United States Patent Application Publication US 2005/0221354 A1 - sequence listing, part 7

SEQ ID NO: 227336 - DNA, 25 bp, probe
gaggatgagcgccagtggcaggaag

SEQ ID NO: 227337 - DNA, 25 bp, probe
gaggaggaccatcgagctaaaggtt

SEQ ID NO: 227338 - DNA, 25 bp, probe
gaggaagatcacagagctaaaggcc

SEQ ID NO: 227339 - DNA, 25 bp, probe
gaggaggattctagagtgaacttcc

SEQ ID NO: 227340 - DNA, 25 bp, probe
gaggagtttccttgctgagatttca

SEQ ID NO: 227341 - DNA, 25 bp, probe
gatggtttaggctgtgagtcctgca

SEQ ID NO: 227342 - DNA, 25 bp, probe
gatggtttaggctgtgagtcctgca

SEQ ID NO: 227343 - DNA, 25 bp, probe
gaggttccattggtggatgtgacca

SEQ ID NO: 227344 - DNA, 25 bp, probe
gaggttccattggtggatgtgacca

SEQ ID NO: 227345 - DNA, 25 bp, probe
gaggattaattggctgacagtttga

SEQ ID NO: 227346 - DNA, 25 bp, probe
gaggatttgattcggaggctttgca

SEQ ID NO: 227347 - DNA, 25 bp, probe
gaggatgcttgattccagtggttct

SEQ ID NO: 227348 - DNA, 25 bp, probe
gaggagtcgtatgcactgtttttct

SEQ ID NO: 227349 - DNA, 25 bp, probe
gaggatgtcatttccatcatattgt

SEQ ID NO: 227350 - DNA, 25 bp, probe
gaggatgccatatttgagatgtcag

SEQ ID NO: 227351 - DNA, 25 bp, probe
gaggatgccatatttgagatgtcag

SEQ ID NO: 227352 - DNA, 25 bp, probe
gaggatccatcatatagttcaacca

SEQ ID NO: 227353 - DNA, 25 bp, probe
gaggatgccataaagaggatcgacc

SEQ ID NO: 227354 - DNA, 25 bp, probe
gaggatgcactcaacacggtgtgaa

SEQ ID NO: 227355 - DNA, 25 bp, probe
gaggatgagctcacagagaggctga

SEQ ID NO: 227356 - DNA, 25 bp, probe
gaggatggactaaatgatctctgaa

SEQ ID NO: 227357 - DNA, 25 bp, probe
gaggatcgacctaacacatctgaaa

SEQ ID NO: 227358 - DNA, 25 bp, probe
gaggaaatcctgagagcatctcgaa

SEQ ID NO: 227359 - DNA, 25 bp, probe
gaggaaatcctgagagcatctcgaa

SEQ ID NO: 227360 - DNA, 25 bp, probe
gaggagaaccctggtgagtcgaatc

SEQ ID NO: 227361 - DNA, 25 bp, probe
gaggaacctcctatggattgcacca

SEQ ID NO: 227362 - DNA, 25 bp, probe
gaggcaacctcagttgatgccttcc

SEQ ID NO: 227363 - DNA, 25 bp, probe
gaggatgaactcttcgagtccatcc

SEQ ID NO: 227364 - DNA, 25 bp, probe
gaggatgacacttctcagtgcctca

SEQ ID NO: 227365 - DNA, 25 bp, probe
gaggatatcacttcatagacttgct

SEQ ID NO: 227366 - DNA, 25 bp, probe
gaggaccacaaccatgatctgatgc

SEQ ID NO: 227367 - DNA, 25 bp, probe
gaggagccataatgtgcatatgtgc

SEQ ID NO: 227368 - DNA, 25 bp, probe
gaggagccataatgtgcatatgtgc

SEQ ID NO: 227369 - DNA, 25 bp, probe
gaggagccataatgtgcatatgtgc

SEQ ID NO: 227370 - DNA, 25 bp, probe
gaggatgccaaatctatctgcagga

SEQ ID NO: 227371 - DNA, 25 bp, probe
gaggatgccaaatctatctgcagga

SEQ ID NO: 227372 - DNA, 25 bp, probe
gaggatccacaactccttggagaaa

SEQ ID NO: 227373 - DNA, 25 bp, probe
gaggacagataactgctttgcaaat

SEQ ID NO: 227374 - DNA, 25 bp, probe
gaggagatgccaaccgttcaacatc

SEQ ID NO: 227375 - DNA, 25 bp, probe
gaggaacgcacagcggaaacatatt

SEQ ID NO: 227376 - DNA, 25 bp, probe
gaggaccacccggcgaaagaagtag

SEQ ID NO: 227377 - DNA, 25 bp, probe
gaggatctcccaaggatgaaagaat

SEQ ID NO: 227378 - DNA, 25 bp, probe
gaggcaaccacgagacagacaacat

SEQ ID NO: 227379 - DNA, 25 bp, probe
gaggcaaccacgagacagacaacat

SEQ ID NO: 227380 - DNA, 25 bp, probe
gaggcaagcacaaactaggaagact

SEQ ID NO: 227381 - DNA, 25 bp, probe
gaggaagcccaggcatcattaaaca

SEQ ID NO: 227382 - DNA, 25 bp, probe
gaggaagaggcggctgttggagaag

SEQ ID NO: 227383 - DNA, 25 bp, probe
gaggaagaggcggctgttggagaag

SEQ ID NO: 227384 - DNA, 25 bp, probe
gaggagtcagctggaagctatggct

SEQ ID NO: 227385 - DNA, 25 bp, probe
gaggatgtactgggacttggcattt

SEQ ID NO: 227386 - DNA, 25 bp, probe
gaggagaagctgaagactgtggagg

SEQ ID NO: 227387 - DNA, 25 bp, probe
gaggagtggcatcaggattatagga

SEQ ID NO: 227388 - DNA, 25 bp, probe
gaggagctgagctgggagcaaaagc

SEQ ID NO: 227389 - DNA, 25 bp, probe
gaggagcaagtccggagctttcagg

SEQ ID NO: 227390 - DNA, 25 bp, probe
gaggagcaaagcaggaggtcttggg

SEQ ID NO: 227391 - DNA, 25 bp, probe
gaggcatgactactaagggtttggg

SEQ ID NO: 227392 - DNA, 25 bp, probe
gaggctaagatgaatgaggggtttg

SEQ ID NO: 227393 - DNA, 25 bp, probe
gaggctaagatgaatgaggggtttg

SEQ ID NO: 227394 - DNA, 25 bp, probe
gaggctaagatgaatgaggggtttg

SEQ ID NO: 227395 - DNA, 25 bp, probe
gatggctaagatgattggcgaagta

SEQ ID NO: 227396 - DNA, 25 bp, probe
gatgtctgcagaagaatgtgtctga

SEQ ID NO: 227397 - DNA, 25 bp, probe
gatgtctgcagaagaatgtgtctga

SEQ ID NO: 227398 - DNA, 25 bp, probe
gatgccctaaactgtataggaggtt

SEQ ID NO: 227399 - DNA, 25 bp, probe
gaggcttccaactgaatatgagagg

SEQ ID NO: 227400 - DNA, 25 bp, probe
gaggcttccaactgaatatgagagg

SEQ ID NO: 227401 - DNA, 25 bp, probe
gaggatgctctacaagaatatgggg

SEQ ID NO: 227402 - DNA, 25 bp, probe
gaggatgctgctacacaggagaagg

SEQ ID NO: 227403 - DNA, 25 bp, probe
gaggatgcatctggggagagcaaag

SEQ ID NO: 227404 - DNA, 25 bp, probe
gaggatgagctgtgtagggagatat

SEQ ID NO: 227405 - DNA, 25 bp, probe
gaggatgcacttagtctggagcgac

SEQ ID NO: 227406 - DNA, 25 bp, probe
gaggctgctttactctggaatagtc

SEQ ID NO: 227407 - DNA, 25 bp, probe
gaggctactatcccgagaaatctcc

SEQ ID NO: 227408 - DNA, 25 bp, probe
gaggaaaaagccctgaacttcctgc

SEQ ID NO: 227409 - DNA, 25 bp, probe
gaggcacaagaagaggacgttcctg

SEQ ID NO: 227410 - DNA, 25 bp, probe
gaggcaaaaaggagttgtgtcgagc

SEQ ID NO: 227411 - DNA, 25 bp, probe
gaggctgaaaaggacgggcgcaaac

SEQ ID NO: 227412 - DNA, 25 bp, probe
gaggccgtatcagacgaggccaaag

SEQ ID NO: 227413 - DNA, 25 bp, probe
gaggccctcttggaggaggcgaaga

SEQ ID NO: 227414 - DNA, 25 bp, probe
gaggccctccagggaggaagtcaga

SEQ ID NO: 227415 - DNA, 25 bp, probe
gatcccccaaatccggaagtcaaag

SEQ ID NO: 227416 - DNA, 25 bp, probe
gatgatccggaacccggcaagtctc

SEQ ID NO: 227417 - DNA, 25 bp, probe
gaggctgatgaaacgccggaagtcc

SEQ ID NO: 227418 - DNA, 25 bp, probe
gatggtgtgaatgaccgagtatggg

SEQ ID NO: 227419 - DNA, 25 bp, probe
gaggatggagcagtgagcgggtctg

SEQ ID NO: 227420 - DNA, 25 bp, probe
gatgggtggatcaggggacgggatg

SEQ ID NO: 227421 - DNA, 25 bp, probe
tggttctcccactatggtaggaccc

SEQ ID NO: 227422 - DNA, 25 bp, probe
gaggagtcagaaagcagtggggaag

SEQ ID NO: 227423 - DNA, 25 bp, probe
gaggagcgccagatggtggaggaat

SEQ ID NO: 227424 - DNA, 25 bp, probe
gaggaactcagatttttgaagactt

SEQ ID NO: 227425 - DNA, 25 bp, probe
gaggacaatcagtatgtggtacaac

SEQ ID NO: 227426 - DNA, 25 bp, probe
gaggacaatcagtatgtggtacaac

SEQ ID NO: 227427 - DNA, 25 bp, probe
gaggatggatcggagtttacaagct

SEQ ID NO: 227428 - DNA, 25 bp, probe
gaggaggacggacgttactctgtgg

SEQ ID NO: 227429 - DNA, 25 bp, probe
gaggaggacggacgttactctgtgg

SEQ ID NO: 227430 - DNA, 25 bp, probe
gaggcacaaaggagttacatcttaa

SEQ ID NO: 227431 - DNA, 25 bp, probe
gaggcacaaaggagttacatcttaa

SEQ ID NO: 227432 - DNA, 25 bp, probe
gaggagtaaatgagtccgacattga

SEQ ID NO: 227433 - DNA, 25 bp, probe
gaggatgtaaaaaagcacccatttt

SEQ ID NO: 227434 - DNA, 25 bp, probe
gatggaaaaacattacctccacctt

SEQ ID NO: 227435 - DNA, 25 bp, probe
gaggaagaagtctaacatctccccc

SEQ ID NO: 227436 - DNA, 25 bp, probe
gaggaaaagtaagcatctctgcaga

SEQ ID NO: 227437 - DNA, 25 bp, probe
gaggaagtgagaaaccgctctgcct

SEQ ID NO: 227438 - DNA, 25 bp, probe
gaggaaggagacaatccgtggtgta

SEQ ID NO: 227439 - DNA, 25 bp, probe
gaggacagcgagtatactgccaggg

SEQ ID NO: 227440 - DNA, 25 bp, probe
gaggacggcagagggtacaggtggt

SEQ ID NO: 227441 - DNA, 25 bp, probe
gaggccggagaccgtatcatattcg

SEQ ID NO: 227442 - DNA, 25 bp, probe
gaggccaaacagcagctagaatacg

SEQ ID NO: 227443 - DNA, 25 bp, probe
gaggccagtacgacgtggccatcaa

SEQ ID NO: 227444 - DNA, 25 bp, probe
gaggctctgtgagcctgatgcctcc

SEQ ID NO: 227445 - DNA, 25 bp, probe
gaggcagtggagaaccaagccccat

SEQ ID NO: 227446 - DNA, 25 bp, probe
gaggaggggtgagagacctgctcag

SEQ ID NO: 227447 - DNA, 25 bp, probe
gatggtgcggggaggaccggcacct

SEQ ID NO: 227448 - DNA, 25 bp, probe
gaggaaggggctaggactgggcccg

SEQ ID NO: 227449 - DNA, 25 bp, probe
gaggaaggtggctggttggtcctcc

SEQ ID NO: 227450 - DNA, 25 bp, probe
gaggagtggaggagacttggtgtcc

SEQ ID NO: 227451 - DNA, 25 bp, probe
gatgggtgagggggtttagtccctg

SEQ ID NO: 227452 - DNA, 25 bp, probe
gaggagaagggacgcttttcttcct

SEQ ID NO: 227453 - DNA, 25 bp, probe
gatggaagtgaggggattttatttt

SEQ ID NO: 227454 - DNA, 25 bp, probe
gaggaggtgacaaggcagtctcttg

SEQ ID NO: 227455 - DNA, 25 bp, probe
gaggagggccaggagagagcttcac

SEQ ID NO: 227456 - DNA, 25 bp, probe
gaggagggcacagagacgcagagca

SEQ ID NO: 227457 - DNA, 25 bp, probe
gaggatggtgaggcgaaggccaggt

SEQ ID NO: 227458 - DNA, 25 bp, probe
gaggaggtgagaggagaggaaggag

SEQ ID NO: 227459 - DNA, 25 bp, probe
gaggagggaggcgtgggatgggaat

SEQ ID NO: 227460 - DNA, 25 bp, probe
gaggaggaaggccttgatgaagggc

SEQ ID NO: 227461 - DNA, 25 bp, probe
gatggagaaggacccagagaaaaga

SEQ ID NO: 227462 - DNA, 25 bp, probe
gaggagaaggaggcctggtaccgcg

SEQ ID NO: 227463 - DNA, 25 bp, probe
gaggaggaggacactggtcactcac

SEQ ID NO: 227464 - DNA, 25 bp, probe
gaggaccacgatgtcggtgcagaac

SEQ ID NO: 227465 - DNA, 25 bp, probe
gaggaccacgatgtcggtgcagaac

SEQ ID NO: 227466 - DNA, 25 bp, probe
gaggaccttgatgatgctttcaaag

SEQ ID NO: 227467 - DNA, 25 bp, probe
gaggagtttgtcaatatttactatg

SEQ ID NO: 227468 - DNA, 25 bp, probe
gaggagtttgtcaatatttactatg

SEQ ID NO: 227469 - DNA, 25 bp, probe
gaggaaattaactatctgtacttat

SEQ ID NO: 227470 - DNA, 25 bp, probe
gaggcagaatacaacattttgcagt

SEQ ID NO: 227471 - DNA, 25 bp, probe
gaggcagaatacaacattttgcagt

SEQ ID NO: 227472 - DNA, 25 bp, probe
gaggaaaaaacaactccatgtattt

SEQ ID NO: 227473 - DNA, 25 bp, probe
gaggcgagaaactagacaaagtttt

SEQ ID NO: 227474 - DNA, 25 bp, probe
gaggaacaaacatatgcacacagtc

SEQ ID NO: 227475 - DNA, 25 bp, probe
gaggagatagaatttaggccagtca

SEQ ID NO: 227476 - DNA, 25 bp, probe
gaggagtgagtattatctgatccat

SEQ ID NO: 227477 - DNA, 25 bp, probe
gaggaggaggtcttcgacagcatcg

SEQ ID NO: 227478 - DNA, 25 bp, probe
gaggaggaggtcttcgacagcatcg

SEQ ID NO: 227479 - DNA, 25 bp, probe
gaggcggaggttacagtgagccgag

SEQ ID NO: 227480 - DNA, 25 bp, probe
gaggcccagagattacagatcccct

SEQ ID NO: 227481 - DNA, 25 bp, probe
gaggagcctggactaggactcccat

SEQ ID NO: 227482 - DNA, 25 bp, probe
gaggacctaattatgcctgtctgca

SEQ ID NO: 227483 - DNA, 25 bp, probe
gaggatggtattcaggctttctcat

SEQ ID NO: 227484 - DNA, 25 bp, probe
gaggatggtattcaggctttctcat

SEQ ID NO: 227485 - DNA, 25 bp, probe
gaggatggtaatcacagcattgctc

SEQ ID NO: 227486 - DNA, 25 bp, probe
gaggatggtcagaataacaacttgt

SEQ ID NO: 227487 - DNA, 25 bp, probe
gaggctttcgacgaaacatctctgc

SEQ ID NO: 227488 - DNA, 25 bp, probe
gaggctgcagctagaaaaactctta

SEQ ID NO: 227489 - DNA, 25 bp, probe
gaggccacctaccagatgactgtgg

SEQ ID NO: 227490 - DNA, 25 bp, probe
gaggccctcaactatgagaccgtgg

SEQ ID NO: 227491 - DNA, 25 bp, probe
gaggacccaatctataggagcagtg

SEQ ID NO: 227492 - DNA, 25 bp, probe
gaggacctcttcgacatcgaggatg

SEQ ID NO: 227493 - DNA, 25 bp, probe
gaggacctctttggggcaagatcca

SEQ ID NO: 227494 - DNA, 25 bp, probe
gaggctccttataaggacatttcca

SEQ ID NO: 227495 - DNA, 25 bp, probe
gaggactgtgattgtgggacatctg

SEQ ID NO: 227496 - DNA, 25 bp, probe
gaggacgatagaggtggttctgtaa

SEQ ID NO: 227497 - DNA, 25 bp, probe
gaggacgatagaggtggttctgtaa

SEQ ID NO: 227498 - DNA, 25 bp, probe
gaggacgagcgattgaggtgtatgg

SEQ ID NO: 227499 - DNA, 25 bp, probe
gaggaggaggaggaggaaatggttt

SEQ ID NO: 227500 - DNA, 25 bp, probe
gaggaggaggaggaggaaatggttt

SEQ ID NO: 227501 - DNA, 25 bp, probe
gaggagcagtggtcgggaaatgaaa

SEQ ID NO: 227502 - DNA, 25 bp, probe
gaggagcagtggtcgggaaatgaaa

SEQ ID NO: 227503 - DNA, 25 bp, probe
gaggaggtgttcgctgaagagagaa

SEQ ID NO: 227504 - DNA, 25 bp, probe
gatgggggttcacctgaacacagag

SEQ ID NO: 227505 - DNA, 25 bp, probe
gatgggaaattacctgaaacagctt

SEQ ID NO: 227506 - DNA, 25 bp, probe
gatgggaaattacctgaaacagctt

SEQ ID NO: 227507 - DNA, 25 bp, probe
gatggccaaaggtgctaaagagatt

SEQ ID NO: 227508 - DNA, 25 bp, probe
gaggccagtaagctcagaaagatga

SEQ ID NO: 227509 - DNA, 25 bp, probe
gaggccctaaataagaaagctatcc

SEQ ID NO: 227510 - DNA, 25 bp, probe
gaggcgctggaagaaaaacttcatt

SEQ ID NO: 227511 - DNA, 25 bp, probe
gaggcagcccaagaaaacgcgtctg

SEQ ID NO: 227512 - DNA, 25 bp, probe
gaggccccggagaaactgaggtatg

SEQ ID NO: 227513 - DNA, 25 bp, probe
gaggccacgggaaagagctggggca

SEQ ID NO: 227514 - DNA, 25 bp, probe
gaggaaagccgacaagctgcaggcc

SEQ ID NO: 227515 - DNA, 25 bp, probe
gaggagatgaccagggatgctgggc

SEQ ID NO: 227516 - DNA, 25 bp, probe
gaggaagcagcctgcagggggacct

SEQ ID NO: 227517 - DNA, 25 bp, probe
gaggcaaagacacagcagaggggac

SEQ ID NO: 227518 - DNA, 25 bp, probe
gaggccagatgtcccggaggggact

SEQ ID NO: 227519 - DNA, 25 bp, probe
gaggcacgaaacagggagggattgg

SEQ ID NO: 227520 - DNA, 25 bp, probe
gaggaccaagaccaggcagaggaga

SEQ ID NO: 227521 - DNA, 25 bp, probe
gaggagccgagagcgagctgagagt

SEQ ID NO: 227522 - DNA, 25 bp, probe
gaggagttcagagtctagctgggaa

SEQ ID NO: 227523 - DNA, 25 bp, probe
gaggagattggagtctgaatggatc

SEQ ID NO: 227524 - DNA, 25 bp, probe
gaggagtctttgacagttgagatct

SEQ ID NO: 227525 - DNA, 25 bp, probe
gatgatgacctttctagtaaggcca

SEQ ID NO: 227526 - DNA, 25 bp, probe
gaggactttactaaaagtcacaggt

SEQ ID NO: 227527 - DNA, 25 bp, probe
gaggacattcaacaagaaatcacag

SEQ ID NO: 227528 - DNA, 25 bp, probe
gaggagcagctcaccaagaatatgc

SEQ ID NO: 227529 - DNA, 25 bp, probe
gaggacagctctacaccagagagtg

SEQ ID NO: 227530 - DNA, 25 bp, probe
gaggaagtctatgccaaaatccttt

SEQ ID NO: 227531 - DNA, 25 bp, probe
gaggacagtgttgccaaaacttgtt

SEQ ID NO: 227532 - DNA, 25 bp, probe
gaggactggcttgacaggggctatg

SEQ ID NO: 227533 - DNA, 25 bp, probe
gaggagtgacgggcaaggggccagg

SEQ ID NO: 227534 - DNA, 25 bp, probe
gatgtcgtacggggagaggccctat

SEQ ID NO: 227535 - DNA, 25 bp, probe
gatttggggctcagaaggccctgct

SEQ ID NO: 227536 - DNA, 25 bp, probe
gatttgtggcagtgtgtaaccctct

SEQ ID NO: 227537 - DNA, 25 bp, probe
gatttgtggcagtgtgtaaccctct

SEQ ID NO: 227538 - DNA, 25 bp, probe
gaggctgtagccaggaaaccctctt

SEQ ID NO: 227539 - DNA, 25 bp, probe
gaggctgtagccaggaaaccctctt

SEQ ID NO: 227540 - DNA, 25 bp, probe
gaggctgccaagaggaacgacttct

SEQ ID NO: 227541 - DNA, 25 bp, probe
gaggctgccaagaggaacgacttct

SEQ ID NO: 227542 - DNA, 25 bp, probe
gaggcaggacagatggacaggttcc

SEQ ID NO: 227543 - DNA, 25 bp, probe
gaggcagagggcagctactgcaggt

SEQ ID NO: 227544 - DNA, 25 bp, probe
gaggcagagggcagctactgcaggt

SEQ ID NO: 227545 - DNA, 25 bp, probe
gaggagatgctgactagttacaggc

SEQ ID NO: 227546 - DNA, 25 bp, probe
gaggagcctggcaagttcacaagca

SEQ ID NO: 227547 - DNA, 25 bp, probe
gaggacactggtggttctactgacc

SEQ ID NO: 227548 - DNA, 25 bp, probe
gaggacatctgggtctcatttgctt

SEQ ID NO: 227549 - DNA, 25 bp, probe
gaggagtcggtgtgatgtcatgcct

SEQ ID NO: 227550 - DNA, 25 bp, probe
gaggcagtgggatggaggagcgcct

SEQ ID NO: 227551 - DNA, 25 bp, probe
gaggagtgaggaatagttgagcccc

SEQ ID NO: 227552 - DNA, 25 bp, probe
gaggagctcagggctggattggcag

SEQ ID NO: 227553 - DNA, 25 bp, probe
gaggagctcagggctggattggcag

SEQ ID NO: 227554 - DNA, 25 bp, probe
gaggagtcagacgatgagaccagcc

SEQ ID NO: 227555 - DNA, 25 bp, probe
gaggagtcagacgatgagaccagcc

SEQ ID NO: 227556 - DNA, 25 bp, probe
gaggcttgcagcatggacaccaact

SEQ ID NO: 227557 - DNA, 25 bp, probe
gaggaattcttaaaccagtctttcg

SEQ ID NO: 227558 - DNA, 25 bp, probe
gaggaattcttaaaccagtctttcg

SEQ ID NO: 227559 - DNA, 25 bp, probe
gaggaatgttattgaagccgtttac

SEQ ID NO: 227560 - DNA, 25 bp, probe
gaggagtttttttgccgctgattgt

SEQ ID NO: 227561 - DNA, 25 bp, probe
gaggagtatttttgtgcctcagact

SEQ ID NO: 227562 - DNA, 25 bp, probe
gaggcagttcacacaatccatcaac

SEQ ID NO: 227563 - DNA, 25 bp, probe
gaggcagttcacacaatccatcaac

SEQ ID NO: 227564 - DNA, 25 bp, probe
gaggagatatctcagaaccaaaaaa

SEQ ID NO: 227565 - DNA, 25 bp, probe
gaggaatgcattcagaagtcttcaa

SEQ ID NO: 227566 - DNA, 25 bp, probe
gaggagatcttgcaacatggccatg

SEQ ID NO: 227567 - DNA, 25 bp, probe
gaggcagacaagcccaatggcatga

SEQ ID NO: 227568 - DNA, 25 bp, probe
gaggagacatatacagaagatgcag

SEQ ID NO: 227569 - DNA, 25 bp, probe
gaggacaatatccatgactgctcaa

SEQ ID NO: 227570 - DNA, 25 bp, probe
gaggcttcatatgagacccagaaag

SEQ ID NO: 227571 - DNA, 25 bp, probe
gatgtatcttcagtgaccccagaaa

SEQ ID NO: 227572 - DNA, 25 bp, probe
gatgtatcttcagtgaccccagaaa

SEQ ID NO: 227573 - DNA, 25 bp, probe
gatgtccctgcactgatacagaagc

SEQ ID NO: 227574 - DNA, 25 bp, probe
gaggcaattgcactgtgtagccgtc

SEQ ID NO: 227575 - DNA, 25 bp, probe
gaggactgatcacggcatagacatt

SEQ ID NO: 227576 - DNA, 25 bp, probe
gaggactgatcacggcatagacatt

SEQ ID NO: 227577 - DNA, 25 bp, probe
gaggacttcaagacgcagaatgact

SEQ ID NO: 227578 - DNA, 25 bp, probe
gaggacttcaagacgcagaatgact

SEQ ID NO: 227579 - DNA, 25 bp, probe
gaggactattcaagcgatgagcaac

SEQ ID NO: 227580 - DNA, 25 bp, probe
gaggagctcttcaagctgctgaagg

SEQ ID NO: 227581 - DNA, 25 bp, probe
gaggagctctacaacatcatgatgc

SEQ ID NO: 227582 - DNA, 25 bp, probe
gatggagtctactccaggtatttta

SEQ ID NO: 227583 - DNA, 25 bp, probe
gtgagtaaaattccaggtactttca

SEQ ID NO: 227584 - DNA, 25 bp, probe
gatgggaaagttgcgttacctgtca

SEQ ID NO: 227585 - DNA, 25 bp, probe
gatgggaaagttgcgttacctgtca

SEQ ID NO: 227586 - DNA, 25 bp, probe
gatgtggcaaagaggtttgcccatt

SEQ ID NO: 227587 - DNA, 25 bp, probe
gaggcggaagaaagctcgggccctg

SEQ ID NO: 227588 - DNA, 25 bp, probe
gggccggagttagagaggcctctgc

SEQ ID NO: 227589 - DNA, 25 bp, probe
gaggacttggtttcaagggccttgc

SEQ ID NO: 227590 - DNA, 25 bp, probe
gaggactctggcttccggagagtct

SEQ ID NO: 227591 - DNA, 25 bp, probe
gaggactctggcttccggagagtct

SEQ ID NO: 227592 - DNA, 25 bp, probe
gaggacctggcttttggcaatttgt

SEQ ID NO: 227593 - DNA, 25 bp, probe
gaggacctggcttttggcaatttgt

SEQ ID NO: 227594 - DNA, 25 bp, probe
gaggacccaatattggcctgtttgc

SEQ ID NO: 227595 - DNA, 25 bp, probe
gaggacccaatattggcctgtttgc

SEQ ID NO: 227596 - DNA, 25 bp, probe
gaggacagccttatgagggtttgct

SEQ ID NO: 227597 - DNA, 25 bp, probe
gaggaatgcctttcagggtgtggtc

SEQ ID NO: 227598 - DNA, 25 bp, probe
gaggcagatgatagacactggggta

SEQ ID NO: 227599 - DNA, 25 bp, probe
gaggagcagattcacaagctggata

SEQ ID NO: 227600 - DNA, 25 bp, probe
gaggcttgtcagccaaagctggaat

SEQ ID NO: 227601 - DNA, 25 bp, probe
gaggcagaggcagggatagctgggt

SEQ ID NO: 227602 - DNA, 25 bp, probe
gaggcagaggcagggatagctgggt

SEQ ID NO: 227603 - DNA, 25 bp, probe
gaggagcagctggggtaggctgtct

SEQ ID NO: 227604 - DNA, 25 bp, probe
gaggagagcagcccatgtaacttac

SEQ ID NO: 227605 - DNA, 25 bp, probe
gaggcagagcctccacaaagcctca

SEQ ID NO: 227606 - DNA, 25 bp, probe
gaggcagagcctccacaaagcctca

SEQ ID NO: 227607 - DNA, 25 bp, probe
gaggcagaactgggcaataccccta

SEQ ID NO: 227608 - DNA, 25 bp, probe
gaggagcagacagaacaaaggcctt

SEQ ID NO: 227609 - DNA, 25 bp, probe
gaggaagagcaggacgactgggcct

SEQ ID NO: 227610 - DNA, 25 bp, probe
gaggaagagaggtcgactgtggggt

SEQ ID NO: 227611 - DNA, 25 bp, probe
gaggaaaatggcagacctgggctgg

SEQ ID NO: 227612 - DNA, 25 bp, probe
gaggacaagatgcaatacctgcagg

SEQ ID NO: 227613 - DNA, 25 bp, probe
gaggacagggagtttccagcaacat

SEQ ID NO: 227614 - DNA, 25 bp, probe
gaggaacctgagtgcctcagtcatc

SEQ ID NO: 227615 - DNA, 25 bp, probe
gaggaacctgagtgcctcagtcatc

SEQ ID NO: 227616 - DNA, 25 bp, probe
gaggaatttacactgtcctgtgctg

SEQ ID NO: 227617 - DNA, 25 bp, probe
gaggagcatgtggagcgattccggt

SEQ ID NO: 227618 - DNA, 25 bp, probe
gaggcatgattggatggagcttcta

SEQ ID NO: 227619 - DNA, 25 bp, probe
gaggcatgattggatggagcttcta

SEQ ID NO: 227620 - DNA, 25 bp, probe
gaggctgttggcatcagccagtcca

SEQ ID NO: 227621 - DNA, 25 bp, probe
gatggttctgggcagtcagttcaaa

SEQ ID NO: 227622 - DNA, 25 bp, probe
gaggcttccaagcattactttaacc

SEQ ID NO: 227623 - DNA, 25 bp, probe
gaggcgagccacatgttactcgtcg

SEQ ID NO: 227624 - DNA, 25 bp, probe
gatgccgagctacaggtaccggcga

SEQ ID NO: 227625 - DNA, 25 bp, probe
gaggcataggagaagggtcgggcca

SEQ ID NO: 227626 - DNA, 25 bp, probe
gggcagggaagtcttcttgcagccg

SEQ ID NO: 227627 - DNA, 25 bp, probe
ggcaggggaattgcttgaacccggg

SEQ ID NO: 227628 - DNA, 25 bp, probe
gaggcaggagaatttctggaaccca

SEQ ID NO: 227629 - DNA, 25 bp, probe
gaggcactaagtctcaggggccagc

SEQ ID NO: 227630 - DNA, 25 bp, probe
gaggcgtaggtcctccaaagacacg

SEQ ID NO: 227631 - DNA, 25 bp, probe
gaggcagttggtgtctacaggtctc

SEQ ID NO: 227632 - DNA, 25 bp, probe
gaggcatttggagagcaagggttca

SEQ ID NO: 227633 - DNA, 25 bp, probe
gaggcaaaagaggaatagcagtttc

SEQ ID NO: 227634 - DNA, 25 bp, probe
gaggaacaaggacattcaaagtgcc

SEQ ID NO: 227635 - DNA, 25 bp, probe
gaggaaccggaggtctgcgaggacc

SEQ ID NO: 227636 - DNA, 25 bp, probe
gaggaacgggagatatgagggctca

SEQ ID NO: 227637 - DNA, 25 bp, probe
gaggaagtaggacttgtagtagagc

SEQ ID NO: 227638 - DNA, 25 bp, probe
gaggacagggtacctgctgtgtatg

SEQ ID NO: 227639 - DNA, 25 bp, probe
gaggaatggggaaagcctggataag

SEQ ID NO: 227640 - DNA, 25 bp, probe
gaggcgtgagggcaaatctggctca

SEQ ID NO: 227641 - DNA, 25 bp, probe
gaggcagtaggacaaggtgcaggca

SEQ ID NO: 227642 - DNA, 25 bp, probe
gaggcaccaggagaagctggaggag

SEQ ID NO: 227643 - DNA, 25 bp, probe
gaggctgccgggcagagtggagcag

SEQ ID NO: 227644 - DNA, 25 bp, probe
gaggctcccgtggagaggaggccgt

SEQ ID NO: 227645 - DNA, 25 bp, probe
gaggctcatctcaggaagctgggcc

SEQ ID NO: 227646 - DNA, 25 bp, probe
gaggaattctaggacagtgggagct

SEQ ID NO: 227647 - DNA, 25 bp, probe
gaggaatttcttcgagctatgggcc

SEQ ID NO: 227648 - DNA, 25 bp, probe
gaggaatttctggaggcagtgctgt

SEQ ID NO: 227649 - DNA, 25 bp, probe
gaggaagattatggagatggagctg

SEQ ID NO: 227650 - DNA, 25 bp, probe
gaggaagcactaggatgttcaggca

SEQ ID NO: 227651 - DNA, 25 bp, probe
gaggaacaaggaggtgcatcaggca

SEQ ID NO: 227652 - DNA, 25 bp, probe
gaggaacaaggaggtgcatcaggca

SEQ ID NO: 227653 - DNA, 25 bp, probe
gaggaatgtagggcctgcatggaga

SEQ ID NO: 227654 - DNA, 25 bp, probe
gaggagctgtaccaactcatgaggc

SEQ ID NO: 227655 - DNA, 25 bp, probe
gaggagctgctaaagcggcgtgagc

SEQ ID NO: 227656 - DNA, 25 bp, probe
gaggagctgctaaagcggcgtgagc

SEQ ID NO: 227657 - DNA, 25 bp, probe
gaggaagtcagagtgcagggccagc

SEQ ID NO: 227658 - DNA, 25 bp, probe
gaggaagtagctggacaggccctgc

SEQ ID NO: 227659 - DNA, 25 bp, probe
gaggaagtagctggacaggccctgc

SEQ ID NO: 227660 - DNA, 25 bp, probe
gaggaagaaggcgtcttccacttcc

SEQ ID NO: 227661 - DNA, 25 bp, probe
gaggaagaaagcccttgtcacctgc

SEQ ID NO: 227662 - DNA, 25 bp, probe
gaggaagaagaccatcttggcaccc

SEQ ID NO: 227663 - DNA, 25 bp, probe
gaggaaggggagcattggcatccct

SEQ ID NO: 227664 - DNA, 25 bp, probe
gaggaagggaagtactccctggtga

SEQ ID NO: 227665 - DNA, 25 bp, probe
gatgggatgggtctgaccccttgtg

SEQ ID NO: 227666 - DNA, 25 bp, probe
gatgggttggggcagttacctggtt

SEQ ID NO: 227667 - DNA, 25 bp, probe
gatgggttggggcagttacctggtt

SEQ ID NO: 227668 - DNA, 25 bp, probe
gatgggtgggggaaaacaatcaggt

SEQ ID NO: 227669 - DNA, 25 bp, probe
gatggggtggggggagaactcctag

SEQ ID NO: 227670 - DNA, 25 bp, probe
gatggggctgggaagtccaacccca

SEQ ID NO: 227671 - DNA, 25 bp, probe
gaggctggagggagacacaggcccc

SEQ ID NO: 227672 - DNA, 25 bp, probe
gaggccatcggcattgacaaggacc

SEQ ID NO: 227673 - DNA, 25 bp, probe
gaggctacagacatgtcacaaagca

SEQ ID NO: 227674 - DNA, 25 bp, probe
gaggacaagacatttcaaagaaagt

SEQ ID NO: 227675 - DNA, 25 bp, probe
gaggacgagatatttaaggaggcaa

SEQ ID NO: 227676 - DNA, 25 bp, probe
gaggactctgacattgatggcgagg

SEQ ID NO: 227677 - DNA, 25 bp, probe
gaggactcaagcaatggagagcggc

SEQ ID NO: 227678 - DNA, 25 bp, probe
gaggaccgagctggaggagctgggt

SEQ ID NO: 227679 - DNA, 25 bp, probe
gaggccctgagccgagggtgggccc

SEQ ID NO: 227680 - DNA, 25 bp, probe
gaggccgtggctatggttggaggtc

SEQ ID NO: 227681 - DNA, 25 bp, probe
gaggccttggccttggatttgatgg

SEQ ID NO: 227682 - DNA, 25 bp, probe
gaggctattgggttttactagatta

SEQ ID NO: 227683 - DNA, 25 bp, probe
gaggcttttgtactttagtaaatgc

SEQ ID NO: 227684 - DNA, 25 bp, probe
ggccttattgttctttgtcggaaca

SEQ ID NO: 227685 - DNA, 25 bp, probe
gtccctagtaatcattcgttggaaa

SEQ ID NO: 227686 - DNA, 25 bp, probe
gttcctagtactgcaattcgggaaa

SEQ ID NO: 227687 - DNA, 25 bp, probe
gttccggtcctataaggggacatca

SEQ ID NO: 227688 - DNA, 25 bp, probe
gattgcctgtggtgaaaagggttct

SEQ ID NO: 227689 - DNA, 25 bp, probe
gaggccttgtgctgcaaaattgctg

SEQ ID NO: 227690 - DNA, 25 bp, probe
gaggctcttgtacgaatgctacttg

SEQ ID NO: 227691 - DNA, 25 bp, probe
gaggcttctgtacagtcaggtctgc

SEQ ID NO: 227692 - DNA, 25 bp, probe
gaggcttggagacagtctgacccag

SEQ ID NO: 227693 - DNA, 25 bp, probe
gatggaatggatctaacttcccagg

SEQ ID NO: 227694 - DNA, 25 bp, probe
gaggaagatttgtctacttgctcca

SEQ ID NO: 227695 - DNA, 25 bp, probe
gatgggggttaccagcttgatccac

SEQ ID NO: 227696 - DNA, 25 bp, probe
gatggccgtgtttcggaatgtcctc

SEQ ID NO: 227697 - DNA, 25 bp, probe
gatggcgtttttgcgagaactgctg

SEQ ID NO: 227698 - DNA, 25 bp, probe
gatggcgtttgtgaatggaaatttt

SEQ ID NO: 227699 - DNA, 25 bp, probe
gaggcagactttcaataaggagatc

SEQ ID NO: 227700 - DNA, 25 bp, probe
gaggaagctttgccattagatctag

SEQ ID NO: 227701 - DNA, 25 bp, probe
gaggaagagtggagtcagatctcag

SEQ ID NO: 227702 - DNA, 25 bp, probe
gaggccaaggtgggatagatcgctt

SEQ ID NO: 227703 - DNA, 25 bp, probe
gaggcctcaggaaagtcattccttt

SEQ ID NO: 227704 - DNA, 25 bp, probe
gaggctctaggaaggttctgggttg

SEQ ID NO: 227705 - DNA, 25 bp, probe
gaggctctaggaaggttctgggttg

SEQ ID NO: 227706 - DNA, 25 bp, probe
gaggctttgtgctggcctttgagtt

SEQ ID NO: 227707 - DNA, 25 bp, probe
gaggcaatctgtttgagactttagt

SEQ ID NO: 227708 - DNA, 25 bp, probe
gaggccatgtgtctcagagctgtta

SEQ ID NO: 227709 - DNA, 25 bp, probe
gaggccatgtgtctcagagctgtta

SEQ ID NO: 227710 - DNA, 25 bp, probe
gatggcctgttgctgggccttagat

SEQ ID NO: 227711 - DNA, 25 bp, probe
gatggccgtttctgacttgtagaga

SEQ ID NO: 227712 - DNA, 25 bp, probe
gaggcaggattttggacattgtgaa

SEQ ID NO: 227713 - DNA, 25 bp, probe
gaggcaggcgtcttagacaagctga

SEQ ID NO: 227714 - DNA, 25 bp, probe
gaggctggagcccttgaaaggtgaa

SEQ ID NO: 227715 - DNA, 25 bp, probe
gaggctgccaccaaagaaatttaat

SEQ ID NO: 227716 - DNA, 25 bp, probe
gaggctgccaccaaagaaatttaat

SEQ ID NO: 227717 - DNA, 25 bp, probe
gatgggacccaagaactttattcat

SEQ ID NO: 227718 - DNA, 25 bp, probe
gatgggacccaagaactttattcat

SEQ ID NO: 227719 - DNA, 25 bp, probe
gatgggccagaatctcaaccgtatt

SEQ ID NO: 227720 - DNA, 25 bp, probe
gatgggccaaatctataccaagctc

SEQ ID NO: 227721 - DNA, 25 bp, probe
gatgggacaagggtgtacagccccc

SEQ ID NO: 227722 - DNA, 25 bp, probe
gatgggacaagggtgtacagccccc

SEQ ID NO: 227723 - DNA, 25 bp, probe
gatggagctcacggcttaaagccca

SEQ ID NO: 227724 - DNA, 25 bp, probe
gaggcagccagggcttacctgtaca

SEQ ID NO: 227725 - DNA, 25 bp, probe
gaggcagcaagtggcctaccagaaa

SEQ ID NO: 227726 - DNA, 25 bp, probe
gaggacagactgactataccagaaa

SEQ ID NO: 227727 - DNA, 25 bp, probe
gaggacatggctgtggtccagagac

SEQ ID NO: 227728 - DNA, 25 bp, probe
gaggaaggctatcgtctgccaagcc

SEQ ID NO: 227729 - DNA, 25 bp, probe
gaggaattgattgtcagccacctcc

SEQ ID NO: 227730 - DNA, 25 bp, probe
gaggaaatgttcctgagtcacgctg

SEQ ID NO: 227731 - DNA, 25 bp, probe
gaggaactgtctctagtagccagtg

SEQ ID NO: 227732 - DNA, 25 bp, probe
gaggaaatgttggtcatggggcaaa

SEQ ID NO: 227733 - DNA, 25 bp, probe
gaggaaacttggacatttatgtaca

SEQ ID NO: 227734 - DNA, 25 bp, probe
gaggaaacttggacatttatgtaca

SEQ ID NO: 227735 - DNA, 25 bp, probe
gaggaaagtgattgatctgtttgta

SEQ ID NO: 227736 - DNA, 25 bp, probe
gaggaacaatggcatctctgtcttg

SEQ ID NO: 227737 - DNA, 25 bp, probe
gaggaaaattcgagatgatcttgag

SEQ ID NO: 227738 - DNA, 25 bp, probe
gaggaaaaaggtcttctccacctgc

SEQ ID NO: 227739 - DNA, 25 bp, probe
gaggaaaacgcttctttctcctcca

SEQ ID NO: 227740 - DNA, 25 bp, probe
gaggaaaacgcttctttctcctcca

SEQ ID NO: 227741 - DNA, 25 bp, probe
gaggaaaacgcttctttctcctcca

SEQ ID NO: 227742 - DNA, 25 bp, probe
gatggcaaacctaatcttatcttcc

SEQ ID NO: 227743 - DNA, 25 bp, probe
gatggcaaacctaatcttatcttcc

SEQ ID NO: 227744 - DNA, 25 bp, probe
gatggaagagtggtacagttttctt

SEQ ID NO: 227745 - DNA, 25 bp, probe
gaggaaagccagttcaccaaatctt

SEQ ID NO: 227746 - DNA, 25 bp, probe
gatgaaacctgatgtcaccaacctt

SEQ ID NO: 227747 - DNA, 25 bp, probe
gatggattcctgagcgaataagcct

SEQ ID NO: 227748 - DNA, 25 bp, probe
gatggattcctgagcgaataagcct

SEQ ID NO: 227749 - DNA, 25 bp, probe
gatgtctatccacaggaaaagacca

SEQ ID NO: 227750 - DNA, 25 bp, probe
gatgtctatccacaggaaaagacca

SEQ ID NO: 227751 - DNA, 25 bp, probe
gaggcgtgcgagtggactaacaaca

SEQ ID NO: 227752 - DNA, 25 bp, probe
gaggcagctaaggggcaggaatcaa

SEQ ID NO: 227753 - DNA, 25 bp, probe
gaggcagccttcagtgaggagctca

SEQ ID NO: 227754 - DNA, 25 bp, probe
gaggacatctctagagggaagctca

SEQ ID NO: 227755 - DNA, 25 bp, probe
gaggacatccttggggagattgctg

SEQ ID NO: 227756 - DNA, 25 bp, probe
gaggacatcctcgaattaatgagat

SEQ ID NO: 227757 - DNA, 25 bp, probe
gaggacatcctcgaattaatgagat

SEQ ID NO: 227758 - DNA, 25 bp, probe
gaggacaccatttttccagagctgc

SEQ ID NO: 227759 - DNA, 25 bp, probe
gaggccagcacattatcttcatatg

SEQ ID NO: 227760 - DNA, 25 bp, probe
gaggcctcaattattaaggaaaagc

SEQ ID NO: 227761 - DNA, 25 bp, probe
gaggcgccaacgcttggaggaagat

SEQ ID NO: 227762 - DNA, 25 bp, probe
gaggcgggagtggagtggaagaaga

SEQ ID NO: 227763 - DNA, 25 bp, probe
gaggcgagtggttggtgggcaaaca

SEQ ID NO: 227764 - DNA, 25 bp, probe
gatggtggggatttacggcaaaatt

SEQ ID NO: 227765 - DNA, 25 bp, probe
gaggctgggagtgaccggaaacatc

SEQ ID NO: 227766 - DNA, 25 bp, probe
gaggcgggaggatcgcttgatattt

SEQ ID NO: 227767 - DNA, 25 bp, probe
gaggcgggtggatcacttgaggtca

SEQ ID NO: 227768 - DNA, 25 bp, probe
gaggcgggctggtgttctaagagcc

SEQ ID NO: 227769 - DNA, 25 bp, probe
gaggctgggtggagtggtgtctagc

SEQ ID NO: 227770 - DNA, 25 bp, probe
gaggctgggtcagtttgggtgttca

SEQ ID NO: 227771 - DNA, 25 bp, probe
gaggcagggatcggtctgagcctgg

SEQ ID NO: 227772 - DNA, 25 bp, probe
gaggcacagagtttgctgcgagctc

SEQ ID NO: 227773 - DNA, 25 bp, probe
gaggcagcgtgaaagcagatgagct

SEQ ID NO: 227774 - DNA, 25 bp, probe
gaggaatggcagtaggcatgcagct

SEQ ID NO: 227775 - DNA, 25 bp, probe
gaggaaggcaaactgcatatgatga

SEQ ID NO: 227776 - DNA, 25 bp, probe
gaggctagtccaagtgcagtgatgt

SEQ ID NO: 227777 - DNA, 25 bp, probe
gaggctgaggctgcagtgagttgtg

SEQ ID NO: 227778 - DNA, 25 bp, probe
gaggctgttgctcagcatgcagggg

SEQ ID NO: 227779 - DNA, 25 bp, probe
gaggctgcttcggagaagttggaat

SEQ ID NO: 227780 - DNA, 25 bp, probe
gaggctgcttcggagaagttggaat

SEQ ID NO: 227781 - DNA, 25 bp, probe
gaggctttggggtagctattcaatt

SEQ ID NO: 227782 - DNA, 25 bp, probe
gaggcttgctggacctaaaatcaat

SEQ ID NO: 227783 - DNA, 25 bp, probe
gatggcttgtgtctattcaaaagta

SEQ ID NO: 227784 - DNA, 25 bp, probe
gaggcttgtggatttctatgttatg

SEQ ID NO: 227785 - DNA, 25 bp, probe
gatggggggatttctggttatgtca

SEQ ID NO: 227786 - DNA, 25 bp, probe
gatgggcgtggagacggttgtgtga

SEQ ID NO: 227787 - DNA, 25 bp, probe
gatggtgccttcgtgaaggcttttg

SEQ ID NO: 227788 - DNA, 25 bp, probe
gaggcttcttctatagactcttcag

SEQ ID NO: 227789 - DNA, 25 bp, probe
gaggcttcttctatagactcttcag

SEQ ID NO: 227790 - DNA, 25 bp, probe
gaggcttcttctatagactcttcag

SEQ ID NO: 227791 - DNA, 25 bp, probe
gaggaattgatcagtatcactttaa

SEQ ID NO: 227792 - DNA, 25 bp, probe
gaggaactaagacttcacttggagc

SEQ ID NO: 227793 - DNA, 25 bp, probe
gaggaactaagacttcacttggagc

SEQ ID NO: 227794 - DNA, 25 bp, probe
gaggaacaagaagcaccactacagg

SEQ ID NO: 227795 - DNA, 25 bp, probe
gaggacaagcaataactctctacag

SEQ ID NO: 227796 - DNA, 25 bp, probe
gatctggccacacgaaactgtttag

SEQ ID NO: 227797 - DNA, 25 bp, probe
gatgcttcccaagaactttcaagcc

SEQ ID NO: 227798 - DNA, 25 bp, probe
gattcctgccaagtagggtttagcc

SEQ ID NO: 227799 - DNA, 25 bp, probe
gattttatacctcaggtttcagatc

SEQ ID NO: 227800 - DNA, 25 bp, probe
gttgttctgaccagggctttcaaag

SEQ ID NO: 227801 - DNA, 25 bp, probe
gatggttctagggtgggtttacagc

SEQ ID NO: 227802 - DNA, 25 bp, probe
gaggcaacgagtgggaggttcaaac

SEQ ID NO: 227803 - DNA, 25 bp, probe
gaggaaatgattttggagtccaaac

SEQ ID NO: 227804 - DNA, 25 bp, probe
gaggaagatgcacaattgacccaaa

SEQ ID NO: 227805 - DNA, 25 bp, probe
gaggaagtgagcggtgctgtcctca

SEQ ID NO: 227806 - DNA, 25 bp, probe
gaggaagtgagcggtgctgtcctca

SEQ ID NO: 227807 - DNA, 25 bp, probe
gaggaagatagagtggtgacttaga

SEQ ID NO: 227808 - DNA, 25 bp, probe
gatgaaaacaagggatggctcattg

SEQ ID NO: 227809 - DNA, 25 bp, probe
gatggacagaaagggcagcctatct

SEQ ID NO: 227810 - DNA, 25 bp, probe
gatggacagaaagggcagcctatct

SEQ ID NO: 227811 - DNA, 25 bp, probe
gatggaagataaactgcacactttc

SEQ ID NO: 227812 - DNA, 25 bp, probe
gaggaagataaacgcccacaacaat

SEQ ID NO: 227813 - DNA, 25 bp, probe
gaggcaagaacatgtctctccaaca

SEQ ID NO: 227814 - DNA, 25 bp, probe
gaggcagcattaacagttctacaca

SEQ ID NO: 227815 - DNA, 25 bp, probe
gaggctatgatgagcagtagtacca

SEQ ID NO: 227816 - DNA, 25 bp, probe
gaggctcagagcagcaggtgttacc

SEQ ID NO: 227817 - DNA, 25 bp, probe
gaggcgtgatgcaggggtgtgaggc

SEQ ID NO: 227818 - DNA, 25 bp, probe
gaggctgtgcgtctggaggtgaagc

SEQ ID NO: 227819 - DNA, 25 bp, probe
gaggcagtggtgagacacgtggagc

SEQ ID NO: 227820 - DNA, 25 bp, probe
gaggcagtggtgagacacgtggagc

SEQ ID NO: 227821 - DNA, 25 bp, probe
gatgcaacggaagagtcctgggcgg

SEQ ID NO: 227822 - DNA, 25 bp, probe
gatctactgtgagaagtccttggat

SEQ ID NO: 227823 - DNA, 25 bp, probe
gatgtgccattagaagaacattaca

SEQ ID NO: 227824 - DNA, 25 bp, probe
gatggacttagccctcaaatttcag

SEQ ID NO: 227825 - DNA, 25 bp, probe
gatgttgttcccgtaaattacatga

SEQ ID NO: 227826 - DNA, 25 bp, probe
gatgttactagtgctaactttgtat

SEQ ID NO: 227827 - DNA, 25 bp, probe
gatgttactagtgctaactttgtat

SEQ ID NO: 227828 - DNA, 25 bp, probe
gatgactactacagaatcttatttt

SEQ ID NO: 227829 - DNA, 25 bp, probe
gatgaaaggattgaacagtattttg

SEQ ID NO: 227830 - DNA, 25 bp, probe
gatgggccggtatacagagattttc

SEQ ID NO: 227831 - DNA, 25 bp, probe
gaggcctgcttcacaacagacattt

SEQ ID NO: 227832 - DNA, 25 bp, probe
gaggcagtcatgttagcaaatgaca

SEQ ID NO: 227833 - DNA, 25 bp, probe
gaggcagcactgttacagaaaacgt

SEQ ID NO: 227834 - DNA, 25 bp, probe
gaggcagcagccgaaatgaagacac

SEQ ID NO: 227835 - DNA, 25 bp, probe
gaggcatgctgaccacaatggacag

SEQ ID NO: 227836 - DNA, 25 bp, probe
gaggcatgctgaccacaatggacag

SEQ ID NO: 227837 - DNA, 25 bp, probe
gaggccgagccatatgatgagagcg

SEQ ID NO: 227838 - DNA, 25 bp, probe
gaggcagcagactggtgtgaacccg

SEQ ID NO: 227839 - DNA, 25 bp, probe
gaggcagcagactggtgtgaacccg

SEQ ID NO: 227840 - DNA, 25 bp, probe
gaggcctgcactgattggggcctgg

SEQ ID NO: 227841 - DNA, 25 bp, probe
gaggcctgcactgattggggcctgg

SEQ ID NO: 227842 - DNA, 25 bp, probe
gaggcctggcactttgcaaggattg

SEQ ID NO: 227843 - DNA, 25 bp, probe
gaggcctggcactttgcaaggattg

SEQ ID NO: 227844 - DNA, 25 bp, probe
gaggcctgtgaaatacaaggttccc

SEQ ID NO: 227845 - DNA, 25 bp, probe
gaggccttggcaaaattggatttct

SEQ ID NO: 227846 - DNA, 25 bp, probe
gaggccttggcaaaattggatttct

SEQ ID NO: 227847 - DNA, 25 bp, probe
gaggccttggcatgagtatgagcac

SEQ ID NO: 227848 - DNA, 25 bp, probe
gaggccttggcatgagtatgagcac

SEQ ID NO: 227849 - DNA, 25 bp, probe
gaggcctctggtgagtgtgagcagc

SEQ ID NO: 227850 - DNA, 25 bp, probe
gaggcctctggtgagtgtgagcagc

SEQ ID NO: 227851 - DNA, 25 bp, probe
gaggcacattgaattcttggatgca

SEQ ID NO: 227852 - DNA, 25 bp, probe
gaggcacactgtttcttagagacgg

SEQ ID NO: 227853 - DNA, 25 bp, probe
gaggcaactgatagactacgagcgc

SEQ ID NO: 227854 - DNA, 25 bp, probe
gaggccatctgaaactgacagactt

SEQ ID NO: 227855 - DNA, 25 bp, probe
gaggcacacgtcaagatcgctgact

SEQ ID NO: 227856 - DNA, 25 bp, probe
gaggcagcctctgcgaatgctgcca

SEQ ID NO: 227857 - DNA, 25 bp, probe
gaggcagtgccagttactctgccta

SEQ ID NO: 227858 - DNA, 25 bp, probe
gaggcaagcaagctctcttgccgag

SEQ ID NO: 227859 - DNA, 25 bp, probe
gaggaagatatggtgatggtgttga

SEQ ID NO: 227860 - DNA, 25 bp, probe
gaggcaacagtggattgctgcttct

SEQ ID NO: 227861 - DNA, 25 bp, probe
gaggcaggggagtctgcttgtctta

SEQ ID NO: 227862 - DNA, 25 bp, probe
gaggaatgggtgttctgtggcctcg

SEQ ID NO: 227863 - DNA, 25 bp, probe
gaggccaaggtgtacagtgccacca

SEQ ID NO: 227864 - DNA, 25 bp, probe
gaggccaaggagttcatctctaagc

SEQ ID NO: 227865 - DNA, 25 bp, probe
gaggccaaggaggcatatcaacttg

SEQ ID NO: 227866 - DNA, 25 bp, probe
gaggccaaggaggcatatcaacttg

SEQ ID NO: 227867 - DNA, 25 bp, probe
gaggcagagaggcaatcatcaatct

SEQ ID NO: 227868 - DNA, 25 bp, probe
gaggcagagggttaccatactgagt

SEQ ID NO: 227869 - DNA, 25 bp, probe
gaggcgggtggatccacctaaggtc

SEQ ID NO: 227870 - DNA, 25 bp, probe
gaggcgggtggatcatgaggtcagg

SEQ ID NO: 227871 - DNA, 25 bp, probe
gaggcaggtggatcacgaggtcagg

SEQ ID NO: 227872 - DNA, 25 bp, probe
gaggcggctaagccacgagttctac

SEQ ID NO: 227873 - DNA, 25 bp, probe
gaggaatcgaagcccagttcttagc

SEQ ID NO: 227874 - DNA, 25 bp, probe
gaggcacctaaacagattcttctgg

SEQ ID NO: 227875 - DNA, 25 bp, probe
gaggcccaagaacatgatgctttgt

SEQ ID NO: 227876 - DNA, 25 bp, probe
gaggcaactcaggagtaagatgtgt

SEQ ID NO: 227877 - DNA, 25 bp, probe
gaggcaaacagcagtgatggctggg

SEQ ID NO: 227878 - DNA, 25 bp, probe
gaggccaggagtttgaggctgcagt

SEQ ID NO: 227879 - DNA, 25 bp, probe
gaggaaggtgagtatgaggctgcac

SEQ ID NO: 227880 - DNA, 25 bp, probe
gaggcaaggctacaggtgcatcaac

SEQ ID NO: 227881 - DNA, 25 bp, probe
gaggcaaggctacaggtgcatcaac

SEQ ID NO: 227882 - DNA, 25 bp, probe
gaggccaccgagaaacatgataacc

SEQ ID NO: 227883 - DNA, 25 bp, probe
gaggccaccgagaaacatgataacc

SEQ ID NO: 227884 - DNA, 25 bp, probe
gaggcacacccggcaaatgagaaac

SEQ ID NO: 227885 - DNA, 25 bp, probe
gaggccaatcaagaccagaagaacc

SEQ ID NO: 227886 - DNA, 25 bp, probe
gaggccaataatatgaagggaatca

SEQ ID NO: 227887 - DNA, 25 bp, probe
gaggccaataatatgaagggaatca

SEQ ID NO: 227888 - DNA, 25 bp, probe
gaggccctagatttctatggggaag

SEQ ID NO: 227889 - DNA, 25 bp, probe
gaggcccaactgaatcgtggggtga

SEQ ID NO: 227890 - DNA, 25 bp, probe
gatggccgcatgactttggtgggca

SEQ ID NO: 227891 - DNA, 25 bp, probe
gatggccgcatgactttggtgggca

SEQ ID NO: 227892 - DNA, 25 bp, probe
gatggacgacacggtgggggcatct

SEQ ID NO: 227893 - DNA, 25 bp, probe
gatggacgacacggtgggggcatct

SEQ ID NO: 227894 - DNA, 25 bp, probe
gatggacaaccgtaggggatttgga

SEQ ID NO: 227895 - DNA, 25 bp, probe
gaggcccaccgaagggtactgaaga

SEQ ID NO: 227896 - DNA, 25 bp, probe
gaggcccactttattctgaggaata

SEQ ID NO: 227897 - DNA, 25 bp, probe
gaggctccactaatctctttagtaa

SEQ ID NO: 227898 - DNA, 25 bp, probe
gaggctccactaatctctttagtaa

SEQ ID NO: 227899 - DNA, 25 bp, probe
gaggctccacactagatctgttaga

SEQ ID NO: 227900 - DNA, 25 bp, probe
gaggccagcactgagtctgggacac

SEQ ID NO: 227901 - DNA, 25 bp, probe
gaggcacagccgtagagctgtggct

SEQ ID NO: 227902 - DNA, 25 bp, probe
gaggccccgagacgtgaagctggcc

SEQ ID NO: 227903 - DNA, 25 bp, probe
gaggcctttgaggacgacacaggtc

SEQ ID NO: 227904 - DNA, 25 bp, probe
gaggcctgttcagtgaagacggtgt

SEQ ID NO: 227905 - DNA, 25 bp, probe
gaggcagcggtgagaagaagggtgg

SEQ ID NO: 227906 - DNA, 25 bp, probe
gaggcgctgggcagagagtcaaggc

SEQ ID NO: 227907 - DNA, 25 bp, probe
gaggcgctgggcagagagtcaaggc

SEQ ID NO: 227908 - DNA, 25 bp, probe
gaggcctgaataagagagtcaccat

SEQ ID NO: 227909 - DNA, 25 bp, probe
gaggcctgaataagagagtcaccat

SEQ ID NO: 227910 - DNA, 25 bp, probe
gaggcgctggccaagcaagtagcct

SEQ ID NO: 227911 - DNA, 25 bp, probe
gaggctgatggacacaaataccaaa

SEQ ID NO: 227912 - DNA, 25 bp, probe
gatggttggctctacaaataccatt

SEQ ID NO: 227913 - DNA, 25 bp, probe
gaggctatttctacatagtaactct

SEQ ID NO: 227914 - DNA, 25 bp, probe
gatgggttactataacaacagtacc

SEQ ID NO: 227915 - DNA, 25 bp, probe
gatcctttactacaaaatatataga

SEQ ID NO: 227916 - DNA, 25 bp, probe
gatcctttactacaaaatatataga

SEQ ID NO: 227917 - DNA, 25 bp, probe
gatcctttcaatatacgttcttcag

SEQ ID NO: 227918 - DNA, 25 bp, probe
gatcctttcaatatacgttcttcag

SEQ ID NO: 227919 - DNA, 25 bp, probe
gatctatattttattccttcttgca

SEQ ID NO: 227920 - DNA, 25 bp, probe
gatggaactgtttttccttcttctc

SEQ ID NO: 227921 - DNA, 25 bp, probe
gatggacaagtttctggctattttt

SEQ ID NO: 227922 - DNA, 25 bp, probe
gattgaccctttaactgtatcctta

SEQ ID NO: 227923 - DNA, 25 bp, probe
gtgctgtcccttgtatttactttaa

SEQ ID NO: 227924 - DNA, 25 bp, probe
gatggtacctagtctttgaatttgt

SEQ ID NO: 227925 - DNA, 25 bp, probe
gaggcacaatcttgacttgtcaatt

SEQ ID NO: 227926 - DNA, 25 bp, probe
gatggccacttctttggacagatta

SEQ ID NO: 227927 - DNA, 25 bp, probe
gaggcgcgcttcgagggaatatgcg

SEQ ID NO: 227928 - DNA, 25 bp, probe
gaggcgcgcttcgagggaatatgcg

SEQ ID NO: 227929 - DNA, 25 bp, probe
gaggcccacactggtgtgaatattg

SEQ ID NO: 227930 - DNA, 25 bp, probe
gaggcagccagagttgaatgttatt

SEQ ID NO: 227931 - DNA, 25 bp, probe
gaggcagccagagttgaatgttatt

SEQ ID NO: 227932 - DNA, 25 bp, probe
gatggcaccagaggtggttacacgg

SEQ ID NO: 227933 - DNA, 25 bp, probe
gatcgaccagtcagagttcgaaggc

SEQ ID NO: 227934 - DNA, 25 bp, probe
gaggccacaggccaagttctaagac

SEQ ID NO: 227935 - DNA, 25 bp, probe
gatggcccaggagaggttgaagaga

SEQ ID NO: 227936 - DNA, 25 bp, probe
gatggcccaggagaggttgaagaga

SEQ ID NO: 227937 - DNA, 25 bp, probe
gatggcaccacaaccaagtacaaaa

SEQ ID NO: 227938 - DNA, 25 bp, probe
gaggcatccatctggcagattggaa

SEQ ID NO: 227939 - DNA, 25 bp, probe
gaggcatacatctgtgggatagtca

SEQ ID NO: 227940 - DNA, 25 bp, probe
gaggcatacacacgggctgtggact

SEQ ID NO: 227941 - DNA, 25 bp, probe
gatgtgcaacatttcggtgagaact

SEQ ID NO: 227942 - DNA, 25 bp, probe
gatggacacatactggattcaaaga

SEQ ID NO: 227943 - DNA, 25 bp, probe
gatgaattcaaagtgttctgggaca

SEQ ID NO: 227944 - DNA, 25 bp, probe
gatgaattcaaagtgttctgggaca

SEQ ID NO: 227945 - DNA, 25 bp, probe
gatgcagttaaggttcctaaacaac

SEQ ID NO: 227946 - DNA, 25 bp, probe
gaggcttagaaaactcttatacaga

SEQ ID NO: 227947 - DNA, 25 bp, probe
gaggcttattccatgtttacacaat

SEQ ID NO: 227948 - DNA, 25 bp, probe
gaggccttataaatgtctgttggaa

SEQ ID NO: 227949 - DNA, 25 bp, probe
gaggcttgtactgctttgttgaata

SEQ ID NO: 227950 - DNA, 25 bp, probe
gaggctgaaacaatccttgtgatga

SEQ ID NO: 227951 - DNA, 25 bp, probe
gatggccatagatttgccttgtggt

SEQ ID NO: 227952 - DNA, 25 bp, probe
gatggaatagaagcccttgttgctg

SEQ ID NO: 227953 - DNA, 25 bp, probe
gatgtgcagagacatccctttttcc

SEQ ID NO: 227954 - DNA, 25 bp, probe
gatgtgcagagacatccctttttcc

SEQ ID NO: 227955 - DNA, 25 bp, probe
gatgtgagaggtgggcgctttggag

SEQ ID NO: 227956 - DNA, 25 bp, probe
gatgaagggctgcgcttaaaacacc

SEQ ID NO: 227957 - DNA, 25 bp, probe
gatgaagggctgcgcttaaaacacc

SEQ ID NO: 227958 - DNA, 25 bp, probe
gatggattggccgcattgaaattcc

SEQ ID NO: 227959 - DNA, 25 bp, probe
gatggtatggactgcatggacaatg

SEQ ID NO: 227960 - DNA, 25 bp, probe
gaggcaagcaactaggtacaatgtc

SEQ ID NO: 227961 - DNA, 25 bp, probe
gaggcaagcaactaggtacaatgtc

SEQ ID NO: 227962 - DNA, 25 bp, probe
gaggcatttgactggtgctgccgtc

SEQ ID NO: 227963 - DNA, 25 bp, probe
gaggcttgttacattggcacagagc

SEQ ID NO: 227964 - DNA, 25 bp, probe
gaggcttgttacattggcacagagc

SEQ ID NO: 227965 - DNA, 25 bp, probe
gaggcctttgtgacttgtctagcag

SEQ ID NO: 227966 - DNA, 25 bp, probe
gaggctttaggacgctgtatgcaga

SEQ ID NO: 227967 - DNA, 25 bp, probe
gaggctgtatcaggatttatacaca

SEQ ID NO: 227968 - DNA, 25 bp, probe
gaggctgtgcaagatgttctacgcc

SEQ ID NO: 227969 - DNA, 25 bp, probe
gaggctgtgcaagatgttctacgcc

SEQ ID NO: 227970 - DNA, 25 bp, probe
gaggctggacaaatgtccttgcctt

SEQ ID NO: 227971 - DNA, 25 bp, probe
gaggctggacaaatgtccttgcctt

SEQ ID NO: 227972 - DNA, 25 bp, probe
gaggcatgtgaccagtgcctatgcc

SEQ ID NO: 227973 - DNA, 25 bp, probe
gaggcttggcatttgccatatcatc

SEQ ID NO: 227974 - DNA, 25 bp, probe
gaggcatggagcagggcagagcaag

SEQ ID NO: 227975 - DNA, 25 bp, probe
gatggtgggcaagatgcagctgaag

SEQ ID NO: 227976 - DNA, 25 bp, probe
gaggctagaactggatggtgagcga

SEQ ID NO: 227977 - DNA, 25 bp, probe
gataataatttctatgggaccaaag

SEQ ID NO: 227978 - DNA, 25 bp, probe
gataataatttctatgggaccaaag

SEQ ID NO: 227979 - DNA, 25 bp, probe
gatgaatttttcaggaggcccagac

SEQ ID NO: 227980 - DNA, 25 bp, probe
gatgaatttttcaggaggcccagac

SEQ ID NO: 227981 - DNA, 25 bp, probe
gatgacctttctagtaaggccaaga

SEQ ID NO: 227982 - DNA, 25 bp, probe
gatggtctttctgtagaggactatg

SEQ ID NO: 227983 - DNA, 25 bp, probe
gaggccttagtgatagagtcaacat

SEQ ID NO: 227984 - DNA, 25 bp, probe
gaggccttagtgatagagtcaacat

SEQ ID NO: 227985 - DNA, 25 bp, probe
gaggccttggacactgtgtcaatca

SEQ ID NO: 227986 - DNA, 25 bp, probe
gaggccttggacactgtgtcaatca

SEQ ID NO: 227987 - DNA, 25 bp, probe
gatggaattaacttcatggtgaata

SEQ ID NO: 227988 - DNA, 25 bp, probe
gatggctcttgaaagtctggttaat

SEQ ID NO: 227989 - DNA, 25 bp, probe
gaggcttctgtatgcttgtgaaaaa

SEQ ID NO: 227990 - DNA, 25 bp, probe
gaggctcgctttttcttaaaaatat

SEQ ID NO: 227991 - DNA, 25 bp, probe
gaggctactcttgacttagacctat

SEQ ID NO: 227992 - DNA, 25 bp, probe
gatggtactatttagatataacact

SEQ ID NO: 227993 - DNA, 25 bp, probe
gaggccagtttctatgaagagcaag

SEQ ID NO: 227994 - DNA, 25 bp, probe
gaggctgtttgattatgtcgtgaag

SEQ ID NO: 227995 - DNA, 25 bp, probe
gaggctcatactttagcttgtgaag

SEQ ID NO: 227996 - DNA, 25 bp, probe
gaggctagcagttcaacttctgtaa

SEQ ID NO: 227997 - DNA, 25 bp, probe
gaggctgaagtaggtatctctcaaa

SEQ ID NO: 227998 - DNA, 25 bp, probe
gaggctcaaggaaaatcctcagaag

SEQ ID NO: 227999 - DNA, 25 bp, probe
gatgtgaccaggacaaacgtgcaat

SEQ ID NO: 228000 - DNA, 25 bp, probe
gatggcaatctgaagagatacctga

SEQ ID NO: 228001 - DNA, 25 bp, probe
gatggagctgatccagtaacctcgg

SEQ ID NO: 228002 - DNA, 25 bp, probe
gatggcacagttctaacctggggaa

SEQ ID NO: 228003 - DNA, 25 bp, probe
gatggcaagatctgtaccgtgacgg

SEQ ID NO: 228004 - DNA, 25 bp, probe
gatggcaacatcaaatacctggact

SEQ ID NO: 228005 - DNA, 25 bp, probe
gaggcattgctcaaatcacctcctc

SEQ ID NO: 228006 - DNA, 25 bp, probe
gaggctcctaagtcacagacctcag

SEQ ID NO: 228007 - DNA, 25 bp, probe
gatgtgccatcgaagatgccgacct

SEQ ID NO: 228008 - DNA, 25 bp, probe
gatgtgccatcgaagatgccgacct

SEQ ID NO: 228009 - DNA, 25 bp, probe
gatggccacatcaagatcactgact

SEQ ID NO: 228010 - DNA, 25 bp, probe
gatgaaactccgtctctactaaaat

SEQ ID NO: 228011 - DNA, 25 bp, probe
gatgcaaaaacgattccgaaacata

SEQ ID NO: 228012 - DNA, 25 bp, probe
gatgctaaaatcgaaattcagacat

SEQ ID NO: 228013 - DNA, 25 bp, probe
gatggaatccccaaagtggatcagt

SEQ ID NO: 228014 - DNA, 25 bp, probe
gatggattccccaaatgagcaagag

SEQ ID NO: 228015 - DNA, 25 bp, probe
gatggattccccaaatgagcaagag

SEQ ID NO: 228016 - DNA, 25 bp, probe
gatggatatcggatggtgcagcaat

SEQ ID NO: 228017 - DNA, 25 bp, probe
gatgaaattggttcctgcagaaatt

SEQ ID NO: 228018 - DNA, 25 bp, probe
gtgccaaccctacttgcaaaatctg

SEQ ID NO: 228019 - DNA, 25 bp, probe
gtgccaaccctacttgcaaaatctg

SEQ ID NO: 228020 - DNA, 25 bp, probe
gatggcaaagcccacttagcaaaag

SEQ ID NO: 228021 - DNA, 25 bp, probe
gatggcaaaggcgatattataaaca

SEQ ID NO: 228022 - DNA, 25 bp, probe
gatgacaaattggggctgtcggggg

SEQ ID NO: 228023 - DNA, 25 bp, probe
gatgatttctctgaggttcgggggg

SEQ ID NO: 228024 - DNA, 25 bp, probe
gatgatttctctgaggttcgggggg

SEQ ID NO: 228025 - DNA, 25 bp, probe
gatggagtccatgcagtttcttaga

SEQ ID NO: 228026 - DNA, 25 bp, probe
gaggcagtgcaaagaggaggttagc

SEQ ID NO: 228027 - DNA, 25 bp, probe
gatgggtgacaggggatggttttgg

SEQ ID NO: 228028 - DNA, 25 bp, probe
gatggggaaggaggctggcttgtcc

SEQ ID NO: 228029 - DNA, 25 bp, probe
gatggacgtgaggaacgccattgtc

SEQ ID NO: 228030 - DNA, 25 bp, probe
gaggctttgcaggaaactctcattc

SEQ ID NO: 228031 - DNA, 25 bp, probe
gatggagaatcagaaaatctttctc

SEQ ID NO: 228032 - DNA, 25 bp, probe
gatggagaccatgaaacagcccttc

SEQ ID NO: 228033 - DNA, 25 bp, probe
gaggcatggactgaattgtccagct

SEQ ID NO: 228034 - DNA, 25 bp, probe
gaggcatggactgaattgtccagct

SEQ ID NO: 228035 - DNA, 25 bp, probe
gatggcatccatgaagatgttccag

SEQ ID NO: 228036 - DNA, 25 bp, probe
gatggcatccatgaagatgttccag

SEQ ID NO: 228037 - DNA, 25 bp, probe
gatggccacataaaaattacagatt

SEQ ID NO: 228038 - DNA, 25 bp, probe
gatggctctcttggaaaaggaaatc

SEQ ID NO: 228039 - DNA, 25 bp, probe
gatggctctcttggaaaaggaaatc

SEQ ID NO: 228040 - DNA, 25 bp, probe
gatgattccttagaacacgagaaac

SEQ ID NO: 228041 - DNA, 25 bp, probe
gatgattccttagaacacgagaaac

SEQ ID NO: 228042 - DNA, 25 bp, probe
gatgttagttgttacccagataaaa

SEQ ID NO: 228043 - DNA, 25 bp, probe
gatgttagttgttacccagataaaa

SEQ ID NO: 228044 - DNA, 25 bp, probe
gatgtctagtttttccaagttacaa

SEQ ID NO: 228045 - DNA, 25 bp, probe
gatgtccgctatatccaaaattaca

SEQ ID NO: 228046 - DNA, 25 bp, probe
gatggtgctgctaattcccaacatt

SEQ ID NO: 228047 - DNA, 25 bp, probe
gaggctgtcagcatcttgaaagctt

SEQ ID NO: 228048 - DNA, 25 bp, probe
gaggctgaaatgtttattctgcttc

SEQ ID NO: 228049 - DNA, 25 bp, probe
gaggcatatttcttaatctggtatc

SEQ ID NO: 228050 - DNA, 25 bp, probe
gaggcatttccacactctgagaatg

SEQ ID NO: 228051 - DNA, 25 bp, probe
gaggcatttctacactgattgcact

SEQ ID NO: 228052 - DNA, 25 bp, probe
gaggcatttcatatcagtgaggatt

SEQ ID NO: 228053 - DNA, 25 bp, probe
gatgctttacatagagagggaattg

SEQ ID NO: 228054 - DNA, 25 bp, probe
gatgtgggaaaactggacaattgtc

SEQ ID NO: 228055 - DNA, 25 bp, probe
gatgagtggaccaagcgggaattcc

SEQ ID NO: 228056 - DNA, 25 bp, probe
gatgagtggaccaagcgggaattcc

SEQ ID NO: 228057 - DNA, 25 bp, probe
gatggcaggatccaaggggctagct

SEQ ID NO: 228058 - DNA, 25 bp, probe
gatgtattttgatggtggtggtcgt

SEQ ID NO: 228059 - DNA, 25 bp, probe
gatgtattttgatggtggtggtcgt

SEQ ID NO: 228060 - DNA, 25 bp, probe
gattttcggaagctggggacacggc

SEQ ID NO: 228061 - DNA, 25 bp, probe
gatgggtcaggtaggggggaaacag

SEQ ID NO: 228062 - DNA, 25 bp, probe
gatgggtccgaggcgggggacagaa

SEQ ID NO: 228063 - DNA, 25 bp, probe
gatggcagctcagatccgtgaggtg

SEQ ID NO: 228064 - DNA, 25 bp, probe
gaggcatagagcaactgcattgagg

SEQ ID NO: 228065 - DNA, 25 bp, probe
gaggctagcatctacgacaagcgct

SEQ ID NO: 228066 - DNA, 25 bp, probe
gggcgacaattaggagagccagaaa

SEQ ID NO: 228067 - DNA, 25 bp, probe
gaggctgcaacatacctcaatcctg

SEQ ID NO: 228068 - DNA, 25 bp, probe
gaggctgaagatcacctacagtccc

SEQ ID NO: 228069 - DNA, 25 bp, probe
gaggctggagaggacttcacctctg

SEQ ID NO: 228070 - DNA, 25 bp, probe
gatggcgtcaggaatttcagccaat

SEQ ID NO: 228071 - DNA, 25 bp, probe
gaggccattgcaaatttcacaaatc

SEQ ID NO: 228072 - DNA, 25 bp, probe
gaggccattgcaaatttcacaaatc

SEQ ID NO: 228073 - DNA, 25 bp, probe
gaggcctggagtattcacagacatt

SEQ ID NO: 228074 - DNA, 25 bp, probe
gatggatcggagtttacaagctcag

SEQ ID NO: 228075 - DNA, 25 bp, probe
gatggacctggatgtagtactcaag

SEQ ID NO: 228076 - DNA, 25 bp, probe
gatggacctgagtgtcggtcacagc

SEQ ID NO: 228077 - DNA, 25 bp, probe
gatggagactggtgaccccatcaca

SEQ ID NO: 228078 - DNA, 25 bp, probe
gatggccacggctgcttccagctcc

SEQ ID NO: 228079 - DNA, 25 bp, probe
gatggccccagaagtcatcaatgag

SEQ ID NO: 228080 - DNA, 25 bp, probe
gaggccgctagaggcctgaggatga

SEQ ID NO: 228081 - DNA, 25 bp, probe
gaggcgctgtaggagcctggtcatc

SEQ ID NO: 228082 - DNA, 25 bp, probe
gaggctgctcaacaggatggccatc

SEQ ID NO: 228083 - DNA, 25 bp, probe
gaggctcacggtacagaggcctgcc

SEQ ID NO: 228084 - DNA, 25 bp, probe
gatggtggcggtgaaagccctcaag

SEQ ID NO: 228085 - DNA, 25 bp, probe
gatggacggtatttcaacggccagg

SEQ ID NO: 228086 - DNA, 25 bp, probe
gatggacggtatttcaacggccagg

SEQ ID NO: 228087 - DNA, 25 bp, probe
gatggaaggttacaagtggcacttc

SEQ ID NO: 228088 - DNA, 25 bp, probe
gatgggaggaaataagcgtgcagct

SEQ ID NO: 228089 - DNA, 25 bp, probe
gatgggggactgagcaagtagctat

SEQ ID NO: 228090 - DNA, 25 bp, probe
gatggagggaggagaccttcttact

SEQ ID NO: 228091 - DNA, 25 bp, probe
gatggctgagggcggagtctatttt

SEQ ID NO: 228092 - DNA, 25 bp, probe
gatggctgagggcggagtctatttt

SEQ ID NO: 228093 - DNA, 25 bp, probe
gaggctgcgtgtaaagatgtataat

SEQ ID NO: 228094 - DNA, 25 bp, probe
gaggctgcaggacccagaatcagag

SEQ ID NO: 228095 - DNA, 25 bp, probe
gaggctgcaggacccagaatcagag

SEQ ID NO: 228096 - DNA, 25 bp, probe
gaggcgcggaggacgaaggaggggc

SEQ ID NO: 228097 - DNA, 25 bp, probe
gaggcgggaggctttagtggtggaa

SEQ ID NO: 228098 - DNA, 25 bp, probe
gaggcgggaggctttagtggtggaa

SEQ ID NO: 228099 - DNA, 25 bp, probe
gaggcgtgggaatccaggcagtggt

SEQ ID NO: 228100 - DNA, 25 bp, probe
gaggcgtgggaatccaggcagtggt

SEQ ID NO: 228101 - DNA, 25 bp, probe
gaggcgtgggaatccaggcagtggt

SEQ ID NO: 228102 - DNA, 25 bp, probe
gaggcgggacactggaggtggagtt

SEQ ID NO: 228103 - DNA, 25 bp, probe
gggctgtatgaaaagggtgggaatg

SEQ ID NO: 228104 - DNA, 25 bp, probe
gaggcttatgtatcaagtctcggga

SEQ ID NO: 228105 - DNA, 25 bp, probe
gaggcttatgtatcaagtctcggga

SEQ ID NO: 228106 - DNA, 25 bp, probe
gaggctgattttgaagtgctccatg

SEQ ID NO: 228107 - DNA, 25 bp, probe
gaggctgataattccagtggtccat

SEQ ID NO: 228108 - DNA, 25 bp, probe
gatggctgcaaatctcagttcaaat

SEQ ID NO: 228109 - DNA, 25 bp, probe
gatggctgcaaatctcagttcaaat

SEQ ID NO: 228110 - DNA, 25 bp, probe
gaggctaaagaccatgttcacattc

SEQ ID NO: 228111 - DNA, 25 bp, probe
gaggccatgaaacatgtgtactttc

SEQ ID NO: 228112 - DNA, 25 bp, probe
gaggccatgaaacatgtgtactttc

SEQ ID NO: 228113 - DNA, 25 bp, probe
gaggctccaatacatgggaagcttt

SEQ ID NO: 228114 - DNA, 25 bp, probe
gaggctgcagcacacatatgtggaa

SEQ ID NO: 228115 - DNA, 25 bp, probe
gaggcgagcacgccatcttgagaca

SEQ ID NO: 228116 - DNA, 25 bp, probe
gaggcgacagtcctatctagacatc

SEQ ID NO: 228117 - DNA, 25 bp, probe
gaggcgagagatgcttagagaccca

SEQ ID NO: 228118 - DNA, 25 bp, probe
gaggctgcggtgagtgtatgcaccc

SEQ ID NO: 228119 - DNA, 25 bp, probe
gaggctgcggtgagtgtatgcaccc

SEQ ID NO: 228120 - DNA, 25 bp, probe
gaggctctgagaactggtactctca

SEQ ID NO: 228121 - DNA, 25 bp, probe
gaggctggagaagaggacttcagga

SEQ ID NO: 228122 - DNA, 25 bp, probe
gaggctggtgtagaggcggagagga

SEQ ID NO: 228123 - DNA, 25 bp, probe
gaggctgagttagtgacagggtggc

SEQ ID NO: 228124 - DNA, 25 bp, probe
gaggctgtgttttgtcacacagggc

SEQ ID NO: 228125 - DNA, 25 bp, probe
gaggctggtttaccaacatctactc

SEQ ID NO: 228126 - DNA, 25 bp, probe
gaggctggtttaccaacatctactc

SEQ ID NO: 228127 - DNA, 25 bp, probe
gatggctggatgtgctccaggccat

SEQ ID NO: 228128 - DNA, 25 bp, probe
gaggctgtgcattacatgcagagtc

SEQ ID NO: 228129 - DNA, 25 bp, probe
gatgacatctgattagcagaagtca

SEQ ID NO: 228130 - DNA, 25 bp, probe
gatgatgacgtggactgcacaatga

SEQ ID NO: 228131 - DNA, 25 bp, probe
gatgtacaggtatcagggaacatgg

SEQ ID NO: 228132 - DNA, 25 bp, probe
gaggccacgtatcagggaaattgca

SEQ ID NO: 228133 - DNA, 25 bp, probe
gatggaccagtacagcgaggttaat

SEQ ID NO: 228134 - DNA, 25 bp, probe
gatgtactggtacaggaagttataa

SEQ ID NO: 228135 - DNA, 25 bp, probe
gatggacgagttctgtatactctaa

SEQ ID NO: 228136 - DNA, 25 bp, probe
gatggaaggtgtttttgtcatgcat

SEQ ID NO: 228137 - DNA, 25 bp, probe
gatgtaaagtttattgttgcttcgc

SEQ ID NO: 228138 - DNA, 25 bp, probe
gatggaaaggatcttgggtcctatc

SEQ ID NO: 228139 - DNA, 25 bp, probe
gatggaaaggattcttggacctcta

SEQ ID NO: 228140 - DNA, 25 bp, probe
gatggagataacactggtgcctcct

SEQ ID NO: 228141 - DNA, 25 bp, probe
gatggagacaatctccacagccacc

SEQ ID NO: 228142 - DNA, 25 bp, probe
gatggattcagtactcctcaaccac

SEQ ID NO: 228143 - DNA, 25 bp, probe
gatggcattggattgggctaaacac

SEQ ID NO: 228144 - DNA, 25 bp, probe
gatggcattggattgggctaaacac

SEQ ID NO: 228145 - DNA, 25 bp, probe
gaggcctggggatgtgaacaacctg

SEQ ID NO: 228146 - DNA, 25 bp, probe
gaggcgcagggacatggggcaagcc

SEQ ID NO: 228147 - DNA, 25 bp, probe
gaggccggaggagtaggacacgccc

SEQ ID NO: 228148 - DNA, 25 bp, probe
gatgggcgaattctaggaaccccag

SEQ ID NO: 228149 - DNA, 25 bp, probe
gatggagggtatctggatcaacccg

SEQ ID NO: 228150 - DNA, 25 bp, probe
gatggactcgttctgtagatgagag

SEQ ID NO: 228151 - DNA, 25 bp, probe
gaggccatcctttgtgaagctggaa

SEQ ID NO: 228152 - DNA, 25 bp, probe
gaggcgatcaggagggagctagcac

SEQ ID NO: 228153 - DNA, 25 bp, probe
gaggcgatcaggagggagctagcac

SEQ ID NO: 228154 - DNA, 25 bp, probe
gaggctgaccagagccggttgactt

SEQ ID NO: 228155 - DNA, 25 bp, probe
gaggctgaacagaactggtgggagg

SEQ ID NO: 228156 - DNA, 25 bp, probe
gatggtggaagcccagcgtggggtc

SEQ ID NO: 228157 - DNA, 25 bp, probe
gatggtggaagcccagcgtggggtc

SEQ ID NO: 228158 - DNA, 25 bp, probe
gatggtggaagcccagcgtggggtc

SEQ ID NO: 228159 - DNA, 25 bp, probe
gatggtcaaaggtgtgggggtcgtg

SEQ ID NO: 228160 - DNA, 25 bp, probe
gatggacaaaggcctggcgtcggcc

SEQ ID NO: 228161 - DNA, 25 bp, probe
gatggacaaggcctgcatgggcggc

SEQ ID NO: 228162 - DNA, 25 bp, probe
gatgggcatatgtgtcagtggggct

SEQ ID NO: 228163 - DNA, 25 bp, probe
gatgggcatatgtgtcagtggggct

SEQ ID NO: 228164 - DNA, 25 bp, probe
gatggagctgagtgtgcatggggtc

SEQ ID NO: 228165 - DNA, 25 bp, probe
gatggcctggaatgagagggtcaag

SEQ ID NO: 228166 - DNA, 25 bp, probe
gaggcctgtcttaaagtttccatgg

SEQ ID NO: 228167 - DNA, 25 bp, probe
gaggccgtttgataattcatccgtg

SEQ ID NO: 228168 - DNA, 25 bp, probe
gatggggtttatgtcagtcattttg

SEQ ID NO: 228169 - DNA, 25 bp, probe
gatggggtgtttgacatccacttgt

SEQ ID NO: 228170 - DNA, 25 bp, probe
gatggtgtttttgttctacatattt

SEQ ID NO: 228171 - DNA, 25 bp, probe
gatggggatcggggattgcaattat

SEQ ID NO: 228172 - DNA, 25 bp, probe
gatggggatggggaaccatgtctca

SEQ ID NO: 228173 - DNA, 25 bp, probe
gatgggtggggagcaaatcatctgc

SEQ ID NO: 228174 - DNA, 25 bp, probe
gatggcctgtgggatgtcactactg

SEQ ID NO: 228175 - DNA, 25 bp, probe
gatggccaggcagattcagcctctc

SEQ ID NO: 228176 - DNA, 25 bp, probe
gatggccaggcagattcagcctctc

SEQ ID NO: 228177 - DNA, 25 bp, probe
gaggccagtcacaatggacagcgcc

SEQ ID NO: 228178 - DNA, 25 bp, probe
gaggccagtcacaatggacagcgcc

SEQ ID NO: 228179 - DNA, 25 bp, probe
gaggctgaggcaggtggatcacgag

SEQ ID NO: 228180 - DNA, 25 bp, probe
gaggcgaactgtagagtgcagggac

SEQ ID NO: 228181 - DNA, 25 bp, probe
gaggctgatgatctagagtctagga

SEQ ID NO: 228182 - DNA, 25 bp, probe
gaggctgaggtggagcagctcctgt

SEQ ID NO: 228183 - DNA, 25 bp, probe
gaggctgaggtggaaggatcacttg

SEQ ID NO: 228184 - DNA, 25 bp, probe
gaggcgaagcgcaagatggccctgg

SEQ ID NO: 228185 - DNA, 25 bp, probe
gatggagctatgcctcagtggcaac

SEQ ID NO: 228186 - DNA, 25 bp, probe
gatggagttgcaggactatgttcag

SEQ ID NO: 228187 - DNA, 25 bp, probe
gatggttgccaggacgaattgagat

SEQ ID NO: 228188 - DNA, 25 bp, probe
gatggcattgaagacggctgtggct

SEQ ID NO: 228189 - DNA, 25 bp, probe
gaggctgtggatgtctgtgagagcc

SEQ ID NO: 228190 - DNA, 25 bp, probe
gaggctgtgagagatgaggcatgac

SEQ ID NO: 228191 - DNA, 25 bp, probe
gaggcgaaagcagtggctcatccta

SEQ ID NO: 228192 - DNA, 25 bp, probe
gaggcgaaagcagtggctcatccta

SEQ ID NO: 228193 - DNA, 25 bp, probe
gaggcgatagaattggcgcatgcgt

SEQ ID NO: 228194 - DNA, 25 bp, probe
gatggcgatcaggatggacaccgtc

SEQ ID NO: 228195 - DNA, 25 bp, probe
gatggctgtgaggaagacaacgctg

SEQ ID NO: 228196 - DNA, 25 bp, probe
gatggaggaaaaccaagccgtggct

SEQ ID NO: 228197 - DNA, 25 bp, probe
gatggaagaaaacaagtcctccagt

SEQ ID NO: 228198 - DNA, 25 bp, probe
gtagtagtaaagccatggtcccgca

SEQ ID NO: 228199 - DNA, 25 bp, probe
gatgagatttatatcctggaccctg

SEQ ID NO: 228200 - DNA, 25 bp, probe
gatgagatttatatcctggaccctg

SEQ ID NO: 228201 - DNA, 25 bp, probe
gatgatcagtttatcatacccccgg

SEQ ID NO: 228202 - DNA, 25 bp, probe
gatgtttatatagaaagcccaagag

SEQ ID NO: 228203 - DNA, 25 bp, probe
gatggtttaaggacaccccagagtc

SEQ ID NO: 228204 - DNA, 25 bp, probe
gatgtgaattaagacaccaccgaga

SEQ ID NO: 228205 - DNA, 25 bp, probe
gatggtatataataagccaggaata

SEQ ID NO: 228206 - DNA, 25 bp, probe
gatggtatataataagccaggaata

SEQ ID NO: 228207 - DNA, 25 bp, probe
gaggcgcaagacaaaatccaggact

SEQ ID NO: 228208 - DNA, 25 bp, probe
gaggccaaagtcaaatccaaggctg

SEQ ID NO: 228209 - DNA, 25 bp, probe
gaggccttgagcttatcatgccaag

SEQ ID NO: 228210 - DNA, 25 bp, probe
gatggcagtcatctccatcatccaa

SEQ ID NO: 228211 - DNA, 25 bp, probe
gatgactcactgctgcatcaatccc

SEQ ID NO: 228212 - DNA, 25 bp, probe
gatgtctgactggttcaacttccac

SEQ ID NO: 228213 - DNA, 25 bp, probe
gatgtctctgaggttgcatggcatg

SEQ ID NO: 228214 - DNA, 25 bp, probe
gatgtcacgatggcactattgaatt

SEQ ID NO: 228215 - DNA, 25 bp, probe
gatgggctgatggaaattgactcgt

SEQ ID NO: 228216 - DNA, 25 bp, probe
gatggtctatgccagaggctgaccc

SEQ ID NO: 228217 - DNA, 25 bp, probe
gatggctctgtgaagctggtgaccc

SEQ ID NO: 228218 - DNA, 25 bp, probe
gatggcgtgatatgcacctgcaacg

SEQ ID NO: 228219 - DNA, 25 bp, probe
gatggcgcttgagcaccgcatcggc

SEQ ID NO: 228220 - DNA, 25 bp, probe
gatggttctgcagacaccaagccaa

SEQ ID NO: 228221 - DNA, 25 bp, probe
gatggatacgaatatgcctacctga

SEQ ID NO: 228222 - DNA, 25 bp, probe
gatggctacagggaagcctccactg

SEQ ID NO: 228223 - DNA, 25 bp, probe
gatggtcaaggtgagttacctgctg

SEQ ID NO: 228224 - DNA, 25 bp, probe
gatggtcaagtgtgagttacctgct

SEQ ID NO: 228225 - DNA, 25 bp, probe
gatggccaagtatgagatctccgcc

SEQ ID NO: 228226 - DNA, 25 bp, probe
gatgtccttgaatggatccagcgct

SEQ ID NO: 228227 - DNA, 25 bp, probe
gatggcctctaataaactgtgtcct

SEQ ID NO: 228228 - DNA, 25 bp, probe
gatggcccaaatgtcagggttctgc

SEQ ID NO: 228229 - DNA, 25 bp, probe
gatggccgccaaagttggagttcgt

SEQ ID NO: 228230 - DNA, 25 bp, probe
gatgtccgctctgatgtctggagtt

SEQ ID NO: 228231 - DNA, 25 bp, probe
gatgtacttgactagtttacttatg

SEQ ID NO: 228232 - DNA, 25 bp, probe
gatgtacttgactagtttacttatg

SEQ ID NO: 228233 - DNA, 25 bp, probe
gatgtgatccggcatccttgagttt

SEQ ID NO: 228234 - DNA, 25 bp, probe
gatggcatgggcattacgggtgttg

SEQ ID NO: 228235 - DNA, 25 bp, probe
gatgggggcttatggggtggcatcg

SEQ ID NO: 228236 - DNA, 25 bp, probe
gatggggagcctacgggtggtaaga

SEQ ID NO: 228237 - DNA, 25 bp, probe
gatggtgagcccttgaggtgtgtct

SEQ ID NO: 228238 - DNA, 25 bp, probe
gatggtctgcatcagctttttgtat

SEQ ID NO: 228239 - DNA, 25 bp, probe
gatggcattgtgaagcctgttactt

SEQ ID NO: 228240 - DNA, 25 bp, probe
gatggacatggaggaattcgagcct

SEQ ID NO: 228241 - DNA, 25 bp, probe
gatggaatggagcttctggtgtgct

SEQ ID NO: 228242 - DNA, 25 bp, probe
gatggagaatggctattggtggtgc

SEQ ID NO: 228243 - DNA, 25 bp, probe
gatgggaattgcacagtaggatgtg

SEQ ID NO: 228244 - DNA, 25 bp, probe
gatgggaactgcaacgtcattaagt

SEQ ID NO: 228245 - DNA, 25 bp, probe
gatgggaactttaacactctagcta

SEQ ID NO: 228246 - DNA, 25 bp, probe
gatgtgggcctttgatagacccact

SEQ ID NO: 228247 - DNA, 25 bp, probe
gatgtgagagccacatcaacccacc

SEQ ID NO: 228248 - DNA, 25 bp, probe
gatggacagactcacaacctgaacc

SEQ ID NO: 228249 - DNA, 25 bp, probe
gatgtccatgaatacaacctaacgc

SEQ ID NO: 228250 - DNA, 25 bp, probe
gatggcacgagatatctaccgggcc

SEQ ID NO: 228251 - DNA, 25 bp, probe
gatggcacagtggagtccaccagtg

SEQ ID NO: 228252 - DNA, 25 bp, probe
gatgtaattgctggattctccgtcc

SEQ ID NO: 228253 - DNA, 25 bp, probe
gatggttactggagctctagctgcc

SEQ ID NO: 228254 - DNA, 25 bp, probe
gatggttactggagctctagctgcc

SEQ ID NO: 228255 - DNA, 25 bp, probe
gatggactgactatggctcgaggtc

SEQ ID NO: 228256 - DNA, 25 bp, probe
gatgaatctaccattgctacgatac

SEQ ID NO: 228257 - DNA, 25 bp, probe
gatgtttatgccaggcctagatacg

SEQ ID NO: 228258 - DNA, 25 bp, probe
gatgtttactgcacacctattacct

SEQ ID NO: 228259 - DNA, 25 bp, probe
gatggttatataatccccattaaca

SEQ ID NO: 228260 - DNA, 25 bp, probe
gatgtctgttctaagtccacttaaa

SEQ ID NO: 228261 - DNA, 25 bp, probe
gatgtctggcttaagtccttagctg

SEQ ID NO: 228262 - DNA, 25 bp, probe
gatgtcatagttgagtgcacccaag

SEQ ID NO: 228263 - DNA, 25 bp, probe
gatgtcatagttgagtgcacccaag

SEQ ID NO: 228264 - DNA, 25 bp, probe
gatggcagagaaaagccctccagaa

SEQ ID NO: 228265 - DNA, 25 bp, probe
gatggcgcagagaaaccttgaagag

SEQ ID NO: 228266 - DNA, 25 bp, probe
gatggcgctgagaagcttcggaagc

SEQ ID NO: 228267 - DNA, 25 bp, probe
gatgtggtgggtatcaggaggcagc

SEQ ID NO: 228268 - DNA, 25 bp, probe
gatgtctggagttttggggtgctgc

SEQ ID NO: 228269 - DNA, 25 bp, probe
gatgagctgggtttgtggggagttc

SEQ ID NO: 228270 - DNA, 25 bp, probe
gatggttgctgatgggattaggtat

SEQ ID NO: 228271 - DNA, 25 bp, probe
gatggatttaggcttacggtagaaa

SEQ ID NO: 228272 - DNA, 25 bp, probe
gatgtagtaaggtttttggattcaa

SEQ ID NO: 228273 - DNA, 25 bp, probe
gatgttattactgttttgggcctcc

SEQ ID NO: 228274 - DNA, 25 bp, probe
gatgcttggcttcttttagggctac

SEQ ID NO: 228275 - DNA, 25 bp, probe
gatgttttattttttagctattcag

SEQ ID NO: 228276 - DNA, 25 bp, probe
gatgtgtagtttatttgtgctttta

SEQ ID NO: 228277 - DNA, 25 bp, probe
gatgtgtttgggatactgcttattt

SEQ ID NO: 228278 - DNA, 25 bp, probe
gatgtgtgtgtcgagtctgactcta

SEQ ID NO: 228279 - DNA, 25 bp, probe
gatgattgctggtcttaactttagg

SEQ ID NO: 228280 - DNA, 25 bp, probe
gatgattgctggtcttaactttagg

SEQ ID NO: 228281 - DNA, 25 bp, probe
gatgttttccttcactttagtttca

SEQ ID NO: 228282 - DNA, 25 bp, probe
gatgttttccttgggatttatttat

SEQ ID NO: 228283 - DNA, 25 bp, probe
gatgtgtatacgtaggaattttttc

SEQ ID NO: 228284 - DNA, 25 bp, probe
gatggtgaacggcaagggtgctttc

SEQ ID NO: 228285 - DNA, 25 bp, probe
gatggtgaaaccgaagctcgactct

SEQ ID NO: 228286 - DNA, 25 bp, probe
gatggtgaaattggaagccgagatg

SEQ ID NO: 228287 - DNA, 25 bp, probe
gatggtgtaattcgacccgagaaat

SEQ ID NO: 228288 - DNA, 25 bp, probe
gatggtgtgcattctggatcccaaa

SEQ ID NO: 228289 - DNA, 25 bp, probe
gatggtccagacagaagcacagtac

SEQ ID NO: 228290 - DNA, 25 bp, probe
gatggacgctgagctgcggaaggag

SEQ ID NO: 228291 - DNA, 25 bp, probe
gatggagcagtgagcgggtctgggc

SEQ ID NO: 228292 - DNA, 25 bp, probe
gatggcagagctgtgaagccttgag

SEQ ID NO: 228293 - DNA, 25 bp, probe
gatggcagagctgtgaagccttgag

SEQ ID NO: 228294 - DNA, 25 bp, probe
gatggcagggataacacacaatgag

SEQ ID NO: 228295 - DNA, 25 bp, probe
gatggagggacacgaccaagcagct

SEQ ID NO: 228296 - DNA, 25 bp, probe
gatggagaggccagacaactgcagc

SEQ ID NO: 228297 - DNA, 25 bp, probe
gatggagggcagcgacaagccacag

SEQ ID NO: 228298 - DNA, 25 bp, probe
gatggcgtggcaggagaacagccgt

SEQ ID NO: 228299 - DNA, 25 bp, probe
gatggctctggacgtgaagtctcgg

SEQ ID NO: 228300 - DNA, 25 bp, probe
gatgtcccaatcctggaggtcatcc

SEQ ID NO: 228301 - DNA, 25 bp, probe
gatgttacaacgggcaggagcctcc

SEQ ID NO: 228302 - DNA, 25 bp, probe
gatgaactacgtggagcacgacctc

SEQ ID NO: 228303 - DNA, 25 bp, probe
gatgatacaagtagggccaacccct

SEQ ID NO: 228304 - DNA, 25 bp, probe
gatgatacaagtagggccaacccct

SEQ ID NO: 228305 - DNA, 25 bp, probe
gatgttccagggggtcaaatccatc

SEQ ID NO: 228306 - DNA, 25 bp, probe
gatggctctaagggctataaattac

SEQ ID NO: 228307 - DNA, 25 bp, probe
gatgttctcttggcatgctaaatca

SEQ ID NO: 228308 - DNA, 25 bp, probe
gatgtttcattggtccaggagctcc

SEQ ID NO: 228309 - DNA, 25 bp, probe
gatgtttcattggtccaggagctcc

SEQ ID NO: 228310 - DNA, 25 bp, probe
gatggttcagtgcttcgaactattc

SEQ ID NO: 228311 - DNA, 25 bp, probe
gatgttgcaagtcgttcctttttct

SEQ ID NO: 228312 - DNA, 25 bp, probe
ggattcaaatttacactggttagct

SEQ ID NO: 228313 - DNA, 25 bp, probe
gaggcctgaagcattactggttcac

SEQ ID NO: 228314 - DNA, 25 bp, probe
gaggcctgaagcattactggttcac

SEQ ID NO: 228315 - DNA, 25 bp, probe
gaggcctacacgaagatttgtgatc

SEQ ID NO: 228316 - DNA, 25 bp, probe
gaggcctacgcgaaaatctgtgacc

SEQ ID NO: 228317 - DNA, 25 bp, probe
gaggcctacgcgaaaatctgtgacc

SEQ ID NO: 228318 - DNA, 25 bp, probe
gaggcctacgcgaaaatctgtgacc

SEQ ID NO: 228319 - DNA, 25 bp, probe
gaggcctacgcgaaaatctgtgacc

SEQ ID NO: 228320 - DNA, 25 bp, probe
gaggcctacgcgaaaatctgtgacc

SEQ ID NO: 228321 - DNA, 25 bp, probe
gatggctttcgacagagatggtgag

SEQ ID NO: 228322 - DNA, 25 bp, probe
gatggctttcgacagagatggtgag

SEQ ID NO: 228323 - DNA, 25 bp, probe
gatggctttcgacagagatggtgag

SEQ ID NO: 228324 - DNA, 25 bp, probe
gatggctttcgacagagatggtgag

SEQ ID NO: 228325 - DNA, 25 bp, probe
gatggcggctctcgccaaaaggaag

SEQ ID NO: 228326 - DNA, 25 bp, probe
gatggcccttgggagacagatgggt

SEQ ID NO: 228327 - DNA, 25 bp, probe
gaggccacttggtagcaagaatggc

SEQ ID NO: 228328 - DNA, 25 bp, probe
gatggccatttggaaacacgatgtg

SEQ ID NO: 228329 - DNA, 25 bp, probe
gatggcactattgaattcacgagca

SEQ ID NO: 228330 - DNA, 25 bp, probe
gatggctgtgttgatcttcaccgac

SEQ ID NO: 228331 - DNA, 25 bp, probe
gatggctgtggtatactcactgggt

SEQ ID NO: 228332 - DNA, 25 bp, probe
gatgttaattgagagccctgggtcc

SEQ ID NO: 228333 - DNA, 25 bp, probe
gatgttaattgagagccctgggtcc

SEQ ID NO: 228334 - DNA, 25 bp, probe
gatgtgttttgtgaccattgtcctg

SEQ ID NO: 228335 - DNA, 25 bp, probe
gatgttgttttgcaagatgtttgtg

SEQ ID NO: 228336 - DNA, 25 bp, probe
gatgatgctgtttggtaaaattttc

SEQ ID NO: 228337 - DNA, 25 bp, probe
gatgatgctgtttggtaaaattttc

SEQ ID NO: 228338 - DNA, 25 bp, probe
gatggcgcatgcatgggaggaattc

SEQ ID NO: 228339 - DNA, 25 bp, probe
gatggtgccctaggtggaatccaga

SEQ ID NO: 228340 - DNA, 25 bp, probe
gatggtgccctaggtggaatccaga

SEQ ID NO: 228341 - DNA, 25 bp, probe
gatggtgccctaggtggaatccaga

SEQ ID NO: 228342 - DNA, 25 bp, probe
gatggtctcattccgtggacgaggt

SEQ ID NO: 228343 - DNA, 25 bp, probe
gatggatgtcaaaagtggtggaaag

SEQ ID NO: 228344 - DNA, 25 bp, probe
gatggatgtcaaaagtggtggaaag

SEQ ID NO: 228345 - DNA, 25 bp, probe
gatggagccagttgggtgtggcaga

SEQ ID NO: 228346 - DNA, 25 bp, probe
gatggcagacgcctggtgtcaggag

SEQ ID NO: 228347 - DNA, 25 bp, probe
gatggcgcaccaagcagtgctgtgg

SEQ ID NO: 228348 - DNA, 25 bp, probe
gatggcgcaccaagcagtgctgtgg

SEQ ID NO: 228349 - DNA, 25 bp, probe
gatggcgcaatttcatggcatggag

SEQ ID NO: 228350 - DNA, 25 bp, probe
gatgatggcatatgataagctggtt

SEQ ID NO: 228351 - DNA, 25 bp, probe
gatgtggaggtacaggcagatcttc

SEQ ID NO: 228352 - DNA, 25 bp, probe
gatgggtggccactgtacagatatt

SEQ ID NO: 228353 - DNA, 25 bp, probe
gatggttcctacttaaatgatttca

SEQ ID NO: 228354 - DNA, 25 bp, probe
gatggttcctacttaaatgatttca

SEQ ID NO: 228355 - DNA, 25 bp, probe
gatggtgtcatttagtaaggatttt

SEQ ID NO: 228356 - DNA, 25 bp, probe
gatgggtcttgcagtacatttgttt

SEQ ID NO: 228357 - DNA, 25 bp, probe
gatgtggccattattacagtaattt

SEQ ID NO: 228358 - DNA, 25 bp, probe
gatgtgtcccaatttcaagtatttt

SEQ ID NO: 228359 - DNA, 25 bp, probe
gatggtcactccgattctgagtgcc

SEQ ID NO: 228360 - DNA, 25 bp, probe
gatggtcactccgattctgagtgcc

SEQ ID NO: 228361 - DNA, 25 bp, probe
gatggattctcggcattaactcctg

SEQ ID NO: 228362 - DNA, 25 bp, probe
gatgtggttgcatcctaactccatg

SEQ ID NO: 228363 - DNA, 25 bp, probe
gatgggcatttaggtagactggata

SEQ ID NO: 228364 - DNA, 25 bp, probe
gatgtccttctaggctcaacagaat

SEQ ID NO: 228365 - DNA, 25 bp, probe
gatgtccttctaggctcaacagaat

SEQ ID NO: 228366 - DNA, 25 bp, probe
gatggagcttctaatgtcattcaaa

SEQ ID NO: 228367 - DNA, 25 bp, probe
gatggagcttctaatgtcattcaaa

SEQ ID NO: 228368 - DNA, 25 bp, probe
gatggagctctgcgatgctttgcat

SEQ ID NO: 228369 - DNA, 25 bp, probe
gatggcagtctgtgtcttgctatgg

SEQ ID NO: 228370 - DNA, 25 bp, probe
gatgaggtttgacttttaggcccgt

SEQ ID NO: 228371 - DNA, 25 bp, probe
gatggtttccacatttagatcctgg

SEQ ID NO: 228372 - DNA, 25 bp, probe
gatggtattcaggctttctcatgtc

SEQ ID NO: 228373 - DNA, 25 bp, probe
gatggccattgagcggtgtattgga

SEQ ID NO: 228374 - DNA, 25 bp, probe
gatggcaattgaatccctttttgat

SEQ ID NO: 228375 - DNA, 25 bp, probe
gatcggaagttcgcatatattatga

SEQ ID NO: 228376 - DNA, 25 bp, probe
gatgaggaagtaagggtttagcaag

SEQ ID NO: 228377 - DNA, 25 bp, probe
gatggggaattgatggttagcgagg

SEQ ID NO: 228378 - DNA, 25 bp, probe
gatggggcaaatatacacaggcctg

SEQ ID NO: 228379 - DNA, 25 bp, probe
gatggggaccagctaacactggctg

SEQ ID NO: 228380 - DNA, 25 bp, probe
gatggggaccagctaacactggctg

SEQ ID NO: 228381 - DNA, 25 bp, probe
gatgggaacgctttgtccacagtga

SEQ ID NO: 228382 - DNA, 25 bp, probe
gatgggaatggcttatccttcatgt

SEQ ID NO: 228383 - DNA, 25 bp, probe
gatggaagaggcctccatcttcgtg

SEQ ID NO: 228384 - DNA, 25 bp, probe
gatggaagaggacctcctccaaggg

SEQ ID NO: 228385 - DNA, 25 bp, probe
gatggaaacagggccacttcagagg

SEQ ID NO: 228386 - DNA, 25 bp, probe
gatggaaacagggccacttcagagg

SEQ ID NO: 228387 - DNA, 25 bp, probe
gatgtaaacaggttacccagctggg

SEQ ID NO: 228388 - DNA, 25 bp, probe
gatgttaacaactcagccatctggc

SEQ ID NO: 228389 - DNA, 25 bp, probe
gatgtttacaaaggactctgagcca

SEQ ID NO: 228390 - DNA, 25 bp, probe
gatgtgattaaagcggtagaggaag

SEQ ID NO: 228391 - DNA, 25 bp, probe
gatggggcccagacggtacatgggg

SEQ ID NO: 228392 - DNA, 25 bp, probe
gatggggcccagacggtacatgggg

SEQ ID NO: 228393 - DNA, 25 bp, probe
gatggcgccacggtgagcggaatgg

SEQ ID NO: 228394 - DNA, 25 bp, probe
gatggcgccacggtgagcggaatgg

SEQ ID NO: 228395 - DNA, 25 bp, probe
gatggccctcacgtatgaggagaag

SEQ ID NO: 228396 - DNA, 25 bp, probe
gatggaccaacgatcctatgagaga

SEQ ID NO: 228397 - DNA, 25 bp, probe
gatgggctgatagatatccttggca

SEQ ID NO: 228398 - DNA, 25 bp, probe
gatggcttatgacagatttgtggca

SEQ ID NO: 228399 - DNA, 25 bp, probe
gatggcttatgacagatttgtggca

SEQ ID NO: 228400 - DNA, 25 bp, probe
gatggctaagacggtaagggcagag

SEQ ID NO: 228401 - DNA, 25 bp, probe
gatggctaagacggtaagggcagag

SEQ ID NO: 228402 - DNA, 25 bp, probe
gatggcgagtggtgctgaagggaca

SEQ ID NO: 228403 - DNA, 25 bp, probe
gatggggtgagaagtacagggcaga

SEQ ID NO: 228404 - DNA, 25 bp, probe
gatggcgaggagattgaggtccaga

SEQ ID NO: 228405 - DNA, 25 bp, probe
gatggctggggaacaatgttcacag

SEQ ID NO: 228406 - DNA, 25 bp, probe
gatggctgatgcccagaacatttca

SEQ ID NO: 228407 - DNA, 25 bp, probe
gatggctatgagtatgcatacctta

SEQ ID NO: 228408 - DNA, 25 bp, probe
gatggcttcatgatgtacctgttgt

SEQ ID NO: 228409 - DNA, 25 bp, probe
gatggtgtttgtcatctgctggatg

SEQ ID NO: 228410 - DNA, 25 bp, probe
gatggtgcttattggctgccatggc

SEQ ID NO: 228411 - DNA, 25 bp, probe
gatggctctgtgtagggcctgagct

SEQ ID NO: 228412 - DNA, 25 bp, probe
gatggtgttgatggatggctctgtg

SEQ ID NO: 228413 - DNA, 25 bp, probe
gatgggatcatagtgcttgcagctg

SEQ ID NO: 228414 - DNA, 25 bp, probe
gatggatataatgtatgcagcagtt

SEQ ID NO: 228415 - DNA, 25 bp, probe
gatggctgaagaatgtagacaggta

SEQ ID NO: 228416 - DNA, 25 bp, probe
gatggcgatgtgttatagacggtgc

SEQ ID NO: 228417 - DNA, 25 bp, probe
gatggagatgctatcaagaagaagt

SEQ ID NO: 228418 - DNA, 25 bp, probe
gatggagcctatcaggaagataatg

SEQ ID NO: 228419 - DNA, 25 bp, probe
gatggagccataggactgacagcat

SEQ ID NO: 228420 - DNA, 25 bp, probe
gatggactgccagacaggcagacat

SEQ ID NO: 228421 - DNA, 25 bp, probe
gatggtggccatgaatatgcagact

SEQ ID NO: 228422 - DNA, 25 bp, probe
gatggttccatcaatacctgatcca

SEQ ID NO: 228423 - DNA, 25 bp, probe
gatggttccatcaatacctgatcca

SEQ ID NO: 228424 - DNA, 25 bp, probe
gatggatttatggaactgtgtcaaa

SEQ ID NO: 228425 - DNA, 25 bp, probe
gatggtcgatcacaactggggagga

SEQ ID NO: 228426 - DNA, 25 bp, probe
gatggtcagtctctactgggacatg

SEQ ID NO: 228427 - DNA, 25 bp, probe
gatggacagcctctacttccatcag

SEQ ID NO: 228428 - DNA, 25 bp, probe
gatggacagcttctttgcccaaaat

SEQ ID NO: 228429 - DNA, 25 bp, probe
gatggacagcttctttgcccaaaat

SEQ ID NO: 228430 - DNA, 25 bp, probe
gattttcttggtatctcccataata

SEQ ID NO: 228431 - DNA, 25 bp, probe
gattaatctaggattcctttgagta

SEQ ID NO: 228432 - DNA, 25 bp, probe
gatgttactaacaatgtccactacg

SEQ ID NO: 228433 - DNA, 25 bp, probe
gatggttaaacatggcacctactca

SEQ ID NO: 228434 - DNA, 25 bp, probe
gatggaataaaaaggcccgtgtaat

SEQ ID NO: 228435 - DNA, 25 bp, probe
gatgtttaacacaggcccagtttca

SEQ ID NO: 228436 - DNA, 25 bp, probe
gatgtttccaagatgtcccattgat

SEQ ID NO: 228437 - DNA, 25 bp, probe
gatgtttccaagatgtcccattgat

SEQ ID NO: 228438 - DNA, 25 bp, probe
gatgtgtggctatttttcctttctc

SEQ ID NO: 228439 - DNA, 25 bp, probe
gatgtgtttgcttttggccttactc

SEQ ID NO: 228440 - DNA, 25 bp, probe
gatgttgggcagtgggcctaaagca

SEQ ID NO: 228441 - DNA, 25 bp, probe
gatgcaggggtgtgaggcccagggt

SEQ ID NO: 228442 - DNA, 25 bp, probe
gatggtactgtgtgtggcccaggaa

SEQ ID NO: 228443 - DNA, 25 bp, probe
gatggaaatagacgggctcctggga

SEQ ID NO: 228444 - DNA, 25 bp, probe
gatggagcaaagtgagggccgagtg

SEQ ID NO: 228445 - DNA, 25 bp, probe
gatggagcaaagtgagggccgagtg

SEQ ID NO: 228446 - DNA, 25 bp, probe
gatggagcaaagtgagggccgagtg

SEQ ID NO: 228447 - DNA, 25 bp, probe
gatggactctaatgcagggacctga

SEQ ID NO: 228448 - DNA, 25 bp, probe
gatggactctaatgcagggacctga

SEQ ID NO: 228449 - DNA, 25 bp, probe
gatgtgaccgaattgctgtaacctc

SEQ ID NO: 228450 - DNA, 25 bp, probe
gatggacatcgaatcagtttacctt

SEQ ID NO: 228451 - DNA, 25 bp, probe
gatggacatcgaatcagtttacctt

SEQ ID NO: 228452 - DNA, 25 bp, probe
gatgatggtagatatgtttaccttg

SEQ ID NO: 228453 - DNA, 25 bp, probe
gatggtgttatcttttgaattcttg

SEQ ID NO: 228454 - DNA, 25 bp, probe
gatggggtgtctgtgttatttgtgg

SEQ ID NO: 228455 - DNA, 25 bp, probe
gatggaggtgtgtaggttaggggga

SEQ ID NO: 228456 - DNA, 25 bp, probe
gatggaggtgtccaagttgctgccg

SEQ ID NO: 228457 - DNA, 25 bp, probe
gatgggcgagtcccagatacttgca

SEQ ID NO: 228458 - DNA, 25 bp, probe
gatggttggtgtccatgaggtggaa

SEQ ID NO: 228459 - DNA, 25 bp, probe
gatggactggtgtcctatggagata

SEQ ID NO: 228460 - DNA, 25 bp, probe
gatgcattctggccaccatattatg

SEQ ID NO: 228461 - DNA, 25 bp, probe
gatgcattctggccaccatattatg

SEQ ID NO: 228462 - DNA, 25 bp, probe
gatctttatggctactttcttacat

SEQ ID NO: 228463 - DNA, 25 bp, probe
gatctttatggctactttcttacat

SEQ ID NO: 228464 - DNA, 25 bp, probe
gatgttttctgctactactttgtca

SEQ ID NO: 228465 - DNA, 25 bp, probe
gatgttttctgctactactttgtca

SEQ ID NO: 228466 - DNA, 25 bp, probe
gatgtttttcacttgcattgtcatt

SEQ ID NO: 228467 - DNA, 25 bp, probe
gatgtcattgcttaaatatagtctt

SEQ ID NO: 228468 - DNA, 25 bp, probe
gatgtctcggcattaatccgtttat

SEQ ID NO: 228469 - DNA, 25 bp, probe
gatgtctcggcattaatccgtttat

SEQ ID NO: 228470 - DNA, 25 bp, probe
gatgatccttgccaaacgttttttc

SEQ ID NO: 228471 - DNA, 25 bp, probe
gatgtgccattccataatggcttcc

SEQ ID NO: 228472 - DNA, 25 bp, probe
gatgtcatcatgggcattactttcc

SEQ ID NO: 228473 - DNA, 25 bp, probe
gatgtgcaatgaagcatctcaattg

SEQ ID NO: 228474 - DNA, 25 bp, probe
gatgtgaagatggcagacttcggtg

SEQ ID NO: 228475 - DNA, 25 bp, probe
gatgtgaagatggcagacttcggtg

SEQ ID NO: 228476 - DNA, 25 bp, probe
gatggatagagcgccttcagtgtac

SEQ ID NO: 228477 - DNA, 25 bp, probe
gatggaagaaaggttcatgtctgca

SEQ ID NO: 228478 - DNA, 25 bp, probe
gatggaaaatcacttgtttgcccca

SEQ ID NO: 228479 - DNA, 25 bp, probe
gatggacagaacttgttttggcggc

SEQ ID NO: 228480 - DNA, 25 bp, probe
gatgtgtcacatgttgttaagggag

SEQ ID NO: 228481 - DNA, 25 bp, probe
gatgtgtctaccttctctgaaggtg

SEQ ID NO: 228482 - DNA, 25 bp, probe
gatgtctaaaagtctgtgagggttt

SEQ ID NO: 228483 - DNA, 25 bp, probe
gatgtccctaaggtagaggtgttgg

SEQ ID NO: 228484 - DNA, 25 bp, probe
gatgcttcccaagaaatagttgatg

SEQ ID NO: 228485 - DNA, 25 bp, probe
gatgatgcttcccaagaaatagttg

SEQ ID NO: 228486 - DNA, 25 bp, probe
gatgtgttcacgaagaggaaaggac

SEQ ID NO: 228487 - DNA, 25 bp, probe
gatgtacacgggcaggaaaggaaaa

SEQ ID NO: 228488 - DNA, 25 bp, probe
gatcaaaagggctatgggaagggca

SEQ ID NO: 228489 - DNA, 25 bp, probe
gatccccgtggattctgctaaggga

SEQ ID NO: 228490 - DNA, 25 bp, probe
gtccgccgaggtgctcggtggagtc

SEQ ID NO: 228491 - DNA, 25 bp, probe
gatgccccaaggaattccgtgtatt

SEQ ID NO: 228492 - DNA, 25 bp, probe
gatgccccaaggaattccgtgtatt

SEQ ID NO: 228493 - DNA, 25 bp, probe
gatgcagcaacctggatttggcttt

SEQ ID NO: 228494 - DNA, 25 bp, probe
gatgcacaactataactatggtggt

SEQ ID NO: 228495 - DNA, 25 bp, probe
gatgtcacttcaggtgaccatggtg

SEQ ID NO: 228496 - DNA, 25 bp, probe
gatgtcaagaatggcttctcatggg

SEQ ID NO: 228497 - DNA, 25 bp, probe
gatggcaagaacgtcgatgctggga

SEQ ID NO: 228498 - DNA, 25 bp, probe
gatggcaagaacgtcgatgctggga

SEQ ID NO: 228499 - DNA, 25 bp, probe
gatggcaatggtagcctgtggggat

SEQ ID NO: 228500 - DNA, 25 bp, probe
gatggaatggctggagcttggctgc

SEQ ID NO: 228501 - DNA, 25 bp, probe
gatggactccattacattgtgctgc

SEQ ID NO: 228502 - DNA, 25 bp, probe
gatggatcaccattatattttgaaa

SEQ ID NO: 228503 - DNA, 25 bp, probe
gatggacaaatgttttcctgagaaa

SEQ ID NO: 228504 - DNA, 25 bp, probe
gatgggtcggagattcctgatgaag

SEQ ID NO: 228505 - DNA, 25 bp, probe
gatggtgtgggtacctcacccagat

SEQ ID NO: 228506 - DNA, 25 bp, probe
gatggtgtgggtacctcacccagat

SEQ ID NO: 228507 - DNA, 25 bp, probe
gatgggtgaggaggccagacctgcc

SEQ ID NO: 228508 - DNA, 25 bp, probe
gatgggtagatgtggcaggcatgtc

SEQ ID NO: 228509 - DNA, 25 bp, probe
gatggtgatggtgtgcacgtttcat

SEQ ID NO: 228510 - DNA, 25 bp, probe
gatggaggctgtatcaggatttata

SEQ ID NO: 228511 - DNA, 25 bp, probe
gatgagacctgtacccgattttaca

SEQ ID NO: 228512 - DNA, 25 bp, probe
gatgaaccctacactgactttgatg

SEQ ID NO: 228513 - DNA, 25 bp, probe
gatgaaccctacactgactttgatg

SEQ ID NO: 228514 - DNA, 25 bp, probe
gatgatacctctttgtgtgaatttc

SEQ ID NO: 228515 - DNA, 25 bp, probe
gatgtagaatccctgttgttttgcc

SEQ ID NO: 228516 - DNA, 25 bp, probe
gatggaggtcacgattctgtcattt

SEQ ID NO: 228517 - DNA, 25 bp, probe
gatggatggaatcttcactactcaa

SEQ ID NO: 228518 - DNA, 25 bp, probe
gatggatggacacatactggattca

SEQ ID NO: 228519 - DNA, 25 bp, probe
gatggagtgatcaaaagcgtattat

SEQ ID NO: 228520 - DNA, 25 bp, probe
gatggacatatcaagatcgcggatt

SEQ ID NO: 228521 - DNA, 25 bp, probe
gatggtatcatcaagctcaacgttc

SEQ ID NO: 228522 - DNA, 25 bp, probe
gatggatgcatcacactcaaggaca

SEQ ID NO: 228523 - DNA, 25 bp, probe
gatggtgctgtgacccagaataaaa

SEQ ID NO: 228524 - DNA, 25 bp, probe
gatgtgctctgtatccagacacact

SEQ ID NO: 228525 - DNA, 25 bp, probe
gatgtgtcttcaatgtcaacagatc

SEQ ID NO: 228526 - DNA, 25 bp, probe
gatgtgtcctaacactgcagacagc

SEQ ID NO: 228527 - DNA, 25 bp, probe
gatgttccagaagacgggcacatgg

SEQ ID NO: 228528 - DNA, 25 bp, probe
gatgtcggaagagttcagggaaggc

SEQ ID NO: 228529 - DNA, 25 bp, probe
gatggggaaactaaggtcagaaggg

SEQ ID NO: 228530 - DNA, 25 bp, probe
gatggggcaaacttcattgttaacc

SEQ ID NO: 228531 - DNA, 25 bp, probe
gatggggaacaagcttgtgcaagaa

SEQ ID NO: 228532 - DNA, 25 bp, probe
gatggagaagacaccttgtgctcat

SEQ ID NO: 228533 - DNA, 25 bp, probe
gatagagaaccctgcagtgtccagc

SEQ ID NO: 228534 - DNA, 25 bp, probe
gatagagaaccctgcagtgtccagc

SEQ ID NO: 228535 - DNA, 25 bp, probe
gatggaggcaacgaagagttcaccc

SEQ ID NO: 228536 - DNA, 25 bp, probe
gatggtcccaaatgactgtaagcca

SEQ ID NO: 228537 - DNA, 25 bp, probe
gatggtcccaaatgactgtaagcca

SEQ ID NO: 228538 - DNA, 25 bp, probe
gatggtcacacagagatacgcaaac

SEQ ID NO: 228539 - DNA, 25 bp, probe
gatggagcaagagagtggtcagaac

SEQ ID NO: 228540 - DNA, 25 bp, probe
gatggagaaaaagttctagttgctt

SEQ ID NO: 228541 - DNA, 25 bp, probe
gatggagaaccacagccaagttcat

SEQ ID NO: 228542 - DNA, 25 bp, probe
gatgggcaacctcaggaagttacta

SEQ ID NO: 228543 - DNA, 25 bp, probe
gatggggagcggagtgacagtaagc

SEQ ID NO: 228544 - DNA, 25 bp, probe
gatggaggagctgggggatcctggg

SEQ ID NO: 228545 - DNA, 25 bp, probe
gatggaggtgctgcgagagcacaag

SEQ ID NO: 228546 - DNA, 25 bp, probe
gatgtcagggctttcaagcagagca

SEQ ID NO: 228547 - DNA, 25 bp, probe
gatgtttggtgatctagacagcttc

SEQ ID NO: 228548 - DNA, 25 bp, probe
gatgtttggtgatctagacagcttc

SEQ ID NO: 228549 - DNA, 25 bp, probe
gatgtgtatttaaccagtcactatt

SEQ ID NO: 228550 - DNA, 25 bp, probe
gatgtgtatttaaccagtcactatt

SEQ ID NO: 228551 - DNA, 25 bp, probe
gatgatgtacttctctcagtacttt

SEQ ID NO: 228552 - DNA, 25 bp, probe
gatgggagtcatcaatcaacctttt

SEQ ID NO: 228553 - DNA, 25 bp, probe
gatgggattcagcaatctgaggaat

SEQ ID NO: 228554 - DNA, 25 bp, probe
gatgggattcagcaatctgaggaat

SEQ ID NO: 228555 - DNA, 25 bp, probe
gatgggattatgcacttcccaattg

SEQ ID NO: 228556 - DNA, 25 bp, probe
gatggtgtctgtgacatttcctgtt

SEQ ID NO: 228557 - DNA, 25 bp, probe
gatggtgtctgtgacatttcctgtt

SEQ ID NO: 228558 - DNA, 25 bp, probe
gatgggtctgattaatagcgttgtt

SEQ ID NO: 228559 - DNA, 25 bp, probe
gatgtgtgcttgatactatgcgttt

SEQ ID NO: 228560 - DNA, 25 bp, probe
gatgattgctcgattgtttggtttt

SEQ ID NO: 228561 - DNA, 25 bp, probe
gatgattgctcgattgtttggtttt

SEQ ID NO: 228562 - DNA, 25 bp, probe
gatggtgctattttgtttgttttgt

SEQ ID NO: 228563 - DNA, 25 bp, probe
gatggtgcaatatctttgttttttt

SEQ ID NO: 228564 - DNA, 25 bp, probe
gatggtcatattattcttcttcttt

SEQ ID NO: 228565 - DNA, 25 bp, probe
gatggttatgttacttgtcttcatt

SEQ ID NO: 228566 - DNA, 25 bp, probe
gatgggtgatgtctttccttatgtt

SEQ ID NO: 228567 - DNA, 25 bp, probe
gatggggagtcggttagtcattgat

SEQ ID NO: 228568 - DNA, 25 bp, probe
gatgggggaaggaatcagcctgtgt

SEQ ID NO: 228569 - DNA, 25 bp, probe
gatgggactactggaatcaggcttg

SEQ ID NO: 228570 - DNA, 25 bp, probe
gatggagtctgacgcaggaaccttc

SEQ ID NO: 228571 - DNA, 25 bp, probe
gattagactgactggattccttcct

SEQ ID NO: 228572 - DNA, 25 bp, probe
gatgtagaaggaaggattctttcac

SEQ ID NO: 228573 - DNA, 25 bp, probe
gattaaaattctcacctttcacaga

SEQ ID NO: 228574 - DNA, 25 bp, probe
gatgtaatattaccaacctttaaag

SEQ ID NO: 228575 - DNA, 25 bp, probe
gatgtaaaaaccttcccataaaatg

SEQ ID NO: 228576 - DNA, 25 bp, probe
gatgaaaacagagacccgcttaaag

SEQ ID NO: 228577 - DNA, 25 bp, probe
gatggtacaacaaacccctcaagaa

SEQ ID NO: 228578 - DNA, 25 bp, probe
gatggttcaagacatgctctctcca

SEQ ID NO: 228579 - DNA, 25 bp, probe
gatggtacaggaaagctcagctact

SEQ ID NO: 228580 - DNA, 25 bp, probe
gatggtacagggtgtgacaacatga

SEQ ID NO: 228581 - DNA, 25 bp, probe
gatgtggcacagctggagtataaac

SEQ ID NO: 228582 - DNA, 25 bp, probe
gatggtgtacctggtgattgtaaaa

SEQ ID NO: 228583 - DNA, 25 bp, probe
gatggtgtacctggtgattgtaaaa

SEQ ID NO: 228584 - DNA, 25 bp, probe
gatgggtactgggtaagtcaacaca

SEQ ID NO: 228585 - DNA, 25 bp, probe
gatgggtactgggtaagtcaacaca

SEQ ID NO: 228586 - DNA, 25 bp, probe
gatgggtttgacattcatttacaga

SEQ ID NO: 228587 - DNA, 25 bp, probe
gatgtgagctttttcttctgttaaa

SEQ ID NO: 228588 - DNA, 25 bp, probe
gatgtggctcttcgttgtttagaac

SEQ ID NO: 228589 - DNA, 25 bp, probe
gatgtgtcattgtgttcatttagag

SEQ ID NO: 228590 - DNA, 25 bp, probe
gatgtgtgcaagtacgacttcgtgg

SEQ ID NO: 228591 - DNA, 25 bp, probe
gatgtgtgcaagtacgacttcgtgg

SEQ ID NO: 228592 - DNA, 25 bp, probe
gatgtgtgcaagtacgacttcgtgg

SEQ ID NO: 228593 - DNA, 25 bp, probe
gatgtgtgcaagtacgacttcgtgg

SEQ ID NO: 228594 - DNA, 25 bp, probe
gatgtgtgcaagtacgacttcgtgg

SEQ ID NO: 228595 - DNA, 25 bp, probe
gatggtggaatatggtttgtgaccc

SEQ ID NO: 228596 - DNA, 25 bp, probe
gatgttggaatgtacattttgtgaa

SEQ ID NO: 228597 - DNA, 25 bp, probe
gatgggctactatctgattcagatg

SEQ ID NO: 228598 - DNA, 25 bp, probe
gatgggctactatctgattcagatg

SEQ ID NO: 228599 - DNA, 25 bp, probe
gatgtggaacattacagtccaatgg

SEQ ID NO: 228600 - DNA, 25 bp, probe
gatggtaatcacagcattgctctcg

SEQ ID NO: 228601 - DNA, 25 bp, probe
gatgtgtaccatactgtgtgctcca

SEQ ID NO: 228602 - DNA, 25 bp, probe
gatgtcttccagatttgctctgcat

SEQ ID NO: 228603 - DNA, 25 bp, probe
gatgtcttccagatttgctctgcat

SEQ ID NO: 228604 - DNA, 25 bp, probe
gatggttcgagcagtgggtgatgag

SEQ ID NO: 228605 - DNA, 25 bp, probe
gatggtgatgatcatggggggcaag

SEQ ID NO: 228606 - DNA, 25 bp, probe
gatggtgatgatcatggggggcaag

SEQ ID NO: 228607 - DNA, 25 bp, probe
gatggatgtgagcctggtgggcggc

SEQ ID NO: 228608 - DNA, 25 bp, probe
gatggatgtgagcctggtgggcggc

SEQ ID NO: 228609 - DNA, 25 bp, probe
gatggtgtgactcagtatgctctgc

SEQ ID NO: 228610 - DNA, 25 bp, probe
gatggtggtcatgtgccatgctctc

SEQ ID NO: 228611 - DNA, 25 bp, probe
gatggtggtcatgtgccatgctctc

SEQ ID NO: 228612 - DNA, 25 bp, probe
gatggtgggcatgtatgcctcctcc

SEQ ID NO: 228613 - DNA, 25 bp, probe
gatggtgggcatgtatgcctcctcc

SEQ ID NO: 228614 - DNA, 25 bp, probe
gatggtaggatccttctgtgtctgc

SEQ ID NO: 228615 - DNA, 25 bp, probe
gatggtaggatccttctgtgtctgc

SEQ ID NO: 228616 - DNA, 25 bp, probe
gatgggaggatcacttgaggccaag

SEQ ID NO: 228617 - DNA, 25 bp, probe
gatggaggaagcgctgctgggcgcc

SEQ ID NO: 228618 - DNA, 25 bp, probe
gatggaggcagacgctgccgagggg

SEQ ID NO: 228619 - DNA, 25 bp, probe
gatgatgggagagctctggcagatg

SEQ ID NO: 228620 - DNA, 25 bp, probe
gatgaggaagtccctgatcggcttt

SEQ ID NO: 228621 - DNA, 25 bp, probe
gatgaggtcagtgggcttaggcctg

SEQ ID NO: 228622 - DNA, 25 bp, probe
gatgtggtcttgggtggagcaactg

SEQ ID NO: 228623 - DNA, 25 bp, probe
gatgtctgcttcgagggcaggaacc

SEQ ID NO: 228624 - DNA, 25 bp, probe
gatgtctgcttcgagggcaggaacc

SEQ ID NO: 228625 - DNA, 25 bp, probe
gatgatagcttcaaggaatacaact

SEQ ID NO: 228626 - DNA, 25 bp, probe
gatgatacattccaagtcttcaaat

SEQ ID NO: 228627 - DNA, 25 bp, probe
gatgatacattccaagtcttcaaat

SEQ ID NO: 228628 - DNA, 25 bp, probe
gatgtgacattctaaatcttgggag

SEQ ID NO: 228629 - DNA, 25 bp, probe
gatgtggacctagagagtgagaagt

SEQ ID NO: 228630 - DNA, 25 bp, probe
gatgtggtccttaagatgaggaagc

SEQ ID NO: 228631 - DNA, 25 bp, probe
gatgtggagctttctgaatagggag

SEQ ID NO: 228632 - DNA, 25 bp, probe
gatgggagcctgtatgctaaggtga

SEQ ID NO: 228633 - DNA, 25 bp, probe
gatggttcctgaactgtcaggtatc

SEQ ID NO: 228634 - DNA, 25 bp, probe
gatgacttcctaacactaggtacaa

SEQ ID NO: 228635 - DNA, 25 bp, probe
gatgtctctaaagcactaccgattc

SEQ ID NO: 228636 - DNA, 25 bp, probe
gatgagtgcaaaaaagcccacgtcc

SEQ ID NO: 228637 - DNA, 25 bp, probe
gatgtacacaaataactgacttcca

SEQ ID NO: 228638 - DNA, 25 bp, probe
gatgtaacctggaaactatgcttta

SEQ ID NO: 228639 - DNA, 25 bp, probe
gatgtagacttggaacaaagctgtt

SEQ ID NO: 228640 - DNA, 25 bp, probe
gatgtagacttggaacaaagctgtt

SEQ ID NO: 228641 - DNA, 25 bp, probe
gatgggcctgtggaagcgatggtgg

SEQ ID NO: 228642 - DNA, 25 bp, probe
gatggggtctcagagcgagagctgc

SEQ ID NO: 228643 - DNA, 25 bp, probe
gatggggcttcagtagcagccactc

SEQ ID NO: 228644 - DNA, 25 bp, probe
gatggggcttcagtagcagccactc

SEQ ID NO: 228645 - DNA, 25 bp, probe
gatgtgggttgagaccagcactctg

SEQ ID NO: 228646 - DNA, 25 bp, probe
gatgtgaggtttccactatcaatgc

SEQ ID NO: 228647 - DNA, 25 bp, probe
gatgtcaggaatgggatctatcctc

SEQ ID NO: 228648 - DNA, 25 bp, probe
gatgtaggagtctctctaccactgg

SEQ ID NO: 228649 - DNA, 25 bp, probe
gatgcaaataactccttcaccaggc

SEQ ID NO: 228650 - DNA, 25 bp, probe
gatgcaaataactccttcaccaggc

SEQ ID NO: 228651 - DNA, 25 bp, probe
gatgaagaatttacagctcagacta

SEQ ID NO: 228652 - DNA, 25 bp, probe
gatgtagccaagttcacatcaagtc

SEQ ID NO: 228653 - DNA, 25 bp, probe
gatgtagttcttttcatgcaagtat

SEQ ID NO: 228654 - DNA, 25 bp, probe
gatgggtttttagtaattgacaaat

SEQ ID NO: 228655 - DNA, 25 bp, probe
gatggtgttctgtaaatatacgaaa

SEQ ID NO: 228656 - DNA, 25 bp, probe
gatggtgactctttttatagcgaca

SEQ ID NO: 228657 - DNA, 25 bp, probe
gatggtactgttattcataagtcat

SEQ ID NO: 228658 - DNA, 25 bp, probe
gatgcagtacggtttattagagata

SEQ ID NO: 228659 - DNA, 25 bp, probe
gatgcagtacggtttattagagata

SEQ ID NO: 228660 - DNA, 25 bp, probe
gatgtttacatcaaagcttcttcac

SEQ ID NO: 228661 - DNA, 25 bp, probe
gatgttttcacatggtctttgcctt

SEQ ID NO: 228662 - DNA, 25 bp, probe
gatgttttcacatggtctttgcctt

SEQ ID NO: 228663 - DNA, 25 bp, probe
gatggtattcattaggttttaactg

SEQ ID NO: 228664 - DNA, 25 bp, probe
gatggtgatgctttcatgggtttca

SEQ ID NO: 228665 - DNA, 25 bp, probe
gatggtgctgtctatgcacaggtgt

SEQ ID NO: 228666 - DNA, 25 bp, probe
gatgggctgtgcacacggttgagcc

SEQ ID NO: 228667 - DNA, 25 bp, probe
gatgggctgtggaatggtgcccagc

SEQ ID NO: 228668 - DNA, 25 bp, probe
gatgaggctcagctaacgctcaaca

SEQ ID NO: 228669 - DNA, 25 bp, probe
gatgatggcagcggaaatgactcct

SEQ ID NO: 228670 - DNA, 25 bp, probe
gtgaggagcctaaatacattcttcc

SEQ ID NO: 228671 - DNA, 25 bp, probe
gatgacgctttaagatattccttcc

SEQ ID NO: 228672 - DNA, 25 bp, probe
gatgggcgtctgagtttcacatctg

SEQ ID NO: 228673 - DNA, 25 bp, probe
gatgggcgtctgagtttcacatctg

SEQ ID NO: 228674 - DNA, 25 bp, probe
gatggtgcagacatcagttccctct

SEQ ID NO: 228675 - DNA, 25 bp, probe
gatggtgcagcaattccagttcctg

SEQ ID NO: 228676 - DNA, 25 bp, probe
gatggtcagattccaaagtcctttc

SEQ ID NO: 228677 - DNA, 25 bp, probe
gatggtcagattccaaagtcctttc

SEQ ID NO: 228678 - DNA, 25 bp, probe
gatgatgtcgaaaaacagtcctgtg

SEQ ID NO: 228679 - DNA, 25 bp, probe
gatgatgtcgaaaaacagtcctgtg

SEQ ID NO: 228680 - DNA, 25 bp, probe
gatgtgatctaacaaatgctcacag

SEQ ID NO: 228681 - DNA, 25 bp, probe
gatgagatcaccaaagagactacag

SEQ ID NO: 228682 - DNA, 25 bp, probe
gatgaagcacctgaccgtacagatg

SEQ ID NO: 228683 - DNA, 25 bp, probe
gatgatgagcaggtttccaaacaca

SEQ ID NO: 228684 - DNA, 25 bp, probe
gatgatgagcaggtttccaaacaca

SEQ ID NO: 228685 - DNA, 25 bp, probe
gatgtggcatcttttgtaaaactga

SEQ ID NO: 228686 - DNA, 25 bp, probe
gatgaagaattttgtaggcgattga

SEQ ID NO: 228687 - DNA, 25 bp, probe
gatgacaagatcgttgggggctaca

SEQ ID NO: 228688 - DNA, 25 bp, probe
gatgacaagatcgttgggggctaca

SEQ ID NO: 228689 - DNA, 25 bp, probe
gatctgagtatcgtcaggggcccaa

SEQ ID NO: 228690 - DNA, 25 bp, probe
gatgtgatctttgctgatgtggccc

SEQ ID NO: 228691 - DNA, 25 bp, probe
gatgtcatggtttctgagtggctaa

SEQ ID NO: 228692 - DNA, 25 bp, probe
gatgcctgttaaatggatcgccata

SEQ ID NO: 228693 - DNA, 25 bp, probe
gatgttgtcatatttagtaccttca

SEQ ID NO: 228694 - DNA, 25 bp, probe
gatgattggtgacatagtaactgtc

SEQ ID NO: 228695 - DNA, 25 bp, probe
gatggtggtgcggatagggcactga

SEQ ID NO: 228696 - DNA, 25 bp, probe
gatgttctggtggaggtagactgaa

SEQ ID NO: 228697 - DNA, 25 bp, probe
gatgttctggtggaggtagactgaa

SEQ ID NO: 228698 - DNA, 25 bp, probe
gatgtttttccaggacaagtgaaga

SEQ ID NO: 228699 - DNA, 25 bp, probe
gatgtttttccaggacaagtgaaga

SEQ ID NO: 228700 - DNA, 25 bp, probe
gatgttcttcaagctgagcgaggag

SEQ ID NO: 228701 - DNA, 25 bp, probe
gatgggtgccaggcctatgttggag

SEQ ID NO: 228702 - DNA, 25 bp, probe
gatgaccgcacagcactatgtgaca

SEQ ID NO: 228703 - DNA, 25 bp, probe
gatgagtgcagcacgcaggaggccg

SEQ ID NO: 228704 - DNA, 25 bp, probe
gatgtatcagaatgtggatggccgt

SEQ ID NO: 228705 - DNA, 25 bp, probe
gatgtataaaattggtgacctgggc

SEQ ID NO: 228706 - DNA, 25 bp, probe
gatgtctgaaattagtgtgacctcg

SEQ ID NO: 228707 - DNA, 25 bp, probe
gatgggaaaaaggtgctctccagta

SEQ ID NO: 228708 - DNA, 25 bp, probe
gatgggaaaaggagattatattaac

SEQ ID NO: 228709 - DNA, 25 bp, probe
gatgcagaggaaaggggaataatct

SEQ ID NO: 228710 - DNA, 25 bp, probe
gatgggggatggcctggaatgagag

SEQ ID NO: 228711 - DNA, 25 bp, probe
gatgggctgagggagctcctagaag

SEQ ID NO: 228712 - DNA, 25 bp, probe
gatgggatggtacctcctaggagta

SEQ ID NO: 228713 - DNA, 25 bp, probe
gatggtggggagcctcttaagagcc

SEQ ID NO: 228714 - DNA, 25 bp, probe
gatgtgggagggcatttgccagtgc

SEQ ID NO: 228715 - DNA, 25 bp, probe
gatgtggagtggaaatttgcaaggg

SEQ ID NO: 228716 - DNA, 25 bp, probe
gatgggatgtggaacattacagtcc

SEQ ID NO: 228717 - DNA, 25 bp, probe
gatgggagagcgatacatcacgcat

SEQ ID NO: 228718 - DNA, 25 bp, probe
gatggtgacagagctggcacctctg

SEQ ID NO: 228719 - DNA, 25 bp, probe
gatggtgactactggagactgctgc

SEQ ID NO: 228720 - DNA, 25 bp, probe
gatggtgactactggagactgctgc

SEQ ID NO: 228721 - DNA, 25 bp, probe
gatgggacggtactgagatatctcg

SEQ ID NO: 228722 - DNA, 25 bp, probe
gatgggagccgtgatcaagatccga

SEQ ID NO: 228723 - DNA, 25 bp, probe
gatgggacgcgtggtcaaggtggag

SEQ ID NO: 228724 - DNA, 25 bp, probe
gatgggacgcgtggtcaaggtggag

SEQ ID NO: 228725 - DNA, 25 bp, probe
gatgggcccagtggataagcggaag

SEQ ID NO: 228726 - DNA, 25 bp, probe
gatgggggcaaggttaggtgaagga

SEQ ID NO: 228727 - DNA, 25 bp, probe
gtcaagggaagctttaactccaagt

SEQ ID NO: 228728 - DNA, 25 bp, probe
gtcaagggaagctttaactccaagt

SEQ ID NO: 228729 - DNA, 25 bp, probe
gatgaagggaagttcttcactcttt

SEQ ID NO: 228730 - DNA, 25 bp, probe
gatgaaagtgcaaagtgccctcatt

SEQ ID NO: 228731 - DNA, 25 bp, probe
gatgtatcagtgtggagccttacat

SEQ ID NO: 228732 - DNA, 25 bp, probe
gatgatatcaggttggtctaagact

SEQ ID NO: 228733 - DNA, 25 bp, probe
gatgatatcaggttggtctaagact

SEQ ID NO: 228734 - DNA, 25 bp, probe
gatgatcacagtcgtgttaaactgc

SEQ ID NO: 228735 - DNA, 25 bp, probe
gatgatcacagtcgtgttaaactgc

SEQ ID NO: 228736 - DNA, 25 bp, probe
gatgacatttagccctaagattgga

SEQ ID NO: 228737 - DNA, 25 bp, probe
gatgaatttaccatcaaacaaatca

SEQ ID NO: 228738 - DNA, 25 bp, probe
gatgtttgtgttactcaaaaaaact

SEQ ID NO: 228739 - DNA, 25 bp, probe
gatgtttggtacaaatagaactata

SEQ ID NO: 228740 - DNA, 25 bp, probe
gatccggggcaatacagaccatcaa

SEQ ID NO: 228741 - DNA, 25 bp, probe
gatccggagaaaaacacggaccatg

SEQ ID NO: 228742 - DNA, 25 bp, probe
gatccccagaagtgatcctgggcca

SEQ ID NO: 228743 - DNA, 25 bp, probe
gatgactgaagcagaagttcgaggc

SEQ ID NO: 228744 - DNA, 25 bp, probe
gatgactgaaccttgcagttctgtg

SEQ ID NO: 228745 - DNA, 25 bp, probe
gatgacaaagataagcagttcttca

SEQ ID NO: 228746 - DNA, 25 bp, probe
gatgacaaagataagcagttcttca

SEQ ID NO: 228747 - DNA, 25 bp, probe
gatgaaaacaaaggcctttctactt

SEQ ID NO: 228748 - DNA, 25 bp, probe
gatgcagaaaaatgccactggtttc

SEQ ID NO: 228749 - DNA, 25 bp, probe
gatgtaagaaatttctgcatggtct

SEQ ID NO: 228750 - DNA, 25 bp, probe
gatgggataatttgggaggcttctc

SEQ ID NO: 228751 - DNA, 25 bp, probe
gatgctggtcaacttgtggggacct

SEQ ID NO: 228752 - DNA, 25 bp, probe
gatgtggatatgttttgccgagagg

SEQ ID NO: 228753 - DNA, 25 bp, probe
gatgggaagattacagtctgagggc

SEQ ID NO: 228754 - DNA, 25 bp, probe
gatgggtgagatcttgtggagctgg

SEQ ID NO: 228755 - DNA, 25 bp, probe
gatggtggatgatgtgtcatgaatg

SEQ ID NO: 228756 - DNA, 25 bp, probe
gatggtggtgctgagtctgattgct

SEQ ID NO: 228757 - DNA, 25 bp, probe
gatggtggtgatgctgtcttcagtc

SEQ ID NO: 228758 - DNA, 25 bp, probe
gatggtggtgatgctgtcttcagtc

SEQ ID NO: 228759 - DNA, 25 bp, probe
gatgtgggtgattctgtacctgggg

SEQ ID NO: 228760 - DNA, 25 bp, probe
gatgaggagtcacaggactcgaggg

SEQ ID NO: 228761 - DNA, 25 bp, probe
gatggggctcagatggactgggagg

SEQ ID NO: 228762 - DNA, 25 bp, probe
gatggggctcagaatgcagacctgg

SEQ ID NO: 228763 - DNA, 25 bp, probe
gatgagggttttgcacctggacctc

SEQ ID NO: 228764 - DNA, 25 bp, probe
gtgacggccttagatctctcgccgc

SEQ ID NO: 228765 - DNA, 25 bp, probe
gatgcactggacaagcacctcattc

SEQ ID NO: 228766 - DNA, 25 bp, probe
gatgcactggacaagcacctcattc

SEQ ID NO: 228767 - DNA, 25 bp, probe
gatgacatctgagctcacactcagt

SEQ ID NO: 228768 - DNA, 25 bp, probe
gatgagccagaggccgagccatatg

SEQ ID NO: 228769 - DNA, 25 bp, probe
gatgaggatgggcccaacattgaca

SEQ ID NO: 228770 - DNA, 25 bp, probe
gatgggggtgactgcccagacattc

SEQ ID NO: 228771 - DNA, 25 bp, probe
gatggggagatggctgatgcccaga

SEQ ID NO: 228772 - DNA, 25 bp, probe
gatgggtgatctacaatgaccagaa

SEQ ID NO: 228773 - DNA, 25 bp, probe
gatgggcagattacagtgggacaaa

SEQ ID NO: 228774 - DNA, 25 bp, probe
gatgggcacattcttgtggcaagca

SEQ ID NO: 228775 - DNA, 25 bp, probe
gatgtggaagatcttattcaacagc

SEQ ID NO: 228776 - DNA, 25 bp, probe
gatgtggtagatccttatgtctatg

SEQ ID NO: 228777 - DNA, 25 bp, probe
gatgtatataacctctttaatgcct

SEQ ID NO: 228778 - DNA, 25 bp, probe
gatgtgaacaaggtcgcctactgcc

SEQ ID NO: 228779 - DNA, 25 bp, probe
gatgtacgcactgtcagttacacca

SEQ ID NO: 228780 - DNA, 25 bp, probe
gatgtacgcactgtcagttacacca

SEQ ID NO: 228781 - DNA, 25 bp, probe
gatgtacgcactgtcagttacacca

SEQ ID NO: 228782 - DNA, 25 bp, probe
gatgatccggaagcagcttacacca

SEQ ID NO: 228783 - DNA, 25 bp, probe
gatgatgacagggggactcccacct

SEQ ID NO: 228784 - DNA, 25 bp, probe
gatgaagggtggcaagcccatcacc

SEQ ID NO: 228785 - DNA, 25 bp, probe
gatgaagggtggcaagcccatcacc

SEQ ID NO: 228786 - DNA, 25 bp, probe
gatgaagcggaagagggctatcccc

SEQ ID NO: 228787 - DNA, 25 bp, probe
gatgaactgcgatgtctgggaaccc

SEQ ID NO: 228788 - DNA, 25 bp, probe
gatgagccgccactggcgggaacgt

SEQ ID NO: 228789 - DNA, 25 bp, probe
gatgatgcccctagagctgaggctg

SEQ ID NO: 228790 - DNA, 25 bp, probe
gatgtggatatccagagcgagcgct

SEQ ID NO: 228791 - DNA, 25 bp, probe
gatgtggatcagcaagcaggagtat

SEQ ID NO: 228792 - DNA, 25 bp, probe
gatgtggaccagtgcagtgaggatg

SEQ ID NO: 228793 - DNA, 25 bp, probe
gatgggaggcagtgagtcttgatga

SEQ ID NO: 228794 - DNA, 25 bp, probe
gatgggactggtcgtgtttgtgctt

SEQ ID NO: 228795 - DNA, 25 bp, probe
gatgaggaccgaagtgattgtggac

SEQ ID NO: 228796 - DNA, 25 bp, probe
gatgtgttcagccagttgactgtgg

SEQ ID NO: 228797 - DNA, 25 bp, probe
gatgtgtatcaggagtgtctaaggc

SEQ ID NO: 228798 - DNA, 25 bp, probe
gatgtgtatcaggaggtatagtgga

SEQ ID NO: 228799 - DNA, 25 bp, probe
gatgggtatggacagcatgcagggc

SEQ ID NO: 228800 - DNA, 25 bp, probe
gatgggttaagcctgcagggatccc

SEQ ID NO: 228801 - DNA, 25 bp, probe
gatgcggttaaaagcactggacccc

SEQ ID NO: 228802 - DNA, 25 bp, probe
gatgcacgtgctgaaagccgaggta

SEQ ID NO: 228803 - DNA, 25 bp, probe
gatccctccaagaagagctacgtag

SEQ ID NO: 228804 - DNA, 25 bp, probe
gatcctctccaaaggaaagcgaggt

SEQ ID NO: 228805 - DNA, 25 bp, probe
gatccacttattgtaacaccagatt

SEQ ID NO: 228806 - DNA, 25 bp, probe
gatcccttttatgcacctagaatat

SEQ ID NO: 228807 - DNA, 25 bp, probe
gatgggcattgtttcccctataatt

SEQ ID NO: 228808 - DNA, 25 bp, probe
gatgggcattgtttcccctataatt

SEQ ID NO: 228809 - DNA, 25 bp, probe
gatgggctttgtcccagtttcatat

SEQ ID NO: 228810 - DNA, 25 bp, probe
gatgggcagtttcacagttcatcca

SEQ ID NO: 228811 - DNA, 25 bp, probe
gatgggtgatttacaatgaccacaa

SEQ ID NO: 228812 - DNA, 25 bp, probe
gatgagcctgattttccatgggaaa

SEQ ID NO: 228813 - DNA, 25 bp, probe
gatgtgccagtcattcctttggatg

SEQ ID NO: 228814 - DNA, 25 bp, probe
gatgtccagaacttcccgtatatga

SEQ ID NO: 228815 - DNA, 25 bp, probe
gatgttagctaattccactgtgtat

SEQ ID NO: 228816 - DNA, 25 bp, probe
gatgttagtgacaatgaacctgatc

SEQ ID NO: 228817 - DNA, 25 bp, probe
gatgttagtgacaatgaacctgatc

SEQ ID NO: 228818 - DNA, 25 bp, probe
gatgggcagagattatatccctatc

SEQ ID NO: 228819 - DNA, 25 bp, probe
gatgaggctgaattacagcctaatt

SEQ ID NO: 228820 - DNA, 25 bp, probe
gatgctgactagttacaggctagct

SEQ ID NO: 228821 - DNA, 25 bp, probe
gatgctgactagttacaggctagct

SEQ ID NO: 228822 - DNA, 25 bp, probe
gatgtgatctagctcagatgccctc

SEQ ID NO: 228823 - DNA, 25 bp, probe
gatgtgatctagctcagatgccctc

SEQ ID NO: 228824 - DNA, 25 bp, probe
gatgatgacatctctagtacttcgg

SEQ ID NO: 228825 - DNA, 25 bp, probe
gatgatgattataccaggactatgg

SEQ ID NO: 228826 - DNA, 25 bp, probe
gatgatgattataccaggactatgg

SEQ ID NO: 228827 - DNA, 25 bp, probe
gatgtatttcatggcactgcaaagg

SEQ ID NO: 228828 - DNA, 25 bp, probe
gatgtttgctcagtgcaaggtggag

SEQ ID NO: 228829 - DNA, 25 bp, probe
gatgttccacatgcagaggcagagg

SEQ ID NO: 228830 - DNA, 25 bp, probe
gatgggccacaggatggccaggcag

SEQ ID NO: 228831 - DNA, 25 bp, probe
gatgggccacaggatggccaggcag

SEQ ID NO: 228832 - DNA, 25 bp, probe
gatgggatgacagatggggtcagac

SEQ ID NO: 228833 - DNA, 25 bp, probe
gatgtgtgtgagtccatgaaggagc

SEQ ID NO: 228834 - DNA, 25 bp, probe
gatgtctgcgaggccatggaatacc

SEQ ID NO: 228835 - DNA, 25 bp, probe
gatgtctgcgaggccatggaatacc

SEQ ID NO: 228836 - DNA, 25 bp, probe
gatgttgaacagaaggaatggcagc

SEQ ID NO: 228837 - DNA, 25 bp, probe
gatgtgatgaacctactcaatgtga

SEQ ID NO: 228838 - DNA, 25 bp, probe
gatgtatgatatcttctccatggcc

SEQ ID NO: 228839 - DNA, 25 bp, probe
gatgacgatcatctttccatcaggc

SEQ ID NO: 228840 - DNA, 25 bp, probe
gatgtcaagatggctttcgacagag

SEQ ID NO: 228841 - DNA, 25 bp, probe
gatgtatgagaacattctgcaccag

SEQ ID NO: 228842 - DNA, 25 bp, probe
gatgtatgagaacattctgcaccag

SEQ ID NO: 228843 - DNA, 25 bp, probe
gatgatgatgcagtacaattcgcaa

SEQ ID NO: 228844 - DNA, 25 bp, probe
gatgatgcagtacaattcgcaagaa

SEQ ID NO: 228845 - DNA, 25 bp, probe
gatgaagtcacagagctccaaggac

SEQ ID NO: 228846 - DNA, 25 bp, probe
gatgaattaacctctcaaagcacag

SEQ ID NO: 228847 - DNA, 25 bp, probe
gatgaaattacagaagccaaatcag

SEQ ID NO: 228848 - DNA, 25 bp, probe
gatgcaggatgttttcaaccagtaa

SEQ ID NO: 228849 - DNA, 25 bp, probe
gatgagccttgaattaaccatgcat

SEQ ID NO: 228850 - DNA, 25 bp, probe
gatgtccttgcacttaaactcattc

SEQ ID NO: 228851 - DNA, 25 bp, probe
gatgtccttgagttttggctcttgg

SEQ ID NO: 228852 - DNA, 25 bp, probe
gatgtaatgtagttctttgttcctg

SEQ ID NO: 228853 - DNA, 25 bp, probe
gatgtaatgtagttctttgttcctg

SEQ ID NO: 228854 - DNA, 25 bp, probe
gatgtgtcagtatctgttgatttgc

SEQ ID NO: 228855 - DNA, 25 bp, probe
gatgtgtcagtatctgttgatttgc

SEQ ID NO: 228856 - DNA, 25 bp, probe
gatgtggaccaactttatctgataa

SEQ ID NO: 228857 - DNA, 25 bp, probe
gatgtgggaaactatcaatcggaca

SEQ ID NO: 228858 - DNA, 25 bp, probe
gatgctgggtatcgaatgtacagga

SEQ ID NO: 228859 - DNA, 25 bp, probe
gatgagtgcctgcgcaagtacggct

SEQ ID NO: 228860 - DNA, 25 bp, probe
gatgagtgccgggcagcaggtcgtc

SEQ ID NO: 228861 - DNA, 25 bp, probe
gatgaagccagggagcatgtcggtg

SEQ ID NO: 228862 - DNA, 25 bp, probe
gatgaagatcgcagacttcgggctg

SEQ ID NO: 228863 - DNA, 25 bp, probe
gatgtggacatgagccatttgaggg

SEQ ID NO: 228864 - DNA, 25 bp, probe
gatgtggcctgaaagcacttagcgg

SEQ ID NO: 228865 - DNA, 25 bp, probe
gatgtgccccacaagacacatcaag

SEQ ID NO: 228866 - DNA, 25 bp, probe
gatgtcaccatggccaacaccatgg

SEQ ID NO: 228867 - DNA, 25 bp, probe
gatgtcccaggatccatggcaggac

SEQ ID NO: 228868 - DNA, 25 bp, probe
gatgtcccagtcaatgcatcggcag

SEQ ID NO: 228869 - DNA, 25 bp, probe
gatgttctcgatacagtctggcaaa

SEQ ID NO: 228870 - DNA, 25 bp, probe
gatgttctcagatatggtcttaaaa

SEQ ID NO: 228871 - DNA, 25 bp, probe
gatgttcctgggatgtttaatcaag

SEQ ID NO: 228872 - DNA, 25 bp, probe
gatgtccgtgaggttgttgaagatt

SEQ ID NO: 228873 - DNA, 25 bp, probe
gatattagtgcagctagtcgggtgt

SEQ ID NO: 228874 - DNA, 25 bp, probe
gatgtttggagctttggagtggttc

SEQ ID NO: 228875 - DNA, 25 bp, probe
gatgtgtatgcgtttgggattgttc

SEQ ID NO: 228876 - DNA, 25 bp, probe
gatgtcgatgcctttgattttattc

SEQ ID NO: 228877 - DNA, 25 bp, probe
gatgtgcattgtctttgcttacatt

SEQ ID NO: 228878 - DNA, 25 bp, probe
gatgagactgtgtttatctcccttt

SEQ ID NO: 228879 - DNA, 25 bp, probe
gatgagttgtgagtttaccttgtat

SEQ ID NO: 228880 - DNA, 25 bp, probe
gatgagatttggataagagtatgta

SEQ ID NO: 228881 - DNA, 25 bp, probe
gatgtggttgtcatggcaactgatg

SEQ ID NO: 228882 - DNA, 25 bp, probe
gatgatttatgtctgagtgacttgg

SEQ ID NO: 228883 - DNA, 25 bp, probe
gatgatttatgtctgagtgacttgg

SEQ ID NO: 228884 - DNA, 25 bp, probe
gatgatttctggcagatggtttggc

SEQ ID NO: 228885 - DNA, 25 bp, probe
gatgatgctgtcaagcaatattgtt

SEQ ID NO: 228886 - DNA, 25 bp, probe
gatgtgctgattgaattttatgccc

SEQ ID NO: 228887 - DNA, 25 bp, probe
gatgctgctagagaaactgaacggc

SEQ ID NO: 228888 - DNA, 25 bp, probe
gatgtctgcaaaaaccagaagcggc

SEQ ID NO: 228889 - DNA, 25 bp, probe
gatgtctgcaaaaaccagaagcggc

SEQ ID NO: 228890 - DNA, 25 bp, probe
gatgtcgcattataaagacatgcat

SEQ ID NO: 228891 - DNA, 25 bp, probe
gatgtcgcattataaagacatgcat

SEQ ID NO: 228892 - DNA, 25 bp, probe
gatgtctgctttgataacaatgtct

SEQ ID NO: 228893 - DNA, 25 bp, probe
gatgttgctgttaagatgatcaagg

SEQ ID NO: 228894 - DNA, 25 bp, probe
gatgttgctgttaagatgatcaagg

SEQ ID NO: 228895 - DNA, 25 bp, probe
gatgtgctgctttgatatataggac

SEQ ID NO: 228896 - DNA, 25 bp, probe
gatgctgctgctcttcgcaagctga

SEQ ID NO: 228897 - DNA, 25 bp, probe
gatgtgcatggactcattgaagtat

SEQ ID NO: 228898 - DNA, 25 bp, probe
gatgtgtgggcatttggcgtgacca

SEQ ID NO: 228899 - DNA, 25 bp, probe
gatgtgtggagcatgggcgtcgtgc

SEQ ID NO: 228900 - DNA, 25 bp, probe
gatgttggacttctgcaatagatga

SEQ ID NO: 228901 - DNA, 25 bp, probe
gatgtctgaatctgaatggaggaat

SEQ ID NO: 228902 - DNA, 25 bp, probe
gatgtctgaatctgaatggaggaat

SEQ ID NO: 228903 - DNA, 25 bp, probe
gatgtctgaatctgaatggaggaat

SEQ ID NO: 228904 - DNA, 25 bp, probe
gatgtgtggtcccttgggtacatca

SEQ ID NO: 228905 - DNA, 25 bp, probe
gatgtgtggtcccttgggtacatca

SEQ ID NO: 228906 - DNA, 25 bp, probe
gatgtatggtcctatggtgtgttac

SEQ ID NO: 228907 - DNA, 25 bp, probe
gatgtgtggagttatggtgtgtgat

SEQ ID NO: 228908 - DNA, 25 bp, probe
gatgtgttgggcgtggttggaaggt

SEQ ID NO: 228909 - DNA, 25 bp, probe
gatgtgtttcagtggtgtgcggagt

SEQ ID NO: 228910 - DNA, 25 bp, probe
gatgtttgacagtgtctttgggact

SEQ ID NO: 228911 - DNA, 25 bp, probe
gatgtttgacagtgtctttgggact

SEQ ID NO: 228912 - DNA, 25 bp, probe
gatgttggaatccgacttggggacc

SEQ ID NO: 228913 - DNA, 25 bp, probe
gatgttggcaacagaactgaggtgg

SEQ ID NO: 228914 - DNA, 25 bp, probe
gatgttggcaacagaactgaggtgg

SEQ ID NO: 228915 - DNA, 25 bp, probe
gatgtttgaaactattccaatgttc

SEQ ID NO: 228916 - DNA, 25 bp, probe
gatgtgtgttaattatgaccaactt

SEQ ID NO: 228917 - DNA, 25 bp, probe
gatgatgaattttataagacacctt

SEQ ID NO: 228918 - DNA, 25 bp, probe
gatgtattttcatagtgacctgtgt

SEQ ID NO: 228919 - DNA, 25 bp, probe
gatgtagctttcttctgtaacagtt

SEQ ID NO: 228920 - DNA, 25 bp, probe
gatgtagctttctgacaaaaagttt

SEQ ID NO: 228921 - DNA, 25 bp, probe
tatttcattctgcagaaaaaattga

SEQ ID NO: 228922 - DNA, 25 bp, probe
gatgattttctgggacaaacaattg

SEQ ID NO: 228923 - DNA, 25 bp, probe
gatgtattactcatattaccaagga

SEQ ID NO: 228924 - DNA, 25 bp, probe
gatgatttcactaggcatttggcaa

SEQ ID NO: 228925 - DNA, 25 bp, probe
gatgagcttcattgggagttcctag

SEQ ID NO: 228926 - DNA, 25 bp, probe
gatgagcttcattgggagttcctag

SEQ ID NO: 228927 - DNA, 25 bp, probe
gatgtgtccaatcggagacaaaagc

SEQ ID NO: 228928 - DNA, 25 bp, probe
gatgaggcgcaaacggaaacagcag

SEQ ID NO: 228929 - DNA, 25 bp, probe
gatgaggcgctcagggaaagctgga

SEQ ID NO: 228930 - DNA, 25 bp, probe
gatgatggcgatttggcccaatctg

SEQ ID NO: 228931 - DNA, 25 bp, probe
gatgatggctgtggagagcccgtcc

SEQ ID NO: 228932 - DNA, 25 bp, probe
gatgaggcctcaaatgctgccatgt

SEQ ID NO: 228933 - DNA, 25 bp, probe
gatgtgggcatcagtgctgccatct

SEQ ID NO: 228934 - DNA, 25 bp, probe
gatgtgtatgagaacctgcacacta

SEQ ID NO: 228935 - DNA, 25 bp, probe
gatgtgattggagcagctacagcca

SEQ ID NO: 228936 - DNA, 25 bp, probe
gatgtgcgcggagagcaatcgccgg

SEQ ID NO: 228937 - DNA, 25 bp, probe
gatgtgcgcggagagcaatcgccgg

SEQ ID NO: 228938 - DNA, 25 bp, probe
gatgtccactgagatagaagccctg

SEQ ID NO: 228939 - DNA, 25 bp, probe
gatgtgctaccagatcagcaggggc

SEQ ID NO: 228940 - DNA, 25 bp, probe
gatgtcttccatggtcatcagtgac

SEQ ID NO: 228941 - DNA, 25 bp, probe
gatgtcgtatcttatgctgcgtact

SEQ ID NO: 228942 - DNA, 25 bp, probe
gatgtcagactaatcaggcttatcc

SEQ ID NO: 228943 - DNA, 25 bp, probe
gatgttgactgcacaggtaatacaa

SEQ ID NO: 228944 - DNA, 25 bp, probe
gatgttgatcacacagcttcaatca

SEQ ID NO: 228945 - DNA, 25 bp, probe
gatgttgttcagcgtctcagcatca

SEQ ID NO: 228946 - DNA, 25 bp, probe
gatgtcttccagactgtcaagagcc

SEQ ID NO: 228947 - DNA, 25 bp, probe
gatgtcatccttactcgaagagctt

SEQ ID NO: 228948 - DNA, 25 bp, probe
gatgacgccattttccaaagcttgg

SEQ ID NO: 228949 - DNA, 25 bp, probe
gatgactccattatatcctggggtt

SEQ ID NO: 228950 - DNA, 25 bp, probe
gatcaacaattctttttgggggtag

SEQ ID NO: 228951 - DNA, 25 bp, probe
gatctacgactatttaatcggcgga

SEQ ID NO: 228952 - DNA, 25 bp, probe
gatctacgactatttaatcggcgga

SEQ ID NO: 228953 - DNA, 25 bp, probe
gatgtacggcttttaatcttggaat

SEQ ID NO: 228954 - DNA, 25 bp, probe
gatgttcggggtgacactgtgggaa

SEQ ID NO: 228955 - DNA, 25 bp, probe
gatgcggtggaggaaaacggggaga

SEQ ID NO: 228956 - DNA, 25 bp, probe
gatgcgactgacaaaaagaacggga

SEQ ID NO: 228957 - DNA, 25 bp, probe
gatgcgactgacaaaaagaacggga

SEQ ID NO: 228958 - DNA, 25 bp, probe
gatgccctaccatatacaccagggc

SEQ ID NO: 228959 - DNA, 25 bp, probe
gatgcaacaatccaaaaaccagtcg

SEQ ID NO: 228960 - DNA, 25 bp, probe
gatgaaccctacaaaatccatggcc

SEQ ID NO: 228961 - DNA, 25 bp, probe
gatgatttcctagtagaactcacag

SEQ ID NO: 228962 - DNA, 25 bp, probe
gatgtagtcctggtgagaatttatg

SEQ ID NO: 228963 - DNA, 25 bp, probe
gatgatgagaccttggcaaagttaa

SEQ ID NO: 228964 - DNA, 25 bp, probe
gatgtgaggcactgtggggcaggac

SEQ ID NO: 228965 - DNA, 25 bp, probe
gatgtcgatgaccagaggggaagag

SEQ ID NO: 228966 - DNA, 25 bp, probe
gatgtcgatgaccagttgaagagga

SEQ ID NO: 228967 - DNA, 25 bp, probe
gatgtgttgtctagtatagaaggac

SEQ ID NO: 228968 - DNA, 25 bp, probe
gatcttttcatcctcgagacaggac

SEQ ID NO: 228969 - DNA, 25 bp, probe
gatgctgtcttcagtcagctgactg

SEQ ID NO: 228970 - DNA, 25 bp, probe
gatgctgtcttcagtcagctgactg

SEQ ID NO: 228971 - DNA, 25 bp, probe
gatgatggtatcacacagtatgctg

SEQ ID NO: 228972 - DNA, 25 bp, probe
gatgatgaggaccgaagtgattgtg

SEQ ID NO: 228973 - DNA, 25 bp, probe
gatgatggggcttgatgcagtaggg

SEQ ID NO: 228974 - DNA, 25 bp, probe
gatgaagagaggtggcaaggcaggg

SEQ ID NO: 228975 - DNA, 25 bp, probe
gatacgggagatggaaaagcagttc

SEQ ID NO: 228976 - DNA, 25 bp, probe
gatacgggagatggaaaagcagttc

SEQ ID NO: 228977 - DNA, 25 bp, probe
gatgacgtggactgcacaatgacag

SEQ ID NO: 228978 - DNA, 25 bp, probe
gatgattgggcatccaacaaagtta

SEQ ID NO: 228979 - DNA, 25 bp, probe
gatgacggctgctcgaagaacaatg

SEQ ID NO: 228980 - DNA, 25 bp, probe
gatgtcaccactccagatagaaagg

SEQ ID NO: 228981 - DNA, 25 bp, probe
gatgctaccttgccaggacaagaac

SEQ ID NO: 228982 - DNA, 25 bp, probe
gatgtacattcaggggacggcaaaa

SEQ ID NO: 228983 - DNA, 25 bp, probe
gatgtacatcatccgagagggtcaa

SEQ ID NO: 228984 - DNA, 25 bp, probe
gatgtgaatgcgcaggatgcggatg

SEQ ID NO: 228985 - DNA, 25 bp, probe
gatgtgactgcacaagagcactgca

SEQ ID NO: 228986 - DNA, 25 bp, probe
gatgtgcctcataaaactctgcaaa

SEQ ID NO: 228987 - DNA, 25 bp, probe
gatgagctctgaacaaacactgaat

SEQ ID NO: 228988 - DNA, 25 bp, probe
gatgatttaaaaatgcatgtgtgat

SEQ ID NO: 228989 - DNA, 25 bp, probe
gatgtttaaagatgtatgatgtcac

SEQ ID NO: 228990 - DNA, 25 bp, probe
gatgctttcaaagatgatcgatttc

SEQ ID NO: 228991 - DNA, 25 bp, probe
gatgcttgtaattctacaaatttca

SEQ ID NO: 228992 - DNA, 25 bp, probe
gatgcttgtaattctacaaatttca

SEQ ID NO: 228993 - DNA, 25 bp, probe
gatgtttgacatactaattatttta

SEQ ID NO: 228994 - DNA, 25 bp, probe
gatgtactacactttatccattatt

SEQ ID NO: 228995 - DNA, 25 bp, probe
gatgtaccacatctgtttctttctg

SEQ ID NO: 228996 - DNA, 25 bp, probe
gatgataccaaaattccttttgata

SEQ ID NO: 228997 - DNA, 25 bp, probe
gatgtacaggactttcctctaaaat

SEQ ID NO: 228998 - DNA, 25 bp, probe
gatgtgacaggaattctccctggca

SEQ ID NO: 228999 - DNA, 25 bp, probe
gatgctgagtgttttgtatgttagc

SEQ ID NO: 229000 - DNA, 25 bp, probe
gatgatgaggtggtggctattttag

SEQ ID NO: 229001 - DNA, 25 bp, probe
gatgagagtgtccatgctctttttg

SEQ ID NO: 229002 - DNA, 25 bp, probe
gatgagaattttccgtatcttgatc

SEQ ID NO: 229003 - DNA, 25 bp, probe
gatgagtgttcaatccaacattgtt

SEQ ID NO: 229004 - DNA, 25 bp, probe
gatgagttacaacattattgtcatg

SEQ ID NO: 229005 - DNA, 25 bp, probe
gatgagttgagagatgaagtagtag

SEQ ID NO: 229006 - DNA, 25 bp, probe
gatgatattagtgcagctagtcggg

SEQ ID NO: 229007 - DNA, 25 bp, probe
gatgagcattctgtcaggtgtcggg

SEQ ID NO: 229008 - DNA, 25 bp, probe
gatgacatgactgtctgtgttgcgg

SEQ ID NO: 229009 - DNA, 25 bp, probe
gatgactaccagctggttcgaaaat

SEQ ID NO: 229010 - DNA, 25 bp, probe
gatgactaccagctggttcgaaaat

SEQ ID NO: 229011 - DNA, 25 bp, probe
gataatcactagccagatttcgaaa

SEQ ID NO: 229012 - DNA, 25 bp, probe
gatgagtcaataccgttccatagag

SEQ ID NO: 229013 - DNA, 25 bp, probe
gatgagtcaagttctcgtcgttgcg

SEQ ID NO: 229014 - DNA, 25 bp, probe
gatgagtcaagttctcgtcgttgcg

SEQ ID NO: 229015 - DNA, 25 bp, probe
gatgaatgcgaatttctggctttgg

SEQ ID NO: 229016 - DNA, 25 bp, probe
gatgactgccaaattcttgcataca

SEQ ID NO: 229017 - DNA, 25 bp, probe
gatgaggccaaagtcaaatccaagg

SEQ ID NO: 229018 - DNA, 25 bp, probe
gatgagggacaagcataagaaggag

SEQ ID NO: 229019 - DNA, 25 bp, probe
gatgaggggaatacttcatgcaaag

SEQ ID NO: 229020 - DNA, 25 bp, probe
gatgaggacgaattctggactacac

SEQ ID NO: 229021 - DNA, 25 bp, probe
gatgacatcatctacactcaggact

SEQ ID NO: 229022 - DNA, 25 bp, probe
gatgacaacagcgacatcatggtgg

SEQ ID NO: 229023 - DNA, 25 bp, probe
gatgagaacatcgtgatcgccgagg

SEQ ID NO: 229024 - DNA, 25 bp, probe
gatgagaacatcgtgatcgccgagg

SEQ ID NO: 229025 - DNA, 25 bp, probe
gatgatgaaattggttcctgcagaa

SEQ ID NO: 229026 - DNA, 25 bp, probe
gatgtaaatggaacttctgcaaggc

SEQ ID NO: 229027 - DNA, 25 bp, probe
gatgtacagcataaccttcacgaag

SEQ ID NO: 229028 - DNA, 25 bp, probe
gatgctaccagaccctaaagaaaga

SEQ ID NO: 229029 - DNA, 25 bp, probe
gatgaagaatgaagcctagtagaat

SEQ ID NO: 229030 - DNA, 25 bp, probe
gatgaagttcaagccagaaaaccca

SEQ ID NO: 229031 - DNA, 25 bp, probe
gatcaaattcaatcaggaaagcctt

SEQ ID NO: 229032 - DNA, 25 bp, probe
gatcagccccaatgatgggttcctg

SEQ ID NO: 229033 - DNA, 25 bp, probe
gatgcctacccatatgtgggacagg

SEQ ID NO: 229034 - DNA, 25 bp, probe
gatgattactcggacaccgtgaagg

SEQ ID NO: 229035 - DNA, 25 bp, probe
gatgttcgactggaacctggagcag

SEQ ID NO: 229036 - DNA, 25 bp, probe
gatgattgcgcagggaggggtacgt

SEQ ID NO: 229037 - DNA, 25 bp, probe
gatgcatgcctgaggcagggtggtc

SEQ ID NO: 229038 - DNA, 25 bp, probe
gatgcatgcctgaggcagggtggtc

SEQ ID NO: 229039 - DNA, 25 bp, probe
gatgtattgattccaggggccatgc

SEQ ID NO: 229040 - DNA, 25 bp, probe
gatgtatggagcttcggggtgatcc

SEQ ID NO: 229041 - DNA, 25 bp, probe
gatgttgggctaagggctgtgagct

SEQ ID NO: 229042 - DNA, 25 bp, probe
gatgatctgggcatatggggctggg

SEQ ID NO: 229043 - DNA, 25 bp, probe
gatgtctggagctttggagtgttga

SEQ ID NO: 229044 - DNA, 25 bp, probe
gatgtctggagctatggggtcacca

SEQ ID NO: 229045 - DNA, 25 bp, probe
gatgtctggagcttaggaatctctt

SEQ ID NO: 229046 - DNA, 25 bp, probe
gatgtcatccgattgctggaatctt

SEQ ID NO: 229047 - DNA, 25 bp, probe
gatgtctatgcatttgggactgttt

SEQ ID NO: 229048 - DNA, 25 bp, probe
gatgcgtacatggtggctagtggtt

SEQ ID NO: 229049 - DNA, 25 bp, probe
gatgtctacatggtgatggtcaagt

SEQ ID NO: 229050 - DNA, 25 bp, probe
gatgtctacatggtgatggtcaagg

SEQ ID NO: 229051 - DNA, 25 bp, probe
gatgtcatgacaactgtgttcaaag

SEQ ID NO: 229052 - DNA, 25 bp, probe
gatgaatcactgtcagttgacgaca

SEQ ID NO: 229053 - DNA, 25 bp, probe
gggcatgcagcgtgcttatgggccc

SEQ ID NO: 229054 - DNA, 25 bp, probe
gatgtctaggtacttcaggggcact

SEQ ID NO: 229055 - DNA, 25 bp, probe
gatctctaggatctggaaggccgct

SEQ ID NO: 229056 - DNA, 25 bp, probe
gatcttctgacgttgcagaaatcca

SEQ ID NO: 229057 - DNA, 25 bp, probe
gatgattcgcaagcctgatactctc

SEQ ID NO: 229058 - DNA, 25 bp, probe
gatgttggcacctttgaattctaca

SEQ ID NO: 229059 - DNA, 25 bp, probe
gatgtctgacctccttatatatgta

SEQ ID NO: 229060 - DNA, 25 bp, probe
gatgtctgacctccttatatatgta

SEQ ID NO: 229061 - DNA, 25 bp, probe
gatgatctacccttactcatatgct

SEQ ID NO: 229062 - DNA, 25 bp, probe
gatgattttactcagcttatccaaa

SEQ ID NO: 229063 - DNA, 25 bp, probe
gatgatctttatggctactttctta

SEQ ID NO: 229064 - DNA, 25 bp, probe
gatgatctttatggctactttctta

SEQ ID NO: 229065 - DNA, 25 bp, probe
gatgcagataatagcctacttctta

SEQ ID NO: 229066 - DNA, 25 bp, probe
gatgatgatacattccaagtcttca

SEQ ID NO: 229067 - DNA, 25 bp, probe
gatgatgatacattccaagtcttca

SEQ ID NO: 229068 - DNA, 25 bp, probe
gatgtataatatgcaatcttacttc

SEQ ID NO: 229069 - DNA, 25 bp, probe
gatgtaactaggactcctcctatca

SEQ ID NO: 229070 - DNA, 25 bp, probe
gatgtaactaggactcctcctatca

SEQ ID NO: 229071 - DNA, 25 bp, probe
gatgtaagctttaaccacctattta

SEQ ID NO: 229072 - DNA, 25 bp, probe
gatgtacaaactaaggactatttat

SEQ ID NO: 229073 - DNA, 25 bp, probe
gatgctaaccaagaggaccacttct

SEQ ID NO: 229074 - DNA, 25 bp, probe
gatgtttctacagtgaggtgtcctt

SEQ ID NO: 229075 - DNA, 25 bp, probe
gatgttttacaaagcggatcactgt

SEQ ID NO: 229076 - DNA, 25 bp, probe
gatgttttacaaagcggatcactgt

SEQ ID NO: 229077 - DNA, 25 bp, probe
gatgtttgtagcctacagcgtcatc

SEQ ID NO: 229078 - DNA, 25 bp, probe
gatgtttgcggggatgacgatgcca

SEQ ID NO: 229079 - DNA, 25 bp, probe
gatgttgtcggaggaatctccagta

SEQ ID NO: 229080 - DNA, 25 bp, probe
gatgttttggattaaccggctgcag

SEQ ID NO: 229081 - DNA, 25 bp, probe
gatgttttggattaaccggctgcag

SEQ ID NO: 229082 - DNA, 25 bp, probe
gatgcgtattgttaagaccgtggag

SEQ ID NO: 229083 - DNA, 25 bp, probe
gatgcgttaagggaagccagctgtg

SEQ ID NO: 229084 - DNA, 25 bp, probe
gatgctggtagcgctggaggcgctg

SEQ ID NO: 229085 - DNA, 25 bp, probe
gatgatcctggagtgtggaggcagc

SEQ ID NO: 229086 - DNA, 25 bp, probe
gatgatagctatggtgtagatggaa

SEQ ID NO: 229087 - DNA, 25 bp, probe
gatgagcagaagctctcgatggaca

SEQ ID NO: 229088 - DNA, 25 bp, probe
gatgagcgtggacgttggctacagg

SEQ ID NO: 229089 - DNA, 25 bp, probe
gatgaggtggactggtgctgccacg

SEQ ID NO: 229090 - DNA, 25 bp, probe
gatgatggggagcggagtgacagta

SEQ ID NO: 229091 - DNA, 25 bp, probe
gttggcttgaggaaggtgaccttca

SEQ ID NO: 229092 - DNA, 25 bp, probe
gatgaggctggtgacgttcagcctt

SEQ ID NO: 229093 - DNA, 25 bp, probe
gatagacgtgttaaattcagacgta

SEQ ID NO: 229094 - DNA, 25 bp, probe
gatgctccagttagtaattcataca

SEQ ID NO: 229095 - DNA, 25 bp, probe
gatgctccagttagtaattcataca

SEQ ID NO: 229096 - DNA, 25 bp, probe
gatgatccggtcatatatccaggaa

SEQ ID NO: 229097 - DNA, 25 bp, probe
gatgttcaggtcaagtagccagaaa

SEQ ID NO: 229098 - DNA, 25 bp, probe
gatgctgctcaggtacggagccagc

SEQ ID NO: 229099 - DNA, 25 bp, probe
gatgctcatcaggtctcatgaatgt

SEQ ID NO: 229100 - DNA, 25 bp, probe
gatgctattgcttcatacacatgtg

SEQ ID NO: 229101 - DNA, 25 bp, probe
gatgctattgcttcatacacatgtg

SEQ ID NO: 229102 - DNA, 25 bp, probe
gatgctttgggcaacagggtcgggg

SEQ ID NO: 229103 - DNA, 25 bp, probe
gatgctttgggcaacagggtcgggg

SEQ ID NO: 229104 - DNA, 25 bp, probe
gatgctttgggcaacagggtcgggg

SEQ ID NO: 229105 - DNA, 25 bp, probe
gatgctttgggcaacagggtcgggg

SEQ ID NO: 229106 - DNA, 25 bp, probe
gatgcctaggttactgggtttgggg

SEQ ID NO: 229107 - DNA, 25 bp, probe
gatgcattactgctatcttagttta

SEQ ID NO: 229108 - DNA, 25 bp, probe
gatgctttcatgggtttcattttgg

SEQ ID NO: 229109 - DNA, 25 bp, probe
gatgtatgtgacgtggttcttctgg

SEQ ID NO: 229110 - DNA, 25 bp, probe
gatgatatgtgctgcctttgcttct

SEQ ID NO: 229111 - DNA, 25 bp, probe
gatgatgatgattcagactctgatg

SEQ ID NO: 229112 - DNA, 25 bp, probe
gatgatgatagctatggtgtagatg

SEQ ID NO: 229113 - DNA, 25 bp, probe
gatgatgcattggaggttgctgacc

SEQ ID NO: 229114 - DNA, 25 bp, probe
gatgagctaggatgcttccagctag

SEQ ID NO: 229115 - DNA, 25 bp, probe
gatgagctaggatgcttccagctag

SEQ ID NO: 229116 - DNA, 25 bp, probe
gatgagagatgagagtgtcacatta

SEQ ID NO: 229117 - DNA, 25 bp, probe
gatgagagatgagagtgtcacatta

SEQ ID NO: 229118 - DNA, 25 bp, probe
gatgagtggagtgtgcatccagtat

SEQ ID NO: 229119 - DNA, 25 bp, probe
gatgagggacatcttccaatgatta

SEQ ID NO: 229120 - DNA, 25 bp, probe
gatgagggacagctgctctacagtg

SEQ ID NO: 229121 - DNA, 25 bp, probe
gatgaagagacacagtctagaggtc

SEQ ID NO: 229122 - DNA, 25 bp, probe
gatgccaagtacacctgcaaggctg

SEQ ID NO: 229123 - DNA, 25 bp, probe
gatgccacctgagttaatgaagccg

SEQ ID NO: 229124 - DNA, 25 bp, probe
gatccatgtctgtttgtaggacgga

SEQ ID NO: 229125 - DNA, 25 bp, probe
gatccttctgcaaggctggggggac

SEQ ID NO: 229126 - DNA, 25 bp, probe
gatcctactgcggagtggcaactgg

SEQ ID NO: 229127 - DNA, 25 bp, probe
gatcctactgcggagtggcaactgg

SEQ ID NO: 229128 - DNA, 25 bp, probe
gatcctgaatggcacaggccaaggg

SEQ ID NO: 229129 - DNA, 25 bp, probe
gatcctgaatggcacaggccaaggg

SEQ ID NO: 229130 - DNA, 25 bp, probe
gatgcccaaggccagaatgacggga

SEQ ID NO: 229131 - DNA, 25 bp, probe
gatgaggaatggggaaagcctggat

SEQ ID NO: 229132 - DNA, 25 bp, probe
gatgagaagatggtcaactacctgg

SEQ ID NO: 229133 - DNA, 25 bp, probe
gatgatcatgagcggcaactaccag

SEQ ID NO: 229134 - DNA, 25 bp, probe
gatgatcataagcagcaactaccag

SEQ ID NO: 229135 - DNA, 25 bp, probe
gatgacaaatgctagaggctgctcc

SEQ ID NO: 229136 - DNA, 25 bp, probe
gatgacaaatgctagaggctgctcc

SEQ ID NO: 229137 - DNA, 25 bp, probe
gatgatgcaaagttgatctctgtac

SEQ ID NO: 229138 - DNA, 25 bp, probe
gatgatctacagttattcttcccat

SEQ ID NO: 229139 - DNA, 25 bp, probe
gatgcacggcagaatggttcccgtc

SEQ ID NO: 229140 - DNA, 25 bp, probe
gatgatggcaggaaggtctccattt

SEQ ID NO: 229141 - DNA, 25 bp, probe
gatgatggcaggaaggtctcctttt

SEQ ID NO: 229142 - DNA, 25 bp, probe
gatcaagacggagtttcaccatgtt

SEQ ID NO: 229143 - DNA, 25 bp, probe
gatgaggaggaggtcttcgacagca

SEQ ID NO: 229144 - DNA, 25 bp, probe
gatgaggtagagttttccaccagtc

SEQ ID NO: 229145 - DNA, 25 bp, probe
gatcggtacatggctatctgccacc

SEQ ID NO: 229146 - DNA, 25 bp, probe
gatgatggtacagcaccatccagcc

SEQ ID NO: 229147 - DNA, 25 bp, probe
gatgcttgtacaaacacgcacacac

SEQ ID NO: 229148 - DNA, 25 bp, probe
gatgcttgtacaaacacgcacacac

SEQ ID NO: 229149 - DNA, 25 bp, probe
gatgttgtatggacctgcagtcgac

SEQ ID NO: 229150 - DNA, 25 bp, probe
gatgttgtatggacctgcagtcgac

SEQ ID NO: 229151 - DNA, 25 bp, probe
gatgtatttgtagccagtctcctat

SEQ ID NO: 229152 - DNA, 25 bp, probe
gatgacatctctgtcttcgtcatcc

SEQ ID NO: 229153 - DNA, 25 bp, probe
gatgatcagaatgctgcgatcttct

SEQ ID NO: 229154 - DNA, 25 bp, probe
gatgagcagagaactgctacttata

SEQ ID NO: 229155 - DNA, 25 bp, probe
gatgatgtagaatttcctttaattt

SEQ ID NO: 229156 - DNA, 25 bp, probe
gatgattatatctttcttgtgtaga

SEQ ID NO: 229157 - DNA, 25 bp, probe
gatgaatttgctatgcgttatggaa

SEQ ID NO: 229158 - DNA, 25 bp, probe
gatgaggatggtatggactgcatgg

SEQ ID NO: 229159 - DNA, 25 bp, probe
gatgagagctacaatttgacggagc

SEQ ID NO: 229160 - DNA, 25 bp, probe
gatgaatgctaccatcactgaagaa

SEQ ID NO: 229161 - DNA, 25 bp, probe
gatgagctctatgacattatgaaaa

SEQ ID NO: 229162 - DNA, 25 bp, probe
gatgagctctatgacattatgaaaa

SEQ ID NO: 229163 - DNA, 25 bp, probe
gatgatgtgctagtcctgggaacag

SEQ ID NO: 229164 - DNA, 25 bp, probe
gatgatgtcttcctagggagtagag

SEQ ID NO: 229165 - DNA, 25 bp, probe
gatgattccactaaagaagttgaag

SEQ ID NO: 229166 - DNA, 25 bp, probe
gatgcattacaaccaaacagtggat

SEQ ID NO: 229167 - DNA, 25 bp, probe
gatgcttagagacccagaattgaga

SEQ ID NO: 229168 - DNA, 25 bp, probe
gatgactgggatacctggatgtaaa

SEQ ID NO: 229169 - DNA, 25 bp, probe
gatgactgggatacctggatgtaaa

SEQ ID NO: 229170 - DNA, 25 bp, probe
gatgaggaggacctggcggatgaaa

SEQ ID NO: 229171 - DNA, 25 bp, probe
gatgaggaccacgatgtcggtgcag

SEQ ID NO: 229172 - DNA, 25 bp, probe
gatgaggaccacgatgtcggtgcag

SEQ ID NO: 229173 - DNA, 25 bp, probe
gatgatggacaaggcagtggttgca

SEQ ID NO: 229174 - DNA, 25 bp, probe
gatgatcagtccggggcgctgcata

SEQ ID NO: 229175 - DNA, 25 bp, probe
gatgttcatcctgtggctctgaact

SEQ ID NO: 229176 - DNA, 25 bp, probe
gatgactacaagcagcctctaactg

SEQ ID NO: 229177 - DNA, 25 bp, probe
gatgaatccagatgacagattaacc

SEQ ID NO: 229178 - DNA, 25 bp, probe
gatgaatccagatgacagattaacc

SEQ ID NO: 229179 - DNA, 25 bp, probe
gatgacaccaatctcaaaaagctgc

SEQ ID NO: 229180 - DNA, 25 bp, probe
gatgacgcaactctcagtgaaactg

SEQ ID NO: 229181 - DNA, 25 bp, probe
gatgcaggaacatatgggaaccaac

SEQ ID NO: 229182 - DNA, 25 bp, probe
gatgcaggaacatatgggaaccaac

SEQ ID NO: 229183 - DNA, 25 bp, probe
gatgaaggaagccaaggatgcccgc

SEQ ID NO: 229184 - DNA, 25 bp, probe
gatgaagaccacctatggcacacca

SEQ ID NO: 229185 - DNA, 25 bp, probe
gatgaagactcacttcctgatgccc

SEQ ID NO: 229186 - DNA, 25 bp, probe
gatgattcctagatttagcacaatg

SEQ ID NO: 229187 - DNA, 25 bp, probe
gatgattcctagatttagcacaatg

SEQ ID NO: 229188 - DNA, 25 bp, probe
gatgttcctcagatgctgaaactag

SEQ ID NO: 229189 - DNA, 25 bp, probe
gatgttcctcattttaaatctgttg

SEQ ID NO: 229190 - DNA, 25 bp, probe
gatgttcctcattttaaatctgttg

SEQ ID NO: 229191 - DNA, 25 bp, probe
gatgtttctatatgtaacttcagat

SEQ ID NO: 229192 - DNA, 25 bp, probe
gatgttttcttactgtatcaatgaa

SEQ ID NO: 229193 - DNA, 25 bp, probe
gatgcttttgcttatgttcaagaaa

SEQ ID NO: 229194 - DNA, 25 bp, probe
gatgttgttctgtcagttgccaaag

SEQ ID NO: 229195 - DNA, 25 bp, probe
gatgagtttgtgtactggccaagtc

SEQ ID NO: 229196 - DNA, 25 bp, probe
gatgatgcttgttgaacggtccact

SEQ ID NO: 229197 - DNA, 25 bp, probe
gatgatgcttgttgaacggtccact

SEQ ID NO: 229198 - DNA, 25 bp, probe
gatgttgatttgtgctggattcctg

SEQ ID NO: 229199 - DNA, 25 bp, probe
gatgcattttggtgggctgtggtga

SEQ ID NO: 229200 - DNA, 25 bp, probe
gatgactttggcacgtcacgggatg

SEQ ID NO: 229201 - DNA, 25 bp, probe
gatgactttactctgtgtccggatg

SEQ ID NO: 229202 - DNA, 25 bp, probe
gatgactttactctgtgtccggatg

SEQ ID NO: 229203 - DNA, 25 bp, probe
gatgacttggagctctttccaaatg

SEQ ID NO: 229204 - DNA, 25 bp, probe
gatgccttgaggggtgtttcagact

SEQ ID NO: 229205 - DNA, 25 bp, probe
gatgctctgtaggcagcgttaggcg

SEQ ID NO: 229206 - DNA, 25 bp, probe
gatgttgagtgaccagctctgtggc

SEQ ID NO: 229207 - DNA, 25 bp, probe
gatgagaagtgactgcggctgaggc

SEQ ID NO: 229208 - DNA, 25 bp, probe
gatgatgcgggactgctggcatgca

SEQ ID NO: 229209 - DNA, 25 bp, probe
gatgatgagggactgttggcatgca

SEQ ID NO: 229210 - DNA, 25 bp, probe
gatctggcaggcagccaggatccct

SEQ ID NO: 229211 - DNA, 25 bp, probe
gatctggcaggcagccaggatccct

SEQ ID NO: 229212 - DNA, 25 bp, probe
gatctggcaggcagccaggatccct

SEQ ID NO: 229213 - DNA, 25 bp, probe
gatctggcaggcagccaggatccct

SEQ ID NO: 229214 - DNA, 25 bp, probe
gatgcggcagacatacaacacctgt

SEQ ID NO: 229215 - DNA, 25 bp, probe
gatgcggcagacatacaacacctgt

SEQ ID NO: 229216 - DNA, 25 bp, probe
gatgcagccaccatgaagacattct

SEQ ID NO: 229217 - DNA, 25 bp, probe
gatgcagcccctagaagtggctttc

SEQ ID NO: 229218 - DNA, 25 bp, probe
gatgagcacccagggagtgacgaag

SEQ ID NO: 229219 - DNA, 25 bp, probe
gatgataacacttggagctattaca

SEQ ID NO: 229220 - DNA, 25 bp, probe
gatgatcgaatctgggtgtttcaaa

SEQ ID NO: 229221 - DNA, 25 bp, probe
gatgatcgaatctgggtgtttcaaa

SEQ ID NO: 229222 - DNA, 25 bp, probe
gatatcgaatccctgccgttagcga

SEQ ID NO: 229223 - DNA, 25 bp, probe
gatcctaacaggccacgttaaactg

SEQ ID NO: 229224 - DNA, 25 bp, probe
gatgcagtgccaggaacccttaaac

SEQ ID NO: 229225 - DNA, 25 bp, probe
gatcaaggcaagaacctctttagca

SEQ ID NO: 229226 - DNA, 25 bp, probe
gatgctgaccacagacctttatagc

SEQ ID NO: 229227 - DNA, 25 bp, probe
gatgcaacaaaaggtctgtgtaagc

SEQ ID NO: 229228 - DNA, 25 bp, probe
gatgcaacacaaacttcctgttcta

SEQ ID NO: 229229 - DNA, 25 bp, probe
gatgatataaatactctccatttcc

SEQ ID NO: 229230 - DNA, 25 bp, probe
gatgatcaaagaaggctccatgtct

SEQ ID NO: 229231 - DNA, 25 bp, probe
gatgcatctaaaaggatctctgtag

SEQ ID NO: 229232 - DNA, 25 bp, probe
gatgcatctaaaaggatctctgtag

SEQ ID NO: 229233 - DNA, 25 bp, probe
gatgatgtgaaaagctgtttgtccc

SEQ ID NO: 229234 - DNA, 25 bp, probe
gatgatgtgaaagtgcagtttttct

SEQ ID NO: 229235 - DNA, 25 bp, probe
gatgatggacaaggttttgaatgat

SEQ ID NO: 229236 - DNA, 25 bp, probe
gatgacgaagcagatcttgtcaagg

SEQ ID NO: 229237 - DNA, 25 bp, probe
gatgctggaaatgctctgtacaaag

SEQ ID NO: 229238 - DNA, 25 bp, probe
gatctgggatatgtgttggaaaact

SEQ ID NO: 229239 - DNA, 25 bp, probe
gatccggccagttattgaacaaacc

SEQ ID NO: 229240 - DNA, 25 bp, probe
gatcctcccgtggcattaaaagaga

SEQ ID NO: 229241 - DNA, 25 bp, probe
gatatccccaagcttcagaaactag

SEQ ID NO: 229242 - DNA, 25 bp, probe
gatcgcccgagtgggacgattactt

SEQ ID NO: 229243 - DNA, 25 bp, probe
gatcccagaggtgcaaaaatacttt

SEQ ID NO: 229244 - DNA, 25 bp, probe
gatcccaagcggagaatgaccattg

SEQ ID NO: 229245 - DNA, 25 bp, probe
gatcctagggagggaaatgtttgcc

SEQ ID NO: 229246 - DNA, 25 bp, probe
gtactggaggagtgagtccctatgc

SEQ ID NO: 229247 - DNA, 25 bp, probe
gatgacggaggagtagccggccagt

SEQ ID NO: 229248 - DNA, 25 bp, probe
gatgagggtggtgcacgagaccagg

SEQ ID NO: 229249 - DNA, 25 bp, probe
gatcgggtgtctgaagtacctgcag

SEQ ID NO: 229250 - DNA, 25 bp, probe
gatccaaagtgggaattccctcgga

SEQ ID NO: 229251 - DNA, 25 bp, probe
gatccaaagtgggaattccctcgga

SEQ ID NO: 229252 - DNA, 25 bp, probe
gatgccaaggggtaatgggcccagc

SEQ ID NO: 229253 - DNA, 25 bp, probe
gatccaagaaggccttcatggcccc

SEQ ID NO: 229254 - DNA, 25 bp, probe
gatgacatggaatccttaggctacg

SEQ ID NO: 229255 - DNA, 25 bp, probe
gatgacggagaacttggagaggcac

SEQ ID NO: 229256 - DNA, 25 bp, probe
gatgacggagaacttggagaggcac

SEQ ID NO: 229257 - DNA, 25 bp, probe
gatgatctgtggaatttaatgaccc

SEQ ID NO: 229258 - DNA, 25 bp, probe
gatgaggtgtatgatctaatgagac

SEQ ID NO: 229259 - DNA, 25 bp, probe
gatgaggttggcagctgatcagacc

SEQ ID NO: 229260 - DNA, 25 bp, probe
gatgaggttggcagctgatcagacc

SEQ ID NO: 229261 - DNA, 25 bp, probe
gatgagagttgggtcgctgagcatt

SEQ ID NO: 229262 - DNA, 25 bp, probe
gatgagttgtgggaccagatgtcat

SEQ ID NO: 229263 - DNA, 25 bp, probe
gatgatggtggccgtacagttctcc

SEQ ID NO: 229264 - DNA, 25 bp, probe
gatgaggagggtcacctgatctgtc

SEQ ID NO: 229265 - DNA, 25 bp, probe
gatgaagcagggccgtactttgctg

SEQ ID NO: 229266 - DNA, 25 bp, probe
gatgaaatgcatcaggtcctttggg

SEQ ID NO: 229267 - DNA, 25 bp, probe
gatgcagaatctgaggttatgtctg

SEQ ID NO: 229268 - DNA, 25 bp, probe
gatcagaacacgggtgctggctatg

SEQ ID NO: 229269 - DNA, 25 bp, probe
gatcagagtgccgtggtggaggtct

SEQ ID NO: 229270 - DNA, 25 bp, probe
gatccaggcttcactaaggcttctg

SEQ ID NO: 229271 - DNA, 25 bp, probe
gatgacggtgtctactcaaggtatt

SEQ ID NO: 229272 - DNA, 25 bp, probe
gatgacagtgtttaaccatggtcaa

SEQ ID NO: 229273 - DNA, 25 bp, probe
gatgacttgattagagaccaaggat

SEQ ID NO: 229274 - DNA, 25 bp, probe
gatgatgatgatgatgaggaccacg

SEQ ID NO: 229275 - DNA, 25 bp, probe
gatgagatgctcaacaggaccaagg

SEQ ID NO: 229276 - DNA, 25 bp, probe
gatgagatgctcaacaggaccaagg

SEQ ID NO: 229277 - DNA, 25 bp, probe
gatgaatgtgcgtccagaacagccg

SEQ ID NO: 229278 - DNA, 25 bp, probe
gatgaaggctctgcagcacgagcgg

SEQ ID NO: 229279 - DNA, 25 bp, probe
gatgagggcatctctcagaagaggt

SEQ ID NO: 229280 - DNA, 25 bp, probe
gatgagggcatctctcagaagaggt

SEQ ID NO: 229281 - DNA, 25 bp, probe
gatgagggactgttggcatgcagtg

SEQ ID NO: 229282 - DNA, 25 bp, probe
gatgagggattgctggcatgctgta

SEQ ID NO: 229283 - DNA, 25 bp, probe
gatgagggatgggcctggcattctt

SEQ ID NO: 229284 - DNA, 25 bp, probe
gatgagcaggcgtggatggcatctt

SEQ ID NO: 229285 - DNA, 25 bp, probe
gatgaggacgggaactgctctttaa

SEQ ID NO: 229286 - DNA, 25 bp, probe
gatgcatggacagggtcctgtgctt

SEQ ID NO: 229287 - DNA, 25 bp, probe
gatgatgaaccgcttcatgccactg

SEQ ID NO: 229288 - DNA, 25 bp, probe
gatgaaacaaggatcttccgagtgc

SEQ ID NO: 229289 - DNA, 25 bp, probe
gatgaagatcaaagttctaagaagc

SEQ ID NO: 229290 - DNA, 25 bp, probe
gatgacagtcaaagtactaagcatt

SEQ ID NO: 229291 - DNA, 25 bp, probe
gatgatcagttctgaatatgcaact

SEQ ID NO: 229292 - DNA, 25 bp, probe
gatgacagtgactccacatcaactg

SEQ ID NO: 229293 - DNA, 25 bp, probe
gatgacagatgatgctgtcaagcaa

SEQ ID NO: 229294 - DNA, 25 bp, probe
gatgacaatcatgttgcagcaattc

SEQ ID NO: 229295 - DNA, 25 bp, probe
gatgacaatcatgttgcagcaattc

SEQ ID NO: 229296 - DNA, 25 bp, probe
gatgagaactctaagcaaacatgca

SEQ ID NO: 229297 - DNA, 25 bp, probe
gatctgtacctaagctcagtatgca

SEQ ID NO: 229298 - DNA, 25 bp, probe
gatgcttccagcttcattttgttgg

SEQ ID NO: 229299 - DNA, 25 bp, probe
gatgacctcattactaatatttgtt

SEQ ID NO: 229300 - DNA, 25 bp, probe
gatgacatctttacggacactatta

SEQ ID NO: 229301 - DNA, 25 bp, probe
gatgatctcattaataagaagatta

SEQ ID NO: 229302 - DNA, 25 bp, probe
gatgactttatttgcggagcatttc

SEQ ID NO: 229303 - DNA, 25 bp, probe
gatgaaattgatccagacagtgctg

SEQ ID NO: 229304 - DNA, 25 bp, probe
gatgaaattgatccagacagtgctg

SEQ ID NO: 229305 - DNA, 25 bp, probe
gatgaggggatccagagagtgctca

SEQ ID NO: 229306 - DNA, 25 bp, probe
gatgaagccagtgcagatggtgcca

SEQ ID NO: 229307 - DNA, 25 bp, probe
gatgcatagcacttaacagagtgca

SEQ ID NO: 229308 - DNA, 25 bp, probe
gatgaagcactataatattgttccc

SEQ ID NO: 229309 - DNA, 25 bp, probe
gataatccaatcttgatttttcccc

SEQ ID NO: 229310 - DNA, 25 bp, probe
gatgaatcacgcattgttttctctc

SEQ ID NO: 229311 - DNA, 25 bp, probe
gatgaacatgccgttggttttattg

SEQ ID NO: 229312 - DNA, 25 bp, probe
gatgaacatgccgttggttttattg

SEQ ID NO: 229313 - DNA, 25 bp, probe
gatgaacatgccgttggttttattg

SEQ ID NO: 229314 - DNA, 25 bp, probe
gatgaacccatcatgctggtttttc

SEQ ID NO: 229315 - DNA, 25 bp, probe
gatgaacccatcatgctggtttttc

SEQ ID NO: 229316 - DNA, 25 bp, probe
gatgacctcggcaactgcaggttat

SEQ ID NO: 229317 - DNA, 25 bp, probe
gatgacatgggggacctggtggatg

SEQ ID NO: 229318 - DNA, 25 bp, probe
gatgaatgtactgaccagctgaggc

SEQ ID NO: 229319 - DNA, 25 bp, probe
gatgaatgtactgacgagccgaggc

SEQ ID NO: 229320 - DNA, 25 bp, probe
gatgaagttctgcttgacctgagag

SEQ ID NO: 229321 - DNA, 25 bp, probe
gatgagactcacagatctacacaaa

SEQ ID NO: 229322 - DNA, 25 bp, probe
gatgagactcacagatctacacaaa

SEQ ID NO: 229323 - DNA, 25 bp, probe
gatgagatcatcaatttctacatga

SEQ ID NO: 229324 - DNA, 25 bp, probe
gatgcatatctcattcattacgatt

SEQ ID NO: 229325 - DNA, 25 bp, probe
gatgacatctctagtacttcggatc

SEQ ID NO: 229326 - DNA, 25 bp, probe
gatgacacctccaattttgatgaac

SEQ ID NO: 229327 - DNA, 25 bp, probe
gatgaagccaccagtatggagctga

SEQ ID NO: 229328 - DNA, 25 bp, probe
gatgaagccaccagtatggagctga

SEQ ID NO: 229329 - DNA, 25 bp, probe
gatgaagccccaggcgtggaagcat

SEQ ID NO: 229330 - DNA, 25 bp, probe
gatgacgctgatgtggagtggaaat

SEQ ID NO: 229331 - DNA, 25 bp, probe
gatgacgatgacattgtgaggaaga

SEQ ID NO: 229332 - DNA, 25 bp, probe
gatgcactactcggtgtgaatgaag

SEQ ID NO: 229333 - DNA, 25 bp, probe
gatgactgcagtccagggatgagag

SEQ ID NO: 229334 - DNA, 25 bp, probe
gatgcttgcgggaagagtgaggact

SEQ ID NO: 229335 - DNA, 25 bp, probe
gatgcttcggatgctggagcagtac

SEQ ID NO: 229336 - DNA, 25 bp, probe
gatgctcctggtggctgggaggcat

SEQ ID NO: 229337 - DNA, 25 bp, probe
gattcctgtgcacccggggtgacaa

SEQ ID NO: 229338 - DNA, 25 bp, probe
gattcctgtgcacccggggtgacaa

SEQ ID NO: 229339 - DNA, 25 bp, probe
gatgcccgagcaccgtgtcgggcag

SEQ ID NO: 229340 - DNA, 25 bp, probe
gatgcccgagcaccgtgtcgggcag

SEQ ID NO: 229341 - DNA, 25 bp, probe
gatcctcagccactcgtggctgcag

SEQ ID NO: 229342 - DNA, 25 bp, probe
gatgccagcgccatgctgaggcgct

SEQ ID NO: 229343 - DNA, 25 bp, probe
gatgccagcgccatgctgaggcgct

SEQ ID NO: 229344 - DNA, 25 bp, probe
gatccacgtctcgaatgtgcgcaat

SEQ ID NO: 229345 - DNA, 25 bp, probe
gatgccaagttcggacttcactaca

SEQ ID NO: 229346 - DNA, 25 bp, probe
gatgccaagttcggacttcactaca

SEQ ID NO: 229347 - DNA, 25 bp, probe
gatgccacagttaggaccaataaac

SEQ ID NO: 229348 - DNA, 25 bp, probe
gatccaacctgatgccgaacagaga

SEQ ID NO: 229349 - DNA, 25 bp, probe
gatgaaacttgctgtagatgaagaa

SEQ ID NO: 229350 - DNA, 25 bp, probe
gatgaacagtgttttatgctgggaa

SEQ ID NO: 229351 - DNA, 25 bp, probe
gatgcccaggtgtcttttgggtctc

SEQ ID NO: 229352 - DNA, 25 bp, probe
gatgctacacggttatatatgtggg

SEQ ID NO: 229353 - DNA, 25 bp, probe
gatgagatagcgcataataagggga

SEQ ID NO: 229354 - DNA, 25 bp, probe
gatgagtatgctctaaaagaatatg

SEQ ID NO: 229355 - DNA, 25 bp, probe
gatgcagttcagtttataagacaaa

SEQ ID NO: 229356 - DNA, 25 bp, probe
gatgcagtacaattcgcaagaaaaa

SEQ ID NO: 229357 - DNA, 25 bp, probe
gatgcagagacctacttcaactaca

SEQ ID NO: 229358 - DNA, 25 bp, probe
gatgcagagacctacttcaactaca

SEQ ID NO: 229359 - DNA, 25 bp, probe
gatgagcagtcacactgttactcca

SEQ ID NO: 229360 - DNA, 25 bp, probe
gatgagcagtcacactgttactcca

SEQ ID NO: 229361 - DNA, 25 bp, probe
gatgacaatgacaacgagtacacca

SEQ ID NO: 229362 - DNA, 25 bp, probe
gatgcactcaacacggtgtgaatca

SEQ ID NO: 229363 - DNA, 25 bp, probe
gatgactctactgcgtggatggtta

SEQ ID NO: 229364 - DNA, 25 bp, probe
gatcctggacccctgggtgtatatc

SEQ ID NO: 229365 - DNA, 25 bp, probe
gatcctggacccttgggtgtacatc

SEQ ID NO: 229366 - DNA, 25 bp, probe
gatcctgataggcaaggtttacaca

SEQ ID NO: 229367 - DNA, 25 bp, probe
gatgacatggggatagttcttacac

SEQ ID NO: 229368 - DNA, 25 bp, probe
gatgaaggtggcaaagtgctgcttc

SEQ ID NO: 229369 - DNA, 25 bp, probe
gatgaagtgtacgagctgatgcgtc

SEQ ID NO: 229370 - DNA, 25 bp, probe
gatgaagttacttggatggacccat

SEQ ID NO: 229371 - DNA, 25 bp, probe
gatgaatttgtcagatgtggaactt

SEQ ID NO: 229372 - DNA, 25 bp, probe
gatgaagaacacagcatgtgccaag

SEQ ID NO: 229373 - DNA, 25 bp, probe
gatgaagacagcatccttgaatatg

SEQ ID NO: 229374 - DNA, 25 bp, probe
gatgaatatgatgtcctcatagaag

SEQ ID NO: 229375 - DNA, 25 bp, probe
gatgaatgtgggattattgaatggg

SEQ ID NO: 229376 - DNA, 25 bp, probe
gatgaatgtgggattattgaatggg

SEQ ID NO: 229377 - DNA, 25 bp, probe
gatccatgttggacataattgagtt

SEQ ID NO: 229378 - DNA, 25 bp, probe
gatccgatctgtggaaactggtcac

SEQ ID NO: 229379 - DNA, 25 bp, probe
gatccctcagttcgaatctggtaaa

SEQ ID NO: 229380 - DNA, 25 bp, probe
gatcccgatgttagaaatggttcca

SEQ ID NO: 229381 - DNA, 25 bp, probe
gatcccgggtgaggagtgttgcccc

SEQ ID NO: 229382 - DNA, 25 bp, probe
gatcctgagggccagctatgagttt

SEQ ID NO: 229383 - DNA, 25 bp, probe
gatccatgggaacgcaagagttact

SEQ ID NO: 229384 - DNA, 25 bp, probe
gatccatgggaacgcaagagttact

SEQ ID NO: 229385 - DNA, 25 bp, probe
gatcgacggcactgcgaattttctg

SEQ ID NO: 229386 - DNA, 25 bp, probe
gatcccaggaaacatcatttcttta

SEQ ID NO: 229387 - DNA, 25 bp, probe
gatcccagaaaacctgatggaccag

SEQ ID NO: 229388 - DNA, 25 bp, probe
gatcctcaagaacgttatggagtcc

SEQ ID NO: 229389 - DNA, 25 bp, probe
gatgacccagatcatgtttgagacc

SEQ ID NO: 229390 - DNA, 25 bp, probe
gatgaccacaagttgcgttgaggcc

SEQ ID NO: 229391 - DNA, 25 bp, probe
gatgaccacaagttgcgttgaggcc

SEQ ID NO: 229392 - DNA, 25 bp, probe
gatgaccagtatgtcagttcagtcg

SEQ ID NO: 229393 - DNA, 25 bp, probe
gatgaccaatgggatgaggtcactt

SEQ ID NO: 229394 - DNA, 25 bp, probe
gatgaatcaactgagacacaacttc

SEQ ID NO: 229395 - DNA, 25 bp, probe
gatgactgacactcagatgcccagt

SEQ ID NO: 229396 - DNA, 25 bp, probe
gatgactgacactcagatgcccagt

SEQ ID NO: 229397 - DNA, 25 bp, probe
gatgaatgaccaactgatgctcctg

SEQ ID NO: 229398 - DNA, 25 bp, probe
gatgcaggatgcccacgtcatcctg

SEQ ID NO: 229399 - DNA, 25 bp, probe
gatgcaggtccatcctgacctggta

SEQ ID NO: 229400 - DNA, 25 bp, probe
gtagtcgccgtgcctaccatggtga

SEQ ID NO: 229401 - DNA, 25 bp, probe
gataccccgagactaccaggagagc

SEQ ID NO: 229402 - DNA, 25 bp, probe
gataccccgagactaccaggagagc

SEQ ID NO: 229403 - DNA, 25 bp, probe
gataaacagcgatctccaagtcaag

SEQ ID NO: 229404 - DNA, 25 bp, probe
gatcaaaacctacaagattcaactg

SEQ ID NO: 229405 - DNA, 25 bp, probe
gatgaaaaccttaatagttctgcct

SEQ ID NO: 229406 - DNA, 25 bp, probe
gataaagacctgcaactgttccgca

SEQ ID NO: 229407 - DNA, 25 bp, probe
gatgaagagggccaaactgttcccc

SEQ ID NO: 229408 - DNA, 25 bp, probe
gatgaaagccagaataacaatttac

SEQ ID NO: 229409 - DNA, 25 bp, probe
gatgaaagccagtgagcctactaac

SEQ ID NO: 229410 - DNA, 25 bp, probe
gatgaaagcctgtgatggtatcaat

SEQ ID NO: 229411 - DNA, 25 bp, probe
gatgaaggcatcacggctcttcaca

SEQ ID NO: 229412 - DNA, 25 bp, probe
gatgacgtgttacctgtttcacatg

SEQ ID NO: 229413 - DNA, 25 bp, probe
gatgaggagatcaaactggtctgca

SEQ ID NO: 229414 - DNA, 25 bp, probe
gatgaggagatcaaactggtctgca

SEQ ID NO: 229415 - DNA, 25 bp, probe
gatgaggatatccaagctggtccca

SEQ ID NO: 229416 - DNA, 25 bp, probe
gatgctggattccgaggggcacatc

SEQ ID NO: 229417 - DNA, 25 bp, probe
gatgctggagctagacgtggacaag

SEQ ID NO: 229418 - DNA, 25 bp, probe
gatgctggagctagacgtggacaag

SEQ ID NO: 229419 - DNA, 25 bp, probe
gatgcttgagtgcacagagaccaac

SEQ ID NO: 229420 - DNA, 25 bp, probe
gatgcttctcagaacatgaaatcaa

SEQ ID NO: 229421 - DNA, 25 bp, probe
gatgctaccagagtctacctaattc

SEQ ID NO: 229422 - DNA, 25 bp, probe
gatgcaagccagcttactagcactt

SEQ ID NO: 229423 - DNA, 25 bp, probe
gatgcaagccagcttactagcactt

SEQ ID NO: 229424 - DNA, 25 bp, probe
gatgcaacctgcataggtgatgact

SEQ ID NO: 229425 - DNA, 25 bp, probe
gatgcaacctgcataggtgatgact

SEQ ID NO: 229426 - DNA, 25 bp, probe
gatgcaacttactagagtgatgatg

SEQ ID NO: 229427 - DNA, 25 bp, probe
gatgacacttacgacaatgacattg

SEQ ID NO: 229428 - DNA, 25 bp, probe
gatgcgcacattagcgagtgagaac

SEQ ID NO: 229429 - DNA, 25 bp, probe
gatgcagccgttgcaggcgaagttg

SEQ ID NO: 229430 - DNA, 25 bp, probe
gatgcagccgttgcaggcgaagttg

SEQ ID NO: 229431 - DNA, 25 bp, probe
gatgagagcgttgaggccaaggagc

SEQ ID NO: 229432 - DNA, 25 bp, probe
gatgaagggtctggaggcagaggtg

SEQ ID NO: 229433 - DNA, 25 bp, probe
gatgagaagcctcgggctgcagggt

SEQ ID NO: 229434 - DNA, 25 bp, probe
gatgcagacgcagtggggcggggac

SEQ ID NO: 229435 - DNA, 25 bp, probe
gatgctgaccagccagggggctgag

SEQ ID NO: 229436 - DNA, 25 bp, probe
gatgctgctacacaggagaaggacc

SEQ ID NO: 229437 - DNA, 25 bp, probe
gatgcagctgaagatggaggaggag

SEQ ID NO: 229438 - DNA, 25 bp, probe
gatgcagtggagtgtggtggccagt

SEQ ID NO: 229439 - DNA, 25 bp, probe
gatgcgggctcatagggagccagct

SEQ ID NO: 229440 - DNA, 25 bp, probe
gatgcgggctcatagggagccagct

SEQ ID NO: 229441 - DNA, 25 bp, probe
gatgcccccagaaggggccagtgcg

SEQ ID NO: 229442 - DNA, 25 bp, probe
gatgctccccgaggtgggagcggcg

SEQ ID NO: 229443 - DNA, 25 bp, probe
gatcccccagccttgttaaggcatg

SEQ ID NO: 229444 - DNA, 25 bp, probe
gatcccgaagcctgtgtagcagtga

SEQ ID NO: 229445 - DNA, 25 bp, probe
gatctccgagacctgtctgaactgg

SEQ ID NO: 229446 - DNA, 25 bp, probe
gatcgatcccacatcctgaataaag

SEQ ID NO: 229447 - DNA, 25 bp, probe
gatcgtggacacatccggatttcag

SEQ ID NO: 229448 - DNA, 25 bp, probe
gatcgtggacacatccggatttcag

SEQ ID NO: 229449 - DNA, 25 bp, probe
gatacgggcacatacggattcttgc

SEQ ID NO: 229450 - DNA, 25 bp, probe
gatccagtaacctcggagacgggac

SEQ ID NO: 229451 - DNA, 25 bp, probe
gatccctagcttgaggggaggggag

SEQ ID NO: 229452 - DNA, 25 bp, probe
gatccctgtgtggtaggagttgggg

SEQ ID NO: 229453 - DNA, 25 bp, probe
gatcgccatccggatcacggcaatg

SEQ ID NO: 229454 - DNA, 25 bp, probe
gatctcagatctgcagacccaaagc

SEQ ID NO: 229455 - DNA, 25 bp, probe
gatgctgagagtgtaaatctagatg

SEQ ID NO: 229456 - DNA, 25 bp, probe
gatgcgtgcatttatcagatcaaaa

SEQ ID NO: 229457 - DNA, 25 bp, probe
gatcggttggtgcatctaatgaagg

SEQ ID NO: 229458 - DNA, 25 bp, probe
gatcggttggtgccactgaatggct

SEQ ID NO: 229459 - DNA, 25 bp, probe
gatctggtggatcagactgaaggct

SEQ ID NO: 229460 - DNA, 25 bp, probe
gatctggaagccaaacaccggcatt

SEQ ID NO: 229461 - DNA, 25 bp, probe
gatgctaatactggagaccgtggac

SEQ ID NO: 229462 - DNA, 25 bp, probe
gatctccatacggaggcgccaggag

SEQ ID NO: 229463 - DNA, 25 bp, probe
gatgcacagctgagatagagcaccg

SEQ ID NO: 229464 - DNA, 25 bp, probe
gatgcacagctgagatagagcaccg

SEQ ID NO: 229465 - DNA, 25 bp, probe
gatgacagtggcgattgtgaaggcg

SEQ ID NO: 229466 - DNA, 25 bp, probe
gatgacagtggcgattgtgaaggcg

SEQ ID NO: 229467 - DNA, 25 bp, probe
gatgacgaggatattgactgggtac

SEQ ID NO: 229468 - DNA, 25 bp, probe
gatgacttggagaaatactgggatt

SEQ ID NO: 229469 - DNA, 25 bp, probe
gatccctggaacatcatctgtagtt

SEQ ID NO: 229470 - DNA, 25 bp, probe
gatgacctgagaaaggattgtagac

SEQ ID NO: 229471 - DNA, 25 bp, probe
gatgacctgagacaagatgctgtca

SEQ ID NO: 229472 - DNA, 25 bp, probe
gatgaccatggactggatgctttat

SEQ ID NO: 229473 - DNA, 25 bp, probe
gatgactctgagtttgagctattaa

SEQ ID NO: 229474 - DNA, 25 bp, probe
gatgagcttctctgcataatttaaa

SEQ ID NO: 229475 - DNA, 25 bp, probe
gatgagcttctctgcataatttaaa

SEQ ID NO: 229476 - DNA, 25 bp, probe
gatgacatgtcctgcatcttctata

SEQ ID NO: 229477 - DNA, 25 bp, probe
gatgcacagtatctgctgttcttca

SEQ ID NO: 229478 - DNA, 25 bp, probe
gatgcacagtatctgctgttcttca

SEQ ID NO: 229479 - DNA, 25 bp, probe
gatgcaattgtatgtttctatgcca

SEQ ID NO: 229480 - DNA, 25 bp, probe
gatgcagacaaatcttatcaatgcc

SEQ ID NO: 229481 - DNA, 25 bp, probe
gatgcaacaggctatttctgcaatg

SEQ ID NO: 229482 - DNA, 25 bp, probe
gatgacagctggttcctgtgatgag

SEQ ID NO: 229483 - DNA, 25 bp, probe
gatgcagagcataacccggaggggc

SEQ ID NO: 229484 - DNA, 25 bp, probe
gatgcagagcataacccggaggggc

SEQ ID NO: 229485 - DNA, 25 bp, probe
gatgaaataacggggagccagcagc

SEQ ID NO: 229486 - DNA, 25 bp, probe
gatgacaatcaaagccggcctgaga

SEQ ID NO: 229487 - DNA, 25 bp, probe
gatccagtacatagcctggcctgac

SEQ ID NO: 229488 - DNA, 25 bp, probe
gatccagtggttgttacattctggt

SEQ ID NO: 229489 - DNA, 25 bp, probe
gatccagcaggtgaacaaccctgag

SEQ ID NO: 229490 - DNA, 25 bp, probe
gatgccaaggcagaacccattcttg

SEQ ID NO: 229491 - DNA, 25 bp, probe
gatgccaaggcagaacccattcttg

SEQ ID NO: 229492 - DNA, 25 bp, probe
gatgccatagagcaattcctttgct

SEQ ID NO: 229493 - DNA, 25 bp, probe
gatgctcataggtcacttctacttc

SEQ ID NO: 229494 - DNA, 25 bp, probe
gatgccatatgagagatttactaac

SEQ ID NO: 229495 - DNA, 25 bp, probe
gatccgaaggagaatccagccaagc

SEQ ID NO: 229496 - DNA, 25 bp, probe
gatgctgcggaccaggacaagcagc

SEQ ID NO: 229497 - DNA, 25 bp, probe
gatgctcgtgtgcagagagcactgg

SEQ ID NO: 229498 - DNA, 25 bp, probe
gatgctcgccggaagcagatgcagc

SEQ ID NO: 229499 - DNA, 25 bp, probe
gatgctgcgcaccaggagcaaaagg

SEQ ID NO: 229500 - DNA, 25 bp, probe
gatgcagctgctggcatggagtacc

SEQ ID NO: 229501 - DNA, 25 bp, probe
gatgcagctgttgagaaaacgaagt

SEQ ID NO: 229502 - DNA, 25 bp, probe
gatgcaggttgcaaaccatacatgg

SEQ ID NO: 229503 - DNA, 25 bp, probe
gatgagcctcagaagaacgccatgg

SEQ ID NO: 229504 - DNA, 25 bp, probe
gatgaccacaggcagcaccctgtgt

SEQ ID NO: 229505 - DNA, 25 bp, probe
gatgccatccagcaagacttcgtga

SEQ ID NO: 229506 - DNA, 25 bp, probe
gatgcctcgttattgtctatttgga

SEQ ID NO: 229507 - DNA, 25 bp, probe
gatcccagctgccaagtctgggggt

SEQ ID NO: 229508 - DNA, 25 bp, probe
gatgccacgactattcttggacttg

SEQ ID NO: 229509 - DNA, 25 bp, probe
gatgccagccaggtattttaagatt

SEQ ID NO: 229510 - DNA, 25 bp, probe
gatgccttgcagggcattcttcaaa

SEQ ID NO: 229511 - DNA, 25 bp, probe
gatctttgagcccattcttctgggt

SEQ ID NO: 229512 - DNA, 25 bp, probe
gatgctgggagccttttatgggact

SEQ ID NO: 229513 - DNA, 25 bp, probe
gatgcgggactttaagattgaagat

SEQ ID NO: 229514 - DNA, 25 bp, probe
gatgcgggactttaagattgaagat

SEQ ID NO: 229515 - DNA, 25 bp, probe
gatgctgtgtagataagtaagaagt

SEQ ID NO: 229516 - DNA, 25 bp, probe
gatgcgtgcagagctgtagtatcag

SEQ ID NO: 229517 - DNA, 25 bp, probe
gatgcagcaggaggccagaggacag

SEQ ID NO: 229518 - DNA, 25 bp, probe
gatcagattcggacaatcgaccgaa

SEQ ID NO: 229519 - DNA, 25 bp, probe
gatccactctggacactcaacaaga

SEQ ID NO: 229520 - DNA, 25 bp, probe
gatccagcgtgcgcacgcagagtac

SEQ ID NO: 229521 - DNA, 25 bp, probe
gatgcactgttagaggcagttactt

SEQ ID NO: 229522 - DNA, 25 bp, probe
gatgcactgttagaggcagttactt

SEQ ID NO: 229523 - DNA, 25 bp, probe
gatgccttctagaattggtttgctc

SEQ ID NO: 229524 - DNA, 25 bp, probe
gatgctgaatttcatctgcgtcttc

SEQ ID NO: 229525 - DNA, 25 bp, probe
gatgctgataatttgaccgtttata

SEQ ID NO: 229526 - DNA, 25 bp, probe
gatgcttgagtcttaccgtaattga

SEQ ID NO: 229527 - DNA, 25 bp, probe
gatgcctatttccaccagaagagga

SEQ ID NO: 229528 - DNA, 25 bp, probe
gatgcttcttacctgtcagaggagg

SEQ ID NO: 229529 - DNA, 25 bp, probe
gatgcttctgaccaagtgcaaagtg

SEQ ID NO: 229530 - DNA, 25 bp, probe
gatgctgctccagtaactacagtgg

SEQ ID NO: 229531 - DNA, 25 bp, probe
gatcttgccgtggactagcaatacc

SEQ ID NO: 229532 - DNA, 25 bp, probe
gatcctgcctgttggtggcatcaag

SEQ ID NO: 229533 - DNA, 25 bp, probe
gatgccagcatccttggatcagtac

SEQ ID NO: 229534 - DNA, 25 bp, probe
gatgcacatgatcctgtatgacctg

SEQ ID NO: 229535 - DNA, 25 bp, probe
gatgaatgcagactctgctaccatt

SEQ ID NO: 229536 - DNA, 25 bp, probe
gatgaatgcagactctgctaccatt

SEQ ID NO: 229537 - DNA, 25 bp, probe
gatgcaaagactggtatcactctgt

SEQ ID NO: 229538 - DNA, 25 bp, probe
gatgcaaagactggtatcactctgt

SEQ ID NO: 229539 - DNA, 25 bp, probe
gatgctgacagggaaaactctgttc

SEQ ID NO: 229540 - DNA, 25 bp, probe
gatgcagacaaggagataatttcaa

SEQ ID NO: 229541 - DNA, 25 bp, probe
gatgcattaacagaaactatcctgg

SEQ ID NO: 229542 - DNA, 25 bp, probe
gatgcattaacagaaactatcctgg

SEQ ID NO: 229543 - DNA, 25 bp, probe
gatgctgtcaaaggaagagcttcct

SEQ ID NO: 229544 - DNA, 25 bp, probe
gatgcggaagaaagagatgctcgga

SEQ ID NO: 229545 - DNA, 25 bp, probe
gatgcggaagaaagagatgctcgga

SEQ ID NO: 229546 - DNA, 25 bp, probe
gatgctggtagtatggattatgaga

SEQ ID NO: 229547 - DNA, 25 bp, probe
gatgcggtatgaaggcgtggtggac

SEQ ID NO: 229548 - DNA, 25 bp, probe
gatgcaagtatgttgggctcgctgg

SEQ ID NO: 229549 - DNA, 25 bp, probe
gatgccgtgttcaggctcatggagc

SEQ ID NO: 229550 - DNA, 25 bp, probe
gatgccgtgttcaggctcatggagc

SEQ ID NO: 229551 - DNA, 25 bp, probe
gatccagagcgacttgagcctgggc

SEQ ID NO: 229552 - DNA, 25 bp, probe
gatccagagcgacttgagcctgggc

SEQ ID NO: 229553 - DNA, 25 bp, probe
gatccagaggagaggcccaagtttc

SEQ ID NO: 229554 - DNA, 25 bp, probe
gatccagctgggaatcacccacgtt

SEQ ID NO: 229555 - DNA, 25 bp, probe
gatccagctgggaatcacccacgtt

SEQ ID NO: 229556 - DNA, 25 bp, probe
gatccagtgattttatacctcaggt

SEQ ID NO: 229557 - DNA, 25 bp, probe
gatctacagttattcttcccatagt

SEQ ID NO: 229558 - DNA, 25 bp, probe
gatctggcagtggaccaacccaaga

SEQ ID NO: 229559 - DNA, 25 bp, probe
gatgctgtaggctcaaagctgaaaa

SEQ ID NO: 229560 - DNA, 25 bp, probe
gatgcttattctgtacagtaaaatt

SEQ ID NO: 229561 - DNA, 25 bp, probe
gatcgtgttctcctacgtaaagatc

SEQ ID NO: 229562 - DNA, 25 bp, probe
gatgcgatttccgttttaacagaca

SEQ ID NO: 229563 - DNA, 25 bp, probe
gatcgaatctgggtgtttcaaagac

SEQ ID NO: 229564 - DNA, 25 bp, probe
gatccaactggaatattctcactag

SEQ ID NO: 229565 - DNA, 25 bp, probe
gatcctgaagtacatcctcagtcgt

SEQ ID NO: 229566 - DNA, 25 bp, probe
gatcctgaagtacatcctcagtcgt

SEQ ID NO: 229567 - DNA, 25 bp, probe
gatcctgtgcatcagtgacttaggg

SEQ ID NO: 229568 - DNA, 25 bp, probe
gattcggactcggacctagaggagg

SEQ ID NO: 229569 - DNA, 25 bp, probe
gtataggacaaggggtggaagggca

SEQ ID NO: 229570 - DNA, 25 bp, probe
gttgctggattatgggtggttgcca

SEQ ID NO: 229571 - DNA, 25 bp, probe
gatctgggcatatggggctgggatg

SEQ ID NO: 229572 - DNA, 25 bp, probe
gatgcgggaaagatccggccagtta

SEQ ID NO: 229573 - DNA, 25 bp, probe
gatgcttgagtacgaaccggccaag

SEQ ID NO: 229574 - DNA, 25 bp, probe
gatgcttgagtacgaaccggccaag

SEQ ID NO: 229575 - DNA, 25 bp, probe
gatgctgaaagacgatgccactgac

SEQ ID NO: 229576 - DNA, 25 bp, probe
gatgctcaaggaaatctaccacccc

SEQ ID NO: 229577 - DNA, 25 bp, probe
gatgcgctatggacaacatcccaac

SEQ ID NO: 229578 - DNA, 25 bp, probe
gatccttggtcaaatggatagccct

SEQ ID NO: 229579 - DNA, 25 bp, probe
gatgccgtggcaaactggtactttg

SEQ ID NO: 229580 - DNA, 25 bp, probe
gatgccgaacattaggaattgttta

SEQ ID NO: 229581 - DNA, 25 bp, probe
gatgctcctcactgcagtggatttt

SEQ ID NO: 229582 - DNA, 25 bp, probe
gatgctcctcactgcagtggatttt

SEQ ID NO: 229583 - DNA, 25 bp, probe
gatgctgatgctgcaagggctgatt

SEQ ID NO: 229584 - DNA, 25 bp, probe
gatgcttgtcacagtggcgcatttc

SEQ ID NO: 229585 - DNA, 25 bp, probe
gatgccttcatctgttcagtcatct

SEQ ID NO: 229586 - DNA, 25 bp, probe
gatgcctttctgatcttgaatcttc

SEQ ID NO: 229587 - DNA, 25 bp, probe
gatgcctttctgatcttgaatcttc

SEQ ID NO: 229588 - DNA, 25 bp, probe
gatgcaccatgtagaattttcactt

SEQ ID NO: 229589 - DNA, 25 bp, probe
gatgcatatcaaagatcttgttact

SEQ ID NO: 229590 - DNA, 25 bp, probe
gatgctggccagcattttcattcat

SEQ ID NO: 229591 - DNA, 25 bp, probe
gatgaagcagctctttagcatcctg

SEQ ID NO: 229592 - DNA, 25 bp, probe
gatgaatcccctggatacacggaat

SEQ ID NO: 229593 - DNA, 25 bp, probe
gtaatggtctctgaaaaggaattga

SEQ ID NO: 229594 - DNA, 25 bp, probe
gatacaagcctcgggagaagctaaa

SEQ ID NO: 229595 - DNA, 25 bp, probe
gatccatacaccacaggacactact

SEQ ID NO: 229596 - DNA, 25 bp, probe
gatctaccatacccattgactaact

SEQ ID NO: 229597 - DNA, 25 bp, probe
gatctaccatacccattgactaact

SEQ ID NO: 229598 - DNA, 25 bp, probe
gatctagcacactccaatacttgaa

SEQ ID NO: 229599 - DNA, 25 bp, probe
gatgcaacagcagaaaagtttcaga

SEQ ID NO: 229600 - DNA, 25 bp, probe
gatgaagcagcaactacaaatttaa

SEQ ID NO: 229601 - DNA, 25 bp, probe
gatgaagacttctcaatatgcttat

SEQ ID NO: 229602 - DNA, 25 bp, probe
gatgaagacatgactgctcgaatca

SEQ ID NO: 229603 - DNA, 25 bp, probe
gatgcacagagctctgcttgaaaca

SEQ ID NO: 229604 - DNA, 25 bp, probe
gatgccaggcacctcattgagaagt

SEQ ID NO: 229605 - DNA, 25 bp, probe
gatgccagtgaacttgtaaggaagc

SEQ ID NO: 229606 - DNA, 25 bp, probe
gatccaggaggtttggaggcagcga

SEQ ID NO: 229607 - DNA, 25 bp, probe
gatccagatgatcgtggtggatggg

SEQ ID NO: 229608 - DNA, 25 bp, probe
gatccatagcagccatgtgctggaa

SEQ ID NO: 229609 - DNA, 25 bp, probe
gatgctaagcagctgtatgccatga

SEQ ID NO: 229610 - DNA, 25 bp, probe
gatgctaagcagctgtatgccatga

SEQ ID NO: 229611 - DNA, 25 bp, probe
gatgctgggcgatctcatcaaggtg

SEQ ID NO: 229612 - DNA, 25 bp, probe
gatgcatagggaggtcctatggcag

SEQ ID NO: 229613 - DNA, 25 bp, probe
gatgaaggagagcgcccgcatagcc

SEQ ID NO: 229614 - DNA, 25 bp, probe
gatactggaagctctacgctactgc

SEQ ID NO: 229615 - DNA, 25 bp, probe
gatgccggaactgagaccatcagcc

SEQ ID NO: 229616 - DNA, 25 bp, probe
gatgctcgagcacctgtaaacaatt

SEQ ID NO: 229617 - DNA, 25 bp, probe
gatgccagagacgcggaacaattga

SEQ ID NO: 229618 - DNA, 25 bp, probe
gatgccacgacggtggacacactcc

SEQ ID NO: 229619 - DNA, 25 bp, probe
gatgccacgacggtggacacactcc

SEQ ID NO: 229620 - DNA, 25 bp, probe
gatgctcactgagcggcggaaccac

SEQ ID NO: 229621 - DNA, 25 bp, probe
gatgctcactgagcggcggaaccac

SEQ ID NO: 229622 - DNA, 25 bp, probe
gatgctcactgagcggcggaaccac

SEQ ID NO: 229623 - DNA, 25 bp, probe
gatgccactgaacagctatgaacga

SEQ ID NO: 229624 - DNA, 25 bp, probe
gatgcccgatcagataatgcaaaag

SEQ ID NO: 229625 - DNA, 25 bp, probe
gatgcaccggcagaaagcagatgaa

SEQ ID NO: 229626 - DNA, 25 bp, probe
gatcacgctggggaaacggataggc

SEQ ID NO: 229627 - DNA, 25 bp, probe
gatccagcgggaggaccaggagacg

SEQ ID NO: 229628 - DNA, 25 bp, probe
gatgctcagcaacaaaccatggaac

SEQ ID NO: 229629 - DNA, 25 bp, probe
gatgctcagattcaaccgacagaaa

SEQ ID NO: 229630 - DNA, 25 bp, probe
gatgctagtgattgacccagcaaaa

SEQ ID NO: 229631 - DNA, 25 bp, probe
gatgctactgaatttgcctgtctaa

SEQ ID NO: 229632 - DNA, 25 bp, probe
gatgcaatctgatttgtccttttga

SEQ ID NO: 229633 - DNA, 25 bp, probe
gatgaatgcatctgttcttctatta

SEQ ID NO: 229634 - DNA, 25 bp, probe
gatgaagtcctgattccttccaagg

SEQ ID NO: 229635 - DNA, 25 bp, probe
gatgcaaatctttattcactttcac

SEQ ID NO: 229636 - DNA, 25 bp, probe
gatgctgaaatttttcccatggaac

SEQ ID NO: 229637 - DNA, 25 bp, probe
gatgcgaacatactggctcttagga

SEQ ID NO: 229638 - DNA, 25 bp, probe
gatgcgaacatactggctcttagga

SEQ ID NO: 229639 - DNA, 25 bp, probe
gatgcgaacatactggctcttagga

SEQ ID NO: 229640 - DNA, 25 bp, probe
gatgctgaaccttgtttgtcagtga

SEQ ID NO: 229641 - DNA, 25 bp, probe
gatgcttgttctttattgacattga

SEQ ID NO: 229642 - DNA, 25 bp, probe
gatctggtccaattttggcttcatg

SEQ ID NO: 229643 - DNA, 25 bp, probe
gatctggtccaattttggcttcatg

SEQ ID NO: 229644 - DNA, 25 bp, probe
gatctcctcagatctttggtttttg

SEQ ID NO: 229645 - DNA, 25 bp, probe
gatgctactatattgcttttgtccc

SEQ ID NO: 229646 - DNA, 25 bp, probe
gatgctactatattgcttttgtccc

SEQ ID NO: 229647 - DNA, 25 bp, probe
gatgcctttgattttattcgcacca

SEQ ID NO: 229648 - DNA, 25 bp, probe
gatccacttgaggtttatcatgacc

SEQ ID NO: 229649 - DNA, 25 bp, probe
gatccttttgatcctatgactgaca

SEQ ID NO: 229650 - DNA, 25 bp, probe
gatccttttgatcctatgactgaca

SEQ ID NO: 229651 - DNA, 25 bp, probe
gatcgtcatgtatacttacggcaac

SEQ ID NO: 229652 - DNA, 25 bp, probe
gatgcccagaacatttcactggaca

SEQ ID NO: 229653 - DNA, 25 bp, probe
gatcctaggaagaggtctgatgaca

SEQ ID NO: 229654 - DNA, 25 bp, probe
gatccaaagaaacggctgactacat

SEQ ID NO: 229655 - DNA, 25 bp, probe
gatcgaaaaaaccgcaaaagcctat

SEQ ID NO: 229656 - DNA, 25 bp, probe
gatgctgagaaaaacccaagaccgc

SEQ ID NO: 229657 - DNA, 25 bp, probe
gatgctgagaaaaacccaagaccgc

SEQ ID NO: 229658 - DNA, 25 bp, probe
gatcggataaactttaatacctcct

SEQ ID NO: 229659 - DNA, 25 bp, probe
gatcaagaaacgtgtgaaaactccc

SEQ ID NO: 229660 - DNA, 25 bp, probe
gatcaagacaacccgttggagcccc

SEQ ID NO: 229661 - DNA, 25 bp, probe
gatgcaagcaaggggcgtggagagt

SEQ ID NO: 229662 - DNA, 25 bp, probe
gatgcaacttcttgtaatgggagat

SEQ ID NO: 229663 - DNA, 25 bp, probe
gatgcaacttcttgtaatgggagat

SEQ ID NO: 229664 - DNA, 25 bp, probe
gatgcagaacttactcttggaagaa

SEQ ID NO: 229665 - DNA, 25 bp, probe
gatgccacatctgaccttggatacc

SEQ ID NO: 229666 - DNA, 25 bp, probe
gatgctcaacaggaccaaggatgca

SEQ ID NO: 229667 - DNA, 25 bp, probe
gatgctcaacaggaccaaggatgca

SEQ ID NO: 229668 - DNA, 25 bp, probe
gatgccaaatatgccaaggtgaagc

SEQ ID NO: 229669 - DNA, 25 bp, probe
gatccagatgttacaacgggcagga

SEQ ID NO: 229670 - DNA, 25 bp, probe
gatctgccacctagcagacgtgggg

SEQ ID NO: 229671 - DNA, 25 bp, probe
gatctgccacctagcagacgtgggg

SEQ ID NO: 229672 - DNA, 25 bp, probe
gatcccacttgcaatgacttgggtg

SEQ ID NO: 229673 - DNA, 25 bp, probe
gatcccacttgcaatgacttgggtg

SEQ ID NO: 229674 - DNA, 25 bp, probe
gatgcccgactggatgggctgggtg

SEQ ID NO: 229675 - DNA, 25 bp, probe
gatccctacggcggcagtggagatg

SEQ ID NO: 229676 - DNA, 25 bp, probe
gatccctacggcggcagtggagatg

SEQ ID NO: 229677 - DNA, 25 bp, probe
gatgccccatggtgggcaggcagat

SEQ ID NO: 229678 - DNA, 25 bp, probe
gatgcccaaggattgggtgctgcta

SEQ ID NO: 229679 - DNA, 25 bp, probe
gatgcacctacatatggtgctgccc

SEQ ID NO: 229680 - DNA, 25 bp, probe
gatgcactttgtagatgctgtggct

SEQ ID NO: 229681 - DNA, 25 bp, probe
gatgcactttgtagatgctgtggct

SEQ ID NO: 229682 - DNA, 25 bp, probe
gatcactgttgaaggtgttcatggc

SEQ ID NO: 229683 - DNA, 25 bp, probe
gatcactgttgaaggtgttcatggc

SEQ ID NO: 229684 - DNA, 25 bp, probe
gatgctcttctcaaggtgacactga

SEQ ID NO: 229685 - DNA, 25 bp, probe
gatccttgacagggtgagcacatga

SEQ ID NO: 229686 - DNA, 25 bp, probe
gatcctgggcatgcgctagccaggt

SEQ ID NO: 229687 - DNA, 25 bp, probe
gatcgctcggatcggatcagatcgg

SEQ ID NO: 229688 - DNA, 25 bp, probe
gatcctgggcatctacaagcagggc

SEQ ID NO: 229689 - DNA, 25 bp, probe
gatcctaagcacttccataataggg

SEQ ID NO: 229690 - DNA, 25 bp, probe
gatcctcaccaagttcaaacagtcg

SEQ ID NO: 229691 - DNA, 25 bp, probe
gatcctcaccaactacatggacacc

SEQ ID NO: 229692 - DNA, 25 bp, probe
gatgccgaggagatcaaggtccagc

SEQ ID NO: 229693 - DNA, 25 bp, probe
gatgccgaggagatcaaggtccagc

SEQ ID NO: 229694 - DNA, 25 bp, probe
gatgccgaggagatcaaggtccagc

SEQ ID NO: 229695 - DNA, 25 bp, probe
gatgcgggcaaggccgaagtcagcg

SEQ ID NO: 229696 - DNA, 25 bp, probe
gatcttgaggaagctgaatgctcgg

SEQ ID NO: 229697 - DNA, 25 bp, probe
gatgcattggaggttgctgacctgt

SEQ ID NO: 229698 - DNA, 25 bp, probe
gatgcattgaggccttggatgaact

SEQ ID NO: 229699 - DNA, 25 bp, probe
gatgcattgaggccttggatgaact

SEQ ID NO: 229700 - DNA, 25 bp, probe
gatgcaatgatccttgtggatggac

SEQ ID NO: 229701 - DNA, 25 bp, probe
gatgcaagtgtgactgctggcgtct

SEQ ID NO: 229702 - DNA, 25 bp, probe
gatgcaagtgtgactgctggcgtct

SEQ ID NO: 229703 - DNA, 25 bp, probe
gatgcagagatgacctctcgctgcc

SEQ ID NO: 229704 - DNA, 25 bp, probe
gatgctgcatatagcccagcagatc

SEQ ID NO: 229705 - DNA, 25 bp, probe
gatgctgacacagtctagaatccat

SEQ ID NO: 229706 - DNA, 25 bp, probe
gatgctgacacagtctagaatccat

SEQ ID NO: 229707 - DNA, 25 bp, probe
gatgctgagacgctgaacaacatcc

SEQ ID NO: 229708 - DNA, 25 bp, probe
gatgctgagacacatgtctccgccc

SEQ ID NO: 229709 - DNA, 25 bp, probe
gatgctgagacacatgtctccgccc

SEQ ID NO: 229710 - DNA, 25 bp, probe
gatgctgacaagcttctgcacatcc

SEQ ID NO: 229711 - DNA, 25 bp, probe
gatgctgacaagcttctgcacatcc

SEQ ID NO: 229712 - DNA, 25 bp, probe
gatgcatgtcttcattctgcagaca

SEQ ID NO: 229713 - DNA, 25 bp, probe
gatgcattctcagattatgccaact

SEQ ID NO: 229714 - DNA, 25 bp, probe
gatgcattctcagattatgccaact

SEQ ID NO: 229715 - DNA, 25 bp, probe
gatgctttgtgaggatatcaaacta

SEQ ID NO: 229716 - DNA, 25 bp, probe
gatgctttgtgaggatatcaaacta

SEQ ID NO: 229717 - DNA, 25 bp, probe
gatgcctgttgagtcagatgctttc

SEQ ID NO: 229718 - DNA, 25 bp, probe
gatgcctgtatggagacatttgact

SEQ ID NO: 229719 - DNA, 25 bp, probe
gatgcgctgtcagataaacatggct

SEQ ID NO: 229720 - DNA, 25 bp, probe
gatgcgctgctggaaaaaccgtccg

SEQ ID NO: 229721 - DNA, 25 bp, probe
gatgcgtgcacggaggaagacagcc

SEQ ID NO: 229722 - DNA, 25 bp, probe
gatgcgctgaaggaggactggcagt

SEQ ID NO: 229723 - DNA, 25 bp, probe
gatctgcaagcggagggttcacatg

SEQ ID NO: 229724 - DNA, 25 bp, probe
gatctgcaagcggagggttcacatg

SEQ ID NO: 229725 - DNA, 25 bp, probe
gatccatggcaggacggtgtgaccc

SEQ ID NO: 229726 - DNA, 25 bp, probe
gatttgccacagttggtgtaccacg

SEQ ID NO: 229727 - DNA, 25 bp, probe
gatctaaagacaagttgtacccaga

SEQ ID NO: 229728 - DNA, 25 bp, probe
gatcagaagggctgcgtgtagcacc

SEQ ID NO: 229729 - DNA, 25 bp, probe
gattacagtatgtggggacacccat

SEQ ID NO: 229730 - DNA, 25 bp, probe
gatagaagattccccggaagcccag

SEQ ID NO: 229731 - DNA, 25 bp, probe
gatccactgttgctcttagaaggcc

SEQ ID NO: 229732 - DNA, 25 bp, probe
gatccatgggagcattctcaaaggc

SEQ ID NO: 229733 - DNA, 25 bp, probe
gatccagggatcattgtctaaatag

SEQ ID NO: 229734 - DNA, 25 bp, probe
gatccagggattactggcctccaga

SEQ ID NO: 229735 - DNA, 25 bp, probe
gatgccaacaaaactacttcaatat

SEQ ID NO: 229736 - DNA, 25 bp, probe
gatgccaacaaaactacttcaatat

SEQ ID NO: 229737 - DNA, 25 bp, probe
gatcctatgaaaacctataacatca

SEQ ID NO: 229738 - DNA, 25 bp, probe
gatgctgttaacaacttctgataac

SEQ ID NO: 229739 - DNA, 25 bp, probe
gatgctggcataacatactatttga

SEQ ID NO: 229740 - DNA, 25 bp, probe
gatgctgtgtagccacctatgtttt

SEQ ID NO: 229741 - DNA, 25 bp, probe
gatgctgtgtagccacctatgtttt

SEQ ID NO: 229742 - DNA, 25 bp, probe
gatgctgaaggacccttttgtgcgc

SEQ ID NO: 229743 - DNA, 25 bp, probe
gatgctgaaggacccttttgtgcgc

SEQ ID NO: 229744 - DNA, 25 bp, probe
gatccaaggagttgctgcttttcca

SEQ ID NO: 229745 - DNA, 25 bp, probe
gatgccaaaatattgcttatgtctc

SEQ ID NO: 229746 - DNA, 25 bp, probe
gatgctaaaatattttcacaaccag

SEQ ID NO: 229747 - DNA, 25 bp, probe
gatgctcactaaagatttcaaagga

SEQ ID NO: 229748 - DNA, 25 bp, probe
gatgctcatgtgacagcagtttgct

SEQ ID NO: 229749 - DNA, 25 bp, probe
gatgcatggctggcacattgttggc

SEQ ID NO: 229750 - DNA, 25 bp, probe
gatgctgtcagctcagctggatggc

SEQ ID NO: 229751 - DNA, 25 bp, probe
gatgcattcagctgaggatgtgcct

SEQ ID NO: 229752 - DNA, 25 bp, probe
gatgcattatgctggatacccattt

SEQ ID NO: 229753 - DNA, 25 bp, probe
gatgcattatgctggatacccattt

SEQ ID NO: 229754 - DNA, 25 bp, probe
gatgcagatatgtaggccaagcagt

SEQ ID NO: 229755 - DNA, 25 bp, probe
gatgcgattacgcttcagagatacc

SEQ ID NO: 229756 - DNA, 25 bp, probe
gatcggtactgtatcaagtcatggc

SEQ ID NO: 229757 - DNA, 25 bp, probe
gatccggagttttgaagaagcgcga

SEQ ID NO: 229758 - DNA, 25 bp, probe
gatcctgggttatgctgaggagccc

SEQ ID NO: 229759 - DNA, 25 bp, probe
gatcgaggactttctggaggagacg

SEQ ID NO: 229760 - DNA, 25 bp, probe
gatcaaagtctgttctggcggcatt

SEQ ID NO: 229761 - DNA, 25 bp, probe
gatctgctaaagttcatccggaatt

SEQ ID NO: 229762 - DNA, 25 bp, probe
gatctgctaaagttcatccggaatt

SEQ ID NO: 229763 - DNA, 25 bp, probe
gatgctgtaaaatttggccgaatgt

SEQ ID NO: 229764 - DNA, 25 bp, probe
gatcgacaaaatatcccgcattggc

SEQ ID NO: 229765 - DNA, 25 bp, probe
gatccaaaacatatccagctgcggg

SEQ ID NO: 229766 - DNA, 25 bp, probe
gatccaatcagacaatgggctgggg

SEQ ID NO: 229767 - DNA, 25 bp, probe
gatccaatcaagggaagttcagagg

SEQ ID NO: 229768 - DNA, 25 bp, probe
gatccagccaaacgaatttctggca

SEQ ID NO: 229769 - DNA, 25 bp, probe
gatccagccaaacgaatttctggca

SEQ ID NO: 229770 - DNA, 25 bp, probe
gatccagccaaacgaatttctggca

SEQ ID NO: 229771 - DNA, 25 bp, probe
gatgccattgtcaaaagatttctgg

SEQ ID NO: 229772 - DNA, 25 bp, probe
gatgccatatttgcaaattgccatc

SEQ ID NO: 229773 - DNA, 25 bp, probe
gatcgatttctggcaattgtctacc

SEQ ID NO: 229774 - DNA, 25 bp, probe
gatccattatctgaattttccactc

SEQ ID NO: 229775 - DNA, 25 bp, probe
gatcccaatattctttttcactgtt

SEQ ID NO: 229776 - DNA, 25 bp, probe
gataccacaagtgctttcccaagaa

SEQ ID NO: 229777 - DNA, 25 bp, probe
gatcccaaggcatatttctcctaga

SEQ ID NO: 229778 - DNA, 25 bp, probe
gatgctcaagaggcaacgctctctc

SEQ ID NO: 229779 - DNA, 25 bp, probe
gatcatgcaaagaacgctctccttt

SEQ ID NO: 229780 - DNA, 25 bp, probe
gatccaaaggacctgaccttcttga

SEQ ID NO: 229781 - DNA, 25 bp, probe
gatcataagggagctgcaggttctt

SEQ ID NO: 229782 - DNA, 25 bp, probe
gattaagaagatgtagctttctgac

SEQ ID NO: 229783 - DNA, 25 bp, probe
gatcccagaaattaagccttctgct

SEQ ID NO: 229784 - DNA, 25 bp, probe
gatcactgtaacatagtccgattgc

SEQ ID NO: 229785 - DNA, 25 bp, probe
gatcttaatacaatactcctcacct

SEQ ID NO: 229786 - DNA, 25 bp, probe
gatcgtgttataacacacccatggc

SEQ ID NO: 229787 - DNA, 25 bp, probe
gatcgtgttataacacacccatggc

SEQ ID NO: 229788 - DNA, 25 bp, probe
gatcttgttgaatccagtccaggta

SEQ ID NO: 229789 - DNA, 25 bp, probe
gatcttgttgaatccagtccaggta

SEQ ID NO: 229790 - DNA, 25 bp, probe
gatcctttggtgtgcagttcacagt

SEQ ID NO: 229791 - DNA, 25 bp, probe
gataaagaggtgtgctttgacagtt

SEQ ID NO: 229792 - DNA, 25 bp, probe
gatacaggggatcatgttaaaaata

SEQ ID NO: 229793 - DNA, 25 bp, probe
gatgcctaccctaagtttatagaat

SEQ ID NO: 229794 - DNA, 25 bp, probe
gatttttcgtctattgtaagaatta

SEQ ID NO: 229795 - DNA, 25 bp, probe
gttgttccttctgtactaaagtatt

SEQ ID NO: 229796 - DNA, 25 bp, probe
gtcgttttcttgcaaatgaagtttt

SEQ ID NO: 229797 - DNA, 25 bp, probe
gtcgttttcttgcaaatgaagtttt

SEQ ID NO: 229798 - DNA, 25 bp, probe
gatcgcttctctttgaaaaagcgtt

SEQ ID NO: 229799 - DNA, 25 bp, probe
gatcgcttctctttgaaaaagcgtt

SEQ ID NO: 229800 - DNA, 25 bp, probe
gattcttccccaaaaacacaggtgt

SEQ ID NO: 229801 - DNA, 25 bp, probe
gatcttcttcttcaaggaccggttc

SEQ ID NO: 229802 - DNA, 25 bp, probe
gttgtctttgggaaggaggaccttg

SEQ ID NO: 229803 - DNA, 25 bp, probe
gatagttaccggaacgaaatagctt

SEQ ID NO: 229804 - DNA, 25 bp, probe
gatcgttacccgaactgcatcaggc

SEQ ID NO: 229805 - DNA, 25 bp, probe
gatctactacgccgagaggataggg

SEQ ID NO: 229806 - DNA, 25 bp, probe
gatctactacgccgagaggataggg

SEQ ID NO: 229807 - DNA, 25 bp, probe
gatccctcacctcagaagtaagaca

SEQ ID NO: 229808 - DNA, 25 bp, probe
gatcctacagggcctgaagtacaca

SEQ ID NO: 229809 - DNA, 25 bp, probe
gatcccctggcttgcagaaaatcca

SEQ ID NO: 229810 - DNA, 25 bp, probe
gatgctgaggctcaaggaaaatcct

SEQ ID NO: 229811 - DNA, 25 bp, probe
gatgctgaggccacagctggtgaac

SEQ ID NO: 229812 - DNA, 25 bp, probe
gatctcaggccagaatggtaccttt

SEQ ID NO: 229813 - DNA, 25 bp, probe
gatctctaatctgttttgagtcttt

SEQ ID NO: 229814 - DNA, 25 bp, probe
gatgctctatacgcttttggtcgga

SEQ ID NO: 229815 - DNA, 25 bp, probe
gatgcctattaccagtttggcctgc

SEQ ID NO: 229816 - DNA, 25 bp, probe
gatccttaaacgtgtgtgaatgctg

SEQ ID NO: 229817 - DNA, 25 bp, probe
gatccaaaacctctcttagatctgg

SEQ ID NO: 229818 - DNA, 25 bp, probe
gatccaaacacctagtcaatacaga

SEQ ID NO: 229819 - DNA, 25 bp, probe
gatgccataaagaggatcgaccagt

SEQ ID NO: 229820 - DNA, 25 bp, probe
gatgctctaacgaattaccacaaac

SEQ ID NO: 229821 - DNA, 25 bp, probe
gatgctcaagatggtaatcagccac

SEQ ID NO: 229822 - DNA, 25 bp, probe
gatgctcaagatggtaatcagccac

SEQ ID NO: 229823 - DNA, 25 bp, probe
gatgctcagattggtttgagtgccc

SEQ ID NO: 229824 - DNA, 25 bp, probe
gatgctctacttcttcagcatggcc

SEQ ID NO: 229825 - DNA, 25 bp, probe
gatgctctcagcaatatttagtact

SEQ ID NO: 229826 - DNA, 25 bp, probe
gatgctgctcatgatttggatacac

SEQ ID NO: 229827 - DNA, 25 bp, probe
gatgcttgctttttggataaactga

SEQ ID NO: 229828 - DNA, 25 bp, probe
gatcttctttgagttaaacctacct

SEQ ID NO: 229829 - DNA, 25 bp, probe
gatctgtgtttacttaagaccgata

SEQ ID NO: 229830 - DNA, 25 bp, probe
gatgctttcttcattaagattttga

SEQ ID NO: 229831 - DNA, 25 bp, probe
gatgcttaccatggttaatgttttg

SEQ ID NO: 229832 - DNA, 25 bp, probe
gatcctcatgccgtttactgtaagg

SEQ ID NO: 229833 - DNA, 25 bp, probe
gatcctcatgccgtttactgtaagg

SEQ ID NO: 229834 - DNA, 25 bp, probe
gatccatccaagacttgactgtaac

SEQ ID NO: 229835 - DNA, 25 bp, probe
gatctcatgctcagatacatgggta

SEQ ID NO: 229836 - DNA, 25 bp, probe
gatcctgactagaatgctgtgtgtc

SEQ ID NO: 229837 - DNA, 25 bp, probe
gatcctgactagaatgctgtgtgtc

SEQ ID NO: 229838 - DNA, 25 bp, probe
gatcctgtgctggattccatgctgt

SEQ ID NO: 229839 - DNA, 25 bp, probe
gatctgctgatagagtctgtgttgg

SEQ ID NO: 229840 - DNA, 25 bp, probe
gatgccctgacatcatcattcttgt

SEQ ID NO: 229841 - DNA, 25 bp, probe
gatgccctgacatcatcattcttgt

SEQ ID NO: 229842 - DNA, 25 bp, probe
gatgccttgacatggtttggctatt

SEQ ID NO: 229843 - DNA, 25 bp, probe
gatccttgacaactttatcagccag

SEQ ID NO: 229844 - DNA, 25 bp, probe
gatgcgtggatatctgtgtatatgc

SEQ ID NO: 229845 - DNA, 25 bp, probe
gatgctgggtattctcagcagccag

SEQ ID NO: 229846 - DNA, 25 bp, probe
gatctggcctgtggatcagcagctc

SEQ ID NO: 229847 - DNA, 25 bp, probe
gatgctgagcgaagctataggctct

SEQ ID NO: 229848 - DNA, 25 bp, probe
gatgctgagcgaagctataggctct

SEQ ID NO: 229849 - DNA, 25 bp, probe
gatcatcaggagcctgtactgcctg

SEQ ID NO: 229850 - DNA, 25 bp, probe
gatgctgtggtccattacttgctaa

SEQ ID NO: 229851 - DNA, 25 bp, probe
gatgccagagtctccacatgtggaa

SEQ ID NO: 229852 - DNA, 25 bp, probe
gatgcccagtatcatacgttgatag

SEQ ID NO: 229853 - DNA, 25 bp, probe
gatcccagcaatgaactgttctagg

SEQ ID NO: 229854 - DNA, 25 bp, probe
gatctcccagatgaactacctgtgg

SEQ ID NO: 229855 - DNA, 25 bp, probe
gatctccacctcgaagtagtggctg

SEQ ID NO: 229856 - DNA, 25 bp, probe
gatgccctcccaggagtggaggggc

SEQ ID NO: 229857 - DNA, 25 bp, probe
gtcaacgcccaggactacaagggcc

SEQ ID NO: 229858 - DNA, 25 bp, probe
gattaagccctgaaggaaaggactt

SEQ ID NO: 229859 - DNA, 25 bp, probe
gattaagccctgaaggaaaggactt

SEQ ID NO: 229860 - DNA, 25 bp, probe
gattccaaccagacacgaattgttt

SEQ ID NO: 229861 - DNA, 25 bp, probe
gatcctcaaacaacactggtgtgac

SEQ ID NO: 229862 - DNA, 25 bp, probe
gatctccaagtcaagactgaggatg

SEQ ID NO: 229863 - DNA, 25 bp, probe
gatcttcaaggaaactcgtggtgga

SEQ ID NO: 229864 - DNA, 25 bp, probe
gatcttcaaggaaactcgtggtgga

SEQ ID NO: 229865 - DNA, 25 bp, probe
gatcgtcaagtacgaccgcgagatg

SEQ ID NO: 229866 - DNA, 25 bp, probe
gatcgtcaagtacgaccgcgagatg

SEQ ID NO: 229867 - DNA, 25 bp, probe
gatcgtcatatcaggcaacggacag

SEQ ID NO: 229868 - DNA, 25 bp, probe
gatcgtcatgtgggaagtcatgtca

SEQ ID NO: 229869 - DNA, 25 bp, probe
gatcattagtggcagagaatttgta

SEQ ID NO: 229870 - DNA, 25 bp, probe
gatcctattcagcagatattaattc

SEQ ID NO: 229871 - DNA, 25 bp, probe
gatctctgtatcccattattactat

SEQ ID NO: 229872 - DNA, 25 bp, probe
gatctctgtatcccattattactat

SEQ ID NO: 229873 - DNA, 25 bp, probe
gatctctgtatcctgttttgactaa

SEQ ID NO: 229874 - DNA, 25 bp, probe
gatcatttctgccatgatgtttaca

SEQ ID NO: 229875 - DNA, 25 bp, probe
gatctgtttcgtgcattggaagacc

SEQ ID NO: 229876 - DNA, 25 bp, probe
gatcgtattcttccagtgaaaacaa

SEQ ID NO: 229877 - DNA, 25 bp, probe
gatcgtattcttccagtgaaaacaa

SEQ ID NO: 229878 - DNA, 25 bp, probe
gatcaggacccgtcctcaataacaa

SEQ ID NO: 229879 - DNA, 25 bp, probe
gatcaagaagacactacaaaaaatt

SEQ ID NO: 229880 - DNA, 25 bp, probe
gataaagaagatgctaccaatgaaa

SEQ ID NO: 229881 - DNA, 25 bp, probe
gatccaaaagtgttggccatgaacc

SEQ ID NO: 229882 - DNA, 25 bp, probe
gatccgcaaggtgctggacgcgaac

SEQ ID NO: 229883 - DNA, 25 bp, probe
gatcctgcagggacgggacagtaac

SEQ ID NO: 229884 - DNA, 25 bp, probe
gatcctgtgggagaagtctctattc

SEQ ID NO: 229885 - DNA, 25 bp, probe
gatgccgtggggcagagatgctctc

SEQ ID NO: 229886 - DNA, 25 bp, probe
gatcagccgggtgcaatgactcatg

SEQ ID NO: 229887 - DNA, 25 bp, probe
gatctggcgggcacacagtgcaatg

SEQ ID NO: 229888 - DNA, 25 bp, probe
gatcctccgatgaaagcagccattt

SEQ ID NO: 229889 - DNA, 25 bp, probe
gatcctccgatgaaagcagccattt

SEQ ID NO: 229890 - DNA, 25 bp, probe
gatcgcccgataaagacggattcta

SEQ ID NO: 229891 - DNA, 25 bp, probe
gatgccaccgtggagaaagggtcta

SEQ ID NO: 229892 - DNA, 25 bp, probe
gatgccgcccaccagtaatggtgac

SEQ ID NO: 229893 - DNA, 25 bp, probe
gatgccagacaacaataattgctgc

SEQ ID NO: 229894 - DNA, 25 bp, probe
gatgccacagcacagaaatatcgac

SEQ ID NO: 229895 - DNA, 25 bp, probe
gatgccagagccgtaagaatgcgcc

SEQ ID NO: 229896 - DNA, 25 bp, probe
gatgccagagccgtaagaatgcgcc

SEQ ID NO: 229897 - DNA, 25 bp, probe
gatgccatgttggaaagaatcaagc

SEQ ID NO: 229898 - DNA, 25 bp, probe
gatctcatggtccggaatgacaccc

SEQ ID NO: 229899 - DNA, 25 bp, probe
gatctcatggtccggaatgacaccc

SEQ ID NO: 229900 - DNA, 25 bp, probe
gatccattgtagcgaaggcactggg

SEQ ID NO: 229901 - DNA, 25 bp, probe
gatccatatggatgagacaggcctg

SEQ ID NO: 229902 - DNA, 25 bp, probe
gatcaatgagggcggggcctggcgt

SEQ ID NO: 229903 - DNA, 25 bp, probe
gatcaatgagggcggggcctggcgt

SEQ ID NO: 229904 - DNA, 25 bp, probe
gatcaagaggcttgggggtaaggcc

SEQ ID NO: 229905 - DNA, 25 bp, probe
gatcaaacccgtgtggtagatgaca

SEQ ID NO: 229906 - DNA, 25 bp, probe
gataataccactagtctgacggata

SEQ ID NO: 229907 - DNA, 25 bp, probe
gataataccactagtctgacggata

SEQ ID NO: 229908 - DNA, 25 bp, probe
gtacgaccctaaggacgtcatcggc

SEQ ID NO: 229909 - DNA, 25 bp, probe
gttcggccctcagagaaggatccag

SEQ ID NO: 229910 - DNA, 25 bp, probe
gttcagggtctagccaaaatcatag

SEQ ID NO: 229911 - DNA, 25 bp, probe
gatgcctgggtttacaaaagattag

SEQ ID NO: 229912 - DNA, 25 bp, probe
gtgttgggattataaacctgaaaat

SEQ ID NO: 229913 - DNA, 25 bp, probe
gattctctgtatcaaacaaactgaa

SEQ ID NO: 229914 - DNA, 25 bp, probe
gttgactttggatacaaggtttggc

SEQ ID NO: 229915 - DNA, 25 bp, probe
gttgaccttctggaccacagagttt

SEQ ID NO: 229916 - DNA, 25 bp, probe
gttgaccttctggaccacagagttt

SEQ ID NO: 229917 - DNA, 25 bp, probe
gttacctcaggggagcagaagccta

SEQ ID NO: 229918 - DNA, 25 bp, probe
gatcggccatcaagggaagaactat

SEQ ID NO: 229919 - DNA, 25 bp, probe
gatccgagctctggagcgtggatac

SEQ ID NO: 229920 - DNA, 25 bp, probe
gatcctgcctctggtgagaggtagc

SEQ ID NO: 229921 - DNA, 25 bp, probe
gatcgactcattgctcagggatcct

SEQ ID NO: 229922 - DNA, 25 bp, probe
gatgcgagcactacctcagaatgac

SEQ ID NO: 229923 - DNA, 25 bp, probe
gatgcggccaatggcatgcagtacc

SEQ ID NO: 229924 - DNA, 25 bp, probe
gatcgctgccaatgcactcgatctt

SEQ ID NO: 229925 - DNA, 25 bp, probe
gatcaggcaccatgttctgacttgg

SEQ ID NO: 229926 - DNA, 25 bp, probe
gatcaacactctggttaccttggtc

SEQ ID NO: 229927 - DNA, 25 bp, probe
gatctatcactgacgttgaatttgg

SEQ ID NO: 229928 - DNA, 25 bp, probe
gatccaccagatcgacttgatcgtg

SEQ ID NO: 229929 - DNA, 25 bp, probe
gatccaccagatcgacttgatcgtg

SEQ ID NO: 229930 - DNA, 25 bp, probe
gatccacgagcaggggctgattgca

SEQ ID NO: 229931 - DNA, 25 bp, probe
gatccaagatcaggtcgcagacgaa

SEQ ID NO: 229932 - DNA, 25 bp, probe
gatccaagatcaggtcgcagacgaa

SEQ ID NO: 229933 - DNA, 25 bp, probe
gatgcgcaaacgctacagcgtggac

SEQ ID NO: 229934 - DNA, 25 bp, probe
gatgcgcaaacgctacagcgtggac

SEQ ID NO: 229935 - DNA, 25 bp, probe
gatctgaaccagaagaagcgggagc

SEQ ID NO: 229936 - DNA, 25 bp, probe
gatgctgtcaagcaatattgtttta

SEQ ID NO: 229937 - DNA, 25 bp, probe
gatcttcaacttactttcttttact

SEQ ID NO: 229938 - DNA, 25 bp, probe
gatccttttcatatttcttttgact

SEQ ID NO: 229939 - DNA, 25 bp, probe
gatctctttcctagattagcttctg

SEQ ID NO: 229940 - DNA, 25 bp, probe
gatcctttttaaggcagcagttatt

SEQ ID NO: 229941 - DNA, 25 bp, probe
gatgcctttttttctctgcatttaa

SEQ ID NO: 229942 - DNA, 25 bp, probe
gatgccttttggacactttcaagca

SEQ ID NO: 229943 - DNA, 25 bp, probe
gatctctttaacaatcttcctagac

SEQ ID NO: 229944 - DNA, 25 bp, probe
gatccttaatacatgtggctcccac

SEQ ID NO: 229945 - DNA, 25 bp, probe
gatgcctccattcctagagggctaa

SEQ ID NO: 229946 - DNA, 25 bp, probe
gatgcctccattcctagagggctaa

SEQ ID NO: 229947 - DNA, 25 bp, probe
gatgcctgtgcagttccaggtggta

SEQ ID NO: 229948 - DNA, 25 bp, probe
gatcctgctcaattccagtatgtac

SEQ ID NO: 229949 - DNA, 25 bp, probe
gatccagtctattcaaggcattgag

SEQ ID NO: 229950 - DNA, 25 bp, probe
gatcgagtccaaggcagcctatgtc

SEQ ID NO: 229951 - DNA, 25 bp, probe
gatcggtgacatctgggctttcact

SEQ ID NO: 229952 - DNA, 25 bp, probe
gatcaccataatcatctggcttttc

SEQ ID NO: 229953 - DNA, 25 bp, probe
gatcaccataatcatctggcttttc

SEQ ID NO: 229954 - DNA, 25 bp, probe
gatgcccatggacacgagcgtgtat

SEQ ID NO: 229955 - DNA, 25 bp, probe
gatcccagagagcccgaggaggtgt

SEQ ID NO: 229956 - DNA, 25 bp, probe
gatgccacaaagcggttaggctgtg

SEQ ID NO: 229957 - DNA, 25 bp, probe
gatccatctcacagggttattgtga

SEQ ID NO: 229958 - DNA, 25 bp, probe
gatccatgttcttgggactctgtgg

SEQ ID NO: 229959 - DNA, 25 bp, probe
gataaactctagggacactggcagc

SEQ ID NO: 229960 - DNA, 25 bp, probe
gatccaagcttacgtacgcgtgcat

SEQ ID NO: 229961 - DNA, 25 bp, probe
gatccaacttgtgaaatgcttcatg

SEQ ID NO: 229962 - DNA, 25 bp, probe
gatccaactttatgatgcgtttgag

SEQ ID NO: 229963 - DNA, 25 bp, probe
gatccaactttatgatgcgtttgag

SEQ ID NO: 229964 - DNA, 25 bp, probe
gatccaacatgtacagtatgtatat

SEQ ID NO: 229965 - DNA, 25 bp, probe
gatcgcacaggatgagatttatatc

SEQ ID NO: 229966 - DNA, 25 bp, probe
gatccatctgagttggcttttataa

SEQ ID NO: 229967 - DNA, 25 bp, probe
gatgccactttaagctttatcagaa

SEQ ID NO: 229968 - DNA, 25 bp, probe
gatgccacagttcatgaggataaga

SEQ ID NO: 229969 - DNA, 25 bp, probe
gatccacaggtatgtaaaagacaat

SEQ ID NO: 229970 - DNA, 25 bp, probe
gatccacaggtatgtaaaagacaat

SEQ ID NO: 229971 - DNA, 25 bp, probe
gatgcccacgtatgtgaaacacaca

SEQ ID NO: 229972 - DNA, 25 bp, probe
gatgcgcctggttattgagaaagca

SEQ ID NO: 229973 - DNA, 25 bp, probe
gatctcctggcgtactggaatgaca

SEQ ID NO: 229974 - DNA, 25 bp, probe
gatgcccagggattcctgaagatcg

SEQ ID NO: 229975 - DNA, 25 bp, probe
gatccggggcaaccatgagagtcgc

SEQ ID NO: 229976 - DNA, 25 bp, probe
gatccgggccaccagaagagattta

SEQ ID NO: 229977 - DNA, 25 bp, probe
gatatcagggaacatgaatggttta

SEQ ID NO: 229978 - DNA, 25 bp, probe
gatatcagggaacatgaatggttta

SEQ ID NO: 229979 - DNA, 25 bp, probe
gatctcggtgaacgtggaggactgt

SEQ ID NO: 229980 - DNA, 25 bp, probe
gatctcggtgaacgtggaggactgt

SEQ ID NO: 229981 - DNA, 25 bp, probe
gatccggtcatatatccaggaagtg

SEQ ID NO: 229982 - DNA, 25 bp, probe
gatgccattgctgaaatccgacgac

SEQ ID NO: 229983 - DNA, 25 bp, probe
gatgccaggctacagacacgtgtac

SEQ ID NO: 229984 - DNA, 25 bp, probe
gatgccaggctacagacacgtgtac

SEQ ID NO: 229985 - DNA, 25 bp, probe
gatgccagcaggatataccgtaaca

SEQ ID NO: 229986 - DNA, 25 bp, probe
gatccagaatgtttccgtgctacac

SEQ ID NO: 229987 - DNA, 25 bp, probe
gatccagaatgtttccgtgctacac

SEQ ID NO: 229988 - DNA, 25 bp, probe
gatgccgaagtatacaatgtaccat

SEQ ID NO: 229989 - DNA, 25 bp, probe
gatctcgaagtatctaattcgccct

SEQ ID NO: 229990 - DNA, 25 bp, probe
gatccgacggaataatagcagcccc

SEQ ID NO: 229991 - DNA, 25 bp, probe
gatccgacggaataatagcagcccc

SEQ ID NO: 229992 - DNA, 25 bp, probe
gatcctgacatgggagaacaaccac

SEQ ID NO: 229993 - DNA, 25 bp, probe
gatgccgcacacaaacaatgcaaac

SEQ ID NO: 229994 - DNA, 25 bp, probe
gatgcctgccaaatggaaccagagg

SEQ ID NO: 229995 - DNA, 25 bp, probe
gatgcctgccaaatggaaccagagg

SEQ ID NO: 229996 - DNA, 25 bp, probe
gatgccataaacaagaaccaggtcc

SEQ ID NO: 229997 - DNA, 25 bp, probe
gatgccataaacaaggaccagagaa

SEQ ID NO: 229998 - DNA, 25 bp, probe
gatgcctgaaacaagctacctgacc

SEQ ID NO: 229999 - DNA, 25 bp, probe
gatccatgaaccagaacctcacatc

SEQ ID NO: 230000 - DNA, 25 bp, probe
gatcctgaatccagcaacgcgagga

SEQ ID NO: 230001 - DNA, 25 bp, probe
gatcaagctagacttcaaggcggga

SEQ ID NO: 230002 - DNA, 25 bp, probe
gatcttgctctgattataatgccag

SEQ ID NO: 230003 - DNA, 25 bp, probe
gatcattgccaaggttaagtcctct

SEQ ID NO: 230004 - DNA, 25 bp, probe
gatcattgccaaggttaagtcctct

SEQ ID NO: 230005 - DNA, 25 bp, probe
gatactggagggataagctcgacac

SEQ ID NO: 230006 - DNA, 25 bp, probe
gataaggggtcatcaatgctggcaa

SEQ ID NO: 230007 - DNA, 25 bp, probe
gataaggggcttgtatctggaatat

SEQ ID NO: 230008 - DNA, 25 bp, probe
gatcaactgtacgcctttggtatct

SEQ ID NO: 230009 - DNA, 25 bp, probe
gatcatatttttttatacaggtatt

SEQ ID NO: 230010 - DNA, 25 bp, probe
gatcgtatttatgcaatgaaagttt

SEQ ID NO: 230011 - DNA, 25 bp, probe
gatcctttgtactctataatgtgaa

SEQ ID NO: 230012 - DNA, 25 bp, probe
gatgccatgtttgcctctaaattaa

SEQ ID NO: 230013 - DNA, 25 bp, probe
gatgccatatggatctctctacaat

SEQ ID NO: 230014 - DNA, 25 bp, probe
gatgccatatgctgttgccaacaac

SEQ ID NO: 230015 - DNA, 25 bp, probe
gatccatcatatagttcaaccatga

SEQ ID NO: 230016 - DNA, 25 bp, probe
gataatgactatatcaacgctagtt

SEQ ID NO: 230017 - DNA, 25 bp, probe
gataaaagttcttccagtcagtttt

SEQ ID NO: 230018 - DNA, 25 bp, probe
gatcaagaagatataaaggcgactg

SEQ ID NO: 230019 - DNA, 25 bp, probe
gataccaatgttccgactggagacg

SEQ ID NO: 230020 - DNA, 25 bp, probe
gatacggtgattgctagttgtgact

SEQ ID NO: 230021 - DNA, 25 bp, probe
gatacgattatgcccaatattaagt

SEQ ID NO: 230022 - DNA, 25 bp, probe
gataatttaacctatgttgtatgtg

SEQ ID NO: 230023 - DNA, 25 bp, probe
gatctttgaccagcactgtttatgg

SEQ ID NO: 230024 - DNA, 25 bp, probe
gatcttctgaactatgcacatttgt

SEQ ID NO: 230025 - DNA, 25 bp, probe
gatcctctgatttatgcactccgga

SEQ ID NO: 230026 - DNA, 25 bp, probe
gatccttggaagtcatccaggatga

SEQ ID NO: 230027 - DNA, 25 bp, probe
gatcctcttaaggcattatcagtga

SEQ ID NO: 230028 - DNA, 25 bp, probe
gatccctgacaagcagttagatgaa

SEQ ID NO: 230029 - DNA, 25 bp, probe
gatccctgacaagcagttagatgaa

SEQ ID NO: 230030 - DNA, 25 bp, probe
gatcctcgtcaggtgcaggtcagca

SEQ ID NO: 230031 - DNA, 25 bp, probe
gatgcctcagatgctataggtcagt

SEQ ID NO: 230032 - DNA, 25 bp, probe
gatccatacatactataaggcactt

SEQ ID NO: 230033 - DNA, 25 bp, probe
gatctgcagttactttgaagacatc

SEQ ID NO: 230034 - DNA, 25 bp, probe
gatctagattacactgcaccattcc

SEQ ID NO: 230035 - DNA, 25 bp, probe
gatccagaaactgctttctgtactc

SEQ ID NO: 230036 - DNA, 25 bp, probe
gatccagaaagcgctctgtctcatt

SEQ ID NO: 230037 - DNA, 25 bp, probe
gatccagaaagcgctctgtctcatt

SEQ ID NO: 230038 - DNA, 25 bp, probe
gatctcatacaaggcttattcttat

SEQ ID NO: 230039 - DNA, 25 bp, probe
gatctcattccttttattctatgct

SEQ ID NO: 230040 - DNA, 25 bp, probe
gatacattccgtgtacatcacgccc

SEQ ID NO: 230041 - DNA, 25 bp, probe
gataggaccttgggccaaatccgct

SEQ ID NO: 230042 - DNA, 25 bp, probe
gataaactcttggcctctaatcttt

SEQ ID NO: 230043 - DNA, 25 bp, probe
gatcaaaccccctattatacattat

SEQ ID NO: 230044 - DNA, 25 bp, probe
gataaaccgtttttaacacatagcg

SEQ ID NO: 230045 - DNA, 25 bp, probe
gataaagcggttcttggtaccagca

SEQ ID NO: 230046 - DNA, 25 bp, probe
gataaatcttttccatttgtacaaa

SEQ ID NO: 230047 - DNA, 25 bp, probe
gataaattaaatgacttgaatagct

SEQ ID NO: 230048 - DNA, 25 bp, probe
gatcaaagtcagagttattaaagtc

SEQ ID NO: 230049 - DNA, 25 bp, probe
gatcaaagtcagagttattaaagtc

SEQ ID NO: 230050 - DNA, 25 bp, probe
gataatgttagaggttttaaagtga

SEQ ID NO: 230051 - DNA, 25 bp, probe
gataagggagacctctttgaaagga

SEQ ID NO: 230052 - DNA, 25 bp, probe
gatcagggggacctttgctttttga

SEQ ID NO: 230053 - DNA, 25 bp, probe
gataatgaggtagtgggttttttat

SEQ ID NO: 230054 - DNA, 25 bp, probe
gatcttagggaatggatgtacctta

SEQ ID NO: 230055 - DNA, 25 bp, probe
gatcttagggaatggatgtacctta

SEQ ID NO: 230056 - DNA, 25 bp, probe
gtttcagtgtactggaaactttcca

SEQ ID NO: 230057 - DNA, 25 bp, probe
gtttcagtgtactggaaactttcca

SEQ ID NO: 230058 - DNA, 25 bp, probe
gatcttagctgtatggagtaactat

SEQ ID NO: 230059 - DNA, 25 bp, probe
gatctctggagccttggagttcttt

SEQ ID NO: 230060 - DNA, 25 bp, probe
gatcatcgacgcttttggtgagctc

SEQ ID NO: 230061 - DNA, 25 bp, probe
gatctgcggcgatttatcgatggtc

SEQ ID NO: 230062 - DNA, 25 bp, probe
gatcgctgccaggatatacgtaatc

SEQ ID NO: 230063 - DNA, 25 bp, probe
gatcctgccacctataaatctatca

SEQ ID NO: 230064 - DNA, 25 bp, probe
gatcgatgctgctccagtaactaca

SEQ ID NO: 230065 - DNA, 25 bp, probe
gatgccagctctaccagaaaaagta

SEQ ID NO: 230066 - DNA, 25 bp, probe
gatgccagctctaccagaaaaagta

SEQ ID NO: 230067 - DNA, 25 bp, probe
gatctctgctataccacaactacag

SEQ ID NO: 230068 - DNA, 25 bp, probe
gatcctgcaattccacttataggaa

SEQ ID NO: 230069 - DNA, 25 bp, probe
gatcttgccattccgagtgaagaaa

SEQ ID NO: 230070 - DNA, 25 bp, probe
gatcttgccattccgagtgaagaaa

SEQ ID NO: 230071 - DNA, 25 bp, probe
gataaccttctctggcagagtgact

SEQ ID NO: 230072 - DNA, 25 bp, probe
gataaccagacttgggtgagtgaat

SEQ ID NO: 230073 - DNA, 25 bp, probe
gataacgctgatgatgaggtggaca

SEQ ID NO: 230074 - DNA, 25 bp, probe
gatatgcccagagatgcatatgtgt

SEQ ID NO: 230075 - DNA, 25 bp, probe
gatcacttcagggacatgctgatga

SEQ ID NO: 230076 - DNA, 25 bp, probe
gatcgcctcaggcatatgctgaggg

SEQ ID NO: 230077 - DNA, 25 bp, probe
gatccttcaggattgatggggtaat

SEQ ID NO: 230078 - DNA, 25 bp, probe
gatcctgtcaggagttgtcgccatc

SEQ ID NO: 230079 - DNA, 25 bp, probe
gatcctgtcttagggcagaggccac

SEQ ID NO: 230080 - DNA, 25 bp, probe
gatccctcttgaagaaagtgctgag

SEQ ID NO: 230081 - DNA, 25 bp, probe
gatcccattggacgagactttgttg

SEQ ID NO: 230082 - DNA, 25 bp, probe
gatctccagaagtgcagcctttgtt

SEQ ID NO: 230083 - DNA, 25 bp, probe
gatctccaagacggatggcgtttgt

SEQ ID NO: 230084 - DNA, 25 bp, probe
gatcccatcacagtttggcgattgt

SEQ ID NO: 230085 - DNA, 25 bp, probe
gatcctgaacaggtacctgagctac

SEQ ID NO: 230086 - DNA, 25 bp, probe
gatctcagtaaggtacggagtaact

SEQ ID NO: 230087 - DNA, 25 bp, probe
gattagggccctacgtaataggcta

SEQ ID NO: 230088 - DNA, 25 bp, probe
gataggggcacccaagctaagggta

SEQ ID NO: 230089 - DNA, 25 bp, probe
gtaggggacctaggaattgcccgag

SEQ ID NO: 230090 - DNA, 25 bp, probe
gtaggggacctaggaattgcccgag

SEQ ID NO: 230091 - DNA, 25 bp, probe
gtaggaggtcctatagcattcccag

SEQ ID NO: 230092 - DNA, 25 bp, probe
gattcagagcctgatcttaacccca

SEQ ID NO: 230093 - DNA, 25 bp, probe
gatccaggtcctattcaaagccaaa

SEQ ID NO: 230094 - DNA, 25 bp, probe
gatctattactctgacataaaccca

SEQ ID NO: 230095 - DNA, 25 bp, probe
gatctattactctgacataaaccca

SEQ ID NO: 230096 - DNA, 25 bp, probe
gatctgggcaacagactcacagagc

SEQ ID NO: 230097 - DNA, 25 bp, probe
gatctgggcaacagactcacagagc

SEQ ID NO: 230098 - DNA, 25 bp, probe
gatctccagaactagacgccatggc

SEQ ID NO: 230099 - DNA, 25 bp, probe
gatctccagaactagacgccatggc

SEQ ID NO: 230100 - DNA, 25 bp, probe
gatctccagaactagacgccatggc

SEQ ID NO: 230101 - DNA, 25 bp, probe
gatctgcggatgataggagcctgcc

SEQ ID NO: 230102 - DNA, 25 bp, probe
gatcatcaccgaatacaacctgctc

SEQ ID NO: 230103 - DNA, 25 bp, probe
gatccaccgagatatcaaagctgcc

SEQ ID NO: 230104 - DNA, 25 bp, probe
gatccaccgagatatcaaagctgcc

SEQ ID NO: 230105 - DNA, 25 bp, probe
gatccacctgatcaataatatgctg

SEQ ID NO: 230106 - DNA, 25 bp, probe
gatcctcttcatgcacaagatgagg

SEQ ID NO: 230107 - DNA, 25 bp, probe
gatccatcaacaccacaacaggagt

SEQ ID NO: 230108 - DNA, 25 bp, probe
gatccattcacagagacctagcagc

SEQ ID NO: 230109 - DNA, 25 bp, probe
gatcctccagaaagtcgagcagcac

SEQ ID NO: 230110 - DNA, 25 bp, probe
gatcgccatagaaagtcttgcagac

SEQ ID NO: 230111 - DNA, 25 bp, probe
gatcacgctggaactgagttgcgac

SEQ ID NO: 230112 - DNA, 25 bp, probe
gatcctctcagaacagagtctggga

SEQ ID NO: 230113 - DNA, 25 bp, probe
gatccgtcatacgaagatatgcgtg

SEQ ID NO: 230114 - DNA, 25 bp, probe
gatcgcagatctctatggatataat

SEQ ID NO: 230115 - DNA, 25 bp, probe
gataagtctcagctggatgcagtga

SEQ ID NO: 230116 - DNA, 25 bp, probe
gatcgagcagtggactggtggtgct

SEQ ID NO: 230117 - DNA, 25 bp, probe
gatcgagcagtggactggtggtgct

SEQ ID NO: 230118 - DNA, 25 bp, probe
gatcgacgcgcttctgtatgggcgc

SEQ ID NO: 230119 - DNA, 25 bp, probe
gatccagcggcatctggatgccagg

SEQ ID NO: 230120 - DNA, 25 bp, probe
gatcctgcgtaaccagatccagcag

SEQ ID NO: 230121 - DNA, 25 bp, probe
gatcccagtggacagaagcaaggtg

SEQ ID NO: 230122 - DNA, 25 bp, probe
gatcgctcatggctgcaagaaaagg

SEQ ID NO: 230123 - DNA, 25 bp, probe
gatcgcttgagcccaggagttcaag

SEQ ID NO: 230124 - DNA, 25 bp, probe
gatccttcacgcagtgtttcagatg

SEQ ID NO: 230125 - DNA, 25 bp, probe
gatccaggcactatgttctctgaag

SEQ ID NO: 230126 - DNA, 25 bp, probe
gatccagatgttatgctcctgctga

SEQ ID NO: 230127 - DNA, 25 bp, probe
gatcccagtgatcatcatcgcatgg

SEQ ID NO: 230128 - DNA, 25 bp, probe
gatcctagagatctgcaagcattgt

SEQ ID NO: 230129 - DNA, 25 bp, probe
gatcctagagatctgcaagcattgt

SEQ ID NO: 230130 - DNA, 25 bp, probe
gatccaaagctgctgaagtatgttt

SEQ ID NO: 230131 - DNA, 25 bp, probe
gatcctaagctcttgactgtagttt

SEQ ID NO: 230132 - DNA, 25 bp, probe
gatcccaattcatttcatctactac

SEQ ID NO: 230133 - DNA, 25 bp, probe
gatctcgaagtgttttctacagact

SEQ ID NO: 230134 - DNA, 25 bp, probe
gatcgccaggcgttttctgagcata

SEQ ID NO: 230135 - DNA, 25 bp, probe
gatccgatggtggttactgactgca

SEQ ID NO: 230136 - DNA, 25 bp, probe
gatctctgtgtgaaagtatctgact

SEQ ID NO: 230137 - DNA, 25 bp, probe
gatctcatgcgctagagaaacagaa

SEQ ID NO: 230138 - DNA, 25 bp, probe
gatcctgctcacagaatcacagcta

SEQ ID NO: 230139 - DNA, 25 bp, probe
gatcctatgactgacatcaactaaa

SEQ ID NO: 230140 - DNA, 25 bp, probe
gatcctatgactgacatcaactaaa

SEQ ID NO: 230141 - DNA, 25 bp, probe
gatcctgtgactgaaaactgtgttc

SEQ ID NO: 230142 - DNA, 25 bp, probe
gatccttgtggcacacaactgtggt

SEQ ID NO: 230143 - DNA, 25 bp, probe
gatcctcaggaaagcactacggggt

SEQ ID NO: 230144 - DNA, 25 bp, probe
gatcctcagtagtgtctttgcagga

SEQ ID NO: 230145 - DNA, 25 bp, probe
gatcctcgtcgtggactgggatgtg

SEQ ID NO: 230146 - DNA, 25 bp, probe
gatctctcgtctcaatcaggaggtg

SEQ ID NO: 230147 - DNA, 25 bp, probe
gatctccgtcttttcagaagtgctg

SEQ ID NO: 230148 - DNA, 25 bp, probe
gatcttgtcatttatacgaaagctg

SEQ ID NO: 230149 - DNA, 25 bp, probe
gatcctggatgaaaagcccaagctg

SEQ ID NO: 230150 - DNA, 25 bp, probe
gatcaccgaggttatgccaaactgg

SEQ ID NO: 230151 - DNA, 25 bp, probe
gataccaactttacttaacgtggat

SEQ ID NO: 230152 - DNA, 25 bp, probe
gataccaactttacttaacgtggat

SEQ ID NO: 230153 - DNA, 25 bp, probe
gtcagtaatttatcttaacctcaaa

SEQ ID NO: 230154 - DNA, 25 bp, probe
tccagtgactcagacgttagacctc

SEQ ID NO: 230155 - DNA, 25 bp, probe
gatcagagcccagaagtaagtcctc

SEQ ID NO: 230156 - DNA, 25 bp, probe
gatcagagcccagaagtaagtcctc

SEQ ID NO: 230157 - DNA, 25 bp, probe
gatcaaccagcggcaggaaagtctg

SEQ ID NO: 230158 - DNA, 25 bp, probe
gatcaacactggtcaggaggagaca

SEQ ID NO: 230159 - DNA, 25 bp, probe
gatctacacacttgcagtttggaag

SEQ ID NO: 230160 - DNA, 25 bp, probe
gatctgacccaccagtttgtacatc

SEQ ID NO: 230161 - DNA, 25 bp, probe
gatcaggtctaccattgcttgttca

SEQ ID NO: 230162 - DNA, 25 bp, probe
gatcaggtctaccattgcttgttca

SEQ ID NO: 230163 - DNA, 25 bp, probe
gatcttcgtcaggatatgcttgttc

SEQ ID NO: 230164 - DNA, 25 bp, probe
gatcttcgtcaggatatgcttgttc

SEQ ID NO: 230165 - DNA, 25 bp, probe
gatttattcaggatcgtgttaacgg

SEQ ID NO: 230166 - DNA, 25 bp, probe
gatttattcaggatcgtgttaacgg

SEQ ID NO: 230167 - DNA, 25 bp, probe
gatcttcccgtactgtcgagtaagc

SEQ ID NO: 230168 - DNA, 25 bp, probe
gatcttcccttacattagtaccaca

SEQ ID NO: 230169 - DNA, 25 bp, probe
gatcctcctttgaaaaagtctccta

SEQ ID NO: 230170 - DNA, 25 bp, probe
gatctccgctgtattacaaatttta

SEQ ID NO: 230171 - DNA, 25 bp, probe
gatctccgctgtattacaaatttta

SEQ ID NO: 230172 - DNA, 25 bp, probe
gatccatcggtttatactatttatt

SEQ ID NO: 230173 - DNA, 25 bp, probe
gatccatcggtttatactatttatt

SEQ ID NO: 230174 - DNA, 25 bp, probe
gatcctcgaatcttttgctttttac

SEQ ID NO: 230175 - DNA, 25 bp, probe
gataccacatatttgtttgtttaaa

SEQ ID NO: 230176 - DNA, 25 bp, probe
gataccaaaggtttctcatgttaat

SEQ ID NO: 230177 - DNA, 25 bp, probe
gatagaaaggtcattatctgttcat

SEQ ID NO: 230178 - DNA, 25 bp, probe
gatcagatcaagcattctttctatt

SEQ ID NO: 230179 - DNA, 25 bp, probe
gatcgctaagctggctctgtttgat

SEQ ID NO: 230180 - DNA, 25 bp, probe
gatctgatcaacactctggttacct

SEQ ID NO: 230181 - DNA, 25 bp, probe
gatctgatcaacactctggttacct

SEQ ID NO: 230182 - DNA, 25 bp, probe
gatctgagccaaccttggccgacat

SEQ ID NO: 230183 - DNA, 25 bp, probe
gatccgaacacagcggtcgacattt

SEQ ID NO: 230184 - DNA, 25 bp, probe
gatcgtgaactctcgaatctgcatc

SEQ ID NO: 230185 - DNA, 25 bp, probe
gatcgtgttacagtcacaatctact

SEQ ID NO: 230186 - DNA, 25 bp, probe
gatcagtgtgataaggactttagga

SEQ ID NO: 230187 - DNA, 25 bp, probe
gatcgcagactttggactctgcaag

SEQ ID NO: 230188 - DNA, 25 bp, probe
gatcgcagactttggactctgcaag

SEQ ID NO: 230189 - DNA, 25 bp, probe
gatcacagcagtttatagctccaac

SEQ ID NO: 230190 - DNA, 25 bp, probe
gatcacagcagtttatagctccaac

SEQ ID NO: 230191 - DNA, 25 bp, probe
gatcgagtgagcattacaacaacaa

SEQ ID NO: 230192 - DNA, 25 bp, probe
gatcgaggagatctcaccaagcaca

SEQ ID NO: 230193 - DNA, 25 bp, probe
gatcgaggagatctcaccaagcaca

SEQ ID NO: 230194 - DNA, 25 bp, probe
gatcggcgattggctccaagagcga

SEQ ID NO: 230195 - DNA, 25 bp, probe
gatcgcggattttggaatgtgcaag

SEQ ID NO: 230196 - DNA, 25 bp, probe
gatcgcagggatattaggcgcaatg

SEQ ID NO: 230197 - DNA, 25 bp, probe
gatcgcagggatattaggcgcaatg

SEQ ID NO: 230198 - DNA, 25 bp, probe
gatccgcggctcattgatgggaaga

SEQ ID NO: 230199 - DNA, 25 bp, probe
gatcctggatccctgtgtggtagga

SEQ ID NO: 230200 - DNA, 25 bp, probe
gatcctgagccacctttggaagagc

SEQ ID NO: 230201 - DNA, 25 bp, probe
gatcctgacctcactttgatcaggc

SEQ ID NO: 230202 - DNA, 25 bp, probe
gatctcaggttctccttgattggga

SEQ ID NO: 230203 - DNA, 25 bp, probe
gatcctgggtctgcaactttggaaa

SEQ ID NO: 230204 - DNA, 25 bp, probe
gatcctgggtgtgcacctcaaggac

SEQ ID NO: 230205 - DNA, 25 bp, probe
gatcctgaaagtgaccggggtgcct

SEQ ID NO: 230206 - DNA, 25 bp, probe
gatcctgaaagtgaccggggtgcct

SEQ ID NO: 230207 - DNA, 25 bp, probe
gtccgaacagacagcctgaaggggc

SEQ ID NO: 230208 - DNA, 25 bp, probe
gatcctacaaacacgtcagtgggca

SEQ ID NO: 230209 - DNA, 25 bp, probe
gatcttgaaaacatcgtagcgattc

SEQ ID NO: 230210 - DNA, 25 bp, probe
gatcttgaaaacatcgtagcgattc

SEQ ID NO: 230211 - DNA, 25 bp, probe
gatcttatggaactctttagaattg

SEQ ID NO: 230212 - DNA, 25 bp, probe
gatcttggtagactctttgcgaaag

SEQ ID NO: 230213 - DNA, 25 bp, probe
gatcgtggtgcatccatactggaac

SEQ ID NO: 230214 - DNA, 25 bp, probe
gatagtagtgctgtcatcatctgcc

SEQ ID NO: 230215 - DNA, 25 bp, probe
gatcatgtggatcgctactcatccc

SEQ ID NO: 230216 - DNA, 25 bp, probe
gatctttggcctactgcaggcccat

SEQ ID NO: 230217 - DNA, 25 bp, probe
gatcctatggcttatctgatggtcc

SEQ ID NO: 230218 - DNA, 25 bp, probe
gatcccatgagctcaatgcattttc

SEQ ID NO: 230219 - DNA, 25 bp, probe
gatcctcagacatgcagctgtgtgt

SEQ ID NO: 230220 - DNA, 25 bp, probe
gatcctcagacatgcagctgtgtgt

SEQ ID NO: 230221 - DNA, 25 bp, probe
gatctatgaagatgattcatgcttg

SEQ ID NO: 230222 - DNA, 25 bp, probe
gatctatgaagatgattcatgcttg

SEQ ID NO: 230223 - DNA, 25 bp, probe
gatcgagcagatccagttcatcaag

SEQ ID NO: 230224 - DNA, 25 bp, probe
gatctggtgatctatgtctacacaa

SEQ ID NO: 230225 - DNA, 25 bp, probe
gatcctggtcctgctgatcaatttc

SEQ ID NO: 230226 - DNA, 25 bp, probe
gatcctggtcctgctgatcaatttc

SEQ ID NO: 230227 - DNA, 25 bp, probe
gatcctcgtggattttgatatcttc

SEQ ID NO: 230228 - DNA, 25 bp, probe
gatcctcgtggattttgatatcttc

SEQ ID NO: 230229 - DNA, 25 bp, probe
gatcattcgtggtcctgtgatcctc

SEQ ID NO: 230230 - DNA, 25 bp, probe
gatcttcgtggagtcagaactgcct

SEQ ID NO: 230231 - DNA, 25 bp, probe
gatctatcgtgtttaaaaccaaaga

SEQ ID NO: 230232 - DNA, 25 bp, probe
gattaacttttgcaaaccaagggag

SEQ ID NO: 230233 - DNA, 25 bp, probe
gttgaactactccagaaactaaaga

SEQ ID NO: 230234 - DNA, 25 bp, probe
gttcgttaccgaaaatgtatcaagt

SEQ ID NO: 230235 - DNA, 25 bp, probe
gttcctaactccaaaagttcatggc

SEQ ID NO: 230236 - DNA, 25 bp, probe
gattacaaacccacaaggagtccct

SEQ ID NO: 230237 - DNA, 25 bp, probe
gattaacaaccctggaagagtccac

SEQ ID NO: 230238 - DNA, 25 bp, probe
gattaaaaccactgcaaatataaga

SEQ ID NO: 230239 - DNA, 25 bp, probe
tcccaacttccctgatctttaagac

SEQ ID NO: 230240 - DNA, 25 bp, probe
taccaactaccatgaggctaaaagc

SEQ ID NO: 230241 - DNA, 25 bp, probe
gatctctactaccacaaggaaaata

SEQ ID NO: 230242 - DNA, 25 bp, probe
gatctcagaatcacaatagtaataa

SEQ ID NO: 230243 - DNA, 25 bp, probe
gatctaggatttgaagtgaaatgct

SEQ ID NO: 230244 - DNA, 25 bp, probe
gatacctattctgaagtgaaagctg

SEQ ID NO: 230245 - DNA, 25 bp, probe
gatcagactgatgatttggctaaag

SEQ ID NO: 230246 - DNA, 25 bp, probe
gatacagcatgaggattttctccag

SEQ ID NO: 230247 - DNA, 25 bp, probe
gatcagcagtgaggatgggttcagc

SEQ ID NO: 230248 - DNA, 25 bp, probe
gatctgcaagatgctgctcaggtac

SEQ ID NO: 230249 - DNA, 25 bp, probe
gatcatctggatgcctcaggaactg

SEQ ID NO: 230250 - DNA, 25 bp, probe
gatcatctggatgcctcaggaactg

SEQ ID NO: 230251 - DNA, 25 bp, probe
gatcctggcatagcacagggtcatg

SEQ ID NO: 230252 - DNA, 25 bp, probe
gatcctggctacttcagaggctgag

SEQ ID NO: 230253 - DNA, 25 bp, probe
gatccggagatcggcaggactgagc

SEQ ID NO: 230254 - DNA, 25 bp, probe
gatcctggagtgtggaggcagcagc

SEQ ID NO: 230255 - DNA, 25 bp, probe
gatcattgatgagtgccgggcagca

SEQ ID NO: 230256 - DNA, 25 bp, probe
gatagaaactgagaagcagcaatct

SEQ ID NO: 230257 - DNA, 25 bp, probe
gatcaccaacatcgaggagatgaac

SEQ ID NO: 230258 - DNA, 25 bp, probe
gatcccatcagctaaagggaagcat

SEQ ID NO: 230259 - DNA, 25 bp, probe
gatcccatcagctaaagggaagcat

SEQ ID NO: 230260 - DNA, 25 bp, probe
gatcctctactctgagtggggctaa

SEQ ID NO: 230261 - DNA, 25 bp, probe
gatcacactgaattagggtgggctc

SEQ ID NO: 230262 - DNA, 25 bp, probe
gtcaagtacgaccgcgagatggtgc

SEQ ID NO: 230263 - DNA, 25 bp, probe
gtcaagtacgaccgcgagatggtgc

SEQ ID NO: 230264 - DNA, 25 bp, probe
gatcaagtaccccgagaacttcttc

SEQ ID NO: 230265 - DNA, 25 bp, probe
gataaccccaaatgcaagcttcacc

SEQ ID NO: 230266 - DNA, 25 bp, probe
gatcacatcgccgataaccaggatt

SEQ ID NO: 230267 - DNA, 25 bp, probe
gatcacaggaagagaccaaagtata

SEQ ID NO: 230268 - DNA, 25 bp, probe
gatcacaggaagagaccaaagtata

SEQ ID NO: 230269 - DNA, 25 bp, probe
gatcacaggaagagaccaaagtata

SEQ ID NO: 230270 - DNA, 25 bp, probe
gatcactgggggcactgagaaccaa

SEQ ID NO: 230271 - DNA, 25 bp, probe
gatcaagtcgggaactccataccga

SEQ ID NO: 230272 - DNA, 25 bp, probe
gataagtcagctgtatctggggcca

SEQ ID NO: 230273 - DNA, 25 bp, probe
gataattcagtccttgcctttgaag

SEQ ID NO: 230274 - DNA, 25 bp, probe
gatcaatatcagttttcctatcgtg

SEQ ID NO: 230275 - DNA, 25 bp, probe
gatcacatatcctgtgaactcctag

SEQ ID NO: 230276 - DNA, 25 bp, probe
gatcatagatcttggaaactcctta

SEQ ID NO: 230277 - DNA, 25 bp, probe
gatcagtgactttgggatgtcccga

SEQ ID NO: 230278 - DNA, 25 bp, probe
gatcggatcctatggactccaaaca

SEQ ID NO: 230279 - DNA, 25 bp, probe
gatctggtcactatgtgactgcctt

SEQ ID NO: 230280 - DNA, 25 bp, probe
gatctgactttaattgtgtgtcttc

SEQ ID NO: 230281 - DNA, 25 bp, probe
gattgaccgaagagctgttcctgca

SEQ ID NO: 230282 - DNA, 25 bp, probe
gatctaccgaggagaggaactcact

SEQ ID NO: 230283 - DNA, 25 bp, probe
gatataccaggagttggtaacatcc

SEQ ID NO: 230284 - DNA, 25 bp, probe
gatctaatcagtagcttgaaaccac

SEQ ID NO: 230285 - DNA, 25 bp, probe
gatctccatcttggtataaatacac

SEQ ID NO: 230286 - DNA, 25 bp, probe
gatctcagcttggcttttcaaacat

SEQ ID NO: 230287 - DNA, 25 bp, probe
gatctcagcttggcttttcaaacat

SEQ ID NO: 230288 - DNA, 25 bp, probe
gatcctgttactactgaaagacaag

SEQ ID NO: 230289 - DNA, 25 bp, probe
gatcctgttactactgaaagacaag

SEQ ID NO: 230290 - DNA, 25 bp, probe
gatcctgaacactctgaacttgacg

SEQ ID NO: 230291 - DNA, 25 bp, probe
gatcttgcaccaagactgaacttga

SEQ ID NO: 230292 - DNA, 25 bp, probe
gatcttgaacaatggagacttttca

SEQ ID NO: 230293 - DNA, 25 bp, probe
gatcttcaaaaataacgactctctc

SEQ ID NO: 230294 - DNA, 25 bp, probe
gatcttaatttcaaaacgatttctt

SEQ ID NO: 230295 - DNA, 25 bp, probe
gatcttaatttcaaaacgatttctt

SEQ ID NO: 230296 - DNA, 25 bp, probe
gatctgaaaactcaaaatgtcttcc

SEQ ID NO: 230297 - DNA, 25 bp, probe
gataaataaccaggaagcattgctt

SEQ ID NO: 230298 - DNA, 25 bp, probe
gataaaaacccgtatagctttcagt

SEQ ID NO: 230299 - DNA, 25 bp, probe
gataagtcagatggggattacgggg

SEQ ID NO: 230300 - DNA, 25 bp, probe
gataattcatccgtggtttcaaggg

SEQ ID NO: 230301 - DNA, 25 bp, probe
gatagatgcttctctgggtggaggg

SEQ ID NO: 230302 - DNA, 25 bp, probe
gatagatgcttctctgggtggaggg

SEQ ID NO: 230303 - DNA, 25 bp, probe
gatcttccctaccggggagggatgg

SEQ ID NO: 230304 - DNA, 25 bp, probe
gatcttccctaccggggagggatgg

SEQ ID NO: 230305 - DNA, 25 bp, probe
gatttacctcctgggggagggctgg

SEQ ID NO: 230306 - DNA, 25 bp, probe
gatctaacttcccagggggcaggca

SEQ ID NO: 230307 - DNA, 25 bp, probe
gatctaacttcccagggggcaggca

SEQ ID NO: 230308 - DNA, 25 bp, probe
gataatacttctgagttggggaatg

SEQ ID NO: 230309 - DNA, 25 bp, probe
gataaactgttctaattggtttgtg

SEQ ID NO: 230310 - DNA, 25 bp, probe
gatagttccgtgtaagggctttgat

SEQ ID NO: 230311 - DNA, 25 bp, probe
gatctgtttttagtcgtggcattta

SEQ ID NO: 230312 - DNA, 25 bp, probe
gatctgggcattaagtcagtggctt

SEQ ID NO: 230313 - DNA, 25 bp, probe
gatatgtccttaggtcctggtctac

SEQ ID NO: 230314 - DNA, 25 bp, probe
gatacccaatacctcctggatatgc

SEQ ID NO: 230315 - DNA, 25 bp, probe
gataactactgacttcactggagtc

SEQ ID NO: 230316 - DNA, 25 bp, probe
gatacaagacgacttcgtgctgaca

SEQ ID NO: 230317 - DNA, 25 bp, probe
gataatctgacaggcagccgtgctc

SEQ ID NO: 230318 - DNA, 25 bp, probe
gataatctgacaggcagccgtgctc

SEQ ID NO: 230319 - DNA, 25 bp, probe
gataatttcacggcagctggctaca

SEQ ID NO: 230320 - DNA, 25 bp, probe
gatctgtttaacgtggctctgcagc

SEQ ID NO: 230321 - DNA, 25 bp, probe
gatctgtttaacgtggctctgcagc

SEQ ID NO: 230322 - DNA, 25 bp, probe
gatctggcattaccagtacctgagc

SEQ ID NO: 230323 - DNA, 25 bp, probe
gatcggaatgaaggtggcactggaa

SEQ ID NO: 230324 - DNA, 25 bp, probe
gatcaggagggagctagcactggac

SEQ ID NO: 230325 - DNA, 25 bp, probe
gatcgacatggttctcaacaagatg

SEQ ID NO: 230326 - DNA, 25 bp, probe
gatcacgagccattgtcattcaagt

SEQ ID NO: 230327 - DNA, 25 bp, probe
gatcacgagccattgtcattcaagt

SEQ ID NO: 230328 - DNA, 25 bp, probe
gatcatctaccatgtcattgatgcc

SEQ ID NO: 230329 - DNA, 25 bp, probe
gatcatctaccatgtcattgatgcc

SEQ ID NO: 230330 - DNA, 25 bp, probe
gatctggactcaggctcactgagca

SEQ ID NO: 230331 - DNA, 25 bp, probe
gatctggactcaggctcactgagca

SEQ ID NO: 230332 - DNA, 25 bp, probe
gatcggcatcgaggccaagaacttg

SEQ ID NO: 230333 - DNA, 25 bp, probe
gatctggggactaccagagactctg

SEQ ID NO: 230334 - DNA, 25 bp, probe
gatctgatgggactactggaatcag

SEQ ID NO: 230335 - DNA, 25 bp, probe
gatctgtgggcacattagcctatgt

SEQ ID NO: 230336 - DNA, 25 bp, probe
gatcatgagcggcaactaccagttt

SEQ ID NO: 230337 - DNA, 25 bp, probe
gatctacaagggttgatccctgttt

SEQ ID NO: 230338 - DNA, 25 bp, probe
gatttgaagttgtgaaacatttttg

SEQ ID NO: 230339 - DNA, 25 bp, probe
gattaggtatagtggagacttattt

SEQ ID NO: 230340 - DNA, 25 bp, probe
gatcggatgtttctgtggacttttc

SEQ ID NO: 230341 - DNA, 25 bp, probe
gatcaggtctgttcctgttactgtt

SEQ ID NO: 230342 - DNA, 25 bp, probe
gatcgtgtctgctgactgtttcatt

SEQ ID NO: 230343 - DNA, 25 bp, probe
gataagatcatccgactttatgatt

SEQ ID NO: 230344 - DNA, 25 bp, probe
gataagacccgagctttgattgact

SEQ ID NO: 230345 - DNA, 25 bp, probe
gataaacctcaagcaacgattcatg

SEQ ID NO: 230346 - DNA, 25 bp, probe
gataagtcagtcaccaacggcaatg

SEQ ID NO: 230347 - DNA, 25 bp, probe
gataaggactgagccaatcctgcca

SEQ ID NO: 230348 - DNA, 25 bp, probe
gataaccactattctatattctgac

SEQ ID NO: 230349 - DNA, 25 bp, probe
gatacaccattttaacctcatcagc

SEQ ID NO: 230350 - DNA, 25 bp, probe
gataacatggtttcaagcccagccc

SEQ ID NO: 230351 - DNA, 25 bp, probe
gataacatggtttcaagcccagccc

SEQ ID NO: 230352 - DNA, 25 bp, probe
gatcatgcacatagatgtccagccc

SEQ ID NO: 230353 - DNA, 25 bp, probe
gatcttcttgatgctgagcccatga

SEQ ID NO: 230354 - DNA, 25 bp, probe
gatctggtatgacatgaccagccaa

SEQ ID NO: 230355 - DNA, 25 bp, probe
gatctctgtagatgaagctctccaa

SEQ ID NO: 230356 - DNA, 25 bp, probe
gatctctgtagatgaagctctccaa

SEQ ID NO: 230357 - DNA, 25 bp, probe
gatctgcttaaaaaggctcatccat

SEQ ID NO: 230358 - DNA, 25 bp, probe
gatcagttgaaaaaagtccagcttg

SEQ ID NO: 230359 - DNA, 25 bp, probe
gatcagttgaaaaaagtccagcttg

SEQ ID NO: 230360 - DNA, 25 bp, probe
gatctgcgatactagaaaaccattt

SEQ ID NO: 230361 - DNA, 25 bp, probe
gatcccatgtgtaaaattctcattg

SEQ ID NO: 230362 - DNA, 25 bp, probe
gataccaggctagcttttctatgga

SEQ ID NO: 230363 - DNA, 25 bp, probe
gatacatacgtagaatttccactga

SEQ ID NO: 230364 - DNA, 25 bp, probe
gtacttcgatgatgaatttaccgcc

SEQ ID NO: 230365 - DNA, 25 bp, probe
gatacactggagtgctttatttagc

SEQ ID NO: 230366 - DNA, 25 bp, probe
gatacaatggattccccatactgga

SEQ ID NO: 230367 - DNA, 25 bp, probe
gataaaggtggtgcccagcgcaagc

SEQ ID NO: 230368 - DNA, 25 bp, probe
gatagaagtcgggccctgaaaaggc

SEQ ID NO: 230369 - DNA, 25 bp, probe
gattacagatcccctcctgtaagtg

SEQ ID NO: 230370 - DNA, 25 bp, probe
gtgccaggcaacccttcagaaaggc

SEQ ID NO: 230371 - DNA, 25 bp, probe
gatcggcgcgacagtgtagaaagtg

SEQ ID NO: 230372 - DNA, 25 bp, probe
gatcaggggacttgtatacccaggc

SEQ ID NO: 230373 - DNA, 25 bp, probe
gtagggcacactttaacccagtctc

SEQ ID NO: 230374 - DNA, 25 bp, probe
gtgcggtctagtttaatcccatgtt

SEQ ID NO: 230375 - DNA, 25 bp, probe
gggcaggtaaacctcatgcccatgt

SEQ ID NO: 230376 - DNA, 25 bp, probe
gggcagttaaatatcctctactacc

SEQ ID NO: 230377 - DNA, 25 bp, probe
gtgacgctaaaataccttagttgct

SEQ ID NO: 230378 - DNA, 25 bp, probe
gatactctaaaatactctttcttgc

SEQ ID NO: 230379 - DNA, 25 bp, probe
gataagtaagaagtagtgtttccat

SEQ ID NO: 230380 - DNA, 25 bp, probe
gatagcacttaaactagttcatttc

SEQ ID NO: 230381 - DNA, 25 bp, probe
gatcgcaactaaacatttgtctttg

SEQ ID NO: 230382 - DNA, 25 bp, probe
gatctcaaataaaattgttgtgtgg

SEQ ID NO: 230383 - DNA, 25 bp, probe
gatctctaaagatcatcttcctggt

SEQ ID NO: 230384 - DNA, 25 bp, probe
ggtctggcaataccactttcggacc

SEQ ID NO: 230385 - DNA, 25 bp, probe
ggtcggcaatggaacctacggacag

SEQ ID NO: 230386 - DNA, 25 bp, probe
gatcttggcaatggtacactacaaa

SEQ ID NO: 230387 - DNA, 25 bp, probe
gatcttgctaacattcatgaacaaa

SEQ ID NO: 230388 - DNA, 25 bp, probe
gatcttcataacggacaaactgaac

SEQ ID NO: 230389 - DNA, 25 bp, probe
gatctgactaaagagaccctgcaca

SEQ ID NO: 230390 - DNA, 25 bp, probe
gatctacttcaagagcaagttctcg

SEQ ID NO: 230391 - DNA, 25 bp, probe
gatagactacgagcgccagctcttt

SEQ ID NO: 230392 - DNA, 25 bp, probe
gatagactacgagcgccagctcttt

SEQ ID NO: 230393 - DNA, 25 bp, probe
gatagactacgagcgccagctcttt

SEQ ID NO: 230394 - DNA, 25 bp, probe
gatagtgaattttcagccagtcttg

SEQ ID NO: 230395 - DNA, 25 bp, probe
gatagtgaattttcagccagtcttg

SEQ ID NO: 230396 - DNA, 25 bp, probe
gatcgggtgctgacagagctagtgt

SEQ ID NO: 230397 - DNA, 25 bp, probe
gatctaggtgtgaccagggtgggcc

SEQ ID NO: 230398 - DNA, 25 bp, probe
gatctaggtgtgaccagggtgggcc

SEQ ID NO: 230399 - DNA, 25 bp, probe
gatcatcgggggccgggaggtgatc

SEQ ID NO: 230400 - DNA, 25 bp, probe
gatcagggggtttgctggagatgga

SEQ ID NO: 230401 - DNA, 25 bp, probe
gatcgagaggaaacgggcaggtgag

SEQ ID NO: 230402 - DNA, 25 bp, probe
gatctaatgagacaatgctggcggg

SEQ ID NO: 230403 - DNA, 25 bp, probe
gatctccagaagtattgctggggtc

SEQ ID NO: 230404 - DNA, 25 bp, probe
gatctccatgaaggacttgctggca

SEQ ID NO: 230405 - DNA, 25 bp, probe
gatcttcagaaccatatggtggcaa

SEQ ID NO: 230406 - DNA, 25 bp, probe
gatctctagaaccgattttggaaaa

SEQ ID NO: 230407 - DNA, 25 bp, probe
gatcactagcacccatttttgagaa

SEQ ID NO: 230408 - DNA, 25 bp, probe
gatcactcaaaaaggtgtgtcaaag

SEQ ID NO: 230409 - DNA, 25 bp, probe
gatcagctccaaagagatgactgtc

SEQ ID NO: 230410 - DNA, 25 bp, probe
gatctgcatccgtaagaagtgtgcc

SEQ ID NO: 230411 - DNA, 25 bp, probe
gatctgcatccgtaagaagtgtgcc

SEQ ID NO: 230412 - DNA, 25 bp, probe
gatctcattaataagaagattactc

SEQ ID NO: 230413 - DNA, 25 bp, probe
gatcacaatcatttaacagatttct

SEQ ID NO: 230414 - DNA, 25 bp, probe
gatcaccattgcgatcaacgtcctc

SEQ ID NO: 230415 - DNA, 25 bp, probe
gatcaccattgcgatcaacgtcctc

SEQ ID NO: 230416 - DNA, 25 bp, probe
gataaatggtaccagcgtcctctta

SEQ ID NO: 230417 - DNA, 25 bp, probe
gataactctgtacgaggcttctcta

SEQ ID NO: 230418 - DNA, 25 bp, probe
gataacagcgtgggggtgctcttca

SEQ ID NO: 230419 - DNA, 25 bp, probe
gatagaagcagtttgggatttgtag

SEQ ID NO: 230420 - DNA, 25 bp, probe
gatagaaactacacgttggtcactg

SEQ ID NO: 230421 - DNA, 25 bp, probe
gataaaaatactactgttagtttcg

SEQ ID NO: 230422 - DNA, 25 bp, probe
gatagacaaaatcagtttaggacta

SEQ ID NO: 230423 - DNA, 25 bp, probe
gataaaaacatgacaattccagagg

SEQ ID NO: 230424 - DNA, 25 bp, probe
gataaccaaacgaatgtcactgaag

SEQ ID NO: 230425 - DNA, 25 bp, probe
gataaccaaacgaatgtcactgaag

SEQ ID NO: 230426 - DNA, 25 bp, probe
gatcaaccaggaggaattcaaaggt

SEQ ID NO: 230427 - DNA, 25 bp, probe
gatcaaacttatagatattgcacga

SEQ ID NO: 230428 - DNA, 25 bp, probe
gatcatagactttgacagcttcatc

SEQ ID NO: 230429 - DNA, 25 bp, probe
gatcataagccagtgacagttgacc

SEQ ID NO: 230430 - DNA, 25 bp, probe
gatcaaggagcaatgtcagtatata

SEQ ID NO: 230431 - DNA, 25 bp, probe
gatcaaggagcaatgtcagtatata

SEQ ID NO: 230432 - DNA, 25 bp, probe
gataatggatcaactcctatgcata

SEQ ID NO: 230433 - DNA, 25 bp, probe
gataatggatcaactcctatgcata

SEQ ID NO: 230434 - DNA, 25 bp, probe
gataattgcattttcctatcattcc

SEQ ID NO: 230435 - DNA, 25 bp, probe
gataatgcttattaccttctgggca

SEQ ID NO: 230436 - DNA, 25 bp, probe
gataatgttatgcacgttggcttga

SEQ ID NO: 230437 - DNA, 25 bp, probe
gataatttttatggtgggacgagga

SEQ ID NO: 230438 - DNA, 25 bp, probe
gataatttttatggtgggacgagga

SEQ ID NO: 230439 - DNA, 25 bp, probe
gatcttttttgtgtatggcaccaga

SEQ ID NO: 230440 - DNA, 25 bp, probe
gatcgttttgggatgtggattgagt

SEQ ID NO: 230441 - DNA, 25 bp, probe
gatatgtttcgtgggttgaattgtg

SEQ ID NO: 230442 - DNA, 25 bp, probe
gatcagctcttcctgtgtttgtaat

SEQ ID NO: 230443 - DNA, 25 bp, probe
gatcagctcttcctgtgtttgtaat

SEQ ID NO: 230444 - DNA, 25 bp, probe
gatacctggcctggtctggacacag

SEQ ID NO: 230445 - DNA, 25 bp, probe
gatacccccaagtgtagcaagatct

SEQ ID NO: 230446 - DNA, 25 bp, probe
gatacacccggactcggatcaaatc

SEQ ID NO: 230447 - DNA, 25 bp, probe
gatcacgcccggagtagaagcgcat

SEQ ID NO: 230448 - DNA, 25 bp, probe
gatcaccccagaatagttaaactct

SEQ ID NO: 230449 - DNA, 25 bp, probe
gatctgcccctggaagattaaacca

SEQ ID NO: 230450 - DNA, 25 bp, probe
gatctcaagcccgaaaatatagtgc

SEQ ID NO: 230451 - DNA, 25 bp, probe
gatctgaagccccaaaacatcttcc

SEQ ID NO: 230452 - DNA, 25 bp, probe
gatcatgtaccccaatttacttgcc

SEQ ID NO: 230453 - DNA, 25 bp, probe
gatcatgtaccccaatttacttgcc

SEQ ID NO: 230454 - DNA, 25 bp, probe
gatcatctacacagtgactttcttc

SEQ ID NO: 230455 - DNA, 25 bp, probe
gatcatctacacagtgactttcttc

SEQ ID NO: 230456 - DNA, 25 bp, probe
gatatgctaagcagtagtcgtcaag

SEQ ID NO: 230457 - DNA, 25 bp, probe
gatactaaccatcagattgtacagt

SEQ ID NO: 230458 - DNA, 25 bp, probe
gatcaaatacctcatgacgctcatc

SEQ ID NO: 230459 - DNA, 25 bp, probe
gatcaaatacctcatgacgctcatc

SEQ ID NO: 230460 - DNA, 25 bp, probe
gatctaatgcatcctatatccagta

SEQ ID NO: 230461 - DNA, 25 bp, probe
gatctatatgatcatgacagaatgc

SEQ ID NO: 230462 - DNA, 25 bp, probe
gatctgcacaattgatgtctacatg

SEQ ID NO: 230463 - DNA, 25 bp, probe
gatctgcacaattgatgtctacatg

SEQ ID NO: 230464 - DNA, 25 bp, probe
gatcagcagcaattgcctctgaaag

SEQ ID NO: 230465 - DNA, 25 bp, probe
gatcatcagcaatgcctcctgcacc

SEQ ID NO: 230466 - DNA, 25 bp, probe
gataagaatgtgcctctcaagcctt

SEQ ID NO: 230467 - DNA, 25 bp, probe
gatcaggcaattcggtcaattgtca

SEQ ID NO: 230468 - DNA, 25 bp, probe
gatagggtcttgctcaatttcttag

SEQ ID NO: 230469 - DNA, 25 bp, probe
gatatggcagctctttaatgtactt

SEQ ID NO: 230470 - DNA, 25 bp, probe
gatatggcagctcgacttcattcga

SEQ ID NO: 230471 - DNA, 25 bp, probe
gatatggcagctcgacttcattcga

SEQ ID NO: 230472 - DNA, 25 bp, probe
gatcatcatcactgacttcaatctg

SEQ ID NO: 230473 - DNA, 25 bp, probe
gatcacatagcattgatcattgaac

SEQ ID NO: 230474 - DNA, 25 bp, probe
gatcatcaatgcagtcatgttaggc

SEQ ID NO: 230475 - DNA, 25 bp, probe
gatcatcgagagctgcatgaatgag

SEQ ID NO: 230476 - DNA, 25 bp, probe
gatcaggtgcacatcatagagcatg

SEQ ID NO: 230477 - DNA, 25 bp, probe
gatcagtgatcctattcagcagata

SEQ ID NO: 230478 - DNA, 25 bp, probe
gatatgtgagacgaatgatggctag

SEQ ID NO: 230479 - DNA, 25 bp, probe
gatctggctgcaagaaatgtgttgc

SEQ ID NO: 230480 - DNA, 25 bp, probe
gatcatctcagctgaagtgtggctt

SEQ ID NO: 230481 - DNA, 25 bp, probe
gatctctctgcatagaggtgagtcc

SEQ ID NO: 230482 - DNA, 25 bp, probe
gatcttgccaaaggagtgattcaga

SEQ ID NO: 230483 - DNA, 25 bp, probe
gatcatgtgcttgagcagactgtaa

SEQ ID NO: 230484 - DNA, 25 bp, probe
gatcatgtgcttgagcagactgtaa

SEQ ID NO: 230485 - DNA, 25 bp, probe
gatcatgctgttgctcatggcgatg

SEQ ID NO: 230486 - DNA, 25 bp, probe
gatcatgcgggagtgctggcatgcc

SEQ ID NO: 230487 - DNA, 25 bp, probe
gatcatgcgggagtgctggcatgcc

SEQ ID NO: 230488 - DNA, 25 bp, probe
gatctgtgtgtgatctggtcactat

SEQ ID NO: 230489 - DNA, 25 bp, probe
gatcatgtggtaactgcgagagctt

SEQ ID NO: 230490 - DNA, 25 bp, probe
gatcaggagaaactcgggcactccc

SEQ ID NO: 230491 - DNA, 25 bp, probe
gatcaggatggacaccgtccacacc

SEQ ID NO: 230492 - DNA, 25 bp, probe
gatcaagagagacacggctcctgcc

SEQ ID NO: 230493 - DNA, 25 bp, probe
gatcagataaatcaagagacttgcc

SEQ ID NO: 230494 - DNA, 25 bp, probe
gatcaaagttctaagaagctggtgc

SEQ ID NO: 230495 - DNA, 25 bp, probe
gatcagtagttcctacccatagtct

SEQ ID NO: 230496 - DNA, 25 bp, probe
gatagtggcatgattgaaccagtgg

SEQ ID NO: 230497 - DNA, 25 bp, probe
gatagtggcttctgagcaaaggcca

SEQ ID NO: 230498 - DNA, 25 bp, probe
gatctttttcattgcaaaattgcca

SEQ ID NO: 230499 - DNA, 25 bp, probe
gatctgctcttttgtcaaagattcc

SEQ ID NO: 230500 - DNA, 25 bp, probe
gatctcttctgcttgtccaaggatg

SEQ ID NO: 230501 - DNA, 25 bp, probe
gatctcttctgcttgtccaaggatg

SEQ ID NO: 230502 - DNA, 25 bp, probe
gatcttatccacaccatcgatatga

SEQ ID NO: 230503 - DNA, 25 bp, probe
gatcttgcaacatggccatgtgcaa

SEQ ID NO: 230504 - DNA, 25 bp, probe
gatcatggcaacagagctactgaaa

SEQ ID NO: 230505 - DNA, 25 bp, probe
gatcatggcaacagagctactgaaa

SEQ ID NO: 230506 - DNA, 25 bp, probe
gatatggtgagcagcggacttcaaa

SEQ ID NO: 230507 - DNA, 25 bp, probe
gatatggtgagcagcggacttcaaa

SEQ ID NO: 230508 - DNA, 25 bp, probe
gatagactgtgcagtgacctccaca

SEQ ID NO: 230509 - DNA, 25 bp, probe
gatcagcttggacatgcccattaca

SEQ ID NO: 230510 - DNA, 25 bp, probe
gatcagcttggacatgcccattaca

SEQ ID NO: 230511 - DNA, 25 bp, probe
gatcatttatagatgtctatccaca

SEQ ID NO: 230512 - DNA, 25 bp, probe
gatcatttatagatgtctatccaca

SEQ ID NO: 230513 - DNA, 25 bp, probe
gatcatttcattaagatctctaatc

SEQ ID NO: 230514 - DNA, 25 bp, probe
gatcagtctttgtcaatgctctaac

SEQ ID NO: 230515 - DNA, 25 bp, probe
gatcagggtggatcatgtgcttgag

SEQ ID NO: 230516 - DNA, 25 bp, probe
gatagtgggggccggcctagagaag

SEQ ID NO: 230517 - DNA, 25 bp, probe
gatagggctgggcctgaccaaaaat

SEQ ID NO: 230518 - DNA, 25 bp, probe
gatagggctgggcctgaccaaaaat

SEQ ID NO: 230519 - DNA, 25 bp, probe
gatatgttgcgggtattccaaattc

SEQ ID NO: 230520 - DNA, 25 bp, probe
gatctatacggctttcaacaagaac

SEQ ID NO: 230521 - DNA, 25 bp, probe
gatctatacggctttcaacaagaac

SEQ ID NO: 230522 - DNA, 25 bp, probe
gatcacagtcgtgttaaactgcaaa

SEQ ID NO: 230523 - DNA, 25 bp, probe
gatcacagtcgtgttaaactgcaaa

SEQ ID NO: 230524 - DNA, 25 bp, probe
gatcaggtcgcagacgaacctgaga

SEQ ID NO: 230525 - DNA, 25 bp, probe
gatatggatggcgcaccaagcagtg

SEQ ID NO: 230526 - DNA, 25 bp, probe
gatcacagggcaccaggccagagat

SEQ ID NO: 230527 - DNA, 25 bp, probe
gatactgggttggtgcacagtgatt

SEQ ID NO: 230528 - DNA, 25 bp, probe
gatactgctgcgtataggcaatgga

SEQ ID NO: 230529 - DNA, 25 bp, probe
gataacccagtagcaaaaacatttg

SEQ ID NO: 230530 - DNA, 25 bp, probe
gataaccccacagcaaatagcaatt

SEQ ID NO: 230531 - DNA, 25 bp, probe
gataacccagcagcaaaaggcggtg

SEQ ID NO: 230532 - DNA, 25 bp, probe
gatcaacccagagacgggcgagcag

SEQ ID NO: 230533 - DNA, 25 bp, probe
gatcaagatcgcagacctgggcaac

SEQ ID NO: 230534 - DNA, 25 bp, probe
gatcaagatccgcacagagagccag

SEQ ID NO: 230535 - DNA, 25 bp, probe
gatcaacttggaaaaatgccagacc

SEQ ID NO: 230536 - DNA, 25 bp, probe
gatcatccatgtggaatactaccaa

SEQ ID NO: 230537 - DNA, 25 bp, probe
gatctttatggagacataccaagca

SEQ ID NO: 230538 - DNA, 25 bp, probe
gatcattaagtgtaacttctgccgc

SEQ ID NO: 230539 - DNA, 25 bp, probe
gatcttcaggcacaagcatttgcac

SEQ ID NO: 230540 - DNA, 25 bp, probe
gatcttctggacaaacttctgcgat

SEQ ID NO: 230541 - DNA, 25 bp, probe
gatcttctggacaaacttctgcgat

SEQ ID NO: 230542 - DNA, 25 bp, probe
gatctccgtggaagaatttcgtgcc

SEQ ID NO: 230543 - DNA, 25 bp, probe
gatctttgcttttggcattgtcgtg

SEQ ID NO: 230544 - DNA, 25 bp, probe
gatcatgggctgattccatgttctt

SEQ ID NO: 230545 - DNA, 25 bp, probe
gatcagaatgtggttactattttca

SEQ ID NO: 230546 - DNA, 25 bp, probe
gatacactggctatacagattttct

SEQ ID NO: 230547 - DNA, 25 bp, probe
gatctcgtgactatactggcatttc

SEQ ID NO: 230548 - DNA, 25 bp, probe
gatctcttggatctcctcagatctt

SEQ ID NO: 230549 - DNA, 25 bp, probe
gatctctgggatttatgctcatgaa

SEQ ID NO: 230550 - DNA, 25 bp, probe
gatctctgggatttatgctcatgaa

SEQ ID NO: 230551 - DNA, 25 bp, probe
gatctctttgactatatcacagaga

SEQ ID NO: 230552 - DNA, 25 bp, probe
gatctctcctgatttaccagacacc

SEQ ID NO: 230553 - DNA, 25 bp, probe
gatctatccaatttacacagcaagt

SEQ ID NO: 230554 - DNA, 25 bp, probe
gatctatccaatttacacagcaagt

SEQ ID NO: 230555 - DNA, 25 bp, probe
gatctcacagacagtgacaaagatg

SEQ ID NO: 230556 - DNA, 25 bp, probe
gatctacctcttgggaaagatgctc

SEQ ID NO: 230557 - DNA, 25 bp, probe
gatctacctcttgggaaagatgctc

SEQ ID NO: 230558 - DNA, 25 bp, probe
gatctccctctctgagaggagcagc

SEQ ID NO: 230559 - DNA, 25 bp, probe
gatcatccatctgctggcagagagc

SEQ ID NO: 230560 - DNA, 25 bp, probe
gatcaatgcattcctcacagatcac

SEQ ID NO: 230561 - DNA, 25 bp, probe
gatcaatgcattcctcacagatcac

SEQ ID NO: 230562 - DNA, 25 bp, probe
gataatgctgctttcaagtacatgc

SEQ ID NO: 230563 - DNA, 25 bp, probe
gataatgctgctttcaagtacatgc

SEQ ID NO: 230564 - DNA, 25 bp, probe
gatctcactgctttaaaacatgctc

SEQ ID NO: 230565 - DNA, 25 bp, probe
gatctacatgctttgtgagacgatt

SEQ ID NO: 230566 - DNA, 25 bp, probe
gatctacctgctaggcaaggtgtac

SEQ ID NO: 230567 - DNA, 25 bp, probe
gataatccagtaggcattggagtat

SEQ ID NO: 230568 - DNA, 25 bp, probe
gataatgctcaaagtgcagtagaaa

SEQ ID NO: 230569 - DNA, 25 bp, probe
gatcaaccagatcctgcaggcaaat

SEQ ID NO: 230570 - DNA, 25 bp, probe
gatcatccgcaacgtgggcaagtac

SEQ ID NO: 230571 - DNA, 25 bp, probe
gatctacagccgcatcggcggagac

SEQ ID NO: 230572 - DNA, 25 bp, probe
gatctacagccgcatcggcggagac

SEQ ID NO: 230573 - DNA, 25 bp, probe
gatctacagccgcatcggcggagac

SEQ ID NO: 230574 - DNA, 25 bp, probe
gatctttcagatcatgtgcaatttt

SEQ ID NO: 230575 - DNA, 25 bp, probe
gatcttttgcatcatgagtatttta

SEQ ID NO: 230576 - DNA, 25 bp, probe
gatcttttgcatcatgagtatttta

SEQ ID NO: 230577 - DNA, 25 bp, probe
gatctcatttttaggttttctcttc

SEQ ID NO: 230578 - DNA, 25 bp, probe
gatcactcgtttaagttcttagttg

SEQ ID NO: 230579 - DNA, 25 bp, probe
gatcactcactgttgtagcttctgt

SEQ ID NO: 230580 - DNA, 25 bp, probe
gatcttgattttgacatctctgatt

SEQ ID NO: 230581 - DNA, 25 bp, probe
gatctttttagatattcttgcttct

SEQ ID NO: 230582 - DNA, 25 bp, probe
gatcttggtatttttgtctcctcgt

SEQ ID NO: 230583 - DNA, 25 bp, probe
gatttcctgttaggtgcttcgtctg

SEQ ID NO: 230584 - DNA, 25 bp, probe
gatcttccaccgtgtgtgtggtcgt

SEQ ID NO: 230585 - DNA, 25 bp, probe
gatctttgagcttgtggaggtggtc

SEQ ID NO: 230586 - DNA, 25 bp, probe
gatcttcacagttggagtttgaccc

SEQ ID NO: 230587 - DNA, 25 bp, probe
gatcttctgcttaatgcagtttgac

SEQ ID NO: 230588 - DNA, 25 bp, probe
gatcactgtgcagaaagtcattcac

SEQ ID NO: 230589 - DNA, 25 bp, probe
gatcacggatgagaagtaccacctc

SEQ ID NO: 230590 - DNA, 25 bp, probe
gatcacggatgagaagtaccacctc

SEQ ID NO: 230591 - DNA, 25 bp, probe
gatctcagtcaaaggcattcgccac

SEQ ID NO: 230592 - DNA, 25 bp, probe
gatcacagtgaaggatgcttccgtc

SEQ ID NO: 230593 - DNA, 25 bp, probe
gatacctaaggagcctggttcagta

SEQ ID NO: 230594 - DNA, 25 bp, probe
gatatttaaggaccccagagctagg

SEQ ID NO: 230595 - DNA, 25 bp, probe
gatctattacggtcagatccagatg

SEQ ID NO: 230596 - DNA, 25 bp, probe
gatctttcacatggaaatccaaatg

SEQ ID NO: 230597 - DNA, 25 bp, probe
gatcttctgccatggatgaaaactc

SEQ ID NO: 230598 - DNA, 25 bp, probe
gatcttctgcagcaggtactggtag

SEQ ID NO: 230599 - DNA, 25 bp, probe
gatcagctctcagggttcaatggga

SEQ ID NO: 230600 - DNA, 25 bp, probe
gatcagcactcgaaggtcaagctat

SEQ ID NO: 230601 - DNA, 25 bp, probe
gatctcacctgttggaatgcactaa

SEQ ID NO: 230602 - DNA, 25 bp, probe
gataccactgaaagagtgcctgaag

SEQ ID NO: 230603 - DNA, 25 bp, probe
gatacacatttcgacaatcctgaga

SEQ ID NO: 230604 - DNA, 25 bp, probe
gatagaatttaggccagtcagtgaa

SEQ ID NO: 230605 - DNA, 25 bp, probe
gataggtcattagtgctttaagcaa

SEQ ID NO: 230606 - DNA, 25 bp, probe
gatactatattggctgtttcaaaat

SEQ ID NO: 230607 - DNA, 25 bp, probe
gatacaagattctgcacctcaaagg

SEQ ID NO: 230608 - DNA, 25 bp, probe
gataaaattcatagcacagtgagaa

SEQ ID NO: 230609 - DNA, 25 bp, probe
gataacatactgcgcaacaagccct

SEQ ID NO: 230610 - DNA, 25 bp, probe
gatcaccaagcggagacgcaaggcc

SEQ ID NO: 230611 - DNA, 25 bp, probe
gatcactaagcaaagctgctagtgg

SEQ ID NO: 230612 - DNA, 25 bp, probe
gatcttgacaaacctgccagggatg

SEQ ID NO: 230613 - DNA, 25 bp, probe
gatcttggctactgtcatgcaggct

SEQ ID NO: 230614 - DNA, 25 bp, probe
gatctttgggatctgcatgcacaat

SEQ ID NO: 230615 - DNA, 25 bp, probe
gatctttgggatctgcatgcacaat

SEQ ID NO: 230616 - DNA, 25 bp, probe
gatcttttggatgaaccaattccag

SEQ ID NO: 230617 - DNA, 25 bp, probe
gatttttggctacacacaaaccagt

SEQ ID NO: 230618 - DNA, 25 bp, probe
gatctttgtggttgctaccagacag

SEQ ID NO: 230619 - DNA, 25 bp, probe
gatcttgggcagaacataccgggtg

SEQ ID NO: 230620 - DNA, 25 bp, probe
gatcttaggcaaaataccagctgat

SEQ ID NO: 230621 - DNA, 25 bp, probe
gatctacaggcagaatcccaggact

SEQ ID NO: 230622 - DNA, 25 bp, probe
gattacaggcatgagctaccgtgcc

SEQ ID NO: 230623 - DNA, 25 bp, probe
gatatgaacgtgcatattgccttgc

SEQ ID NO: 230624 - DNA, 25 bp, probe
gataaataatgtcatcgcctccaac

SEQ ID NO: 230625 - DNA, 25 bp, probe
gatcaataaagtcatacgctccaac

SEQ ID NO: 230626 - DNA, 25 bp, probe
gataatatatttaattcatgtacaa

SEQ ID NO: 230627 - DNA, 25 bp, probe
gataaatgatttaaccattgccctc

SEQ ID NO: 230628 - DNA, 25 bp, probe
gttgcagtcaagaaactaagccgtc

SEQ ID NO: 230629 - DNA, 25 bp, probe
gatctagacaagaacatacataccc

SEQ ID NO: 230630 - DNA, 25 bp, probe
gttgagaatcatggacaaaacctgc

SEQ ID NO: 230631 - DNA, 25 bp, probe
gatcaaacatctggaaattacctta

SEQ ID NO: 230632 - DNA, 25 bp, probe
gatcaagacttgaccacttacttgg

SEQ ID NO: 230633 - DNA, 25 bp, probe
gatcatcagaaaagcccttactgag

SEQ ID NO: 230634 - DNA, 25 bp, probe
gatagcaaaacccaatctactgaga

SEQ ID NO: 230635 - DNA, 25 bp, probe
gatacagcaaaaccagtctattaga

SEQ ID NO: 230636 - DNA, 25 bp, probe
gataagcaagacttcaagaataaga

SEQ ID NO: 230637 - DNA, 25 bp, probe
gataatgtaagctcatccaccaaga

SEQ ID NO: 230638 - DNA, 25 bp, probe
gataatgtaagctcatccaccaaga

SEQ ID NO: 230639 - DNA, 25 bp, probe
gattagtaatgtgcattcaggtgaa

SEQ ID NO: 230640 - DNA, 25 bp, probe
gatcatgatgtatgtgctcattgtg

SEQ ID NO: 230641 - DNA, 25 bp, probe
gatcatgttaaggcagattctgtca

SEQ ID NO: 230642 - DNA, 25 bp, probe
gatcatgtgcaatgccgtcattgac

SEQ ID NO: 230643 - DNA, 25 bp, probe
gatcatgtgcaatttttatctaacc

SEQ ID NO: 230644 - DNA, 25 bp, probe
gatcaagaagtcattatctcaaact

SEQ ID NO: 230645 - DNA, 25 bp, probe
gatcaagaagtcattatctcaaact

SEQ ID NO: 230646 - DNA, 25 bp, probe
gataaggagtccctgattcaagttc

SEQ ID NO: 230647 - DNA, 25 bp, probe
gataaggagtccctgattcaagttc

SEQ ID NO: 230648 - DNA, 25 bp, probe
gatataatcctcccgtaaagcttca

SEQ ID NO: 230649 - DNA, 25 bp, probe
gatataatcctcccgtaaagcttca

SEQ ID NO: 230650 - DNA, 25 bp, probe
gataaatcctacctagagacctttg

SEQ ID NO: 230651 - DNA, 25 bp, probe
gatacaaccatgtttaaatcctcgt

SEQ ID NO: 230652 - DNA, 25 bp, probe
gatacaaccatgtttaaatcctcgt

SEQ ID NO: 230653 - DNA, 25 bp, probe
gatacaagtagggccaacccctata

SEQ ID NO: 230654 - DNA, 25 bp, probe
gatacaagtagggccaacccctata

SEQ ID NO: 230655 - DNA, 25 bp, probe
gataaagtcggtttaatcaccttga

SEQ ID NO: 230656 - DNA, 25 bp, probe
gataaagacggattctaaggactct

SEQ ID NO: 230657 - DNA, 25 bp, probe
gatagcaagacattgttacaaggac

SEQ ID NO: 230658 - DNA, 25 bp, probe
gatactaatgattcttacagggatt

SEQ ID NO: 230659 - DNA, 25 bp, probe
gatcagccattttatgctacagaag

SEQ ID NO: 230660 - DNA, 25 bp, probe
gatagctatggtgtagatggaatgg

SEQ ID NO: 230661 - DNA, 25 bp, probe
gatagcacatgactttcctggaatt

SEQ ID NO: 230662 - DNA, 25 bp, probe
gatatcagcgatcttctctactttc

SEQ ID NO: 230663 - DNA, 25 bp, probe
gattcatgcgatgtgtccaatcgga

SEQ ID NO: 230664 - DNA, 25 bp, probe
gatcatatcctcagaccaggtggaa

SEQ ID NO: 230665 - DNA, 25 bp, probe
gatcttctctctggatccggaagaa

SEQ ID NO: 230666 - DNA, 25 bp, probe
gatcatctcctagaacttcaatgaa

SEQ ID NO: 230667 - DNA, 25 bp, probe
gatcatctcctagaacttcaatgaa

SEQ ID NO: 230668 - DNA, 25 bp, probe
gatcttgtcaaggaacttcagagca

SEQ ID NO: 230669 - DNA, 25 bp, probe
gatcttatcaacaatttgctgcaag

SEQ ID NO: 230670 - DNA, 25 bp, probe
gatcattagtgagactggccacagt

SEQ ID NO: 230671 - DNA, 25 bp, probe
gatcattagtgagactggccacagt

SEQ ID NO: 230672 - DNA, 25 bp, probe
gatcattttactttgcagcacactc

SEQ ID NO: 230673 - DNA, 25 bp, probe
gatcattcttacaagttatactctt

SEQ ID NO: 230674 - DNA, 25 bp, probe
gatcttttaattcctattttctgct

SEQ ID NO: 230675 - DNA, 25 bp, probe
gatcttttactcacattctgttgtt

SEQ ID NO: 230676 - DNA, 25 bp, probe
gatcttttactcacattctgttgtt

SEQ ID NO: 230677 - DNA, 25 bp, probe
gatatttccctaacatgtccttttt

SEQ ID NO: 230678 - DNA, 25 bp, probe
gatcattctcacttcaaattcctgg

SEQ ID NO: 230679 - DNA, 25 bp, probe
gatcacctccaatgagaagcacttg

SEQ ID NO: 230680 - DNA, 25 bp, probe
gatcagagctccatcagtaagactc

SEQ ID NO: 230681 - DNA, 25 bp, probe
gatcaactcctatgcataaagctgc

SEQ ID NO: 230682 - DNA, 25 bp, probe
gatcaactcctatgcataaagctgc

SEQ ID NO: 230683 - DNA, 25 bp, probe
gatcagtcccagttataaactgaaa

SEQ ID NO: 230684 - DNA, 25 bp, probe
gatcatgaatctctaataaatttaa

SEQ ID NO: 230685 - DNA, 25 bp, probe
gatagacgctggcaacaaattttca

SEQ ID NO: 230686 - DNA, 25 bp, probe
gatcatgtcgcacaaacaaatttac

SEQ ID NO: 230687 - DNA, 25 bp, probe
gatcttgtggctaaaccagcatttc

SEQ ID NO: 230688 - DNA, 25 bp, probe
gatttggaggtttgccctttacagg

SEQ ID NO: 230689 - DNA, 25 bp, probe
gataggttggtttcagtgttgtaca

SEQ ID NO: 230690 - DNA, 25 bp, probe
gatcatggtcggattcctggggaat

SEQ ID NO: 230691 - DNA, 25 bp, probe
gataggatggggtgtctgtgttatt

SEQ ID NO: 230692 - DNA, 25 bp, probe
gatcatgagggggatttctgggtct

SEQ ID NO: 230693 - DNA, 25 bp, probe
gatatcggggacatccatagccttc

SEQ ID NO: 230694 - DNA, 25 bp, probe
gatatcggggacatccatagccttc

SEQ ID NO: 230695 - DNA, 25 bp, probe
gatatcggggacatccatagccttc

SEQ ID NO: 230696 - DNA, 25 bp, probe
gatatcggggctttgatgtacccta

SEQ ID NO: 230697 - DNA, 25 bp, probe
gatacaggtggctgggctattccat

SEQ ID NO: 230698 - DNA, 25 bp, probe
gatactggtagttggtgtgaaactc

SEQ ID NO: 230699 - DNA, 25 bp, probe
gatcacagagtacagtcttggaggg

SEQ ID NO: 230700 - DNA, 25 bp, probe
gatcatggagtactaccggcagagc

SEQ ID NO: 230701 - DNA, 25 bp, probe
gatactgcagaacaccaacatgctg

SEQ ID NO: 230702 - DNA, 25 bp, probe
gatcagatggaacagacaatgccta

SEQ ID NO: 230703 - DNA, 25 bp, probe
gatcatcctgaacaaaggccatgac

SEQ ID NO: 230704 - DNA, 25 bp, probe
gatcacctgattgaaatggccacca

SEQ ID NO: 230705 - DNA, 25 bp, probe
gatcacctgattgaaatggccacca

SEQ ID NO: 230706 - DNA, 25 bp, probe
gatcactccattgagaaagcaaatg

SEQ ID NO: 230707 - DNA, 25 bp, probe
gatcttcgatctttaaacaacatgc

SEQ ID NO: 230708 - DNA, 25 bp, probe
gatcttccattaccaagaggacagc

SEQ ID NO: 230709 - DNA, 25 bp, probe
gatcatacctccccagagggaagca

SEQ ID NO: 230710 - DNA, 25 bp, probe
gatcatccacagttacacggaaagc

SEQ ID NO: 230711 - DNA, 25 bp, probe
gatacccagattccaaggacctcac

SEQ ID NO: 230712 - DNA, 25 bp, probe
gataccgaagattagtggagctcta

SEQ ID NO: 230713 - DNA, 25 bp, probe
gatcagggcagcttaagtggtctaa

SEQ ID NO: 230714 - DNA, 25 bp, probe
gatagcgctcacgcaagcatggtta

SEQ ID NO: 230715 - DNA, 25 bp, probe
gatagcgcataataaggggaagact

SEQ ID NO: 230716 - DNA, 25 bp, probe
gataggtcctgatgggggaacacca

SEQ ID NO: 230717 - DNA, 25 bp, probe
gataggtcctgatgggggaacacca

SEQ ID NO: 230718 - DNA, 25 bp, probe
gatacgttctaaagggggatggcca

SEQ ID NO: 230719 - DNA, 25 bp, probe
gttcctttataggccaaggaccgca

SEQ ID NO: 230720 - DNA, 25 bp, probe
gatttctttaaggccaccgaggaga

SEQ ID NO: 230721 - DNA, 25 bp, probe
gatttcacagtcagctgctcaacgg

SEQ ID NO: 230722 - DNA, 25 bp, probe
gatcatcaccagaccctgggattgg

SEQ ID NO: 230723 - DNA, 25 bp, probe
gatcatcaccagaccctgggattgg

SEQ ID NO: 230724 - DNA, 25 bp, probe
gatcatcaccgagttcattgagaat

SEQ ID NO: 230725 - DNA, 25 bp, probe
gatcatgaacagccttcaagaaatg

SEQ ID NO: 230726 - DNA, 25 bp, probe
gatcagagcacacgtacgaaaaggt

SEQ ID NO: 230727 - DNA, 25 bp, probe
gatagagaactgtacttactaggaa

SEQ ID NO: 230728 - DNA, 25 bp, probe
gttggatcagctcctttacaaaaaa

SEQ ID NO: 230729 - DNA, 25 bp, probe
gttggatcagctcctttacaaaaaa

SEQ ID NO: 230730 - DNA, 25 bp, probe
gttgagaccctgtgtctagcaaaaa

SEQ ID NO: 230731 - DNA, 25 bp, probe
ggtcggtcctttacaacatcaaata

SEQ ID NO: 230732 - DNA, 25 bp, probe
gtttccccttgtgaaaccacatatt

SEQ ID NO: 230733 - DNA, 25 bp, probe
gtttccccttgtgaaaccacatatt

SEQ ID NO: 230734 - DNA, 25 bp, probe
gatcttggcccataggtgaaccacc

SEQ ID NO: 230735 - DNA, 25 bp, probe
gattacggccaggagatacaaccag

SEQ ID NO: 230736 - DNA, 25 bp, probe
gatagacgcgaacacagacaacctt

SEQ ID NO: 230737 - DNA, 25 bp, probe
gatcagcaacgctaccacgaagaca

SEQ ID NO: 230738 - DNA, 25 bp, probe
gatcagcatcaccaacggtgaagaa

SEQ ID NO: 230739 - DNA, 25 bp, probe
gatcatgaccctgtgcgtgatcagc

SEQ ID NO: 230740 - DNA, 25 bp, probe
gatcagacccattgtgatgtcacag

SEQ ID NO: 230741 - DNA, 25 bp, probe
gatcagccgcatcgagtatatccac

SEQ ID NO: 230742 - DNA, 25 bp, probe
gatcacaccatcgagaacaacactg

SEQ ID NO: 230743 - DNA, 25 bp, probe
gatcacaccatcgagaacaacactg

SEQ ID NO: 230744 - DNA, 25 bp, probe
gatcaacaacagaatctcaaagcag

SEQ ID NO: 230745 - DNA, 25 bp, probe
gatcaacaacagaatctcaaagcag

SEQ ID NO: 230746 - DNA, 25 bp, probe
gatcagataactccatcccaatggc

SEQ ID NO: 230747 - DNA, 25 bp, probe
gatcagataactccatcccaatggc

SEQ ID NO: 230748 - DNA, 25 bp, probe
gatcatgtaaatgctcaaagatgta

SEQ ID NO: 230749 - DNA, 25 bp, probe
gatcattaagaccacggagcagctc

SEQ ID NO: 230750 - DNA, 25 bp, probe
gatcattaagattacagaacagctg

SEQ ID NO: 230751 - DNA, 25 bp, probe
gatcagtgaagacagcaatcacggt

SEQ ID NO: 230752 - DNA, 25 bp, probe
gatagcgaatggccagaagaagcag

SEQ ID NO: 230753 - DNA, 25 bp, probe
gataggatctaacttcagagtgcag

SEQ ID NO: 230754 - DNA, 25 bp, probe
gatcagagacatgctgctgtcgggg

SEQ ID NO: 230755 - DNA, 25 bp, probe
gcatacatcatgaccgtcactgact

SEQ ID NO: 230756 - DNA, 25 bp, probe
gatcaggatcagcttggacatgccc

SEQ ID NO: 230757 - DNA, 25 bp, probe
gatcaggatcagcttggacatgccc

SEQ ID NO: 230758 - DNA, 25 bp, probe
gatcaggccaagaggatcaatcaca

SEQ ID NO: 230759 - DNA, 25 bp, probe
gatcaggaagagaaggagcagagca

SEQ ID NO: 230760 - DNA, 25 bp, probe
gatcaggctgcaggaagaagaaggg

SEQ ID NO: 230761 - DNA, 25 bp, probe
gatcatttcaggtgagcagttagag

SEQ ID NO: 230762 - DNA, 25 bp, probe
gatcacttcaggtcaggagtttgag

SEQ ID NO: 230763 - DNA, 25 bp, probe
gatcacctgaggtcaggagttcaag

SEQ ID NO: 230764 - DNA, 25 bp, probe
gatactgctgtttctcgaggtaaga

SEQ ID NO: 230765 - DNA, 25 bp, probe
gatcactctgtagcgcatggttaaa

SEQ ID NO: 230766 - DNA, 25 bp, probe
gatcactctgtagcgcatggttaaa

SEQ ID NO: 230767 - DNA, 25 bp, probe
gatcacttgctatccattaagaaga

SEQ ID NO: 230768 - DNA, 25 bp, probe
gatcagcttgtgtatggtttagaaa

SEQ ID NO: 230769 - DNA, 25 bp, probe
gatcatctgaggtcaggaattcaag

SEQ ID NO: 230770 - DNA, 25 bp, probe
gatcatttggaacagtctacaaggg

SEQ ID NO: 230771 - DNA, 25 bp, probe
gatcatttggtgtggtatatcaagc

SEQ ID NO: 230772 - DNA, 25 bp, probe
gatatgttggccttggtttctagta

SEQ ID NO: 230773 - DNA, 25 bp, probe
gatactatgcgtttggttgaccttc

SEQ ID NO: 230774 - DNA, 25 bp, probe
gataacttgtttggtatactttgct

SEQ ID NO: 230775 - DNA, 25 bp, probe
gatcaacctaatattaacaattctg

SEQ ID NO: 230776 - DNA, 25 bp, probe
gataccttggaaatgaggacagtta

SEQ ID NO: 230777 - DNA, 25 bp, probe
gataccttgggttgaatacactttt

SEQ ID NO: 230778 - DNA, 25 bp, probe
gatacttacagtgctaaccacttct

SEQ ID NO: 230779 - DNA, 25 bp, probe
gatacttacagtgctaaccacttct

SEQ ID NO: 230780 - DNA, 25 bp, probe
gattttggagtccaaacctctacat

SEQ ID NO: 230781 - DNA, 25 bp, probe
gatttagtacccaaatcgtcttata

SEQ ID NO: 230782 - DNA, 25 bp, probe
gatagttgtaccgcaatgtgactta

SEQ ID NO: 230783 - DNA, 25 bp, probe
gatagttgtaccgcaatgtgactta

SEQ ID NO: 230784 - DNA, 25 bp, probe
gatagcttggattccctaggtcttt

SEQ ID NO: 230785 - DNA, 25 bp, probe
gatcactttattactctgaatgcct

SEQ ID NO: 230786 - DNA, 25 bp, probe
gatcactttattactctgaatgcct

SEQ ID NO: 230787 - DNA, 25 bp, probe
gatcagctggttattgctaacatag

SEQ ID NO: 230788 - DNA, 25 bp, probe
gatcagtgtaatggttgtaaatggc

SEQ ID NO: 230789 - DNA, 25 bp, probe
gatacgtaagtgaatattaaggttc

SEQ ID NO: 230790 - DNA, 25 bp, probe
gatacgttttgttgttgaaggtcaa

SEQ ID NO: 230791 - DNA, 25 bp, probe
gatactttttcttttgtaagtgcta

SEQ ID NO: 230792 - DNA, 25 bp, probe
gatacttctaaattttgggagctcc

SEQ ID NO: 230793 - DNA, 25 bp, probe
gatacagtgtaaaagtgcgggctct

SEQ ID NO: 230794 - DNA, 25 bp, probe
gatacagttcagagagtgacgtgtg

SEQ ID NO: 230795 - DNA, 25 bp, probe
gatacgtcctgaaagcccaggtgga

SEQ ID NO: 230796 - DNA, 25 bp, probe
gataaccctgaccagaacacagagg

SEQ ID NO: 230797 - DNA, 25 bp, probe
gatacactccgagaggtgcagctga

SEQ ID NO: 230798 - DNA, 25 bp, probe
gatcaacaccgtgtgcttcgtgacg

SEQ ID NO: 230799 - DNA, 25 bp, probe
gatcaacaccgtggatgatttctgg

SEQ ID NO: 230800 - DNA, 25 bp, probe
gataagcagttgccagtgacattct

SEQ ID NO: 230801 - DNA, 25 bp, probe
gattaccatgtccagatactgtcta

SEQ ID NO: 230802 - DNA, 25 bp, probe
gctatccattaagaagacattgaaa

SEQ ID NO: 230803 - DNA, 25 bp, probe
gttataaaggcatggcttatttaaa

SEQ ID NO: 230804 - DNA, 25 bp, probe
gtttcaaacgttctttatccagaca

SEQ ID NO: 230805 - DNA, 25 bp, probe
gtttcgttttcatgctttaccagaa

SEQ ID NO: 230806 - DNA, 25 bp, probe
gatttttcctaatgttgtacctata

SEQ ID NO: 230807 - DNA, 25 bp, probe
gatttttactatacaaagccaccta

SEQ ID NO: 230808 - DNA, 25 bp, probe
gattttctccttacaattacaaaca

SEQ ID NO: 230809 - DNA, 25 bp, probe
gatttctctttatactaaagaatcc

SEQ ID NO: 230810 - DNA, 25 bp, probe
gatagtagctattaaacccaatatt

SEQ ID NO: 230811 - DNA, 25 bp, probe
gatagtagctattaaacccaatatt

SEQ ID NO: 230812 - DNA, 25 bp, probe
gataatagaaagcaccctaattgac

SEQ ID NO: 230813 - DNA, 25 bp, probe
gataatagaaagcaccctaattgac

SEQ ID NO: 230814 - DNA, 25 bp, probe
gataataaagactgcctcattgaca

SEQ ID NO: 230815 - DNA, 25 bp, probe
gataataaatgcttggcttctgtgt

SEQ ID NO: 230816 - DNA, 25 bp, probe
gataataaatgcttggcttctgtgt

SEQ ID NO: 230817 - DNA, 25 bp, probe
gatcaagaatatctgagtcattttt

SEQ ID NO: 230818 - DNA, 25 bp, probe
gatcaacaaatatggtcgacggtcc

SEQ ID NO: 230819 - DNA, 25 bp, probe
gatatgaacacttatacttacggtc

SEQ ID NO: 230820 - DNA, 25 bp, probe
gattagaaattctacttccctgact

SEQ ID NO: 230821 - DNA, 25 bp, probe
gattagaaacatcaggtccttaaat

SEQ ID NO: 230822 - DNA, 25 bp, probe
gataggaattctcagtgtttcaaat

SEQ ID NO: 230823 - DNA, 25 bp, probe
gatcacaaactcctagagtctacat

SEQ ID NO: 230824 - DNA, 25 bp, probe
gatcaagaaatcgatagcatttgca

SEQ ID NO: 230825 - DNA, 25 bp, probe
gatagcagcaaacaatcattggagc

SEQ ID NO: 230826 - DNA, 25 bp, probe
gatatgacaatatcaggctctggat

SEQ ID NO: 230827 - DNA, 25 bp, probe
gatatgacaatatcaggctctggat

SEQ ID NO: 230828 - DNA, 25 bp, probe
gatataattaggtagctgctgaaag

SEQ ID NO: 230829 - DNA, 25 bp, probe
gataacttggctcagctgtatgaag

SEQ ID NO: 230830 - DNA, 25 bp, probe
gataacttggctcagctgtatgaag

SEQ ID NO: 230831 - DNA, 25 bp, probe
gatacagctccagacgcgttaagcg

SEQ ID NO: 230832 - DNA, 25 bp, probe
gataagctgccaactcaactgagaa

SEQ ID NO: 230833 - DNA, 25 bp, probe
gataactgatattctgcaaatgatg

SEQ ID NO: 230834 - DNA, 25 bp, probe
gatagaggacattcaacaagaaatc

SEQ ID NO: 230835 - DNA, 25 bp, probe
gatacaaggacatagcacagacagt

SEQ ID NO: 230836 - DNA, 25 bp, probe
gatacaaggacatagcacagacagt

SEQ ID NO: 230837 - DNA, 25 bp, probe
gataaagatgacttcgtagcagcac

SEQ ID NO: 230838 - DNA, 25 bp, probe
gatcagctaatacttctctcaacaa

SEQ ID NO: 230839 - DNA, 25 bp, probe
gatagatggtactctccaaaggccc

SEQ ID NO: 230840 - DNA, 25 bp, probe
gatagatggtactctccaaaggccc

SEQ ID NO: 230841 - DNA, 25 bp, probe
gataggggcacagcccaatgacccc

SEQ ID NO: 230842 - DNA, 25 bp, probe
gatcagggagtggggccaatgggcc

SEQ ID NO: 230843 - DNA, 25 bp, probe
gatcacggcaatgcggctgcactgg

SEQ ID NO: 230844 - DNA, 25 bp, probe
gatcacatggaaggcggcgcagagg

SEQ ID NO: 230845 - DNA, 25 bp, probe
gatcacatggaaggcggcgcagagg

SEQ ID NO: 230846 - DNA, 25 bp, probe
gatcaagagagaccttctacaggat

SEQ ID NO: 230847 - DNA, 25 bp, probe
gataaggcagatccttcccagattg

SEQ ID NO: 230848 - DNA, 25 bp, probe
gatagaggacacattcagctaacgt

SEQ ID NO: 230849 - DNA, 25 bp, probe
gatagggaactggctcagcataggc

SEQ ID NO: 230850 - DNA, 25 bp, probe
gatcagggaaaccatgaagaggaac

SEQ ID NO: 230851 - DNA, 25 bp, probe
gatagcgagaaatatgccgaggaga

SEQ ID NO: 230852 - DNA, 25 bp, probe
gataatgatgaataatcctcaggac

SEQ ID NO: 230853 - DNA, 25 bp, probe
gataatgatgaataatcctcaggac

SEQ ID NO: 230854 - DNA, 25 bp, probe
gataatcagaacactagtagagacg

SEQ ID NO: 230855 - DNA, 25 bp, probe
gataaagacaccatgaggggactga

SEQ ID NO: 230856 - DNA, 25 bp, probe
gataaagacaccatgaggggactga

SEQ ID NO: 230857 - DNA, 25 bp, probe
gataacagacatgcagcttggaggt

SEQ ID NO: 230858 - DNA, 25 bp, probe
gataacagacatgcagcttggaggt

SEQ ID NO: 230859 - DNA, 25 bp, probe
gatcacataccagagtctggagctg

SEQ ID NO: 230860 - DNA, 25 bp, probe
gatcaaatctcagggcttcatggga

SEQ ID NO: 230861 - DNA, 25 bp, probe
gatacactctctagctttaggggac

SEQ ID NO: 230862 - DNA, 25 bp, probe
gatacattccaagtcttcaaatgga

SEQ ID NO: 230863 - DNA, 25 bp, probe
gatacattccaagtcttcaaatgga

SEQ ID NO: 230864 - DNA, 25 bp, probe
gatagtgtccagccttgtatatttc

SEQ ID NO: 230865 - DNA, 25 bp, probe
gatacttgttgcttgcttcaatttc

SEQ ID NO: 230866 - DNA, 25 bp, probe
gatacttgttgcttgcttcaatttc

SEQ ID NO: 230867 - DNA, 25 bp, probe
gatcactatttgtttcccattgttt

SEQ ID NO: 230868 - DNA, 25 bp, probe
gatttcagttacttacctgcatgtg

SEQ ID NO: 230869 - DNA, 25 bp, probe
gatatgaatgttgcagaaactctat

SEQ ID NO: 230870 - DNA, 25 bp, probe
gatatgaggatcttggagctaacgc

SEQ ID NO: 230871 - DNA, 25 bp, probe
gataaaatcacttgatgtaacctgg

SEQ ID NO: 230872 - DNA, 25 bp, probe
gataccaccatcatgttcagaccat

SEQ ID NO: 230873 - DNA, 25 bp, probe
gataacaacatcactacaagtataa

SEQ ID NO: 230874 - DNA, 25 bp, probe
gatacagatacccaaaaagattcaa

SEQ ID NO: 230875 - DNA, 25 bp, probe
gatacagctcatacaaaagcagaat

SEQ ID NO: 230876 - DNA, 25 bp, probe
gatacagctcatacaaaagcagaat

SEQ ID NO: 230877 - DNA, 25 bp, probe
gatacatgagcccagaacagatttc

SEQ ID NO: 230878 - DNA, 25 bp, probe
gatacatcaccctaacagagcatta

SEQ ID NO: 230879 - DNA, 25 bp, probe
gatacgaccatcaacagagactgac

SEQ ID NO: 230880 - DNA, 25 bp, probe
gatacgaccatcaacagagactgac

SEQ ID NO: 230881 - DNA, 25 bp, probe
gatacagacctaactgagccttact

SEQ ID NO: 230882 - DNA, 25 bp, probe
gatacagtttaaaagtgcttaccca

SEQ ID NO: 230883 - DNA, 25 bp, probe
gataacttctactgtgatgttcccc

SEQ ID NO: 230884 - DNA, 25 bp, probe
gataacttctactgtgatgttcccc

SEQ ID NO: 230885 - DNA, 25 bp, probe
gataattatagagtggttttgtcct

SEQ ID NO: 230886 - DNA, 25 bp, probe
gatagtgaatacactgtttcctccg

SEQ ID NO: 230887 - DNA, 25 bp, probe
gataagattacacagattatacagc

SEQ ID NO: 230888 - DNA, 25 bp, probe
gatcacgtttgacaacaaagcacac

SEQ ID NO: 230889 - DNA, 25 bp, probe
gatactgtgggaaaacagataccaa

SEQ ID NO: 230890 - DNA, 25 bp, probe
gatactgtgggaaaacagataccaa

SEQ ID NO: 230891 - DNA, 25 bp, probe
gataccgaggcaagagggcgaccac

SEQ ID NO: 230892 - DNA, 25 bp, probe
gatacagtggtgagaggagccccat

SEQ ID NO: 230893 - DNA, 25 bp, probe
gatacagtggtgagaggagccccat

SEQ ID NO: 230894 - DNA, 25 bp, probe
gtagagaagcttcaggagccacttc

SEQ ID NO: 230895 - DNA, 25 bp, probe
gatataaatgctgaagaggccccca

SEQ ID NO: 230896 - DNA, 25 bp, probe
gatatcaaagtcagtaagccaagaa

SEQ ID NO: 230897 - DNA, 25 bp, probe
gatactagaccatttagagcccaat

SEQ ID NO: 230898 - DNA, 25 bp, probe
gatatctggagtttaggagtccttt

SEQ ID NO: 230899 - DNA, 25 bp, probe
gataatctgaggtttggcatgtcct

SEQ ID NO: 230900 - DNA, 25 bp, probe
gataattatggcaattgtgcttttc

SEQ ID NO: 230901 - DNA, 25 bp, probe
gatacattaggaagctgaattatta

SEQ ID NO: 230902 - DNA, 25 bp, probe
gataatgtacaaagtagtctataat

SEQ ID NO: 230903 - DNA, 25 bp, probe
gatagactacacaagaagtcatatg

SEQ ID NO: 230904 - DNA, 25 bp, probe
gatcacaccaacgacaggagctgat

SEQ ID NO: 230905 - DNA, 25 bp, probe
gatacctgcgcttgaaggacatcat

SEQ ID NO: 230906 - DNA, 25 bp, probe
gatacctgcgcttgaaggacatcat

SEQ ID NO: 230907 - DNA, 25 bp, probe
gatacagatacgtaagtgaatatta

SEQ ID NO: 230908 - DNA, 25 bp, probe
gatatggattggaaactgaaattca

SEQ ID NO: 230909 - DNA, 25 bp, probe
gatacagatgtgtgaacttcaatat

SEQ ID NO: 230910 - DNA, 25 bp, probe
gataagtttctattctgtcagtgtt

SEQ ID NO: 230911 - DNA, 25 bp, probe
gatattgttacttttcacctgttga

SEQ ID NO: 230912 - DNA, 25 bp, probe
gataatttgcaaagtacccttgaga

SEQ ID NO: 230913 - DNA, 25 bp, probe
gataactgctaaaattcccctgtac

SEQ ID NO: 230914 - DNA, 25 bp, probe
gatagttctggaaacaaccctgtac

SEQ ID NO: 230915 - DNA, 25 bp, probe
gatagttctggaaacaaccctgtac

SEQ ID NO: 230916 - DNA, 25 bp, probe
gtagatggtgtaattcgacccgaga

SEQ ID NO: 230917 - DNA, 25 bp, probe
gataggtttatcacacagcctaagg

SEQ ID NO: 230918 - DNA, 25 bp, probe
gataatgttttgctactcttgtcag

SEQ ID NO: 230919 - DNA, 25 bp, probe
gataaattccgcttagacctgtcgg

SEQ ID NO: 230920 - DNA, 25 bp, probe
gattaatttttattgaccttccatg

SEQ ID NO: 230921 - DNA, 25 bp, probe
aatattcaccaattcccaggattga

SEQ ID NO: 230922 - DNA, 25 bp, probe
gataagatttaaccaacatcaacaa

SEQ ID NO: 230923 - DNA, 25 bp, probe
gataccttttatctcagaaaccaaa

SEQ ID NO: 230924 - DNA, 25 bp, probe
tgaaccttagaatctaaaacttaca

SEQ ID NO: 230925 - DNA, 25 bp, probe
gataccttaccatctaaaatgtgtg

SEQ ID NO: 230926 - DNA, 25 bp, probe
gatacttttgacaacaaattaggtt

SEQ ID NO: 230927 - DNA, 25 bp, probe
gattctttatgtgtaaatggggata

SEQ ID NO: 230928 - DNA, 25 bp, probe
gattcttggtctctgaacttggcgt

SEQ ID NO: 230929 - DNA, 25 bp, probe
gatttggcctagagaaccttgtgat

SEQ ID NO: 230930 - DNA, 25 bp, probe
gattctacttcgagaacctgctggc

SEQ ID NO: 230931 - DNA, 25 bp, probe
gattctacttcgagaacctgctggc

SEQ ID NO: 230932 - DNA, 25 bp, probe
gattctacttcgagaacctgctggc

SEQ ID NO: 230933 - DNA, 25 bp, probe
gattctacttcgagaacctgctggc

SEQ ID NO: 230934 - DNA, 25 bp, probe
gattaatttcagtaaacattctagt

SEQ ID NO: 230935 - DNA, 25 bp, probe
gattaattatctctaccagtttttg

SEQ ID NO: 230936 - DNA, 25 bp, probe
gttgactacatccttaccaatttag

SEQ ID NO: 230937 - DNA, 25 bp, probe
gatagcaaactcctataccactgtc

SEQ ID NO: 230938 - DNA, 25 bp, probe
gataaacacctcattggcactgtcc

SEQ ID NO: 230939 - DNA, 25 bp, probe
gattaatatgcccttttgccgatgc

SEQ ID NO: 230940 - DNA, 25 bp, probe
gatcaagattgacattttccctgcc

SEQ ID NO: 230941 - DNA, 25 bp, probe
gataagatgaatctcttctccctgt

SEQ ID NO: 230942 - DNA, 25 bp, probe
gataactgctatcctttaccagagt

SEQ ID NO: 230943 - DNA, 25 bp, probe
gatagtccaatttttactcagtgac

SEQ ID NO: 230944 - DNA, 25 bp, probe
gatttcgtttcgatgactcattacc

SEQ ID NO: 230945 - DNA, 25 bp, probe
gattttcttgggagagtcactccag

SEQ ID NO: 230946 - DNA, 25 bp, probe
gatatttttggattacttactcaag

SEQ ID NO: 230947 - DNA, 25 bp, probe
gatatgtgttggaaaactgctttcc

SEQ ID NO: 230948 - DNA, 25 bp, probe
gatagttttggggatacgtccatct

SEQ ID NO: 230949 - DNA, 25 bp, probe
gatatgttttgccgagaggtgtcca

SEQ ID NO: 230950 - DNA, 25 bp, probe
gatatattgctacagaaaggtctca

SEQ ID NO: 230951 - DNA, 25 bp, probe
gatatattgctacagaaaggtctca

SEQ ID NO: 230952 - DNA, 25 bp, probe
gataactcacagagaccagttgcca

SEQ ID NO: 230953 - DNA, 25 bp, probe
gataacagagcgagaccctgtctca

SEQ ID NO: 230954 - DNA, 25 bp, probe
gataaatggctaatccttttctagt

SEQ ID NO: 230955 - DNA, 25 bp, probe
gataaatggctaatccttttctagt

SEQ ID NO: 230956 - DNA, 25 bp, probe
gataaatgccaaacatgttgtcaca

SEQ ID NO: 230957 - DNA, 25 bp, probe
gataaatgccaaacatgttgtcaca

SEQ ID NO: 230958 - DNA, 25 bp, probe
gataatattccaatcatttgccatt

SEQ ID NO: 230959 - DNA, 25 bp, probe
gataacttcaaaaatcccatggttg

SEQ ID NO: 230960 - DNA, 25 bp, probe
gataactctcattcagtattcttgg

SEQ ID NO: 230961 - DNA, 25 bp, probe
gataactccaacttctggctgtaga

SEQ ID NO: 230962 - DNA, 25 bp, probe
gataaatataacttcagactgtgag

SEQ ID NO: 230963 - DNA, 25 bp, probe
gatagccatgatgactcaagaagta

SEQ ID NO: 230964 - DNA, 25 bp, probe
gatagccagactgctgcgagcaacc

SEQ ID NO: 230965 - DNA, 25 bp, probe
gatagccagactgctgcgagcaacc

SEQ ID NO: 230966 - DNA, 25 bp, probe
gatagcaaacgcaggacacaccaag

SEQ ID NO: 230967 - DNA, 25 bp, probe
gatacaaaacgggctacaccaatag

SEQ ID NO: 230968 - DNA, 25 bp, probe
gtgaatacccgcattacaccacaat

SEQ ID NO: 230969 - DNA, 25 bp, probe
gtaggaccaagtgatgacacccctc

SEQ ID NO: 230970 - DNA, 25 bp, probe
gtaggaccaagtgatgacacccctc

SEQ ID NO: 230971 - DNA, 25 bp, probe
gttggtgccagagaagagtcctttc

SEQ ID NO: 230972 - DNA, 25 bp, probe
gttagtcattgatagaactactttg

SEQ ID NO: 230973 - DNA, 25 bp, probe
gatttgcatttgtcaggcagacgtt

SEQ ID NO: 230974 - DNA, 25 bp, probe
gattggctttgcgcgaggagctcat

SEQ ID NO: 230975 - DNA, 25 bp, probe
gatagaggtggctacagacgcacct

SEQ ID NO: 230976 - DNA, 25 bp, probe
gatatgagggctcaagtcgcaatgt

SEQ ID NO: 230977 - DNA, 25 bp, probe
gatacatgggtaatagaacagatgg

SEQ ID NO: 230978 - DNA, 25 bp, probe
gatacggaatggtcaaacacacaga

SEQ ID NO: 230979 - DNA, 25 bp, probe
gatacggaacagcatttccctgcag

SEQ ID NO: 230980 - DNA, 25 bp, probe
gatacggtgacatgtaccctgtgac

SEQ ID NO: 230981 - DNA, 25 bp, probe
gatacggtgacatgtaccctgtgac

SEQ ID NO: 230982 - DNA, 25 bp, probe
gatagggaacactcatccctggtcg

SEQ ID NO: 230983 - DNA, 25 bp, probe
gataaaaacacttctccctgtattc

SEQ ID NO: 230984 - DNA, 25 bp, probe
gataaatggttttcatcagccggat

SEQ ID NO: 230985 - DNA, 25 bp, probe
gatcaagctgttatgaacaccagaa

SEQ ID NO: 230986 - DNA, 25 bp, probe
gataatgctttcacaacatttgcag

SEQ ID NO: 230987 - DNA, 25 bp, probe
gataattttgcaactcatgttatgg

SEQ ID NO: 230988 - DNA, 25 bp, probe
gatcaatgtttaactcagctcaaag

SEQ ID NO: 230989 - DNA, 25 bp, probe
gatacattggtcaaacactcaaacc

SEQ ID NO: 230990 - DNA, 25 bp, probe
gatagcttgtgtagacaccacaaca

SEQ ID NO: 230991 - DNA, 25 bp, probe
gatacctgtctccagatctcagtaa

SEQ ID NO: 230992 - DNA, 25 bp, probe
gatacctgtctccagatctcagtaa

SEQ ID NO: 230993 - DNA, 25 bp, probe
gatactggatgtcagtctcttggca

SEQ ID NO: 230994 - DNA, 25 bp, probe
gatactggatgtcagtctcttggca

SEQ ID NO: 230995 - DNA, 25 bp, probe
gatagctgtcagtggagctctaaga

SEQ ID NO: 230996 - DNA, 25 bp, probe
gatactatcacatgcaaggataatg

SEQ ID NO: 230997 - DNA, 25 bp, probe
gatacgctcaaagcaagtcacagtg

SEQ ID NO: 230998 - DNA, 25 bp, probe
gatacgctcaaagcaagtcacagtg

SEQ ID NO: 230999 - DNA, 25 bp, probe
gatacctctagagaaacatcagaat

SEQ ID NO: 231000 - DNA, 25 bp, probe
gatacctctagtgcaatttataagc

SEQ ID NO: 231001 - DNA, 25 bp, probe
gatacctctagtgcaatttataagc

SEQ ID NO: 231002 - DNA, 25 bp, probe
gatacctctagtgcaatttataagc

SEQ ID NO: 231003 - DNA, 25 bp, probe
gatacttcatatagcccattttaac

SEQ ID NO: 231004 - DNA, 25 bp, probe
gatacttcatatagcccattttaac

SEQ ID NO: 231005 - DNA, 25 bp, probe
gatacttgaatggacctctataaac

SEQ ID NO: 231006 - DNA, 25 bp, probe
gatacttgaatggacctctataaac

SEQ ID NO: 231007 - DNA, 25 bp, probe
gataatgctgttgcctcatctataa

SEQ ID NO: 231008 - DNA, 25 bp, probe
gataatgcatgatgcctcttccagt

SEQ ID NO: 231009 - DNA, 25 bp, probe
gataatgctgaagctcttcttgaat

SEQ ID NO: 231010 - DNA, 25 bp, probe
gatacagagatatttcgccttatga

SEQ ID NO: 231011 - DNA, 25 bp, probe
gataaatgatctttcgtcagtatga

SEQ ID NO: 231012 - DNA, 25 bp, probe
gataagtcttttatgcgatgatcat

SEQ ID NO: 231013 - DNA, 25 bp, probe
gataggataaagttggccatgtatt

SEQ ID NO: 231014 - DNA, 25 bp, probe
gataggataaagttggccatgtatt

SEQ ID NO: 231015 - DNA, 25 bp, probe
gataggaagtagttcccttcagttc

SEQ ID NO: 231016 - DNA, 25 bp, probe
gataggaagtagttcccttcagttc

SEQ ID NO: 231017 - DNA, 25 bp, probe
gatacgaagtggatacctctagtgc

SEQ ID NO: 231018 - DNA, 25 bp, probe
gatacctagggcaagaacacaagtg

SEQ ID NO: 231019 - DNA, 25 bp, probe
gataccctcaggaaaatccaagtgg

SEQ ID NO: 231020 - DNA, 25 bp, probe
gataaacacaaaatccattccaggt

SEQ ID NO: 231021 - DNA, 25 bp, probe
gataaaagcaagttcctcctgtgac

SEQ ID NO: 231022 - DNA, 25 bp, probe
gatagaaaatacttcactgccgggc

SEQ ID NO: 231023 - DNA, 25 bp, probe
gatagaaaatacttcactgccgggc

SEQ ID NO: 231024 - DNA, 25 bp, probe
gatagagacaatcttacccgcaggt

SEQ ID NO: 231025 - DNA, 25 bp, probe
gataggcaaggtttacacagcacag

SEQ ID NO: 231026 - DNA, 25 bp, probe
gataccacgaattgtgaacaaaggg

SEQ ID NO: 231027 - DNA, 25 bp, probe
gatagccactaatggaactccagag

SEQ ID NO: 231028 - DNA, 25 bp, probe
gataccgctcaaaagaagctccaag

SEQ ID NO: 231029 - DNA, 25 bp, probe
gatacacgctgcaggtgaacaccat

SEQ ID NO: 231030 - DNA, 25 bp, probe
gatagacctcaataaaagacataat

SEQ ID NO: 231031 - DNA, 25 bp, probe
gataacctctacaagaaagttgata

SEQ ID NO: 231032 - DNA, 25 bp, probe
gatagagcttctaaaaatatttcta

SEQ ID NO: 231033 - DNA, 25 bp, probe
gatatttttttacattttctcactg

SEQ ID NO: 231034 - DNA, 25 bp, probe
gattctttcttaaaagtttctaatg

SEQ ID NO: 231035 - DNA, 25 bp, probe
gttctggtactaaaaattgtggttg

SEQ ID NO: 231036 - DNA, 25 bp, probe
gttgggtgtctatgggatggggttt

SEQ ID NO: 231037 - DNA, 25 bp, probe
gttgggtgtctatgggatggggttt

SEQ ID NO: 231038 - DNA, 25 bp, probe
gattggactccctggtggttgagtt

SEQ ID NO: 231039 - DNA, 25 bp, probe
gatagggatcctggtgggaggagag

SEQ ID NO: 231040 - DNA, 25 bp, probe
gatttgtacagccggctggggaagc

SEQ ID NO: 231041 - DNA, 25 bp, probe
gttggaatccgacttggggaccatg

SEQ ID NO: 231042 - DNA, 25 bp, probe
gattggaaacggatgacgggcctct

SEQ ID NO: 231043 - DNA, 25 bp, probe
gattggaaacggatgacgggcctct

SEQ ID NO: 231044 - DNA, 25 bp, probe
gattggaatagttcaagccgggcgc

SEQ ID NO: 231045 - DNA, 25 bp, probe
gttggagggtctttctcaggagcag

SEQ ID NO: 231046 - DNA, 25 bp, probe
gatagagaaaaccgtccaggccagt

SEQ ID NO: 231047 - DNA, 25 bp, probe
gataccaaagacacaagcaaccaat

SEQ ID NO: 231048 - DNA, 25 bp, probe
gatacccatagcttccatgagaaca

SEQ ID NO: 231049 - DNA, 25 bp, probe
gatactgcctgtttgcaaagtcaca

SEQ ID NO: 231050 - DNA, 25 bp, probe
gatacgttgcattgtgccaacatca

SEQ ID NO: 231051 - DNA, 25 bp, probe
gatacgttgcattgtgccaacatca

SEQ ID NO: 231052 - DNA, 25 bp, probe
gatacagatctgacctggaaatcat

SEQ ID NO: 231053 - DNA, 25 bp, probe
gatactgttgacgtggcaatgccgc

SEQ ID NO: 231054 - DNA, 25 bp, probe
gatactgctcagccttgatgaaagc

SEQ ID NO: 231055 - DNA, 25 bp, probe
gatactgcgcaagaatacattgttt

SEQ ID NO: 231056 - DNA, 25 bp, probe
gatactctaatcactacattgcttt

SEQ ID NO: 231057 - DNA, 25 bp, probe
gatatttccatcattaaatttttcc

SEQ ID NO: 231058 - DNA, 25 bp, probe
gatatgttagctactatgactattt

SEQ ID NO: 231059 - DNA, 25 bp, probe
gataaacagctgactgtggcttcaa

SEQ ID NO: 231060 - DNA, 25 bp, probe
gatacagaagaggccatgtgtctca

SEQ ID NO: 231061 - DNA, 25 bp, probe
gatacaagaggcatcattggctcca

SEQ ID NO: 231062 - DNA, 25 bp, probe
gatacaagagggtcaccactcacag

SEQ ID NO: 231063 - DNA, 25 bp, probe
gattacgggagacacacccatggaa

SEQ ID NO: 231064 - DNA, 25 bp, probe
gatatcctgggacaacattcacgga

SEQ ID NO: 231065 - DNA, 25 bp, probe
gataccagttgagtagaatgtgatc

SEQ ID NO: 231066 - DNA, 25 bp, probe
gataccagcttggaagggttgtgtc

SEQ ID NO: 231067 - DNA, 25 bp, probe
gataccacattcaaatgggactctt

SEQ ID NO: 231068 - DNA, 25 bp, probe
gataccagcccttggagagactgcc

SEQ ID NO: 231069 - DNA, 25 bp, probe
gataaaccacttgcagagtggctaa

SEQ ID NO: 231070 - DNA, 25 bp, probe
gattaaccggctgcagagggtcaag

SEQ ID NO: 231071 - DNA, 25 bp, probe
gattcgactgcatgctacagggttc

SEQ ID NO: 231072 - DNA, 25 bp, probe
gatacagacattggcttgttggttt

SEQ ID NO: 231073 - DNA, 25 bp, probe
gatactcagtatggttcttcagtcg

SEQ ID NO: 231074 - DNA, 25 bp, probe
gatactcagtatggttcttcagtcg

SEQ ID NO: 231075 - DNA, 25 bp, probe
gatactcagtatggttcttcagtcg

SEQ ID NO: 231076 - DNA, 25 bp, probe
gatactagtttgctttgctgaccaa

SEQ ID NO: 231077 - DNA, 25 bp, probe
gatactagtttgctttgctgaccaa

SEQ ID NO: 231078 - DNA, 25 bp, probe
gatattagttgtctttccatgtttt

SEQ ID NO: 231079 - DNA, 25 bp, probe
gatatttgtattcactttctttaaa

SEQ ID NO: 231080 - DNA, 25 bp, probe
gatagtgggttccctatgtgcgatt

SEQ ID NO: 231081 - DNA, 25 bp, probe
gatagtcgggcaatcttgtgtcgtt

SEQ ID NO: 231082 - DNA, 25 bp, probe
gatagctaggccaagtttgccagct

SEQ ID NO: 231083 - DNA, 25 bp, probe
gatagccatcctgggtcttggcagc

SEQ ID NO: 231084 - DNA, 25 bp, probe
gatagcactctcgagttctgagacc

SEQ ID NO: 231085 - DNA, 25 bp, probe
gatagctctctgactgctttggata

SEQ ID NO: 231086 - DNA, 25 bp, probe
gatagctctctgactgctttggata

SEQ ID NO: 231087 - DNA, 25 bp, probe
gataacttgcatgatcttgtcaaac

SEQ ID NO: 231088 - DNA, 25 bp, probe
gataacttgcatgatcttgtcaaac

SEQ ID NO: 231089 - DNA, 25 bp, probe
gatagagctggagacctacaaactg

SEQ ID NO: 231090 - DNA, 25 bp, probe
gatagtctgcagtgacctcaacaag

SEQ ID NO: 231091 - DNA, 25 bp, probe
gatagggcagatcactctcaagaag

SEQ ID NO: 231092 - DNA, 25 bp, probe
gatagccgatgaggagtcccaggag

SEQ ID NO: 231093 - DNA, 25 bp, probe
gattacgagcagggtcttgctagtg

SEQ ID NO: 231094 - DNA, 25 bp, probe
gattacgagcagggtcttgctagtg

SEQ ID NO: 231095 - DNA, 25 bp, probe
gattattacaggatctatgtaggtg

SEQ ID NO: 231096 - DNA, 25 bp, probe
gatatctgctactcacatttttggt

SEQ ID NO: 231097 - DNA, 25 bp, probe
gatactcatatctctcagttctgtt

SEQ ID NO: 231098 - DNA, 25 bp, probe
gatatctgtcccttcagacatttat

SEQ ID NO: 231099 - DNA, 25 bp, probe
gatttgaagcctagcaacattgttg

SEQ ID NO: 231100 - DNA, 25 bp, probe
gatatcaaagctgccaacgtgctgc

SEQ ID NO: 231101 - DNA, 25 bp, probe
gatacgacaaacgtgacttctgcgc

SEQ ID NO: 231102 - DNA, 25 bp, probe
gatacgacaaacgtgacttctgcgc

SEQ ID NO: 231103 - DNA, 25 bp, probe
gatacagaaaaggtcctctccatct

SEQ ID NO: 231104 - DNA, 25 bp, probe
gatacagaagaacatctcatcccat

SEQ ID NO: 231105 - DNA, 25 bp, probe
gataaccagtatcacttacacaaac

SEQ ID NO: 231106 - DNA, 25 bp, probe
gataaccagtggaaatgtaactaac

SEQ ID NO: 231107 - DNA, 25 bp, probe
gataaccagtggaaatgtaactaac

SEQ ID NO: 231108 - DNA, 25 bp, probe
gataacacttggagctattacatag

SEQ ID NO: 231109 - DNA, 25 bp, probe
gataactcttaaagcatcatttgca

SEQ ID NO: 231110 - DNA, 25 bp, probe
gatagtaattaaatatgttgtcatt

SEQ ID NO: 231111 - DNA, 25 bp, probe
gatactcactttagatttttcattt

SEQ ID NO: 231112 - DNA, 25 bp, probe
gatactagatttttaatttgttcat

SEQ ID NO: 231113 - DNA, 25 bp, probe
gatagcttattttaacaattgcctg

SEQ ID NO: 231114 - DNA, 25 bp, probe
gatatttatttaaccaatgacctta

SEQ ID NO: 231115 - DNA, 25 bp, probe
gatatgttaagtaacactcaaccat

SEQ ID NO: 231116 - DNA, 25 bp, probe
gatagtggacagcaacttgagaaat

SEQ ID NO: 231117 - DNA, 25 bp, probe
gttggtgaaaactatgtggcaaaaa

SEQ ID NO: 231118 - DNA, 25 bp, probe
gattggtgcaatcagcaatgtccta

SEQ ID NO: 231119 - DNA, 25 bp, probe
gatttctcaatcaacgagactcaat

SEQ ID NO: 231120 - DNA, 25 bp, probe
gatttctcaatcaacgagactcaat

SEQ ID NO: 231121 - DNA, 25 bp, probe
gatactatcatactactgaaacaga

SEQ ID NO: 231122 - DNA, 25 bp, probe
gatactgctcatgctgacttaaaac

SEQ ID NO: 231123 - DNA, 25 bp, probe
gataggattgcctgcttagatgata

SEQ ID NO: 231124 - DNA, 25 bp, probe
gatatggaggcctctggtgagtgtg

SEQ ID NO: 231125 - DNA, 25 bp, probe
gatatggaggcctctggtgagtgtg

SEQ ID NO: 231126 - DNA, 25 bp, probe
gatatggggtttcgccatgttggcc

SEQ ID NO: 231127 - DNA, 25 bp, probe
gatagctgggtggtgacctcttagc

SEQ ID NO: 231128 - DNA, 25 bp, probe
gatagctgggtggtgacctcttagc

SEQ ID NO: 231129 - DNA, 25 bp, probe
gatagctgggtggtgacctcttagc

SEQ ID NO: 231130 - DNA, 25 bp, probe
gatagctgggtggtgacctcttagc

SEQ ID NO: 231131 - DNA, 25 bp, probe
gatagctgggtggtgacctcttagc

SEQ ID NO: 231132 - DNA, 25 bp, probe
gatactggggagggcgagtcagagc

SEQ ID NO: 231133 - DNA, 25 bp, probe
gattctagtcaagacggcatctggc

SEQ ID NO: 231134 - DNA, 25 bp, probe
gatactatggaaaacagcgccatca

SEQ ID NO: 231135 - DNA, 25 bp, probe
gatagttggacaaaaggactttgaa

SEQ ID NO: 231136 - DNA, 25 bp, probe
gatatttgaagctgaccgtctttga

SEQ ID NO: 231137 - DNA, 25 bp, probe
gatacatcaatacctgacctttttt

SEQ ID NO: 231138 - DNA, 25 bp, probe
gatactgtgtagctaccttcatttt

SEQ ID NO: 231139 - DNA, 25 bp, probe
gatatctgtgtatatgcccgtatgt

SEQ ID NO: 231140 - DNA, 25 bp, probe
gatatctttcatcatcctctttatc

SEQ ID NO: 231141 - DNA, 25 bp, probe
gatattgactaactgagctccttca

SEQ ID NO: 231142 - DNA, 25 bp, probe
gatttgccaagatgcacatcgctat

SEQ ID NO: 231143 - DNA, 25 bp, probe
gatttgccaagatgcacatcgctat

SEQ ID NO: 231144 - DNA, 25 bp, probe
gattatctaaactaagcgctcattc

SEQ ID NO: 231145 - DNA, 25 bp, probe
gatattcaagtacatcagcttcaac

SEQ ID NO: 231146 - DNA, 25 bp, probe
gatattcaatgcatcttcctcatac

SEQ ID NO: 231147 - DNA, 25 bp, probe
gatatgtcaggaatgtgattcttca

SEQ ID NO: 231148 - DNA, 25 bp, probe
gatatgggatatggtgcatctttac

SEQ ID NO: 231149 - DNA, 25 bp, probe
gatagtgtgagaggttcctttctgt

SEQ ID NO: 231150 - DNA, 25 bp, probe
gatagatgtgagctttttcttctgt

SEQ ID NO: 231151 - DNA, 25 bp, probe
gatactgctaggaaccttggtcttc

SEQ ID NO: 231152 - DNA, 25 bp, probe
gatactgctaggaaccttggtcttc

SEQ ID NO: 231153 - DNA, 25 bp, probe
gataggctatgtcaattctggtttc

SEQ ID NO: 231154 - DNA, 25 bp, probe
gatagccgtgtgagcagtctcagct

SEQ ID NO: 231155 - DNA, 25 bp, probe
gatactcgaggtggatgtcgcgtcc

SEQ ID NO: 231156 - DNA, 25 bp, probe
gatacgagggtggaacgcatgtcct

SEQ ID NO: 231157 - DNA, 25 bp, probe
gatatctatgggatcaaccaggcct

SEQ ID NO: 231158 - DNA, 25 bp, probe
gatttactggcaatcacgccgtatt

SEQ ID NO: 231159 - DNA, 25 bp, probe
gatttactggcaatcacgccgtatt

SEQ ID NO: 231160 - DNA, 25 bp, probe
gatttcagccgaacagcatccggag

SEQ ID NO: 231161 - DNA, 25 bp, probe
gatactcggccatcatgcatggagg

SEQ ID NO: 231162 - DNA, 25 bp, probe
gatagactgtgcctgacagtggagg

SEQ ID NO: 231163 - DNA, 25 bp, probe
gatagactgtgcctgacagtggagg

SEQ ID NO: 231164 - DNA, 25 bp, probe
gatagcatgtgatggctcaggctga

SEQ ID NO: 231165 - DNA, 25 bp, probe
gatattgctgtgagccttgcatgac

SEQ ID NO: 231166 - DNA, 25 bp, probe
gatatctgctggaagcctcaagaag

SEQ ID NO: 231167 - DNA, 25 bp, probe
gatactcatcaggacctcacaggag

SEQ ID NO: 231168 - DNA, 25 bp, probe
gatactcatcaggacctcacaggag

SEQ ID NO: 231169 - DNA, 25 bp, probe
gattccaaggacctcacgatggtgc

SEQ ID NO: 231170 - DNA, 25 bp, probe
gattccaaggacctcacgatggtgc

SEQ ID NO: 231171 - DNA, 25 bp, probe
gattactgagtggccaccaggggcc

SEQ ID NO: 231172 - DNA, 25 bp, probe
gattactgcacgggcaacaaaggat

SEQ ID NO: 231173 - DNA, 25 bp, probe
gatttccctgacccaattcagagat

SEQ ID NO: 231174 - DNA, 25 bp, probe
gatttccctgacccaattcagagat

SEQ ID NO: 231175 - DNA, 25 bp, probe
gatttccctgacccaattcagagat

SEQ ID NO: 231176 - DNA, 25 bp, probe
gatttccctgacccaattcagagat

SEQ ID NO: 231177 - DNA, 25 bp, probe
gatttccctgacccaattcagagat

SEQ ID NO: 231178 - DNA, 25 bp, probe
gatttccagcggtccacattagagt

SEQ ID NO: 231179 - DNA, 25 bp, probe
gatttcggcctgtccaggtatgtcc

SEQ ID NO: 231180 - DNA, 25 bp, probe
gatatctagcccacagagtttgtgc

SEQ ID NO: 231181 - DNA, 25 bp, probe
gatacttgcctaacatgcatgtgct

SEQ ID NO: 231182 - DNA, 25 bp, probe
gatagtgagcgtaacatctgtatta

SEQ ID NO: 231183 - DNA, 25 bp, probe
gatagagtctgtgttggtcttcatc

SEQ ID NO: 231184 - DNA, 25 bp, probe
gatagcatggcttattgtgggcatt

SEQ ID NO: 231185 - DNA, 25 bp, probe
gatagatggacatttgttgacttgg

SEQ ID NO: 231186 - DNA, 25 bp, probe
gatagaaacagactgcctgaattga

SEQ ID NO: 231187 - DNA, 25 bp, probe
gatagcaaatcatgctgcatctata

SEQ ID NO: 231188 - DNA, 25 bp, probe
gatatcacctcatcgatgcagaatc

SEQ ID NO: 231189 - DNA, 25 bp, probe
gatataactgcatgtggccaacaca

SEQ ID NO: 231190 - DNA, 25 bp, probe
gatatgtactgcaggcccagataga

SEQ ID NO: 231191 - DNA, 25 bp, probe
gatatgctttgcaggcccaggagat

SEQ ID NO: 231192 - DNA, 25 bp, probe
gatagcttacatatggccaaaggaa

SEQ ID NO: 231193 - DNA, 25 bp, probe
gatagcttacatatggccaaaggaa

SEQ ID NO: 231194 - DNA, 25 bp, probe
gatacttacacaaggagaagaggat

SEQ ID NO: 231195 - DNA, 25 bp, probe
gatactgcttatttagagaagggtt

SEQ ID NO: 231196 - DNA, 25 bp, probe
gatatctgcactttgtagaaagggc

SEQ ID NO: 231197 - DNA, 25 bp, probe
gatagctgactttggaatgagcagg

SEQ ID NO: 231198 - DNA, 25 bp, probe
gatactgtctatttggagacactgt

SEQ ID NO: 231199 - DNA, 25 bp, probe
gatacttcaaatccgacagcactcc

SEQ ID NO: 231200 - DNA, 25 bp, probe
gatacttcaaatccgacagcactcc

SEQ ID NO: 231201 - DNA, 25 bp, probe
gatatgttgcactgaagacagaccc

SEQ ID NO: 231202 - DNA, 25 bp, probe
gataggagctcatatctgacagcat

SEQ ID NO: 231203 - DNA, 25 bp, probe
gatatggcagcttctacatacgaat

SEQ ID NO: 231204 - DNA, 25 bp, probe
gatagatcgcttgagctcaggagca

SEQ ID NO: 231205 - DNA, 25 bp, probe
gatagaccaatcagctgtgtcgcac

SEQ ID NO: 231206 - DNA, 25 bp, probe
gatacacccatcatggtcatctatc

SEQ ID NO: 231207 - DNA, 25 bp, probe
gatacacccatcatggtcatctatc

SEQ ID NO: 231208 - DNA, 25 bp, probe
gattccccatgcatgggaaagtgca

SEQ ID NO: 231209 - DNA, 25 bp, probe
gattccccatgcatgggaaagtgca

SEQ ID NO: 231210 - DNA, 25 bp, probe
gttgcaaccaggtggtatcaggccc

SEQ ID NO: 231211 - DNA, 25 bp, probe
gttgaagcgcgtgcgggtgcagacc

SEQ ID NO: 231212 - DNA, 25 bp, probe
gattataaacaacctagacagtacc

SEQ ID NO: 231213 - DNA, 25 bp, probe
gattttaccagtccagatatattca

SEQ ID NO: 231214 - DNA, 25 bp, probe
gatattttccggctttatgtcagta

SEQ ID NO: 231215 - DNA, 25 bp, probe
gatattatgtggcttttatttcagt

SEQ ID NO: 231216 - DNA, 25 bp, probe
gattttggggtcaccttcatggtct

SEQ ID NO: 231217 - DNA, 25 bp, probe
gatttagcgaggtggcctacatgtt

SEQ ID NO: 231218 - DNA, 25 bp, probe
gatttatcagttcagtccaatttat

SEQ ID NO: 231219 - DNA, 25 bp, probe
gattttctgtatgatgttactttat

SEQ ID NO: 231220 - DNA, 25 bp, probe
gatttgtagttgcgacttcttcgat

SEQ ID NO: 231221 - DNA, 25 bp, probe
gtttgctgagtacaactaggtcgat

SEQ ID NO: 231222 - DNA, 25 bp, probe
gatttgctggtagaagtcagtcggt

SEQ ID NO: 231223 - DNA, 25 bp, probe
gatttgtggtagggaagcagtatgg

SEQ ID NO: 231224 - DNA, 25 bp, probe
gatttgtttagactgaaggaagacg

SEQ ID NO: 231225 - DNA, 25 bp, probe
gattttgttaacccagcgacgaact

SEQ ID NO: 231226 - DNA, 25 bp, probe
gattttctacaacccaaaccaagtg

SEQ ID NO: 231227 - DNA, 25 bp, probe
gatagtttaaccaaacaaccagaag

SEQ ID NO: 231228 - DNA, 25 bp, probe
gatagatggtacaacaaacccctca

SEQ ID NO: 231229 - DNA, 25 bp, probe
gatagcaggtgaactcgaagcccac

SEQ ID NO: 231230 - DNA, 25 bp, probe
gattcggtaccattgatagcccagt

SEQ ID NO: 231231 - DNA, 25 bp, probe
gatactggtgacgacgaagacttct

SEQ ID NO: 231232 - DNA, 25 bp, probe
gatacttagaccaagcaagagtgta

SEQ ID NO: 231233 - DNA, 25 bp, probe
gatactgtaacgaagataaattggc

SEQ ID NO: 231234 - DNA, 25 bp, probe
gatatttcaacggcaaagaatctgt

SEQ ID NO: 231235 - DNA, 25 bp, probe
gatatttcaacggcaaagaatctgt

SEQ ID NO: 231236 - DNA, 25 bp, probe
gatatttcaaaggtaaaacaataca

SEQ ID NO: 231237 - DNA, 25 bp, probe
gatttctcatttgccaataataata

SEQ ID NO: 231238 - DNA, 25 bp, probe
gatatgtccattattagattatgtt

SEQ ID NO: 231239 - DNA, 25 bp, probe
gattccctagtcatgaggtagattc

SEQ ID NO: 231240 - DNA, 25 bp, probe
gattccctgagcaggattttaatct

SEQ ID NO: 231241 - DNA, 25 bp, probe
gatttcctgatcccgatgttagaaa

SEQ ID NO: 231242 - DNA, 25 bp, probe
gatattaaatccagagtcaagcaac

SEQ ID NO: 231243 - DNA, 25 bp, probe
gattatgaaatcacggaccagtaca

SEQ ID NO: 231244 - DNA, 25 bp, probe
gatattgatttcactggtccatcta

SEQ ID NO: 231245 - DNA, 25 bp, probe
gatattattctcaccgggaaactgt

SEQ ID NO: 231246 - DNA, 25 bp, probe
gatattattctcaccgggaaactgt

SEQ ID NO: 231247 - DNA, 25 bp, probe
tgaaaactcccctgggaacttgtag

SEQ ID NO: 231248 - DNA, 25 bp, probe
gtcaaaacaccctggggcacttgaa

SEQ ID NO: 231249 - DNA, 25 bp, probe
gatactaacagtacctggggcctta

SEQ ID NO: 231250 - DNA, 25 bp, probe
gatattaaaatgcacgctggcgcct

SEQ ID NO: 231251 - DNA, 25 bp, probe
gatttaccactgcacagaggagcgg

SEQ ID NO: 231252 - DNA, 25 bp, probe
gatttcctcagttagtgagcttgtg

SEQ ID NO: 231253 - DNA, 25 bp, probe
gattttccctttgcaggttgcacac

SEQ ID NO: 231254 - DNA, 25 bp, probe
gattttggccttgccagagcttttg

SEQ ID NO: 231255 - DNA, 25 bp, probe
gattttgggattgcaaaccaaatgc

SEQ ID NO: 231256 - DNA, 25 bp, probe
gatttgtggtgttcctaggccaaac

SEQ ID NO: 231257 - DNA, 25 bp, probe
gatttgacgttgttgtcattgtcca

SEQ ID NO: 231258 - DNA, 25 bp, probe
gatttacagtggcgattattaccgc

SEQ ID NO: 231259 - DNA, 25 bp, probe
gatttagagcagcagagcctttacc

SEQ ID NO: 231260 - DNA, 25 bp, probe
gatttagctgctcgaaactgcatgt

SEQ ID NO: 231261 - DNA, 25 bp, probe
gatacttcttggaatggctgcagtg

SEQ ID NO: 231262 - DNA, 25 bp, probe
gatagcatttgcagtatagagcgtg

SEQ ID NO: 231263 - DNA, 25 bp, probe
gatagcatttgcagtatagagcgtg

SEQ ID NO: 231264 - DNA, 25 bp, probe
gatagcatttattgtgataagtaca

SEQ ID NO: 231265 - DNA, 25 bp, probe
gatagagttctgttacaagtccagg

SEQ ID NO: 231266 - DNA, 25 bp, probe
gattgacctgcgttacgaagctcag

SEQ ID NO: 231267 - DNA, 25 bp, probe
gtagacctagttccaggatccatgg

SEQ ID NO: 231268 - DNA, 25 bp, probe
gattactaacttccaacactcagtg

SEQ ID NO: 231269 - DNA, 25 bp, probe
gatattcaaactctaaaccatctga

SEQ ID NO: 231270 - DNA, 25 bp, probe
gatattcaaattcataagctttaac

SEQ ID NO: 231271 - DNA, 25 bp, probe
gattattaattgtgcaagcttttcc

SEQ ID NO: 231272 - DNA, 25 bp, probe
gattataaactgtaattgtgtttca

SEQ ID NO: 231273 - DNA, 25 bp, probe
gattataccaagtcagtggtcttaa

SEQ ID NO: 231274 - DNA, 25 bp, probe
gatttgaagcaactcatggttcatg

SEQ ID NO: 231275 - DNA, 25 bp, probe
gattatcgacatctttgaagctggg

SEQ ID NO: 231276 - DNA, 25 bp, probe
gatatatctgaacctcttatgacgg

SEQ ID NO: 231277 - DNA, 25 bp, probe
gatatttacagcccattaacttgag

SEQ ID NO: 231278 - DNA, 25 bp, probe
gattttacagcagcaattacttggc

SEQ ID NO: 231279 - DNA, 25 bp, probe
gatttccaaacaaatgtactgtact

SEQ ID NO: 231280 - DNA, 25 bp, probe
gatttcagcacctacagtgtacagt

SEQ ID NO: 231281 - DNA, 25 bp, probe
gattttgaacaaggtgcttcgcttc

SEQ ID NO: 231282 - DNA, 25 bp, probe
gattcttaagtcagtcctggcagtt

SEQ ID NO: 231283 - DNA, 25 bp, probe
gatatttaaatacatcatctggcca

SEQ ID NO: 231284 - DNA, 25 bp, probe
gatatttgagcatgtgttcctgggc

SEQ ID NO: 231285 - DNA, 25 bp, probe
gatttgcatagatgtggttctggga

SEQ ID NO: 231286 - DNA, 25 bp, probe
gatttttggcagatgacttgggaac

SEQ ID NO: 231287 - DNA, 25 bp, probe
gattcttcatccacgtttgtggaca

SEQ ID NO: 231288 - DNA, 25 bp, probe
gattttattgtaattggttgtcact

SEQ ID NO: 231289 - DNA, 25 bp, probe
gatttaacttgtattttgtcacttt

SEQ ID NO: 231290 - DNA, 25 bp, probe
gattaacacgttttgtatggtctgt

SEQ ID NO: 231291 - DNA, 25 bp, probe
gattaaactgtcgtgtgtttctgtt

SEQ ID NO: 231292 - DNA, 25 bp, probe
gattgaaatgtccctggtttctatt

SEQ ID NO: 231293 - DNA, 25 bp, probe
gattataatgccagtgaatgttgct

SEQ ID NO: 231294 - DNA, 25 bp, probe
gatatatatatgcttggctaactat

SEQ ID NO: 231295 - DNA, 25 bp, probe
gattcacatatgtttgaccaaggca

SEQ ID NO: 231296 - DNA, 25 bp, probe
gattcacatatgtttgaccaaggca

SEQ ID NO: 231297 - DNA, 25 bp, probe
gatatcacatttattccacggagga

SEQ ID NO: 231298 - DNA, 25 bp, probe
gatagacgcttcatgttaaggacga

SEQ ID NO: 231299 - DNA, 25 bp, probe
gatacctgtttgactttgaggtagt

SEQ ID NO: 231300 - DNA, 25 bp, probe
gattccgcttattccttggtatggt

SEQ ID NO: 231301 - DNA, 25 bp, probe
gattcaggtggtcccttagtttgca

SEQ ID NO: 231302 - DNA, 25 bp, probe
gatattggtggccggtggttttgtg

SEQ ID NO: 231303 - DNA, 25 bp, probe
gatttctgcattccggggtgtatgt

SEQ ID NO: 231304 - DNA, 25 bp, probe
gatattcaacaggagggcggaagta

SEQ ID NO: 231305 - DNA, 25 bp, probe
gatttcctcacctttctgagaagga

SEQ ID NO: 231306 - DNA, 25 bp, probe
gattttccacaagattcccagagac

SEQ ID NO: 231307 - DNA, 25 bp, probe
gatttctcaaaggtcttccaaaact

SEQ ID NO: 231308 - DNA, 25 bp, probe
gatactcccacaggtgggcccatat

SEQ ID NO: 231309 - DNA, 25 bp, probe
gatactcccacaggatggactcact

SEQ ID NO: 231310 - DNA, 25 bp, probe
gatactcccacaggatggactcact

SEQ ID NO: 231311 - DNA, 25 bp, probe
gatactcccacaggatggactcact

SEQ ID NO: 231312 - DNA, 25 bp, probe
gatatctccccagtgtgaagtttct

SEQ ID NO: 231313 - DNA, 25 bp, probe
gatattctatacagttctgttgtct

SEQ ID NO: 231314 - DNA, 25 bp, probe
gataccaatgggcattgctgtgttc

SEQ ID NO: 231315 - DNA, 25 bp, probe
gatatcctctgacgtatcatctttt

SEQ ID NO: 231316 - DNA, 25 bp, probe
gatttgtctgaatcacatgattgct

SEQ ID NO: 231317 - DNA, 25 bp, probe
gatttgtctgaatcacatgattgct

SEQ ID NO: 231318 - DNA, 25 bp, probe
gatagctattgatacagcaattgca

SEQ ID NO: 231319 - DNA, 25 bp, probe
gatagctattgatacagcaattgca

SEQ ID NO: 231320 - DNA, 25 bp, probe
gatagtttgaaagaagatgccagga

SEQ ID NO: 231321 - DNA, 25 bp, probe
gatagttgatggaatgctaaagcta

SEQ ID NO: 231322 - DNA, 25 bp, probe
gatagtgggtagacataaaatgaag

SEQ ID NO: 231323 - DNA, 25 bp, probe
gatttcggtttcacaaatggcagac

SEQ ID NO: 231324 - DNA, 25 bp, probe
gatttggagatgagcccaaagtgcc

SEQ ID NO: 231325 - DNA, 25 bp, probe
gatttggagatgagcccaaagtgcc

SEQ ID NO: 231326 - DNA, 25 bp, probe
gattttggattgtcccgaggtcaag

SEQ ID NO: 231327 - DNA, 25 bp, probe
gattggtgggtttcggggtgaagca

SEQ ID NO: 231328 - DNA, 25 bp, probe
gattggtgggtttcggggtgaagca

SEQ ID NO: 231329 - DNA, 25 bp, probe
gattggggatgcttacatggtggta

SEQ ID NO: 231330 - DNA, 25 bp, probe
gattgtggggtatgtcctggccaaa

SEQ ID NO: 231331 - DNA, 25 bp, probe
gattttggttttgcacgaacactag

SEQ ID NO: 231332 - DNA, 25 bp, probe
gattttgagcatttttacgtacttg

SEQ ID NO: 231333 - DNA, 25 bp, probe
gatatcgtggatgctttatcagatc

SEQ ID NO: 231334 - DNA, 25 bp, probe
gatattgtggatggcatgggcatta

SEQ ID NO: 231335 - DNA, 25 bp, probe
gatagtgatggcaaaggcgatatta

SEQ ID NO: 231336 - DNA, 25 bp, probe
gatatggcagcgaaaggatgtaaac

SEQ ID NO: 231337 - DNA, 25 bp, probe
gatatggcagcttagaggtgttggc

SEQ ID NO: 231338 - DNA, 25 bp, probe
gatatggcagcttagaggtgttggc

SEQ ID NO: 231339 - DNA, 25 bp, probe
gatatgcacgctgaatcctgctatg

SEQ ID NO: 231340 - DNA, 25 bp, probe
gatatgatgctggaaatgctctgta

SEQ ID NO: 231341 - DNA, 25 bp, probe
gatatgcatgtttcaagtggtattg

SEQ ID NO: 231342 - DNA, 25 bp, probe
gatagcatttcagaatgtgtctttt

SEQ ID NO: 231343 - DNA, 25 bp, probe
gatacctgtgaggactggttgtctc

SEQ ID NO: 231344 - DNA, 25 bp, probe
gatacctgtatctctaagtgttgct

SEQ ID NO: 231345 - DNA, 25 bp, probe
gatacctgtatctctaagtgttgct

SEQ ID NO: 231346 - DNA, 25 bp, probe
gataccttcaatttaaggctgtggg

SEQ ID NO: 231347 - DNA, 25 bp, probe
gatatcacctacacggagggtgggg

SEQ ID NO: 231348 - DNA, 25 bp, probe
gattcccgactgtggcggttagcat

SEQ ID NO: 231349 - DNA, 25 bp, probe
gattcccgactgtggcggttagcat

SEQ ID NO: 231350 - DNA, 25 bp, probe
gttgcaccaaggagtgggtgtagta

SEQ ID NO: 231351 - DNA, 25 bp, probe
gttggcagaactcaagggcaaagat

SEQ ID NO: 231352 - DNA, 25 bp, probe
gttgatggaaccaaatagaaaaact

SEQ ID NO: 231353 - DNA, 25 bp, probe
gatatgggaaccccaaggagcagaa

SEQ ID NO: 231354 - DNA, 25 bp, probe
gatagggaacggaagaaaagcaaga

SEQ ID NO: 231355 - DNA, 25 bp, probe
gatagtgtaaatggaaggcaaagca

SEQ ID NO: 231356 - DNA, 25 bp, probe
gatttgtttcaggggaaaatgccca

SEQ ID NO: 231357 - DNA, 25 bp, probe
gatttgtttcatgtgacctagggga

SEQ ID NO: 231358 - DNA, 25 bp, probe
gatttgtttcatgtgacctagggga

SEQ ID NO: 231359 - DNA, 25 bp, probe
gatttccattgtgtggcctggtggg

SEQ ID NO: 231360 - DNA, 25 bp, probe
gatttccattgtgtggcctggtggg

SEQ ID NO: 231361 - DNA, 25 bp, probe
gattatcctgttctgctacgtggag

SEQ ID NO: 231362 - DNA, 25 bp, probe
gatataactgtttacttgttgcaag

SEQ ID NO: 231363 - DNA, 25 bp, probe
gatataatctgtcccattttcgagg

SEQ ID NO: 231364 - DNA, 25 bp, probe
gatatagatccgtagaattgtcagg

SEQ ID NO: 231365 - DNA, 25 bp, probe
gattaactcgacaatatggccagct

SEQ ID NO: 231366 - DNA, 25 bp, probe
gattacaccaatgtattctagaata

SEQ ID NO: 231367 - DNA, 25 bp, probe
gatatccatgcctgttttacagaaa

SEQ ID NO: 231368 - DNA, 25 bp, probe
gatatccatgcctgttttacagaaa

SEQ ID NO: 231369 - DNA, 25 bp, probe
gatatccgtgtctctataacagaaa

SEQ ID NO: 231370 - DNA, 25 bp, probe
gatatcccgtttcaaggctgtaatt

SEQ ID NO: 231371 - DNA, 25 bp, probe
gatttccgttttaaggttcacatgg

SEQ ID NO: 231372 - DNA, 25 bp, probe
gatttgccggtaaaagcagactcaa

SEQ ID NO: 231373 - DNA, 25 bp, probe
gatttacggcgctaaggatgactct

SEQ ID NO: 231374 - DNA, 25 bp, probe
gatttccgagctgacggaagcctgt

SEQ ID NO: 231375 - DNA, 25 bp, probe
gatttcggtctctaagaaccaatgt

SEQ ID NO: 231376 - DNA, 25 bp, probe
gatatctcggatacaatagaggcaa

SEQ ID NO: 231377 - DNA, 25 bp, probe
gatagcagcctgtacacggggcaga

SEQ ID NO: 231378 - DNA, 25 bp, probe
gatatgcacctgcaacggagactcc

SEQ ID NO: 231379 - DNA, 25 bp, probe
gattcatccgagatcagcagcaatt

SEQ ID NO: 231380 - DNA, 25 bp, probe
gattcatcctggtctgagacctcag

SEQ ID NO: 231381 - DNA, 25 bp, probe
gattccctgtgggacaagcacgcgt

SEQ ID NO: 231382 - DNA, 25 bp, probe
gatattccgcatttacaatgccgcc

SEQ ID NO: 231383 - DNA, 25 bp, probe
gatattcttattgacatcatcagag

SEQ ID NO: 231384 - DNA, 25 bp, probe
gatttatatcctggaccctgagctg

SEQ ID NO: 231385 - DNA, 25 bp, probe
gattgatatcgcagcgaccctggag

SEQ ID NO: 231386 - DNA, 25 bp, probe
gatttcatccggcacttgatggaga

SEQ ID NO: 231387 - DNA, 25 bp, probe
gatttacctgagaagcaagatggaa

SEQ ID NO: 231388 - DNA, 25 bp, probe
gatttcaacttgagcaaagagacgg

SEQ ID NO: 231389 - DNA, 25 bp, probe
gatattaacttactcacacggacag

SEQ ID NO: 231390 - DNA, 25 bp, probe
gttccaactctcaaacacggaggtc

SEQ ID NO: 231391 - DNA, 25 bp, probe
gataccaacttgatagcagaggggg

SEQ ID NO: 231392 - DNA, 25 bp, probe
gataccagaccacattgacagggag

SEQ ID NO: 231393 - DNA, 25 bp, probe
gatatccagagcgagcgcttcaggg

SEQ ID NO: 231394 - DNA, 25 bp, probe
gatatacacatggatgcacgcacat

SEQ ID NO: 231395 - DNA, 25 bp, probe
gatatgagctatgtgcatcgtgatc

SEQ ID NO: 231396 - DNA, 25 bp, probe
gatatatgctgggctccggagcaac

SEQ ID NO: 231397 - DNA, 25 bp, probe
gatagtgctggcactggtgagcacc

SEQ ID NO: 231398 - DNA, 25 bp, probe
gatttgctgatattcagggacaccc

SEQ ID NO: 231399 - DNA, 25 bp, probe
gttcgtgagaactgcaaaccgctgc

SEQ ID NO: 231400 - DNA, 25 bp, probe
gttcgtgagaactgcaaaccgctgc

SEQ ID NO: 231401 - DNA, 25 bp, probe
gattcggagaattatgagacctact

SEQ ID NO: 231402 - DNA, 25 bp, probe
gattcggagaattatgagacctact

SEQ ID NO: 231403 - DNA, 25 bp, probe
gatttggaaacatagctcctaccac

SEQ ID NO: 231404 - DNA, 25 bp, probe
gatttgttacactagtgcatacata

SEQ ID NO: 231405 - DNA, 25 bp, probe
gattctgggaaggggcaagcagaga

SEQ ID NO: 231406 - DNA, 25 bp, probe
gattctgggaaggggcaagcagaga

SEQ ID NO: 231407 - DNA, 25 bp, probe
gatatcggggaggtgtacgcggatg

SEQ ID NO: 231408 - DNA, 25 bp, probe
gatattgtgtggtctggttcctgtg

SEQ ID NO: 231409 - DNA, 25 bp, probe
gatatatgttatactgcagtttttg

SEQ ID NO: 231410 - DNA, 25 bp, probe
gatatatgttatactgcagtttttg

SEQ ID NO: 231411 - DNA, 25 bp, probe
gatattagtatttgctgttagttgg

SEQ ID NO: 231412 - DNA, 25 bp, probe
gatattaggatattgctcaaaatta

SEQ ID NO: 231413 - DNA, 25 bp, probe
gatttcctgtacttctaacaatatt

SEQ ID NO: 231414 - DNA, 25 bp, probe
gatttcctgtacttctaacaatatt

SEQ ID NO: 231415 - DNA, 25 bp, probe
gattttttgcctctagacatatttg

SEQ ID NO: 231416 - DNA, 25 bp, probe
gattttttgcctctagacatatttg

SEQ ID NO: 231417 - DNA, 25 bp, probe
gatttttctgccttaaatcttgatg

SEQ ID NO: 231418 - DNA, 25 bp, probe
gattttttgtgctaccaattctggc

SEQ ID NO: 231419 - DNA, 25 bp, probe
gattttttgtgctaccaattctggc

SEQ ID NO: 231420 - DNA, 25 bp, probe
gattttggcctgtccacatttcagg

SEQ ID NO: 231421 - DNA, 25 bp, probe
gattttggtctgtccaagattatgg

SEQ ID NO: 231422 - DNA, 25 bp, probe
gatttctgaccattatcaagagttg

SEQ ID NO: 231423 - DNA, 25 bp, probe
gatttctcacccttagaagctctac

SEQ ID NO: 231424 - DNA, 25 bp, probe
gattttctagacttcagaacatgct

SEQ ID NO: 231425 - DNA, 25 bp, probe
gatatgattctgtaactccaatcag

SEQ ID NO: 231426 - DNA, 25 bp, probe
gatatactatgaatactctagaatg

SEQ ID NO: 231427 - DNA, 25 bp, probe
gatatttctatttcctggaatggtt

SEQ ID NO: 231428 - DNA, 25 bp, probe
gatttattatatacagtgggcgttc

SEQ ID NO: 231429 - DNA, 25 bp, probe
gattttttttgccatgggttcttca

SEQ ID NO: 231430 - DNA, 25 bp, probe
gttgttcctggtcattgagtacgtc

SEQ ID NO: 231431 - DNA, 25 bp, probe
gtcgattggtggtcctttggagttc

SEQ ID NO: 231432 - DNA, 25 bp, probe
gatatattgggttcacattctggag

SEQ ID NO: 231433 - DNA, 25 bp, probe
gattttggagttagcactcagctgg

SEQ ID NO: 231434 - DNA, 25 bp, probe
gattaaccgtcggcacatcactgag

SEQ ID NO: 231435 - DNA, 25 bp, probe
gatataccactatggccacatcgag

SEQ ID NO: 231436 - DNA, 25 bp, probe
gatatccatccaatgagggcaatct

SEQ ID NO: 231437 - DNA, 25 bp, probe
gatatcatatgggtcaggtcatttt

SEQ ID NO: 231438 - DNA, 25 bp, probe
gatatcatatgggtcaggtcatttt

SEQ ID NO: 231439 - DNA, 25 bp, probe
gatatcaaatttggtgtcatgcaat

SEQ ID NO: 231440 - DNA, 25 bp, probe
gatatgcacacacatggatgagcac

SEQ ID NO: 231441 - DNA, 25 bp, probe
gatatctcatcctagctaagctcta

SEQ ID NO: 231442 - DNA, 25 bp, probe
gatttcatcatctttgaggctgctc

SEQ ID NO: 231443 - DNA, 25 bp, probe
gatattctactggccatgatgccac

SEQ ID NO: 231444 - DNA, 25 bp, probe
gatatacccttcaattgccaaattt

SEQ ID NO: 231445 - DNA, 25 bp, probe
gattttgccttcactgaaaacttcc

SEQ ID NO: 231446 - DNA, 25 bp, probe
gattttgccttcactgaaaacttcc

SEQ ID NO: 231447 - DNA, 25 bp, probe
gatttttattttttaaatgctgtca

SEQ ID NO: 231448 - DNA, 25 bp, probe
gttttagtattgtattccaagttga

SEQ ID NO: 231449 - DNA, 25 bp, probe
gttgttgttaaaattctcaaggtga

SEQ ID NO: 231450 - DNA, 25 bp, probe
gatttttctgcaggactttaaagct

SEQ ID NO: 231451 - DNA, 25 bp, probe
gattctaggtcagaccctcaaagcc

SEQ ID NO: 231452 - DNA, 25 bp, probe
gatttttacacttccttaactgcac

SEQ ID NO: 231453 - DNA, 25 bp, probe
gatatttgtacagtgtcgctttttg

SEQ ID NO: 231454 - DNA, 25 bp, probe
gatatttttcatgctccactatttt

SEQ ID NO: 231455 - DNA, 25 bp, probe
gatatattttgaaaccacatttctt

SEQ ID NO: 231456 - DNA, 25 bp, probe
tataaaaagtagggcaatttcatta

SEQ ID NO: 231457 - DNA, 25 bp, probe
gtacaaactaaggactatttattga

SEQ ID NO: 231458 - DNA, 25 bp, probe
gatataacactatgtttatttacta

SEQ ID NO: 231459 - DNA, 25 bp, probe
gattagacactggaggtttttaaca

SEQ ID NO: 231460 - DNA, 25 bp, probe
gattagacactggaggtttttaaca

SEQ ID NO: 231461 - DNA, 25 bp, probe
gatataatcacctaggtttacaaat

SEQ ID NO: 231462 - DNA, 25 bp, probe
gatataatcacctaggtttacaaat

SEQ ID NO: 231463 - DNA, 25 bp, probe
gattaacatcgctatcactcttgac

SEQ ID NO: 231464 - DNA, 25 bp, probe
gatatcaaagactcattgcttaatt

SEQ ID NO: 231465 - DNA, 25 bp, probe
gatagaacgcaaacaacttgattat

SEQ ID NO: 231466 - DNA, 25 bp, probe
gattaaggctgaaattctagatctt

SEQ ID NO: 231467 - DNA, 25 bp, probe
gattaatcctatatgtaatgatcat

SEQ ID NO: 231468 - DNA, 25 bp, probe
gatattattaatagtgttatgcaga

SEQ ID NO: 231469 - DNA, 25 bp, probe
gatatcatgttactaaagttgaagg

SEQ ID NO: 231470 - DNA, 25 bp, probe
gattctttaccaaattggatgcaga

SEQ ID NO: 231471 - DNA, 25 bp, probe
gatatcacttcatagacttgctgga

SEQ ID NO: 231472 - DNA, 25 bp, probe
gattacgtcatccagactactcgaa

SEQ ID NO: 231473 - DNA, 25 bp, probe
gattacgtcatccagactactcgaa

SEQ ID NO: 231474 - DNA, 25 bp, probe
gatatccagataccacacataccaa

SEQ ID NO: 231475 - DNA, 25 bp, probe
gatttcagatgactatgcagaggcc

SEQ ID NO: 231476 - DNA, 25 bp, probe
gatatctgagattttgctggttcca

SEQ ID NO: 231477 - DNA, 25 bp, probe
gatatctgagattttgctggttcca

SEQ ID NO: 231478 - DNA, 25 bp, probe
gatatcggatggtgcagcaattcca

SEQ ID NO: 231479 - DNA, 25 bp, probe
gatagtgagtcgtgcgctaatgtac

SEQ ID NO: 231480 - DNA, 25 bp, probe
gatttgcagttattcgtaatgtcag

SEQ ID NO: 231481 - DNA, 25 bp, probe
gatttcaggatactctgtcagatgg

SEQ ID NO: 231482 - DNA, 25 bp, probe
gatttggagatatcgtggatgcttt

SEQ ID NO: 231483 - DNA, 25 bp, probe
gatttggcaacagtgcgggtggtcc

SEQ ID NO: 231484 - DNA, 25 bp, probe
gatttggcaacagtgcgggtggtcc

SEQ ID NO: 231485 - DNA, 25 bp, probe
gatatcgagcagttctcggcggtga

SEQ ID NO: 231486 - DNA, 25 bp, probe
gatatggtgcatttcttgtctactg

SEQ ID NO: 231487 - DNA, 25 bp, probe
gatattgtcaattcttgctcatcgg

SEQ ID NO: 231488 - DNA, 25 bp, probe
gatattgtcaattcttgctcatcgg

SEQ ID NO: 231489 - DNA, 25 bp, probe
gatattagctaattgtgccaggggc

SEQ ID NO: 231490 - DNA, 25 bp, probe
gatttaataatcatgctaggggccg

SEQ ID NO: 231491 - DNA, 25 bp, probe
gattctaaaaacctcaggtggctct

SEQ ID NO: 231492 - DNA, 25 bp, probe
gatttaaagtcagtcacaaaggctt

SEQ ID NO: 231493 - DNA, 25 bp, probe
gatttaagcaccttcactaaagtct

SEQ ID NO: 231494 - DNA, 25 bp, probe
gatttaagcaccttcactaaagtct

SEQ ID NO: 231495 - DNA, 25 bp, probe
gattgataaccctcacataacatat

SEQ ID NO: 231496 - DNA, 25 bp, probe
gatttaaccacaaactacctctact

SEQ ID NO: 231497 - DNA, 25 bp, probe
gattaacacaacacctgtccttact

SEQ ID NO: 231498 - DNA, 25 bp, probe
gattaacacaccacactggcgaacc

SEQ ID NO: 231499 - DNA, 25 bp, probe
gattaacacaccacactggcgaacc

SEQ ID NO: 231500 - DNA, 25 bp, probe
gatataaccctaacacacacagaaa

SEQ ID NO: 231501 - DNA, 25 bp, probe
gattcactccctaaccaaaggaata

SEQ ID NO: 231502 - DNA, 25 bp, probe
gattttccacttttaaagttcatgg

SEQ ID NO: 231503 - DNA, 25 bp, probe
gatttctggtttctcttagttcttc

SEQ ID NO: 231504 - DNA, 25 bp, probe
gatattttgtttcttttgatttctc

SEQ ID NO: 231505 - DNA, 25 bp, probe
gatatttttttcttcgcttgtttat

SEQ ID NO: 231506 - DNA, 25 bp, probe
gattttttcacatacgctcatttta

SEQ ID NO: 231507 - DNA, 25 bp, probe
gattttttcacatacgctcatttta

SEQ ID NO: 231508 - DNA, 25 bp, probe
gatttgtattaagacagcacttata

SEQ ID NO: 231509 - DNA, 25 bp, probe
gatttgcaattctggaggctcctga

SEQ ID NO: 231510 - DNA, 25 bp, probe
gatttcatatcctgagatagctctg

SEQ ID NO: 231511 - DNA, 25 bp, probe
gatttcattcctgggctgagagtgg

SEQ ID NO: 231512 - DNA, 25 bp, probe
gattttcccaaggggagatgggaca

SEQ ID NO: 231513 - DNA, 25 bp, probe
gtctcccctaatgcgggggctggac

SEQ ID NO: 231514 - DNA, 25 bp, probe
gttggccctgaaacaggaatggggc

SEQ ID NO: 231515 - DNA, 25 bp, probe
gttggtccaaactgaataggcttgc

SEQ ID NO: 231516 - DNA, 25 bp, probe
gattagcccacaaactgaataagtc

SEQ ID NO: 231517 - DNA, 25 bp, probe
gattagcccacaaactgaataagtc

SEQ ID NO: 231518 - DNA, 25 bp, probe
gattagatcaaaagtctacataact

SEQ ID NO: 231519 - DNA, 25 bp, probe
gattaacacaaagtctgcctttctc

SEQ ID NO: 231520 - DNA, 25 bp, probe
gatttttacaagatccatttgcctt

SEQ ID NO: 231521 - DNA, 25 bp, probe
gatttttagaaaattatgtcttctg

SEQ ID NO: 231522 - DNA, 25 bp, probe
gatattttctacaaatgttacttct

SEQ ID NO: 231523 - DNA, 25 bp, probe
gatatttttgcaactatttccacct

SEQ ID NO: 231524 - DNA, 25 bp, probe
gattgtagtttagttttcctccttg

SEQ ID NO: 231525 - DNA, 25 bp, probe
gattaagtcctatttttcacctaag

SEQ ID NO: 231526 - DNA, 25 bp, probe
gattaggtaaaaatctctacaccaa

SEQ ID NO: 231527 - DNA, 25 bp, probe
gattatcaaagaagactttaccaca

SEQ ID NO: 231528 - DNA, 25 bp, probe
gatttgtgtagagttctaataccaa

SEQ ID NO: 231529 - DNA, 25 bp, probe
gattttgtaggtccgactacacagc

SEQ ID NO: 231530 - DNA, 25 bp, probe
gattttcgacgtttgactagccatc

SEQ ID NO: 231531 - DNA, 25 bp, probe
gatattgttgccatcaatgacccct

SEQ ID NO: 231532 - DNA, 25 bp, probe
gatttattgacttcatcggccaagt

SEQ ID NO: 231533 - DNA, 25 bp, probe
gatttttactacaggcccttcaata

SEQ ID NO: 231534 - DNA, 25 bp, probe
gattcttttcaagaggcccaaatta

SEQ ID NO: 231535 - DNA, 25 bp, probe
gattcttttcaagaggcccaaatta

SEQ ID NO: 231536 - DNA, 25 bp, probe
gatttctattcaaggtggccaaatt

SEQ ID NO: 231537 - DNA, 25 bp, probe
gatatcttcctcaatgagctggtca

SEQ ID NO: 231538 - DNA, 25 bp, probe
gattttctgcagcaagcactgtcaa

SEQ ID NO: 231539 - DNA, 25 bp, probe
gattttctgcagcaagcactgtcaa

SEQ ID NO: 231540 - DNA, 25 bp, probe
gatattccagagaaagatcttcaag

SEQ ID NO: 231541 - DNA, 25 bp, probe
gattacctagtagtcatttcatggg

SEQ ID NO: 231542 - DNA, 25 bp, probe
gattcaccagcacttgctcgtccat

SEQ ID NO: 231543 - DNA, 25 bp, probe
gatatcctgcaggaattcctcgaga

SEQ ID NO: 231544 - DNA, 25 bp, probe
gatatcctgcaggaattcctcgaga

SEQ ID NO: 231545 - DNA, 25 bp, probe
gatatgcttgatgattttcctgata

SEQ ID NO: 231546 - DNA, 25 bp, probe
gattgttatggctgtaccgcattac

SEQ ID NO: 231547 - DNA, 25 bp, probe
gatttttggtgagtccatagctcta

SEQ ID NO: 231548 - DNA, 25 bp, probe
gatttttggtgagtccatagctcta

SEQ ID NO: 231549 - DNA, 25 bp, probe
gatatttgtttgttacatcctgctg

SEQ ID NO: 231550 - DNA, 25 bp, probe
gatattttgtatttggcaactgtgg

SEQ ID NO: 231551 - DNA, 25 bp, probe
gattcagttgcaaaaggacccgggt

SEQ ID NO: 231552 - DNA, 25 bp, probe
gattcagttgcaaaaggacccgggt

SEQ ID NO: 231553 - DNA, 25 bp, probe
gattgacactgtaaaggaccccgtg

SEQ ID NO: 231554 - DNA, 25 bp, probe
gattgatgcggtatacgaggcccca

SEQ ID NO: 231555 - DNA, 25 bp, probe
gttgtgcacttttacaagccgcaaa

SEQ ID NO: 231556 - DNA, 25 bp, probe
gatatgtgactttggattggctcga

SEQ ID NO: 231557 - DNA, 25 bp, probe
gatatgtgatctcagagtagcccat

SEQ ID NO: 231558 - DNA, 25 bp, probe
gatatgtgcagttcaagtttcacat

SEQ ID NO: 231559 - DNA, 25 bp, probe
gatattgcatatgcatagttcccat

SEQ ID NO: 231560 - DNA, 25 bp, probe
gatatagcaatggcacgtcaaaccc

SEQ ID NO: 231561 - DNA, 25 bp, probe
gattactgataatatcacaacccag

SEQ ID NO: 231562 - DNA, 25 bp, probe
gattaccatgaagaataacacacat

SEQ ID NO: 231563 - DNA, 25 bp, probe
gattcaactgggcacataaaatcag

SEQ ID NO: 231564 - DNA, 25 bp, probe
gattcaactgggcacataaaatcag

SEQ ID NO: 231565 - DNA, 25 bp, probe
gattcaactaggcatcatacgtgac

SEQ ID NO: 231566 - DNA, 25 bp, probe
gattcaacagggcatcatacgtgac

SEQ ID NO: 231567 - DNA, 25 bp, probe
gattcaggcctagattacttgcacg

SEQ ID NO: 231568 - DNA, 25 bp, probe
gattcccctggagtgtgaagctgac

SEQ ID NO: 231569 - DNA, 25 bp, probe
gattcccctggagtgtgaagctgac

SEQ ID NO: 231570 - DNA, 25 bp, probe
gattcccctggagtgtgaagctgac

SEQ ID NO: 231571 - DNA, 25 bp, probe
gattctccaccgagtatgagctgca

SEQ ID NO: 231572 - DNA, 25 bp, probe
gattcctcaggccaggtgatgactc

SEQ ID NO: 231573 - DNA, 25 bp, probe
gattacacagttaggatgctgacac

SEQ ID NO: 231574 - DNA, 25 bp, probe
gattcagctagttaggagcccattt

SEQ ID NO: 231575 - DNA, 25 bp, probe
gattttagtccagtgatgtccatgt

SEQ ID NO: 231576 - DNA, 25 bp, probe
gatttcatagcccagtatgtgtgca

SEQ ID NO: 231577 - DNA, 25 bp, probe
gatattctatctgcagtatttgtac

SEQ ID NO: 231578 - DNA, 25 bp, probe
gatttgtatgtgaagctattttgaa

SEQ ID NO: 231579 - DNA, 25 bp, probe
gatttctgtatgggctgtacttggt

SEQ ID NO: 231580 - DNA, 25 bp, probe
gattattgaatgggtgaacaacact

SEQ ID NO: 231581 - DNA, 25 bp, probe
gattattcaatttatacctagcact

SEQ ID NO: 231582 - DNA, 25 bp, probe
gatttcatgtctaactaactaactt

SEQ ID NO: 231583 - DNA, 25 bp, probe
gatttcatgtctaactaactaactt

SEQ ID NO: 231584 - DNA, 25 bp, probe
gatttcatcctggccatttttattc

SEQ ID NO: 231585 - DNA, 25 bp, probe
gatttgctctgttagcacttttttc

SEQ ID NO: 231586 - DNA, 25 bp, probe
gatattggatgtgtggctatttttc

SEQ ID NO: 231587 - DNA, 25 bp, probe
gatttcgctgatgtggtttgttata

SEQ ID NO: 231588 - DNA, 25 bp, probe
gatattcactgaaagtattagtttt

SEQ ID NO: 231589 - DNA, 25 bp, probe
gatattcatggacagtatacagatt

SEQ ID NO: 231590 - DNA, 25 bp, probe
gatttgcaagaggaattgatcagta

SEQ ID NO: 231591 - DNA, 25 bp, probe
gatattgcacgacagactgcacagg

SEQ ID NO: 231592 - DNA, 25 bp, probe
gatattagcagctttgactgcagca

SEQ ID NO: 231593 - DNA, 25 bp, probe
gatattgatgcctttgctcaggtct

SEQ ID NO: 231594 - DNA, 25 bp, probe
gatattgatgcctttgctcaggtct

SEQ ID NO: 231595 - DNA, 25 bp, probe
gattttctcagaggctcgagtcttt

SEQ ID NO: 231596 - DNA, 25 bp, probe
gattttgtcgcagtcacgatcaact

SEQ ID NO: 231597 - DNA, 25 bp, probe
gattttgcacaaatatccaccactt

SEQ ID NO: 231598 - DNA, 25 bp, probe
gattattcaagaattctaccaaata

SEQ ID NO: 231599 - DNA, 25 bp, probe
gattaaaaatttggacttagcatca

SEQ ID NO: 231600 - DNA, 25 bp, probe
gattaagatgattcctagatttagc

SEQ ID NO: 231601 - DNA, 25 bp, probe
gattaagatgattcctagatttagc

SEQ ID NO: 231602 - DNA, 25 bp, probe
gattatatagctcacatggctttgg

SEQ ID NO: 231603 - DNA, 25 bp, probe
gattatatagctcacatggctttgg

SEQ ID NO: 231604 - DNA, 25 bp, probe
gatatactttgcaactggcgtcctg

SEQ ID NO: 231605 - DNA, 25 bp, probe
gatataaattctgtgggtccgataa

SEQ ID NO: 231606 - DNA, 25 bp, probe
gatataaacctgtttggttcagcaa

SEQ ID NO: 231607 - DNA, 25 bp, probe
gattagacccttgatgctattcaca

SEQ ID NO: 231608 - DNA, 25 bp, probe
gattagacccttgatgctattcaca

SEQ ID NO: 231609 - DNA, 25 bp, probe
gattagtcacagatgtattttgatg

SEQ ID NO: 231610 - DNA, 25 bp, probe
gttcgctcataaagaagtttttggg

SEQ ID NO: 231611 - DNA, 25 bp, probe
gttagctcttaatggttttattgtt

SEQ ID NO: 231612 - DNA, 25 bp, probe
gattagtctatgaaaggttctctta

SEQ ID NO: 231613 - DNA, 25 bp, probe
gattagtctatgaaaggttctctta

SEQ ID NO: 231614 - DNA, 25 bp, probe
gattcagcgtgtgaatggctctctg

SEQ ID NO: 231615 - DNA, 25 bp, probe
gatatcagttgtttgacgtgcaatg

SEQ ID NO: 231616 - DNA, 25 bp, probe
gatatcagaggtcagactgagctga

SEQ ID NO: 231617 - DNA, 25 bp, probe
gattcggaggaacctgagtgcctca

SEQ ID NO: 231618 - DNA, 25 bp, probe
gattcggaggaacctgagtgcctca

SEQ ID NO: 231619 - DNA, 25 bp, probe
gatttggagaggtttgcgcctgtca

SEQ ID NO: 231620 - DNA, 25 bp, probe
gattctggaagctgagctccacttc

SEQ ID NO: 231621 - DNA, 25 bp, probe
gatttggcaaaatgcatcacctttg

SEQ ID NO: 231622 - DNA, 25 bp, probe
gatttgtgagtatagccacctgtgc

SEQ ID NO: 231623 - DNA, 25 bp, probe
gatatcgtgaaatcctcagccgaga

SEQ ID NO: 231624 - DNA, 25 bp, probe
gatatcgacacatttcccttcgaaa

SEQ ID NO: 231625 - DNA, 25 bp, probe
gatttgtacatatgccctaggaaaa

SEQ ID NO: 231626 - DNA, 25 bp, probe
gattttattgactgcgtcagggaag

SEQ ID NO: 231627 - DNA, 25 bp, probe
gattgttttaactgtctgcctatag

SEQ ID NO: 231628 - DNA, 25 bp, probe
gattgttttaactgtctgcctatag

SEQ ID NO: 231629 - DNA, 25 bp, probe
gattgtgttttattcgtgtcccata

SEQ ID NO: 231630 - DNA, 25 bp, probe
gattggtttctaggcagttcaaagc

SEQ ID NO: 231631 - DNA, 25 bp, probe
gatttgtcttctgccttgtgaaaga

SEQ ID NO: 231632 - DNA, 25 bp, probe
gatatctgtgatgtgcattttggaa

SEQ ID NO: 231633 - DNA, 25 bp, probe
gatatctgtgatgtgcattttggaa

SEQ ID NO: 231634 - DNA, 25 bp, probe
gatttgtgagcatgctttaagatga

SEQ ID NO: 231635 - DNA, 25 bp, probe
gatattgctgccagatcaataagaa

SEQ ID NO: 231636 - DNA, 25 bp, probe
gatatcatgctggttaagcttcaaa

SEQ ID NO: 231637 - DNA, 25 bp, probe
gatttgtgttttccatagcaaatat

SEQ ID NO: 231638 - DNA, 25 bp, probe
gattaggttgggcccagccagataa

SEQ ID NO: 231639 - DNA, 25 bp, probe
gattagtgctcggggtcaccatgat

SEQ ID NO: 231640 - DNA, 25 bp, probe
gattcagttctgtggtgcatctgag

SEQ ID NO: 231641 - DNA, 25 bp, probe
gattcagtcttgacggtgaatggaa

SEQ ID NO: 231642 - DNA, 25 bp, probe
gattctggttacagtgccataaacc

SEQ ID NO: 231643 - DNA, 25 bp, probe
gatttgctgctttagttgtaataat

SEQ ID NO: 231644 - DNA, 25 bp, probe
gatttctgacatcatctatctaaaa

SEQ ID NO: 231645 - DNA, 25 bp, probe
gattttccaactccatctgtaatcc

SEQ ID NO: 231646 - DNA, 25 bp, probe
gttgtgtccaacgattcggactcgg

SEQ ID NO: 231647 - DNA, 25 bp, probe
gatttgtgacactgcattgctgggc

SEQ ID NO: 231648 - DNA, 25 bp, probe
gattctaatatttcattctgtggca

SEQ ID NO: 231649 - DNA, 25 bp, probe
gatataggaatgaactgtctgtgaa

SEQ ID NO: 231650 - DNA, 25 bp, probe
gatattgccttatttgtctgtaaaa

SEQ ID NO: 231651 - DNA, 25 bp, probe
gatattgccttatttgtctgtaaaa

SEQ ID NO: 231652 - DNA, 25 bp, probe
gatataccaaaaagtcttataatag

SEQ ID NO: 231653 - DNA, 25 bp, probe
gattaaactgtatgtcttataagaa

SEQ ID NO: 231654 - DNA, 25 bp, probe
gattaaactgtatgtcttataagaa

SEQ ID NO: 231655 - DNA, 25 bp, probe
gatataacactttccagcctatagc

SEQ ID NO: 231656 - DNA, 25 bp, probe
gttaaccggcactacgccaagatca

SEQ ID NO: 231657 - DNA, 25 bp, probe
gattacctcggataccacaagtgct

SEQ ID NO: 231658 - DNA, 25 bp, probe
gattacctcggataccacaagtgct

SEQ ID NO: 231659 - DNA, 25 bp, probe
gattacctcggataccacaagtgct

SEQ ID NO: 231660 - DNA, 25 bp, probe
gatttgcttgggatacagaagaggc

SEQ ID NO: 231661 - DNA, 25 bp, probe
gatttggcctggatacagtagaggt

SEQ ID NO: 231662 - DNA, 25 bp, probe
gatttgattctggttacagtgccat

SEQ ID NO: 231663 - DNA, 25 bp, probe
gatttgaggcctgacagcagtccac

SEQ ID NO: 231664 - DNA, 25 bp, probe
gatttatgacctgttcagaaagcgc

SEQ ID NO: 231665 - DNA, 25 bp, probe
gattttacctgggatatgacaagca

SEQ ID NO: 231666 - DNA, 25 bp, probe
gatttcttccagggaatgccagcaa

SEQ ID NO: 231667 - DNA, 25 bp, probe
gattacttgcacgggactggacatg

SEQ ID NO: 231668 - DNA, 25 bp, probe
gattacttcctacaggagcacggca

SEQ ID NO: 231669 - DNA, 25 bp, probe
gatttcttccattataagacaggga

SEQ ID NO: 231670 - DNA, 25 bp, probe
gattatttgcttatatctgaaggga

SEQ ID NO: 231671 - DNA, 25 bp, probe
gattttgtattaatcctaatgctgg

SEQ ID NO: 231672 - DNA, 25 bp, probe
gatttgtttatattttacatctctg

SEQ ID NO: 231673 - DNA, 25 bp, probe
gatttgcccttgattctattttgct

SEQ ID NO: 231674 - DNA, 25 bp, probe
gatatatggcctattcgttgccttt

SEQ ID NO: 231675 - DNA, 25 bp, probe
gattaggtctctgttgactggctgt

SEQ ID NO: 231676 - DNA, 25 bp, probe
gatttgcctcttctaagtgtctatg

SEQ ID NO: 231677 - DNA, 25 bp, probe
gattgccggcttcgtgaaggagttc

SEQ ID NO: 231678 - DNA, 25 bp, probe
gattgggggtggcccaggggatgct

SEQ ID NO: 231679 - DNA, 25 bp, probe
gattgggggtggcccaggggatgct

SEQ ID NO: 231680 - DNA, 25 bp, probe
gttggaagcagtcaccaagataatc

SEQ ID NO: 231681 - DNA, 25 bp, probe
gttggaagggaccccagatacctgt

SEQ ID NO: 231682 - DNA, 25 bp, probe
gttgagaagggccgagtaaagtgtg

SEQ ID NO: 231683 - DNA, 25 bp, probe
gttggaagtacagtttcaaggatga

SEQ ID NO: 231684 - DNA, 25 bp, probe
gattaaactccattgttcagggtaa

SEQ ID NO: 231685 - DNA, 25 bp, probe
gatttaaaccattctgatgcaagga

SEQ ID NO: 231686 - DNA, 25 bp, probe
gattatagtaccactgcacatcatg

SEQ ID NO: 231687 - DNA, 25 bp, probe
gatttattacttcccaatatttcta

SEQ ID NO: 231688 - DNA, 25 bp, probe
gattttaactttcaatgtccatctt

SEQ ID NO: 231689 - DNA, 25 bp, probe
gattttaactttcaatgtccatctt

SEQ ID NO: 231690 - DNA, 25 bp, probe
gattttcagagctttgggcactccc

SEQ ID NO: 231691 - DNA, 25 bp, probe
gattttcagagctttgggcactccc

SEQ ID NO: 231692 - DNA, 25 bp, probe
gattttcagagctttgggcactccc

SEQ ID NO: 231693 - DNA, 25 bp, probe
gatttgcacactgatttggcccagc

SEQ ID NO: 231694 - DNA, 25 bp, probe
gattcttatcatggttcgggcgagc

SEQ ID NO: 231695 - DNA, 25 bp, probe
gatatttacagctttggtgtggttt

SEQ ID NO: 231696 - DNA, 25 bp, probe
gatatttacagctttggtgtggttt

SEQ ID NO: 231697 - DNA, 25 bp, probe
gatatttcggaattggttttactgt

SEQ ID NO: 231698 - DNA, 25 bp, probe
gatttttggcactttgttttcaaga

SEQ ID NO: 231699 - DNA, 25 bp, probe
gatttttggcactttgttttcaaga

SEQ ID NO: 231700 - DNA, 25 bp, probe
gattaagggagctgctgtttaggtg

SEQ ID NO: 231701 - DNA, 25 bp, probe
gatttctgaggttgggattaaggta

SEQ ID NO: 231702 - DNA, 25 bp, probe
gatttctgaggttgggattaaggta

SEQ ID NO: 231703 - DNA, 25 bp, probe
gatattcagggtttggattagcagt

SEQ ID NO: 231704 - DNA, 25 bp, probe
gatattcagggtttggattagcagt

SEQ ID NO: 231705 - DNA, 25 bp, probe
gatttcctgtgtggggttcagcgta

SEQ ID NO: 231706 - DNA, 25 bp, probe
gattccactcttcggagttgcagtt

SEQ ID NO: 231707 - DNA, 25 bp, probe
gattctgcagccacaaagttgagac

SEQ ID NO: 231708 - DNA, 25 bp, probe
gattctgcacctcaaaggggatccc

SEQ ID NO: 231709 - DNA, 25 bp, probe
gattctgcacctcaaaggggatccc

SEQ ID NO: 231710 - DNA, 25 bp, probe
gattatgcacttcccaattgggatt

SEQ ID NO: 231711 - DNA, 25 bp, probe
gattagatgttttccttgggattta

SEQ ID NO: 231712 - DNA, 25 bp, probe
gattgagcatttagtcacatttggt

SEQ ID NO: 231713 - DNA, 25 bp, probe
gattggatttggagttggtagtagg

SEQ ID NO: 231714 - DNA, 25 bp, probe
gttggacttggtgtcagtgggaaag

SEQ ID NO: 231715 - DNA, 25 bp, probe
gttgggcttgttgattgtgggattg

SEQ ID NO: 231716 - DNA, 25 bp, probe
gattcaggtatgttgcctttatggt

SEQ ID NO: 231717 - DNA, 25 bp, probe
gattgctggtcttaactttaggtaa

SEQ ID NO: 231718 - DNA, 25 bp, probe
gattgctggtcttaactttaggtaa

SEQ ID NO: 231719 - DNA, 25 bp, probe
gatttggtgccatggtctataatgt

SEQ ID NO: 231720 - DNA, 25 bp, probe
gatttggatccagtggttgttacat

SEQ ID NO: 231721 - DNA, 25 bp, probe
gatttcgaccaggttcgttcactca

SEQ ID NO: 231722 - DNA, 25 bp, probe
gatattctgcatcagtttgcagttc

SEQ ID NO: 231723 - DNA, 25 bp, probe
gatttgatgcattcagattctcgtg

SEQ ID NO: 231724 - DNA, 25 bp, probe
gatttgatgcattcagattctcgtg

SEQ ID NO: 231725 - DNA, 25 bp, probe
gatttggatacactctctagcttta

SEQ ID NO: 231726 - DNA, 25 bp, probe
gatttggaatctctccatctgtaat

SEQ ID NO: 231727 - DNA, 25 bp, probe
gattagtgaatccagatcaactgtt

SEQ ID NO: 231728 - DNA, 25 bp, probe
gatttgtgactttgtcaatcagtgc

SEQ ID NO: 231729 - DNA, 25 bp, probe
gatttcgagctggcttcaagagagc

SEQ ID NO: 231730 - DNA, 25 bp, probe
gatattcgaagcttacaacatggca

SEQ ID NO: 231731 - DNA, 25 bp, probe
gattcatcgaacttaatagtaccct

SEQ ID NO: 231732 - DNA, 25 bp, probe
gattatgccaagctgataactactg

SEQ ID NO: 231733 - DNA, 25 bp, probe
gatttcataaggaaaaccactgttt

SEQ ID NO: 231734 - DNA, 25 bp, probe
gatttcataaggaaaaccactgttt

SEQ ID NO: 231735 - DNA, 25 bp, probe
gatttgcatgacagcatccaactcc

SEQ ID NO: 231736 - DNA, 25 bp, probe
gatttgcatacattcttcaagatcc

SEQ ID NO: 231737 - DNA, 25 bp, probe
gatttgctgaactttctcagtcctg

SEQ ID NO: 231738 - DNA, 25 bp, probe
gattccaagtgcttatccaactctg

SEQ ID NO: 231739 - DNA, 25 bp, probe
gattccaagtgcttatccaactctg

SEQ ID NO: 231740 - DNA, 25 bp, probe
gattccagagatctagacctctctg

SEQ ID NO: 231741 - DNA, 25 bp, probe
gattcataatgacttaagcacactt

SEQ ID NO: 231742 - DNA, 25 bp, probe
gattcataatgacttaagcacactt

SEQ ID NO: 231743 - DNA, 25 bp, probe
gattattaatgcttcaagtcactaa

SEQ ID NO: 231744 - DNA, 25 bp, probe
gattattaatgcttcaagtcactaa

SEQ ID NO: 231745 - DNA, 25 bp, probe
gattgacttgagactaactagcaaa

SEQ ID NO: 231746 - DNA, 25 bp, probe
gattaatccagaataactagcacca

SEQ ID NO: 231747 - DNA, 25 bp, probe
gattaccccatatacatgtgactaa

SEQ ID NO: 231748 - DNA, 25 bp, probe
gattaccccatatacatgtgactaa

SEQ ID NO: 231749 - DNA, 25 bp, probe
gattcaccaaattagccattccatt

SEQ ID NO: 231750 - DNA, 25 bp, probe
gattccgaaacataatatcaatttt

SEQ ID NO: 231751 - DNA, 25 bp, probe
gattcgtagaggaacaatttagttt

SEQ ID NO: 231752 - DNA, 25 bp, probe
gatttgtcaagtttcatcttttttt

SEQ ID NO: 231753 - DNA, 25 bp, probe
gatttgtgctggattcctgattgcc

SEQ ID NO: 231754 - DNA, 25 bp, probe
gattattctcacatacctgaggcag

SEQ ID NO: 231755 - DNA, 25 bp, probe
gattgagtcaccctgacgatgaccg

SEQ ID NO: 231756 - DNA, 25 bp, probe
gattgagtcaccctgacgatgaccg

SEQ ID NO: 231757 - DNA, 25 bp, probe
gattattcacaccgatagcaacacc

SEQ ID NO: 231758 - DNA, 25 bp, probe
gattttgccatgaagttcaatgcac

SEQ ID NO: 231759 - DNA, 25 bp, probe
gattttgccatgaagttcaatgcac

SEQ ID NO: 231760 - DNA, 25 bp, probe
gatttgtccatcaacttcaggaata

SEQ ID NO: 231761 - DNA, 25 bp, probe
gattggctccaggccattaaaatgg

SEQ ID NO: 231762 - DNA, 25 bp, probe
gattttctaccctagcaaggatggt

SEQ ID NO: 231763 - DNA, 25 bp, probe
gattttggaaccatgcaagtggcga

SEQ ID NO: 231764 - DNA, 25 bp, probe
gatttcaggcgaaaagaatctgggg

SEQ ID NO: 231765 - DNA, 25 bp, probe
gatttcaggcgaaaagaatctgggg

SEQ ID NO: 231766 - DNA, 25 bp, probe
gattggcaccaggggtatttggagg

SEQ ID NO: 231767 - DNA, 25 bp, probe
gatttgagccagggaaacctccagg

SEQ ID NO: 231768 - DNA, 25 bp, probe
gattgtgaccctggcagaacaaccc

SEQ ID NO: 231769 - DNA, 25 bp, probe
gattggagttcaagagacacttcct

SEQ ID NO: 231770 - DNA, 25 bp, probe
gatttggtgcgctgcatgagactac

SEQ ID NO: 231771 - DNA, 25 bp, probe
gatttagtgccactgaagcctgcgt

SEQ ID NO: 231772 - DNA, 25 bp, probe
gatttagtgccactgaagcctgcgt

SEQ ID NO: 231773 - DNA, 25 bp, probe
gatttcaggccaagaacatctctgt

SEQ ID NO: 231774 - DNA, 25 bp, probe
gattctagaagctgaacttgctgtt

SEQ ID NO: 231775 - DNA, 25 bp, probe
gattctaaatgacaatcttttgaat

SEQ ID NO: 231776 - DNA, 25 bp, probe
gattctaggtaaaaatctattgata

SEQ ID NO: 231777 - DNA, 25 bp, probe
gattaatgtgtatttactgtactaa

SEQ ID NO: 231778 - DNA, 25 bp, probe
gattatctactaattatcctcttaa

SEQ ID NO: 231779 - DNA, 25 bp, probe
gatttccctagtaaccttgcagata

SEQ ID NO: 231780 - DNA, 25 bp, probe
gatttccatctaaatagtttcaata

SEQ ID NO: 231781 - DNA, 25 bp, probe
gatttggaaagtaatgtctattcta

SEQ ID NO: 231782 - DNA, 25 bp, probe
gatttggaaagtaatgtctattcta

SEQ ID NO: 231783 - DNA, 25 bp, probe
gatttcatcgaaattatttattcat

SEQ ID NO: 231784 - DNA, 25 bp, probe
gattttccagtcttattgtattaac

SEQ ID NO: 231785 - DNA, 25 bp, probe
gattttggcatcttgtttttctaac

SEQ ID NO: 231786 - DNA, 25 bp, probe
gattttggcatcttgtttttctaac

SEQ ID NO: 231787 - DNA, 25 bp, probe
gattttggcatcttgtttttctaac

SEQ ID NO: 231788 - DNA, 25 bp, probe
gatttgctgggcagtttttctgtat

SEQ ID NO: 231789 - DNA, 25 bp, probe
gatttgctgggcagtttttctgtat

SEQ ID NO: 231790 - DNA, 25 bp, probe
gatttgtagtaccctttcttattat

SEQ ID NO: 231791 - DNA, 25 bp, probe
gatttgtagctctaggtttcttgat

SEQ ID NO: 231792 - DNA, 25 bp, probe
gatttgtagctctaggtttcttgat

SEQ ID NO: 231793 - DNA, 25 bp, probe
gattttatctctttctgtatctata

SEQ ID NO: 231794 - DNA, 25 bp, probe
gattcttgtgtcatcaagtagtagt

SEQ ID NO: 231795 - DNA, 25 bp, probe
gattcttgtgtcatcaagtagtagt

SEQ ID NO: 231796 - DNA, 25 bp, probe
gattctggctggctcaaaggtagtg

SEQ ID NO: 231797 - DNA, 25 bp, probe
gatttcctggattctactggggtgc

SEQ ID NO: 231798 - DNA, 25 bp, probe
gatttcctggattctactggggtgc

SEQ ID NO: 231799 - DNA, 25 bp, probe
gatttccccatcgagactgtggtgt

SEQ ID NO: 231800 - DNA, 25 bp, probe
gattttcctctccaattgggttgtg

SEQ ID NO: 231801 - DNA, 25 bp, probe
gattccctcgtcaatttgggttgtg

SEQ ID NO: 231802 - DNA, 25 bp, probe
gattcagttccacacggggtttgtg

SEQ ID NO: 231803 - DNA, 25 bp, probe
ggattgtttgaggccgggagttcgg

SEQ ID NO: 231804 - DNA, 25 bp, probe
gggtttggagcctggggtattgtca

SEQ ID NO: 231805 - DNA, 25 bp, probe
gttggttatcagtggtgggttttca

SEQ ID NO: 231806 - DNA, 25 bp, probe
gttggttatattctggggcttggag

SEQ ID NO: 231807 - DNA, 25 bp, probe
gattttttcattctcgtgacattag

SEQ ID NO: 231808 - DNA, 25 bp, probe
gatttcattgtcaagtatcgtggtg

SEQ ID NO: 231809 - DNA, 25 bp, probe
gatttctatgttatgccggtggtta

SEQ ID NO: 231810 - DNA, 25 bp, probe
gattttatttggaaaggtggctgga

SEQ ID NO: 231811 - DNA, 25 bp, probe
gattttatggagcattttttgtaga

SEQ ID NO: 231812 - DNA, 25 bp, probe
gattttattcttttttttgagacag

SEQ ID NO: 231813 - DNA, 25 bp, probe
gattttcaccgattctactttgaaa

SEQ ID NO: 231814 - DNA, 25 bp, probe
gatttgtccaactaatttttggcaa

SEQ ID NO: 231815 - DNA, 25 bp, probe
gattctctggcagaaacattttggg

SEQ ID NO: 231816 - DNA, 25 bp, probe
gattccggggagaagatttccctgg

SEQ ID NO: 231817 - DNA, 25 bp, probe
gattcctgggggacagaagcctccc

SEQ ID NO: 231818 - DNA, 25 bp, probe
gattttgggtggtcagtacatgctc

SEQ ID NO: 231819 - DNA, 25 bp, probe
gattttctcttttgcagtttgctgc

SEQ ID NO: 231820 - DNA, 25 bp, probe
gatttagctcattacatgcagtctt

SEQ ID NO: 231821 - DNA, 25 bp, probe
gattttgctgcatgtgcaggtcctc

SEQ ID NO: 231822 - DNA, 25 bp, probe
gattttggcatgagcagggatatct

SEQ ID NO: 231823 - DNA, 25 bp, probe
gatttcttgagcatgaatggcatgt

SEQ ID NO: 231824 - DNA, 25 bp, probe
gatttctattttcttgcatgctggc

SEQ ID NO: 231825 - DNA, 25 bp, probe
gattatcttctatatcttcaggcgc

SEQ ID NO: 231826 - DNA, 25 bp, probe
gatttcttcattctgctgagcaagt

SEQ ID NO: 231827 - DNA, 25 bp, probe
gattttttggctggtgagagtgtgg

SEQ ID NO: 231828 - DNA, 25 bp, probe
gatttcttggtgggtgtgactgtga

SEQ ID NO: 231829 - DNA, 25 bp, probe
gatttcttcgctggaattgcctatg

SEQ ID NO: 231830 - DNA, 25 bp, probe
gattacgcttcagagataccaatgg

SEQ ID NO: 231831 - DNA, 25 bp, probe
gattacgcaacagtaaatccttaca

SEQ ID NO: 231832 - DNA, 25 bp, probe
gattactacaaccacaacctggaca

SEQ ID NO: 231833 - DNA, 25 bp, probe
gattaccctgactcataccaggaca

SEQ ID NO: 231834 - DNA, 25 bp, probe
gattaccgacagtgactaagggcag

SEQ ID NO: 231835 - DNA, 25 bp, probe
gattgcccgtaggttaagaggtcag

SEQ ID NO: 231836 - DNA, 25 bp, probe
gattgtcccgaggtcaagaggtgta

SEQ ID NO: 231837 - DNA, 25 bp, probe
gatttccctatgattcatggggaac

SEQ ID NO: 231838 - DNA, 25 bp, probe
gatttccctatgattcatggggaac

SEQ ID NO: 231839 - DNA, 25 bp, probe
gatttccctatgattcatggggaac

SEQ ID NO: 231840 - DNA, 25 bp, probe
gatttcagttataaccgggaagact

SEQ ID NO: 231841 - DNA, 25 bp, probe
gattctctgtacgcccagggaaagc

SEQ ID NO: 231842 - DNA, 25 bp, probe
gattcatcctactcactggggaaga

SEQ ID NO: 231843 - DNA, 25 bp, probe
gattcatccctaagcactgtaggaa

SEQ ID NO: 231844 - DNA, 25 bp, probe
gattcacacagaaggtgctgttgta

SEQ ID NO: 231845 - DNA, 25 bp, probe
gattcacacagaaggtgctgttgta

SEQ ID NO: 231846 - DNA, 25 bp, probe
gattgatccatgtctgtttgtagga

SEQ ID NO: 231847 - DNA, 25 bp, probe
gatttccagctccttgtgtatatga

SEQ ID NO: 231848 - DNA, 25 bp, probe
gattatctcgtggatagttcatggt

SEQ ID NO: 231849 - DNA, 25 bp, probe
gattaacagtgttcagttcatagca

SEQ ID NO: 231850 - DNA, 25 bp, probe
gatttcactgacaactttaagatat

SEQ ID NO: 231851 - DNA, 25 bp, probe
gattatttgaatttgttttgctact

SEQ ID NO: 231852 - DNA, 25 bp, probe
gttgcttggaagtggttttagtgag

SEQ ID NO: 231853 - DNA, 25 bp, probe
gttgcttggaagtggttttagtgag

SEQ ID NO: 231854 - DNA, 25 bp, probe
gattattggctcaggttcttttggg

SEQ ID NO: 231855 - DNA, 25 bp, probe
gttatccctgcaggagtccttagtg

SEQ ID NO: 231856 - DNA, 25 bp, probe
gatttcccatgagatttgcttactt

SEQ ID NO: 231857 - DNA, 25 bp, probe
gatttcccatgagatttgcttactt

SEQ ID NO: 231858 - DNA, 25 bp, probe
gattatacaatctctttattactga

SEQ ID NO: 231859 - DNA, 25 bp, probe
gatttatcaatcccgttttgacatg

SEQ ID NO: 231860 - DNA, 25 bp, probe
gatttcatgcagaaccagttgatgt

SEQ ID NO: 231861 - DNA, 25 bp, probe
gattttcagccgccatgctgtgatt

SEQ ID NO: 231862 - DNA, 25 bp, probe
gatttcatcatccgagcattgtctg

SEQ ID NO: 231863 - DNA, 25 bp, probe
gatttcatcactgcagcgtggctga

SEQ ID NO: 231864 - DNA, 25 bp, probe
gattcttccatcctgccggatgagt

SEQ ID NO: 231865 - DNA, 25 bp, probe
gattctctctccatttggaattaca

SEQ ID NO: 231866 - DNA, 25 bp, probe
gattcttgtaagtttgagttccaca

SEQ ID NO: 231867 - DNA, 25 bp, probe
gattcttgtaagtttgagttccaca

SEQ ID NO: 231868 - DNA, 25 bp, probe
gattatgtgtacagttggttcatcc

SEQ ID NO: 231869 - DNA, 25 bp, probe
gattggtggtcctttggagttctgc

SEQ ID NO: 231870 - DNA, 25 bp, probe
gttgagtggtttgggatgtgttcgc

SEQ ID NO: 231871 - DNA, 25 bp, probe
gattgagtctgtttagtagtttcca

SEQ ID NO: 231872 - DNA, 25 bp, probe
gattttcttctgtagaatgtttgac

SEQ ID NO: 231873 - DNA, 25 bp, probe
gatttctctgggcaaattgtcgcct

SEQ ID NO: 231874 - DNA, 25 bp, probe
gattcttctggacaaaagtcacata

SEQ ID NO: 231875 - DNA, 25 bp, probe
gattgcccttgtcaactcagtcaac

SEQ ID NO: 231876 - DNA, 25 bp, probe
gattaccatttattacatcgttcat

SEQ ID NO: 231877 - DNA, 25 bp, probe
gattactttgtattgtactgccatt

SEQ ID NO: 231878 - DNA, 25 bp, probe
gatttcttgcttttttcagtcattt

SEQ ID NO: 231879 - DNA, 25 bp, probe
gatttctttgttcctgtagacttat

SEQ ID NO: 231880 - DNA, 25 bp, probe
gatttttcctctgcgtagagccatc

SEQ ID NO: 231881 - DNA, 25 bp, probe
gattattcccctggagctaagctca

SEQ ID NO: 231882 - DNA, 25 bp, probe
gattatttctccttggatacagata

SEQ ID NO: 231883 - DNA, 25 bp, probe
gattttacctgcatggcacctatct

SEQ ID NO: 231884 - DNA, 25 bp, probe
gattatctacaccgtgggccatagc

SEQ ID NO: 231885 - DNA, 25 bp, probe
gattatctacaccgtgggccatagc

SEQ ID NO: 231886 - DNA, 25 bp, probe
gattgaaacccagggtcgtcacgct

SEQ ID NO: 231887 - DNA, 25 bp, probe
gattcaaaccaaagctgcctgtgcc

SEQ ID NO: 231888 - DNA, 25 bp, probe
gatttcaataaaactgcctggctgg

SEQ ID NO: 231889 - DNA, 25 bp, probe
gatttaaccaagaagacggctgcgg

SEQ ID NO: 231890 - DNA, 25 bp, probe
gatttaccataagggactgtgccag

SEQ ID NO: 231891 - DNA, 25 bp, probe
gttttcccaaagcagtgtccaggat

SEQ ID NO: 231892 - DNA, 25 bp, probe
gttgtgtcccaagaggtgttgaggt

SEQ ID NO: 231893 - DNA, 25 bp, probe
gttggcttggggtggccaatgggct

SEQ ID NO: 231894 - DNA, 25 bp, probe
gttggtggtggatgtacgccaggcc

SEQ ID NO: 231895 - DNA, 25 bp, probe
gttggtggtggatgtacgccaggcc

SEQ ID NO: 231896 - DNA, 25 bp, probe
tcttggtacttgggaccccagtgcc

SEQ ID NO: 231897 - DNA, 25 bp, probe
gttgcgaactggtgacctgtaggcc

SEQ ID NO: 231898 - DNA, 25 bp, probe
gttgactggctgtgtgaccttaggc

SEQ ID NO: 231899 - DNA, 25 bp, probe
gattatttgctgccgtggtttcagg

SEQ ID NO: 231900 - DNA, 25 bp, probe
gattctttctcagaggtttgtggtt

SEQ ID NO: 231901 - DNA, 25 bp, probe
gatttctgtcttgtttgtttttttg

SEQ ID NO: 231902 - DNA, 25 bp, probe
gatttctttagtgcttgcttttctg

SEQ ID NO: 231903 - DNA, 25 bp, probe
gattagctttgaggcctgtcttacc

SEQ ID NO: 231904 - DNA, 25 bp, probe
gattaccttgaggttgtgttcaaca

SEQ ID NO: 231905 - DNA, 25 bp, probe
gattacactgatcttatgtgttaca

SEQ ID NO: 231906 - DNA, 25 bp, probe
gatttcactaccttttgttcagttg

SEQ ID NO: 231907 - DNA, 25 bp, probe
gatttactcctggttagtacattct

SEQ ID NO: 231908 - DNA, 25 bp, probe
gatttactcctggttagtacattct

SEQ ID NO: 231909 - DNA, 25 bp, probe
gatttaacactgacttagcatatag

SEQ ID NO: 231910 - DNA, 25 bp, probe
gatttcaacctaatgaccataagac

SEQ ID NO: 231911 - DNA, 25 bp, probe
gattctcaaaccagaggctaagatg

SEQ ID NO: 231912 - DNA, 25 bp, probe
gattgccaaacagaggttcagaatc

SEQ ID NO: 231913 - DNA, 25 bp, probe
gattaaatactcatgtgttcagaaa

SEQ ID NO: 231914 - DNA, 25 bp, probe
gattaaaagccactgttacatttca

SEQ ID NO: 231915 - DNA, 25 bp, probe
gattgccaaaaatgctgctaattta

SEQ ID NO: 231916 - DNA, 25 bp, probe
gattccgaagacactgtatttgaag

SEQ ID NO: 231917 - DNA, 25 bp, probe
gattccgaagacactgtatttgaag

SEQ ID NO: 231918 - DNA, 25 bp, probe
gattactgaatagttgtgtcatgtt

SEQ ID NO: 231919 - DNA, 25 bp, probe
gattactgaatagttgtgtcatgtt

SEQ ID NO: 231920 - DNA, 25 bp, probe
gattcactgtcttttgattcttgat

SEQ ID NO: 231921 - DNA, 25 bp, probe
gatttatgtctgagtgacttggata

SEQ ID NO: 231922 - DNA, 25 bp, probe
gatttcaggctgagtgtggtggctc

SEQ ID NO: 231923 - DNA, 25 bp, probe
gattatcagtgtgctggtgcttgtt

SEQ ID NO: 231924 - DNA, 25 bp, probe
gatttatttcctgggttcatagacc

SEQ ID NO: 231925 - DNA, 25 bp, probe
gattttatctctgcgtttcagtgac

SEQ ID NO: 231926 - DNA, 25 bp, probe
gattgtattttggtttatagtgacg

SEQ ID NO: 231927 - DNA, 25 bp, probe
gatttactctctattattgggcata

SEQ ID NO: 231928 - DNA, 25 bp, probe
gattttctgttattcttcataccta

SEQ ID NO: 231929 - DNA, 25 bp, probe
gatttttatgtattttgtgactttg

SEQ ID NO: 231930 - DNA, 25 bp, probe
gattttatttatttttactctctgg

SEQ ID NO: 231931 - DNA, 25 bp, probe
gatttatatttttgagttccgtgat

SEQ ID NO: 231932 - DNA, 25 bp, probe
gattcataatttcagtttactagac

SEQ ID NO: 231933 - DNA, 25 bp, probe
gattaaagttgcaagttctggggac

SEQ ID NO: 231934 - DNA, 25 bp, probe
gattcaaccttgtgtactgggtagt

SEQ ID NO: 231935 - DNA, 25 bp, probe
gattcaaccttgtgtactgggtagt

SEQ ID NO: 231936 - DNA, 25 bp, probe
gttgtccttctgtgtgactggggaa

SEQ ID NO: 231937 - DNA, 25 bp, probe
gttgtccttctgtgtgactggggaa

SEQ ID NO: 231938 - DNA, 25 bp, probe
gttgggcttttaatcctgtgtgtga

SEQ ID NO: 231939 - DNA, 25 bp, probe
gattacctttggatccatttgtcaa

SEQ ID NO: 231940 - DNA, 25 bp, probe
gatttttttgatatcctttgtggaa

SEQ ID NO: 231941 - DNA, 25 bp, probe
gattttatgattccttgccttattc

SEQ ID NO: 231942 - DNA, 25 bp, probe
gattttgaagggttctcgtatgtca

SEQ ID NO: 231943 - DNA, 25 bp, probe
gatttcactaggcatttggcaattc

SEQ ID NO: 231944 - DNA, 25 bp, probe
gatttcactggagcctgctgggaac

SEQ ID NO: 231945 - DNA, 25 bp, probe
gatttattggcagcccacgaacacc

SEQ ID NO: 231946 - DNA, 25 bp, probe
gattatattgtctcaacatggtcca

SEQ ID NO: 231947 - DNA, 25 bp, probe
gatttacttctttatcaagcatcca

SEQ ID NO: 231948 - DNA, 25 bp, probe
gatttacatttttggagcatgcact

SEQ ID NO: 231949 - DNA, 25 bp, probe
gattttgctgtagaagatggcactt

SEQ ID NO: 231950 - DNA, 25 bp, probe
gattcttcttacagagagtatccaa

SEQ ID NO: 231951 - DNA, 25 bp, probe
gattcctataacatgctttcatccc

SEQ ID NO: 231952 - DNA, 25 bp, probe
gattacaaaagcaattttcatttac

SEQ ID NO: 231953 - DNA, 25 bp, probe
gattacagtgggggcatttctttat

SEQ ID NO: 231954 - DNA, 25 bp, probe
gattaatgtcaggaccatttctctt

SEQ ID NO: 231955 - DNA, 25 bp, probe
gattatctggaggtctcatttcttg

SEQ ID NO: 231956 - DNA, 25 bp, probe
gattctcagagtgattcattgtgta

SEQ ID NO: 231957 - DNA, 25 bp, probe
gattttgtgcctgtgcagattgcaa

SEQ ID NO: 231958 - DNA, 25 bp, probe
gattcttgtagctactatattccag

SEQ ID NO: 231959 - DNA, 25 bp, probe
gattcttgtagctactatattccag

SEQ ID NO: 231960 - DNA, 25 bp, probe
gattatggggattcaaattctagta

SEQ ID NO: 231961 - DNA, 25 bp, probe
gattatggggtctcctgaataaata

SEQ ID NO: 231962 - DNA, 25 bp, probe
gattatgtggtttcacctcaaatca

SEQ ID NO: 231963 - DNA, 25 bp, probe
gattttggatgttcagtaaagctca

SEQ ID NO: 231964 - DNA, 25 bp, probe
gattttggatgttcagtaaagctca

SEQ ID NO: 231965 - DNA, 25 bp, probe
gattcttcgaaatctcaaagatcat

SEQ ID NO: 231966 - DNA, 25 bp, probe
gattttgctaaatctgggagtcatt

SEQ ID NO: 231967 - DNA, 25 bp, probe
gattttgctaaatctgggagtcatt

SEQ ID NO: 231968 - DNA, 25 bp, probe
gattttggagcaaaggcggaacaat

SEQ ID NO: 231969 - DNA, 25 bp, probe
gattttggaattcgtgcaggaagcc

SEQ ID NO: 231970 - DNA, 25 bp, probe
gattttggaattcgtgcaggaagcc

SEQ ID NO: 231971 - DNA, 25 bp, probe
gattattgatattctgtggagtgat

SEQ ID NO: 231972 - DNA, 25 bp, probe
gattacatgtatctgaggcagctat

SEQ ID NO: 231973 - DNA, 25 bp, probe
gattccatgttcttgggcaacagtc

SEQ ID NO: 231974 - DNA, 25 bp, probe
gattaagttcatccctgcaaggatc

SEQ ID NO: 231975 - DNA, 25 bp, probe
gattacacctcatccatcgatgttt

SEQ ID NO: 231976 - DNA, 25 bp, probe
gattcacatgctaaagccaggattg

SEQ ID NO: 231977 - DNA, 25 bp, probe
gattcagctgaaccaccaggaacct

SEQ ID NO: 231978 - DNA, 25 bp, probe
gattccatgaaggcagcactgagga

SEQ ID NO: 231979 - DNA, 25 bp, probe
gattatctgcactcagagcgcaaga

SEQ ID NO: 231980 - DNA, 25 bp, probe
gattcatgtctctcagagcactgca

SEQ ID NO: 231981 - DNA, 25 bp, probe
gattctgttaccttgactgggggtg

SEQ ID NO: 231982 - DNA, 25 bp, probe
gttggcttgaccagtcacgttggga

SEQ ID NO: 231983 - DNA, 25 bp, probe
gatttttgaagcaactcatcgattg

SEQ ID NO: 231984 - DNA, 25 bp, probe
gatttttgaatttgtacttctgcgg

SEQ ID NO: 231985 - DNA, 25 bp, probe
gattgaaataatgcggggtctgcgg

SEQ ID NO: 231986 - DNA, 25 bp, probe
gttgatgaaaacaagggatggctca

SEQ ID NO: 231987 - DNA, 25 bp, probe
gattgatcctgacaagcggatctct

SEQ ID NO: 231988 - DNA, 25 bp, probe
gattaccatgatgtcgtggttgttg

SEQ ID NO: 231989 - DNA, 25 bp, probe
gattgactatgatggcagtggctct

SEQ ID NO: 231990 - DNA, 25 bp, probe
gattcaggagaactggtcgccatca

SEQ ID NO: 231991 - DNA, 25 bp, probe
gattgcaggaaaagagatccgacgg

SEQ ID NO: 231992 - DNA, 25 bp, probe
gattcggacaatcgaccgaaagcaa

SEQ ID NO: 231993 - DNA, 25 bp, probe
gattcggacaatcgaccgaaagcaa

SEQ ID NO: 231994 - DNA, 25 bp, probe
gattcagaaccaagacctaactcct

SEQ ID NO: 231995 - DNA, 25 bp, probe
gattctgaaaatggaccaacagttt

SEQ ID NO: 231996 - DNA, 25 bp, probe
gtaggtagactttacccagtctctt

SEQ ID NO: 231997 - DNA, 25 bp, probe
gtaggtagactttacccagtctctt

SEQ ID NO: 231998 - DNA, 25 bp, probe
gattggaaattcatagcccaggttc

SEQ ID NO: 231999 - DNA, 25 bp, probe
gattcaaattatctcgcaccgggtc

SEQ ID NO: 232000 - DNA, 25 bp, probe
gattcaactgtagcctgtaatgggt

SEQ ID NO: 232001 - DNA, 25 bp, probe
gattcaactgtagcctgtaatgggt

SEQ ID NO: 232002 - DNA, 25 bp, probe
gattcaagttcaggactgggatggc

SEQ ID NO: 232003 - DNA, 25 bp, probe
gattcaagttcaggactgggatggc

SEQ ID NO: 232004 - DNA, 25 bp, probe
gattcaaagttccatttgacagagc

SEQ ID NO: 232005 - DNA, 25 bp, probe
gattcaaagttccatttgacagagc

SEQ ID NO: 232006 - DNA, 25 bp, probe
gattccgcaggaagatttccagacc

SEQ ID NO: 232007 - DNA, 25 bp, probe
gattctccttgatattaccaacaca

SEQ ID NO: 232008 - DNA, 25 bp, probe
gattcccttgcacagtcagggccaa

SEQ ID NO: 232009 - DNA, 25 bp, probe
gattccccagtttagagggccacaa

SEQ ID NO: 232010 - DNA, 25 bp, probe
gattcccagttaaaaggctccagaa

SEQ ID NO: 232011 - DNA, 25 bp, probe
gattccaactccacagagtgaccag

SEQ ID NO: 232012 - DNA, 25 bp, probe
gattccaatccagggcgggatcctg

SEQ ID NO: 232013 - DNA, 25 bp, probe
gattgtaagatctagtccggacttg

SEQ ID NO: 232014 - DNA, 25 bp, probe
gattgtaagatctagtccggacttg

SEQ ID NO: 232015 - DNA, 25 bp, probe
gattgtcaacatgcagggcgagccc

SEQ ID NO: 232016 - DNA, 25 bp, probe
gattacaagcggaggcgctgccgcg

SEQ ID NO: 232017 - DNA, 25 bp, probe
gattacaggcgtgagccactgcgcc

SEQ ID NO: 232018 - DNA, 25 bp, probe
gattacaggcgtgagccactgcgcc

SEQ ID NO: 232019 - DNA, 25 bp, probe
gattatgagatggactagcccctgc

SEQ ID NO: 232020 - DNA, 25 bp, probe
gattcatgcttgaaaactagcacag

SEQ ID NO: 232021 - DNA, 25 bp, probe
gattcatgcttgaaaactagcacag

SEQ ID NO: 232022 - DNA, 25 bp, probe
gattatgttgatttactcatcattt

SEQ ID NO: 232023 - DNA, 25 bp, probe
gattatggcatcaagtactcatttg

SEQ ID NO: 232024 - DNA, 25 bp, probe
gattatggcatcaagtactcatttg

SEQ ID NO: 232025 - DNA, 25 bp, probe
gattcataatctggtagacgtgtgt

SEQ ID NO: 232026 - DNA, 25 bp, probe
gattaaatccctccctgtggtatat

SEQ ID NO: 232027 - DNA, 25 bp, probe
gattttattcgcaccattgcggtcg

SEQ ID NO: 232028 - DNA, 25 bp, probe
gattcttttgcccacacttgggagc

SEQ ID NO: 232029 - DNA, 25 bp, probe
gattgtcttgtcataccttggaggc

SEQ ID NO: 232030 - DNA, 25 bp, probe
gattccttgccttattcatttgaga

SEQ ID NO: 232031 - DNA, 25 bp, probe
gattcggagccttgatgtggtagga

SEQ ID NO: 232032 - DNA, 25 bp, probe
gattcagagcacttgggattgtaag

SEQ ID NO: 232033 - DNA, 25 bp, probe
gattaacaattgcagtggctgcagg

SEQ ID NO: 232034 - DNA, 25 bp, probe
gattagaaagtgcgctggctcacat

SEQ ID NO: 232035 - DNA, 25 bp, probe
gattgtggactttggcagtgcccag

SEQ ID NO: 232036 - DNA, 25 bp, probe
gattgtggactttggcagtgcccag

SEQ ID NO: 232037 - DNA, 25 bp, probe
gattttgcaggttggctctgctcca

SEQ ID NO: 232038 - DNA, 25 bp, probe
gtagctacgagatggtaccgagctc

SEQ ID NO: 232039 - DNA, 25 bp, probe
gttggacgaatccgtgtccgagtct

SEQ ID NO: 232040 - DNA, 25 bp, probe
gttgtgggaatcaagatgcctcgtt

SEQ ID NO: 232041 - DNA, 25 bp, probe
gttggaggacaaaatcccctaccat

SEQ ID NO: 232042 - DNA, 25 bp, probe
tttgggggcaacagcaccctagttt

SEQ ID NO: 232043 - DNA, 25 bp, probe
gtagttgggaccacagacgcatacc

SEQ ID NO: 232044 - DNA, 25 bp, probe
gttggtgtggatcctaaccggaact

SEQ ID NO: 232045 - DNA, 25 bp, probe
gttggtgtggatcctaaccggaact

SEQ ID NO: 232046 - DNA, 25 bp, probe
gttggagggaaggactggcggttct

SEQ ID NO: 232047 - DNA, 25 bp, probe
gattgaagtggatggtccctttggc

SEQ ID NO: 232048 - DNA, 25 bp, probe
gattatattgaaagcagttttttgc

SEQ ID NO: 232049 - DNA, 25 bp, probe
gattatattgaaagcagttttttgc

SEQ ID NO: 232050 - DNA, 25 bp, probe
gattataagacaatgctgctttggt

SEQ ID NO: 232051 - DNA, 25 bp, probe
gattataagacaatgctgctttggt

SEQ ID NO: 232052 - DNA, 25 bp, probe
gattatataatgagattcttgcagt

SEQ ID NO: 232053 - DNA, 25 bp, probe
gattgtattatgctgctcactgatc

SEQ ID NO: 232054 - DNA, 25 bp, probe
gattgtattatgctgctcactgatc

SEQ ID NO: 232055 - DNA, 25 bp, probe
gattttcttcagctcagcagatgga

SEQ ID NO: 232056 - DNA, 25 bp, probe
gattttcttcagctcagcagatgga

SEQ ID NO: 232057 - DNA, 25 bp, probe
gattttcttatgcgccagaggatga

SEQ ID NO: 232058 - DNA, 25 bp, probe
gattctcttgtccaggcatcagagg

SEQ ID NO: 232059 - DNA, 25 bp, probe
gattcagctcgctgaggaagaggga

SEQ ID NO: 232060 - DNA, 25 bp, probe
gattcatccaaaagctgaggagcca

SEQ ID NO: 232061 - DNA, 25 bp, probe
gattccagaaacatatgggctgata

SEQ ID NO: 232062 - DNA, 25 bp, probe
gattctgtttacattgttcatatga

SEQ ID NO: 232063 - DNA, 25 bp, probe
gattaatttaattcatgtattatga

SEQ ID NO: 232064 - DNA, 25 bp, probe
gattaacttccaacttataagtttg

SEQ ID NO: 232065 - DNA, 25 bp, probe
gattcaaattctgccttgaaatatt

SEQ ID NO: 232066 - DNA, 25 bp, probe
gattattttttggtcatggagcata

SEQ ID NO: 232067 - DNA, 25 bp, probe
gattcaggttttctctagagcaaaa

SEQ ID NO: 232068 - DNA, 25 bp, probe
gttgctatggttttatctaacaaat

SEQ ID NO: 232069 - DNA, 25 bp, probe
gttgttggagagttcccatgtcaaa

SEQ ID NO: 232070 - DNA, 25 bp, probe
gttgttggagagttcccatgtcaaa

SEQ ID NO: 232071 - DNA, 25 bp, probe
gttggccatgagctctaccatgtac

SEQ ID NO: 232072 - DNA, 25 bp, probe
gattgtgtctgccgtgaagcacatg

SEQ ID NO: 232073 - DNA, 25 bp, probe
gattttggcttggagagcactgctg

SEQ ID NO: 232074 - DNA, 25 bp, probe
gattgactcctaccatggagctgtg

SEQ ID NO: 232075 - DNA, 25 bp, probe
gattatgctgtgagcctgcaggctt

SEQ ID NO: 232076 - DNA, 25 bp, probe
gattcaattgcttggctgtagcttt

SEQ ID NO: 232077 - DNA, 25 bp, probe
gattgcagattttggctggtctgtg

SEQ ID NO: 232078 - DNA, 25 bp, probe
gattgccagctcatgacatggtgct

SEQ ID NO: 232079 - DNA, 25 bp, probe
gattgccagctttaagactgatgaa

SEQ ID NO: 232080 - DNA, 25 bp, probe
gattcgctgcattttagagcatgct

SEQ ID NO: 232081 - DNA, 25 bp, probe
gattgcgctcatggatacagatggc

SEQ ID NO: 232082 - DNA, 25 bp, probe
gattacaactgctacagagcagaca

SEQ ID NO: 232083 - DNA, 25 bp, probe
gattcctccagctacaagcacaatg

SEQ ID NO: 232084 - DNA, 25 bp, probe
gattcactccgttgatcagaaagtt

SEQ ID NO: 232085 - DNA, 25 bp, probe
gattagatcgggtctcggaagggaa

SEQ ID NO: 232086 - DNA, 25 bp, probe
gttgggcagtgggcctaaagcaggg

SEQ ID NO: 232087 - DNA, 25 bp, probe
gttgggcttgggaaggcaagaaggt

SEQ ID NO: 232088 - DNA, 25 bp, probe
gttaccttggtcagtgaaaagatgc

SEQ ID NO: 232089 - DNA, 25 bp, probe
gattccggtatggctggtgcaaaag

SEQ ID NO: 232090 - DNA, 25 bp, probe
gattcgggagatctggcattaccag

SEQ ID NO: 232091 - DNA, 25 bp, probe
gattcatggggaactccatttcagc

SEQ ID NO: 232092 - DNA, 25 bp, probe
gattcatggggaactccatttcagc

SEQ ID NO: 232093 - DNA, 25 bp, probe
gattcatggggaactccatttcagc

SEQ ID NO: 232094 - DNA, 25 bp, probe
gattagtggaagacatcctatctag

SEQ ID NO: 232095 - DNA, 25 bp, probe
gattacaggacgaatagctataatg

SEQ ID NO: 232096 - DNA, 25 bp, probe
gattacacagattatacagctctaa

SEQ ID NO: 232097 - DNA, 25 bp, probe
gattcagccacagataccattgata

SEQ ID NO: 232098 - DNA, 25 bp, probe
gattcagccacagataccattgata

SEQ ID NO: 232099 - DNA, 25 bp, probe
gattcactacagagcaggcattgaa

SEQ ID NO: 232100 - DNA, 25 bp, probe
gattcactacagagcaggcattgaa

SEQ ID NO: 232101 - DNA, 25 bp, probe
gattactcacacatagatcaagaga

SEQ ID NO: 232102 - DNA, 25 bp, probe
gattaccaactggttcgaaaacttg

SEQ ID NO: 232103 - DNA, 25 bp, probe
gattggaagaatggttcgttaagtt

SEQ ID NO: 232104 - DNA, 25 bp, probe
gattccaaacattgtgctcgttcaa

SEQ ID NO: 232105 - DNA, 25 bp, probe
gattcctaacattggtaatgtgatg

SEQ ID NO: 232106 - DNA, 25 bp, probe
gattcctaacattggtaatgtgatg

SEQ ID NO: 232107 - DNA, 25 bp, probe
gattcttccagtggggatagtgatg

SEQ ID NO: 232108 - DNA, 25 bp, probe
gattctttgactggtgaatgcgtac

SEQ ID NO: 232109 - DNA, 25 bp, probe
gattgttgtgacattggccgtatgc

SEQ ID NO: 232110 - DNA, 25 bp, probe
gattatcattccatggcaccaaacg

SEQ ID NO: 232111 - DNA, 25 bp, probe
gattataggcacaagacaccacaat

SEQ ID NO: 232112 - DNA, 25 bp, probe
gattcagaggcagcaagcactacag

SEQ ID NO: 232113 - DNA, 25 bp, probe
gattctcagtcagaggctgatgccg

SEQ ID NO: 232114 - DNA, 25 bp, probe
gattctctgtaccaagtgatgcagc

SEQ ID NO: 232115 - DNA, 25 bp, probe
gattgcctgtgggagagtgcacatc

SEQ ID NO: 232116 - DNA, 25 bp, probe
gattcagcagcatggacagtcactc

SEQ ID NO: 232117 - DNA, 25 bp, probe
gattcagcagcatggacagtcactc

SEQ ID NO: 232118 - DNA, 25 bp, probe
gattcagcagcatggacagtcactc

SEQ ID NO: 232119 - DNA, 25 bp, probe
gattcatctagcagacagctctgga

SEQ ID NO: 232120 - DNA, 25 bp, probe
gattcagaagaatcacctggatgat

SEQ ID NO: 232121 - DNA, 25 bp, probe
gattcagaagaatcacctggatgat

SEQ ID NO: 232122 - DNA, 25 bp, probe
gattctggagaaccttcgtggtgga

SEQ ID NO: 232123 - DNA, 25 bp, probe
gattcttagaatcctgagctgtggt

SEQ ID NO: 232124 - DNA, 25 bp, probe
gttgtggacaatctcagctgggtca

SEQ ID NO: 232125 - DNA, 25 bp, probe
gttgtggacaatctcagctgggtca

SEQ ID NO: 232126 - DNA, 25 bp, probe
gattgttgtcaacacatttgtgaag

SEQ ID NO: 232127 - DNA, 25 bp, probe
gattctgagaaacagcaactcgagg

SEQ ID NO: 232128 - DNA, 25 bp, probe
gattcttggagactaaaaagcagtg

SEQ ID NO: 232129 - DNA, 25 bp, probe
gattgctgtgaaaacgaaaatgtgt

SEQ ID NO: 232130 - DNA, 25 bp, probe
gattggctgaagtaccagacctgct

SEQ ID NO: 232131 - DNA, 25 bp, probe
gattggctgaagtaccagacctgct

SEQ ID NO: 232132 - DNA, 25 bp, probe
gattggctgaagtaccagacctgct

SEQ ID NO: 232133 - DNA, 25 bp, probe
gattgagatacagctccagacgcgt

SEQ ID NO: 232134 - DNA, 25 bp, probe
gattatgtaactcccagggtgctgg

SEQ ID NO: 232135 - DNA, 25 bp, probe
gattattaaatagtcactagtattg

SEQ ID NO: 232136 - DNA, 25 bp, probe
gattatgggaatcatagggaaagag

SEQ ID NO: 232137 - DNA, 25 bp, probe
gattgagggcagaaaaaggaaacgg

SEQ ID NO: 232138 - DNA, 25 bp, probe
gattgactccgttattccgaaaggg

SEQ ID NO: 232139 - DNA, 25 bp, probe
gattgactccgttattccgaaaggg

SEQ ID NO: 232140 - DNA, 25 bp, probe
gattgcttccgttttcaagattggt

SEQ ID NO: 232141 - DNA, 25 bp, probe
gattgcttccgttttcaagattggt

SEQ ID NO: 232142 - DNA, 25 bp, probe
gttgcttcggttttcatacgggatt

SEQ ID NO: 232143 - DNA, 25 bp, probe
gttgcttcggttttcatacgggatt

SEQ ID NO: 232144 - DNA, 25 bp, probe
gattggctcgtataacaacaggtat

SEQ ID NO: 232145 - DNA, 25 bp, probe
gattggtggtaaaagctgacgggaa

SEQ ID NO: 232146 - DNA, 25 bp, probe
gattggtggtaaaagctgacgggaa

SEQ ID NO: 232147 - DNA, 25 bp, probe
gattgtccgtagagaggacgtccac

SEQ ID NO: 232148 - DNA, 25 bp, probe
gattgtccgtagagaggacgtccac

SEQ ID NO: 232149 - DNA, 25 bp, probe
gattacctgtaccgaaatgctgtcc

SEQ ID NO: 232150 - DNA, 25 bp, probe
gattatcgctgcaaaggaagcaatt

SEQ ID NO: 232151 - DNA, 25 bp, probe
gattaagagtcaatctgcaagccat

SEQ ID NO: 232152 - DNA, 25 bp, probe
gattgaagtgtggcaccaagattga

SEQ ID NO: 232153 - DNA, 25 bp, probe
gattgaatgtgaaacgggggcaccc

SEQ ID NO: 232154 - DNA, 25 bp, probe
gttgaaggagactgtggtaacccat

SEQ ID NO: 232155 - DNA, 25 bp, probe
tttggggcagatctgtagtaaacaa

SEQ ID NO: 232156 - DNA, 25 bp, probe
gttggcctgagcaacctagtaagac

SEQ ID NO: 232157 - DNA, 25 bp, probe
gttggcctgagcaacctagtaagac

SEQ ID NO: 232158 - DNA, 25 bp, probe
gattcgcacgatgagtgtaaagaac

SEQ ID NO: 232159 - DNA, 25 bp, probe
gattcacactatgcactgggaaagt

SEQ ID NO: 232160 - DNA, 25 bp, probe
gattgaaggcattccaggaaacagg

SEQ ID NO: 232161 - DNA, 25 bp, probe
gttgattggcaatgaggataaaatg

SEQ ID NO: 232162 - DNA, 25 bp, probe
gttgtagtcaatgcctatgaacaca

SEQ ID NO: 232163 - DNA, 25 bp, probe
gattataatcatttccagtgcacac

SEQ ID NO: 232164 - DNA, 25 bp, probe
gttcaggactttgaatgccagccaa

SEQ ID NO: 232165 - DNA, 25 bp, probe
gttcaggactttgaatgccagccaa

SEQ ID NO: 232166 - DNA, 25 bp, probe
gttctggcatttatagtccccaacc

SEQ ID NO: 232167 - DNA, 25 bp, probe
gttctggcatttatagtccccaacc

SEQ ID NO: 232168 - DNA, 25 bp, probe
gtttgacttcgtattgacccttatc

SEQ ID NO: 232169 - DNA, 25 bp, probe
gtttgacttcgtattgacccttatc

SEQ ID NO: 232170 - DNA, 25 bp, probe
gtttaattctgtaggtaaccatttg

SEQ ID NO: 232171 - DNA, 25 bp, probe
gtttaattctgtaggtaaccatttg

SEQ ID NO: 232172 - DNA, 25 bp, probe
gattcttttcttaggtatacaaatg

SEQ ID NO: 232173 - DNA, 25 bp, probe
gattgttttctttgtcatacctaat

SEQ ID NO: 232174 - DNA, 25 bp, probe
gattgttttctttgtcatacctaat

SEQ ID NO: 232175 - DNA, 25 bp, probe
gattctttgtcttcatgttaactga

SEQ ID NO: 232176 - DNA, 25 bp, probe
gattcttgcagtaaattgataataa

SEQ ID NO: 232177 - DNA, 25 bp, probe
gattcttgcagtaaattgataataa

SEQ ID NO: 232178 - DNA, 25 bp, probe
gattctgccgccaaatttatatcat

SEQ ID NO: 232179 - DNA, 25 bp, probe
gattccctcagtgatattggatgca

SEQ ID NO: 232180 - DNA, 25 bp, probe
gattcccaagtcaataagcttgcca

SEQ ID NO: 232181 - DNA, 25 bp, probe
gattccactaaagaagttgaagtac

SEQ ID NO: 232182 - DNA, 25 bp, probe
gattccttagaacacgagaaactca

SEQ ID NO: 232183 - DNA, 25 bp, probe
gattccgataagaaacacgagaacc

SEQ ID NO: 232184 - DNA, 25 bp, probe
gattccgaggggcacatcaaaatcg

SEQ ID NO: 232185 - DNA, 25 bp, probe
gattctataaggccaactgcacaaa

SEQ ID NO: 232186 - DNA, 25 bp, probe
gattccaaggatgcaaatatcttag

SEQ ID NO: 232187 - DNA, 25 bp, probe
gattccaggttatatctcatctttg

SEQ ID NO: 232188 - DNA, 25 bp, probe
gattctaagttgttggccttgtgtg

SEQ ID NO: 232189 - DNA, 25 bp, probe
gattcttttgtgtgactttgtagtc

SEQ ID NO: 232190 - DNA, 25 bp, probe
gttggtgccttcttggtattgtacc

SEQ ID NO: 232191 - DNA, 25 bp, probe
gttggtctttgaagggtggcttgcc

SEQ ID NO: 232192 - DNA, 25 bp, probe
gttgggcttctgttagagtggcttc

SEQ ID NO: 232193 - DNA, 25 bp, probe
gttgagttgcttctgaggtacattt

SEQ ID NO: 232194 - DNA, 25 bp, probe
gattatgtagctacgagatggtacc

SEQ ID NO: 232195 - DNA, 25 bp, probe
gattagtatgctatgctatggaata

SEQ ID NO: 232196 - DNA, 25 bp, probe
gttggatttattctgccaaacctgt

SEQ ID NO: 232197 - DNA, 25 bp, probe
gttggagcttctattgccatgaacc

SEQ ID NO: 232198 - DNA, 25 bp, probe
gttggacttctgcaatagatgacac

SEQ ID NO: 232199 - DNA, 25 bp, probe
gattgttctgtacgaactgatgacc

SEQ ID NO: 232200 - DNA, 25 bp, probe
gattcttcttggtctactgtgaact

SEQ ID NO: 232201 - DNA, 25 bp, probe
gattcttggtgccaccattgagaac

SEQ ID NO: 232202 - DNA, 25 bp, probe
gattcttggacgactatgtggcaac

SEQ ID NO: 232203 - DNA, 25 bp, probe
gattcaagtgggcctttggcttcct

SEQ ID NO: 232204 - DNA, 25 bp, probe
gattctaggtgtggtgttgactgtc

SEQ ID NO: 232205 - DNA, 25 bp, probe
gattagggttcaagtagcagctgct

SEQ ID NO: 232206 - DNA, 25 bp, probe
gttaaggttcaagacagatgggcat

SEQ ID NO: 232207 - DNA, 25 bp, probe
gttgtacgcccaggcaacaagggct

SEQ ID NO: 232208 - DNA, 25 bp, probe
gttgtacgacgatgtatcaacagag

SEQ ID NO: 232209 - DNA, 25 bp, probe
gattgtgaaggcgctgtactacctg

SEQ ID NO: 232210 - DNA, 25 bp, probe
gattgtgaaggcgctgtactacctg

SEQ ID NO: 232211 - DNA, 25 bp, probe
gattaaagtggcagacaccccttcc

SEQ ID NO: 232212 - DNA, 25 bp, probe
gattaaagtggcagacaccccttcc

SEQ ID NO: 232213 - DNA, 25 bp, probe
gattcaagagggacagccccagctt

SEQ ID NO: 232214 - DNA, 25 bp, probe
gattctactgggacagttgctcggt

SEQ ID NO: 232215 - DNA, 25 bp, probe
gattctaatggctttattgcagcga

SEQ ID NO: 232216 - DNA, 25 bp, probe
gattctgaatggtgtgacgaccacc

SEQ ID NO: 232217 - DNA, 25 bp, probe
gattcctatgtgggcgacgaggccc

SEQ ID NO: 232218 - DNA, 25 bp, probe
gattctgtcattttggatccagagc

SEQ ID NO: 232219 - DNA, 25 bp, probe
gattctgtcattttggatccagagc

SEQ ID NO: 232220 - DNA, 25 bp, probe
gattcatattcatttgtatccaagg

SEQ ID NO: 232221 - DNA, 25 bp, probe
gattctatgtgcttttatcagaaag

SEQ ID NO: 232222 - DNA, 25 bp, probe
gattctatgtgcttttatcagaaag

SEQ ID NO: 232223 - DNA, 25 bp, probe
gttgctgattctgttccggaagccg

SEQ ID NO: 232224 - DNA, 25 bp, probe
gattgctgtagcggttgccagggac

SEQ ID NO: 232225 - DNA, 25 bp, probe
gattgctggcctgttgtaggtggta

SEQ ID NO: 232226 - DNA, 25 bp, probe
gattgctggcctgttgtaggtggta

SEQ ID NO: 232227 - DNA, 25 bp, probe
gattgctgggtgactggatgggggt

SEQ ID NO: 232228 - DNA, 25 bp, probe
gattgctgggtgactggatgggggt

SEQ ID NO: 232229 - DNA, 25 bp, probe
gattgtaggtgcaagctgtccagag

SEQ ID NO: 232230 - DNA, 25 bp, probe
gattgtgagccgccaatatcatcac

SEQ ID NO: 232231 - DNA, 25 bp, probe
gattctgatcctttcaatatacgtt

SEQ ID NO: 232232 - DNA, 25 bp, probe
gattcgatcctcttaaggcattatc

SEQ ID NO: 232233 - DNA, 25 bp, probe
gattctgacagcaatcttctggctc

SEQ ID NO: 232234 - DNA, 25 bp, probe
gattcttctcagacatgtcttcttc

SEQ ID NO: 232235 - DNA, 25 bp, probe
gattctctcatcaaatctatccatt

SEQ ID NO: 232236 - DNA, 25 bp, probe
gattcatctacatttcttcacagct

SEQ ID NO: 232237 - DNA, 25 bp, probe
gattcatctacatttcttcacagct

SEQ ID NO: 232238 - DNA, 25 bp, probe
gattactgtcagaactgtcagcatt

SEQ ID NO: 232239 - DNA, 25 bp, probe
gattactgtcaaaccagcatggtta

SEQ ID NO: 232240 - DNA, 25 bp, probe
gattactgtcaatgtctatagatta

SEQ ID NO: 232241 - DNA, 25 bp, probe
gattaatggcagagtgcctcaaaaa

SEQ ID NO: 232242 - DNA, 25 bp, probe
gattacagaagctgcatcctgagac

SEQ ID NO: 232243 - DNA, 25 bp, probe
gattacagaagctgcatcctgagac

SEQ ID NO: 232244 - DNA, 25 bp, probe
gattacagaacagctgattgaagcc

SEQ ID NO: 232245 - DNA, 25 bp, probe
gattcaagaactgtacaagctgccc

SEQ ID NO: 232246 - DNA, 25 bp, probe
gattcagataccttcaacaactgca

SEQ ID NO: 232247 - DNA, 25 bp, probe
gattctgtaactccaatcagttcag

SEQ ID NO: 232248 - DNA, 25 bp, probe
gttgcttaaggtcatgcagcttagc

SEQ ID NO: 232249 - DNA, 25 bp, probe
gttgattatctggaggtctcatttc

SEQ ID NO: 232250 - DNA, 25 bp, probe
gattgaatttgccactgtcaactat

SEQ ID NO: 232251 - DNA, 25 bp, probe
gattcatcttttcctggaatttcta

SEQ ID NO: 232252 - DNA, 25 bp, probe
gattcatcggttttggtataactac

SEQ ID NO: 232253 - DNA, 25 bp, probe
gattcatcggttttggtataactac

SEQ ID NO: 232254 - DNA, 25 bp, probe
gattcacagggcccaggtaaaccaa

SEQ ID NO: 232255 - DNA, 25 bp, probe
gattcgagggcactgggttttcaaa

SEQ ID NO: 232256 - DNA, 25 bp, probe
gattcgagggcactgggttttcaaa

SEQ ID NO: 232257 - DNA, 25 bp, probe
gtgtccggccagagtggcttacaag

SEQ ID NO: 232258 - DNA, 25 bp, probe
gtaccagtaaggctggatcttacag

SEQ ID NO: 232259 - DNA, 25 bp, probe
ttttagtagagacagggtttcacca

SEQ ID NO: 232260 - DNA, 25 bp, probe
gattgtgttgaagaagggttatcct

SEQ ID NO: 232261 - DNA, 25 bp, probe
gattctttgagagccagggtagatc

SEQ ID NO: 232262 - DNA, 25 bp, probe
gttctttcaagtgcaaagtaattta

SEQ ID NO: 232263 - DNA, 25 bp, probe
gttcatgtacgaccctaagaaaagg

SEQ ID NO: 232264 - DNA, 25 bp, probe
gttcatgtacgaccctaagaaaagg

SEQ ID NO: 232265 - DNA, 25 bp, probe
gttcatgtacgaccctaagaaaagg

SEQ ID NO: 232266 - DNA, 25 bp, probe
gttctggggtccttctacaacaagg

SEQ ID NO: 232267 - DNA, 25 bp, probe
gattctagagtgaacttccacacca

SEQ ID NO: 232268 - DNA, 25 bp, probe
gattcgatttcaacctaatgaccat

SEQ ID NO: 232269 - DNA, 25 bp, probe
gattggtttattgccgtgtgctatg

SEQ ID NO: 232270 - DNA, 25 bp, probe
gattgtgctttattgagcctgcagt

SEQ ID NO: 232271 - DNA, 25 bp, probe
gattgtgccatttagagggaactct

SEQ ID NO: 232272 - DNA, 25 bp, probe
gattctggagtgggaggagcagcaa

SEQ ID NO: 232273 - DNA, 25 bp, probe
gattgcatgtgactctgaagctgac

SEQ ID NO: 232274 - DNA, 25 bp, probe
gattgcatgtgactctgaagctgac

SEQ ID NO: 232275 - DNA, 25 bp, probe
gattggtgagctgatcgctataact

SEQ ID NO: 232276 - DNA, 25 bp, probe
gattgggccatatgcccacaacatt

SEQ ID NO: 232277 - DNA, 25 bp, probe
gattgggccatatgcccacaacatt

SEQ ID NO: 232278 - DNA, 25 bp, probe
gattggcccgattgatagaagacaa

SEQ ID NO: 232279 - DNA, 25 bp, probe
gattgcaggtctcattggaaccaca

SEQ ID NO: 232280 - DNA, 25 bp, probe
gattgcaggtctcattggaaccaca

SEQ ID NO: 232281 - DNA, 25 bp, probe
gattgcagtacatgagtttacacaa

SEQ ID NO: 232282 - DNA, 25 bp, probe
gattgcagtacatgagtttacacaa

SEQ ID NO: 232283 - DNA, 25 bp, probe
gattctggatgcaacgtctttacaa

SEQ ID NO: 232284 - DNA, 25 bp, probe
gattcagagtgcacctctttgacta

SEQ ID NO: 232285 - DNA, 25 bp, probe
gattgtgtctcagccttttagctaa

SEQ ID NO: 232286 - DNA, 25 bp, probe
gttggcctaatgacttcttactgaa

SEQ ID NO: 232287 - DNA, 25 bp, probe
gattgaggtgaaagcttcgtccgag

SEQ ID NO: 232288 - DNA, 25 bp, probe
gattggggacttcggcatgtccaga

SEQ ID NO: 232289 - DNA, 25 bp, probe
gattcagggacattctccattcaaa

SEQ ID NO: 232290 - DNA, 25 bp, probe
gattctggagaacttccttcacaag

SEQ ID NO: 232291 - DNA, 25 bp, probe
gattgtgagactgcttccttgaaac

SEQ ID NO: 232292 - DNA, 25 bp, probe
gattgtggactgtcaatcttagata

SEQ ID NO: 232293 - DNA, 25 bp, probe
gattgttatctatcaactataagcc

SEQ ID NO: 232294 - DNA, 25 bp, probe
gttgttgactatatactgccaccct

SEQ ID NO: 232295 - DNA, 25 bp, probe
gtttatccggataatccaacccctg

SEQ ID NO: 232296 - DNA, 25 bp, probe
gttgtacctggggaccaaattccat

SEQ ID NO: 232297 - DNA, 25 bp, probe
gttgtacctggggaccaaattccat

SEQ ID NO: 232298 - DNA, 25 bp, probe
gttgtacctccataaaacagtagca

SEQ ID NO: 232299 - DNA, 25 bp, probe
gttggacgccaataactgcgactat

SEQ ID NO: 232300 - DNA, 25 bp, probe
gttggacgccaataactgcgactat

SEQ ID NO: 232301 - DNA, 25 bp, probe
gttggacgccaataactgcgactat

SEQ ID NO: 232302 - DNA, 25 bp, probe
gttggactcctaaaagtgctactta

SEQ ID NO: 232303 - DNA, 25 bp, probe
gttgggacccagcaagggcacttaa

SEQ ID NO: 232304 - DNA, 25 bp, probe
gttgggacccagcaagggcacttaa

SEQ ID NO: 232305 - DNA, 25 bp, probe
gattcaggaccggataatggccatc

SEQ ID NO: 232306 - DNA, 25 bp, probe
gattcagggcccatgtgtgacctgc

SEQ ID NO: 232307 - DNA, 25 bp, probe
gattctgagtgccacattggtagac

SEQ ID NO: 232308 - DNA, 25 bp, probe
gattctgagtgccacattggtagac

SEQ ID NO: 232309 - DNA, 25 bp, probe
gattctgttcagcattcactaaccc

SEQ ID NO: 232310 - DNA, 25 bp, probe
gattgggttgtcatcctcaaacagg

SEQ ID NO: 232311 - DNA, 25 bp, probe
gttgtaggttttggctctaatgggt

SEQ ID NO: 232312 - DNA, 25 bp, probe
gttgtaggcttgttctgttgagtgg

SEQ ID NO: 232313 - DNA, 25 bp, probe
gttgggcgccataatcaattggctg

SEQ ID NO: 232314 - DNA, 25 bp, probe
gttgtggccctagctatgggcctaa

SEQ ID NO: 232315 - DNA, 25 bp, probe
gttgggccctgaggcttgaagcttg

SEQ ID NO: 232316 - DNA, 25 bp, probe
gattgaaggggaggcttgtactgct

SEQ ID NO: 232317 - DNA, 25 bp, probe
gattgggtgggagctggttatgtgt

SEQ ID NO: 232318 - DNA, 25 bp, probe
gattggagtcgtgagctggggagtg

SEQ ID NO: 232319 - DNA, 25 bp, probe
gttgggaagggggtgcaggaagctc

SEQ ID NO: 232320 - DNA, 25 bp, probe
gttgctggaacgaggggagaggctg

SEQ ID NO: 232321 - DNA, 25 bp, probe
gattgtgggattgtgggtggagggg

SEQ ID NO: 232322 - DNA, 25 bp, probe
gttggaggtctaagtgacgaggggg

SEQ ID NO: 232323 - DNA, 25 bp, probe
gttggatgagatggaaggtggagga

SEQ ID NO: 232324 - DNA, 25 bp, probe
gttgaggacacctaggttcacggtc

SEQ ID NO: 232325 - DNA, 25 bp, probe
gttggaacacctcattttatggcac

SEQ ID NO: 232326 - DNA, 25 bp, probe
gttggaacactgaattcttctgtgc

SEQ ID NO: 232327 - DNA, 25 bp, probe
gttggaacactttcctgagatgcac

SEQ ID NO: 232328 - DNA, 25 bp, probe
gattggagtgacgcatctccaagcc

SEQ ID NO: 232329 - DNA, 25 bp, probe
gattggaggactgtcaggcactgac

SEQ ID NO: 232330 - DNA, 25 bp, probe
gttggaaggcttacaggatgctcct

SEQ ID NO: 232331 - DNA, 25 bp, probe
gttggaacctgcaataaactcgctg

SEQ ID NO: 232332 - DNA, 25 bp, probe
gattgcttaccgcattgaacggctg

SEQ ID NO: 232333 - DNA, 25 bp, probe
gttgatatcacctacacggagggtg

SEQ ID NO: 232334 - DNA, 25 bp, probe
gttgtatatgctctgaagtggggta

SEQ ID NO: 232335 - DNA, 25 bp, probe
gttaaaggggcaggagaatggacaa

SEQ ID NO: 232336 - DNA, 25 bp, probe
gttgaattgggacaaaaggaacatt

SEQ ID NO: 232337 - DNA, 25 bp, probe
gttaattggctcagaattttaatat

SEQ ID NO: 232338 - DNA, 25 bp, probe
gttgacctggctattggttctgaaa

SEQ ID NO: 232339 - DNA, 25 bp, probe
gttgacctggctattggttctgaaa

SEQ ID NO: 232340 - DNA, 25 bp, probe
gattgaccaggcatagttctttaga

SEQ ID NO: 232341 - DNA, 25 bp, probe
gattcagccatccaattggttttag

SEQ ID NO: 232342 - DNA, 25 bp, probe
gattgcagaaggaatgtggtttatt

SEQ ID NO: 232343 - DNA, 25 bp, probe
gattctcaatggatgctggattcta

SEQ ID NO: 232344 - DNA, 25 bp, probe
gattccatgctgttgatgtggattc

SEQ ID NO: 232345 - DNA, 25 bp, probe
gattccagctagtgtcagcagtggg

SEQ ID NO: 232346 - DNA, 25 bp, probe
gattccagctagtgtcagcagtggg

SEQ ID NO: 232347 - DNA, 25 bp, probe
gattccagagcactgctccagtggg

SEQ ID NO: 232348 - DNA, 25 bp, probe
gattgagagctgttcaccatgtgtg

SEQ ID NO: 232349 - DNA, 25 bp, probe
gttgatcatgctgttgctcatggcg

SEQ ID NO: 232350 - DNA, 25 bp, probe
gattgacatgtcggcgcagattgct

SEQ ID NO: 232351 - DNA, 25 bp, probe
gttgacgtttgctcatttaagaatt

SEQ ID NO: 232352 - DNA, 25 bp, probe
gttgactttatctttttgtaggact

SEQ ID NO: 232353 - DNA, 25 bp, probe
gttccttttcttgtgttaatgtaca

SEQ ID NO: 232354 - DNA, 25 bp, probe
gttccccttgttgatgttaacgacg

SEQ ID NO: 232355 - DNA, 25 bp, probe
gattccacgttgctttttagagttc

SEQ ID NO: 232356 - DNA, 25 bp, probe
gattctacaaagctcttttgagcat

SEQ ID NO: 232357 - DNA, 25 bp, probe
gattccacacattaatctttcaaat

SEQ ID NO: 232358 - DNA, 25 bp, probe
gattctctaggaaatctggtgaagt

SEQ ID NO: 232359 - DNA, 25 bp, probe
gattcactgggtgactgtctgaccc

SEQ ID NO: 232360 - DNA, 25 bp, probe
gattgacgtggatgagctcctggac

SEQ ID NO: 232361 - DNA, 25 bp, probe
gttgaggtgcgctcacctcagagca

SEQ ID NO: 232362 - DNA, 25 bp, probe
gattgtgatgaggcacgcccatcag

SEQ ID NO: 232363 - DNA, 25 bp, probe
gattgtgatgaggcacgcccatcag

SEQ ID NO: 232364 - DNA, 25 bp, probe
gttgagagagcggcagccagcactg

SEQ ID NO: 232365 - DNA, 25 bp, probe
gattgcagagggaatggcatacatc

SEQ ID NO: 232366 - DNA, 25 bp, probe
gattgtgacagcgtatgtgatgact

SEQ ID NO: 232367 - DNA, 25 bp, probe
gattgtgacagcgtatgtgatgact

SEQ ID NO: 232368 - DNA, 25 bp, probe
gattctgaatgatagtcatactcct

SEQ ID NO: 232369 - DNA, 25 bp, probe
gattctgaattcttggatattactt

SEQ ID NO: 232370 - DNA, 25 bp, probe
gattgctcaaccaggatttcactct

SEQ ID NO: 232371 - DNA, 25 bp, probe
gattgctcaaccaggatttcactct

SEQ ID NO: 232372 - DNA, 25 bp, probe
gattgccaagaaaagacctcaccaa

SEQ ID NO: 232373 - DNA, 25 bp, probe
gattctttgaataatagccttccaa

SEQ ID NO: 232374 - DNA, 25 bp, probe
gattgttctaacatagcttaagcta

SEQ ID NO: 232375 - DNA, 25 bp, probe
gattgttctaacatagcttaagcta

SEQ ID NO: 232376 - DNA, 25 bp, probe
gattgtcctgacctactgtataagt

SEQ ID NO: 232377 - DNA, 25 bp, probe
gttggcctgtcagagcttgattaga

SEQ ID NO: 232378 - DNA, 25 bp, probe
gattgaactatcccagatggttatg

SEQ ID NO: 232379 - DNA, 25 bp, probe
gattgacaagtaccaggctttgatg

SEQ ID NO: 232380 - DNA, 25 bp, probe
gattgtaagttataggttctgagct

SEQ ID NO: 232381 - DNA, 25 bp, probe
gattgtaagttataggttctgagct

SEQ ID NO: 232382 - DNA, 25 bp, probe
gattggtagctttctaggattccac

SEQ ID NO: 232383 - DNA, 25 bp, probe
gattggtagctttctaggattccac

SEQ ID NO: 232384 - DNA, 25 bp, probe
gttggtatgatattccaggcagctc

SEQ ID NO: 232385 - DNA, 25 bp, probe
gattggggatgctattcggatgata

SEQ ID NO: 232386 - DNA, 25 bp, probe
gattgaggggagaacatatgatgaa

SEQ ID NO: 232387 - DNA, 25 bp, probe
gttgaggaggacgacatttacacta

SEQ ID NO: 232388 - DNA, 25 bp, probe
gattcatggaaacagctattctcat

SEQ ID NO: 232389 - DNA, 25 bp, probe
gattctgtaccctagtatatctttt

SEQ ID NO: 232390 - DNA, 25 bp, probe
gattgttaagtctaaatatttcctt

SEQ ID NO: 232391 - DNA, 25 bp, probe
gattgtgtcaagtttaatttgtttt

SEQ ID NO: 232392 - DNA, 25 bp, probe
gttggtcatagtctgcactttgtgg

SEQ ID NO: 232393 - DNA, 25 bp, probe
gttggctatggtgatcttaatggga

SEQ ID NO: 232394 - DNA, 25 bp, probe
gttggccaggctggtctcaaactcc

SEQ ID NO: 232395 - DNA, 25 bp, probe
gttggccaggctggtctcaaactcc

SEQ ID NO: 232396 - DNA, 25 bp, probe
gttggccaggctggtcttgaactcc

SEQ ID NO: 232397 - DNA, 25 bp, probe
gttggccaggctggtctcgaaatcc

SEQ ID NO: 232398 - DNA, 25 bp, probe
gttggtttgctctccagataatcac

SEQ ID NO: 232399 - DNA, 25 bp, probe
gttggtgtgctgaacccagtaactc

SEQ ID NO: 232400 - DNA, 25 bp, probe
gttgagttgccaaccgaaccatcac

SEQ ID NO: 232401 - DNA, 25 bp, probe
gttggtggtacctgaactgtatgca

SEQ ID NO: 232402 - DNA, 25 bp, probe
gttgttgggcatgtagaactttcat

SEQ ID NO: 232403 - DNA, 25 bp, probe
gttgtaaggatgaaactacgtttgc

SEQ ID NO: 232404 - DNA, 25 bp, probe
gttggaaggtgggttctgcgtgtcc

SEQ ID NO: 232405 - DNA, 25 bp, probe
gttggaaatgtgcaaccactgcttc

SEQ ID NO: 232406 - DNA, 25 bp, probe
gattggaaacatgaactacccatcc

SEQ ID NO: 232407 - DNA, 25 bp, probe
gattggcggattggagatgccaccc

SEQ ID NO: 232408 - DNA, 25 bp, probe
gttggcaggacaggtgtgacacagc

SEQ ID NO: 232409 - DNA, 25 bp, probe
gattgccaaccagttcatgagcaag

SEQ ID NO: 232410 - DNA, 25 bp, probe
gattccacagataccaatggatcag

SEQ ID NO: 232411 - DNA, 25 bp, probe
gattctcaggttggcacagttaatt

SEQ ID NO: 232412 - DNA, 25 bp, probe
gattctcgtgtaacacttgttgctt

SEQ ID NO: 232413 - DNA, 25 bp, probe
gattgcattgcagaaggtgttcctt

SEQ ID NO: 232414 - DNA, 25 bp, probe
gattgcattgcagaaggtgttcctt

SEQ ID NO: 232415 - DNA, 25 bp, probe
gattgatagtccaaatgcttttctt

SEQ ID NO: 232416 - DNA, 25 bp, probe
gattgtagaatcatttttgtttaat

SEQ ID NO: 232417 - DNA, 25 bp, probe
gattgctcgattgtttggtttttaa

SEQ ID NO: 232418 - DNA, 25 bp, probe
gttgtcctatttttgtcattactat

SEQ ID NO: 232419 - DNA, 25 bp, probe
gttgttaacttgtttattgcagctt

SEQ ID NO: 232420 - DNA, 25 bp, probe
gttggctggactggttgtttcattg

SEQ ID NO: 232421 - DNA, 25 bp, probe
gttggctggactggttgtttcattg

SEQ ID NO: 232422 - DNA, 25 bp, probe
gattggagaaggcttgtattagtcc

SEQ ID NO: 232423 - DNA, 25 bp, probe
gattgggaaccagctgtatttgttc

SEQ ID NO: 232424 - DNA, 25 bp, probe
gttgtgggaccagatgtcatctctg

SEQ ID NO: 232425 - DNA, 25 bp, probe
gttgtatgtgatcagaagctgcgtc

SEQ ID NO: 232426 - DNA, 25 bp, probe
gttcgggatgtggcacagacgtcca

SEQ ID NO: 232427 - DNA, 25 bp, probe
gttggggatggttcagtgcttcgaa

SEQ ID NO: 232428 - DNA, 25 bp, probe
gattggtagttatctgagcttaaac

SEQ ID NO: 232429 - DNA, 25 bp, probe
gattggctacttgggctattgtaaa

SEQ ID NO: 232430 - DNA, 25 bp, probe
gttgtgaactatgattttgtttcat

SEQ ID NO: 232431 - DNA, 25 bp, probe
gattgttacttcaattctatctgtt

SEQ ID NO: 232432 - DNA, 25 bp, probe
gattgtgttcattgctttcaagttg

SEQ ID NO: 232433 - DNA, 25 bp, probe
gattgctggctttgtttgacggaac

SEQ ID NO: 232434 - DNA, 25 bp, probe
gattgctggctttgtttgacggaac

SEQ ID NO: 232435 - DNA, 25 bp, probe
gattcttcttatactctgaaggtga

SEQ ID NO: 232436 - DNA, 25 bp, probe
gattgtacattatctcaaaagtctc

SEQ ID NO: 232437 - DNA, 25 bp, probe
gttgtccagacactccaaaggtctc

SEQ ID NO: 232438 - DNA, 25 bp, probe
gttgtcctgaatttccggaggcttg

SEQ ID NO: 232439 - DNA, 25 bp, probe
gttgcacggacaattcggcggggtg

SEQ ID NO: 232440 - DNA, 25 bp, probe
gttcacagtcaaatggggaggggta

SEQ ID NO: 232441 - DNA, 25 bp, probe
gtgggattgaaacccagggtcgtca

SEQ ID NO: 232442 - DNA, 25 bp, probe
gtgggatttacctacttggtttcag

SEQ ID NO: 232443 - DNA, 25 bp, probe
gtgggatttacctacttggtttcag

SEQ ID NO: 232444 - DNA, 25 bp, probe
gtaggtattactgtttgtgtgtttg

SEQ ID NO: 232445 - DNA, 25 bp, probe
gttcctgttactgttgggtcttggc

SEQ ID NO: 232446 - DNA, 25 bp, probe
gttgcctttgcaatcctagggtttg

SEQ ID NO: 232447 - DNA, 25 bp, probe
gttgactgacgagccgaggggtggc

SEQ ID NO: 232448 - DNA, 25 bp, probe
gtaagctgaaggcgaaggggtggtc

SEQ ID NO: 232449 - DNA, 25 bp, probe
gtaagtgagaaaaaactagggctga

SEQ ID NO: 232450 - DNA, 25 bp, probe
gttggtaaaatacatcttggcacaa

SEQ ID NO: 232451 - DNA, 25 bp, probe
gttggtaaaatacatcttggcacaa

SEQ ID NO: 232452 - DNA, 25 bp, probe
gtgtggctacaacaaattttactag

SEQ ID NO: 232453 - DNA, 25 bp, probe
gtgtggctacaacaaattttactag

SEQ ID NO: 232454 - DNA, 25 bp, probe
ggggcagttaaatatcctctactac

SEQ ID NO: 232455 - DNA, 25 bp, probe
gttggcatttcagaaatcccttcca

SEQ ID NO: 232456 - DNA, 25 bp, probe
gttggcatattgttaaaagtctctc

SEQ ID NO: 232457 - DNA, 25 bp, probe
gttggcatattgttaaaagtctctc

SEQ ID NO: 232458 - DNA, 25 bp, probe
gttggcacttggaaatacagtctgc

SEQ ID NO: 232459 - DNA, 25 bp, probe
gattgcctgcttagatgataaaatg

SEQ ID NO: 232460 - DNA, 25 bp, probe
gattgtctgccattgttgataaact

SEQ ID NO: 232461 - DNA, 25 bp, probe
gattgcctctgattcttgtaagttt

SEQ ID NO: 232462 - DNA, 25 bp, probe
gattcctgctgtattgaccagtctc

SEQ ID NO: 232463 - DNA, 25 bp, probe
gattccttattaatctctcagacta

SEQ ID NO: 232464 - DNA, 25 bp, probe
gattctcttgatcgacatttcaaac

SEQ ID NO: 232465 - DNA, 25 bp, probe
gattctcttgatcgacatttcaaac

SEQ ID NO: 232466 - DNA, 25 bp, probe
gattgtttggcgccatcattgcagt

SEQ ID NO: 232467 - DNA, 25 bp, probe
gattgatttatgcttatgtggttgt

SEQ ID NO: 232468 - DNA, 25 bp, probe
gattgactttggctgtgccaggcgt

SEQ ID NO: 232469 - DNA, 25 bp, probe
gttgactttacctcacagtgcttaa

SEQ ID NO: 232470 - DNA, 25 bp, probe
gttgttctttccaccagcaggaagt

SEQ ID NO: 232471 - DNA, 25 bp, probe
gttgtccttactgcccaaggaaggg

SEQ ID NO: 232472 - DNA, 25 bp, probe
gttgatgccaaaatacccacggggt

SEQ ID NO: 232473 - DNA, 25 bp, probe
gttgatgccaaaatacccacggggt

SEQ ID NO: 232474 - DNA, 25 bp, probe
gattgtccacaaatgtcctcagagg

SEQ ID NO: 232475 - DNA, 25 bp, probe
gattctcaacgactgcattcaaagc

SEQ ID NO: 232476 - DNA, 25 bp, probe
gattctacagctaggacttaacctt

SEQ ID NO: 232477 - DNA, 25 bp, probe
gttccctttggactctagggcttcg

SEQ ID NO: 232478 - DNA, 25 bp, probe
gttggcctttggataggaggcttcc

SEQ ID NO: 232479 - DNA, 25 bp, probe
gttggccttgtggcctcagggaact

SEQ ID NO: 232480 - DNA, 25 bp, probe
gttggccttgtggcctcagggaact

SEQ ID NO: 232481 - DNA, 25 bp, probe
gattggcactttcactgagagttga

SEQ ID NO: 232482 - DNA, 25 bp, probe
gattggcactttcactgagagttga

SEQ ID NO: 232483 - DNA, 25 bp, probe
gttgggctaagggctgtgagcttat

SEQ ID NO: 232484 - DNA, 25 bp, probe
gttgattgcccatgttggacttgat

SEQ ID NO: 232485 - DNA, 25 bp, probe
gttgttcccaagtcatgtaatgtat

SEQ ID NO: 232486 - DNA, 25 bp, probe
gattgctctgcaggaagacactaat

SEQ ID NO: 232487 - DNA, 25 bp, probe
gttgtcagcgtggaccactaaccag

SEQ ID NO: 232488 - DNA, 25 bp, probe
gttgtcctggtatctgcagatcgat

SEQ ID NO: 232489 - DNA, 25 bp, probe
gttggtgtggaattcctgggctcca

SEQ ID NO: 232490 - DNA, 25 bp, probe
gttggcttagataacttgtaccgtt

SEQ ID NO: 232491 - DNA, 25 bp, probe
gttgtctataatgagccgttaagtc

SEQ ID NO: 232492 - DNA, 25 bp, probe
gttgtttttaagtcctgtatatgta

SEQ ID NO: 232493 - DNA, 25 bp, probe
gttgctgtcgattaagaccggagct

SEQ ID NO: 232494 - DNA, 25 bp, probe
gttgcatgttgtaagaccaggtggt

SEQ ID NO: 232495 - DNA, 25 bp, probe
gttggctctgtagatccaggttttg

SEQ ID NO: 232496 - DNA, 25 bp, probe
gttggctctgtagatccaggttttg

SEQ ID NO: 232497 - DNA, 25 bp, probe
gttcagtctaacaccatttactgtg

SEQ ID NO: 232498 - DNA, 25 bp, probe
gttgggtcaactatttctaatggga

SEQ ID NO: 232499 - DNA, 25 bp, probe
gttgaccctactgtggattggtggg

SEQ ID NO: 232500 - DNA, 25 bp, probe
gttgaagcccctgctgagcagtgaa

SEQ ID NO: 232501 - DNA, 25 bp, probe
gttggaccacactgtgagcatgcag

SEQ ID NO: 232502 - DNA, 25 bp, probe
gttggaccacactgtgagcatgcag

SEQ ID NO: 232503 - DNA, 25 bp, probe
gattggactcgtttatggcacagcc

SEQ ID NO: 232504 - DNA, 25 bp, probe
gttggattctgggtatgacatactc

SEQ ID NO: 232505 - DNA, 25 bp, probe
gattggtttgctgatatgatcccag

SEQ ID NO: 232506 - DNA, 25 bp, probe
gattgctgacttcggattggcccga

SEQ ID NO: 232507 - DNA, 25 bp, probe
gattgctgacttcggattggcccga

SEQ ID NO: 232508 - DNA, 25 bp, probe
gattgctacttctatgttggtcggt

SEQ ID NO: 232509 - DNA, 25 bp, probe
gattgcaactgtgttgggtcaacta

SEQ ID NO: 232510 - DNA, 25 bp, probe
gttgaccttctcttggtgctattat

SEQ ID NO: 232511 - DNA, 25 bp, probe
gttgattctcttgatcgacatttca

SEQ ID NO: 232512 - DNA, 25 bp, probe
gttgattctcttgatcgacatttca

SEQ ID NO: 232513 - DNA, 25 bp, probe
gttgatgactcgaaactgacagtat

SEQ ID NO: 232514 - DNA, 25 bp, probe
gattgcatccaagacttatcagtct

SEQ ID NO: 232515 - DNA, 25 bp, probe
gattgcttcaagtctctggacacca

SEQ ID NO: 232516 - DNA, 25 bp, probe
gattctgtcaatgtcttgaaatcaa

SEQ ID NO: 232517 - DNA, 25 bp, probe
gattcgatcagtgtgcctgaaacct

SEQ ID NO: 232518 - DNA, 25 bp, probe
gattcgatcagtgtgcctgaaacct

SEQ ID NO: 232519 - DNA, 25 bp, probe
gattctgatcggatgttacatagcc

SEQ ID NO: 232520 - DNA, 25 bp, probe
gattctgtcctacttgtacatagtc

SEQ ID NO: 232521 - DNA, 25 bp, probe
gattccatgccatctttactatgtg

SEQ ID NO: 232522 - DNA, 25 bp, probe
gattcctgtccagtggctaagatgc

SEQ ID NO: 232523 - DNA, 25 bp, probe
gattctgtgtccgaggccacaagag

SEQ ID NO: 232524 - DNA, 25 bp, probe
gattgggtcccacataaagcagtca

SEQ ID NO: 232525 - DNA, 25 bp, probe
gattgaggttcctggacagatcagg

SEQ ID NO: 232526 - DNA, 25 bp, probe
gttggctgttcctgcagtagaatgg

SEQ ID NO: 232527 - DNA, 25 bp, probe
gttgtatggacctgcagtcgactgg

SEQ ID NO: 232528 - DNA, 25 bp, probe
gttgtatggacctgcagtcgactgg

SEQ ID NO: 232529 - DNA, 25 bp, probe
gttggtgaaaaggcttggcgctggg

SEQ ID NO: 232530 - DNA, 25 bp, probe
gttggctgaaaagactgtgttggga

SEQ ID NO: 232531 - DNA, 25 bp, probe
gttggctaaaagaagtgggttatgt

SEQ ID NO: 232532 - DNA, 25 bp, probe
gttggcaaaacaatagggggagatt

SEQ ID NO: 232533 - DNA, 25 bp, probe
gttggcaaaaacagccttctagcac

SEQ ID NO: 232534 - DNA, 25 bp, probe
gttgagctcaaatcccaacttagcc

SEQ ID NO: 232535 - DNA, 25 bp, probe
gttggtcatgcagcattaaactttg

SEQ ID NO: 232536 - DNA, 25 bp, probe
gttggttggcttgaaatgcatagcg

SEQ ID NO: 232537 - DNA, 25 bp, probe
gttgcgttggtcgggatgattacag

SEQ ID NO: 232538 - DNA, 25 bp, probe
gttgcagttaactggggtatcagct

SEQ ID NO: 232539 - DNA, 25 bp, probe
gttggctttgacctggaggaattct

SEQ ID NO: 232540 - DNA, 25 bp, probe
gttggctttgtttggatgtaattta

SEQ ID NO: 232541 - DNA, 25 bp, probe
gttggctttgtttggatgtaattta

SEQ ID NO: 232542 - DNA, 25 bp, probe
gttggccttattttatgatcctttt

SEQ ID NO: 232543 - DNA, 25 bp, probe
gttggccttattttatgatcctttt

SEQ ID NO: 232544 - DNA, 25 bp, probe
gttccacgtgttttattcctgtatg

SEQ ID NO: 232545 - DNA, 25 bp, probe
gttgtcttattcctaattcctgtat

SEQ ID NO: 232546 - DNA, 25 bp, probe
gttgtcttattcctaattcctgtat

SEQ ID NO: 232547 - DNA, 25 bp, probe
gtgcgccttaaacaattcttgtaac

SEQ ID NO: 232548 - DNA, 25 bp, probe
gttgccctggaagacatttatgaaa

SEQ ID NO: 232549 - DNA, 25 bp, probe
gattcctttgagtaagacttcaaaa

SEQ ID NO: 232550 - DNA, 25 bp, probe
gattcctgattgcctggattcctta

SEQ ID NO: 232551 - DNA, 25 bp, probe
gattcctgattgcctggattcctta

SEQ ID NO: 232552 - DNA, 25 bp, probe
gattgcctgatgggtgtttacttgt

SEQ ID NO: 232553 - DNA, 25 bp, probe
gattgcctgatgggtgtttacttgt

SEQ ID NO: 232554 - DNA, 25 bp, probe
gattcgctgtcagtttttcacttat

SEQ ID NO: 232555 - DNA, 25 bp, probe
gattgcctcacagttgtttgtttac

SEQ ID NO: 232556 - DNA, 25 bp, probe
gattccaaagtcctttctttatact

SEQ ID NO: 232557 - DNA, 25 bp, probe
gattccaaagtcctttctttatact

SEQ ID NO: 232558 - DNA, 25 bp, probe
gattccaaagtcctttctttatact

SEQ ID NO: 232559 - DNA, 25 bp, probe
gttgccagaagtatttcctttcctt

SEQ ID NO: 232560 - DNA, 25 bp, probe
gttgtagacgttgtgtaatgtgttt

SEQ ID NO: 232561 - DNA, 25 bp, probe
gttataggttctgagctgaactgtt

SEQ ID NO: 232562 - DNA, 25 bp, probe
gttcaatggatcccggggacatgat

SEQ ID NO: 232563 - DNA, 25 bp, probe
gttgcagtgaatgggctgggggtgg

SEQ ID NO: 232564 - DNA, 25 bp, probe
gattgccttacgctcgtgagcgtga

SEQ ID NO: 232565 - DNA, 25 bp, probe
gattgccactcctgtttcagaggaa

SEQ ID NO: 232566 - DNA, 25 bp, probe
gattccagtggttctgcttcaaggc

SEQ ID NO: 232567 - DNA, 25 bp, probe
gattgctagcattgaactgtattat

SEQ ID NO: 232568 - DNA, 25 bp, probe
gattgccagagtcatgcttttacat

SEQ ID NO: 232569 - DNA, 25 bp, probe
gttggcagagcttttgcatttcctg

SEQ ID NO: 232570 - DNA, 25 bp, probe
gttgtgcagagttgctggactttat

SEQ ID NO: 232571 - DNA, 25 bp, probe
gttgtgcagagttgctggactttat

SEQ ID NO: 232572 - DNA, 25 bp, probe
gattgatgagagtgtccatgctctt

SEQ ID NO: 232573 - DNA, 25 bp, probe
gattgcatttcatgatccagagctg

SEQ ID NO: 232574 - DNA, 25 bp, probe
gttgcatttccgtaaagtttgtcac

SEQ ID NO: 232575 - DNA, 25 bp, probe
gattgtttccgtaagcagtatgagg

SEQ ID NO: 232576 - DNA, 25 bp, probe
gttttttagtcatggcttatggaac

SEQ ID NO: 232577 - DNA, 25 bp, probe
gattgtttttagtcttgcttgagga

SEQ ID NO: 232578 - DNA, 25 bp, probe
gttggttttgcatgtctgcatgaag

SEQ ID NO: 232579 - DNA, 25 bp, probe
gattgtgttttgtcactctagaaga

SEQ ID NO: 232580 - DNA, 25 bp, probe
gattgaggatcaggggttagaagac

SEQ ID NO: 232581 - DNA, 25 bp, probe
gattgagtctagaggtcttaattct

SEQ ID NO: 232582 - DNA, 25 bp, probe
gattccatatggaggcctgaaaatt

SEQ ID NO: 232583 - DNA, 25 bp, probe
gattgcaactggcctggccgcaaca

SEQ ID NO: 232584 - DNA, 25 bp, probe
gattgatattgtgagcagccagaag

SEQ ID NO: 232585 - DNA, 25 bp, probe
gattgagaactcttcagccatgatt

SEQ ID NO: 232586 - DNA, 25 bp, probe
gattgtgcacatacttgagactgtt

SEQ ID NO: 232587 - DNA, 25 bp, probe
gattgtgcagatgactgaagcagaa

SEQ ID NO: 232588 - DNA, 25 bp, probe
gttgcatatgtggactgcagaagaa

SEQ ID NO: 232589 - DNA, 25 bp, probe
gttgccatggcaatctttagtgcac

SEQ ID NO: 232590 - DNA, 25 bp, probe
gttgccatggcaatctttagtgcac

SEQ ID NO: 232591 - DNA, 25 bp, probe
gattgacacgatatctcgagctgcc

SEQ ID NO: 232592 - DNA, 25 bp, probe
gattgacacgatatctcgagctgcc

SEQ ID NO: 232593 - DNA, 25 bp, probe
gattgacataaactctttgtgcctt

SEQ ID NO: 232594 - DNA, 25 bp, probe
gattgccacatgtcacttatttgct

SEQ ID NO: 232595 - DNA, 25 bp, probe
gattgtactctagttagatctgcag

SEQ ID NO: 232596 - DNA, 25 bp, probe
gttgtactgctgttcattgcattgc

SEQ ID NO: 232597 - DNA, 25 bp, probe
gattgcttgggaattggcatgatgc

SEQ ID NO: 232598 - DNA, 25 bp, probe
gattgcattgggaccagtcatttcc

SEQ ID NO: 232599 - DNA, 25 bp, probe
gattgcattgggaccagtcatttcc

SEQ ID NO: 232600 - DNA, 25 bp, probe
gttgcattttattcgtcattacctg

SEQ ID NO: 232601 - DNA, 25 bp, probe
gattgttttaaccattaacttgtca

SEQ ID NO: 232602 - DNA, 25 bp, probe
gttgtttgaaacataactcactgtt

SEQ ID NO: 232603 - DNA, 25 bp, probe
gattgttatgatcacaaaactcaaa

SEQ ID NO: 232604 - DNA, 25 bp, probe
gttgtctttcaatacaggcataaac

SEQ ID NO: 232605 - DNA, 25 bp, probe
gttgcttttaagttatggcaattat

SEQ ID NO: 232606 - DNA, 25 bp, probe
gattgttttagtgttggcagtaatg

SEQ ID NO: 232607 - DNA, 25 bp, probe
gttgtatgtgtggtgacttgcggat

SEQ ID NO: 232608 - DNA, 25 bp, probe
gttgtttgtgtgttctatgggaccc

SEQ ID NO: 232609 - DNA, 25 bp, probe
gattgatcttgtggcttatggggac

SEQ ID NO: 232610 - DNA, 25 bp, probe
gattgatcttgtggcttatggggac

SEQ ID NO: 232611 - DNA, 25 bp, probe
gttgtatgctgtggtttcagaggag

SEQ ID NO: 232612 - DNA, 25 bp, probe
gttccagcttggactcatgaaggat

SEQ ID NO: 232613 - DNA, 25 bp, probe
gttccagcttggactcatgaaggat

SEQ ID NO: 232614 - DNA, 25 bp, probe
gttgtcatgtgctgacacaaagcct

SEQ ID NO: 232615 - DNA, 25 bp, probe
gattgctctggagcagccaaggccg

SEQ ID NO: 232616 - DNA, 25 bp, probe
gattgaggagaccatagcaagccac

SEQ ID NO: 232617 - DNA, 25 bp, probe
gattgaagagagacagtacatgccc

SEQ ID NO: 232618 - DNA, 25 bp, probe
gattgtggatagactgtgcctgaca

SEQ ID NO: 232619 - DNA, 25 bp, probe
gattgtggatagactgtgcctgaca

SEQ ID NO: 232620 - DNA, 25 bp, probe
gattgggatgtgtctgagctgaggc

SEQ ID NO: 232621 - DNA, 25 bp, probe
gttgttgttggcaagctgcaggttt

SEQ ID NO: 232622 - DNA, 25 bp, probe
gattgttgctattaagcaagttcct

SEQ ID NO: 232623 - DNA, 25 bp, probe
gttggatgattatagcaggttcctg

SEQ ID NO: 232624 - DNA, 25 bp, probe
gttgtgtgaagacagcggatttcgg

SEQ ID NO: 232625 - DNA, 25 bp, probe
gttgatggaggtcacgattctgtca

SEQ ID NO: 232626 - DNA, 25 bp, probe
gttgagaaactcactttagacaatg

SEQ ID NO: 232627 - DNA, 25 bp, probe
gttgcaataaccactgcttccaagt

SEQ ID NO: 232628 - DNA, 25 bp, probe
gttgcaatgaaaaccagtctgcggt

SEQ ID NO: 232629 - DNA, 25 bp, probe
gttgcaatgaaaaccagtctgcggt

SEQ ID NO: 232630 - DNA, 25 bp, probe
gttgaagcataatcccagccagagg

SEQ ID NO: 232631 - DNA, 25 bp, probe
gattgcaaatactgcccgcaaagct

SEQ ID NO: 232632 - DNA, 25 bp, probe
gttgagaaagaaccaccaaagatct

SEQ ID NO: 232633 - DNA, 25 bp, probe
gttatgaaagagtagccagcaaggt

SEQ ID NO: 232634 - DNA, 25 bp, probe
gttatgaaagagtagccagcaaggt

SEQ ID NO: 232635 - DNA, 25 bp, probe
gttagggacagctatccccaggtta

SEQ ID NO: 232636 - DNA, 25 bp, probe
tgtctaagtacgcacggccggtaca

SEQ ID NO: 232637 - DNA, 25 bp, probe
gtctaagtacgcacggccggtacag

SEQ ID NO: 232638 - DNA, 25 bp, probe
gttgaaaatcgggcccggaattcag

SEQ ID NO: 232639 - DNA, 25 bp, probe
gttgccaaatatgtcctggggtata

SEQ ID NO: 232640 - DNA, 25 bp, probe
gattgaagaactgatccaggggaca

SEQ ID NO: 232641 - DNA, 25 bp, probe
gattgaagccatcaacaatggggac

SEQ ID NO: 232642 - DNA, 25 bp, probe
gttcaagccatagagttggggcctc

SEQ ID NO: 232643 - DNA, 25 bp, probe
gttcaagccatagagttggggcctc

SEQ ID NO: 232644 - DNA, 25 bp, probe
gttggcagaaaggatgttttgtccc

SEQ ID NO: 232645 - DNA, 25 bp, probe
gttggcagaaaggatgttttgtccc

SEQ ID NO: 232646 - DNA, 25 bp, probe
gttggtggatagaatgtctttgccc

SEQ ID NO: 232647 - DNA, 25 bp, probe
gttccgtgattgcaaattatgacct

SEQ ID NO: 232648 - DNA, 25 bp, probe
gttctccgtggtggaattgaccgaa

SEQ ID NO: 232649 - DNA, 25 bp, probe
gttccgattggtggtaaaagctgac

SEQ ID NO: 232650 - DNA, 25 bp, probe
gttccgattggtggtaaaagctgac

SEQ ID NO: 232651 - DNA, 25 bp, probe
gttcccatttttataaatctgagca

SEQ ID NO: 232652 - DNA, 25 bp, probe
gttggagtttttatggactctcaga

SEQ ID NO: 232653 - DNA, 25 bp, probe
gttgtggtctttttaatcacctcgt

SEQ ID NO: 232654 - DNA, 25 bp, probe
gttgtaggtttattctatcctctcc

SEQ ID NO: 232655 - DNA, 25 bp, probe
gttgtagacttaacacttcttacgc

SEQ ID NO: 232656 - DNA, 25 bp, probe
gattggaagggaacctgtcctgaca

SEQ ID NO: 232657 - DNA, 25 bp, probe
gattggaatgaattatcctgccttg

SEQ ID NO: 232658 - DNA, 25 bp, probe
gttggcaaggagtctgcctccatgc

SEQ ID NO: 232659 - DNA, 25 bp, probe
gattgcactgaggatatctccccag

SEQ ID NO: 232660 - DNA, 25 bp, probe
gattgcactggctgcattcacaacg

SEQ ID NO: 232661 - DNA, 25 bp, probe
gattgacagtcatgattggcagccg

SEQ ID NO: 232662 - DNA, 25 bp, probe
gattgcaagcattagctatcacagc

SEQ ID NO: 232663 - DNA, 25 bp, probe
gattgcaagcattagctatcacagc

SEQ ID NO: 232664 - DNA, 25 bp, probe
gattgcaagtgattgcttccgtttt

SEQ ID NO: 232665 - DNA, 25 bp, probe
gattgcaagtgattgcttccgtttt

SEQ ID NO: 232666 - DNA, 25 bp, probe
gttgggcatgattctacccttattc

SEQ ID NO: 232667 - DNA, 25 bp, probe
gttgggcatgacatggggttttgca

SEQ ID NO: 232668 - DNA, 25 bp, probe
gttggtatgccaatggagcagctag

SEQ ID NO: 232669 - DNA, 25 bp, probe
gttggtatgccaatggagcagctag

SEQ ID NO: 232670 - DNA, 25 bp, probe
gttgcactacctcggccatgtcatg

SEQ ID NO: 232671 - DNA, 25 bp, probe
gattgacagacacctaatattcatg

SEQ ID NO: 232672 - DNA, 25 bp, probe
gattgacagaagcttctgcccacct

SEQ ID NO: 232673 - DNA, 25 bp, probe
gattgacagaagcttctgcccacct

SEQ ID NO: 232674 - DNA, 25 bp, probe
gattgatgaggacatgactgcccga

SEQ ID NO: 232675 - DNA, 25 bp, probe
gattgtgacagagaggctgcccact

SEQ ID NO: 232676 - DNA, 25 bp, probe
gttgttagaacaggagcccactttg

SEQ ID NO: 232677 - DNA, 25 bp, probe
gttgttagaacaggagcccactttg

SEQ ID NO: 232678 - DNA, 25 bp, probe
gttggtcaaagcggagaccacgtgt

SEQ ID NO: 232679 - DNA, 25 bp, probe
gttgatgaaaacagagacccgctta

SEQ ID NO: 232680 - DNA, 25 bp, probe
gttgggagagaaaggccctcagctt

SEQ ID NO: 232681 - DNA, 25 bp, probe
gttgggaagactctcatactccatc

SEQ ID NO: 232682 - DNA, 25 bp, probe
gttgtggaagacagaatcatctcct

SEQ ID NO: 232683 - DNA, 25 bp, probe
gattgtggggaacagactccccggg

SEQ ID NO: 232684 - DNA, 25 bp, probe
gttgtggtggaacagcaaccggtgc

SEQ ID NO: 232685 - DNA, 25 bp, probe
gttgatggggaaaacaccttggata

SEQ ID NO: 232686 - DNA, 25 bp, probe
gttctgggctaatatacttgtaaaa

SEQ ID NO: 232687 - DNA, 25 bp, probe
gttggggaaaggcacactgttataa

SEQ ID NO: 232688 - DNA, 25 bp, probe
gttggaccacgagggtcactgtaaa

SEQ ID NO: 232689 - DNA, 25 bp, probe
gttgtacgactatcttcagcttact

SEQ ID NO: 232690 - DNA, 25 bp, probe
gttgcaaaattatctccagacttct

SEQ ID NO: 232691 - DNA, 25 bp, probe
gattgttgtatttattccactattt

SEQ ID NO: 232692 - DNA, 25 bp, probe
gattgatctgtttgtaattacttgt

SEQ ID NO: 232693 - DNA, 25 bp, probe
gattgtgcagttggttgataacatt

SEQ ID NO: 232694 - DNA, 25 bp, probe
gattgtgcagttggttgataacatt

SEQ ID NO: 232695 - DNA, 25 bp, probe
gattgtctggatgtggaagagctta

SEQ ID NO: 232696 - DNA, 25 bp, probe
gattgacgacaagtgctgaacagtg

SEQ ID NO: 232697 - DNA, 25 bp, probe
gttggctcacagggctgaaaggggc

SEQ ID NO: 232698 - DNA, 25 bp, probe
gattgtgccaagcgcaaaagctggg

SEQ ID NO: 232699 - DNA, 25 bp, probe
gttggcaaagggtgaagctgtgaag

SEQ ID NO: 232700 - DNA, 25 bp, probe
gttggaaagagctaatgaggcttac

SEQ ID NO: 232701 - DNA, 25 bp, probe
gttgtgaaatcagactgcaccctga

SEQ ID NO: 232702 - DNA, 25 bp, probe
gttgtgaaatactcttccaaaagcc

SEQ ID NO: 232703 - DNA, 25 bp, probe
gttgtgaatttctgtctcaaaatgt

SEQ ID NO: 232704 - DNA, 25 bp, probe
gttggttgttctggccaacaatatg

SEQ ID NO: 232705 - DNA, 25 bp, probe
gttgggttcctgaatgcaccataat

SEQ ID NO: 232706 - DNA, 25 bp, probe
gttccaggttgatatcacctacacg

SEQ ID NO: 232707 - DNA, 25 bp, probe
gttccaggttgatatcacctacacg

SEQ ID NO: 232708 - DNA, 25 bp, probe
gttgacatgagtaccaaccgccgac

SEQ ID NO: 232709 - DNA, 25 bp, probe
gttggcagagaaggcagaccgaaga

SEQ ID NO: 232710 - DNA, 25 bp, probe
gttgtgcgtgggggacccagagatt

SEQ ID NO: 232711 - DNA, 25 bp, probe
gttggagtccgcagagcactcggaa

SEQ ID NO: 232712 - DNA, 25 bp, probe
gttgaagtcttgagaactgatgtaa

SEQ ID NO: 232713 - DNA, 25 bp, probe
gttgtagtttgcacagacttttatg

SEQ ID NO: 232714 - DNA, 25 bp, probe
gttgtagtttgcacagacttttatg

SEQ ID NO: 232715 - DNA, 25 bp, probe
gttgtagtttatgtacttcttgata

SEQ ID NO: 232716 - DNA, 25 bp, probe
gttgtagttcttgtgcatgtttact

SEQ ID NO: 232717 - DNA, 25 bp, probe
gttgtcagtgaaactactttggatt

SEQ ID NO: 232718 - DNA, 25 bp, probe
gttggctctacaaataccattggaa

SEQ ID NO: 232719 - DNA, 25 bp, probe
gattggcctccaatcaaacctgaac

SEQ ID NO: 232720 - DNA, 25 bp, probe
gttgccccaaatacaagcacaaatc

SEQ ID NO: 232721 - DNA, 25 bp, probe
gttgccccaaatacaagcacaaatc

SEQ ID NO: 232722 - DNA, 25 bp, probe
gttcacccgtaatgagaaacttcga

SEQ ID NO: 232723 - DNA, 25 bp, probe
gttaatctgggttcggaaaattcat

SEQ ID NO: 232724 - DNA, 25 bp, probe
gttcgacatagtgacggaagcaaat

SEQ ID NO: 232725 - DNA, 25 bp, probe
gttcgacatagtgacggaagcaaat

SEQ ID NO: 232726 - DNA, 25 bp, probe
gttagtcaggtaatcatggaaaagt

SEQ ID NO: 232727 - DNA, 25 bp, probe
gttagtcaggtaatcatggaaaagt

SEQ ID NO: 232728 - DNA, 25 bp, probe
gttctgtctaaaaaccagacaagga

SEQ ID NO: 232729 - DNA, 25 bp, probe
gttcgacgggcgagacgccaaggcc

SEQ ID NO: 232730 - DNA, 25 bp, probe
gttcttcggggatgtctggaaaaca

SEQ ID NO: 232731 - DNA, 25 bp, probe
gtttcgagggtgaggtgaaggccaa

SEQ ID NO: 232732 - DNA, 25 bp, probe
gttgactgggggaggtgaatcacaa

SEQ ID NO: 232733 - DNA, 25 bp, probe
gttgactgggggaggtgaatcacaa

SEQ ID NO: 232734 - DNA, 25 bp, probe
gttgtccaaggaaatgtagaatcac

SEQ ID NO: 232735 - DNA, 25 bp, probe
gattggcccaggaggaaaacacgac

SEQ ID NO: 232736 - DNA, 25 bp, probe
gttggctacggatttgaaagcacag

SEQ ID NO: 232737 - DNA, 25 bp, probe
gtctggtaacggtaacaacaatgga

SEQ ID NO: 232738 - DNA, 25 bp, probe
gttaaacagcagcaacactaaaaag

SEQ ID NO: 232739 - DNA, 25 bp, probe
gttatgatgacctggcaacaaaaaa

SEQ ID NO: 232740 - DNA, 25 bp, probe
gttgctagacactgcgaaaccaagc

SEQ ID NO: 232741 - DNA, 25 bp, probe
gttgcagcaacctgtgacaggatca

SEQ ID NO: 232742 - DNA, 25 bp, probe
gttgcaggactatgttcagaaaacc

SEQ ID NO: 232743 - DNA, 25 bp, probe
gttgagaatccatggcttaacccac

SEQ ID NO: 232744 - DNA, 25 bp, probe
gttgagacattctggctttttcttt

SEQ ID NO: 232745 - DNA, 25 bp, probe
gttgagtcaagcttgggcttttttc

SEQ ID NO: 232746 - DNA, 25 bp, probe
gttgagattgacttggagctcttcg

SEQ ID NO: 232747 - DNA, 25 bp, probe
gttggcgctgacttgaagtctgtta

SEQ ID NO: 232748 - DNA, 25 bp, probe
gttgatgggcacttgagaactttcc

SEQ ID NO: 232749 - DNA, 25 bp, probe
gttgatgtggacatgagccatttga

SEQ ID NO: 232750 - DNA, 25 bp, probe
gttgagggcaaaagactatggactg

SEQ ID NO: 232751 - DNA, 25 bp, probe
gttgaggagaacagcatgaaggcag

SEQ ID NO: 232752 - DNA, 25 bp, probe
gttgaggagaacagcatgaaggcag

SEQ ID NO: 232753 - DNA, 25 bp, probe
gttgagggaagcactgatgccaagg

SEQ ID NO: 232754 - DNA, 25 bp, probe
gttgagggaagcactgatgccaagg

SEQ ID NO: 232755 - DNA, 25 bp, probe
gttgaggggagcatgcttccctgca

SEQ ID NO: 232756 - DNA, 25 bp, probe
gttgaggaggagacgctcactttcg

SEQ ID NO: 232757 - DNA, 25 bp, probe
gttgaggaggagacgctcactttcg

SEQ ID NO: 232758 - DNA, 25 bp, probe
gttgagggggatactctgtttatga

SEQ ID NO: 232759 - DNA, 25 bp, probe
gttgagaatggaatcctctgtggat

SEQ ID NO: 232760 - DNA, 25 bp, probe
gttgaaattgcaagaatcgggaaga

SEQ ID NO: 232761 - DNA, 25 bp, probe
gttgagtttcattgcataccggata

SEQ ID NO: 232762 - DNA, 25 bp, probe
gttgtgtccagattaagggagataa

SEQ ID NO: 232763 - DNA, 25 bp, probe
gttgtgtccagattaagggagataa

SEQ ID NO: 232764 - DNA, 25 bp, probe
gttggttgcagtgaatgggctgggg

SEQ ID NO: 232765 - DNA, 25 bp, probe
gttggatatccaaaatggccgtgca

SEQ ID NO: 232766 - DNA, 25 bp, probe
gttgtatatttgtaagatgacagat

SEQ ID NO: 232767 - DNA, 25 bp, probe
gattgttctttgttatagagtatgt

SEQ ID NO: 232768 - DNA, 25 bp, probe
gattgttctactgcatgtgaagtgg

SEQ ID NO: 232769 - DNA, 25 bp, probe
gttgctttcactgcaccatcagtgc

SEQ ID NO: 232770 - DNA, 25 bp, probe
gattgttgtacagcctctcaggaga

SEQ ID NO: 232771 - DNA, 25 bp, probe
gattgatttacggcgctaaggatga

SEQ ID NO: 232772 - DNA, 25 bp, probe
gttgatttcagcacctacagtgtac

SEQ ID NO: 232773 - DNA, 25 bp, probe
gttgattgtaaacccacagtatcta

SEQ ID NO: 232774 - DNA, 25 bp, probe
gttgttgataaattaaatgacttga

SEQ ID NO: 232775 - DNA, 25 bp, probe
gttgtggaaattatactgagtatgc

SEQ ID NO: 232776 - DNA, 25 bp, probe
gttgaccaataaaatatctagtgat

SEQ ID NO: 232777 - DNA, 25 bp, probe
gttgtaccaaaattcatctgtctat

SEQ ID NO: 232778 - DNA, 25 bp, probe
gttgtcctgtgggattcatcttcaa

SEQ ID NO: 232779 - DNA, 25 bp, probe
gttgtcctgtgggattcatcttcaa

SEQ ID NO: 232780 - DNA, 25 bp, probe
gttgctccgagagtgtttctccaag

SEQ ID NO: 232781 - DNA, 25 bp, probe
gttgtgtgccagtctggtcccaaac

SEQ ID NO: 232782 - DNA, 25 bp, probe
gttgattgggccatatgcccacaac

SEQ ID NO: 232783 - DNA, 25 bp, probe
gttgatggggccagatgagccagca

SEQ ID NO: 232784 - DNA, 25 bp, probe
gttgatggcgagtggtgctgaaggg

SEQ ID NO: 232785 - DNA, 25 bp, probe
gttgtgaggaagctcctgaaggtca

SEQ ID NO: 232786 - DNA, 25 bp, probe
gttgttggcaagctgcaggtttgta

SEQ ID NO: 232787 - DNA, 25 bp, probe
gttctcggtacttaggacttgatcc

SEQ ID NO: 232788 - DNA, 25 bp, probe
gttggcggttcttagagcagatgtg

SEQ ID NO: 232789 - DNA, 25 bp, probe
gttggcagagatttccaagaaaagt

SEQ ID NO: 232790 - DNA, 25 bp, probe
gttgctgaggatgtcacatataaga

SEQ ID NO: 232791 - DNA, 25 bp, probe
gattgtgatgagagacagctttgga

SEQ ID NO: 232792 - DNA, 25 bp, probe
gattgtgatgagagacagctttgga

SEQ ID NO: 232793 - DNA, 25 bp, probe
gttgtggagggaagtgctgctagat

SEQ ID NO: 232794 - DNA, 25 bp, probe
gttgtgtcatgttaatgtgcctaat

SEQ ID NO: 232795 - DNA, 25 bp, probe
gttggcatcatgctaggttgctaaa

SEQ ID NO: 232796 - DNA, 25 bp, probe
gttggcaagctgcaggtttgtaatg

SEQ ID NO: 232797 - DNA, 25 bp, probe
gttgcagactcagtagcgttttagt

SEQ ID NO: 232798 - DNA, 25 bp, probe
gtaggcctcctaagtctaatattta

SEQ ID NO: 232799 - DNA, 25 bp, probe
gttgccccactaaggaatcacttta

SEQ ID NO: 232800 - DNA, 25 bp, probe
gttggcaccaaacgctatatgcctc

SEQ ID NO: 232801 - DNA, 25 bp, probe
gttggattgcaatatctgaagccct

SEQ ID NO: 232802 - DNA, 25 bp, probe
gttggttcaatttcatgtcatcact

SEQ ID NO: 232803 - DNA, 25 bp, probe
gttgcgttgcagaggcatttttcct

SEQ ID NO: 232804 - DNA, 25 bp, probe
gttggtgctggtactgtgttatctc

SEQ ID NO: 232805 - DNA, 25 bp, probe
gttgtgtgcaggatctgtttgccca

SEQ ID NO: 232806 - DNA, 25 bp, probe
gttgtgtgcaggatctgtttgccca

SEQ ID NO: 232807 - DNA, 25 bp, probe
gttcatagccgtctgttatgccttt

SEQ ID NO: 232808 - DNA, 25 bp, probe
gttgcattgtccttttagtgcctta

SEQ ID NO: 232809 - DNA, 25 bp, probe
gttggacatctctagtgtagctgcc

SEQ ID NO: 232810 - DNA, 25 bp, probe
gttggagactctgattgtcatgcca

SEQ ID NO: 232811 - DNA, 25 bp, probe
gattgtggacaccacatttgaggct

SEQ ID NO: 232812 - DNA, 25 bp, probe
gattgtgggcactctgtgtgccatt

SEQ ID NO: 232813 - DNA, 25 bp, probe
gttgtgttcactacattgtgcaatt

SEQ ID NO: 232814 - DNA, 25 bp, probe
gttgggctttccactgagatctact

SEQ ID NO: 232815 - DNA, 25 bp, probe
gttgggagatggccattctaactac

SEQ ID NO: 232816 - DNA, 25 bp, probe
gttggctagcaaccatactatatcc

SEQ ID NO: 232817 - DNA, 25 bp, probe
gttggcaatcaaagcatgcacttgt

SEQ ID NO: 232818 - DNA, 25 bp, probe
gattggatacagatatgaacgtgca

SEQ ID NO: 232819 - DNA, 25 bp, probe
gttggatacaggatacagtggtgag

SEQ ID NO: 232820 - DNA, 25 bp, probe
gttggatacaggatacagtggtgag

SEQ ID NO: 232821 - DNA, 25 bp, probe
gttggacaagggaatacggagagaa

SEQ ID NO: 232822 - DNA, 25 bp, probe
gttctaaaggtggtgaggcaataaa

SEQ ID NO: 232823 - DNA, 25 bp, probe
gttctaaaggtggtgaggcaataaa

SEQ ID NO: 232824 - DNA, 25 bp, probe
gttcattaagttctgaatgttaaac

SEQ ID NO: 232825 - DNA, 25 bp, probe
gttcacaattttcaccatttaaaca

SEQ ID NO: 232826 - DNA, 25 bp, probe
gttcctcttatataccagtttatcc

SEQ ID NO: 232827 - DNA, 25 bp, probe
gttctttccattcaccagaccattc

SEQ ID NO: 232828 - DNA, 25 bp, probe
gttgcttactgaacgccaaaacttc

SEQ ID NO: 232829 - DNA, 25 bp, probe
gttgttctgtgctcctaatgacact

SEQ ID NO: 232830 - DNA, 25 bp, probe
gttgtgttgtcacccaagagattgt

SEQ ID NO: 232831 - DNA, 25 bp, probe
gttgtattggcccataacaatttgg

SEQ ID NO: 232832 - DNA, 25 bp, probe
gttgcttcatggactaaaagatcta

SEQ ID NO: 232833 - DNA, 25 bp, probe
gttgatgtcttgtgaacagagatat

SEQ ID NO: 232834 - DNA, 25 bp, probe
gttggtctatgattgacaagtacca

SEQ ID NO: 232835 - DNA, 25 bp, probe
gttcgactatgagtacgactgggcc

SEQ ID NO: 232836 - DNA, 25 bp, probe
gttgcgccttcaggaggatgcggac

SEQ ID NO: 232837 - DNA, 25 bp, probe
gttggcactggagtcaggcaggttc

SEQ ID NO: 232838 - DNA, 25 bp, probe
gttcgagcgcgaccaggtggacgcg

SEQ ID NO: 232839 - DNA, 25 bp, probe
gttcaggaggagacagtcaggaagc

SEQ ID NO: 232840 - DNA, 25 bp, probe
gttcgagaagcagtcagagcggcat

SEQ ID NO: 232841 - DNA, 25 bp, probe
gtatcggtagctggagcctgtgcac

SEQ ID NO: 232842 - DNA, 25 bp, probe
gttgctggttgtggactatgccacc

SEQ ID NO: 232843 - DNA, 25 bp, probe
gttggagtgggcatcacagccaggg

SEQ ID NO: 232844 - DNA, 25 bp, probe
gttggagtgggcatcacagccaggg

SEQ ID NO: 232845 - DNA, 25 bp, probe
gattggagttggatcagtcacttgg

SEQ ID NO: 232846 - DNA, 25 bp, probe
gttggcagtaggaatcattgcagca

SEQ ID NO: 232847 - DNA, 25 bp, probe
gattggcatgttcatactttattct

SEQ ID NO: 232848 - DNA, 25 bp, probe
gttgtgagtttaccttgtatactgt

SEQ ID NO: 232849 - DNA, 25 bp, probe
gttggtcaattaccgtggcacactt

SEQ ID NO: 232850 - DNA, 25 bp, probe
gttggagagttctcggagccatttg

SEQ ID NO: 232851 - DNA, 25 bp, probe
gttggaagtagctgttagccttgct

SEQ ID NO: 232852 - DNA, 25 bp, probe
gttgtgacagaagagtttcttttca

SEQ ID NO: 232853 - DNA, 25 bp, probe
gttgtaggaataagtttctaatgta

SEQ ID NO: 232854 - DNA, 25 bp, probe
gttggaagcaacatttttgacatca

SEQ ID NO: 232855 - DNA, 25 bp, probe
gttgtgccagcagagttgggtgtcc

SEQ ID NO: 232856 - DNA, 25 bp, probe
gttgtgccagcagagttgggtgtcc

SEQ ID NO: 232857 - DNA, 25 bp, probe
gttgctgccatagagttgatggttt

SEQ ID NO: 232858 - DNA, 25 bp, probe
gttgtcacaggatgtttctgttgat

SEQ ID NO: 232859 - DNA, 25 bp, probe
gttgataatggttgttctcaatctt

SEQ ID NO: 232860 - DNA, 25 bp, probe
gttatgcaatggacctgattctagt

SEQ ID NO: 232861 - DNA, 25 bp, probe
gttgcagcaattcactgtaaagctg

SEQ ID NO: 232862 - DNA, 25 bp, probe
gttgagtgcagcctgttgtcaaagc

SEQ ID NO: 232863 - DNA, 25 bp, probe
gttgagtgcagcctgttgtcaaagc

SEQ ID NO: 232864 - DNA, 25 bp, probe
gttgcagtgcattgcgttgtggaat

SEQ ID NO: 232865 - DNA, 25 bp, probe
gttgcagtcttgcgtgtggatggtg

SEQ ID NO: 232866 - DNA, 25 bp, probe
gttgcagtcttgcgtgtggatggtg

SEQ ID NO: 232867 - DNA, 25 bp, probe
gttgagctggcctagcgatggaggg

SEQ ID NO: 232868 - DNA, 25 bp, probe
gttgatgtgcccttgaataccaggg

SEQ ID NO: 232869 - DNA, 25 bp, probe
gttggatggctcttgaaagtctggt

SEQ ID NO: 232870 - DNA, 25 bp, probe
gttgagtgttttcagcagctgctcc

SEQ ID NO: 232871 - DNA, 25 bp, probe
gttgtgtgtgttaggcagagctcct

SEQ ID NO: 232872 - DNA, 25 bp, probe
gttgtgtgtgttaggcagagctcct

SEQ ID NO: 232873 - DNA, 25 bp, probe
gttggtgtgaaattggagcctctcg

SEQ ID NO: 232874 - DNA, 25 bp, probe
gttggctctgactgtggagcctcct

SEQ ID NO: 232875 - DNA, 25 bp, probe
gattggcttaatagttgaccttctg

SEQ ID NO: 232876 - DNA, 25 bp, probe
gattggctggagtggctgggtttgg

SEQ ID NO: 232877 - DNA, 25 bp, probe
gattggctggagtggctgggtttgg

SEQ ID NO: 232878 - DNA, 25 bp, probe
gattggcatagggcggtgggattaa

SEQ ID NO: 232879 - DNA, 25 bp, probe
gtagaatagcctgtggcctttgcaa

SEQ ID NO: 232880 - DNA, 25 bp, probe
gtagaatagcctgtggcctttgcaa

SEQ ID NO: 232881 - DNA, 25 bp, probe
gttgaatagcttgcggccaggacaa

SEQ ID NO: 232882 - DNA, 25 bp, probe
gttgaatcaaagccggaaatacatc

SEQ ID NO: 232883 - DNA, 25 bp, probe
gttgaatcaaagccggaaatacatc

SEQ ID NO: 232884 - DNA, 25 bp, probe
gttaaccagttgcactacataatct

SEQ ID NO: 232885 - DNA, 25 bp, probe
gttgctatacagttaactcccattt

SEQ ID NO: 232886 - DNA, 25 bp, probe
gttgctatacagttaactcccattt

SEQ ID NO: 232887 - DNA, 25 bp, probe
gttgtatacagtagtgactcccatg

SEQ ID NO: 232888 - DNA, 25 bp, probe
gttgaaacaggggcccatcatcatg

SEQ ID NO: 232889 - DNA, 25 bp, probe
gttgggacagcggctgttaatatgt

SEQ ID NO: 232890 - DNA, 25 bp, probe
gttgggtgcactacttctaaggatg

SEQ ID NO: 232891 - DNA, 25 bp, probe
gttgagggcgccattctgaagaaag

SEQ ID NO: 232892 - DNA, 25 bp, probe
gttggtgtaccacgtggaaaatgag

SEQ ID NO: 232893 - DNA, 25 bp, probe
gttggcatgtacgtgggtgggaaga

SEQ ID NO: 232894 - DNA, 25 bp, probe
gttgccaaactggtggtttgaaagc

SEQ ID NO: 232895 - DNA, 25 bp, probe
gttgcctctggggtttcttaaagct

SEQ ID NO: 232896 - DNA, 25 bp, probe
gtagctcttaaggttcgttaccgtg

SEQ ID NO: 232897 - DNA, 25 bp, probe
tccactaaagaagttgaagtacctg

SEQ ID NO: 232898 - DNA, 25 bp, probe
tgataccaagaaacttaactaccgt

SEQ ID NO: 232899 - DNA, 25 bp, probe
gttccacacaaacttaaattactgt

SEQ ID NO: 232900 - DNA, 25 bp, probe
gttccataccgggctacaattcttt

SEQ ID NO: 232901 - DNA, 25 bp, probe
gttggtagccactgctagatattta

SEQ ID NO: 232902 - DNA, 25 bp, probe
gttcccagcaactgcttgtttgtgc

SEQ ID NO: 232903 - DNA, 25 bp, probe
gttcccagcgactgctttcaaatac

SEQ ID NO: 232904 - DNA, 25 bp, probe
gttcagtacggctgtaccaatacaa

SEQ ID NO: 232905 - DNA, 25 bp, probe
gttccacaggatgtgccaccagaac

SEQ ID NO: 232906 - DNA, 25 bp, probe
gttgccaaatgatcagccaaagaga

SEQ ID NO: 232907 - DNA, 25 bp, probe
gttgccatattctccaaactggtct

SEQ ID NO: 232908 - DNA, 25 bp, probe
gttgtctttgctttcggagtggtat

SEQ ID NO: 232909 - DNA, 25 bp, probe
gttgtccattgcagtgctggaatcg

SEQ ID NO: 232910 - DNA, 25 bp, probe
gttcgcagttgcagcgattgcaact

SEQ ID NO: 232911 - DNA, 25 bp, probe
gttggctgcctcagagcattcagaa

SEQ ID NO: 232912 - DNA, 25 bp, probe
gttggctgcctcagagcattcagaa

SEQ ID NO: 232913 - DNA, 25 bp, probe
gttggggcatcttgactatcagata

SEQ ID NO: 232914 - DNA, 25 bp, probe
gttggcagctgatcagacctcaata

SEQ ID NO: 232915 - DNA, 25 bp, probe
gttggcagctgatcagacctcaata

SEQ ID NO: 232916 - DNA, 25 bp, probe
gttggctgtatgactgaagtaataa

SEQ ID NO: 232917 - DNA, 25 bp, probe
gttggcattttcgatataaaatacc

SEQ ID NO: 232918 - DNA, 25 bp, probe
gttggcacctttgaattctacatcc

SEQ ID NO: 232919 - DNA, 25 bp, probe
gtgtggtcccttgggtacatcacat

SEQ ID NO: 232920 - DNA, 25 bp, probe
gtgtggtcccttgggtacatcacat

SEQ ID NO: 232921 - DNA, 25 bp, probe
gttgagtctgccattcgtagctgaa

SEQ ID NO: 232922 - DNA, 25 bp, probe
gttgagtctgccattcgtagctgaa

SEQ ID NO: 232923 - DNA, 25 bp, probe
gttgtgaatgcccttttaggagcaa

SEQ ID NO: 232924 - DNA, 25 bp, probe
gttggaatcacattctttacagagc

SEQ ID NO: 232925 - DNA, 25 bp, probe
gttggaatcacattctttacagagc

SEQ ID NO: 232926 - DNA, 25 bp, probe
gttggtacacatagcttctccagac

SEQ ID NO: 232927 - DNA, 25 bp, probe
gttggtcaaattcctccatgatgag

SEQ ID NO: 232928 - DNA, 25 bp, probe
gttgtgtgaaacccctagcatagag

SEQ ID NO: 232929 - DNA, 25 bp, probe
gttgtgtgaaacccctagcatagag

SEQ ID NO: 232930 - DNA, 25 bp, probe
gttgtgtgaaacccctagcatagag

SEQ ID NO: 232931 - DNA, 25 bp, probe
gttgtgtgaaacccctagcatagag

SEQ ID NO: 232932 - DNA, 25 bp, probe
gttgtgtgaaactcactccacaaac

SEQ ID NO: 232933 - DNA, 25 bp, probe
gttgctgacaaacttatcccaaaac

SEQ ID NO: 232934 - DNA, 25 bp, probe
gttctaccaacgagctgcaaaacca

SEQ ID NO: 232935 - DNA, 25 bp, probe
gttgtaccgggaccagaacatgacc

SEQ ID NO: 232936 - DNA, 25 bp, probe
gttgttcccgtaaattacatgagct

SEQ ID NO: 232937 - DNA, 25 bp, probe
gttgtttcccataatagaactgcag

SEQ ID NO: 232938 - DNA, 25 bp, probe
gttgctattgcccgttaaaggcact

SEQ ID NO: 232939 - DNA, 25 bp, probe
gttctgttattgacccaaaggccat

SEQ ID NO: 232940 - DNA, 25 bp, probe
gttccttactgctgccacaatcagc

SEQ ID NO: 232941 - DNA, 25 bp, probe
gttgcctagaagggctccaaaccac

SEQ ID NO: 232942 - DNA, 25 bp, probe
gttgccaaaggcatggagtaccttc

SEQ ID NO: 232943 - DNA, 25 bp, probe
gtcactatgacaagcacatggactt

SEQ ID NO: 232944 - DNA, 25 bp, probe
gttgcattgcaaactcaggtattat

SEQ ID NO: 232945 - DNA, 25 bp, probe
gttgatgtaattgctggattctccg

SEQ ID NO: 232946 - DNA, 25 bp, probe
gttgatgaatcccctggatacacgg

SEQ ID NO: 232947 - DNA, 25 bp, probe
gttgctgttcctgctgcaaaaccaa

SEQ ID NO: 232948 - DNA, 25 bp, probe
gttgtggtttgtccaaactcatcaa

SEQ ID NO: 232949 - DNA, 25 bp, probe
gttggaatttggtcatctactagaa

SEQ ID NO: 232950 - DNA, 25 bp, probe
gttgctggatcttgagtcccattag

SEQ ID NO: 232951 - DNA, 25 bp, probe
gttgtgtagctgtgtcatgtatata

SEQ ID NO: 232952 - DNA, 25 bp, probe
gttgtgctatgagcctctgtaatca

SEQ ID NO: 232953 - DNA, 25 bp, probe
gttgtggtaaccaagctgcaatcat

SEQ ID NO: 232954 - DNA, 25 bp, probe
gttgtggtaaccaggctgcgatcat

SEQ ID NO: 232955 - DNA, 25 bp, probe
gttggtgtgaaactcggctgtatta

SEQ ID NO: 232956 - DNA, 25 bp, probe
gttggtgtaatcagctggggagtag

SEQ ID NO: 232957 - DNA, 25 bp, probe
tgttgggtaaccggatggggcttct

SEQ ID NO: 232958 - DNA, 25 bp, probe
gttctggttcctctgatggagggac

SEQ ID NO: 232959 - DNA, 25 bp, probe
gttggggtcctcaacggagagtacg

SEQ ID NO: 232960 - DNA, 25 bp, probe
gtctaggggtccacgggtggcagga

SEQ ID NO: 232961 - DNA, 25 bp, probe
gttcggggtgacactgtgggaaatg

SEQ ID NO: 232962 - DNA, 25 bp, probe
gttgggggctacatctgtgaggaga

SEQ ID NO: 232963 - DNA, 25 bp, probe
gttggaaagcattgcctctagggga

SEQ ID NO: 232964 - DNA, 25 bp, probe
gttggaaagcattgcctctagggga

SEQ ID NO: 232965 - DNA, 25 bp, probe
gtttgaaagctcgccgggcggcaat

SEQ ID NO: 232966 - DNA, 25 bp, probe
gttctactgacccaactgggggcaa

SEQ ID NO: 232967 - DNA, 25 bp, probe
gttctcgtgccccttagaggggaat

SEQ ID NO: 232968 - DNA, 25 bp, probe
gttgggatggccgtaggcaggggag

SEQ ID NO: 232969 - DNA, 25 bp, probe
gttccaaggcattttagcggggagg

SEQ ID NO: 232970 - DNA, 25 bp, probe
gtccttaacagagtttgggggagag

SEQ ID NO: 232971 - DNA, 25 bp, probe
gttgttattgaagtttgggcaggag

SEQ ID NO: 232972 - DNA, 25 bp, probe
gttgtcttcagacgtcttggggacg

SEQ ID NO: 232973 - DNA, 25 bp, probe
gttgctgccaggagacttggggagc

SEQ ID NO: 232974 - DNA, 25 bp, probe
gttcagcacggggacaagatcggag

SEQ ID NO: 232975 - DNA, 25 bp, probe
gttcagggtggctgcacgatttatg

SEQ ID NO: 232976 - DNA, 25 bp, probe
gttgctgggtgggtgggaaatatga

SEQ ID NO: 232977 - DNA, 25 bp, probe
gttgtctgtgtcggttttcaataac

SEQ ID NO: 232978 - DNA, 25 bp, probe
gttgtttgccatactttgtctgaaa

SEQ ID NO: 232979 - DNA, 25 bp, probe
gttgtgtctaatctccttctgagaa

SEQ ID NO: 232980 - DNA, 25 bp, probe
gttgtgtctaatctccttctgagaa

SEQ ID NO: 232981 - DNA, 25 bp, probe
gggccttaagtatcttcatgaaaac

SEQ ID NO: 232982 - DNA, 25 bp, probe
gttccttggagttggcttcaaagaa

SEQ ID NO: 232983 - DNA, 25 bp, probe
gttccctacttgatcttcaaggaaa

SEQ ID NO: 232984 - DNA, 25 bp, probe
gttccattacggaccaatggggcca

SEQ ID NO: 232985 - DNA, 25 bp, probe
gttccgaaactgcacacaggatggc

SEQ ID NO: 232986 - DNA, 25 bp, probe
gttgaagacagagctacacagggga

SEQ ID NO: 232987 - DNA, 25 bp, probe
gttgacatccaaatctagccagagc

SEQ ID NO: 232988 - DNA, 25 bp, probe
gttgacatcacaggcatgacaatgc

SEQ ID NO: 232989 - DNA, 25 bp, probe
gttgactcacacagacttaaagcct

SEQ ID NO: 232990 - DNA, 25 bp, probe
gttgactcacacagacttaaagcct

SEQ ID NO: 232991 - DNA, 25 bp, probe
gttgactcacacagacttaaagcct

SEQ ID NO: 232992 - DNA, 25 bp, probe
gttgttcatcgtgatcttaaaccta

SEQ ID NO: 232993 - DNA, 25 bp, probe
gtttctacgtctatttaaggctagg

SEQ ID NO: 232994 - DNA, 25 bp, probe
gtgttccaaggcattttagcgggga

SEQ ID NO: 232995 - DNA, 25 bp, probe
gttcctcaaggaatctcttaagttt

SEQ ID NO: 232996 - DNA, 25 bp, probe
gttctctcaaagactttgtaaagtg

SEQ ID NO: 232997 - DNA, 25 bp, probe
gttactgggacacttttaaactctg

SEQ ID NO: 232998 - DNA, 25 bp, probe
gttactgggacacttttaaactctg

SEQ ID NO: 232999 - DNA, 25 bp, probe
gtgtccgggacctgttagaagaatg

SEQ ID NO: 233000 - DNA, 25 bp, probe
gttccggggcaggactgtaaaggtg

SEQ ID NO: 233001 - DNA, 25 bp, probe
gttggagtaggagactttcacaagt

SEQ ID NO: 233002 - DNA, 25 bp, probe
gttggaggacaagacatttcaaaga

SEQ ID NO: 233003 - DNA, 25 bp, probe
gttggaacacaataattcccttgtt

SEQ ID NO: 233004 - DNA, 25 bp, probe
gttggaacacaataattcccttgtt

SEQ ID NO: 233005 - DNA, 25 bp, probe
gttgctaaacgagtcaatcccctca

SEQ ID NO: 233006 - DNA, 25 bp, probe
gtagcaaaaccagaatccctcagct

SEQ ID NO: 233007 - DNA, 25 bp, probe
gttgaataccaagaactgcccaagt

SEQ ID NO: 233008 - DNA, 25 bp, probe
gttgaataccaagaactgcccaagt

SEQ ID NO: 233009 - DNA, 25 bp, probe
gttgaataccaagaactgcccaagt

SEQ ID NO: 233010 - DNA, 25 bp, probe
gttgtctactcaggaaggtcccata

SEQ ID NO: 233011 - DNA, 25 bp, probe
gttggtagtaggtatggttctcata

SEQ ID NO: 233012 - DNA, 25 bp, probe
gttgaggagtaccaattgccttatt

SEQ ID NO: 233013 - DNA, 25 bp, probe
gttgggcatgtagaactttcatttc

SEQ ID NO: 233014 - DNA, 25 bp, probe
gttgccacagtacaagtttattttt

SEQ ID NO: 233015 - DNA, 25 bp, probe
gttcccttaccacctttgatggtgt

SEQ ID NO: 233016 - DNA, 25 bp, probe
gttcctcttgtcaaggtttgggaat

SEQ ID NO: 233017 - DNA, 25 bp, probe
gttgactcatatagctaggttgtgg

SEQ ID NO: 233018 - DNA, 25 bp, probe
gttgacatccaccgggtgtgtggga

SEQ ID NO: 233019 - DNA, 25 bp, probe
gttgacagaacaaggtggttaggaa

SEQ ID NO: 233020 - DNA, 25 bp, probe
gtaggcagaaaatgggcttgggagc

SEQ ID NO: 233021 - DNA, 25 bp, probe
gttgtatataaatgggcttcccacc

SEQ ID NO: 233022 - DNA, 25 bp, probe
gttgtattaacagcagggtcacttc

SEQ ID NO: 233023 - DNA, 25 bp, probe
gttggggatccagcaggagaccctc

SEQ ID NO: 233024 - DNA, 25 bp, probe
gttggggtcatagatgtttccttgc

SEQ ID NO: 233025 - DNA, 25 bp, probe
gttggagggaacctgtttcactatg

SEQ ID NO: 233026 - DNA, 25 bp, probe
gttgtggtggaaacgtttgccatat

SEQ ID NO: 233027 - DNA, 25 bp, probe
gttggtggtacatcttgttgaattc

SEQ ID NO: 233028 - DNA, 25 bp, probe
gttggttgataacattgtattttgg

SEQ ID NO: 233029 - DNA, 25 bp, probe
gttggttgataacattgtattttgg

SEQ ID NO: 233030 - DNA, 25 bp, probe
gttggttagaatttctgtgtttatg

SEQ ID NO: 233031 - DNA, 25 bp, probe
gttgtgtgtggtttctttcttttga

SEQ ID NO: 233032 - DNA, 25 bp, probe
gttgtgtgtggtttctttcttttga

SEQ ID NO: 233033 - DNA, 25 bp, probe
gttgttttgaccctttcatctatta

SEQ ID NO: 233034 - DNA, 25 bp, probe
gttgtgctttgacagttaactctag

SEQ ID NO: 233035 - DNA, 25 bp, probe
gttgtgctttgacagttaactctag

SEQ ID NO: 233036 - DNA, 25 bp, probe
gttgtgtttttgcctaaatactagt

SEQ ID NO: 233037 - DNA, 25 bp, probe
gttgcgggtattccaaattctcttg

SEQ ID NO: 233038 - DNA, 25 bp, probe
gttcgtatgttaccaaaccacctgt

SEQ ID NO: 233039 - DNA, 25 bp, probe
gttcgtatgttaccaaaccacctgt

SEQ ID NO: 233040 - DNA, 25 bp, probe
gttcctggctttcagaaaaccaacg

SEQ ID NO: 233041 - DNA, 25 bp, probe
gttcctgagtttgagtaggtcccca

SEQ ID NO: 233042 - DNA, 25 bp, probe
gttccggcattactatgtcatggtc

SEQ ID NO: 233043 - DNA, 25 bp, probe
gtatccaaataaaagtcattcccat

SEQ ID NO: 233044 - DNA, 25 bp, probe
gttcccaataaaagtgactctcagc

SEQ ID NO: 233045 - DNA, 25 bp, probe
gttgctcacaattgaccaggacctc

SEQ ID NO: 233046 - DNA, 25 bp, probe
gttgatcccatttgacattcacacc

SEQ ID NO: 233047 - DNA, 25 bp, probe
gttgaaactactggcatcaccacac

SEQ ID NO: 233048 - DNA, 25 bp, probe
gttgtacaataccagatcactcaaa

SEQ ID NO: 233049 - DNA, 25 bp, probe
gttgctcacagaaggaccacattta

SEQ ID NO: 233050 - DNA, 25 bp, probe
gttctggctgtagacaacattcttt

SEQ ID NO: 233051 - DNA, 25 bp, probe
gttgtggattgcaagaaactctttt

SEQ ID NO: 233052 - DNA, 25 bp, probe
gttgttgcactcctgaaattctatt

SEQ ID NO: 233053 - DNA, 25 bp, probe
gttgactggccaaaaatatcttttt

SEQ ID NO: 233054 - DNA, 25 bp, probe
gttgactgtgtcattagtcctttgt

SEQ ID NO: 233055 - DNA, 25 bp, probe
gttgactgtgtccattcgggttatt

SEQ ID NO: 233056 - DNA, 25 bp, probe
gttactgagtccactttattctggg

SEQ ID NO: 233057 - DNA, 25 bp, probe
gttgtattcctcactttgatgttgt

SEQ ID NO: 233058 - DNA, 25 bp, probe
gttgtcattgttgttattattattg

SEQ ID NO: 233059 - DNA, 25 bp, probe
gttgtgtgatttgtgttatactggt

SEQ ID NO: 233060 - DNA, 25 bp, probe
gttggtacatatgatgatttccata

SEQ ID NO: 233061 - DNA, 25 bp, probe
gttgtgctacaccaatatttctatg

SEQ ID NO: 233062 - DNA, 25 bp, probe
gttgtgctacaccaatatttctatg

SEQ ID NO: 233063 - DNA, 25 bp, probe
gttgttgccaggaatttgctttgtt

SEQ ID NO: 233064 - DNA, 25 bp, probe
gttgcttcgcagggggatttgtttt

SEQ ID NO: 233065 - DNA, 25 bp, probe
gttgcttctgaggtacattttgaat

SEQ ID NO: 233066 - DNA, 25 bp, probe
gttgtcatcttggagactaaagaat

SEQ ID NO: 233067 - DNA, 25 bp, probe
gttgcatccttagtggctagggaaa

SEQ ID NO: 233068 - DNA, 25 bp, probe
gttgtcatgctgaaccgcattgtgg

SEQ ID NO: 233069 - DNA, 25 bp, probe
gttgtattgcaattcactgtgttgt

SEQ ID NO: 233070 - DNA, 25 bp, probe
gttgttatcattccctgatgtgttg

SEQ ID NO: 233071 - DNA, 25 bp, probe
gttgttcatcaacccatggtgaaat

SEQ ID NO: 233072 - DNA, 25 bp, probe
gttgttcatcaacccatggtgaaat

SEQ ID NO: 233073 - DNA, 25 bp, probe
gttgctacaaacgtctggagaaacg

SEQ ID NO: 233074 - DNA, 25 bp, probe
gttgctcaaaaggtcaatgaaaacc

SEQ ID NO: 233075 - DNA, 25 bp, probe
gttgtcgatggggccagagatgaag

SEQ ID NO: 233076 - DNA, 25 bp, probe
gttcctggggaatatagagagttga

SEQ ID NO: 233077 - DNA, 25 bp, probe
gttctgcgccggtgacaaagcaggt

SEQ ID NO: 233078 - DNA, 25 bp, probe
gttccaccagttcacagcagtgggt

SEQ ID NO: 233079 - DNA, 25 bp, probe
gttccccaagaggatggccatgggt

SEQ ID NO: 233080 - DNA, 25 bp, probe
gttctggccaagacagtggccttcc

SEQ ID NO: 233081 - DNA, 25 bp, probe
gttgctgtacaagagcaggctttac

SEQ ID NO: 233082 - DNA, 25 bp, probe
gttactacacatgctaggctttctc

SEQ ID NO: 233083 - DNA, 25 bp, probe
gttccgacgccggagagtatgtcca

SEQ ID NO: 233084 - DNA, 25 bp, probe
gttcctgatgccttgaggggtgttt

SEQ ID NO: 233085 - DNA, 25 bp, probe
gttccagagacctgggggtgtgtct

SEQ ID NO: 233086 - DNA, 25 bp, probe
ggtccaaggagggagagtgggttct

SEQ ID NO: 233087 - DNA, 25 bp, probe
gttgcaagggaacagagagggacct

SEQ ID NO: 233088 - DNA, 25 bp, probe
gttgaaagaacctatgggtggcacc

SEQ ID NO: 233089 - DNA, 25 bp, probe
gttccacagacagacatctgggcca

SEQ ID NO: 233090 - DNA, 25 bp, probe
gttcctgcagtagaatgggggcagc

SEQ ID NO: 233091 - DNA, 25 bp, probe
gttccatcactagaaacgtgtgaag

SEQ ID NO: 233092 - DNA, 25 bp, probe
gtttccctgaggacaacgatgaacc

SEQ ID NO: 233093 - DNA, 25 bp, probe
gttgtccctcaggaagacaccatac

SEQ ID NO: 233094 - DNA, 25 bp, probe
gttgtctaccacggagaatacatag

SEQ ID NO: 233095 - DNA, 25 bp, probe
gttgcattcacagcaaatgaaaatt

SEQ ID NO: 233096 - DNA, 25 bp, probe
gttgactgcacaggtaatacaacac

SEQ ID NO: 233097 - DNA, 25 bp, probe
gttccataaggtgatacaggcctgc

SEQ ID NO: 233098 - DNA, 25 bp, probe
gttcctccacgaaaaaggcatcatc

SEQ ID NO: 233099 - DNA, 25 bp, probe
gttcctccacgaaaaaggcatcatc

SEQ ID NO: 233100 - DNA, 25 bp, probe
gttgccttcacagtggacaatggac

SEQ ID NO: 233101 - DNA, 25 bp, probe
gttgcctagttttgtacatggatct

SEQ ID NO: 233102 - DNA, 25 bp, probe
gttgcctagttttgtacatggatct

SEQ ID NO: 233103 - DNA, 25 bp, probe
gttgacttggttttacaggtcatta

SEQ ID NO: 233104 - DNA, 25 bp, probe
gttactgtggtatctatgagttatc

SEQ ID NO: 233105 - DNA, 25 bp, probe
gttactgtggtatctatgagttatc

SEQ ID NO: 233106 - DNA, 25 bp, probe
gttgactcttgctggtgaagtacac

SEQ ID NO: 233107 - DNA, 25 bp, probe
gttgactacgagcagatcaagataa

SEQ ID NO: 233108 - DNA, 25 bp, probe
gttgactacgagcagatcaagataa

SEQ ID NO: 233109 - DNA, 25 bp, probe
gttgcctgttgaggagccaattaaa

SEQ ID NO: 233110 - DNA, 25 bp, probe
gttcctctgtgtgctaaactgaagt

SEQ ID NO: 233111 - DNA, 25 bp, probe
gttcctctgtgtgctaaactgaagt

SEQ ID NO: 233112 - DNA, 25 bp, probe
gttcctcgagttgaatggggatgtc

SEQ ID NO: 233113 - DNA, 25 bp, probe
gttccatcagccgtaccgggcgatg

SEQ ID NO: 233114 - DNA, 25 bp, probe
gttctaagccaggagccgagatgga

SEQ ID NO: 233115 - DNA, 25 bp, probe
gttctaagccaggagccgagatgga

SEQ ID NO: 233116 - DNA, 25 bp, probe
gttgttacactggagctgaggaggc

SEQ ID NO: 233117 - DNA, 25 bp, probe
gttgtcttcacgggagcaggaggag

SEQ ID NO: 233118 - DNA, 25 bp, probe
gttgtgcttatatgggagggagagt

SEQ ID NO: 233119 - DNA, 25 bp, probe
gttctgttaccaggcggcactggag

SEQ ID NO: 233120 - DNA, 25 bp, probe
gttgcagcgattgcaactggcctgg

SEQ ID NO: 233121 - DNA, 25 bp, probe
gttgacctttgcactggcattaaag

SEQ ID NO: 233122 - DNA, 25 bp, probe
gtgtaccgtggatctgtttaacgtg

SEQ ID NO: 233123 - DNA, 25 bp, probe
gtgtaccgtggatctgtttaacgtg

SEQ ID NO: 233124 - DNA, 25 bp, probe
gttcaccgtggagcgcatgtatgac

SEQ ID NO: 233125 - DNA, 25 bp, probe
gttgacattgagaaccctgaaaccc

SEQ ID NO: 233126 - DNA, 25 bp, probe
gttgccaatgcagagctggttcggg

SEQ ID NO: 233127 - DNA, 25 bp, probe
gttgagaagggggtgagtggtgcca

SEQ ID NO: 233128 - DNA, 25 bp, probe
gttgtgttggagggaaggactggcg

SEQ ID NO: 233129 - DNA, 25 bp, probe
gttgtgtttgatcagaattttgggg

SEQ ID NO: 233130 - DNA, 25 bp, probe
gttgtgtttgatcagaattttgggg

SEQ ID NO: 233131 - DNA, 25 bp, probe
gttgtttgtgaccagaagtttcgac

SEQ ID NO: 233132 - DNA, 25 bp, probe
gttgattcatgtgcagagaggtctc

SEQ ID NO: 233133 - DNA, 25 bp, probe
gttgtgcaatgcaatcacaggaatt

SEQ ID NO: 233134 - DNA, 25 bp, probe
gttgagcactgcaagacacacacgg

SEQ ID NO: 233135 - DNA, 25 bp, probe
gttcagcatctctgaaccccaacta

SEQ ID NO: 233136 - DNA, 25 bp, probe
gttcagacttagtttttataaaatg

SEQ ID NO: 233137 - DNA, 25 bp, probe
gttgagacttacactgttgaggaag

SEQ ID NO: 233138 - DNA, 25 bp, probe
gttgatgactcttcaaggattagaa

SEQ ID NO: 233139 - DNA, 25 bp, probe
gttgtgacatattcattgtgttacc

SEQ ID NO: 233140 - DNA, 25 bp, probe
gttgctgtcacacattgtgtaaagg

SEQ ID NO: 233141 - DNA, 25 bp, probe
gttgctgtcacacattgtgtaaagg

SEQ ID NO: 233142 - DNA, 25 bp, probe
gttgttcagcttcttgtaaatgtgt

SEQ ID NO: 233143 - DNA, 25 bp, probe
gttgcctcggggatgtgcaagatgt

SEQ ID NO: 233144 - DNA, 25 bp, probe
gttgcctgcaaagattcgaatatgg

SEQ ID NO: 233145 - DNA, 25 bp, probe
gttgccctagcattaattgaaagtg

SEQ ID NO: 233146 - DNA, 25 bp, probe
gttcccagtcatttcagtgagaact

SEQ ID NO: 233147 - DNA, 25 bp, probe
gttcccagtcatttcagtgagaact

SEQ ID NO: 233148 - DNA, 25 bp, probe
gttgtactgtgtttgagatggctac

SEQ ID NO: 233149 - DNA, 25 bp, probe
gttatcctggatctggtgttacaat

SEQ ID NO: 233150 - DNA, 25 bp, probe
gttgcatggcatggtccttgtgatg

SEQ ID NO: 233151 - DNA, 25 bp, probe
gttgtgacattggccgtatgctgga

SEQ ID NO: 233152 - DNA, 25 bp, probe
gttgatgtcgtatcttatgctgcgt

SEQ ID NO: 233153 - DNA, 25 bp, probe
gttgctgtcagggcagcagttccag

SEQ ID NO: 233154 - DNA, 25 bp, probe
gttgcactgcaaccaagtgtcagag

SEQ ID NO: 233155 - DNA, 25 bp, probe
gttgcagtgaaccaaaatagtgaca

SEQ ID NO: 233156 - DNA, 25 bp, probe
gttgctgctgaacttatactaaatc

SEQ ID NO: 233157 - DNA, 25 bp, probe
gttctgctgaatcctattcctaagg

SEQ ID NO: 233158 - DNA, 25 bp, probe
gttctgctgaatcctattcctaagg

SEQ ID NO: 233159 - DNA, 25 bp, probe
gttcttgccagacgtgtcctgaatg

SEQ ID NO: 233160 - DNA, 25 bp, probe
gttctctgtcactgttcccggaagc

SEQ ID NO: 233161 - DNA, 25 bp, probe
gttctggaccaagttcgacgtggct

SEQ ID NO: 233162 - DNA, 25 bp, probe
gttctggaccaagttcgacgtggct

SEQ ID NO: 233163 - DNA, 25 bp, probe
gttgctaggcaggcctgtagacttg

SEQ ID NO: 233164 - DNA, 25 bp, probe
gttctctggcagccggtaacagctg

SEQ ID NO: 233165 - DNA, 25 bp, probe
gttgcctggatgcggtggtgcattg

SEQ ID NO: 233166 - DNA, 25 bp, probe
gttgtctgagacctgggtcgcttgc

SEQ ID NO: 233167 - DNA, 25 bp, probe
gttcctggaccacgagatcgatggc

SEQ ID NO: 233168 - DNA, 25 bp, probe
gttcctggaccacgagatcgatggc

SEQ ID NO: 233169 - DNA, 25 bp, probe
gttcctcatgatcttcaacagtggg

SEQ ID NO: 233170 - DNA, 25 bp, probe
gttcctcatgatcttcaacagtggg

SEQ ID NO: 233171 - DNA, 25 bp, probe
gttccactggaagtctccaggagag

SEQ ID NO: 233172 - DNA, 25 bp, probe
atggctacagggaagcctccactgg

SEQ ID NO: 233173 - DNA, 25 bp, probe
gttgtctcagctgatttcagacacg

SEQ ID NO: 233174 - DNA, 25 bp, probe
gttgctggatctgctgtttgaagcg

SEQ ID NO: 233175 - DNA, 25 bp, probe
gttgcttgaagccatttatagacga

SEQ ID NO: 233176 - DNA, 25 bp, probe
gttgcattatagccagtagtaaaaa

SEQ ID NO: 233177 - DNA, 25 bp, probe
gttcctttctcacagtgacaggaag

SEQ ID NO: 233178 - DNA, 25 bp, probe
gttcctttctcacagtgacaggaag

SEQ ID NO: 233179 - DNA, 25 bp, probe
gttcctgtttagctgttctgaaata

SEQ ID NO: 233180 - DNA, 25 bp, probe
gttcctgtttagctgttctgaaata

SEQ ID NO: 233181 - DNA, 25 bp, probe
gttccctttatgattatctgaagtc

SEQ ID NO: 233182 - DNA, 25 bp, probe
gttccctttgtgattaccagatgca

SEQ ID NO: 233183 - DNA, 25 bp, probe
gttccctttgtgattaccagatgca

SEQ ID NO: 233184 - DNA, 25 bp, probe
gttcccttcagttcaaatcctgtgc

SEQ ID NO: 233185 - DNA, 25 bp, probe
gttctcctacgtaaagatcattgcc

SEQ ID NO: 233186 - DNA, 25 bp, probe
gttcgttacgagattgtcttcgcag

SEQ ID NO: 233187 - DNA, 25 bp, probe
gttctgctttcgattcgttaagaga

SEQ ID NO: 233188 - DNA, 25 bp, probe
gttctgctttcgattcgttaagaga

SEQ ID NO: 233189 - DNA, 25 bp, probe
gttctgttctggatattattaagca

SEQ ID NO: 233190 - DNA, 25 bp, probe
gttctgaccagggctttcaaagatg

SEQ ID NO: 233191 - DNA, 25 bp, probe
gttcgttggatggctcttgaaagtc

SEQ ID NO: 233192 - DNA, 25 bp, probe
gttgcttgtggatttatagtagttc

SEQ ID NO: 233193 - DNA, 25 bp, probe
attttttgtatttttgatcaagacg

SEQ ID NO: 233194 - DNA, 25 bp, probe
gttgcttgaagttaataggtttgcc

SEQ ID NO: 233195 - DNA, 25 bp, probe
gttgaggaagtaaaagttcatccaa

SEQ ID NO: 233196 - DNA, 25 bp, probe
gttgcactacgtttcaagttctcaa

SEQ ID NO: 233197 - DNA, 25 bp, probe
gttcacgtggtcctaatcttctgaa

SEQ ID NO: 233198 - DNA, 25 bp, probe
gttaagtatgtcgccattgttgtac

SEQ ID NO: 233199 - DNA, 25 bp, probe
gttaagtatgtcgccattgttgtac

SEQ ID NO: 233200 - DNA, 25 bp, probe
gttaaaatgtcgcttttcatctcct

SEQ ID NO: 233201 - DNA, 25 bp, probe
gttgctgaaatgtggctttggcatt

SEQ ID NO: 233202 - DNA, 25 bp, probe
gttgccaaagctgtttgatggatgc

SEQ ID NO: 233203 - DNA, 25 bp, probe
gttgccaaagctgtttgatggatgc

SEQ ID NO: 233204 - DNA, 25 bp, probe
gttccataggtgattctgataggca

SEQ ID NO: 233205 - DNA, 25 bp, probe
gttcggattgagaactcttcagcca

SEQ ID NO: 233206 - DNA, 25 bp, probe
gttccagctagaaacttgtatgcct

SEQ ID NO: 233207 - DNA, 25 bp, probe
gttccagctagaaacttgtatgcct

SEQ ID NO: 233208 - DNA, 25 bp, probe
gttctgggaaattgttatagcttaa

SEQ ID NO: 233209 - DNA, 25 bp, probe
gttctgggaaattgttatagcttaa

SEQ ID NO: 233210 - DNA, 25 bp, probe
gttgatgcggcaaatgctgttattt

SEQ ID NO: 233211 - DNA, 25 bp, probe
gttgatgctccaaacttcattgttg

SEQ ID NO: 233212 - DNA, 25 bp, probe
gttgatctctagaaccgattttgga

SEQ ID NO: 233213 - DNA, 25 bp, probe
gttgcttttccccagatttggtgac

SEQ ID NO: 233214 - DNA, 25 bp, probe
gtatatgtttcagcaagtttgggga

SEQ ID NO: 233215 - DNA, 25 bp, probe
gttgttttgcaagatgtttgtggaa

SEQ ID NO: 233216 - DNA, 25 bp, probe
gttgttttgcaagatgtttgtggaa

SEQ ID NO: 233217 - DNA, 25 bp, probe
gttgttttgtctcgtgttcatgatg

SEQ ID NO: 233218 - DNA, 25 bp, probe
gttctcgataggccttttgatgatg

SEQ ID NO: 233219 - DNA, 25 bp, probe
gttgcaattaggattttgatgtgac

SEQ ID NO: 233220 - DNA, 25 bp, probe
gttgccattgggtttgtttggagcc

SEQ ID NO: 233221 - DNA, 25 bp, probe
gtacaatcagggtgtggtagaacac

SEQ ID NO: 233222 - DNA, 25 bp, probe
gttaatcatgggagggtgagacaga

SEQ ID NO: 233223 - DNA, 25 bp, probe
gttgaatcatggttcgtatgttacc

SEQ ID NO: 233224 - DNA, 25 bp, probe
gttgaatcatggttcgtatgttacc

SEQ ID NO: 233225 - DNA, 25 bp, probe
gttgcgacttcttcgatagttacct

SEQ ID NO: 233226 - DNA, 25 bp, probe
gttgcaattgctgtagataggttcc

SEQ ID NO: 233227 - DNA, 25 bp, probe
gttgctaatctatattagttatccc

SEQ ID NO: 233228 - DNA, 25 bp, probe
gttgtattcttatttcagtgtttcc

SEQ ID NO: 233229 - DNA, 25 bp, probe
gttccagattgttctgtccagtttc

SEQ ID NO: 233230 - DNA, 25 bp, probe
gttccacatatatttccacttcttc

SEQ ID NO: 233231 - DNA, 25 bp, probe
gttgccatcaatgaccccttcattg

SEQ ID NO: 233232 - DNA, 25 bp, probe
gttgaactgagcaatacctcctcct

SEQ ID NO: 233233 - DNA, 25 bp, probe
gttgcatcctacaatttgccactgc

SEQ ID NO: 233234 - DNA, 25 bp, probe
gttgatctctgtacatttaagtgaa

SEQ ID NO: 233235 - DNA, 25 bp, probe
gttgtttgcttattttatggaacag

SEQ ID NO: 233236 - DNA, 25 bp, probe
gttgtttggagattgactgctggga

SEQ ID NO: 233237 - DNA, 25 bp, probe
gttgcttggtgcacagattgctgaa

SEQ ID NO: 233238 - DNA, 25 bp, probe
gttgttattctcggactgtgaattt

SEQ ID NO: 233239 - DNA, 25 bp, probe
gttgttatttatgactggattatga

SEQ ID NO: 233240 - DNA, 25 bp, probe
gttgtttgcctaccaagatattaca

SEQ ID NO: 233241 - DNA, 25 bp, probe
gttgttttctagcagactcatgtcc

SEQ ID NO: 233242 - DNA, 25 bp, probe
gttgtttctataaatgactattgta

SEQ ID NO: 233243 - DNA, 25 bp, probe
gttgtttctaattttcattattata

SEQ ID NO: 233244 - DNA, 25 bp, probe
gttgattttttcttttgctttatgg

SEQ ID NO: 233245 - DNA, 25 bp, probe
gttgtatctttagtattcaggttgt

SEQ ID NO: 233246 - DNA, 25 bp, probe
gttgtattctttttcattgggtgat

SEQ ID NO: 233247 - DNA, 25 bp, probe
gttgtttgtttggaaggcagggcag

SEQ ID NO: 233248 - DNA, 25 bp, probe
gttgttctgttgcaaggcggagcgg

SEQ ID NO: 233249 - DNA, 25 bp, probe
gttgaaatttgtcatggatggaggg

SEQ ID NO: 233250 - DNA, 25 bp, probe
gttgatgaatttgctatgcgttatg

SEQ ID NO: 233251 - DNA, 25 bp, probe
gttgctacatgtatcgagccttgat

SEQ ID NO: 233252 - DNA, 25 bp, probe
gttgtagatatcttccagactgtca

SEQ ID NO: 233253 - DNA, 25 bp, probe
gttgctcgatacatccgagctgccc

SEQ ID NO: 233254 - DNA, 25 bp, probe
gttcatcgataaagccaagctctcc

SEQ ID NO: 233255 - DNA, 25 bp, probe
gttgcactgaagacagaccctgtca

SEQ ID NO: 233256 - DNA, 25 bp, probe
gttgagatgctaccaactgccattc

SEQ ID NO: 233257 - DNA, 25 bp, probe
gttgaatgataatagctcacagcac

SEQ ID NO: 233258 - DNA, 25 bp, probe
gttgaatgataatagctcacagcac

SEQ ID NO: 233259 - DNA, 25 bp, probe
gttgtatgagttccactgccagatt

SEQ ID NO: 233260 - DNA, 25 bp, probe
gttgtatgagttccactgccagatt

SEQ ID NO: 233261 - DNA, 25 bp, probe
gttgctagcaggcaatctccatttc

SEQ ID NO: 233262 - DNA, 25 bp, probe
gttgctagcaggcaatctccatttc

SEQ ID NO: 233263 - DNA, 25 bp, probe
gttgcaagatggttcctgaactgtc

SEQ ID NO: 233264 - DNA, 25 bp, probe
gttgcaagatggttcctgaactgtc

SEQ ID NO: 233265 - DNA, 25 bp, probe
gttgcagaatactcactatttccaa

SEQ ID NO: 233266 - DNA, 25 bp, probe
gttgaagaatcatcacctgtgtacc

SEQ ID NO: 233267 - DNA, 25 bp, probe
gttgaagaattacagcttgctaaag

SEQ ID NO: 233268 - DNA, 25 bp, probe
gttgataaattaaatgacttgaata

SEQ ID NO: 233269 - DNA, 25 bp, probe
gttgaaaaaagtccagcttgaacat

SEQ ID NO: 233270 - DNA, 25 bp, probe
gttgcaaaaaaagactgtatcaaaa

SEQ ID NO: 233271 - DNA, 25 bp, probe
gttgagataaacattcctttttaag

SEQ ID NO: 233272 - DNA, 25 bp, probe
gttgaggtaatggtgctatgttttt

SEQ ID NO: 233273 - DNA, 25 bp, probe
gttgatggtattcattaggttttaa

SEQ ID NO: 233274 - DNA, 25 bp, probe
gtaaggattttatgagttcttgttt

SEQ ID NO: 233275 - DNA, 25 bp, probe
gtaaagcccctatggttctaatcag

SEQ ID NO: 233276 - DNA, 25 bp, probe
gtaaactacccatgccgttatttca

SEQ ID NO: 233277 - DNA, 25 bp, probe
gtaaactacccatgccgttatttca

SEQ ID NO: 233278 - DNA, 25 bp, probe
gtaaaccaaagctcctggtggttga

SEQ ID NO: 233279 - DNA, 25 bp, probe
gtaaggcttaacacagtgggtggtg

SEQ ID NO: 233280 - DNA, 25 bp, probe
gtgaagtttcaagaagggggaatgc

SEQ ID NO: 233281 - DNA, 25 bp, probe
gtaagacctacagtacggaggagta

SEQ ID NO: 233282 - DNA, 25 bp, probe
gttgactccaacatgacaggaagag

SEQ ID NO: 233283 - DNA, 25 bp, probe
gttgactgcaacattgacgttctca

SEQ ID NO: 233284 - DNA, 25 bp, probe
gttgactgcgatattgacgttccca

SEQ ID NO: 233285 - DNA, 25 bp, probe
gttgacctgttaacaagtatcacct

SEQ ID NO: 233286 - DNA, 25 bp, probe
gttaccgtgaagaagcttacatcca

SEQ ID NO: 233287 - DNA, 25 bp, probe
gttaccgtgaagaagcttacatcca

SEQ ID NO: 233288 - DNA, 25 bp, probe
gttactgacttatgagctaccaaaa

SEQ ID NO: 233289 - DNA, 25 bp, probe
gttaccgcttaaggcaaaatgtcaa

SEQ ID NO: 233290 - DNA, 25 bp, probe
gttcgaggcttatgtatcaagtctc

SEQ ID NO: 233291 - DNA, 25 bp, probe
gttcgcacgttgtttagggtgccct

SEQ ID NO: 233292 - DNA, 25 bp, probe
gttctcaagttgttaagtttcctct

SEQ ID NO: 233293 - DNA, 25 bp, probe
gttctacgtgaattagctttttctc

SEQ ID NO: 233294 - DNA, 25 bp, probe
gttcgaagttttgctgttcagtgct

SEQ ID NO: 233295 - DNA, 25 bp, probe
gttaaaattattcttaatgtctgta

SEQ ID NO: 233296 - DNA, 25 bp, probe
gttaaacaaactctcatttgactgt

SEQ ID NO: 233297 - DNA, 25 bp, probe
gttacccaaagggcttattgactct

SEQ ID NO: 233298 - DNA, 25 bp, probe
gttccccaagtgtctctggggacct

SEQ ID NO: 233299 - DNA, 25 bp, probe
gttcccccaagctggggaagcccag

SEQ ID NO: 233300 - DNA, 25 bp, probe
tttctgacccaagaggtggggacca

SEQ ID NO: 233301 - DNA, 25 bp, probe
tttctgacccaagaggtggggacca

SEQ ID NO: 233302 - DNA, 25 bp, probe
gttctgggccaacttgttggtctga

SEQ ID NO: 233303 - DNA, 25 bp, probe
gttctgagagccatttggtttcagt

SEQ ID NO: 233304 - DNA, 25 bp, probe
gttccagaaattgtgccatttcgcc

SEQ ID NO: 233305 - DNA, 25 bp, probe
gttcccaactagatgcttgttggcc

SEQ ID NO: 233306 - DNA, 25 bp, probe
gttcctacccatagtctttgtgtgc

SEQ ID NO: 233307 - DNA, 25 bp, probe
gtaccgacacctacagattgcagtt

SEQ ID NO: 233308 - DNA, 25 bp, probe
gttaagacagccatccatgtgcatg

SEQ ID NO: 233309 - DNA, 25 bp, probe
gttaagacagccatccatgtgcatg

SEQ ID NO: 233310 - DNA, 25 bp, probe
gttgaccacacaattcttgatgact

SEQ ID NO: 233311 - DNA, 25 bp, probe
gttgccacaaacactgcagagacca

SEQ ID NO: 233312 - DNA, 25 bp, probe
gttgcacagcataactactgagagg

SEQ ID NO: 233313 - DNA, 25 bp, probe
gttccacttcctgtggaggtggctt

SEQ ID NO: 233314 - DNA, 25 bp, probe
gttcccaaactcatggaagtctgtt

SEQ ID NO: 233315 - DNA, 25 bp, probe
gttcccagaggcttctgtacagtca

SEQ ID NO: 233316 - DNA, 25 bp, probe
gttgctccagaacttctgaagagaa

SEQ ID NO: 233317 - DNA, 25 bp, probe
gttcccaagagtttgacttcagcaa

SEQ ID NO: 233318 - DNA, 25 bp, probe
gttcccaagagtttgacttcagcaa

SEQ ID NO: 233319 - DNA, 25 bp, probe
gttgaggcttagtttgatcttccat

SEQ ID NO: 233320 - DNA, 25 bp, probe
gtatgaaggcttttggtctccctgg

SEQ ID NO: 233321 - DNA, 25 bp, probe
gtaaagagtaaatatgcccctggct

SEQ ID NO: 233322 - DNA, 25 bp, probe
gtctaaaaaatacattctccgtgca

SEQ ID NO: 233323 - DNA, 25 bp, probe
gtctaaaaaatacattctccgtgca

SEQ ID NO: 233324 - DNA, 25 bp, probe
gttaccactaagataatggccagta

SEQ ID NO: 233325 - DNA, 25 bp, probe
gttcccgtaaattacatgagctatt

SEQ ID NO: 233326 - DNA, 25 bp, probe
gttccctaaacttgcttcagttata

SEQ ID NO: 233327 - DNA, 25 bp, probe
gttcccataatagcttccagtattc

SEQ ID NO: 233328 - DNA, 25 bp, probe
gttctgaatatgcaactgtccactt

SEQ ID NO: 233329 - DNA, 25 bp, probe
gttgctggagcataactgcttcaat

SEQ ID NO: 233330 - DNA, 25 bp, probe
gttcatgtgagtttactattgcgac

SEQ ID NO: 233331 - DNA, 25 bp, probe
gttcatgtgagtttactattgcgac

SEQ ID NO: 233332 - DNA, 25 bp, probe
gttctgtgcagtttggtatgaaaca

SEQ ID NO: 233333 - DNA, 25 bp, probe
gttctgtgcagtttggtatgaaaca

SEQ ID NO: 233334 - DNA, 25 bp, probe
gttctccatgagttggacagatacc

SEQ ID NO: 233335 - DNA, 25 bp, probe
gttctgtatgaattgatgactggac

SEQ ID NO: 233336 - DNA, 25 bp, probe
gttctgtatgaattgatgactggac

SEQ ID NO: 233337 - DNA, 25 bp, probe
gttgctcaaaaaatgagctcgcatt

SEQ ID NO: 233338 - DNA, 25 bp, probe
gttgctaaaagttatgattcatcca

SEQ ID NO: 233339 - DNA, 25 bp, probe
gttgataaccagcttcagtctctac

SEQ ID NO: 233340 - DNA, 25 bp, probe
gttgaaacatatctcttatcttacg

SEQ ID NO: 233341 - DNA, 25 bp, probe
gttgataagtatctgaatctgtttc

SEQ ID NO: 233342 - DNA, 25 bp, probe
gttgagttgtatctttagtattcag

SEQ ID NO: 233343 - DNA, 25 bp, probe
gttgacttatctcttcacagtaatc

SEQ ID NO: 233344 - DNA, 25 bp, probe
gttgacttgcctctttcagagataa

SEQ ID NO: 233345 - DNA, 25 bp, probe
gttcctgtccgtttatcaggacacg

SEQ ID NO: 233346 - DNA, 25 bp, probe
gttcctctacggcaccgagaaggtc

SEQ ID NO: 233347 - DNA, 25 bp, probe
gttgccgatgatgaggaccgaagtg

SEQ ID NO: 233348 - DNA, 25 bp, probe
gttgcgcagttgaggacacctaggt

SEQ ID NO: 233349 - DNA, 25 bp, probe
gttcacatgggaagagtcaccgaag

SEQ ID NO: 233350 - DNA, 25 bp, probe
gttccttttagactcaccagagata

SEQ ID NO: 233351 - DNA, 25 bp, probe
gttcccttttgggccatcaagaaca

SEQ ID NO: 233352 - DNA, 25 bp, probe
gttcttgcttttggcgcccacagtg

SEQ ID NO: 233353 - DNA, 25 bp, probe
gttcgtttcagaagtgcctcactgt

SEQ ID NO: 233354 - DNA, 25 bp, probe
gttgctgagttctcagtgccattgc

SEQ ID NO: 233355 - DNA, 25 bp, probe
gttcgggtcatggcagactctatgc

SEQ ID NO: 233356 - DNA, 25 bp, probe
gttcgaaggctttgagtatatcaac

SEQ ID NO: 233357 - DNA, 25 bp, probe
gttcaggacgtgtacaggctatgca

SEQ ID NO: 233358 - DNA, 25 bp, probe
gttgaggacgtgggagactgtacac

SEQ ID NO: 233359 - DNA, 25 bp, probe
gttcaggcaccgagaacctagcacg

SEQ ID NO: 233360 - DNA, 25 bp, probe
gttctggaccaaaggaacatagccc

SEQ ID NO: 233361 - DNA, 25 bp, probe
gttccagcccacagggaacaacccg

SEQ ID NO: 233362 - DNA, 25 bp, probe
gttccaaccattaaggtccacacca

SEQ ID NO: 233363 - DNA, 25 bp, probe
gttccaatccaaaactgtctcagaa

SEQ ID NO: 233364 - DNA, 25 bp, probe
gttctgtgtacataaagtcatcaaa

SEQ ID NO: 233365 - DNA, 25 bp, probe
gttcgtgggatgtttaatcaagaga

SEQ ID NO: 233366 - DNA, 25 bp, probe
gttcttaaagagttccacaagcaga

SEQ ID NO: 233367 - DNA, 25 bp, probe
gttgcttaggaatattcccagatgg

SEQ ID NO: 233368 - DNA, 25 bp, probe
gttcctaggaaaatgtcccaagaag

SEQ ID NO: 233369 - DNA, 25 bp, probe
gttctcttgagaagtgaggcccggc

SEQ ID NO: 233370 - DNA, 25 bp, probe
gttcggggatagaagccccgccgag

SEQ ID NO: 233371 - DNA, 25 bp, probe
gtacggggtggacgtcatggcccga

SEQ ID NO: 233372 - DNA, 25 bp, probe
ttttggtggatgtgttaccccgcac

SEQ ID NO: 233373 - DNA, 25 bp, probe
ttttggtggatgtgttaccccgcac

SEQ ID NO: 233374 - DNA, 25 bp, probe
tttcttgggtggagtaaccctgcct

SEQ ID NO: 233375 - DNA, 25 bp, probe
gttgctgtcggtggaagataaccac

SEQ ID NO: 233376 - DNA, 25 bp, probe
gttcattcgatgagacctgtacccg

SEQ ID NO: 233377 - DNA, 25 bp, probe
gttcttcacagggacctgaaacctc

SEQ ID NO: 233378 - DNA, 25 bp, probe
gttctacaaaactcgacacaacatc

SEQ ID NO: 233379 - DNA, 25 bp, probe
gttctacaaaactcgacacaacatc

SEQ ID NO: 233380 - DNA, 25 bp, probe
gttctaactacagtgctcaataaaa

SEQ ID NO: 233381 - DNA, 25 bp, probe
gttgcaatacaaactgctcttgaca

SEQ ID NO: 233382 - DNA, 25 bp, probe
gttgcaagaaatttctcttcaagca

SEQ ID NO: 233383 - DNA, 25 bp, probe
gttgaacccagtttcattctgcagg

SEQ ID NO: 233384 - DNA, 25 bp, probe
gttgaaacacctgatcttgtggatc

SEQ ID NO: 233385 - DNA, 25 bp, probe
gttcaaccacaaccattaatggatc

SEQ ID NO: 233386 - DNA, 25 bp, probe
gttccaactcaacctatcttacatc

SEQ ID NO: 233387 - DNA, 25 bp, probe
gttctgaggcacatcctcactgtaa

SEQ ID NO: 233388 - DNA, 25 bp, probe
gttgcagaggactgaccctgctaca

SEQ ID NO: 233389 - DNA, 25 bp, probe
gttgcaaactgctgaccacgccgaa

SEQ ID NO: 233390 - DNA, 25 bp, probe
gttgaagcagcccgaagactgcctg

SEQ ID NO: 233391 - DNA, 25 bp, probe
gttgcagccacaggggcaacacctg

SEQ ID NO: 233392 - DNA, 25 bp, probe
gttgctatccaggctgtgctatccc

SEQ ID NO: 233393 - DNA, 25 bp, probe
gttcacattgcggtgatgtaccctc

SEQ ID NO: 233394 - DNA, 25 bp, probe
gttccactgcagtaatgtcaatggt

SEQ ID NO: 233395 - DNA, 25 bp, probe
gttgccaccattttgtgcattcgtt

SEQ ID NO: 233396 - DNA, 25 bp, probe
gttgcaagccattttgttttttcat

SEQ ID NO: 233397 - DNA, 25 bp, probe
gttgaagtcactttgatttctttaa

SEQ ID NO: 233398 - DNA, 25 bp, probe
gttgcacagatcccaggatacctgt

SEQ ID NO: 233399 - DNA, 25 bp, probe
gttgaaatccatggaatccctgctg

SEQ ID NO: 233400 - DNA, 25 bp, probe
gtatgaacaggagaaggccgtcttc

SEQ ID NO: 233401 - DNA, 25 bp, probe
gttctccactgtgaagggcgtcaat

SEQ ID NO: 233402 - DNA, 25 bp, probe
gttccacatcgtcaatggcgcagtg

SEQ ID NO: 233403 - DNA, 25 bp, probe
gttccacatcgtcaatggcgcagtg

SEQ ID NO: 233404 - DNA, 25 bp, probe
gttctctgtctgtaaaagctgcaag

SEQ ID NO: 233405 - DNA, 25 bp, probe
gttgcttttcaaaacaggaatgcat

SEQ ID NO: 233406 - DNA, 25 bp, probe
gttgctttttcaacatagcagaatt

SEQ ID NO: 233407 - DNA, 25 bp, probe
gttgccgtattcatctatatagcta

SEQ ID NO: 233408 - DNA, 25 bp, probe
gttctcggagccatttgtacatttc

SEQ ID NO: 233409 - DNA, 25 bp, probe
gttctcggagccatttgtacatttc

SEQ ID NO: 233410 - DNA, 25 bp, probe
gttgcaccatactttcttgtacatt

SEQ ID NO: 233411 - DNA, 25 bp, probe
gttgcactacataatctctggaaat

SEQ ID NO: 233412 - DNA, 25 bp, probe
gttgcactacataatctctggaaat

SEQ ID NO: 233413 - DNA, 25 bp, probe
gttgagctacattcttcattgcttt

SEQ ID NO: 233414 - DNA, 25 bp, probe
gttgagctcaatttcatttctgttt

SEQ ID NO: 233415 - DNA, 25 bp, probe
gttgacatatattttatatcctctt

SEQ ID NO: 233416 - DNA, 25 bp, probe
gttgcttatactgtgatatctcatc

SEQ ID NO: 233417 - DNA, 25 bp, probe
gttgctgttaatattatcttatcta

SEQ ID NO: 233418 - DNA, 25 bp, probe
gttctgattgcaacacttacttccc

SEQ ID NO: 233419 - DNA, 25 bp, probe
gttctgattgcaacacttacttccc

SEQ ID NO: 233420 - DNA, 25 bp, probe
gttctgattgatccacagtgggtgc

SEQ ID NO: 233421 - DNA, 25 bp, probe
gttgctgtagatgtgcgtgcagtct

SEQ ID NO: 233422 - DNA, 25 bp, probe
gttgctgtagatgtgcgtgcagtct

SEQ ID NO: 233423 - DNA, 25 bp, probe
gttgctatggatgcaggccattcgt

SEQ ID NO: 233424 - DNA, 25 bp, probe
gttgctgaggctggagtgcagtgat

SEQ ID NO: 233425 - DNA, 25 bp, probe
gttgctgccgtgaagtcaggacttg

SEQ ID NO: 233426 - DNA, 25 bp, probe
gttctgcagcttattcaagtgatgg

SEQ ID NO: 233427 - DNA, 25 bp, probe
gttctgcagcttattcaagtgatgg

SEQ ID NO: 233428 - DNA, 25 bp, probe
gttccagtttgcccaatggagttga

SEQ ID NO: 233429 - DNA, 25 bp, probe
gttccagttcacctaaaggctgatt

SEQ ID NO: 233430 - DNA, 25 bp, probe
gttctgagatcccctttaggatgaa

SEQ ID NO: 233431 - DNA, 25 bp, probe
gttgctcatgactttcttttgtaaa

SEQ ID NO: 233432 - DNA, 25 bp, probe
gttgactatctgaatcatttttaag

SEQ ID NO: 233433 - DNA, 25 bp, probe
gttgactatctgaatcatttttaag

SEQ ID NO: 233434 - DNA, 25 bp, probe
gttgcactcctgaaattctattaac

SEQ ID NO: 233435 - DNA, 25 bp, probe
gttgcctcacgcaaatgtatttctt

SEQ ID NO: 233436 - DNA, 25 bp, probe
gttgcctcacgcaaatgtatttctt

SEQ ID NO: 233437 - DNA, 25 bp, probe
gttcctccagaatttgagtcctgtt

SEQ ID NO: 233438 - DNA, 25 bp, probe
gttcctaaaatggtgatatcctctc

SEQ ID NO: 233439 - DNA, 25 bp, probe
gttcagtgaagacggtgtcaccctg

SEQ ID NO: 233440 - DNA, 25 bp, probe
gttctgtgcaaattggggcatcacc

SEQ ID NO: 233441 - DNA, 25 bp, probe
gttcatggcatagttggagtctctg

SEQ ID NO: 233442 - DNA, 25 bp, probe
gttcatggcatagttggagtctctg

SEQ ID NO: 233443 - DNA, 25 bp, probe
gttgcatcgatacaggcaggtgctg

SEQ ID NO: 233444 - DNA, 25 bp, probe
gttgcggcagagaagccatgcgttc

SEQ ID NO: 233445 - DNA, 25 bp, probe
gttagccaggatggtctcgatctcc

SEQ ID NO: 233446 - DNA, 25 bp, probe
gttctgctgggagttctagaaccac

SEQ ID NO: 233447 - DNA, 25 bp, probe
gttcgtggccagcctgctggccacc

SEQ ID NO: 233448 - DNA, 25 bp, probe
gttcagaagctccgcttcacatgca

SEQ ID NO: 233449 - DNA, 25 bp, probe
gttctgcaatgcaggcatcatcagg

SEQ ID NO: 233450 - DNA, 25 bp, probe
gttcatgcaatatggcatcgtggcc

SEQ ID NO: 233451 - DNA, 25 bp, probe
gttctgaatccagcatggagcagac

SEQ ID NO: 233452 - DNA, 25 bp, probe
gttcaagaccagcctggccaacatg

SEQ ID NO: 233453 - DNA, 25 bp, probe
gttcgtggaggcctgcctcaacaaa

SEQ ID NO: 233454 - DNA, 25 bp, probe
gttcctggcagaggatgcactcaac

SEQ ID NO: 233455 - DNA, 25 bp, probe
gttccagttgatggatgcacctgcc

SEQ ID NO: 233456 - DNA, 25 bp, probe
gttgactttgtttcatactgccaat

SEQ ID NO: 233457 - DNA, 25 bp, probe
gttgactttgtttcatactgccaat

SEQ ID NO: 233458 - DNA, 25 bp, probe
gttgaagtttttaacatcgatgatg

SEQ ID NO: 233459 - DNA, 25 bp, probe
gttgaagtttttaacatcgatgatg

SEQ ID NO: 233460 - DNA, 25 bp, probe
gttaatagttttaccctctgcattg

SEQ ID NO: 233461 - DNA, 25 bp, probe
gttaataggtttgcccttgcatctc

SEQ ID NO: 233462 - DNA, 25 bp, probe
gttgcattggttattcctttcatcc

SEQ ID NO: 233463 - DNA, 25 bp, probe
gttgcagtattactttgcttttatc

SEQ ID NO: 233464 - DNA, 25 bp, probe
gttcctaatgacgtggactttagca

SEQ ID NO: 233465 - DNA, 25 bp, probe
gttcttctaattgagactgactcca

SEQ ID NO: 233466 - DNA, 25 bp, probe
gttcattcctttcagccatcgtcct

SEQ ID NO: 233467 - DNA, 25 bp, probe
gttcttcccttcatgatagtattct

SEQ ID NO: 233468 - DNA, 25 bp, probe
gttgctttctccaaatgattgtttt

SEQ ID NO: 233469 - DNA, 25 bp, probe
gttcttgtgcatgtttactttatta

SEQ ID NO: 233470 - DNA, 25 bp, probe
gttcattagctggtcttactctacc

SEQ ID NO: 233471 - DNA, 25 bp, probe
gttcatctaggggaagacatctgat

SEQ ID NO: 233472 - DNA, 25 bp, probe
gttgcatctttgttgaaatgatcca

SEQ ID NO: 233473 - DNA, 25 bp, probe
gttcgatcttgcatggagcaatctc

SEQ ID NO: 233474 - DNA, 25 bp, probe
gttgcaccttgtagtggattctgca

SEQ ID NO: 233475 - DNA, 25 bp, probe
gttgcacttgctttgattgaatgtg

SEQ ID NO: 233476 - DNA, 25 bp, probe
gttcagattgctttgattaatccag

SEQ ID NO: 233477 - DNA, 25 bp, probe
gttcagtattcattgatctcactgc

SEQ ID NO: 233478 - DNA, 25 bp, probe
gttcgtttgcaatctacagctagta

SEQ ID NO: 233479 - DNA, 25 bp, probe
gttcgctcattccaactaatcatca

SEQ ID NO: 233480 - DNA, 25 bp, probe
gttgccatcttgaagactttccatc

SEQ ID NO: 233481 - DNA, 25 bp, probe
gttgctatgttatgacactttctca

SEQ ID NO: 233482 - DNA, 25 bp, probe
gttgcatgagttcatactttctacg

SEQ ID NO: 233483 - DNA, 25 bp, probe
gttgcgagatgacatgactgtctgt

SEQ ID NO: 233484 - DNA, 25 bp, probe
gttgctgcaggacgtggctttgcaa

SEQ ID NO: 233485 - DNA, 25 bp, probe
gttgctgcaggacgtggctttgcaa

SEQ ID NO: 233486 - DNA, 25 bp, probe
gttgcgcagtgcctgaagccaggaa

SEQ ID NO: 233487 - DNA, 25 bp, probe
gttgcgcagtgcctgaagccaggaa

SEQ ID NO: 233488 - DNA, 25 bp, probe
gttagcaggtgccaatccagcagtc

SEQ ID NO: 233489 - DNA, 25 bp, probe
gttactagtggatccgagctcggta

SEQ ID NO: 233490 - DNA, 25 bp, probe
gttaccagtaatccattcactcttt

SEQ ID NO: 233491 - DNA, 25 bp, probe
gttccggaaagccttcctcaagatc

SEQ ID NO: 233492 - DNA, 25 bp, probe
gttgccagtgaaacgttcccagata

SEQ ID NO: 233493 - DNA, 25 bp, probe
gttgccaggaatttgctttgtttac

SEQ ID NO: 233494 - DNA, 25 bp, probe
gttccaggaatctcattcattcatt

SEQ ID NO: 233495 - DNA, 25 bp, probe
gttccaagagccttttagtgattaa

SEQ ID NO: 233496 - DNA, 25 bp, probe
gttccaagagccttttagtgattaa

SEQ ID NO: 233497 - DNA, 25 bp, probe
gttctctgcagagtttgttgacttt

SEQ ID NO: 233498 - DNA, 25 bp, probe
gttctctgcagagtttgttgacttt

SEQ ID NO: 233499 - DNA, 25 bp, probe
gttctggatattattaagcacattg

SEQ ID NO: 233500 - DNA, 25 bp, probe
gttctgaaattttgaatcatctctg

SEQ ID NO: 233501 - DNA, 25 bp, probe
gttgctgaacaggttgactatgtca

SEQ ID NO: 233502 - DNA, 25 bp, probe
gttgctgaacaggttgactatgtca

SEQ ID NO: 233503 - DNA, 25 bp, probe
gttgctgaactctttgtatatgcaa

SEQ ID NO: 233504 - DNA, 25 bp, probe
gttgctgttgctctgatgtttgctc

SEQ ID NO: 233505 - DNA, 25 bp, probe
gttgctgttgtcaacatgtctggcc

SEQ ID NO: 233506 - DNA, 25 bp, probe
gttgctttgtggtcatgtatcctat

SEQ ID NO: 233507 - DNA, 25 bp, probe
gttgctattccagtcaatcatgtcg

SEQ ID NO: 233508 - DNA, 25 bp, probe
gttctctcatctttcaatagttgct

SEQ ID NO: 233509 - DNA, 25 bp, probe
gttctctcatctttcaatagttgct

SEQ ID NO: 233510 - DNA, 25 bp, probe
gttcctctgtatgaaagtattgtta

SEQ ID NO: 233511 - DNA, 25 bp, probe
gttcctcattttaaatctgttgttt

SEQ ID NO: 233512 - DNA, 25 bp, probe
gttgcctttcttgaagtgttctctg

SEQ ID NO: 233513 - DNA, 25 bp, probe
gttgcctttcttgaagtgttctctg

SEQ ID NO: 233514 - DNA, 25 bp, probe
gttcctggatctacggagtcttcta

SEQ ID NO: 233515 - DNA, 25 bp, probe
gttccaggatccatgggagcattct

SEQ ID NO: 233516 - DNA, 25 bp, probe
gttcgcaagaacctgatggacatgt

SEQ ID NO: 233517 - DNA, 25 bp, probe
gttccagaggacctgatgccaaggg

SEQ ID NO: 233518 - DNA, 25 bp, probe
gttccatcaatacctgatccagaat

SEQ ID NO: 233519 - DNA, 25 bp, probe
gttccatcaatacctgatccagaat

SEQ ID NO: 233520 - DNA, 25 bp, probe
gttgcacatgcttgaactgtagtaa

SEQ ID NO: 233521 - DNA, 25 bp, probe
gttcgagccgcattctggagaagac

SEQ ID NO: 233522 - DNA, 25 bp, probe
gttcacagcctggatctggggatac

SEQ ID NO: 233523 - DNA, 25 bp, probe
gttgcagcaggctttccggcagaac

SEQ ID NO: 233524 - DNA, 25 bp, probe
gttccaggctttggcgtagcagatg

SEQ ID NO: 233525 - DNA, 25 bp, probe
gttacaagttgtggttcctggtata

SEQ ID NO: 233526 - DNA, 25 bp, probe
gttaaagtagctgctccacggtgca

SEQ ID NO: 233527 - DNA, 25 bp, probe
gttaggaacccggcatgccgagtgc

SEQ ID NO: 233528 - DNA, 25 bp, probe
gttcagatacacccggactcggatc

SEQ ID NO: 233529 - DNA, 25 bp, probe
gttccatacagccttggactagcaa

SEQ ID NO: 233530 - DNA, 25 bp, probe
gttgccatctaccttgggatcaaac

SEQ ID NO: 233531 - DNA, 25 bp, probe
gttgccatctaccttgggatcaaac

SEQ ID NO: 233532 - DNA, 25 bp, probe
gttgccatctaccttgggatcaaac

SEQ ID NO: 233533 - DNA, 25 bp, probe
gttgccatctaccttgggatcaaac

SEQ ID NO: 233534 - DNA, 25 bp, probe
gttccctagcgccttgagtcaaggc

SEQ ID NO: 233535 - DNA, 25 bp, probe
gttccacaagcagattactgcacgg

SEQ ID NO: 233536 - DNA, 25 bp, probe
gttccacagcaagatgtgatcctgc

SEQ ID NO: 233537 - DNA, 25 bp, probe
gttcctgaacaggagtaccctttag

SEQ ID NO: 233538 - DNA, 25 bp, probe
gttcctgaacaggagtaccctttag

SEQ ID NO: 233539 - DNA, 25 bp, probe
gttccataggcacagtagcccttct

SEQ ID NO: 233540 - DNA, 25 bp, probe
gttaaattcagacgtactggcttct

SEQ ID NO: 233541 - DNA, 25 bp, probe
taatatccctccaggaatggttcct

SEQ ID NO: 233542 - DNA, 25 bp, probe
gttatgaacaccagaaaggtcacct

SEQ ID NO: 233543 - DNA, 25 bp, probe
gttctaccccacgaaactgtgactt

SEQ ID NO: 233544 - DNA, 25 bp, probe
gttctaccgatccccagaagtgatc

SEQ ID NO: 233545 - DNA, 25 bp, probe
gttctcacccaacaatgacagttga

SEQ ID NO: 233546 - DNA, 25 bp, probe
gttcttccgatatcagagactttga

SEQ ID NO: 233547 - DNA, 25 bp, probe
gttcttctcaagggtgcgagctcat

SEQ ID NO: 233548 - DNA, 25 bp, probe
gttcctctctgagcgagcggacttc

SEQ ID NO: 233549 - DNA, 25 bp, probe
gttcctctctacttggggaaatcag

SEQ ID NO: 233550 - DNA, 25 bp, probe
gttgcctcggcagctggtgcgaaaa

SEQ ID NO: 233551 - DNA, 25 bp, probe
gttgcccagcctgggtgtcaataat

SEQ ID NO: 233552 - DNA, 25 bp, probe
gttgcccaggttggtgtggaattcc

SEQ ID NO: 233553 - DNA, 25 bp, probe
gttcccaaatctgtgctggacaagc

SEQ ID NO: 233554 - DNA, 25 bp, probe
gttctccatttctaatggccaaacc

SEQ ID NO: 233555 - DNA, 25 bp, probe
gttgcctcatctacaatttgagaaa

SEQ ID NO: 233556 - DNA, 25 bp, probe
gttccgcctgtctcaagatgatata

SEQ ID NO: 233557 - DNA, 25 bp, probe
gttccatccgtaaaatatgtaaagg

SEQ ID NO: 233558 - DNA, 25 bp, probe
gttccatctcctataatctgtcaaa

SEQ ID NO: 233559 - DNA, 25 bp, probe
gttgctgactcccttagtctagaaa

SEQ ID NO: 233560 - DNA, 25 bp, probe
gttcagttccgggcaactcagaaga

SEQ ID NO: 233561 - DNA, 25 bp, probe
gttgcgtcccagggaccaagagaaa

SEQ ID NO: 233562 - DNA, 25 bp, probe
gttgctgggccttagatccagagga

SEQ ID NO: 233563 - DNA, 25 bp, probe
gttctgggcatttcatgtcaatgga

SEQ ID NO: 233564 - DNA, 25 bp, probe
gttctgggcatttcatgtcaatgga

SEQ ID NO: 233565 - DNA, 25 bp, probe
gttcccatctgttcaggcaaatgca

SEQ ID NO: 233566 - DNA, 25 bp, probe
gttcaacatcgtcaggatcctaatg

SEQ ID NO: 233567 - DNA, 25 bp, probe
gttctacacagtcagatgccagtaa

SEQ ID NO: 233568 - DNA, 25 bp, probe
gttcatccctgcaaggatctgcagt

SEQ ID NO: 233569 - DNA, 25 bp, probe
gttgctgctgtccatggtagtcagt

SEQ ID NO: 233570 - DNA, 25 bp, probe
gttgctctgatgtttgctcagtgca

SEQ ID NO: 233571 - DNA, 25 bp, probe
gttgctagcatgttatgatttcata

SEQ ID NO: 233572 - DNA, 25 bp, probe
gttctattctcctatgcttgcatag

SEQ ID NO: 233573 - DNA, 25 bp, probe
gttctaatgctggcaattcagcaaa

SEQ ID NO: 233574 - DNA, 25 bp, probe
gttctacctggattgtcaacaactg

SEQ ID NO: 233575 - DNA, 25 bp, probe
gttctctcctcttttaacaacagtc

SEQ ID NO: 233576 - DNA, 25 bp, probe
gttcactcacatctgtaaaaacaat

SEQ ID NO: 233577 - DNA, 25 bp, probe
gttcactcacatctgtaaaaacaat

SEQ ID NO: 233578 - DNA, 25 bp, probe
gttcctagcaagttgactaaacagc

SEQ ID NO: 233579 - DNA, 25 bp, probe
gttcctagcaagttgactaaacagc

SEQ ID NO: 233580 - DNA, 25 bp, probe
gttcccagcaagtgctgaaactcac

SEQ ID NO: 233581 - DNA, 25 bp, probe
gttcctatcaaattggactttccct

SEQ ID NO: 233582 - DNA, 25 bp, probe
gttctatatgaacttggaattattg

SEQ ID NO: 233583 - DNA, 25 bp, probe
gttcttgattagtatcgtgagtttg

SEQ ID NO: 233584 - DNA, 25 bp, probe
gttcgcttccgttggtagcttgagt

SEQ ID NO: 233585 - DNA, 25 bp, probe
gtctggttccacaggtaggtcgaat

SEQ ID NO: 233586 - DNA, 25 bp, probe
gtcgggacacctgggcaaagacgaa

SEQ ID NO: 233587 - DNA, 25 bp, probe
gttcgaaacctgtccataaagtaat

SEQ ID NO: 233588 - DNA, 25 bp, probe
gttgctggaatcatctttaaagtta

SEQ ID NO: 233589 - DNA, 25 bp, probe
gttctagagatcatttggaaaaaaa

SEQ ID NO: 233590 - DNA, 25 bp, probe
gttctaagtcctttttaaagccatg

SEQ ID NO: 233591 - DNA, 25 bp, probe
gttcgggtccttttggacagaggtg

SEQ ID NO: 233592 - DNA, 25 bp, probe
gttcgggtccttttggacagaggtg

SEQ ID NO: 233593 - DNA, 25 bp, probe
gttcgtggtgccaatcagtggatca

SEQ ID NO: 233594 - DNA, 25 bp, probe
gttcaagaagccaacgctgagtcag

SEQ ID NO: 233595 - DNA, 25 bp, probe
gttcgaaaactcagcaatggcagat

SEQ ID NO: 233596 - DNA, 25 bp, probe
gttcggaagtctaagcagggcagga

SEQ ID NO: 233597 - DNA, 25 bp, probe
gttcggaagtctaagcagggcagga

SEQ ID NO: 233598 - DNA, 25 bp, probe
gttctgggaggcttacagggtgtac

SEQ ID NO: 233599 - DNA, 25 bp, probe
gttcgtcgtggctctcattgggaac

SEQ ID NO: 233600 - DNA, 25 bp, probe
gttcgacgtggctgattggctggag

SEQ ID NO: 233601 - DNA, 25 bp, probe
gttcgacgtggctgattggctggag

SEQ ID NO: 233602 - DNA, 25 bp, probe
gttctgggcattaagatcggctggg

SEQ ID NO: 233603 - DNA, 25 bp, probe
gttctgtgaactgaatgcagcctgg

SEQ ID NO: 233604 - DNA, 25 bp, probe
gttctggcggcagcaagctgctcgg

SEQ ID NO: 233605 - DNA, 25 bp, probe
gttcatggggcacacccaggggaat

SEQ ID NO: 233606 - DNA, 25 bp, probe
gttctggaggaaccgcaagccggag

SEQ ID NO: 233607 - DNA, 25 bp, probe
gttcttccgagaccaagggaggcag

SEQ ID NO: 233608 - DNA, 25 bp, probe
gttcttccgagaccaagggaggcag

SEQ ID NO: 233609 - DNA, 25 bp, probe
gttcttccgagaccaagggaggcag

SEQ ID NO: 233610 - DNA, 25 bp, probe
gttcttccgagaccaagggaggcag

SEQ ID NO: 233611 - DNA, 25 bp, probe
gttccttgcagctgaccgaggagga

SEQ ID NO: 233612 - DNA, 25 bp, probe
gttccatatagacaccaaggaggcg

SEQ ID NO: 233613 - DNA, 25 bp, probe
gttccaagaggccaagcaaggaagc

SEQ ID NO: 233614 - DNA, 25 bp, probe
gttcgcggaggcagaggatggaggc

SEQ ID NO: 233615 - DNA, 25 bp, probe
gttccggcatggctaggctgagagc

SEQ ID NO: 233616 - DNA, 25 bp, probe
gttccaggatcactgttggctgcta

SEQ ID NO: 233617 - DNA, 25 bp, probe
gttccaggatcactgttggctgcta

SEQ ID NO: 233618 - DNA, 25 bp, probe
gttccagagattcgatcctcttaag

SEQ ID NO: 233619 - DNA, 25 bp, probe
gttcgcatcagtggcgatgacttta

SEQ ID NO: 233620 - DNA, 25 bp, probe
gttcctctttgcatgatctgtcaaa

SEQ ID NO: 233621 - DNA, 25 bp, probe
gttcctctttgcatgatctgtcaaa

SEQ ID NO: 233622 - DNA, 25 bp, probe
gttcctgcttgggtgcttatcaggt

SEQ ID NO: 233623 - DNA, 25 bp, probe
gttctctcgtgggagacgcaggcac

SEQ ID NO: 233624 - DNA, 25 bp, probe
gttcatccagcaagtctacctggca

SEQ ID NO: 233625 - DNA, 25 bp, probe
gttcatccagcaagtctacctggca

SEQ ID NO: 233626 - DNA, 25 bp, probe
gttcatcaccaacaatcagctgtca

SEQ ID NO: 233627 - DNA, 25 bp, probe
gttacccaagctgaacattattaaa

SEQ ID NO: 233628 - DNA, 25 bp, probe
gttacccaagctgaacattattaaa

SEQ ID NO: 233629 - DNA, 25 bp, probe
gttctcggcaccttaaattattaga

SEQ ID NO: 233630 - DNA, 25 bp, probe
gttccccacctacaaatatgtcgac

SEQ ID NO: 233631 - DNA, 25 bp, probe
gttcccccagctgtaagacagggac

SEQ ID NO: 233632 - DNA, 25 bp, probe
gttccatgcaacgtcctgaggacag

SEQ ID NO: 233633 - DNA, 25 bp, probe
gttccatgcaacgtcctgaggacag

SEQ ID NO: 233634 - DNA, 25 bp, probe
gttcgctaatgagctcgaggaagcc

SEQ ID NO: 233635 - DNA, 25 bp, probe
gttccggcagagcccggtgaagacc

SEQ ID NO: 233636 - DNA, 25 bp, probe
gttaaggcacacctgctgagtaaaa

SEQ ID NO: 233637 - DNA, 25 bp, probe
gttagggccaacagctgataccaag

SEQ ID NO: 233638 - DNA, 25 bp, probe
gttcagggtaaaggctgtagataat

SEQ ID NO: 233639 - DNA, 25 bp, probe
gttcaggcaggtgacgtgtggaaag

SEQ ID NO: 233640 - DNA, 25 bp, probe
gttgcggggaagctgtgtggaagga

SEQ ID NO: 233641 - DNA, 25 bp, probe
gtagggggccaggttttcatcctga

SEQ ID NO: 233642 - DNA, 25 bp, probe
gtagaagggccaggactttgccctt

SEQ ID NO: 233643 - DNA, 25 bp, probe
gtagaagggccaggactttgccctt

SEQ ID NO: 233644 - DNA, 25 bp, probe
gtagcaataagctggactagtgtcc

SEQ ID NO: 233645 - DNA, 25 bp, probe
gtagagcaatattaaacaagcttcc

SEQ ID NO: 233646 - DNA, 25 bp, probe
gttaaaatggaatccgctttcaaag

SEQ ID NO: 233647 - DNA, 25 bp, probe
gttaaaatggaatccgctttcaaag

SEQ ID NO: 233648 - DNA, 25 bp, probe
gttcttattggatactcctcttatt

SEQ ID NO: 233649 - DNA, 25 bp, probe
gttcttattggatactcctcttatt

SEQ ID NO: 233650 - DNA, 25 bp, probe
gttctcaaatgggctaggccttttt

SEQ ID NO: 233651 - DNA, 25 bp, probe
gttccagacatgagcttgagcaggc

SEQ ID NO: 233652 - DNA, 25 bp, probe
gttccaacgcaagttgagctgctca

SEQ ID NO: 233653 - DNA, 25 bp, probe
gttgcccacgcaggagtgcagtggc

SEQ ID NO: 233654 - DNA, 25 bp, probe
gttcccaggcaggatgagctggggt

SEQ ID NO: 233655 - DNA, 25 bp, probe
gttcccaaaacaatggtgtggtgaa

SEQ ID NO: 233656 - DNA, 25 bp, probe
gttcccagaaccttgatggggtgag

SEQ ID NO: 233657 - DNA, 25 bp, probe
gttcccgacaccagaagctgttggg

SEQ ID NO: 233658 - DNA, 25 bp, probe
tgaattcctaccccgaactggaagc

SEQ ID NO: 233659 - DNA, 25 bp, probe
gtttaaacctcacgtgcctggaagc

SEQ ID NO: 233660 - DNA, 25 bp, probe
gttaattaactgtgtgcttccaaca

SEQ ID NO: 233661 - DNA, 25 bp, probe
gttagtattaatgcgttggcccacg

SEQ ID NO: 233662 - DNA, 25 bp, probe
gttagtattaatgcgttggcccacg

SEQ ID NO: 233663 - DNA, 25 bp, probe
gttagccggaatactggggcctgcc

SEQ ID NO: 233664 - DNA, 25 bp, probe
gttacactggactctaagccacttc

SEQ ID NO: 233665 - DNA, 25 bp, probe
gttacactggactctaagccacttc

SEQ ID NO: 233666 - DNA, 25 bp, probe
gttacactggactctaagccacttc

SEQ ID NO: 233667 - DNA, 25 bp, probe
gttcatactccagcctttgaacttc

SEQ ID NO: 233668 - DNA, 25 bp, probe
gtttgacccagcactttgttgtggc

SEQ ID NO: 233669 - DNA, 25 bp, probe
gttctcccaagagctttgttggatg

SEQ ID NO: 233670 - DNA, 25 bp, probe
gttcttccaagatttttgttcatct

SEQ ID NO: 233671 - DNA, 25 bp, probe
gttccttaactattttgtctgccat

SEQ ID NO: 233672 - DNA, 25 bp, probe
gttcctatggaaacattttatactg

SEQ ID NO: 233673 - DNA, 25 bp, probe
gttcccttgaagtatttatttatgt

SEQ ID NO: 233674 - DNA, 25 bp, probe
gttccttatatcgttaaatctttgt

SEQ ID NO: 233675 - DNA, 25 bp, probe
gttccttatatcgttaaatctttgt

SEQ ID NO: 233676 - DNA, 25 bp, probe
gttctttattcatttgaacacgttt

SEQ ID NO: 233677 - DNA, 25 bp, probe
gttctttattcatttgaacacgttt

SEQ ID NO: 233678 - DNA, 25 bp, probe
gttcttgtgtcgtttgtgaaagttc

SEQ ID NO: 233679 - DNA, 25 bp, probe
gttcctggtggaatttaacctctgc

SEQ ID NO: 233680 - DNA, 25 bp, probe
gttccggggatgacatctctgtctt

SEQ ID NO: 233681 - DNA, 25 bp, probe
gttccaaggagaattgcccctctgt

SEQ ID NO: 233682 - DNA, 25 bp, probe
gtatccgagtggaaatgcagtcccg

SEQ ID NO: 233683 - DNA, 25 bp, probe
gttcacagcagtgggtaggcccagc

SEQ ID NO: 233684 - DNA, 25 bp, probe
gttcacagcatgtcggagttccaga

SEQ ID NO: 233685 - DNA, 25 bp, probe
gtatatgacagctgcggtacttgag

SEQ ID NO: 233686 - DNA, 25 bp, probe
gttctacagcatgcgcagtagccgg

SEQ ID NO: 233687 - DNA, 25 bp, probe
gttctacagcatgcgcagtagccgg

SEQ ID NO: 233688 - DNA, 25 bp, probe
gttccagcagctgaagcaggtggtg

SEQ ID NO: 233689 - DNA, 25 bp, probe
gttcccattcaacagagtagggtgc

SEQ ID NO: 233690 - DNA, 25 bp, probe
gttcaccaccgagagcgacgtgtgg

SEQ ID NO: 233691 - DNA, 25 bp, probe
gttcacctactgtgacgacaggatt

SEQ ID NO: 233692 - DNA, 25 bp, probe
gttcctctactatgagcaagtctga

SEQ ID NO: 233693 - DNA, 25 bp, probe
gttcctctactatgagcaagtctga

SEQ ID NO: 233694 - DNA, 25 bp, probe
tgcttacttaccttactaacttctc

SEQ ID NO: 233695 - DNA, 25 bp, probe
gttacgtcacttttctatagttttg

SEQ ID NO: 233696 - DNA, 25 bp, probe
gttacgtcacttttctatagttttg

SEQ ID NO: 233697 - DNA, 25 bp, probe
gttccattctctctcctgtactttt

SEQ ID NO: 233698 - DNA, 25 bp, probe
gttcgcgattatcttctatatcttc

SEQ ID NO: 233699 - DNA, 25 bp, probe
gttcctgttacaatatttagcatta

SEQ ID NO: 233700 - DNA, 25 bp, probe
gttcctgttacaatatttagcatta

SEQ ID NO: 233701 - DNA, 25 bp, probe
gttctctgttaccatattttgtatt

SEQ ID NO: 233702 - DNA, 25 bp, probe
gttctttgccctaatgtttcatttg

SEQ ID NO: 233703 - DNA, 25 bp, probe
gttctactgacctttgtccttaggt

SEQ ID NO: 233704 - DNA, 25 bp, probe
gttccactgatgtgtgttaattatg

SEQ ID NO: 233705 - DNA, 25 bp, probe
gttccgctgtacatgttcagtataa

SEQ ID NO: 233706 - DNA, 25 bp, probe
gttccgctgtacatgttcagtataa

SEQ ID NO: 233707 - DNA, 25 bp, probe
gttcccagaccaatatacattaaga

SEQ ID NO: 233708 - DNA, 25 bp, probe
gttcccacctgaagagactctgaag

SEQ ID NO: 233709 - DNA, 25 bp, probe
gttaccaccagcagcaacatctggc

SEQ ID NO: 233710 - DNA, 25 bp, probe
gttaccaacatatgtcatgctgctg

SEQ ID NO: 233711 - DNA, 25 bp, probe
gttcaccaaatcttcatagacgaca

SEQ ID NO: 233712 - DNA, 25 bp, probe
gttcaccaaatcttcatagacgaca

SEQ ID NO: 233713 - DNA, 25 bp, probe
gttctccacaaccacagggcagaga

SEQ ID NO: 233714 - DNA, 25 bp, probe
gttcctgctgcagatcaaggacaga

SEQ ID NO: 233715 - DNA, 25 bp, probe
gttcctgctgcagatcaaggacaga

SEQ ID NO: 233716 - DNA, 25 bp, probe
gttcctgccagtgcagatctggaga

SEQ ID NO: 233717 - DNA, 25 bp, probe
gttcctgccagtgcagatctggaga

SEQ ID NO: 233718 - DNA, 25 bp, probe
gttctgtccttgtcatgatgctgga

SEQ ID NO: 233719 - DNA, 25 bp, probe
gttctgcccaaattatgtgaaatgc

SEQ ID NO: 233720 - DNA, 25 bp, probe
gttcctctcaaactcaggatcattc

SEQ ID NO: 233721 - DNA, 25 bp, probe
gttccccagagactagtgagagtca

SEQ ID NO: 233722 - DNA, 25 bp, probe
gttccacaatcatctattgagtgta

SEQ ID NO: 233723 - DNA, 25 bp, probe
gttcgcaaagaactactgggcatgt

SEQ ID NO: 233724 - DNA, 25 bp, probe
gttcccactcaatacgctggagtcc

SEQ ID NO: 233725 - DNA, 25 bp, probe
gtttctaagcaatacgaggccacct

SEQ ID NO: 233726 - DNA, 25 bp, probe
gtttctaagcaatacgaggccacct

SEQ ID NO: 233727 - DNA, 25 bp, probe
gttagtatacaatattggggacacc

SEQ ID NO: 233728 - DNA, 25 bp, probe
gttcagttcccccgagtgggatgac

SEQ ID NO: 233729 - DNA, 25 bp, probe
gttcttagctctgcagaaggggttc

SEQ ID NO: 233730 - DNA, 25 bp, probe
gttctctgcccagcgaagcaggagt

SEQ ID NO: 233731 - DNA, 25 bp, probe
gttctctgcccagcgaagcaggagt

SEQ ID NO: 233732 - DNA, 25 bp, probe
gttcccatccagccgatgaaggagc

SEQ ID NO: 233733 - DNA, 25 bp, probe
gttctcttcaagtcgcagatagaga

SEQ ID NO: 233734 - DNA, 25 bp, probe
gttcctgctgcgtggcatggaagca

SEQ ID NO: 233735 - DNA, 25 bp, probe
gttcctgctggggcaagcaggagaa

SEQ ID NO: 233736 - DNA, 25 bp, probe
gttcgctccctggataagatggaaa

SEQ ID NO: 233737 - DNA, 25 bp, probe
gttcagtcctagcaagaagcgagaa

SEQ ID NO: 233738 - DNA, 25 bp, probe
gttcatcgtctactcggagagcaaa

SEQ ID NO: 233739 - DNA, 25 bp, probe
gttcatcgtctactcggagagcaaa

SEQ ID NO: 233740 - DNA, 25 bp, probe
gttacaggctagctaaagtagaggg

SEQ ID NO: 233741 - DNA, 25 bp, probe
gttccaggctcttgaaatagtgcag

SEQ ID NO: 233742 - DNA, 25 bp, probe
gttcctgtctctggcaagtagtcca

SEQ ID NO: 233743 - DNA, 25 bp, probe
gttcctgttttcatctagtcagaga

SEQ ID NO: 233744 - DNA, 25 bp, probe
gttcgcttttctatcatcagaagac

SEQ ID NO: 233745 - DNA, 25 bp, probe
gttccttttgctctgatagacaaaa

SEQ ID NO: 233746 - DNA, 25 bp, probe
gttcccctgggattctgaatataac

SEQ ID NO: 233747 - DNA, 25 bp, probe
gttcctggctatcgagtctgaatct

SEQ ID NO: 233748 - DNA, 25 bp, probe
gttctctggttggaacagatactct

SEQ ID NO: 233749 - DNA, 25 bp, probe
gttctgtgtgttcaacaacgtggcc

SEQ ID NO: 233750 - DNA, 25 bp, probe
gttctgtttttctacaacacagagt

SEQ ID NO: 233751 - DNA, 25 bp, probe
gttctactgtttcctcaatagtgag

SEQ ID NO: 233752 - DNA, 25 bp, probe
gttctcaggtgttgccaaatatgtc

SEQ ID NO: 233753 - DNA, 25 bp, probe
gttctcaggcacaccaaagggcagt

SEQ ID NO: 233754 - DNA, 25 bp, probe
gttctcaggcacaccaaagggcagt

SEQ ID NO: 233755 - DNA, 25 bp, probe
gttcttgacatcacacgatgaggcg

SEQ ID NO: 233756 - DNA, 25 bp, probe
gttctgtgtctgcaaggatgagtgg

SEQ ID NO: 233757 - DNA, 25 bp, probe
gttcggctccgaggtggagctgaga

SEQ ID NO: 233758 - DNA, 25 bp, probe
gttcagggtggatgtgggcatgcag

SEQ ID NO: 233759 - DNA, 25 bp, probe
gttagggtagcatgggattacaggg

SEQ ID NO: 233760 - DNA, 25 bp, probe
gttagagggccgagatgttgatccg

SEQ ID NO: 233761 - DNA, 25 bp, probe
gttagagggccgagatgttgatccg

SEQ ID NO: 233762 - DNA, 25 bp, probe
gttcagcagagtcagggatgggtcc

SEQ ID NO: 233763 - DNA, 25 bp, probe
gttacaggagtacctagggagccta

SEQ ID NO: 233764 - DNA, 25 bp, probe
gttctaatcttaggcgcttcaggcg

SEQ ID NO: 233765 - DNA, 25 bp, probe
gttagaactgaggtgggctagtggg

SEQ ID NO: 233766 - DNA, 25 bp, probe
gttctaaaacggcagcgagagctgt

SEQ ID NO: 233767 - DNA, 25 bp, probe
gttctctccaacatggaaaggcttt

SEQ ID NO: 233768 - DNA, 25 bp, probe
gttccatttgacagagcaaaggcac

SEQ ID NO: 233769 - DNA, 25 bp, probe
gttccatttgacagagcaaaggcac

SEQ ID NO: 233770 - DNA, 25 bp, probe
gttctgctcatggctcagaggaaca

SEQ ID NO: 233771 - DNA, 25 bp, probe
gttctgctcatggctcagaggaaca

SEQ ID NO: 233772 - DNA, 25 bp, probe
gttcagcatcgcggatgaagacgca

SEQ ID NO: 233773 - DNA, 25 bp, probe
gttcagcatcgcggatgaagacgca

SEQ ID NO: 233774 - DNA, 25 bp, probe
gttcatgagcctggaaagaatcaaa

SEQ ID NO: 233775 - DNA, 25 bp, probe
gttaagctctacatagattaaattg

SEQ ID NO: 233776 - DNA, 25 bp, probe
gttaagctctacatagattaaattg

SEQ ID NO: 233777 - DNA, 25 bp, probe
gttaaatcccttgatctatacactg

SEQ ID NO: 233778 - DNA, 25 bp, probe
gttagaataacttgctactcatggc

SEQ ID NO: 233779 - DNA, 25 bp, probe
gttcagaatcaacatctcacacaac

SEQ ID NO: 233780 - DNA, 25 bp, probe
gttctgttcattcattcatccatac

SEQ ID NO: 233781 - DNA, 25 bp, probe
gttcctgtattgagatgcatcaatg

SEQ ID NO: 233782 - DNA, 25 bp, probe
gttcttgatgaccagtatgtcagtt

SEQ ID NO: 233783 - DNA, 25 bp, probe
gttctccatcagccagatgatgttt

SEQ ID NO: 233784 - DNA, 25 bp, probe
gtaccaaagacagtggtggtccggt

SEQ ID NO: 233785 - DNA, 25 bp, probe
gtaccaaagacagtggtggtccggt

SEQ ID NO: 233786 - DNA, 25 bp, probe
gtaccaaagacagtggtggtccggt

SEQ ID NO: 233787 - DNA, 25 bp, probe
gttacgtagagagggtggccacaag

SEQ ID NO: 233788 - DNA, 25 bp, probe
gttcacttgggactgttgatgctcc

SEQ ID NO: 233789 - DNA, 25 bp, probe
gttcagctatgtggacctagtggaa

SEQ ID NO: 233790 - DNA, 25 bp, probe
gttctttgtggacctaggcagttcc

SEQ ID NO: 233791 - DNA, 25 bp, probe
gttcattctggtaccacaggcagtt

SEQ ID NO: 233792 - DNA, 25 bp, probe
gttctgtggagaatgctatctggca

SEQ ID NO: 233793 - DNA, 25 bp, probe
gttcagtgagagccagcaaccagaa

SEQ ID NO: 233794 - DNA, 25 bp, probe
gttcagtgagagccagcaaccagaa

SEQ ID NO: 233795 - DNA, 25 bp, probe
gttcctgcaacagcagaccaagcac

SEQ ID NO: 233796 - DNA, 25 bp, probe
gttctgctgacattaaatccaacca

SEQ ID NO: 233797 - DNA, 25 bp, probe
gttctgctacgtggagatcctcagg

SEQ ID NO: 233798 - DNA, 25 bp, probe
gttctgctacgtggagatcctcagg

SEQ ID NO: 233799 - DNA, 25 bp, probe
gttctgtacgaactgatgaccggcc

SEQ ID NO: 233800 - DNA, 25 bp, probe
gttcgttctgtactgttactgggcc

SEQ ID NO: 233801 - DNA, 25 bp, probe
gttcttatcttctatgttacggtga

SEQ ID NO: 233802 - DNA, 25 bp, probe
gttcatgtactttgagttccctcag

SEQ ID NO: 233803 - DNA, 25 bp, probe
gttcatgtcagtgagagcttcccac

SEQ ID NO: 233804 - DNA, 25 bp, probe
gttcatggcgagagggatgctccac

SEQ ID NO: 233805 - DNA, 25 bp, probe
gttcagcaagagaggcagacccagc

SEQ ID NO: 233806 - DNA, 25 bp, probe
gttcacagggccgcagaaagctgca

SEQ ID NO: 233807 - DNA, 25 bp, probe
gttcctgaatgcaccataatcgctg

SEQ ID NO: 233808 - DNA, 25 bp, probe
gttcctacatcaatgccaactacat

SEQ ID NO: 233809 - DNA, 25 bp, probe
gttccgagtgcaatgcccactgaaa

SEQ ID NO: 233810 - DNA, 25 bp, probe
gttccgagtgcaatgcccactgaaa

SEQ ID NO: 233811 - DNA, 25 bp, probe
gttcctgatgataacccagtagcaa

SEQ ID NO: 233812 - DNA, 25 bp, probe
gttcctgatggaattcaccatagcc

SEQ ID NO: 233813 - DNA, 25 bp, probe
gttcctgcagaaattattcttgcac

SEQ ID NO: 233814 - DNA, 25 bp, probe
gttctctagcataatttgtattgaa

SEQ ID NO: 233815 - DNA, 25 bp, probe
gttctatatgcaaacatgatgtctt

SEQ ID NO: 233816 - DNA, 25 bp, probe
gttcattcacagcactggatgcaat

SEQ ID NO: 233817 - DNA, 25 bp, probe
gttcattcacagcactggatgcaat

SEQ ID NO: 233818 - DNA, 25 bp, probe
gttctctctctgagctggatctagc

SEQ ID NO: 233819 - DNA, 25 bp, probe
gttctgtcaccaactgaagtggcta

SEQ ID NO: 233820 - DNA, 25 bp, probe
gttcttcagtcgatatatgggctat

SEQ ID NO: 233821 - DNA, 25 bp, probe
gttctttctgccttataaggctagc

SEQ ID NO: 233822 - DNA, 25 bp, probe
gttcttcaagcctagacaacctaag

SEQ ID NO: 233823 - DNA, 25 bp, probe
gttctttagccatacatatcattgc

SEQ ID NO: 233824 - DNA, 25 bp, probe
gttctgtgtctgcagaaattttgtt

SEQ ID NO: 233825 - DNA, 25 bp, probe
gttctgtgtctgcagaaattttgtt

SEQ ID NO: 233826 - DNA, 25 bp, probe
gttctgatacttcacgtttatgctt

SEQ ID NO: 233827 - DNA, 25 bp, probe
gttctatttgtgcacgttccagact

SEQ ID NO: 233828 - DNA, 25 bp, probe
gttctatttgtgcacgttccagact

SEQ ID NO: 233829 - DNA, 25 bp, probe
gttcgatttgagccagggaaacctc

SEQ ID NO: 233830 - DNA, 25 bp, probe
gttctcatttgatcaggggaggcct

SEQ ID NO: 233831 - DNA, 25 bp, probe
gttctttgtaaacttggacaccatc

SEQ ID NO: 233832 - DNA, 25 bp, probe
gttctacgataagcattgtgacctg

SEQ ID NO: 233833 - DNA, 25 bp, probe
gttcgaggagacacgattcaccgcg

SEQ ID NO: 233834 - DNA, 25 bp, probe
gttcctgtggaatcagacctccagg

SEQ ID NO: 233835 - DNA, 25 bp, probe
gttccggaagaaacatcctccggct

SEQ ID NO: 233836 - DNA, 25 bp, probe
gtttagggcaaatcaccctaggcca

SEQ ID NO: 233837 - DNA, 25 bp, probe
gttctttacaaatatttgcttggca

SEQ ID NO: 233838 - DNA, 25 bp, probe
gttcttaagacgtgattttgctgta

SEQ ID NO: 233839 - DNA, 25 bp, probe
gtttggaatgggccgttaggagtat

SEQ ID NO: 233840 - DNA, 25 bp, probe
gttctggagacaatcgggaaggggt

SEQ ID NO: 233841 - DNA, 25 bp, probe
gttctggaaagtgagctgaagcgca

SEQ ID NO: 233842 - DNA, 25 bp, probe
gttcctgggactgtctgagatggca

SEQ ID NO: 233843 - DNA, 25 bp, probe
gttcctgcaggattactttgatggc

SEQ ID NO: 233844 - DNA, 25 bp, probe
gttccgcatggatgactttgatgta

SEQ ID NO: 233845 - DNA, 25 bp, probe
gttcaccatagattgacatttcaga

SEQ ID NO: 233846 - DNA, 25 bp, probe
gttcaccatagattgacatttcaga

SEQ ID NO: 233847 - DNA, 25 bp, probe
gttcaagaatcaatactttcaaccc

SEQ ID NO: 233848 - DNA, 25 bp, probe
gttctcagaatctgatgctttctga

SEQ ID NO: 233849 - DNA, 25 bp, probe
gttctgatgatgatagagcttctaa

SEQ ID NO: 233850 - DNA, 25 bp, probe
gttctgtgcatagagacctttaagc

SEQ ID NO: 233851 - DNA, 25 bp, probe
gttctggctacttgaggaccaaagg

SEQ ID NO: 233852 - DNA, 25 bp, probe
gttcttgtttagagaccagagcagg

SEQ ID NO: 233853 - DNA, 25 bp, probe
gttcttgggcaacagtccagaagca

SEQ ID NO: 233854 - DNA, 25 bp, probe
gttctctttcaacatgttcgaccac

SEQ ID NO: 233855 - DNA, 25 bp, probe
gtttcgtatatctgttctcggtact

SEQ ID NO: 233856 - DNA, 25 bp, probe
gtttcgtatatctgttctcggtact

SEQ ID NO: 233857 - DNA, 25 bp, probe
gtttacttatcttatgccacgggaa

SEQ ID NO: 233858 - DNA, 25 bp, probe
gttctttgttctttgtcacagggac

SEQ ID NO: 233859 - DNA, 25 bp, probe
gttctttgttctttgtcacagggac

SEQ ID NO: 233860 - DNA, 25 bp, probe
gtttttatagttattcagggacact

SEQ ID NO: 233861 - DNA, 25 bp, probe
gttattttccttctgaagtctgagc

SEQ ID NO: 233862 - DNA, 25 bp, probe
gtgataattaccatccttgaccagg

SEQ ID NO: 233863 - DNA, 25 bp, probe
gttaattttaaccgctatagagtat

SEQ ID NO: 233864 - DNA, 25 bp, probe
gttcactctatttattggggaagga

SEQ ID NO: 233865 - DNA, 25 bp, probe
gttcactctgaatctgatgttggca

SEQ ID NO: 233866 - DNA, 25 bp, probe
gttcaatctgattcctccagtgtgt

SEQ ID NO: 233867 - DNA, 25 bp, probe
gtatcaatagtgtcattccatgttt

SEQ ID NO: 233868 - DNA, 25 bp, probe
gttcagtgaagagtcccatgtttag

SEQ ID NO: 233869 - DNA, 25 bp, probe
gttactcaagccaccacattttgta

SEQ ID NO: 233870 - DNA, 25 bp, probe
gttagccaagtaaatatcattgttg

SEQ ID NO: 233871 - DNA, 25 bp, probe
gttagcgtcataaagtccagcttgt

SEQ ID NO: 233872 - DNA, 25 bp, probe
gttagcatcactaacctgacagttg

SEQ ID NO: 233873 - DNA, 25 bp, probe
gttcatgtacttttcattcattgat

SEQ ID NO: 233874 - DNA, 25 bp, probe
gttcatgtacttggtcacggtggca

SEQ ID NO: 233875 - DNA, 25 bp, probe
gttatattctggggcttggagaccg

SEQ ID NO: 233876 - DNA, 25 bp, probe
gttcttgttgtgaccagtggaactg

SEQ ID NO: 233877 - DNA, 25 bp, probe
gttcttgttgtgaccagtggaactg

SEQ ID NO: 233878 - DNA, 25 bp, probe
gttctgtgtcaaagaagtgcagaac

SEQ ID NO: 233879 - DNA, 25 bp, probe
gttcgtgataactagagtcagagtc

SEQ ID NO: 233880 - DNA, 25 bp, probe
gttctctgtaactcttcaattctaa

SEQ ID NO: 233881 - DNA, 25 bp, probe
gtttttaattactcagatactcgtg

SEQ ID NO: 233882 - DNA, 25 bp, probe
gttttttcttacactttgtcatggt

SEQ ID NO: 233883 - DNA, 25 bp, probe
gtttatgcttctgaactcgggtttc

SEQ ID NO: 233884 - DNA, 25 bp, probe
gtttctgcatttgtataatggggct

SEQ ID NO: 233885 - DNA, 25 bp, probe
gttatgccggtggttaatgtggacg

SEQ ID NO: 233886 - DNA, 25 bp, probe
gtgtgatttggtgtaggtaggtctg

SEQ ID NO: 233887 - DNA, 25 bp, probe
gtattttggtcacagggtggttttg

SEQ ID NO: 233888 - DNA, 25 bp, probe
gtttagggatcacactggttggtca

SEQ ID NO: 233889 - DNA, 25 bp, probe
gttttggtggggactttgatggtgt

SEQ ID NO: 233890 - DNA, 25 bp, probe
gttcttttggtgccatgttttgtgg

SEQ ID NO: 233891 - DNA, 25 bp, probe
gttcttttggtgccatgttttgtgg

SEQ ID NO: 233892 - DNA, 25 bp, probe
gttctttgttggcattttcgatata

SEQ ID NO: 233893 - DNA, 25 bp, probe
gttctgttgagtggcacttgctttg

SEQ ID NO: 233894 - DNA, 25 bp, probe
gttcatgtgtgctgcagtcttcttc

SEQ ID NO: 233895 - DNA, 25 bp, probe
gttcagcttgcactaatctatataa

SEQ ID NO: 233896 - DNA, 25 bp, probe
gttcagctgccacaatagacatcat

SEQ ID NO: 233897 - DNA, 25 bp, probe
gttcagatgcttcttaggccacatc

SEQ ID NO: 233898 - DNA, 25 bp, probe
gttaaggtgttctagagccatttgc

SEQ ID NO: 233899 - DNA, 25 bp, probe
gttacaggtttatcctcactgcctg

SEQ ID NO: 233900 - DNA, 25 bp, probe
gttcacaggcagcaaacctcctggg

SEQ ID NO: 233901 - DNA, 25 bp, probe
gttcaagaaattgttctgcctgggc

SEQ ID NO: 233902 - DNA, 25 bp, probe
gttcaagaaacgtgacagtgtggcc

SEQ ID NO: 233903 - DNA, 25 bp, probe
gttaatacaggtttacagttcatgc

SEQ ID NO: 233904 - DNA, 25 bp, probe
gttaatagacagtagccaagttata

SEQ ID NO: 233905 - DNA, 25 bp, probe
gttcagaagacctccctgtgagaga

SEQ ID NO: 233906 - DNA, 25 bp, probe
gttcagaagacctccctgtgagaga

SEQ ID NO: 233907 - DNA, 25 bp, probe
gttcaaaaagcattatcctgtggcg

SEQ ID NO: 233908 - DNA, 25 bp, probe
gttcaaaaagcattatcctgtggcg

SEQ ID NO: 233909 - DNA, 25 bp, probe
gttctgataaagattgcctgtggtg

SEQ ID NO: 233910 - DNA, 25 bp, probe
gttctgtggaagtctatgcgtgggc

SEQ ID NO: 233911 - DNA, 25 bp, probe
gttctgggactagttgagttgtatc

SEQ ID NO: 233912 - DNA, 25 bp, probe
gttcgaaattagtggtgattgtgca

SEQ ID NO: 233913 - DNA, 25 bp, probe
gttaaaattctcaaggtgagtacaa

SEQ ID NO: 233914 - DNA, 25 bp, probe
gtttcaatgttcctaatgggttcgt

SEQ ID NO: 233915 - DNA, 25 bp, probe
gtttaagtatccagtagtgatttgt

SEQ ID NO: 233916 - DNA, 25 bp, probe
gtttaaggtctagatagggtttgct

SEQ ID NO: 233917 - DNA, 25 bp, probe
gtttaaggtctagatagggtttgct

SEQ ID NO: 233918 - DNA, 25 bp, probe
gttttagatgccacaaagcggttag

SEQ ID NO: 233919 - DNA, 25 bp, probe
gtttacacatctgccaaaggggtag

SEQ ID NO: 233920 - DNA, 25 bp, probe
gtattacaatccggcagaaagggga

SEQ ID NO: 233921 - DNA, 25 bp, probe
gttcttccttcctatggaagtcgga

SEQ ID NO: 233922 - DNA, 25 bp, probe
tgatttttcctttcgcgaatccgta

SEQ ID NO: 233923 - DNA, 25 bp, probe
tgattactttaagcccacatccact

SEQ ID NO: 233924 - DNA, 25 bp, probe
tgtaaccattgaaccaccaaaccct

SEQ ID NO: 233925 - DNA, 25 bp, probe
tgtaaccattgaaccaccaaaccct

SEQ ID NO: 233926 - DNA, 25 bp, probe
gttactctttacggtcaaagactct

SEQ ID NO: 233927 - DNA, 25 bp, probe
gttactctttacggtcaaagactct

SEQ ID NO: 233928 - DNA, 25 bp, probe
gttacttcttaatacaattcctttg

SEQ ID NO: 233929 - DNA, 25 bp, probe
gttacttcttaatacaattcctttg

SEQ ID NO: 233930 - DNA, 25 bp, probe
gttcaagtttaatgatctcttcctc

SEQ ID NO: 233931 - DNA, 25 bp, probe
gttcaagtttaatgatctcttcctc

SEQ ID NO: 233932 - DNA, 25 bp, probe
gttcaaatgttatccttgttcctgt

SEQ ID NO: 233933 - DNA, 25 bp, probe
gttctaaagctatccattgtgtcat

SEQ ID NO: 233934 - DNA, 25 bp, probe
gttcaaacagaaattgcattgttat

SEQ ID NO: 233935 - DNA, 25 bp, probe
gttaaagctcaaatactgttttctt

SEQ ID NO: 233936 - DNA, 25 bp, probe
gtttaacgtggtgctgttggtccat

SEQ ID NO: 233937 - DNA, 25 bp, probe
gttacccagtggtgtgagggctcca

SEQ ID NO: 233938 - DNA, 25 bp, probe
gtaaggccagggtgtgaagggactt

SEQ ID NO: 233939 - DNA, 25 bp, probe
tttgaggccgggagttcgggaccag

SEQ ID NO: 233940 - DNA, 25 bp, probe
gttaggatccggagtgttggaacag

SEQ ID NO: 233941 - DNA, 25 bp, probe
gttaggatccggagtgttggaacag

SEQ ID NO: 233942 - DNA, 25 bp, probe
gttcaaagtcgtagggcttataaag

SEQ ID NO: 233943 - DNA, 25 bp, probe
gttcacaaactcttggtcattatag

SEQ ID NO: 233944 - DNA, 25 bp, probe
gttcacaaactcttggtcattatag

SEQ ID NO: 233945 - DNA, 25 bp, probe
gttctaaactcttttcatgtcatgt

SEQ ID NO: 233946 - DNA, 25 bp, probe
gttaactcccattttcatgttttgt

SEQ ID NO: 233947 - DNA, 25 bp, probe
gttaactcccattttcatgttttgt

SEQ ID NO: 233948 - DNA, 25 bp, probe
gttaactcttgtctatttttgtctt

SEQ ID NO: 233949 - DNA, 25 bp, probe
gttaactcatttctcatgccattag

SEQ ID NO: 233950 - DNA, 25 bp, probe
gttcacactcagactttggctttat

SEQ ID NO: 233951 - DNA, 25 bp, probe
gttcacaccacgatctggatttctt

SEQ ID NO: 233952 - DNA, 25 bp, probe
gttaccctgcagtttgtgaattttt

SEQ ID NO: 233953 - DNA, 25 bp, probe
gttaccctgcagtttgtgaattttt

SEQ ID NO: 233954 - DNA, 25 bp, probe
gttacctctgattcttgaggaatga

SEQ ID NO: 233955 - DNA, 25 bp, probe
gttacctctgattcttgaggaatga

SEQ ID NO: 233956 - DNA, 25 bp, probe
gttcacttcagaatttgagccagca

SEQ ID NO: 233957 - DNA, 25 bp, probe
gttcaggctcacaagcttgatctaa

SEQ ID NO: 233958 - DNA, 25 bp, probe
gttcagcagtcacacgctgactggt

SEQ ID NO: 233959 - DNA, 25 bp, probe
gttacaggagtaccagacgtggctg

SEQ ID NO: 233960 - DNA, 25 bp, probe
gttacaaacatacagccatctgggg

SEQ ID NO: 233961 - DNA, 25 bp, probe
gttaataaacaagccattgcagcgg

SEQ ID NO: 233962 - DNA, 25 bp, probe
gttactataacaacagtaccaaggt

SEQ ID NO: 233963 - DNA, 25 bp, probe
gttcacactgaaaaagggcacaagg

SEQ ID NO: 233964 - DNA, 25 bp, probe
gttctcactcaaactggatgccaag

SEQ ID NO: 233965 - DNA, 25 bp, probe
gttctcactcaaactggatgccaag

SEQ ID NO: 233966 - DNA, 25 bp, probe
gttctcactcaaactggatgccaag

SEQ ID NO: 233967 - DNA, 25 bp, probe
gttctcaatcataaaggtgccacgt

SEQ ID NO: 233968 - DNA, 25 bp, probe
gttctaccaatgtattgtccacagt

SEQ ID NO: 233969 - DNA, 25 bp, probe
gttctatccctgtaagtgcgcagac

SEQ ID NO: 233970 - DNA, 25 bp, probe
gttcttcagctctaacggggacaac

SEQ ID NO: 233971 - DNA, 25 bp, probe
gttcttcagcatccgacgggaacat

SEQ ID NO: 233972 - DNA, 25 bp, probe
gttcttcagcatccgacgggaacat

SEQ ID NO: 233973 - DNA, 25 bp, probe
gttctgtcagctgcataccagtaat

SEQ ID NO: 233974 - DNA, 25 bp, probe
gttctgatatctgaggccagtaact

SEQ ID NO: 233975 - DNA, 25 bp, probe
gttctcaatcttgggacactgaatt

SEQ ID NO: 233976 - DNA, 25 bp, probe
gttctatacgagtgaccgattatgc

SEQ ID NO: 233977 - DNA, 25 bp, probe
gttaagaccgtggaggcagctgtag

SEQ ID NO: 233978 - DNA, 25 bp, probe
gttcaaagcacggcgaggccttcag

SEQ ID NO: 233979 - DNA, 25 bp, probe
gttcacaatgtggccgaggactttg

SEQ ID NO: 233980 - DNA, 25 bp, probe
gttcacattggagatattcagtatt

SEQ ID NO: 233981 - DNA, 25 bp, probe
gttcaattcaaggttatctggaagt

SEQ ID NO: 233982 - DNA, 25 bp, probe
gttaatgatcctgtcttagggcaga

SEQ ID NO: 233983 - DNA, 25 bp, probe
gttcaattcctggtttaccagctgc

SEQ ID NO: 233984 - DNA, 25 bp, probe
gttcatcttcctggtataccgactt

SEQ ID NO: 233985 - DNA, 25 bp, probe
gttctcagtattgtaacagcaactt

SEQ ID NO: 233986 - DNA, 25 bp, probe
gttctcagtattgtaacagcaactt

SEQ ID NO: 233987 - DNA, 25 bp, probe
gttctcattattatcacacatccta

SEQ ID NO: 233988 - DNA, 25 bp, probe
gttctcattattatcacacatccta

SEQ ID NO: 233989 - DNA, 25 bp, probe
gttctcatcattattacatagactg

SEQ ID NO: 233990 - DNA, 25 bp, probe
gttctgtgcctcatgaaccagacgt

SEQ ID NO: 233991 - DNA, 25 bp, probe
gttctgtgcctcatgaaccagacgt

SEQ ID NO: 233992 - DNA, 25 bp, probe
gttctgtggctgggctatgccaact

SEQ ID NO: 233993 - DNA, 25 bp, probe
gttctgtggtgcatctgagccagtc

SEQ ID NO: 233994 - DNA, 25 bp, probe
gttcatggaagccatagagtacatc

SEQ ID NO: 233995 - DNA, 25 bp, probe
gttctgagaagcccgaggtcatcac

SEQ ID NO: 233996 - DNA, 25 bp, probe
gttctgagaagcccgaggtcatcac

SEQ ID NO: 233997 - DNA, 25 bp, probe
gttctgagaagcccgaggtcatcac

SEQ ID NO: 233998 - DNA, 25 bp, probe
gttctgagaagcccgaggtcatcac

SEQ ID NO: 233999 - DNA, 25 bp, probe
gttcagaaacagtggcggcagcatc

SEQ ID NO: 234000 - DNA, 25 bp, probe
gttcaaaacaatgggggacctatgc

SEQ ID NO: 234001 - DNA, 25 bp, probe
gttaaataacttgggccatcctatc

SEQ ID NO: 234002 - DNA, 25 bp, probe
gttaagaacacaacgaccagctatg

SEQ ID NO: 234003 - DNA, 25 bp, probe
gttaggaacaaggtgcaccataagc

SEQ ID NO: 234004 - DNA, 25 bp, probe
gttaggagggacatcacaaccacaa

SEQ ID NO: 234005 - DNA, 25 bp, probe
gttaggagggacatcacaaccacaa

SEQ ID NO: 234006 - DNA, 25 bp, probe
gttagccaagacattatccaccaaa

SEQ ID NO: 234007 - DNA, 25 bp, probe
gttctgcaaggactgtgttcccgag

SEQ ID NO: 234008 - DNA, 25 bp, probe
gttctgttggagctgataaccgggc

SEQ ID NO: 234009 - DNA, 25 bp, probe
gttctgtggttctgagaagcccgag

SEQ ID NO: 234010 - DNA, 25 bp, probe
gttctgtggttctgagaagcccgag

SEQ ID NO: 234011 - DNA, 25 bp, probe
gttctgtggttctgagaagcccgag

SEQ ID NO: 234012 - DNA, 25 bp, probe
gttcttggttgaacatgaaacccag

SEQ ID NO: 234013 - DNA, 25 bp, probe
gttctgtgtgtttcaagaaattcac

SEQ ID NO: 234014 - DNA, 25 bp, probe
gttcattgctttcaagttggtgcaa

SEQ ID NO: 234015 - DNA, 25 bp, probe
gttcttccactgcaggttcattgca

SEQ ID NO: 234016 - DNA, 25 bp, probe
gttctgcactgaaaaggttcttcat

SEQ ID NO: 234017 - DNA, 25 bp, probe
gtactacggaactctgatcttcatg

SEQ ID NO: 234018 - DNA, 25 bp, probe
gtactacggaactctgatcttcatg

SEQ ID NO: 234019 - DNA, 25 bp, probe
gtaaacgtatcctctgtattcagta

SEQ ID NO: 234020 - DNA, 25 bp, probe
gtagaaggtaactctttgcacataa

SEQ ID NO: 234021 - DNA, 25 bp, probe
gtagaacctcgaggtttctcaaaga

SEQ ID NO: 234022 - DNA, 25 bp, probe
gttaaactcccgcgtcatagaaata

SEQ ID NO: 234023 - DNA, 25 bp, probe
gttcaaaccacggagttcacaacac

SEQ ID NO: 234024 - DNA, 25 bp, probe
gttcaaaccacggagttcacaacac

SEQ ID NO: 234025 - DNA, 25 bp, probe
gttcatcaagccaggagattagcag

SEQ ID NO: 234026 - DNA, 25 bp, probe
gttcaaagccttaggttctgatgac

SEQ ID NO: 234027 - DNA, 25 bp, probe
gttcaaagccttaggttctgatgac

SEQ ID NO: 234028 - DNA, 25 bp, probe
gttaacagcctttggagtcgcaatg

SEQ ID NO: 234029 - DNA, 25 bp, probe
gttaaccacatgagggaccagaaca

SEQ ID NO: 234030 - DNA, 25 bp, probe
gttcaaaacgttctcaccaaatcca

SEQ ID NO: 234031 - DNA, 25 bp, probe
gttattaactatattccctggatcg

SEQ ID NO: 234032 - DNA, 25 bp, probe
gttataaatttcaccagcgttgtag

SEQ ID NO: 234033 - DNA, 25 bp, probe
gttacataatcattaccacgggtga

SEQ ID NO: 234034 - DNA, 25 bp, probe
gttcagcattcactaaccctgttta

SEQ ID NO: 234035 - DNA, 25 bp, probe
gttaatatagtaatacctttatgat

SEQ ID NO: 234036 - DNA, 25 bp, probe
gttacacaaaaatcccattgatctg

SEQ ID NO: 234037 - DNA, 25 bp, probe
gttacagtgccataaaccttgttac

SEQ ID NO: 234038 - DNA, 25 bp, probe
gttaagagcgtgtgaaccttttgtg

SEQ ID NO: 234039 - DNA, 25 bp, probe
gttacggagtgggaacacctattgg

SEQ ID NO: 234040 - DNA, 25 bp, probe
gttacccactgagatacaccatttt

SEQ ID NO: 234041 - DNA, 25 bp, probe
gttacagcacctaccataactgctt

SEQ ID NO: 234042 - DNA, 25 bp, probe
gttagaggcagttcacacaatccat

SEQ ID NO: 234043 - DNA, 25 bp, probe
gttcagaaatttacagacaccatat

SEQ ID NO: 234044 - DNA, 25 bp, probe
gttcagaaatttacagacaccatat

SEQ ID NO: 234045 - DNA, 25 bp, probe
gttctattttgtacagacaagttgg

SEQ ID NO: 234046 - DNA, 25 bp, probe
gttctttgtcggaacaaatgccttg

SEQ ID NO: 234047 - DNA, 25 bp, probe
gttctgattgacccatacctagact

SEQ ID NO: 234048 - DNA, 25 bp, probe
gttctctattctcctattgctaaat

SEQ ID NO: 234049 - DNA, 25 bp, probe
gttactgaatcttagtatgctaaat

SEQ ID NO: 234050 - DNA, 25 bp, probe
gttcttaagctgtcattatggaaag

SEQ ID NO: 234051 - DNA, 25 bp, probe
gttaaaagcctaatatgcagaaatg

SEQ ID NO: 234052 - DNA, 25 bp, probe
gttaaactgcccatctggagaatcg

SEQ ID NO: 234053 - DNA, 25 bp, probe
gttacaaggcttatctagctattcg

SEQ ID NO: 234054 - DNA, 25 bp, probe
gttaatatggctcttcataattcta

SEQ ID NO: 234055 - DNA, 25 bp, probe
gttacttggttcccataatagcttc

SEQ ID NO: 234056 - DNA, 25 bp, probe
gttagtgtaaactgcaaatactaca

SEQ ID NO: 234057 - DNA, 25 bp, probe
gttcatgagtattcctagcaaattt

SEQ ID NO: 234058 - DNA, 25 bp, probe
gttatgttacccagagaactttcca

SEQ ID NO: 234059 - DNA, 25 bp, probe
gttctgttactcacagaagtgtttc

SEQ ID NO: 234060 - DNA, 25 bp, probe
gttctgttgacctgcatacatgtga

SEQ ID NO: 234061 - DNA, 25 bp, probe
gtttgattatgcagagcatgacttg

SEQ ID NO: 234062 - DNA, 25 bp, probe
gtttgattatgcagagcatgacttg

SEQ ID NO: 234063 - DNA, 25 bp, probe
gttctgatctttgggcatggccagg

SEQ ID NO: 234064 - DNA, 25 bp, probe
gttctacgattcacatggtcaatga

SEQ ID NO: 234065 - DNA, 25 bp, probe
gttaactttgcatcaggtctacaca

SEQ ID NO: 234066 - DNA, 25 bp, probe
gttaactttgcatcaggtctacaca

SEQ ID NO: 234067 - DNA, 25 bp, probe
gttaacttcagattcaactgggcac

SEQ ID NO: 234068 - DNA, 25 bp, probe
gttaacttcagattcaactgggcac

SEQ ID NO: 234069 - DNA, 25 bp, probe
gttcaggataaattccgcttagacc

SEQ ID NO: 234070 - DNA, 25 bp, probe
gttcttcaccttgacgcttatgaac

SEQ ID NO: 234071 - DNA, 25 bp, probe
gttcttcatccttgtgattggtata

SEQ ID NO: 234072 - DNA, 25 bp, probe
gttcatctgctgtcttgtgattaaa

SEQ ID NO: 234073 - DNA, 25 bp, probe
gttcattgtggcactcttcacaatc

SEQ ID NO: 234074 - DNA, 25 bp, probe
gttcttcggacagtcgtacacatct

SEQ ID NO: 234075 - DNA, 25 bp, probe
gttcttcggacagtcgtacacatct

SEQ ID NO: 234076 - DNA, 25 bp, probe
gttcttcagtaattgtgctggcact

SEQ ID NO: 234077 - DNA, 25 bp, probe
gttcattgcagaagaggccgcggct

SEQ ID NO: 234078 - DNA, 25 bp, probe
gttcattcaaaagtgcctgcagtct

SEQ ID NO: 234079 - DNA, 25 bp, probe
gttcttagtgcatcttcatggtgtc

SEQ ID NO: 234080 - DNA, 25 bp, probe
gttctctagcgctagtgatgtgtgg

SEQ ID NO: 234081 - DNA, 25 bp, probe
gttcactacagcaagtgatgtgtgg

SEQ ID NO: 234082 - DNA, 25 bp, probe
gttctctgaagaactgtggctggaa

SEQ ID NO: 234083 - DNA, 25 bp, probe
gttctcgctagatgtctgcgaggcc

SEQ ID NO: 234084 - DNA, 25 bp, probe
gttctcgctagatgtctgcgaggcc

SEQ ID NO: 234085 - DNA, 25 bp, probe
gttcacgtgcgagggctgcaagagc

SEQ ID NO: 234086 - DNA, 25 bp, probe
gttcacgtgcgagggctgcaagagc

SEQ ID NO: 234087 - DNA, 25 bp, probe
gttcactgccgagtgcatcgtgagg

SEQ ID NO: 234088 - DNA, 25 bp, probe
gttcactgccgagtgcatcgtgagg

SEQ ID NO: 234089 - DNA, 25 bp, probe
gttcacatgctccacgtagctgtaa

SEQ ID NO: 234090 - DNA, 25 bp, probe
gttcaagggcaggtagctgatgcta

SEQ ID NO: 234091 - DNA, 25 bp, probe
gttacattggcacagagccatggaa

SEQ ID NO: 234092 - DNA, 25 bp, probe
gttacagcgcaacagcagcctgcag

SEQ ID NO: 234093 - DNA, 25 bp, probe
gttcaaggctgtcatcactcgagca

SEQ ID NO: 234094 - DNA, 25 bp, probe
gttcaatgttcccatcactcgaact

SEQ ID NO: 234095 - DNA, 25 bp, probe
gttcaagtagccccagatttagctt

SEQ ID NO: 234096 - DNA, 25 bp, probe
gttcagggaactacttattagctgt

SEQ ID NO: 234097 - DNA, 25 bp, probe
gttaggtgaaggaccaaggagcaga

SEQ ID NO: 234098 - DNA, 25 bp, probe
gttagttacaggacaagttgtgaaa

SEQ ID NO: 234099 - DNA, 25 bp, probe
gttacttacagtccaaattggctta

SEQ ID NO: 234100 - DNA, 25 bp, probe
gttactttgctgttcactttggcat

SEQ ID NO: 234101 - DNA, 25 bp, probe
gttactttgctgttcactttggcat

SEQ ID NO: 234102 - DNA, 25 bp, probe
gttactttgtgggagactttcacct

SEQ ID NO: 234103 - DNA, 25 bp, probe
gttactttgtgggagactttcacct

SEQ ID NO: 234104 - DNA, 25 bp, probe
gttagtattctggacaagcttatcc

SEQ ID NO: 234105 - DNA, 25 bp, probe
gttactcttttgtcaaggtatttgg

SEQ ID NO: 234106 - DNA, 25 bp, probe
gttactcttttgtcaaggtatttgg

SEQ ID NO: 234107 - DNA, 25 bp, probe
gttactcctttttactggacatgat

SEQ ID NO: 234108 - DNA, 25 bp, probe
gttactggtttcttacattgccatt

SEQ ID NO: 234109 - DNA, 25 bp, probe
gttacacgctgcttgtagacatgtt

SEQ ID NO: 234110 - DNA, 25 bp, probe
gttcagtcctgcagataacatcttt

SEQ ID NO: 234111 - DNA, 25 bp, probe
gttcagctcttctgtgagaatatga

SEQ ID NO: 234112 - DNA, 25 bp, probe
gttcagcctggctcggcaagtagat

SEQ ID NO: 234113 - DNA, 25 bp, probe
gttagccctgcctgaatcagtagat

SEQ ID NO: 234114 - DNA, 25 bp, probe
gttcatctcttgccaaataagggtc

SEQ ID NO: 234115 - DNA, 25 bp, probe
gttcttatcctcaattcaatgtggt

SEQ ID NO: 234116 - DNA, 25 bp, probe
gttctttccggaggccattgagttc

SEQ ID NO: 234117 - DNA, 25 bp, probe
gttctatctcacgagacctttgaga

SEQ ID NO: 234118 - DNA, 25 bp, probe
gttatcacctaagcacttctagaat

SEQ ID NO: 234119 - DNA, 25 bp, probe
gttctcatttaagcactactggaat

SEQ ID NO: 234120 - DNA, 25 bp, probe
gttctcttcagaaccctatctggga

SEQ ID NO: 234121 - DNA, 25 bp, probe
gttctcttcagaaccctatctggga

SEQ ID NO: 234122 - DNA, 25 bp, probe
gttctcatggaattggcctattggc

SEQ ID NO: 234123 - DNA, 25 bp, probe
gttctcatggaattggcctattggc

SEQ ID NO: 234124 - DNA, 25 bp, probe
gttctatgggagtgtcatctatgtc

SEQ ID NO: 234125 - DNA, 25 bp, probe
gttaaggtgagatcacactgaatta

SEQ ID NO: 234126 - DNA, 25 bp, probe
gttaaagtgatgaacgctcgtaaga

SEQ ID NO: 234127 - DNA, 25 bp, probe
gttaaagtgatgaacgctcgtaaga

SEQ ID NO: 234128 - DNA, 25 bp, probe
gttaccgtatactactcagtcatag

SEQ ID NO: 234129 - DNA, 25 bp, probe
gttaccgtatactactcagtcatag

SEQ ID NO: 234130 - DNA, 25 bp, probe
gttcaccgagatttagccaccagga

SEQ ID NO: 234131 - DNA, 25 bp, probe
gttcttggaatcaattcctctaaga

SEQ ID NO: 234132 - DNA, 25 bp, probe
gttcttcagagaacaccctctaggg

SEQ ID NO: 234133 - DNA, 25 bp, probe
gttctatggagctgccacattcatg

SEQ ID NO: 234134 - DNA, 25 bp, probe
gttctaatggcatctctttagagaa

SEQ ID NO: 234135 - DNA, 25 bp, probe
gttctcaatggctacgtgtgactag

SEQ ID NO: 234136 - DNA, 25 bp, probe
gttctatctggcaactggtactttg

SEQ ID NO: 234137 - DNA, 25 bp, probe
gttctatctaaatttgtacagtgtg

SEQ ID NO: 234138 - DNA, 25 bp, probe
gttctctcaaaacatgttctgtgct

SEQ ID NO: 234139 - DNA, 25 bp, probe
gttctttctaccaatctatatgtct

SEQ ID NO: 234140 - DNA, 25 bp, probe
gttctactcatatatatctatctta

SEQ ID NO: 234141 - DNA, 25 bp, probe
gttctagagccatttgcatacaatt

SEQ ID NO: 234142 - DNA, 25 bp, probe
gttctcagagccatcgtggtcatgt

SEQ ID NO: 234143 - DNA, 25 bp, probe
gttctctatgtcttcattgggcatg

SEQ ID NO: 234144 - DNA, 25 bp, probe
gttctcattgtggtcctgaccatct

SEQ ID NO: 234145 - DNA, 25 bp, probe
gttctattgtgcctagtacactgta

SEQ ID NO: 234146 - DNA, 25 bp, probe
gttctatctagtacttgagcagctg

SEQ ID NO: 234147 - DNA, 25 bp, probe
gttctacatcatgatgtgtaagcca

SEQ ID NO: 234148 - DNA, 25 bp, probe
gttcattctatttgttattgctact

SEQ ID NO: 234149 - DNA, 25 bp, probe
gttcatttgtatctggatctctgtt

SEQ ID NO: 234150 - DNA, 25 bp, probe
gttcttagttgtatgtcatctcttc

SEQ ID NO: 234151 - DNA, 25 bp, probe
gttcacttttgtattcttcagtcct

SEQ ID NO: 234152 - DNA, 25 bp, probe
gttactttatgtgaattctcatctc

SEQ ID NO: 234153 - DNA, 25 bp, probe
gttcagttcttggtgagttctccag

SEQ ID NO: 234154 - DNA, 25 bp, probe
gttcagctttatgggattcaggcct

SEQ ID NO: 234155 - DNA, 25 bp, probe
gttactgggacgccatgccaggact

SEQ ID NO: 234156 - DNA, 25 bp, probe
gttaatctatgatccagccaaacga

SEQ ID NO: 234157 - DNA, 25 bp, probe
gttaatctatgatccagccaaacga

SEQ ID NO: 234158 - DNA, 25 bp, probe
gttaatctatgatccagccaaacga

SEQ ID NO: 234159 - DNA, 25 bp, probe
gttaatctatgatccagccaaacga

SEQ ID NO: 234160 - DNA, 25 bp, probe
gttacactgcagtatgtcccaagac

SEQ ID NO: 234161 - DNA, 25 bp, probe
gttcatcaccagtctgtaaaataca

SEQ ID NO: 234162 - DNA, 25 bp, probe
gttcatcctatgtctccagatacaa

SEQ ID NO: 234163 - DNA, 25 bp, probe
gttatcctttcattaggcaaagtac

SEQ ID NO: 234164 - DNA, 25 bp, probe
gttaaactgtcagtcgaacaagtca

SEQ ID NO: 234165 - DNA, 25 bp, probe
gttaggtgcttcgtctgaaagtgaa

SEQ ID NO: 234166 - DNA, 25 bp, probe
gttagtgtttgagttgaagtgttat

SEQ ID NO: 234167 - DNA, 25 bp, probe
gttagaagttggaataagcaatttc

SEQ ID NO: 234168 - DNA, 25 bp, probe
gttacagaagatggttactagattt

SEQ ID NO: 234169 - DNA, 25 bp, probe
tcttacaaaagtctccaagtgttta

SEQ ID NO: 234170 - DNA, 25 bp, probe
gttagcaaacgcagctccaacttat

SEQ ID NO: 234171 - DNA, 25 bp, probe
gttctcaatacggtaccaaagatat

SEQ ID NO: 234172 - DNA, 25 bp, probe
gttctaatcagcgttatccgggttc

SEQ ID NO: 234173 - DNA, 25 bp, probe
gttctacacagagtttgatcggcgt

SEQ ID NO: 234174 - DNA, 25 bp, probe
gttcagaagaatgcttgtggtgccc

SEQ ID NO: 234175 - DNA, 25 bp, probe
gttcagaagaatgcttgtggtgccc

SEQ ID NO: 234176 - DNA, 25 bp, probe
gttaattgagagccctgggtcctgc

SEQ ID NO: 234177 - DNA, 25 bp, probe
gttacaataagctcttgtgacctcc

SEQ ID NO: 234178 - DNA, 25 bp, probe
gttacagaaaggccaagtgttgtct

SEQ ID NO: 234179 - DNA, 25 bp, probe
gttcatcctactcagcaagtttggc

SEQ ID NO: 234180 - DNA, 25 bp, probe
gtttttgccttagacgtgctggccc

SEQ ID NO: 234181 - DNA, 25 bp, probe
gttcttctcccatagaggtcgggcc

SEQ ID NO: 234182 - DNA, 25 bp, probe
gttctttccctgtgagcatttgtgg

SEQ ID NO: 234183 - DNA, 25 bp, probe
gttctttcccagtagtgtgattggt

SEQ ID NO: 234184 - DNA, 25 bp, probe
gttcactcccacaaagtggtgtctg

SEQ ID NO: 234185 - DNA, 25 bp, probe
gttagtgccacagcacctgggtatg

SEQ ID NO: 234186 - DNA, 25 bp, probe
gttaccaaaccacctgtgaatcaga

SEQ ID NO: 234187 - DNA, 25 bp, probe
gttaccaaaccacctgtgaatcaga

SEQ ID NO: 234188 - DNA, 25 bp, probe
gttagccaatatgcaatcactgaaa

SEQ ID NO: 234189 - DNA, 25 bp, probe
gttagccaatatgcaatcactgaaa

SEQ ID NO: 234190 - DNA, 25 bp, probe
gttaccaatgctgcagtcctgcagt

SEQ ID NO: 234191 - DNA, 25 bp, probe
gttactcaactccagttgacatttg

SEQ ID NO: 234192 - DNA, 25 bp, probe
gttcagccacccgagattgagcaat

SEQ ID NO: 234193 - DNA, 25 bp, probe
gttcagccacccgagattgagcaat

SEQ ID NO: 234194 - DNA, 25 bp, probe
gttaggcttccatgatgttacatta

SEQ ID NO: 234195 - DNA, 25 bp, probe
gttaggcttccatgatgttacatta

SEQ ID NO: 234196 - DNA, 25 bp, probe
gttaacattccaagactctagagtc

SEQ ID NO: 234197 - DNA, 25 bp, probe
tcttataataccttccttagggctc

SEQ ID NO: 234198 - DNA, 25 bp, probe
gttcaatgaacctttcctagggctg

SEQ ID NO: 234199 - DNA, 25 bp, probe
gttcatctgaacatgttccaagagc

SEQ ID NO: 234200 - DNA, 25 bp, probe
gttcatctgaacatgttccaagagc

SEQ ID NO: 234201 - DNA, 25 bp, probe
gttcattgggtttatcctgaacaac

SEQ ID NO: 234202 - DNA, 25 bp, probe
gttcattgggtttatcctgaacaac

SEQ ID NO: 234203 - DNA, 25 bp, probe
gttcttgcatggttcaaaccaccat

SEQ ID NO: 234204 - DNA, 25 bp, probe
gttcttgatattagataactccaac

SEQ ID NO: 234205 - DNA, 25 bp, probe
gttcttgatattagataactccaac

SEQ ID NO: 234206 - DNA, 25 bp, probe
gttcttctattagtgaatggcccac

SEQ ID NO: 234207 - DNA, 25 bp, probe
gttctttatgagcctcgatgttccc

SEQ ID NO: 234208 - DNA, 25 bp, probe
gttctttatgagcctcgatgttccc

SEQ ID NO: 234209 - DNA, 25 bp, probe
gttctattagaagctatcaatcacc

SEQ ID NO: 234210 - DNA, 25 bp, probe
gttctattagaagctatcaatcacc

SEQ ID NO: 234211 - DNA, 25 bp, probe
gtttgatgctgacaagtccggcacc

SEQ ID NO: 234212 - DNA, 25 bp, probe
gttcttgtgcatggaaatgcaggga

SEQ ID NO: 234213 - DNA, 25 bp, probe
gttcttggatgtggaagggctttga

SEQ ID NO: 234214 - DNA, 25 bp, probe
gttctttgggtcaggagcattcatg

SEQ ID NO: 234215 - DNA, 25 bp, probe
gttcttcagggtcaaaattcagtga

SEQ ID NO: 234216 - DNA, 25 bp, probe
gtttgtaggacggagaaaccgcttg

SEQ ID NO: 234217 - DNA, 25 bp, probe
gttttcacacaacagaaaccacctg

SEQ ID NO: 234218 - DNA, 25 bp, probe
gttttcacacaacagaaaccacctg

SEQ ID NO: 234219 - DNA, 25 bp, probe
gttttacacgattataattcccctg

SEQ ID NO: 234220 - DNA, 25 bp, probe
gttaattaagcacatagattttcct

SEQ ID NO: 234221 - DNA, 25 bp, probe
gttaattaagcacatagattttcct

SEQ ID NO: 234222 - DNA, 25 bp, probe
gttttttagccatagaatcttctag

SEQ ID NO: 234223 - DNA, 25 bp, probe
tagatggtactctccaaaggcccta

SEQ ID NO: 234224 - DNA, 25 bp, probe
gtttttcggctcagagaaagccaag

SEQ ID NO: 234225 - DNA, 25 bp, probe
tttctttccctacaaactgaacatg

SEQ ID NO: 234226 - DNA, 25 bp, probe
gttcattttctttcaaaagtaacag

SEQ ID NO: 234227 - DNA, 25 bp, probe
gttcataaattcccatctaagaaac

SEQ ID NO: 234228 - DNA, 25 bp, probe
gttaagatgctttgacactgaataa

SEQ ID NO: 234229 - DNA, 25 bp, probe
gttagcaactatcgatcttgccaaa

SEQ ID NO: 234230 - DNA, 25 bp, probe
gttaagatgctactgttttaaagga

SEQ ID NO: 234231 - DNA, 25 bp, probe
gttaatagtatttgtgttgagcaac

SEQ ID NO: 234232 - DNA, 25 bp, probe
gttagaagccatcgttctgtggctg

SEQ ID NO: 234233 - DNA, 25 bp, probe
gttcaaagccattgggcttcctgtg

SEQ ID NO: 234234 - DNA, 25 bp, probe
gttcatatatcctaaatctatccta

SEQ ID NO: 234235 - DNA, 25 bp, probe
gttcatatatcctaaatctatccta

SEQ ID NO: 234236 - DNA, 25 bp, probe
gttcatatatattaccacgacattt

SEQ ID NO: 234237 - DNA, 25 bp, probe
gttcattcatattgacctgcatctc

SEQ ID NO: 234238 - DNA, 25 bp, probe
gttcattcatattgacctgcatctc

SEQ ID NO: 234239 - DNA, 25 bp, probe
gttcatctcactggacgagttcagg

SEQ ID NO: 234240 - DNA, 25 bp, probe
gttagatcacatcgccgataaccag

SEQ ID NO: 234241 - DNA, 25 bp, probe
gttagtgcaaagcagctggtccgag

SEQ ID NO: 234242 - DNA, 25 bp, probe
gttagtcagagcaggggatcagagg

SEQ ID NO: 234243 - DNA, 25 bp, probe
gttagattgccaaccagttcatgag

SEQ ID NO: 234244 - DNA, 25 bp, probe
gttagatggaaggccgctttggaga

SEQ ID NO: 234245 - DNA, 25 bp, probe
gttcatgatgagtatggagcagttt

SEQ ID NO: 234246 - DNA, 25 bp, probe
gttcatatgggtagcagattttgtg

SEQ ID NO: 234247 - DNA, 25 bp, probe
gttcagggctgttggaagtagctgt

SEQ ID NO: 234248 - DNA, 25 bp, probe
gttcatggccaaaggaagcttgctg

SEQ ID NO: 234249 - DNA, 25 bp, probe
gttagctgccttcgaatagtgctgt

SEQ ID NO: 234250 - DNA, 25 bp, probe
gttatcggcagtggagctactgctg

SEQ ID NO: 234251 - DNA, 25 bp, probe
gttactgggcaggagtactgtgagg

SEQ ID NO: 234252 - DNA, 25 bp, probe
gttactggtgccacagatctggagg

SEQ ID NO: 234253 - DNA, 25 bp, probe
gttcaaggtgaagcgatgtggagtt

SEQ ID NO: 234254 - DNA, 25 bp, probe
gttaaggagtagggctgtgggtgct

SEQ ID NO: 234255 - DNA, 25 bp, probe
gttcacagtaggggtggtggtcatt

SEQ ID NO: 234256 - DNA, 25 bp, probe
gttcatctgcattggctggggtgtg

SEQ ID NO: 234257 - DNA, 25 bp, probe
gttcatcatgattgggtgctacttg

SEQ ID NO: 234258 - DNA, 25 bp, probe
gttcaggattggctgtcattgcatc

SEQ ID NO: 234259 - DNA, 25 bp, probe
gttcagtgtttgtcaagcttctggt

SEQ ID NO: 234260 - DNA, 25 bp, probe
gttcacatgttccaactttcaggtt

SEQ ID NO: 234261 - DNA, 25 bp, probe
gttcatctgtcacaagcctgtcagc

SEQ ID NO: 234262 - DNA, 25 bp, probe
gttcatctgtcacaagcctgtcagc

SEQ ID NO: 234263 - DNA, 25 bp, probe
gttcatcattaatgtgacttctgct

SEQ ID NO: 234264 - DNA, 25 bp, probe
gttcatcattaatgtgacttctgct

SEQ ID NO: 234265 - DNA, 25 bp, probe
gttcttctacaagttcaactgataa

SEQ ID NO: 234266 - DNA, 25 bp, probe
gtttctctaaaaagacttgtaggtg

SEQ ID NO: 234267 - DNA, 25 bp, probe
gtttctctaaaaagacttgtaggtg

SEQ ID NO: 234268 - DNA, 25 bp, probe
gtttcctcacgtgtactataaggct

SEQ ID NO: 234269 - DNA, 25 bp, probe
gtttgcttccaagaacttaaggcag

SEQ ID NO: 234270 - DNA, 25 bp, probe
gttttcacctctgagaattacaatg

SEQ ID NO: 234271 - DNA, 25 bp, probe
gttttccctcagagagaatccagtg

SEQ ID NO: 234272 - DNA, 25 bp, probe
gtgtaatcccccaggagaacatctt

SEQ ID NO: 234273 - DNA, 25 bp, probe
gtaccactactcccggagaagatca

SEQ ID NO: 234274 - DNA, 25 bp, probe
gtttatagcaccctggtagtacaca

SEQ ID NO: 234275 - DNA, 25 bp, probe
gtttgtgcccaccatggtgcgaatc

SEQ ID NO: 234276 - DNA, 25 bp, probe
gttcatggccacggtgttggagtcc

SEQ ID NO: 234277 - DNA, 25 bp, probe
gttcatggctccggagatggtgaag

SEQ ID NO: 234278 - DNA, 25 bp, probe
gttcagcgctgtcaggattgcgaga

SEQ ID NO: 234279 - DNA, 25 bp, probe
gttcagagctgtaaaacatctgaac

SEQ ID NO: 234280 - DNA, 25 bp, probe
gttaggctgatttcagattctctag

SEQ ID NO: 234281 - DNA, 25 bp, probe
gttagagctgacaggacccttgaag

SEQ ID NO: 234282 - DNA, 25 bp, probe
gttcaggatgtcagaacccatgtga

SEQ ID NO: 234283 - DNA, 25 bp, probe
gttcagcgttctagcaacacgtgtg

SEQ ID NO: 234284 - DNA, 25 bp, probe
gttagcatgtttagcaaaccttgtg

SEQ ID NO: 234285 - DNA, 25 bp, probe
gttaatagttgaaagacctgttgta

SEQ ID NO: 234286 - DNA, 25 bp, probe
gttaatagttgaaagacctgttgta

SEQ ID NO: 234287 - DNA, 25 bp, probe
gttacattgtccaaagccctttact

SEQ ID NO: 234288 - DNA, 25 bp, probe
gttacattgtccaaagccctttact

SEQ ID NO: 234289 - DNA, 25 bp, probe
gttagtagtgccagaggcaccctga

SEQ ID NO: 234290 - DNA, 25 bp, probe
gttcagtagctggatatggagacat

SEQ ID NO: 234291 - DNA, 25 bp, probe
gttagctcaaccaatggagagctga

SEQ ID NO: 234292 - DNA, 25 bp, probe
gttactcagcagaccatgaaagggc

SEQ ID NO: 234293 - DNA, 25 bp, probe
gttcagtgcagaaccaggtcagcag

SEQ ID NO: 234294 - DNA, 25 bp, probe
gttcagcaagaacgcagtgatcagc

SEQ ID NO: 234295 - DNA, 25 bp, probe
gttcaaccatgattgatgatgaagc

SEQ ID NO: 234296 - DNA, 25 bp, probe
gttaatccatattggcagaacgaaa

SEQ ID NO: 234297 - DNA, 25 bp, probe
gttacaggcaactgagccactgaag

SEQ ID NO: 234298 - DNA, 25 bp, probe
gttacaaatcactgtgtccatagaa

SEQ ID NO: 234299 - DNA, 25 bp, probe
gttaataatgcctgtgaactaaaaa

SEQ ID NO: 234300 - DNA, 25 bp, probe
gttagaattactctgaagttatgaa

SEQ ID NO: 234301 - DNA, 25 bp, probe
gttagctttgcagggtgaagaccaa

SEQ ID NO: 234302 - DNA, 25 bp, probe
gtctattttacgcgtcgcccaatga

SEQ ID NO: 234303 - DNA, 25 bp, probe
gtctattttacgcgtcgcccaatga

SEQ ID NO: 234304 - DNA, 25 bp, probe
tgcattaattaatggcttcgttaat

SEQ ID NO: 234305 - DNA, 25 bp, probe
gttaatttcatctctccggtaagat

SEQ ID NO: 234306 - DNA, 25 bp, probe
gtgatcgtgttctcctacgtaaaga

SEQ ID NO: 234307 - DNA, 25 bp, probe
gtttccttcaacgtacgtagaagag

SEQ ID NO: 234308 - DNA, 25 bp, probe
gttatcacctgcaacagaacgtcca

SEQ ID NO: 234309 - DNA, 25 bp, probe
gttcacacttcttcagtaatgtctg

SEQ ID NO: 234310 - DNA, 25 bp, probe
gttcacacataccaccatatattca

SEQ ID NO: 234311 - DNA, 25 bp, probe
gttacagctgagcattatgatgtta

SEQ ID NO: 234312 - DNA, 25 bp, probe
gttacagctgtcataagatcataat

SEQ ID NO: 234313 - DNA, 25 bp, probe
gttacaagtctttaatcatacagct

SEQ ID NO: 234314 - DNA, 25 bp, probe
gttcacgttcttgtaacacagctcc

SEQ ID NO: 234315 - DNA, 25 bp, probe
gttcacgttcttgtaacacagctcc

SEQ ID NO: 234316 - DNA, 25 bp, probe
gttcacggtctgagtaacacctcat

SEQ ID NO: 234317 - DNA, 25 bp, probe
gtagctcgtgtgcttagaaacctca

SEQ ID NO: 234318 - DNA, 25 bp, probe
gtacatcggcaacttcaaagatgcc

SEQ ID NO: 234319 - DNA, 25 bp, probe
gttcacagcagctctttcaagcagc

SEQ ID NO: 234320 - DNA, 25 bp, probe
gttcaagcatggctgaccaggcgcc

SEQ ID NO: 234321 - DNA, 25 bp, probe
gttcatggctggggacacagccccc

SEQ ID NO: 234322 - DNA, 25 bp, probe
gttcatggctggggacacagccccc

SEQ ID NO: 234323 - DNA, 25 bp, probe
gttcatgagcaagcaactcagtccc

SEQ ID NO: 234324 - DNA, 25 bp, probe
gttcatgagcaagcaactcagtccc

SEQ ID NO: 234325 - DNA, 25 bp, probe
gttagacacaccaagcagattcgac

SEQ ID NO: 234326 - DNA, 25 bp, probe
gttagcagcacattcaaccatttgt

SEQ ID NO: 234327 - DNA, 25 bp, probe
gttaccaatatcaccatcttggttg

SEQ ID NO: 234328 - DNA, 25 bp, probe
gttaccaactgctgagatttttatg

SEQ ID NO: 234329 - DNA, 25 bp, probe
gttaccaactgctgagatttttatg

SEQ ID NO: 234330 - DNA, 25 bp, probe
gttattagtctgtgaagtgctttac

SEQ ID NO: 234331 - DNA, 25 bp, probe
gttttgcatgtctgcatgaaggtct

SEQ ID NO: 234332 - DNA, 25 bp, probe
gttagtctgaccctgaacgttagtc

SEQ ID NO: 234333 - DNA, 25 bp, probe
gtcaagtcgacatctaacgttttat

SEQ ID NO: 234334 - DNA, 25 bp, probe
gttagcatcgactctttctttttat

SEQ ID NO: 234335 - DNA, 25 bp, probe
gttaacgactggattctatcttcat

SEQ ID NO: 234336 - DNA, 25 bp, probe
gttacagaacgtattattgctatgt

SEQ ID NO: 234337 - DNA, 25 bp, probe
gttcaataatcatactctttgctat

SEQ ID NO: 234338 - DNA, 25 bp, probe
gttcagacttatcaccattcttatg

SEQ ID NO: 234339 - DNA, 25 bp, probe
gttcatggttattctacatttctag

SEQ ID NO: 234340 - DNA, 25 bp, probe
gttcatggttattctacatttctag

SEQ ID NO: 234341 - DNA, 25 bp, probe
gttcatggtaatgttgccctctgag

SEQ ID NO: 234342 - DNA, 25 bp, probe
gttcatggtaatgttgccctctgag

SEQ ID NO: 234343 - DNA, 25 bp, probe
gttcagcagtacatgttgaccttat

SEQ ID NO: 234344 - DNA, 25 bp, probe
gttcagcagtacatgttgaccttat

SEQ ID NO: 234345 - DNA, 25 bp, probe
gttactgcaatcatgttgtagtttg

SEQ ID NO: 234346 - DNA, 25 bp, probe
gttactgcctacatggctacagggg

SEQ ID NO: 234347 - DNA, 25 bp, probe
gttactactatcaactgtcatcggc

SEQ ID NO: 234348 - DNA, 25 bp, probe
gttacatcactgttttgcatctctg

SEQ ID NO: 234349 - DNA, 25 bp, probe
gttacatcactgttttgcatctctg

SEQ ID NO: 234350 - DNA, 25 bp, probe
gttactcacatctaattcatctcga

SEQ ID NO: 234351 - DNA, 25 bp, probe
gttcatccacacaagtctggccgaa

SEQ ID NO: 234352 - DNA, 25 bp, probe
gttcatccacacaagtctggccgaa

SEQ ID NO: 234353 - DNA, 25 bp, probe
gttcactgcagaccagaaggccgtc

SEQ ID NO: 234354 - DNA, 25 bp, probe
gttcagtggcacctagaggcttggc

SEQ ID NO: 234355 - DNA, 25 bp, probe
gttagtggctgcatcatactcttgg

SEQ ID NO: 234356 - DNA, 25 bp, probe
gttagtggctgcatcatactcttgg

SEQ ID NO: 234357 - DNA, 25 bp, probe
gttagtactgcccatgactagttgg

SEQ ID NO: 234358 - DNA, 25 bp, probe
gttcagtctcgggtactcaattggt

SEQ ID NO: 234359 - DNA, 25 bp, probe
gttcatgtctcatggtattcgggaa

SEQ ID NO: 234360 - DNA, 25 bp, probe
gttatgctttattcacttctgtgga

SEQ ID NO: 234361 - DNA, 25 bp, probe
gttactttgaacttcttggtgccag

SEQ ID NO: 234362 - DNA, 25 bp, probe
gttacacggaaagcttatggcccta

SEQ ID NO: 234363 - DNA, 25 bp, probe
gttacacggaaagcatggttcaaaa

SEQ ID NO: 234364 - DNA, 25 bp, probe
gtaaaatcaaaatctgagtctgaga

SEQ ID NO: 234365 - DNA, 25 bp, probe
gtaaaatcaaaatctgagtctgaga

SEQ ID NO: 234366 - DNA, 25 bp, probe
gtagaattcccaatcagagggctga

SEQ ID NO: 234367 - DNA, 25 bp, probe
gtaaattgcttctgagggtctgaaa

SEQ ID NO: 234368 - DNA, 25 bp, probe
gttactatgccctgatgctggttat

SEQ ID NO: 234369 - DNA, 25 bp, probe
gttacaaggacatggtgagtctatt

SEQ ID NO: 234370 - DNA, 25 bp, probe
gttacaattacaggggattcgacat

SEQ ID NO: 234371 - DNA, 25 bp, probe
gttacatcattagcgaatcttggaa

SEQ ID NO: 234372 - DNA, 25 bp, probe
gttacctggaatggaacttgaaagc

SEQ ID NO: 234373 - DNA, 25 bp, probe
gttacctgggcaataagggactagc

SEQ ID NO: 234374 - DNA, 25 bp, probe
gttacactagtgcatacatagagac

SEQ ID NO: 234375 - DNA, 25 bp, probe
gttcaacatttgcaaagagagacaa

SEQ ID NO: 234376 - DNA, 25 bp, probe
gtatcatcagagcgccgaggagagt

SEQ ID NO: 234377 - DNA, 25 bp, probe
gttcacagactggccggaacagggt

SEQ ID NO: 234378 - DNA, 25 bp, probe
gttcacagcccagaatgagacccga

SEQ ID NO: 234379 - DNA, 25 bp, probe
gttatcacccaaataggaaacgact

SEQ ID NO: 234380 - DNA, 25 bp, probe
gttaacccaagaagtagacatcaaa

SEQ ID NO: 234381 - DNA, 25 bp, probe
gtttacctaaatgttcactgacaca

SEQ ID NO: 234382 - DNA, 25 bp, probe
gttttactaaatgggcacagcatga

SEQ ID NO: 234383 - DNA, 25 bp, probe
gttttcctatgctttgaaacagaaa

SEQ ID NO: 234384 - DNA, 25 bp, probe
gttacttgcttgtgtaagaacaaaa

SEQ ID NO: 234385 - DNA, 25 bp, probe
gttacttgcttgtgtaagaacaaaa

SEQ ID NO: 234386 - DNA, 25 bp, probe
gttacgctgattttatgaagaccac

SEQ ID NO: 234387 - DNA, 25 bp, probe
gttaggtgttgacattgagaaccct

SEQ ID NO: 234388 - DNA, 25 bp, probe
gtttttgtttggagagcacacctat

SEQ ID NO: 234389 - DNA, 25 bp, probe
gtatttttctctgctaagaccggct

SEQ ID NO: 234390 - DNA, 25 bp, probe
gtattttggcacagccaaagcccgc

SEQ ID NO: 234391 - DNA, 25 bp, probe
gtatttcgaatagtgccaaagttta

SEQ ID NO: 234392 - DNA, 25 bp, probe
gtttcggcttagtccaacagtgttt

SEQ ID NO: 234393 - DNA, 25 bp, probe
gttttgtctttgccaaacatcatcc

SEQ ID NO: 234394 - DNA, 25 bp, probe
gtatttagtgtggcagaataataac

SEQ ID NO: 234395 - DNA, 25 bp, probe
gttttgctggatgccgaagtataca

SEQ ID NO: 234396 - DNA, 25 bp, probe
gttttcttggccggatggctgaggc

SEQ ID NO: 234397 - DNA, 25 bp, probe
gttaggcttctgaggggtcaggcag

SEQ ID NO: 234398 - DNA, 25 bp, probe
gttaggtggagcagttggtgtggca

SEQ ID NO: 234399 - DNA, 25 bp, probe
gttcacaggaggccagtgggcgggc

SEQ ID NO: 234400 - DNA, 25 bp, probe
gttcaaggagccggtggaggtgctg

SEQ ID NO: 234401 - DNA, 25 bp, probe
gttaagaggtcagcattgaggtcac

SEQ ID NO: 234402 - DNA, 25 bp, probe
gttagattgccaaccagttcatgag

SEQ ID NO: 234403 - DNA, 25 bp, probe
gttaataccataggggctactggga

SEQ ID NO: 234404 - DNA, 25 bp, probe
gttaataccataggggctactggga

SEQ ID NO: 234405 - DNA, 25 bp, probe
gtttcaacccatggtgggacacgga

SEQ ID NO: 234406 - DNA, 25 bp, probe
gtttagttgccacagtgaaccagga

SEQ ID NO: 234407 - DNA, 25 bp, probe
gtttagttgacatagaagaggcaca

SEQ ID NO: 234408 - DNA, 25 bp, probe
gtattacctggctgagaagcacctt

SEQ ID NO: 234409 - DNA, 25 bp, probe
gtttgacatcgggaaggacacgtac

SEQ ID NO: 234410 - DNA, 25 bp, probe
gttaagctctgtaaatgtgccacga

SEQ ID NO: 234411 - DNA, 25 bp, probe
gttagcctggtcaagatgctgacca

SEQ ID NO: 234412 - DNA, 25 bp, probe
gttcaccggctatgtgataccagga

SEQ ID NO: 234413 - DNA, 25 bp, probe
gttaactgagattcctatacaggga

SEQ ID NO: 234414 - DNA, 25 bp, probe
gtttactggatttcttaaaagatgg

SEQ ID NO: 234415 - DNA, 25 bp, probe
gtttactggatttcttaaaagatgg

SEQ ID NO: 234416 - DNA, 25 bp, probe
ggtactaggatttctcaaaaggatt

SEQ ID NO: 234417 - DNA, 25 bp, probe
gttatgccaacttttcaagtagttt

SEQ ID NO: 234418 - DNA, 25 bp, probe
gttatgatttcatatcctgagatag

SEQ ID NO: 234419 - DNA, 25 bp, probe
gttatctgtttgttactgcatcatc

SEQ ID NO: 234420 - DNA, 25 bp, probe
gttactgatagggatacatgtctta

SEQ ID NO: 234421 - DNA, 25 bp, probe
gttactgatagggatacatgtctta

SEQ ID NO: 234422 - DNA, 25 bp, probe
gttactggagctctagctgcctatt

SEQ ID NO: 234423 - DNA, 25 bp, probe
gttactggagctctagctgcctatt

SEQ ID NO: 234424 - DNA, 25 bp, probe
gttacaggagcgagagcgagctctc

SEQ ID NO: 234425 - DNA, 25 bp, probe
gttaagatgatcaaggagggctcca

SEQ ID NO: 234426 - DNA, 25 bp, probe
gttacgtgtctactatttgtcctgg

SEQ ID NO: 234427 - DNA, 25 bp, probe
gttacctgtttcacatgtacgtggg

SEQ ID NO: 234428 - DNA, 25 bp, probe
gttacttttgacccatgtgcaagga

SEQ ID NO: 234429 - DNA, 25 bp, probe
gttatctagttaccaatgctgcagt

SEQ ID NO: 234430 - DNA, 25 bp, probe
gttattagcagaagcaaatgtcatg

SEQ ID NO: 234431 - DNA, 25 bp, probe
gttatatgggatagaaatggcagca

SEQ ID NO: 234432 - DNA, 25 bp, probe
gttaagttgctagacactgcgaaac

SEQ ID NO: 234433 - DNA, 25 bp, probe
gttaacaactcagccatctggcaca

SEQ ID NO: 234434 - DNA, 25 bp, probe
gttcaatcagaatccccgaaacctc

SEQ ID NO: 234435 - DNA, 25 bp, probe
gttttagcaaacgtcccacaatcgc

SEQ ID NO: 234436 - DNA, 25 bp, probe
gtttcgaccaagtatcccaaaccag

SEQ ID NO: 234437 - DNA, 25 bp, probe
gtttcgaccaagtatcccaaaccag

SEQ ID NO: 234438 - DNA, 25 bp, probe
gttttactgaagtatccagttctta

SEQ ID NO: 234439 - DNA, 25 bp, probe
gttttatgctgggaatctagggcct

SEQ ID NO: 234440 - DNA, 25 bp, probe
gttagtgtggtgaaatctagttcct

SEQ ID NO: 234441 - DNA, 25 bp, probe
gtaatgttaggaactcctttcctag

SEQ ID NO: 234442 - DNA, 25 bp, probe
gtatggagtaatgttacccccttga

SEQ ID NO: 234443 - DNA, 25 bp, probe
gttagaggagacgatctgacccacc

SEQ ID NO: 234444 - DNA, 25 bp, probe
gttagaggaagccctacctgtcagc

SEQ ID NO: 234445 - DNA, 25 bp, probe
gttagaggaggccctgtctgaagca

SEQ ID NO: 234446 - DNA, 25 bp, probe
gttatggagggagcagcctcacaca

SEQ ID NO: 234447 - DNA, 25 bp, probe
gttagggagaaccatcatttcacag

SEQ ID NO: 234448 - DNA, 25 bp, probe
gttaacagatgatccatttgaacag

SEQ ID NO: 234449 - DNA, 25 bp, probe
gttacacagcagtacctctttgacc

SEQ ID NO: 234450 - DNA, 25 bp, probe
gttaatccatgttcaattcaaggtt

SEQ ID NO: 234451 - DNA, 25 bp, probe
gttatatcagcagacactccagttt

SEQ ID NO: 234452 - DNA, 25 bp, probe
gttagtgccatggcacactgccaca

SEQ ID NO: 234453 - DNA, 25 bp, probe
gttattgcactggtctgtgctgaca

SEQ ID NO: 234454 - DNA, 25 bp, probe
gttttccgtggctgcattcatacaa

SEQ ID NO: 234455 - DNA, 25 bp, probe
gttttgcccggatcattggagagaa

SEQ ID NO: 234456 - DNA, 25 bp, probe
gttttccccagaacattgtagatgg

SEQ ID NO: 234457 - DNA, 25 bp, probe
gttattgtcccacacgtgaaaccag

SEQ ID NO: 234458 - DNA, 25 bp, probe
gttattcagggacactatattacaa

SEQ ID NO: 234459 - DNA, 25 bp, probe
gtttccaaggtgcacattttccacg

SEQ ID NO: 234460 - DNA, 25 bp, probe
gtttttagtcgtggcatttaccctg

SEQ ID NO: 234461 - DNA, 25 bp, probe
gtttcttagtccgaatgttagattc

SEQ ID NO: 234462 - DNA, 25 bp, probe
gttttatattaggacgactcagtat

SEQ ID NO: 234463 - DNA, 25 bp, probe
gttttactttgagaatctcctgtcc

SEQ ID NO: 234464 - DNA, 25 bp, probe
gttttggctttcagcaattcttgcg

SEQ ID NO: 234465 - DNA, 25 bp, probe
gtttagtatgctattaagtcattct

SEQ ID NO: 234466 - DNA, 25 bp, probe
gttacagtttacgcaggacattctt

SEQ ID NO: 234467 - DNA, 25 bp, probe
gttacagtttacgcaggacattctt

SEQ ID NO: 234468 - DNA, 25 bp, probe
gttaactgttacatcagtaactgca

SEQ ID NO: 234469 - DNA, 25 bp, probe
gttataagtaacatatgtaaacatg

SEQ ID NO: 234470 - DNA, 25 bp, probe
gtttacagaaacagatcaagggcta

SEQ ID NO: 234471 - DNA, 25 bp, probe
tgtttcggacccagatcatccggag

SEQ ID NO: 234472 - DNA, 25 bp, probe
gtttagagggccacaagctctgggg

SEQ ID NO: 234473 - DNA, 25 bp, probe
gtttagggccctgatttgctgggca

SEQ ID NO: 234474 - DNA, 25 bp, probe
gtttatacggcttttttgctggtca

SEQ ID NO: 234475 - DNA, 25 bp, probe
gtttaacatgggttgcttaaggtca

SEQ ID NO: 234476 - DNA, 25 bp, probe
gtatctgaaaaggtttaaagtgatg

SEQ ID NO: 234477 - DNA, 25 bp, probe
gtgcctgaaaccttactacaaggga

SEQ ID NO: 234478 - DNA, 25 bp, probe
gtgcctgaaaccttactacaaggga

SEQ ID NO: 234479 - DNA, 25 bp, probe
gtttgagaacttcacttacgcgggc

SEQ ID NO: 234480 - DNA, 25 bp, probe
gtttaggcacagctatttatagggg

SEQ ID NO: 234481 - DNA, 25 bp, probe
gtttcatggccggttttatcagcag

SEQ ID NO: 234482 - DNA, 25 bp, probe
gttacagcaccattgttttagcagt

SEQ ID NO: 234483 - DNA, 25 bp, probe
gttacagtctaattgtcttggacat

SEQ ID NO: 234484 - DNA, 25 bp, probe
gttacagtctaattgtcttggacat

SEQ ID NO: 234485 - DNA, 25 bp, probe
gttactgtgtaaactcatctgaaat

SEQ ID NO: 234486 - DNA, 25 bp, probe
gttaatgtgaacgactcttccaacg

SEQ ID NO: 234487 - DNA, 25 bp, probe
gttttgtacaaccttactgcacact

SEQ ID NO: 234488 - DNA, 25 bp, probe
gtttatgattccacctacatgaggt

SEQ ID NO: 234489 - DNA, 25 bp, probe
gttatctgatgtccagaacttcccg

SEQ ID NO: 234490 - DNA, 25 bp, probe
gttactgtctgggagcagcttcaac

SEQ ID NO: 234491 - DNA, 25 bp, probe
gttactgttgggctttccactgaga

SEQ ID NO: 234492 - DNA, 25 bp, probe
gttttgtgtggggcttccctaagca

SEQ ID NO: 234493 - DNA, 25 bp, probe
gtttctaatgggcagaccacgcggc

SEQ ID NO: 234494 - DNA, 25 bp, probe
gttttacatcggagcacaccgaggg

SEQ ID NO: 234495 - DNA, 25 bp, probe
gtttgttggggtcctcaacggagag

SEQ ID NO: 234496 - DNA, 25 bp, probe
gtattttgacagggccgtcaccgaa

SEQ ID NO: 234497 - DNA, 25 bp, probe
gttttggacacttgggtcacctgac

SEQ ID NO: 234498 - DNA, 25 bp, probe
gtttgtaacactcttgtgaccgtgc

SEQ ID NO: 234499 - DNA, 25 bp, probe
gtttaaagaaacaggattcagtgtg

SEQ ID NO: 234500 - DNA, 25 bp, probe
gtttcttagaaatcggtctcagtgc

SEQ ID NO: 234501 - DNA, 25 bp, probe
gttacttacaaagaggtgctcagct

SEQ ID NO: 234502 - DNA, 25 bp, probe
gttaatgtctactaaaattgctact

SEQ ID NO: 234503 - DNA, 25 bp, probe
gttcaatttgaaccactttctagca

SEQ ID NO: 234504 - DNA, 25 bp, probe
gttaatttgataccagttgagtaga

SEQ ID NO: 234505 - DNA, 25 bp, probe
gttatataatatctcataatagtag

SEQ ID NO: 234506 - DNA, 25 bp, probe
gttaatctttgtgctatatggtatg

SEQ ID NO: 234507 - DNA, 25 bp, probe
gttacttcttctgcatgatgtgtgg

SEQ ID NO: 234508 - DNA, 25 bp, probe
gttagtcatatcctacgaggatgtg

SEQ ID NO: 234509 - DNA, 25 bp, probe
gttagtacattctcagaggattctg

SEQ ID NO: 234510 - DNA, 25 bp, probe
gttagtacattctcagaggattctg

SEQ ID NO: 234511 - DNA, 25 bp, probe
gttaaactctgcattgatggatacg

SEQ ID NO: 234512 - DNA, 25 bp, probe
gtttcagacttggaaaggtcacaga

SEQ ID NO: 234513 - DNA, 25 bp, probe
gtttcaagttctcaatggctacgtc

SEQ ID NO: 234514 - DNA, 25 bp, probe
gtttaaagactaaatgtgttcacat

SEQ ID NO: 234515 - DNA, 25 bp, probe
gtttagaatattaagttttcctctg

SEQ ID NO: 234516 - DNA, 25 bp, probe
gtttaggagttaatttttgtcagca

SEQ ID NO: 234517 - DNA, 25 bp, probe
gtttagtacaaactttttgacagat

SEQ ID NO: 234518 - DNA, 25 bp, probe
gtttagtacaaactttttgacagat

SEQ ID NO: 234519 - DNA, 25 bp, probe
gtttagttcttagtatcttttcaat

SEQ ID NO: 234520 - DNA, 25 bp, probe
gtttagttcttagtatcttttcaat

SEQ ID NO: 234521 - DNA, 25 bp, probe
gtttctcagttgcactacgtttcaa

SEQ ID NO: 234522 - DNA, 25 bp, probe
gttacacttgtgcagaaagatttta

SEQ ID NO: 234523 - DNA, 25 bp, probe
gtttattttgggatagttaggagct

SEQ ID NO: 234524 - DNA, 25 bp, probe
gttttgtggcttcttagttagtaat

SEQ ID NO: 234525 - DNA, 25 bp, probe
gttttgtggcttcttagttagtaat

SEQ ID NO: 234526 - DNA, 25 bp, probe
gtttgtcttggtcttagtgtttgct

SEQ ID NO: 234527 - DNA, 25 bp, probe
gttttcatacgggattttgccttca

SEQ ID NO: 234528 - DNA, 25 bp, probe
gttttcatacgggattttgccttca

SEQ ID NO: 234529 - DNA, 25 bp, probe
gttttgtagcctgcttttgctttca

SEQ ID NO: 234530 - DNA, 25 bp, probe
gttagtgaaacagctgtctccgtaa

SEQ ID NO: 234531 - DNA, 25 bp, probe
gttagtgattgatcctgacaagcgg

SEQ ID NO: 234532 - DNA, 25 bp, probe
gttagtgttgattacagacatagtg

SEQ ID NO: 234533 - DNA, 25 bp, probe
gttagtgttgattacagacatagtg

SEQ ID NO: 234534 - DNA, 25 bp, probe
gttagaggtgtctacagtccagatg

SEQ ID NO: 234535 - DNA, 25 bp, probe
gttcaatgatggaaatgccgccgtg

SEQ ID NO: 234536 - DNA, 25 bp, probe
gttaattgagaatcatcagccacgt

SEQ ID NO: 234537 - DNA, 25 bp, probe
gttacactgaagtataatcacactg

SEQ ID NO: 234538 - DNA, 25 bp, probe
gttaatatcatacacaatcaccata

SEQ ID NO: 234539 - DNA, 25 bp, probe
gttaaactgagaatcaacacctatg

SEQ ID NO: 234540 - DNA, 25 bp, probe
gttaatgccgaagtctcaacgctaa

SEQ ID NO: 234541 - DNA, 25 bp, probe
gttaactcgaattctcacaaggaaa

SEQ ID NO: 234542 - DNA, 25 bp, probe
gttaactcacatgacccaaatgtag

SEQ ID NO: 234543 - DNA, 25 bp, probe
gttatcactacagatctcccagtaa

SEQ ID NO: 234544 - DNA, 25 bp, probe
gttatgactaatgatatgcctagta

SEQ ID NO: 234545 - DNA, 25 bp, probe
gttacatggatagattgcctagtgg

SEQ ID NO: 234546 - DNA, 25 bp, probe
gttattggagacatatagctcagat

SEQ ID NO: 234547 - DNA, 25 bp, probe
gtttcaggaccatcatcagcatgca

SEQ ID NO: 234548 - DNA, 25 bp, probe
gtttcagagcccaagtcaggaggtc

SEQ ID NO: 234549 - DNA, 25 bp, probe
gtttaactcctatgcaagatgaagc

SEQ ID NO: 234550 - DNA, 25 bp, probe
gtttaactcctatgcaagatgaagc

SEQ ID NO: 234551 - DNA, 25 bp, probe
gttaaagtgctttacatgatgatgt

SEQ ID NO: 234552 - DNA, 25 bp, probe
gttaacagagtttgatatgggcttt

SEQ ID NO: 234553 - DNA, 25 bp, probe
gttaacagagtttgatatgggcttt

SEQ ID NO: 234554 - DNA, 25 bp, probe
gttaacttgtttattgcagcttata

SEQ ID NO: 234555 - DNA, 25 bp, probe
gtctgaaccgttgcttgtggattta

SEQ ID NO: 234556 - DNA, 25 bp, probe
gtatacttccttatgcttcttttaa

SEQ ID NO: 234557 - DNA, 25 bp, probe
gtatctttggttatcctgtttgaag

SEQ ID NO: 234558 - DNA, 25 bp, probe
gttatttggactataccctgagata

SEQ ID NO: 234559 - DNA, 25 bp, probe
gttattattgcttcaaacacccaaa

SEQ ID NO: 234560 - DNA, 25 bp, probe
gttattattgcttcaaacacccaaa

SEQ ID NO: 234561 - DNA, 25 bp, probe
gttatttctctttcacggaacaatc

SEQ ID NO: 234562 - DNA, 25 bp, probe
gttaactttgtgtctcggcaacata

SEQ ID NO: 234563 - DNA, 25 bp, probe
gttagtctgttcttttggatagcat

SEQ ID NO: 234564 - DNA, 25 bp, probe
gttaatccttctatcttgaatcttc

SEQ ID NO: 234565 - DNA, 25 bp, probe
gttacatgacctatatcttttcctc

SEQ ID NO: 234566 - DNA, 25 bp, probe
gttacatgacctatatcttttcctc

SEQ ID NO: 234567 - DNA, 25 bp, probe
gttacagtcacaatctacttttctt

SEQ ID NO: 234568 - DNA, 25 bp, probe
gttacagtccagttttgtgtgcttt

SEQ ID NO: 234569 - DNA, 25 bp, probe
gttacagtccagttttgtgtgcttt

SEQ ID NO: 234570 - DNA, 25 bp, probe
gttaatgtactctttggctttgttt

SEQ ID NO: 234571 - DNA, 25 bp, probe
gttacattatcttttgattcattta

SEQ ID NO: 234572 - DNA, 25 bp, probe
gttactgtagtgtttatataatttt

SEQ ID NO: 234573 - DNA, 25 bp, probe
gttactgctcagaggtattccttta

SEQ ID NO: 234574 - DNA, 25 bp, probe
gttactgaagagcttcactccctta

SEQ ID NO: 234575 - DNA, 25 bp, probe
gttagtgacagggtggcagtcccat

SEQ ID NO: 234576 - DNA, 25 bp, probe
gttactgaagctggtggcgtgctaa

SEQ ID NO: 234577 - DNA, 25 bp, probe
gttactgaagctggtggcgtgctaa

SEQ ID NO: 234578 - DNA, 25 bp, probe
gttatctctactggatgggtccagg

SEQ ID NO: 234579 - DNA, 25 bp, probe
gttatctctactggatgggtccagg

SEQ ID NO: 234580 - DNA, 25 bp, probe
gttaccgcacggtggtgcagggcac

SEQ ID NO: 234581 - DNA, 25 bp, probe
gttacccagggtggagtgcagtggt

SEQ ID NO: 234582 - DNA, 25 bp, probe
gttacctgtgtgtggaccagaggaa

SEQ ID NO: 234583 - DNA, 25 bp, probe
gttatcgttgtggtaaccaagctgc

SEQ ID NO: 234584 - DNA, 25 bp, probe
gttattgttgtggtaaccaggctgc

SEQ ID NO: 234585 - DNA, 25 bp, probe
gttatttattgggaacccctgcagg

SEQ ID NO: 234586 - DNA, 25 bp, probe
gttattttccaggaaccttctcctg

SEQ ID NO: 234587 - DNA, 25 bp, probe
gttattttccaggaaccttctcctg

SEQ ID NO: 234588 - DNA, 25 bp, probe
gttatttataccaaatcctacaggg

SEQ ID NO: 234589 - DNA, 25 bp, probe
gttactttaactggacctgagtagg

SEQ ID NO: 234590 - DNA, 25 bp, probe
gttattatacaatggacaggattat

SEQ ID NO: 234591 - DNA, 25 bp, probe
gttagagaaccactgtgacatggct

SEQ ID NO: 234592 - DNA, 25 bp, probe
gttagagaaccactgtgacatggct

SEQ ID NO: 234593 - DNA, 25 bp, probe
gttatgagaaccagcgaaatccccc

SEQ ID NO: 234594 - DNA, 25 bp, probe
tgttaggaacgtcaaagaaagcgcc

SEQ ID NO: 234595 - DNA, 25 bp, probe
gttaggaacgtcaaagaaagcgccg

SEQ ID NO: 234596 - DNA, 25 bp, probe
gttaggaccaataaacactacagct

SEQ ID NO: 234597 - DNA, 25 bp, probe
gtatggaagaaaaaccctcacagac

SEQ ID NO: 234598 - DNA, 25 bp, probe
gtttgacgacgaaaacacagcccag

SEQ ID NO: 234599 - DNA, 25 bp, probe
gtttggtgataacaactacccagga

SEQ ID NO: 234600 - DNA, 25 bp, probe
gttttgtgaaggcaatgcgggcaca

SEQ ID NO: 234601 - DNA, 25 bp, probe
gttttctaagtaattgctgcctcta

SEQ ID NO: 234602 - DNA, 25 bp, probe
gttatttatttaagtgcgcctgtgt

SEQ ID NO: 234603 - DNA, 25 bp, probe
gtattttctgcctaagtgctacgtg

SEQ ID NO: 234604 - DNA, 25 bp, probe
gttttattgccattcaactagggaa

SEQ ID NO: 234605 - DNA, 25 bp, probe
gttttactgcctgtagcaatggcca

SEQ ID NO: 234606 - DNA, 25 bp, probe
gttttccaccagtctgaaaggcata

SEQ ID NO: 234607 - DNA, 25 bp, probe
gttatgatcacaaaactcaaagaaa

SEQ ID NO: 234608 - DNA, 25 bp, probe
gtttcatatgcagcgacaaagaaaa

SEQ ID NO: 234609 - DNA, 25 bp, probe
gtttatatgtacagatcaagaagtc

SEQ ID NO: 234610 - DNA, 25 bp, probe
gtttatatgtacagatcaagaagtc

SEQ ID NO: 234611 - DNA, 25 bp, probe
gtttcaattgaaaatagactcagga

SEQ ID NO: 234612 - DNA, 25 bp, probe
gttactttccaggaagactacagca

SEQ ID NO: 234613 - DNA, 25 bp, probe
gttactttccaggaagactacagca

SEQ ID NO: 234614 - DNA, 25 bp, probe
gttacattaccataaaccatatcac

SEQ ID NO: 234615 - DNA, 25 bp, probe
gttacttgaccgtattctcaaacaa

SEQ ID NO: 234616 - DNA, 25 bp, probe
gtttcgtagcatgagtttaaatcaa

SEQ ID NO: 234617 - DNA, 25 bp, probe
gtttactggcaggaatttgaagata

SEQ ID NO: 234618 - DNA, 25 bp, probe
gttaactggggtatcagctgaatca

SEQ ID NO: 234619 - DNA, 25 bp, probe
gttaactcacatttatacagcagaa

SEQ ID NO: 234620 - DNA, 25 bp, probe
gttaactcacatttatacagcagaa

SEQ ID NO: 234621 - DNA, 25 bp, probe
gttactctgtcgttatccagagatg

SEQ ID NO: 234622 - DNA, 25 bp, probe
gttactctgtcgttatccagagatg

SEQ ID NO: 234623 - DNA, 25 bp, probe
gttacatcatctcattaaggccatt

SEQ ID NO: 234624 - DNA, 25 bp, probe
gttacatcttaacacaggcaatgtc

SEQ ID NO: 234625 - DNA, 25 bp, probe
gttacatcttaacacaggcaatgtc

SEQ ID NO: 234626 - DNA, 25 bp, probe
gttttcgtacagcaaggcactgggg

SEQ ID NO: 234627 - DNA, 25 bp, probe
gttttctgctgtttaaggtcttggg

SEQ ID NO: 234628 - DNA, 25 bp, probe
gttattctgctccttaaggttaaca

SEQ ID NO: 234629 - DNA, 25 bp, probe
gttttcagatccatagcatggaaaa

SEQ ID NO: 234630 - DNA, 25 bp, probe
gttttcaatgccagtgggccaaata

SEQ ID NO: 234631 - DNA, 25 bp, probe
gttttcaatgccagtgggccaaata

SEQ ID NO: 234632 - DNA, 25 bp, probe
gttttgaagctcatgggaaaattgt

SEQ ID NO: 234633 - DNA, 25 bp, probe
gttttctagttctgtgtaattgttt

SEQ ID NO: 234634 - DNA, 25 bp, probe
gtttacattttctggtactctgtga

SEQ ID NO: 234635 - DNA, 25 bp, probe
gttaacatcaaagctggcaacttga

SEQ ID NO: 234636 - DNA, 25 bp, probe
gttaaagaatcatctggattataga

SEQ ID NO: 234637 - DNA, 25 bp, probe
gtttcagagaacggctacattaaga

SEQ ID NO: 234638 - DNA, 25 bp, probe
gtttcagagaacggctacattaaga

SEQ ID NO: 234639 - DNA, 25 bp, probe
gttaaactatatggtacttgctaca

SEQ ID NO: 234640 - DNA, 25 bp, probe
gttaaaatatgtgctcatctcctaa

SEQ ID NO: 234641 - DNA, 25 bp, probe
gttaaaatatgtgctcatctcctaa

SEQ ID NO: 234642 - DNA, 25 bp, probe
gttatgtataatacttagatcctcc

SEQ ID NO: 234643 - DNA, 25 bp, probe
gtttacataattttgggccccagat

SEQ ID NO: 234644 - DNA, 25 bp, probe
gtcttaccaattctgcgtcactagg

SEQ ID NO: 234645 - DNA, 25 bp, probe
gtttaccagcttggatgcccacaag

SEQ ID NO: 234646 - DNA, 25 bp, probe
gtttaccgtatttccaacacacgat

SEQ ID NO: 234647 - DNA, 25 bp, probe
gtttgaggatttcaccaacacctta

SEQ ID NO: 234648 - DNA, 25 bp, probe
gtttcatggtgttgcaagccaagct

SEQ ID NO: 234649 - DNA, 25 bp, probe
gttttagtgttggcagtaatgttga

SEQ ID NO: 234650 - DNA, 25 bp, probe
gtttcaacttgtcttatgcatctta

SEQ ID NO: 234651 - DNA, 25 bp, probe
gttaaacttttgaattgatttgagg

SEQ ID NO: 234652 - DNA, 25 bp, probe
gttaaattctccattatgttcgtgg

SEQ ID NO: 234653 - DNA, 25 bp, probe
gttaaattgtgcgctgtattttgca

SEQ ID NO: 234654 - DNA, 25 bp, probe
gtataacttgtcacttaatgttaga

SEQ ID NO: 234655 - DNA, 25 bp, probe
gttacctcttctccttaatcagaag

SEQ ID NO: 234656 - DNA, 25 bp, probe
gttacctcttctccttaatcagaag

SEQ ID NO: 234657 - DNA, 25 bp, probe
gttacaagtggcacttcaatgagac

SEQ ID NO: 234658 - DNA, 25 bp, probe
gttaccagggctgaatgggaacaga

SEQ ID NO: 234659 - DNA, 25 bp, probe
gttaccaggcggcactggagtacct

SEQ ID NO: 234660 - DNA, 25 bp, probe
gttaccgctggccgagctgaagaac

SEQ ID NO: 234661 - DNA, 25 bp, probe
gttactccgtaccttactgagatct

SEQ ID NO: 234662 - DNA, 25 bp, probe
gttattatttttgtcacggaaagca

SEQ ID NO: 234663 - DNA, 25 bp, probe
gttttggttttgactcacctgaaag

SEQ ID NO: 234664 - DNA, 25 bp, probe
gttttggttttgactcacctgaaag

SEQ ID NO: 234665 - DNA, 25 bp, probe
gttttggaatttaccggctgagaga

SEQ ID NO: 234666 - DNA, 25 bp, probe
gttatttcatggttaccgtatacag

SEQ ID NO: 234667 - DNA, 25 bp, probe
gtttttaaatattgcactgataaac

SEQ ID NO: 234668 - DNA, 25 bp, probe
gttttcatccactatccagtactga

SEQ ID NO: 234669 - DNA, 25 bp, probe
gttaccatgccatttcacattacca

SEQ ID NO: 234670 - DNA, 25 bp, probe
gttatccatgccttcaacatgaaca

SEQ ID NO: 234671 - DNA, 25 bp, probe
gttacttgagtgtcactcagcaaca

SEQ ID NO: 234672 - DNA, 25 bp, probe
gttagttggatgccactacaccttt

SEQ ID NO: 234673 - DNA, 25 bp, probe
gttactgggcataacttactgcttt

SEQ ID NO: 234674 - DNA, 25 bp, probe
gttatcgagccaatacctactgctc

SEQ ID NO: 234675 - DNA, 25 bp, probe
gttattgcagccacttgctcagtgc

SEQ ID NO: 234676 - DNA, 25 bp, probe
gtttgatcacctgcctgcaaggaat

SEQ ID NO: 234677 - DNA, 25 bp, probe
gttacatcatccttcccaaggattc

SEQ ID NO: 234678 - DNA, 25 bp, probe
gttagccttgcttccacaaggccat

SEQ ID NO: 234679 - DNA, 25 bp, probe
gtttgctttgctgaccaaatgcctg

SEQ ID NO: 234680 - DNA, 25 bp, probe
gtttgctttgctgaccaaatgcctg

SEQ ID NO: 234681 - DNA, 25 bp, probe
gtatgaatttcctgacaaagactgg

SEQ ID NO: 234682 - DNA, 25 bp, probe
gtttatcgaccggcacaaacagctg

SEQ ID NO: 234683 - DNA, 25 bp, probe
gtttatcgaccggcacaaacagctg

SEQ ID NO: 234684 - DNA, 25 bp, probe
gttttccacgcagactgtagctgct

SEQ ID NO: 234685 - DNA, 25 bp, probe
gtttttcctgagggctagatgcatt

SEQ ID NO: 234686 - DNA, 25 bp, probe
gtctttcctctgagtctaaactgca

SEQ ID NO: 234687 - DNA, 25 bp, probe
gtttttccatggcatcagtatacct

SEQ ID NO: 234688 - DNA, 25 bp, probe
gtttttccatggcatcagtatacct

SEQ ID NO: 234689 - DNA, 25 bp, probe
gtttttccatggcatcagtatacct

SEQ ID NO: 234690 - DNA, 25 bp, probe
gtttgttactctgtcgttatccaga

SEQ ID NO: 234691 - DNA, 25 bp, probe
gtttgttactctgtcgttatccaga

SEQ ID NO: 234692 - DNA, 25 bp, probe
gttacttacctgcatgtgttgtaca

SEQ ID NO: 234693 - DNA, 25 bp, probe
gtttttcacttgcattgtcattaga

SEQ ID NO: 234694 - DNA, 25 bp, probe
gtttttgggctgtatagctctttac

SEQ ID NO: 234695 - DNA, 25 bp, probe
gtttttgggctgtatagctctttac

SEQ ID NO: 234696 - DNA, 25 bp, probe
gtcttttggtctctaccattttctg

SEQ ID NO: 234697 - DNA, 25 bp, probe
gttttctttgtcatacctaatctgt

SEQ ID NO: 234698 - DNA, 25 bp, probe
gttttctttgtcatacctaatctgt

SEQ ID NO: 234699 - DNA, 25 bp, probe
gttattcttctgaaagagccacatt

SEQ ID NO: 234700 - DNA, 25 bp, probe
gttacctatctgaatgcacaccaag

SEQ ID NO: 234701 - DNA, 25 bp, probe
gttaccattataaccctacagaggt

SEQ ID NO: 234702 - DNA, 25 bp, probe
gttacatatttagcgcacccagaga

SEQ ID NO: 234703 - DNA, 25 bp, probe
gttagtagttgagcctgaccatgag

SEQ ID NO: 234704 - DNA, 25 bp, probe
gtttatacattatttctaccgagaa

SEQ ID NO: 234705 - DNA, 25 bp, probe
gtttatacattatttctaccgagaa

SEQ ID NO: 234706 - DNA, 25 bp, probe
gtttacacaacgattactcgaagat

SEQ ID NO: 234707 - DNA, 25 bp, probe
gtttgtaaacgtatcctctgtattc

SEQ ID NO: 234708 - DNA, 25 bp, probe
gttattggaaaagctccctgccttc

SEQ ID NO: 234709 - DNA, 25 bp, probe
gttaggaataacactgcagccctct

SEQ ID NO: 234710 - DNA, 25 bp, probe
gttatggataagacccgagctttga

SEQ ID NO: 234711 - DNA, 25 bp, probe
gttttaagaacctgcagtttgactc

SEQ ID NO: 234712 - DNA, 25 bp, probe
tgagtttaaggagcttgtttaccca

SEQ ID NO: 234713 - DNA, 25 bp, probe
tagtttaagtgtgttcttaccgcct

SEQ ID NO: 234714 - DNA, 25 bp, probe
tagtttaagtgtgttcttaccgcct

SEQ ID NO: 234715 - DNA, 25 bp, probe
tccttccaaagtgtcctatgaaccc

SEQ ID NO: 234716 - DNA, 25 bp, probe
tctgttccaaaatgtacggacccca

SEQ ID NO: 234717 - DNA, 25 bp, probe
tctttccaacgctgtaaaaaggaca

SEQ ID NO: 234718 - DNA, 25 bp, probe
gtttcaagacgctgtaaacctctga

SEQ ID NO: 234719 - DNA, 25 bp, probe
gtttcaagaagggggaatgctgtcg

SEQ ID NO: 234720 - DNA, 25 bp, probe
gttactggaagccgggactgctagg

SEQ ID NO: 234721 - DNA, 25 bp, probe
gttacggcatagcctatgtacatct

SEQ ID NO: 234722 - DNA, 25 bp, probe
gttacggcatagcctatgtacatct

SEQ ID NO: 234723 - DNA, 25 bp, probe
gttacttctatgcctgattacaagc

SEQ ID NO: 234724 - DNA, 25 bp, probe
gttatttcatagacgatcaaaacaa

SEQ ID NO: 234725 - DNA, 25 bp, probe
gttatggctataggtgctacaaaaa

SEQ ID NO: 234726 - DNA, 25 bp, probe
gtttggttgccagtcatacaaatta

SEQ ID NO: 234727 - DNA, 25 bp, probe
gttttgtctcacgtgataattcaga

SEQ ID NO: 234728 - DNA, 25 bp, probe
gttttgctggcacattaatcataga

SEQ ID NO: 234729 - DNA, 25 bp, probe
gttatctaaaaattaatctgagcac

SEQ ID NO: 234730 - DNA, 25 bp, probe
gttactaaaattacaaggacctgct

SEQ ID NO: 234731 - DNA, 25 bp, probe
gttactaacaatgtccactacgaga

SEQ ID NO: 234732 - DNA, 25 bp, probe
gttactaatcctgttacgagatgaa

SEQ ID NO: 234733 - DNA, 25 bp, probe
gttactaaccagtcttttgaatcac

SEQ ID NO: 234734 - DNA, 25 bp, probe
gttactccaaaattttacagatcac

SEQ ID NO: 234735 - DNA, 25 bp, probe
gttaccttatggttgtctgtcaatc

SEQ ID NO: 234736 - DNA, 25 bp, probe
gttaccattatttaatttgtatgct

SEQ ID NO: 234737 - DNA, 25 bp, probe
gttacttgtcttcatttgtgttgcc

SEQ ID NO: 234738 - DNA, 25 bp, probe
gttacttgtcttcatttgtgttgcc

SEQ ID NO: 234739 - DNA, 25 bp, probe
gttatttgcctttagtggtgtttct

SEQ ID NO: 234740 - DNA, 25 bp, probe
gttatttgtttaccacttgtattat

SEQ ID NO: 234741 - DNA, 25 bp, probe
gttatatcttcccatatcacttttt

SEQ ID NO: 234742 - DNA, 25 bp, probe
gttatgtcttaggaaattgtggttt

SEQ ID NO: 234743 - DNA, 25 bp, probe
gttagctttctggggaggtgtgtgt

SEQ ID NO: 234744 - DNA, 25 bp, probe
gttagcgttcaggcaggtgacgtgt

SEQ ID NO: 234745 - DNA, 25 bp, probe
gttaccattcagaggtgcagtgagt

SEQ ID NO: 234746 - DNA, 25 bp, probe
gttatccctgaaacctgcatagagt

SEQ ID NO: 234747 - DNA, 25 bp, probe
gtatattcagctcaatgcactaatg

SEQ ID NO: 234748 - DNA, 25 bp, probe
gttataagcatcaatgtgacacttg

SEQ ID NO: 234749 - DNA, 25 bp, probe
gttatgcattgtccagtgacatcat

SEQ ID NO: 234750 - DNA, 25 bp, probe
gttatgattcatccagatccagaga

SEQ ID NO: 234751 - DNA, 25 bp, probe
gttatgattcatccagatccagaga

SEQ ID NO: 234752 - DNA, 25 bp, probe
gttatttatgcttgctgcacagaca

SEQ ID NO: 234753 - DNA, 25 bp, probe
gttactacagcatctgccaggacac

SEQ ID NO: 234754 - DNA, 25 bp, probe
gttataaagcaattccgtcatccaa

SEQ ID NO: 234755 - DNA, 25 bp, probe
gttataaagcaattccgtcatccaa

SEQ ID NO: 234756 - DNA, 25 bp, probe
gttatgagggaagccctgattcaca

SEQ ID NO: 234757 - DNA, 25 bp, probe
gttagcactgatagtcctttttcca

SEQ ID NO: 234758 - DNA, 25 bp, probe
gttagcaatgtagtactgcctctat

SEQ ID NO: 234759 - DNA, 25 bp, probe
gttagcaatgtagtactgcctctat

SEQ ID NO: 234760 - DNA, 25 bp, probe
gttactgtgaactattgtctcttgg

SEQ ID NO: 234761 - DNA, 25 bp, probe
gttactcagaattttgctttgattg

SEQ ID NO: 234762 - DNA, 25 bp, probe
gttaccagagatttacccatcgggt

SEQ ID NO: 234763 - DNA, 25 bp, probe
gttttctggatggttcccagagggt

SEQ ID NO: 234764 - DNA, 25 bp, probe
gtatttgaaatggttcctccaggag

SEQ ID NO: 234765 - DNA, 25 bp, probe
gttttggagttggtcttctggagct

SEQ ID NO: 234766 - DNA, 25 bp, probe
gttttggagttggtcttctggagct

SEQ ID NO: 234767 - DNA, 25 bp, probe
gtttagagagctaagattatctggg

SEQ ID NO: 234768 - DNA, 25 bp, probe
gttactcagaattttgctttgattg

SEQ ID NO: 234769 - DNA, 25 bp, probe
gttattctgaattttctaccttagt

SEQ ID NO: 234770 - DNA, 25 bp, probe
gttattctataatatcttctttgaa

SEQ ID NO: 234771 - DNA, 25 bp, probe
gttattaacagaaattcatatttgg

SEQ ID NO: 234772 - DNA, 25 bp, probe
gttttcaacctcatgtaatttgtgc

SEQ ID NO: 234773 - DNA, 25 bp, probe
gttttcaacctcatgtaatttgtgc

SEQ ID NO: 234774 - DNA, 25 bp, probe
gttttcatctttgttcacttgaggc

SEQ ID NO: 234775 - DNA, 25 bp, probe
gttttatgccctttggactgtcagg

SEQ ID NO: 234776 - DNA, 25 bp, probe
gttttgaggttgagtgacatgttcg

SEQ ID NO: 234777 - DNA, 25 bp, probe
gtttaatgttatgaggacgtgtctg

SEQ ID NO: 234778 - DNA, 25 bp, probe
gttattatttactattacgtgctat

SEQ ID NO: 234779 - DNA, 25 bp, probe
gttttcagtctggctttacgtaact

SEQ ID NO: 234780 - DNA, 25 bp, probe
gttttagtcatgggctttcttcacc

SEQ ID NO: 234781 - DNA, 25 bp, probe
gttttatctctggtttgtgttctcc

SEQ ID NO: 234782 - DNA, 25 bp, probe
gtttttatggttcatgttatatcct

SEQ ID NO: 234783 - DNA, 25 bp, probe
gttttagcttttcttctactggctt

SEQ ID NO: 234784 - DNA, 25 bp, probe
gttattatttttgtttgctttctgt

SEQ ID NO: 234785 - DNA, 25 bp, probe
gttatgtatgcttcttgtcttggtt

SEQ ID NO: 234786 - DNA, 25 bp, probe
gttatttctacttatcttagcactc

SEQ ID NO: 234787 - DNA, 25 bp, probe
gttatttctacttatcttagcactc

SEQ ID NO: 234788 - DNA, 25 bp, probe
gttagcacttttttctttgactcat

SEQ ID NO: 234789 - DNA, 25 bp, probe
gtttagctttataccttggccacag

SEQ ID NO: 234790 - DNA, 25 bp, probe
gttatactcttgaatccctgtggaa

SEQ ID NO: 234791 - DNA, 25 bp, probe
gtttcctgcagaattcgccatgtac

SEQ ID NO: 234792 - DNA, 25 bp, probe
gttatctccatgacttgggcatcat

SEQ ID NO: 234793 - DNA, 25 bp, probe
gttattcctatcctgtggactggtt

SEQ ID NO: 234794 - DNA, 25 bp, probe
gttattcctatcctgtggactggtt

SEQ ID NO: 234795 - DNA, 25 bp, probe
gtttcataaaccctggcactggtca

SEQ ID NO: 234796 - DNA, 25 bp, probe
gttattgaacagcttggaacaccat

SEQ ID NO: 234797 - DNA, 25 bp, probe
gttatatggaatgtctgtaaattct

SEQ ID NO: 234798 - DNA, 25 bp, probe
gtatattatggaactagtaaacctt

SEQ ID NO: 234799 - DNA, 25 bp, probe
ttcaattaggggagtctggacttgt

SEQ ID NO: 234800 - DNA, 25 bp, probe
gtcaagattggagacctcggtctgg

SEQ ID NO: 234801 - DNA, 25 bp, probe
gtgcttattggtatcccaggattag

SEQ ID NO: 234802 - DNA, 25 bp, probe
gtttcaccagtattcaccgaattct

SEQ ID NO: 234803 - DNA, 25 bp, probe
gtttaccggtattactgagctcggc

SEQ ID NO: 234804 - DNA, 25 bp, probe
gtttacgcaggacattcttgccgta

SEQ ID NO: 234805 - DNA, 25 bp, probe
gtttacgagatgtggctcttcgttg

SEQ ID NO: 234806 - DNA, 25 bp, probe
gtttagcgagagatttttctgcctt

SEQ ID NO: 234807 - DNA, 25 bp, probe
gtttagcagaactcattctatcccc

SEQ ID NO: 234808 - DNA, 25 bp, probe
gtttacagagcaaggcttccctgtc

SEQ ID NO: 234809 - DNA, 25 bp, probe
gtttgacgagaacgctcaggttgga

SEQ ID NO: 234810 - DNA, 25 bp, probe
gtttcagggacaattactggggaca

SEQ ID NO: 234811 - DNA, 25 bp, probe
gtttcgggagatcaactgggaggaa

SEQ ID NO: 234812 - DNA, 25 bp, probe
gtttttacaatggaaatggctggaa

SEQ ID NO: 234813 - DNA, 25 bp, probe
gttttgtcacaatgacctgctctgc

SEQ ID NO: 234814 - DNA, 25 bp, probe
gttttgtcacaatgacctgctctgc

SEQ ID NO: 234815 - DNA, 25 bp, probe
gtttctgtataataccttctttgga

SEQ ID NO: 234816 - DNA, 25 bp, probe
gtttcaggatatttgacctgtcatt

SEQ ID NO: 234817 - DNA, 25 bp, probe
gttatcagacactctggctggtttg

SEQ ID NO: 234818 - DNA, 25 bp, probe
gtttcaaacccaagtgagtgtgtgc

SEQ ID NO: 234819 - DNA, 25 bp, probe
gtttagattcccttgaagatgtgtc

SEQ ID NO: 234820 - DNA, 25 bp, probe
gttagagttatccctgcaggagtcc

SEQ ID NO: 234821 - DNA, 25 bp, probe
gttaggctttctatgcacctatcaa

SEQ ID NO: 234822 - DNA, 25 bp, probe
gttaggatcttcaagtcccatcata

SEQ ID NO: 234823 - DNA, 25 bp, probe
gttaggatgctgacacagtctagaa

SEQ ID NO: 234824 - DNA, 25 bp, probe
gttagcaagcatgatctttcgaagg

SEQ ID NO: 234825 - DNA, 25 bp, probe
gttaggcaatgcgttgattcaagac

SEQ ID NO: 234826 - DNA, 25 bp, probe
gttaggcaatgcgttgattcaagac

SEQ ID NO: 234827 - DNA, 25 bp, probe
gtttgaagtgccctcgctcaaactc

SEQ ID NO: 234828 - DNA, 25 bp, probe
gtatcaaaatccatccgcaagactc

SEQ ID NO: 234829 - DNA, 25 bp, probe
gtattaaattcattcacgagtgccg

SEQ ID NO: 234830 - DNA, 25 bp, probe
gttataaaatattccaagatgagcc

SEQ ID NO: 234831 - DNA, 25 bp, probe
gttatcaagaatgggtcaggagacc

SEQ ID NO: 234832 - DNA, 25 bp, probe
gttttaggcatctgtgatcgacaca

SEQ ID NO: 234833 - DNA, 25 bp, probe
gttttaggcatctgtgatcgacaca

SEQ ID NO: 234834 - DNA, 25 bp, probe
gtttaaagctcaaagatggacatcg

SEQ ID NO: 234835 - DNA, 25 bp, probe
gtttagatactcatcaggacctcac

SEQ ID NO: 234836 - DNA, 25 bp, probe
gtttagatactcatcaggacctcac

SEQ ID NO: 234837 - DNA, 25 bp, probe
gttttgaagtccaagagcatcccag

SEQ ID NO: 234838 - DNA, 25 bp, probe
gttattgtgattgaaggcattccag

SEQ ID NO: 234839 - DNA, 25 bp, probe
gttattgcatgatccaatggcttac

SEQ ID NO: 234840 - DNA, 25 bp, probe
gtttatcgagccaaatggatatcac

SEQ ID NO: 234841 - DNA, 25 bp, probe
gttttgtgaccactgtgggtcactg

SEQ ID NO: 234842 - DNA, 25 bp, probe
gtttcttgacaatggggtcaggccc

SEQ ID NO: 234843 - DNA, 25 bp, probe
gttattccgaaaggggcacaggcat

SEQ ID NO: 234844 - DNA, 25 bp, probe
gttttaggataaggggtcatcaatg

SEQ ID NO: 234845 - DNA, 25 bp, probe
gttttatgtaaggggtttcctgcag

SEQ ID NO: 234846 - DNA, 25 bp, probe
gtttccatgtaagcgggatccgttt

SEQ ID NO: 234847 - DNA, 25 bp, probe
gtttcgttagaaagcggacgctgtt

SEQ ID NO: 234848 - DNA, 25 bp, probe
gttttcctagactgtcgagccatgg

SEQ ID NO: 234849 - DNA, 25 bp, probe
gttttcctaatatgctggtgccctt

SEQ ID NO: 234850 - DNA, 25 bp, probe
gttttcccacatactaggtgctcaa

SEQ ID NO: 234851 - DNA, 25 bp, probe
gttatagcccaaactcaactctcaa

SEQ ID NO: 234852 - DNA, 25 bp, probe
gttatagcttaaatggaactcacca

SEQ ID NO: 234853 - DNA, 25 bp, probe
gttatagcttaaatggaactcacca

SEQ ID NO: 234854 - DNA, 25 bp, probe
gttatactttggagcacagcacagc

SEQ ID NO: 234855 - DNA, 25 bp, probe
gttatgcctaatagcaggcaagagg

SEQ ID NO: 234856 - DNA, 25 bp, probe
gttatgcctgtatttaagaagctga

SEQ ID NO: 234857 - DNA, 25 bp, probe
gtttgtctgatgtggcaaaaggccc

SEQ ID NO: 234858 - DNA, 25 bp, probe
gtttgaagatgatggcaggaaggtc

SEQ ID NO: 234859 - DNA, 25 bp, probe
gtttcagaggaagcaggccgagaga

SEQ ID NO: 234860 - DNA, 25 bp, probe
gtttagagtaattcacttcaggaag

SEQ ID NO: 234861 - DNA, 25 bp, probe
gttataaaattatgcttcaggatta

SEQ ID NO: 234862 - DNA, 25 bp, probe
gtttgaagagaaacctccggtgtga

SEQ ID NO: 234863 - DNA, 25 bp, probe
gtttgaagagaaacctccggtgtga

SEQ ID NO: 234864 - DNA, 25 bp, probe
gtttaacgaagcacttccgactgga

SEQ ID NO: 234865 - DNA, 25 bp, probe
gtttatccaaacatcttccaattta

SEQ ID NO: 234866 - DNA, 25 bp, probe
gtttatttaaccattcccatgttgt

SEQ ID NO: 234867 - DNA, 25 bp, probe
gttttgttaactattcagcacttca

SEQ ID NO: 234868 - DNA, 25 bp, probe
gttttttcacactgatccgtattcc

SEQ ID NO: 234869 - DNA, 25 bp, probe
gttttcatctagtcagagattcagt

SEQ ID NO: 234870 - DNA, 25 bp, probe
gttatacatcttcaggatgattcat

SEQ ID NO: 234871 - DNA, 25 bp, probe
gttatagcttgggagtggtctgaat

SEQ ID NO: 234872 - DNA, 25 bp, probe
gttaggctggagggcatgttcagag

SEQ ID NO: 234873 - DNA, 25 bp, probe
gttagcattggatttgctgttcgac

SEQ ID NO: 234874 - DNA, 25 bp, probe
gtatatagggtccatgtgcaatagg

SEQ ID NO: 234875 - DNA, 25 bp, probe
gtttggtttagcttgcttgcacggg

SEQ ID NO: 234876 - DNA, 25 bp, probe
gttatttattcagatctttgcaggg

SEQ ID NO: 234877 - DNA, 25 bp, probe
gttttggattaaccggctgcagagg

SEQ ID NO: 234878 - DNA, 25 bp, probe
gttttgggtctaccagagtcagaga

SEQ ID NO: 234879 - DNA, 25 bp, probe
gttttgtggttctctgtgtagatgc

SEQ ID NO: 234880 - DNA, 25 bp, probe
gttttgtgttttgtttgaggcttag

SEQ ID NO: 234881 - DNA, 25 bp, probe
gttttgtattttgtgttcctctttg

SEQ ID NO: 234882 - DNA, 25 bp, probe
gttttggttggcatcgttgtttttg

SEQ ID NO: 234883 - DNA, 25 bp, probe
gttatcaggttgtttcagttgtatt

SEQ ID NO: 234884 - DNA, 25 bp, probe
gttatgaggacgtgtctgttatttc

SEQ ID NO: 234885 - DNA, 25 bp, probe
gttagagtaggttgctatggtttta

SEQ ID NO: 234886 - DNA, 25 bp, probe
gttatggaaggcgtgcttggcattc

SEQ ID NO: 234887 - DNA, 25 bp, probe
gttatgatgactgccattatctctt

SEQ ID NO: 234888 - DNA, 25 bp, probe
gtatatgcagcattgacatccttcc

SEQ ID NO: 234889 - DNA, 25 bp, probe
gttatcgctctgcacagctatgagc

SEQ ID NO: 234890 - DNA, 25 bp, probe
gttatctgttgctgcataatgatcc

SEQ ID NO: 234891 - DNA, 25 bp, probe
gttatctgtacacgaacatacgaga

SEQ ID NO: 234892 - DNA, 25 bp, probe
gttatctgtacacgaacatacgaga

SEQ ID NO: 234893 - DNA, 25 bp, probe
gttttgacacacccctaagtacaag

SEQ ID NO: 234894 - DNA, 25 bp, probe
gttttgacacacccctaagtacaag

SEQ ID NO: 234895 - DNA, 25 bp, probe
gtttctgacgcacatgttttgtaca

SEQ ID NO: 234896 - DNA, 25 bp, probe
gttattgatccgaatgaactctaaa

SEQ ID NO: 234897 - DNA, 25 bp, probe
gtttaatcacagataagcttctaga

SEQ ID NO: 234898 - DNA, 25 bp, probe
gtttactccaggaagagatacagca

SEQ ID NO: 234899 - DNA, 25 bp, probe
gtttgaccccagcgagatcaaagtt

SEQ ID NO: 234900 - DNA, 25 bp, probe
gtaacatcccctgtggatcaaagga

SEQ ID NO: 234901 - DNA, 25 bp, probe
gtactcacccttgtggacgaagcaa

SEQ ID NO: 234902 - DNA, 25 bp, probe
gtttacagcctacaggacgtacaca

SEQ ID NO: 234903 - DNA, 25 bp, probe
gtttaggcactagttgggagtaata

SEQ ID NO: 234904 - DNA, 25 bp, probe
gtttaggcactagttgggagtaata

SEQ ID NO: 234905 - DNA, 25 bp, probe
gtttgaaccacattctggggaagac

SEQ ID NO: 234906 - DNA, 25 bp, probe
gtattgacaccccaggggagggagc

SEQ ID NO: 234907 - DNA, 25 bp, probe
gtttgaccccaatgccaggatggtg

SEQ ID NO: 234908 - DNA, 25 bp, probe
gtttggctctttaaccatggatggt

SEQ ID NO: 234909 - DNA, 25 bp, probe
gtttctctctttaatctcacgtagc

SEQ ID NO: 234910 - DNA, 25 bp, probe
gttttgttttggactctctgtggtc

SEQ ID NO: 234911 - DNA, 25 bp, probe
gttttgatgttctgaggtttgcttt

SEQ ID NO: 234912 - DNA, 25 bp, probe
gttatgttactcagaattttgcttt

SEQ ID NO: 234913 - DNA, 25 bp, probe
gttatgttactcagaattttgcttt

SEQ ID NO: 234914 - DNA, 25 bp, probe
gttattcacattatagattttggtt

SEQ ID NO: 234915 - DNA, 25 bp, probe
gtttttcaccttagcattttgtgac

SEQ ID NO: 234916 - DNA, 25 bp, probe
gttttttttcttctgctatgtgact

SEQ ID NO: 234917 - DNA, 25 bp, probe
gttatttcttctactccagtggtga

SEQ ID NO: 234918 - DNA, 25 bp, probe
gtttattgttgcttcgcagggggat

SEQ ID NO: 234919 - DNA, 25 bp, probe
gtttctggcagtttcagaggagggt

SEQ ID NO: 234920 - DNA, 25 bp, probe
gtttctggcagtttcagaggagggt

SEQ ID NO: 234921 - DNA, 25 bp, probe
gttatgttgcagttagctggggggt

SEQ ID NO: 234922 - DNA, 25 bp, probe
gttatctagcaagccgctggggctt

SEQ ID NO: 234923 - DNA, 25 bp, probe
gttttggcaaactgctgctgcgact

SEQ ID NO: 234924 - DNA, 25 bp, probe
gttttccatacagcagtgcctatat

SEQ ID NO: 234925 - DNA, 25 bp, probe
gttttccatacagcagtgcctatat

SEQ ID NO: 234926 - DNA, 25 bp, probe
gtttccttcacacaggttcattgca

SEQ ID NO: 234927 - DNA, 25 bp, probe
gttatccactacaggttttatgaga

SEQ ID NO: 234928 - DNA, 25 bp, probe
gttatccactacaggttttatgaga

SEQ ID NO: 234929 - DNA, 25 bp, probe
gtttccttgccttggttgatttggt

SEQ ID NO: 234930 - DNA, 25 bp, probe
gtttccttgccttggttgatttggt

SEQ ID NO: 234931 - DNA, 25 bp, probe
gtttgtttacagctgttgtcctggt

SEQ ID NO: 234932 - DNA, 25 bp, probe
gtttcttttcagctatggaactatt

SEQ ID NO: 234933 - DNA, 25 bp, probe
gtttttttcaatcatgatattcaga

SEQ ID NO: 234934 - DNA, 25 bp, probe
gtttctttaatatttgaactcaagt

SEQ ID NO: 234935 - DNA, 25 bp, probe
gtatgtcagttcagtcggaacaaag

SEQ ID NO: 234936 - DNA, 25 bp, probe
gtttcatgctttgctccgaacaaat

SEQ ID NO: 234937 - DNA, 25 bp, probe
gtttacttaagaccgatagcaggtg

SEQ ID NO: 234938 - DNA, 25 bp, probe
gtttcctaaggtacaatagtggatt

SEQ ID NO: 234939 - DNA, 25 bp, probe
gtagtcttaggaactcagaagtgaa

SEQ ID NO: 234940 - DNA, 25 bp, probe
gttttcattttgccttgaatggaac

SEQ ID NO: 234941 - DNA, 25 bp, probe
gtttaattcttgccaaccaggaggt

SEQ ID NO: 234942 - DNA, 25 bp, probe
gtttcaattctttacaccaaagtat

SEQ ID NO: 234943 - DNA, 25 bp, probe
gttttgatttttagaccaccacatg

SEQ ID NO: 234944 - DNA, 25 bp, probe
gtttttgtttgatcccacagcaatc

SEQ ID NO: 234945 - DNA, 25 bp, probe
gtagtgttgttttggcttacagggt

SEQ ID NO: 234946 - DNA, 25 bp, probe
gtactttgaatttggcacctcggag

SEQ ID NO: 234947 - DNA, 25 bp, probe
gtttactgaagttgtgcacatgctc

SEQ ID NO: 234948 - DNA, 25 bp, probe
gtttgcaatgaagtagtcgacacct

SEQ ID NO: 234949 - DNA, 25 bp, probe
gtttgagatggctacagggaagcct

SEQ ID NO: 234950 - DNA, 25 bp, probe
gttatcagtgcccacgactatagcc

SEQ ID NO: 234951 - DNA, 25 bp, probe
gttatcagccaccaggctttggctt

SEQ ID NO: 234952 - DNA, 25 bp, probe
gttatcagccaccaggctttggctt

SEQ ID NO: 234953 - DNA, 25 bp, probe
gtttatgctcatacagtgtttggac

SEQ ID NO: 234954 - DNA, 25 bp, probe
gtttatgctcatacagtgtttggac

SEQ ID NO: 234955 - DNA, 25 bp, probe
gtttcgctcatgtgagactcgagcc

SEQ ID NO: 234956 - DNA, 25 bp, probe
gtttcgctcatgtgagactcgagcc

SEQ ID NO: 234957 - DNA, 25 bp, probe
gttatctcacactgaatctttccta

SEQ ID NO: 234958 - DNA, 25 bp, probe
gtttctaatgttattttccttctga

SEQ ID NO: 234959 - DNA, 25 bp, probe
gtttctaaatatctatggtcccctg

SEQ ID NO: 234960 - DNA, 25 bp, probe
gtttccaaaagatttcgtttcgatg

SEQ ID NO: 234961 - DNA, 25 bp, probe
gtttccaaaagatttcgtttcgatg

SEQ ID NO: 234962 - DNA, 25 bp, probe
gttatgccaaagtactgttggttcg

SEQ ID NO: 234963 - DNA, 25 bp, probe
gttatctggaagttcagtcttttaa

SEQ ID NO: 234964 - DNA, 25 bp, probe
gttatcttacgctatttctgttggt

SEQ ID NO: 234965 - DNA, 25 bp, probe
gttattgtactgtcactttgttctt

SEQ ID NO: 234966 - DNA, 25 bp, probe
gttatgtttctttgcttacttcatt

SEQ ID NO: 234967 - DNA, 25 bp, probe
gttatgtttttcatgtatgtatcat

SEQ ID NO: 234968 - DNA, 25 bp, probe
gtatatctgttctcggtactatagg

SEQ ID NO: 234969 - DNA, 25 bp, probe
gttattgatatctcggatacaatag

SEQ ID NO: 234970 - DNA, 25 bp, probe
gttattaaaacttgatcagcacata

SEQ ID NO: 234971 - DNA, 25 bp, probe
gttatacacagctttatgatatcaa

SEQ ID NO: 234972 - DNA, 25 bp, probe
gtttgagtcgtttatgtactactga

SEQ ID NO: 234973 - DNA, 25 bp, probe
gttatgctgtttagtattcgtttga

SEQ ID NO: 234974 - DNA, 25 bp, probe
gttatgctgttactagtgattttag

SEQ ID NO: 234975 - DNA, 25 bp, probe
gttatctgtgtatattgttgcttat

SEQ ID NO: 234976 - DNA, 25 bp, probe
gttatctttttactttgccagtcat

SEQ ID NO: 234977 - DNA, 25 bp, probe
gttatgtctgatgtgaccctgccaa

SEQ ID NO: 234978 - DNA, 25 bp, probe
gttatgtctgatgtgaccctgccaa

SEQ ID NO: 234979 - DNA, 25 bp, probe
gttatgactgatcactccattgaga

SEQ ID NO: 234980 - DNA, 25 bp, probe
gttattccactaaatgatgaatgtg

SEQ ID NO: 234981 - DNA, 25 bp, probe
gttattccactaaatgatgaatgtg

SEQ ID NO: 234982 - DNA, 25 bp, probe
gttatctctgtcttttgaggatggc

SEQ ID NO: 234983 - DNA, 25 bp, probe
gttttctggccgagtggttgctata

SEQ ID NO: 234984 - DNA, 25 bp, probe
gttttctggccgagtggttgctata

SEQ ID NO: 234985 - DNA, 25 bp, probe
gttttgctggatgtttggtctgaaa

SEQ ID NO: 234986 - DNA, 25 bp, probe
gtttgggtgagggcttgggtggaag

SEQ ID NO: 234987 - DNA, 25 bp, probe
gtttgtgtgtataagttgggggaat

SEQ ID NO: 234988 - DNA, 25 bp, probe
gttttcttctaacctggcaaggaga

SEQ ID NO: 234989 - DNA, 25 bp, probe
gtttgtccgtaccctggaatgacaa

SEQ ID NO: 234990 - DNA, 25 bp, probe
gttattccttacctagagaaacaat

SEQ ID NO: 234991 - DNA, 25 bp, probe
gttatctccaaagccacagaagaaa

SEQ ID NO: 234992 - DNA, 25 bp, probe
gttatctccaaagccacagaagaaa

SEQ ID NO: 234993 - DNA, 25 bp, probe
gttattccaacagcagcaaagcgaa

SEQ ID NO: 234994 - DNA, 25 bp, probe
gttattccaggaaatacttgtgaag

SEQ ID NO: 234995 - DNA, 25 bp, probe
gtttcccagttcatggcgtgtgagg

SEQ ID NO: 234996 - DNA, 25 bp, probe
gtttccctcccgtgaatgtgaagtt

SEQ ID NO: 234997 - DNA, 25 bp, probe
gtttccctcccgtgaatgtgaagtt

SEQ ID NO: 234998 - DNA, 25 bp, probe
gtttccctcccgtgaatgtgaagtt

SEQ ID NO: 234999 - DNA, 25 bp, probe
gtatttccccacacgtgtgtaagct

SEQ ID NO: 235000 - DNA, 25 bp, probe
gtttattccaaccacgtggaaagct

SEQ ID NO: 235001 - DNA, 25 bp, probe
gtttattcttgaacagagggcaaag

SEQ ID NO: 235002 - DNA, 25 bp, probe
gttttgtgccattcaggagaggaaa

SEQ ID NO: 235003 - DNA, 25 bp, probe
gtttcaggccatcatggaacaaact

SEQ ID NO: 235004 - DNA, 25 bp, probe
gtttctggccatcaatgccacaaac

SEQ ID NO: 235005 - DNA, 25 bp, probe
gtttctggccatcaatgccacaaac

SEQ ID NO: 235006 - DNA, 25 bp, probe
gtttcggcaagcttttcagaaaatt

SEQ ID NO: 235007 - DNA, 25 bp, probe
gttttcaggagcttttgacactata

SEQ ID NO: 235008 - DNA, 25 bp, probe
gtttcgagggatatctgatcaagat

SEQ ID NO: 235009 - DNA, 25 bp, probe
gtttcgagggatatctgatcaagat

SEQ ID NO: 235010 - DNA, 25 bp, probe
gttttacctgtttagacacagatcc

SEQ ID NO: 235011 - DNA, 25 bp, probe
gtttttcctgttcttaagacgtgat

SEQ ID NO: 235012 - DNA, 25 bp, probe
gttatttccatgactgctttactga

SEQ ID NO: 235013 - DNA, 25 bp, probe
gttattttctgactgctggattctg

SEQ ID NO: 235014 - DNA, 25 bp, probe
gtttttgttgagtctgccattcgta

SEQ ID NO: 235015 - DNA, 25 bp, probe
gtttttgttgagtctgccattcgta

SEQ ID NO: 235016 - DNA, 25 bp, probe
gttttggtggagtccgatgattctc

SEQ ID NO: 235017 - DNA, 25 bp, probe
gttatttgctgactcaccaatgcct

SEQ ID NO: 235018 - DNA, 25 bp, probe
gtttatagctccaaccaatgctgtg

SEQ ID NO: 235019 - DNA, 25 bp, probe
gtttatccctcaagcaaatcctgat

SEQ ID NO: 235020 - DNA, 25 bp, probe
gtttatcgcgtcaagaaattccagt

SEQ ID NO: 235021 - DNA, 25 bp, probe
gtttatggctacccaaattgcctct

SEQ ID NO: 235022 - DNA, 25 bp, probe
gttttgtgtactcctgtgggactcc

SEQ ID NO: 235023 - DNA, 25 bp, probe
gttttggcaattcttgtgtcaaccc

SEQ ID NO: 235024 - DNA, 25 bp, probe
gttttggtatggtttgttaggcagc

SEQ ID NO: 235025 - DNA, 25 bp, probe
gttttgggagtgtttatcgagccaa

SEQ ID NO: 235026 - DNA, 25 bp, probe
gttttgcgagttcattacagagctg

SEQ ID NO: 235027 - DNA, 25 bp, probe
gttttgtgagctgccatgtgaagac

SEQ ID NO: 235028 - DNA, 25 bp, probe
gttatattggcaacctattctcact

SEQ ID NO: 235029 - DNA, 25 bp, probe
gttatttgtgccagcaagtcctcct

SEQ ID NO: 235030 - DNA, 25 bp, probe
gtttactgtatcaggagtgcctcct

SEQ ID NO: 235031 - DNA, 25 bp, probe
gtttatccttctggtggtagtccca

SEQ ID NO: 235032 - DNA, 25 bp, probe
gtttatccttctggtggtagtccca

SEQ ID NO: 235033 - DNA, 25 bp, probe
gttatactcttatttggaaggccct

SEQ ID NO: 235034 - DNA, 25 bp, probe
gtttcccattaagtggacagcgcca

SEQ ID NO: 235035 - DNA, 25 bp, probe
gtttctgcaatggcgaggtacaagc

SEQ ID NO: 235036 - DNA, 25 bp, probe
gttttggcatgagagggacacagtc

SEQ ID NO: 235037 - DNA, 25 bp, probe
gtataattcatagagctagaccagc

SEQ ID NO: 235038 - DNA, 25 bp, probe
gtattctctagcggaccagacgagt

SEQ ID NO: 235039 - DNA, 25 bp, probe
gtttatctgaaggaccccaggtaag

SEQ ID NO: 235040 - DNA, 25 bp, probe
gttttctaactgcctcgtagggtag

SEQ ID NO: 235041 - DNA, 25 bp, probe
gttttctaactgcctcgtagggtag

SEQ ID NO: 235042 - DNA, 25 bp, probe
gtttataacagtgccttaaggtatg

SEQ ID NO: 235043 - DNA, 25 bp, probe
gttttcaagattggtctagtagtta

SEQ ID NO: 235044 - DNA, 25 bp, probe
gttttcaagattggtctagtagtta

SEQ ID NO: 235045 - DNA, 25 bp, probe
gttttgctatgtacagtctgactaa

SEQ ID NO: 235046 - DNA, 25 bp, probe
gttttgctatgtacagtctgactaa

SEQ ID NO: 235047 - DNA, 25 bp, probe
gttttgtatgttagcatcgactctt

SEQ ID NO: 235048 - DNA, 25 bp, probe
gttttggatcttactgcacagcttt

SEQ ID NO: 235049 - DNA, 25 bp, probe
gttttggatcttactgcacagcttt

SEQ ID NO: 235050 - DNA, 25 bp, probe
gttattaatcttcatgaggtctatg

SEQ ID NO: 235051 - DNA, 25 bp, probe
gttttgattctaaaatggatctgaa

SEQ ID NO: 235052 - DNA, 25 bp, probe
gttttattctagcaatgaatttgaa

SEQ ID NO: 235053 - DNA, 25 bp, probe
gtttttctctaatagatagttggac

SEQ ID NO: 235054 - DNA, 25 bp, probe
gttttatttatctacaatagaagtg

SEQ ID NO: 235055 - DNA, 25 bp, probe
gtttgttttacagatctaaagcggg

SEQ ID NO: 235056 - DNA, 25 bp, probe
gttttgcttattccagtctgaaacc

SEQ ID NO: 235057 - DNA, 25 bp, probe
gttttcttgtctggagtctgcacat

SEQ ID NO: 235058 - DNA, 25 bp, probe
gtttttctgctagtgacttgcacag

SEQ ID NO: 235059 - DNA, 25 bp, probe
gttttgtgactgttacattgtgcag

SEQ ID NO: 235060 - DNA, 25 bp, probe
gtttatggcacctgacttgtaaaaa

SEQ ID NO: 235061 - DNA, 25 bp, probe
gtttatggcaactaatctttcaaaa

SEQ ID NO: 235062 - DNA, 25 bp, probe
gtttatggcaactaatctttcaaaa

SEQ ID NO: 235063 - DNA, 25 bp, probe
gtttaatgaacatttccaccaaaca

SEQ ID NO: 235064 - DNA, 25 bp, probe
gtttaacaccaagtcctacaacaca

SEQ ID NO: 235065 - DNA, 25 bp, probe
gtttaagacaaacccttgtgcacct

SEQ ID NO: 235066 - DNA, 25 bp, probe
gttataggaacaattctcttttcct

SEQ ID NO: 235067 - DNA, 25 bp, probe
gttattgtaaattgctctctttacc

SEQ ID NO: 235068 - DNA, 25 bp, probe
gttttgtaaatttctctactgtctc

SEQ ID NO: 235069 - DNA, 25 bp, probe
gtttcgttagaggtgtctacagtcc

SEQ ID NO: 235070 - DNA, 25 bp, probe
gttttgccgagaggtgtccattctc

SEQ ID NO: 235071 - DNA, 25 bp, probe
gttattggtggtgatgttcatcttg

SEQ ID NO: 235072 - DNA, 25 bp, probe
gtttaggtggtgctggtttatgttc

SEQ ID NO: 235073 - DNA, 25 bp, probe
gtttgaggtgcttgcagttgtctta

SEQ ID NO: 235074 - DNA, 25 bp, probe
gtttgaggtgcttgcagttgtctta

SEQ ID NO: 235075 - DNA, 25 bp, probe
gtttacagtcattcgatatatctca

SEQ ID NO: 235076 - DNA, 25 bp, probe
gtttacagtcattcgatatatctca

SEQ ID NO: 235077 - DNA, 25 bp, probe
gtttatgtgtcatcaatgtacatgc

SEQ ID NO: 235078 - DNA, 25 bp, probe
gtttcatgccatatcatattcaacg

SEQ ID NO: 235079 - DNA, 25 bp, probe
gttttggcagcagcacatctaacga

SEQ ID NO: 235080 - DNA, 25 bp, probe
gttttggcagcagcacatctaacga

SEQ ID NO: 235081 - DNA, 25 bp, probe
gttttggcatcagctactgacacgt

SEQ ID NO: 235082 - DNA, 25 bp, probe
gttttatcagcagttactggacagg

SEQ ID NO: 235083 - DNA, 25 bp, probe
gttttctagcatatcactgacctgg

SEQ ID NO: 235084 - DNA, 25 bp, probe
gttttcatacacagcctgggctggg

SEQ ID NO: 235085 - DNA, 25 bp, probe
gttttgctaccagccgaggctgtgc

SEQ ID NO: 235086 - DNA, 25 bp, probe
gttttgctaccagccgaggctgtgc

SEQ ID NO: 235087 - DNA, 25 bp, probe
gttgcttgaagttaataggtttgcc

SEQ ID NO: 235088 - DNA, 25 bp, probe
gttttctagtgttagagaggcttac

SEQ ID NO: 235089 - DNA, 25 bp, probe
gttttctagtgcagtgtactttgcc

SEQ ID NO: 235090 - DNA, 25 bp, probe
gtattttcggactttgacatttgac

SEQ ID NO: 235091 - DNA, 25 bp, probe
gttttcctgtcttttgacatttgac

SEQ ID NO: 235092 - DNA, 25 bp, probe
gtttcccattgtttacatctttgtg

SEQ ID NO: 235093 - DNA, 25 bp, probe
gtttcagaaccatgtacctttatgc

SEQ ID NO: 235094 - DNA, 25 bp, probe
gtttacaagactaatcccattgact

SEQ ID NO: 235095 - DNA, 25 bp, probe
gtttccaaaatataccacatacttt

SEQ ID NO: 235096 - DNA, 25 bp, probe
gtttccaaaatataccacatacttt

SEQ ID NO: 235097 - DNA, 25 bp, probe
gttttaaagatagttgctaatcctt

SEQ ID NO: 235098 - DNA, 25 bp, probe
gtttctaaagagcctgcgaaagcct

SEQ ID NO: 235099 - DNA, 25 bp, probe
gtttccagatagacgctggcaacaa

SEQ ID NO: 235100 - DNA, 25 bp, probe
gtttctagataaacagcgatctcca

SEQ ID NO: 235101 - DNA, 25 bp, probe
gttttgactccaatcagtgatacca

SEQ ID NO: 235102 - DNA, 25 bp, probe
gttttacggcaatatcatcaccaca

SEQ ID NO: 235103 - DNA, 25 bp, probe
gttattactagcaaattctacagaa

SEQ ID NO: 235104 - DNA, 25 bp, probe
gttattaatctggacattcgaggaa

SEQ ID NO: 235105 - DNA, 25 bp, probe
gtttagcaatatgacattcttggtg

SEQ ID NO: 235106 - DNA, 25 bp, probe
gtttatgcaataaagcactatatga

SEQ ID NO: 235107 - DNA, 25 bp, probe
gtttagagacttggccatgaatatc

SEQ ID NO: 235108 - DNA, 25 bp, probe
gttattgagaatatctatgatttac

SEQ ID NO: 235109 - DNA, 25 bp, probe
gtttcatgaccacccattgattgta

SEQ ID NO: 235110 - DNA, 25 bp, probe
gtttcatgaccacccattgattgta

SEQ ID NO: 235111 - DNA, 25 bp, probe
gttttctcattgtctttttgcatca

SEQ ID NO: 235112 - DNA, 25 bp, probe
gttttctcattgtctttttgcatca

SEQ ID NO: 235113 - DNA, 25 bp, probe
gttttctgctactactttgtcatca

SEQ ID NO: 235114 - DNA, 25 bp, probe
gttttctgctactactttgtcatca

SEQ ID NO: 235115 - DNA, 25 bp, probe
gttttattcctgtatgttgtccaat

SEQ ID NO: 235116 - DNA, 25 bp, probe
gttttgattcctgctgtattgacca

SEQ ID NO: 235117 - DNA, 25 bp, probe
gtttcgcattcggcgttatctggaa

SEQ ID NO: 235118 - DNA, 25 bp, probe
gtttccttgggagttgtcattaaag

SEQ ID NO: 235119 - DNA, 25 bp, probe
gtttccttgggagttgtcattaaag

SEQ ID NO: 235120 - DNA, 25 bp, probe
gttttgtcttggatattcttgaaag

SEQ ID NO: 235121 - DNA, 25 bp, probe
gtttctgttgtgtttttgcctaaat

SEQ ID NO: 235122 - DNA, 25 bp, probe
gtttcttattttactatgtctaggt

SEQ ID NO: 235123 - DNA, 25 bp, probe
gtttgtttgttttcttcttcagtga

SEQ ID NO: 235124 - DNA, 25 bp, probe
gtttttctgtgttacttatattaga

SEQ ID NO: 235125 - DNA, 25 bp, probe
gttttctgtttattgcttacctggc

SEQ ID NO: 235126 - DNA, 25 bp, probe
gttttcagttgtttgtggacctctg

SEQ ID NO: 235127 - DNA, 25 bp, probe
gttttcagttgtttgtggacctctg

SEQ ID NO: 235128 - DNA, 25 bp, probe
gtttctcatttgtgaggccagcctc

SEQ ID NO: 235129 - DNA, 25 bp, probe
gtttgcttttaaggatcggctccct

SEQ ID NO: 235130 - DNA, 25 bp, probe
gtttctgctgctgaagaacttctcc

SEQ ID NO: 235131 - DNA, 25 bp, probe
gtttcatcgtaaacatacttctaaa

SEQ ID NO: 235132 - DNA, 25 bp, probe
gtttatctgttaactattatccaaa

SEQ ID NO: 235133 - DNA, 25 bp, probe
gtttatctgttaactattatccaaa

SEQ ID NO: 235134 - DNA, 25 bp, probe
gttttcttgctgttctgattgaccc

SEQ ID NO: 235135 - DNA, 25 bp, probe
gttttcttgctgttctgattgaccc

SEQ ID NO: 235136 - DNA, 25 bp, probe
gttttctgtatgttctattgtgcct

SEQ ID NO: 235137 - DNA, 25 bp, probe
gttttctagagattcaaactgctcc

SEQ ID NO: 235138 - DNA, 25 bp, probe
gtgtgtttaagcttaggaatgccct

SEQ ID NO: 235139 - DNA, 25 bp, probe
gtttttcagctttagggtcctgctt

SEQ ID NO: 235140 - DNA, 25 bp, probe
gtttgtaaatcttaacctcctgcct

SEQ ID NO: 235141 - DNA, 25 bp, probe
gttttgaaatcgtaaagcgagctga

SEQ ID NO: 235142 - DNA, 25 bp, probe
gtttttcgtcgccaaatgttgctga

SEQ ID NO: 235143 - DNA, 25 bp, probe
gttttattactgcaccatgtttact

SEQ ID NO: 235144 - DNA, 25 bp, probe
gtattattatagctacctgttaaag

SEQ ID NO: 235145 - DNA, 25 bp, probe
gtatgaacgaagccgacatgctgtt

SEQ ID NO: 235146 - DNA, 25 bp, probe
tttgaaaaaccgttgctggatctgc

SEQ ID NO: 235147 - DNA, 25 bp, probe
tgttaaattcagacgtactggcttc

SEQ ID NO: 235148 - DNA, 25 bp, probe
gtttcacatctagcaaactccttcc

SEQ ID NO: 235149 - DNA, 25 bp, probe
gtttccctggaatacctttgcatca

SEQ ID NO: 235150 - DNA, 25 bp, probe
gtttcctatccaaaatccttgtcca

SEQ ID NO: 235151 - DNA, 25 bp, probe
gtttcttatcactgtattttcgtaa

SEQ ID NO: 235152 - DNA, 25 bp, probe
gtttttaccaggaatggatgtcgct

SEQ ID NO: 235153 - DNA, 25 bp, probe
gttttgtcactctagaagagttctt

SEQ ID NO: 235154 - DNA, 25 bp, probe
gttttttccttctgagtttgctgtt

SEQ ID NO: 235155 - DNA, 25 bp, probe
gttttgctccatttcttaatttctt

SEQ ID NO: 235156 - DNA, 25 bp, probe
gttttgttgatattggttctattta

SEQ ID NO: 235157 - DNA, 25 bp, probe
gtttcggttatctctgtcttttgag

SEQ ID NO: 235158 - DNA, 25 bp, probe
gtttcggatctgtggttcctttgaa

SEQ ID NO: 235159 - DNA, 25 bp, probe
gttttgacacttgttgtccagttga

SEQ ID NO: 235160 - DNA, 25 bp, probe
gttttacagtgtacattgggaaagc

SEQ ID NO: 235161 - DNA, 25 bp, probe
gttttatagtgtgcaagtggcagac

SEQ ID NO: 235162 - DNA, 25 bp, probe
gttttcatggtgcacatgccggaga

SEQ ID NO: 235163 - DNA, 25 bp, probe
gttttctgtgtgctgcacggtgcag

SEQ ID NO: 235164 - DNA, 25 bp, probe
gttttcgagtgttgcaggctcatgg

SEQ ID NO: 235165 - DNA, 25 bp, probe
gttttctggctgaacacagctgtgg

SEQ ID NO: 235166 - DNA, 25 bp, probe
gttttctagcagatgcctcttgttt

SEQ ID NO: 235167 - DNA, 25 bp, probe
gtttttagaagtccttcccatgata

SEQ ID NO: 235168 - DNA, 25 bp, probe
gtttttagaagtccttcccatgata

SEQ ID NO: 235169 - DNA, 25 bp, probe
gtttttcaaaggtctcattggcaat

SEQ ID NO: 235170 - DNA, 25 bp, probe
gtttttcacaatggtggcatcaagc

SEQ ID NO: 235171 - DNA, 25 bp, probe
gttttctgacaatttggacaactgt

SEQ ID NO: 235172 - DNA, 25 bp, probe
gttttgctactcttgtcagacaatg

SEQ ID NO: 235173 - DNA, 25 bp, probe
gttttcttcatctgtccagttgggg

SEQ ID NO: 235174 - DNA, 25 bp, probe
gttttcttcagtagattattttgag

SEQ ID NO: 235175 - DNA, 25 bp, probe
gttttgtctcgtgttcatgatgtta

SEQ ID NO: 235176 - DNA, 25 bp, probe
gtattttccgtagtgctctgggtgg

SEQ ID NO: 235177 - DNA, 25 bp, probe
gtttttcacagacctacgggatggc

SEQ ID NO: 235178 - DNA, 25 bp, probe
gtttttctacaacacagagtactga

SEQ ID NO: 235179 - DNA, 25 bp, probe
gtttttcttccatacgattgttata

SEQ ID NO: 235180 - DNA, 25 bp, probe
gttttgtgcttccaaatcacttttt

SEQ ID NO: 235181 - DNA, 25 bp, probe
gttttgagtatatcaatcctctttt

SEQ ID NO: 235182 - DNA, 25 bp, probe
gtttttctcttgtcaatctgtcttt

SEQ ID NO: 235183 - DNA, 25 bp, probe
gttttctggtgttatatctttatta

SEQ ID NO: 235184 - DNA, 25 bp, probe
gttttctagtagtattgcttttgag

SEQ ID NO: 235185 - DNA, 25 bp, probe
gttttaatgaaccatgttgttgctg

SEQ ID NO: 235186 - DNA, 25 bp, probe
gtattttcccaatcattttctctag

SEQ ID NO: 235187 - DNA, 25 bp, probe
gtattttcaccaagccttttcataa

SEQ ID NO: 235188 - DNA, 25 bp, probe
gtattttaaatagacacttcgaact

SEQ ID NO: 235189 - DNA, 25 bp, probe
gtattttaaatagacacttcgaact

SEQ ID NO: 235190 - DNA, 25 bp, probe
gtcatctcttaataaacgcttaaaa

SEQ ID NO: 235191 - DNA, 25 bp, probe
gtctttacaaaatagccagttataa

SEQ ID NO: 235192 - DNA, 25 bp, probe
gttttcaattttgcatgctcgatta

SEQ ID NO: 235193 - DNA, 25 bp, probe
gttttgctttgtttgcatgtccact

SEQ ID NO: 235194 - DNA, 25 bp, probe
gttttctttgagagcagtgcacatt

SEQ ID NO: 235195 - DNA, 25 bp, probe
gttttccttgctatcaggatgcata

SEQ ID NO: 235196 - DNA, 25 bp, probe
gttttcctattcatcaggctgtact

SEQ ID NO: 235197 - DNA, 25 bp, probe
gttttcctattcatcaggctgtact

SEQ ID NO: 235198 - DNA, 25 bp, probe
gttttaccatacaataagttgacaa

SEQ ID NO: 235199 - DNA, 25 bp, probe
gtttttcacatatgtaggtattcat

SEQ ID NO: 235200 - DNA, 25 bp, probe
gtttttcacatatgtaggtattcat

SEQ ID NO: 235201 - DNA, 25 bp, probe
gtttttcatgtatgtatcattaaaa

SEQ ID NO: 235202 - DNA, 25 bp, probe
gtttattcattatattgttacaatt

SEQ ID NO: 235203 - DNA, 25 bp, probe
gtttcattttaacgagtgtaactag

SEQ ID NO: 235204 - DNA, 25 bp, probe
gtttttttaagtgtgcagaatctga

SEQ ID NO: 235205 - DNA, 25 bp, probe
gttttccttgatggttgatgcaaac

SEQ ID NO: 235206 - DNA, 25 bp, probe
gtttatttctgcagggctgaaagca

SEQ ID NO: 235207 - DNA, 25 bp, probe
gttttctgatcccagaggtgcaaaa

SEQ ID NO: 235208 - DNA, 25 bp, probe
gttttgctgtcacggaggtggagga

SEQ ID NO: 235209 - DNA, 25 bp, probe
gtttcacatgtacgtgggtgtccgg

SEQ ID NO: 235210 - DNA, 25 bp, probe
gtttacatggtaatggagctggcta

SEQ ID NO: 235211 - DNA, 25 bp, probe
gtttacagctgggtgtgactcagta

SEQ ID NO: 235212 - DNA, 25 bp, probe
gtttacatgtggttgggctcagttg

SEQ ID NO: 235213 - DNA, 25 bp, probe
gttttctgtgacgtttccatggatg

SEQ ID NO: 235214 - DNA, 25 bp, probe
gttttgctggcaatgtttcccaatg

SEQ ID NO: 235215 - DNA, 25 bp, probe
gttttcaggactctggcctcagagg

SEQ ID NO: 235216 - DNA, 25 bp, probe
gtttatactacttggcttctcagat

SEQ ID NO: 235217 - DNA, 25 bp, probe
gtttagcattcactaagccctacat

SEQ ID NO: 235218 - DNA, 25 bp, probe
gtttatatacacttatgccttacat

SEQ ID NO: 235219 - DNA, 25 bp, probe
gtttcttagattctgaccatgactc

SEQ ID NO: 235220 - DNA, 25 bp, probe
gtttttgaatacatgcacacagacc

SEQ ID NO: 235221 - DNA, 25 bp, probe
gtttattcactgtcttatctgcaga

SEQ ID NO: 235222 - DNA, 25 bp, probe
gtttacagcactactctgtgccagc

SEQ ID NO: 235223 - DNA, 25 bp, probe
gtttgaacctcactcatggaactta

SEQ ID NO: 235224 - DNA, 25 bp, probe
gtttcaagccaactgtggataccct

SEQ ID NO: 235225 - DNA, 25 bp, probe
gtattcaacaaccaggagaacgcca

SEQ ID NO: 235226 - DNA, 25 bp, probe
gtttctgaaatattgcaaacccgca

SEQ ID NO: 235227 - DNA, 25 bp, probe
gtttaagagaacgaagaccacagca

SEQ ID NO: 235228 - DNA, 25 bp, probe
gtttgaggaactgaatgaccccaac

SEQ ID NO: 235229 - DNA, 25 bp, probe
tgttctgtctaaaaaccagacaagg

SEQ ID NO: 235230 - DNA, 25 bp, probe
gtttgcggcaaccgcaagaagcccg

SEQ ID NO: 235231 - DNA, 25 bp, probe
gtttctgccagacactgaaagccat

SEQ ID NO: 235232 - DNA, 25 bp, probe
gttttccatagcaaatatgcagggt

SEQ ID NO: 235233 - DNA, 25 bp, probe
gtttatcctgacatattcaagtgat

SEQ ID NO: 235234 - DNA, 25 bp, probe
gtttatcctgacatattcaagtgat

SEQ ID NO: 235235 - DNA, 25 bp, probe
gtttacatctgcatttctacatgtt

SEQ ID NO: 235236 - DNA, 25 bp, probe
gtttcatactgccaataaactctta

SEQ ID NO: 235237 - DNA, 25 bp, probe
gtttctactccaattaagaatatat

SEQ ID NO: 235238 - DNA, 25 bp, probe
gtttgcctaccaagatattacaaat

SEQ ID NO: 235239 - DNA, 25 bp, probe
gtttgccatactttgtctgaaaaat

SEQ ID NO: 235240 - DNA, 25 bp, probe
gtttcacattgactttggaaagttt

SEQ ID NO: 235241 - DNA, 25 bp, probe
gtttgccttgtcaatatcagaatag

SEQ ID NO: 235242 - DNA, 25 bp, probe
gttttcgtatcttccagaataccca

SEQ ID NO: 235243 - DNA, 25 bp, probe
gtttttattcattccaagccaccac

SEQ ID NO: 235244 - DNA, 25 bp, probe
gtttttatggactctcagacactca

SEQ ID NO: 235245 - DNA, 25 bp, probe
gtctgtttaggccaggccaacacaa

SEQ ID NO: 235246 - DNA, 25 bp, probe
gtttgcttagaggcggctccaagag

SEQ ID NO: 235247 - DNA, 25 bp, probe
gtttgcttagaggcggctccaagag

SEQ ID NO: 235248 - DNA, 25 bp, probe
gtttcttgggcaggttgaggagacc

SEQ ID NO: 235249 - DNA, 25 bp, probe
gtttctctcccaatgtttggagacc

SEQ ID NO: 235250 - DNA, 25 bp, probe
gttttctaacagattagctgagata

SEQ ID NO: 235251 - DNA, 25 bp, probe
gttttctaacagattagctgagata

SEQ ID NO: 235252 - DNA, 25 bp, probe
gttttcatgaaagttctcagtattg

SEQ ID NO: 235253 - DNA, 25 bp, probe
gttttctattcagtccatagttttc

SEQ ID NO: 235254 - DNA, 25 bp, probe
gttttctcattgctacagtgtattg

SEQ ID NO: 235255 - DNA, 25 bp, probe
gtttctcatcttcataataccagtg

SEQ ID NO: 235256 - DNA, 25 bp, probe
gtttttttactattccatcatgagg

SEQ ID NO: 235257 - DNA, 25 bp, probe
gtttcttttacttacctgcttgaat

SEQ ID NO: 235258 - DNA, 25 bp, probe
gtatttttaattgtcactgtaaata

SEQ ID NO: 235259 - DNA, 25 bp, probe
gtttttcttttgctattgttaatat

SEQ ID NO: 235260 - DNA, 25 bp, probe
gtttttctcttaagtgcctgtttga

SEQ ID NO: 235261 - DNA, 25 bp, probe
gtttttatttctcgggtgcatttga

SEQ ID NO: 235262 - DNA, 25 bp, probe
gttttatatctgtgtggtgttttgt

SEQ ID NO: 235263 - DNA, 25 bp, probe
gttttaacatctctgatgctgtgtt

SEQ ID NO: 235264 - DNA, 25 bp, probe
gttttcttgattcaggctttctttc

SEQ ID NO: 235265 - DNA, 25 bp, probe
gttttcttgattcaggctttctttc

SEQ ID NO: 235266 - DNA, 25 bp, probe
gtttattgcttacctggctttttat

SEQ ID NO: 235267 - DNA, 25 bp, probe
gtttgacagctatgggtttatttct

SEQ ID NO: 235268 - DNA, 25 bp, probe
gtttagagctcctggacagtaaagt

SEQ ID NO: 235269 - DNA, 25 bp, probe
gtcttagacctgcaaacagctaata

SEQ ID NO: 235270 - DNA, 25 bp, probe
gtttatatcagttcacccgtaatga

SEQ ID NO: 235271 - DNA, 25 bp, probe
gtataaatagaaccgccttaagaga

SEQ ID NO: 235272 - DNA, 25 bp, probe
gtttgtagagaactcccttatacag

SEQ ID NO: 235273 - DNA, 25 bp, probe
gtttgctcaagatcccaagttcatc

SEQ ID NO: 235274 - DNA, 25 bp, probe
gtttccaaattccacaataagcaat

SEQ ID NO: 235275 - DNA, 25 bp, probe
gtttccggtatgcagagctataaga

SEQ ID NO: 235276 - DNA, 25 bp, probe
gtttccggtatgcagagctataaga

SEQ ID NO: 235277 - DNA, 25 bp, probe
gtttgcgggtagttgcacggacaat

SEQ ID NO: 235278 - DNA, 25 bp, probe
gtttgagaagtataactggccagac

SEQ ID NO: 235279 - DNA, 25 bp, probe
gtttaaattaaagtcatggtggaga

SEQ ID NO: 235280 - DNA, 25 bp, probe
gtttaaattaaagtcatggtggaga

SEQ ID NO: 235281 - DNA, 25 bp, probe
gtttacacattttgcacttgggagg

SEQ ID NO: 235282 - DNA, 25 bp, probe
gttttaccctctgcattggagagag

SEQ ID NO: 235283 - DNA, 25 bp, probe
gttttaaccagtacttctaagagca

SEQ ID NO: 235284 - DNA, 25 bp, probe
gtttttacagttattctataatatc

SEQ ID NO: 235285 - DNA, 25 bp, probe
gtttctttcctcagtatttacatga

SEQ ID NO: 235286 - DNA, 25 bp, probe
gtttcctttcactgtagagctactg

SEQ ID NO: 235287 - DNA, 25 bp, probe
gtttagagttgcaatcgtaatgtac

SEQ ID NO: 235288 - DNA, 25 bp, probe
gttttatgtggcaattgggagatac

SEQ ID NO: 235289 - DNA, 25 bp, probe
gtatcgccttggatcggtggtatgc

SEQ ID NO: 235290 - DNA, 25 bp, probe
gtttccggggctagtgatcgtgatc

SEQ ID NO: 235291 - DNA, 25 bp, probe
gtatatcctggtggggctgacggtc

SEQ ID NO: 235292 - DNA, 25 bp, probe
gtatatcctggtggggctgacggtc

SEQ ID NO: 235293 - DNA, 25 bp, probe
gtttcactggttatgcggcggatcc

SEQ ID NO: 235294 - DNA, 25 bp, probe
gtttttgctttttctgaggagtctc

SEQ ID NO: 235295 - DNA, 25 bp, probe
gtttttctgtattttataagtatct

SEQ ID NO: 235296 - DNA, 25 bp, probe
gtttttctgtattttataagtatct

SEQ ID NO: 235297 - DNA, 25 bp, probe
gtttggtagttttgccaaggtcact

SEQ ID NO: 235298 - DNA, 25 bp, probe
gtttttaattgttgccgtattcatc

SEQ ID NO: 235299 - DNA, 25 bp, probe
gtttttgaattttcacattatttgt

SEQ ID NO: 235300 - DNA, 25 bp, probe
gtttttgaagtcctccatattttgg

SEQ ID NO: 235301 - DNA, 25 bp, probe
gtttagggacatgtattcattttgt

SEQ ID NO: 235302 - DNA, 25 bp, probe
gttttaccacatgtaacagattcct

SEQ ID NO: 235303 - DNA, 25 bp, probe
ttttctaaagctctgaacaaaagct

SEQ ID NO: 235304 - DNA, 25 bp, probe
gttttataattgcttccaaacagct

SEQ ID NO: 235305 - DNA, 25 bp, probe
gttttaaaggctagttcatcaacca

SEQ ID NO: 235306 - DNA, 25 bp, probe
gttttaaatggtcttcatgccccac

SEQ ID NO: 235307 - DNA, 25 bp, probe
gttttaggggtgtgcttgtgcccct

SEQ ID NO: 235308 - DNA, 25 bp, probe
gttttaggtgtgcatcgctgtgtag

SEQ ID NO: 235309 - DNA, 25 bp, probe
gtttatgagaaggttcacatgtgtt

SEQ ID NO: 235310 - DNA, 25 bp, probe
gtttaacaatgctttctatgttcat

SEQ ID NO: 235311 - DNA, 25 bp, probe
gtttagatccaggtctccaattcat

SEQ ID NO: 235312 - DNA, 25 bp, probe
gtttgaaccatgggccccatcttta

SEQ ID NO: 235313 - DNA, 25 bp, probe
gtatcgattcgagggcactgggttt

SEQ ID NO: 235314 - DNA, 25 bp, probe
gtatcgattcgagggcactgggttt

SEQ ID NO: 235315 - DNA, 25 bp, probe
gtttgaccaaggcactgggcagctg

SEQ ID NO: 235316 - DNA, 25 bp, probe
gtttgaccaaggcactgggcagctg

SEQ ID NO: 235317 - DNA, 25 bp, probe
gtttcaacattgagagctgggtctg

SEQ ID NO: 235318 - DNA, 25 bp, probe
gtttcaacattgagagctgggtctg

SEQ ID NO: 235319 - DNA, 25 bp, probe
gtttcaacttgaagacaccgtatga

SEQ ID NO: 235320 - DNA, 25 bp, probe
gtttccccaagagcggcggattaag

SEQ ID NO: 235321 - DNA, 25 bp, probe
gtttccctcaaatagtgatggttta

SEQ ID NO: 235322 - DNA, 25 bp, probe
gtttccactcttctcagtgtaggta

SEQ ID NO: 235323 - DNA, 25 bp, probe
gtttgacccttgctgcaagtaccaa

SEQ ID NO: 235324 - DNA, 25 bp, probe
gtttgccatcactggtgttgtcacc

SEQ ID NO: 235325 - DNA, 25 bp, probe
gtttcgccatgctggatgatgaaat

SEQ ID NO: 235326 - DNA, 25 bp, probe
gtttccacgtcagcatgctgaaccg

SEQ ID NO: 235327 - DNA, 25 bp, probe
gtttctagaatcacagctcaagcat

SEQ ID NO: 235328 - DNA, 25 bp, probe
gtttaaaatcatttctgcatcagct

SEQ ID NO: 235329 - DNA, 25 bp, probe
gtttaactcatattctgcacgatct

SEQ ID NO: 235330 - DNA, 25 bp, probe
gtttgagacctattctgaccaaact

SEQ ID NO: 235331 - DNA, 25 bp, probe
gtttagaagttagtatacaatattg

SEQ ID NO: 235332 - DNA, 25 bp, probe
gtttcgcacagagtactatgacaag

SEQ ID NO: 235333 - DNA, 25 bp, probe
gtaggagcctggtcatctctaccag

SEQ ID NO: 235334 - DNA, 25 bp, probe
gtagagaggacgtccacaaccagtg

SEQ ID NO: 235335 - DNA, 25 bp, probe
gtagagaggacgtccacaaccagtg

SEQ ID NO: 235336 - DNA, 25 bp, probe
gtaaggaaggattacggccaggaga

SEQ ID NO: 235337 - DNA, 25 bp, probe
gtaagcgcaacatcgacgcggggga

SEQ ID NO: 235338 - DNA, 25 bp, probe
gtttggtctggactgacagcatgtg

SEQ ID NO: 235339 - DNA, 25 bp, probe
gtttgagtatcggttagtgctggcg

SEQ ID NO: 235340 - DNA, 25 bp, probe
gttttttgcctttatgattggcatg

SEQ ID NO: 235341 - DNA, 25 bp, probe
gtttttcacagttatacactgaagt

SEQ ID NO: 235342 - DNA, 25 bp, probe
gtttttcatagttttcaccactgtg

SEQ ID NO: 235343 - DNA, 25 bp, probe
gtttttcatagttttcaccactgtg

SEQ ID NO: 235344 - DNA, 25 bp, probe
gtttttgatgactctgaaccagttc

SEQ ID NO: 235345 - DNA, 25 bp, probe
gtttcttatgacttgtttccactcc

SEQ ID NO: 235346 - DNA, 25 bp, probe
gtttcaccaaccagttatactcctt

SEQ ID NO: 235347 - DNA, 25 bp, probe
tgtttacccaccagattacaatcct

SEQ ID NO: 235348 - DNA, 25 bp, probe
gtttacccaccagattacaatcctg

SEQ ID NO: 235349 - DNA, 25 bp, probe
gtttctggacccttataaaatcctg

SEQ ID NO: 235350 - DNA, 25 bp, probe
gtttcctactcctaatgagagttcc

SEQ ID NO: 235351 - DNA, 25 bp, probe
gtttcattacttgaatgtagttatc

SEQ ID NO: 235352 - DNA, 25 bp, probe
gtttcttacattgccattttctatt

SEQ ID NO: 235353 - DNA, 25 bp, probe
gttttttatgactatcattttcatt

SEQ ID NO: 235354 - DNA, 25 bp, probe
gttttatttcgtagattttgcattt

SEQ ID NO: 235355 - DNA, 25 bp, probe
gttttttgtctcagcatcagtatat

SEQ ID NO: 235356 - DNA, 25 bp, probe
gtttctttgtccaagtgcatgatgt

SEQ ID NO: 235357 - DNA, 25 bp, probe
gtaccactctgtgcacggagttggc

SEQ ID NO: 235358 - DNA, 25 bp, probe
gtttcacctggaacggcagatgggc

SEQ ID NO: 235359 - DNA, 25 bp, probe
gtttcacctggaacggcagatgggc

SEQ ID NO: 235360 - DNA, 25 bp, probe
gtttgcacctggggaagcagagacc

SEQ ID NO: 235361 - DNA, 25 bp, probe
gtttgcacctggggaagcagagacc

SEQ ID NO: 235362 - DNA, 25 bp, probe
gtttcctgcttgaggctgcaggacc

SEQ ID NO: 235363 - DNA, 25 bp, probe
gtttcctctggaaggctaacccttg

SEQ ID NO: 235364 - DNA, 25 bp, probe
gtttcttatggaacgaataccctgc

SEQ ID NO: 235365 - DNA, 25 bp, probe
gtttttaatactgcattgagccctc

SEQ ID NO: 235366 - DNA, 25 bp, probe
gtttaaatataaaatagacacactc

SEQ ID NO: 235367 - DNA, 25 bp, probe
gtttagaataagcgcattatccaat

SEQ ID NO: 235368 - DNA, 25 bp, probe
gtttagaataagcgcattatccaat

SEQ ID NO: 235369 - DNA, 25 bp, probe
gtttaaaagtgcccttatgcctgca

SEQ ID NO: 235370 - DNA, 25 bp, probe
gtttagaaagtaatctcttccacac

SEQ ID NO: 235371 - DNA, 25 bp, probe
gtttagaaagtaatctcttccacac

SEQ ID NO: 235372 - DNA, 25 bp, probe
gtttgatggacaaatgttttcctga

SEQ ID NO: 235373 - DNA, 25 bp, probe
gtttgccaagcacatgttctttctg

SEQ ID NO: 235374 - DNA, 25 bp, probe
gtttggcacagaaatggttccctga

SEQ ID NO: 235375 - DNA, 25 bp, probe
gtttcacagcagacaatggacctcc

SEQ ID NO: 235376 - DNA, 25 bp, probe
gtgattacaaatattacctccaggg

SEQ ID NO: 235377 - DNA, 25 bp, probe
gtttacaaattgatcctgctgacag

SEQ ID NO: 235378 - DNA, 25 bp, probe
gtttacaaattgatcctgctgacag

SEQ ID NO: 235379 - DNA, 25 bp, probe
gtttatcaatgtcatttggctatag

SEQ ID NO: 235380 - DNA, 25 bp, probe
gtttgatatgggctttctctttggt

SEQ ID NO: 235381 - DNA, 25 bp, probe
gtttgcacagggatttgtcctgggg

SEQ ID NO: 235382 - DNA, 25 bp, probe
gtttccatgaggcttgtgtatcttt

SEQ ID NO: 235383 - DNA, 25 bp, probe
gtttttgcacatatctgattatatt

SEQ ID NO: 235384 - DNA, 25 bp, probe
gtttttgcacatatctgattatatt

SEQ ID NO: 235385 - DNA, 25 bp, probe
gtttcaatgccaagttcttatttta

SEQ ID NO: 235386 - DNA, 25 bp, probe
gtttataccaatacactgctaagta

SEQ ID NO: 235387 - DNA, 25 bp, probe
gtttatacacaactttgcaaattat

SEQ ID NO: 235388 - DNA, 25 bp, probe
gtttacatgcacaagctttgcgttc

SEQ ID NO: 235389 - DNA, 25 bp, probe
gtttgatcatccatttagccttgac

SEQ ID NO: 235390 - DNA, 25 bp, probe
gtttacttgctatatagactgtact

SEQ ID NO: 235391 - DNA, 25 bp, probe
gtttactggctgtactatgttaact

SEQ ID NO: 235392 - DNA, 25 bp, probe
gtttatattctgtacatatggttta

SEQ ID NO: 235393 - DNA, 25 bp, probe
gtttaaattgtattagcaaatgcta

SEQ ID NO: 235394 - DNA, 25 bp, probe
gtttaacttgtcttcagcatattct

SEQ ID NO: 235395 - DNA, 25 bp, probe
gtttttgctcttttgcagaatttgc

SEQ ID NO: 235396 - DNA, 25 bp, probe
gtttttgttatgttctgttattgac

SEQ ID NO: 235397 - DNA, 25 bp, probe
gtttcttggtcgtcctttgagtgac

SEQ ID NO: 235398 - DNA, 25 bp, probe
gtttcttggtcgtcctttgagtgac

SEQ ID NO: 235399 - DNA, 25 bp, probe
gtttttcttcaagctcattggtgac

SEQ ID NO: 235400 - DNA, 25 bp, probe
gtttcttttgcatgactgtggcctg

SEQ ID NO: 235401 - DNA, 25 bp, probe
gtttcttttgcatgactgtggcctg

SEQ ID NO: 235402 - DNA, 25 bp, probe
gtttacttatgcatctctttgcaag

SEQ ID NO: 235403 - DNA, 25 bp, probe
gtttacttatgcatctctttgcaag

SEQ ID NO: 235404 - DNA, 25 bp, probe
gtttatcatcgttgactctttgcaa

SEQ ID NO: 235405 - DNA, 25 bp, probe
gtttatcatcgttgactctttgcaa

SEQ ID NO: 235406 - DNA, 25 bp, probe
gtttattgatgtggagctttctgaa

SEQ ID NO: 235407 - DNA, 25 bp, probe
gtttatgtgattggttgttctaact

SEQ ID NO: 235408 - DNA, 25 bp, probe
gtttttgtatgactgtgttatactt

SEQ ID NO: 235409 - DNA, 25 bp, probe
gtttctatttccgtggctatggctt

SEQ ID NO: 235410 - DNA, 25 bp, probe
gtttctatttccgtggctatggctt

SEQ ID NO: 235411 - DNA, 25 bp, probe
gtttctactactttggctggtatct

SEQ ID NO: 235412 - DNA, 25 bp, probe
gtttctagggtgtagctgggtacat

SEQ ID NO: 235413 - DNA, 25 bp, probe
gtttctatgggttaggggtcttgat

SEQ ID NO: 235414 - DNA, 25 bp, probe
gtttcctggggcacaagtgtctgtg

SEQ ID NO: 235415 - DNA, 25 bp, probe
gtatttgccggtgcctaggattgtg

SEQ ID NO: 235416 - DNA, 25 bp, probe
gtttctgtgcgcttacccagaattc

SEQ ID NO: 235417 - DNA, 25 bp, probe
gtttatgttctatgcacctgactga

SEQ ID NO: 235418 - DNA, 25 bp, probe
gtttgagtttatggacactgacctg

SEQ ID NO: 235419 - DNA, 25 bp, probe
gtttgaggtagttgtgcctgacctt

SEQ ID NO: 235420 - DNA, 25 bp, probe
gtttgaaggatttctgagtgactca

SEQ ID NO: 235421 - DNA, 25 bp, probe
gtttacaatctatcatgagtattat

SEQ ID NO: 235422 - DNA, 25 bp, probe
gtttacagatttcctgatcccgatg

SEQ ID NO: 235423 - DNA, 25 bp, probe
gtttacgcaatagcgacgcgctggc

SEQ ID NO: 235424 - DNA, 25 bp, probe
gtttgaggcttagaacgctggtgca

SEQ ID NO: 235425 - DNA, 25 bp, probe
gtttgaggcttagaacgctggtgca

SEQ ID NO: 235426 - DNA, 25 bp, probe
gtttggtcacggggacccgagcaag

SEQ ID NO: 235427 - DNA, 25 bp, probe
gtttgtgtactggccaagtcgagaa

SEQ ID NO: 235428 - DNA, 25 bp, probe
gtttgtgatacgcctaagtcctatg

SEQ ID NO: 235429 - DNA, 25 bp, probe
gtttgctggggacaactcgatttct

SEQ ID NO: 235430 - DNA, 25 bp, probe
gtttctggggactgcagatttttct

SEQ ID NO: 235431 - DNA, 25 bp, probe
gtttcgccggacagagttggtgttt

SEQ ID NO: 235432 - DNA, 25 bp, probe
gtttcgccggacagagttggtgttt

SEQ ID NO: 235433 - DNA, 25 bp, probe
gtttcgccggacagagttggtgttt

SEQ ID NO: 235434 - DNA, 25 bp, probe
gtattggccggagagcaggtggcgt

SEQ ID NO: 235435 - DNA, 25 bp, probe
gtaaggacaggtggaagtgtggcag

SEQ ID NO: 235436 - DNA, 25 bp, probe
taaagtaagcgtgtacctagcaaaa

SEQ ID NO: 235437 - DNA, 25 bp, probe
taaaggaagtgatccccgaagtcta

SEQ ID NO: 235438 - DNA, 25 bp, probe
tctaaggacctgaaattccaaagtc

SEQ ID NO: 235439 - DNA, 25 bp, probe
tctaaggacctgaaattccaaagtc

SEQ ID NO: 235440 - DNA, 25 bp, probe
ttacacgaacgttttctcgaccatc

SEQ ID NO: 235441 - DNA, 25 bp, probe
gtaaggagactttgttgcttcccct

SEQ ID NO: 235442 - DNA, 25 bp, probe
gtagaaaagcgagtcttggccctgc

SEQ ID NO: 235443 - DNA, 25 bp, probe
gtatggagacagcactgccaggtcc

SEQ ID NO: 235444 - DNA, 25 bp, probe
gtttggcaaaacccactgtgaccat

SEQ ID NO: 235445 - DNA, 25 bp, probe
gtttacaagacagccagggcacttc

SEQ ID NO: 235446 - DNA, 25 bp, probe
gtttacaagacagccagggcacttc

SEQ ID NO: 235447 - DNA, 25 bp, probe
gtttacggacgtgcagctgagctgt

SEQ ID NO: 235448 - DNA, 25 bp, probe
gtttaatggcacctcatttggcttt

SEQ ID NO: 235449 - DNA, 25 bp, probe
gtttaatggcacctcatttggcttt

SEQ ID NO: 235450 - DNA, 25 bp, probe
gtttatcatcccctttgtttgtgat

SEQ ID NO: 235451 - DNA, 25 bp, probe
gtttcatctactgttgctgtgtttg

SEQ ID NO: 235452 - DNA, 25 bp, probe
gtttcacgttcgttgagtgtaagca

SEQ ID NO: 235453 - DNA, 25 bp, probe
gtttcacagctggccacagacttta

SEQ ID NO: 235454 - DNA, 25 bp, probe
gtatgtctcgtggtaggactgtaga

SEQ ID NO: 235455 - DNA, 25 bp, probe
gtttctggttttgggtgtacagtct

SEQ ID NO: 235456 - DNA, 25 bp, probe
gtttctggttgtttggttagggctg

SEQ ID NO: 235457 - DNA, 25 bp, probe
gtttgatggctaagacggtaagggc

SEQ ID NO: 235458 - DNA, 25 bp, probe
gtttgatggctaagacggtaagggc

SEQ ID NO: 235459 - DNA, 25 bp, probe
gtttgtcgtgaaaagcttaatgggc

SEQ ID NO: 235460 - DNA, 25 bp, probe
gtttgcggtgaagattatggaagtg

SEQ ID NO: 235461 - DNA, 25 bp, probe
gtttgcggggatgacgatgccaagt

SEQ ID NO: 235462 - DNA, 25 bp, probe
gtttggagtggtcagctgggcaagt

SEQ ID NO: 235463 - DNA, 25 bp, probe
gtttggagtggtcagctgggcaagt

SEQ ID NO: 235464 - DNA, 25 bp, probe
gtttggatcgcccgagtgggacgat

SEQ ID NO: 235465 - DNA, 25 bp, probe
gtttggtgggggtagagctgatcca

SEQ ID NO: 235466 - DNA, 25 bp, probe
gtttcgtggcgttgaagcgcgtgcg

SEQ ID NO: 235467 - DNA, 25 bp, probe
gtttgcagttgacttcaagacgctg

SEQ ID NO: 235468 - DNA, 25 bp, probe
gtatatgatgtggctttaatacgtg

SEQ ID NO: 235469 - DNA, 25 bp, probe
gtttgtgtccttaggcaaagctgtg

SEQ ID NO: 235470 - DNA, 25 bp, probe
gtttgctgccttactggaatacgca

SEQ ID NO: 235471 - DNA, 25 bp, probe
gtttgcctcttgctggaacagtcaa

SEQ ID NO: 235472 - DNA, 25 bp, probe
gtttgcctttaggcaggaagtcagg

SEQ ID NO: 235473 - DNA, 25 bp, probe
gtttccgctttgtaagacagtagaa

SEQ ID NO: 235474 - DNA, 25 bp, probe
gtttccgctgtcaaacatgtggtta

SEQ ID NO: 235475 - DNA, 25 bp, probe
gtttatcctttgacctgttttcatc

SEQ ID NO: 235476 - DNA, 25 bp, probe
gtttacagctgttgtcctggtatct

SEQ ID NO: 235477 - DNA, 25 bp, probe
gtttgatgtgatcttcctggtcagc

SEQ ID NO: 235478 - DNA, 25 bp, probe
gtttgtaactgtttcatagaagagc

SEQ ID NO: 235479 - DNA, 25 bp, probe
gtttgttgactttacctcacagtgc

SEQ ID NO: 235480 - DNA, 25 bp, probe
gtttcctgagccaaagactccagtt

SEQ ID NO: 235481 - DNA, 25 bp, probe
gtttcttgccgcaagacgtcgcgtt

SEQ ID NO: 235482 - DNA, 25 bp, probe
gtttcttacagcaaggtccctgtgt

SEQ ID NO: 235483 - DNA, 25 bp, probe
gtttgtaacaaaggccgagcgttat

SEQ ID NO: 235484 - DNA, 25 bp, probe
gtttgacaccaatggctggcagctt

SEQ ID NO: 235485 - DNA, 25 bp, probe
gtttcagcacatcatggttggcctt

SEQ ID NO: 235486 - DNA, 25 bp, probe
gtttgtgctctactggttgagcctg

SEQ ID NO: 235487 - DNA, 25 bp, probe
gtttgctgatcgcagatctctatgg

SEQ ID NO: 235488 - DNA, 25 bp, probe
gtttgctgatcgcagatctctatgg

SEQ ID NO: 235489 - DNA, 25 bp, probe
gtttcagatggagctctgcgatgct

SEQ ID NO: 235490 - DNA, 25 bp, probe
gtttcaggcatgaccatgtgctatg

SEQ ID NO: 235491 - DNA, 25 bp, probe
gtttacctccacatgctgatgatga

SEQ ID NO: 235492 - DNA, 25 bp, probe
gtttacctccacatgctgatgatga

SEQ ID NO: 235493 - DNA, 25 bp, probe
gtttacactcatcagagcgatgtct

SEQ ID NO: 235494 - DNA, 25 bp, probe
gtttatggcctggagagcgtgagct

SEQ ID NO: 235495 - DNA, 25 bp, probe
gtttgtggccatggtagtggaccgc

SEQ ID NO: 235496 - DNA, 25 bp, probe
gtttgtggatgtgatgggcggcctg

SEQ ID NO: 235497 - DNA, 25 bp, probe
gtttggcgattgtggagggcctcct

SEQ ID NO: 235498 - DNA, 25 bp, probe
gtttggcgaggtctgcagtggccac

SEQ ID NO: 235499 - DNA, 25 bp, probe
gtttgggctgggatcagagcccaga

SEQ ID NO: 235500 - DNA, 25 bp, probe
gtttgggctgggatcagagcccaga

SEQ ID NO: 235501 - DNA, 25 bp, probe
gtattgcgggcgctctagaggataa

SEQ ID NO: 235502 - DNA, 25 bp, probe
gtttggggcagatctgtagtaaaca

SEQ ID NO: 235503 - DNA, 25 bp, probe
gtttgtggggttttcgtacagcaag

SEQ ID NO: 235504 - DNA, 25 bp, probe
gtttgaggaggtgttcgctgaagag

SEQ ID NO: 235505 - DNA, 25 bp, probe
gtttggctgggccagttcccagaag

SEQ ID NO: 235506 - DNA, 25 bp, probe
gtttgcactggacatattccctacc

SEQ ID NO: 235507 - DNA, 25 bp, probe
gtttgccttgatgctgatcatcacc

SEQ ID NO: 235508 - DNA, 25 bp, probe
gtttgcagcttatgtaatagcagat

SEQ ID NO: 235509 - DNA, 25 bp, probe
gtttgcagcttatgtaatagcagat

SEQ ID NO: 235510 - DNA, 25 bp, probe
gtttcatgctacagctgacgagcgc

SEQ ID NO: 235511 - DNA, 25 bp, probe
gtttcatatacaggtcacttggcca

SEQ ID NO: 235512 - DNA, 25 bp, probe
gtttcattcactgtgcactttgctc

SEQ ID NO: 235513 - DNA, 25 bp, probe
gtttcagaagtgcctcactgttctc

SEQ ID NO: 235514 - DNA, 25 bp, probe
gtttcagacagaggcgacttctgcc

SEQ ID NO: 235515 - DNA, 25 bp, probe
gtttgaagcgcagcaggtgcatcgc

SEQ ID NO: 235516 - DNA, 25 bp, probe
gtttgatgatgcgctcagtgccatg

SEQ ID NO: 235517 - DNA, 25 bp, probe
gtattgattccaggggccatgcagg

SEQ ID NO: 235518 - DNA, 25 bp, probe
gtattgattccaggggccatgcagg

SEQ ID NO: 235519 - DNA, 25 bp, probe
gtatatgttatagaggtgagaaatg

SEQ ID NO: 235520 - DNA, 25 bp, probe
gtatttttcaagttgtggaaattat

SEQ ID NO: 235521 - DNA, 25 bp, probe
gtagtccctcaacttggctaaagaa

SEQ ID NO: 235522 - DNA, 25 bp, probe
gtattgacccttatctgtaaaacac

SEQ ID NO: 235523 - DNA, 25 bp, probe
gtttactcacttaatttgtaagatc

SEQ ID NO: 235524 - DNA, 25 bp, probe
gtttactactttacatcggacacaa

SEQ ID NO: 235525 - DNA, 25 bp, probe
gtttctcttgtaagacatcagtaaa

SEQ ID NO: 235526 - DNA, 25 bp, probe
gtttctgttgttgttcaaatgcaaa

SEQ ID NO: 235527 - DNA, 25 bp, probe
gtttctgttttgctggcaatgtttc

SEQ ID NO: 235528 - DNA, 25 bp, probe
gtttcatagttggggtcatagatgt

SEQ ID NO: 235529 - DNA, 25 bp, probe
gtattatagtcatgcggtcttatgt

SEQ ID NO: 235530 - DNA, 25 bp, probe
gtattatagtcatgcggtcttatgt

SEQ ID NO: 235531 - DNA, 25 bp, probe
gtttcatggaacctatgtttatttc

SEQ ID NO: 235532 - DNA, 25 bp, probe
gtttctggtaacaatgtagctttga

SEQ ID NO: 235533 - DNA, 25 bp, probe
gtttctggtaacaatgtagctttga

SEQ ID NO: 235534 - DNA, 25 bp, probe
gtttgggtgcaagtaggtctgattg

SEQ ID NO: 235535 - DNA, 25 bp, probe
gtttgggtgccaggtggaaggagat

SEQ ID NO: 235536 - DNA, 25 bp, probe
gtttggccattgcttggggggatta

SEQ ID NO: 235537 - DNA, 25 bp, probe
gtttggccagggaggcgcagggaca

SEQ ID NO: 235538 - DNA, 25 bp, probe
gtttctcaggggaagctcctgggga

SEQ ID NO: 235539 - DNA, 25 bp, probe
gtttctcaggggaagctcctgggga

SEQ ID NO: 235540 - DNA, 25 bp, probe
gtttgccagtgaagacttcttgggt

SEQ ID NO: 235541 - DNA, 25 bp, probe
gtttctcagtaacattgccatttgt

SEQ ID NO: 235542 - DNA, 25 bp, probe
gtttctgcagccactattgttagtc

SEQ ID NO: 235543 - DNA, 25 bp, probe
gtttctgcagccactattgttagtc

SEQ ID NO: 235544 - DNA, 25 bp, probe
gtttcaagactttattttggtcaat

SEQ ID NO: 235545 - DNA, 25 bp, probe
gtttcccctataattgtgctgtttt

SEQ ID NO: 235546 - DNA, 25 bp, probe
gtttcccctataattgtgctgtttt

SEQ ID NO: 235547 - DNA, 25 bp, probe
gtttctttctaaattgctgttcctt

SEQ ID NO: 235548 - DNA, 25 bp, probe
gtttctttctaaattgctgttcctt

SEQ ID NO: 235549 - DNA, 25 bp, probe
gtttcattgtcatagatgccatgtt

SEQ ID NO: 235550 - DNA, 25 bp, probe
gtttcattgtcatagatgccatgtt

SEQ ID NO: 235551 - DNA, 25 bp, probe
gtttcatcttccgaggccaataaag

SEQ ID NO: 235552 - DNA, 25 bp, probe
gtttcatcttccgaggccaataaag

SEQ ID NO: 235553 - DNA, 25 bp, probe
gtttgacttcctgtccaaagagctg

SEQ ID NO: 235554 - DNA, 25 bp, probe
gtatttttgccatttgaaaaggttg

SEQ ID NO: 235555 - DNA, 25 bp, probe
gtatgcacttaggaatgctaaaaat

SEQ ID NO: 235556 - DNA, 25 bp, probe
gtatgcagtggtgatgcctaaagga

SEQ ID NO: 235557 - DNA, 25 bp, probe
gtatgaatgaagatcctgcaaagcg

SEQ ID NO: 235558 - DNA, 25 bp, probe
gtatacaaattccctgcactagcag

SEQ ID NO: 235559 - DNA, 25 bp, probe
gtatacaatattggggacaccaact

SEQ ID NO: 235560 - DNA, 25 bp, probe
gtatacttacggcaacaagcagcac

SEQ ID NO: 235561 - DNA, 25 bp, probe
gtttctttctggtgacatacatggc

SEQ ID NO: 235562 - DNA, 25 bp, probe
gtttcttctctggagtaaactggca

SEQ ID NO: 235563 - DNA, 25 bp, probe
gtttgttcatgtcagtgagagcttc

SEQ ID NO: 235564 - DNA, 25 bp, probe
gtttgaacaagtggtggcgctgctc

SEQ ID NO: 235565 - DNA, 25 bp, probe
gtttgaacaagtggtggcgctgctc

SEQ ID NO: 235566 - DNA, 25 bp, probe
gtttgagacggaacaggctctgcgc

SEQ ID NO: 235567 - DNA, 25 bp, probe
gtttgcaacgctagaagagccgagg

SEQ ID NO: 235568 - DNA, 25 bp, probe
gtttgcgactctgacagagctggtg

SEQ ID NO: 235569 - DNA, 25 bp, probe
gtttcttctcatcagagcactggga

SEQ ID NO: 235570 - DNA, 25 bp, probe
gtttctgccattccaacagtgggca

SEQ ID NO: 235571 - DNA, 25 bp, probe
gtttcctcatctgcaaaatgggaac

SEQ ID NO: 235572 - DNA, 25 bp, probe
gtttcgccatcagaacattgtgcgg

SEQ ID NO: 235573 - DNA, 25 bp, probe
gtatacccatcagtgattcattccc

SEQ ID NO: 235574 - DNA, 25 bp, probe
gtagccacggcagtgtttttggtct

SEQ ID NO: 235575 - DNA, 25 bp, probe
gtaacctgacacagattggcggcct

SEQ ID NO: 235576 - DNA, 25 bp, probe
gtaacctgacacagattggcggcct

SEQ ID NO: 235577 - DNA, 25 bp, probe
tgaaactaaacaagcttggtacccg

SEQ ID NO: 235578 - DNA, 25 bp, probe
tgaaactaaacaagcttggtacccg

SEQ ID NO: 235579 - DNA, 25 bp, probe
gtaactgaaataaggtgcttactca

SEQ ID NO: 235580 - DNA, 25 bp, probe
gtaactgaaataaggtgcttactca

SEQ ID NO: 235581 - DNA, 25 bp, probe
gtttctcttcagagttgttgactca

SEQ ID NO: 235582 - DNA, 25 bp, probe
gtttctctaatgttgattgttagcc

SEQ ID NO: 235583 - DNA, 25 bp, probe
gtttcttactgctcatggattacat

SEQ ID NO: 235584 - DNA, 25 bp, probe
gtttgtttctgatgcatctgttcaa

SEQ ID NO: 235585 - DNA, 25 bp, probe
gtttggattgtatatatggtgctaa

SEQ ID NO: 235586 - DNA, 25 bp, probe
gtttaattgacatactcaggataac

SEQ ID NO: 235587 - DNA, 25 bp, probe
gtttaattgcagtttcatctgtgaa

SEQ ID NO: 235588 - DNA, 25 bp, probe
gtttcaaggctgtaattctgagaag

SEQ ID NO: 235589 - DNA, 25 bp, probe
gtttcagtggtcttttctagtttga

SEQ ID NO: 235590 - DNA, 25 bp, probe
gtttcagaggccttattttgtcata

SEQ ID NO: 235591 - DNA, 25 bp, probe
gtttcagaggccttattttgtcata

SEQ ID NO: 235592 - DNA, 25 bp, probe
gtttctggtgcctatttattcattc

SEQ ID NO: 235593 - DNA, 25 bp, probe
gtttctttctatgtgttctcatatc

SEQ ID NO: 235594 - DNA, 25 bp, probe
gtttctttctatgtgttctcatatc

SEQ ID NO: 235595 - DNA, 25 bp, probe
gtttcatttgatatgtgaatgctca

SEQ ID NO: 235596 - DNA, 25 bp, probe
gtttctctatgtagtctggcagtat

SEQ ID NO: 235597 - DNA, 25 bp, probe
gtttcacttgctttgtggagattca

SEQ ID NO: 235598 - DNA, 25 bp, probe
gtttccttctgatttggaatctctc

SEQ ID NO: 235599 - DNA, 25 bp, probe
gtttctcttctatgctgtgacagct

SEQ ID NO: 235600 - DNA, 25 bp, probe
gtttctttgcaatgcattgtatggc

SEQ ID NO: 235601 - DNA, 25 bp, probe
gtttccttgccttgttgatgtggac

SEQ ID NO: 235602 - DNA, 25 bp, probe
gtttccttgccttgttgatgtggac

SEQ ID NO: 235603 - DNA, 25 bp, probe
gtttccttgccttgttgatgtggac

SEQ ID NO: 235604 - DNA, 25 bp, probe
gtttcctgtacttcatagctggaga

SEQ ID NO: 235605 - DNA, 25 bp, probe
gtttcctgtacttcatagctggaga

SEQ ID NO: 235606 - DNA, 25 bp, probe
gtttcaggtcagaacagcctggggt

SEQ ID NO: 235607 - DNA, 25 bp, probe
gtatgaaggttggacagcctggaac

SEQ ID NO: 235608 - DNA, 25 bp, probe
gtatgcaaccttagctgatggggaa

SEQ ID NO: 235609 - DNA, 25 bp, probe
gtatcaccttttttaggatgaaggt

SEQ ID NO: 235610 - DNA, 25 bp, probe
gtatacacgtacatccaaagccggt

SEQ ID NO: 235611 - DNA, 25 bp, probe
tgttgacctaactccaagacctgga

SEQ ID NO: 235612 - DNA, 25 bp, probe
tgttgacccgaggttccaaaggtga

SEQ ID NO: 235613 - DNA, 25 bp, probe
tgttgacccgaggttccaaaggtga

SEQ ID NO: 235614 - DNA, 25 bp, probe
gtttcccatgggattcaagagggac

SEQ ID NO: 235615 - DNA, 25 bp, probe
gtttcccttggaatgtagatggtga

SEQ ID NO: 235616 - DNA, 25 bp, probe
gtatcctttcggcatgtggaggaag

SEQ ID NO: 235617 - DNA, 25 bp, probe
gtctaatccgggcaggtgctggaaa

SEQ ID NO: 235618 - DNA, 25 bp, probe
gtctaatccgggcaggtgctggaaa

SEQ ID NO: 235619 - DNA, 25 bp, probe
gtatactgccagggaaggtaccaaa

SEQ ID NO: 235620 - DNA, 25 bp, probe
gtttgtcaagcttcaagttagccaa

SEQ ID NO: 235621 - DNA, 25 bp, probe
gtttgtcaagcttctggtctaatat

SEQ ID NO: 235622 - DNA, 25 bp, probe
gtttgtcaagcttctggtctaatat

SEQ ID NO: 235623 - DNA, 25 bp, probe
gtttctcaccattatggctcatgac

SEQ ID NO: 235624 - DNA, 25 bp, probe
gtttcatacagcggtgtctcagaca

SEQ ID NO: 235625 - DNA, 25 bp, probe
gtttcatacagcggtgtctcagaca

SEQ ID NO: 235626 - DNA, 25 bp, probe
gtttccaacgcagtgtctcaaatgt

SEQ ID NO: 235627 - DNA, 25 bp, probe
gtttccaacgcagtgtctcaaatgt

SEQ ID NO: 235628 - DNA, 25 bp, probe
gtattccaaagaggactaaagcgcc

SEQ ID NO: 235629 - DNA, 25 bp, probe
gtttcacaaatggcagacttgaaga

SEQ ID NO: 235630 - DNA, 25 bp, probe
gtttctcactaggcatgtcttggga

SEQ ID NO: 235631 - DNA, 25 bp, probe
gtttccaaagccagtctgatgggca

SEQ ID NO: 235632 - DNA, 25 bp, probe
gtttccaaacacagttgtcagatac

SEQ ID NO: 235633 - DNA, 25 bp, probe
gtttccaaacacagttgtcagatac

SEQ ID NO: 235634 - DNA, 25 bp, probe
gtttccaggtagaggattccaccag

SEQ ID NO: 235635 - DNA, 25 bp, probe
gtttctcgaggtaagagattcagcc

SEQ ID NO: 235636 - DNA, 25 bp, probe
gtttgagcagattgttagtattctg

SEQ ID NO: 235637 - DNA, 25 bp, probe
gtttgaaatgctggtagttcctgaa

SEQ ID NO: 235638 - DNA, 25 bp, probe
gtttgtcttcatgaagattcctaac

SEQ ID NO: 235639 - DNA, 25 bp, probe
gtttgaatatatggaccatgatctg

SEQ ID NO: 235640 - DNA, 25 bp, probe
gtttgatgctgttctgggcagccat

SEQ ID NO: 235641 - DNA, 25 bp, probe
gtttgctgtcattctgagcagcgtc

SEQ ID NO: 235642 - DNA, 25 bp, probe
gtttgtgttcaaagcacggcgaggc

SEQ ID NO: 235643 - DNA, 25 bp, probe
gtttgtttggaaggcagggcaggct

SEQ ID NO: 235644 - DNA, 25 bp, probe
gtttgctcagtgcaaggtggagaag

SEQ ID NO: 235645 - DNA, 25 bp, probe
gtttccagctgtgagcttgagagaa

SEQ ID NO: 235646 - DNA, 25 bp, probe
gacattgtcgcaagtcacagaatta

SEQ ID NO: 235647 - DNA, 25 bp, probe
attgtcgcaagtcacagaattattt

SEQ ID NO: 235648 - DNA, 25 bp, probe
gttgctggatctgctgtttgaagcg

SEQ ID NO: 235649 - DNA, 25 bp, probe
ggatctgctgtttgaagcgcagcag

SEQ ID NO: 235650 - DNA, 25 bp, probe
gcgcagcaggtgcatcgccagcatt

SEQ ID NO: 235651 - DNA, 25 bp, probe
gcaggtgcatcgccagcatttcgat

SEQ ID NO: 235652 - DNA, 25 bp, probe
gcatcgccagcatttcgatcctcgt

SEQ ID NO: 235653 - DNA, 25 bp, probe
gcatttcgatcctcgtcaggtgcag

SEQ ID NO: 235654 - DNA, 25 bp, probe
cgatcctcgtcaggtgcaggtcagc

SEQ ID NO: 235655 - DNA, 25 bp, probe
tcgtcaggtgcaggtcagcacgttg

SEQ ID NO: 235656 - DNA, 25 bp, probe
gcaggtcagcacgttgctgtcgatt

SEQ ID NO: 235657 - DNA, 25 bp, probe
cagcacgttgctgtcgattaagacc

SEQ ID NO: 235658 - DNA, 25 bp, probe
gctgtcgattaagaccggagcttgt

SEQ ID NO: 235659 - DNA, 25 bp, probe
agcttgtccggaagattgcaaatac

SEQ ID NO: 235660 - DNA, 25 bp, probe
agattgcaaatactgcccgcaaacg

SEQ ID NO: 235661 - DNA, 25 bp, probe
caaatactgcccgcaaacgtcgcgc

SEQ ID NO: 235662 - DNA, 25 bp, probe
tgaacaggtgctggagtcggcgcgc

SEQ ID NO: 235663 - DNA, 25 bp, probe
ggagtcggcgcgcaaagcgaaagcg

SEQ ID NO: 235664 - DNA, 25 bp, probe
gtttgtcaggcagatctgtgacggg

SEQ ID NO: 235665 - DNA, 25 bp, probe
gtttgcaatggccgtgaggtggtgg

SEQ ID NO: 235666 - DNA, 25 bp, probe
gtttcctgaacagtgaggtgcagtg

SEQ ID NO: 235667 - DNA, 25 bp, probe
gtattctcatgatcccagataagtg

SEQ ID NO: 235668 - DNA, 25 bp, probe
gtataactatttccatgatgcacgc

SEQ ID NO: 235669 - DNA, 25 bp, probe
gtatgaactacttaaagctctggat

SEQ ID NO: 235670 - DNA, 25 bp, probe
gtatacccctatgcagtgtattgcc

SEQ ID NO: 235671 - DNA, 25 bp, probe
gtataatttcctcaggtcattgcca

SEQ ID NO: 235672 - DNA, 25 bp, probe
gtatttactccacagaagcattgac

SEQ ID NO: 235673 - DNA, 25 bp, probe
gtattaacattccaatgaactagca

SEQ ID NO: 235674 - DNA, 25 bp, probe
gtattacaatcggaacacattcagc

SEQ ID NO: 235675 - DNA, 25 bp, probe
gtattcaaagcagatcaccattgcg

SEQ ID NO: 235676 - DNA, 25 bp, probe
gtttcataaagaacctcattgttgt

SEQ ID NO: 235677 - DNA, 25 bp, probe
gtatgttcaaacaccttttagtatt

SEQ ID NO: 235678 - DNA, 25 bp, probe
gtatgttcaaacaccttttagtatt

SEQ ID NO: 235679 - DNA, 25 bp, probe
gtttgtagaagatactagttgagga

SEQ ID NO: 235680 - DNA, 25 bp, probe
gtatattagaaatcctagatctcag

SEQ ID NO: 235681 - DNA, 25 bp, probe
gtattcaaaaaactccaggctggca

SEQ ID NO: 235682 - DNA, 25 bp, probe
gtttgtgcaagacacccagtggaac

SEQ ID NO: 235683 - DNA, 25 bp, probe
gtttgtgcaagacacccagtggaac

SEQ ID NO: 235684 - DNA, 25 bp, probe
gtttgtcaagtcaaccaatgtagaa

SEQ ID NO: 235685 - DNA, 25 bp, probe
gtatcttaagtgtcaaccagttata

SEQ ID NO: 235686 - DNA, 25 bp, probe
gtatctctaagttacatgacctata

SEQ ID NO: 235687 - DNA, 25 bp, probe
gtatctctaagttacatgacctata

SEQ ID NO: 235688 - DNA, 25 bp, probe
gtttctatggattcacttctattta

SEQ ID NO: 235689 - DNA, 25 bp, probe
gtttctaatgtattaattattctca

SEQ ID NO: 235690 - DNA, 25 bp, probe
gtattcttttaaaatttcctctgat

SEQ ID NO: 235691 - DNA, 25 bp, probe
gtatttttctgacttatttaacatt

SEQ ID NO: 235692 - DNA, 25 bp, probe
gtttcttttgatttctctttatact

SEQ ID NO: 235693 - DNA, 25 bp, probe
gtttctcttagttcttctctaacat

SEQ ID NO: 235694 - DNA, 25 bp, probe
gtttctctggagattcctgcaacct

SEQ ID NO: 235695 - DNA, 25 bp, probe
gtttgatggggaaagcctgcatata

SEQ ID NO: 235696 - DNA, 25 bp, probe
gtttgatggggaaagcctgcatata

SEQ ID NO: 235697 - DNA, 25 bp, probe
gtttggcaagaacactgtgcacatg

SEQ ID NO: 235698 - DNA, 25 bp, probe
gtttggccaaaaagtacagagacaa

SEQ ID NO: 235699 - DNA, 25 bp, probe
gtattccaaaaaagtcatagaagat

SEQ ID NO: 235700 - DNA, 25 bp, probe
gtttccacatcctatgtactagaaa

SEQ ID NO: 235701 - DNA, 25 bp, probe
gtttccacatcctatgtactagaaa

SEQ ID NO: 235702 - DNA, 25 bp, probe
gtttccaatgccaattcatctcagc

SEQ ID NO: 235703 - DNA, 25 bp, probe
gtttctgtcatggtttccatctgtc

SEQ ID NO: 235704 - DNA, 25 bp, probe
gtttcttgagatttatccacattga

SEQ ID NO: 235705 - DNA, 25 bp, probe
gtattctgtcagataatgcctaaga

SEQ ID NO: 235706 - DNA, 25 bp, probe
gtattctgggaaattgctcgacgat

SEQ ID NO: 235707 - DNA, 25 bp, probe
gtattctgggaaattgctcgacgat

SEQ ID NO: 235708 - DNA, 25 bp, probe
gtttgggcaaattctgttagcaatg

SEQ ID NO: 235709 - DNA, 25 bp, probe
gtttgggcaaattctgttagcaatg

SEQ ID NO: 235710 - DNA, 25 bp, probe
gtttgcggccaattgtgtctaatcg

SEQ ID NO: 235711 - DNA, 25 bp, probe
gtattgcactgccagatgtggttat

SEQ ID NO: 235712 - DNA, 25 bp, probe
gtattgaatgctcaggtatccaccg

SEQ ID NO: 235713 - DNA, 25 bp, probe
gtttgcatagcttgtctttacatgc

SEQ ID NO: 235714 - DNA, 25 bp, probe
gtttcattgcttcagacatgacatc

SEQ ID NO: 235715 - DNA, 25 bp, probe
gtttcattgcataccggatacagat

SEQ ID NO: 235716 - DNA, 25 bp, probe
gtttgcattccaagccagtatcaat

SEQ ID NO: 235717 - DNA, 25 bp, probe
gtttgatatcaaagtcagtaagcca

SEQ ID NO: 235718 - DNA, 25 bp, probe
gtttgaacagcattgtaaaatggca

SEQ ID NO: 235719 - DNA, 25 bp, probe
gtttggaatgcacttaatagctggt

SEQ ID NO: 235720 - DNA, 25 bp, probe
gtttgatgattccttagaacacgag

SEQ ID NO: 235721 - DNA, 25 bp, probe
gtttgacttctttgagacagagggc

SEQ ID NO: 235722 - DNA, 25 bp, probe
gtttgacttctttgagacagagggc

SEQ ID NO: 235723 - DNA, 25 bp, probe
gtttgacttctttgagacagagggc

SEQ ID NO: 235724 - DNA, 25 bp, probe
gtttgcactctgttgagagataagg

SEQ ID NO: 235725 - DNA, 25 bp, probe
gtttccatcatgtcaaggtcacagg

SEQ ID NO: 235726 - DNA, 25 bp, probe
gtattcctatgccagagcagtgcca

SEQ ID NO: 235727 - DNA, 25 bp, probe
gtattctctcaccagtaggacttaa

SEQ ID NO: 235728 - DNA, 25 bp, probe
gtattcctacaatgtacacttggat

SEQ ID NO: 235729 - DNA, 25 bp, probe
gtagtcactaccagtaccaatgatt

SEQ ID NO: 235730 - DNA, 25 bp, probe
gtatgtgaccccaaattccattatg

SEQ ID NO: 235731 - DNA, 25 bp, probe
gtttgaccagcacaagccagattga

SEQ ID NO: 235732 - DNA, 25 bp, probe
gtttgcacacaaagacagcctgtct

SEQ ID NO: 235733 - DNA, 25 bp, probe
gtttccaaacagcatgctcgagtca

SEQ ID NO: 235734 - DNA, 25 bp, probe
gtttccagaacagtgccttggtcat

SEQ ID NO: 235735 - DNA, 25 bp, probe
gtttctcattactgtctgtggctaa

SEQ ID NO: 235736 - DNA, 25 bp, probe
gtttctcattactgtctgtggctaa

SEQ ID NO: 235737 - DNA, 25 bp, probe
gtttctgaattttgtctacctcaca

SEQ ID NO: 235738 - DNA, 25 bp, probe
gtttgtaaactggatcgactctatc

SEQ ID NO: 235739 - DNA, 25 bp, probe
gtttgtaaactggatcgactctatc

SEQ ID NO: 235740 - DNA, 25 bp, probe
gtttgtacacatggtccgacagcaa

SEQ ID NO: 235741 - DNA, 25 bp, probe
gtttgccagaagctcagggtgcata

SEQ ID NO: 235742 - DNA, 25 bp, probe
gtattggaataactcacagggatat

SEQ ID NO: 235743 - DNA, 25 bp, probe
gtattgagcaactctatcagaagat

SEQ ID NO: 235744 - DNA, 25 bp, probe
gtttgtgcagaatctctatgtatat

SEQ ID NO: 235745 - DNA, 25 bp, probe
gtttgcaggtcgactcattgaatta

SEQ ID NO: 235746 - DNA, 25 bp, probe
gtttgcaggtcgactcattgaatta

SEQ ID NO: 235747 - DNA, 25 bp, probe
gtttgtggatgccttcctgaaatat

SEQ ID NO: 235748 - DNA, 25 bp, probe
gtttgactgtttgcctgagaaatgc

SEQ ID NO: 235749 - DNA, 25 bp, probe
gtttgactgtttgcctgagaaatgc

SEQ ID NO: 235750 - DNA, 25 bp, probe
gtttgacatttaacccagccaaaag

SEQ ID NO: 235751 - DNA, 25 bp, probe
gtttgccttaactcatagacatcaa

SEQ ID NO: 235752 - DNA, 25 bp, probe
gtttctattaattatgcatcagaca

SEQ ID NO: 235753 - DNA, 25 bp, probe
gtagttgattcagccctcagaagaa

SEQ ID NO: 235754 - DNA, 25 bp, probe
gtagtagtgtcctcctagtatatta

SEQ ID NO: 235755 - DNA, 25 bp, probe
gtttgggatactgcttattttatga

SEQ ID NO: 235756 - DNA, 25 bp, probe
gtttggtatactttgctttttctag

SEQ ID NO: 235757 - DNA, 25 bp, probe
gtttggtaggtatttgcttgttgaa

SEQ ID NO: 235758 - DNA, 25 bp, probe
gtttgttcggtttgtttctgatgca

SEQ ID NO: 235759 - DNA, 25 bp, probe
gtttgtatcgccactgtatttgtgt

SEQ ID NO: 235760 - DNA, 25 bp, probe
gtttctacgctgcagagatcatttc

SEQ ID NO: 235761 - DNA, 25 bp, probe
gtttctacgctgcagagatcatttc

SEQ ID NO: 235762 - DNA, 25 bp, probe
gtttctcctctgcagagacatagct

SEQ ID NO: 235763 - DNA, 25 bp, probe
gtttgtcactatcagatttactcta

SEQ ID NO: 235764 - DNA, 25 bp, probe
gtttcctgcttttgagttgacctga

SEQ ID NO: 235765 - DNA, 25 bp, probe
gtattactttactgttacctgaatt

SEQ ID NO: 235766 - DNA, 25 bp, probe
gtgagtttattacagttccttggat

SEQ ID NO: 235767 - DNA, 25 bp, probe
gtgagtttattacagttccttggat

SEQ ID NO: 235768 - DNA, 25 bp, probe
gtagtttatttgtgcttttattgtt

SEQ ID NO: 235769 - DNA, 25 bp, probe
gtattctattttgcgtttcttacct

SEQ ID NO: 235770 - DNA, 25 bp, probe
gtttctgtttctgatgtaccttttt

SEQ ID NO: 235771 - DNA, 25 bp, probe
gtttgtttgcttaatttccttctgt

SEQ ID NO: 235772 - DNA, 25 bp, probe
gtgctttatatgatttttacctctg

SEQ ID NO: 235773 - DNA, 25 bp, probe
gtatgtattaaacttttgacctctg

SEQ ID NO: 235774 - DNA, 25 bp, probe
gtagctttaacactagtgacccctg

SEQ ID NO: 235775 - DNA, 25 bp, probe
gtaccttaaacaagtagccctgtat

SEQ ID NO: 235776 - DNA, 25 bp, probe
gtaccttaaacaagtagccctgtat

SEQ ID NO: 235777 - DNA, 25 bp, probe
ggacggtaaccaactacttcatagt

SEQ ID NO: 235778 - DNA, 25 bp, probe
gtacttgataaccccattttctatg

SEQ ID NO: 235779 - DNA, 25 bp, probe
gtacttgataaccccattttctatg

SEQ ID NO: 235780 - DNA, 25 bp, probe
gtatcttttcagcacttaattttaa

SEQ ID NO: 235781 - DNA, 25 bp, probe
gtatagtttcagaacatgtacatct

SEQ ID NO: 235782 - DNA, 25 bp, probe
gtatagtttaattgcagtttcatct

SEQ ID NO: 235783 - DNA, 25 bp, probe
gtttgtttcatcttgcttttgcatt

SEQ ID NO: 235784 - DNA, 25 bp, probe
gtttccttcatcatgagttctgctg

SEQ ID NO: 235785 - DNA, 25 bp, probe
gtttccacttcttgatatgactgag

SEQ ID NO: 235786 - DNA, 25 bp, probe
gtttccacttcttgatatgactgag

SEQ ID NO: 235787 - DNA, 25 bp, probe
gtttccatattcctatacacgaagt

SEQ ID NO: 235788 - DNA, 25 bp, probe
gtttccagtccactgaaacaccctg

SEQ ID NO: 235789 - DNA, 25 bp, probe
gtattcctaccaggaaagcatccct

SEQ ID NO: 235790 - DNA, 25 bp, probe
gtttctgccacctctaagatgtgcc

SEQ ID NO: 235791 - DNA, 25 bp, probe
gtttctgccacctctaagatgtgcc

SEQ ID NO: 235792 - DNA, 25 bp, probe
gtttctgttccttgtgggatgctgc

SEQ ID NO: 235793 - DNA, 25 bp, probe
gtttctgtgtagtagctcgtgtgct

SEQ ID NO: 235794 - DNA, 25 bp, probe
gtttgcgtttgaggtagttgtgcct

SEQ ID NO: 235795 - DNA, 25 bp, probe
gtttctgacctgtcgtacatttgtt

SEQ ID NO: 235796 - DNA, 25 bp, probe
gtttctgcaactgtgtaatttatag

SEQ ID NO: 235797 - DNA, 25 bp, probe
gtttctgatagtaatggactttatt

SEQ ID NO: 235798 - DNA, 25 bp, probe
gtttctgatagtaatggactttatt

SEQ ID NO: 235799 - DNA, 25 bp, probe
gtttgccattctcataagtgttttg

SEQ ID NO: 235800 - DNA, 25 bp, probe
gtttgactacttacagagcgtcctg

SEQ ID NO: 235801 - DNA, 25 bp, probe
gtttgactacttacagagcgtcctg

SEQ ID NO: 235802 - DNA, 25 bp, probe
gtttgattactgtttactgagcctt

SEQ ID NO: 235803 - DNA, 25 bp, probe
gtttgcttattgatgtcacatggcc

SEQ ID NO: 235804 - DNA, 25 bp, probe
gtttgctctgatcattgctgattcc

SEQ ID NO: 235805 - DNA, 25 bp, probe
gtttgcttcaacagtatatcctact

SEQ ID NO: 235806 - DNA, 25 bp, probe
gtttgcttcctcagtaacatttctg

SEQ ID NO: 235807 - DNA, 25 bp, probe
gtatccttgttgagtaccaagtgct

SEQ ID NO: 235808 - DNA, 25 bp, probe
gtatccttgttgagtaccaagtgct

SEQ ID NO: 235809 - DNA, 25 bp, probe
gtatagactgtatcgtacctgggct

SEQ ID NO: 235810 - DNA, 25 bp, probe
ggataaggtcactgtcctaggtgct

SEQ ID NO: 235811 - DNA, 25 bp, probe
ttaaccgtcagacttccggggcatt

SEQ ID NO: 235812 - DNA, 25 bp, probe
ttaaccgtcagacttccggggcatt

SEQ ID NO: 235813 - DNA, 25 bp, probe
tgtaggggtcaagttccgggagcgg

SEQ ID NO: 235814 - DNA, 25 bp, probe
gtatggggagcagggaacgggacag

SEQ ID NO: 235815 - DNA, 25 bp, probe
gtatggggagcagggaacgggacag

SEQ ID NO: 235816 - DNA, 25 bp, probe
gtattgagtacactggaccctgacc

SEQ ID NO: 235817 - DNA, 25 bp, probe
gtatctattacaaaacacctttctt

SEQ ID NO: 235818 - DNA, 25 bp, probe
gtattttctagacaattctctattt

SEQ ID NO: 235819 - DNA, 25 bp, probe
gtatttaattgacatttcttttttg

SEQ ID NO: 235820 - DNA, 25 bp, probe
gtatactaagggagttcattgattt

SEQ ID NO: 235821 - DNA, 25 bp, probe
gtataatgaatggccgtttgttgat

SEQ ID NO: 235822 - DNA, 25 bp, probe
gtataaaccctctcttttatggctt

SEQ ID NO: 235823 - DNA, 25 bp, probe
gtataaaccccatagctctgtattt

SEQ ID NO: 235824 - DNA, 25 bp, probe
gtataagagccccaatctcacttga

SEQ ID NO: 235825 - DNA, 25 bp, probe
gtataagagccccaatctcacttga

SEQ ID NO: 235826 - DNA, 25 bp, probe
gtttgaaggcatctacaccattaag

SEQ ID NO: 235827 - DNA, 25 bp, probe
gtttgtactgatactagaccattta

SEQ ID NO: 235828 - DNA, 25 bp, probe
gtttgtgaaaaaagagcttgttaat

SEQ ID NO: 235829 - DNA, 25 bp, probe
gtttgtaaaactacacatccctaat

SEQ ID NO: 235830 - DNA, 25 bp, probe
gtataatacttagatcctccttata

SEQ ID NO: 235831 - DNA, 25 bp, probe
gtatataaatgggcttcccacccac

SEQ ID NO: 235832 - DNA, 25 bp, probe
gtatatgaacatactttcctatttc

SEQ ID NO: 235833 - DNA, 25 bp, probe
gtatataagactgttcctgccttcg

SEQ ID NO: 235834 - DNA, 25 bp, probe
gtatataacctctttaatgcctgaa

SEQ ID NO: 235835 - DNA, 25 bp, probe
gtattgtaccccaaaattctgcata

SEQ ID NO: 235836 - DNA, 25 bp, probe
gtttgattcccgagagattagcttt

SEQ ID NO: 235837 - DNA, 25 bp, probe
gtttgttcaccgagatttagccacc

SEQ ID NO: 235838 - DNA, 25 bp, probe
gtttgtttcctgagtcctgaggtta

SEQ ID NO: 235839 - DNA, 25 bp, probe
gtttgtgtaccgtgggctgagaggg

SEQ ID NO: 235840 - DNA, 25 bp, probe
gtttgtgttctccgtggtggaattg

SEQ ID NO: 235841 - DNA, 25 bp, probe
gtatattttcccgttggagacacat

SEQ ID NO: 235842 - DNA, 25 bp, probe
gtatcttttctctgtcagcgaacgt

SEQ ID NO: 235843 - DNA, 25 bp, probe
gtatctttacagggatcgggaggct

SEQ ID NO: 235844 - DNA, 25 bp, probe
gtatctttacagggatcgggaggct

SEQ ID NO: 235845 - DNA, 25 bp, probe
tgtatcctttgaggagacgttaggg

SEQ ID NO: 235846 - DNA, 25 bp, probe
tgctaccaattctggccttactgga

SEQ ID NO: 235847 - DNA, 25 bp, probe
tgctaccaattctggccttactgga

SEQ ID NO: 235848 - DNA, 25 bp, probe
gtcagccaatgtggggggtcctgaa

SEQ ID NO: 235849 - DNA, 25 bp, probe
gtaggctatggggacatgtgcccga

SEQ ID NO: 235850 - DNA, 25 bp, probe
gtttgcataagggaatatcaccaga

SEQ ID NO: 235851 - DNA, 25 bp, probe
gtttgctatagggtttgctctgaca

SEQ ID NO: 235852 - DNA, 25 bp, probe
gtttgctatagggtttgctctgaca

SEQ ID NO: 235853 - DNA, 25 bp, probe
gtatatattatgcagtttctctaag

SEQ ID NO: 235854 - DNA, 25 bp, probe
gtatatattatgcagtttctctaag

SEQ ID NO: 235855 - DNA, 25 bp, probe
gtattattgctatgtcatttccatc

SEQ ID NO: 235856 - DNA, 25 bp, probe
gtattgatagcttacatatggccaa

SEQ ID NO: 235857 - DNA, 25 bp, probe
gtattgatagcttacatatggccaa

SEQ ID NO: 235858 - DNA, 25 bp, probe
gtatattgactttcatgtcgtcatg

SEQ ID NO: 235859 - DNA, 25 bp, probe
gtatatgcccgtatgtgcgtgcatg

SEQ ID NO: 235860 - DNA, 25 bp, probe
gtatatgctcatctgagtgacggat

SEQ ID NO: 235861 - DNA, 25 bp, probe
gtatcatccatctacttggggatcg

SEQ ID NO: 235862 - DNA, 25 bp, probe
gtattccataacatgctgatgagag

SEQ ID NO: 235863 - DNA, 25 bp, probe
gtattccataacatgctgatgagag

SEQ ID NO: 235864 - DNA, 25 bp, probe
gtttggatacacttgatgagagatg

SEQ ID NO: 235865 - DNA, 25 bp, probe
gtttggtcaacatgaagcgtttccc

SEQ ID NO: 235866 - DNA, 25 bp, probe
gtttgaggcatagagcaactgcatt

SEQ ID NO: 235867 - DNA, 25 bp, probe
gtatgtatgggagagcagactgcac

SEQ ID NO: 235868 - DNA, 25 bp, probe
gtattagccaaggtgcagtctgcaa

SEQ ID NO: 235869 - DNA, 25 bp, probe
gtttccccagtgtcattcaatatgc

SEQ ID NO: 235870 - DNA, 25 bp, probe
gtttccccagtgtcattcaatatgc

SEQ ID NO: 235871 - DNA, 25 bp, probe
gtttccaccatttactcaacatttg

SEQ ID NO: 235872 - DNA, 25 bp, probe
gtttccaccatttactcaacatttg

SEQ ID NO: 235873 - DNA, 25 bp, probe
gtttgccttaattctcgaacagttg

SEQ ID NO: 235874 - DNA, 25 bp, probe
gtttggttcttgtgcagatcacata

SEQ ID NO: 235875 - DNA, 25 bp, probe
gtttgtgaatttttgcagaacaata

SEQ ID NO: 235876 - DNA, 25 bp, probe
gtttgtcagtgacgttgagaaggaa

SEQ ID NO: 235877 - DNA, 25 bp, probe
gtttgctattggcttataaaatcaa

SEQ ID NO: 235878 - DNA, 25 bp, probe
gtttgctattggcttataaaatcaa

SEQ ID NO: 235879 - DNA, 25 bp, probe
gtttgtttttgtaatccatatcata

SEQ ID NO: 235880 - DNA, 25 bp, probe
gtttgtttttgttctgagctccata

SEQ ID NO: 235881 - DNA, 25 bp, probe
gtttggttttattctcagagccatt

SEQ ID NO: 235882 - DNA, 25 bp, probe
gtattggtttaattgtcacaagctt

SEQ ID NO: 235883 - DNA, 25 bp, probe
gtttgctgtgttcatgggcaaagta

SEQ ID NO: 235884 - DNA, 25 bp, probe
gtatacgtgtacaaggtgctgaagc

SEQ ID NO: 235885 - DNA, 25 bp, probe
gtattgtattccaagttgataactc

SEQ ID NO: 235886 - DNA, 25 bp, probe
gtatttctatacaagattattagct

SEQ ID NO: 235887 - DNA, 25 bp, probe
gtatttctatacaagattattagct

SEQ ID NO: 235888 - DNA, 25 bp, probe
gtatttcttacgtacactgtacttc

SEQ ID NO: 235889 - DNA, 25 bp, probe
gtatttcctatcaccatacttttcc

SEQ ID NO: 235890 - DNA, 25 bp, probe
gtttgttcttcgctcaatttttttg

SEQ ID NO: 235891 - DNA, 25 bp, probe
gtttgcctttcgtgaacacattctt

SEQ ID NO: 235892 - DNA, 25 bp, probe
gtttccttttcatgataccttcaga

SEQ ID NO: 235893 - DNA, 25 bp, probe
gtttccttttcatgataccttcaga

SEQ ID NO: 235894 - DNA, 25 bp, probe
gtaaacatttcctggacctccaaga

SEQ ID NO: 235895 - DNA, 25 bp, probe
gtacattatcttttgggatccttaa

SEQ ID NO: 235896 - DNA, 25 bp, probe
gtatattttctgtgcagccactgtt

SEQ ID NO: 235897 - DNA, 25 bp, probe
gtatattttctgtgcagccactgtt

SEQ ID NO: 235898 - DNA, 25 bp, probe
gtagtttgtcagagactccagttta

SEQ ID NO: 235899 - DNA, 25 bp, probe
gtagttgaacactgtcatccgtttc

SEQ ID NO: 235900 - DNA, 25 bp, probe
gtattctggaaatgtcttttgttaa

SEQ ID NO: 235901 - DNA, 25 bp, probe
gtattttggaatggattatttgaat

SEQ ID NO: 235902 - DNA, 25 bp, probe
gtattggtgtaagatttttgtcatt

SEQ ID NO: 235903 - DNA, 25 bp, probe
gtattggtgtaagatttttgtcatt

SEQ ID NO: 235904 - DNA, 25 bp, probe
gtttgggccaaatgttggtgatcat

SEQ ID NO: 235905 - DNA, 25 bp, probe
gtattggcccataacaatttggtat

SEQ ID NO: 235906 - DNA, 25 bp, probe
gtatctggacaaggccaccttaata

SEQ ID NO: 235907 - DNA, 25 bp, probe
gtatgctcgacctcgagttatccat

SEQ ID NO: 235908 - DNA, 25 bp, probe
gtttccactgagtctgagtcttcaa

SEQ ID NO: 235909 - DNA, 25 bp, probe
gtttccaagatgtcccattgataat

SEQ ID NO: 235910 - DNA, 25 bp, probe
gtttccaagatgtcccattgataat

SEQ ID NO: 235911 - DNA, 25 bp, probe
gtttgccaaatactacaagatcaat

SEQ ID NO: 235912 - DNA, 25 bp, probe
gtttgccagtcttgcaatcaggtca

SEQ ID NO: 235913 - DNA, 25 bp, probe
gtttgctagatctggtcagcttgct

SEQ ID NO: 235914 - DNA, 25 bp, probe
gtattaacagcagggtcacttctca

SEQ ID NO: 235915 - DNA, 25 bp, probe
gtattacaagggtatcctgtgctat

SEQ ID NO: 235916 - DNA, 25 bp, probe
gtattacaagggtatcctgtgctat

SEQ ID NO: 235917 - DNA, 25 bp, probe
gtattgaaagccgcactgatggata

SEQ ID NO: 235918 - DNA, 25 bp, probe
gtatttgaagcacctgaataggcaa

SEQ ID NO: 235919 - DNA, 25 bp, probe
gtatttgaagccatcaacatcacaa

SEQ ID NO: 235920 - DNA, 25 bp, probe
gtatttaagcaatctcatccagaga

SEQ ID NO: 235921 - DNA, 25 bp, probe
gtatttaaccataatgtactagaca

SEQ ID NO: 235922 - DNA, 25 bp, probe
gtatttttcaaatgtgactcagact

SEQ ID NO: 235923 - DNA, 25 bp, probe
gtatttttccagtcagttgctgata

SEQ ID NO: 235924 - DNA, 25 bp, probe
gtatttttccagtcagttgctgata

SEQ ID NO: 235925 - DNA, 25 bp, probe
gtattttttctctggtggcattcct

SEQ ID NO: 235926 - DNA, 25 bp, probe
gtattttttctctggtggcattcct

SEQ ID NO: 235927 - DNA, 25 bp, probe
gtattctttactttaggtgttgctt

SEQ ID NO: 235928 - DNA, 25 bp, probe
gtatttttgactttgctagtttgtg

SEQ ID NO: 235929 - DNA, 25 bp, probe
gtattaggttctttcaagtttgact

SEQ ID NO: 235930 - DNA, 25 bp, probe
gtttgggtttttgagatttgctggt

SEQ ID NO: 235931 - DNA, 25 bp, probe
gtttggagttgtatacagctgtgtg

SEQ ID NO: 235932 - DNA, 25 bp, probe
gtttggattttgatctcaatgtgta

SEQ ID NO: 235933 - DNA, 25 bp, probe
gtttggattttgatctcaatgtgta

SEQ ID NO: 235934 - DNA, 25 bp, probe
gtttggcatgtcctgttttgatagt

SEQ ID NO: 235935 - DNA, 25 bp, probe
gtttgtggaggtgttctgattgatc

SEQ ID NO: 235936 - DNA, 25 bp, probe
gtttggtgaagacgacatcaatttc

SEQ ID NO: 235937 - DNA, 25 bp, probe
gtttggtgaagacgacatcaatttc

SEQ ID NO: 235938 - DNA, 25 bp, probe
gtttgtccaaactcatcaatgtatc

SEQ ID NO: 235939 - DNA, 25 bp, probe
gtttgtaaatattctacacatgtaa

SEQ ID NO: 235940 - DNA, 25 bp, probe
gtaatgctaaaatgctggcacccta

SEQ ID NO: 235941 - DNA, 25 bp, probe
gtaaccacagaaaccagacctctga

SEQ ID NO: 235942 - DNA, 25 bp, probe
gtacctccagaatggcagatccctc

SEQ ID NO: 235943 - DNA, 25 bp, probe
gtacctcgggaatgaacttccgctt

SEQ ID NO: 235944 - DNA, 25 bp, probe
gtacctaggtgagaagtttccagac

SEQ ID NO: 235945 - DNA, 25 bp, probe
gtatggaggggagaagtttgcgact

SEQ ID NO: 235946 - DNA, 25 bp, probe
gtattgggggtctggtctacatgac

SEQ ID NO: 235947 - DNA, 25 bp, probe
gtttggatggtggaaggtctcattt

SEQ ID NO: 235948 - DNA, 25 bp, probe
gtttggagctatgggatcgtcatgt

SEQ ID NO: 235949 - DNA, 25 bp, probe
gtattgcagacttaggactggcagt

SEQ ID NO: 235950 - DNA, 25 bp, probe
gtattgcagacttaggactggcagt

SEQ ID NO: 235951 - DNA, 25 bp, probe
gtttgaagaatcggactgtgactct

SEQ ID NO: 235952 - DNA, 25 bp, probe
gtttgttgttgtgagcattgatatt

SEQ ID NO: 235953 - DNA, 25 bp, probe
gtttgtccattgtgacagtttgttt

SEQ ID NO: 235954 - DNA, 25 bp, probe
gtttgttatgtgtgtatgtttatgt

SEQ ID NO: 235955 - DNA, 25 bp, probe
gtttgactattgtgatgactctttg

SEQ ID NO: 235956 - DNA, 25 bp, probe
gtttgatgctataaagctcattttt

SEQ ID NO: 235957 - DNA, 25 bp, probe
gtattcttcatgaaatgtgttttgt

SEQ ID NO: 235958 - DNA, 25 bp, probe
gtattctcgctattttatagtcgtg

SEQ ID NO: 235959 - DNA, 25 bp, probe
gtttgtcctgttcttggtcatgtat

SEQ ID NO: 235960 - DNA, 25 bp, probe
gtttgcccgaatcttggctgagtat

SEQ ID NO: 235961 - DNA, 25 bp, probe
gtttgcccagacagtcatgactagc

SEQ ID NO: 235962 - DNA, 25 bp, probe
gtttgcccagacagtcatgactagc

SEQ ID NO: 235963 - DNA, 25 bp, probe
gtttgctgacgactcctcagaaggc

SEQ ID NO: 235964 - DNA, 25 bp, probe
gtttggacatgaacctcatgaagga

SEQ ID NO: 235965 - DNA, 25 bp, probe
gtttgagaagccacgcatggacgac

SEQ ID NO: 235966 - DNA, 25 bp, probe
gtttgagaagccacgcatggacgac

SEQ ID NO: 235967 - DNA, 25 bp, probe
gtttgagtaaatacaaagactgaag

SEQ ID NO: 235968 - DNA, 25 bp, probe
gtgttaggaacgtcaaagaaagcgc

SEQ ID NO: 235969 - DNA, 25 bp, probe
gtagatgaggaacaactagaaccaa

SEQ ID NO: 235970 - DNA, 25 bp, probe
gtaggcaagcgtctgagtagacagc

SEQ ID NO: 235971 - DNA, 25 bp, probe
gtagatgggactgtaggcacctgcc

SEQ ID NO: 235972 - DNA, 25 bp, probe
gtagaagcggtagaggcccgggaag

SEQ ID NO: 235973 - DNA, 25 bp, probe
gtaacacaggaacaactgccggtga

SEQ ID NO: 235974 - DNA, 25 bp, probe
gtatacctgagccagaagacatgga

SEQ ID NO: 235975 - DNA, 25 bp, probe
gtatatcatgcttgccctagagagt

SEQ ID NO: 235976 - DNA, 25 bp, probe
gtatatcatgcttgccctagagagt

SEQ ID NO: 235977 - DNA, 25 bp, probe
gtatacattgtatctaaattgtggg

SEQ ID NO: 235978 - DNA, 25 bp, probe
gtatacattgtatctaaattgtggg

SEQ ID NO: 235979 - DNA, 25 bp, probe
gtatactttttttacataattggag

SEQ ID NO: 235980 - DNA, 25 bp, probe
gtatacatttagttaacacacatat

SEQ ID NO: 235981 - DNA, 25 bp, probe
gtatatttctggtgtccccaatcac

SEQ ID NO: 235982 - DNA, 25 bp, probe
gtatatttctggtgtccccaatcac

SEQ ID NO: 235983 - DNA, 25 bp, probe
gtttgttcggcatacaaataatacc

SEQ ID NO: 235984 - DNA, 25 bp, probe
gtttgtacggaccataaatataact

SEQ ID NO: 235985 - DNA, 25 bp, probe
gtattcttccagtgaaaacaagact

SEQ ID NO: 235986 - DNA, 25 bp, probe
gtatttattcatttactaactttat

SEQ ID NO: 235987 - DNA, 25 bp, probe
gtttgtctgtcttttgttactgttt

SEQ ID NO: 235988 - DNA, 25 bp, probe
gtatactttgctttttctaggtatc

SEQ ID NO: 235989 - DNA, 25 bp, probe
gtatactattattgttctttcactt

SEQ ID NO: 235990 - DNA, 25 bp, probe
gtatactattattgttctttcactt

SEQ ID NO: 235991 - DNA, 25 bp, probe
gtttgtatctatttcatgctttact

SEQ ID NO: 235992 - DNA, 25 bp, probe
gtttgttgtatacttccttatgctt

SEQ ID NO: 235993 - DNA, 25 bp, probe
gtattttatttcaaccatttccatc

SEQ ID NO: 235994 - DNA, 25 bp, probe
gtagttgaattcatcaatcttttat

SEQ ID NO: 235995 - DNA, 25 bp, probe
gtcagctgacagatttcccatttag

SEQ ID NO: 235996 - DNA, 25 bp, probe
gtctgtacacgtgtcctgtagttgc

SEQ ID NO: 235997 - DNA, 25 bp, probe
gtatgtgtccttgtgccgtagtgac

SEQ ID NO: 235998 - DNA, 25 bp, probe
gtatgtgtccttgtgccgtagtgac

SEQ ID NO: 235999 - DNA, 25 bp, probe
gtatgttacattgtccaaagccctt

SEQ ID NO: 236000 - DNA, 25 bp, probe
gtattctgcaatatggctaaaccct

SEQ ID NO: 236001 - DNA, 25 bp, probe
gtatacgagaaaagcccatgacgcc

SEQ ID NO: 236002 - DNA, 25 bp, probe
gtataaaagaaggccgcgcagccac

SEQ ID NO: 236003 - DNA, 25 bp, probe
gtatggtaagaacgttcaggctcac

SEQ ID NO: 236004 - DNA, 25 bp, probe
gtagcaataaaacggatcaacttgg

SEQ ID NO: 236005 - DNA, 25 bp, probe
gtatgtaaaagacaatactcttgtg

SEQ ID NO: 236006 - DNA, 25 bp, probe
gtattaaaactatatacatccatat

SEQ ID NO: 236007 - DNA, 25 bp, probe
gtattaaaactatatacatccatat

SEQ ID NO: 236008 - DNA, 25 bp, probe
gtatttagcagagtattttcaactt

SEQ ID NO: 236009 - DNA, 25 bp, probe
gtattccatggacatgttccacacg

SEQ ID NO: 236010 - DNA, 25 bp, probe
gtatgcccatgaatcacatggctca

SEQ ID NO: 236011 - DNA, 25 bp, probe
gtatcaacagttcctagctcttgac

SEQ ID NO: 236012 - DNA, 25 bp, probe
gtatcaacagaataaccatgtgcat

SEQ ID NO: 236013 - DNA, 25 bp, probe
gtatcaacagaataaccatgtgcat

SEQ ID NO: 236014 - DNA, 25 bp, probe
gtataaataacttgacatcgtaatt

SEQ ID NO: 236015 - DNA, 25 bp, probe
gtatatcaaaatctactggccaaga

SEQ ID NO: 236016 - DNA, 25 bp, probe
gtacaataaagttacacctcaaagt

SEQ ID NO: 236017 - DNA, 25 bp, probe
gtataaagaagttctccatccagag

SEQ ID NO: 236018 - DNA, 25 bp, probe
gtatataaaaggttctgctgacatt

SEQ ID NO: 236019 - DNA, 25 bp, probe
gtattaagacagcacttatattgta

SEQ ID NO: 236020 - DNA, 25 bp, probe
gtattaaactctcctttgatattat

SEQ ID NO: 236021 - DNA, 25 bp, probe
gtattgagatactttttcttttgta

SEQ ID NO: 236022 - DNA, 25 bp, probe
gtttgaaccaactttctagctgctg

SEQ ID NO: 236023 - DNA, 25 bp, probe
gtttgacaccaaggttcttcagcta

SEQ ID NO: 236024 - DNA, 25 bp, probe
gtttgacaccaaggttcttcagcta

SEQ ID NO: 236025 - DNA, 25 bp, probe
gtttgaccactatgtgcacttcagc

SEQ ID NO: 236026 - DNA, 25 bp, probe
gtttgaccactatgtgcacttcagc

SEQ ID NO: 236027 - DNA, 25 bp, probe
gtatatactcctaagtctgctgtaa

SEQ ID NO: 236028 - DNA, 25 bp, probe
gtttgacgctgcgaactctgtggga

SEQ ID NO: 236029 - DNA, 25 bp, probe
gtattactttggaccatgtgggaaa

SEQ ID NO: 236030 - DNA, 25 bp, probe
gtatttactgtgctaatgggctgct

SEQ ID NO: 236031 - DNA, 25 bp, probe
gtattatagttgctgccatagagtt

SEQ ID NO: 236032 - DNA, 25 bp, probe
gtattagatttactgctaatgagga

SEQ ID NO: 236033 - DNA, 25 bp, probe
gtatgccgaataccttaaagtaact

SEQ ID NO: 236034 - DNA, 25 bp, probe
gtaggcaggctcggttactaggaac

SEQ ID NO: 236035 - DNA, 25 bp, probe
gggggtctaggactttagggatctg

SEQ ID NO: 236036 - DNA, 25 bp, probe
gtaggttctcggtacttaggacttg

SEQ ID NO: 236037 - DNA, 25 bp, probe
gtattgtttgagcaacttggatgcc

SEQ ID NO: 236038 - DNA, 25 bp, probe
gtattgcatttgtcatttgttgggc

SEQ ID NO: 236039 - DNA, 25 bp, probe
gtattgcatttgtcatttgttgggc

SEQ ID NO: 236040 - DNA, 25 bp, probe
gtttgtgggtcagtctgtcttccca

SEQ ID NO: 236041 - DNA, 25 bp, probe
gtatttcggaaggtgatcctgccgg

SEQ ID NO: 236042 - DNA, 25 bp, probe
gtatcatggcggaagagttggccct

SEQ ID NO: 236043 - DNA, 25 bp, probe
gtatcttgctgggcaagttcactac

SEQ ID NO: 236044 - DNA, 25 bp, probe
gtatcttgctgggcaagttcactac

SEQ ID NO: 236045 - DNA, 25 bp, probe
gtatcttgctgggcaagttcactac

SEQ ID NO: 236046 - DNA, 25 bp, probe
gtatcacatcatggcgtggggcctg

SEQ ID NO: 236047 - DNA, 25 bp, probe
gtatacatcattctggaactggctc

SEQ ID NO: 236048 - DNA, 25 bp, probe
gtatcatgtctcctttaactagcat

SEQ ID NO: 236049 - DNA, 25 bp, probe
gtatttacgtatgcagactagtctt

SEQ ID NO: 236050 - DNA, 25 bp, probe
gtattttgtgtgaccaactgtgttg

SEQ ID NO: 236051 - DNA, 25 bp, probe
gtatttggaggctcttctgtgattt

SEQ ID NO: 236052 - DNA, 25 bp, probe
gtttgatgggactctcccttatgca

SEQ ID NO: 236053 - DNA, 25 bp, probe
gtttgatgggactctcccttatgca

SEQ ID NO: 236054 - DNA, 25 bp, probe
gtttgtgtgttgtgtccattttgca

SEQ ID NO: 236055 - DNA, 25 bp, probe
gtttgggatgtgttcgccatttctg

SEQ ID NO: 236056 - DNA, 25 bp, probe
gtttggagtctgtccgagtttgcag

SEQ ID NO: 236057 - DNA, 25 bp, probe
gtttggagtctgtccgagtttgcag

SEQ ID NO: 236058 - DNA, 25 bp, probe
gtttgagagatttcctgttaggtgc

SEQ ID NO: 236059 - DNA, 25 bp, probe
gtttggagacattcctgggcacagt

SEQ ID NO: 236060 - DNA, 25 bp, probe
gtttggcaggccggtgtgctgcaac

SEQ ID NO: 236061 - DNA, 25 bp, probe
gtttgagagcatccaggagggcaag

SEQ ID NO: 236062 - DNA, 25 bp, probe
gtttggcgcatgcgcataggcgcac

SEQ ID NO: 236063 - DNA, 25 bp, probe
gtttggcgcatgcgcataggcgcac

SEQ ID NO: 236064 - DNA, 25 bp, probe
gtttgtgatgatcagctcagcggcc

SEQ ID NO: 236065 - DNA, 25 bp, probe
gtatggttcatctgtcacaagcctg

SEQ ID NO: 236066 - DNA, 25 bp, probe
gtatcgctcatagatcagcaaaccg

SEQ ID NO: 236067 - DNA, 25 bp, probe
gtatcatgccaggcaaggtgaaccc

SEQ ID NO: 236068 - DNA, 25 bp, probe
gtatcagctgatccagcacgtgata

SEQ ID NO: 236069 - DNA, 25 bp, probe
gtagcatgattgcgctcatggatac

SEQ ID NO: 236070 - DNA, 25 bp, probe
gtatgcatttcagctcaattcagga

SEQ ID NO: 236071 - DNA, 25 bp, probe
gtatatgtacagggcaagtaggtat

SEQ ID NO: 236072 - DNA, 25 bp, probe
gtatagtacacatgatatttcggaa

SEQ ID NO: 236073 - DNA, 25 bp, probe
gtaagtcacactaagtcttctggag

SEQ ID NO: 236074 - DNA, 25 bp, probe
gtatatatcacacaagtcttaccaa

SEQ ID NO: 236075 - DNA, 25 bp, probe
gtatgcaaacagctagtgatttaca

SEQ ID NO: 236076 - DNA, 25 bp, probe
gtataatcacactgaatgttagacc

SEQ ID NO: 236077 - DNA, 25 bp, probe
gtataggcaccatatttgctgaact

SEQ ID NO: 236078 - DNA, 25 bp, probe
gtatagaatctggtgcttcctgacc

SEQ ID NO: 236079 - DNA, 25 bp, probe
gtatagaatctggtgcttcctgacc

SEQ ID NO: 236080 - DNA, 25 bp, probe
gtaggaagagttctcctgaggctgt

SEQ ID NO: 236081 - DNA, 25 bp, probe
gtatggatccacagtcacgtgggct

SEQ ID NO: 236082 - DNA, 25 bp, probe
gtagcgcttagttatcacaaggcct

SEQ ID NO: 236083 - DNA, 25 bp, probe
gtactggaagatctacaaggctgcc

SEQ ID NO: 236084 - DNA, 25 bp, probe
gtactggaagatctacaaggctgcc

SEQ ID NO: 236085 - DNA, 25 bp, probe
gtatctgggatatttccatatggca

SEQ ID NO: 236086 - DNA, 25 bp, probe
gtatctagctaatatgtatgtgtca

SEQ ID NO: 236087 - DNA, 25 bp, probe
gtatctcccacattagttgtgttct

SEQ ID NO: 236088 - DNA, 25 bp, probe
gtatttcccctcatgtgtgtaagct

SEQ ID NO: 236089 - DNA, 25 bp, probe
gtatttcagctcccaagtttagttc

SEQ ID NO: 236090 - DNA, 25 bp, probe
gtagattcgtagttagtttagccta

SEQ ID NO: 236091 - DNA, 25 bp, probe
gtagtatcagctattactttgacca

SEQ ID NO: 236092 - DNA, 25 bp, probe
gtatgtttgttttacagatctaaag

SEQ ID NO: 236093 - DNA, 25 bp, probe
gtattttggttagctatgcaaagtc

SEQ ID NO: 236094 - DNA, 25 bp, probe
gtttgattcagataccttcaacaac

SEQ ID NO: 236095 - DNA, 25 bp, probe
gtatagttcacttactcttacaccc

SEQ ID NO: 236096 - DNA, 25 bp, probe
gtataggtgatcggatctgtttcat

SEQ ID NO: 236097 - DNA, 25 bp, probe
gtttggtgatctagacagcttcttc

SEQ ID NO: 236098 - DNA, 25 bp, probe
gtttgtggcatcttgccaagggtcc

SEQ ID NO: 236099 - DNA, 25 bp, probe
gtttgtggaccagccagggtcctgt

SEQ ID NO: 236100 - DNA, 25 bp, probe
gtttgggaccatggagcggtaccta

SEQ ID NO: 236101 - DNA, 25 bp, probe
gtttgggaccatgactgagaagcag

SEQ ID NO: 236102 - DNA, 25 bp, probe
gtttggggtgatgatttagagcagc

SEQ ID NO: 236103 - DNA, 25 bp, probe
gtttgtgggcagagcaaaagacatc

SEQ ID NO: 236104 - DNA, 25 bp, probe
gtttggaggcagcgataccagagcc

SEQ ID NO: 236105 - DNA, 25 bp, probe
gtttgggcctgacgtcaccaaggcc

SEQ ID NO: 236106 - DNA, 25 bp, probe
gtttggtggatgacgtgccaaggag

SEQ ID NO: 236107 - DNA, 25 bp, probe
gtttggtgtcaacagctcacaggag

SEQ ID NO: 236108 - DNA, 25 bp, probe
gtttggtgtcaacagctcacaggag

SEQ ID NO: 236109 - DNA, 25 bp, probe
gtcttggcgtaaggacacagcccaa

SEQ ID NO: 236110 - DNA, 25 bp, probe
gtcttcgcagttttaccgacttaga

SEQ ID NO: 236111 - DNA, 25 bp, probe
gtattctctgttttacacgattata

SEQ ID NO: 236112 - DNA, 25 bp, probe
gtataatcgtaattcatccgttgta

SEQ ID NO: 236113 - DNA, 25 bp, probe
gtattttagacattcctcgtcagta

SEQ ID NO: 236114 - DNA, 25 bp, probe
gtattattatctgtctcttgtagta

SEQ ID NO: 236115 - DNA, 25 bp, probe
gtatattgattttatctctttctgt

SEQ ID NO: 236116 - DNA, 25 bp, probe
gtatccagttcttagtccttagtct

SEQ ID NO: 236117 - DNA, 25 bp, probe
gtatcactggattaagcccttttct

SEQ ID NO: 236118 - DNA, 25 bp, probe
gtatcattgtgaacaaggccccctt

SEQ ID NO: 236119 - DNA, 25 bp, probe
gtatcattgtgaacaaggccccctt

SEQ ID NO: 236120 - DNA, 25 bp, probe
gtatcattgtgaacaaggccccctt

SEQ ID NO: 236121 - DNA, 25 bp, probe
gtttggtgatactgtcaagccctat

SEQ ID NO: 236122 - DNA, 25 bp, probe
gtttgtatattctgtatagcctaac

SEQ ID NO: 236123 - DNA, 25 bp, probe
gtattgcttattcattatagctatt

SEQ ID NO: 236124 - DNA, 25 bp, probe
gtttgtgagagcccagtcattgtac

SEQ ID NO: 236125 - DNA, 25 bp, probe
gtttgtgagagcccagtcattgtac

SEQ ID NO: 236126 - DNA, 25 bp, probe
gtattgctggggtcagctcgttact

SEQ ID NO: 236127 - DNA, 25 bp, probe
gtattgctggggtcagctcgttact

SEQ ID NO: 236128 - DNA, 25 bp, probe
gtattcagatcgccacactctgtga

SEQ ID NO: 236129 - DNA, 25 bp, probe
gtattgcataatcaatgctggctga

SEQ ID NO: 236130 - DNA, 25 bp, probe
gtatctatatgactatgcgtggctg

SEQ ID NO: 236131 - DNA, 25 bp, probe
gtatcttgcatccctgtatggaggt

SEQ ID NO: 236132 - DNA, 25 bp, probe
gtatttgtagctattggagaattca

SEQ ID NO: 236133 - DNA, 25 bp, probe
gtagtggacagggttggaaactgca

SEQ ID NO: 236134 - DNA, 25 bp, probe
gtagagcgtcttgttgagaaaactg

SEQ ID NO: 236135 - DNA, 25 bp, probe
gtttggagcttgccttgtaatcaac

SEQ ID NO: 236136 - DNA, 25 bp, probe
gtttggagcttgccttgtaatcaac

SEQ ID NO: 236137 - DNA, 25 bp, probe
gtatattcagtctctgtgtaatcat

SEQ ID NO: 236138 - DNA, 25 bp, probe
gtatatcaaccattcgtgtgcacct

SEQ ID NO: 236139 - DNA, 25 bp, probe
gtattgatgaagttctgcttgacct

SEQ ID NO: 236140 - DNA, 25 bp, probe
gtattgatgtagttagtccacattt

SEQ ID NO: 236141 - DNA, 25 bp, probe
gtatacagtagtgactcccatgcta

SEQ ID NO: 236142 - DNA, 25 bp, probe
gtatccagtagtgatttgtaaactt

SEQ ID NO: 236143 - DNA, 25 bp, probe
gtatcgtctgtgtccattttttaat

SEQ ID NO: 236144 - DNA, 25 bp, probe
gtatcgtctgtgtccattttttaat

SEQ ID NO: 236145 - DNA, 25 bp, probe
gtatgagtcgtgtgtaatttatgta

SEQ ID NO: 236146 - DNA, 25 bp, probe
gtatgggttttggaagtccctagca

SEQ ID NO: 236147 - DNA, 25 bp, probe
gtagagttgtgtgaaacccctagca

SEQ ID NO: 236148 - DNA, 25 bp, probe
gtagagttgtgtgaaacccctagca

SEQ ID NO: 236149 - DNA, 25 bp, probe
gtatgacaaggtgccatactcctcc

SEQ ID NO: 236150 - DNA, 25 bp, probe
gtatgataaatgatggcacctcctg

SEQ ID NO: 236151 - DNA, 25 bp, probe
gtatgataaatgatggcacctcctg

SEQ ID NO: 236152 - DNA, 25 bp, probe
gtattaatgcgttggcccacgtagc

SEQ ID NO: 236153 - DNA, 25 bp, probe
gtattaatgcgttggcccacgtagc

SEQ ID NO: 236154 - DNA, 25 bp, probe
gtattactgaatagtcccagctgga

SEQ ID NO: 236155 - DNA, 25 bp, probe
gtatatcttgaatgtcactcgagag

SEQ ID NO: 236156 - DNA, 25 bp, probe
gtatttctgccatgtacctaatgat

SEQ ID NO: 236157 - DNA, 25 bp, probe
gtattctactcatgttgccatttaa

SEQ ID NO: 236158 - DNA, 25 bp, probe
gtaagcatacaatattactttaaaa

SEQ ID NO: 236159 - DNA, 25 bp, probe
gtataaacacatttttgctattaaa

SEQ ID NO: 236160 - DNA, 25 bp, probe
gtattgaacaattcttttaaaagca

SEQ ID NO: 236161 - DNA, 25 bp, probe
gtattaccaattgttcagataaatg

SEQ ID NO: 236162 - DNA, 25 bp, probe
gtgtattcctttcttaataaagtgt

SEQ ID NO: 236163 - DNA, 25 bp, probe
ggtgcctcctttgtgcaaattaaat

SEQ ID NO: 236164 - DNA, 25 bp, probe
gtatttccttctagtataattaaat

SEQ ID NO: 236165 - DNA, 25 bp, probe
gtattctccgtattctatactgtga

SEQ ID NO: 236166 - DNA, 25 bp, probe
gtattctggacaagcttatccggaa

SEQ ID NO: 236167 - DNA, 25 bp, probe
gtattctagaatagttatgtcttag

SEQ ID NO: 236168 - DNA, 25 bp, probe
gtattctctgacactcttatttggt

SEQ ID NO: 236169 - DNA, 25 bp, probe
gtatttgctgacagcctgcaagctt

SEQ ID NO: 236170 - DNA, 25 bp, probe
gtatgtcttggaaccgggctatgtt

SEQ ID NO: 236171 - DNA, 25 bp, probe
gtagaaggccatacctggaatttta

SEQ ID NO: 236172 - DNA, 25 bp, probe
gtagtcgcagcctttcgggaggctg

SEQ ID NO: 236173 - DNA, 25 bp, probe
gtagttggacggacgggcagggccg

SEQ ID NO: 236174 - DNA, 25 bp, probe
gtagttgaactagggaagagggtct

SEQ ID NO: 236175 - DNA, 25 bp, probe
gtatcttaagtgaggaggcatgggc

SEQ ID NO: 236176 - DNA, 25 bp, probe
gtatttaatgatggtgtacctggtg

SEQ ID NO: 236177 - DNA, 25 bp, probe
gtatcttcagtaatttacttggtct

SEQ ID NO: 236178 - DNA, 25 bp, probe
gtatttcagacatttccctaggtgt

SEQ ID NO: 236179 - DNA, 25 bp, probe
gtattctggaccacttactggtgaa

SEQ ID NO: 236180 - DNA, 25 bp, probe
gtattctggaccacttactggtgaa

SEQ ID NO: 236181 - DNA, 25 bp, probe
gtattctggaccacttactggtgaa

SEQ ID NO: 236182 - DNA, 25 bp, probe
gtattccagcatccttctatatctg

SEQ ID NO: 236183 - DNA, 25 bp, probe
gtatgatacagaactcttttggcat

SEQ ID NO: 236184 - DNA, 25 bp, probe
gtatcaaatacccttctgtggtcct

SEQ ID NO: 236185 - DNA, 25 bp, probe
gtattataaccacttacagttgctt

SEQ ID NO: 236186 - DNA, 25 bp, probe
gtattataaccacttacagttgctt

SEQ ID NO: 236187 - DNA, 25 bp, probe
gtaataaacccttaactggcatagg

SEQ ID NO: 236188 - DNA, 25 bp, probe
gtactgaaaccctgccattgaattg

SEQ ID NO: 236189 - DNA, 25 bp, probe
gtactgaaaccctgccattgaattg

SEQ ID NO: 236190 - DNA, 25 bp, probe
gtaatctaacccttgaaggacctgg

SEQ ID NO: 236191 - DNA, 25 bp, probe
gtaagtacccgtggaatggatttgt

SEQ ID NO: 236192 - DNA, 25 bp, probe
gtaggtaaccgtctatggtgtgttt

SEQ ID NO: 236193 - DNA, 25 bp, probe
gtatggtaacatatttcttgtggct

SEQ ID NO: 236194 - DNA, 25 bp, probe
gtattagacactttgattaagtcct

SEQ ID NO: 236195 - DNA, 25 bp, probe
gtattaatcacgcgatgttgactgc

SEQ ID NO: 236196 - DNA, 25 bp, probe
gtattcttcagccccataaactggg

SEQ ID NO: 236197 - DNA, 25 bp, probe
gtattggctcgtcaaaaacagctgg

SEQ ID NO: 236198 - DNA, 25 bp, probe
gtattcgctgttcaataaacattga

SEQ ID NO: 236199 - DNA, 25 bp, probe
gtattttgctcaggattaagaatta

SEQ ID NO: 236200 - DNA, 25 bp, probe
gtattttgctcaggattaagaatta

SEQ ID NO: 236201 - DNA, 25 bp, probe
gtattcttcacagcaacagagctca

SEQ ID NO: 236202 - DNA, 25 bp, probe
gtatttgtcactaccaaactcagcc

SEQ ID NO: 236203 - DNA, 25 bp, probe
gtttggtcagttcaacatgcatagt

SEQ ID NO: 236204 - DNA, 25 bp, probe
gtttggtcagttcaacatgcatagt

SEQ ID NO: 236205 - DNA, 25 bp, probe
gtatcggtctttcaactataatgag

SEQ ID NO: 236206 - DNA, 25 bp, probe
gtataggattttgcacattgaggga

SEQ ID NO: 236207 - DNA, 25 bp, probe
gtatcgtgagtttgaaaagtctaga

SEQ ID NO: 236208 - DNA, 25 bp, probe
gtatccaggctttgtacagagtgct

SEQ ID NO: 236209 - DNA, 25 bp, probe
gtatgcagcagcctgctcagtcaca

SEQ ID NO: 236210 - DNA, 25 bp, probe
gtatgcagcagcctgctcagtcaca

SEQ ID NO: 236211 - DNA, 25 bp, probe
gtatcagcagctttgtgtaaaaatg

SEQ ID NO: 236212 - DNA, 25 bp, probe
gtatcacctttgccaagtaagagtg

SEQ ID NO: 236213 - DNA, 25 bp, probe
gtattccttttgtgtacagtgtgta

SEQ ID NO: 236214 - DNA, 25 bp, probe
gtattctttttcattgggtgatgtc

SEQ ID NO: 236215 - DNA, 25 bp, probe
gtataatgtatttctttgtggtttt

SEQ ID NO: 236216 - DNA, 25 bp, probe
gtataattaattactggcatggtta

SEQ ID NO: 236217 - DNA, 25 bp, probe
gtatcaatgatggattttggcttac

SEQ ID NO: 236218 - DNA, 25 bp, probe
gtatcctgtgctatgctggacatta

SEQ ID NO: 236219 - DNA, 25 bp, probe
gtatcctgtgctatgctggacatta

SEQ ID NO: 236220 - DNA, 25 bp, probe
gtatactgtattttccagcattaca

SEQ ID NO: 236221 - DNA, 25 bp, probe
gtatcgtactttcctacatttgcat

SEQ ID NO: 236222 - DNA, 25 bp, probe
gtatcgtattttgttgctcaagaat

SEQ ID NO: 236223 - DNA, 25 bp, probe
gtatcgtattttgttgctcaagaat

SEQ ID NO: 236224 - DNA, 25 bp, probe
gtatcaggaggtatagtggaagaat

SEQ ID NO: 236225 - DNA, 25 bp, probe
gtacgactggtcacagtcccaagag

SEQ ID NO: 236226 - DNA, 25 bp, probe
gtaggaaggtctcattcttccaagc

SEQ ID NO: 236227 - DNA, 25 bp, probe
gtaggaaggccttttatttctcagt

SEQ ID NO: 236228 - DNA, 25 bp, probe
gtggggagttccttaatattctcaa

SEQ ID NO: 236229 - DNA, 25 bp, probe
gtagttttttcataaatgctcatca

SEQ ID NO: 236230 - DNA, 25 bp, probe
gtagttttttcataaatgctcatca

SEQ ID NO: 236231 - DNA, 25 bp, probe
gtattttccttgtaaacaccatgag

SEQ ID NO: 236232 - DNA, 25 bp, probe
gtattttccttgtaaacaccatgag

SEQ ID NO: 236233 - DNA, 25 bp, probe
gtaccttggctaacacaaactatgt

SEQ ID NO: 236234 - DNA, 25 bp, probe
gtattttggtcttaagatgacttta

SEQ ID NO: 236235 - DNA, 25 bp, probe
gtatatactttttagagactctttt

SEQ ID NO: 236236 - DNA, 25 bp, probe
gtatattttgtaaatctcccatttt

SEQ ID NO: 236237 - DNA, 25 bp, probe
gtatagttttcacctctgagaatta

SEQ ID NO: 236238 - DNA, 25 bp, probe
gtatagacttactgctggacaatct

SEQ ID NO: 236239 - DNA, 25 bp, probe
gtattcaccgaattctggaacgcat

SEQ ID NO: 236240 - DNA, 25 bp, probe
gtattactggactctgaaggccaca

SEQ ID NO: 236241 - DNA, 25 bp, probe
gtattactgatgaagaccaaggaac

SEQ ID NO: 236242 - DNA, 25 bp, probe
gtattactgatgaagaccaaggaac

SEQ ID NO: 236243 - DNA, 25 bp, probe
gtatctgatccaggtgacacacagc

SEQ ID NO: 236244 - DNA, 25 bp, probe
gtatcagagcctgtacatgaagtga

SEQ ID NO: 236245 - DNA, 25 bp, probe
gtatcactgtctttcctagatggca

SEQ ID NO: 236246 - DNA, 25 bp, probe
gtatgatgttgctgttaagatgatc

SEQ ID NO: 236247 - DNA, 25 bp, probe
gtatgatgttgctgttaagatgatc

SEQ ID NO: 236248 - DNA, 25 bp, probe
gtatatgcttgcttatcttaatttg

SEQ ID NO: 236249 - DNA, 25 bp, probe
gtattctctttccagtcacatttgg

SEQ ID NO: 236250 - DNA, 25 bp, probe
gtatttcctgtgccaggtatacgcg

SEQ ID NO: 236251 - DNA, 25 bp, probe
gtatcttgcctgggggtatgtgcgc

SEQ ID NO: 236252 - DNA, 25 bp, probe
gtattctctccatggagtgaccagc

SEQ ID NO: 236253 - DNA, 25 bp, probe
gtattgcctcagtggaggcgctccg

SEQ ID NO: 236254 - DNA, 25 bp, probe
gtattgcctcagtggaggcgctccg

SEQ ID NO: 236255 - DNA, 25 bp, probe
gtattttgcagattatggggattca

SEQ ID NO: 236256 - DNA, 25 bp, probe
gtattgttcacattatggctttaaa

SEQ ID NO: 236257 - DNA, 25 bp, probe
gtattgttcacattatggctttaaa

SEQ ID NO: 236258 - DNA, 25 bp, probe
gtattgtaatgaatatctgctttaa

SEQ ID NO: 236259 - DNA, 25 bp, probe
gtagtcaaatattatggcagttatt

SEQ ID NO: 236260 - DNA, 25 bp, probe
gtaggaatcgtatttcagcttcaag

SEQ ID NO: 236261 - DNA, 25 bp, probe
gtaggaatcgtatttcagcttcaag

SEQ ID NO: 236262 - DNA, 25 bp, probe
gtagggatgggttaagcctgcaggg

SEQ ID NO: 236263 - DNA, 25 bp, probe
gtagggatgggttaagcctgcaggg

SEQ ID NO: 236264 - DNA, 25 bp, probe
gtagggagggactaagtcagtcgtc

SEQ ID NO: 236265 - DNA, 25 bp, probe
gtagggaggtttattcagatcgctg

SEQ ID NO: 236266 - DNA, 25 bp, probe
gtagtggcactgaccattttatatg

SEQ ID NO: 236267 - DNA, 25 bp, probe
gtagtgcccagaacgtttgtgcgag

SEQ ID NO: 236268 - DNA, 25 bp, probe
gtattgccaagagcttgaagctcga

SEQ ID NO: 236269 - DNA, 25 bp, probe
gtattgccaagagcttgaagctcga

SEQ ID NO: 236270 - DNA, 25 bp, probe
gtattccacgaggcattgagaaaac

SEQ ID NO: 236271 - DNA, 25 bp, probe
gtattgcccgatgcaatgagaaaaa

SEQ ID NO: 236272 - DNA, 25 bp, probe
gtattgcctggtgtcatcgacacaa

SEQ ID NO: 236273 - DNA, 25 bp, probe
ggatcccgattctataaggccaact

SEQ ID NO: 236274 - DNA, 25 bp, probe
gtatatcctttctaaactgcctagt

SEQ ID NO: 236275 - DNA, 25 bp, probe
gtatatcctatacacacatctcctt

SEQ ID NO: 236276 - DNA, 25 bp, probe
gtatgataacaacagcagcaccctg

SEQ ID NO: 236277 - DNA, 25 bp, probe
gtatgataacaacagcagcaccctg

SEQ ID NO: 236278 - DNA, 25 bp, probe
gtatgttaccaaaccacctgtgaat

SEQ ID NO: 236279 - DNA, 25 bp, probe
gtatgttaccaaaccacctgtgaat

SEQ ID NO: 236280 - DNA, 25 bp, probe
gtattatcgggaaccatttgtgcaa

SEQ ID NO: 236281 - DNA, 25 bp, probe
gtatcatcaagctcaacgttctgga

SEQ ID NO: 236282 - DNA, 25 bp, probe
caaagcgaaagcggcaggatcgacg

SEQ ID NO: 236283 - DNA, 25 bp, probe
ggcaggatcgacgcgcttctgtatg

SEQ ID NO: 236284 - DNA, 25 bp, probe
gccggagttttacggcaatatcatc

SEQ ID NO: 236285 - DNA, 25 bp, probe
gttttacggcaatatcatcaccaca

SEQ ID NO: 236286 - DNA, 25 bp, probe
gcaatatcatcaccacacgcactta

SEQ ID NO: 236287 - DNA, 25 bp, probe
atcaccacacgcacttatcaggaac

SEQ ID NO: 236288 - DNA, 25 bp, probe
acgcacttatcaggaacgcctcgat

SEQ ID NO: 236289 - DNA, 25 bp, probe
atacgctggaaaaagtgcgcgatgc

SEQ ID NO: 236290 - DNA, 25 bp, probe
ggaaaaagtgcgcgatgccgggatc

SEQ ID NO: 236291 - DNA, 25 bp, probe
agtgcgcgatgccgggatcaaagtc

SEQ ID NO: 236292 - DNA, 25 bp, probe
gccgggatcaaagtctgttctggcg

SEQ ID NO: 236293 - DNA, 25 bp, probe
aagtctgttctggcggcattgtggg

SEQ ID NO: 236294 - DNA, 25 bp, probe
aagatcgcgccggattattgctgca

SEQ ID NO: 236295 - DNA, 25 bp, probe
gccggattattgctgcaactggcaa

SEQ ID NO: 236296 - DNA, 25 bp, probe
attgctgcaactggcaaacctgccg

SEQ ID NO: 236297 - DNA, 25 bp, probe
cgccggaaagcgtgccaatcaacat

SEQ ID NO: 236298 - DNA, 25 bp, probe
aagcgtgccaatcaacatgctggtg

SEQ ID NO: 236299 - DNA, 25 bp, probe
caatcaacatgctggtgaaggtgaa

SEQ ID NO: 236300 - DNA, 25 bp, probe
gtatattgtgtgtctcatctgtgaa

SEQ ID NO: 236301 - DNA, 25 bp, probe
gtatatgtctcagcatccaggaggg

SEQ ID NO: 236302 - DNA, 25 bp, probe
gtatcttctgcagcacaaggaggct

SEQ ID NO: 236303 - DNA, 25 bp, probe
gtatttcatgaatatcagatggtct

SEQ ID NO: 236304 - DNA, 25 bp, probe
gtatttcatgaatatcagatggtct

SEQ ID NO: 236305 - DNA, 25 bp, probe
gtatgtacatactggcaacgatgtc

SEQ ID NO: 236306 - DNA, 25 bp, probe
gtatatacatatcacctcctattct

SEQ ID NO: 236307 - DNA, 25 bp, probe
gtataacatcatggtcctggtttct

SEQ ID NO: 236308 - DNA, 25 bp, probe
gtataatatgatgtttggatgtatg

SEQ ID NO: 236309 - DNA, 25 bp, probe
gtagatgatatgtttcgtgggttga

SEQ ID NO: 236310 - DNA, 25 bp, probe
gtagatgatatgtttcgtgggttga

SEQ ID NO: 236311 - DNA, 25 bp, probe
gtaggagagacctgtgcaaatctga

SEQ ID NO: 236312 - DNA, 25 bp, probe
gtagtggcagcagtaaggacaatgt

SEQ ID NO: 236313 - DNA, 25 bp, probe
gtagttctagtgtggtcgttataaa

SEQ ID NO: 236314 - DNA, 25 bp, probe
gtagttctagtgtggtcgttataaa

SEQ ID NO: 236315 - DNA, 25 bp, probe
gtaggtttgtaactgtttcatagaa

SEQ ID NO: 236316 - DNA, 25 bp, probe
gtagtttatgtacttcttgatactg

SEQ ID NO: 236317 - DNA, 25 bp, probe
gtattttttcacactgtagatggca

SEQ ID NO: 236318 - DNA, 25 bp, probe
gtgttaaattcagacgtactggctt

SEQ ID NO: 236319 - DNA, 25 bp, probe
gtatttgaagtcacactgtaacctc

SEQ ID NO: 236320 - DNA, 25 bp, probe
gtatcctaagttagcacatttactt

SEQ ID NO: 236321 - DNA, 25 bp, probe
gtatccaacattgcacaagtaactt

SEQ ID NO: 236322 - DNA, 25 bp, probe
gtatccaacagacactcaataaact

SEQ ID NO: 236323 - DNA, 25 bp, probe
gtactaccagtgccactcactgaag

SEQ ID NO: 236324 - DNA, 25 bp, probe
gtactaccagtgccactcactgaag

SEQ ID NO: 236325 - DNA, 25 bp, probe
gtatcgaccatgtgccatatatcaa

SEQ ID NO: 236326 - DNA, 25 bp, probe
gtattattgctgttgcttgaatagc

SEQ ID NO: 236327 - DNA, 25 bp, probe
gtattttctgcactgattgaatttg

SEQ ID NO: 236328 - DNA, 25 bp, probe
gtatattgttgcttattgttttgtt

SEQ ID NO: 236329 - DNA, 25 bp, probe
gtattattttgtttgtatagtttca

SEQ ID NO: 236330 - DNA, 25 bp, probe
gtattttctgtgttgttcatagtca

SEQ ID NO: 236331 - DNA, 25 bp, probe
gtattttcgtaaacacatgatagca

SEQ ID NO: 236332 - DNA, 25 bp, probe
gtatgactgaagtaataactgatga

SEQ ID NO: 236333 - DNA, 25 bp, probe
gtataccagaaattcacactgagaa

SEQ ID NO: 236334 - DNA, 25 bp, probe
gtatagcctaactacacacatcaaa

SEQ ID NO: 236335 - DNA, 25 bp, probe
gtatacaatcaagacaacacaagaa

SEQ ID NO: 236336 - DNA, 25 bp, probe
gtatataagggcacattaaaggata

SEQ ID NO: 236337 - DNA, 25 bp, probe
gtatctataggtaaatctcaagggt

SEQ ID NO: 236338 - DNA, 25 bp, probe
gtatcacatagacctagatccacac

SEQ ID NO: 236339 - DNA, 25 bp, probe
gtatcagctattactttgaccactc

SEQ ID NO: 236340 - DNA, 25 bp, probe
gtatagcatttttattcatgccatc

SEQ ID NO: 236341 - DNA, 25 bp, probe
gtatatgcatttggaattgttctgt

SEQ ID NO: 236342 - DNA, 25 bp, probe
gtatatgcatttggaattgttctgt

SEQ ID NO: 236343 - DNA, 25 bp, probe
gtatagcattgaacatttcttatga

SEQ ID NO: 236344 - DNA, 25 bp, probe
gtattcattgaagtcagatgtggta

SEQ ID NO: 236345 - DNA, 25 bp, probe
gtattcattgaagtcagatgtggta

SEQ ID NO: 236346 - DNA, 25 bp, probe
gtattcattgatctcactgctttaa

SEQ ID NO: 236347 - DNA, 25 bp, probe
gtattactgatggtactgttattca

SEQ ID NO: 236348 - DNA, 25 bp, probe
gtataattgatggattcttccatcc

SEQ ID NO: 236349 - DNA, 25 bp, probe
gtatggaggacgttcttacactccc

SEQ ID NO: 236350 - DNA, 25 bp, probe
gtatcagaggtctatttttacctac

SEQ ID NO: 236351 - DNA, 25 bp, probe
gtatcaagcgtccttagtcacacac

SEQ ID NO: 236352 - DNA, 25 bp, probe
gtaggacatgtgcttggtacaaaaa

SEQ ID NO: 236353 - DNA, 25 bp, probe
gtaggactaacttcattaataactt

SEQ ID NO: 236354 - DNA, 25 bp, probe
gtaggactaacttcattaataactt

SEQ ID NO: 236355 - DNA, 25 bp, probe
gtaggaataagtttctaatgtatta

SEQ ID NO: 236356 - DNA, 25 bp, probe
gtagctcgtaaggtagtaattggta

SEQ ID NO: 236357 - DNA, 25 bp, probe
gtatctcttagacttaggaatgtgt

SEQ ID NO: 236358 - DNA, 25 bp, probe
gtatgccaataacttggagaagctg

SEQ ID NO: 236359 - DNA, 25 bp, probe
gtatcgaatgtacaggaagagccaa

SEQ ID NO: 236360 - DNA, 25 bp, probe
gtcataatttatcaggtaaccatca

SEQ ID NO: 236361 - DNA, 25 bp, probe
gtatgaactggagagggtacctcag

SEQ ID NO: 236362 - DNA, 25 bp, probe
gtattactcagaaggggtaatgctc

SEQ ID NO: 236363 - DNA, 25 bp, probe
gtatctcctcgcaagctgggtaatc

SEQ ID NO: 236364 - DNA, 25 bp, probe
gtacccatgcctgtgggtcaacgtg

SEQ ID NO: 236365 - DNA, 25 bp, probe
gtagtgccaactgaagtgccgactg

SEQ ID NO: 236366 - DNA, 25 bp, probe
gtagacacctaggaagagcccgcat

SEQ ID NO: 236367 - DNA, 25 bp, probe
gtagaggcccgggaagccatcagag

SEQ ID NO: 236368 - DNA, 25 bp, probe
gtaggccctagggcctgcttctatg

SEQ ID NO: 236369 - DNA, 25 bp, probe
gtagtgaaaagggcggtagttggtg

SEQ ID NO: 236370 - DNA, 25 bp, probe
gtaggtagaagggccaggactttgc

SEQ ID NO: 236371 - DNA, 25 bp, probe
gtaggtagaagggccaggactttgc

SEQ ID NO: 236372 - DNA, 25 bp, probe
gtatagatttagggtgcaggactta

SEQ ID NO: 236373 - DNA, 25 bp, probe
gtatatctttttgggcatggactaa

SEQ ID NO: 236374 - DNA, 25 bp, probe
gtattttttctgaccaggagctgaa

SEQ ID NO: 236375 - DNA, 25 bp, probe
gtattttttctggcatgcgtttatt

SEQ ID NO: 236376 - DNA, 25 bp, probe
gtattttacatcctctggttgccat

SEQ ID NO: 236377 - DNA, 25 bp, probe
gtattttgataactgcatgttctgc

SEQ ID NO: 236378 - DNA, 25 bp, probe
gtattttgataactgcatgttctgc

SEQ ID NO: 236379 - DNA, 25 bp, probe
gtatcagggaaattgcaggtctgca

SEQ ID NO: 236380 - DNA, 25 bp, probe
gtatcatgtgaaacagtggttgcca

SEQ ID NO: 236381 - DNA, 25 bp, probe
gtatcatggctattgagatggtaga

SEQ ID NO: 236382 - DNA, 25 bp, probe
gtatctggctttgtactgagaaata

SEQ ID NO: 236383 - DNA, 25 bp, probe
gtatttgtttaggtcatgaagcaaa

SEQ ID NO: 236384 - DNA, 25 bp, probe
gtatgttcatttttatcagaatgca

SEQ ID NO: 236385 - DNA, 25 bp, probe
gtattatcaatttctcatagacact

SEQ ID NO: 236386 - DNA, 25 bp, probe
gtatctgatcaattattgggaccaa

SEQ ID NO: 236387 - DNA, 25 bp, probe
gtatttgtttgtacggaccataaat

SEQ ID NO: 236388 - DNA, 25 bp, probe
gtattttcttgtacatgaggcctgt

SEQ ID NO: 236389 - DNA, 25 bp, probe
gtatctatatctatacctggccctt

SEQ ID NO: 236390 - DNA, 25 bp, probe
gtattatatacaagacgtaggcttt

SEQ ID NO: 236391 - DNA, 25 bp, probe
gtattattcatacagctttggtttg

SEQ ID NO: 236392 - DNA, 25 bp, probe
gtattattcatacagctttggtttg

SEQ ID NO: 236393 - DNA, 25 bp, probe
gtatttacatactcaagttgtttga

SEQ ID NO: 236394 - DNA, 25 bp, probe
gtatgttatccactacaggttttat

SEQ ID NO: 236395 - DNA, 25 bp, probe
gtatgttatccactacaggttttat

SEQ ID NO: 236396 - DNA, 25 bp, probe
gtaatgaatacactaaggtccttgt

SEQ ID NO: 236397 - DNA, 25 bp, probe
gtatagaatacacaaagaactggat

SEQ ID NO: 236398 - DNA, 25 bp, probe
gtataagcccatcaagaaagtcatg

SEQ ID NO: 236399 - DNA, 25 bp, probe
gtatcgtcaccgcaagatgaagcca

SEQ ID NO: 236400 - DNA, 25 bp, probe
gtatcctatgaactcaatagaacaa

SEQ ID NO: 236401 - DNA, 25 bp, probe
gtatccaacaagccagaatcagcac

SEQ ID NO: 236402 - DNA, 25 bp, probe
gtatccggcagaatgggcatgcagc

SEQ ID NO: 236403 - DNA, 25 bp, probe
gtattttgcagaggccgatgagcga

SEQ ID NO: 236404 - DNA, 25 bp, probe
gtagtctttgctgccgtgaggcagt

SEQ ID NO: 236405 - DNA, 25 bp, probe
gtagcagttcctgccagtgcagatc

SEQ ID NO: 236406 - DNA, 25 bp, probe
gtatcaggttctgggaggcaacagc

SEQ ID NO: 236407 - DNA, 25 bp, probe
gtatgggctaccggatgggggactt

SEQ ID NO: 236408 - DNA, 25 bp, probe
gtatcaggcccctgagttactattt

SEQ ID NO: 236409 - DNA, 25 bp, probe
gtataggcccaaactgccttcgttt

SEQ ID NO: 236410 - DNA, 25 bp, probe
gtaatggtgaaaacgtcttccttct

SEQ ID NO: 236411 - DNA, 25 bp, probe
gtaggaggacaaatcctttcccctg

SEQ ID NO: 236412 - DNA, 25 bp, probe
gtatccaagaaagttcttcccccag

SEQ ID NO: 236413 - DNA, 25 bp, probe
gtatcggcagaacattcctgcttcc

SEQ ID NO: 236414 - DNA, 25 bp, probe
gtatcttgaagacttttctttcagc

SEQ ID NO: 236415 - DNA, 25 bp, probe
gtatcttgaagacttttctttcagc

SEQ ID NO: 236416 - DNA, 25 bp, probe
gtatatgtggagcttctgtttctca

SEQ ID NO: 236417 - DNA, 25 bp, probe
gtatacagcgacaatcctgttttct

SEQ ID NO: 236418 - DNA, 25 bp, probe
gtataattacagtacatgattgtgt

SEQ ID NO: 236419 - DNA, 25 bp, probe
gtatttaattgcccatgatatgtat

SEQ ID NO: 236420 - DNA, 25 bp, probe
gtattttgtatgctagtcatgttct

SEQ ID NO: 236421 - DNA, 25 bp, probe
gtatttgggatgcaattgtgttgta

SEQ ID NO: 236422 - DNA, 25 bp, probe
gtatcaccaggtgacattgcaggtg

SEQ ID NO: 236423 - DNA, 25 bp, probe
gtatccaaggtgctgaatcttggag

SEQ ID NO: 236424 - DNA, 25 bp, probe
gtatccatagcagttggacttgctg

SEQ ID NO: 236425 - DNA, 25 bp, probe
gtatccattgactggaagtctgtca

SEQ ID NO: 236426 - DNA, 25 bp, probe
gtatccattgactggaagtctgtca

SEQ ID NO: 236427 - DNA, 25 bp, probe
gtatccatatacacgcacaggtgcc

SEQ ID NO: 236428 - DNA, 25 bp, probe
gtatccatatacttcaggtgttgct

SEQ ID NO: 236429 - DNA, 25 bp, probe
gtatactgtatcagcagctttgtgt

SEQ ID NO: 236430 - DNA, 25 bp, probe
gtatacagtacaggatctttggtct

SEQ ID NO: 236431 - DNA, 25 bp, probe
gtatatcaatcctcttttgatgtct

SEQ ID NO: 236432 - DNA, 25 bp, probe
gtatctaattcaccttaacatgtgg

SEQ ID NO: 236433 - DNA, 25 bp, probe
gtatctgaatttgaaactcatctgg

SEQ ID NO: 236434 - DNA, 25 bp, probe
gtatctggattgtaatgtgaatctt

SEQ ID NO: 236435 - DNA, 25 bp, probe
gtatagccttggaatggcacctttt

SEQ ID NO: 236436 - DNA, 25 bp, probe
gtatcagctctgtgataacagcgtg

SEQ ID NO: 236437 - DNA, 25 bp, probe
gtatcctgcatgacgattatgccgt

SEQ ID NO: 236438 - DNA, 25 bp, probe
gtatcctgcatgacgattatgccgt

SEQ ID NO: 236439 - DNA, 25 bp, probe
gtatcgaatatctatctgagccctc

SEQ ID NO: 236440 - DNA, 25 bp, probe
gtatcttatcatgtctggatccccg

SEQ ID NO: 236441 - DNA, 25 bp, probe
gtatttgtcatttctgagtcgcctg

SEQ ID NO: 236442 - DNA, 25 bp, probe
gtatttgtatttcgatatgagcttg

SEQ ID NO: 236443 - DNA, 25 bp, probe
gtatttggaactggctagaattgct

SEQ ID NO: 236444 - DNA, 25 bp, probe
gtatttggcaactgtgggcaataat

SEQ ID NO: 236445 - DNA, 25 bp, probe
gtatttgtgaactgtaatctgaagc

SEQ ID NO: 236446 - DNA, 25 bp, probe
gtatattgggaagctcaatgataca

SEQ ID NO: 236447 - DNA, 25 bp, probe
gtatatttgtaagatgacagatgat

SEQ ID NO: 236448 - DNA, 25 bp, probe
gtatattgatgtaactgtgtcagga

SEQ ID NO: 236449 - DNA, 25 bp, probe
gtatatggtgtgaggtgggaggaca

SEQ ID NO: 236450 - DNA, 25 bp, probe
tctagcgggggacctgggagataat

SEQ ID NO: 236451 - DNA, 25 bp, probe
gtacggggacagcggggagcagatt

SEQ ID NO: 236452 - DNA, 25 bp, probe
gtatcggcagtggctgaaggaagaa

SEQ ID NO: 236453 - DNA, 25 bp, probe
gtatgctgaattacgagcacgacag

SEQ ID NO: 236454 - DNA, 25 bp, probe
gtatctacactgttagtgccacagc

SEQ ID NO: 236455 - DNA, 25 bp, probe
gtatcttcagatccagagtccagca

SEQ ID NO: 236456 - DNA, 25 bp, probe
gtatcttaaggactctcttgcatta

SEQ ID NO: 236457 - DNA, 25 bp, probe
gtatgttagcatcgactctttcttt

SEQ ID NO: 236458 - DNA, 25 bp, probe
gtacgaagattccaatgttcattgt

SEQ ID NO: 236459 - DNA, 25 bp, probe
gtatagaagagtcaactgttcagat

SEQ ID NO: 236460 - DNA, 25 bp, probe
gtatagaagagtcaactgttcagat

SEQ ID NO: 236461 - DNA, 25 bp, probe
gtatataagcctcacattttatgat

SEQ ID NO: 236462 - DNA, 25 bp, probe
gtatgtgaagtcgccagcatttata

SEQ ID NO: 236463 - DNA, 25 bp, probe
gtatgggacattcctctgatcctaa

SEQ ID NO: 236464 - DNA, 25 bp, probe
gtcatgcaatgaaatgtctcgtgcc

SEQ ID NO: 236465 - DNA, 25 bp, probe
gtatgctatataatacatagagcac

SEQ ID NO: 236466 - DNA, 25 bp, probe
gtagtcattcttacaattgcactgc

SEQ ID NO: 236467 - DNA, 25 bp, probe
gtatgctattaagtcattctgaatc

SEQ ID NO: 236468 - DNA, 25 bp, probe
gtatttgtacactatctggcacata

SEQ ID NO: 236469 - DNA, 25 bp, probe
gtatttgtacactatctggcacata

SEQ ID NO: 236470 - DNA, 25 bp, probe
gtatttccaacacttgatcataagc

SEQ ID NO: 236471 - DNA, 25 bp, probe
gtatgtttcccactttattatgacc

SEQ ID NO: 236472 - DNA, 25 bp, probe
gtatgtttcccactttattatgacc

SEQ ID NO: 236473 - DNA, 25 bp, probe
gtatttgtagccagtctcctatacc

SEQ ID NO: 236474 - DNA, 25 bp, probe
gtatttgctacttgtgtctcatctt

SEQ ID NO: 236475 - DNA, 25 bp, probe
gtatattgatagttgattcatgtgc

SEQ ID NO: 236476 - DNA, 25 bp, probe
gtatctggatctctgttatgtgcca

SEQ ID NO: 236477 - DNA, 25 bp, probe
gtatcaaactagctgctatgtgcaa

SEQ ID NO: 236478 - DNA, 25 bp, probe
gtatacccaggcttgtctggaagga

SEQ ID NO: 236479 - DNA, 25 bp, probe
gtatacccaggcttgtctggaagga

SEQ ID NO: 236480 - DNA, 25 bp, probe
taatccccacgtgacatgggaggga

SEQ ID NO: 236481 - DNA, 25 bp, probe
tcaatcctcccctttagggaaggag

SEQ ID NO: 236482 - DNA, 25 bp, probe
tcaatcctcccctttagggaaggag

SEQ ID NO: 236483 - DNA, 25 bp, probe
tccagcccctcttctaagggaagga

SEQ ID NO: 236484 - DNA, 25 bp, probe
tccagcccctcttctaagggaagga

SEQ ID NO: 236485 - DNA, 25 bp, probe
gtgaggcccttggccaagggaccag

SEQ ID NO: 236486 - DNA, 25 bp, probe
gtaggactgtagaaaagggaactga

SEQ ID NO: 236487 - DNA, 25 bp, probe
gtatggactgcatggacaatgagag

SEQ ID NO: 236488 - DNA, 25 bp, probe
gtatgagagctatggccttggcagc

SEQ ID NO: 236489 - DNA, 25 bp, probe
gtatggatgcgtggatatctgtgta

SEQ ID NO: 236490 - DNA, 25 bp, probe
gtagatgtgcgtgcagtctggcagc

SEQ ID NO: 236491 - DNA, 25 bp, probe
gtagatgtgcgtgcagtctggcagc

SEQ ID NO: 236492 - DNA, 25 bp, probe
gtatgagaacatccagtcgagcaga

SEQ ID NO: 236493 - DNA, 25 bp, probe
gtatgagaacatccagtcgagcaga

SEQ ID NO: 236494 - DNA, 25 bp, probe
gtatgagaacatccagtcgagcaga

SEQ ID NO: 236495 - DNA, 25 bp, probe
gtatgagaacatccagtcgagcaga

SEQ ID NO: 236496 - DNA, 25 bp, probe
gtatgatgataacaacaagctgatt

SEQ ID NO: 236497 - DNA, 25 bp, probe
gtatcatgcctaccaacaagctgta

SEQ ID NO: 236498 - DNA, 25 bp, probe
gtatgctggatgcccaaccagattc

SEQ ID NO: 236499 - DNA, 25 bp, probe
gtaggtgatgtgccattccataatg

SEQ ID NO: 236500 - DNA, 25 bp, probe
gtaggtccgactacacagcagtgtt

SEQ ID NO: 236501 - DNA, 25 bp, probe
gtaggtccgactacacagcagtgtt

SEQ ID NO: 236502 - DNA, 25 bp, probe
gtagagtcggaaacaggcatgggga

SEQ ID NO: 236503 - DNA, 25 bp, probe
gtagagcggggcaaagtgagggcca

SEQ ID NO: 236504 - DNA, 25 bp, probe
gtagatcaggcatgtagagctgctg

SEQ ID NO: 236505 - DNA, 25 bp, probe
gtagatcaggcatgtagagctgctg

SEQ ID NO: 236506 - DNA, 25 bp, probe
gtagtgggcaagtaagatttggctc

SEQ ID NO: 236507 - DNA, 25 bp, probe
gtagtgggcaagtaagatttggctc

SEQ ID NO: 236508 - DNA, 25 bp, probe
gtaggatcccagtaaatatgggttg

SEQ ID NO: 236509 - DNA, 25 bp, probe
gtagttcccaaactcatggaagtct

SEQ ID NO: 236510 - DNA, 25 bp, probe
gtagttcctcattgaacatgtgata

SEQ ID NO: 236511 - DNA, 25 bp, probe
gtagttcctcattgaacatgtgata

SEQ ID NO: 236512 - DNA, 25 bp, probe
gtatgttcttgatgaccagtatgtc

SEQ ID NO: 236513 - DNA, 25 bp, probe
gtatgctccttatcctggacatgaa

SEQ ID NO: 236514 - DNA, 25 bp, probe
gtacagtcttggagggacagaattg

SEQ ID NO: 236515 - DNA, 25 bp, probe
gtgaatggccggtgggaaatcttcc

SEQ ID NO: 236516 - DNA, 25 bp, probe
gtatcggccttgtgtagaatcactc

SEQ ID NO: 236517 - DNA, 25 bp, probe
gtatctgagttgccaagacaaatca

SEQ ID NO: 236518 - DNA, 25 bp, probe
gtaccatggtcggaacgccatactg

SEQ ID NO: 236519 - DNA, 25 bp, probe
gtatcctggtatcatatggctacat

SEQ ID NO: 236520 - DNA, 25 bp, probe
gtataatgtgctttatttgcaaatc

SEQ ID NO: 236521 - DNA, 25 bp, probe
gtatagattcagtcttcttccagtt

SEQ ID NO: 236522 - DNA, 25 bp, probe
gtaggcttagttttttcagttgcag

SEQ ID NO: 236523 - DNA, 25 bp, probe
gtagtgctattaaaatttcgttcag

SEQ ID NO: 236524 - DNA, 25 bp, probe
gtatatatcttataactgttttaga

SEQ ID NO: 236525 - DNA, 25 bp, probe
gtataacctgcataactttttgtct

SEQ ID NO: 236526 - DNA, 25 bp, probe
gtcatgcgaccctaggacttttttt

SEQ ID NO: 236527 - DNA, 25 bp, probe
gtatgccctatctggattctactta

SEQ ID NO: 236528 - DNA, 25 bp, probe
gtatccctttactatgattaatttt

SEQ ID NO: 236529 - DNA, 25 bp, probe
gtatcccattattactataagaggt

SEQ ID NO: 236530 - DNA, 25 bp, probe
gtatcccattattactataagaggt

SEQ ID NO: 236531 - DNA, 25 bp, probe
gtatctaattattggttgaacagta

SEQ ID NO: 236532 - DNA, 25 bp, probe
gtactatgagtattggtcgaccttt

SEQ ID NO: 236533 - DNA, 25 bp, probe
gtacttgactacagggccacattct

SEQ ID NO: 236534 - DNA, 25 bp, probe
gtactcgggaatccggcacaaggca

SEQ ID NO: 236535 - DNA, 25 bp, probe
gtacctagggagcctagccgaggcc

SEQ ID NO: 236536 - DNA, 25 bp, probe
gtacctgacgggcatcgtcagctgg

SEQ ID NO: 236537 - DNA, 25 bp, probe
gtaccacacggaggacactcgggac

SEQ ID NO: 236538 - DNA, 25 bp, probe
gtaccgcgggacaaatcctgagtca

SEQ ID NO: 236539 - DNA, 25 bp, probe
gtaccgcgggacaaatcctgagtca

SEQ ID NO: 236540 - DNA, 25 bp, probe
gtatcttgccggtcatttttatgtt

SEQ ID NO: 236541 - DNA, 25 bp, probe
gtatgcattgccctatgcactgtta

SEQ ID NO: 236542 - DNA, 25 bp, probe
gtatgcttacaattgtcatgtctag

SEQ ID NO: 236543 - DNA, 25 bp, probe
gtatgcttacaattgtcatgtctag

SEQ ID NO: 236544 - DNA, 25 bp, probe
gtatccacacaaattcagtctctga

SEQ ID NO: 236545 - DNA, 25 bp, probe
gtatctcctaatttgaggctcagat

SEQ ID NO: 236546 - DNA, 25 bp, probe
gtatctctttacttcatttcagaga

SEQ ID NO: 236547 - DNA, 25 bp, probe
gtatatgctgtgaaggtcttaaaga

SEQ ID NO: 236548 - DNA, 25 bp, probe
gtatatgccttcaggaatgatataa

SEQ ID NO: 236549 - DNA, 25 bp, probe
gtatcacatttcaggttaagacaga

SEQ ID NO: 236550 - DNA, 25 bp, probe
gtatcacaaatcagtgttaaaacac

SEQ ID NO: 236551 - DNA, 25 bp, probe
gtagcgccacatctggtttataaag

SEQ ID NO: 236552 - DNA, 25 bp, probe
gtagttacacttgtgtttcaatcag

SEQ ID NO: 236553 - DNA, 25 bp, probe
gtatgtaccgttgatgttgataaaa

SEQ ID NO: 236554 - DNA, 25 bp, probe
gtatacacctgcatcagtgttgaca

SEQ ID NO: 236555 - DNA, 25 bp, probe
gtatgacgcgtggtcaggttacaaa

SEQ ID NO: 236556 - DNA, 25 bp, probe
gtatgtcctagcttagccattcaga

SEQ ID NO: 236557 - DNA, 25 bp, probe
gtatgtcacatgccttatgaataga

SEQ ID NO: 236558 - DNA, 25 bp, probe
gtatgtctacctacatcagtgtgta

SEQ ID NO: 236559 - DNA, 25 bp, probe
gtagtgcgtcttacacagtgtcaac

SEQ ID NO: 236560 - DNA, 25 bp, probe
gtatgtatgtttacctgtgcctaat

SEQ ID NO: 236561 - DNA, 25 bp, probe
gtactcaggtttcagagcccaagtc

SEQ ID NO: 236562 - DNA, 25 bp, probe
gtactgttttgctggatgccgaagt

SEQ ID NO: 236563 - DNA, 25 bp, probe
gtaagtgttgtatgtaccgttgatg

SEQ ID NO: 236564 - DNA, 25 bp, probe
gtagggttattagtccaaatgtgat

SEQ ID NO: 236565 - DNA, 25 bp, probe
gtaggtggttttgccagagaatggt

SEQ ID NO: 236566 - DNA, 25 bp, probe
gtaggaagttgtttaaagactggca

SEQ ID NO: 236567 - DNA, 25 bp, probe
gtatcgcaagggtttgacacggctg

SEQ ID NO: 236568 - DNA, 25 bp, probe
gtatcaccacggatttcagcagagg

SEQ ID NO: 236569 - DNA, 25 bp, probe
gtatctccccttttatgcagggatg

SEQ ID NO: 236570 - DNA, 25 bp, probe
gtatctgctcctttggtttgggatg

SEQ ID NO: 236571 - DNA, 25 bp, probe
gtatcattaatgtaggtttagatat

SEQ ID NO: 236572 - DNA, 25 bp, probe
ggtcttgggaggctttcaattgtat

SEQ ID NO: 236573 - DNA, 25 bp, probe
ggtctgatggcctctaataaactgt

SEQ ID NO: 236574 - DNA, 25 bp, probe
gggctgggcctgaccaaaaatatac

SEQ ID NO: 236575 - DNA, 25 bp, probe
gggctgggcctgaccaaaaatatac

SEQ ID NO: 236576 - DNA, 25 bp, probe
gtaggggcactaatccagcccttaa

SEQ ID NO: 236577 - DNA, 25 bp, probe
gtcacgtggccataccaaactgtaa

SEQ ID NO: 236578 - DNA, 25 bp, probe
gtaccttaagcaccgcaatatcgtt

SEQ ID NO: 236579 - DNA, 25 bp, probe
gtaccttaagcaccgcaatatcgtt

SEQ ID NO: 236580 - DNA, 25 bp, probe
gtacctggggaccaaattccattca

SEQ ID NO: 236581 - DNA, 25 bp, probe
gtacctggggaccaaattccattca

SEQ ID NO: 236582 - DNA, 25 bp, probe
gtacaggggtgtggaggacttaatc

SEQ ID NO: 236583 - DNA, 25 bp, probe
gtacaggggtgtggaggacttaatc

SEQ ID NO: 236584 - DNA, 25 bp, probe
gtaagtggagttgggaaatacaaga

SEQ ID NO: 236585 - DNA, 25 bp, probe
gtatcagttagtgcaggaagtaaag

SEQ ID NO: 236586 - DNA, 25 bp, probe
gtatcagcgtaagaggtggctgtac

SEQ ID NO: 236587 - DNA, 25 bp, probe
gtatcacaggcaaccagttggcctc

SEQ ID NO: 236588 - DNA, 25 bp, probe
gtataagctgatgctcagctgctgg

SEQ ID NO: 236589 - DNA, 25 bp, probe
gtatagatgctgacctccatcattt

SEQ ID NO: 236590 - DNA, 25 bp, probe
gtatcagatgctgagacacatgtct

SEQ ID NO: 236591 - DNA, 25 bp, probe
gtatgctgcgctgaacagagacttc

SEQ ID NO: 236592 - DNA, 25 bp, probe
gtaggtgctcaatcagcagcctttg

SEQ ID NO: 236593 - DNA, 25 bp, probe
gtagtgtccagttcacagagctttg

SEQ ID NO: 236594 - DNA, 25 bp, probe
gtagtgctcacgaatacagctcctc

SEQ ID NO: 236595 - DNA, 25 bp, probe
gtagtgccagaggcaccctgacatc

SEQ ID NO: 236596 - DNA, 25 bp, probe
gtatggctcaaccagccatctactt

SEQ ID NO: 236597 - DNA, 25 bp, probe
gtatgctctaaaagaatatggcgtc

SEQ ID NO: 236598 - DNA, 25 bp, probe
gtatctctcaaaaggattccaatcc

SEQ ID NO: 236599 - DNA, 25 bp, probe
gtatcatacagttagtgttgccagt

SEQ ID NO: 236600 - DNA, 25 bp, probe
gtatcagaagtatgccttgctgtgg

SEQ ID NO: 236601 - DNA, 25 bp, probe
gtatcagaagtatgccttgctgtgg

SEQ ID NO: 236602 - DNA, 25 bp, probe
gtatcagaaagcgatgacgtgggac

SEQ ID NO: 236603 - DNA, 25 bp, probe
gtaccaaccacatcagagggaaaga

SEQ ID NO: 236604 - DNA, 25 bp, probe
gtaccacagcccggaggggaatgga

SEQ ID NO: 236605 - DNA, 25 bp, probe
gtaccggcacgggatatggaacgaa

SEQ ID NO: 236606 - DNA, 25 bp, probe
gtatcccacaggagatggagaacca

SEQ ID NO: 236607 - DNA, 25 bp, probe
gtagtcccagatacttgggaggcca

SEQ ID NO: 236608 - DNA, 25 bp, probe
gggtccgaatcagtaggtgaccccg

SEQ ID NO: 236609 - DNA, 25 bp, probe
gggcccagtaaggacagtgcccgcc

SEQ ID NO: 236610 - DNA, 25 bp, probe
gtatgacccagccgaagtggaggcg

SEQ ID NO: 236611 - DNA, 25 bp, probe
gtatgaacggcacagaggcggcgca

SEQ ID NO: 236612 - DNA, 25 bp, probe
gtatgaaccagctcagcggctgacc

SEQ ID NO: 236613 - DNA, 25 bp, probe
gtagcaaccaggtagacagtgacca

SEQ ID NO: 236614 - DNA, 25 bp, probe
gtacaacacggacaccgacgagtgg

SEQ ID NO: 236615 - DNA, 25 bp, probe
gtacaacacggacaccgacgagtgg

SEQ ID NO: 236616 - DNA, 25 bp, probe
gtcagcaaccggaaaccaagcaagg

SEQ ID NO: 236617 - DNA, 25 bp, probe
gtcaacaccggaacccagaaaactg

SEQ ID NO: 236618 - DNA, 25 bp, probe
gtcaacaccggaacccagaaaactg

SEQ ID NO: 236619 - DNA, 25 bp, probe
gtcaatcccctcattcaggaaaact

SEQ ID NO: 236620 - DNA, 25 bp, probe
gtgtcccactcgataaagaaaaatg

SEQ ID NO: 236621 - DNA, 25 bp, probe
gtatcccaccaagaaacaacagctc

SEQ ID NO: 236622 - DNA, 25 bp, probe
gtatcccaccaagaaacaacagctc

SEQ ID NO: 236623 - DNA, 25 bp, probe
gtagccccaaagtggaaacatcttg

SEQ ID NO: 236624 - DNA, 25 bp, probe
gtccgccttaatctggaaggcccct

SEQ ID NO: 236625 - DNA, 25 bp, probe
gtacctttaagttgtattggcccat

SEQ ID NO: 236626 - DNA, 25 bp, probe
gtatcgatgttatgtaaaaggccaa

SEQ ID NO: 236627 - DNA, 25 bp, probe
gtatgtgtttgatgctataaagctc

SEQ ID NO: 236628 - DNA, 25 bp, probe
gtatgcagctgtgaactacctcacc

SEQ ID NO: 236629 - DNA, 25 bp, probe
gtatgacttagatctagctcctacc

SEQ ID NO: 236630 - DNA, 25 bp, probe
gtagtgatggattcagtactcctca

SEQ ID NO: 236631 - DNA, 25 bp, probe
gtagtgaagctactgtgagtcttta

SEQ ID NO: 236632 - DNA, 25 bp, probe
gtagtgaagctactgtgagtcttta

SEQ ID NO: 236633 - DNA, 25 bp, probe
gtagtgaagctactgtgagtcttta

SEQ ID NO: 236634 - DNA, 25 bp, probe
gtagtcccattgatgtactttacct

SEQ ID NO: 236635 - DNA, 25 bp, probe
gtatgtcgccattgttgtacaacca

SEQ ID NO: 236636 - DNA, 25 bp, probe
gtatgtcgccattgttgtacaacca

SEQ ID NO: 236637 - DNA, 25 bp, probe
gtatgtctgcatcgatgtctgtact

SEQ ID NO: 236638 - DNA, 25 bp, probe
gtatgcatcactggagacctactgc

SEQ ID NO: 236639 - DNA, 25 bp, probe
gtatcacatcatggggccctgagcc

SEQ ID NO: 236640 - DNA, 25 bp, probe
gtatcagctgatgctggactgctgg

SEQ ID NO: 236641 - DNA, 25 bp, probe
gtatcagccacccaatgactggcgt

SEQ ID NO: 236642 - DNA, 25 bp, probe
gtatgacacacaccagaacttgcgc

SEQ ID NO: 236643 - DNA, 25 bp, probe
gtatgaacaagatgagcattctgtc

SEQ ID NO: 236644 - DNA, 25 bp, probe
gtatgaggtagatgacattgatgaa

SEQ ID NO: 236645 - DNA, 25 bp, probe
gtatcagtgtggagccttacatact

SEQ ID NO: 236646 - DNA, 25 bp, probe
gtatctgctgtgcattcactctaag

SEQ ID NO: 236647 - DNA, 25 bp, probe
gtatgctggagagttactctgcaaa

SEQ ID NO: 236648 - DNA, 25 bp, probe
gtatcatcaaactcagtctcaaact

SEQ ID NO: 236649 - DNA, 25 bp, probe
gtatcacagagatccagtctattca

SEQ ID NO: 236650 - DNA, 25 bp, probe
gtatgccagaaattaggctaccaat

SEQ ID NO: 236651 - DNA, 25 bp, probe
gtatccagaaagttactgacacagt

SEQ ID NO: 236652 - DNA, 25 bp, probe
gtatcaaagaagttgctgtcacaca

SEQ ID NO: 236653 - DNA, 25 bp, probe
gtatcaaagaagttgctgtcacaca

SEQ ID NO: 236654 - DNA, 25 bp, probe
gtatcagcagaacggtgagtctgca

SEQ ID NO: 236655 - DNA, 25 bp, probe
gtactgcagaaactgaggactaaag

SEQ ID NO: 236656 - DNA, 25 bp, probe
gtatctgcagaacagtaagcgaaag

SEQ ID NO: 236657 - DNA, 25 bp, probe
gtatctgtgatacattatccgacta

SEQ ID NO: 236658 - DNA, 25 bp, probe
gtatcttagcacaattaccataata

SEQ ID NO: 236659 - DNA, 25 bp, probe
gtatgctgtagctaactttataaaa

SEQ ID NO: 236660 - DNA, 25 bp, probe
gtatgctgtagctaactttataaaa

SEQ ID NO: 236661 - DNA, 25 bp, probe
gtatctttgcaaactgcccattcac

SEQ ID NO: 236662 - DNA, 25 bp, probe
gtatctgttgcattaaggcacatag

SEQ ID NO: 236663 - DNA, 25 bp, probe
gtagtcaatgcctatgaacacatca

SEQ ID NO: 236664 - DNA, 25 bp, probe
gtatctactgcttgatgtaactagg

SEQ ID NO: 236665 - DNA, 25 bp, probe
gtatctactgcttgatgtaactagg

SEQ ID NO: 236666 - DNA, 25 bp, probe
gtatctcagctctggtacctatggt

SEQ ID NO: 236667 - DNA, 25 bp, probe
gtatctacaattggtagccgctgcg

SEQ ID NO: 236668 - DNA, 25 bp, probe
gtatcacaaatctgtagtagcatgg

SEQ ID NO: 236669 - DNA, 25 bp, probe
gtatccagacacacttggcagatgg

SEQ ID NO: 236670 - DNA, 25 bp, probe
gtaccagacctaagtgacaagagac

SEQ ID NO: 236671 - DNA, 25 bp, probe
gtacggagccgagattatcgcaatt

SEQ ID NO: 236672 - DNA, 25 bp, probe
gtacctgccggagagtgtcagaact

SEQ ID NO: 236673 - DNA, 25 bp, probe
gtatcctcctgatgaagcagtgctg

SEQ ID NO: 236674 - DNA, 25 bp, probe
gtatcatccttaaagatgtggctgc

SEQ ID NO: 236675 - DNA, 25 bp, probe
gtatctgctttgtactgttggtgcc

SEQ ID NO: 236676 - DNA, 25 bp, probe
gtatggatgaactacttcttgtgcc

SEQ ID NO: 236677 - DNA, 25 bp, probe
gtatgtgtgcagtttcttgcatttc

SEQ ID NO: 236678 - DNA, 25 bp, probe
gtatggctgctgtttgattatgcag

SEQ ID NO: 236679 - DNA, 25 bp, probe
gtatggctgctgtttgattatgcag

SEQ ID NO: 236680 - DNA, 25 bp, probe
gtatgtgctgtctcatgtcttattt

SEQ ID NO: 236681 - DNA, 25 bp, probe
gtatctgtgtagactatttgcttat

SEQ ID NO: 236682 - DNA, 25 bp, probe
gtatctttagtattcaggttgtgaa

SEQ ID NO: 236683 - DNA, 25 bp, probe
gtatcttttcaatcaagctgtgtgc

SEQ ID NO: 236684 - DNA, 25 bp, probe
gtatcttttcaatcaagctgtgtgc

SEQ ID NO: 236685 - DNA, 25 bp, probe
gtatcttttcaatcaagctgtgtgc

SEQ ID NO: 236686 - DNA, 25 bp, probe
gtatctttgtggtcatctactgggt

SEQ ID NO: 236687 - DNA, 25 bp, probe
gtatctaggtggacctcacttgttt

SEQ ID NO: 236688 - DNA, 25 bp, probe
gtatctaggtggacctcacttgttt

SEQ ID NO: 236689 - DNA, 25 bp, probe
gtactcagggaaacatggctaattt

SEQ ID NO: 236690 - DNA, 25 bp, probe
gtaaatggaggagacctaatgtttc

SEQ ID NO: 236691 - DNA, 25 bp, probe
gtatgggggtgatcacctacatgct

SEQ ID NO: 236692 - DNA, 25 bp, probe
gtatggatggactccccttatgtat

SEQ ID NO: 236693 - DNA, 25 bp, probe
gtatggatggactccccttatgtat

SEQ ID NO: 236694 - DNA, 25 bp, probe
gtatggcggacatcacgtttgtgga

SEQ ID NO: 236695 - DNA, 25 bp, probe
gtatgaggtacaacctgttctgctt

SEQ ID NO: 236696 - DNA, 25 bp, probe
gtatgaagtggctgtgctggttgga

SEQ ID NO: 236697 - DNA, 25 bp, probe
gtagaaatggtctctggcattgaag

SEQ ID NO: 236698 - DNA, 25 bp, probe
gtaggaagaatcattgctgcatttc

SEQ ID NO: 236699 - DNA, 25 bp, probe
gtaggatgaaccgttggcatgctcc

SEQ ID NO: 236700 - DNA, 25 bp, probe
gtatcagatggaccctgatgcctgc

SEQ ID NO: 236701 - DNA, 25 bp, probe
gtatcagatggaccctgatgcctgc

SEQ ID NO: 236702 - DNA, 25 bp, probe
gtatcagatcaacttcaacccatgg

SEQ ID NO: 236703 - DNA, 25 bp, probe
gtatcatgaagactctctatcaccc

SEQ ID NO: 236704 - DNA, 25 bp, probe
gtatcagatcaaccctgatgcttgc

SEQ ID NO: 236705 - DNA, 25 bp, probe
gtatgcagatgatgacctgatcata

SEQ ID NO: 236706 - DNA, 25 bp, probe
gtagaagcgcatacgcatgactaca

SEQ ID NO: 236707 - DNA, 25 bp, probe
gtagatcctgctcacagaatcacag

SEQ ID NO: 236708 - DNA, 25 bp, probe
gtatgaccccaaggagctacggaag

SEQ ID NO: 236709 - DNA, 25 bp, probe
gtcaactcctcagtgggtaagagca

SEQ ID NO: 236710 - DNA, 25 bp, probe
gtagactacgaccaggtgaagatca

SEQ ID NO: 236711 - DNA, 25 bp, probe
gtatgaaactcaccagcgagaacaa

SEQ ID NO: 236712 - DNA, 25 bp, probe
gtatgagaacctgcacactaagaac

SEQ ID NO: 236713 - DNA, 25 bp, probe
gtatggagtccagtctaagcagaga

SEQ ID NO: 236714 - DNA, 25 bp, probe
gtatgctaatccatctgcaaaagaa

SEQ ID NO: 236715 - DNA, 25 bp, probe
gtatgtcaaccaagtgtttagaatg

SEQ ID NO: 236716 - DNA, 25 bp, probe
gtcggcacaacctgtttgagcctga

SEQ ID NO: 236717 - DNA, 25 bp, probe
gtcggcacaacctgtttgagcctga

SEQ ID NO: 236718 - DNA, 25 bp, probe
gtatggaatattcattttactcaga

SEQ ID NO: 236719 - DNA, 25 bp, probe
gtatgaggaagacatgtttagtgac

SEQ ID NO: 236720 - DNA, 25 bp, probe
gtatctggaagcctctgtgttggtg

SEQ ID NO: 236721 - DNA, 25 bp, probe
gtatctggaagcctctgtgttggtg

SEQ ID NO: 236722 - DNA, 25 bp, probe
gtatgcatgagttgagttgcttctg

SEQ ID NO: 236723 - DNA, 25 bp, probe
gtatgctagtcatgttcttggttct

SEQ ID NO: 236724 - DNA, 25 bp, probe
gtatgtaacctgttttgagcttaaa

SEQ ID NO: 236725 - DNA, 25 bp, probe
gtatgaacaccttgacttagatttg

SEQ ID NO: 236726 - DNA, 25 bp, probe
gtatgaatgcccctacttggtatat

SEQ ID NO: 236727 - DNA, 25 bp, probe
gtatgacatcctgcacaatttgtga

SEQ ID NO: 236728 - DNA, 25 bp, probe
gtatgtatttgtacactatctggca

SEQ ID NO: 236729 - DNA, 25 bp, probe
gtatgtattttttcacactgtagat

SEQ ID NO: 236730 - DNA, 25 bp, probe
gtaggcattatttaccagaatagtc

SEQ ID NO: 236731 - DNA, 25 bp, probe
gtagatcttgatcttccaggtaccc

SEQ ID NO: 236732 - DNA, 25 bp, probe
gtagatttgactctgttgttttctc

SEQ ID NO: 236733 - DNA, 25 bp, probe
gtagcgttaattatgctctgtttcc

SEQ ID NO: 236734 - DNA, 25 bp, probe
gtaggttcacaaactcttggtcatt

SEQ ID NO: 236735 - DNA, 25 bp, probe
gtaggttcacaaactcttggtcatt

SEQ ID NO: 236736 - DNA, 25 bp, probe
gtagacctgaacatacttgtgtatt

SEQ ID NO: 236737 - DNA, 25 bp, probe
gtagacctgaacatacttgtgtatt

SEQ ID NO: 236738 - DNA, 25 bp, probe
gtatgtccttacatttctgaaagct

SEQ ID NO: 236739 - DNA, 25 bp, probe
gtatgctcattgaactttaagaagc

SEQ ID NO: 236740 - DNA, 25 bp, probe
gtagctattggagaattcatataca

SEQ ID NO: 236741 - DNA, 25 bp, probe
gtatgtttggtgagtcacagatata

SEQ ID NO: 236742 - DNA, 25 bp, probe
gtagtgtctgcatgcagtgtactga

SEQ ID NO: 236743 - DNA, 25 bp, probe
gtatgtgatcagaagctgcgtccca

SEQ ID NO: 236744 - DNA, 25 bp, probe
gtatgtgtcagtagtaggctccaag

SEQ ID NO: 236745 - DNA, 25 bp, probe
gtatggacctatacatgatgcacct

SEQ ID NO: 236746 - DNA, 25 bp, probe
gtatgagacctatcagagcagccgg

SEQ ID NO: 236747 - DNA, 25 bp, probe
gtatggactcatccaccaggggatg

SEQ ID NO: 236748 - DNA, 25 bp, probe
gtagttctgctccagacagggaatt

SEQ ID NO: 236749 - DNA, 25 bp, probe
gtatgtgactggcaaatggaactac

SEQ ID NO: 236750 - DNA, 25 bp, probe
gtatgtgattgacaaatcatgatct

SEQ ID NO: 236751 - DNA, 25 bp, probe
gtatgtgttggtttattgattctgt

SEQ ID NO: 236752 - DNA, 25 bp, probe
gtatctatttgtggtgaatgtgttt

SEQ ID NO: 236753 - DNA, 25 bp, probe
gtatccatgcggagttgatgctttg

SEQ ID NO: 236754 - DNA, 25 bp, probe
gtatcctgcttctgatatgcagttt

SEQ ID NO: 236755 - DNA, 25 bp, probe
gtatgacttactggatgatggtggt

SEQ ID NO: 236756 - DNA, 25 bp, probe
gtatgacttactggatgatggtggt

SEQ ID NO: 236757 - DNA, 25 bp, probe
gtatgttttcatgggtcaggacttc

SEQ ID NO: 236758 - DNA, 25 bp, probe
gtatgatctattacggtcagatcca

SEQ ID NO: 236759 - DNA, 25 bp, probe
gtatgatctctatggacaagagcta

SEQ ID NO: 236760 - DNA, 25 bp, probe
gtatgatctctatggacaagagcta

SEQ ID NO: 236761 - DNA, 25 bp, probe
gtatgatgcctgtatggagacattt

SEQ ID NO: 236762 - DNA, 25 bp, probe
gtagtcctggtgagaatttatggca

SEQ ID NO: 236763 - DNA, 25 bp, probe
gtagtcctggtgagaatttatggca

SEQ ID NO: 236764 - DNA, 25 bp, probe
gtaggcctggtcagttatgacaaca

SEQ ID NO: 236765 - DNA, 25 bp, probe
gtagcctttgtcaagtgaggaaatc

SEQ ID NO: 236766 - DNA, 25 bp, probe
gtagcctttgtcaagtgaggaaatc

SEQ ID NO: 236767 - DNA, 25 bp, probe
gtagctttggtattatgagtgcaaa

SEQ ID NO: 236768 - DNA, 25 bp, probe
gtagttacctatctgaatgcacacc

SEQ ID NO: 236769 - DNA, 25 bp, probe
gtagggacacgtgtccatgcaccac

SEQ ID NO: 236770 - DNA, 25 bp, probe
gtaggtgacctgcttggatctagac

SEQ ID NO: 236771 - DNA, 25 bp, probe
gtagtgatgctccggtgtgagtctg

SEQ ID NO: 236772 - DNA, 25 bp, probe
gtatgtgagctctatggtggtggat

SEQ ID NO: 236773 - DNA, 25 bp, probe
gtactggcctagccatgtggaattc

SEQ ID NO: 236774 - DNA, 25 bp, probe
gtaggaacatgagatgtgacattct

SEQ ID NO: 236775 - DNA, 25 bp, probe
gtaggacacaagctgtgagcaatct

SEQ ID NO: 236776 - DNA, 25 bp, probe
gtatctgatagctctttggcagtct

SEQ ID NO: 236777 - DNA, 25 bp, probe
gtatctgaggcagctattccgcatt

SEQ ID NO: 236778 - DNA, 25 bp, probe
gtagccagctcagaatacccatgta

SEQ ID NO: 236779 - DNA, 25 bp, probe
gtatgctgcctctgtaaattcatgt

SEQ ID NO: 236780 - DNA, 25 bp, probe
gtatggcccatccaagacttttagg

SEQ ID NO: 236781 - DNA, 25 bp, probe
gtatgagccgctgcagaagtttctg

SEQ ID NO: 236782 - DNA, 25 bp, probe
gtagtgctgcttctgaagttatctc

SEQ ID NO: 236783 - DNA, 25 bp, probe
gtagtgtgtagtctatgaccactgc

SEQ ID NO: 236784 - DNA, 25 bp, probe
gtagtttattataatcatccctcta

SEQ ID NO: 236785 - DNA, 25 bp, probe
gtatgctaaatttgatattcccatc

SEQ ID NO: 236786 - DNA, 25 bp, probe
gtaggccaatatagatttgccttta

SEQ ID NO: 236787 - DNA, 25 bp, probe
gtatggctcttataattgcccgaaa

SEQ ID NO: 236788 - DNA, 25 bp, probe
gtagttcatatatattaccacgaca

SEQ ID NO: 236789 - DNA, 25 bp, probe
gtactatcagaatgacatcccctac

SEQ ID NO: 236790 - DNA, 25 bp, probe
gtactatcagaatgacatcccctac

SEQ ID NO: 236791 - DNA, 25 bp, probe
gtagtaagaagaccacacacctgcc

SEQ ID NO: 236792 - DNA, 25 bp, probe
gtagtacagaagttccactgatgtg

SEQ ID NO: 236793 - DNA, 25 bp, probe
gtagtacaaatgactcactgctgta

SEQ ID NO: 236794 - DNA, 25 bp, probe
gtagtgtcccagattgatgctgtag

SEQ ID NO: 236795 - DNA, 25 bp, probe
gtaggttaagaggtcagcattgagg

SEQ ID NO: 236796 - DNA, 25 bp, probe
gtatggttcttcagtcgatatatgg

SEQ ID NO: 236797 - DNA, 25 bp, probe
gtaggaatcgtgggtcttcataggc

SEQ ID NO: 236798 - DNA, 25 bp, probe
gtatggtcatttggtgtattgctaa

SEQ ID NO: 236799 - DNA, 25 bp, probe
gtatggtcactgggctgtgtcatgt

SEQ ID NO: 236800 - DNA, 25 bp, probe
gtatgtgtccttgtgttatgttgta

SEQ ID NO: 236801 - DNA, 25 bp, probe
gggtttcgttttcatgctttaccag

SEQ ID NO: 236802 - DNA, 25 bp, probe
gtgcctttggttgtaggttttccag

SEQ ID NO: 236803 - DNA, 25 bp, probe
gtgcctttggttgtaggttttccag

SEQ ID NO: 236804 - DNA, 25 bp, probe
gtactggctggtacgccaggttttc

SEQ ID NO: 236805 - DNA, 25 bp, probe
gtatgtggatggaggcgaactcttt

SEQ ID NO: 236806 - DNA, 25 bp, probe
gtatgtggatggaggcgaactcttt

SEQ ID NO: 236807 - DNA, 25 bp, probe
gtagggcaggtgtctgcaaactttt

SEQ ID NO: 236808 - DNA, 25 bp, probe
gtaggcagcagtgttgcagcaacct

SEQ ID NO: 236809 - DNA, 25 bp, probe
gtagctcaagacttggcagcattcc

SEQ ID NO: 236810 - DNA, 25 bp, probe
gtagatgactacttgggccatcggg

SEQ ID NO: 236811 - DNA, 25 bp, probe
gtagatgactacttgggccatcggg

SEQ ID NO: 236812 - DNA, 25 bp, probe
gtagacttgccatggtgacacggga

SEQ ID NO: 236813 - DNA, 25 bp, probe
gtagctttccactggagtctgggat

SEQ ID NO: 236814 - DNA, 25 bp, probe
gtagttctcaaatgggctaggcctt

SEQ ID NO: 236815 - DNA, 25 bp, probe
gtagctattcaattaggggagtctg

SEQ ID NO: 236816 - DNA, 25 bp, probe
gtatgtatgtatttagttcaggttg

SEQ ID NO: 236817 - DNA, 25 bp, probe
gtagttggtctgtaattaagttgca

SEQ ID NO: 236818 - DNA, 25 bp, probe
gtatgtcctttgtatctctaagtta

SEQ ID NO: 236819 - DNA, 25 bp, probe
gtatgtcctttgtatctctaagtta

SEQ ID NO: 236820 - DNA, 25 bp, probe
gtatccctgatttattctggtgtct

SEQ ID NO: 236821 - DNA, 25 bp, probe
gtatccagaagaaataattgtgtca

SEQ ID NO: 236822 - DNA, 25 bp, probe
gtacctaaaactcatctgatgtctg

SEQ ID NO: 236823 - DNA, 25 bp, probe
gtagatctaatagctgaactgattc

SEQ ID NO: 236824 - DNA, 25 bp, probe
gtactctataatgtgaactttcccc

SEQ ID NO: 236825 - DNA, 25 bp, probe
gtacctaaggccatacttactcttc

SEQ ID NO: 236826 - DNA, 25 bp, probe
gtacccaacctggtaattatcctca

SEQ ID NO: 236827 - DNA, 25 bp, probe
gtaggtaaccggcatattattccat

SEQ ID NO: 236828 - DNA, 25 bp, probe
gtaggtaaccggcatattattccat

SEQ ID NO: 236829 - DNA, 25 bp, probe
gtaggtaacatgtggtttcttgcct

SEQ ID NO: 236830 - DNA, 25 bp, probe
gtagtgccttctttggttgtgttgc

SEQ ID NO: 236831 - DNA, 25 bp, probe
gtagataatacttctgagttgggga

SEQ ID NO: 236832 - DNA, 25 bp, probe
gtagcgattcactgtaaaggaggca

SEQ ID NO: 236833 - DNA, 25 bp, probe
gtagggtcagctataaaatcagaca

SEQ ID NO: 236834 - DNA, 25 bp, probe
gtagggtgcactgacaaagtataga

SEQ ID NO: 236835 - DNA, 25 bp, probe
gtagctcggcaccaactaagaaaaa

SEQ ID NO: 236836 - DNA, 25 bp, probe
gtagcttccaaatttgaatggatta

SEQ ID NO: 236837 - DNA, 25 bp, probe
gtagcttccaaatttgaatggatta

SEQ ID NO: 236838 - DNA, 25 bp, probe
gtagtgtcccactcgataaagaaaa

SEQ ID NO: 236839 - DNA, 25 bp, probe
gtaggtcctccaaagacacgcagta

SEQ ID NO: 236840 - DNA, 25 bp, probe
gtaggacttggaaaacacatcaatc

SEQ ID NO: 236841 - DNA, 25 bp, probe
gtatgaacctgtcctaaatcaattc

SEQ ID NO: 236842 - DNA, 25 bp, probe
gtagagttttcccaaagcagtgtcc

SEQ ID NO: 236843 - DNA, 25 bp, probe
gtagagcagttttggcatgagaggg

SEQ ID NO: 236844 - DNA, 25 bp, probe
gtagacaggttagagattgtggacc

SEQ ID NO: 236845 - DNA, 25 bp, probe
gtagggggacagctgtggctggtcc

SEQ ID NO: 236846 - DNA, 25 bp, probe
gtagggggacagctgtggctggtcc

SEQ ID NO: 236847 - DNA, 25 bp, probe
gtatgtgtggaggactttgcagggg

SEQ ID NO: 236848 - DNA, 25 bp, probe
gtagtggtcctgttctatgggagtg

SEQ ID NO: 236849 - DNA, 25 bp, probe
gtatgtgagtagtcttatgtaaagt

SEQ ID NO: 236850 - DNA, 25 bp, probe
gtatggattaacttcagtccactgt

SEQ ID NO: 236851 - DNA, 25 bp, probe
gtaggatggaagtcttgtcccgcta

SEQ ID NO: 236852 - DNA, 25 bp, probe
gtaggatggaagtcttgtcccgcta

SEQ ID NO: 236853 - DNA, 25 bp, probe
gtagcttggaaggccatgaccacag

SEQ ID NO: 236854 - DNA, 25 bp, probe
gtatggggaactgctgacatcatga

SEQ ID NO: 236855 - DNA, 25 bp, probe
gtatggctgtaagtctcatggttca

SEQ ID NO: 236856 - DNA, 25 bp, probe
gtatgagctgtatctttagcatttc

SEQ ID NO: 236857 - DNA, 25 bp, probe
gtatgagctgtatctttagcatttc

SEQ ID NO: 236858 - DNA, 25 bp, probe
gtatgatgttactttatgtgaattc

SEQ ID NO: 236859 - DNA, 25 bp, probe
gtatggttgttttatgtggcaattg

SEQ ID NO: 236860 - DNA, 25 bp, probe
gtatgcgtagctttgatttggatga

SEQ ID NO: 236861 - DNA, 25 bp, probe
gtacgttgctatccaggctgtgcta

SEQ ID NO: 236862 - DNA, 25 bp, probe
gtagggatgtctcgagatgctgtaa

SEQ ID NO: 236863 - DNA, 25 bp, probe
gtaggaaggctactggcattaatta

SEQ ID NO: 236864 - DNA, 25 bp, probe
gtaggagagccttagaatttttgag

SEQ ID NO: 236865 - DNA, 25 bp, probe
gtaggctactccatgatagtgttaa

SEQ ID NO: 236866 - DNA, 25 bp, probe
gtagccccattcataagatgtctgc

SEQ ID NO: 236867 - DNA, 25 bp, probe
gtagccatcacaccattaaaaagcc

SEQ ID NO: 236868 - DNA, 25 bp, probe
gtaacacctccagagaaacgacacc

SEQ ID NO: 236869 - DNA, 25 bp, probe
gtacctcccctggatgaagatggac

SEQ ID NO: 236870 - DNA, 25 bp, probe
gtatgcttcacctagaaacagatta

SEQ ID NO: 236871 - DNA, 25 bp, probe
gtatgcattctttatagtgaagtgt

SEQ ID NO: 236872 - DNA, 25 bp, probe
gtatgcatcttttatagacgctctt

SEQ ID NO: 236873 - DNA, 25 bp, probe
gtatgcacctattgaaatatgttta

SEQ ID NO: 236874 - DNA, 25 bp, probe
gtatgcagactttgagttcctcgcc

SEQ ID NO: 236875 - DNA, 25 bp, probe
gtatggccctagcattactagatgc

SEQ ID NO: 236876 - DNA, 25 bp, probe
gtatgtccccactttgacatagctg

SEQ ID NO: 236877 - DNA, 25 bp, probe
gtagtaccgcatctctgatcaatga

SEQ ID NO: 236878 - DNA, 25 bp, probe
gtaaaccactggtcacaaatgaact

SEQ ID NO: 236879 - DNA, 25 bp, probe
gtagaagcacacaggcagaacagta

SEQ ID NO: 236880 - DNA, 25 bp, probe
gtagcaacatccaatggcacccaga

SEQ ID NO: 236881 - DNA, 25 bp, probe
gtatgaagaccacgagctccatgga

SEQ ID NO: 236882 - DNA, 25 bp, probe
gtagaagaggagggcatccagtgac

SEQ ID NO: 236883 - DNA, 25 bp, probe
gtagcagaggacgatcctccgatga

SEQ ID NO: 236884 - DNA, 25 bp, probe
gtagcagaggacgatcctccgatga

SEQ ID NO: 236885 - DNA, 25 bp, probe
gtaggacgtcgtgtcagctgtgcac

SEQ ID NO: 236886 - DNA, 25 bp, probe
gtagctactgtgcagaccacatggc

SEQ ID NO: 236887 - DNA, 25 bp, probe
gtagctactgtgcagaccacatggc

SEQ ID NO: 236888 - DNA, 25 bp, probe
gtatggccaggaagtagcacaggct

SEQ ID NO: 236889 - DNA, 25 bp, probe
gtaggctcaagaatgggcagcacag

SEQ ID NO: 236890 - DNA, 25 bp, probe
gtagggaggaggggcatgccaccta

SEQ ID NO: 236891 - DNA, 25 bp, probe
gtatggcgggaagggctggaaacag

SEQ ID NO: 236892 - DNA, 25 bp, probe
gtatggtggtgtttgggctacagta

SEQ ID NO: 236893 - DNA, 25 bp, probe
gtatgtgtggtgacttgcggattta

SEQ ID NO: 236894 - DNA, 25 bp, probe
gtatgtgtggtgacttgcggattta

SEQ ID NO: 236895 - DNA, 25 bp, probe
gtatgtaggaatcatgctggttctc

SEQ ID NO: 236896 - DNA, 25 bp, probe
gtatgtcagacatccatgtttgtaa

SEQ ID NO: 236897 - DNA, 25 bp, probe
gtatgtgaatgtgcgcattttgcat

SEQ ID NO: 236898 - DNA, 25 bp, probe
gtatgtgagagggccacattggcta

SEQ ID NO: 236899 - DNA, 25 bp, probe
gtaggatgcagggctaaattgcaaa

SEQ ID NO: 236900 - DNA, 25 bp, probe
gtaggtgaatggctagaggcaatca

SEQ ID NO: 236901 - DNA, 25 bp, probe
gtagggaagcagtatgggtgcagtc

SEQ ID NO: 236902 - DNA, 25 bp, probe
gtagatggaacagcatgtggtgaaa

SEQ ID NO: 236903 - DNA, 25 bp, probe
gtagtggaactaatatgggagaagg

SEQ ID NO: 236904 - DNA, 25 bp, probe
gtagtggaactaatatgggagaagg

SEQ ID NO: 236905 - DNA, 25 bp, probe
gtagaagatactagttgaggaggag

SEQ ID NO: 236906 - DNA, 25 bp, probe
gtagtcagagatgaggtaggtggaa

SEQ ID NO: 236907 - DNA, 25 bp, probe
gtagtgccagcagagtagggaaaac

SEQ ID NO: 236908 - DNA, 25 bp, probe
gtagtgccagagacttagcagaaaa

SEQ ID NO: 236909 - DNA, 25 bp, probe
gtagtgccagagacttagcagaaaa

SEQ ID NO: 236910 - DNA, 25 bp, probe
gtaggccatgttagcactgcaaaaa

SEQ ID NO: 236911 - DNA, 25 bp, probe
gtagcgctctgtagagccatgtaga

SEQ ID NO: 236912 - DNA, 25 bp, probe
gtagcacattgcggggcattcgtgc

SEQ ID NO: 236913 - DNA, 25 bp, probe
gtagcacaagcgatgagcaaactct

SEQ ID NO: 236914 - DNA, 25 bp, probe
gtagcaccaggcatagccacttttg

SEQ ID NO: 236915 - DNA, 25 bp, probe
gtacatcagaagagagcccttggta

SEQ ID NO: 236916 - DNA, 25 bp, probe
gtaacagggtgaagccctatgtcca

SEQ ID NO: 236917 - DNA, 25 bp, probe
gtagtcagcaggaaacgtgggtcca

SEQ ID NO: 236918 - DNA, 25 bp, probe
tggtgaaggtgaaaggcacgccgct

SEQ ID NO: 236919 - DNA, 25 bp, probe
acgccgcttgccgataacgatgatg

SEQ ID NO: 236920 - DNA, 25 bp, probe
ttgccgataacgatgatgtcgatgc

SEQ ID NO: 236921 - DNA, 25 bp, probe
acgatgatgtcgatgcctttgattt

SEQ ID NO: 236922 - DNA, 25 bp, probe
ggtcgcgcggatcatgatgccaacc

SEQ ID NO: 236923 - DNA, 25 bp, probe
ggatcatgatgccaacctcttacgt

SEQ ID NO: 236924 - DNA, 25 bp, probe
tgccaacctcttacgtgcgcctttc

SEQ ID NO: 236925 - DNA, 25 bp, probe
gcgcctttctgccggacgcgagcag

SEQ ID NO: 236926 - DNA, 25 bp, probe
gccggacgcgagcagatgaacgaac

SEQ ID NO: 236927 - DNA, 25 bp, probe
cgagcagatgaacgaacagactcag

SEQ ID NO: 236928 - DNA, 25 bp, probe
gatgaacgaacagactcaggcgatg

SEQ ID NO: 236929 - DNA, 25 bp, probe
aacagactcaggcgatgtgctttat

SEQ ID NO: 236930 - DNA, 25 bp, probe
tcaggcgatgtgctttatggcaggc

SEQ ID NO: 236931 - DNA, 25 bp, probe
gtgctttatggcaggcgcaaactcg

SEQ ID NO: 236932 - DNA, 25 bp, probe
atggcaggcgcaaactcgattttct

SEQ ID NO: 236933 - DNA, 25 bp, probe
tacggttgcaaactgctgaccacgc

SEQ ID NO: 236934 - DNA, 25 bp, probe
caaactgctgaccacgccgaatccg

SEQ ID NO: 236935 - DNA, 25 bp, probe
gacctgcaactgttccgcaaactgg

SEQ ID NO: 236936 - DNA, 25 bp, probe
gtagggtgggtcctggatgcagttg

SEQ ID NO: 236937 - DNA, 25 bp, probe
gtagggtgggtcctggatgcagttg

SEQ ID NO: 236938 - DNA, 25 bp, probe
gtagactggtgggcaatgggcgtgt

SEQ ID NO: 236939 - DNA, 25 bp, probe
gtaggctgcctgcgacagatgaggt

SEQ ID NO: 236940 - DNA, 25 bp, probe
gtatgggtgcatgttcagcatggtg

SEQ ID NO: 236941 - DNA, 25 bp, probe
gtagctggctgtactgccaaggtac

SEQ ID NO: 236942 - DNA, 25 bp, probe
gtgactagtgcttaccatactggac

SEQ ID NO: 236943 - DNA, 25 bp, probe
gtagccagtgatgcccaaattgatt

SEQ ID NO: 236944 - DNA, 25 bp, probe
gtagccagtgatgcccaaattgatt

SEQ ID NO: 236945 - DNA, 25 bp, probe
gtagggcttctaccagagattttcc

SEQ ID NO: 236946 - DNA, 25 bp, probe
gtaggtgctatgaagctgatggtct

SEQ ID NO: 236947 - DNA, 25 bp, probe
gtaggtgctatgaagctgatggtct

SEQ ID NO: 236948 - DNA, 25 bp, probe
gtagggctgcagcactgatgcccag

SEQ ID NO: 236949 - DNA, 25 bp, probe
gtatgtggtgatggagtacgccaga

SEQ ID NO: 236950 - DNA, 25 bp, probe
gtatgtgtgtgagtggtgggcaggc

SEQ ID NO: 236951 - DNA, 25 bp, probe
gtaggggcagtgatggttgccagga

SEQ ID NO: 236952 - DNA, 25 bp, probe
gtaggggcagtgatggttgccagga

SEQ ID NO: 236953 - DNA, 25 bp, probe
gtaggtgagagtcagggtgcagggt

SEQ ID NO: 236954 - DNA, 25 bp, probe
gtagggagatattcaacaggagggc

SEQ ID NO: 236955 - DNA, 25 bp, probe
gtacggtggatggcaccggagtccc

SEQ ID NO: 236956 - DNA, 25 bp, probe
gtaccgaggggaactgggtgccctg

SEQ ID NO: 236957 - DNA, 25 bp, probe
gtacccaacaggaccttgggtcctg

SEQ ID NO: 236958 - DNA, 25 bp, probe
gtacccaacaggaccttgggtcctg

SEQ ID NO: 236959 - DNA, 25 bp, probe
gtacgacagtgaggaccttagggca

SEQ ID NO: 236960 - DNA, 25 bp, probe
gtcactgaaagaggtgtcggaggcc

SEQ ID NO: 236961 - DNA, 25 bp, probe
gtacgcacaaaggagggagaaccac

SEQ ID NO: 236962 - DNA, 25 bp, probe
gtacccagctggttgggaggaccag

SEQ ID NO: 236963 - DNA, 25 bp, probe
gtagccttcggggtgaaggtccaca

SEQ ID NO: 236964 - DNA, 25 bp, probe
gtacatgttcgggtgtgggttctac

SEQ ID NO: 236965 - DNA, 25 bp, probe
gtagagttcctggttgcttttcata

SEQ ID NO: 236966 - DNA, 25 bp, probe
gtaggttgctatggttttatctaac

SEQ ID NO: 236967 - DNA, 25 bp, probe
gtagtaggtatggttctcataccag

SEQ ID NO: 236968 - DNA, 25 bp, probe
gtatgtggggacacccatggccagt

SEQ ID NO: 236969 - DNA, 25 bp, probe
gtatgtggggacacccatggccagt

SEQ ID NO: 236970 - DNA, 25 bp, probe
gtagttgatgtatccaacaagccag

SEQ ID NO: 236971 - DNA, 25 bp, probe
gtaggcaatttcttgcaaccaccac

SEQ ID NO: 236972 - DNA, 25 bp, probe
gtagtaatgttaatcacatacacca

SEQ ID NO: 236973 - DNA, 25 bp, probe
gtagatcaatgtttaactcagctca

SEQ ID NO: 236974 - DNA, 25 bp, probe
gtagtcagtatggctcaaccagcca

SEQ ID NO: 236975 - DNA, 25 bp, probe
gtagtcacatatataagcactgcac

SEQ ID NO: 236976 - DNA, 25 bp, probe
gtagtcacatatataagcactgcac

SEQ ID NO: 236977 - DNA, 25 bp, probe
gtagcccatgtggaaagcttgcagg

SEQ ID NO: 236978 - DNA, 25 bp, probe
gtaggcatttggtagagcttggggg

SEQ ID NO: 236979 - DNA, 25 bp, probe
gtaggatttgggtatctctctttgc

SEQ ID NO: 236980 - DNA, 25 bp, probe
gtaggatttgccatcatgtttttta

SEQ ID NO: 236981 - DNA, 25 bp, probe
gtaggatgtttcagtggtcttttct

SEQ ID NO: 236982 - DNA, 25 bp, probe
gtagttctgtttggtgtgtcccatt

SEQ ID NO: 236983 - DNA, 25 bp, probe
gtagttctgctgaatcctattccta

SEQ ID NO: 236984 - DNA, 25 bp, probe
gtagttctgctgaatcctattccta

SEQ ID NO: 236985 - DNA, 25 bp, probe
gtatggttgctagcttcagctccaa

SEQ ID NO: 236986 - DNA, 25 bp, probe
gtaggtggtacatgtgtcccacacc

SEQ ID NO: 236987 - DNA, 25 bp, probe
gtaggtggtacatgtgtcccacacc

SEQ ID NO: 236988 - DNA, 25 bp, probe
gtagagtagtgttagatgatccaaa

SEQ ID NO: 236989 - DNA, 25 bp, probe
gtagcactcagataagtatacagcg

SEQ ID NO: 236990 - DNA, 25 bp, probe
gtagcctcaaggtacttcaagggac

SEQ ID NO: 236991 - DNA, 25 bp, probe
gtacctctaaggactctagaaagtc

SEQ ID NO: 236992 - DNA, 25 bp, probe
gtacctctaaggactctagaaagtc

SEQ ID NO: 236993 - DNA, 25 bp, probe
gtaactcaaggctaccaagtgaagc

SEQ ID NO: 236994 - DNA, 25 bp, probe
gtacaccaaacttccaggaggaggc

SEQ ID NO: 236995 - DNA, 25 bp, probe
gtgaccctagtcaccagaattcagg

SEQ ID NO: 236996 - DNA, 25 bp, probe
gtacccaaatcgtcttatattaggg

SEQ ID NO: 236997 - DNA, 25 bp, probe
gtaccgtggatctgtttaacgtggc

SEQ ID NO: 236998 - DNA, 25 bp, probe
gtaccgtggatctgtttaacgtggc

SEQ ID NO: 236999 - DNA, 25 bp, probe
gtaccgagtgatccgtcatacgaag

SEQ ID NO: 237000 - DNA, 25 bp, probe
gtacctcattgacaggcacctaagc

SEQ ID NO: 237001 - DNA, 25 bp, probe
gtagtctcataaccaggatattgac

SEQ ID NO: 237002 - DNA, 25 bp, probe
gtagatatttcaccaagaattgcag

SEQ ID NO: 237003 - DNA, 25 bp, probe
gtatggtgagtcccaagatctctgc

SEQ ID NO: 237004 - DNA, 25 bp, probe
gtacgctgatcttggcaaatctgcc

SEQ ID NO: 237005 - DNA, 25 bp, probe
gtagatgtatttggctccactccat

SEQ ID NO: 237006 - DNA, 25 bp, probe
gtagtgtagtcaggtgctcaatgga

SEQ ID NO: 237007 - DNA, 25 bp, probe
gtagttgagcctgaccatgagtctt

SEQ ID NO: 237008 - DNA, 25 bp, probe
gtagttgagcctgaccatgagtctt

SEQ ID NO: 237009 - DNA, 25 bp, probe
gtagaatcaggttcacgtggtgctt

SEQ ID NO: 237010 - DNA, 25 bp, probe
gtatgtgatgactgtgacggggcta

SEQ ID NO: 237011 - DNA, 25 bp, probe
gtatgtgatgactgtgacggggcta

SEQ ID NO: 237012 - DNA, 25 bp, probe
gtaccgacaatggtctggggtattt

SEQ ID NO: 237013 - DNA, 25 bp, probe
gtaccagatcagtagttggcttgtg

SEQ ID NO: 237014 - DNA, 25 bp, probe
gtagctcttcagagtctgaccgtaa

SEQ ID NO: 237015 - DNA, 25 bp, probe
gtagctctgaaggtgatcaggctgc

SEQ ID NO: 237016 - DNA, 25 bp, probe
gtagctctgaaggtgatcaggctgc

SEQ ID NO: 237017 - DNA, 25 bp, probe
gtagtggagatgaagcatagctgag

SEQ ID NO: 237018 - DNA, 25 bp, probe
gtagtggagatgaagcatagctgag

SEQ ID NO: 237019 - DNA, 25 bp, probe
gtagtcaggtgctcaatggagaata

SEQ ID NO: 237020 - DNA, 25 bp, probe
gtagctagcgtgtgccaggcagatc

SEQ ID NO: 237021 - DNA, 25 bp, probe
gtagtagcactgtttgaggagcact

SEQ ID NO: 237022 - DNA, 25 bp, probe
gtagcggcaatgtttgagcggcaca

SEQ ID NO: 237023 - DNA, 25 bp, probe
gtagctgatgctaagttggttctcc

SEQ ID NO: 237024 - DNA, 25 bp, probe
gtatggagcttcggggtgatcctct

SEQ ID NO: 237025 - DNA, 25 bp, probe
gtatggagcttcggggtgatcctct

SEQ ID NO: 237026 - DNA, 25 bp, probe
gtatggagcttcggggtgatcctct

SEQ ID NO: 237027 - DNA, 25 bp, probe
gtatggagcttcggggtgatcctct

SEQ ID NO: 237028 - DNA, 25 bp, probe
gtatggagtacagctgtctggcctc

SEQ ID NO: 237029 - DNA, 25 bp, probe
gtatggtgaacagtgctcttgtggt

SEQ ID NO: 237030 - DNA, 25 bp, probe
gtaggtacacagtcttatgttgctt

SEQ ID NO: 237031 - DNA, 25 bp, probe
gtaggtattcattttgagtaggttg

SEQ ID NO: 237032 - DNA, 25 bp, probe
gtaggtttcatggttacgacctggt

SEQ ID NO: 237033 - DNA, 25 bp, probe
gtaggtctcactgtaacaactattt

SEQ ID NO: 237034 - DNA, 25 bp, probe
gtaggtctcactgtaacaactattt

SEQ ID NO: 237035 - DNA, 25 bp, probe
gtaggtcatcctcgtaaacatatca

SEQ ID NO: 237036 - DNA, 25 bp, probe
gtagtgattgctagcttaataaata

SEQ ID NO: 237037 - DNA, 25 bp, probe
gtaagctggcaagatttaaaaaact

SEQ ID NO: 237038 - DNA, 25 bp, probe
gtacctggcacagtggttagaaaag

SEQ ID NO: 237039 - DNA, 25 bp, probe
gtacctggcgaggaagtacaaccgc

SEQ ID NO: 237040 - DNA, 25 bp, probe
gtagccgtctgctggagtatacacc

SEQ ID NO: 237041 - DNA, 25 bp, probe
gtagccgtctgctggagtatacacc

SEQ ID NO: 237042 - DNA, 25 bp, probe
gtagccgtctgctggagtatacacc

SEQ ID NO: 237043 - DNA, 25 bp, probe
gtacgtgctagccggaaaccatgac

SEQ ID NO: 237044 - DNA, 25 bp, probe
gtacgcctctggccgtaccactggc

SEQ ID NO: 237045 - DNA, 25 bp, probe
gtaccacttttgctacgatgtggcc

SEQ ID NO: 237046 - DNA, 25 bp, probe
gtaccctgctttgctttggatggac

SEQ ID NO: 237047 - DNA, 25 bp, probe
gtaccgggcgatgcttgtgcctgag

SEQ ID NO: 237048 - DNA, 25 bp, probe
gtactcagggcattctgttggccta

SEQ ID NO: 237049 - DNA, 25 bp, probe
gtaccggcatgttatgttacccaga

SEQ ID NO: 237050 - DNA, 25 bp, probe
gtagctacgctaatggttaacctga

SEQ ID NO: 237051 - DNA, 25 bp, probe
gtactacgtagggcttctaccagag

SEQ ID NO: 237052 - DNA, 25 bp, probe
gtacggggagaggccctattgggat

SEQ ID NO: 237053 - DNA, 25 bp, probe
gtaccacgaagctaccttttgggat

SEQ ID NO: 237054 - DNA, 25 bp, probe
gtaccacgaagctaccttttgggat

SEQ ID NO: 237055 - DNA, 25 bp, probe
gtagttcagatagagatattttggg

SEQ ID NO: 237056 - DNA, 25 bp, probe
gtaggtctgattgagcttgtgttgt

SEQ ID NO: 237057 - DNA, 25 bp, probe
gtaggtctgattgagcttgtgttgt

SEQ ID NO: 237058 - DNA, 25 bp, probe
gtaggctggagagacattgtgggtg

SEQ ID NO: 237059 - DNA, 25 bp, probe
gtacgcggcaaggaattgtttggtc

SEQ ID NO: 237060 - DNA, 25 bp, probe
gtacgcggcaaggaattgtttggtc

SEQ ID NO: 237061 - DNA, 25 bp, probe
gtaggcggaagggatggcgatcagg

SEQ ID NO: 237062 - DNA, 25 bp, probe
gtacgtagaagaggagggcatccag

SEQ ID NO: 237063 - DNA, 25 bp, probe
gtactctaataggggcggctcaggc

SEQ ID NO: 237064 - DNA, 25 bp, probe
gtagctctaacaggttggaccaagc

SEQ ID NO: 237065 - DNA, 25 bp, probe
gtagaccacatctgttcgtctgcac

SEQ ID NO: 237066 - DNA, 25 bp, probe
gtagacagactttgtatagttcact

SEQ ID NO: 237067 - DNA, 25 bp, probe
gtagacagactttgtatagttcact

SEQ ID NO: 237068 - DNA, 25 bp, probe
gtagctcagacctgtttttatttgc

SEQ ID NO: 237069 - DNA, 25 bp, probe
gtactaacatcatactactcttttg

SEQ ID NO: 237070 - DNA, 25 bp, probe
gtactaacatcatactactcttttg

SEQ ID NO: 237071 - DNA, 25 bp, probe
gtagatggaatagaagcccttgttg

SEQ ID NO: 237072 - DNA, 25 bp, probe
gtagtggataagcagttgccagtga

SEQ ID NO: 237073 - DNA, 25 bp, probe
gtagagatgattcggatttgacaaa

SEQ ID NO: 237074 - DNA, 25 bp, probe
gtagactttgcgcttgatgaagaag

SEQ ID NO: 237075 - DNA, 25 bp, probe
gtagagtttgcacctggggaagcag

SEQ ID NO: 237076 - DNA, 25 bp, probe
gtagagtttgcacctggggaagcag

SEQ ID NO: 237077 - DNA, 25 bp, probe
gtaaggcccaggggttgcactgagt

SEQ ID NO: 237078 - DNA, 25 bp, probe
gtaaggccacagtaatcaagcaagg

SEQ ID NO: 237079 - DNA, 25 bp, probe
gtaaggccacagtaatcaagcaagg

SEQ ID NO: 237080 - DNA, 25 bp, probe
gtactggccaacagatgaccaagag

SEQ ID NO: 237081 - DNA, 25 bp, probe
gtagcttgctcaacaggtgacctta

SEQ ID NO: 237082 - DNA, 25 bp, probe
gtcagttgctcaaaaggtcaatgaa

SEQ ID NO: 237083 - DNA, 25 bp, probe
gtcagttgctcaaaaggtcaatgaa

SEQ ID NO: 237084 - DNA, 25 bp, probe
gtagttgtatatttgtaagatgaca

SEQ ID NO: 237085 - DNA, 25 bp, probe
gtaggcttgttctgttgagtggcac

SEQ ID NO: 237086 - DNA, 25 bp, probe
gtaggcttggcagtgggctgcagtg

SEQ ID NO: 237087 - DNA, 25 bp, probe
gtagagccgagcagtgggggtggtt

SEQ ID NO: 237088 - DNA, 25 bp, probe
gtagtgcctgatcaatgagggcggg

SEQ ID NO: 237089 - DNA, 25 bp, probe
gtagtgcctgatcaatgagggcggg

SEQ ID NO: 237090 - DNA, 25 bp, probe
gtagctgactacagatgtgtgaggg

SEQ ID NO: 237091 - DNA, 25 bp, probe
gtacgacatgatcctactgcggagt

SEQ ID NO: 237092 - DNA, 25 bp, probe
gtaggcatgcagtgatagctgtgtg

SEQ ID NO: 237093 - DNA, 25 bp, probe
gtagtgtcagaggatactgtggctt

SEQ ID NO: 237094 - DNA, 25 bp, probe
gtagtgggcattacactgcttctgt

SEQ ID NO: 237095 - DNA, 25 bp, probe
gtagctgggattacaggcacgtgcc

SEQ ID NO: 237096 - DNA, 25 bp, probe
gtagctggagacctaggcagtctgc

SEQ ID NO: 237097 - DNA, 25 bp, probe
gtagatgggccgacacacacttggc

SEQ ID NO: 237098 - DNA, 25 bp, probe
gtagatgggccgacacacacttggc

SEQ ID NO: 237099 - DNA, 25 bp, probe
gtagaggagccgtcaaatccagagg

SEQ ID NO: 237100 - DNA, 25 bp, probe
gtagaggatgccacatctgaccttg

SEQ ID NO: 237101 - DNA, 25 bp, probe
gtagatgcaaacaccatacatctgg

SEQ ID NO: 237102 - DNA, 25 bp, probe
gtagatcaacaattctttttggggg

SEQ ID NO: 237103 - DNA, 25 bp, probe
gtagacactaattctgtcagtaggg

SEQ ID NO: 237104 - DNA, 25 bp, probe
gtagaaaaattgcctgcatgatatg

SEQ ID NO: 237105 - DNA, 25 bp, probe
gtagaactagcacgcatcaagaatg

SEQ ID NO: 237106 - DNA, 25 bp, probe
gtagctatcaaggccatcaatgaag

SEQ ID NO: 237107 - DNA, 25 bp, probe
gtagctgtcaagaccacacgatttg

SEQ ID NO: 237108 - DNA, 25 bp, probe
gtagttatagtggctgctaatttac

SEQ ID NO: 237109 - DNA, 25 bp, probe
gtagttgatatgctatgtcaatctc

SEQ ID NO: 237110 - DNA, 25 bp, probe
gtaggtgaatgcagattccatcgct

SEQ ID NO: 237111 - DNA, 25 bp, probe
gtaggtgaatgcaaactccatcgtt

SEQ ID NO: 237112 - DNA, 25 bp, probe
gtagctgtgaagatactcaatcgac

SEQ ID NO: 237113 - DNA, 25 bp, probe
gtagctgtgaaatccatatatatga

SEQ ID NO: 237114 - DNA, 25 bp, probe
gtagctgtgaaatccatatatatga

SEQ ID NO: 237115 - DNA, 25 bp, probe
gtagctctaggtttcttgatgatca

SEQ ID NO: 237116 - DNA, 25 bp, probe
gtagctctaggtttcttgatgatca

SEQ ID NO: 237117 - DNA, 25 bp, probe
gtagctcattttctgccgatgaaga

SEQ ID NO: 237118 - DNA, 25 bp, probe
gtagctcattttctgccgatgaaga

SEQ ID NO: 237119 - DNA, 25 bp, probe
gtagccttgtccagacgaagtgacg

SEQ ID NO: 237120 - DNA, 25 bp, probe
gggcctttctcagaagactgtaatg

SEQ ID NO: 237121 - DNA, 25 bp, probe
gggccttgggcgtaacgctatactg

SEQ ID NO: 237122 - DNA, 25 bp, probe
gggccttgggcgtaacgctatactg

SEQ ID NO: 237123 - DNA, 25 bp, probe
gtagcctgtgaagaaaccttacatg

SEQ ID NO: 237124 - DNA, 25 bp, probe
gtagccagtgaagcagttcgtgcta

SEQ ID NO: 237125 - DNA, 25 bp, probe
gtagaattgaaaatgcattagggaa

SEQ ID NO: 237126 - DNA, 25 bp, probe
gtagatttgaagtacagtggtgaaa

SEQ ID NO: 237127 - DNA, 25 bp, probe
gtagctttgagggatcagttcttaa

SEQ ID NO: 237128 - DNA, 25 bp, probe
gtagctttgagggatcagttcttaa

SEQ ID NO: 237129 - DNA, 25 bp, probe
gtactttaccatatgttgctccaga

SEQ ID NO: 237130 - DNA, 25 bp, probe
gtagcttatcccaagtcaaagccct

SEQ ID NO: 237131 - DNA, 25 bp, probe
gtagctctgagctcagaccaaccac

SEQ ID NO: 237132 - DNA, 25 bp, probe
gtagcttcatgaccaaagcagtccc

SEQ ID NO: 237133 - DNA, 25 bp, probe
gtagcttcatgaccaaagcagtccc

SEQ ID NO: 237134 - DNA, 25 bp, probe
gtgagtgccagggttatcgatcccc

SEQ ID NO: 237135 - DNA, 25 bp, probe
gtagtgactgcggatgtttacactg

SEQ ID NO: 237136 - DNA, 25 bp, probe
gtacgagctgcaggaggttatcggc

SEQ ID NO: 237137 - DNA, 25 bp, probe
gtagctgagggcatggcctacatgg

SEQ ID NO: 237138 - DNA, 25 bp, probe
gtagcgaaggcactgggtgcacggg

SEQ ID NO: 237139 - DNA, 25 bp, probe
gtacgggcagcacaggtgaaggcga

SEQ ID NO: 237140 - DNA, 25 bp, probe
gtaaaggcagccaggcgtgagcagc

SEQ ID NO: 237141 - DNA, 25 bp, probe
gtaaaggcagccaggcgtgagcagc

SEQ ID NO: 237142 - DNA, 25 bp, probe
gtagtaggctccaaggattgacaaa

SEQ ID NO: 237143 - DNA, 25 bp, probe
gtagtactctgggcgatatttgcaa

SEQ ID NO: 237144 - DNA, 25 bp, probe
gtagtactctgggcgatatttgcaa

SEQ ID NO: 237145 - DNA, 25 bp, probe
gtagtcctgcggtgatattctatct

SEQ ID NO: 237146 - DNA, 25 bp, probe
gtagtcgtcaagttgcagatctttt

SEQ ID NO: 237147 - DNA, 25 bp, probe
gtagctgtgtcatgtatataccttt

SEQ ID NO: 237148 - DNA, 25 bp, probe
gtagctgattctggaagcaacgttc

SEQ ID NO: 237149 - DNA, 25 bp, probe
gtacttggtagacatgcagcgcttc

SEQ ID NO: 237150 - DNA, 25 bp, probe
gtacttgtgtcatccagaatgtttt

SEQ ID NO: 237151 - DNA, 25 bp, probe
gtactggggagaaataattgttgat

SEQ ID NO: 237152 - DNA, 25 bp, probe
gtaccagccaggagaaaatttataa

SEQ ID NO: 237153 - DNA, 25 bp, probe
gtaccagccaggagaaaatttataa

SEQ ID NO: 237154 - DNA, 25 bp, probe
gtaccagcccatgaacaaattcctg

SEQ ID NO: 237155 - DNA, 25 bp, probe
gtaccaggcagagaactgaagtact

SEQ ID NO: 237156 - DNA, 25 bp, probe
gtagcccgcaagattgtgaagatga

SEQ ID NO: 237157 - DNA, 25 bp, probe
gtacccagcaagcctgcaatgcaaa

SEQ ID NO: 237158 - DNA, 25 bp, probe
gtactgcctgggctaatgctcaaag

SEQ ID NO: 237159 - DNA, 25 bp, probe
gtagtggtctactttatccagaacc

SEQ ID NO: 237160 - DNA, 25 bp, probe
gtagtacttaatagtacccaacctg

SEQ ID NO: 237161 - DNA, 25 bp, probe
gtagtacttaatagtacccaacctg

SEQ ID NO: 237162 - DNA, 25 bp, probe
gtagtatttcaaatttccttccttg

SEQ ID NO: 237163 - DNA, 25 bp, probe
gtagtccttcagatctttctttgta

SEQ ID NO: 237164 - DNA, 25 bp, probe
gtagttttcatgacaattttatatt

SEQ ID NO: 237165 - DNA, 25 bp, probe
gtagcattttttaaattgtgcatga

SEQ ID NO: 237166 - DNA, 25 bp, probe
gtactcctttctaggaatgctgatt

SEQ ID NO: 237167 - DNA, 25 bp, probe
gtactacttccaaggtggctagtgt

SEQ ID NO: 237168 - DNA, 25 bp, probe
gtactacaacgctggtgaaatttat

SEQ ID NO: 237169 - DNA, 25 bp, probe
gtactacaacgctggtgaaatttat

SEQ ID NO: 237170 - DNA, 25 bp, probe
gtaccacagcccgggtgagaagtaa

SEQ ID NO: 237171 - DNA, 25 bp, probe
gtacctcgccgagggtgagacggac

SEQ ID NO: 237172 - DNA, 25 bp, probe
gtacctcgccgagggtgagacggac

SEQ ID NO: 237173 - DNA, 25 bp, probe
gtactcatggctcacgggagggaag

SEQ ID NO: 237174 - DNA, 25 bp, probe
gtactcagtgatgaagggccggata

SEQ ID NO: 237175 - DNA, 25 bp, probe
gtacttggaaaaaggccgcatgatc

SEQ ID NO: 237176 - DNA, 25 bp, probe
gtactactaatattattcctggtct

SEQ ID NO: 237177 - DNA, 25 bp, probe
gtactacctgcatataaccatggga

SEQ ID NO: 237178 - DNA, 25 bp, probe
gtagcatcaccatctgtaaaaggaa

SEQ ID NO: 237179 - DNA, 25 bp, probe
gtagcatcaccatctgtaaaaggaa

SEQ ID NO: 237180 - DNA, 25 bp, probe
gtagcatcacaaactcgaaccaaag

SEQ ID NO: 237181 - DNA, 25 bp, probe
gtcacatccaactggaaattccagg

SEQ ID NO: 237182 - DNA, 25 bp, probe
gtaccatacgccgtgaaatgtccac

SEQ ID NO: 237183 - DNA, 25 bp, probe
gtacctatggtcgtgtatataaagc

SEQ ID NO: 237184 - DNA, 25 bp, probe
gtacctatggtcgtgtatataaagc

SEQ ID NO: 237185 - DNA, 25 bp, probe
gtaccaagctatctttgataatacc

SEQ ID NO: 237186 - DNA, 25 bp, probe
gtaccaagctatctttgataatacc

SEQ ID NO: 237187 - DNA, 25 bp, probe
gtaccaaggtggctgtgaaaaccct

SEQ ID NO: 237188 - DNA, 25 bp, probe
gtaacaaggtgtcttttccactcct

SEQ ID NO: 237189 - DNA, 25 bp, probe
gtacacccctgtgttttgaatcctc

SEQ ID NO: 237190 - DNA, 25 bp, probe
gtaacccacattctgttcaggatac

SEQ ID NO: 237191 - DNA, 25 bp, probe
gtacctgggctctgtttcagagaac

SEQ ID NO: 237192 - DNA, 25 bp, probe
gtacctgggctctgtttcagagaac

SEQ ID NO: 237193 - DNA, 25 bp, probe
gtactcgggctctgactacagaagt

SEQ ID NO: 237194 - DNA, 25 bp, probe
gtacggggctaccactgtggtgcgt

SEQ ID NO: 237195 - DNA, 25 bp, probe
gtactgggacttggcatttaggatt

SEQ ID NO: 237196 - DNA, 25 bp, probe
gtagtaggcactgttgattcaaatt

SEQ ID NO: 237197 - DNA, 25 bp, probe
gtagtaggcactgttgattcaaatt

SEQ ID NO: 237198 - DNA, 25 bp, probe
gtagttgacgctgggaatgaaaatt

SEQ ID NO: 237199 - DNA, 25 bp, probe
gtagattacctcggataccacaagt

SEQ ID NO: 237200 - DNA, 25 bp, probe
gtagaataattcgctatccagatag

SEQ ID NO: 237201 - DNA, 25 bp, probe
gtagaattctttgcagccagagttg

SEQ ID NO: 237202 - DNA, 25 bp, probe
gtcatgaactatatccgtaacctgg

SEQ ID NO: 237203 - DNA, 25 bp, probe
gtaccaagagttccgtaaacagtgt

SEQ ID NO: 237204 - DNA, 25 bp, probe
gtgtgtaaaggtattagaactgata

SEQ ID NO: 237205 - DNA, 25 bp, probe
gtagttactgctgtttaggaatata

SEQ ID NO: 237206 - DNA, 25 bp, probe
gtagcttcctctggttttcaagtaa

SEQ ID NO: 237207 - DNA, 25 bp, probe
gtacatttctttcgtgttcaaacca

SEQ ID NO: 237208 - DNA, 25 bp, probe
gtacatttctttcgtgttcaaacca

SEQ ID NO: 237209 - DNA, 25 bp, probe
gtacagttacccgtttcaatgttat

SEQ ID NO: 237210 - DNA, 25 bp, probe
gtacggaccccacttacaatgaaat

SEQ ID NO: 237211 - DNA, 25 bp, probe
gtcgctgcagacgcgccaataaaaa

SEQ ID NO: 237212 - DNA, 25 bp, probe
gtagagcagagcctgaccctaaaaa

SEQ ID NO: 237213 - DNA, 25 bp, probe
gtagagtggccaagcttcctaagaa

SEQ ID NO: 237214 - DNA, 25 bp, probe
gtaagtggcagctgctctatttaat

SEQ ID NO: 237215 - DNA, 25 bp, probe
gtagagctgagaccgtccttgttga

SEQ ID NO: 237216 - DNA, 25 bp, probe
gtagagtggcccagaattgcattct

SEQ ID NO: 237217 - DNA, 25 bp, probe
gtagcggggtcaggacaatcatctc

SEQ ID NO: 237218 - DNA, 25 bp, probe
gtagctgagaggctaaaactcatca

SEQ ID NO: 237219 - DNA, 25 bp, probe
gtcagacaatggctataaactgaat

SEQ ID NO: 237220 - DNA, 25 bp, probe
gtagaatcttgtttgtaggctgaat

SEQ ID NO: 237221 - DNA, 25 bp, probe
ggttgctctgtcttctttagcaaaa

SEQ ID NO: 237222 - DNA, 25 bp, probe
gtacaatgttcccttgtggccaaat

SEQ ID NO: 237223 - DNA, 25 bp, probe
gtacaaggactcatctgtggtccct

SEQ ID NO: 237224 - DNA, 25 bp, probe
gtacagggcagcccaatctggtccc

SEQ ID NO: 237225 - DNA, 25 bp, probe
gtagtcatgaacccacatctatgtc

SEQ ID NO: 237226 - DNA, 25 bp, probe
gtaattacactggacctaggcaaaa

SEQ ID NO: 237227 - DNA, 25 bp, probe
gtagagttattggagacatatagct

SEQ ID NO: 237228 - DNA, 25 bp, probe
gtagatttcttgacagtgctgtaat

SEQ ID NO: 237229 - DNA, 25 bp, probe
gtacttctgtgtgcaattgtaaaca

SEQ ID NO: 237230 - DNA, 25 bp, probe
gtacgcctttggtatctgaccataa

SEQ ID NO: 237231 - DNA, 25 bp, probe
gtacagttcctgggtgtgacaaaag

SEQ ID NO: 237232 - DNA, 25 bp, probe
gtactgtgaacgtcgtgtgactcag

SEQ ID NO: 237233 - DNA, 25 bp, probe
gtactgtgaacgtcgtgtgactcag

SEQ ID NO: 237234 - DNA, 25 bp, probe
gtacctgatgacgcgtggactgacc

SEQ ID NO: 237235 - DNA, 25 bp, probe
gtacttgcagacagggaagctgagc

SEQ ID NO: 237236 - DNA, 25 bp, probe
gtacgtgcaggaagagcggctttga

SEQ ID NO: 237237 - DNA, 25 bp, probe
gtacagacagagaagcacgtgtttg

SEQ ID NO: 237238 - DNA, 25 bp, probe
gtagcagaaggcagtcagtgctggt

SEQ ID NO: 237239 - DNA, 25 bp, probe
gtagcagaaggcagtcagtgctggt

SEQ ID NO: 237240 - DNA, 25 bp, probe
gtacaggcaggaggatcagagggaa

SEQ ID NO: 237241 - DNA, 25 bp, probe
gtagaggcgctgggcagagagtcaa

SEQ ID NO: 237242 - DNA, 25 bp, probe
gtagaggcgctgggcagagagtcaa

SEQ ID NO: 237243 - DNA, 25 bp, probe
gtagccggccagtcgaggctacagg

SEQ ID NO: 237244 - DNA, 25 bp, probe
gggccggccagtcagaggccggctg

SEQ ID NO: 237245 - DNA, 25 bp, probe
gggccggccagtcagaggccggctg

SEQ ID NO: 237246 - DNA, 25 bp, probe
gtagacctagttccaggatccatgg

SEQ ID NO: 237247 - DNA, 25 bp, probe
gtagacctttaatggagacatgcat

SEQ ID NO: 237248 - DNA, 25 bp, probe
gtagacctttaatggagacatgcat

SEQ ID NO: 237249 - DNA, 25 bp, probe
gtagaggctattcaaggttatcaag

SEQ ID NO: 237250 - DNA, 25 bp, probe
gtagagaatttggaaactgtagaag

SEQ ID NO: 237251 - DNA, 25 bp, probe
gtagcccaagtgataacttcgaagc

SEQ ID NO: 237252 - DNA, 25 bp, probe
gtagacctcgaggctaagtttcaag

SEQ ID NO: 237253 - DNA, 25 bp, probe
gtagactgtcccgaaaatattaagt

SEQ ID NO: 237254 - DNA, 25 bp, probe
gtagacctcctgcaaaccaggtttg

SEQ ID NO: 237255 - DNA, 25 bp, probe
gtagacctcctgcaaaccaggtttg

SEQ ID NO: 237256 - DNA, 25 bp, probe
gtagaacactttcaaagaggtttga

SEQ ID NO: 237257 - DNA, 25 bp, probe
gtagaccacgctttaaagaagtttg

SEQ ID NO: 237258 - DNA, 25 bp, probe
gtagaccacgctttaaagaagtttg

SEQ ID NO: 237259 - DNA, 25 bp, probe
gtaccctcctaataagaactgtgtg

SEQ ID NO: 237260 - DNA, 25 bp, probe
gtacccttacatataaacactggag

SEQ ID NO: 237261 - DNA, 25 bp, probe
gtagcccattatataagaagaccga

SEQ ID NO: 237262 - DNA, 25 bp, probe
gtacttcctgccataaaactccaga

SEQ ID NO: 237263 - DNA, 25 bp, probe
gtactgtttaaataatgagtcaaga

SEQ ID NO: 237264 - DNA, 25 bp, probe
gtacttttactatatctacatacat

SEQ ID NO: 237265 - DNA, 25 bp, probe
gtacctttgaacttatcaacgtcat

SEQ ID NO: 237266 - DNA, 25 bp, probe
gtaccttatatagaacagcatcagt

SEQ ID NO: 237267 - DNA, 25 bp, probe
gtaccaatcatcttgggacagccag

SEQ ID NO: 237268 - DNA, 25 bp, probe
gtacgcaattcagtggtctagtcct

SEQ ID NO: 237269 - DNA, 25 bp, probe
gtactgcaattcgggaaatttctct

SEQ ID NO: 237270 - DNA, 25 bp, probe
gtagtaattctgtgacatacttttt

SEQ ID NO: 237271 - DNA, 25 bp, probe
gtaaatacacagtgaaattgtcttt

SEQ ID NO: 237272 - DNA, 25 bp, probe
gtagaaacagtgttgccatattctc

SEQ ID NO: 237273 - DNA, 25 bp, probe
gtagatgcacaccttgtgccactgg

SEQ ID NO: 237274 - DNA, 25 bp, probe
gtagcagcacctactatgcttcagg

SEQ ID NO: 237275 - DNA, 25 bp, probe
gtcactaccagtctgcttagtttta

SEQ ID NO: 237276 - DNA, 25 bp, probe
gtacaaccctagcctgataggttta

SEQ ID NO: 237277 - DNA, 25 bp, probe
gtacaaccctagcctgataggttta

SEQ ID NO: 237278 - DNA, 25 bp, probe
gtgataacttcgaagccatagggtg

SEQ ID NO: 237279 - DNA, 25 bp, probe
gtgaaaaatgctctcgtaggtggcc

SEQ ID NO: 237280 - DNA, 25 bp, probe
gtagagacaaggctcagccagtggc

SEQ ID NO: 237281 - DNA, 25 bp, probe
gtacgccagcagctttacgctggct

SEQ ID NO: 237282 - DNA, 25 bp, probe
gtaccccagaagccatatcctgaca

SEQ ID NO: 237283 - DNA, 25 bp, probe
gtacaggcggattagctatcttcca

SEQ ID NO: 237284 - DNA, 25 bp, probe
gtaccgcaatgtgacttaatgccac

SEQ ID NO: 237285 - DNA, 25 bp, probe
ggacaccagtgaaacttgaaccggg

SEQ ID NO: 237286 - DNA, 25 bp, probe
gtaccgcctgggacggaagatcggg

SEQ ID NO: 237287 - DNA, 25 bp, probe
gtactggaagggctggaatatctgc

SEQ ID NO: 237288 - DNA, 25 bp, probe
gtacatgtactggaagtggataacc

SEQ ID NO: 237289 - DNA, 25 bp, probe
gtacttcagggatttgccaattcca

SEQ ID NO: 237290 - DNA, 25 bp, probe
gtacaatcaggggttgtacctccat

SEQ ID NO: 237291 - DNA, 25 bp, probe
gtacagataacctgatctaccaagt

SEQ ID NO: 237292 - DNA, 25 bp, probe
gtactgtaacactgactgacgagga

SEQ ID NO: 237293 - DNA, 25 bp, probe
gtacctaatcacagactatcatgaa

SEQ ID NO: 237294 - DNA, 25 bp, probe
gtacctcaccaacggcatcatgtga

SEQ ID NO: 237295 - DNA, 25 bp, probe
gtactgtccgcaaggttcatgtgac

SEQ ID NO: 237296 - DNA, 25 bp, probe
gtactgtatagacagtttgtaaatg

SEQ ID NO: 237297 - DNA, 25 bp, probe
gtactgtatcaaactattttacatg

SEQ ID NO: 237298 - DNA, 25 bp, probe
gtactgtatcagaacaatggattat

SEQ ID NO: 237299 - DNA, 25 bp, probe
gtagcttacctgacacaagaggaat

SEQ ID NO: 237300 - DNA, 25 bp, probe
gtactatcacctctcaaaagcattc

SEQ ID NO: 237301 - DNA, 25 bp, probe
gtactactgcctctgcagcacaaat

SEQ ID NO: 237302 - DNA, 25 bp, probe
gtacatcctcagtcgtgagatcaag

SEQ ID NO: 237303 - DNA, 25 bp, probe
gtaccagacctgctagagaaggggg

SEQ ID NO: 237304 - DNA, 25 bp, probe
gtaccagacctgctagagaaggggg

SEQ ID NO: 237305 - DNA, 25 bp, probe
gtactggaactgcatcccaaggagc

SEQ ID NO: 237306 - DNA, 25 bp, probe
gtactcgacctgtaccagcgagggc

SEQ ID NO: 237307 - DNA, 25 bp, probe
gtagctggacccacgaggaggaacc

SEQ ID NO: 237308 - DNA, 25 bp, probe
gtacttgacaccccagggaggagct

SEQ ID NO: 237309 - DNA, 25 bp, probe
gtacttactgcaatgctcgctggag

SEQ ID NO: 237310 - DNA, 25 bp, probe
gtacatttcatcactcagtgtatgc

SEQ ID NO: 237311 - DNA, 25 bp, probe
gtacatttcatcactcagtgtatgc

SEQ ID NO: 237312 - DNA, 25 bp, probe
gtagctgcattatttcttgattaga

SEQ ID NO: 237313 - DNA, 25 bp, probe
gtagctgcattatttcttgattaga

SEQ ID NO: 237314 - DNA, 25 bp, probe
gtagagattgcagctgtgtgttgag

SEQ ID NO: 237315 - DNA, 25 bp, probe
gtagatgctgtggctttgtgttgcg

SEQ ID NO: 237316 - DNA, 25 bp, probe
gtagatgctgtggctttgtgttgcg

SEQ ID NO: 237317 - DNA, 25 bp, probe
gtagatcatatgactgcctttctgt

SEQ ID NO: 237318 - DNA, 25 bp, probe
gtacaaatactgcctagtgtattca

SEQ ID NO: 237319 - DNA, 25 bp, probe
gtaaatatactggaagcttgataat

SEQ ID NO: 237320 - DNA, 25 bp, probe
gtcaaatatttgttacctggaatgg

SEQ ID NO: 237321 - DNA, 25 bp, probe
gtgaaatttgtagaactggttagtc

SEQ ID NO: 237322 - DNA, 25 bp, probe
gtaactttgtgggaacactgattca

SEQ ID NO: 237323 - DNA, 25 bp, probe
gtaatttatttgtaagcctgaatcg

SEQ ID NO: 237324 - DNA, 25 bp, probe
gtaacctctttgccaagttttctgc

SEQ ID NO: 237325 - DNA, 25 bp, probe
gtagaacttaggtatagtgttttca

SEQ ID NO: 237326 - DNA, 25 bp, probe
gtagatatttcaaaaggctgtgtct

SEQ ID NO: 237327 - DNA, 25 bp, probe
gtaaagtgtgataaaggctccttgg

SEQ ID NO: 237328 - DNA, 25 bp, probe
gtaaagtgtgataaaggctccttgg

SEQ ID NO: 237329 - DNA, 25 bp, probe
gtcaagggtagggtgggccttcagg

SEQ ID NO: 237330 - DNA, 25 bp, probe
gtagagggactgaaggtacctttgg

SEQ ID NO: 237331 - DNA, 25 bp, probe
gtagaggaggccacgttcttactag

SEQ ID NO: 237332 - DNA, 25 bp, probe
gtagcagagtgtgatcttgtttgta

SEQ ID NO: 237333 - DNA, 25 bp, probe
gtagatatgtgtgattttccagaat

SEQ ID NO: 237334 - DNA, 25 bp, probe
gtagaaaggttgattctcatgcact

SEQ ID NO: 237335 - DNA, 25 bp, probe
gtagaaaggttgattctcatgcact

SEQ ID NO: 237336 - DNA, 25 bp, probe
gtagagagagttgtctgcactgctg

SEQ ID NO: 237337 - DNA, 25 bp, probe
gtagcagagcagctccctcgctgcg

SEQ ID NO: 237338 - DNA, 25 bp, probe
gtagcatacatgagtccatccatca

SEQ ID NO: 237339 - DNA, 25 bp, probe
gtagcaaagtagaatcatcctcaga

SEQ ID NO: 237340 - DNA, 25 bp, probe
gtagaaagtgatccatacttcaaaa

SEQ ID NO: 237341 - DNA, 25 bp, probe
gtactataagctcctacctagaaga

SEQ ID NO: 237342 - DNA, 25 bp, probe
gtacgtcacatcccagagggcaaaa

SEQ ID NO: 237343 - DNA, 25 bp, probe
gtcactgtccttaagacggcaggaa

SEQ ID NO: 237344 - DNA, 25 bp, probe
gtagatcgactaaaactggcagaaa

SEQ ID NO: 237345 - DNA, 25 bp, probe
gtacccagctattaatagaagcaaa

SEQ ID NO: 237346 - DNA, 25 bp, probe
gtacctccataaaacagtagcacaa

SEQ ID NO: 237347 - DNA, 25 bp, probe
gtacctgcctaacaagcaacgcaca

SEQ ID NO: 237348 - DNA, 25 bp, probe
gtagacgcactctcaaaaactgcac

SEQ ID NO: 237349 - DNA, 25 bp, probe
gtagccaacatcacaatctatgacg

SEQ ID NO: 237350 - DNA, 25 bp, probe
gtaccaatcagtcagtgtcatcaca

SEQ ID NO: 237351 - DNA, 25 bp, probe
gtagccaatacatggtgtatagcac

SEQ ID NO: 237352 - DNA, 25 bp, probe
gtagcacaaattgggctttggcaaa

SEQ ID NO: 237353 - DNA, 25 bp, probe
gtcaggaaactcgggtctggacaat

SEQ ID NO: 237354 - DNA, 25 bp, probe
gtcagcaggaaacgtgggtccaaac

SEQ ID NO: 237355 - DNA, 25 bp, probe
gtagaggaaggctatcgtctgccaa

SEQ ID NO: 237356 - DNA, 25 bp, probe
gtacggaagcgatccattggagata

SEQ ID NO: 237357 - DNA, 25 bp, probe
gtcccgaaggaagctcatggagtat

SEQ ID NO: 237358 - DNA, 25 bp, probe
gtccctaaggttgtacagactcttg

SEQ ID NO: 237359 - DNA, 25 bp, probe
gtactaaacagcttccttcagatct

SEQ ID NO: 237360 - DNA, 25 bp, probe
gtactgaactcagttccatccgtaa

SEQ ID NO: 237361 - DNA, 25 bp, probe
gtactgatactagaccatttagagc

SEQ ID NO: 237362 - DNA, 25 bp, probe
gtaaatcccagctcctttcaagctg

SEQ ID NO: 237363 - DNA, 25 bp, probe
gtaaatcccagctcctttcaagctg

SEQ ID NO: 237364 - DNA, 25 bp, probe
gtaaaatagtcttcttttatactgt

SEQ ID NO: 237365 - DNA, 25 bp, probe
gtgaaccttttgtgttgtcagactt

SEQ ID NO: 237366 - DNA, 25 bp, probe
gtagcccttttcatttacaaatctc

SEQ ID NO: 237367 - DNA, 25 bp, probe
gtagccctgggtttaatgtcaaatc

SEQ ID NO: 237368 - DNA, 25 bp, probe
gtagagctgctgaggagtttgtcaa

SEQ ID NO: 237369 - DNA, 25 bp, probe
gtaacttattgggttggcgaagcct

SEQ ID NO: 237370 - DNA, 25 bp, probe
gtaagcttaaggcagcggtgaaggc

SEQ ID NO: 237371 - DNA, 25 bp, probe
gtcagggtgaagttcggaggtacct

SEQ ID NO: 237372 - DNA, 25 bp, probe
ttaaggtaaattggtcaggaactat

SEQ ID NO: 237373 - DNA, 25 bp, probe
gtaaagaagatcttcctcaggaatt

SEQ ID NO: 237374 - DNA, 25 bp, probe
gtagacaggtacttcactcagaaag

SEQ ID NO: 237375 - DNA, 25 bp, probe
gtggatcaggtctgttcctgttact

SEQ ID NO: 237376 - DNA, 25 bp, probe
gtggacaggtactttactatcttct

SEQ ID NO: 237377 - DNA, 25 bp, probe
gtagaagtgagtttgtaaatattct

SEQ ID NO: 237378 - DNA, 25 bp, probe
gtagaatgtgatcaatccagtttac

SEQ ID NO: 237379 - DNA, 25 bp, probe
gtagaatgtttgacttcgtattgac

SEQ ID NO: 237380 - DNA, 25 bp, probe
gtagactttggtagtgcaacatatg

SEQ ID NO: 237381 - DNA, 25 bp, probe
gtagactttggtagtgcaacatatg

SEQ ID NO: 237382 - DNA, 25 bp, probe
gtagactttgtgaaggaccatggga

SEQ ID NO: 237383 - DNA, 25 bp, probe
gtagaatgtaagaagaggccagggg

SEQ ID NO: 237384 - DNA, 25 bp, probe
gtaaagtcggaccagtgtcaaggaa

SEQ ID NO: 237385 - DNA, 25 bp, probe
gtagaagctgggagatgtgtcctgg

SEQ ID NO: 237386 - DNA, 25 bp, probe
gtagaagctgggagatgtgtcctgg

SEQ ID NO: 237387 - DNA, 25 bp, probe
gtcaagtctgggtttaggtctgaga

SEQ ID NO: 237388 - DNA, 25 bp, probe
gtacagtcttgtattaagttgttaa

SEQ ID NO: 237389 - DNA, 25 bp, probe
gtcaaggcttctgcttagttttttc

SEQ ID NO: 237390 - DNA, 25 bp, probe
gtaacctcatcgggattgtcttttt

SEQ ID NO: 237391 - DNA, 25 bp, probe
gtaacctactaggtgctgaccttcc

SEQ ID NO: 237392 - DNA, 25 bp, probe
gtaacctactaggtgctgaccttcc

SEQ ID NO: 237393 - DNA, 25 bp, probe
gtaacttaagtttctgacctgtcgt

SEQ ID NO: 237394 - DNA, 25 bp, probe
gtagacttatagattattccatatt

SEQ ID NO: 237395 - DNA, 25 bp, probe
gtactaatggtgattatgctccaat

SEQ ID NO: 237396 - DNA, 25 bp, probe
gtacgcactgtcagttacaccaatc

SEQ ID NO: 237397 - DNA, 25 bp, probe
gtactggcattcagattggagccta

SEQ ID NO: 237398 - DNA, 25 bp, probe
gtaccgcatctctgatcaatgagtt

SEQ ID NO: 237399 - DNA, 25 bp, probe
gtactctctgctttgtgcaatggcc

SEQ ID NO: 237400 - DNA, 25 bp, probe
gtactcactgcagtactacatgggc

SEQ ID NO: 237401 - DNA, 25 bp, probe
gtagctactgcagcacagatctgta

SEQ ID NO: 237402 - DNA, 25 bp, probe
gtagctagcagcgtggagacattag

SEQ ID NO: 237403 - DNA, 25 bp, probe
gtagctgctgatcgtggaaatgtgg

SEQ ID NO: 237404 - DNA, 25 bp, probe
gtacctgtcactaaagatgatggca

SEQ ID NO: 237405 - DNA, 25 bp, probe
gtacatcgtcacggaactcatgcgc

SEQ ID NO: 237406 - DNA, 25 bp, probe
gtactgcgacctggcacagtgccag

SEQ ID NO: 237407 - DNA, 25 bp, probe
gtacatgctgctgtgcatgcacggc

SEQ ID NO: 237408 - DNA, 25 bp, probe
gtactgtgcatcgtgagggccagag

SEQ ID NO: 237409 - DNA, 25 bp, probe
gtagctgatgcctggggagaggacc

SEQ ID NO: 237410 - DNA, 25 bp, probe
gtaccgccatggaagtggggctcac

SEQ ID NO: 237411 - DNA, 25 bp, probe
gtaccgccatggaagtggggctcac

SEQ ID NO: 237412 - DNA, 25 bp, probe
gtaccagatcacctggtggaggtac

SEQ ID NO: 237413 - DNA, 25 bp, probe
gtacaaacccagattgaagctaaaa

SEQ ID NO: 237414 - DNA, 25 bp, probe
gtaaagccaccatttatacctacca

SEQ ID NO: 237415 - DNA, 25 bp, probe
ggatcaggctgctgcatacaaacct

SEQ ID NO: 237416 - DNA, 25 bp, probe
gtagcatggttccaaagaaccttaa

SEQ ID NO: 237417 - DNA, 25 bp, probe
gtacaggttcgatcgtttctataga

SEQ ID NO: 237418 - DNA, 25 bp, probe
gtagcactcactgaatagttttaaa

SEQ ID NO: 237419 - DNA, 25 bp, probe
gtagccccagatttagcttactgag

SEQ ID NO: 237420 - DNA, 25 bp, probe
gtagccccagatttagcttactgag

SEQ ID NO: 237421 - DNA, 25 bp, probe
gtacccatagtaataattgcatcaa

SEQ ID NO: 237422 - DNA, 25 bp, probe
gtagctgccacattgatttttctat

SEQ ID NO: 237423 - DNA, 25 bp, probe
gtagcatcaactagaataatctaca

SEQ ID NO: 237424 - DNA, 25 bp, probe
gtacatttcttgttaaccacgttat

SEQ ID NO: 237425 - DNA, 25 bp, probe
gtactttttgtataaatggagtctc

SEQ ID NO: 237426 - DNA, 25 bp, probe
gtactttattaattccaagggcata

SEQ ID NO: 237427 - DNA, 25 bp, probe
gtagacttatcttttccaggagcca

SEQ ID NO: 237428 - DNA, 25 bp, probe
gtaatcgtttgcttgttcagggaac

SEQ ID NO: 237429 - DNA, 25 bp, probe
gtactagtactgtgtactgtataga

SEQ ID NO: 237430 - DNA, 25 bp, probe
gtactagtactgtgtactgtataga

SEQ ID NO: 237431 - DNA, 25 bp, probe
gtaaagataccgatgcacttataga

SEQ ID NO: 237432 - DNA, 25 bp, probe
gtagaatttcccatgcatttactag

SEQ ID NO: 237433 - DNA, 25 bp, probe
ttagtagtttccatcattctagtct

SEQ ID NO: 237434 - DNA, 25 bp, probe
gtagccctttccacatactgtggct

SEQ ID NO: 237435 - DNA, 25 bp, probe
gtagcagccctcacaaaaaggcctt

SEQ ID NO: 237436 - DNA, 25 bp, probe
gtagcagatgccgttcaaaaggtcg

SEQ ID NO: 237437 - DNA, 25 bp, probe
gtaatgtccttttaatgagtggtga

SEQ ID NO: 237438 - DNA, 25 bp, probe
gtaatgtccttttaatgagtggtga

SEQ ID NO: 237439 - DNA, 25 bp, probe
gtactgaacattgtcaacgtggtct

SEQ ID NO: 237440 - DNA, 25 bp, probe
gtactgaacattgtcaacgtggtct

SEQ ID NO: 237441 - DNA, 25 bp, probe
gtagcgttcttaggaatctggtgtc

SEQ ID NO: 237442 - DNA, 25 bp, probe
gtacatttttcagtgcaactgttta

SEQ ID NO: 237443 - DNA, 25 bp, probe
gtactattttcactcagaagcatgt

SEQ ID NO: 237444 - DNA, 25 bp, probe
gtaccaggttgcctaaatcatgtgc

SEQ ID NO: 237445 - DNA, 25 bp, probe
gtacggtatatcttgaatgtcactc

SEQ ID NO: 237446 - DNA, 25 bp, probe
gtaccagttatctgttgctgcataa

SEQ ID NO: 237447 - DNA, 25 bp, probe
gtagaattatactgcttcatattat

SEQ ID NO: 237448 - DNA, 25 bp, probe
gtagaattcacaccctctatcataa

SEQ ID NO: 237449 - DNA, 25 bp, probe
gtagctttccaggactaacagataa

SEQ ID NO: 237450 - DNA, 25 bp, probe
gtactgtttcaggaccatcatcagc

SEQ ID NO: 237451 - DNA, 25 bp, probe
gtaactcttatggagacctagggga

SEQ ID NO: 237452 - DNA, 25 bp, probe
gtaaatgctttgaggcccagggacc

SEQ ID NO: 237453 - DNA, 25 bp, probe
gtactgtgtttgagatggctacagg

SEQ ID NO: 237454 - DNA, 25 bp, probe
gtactggtgtagtgattgctagctt

SEQ ID NO: 237455 - DNA, 25 bp, probe
gtacagacttagcttctgaactcta

SEQ ID NO: 237456 - DNA, 25 bp, probe
gtactcactttaatttgaatcttat

SEQ ID NO: 237457 - DNA, 25 bp, probe
gtactcactttaatttgaatcttat

SEQ ID NO: 237458 - DNA, 25 bp, probe
gtaccaattcttttgtcttttgata

SEQ ID NO: 237459 - DNA, 25 bp, probe
gtacctgttgtcttaatgcatttat

SEQ ID NO: 237460 - DNA, 25 bp, probe
gtacactgacttgagaccagttgaa

SEQ ID NO: 237461 - DNA, 25 bp, probe
gtacactgacttcagctactttagg

SEQ ID NO: 237462 - DNA, 25 bp, probe
gtagcaccacttctgatgagattgt

SEQ ID NO: 237463 - DNA, 25 bp, probe
gtagcaaaattcttaagtatgttat

SEQ ID NO: 237464 - DNA, 25 bp, probe
gtagcaaaattcttaagtatgttat

SEQ ID NO: 237465 - DNA, 25 bp, probe
gtacaatacttcagactgttttttt

SEQ ID NO: 237466 - DNA, 25 bp, probe
gtaaatatttttgcttgtgttgtcg

SEQ ID NO: 237467 - DNA, 25 bp, probe
gtaaagtttattgttgcttcgcagg

SEQ ID NO: 237468 - DNA, 25 bp, probe
gtaaaatttgttcattcgttgaggt

SEQ ID NO: 237469 - DNA, 25 bp, probe
gtaaaagttgtacactttcaacatt

SEQ ID NO: 237470 - DNA, 25 bp, probe
gtgtacgttttacaagttcagcact

SEQ ID NO: 237471 - DNA, 25 bp, probe
gtaacgtttgtagaagatactagtt

SEQ ID NO: 237472 - DNA, 25 bp, probe
gtaacacttcttttcaaggattaat

SEQ ID NO: 237473 - DNA, 25 bp, probe
gtacatactgtatatagccggatta

SEQ ID NO: 237474 - DNA, 25 bp, probe
gtaaatcttcaaacccagcagaata

SEQ ID NO: 237475 - DNA, 25 bp, probe
gtaaatcttcaaacccagcagaata

SEQ ID NO: 237476 - DNA, 25 bp, probe
gtaagacttcaagccaagcgtatgt

SEQ ID NO: 237477 - DNA, 25 bp, probe
gtaaactctcgggaaagcacttgtg

SEQ ID NO: 237478 - DNA, 25 bp, probe
gtaaactctcgggaaagcacttgtg

SEQ ID NO: 237479 - DNA, 25 bp, probe
tctaaaccttagaaaacatttgcct

SEQ ID NO: 237480 - DNA, 25 bp, probe
tcaaaacgttgggaataagggcctg

SEQ ID NO: 237481 - DNA, 25 bp, probe
tctaccagcgaacgaaataaggggc

SEQ ID NO: 237482 - DNA, 25 bp, probe
gtactcgggacagactaagggcgct

SEQ ID NO: 237483 - DNA, 25 bp, probe
gtacacggggcagatctactgggcg

SEQ ID NO: 237484 - DNA, 25 bp, probe
gtacgggcctgcagtagactggtgg

SEQ ID NO: 237485 - DNA, 25 bp, probe
gtacaaggaagcagctcgacttgag

SEQ ID NO: 237486 - DNA, 25 bp, probe
gtaaatgttgaagctcggtgtaccg

SEQ ID NO: 237487 - DNA, 25 bp, probe
gtagccagtgttaactagtttacca

SEQ ID NO: 237488 - DNA, 25 bp, probe
gtagccactgctagatatttatttc

SEQ ID NO: 237489 - DNA, 25 bp, probe
gtagcaactatattagcaacatttg

SEQ ID NO: 237490 - DNA, 25 bp, probe
gtagctactatattccagactggaa

SEQ ID NO: 237491 - DNA, 25 bp, probe
gtagctactatattccagactggaa

SEQ ID NO: 237492 - DNA, 25 bp, probe
gtacgacgatgtatcaacagagaaa

SEQ ID NO: 237493 - DNA, 25 bp, probe
gtaaatgcacttttccatggaataa

SEQ ID NO: 237494 - DNA, 25 bp, probe
gtaaagtctaatctctaaatcaagt

SEQ ID NO: 237495 - DNA, 25 bp, probe
gtcagtttttctcttaagtgcctgt

SEQ ID NO: 237496 - DNA, 25 bp, probe
gtagctgggtacatattaagtggct

SEQ ID NO: 237497 - DNA, 25 bp, probe
gtactgaggtaacttccacgtagcc

SEQ ID NO: 237498 - DNA, 25 bp, probe
gtacgggatctacaccaaggtcacc

SEQ ID NO: 237499 - DNA, 25 bp, probe
gtagcggggtaaagcccagagttca

SEQ ID NO: 237500 - DNA, 25 bp, probe
gtactggggtaaatgtgtacctaat

SEQ ID NO: 237501 - DNA, 25 bp, probe
gtagcttcagttattggtgagtcta

SEQ ID NO: 237502 - DNA, 25 bp, probe
gtacctgggctcatggagtagtcta

SEQ ID NO: 237503 - DNA, 25 bp, probe
gtacctggtccactgaaaaattctt

SEQ ID NO: 237504 - DNA, 25 bp, probe
gtacctggctccagacaatttttct

SEQ ID NO: 237505 - DNA, 25 bp, probe
gtgaccgggtcttatgcaaattttc

SEQ ID NO: 237506 - DNA, 25 bp, probe
gtacctgagctgtctaaaaatatat

SEQ ID NO: 237507 - DNA, 25 bp, probe
gtaccatgcctgtcatgcgaaatat

SEQ ID NO: 237508 - DNA, 25 bp, probe
gtagcatatgcttgtctcaaagatt

SEQ ID NO: 237509 - DNA, 25 bp, probe
gtagcatagctctgtacatctttta

SEQ ID NO: 237510 - DNA, 25 bp, probe
gtacaagccttgaacatcgtcctgc

SEQ ID NO: 237511 - DNA, 25 bp, probe
gtaatccctgagaaatctccttcaa

SEQ ID NO: 237512 - DNA, 25 bp, probe
gtacatccctgaaactgagcacatt

SEQ ID NO: 237513 - DNA, 25 bp, probe
gtagcatcacgcgagacagtgacac

SEQ ID NO: 237514 - DNA, 25 bp, probe
gtagcatgcagtctggatctgaact

SEQ ID NO: 237515 - DNA, 25 bp, probe
gtagcatgcagtctggatctgaact

SEQ ID NO: 237516 - DNA, 25 bp, probe
gtactgcgctctcagtcagatactg

SEQ ID NO: 237517 - DNA, 25 bp, probe
gtactgcaggcccagatagataagg

SEQ ID NO: 237518 - DNA, 25 bp, probe
gtactcaagccgcaccagagatggc

SEQ ID NO: 237519 - DNA, 25 bp, probe
gtactcaagccgcaccagagatggc

SEQ ID NO: 237520 - DNA, 25 bp, probe
gtacagaagccgccacaagggtgac

SEQ ID NO: 237521 - DNA, 25 bp, probe
gtacgagtggcccctagagcaggcc

SEQ ID NO: 237522 - DNA, 25 bp, probe
gtactactggaccacgaaggccact

SEQ ID NO: 237523 - DNA, 25 bp, probe
gtactactggaccacgaaggccact

SEQ ID NO: 237524 - DNA, 25 bp, probe
gtactgacaggtggaccaacggact

SEQ ID NO: 237525 - DNA, 25 bp, probe
gtacgaatgcgtggcggagatcggg

SEQ ID NO: 237526 - DNA, 25 bp, probe
gtacaaaggggggatgacgcagacc

SEQ ID NO: 237527 - DNA, 25 bp, probe
gtacctcggggggctgagagagcaa

SEQ ID NO: 237528 - DNA, 25 bp, probe
gtacctggtgtgccagcgaaaccaa

SEQ ID NO: 237529 - DNA, 25 bp, probe
gtacctggtgtgccagcgaaaccaa

SEQ ID NO: 237530 - DNA, 25 bp, probe
gtacttggtcatgcagctggatcag

SEQ ID NO: 237531 - DNA, 25 bp, probe
gtacttggtcatgcagctggatcag

SEQ ID NO: 237532 - DNA, 25 bp, probe
gtactatgacccgacggatgagcca

SEQ ID NO: 237533 - DNA, 25 bp, probe
gtactatgtgccggagacggaccag

SEQ ID NO: 237534 - DNA, 25 bp, probe
gtactatgtgccggagacggaccag

SEQ ID NO: 237535 - DNA, 25 bp, probe
gtacctggctcggctcaaggaaagc

SEQ ID NO: 237536 - DNA, 25 bp, probe
gtactcagagggttaacagacaagc

SEQ ID NO: 237537 - DNA, 25 bp, probe
gtaccagcggaaggaaggaaggcca

SEQ ID NO: 237538 - DNA, 25 bp, probe
gtagccgtagttggacggacgggca

SEQ ID NO: 237539 - DNA, 25 bp, probe
gtagcggaaaaggacaagacggtgc

SEQ ID NO: 237540 - DNA, 25 bp, probe
gtactacaacgggcacacgaaggtg

SEQ ID NO: 237541 - DNA, 25 bp, probe
gtaccaacacgtcaccggagagatg

SEQ ID NO: 237542 - DNA, 25 bp, probe
gtaccaagcactacaacacagggaa

SEQ ID NO: 237543 - DNA, 25 bp, probe
gtaccaagcactacaacacagggaa

SEQ ID NO: 237544 - DNA, 25 bp, probe
gtacagcagacagtgtcacatcaac

SEQ ID NO: 237545 - DNA, 25 bp, probe
gtaacaacggctactgcaccgtggg

SEQ ID NO: 237546 - DNA, 25 bp, probe
gtaccaaagtcaactgcacgtgttt

SEQ ID NO: 237547 - DNA, 25 bp, probe
gtcaccttgaggacactcggtttga

SEQ ID NO: 237548 - DNA, 25 bp, probe
gtcaccttgaggacactcggtttga

SEQ ID NO: 237549 - DNA, 25 bp, probe
gtaccgtggccatcaaggtggtgga

SEQ ID NO: 237550 - DNA, 25 bp, probe
gtaccattggactctcagtctgatg

SEQ ID NO: 237551 - DNA, 25 bp, probe
gtagccatatgtaatcccttgcttt

SEQ ID NO: 237552 - DNA, 25 bp, probe
gtacacatagtaacccagcctgttc

SEQ ID NO: 237553 - DNA, 25 bp, probe
gtaccaatgattaccatgatgtcgt

SEQ ID NO: 237554 - DNA, 25 bp, probe
gggctaaatccgcagcaaactgccg

SEQ ID NO: 237555 - DNA, 25 bp, probe
cgcagcaaactgccgtgctggcagg

SEQ ID NO: 237556 - DNA, 25 bp, probe
acagcaacgtcttgaacaggcgctg

SEQ ID NO: 237557 - DNA, 25 bp, probe
cgtcttgaacaggcgctgatgaccc

SEQ ID NO: 237558 - DNA, 25 bp, probe
acaggcgctgatgaccccggacacc

SEQ ID NO: 237559 - DNA, 25 bp, probe
atattacaacgcggcagcattatga

SEQ ID NO: 237560 - DNA, 25 bp, probe
cagcggcatttggtcgggcagccgc

SEQ ID NO: 237561 - DNA, 25 bp, probe
gtcgggcagccgcacactatgagca

SEQ ID NO: 237562 - DNA, 25 bp, probe
cgcacactatgagcaacatgcagat

SEQ ID NO: 237563 - DNA, 25 bp, probe
aacatgcagatctacagcgccagag

SEQ ID NO: 237564 - DNA, 25 bp, probe
tacagcgccagagtgctgacgcctt

SEQ ID NO: 237565 - DNA, 25 bp, probe
gagtgctgacgccttactggcaatg

SEQ ID NO: 237566 - DNA, 25 bp, probe
tactggcaatgcttccacagcgtaa

SEQ ID NO: 237567 - DNA, 25 bp, probe
gggttgtggacctggctggatgagc

SEQ ID NO: 237568 - DNA, 25 bp, probe
tgagccgccactggcgggaacgtca

SEQ ID NO: 237569 - DNA, 25 bp, probe
gcgcaggtgacggccttagatctct

SEQ ID NO: 237570 - DNA, 25 bp, probe
gccttagatctctcgccgccaatgc

SEQ ID NO: 237571 - DNA, 25 bp, probe
gccgccaatgcttgttcaggcacgc

SEQ ID NO: 237572 - DNA, 25 bp, probe
gtactattttcatcgtgggaatggt

SEQ ID NO: 237573 - DNA, 25 bp, probe
gtacctgctttgttggggtatggtt

SEQ ID NO: 237574 - DNA, 25 bp, probe
gtacgctggttttagtggcttgaga

SEQ ID NO: 237575 - DNA, 25 bp, probe
gtacctggataccacagttgctgta

SEQ ID NO: 237576 - DNA, 25 bp, probe
gtcacgggcatcgtacaggtgtaca

SEQ ID NO: 237577 - DNA, 25 bp, probe
gtcacgggcatcgtacaggtgtaca

SEQ ID NO: 237578 - DNA, 25 bp, probe
gtacgtggccaatgcaggcgatagc

SEQ ID NO: 237579 - DNA, 25 bp, probe
gtacgacggaatgcaggacgagccc

SEQ ID NO: 237580 - DNA, 25 bp, probe
gtacccaggcaacaagaagagccct

SEQ ID NO: 237581 - DNA, 25 bp, probe
gtacccagcctaccagagatggacc

SEQ ID NO: 237582 - DNA, 25 bp, probe
gtaccgaggctccaaggatgctgca

SEQ ID NO: 237583 - DNA, 25 bp, probe
gtactggaggtcaagatggagacaa

SEQ ID NO: 237584 - DNA, 25 bp, probe
gtactgcgtggtgtatgataacaac

SEQ ID NO: 237585 - DNA, 25 bp, probe
gtactgtgtttcgcattaagcacac

SEQ ID NO: 237586 - DNA, 25 bp, probe
gtactgctgttcattgcattgcagg

SEQ ID NO: 237587 - DNA, 25 bp, probe
gtactgctcgtcctatgttgatgca

SEQ ID NO: 237588 - DNA, 25 bp, probe
gtagcctgtgcatgtatgtcttgga

SEQ ID NO: 237589 - DNA, 25 bp, probe
gtagcctgtgcatgtatgtcttgga

SEQ ID NO: 237590 - DNA, 25 bp, probe
gtagccacaacaaatatgctggaga

SEQ ID NO: 237591 - DNA, 25 bp, probe
gtaccacattccatgacgcaggagc

SEQ ID NO: 237592 - DNA, 25 bp, probe
gtacttgcatgatcttacacgaaga

SEQ ID NO: 237593 - DNA, 25 bp, probe
gtaccacagaatgttcatctgaaca

SEQ ID NO: 237594 - DNA, 25 bp, probe
gtaccacagaatgttcatctgaaca

SEQ ID NO: 237595 - DNA, 25 bp, probe
gtacccaatacagctcttacagctt

SEQ ID NO: 237596 - DNA, 25 bp, probe
gtacccaatacagctcttacagctt

SEQ ID NO: 237597 - DNA, 25 bp, probe
gtacccactaattgcattggaactt

SEQ ID NO: 237598 - DNA, 25 bp, probe
gtacccactaattgcattggaactt

SEQ ID NO: 237599 - DNA, 25 bp, probe
gtactcccaaatgatgatctaccct

SEQ ID NO: 237600 - DNA, 25 bp, probe
gtcctccggttgcatactggactct

SEQ ID NO: 237601 - DNA, 25 bp, probe
gtacccggttgctacggtgaaatga

SEQ ID NO: 237602 - DNA, 25 bp, probe
gtaactgtggcattggacgggtaag

SEQ ID NO: 237603 - DNA, 25 bp, probe
gtaccaggtgaactgacggagctca

SEQ ID NO: 237604 - DNA, 25 bp, probe
gtacctgcttagttaattggctcag

SEQ ID NO: 237605 - DNA, 25 bp, probe
gtaccgatggactgactatggctcg

SEQ ID NO: 237606 - DNA, 25 bp, probe
gtagccagaagatgccactgatacc

SEQ ID NO: 237607 - DNA, 25 bp, probe
gtacaaaagtaccatagcacagcac

SEQ ID NO: 237608 - DNA, 25 bp, probe
gtacataatactattccatccacac

SEQ ID NO: 237609 - DNA, 25 bp, probe
gtaaatgctgccatgttccaaaccc

SEQ ID NO: 237610 - DNA, 25 bp, probe
gtaaatgctacctctgatcaaagca

SEQ ID NO: 237611 - DNA, 25 bp, probe
gtaaacgacccaaagcaaagagtgt

SEQ ID NO: 237612 - DNA, 25 bp, probe
gtaacaggaactgaggcgatagaat

SEQ ID NO: 237613 - DNA, 25 bp, probe
gtaccgtgggctgagaggggatgat

SEQ ID NO: 237614 - DNA, 25 bp, probe
gtactaagggatgcagtggagtgtg

SEQ ID NO: 237615 - DNA, 25 bp, probe
gtacaaagtggtgccgatatgtgag

SEQ ID NO: 237616 - DNA, 25 bp, probe
gtacaagtttatttttatgaagcca

SEQ ID NO: 237617 - DNA, 25 bp, probe
gtacgaatcttatttttcctgtcct

SEQ ID NO: 237618 - DNA, 25 bp, probe
gtaccattattattgttgtcattgt

SEQ ID NO: 237619 - DNA, 25 bp, probe
gtactcttagtttacttatgttgaa

SEQ ID NO: 237620 - DNA, 25 bp, probe
gtactttcgttaatcttgctgctta

SEQ ID NO: 237621 - DNA, 25 bp, probe
gtacctaatgattattcagtgcgta

SEQ ID NO: 237622 - DNA, 25 bp, probe
gtacctgtatgcatttcagctcaat

SEQ ID NO: 237623 - DNA, 25 bp, probe
gtaccaggtcttagatgtccaacca

SEQ ID NO: 237624 - DNA, 25 bp, probe
gtacctggattcagatgactcatcc

SEQ ID NO: 237625 - DNA, 25 bp, probe
gtactgggactacgaggctcacgtc

SEQ ID NO: 237626 - DNA, 25 bp, probe
gtacttggagtacggcagccacgag

SEQ ID NO: 237627 - DNA, 25 bp, probe
gtacatcgtaggagccattcacaag

SEQ ID NO: 237628 - DNA, 25 bp, probe
gtactgcgatgaggggactttagaa

SEQ ID NO: 237629 - DNA, 25 bp, probe
gtacatggcatgtgggatcaattaa

SEQ ID NO: 237630 - DNA, 25 bp, probe
gtacatcagctatgggccagcttat

SEQ ID NO: 237631 - DNA, 25 bp, probe
gtacatcagctatgggccagcttat

SEQ ID NO: 237632 - DNA, 25 bp, probe
gtacattctaattaccagtatatca

SEQ ID NO: 237633 - DNA, 25 bp, probe
gtacttctaagagcatagaactcaa

SEQ ID NO: 237634 - DNA, 25 bp, probe
gtactcctcaagcactggaacacga

SEQ ID NO: 237635 - DNA, 25 bp, probe
gtacatcgccaagtgcctcaaagac

SEQ ID NO: 237636 - DNA, 25 bp, probe
gtaccgcgctgagtgcaaactggac

SEQ ID NO: 237637 - DNA, 25 bp, probe
gtaccacctggtaaaatcgcacacc

SEQ ID NO: 237638 - DNA, 25 bp, probe
gtaccacctggtaaaatcgcacacc

SEQ ID NO: 237639 - DNA, 25 bp, probe
gtaccacaagaggctaactccaccc

SEQ ID NO: 237640 - DNA, 25 bp, probe
gtaccacaagaggctaactccaccc

SEQ ID NO: 237641 - DNA, 25 bp, probe
gtaagaaaagccacagcttccctcc

SEQ ID NO: 237642 - DNA, 25 bp, probe
gtaatgatcatgtcagccttcagaa

SEQ ID NO: 237643 - DNA, 25 bp, probe
gtaagcgagacccttcagaagagat

SEQ ID NO: 237644 - DNA, 25 bp, probe
gtaaaaatccagaacagaaatataa

SEQ ID NO: 237645 - DNA, 25 bp, probe
gtaacaagctcatagggtatcaata

SEQ ID NO: 237646 - DNA, 25 bp, probe
gtaagctcctcaagagcagggacaa

SEQ ID NO: 237647 - DNA, 25 bp, probe
gtactgtccaacgagcaggtggcat

SEQ ID NO: 237648 - DNA, 25 bp, probe
gtaccatccaatggagcaagctggt

SEQ ID NO: 237649 - DNA, 25 bp, probe
gtaccaagtgatgcagcaatgctgg

SEQ ID NO: 237650 - DNA, 25 bp, probe
gtacatctgggtgatgcaacctgca

SEQ ID NO: 237651 - DNA, 25 bp, probe
gtactcagggtggaagtcctgccta

SEQ ID NO: 237652 - DNA, 25 bp, probe
gtactgagaggggtcaggctgctcg

SEQ ID NO: 237653 - DNA, 25 bp, probe
gtactgaagatgcagaccgaccgcc

SEQ ID NO: 237654 - DNA, 25 bp, probe
gtactagcagagagtcctgagccac

SEQ ID NO: 237655 - DNA, 25 bp, probe
gtactacagagacctggctggcaac

SEQ ID NO: 237656 - DNA, 25 bp, probe
gtactacagagacctggctggcaac

SEQ ID NO: 237657 - DNA, 25 bp, probe
gtaatgttgcagatccgcaggcaga

SEQ ID NO: 237658 - DNA, 25 bp, probe
gtacatccacaaatccagcaggcaa

SEQ ID NO: 237659 - DNA, 25 bp, probe
gtaccccaagctggcagctctgaac

SEQ ID NO: 237660 - DNA, 25 bp, probe
gtacttgtcaagtcgacatctaacg

SEQ ID NO: 237661 - DNA, 25 bp, probe
gtactattgacatgggcatcaacac

SEQ ID NO: 237662 - DNA, 25 bp, probe
gtactattacaaaaccagacacttt

SEQ ID NO: 237663 - DNA, 25 bp, probe
gtacataatccacaagcaagcacct

SEQ ID NO: 237664 - DNA, 25 bp, probe
gtaataccaacatatgggccccatc

SEQ ID NO: 237665 - DNA, 25 bp, probe
gtaataccaacatatgggccccatc

SEQ ID NO: 237666 - DNA, 25 bp, probe
gtaaaagcaaagagggctcccagaa

SEQ ID NO: 237667 - DNA, 25 bp, probe
gtaaattaagtgggggcaaggcagt

SEQ ID NO: 237668 - DNA, 25 bp, probe
gtaacttacagaaagaccaggtagt

SEQ ID NO: 237669 - DNA, 25 bp, probe
gtaacttacagaaagaccaggtagt

SEQ ID NO: 237670 - DNA, 25 bp, probe
gtacgttacagctttcacagagtta

SEQ ID NO: 237671 - DNA, 25 bp, probe
gtactgtgtactgtatagacagttt

SEQ ID NO: 237672 - DNA, 25 bp, probe
gtactgtgttatctccatgacttgg

SEQ ID NO: 237673 - DNA, 25 bp, probe
gtacctgtataaactgaactgtgaa

SEQ ID NO: 237674 - DNA, 25 bp, probe
gtacttgaccacattgaatttaagg

SEQ ID NO: 237675 - DNA, 25 bp, probe
gtacttgaccacattgaatttaagg

SEQ ID NO: 237676 - DNA, 25 bp, probe
gtactcaagccagcttgtattttgc

SEQ ID NO: 237677 - DNA, 25 bp, probe
gtaccatagcacagcactgctaaat

SEQ ID NO: 237678 - DNA, 25 bp, probe
gtacatctgtacatgactgtataat

SEQ ID NO: 237679 - DNA, 25 bp, probe
gtaccttactattcctgacaagact

SEQ ID NO: 237680 - DNA, 25 bp, probe
gtaccctttgattactgtcagaact

SEQ ID NO: 237681 - DNA, 25 bp, probe
gtaccctttactacactcatgagtg

SEQ ID NO: 237682 - DNA, 25 bp, probe
gtaccctttactacactcatgagtg

SEQ ID NO: 237683 - DNA, 25 bp, probe
gtacctctcttagggactctgtgat

SEQ ID NO: 237684 - DNA, 25 bp, probe
gtaccttcaataatggactatgcta

SEQ ID NO: 237685 - DNA, 25 bp, probe
gtaccttcaataatggactatgcta

SEQ ID NO: 237686 - DNA, 25 bp, probe
gtaccattctcataagattctctca

SEQ ID NO: 237687 - DNA, 25 bp, probe
gtactatatgtgggtagtattccag

SEQ ID NO: 237688 - DNA, 25 bp, probe
gtactcttgctggagaaccgatccc

SEQ ID NO: 237689 - DNA, 25 bp, probe
gtacttagctcagatacttgattgc

SEQ ID NO: 237690 - DNA, 25 bp, probe
gtacttatggcagaatctatttggg

SEQ ID NO: 237691 - DNA, 25 bp, probe
gtacttatggcagaatctatttggg

SEQ ID NO: 237692 - DNA, 25 bp, probe
gtacttaggacttgatcctgtggtt

SEQ ID NO: 237693 - DNA, 25 bp, probe
gtgacgtccaggttgtccttgagta

SEQ ID NO: 237694 - DNA, 25 bp, probe
gtactccactggtctgtctttggat

SEQ ID NO: 237695 - DNA, 25 bp, probe
gtacctccagggatttgtggcattc

SEQ ID NO: 237696 - DNA, 25 bp, probe
gtacctgtccggatatatttccctg

SEQ ID NO: 237697 - DNA, 25 bp, probe
gtacgttcgagtatacgttgcccat

SEQ ID NO: 237698 - DNA, 25 bp, probe
gtacgtacaggctttttatatacca

SEQ ID NO: 237699 - DNA, 25 bp, probe
gtacctaacgaagtatccttcagcc

SEQ ID NO: 237700 - DNA, 25 bp, probe
gtacactagcaggggaacccatacc

SEQ ID NO: 237701 - DNA, 25 bp, probe
gtcaacatgaagcgtttcccagaac

SEQ ID NO: 237702 - DNA, 25 bp, probe
gtaacagaaggcgaacctccaaaca

SEQ ID NO: 237703 - DNA, 25 bp, probe
gtaatcaacctttacttcccaagct

SEQ ID NO: 237704 - DNA, 25 bp, probe
gtaatcaacctttacttcccaagct

SEQ ID NO: 237705 - DNA, 25 bp, probe
gtaacaaccttgatcgtttcggctg

SEQ ID NO: 237706 - DNA, 25 bp, probe
gtaaaaccctgacatgtattgcggg

SEQ ID NO: 237707 - DNA, 25 bp, probe
gtaaacaaatctcacctttggggct

SEQ ID NO: 237708 - DNA, 25 bp, probe
gtaatccaagttcgtcctttgtagg

SEQ ID NO: 237709 - DNA, 25 bp, probe
gtacccagagggcttgcattggtca

SEQ ID NO: 237710 - DNA, 25 bp, probe
gtcacctttgggtgtgcggtgtgcc

SEQ ID NO: 237711 - DNA, 25 bp, probe
gtcacctttgggtgtgcggtgtgcc

SEQ ID NO: 237712 - DNA, 25 bp, probe
gtacgttctagcctggtggaatgtg

SEQ ID NO: 237713 - DNA, 25 bp, probe
gtacgttctagcctggtggaatgtg

SEQ ID NO: 237714 - DNA, 25 bp, probe
gtacagtgttagaatactgtgaagg

SEQ ID NO: 237715 - DNA, 25 bp, probe
gtacgttcgagaatatgctgtaggc

SEQ ID NO: 237716 - DNA, 25 bp, probe
gtacgaccgcgagatggtgcagcag

SEQ ID NO: 237717 - DNA, 25 bp, probe
gtacgtttgcgggagcacatgggtg

SEQ ID NO: 237718 - DNA, 25 bp, probe
gtacaggtatcagggaacatgggga

SEQ ID NO: 237719 - DNA, 25 bp, probe
gtacaggtacagaagccgaggacgt

SEQ ID NO: 237720 - DNA, 25 bp, probe
gtactgctgtaatgagccaagtggc

SEQ ID NO: 237721 - DNA, 25 bp, probe
gtacttgataacagcacgagtccca

SEQ ID NO: 237722 - DNA, 25 bp, probe
gtactttgatactgctcatgctgac

SEQ ID NO: 237723 - DNA, 25 bp, probe
gtactttgacaccgtggctgacaag

SEQ ID NO: 237724 - DNA, 25 bp, probe
gtaccctgtgacaattggaggcaag

SEQ ID NO: 237725 - DNA, 25 bp, probe
gtaccctgtgacaattggaggcaag

SEQ ID NO: 237726 - DNA, 25 bp, probe
gtactggcgattctctgagggcagg

SEQ ID NO: 237727 - DNA, 25 bp, probe
gtacgagctgatgcgtcagtgctgg

SEQ ID NO: 237728 - DNA, 25 bp, probe
gtacgcactcatgagtgactgctgg

SEQ ID NO: 237729 - DNA, 25 bp, probe
gtacgatctcatgaatctgtgctgg

SEQ ID NO: 237730 - DNA, 25 bp, probe
gtacaatctcatgcgtctatgttgg

SEQ ID NO: 237731 - DNA, 25 bp, probe
gtacgatgtcatgctggggtgctgg

SEQ ID NO: 237732 - DNA, 25 bp, probe
gtacggatcacgggagcaatgctgt

SEQ ID NO: 237733 - DNA, 25 bp, probe
gtacggatcacgggagcaatgctgt

SEQ ID NO: 237734 - DNA, 25 bp, probe
gtaaaggcactgtcagagaatctgg

SEQ ID NO: 237735 - DNA, 25 bp, probe
gtaaataactgagtatgttcagggt

SEQ ID NO: 237736 - DNA, 25 bp, probe
gtacattacctggtttcctgggatt

SEQ ID NO: 237737 - DNA, 25 bp, probe
gtaattaactgtcaagcctgtggat

SEQ ID NO: 237738 - DNA, 25 bp, probe
gtaaacaccttcaaatttcaggcat

SEQ ID NO: 237739 - DNA, 25 bp, probe
gtaaatatctactgtttgccaggca

SEQ ID NO: 237740 - DNA, 25 bp, probe
gtaaattctaatacttgaagtggac

SEQ ID NO: 237741 - DNA, 25 bp, probe
gtaaagcatcaaatggctggatggc

SEQ ID NO: 237742 - DNA, 25 bp, probe
gtacatcagcaaccatccttgttgc

SEQ ID NO: 237743 - DNA, 25 bp, probe
gtacatcacatataccttgttagtg

SEQ ID NO: 237744 - DNA, 25 bp, probe
gtacatcacatataccttgttagtg

SEQ ID NO: 237745 - DNA, 25 bp, probe
gtacatggattcttcacttgttaag

SEQ ID NO: 237746 - DNA, 25 bp, probe
gtacatggattcttcacttgttaag

SEQ ID NO: 237747 - DNA, 25 bp, probe
gtacatggattcttcacttgttaag

SEQ ID NO: 237748 - DNA, 25 bp, probe
gtacttgttctacctggattgtcaa

SEQ ID NO: 237749 - DNA, 25 bp, probe
gtactatgctttaatgcttctttca

SEQ ID NO: 237750 - DNA, 25 bp, probe
gtacattgtttccacttcttgatat

SEQ ID NO: 237751 - DNA, 25 bp, probe
gtacattgtttccacttcttgatat

SEQ ID NO: 237752 - DNA, 25 bp, probe
gtacatcttgccgtgcacattttga

SEQ ID NO: 237753 - DNA, 25 bp, probe
gtactcattgtcttctatcaatcgg

SEQ ID NO: 237754 - DNA, 25 bp, probe
gtactcattgtcttctatcaatcgg

SEQ ID NO: 237755 - DNA, 25 bp, probe
gtactatttactccacatacaatgt

SEQ ID NO: 237756 - DNA, 25 bp, probe
gtgacacactttgacaaaaatgtag

SEQ ID NO: 237757 - DNA, 25 bp, probe
gtaacctcaggatcaaacttgtatg

SEQ ID NO: 237758 - DNA, 25 bp, probe
gtaacaccagtgtaaaagcttgagg

SEQ ID NO: 237759 - DNA, 25 bp, probe
gtaaccacagtcaggaagtcttctg

SEQ ID NO: 237760 - DNA, 25 bp, probe
gtactcgtgagtcaggagcagtctt

SEQ ID NO: 237761 - DNA, 25 bp, probe
gtacctgtggagcgaggtgtattcc

SEQ ID NO: 237762 - DNA, 25 bp, probe
gtacctgtggagcgaggtgtattcc

SEQ ID NO: 237763 - DNA, 25 bp, probe
gtacccttgagattgaattttctct

SEQ ID NO: 237764 - DNA, 25 bp, probe
gtactctttggctttgtttgtttgt

SEQ ID NO: 237765 - DNA, 25 bp, probe
gtactcttgggcatattttccatgg

SEQ ID NO: 237766 - DNA, 25 bp, probe
gtaactttacacgattttccagtct

SEQ ID NO: 237767 - DNA, 25 bp, probe
gtgaacttgtcctcttaaaatgtgt

SEQ ID NO: 237768 - DNA, 25 bp, probe
gtactttgtccttcagcaagaaagg

SEQ ID NO: 237769 - DNA, 25 bp, probe
gtacatttgtccaggaatcaggagc

SEQ ID NO: 237770 - DNA, 25 bp, probe
gtacttcaggcactagataacagtc

SEQ ID NO: 237771 - DNA, 25 bp, probe
gtacttcagcgtaaatatgagcact

SEQ ID NO: 237772 - DNA, 25 bp, probe
gtacttgctgatggaagaatgacct

SEQ ID NO: 237773 - DNA, 25 bp, probe
gtacttctgggggaagaatgctctg

SEQ ID NO: 237774 - DNA, 25 bp, probe
gtacttctggcgagccaggctgcac

SEQ ID NO: 237775 - DNA, 25 bp, probe
gtacttgtggttggctatggtgatc

SEQ ID NO: 237776 - DNA, 25 bp, probe
gtacttgtggttggctatggtgatc

SEQ ID NO: 237777 - DNA, 25 bp, probe
gtacattttgcttgcgtgctgggac

SEQ ID NO: 237778 - DNA, 25 bp, probe
gtacactgaccttaggcatggagaa

SEQ ID NO: 237779 - DNA, 25 bp, probe
gtcaattaactctgatgatgtcgaa

SEQ ID NO: 237780 - DNA, 25 bp, probe
gtcaattaactctgatgatgtcgaa

SEQ ID NO: 237781 - DNA, 25 bp, probe
gtacttggcacctgaagtgcttctg

SEQ ID NO: 237782 - DNA, 25 bp, probe
gtacttggcacctgaagtgcttctg

SEQ ID NO: 237783 - DNA, 25 bp, probe
gtaccgctgcatcaagaaggttcac

SEQ ID NO: 237784 - DNA, 25 bp, probe
gtaccgcatgcgcaagaagcagatc

SEQ ID NO: 237785 - DNA, 25 bp, probe
gtacgagatgctcattggccagtcc

SEQ ID NO: 237786 - DNA, 25 bp, probe
gtacatcgtgctctgtgagacgttc

SEQ ID NO: 237787 - DNA, 25 bp, probe
gtaataggctacgaaactttctcca

SEQ ID NO: 237788 - DNA, 25 bp, probe
gtaataggctacgaaactttctcca

SEQ ID NO: 237789 - DNA, 25 bp, probe
gtacacagactgacgaaactttaaa

SEQ ID NO: 237790 - DNA, 25 bp, probe
gtaattacatgtgtaacttccacaa

SEQ ID NO: 237791 - DNA, 25 bp, probe
gtaactgacaatcaaaaatccacag

SEQ ID NO: 237792 - DNA, 25 bp, probe
gtaacccaatctggactgagtcaac

SEQ ID NO: 237793 - DNA, 25 bp, probe
gtgacccgccagggacatacaaagc

SEQ ID NO: 237794 - DNA, 25 bp, probe
gtacatcctggcgggtcatgaaaac

SEQ ID NO: 237795 - DNA, 25 bp, probe
gtacatcctggcgggtcatgaaaac

SEQ ID NO: 237796 - DNA, 25 bp, probe
gtacatactagtgttcatagaacgt

SEQ ID NO: 237797 - DNA, 25 bp, probe
gtacataaagaagttttgcacacgt

SEQ ID NO: 237798 - DNA, 25 bp, probe
gtacattaaaagatttccaaatgtc

SEQ ID NO: 237799 - DNA, 25 bp, probe
gtacttcaaagtattattcaacttc

SEQ ID NO: 237800 - DNA, 25 bp, probe
gtactacactttatccattattcta

SEQ ID NO: 237801 - DNA, 25 bp, probe
gtactgtactgttatataatttatt

SEQ ID NO: 237802 - DNA, 25 bp, probe
gtacttgactagtttacttatgcat

SEQ ID NO: 237803 - DNA, 25 bp, probe
gtacttcccagtatgatattgtgat

SEQ ID NO: 237804 - DNA, 25 bp, probe
gtacattttcacttctgtattcgag

SEQ ID NO: 237805 - DNA, 25 bp, probe
gtactagcatttgttatttcatggt

SEQ ID NO: 237806 - DNA, 25 bp, probe
gtactagagttgcccataactacct

SEQ ID NO: 237807 - DNA, 25 bp, probe
gtactccagcttgggagatactccc

SEQ ID NO: 237808 - DNA, 25 bp, probe
gtactctgccttggagcagagcacc

SEQ ID NO: 237809 - DNA, 25 bp, probe
gtacttgtctgtggaggggatgcga

SEQ ID NO: 237810 - DNA, 25 bp, probe
gtacttgtctgtggaggggatgcga

SEQ ID NO: 237811 - DNA, 25 bp, probe
gtacttgcacggcaagggcatcatt

SEQ ID NO: 237812 - DNA, 25 bp, probe
gtactataccagtaagtgccacttc

SEQ ID NO: 237813 - DNA, 25 bp, probe
gtacataaccagcaagctctcagat

SEQ ID NO: 237814 - DNA, 25 bp, probe
gtaagacaccaacagaaatgatata

SEQ ID NO: 237815 - DNA, 25 bp, probe
gtaaacattaagtaaatgctgtaga

SEQ ID NO: 237816 - DNA, 25 bp, probe
gtaaactgatacataacctaaatta

SEQ ID NO: 237817 - DNA, 25 bp, probe
gtctaactaactaactttatacatg

SEQ ID NO: 237818 - DNA, 25 bp, probe
gtaaggcattacttactttccactg

SEQ ID NO: 237819 - DNA, 25 bp, probe
gtaaggcattacttactttccactg

SEQ ID NO: 237820 - DNA, 25 bp, probe
gtacaagttcatctacgtggccatc

SEQ ID NO: 237821 - DNA, 25 bp, probe
gtacatagtttaacacgtggtcctt

SEQ ID NO: 237822 - DNA, 25 bp, probe
gtacgagctctttagcgaggtgttc

SEQ ID NO: 237823 - DNA, 25 bp, probe
gtacgagctctttagcgaggtgttc

SEQ ID NO: 237824 - DNA, 25 bp, probe
gtaaatggcttgtggatgtttcttg

SEQ ID NO: 237825 - DNA, 25 bp, probe
gtaacaggttatggaatggtctctt

SEQ ID NO: 237826 - DNA, 25 bp, probe
gtacaccgctttggaaacagccttc

SEQ ID NO: 237827 - DNA, 25 bp, probe
tgtacccgccctgggacaagaactt

SEQ ID NO: 237828 - DNA, 25 bp, probe
gtacacccctgctggcagaagtacc

SEQ ID NO: 237829 - DNA, 25 bp, probe
gtacatgctgccctttgaggaagag

SEQ ID NO: 237830 - DNA, 25 bp, probe
gtaatcccagctactcgggaggctg

SEQ ID NO: 237831 - DNA, 25 bp, probe
gtacttgaactactgtcgtgggctg

SEQ ID NO: 237832 - DNA, 25 bp, probe
ttacattagtttctcactaggcatg

SEQ ID NO: 237833 - DNA, 25 bp, probe
gtacaaatctttcatccatacctgt

SEQ ID NO: 237834 - DNA, 25 bp, probe
gtcaataattttgaccaagacttta

SEQ ID NO: 237835 - DNA, 25 bp, probe
gtaaatattttcaccacgatcgatt

SEQ ID NO: 237836 - DNA, 25 bp, probe
gtaaatattttcaccacgatcgatt

SEQ ID NO: 237837 - DNA, 25 bp, probe
gtaaatattttcaccacgatcgatt

SEQ ID NO: 237838 - DNA, 25 bp, probe
gtaaatattttcaccacgatcgatt

SEQ ID NO: 237839 - DNA, 25 bp, probe
gtaaacagttttataagtagatctt

SEQ ID NO: 237840 - DNA, 25 bp, probe
gtaaacaattttctcaacctatttg

SEQ ID NO: 237841 - DNA, 25 bp, probe
gtacaataggcttttcatcaacttt

SEQ ID NO: 237842 - DNA, 25 bp, probe
gtaaatcctgtgtttcattacttga

SEQ ID NO: 237843 - DNA, 25 bp, probe
gtaattactgtaataccaacatatg

SEQ ID NO: 237844 - DNA, 25 bp, probe
gtaatgtttgttacctccaacagaa

SEQ ID NO: 237845 - DNA, 25 bp, probe
gtacatggatctcattttacaagag

SEQ ID NO: 237846 - DNA, 25 bp, probe
gtacatggatctcattttacaagag

SEQ ID NO: 237847 - DNA, 25 bp, probe
gtacgacattttgtgactgaagaga

SEQ ID NO: 237848 - DNA, 25 bp, probe
gtaaccatttgagctgcaattcagg

SEQ ID NO: 237849 - DNA, 25 bp, probe
gtaacatgcttgaaactgcctggca

SEQ ID NO: 237850 - DNA, 25 bp, probe
gtaaatggaacttctgcaaggcagt

SEQ ID NO: 237851 - DNA, 25 bp, probe
gtaagcaggacaaatcccggctgaa

SEQ ID NO: 237852 - DNA, 25 bp, probe
gtactgaggaaatcacactctctga

SEQ ID NO: 237853 - DNA, 25 bp, probe
gtactgaggaaatcacactctctga

SEQ ID NO: 237854 - DNA, 25 bp, probe
gtacaggaaacagagcatgcctcga

SEQ ID NO: 237855 - DNA, 25 bp, probe
gtacagaaaccaaagcagtctgcgt

SEQ ID NO: 237856 - DNA, 25 bp, probe
gtaatcaatattaatgagcgtgctg

SEQ ID NO: 237857 - DNA, 25 bp, probe
gtaatcaatattaatgagcgtgctg

SEQ ID NO: 237858 - DNA, 25 bp, probe
gtacacaagttcaagcagttgctaa

SEQ ID NO: 237859 - DNA, 25 bp, probe
gtaagaagttccaagctcgcttccg

SEQ ID NO: 237860 - DNA, 25 bp, probe
gtacagaaatccgaatccgactcct

SEQ ID NO: 237861 - DNA, 25 bp, probe
gtaagagatacggcacttctggcca

SEQ ID NO: 237862 - DNA, 25 bp, probe
gtaaacatcaggcactttggttaat

SEQ ID NO: 237863 - DNA, 25 bp, probe
gtaaacatcaggcactttggttaat

SEQ ID NO: 237864 - DNA, 25 bp, probe
gtaagttctgtgcagtttggtatga

SEQ ID NO: 237865 - DNA, 25 bp, probe
gtaagttctgtgcagtttggtatga

SEQ ID NO: 237866 - DNA, 25 bp, probe
gtactgcaactgccagaacttggta

SEQ ID NO: 237867 - DNA, 25 bp, probe
gtactgaatctcataattggaatat

SEQ ID NO: 237868 - DNA, 25 bp, probe
gtacaagctgccctagtgggtatct

SEQ ID NO: 237869 - DNA, 25 bp, probe
gtacattctccacttggacctgaag

SEQ ID NO: 237870 - DNA, 25 bp, probe
gtacattcacgatctggactcgaac

SEQ ID NO: 237871 - DNA, 25 bp, probe
gtacttccgtcagggacacaactgc

SEQ ID NO: 237872 - DNA, 25 bp, probe
gtcacatcccagagggcaaaagcct

SEQ ID NO: 237873 - DNA, 25 bp, probe
gtacatctcacagctgggcaagggc

SEQ ID NO: 237874 - DNA, 25 bp, probe
gtcacactcaagaggccttggcagc

SEQ ID NO: 237875 - DNA, 25 bp, probe
gtcacaccaggctgtgtgctctggc

SEQ ID NO: 237876 - DNA, 25 bp, probe
gtacacgcgagctgtggactggtgg

SEQ ID NO: 237877 - DNA, 25 bp, probe
gtacacgcgagctgtggactggtgg

SEQ ID NO: 237878 - DNA, 25 bp, probe
gtactggccatctgatggactggtg

SEQ ID NO: 237879 - DNA, 25 bp, probe
gtactgaccagctgaggcagcagtg

SEQ ID NO: 237880 - DNA, 25 bp, probe
gtcaagaccagctgggtagtcagga

SEQ ID NO: 237881 - DNA, 25 bp, probe
gtgggaaccagagcagatggccagg

SEQ ID NO: 237882 - DNA, 25 bp, probe
gtacacacatccttggcaattcagc

SEQ ID NO: 237883 - DNA, 25 bp, probe
gtacacacatccttggcaattcagc

SEQ ID NO: 237884 - DNA, 25 bp, probe
gtacaagcttttccagaccagctgg

SEQ ID NO: 237885 - DNA, 25 bp, probe
gtaaacttgctcaacgacatcgtga

SEQ ID NO: 237886 - DNA, 25 bp, probe
gtaaacttgctcaacgacatcgtga

SEQ ID NO: 237887 - DNA, 25 bp, probe
gtaaacttgtttttcatttgaagct

SEQ ID NO: 237888 - DNA, 25 bp, probe
gtaatattgactctattttgtaact

SEQ ID NO: 237889 - DNA, 25 bp, probe
gtaatttccttcaagttacttacat

SEQ ID NO: 237890 - DNA, 25 bp, probe
gtacacctccttctatgtaaggagt

SEQ ID NO: 237891 - DNA, 25 bp, probe
gtacacctccttctatgtaaggagt

SEQ ID NO: 237892 - DNA, 25 bp, probe
gtactcccttgtacttgtcaagtcg

SEQ ID NO: 237893 - DNA, 25 bp, probe
gtactcctaattacattgctcctga

SEQ ID NO: 237894 - DNA, 25 bp, probe
gtacatgccaacataaatatggcga

SEQ ID NO: 237895 - DNA, 25 bp, probe
gtactgccacttaaagaatatcaca

SEQ ID NO: 237896 - DNA, 25 bp, probe
gtactgccgcttaaagaacatcaca

SEQ ID NO: 237897 - DNA, 25 bp, probe
gtactgcctctataaaaacgtcgca

SEQ ID NO: 237898 - DNA, 25 bp, probe
gtactgcctctataaaaacgtcgca

SEQ ID NO: 237899 - DNA, 25 bp, probe
gtgacgtccaaggaaccaaacccag

SEQ ID NO: 237900 - DNA, 25 bp, probe
gtcaattaaagatagcaaaacccaa

SEQ ID NO: 237901 - DNA, 25 bp, probe
gtctgaccgtaagtaaaaacacaca

SEQ ID NO: 237902 - DNA, 25 bp, probe
gtctgaccgtaagtaaaaacacaca

SEQ ID NO: 237903 - DNA, 25 bp, probe
gtctacctcaggactgaacgccaca

SEQ ID NO: 237904 - DNA, 25 bp, probe
gtacagcgctacacagagactgccc

SEQ ID NO: 237905 - DNA, 25 bp, probe
gtacagcgctacacagagactgccc

SEQ ID NO: 237906 - DNA, 25 bp, probe
gtaaagcctcaaggacatctgcctg

SEQ ID NO: 237907 - DNA, 25 bp, probe
gtaaactcacaaacacttggctcct

SEQ ID NO: 237908 - DNA, 25 bp, probe
gtaacagtcatagttcacctgtctc

SEQ ID NO: 237909 - DNA, 25 bp, probe
gtaaaccatgcagtactggctgttg

SEQ ID NO: 237910 - DNA, 25 bp, probe
gtactgcccatgactagttggtgga

SEQ ID NO: 237911 - DNA, 25 bp, probe
gtacacacgatgatagcttcaagga

SEQ ID NO: 237912 - DNA, 25 bp, probe
gtacaccagctatagcgtgcagacg

SEQ ID NO: 237913 - DNA, 25 bp, probe
gtaacagccttaatggaagaccaaa

SEQ ID NO: 237914 - DNA, 25 bp, probe
gtaaacttggttggataggtcagag

SEQ ID NO: 237915 - DNA, 25 bp, probe
gtaaacttggttggataggtcagag

SEQ ID NO: 237916 - DNA, 25 bp, probe
gtaaactgggcttcacacagtctca

SEQ ID NO: 237917 - DNA, 25 bp, probe
gtaaactgggcttcacacagtctca

SEQ ID NO: 237918 - DNA, 25 bp, probe
gtacacactggaactgcaatcagac

SEQ ID NO: 237919 - DNA, 25 bp, probe
gtaaactgatgctttcagatccatc

SEQ ID NO: 237920 - DNA, 25 bp, probe
gtaacactctggtacagatctccag

SEQ ID NO: 237921 - DNA, 25 bp, probe
gtgaaccttgagaaaatctaccgag

SEQ ID NO: 237922 - DNA, 25 bp, probe
gtaatcccagatgacaaccagacgg

SEQ ID NO: 237923 - DNA, 25 bp, probe
gtactcccagacaaatctgaaactg

SEQ ID NO: 237924 - DNA, 25 bp, probe
gtaacccaagtagtctgaagacgct

SEQ ID NO: 237925 - DNA, 25 bp, probe
gtaacctgcgtgctttataagcctc

SEQ ID NO: 237926 - DNA, 25 bp, probe
gtaaacagttggttgttctggccaa

SEQ ID NO: 237927 - DNA, 25 bp, probe
gtacaatcgtttcatcattcggcgt

SEQ ID NO: 237928 - DNA, 25 bp, probe
gtaaatactgttcgacatagtgacg

SEQ ID NO: 237929 - DNA, 25 bp, probe
gtaaatactgttcgacatagtgacg

SEQ ID NO: 237930 - DNA, 25 bp, probe
gtacaattgatgactcagaccctga

SEQ ID NO: 237931 - DNA, 25 bp, probe
gtacattaggcaagagacctctacc

SEQ ID NO: 237932 - DNA, 25 bp, probe
gtacagctatagagatgactactac

SEQ ID NO: 237933 - DNA, 25 bp, probe
gtcacagcttagaccatgggcttac

SEQ ID NO: 237934 - DNA, 25 bp, probe
gtacactatctggcacatatgcgct

SEQ ID NO: 237935 - DNA, 25 bp, probe
gtacagtcactggaaactgctgggc

SEQ ID NO: 237936 - DNA, 25 bp, probe
gtacatgatcatgcgggagtgctgg

SEQ ID NO: 237937 - DNA, 25 bp, probe
gtacatgatcatgcgggagtgctgg

SEQ ID NO: 237938 - DNA, 25 bp, probe
gtacatgagcaagggtgagtcctgg

SEQ ID NO: 237939 - DNA, 25 bp, probe
gtacatagtacaccatggagcacgg

SEQ ID NO: 237940 - DNA, 25 bp, probe
gtcactagtccagctgggtgcagga

SEQ ID NO: 237941 - DNA, 25 bp, probe
gtactacactcagcagcagggtgtg

SEQ ID NO: 237942 - DNA, 25 bp, probe
gtacatagagcgtgacggcactgag

SEQ ID NO: 237943 - DNA, 25 bp, probe
gtacatcgatgccgtgaaggactgc

SEQ ID NO: 237944 - DNA, 25 bp, probe
gtacatcatgtcttataaggaagcc

SEQ ID NO: 237945 - DNA, 25 bp, probe
gtacatcatcctgtgctcggaaatc

SEQ ID NO: 237946 - DNA, 25 bp, probe
gtacatccgcattttctggacagtc

SEQ ID NO: 237947 - DNA, 25 bp, probe
gtacatccgcattttctggacagtc

SEQ ID NO: 237948 - DNA, 25 bp, probe
gtacttcatatattcttggcaattg

SEQ ID NO: 237949 - DNA, 25 bp, probe
gtacactgtacttctgtgtgcaatt

SEQ ID NO: 237950 - DNA, 25 bp, probe
gtaactgcttctagagatgggattg

SEQ ID NO: 237951 - DNA, 25 bp, probe
gtaagctcctccaaagttgcttgca

SEQ ID NO: 237952 - DNA, 25 bp, probe
gtaagcccagtttgaatgtgctcca

SEQ ID NO: 237953 - DNA, 25 bp, probe
gtaacactgagtctattcagctcca

SEQ ID NO: 237954 - DNA, 25 bp, probe
gtaacactgagtctattcagctcca

SEQ ID NO: 237955 - DNA, 25 bp, probe
gtacaactgaaggctgtgttcccac

SEQ ID NO: 237956 - DNA, 25 bp, probe
gtacaactgaaggctgtgttcccac

SEQ ID NO: 237957 - DNA, 25 bp, probe
gtaaacttcgacaagttcccagcaa

SEQ ID NO: 237958 - DNA, 25 bp, probe
gtcaaacttaaaatggtcgtctgcc

SEQ ID NO: 237959 - DNA, 25 bp, probe
gtacaagtgtaatatggacagtatc

SEQ ID NO: 237960 - DNA, 25 bp, probe
tgcttaaggtactctggactttctc

SEQ ID NO: 237961 - DNA, 25 bp, probe
tgcttaaggtactctggactttctc

SEQ ID NO: 237962 - DNA, 25 bp, probe
tgctaaagttcatccggaatttggg

SEQ ID NO: 237963 - DNA, 25 bp, probe
tgctaaagttcatccggaatttggg

SEQ ID NO: 237964 - DNA, 25 bp, probe
gtgaaagcttcgtccgagaaacgcc

SEQ ID NO: 237965 - DNA, 25 bp, probe
gtaaagttgggccggaacattctca

SEQ ID NO: 237966 - DNA, 25 bp, probe
gtaaaattggttatgaactttggat

SEQ ID NO: 237967 - DNA, 25 bp, probe
gtaagagggactacttaagttctag

SEQ ID NO: 237968 - DNA, 25 bp, probe
gtaacagggcagttcattccaaatc

SEQ ID NO: 237969 - DNA, 25 bp, probe
gtaacgggtttttccatggcatcag

SEQ ID NO: 237970 - DNA, 25 bp, probe
gtaacgggtttttccatggcatcag

SEQ ID NO: 237971 - DNA, 25 bp, probe
gtaacgggtttttccatggcatcag

SEQ ID NO: 237972 - DNA, 25 bp, probe
gtaactaggactcctcctatcaaag

SEQ ID NO: 237973 - DNA, 25 bp, probe
gtaactaggactcctcctatcaaag

SEQ ID NO: 237974 - DNA, 25 bp, probe
gtaacaaggatctccagtccacaag

SEQ ID NO: 237975 - DNA, 25 bp, probe
gtaacaaggatctccagtccacaag

SEQ ID NO: 237976 - DNA, 25 bp, probe
gtaacaaggatctccagtccacaag

SEQ ID NO: 237977 - DNA, 25 bp, probe
gtcattaaggagtaccctggaaagg

SEQ ID NO: 237978 - DNA, 25 bp, probe
gtcgggaggttagctgcggaaagaa

SEQ ID NO: 237979 - DNA, 25 bp, probe
gtcgggaggttagctgcggaaagaa

SEQ ID NO: 237980 - DNA, 25 bp, probe
gtcagatggggattacggggaaggg

SEQ ID NO: 237981 - DNA, 25 bp, probe
gtaatgacggactctgggttccggg

SEQ ID NO: 237982 - DNA, 25 bp, probe
gtaaactaacattcactggttccag

SEQ ID NO: 237983 - DNA, 25 bp, probe
gtaaccttcatttcactaaatccaa

SEQ ID NO: 237984 - DNA, 25 bp, probe
gtcaaccccattatctataacctac

SEQ ID NO: 237985 - DNA, 25 bp, probe
gtcaaccccattatctataacctac

SEQ ID NO: 237986 - DNA, 25 bp, probe
gtcacaatctacttttcttaaactt

SEQ ID NO: 237987 - DNA, 25 bp, probe
gtcaccagaaactttttcaggacat

SEQ ID NO: 237988 - DNA, 25 bp, probe
gtcacgaaaactgtaatcagaacat

SEQ ID NO: 237989 - DNA, 25 bp, probe
gtcaggaacccctgtatctcaacat

SEQ ID NO: 237990 - DNA, 25 bp, probe
gtcaggaacccctgtatctcaacat

SEQ ID NO: 237991 - DNA, 25 bp, probe
gtcatggaactgcccaaactaaagc

SEQ ID NO: 237992 - DNA, 25 bp, probe
gtaagcgactgtcatcaagtaaggc

SEQ ID NO: 237993 - DNA, 25 bp, probe
gtgcaaggagggcatttgtaacggg

SEQ ID NO: 237994 - DNA, 25 bp, probe
gtcttctggaggttctatttacggg

SEQ ID NO: 237995 - DNA, 25 bp, probe
gtcttctggaggttctatttacggg

SEQ ID NO: 237996 - DNA, 25 bp, probe
gtcgtggtgggatttacctacttgg

SEQ ID NO: 237997 - DNA, 25 bp, probe
gtcaggtatgggtctaacttaccct

SEQ ID NO: 237998 - DNA, 25 bp, probe
gtaaattaggcctaatcctcactct

SEQ ID NO: 237999 - DNA, 25 bp, probe
gtaaaaaagattaatcctatatgta

SEQ ID NO: 238000 - DNA, 25 bp, probe
gtaaatatcgtgaatttccttttag

SEQ ID NO: 238001 - DNA, 25 bp, probe
gtaaacatcttggattttcttcctc

SEQ ID NO: 238002 - DNA, 25 bp, probe
gtacattctttgaaatttattcctt

SEQ ID NO: 238003 - DNA, 25 bp, probe
gtaatcctgggtgtttatcacgttc

SEQ ID NO: 238004 - DNA, 25 bp, probe
gtaagtgtggggatttaaacttgag

SEQ ID NO: 238005 - DNA, 25 bp, probe
gtaagttgaaggatattggacagga

SEQ ID NO: 238006 - DNA, 25 bp, probe
gtaagttgaaggatattggacagga

SEQ ID NO: 238007 - DNA, 25 bp, probe
gtaagtctgaacctctaatggaaaa

SEQ ID NO: 238008 - DNA, 25 bp, probe
gtaagtctgaacctctaatggaaaa

SEQ ID NO: 238009 - DNA, 25 bp, probe
gtaattcgacagctctacagaaaca

SEQ ID NO: 238010 - DNA, 25 bp, probe
gtaattcgacagctctacagaaaca

SEQ ID NO: 238011 - DNA, 25 bp, probe
gtaattgagaagatctgcgatacta

SEQ ID NO: 238012 - DNA, 25 bp, probe
gtacttggagtaattgcacattttt

SEQ ID NO: 238013 - DNA, 25 bp, probe
gtacttggagtaattgcacattttt

SEQ ID NO: 238014 - DNA, 25 bp, probe
gtacagggggacatcctctgttact

SEQ ID NO: 238015 - DNA, 25 bp, probe
gtccgaggctagtttcctctggaac

SEQ ID NO: 238016 - DNA, 25 bp, probe
gtcaagggcttactatttctgggtc

SEQ ID NO: 238017 - DNA, 25 bp, probe
gtacatagtgtttggctttggggct

SEQ ID NO: 238018 - DNA, 25 bp, probe
gtaatacttgtgtgaaggtgggcga

SEQ ID NO: 238019 - DNA, 25 bp, probe
gtaaagttgatcccaagcctgggcg

SEQ ID NO: 238020 - DNA, 25 bp, probe
gtcaaaattacagacttcgggctgg

SEQ ID NO: 238021 - DNA, 25 bp, probe
gtaaatattactttttctggctgtg

SEQ ID NO: 238022 - DNA, 25 bp, probe
gtaagaagtagtgtttccatgctct

SEQ ID NO: 238023 - DNA, 25 bp, probe
gtaagaagtcggggctttctgatgt

SEQ ID NO: 238024 - DNA, 25 bp, probe
gtacatgcatggtggttcttttgtt

SEQ ID NO: 238025 - DNA, 25 bp, probe
gtacatgcatggtggttcttttgtt

SEQ ID NO: 238026 - DNA, 25 bp, probe
gtaaaggggatctattttgtgtgtt

SEQ ID NO: 238027 - DNA, 25 bp, probe
gtaaactggtaaattttgtgcttat

SEQ ID NO: 238028 - DNA, 25 bp, probe
gtaagccagttacagtttgccttaa

SEQ ID NO: 238029 - DNA, 25 bp, probe
gtaaccgttaagaatactcttcaag

SEQ ID NO: 238030 - DNA, 25 bp, probe
gtaactcctttattgtacttatcat

SEQ ID NO: 238031 - DNA, 25 bp, probe
gtaaagcttttatgactctaatatt

SEQ ID NO: 238032 - DNA, 25 bp, probe
gtacatatggtttaggtcaccagat

SEQ ID NO: 238033 - DNA, 25 bp, probe
gtacatgtgcagatattcctaaagt

SEQ ID NO: 238034 - DNA, 25 bp, probe
gtacatatgatgatttccatactat

SEQ ID NO: 238035 - DNA, 25 bp, probe
gtacagagatgcttttgcttatgtt

SEQ ID NO: 238036 - DNA, 25 bp, probe
gtaatgggcatcgattgcttttctc

SEQ ID NO: 238037 - DNA, 25 bp, probe
gtaatgggcatcgattgcttttctc

SEQ ID NO: 238038 - DNA, 25 bp, probe
gtacatagtgacgatggcttttatt

SEQ ID NO: 238039 - DNA, 25 bp, probe
gtacatggatgaggcaggtgggtgc

SEQ ID NO: 238040 - DNA, 25 bp, probe
gtacagcagacagcaaatggagtga

SEQ ID NO: 238041 - DNA, 25 bp, probe
gtacatcatacaggcctgtcgagga

SEQ ID NO: 238042 - DNA, 25 bp, probe
gtacacaatatcctgctgctgggaa

SEQ ID NO: 238043 - DNA, 25 bp, probe
gtacaacatcatggtgctggtgtcc

SEQ ID NO: 238044 - DNA, 25 bp, probe
gtcaatggcatcaggagggcgcccc

SEQ ID NO: 238045 - DNA, 25 bp, probe
gtcaatggcatcaggagggcgcccc

SEQ ID NO: 238046 - DNA, 25 bp, probe
gtgatagacacttcgggtggacccc

SEQ ID NO: 238047 - DNA, 25 bp, probe
gtaataacttccaagctgaactccc

SEQ ID NO: 238048 - DNA, 25 bp, probe
gtaaagaccttgaagagcccatcac

SEQ ID NO: 238049 - DNA, 25 bp, probe
gtaagagcaccaagttgtgccccac

SEQ ID NO: 238050 - DNA, 25 bp, probe
gtcagagactccagtttacatccag

SEQ ID NO: 238051 - DNA, 25 bp, probe
gtcaaggtatataatcttactcatc

SEQ ID NO: 238052 - DNA, 25 bp, probe
gtaagtgcctataaccatgttctat

SEQ ID NO: 238053 - DNA, 25 bp, probe
gtaaggcctgatcatagtattctgt

SEQ ID NO: 238054 - DNA, 25 bp, probe
gtacagatctccagaagtattgctg

SEQ ID NO: 238055 - DNA, 25 bp, probe
tgtcaatacccgaaatgatgtactg

SEQ ID NO: 238056 - DNA, 25 bp, probe
gtcaatacccgaaatgatgtactgg

SEQ ID NO: 238057 - DNA, 25 bp, probe
gtacataccttgttatatgcagaca

SEQ ID NO: 238058 - DNA, 25 bp, probe
gtaatcccattgtctatgcatttat

SEQ ID NO: 238059 - DNA, 25 bp, probe
gtaacaccagtgtctgatgaaacat

SEQ ID NO: 238060 - DNA, 25 bp, probe
gtacaaaattgcctataatacttgc

SEQ ID NO: 238061 - DNA, 25 bp, probe
gtacagtctattccatagaatcaca

SEQ ID NO: 238062 - DNA, 25 bp, probe
gtcacaggtttttacagtccagcaa

SEQ ID NO: 238063 - DNA, 25 bp, probe
gtaaggatattttcagcattcccaa

SEQ ID NO: 238064 - DNA, 25 bp, probe
gtaacgtttgattcagataccttca

SEQ ID NO: 238065 - DNA, 25 bp, probe
gtaacagcaacttgtcaaacctaag

SEQ ID NO: 238066 - DNA, 25 bp, probe
gtcaaagaagactgcaaagcctaat

SEQ ID NO: 238067 - DNA, 25 bp, probe
gtcaaagaagactgcaaagcctaat

SEQ ID NO: 238068 - DNA, 25 bp, probe
gtaatttaactgtagaacctgagct

SEQ ID NO: 238069 - DNA, 25 bp, probe
gtaagttaacactacactactcaca

SEQ ID NO: 238070 - DNA, 25 bp, probe
gtaagttattcctatcctgtggact

SEQ ID NO: 238071 - DNA, 25 bp, probe
gtcagagatctgagccaaccttggc

SEQ ID NO: 238072 - DNA, 25 bp, probe
gtcagagatctgagccaaccttggc

SEQ ID NO: 238073 - DNA, 25 bp, probe
gtcgatgactttgaaatcgggcgtc

SEQ ID NO: 238074 - DNA, 25 bp, probe
gtcagggaccttccaaagggctgtc

SEQ ID NO: 238075 - DNA, 25 bp, probe
gtaagagaccccaaatcagggtctc

SEQ ID NO: 238076 - DNA, 25 bp, probe
gtcatagtggcccggaaggggttag

SEQ ID NO: 238077 - DNA, 25 bp, probe
gtacacggctcgggaaggggccaag

SEQ ID NO: 238078 - DNA, 25 bp, probe
gtacaaggcatggcgtagagggtgc

SEQ ID NO: 238079 - DNA, 25 bp, probe
gtacaaactggcatgaatgtctggc

SEQ ID NO: 238080 - DNA, 25 bp, probe
gtacaaactggcatgaatgtctggc

SEQ ID NO: 238081 - DNA, 25 bp, probe
gtaactgttgagatgtatgtgcatg

SEQ ID NO: 238082 - DNA, 25 bp, probe
gtacagctgattatctatagatcgt

SEQ ID NO: 238083 - DNA, 25 bp, probe
gtacagctggataacttgccaggaa

SEQ ID NO: 238084 - DNA, 25 bp, probe
gtaagagctgatgacttcctaacac

SEQ ID NO: 238085 - DNA, 25 bp, probe
gtcaaggtacagctctcctagacaa

SEQ ID NO: 238086 - DNA, 25 bp, probe
gtaagaagtcagctctcttcatcca

SEQ ID NO: 238087 - DNA, 25 bp, probe
gtaacaggaatgcttctctgtcaaa

SEQ ID NO: 238088 - DNA, 25 bp, probe
gtaactgctttgcttcttgagtaga

SEQ ID NO: 238089 - DNA, 25 bp, probe
gtacagtctgattctttttatctgg

SEQ ID NO: 238090 - DNA, 25 bp, probe
gtacaagctgatgttttgtattttg

SEQ ID NO: 238091 - DNA, 25 bp, probe
gtacacagtctgttttctatttgtt

SEQ ID NO: 238092 - DNA, 25 bp, probe
gtacagtgtcgctttttgaatagtt

SEQ ID NO: 238093 - DNA, 25 bp, probe
gtaaatcccattattgatatgttta

SEQ ID NO: 238094 - DNA, 25 bp, probe
gtaacacaggattcactgttttatt

SEQ ID NO: 238095 - DNA, 25 bp, probe
gtaacctggaaactatgctttacat

SEQ ID NO: 238096 - DNA, 25 bp, probe
gtacaccatggagcacggtttaagc

SEQ ID NO: 238097 - DNA, 25 bp, probe
gtacaccatggagcacggtttaagc

SEQ ID NO: 238098 - DNA, 25 bp, probe
gtacatgggtgagagaggttaaagc

SEQ ID NO: 238099 - DNA, 25 bp, probe
gtacagaatgtagggatgggttaag

SEQ ID NO: 238100 - DNA, 25 bp, probe
gtacagaagttccactgatgtgtgt

SEQ ID NO: 238101 - DNA, 25 bp, probe
gtaagaaatttctgcatggtctaaa

SEQ ID NO: 238102 - DNA, 25 bp, probe
gtaaatattctacacatgtaaaata

SEQ ID NO: 238103 - DNA, 25 bp, probe
gtaaatgtggtatacaggacaaact

SEQ ID NO: 238104 - DNA, 25 bp, probe
gtaatcgatgtggaaaacccaaagg

SEQ ID NO: 238105 - DNA, 25 bp, probe
gtaatcagtgtagagaaaaccgtga

SEQ ID NO: 238106 - DNA, 25 bp, probe
gtaacttacagccagtaaactcttt

SEQ ID NO: 238107 - DNA, 25 bp, probe
gtaacttacagccagtaaactcttt

SEQ ID NO: 238108 - DNA, 25 bp, probe
gtaacttaacgattcttcacttctt

SEQ ID NO: 238109 - DNA, 25 bp, probe
gtcacttttcacatccttgactttt

SEQ ID NO: 238110 - DNA, 25 bp, probe
gtacatatattatttccttagttta

SEQ ID NO: 238111 - DNA, 25 bp, probe
gtctttttaatcacctcgtttgagt

SEQ ID NO: 238112 - DNA, 25 bp, probe
gtctttttaatcacctcgtttgagt

SEQ ID NO: 238113 - DNA, 25 bp, probe
gtaagtttgttcaccgagatttagc

SEQ ID NO: 238114 - DNA, 25 bp, probe
gtaaattgtttcagcaaaattctgc

SEQ ID NO: 238115 - DNA, 25 bp, probe
gtcaaacgtttgcggccaattgtgt

SEQ ID NO: 238116 - DNA, 25 bp, probe
gtacacacgtttgagacgactgttg

SEQ ID NO: 238117 - DNA, 25 bp, probe
gtacatcgcgatatcaaaggaaata

SEQ ID NO: 238118 - DNA, 25 bp, probe
gtacacagcgaaccacaggatgggg

SEQ ID NO: 238119 - DNA, 25 bp, probe
gtcaccaggtgacagggtctgggtg

SEQ ID NO: 238120 - DNA, 25 bp, probe
gtcaccaggtgacagggtctgggtg

SEQ ID NO: 238121 - DNA, 25 bp, probe
gtaagcggcaacaagggtccgtgga

SEQ ID NO: 238122 - DNA, 25 bp, probe
gtaacatgtgcaaaagctccccgtc

SEQ ID NO: 238123 - DNA, 25 bp, probe
gtaacagtgaaatgcaaccttgcat

SEQ ID NO: 238124 - DNA, 25 bp, probe
gtacaattgccatatgatttctagc

SEQ ID NO: 238125 - DNA, 25 bp, probe
gtacaatgcttctatgaatatttcc

SEQ ID NO: 238126 - DNA, 25 bp, probe
gtacactgttcacgaccagtgtgcc

SEQ ID NO: 238127 - DNA, 25 bp, probe
gtacaatgtatccaacagacactca

SEQ ID NO: 238128 - DNA, 25 bp, probe
gtacagtctgactaataactgctaa

SEQ ID NO: 238129 - DNA, 25 bp, probe
gtacagtctgactaataactgctaa

SEQ ID NO: 238130 - DNA, 25 bp, probe
gtacaggtcctaaaatatgaacaat

SEQ ID NO: 238131 - DNA, 25 bp, probe
gtaaggtcctctgaagacaagactt

SEQ ID NO: 238132 - DNA, 25 bp, probe
gtaaggtcctctgaagacaagactt

SEQ ID NO: 238133 - DNA, 25 bp, probe
gtacaggttcctgtaccacacggtg

SEQ ID NO: 238134 - DNA, 25 bp, probe
gtacaggtctggaaccaccgagtgc

SEQ ID NO: 238135 - DNA, 25 bp, probe
gtcaaggttgtgacctccacagacg

SEQ ID NO: 238136 - DNA, 25 bp, probe
gtacaggggtatcctggaagcctcc

SEQ ID NO: 238137 - DNA, 25 bp, probe
gtacagatgggaagttgaatagttt

SEQ ID NO: 238138 - DNA, 25 bp, probe
gtacagatgggaagttgaatagttt

SEQ ID NO: 238139 - DNA, 25 bp, probe
gtacagatggagatgtcatcacaat

SEQ ID NO: 238140 - DNA, 25 bp, probe
gtacagatggagatgtcatcacaat

SEQ ID NO: 238141 - DNA, 25 bp, probe
gtaagtgggcatggtctcctaatgg

SEQ ID NO: 238142 - DNA, 25 bp, probe
gtcaaaggctgtgagcccttcatgg

SEQ ID NO: 238143 - DNA, 25 bp, probe
gtaaaggcagccgaggaatccaatg

SEQ ID NO: 238144 - DNA, 25 bp, probe
gtacaattgaacttaaataaatgtc

SEQ ID NO: 238145 - DNA, 25 bp, probe
gtaaattaagcagatagtcaaagaa

SEQ ID NO: 238146 - DNA, 25 bp, probe
gtaaatactactgatctgtcaccaa

SEQ ID NO: 238147 - DNA, 25 bp, probe
gtacaatgtaactttatgcttccaa

SEQ ID NO: 238148 - DNA, 25 bp, probe
gtcaaatcagaacacttcttccaga

SEQ ID NO: 238149 - DNA, 25 bp, probe
gtcaaggcacaatcagttttcagga

SEQ ID NO: 238150 - DNA, 25 bp, probe
gtaacagtatattatttgtacagtg

SEQ ID NO: 238151 - DNA, 25 bp, probe
gtaattgtttgtctttaactgtcaa

SEQ ID NO: 238152 - DNA, 25 bp, probe
gtaatttatagtctctccaacagtg

SEQ ID NO: 238153 - DNA, 25 bp, probe
gtaagtggataagattacacagatt

SEQ ID NO: 238154 - DNA, 25 bp, probe
gtaaatggaaggcaaagcatcacat

SEQ ID NO: 238155 - DNA, 25 bp, probe
gtaagcatgtgtgggcaaaaaagca

SEQ ID NO: 238156 - DNA, 25 bp, probe
gtaagcatgtgtgggcaaaaaagca

SEQ ID NO: 238157 - DNA, 25 bp, probe
gtacacatggataccgctcaaaaga

SEQ ID NO: 238158 - DNA, 25 bp, probe
gtaacaaggcaccgctaagcaagca

SEQ ID NO: 238159 - DNA, 25 bp, probe
gtcaaagggccactgccaaggcgac

SEQ ID NO: 238160 - DNA, 25 bp, probe
gtcaaagggccactgccaaggcgac

SEQ ID NO: 238161 - DNA, 25 bp, probe
gtacaactgtgcggccaagatgctc

SEQ ID NO: 238162 - DNA, 25 bp, probe
gtaacaatgctgctgtcactgtctc

SEQ ID NO: 238163 - DNA, 25 bp, probe
gtaaatagcttgtgcacagatgacg

SEQ ID NO: 238164 - DNA, 25 bp, probe
gtaaaactattccacaagatcgaca

SEQ ID NO: 238165 - DNA, 25 bp, probe
gtaaaactattccacaagatcgaca

SEQ ID NO: 238166 - DNA, 25 bp, probe
gtaagtttattaccaaagtgatatg

SEQ ID NO: 238167 - DNA, 25 bp, probe
gtaagtttattaccaaagtgatatg

SEQ ID NO: 238168 - DNA, 25 bp, probe
gtaatttttcaagtcagaagctgat

SEQ ID NO: 238169 - DNA, 25 bp, probe
gtaatttttcaagtcagaagctgat

SEQ ID NO: 238170 - DNA, 25 bp, probe
gtaatttttcaagtcagaagctgat

SEQ ID NO: 238171 - DNA, 25 bp, probe
gtcaatatttgaccactctggactg

SEQ ID NO: 238172 - DNA, 25 bp, probe
gtaatcatgattgagcctcagaatc

SEQ ID NO: 238173 - DNA, 25 bp, probe
gtaatcatgattgagcctcagaatc

SEQ ID NO: 238174 - DNA, 25 bp, probe
gtaacagatatcgatgaactaggca

SEQ ID NO: 238175 - DNA, 25 bp, probe
gtcagggatacggcaagcatgaatg

SEQ ID NO: 238176 - DNA, 25 bp, probe
gtcaagagctacctgcagatgctgc

SEQ ID NO: 238177 - DNA, 25 bp, probe
gtacagcagtaaatctgatgtctgg

SEQ ID NO: 238178 - DNA, 25 bp, probe
gtacagcagtaaatctgatgtctgg

SEQ ID NO: 238179 - DNA, 25 bp, probe
gtacacatgatatttcggaattggt

SEQ ID NO: 238180 - DNA, 25 bp, probe
gtacacatgatatttcggaattggt

SEQ ID NO: 238181 - DNA, 25 bp, probe
gtaagatctagtccggacttgctgt

SEQ ID NO: 238182 - DNA, 25 bp, probe
gtacagaatcgaactctgcacttct

SEQ ID NO: 238183 - DNA, 25 bp, probe
gtacaggtcagtaagcctcattatt

SEQ ID NO: 238184 - DNA, 25 bp, probe
gtacactcatagttagctttgtaat

SEQ ID NO: 238185 - DNA, 25 bp, probe
gtaagctgaagcagacatttgtagt

SEQ ID NO: 238186 - DNA, 25 bp, probe
gtcactctgaagcacaatatttatg

SEQ ID NO: 238187 - DNA, 25 bp, probe
gtcaatctggaccacacagacgacg

SEQ ID NO: 238188 - DNA, 25 bp, probe
gtaacaagagcatcacagccaagga

SEQ ID NO: 238189 - DNA, 25 bp, probe
gtcagacaagaatcctgggagcagt

SEQ ID NO: 238190 - DNA, 25 bp, probe
tgttcaggcacgccagaaggatgcc

SEQ ID NO: 238191 - DNA, 25 bp, probe
agaaggatgccgcagaccattatct

SEQ ID NO: 238192 - DNA, 25 bp, probe
gccgcagaccattatctggcgggag

SEQ ID NO: 238193 - DNA, 25 bp, probe
cgttagcgactgcgacgttcgatct

SEQ ID NO: 238194 - DNA, 25 bp, probe
cgacgttcgatcttgcatggagcaa

SEQ ID NO: 238195 - DNA, 25 bp, probe
gatcttgcatggagcaatctcgcag

SEQ ID NO: 238196 - DNA, 25 bp, probe
caatctcgcagtgcagtggtgcggt

SEQ ID NO: 238197 - DNA, 25 bp, probe
atttatccacggcactccgcgagct

SEQ ID NO: 238198 - DNA, 25 bp, probe
tacccgaacgtcatcaggcgtggca

SEQ ID NO: 238199 - DNA, 25 bp, probe
ggtggacgagcgtccgcatgctaat

SEQ ID NO: 238200 - DNA, 25 bp, probe
cgtccgcatgctaatcgctttttac

SEQ ID NO: 238201 - DNA, 25 bp, probe
tttaccgccagatgaaatcgaacag

SEQ ID NO: 238202 - DNA, 25 bp, probe
gatgaaatcgaacagtcgctgaacg

SEQ ID NO: 238203 - DNA, 25 bp, probe
aacagtcgctgaacggcgtgcatta

SEQ ID NO: 238204 - DNA, 25 bp, probe
acatcatattcagcccatcacgctg

SEQ ID NO: 238205 - DNA, 25 bp, probe
ttcagcccatcacgctgtggtttga

SEQ ID NO: 238206 - DNA, 25 bp, probe
atcacgctgtggtttgatgatgcgc

SEQ ID NO: 238207 - DNA, 25 bp, probe
ggtttgatgatgcgctcagtgccat

SEQ ID NO: 238208 - DNA, 25 bp, probe
gtaaatttctctactgtctcagttt

SEQ ID NO: 238209 - DNA, 25 bp, probe
gtaaatcttcatgtgattgtcatgt

SEQ ID NO: 238210 - DNA, 25 bp, probe
gtaaccttctgcttgtggtgcatta

SEQ ID NO: 238211 - DNA, 25 bp, probe
gtacactttgtatgggtgcatgttc

SEQ ID NO: 238212 - DNA, 25 bp, probe
gtacactttcaatcaacactttttc

SEQ ID NO: 238213 - DNA, 25 bp, probe
gtacagtgtgtataaaccttcttct

SEQ ID NO: 238214 - DNA, 25 bp, probe
gtacaatgtcagaaaagggattctt

SEQ ID NO: 238215 - DNA, 25 bp, probe
gtaaaccagtgaaagggcattccaa

SEQ ID NO: 238216 - DNA, 25 bp, probe
gtcaaaccggaggagagactcacca

SEQ ID NO: 238217 - DNA, 25 bp, probe
gtaagccctgtgaggagagctccca

SEQ ID NO: 238218 - DNA, 25 bp, probe
gtaactctgagggggggcacccagt

SEQ ID NO: 238219 - DNA, 25 bp, probe
gtacacatcgtatggggtgacaccg

SEQ ID NO: 238220 - DNA, 25 bp, probe
gtacaccttgatttaaagccacaga

SEQ ID NO: 238221 - DNA, 25 bp, probe
gtaacttttgtaaatacacacagca

SEQ ID NO: 238222 - DNA, 25 bp, probe
gtaacttttgtaaatacacacagca

SEQ ID NO: 238223 - DNA, 25 bp, probe
gtcaactttggtttcagcaccacat

SEQ ID NO: 238224 - DNA, 25 bp, probe
gtcaaggggcagcttcagaccatgc

SEQ ID NO: 238225 - DNA, 25 bp, probe
gtaactggccagccattcatcggat

SEQ ID NO: 238226 - DNA, 25 bp, probe
gtaacttcacatcatcagcttgcag

SEQ ID NO: 238227 - DNA, 25 bp, probe
gtacagttctccatcagccagatga

SEQ ID NO: 238228 - DNA, 25 bp, probe
gtacagttcataattcaccaaaaag

SEQ ID NO: 238229 - DNA, 25 bp, probe
gtacaataccagatcactcaaaaag

SEQ ID NO: 238230 - DNA, 25 bp, probe
gtacaatgaactattctcatgaaaa

SEQ ID NO: 238231 - DNA, 25 bp, probe
gtaactataatgaaatctgctgcaa

SEQ ID NO: 238232 - DNA, 25 bp, probe
gtaactaactaactgctgtggttgg

SEQ ID NO: 238233 - DNA, 25 bp, probe
gtaaaagacaatactcttgtgttac

SEQ ID NO: 238234 - DNA, 25 bp, probe
gtaaacagtaatacattgcttaata

SEQ ID NO: 238235 - DNA, 25 bp, probe
gtaatccaggaagtatatctatatg

SEQ ID NO: 238236 - DNA, 25 bp, probe
gtaaccggcatattattccatatct

SEQ ID NO: 238237 - DNA, 25 bp, probe
gtaaccaggctgcgatcatggaact

SEQ ID NO: 238238 - DNA, 25 bp, probe
gtaacagcatggcgaactgggatat

SEQ ID NO: 238239 - DNA, 25 bp, probe
gtacaacaaggggatcatgggtgaa

SEQ ID NO: 238240 - DNA, 25 bp, probe
gtcacactaaggagactttgttcat

SEQ ID NO: 238241 - DNA, 25 bp, probe
gtcacactaaggagactttgttcat

SEQ ID NO: 238242 - DNA, 25 bp, probe
gtcaccgacagaaggactgcttttg

SEQ ID NO: 238243 - DNA, 25 bp, probe
gtacaaccagtatgatctgcagaat

SEQ ID NO: 238244 - DNA, 25 bp, probe
gtacaactcgtatttatctctgatg

SEQ ID NO: 238245 - DNA, 25 bp, probe
gtacaactcgtatttatctctgatg

SEQ ID NO: 238246 - DNA, 25 bp, probe
gtacaaagcctgacttacaatatgc

SEQ ID NO: 238247 - DNA, 25 bp, probe
gtaaaacttgctttgaaatagcagc

SEQ ID NO: 238248 - DNA, 25 bp, probe
gtaaaatcccctagagcagagagag

SEQ ID NO: 238249 - DNA, 25 bp, probe
gtaaaaggcagcatcaagagaggga

SEQ ID NO: 238250 - DNA, 25 bp, probe
gtaaaaggcagcatcaagagaggga

SEQ ID NO: 238251 - DNA, 25 bp, probe
gtaatggagctggctaccggagggg

SEQ ID NO: 238252 - DNA, 25 bp, probe
gtacaatgtgttgaccatcgcaggg

SEQ ID NO: 238253 - DNA, 25 bp, probe
gtacacagttgtgatgtctaggggc

SEQ ID NO: 238254 - DNA, 25 bp, probe
gtacacagttatacatgtctatcaa

SEQ ID NO: 238255 - DNA, 25 bp, probe
gtacagcatttggtgtgtgcttata

SEQ ID NO: 238256 - DNA, 25 bp, probe
gtacactttagtctcttggcagtag

SEQ ID NO: 238257 - DNA, 25 bp, probe
gtacagctgctttgtttctttgcaa

SEQ ID NO: 238258 - DNA, 25 bp, probe
gtaacatttctgttctcatttgatc

SEQ ID NO: 238259 - DNA, 25 bp, probe
gtacactggtgtttatatttgcaca

SEQ ID NO: 238260 - DNA, 25 bp, probe
gtacactggtgtttatatttgcaca

SEQ ID NO: 238261 - DNA, 25 bp, probe
gtacacagggttcatcatctacact

SEQ ID NO: 238262 - DNA, 25 bp, probe
gtacaagggaatgtcacaagcacag

SEQ ID NO: 238263 - DNA, 25 bp, probe
gtacaaggggatcgacaaccacacc

SEQ ID NO: 238264 - DNA, 25 bp, probe
gtctaatgggggcagtctccccttc

SEQ ID NO: 238265 - DNA, 25 bp, probe
gtaacttggggatggtctcccctgc

SEQ ID NO: 238266 - DNA, 25 bp, probe
gtaactgaggagaggggcgcctcct

SEQ ID NO: 238267 - DNA, 25 bp, probe
tgtaaagctggaaagggacgaactg

SEQ ID NO: 238268 - DNA, 25 bp, probe
gtaaagctggaaagggacgaactgg

SEQ ID NO: 238269 - DNA, 25 bp, probe
gtaaactgaatctaatatgacacaa

SEQ ID NO: 238270 - DNA, 25 bp, probe
gtaacactaataggattggcaccag

SEQ ID NO: 238271 - DNA, 25 bp, probe
gtaaccccaagcattggatgactca

SEQ ID NO: 238272 - DNA, 25 bp, probe
gtaacacaccaacgtactgtgacct

SEQ ID NO: 238273 - DNA, 25 bp, probe
gtaaccacgcctggttctgtacatg

SEQ ID NO: 238274 - DNA, 25 bp, probe
gtaacaacagccgcttctggaacgg

SEQ ID NO: 238275 - DNA, 25 bp, probe
gtaaatccatgctcatgttctaaac

SEQ ID NO: 238276 - DNA, 25 bp, probe
gtaaaaagcttcattctcactctgc

SEQ ID NO: 238277 - DNA, 25 bp, probe
gtcaaaaaatctcaattcttcccta

SEQ ID NO: 238278 - DNA, 25 bp, probe
gtaaaaacactgctatacctcctta

SEQ ID NO: 238279 - DNA, 25 bp, probe
gtaatgaaaccttccatgaccacct

SEQ ID NO: 238280 - DNA, 25 bp, probe
gtaatacaacacgccggactgactc

SEQ ID NO: 238281 - DNA, 25 bp, probe
gtaaaagatcgcgccggattattgc

SEQ ID NO: 238282 - DNA, 25 bp, probe
gtaaagcgagctgacgctggttttg

SEQ ID NO: 238283 - DNA, 25 bp, probe
gtacaacaacatgcgcgtggagttc

SEQ ID NO: 238284 - DNA, 25 bp, probe
gtacaacaacatgcgcgtggagttc

SEQ ID NO: 238285 - DNA, 25 bp, probe
gtacaacaacatgcgcgtggagttc

SEQ ID NO: 238286 - DNA, 25 bp, probe
gtacaagatacaaatgactcgagtt

SEQ ID NO: 238287 - DNA, 25 bp, probe
gtaaagatactgctgacctgtgctt

SEQ ID NO: 238288 - DNA, 25 bp, probe
gtaaaataggtgtcacgctgttttt

SEQ ID NO: 238289 - DNA, 25 bp, probe
gtaaaataggtgtcacgctgttttt

SEQ ID NO: 238290 - DNA, 25 bp, probe
gtaaaacagtgaacacacgctttct

SEQ ID NO: 238291 - DNA, 25 bp, probe
gtcaaagaagtgcagaacgtactct

SEQ ID NO: 238292 - DNA, 25 bp, probe
gtaaaaaggccatagcccattatga

SEQ ID NO: 238293 - DNA, 25 bp, probe
gtaactacagtggcattaggactta

SEQ ID NO: 238294 - DNA, 25 bp, probe
gtaactgtagtgtagtcaggtgctc

SEQ ID NO: 238295 - DNA, 25 bp, probe
gtaattctaggctgaaggactcttc

SEQ ID NO: 238296 - DNA, 25 bp, probe
gtcaatgcttccctggacatagacc

SEQ ID NO: 238297 - DNA, 25 bp, probe
gtcaatgcttccctggacatagacc

SEQ ID NO: 238298 - DNA, 25 bp, probe
gtaaatatcagccttgcagcaagac

SEQ ID NO: 238299 - DNA, 25 bp, probe
gtacacacatccctctgagaagcac

SEQ ID NO: 238300 - DNA, 25 bp, probe
gtacaacctctttagaagacatctt

SEQ ID NO: 238301 - DNA, 25 bp, probe
gtacaacctctttagaagacatctt

SEQ ID NO: 238302 - DNA, 25 bp, probe
gtaaaagtcttctgagagctcctga

SEQ ID NO: 238303 - DNA, 25 bp, probe
gtaaaagtcttctgagagctcctga

SEQ ID NO: 238304 - DNA, 25 bp, probe
gtaaaaacatctatcgcatgtgcct

SEQ ID NO: 238305 - DNA, 25 bp, probe
gtcaacaaccgtaaccatgggctgg

SEQ ID NO: 238306 - DNA, 25 bp, probe
gtcaacaaccgtaaccatgggctgg

SEQ ID NO: 238307 - DNA, 25 bp, probe
gtgaactgacctctaaagcagcgtg

SEQ ID NO: 238308 - DNA, 25 bp, probe
gtaagtggctatttgtaaagcagtg

SEQ ID NO: 238309 - DNA, 25 bp, probe
gtaagcagttctattgacaaggatg

SEQ ID NO: 238310 - DNA, 25 bp, probe
gtaagatttctttatggcatagtat

SEQ ID NO: 238311 - DNA, 25 bp, probe
gtaaatagctcagtgttgtatagtg

SEQ ID NO: 238312 - DNA, 25 bp, probe
gtacaatgagccttactgtatttag

SEQ ID NO: 238313 - DNA, 25 bp, probe
gtcatcgattgtctcacgtattttc

SEQ ID NO: 238314 - DNA, 25 bp, probe
gtaatgtgcattcaggtgaattttc

SEQ ID NO: 238315 - DNA, 25 bp, probe
gtaagtattgcctggtgtcatcgac

SEQ ID NO: 238316 - DNA, 25 bp, probe
gtaacagagtcctcgctgtatggag

SEQ ID NO: 238317 - DNA, 25 bp, probe
gtaaagagttttcgagtgttgcagg

SEQ ID NO: 238318 - DNA, 25 bp, probe
gtaaagtgttattgaatgtgtgggg

SEQ ID NO: 238319 - DNA, 25 bp, probe
gtaacatttgaatttgatcttaggg

SEQ ID NO: 238320 - DNA, 25 bp, probe
gtaaatacataagcggcgtaagttt

SEQ ID NO: 238321 - DNA, 25 bp, probe
gtaaataatgaactcgtgcaagaca

SEQ ID NO: 238322 - DNA, 25 bp, probe
gtaacatcactatccgatgcaccaa

SEQ ID NO: 238323 - DNA, 25 bp, probe
gtaactagtctaccagtgacctcag

SEQ ID NO: 238324 - DNA, 25 bp, probe
gtaagctatgatcatgccactgcac

SEQ ID NO: 238325 - DNA, 25 bp, probe
gtaactgcaggactgcgcctactga

SEQ ID NO: 238326 - DNA, 25 bp, probe
gtaactgcaggactgcgcctactga

SEQ ID NO: 238327 - DNA, 25 bp, probe
gtaatcgatggggagtctgaagcag

SEQ ID NO: 238328 - DNA, 25 bp, probe
gtcactcttttgggatctaactgtt

SEQ ID NO: 238329 - DNA, 25 bp, probe
gtcactcttttgggatctaactgtt

SEQ ID NO: 238330 - DNA, 25 bp, probe
gtcacactaagtcttctggaggttc

SEQ ID NO: 238331 - DNA, 25 bp, probe
gtcacactaagtcttctggaggttc

SEQ ID NO: 238332 - DNA, 25 bp, probe
gtgccctggactgtttcaaggtcca

SEQ ID NO: 238333 - DNA, 25 bp, probe
gtcagcctaccgttttaggtgtcca

SEQ ID NO: 238334 - DNA, 25 bp, probe
gtcacctacaccattttaggcatta

SEQ ID NO: 238335 - DNA, 25 bp, probe
gtaacgacacacactactgcaatga

SEQ ID NO: 238336 - DNA, 25 bp, probe
gtaacgacacacactactgcaatga

SEQ ID NO: 238337 - DNA, 25 bp, probe
gtaaattcatacacttatcacatga

SEQ ID NO: 238338 - DNA, 25 bp, probe
gtcaaaacatacctacttccagata

SEQ ID NO: 238339 - DNA, 25 bp, probe
gtaaaaatccactatttccattgaa

SEQ ID NO: 238340 - DNA, 25 bp, probe
gtaaataaaacactcttccatatga

SEQ ID NO: 238341 - DNA, 25 bp, probe
gtaaataccaaagttccagctagaa

SEQ ID NO: 238342 - DNA, 25 bp, probe
gtaaataccaaagttccagctagaa

SEQ ID NO: 238343 - DNA, 25 bp, probe
gtaattatacacatttccagttcca

SEQ ID NO: 238344 - DNA, 25 bp, probe
gtaattacccagatcctatggttcg

SEQ ID NO: 238345 - DNA, 25 bp, probe
gtaatcaagcaagggcctttggttt

SEQ ID NO: 238346 - DNA, 25 bp, probe
gtaatcaagcaagggcctttggttt

SEQ ID NO: 238347 - DNA, 25 bp, probe
gtcaacaccaccgggcatttggtga

SEQ ID NO: 238348 - DNA, 25 bp, probe
gtaacaaccacgggtgtaagtgcca

SEQ ID NO: 238349 - DNA, 25 bp, probe
gtaacaacgacctagaaaagtgaga

SEQ ID NO: 238350 - DNA, 25 bp, probe
gtaacaactacctattatgtgagga

SEQ ID NO: 238351 - DNA, 25 bp, probe
gtaaatcctggttatcggcgatgtg

SEQ ID NO: 238352 - DNA, 25 bp, probe
gtaagatactgggttggtgcacagt

SEQ ID NO: 238353 - DNA, 25 bp, probe
gtaagaacctggagcccaagtataa

SEQ ID NO: 238354 - DNA, 25 bp, probe
gtaaaactccgaagtcctaaatcag

SEQ ID NO: 238355 - DNA, 25 bp, probe
gtgaaaaccctgaagccaggaacta

SEQ ID NO: 238356 - DNA, 25 bp, probe
gtaactgtccctgaccagggcacat

SEQ ID NO: 238357 - DNA, 25 bp, probe
gtaactgtccctgaccagggcacat

SEQ ID NO: 238358 - DNA, 25 bp, probe
gtaactgtccaaaagccatgaagag

SEQ ID NO: 238359 - DNA, 25 bp, probe
gtaactgtccaaaagccatgaagag

SEQ ID NO: 238360 - DNA, 25 bp, probe
gtaactgatgaaaaatccatgggtg

SEQ ID NO: 238361 - DNA, 25 bp, probe
gtaactgatgaaaaatccatgggtg

SEQ ID NO: 238362 - DNA, 25 bp, probe
gtaactgcgagagcttgctgagggg

SEQ ID NO: 238363 - DNA, 25 bp, probe
gtaactaaactggtcgagcgatgga

SEQ ID NO: 238364 - DNA, 25 bp, probe
gtcaactaaacagccccgaggactt

SEQ ID NO: 238365 - DNA, 25 bp, probe
gtcaacaaaacagccagcgggcggg

SEQ ID NO: 238366 - DNA, 25 bp, probe
gtcaacaaaccaagcatcaggggga

SEQ ID NO: 238367 - DNA, 25 bp, probe
gtaagaacacatcatgccaggtaga

SEQ ID NO: 238368 - DNA, 25 bp, probe
gtaagaacacatcatgccaggtaga

SEQ ID NO: 238369 - DNA, 25 bp, probe
gtaagaaactgcctggagcctggaa

SEQ ID NO: 238370 - DNA, 25 bp, probe
gtaagaaactgcctggagcctggaa

SEQ ID NO: 238371 - DNA, 25 bp, probe
gtaatccaagatggttggctctaca

SEQ ID NO: 238372 - DNA, 25 bp, probe
gtaattcaagctggttagcttaatt

SEQ ID NO: 238373 - DNA, 25 bp, probe
gtaatacagtttctacgtctattta

SEQ ID NO: 238374 - DNA, 25 bp, probe
gtaaatactttgcatattgtctgat

SEQ ID NO: 238375 - DNA, 25 bp, probe
gtaaatactgttcgcttttctatca

SEQ ID NO: 238376 - DNA, 25 bp, probe
gtaaaatatatttcttctatctaat

SEQ ID NO: 238377 - DNA, 25 bp, probe
gtaaaatatattactctttccaaga

SEQ ID NO: 238378 - DNA, 25 bp, probe
gtaaaagtattgactcttctaccaa

SEQ ID NO: 238379 - DNA, 25 bp, probe
gtcaaccagtacccttacatataaa

SEQ ID NO: 238380 - DNA, 25 bp, probe
gtcaaaagtagcgcttagttatcac

SEQ ID NO: 238381 - DNA, 25 bp, probe
gtaatgaacaacagcattcagttat

SEQ ID NO: 238382 - DNA, 25 bp, probe
gtaatgaacatctttttcagtaatt

SEQ ID NO: 238383 - DNA, 25 bp, probe
gtcactaactctgatttcctaagaa

SEQ ID NO: 238384 - DNA, 25 bp, probe
gtcatctttcttgtttcatcgtaaa

SEQ ID NO: 238385 - DNA, 25 bp, probe
gtaagattgcttgtctttgcttaaa

SEQ ID NO: 238386 - DNA, 25 bp, probe
gtaaatgttgtagcttattctaaat

SEQ ID NO: 238387 - DNA, 25 bp, probe
gtaaatgtgtgtaggtctcactgta

SEQ ID NO: 238388 - DNA, 25 bp, probe
gtaactggctttgggcttctatgac

SEQ ID NO: 238389 - DNA, 25 bp, probe
gtaactggtggtgaactcactggcc

SEQ ID NO: 238390 - DNA, 25 bp, probe
gtgaccatggtgattacttccggct

SEQ ID NO: 238391 - DNA, 25 bp, probe
gtgatcttgggcagaacataccggg

SEQ ID NO: 238392 - DNA, 25 bp, probe
gggctgacctttcaaaccagagggt

SEQ ID NO: 238393 - DNA, 25 bp, probe
gtgcagtaccttctagaacacggag

SEQ ID NO: 238394 - DNA, 25 bp, probe
gtaaacctgatcacagtcacactgg

SEQ ID NO: 238395 - DNA, 25 bp, probe
gtgaagcattcgagacagaaccttg

SEQ ID NO: 238396 - DNA, 25 bp, probe
gtaacctgtcagcaaggccttatgt

SEQ ID NO: 238397 - DNA, 25 bp, probe
gtaatgctttacacaggcagttttg

SEQ ID NO: 238398 - DNA, 25 bp, probe
gtaaatgctgtagaagtgagtttgt

SEQ ID NO: 238399 - DNA, 25 bp, probe
gtaattttcaggaagatgatttgtt

SEQ ID NO: 238400 - DNA, 25 bp, probe
gtaacgttcagccatcagatttagt

SEQ ID NO: 238401 - DNA, 25 bp, probe
gtaacgggagccagttcatagcagc

SEQ ID NO: 238402 - DNA, 25 bp, probe
gtaacgtggcacctttatgattgag

SEQ ID NO: 238403 - DNA, 25 bp, probe
gtaacctggcctttgtgaattcatg

SEQ ID NO: 238404 - DNA, 25 bp, probe
gtaacctggcctttgtgaattcatg

SEQ ID NO: 238405 - DNA, 25 bp, probe
gtaacttgtgtctcatgaaaatcag

SEQ ID NO: 238406 - DNA, 25 bp, probe
gtaacttgtgtctcatgaaaatcag

SEQ ID NO: 238407 - DNA, 25 bp, probe
gtaaccctgtctaatgaaacctgtg

SEQ ID NO: 238408 - DNA, 25 bp, probe
gtaactcttggcaaggtaacctggg

SEQ ID NO: 238409 - DNA, 25 bp, probe
gtaactcttggcaaggtaacctggg

SEQ ID NO: 238410 - DNA, 25 bp, probe
gtgagcactctactgcaagacttaa

SEQ ID NO: 238411 - DNA, 25 bp, probe
gtaacctatgtcagacactacatga

SEQ ID NO: 238412 - DNA, 25 bp, probe
gtaacctttttatcttgatgcattg

SEQ ID NO: 238413 - DNA, 25 bp, probe
gtaacttgtgttagggctgtgagct

SEQ ID NO: 238414 - DNA, 25 bp, probe
gtaacttgtgttagggctgtgagct

SEQ ID NO: 238415 - DNA, 25 bp, probe
gtaacttgttctagtatggtgctaa

SEQ ID NO: 238416 - DNA, 25 bp, probe
gtaattatcctcaagttgtgtgcta

SEQ ID NO: 238417 - DNA, 25 bp, probe
gtaattatcctcaagttgtgtgcta

SEQ ID NO: 238418 - DNA, 25 bp, probe
gtaacttgccacatgatattgatga

SEQ ID NO: 238419 - DNA, 25 bp, probe
gtaacttcctatagcagcaatatga

SEQ ID NO: 238420 - DNA, 25 bp, probe
gtaacttcctatagcagcaatatga

SEQ ID NO: 238421 - DNA, 25 bp, probe
gtaagctatgcttagtgccaatagt

SEQ ID NO: 238422 - DNA, 25 bp, probe
gtaacgtgctgttgaccaatggtca

SEQ ID NO: 238423 - DNA, 25 bp, probe
gtaaagtgtgatcattactggccag

SEQ ID NO: 238424 - DNA, 25 bp, probe
gtaaagtctgaaatatacagctttg

SEQ ID NO: 238425 - DNA, 25 bp, probe
gtaaagatctgtctgaagcagcttc

SEQ ID NO: 238426 - DNA, 25 bp, probe
gtaaacacatgatagcaaactccta

SEQ ID NO: 238427 - DNA, 25 bp, probe
gtaattcatacattagaacacccaa

SEQ ID NO: 238428 - DNA, 25 bp, probe
gtaattcatacattagaacacccaa

SEQ ID NO: 238429 - DNA, 25 bp, probe
gtaatgtctgaacttgaaagccaca

SEQ ID NO: 238430 - DNA, 25 bp, probe
gtaatgtctgaacttgaaagccaca

SEQ ID NO: 238431 - DNA, 25 bp, probe
gtaacctgattgtggaaagcacatc

SEQ ID NO: 238432 - DNA, 25 bp, probe
gtcaagtgcgagccacaggaaaaat

SEQ ID NO: 238433 - DNA, 25 bp, probe
gtaagccgatgggatggcaatgaga

SEQ ID NO: 238434 - DNA, 25 bp, probe
gtaagccagaaccattgaatgagga

SEQ ID NO: 238435 - DNA, 25 bp, probe
gtaaggacaactttgatatgtgcag

SEQ ID NO: 238436 - DNA, 25 bp, probe
gtcaaaactactgtgtctgatacca

SEQ ID NO: 238437 - DNA, 25 bp, probe
gtcaggtactactaatattattcct

SEQ ID NO: 238438 - DNA, 25 bp, probe
gtaataactgatgagatacatttga

SEQ ID NO: 238439 - DNA, 25 bp, probe
gtaataaaaggcctgacatatctga

SEQ ID NO: 238440 - DNA, 25 bp, probe
gtaattttgaccctgacttcataaa

SEQ ID NO: 238441 - DNA, 25 bp, probe
gtaagatattacagccatttcatga

SEQ ID NO: 238442 - DNA, 25 bp, probe
gtaaaaatagcaaccacttatggca

SEQ ID NO: 238443 - DNA, 25 bp, probe
gtcaaaagttgcaaaactgttctga

SEQ ID NO: 238444 - DNA, 25 bp, probe
gtaaacagttggtcaagactttgta

SEQ ID NO: 238445 - DNA, 25 bp, probe
gtaaagctttggacatacacttagc

SEQ ID NO: 238446 - DNA, 25 bp, probe
gtaaagctgttggaatgagtatgtg

SEQ ID NO: 238447 - DNA, 25 bp, probe
gtaagtgccttggaacaatattgaa

SEQ ID NO: 238448 - DNA, 25 bp, probe
gtcaggtcactcagaaaaatggcac

SEQ ID NO: 238449 - DNA, 25 bp, probe
gtcacgccacgggaaggccatgagc

SEQ ID NO: 238450 - DNA, 25 bp, probe
gtcacgccacgggaaggccatgagc

SEQ ID NO: 238451 - DNA, 25 bp, probe
gtcaagcactcgggaaacctggggc

SEQ ID NO: 238452 - DNA, 25 bp, probe
gtcaatgcactaactcaataccaag

SEQ ID NO: 238453 - DNA, 25 bp, probe
gtcaagccacaactctaacaaacaa

SEQ ID NO: 238454 - DNA, 25 bp, probe
gtcaactgcctataaaacaacaata

SEQ ID NO: 238455 - DNA, 25 bp, probe
gtcaactgcctataaaacaacaata

SEQ ID NO: 238456 - DNA, 25 bp, probe
gtcaacgcttaaacaagtgcacaca

SEQ ID NO: 238457 - DNA, 25 bp, probe
gtcaacgcttaaacaagtgcacaca

SEQ ID NO: 238458 - DNA, 25 bp, probe
gtcggcctatgagcctaatgaccac

SEQ ID NO: 238459 - DNA, 25 bp, probe
gtcagggttgtagccaagacgcccc

SEQ ID NO: 238460 - DNA, 25 bp, probe
gtgaggaccttagggcatgaagcct

SEQ ID NO: 238461 - DNA, 25 bp, probe
gtaaaccatgtaagtggaagcttta

SEQ ID NO: 238462 - DNA, 25 bp, probe
gtaaccctctaactaatggtatcta

SEQ ID NO: 238463 - DNA, 25 bp, probe
gtaacccactgttgtacatggtcac

SEQ ID NO: 238464 - DNA, 25 bp, probe
gtaacccactgttgtacatggtcac

SEQ ID NO: 238465 - DNA, 25 bp, probe
gtaatcccagcacttggagaggctg

SEQ ID NO: 238466 - DNA, 25 bp, probe
gtaatcccagcacttggagaggctg

SEQ ID NO: 238467 - DNA, 25 bp, probe
gtaatcccagcactttgggaggccg

SEQ ID NO: 238468 - DNA, 25 bp, probe
gtaatcctagcactttgggaggctg

SEQ ID NO: 238469 - DNA, 25 bp, probe
gtaatttatgtctttgtgggccggc

SEQ ID NO: 238470 - DNA, 25 bp, probe
gtaatttatgtctttgtgggccggc

SEQ ID NO: 238471 - DNA, 25 bp, probe
gtaatgttgatctagatttttccgg

SEQ ID NO: 238472 - DNA, 25 bp, probe
gtaatgcagagttttttttccgtga

SEQ ID NO: 238473 - DNA, 25 bp, probe
gtaataagtaatatccccctggaag

SEQ ID NO: 238474 - DNA, 25 bp, probe
gtcaacaagtttactctccgtcttg

SEQ ID NO: 238475 - DNA, 25 bp, probe
gtaacatgtggtttcttgcctttgt

SEQ ID NO: 238476 - DNA, 25 bp, probe
gtaattaagtttatccttctggtgg

SEQ ID NO: 238477 - DNA, 25 bp, probe
gtaattaagtttatccttctggtgg

SEQ ID NO: 238478 - DNA, 25 bp, probe
gtaactctagttttttcaatatggt

SEQ ID NO: 238479 - DNA, 25 bp, probe
gtaactctagttttttcaatatggt

SEQ ID NO: 238480 - DNA, 25 bp, probe
gtaacttcagatgtttccaagatgt

SEQ ID NO: 238481 - DNA, 25 bp, probe
gtgaagtactaactttccaaggcct

SEQ ID NO: 238482 - DNA, 25 bp, probe
gtaatgtgacgatatgtggacaaag

SEQ ID NO: 238483 - DNA, 25 bp, probe
gtaagaacgttcaggctcacaagct

SEQ ID NO: 238484 - DNA, 25 bp, probe
gtaacaacattatctgaccaatagt

SEQ ID NO: 238485 - DNA, 25 bp, probe
gtcaatatccttacgcataaccttg

SEQ ID NO: 238486 - DNA, 25 bp, probe
gtcaataccgttccatagaggtttt

SEQ ID NO: 238487 - DNA, 25 bp, probe
gtcactcccagcatttgaaggttat

SEQ ID NO: 238488 - DNA, 25 bp, probe
gtaatccagcatgtttcacagagta

SEQ ID NO: 238489 - DNA, 25 bp, probe
gtaacgcagcttccgtaagcatgtg

SEQ ID NO: 238490 - DNA, 25 bp, probe
gtcaacgacatcttcgaacgcatcg

SEQ ID NO: 238491 - DNA, 25 bp, probe
gtaacatgagcttattgagaccatc

SEQ ID NO: 238492 - DNA, 25 bp, probe
gtaacagcaatgtatctatcaacag

SEQ ID NO: 238493 - DNA, 25 bp, probe
gtcacgcagacagcactgtcaacac

SEQ ID NO: 238494 - DNA, 25 bp, probe
gtcacatgaagtaatggtcatgcct

SEQ ID NO: 238495 - DNA, 25 bp, probe
gtcacaaagtgttcttcctcatgga

SEQ ID NO: 238496 - DNA, 25 bp, probe
gtaagacagttgactatcttcattg

SEQ ID NO: 238497 - DNA, 25 bp, probe
gtcaaggagttgttcatcgtgatct

SEQ ID NO: 238498 - DNA, 25 bp, probe
gtaagtgaagtggttctcagtcccc

SEQ ID NO: 238499 - DNA, 25 bp, probe
gtcaaggagagggttttggccgctc

SEQ ID NO: 238500 - DNA, 25 bp, probe
gtgaagaactgccgtttgtggggtt

SEQ ID NO: 238501 - DNA, 25 bp, probe
gtaagaactgtacattgtgagctct

SEQ ID NO: 238502 - DNA, 25 bp, probe
gtaagaactgtacattgtgagctct

SEQ ID NO: 238503 - DNA, 25 bp, probe
gtaagcctcattatttggaatttga

SEQ ID NO: 238504 - DNA, 25 bp, probe
gtaacaggtcttattggaattgctt

SEQ ID NO: 238505 - DNA, 25 bp, probe
gtaagagaactctgtaggaattatt

SEQ ID NO: 238506 - DNA, 25 bp, probe
gtaatgcaacctttgaaactttgta

SEQ ID NO: 238507 - DNA, 25 bp, probe
gtaatccaggtatgagaatcaactt

SEQ ID NO: 238508 - DNA, 25 bp, probe
gtaagccagacttgaagcatgtcaa

SEQ ID NO: 238509 - DNA, 25 bp, probe
gtaagccagacttgaagcatgtcaa

SEQ ID NO: 238510 - DNA, 25 bp, probe
gtaagctcagaaagatgactgccat

SEQ ID NO: 238511 - DNA, 25 bp, probe
gtaactcagcagcaatgtcaccttg

SEQ ID NO: 238512 - DNA, 25 bp, probe
gtcacccgaatggtgtccatcgtgg

SEQ ID NO: 238513 - DNA, 25 bp, probe
gtcacagccaaatgcttccatttgt

SEQ ID NO: 238514 - DNA, 25 bp, probe
gtcacgtcagaatgttgcttttccc

SEQ ID NO: 238515 - DNA, 25 bp, probe
gtcacgaaccatttctctggttccc

SEQ ID NO: 238516 - DNA, 25 bp, probe
gtcagagatacctggcctggtctgg

SEQ ID NO: 238517 - DNA, 25 bp, probe
gtcagaagagccatcccatggccat

SEQ ID NO: 238518 - DNA, 25 bp, probe
gtaatcattcgttggaaagagctaa

SEQ ID NO: 238519 - DNA, 25 bp, probe
gtaacctcagaaagcaagaatgtga

SEQ ID NO: 238520 - DNA, 25 bp, probe
gtcaacgccatgcaccagaaattgc

SEQ ID NO: 238521 - DNA, 25 bp, probe
gtcaatgcctatgaacacatcagat

SEQ ID NO: 238522 - DNA, 25 bp, probe
gtaatctcttccacacaacagtgta

SEQ ID NO: 238523 - DNA, 25 bp, probe
gtaatctcttccacacaacagtgta

SEQ ID NO: 238524 - DNA, 25 bp, probe
gtaactggaatctcaaaagttcttt

SEQ ID NO: 238525 - DNA, 25 bp, probe
gtaatttttaccctaatgtcttcat

SEQ ID NO: 238526 - DNA, 25 bp, probe
gtcacctttttccgacagatgtcgt

SEQ ID NO: 238527 - DNA, 25 bp, probe
gtccccgtttgtcaaagaggatgga

SEQ ID NO: 238528 - DNA, 25 bp, probe
gtcactccgttttgcaaaaggtggc

SEQ ID NO: 238529 - DNA, 25 bp, probe
gtcactccatggattaaccaggaag

SEQ ID NO: 238530 - DNA, 25 bp, probe
gtcactgcccagaggtactgaggaa

SEQ ID NO: 238531 - DNA, 25 bp, probe
gtcagctgggcaagtggaaggggca

SEQ ID NO: 238532 - DNA, 25 bp, probe
gtcagctgggcaagtggaaggggca

SEQ ID NO: 238533 - DNA, 25 bp, probe
gtcacggcttactgcaagagaggca

SEQ ID NO: 238534 - DNA, 25 bp, probe
gtcctggctgtagaaaagtacttcc

SEQ ID NO: 238535 - DNA, 25 bp, probe
gtcctggctgtagaaaagtacttcc

SEQ ID NO: 238536 - DNA, 25 bp, probe
tgtccccttaggagcaaaattgccc

SEQ ID NO: 238537 - DNA, 25 bp, probe
tgctcccctgggctacaaagaaccc

SEQ ID NO: 238538 - DNA, 25 bp, probe
gtcaacactgggccttaggagaccc

SEQ ID NO: 238539 - DNA, 25 bp, probe
gtcaacatctggtgctagcaccccc

SEQ ID NO: 238540 - DNA, 25 bp, probe
gtaagattgtgatgaggcacgccca

SEQ ID NO: 238541 - DNA, 25 bp, probe
gtaagattgtgatgaggcacgccca

SEQ ID NO: 238542 - DNA, 25 bp, probe
gtaacagtgccatgaggagcaccct

SEQ ID NO: 238543 - DNA, 25 bp, probe
gtaatcatgttcattggtatccagc

SEQ ID NO: 238544 - DNA, 25 bp, probe
gtaatcatggtcatagctgtttcct

SEQ ID NO: 238545 - DNA, 25 bp, probe
gtaatcatgaggctactgagtttgg

SEQ ID NO: 238546 - DNA, 25 bp, probe
gtaatgctgaggctattgctgaata

SEQ ID NO: 238547 - DNA, 25 bp, probe
gtaagatgacagatgatgctgtcaa

SEQ ID NO: 238548 - DNA, 25 bp, probe
gtaagcaagctactggcatggcaag

SEQ ID NO: 238549 - DNA, 25 bp, probe
gtaagcaagctactggcatggcaag

SEQ ID NO: 238550 - DNA, 25 bp, probe
gtaagacagtagaagtgatgacagc

SEQ ID NO: 238551 - DNA, 25 bp, probe
gtaacattgtagaagcagcatagga

SEQ ID NO: 238552 - DNA, 25 bp, probe
gtcacacgtggggtcagcagaggta

SEQ ID NO: 238553 - DNA, 25 bp, probe
gtaagagatggggttgctgcagtgt

SEQ ID NO: 238554 - DNA, 25 bp, probe
gtaagcagctgaggtctcttgaggg

SEQ ID NO: 238555 - DNA, 25 bp, probe
gtaacagctgaccttattgtgaaga

SEQ ID NO: 238556 - DNA, 25 bp, probe
gtaagcctggcccataatgtgaaca

SEQ ID NO: 238557 - DNA, 25 bp, probe
gtaagcctggcccataatgtgaaca

SEQ ID NO: 238558 - DNA, 25 bp, probe
gtaagcatctctgcagaaagccaac

SEQ ID NO: 238559 - DNA, 25 bp, probe
gtcaagttcatggaataatggagaa

SEQ ID NO: 238560 - DNA, 25 bp, probe
gtcaagggcatgggttggggtagtg

SEQ ID NO: 238561 - DNA, 25 bp, probe
gtcaatggcgcagtggtttgtggat

SEQ ID NO: 238562 - DNA, 25 bp, probe
gtcaatggcgcagtggtttgtggat

SEQ ID NO: 238563 - DNA, 25 bp, probe
gtaatgagctgaagtgtgtgtgtaa

SEQ ID NO: 238564 - DNA, 25 bp, probe
gtaatgagctgaagtgtgtgtgtaa

SEQ ID NO: 238565 - DNA, 25 bp, probe
gtcaatgagcgctgggtgctcactg

SEQ ID NO: 238566 - DNA, 25 bp, probe
gtaatggtgactatgtgctgctctt

SEQ ID NO: 238567 - DNA, 25 bp, probe
gtaaggtgacttggtggcgttccca

SEQ ID NO: 238568 - DNA, 25 bp, probe
gtaagtgtgagtaagagctggtgtc

SEQ ID NO: 238569 - DNA, 25 bp, probe
gtcaagtgaggaaatcagtggttaa

SEQ ID NO: 238570 - DNA, 25 bp, probe
gtcaagtgaggaaatcagtggttaa

SEQ ID NO: 238571 - DNA, 25 bp, probe
gtaactatggcaacacagtgtgtgt

SEQ ID NO: 238572 - DNA, 25 bp, probe
gtaagatgtgtgagcgcactcgttt

SEQ ID NO: 238573 - DNA, 25 bp, probe
gtcaacagatgtaagcgtcttactt

SEQ ID NO: 238574 - DNA, 25 bp, probe
gtcataagcttgcgttgattaagtc

SEQ ID NO: 238575 - DNA, 25 bp, probe
gtcaaacttcggtcatgagattgga

SEQ ID NO: 238576 - DNA, 25 bp, probe
gtcactatctccagctcagagtttg

SEQ ID NO: 238577 - DNA, 25 bp, probe
gtcactatctccagctcagagtttg

SEQ ID NO: 238578 - DNA, 25 bp, probe
gtcaagatgctgaccagccaggggg

SEQ ID NO: 238579 - DNA, 25 bp, probe
gtcaagtgtgcatgcaagaggtggc

SEQ ID NO: 238580 - DNA, 25 bp, probe
gtcacaatgtattgcataatcaatg

SEQ ID NO: 238581 - DNA, 25 bp, probe
gtcagatctgatttgcttacggcct

SEQ ID NO: 238582 - DNA, 25 bp, probe
gtcagatctgatttgcttacggcct

SEQ ID NO: 238583 - DNA, 25 bp, probe
gtcagactgtataatcctcctgctc

SEQ ID NO: 238584 - DNA, 25 bp, probe
gtaacgctatactgtctgctgttcg

SEQ ID NO: 238585 - DNA, 25 bp, probe
gtaacgctatactgtctgctgttcg

SEQ ID NO: 238586 - DNA, 25 bp, probe
gtaactgttaaattgctgtgtatct

SEQ ID NO: 238587 - DNA, 25 bp, probe
gtaactgttaaattgctgtgtatct

SEQ ID NO: 238588 - DNA, 25 bp, probe
gtcagactctattaaactgggcctc

SEQ ID NO: 238589 - DNA, 25 bp, probe
gtaagtccagcatcaagcgggtgct

SEQ ID NO: 238590 - DNA, 25 bp, probe
gtaattccagctccaatagcgtata

SEQ ID NO: 238591 - DNA, 25 bp, probe
gtaattcacagtcctcagaagccta

SEQ ID NO: 238592 - DNA, 25 bp, probe
gtaatcacagcattgctctcgaccc

SEQ ID NO: 238593 - DNA, 25 bp, probe
gtcactgcacagtgcatctcagccc

SEQ ID NO: 238594 - DNA, 25 bp, probe
gtcaatgatgagtcctctctggtca

SEQ ID NO: 238595 - DNA, 25 bp, probe
gtcactgatgagcccgggtactatg

SEQ ID NO: 238596 - DNA, 25 bp, probe
tgtagctgatgatccgaataactac

SEQ ID NO: 238597 - DNA, 25 bp, probe
gtcagcagaggtaccacgaagctac

SEQ ID NO: 238598 - DNA, 25 bp, probe
gtcagcagaggtaccacgaagctac

SEQ ID NO: 238599 - DNA, 25 bp, probe
gtcagggtgataaccagacattcat

SEQ ID NO: 238600 - DNA, 25 bp, probe
gtcagaagtatcaccacggatttca

SEQ ID NO: 238601 - DNA, 25 bp, probe
gttttctattgtgccaaggttgcca

SEQ ID NO: 238602 - DNA, 25 bp, probe
gtaagatttggctcttggtttctgg

SEQ ID NO: 238603 - DNA, 25 bp, probe
gtcataaaaagcttattggttttgg

SEQ ID NO: 238604 - DNA, 25 bp, probe
gtaaggaaagcaaaatggcatttag

SEQ ID NO: 238605 - DNA, 25 bp, probe
gtaagcgaaagagccggcctgtgag

SEQ ID NO: 238606 - DNA, 25 bp, probe
gtctacgaccagggtggccctgtgg

SEQ ID NO: 238607 - DNA, 25 bp, probe
gtctacgacggcaagtacctgcctg

SEQ ID NO: 238608 - DNA, 25 bp, probe
gtcaaaagggcaagtgcctctccag

SEQ ID NO: 238609 - DNA, 25 bp, probe
gtcagacatctggagcatgggactg

SEQ ID NO: 238610 - DNA, 25 bp, probe
gtcaccctggacaaggaggtaacca

SEQ ID NO: 238611 - DNA, 25 bp, probe
gtcaccctggacaaggaggtaacca

SEQ ID NO: 238612 - DNA, 25 bp, probe
gtgggcctggatcaaagttaaagtt

SEQ ID NO: 238613 - DNA, 25 bp, probe
gtgggcgtcgtcacggttaaagaga

SEQ ID NO: 238614 - DNA, 25 bp, probe
gtgggcgtcgtcacggttaaagaga

SEQ ID NO: 238615 - DNA, 25 bp, probe
gtcgtggacgtagtcctctttaagg

SEQ ID NO: 238616 - DNA, 25 bp, probe
gtcttggccggagcaatttctgggc

SEQ ID NO: 238617 - DNA, 25 bp, probe
gtcagggatgggcgtgttttgggcg

SEQ ID NO: 238618 - DNA, 25 bp, probe
gtcagggtggaatccttttggagag

SEQ ID NO: 238619 - DNA, 25 bp, probe
gtcagggtggaatccttttggagag

SEQ ID NO: 238620 - DNA, 25 bp, probe
gtcatggggtaacatcccctgtgga

SEQ ID NO: 238621 - DNA, 25 bp, probe
gtctgggtgccagaactcaaggttc

SEQ ID NO: 238622 - DNA, 25 bp, probe
gtcttggtgacctggctaagacctc

SEQ ID NO: 238623 - DNA, 25 bp, probe
gtcttgactacctttcaaaaccagc

SEQ ID NO: 238624 - DNA, 25 bp, probe
gtctagataacctctacaagaaagt

SEQ ID NO: 238625 - DNA, 25 bp, probe
gtcatggtacgtttcctaaagatag

SEQ ID NO: 238626 - DNA, 25 bp, probe
gtggagtacgacgcctataaactgt

SEQ ID NO: 238627 - DNA, 25 bp, probe
gtcggaacaaatgccttgaaatgct

SEQ ID NO: 238628 - DNA, 25 bp, probe
gtcttaaccattgctttgccagtgc

SEQ ID NO: 238629 - DNA, 25 bp, probe
gtcttagaccctgttatctactgtt

SEQ ID NO: 238630 - DNA, 25 bp, probe
gtcagtagatctggtttccattcct

SEQ ID NO: 238631 - DNA, 25 bp, probe
gtaatagaggcactttagcttccac

SEQ ID NO: 238632 - DNA, 25 bp, probe
gtaatttggcaacttgagctctccc

SEQ ID NO: 238633 - DNA, 25 bp, probe
gtcagcagtttgcagttttccacct

SEQ ID NO: 238634 - DNA, 25 bp, probe
gtcaaaattggaggttcgtctggct

SEQ ID NO: 238635 - DNA, 25 bp, probe
gtcagaaaagggattctttatgtgt

SEQ ID NO: 238636 - DNA, 25 bp, probe
gtaagtcaaggttttatcctgattg

SEQ ID NO: 238637 - DNA, 25 bp, probe
gtaatcttgggtttttcacatatgt

SEQ ID NO: 238638 - DNA, 25 bp, probe
gtaatttgctggtgtgtacttagct

SEQ ID NO: 238639 - DNA, 25 bp, probe
gtcaatttgggttgtgtccatcata

SEQ ID NO: 238640 - DNA, 25 bp, probe
gtcaatttgggttgtgtccatcata

SEQ ID NO: 238641 - DNA, 25 bp, probe
gtaattggaagcttggtacacataa

SEQ ID NO: 238642 - DNA, 25 bp, probe
gtaattggaagcttggtacacataa

SEQ ID NO: 238643 - DNA, 25 bp, probe
gtcaattacatgtttggtaccaaga

SEQ ID NO: 238644 - DNA, 25 bp, probe
gtaatctagatatctgcctactaca

SEQ ID NO: 238645 - DNA, 25 bp, probe
gtaattctattgtgcctatgataaa

SEQ ID NO: 238646 - DNA, 25 bp, probe
gtcaactttcagtgctggccaaaac

SEQ ID NO: 238647 - DNA, 25 bp, probe
gtaactgtgatcctgttggagaaaa

SEQ ID NO: 238648 - DNA, 25 bp, probe
gtcaactggaccacaccagaaacca

SEQ ID NO: 238649 - DNA, 25 bp, probe
gtaatgttgaccacacaagttgaac

SEQ ID NO: 238650 - DNA, 25 bp, probe
gtcaagttactggtgccacagatct

SEQ ID NO: 238651 - DNA, 25 bp, probe
gtcaagtatcgtggtgtcagctatg

SEQ ID NO: 238652 - DNA, 25 bp, probe
gtcagtgttgtgggtgtccctggag

SEQ ID NO: 238653 - DNA, 25 bp, probe
gtcatgtaggtcaggaccttggctg

SEQ ID NO: 238654 - DNA, 25 bp, probe
gtcattctgtacactgaccttaggc

SEQ ID NO: 238655 - DNA, 25 bp, probe
gtcatgtttggacatgaacctcatg

SEQ ID NO: 238656 - DNA, 25 bp, probe
gtcagtggtggacctgacctgccgt

SEQ ID NO: 238657 - DNA, 25 bp, probe
gtcgagcgatggatttccgtctctg

SEQ ID NO: 238658 - DNA, 25 bp, probe
gtaagtagaattatctcttcatctg

SEQ ID NO: 238659 - DNA, 25 bp, probe
gtaatggaattcacctttgcatctt

SEQ ID NO: 238660 - DNA, 25 bp, probe
gtcagattccaaagtcctttcttta

SEQ ID NO: 238661 - DNA, 25 bp, probe
gtcagattccaaagtcctttcttta

SEQ ID NO: 238662 - DNA, 25 bp, probe
gtaattcctctgattctgttttctg

SEQ ID NO: 238663 - DNA, 25 bp, probe
gtaatttcattccattctattgttt

SEQ ID NO: 238664 - DNA, 25 bp, probe
gtaatctgcattttgtctctttgta

SEQ ID NO: 238665 - DNA, 25 bp, probe
gtaatcagcccatctgttttgttaa

SEQ ID NO: 238666 - DNA, 25 bp, probe
gtgaatcacctaggggtcttgttaa

SEQ ID NO: 238667 - DNA, 25 bp, probe
gtcaatcagcctttaggtctttagt

SEQ ID NO: 238668 - DNA, 25 bp, probe
gtcaaagcaccaacaggacattttg

SEQ ID NO: 238669 - DNA, 25 bp, probe
gtcaattaccgtggcacactttctg

SEQ ID NO: 238670 - DNA, 25 bp, probe
gtaattatgcctatgcaactttaat

SEQ ID NO: 238671 - DNA, 25 bp, probe
gtaattatgcctatgcaactttaat

SEQ ID NO: 238672 - DNA, 25 bp, probe
gtaattgtcctgatgatagattcca

SEQ ID NO: 238673 - DNA, 25 bp, probe
gtcacaaggccgaacattttcagaa

SEQ ID NO: 238674 - DNA, 25 bp, probe
gtcaaatggccagactatttcatta

SEQ ID NO: 238675 - DNA, 25 bp, probe
gtcaattagcaattttgtgtttcta

SEQ ID NO: 238676 - DNA, 25 bp, probe
gtcaaatactctttttattcttaag

SEQ ID NO: 238677 - DNA, 25 bp, probe
gtcaaccactgcaactgtaattcta

SEQ ID NO: 238678 - DNA, 25 bp, probe
gtcacattcaccgacatcggactca

SEQ ID NO: 238679 - DNA, 25 bp, probe
gtcacattcaccgacatcggactca

SEQ ID NO: 238680 - DNA, 25 bp, probe
gtcacaagagcccagcagggcctca

SEQ ID NO: 238681 - DNA, 25 bp, probe
gtcaaagaccaccgaggcatcatcc

SEQ ID NO: 238682 - DNA, 25 bp, probe
gtcaaagaccaccgaggcatcatcc

SEQ ID NO: 238683 - DNA, 25 bp, probe
gtcaaagaccaccgaggcatcatcc

SEQ ID NO: 238684 - DNA, 25 bp, probe
gtcagcggtcacgggatggatagcc

SEQ ID NO: 238685 - DNA, 25 bp, probe
gtcagagcagatgtggagggttcct

SEQ ID NO: 238686 - DNA, 25 bp, probe
gtcaatgcacatgtagatggttagc

SEQ ID NO: 238687 - DNA, 25 bp, probe
gtcaatcctaattgtggtcctgcct

SEQ ID NO: 238688 - DNA, 25 bp, probe
gtcaacaccaataggaatccattta

SEQ ID NO: 238689 - DNA, 25 bp, probe
gtcaacaccaataggaatccattta

SEQ ID NO: 238690 - DNA, 25 bp, probe
gtggaccccatagattcaacttatc

SEQ ID NO: 238691 - DNA, 25 bp, probe
gtggaccccattaataatcctggcc

SEQ ID NO: 238692 - DNA, 25 bp, probe
gtaaccatcactgaagacatacggc

SEQ ID NO: 238693 - DNA, 25 bp, probe
gtcaatcccaacaaagacatactcc

SEQ ID NO: 238694 - DNA, 25 bp, probe
gtcaacagaaacaaatcctcccatc

SEQ ID NO: 238695 - DNA, 25 bp, probe
gtcaacaaaaactttcagctctcac

SEQ ID NO: 238696 - DNA, 25 bp, probe
gtcaacaagttacactcatatccca

SEQ ID NO: 238697 - DNA, 25 bp, probe
gtaatgcggttactgaatcataaga

SEQ ID NO: 238698 - DNA, 25 bp, probe
gtcagtgcgcgtagatgtcaataaa

SEQ ID NO: 238699 - DNA, 25 bp, probe
gtcaggcagaattcttcaattaagt

SEQ ID NO: 238700 - DNA, 25 bp, probe
gtcaacagatatacactcaataaca

SEQ ID NO: 238701 - DNA, 25 bp, probe
gtcaacagatatacactcaataaca

SEQ ID NO: 238702 - DNA, 25 bp, probe
gtcacactgtaacctcagtctaccc

SEQ ID NO: 238703 - DNA, 25 bp, probe
gtcaactattatctgcaactgcact

SEQ ID NO: 238704 - DNA, 25 bp, probe
gtcagagcgattcctggaaccctga

SEQ ID NO: 238705 - DNA, 25 bp, probe
gtcagagcgattcctggaaccctga

SEQ ID NO: 238706 - DNA, 25 bp, probe
gtcagagcgattcctggaaccctga

SEQ ID NO: 238707 - DNA, 25 bp, probe
gtcaggagttcgagcccagcctgac

SEQ ID NO: 238708 - DNA, 25 bp, probe
gtcaaagctctgcatagtccaggtg

SEQ ID NO: 238709 - DNA, 25 bp, probe
gtcaggagcctgatcaagccagagg

SEQ ID NO: 238710 - DNA, 25 bp, probe
gtcaggagcctgatcaagccagagg

SEQ ID NO: 238711 - DNA, 25 bp, probe
gtcacaagaacttcgaccagaggcc

SEQ ID NO: 238712 - DNA, 25 bp, probe
gtctcaaggttatagggatggccca

SEQ ID NO: 238713 - DNA, 25 bp, probe
gtccaagtgtactgttggccgcagc

SEQ ID NO: 238714 - DNA, 25 bp, probe
gtcacaaggaacggtgtggtccacc

SEQ ID NO: 238715 - DNA, 25 bp, probe
gtctcacggaactagtgacggcgac

SEQ ID NO: 238716 - DNA, 25 bp, probe
gtcacctactacttggactggatcc

SEQ ID NO: 238717 - DNA, 25 bp, probe
gtcacttactaaatatagtggatat

SEQ ID NO: 238718 - DNA, 25 bp, probe
gtaatgtgactatgtattgctagat

SEQ ID NO: 238719 - DNA, 25 bp, probe
gtcaatggaatcatgtactctgtga

SEQ ID NO: 238720 - DNA, 25 bp, probe
gtcaatggaatcatgtactctgtga

SEQ ID NO: 238721 - DNA, 25 bp, probe
gtcaatagtggactctcactgtcta

SEQ ID NO: 238722 - DNA, 25 bp, probe
gtcacacagctctagacctgctgtc

SEQ ID NO: 238723 - DNA, 25 bp, probe
gtcactcagccaaatctgtctgctg

SEQ ID NO: 238724 - DNA, 25 bp, probe
gtaatcatgcaatagctgttcggat

SEQ ID NO: 238725 - DNA, 25 bp, probe
gtaatatcagaaatggttggcctga

SEQ ID NO: 238726 - DNA, 25 bp, probe
gtcatctatgtctattttaggcctc

SEQ ID NO: 238727 - DNA, 25 bp, probe
gtcacagctgtctatttttgtcact

SEQ ID NO: 238728 - DNA, 25 bp, probe
gtcacagctgtctatttttgtcact

SEQ ID NO: 238729 - DNA, 25 bp, probe
gtcaagttccaggttgatatcacct

SEQ ID NO: 238730 - DNA, 25 bp, probe
gtcaagatcctgcgctatgagaatg

SEQ ID NO: 238731 - DNA, 25 bp, probe
gtcaatatttactatgagacaatgg

SEQ ID NO: 238732 - DNA, 25 bp, probe
gtcaatatttactatgagacaatgg

SEQ ID NO: 238733 - DNA, 25 bp, probe
gtaatacattactgcagagaaacac

SEQ ID NO: 238734 - DNA, 25 bp, probe
gtaatgatcattagtggcagagaat

SEQ ID NO: 238735 - DNA, 25 bp, probe
gtaatgatcattatcgaagtgtgta

SEQ ID NO: 238736 - DNA, 25 bp, probe
gtaattcatgtttgagatgggtggc

SEQ ID NO: 238737 - DNA, 25 bp, probe
gtaatgtctgataacaggcatgttc

SEQ ID NO: 238738 - DNA, 25 bp, probe
gtcactatctgtcaagactgatact

SEQ ID NO: 238739 - DNA, 25 bp, probe
gtcagtgctggtcaaaagtaatgaa

SEQ ID NO: 238740 - DNA, 25 bp, probe
gtcagtgctggtcaaaagtaatgaa

SEQ ID NO: 238741 - DNA, 25 bp, probe
gtcgatcgagatgaggaagtaaaga

SEQ ID NO: 238742 - DNA, 25 bp, probe
gtcaatcagattgtggagcagtaca

SEQ ID NO: 238743 - DNA, 25 bp, probe
gtcaacagctcacaggagcgtgaac

SEQ ID NO: 238744 - DNA, 25 bp, probe
gtcagcacattcacgatactgtgca

SEQ ID NO: 238745 - DNA, 25 bp, probe
gtcacctgatgaatcgtctgagtca

SEQ ID NO: 238746 - DNA, 25 bp, probe
gtcacctgatgaatcgtctgagtca

SEQ ID NO: 238747 - DNA, 25 bp, probe
gtccctttgaccatagtcggattaa

SEQ ID NO: 238748 - DNA, 25 bp, probe
gtctcagtttacattttcggtatat

SEQ ID NO: 238749 - DNA, 25 bp, probe
gtctcgggtactcaattggttgact

SEQ ID NO: 238750 - DNA, 25 bp, probe
gtcggggattctcagtcgagtttcc

SEQ ID NO: 238751 - DNA, 25 bp, probe
gtcactgggttttggtatggtttgt

SEQ ID NO: 238752 - DNA, 25 bp, probe
gtccccgtttaacgtggtgctgttg

SEQ ID NO: 238753 - DNA, 25 bp, probe
gtcccggtggtccacgtggaattgt

SEQ ID NO: 238754 - DNA, 25 bp, probe
gtcccggtggtccacgtggaattgt

SEQ ID NO: 238755 - DNA, 25 bp, probe
gtcacctggggacatgggctatctt

SEQ ID NO: 238756 - DNA, 25 bp, probe
gtcaccgggaacctggttcagtttg

SEQ ID NO: 238757 - DNA, 25 bp, probe
gtaagatggaagagtggtacagttt

SEQ ID NO: 238758 - DNA, 25 bp, probe
gtctccaggagagagggaacctctt

SEQ ID NO: 238759 - DNA, 25 bp, probe
gtcaacaggcaaaagacaaaccttc

SEQ ID NO: 238760 - DNA, 25 bp, probe
gtcaacaggcaaggtaatcttcaca

SEQ ID NO: 238761 - DNA, 25 bp, probe
gtaagagtcacaggctagatattat

SEQ ID NO: 238762 - DNA, 25 bp, probe
gtcaaggtcacaggcatccatgtgt

SEQ ID NO: 238763 - DNA, 25 bp, probe
gtcaattgtcactgtcatcagaatc

SEQ ID NO: 238764 - DNA, 25 bp, probe
gtaatgttacatttaagcatgataa

SEQ ID NO: 238765 - DNA, 25 bp, probe
gtaatgttacatttaagcatgataa

SEQ ID NO: 238766 - DNA, 25 bp, probe
gtaatgtggcctttgagaggaacaa

SEQ ID NO: 238767 - DNA, 25 bp, probe
gtaattatcattttagaagactcta

SEQ ID NO: 238768 - DNA, 25 bp, probe
gtaattatcattttagaagactcta

SEQ ID NO: 238769 - DNA, 25 bp, probe
gtaaggttctcatttagcagacatc

SEQ ID NO: 238770 - DNA, 25 bp, probe
gtaagtttctgatgctgactggcac

SEQ ID NO: 238771 - DNA, 25 bp, probe
gtaattttgtgcacatggcagagac

SEQ ID NO: 238772 - DNA, 25 bp, probe
gtaattttgtgcacatggcagagac

SEQ ID NO: 238773 - DNA, 25 bp, probe
gtaataagtgtcatcttgtgggcat

SEQ ID NO: 238774 - DNA, 25 bp, probe
gtcactgagggttttggttggcatc

SEQ ID NO: 238775 - DNA, 25 bp, probe
gtcacagggtttgcttgttgctgct

SEQ ID NO: 238776 - DNA, 25 bp, probe
gtcacaatggtctccattgcatttc

SEQ ID NO: 238777 - DNA, 25 bp, probe
gtcaaagtggccattacatcctctt

SEQ ID NO: 238778 - DNA, 25 bp, probe
gtcaaaggtgccaatttgctaattg

SEQ ID NO: 238779 - DNA, 25 bp, probe
gtcacaagacatgcaaaactcaaag

SEQ ID NO: 238780 - DNA, 25 bp, probe
gtcacaatacagtcaaaagatacaa

SEQ ID NO: 238781 - DNA, 25 bp, probe
gtcacaatacagtcaaaagatacaa

SEQ ID NO: 238782 - DNA, 25 bp, probe
gtcacctcacaagccaatgtacact

SEQ ID NO: 238783 - DNA, 25 bp, probe
gtcacctcacaagccaatgtacact

SEQ ID NO: 238784 - DNA, 25 bp, probe
gtcactctaaagggaactgtgacat

SEQ ID NO: 238785 - DNA, 25 bp, probe
gtcactctagaagagttcttcacag

SEQ ID NO: 238786 - DNA, 25 bp, probe
gtcaatcttagatagattcttcaat

SEQ ID NO: 238787 - DNA, 25 bp, probe
gtaatcattatctcactttgtaaat

SEQ ID NO: 238788 - DNA, 25 bp, probe
gtaatttgtattgcattctataaaa

SEQ ID NO: 238789 - DNA, 25 bp, probe
gtaatgttcatattcaatatcttac

SEQ ID NO: 238790 - DNA, 25 bp, probe
gtaatgttcatattcaatatcttac

SEQ ID NO: 238791 - DNA, 25 bp, probe
gtcaagcttctggtctaatatgtac

SEQ ID NO: 238792 - DNA, 25 bp, probe
gtcaagcttctggtctaatatgtac

SEQ ID NO: 238793 - DNA, 25 bp, probe
gtcagactggctgtgtcaaatcccc

SEQ ID NO: 238794 - DNA, 25 bp, probe
gtcagactaatcaggcttatccgat

SEQ ID NO: 238795 - DNA, 25 bp, probe
gtcaactctgtggaggctttgcagg

SEQ ID NO: 238796 - DNA, 25 bp, probe
gtcacaggggacaggcttgctggac

SEQ ID NO: 238797 - DNA, 25 bp, probe
gtcatacgggaggcgagtggttggt

SEQ ID NO: 238798 - DNA, 25 bp, probe
gtctaagtagggccagggcaccgta

SEQ ID NO: 238799 - DNA, 25 bp, probe
gtctaagccaggcgagggcaagctc

SEQ ID NO: 238800 - DNA, 25 bp, probe
gtcacaggcaatgtggagggccagt

SEQ ID NO: 238801 - DNA, 25 bp, probe
gtcacaggactcgagggggacagac

SEQ ID NO: 238802 - DNA, 25 bp, probe
gtcagaagacatgcctggagggatg

SEQ ID NO: 238803 - DNA, 25 bp, probe
gtcaacgtattcttcgagggcattc

SEQ ID NO: 238804 - DNA, 25 bp, probe
gtcaacgtattcttcgagggcattc

SEQ ID NO: 238805 - DNA, 25 bp, probe
gtaatgagaaacttcgagatgcgaa

SEQ ID NO: 238806 - DNA, 25 bp, probe
gtcaatgagaatcagatcgagtcca

SEQ ID NO: 238807 - DNA, 25 bp, probe
gtcaaggatgctcacatcctgccca

SEQ ID NO: 238808 - DNA, 25 bp, probe
gtaatagatgcatagcacttaacag

SEQ ID NO: 238809 - DNA, 25 bp, probe
gtaatagatgcatagcacttaacag

SEQ ID NO: 238810 - DNA, 25 bp, probe
gtaattgctgtttgcacttactgca

SEQ ID NO: 238811 - DNA, 25 bp, probe
gtcaatgctgccttgtgattaaatg

SEQ ID NO: 238812 - DNA, 25 bp, probe
gtcacatggcctaggtcaccaattt

SEQ ID NO: 238813 - DNA, 25 bp, probe
gtcacaggtaaagcagccaattttg

SEQ ID NO: 238814 - DNA, 25 bp, probe
gtcacggtactagcatttgttattt

SEQ ID NO: 238815 - DNA, 25 bp, probe
gtcactttaaagacttgtgctattt

SEQ ID NO: 238816 - DNA, 25 bp, probe
gtcagtttacaccaatagtttcttg

SEQ ID NO: 238817 - DNA, 25 bp, probe
gtcactttaagaaatagctactgtt

SEQ ID NO: 238818 - DNA, 25 bp, probe
gtcactaaaggatttgcagcttgcg

SEQ ID NO: 238819 - DNA, 25 bp, probe
gtcactgactcagatgcagggtctg

SEQ ID NO: 238820 - DNA, 25 bp, probe
gtcaatgattagatcgggtctcgga

SEQ ID NO: 238821 - DNA, 25 bp, probe
gtcactgtaagaacctggagcccaa

SEQ ID NO: 238822 - DNA, 25 bp, probe
gtcactgtaaataacatttaccaca

SEQ ID NO: 238823 - DNA, 25 bp, probe
gtcacctaaattcaattcactggcc

SEQ ID NO: 238824 - DNA, 25 bp, probe
gtcaagctcaacatctacttccaag

SEQ ID NO: 238825 - DNA, 25 bp, probe
gtcaagccagagatctgttatcaaa

SEQ ID NO: 238826 - DNA, 25 bp, probe
atgatgcgctcagtgccatgcgttc

SEQ ID NO: 238827 - DNA, 25 bp, probe
ctcagtgccatgcgttcgctgaaag

SEQ ID NO: 238828 - DNA, 25 bp, probe
catgcgttcgctgaaaggcatcggt

SEQ ID NO: 238829 - DNA, 25 bp, probe
ctgaaaggcatcggtgccacgcatc

SEQ ID NO: 238830 - DNA, 25 bp, probe
ggcatcggtgccacgcatcttcatg

SEQ ID NO: 238831 - DNA, 25 bp, probe
tgccacgcatcttcatgaagggcgc

SEQ ID NO: 238832 - DNA, 25 bp, probe
atcttcatgaagggcgcgacccgcg

SEQ ID NO: 238833 - DNA, 25 bp, probe
attaacgcgttcgcagttgcagcga

SEQ ID NO: 238834 - DNA, 25 bp, probe
gcgttcgcagttgcagcgattgcaa

SEQ ID NO: 238835 - DNA, 25 bp, probe
agttgcagcgattgcaactggcctg

SEQ ID NO: 238836 - DNA, 25 bp, probe
gggaaaactgtcgccagttgtgcac

SEQ ID NO: 238837 - DNA, 25 bp, probe
cgccagttgtgcacttttacaagcc

SEQ ID NO: 238838 - DNA, 25 bp, probe
cacttttacaagccgcaaaggcagc

SEQ ID NO: 238839 - DNA, 25 bp, probe
caagccgcaaaggcagcaggctacc

SEQ ID NO: 238840 - DNA, 25 bp, probe
gcaaaggcagcaggctaccggacgg

SEQ ID NO: 238841 - DNA, 25 bp, probe
aggtttacgcaatagcgacgcgctg

SEQ ID NO: 238842 - DNA, 25 bp, probe
cgcaatagcgacgcgctggcgttac

SEQ ID NO: 238843 - DNA, 25 bp, probe
gcgacgcgctggcgttacagcgcaa

SEQ ID NO: 238844 - DNA, 25 bp, probe
gtcaccatggcaacgtggacctggt

SEQ ID NO: 238845 - DNA, 25 bp, probe
gtcaccaatattgtggatcctttca

SEQ ID NO: 238846 - DNA, 25 bp, probe
gtcaacctgttgcagtgtttttcat

SEQ ID NO: 238847 - DNA, 25 bp, probe
gtcaacatttgtcataggtattact

SEQ ID NO: 238848 - DNA, 25 bp, probe
gtaattcctgtttagcgattgtcaa

SEQ ID NO: 238849 - DNA, 25 bp, probe
gtaattggtatttaacatttgcatt

SEQ ID NO: 238850 - DNA, 25 bp, probe
gtcaacagtgtaactaaatttctct

SEQ ID NO: 238851 - DNA, 25 bp, probe
gtcaaactgaaataagttcttcatt

SEQ ID NO: 238852 - DNA, 25 bp, probe
gtcaacatttagtgaagattcttct

SEQ ID NO: 238853 - DNA, 25 bp, probe
gtgaatctttagggtaattcctcca

SEQ ID NO: 238854 - DNA, 25 bp, probe
gtcacttcttgggcatgtggttccc

SEQ ID NO: 238855 - DNA, 25 bp, probe
gtcacttctgctaaggagggacccg

SEQ ID NO: 238856 - DNA, 25 bp, probe
gtcagttctgtccatgtgggagacc

SEQ ID NO: 238857 - DNA, 25 bp, probe
gtcagttcgggatgtggcacagacg

SEQ ID NO: 238858 - DNA, 25 bp, probe
gtcaaaccctgaagtgatccgagct

SEQ ID NO: 238859 - DNA, 25 bp, probe
gtcaaagacctgtcagtatgtcccc

SEQ ID NO: 238860 - DNA, 25 bp, probe
gtcaaagacctgtcagtatgtcccc

SEQ ID NO: 238861 - DNA, 25 bp, probe
gtcaaaggcctgacagctctgtggc

SEQ ID NO: 238862 - DNA, 25 bp, probe
gtaatatgtgccaatgctatttgtg

SEQ ID NO: 238863 - DNA, 25 bp, probe
gtaatattgtcaaatgtctctatgg

SEQ ID NO: 238864 - DNA, 25 bp, probe
gtcaaaagaaattgctctctgatga

SEQ ID NO: 238865 - DNA, 25 bp, probe
gtcacaacaataacctccatagcac

SEQ ID NO: 238866 - DNA, 25 bp, probe
gtcacaacaataacctccatagcac

SEQ ID NO: 238867 - DNA, 25 bp, probe
gtcacaaaagcaacactcgatgata

SEQ ID NO: 238868 - DNA, 25 bp, probe
gtcacagatcaactactgctcggtg

SEQ ID NO: 238869 - DNA, 25 bp, probe
gtcacaatcattcattgctccagct

SEQ ID NO: 238870 - DNA, 25 bp, probe
gtcacaatcattcattgctccagct

SEQ ID NO: 238871 - DNA, 25 bp, probe
gtcaagtcattgaattaccactcct

SEQ ID NO: 238872 - DNA, 25 bp, probe
gtcaggtgcacaagattaccttcct

SEQ ID NO: 238873 - DNA, 25 bp, probe
gtcaggtgcgttatctcagcttctt

SEQ ID NO: 238874 - DNA, 25 bp, probe
gtcagccctgctagagtttgcttgc

SEQ ID NO: 238875 - DNA, 25 bp, probe
gtcagaactgtcagcatttgccagt

SEQ ID NO: 238876 - DNA, 25 bp, probe
gtcaaaggacatcttctgccatgtc

SEQ ID NO: 238877 - DNA, 25 bp, probe
gtcaaagaaagcgccgctcatgact

SEQ ID NO: 238878 - DNA, 25 bp, probe
gtcagccagcactaggaggcgctat

SEQ ID NO: 238879 - DNA, 25 bp, probe
gtcaccgatattccagtctggatcc

SEQ ID NO: 238880 - DNA, 25 bp, probe
gtcaatagttttctcattgctacag

SEQ ID NO: 238881 - DNA, 25 bp, probe
gtcaacagttttcctatgctttgaa

SEQ ID NO: 238882 - DNA, 25 bp, probe
gtcatagcatgtgtgtaaactttaa

SEQ ID NO: 238883 - DNA, 25 bp, probe
gtcatagcatgtgtgtaaactttaa

SEQ ID NO: 238884 - DNA, 25 bp, probe
gtcaaggttttatcctgattggaaa

SEQ ID NO: 238885 - DNA, 25 bp, probe
gtcaaagattttgcccaactggtcg

SEQ ID NO: 238886 - DNA, 25 bp, probe
gtcaaagtgtcctcaccaaaggtac

SEQ ID NO: 238887 - DNA, 25 bp, probe
gtcaagggtggagccagagaaggaa

SEQ ID NO: 238888 - DNA, 25 bp, probe
gtcacacgggtatccagagcaaggc

SEQ ID NO: 238889 - DNA, 25 bp, probe
gtcacgtgggttatgaagaagtctg

SEQ ID NO: 238890 - DNA, 25 bp, probe
gtcacgtgggttatgaagaagtctg

SEQ ID NO: 238891 - DNA, 25 bp, probe
gtcacgtgcggttcattgactatga

SEQ ID NO: 238892 - DNA, 25 bp, probe
gtcactgttgtacggtgtctagaat

SEQ ID NO: 238893 - DNA, 25 bp, probe
gtcactttatctgggtgtctcgcac

SEQ ID NO: 238894 - DNA, 25 bp, probe
gtcatccttgagttgggttggtcac

SEQ ID NO: 238895 - DNA, 25 bp, probe
gtcaccagtggaggccggatggacc

SEQ ID NO: 238896 - DNA, 25 bp, probe
gtcaccagtggaggccggatggacc

SEQ ID NO: 238897 - DNA, 25 bp, probe
gtcacctgggacttcagggaggctc

SEQ ID NO: 238898 - DNA, 25 bp, probe
gtcagccgtggacacagctaagact

SEQ ID NO: 238899 - DNA, 25 bp, probe
gtcagaggtggaaacactacagaca

SEQ ID NO: 238900 - DNA, 25 bp, probe
gtgacaagggtacactgacttcagc

SEQ ID NO: 238901 - DNA, 25 bp, probe
gggcctgagttagactatttcccac

SEQ ID NO: 238902 - DNA, 25 bp, probe
gggttgagggtcacagacctccctc

SEQ ID NO: 238903 - DNA, 25 bp, probe
gggagggggtcatagaccccaggat

SEQ ID NO: 238904 - DNA, 25 bp, probe
ggtggtcggcaatggaacctacgga

SEQ ID NO: 238905 - DNA, 25 bp, probe
ggtaccaagaaaggaacctgtcagg

SEQ ID NO: 238906 - DNA, 25 bp, probe
gtctacctaaaaatggcagccgggg

SEQ ID NO: 238907 - DNA, 25 bp, probe
gtcaccaaaaacctgcggcgagagg

SEQ ID NO: 238908 - DNA, 25 bp, probe
gtcaaacacatcacggggcgaagtg

SEQ ID NO: 238909 - DNA, 25 bp, probe
gtcaacatccacactaggcaggaat

SEQ ID NO: 238910 - DNA, 25 bp, probe
gtcagtctacaggcctttcaggaag

SEQ ID NO: 238911 - DNA, 25 bp, probe
gtcagaattcaaacttcatcggaaa

SEQ ID NO: 238912 - DNA, 25 bp, probe
gtcagaaccaatatttcactgtcga

SEQ ID NO: 238913 - DNA, 25 bp, probe
gtcacagaaagaacggctcctgtcg

SEQ ID NO: 238914 - DNA, 25 bp, probe
gtcacacaaagcgacggatacgtcc

SEQ ID NO: 238915 - DNA, 25 bp, probe
gtcacagggactgaaaacctctcct

SEQ ID NO: 238916 - DNA, 25 bp, probe
gtcaaagcgtctggaaaaagccctc

SEQ ID NO: 238917 - DNA, 25 bp, probe
gtcaaagtgcccctgaagaaattta

SEQ ID NO: 238918 - DNA, 25 bp, probe
gtcaaatgtgggttgtatggagttt

SEQ ID NO: 238919 - DNA, 25 bp, probe
gtcaaatgtgggttgtatggagttt

SEQ ID NO: 238920 - DNA, 25 bp, probe
gtcagaagtaatcctgagaaatgtt

SEQ ID NO: 238921 - DNA, 25 bp, probe
gtcaatagctcagtcctgcagtttg

SEQ ID NO: 238922 - DNA, 25 bp, probe
gtcaatagctcagtcctgcagtttg

SEQ ID NO: 238923 - DNA, 25 bp, probe
gtcaccagtattggcagactcattg

SEQ ID NO: 238924 - DNA, 25 bp, probe
gtcaccagtattggcagactcattg

SEQ ID NO: 238925 - DNA, 25 bp, probe
gtcaccagcatgagaagcagtccag

SEQ ID NO: 238926 - DNA, 25 bp, probe
gtcaccacagacaagatggcccagg

SEQ ID NO: 238927 - DNA, 25 bp, probe
gtcacagagcagctggatgccgggg

SEQ ID NO: 238928 - DNA, 25 bp, probe
gtcaacatgcagggcgagcccacgg

SEQ ID NO: 238929 - DNA, 25 bp, probe
gtcaacatcatgaaccagctcagcc

SEQ ID NO: 238930 - DNA, 25 bp, probe
gtcaacatcatgaaccagctcagcc

SEQ ID NO: 238931 - DNA, 25 bp, probe
gtcacatatataagcactgcacatg

SEQ ID NO: 238932 - DNA, 25 bp, probe
gtcaataaatgcccagcctgcatcc

SEQ ID NO: 238933 - DNA, 25 bp, probe
gtcaataaatgcctcatcaagaacc

SEQ ID NO: 238934 - DNA, 25 bp, probe
gtcactaagtcgcatcacagagatg

SEQ ID NO: 238935 - DNA, 25 bp, probe
gtcactaatcacctgatcataggaa

SEQ ID NO: 238936 - DNA, 25 bp, probe
gtcactaatcacctgatcataggaa

SEQ ID NO: 238937 - DNA, 25 bp, probe
gtctcattcccgcagtaatgacacc

SEQ ID NO: 238938 - DNA, 25 bp, probe
gtcagcctcccgtcaggagagaagc

SEQ ID NO: 238939 - DNA, 25 bp, probe
gtcagcctcccgtcaggagagaagc

SEQ ID NO: 238940 - DNA, 25 bp, probe
gtcagactgacctttgtggaactgc

SEQ ID NO: 238941 - DNA, 25 bp, probe
gtcaactacgcgaggcagaggctcg

SEQ ID NO: 238942 - DNA, 25 bp, probe
gtgaaccactgtgtactggagcctg

SEQ ID NO: 238943 - DNA, 25 bp, probe
gtaattatctgtgatggatggacac

SEQ ID NO: 238944 - DNA, 25 bp, probe
gtaattggtcatgtgatgcaagcca

SEQ ID NO: 238945 - DNA, 25 bp, probe
gtaattgtgtctggaatgacagcag

SEQ ID NO: 238946 - DNA, 25 bp, probe
gtcaatgatgtgtcttcaatgtcaa

SEQ ID NO: 238947 - DNA, 25 bp, probe
gtcaagaggtgcacagatgctcaga

SEQ ID NO: 238948 - DNA, 25 bp, probe
gtcaaggcctgcatatgcagaatga

SEQ ID NO: 238949 - DNA, 25 bp, probe
gtcacatgggtttatggatatgctc

SEQ ID NO: 238950 - DNA, 25 bp, probe
gtcagcattggatcagatggtattt

SEQ ID NO: 238951 - DNA, 25 bp, probe
gtcagcattgaggtcacctgctttc

SEQ ID NO: 238952 - DNA, 25 bp, probe
gtcatccatggacccctgatgattc

SEQ ID NO: 238953 - DNA, 25 bp, probe
gtcatcctgggtatgggctacaaag

SEQ ID NO: 238954 - DNA, 25 bp, probe
gtcacttggtttgggcttcattagg

SEQ ID NO: 238955 - DNA, 25 bp, probe
gtcacctttaaagtgcttgctaagg

SEQ ID NO: 238956 - DNA, 25 bp, probe
gtctcagtacaagaggctggccaag

SEQ ID NO: 238957 - DNA, 25 bp, probe
gtctcagtacaagaggctggccaag

SEQ ID NO: 238958 - DNA, 25 bp, probe
gtcaagctacattagagagctcatc

SEQ ID NO: 238959 - DNA, 25 bp, probe
gtcaagctacattagagagctcatc

SEQ ID NO: 238960 - DNA, 25 bp, probe
gtcacagctaaggagcatgcccatc

SEQ ID NO: 238961 - DNA, 25 bp, probe
gtcagccttcgctatgatggagcac

SEQ ID NO: 238962 - DNA, 25 bp, probe
gtcactgctgtggttgcagccacag

SEQ ID NO: 238963 - DNA, 25 bp, probe
gtcacctgggagacagtccagaagg

SEQ ID NO: 238964 - DNA, 25 bp, probe
gtcacctgggagagctcaaactggc

SEQ ID NO: 238965 - DNA, 25 bp, probe
gtcacctgggagagctcaaactggc

SEQ ID NO: 238966 - DNA, 25 bp, probe
gtcacactggtgattgtcaagaccc

SEQ ID NO: 238967 - DNA, 25 bp, probe
gtcaccatggtcattgtgcttacgt

SEQ ID NO: 238968 - DNA, 25 bp, probe
gtcaccatggtcattgtgcttacgt

SEQ ID NO: 238969 - DNA, 25 bp, probe
gtcagcctgtccatctggatattgg

SEQ ID NO: 238970 - DNA, 25 bp, probe
gtcacgtttccttctgatttggaat

SEQ ID NO: 238971 - DNA, 25 bp, probe
gtcacccatacatcactgtttggta

SEQ ID NO: 238972 - DNA, 25 bp, probe
gtcaccttcactcacagtctgagtt

SEQ ID NO: 238973 - DNA, 25 bp, probe
gtcaccttcactcacagtctgagtt

SEQ ID NO: 238974 - DNA, 25 bp, probe
gtcaccttctcactgagctttgatg

SEQ ID NO: 238975 - DNA, 25 bp, probe
gtcatcctgaacctgagttcaacca

SEQ ID NO: 238976 - DNA, 25 bp, probe
gtcactgctgtatggactcatccac

SEQ ID NO: 238977 - DNA, 25 bp, probe
gtcactgtaacagactgccacatac

SEQ ID NO: 238978 - DNA, 25 bp, probe
gtcagtgggacaaactccagcacag

SEQ ID NO: 238979 - DNA, 25 bp, probe
gtctgttgggcaaactgcccgagct

SEQ ID NO: 238980 - DNA, 25 bp, probe
gtcttcaaattcattgccctgactc

SEQ ID NO: 238981 - DNA, 25 bp, probe
gtcttgctcaatttcttaggctgga

SEQ ID NO: 238982 - DNA, 25 bp, probe
gtcagtcgaaattttggacggtgtg

SEQ ID NO: 238983 - DNA, 25 bp, probe
gtcagccgaactttgttatggaggg

SEQ ID NO: 238984 - DNA, 25 bp, probe
gtcaccagacctgcaatctatggag

SEQ ID NO: 238985 - DNA, 25 bp, probe
gtcaccagacctgcaatctatggag

SEQ ID NO: 238986 - DNA, 25 bp, probe
gtcaaaactggcccatgctgatgga

SEQ ID NO: 238987 - DNA, 25 bp, probe
gtcagaaactttcctggcaggcaca

SEQ ID NO: 238988 - DNA, 25 bp, probe
gtcagaaactttcctggcaggcaca

SEQ ID NO: 238989 - DNA, 25 bp, probe
gtcaaaaccttggctccagcatgaa

SEQ ID NO: 238990 - DNA, 25 bp, probe
gtcaacagaagctggtgctacaaat

SEQ ID NO: 238991 - DNA, 25 bp, probe
gtcaacaatcagtgatggtccaggt

SEQ ID NO: 238992 - DNA, 25 bp, probe
gtcaacatttgttagaaccagtctt

SEQ ID NO: 238993 - DNA, 25 bp, probe
gtcaatatttggccagtaccttttc

SEQ ID NO: 238994 - DNA, 25 bp, probe
gtcaattttgtccttttcattagta

SEQ ID NO: 238995 - DNA, 25 bp, probe
gtcagtattctcgctattttatagt

SEQ ID NO: 238996 - DNA, 25 bp, probe
gtcacctgtgtgggtattttataaa

SEQ ID NO: 238997 - DNA, 25 bp, probe
gtcacctggattggctacttttgct

SEQ ID NO: 238998 - DNA, 25 bp, probe
gtcacctggattgccctgatggtgt

SEQ ID NO: 238999 - DNA, 25 bp, probe
gtcacctggattgccctgatggtgt

SEQ ID NO: 239000 - DNA, 25 bp, probe
gtcactgtgacagttctccaggaag

SEQ ID NO: 239001 - DNA, 25 bp, probe
gtcactgtgacagttctccaggaag

SEQ ID NO: 239002 - DNA, 25 bp, probe
gtcacggaactcatgcgcaagggga

SEQ ID NO: 239003 - DNA, 25 bp, probe
gtcacggaactcatgcgcaagggga

SEQ ID NO: 239004 - DNA, 25 bp, probe
gtcactgagtacatggccaagggga

SEQ ID NO: 239005 - DNA, 25 bp, probe
gtcacgtctacaaggcgaggcggaa

SEQ ID NO: 239006 - DNA, 25 bp, probe
gtcacgtctacaaggcgaggcggaa

SEQ ID NO: 239007 - DNA, 25 bp, probe
gtcactttgacaatgggaatgagga

SEQ ID NO: 239008 - DNA, 25 bp, probe
gtcacatttagctgtgctcagaagg

SEQ ID NO: 239009 - DNA, 25 bp, probe
gtcaatcttgactagattaagagtc

SEQ ID NO: 239010 - DNA, 25 bp, probe
gtcaactgttcagatgtaagatgtt

SEQ ID NO: 239011 - DNA, 25 bp, probe
gtcagatcgcctcgggtatggtgta

SEQ ID NO: 239012 - DNA, 25 bp, probe
gtcaatgccgtaatggatttgtgct

SEQ ID NO: 239013 - DNA, 25 bp, probe
gtcaatgccggaattttgtattctg

SEQ ID NO: 239014 - DNA, 25 bp, probe
gtcaatgacagtttcttttttctta

SEQ ID NO: 239015 - DNA, 25 bp, probe
gtcaatgcaattgtctctgttttac

SEQ ID NO: 239016 - DNA, 25 bp, probe
gtcatcagaactcacctttgatttc

SEQ ID NO: 239017 - DNA, 25 bp, probe
gtcatcagaactcacctttgatttc

SEQ ID NO: 239018 - DNA, 25 bp, probe
gtcagtgaagcacccctttattgtg

SEQ ID NO: 239019 - DNA, 25 bp, probe
gtcagtgaagcacccctttattgtg

SEQ ID NO: 239020 - DNA, 25 bp, probe
gtcagtacatggattcttcacttgt

SEQ ID NO: 239021 - DNA, 25 bp, probe
gtcagaagttgacctttgcactggc

SEQ ID NO: 239022 - DNA, 25 bp, probe
gtcaaaggtgagactctctcatgtg

SEQ ID NO: 239023 - DNA, 25 bp, probe
gtcaagggatgaagacctgcagtga

SEQ ID NO: 239024 - DNA, 25 bp, probe
gtcagcagtgggatacctgcgcttg

SEQ ID NO: 239025 - DNA, 25 bp, probe
gtcagcagtgggatacctgcgcttg

SEQ ID NO: 239026 - DNA, 25 bp, probe
gtcaagtggcggtaaaggctcaggc

SEQ ID NO: 239027 - DNA, 25 bp, probe
gtcagagtgggattaacaaccctgg

SEQ ID NO: 239028 - DNA, 25 bp, probe
gtcagggtctcttcggagacccagg

SEQ ID NO: 239029 - DNA, 25 bp, probe
gtcagtgcatctcagggagaaccaa

SEQ ID NO: 239030 - DNA, 25 bp, probe
gtcatggcatctcttgcacagtaac

SEQ ID NO: 239031 - DNA, 25 bp, probe
gtcatggcatctcttgcacagtaac

SEQ ID NO: 239032 - DNA, 25 bp, probe
gtcaatgctctaagtgaagatacag

SEQ ID NO: 239033 - DNA, 25 bp, probe
gtcaagcatctaagcccaggacatg

SEQ ID NO: 239034 - DNA, 25 bp, probe
gtcaacagtgtcgccactgacagct

SEQ ID NO: 239035 - DNA, 25 bp, probe
gtctaagtcccagtcattgagtctc

SEQ ID NO: 239036 - DNA, 25 bp, probe
gtcatgttcccagccaagagtatga

SEQ ID NO: 239037 - DNA, 25 bp, probe
gtcatgttcccagccaagagtatga

SEQ ID NO: 239038 - DNA, 25 bp, probe
gtcatgttcccagccaagagtatga

SEQ ID NO: 239039 - DNA, 25 bp, probe
gtcatgttcccagccaagagtatga

SEQ ID NO: 239040 - DNA, 25 bp, probe
gtcagttctctagcataatttgtat

SEQ ID NO: 239041 - DNA, 25 bp, probe
gtcacctcacttgcagaatatcttt

SEQ ID NO: 239042 - DNA, 25 bp, probe
gtcaacaacttcggcatgtactact

SEQ ID NO: 239043 - DNA, 25 bp, probe
gtcaaccactacatgtgtgacatcc

SEQ ID NO: 239044 - DNA, 25 bp, probe
gtcaaccactacatgtgtgacatcc

SEQ ID NO: 239045 - DNA, 25 bp, probe
gtcaccacgtacttggtagacatgc

SEQ ID NO: 239046 - DNA, 25 bp, probe
gtcactccgattctgagtgccacat

SEQ ID NO: 239047 - DNA, 25 bp, probe
gtcactgccgattttgtagaacttg

SEQ ID NO: 239048 - DNA, 25 bp, probe
gtcacttccttcatgtaagactttg

SEQ ID NO: 239049 - DNA, 25 bp, probe
gtcatttccatcttctggaaggcag

SEQ ID NO: 239050 - DNA, 25 bp, probe
gtcatttccatcttctggaaggcag

SEQ ID NO: 239051 - DNA, 25 bp, probe
gtcactttgcatcttgtgacaaagg

SEQ ID NO: 239052 - DNA, 25 bp, probe
gtcactacatcactcaagtgcacaa

SEQ ID NO: 239053 - DNA, 25 bp, probe
gtcactacatcactcaagtgcacaa

SEQ ID NO: 239054 - DNA, 25 bp, probe
gtcagatcacaaccatcagcatcac

SEQ ID NO: 239055 - DNA, 25 bp, probe
gtcagatcacaaccatcagcatcac

SEQ ID NO: 239056 - DNA, 25 bp, probe
gtcatgacgcaactgcggcatagca

SEQ ID NO: 239057 - DNA, 25 bp, probe
gtcagtcgaacaagtcatgaagatt

SEQ ID NO: 239058 - DNA, 25 bp, probe
gtcacatgggcagagatagccgtgt

SEQ ID NO: 239059 - DNA, 25 bp, probe
gtcacgggatggatagccggcctgc

SEQ ID NO: 239060 - DNA, 25 bp, probe
gtcacgggatggatagccggcctgc

SEQ ID NO: 239061 - DNA, 25 bp, probe
gtcacggtctcgggagacgggctgc

SEQ ID NO: 239062 - DNA, 25 bp, probe
gtcaggaaatggggtatgcagggtc

SEQ ID NO: 239063 - DNA, 25 bp, probe
gtgcggacaaggtgggagagcccta

SEQ ID NO: 239064 - DNA, 25 bp, probe
gtgcggacaaggtgggagagcccta

SEQ ID NO: 239065 - DNA, 25 bp, probe
gtcacggaaggtgggagactcccca

SEQ ID NO: 239066 - DNA, 25 bp, probe
gtcactgttgactgtggagagtccc

SEQ ID NO: 239067 - DNA, 25 bp, probe
gtcacgtctgttgggcaaactgccc

SEQ ID NO: 239068 - DNA, 25 bp, probe
gtcacgtgtttggatcaagactgca

SEQ ID NO: 239069 - DNA, 25 bp, probe
gtcacagtgtgctgtcacagaccag

SEQ ID NO: 239070 - DNA, 25 bp, probe
gtcacagtgtgctgtcacagaccag

SEQ ID NO: 239071 - DNA, 25 bp, probe
gtcaagatgctccacataagatcca

SEQ ID NO: 239072 - DNA, 25 bp, probe
gtcaagacccaacagattcatacca

SEQ ID NO: 239073 - DNA, 25 bp, probe
gtcaagtactgcaaaagattcattc

SEQ ID NO: 239074 - DNA, 25 bp, probe
gtcaagtccattgtagactttgtga

SEQ ID NO: 239075 - DNA, 25 bp, probe
gtcaggtccaagtgtactgttggcc

SEQ ID NO: 239076 - DNA, 25 bp, probe
gtcagtaaatactgctcactttccc

SEQ ID NO: 239077 - DNA, 25 bp, probe
gtcagtaaatactgccactttcccc

SEQ ID NO: 239078 - DNA, 25 bp, probe
gtcagtaaatactcccactatgcct

SEQ ID NO: 239079 - DNA, 25 bp, probe
gtcaccaactactcaccagaagggg

SEQ ID NO: 239080 - DNA, 25 bp, probe
gtcactactttagagccactcaagg

SEQ ID NO: 239081 - DNA, 25 bp, probe
gtcagcgactttggcctggccaaag

SEQ ID NO: 239082 - DNA, 25 bp, probe
gtcagcgactttggcctggccaaag

SEQ ID NO: 239083 - DNA, 25 bp, probe
gtcacagaccttgcctcagaaggag

SEQ ID NO: 239084 - DNA, 25 bp, probe
gtcaactcttcttcctagaactgga

SEQ ID NO: 239085 - DNA, 25 bp, probe
gtcaagtttcttttggagaaggcaa

SEQ ID NO: 239086 - DNA, 25 bp, probe
gtcaagttctatggagtgtgcggcg

SEQ ID NO: 239087 - DNA, 25 bp, probe
gtcaagttctcaatggctacgtgtg

SEQ ID NO: 239088 - DNA, 25 bp, probe
gtcaggtttatttcatgaccttagg

SEQ ID NO: 239089 - DNA, 25 bp, probe
gtcagcgttcaatcttgaccttgaa

SEQ ID NO: 239090 - DNA, 25 bp, probe
gtcgtgttaaactgcaaaatgctga

SEQ ID NO: 239091 - DNA, 25 bp, probe
gtcgtgttaaactgcaaaatgctga

SEQ ID NO: 239092 - DNA, 25 bp, probe
gtcaggggaggagggcagagacttt

SEQ ID NO: 239093 - DNA, 25 bp, probe
gtcagaggggcatggcgaggagtcc

SEQ ID NO: 239094 - DNA, 25 bp, probe
gtcagtcgtgtgcagctctgagggc

SEQ ID NO: 239095 - DNA, 25 bp, probe
gtcagtcgtgtgcagctctgagggc

SEQ ID NO: 239096 - DNA, 25 bp, probe
gtcagtggtcaatgcctgagagggc

SEQ ID NO: 239097 - DNA, 25 bp, probe
gtcactgcggactaggtggcagagg

SEQ ID NO: 239098 - DNA, 25 bp, probe
gtcactcatgtgcaaaattgcagat

SEQ ID NO: 239099 - DNA, 25 bp, probe
gtcaaatcatggccaaatcgcagtg

SEQ ID NO: 239100 - DNA, 25 bp, probe
gtcacaccatcttaaatgacagtga

SEQ ID NO: 239101 - DNA, 25 bp, probe
gtcacagccagcgtcaaggaagctg

SEQ ID NO: 239102 - DNA, 25 bp, probe
gtcacacccaccaaggaagataagc

SEQ ID NO: 239103 - DNA, 25 bp, probe
gtcacctcacctcgggaaatgagaa

SEQ ID NO: 239104 - DNA, 25 bp, probe
gtcactggcacctcaggggaggaaa

SEQ ID NO: 239105 - DNA, 25 bp, probe
gtcacaggcagcatatccatgggag

SEQ ID NO: 239106 - DNA, 25 bp, probe
gtcacagtgacttgtctatgagggc

SEQ ID NO: 239107 - DNA, 25 bp, probe
gtcaaatactggcctgatgagtatg

SEQ ID NO: 239108 - DNA, 25 bp, probe
gtcatgattggcagccggagtcact

SEQ ID NO: 239109 - DNA, 25 bp, probe
gtcagtatggctcaaccagccatct

SEQ ID NO: 239110 - DNA, 25 bp, probe
gtcaaagactctaactcatgccatt

SEQ ID NO: 239111 - DNA, 25 bp, probe
gtcaaagactctaactcatgccatt

SEQ ID NO: 239112 - DNA, 25 bp, probe
gtcaaagacattcactatgttttta

SEQ ID NO: 239113 - DNA, 25 bp, probe
gtcaaatacatttatttgctcttgt

SEQ ID NO: 239114 - DNA, 25 bp, probe
gtcaaatacatttatttgctcttgt

SEQ ID NO: 239115 - DNA, 25 bp, probe
gtcaacatacagatttggcctagag

SEQ ID NO: 239116 - DNA, 25 bp, probe
gtgccctcgatcagtttcctaaggg

SEQ ID NO: 239117 - DNA, 25 bp, probe
gtgccctcgatcagtttcctaaggg

SEQ ID NO: 239118 - DNA, 25 bp, probe
gtctcttcagttctttaaaagtggt

SEQ ID NO: 239119 - DNA, 25 bp, probe
gtctttccttttgctcttaagttgt

SEQ ID NO: 239120 - DNA, 25 bp, probe
gtctttacattaactactaacagta

SEQ ID NO: 239121 - DNA, 25 bp, probe
gtcatttacgcatacttcaacaagg

SEQ ID NO: 239122 - DNA, 25 bp, probe
gtcacttcctgataaataagaggtg

SEQ ID NO: 239123 - DNA, 25 bp, probe
gtcacttctgctgtacagatatcga

SEQ ID NO: 239124 - DNA, 25 bp, probe
gtcactcgctgctttgagcattacg

SEQ ID NO: 239125 - DNA, 25 bp, probe
gtcacaggcatccatgtgtgcaaac

SEQ ID NO: 239126 - DNA, 25 bp, probe
gtcacaggcaagttcacagctcacc

SEQ ID NO: 239127 - DNA, 25 bp, probe
gtcacggaacacgtgcagctactgc

SEQ ID NO: 239128 - DNA, 25 bp, probe
gtcatcagcacattccctagtgagc

SEQ ID NO: 239129 - DNA, 25 bp, probe
gtcacagcgacccaggatgctgaca

SEQ ID NO: 239130 - DNA, 25 bp, probe
gtcattgccagcgctcagtctggca

SEQ ID NO: 239131 - DNA, 25 bp, probe
gtcattgtgcatggacaggccggga

SEQ ID NO: 239132 - DNA, 25 bp, probe
gtcatgctggctgagcgccagcggc

SEQ ID NO: 239133 - DNA, 25 bp, probe
gtcatgcggtttccaaggtgcacat

SEQ ID NO: 239134 - DNA, 25 bp, probe
gtcatgaagctttcctatggtcctg

SEQ ID NO: 239135 - DNA, 25 bp, probe
gtcatggagcacaggttcttcctca

SEQ ID NO: 239136 - DNA, 25 bp, probe
gtcagcgaacgtggcattttctgcg

SEQ ID NO: 239137 - DNA, 25 bp, probe
gtcagcagcaatggccttttctgtg

SEQ ID NO: 239138 - DNA, 25 bp, probe
gtcacgattctgtcattttggatcc

SEQ ID NO: 239139 - DNA, 25 bp, probe
gtcacgattctgtcattttggatcc

SEQ ID NO: 239140 - DNA, 25 bp, probe
gtcatcgaccccattgatggcacta

SEQ ID NO: 239141 - DNA, 25 bp, probe
gtcaccaacaccagggagaataaga

SEQ ID NO: 239142 - DNA, 25 bp, probe
gtcacagaacccatagggaatggag

SEQ ID NO: 239143 - DNA, 25 bp, probe
gtcacccacccatatggaaattgct

SEQ ID NO: 239144 - DNA, 25 bp, probe
gtcagtccctacttaggaaatactc

SEQ ID NO: 239145 - DNA, 25 bp, probe
gtcaggccctgtctgggccagaact

SEQ ID NO: 239146 - DNA, 25 bp, probe
gtcaggtcttggtaggtgcctgcat

SEQ ID NO: 239147 - DNA, 25 bp, probe
gtcagcttccatggtagtgtccatt

SEQ ID NO: 239148 - DNA, 25 bp, probe
gtcagctgtactagcaactgctcca

SEQ ID NO: 239149 - DNA, 25 bp, probe
gtcacagtcacaatgtattgcataa

SEQ ID NO: 239150 - DNA, 25 bp, probe
gtcagcagtgccttagacagcaaaa

SEQ ID NO: 239151 - DNA, 25 bp, probe
gtcacaatgacctgctctgcaagaa

SEQ ID NO: 239152 - DNA, 25 bp, probe
gtcacaatgacctgctctgcaagaa

SEQ ID NO: 239153 - DNA, 25 bp, probe
gtcatcaagcagtcggcctacgact

SEQ ID NO: 239154 - DNA, 25 bp, probe
gtcagagttcgaaggctttgagtat

SEQ ID NO: 239155 - DNA, 25 bp, probe
gtcagagtcccaggacattaaactc

SEQ ID NO: 239156 - DNA, 25 bp, probe
gtcgacctcctggatcagtacaagt

SEQ ID NO: 239157 - DNA, 25 bp, probe
gtcagagccccgaagcagctaatgt

SEQ ID NO: 239158 - DNA, 25 bp, probe
gtcagatactgcgcaagaatacatt

SEQ ID NO: 239159 - DNA, 25 bp, probe
gtcatactagcccaaccaacatggc

SEQ ID NO: 239160 - DNA, 25 bp, probe
gtctactagcaacaacaactttctt

SEQ ID NO: 239161 - DNA, 25 bp, probe
gtcatttggctatagaaacattttc

SEQ ID NO: 239162 - DNA, 25 bp, probe
gtcatcttggagactaaagaatatt

SEQ ID NO: 239163 - DNA, 25 bp, probe
gtcactcccgagaatgcagaaattt

SEQ ID NO: 239164 - DNA, 25 bp, probe
gtcacccctatgtggaccactatga

SEQ ID NO: 239165 - DNA, 25 bp, probe
gtcacccctatgtggaccactatga

SEQ ID NO: 239166 - DNA, 25 bp, probe
gtcactgtcctatgggaccatcttt

SEQ ID NO: 239167 - DNA, 25 bp, probe
gtcactgtcctatgggaccatcttt

SEQ ID NO: 239168 - DNA, 25 bp, probe
gtcatctgtcgctaaggcgcaacct

SEQ ID NO: 239169 - DNA, 25 bp, probe
gtcactgttctaatgctggcaattc

SEQ ID NO: 239170 - DNA, 25 bp, probe
gtcagttttatagtgtgcaagtggc

SEQ ID NO: 239171 - DNA, 25 bp, probe
gtcagttattatttactattacgtg

SEQ ID NO: 239172 - DNA, 25 bp, probe
gtcagcctcttcgatgtttaataca

SEQ ID NO: 239173 - DNA, 25 bp, probe
gtcagcccttagattcagatagaag

SEQ ID NO: 239174 - DNA, 25 bp, probe
gtcaccctaagtatggataggctgg

SEQ ID NO: 239175 - DNA, 25 bp, probe
gtcaccactccagatagaaaggtca

SEQ ID NO: 239176 - DNA, 25 bp, probe
gtcactgcctccaagtgaaagatgg

SEQ ID NO: 239177 - DNA, 25 bp, probe
gtcagatgccggacgacatgaaggg

SEQ ID NO: 239178 - DNA, 25 bp, probe
gtcagagcctgccaagatcacagat

SEQ ID NO: 239179 - DNA, 25 bp, probe
gtcacatatgagcaagatcagaata

SEQ ID NO: 239180 - DNA, 25 bp, probe
gtcagctgaagttagatcagaagac

SEQ ID NO: 239181 - DNA, 25 bp, probe
gtcactgcaaggggatgctgcaccc

SEQ ID NO: 239182 - DNA, 25 bp, probe
gtcactgcaaggggatgctgcaccc

SEQ ID NO: 239183 - DNA, 25 bp, probe
gtcactgtagcgatgactccacgct

SEQ ID NO: 239184 - DNA, 25 bp, probe
gtcagcattatctctgagtccacca

SEQ ID NO: 239185 - DNA, 25 bp, probe
gtcatcagaatctgtcggccaaaag

SEQ ID NO: 239186 - DNA, 25 bp, probe
gtcactgcaattttcaggagacata

SEQ ID NO: 239187 - DNA, 25 bp, probe
gtcagtcacttgtttgcagaagcaa

SEQ ID NO: 239188 - DNA, 25 bp, probe
gtcagcatcagcttggtgtggatag

SEQ ID NO: 239189 - DNA, 25 bp, probe
gtcagacagatgtggttgcatccta

SEQ ID NO: 239190 - DNA, 25 bp, probe
gtcagaagtgtgagttatcagccac

SEQ ID NO: 239191 - DNA, 25 bp, probe
gtcacacagggcagtcattcagcac

SEQ ID NO: 239192 - DNA, 25 bp, probe
gtcaccaggctggagtgcagtggca

SEQ ID NO: 239193 - DNA, 25 bp, probe
gtcacccatgctggagtgcagtggc

SEQ ID NO: 239194 - DNA, 25 bp, probe
gtcagccttcatggagcaggatgct

SEQ ID NO: 239195 - DNA, 25 bp, probe
gtcagctgttctggcacagtgagtg

SEQ ID NO: 239196 - DNA, 25 bp, probe
gtcagtgtctctaagattgtggtgc

SEQ ID NO: 239197 - DNA, 25 bp, probe
gtcactgtcatcagaatctgtcggc

SEQ ID NO: 239198 - DNA, 25 bp, probe
gtcactgtcatcagaatctgtcggc

SEQ ID NO: 239199 - DNA, 25 bp, probe
gtcagtatctgcagaacagtaagcg

SEQ ID NO: 239200 - DNA, 25 bp, probe
gtcagtatccaggctttgtacagag

SEQ ID NO: 239201 - DNA, 25 bp, probe
gtcacatatccaggtagctatcaag

SEQ ID NO: 239202 - DNA, 25 bp, probe
gtcacaatctcagcaacgagcaaga

SEQ ID NO: 239203 - DNA, 25 bp, probe
gtcacgttactacaggcaagtggca

SEQ ID NO: 239204 - DNA, 25 bp, probe
gtccagtttccaaagggcagtaaag

SEQ ID NO: 239205 - DNA, 25 bp, probe
gtcacgtttccaaagctgtgtgctc

SEQ ID NO: 239206 - DNA, 25 bp, probe
gtcacctgatgtcaaccttgtgacc

SEQ ID NO: 239207 - DNA, 25 bp, probe
gtcacctatgtgaacagctgcttgt

SEQ ID NO: 239208 - DNA, 25 bp, probe
gtcagagttgtgcacatggcttagt

SEQ ID NO: 239209 - DNA, 25 bp, probe
gtcaggaggtgaccagtcttcattt

SEQ ID NO: 239210 - DNA, 25 bp, probe
gtcaggaggtcaagtgtgcatgcaa

SEQ ID NO: 239211 - DNA, 25 bp, probe
gtcaggaattcaagcgtgaacccat

SEQ ID NO: 239212 - DNA, 25 bp, probe
gtcacgacattctgcagagattccc

SEQ ID NO: 239213 - DNA, 25 bp, probe
gtcacttcagcctgatacagtccac

SEQ ID NO: 239214 - DNA, 25 bp, probe
gtcagctacttctgaaactgcagca

SEQ ID NO: 239215 - DNA, 25 bp, probe
gtcagcaactccccaaagtggacaa

SEQ ID NO: 239216 - DNA, 25 bp, probe
gtcaaataacacgaaagtggtgaaa

SEQ ID NO: 239217 - DNA, 25 bp, probe
gtcaaattacaatcacagttaagaa

SEQ ID NO: 239218 - DNA, 25 bp, probe
gtcagattctaagccctgttcagag

SEQ ID NO: 239219 - DNA, 25 bp, probe
gtcagattctaagccctgttcagag

SEQ ID NO: 239220 - DNA, 25 bp, probe
gtcagtggcaaagactggtccagag

SEQ ID NO: 239221 - DNA, 25 bp, probe
gtcagtggcaaagactggtccagag

SEQ ID NO: 239222 - DNA, 25 bp, probe
gtcagttcagaagtaagcgctctaa

SEQ ID NO: 239223 - DNA, 25 bp, probe
gtcattctaaaaaacacctaattat

SEQ ID NO: 239224 - DNA, 25 bp, probe
gtcttaaagaaggacgtcatccttc

SEQ ID NO: 239225 - DNA, 25 bp, probe
gtctaagaacaaaagcgacccattc

SEQ ID NO: 239226 - DNA, 25 bp, probe
gtctgaaggggaaaggcattctttc

SEQ ID NO: 239227 - DNA, 25 bp, probe
gtctgcaggggtgaacctttgctct

SEQ ID NO: 239228 - DNA, 25 bp, probe
gtcagaagggttaactcaactgtct

SEQ ID NO: 239229 - DNA, 25 bp, probe
gtcattaacgttcaccacagatctt

SEQ ID NO: 239230 - DNA, 25 bp, probe
gtcagtttggttcttgtgcagatca

SEQ ID NO: 239231 - DNA, 25 bp, probe
gtcagctttgtactctttgttgata

SEQ ID NO: 239232 - DNA, 25 bp, probe
gtcagtgctgttgcctctaatatga

SEQ ID NO: 239233 - DNA, 25 bp, probe
gtcagtattaccaccagactgactc

SEQ ID NO: 239234 - DNA, 25 bp, probe
gtcactaccagtaccaatgattacc

SEQ ID NO: 239235 - DNA, 25 bp, probe
gtcagccagacagggcatcaaatta

SEQ ID NO: 239236 - DNA, 25 bp, probe
gtcagccagacagggcatcaaatta

SEQ ID NO: 239237 - DNA, 25 bp, probe
gtcatgaagccagatgctcaagatt

SEQ ID NO: 239238 - DNA, 25 bp, probe
gtcagcatagctatagacaagatat

SEQ ID NO: 239239 - DNA, 25 bp, probe
gtcagaccatttcagcacagagctt

SEQ ID NO: 239240 - DNA, 25 bp, probe
gtcagatggacttcccaagacttgt

SEQ ID NO: 239241 - DNA, 25 bp, probe
gtcagaagaccaggctacaaggtgt

SEQ ID NO: 239242 - DNA, 25 bp, probe
gtcagaaacccactaatgggtgtca

SEQ ID NO: 239243 - DNA, 25 bp, probe
gtcacaaacacccagaccggggaag

SEQ ID NO: 239244 - DNA, 25 bp, probe
gtctcaaactcctgacctcaggtga

SEQ ID NO: 239245 - DNA, 25 bp, probe
gtctcaaactcctgacctcaggtga

SEQ ID NO: 239246 - DNA, 25 bp, probe
gtcttgaactcctgacctcaggtga

SEQ ID NO: 239247 - DNA, 25 bp, probe
gtcttacgccacagggtgcaggtaa

SEQ ID NO: 239248 - DNA, 25 bp, probe
gtcttacagctctaaagggcggcac

SEQ ID NO: 239249 - DNA, 25 bp, probe
gtcttactgatctaaccctaaatcc

SEQ ID NO: 239250 - DNA, 25 bp, probe
gtctctttcctacaagttaaccagt

SEQ ID NO: 239251 - DNA, 25 bp, probe
gtctctttcctacaagttaaccagt

SEQ ID NO: 239252 - DNA, 25 bp, probe
gtctctgttttacaagttggagtca

SEQ ID NO: 239253 - DNA, 25 bp, probe
gtctcttggtccacagtatttggaa

SEQ ID NO: 239254 - DNA, 25 bp, probe
gtgctttaggtctggactttgtgga

SEQ ID NO: 239255 - DNA, 25 bp, probe
gtgcttttgtacagacctttgtaac

SEQ ID NO: 239256 - DNA, 25 bp, probe
gtgcttttgtacagacctttgtaac

SEQ ID NO: 239257 - DNA, 25 bp, probe
gtctctctagttgaaccctgggaac

SEQ ID NO: 239258 - DNA, 25 bp, probe
gtcttccattgaaccacttcgggaa

SEQ ID NO: 239259 - DNA, 25 bp, probe
gtcttgccttacacaaaggggatca

SEQ ID NO: 239260 - DNA, 25 bp, probe
gtcttgccttacacaaaggggatca

SEQ ID NO: 239261 - DNA, 25 bp, probe
gtgctggctttagacggggagaaac

SEQ ID NO: 239262 - DNA, 25 bp, probe
gtgctggctttagacggggagaaac

SEQ ID NO: 239263 - DNA, 25 bp, probe
gtcatgcagtctgaaaagggaagaa

SEQ ID NO: 239264 - DNA, 25 bp, probe
gtcatggatgtctaagcaccgtaag

SEQ ID NO: 239265 - DNA, 25 bp, probe
gtcttgtacagaagccgccacaagg

SEQ ID NO: 239266 - DNA, 25 bp, probe
gtcatgtatacttacggcaacaagc

SEQ ID NO: 239267 - DNA, 25 bp, probe
gtcatgatacctacacttccatcaa

SEQ ID NO: 239268 - DNA, 25 bp, probe
gtcatgtctctaaactgcggtcaga

SEQ ID NO: 239269 - DNA, 25 bp, probe
gtcaggtgatatgactggtgtcaca

SEQ ID NO: 239270 - DNA, 25 bp, probe
gtcactttatggactgtctgtgcaa

SEQ ID NO: 239271 - DNA, 25 bp, probe
gtcacttggatggtgtgttcatgca

SEQ ID NO: 239272 - DNA, 25 bp, probe
gtcagatgtggatatgttttgccga

SEQ ID NO: 239273 - DNA, 25 bp, probe
gtcatcatggaatgttgtttgccta

SEQ ID NO: 239274 - DNA, 25 bp, probe
gtcactggatagtgctgtatcactt

SEQ ID NO: 239275 - DNA, 25 bp, probe
gtcactggatagtgctgtatcactt

SEQ ID NO: 239276 - DNA, 25 bp, probe
gtcacagggggcctgtgtcacagtg

SEQ ID NO: 239277 - DNA, 25 bp, probe
gtcacagatgaagcacctgaccgta

SEQ ID NO: 239278 - DNA, 25 bp, probe
gtcataagaagaactttttgcatag

SEQ ID NO: 239279 - DNA, 25 bp, probe
gtcagagaaagaagctcggtctatt

SEQ ID NO: 239280 - DNA, 25 bp, probe
gtcacagatttaaccttgatctaaa

SEQ ID NO: 239281 - DNA, 25 bp, probe
gtctattttagaccttgagtaaact

SEQ ID NO: 239282 - DNA, 25 bp, probe
gtctacgttaccaggcaggaaggct

SEQ ID NO: 239283 - DNA, 25 bp, probe
gtctacggaagcctctgggtgacaa

SEQ ID NO: 239284 - DNA, 25 bp, probe
gtctacggaagcctctgggtgacaa

SEQ ID NO: 239285 - DNA, 25 bp, probe
gtctttatgaaccggcagtttcgaa

SEQ ID NO: 239286 - DNA, 25 bp, probe
gtctttatgaaccggcagtttcgaa

SEQ ID NO: 239287 - DNA, 25 bp, probe
gtcattttgcttcgggcagggtgga

SEQ ID NO: 239288 - DNA, 25 bp, probe
gtctttccggaggtcagtggtgggt

SEQ ID NO: 239289 - DNA, 25 bp, probe
gtctcaaccggcagatccgggggga

SEQ ID NO: 239290 - DNA, 25 bp, probe
gtctcaagaagtgcttccgggtggg

SEQ ID NO: 239291 - DNA, 25 bp, probe
gtcgatctaggtgtgaccagggtgg

SEQ ID NO: 239292 - DNA, 25 bp, probe
gtcgatctaggtgtgaccagggtgg

SEQ ID NO: 239293 - DNA, 25 bp, probe
gtcacatttggtagacaacagggtt

SEQ ID NO: 239294 - DNA, 25 bp, probe
gtcatagttgagtgcacccaagtgg

SEQ ID NO: 239295 - DNA, 25 bp, probe
gtcataaatatgtttccctatgtgt

SEQ ID NO: 239296 - DNA, 25 bp, probe
gtcatggtaagttctactcattttc

SEQ ID NO: 239297 - DNA, 25 bp, probe
gtcacctcaatatttactatttcaa

SEQ ID NO: 239298 - DNA, 25 bp, probe
gtcacctcaatatttactatttcaa

SEQ ID NO: 239299 - DNA, 25 bp, probe
gtcactccatcgatgttcttcttcg

SEQ ID NO: 239300 - DNA, 25 bp, probe
gtcagcccttgagtgtatttgttct

SEQ ID NO: 239301 - DNA, 25 bp, probe
gtcacccaagagattgttgtttgcc

SEQ ID NO: 239302 - DNA, 25 bp, probe
gtcactcacaagtttctgtttatat

SEQ ID NO: 239303 - DNA, 25 bp, probe
gtcagtactgaattcctgcttgtta

SEQ ID NO: 239304 - DNA, 25 bp, probe
gtcaggagtgacttccgctcaaaag

SEQ ID NO: 239305 - DNA, 25 bp, probe
gtcaggagttttactgcctgtagca

SEQ ID NO: 239306 - DNA, 25 bp, probe
gtcagggtgttatgtcctgaaaata

SEQ ID NO: 239307 - DNA, 25 bp, probe
gtcttgtggctgtctttcggaaaat

SEQ ID NO: 239308 - DNA, 25 bp, probe
gtctttgtcaatgctctaacaaacc

SEQ ID NO: 239309 - DNA, 25 bp, probe
gtctttacaaccttacctagatatc

SEQ ID NO: 239310 - DNA, 25 bp, probe
gtctttaggcagcagcttttaatac

SEQ ID NO: 239311 - DNA, 25 bp, probe
gtctaaatggcttctttgttactac

SEQ ID NO: 239312 - DNA, 25 bp, probe
gtctactgggctacgtatttaaaca

SEQ ID NO: 239313 - DNA, 25 bp, probe
gtctactgggctacgtatttaaaca

SEQ ID NO: 239314 - DNA, 25 bp, probe
gtctactgggttggatacctgtatc

SEQ ID NO: 239315 - DNA, 25 bp, probe
gtctactgcctcaagagaaacctac

SEQ ID NO: 239316 - DNA, 25 bp, probe
gtcatgactgtcctagtgaacactt

SEQ ID NO: 239317 - DNA, 25 bp, probe
gtcatcctgagcatctagaaccttg

SEQ ID NO: 239318 - DNA, 25 bp, probe
gtcatcctgagcatctagaaccttg

SEQ ID NO: 239319 - DNA, 25 bp, probe
gtcaccatgcagccgctgatagttc

SEQ ID NO: 239320 - DNA, 25 bp, probe
gtcacgatggcactattgaattcac

SEQ ID NO: 239321 - DNA, 25 bp, probe
gtcactgatagccgatgaggagtcc

SEQ ID NO: 239322 - DNA, 25 bp, probe
gtcagcttatcctaaggctgtccac

SEQ ID NO: 239323 - DNA, 25 bp, probe
gtcagaagacactgagttcctcact

SEQ ID NO: 239324 - DNA, 25 bp, probe
gtcagagtcacctgatgtcaacctt

SEQ ID NO: 239325 - DNA, 25 bp, probe
gtcagcacccaaaggtcaatgcaca

SEQ ID NO: 239326 - DNA, 25 bp, probe
gtcacccacatcaaggtcatgtgcg

SEQ ID NO: 239327 - DNA, 25 bp, probe
gtcttctaccatagtccagtggctc

SEQ ID NO: 239328 - DNA, 25 bp, probe
gtcttctgacacttgtaggtggtac

SEQ ID NO: 239329 - DNA, 25 bp, probe
gtcttctgacacttgtaggtggtac

SEQ ID NO: 239330 - DNA, 25 bp, probe
gtcttctgcacgagcaagtttctca

SEQ ID NO: 239331 - DNA, 25 bp, probe
gtcttctgcacgagcaagtttctca

SEQ ID NO: 239332 - DNA, 25 bp, probe
gtctttcaacgtgatgttcccgatg

SEQ ID NO: 239333 - DNA, 25 bp, probe
gtgctttcccaagaatttacagagt

SEQ ID NO: 239334 - DNA, 25 bp, probe
gtgctttcccaagaatttacagagt

SEQ ID NO: 239335 - DNA, 25 bp, probe
gtcttccctgagaaagttaatctgg

SEQ ID NO: 239336 - DNA, 25 bp, probe
gtcttccttggcaaggcttaaaggc

SEQ ID NO: 239337 - DNA, 25 bp, probe
gtcttcgttggcagagatttccaag

SEQ ID NO: 239338 - DNA, 25 bp, probe
gtccttgttgaagcagttacctagt

SEQ ID NO: 239339 - DNA, 25 bp, probe
gtcgctgtttgagaacttcacttac

SEQ ID NO: 239340 - DNA, 25 bp, probe
gtcagatgtttactgcacacctatt

SEQ ID NO: 239341 - DNA, 25 bp, probe
tgatcagggatcactgcaacctctg

SEQ ID NO: 239342 - DNA, 25 bp, probe
gtcatggcgaagactgagtcaccgc

SEQ ID NO: 239343 - DNA, 25 bp, probe
gtcaggtggtgggagtaccagcccc

SEQ ID NO: 239344 - DNA, 25 bp, probe
gtcaggggcttggatttcgtgtgcc

SEQ ID NO: 239345 - DNA, 25 bp, probe
gtcatagggcttgatagacctggca

SEQ ID NO: 239346 - DNA, 25 bp, probe
gtcatggggagggtagcaccaggca

SEQ ID NO: 239347 - DNA, 25 bp, probe
gtcagaggaggggatatgggcagag

SEQ ID NO: 239348 - DNA, 25 bp, probe
gtcagcaatgagggcgagggggagc

SEQ ID NO: 239349 - DNA, 25 bp, probe
gtcagcgatgttccaggggcagaga

SEQ ID NO: 239350 - DNA, 25 bp, probe
gtcagcacagtacaggcgagaacct

SEQ ID NO: 239351 - DNA, 25 bp, probe
gtcagcatctgtaacaagtatggag

SEQ ID NO: 239352 - DNA, 25 bp, probe
gtcagcatcttgaaagctttcatga

SEQ ID NO: 239353 - DNA, 25 bp, probe
gtcagcctaagacctgcaacatgag

SEQ ID NO: 239354 - DNA, 25 bp, probe
gtcagcctaagacctgcaacatgag

SEQ ID NO: 239355 - DNA, 25 bp, probe
gtcagcctaatatgcacactatgga

SEQ ID NO: 239356 - DNA, 25 bp, probe
gtcagcctaatatgcacactatgga

SEQ ID NO: 239357 - DNA, 25 bp, probe
gtcacctagagaggctcacttgtac

SEQ ID NO: 239358 - DNA, 25 bp, probe
gtcaccatcatgaacactcaattgt

SEQ ID NO: 239359 - DNA, 25 bp, probe
gtcaccatcatgaacactcaattgt

SEQ ID NO: 239360 - DNA, 25 bp, probe
gtcaccatcagaaggctgtttgtta

SEQ ID NO: 239361 - DNA, 25 bp, probe
gtcaccatcagaaggctgtttgtta

SEQ ID NO: 239362 - DNA, 25 bp, probe
gtctcagtgcatgctgtgctttttc

SEQ ID NO: 239363 - DNA, 25 bp, probe
gtctagattgacccttgattttgcc

SEQ ID NO: 239364 - DNA, 25 bp, probe
gtcatcagggacccattgttctctt

SEQ ID NO: 239365 - DNA, 25 bp, probe
gtcaggggacagcttgtgtcaccac

SEQ ID NO: 239366 - DNA, 25 bp, probe
gtcatggatggagggtatctggatc

SEQ ID NO: 239367 - DNA, 25 bp, probe
gtcagctatcaagggcatgatccgc

SEQ ID NO: 239368 - DNA, 25 bp, probe
gtcatgtacatagtccatacctgag

SEQ ID NO: 239369 - DNA, 25 bp, probe
gtcagtcacatctgtaacctgctca

SEQ ID NO: 239370 - DNA, 25 bp, probe
gtcgatgacatgtttgaacctcact

SEQ ID NO: 239371 - DNA, 25 bp, probe
gtctatgactctttggacaaggccc

SEQ ID NO: 239372 - DNA, 25 bp, probe
gtcataatccttagtgagggtgccc

SEQ ID NO: 239373 - DNA, 25 bp, probe
gtcatagatttctgaaggcgtcaac

SEQ ID NO: 239374 - DNA, 25 bp, probe
gtcatagaattctcaggggacatct

SEQ ID NO: 239375 - DNA, 25 bp, probe
gtcaggaatccacatggtgtaataa

SEQ ID NO: 239376 - DNA, 25 bp, probe
gtcagctttgcctcacagttgaaaa

SEQ ID NO: 239377 - DNA, 25 bp, probe
gtcactgttgccaaatgggaaagaa

SEQ ID NO: 239378 - DNA, 25 bp, probe
gtcactgtgtcatcgatgagcggac

SEQ ID NO: 239379 - DNA, 25 bp, probe
gtcagccagtctccgagagcggatt

SEQ ID NO: 239380 - DNA, 25 bp, probe
gtcagccagtctccgagagcggatt

SEQ ID NO: 239381 - DNA, 25 bp, probe
gtcagctgagtccgaggaggtgtcg

SEQ ID NO: 239382 - DNA, 25 bp, probe
gtcaccagatcctagtgtagttctg

SEQ ID NO: 239383 - DNA, 25 bp, probe
gtcaccaaacaacttggttgtgaac

SEQ ID NO: 239384 - DNA, 25 bp, probe
gtcaccgacaacatgctgtgtgctg

SEQ ID NO: 239385 - DNA, 25 bp, probe
gtcaccgacaacatgctgtgtgctg

SEQ ID NO: 239386 - DNA, 25 bp, probe
gtcagcgtgccatcttgatgtgtgt

SEQ ID NO: 239387 - DNA, 25 bp, probe
gtcagagtgctgtcttatgtgaagt

SEQ ID NO: 239388 - DNA, 25 bp, probe
gtctacgtgctcatgctggagtgct

SEQ ID NO: 239389 - DNA, 25 bp, probe
gtctacgtgctcatgctggagtgct

SEQ ID NO: 239390 - DNA, 25 bp, probe
gtcatcctggtgatgctgaggtccc

SEQ ID NO: 239391 - DNA, 25 bp, probe
gtcatccgtctgctgcagaaactcc

SEQ ID NO: 239392 - DNA, 25 bp, probe
gtcatccagactactcgaaatggcg

SEQ ID NO: 239393 - DNA, 25 bp, probe
gtcatccatgacaactttggtatcg

SEQ ID NO: 239394 - DNA, 25 bp, probe
gtcaccagcagctcttgggaaggac

SEQ ID NO: 239395 - DNA, 25 bp, probe
gtcagccgcagactttggaaagccc

SEQ ID NO: 239396 - DNA, 25 bp, probe
gtcacctgtgagctggagagaaccc

SEQ ID NO: 239397 - DNA, 25 bp, probe
gtccctggggtgtgtgaattcctac

SEQ ID NO: 239398 - DNA, 25 bp, probe
gtcccgccaccgtgatgaatgtact

SEQ ID NO: 239399 - DNA, 25 bp, probe
gtcaccgtcagcagtttgcagtttt

SEQ ID NO: 239400 - DNA, 25 bp, probe
gtcccttccaatgctgtgggtttcc

SEQ ID NO: 239401 - DNA, 25 bp, probe
gtctttcaccaaatttgaggacttt

SEQ ID NO: 239402 - DNA, 25 bp, probe
gtcttgtcccaattaaaatactatg

SEQ ID NO: 239403 - DNA, 25 bp, probe
gtcatacccgaaaaagcaaacgatg

SEQ ID NO: 239404 - DNA, 25 bp, probe
gtctactccaagaaaccaacgctga

SEQ ID NO: 239405 - DNA, 25 bp, probe
gtctacagtccagatgttcttcgta

SEQ ID NO: 239406 - DNA, 25 bp, probe
gtctaaactcagcatgctttggtga

SEQ ID NO: 239407 - DNA, 25 bp, probe
gtcttgatttcaccattgtcggtga

SEQ ID NO: 239408 - DNA, 25 bp, probe
gtctttatatcactttgacagagga

SEQ ID NO: 239409 - DNA, 25 bp, probe
gtctttatatcactttgacagagga

SEQ ID NO: 239410 - DNA, 25 bp, probe
gtcataaatcacaataagtatagga

SEQ ID NO: 239411 - DNA, 25 bp, probe
gtcataaagctcaactatgtctttg

SEQ ID NO: 239412 - DNA, 25 bp, probe
gtcataaagctcaactatgtctttg

SEQ ID NO: 239413 - DNA, 25 bp, probe
gtcaccaggacaatcttggctattc

SEQ ID NO: 239414 - DNA, 25 bp, probe
gtcatcatctggtcctttgtgaaat

SEQ ID NO: 239415 - DNA, 25 bp, probe
gtcatcagtatgtcctacgtcatca

SEQ ID NO: 239416 - DNA, 25 bp, probe
gtcatcaatgtacatgccaacataa

SEQ ID NO: 239417 - DNA, 25 bp, probe
gtcacgcatgttcataaagcatgaa

SEQ ID NO: 239418 - DNA, 25 bp, probe
gtcaccttggtcacagcagtaagaa

SEQ ID NO: 239419 - DNA, 25 bp, probe
gtcaccttggtcacagcagtaagaa

SEQ ID NO: 239420 - DNA, 25 bp, probe
gtcacccttatcagcaaagacagac

SEQ ID NO: 239421 - DNA, 25 bp, probe
gtcaccaattcatacaccgggactt

SEQ ID NO: 239422 - DNA, 25 bp, probe
gtcatcgatttatcaatcccgtttt

SEQ ID NO: 239423 - DNA, 25 bp, probe
gtcatactttcatacttcattttgt

SEQ ID NO: 239424 - DNA, 25 bp, probe
gtcatgctttactcctgtattgtta

SEQ ID NO: 239425 - DNA, 25 bp, probe
gtcagttacaccaatctgaagttta

SEQ ID NO: 239426 - DNA, 25 bp, probe
gtcagtttgaattttgacagctatt

SEQ ID NO: 239427 - DNA, 25 bp, probe
gtcagtttgaattttgacagctatt

SEQ ID NO: 239428 - DNA, 25 bp, probe
gtcagtttcagttacaatcatcttt

SEQ ID NO: 239429 - DNA, 25 bp, probe
gtcagtttcatgccatatcatattc

SEQ ID NO: 239430 - DNA, 25 bp, probe
gtcagtcttcaggatgtgcttatgc

SEQ ID NO: 239431 - DNA, 25 bp, probe
gtcagtcttcaggatgtgcttatgc

SEQ ID NO: 239432 - DNA, 25 bp, probe
gtcattgggctgcttgctgtatgag

SEQ ID NO: 239433 - DNA, 25 bp, probe
gtcatttggtgactttgatgggggg

SEQ ID NO: 239434 - DNA, 25 bp, probe
gtctttgagttgtggtggacgctgg

SEQ ID NO: 239435 - DNA, 25 bp, probe
gtcttcaggggctgattatccggtg

SEQ ID NO: 239436 - DNA, 25 bp, probe
gtcccagggccaggacgaaagtgtg

SEQ ID NO: 239437 - DNA, 25 bp, probe
gtcccaggatccatggcaggacggt

SEQ ID NO: 239438 - DNA, 25 bp, probe
gtctaagtgacgagggggctgggtc

SEQ ID NO: 239439 - DNA, 25 bp, probe
gtcttggtgaaggtgaggggctgta

SEQ ID NO: 239440 - DNA, 25 bp, probe
gtcagatgtgtatgcgtttgggatt

SEQ ID NO: 239441 - DNA, 25 bp, probe
gtcatatggatattagccattccga

SEQ ID NO: 239442 - DNA, 25 bp, probe
gtcatatggatattagccattccga

SEQ ID NO: 239443 - DNA, 25 bp, probe
gtcatcgttgccaacacaatgccca

SEQ ID NO: 239444 - DNA, 25 bp, probe
gtcatctgttacagcacctaccata

SEQ ID NO: 239445 - DNA, 25 bp, probe
gtcatgcatttcttgagcacctact

SEQ ID NO: 239446 - DNA, 25 bp, probe
gtcatgcatttcttgagcacctact

SEQ ID NO: 239447 - DNA, 25 bp, probe
gtcatcattactgacactcaactcc

SEQ ID NO: 239448 - DNA, 25 bp, probe
gtcatcttgaccaagcaggaagctc

SEQ ID NO: 239449 - DNA, 25 bp, probe
gtctcattgtactacggaactctga

SEQ ID NO: 239450 - DNA, 25 bp, probe
gtctcattgtactacggaactctga

SEQ ID NO: 239451 - DNA, 25 bp, probe
gtcatattaaatctgtagactcagg

SEQ ID NO: 239452 - DNA, 25 bp, probe
gtcattgggaattgtgtaaacacct

SEQ ID NO: 239453 - DNA, 25 bp, probe
gtcttttgaagggctataccagtta

SEQ ID NO: 239454 - DNA, 25 bp, probe
gtcttcttaggatctgatcccagtt

SEQ ID NO: 239455 - DNA, 25 bp, probe
gtctttctcaggagcagttaagtac

SEQ ID NO: 239456 - DNA, 25 bp, probe
gtctttctggagaggttataggtca

SEQ ID NO: 239457 - DNA, 25 bp, probe
gtcttattggaattgcttatgaagg

SEQ ID NO: 239458 - DNA, 25 bp, probe
gtctgtttggatttgctttaaagtc

SEQ ID NO: 239459 - DNA, 25 bp, probe
gtcagcctgggtttctttagggctc

SEQ ID NO: 239460 - DNA, 25 bp, probe
gtcagccgtggttgcattttagaag

SEQ ID NO: 239461 - DNA, 25 bp, probe
gtcagaccgagtgcatggtagagca

SEQ ID NO: 239462 - DNA, 25 bp, probe
gcgctggcgttacagcgcaacagca

SEQ ID NO: 239463 - DNA, 25 bp, probe
cgttacagcgcaacagcagcctgca

SEQ ID NO: 239464 - DNA, 25 bp, probe
agcgcaacagcagcctgcagctgga

SEQ ID NO: 239465 - DNA, 25 bp, probe
cagcagcctgcagctggattacgca

SEQ ID NO: 239466 - DNA, 25 bp, probe
ctgcagctggattacgcaacagtaa

SEQ ID NO: 239467 - DNA, 25 bp, probe
catcagcgcgcaagagggcagaccg

SEQ ID NO: 239468 - DNA, 25 bp, probe
cgcaagagggcagaccgatagaatc

SEQ ID NO: 239469 - DNA, 25 bp, probe
gggcagaccgatagaatcattggta

SEQ ID NO: 239470 - DNA, 25 bp, probe
gaccgatagaatcattggtaatgag

SEQ ID NO: 239471 - DNA, 25 bp, probe
agaatcattggtaatgagcgccgga

SEQ ID NO: 239472 - DNA, 25 bp, probe
ttggtaatgagcgccggattacgcg

SEQ ID NO: 239473 - DNA, 25 bp, probe
atgagcgccggattacgcgcgcttg

SEQ ID NO: 239474 - DNA, 25 bp, probe
ggtgctggcggctggtttacgccgc

SEQ ID NO: 239475 - DNA, 25 bp, probe
ctttctgacactttcacttttgcag

SEQ ID NO: 239476 - DNA, 25 bp, probe
tgacactttcacttttgcagattgg

SEQ ID NO: 239477 - DNA, 25 bp, probe
tttgcagattgggtaacacaggaac

SEQ ID NO: 239478 - DNA, 25 bp, probe
gaaaacgtcacgctgaatatatgac

SEQ ID NO: 239479 - DNA, 25 bp, probe
aaacgtcacgctgaatatatgacca

SEQ ID NO: 239480 - DNA, 25 bp, probe
gtcaccagcgcacacgctgatttga

SEQ ID NO: 239481 - DNA, 25 bp, probe
gtcatcctcaaacaggatttgctga

SEQ ID NO: 239482 - DNA, 25 bp, probe
gtcatcaccaacaaatggtttcaac

SEQ ID NO: 239483 - DNA, 25 bp, probe
gtcatgcctcaagaaagccataaac

SEQ ID NO: 239484 - DNA, 25 bp, probe
gtcatgcctcaagaaagccataaac

SEQ ID NO: 239485 - DNA, 25 bp, probe
gtcatccttactcgaagagcttaga

SEQ ID NO: 239486 - DNA, 25 bp, probe
gtctcctcctcagtcatagagcaat

SEQ ID NO: 239487 - DNA, 25 bp, probe
gtctatcctccagagaacgatttgt

SEQ ID NO: 239488 - DNA, 25 bp, probe
gtcttccactacttgatggcgtttt

SEQ ID NO: 239489 - DNA, 25 bp, probe
gtcttcacactactagtaagccttt

SEQ ID NO: 239490 - DNA, 25 bp, probe
gtcattcagttactcttaattcttt

SEQ ID NO: 239491 - DNA, 25 bp, probe
gtcattcatttatcctaatactggg

SEQ ID NO: 239492 - DNA, 25 bp, probe
gtcattcatttatcctaatactggg

SEQ ID NO: 239493 - DNA, 25 bp, probe
gtcattgtctgtgactgctaccatt

SEQ ID NO: 239494 - DNA, 25 bp, probe
gtcagatgctttcatttacacagat

SEQ ID NO: 239495 - DNA, 25 bp, probe
gtcagtctgcttagaaataacagaa

SEQ ID NO: 239496 - DNA, 25 bp, probe
gtcataccctcaaaagatccagaac

SEQ ID NO: 239497 - DNA, 25 bp, probe
gtgcatgaaccgttattgatccgaa

SEQ ID NO: 239498 - DNA, 25 bp, probe
gtcatagaccgattcttcatgtgga

SEQ ID NO: 239499 - DNA, 25 bp, probe
gtcatagcagttatttcttggggta

SEQ ID NO: 239500 - DNA, 25 bp, probe
gtcagagcagaaatgaatcctgggg

SEQ ID NO: 239501 - DNA, 25 bp, probe
gtcagataggacaacactgctgggt

SEQ ID NO: 239502 - DNA, 25 bp, probe
gtcttgccgccaacgatgcaagtgt

SEQ ID NO: 239503 - DNA, 25 bp, probe
gtcttttgctgaccgcatgaagtgg

SEQ ID NO: 239504 - DNA, 25 bp, probe
gtcatttatgagacagctcatggag

SEQ ID NO: 239505 - DNA, 25 bp, probe
gtcagttcaagcaaccagctgagca

SEQ ID NO: 239506 - DNA, 25 bp, probe
gtcatcgtcaacaacttcggcatgt

SEQ ID NO: 239507 - DNA, 25 bp, probe
gtcagcgacaactttcagcaggctg

SEQ ID NO: 239508 - DNA, 25 bp, probe
gtcagcggcaagctgtggaggatgg

SEQ ID NO: 239509 - DNA, 25 bp, probe
gtcatgggcataggtgaccgctgtg

SEQ ID NO: 239510 - DNA, 25 bp, probe
gtcagaagctgatgttcctggtaaa

SEQ ID NO: 239511 - DNA, 25 bp, probe
gtcagaagctgatgttcctggtaaa

SEQ ID NO: 239512 - DNA, 25 bp, probe
gtcagaattaagctgcctcagtaac

SEQ ID NO: 239513 - DNA, 25 bp, probe
gtcagaatgattactacctcaggac

SEQ ID NO: 239514 - DNA, 25 bp, probe
gtcatgccagaaacaaggctcggtc

SEQ ID NO: 239515 - DNA, 25 bp, probe
gtcatccacaaagacctggttgcca

SEQ ID NO: 239516 - DNA, 25 bp, probe
gtcaccaatgaagacctcctgacca

SEQ ID NO: 239517 - DNA, 25 bp, probe
gtcaccaatgaagacctcctgacca

SEQ ID NO: 239518 - DNA, 25 bp, probe
gtcagacagaaagagcttctgggaa

SEQ ID NO: 239519 - DNA, 25 bp, probe
gtgaagtgaacagcaccctggggac

SEQ ID NO: 239520 - DNA, 25 bp, probe
gtgaagtgaacagcaccctggggac

SEQ ID NO: 239521 - DNA, 25 bp, probe
gtcagcagaaaagaccctgctggga

SEQ ID NO: 239522 - DNA, 25 bp, probe
gtcagaaaaccatcgcctgcgaatg

SEQ ID NO: 239523 - DNA, 25 bp, probe
gtcagacgatgagaccagcctggaa

SEQ ID NO: 239524 - DNA, 25 bp, probe
gtcagaagatgagtacacaccacca

SEQ ID NO: 239525 - DNA, 25 bp, probe
gtcattgatgaagtcactaacacca

SEQ ID NO: 239526 - DNA, 25 bp, probe
gtcattgtaccattgctcaatccca

SEQ ID NO: 239527 - DNA, 25 bp, probe
gtcattgatcactttgcatgtgact

SEQ ID NO: 239528 - DNA, 25 bp, probe
gtcattgatcactttgcatgtgact

SEQ ID NO: 239529 - DNA, 25 bp, probe
gtcatgtatgtcatctgctggctgc

SEQ ID NO: 239530 - DNA, 25 bp, probe
gtcagtcattgagtatgcagctgtg

SEQ ID NO: 239531 - DNA, 25 bp, probe
gtcagggctgcagtgagccatgatg

SEQ ID NO: 239532 - DNA, 25 bp, probe
gtcatgtatgtggtgaccgtgctgg

SEQ ID NO: 239533 - DNA, 25 bp, probe
gtcagatgtggatatccagagcgag

SEQ ID NO: 239534 - DNA, 25 bp, probe
gtcatgcaggaacatcgcaaggtgc

SEQ ID NO: 239535 - DNA, 25 bp, probe
gtcagtggatgactctgcaaaagtg

SEQ ID NO: 239536 - DNA, 25 bp, probe
gtcagctcggagggcaactagcatg

SEQ ID NO: 239537 - DNA, 25 bp, probe
gtcccgggggaacatgattccacag

SEQ ID NO: 239538 - DNA, 25 bp, probe
gtcccgggggaacatgattccacag

SEQ ID NO: 239539 - DNA, 25 bp, probe
ggaccgggcaaaaaggattgacacg

SEQ ID NO: 239540 - DNA, 25 bp, probe
ggaccgggcaaaaaggattgacacg

SEQ ID NO: 239541 - DNA, 25 bp, probe
gtgcaccgggacttaaagttggaga

SEQ ID NO: 239542 - DNA, 25 bp, probe
gtcatcccttcttttggacttggga

SEQ ID NO: 239543 - DNA, 25 bp, probe
gtcatcccttcttttggacttggga

SEQ ID NO: 239544 - DNA, 25 bp, probe
gtcatccgtttcagctgacagctgc

SEQ ID NO: 239545 - DNA, 25 bp, probe
gtcaggttattcacatggagctgga

SEQ ID NO: 239546 - DNA, 25 bp, probe
gtcaggattaccagattacatgagc

SEQ ID NO: 239547 - DNA, 25 bp, probe
gtcgaaaacctcatctacgagaacg

SEQ ID NO: 239548 - DNA, 25 bp, probe
gtctggaaaccaggtaccgatggac

SEQ ID NO: 239549 - DNA, 25 bp, probe
gtccagaaagccggagactttgcgg

SEQ ID NO: 239550 - DNA, 25 bp, probe
gtctcaaaagccgaagaggcagccc

SEQ ID NO: 239551 - DNA, 25 bp, probe
gtctaagcagggcaggaaacgccaa

SEQ ID NO: 239552 - DNA, 25 bp, probe
gtgcgttcagtgtgaaaaaccagac

SEQ ID NO: 239553 - DNA, 25 bp, probe
gtcagttcagtcggaacaaagtttc

SEQ ID NO: 239554 - DNA, 25 bp, probe
gtcaggttttaaagaacagttcagc

SEQ ID NO: 239555 - DNA, 25 bp, probe
gtcatcgtttgtgtgtataagttgg

SEQ ID NO: 239556 - DNA, 25 bp, probe
gtcatccccagggctgtatacattg

SEQ ID NO: 239557 - DNA, 25 bp, probe
gtcagctcccgtggggagatcaagc

SEQ ID NO: 239558 - DNA, 25 bp, probe
gtcatgatcctctgcgtgggagggc

SEQ ID NO: 239559 - DNA, 25 bp, probe
gtcatccgctacacttgtgaggagc

SEQ ID NO: 239560 - DNA, 25 bp, probe
gtcttcagctactggtggcggagga

SEQ ID NO: 239561 - DNA, 25 bp, probe
gtcattcagctaaagatgggggcaa

SEQ ID NO: 239562 - DNA, 25 bp, probe
gtctgtctggacgaaggggagtgag

SEQ ID NO: 239563 - DNA, 25 bp, probe
gtcatgttggcagaactcaagggca

SEQ ID NO: 239564 - DNA, 25 bp, probe
gtcagctatacagacactaaagtga

SEQ ID NO: 239565 - DNA, 25 bp, probe
gtcatgctgcatgcaaaactacaca

SEQ ID NO: 239566 - DNA, 25 bp, probe
gtcatgctgcccaaggacatagcca

SEQ ID NO: 239567 - DNA, 25 bp, probe
gtcagtcaccaacggcaatggcatg

SEQ ID NO: 239568 - DNA, 25 bp, probe
gtcagtgaccatcccgagctgaata

SEQ ID NO: 239569 - DNA, 25 bp, probe
gtcagtgcataattccaagtggctt

SEQ ID NO: 239570 - DNA, 25 bp, probe
gtcagtatgacatttcacgggagat

SEQ ID NO: 239571 - DNA, 25 bp, probe
gtcagtatgacatttcacgggagat

SEQ ID NO: 239572 - DNA, 25 bp, probe
gtcatgcttacactgatacagggaa

SEQ ID NO: 239573 - DNA, 25 bp, probe
gtcagattaccagttataggaacaa

SEQ ID NO: 239574 - DNA, 25 bp, probe
gtcagtcacaaaggcttgggaacaa

SEQ ID NO: 239575 - DNA, 25 bp, probe
gtcaggctcagcagggtgggaacag

SEQ ID NO: 239576 - DNA, 25 bp, probe
gtcaggctcagcagggtgggaacag

SEQ ID NO: 239577 - DNA, 25 bp, probe
gtcagtgctactgtggctgaggtac

SEQ ID NO: 239578 - DNA, 25 bp, probe
gtcagtccactttgacttcgtactg

SEQ ID NO: 239579 - DNA, 25 bp, probe
gtcttccagttctaccagcgaacga

SEQ ID NO: 239580 - DNA, 25 bp, probe
gtcagggagttaaacagcagcaaca

SEQ ID NO: 239581 - DNA, 25 bp, probe
tccatcgatgttcttcttcggatca

SEQ ID NO: 239582 - DNA, 25 bp, probe
gtcattctgagcagcgtcaacaaac

SEQ ID NO: 239583 - DNA, 25 bp, probe
gtcattcgacacggagcagatgctg

SEQ ID NO: 239584 - DNA, 25 bp, probe
gtcatggcagactctatgcaagaga

SEQ ID NO: 239585 - DNA, 25 bp, probe
gtcaggcagcaacatagagcagtac

SEQ ID NO: 239586 - DNA, 25 bp, probe
gtcattgcctgctcaagaatgtaca

SEQ ID NO: 239587 - DNA, 25 bp, probe
gtcatctctcactcttactgtgagc

SEQ ID NO: 239588 - DNA, 25 bp, probe
gtcatctttgctgcttcagtgttca

SEQ ID NO: 239589 - DNA, 25 bp, probe
gtcatcttgtggcttagttgtagaa

SEQ ID NO: 239590 - DNA, 25 bp, probe
gtcatgttgttgctaatctatatta

SEQ ID NO: 239591 - DNA, 25 bp, probe
gtcatgttgttgctaatctatatta

SEQ ID NO: 239592 - DNA, 25 bp, probe
gtcagtgctgacaaataacatttaa

SEQ ID NO: 239593 - DNA, 25 bp, probe
gtcatctggactaatcaagctggga

SEQ ID NO: 239594 - DNA, 25 bp, probe
gtcatgggcagtactaacattagag

SEQ ID NO: 239595 - DNA, 25 bp, probe
gtcatcgcctatatgctacttagcg

SEQ ID NO: 239596 - DNA, 25 bp, probe
gtctgcagctccaggtacatatcac

SEQ ID NO: 239597 - DNA, 25 bp, probe
gtcatgcagctggatcaggtgggaa

SEQ ID NO: 239598 - DNA, 25 bp, probe
gtcatgcagcttagctaatgccaaa

SEQ ID NO: 239599 - DNA, 25 bp, probe
gtcatcactcaatattgcgaagcac

SEQ ID NO: 239600 - DNA, 25 bp, probe
gtcatcctgtgaggactgcaaagcc

SEQ ID NO: 239601 - DNA, 25 bp, probe
gtctatgcgtgggcaccaaagccat

SEQ ID NO: 239602 - DNA, 25 bp, probe
gtcttcctgagccatggcgaaggca

SEQ ID NO: 239603 - DNA, 25 bp, probe
gtcagtcctgtcttaccaaagatga

SEQ ID NO: 239604 - DNA, 25 bp, probe
gtcaggaatttcagccaataggagc

SEQ ID NO: 239605 - DNA, 25 bp, probe
gtcagggttttagagagcagtggca

SEQ ID NO: 239606 - DNA, 25 bp, probe
gtcgtagggcttataaagtggaata

SEQ ID NO: 239607 - DNA, 25 bp, probe
gtctgtcgtactcagcttaagtgga

SEQ ID NO: 239608 - DNA, 25 bp, probe
gtctgtcgtactcagcttaagtgga

SEQ ID NO: 239609 - DNA, 25 bp, probe
gtcgtcttcaaggacctgagcgggt

SEQ ID NO: 239610 - DNA, 25 bp, probe
gtcgtcttcaaggacctgagcgggt

SEQ ID NO: 239611 - DNA, 25 bp, probe
gtctgctttagagtacttgcacggc

SEQ ID NO: 239612 - DNA, 25 bp, probe
gtcttgggagagtatcttgctgggc

SEQ ID NO: 239613 - DNA, 25 bp, probe
gtcttgggagagtatcttgctgggc

SEQ ID NO: 239614 - DNA, 25 bp, probe
gtcttgggagagtatcttgctgggc

SEQ ID NO: 239615 - DNA, 25 bp, probe
gtcttgggagagtatcttgctgggc

SEQ ID NO: 239616 - DNA, 25 bp, probe
gtcttcaggatgtgcttatgcagga

SEQ ID NO: 239617 - DNA, 25 bp, probe
gtcagtgccttatcttatgaagaaa

SEQ ID NO: 239618 - DNA, 25 bp, probe
gtcagtgccttatcttatgaagaaa

SEQ ID NO: 239619 - DNA, 25 bp, probe
gtcagtggcttatgtcatttacaca

SEQ ID NO: 239620 - DNA, 25 bp, probe
gtcagtggctttgcatagctttcac

SEQ ID NO: 239621 - DNA, 25 bp, probe
gtcattggtttctgatgcttgtaca

SEQ ID NO: 239622 - DNA, 25 bp, probe
gtcattggtttctgatgcttgtaca

SEQ ID NO: 239623 - DNA, 25 bp, probe
gtcattggtttctgatgcttgtaca

SEQ ID NO: 239624 - DNA, 25 bp, probe
gtcttggactggtggcatcatgtaa

SEQ ID NO: 239625 - DNA, 25 bp, probe
gtctaggagcatcacctccagtgac

SEQ ID NO: 239626 - DNA, 25 bp, probe
gtcataggccatcacggtcaagagt

SEQ ID NO: 239627 - DNA, 25 bp, probe
gtcataggccatcacggtcaagagt

SEQ ID NO: 239628 - DNA, 25 bp, probe
gtcatcacaagtcaagttgcacagg

SEQ ID NO: 239629 - DNA, 25 bp, probe
gtctatgattgacaagtaccaggct

SEQ ID NO: 239630 - DNA, 25 bp, probe
gtcttgatctgtttcgtgtctaatt

SEQ ID NO: 239631 - DNA, 25 bp, probe
gtctttctgtccaaatatctacttg

SEQ ID NO: 239632 - DNA, 25 bp, probe
gtcatttcttctaggttttcttggc

SEQ ID NO: 239633 - DNA, 25 bp, probe
gtctttcaagtaagtttgccttctt

SEQ ID NO: 239634 - DNA, 25 bp, probe
gtctttcaagtaagtttgccttctt

SEQ ID NO: 239635 - DNA, 25 bp, probe
gtctttggaaaccatttgtttgcta

SEQ ID NO: 239636 - DNA, 25 bp, probe
gtctttggaaaccatttgtttgcta

SEQ ID NO: 239637 - DNA, 25 bp, probe
gtctttggaattatccctcatgtga

SEQ ID NO: 239638 - DNA, 25 bp, probe
gtctttggaattatccctcatgtga

SEQ ID NO: 239639 - DNA, 25 bp, probe
gtcattttgtttgtgtccacagaaa

SEQ ID NO: 239640 - DNA, 25 bp, probe
gtcattttggtgtgctattcactga

SEQ ID NO: 239641 - DNA, 25 bp, probe
gtcattttggtgtgctattcactga

SEQ ID NO: 239642 - DNA, 25 bp, probe
gtcttattttgtcatattcatccag

SEQ ID NO: 239643 - DNA, 25 bp, probe
gtctatttctagttattacccagag

SEQ ID NO: 239644 - DNA, 25 bp, probe
gtcatatttatgttctataccccag

SEQ ID NO: 239645 - DNA, 25 bp, probe
gtcattctgtaggtctcatacggtc

SEQ ID NO: 239646 - DNA, 25 bp, probe
gtctttgttgcactaacacgtctcc

SEQ ID NO: 239647 - DNA, 25 bp, probe
gtcatttgccgacagagcactgatc

SEQ ID NO: 239648 - DNA, 25 bp, probe
gtcagtgctgggcggagactgtctc

SEQ ID NO: 239649 - DNA, 25 bp, probe
gtcagaggaggacgtgagccagttt

SEQ ID NO: 239650 - DNA, 25 bp, probe
gtcagaggaggacgtgagccagttt

SEQ ID NO: 239651 - DNA, 25 bp, probe
gtcagatggatcctggttggcatgt

SEQ ID NO: 239652 - DNA, 25 bp, probe
gtcagagactgctgtgtttgagctc

SEQ ID NO: 239653 - DNA, 25 bp, probe
gtcagatgtctgcaggcatttgccc

SEQ ID NO: 239654 - DNA, 25 bp, probe
gtcagagacgggtcatctgtcgcta

SEQ ID NO: 239655 - DNA, 25 bp, probe
gtcagatcaagagtcccttcactac

SEQ ID NO: 239656 - DNA, 25 bp, probe
gtcagatcaagagtcccttcactac

SEQ ID NO: 239657 - DNA, 25 bp, probe
gtcagatcagtgatcctattcagca

SEQ ID NO: 239658 - DNA, 25 bp, probe
gtcatatacataactgtattcacag

SEQ ID NO: 239659 - DNA, 25 bp, probe
gtcatttgcaaccagtttcagatgt

SEQ ID NO: 239660 - DNA, 25 bp, probe
gtcatggtgacccagtgtgttgaga

SEQ ID NO: 239661 - DNA, 25 bp, probe
gtcaggtgagcagtaggtcatccag

SEQ ID NO: 239662 - DNA, 25 bp, probe
gtcagagtgagcagtgagggccagt

SEQ ID NO: 239663 - DNA, 25 bp, probe
gtctgatgtggcaaaaggccctctg

SEQ ID NO: 239664 - DNA, 25 bp, probe
gtcatggagcctgaagggtgcctag

SEQ ID NO: 239665 - DNA, 25 bp, probe
gtcatccacctggagggtgtcgtga

SEQ ID NO: 239666 - DNA, 25 bp, probe
gtcatatggcctgtggggctctgag

SEQ ID NO: 239667 - DNA, 25 bp, probe
gtcatggagcttgtgcaggggggcg

SEQ ID NO: 239668 - DNA, 25 bp, probe
gtctgagcccatttctggggggaga

SEQ ID NO: 239669 - DNA, 25 bp, probe
gtctgagcccatttctggggggaga

SEQ ID NO: 239670 - DNA, 25 bp, probe
gtctacaggcctttcaggaagggag

SEQ ID NO: 239671 - DNA, 25 bp, probe
gtgctaaggcccacaaaagccagga

SEQ ID NO: 239672 - DNA, 25 bp, probe
gtcatcactcgtgcccaaagaaagg

SEQ ID NO: 239673 - DNA, 25 bp, probe
gtcatcactcgtgccaaaggagagg

SEQ ID NO: 239674 - DNA, 25 bp, probe
gtcatcactcgtgccaaaggagagg

SEQ ID NO: 239675 - DNA, 25 bp, probe
gtcatactcctggaacaaaggtgta

SEQ ID NO: 239676 - DNA, 25 bp, probe
gtcatggtcctggtgaacaccttct

SEQ ID NO: 239677 - DNA, 25 bp, probe
gtcatggtgctcattaacacctttt

SEQ ID NO: 239678 - DNA, 25 bp, probe
gtctgcaactttggaaaactcctct

SEQ ID NO: 239679 - DNA, 25 bp, probe
gtcattcctggtgggattgaccccc

SEQ ID NO: 239680 - DNA, 25 bp, probe
gtcattcacacggaggattaccggc

SEQ ID NO: 239681 - DNA, 25 bp, probe
gtcattgtcactccatggattaacc

SEQ ID NO: 239682 - DNA, 25 bp, probe
gtcattgtacccattgtacagatgg

SEQ ID NO: 239683 - DNA, 25 bp, probe
gtcatttccatcatattgtaaatag

SEQ ID NO: 239684 - DNA, 25 bp, probe
gtcagtggtcttaattgaaattatg

SEQ ID NO: 239685 - DNA, 25 bp, probe
gtcaggcttctggttgtgaaatcac

SEQ ID NO: 239686 - DNA, 25 bp, probe
gtcatggttctgcttcaagaacaga

SEQ ID NO: 239687 - DNA, 25 bp, probe
gtcatggttctgcttcaagaacaga

SEQ ID NO: 239688 - DNA, 25 bp, probe
gtcataactccacagatcgaatcaa

SEQ ID NO: 239689 - DNA, 25 bp, probe
gtcttgatctcctgacatcgtgatc

SEQ ID NO: 239690 - DNA, 25 bp, probe
gtcattattcaaggtgatcgtattc

SEQ ID NO: 239691 - DNA, 25 bp, probe
gtcattcctagatgaatcctttgaa

SEQ ID NO: 239692 - DNA, 25 bp, probe
gtcattcctagatgaatcctttgaa

SEQ ID NO: 239693 - DNA, 25 bp, probe
gtcaggcctacattgatctacctct

SEQ ID NO: 239694 - DNA, 25 bp, probe
gtcaggcctacattgatctacctct

SEQ ID NO: 239695 - DNA, 25 bp, probe
gtcggcctacgacttcaaggctgac

SEQ ID NO: 239696 - DNA, 25 bp, probe
gtccgaggtcgacacaaggtacttc

SEQ ID NO: 239697 - DNA, 25 bp, probe
gtccgaggtcgacacaaggtacttc

SEQ ID NO: 239698 - DNA, 25 bp, probe
gtccgaggtcgacacaaggtacttc

SEQ ID NO: 239699 - DNA, 25 bp, probe
gtccgaggagaacccaatgtttcgt

SEQ ID NO: 239700 - DNA, 25 bp, probe
gtccctgaaggacccaggatttgct

SEQ ID NO: 239701 - DNA, 25 bp, probe
gtctgccgaaggctagcatggtttt

SEQ ID NO: 239702 - DNA, 25 bp, probe
gtcttcataacgctaagcattgttt

SEQ ID NO: 239703 - DNA, 25 bp, probe
gtctataatgagccgttaagtcttt

SEQ ID NO: 239704 - DNA, 25 bp, probe
gtctcatggtattcgggaaggcatt

SEQ ID NO: 239705 - DNA, 25 bp, probe
gtcatgctggtttctgaggctgaga

SEQ ID NO: 239706 - DNA, 25 bp, probe
gtcagggctttcaagcagagcacat

SEQ ID NO: 239707 - DNA, 25 bp, probe
gtcaggtgctcaatggagaatataa

SEQ ID NO: 239708 - DNA, 25 bp, probe
gtcaggatccttggaagtcatccag

SEQ ID NO: 239709 - DNA, 25 bp, probe
gtcatggagttctgacagttccagc

SEQ ID NO: 239710 - DNA, 25 bp, probe
gtctagctgttgtggactttagaaa

SEQ ID NO: 239711 - DNA, 25 bp, probe
gtctctttgatgtggtccttaagat

SEQ ID NO: 239712 - DNA, 25 bp, probe
gtcttttgacatgagccctgaaaat

SEQ ID NO: 239713 - DNA, 25 bp, probe
gtctttagaccagcactccaaaaaa

SEQ ID NO: 239714 - DNA, 25 bp, probe
gtcatgttagcaaacgcagctccaa

SEQ ID NO: 239715 - DNA, 25 bp, probe
gtcatccaatctaaccacatcaata

SEQ ID NO: 239716 - DNA, 25 bp, probe
gtcatccaatctaaccacatcaata

SEQ ID NO: 239717 - DNA, 25 bp, probe
gtcatcgacacaagtccaccaaatt

SEQ ID NO: 239718 - DNA, 25 bp, probe
gtcatggaggattgtcaccagacct

SEQ ID NO: 239719 - DNA, 25 bp, probe
gtcatggaggattgtcaccagacct

SEQ ID NO: 239720 - DNA, 25 bp, probe
gtctggtcgtcttcaaggacctgag

SEQ ID NO: 239721 - DNA, 25 bp, probe
gtctggtcgtcttcaaggacctgag

SEQ ID NO: 239722 - DNA, 25 bp, probe
gtctttttctggactgaagcctgca

SEQ ID NO: 239723 - DNA, 25 bp, probe
gtctaggtttggaccagagcctgca

SEQ ID NO: 239724 - DNA, 25 bp, probe
gtcttgttttgtgtcatgaattact

SEQ ID NO: 239725 - DNA, 25 bp, probe
gtcttgtttaccttatgacatcatc

SEQ ID NO: 239726 - DNA, 25 bp, probe
gtctttggaaccagaacatcccaag

SEQ ID NO: 239727 - DNA, 25 bp, probe
gtctttgggaagatgaacaagctca

SEQ ID NO: 239728 - DNA, 25 bp, probe
gtcatggggagaacctaaagatgga

SEQ ID NO: 239729 - DNA, 25 bp, probe
gtcagggggataatctagaggcagg

SEQ ID NO: 239730 - DNA, 25 bp, probe
gtcagggcagtaggctgggagtcag

SEQ ID NO: 239731 - DNA, 25 bp, probe
gtcagggttaagcggcaggcaggat

SEQ ID NO: 239732 - DNA, 25 bp, probe
gtcagtgtggcaaagcgggggcagg

SEQ ID NO: 239733 - DNA, 25 bp, probe
gtcagtgcagcgagaggatatgggg

SEQ ID NO: 239734 - DNA, 25 bp, probe
gtcagtgcagcgagaggatatgggg

SEQ ID NO: 239735 - DNA, 25 bp, probe
gtcaggcatgcgagtaacaagggca

SEQ ID NO: 239736 - DNA, 25 bp, probe
gtcattgactgatgtagataattta

SEQ ID NO: 239737 - DNA, 25 bp, probe
gtcatcaactccttttacattgtga

SEQ ID NO: 239738 - DNA, 25 bp, probe
gtcccctccgtttaaagtcatggag

SEQ ID NO: 239739 - DNA, 25 bp, probe
gtccctccttggtgaatttgaggag

SEQ ID NO: 239740 - DNA, 25 bp, probe
gtgcagtcccgtggagggtagggga

SEQ ID NO: 239741 - DNA, 25 bp, probe
gtcaggccagagaaggggccagggc

SEQ ID NO: 239742 - DNA, 25 bp, probe
gtcttgctagtgagctggaccagtg

SEQ ID NO: 239743 - DNA, 25 bp, probe
gtcttgctagtgagctggaccagtg

SEQ ID NO: 239744 - DNA, 25 bp, probe
gtcttcggagaggcgagagccctga

SEQ ID NO: 239745 - DNA, 25 bp, probe
gtcatccagcgctgctggagaccca

SEQ ID NO: 239746 - DNA, 25 bp, probe
gtcatcgacatgctcatggagaaca

SEQ ID NO: 239747 - DNA, 25 bp, probe
gtcatgctgactctatgagatgggg

SEQ ID NO: 239748 - DNA, 25 bp, probe
gtcaggattgcgagagatgtgtgtt

SEQ ID NO: 239749 - DNA, 25 bp, probe
gtcaggacggtggagagctgctggt

SEQ ID NO: 239750 - DNA, 25 bp, probe
gtcagtgcaacagtgtcaggcctgg

SEQ ID NO: 239751 - DNA, 25 bp, probe
gtcatggaaacttcggggctggtgg

SEQ ID NO: 239752 - DNA, 25 bp, probe
gtcattaaaacctggctctttggtt

SEQ ID NO: 239753 - DNA, 25 bp, probe
gtcatattaaaagctggtcttgtgg

SEQ ID NO: 239754 - DNA, 25 bp, probe
gtctgattaatagcgttgtttggga

SEQ ID NO: 239755 - DNA, 25 bp, probe
gtcattatattcatctggcttttgg

SEQ ID NO: 239756 - DNA, 25 bp, probe
gtcattttttctttgcactttggat

SEQ ID NO: 239757 - DNA, 25 bp, probe
gtcatgttttgattataggctttgg

SEQ ID NO: 239758 - DNA, 25 bp, probe
gtcttttctgaacagcctatgctgc

SEQ ID NO: 239759 - DNA, 25 bp, probe
gtctttcccagtgactcatcagtca

SEQ ID NO: 239760 - DNA, 25 bp, probe
gtcatcataccagttggaatcacat

SEQ ID NO: 239761 - DNA, 25 bp, probe
gtcatcataccagttggaatcacat

SEQ ID NO: 239762 - DNA, 25 bp, probe
gtcatttcttgttggcagacatctg

SEQ ID NO: 239763 - DNA, 25 bp, probe
gtctatgatgttacaatggtcattg

SEQ ID NO: 239764 - DNA, 25 bp, probe
gtcttcagcatcactataggactgt

SEQ ID NO: 239765 - DNA, 25 bp, probe
gtcttcgaccgcggggacatgaaga

SEQ ID NO: 239766 - DNA, 25 bp, probe
gtcgtccctcgggtggagaagggct

SEQ ID NO: 239767 - DNA, 25 bp, probe
gtcgtccctcgggtggagaagggct

SEQ ID NO: 239768 - DNA, 25 bp, probe
gtcttcctcacagggtggagatcag

SEQ ID NO: 239769 - DNA, 25 bp, probe
gtcttgctgtctagggatggacttg

SEQ ID NO: 239770 - DNA, 25 bp, probe
gtcttgctgtctagggatggacttg

SEQ ID NO: 239771 - DNA, 25 bp, probe
gtcttgctcctatggagtcacataa

SEQ ID NO: 239772 - DNA, 25 bp, probe
gtctctgtccattgcttttaattaa

SEQ ID NO: 239773 - DNA, 25 bp, probe
gtctgcagtcaaggattcttcattt

SEQ ID NO: 239774 - DNA, 25 bp, probe
gtctacgatgggattatgcacttcc

SEQ ID NO: 239775 - DNA, 25 bp, probe
gtcaggaatgtgattcttcatcttc

SEQ ID NO: 239776 - DNA, 25 bp, probe
gtcaggaatgtgattcttcatcttc

SEQ ID NO: 239777 - DNA, 25 bp, probe
gtcaggatatgcttgttctgcagct

SEQ ID NO: 239778 - DNA, 25 bp, probe
gtcaggatatgcttgttctgcagct

SEQ ID NO: 239779 - DNA, 25 bp, probe
gtcaggaacactacactgcacagga

SEQ ID NO: 239780 - DNA, 25 bp, probe
gtcatggcttccatcctgaggagaa

SEQ ID NO: 239781 - DNA, 25 bp, probe
gtctgaccccttgtgggatgaaagc

SEQ ID NO: 239782 - DNA, 25 bp, probe
gtcatgaccacccgagaggtggaga

SEQ ID NO: 239783 - DNA, 25 bp, probe
gtcatttcatcgcggactgtgcggc

SEQ ID NO: 239784 - DNA, 25 bp, probe
gtcatttcatcgcggactgtgcggc

SEQ ID NO: 239785 - DNA, 25 bp, probe
gtcattgtcatcgtggggcatgtgg

SEQ ID NO: 239786 - DNA, 25 bp, probe
gtcatgattcatgattgaaagcaga

SEQ ID NO: 239787 - DNA, 25 bp, probe
gtcattgctgctactctaacactga

SEQ ID NO: 239788 - DNA, 25 bp, probe
gtcattcatcaactcattctattca

SEQ ID NO: 239789 - DNA, 25 bp, probe
gtcattatgcaaagcctctgaccag

SEQ ID NO: 239790 - DNA, 25 bp, probe
gtcatgcactttatttataggctct

SEQ ID NO: 239791 - DNA, 25 bp, probe
gtcatgtgtttcatttatcccatat

SEQ ID NO: 239792 - DNA, 25 bp, probe
gtcatggaattcatatggtccacac

SEQ ID NO: 239793 - DNA, 25 bp, probe
gtctggatcttttcatcctcgagac

SEQ ID NO: 239794 - DNA, 25 bp, probe
gtctgaatgcttacacaaataaatt

SEQ ID NO: 239795 - DNA, 25 bp, probe
gtcttttgttaatataatcttccca

SEQ ID NO: 239796 - DNA, 25 bp, probe
gtctatgtatgtgtaaaacaatctg

SEQ ID NO: 239797 - DNA, 25 bp, probe
gtctatgtatgtgtaaaacaatctg

SEQ ID NO: 239798 - DNA, 25 bp, probe
gtcttcttgtgtcctgatgaaaaat

SEQ ID NO: 239799 - DNA, 25 bp, probe
gtcttcgtggcggtcatggaattca

SEQ ID NO: 239800 - DNA, 25 bp, probe
gtcttcggagctgttggacagtaat

SEQ ID NO: 239801 - DNA, 25 bp, probe
gtcttctggactggttttcacatta

SEQ ID NO: 239802 - DNA, 25 bp, probe
gtcttctggactggttttcacatta

SEQ ID NO: 239803 - DNA, 25 bp, probe
gtcttctagacatttactatcactg

SEQ ID NO: 239804 - DNA, 25 bp, probe
gtcttctagacatttactatcactg

SEQ ID NO: 239805 - DNA, 25 bp, probe
gtcatcctttatgtcctgacacgtc

SEQ ID NO: 239806 - DNA, 25 bp, probe
gtcatcctttacactctagtggtcg

SEQ ID NO: 239807 - DNA, 25 bp, probe
gtcttctttagcaaaatatctgggg

SEQ ID NO: 239808 - DNA, 25 bp, probe
gtcttctttagcaaaatatctgggg

SEQ ID NO: 239809 - DNA, 25 bp, probe
tgtcttccttaataattggaccttt

SEQ ID NO: 239810 - DNA, 25 bp, probe
gtctcacctaaacaagatagacctc

SEQ ID NO: 239811 - DNA, 25 bp, probe
gtctcacctaaacaagatagacctc

SEQ ID NO: 239812 - DNA, 25 bp, probe
gtctcatctctatagtacagggaat

SEQ ID NO: 239813 - DNA, 25 bp, probe
gtcatccctgagctgaacgggaagc

SEQ ID NO: 239814 - DNA, 25 bp, probe
gtcatccctgagccagataagaggc

SEQ ID NO: 239815 - DNA, 25 bp, probe
gtcatctattggcaatgagctagcc

SEQ ID NO: 239816 - DNA, 25 bp, probe
gtctatgacgcaaagatcaccagcc

SEQ ID NO: 239817 - DNA, 25 bp, probe
gtcttgcccagaggatcacagtgct

SEQ ID NO: 239818 - DNA, 25 bp, probe
gtcattgactttggatcaagctgtt

SEQ ID NO: 239819 - DNA, 25 bp, probe
gtcatgtgaagcgtttacagcttaa

SEQ ID NO: 239820 - DNA, 25 bp, probe
gtcatgtggagcgtcgtgtcacagt

SEQ ID NO: 239821 - DNA, 25 bp, probe
gtcatcatgaacacggctctagata

SEQ ID NO: 239822 - DNA, 25 bp, probe
gtcatcatgaacacggctctagata

SEQ ID NO: 239823 - DNA, 25 bp, probe
gtcatcaaacagtcggcctatgact

SEQ ID NO: 239824 - DNA, 25 bp, probe
gtcatccagacagtgggctcatatc

SEQ ID NO: 239825 - DNA, 25 bp, probe
gtcatcgatgagcggactgatgtct

SEQ ID NO: 239826 - DNA, 25 bp, probe
gtcattgatgaacagactgatgtct

SEQ ID NO: 239827 - DNA, 25 bp, probe
gtcattggaatgttgcacagaggct

SEQ ID NO: 239828 - DNA, 25 bp, probe
gtcattggaatgttgcacagaggct

SEQ ID NO: 239829 - DNA, 25 bp, probe
gtcattgagcagtactcgcagggcc

SEQ ID NO: 239830 - DNA, 25 bp, probe
gtcatgatcaccaacatcgaggaga

SEQ ID NO: 239831 - DNA, 25 bp, probe
gtcatgctgaaccgcattgtggaga

SEQ ID NO: 239832 - DNA, 25 bp, probe
gtcatgctcaacagagtgatggaga

SEQ ID NO: 239833 - DNA, 25 bp, probe
gtcatgacaatgaaagaagcggaga

SEQ ID NO: 239834 - DNA, 25 bp, probe
gtcatgaccagccgaatcgtgggca

SEQ ID NO: 239835 - DNA, 25 bp, probe
gtcatcactgcagaaacgtgcaggc

SEQ ID NO: 239836 - DNA, 25 bp, probe
gtcatcacagccgcatacgtgagga

SEQ ID NO: 239837 - DNA, 25 bp, probe
gtcatccacaaggcatagcctccaa

SEQ ID NO: 239838 - DNA, 25 bp, probe
gtcatccacaaggcatagcctccaa

SEQ ID NO: 239839 - DNA, 25 bp, probe
gtcatgatgctggagccagacccca

SEQ ID NO: 239840 - DNA, 25 bp, probe
gtcatgatgctggagccagacccca

SEQ ID NO: 239841 - DNA, 25 bp, probe
gtcatgcatgagatccatacaccac

SEQ ID NO: 239842 - DNA, 25 bp, probe
gtcgcagatgctgcatatagcccag

SEQ ID NO: 239843 - DNA, 25 bp, probe
gtcgcagatgctgcatatagcccag

SEQ ID NO: 239844 - DNA, 25 bp, probe
gtcatgcagctctttcaggaccatg

SEQ ID NO: 239845 - DNA, 25 bp, probe
gtcatgagcgttagactgacttgtt

SEQ ID NO: 239846 - DNA, 25 bp, probe
gtcatggggttgttttgctgtttgg

SEQ ID NO: 239847 - DNA, 25 bp, probe
gtcatggggaatcatgttgctgtaa

SEQ ID NO: 239848 - DNA, 25 bp, probe
gtcatgtgggaagtcatgtcatttg

SEQ ID NO: 239849 - DNA, 25 bp, probe
gtcatgctgccgcaggatgatcagt

SEQ ID NO: 239850 - DNA, 25 bp, probe
gtcatgctcactcagtgtaatgaga

SEQ ID NO: 239851 - DNA, 25 bp, probe
gtcatgccactggatgggatgtgga

SEQ ID NO: 239852 - DNA, 25 bp, probe
gtcatcctgagaaggtcatgggaaa

SEQ ID NO: 239853 - DNA, 25 bp, probe
gtcatttgaatgagacctggaacaa

SEQ ID NO: 239854 - DNA, 25 bp, probe
gtcttctgaatatgccgttaagcca

SEQ ID NO: 239855 - DNA, 25 bp, probe
gtcttctgaatatgccgttaagcca

SEQ ID NO: 239856 - DNA, 25 bp, probe
gtcttgctgaattagacagctctaa

SEQ ID NO: 239857 - DNA, 25 bp, probe
gtcttctgcagactcatgcagccct

SEQ ID NO: 239858 - DNA, 25 bp, probe
gtcttctgcagactcatgcagccct

SEQ ID NO: 239859 - DNA, 25 bp, probe
gtcttctggagctcctgactggaag

SEQ ID NO: 239860 - DNA, 25 bp, probe
gtcttctgagagctcctgaggaatg

SEQ ID NO: 239861 - DNA, 25 bp, probe
gtctcaggatgggtcctgggggcct

SEQ ID NO: 239862 - DNA, 25 bp, probe
gtcggaagagttcagggaaggcttg

SEQ ID NO: 239863 - DNA, 25 bp, probe
gtcggaagagttcagggaaggcttg

SEQ ID NO: 239864 - DNA, 25 bp, probe
gtctacacggttcagagcgacgtct

SEQ ID NO: 239865 - DNA, 25 bp, probe
gtcttcaagtttccaacgcagtgtc

SEQ ID NO: 239866 - DNA, 25 bp, probe
gtcttcaagtttccaacgcagtgtc

SEQ ID NO: 239867 - DNA, 25 bp, probe
gtcatctagattttccatttcagtg

SEQ ID NO: 239868 - DNA, 25 bp, probe
gtcatctatattgtcctaatagttt

SEQ ID NO: 239869 - DNA, 25 bp, probe
gtctctataatttcccaggtgtctg

SEQ ID NO: 239870 - DNA, 25 bp, probe
gtctctataatttcccaggtgtctg

SEQ ID NO: 239871 - DNA, 25 bp, probe
gtcatctgaagcctggatccaaggg

SEQ ID NO: 239872 - DNA, 25 bp, probe
gtctttagcttggccatcatcatgc

SEQ ID NO: 239873 - DNA, 25 bp, probe
gtcttaacattggccagcatctgtt

SEQ ID NO: 239874 - DNA, 25 bp, probe
gtcttactgattgggacagttgcca

SEQ ID NO: 239875 - DNA, 25 bp, probe
gtgcaatagggagggacgtcttcta

SEQ ID NO: 239876 - DNA, 25 bp, probe
gtgcctacagtgtggaagacttcca

SEQ ID NO: 239877 - DNA, 25 bp, probe
gtcgcttactttgagtgatcctcca

SEQ ID NO: 239878 - DNA, 25 bp, probe
gtcatgctataccgtaattaccttc

SEQ ID NO: 239879 - DNA, 25 bp, probe
gtctgtaactatggacttaccttca

SEQ ID NO: 239880 - DNA, 25 bp, probe
gtgctgaaccaagtttatgaacttc

SEQ ID NO: 239881 - DNA, 25 bp, probe
gtcttcaccaccatggagaaggctg

SEQ ID NO: 239882 - DNA, 25 bp, probe
gtcttttcttcttgcagagcaaggg

SEQ ID NO: 239883 - DNA, 25 bp, probe
gtcttttgtatattaggccaagtgc

SEQ ID NO: 239884 - DNA, 25 bp, probe
gtcttttgtatattaggccaagtgc

SEQ ID NO: 239885 - DNA, 25 bp, probe
gtctctatgttaaaacctatagtgt

SEQ ID NO: 239886 - DNA, 25 bp, probe
gtctctatgttaaaacctatagtgt

SEQ ID NO: 239887 - DNA, 25 bp, probe
gtcctatttttcacctaagtcatct

SEQ ID NO: 239888 - DNA, 25 bp, probe
gtccttttgtgaaacctagaactca

SEQ ID NO: 239889 - DNA, 25 bp, probe
gtcctaagtcgaaaactttgcaaca

SEQ ID NO: 239890 - DNA, 25 bp, probe
gtcctccagttaaaatttgatcacc

SEQ ID NO: 239891 - DNA, 25 bp, probe
gtcttcaagatgcaatacttttctt

SEQ ID NO: 239892 - DNA, 25 bp, probe
gtcttatagtccaaactttctctgt

SEQ ID NO: 239893 - DNA, 25 bp, probe
gtctgtgattttaaactaactgtgt

SEQ ID NO: 239894 - DNA, 25 bp, probe
gtcttattgtattaaccagcactgt

SEQ ID NO: 239895 - DNA, 25 bp, probe
gtcttttatgattacaccaatgtat

SEQ ID NO: 239896 - DNA, 25 bp, probe
gtcttgttatcatcccttgatgttt

SEQ ID NO: 239897 - DNA, 25 bp, probe
gtcttgtgttcacccgtgggtgtgt

SEQ ID NO: 239898 - DNA, 25 bp, probe
gtcttgattcaacagctgtggggct

SEQ ID NO: 239899 - DNA, 25 bp, probe
gtcttcctgcaacaggtgtgacagt

SEQ ID NO: 239900 - DNA, 25 bp, probe
gtcattcaaaaaggcctggtcagtg

SEQ ID NO: 239901 - DNA, 25 bp, probe
gtcattcaaaaaggcctggtcagtg

SEQ ID NO: 239902 - DNA, 25 bp, probe
gtctggaaaacatgccggaagctga

SEQ ID NO: 239903 - DNA, 25 bp, probe
gtctagaaaaacctgccaaatatga

SEQ ID NO: 239904 - DNA, 25 bp, probe
gtccgacaacaccgtgtccaaaaag

SEQ ID NO: 239905 - DNA, 25 bp, probe
gtccgacaacaccgtgtccaaaaag

SEQ ID NO: 239906 - DNA, 25 bp, probe
gtccgacaacaccgtgtccaaaaag

SEQ ID NO: 239907 - DNA, 25 bp, probe
gtccgacaacaccgtgtccaaaaag

SEQ ID NO: 239908 - DNA, 25 bp, probe
gtccgacaacaccgtgtccaaaaag

SEQ ID NO: 239909 - DNA, 25 bp, probe
gtctagaacacaaggtatggtatat

SEQ ID NO: 239910 - DNA, 25 bp, probe
gtctagaacacaaggtatggtatat

SEQ ID NO: 239911 - DNA, 25 bp, probe
gtctaggggcatctgtatgcggttg

SEQ ID NO: 239912 - DNA, 25 bp, probe
gtctcagagggcgtttgtggcgttg

SEQ ID NO: 239913 - DNA, 25 bp, probe
gtgaaggggcccagaccatgattga

SEQ ID NO: 239914 - DNA, 25 bp, probe
ggaaaagaacacaggccttggaaca

SEQ ID NO: 239915 - DNA, 25 bp, probe
gtgcaaaagcgagttcggacttggt

SEQ ID NO: 239916 - DNA, 25 bp, probe
gtcatcaaaggagttcgcggaggca

SEQ ID NO: 239917 - DNA, 25 bp, probe
gtcatctaccaagccagtggaggaa

SEQ ID NO: 239918 - DNA, 25 bp, probe
gtcatttgacaaccgaggagaggag

SEQ ID NO: 239919 - DNA, 25 bp, probe
gtctttaaggcggggaagtacagct

SEQ ID NO: 239920 - DNA, 25 bp, probe
gtcttcaacaaggagggggaaagct

SEQ ID NO: 239921 - DNA, 25 bp, probe
gtcttcataaagtacttgagtgtaa

SEQ ID NO: 239922 - DNA, 25 bp, probe
gtcttcataaagtacttgagtgtaa

SEQ ID NO: 239923 - DNA, 25 bp, probe
gtctattcaaggcattgagaatgta

SEQ ID NO: 239924 - DNA, 25 bp, probe
gtctttcacgctgtgaagacactga

SEQ ID NO: 239925 - DNA, 25 bp, probe
gtgttggagccaggtatgcaccact

SEQ ID NO: 239926 - DNA, 25 bp, probe
gtcttgcagaccgagtctacacaag

SEQ ID NO: 239927 - DNA, 25 bp, probe
gtgttgcaaaagaagcccaaggctg

SEQ ID NO: 239928 - DNA, 25 bp, probe
tcttaaacgagaagccccggctgtc

SEQ ID NO: 239929 - DNA, 25 bp, probe
gtgaaaatgggacccaccgtctctc

SEQ ID NO: 239930 - DNA, 25 bp, probe
gtgaagaatttacccacacgtgtcc

SEQ ID NO: 239931 - DNA, 25 bp, probe
gtgaagaatttacccacacgtgtcc

SEQ ID NO: 239932 - DNA, 25 bp, probe
gtgttgtattaacaaaagttccctg

SEQ ID NO: 239933 - DNA, 25 bp, probe
gtctttattaacaaacaggatatcc

SEQ ID NO: 239934 - DNA, 25 bp, probe
gtcattctttacaccacagtaacca

SEQ ID NO: 239935 - DNA, 25 bp, probe
gtcatcatctttatagccatcctga

SEQ ID NO: 239936 - DNA, 25 bp, probe
gtcttccatgtcagagtcacctgat

SEQ ID NO: 239937 - DNA, 25 bp, probe
gtcttccatgtcagagtcacctgat

SEQ ID NO: 239938 - DNA, 25 bp, probe
gtcttccgatcagtggtgtctgtga

SEQ ID NO: 239939 - DNA, 25 bp, probe
gtcttccgatcagtggtgtctgtga

SEQ ID NO: 239940 - DNA, 25 bp, probe
gtctcggctgacataatcctcgaat

SEQ ID NO: 239941 - DNA, 25 bp, probe
gtctcggctgacataatcctcgaat

SEQ ID NO: 239942 - DNA, 25 bp, probe
gtcataggtaagaaacacagcaaca

SEQ ID NO: 239943 - DNA, 25 bp, probe
gtctttggggtctacactgcaatca

SEQ ID NO: 239944 - DNA, 25 bp, probe
gtcttcataatttcttcactcaatc

SEQ ID NO: 239945 - DNA, 25 bp, probe
gtcttgaaattgtcactcgcttact

SEQ ID NO: 239946 - DNA, 25 bp, probe
gtcttgtgtttaggctcgtctgacc

SEQ ID NO: 239947 - DNA, 25 bp, probe
gtctgggtttaggtctgagaagatg

SEQ ID NO: 239948 - DNA, 25 bp, probe
gtctgagatgttctttctaccaatc

SEQ ID NO: 239949 - DNA, 25 bp, probe
gtcatatactacttttccactaatg

SEQ ID NO: 239950 - DNA, 25 bp, probe
gtctaatgcatgttttcatccacta

SEQ ID NO: 239951 - DNA, 25 bp, probe
gtctatcttctgcatgaacccatat

SEQ ID NO: 239952 - DNA, 25 bp, probe
gtcttctgatctcagataactcagt

SEQ ID NO: 239953 - DNA, 25 bp, probe
gtcattcttgtgcagagatatgctt

SEQ ID NO: 239954 - DNA, 25 bp, probe
gtcatccgattgctggaatctttgg

SEQ ID NO: 239955 - DNA, 25 bp, probe
gtcatctcctgggtaaattttgatg

SEQ ID NO: 239956 - DNA, 25 bp, probe
gtcatctttgaggtgtaatcttgtt

SEQ ID NO: 239957 - DNA, 25 bp, probe
gtcctttgggtatggttgctagctt

SEQ ID NO: 239958 - DNA, 25 bp, probe
gtctctttagtatggttttcagtgc

SEQ ID NO: 239959 - DNA, 25 bp, probe
gtctttgctacctgttcattatcat

SEQ ID NO: 239960 - DNA, 25 bp, probe
gtcttgatcttcgaatgttacctta

SEQ ID NO: 239961 - DNA, 25 bp, probe
gtctatcctatggcaagtctgacct

SEQ ID NO: 239962 - DNA, 25 bp, probe
gtcatctcctttggaggctgcatcg

SEQ ID NO: 239963 - DNA, 25 bp, probe
gtcattccaaatatgagatgcattg

SEQ ID NO: 239964 - DNA, 25 bp, probe
gtcattgccaatgatatggcagctt

SEQ ID NO: 239965 - DNA, 25 bp, probe
gtcttgcctagcttgagggcttaag

SEQ ID NO: 239966 - DNA, 25 bp, probe
gtcttcttcagcagaggacttgata

SEQ ID NO: 239967 - DNA, 25 bp, probe
gtcttgcttcggccagaagtagcac

SEQ ID NO: 239968 - DNA, 25 bp, probe
gtctgtgttccggaactttgacgtc

SEQ ID NO: 239969 - DNA, 25 bp, probe
ggtagttgcacggacaattcggcgg

SEQ ID NO: 239970 - DNA, 25 bp, probe
gtctattagacggccaagtcgacag

SEQ ID NO: 239971 - DNA, 25 bp, probe
gtcatttctgaccctaagctcataa

SEQ ID NO: 239972 - DNA, 25 bp, probe
gtcattttcatcggtgaacaataaa

SEQ ID NO: 239973 - DNA, 25 bp, probe
gtctgttatttcctaatcaaaaagg

SEQ ID NO: 239974 - DNA, 25 bp, probe
gtcgtcttgtttctagcaaaacagg

SEQ ID NO: 239975 - DNA, 25 bp, probe
gtcgtgtttgtaaaagaagtaattg

SEQ ID NO: 239976 - DNA, 25 bp, probe
gtcggtttgttcactgtatgtcctt

SEQ ID NO: 239977 - DNA, 25 bp, probe
gtcgcagtcacgatcaacttaggca

SEQ ID NO: 239978 - DNA, 25 bp, probe
gtgccaagtcgactatgccttagac

SEQ ID NO: 239979 - DNA, 25 bp, probe
gtgcagatcgtggagatcatgcagc

SEQ ID NO: 239980 - DNA, 25 bp, probe
gtgcagatcgtggacgaggccaacg

SEQ ID NO: 239981 - DNA, 25 bp, probe
gtgcaacgggaaactgtacatcgtg

SEQ ID NO: 239982 - DNA, 25 bp, probe
tggcagccggtaacagctgacctta

SEQ ID NO: 239983 - DNA, 25 bp, probe
gggctcgcagaaggacgtcctaaac

SEQ ID NO: 239984 - DNA, 25 bp, probe
gtgaccgagctgggatcgtccagaa

SEQ ID NO: 239985 - DNA, 25 bp, probe
gtctgccgatatggatggcgcacca

SEQ ID NO: 239986 - DNA, 25 bp, probe
gtctgccgatatggatggcgcacca

SEQ ID NO: 239987 - DNA, 25 bp, probe
gtcttgcgtgtggatggtgcagcca

SEQ ID NO: 239988 - DNA, 25 bp, probe
gtcttgcgtgtggatggtgcagcca

SEQ ID NO: 239989 - DNA, 25 bp, probe
gtcattggagaggatgccgcctgca

SEQ ID NO: 239990 - DNA, 25 bp, probe
gtcattggagaggatgccgcctgca

SEQ ID NO: 239991 - DNA, 25 bp, probe
gtcattggagaggatgccgcctgca

SEQ ID NO: 239992 - DNA, 25 bp, probe
gtcattggagaggatgccgcctgca

SEQ ID NO: 239993 - DNA, 25 bp, probe
gtcattggagaggatgccgcctgca

SEQ ID NO: 239994 - DNA, 25 bp, probe
gtcttcgagatgctcatccatctgc

SEQ ID NO: 239995 - DNA, 25 bp, probe
gtcttcgagatgctcatccatctgc

SEQ ID NO: 239996 - DNA, 25 bp, probe
gtcttccagatttgctctgcatgtg

SEQ ID NO: 239997 - DNA, 25 bp, probe
gtcttccagatttgctctgcatgtg

SEQ ID NO: 239998 - DNA, 25 bp, probe
gtcttacatgattgtcctcatggtc

SEQ ID NO: 239999 - DNA, 25 bp, probe
gtcttacatgattgtcctcatggtc

SEQ ID NO: 240000 - DNA, 25 bp, probe
gtctctactcaagtctttggatgtt

SEQ ID NO: 240001 - DNA, 25 bp, probe
gtctctgagaacgactttgaagatc

SEQ ID NO: 240002 - DNA, 25 bp, probe
gtctctgagaacgactttgaagatc

SEQ ID NO: 240003 - DNA, 25 bp, probe
gtctaatgaacaggtgttgaaattt

SEQ ID NO: 240004 - DNA, 25 bp, probe
gtctaagaaatccagcttcataatt

SEQ ID NO: 240005 - DNA, 25 bp, probe
gtctcaaatccaatagttcacagct

SEQ ID NO: 240006 - DNA, 25 bp, probe
gtctagaatccataatgctccctac

SEQ ID NO: 240007 - DNA, 25 bp, probe
gtctagaatccataatgctccctac

SEQ ID NO: 240008 - DNA, 25 bp, probe
gtcttcttccaatgatgcttactac

SEQ ID NO: 240009 - DNA, 25 bp, probe
gtcttccccaaaattgatcactccg

SEQ ID NO: 240010 - DNA, 25 bp, probe
gtcttcacaacagattattacctta

SEQ ID NO: 240011 - DNA, 25 bp, probe
gtcttgataccatattggtaccaaa

SEQ ID NO: 240012 - DNA, 25 bp, probe
gtctttatgtcatcattgttcaaaa

SEQ ID NO: 240013 - DNA, 25 bp, probe
gtctttatgtcatcattgttcaaaa

SEQ ID NO: 240014 - DNA, 25 bp, probe
gtctttggagagtattttagaaact

SEQ ID NO: 240015 - DNA, 25 bp, probe
gtcttggggacgttcctaaacactg

SEQ ID NO: 240016 - DNA, 25 bp, probe
gtcttcgtggacccacgcaaggaca

SEQ ID NO: 240017 - DNA, 25 bp, probe
gtctttggtgaacattgcaatagaa

SEQ ID NO: 240018 - DNA, 25 bp, probe
gtctccaggtaactttgcttgatta

SEQ ID NO: 240019 - DNA, 25 bp, probe
gtctccaggtaactttgcttgatta

SEQ ID NO: 240020 - DNA, 25 bp, probe
gtctcactagtttttcctgtgcaaa

SEQ ID NO: 240021 - DNA, 25 bp, probe
gtctagggctattgtgttagtgaag

SEQ ID NO: 240022 - DNA, 25 bp, probe
gtctagggctattgtgttagtgaag

SEQ ID NO: 240023 - DNA, 25 bp, probe
gtctcagaggacctggtaaccaagg

SEQ ID NO: 240024 - DNA, 25 bp, probe
gtctcaggtggcctctgaaacacca

SEQ ID NO: 240025 - DNA, 25 bp, probe
gtcataggagtggtgctcaaattta

SEQ ID NO: 240026 - DNA, 25 bp, probe
gtcataggagtggtgctcaaattta

SEQ ID NO: 240027 - DNA, 25 bp, probe
gtcttgggctggacatataattgct

SEQ ID NO: 240028 - DNA, 25 bp, probe
gtctcgggcttactgaagattcctt

SEQ ID NO: 240029 - DNA, 25 bp, probe
gtctttggtattatagttcatcttc

SEQ ID NO: 240030 - DNA, 25 bp, probe
gtctcttgcgtttattacgactttc

SEQ ID NO: 240031 - DNA, 25 bp, probe
gtctcttgcgtttattacgactttc

SEQ ID NO: 240032 - DNA, 25 bp, probe
gtgctgtccttttattaaacttatt

SEQ ID NO: 240033 - DNA, 25 bp, probe
gtggatttggtgcttcaaaccctat

SEQ ID NO: 240034 - DNA, 25 bp, probe
gtgtctggtcgtcttcaaggacctg

SEQ ID NO: 240035 - DNA, 25 bp, probe
gtgtctggtcgtcttcaaggacctg

SEQ ID NO: 240036 - DNA, 25 bp, probe
gtctctggtagaacccaaggacttc

SEQ ID NO: 240037 - DNA, 25 bp, probe
gtcgacgtagaacctcgaggtttct

SEQ ID NO: 240038 - DNA, 25 bp, probe
gtctgacgatgacacctccaatttt

SEQ ID NO: 240039 - DNA, 25 bp, probe
gtcttcagtggcaccctcagaaaaa

SEQ ID NO: 240040 - DNA, 25 bp, probe
gtcttcacctgattcaactaaaaaa

SEQ ID NO: 240041 - DNA, 25 bp, probe
gtcttcacagtatcaactgcaacat

SEQ ID NO: 240042 - DNA, 25 bp, probe
gtctatgacatttatctaccaacac

SEQ ID NO: 240043 - DNA, 25 bp, probe
gtcttctgcatcagattattgcaac

SEQ ID NO: 240044 - DNA, 25 bp, probe
gtcttctgcatcagattattgcaac

SEQ ID NO: 240045 - DNA, 25 bp, probe
gtcttcagcatcagcatgttggaca

SEQ ID NO: 240046 - DNA, 25 bp, probe
gtctatagctgtagatgggcttcac

SEQ ID NO: 240047 - DNA, 25 bp, probe
gtcttctgagtgttggagcttggct

SEQ ID NO: 240048 - DNA, 25 bp, probe
gtcttgctagtctgaattcatgtct

SEQ ID NO: 240049 - DNA, 25 bp, probe
gtcttcataggcatgtttctgatcc

SEQ ID NO: 240050 - DNA, 25 bp, probe
gtcttgccagaaatgctgttctcac

SEQ ID NO: 240051 - DNA, 25 bp, probe
gtctaggaagcagttctgctccacc

SEQ ID NO: 240052 - DNA, 25 bp, probe
gtcttggtgacaatatctggcaaaa

SEQ ID NO: 240053 - DNA, 25 bp, probe
gtctcaggtctgaattcaagcatga

SEQ ID NO: 240054 - DNA, 25 bp, probe
gtctacagttataccaagtggatag

SEQ ID NO: 240055 - DNA, 25 bp, probe
gtctacgtgtttgcaacgctagaag

SEQ ID NO: 240056 - DNA, 25 bp, probe
gtctccagttgttcatcaacccatg

SEQ ID NO: 240057 - DNA, 25 bp, probe
gtctccagttgttcatcaacccatg

SEQ ID NO: 240058 - DNA, 25 bp, probe
gtctctttttgatcaaccaattttt

SEQ ID NO: 240059 - DNA, 25 bp, probe
gtcattttattaatctatccctttt

SEQ ID NO: 240060 - DNA, 25 bp, probe
gtctgtgttattttctatttccttt

SEQ ID NO: 240061 - DNA, 25 bp, probe
gtcttttgcacttttatttttatgt

SEQ ID NO: 240062 - DNA, 25 bp, probe
gtcttattcctaattcctgtatgtt

SEQ ID NO: 240063 - DNA, 25 bp, probe
gtcttattcctaattcctgtatgtt

SEQ ID NO: 240064 - DNA, 25 bp, probe
gtctttttgcatcagtactttgtat

SEQ ID NO: 240065 - DNA, 25 bp, probe
gtctttttgcatcagtactttgtat

SEQ ID NO: 240066 - DNA, 25 bp, probe
gtctatttttacctactgtgtcttg

SEQ ID NO: 240067 - DNA, 25 bp, probe
gtctttatttatggtcgtgcccttc

SEQ ID NO: 240068 - DNA, 25 bp, probe
gtcatttcagtgagaactgtccctt

SEQ ID NO: 240069 - DNA, 25 bp, probe
gtcatttcagtgagaactgtccctt

SEQ ID NO: 240070 - DNA, 25 bp, probe
gtctttgcagtcaagaggctgaccc

SEQ ID NO: 240071 - DNA, 25 bp, probe
gtcttagatgttggtggtgcagccc

SEQ ID NO: 240072 - DNA, 25 bp, probe
gtctaaggactccatgggagcagac

SEQ ID NO: 240073 - DNA, 25 bp, probe
gtctaaggactccatgggagcagac

SEQ ID NO: 240074 - DNA, 25 bp, probe
gtctctgaggacgtcatcggaggct

SEQ ID NO: 240075 - DNA, 25 bp, probe
gtcgtggagtccactggcgtcttca

SEQ ID NO: 240076 - DNA, 25 bp, probe
tgtcagtcgtgttgcttacggtttc

SEQ ID NO: 240077 - DNA, 25 bp, probe
gtcattgctgtttcatctactgttg

SEQ ID NO: 240078 - DNA, 25 bp, probe
gtcattgtgattttcgacctcatgg

SEQ ID NO: 240079 - DNA, 25 bp, probe
gtcttctgttttgaagctcatggga

SEQ ID NO: 240080 - DNA, 25 bp, probe
gtctttaatctcgacaagctcatat

SEQ ID NO: 240081 - DNA, 25 bp, probe
gtcttgatcactaagcaaagctgct

SEQ ID NO: 240082 - DNA, 25 bp, probe
gtcattataagaacataggcgctac

SEQ ID NO: 240083 - DNA, 25 bp, probe
gtcttacgagcagcatatccatcta

SEQ ID NO: 240084 - DNA, 25 bp, probe
gtctggacaacagagatgccatgat

SEQ ID NO: 240085 - DNA, 25 bp, probe
gtctggtcccaaacatcaatttctt

SEQ ID NO: 240086 - DNA, 25 bp, probe
gtctgactctactcattagattcct

SEQ ID NO: 240087 - DNA, 25 bp, probe
gtcggtgcaagggcttgagttcatt

SEQ ID NO: 240088 - DNA, 25 bp, probe
gtctagggatggacttggttcctct

SEQ ID NO: 240089 - DNA, 25 bp, probe
gtctagggatggacttggttcctct

SEQ ID NO: 240090 - DNA, 25 bp, probe
gtcttgagtgggacttggccccacc

SEQ ID NO: 240091 - DNA, 25 bp, probe
gtctctactgggacatgttaggccc

SEQ ID NO: 240092 - DNA, 25 bp, probe
gtctttaggggaattgaggccacca

SEQ ID NO: 240093 - DNA, 25 bp, probe
gtcttcttggggacgtatgtggccg

SEQ ID NO: 240094 - DNA, 25 bp, probe
gtcttcttggggacgtatgtggccg

SEQ ID NO: 240095 - DNA, 25 bp, probe
gtcgactgtggggtcatttggtgcc

SEQ ID NO: 240096 - DNA, 25 bp, probe
gtctccatgtgcgtccatatttaac

SEQ ID NO: 240097 - DNA, 25 bp, probe
gtcttctcatgactccttgttacac

SEQ ID NO: 240098 - DNA, 25 bp, probe
cgtcacgctgaatatatgaccacgc

SEQ ID NO: 240099 - DNA, 25 bp, probe
acgctgaatatatgaccacgctcac

SEQ ID NO: 240100 - DNA, 25 bp, probe
ctgaatatatgaccacgctcacccg

SEQ ID NO: 240101 - DNA, 25 bp, probe
gaatatatgaccacgctcacccgca

SEQ ID NO: 240102 - DNA, 25 bp, probe
cccgcatgattcccgcgccgctgct

SEQ ID NO: 240103 - DNA, 25 bp, probe
catgattcccgcgccgctgctggga

SEQ ID NO: 240104 - DNA, 25 bp, probe
gattcccgcgccgctgctgggagag

SEQ ID NO: 240105 - DNA, 25 bp, probe
cgcgccgctgctgggagagatcccc

SEQ ID NO: 240106 - DNA, 25 bp, probe
ccgctgctgggagagatcccctggc

SEQ ID NO: 240107 - DNA, 25 bp, probe
ctgctgggagagatcccctggcttg

SEQ ID NO: 240108 - DNA, 25 bp, probe
gctgggagagatcccctggcttgca

SEQ ID NO: 240109 - DNA, 25 bp, probe
ggagagatcccctggcttgcagaaa

SEQ ID NO: 240110 - DNA, 25 bp, probe
gagatcccctggcttgcagaaaatc

SEQ ID NO: 240111 - DNA, 25 bp, probe
atcccctggcttgcagaaaatccag

SEQ ID NO: 240112 - DNA, 25 bp, probe
atttgcctgcattaccggtcgatgc

SEQ ID NO: 240113 - DNA, 25 bp, probe
taccggtcgatgcaacgagtgatga

SEQ ID NO: 240114 - DNA, 25 bp, probe
gagtgatgaggttcgcaagaacctg

SEQ ID NO: 240115 - DNA, 25 bp, probe
gcaagaacctgatggacatgttcag

SEQ ID NO: 240116 - DNA, 25 bp, probe
gtctcagcaagacatcctacaagag

SEQ ID NO: 240117 - DNA, 25 bp, probe
gtctacaccaacgtctgcagataca

SEQ ID NO: 240118 - DNA, 25 bp, probe
gtctcaaacaccttcagcatgtgtg

SEQ ID NO: 240119 - DNA, 25 bp, probe
gtctcataatcaaatatcgctttac

SEQ ID NO: 240120 - DNA, 25 bp, probe
gtctatcaccaccaaactctatgac

SEQ ID NO: 240121 - DNA, 25 bp, probe
gtcttcctatctggaatgactagag

SEQ ID NO: 240122 - DNA, 25 bp, probe
gtcattccaatcagccaactaagtt

SEQ ID NO: 240123 - DNA, 25 bp, probe
gtcccgcctcatacaaattaagtta

SEQ ID NO: 240124 - DNA, 25 bp, probe
gtcccgtcgtagcaattatatttat

SEQ ID NO: 240125 - DNA, 25 bp, probe
gtcttctgtctttggtattatagtt

SEQ ID NO: 240126 - DNA, 25 bp, probe
gtctattactttgtttcacatgatt

SEQ ID NO: 240127 - DNA, 25 bp, probe
gtcttgtttatactttctgcacatt

SEQ ID NO: 240128 - DNA, 25 bp, probe
gtcttcatatgtaataattctcact

SEQ ID NO: 240129 - DNA, 25 bp, probe
gtcttcatatgtaataattctcact

SEQ ID NO: 240130 - DNA, 25 bp, probe
gtcttcatgcttgtttgcatcatcg

SEQ ID NO: 240131 - DNA, 25 bp, probe
gtcttcatgcttgtttgcatcatcg

SEQ ID NO: 240132 - DNA, 25 bp, probe
gtctatcagtacgtcggcaatggaa

SEQ ID NO: 240133 - DNA, 25 bp, probe
gtcttgcaatcaggtcagaaaggga

SEQ ID NO: 240134 - DNA, 25 bp, probe
gtcttcaacggtgaccagtgatgac

SEQ ID NO: 240135 - DNA, 25 bp, probe
gtcttcagtgctggtaagtcaggta

SEQ ID NO: 240136 - DNA, 25 bp, probe
gtcgacgtgcaggagaagctagggc

SEQ ID NO: 240137 - DNA, 25 bp, probe
gtctgaaggagtacaccatcaagtc

SEQ ID NO: 240138 - DNA, 25 bp, probe
gtctatgtggacccacgcaaagata

SEQ ID NO: 240139 - DNA, 25 bp, probe
gtcttgtagcatggttccaaagaac

SEQ ID NO: 240140 - DNA, 25 bp, probe
gtctcttggcagtgtccacagagta

SEQ ID NO: 240141 - DNA, 25 bp, probe
gtctcttggcagtgtccacagagta

SEQ ID NO: 240142 - DNA, 25 bp, probe
gtctactgggcatgctccagtcatg

SEQ ID NO: 240143 - DNA, 25 bp, probe
gtctagtgctggatctacaggcaga

SEQ ID NO: 240144 - DNA, 25 bp, probe
gtcttgtgggtgtctgacagtggcg

SEQ ID NO: 240145 - DNA, 25 bp, probe
gtcttgtgtcatgtgttcagctggc

SEQ ID NO: 240146 - DNA, 25 bp, probe
gtctgcattgtcactgttgactgtg

SEQ ID NO: 240147 - DNA, 25 bp, probe
gtctcatttgcttctgctaggttaa

SEQ ID NO: 240148 - DNA, 25 bp, probe
gtctcatttcttgtaaagtataact

SEQ ID NO: 240149 - DNA, 25 bp, probe
gtcttttctgctgctagcaactcaa

SEQ ID NO: 240150 - DNA, 25 bp, probe
gtcttgatttctccaagcacttaac

SEQ ID NO: 240151 - DNA, 25 bp, probe
gtctctgatttctacatcagccttg

SEQ ID NO: 240152 - DNA, 25 bp, probe
gtcttgcaagactactcaaattgaa

SEQ ID NO: 240153 - DNA, 25 bp, probe
gtcttcaatacacacccattgacaa

SEQ ID NO: 240154 - DNA, 25 bp, probe
gtctgttatcacccaaataggaaac

SEQ ID NO: 240155 - DNA, 25 bp, probe
gtctgttatcacccaaataggaaac

SEQ ID NO: 240156 - DNA, 25 bp, probe
gtcttttcacagctcaaagagaagc

SEQ ID NO: 240157 - DNA, 25 bp, probe
gtcttctgcctccttcaagagggag

SEQ ID NO: 240158 - DNA, 25 bp, probe
gtctcctttctattcggagcggctg

SEQ ID NO: 240159 - DNA, 25 bp, probe
gtctcctttctattcggagcggctg

SEQ ID NO: 240160 - DNA, 25 bp, probe
gtctacttatacaatgcggccatca

SEQ ID NO: 240161 - DNA, 25 bp, probe
gtctactgcaatctgtgcgagtcaa

SEQ ID NO: 240162 - DNA, 25 bp, probe
gtcttcagcagtgttcagagccaag

SEQ ID NO: 240163 - DNA, 25 bp, probe
gtcttcgagtatatgcggcacgggg

SEQ ID NO: 240164 - DNA, 25 bp, probe
gtgcttgaacttttgggacgtggcg

SEQ ID NO: 240165 - DNA, 25 bp, probe
gtctacatactttcatcctgactct

SEQ ID NO: 240166 - DNA, 25 bp, probe
gtctgaagcagcttcacactctgca

SEQ ID NO: 240167 - DNA, 25 bp, probe
gtctcagacatgttgagaatcatgg

SEQ ID NO: 240168 - DNA, 25 bp, probe
gtctgcacagctgtgaggcgatgct

SEQ ID NO: 240169 - DNA, 25 bp, probe
gtctcagcatcagtatatcccatgc

SEQ ID NO: 240170 - DNA, 25 bp, probe
gtctcaaagatatcagtagcttgga

SEQ ID NO: 240171 - DNA, 25 bp, probe
gtcctcaagctctgcgattttggca

SEQ ID NO: 240172 - DNA, 25 bp, probe
gtcttcaagctgtggacttctggga

SEQ ID NO: 240173 - DNA, 25 bp, probe
gtcctcaacggggagccccaaatgt

SEQ ID NO: 240174 - DNA, 25 bp, probe
gtcccacctggtggggtatcaccag

SEQ ID NO: 240175 - DNA, 25 bp, probe
gtctaccgtggtccaggttatcagc

SEQ ID NO: 240176 - DNA, 25 bp, probe
gtgctttggggaccggtattatcgg

SEQ ID NO: 240177 - DNA, 25 bp, probe
gtgcgtgggggacccagagattaaa

SEQ ID NO: 240178 - DNA, 25 bp, probe
gtctcttcggagacccaggatttag

SEQ ID NO: 240179 - DNA, 25 bp, probe
gtctcccttataacctggacgtgag

SEQ ID NO: 240180 - DNA, 25 bp, probe
gtgccaggcgtttggcctgggcagg

SEQ ID NO: 240181 - DNA, 25 bp, probe
gtctcagggaattgcctgctggggt

SEQ ID NO: 240182 - DNA, 25 bp, probe
gtcggaggaattgttgaggagtacc

SEQ ID NO: 240183 - DNA, 25 bp, probe
gtctgggtagcttgtttagggtaca

SEQ ID NO: 240184 - DNA, 25 bp, probe
gtctgggaagttactctcatggtta

SEQ ID NO: 240185 - DNA, 25 bp, probe
gtctaagagacctacctctggtcaa

SEQ ID NO: 240186 - DNA, 25 bp, probe
gtctaagagacctacctctggtcaa

SEQ ID NO: 240187 - DNA, 25 bp, probe
gtctaagagcgctcaggctgggtgc

SEQ ID NO: 240188 - DNA, 25 bp, probe
tgattaaagcggtagaggaaggcta

SEQ ID NO: 240189 - DNA, 25 bp, probe
ttaaagcggtagaggaaggctatcg

SEQ ID NO: 240190 - DNA, 25 bp, probe
gtcgaccgggagaggaaggtgagta

SEQ ID NO: 240191 - DNA, 25 bp, probe
gtctccttgggccaccaaaggtggt

SEQ ID NO: 240192 - DNA, 25 bp, probe
gtctccttgggccaccaaaggtggt

SEQ ID NO: 240193 - DNA, 25 bp, probe
gtcttccttggctactgcaaagagc

SEQ ID NO: 240194 - DNA, 25 bp, probe
gtcttccttgcctttagagtgaccc

SEQ ID NO: 240195 - DNA, 25 bp, probe
gtcttccttgcctttagagtgaccc

SEQ ID NO: 240196 - DNA, 25 bp, probe
gtcttttctagctgattgtggcccc

SEQ ID NO: 240197 - DNA, 25 bp, probe
gtctttcttatcatgatttggcaaa

SEQ ID NO: 240198 - DNA, 25 bp, probe
gtcttatcatggacaatttgggcta

SEQ ID NO: 240199 - DNA, 25 bp, probe
gtctgttctggcggcattgtgggct

SEQ ID NO: 240200 - DNA, 25 bp, probe
gtctgatcatcgacgcttttggtga

SEQ ID NO: 240201 - DNA, 25 bp, probe
gtctatcaacacgcatcttggcaaa

SEQ ID NO: 240202 - DNA, 25 bp, probe
gtcttcaacatccaagcatgtggcc

SEQ ID NO: 240203 - DNA, 25 bp, probe
gtctcatcggcaggaagctgtggcg

SEQ ID NO: 240204 - DNA, 25 bp, probe
gtctgaatggcggcacgctgaagga

SEQ ID NO: 240205 - DNA, 25 bp, probe
gtctggcagtgggcacatgggggtc

SEQ ID NO: 240206 - DNA, 25 bp, probe
gtctgtgtctgggaagggatggcca

SEQ ID NO: 240207 - DNA, 25 bp, probe
gtctttgctgccgtgaggcagtggc

SEQ ID NO: 240208 - DNA, 25 bp, probe
gtctttatggaggaagcatggaaga

SEQ ID NO: 240209 - DNA, 25 bp, probe
gtcttacggcagggatcattgggaa

SEQ ID NO: 240210 - DNA, 25 bp, probe
gtcttacggcagggatcattgggaa

SEQ ID NO: 240211 - DNA, 25 bp, probe
gtcttcacggcaggacaacgagaaa

SEQ ID NO: 240212 - DNA, 25 bp, probe
gtctctgccgctggggaaggtaaag

SEQ ID NO: 240213 - DNA, 25 bp, probe
gtctctgccgctggggaaggtaaag

SEQ ID NO: 240214 - DNA, 25 bp, probe
gtcccaactggccagacaagtaccc

SEQ ID NO: 240215 - DNA, 25 bp, probe
gtctccagatctcagtaaggtacgg

SEQ ID NO: 240216 - DNA, 25 bp, probe
gtctccagatctcagtaaggtacgg

SEQ ID NO: 240217 - DNA, 25 bp, probe
gtctcaagactgtggcaaccatcac

SEQ ID NO: 240218 - DNA, 25 bp, probe
gtcttctgacagtgccaataccacc

SEQ ID NO: 240219 - DNA, 25 bp, probe
gtcttctgacagtgccaataccacc

SEQ ID NO: 240220 - DNA, 25 bp, probe
gtcttctgacagtgccaataccacc

SEQ ID NO: 240221 - DNA, 25 bp, probe
gtcttcatccagatgccaaatatgc

SEQ ID NO: 240222 - DNA, 25 bp, probe
gtcttccatcagacccagtgatgct

SEQ ID NO: 240223 - DNA, 25 bp, probe
gtcttccatggtcatcagtgacctc

SEQ ID NO: 240224 - DNA, 25 bp, probe
gtcttccaggattcatggtgcctct

SEQ ID NO: 240225 - DNA, 25 bp, probe
gtctcatcttggtaatgatgtccta

SEQ ID NO: 240226 - DNA, 25 bp, probe
gtctgcagtttgttattgcatagta

SEQ ID NO: 240227 - DNA, 25 bp, probe
gtctgcagtttgttattgcatagta

SEQ ID NO: 240228 - DNA, 25 bp, probe
gtccagttttgtgtgctttactaca

SEQ ID NO: 240229 - DNA, 25 bp, probe
gtccagttttgtgtgctttactaca

SEQ ID NO: 240230 - DNA, 25 bp, probe
gtgccggttttcagctattagcaac

SEQ ID NO: 240231 - DNA, 25 bp, probe
gtccccttttatctgattctgagac

SEQ ID NO: 240232 - DNA, 25 bp, probe
gtcgatgcctttgattttattcgca

SEQ ID NO: 240233 - DNA, 25 bp, probe
gtccaccgtgtggttaggattccca

SEQ ID NO: 240234 - DNA, 25 bp, probe
gtccaccgtgacattaaaggtgcca

SEQ ID NO: 240235 - DNA, 25 bp, probe
gtccaccgtgacattaaaggtgcca

SEQ ID NO: 240236 - DNA, 25 bp, probe
gtccaccgtgacattaaaggtgcca

SEQ ID NO: 240237 - DNA, 25 bp, probe
gtctacctggccagtggagtggtcc

SEQ ID NO: 240238 - DNA, 25 bp, probe
gtctacctggccagtggagtggtcc

SEQ ID NO: 240239 - DNA, 25 bp, probe
gtctagcctgggtatgaagaagttc

SEQ ID NO: 240240 - DNA, 25 bp, probe
gtcttactgtcattcgaagagagtt

SEQ ID NO: 240241 - DNA, 25 bp, probe
gtctttgtgtgcttgctaaatggtg

SEQ ID NO: 240242 - DNA, 25 bp, probe
gtctttgtgtgcttgctaaatggtg

SEQ ID NO: 240243 - DNA, 25 bp, probe
gtctttctatgctccaaatgaatgt

SEQ ID NO: 240244 - DNA, 25 bp, probe
gtctgtctttctgtccaaatatcta

SEQ ID NO: 240245 - DNA, 25 bp, probe
gtctgtctttctgtccaaatatcta

SEQ ID NO: 240246 - DNA, 25 bp, probe
gtctttctttgtcattcagttctag

SEQ ID NO: 240247 - DNA, 25 bp, probe
gtctctttttgtatatcatctactc

SEQ ID NO: 240248 - DNA, 25 bp, probe
gtctctggatttctagcacattact

SEQ ID NO: 240249 - DNA, 25 bp, probe
gtctctgagaaggctgctaacattg

SEQ ID NO: 240250 - DNA, 25 bp, probe
gtctgcagaagatttgctcagtcaa

SEQ ID NO: 240251 - DNA, 25 bp, probe
gtctgtggatggacatgatcagtgc

SEQ ID NO: 240252 - DNA, 25 bp, probe
gtctctaggatgatatgcatgtttc

SEQ ID NO: 240253 - DNA, 25 bp, probe
gtctaacgagagacatcagtttctc

SEQ ID NO: 240254 - DNA, 25 bp, probe
gtctacagctaaaacaatttgccaa

SEQ ID NO: 240255 - DNA, 25 bp, probe
gtctgagacatacacactttccagc

SEQ ID NO: 240256 - DNA, 25 bp, probe
gtctcgaatgtgcgcaatcttgccg

SEQ ID NO: 240257 - DNA, 25 bp, probe
gtctggaagttggaagctggccgca

SEQ ID NO: 240258 - DNA, 25 bp, probe
gtctgggagggacactacacagcca

SEQ ID NO: 240259 - DNA, 25 bp, probe
gtctggggtagggagcccagccatg

SEQ ID NO: 240260 - DNA, 25 bp, probe
gtctgggtgcggaggagctcccagc

SEQ ID NO: 240261 - DNA, 25 bp, probe
gtccaggtggccgaatagccctggc

SEQ ID NO: 240262 - DNA, 25 bp, probe
gtccagggcgtaggaagccgggtgg

SEQ ID NO: 240263 - DNA, 25 bp, probe
gtctgccaggtgaacggtgcctggg

SEQ ID NO: 240264 - DNA, 25 bp, probe
gtctgccaggtgaacggtgcctggg

SEQ ID NO: 240265 - DNA, 25 bp, probe
gtctccagggtcagtccctggatgg

SEQ ID NO: 240266 - DNA, 25 bp, probe
gtcccaaagcacagttcttggttga

SEQ ID NO: 240267 - DNA, 25 bp, probe
gtctttcccacggtttatgtgtgtg

SEQ ID NO: 240268 - DNA, 25 bp, probe
gtctttcccacggtttatgtgtgtg

SEQ ID NO: 240269 - DNA, 25 bp, probe
gtcttcaccaaaggttatggatttg

SEQ ID NO: 240270 - DNA, 25 bp, probe
gtcgtcaaagagtttttgcctttgg

SEQ ID NO: 240271 - DNA, 25 bp, probe
gtctgtaaaaacgattttcttctgt

SEQ ID NO: 240272 - DNA, 25 bp, probe
gtctgtaaaaacgattttcttctgt

SEQ ID NO: 240273 - DNA, 25 bp, probe
gtgtggaaaggaggtttatcggcct

SEQ ID NO: 240274 - DNA, 25 bp, probe
gtctgtaagattttattttcaagca

SEQ ID NO: 240275 - DNA, 25 bp, probe
gtctcagaacttctacttctctgaa

SEQ ID NO: 240276 - DNA, 25 bp, probe
gtctcaaagctgtgcagtcttttgt

SEQ ID NO: 240277 - DNA, 25 bp, probe
gtctcaaagctgtgcagtcttttgt

SEQ ID NO: 240278 - DNA, 25 bp, probe
gtctacaatgtgttctccttattct

SEQ ID NO: 240279 - DNA, 25 bp, probe
gtctactatgaaccatcctgtactc

SEQ ID NO: 240280 - DNA, 25 bp, probe
gtctactatgaaccatcctgtactc

SEQ ID NO: 240281 - DNA, 25 bp, probe
gtctcacttttgccatcacattggc

SEQ ID NO: 240282 - DNA, 25 bp, probe
gtctacataactaatacagctgagc

SEQ ID NO: 240283 - DNA, 25 bp, probe
gtctacagagaaggtcaggtgatgc

SEQ ID NO: 240284 - DNA, 25 bp, probe
gtctacagagaaggtcaggtgatgc

SEQ ID NO: 240285 - DNA, 25 bp, probe
gtctcaccttgagttaggctgagca

SEQ ID NO: 240286 - DNA, 25 bp, probe
gtctcagcgggagctggagcttcag

SEQ ID NO: 240287 - DNA, 25 bp, probe
gtctgagcagctcggaattgagctt

SEQ ID NO: 240288 - DNA, 25 bp, probe
gtctcagagcaggggagtggcttcc

SEQ ID NO: 240289 - DNA, 25 bp, probe
gtctcagagcaggggagtggcttcc

SEQ ID NO: 240290 - DNA, 25 bp, probe
gtctcagagctgttaagggcttatt

SEQ ID NO: 240291 - DNA, 25 bp, probe
gtctcagagctgttaagggcttatt

SEQ ID NO: 240292 - DNA, 25 bp, probe
gtctcagcactgttacaattcttca

SEQ ID NO: 240293 - DNA, 25 bp, probe
gtctccattgttaaatgtcccctta

SEQ ID NO: 240294 - DNA, 25 bp, probe
gtctacttggtttttacttgtgtca

SEQ ID NO: 240295 - DNA, 25 bp, probe
gtctaattgttcatcctaattgttc

SEQ ID NO: 240296 - DNA, 25 bp, probe
gtctagaatgggcatcttcaaaggt

SEQ ID NO: 240297 - DNA, 25 bp, probe
gtctgtaatggggtgcttcaaggta

SEQ ID NO: 240298 - DNA, 25 bp, probe
gtctgaggacaacgtggccaaggtc

SEQ ID NO: 240299 - DNA, 25 bp, probe
gtctgaggacaacgtggccaaggac

SEQ ID NO: 240300 - DNA, 25 bp, probe
gtctgcgtggaaagggcccaagaac

SEQ ID NO: 240301 - DNA, 25 bp, probe
gtctgtcccgcaagggcggcaagac

SEQ ID NO: 240302 - DNA, 25 bp, probe
gtcttcagccatgtggagggctgga

SEQ ID NO: 240303 - DNA, 25 bp, probe
gtcggagtccttcagagaatgtgat

SEQ ID NO: 240304 - DNA, 25 bp, probe
gtcggagtccttcagagaatgtgat

SEQ ID NO: 240305 - DNA, 25 bp, probe
gtcggattccgtctgcagaggagga

SEQ ID NO: 240306 - DNA, 25 bp, probe
gtcggtgtccttttcaacaatggtg

SEQ ID NO: 240307 - DNA, 25 bp, probe
tgacgggtccattaacaaagcgggc

SEQ ID NO: 240308 - DNA, 25 bp, probe
tgactccgttattccgaaaggggca

SEQ ID NO: 240309 - DNA, 25 bp, probe
tccccgtggattctgctaagggaaa

SEQ ID NO: 240310 - DNA, 25 bp, probe
tcctccgactttctggaatttgtaa

SEQ ID NO: 240311 - DNA, 25 bp, probe
gtctacaacttcaccaaatttggaa

SEQ ID NO: 240312 - DNA, 25 bp, probe
gtcgactacttcacacatactgtga

SEQ ID NO: 240313 - DNA, 25 bp, probe
gtctgaatctgcactactcaactta

SEQ ID NO: 240314 - DNA, 25 bp, probe
gtctacctgaaaattcaacatttgc

SEQ ID NO: 240315 - DNA, 25 bp, probe
gtgctacctcagtgttgtagtttct

SEQ ID NO: 240316 - DNA, 25 bp, probe
gtctgaccctgaacgttagtctctt

SEQ ID NO: 240317 - DNA, 25 bp, probe
gtctaccactggaccatgtaactct

SEQ ID NO: 240318 - DNA, 25 bp, probe
gtctgagccagtactgaataaactc

SEQ ID NO: 240319 - DNA, 25 bp, probe
gtctaccatttttgattaacatcgc

SEQ ID NO: 240320 - DNA, 25 bp, probe
gtctcagactctttttgtacctggt

SEQ ID NO: 240321 - DNA, 25 bp, probe
gtctcagactctttttgtacctggt

SEQ ID NO: 240322 - DNA, 25 bp, probe
gtctagcactcattttctataacag

SEQ ID NO: 240323 - DNA, 25 bp, probe
gtctagcactcattttctataacag

SEQ ID NO: 240324 - DNA, 25 bp, probe
gtctatgcactacattctgctagct

SEQ ID NO: 240325 - DNA, 25 bp, probe
gtctataccaaagtctgccactact

SEQ ID NO: 240326 - DNA, 25 bp, probe
gtctataccaaagtctgccactact

SEQ ID NO: 240327 - DNA, 25 bp, probe
gtcttttcagaagtgctgtctcttt

SEQ ID NO: 240328 - DNA, 25 bp, probe
gtcttttaacagtctctctttatat

SEQ ID NO: 240329 - DNA, 25 bp, probe
gtcttatatatatttctttgttatc

SEQ ID NO: 240330 - DNA, 25 bp, probe
gtctatgaatgttagtctgttcttt

SEQ ID NO: 240331 - DNA, 25 bp, probe
gtctatgaatgaccagtgtttttcg

SEQ ID NO: 240332 - DNA, 25 bp, probe
gtcttagaggcctttcttgtatgtg

SEQ ID NO: 240333 - DNA, 25 bp, probe
gtctggaaggctccttcgagctggt

SEQ ID NO: 240334 - DNA, 25 bp, probe
gtctggttgtgtcccaagaggtgtt

SEQ ID NO: 240335 - DNA, 25 bp, probe
gtctgttttgatccccttgatggat

SEQ ID NO: 240336 - DNA, 25 bp, probe
gtctggtttctagacttgtgctgat

SEQ ID NO: 240337 - DNA, 25 bp, probe
gtctgggaccaagaatacatgcttt

SEQ ID NO: 240338 - DNA, 25 bp, probe
gtctgggaccaagaatacatgcttt

SEQ ID NO: 240339 - DNA, 25 bp, probe
gtgcgggaccactattcaatttttt

SEQ ID NO: 240340 - DNA, 25 bp, probe
gtctagaactcctgtaagtttttga

SEQ ID NO: 240341 - DNA, 25 bp, probe
gtctggaattaatggggttcttata

SEQ ID NO: 240342 - DNA, 25 bp, probe
gtctggaatttctgagtgagtcctt

SEQ ID NO: 240343 - DNA, 25 bp, probe
gtctgtgaaaaggaagtttgcactg

SEQ ID NO: 240344 - DNA, 25 bp, probe
gtctggagaccagacacattcgcac

SEQ ID NO: 240345 - DNA, 25 bp, probe
gtctggagaccagacacattcgcac

SEQ ID NO: 240346 - DNA, 25 bp, probe
gtctcgggacaggaaagtggccaag

SEQ ID NO: 240347 - DNA, 25 bp, probe
gtctcgggacaggaaagtggccaag

SEQ ID NO: 240348 - DNA, 25 bp, probe
gtctctgggacccacacaggatcaa

SEQ ID NO: 240349 - DNA, 25 bp, probe
gtctgggagatcctccaccgaaaac

SEQ ID NO: 240350 - DNA, 25 bp, probe
gtctgtgggacgaagaccgggcacc

SEQ ID NO: 240351 - DNA, 25 bp, probe
gtctatgcggtggtgcagatctcgg

SEQ ID NO: 240352 - DNA, 25 bp, probe
gtctgcacacgtctcatgaatgcat

SEQ ID NO: 240353 - DNA, 25 bp, probe
gtctgcgaccatcgtcatgttaaca

SEQ ID NO: 240354 - DNA, 25 bp, probe
gtctggatccttccatgactacagc

SEQ ID NO: 240355 - DNA, 25 bp, probe
gtctggatgactacttaaacacccc

SEQ ID NO: 240356 - DNA, 25 bp, probe
gtctggatgactacttaaacacccc

SEQ ID NO: 240357 - DNA, 25 bp, probe
gtctgcagtactgcactcaggaccc

SEQ ID NO: 240358 - DNA, 25 bp, probe
gtctcagtttgccagtcttgcaatc

SEQ ID NO: 240359 - DNA, 25 bp, probe
gtctcagatggtgtgtccagcactc

SEQ ID NO: 240360 - DNA, 25 bp, probe
gtctcagtggttagagctgctcagc

SEQ ID NO: 240361 - DNA, 25 bp, probe
gtctagtgtttttgttgagtctgcc

SEQ ID NO: 240362 - DNA, 25 bp, probe
gtctttgcttacattggagtcagcg

SEQ ID NO: 240363 - DNA, 25 bp, probe
gtctgttggataggtagggccacga

SEQ ID NO: 240364 - DNA, 25 bp, probe
gtctgagggaacggggtgctaagca

SEQ ID NO: 240365 - DNA, 25 bp, probe
gtcgggggagggtaggtgagagtca

SEQ ID NO: 240366 - DNA, 25 bp, probe
gtcctgggggcgagatcggggtaga

SEQ ID NO: 240367 - DNA, 25 bp, probe
gtctttgggactgtggtggaggtaa

SEQ ID NO: 240368 - DNA, 25 bp, probe
gtctttgggactgtggtggaggtaa

SEQ ID NO: 240369 - DNA, 25 bp, probe
gtctctgtgtggttgggttgggagg

SEQ ID NO: 240370 - DNA, 25 bp, probe
gtctactgatggagtggggcgcgga

SEQ ID NO: 240371 - DNA, 25 bp, probe
gtgctgacatcagattgttaagggc

SEQ ID NO: 240372 - DNA, 25 bp, probe
gtgctttccacaaataaagttcctg

SEQ ID NO: 240373 - DNA, 25 bp, probe
gtctttccatgaaacgaagttgaga

SEQ ID NO: 240374 - DNA, 25 bp, probe
gtcctcgcacgatacgaagtgcttg

SEQ ID NO: 240375 - DNA, 25 bp, probe
gtcctcgcacgatacgaagtgcttg

SEQ ID NO: 240376 - DNA, 25 bp, probe
gtgaccccgggagtcaagagcccgg

SEQ ID NO: 240377 - DNA, 25 bp, probe
gtctgcccaggggagtcaaggcccc

SEQ ID NO: 240378 - DNA, 25 bp, probe
gtctgcccaggggagtcaaggcccc

SEQ ID NO: 240379 - DNA, 25 bp, probe
gtctccctgcatgtcaggaagagta

SEQ ID NO: 240380 - DNA, 25 bp, probe
gtctcacggcagcacgatgaagact

SEQ ID NO: 240381 - DNA, 25 bp, probe
gtctaccagagtcagagatcagctc

SEQ ID NO: 240382 - DNA, 25 bp, probe
gtctgaactggctgagaattctcct

SEQ ID NO: 240383 - DNA, 25 bp, probe
gtctgaactggctgagaattctcct

SEQ ID NO: 240384 - DNA, 25 bp, probe
gtcggagccgcgcgagatatggccc

SEQ ID NO: 240385 - DNA, 25 bp, probe
gtcgggactgagcaggcaatggcct

SEQ ID NO: 240386 - DNA, 25 bp, probe
gtcgctgaacggcgtgcattatcaa

SEQ ID NO: 240387 - DNA, 25 bp, probe
gtctctgaacttggcgtcgatgtag

SEQ ID NO: 240388 - DNA, 25 bp, probe
gtctctcaaattaggccagattcta

SEQ ID NO: 240389 - DNA, 25 bp, probe
gtctctcaaattaggccagattcta

SEQ ID NO: 240390 - DNA, 25 bp, probe
gtcgtcataattcctgctattgtta

SEQ ID NO: 240391 - DNA, 25 bp, probe
gtctttgacatggacgtttgtgatg

SEQ ID NO: 240392 - DNA, 25 bp, probe
gtctttgttgtacattgtcagtgta

SEQ ID NO: 240393 - DNA, 25 bp, probe
gtctttcttcaatgttgccatggtt

SEQ ID NO: 240394 - DNA, 25 bp, probe
gtctttcattcatagcctgctagtg

SEQ ID NO: 240395 - DNA, 25 bp, probe
gtctgtcttccatcagacccagtga

SEQ ID NO: 240396 - DNA, 25 bp, probe
gtctcatatgtctatccaacacacc

SEQ ID NO: 240397 - DNA, 25 bp, probe
gtctcatagtcatggaatgcatcac

SEQ ID NO: 240398 - DNA, 25 bp, probe
gtctatagctttgggatcatcctgc

SEQ ID NO: 240399 - DNA, 25 bp, probe
gtcgtatcttatgctgcgtactgct

SEQ ID NO: 240400 - DNA, 25 bp, probe
gtctttgctttcggagtggtatttc

SEQ ID NO: 240401 - DNA, 25 bp, probe
gtctattgtctccttggttatattt

SEQ ID NO: 240402 - DNA, 25 bp, probe
gtctcttccatcctggggaacatgt

SEQ ID NO: 240403 - DNA, 25 bp, probe
gtctcttccatcctggggaacatgt

SEQ ID NO: 240404 - DNA, 25 bp, probe
gtctctgtccatgttgagctgttca

SEQ ID NO: 240405 - DNA, 25 bp, probe
gtctctgtccatgttgagctgttca

SEQ ID NO: 240406 - DNA, 25 bp, probe
gtctatatcctggctgtgatggcct

SEQ ID NO: 240407 - DNA, 25 bp, probe
gtctgattccatatggaggcctgaa

SEQ ID NO: 240408 - DNA, 25 bp, probe
gtctcattatatattgggtgctaaa

SEQ ID NO: 240409 - DNA, 25 bp, probe
gtctcatgtcttatttttgaaccat

SEQ ID NO: 240410 - DNA, 25 bp, probe
gtctgtctcttggctattttaacct

SEQ ID NO: 240411 - DNA, 25 bp, probe
gtcggcagctggtctttttcaagac

SEQ ID NO: 240412 - DNA, 25 bp, probe
gtcggagcttccagattcaattgaa

SEQ ID NO: 240413 - DNA, 25 bp, probe
gtcgggacaccagtgaaacttgaac

SEQ ID NO: 240414 - DNA, 25 bp, probe
gtctgggtcactttgtaacttacag

SEQ ID NO: 240415 - DNA, 25 bp, probe
gtctggaccctttctatctagataa

SEQ ID NO: 240416 - DNA, 25 bp, probe
gtctgacctccttatatatgtaaaa

SEQ ID NO: 240417 - DNA, 25 bp, probe
gtctgacctccttatatatgtaaaa

SEQ ID NO: 240418 - DNA, 25 bp, probe
gtctacctacatcagtgtgtaagag

SEQ ID NO: 240419 - DNA, 25 bp, probe
gtctattgtaatgcagattgtaaat

SEQ ID NO: 240420 - DNA, 25 bp, probe
gtcgatttacaaggtatgtgaaact

SEQ ID NO: 240421 - DNA, 25 bp, probe
gtctattattctggagtatgtgcaa

SEQ ID NO: 240422 - DNA, 25 bp, probe
gtctatctctgttgctgagatcagg

SEQ ID NO: 240423 - DNA, 25 bp, probe
gtctactgagtactacacactattt

SEQ ID NO: 240424 - DNA, 25 bp, probe
gtctgcacatagaatccaaactcat

SEQ ID NO: 240425 - DNA, 25 bp, probe
gtctgcattgaatccgctgatctac

SEQ ID NO: 240426 - DNA, 25 bp, probe
gtctctggatttctagcacattact

SEQ ID NO: 240427 - DNA, 25 bp, probe
gtctgtgctatttctgtacagctat

SEQ ID NO: 240428 - DNA, 25 bp, probe
gtctgtgcaattacgtccaccaaag

SEQ ID NO: 240429 - DNA, 25 bp, probe
gtctgagcaatcgtggtgcctagac

SEQ ID NO: 240430 - DNA, 25 bp, probe
gtctcagaattggagggctctgaaa

SEQ ID NO: 240431 - DNA, 25 bp, probe
gtccattttctagggatagacgccc

SEQ ID NO: 240432 - DNA, 25 bp, probe
gtccattttctagggatagacgccc

SEQ ID NO: 240433 - DNA, 25 bp, probe
gtccattttttataaccgctacact

SEQ ID NO: 240434 - DNA, 25 bp, probe
gtgagtattttttaaacagcctcaa

SEQ ID NO: 240435 - DNA, 25 bp, probe
gtgagtattttttaaacagcctcaa

SEQ ID NO: 240436 - DNA, 25 bp, probe
gtctacattcttttaagaagctctt

SEQ ID NO: 240437 - DNA, 25 bp, probe
gtctccatttctgggaagggcttca

SEQ ID NO: 240438 - DNA, 25 bp, probe
gtcccaagacctgcgatggacttca

SEQ ID NO: 240439 - DNA, 25 bp, probe
gtccccagaccagtagtgaccaatc

SEQ ID NO: 240440 - DNA, 25 bp, probe
gtccccagaccagtagtgaccaatc

SEQ ID NO: 240441 - DNA, 25 bp, probe
gtctccaacaccataggaagcaacg

SEQ ID NO: 240442 - DNA, 25 bp, probe
tgttcggccccaatggggggtcgag

SEQ ID NO: 240443 - DNA, 25 bp, probe
tgttcggccccaatggggggtcgag

SEQ ID NO: 240444 - DNA, 25 bp, probe
tgctttgggcaacagggtcggggaa

SEQ ID NO: 240445 - DNA, 25 bp, probe
gtctagaggcaacagtgttctgagc

SEQ ID NO: 240446 - DNA, 25 bp, probe
gtctagcccatgggagaactctgag

SEQ ID NO: 240447 - DNA, 25 bp, probe
gtctcccctgtcaatgagaatcaga

SEQ ID NO: 240448 - DNA, 25 bp, probe
gtctccccagatatggaccatcagt

SEQ ID NO: 240449 - DNA, 25 bp, probe
gtcccttcagtgttgtacgacgatg

SEQ ID NO: 240450 - DNA, 25 bp, probe
gtctccctgggaaatggtacagatg

SEQ ID NO: 240451 - DNA, 25 bp, probe
gtctacaagggaaagtggcatggtg

SEQ ID NO: 240452 - DNA, 25 bp, probe
gtctactagtgaattagcgactttg

SEQ ID NO: 240453 - DNA, 25 bp, probe
gtctacttctggatctgctatgtct

SEQ ID NO: 240454 - DNA, 25 bp, probe
gtctatctcatttggtctcagagct

SEQ ID NO: 240455 - DNA, 25 bp, probe
gtctaccattgcttgttcagagaac

SEQ ID NO: 240456 - DNA, 25 bp, probe
gtctaccattgcttgttcagagaac

SEQ ID NO: 240457 - DNA, 25 bp, probe
gtctggcaatggtgttgctggcacc

SEQ ID NO: 240458 - DNA, 25 bp, probe
gtctggcaatggtgttgctggcacc

SEQ ID NO: 240459 - DNA, 25 bp, probe
gtctgatggggagatggctgatgcc

SEQ ID NO: 240460 - DNA, 25 bp, probe
gtctgcaggcaccaggctgggatga

SEQ ID NO: 240461 - DNA, 25 bp, probe
gtctcgtcaggaggtgcctgagagc

SEQ ID NO: 240462 - DNA, 25 bp, probe
gtctcgtcaagaggatggtggagtg

SEQ ID NO: 240463 - DNA, 25 bp, probe
gtctcagtggcgacaaaggaagctg

SEQ ID NO: 240464 - DNA, 25 bp, probe
gtctccgggatcaacggcgacattc

SEQ ID NO: 240465 - DNA, 25 bp, probe
gtctactgaggaccctgggacttaa

SEQ ID NO: 240466 - DNA, 25 bp, probe
gtctactgaggaccctgggacttaa

SEQ ID NO: 240467 - DNA, 25 bp, probe
gtctcctgggagccttgaaaaaact

SEQ ID NO: 240468 - DNA, 25 bp, probe
gtctccgagtcactcatgtgcaaaa

SEQ ID NO: 240469 - DNA, 25 bp, probe
gtctgccgtgaagcacatgcatgaa

SEQ ID NO: 240470 - DNA, 25 bp, probe
gtcgcctgctgagtgacagtgctga

SEQ ID NO: 240471 - DNA, 25 bp, probe
gtctgcacttgagttcacttgagtt

SEQ ID NO: 240472 - DNA, 25 bp, probe
gtctcaagtactcactagatgttgt

SEQ ID NO: 240473 - DNA, 25 bp, probe
gtctaagtatgcctcagtgggttga

SEQ ID NO: 240474 - DNA, 25 bp, probe
gtctaacttggctggtggtgtggac

SEQ ID NO: 240475 - DNA, 25 bp, probe
gtctcagactgggcagggaggcttt

SEQ ID NO: 240476 - DNA, 25 bp, probe
gtctcagctggatgcagtgaacctt

SEQ ID NO: 240477 - DNA, 25 bp, probe
gtctcatctgtctcagctgaatcgt

SEQ ID NO: 240478 - DNA, 25 bp, probe
gtctctgtgtaaccagctcagtgtt

SEQ ID NO: 240479 - DNA, 25 bp, probe
gtctagtgatcatctcagctgaagt

SEQ ID NO: 240480 - DNA, 25 bp, probe
gtctgagtctgatatcagcaagatt

SEQ ID NO: 240481 - DNA, 25 bp, probe
gtctgaggctgatgatctagagtct

SEQ ID NO: 240482 - DNA, 25 bp, probe
gtctgtgcaggattgtctgggttga

SEQ ID NO: 240483 - DNA, 25 bp, probe
gtctgtgcaggattgtctgggttga

SEQ ID NO: 240484 - DNA, 25 bp, probe
gtctgagggatcactgtgtcattga

SEQ ID NO: 240485 - DNA, 25 bp, probe
gtctctggtgtagctgatgatccga

SEQ ID NO: 240486 - DNA, 25 bp, probe
gtctctcagtgtacttgttcctatt

SEQ ID NO: 240487 - DNA, 25 bp, probe
gtctccctctgtggggtcttattga

SEQ ID NO: 240488 - DNA, 25 bp, probe
gtctccgtcatggggttgttttgct

SEQ ID NO: 240489 - DNA, 25 bp, probe
gtctggttcatgggtaagtttctga

SEQ ID NO: 240490 - DNA, 25 bp, probe
gtctggttctcactgagacgtttta

SEQ ID NO: 240491 - DNA, 25 bp, probe
gtctgtgctatcagagcaaggcgct

SEQ ID NO: 240492 - DNA, 25 bp, probe
gtctcctgatgcctgagcagaggtg

SEQ ID NO: 240493 - DNA, 25 bp, probe
gtctcagctgatttcagacacgtga

SEQ ID NO: 240494 - DNA, 25 bp, probe
gtctcgctgcaaggctgcagacgga

SEQ ID NO: 240495 - DNA, 25 bp, probe
gtcctgtaacctcatcgggattgtc

SEQ ID NO: 240496 - DNA, 25 bp, probe
ggtttaactgtcccagcgagatttc

SEQ ID NO: 240497 - DNA, 25 bp, probe
gtgtacgaagctacccagggagatc

SEQ ID NO: 240498 - DNA, 25 bp, probe
ggaacgttgtccacaggggatttat

SEQ ID NO: 240499 - DNA, 25 bp, probe
ggaaggatttccagagggaggccga

SEQ ID NO: 240500 - DNA, 25 bp, probe
gtgaaggtcttaaagaaggacgtca

SEQ ID NO: 240501 - DNA, 25 bp, probe
gtgctacgtctttaaggcggggaag

SEQ ID NO: 240502 - DNA, 25 bp, probe
gtctggcttgcctgaagggagtggc

SEQ ID NO: 240503 - DNA, 25 bp, probe
gtctggtatgacccagccgaagtgg

SEQ ID NO: 240504 - DNA, 25 bp, probe
gtctcatgaatgtaagcccgaaggg

SEQ ID NO: 240505 - DNA, 25 bp, probe
gtgccatgaaaatcaccgagggcga

SEQ ID NO: 240506 - DNA, 25 bp, probe
gtgccatgaaaatcaccgagggcga

SEQ ID NO: 240507 - DNA, 25 bp, probe
gtctggaataatggacgccgctggc

SEQ ID NO: 240508 - DNA, 25 bp, probe
gtctgcataatatcccagtgcctga

SEQ ID NO: 240509 - DNA, 25 bp, probe
gtctgcataatatcccagtgcctga

SEQ ID NO: 240510 - DNA, 25 bp, probe
gtctctagatattctcaggagtctg

SEQ ID NO: 240511 - DNA, 25 bp, probe
gtcctggatcaataaagtcatacgc

SEQ ID NO: 240512 - DNA, 25 bp, probe
gtcctggatcaataaagtcatacgc

SEQ ID NO: 240513 - DNA, 25 bp, probe
tgtcgaggagaacaaagggaccccg

SEQ ID NO: 240514 - DNA, 25 bp, probe
ttcggaggacagtgaaaacttccca

SEQ ID NO: 240515 - DNA, 25 bp, probe
gtctggaaatcacagtaaacctcct

SEQ ID NO: 240516 - DNA, 25 bp, probe
gtgcgcgtcaacaggtaacacttcc

SEQ ID NO: 240517 - DNA, 25 bp, probe
gtcctgctacccagtaaaaatccac

SEQ ID NO: 240518 - DNA, 25 bp, probe
gtcctcagaccctggaaaagtgaac

SEQ ID NO: 240519 - DNA, 25 bp, probe
gtcctccctctgtgaatgtacaggc

SEQ ID NO: 240520 - DNA, 25 bp, probe
gtcctgcccctttgagggggtgcaa

SEQ ID NO: 240521 - DNA, 25 bp, probe
gtccctgcaggtcatgaggggccta

SEQ ID NO: 240522 - DNA, 25 bp, probe
gtccatcttggtcaaggacacccag

SEQ ID NO: 240523 - DNA, 25 bp, probe
gtctcttctattcacagtacacgtc

SEQ ID NO: 240524 - DNA, 25 bp, probe
gtcggttatttaggtccagcagcta

SEQ ID NO: 240525 - DNA, 25 bp, probe
gtctggttttcttgagacctcagat

SEQ ID NO: 240526 - DNA, 25 bp, probe
gtgctggcacttattgcaatttaac

SEQ ID NO: 240527 - DNA, 25 bp, probe
gtctaacttctgtgcctgttaatca

SEQ ID NO: 240528 - DNA, 25 bp, probe
gtctaattgtcttggacattttggg

SEQ ID NO: 240529 - DNA, 25 bp, probe
gtctaattgtcttggacattttggg

SEQ ID NO: 240530 - DNA, 25 bp, probe
gtctgtgaaggcatggccttcttgg

SEQ ID NO: 240531 - DNA, 25 bp, probe
gtctgtcgattggtggtcctttgga

SEQ ID NO: 240532 - DNA, 25 bp, probe
gtctgggcattctgacctattggaa

SEQ ID NO: 240533 - DNA, 25 bp, probe
gtgcggtgcattggagacgtccgtt

SEQ ID NO: 240534 - DNA, 25 bp, probe
gtctcaatgcctgggactggaggtt

SEQ ID NO: 240535 - DNA, 25 bp, probe
gtctcactcacagtggatatggaga

SEQ ID NO: 240536 - DNA, 25 bp, probe
gtctcacagcactggaaggagtaca

SEQ ID NO: 240537 - DNA, 25 bp, probe
gtctcacagcactggaaggagtaca

SEQ ID NO: 240538 - DNA, 25 bp, probe
gtctgccccaaagaggtgtacgatg

SEQ ID NO: 240539 - DNA, 25 bp, probe
gtcccctgaaaggtcctatacaagt

SEQ ID NO: 240540 - DNA, 25 bp, probe
gtccccggaacagatcgaccaattt

SEQ ID NO: 240541 - DNA, 25 bp, probe
tgaccctaaaaagaaagccacattt

SEQ ID NO: 240542 - DNA, 25 bp, probe
tgtccccaaaaagcaacatacggtt

SEQ ID NO: 240543 - DNA, 25 bp, probe
gtccccagaaagattccaggggact

SEQ ID NO: 240544 - DNA, 25 bp, probe
gtctctccaacagtgtattccaaag

SEQ ID NO: 240545 - DNA, 25 bp, probe
gtctctctaccactggatgaaaata

SEQ ID NO: 240546 - DNA, 25 bp, probe
gtctcactgaacatttcaatcaaga

SEQ ID NO: 240547 - DNA, 25 bp, probe
gtctcaagacccattaactggacaa

SEQ ID NO: 240548 - DNA, 25 bp, probe
gtctcaagacccattaactggacaa

SEQ ID NO: 240549 - DNA, 25 bp, probe
gtccggcagcagttttaactggccg

SEQ ID NO: 240550 - DNA, 25 bp, probe
gggcgagacaacattccgttggcag

SEQ ID NO: 240551 - DNA, 25 bp, probe
gtgggacacggagtttgcgtttgag

SEQ ID NO: 240552 - DNA, 25 bp, probe
gtgagacaagggctcggccttaagg

SEQ ID NO: 240553 - DNA, 25 bp, probe
gtgaagaaagtgcaagggcttgggg

SEQ ID NO: 240554 - DNA, 25 bp, probe
gtgaagtacggggacagcggggagc

SEQ ID NO: 240555 - DNA, 25 bp, probe
gtgaaggggagagacaggggccgcc

SEQ ID NO: 240556 - DNA, 25 bp, probe
gtcggaagggcacacggggtgcgtc

SEQ ID NO: 240557 - DNA, 25 bp, probe
gtcggcaaaaggcgcggtgtggcaa

SEQ ID NO: 240558 - DNA, 25 bp, probe
gtcccaaaaggccttagtgagcgag

SEQ ID NO: 240559 - DNA, 25 bp, probe
gtcctatacaagtcagttaaggaag

SEQ ID NO: 240560 - DNA, 25 bp, probe
gtctcttcaccgtgttaacataatc

SEQ ID NO: 240561 - DNA, 25 bp, probe
gtcctggacccagttgtacctaatc

SEQ ID NO: 240562 - DNA, 25 bp, probe
gtcctggacccagttgtacctaatc

SEQ ID NO: 240563 - DNA, 25 bp, probe
gtccgcgagccgggattacagggtc

SEQ ID NO: 240564 - DNA, 25 bp, probe
gtccgcgagccgggattacagggtc

SEQ ID NO: 240565 - DNA, 25 bp, probe
gtcgggagctctggcaagctatagg

SEQ ID NO: 240566 - DNA, 25 bp, probe
gtctggaagcttgtctgctctatag

SEQ ID NO: 240567 - DNA, 25 bp, probe
gtctgtgaacttgatgttcctggga

SEQ ID NO: 240568 - DNA, 25 bp, probe
gtctctgtacatacacatgttcctc

SEQ ID NO: 240569 - DNA, 25 bp, probe
gtctgtttagtagtttccatcattc

SEQ ID NO: 240570 - DNA, 25 bp, probe
gtctctctaggttttcaactatttc

SEQ ID NO: 240571 - DNA, 25 bp, probe
gtctccaagtgtttaccactttctg

SEQ ID NO: 240572 - DNA, 25 bp, probe
gtctccacagagtttatgccatatt

SEQ ID NO: 240573 - DNA, 25 bp, probe
gtctcccagtgggtgatgcttttgc

SEQ ID NO: 240574 - DNA, 25 bp, probe
gtctcccagatacgttgcattgtgc

SEQ ID NO: 240575 - DNA, 25 bp, probe
gtctcccagatacgttgcattgtgc

SEQ ID NO: 240576 - DNA, 25 bp, probe
gtctccgagagcggattgagttcct

SEQ ID NO: 240577 - DNA, 25 bp, probe
gtctcgagagaagatcaccctcctt

SEQ ID NO: 240578 - DNA, 25 bp, probe
gtctcgagagaagatcaccctcctt

SEQ ID NO: 240579 - DNA, 25 bp, probe
gtctccaggaagcctacagtcttca

SEQ ID NO: 240580 - DNA, 25 bp, probe
gtctccaaagaagatagctctctga

SEQ ID NO: 240581 - DNA, 25 bp, probe
gtctctccaacaacgtagtattgaa

SEQ ID NO: 240582 - DNA, 25 bp, probe
gtctctggcattgaagtagatgagg

SEQ ID NO: 240583 - DNA, 25 bp, probe
gtcgggatgattacagttgctgagc

SEQ ID NO: 240584 - DNA, 25 bp, probe
gtcggtatcatggtggtgtcgtgca

SEQ ID NO: 240585 - DNA, 25 bp, probe
gtctcagaaatcgtgggctactatt

SEQ ID NO: 240586 - DNA, 25 bp, probe
gtctggagataattttgcaactcat

SEQ ID NO: 240587 - DNA, 25 bp, probe
gtctgggatcagaagttgtcactca

SEQ ID NO: 240588 - DNA, 25 bp, probe
gtctgcggttgaagctatgttcctt

SEQ ID NO: 240589 - DNA, 25 bp, probe
gtctgattttgaagggttctcgtat

SEQ ID NO: 240590 - DNA, 25 bp, probe
gtctgctttgtgaggcagtcttgtt

SEQ ID NO: 240591 - DNA, 25 bp, probe
gtctctgttggtggtacatcttgtt

SEQ ID NO: 240592 - DNA, 25 bp, probe
gtctcattctatagttaaattgttc

SEQ ID NO: 240593 - DNA, 25 bp, probe
gtctcattctatagttaaattgttc

SEQ ID NO: 240594 - DNA, 25 bp, probe
gtctctttatggatgtattgttcac

SEQ ID NO: 240595 - DNA, 25 bp, probe
gtctctttatggatgtattgttcac

SEQ ID NO: 240596 - DNA, 25 bp, probe
gtctccgtatcgaaatgatgtgcca

SEQ ID NO: 240597 - DNA, 25 bp, probe
gtctccgtatcgaaatgatgtgcca

SEQ ID NO: 240598 - DNA, 25 bp, probe
gtctcctgttgtgaggggctcactt

SEQ ID NO: 240599 - DNA, 25 bp, probe
gtctcagctcttactaggggtattc

SEQ ID NO: 240600 - DNA, 25 bp, probe
gtctctctcctggatcagggtggat

SEQ ID NO: 240601 - DNA, 25 bp, probe
gtctctctcctggatcagggtggat

SEQ ID NO: 240602 - DNA, 25 bp, probe
gtctgtctttgcaaaggactgtaag

SEQ ID NO: 240603 - DNA, 25 bp, probe
gtcgtcttctgccacaatgacatcc

SEQ ID NO: 240604 - DNA, 25 bp, probe
gtcgactatgccttagacacatcct

SEQ ID NO: 240605 - DNA, 25 bp, probe
gtcgttgtgcctcagtatgaccgaa

SEQ ID NO: 240606 - DNA, 25 bp, probe
gtcgtttctatgcattcaggctgcc

SEQ ID NO: 240607 - DNA, 25 bp, probe
gtgctgcatttcagagaacgcctcc

SEQ ID NO: 240608 - DNA, 25 bp, probe
gtctgctggccaacagacaaccgcc

SEQ ID NO: 240609 - DNA, 25 bp, probe
gtctgctggagtatacaccaactgc

SEQ ID NO: 240610 - DNA, 25 bp, probe
gtcgtgggagtgtacaggccacccc

SEQ ID NO: 240611 - DNA, 25 bp, probe
gtctgggggacaatgaaaacaggcc

SEQ ID NO: 240612 - DNA, 25 bp, probe
gtcgggggaatgggccagatggacc

SEQ ID NO: 240613 - DNA, 25 bp, probe
gtcggccggagatgagccgaggctt

SEQ ID NO: 240614 - DNA, 25 bp, probe
gtccagttggagaccgtcaaccttc

SEQ ID NO: 240615 - DNA, 25 bp, probe
gtccgagtttgtctgtaacctgtca

SEQ ID NO: 240616 - DNA, 25 bp, probe
gtgacaggtttgacatcgaagacgt

SEQ ID NO: 240617 - DNA, 25 bp, probe
gtgaggtggtggactcgacaacgtc

SEQ ID NO: 240618 - DNA, 25 bp, probe
ggtggggtttcacacaaaggaattg

SEQ ID NO: 240619 - DNA, 25 bp, probe
ggggcggatttacctaaaggctgag

SEQ ID NO: 240620 - DNA, 25 bp, probe
gtgggccaggttacctacatgaact

SEQ ID NO: 240621 - DNA, 25 bp, probe
gtgcggtaatttatccacggcactc

SEQ ID NO: 240622 - DNA, 25 bp, probe
gtgctggtttatgttctaggaactc

SEQ ID NO: 240623 - DNA, 25 bp, probe
gtctctgtttacctgcctaggaaaa

SEQ ID NO: 240624 - DNA, 25 bp, probe
gtctcgtgttcatgatgttaagaaa

SEQ ID NO: 240625 - DNA, 25 bp, probe
gtctcgtggtaggactgtagaaaag

SEQ ID NO: 240626 - DNA, 25 bp, probe
gtcctgggtggagatgaagaaagca

SEQ ID NO: 240627 - DNA, 25 bp, probe
gtcggggtggagcacgagaacggca

SEQ ID NO: 240628 - DNA, 25 bp, probe
gtctggggagggccgcagaaaggcc

SEQ ID NO: 240629 - DNA, 25 bp, probe
gtctggccagactccatggcaaaac

SEQ ID NO: 240630 - DNA, 25 bp, probe
gtctggccagactccatggcaaaac

SEQ ID NO: 240631 - DNA, 25 bp, probe
gtctgtccagactcagtggatctga

SEQ ID NO: 240632 - DNA, 25 bp, probe
gtctcctagagctagccggatggac

SEQ ID NO: 240633 - DNA, 25 bp, probe
gtctcctagagctagccggatggac

SEQ ID NO: 240634 - DNA, 25 bp, probe
gtctcctcgggggagcagatgaggg

SEQ ID NO: 240635 - DNA, 25 bp, probe
gtctcttatcctggaacatggtgga

SEQ ID NO: 240636 - DNA, 25 bp, probe
gtctccgctcctgataatgatgttg

SEQ ID NO: 240637 - DNA, 25 bp, probe
gtctccgctcctgataatgatgttg

SEQ ID NO: 240638 - DNA, 25 bp, probe
gtctgccatccccaaattatgtggt

SEQ ID NO: 240639 - DNA, 25 bp, probe
gtctctctctacctcatttttagaa

SEQ ID NO: 240640 - DNA, 25 bp, probe
gtctcttcataccggttttatgaca

SEQ ID NO: 240641 - DNA, 25 bp, probe
gtctctttacctaatggtctctacc

SEQ ID NO: 240642 - DNA, 25 bp, probe
gtccattaacaaagcgggctttgcc

SEQ ID NO: 240643 - DNA, 25 bp, probe
gtccaaaataacggggctcctgctc

SEQ ID NO: 240644 - DNA, 25 bp, probe
gtctccataacatcattgggatccc

SEQ ID NO: 240645 - DNA, 25 bp, probe
gtctccataacatcattgggatccc

SEQ ID NO: 240646 - DNA, 25 bp, probe
gtctgcctcaagtaccattggacca

SEQ ID NO: 240647 - DNA, 25 bp, probe
gtctcattatgtgattcctggagcc

SEQ ID NO: 240648 - DNA, 25 bp, probe
gtccttagtcacacacggcaagagg

SEQ ID NO: 240649 - DNA, 25 bp, probe
gtctctttgtatacacaccacaaga

SEQ ID NO: 240650 - DNA, 25 bp, probe
gtctcctagtgataatgctccaagt

SEQ ID NO: 240651 - DNA, 25 bp, probe
gtcccgagggtagtgcctgatcaat

SEQ ID NO: 240652 - DNA, 25 bp, probe
gtcccgagggtagtgcctgatcaat

SEQ ID NO: 240653 - DNA, 25 bp, probe
gtctcctcaggagttgtttgaaata

SEQ ID NO: 240654 - DNA, 25 bp, probe
gtccctgggactgtttcagacttgg

SEQ ID NO: 240655 - DNA, 25 bp, probe
gtccctgtggaagtatcttggttgt

SEQ ID NO: 240656 - DNA, 25 bp, probe
gtctcttgcatgattcttcttggtc

SEQ ID NO: 240657 - DNA, 25 bp, probe
gtctcattggcaatgtttcgataga

SEQ ID NO: 240658 - DNA, 25 bp, probe
gtctcttggcattgcttattatgtg

SEQ ID NO: 240659 - DNA, 25 bp, probe
gtctctgtggcagtgatccaccatc

SEQ ID NO: 240660 - DNA, 25 bp, probe
gtctccatggcaggtccatacagca

SEQ ID NO: 240661 - DNA, 25 bp, probe
gtctcctggaccttgacagagcagc

SEQ ID NO: 240662 - DNA, 25 bp, probe
gtctggaggcacaggcacaaagcat

SEQ ID NO: 240663 - DNA, 25 bp, probe
gtctggagtcacagatcaactactg

SEQ ID NO: 240664 - DNA, 25 bp, probe
gtctcgatgctgttaacaacttctg

SEQ ID NO: 240665 - DNA, 25 bp, probe
gtctcgatgctgttaacaacttctg

SEQ ID NO: 240666 - DNA, 25 bp, probe
gtctccattgagatgactcctacga

SEQ ID NO: 240667 - DNA, 25 bp, probe
gtctccattgagatgactcctacga

SEQ ID NO: 240668 - DNA, 25 bp, probe
gtcgcctttatggaccacatacgga

SEQ ID NO: 240669 - DNA, 25 bp, probe
gtcgcctttatggaccacatacgga

SEQ ID NO: 240670 - DNA, 25 bp, probe
gtccttttcagaaccaaactcatgc

SEQ ID NO: 240671 - DNA, 25 bp, probe
ggccattgtacagccgaagtacgcc

SEQ ID NO: 240672 - DNA, 25 bp, probe
gtgctattgtacatggcaaagtttc

SEQ ID NO: 240673 - DNA, 25 bp, probe
gtgcccttactttcaacaaattctg

SEQ ID NO: 240674 - DNA, 25 bp, probe
gtctgccatagtgacctaaaacttg

SEQ ID NO: 240675 - DNA, 25 bp, probe
gtcggcaatggaacctacggacagg

SEQ ID NO: 240676 - DNA, 25 bp, probe
gtctgctgcagaaactccttcaggc

SEQ ID NO: 240677 - DNA, 25 bp, probe
gtctgctgcagaaactccttcaggc

SEQ ID NO: 240678 - DNA, 25 bp, probe
gtctgctgaatgaaccccaatacat

SEQ ID NO: 240679 - DNA, 25 bp, probe
gtctgctattcagtcataatcaaaa

SEQ ID NO: 240680 - DNA, 25 bp, probe
gtctgctcattttcaattccaaact

SEQ ID NO: 240681 - DNA, 25 bp, probe
gtctccagagcttcaaaggcaacac

SEQ ID NO: 240682 - DNA, 25 bp, probe
gtctgaaggttctgatgccagcaca

SEQ ID NO: 240683 - DNA, 25 bp, probe
gtctctgagtgtagcagggccagga

SEQ ID NO: 240684 - DNA, 25 bp, probe
gtctctgggttgcggcaagaacact

SEQ ID NO: 240685 - DNA, 25 bp, probe
gtctctttgtgtccttgtgagacac

SEQ ID NO: 240686 - DNA, 25 bp, probe
gtctctgcttgtgcactattgtcac

SEQ ID NO: 240687 - DNA, 25 bp, probe
gtctctgttcagatgtgcatttcac

SEQ ID NO: 240688 - DNA, 25 bp, probe
gtctctgaatgactctgtcttgtgg

SEQ ID NO: 240689 - DNA, 25 bp, probe
gtctctgaatgactctgtcttgtgg

SEQ ID NO: 240690 - DNA, 25 bp, probe
gtctctcatttgcttcttggtaaat

SEQ ID NO: 240691 - DNA, 25 bp, probe
gtctctcatttgcttcttggtaaat

SEQ ID NO: 240692 - DNA, 25 bp, probe
gtctccttgatgcttttggacataa

SEQ ID NO: 240693 - DNA, 25 bp, probe
gtctccttcatgtttaatggcacct

SEQ ID NO: 240694 - DNA, 25 bp, probe
gtctccattttgcaaatgctgctcc

SEQ ID NO: 240695 - DNA, 25 bp, probe
gtctgcctttctcaagatgatctac

SEQ ID NO: 240696 - DNA, 25 bp, probe
gtctcctatgtcacagcgatggatc

SEQ ID NO: 240697 - DNA, 25 bp, probe
gtctctgttgactggctgtgtgacc

SEQ ID NO: 240698 - DNA, 25 bp, probe
gtctctgttgcacagatctgttttt

SEQ ID NO: 240699 - DNA, 25 bp, probe
gtcggtatcggagttcttatactat

SEQ ID NO: 240700 - DNA, 25 bp, probe
gtcgttaccagagatttacccatcg

SEQ ID NO: 240701 - DNA, 25 bp, probe
gtcgttatccagagatgtcttcctt

SEQ ID NO: 240702 - DNA, 25 bp, probe
gtcgttatccagagatgtcttcctt

SEQ ID NO: 240703 - DNA, 25 bp, probe
gtctgtctttagaccagcactccaa

SEQ ID NO: 240704 - DNA, 25 bp, probe
gtctgtctttagaccagcactccaa

SEQ ID NO: 240705 - DNA, 25 bp, probe
gtctgtgcttgtaatccagcatgtt

SEQ ID NO: 240706 - DNA, 25 bp, probe
gtctgtgctgtgcaagtcactggtt

SEQ ID NO: 240707 - DNA, 25 bp, probe
gtctctgagagtagagtcactggaa

SEQ ID NO: 240708 - DNA, 25 bp, probe
gtctctgaggttgcatggcatggtc

SEQ ID NO: 240709 - DNA, 25 bp, probe
gtctctgggcttggatgacagcaga

SEQ ID NO: 240710 - DNA, 25 bp, probe
gtctctggccttttcaagcagtgga

SEQ ID NO: 240711 - DNA, 25 bp, probe
gtctgtgggaaattctcactggcga

SEQ ID NO: 240712 - DNA, 25 bp, probe
gtcctaggagaatccggggagttgg

SEQ ID NO: 240713 - DNA, 25 bp, probe
gtcctaggagaatccggggagttgg

SEQ ID NO: 240714 - DNA, 25 bp, probe
gtcgtagatgaaaggccagggggcc

SEQ ID NO: 240715 - DNA, 25 bp, probe
gtcgtaaacattaaagtgcaggtca

SEQ ID NO: 240716 - DNA, 25 bp, probe
gtctgtaacctgtcagcaaggcctt

SEQ ID NO: 240717 - DNA, 25 bp, probe
gtctggcatacctcatgcagagtcg

SEQ ID NO: 240718 - DNA, 25 bp, probe
gtctgtgagaccttagcagtgctac

SEQ ID NO: 240719 - DNA, 25 bp, probe
gtctggaaccaccgagtgctgaagg

SEQ ID NO: 240720 - DNA, 25 bp, probe
gtctggaaccaccgagtgctgaagg

SEQ ID NO: 240721 - DNA, 25 bp, probe
gtcggatacacactcgaatcattga

SEQ ID NO: 240722 - DNA, 25 bp, probe
gtcggattccagttaaatggatggc

SEQ ID NO: 240723 - DNA, 25 bp, probe
gtcgtgaaaagcttaatgggctggc

SEQ ID NO: 240724 - DNA, 25 bp, probe
gtcgtaagcaagctactggcatggc

SEQ ID NO: 240725 - DNA, 25 bp, probe
gtctgaagcagatgcaaagaggcag

SEQ ID NO: 240726 - DNA, 25 bp, probe
gtctgaacttgggcaaggcgatgca

SEQ ID NO: 240727 - DNA, 25 bp, probe
gtctgcaactgcctggtcaggggac

SEQ ID NO: 240728 - DNA, 25 bp, probe
gtcgcgctgtggcctgaagtggcgc

SEQ ID NO: 240729 - DNA, 25 bp, probe
gtctccaggagcgtgacactggtga

SEQ ID NO: 240730 - DNA, 25 bp, probe
gtctgacaggtgcttcagtggtatg

SEQ ID NO: 240731 - DNA, 25 bp, probe
gtctgacaggtgcttcagtggtatg

SEQ ID NO: 240732 - DNA, 25 bp, probe
gtctgacagtggcgacgatgaacat

SEQ ID NO: 240733 - DNA, 25 bp, probe
gtctgacaaggacccgtgtcacatc

SEQ ID NO: 240734 - DNA, 25 bp, probe
gacatgttcagggatcgccaggcgt

SEQ ID NO: 240735 - DNA, 25 bp, probe
gccaggcgttttctgagcatacctg

SEQ ID NO: 240736 - DNA, 25 bp, probe
gcggcatggtgcaagttgaataacc

SEQ ID NO: 240737 - DNA, 25 bp, probe
gaagatgttcgcgattatcttctat

SEQ ID NO: 240738 - DNA, 25 bp, probe
tctatatcttcaggcgcgcggtctg

SEQ ID NO: 240739 - DNA, 25 bp, probe
gcaacatttgggccagctaaacatg

SEQ ID NO: 240740 - DNA, 25 bp, probe
ccagctaaacatgcttcatcgtcgg

SEQ ID NO: 240741 - DNA, 25 bp, probe
ccgggctgccacgaccaagtgacag

SEQ ID NO: 240742 - DNA, 25 bp, probe
gaccaagtgacagcaatgctgtttc

SEQ ID NO: 240743 - DNA, 25 bp, probe
aatgctgtttcactggttatgcggc

SEQ ID NO: 240744 - DNA, 25 bp, probe
atgccggtgaacgtgcaaaacaggc

SEQ ID NO: 240745 - DNA, 25 bp, probe
acgtgcaaaacaggctctagcgttc

SEQ ID NO: 240746 - DNA, 25 bp, probe
ctctagcgttcgaacgcactgattt

SEQ ID NO: 240747 - DNA, 25 bp, probe
tcgttcactcatggaaaatagcgat

SEQ ID NO: 240748 - DNA, 25 bp, probe
atggaaaatagcgatcgctgccagg

SEQ ID NO: 240749 - DNA, 25 bp, probe
tcagggttaaagatatctcacgtac

SEQ ID NO: 240750 - DNA, 25 bp, probe
cgctggttagcaccgcaggtgtaga

SEQ ID NO: 240751 - DNA, 25 bp, probe
caccgcaggtgtagagaaggcactt

SEQ ID NO: 240752 - DNA, 25 bp, probe
gtctgacccagaagacaccacaggc

SEQ ID NO: 240753 - DNA, 25 bp, probe
gtctgaccgcaatacacagattctt

SEQ ID NO: 240754 - DNA, 25 bp, probe
gtcgactagcactggccatgtgact

SEQ ID NO: 240755 - DNA, 25 bp, probe
gtcgatcaagacttgaccacttact

SEQ ID NO: 240756 - DNA, 25 bp, probe
gtctgagaatgacgatacccgtgac

SEQ ID NO: 240757 - DNA, 25 bp, probe
gtctgagcacgtgggagccgtgtgt

SEQ ID NO: 240758 - DNA, 25 bp, probe
gtctgcagtcagaggaggacgtgag

SEQ ID NO: 240759 - DNA, 25 bp, probe
gtctgcgggaggcagtggtggggcc

SEQ ID NO: 240760 - DNA, 25 bp, probe
gtctgcccaaggaagttgctcatgg

SEQ ID NO: 240761 - DNA, 25 bp, probe
tgtcccctagtgagggactgtgttg

SEQ ID NO: 240762 - DNA, 25 bp, probe
gtccatactttgatttaccagatta

SEQ ID NO: 240763 - DNA, 25 bp, probe
gtctgctcttatttttgtaccatat

SEQ ID NO: 240764 - DNA, 25 bp, probe
gtctccatattactgtttcatgact

SEQ ID NO: 240765 - DNA, 25 bp, probe
gtctccatattactgtttcatgact

SEQ ID NO: 240766 - DNA, 25 bp, probe
gtctccacttcaggtggtacacact

SEQ ID NO: 240767 - DNA, 25 bp, probe
gtctccagattctaggtcagaccct

SEQ ID NO: 240768 - DNA, 25 bp, probe
gtctccaattcatggttatcagggc

SEQ ID NO: 240769 - DNA, 25 bp, probe
gtcccaaatttggaaaagctgactc

SEQ ID NO: 240770 - DNA, 25 bp, probe
gtcccagtttcatatacaggtcact

SEQ ID NO: 240771 - DNA, 25 bp, probe
gtctccgtcatcatgaacacggctc

SEQ ID NO: 240772 - DNA, 25 bp, probe
gtctccgtcatcatgaacacggctc

SEQ ID NO: 240773 - DNA, 25 bp, probe
gtctggtgtcagatacagccgactc

SEQ ID NO: 240774 - DNA, 25 bp, probe
gtctgcaggtagaatgcacaggaga

SEQ ID NO: 240775 - DNA, 25 bp, probe
gtcgcagcttcaatctatcagcaac

SEQ ID NO: 240776 - DNA, 25 bp, probe
gtcgcagcttactgtccaagagtat

SEQ ID NO: 240777 - DNA, 25 bp, probe
gtcccttctgtagtcccagatgaat

SEQ ID NO: 240778 - DNA, 25 bp, probe
gtctccagtggaactcacacagtaa

SEQ ID NO: 240779 - DNA, 25 bp, probe
gtctccagcacggagctgacactgt

SEQ ID NO: 240780 - DNA, 25 bp, probe
gtctccagcacggagctgacactgt

SEQ ID NO: 240781 - DNA, 25 bp, probe
gtctgacacctggagcatgggcgtc

SEQ ID NO: 240782 - DNA, 25 bp, probe
gtctgagatctctctgcatagaggt

SEQ ID NO: 240783 - DNA, 25 bp, probe
gtcgatgcaacgagtgatgaggttc

SEQ ID NO: 240784 - DNA, 25 bp, probe
gtcgagcaagctcaggagaatgtaa

SEQ ID NO: 240785 - DNA, 25 bp, probe
gtctgtaagttacaaagtcaggaaa

SEQ ID NO: 240786 - DNA, 25 bp, probe
gtctgcaaagtggtcaaaagtgctg

SEQ ID NO: 240787 - DNA, 25 bp, probe
gtctgctcatagtgtcagtccttca

SEQ ID NO: 240788 - DNA, 25 bp, probe
gtctccaaggagacgcctctgtgaa

SEQ ID NO: 240789 - DNA, 25 bp, probe
gtctgcaaaggagggcctcagagac

SEQ ID NO: 240790 - DNA, 25 bp, probe
gtctgaatcatccgaggcaaagaga

SEQ ID NO: 240791 - DNA, 25 bp, probe
gtctccatctagcaggaaaagccat

SEQ ID NO: 240792 - DNA, 25 bp, probe
gtcgcctctggcagcgaaaagaccc

SEQ ID NO: 240793 - DNA, 25 bp, probe
gtctgccctagcattagaaatgaga

SEQ ID NO: 240794 - DNA, 25 bp, probe
gtctcctgttcgctcataaagaagt

SEQ ID NO: 240795 - DNA, 25 bp, probe
gtctcctgttcgaactcgagggacc

SEQ ID NO: 240796 - DNA, 25 bp, probe
gtcccgtatgaggatgtcgaaaacc

SEQ ID NO: 240797 - DNA, 25 bp, probe
gtcgccgtcaagtgcattaagaacg

SEQ ID NO: 240798 - DNA, 25 bp, probe
gtcgggtgccaggacaatgaaatac

SEQ ID NO: 240799 - DNA, 25 bp, probe
gtctgtttgtaggacggagaaaccg

SEQ ID NO: 240800 - DNA, 25 bp, probe
gtctgctttctaagtgggaagagga

SEQ ID NO: 240801 - DNA, 25 bp, probe
gtctgctttctaagtgggaagagga

SEQ ID NO: 240802 - DNA, 25 bp, probe
gtctgcttgtcttagatgttggtgg

SEQ ID NO: 240803 - DNA, 25 bp, probe
gtctgccattcgtagctgaatatgt

SEQ ID NO: 240804 - DNA, 25 bp, probe
gtctgccattcgtagctgaatatgt

SEQ ID NO: 240805 - DNA, 25 bp, probe
gtctgcacacatctttggctgatgt

SEQ ID NO: 240806 - DNA, 25 bp, probe
gtctccatcaggcagtggctgttgg

SEQ ID NO: 240807 - DNA, 25 bp, probe
gtctccataatgccactggtgttaa

SEQ ID NO: 240808 - DNA, 25 bp, probe
gtctccaggtgattggatgtgtcca

SEQ ID NO: 240809 - DNA, 25 bp, probe
gtcccacagggtctgttccataatg

SEQ ID NO: 240810 - DNA, 25 bp, probe
gtccccgctgggtgcgtagataatc

SEQ ID NO: 240811 - DNA, 25 bp, probe
gtccccgctgggtgcgtagataatc

SEQ ID NO: 240812 - DNA, 25 bp, probe
gtcccgcaagggcggcaagtgagga

SEQ ID NO: 240813 - DNA, 25 bp, probe
gtcggtgggggtggagacaggggag

SEQ ID NO: 240814 - DNA, 25 bp, probe
gtccgttggggcagaaccatggagg

SEQ ID NO: 240815 - DNA, 25 bp, probe
gtcccactcgggaaaggcaaggagg

SEQ ID NO: 240816 - DNA, 25 bp, probe
gtctgcaacgggctaatccacggaa

SEQ ID NO: 240817 - DNA, 25 bp, probe
gtctgcaacgggctaatccacggaa

SEQ ID NO: 240818 - DNA, 25 bp, probe
gtcgaccaagatctttcaaaagcaa

SEQ ID NO: 240819 - DNA, 25 bp, probe
gtcgaccaagatctttcaaaagcaa

SEQ ID NO: 240820 - DNA, 25 bp, probe
gtcgaccaaatgatattatggcaga

SEQ ID NO: 240821 - DNA, 25 bp, probe
gtctgaccaaaattccttctgcaca

SEQ ID NO: 240822 - DNA, 25 bp, probe
gtctgagaatattggccctttctaa

SEQ ID NO: 240823 - DNA, 25 bp, probe
gtgcagaagtaacccacttggtaac

SEQ ID NO: 240824 - DNA, 25 bp, probe
gtctgaagggagcccaaccaggaac

SEQ ID NO: 240825 - DNA, 25 bp, probe
gtggaagggcgagaccaacggacgg

SEQ ID NO: 240826 - DNA, 25 bp, probe
gtggaagggcgagaccaacggacgg

SEQ ID NO: 240827 - DNA, 25 bp, probe
gtgaccaagggtgaccaaggtgacc

SEQ ID NO: 240828 - DNA, 25 bp, probe
gtgcacccggggtgacaagctgttc

SEQ ID NO: 240829 - DNA, 25 bp, probe
gtgacttcgggtttgcacaaattct

SEQ ID NO: 240830 - DNA, 25 bp, probe
gtggtcacgattgtatgaaagttca

SEQ ID NO: 240831 - DNA, 25 bp, probe
ggcgtcctggctgtaaacatttaca

SEQ ID NO: 240832 - DNA, 25 bp, probe
gtcgtactggatgtaactagtctac

SEQ ID NO: 240833 - DNA, 25 bp, probe
gtctgtgagctgccatgttgatagt

SEQ ID NO: 240834 - DNA, 25 bp, probe
gtctgatatatgctgctcttggttc

SEQ ID NO: 240835 - DNA, 25 bp, probe
gtctgatatatgctgctcttggttc

SEQ ID NO: 240836 - DNA, 25 bp, probe
gtcgacatatggtctctgggtatca

SEQ ID NO: 240837 - DNA, 25 bp, probe
gtcgacatctaacgttttatcataa

SEQ ID NO: 240838 - DNA, 25 bp, probe
gtcgcaatcatatactgtttctgca

SEQ ID NO: 240839 - DNA, 25 bp, probe
gtctgctcataagtacttgtgtcat

SEQ ID NO: 240840 - DNA, 25 bp, probe
gtctgtgcaagggcagcctggacaa

SEQ ID NO: 240841 - DNA, 25 bp, probe
gtctgtcagaagagccggcgtgacc

SEQ ID NO: 240842 - DNA, 25 bp, probe
gtcggagaaataggagacaggatcc

SEQ ID NO: 240843 - DNA, 25 bp, probe
gtcgggctacacggagaagcagcgc

SEQ ID NO: 240844 - DNA, 25 bp, probe
gtctggtgtagagatggacagcctc

SEQ ID NO: 240845 - DNA, 25 bp, probe
gtctggtgccagtgtggaagctgcc

SEQ ID NO: 240846 - DNA, 25 bp, probe
gtcgtgtcacagtggacagatggcc

SEQ ID NO: 240847 - DNA, 25 bp, probe
gtcgggcagccgcacactatgagca

SEQ ID NO: 240848 - DNA, 25 bp, probe
gtccgactgcgctgacaatggacag

SEQ ID NO: 240849 - DNA, 25 bp, probe
gtccgactgcgctgacaatggacag

SEQ ID NO: 240850 - DNA, 25 bp, probe
gtcccactggatggcaagggcacgc

SEQ ID NO: 240851 - DNA, 25 bp, probe
gtcccactggatggcaagggcacgc

SEQ ID NO: 240852 - DNA, 25 bp, probe
gtctgccactacttggagtggatca

SEQ ID NO: 240853 - DNA, 25 bp, probe
gtctgccactacttggagtggatca

SEQ ID NO: 240854 - DNA, 25 bp, probe
gtctgcaaatcatgtggaggagatg

SEQ ID NO: 240855 - DNA, 25 bp, probe
gtctgcaaatgaggagtcagctgga

SEQ ID NO: 240856 - DNA, 25 bp, probe
gtctgcaagcaagtggccaggaccc

SEQ ID NO: 240857 - DNA, 25 bp, probe
gtctgcaagcaagtggccaggaccc

SEQ ID NO: 240858 - DNA, 25 bp, probe
gtcgaagcaaatgccatggacatgg

SEQ ID NO: 240859 - DNA, 25 bp, probe
gtctgaacatcagtaccaaggagta

SEQ ID NO: 240860 - DNA, 25 bp, probe
gtgctgcaggcatataccaaggggt

SEQ ID NO: 240861 - DNA, 25 bp, probe
ttccggcaaaacgatgggcagtttc

SEQ ID NO: 240862 - DNA, 25 bp, probe
gtcgcaccttcaaagtgggcagctt

SEQ ID NO: 240863 - DNA, 25 bp, probe
gtcgaatctggaatgggagggtctg

SEQ ID NO: 240864 - DNA, 25 bp, probe
gtcgtgatctgtacaggggcttgcc

SEQ ID NO: 240865 - DNA, 25 bp, probe
gtcctcatttactggatttgacttc

SEQ ID NO: 240866 - DNA, 25 bp, probe
gtcccattttgtttctttggatttg

SEQ ID NO: 240867 - DNA, 25 bp, probe
gtccctgctgtttttgcatttggaa

SEQ ID NO: 240868 - DNA, 25 bp, probe
gtccctgctgtttttgcatttggaa

SEQ ID NO: 240869 - DNA, 25 bp, probe
gtcctggctgtttggtgattgggca

SEQ ID NO: 240870 - DNA, 25 bp, probe
gtcctgactcacagggcctggaaac

SEQ ID NO: 240871 - DNA, 25 bp, probe
gtcccgtcattctgggctagaaggc

SEQ ID NO: 240872 - DNA, 25 bp, probe
gtcccgtgcctctatgggggaagca

SEQ ID NO: 240873 - DNA, 25 bp, probe
gtcccgtgcctctatgggggaagca

SEQ ID NO: 240874 - DNA, 25 bp, probe
gtcccgggacaacagcagggacagc

SEQ ID NO: 240875 - DNA, 25 bp, probe
tgtccctcggacaaaagtgaaaact

SEQ ID NO: 240876 - DNA, 25 bp, probe
tgtccctcggacaaaagtgaaaact

SEQ ID NO: 240877 - DNA, 25 bp, probe
gtcgttctggaccaaaggaacatag

SEQ ID NO: 240878 - DNA, 25 bp, probe
gtctgtctgtctgccacaaggaaat

SEQ ID NO: 240879 - DNA, 25 bp, probe
gtctgtctgtctgccacaaggaaat

SEQ ID NO: 240880 - DNA, 25 bp, probe
gtcgtcgtctccgtatcgaaatgat

SEQ ID NO: 240881 - DNA, 25 bp, probe
gtcgtcgtctccgtatcgaaatgat

SEQ ID NO: 240882 - DNA, 25 bp, probe
gtcgcctttcctgggtgacaatgat

SEQ ID NO: 240883 - DNA, 25 bp, probe
gtcctttggacaggtggccaagtgc

SEQ ID NO: 240884 - DNA, 25 bp, probe
gtccagtgggaggggcccaagatct

SEQ ID NO: 240885 - DNA, 25 bp, probe
gtccgtgggacctagactctagagt

SEQ ID NO: 240886 - DNA, 25 bp, probe
gtccgtgggacctagactctagagt

SEQ ID NO: 240887 - DNA, 25 bp, probe
gtcggtgggctgagagagctctttg

SEQ ID NO: 240888 - DNA, 25 bp, probe
gtctgtttccagaacagtgccttgg

SEQ ID NO: 240889 - DNA, 25 bp, probe
gtctggagctacggaattgtcatgt

SEQ ID NO: 240890 - DNA, 25 bp, probe
gtctggcgtgatcaacattttgtta

SEQ ID NO: 240891 - DNA, 25 bp, probe
gtctgtgtgaagcaatcatttagtt

SEQ ID NO: 240892 - DNA, 25 bp, probe
gtctggtcatatggaatattactgt

SEQ ID NO: 240893 - DNA, 25 bp, probe
gtcgaggcaatggaaaagctcatta

SEQ ID NO: 240894 - DNA, 25 bp, probe
gtctgggttgaatgacactctcaaa

SEQ ID NO: 240895 - DNA, 25 bp, probe
gtctgggttgaatgacactctcaaa

SEQ ID NO: 240896 - DNA, 25 bp, probe
gtcggtgacggggacatcttcaaga

SEQ ID NO: 240897 - DNA, 25 bp, probe
gtcggtgggtgtgatcttctatcag

SEQ ID NO: 240898 - DNA, 25 bp, probe
gtccgtagctgtcagtatgacttag

SEQ ID NO: 240899 - DNA, 25 bp, probe
gtccggacttgctgtgtatattgta

SEQ ID NO: 240900 - DNA, 25 bp, probe
gtccgagggtgctcttatttctaca

SEQ ID NO: 240901 - DNA, 25 bp, probe
gtcccaggacagtgttacttcttct

SEQ ID NO: 240902 - DNA, 25 bp, probe
gtcccaaactacagttcttgttgtg

SEQ ID NO: 240903 - DNA, 25 bp, probe
gtcccaaactacagttcttgttgtg

SEQ ID NO: 240904 - DNA, 25 bp, probe
gtcccaaacaacatttcacttacca

SEQ ID NO: 240905 - DNA, 25 bp, probe
tgtactcgaaagactttccgcttac

SEQ ID NO: 240906 - DNA, 25 bp, probe
tgtactcgaaagactttccgcttac

SEQ ID NO: 240907 - DNA, 25 bp, probe
gtgactcgaaaagcttatggtccga

SEQ ID NO: 240908 - DNA, 25 bp, probe
gtgaaggaaaaggtttgccggctga

SEQ ID NO: 240909 - DNA, 25 bp, probe
gtggaaaaaggcttctacacggagc

SEQ ID NO: 240910 - DNA, 25 bp, probe
gtgagacaagttcttttagtgccag

SEQ ID NO: 240911 - DNA, 25 bp, probe
gtgacgaacttgctttaattaattt

SEQ ID NO: 240912 - DNA, 25 bp, probe
gtgccagaaattccttacctaaagt

SEQ ID NO: 240913 - DNA, 25 bp, probe
gtccagataagtcagtcaccaacgg

SEQ ID NO: 240914 - DNA, 25 bp, probe
gtccaggcaatgcgaacccaaatgc

SEQ ID NO: 240915 - DNA, 25 bp, probe
gtcgcgcacgatggtgaagccgtag

SEQ ID NO: 240916 - DNA, 25 bp, probe
gtctgagctgtaggtaaccggcata

SEQ ID NO: 240917 - DNA, 25 bp, probe
gtgcgagctgaagcgaaaatggcga

SEQ ID NO: 240918 - DNA, 25 bp, probe
gtgcgagctgaagcgaaaatggcga

SEQ ID NO: 240919 - DNA, 25 bp, probe
gtctggaggactcaagcaatggaga

SEQ ID NO: 240920 - DNA, 25 bp, probe
gtctgcaaggacctgtgggtggaga

SEQ ID NO: 240921 - DNA, 25 bp, probe
gtcgacaggtgtctgacgtgtaaac

SEQ ID NO: 240922 - DNA, 25 bp, probe
gtcgacaggtgtctgacgtgtaaac

SEQ ID NO: 240923 - DNA, 25 bp, probe
gtccaagggctcaagactttctaac

SEQ ID NO: 240924 - DNA, 25 bp, probe
gtcgcaagtcacagaattatttgaa

SEQ ID NO: 240925 - DNA, 25 bp, probe
gtcgctaatcataataaaattcaac

SEQ ID NO: 240926 - DNA, 25 bp, probe
gtctgtaaattctaatacttgaagt

SEQ ID NO: 240927 - DNA, 25 bp, probe
gtcgtcaagttgcagatctttttgt

SEQ ID NO: 240928 - DNA, 25 bp, probe
gtccgaatgttagattcctcttgcc

SEQ ID NO: 240929 - DNA, 25 bp, probe
gtccgattgcgttatttcttctact

SEQ ID NO: 240930 - DNA, 25 bp, probe
gtccaattggttttacatctttctt

SEQ ID NO: 240931 - DNA, 25 bp, probe
gtccaaatttttatcactgtctttc

SEQ ID NO: 240932 - DNA, 25 bp, probe
gtctgtgaatttctttaatgtctaa

SEQ ID NO: 240933 - DNA, 25 bp, probe
gtctgtgaatttctggtacgtgctg

SEQ ID NO: 240934 - DNA, 25 bp, probe
gtctggacaactttgacacacagtt

SEQ ID NO: 240935 - DNA, 25 bp, probe
gtctggagctatggggtcaccatgt

SEQ ID NO: 240936 - DNA, 25 bp, probe
gtctgttgagagagcggcagccagc

SEQ ID NO: 240937 - DNA, 25 bp, probe
gtctgttgagagagcggcagccagc

SEQ ID NO: 240938 - DNA, 25 bp, probe
gtctgatcaacaagtgggcacctgc

SEQ ID NO: 240939 - DNA, 25 bp, probe
gtctgatgatacctggagcgccaag

SEQ ID NO: 240940 - DNA, 25 bp, probe
gtctgatgatacctggagcgccaag

SEQ ID NO: 240941 - DNA, 25 bp, probe
gtctgagctccatggggcacatgag

SEQ ID NO: 240942 - DNA, 25 bp, probe
gtcgagccctggaggcaatctgttt

SEQ ID NO: 240943 - DNA, 25 bp, probe
gtcgccgggatgacatggaatcgtt

SEQ ID NO: 240944 - DNA, 25 bp, probe
ttgcccgggttctcagttttggcaa

SEQ ID NO: 240945 - DNA, 25 bp, probe
tgccccgttattgtctttttggaga

SEQ ID NO: 240946 - DNA, 25 bp, probe
tgccccgttattgtctttttggaga

SEQ ID NO: 240947 - DNA, 25 bp, probe
gtcctggttattgtcggtatcggag

SEQ ID NO: 240948 - DNA, 25 bp, probe
gtcgttcctactgacattgtattgg

SEQ ID NO: 240949 - DNA, 25 bp, probe
gtccttttcactacaccatgtttga

SEQ ID NO: 240950 - DNA, 25 bp, probe
gtccattccccactagaatgtttgc

SEQ ID NO: 240951 - DNA, 25 bp, probe
gtcctatccttcttagaagcttcga

SEQ ID NO: 240952 - DNA, 25 bp, probe
gtcgcgtcctggtttaaggatgtca

SEQ ID NO: 240953 - DNA, 25 bp, probe
gtccccgctcagtctttgagcgagc

SEQ ID NO: 240954 - DNA, 25 bp, probe
gtccccactcagcatattaccaggg

SEQ ID NO: 240955 - DNA, 25 bp, probe
gtccagcctaatcaagtcaaatgga

SEQ ID NO: 240956 - DNA, 25 bp, probe
gtcgccagcatttataactcaccag

SEQ ID NO: 240957 - DNA, 25 bp, probe
gtcctactctatacaatgcttaccg

SEQ ID NO: 240958 - DNA, 25 bp, probe
gtcccagctcaggtatgagttccgc

SEQ ID NO: 240959 - DNA, 25 bp, probe
gtcgacgctacattgatgagtacag

SEQ ID NO: 240960 - DNA, 25 bp, probe
gtcgacgctacattgatgagtacag

SEQ ID NO: 240961 - DNA, 25 bp, probe
gtcgagacaacatgagtgtgatttt

SEQ ID NO: 240962 - DNA, 25 bp, probe
gtcggactagtgcctgtttattctt

SEQ ID NO: 240963 - DNA, 25 bp, probe
gtcgagagctatgaattttgatttt

SEQ ID NO: 240964 - DNA, 25 bp, probe
gtcgaagttaatgctacagattgtt

SEQ ID NO: 240965 - DNA, 25 bp, probe
gtctgattttttggctggtgagagt

SEQ ID NO: 240966 - DNA, 25 bp, probe
gtctgttcttttggatagcatgaag

SEQ ID NO: 240967 - DNA, 25 bp, probe
gtctgtgacatttcctgttgtgaag

SEQ ID NO: 240968 - DNA, 25 bp, probe
gtctgtgacatttcctgttgtgaag

SEQ ID NO: 240969 - DNA, 25 bp, probe
gtctgtgcacatgcctctgtagaga

SEQ ID NO: 240970 - DNA, 25 bp, probe
gtcgtcatgcatctgtcatgaatga

SEQ ID NO: 240971 - DNA, 25 bp, probe
gtcgtcttaatggtgaagagggatc

SEQ ID NO: 240972 - DNA, 25 bp, probe
gtctgtctttggataataggaattc

SEQ ID NO: 240973 - DNA, 25 bp, probe
gtgttcgagtggattgtaggtgcaa

SEQ ID NO: 240974 - DNA, 25 bp, probe
gtcgggaagcagattggagcagtga

SEQ ID NO: 240975 - DNA, 25 bp, probe
gtcgggaagcagattggagcagtga

SEQ ID NO: 240976 - DNA, 25 bp, probe
gtctgggagagcctggcaaggcatt

SEQ ID NO: 240977 - DNA, 25 bp, probe
gtctggacaattcggcgaagtctgg

SEQ ID NO: 240978 - DNA, 25 bp, probe
gtcggcagtttggggaagtctggat

SEQ ID NO: 240979 - DNA, 25 bp, probe
gtctggagctttgaggagatgtttt

SEQ ID NO: 240980 - DNA, 25 bp, probe
gtcggatccatagcagccatgtgct

SEQ ID NO: 240981 - DNA, 25 bp, probe
gtcggatccatagcagccatgtgct

SEQ ID NO: 240982 - DNA, 25 bp, probe
gtctggaggtcccagacatgctgcc

SEQ ID NO: 240983 - DNA, 25 bp, probe
gtctggaggtcccagacatgctgcc

SEQ ID NO: 240984 - DNA, 25 bp, probe
gtgctgcgggatcagcaacgctacc

SEQ ID NO: 240985 - DNA, 25 bp, probe
gtctgggagcaaaagtctgcgacca

SEQ ID NO: 240986 - DNA, 25 bp, probe
gtcgatgtggcatgcgagccggaac

SEQ ID NO: 240987 - DNA, 25 bp, probe
gtcgtggtgcactgcagtgctggaa

SEQ ID NO: 240988 - DNA, 25 bp, probe
gtctgtgggctgtatcatggcagag

SEQ ID NO: 240989 - DNA, 25 bp, probe
gtctgtccaagattatggatgatga

SEQ ID NO: 240990 - DNA, 25 bp, probe
gtctgtgccttgctatggagtatgg

SEQ ID NO: 240991 - DNA, 25 bp, probe
gtctgtgtcttgctatggaatatgg

SEQ ID NO: 240992 - DNA, 25 bp, probe
gtctgtgctgtttgtcgtgaaaagc

SEQ ID NO: 240993 - DNA, 25 bp, probe
gtcgcctggattgggatgagaacac

SEQ ID NO: 240994 - DNA, 25 bp, probe
gtcgcctggattgggatgagaacac

SEQ ID NO: 240995 - DNA, 25 bp, probe
gtctggcatggcatgtggggcaagc

SEQ ID NO: 240996 - DNA, 25 bp, probe
gtcgtgtgcagctctgagggcagag

SEQ ID NO: 240997 - DNA, 25 bp, probe
gtcgcagtgcgcactggaggagtac

SEQ ID NO: 240998 - DNA, 25 bp, probe
gtcgcaatgtatctgctgagcaaaa

SEQ ID NO: 240999 - DNA, 25 bp, probe
gtcgcaatgtatctgctgagcaaaa

SEQ ID NO: 241000 - DNA, 25 bp, probe
gtcgagtgcatcgccatgagcaaca

SEQ ID NO: 241001 - DNA, 25 bp, probe
gtcgtgtgactcagtgcagagacag

SEQ ID NO: 241002 - DNA, 25 bp, probe
gtctggtgatggagtctgacgcagg

SEQ ID NO: 241003 - DNA, 25 bp, probe
gtctggtgtggacgatcctgtggga

SEQ ID NO: 241004 - DNA, 25 bp, probe
gtcggctggaagctgctttggcgag

SEQ ID NO: 241005 - DNA, 25 bp, probe
gtccgcaggaagctgcttcgggggg

SEQ ID NO: 241006 - DNA, 25 bp, probe
gtcggcatcaggtgtgtgtgccggg

SEQ ID NO: 241007 - DNA, 25 bp, probe
gtcgacatcagttgtgtgtgggggg

SEQ ID NO: 241008 - DNA, 25 bp, probe
gtcgatcacaactggggaggaggtg

SEQ ID NO: 241009 - DNA, 25 bp, probe
gtcggaaacaggcatggggagattg

SEQ ID NO: 241010 - DNA, 25 bp, probe
gtcggaagacgacgaggactgctat

SEQ ID NO: 241011 - DNA, 25 bp, probe
gtcgcccaggcgacaaaagtgctag

SEQ ID NO: 241012 - DNA, 25 bp, probe
gtgcgtccgagaggcaacaaggttt

SEQ ID NO: 241013 - DNA, 25 bp, probe
gtgcgtccgagaggcaacaaggttt

SEQ ID NO: 241014 - DNA, 25 bp, probe
gtctggccaagacgtgatcaaggct

SEQ ID NO: 241015 - DNA, 25 bp, probe
gtctggcccggaatgtagcagcagc

SEQ ID NO: 241016 - DNA, 25 bp, probe
gtcgggccgtgaagtatctgcagat

SEQ ID NO: 241017 - DNA, 25 bp, probe
gtcgggccgtgaagtatctgcagat

SEQ ID NO: 241018 - DNA, 25 bp, probe
gtcgtccaggaaagattgtgcagat

SEQ ID NO: 241019 - DNA, 25 bp, probe
gtcgtcctgcagtatgagatttctc

SEQ ID NO: 241020 - DNA, 25 bp, probe
gtcgtctgtcaatgatgtgtcttca

SEQ ID NO: 241021 - DNA, 25 bp, probe
gtcgtctgtcaatgatgtgtcttca

SEQ ID NO: 241022 - DNA, 25 bp, probe
gtctgtgtgtgtgtgtgtatgtata

SEQ ID NO: 241023 - DNA, 25 bp, probe
gtcgtgcatgtgggatgtatttgaa

SEQ ID NO: 241024 - DNA, 25 bp, probe
gtctgtgtgtgtgcatgtatgtgtg

SEQ ID NO: 241025 - DNA, 25 bp, probe
gtcggatgtgaggttcagcagtgcc

SEQ ID NO: 241026 - DNA, 25 bp, probe
gtcgtcgtgactgtcagtattctcg

SEQ ID NO: 241027 - DNA, 25 bp, probe
gtcccagatgagcctctattttcat

SEQ ID NO: 241028 - DNA, 25 bp, probe
gtcggagagtatcgtctgtgtccat

SEQ ID NO: 241029 - DNA, 25 bp, probe
gtcgtgactgtcagtattctcgcta

SEQ ID NO: 241030 - DNA, 25 bp, probe
gtcgtcaatgatgagtcctctctgg

SEQ ID NO: 241031 - DNA, 25 bp, probe
gtcgtttggagtcctcctgatggaa

SEQ ID NO: 241032 - DNA, 25 bp, probe
gtgaggttggtgtgtcactggtcaa

SEQ ID NO: 241033 - DNA, 25 bp, probe
gtgaaggtggtgggatcacctctga

SEQ ID NO: 241034 - DNA, 25 bp, probe
gtcgaagtagtggtgctcagcctgc

SEQ ID NO: 241035 - DNA, 25 bp, probe
gtcgtagtcagtgctgtctgtctgc

SEQ ID NO: 241036 - DNA, 25 bp, probe
gtcgtatcctggtgaatgtctgttc

SEQ ID NO: 241037 - DNA, 25 bp, probe
gtcgtatcctggtgaatgtctgttc

SEQ ID NO: 241038 - DNA, 25 bp, probe
gtccttcctggagataggtttcaac

SEQ ID NO: 241039 - DNA, 25 bp, probe
gtccctcattactcgggtttcatat

SEQ ID NO: 241040 - DNA, 25 bp, probe
gtccccattcccaggggatgatgag

SEQ ID NO: 241041 - DNA, 25 bp, probe
gtcccacaatcgcagacgaggcggc

SEQ ID NO: 241042 - DNA, 25 bp, probe
gtgctgccacggcaggcccaggcca

SEQ ID NO: 241043 - DNA, 25 bp, probe
gtctggacagtgaggcctctgtcca

SEQ ID NO: 241044 - DNA, 25 bp, probe
gtctggtatgtgaggcgtgcgtgaa

SEQ ID NO: 241045 - DNA, 25 bp, probe
gtctggtttgcagagcttgaacaca

SEQ ID NO: 241046 - DNA, 25 bp, probe
gtcgagtgcggagcagttgatagaa

SEQ ID NO: 241047 - DNA, 25 bp, probe
gtctgtgtcggttttcaataacaag

SEQ ID NO: 241048 - DNA, 25 bp, probe
gtctgtgtccattttttaatcagcc

SEQ ID NO: 241049 - DNA, 25 bp, probe
gtcgggcatacttatttatatccat

SEQ ID NO: 241050 - DNA, 25 bp, probe
gtcggttagtcattgatagaactac

SEQ ID NO: 241051 - DNA, 25 bp, probe
tgtcggaaggaaatataaactgctt

SEQ ID NO: 241052 - DNA, 25 bp, probe
gtcgcagaagagtgtcagaacaatc

SEQ ID NO: 241053 - DNA, 25 bp, probe
gtcggcacatcactgagtcagtcaa

SEQ ID NO: 241054 - DNA, 25 bp, probe
gtctggctcacactggaagcagcta

SEQ ID NO: 241055 - DNA, 25 bp, probe
gtcgtctgccaccatgaagattgat

SEQ ID NO: 241056 - DNA, 25 bp, probe
gtcgtcatgctcaacagagtgatgg

SEQ ID NO: 241057 - DNA, 25 bp, probe
gtcgatgtgtctaccaggcagcgaa

SEQ ID NO: 241058 - DNA, 25 bp, probe
gtcgatgtgtctaccaggcagcgaa

SEQ ID NO: 241059 - DNA, 25 bp, probe
gtcgctgttgaacccagagctgatt

SEQ ID NO: 241060 - DNA, 25 bp, probe
gtcgctgttgaacccagagctgatt

SEQ ID NO: 241061 - DNA, 25 bp, probe
gtcgctgttgaacccagagctgatt

SEQ ID NO: 241062 - DNA, 25 bp, probe
gtcccaagaggaattacaagagtac

SEQ ID NO: 241063 - DNA, 25 bp, probe
gtcccaaggagcaatacatcgaagc

SEQ ID NO: 241064 - DNA, 25 bp, probe
gtcctgcagggtgtccaccaagaag

SEQ ID NO: 241065 - DNA, 25 bp, probe
gtgccgtagactgtcccgaaaatat

SEQ ID NO: 241066 - DNA, 25 bp, probe
gtgatagaagtcgggccctgaaaag

SEQ ID NO: 241067 - DNA, 25 bp, probe
gtgaaaaatcagggtgcctgcggca

SEQ ID NO: 241068 - DNA, 25 bp, probe
gtgactattaccggatccagggccg

SEQ ID NO: 241069 - DNA, 25 bp, probe
gtgactattaccggatccagggccg

SEQ ID NO: 241070 - DNA, 25 bp, probe
gtgacttctgaccataagctagaac

SEQ ID NO: 241071 - DNA, 25 bp, probe
gtgacttctgaccataagctagaac

SEQ ID NO: 241072 - DNA, 25 bp, probe
gtcccttggccatatcaaggcagca

SEQ ID NO: 241073 - DNA, 25 bp, probe
gtcctttgtctaagtagggccaggg

SEQ ID NO: 241074 - DNA, 25 bp, probe
gtccttatcaacaaggagggccatg

SEQ ID NO: 241075 - DNA, 25 bp, probe
gtcggttcaagcgagtggtggagac

SEQ ID NO: 241076 - DNA, 25 bp, probe
gtcgcttcaagagggtggtggagac

SEQ ID NO: 241077 - DNA, 25 bp, probe
gtccctcacaagcagggtggcaaca

SEQ ID NO: 241078 - DNA, 25 bp, probe
gtccccaaaaagccgtgagtcaggc

SEQ ID NO: 241079 - DNA, 25 bp, probe
gtccccaaggactagtggagtcctg

SEQ ID NO: 241080 - DNA, 25 bp, probe
gtcctagcaaagctggatggggttg

SEQ ID NO: 241081 - DNA, 25 bp, probe
gtccgagaagggacatgtgggacgt

SEQ ID NO: 241082 - DNA, 25 bp, probe
gtcggagggctggacatttgtggca

SEQ ID NO: 241083 - DNA, 25 bp, probe
gtcgccagttgtgcacttttacaag

SEQ ID NO: 241084 - DNA, 25 bp, probe
gtcctccttgtgggtagttaagagt

SEQ ID NO: 241085 - DNA, 25 bp, probe
gtcctctctaggagcaaattggggg

SEQ ID NO: 241086 - DNA, 25 bp, probe
gtcctctctaggagcaaattggggg

SEQ ID NO: 241087 - DNA, 25 bp, probe
gtcccctagtgagggactgtgttga

SEQ ID NO: 241088 - DNA, 25 bp, probe
gtccaccttcatttaactctttgaa

SEQ ID NO: 241089 - DNA, 25 bp, probe
gtccaggtccatttagtttttggat

SEQ ID NO: 241090 - DNA, 25 bp, probe
gtcctttccaatacgattttctgtt

SEQ ID NO: 241091 - DNA, 25 bp, probe
gtccttttgatgttagtatttcttg

SEQ ID NO: 241092 - DNA, 25 bp, probe
gtcctcttcatttttgggaactcct

SEQ ID NO: 241093 - DNA, 25 bp, probe
gtcctcttattcctaaggtaatcct

SEQ ID NO: 241094 - DNA, 25 bp, probe
gtccctgttattgagggattatccc

SEQ ID NO: 241095 - DNA, 25 bp, probe
gtgtcctgggactgagggttactcc

SEQ ID NO: 241096 - DNA, 25 bp, probe
gtgccggacgagtgggaggtgtctc

SEQ ID NO: 241097 - DNA, 25 bp, probe
gtgccggacgagtgggaggtgtctc

SEQ ID NO: 241098 - DNA, 25 bp, probe
gtcctgtgactctgggagaggtgac

SEQ ID NO: 241099 - DNA, 25 bp, probe
gtcctgtgactctgggagaggtgac

SEQ ID NO: 241100 - DNA, 25 bp, probe
gtcctgctggacacggagtgggtgc

SEQ ID NO: 241101 - DNA, 25 bp, probe
gtcccatggatgatcctggggtctc

SEQ ID NO: 241102 - DNA, 25 bp, probe
gtcctatgggaacagagggtctttt

SEQ ID NO: 241103 - DNA, 25 bp, probe
gtcctgttggaccacgagggtcact

SEQ ID NO: 241104 - DNA, 25 bp, probe
gtccgttccatctgtgagaaatcac

SEQ ID NO: 241105 - DNA, 25 bp, probe
gtcccttctacaggcatgaggaatc

SEQ ID NO: 241106 - DNA, 25 bp, probe
gtcccattgataattcgagcaaaca

SEQ ID NO: 241107 - DNA, 25 bp, probe
gtcccattgataattcgagcaaaca

SEQ ID NO: 241108 - DNA, 25 bp, probe
gtcctttgcattatctgatcaaatt

SEQ ID NO: 241109 - DNA, 25 bp, probe
gtcgtttatgtactactgaactgta

SEQ ID NO: 241110 - DNA, 25 bp, probe
gtcgtgtatggtagggtaagtgaga

SEQ ID NO: 241111 - DNA, 25 bp, probe
gtcgatggggccagagatgaaggga

SEQ ID NO: 241112 - DNA, 25 bp, probe
gtcgctgtgtggcctcagaatattt

SEQ ID NO: 241113 - DNA, 25 bp, probe
gtcgctggatgctgatctaatcagt

SEQ ID NO: 241114 - DNA, 25 bp, probe
gtccatgtgatgcgcacattagcga

SEQ ID NO: 241115 - DNA, 25 bp, probe
gtcggatgagtggcagctgctgaaa

SEQ ID NO: 241116 - DNA, 25 bp, probe
gtcggatgagtggcagctgctgaaa

SEQ ID NO: 241117 - DNA, 25 bp, probe
gtcggtgagtgagcagatcaagaag

SEQ ID NO: 241118 - DNA, 25 bp, probe
gtcgtgatgaggaccacatcgctca

SEQ ID NO: 241119 - DNA, 25 bp, probe
gtcgtgggccatgagctgactcatg

SEQ ID NO: 241120 - DNA, 25 bp, probe
gtcgtgggccatgagctgactcatg

SEQ ID NO: 241121 - DNA, 25 bp, probe
gtcgtggactgggatgtgcaccatg

SEQ ID NO: 241122 - DNA, 25 bp, probe
gtcctgcagaatgggagctaccgct

SEQ ID NO: 241123 - DNA, 25 bp, probe
gtcgcgcggatcatgatgccaacct

SEQ ID NO: 241124 - DNA, 25 bp, probe
gtcgccgtcatcatggacaactttg

SEQ ID NO: 241125 - DNA, 25 bp, probe
ggccgcccatcatggttaattctgt

SEQ ID NO: 241126 - DNA, 25 bp, probe
ggccgcccatcatggttaattctgt

SEQ ID NO: 241127 - DNA, 25 bp, probe
gtcgatgccctgtagtttgaaagtg

SEQ ID NO: 241128 - DNA, 25 bp, probe
gtcctcctcgctatgttggaaatgt

SEQ ID NO: 241129 - DNA, 25 bp, probe
gtcctcctcgctatgttggaaatgt

SEQ ID NO: 241130 - DNA, 25 bp, probe
ggtctccccagtgggggataagtct

SEQ ID NO: 241131 - DNA, 25 bp, probe
gtgttccctctttggggcaaattct

SEQ ID NO: 241132 - DNA, 25 bp, probe
ggtcccctcttttggggtagatgcg

SEQ ID NO: 241133 - DNA, 25 bp, probe
ggtcccctcttttggggtagatgcg

SEQ ID NO: 241134 - DNA, 25 bp, probe
ggtattcctttattatgtggttagc

SEQ ID NO: 241135 - DNA, 25 bp, probe
ggtattcctttattatgtggttagc

SEQ ID NO: 241136 - DNA, 25 bp, probe
gtgaattgccttgaaccatggttaa

SEQ ID NO: 241137 - DNA, 25 bp, probe
gtgaattgccttgaaccatggttaa

SEQ ID NO: 241138 - DNA, 25 bp, probe
gtccaatcctaggacagccttgttc

SEQ ID NO: 241139 - DNA, 25 bp, probe
gtccagtcctaggcaaaatttcatg

SEQ ID NO: 241140 - DNA, 25 bp, probe
gtccactgccaaaagagtagttgct

SEQ ID NO: 241141 - DNA, 25 bp, probe
gtcccccaaacatgttgtacatttc

SEQ ID NO: 241142 - DNA, 25 bp, probe
gtcctaaaacactggagtatgcttc

SEQ ID NO: 241143 - DNA, 25 bp, probe
gtccatgaaaaccaggggcttgccc

SEQ ID NO: 241144 - DNA, 25 bp, probe
gtcctgaaagcccaggtggacagag

SEQ ID NO: 241145 - DNA, 25 bp, probe
gtcctgaaggccacggttcaggccc

SEQ ID NO: 241146 - DNA, 25 bp, probe
gtcggagtggtctctggtagaaccc

SEQ ID NO: 241147 - DNA, 25 bp, probe
gtcggaggaatctccagtatgagaa

SEQ ID NO: 241148 - DNA, 25 bp, probe
gtcgcgaagaaatcacagccaagga

SEQ ID NO: 241149 - DNA, 25 bp, probe
gtcggggaaaccagcacgatgtgcc

SEQ ID NO: 241150 - DNA, 25 bp, probe
gtcggggaaaccagcacgatgtgcc

SEQ ID NO: 241151 - DNA, 25 bp, probe
gtcgggagaaaggtcgctgtgtggc

SEQ ID NO: 241152 - DNA, 25 bp, probe
gtcgggagaaaggtcgctgtgtggc

SEQ ID NO: 241153 - DNA, 25 bp, probe
ttacttgagtgtcactcagcaacac

SEQ ID NO: 241154 - DNA, 25 bp, probe
gtcctgaaaataggtgacaacggca

SEQ ID NO: 241155 - DNA, 25 bp, probe
gtccgcctgtaagagaaacgagtat

SEQ ID NO: 241156 - DNA, 25 bp, probe
gtcccacccacagagggagggcttt

SEQ ID NO: 241157 - DNA, 25 bp, probe
gtccgcctcgagcggggagggtaat

SEQ ID NO: 241158 - DNA, 25 bp, probe
gtcgcagctctggtgggaggaaggc

SEQ ID NO: 241159 - DNA, 25 bp, probe
gtcccttgagggagcgtggagctgc

SEQ ID NO: 241160 - DNA, 25 bp, probe
gtccttttggagagtggtgagaaaa

SEQ ID NO: 241161 - DNA, 25 bp, probe
gtccttttggagagtggtgagaaaa

SEQ ID NO: 241162 - DNA, 25 bp, probe
gtccttctgtagtgccatggtagaa

SEQ ID NO: 241163 - DNA, 25 bp, probe
gtccttctgtagtgccatggtagaa

SEQ ID NO: 241164 - DNA, 25 bp, probe
gtccggtgctcagactgtggattga

SEQ ID NO: 241165 - DNA, 25 bp, probe
gtccagaatccctccatgaattgat

SEQ ID NO: 241166 - DNA, 25 bp, probe
gtcctcaattactccaacatagaca

SEQ ID NO: 241167 - DNA, 25 bp, probe
gtcgacaatgtgaaagcccatttaa

SEQ ID NO: 241168 - DNA, 25 bp, probe
gtcgaccaggaaagccacacggaga

SEQ ID NO: 241169 - DNA, 25 bp, probe
gtcgggcccagaggccactaagaga

SEQ ID NO: 241170 - DNA, 25 bp, probe
gtcgtccccagagctggcgaagaag

SEQ ID NO: 241171 - DNA, 25 bp, probe
gtcgtccccagagctggcgaagaag

SEQ ID NO: 241172 - DNA, 25 bp, probe
gtcctccccaagggtgagttcagca

SEQ ID NO: 241173 - DNA, 25 bp, probe
gtccaccacccagagtaatagaaca

SEQ ID NO: 241174 - DNA, 25 bp, probe
gtccaccacccagagtaatagaaca

SEQ ID NO: 241175 - DNA, 25 bp, probe
gtccaccacccagagtaatagaaca

SEQ ID NO: 241176 - DNA, 25 bp, probe
gtcctgcccccaaagtaacatggaa

SEQ ID NO: 241177 - DNA, 25 bp, probe
gtccgcccagaagccatagacgaga

SEQ ID NO: 241178 - DNA, 25 bp, probe
gtccgcccagaagccatagacgaga

SEQ ID NO: 241179 - DNA, 25 bp, probe
gtcctcaccaaagtcctacaggaag

SEQ ID NO: 241180 - DNA, 25 bp, probe
gtcctcaccaaagtcctacaggaag

SEQ ID NO: 241181 - DNA, 25 bp, probe
gtcctactccaggccaaataggagg

SEQ ID NO: 241182 - DNA, 25 bp, probe
gtcctgccacatatcctaatgaaat

SEQ ID NO: 241183 - DNA, 25 bp, probe
gtcctgccacatatcctaatgaaat

SEQ ID NO: 241184 - DNA, 25 bp, probe
tgtccagaggatatttccaaaatca

SEQ ID NO: 241185 - DNA, 25 bp, probe
gtgactgcggatgtttacactgaat

SEQ ID NO: 241186 - DNA, 25 bp, probe
gtgctggcggctggtttacgccgct

SEQ ID NO: 241187 - DNA, 25 bp, probe
gtggacgctgtgggcttcagcgtcg

SEQ ID NO: 241188 - DNA, 25 bp, probe
gggacggggagtgaggttgggcagt

SEQ ID NO: 241189 - DNA, 25 bp, probe
gggacggggagtgaggttgggcagt

SEQ ID NO: 241190 - DNA, 25 bp, probe
gggacggggagtgaggttgggcagt

SEQ ID NO: 241191 - DNA, 25 bp, probe
gggacggggagtgaggttgggcagt

SEQ ID NO: 241192 - DNA, 25 bp, probe
gggagacgggcgctagatttggggc

SEQ ID NO: 241193 - DNA, 25 bp, probe
gtgaaaagggcggtagttggtggtg

SEQ ID NO: 241194 - DNA, 25 bp, probe
gtgaaaatcggggactttgggatgt

SEQ ID NO: 241195 - DNA, 25 bp, probe
gtgaaaaaagagcttgttaatgatg

SEQ ID NO: 241196 - DNA, 25 bp, probe
gtccaaggcaagaagatagtaaatt

SEQ ID NO: 241197 - DNA, 25 bp, probe
gtccactacgagaactatggaagca

SEQ ID NO: 241198 - DNA, 25 bp, probe
gtccgttcagggtctagccaaaatc

SEQ ID NO: 241199 - DNA, 25 bp, probe
gtccaaatagcggcctcggaaaagc

SEQ ID NO: 241200 - DNA, 25 bp, probe
gtcccaagaagctctcggaaggaga

SEQ ID NO: 241201 - DNA, 25 bp, probe
gtcgccaagtggaccatcgatgagg

SEQ ID NO: 241202 - DNA, 25 bp, probe
gtcccagagctggagcttcttgcac

SEQ ID NO: 241203 - DNA, 25 bp, probe
gtcctggatctgcacagtcttctaa

SEQ ID NO: 241204 - DNA, 25 bp, probe
gtcctgcaattctacagtttcttac

SEQ ID NO: 241205 - DNA, 25 bp, probe
gtcccattgatgtactttacctgaa

SEQ ID NO: 241206 - DNA, 25 bp, probe
gtcccagtgttagggtagcatggga

SEQ ID NO: 241207 - DNA, 25 bp, probe
gtcccactttgagtacgtcaagaat

SEQ ID NO: 241208 - DNA, 25 bp, probe
gtcccactttgagtacgtcaagaat

SEQ ID NO: 241209 - DNA, 25 bp, probe
gtcgcccatgattttactgtcaaaa

SEQ ID NO: 241210 - DNA, 25 bp, probe
gtccccaatcactatagtccatgaa

SEQ ID NO: 241211 - DNA, 25 bp, probe
gtccctcagatcatcatcagtgctg

SEQ ID NO: 241212 - DNA, 25 bp, probe
gtccctcagatcatcatcagtgctg

SEQ ID NO: 241213 - DNA, 25 bp, probe
gtccttcagatctttctttgtagtg

SEQ ID NO: 241214 - DNA, 25 bp, probe
gtcccgagaatcttccttacagtac

SEQ ID NO: 241215 - DNA, 25 bp, probe
gtcccagagccatgtcaaattcagt

SEQ ID NO: 241216 - DNA, 25 bp, probe
gtcccaaagcagtgcacaattccgt

SEQ ID NO: 241217 - DNA, 25 bp, probe
gtgccaccaacaactgcacagaacc

SEQ ID NO: 241218 - DNA, 25 bp, probe
gtcgcccatgggcctgaagatcaca

SEQ ID NO: 241219 - DNA, 25 bp, probe
gtcgtctatgtgctgtgctgggcac

SEQ ID NO: 241220 - DNA, 25 bp, probe
gtcgtctatgtgctgtgctgggcac

SEQ ID NO: 241221 - DNA, 25 bp, probe
gtcccaagatctctgctggacatca

SEQ ID NO: 241222 - DNA, 25 bp, probe
gtccggatatcactccgatgacaca

SEQ ID NO: 241223 - DNA, 25 bp, probe
gtcccgagaaatgctggtcacaaac

SEQ ID NO: 241224 - DNA, 25 bp, probe
gtcctgaaagaagctgtggccaata

SEQ ID NO: 241225 - DNA, 25 bp, probe
gtcctgaaagaagctgtggccaata

SEQ ID NO: 241226 - DNA, 25 bp, probe
gtcctcaaagagggatcttcagaac

SEQ ID NO: 241227 - DNA, 25 bp, probe
gtcctcatgagggctggatgctctc

SEQ ID NO: 241228 - DNA, 25 bp, probe
gtccttcgcaggcatagcctgcgcc

SEQ ID NO: 241229 - DNA, 25 bp, probe
gtccttcctgctgaacacggtcagc

SEQ ID NO: 241230 - DNA, 25 bp, probe
gtccttccctgtaacattggatttt

SEQ ID NO: 241231 - DNA, 25 bp, probe
gtcctttccgttgctatggtgaaaa

SEQ ID NO: 241232 - DNA, 25 bp, probe
gtcctaatacgctatgtgcttggcg

SEQ ID NO: 241233 - DNA, 25 bp, probe
gtccttcatcatcgccgagatggtc

SEQ ID NO: 241234 - DNA, 25 bp, probe
gtcctgttttgcatggtggtggggt

SEQ ID NO: 241235 - DNA, 25 bp, probe
gtccgagtttgcagggtgctgagct

SEQ ID NO: 241236 - DNA, 25 bp, probe
gtccgagtttgcagggtgctgagct

SEQ ID NO: 241237 - DNA, 25 bp, probe
gtcccatcctggcagaggtcaagca

SEQ ID NO: 241238 - DNA, 25 bp, probe
gtccctgcccgtgggacatcatgac

SEQ ID NO: 241239 - DNA, 25 bp, probe
gtccgcttccaggtggacatcagct

SEQ ID NO: 241240 - DNA, 25 bp, probe
gtccgcttccaggtggacatcagct

SEQ ID NO: 241241 - DNA, 25 bp, probe
gtcctggctccagttggaacacttt

SEQ ID NO: 241242 - DNA, 25 bp, probe
gtcctggtctacatgctcaaacacc

SEQ ID NO: 241243 - DNA, 25 bp, probe
gtcctttgcaagagcgcagaccacc

SEQ ID NO: 241244 - DNA, 25 bp, probe
gtcctgtggcatccacgaaactacc

SEQ ID NO: 241245 - DNA, 25 bp, probe
gtcctgggattcaacccactattac

SEQ ID NO: 241246 - DNA, 25 bp, probe
gtcctggtgaataacaagccttctc

SEQ ID NO: 241247 - DNA, 25 bp, probe
gtcctggggagattacccttgtgcc

SEQ ID NO: 241248 - DNA, 25 bp, probe
gtccgctggggaagatgccgcgggc

SEQ ID NO: 241249 - DNA, 25 bp, probe
gtccgctggggaagatgccgcgggc

SEQ ID NO: 241250 - DNA, 25 bp, probe
gtccgcgggaggatggagcagtgag

SEQ ID NO: 241251 - DNA, 25 bp, probe
gtccgaggtagccttcaatcactgg

SEQ ID NO: 241252 - DNA, 25 bp, probe
gtgccgggaagactggccaaatcag

SEQ ID NO: 241253 - DNA, 25 bp, probe
gtgctggggttgttggcctgaagat

SEQ ID NO: 241254 - DNA, 25 bp, probe
gtgctggggttgttggcctgaagat

SEQ ID NO: 241255 - DNA, 25 bp, probe
gtgctggggttgttggcctgaagat

SEQ ID NO: 241256 - DNA, 25 bp, probe
gtgagggactgtgttgactgacgag

SEQ ID NO: 241257 - DNA, 25 bp, probe
gtgagaggaaatgttgactggccaa

SEQ ID NO: 241258 - DNA, 25 bp, probe
gtgtaatgaaggcttgtcttcctca

SEQ ID NO: 241259 - DNA, 25 bp, probe
gtgtctaaatggcttctttgttact

SEQ ID NO: 241260 - DNA, 25 bp, probe
gtccttacggcaatatgcttttgta

SEQ ID NO: 241261 - DNA, 25 bp, probe
gtcgcttacgcgatgcgggtagtat

SEQ ID NO: 241262 - DNA, 25 bp, probe
gtcccatactggcccgaggtgggca

SEQ ID NO: 241263 - DNA, 25 bp, probe
gtccaaatcggggattggtgagcca

SEQ ID NO: 241264 - DNA, 25 bp, probe
gtcctaagtgagggtctgcggaggc

SEQ ID NO: 241265 - DNA, 25 bp, probe
gtcctacagagggataccgtgaggc

SEQ ID NO: 241266 - DNA, 25 bp, probe
gtcgctacagagcccaaatgcttag

SEQ ID NO: 241267 - DNA, 25 bp, probe
gtcgctacagagcccaaatgcttag

SEQ ID NO: 241268 - DNA, 25 bp, probe
gtcgcagaagggccaggagtcggag

SEQ ID NO: 241269 - DNA, 25 bp, probe
gtccagcaacagcagcggagggtgg

SEQ ID NO: 241270 - DNA, 25 bp, probe
gtcccagcaggggcggcaggagaga

SEQ ID NO: 241271 - DNA, 25 bp, probe
gtcccacacgtggaggatcttgcgt

SEQ ID NO: 241272 - DNA, 25 bp, probe
gtcccacacctgcagagacatttaa

SEQ ID NO: 241273 - DNA, 25 bp, probe
gtcccacacgtgaaaccagcatgtg

SEQ ID NO: 241274 - DNA, 25 bp, probe
gtccagacactggaacagtatgagt

SEQ ID NO: 241275 - DNA, 25 bp, probe
gtgtataactcatgaagtgtaattc

SEQ ID NO: 241276 - DNA, 25 bp, probe
gtccattatcgctgggcatttttca

SEQ ID NO: 241277 - DNA, 25 bp, probe
gtcctttggcatttgtcaactgctt

SEQ ID NO: 241278 - DNA, 25 bp, probe
gtcctaatagttttcagtctggctt

SEQ ID NO: 241279 - DNA, 25 bp, probe
gtcctaaaggaaacccctcttcatg

SEQ ID NO: 241280 - DNA, 25 bp, probe
gtcccaacaggtacaatgacctctg

SEQ ID NO: 241281 - DNA, 25 bp, probe
gtcccaggagccaatcagaggccca

SEQ ID NO: 241282 - DNA, 25 bp, probe
gtcgccgtgcctaccatggtgacca

SEQ ID NO: 241283 - DNA, 25 bp, probe
gtccctcactccacagagtgagcca

SEQ ID NO: 241284 - DNA, 25 bp, probe
gtcgttgccttcacagtggacaatg

SEQ ID NO: 241285 - DNA, 25 bp, probe
gtgcttctcctaactcaaggacttg

SEQ ID NO: 241286 - DNA, 25 bp, probe
gtccttcactatactactgaaattg

SEQ ID NO: 241287 - DNA, 25 bp, probe
gtcctacactgctattgttgctaca

SEQ ID NO: 241288 - DNA, 25 bp, probe
gtcccacgtccatgtttgactattg

SEQ ID NO: 241289 - DNA, 25 bp, probe
gtcccacgtccatgtttgactattg

SEQ ID NO: 241290 - DNA, 25 bp, probe
gtcccaggatccagatttagcctca

SEQ ID NO: 241291 - DNA, 25 bp, probe
gtccttggatcaaatctttagcctc

SEQ ID NO: 241292 - DNA, 25 bp, probe
gtccgaggcactgatgctttcagct

SEQ ID NO: 241293 - DNA, 25 bp, probe
gtcccatgtcgtgggctatatctgc

SEQ ID NO: 241294 - DNA, 25 bp, probe
gtccttagctgcggtgctatatgcc

SEQ ID NO: 241295 - DNA, 25 bp, probe
gtccctgagcagagttacatgctcc

SEQ ID NO: 241296 - DNA, 25 bp, probe
gtccctagaaggcatcgcagtgcta

SEQ ID NO: 241297 - DNA, 25 bp, probe
gtcccgatgacctgatcggctgttc

SEQ ID NO: 241298 - DNA, 25 bp, probe
gtcccaggacagtgacatcttgttc

SEQ ID NO: 241299 - DNA, 25 bp, probe
gtcccaggacagtgacatcttgttc

SEQ ID NO: 241300 - DNA, 25 bp, probe
gtcccaggacattaaactctgatag

SEQ ID NO: 241301 - DNA, 25 bp, probe
gtcctgggaaaatacatgctgccag

SEQ ID NO: 241302 - DNA, 25 bp, probe
gtcctatggagatattacagtggaa

SEQ ID NO: 241303 - DNA, 25 bp, probe
gtcctatgatcgttttacagctata

SEQ ID NO: 241304 - DNA, 25 bp, probe
gtccatgcagattttattggcagct

SEQ ID NO: 241305 - DNA, 25 bp, probe
gtcccagaggtcatgtgagcatact

SEQ ID NO: 241306 - DNA, 25 bp, probe
gtccttggttgcaactactactaca

SEQ ID NO: 241307 - DNA, 25 bp, probe
gtgccttggtcactactgaagagct

SEQ ID NO: 241308 - DNA, 25 bp, probe
gtgccttggtcactactgaagagct

SEQ ID NO: 241309 - DNA, 25 bp, probe
gtcgctttgccatcaagaaacattc

SEQ ID NO: 241310 - DNA, 25 bp, probe
gtccctggtgctacacgacaaatcc

SEQ ID NO: 241311 - DNA, 25 bp, probe
gtccctgggttccagacggagcaga

SEQ ID NO: 241312 - DNA, 25 bp, probe
gtgcctgagcggatccgaaggagaa

SEQ ID NO: 241313 - DNA, 25 bp, probe
gtgcctgagcggatccgaaggagaa

SEQ ID NO: 241314 - DNA, 25 bp, probe
gtcctggagagaccgcacaaggggc

SEQ ID NO: 241315 - DNA, 25 bp, probe
gtcctggtggatagcttccagacgg

SEQ ID NO: 241316 - DNA, 25 bp, probe
gtcctgatggttggtgtccatgagg

SEQ ID NO: 241317 - DNA, 25 bp, probe
gtcctcaggttcttgaccatgaaca

SEQ ID NO: 241318 - DNA, 25 bp, probe
gtcctcaggttcttgaccatgaaca

SEQ ID NO: 241319 - DNA, 25 bp, probe
gtccggtttgcagtacttgcacaca

SEQ ID NO: 241320 - DNA, 25 bp, probe
gtcctggtttgggaacttcatcagc

SEQ ID NO: 241321 - DNA, 25 bp, probe
gtccatcgtttgccttaattctcga

SEQ ID NO: 241322 - DNA, 25 bp, probe
gtccatcgtttgccttaattctcga

SEQ ID NO: 241323 - DNA, 25 bp, probe
gtccatcgtgttggtcaaattcctc

SEQ ID NO: 241324 - DNA, 25 bp, probe
gtcctggtttctgagaggtcctcaa

SEQ ID NO: 241325 - DNA, 25 bp, probe
gtccggatgtttgacagtgtctttg

SEQ ID NO: 241326 - DNA, 25 bp, probe
gtccggatgtttgacagtgtctttg

SEQ ID NO: 241327 - DNA, 25 bp, probe
gtcctgtttccatacatgtttttgt

SEQ ID NO: 241328 - DNA, 25 bp, probe
gtccacactttgtccaatggttttt

SEQ ID NO: 241329 - DNA, 25 bp, probe
gtccatggcctttctaatggaattc

SEQ ID NO: 241330 - DNA, 25 bp, probe
gtcgcttcctggctaatgagatttt

SEQ ID NO: 241331 - DNA, 25 bp, probe
gtcgcttcttcaagtgaatgattct

SEQ ID NO: 241332 - DNA, 25 bp, probe
gtccccataatcagcaatgatgtct

SEQ ID NO: 241333 - DNA, 25 bp, probe
gtcccactaagcatcatcgtgatct

SEQ ID NO: 241334 - DNA, 25 bp, probe
gtcctacgatgacgtctctgtgttc

SEQ ID NO: 241335 - DNA, 25 bp, probe
gtccttatgctgtgttagtttcgtt

SEQ ID NO: 241336 - DNA, 25 bp, probe
gtccttatgctgtgttagtttcgtt

SEQ ID NO: 241337 - DNA, 25 bp, probe
gtccttgtcataactttgtgttgga

SEQ ID NO: 241338 - DNA, 25 bp, probe
gtccttgcatcaatttttcttattt

SEQ ID NO: 241339 - DNA, 25 bp, probe
gtcctgtgccaaattacctcagaat

SEQ ID NO: 241340 - DNA, 25 bp, probe
gtccattgccatatcggctcgcaaa

SEQ ID NO: 241341 - DNA, 25 bp, probe
gtccctgcctgaggatagcagctgc

SEQ ID NO: 241342 - DNA, 25 bp, probe
gtccctgcctgaggatagcagctgc

SEQ ID NO: 241343 - DNA, 25 bp, probe
gtccgatcctgagttgcagaggaag

SEQ ID NO: 241344 - DNA, 25 bp, probe
gtcgcgaggcatttggagagcaagg

SEQ ID NO: 241345 - DNA, 25 bp, probe
gtcctgggattgtgcaagaaggtca

SEQ ID NO: 241346 - DNA, 25 bp, probe
gtcctgggtgtgcccaggaggcgtc

SEQ ID NO: 241347 - DNA, 25 bp, probe
gtcgcaggagttgcatcagtgtggc

SEQ ID NO: 241348 - DNA, 25 bp, probe
gtccagggagaggcaagattgagca

SEQ ID NO: 241349 - DNA, 25 bp, probe
gtcctgcaggagctcaacgtgacgg

SEQ ID NO: 241350 - DNA, 25 bp, probe
gtccgaggaggtgtcggtgtgccag

SEQ ID NO: 241351 - DNA, 25 bp, probe
gtcctggaccctgtagggtgccatt

SEQ ID NO: 241352 - DNA, 25 bp, probe
gtcccaaccattttgagggtcacta

SEQ ID NO: 241353 - DNA, 25 bp, probe
gtccacaaccagtgaagggtctgaa

SEQ ID NO: 241354 - DNA, 25 bp, probe
gtcccaaccatgtgatgtctggagc

SEQ ID NO: 241355 - DNA, 25 bp, probe
gtcccaaccatgtgatgtctggagc

SEQ ID NO: 241356 - DNA, 25 bp, probe
gtcccaaccatgtgatgtctggagc

SEQ ID NO: 241357 - DNA, 25 bp, probe
gtcccaaccatgtctacatctggag

SEQ ID NO: 241358 - DNA, 25 bp, probe
gtcccaaccatgtctacatctggag

SEQ ID NO: 241359 - DNA, 25 bp, probe
gtcccagatctcggtgaacgtggag

SEQ ID NO: 241360 - DNA, 25 bp, probe
gtcccagatctcggtgaacgtggag

SEQ ID NO: 241361 - DNA, 25 bp, probe
gtcccagatctcagtagactgggtc

SEQ ID NO: 241362 - DNA, 25 bp, probe
gtgccaaatagccccagactgggcc

SEQ ID NO: 241363 - DNA, 25 bp, probe
gtgccaactgaagtgccgactggac

SEQ ID NO: 241364 - DNA, 25 bp, probe
gtccgcaatggagcatgtgcactgg

SEQ ID NO: 241365 - DNA, 25 bp, probe
gtcctcagatgggaattgcacagta

SEQ ID NO: 241366 - DNA, 25 bp, probe
gtccagacaggccacaagaagtcag

SEQ ID NO: 241367 - DNA, 25 bp, probe
gtccaacaggccaaggagagattta

SEQ ID NO: 241368 - DNA, 25 bp, probe
gtccgactgggcagtggaatgctga

SEQ ID NO: 241369 - DNA, 25 bp, probe
gtcgcgcaaggactcgctggacgac

SEQ ID NO: 241370 - DNA, 25 bp, probe
tggtcgagcgatggatttccgtctc

SEQ ID NO: 241371 - DNA, 25 bp, probe
atggatttccgtctctggtgtagct

SEQ ID NO: 241372 - DNA, 25 bp, probe
gtctctggtgtagctgatgatccga

SEQ ID NO: 241373 - DNA, 25 bp, probe
tgtagctgatgatccgaataactac

SEQ ID NO: 241374 - DNA, 25 bp, probe
accagccagctatcaactcgcgccc

SEQ ID NO: 241375 - DNA, 25 bp, probe
gcaactcatcgattgatttacggcg

SEQ ID NO: 241376 - DNA, 25 bp, probe
gattgatttacggcgctaaggatga

SEQ ID NO: 241377 - DNA, 25 bp, probe
taaggatgactctggtcagagatac

SEQ ID NO: 241378 - DNA, 25 bp, probe
tggtcagagatacctggcctggtct

SEQ ID NO: 241379 - DNA, 25 bp, probe
ctggtctggacacagtgcccgtgtc

SEQ ID NO: 241380 - DNA, 25 bp, probe
gtgcccgtgtcggagccgcgcgaga

SEQ ID NO: 241381 - DNA, 25 bp, probe
cgagatatggcccgcgctggagttt

SEQ ID NO: 241382 - DNA, 25 bp, probe
ggagtttcaataccggagatcatgc

SEQ ID NO: 241383 - DNA, 25 bp, probe
ggagatcatgcaagctggtggctgg

SEQ ID NO: 241384 - DNA, 25 bp, probe
ctggtggctggaccaatgtaaatat

SEQ ID NO: 241385 - DNA, 25 bp, probe
ccaatgtaaatattgtcatgaacta

SEQ ID NO: 241386 - DNA, 25 bp, probe
ttgtcatgaactatatccgtaacct

SEQ ID NO: 241387 - DNA, 25 bp, probe
tagtgaaacaggggcaatggtgcgc

SEQ ID NO: 241388 - DNA, 25 bp, probe
gtccgcacgcagaagccaggagaga

SEQ ID NO: 241389 - DNA, 25 bp, probe
gtccacccagaatctcatcggtgct

SEQ ID NO: 241390 - DNA, 25 bp, probe
gtccaccgcaaatgcttctaggcgg

SEQ ID NO: 241391 - DNA, 25 bp, probe
gtccaccgcaaatgcttctaggcgg

SEQ ID NO: 241392 - DNA, 25 bp, probe
gtcccctgcaggtagctatcaagac

SEQ ID NO: 241393 - DNA, 25 bp, probe
gtccccgacttagtccatgtgatgc

SEQ ID NO: 241394 - DNA, 25 bp, probe
gtcgcccaggctggagggcagtggc

SEQ ID NO: 241395 - DNA, 25 bp, probe
gtccgcgggctgtgtggaggagcgg

SEQ ID NO: 241396 - DNA, 25 bp, probe
gtcccggctctgtgggtgatgggga

SEQ ID NO: 241397 - DNA, 25 bp, probe
gtccaccgactgctgaggtgtgggg

SEQ ID NO: 241398 - DNA, 25 bp, probe
gtcccatccactcttgaagctgggg

SEQ ID NO: 241399 - DNA, 25 bp, probe
gtccacctcatgtctaagaacgggg

SEQ ID NO: 241400 - DNA, 25 bp, probe
gtcccaagctgagaagaatgcagca

SEQ ID NO: 241401 - DNA, 25 bp, probe
gtcccatgttatagaaactgcagca

SEQ ID NO: 241402 - DNA, 25 bp, probe
gtcccagtttagtcagatggccaaa

SEQ ID NO: 241403 - DNA, 25 bp, probe
gtcccagatacttgggaggccaagg

SEQ ID NO: 241404 - DNA, 25 bp, probe
gtcccgagtgcttgaggatgatccg

SEQ ID NO: 241405 - DNA, 25 bp, probe
gtcccgggcactgggagcatacaga

SEQ ID NO: 241406 - DNA, 25 bp, probe
gtcccgaggctatgaaattgatgaa

SEQ ID NO: 241407 - DNA, 25 bp, probe
gtccctgggccagggtctgtgtgaa

SEQ ID NO: 241408 - DNA, 25 bp, probe
gtcccttcagtaggcaagcgtctga

SEQ ID NO: 241409 - DNA, 25 bp, probe
gtccctataggatagagctggcagc

SEQ ID NO: 241410 - DNA, 25 bp, probe
gtcccagctacttgcaaggctgagg

SEQ ID NO: 241411 - DNA, 25 bp, probe
gtcgccttcatctgcaaggaaatag

SEQ ID NO: 241412 - DNA, 25 bp, probe
gtccagctcccttgctaaaaataac

SEQ ID NO: 241413 - DNA, 25 bp, probe
gtccgcctgagcttgcatttgaaat

SEQ ID NO: 241414 - DNA, 25 bp, probe
gtccgcctgagcttgcatttgaaat

SEQ ID NO: 241415 - DNA, 25 bp, probe
gtcccatgaatcttgtcataacagt

SEQ ID NO: 241416 - DNA, 25 bp, probe
gtcgccaaatgttgctgacaaactt

SEQ ID NO: 241417 - DNA, 25 bp, probe
gtcccagtcatgatgctaccagacc

SEQ ID NO: 241418 - DNA, 25 bp, probe
gtccgcatcatcatcatgctgaccg

SEQ ID NO: 241419 - DNA, 25 bp, probe
gtgcagagtgtcccagctgacacag

SEQ ID NO: 241420 - DNA, 25 bp, probe
gtgcggcgacatccatggacaattc

SEQ ID NO: 241421 - DNA, 25 bp, probe
gtgaaaaatacactggaactctggg

SEQ ID NO: 241422 - DNA, 25 bp, probe
gtgagaaaagttcaatactcttgaa

SEQ ID NO: 241423 - DNA, 25 bp, probe
gtgtgaaagcagaggggattttgga

SEQ ID NO: 241424 - DNA, 25 bp, probe
gtgctgctaaccagggccagatatt

SEQ ID NO: 241425 - DNA, 25 bp, probe
gtgctgctaaccagggccagatatt

SEQ ID NO: 241426 - DNA, 25 bp, probe
gtgcttaccatgtgggagcagtaat

SEQ ID NO: 241427 - DNA, 25 bp, probe
gtcctgagcactttgcaagagagat

SEQ ID NO: 241428 - DNA, 25 bp, probe
gtcctaatctgctgccagaattaaa

SEQ ID NO: 241429 - DNA, 25 bp, probe
gtgcctcctttgtgcaaattaaatt

SEQ ID NO: 241430 - DNA, 25 bp, probe
gtcccaccattgttcatgatgagta

SEQ ID NO: 241431 - DNA, 25 bp, probe
gtcccatttatgtgctgaagttcag

SEQ ID NO: 241432 - DNA, 25 bp, probe
gtcccacttcgaagtggaggtctgc

SEQ ID NO: 241433 - DNA, 25 bp, probe
gtcccacttcgaagtggaggtctgc

SEQ ID NO: 241434 - DNA, 25 bp, probe
gtccacagtacatacggaagtctcc

SEQ ID NO: 241435 - DNA, 25 bp, probe
gtcctggaggatgactggaacttcc

SEQ ID NO: 241436 - DNA, 25 bp, probe
gtcctggtgttctctgagacactct

SEQ ID NO: 241437 - DNA, 25 bp, probe
gtcctctgtttgcactggacatatt

SEQ ID NO: 241438 - DNA, 25 bp, probe
gtcccatgtcaacactggttcatgc

SEQ ID NO: 241439 - DNA, 25 bp, probe
gtcccagtccaaattgtctgtctgc

SEQ ID NO: 241440 - DNA, 25 bp, probe
gtcccagtccaaattgtctgtctgc

SEQ ID NO: 241441 - DNA, 25 bp, probe
gtcccactaaagatgtcagacccat

SEQ ID NO: 241442 - DNA, 25 bp, probe
gtcctccaaagacacgcagtaccat

SEQ ID NO: 241443 - DNA, 25 bp, probe
gtccccaagacactgggcttcaaat

SEQ ID NO: 241444 - DNA, 25 bp, probe
gtccctgcaagaactggttctgcca

SEQ ID NO: 241445 - DNA, 25 bp, probe
gtcccgaagcaaatctgctgtcctc

SEQ ID NO: 241446 - DNA, 25 bp, probe
gtcccgaagcaaatctgctgtcctc

SEQ ID NO: 241447 - DNA, 25 bp, probe
gtcccagaggaaagtgcgtcagatc

SEQ ID NO: 241448 - DNA, 25 bp, probe
gtccccaggagatgtggaactcggg

SEQ ID NO: 241449 - DNA, 25 bp, probe
gtccttcagggactgaagaactggg

SEQ ID NO: 241450 - DNA, 25 bp, probe
gtcctatgggagctggggatctgga

SEQ ID NO: 241451 - DNA, 25 bp, probe
gtcccagggagcttggatggaagag

SEQ ID NO: 241452 - DNA, 25 bp, probe
gtccataaggaattcgatgatgaca

SEQ ID NO: 241453 - DNA, 25 bp, probe
gtccattcgggttattagcagctaa

SEQ ID NO: 241454 - DNA, 25 bp, probe
gtcctccaacaataaagagctcaag

SEQ ID NO: 241455 - DNA, 25 bp, probe
gtccccacaggatgaaacagctgaa

SEQ ID NO: 241456 - DNA, 25 bp, probe
gtccatcccatggcaaaacgagatg

SEQ ID NO: 241457 - DNA, 25 bp, probe
gtccatcccatggaaacatgggcac

SEQ ID NO: 241458 - DNA, 25 bp, probe
gtccacctaaaattcatatgtgaca

SEQ ID NO: 241459 - DNA, 25 bp, probe
gtgaccccaaattccattatgacaa

SEQ ID NO: 241460 - DNA, 25 bp, probe
gtgaaagttaatgccaatagaaaaa

SEQ ID NO: 241461 - DNA, 25 bp, probe
gtgaaacttgtttgccaaccaataa

SEQ ID NO: 241462 - DNA, 25 bp, probe
gtgaaacagtggttgccaaaagtgg

SEQ ID NO: 241463 - DNA, 25 bp, probe
gtgaacctggacatcgccaaagaga

SEQ ID NO: 241464 - DNA, 25 bp, probe
gtgaacctggacatcgccaaagaga

SEQ ID NO: 241465 - DNA, 25 bp, probe
gtgaactcgggaccctgagggagct

SEQ ID NO: 241466 - DNA, 25 bp, probe
gtcccgagtggctcctgacaggagc

SEQ ID NO: 241467 - DNA, 25 bp, probe
gtcccagggcaagacaacaggatca

SEQ ID NO: 241468 - DNA, 25 bp, probe
gtcccagggcaagacaacaggatca

SEQ ID NO: 241469 - DNA, 25 bp, probe
gtgcttcggaccttacaacgtgtcc

SEQ ID NO: 241470 - DNA, 25 bp, probe
gtgttcggccctcagagaaggatcc

SEQ ID NO: 241471 - DNA, 25 bp, probe
ggtcctagccctcagaaactgtatc

SEQ ID NO: 241472 - DNA, 25 bp, probe
ggtcctagccctcagaaactgtatc

SEQ ID NO: 241473 - DNA, 25 bp, probe
gtgcccttgcctgaaaaactatgac

SEQ ID NO: 241474 - DNA, 25 bp, probe
gtccattctcctaagtaaagcctga

SEQ ID NO: 241475 - DNA, 25 bp, probe
gtccatgccaaccagagggtaccta

SEQ ID NO: 241476 - DNA, 25 bp, probe
gtccatgccaaccagagggtaccta

SEQ ID NO: 241477 - DNA, 25 bp, probe
gtccgcatataccaccagggacttc

SEQ ID NO: 241478 - DNA, 25 bp, probe
gtcctcagaaccctgaatgcaactt

SEQ ID NO: 241479 - DNA, 25 bp, probe
gtcctggaacacctgtactagttga

SEQ ID NO: 241480 - DNA, 25 bp, probe
gtcctgatgaacacctacagtgttg

SEQ ID NO: 241481 - DNA, 25 bp, probe
gtccttcaagaacctccaggtctag

SEQ ID NO: 241482 - DNA, 25 bp, probe
gtccttcaagaacctccaggtctag

SEQ ID NO: 241483 - DNA, 25 bp, probe
gtccttcagtaacaccagtgtaaaa

SEQ ID NO: 241484 - DNA, 25 bp, probe
gtccttcttaacttctagctaacaa

SEQ ID NO: 241485 - DNA, 25 bp, probe
gtccttcttagtttgcttgtggcct

SEQ ID NO: 241486 - DNA, 25 bp, probe
gtcctgttatttatgcttgctgcac

SEQ ID NO: 241487 - DNA, 25 bp, probe
gtgcctttggttatgggctgccgat

SEQ ID NO: 241488 - DNA, 25 bp, probe
gtccttctccttatgtgggaaatgg

SEQ ID NO: 241489 - DNA, 25 bp, probe
gtccccctcagtttagggtcaatgg

SEQ ID NO: 241490 - DNA, 25 bp, probe
gtccccagcaagtgtaggagtggtg

SEQ ID NO: 241491 - DNA, 25 bp, probe
gtccccaagcagtgccagtgggtcg

SEQ ID NO: 241492 - DNA, 25 bp, probe
gtgccccagaggtctaggataggat

SEQ ID NO: 241493 - DNA, 25 bp, probe
gtccctggagtactatggcatcgag

SEQ ID NO: 241494 - DNA, 25 bp, probe
gtccctggtttctattgatctggaa

SEQ ID NO: 241495 - DNA, 25 bp, probe
gtcccgtttcatttagtcatgtgac

SEQ ID NO: 241496 - DNA, 25 bp, probe
gtccaagcgctttattcaccgtgac

SEQ ID NO: 241497 - DNA, 25 bp, probe
gtccaacaaaactcagccagtatcc

SEQ ID NO: 241498 - DNA, 25 bp, probe
gtccaacaaactcagcgctcagttg

SEQ ID NO: 241499 - DNA, 25 bp, probe
gtccaacaaactcagcgctcagttg

SEQ ID NO: 241500 - DNA, 25 bp, probe
gtccagcatcaagccagaggccagt

SEQ ID NO: 241501 - DNA, 25 bp, probe
gtccctgtcagcacaggtgtgcatt

SEQ ID NO: 241502 - DNA, 25 bp, probe
gtccctggtgcagaggtgagcagag

SEQ ID NO: 241503 - DNA, 25 bp, probe
gtcccgagtgctatgagctgcaggt

SEQ ID NO: 241504 - DNA, 25 bp, probe
gtcccgatatctggatatctgctgg

SEQ ID NO: 241505 - DNA, 25 bp, probe
gtcctggtatctgcagatcgatctg

SEQ ID NO: 241506 - DNA, 25 bp, probe
gtcctggtcatcttaatctccattg

SEQ ID NO: 241507 - DNA, 25 bp, probe
gtcctgcagtcacctatacattatt

SEQ ID NO: 241508 - DNA, 25 bp, probe
gtccgaggccacaagagatcaagat

SEQ ID NO: 241509 - DNA, 25 bp, probe
gtccgtgacgccaagcagaggctga

SEQ ID NO: 241510 - DNA, 25 bp, probe
gtccctgaggacaaagggcaacctg

SEQ ID NO: 241511 - DNA, 25 bp, probe
gtccctgaggacaaagggcaacctg

SEQ ID NO: 241512 - DNA, 25 bp, probe
gtccctcaggaccaaagaacactcg

SEQ ID NO: 241513 - DNA, 25 bp, probe
gtccccatgaacggaacaagcatcc

SEQ ID NO: 241514 - DNA, 25 bp, probe
gtccccagagctggcgaagaagtcc

SEQ ID NO: 241515 - DNA, 25 bp, probe
gtccctgcatgaggcccacgagttc

SEQ ID NO: 241516 - DNA, 25 bp, probe
gtccgctgctggtcaccagaatgtt

SEQ ID NO: 241517 - DNA, 25 bp, probe
gtccgttgtatcacaaatcagtgtt

SEQ ID NO: 241518 - DNA, 25 bp, probe
gtccagtaatactgtatatagtggg

SEQ ID NO: 241519 - DNA, 25 bp, probe
gtccagtaaaccaaagctcctggtg

SEQ ID NO: 241520 - DNA, 25 bp, probe
gtccagtagtatgaaggccctgctc

SEQ ID NO: 241521 - DNA, 25 bp, probe
gtccccaggatggatcagggctatg

SEQ ID NO: 241522 - DNA, 25 bp, probe
gtccccaggatggatcagggctatg

SEQ ID NO: 241523 - DNA, 25 bp, probe
gtgcttatgcaggattccaggttat

SEQ ID NO: 241524 - DNA, 25 bp, probe
gtccattggccttaagtgtctagag

SEQ ID NO: 241525 - DNA, 25 bp, probe
gtcctagagcctgtagctgcttcaa

SEQ ID NO: 241526 - DNA, 25 bp, probe
gtccttgagtgctcttgctattaac

SEQ ID NO: 241527 - DNA, 25 bp, probe
gtccttggtcaactatcttaataaa

SEQ ID NO: 241528 - DNA, 25 bp, probe
gtccttcgtcaaagactgccttact

SEQ ID NO: 241529 - DNA, 25 bp, probe
gtccttcgtcaaagactgccttact

SEQ ID NO: 241530 - DNA, 25 bp, probe
gtccttcgtcaaagactgccttact

SEQ ID NO: 241531 - DNA, 25 bp, probe
gtccttcttggaagactacttcact

SEQ ID NO: 241532 - DNA, 25 bp, probe
gtccttcttggaagactacttcact

SEQ ID NO: 241533 - DNA, 25 bp, probe
gtcctttgagtgacaacttctccgt

SEQ ID NO: 241534 - DNA, 25 bp, probe
gtcctttgagtgacaacttctccgt

SEQ ID NO: 241535 - DNA, 25 bp, probe
gtcctgttgttggagagttcccatg

SEQ ID NO: 241536 - DNA, 25 bp, probe
gtcctgttgttggagagttcccatg

SEQ ID NO: 241537 - DNA, 25 bp, probe
gtcctggagacagaagttcaccagc

SEQ ID NO: 241538 - DNA, 25 bp, probe
gtcctggagacagaagttcaccagc

SEQ ID NO: 241539 - DNA, 25 bp, probe
gtcccgagcaatgaagtcatccact

SEQ ID NO: 241540 - DNA, 25 bp, probe
gtcctcagagcaagaaagctacgga

SEQ ID NO: 241541 - DNA, 25 bp, probe
gtcctctgaacacagagtccctgaa

SEQ ID NO: 241542 - DNA, 25 bp, probe
gtcctctgaagacaagacttctaaa

SEQ ID NO: 241543 - DNA, 25 bp, probe
gtccttaaagttgttctcccaagag

SEQ ID NO: 241544 - DNA, 25 bp, probe
gtgtgttaaaggattaccccatata

SEQ ID NO: 241545 - DNA, 25 bp, probe
gtgtgttaaaggattaccccatata

SEQ ID NO: 241546 - DNA, 25 bp, probe
gtgtaaggaaggattacggccagga

SEQ ID NO: 241547 - DNA, 25 bp, probe
gtgtacaaggggatcgacaaccaca

SEQ ID NO: 241548 - DNA, 25 bp, probe
tggtcaccaatgagtacccgacccg

SEQ ID NO: 241549 - DNA, 25 bp, probe
gggtctgaagggagcccaaccagga

SEQ ID NO: 241550 - DNA, 25 bp, probe
gggtaatcgggaagccctaatccag

SEQ ID NO: 241551 - DNA, 25 bp, probe
gggccaagtaggggccctcattcct

SEQ ID NO: 241552 - DNA, 25 bp, probe
ggggaaaaacaacctccatatcctg

SEQ ID NO: 241553 - DNA, 25 bp, probe
gtgcgagaaaacaaactgctgctta

SEQ ID NO: 241554 - DNA, 25 bp, probe
gtgcgagaaaacaaactgctgctta

SEQ ID NO: 241555 - DNA, 25 bp, probe
gtccgaaaataattccttgatcata

SEQ ID NO: 241556 - DNA, 25 bp, probe
gtccagacgaagtgacgttgagatc

SEQ ID NO: 241557 - DNA, 25 bp, probe
gtccaaaagtgttgactgtgtcatt

SEQ ID NO: 241558 - DNA, 25 bp, probe
gtccacaagtggaatttcttcttca

SEQ ID NO: 241559 - DNA, 25 bp, probe
gtccagaacttcttaatcttccatc

SEQ ID NO: 241560 - DNA, 25 bp, probe
gtccaaggcctcgttgacatttaca

SEQ ID NO: 241561 - DNA, 25 bp, probe
gtcctcaccacagatggaattaact

SEQ ID NO: 241562 - DNA, 25 bp, probe
gtcctaaagcaattgaagttgtagt

SEQ ID NO: 241563 - DNA, 25 bp, probe
gtcctaatatcatagatcactttat

SEQ ID NO: 241564 - DNA, 25 bp, probe
gtcctaaatcattttattatctcat

SEQ ID NO: 241565 - DNA, 25 bp, probe
gtcctatatacttgacactttctcc

SEQ ID NO: 241566 - DNA, 25 bp, probe
gtcctttgaaagcttttctcttctc

SEQ ID NO: 241567 - DNA, 25 bp, probe
gtgctcaattgaaaaggttcctttt

SEQ ID NO: 241568 - DNA, 25 bp, probe
gtccattttggagggatccattttg

SEQ ID NO: 241569 - DNA, 25 bp, probe
gtgcctattttactggctttattgt

SEQ ID NO: 241570 - DNA, 25 bp, probe
gtgccaatagtaagtggctatttgt

SEQ ID NO: 241571 - DNA, 25 bp, probe
gtccaagccatcaagtgctttcttt

SEQ ID NO: 241572 - DNA, 25 bp, probe
gtccaagtgcatgatgtttctccag

SEQ ID NO: 241573 - DNA, 25 bp, probe
gtccacaggcactgaggacccaggc

SEQ ID NO: 241574 - DNA, 25 bp, probe
gtccacgggtctaggagcctgagag

SEQ ID NO: 241575 - DNA, 25 bp, probe
tgtccaaaggtctcacccatgaacc

SEQ ID NO: 241576 - DNA, 25 bp, probe
gtcctaagagtatcatctgccagag

SEQ ID NO: 241577 - DNA, 25 bp, probe
gtcctggaacaattgcacaccagca

SEQ ID NO: 241578 - DNA, 25 bp, probe
gtccggacatcctatgtcccagagg

SEQ ID NO: 241579 - DNA, 25 bp, probe
gtcctggaacaggatgtctctctgt

SEQ ID NO: 241580 - DNA, 25 bp, probe
gtcctggccaagaactcagtcattt

SEQ ID NO: 241581 - DNA, 25 bp, probe
gtcctggtgagaatttatggcaata

SEQ ID NO: 241582 - DNA, 25 bp, probe
gtccttgtggttctcagtgcacatg

SEQ ID NO: 241583 - DNA, 25 bp, probe
gtcctgatgccgtgttcaggctcat

SEQ ID NO: 241584 - DNA, 25 bp, probe
gtcctgactctgtgtataagctgat

SEQ ID NO: 241585 - DNA, 25 bp, probe
gtcctgttcttggtcatgtatgtgg

SEQ ID NO: 241586 - DNA, 25 bp, probe
gtccattgacttgtggtcagctggc

SEQ ID NO: 241587 - DNA, 25 bp, probe
gtgccactcactgaaggagagcttc

SEQ ID NO: 241588 - DNA, 25 bp, probe
gtgccactcactgaaggagagcttc

SEQ ID NO: 241589 - DNA, 25 bp, probe
gtgccactcactgaaggagagcttc

SEQ ID NO: 241590 - DNA, 25 bp, probe
gtcctccactcagaggcagagactg

SEQ ID NO: 241591 - DNA, 25 bp, probe
gtccacgcagaagcaggctcaacag

SEQ ID NO: 241592 - DNA, 25 bp, probe
gtccacgcagaagcaggctcaacag

SEQ ID NO: 241593 - DNA, 25 bp, probe
gtccagcctattgcaggcttttcct

SEQ ID NO: 241594 - DNA, 25 bp, probe
gtccactgtgaagctgggttctcct

SEQ ID NO: 241595 - DNA, 25 bp, probe
gtccatcgggaggcaaggcctcatc

SEQ ID NO: 241596 - DNA, 25 bp, probe
gtcctgctgtgggagatcgtgaccc

SEQ ID NO: 241597 - DNA, 25 bp, probe
gtccaggagatgggatggtacctcc

SEQ ID NO: 241598 - DNA, 25 bp, probe
gtccaggagatgggatggtacctcc

SEQ ID NO: 241599 - DNA, 25 bp, probe
gtccatgacagtcgtgtttgacccc

SEQ ID NO: 241600 - DNA, 25 bp, probe
gtccagcactgatgtgtctaccttc

SEQ ID NO: 241601 - DNA, 25 bp, probe
gtccagcttgaacatctagaattcc

SEQ ID NO: 241602 - DNA, 25 bp, probe
gtgcgactggatcttgctaacattc

SEQ ID NO: 241603 - DNA, 25 bp, probe
gtccagctcagtatctgcaacaaga

SEQ ID NO: 241604 - DNA, 25 bp, probe
gtcctgcaatgtcctggctgtagaa

SEQ ID NO: 241605 - DNA, 25 bp, probe
gtcctgcaatgtcctggctgtagaa

SEQ ID NO: 241606 - DNA, 25 bp, probe
gtcctgcatctggcttagctgaaga

SEQ ID NO: 241607 - DNA, 25 bp, probe
gtcctgcatctggcttagctgaaga

SEQ ID NO: 241608 - DNA, 25 bp, probe
gtcctgcatcttctataaacaggca

SEQ ID NO: 241609 - DNA, 25 bp, probe
gtcctccagtgcttgaatatcagcg

SEQ ID NO: 241610 - DNA, 25 bp, probe
gtccttgcacacctggattcagggc

SEQ ID NO: 241611 - DNA, 25 bp, probe
gtcctcccagagtgattcagcactg

SEQ ID NO: 241612 - DNA, 25 bp, probe
gtcctccatgagcatggcatagtcc

SEQ ID NO: 241613 - DNA, 25 bp, probe
gtccatcctgacctggtatggtcat

SEQ ID NO: 241614 - DNA, 25 bp, probe
gtccatggtagtcagtatggctcaa

SEQ ID NO: 241615 - DNA, 25 bp, probe
gtcctagctactcagtagtcttagg

SEQ ID NO: 241616 - DNA, 25 bp, probe
gtcctggtacagcagggtcttgctg

SEQ ID NO: 241617 - DNA, 25 bp, probe
gtgcctggcagatgaaggagttttc

SEQ ID NO: 241618 - DNA, 25 bp, probe
gtccgctctgatgtctggagtttgg

SEQ ID NO: 241619 - DNA, 25 bp, probe
gtgctggtgcttgttgtacctatgg

SEQ ID NO: 241620 - DNA, 25 bp, probe
gtgcggtgctgaaagtaccccgcgc

SEQ ID NO: 241621 - DNA, 25 bp, probe
gtgcggtgctgaaagtaccccgcgc

SEQ ID NO: 241622 - DNA, 25 bp, probe
gtgccggtgaaagtgaccgacaggt

SEQ ID NO: 241623 - DNA, 25 bp, probe
gtcctggatgatttctacacagcca

SEQ ID NO: 241624 - DNA, 25 bp, probe
gtcctggatgatttctacacagcca

SEQ ID NO: 241625 - DNA, 25 bp, probe
gtcctccattgtactgaacagacag

SEQ ID NO: 241626 - DNA, 25 bp, probe
gtcctgcctctgcacgaggagatag

SEQ ID NO: 241627 - DNA, 25 bp, probe
gtcctgcctctgcacgaggagatag

SEQ ID NO: 241628 - DNA, 25 bp, probe
gtgcttcccattccaggggatgagc

SEQ ID NO: 241629 - DNA, 25 bp, probe
gtcctccggagccaggagagtgagg

SEQ ID NO: 241630 - DNA, 25 bp, probe
gtcctgtgcggaccggcagagaaca

SEQ ID NO: 241631 - DNA, 25 bp, probe
gtccgagagtgctcggcaggacttc

SEQ ID NO: 241632 - DNA, 25 bp, probe
gtcctgtgacctacaaggtgactgt

SEQ ID NO: 241633 - DNA, 25 bp, probe
gtcctggacagcatcaaggagggct

SEQ ID NO: 241634 - DNA, 25 bp, probe
gtcctagccagcaactaggcagggc

SEQ ID NO: 241635 - DNA, 25 bp, probe
gtgcctaccagttcttcagagaagc

SEQ ID NO: 241636 - DNA, 25 bp, probe
gtcctgacacgtcttcaagcagaag

SEQ ID NO: 241637 - DNA, 25 bp, probe
gtccatgcacacatggtgtcccaga

SEQ ID NO: 241638 - DNA, 25 bp, probe
gtcctgaagttggcatgtgcagaca

SEQ ID NO: 241639 - DNA, 25 bp, probe
gtcctgcagaggaacagctgtgcca

SEQ ID NO: 241640 - DNA, 25 bp, probe
gtcctgtgagtcctcatgcagagca

SEQ ID NO: 241641 - DNA, 25 bp, probe
gtccgaggtgcagctgcaacagtac

SEQ ID NO: 241642 - DNA, 25 bp, probe
gtccgaggtgcagctgcaacagtac

SEQ ID NO: 241643 - DNA, 25 bp, probe
gtccatcaggtcattgataaggtca

SEQ ID NO: 241644 - DNA, 25 bp, probe
gtcctcaatgtccttaagagggtgt

SEQ ID NO: 241645 - DNA, 25 bp, probe
gtgccaaagtcgggggagggcttca

SEQ ID NO: 241646 - DNA, 25 bp, probe
gtgccaaagtccggagaaggattta

SEQ ID NO: 241647 - DNA, 25 bp, probe
gtgccgtcagatccttaaaggtctt

SEQ ID NO: 241648 - DNA, 25 bp, probe
gtgcgctaatgtactacgtagggct

SEQ ID NO: 241649 - DNA, 25 bp, probe
gtgcctacgaccacctagaggtgtt

SEQ ID NO: 241650 - DNA, 25 bp, probe
gtcctcagagggtccctaggtgggt

SEQ ID NO: 241651 - DNA, 25 bp, probe
gtccttaggagtcttaacattggcc

SEQ ID NO: 241652 - DNA, 25 bp, probe
gtccttttagtgccttaatttgaga

SEQ ID NO: 241653 - DNA, 25 bp, probe
gtccttttagtgccttaatttgaga

SEQ ID NO: 241654 - DNA, 25 bp, probe
gtcctatttttgtcattactataga

SEQ ID NO: 241655 - DNA, 25 bp, probe
gtcctctcttttgcatattctaata

SEQ ID NO: 241656 - DNA, 25 bp, probe
gtgcctgcctatgaaatttcaactt

SEQ ID NO: 241657 - DNA, 25 bp, probe
gtcctcttaaaatgtgtcaatcata

SEQ ID NO: 241658 - DNA, 25 bp, probe
gtccagtaacaagagttgattcata

SEQ ID NO: 241659 - DNA, 25 bp, probe
gtccatgttcagcgttctagcaaca

SEQ ID NO: 241660 - DNA, 25 bp, probe
gtccatgttgagctgttcactcatc

SEQ ID NO: 241661 - DNA, 25 bp, probe
gtccatgttgagctgttcactcatc

SEQ ID NO: 241662 - DNA, 25 bp, probe
gtcctgggcagccttcatatttgcc

SEQ ID NO: 241663 - DNA, 25 bp, probe
gtcctgggcagccttcatatttgcc

SEQ ID NO: 241664 - DNA, 25 bp, probe
gtcctcgaggcgatgatattctcac

SEQ ID NO: 241665 - DNA, 25 bp, probe
gtcctccttcagctgaagatgcccc

SEQ ID NO: 241666 - DNA, 25 bp, probe
gtcctcatctgtccaatgacagccc

SEQ ID NO: 241667 - DNA, 25 bp, probe
gtcctgctattgcattatcatctcc

SEQ ID NO: 241668 - DNA, 25 bp, probe
gtgccatcttgcaaactacacttta

SEQ ID NO: 241669 - DNA, 25 bp, probe
gtgccacattggtagactcctaaaa

SEQ ID NO: 241670 - DNA, 25 bp, probe
gtgccatcagtactgagtgctgcct

SEQ ID NO: 241671 - DNA, 25 bp, probe
gtgccatcagtactgagtgctgcct

SEQ ID NO: 241672 - DNA, 25 bp, probe
gtccattgctggcaactgacttgtc

SEQ ID NO: 241673 - DNA, 25 bp, probe
gtccatccactgaaggctgtgttta

SEQ ID NO: 241674 - DNA, 25 bp, probe
gtgccttcgtgaaggcttttgttct

SEQ ID NO: 241675 - DNA, 25 bp, probe
gtcctttgtatctctaagttacatg

SEQ ID NO: 241676 - DNA, 25 bp, probe
gtcctattttccgctggtgtatcag

SEQ ID NO: 241677 - DNA, 25 bp, probe
gtccaacagattgacctgcgttacg

SEQ ID NO: 241678 - DNA, 25 bp, probe
gtccaacagtcgtatcctggtgaat

SEQ ID NO: 241679 - DNA, 25 bp, probe
gtgccagacagctgaatctttatca

SEQ ID NO: 241680 - DNA, 25 bp, probe
gtccagaaggagaacttcctgagca

SEQ ID NO: 241681 - DNA, 25 bp, probe
gtccagaagaatcccttctagaaag

SEQ ID NO: 241682 - DNA, 25 bp, probe
gtccagtggaaaccttaaaggagca

SEQ ID NO: 241683 - DNA, 25 bp, probe
gtcctaggacatctctgtaaaaagc

SEQ ID NO: 241684 - DNA, 25 bp, probe
gtcctgtgggattcatcttcaaaga

SEQ ID NO: 241685 - DNA, 25 bp, probe
gtcctgtgcaaatagtgtcaaaagt

SEQ ID NO: 241686 - DNA, 25 bp, probe
gtcctgtcgattgtgttatttagaa

SEQ ID NO: 241687 - DNA, 25 bp, probe
gtccatgtagtaatttttcttcaag

SEQ ID NO: 241688 - DNA, 25 bp, probe
gtccattcagaaagcttcaaattat

SEQ ID NO: 241689 - DNA, 25 bp, probe
gtccattagaaagtcagcccttaga

SEQ ID NO: 241690 - DNA, 25 bp, probe
gtgccttatcaaagccagcaccact

SEQ ID NO: 241691 - DNA, 25 bp, probe
gtccttgatgcaaacacaactcagt

SEQ ID NO: 241692 - DNA, 25 bp, probe
gtcctatgttgatgcaggagtcgtg

SEQ ID NO: 241693 - DNA, 25 bp, probe
gtccttgtcatgatgctggagccag

SEQ ID NO: 241694 - DNA, 25 bp, probe
gtccttgtcatgatgctggagccag

SEQ ID NO: 241695 - DNA, 25 bp, probe
gtcctcatgtgtattgaatgctcag

SEQ ID NO: 241696 - DNA, 25 bp, probe
gtccttgctttctgatatgcttgat

SEQ ID NO: 241697 - DNA, 25 bp, probe
gtccttgtctatgccagaatctatg

SEQ ID NO: 241698 - DNA, 25 bp, probe
gtgccacattggtagactcctaaaa

SEQ ID NO: 241699 - DNA, 25 bp, probe
gtgccctaggtggaatccagaactt

SEQ ID NO: 241700 - DNA, 25 bp, probe
gtccttatgttggaaactcaagtgg

SEQ ID NO: 241701 - DNA, 25 bp, probe
gtgcctttgaagaacaactacagtg

SEQ ID NO: 241702 - DNA, 25 bp, probe
gtcctttgatgaaagcactgctatt

SEQ ID NO: 241703 - DNA, 25 bp, probe
gtccttctgtacgagatgctcattg

SEQ ID NO: 241704 - DNA, 25 bp, probe
gtccattttctcagcactcaatgct

SEQ ID NO: 241705 - DNA, 25 bp, probe
gtcctttctctctaattcagtgttt

SEQ ID NO: 241706 - DNA, 25 bp, probe
gtcctatttctctgacacaaactgt

SEQ ID NO: 241707 - DNA, 25 bp, probe
gtcctatcgactttatacagaactg

SEQ ID NO: 241708 - DNA, 25 bp, probe
gtcctatggcagcgtatacaaagct

SEQ ID NO: 241709 - DNA, 25 bp, probe
gtcctaaaacgttaccagcagctga

SEQ ID NO: 241710 - DNA, 25 bp, probe
tgtcctaaaacgttaccagcagctg

SEQ ID NO: 241711 - DNA, 25 bp, probe
gtcctcaacaagcacgagctgcaag

SEQ ID NO: 241712 - DNA, 25 bp, probe
gtgcctccaaagaccgagcacggtt

SEQ ID NO: 241713 - DNA, 25 bp, probe
gtccatccatattgtgtcagagtgg

SEQ ID NO: 241714 - DNA, 25 bp, probe
gtgccacgcatcttcatgaagggcg

SEQ ID NO: 241715 - DNA, 25 bp, probe
gtgccactgaatggctagagggata

SEQ ID NO: 241716 - DNA, 25 bp, probe
gtgccttgccattcattggcaggat

SEQ ID NO: 241717 - DNA, 25 bp, probe
gtccttgaatggatccagcgctacg

SEQ ID NO: 241718 - DNA, 25 bp, probe
gtcctagaagatgtgccactgacca

SEQ ID NO: 241719 - DNA, 25 bp, probe
gtcctaggagctgcagccagctgga

SEQ ID NO: 241720 - DNA, 25 bp, probe
tacctggaggagcagcgcgttgtgc

SEQ ID NO: 241721 - DNA, 25 bp, probe
gtcctcattaggacatcatgtcttt

SEQ ID NO: 241722 - DNA, 25 bp, probe
gtcctcattaggacatcatgtcttt

SEQ ID NO: 241723 - DNA, 25 bp, probe
gtccagtccaggacactggtgcttt

SEQ ID NO: 241724 - DNA, 25 bp, probe
gtgcctgtccaatactgggttcagc

SEQ ID NO: 241725 - DNA, 25 bp, probe
gtcctgtacattgtgggatgttcag

SEQ ID NO: 241726 - DNA, 25 bp, probe
gtccttccagttggagagttctcgg

SEQ ID NO: 241727 - DNA, 25 bp, probe
gtcctgatctccagtaggcatttct

SEQ ID NO: 241728 - DNA, 25 bp, probe
gtcctgttgctggttaacattcacc

SEQ ID NO: 241729 - DNA, 25 bp, probe
gtgcagatatttccctaacatgtcc

SEQ ID NO: 241730 - DNA, 25 bp, probe
gtgctgacatttccatcaatgtgat

SEQ ID NO: 241731 - DNA, 25 bp, probe
gtgcgccttccccgagtggaaggcg

SEQ ID NO: 241732 - DNA, 25 bp, probe
gtgccctcgggcatcgggagagggg

SEQ ID NO: 241733 - DNA, 25 bp, probe
gtgacttagtggacaggggaggggg

SEQ ID NO: 241734 - DNA, 25 bp, probe
gtgactttgggatgtcccgagagga

SEQ ID NO: 241735 - DNA, 25 bp, probe
gtgccagtttggagctcctggaagg

SEQ ID NO: 241736 - DNA, 25 bp, probe
gtgccagtttagagctcctggacag

SEQ ID NO: 241737 - DNA, 25 bp, probe
gtccactgagatagaagccctggtc

SEQ ID NO: 241738 - DNA, 25 bp, probe
gtccatctgaggaaagccagttcac

SEQ ID NO: 241739 - DNA, 25 bp, probe
gtccagcttggaacacgcagttggc

SEQ ID NO: 241740 - DNA, 25 bp, probe
gtccagcttggaacacgcagttggc

SEQ ID NO: 241741 - DNA, 25 bp, probe
gtgccaattacaagactgctttcag

SEQ ID NO: 241742 - DNA, 25 bp, probe
gtccagttcacagagctttgtcatc

SEQ ID NO: 241743 - DNA, 25 bp, probe
gtccagcttgaagacgctcttcatc

SEQ ID NO: 241744 - DNA, 25 bp, probe
gtccatcggagtgattgcctacatc

SEQ ID NO: 241745 - DNA, 25 bp, probe
gtccataggtgtcatcgcctacatc

SEQ ID NO: 241746 - DNA, 25 bp, probe
gtccatcgagttcatcgataaagcc

SEQ ID NO: 241747 - DNA, 25 bp, probe
gtccatcgaggacttcagcgaagtg

SEQ ID NO: 241748 - DNA, 25 bp, probe
gtcctccggcaaacagcagaagccc

SEQ ID NO: 241749 - DNA, 25 bp, probe
gtccttctgcgcaaaccatgagatc

SEQ ID NO: 241750 - DNA, 25 bp, probe
gtcctctatggcaatgatctcaggg

SEQ ID NO: 241751 - DNA, 25 bp, probe
gtcctctatgaaatgttaccgaagc

SEQ ID NO: 241752 - DNA, 25 bp, probe
gtcctctatgaaatgttaccgaagc

SEQ ID NO: 241753 - DNA, 25 bp, probe
gtcctgctgaatatgttcttggcaa

SEQ ID NO: 241754 - DNA, 25 bp, probe
gtcctgctgatcaatttcatcttcc

SEQ ID NO: 241755 - DNA, 25 bp, probe
gtccttgcacttaaactcattccat

SEQ ID NO: 241756 - DNA, 25 bp, probe
gtccttgcacttaaactcattccat

SEQ ID NO: 241757 - DNA, 25 bp, probe
gtccttcacaggaaattctagcttc

SEQ ID NO: 241758 - DNA, 25 bp, probe
gtccttagagacagactctctcttc

SEQ ID NO: 241759 - DNA, 25 bp, probe
gtccatgctaagtctaacactcctg

SEQ ID NO: 241760 - DNA, 25 bp, probe
gtcctgctatatgaagatcacctgg

SEQ ID NO: 241761 - DNA, 25 bp, probe
gtgcctgctacacatacaacactga

SEQ ID NO: 241762 - DNA, 25 bp, probe
gtgcctgccacaaaaacaagtgccc

SEQ ID NO: 241763 - DNA, 25 bp, probe
gtccagcccagaacgtcagaatcgt

SEQ ID NO: 241764 - DNA, 25 bp, probe
gtccaccagcgatctatatgatcat

SEQ ID NO: 241765 - DNA, 25 bp, probe
gtcctcctgcacaaatatggaaatt

SEQ ID NO: 241766 - DNA, 25 bp, probe
gtgccccgcactgtggaagagattg

SEQ ID NO: 241767 - DNA, 25 bp, probe
gtgctacccttcgtggaaaaccagc

SEQ ID NO: 241768 - DNA, 25 bp, probe
gtgagacacgttatgagggaagccc

SEQ ID NO: 241769 - DNA, 25 bp, probe
gtgctgtcctgttttactggacccc

SEQ ID NO: 241770 - DNA, 25 bp, probe
gtgcggagcctcattacgagaactg

SEQ ID NO: 241771 - DNA, 25 bp, probe
gtgctggctcctgggaacgagaact

SEQ ID NO: 241772 - DNA, 25 bp, probe
gtgctagtcctgggaacagatggcc

SEQ ID NO: 241773 - DNA, 25 bp, probe
gtgctggtttggcaaaaggcctggg

SEQ ID NO: 241774 - DNA, 25 bp, probe
gtccagtttgtgcaagacacccagt

SEQ ID NO: 241775 - DNA, 25 bp, probe
gtccagtttgtgcaagacacccagt

SEQ ID NO: 241776 - DNA, 25 bp, probe
gtgcaagcttttcctaataaacgtg

SEQ ID NO: 241777 - DNA, 25 bp, probe
gtgctcctttatccaatttgtactt

SEQ ID NO: 241778 - DNA, 25 bp, probe
gtgcccatgttataatgtgtttccg

SEQ ID NO: 241779 - DNA, 25 bp, probe
gtccatcattgttaccgtgtttgtc

SEQ ID NO: 241780 - DNA, 25 bp, probe
gtcctattgtcgtgcatgtgggatg

SEQ ID NO: 241781 - DNA, 25 bp, probe
gtccttaggcaaagctgtgggagtc

SEQ ID NO: 241782 - DNA, 25 bp, probe
gtccttaggcaaagctgtgggagtc

SEQ ID NO: 241783 - DNA, 25 bp, probe
gtcctcaggcagaattgctggtgga

SEQ ID NO: 241784 - DNA, 25 bp, probe
gtcctatgcgctcatgagcgtctgt

SEQ ID NO: 241785 - DNA, 25 bp, probe
gtccttgtgctctgagatggctgtt

SEQ ID NO: 241786 - DNA, 25 bp, probe
gtcctagtgccaccaatctcataat

SEQ ID NO: 241787 - DNA, 25 bp, probe
gtcctaggccagaacagttattgga

SEQ ID NO: 241788 - DNA, 25 bp, probe
gtcctaggccagaacagttattgga

SEQ ID NO: 241789 - DNA, 25 bp, probe
gtcctaggctggacacaggattcag

SEQ ID NO: 241790 - DNA, 25 bp, probe
gtcctagcaagaagcgagaattctg

SEQ ID NO: 241791 - DNA, 25 bp, probe
gtcctaccaagggagaagactggga

SEQ ID NO: 241792 - DNA, 25 bp, probe
gtgccggctacagggaaggagggaa

SEQ ID NO: 241793 - DNA, 25 bp, probe
gtgccggctacagggaaggagggaa

SEQ ID NO: 241794 - DNA, 25 bp, probe
gtgcgatggctgtgaggaagacaac

SEQ ID NO: 241795 - DNA, 25 bp, probe
gtccatagctgaagaggagcgccag

SEQ ID NO: 241796 - DNA, 25 bp, probe
gtccttgctgcccaggcagcgtgga

SEQ ID NO: 241797 - DNA, 25 bp, probe
gtccttctgctgcacacattgttga

SEQ ID NO: 241798 - DNA, 25 bp, probe
gtccttctgtgtgactggggaaatt

SEQ ID NO: 241799 - DNA, 25 bp, probe
gtccttctgtgtgactggggaaatt

SEQ ID NO: 241800 - DNA, 25 bp, probe
gtccttccatcccactgggaaaacg

SEQ ID NO: 241801 - DNA, 25 bp, probe
gtccttacactccagcctggataac

SEQ ID NO: 241802 - DNA, 25 bp, probe
gtccattatttaccttgaacaatca

SEQ ID NO: 241803 - DNA, 25 bp, probe
gtccattatttaccttgaacaatca

SEQ ID NO: 241804 - DNA, 25 bp, probe
gtgcaatttttatctaaccaatcag

SEQ ID NO: 241805 - DNA, 25 bp, probe
gtgcaggtttgataaacaccagaac

SEQ ID NO: 241806 - DNA, 25 bp, probe
gtgctggctttgaacaattacgaac

SEQ ID NO: 241807 - DNA, 25 bp, probe
gtgctggcttagaaagtgggggcaa

SEQ ID NO: 241808 - DNA, 25 bp, probe
gtgctggcttagaaagtgggggcaa

SEQ ID NO: 241809 - DNA, 25 bp, probe
gtgacctgggaatgggggcagccaa

SEQ ID NO: 241810 - DNA, 25 bp, probe
ggaccggtataaggataacttcaca

SEQ ID NO: 241811 - DNA, 25 bp, probe
ggcaacggttgctccaaaagtcaaa

SEQ ID NO: 241812 - DNA, 25 bp, probe
gtgccaagtttcttacaacaattaa

SEQ ID NO: 241813 - DNA, 25 bp, probe
gtgccaagtttcttacaacaattaa

SEQ ID NO: 241814 - DNA, 25 bp, probe
gtgccactgtttgcttcaacagtat

SEQ ID NO: 241815 - DNA, 25 bp, probe
gtcctatgtatatcttctacatgca

SEQ ID NO: 241816 - DNA, 25 bp, probe
gtcctatgtatatcttctacatgca

SEQ ID NO: 241817 - DNA, 25 bp, probe
gtcctagcttagccattcagaagag

SEQ ID NO: 241818 - DNA, 25 bp, probe
gtgcccagcttcactggagaacaac

SEQ ID NO: 241819 - DNA, 25 bp, probe
gtgcttgcagttgtcttaaaaatta

SEQ ID NO: 241820 - DNA, 25 bp, probe
gtgcttgcagttgtcttaaaaatta

SEQ ID NO: 241821 - DNA, 25 bp, probe
gtgttgactgactttaacaaggttc

SEQ ID NO: 241822 - DNA, 25 bp, probe
gtgttgactgactttaacaaggttc

SEQ ID NO: 241823 - DNA, 25 bp, probe
gtgaattctctctttaacaggagtt

SEQ ID NO: 241824 - DNA, 25 bp, probe
gtgcatttcacctgtgacaaaggat

SEQ ID NO: 241825 - DNA, 25 bp, probe
tgtaatctccctcaaagaaaatttc

SEQ ID NO: 241826 - DNA, 25 bp, probe
gtccttctgcaccgaaatggaaatt

SEQ ID NO: 241827 - DNA, 25 bp, probe
gtgcgtttcccagaacgaacactag

SEQ ID NO: 241828 - DNA, 25 bp, probe
gtggataccccacaagtagaatata

SEQ ID NO: 241829 - DNA, 25 bp, probe
gtccaaacacctcaatgtccaaata

SEQ ID NO: 241830 - DNA, 25 bp, probe
gtccaaacacctcaatgtccaaata

SEQ ID NO: 241831 - DNA, 25 bp, probe
gtccaacaaccgctttgtgcataag

SEQ ID NO: 241832 - DNA, 25 bp, probe
gtccaacacacacagctatttatag

SEQ ID NO: 241833 - DNA, 25 bp, probe
gtccattccacatattattctctaa

SEQ ID NO: 241834 - DNA, 25 bp, probe
gtccattacatcgagccttgtttta

SEQ ID NO: 241835 - DNA, 25 bp, probe
gtccaccatacgatctgtgtaagta

SEQ ID NO: 241836 - DNA, 25 bp, probe
gtccaccatacgatctgtgtaagta

SEQ ID NO: 241837 - DNA, 25 bp, probe
gtgccaaattctaccgtggaatgtc

SEQ ID NO: 241838 - DNA, 25 bp, probe
gtgccactacctacttgtgtgattg

SEQ ID NO: 241839 - DNA, 25 bp, probe
gtgcgctctgtagatttggatttta

SEQ ID NO: 241840 - DNA, 25 bp, probe
gtgcaccttaccaactttctgtaaa

SEQ ID NO: 241841 - DNA, 25 bp, probe
gtgccagttgggaacattacttaaa

SEQ ID NO: 241842 - DNA, 25 bp, probe
gggccattgggaagctgtactacga

SEQ ID NO: 241843 - DNA, 25 bp, probe
gggccattgggaagctgtactacga

SEQ ID NO: 241844 - DNA, 25 bp, probe
gtgagtcttcggagctgttggacag

SEQ ID NO: 241845 - DNA, 25 bp, probe
gtgcagtggtgcggtaatttatcca

SEQ ID NO: 241846 - DNA, 25 bp, probe
gtgctgtggttcggaagtctaagca

SEQ ID NO: 241847 - DNA, 25 bp, probe
gtccaggcagtcggacatcctaggc

SEQ ID NO: 241848 - DNA, 25 bp, probe
gtccatgtgaacgctacttatgtga

SEQ ID NO: 241849 - DNA, 25 bp, probe
gtccattaacatttatccatatgcc

SEQ ID NO: 241850 - DNA, 25 bp, probe
gtccattaacatttatccatatgcc

SEQ ID NO: 241851 - DNA, 25 bp, probe
gtccttacactacatcatcatcatc

SEQ ID NO: 241852 - DNA, 25 bp, probe
gtccttacactacatcatcatcatc

SEQ ID NO: 241853 - DNA, 25 bp, probe
gtccaagacacttattcatacatca

SEQ ID NO: 241854 - DNA, 25 bp, probe
gtccatcagctacacagtcatgacc

SEQ ID NO: 241855 - DNA, 25 bp, probe
gtccatcaagatgcagcagtatacg

SEQ ID NO: 241856 - DNA, 25 bp, probe
gtgcctctatgtgcacatgttcctg

SEQ ID NO: 241857 - DNA, 25 bp, probe
gtgctcctaatgacacttgaccttg

SEQ ID NO: 241858 - DNA, 25 bp, probe
gtgcttccaacgtcattgatcactt

SEQ ID NO: 241859 - DNA, 25 bp, probe
gtgcttccaacgtcattgatcactt

SEQ ID NO: 241860 - DNA, 25 bp, probe
gtgcttcgcagatgtccttgatgct

SEQ ID NO: 241861 - DNA, 25 bp, probe
gtgccatggaaagccattcactcct

SEQ ID NO: 241862 - DNA, 25 bp, probe
gtccatgcatgggactccatattgg

SEQ ID NO: 241863 - DNA, 25 bp, probe
gtcctatgggaccatctttgctgtg

SEQ ID NO: 241864 - DNA, 25 bp, probe
gtgcctacatggtgattctcttgtc

SEQ ID NO: 241865 - DNA, 25 bp, probe
gtgcctacatggtgattctcttgtc

SEQ ID NO: 241866 - DNA, 25 bp, probe
gtgcctgagaggtactgcctctctt

SEQ ID NO: 241867 - DNA, 25 bp, probe
gtgcttcaatttgtccttcagtagt

SEQ ID NO: 241868 - DNA, 25 bp, probe
gtgcccaattcagtgttgtgtatgt

SEQ ID NO: 241869 - DNA, 25 bp, probe
gtccagaatctgcgtctgagatctc

SEQ ID NO: 241870 - DNA, 25 bp, probe
gtgccaatttgctaattgacagcac

SEQ ID NO: 241871 - DNA, 25 bp, probe
gtgccgatatgtgagacgaatgatg

SEQ ID NO: 241872 - DNA, 25 bp, probe
gtgctggagattcagggcaatggag

SEQ ID NO: 241873 - DNA, 25 bp, probe
gtgctgcggtcggagagcgaggaga

SEQ ID NO: 241874 - DNA, 25 bp, probe
gtgctgggcatcggtgatcggcaca

SEQ ID NO: 241875 - DNA, 25 bp, probe
gtgcgtcagatcagtgatcctattc

SEQ ID NO: 241876 - DNA, 25 bp, probe
gtgcagctgcaacagtacttcctgc

SEQ ID NO: 241877 - DNA, 25 bp, probe
gtgcatcgccagcatttcgatcctc

SEQ ID NO: 241878 - DNA, 25 bp, probe
gtgcattgccgaggattagagacca

SEQ ID NO: 241879 - DNA, 25 bp, probe
gtgctttccaacttcaagaccacag

SEQ ID NO: 241880 - DNA, 25 bp, probe
gtgctcttcaatgactcaacacgcc

SEQ ID NO: 241881 - DNA, 25 bp, probe
gtgagccagcaatgtcatcaccagg

SEQ ID NO: 241882 - DNA, 25 bp, probe
gtgacaacatctttatcaccggccc

SEQ ID NO: 241883 - DNA, 25 bp, probe
gtgaagaacgagatcaaccccagcc

SEQ ID NO: 241884 - DNA, 25 bp, probe
gtgaccaacaggaaaggacgccacc

SEQ ID NO: 241885 - DNA, 25 bp, probe
gtgaccaagaggagcttcaggacgc

SEQ ID NO: 241886 - DNA, 25 bp, probe
gtgcccagggtgggtgtctggcacc

SEQ ID NO: 241887 - DNA, 25 bp, probe
gtgccagcagagttgggtgtccagc

SEQ ID NO: 241888 - DNA, 25 bp, probe
gtgccagcagagttgggtgtccagc

SEQ ID NO: 241889 - DNA, 25 bp, probe
gtccagatgggcactgctgtggagt

SEQ ID NO: 241890 - DNA, 25 bp, probe
gtccatctgggtctgcttatgagaa

SEQ ID NO: 241891 - DNA, 25 bp, probe
gtgccaggggctgttatatacatat

SEQ ID NO: 241892 - DNA, 25 bp, probe
gtgccagaggttgtccacattatca

SEQ ID NO: 241893 - DNA, 25 bp, probe
gtccatgtgtttctccaatgtcaac

SEQ ID NO: 241894 - DNA, 25 bp, probe
gtccatgtgtttctccaatgtcaac

SEQ ID NO: 241895 - DNA, 25 bp, probe
gtgctcttatttctacagttaccct

SEQ ID NO: 241896 - DNA, 25 bp, probe
gtgcctcttcctgtagagttactca

SEQ ID NO: 241897 - DNA, 25 bp, probe
gtgcctcttcctgtagagttactca

SEQ ID NO: 241898 - DNA, 25 bp, probe
gtgcccttctcgtaaagttgttcaa

SEQ ID NO: 241899 - DNA, 25 bp, probe
gtgctgactatggggaaatctttta

SEQ ID NO: 241900 - DNA, 25 bp, probe
gtgctgtgttgcggggaagctgtgt

SEQ ID NO: 241901 - DNA, 25 bp, probe
gtgctgttcgaggatgtgtacgagc

SEQ ID NO: 241902 - DNA, 25 bp, probe
gtgctgtccctggagcaaacggagc

SEQ ID NO: 241903 - DNA, 25 bp, probe
gtgctgtgcaccaggcagattttgg

SEQ ID NO: 241904 - DNA, 25 bp, probe
gtgctggagccgggagtctgagcag

SEQ ID NO: 241905 - DNA, 25 bp, probe
gtgccacagcccaggtcggagtggc

SEQ ID NO: 241906 - DNA, 25 bp, probe
gtgccacagcccaggtcggagtggc

SEQ ID NO: 241907 - DNA, 25 bp, probe
gtgccatagcccagtacacaggctg

SEQ ID NO: 241908 - DNA, 25 bp, probe
gtgccatacccaggcatgaacaacc

SEQ ID NO: 241909 - DNA, 25 bp, probe
gtgccatacccaggcatgaacaacc

SEQ ID NO: 241910 - DNA, 25 bp, probe
gtccagacctcggagaagctgaaac

SEQ ID NO: 241911 - DNA, 25 bp, probe
gtgtactcccagacaaatctgaaac

SEQ ID NO: 241912 - DNA, 25 bp, probe
gtgcttctcccaagactatcttgaa

SEQ ID NO: 241913 - DNA, 25 bp, probe
gtgtatctaaaactttgcctcgaaa

SEQ ID NO: 241914 - DNA, 25 bp, probe
gtgctattaaaatttcgttcagtta

SEQ ID NO: 241915 - DNA, 25 bp, probe
gtgcagataacagaatcccccactt

SEQ ID NO: 241916 - DNA, 25 bp, probe
gtgcagataacagaatcccccactt

SEQ ID NO: 241917 - DNA, 25 bp, probe
gtgctaaacagtatattacctctgt

SEQ ID NO: 241918 - DNA, 25 bp, probe
gtgctgacataactttcaatagact

SEQ ID NO: 241919 - DNA, 25 bp, probe
gtgcgaagactgagccagattggcc

SEQ ID NO: 241920 - DNA, 25 bp, probe
gtgctgggactgagccagtcccagg

SEQ ID NO: 241921 - DNA, 25 bp, probe
gtgctggtactgtgttatctccatg

SEQ ID NO: 241922 - DNA, 25 bp, probe
gtgccgtagctcttatctagcaaat

SEQ ID NO: 241923 - DNA, 25 bp, probe
gtgccgtagctcttatctagcaaat

SEQ ID NO: 241924 - DNA, 25 bp, probe
gtccagatactgtctatttggagac

SEQ ID NO: 241925 - DNA, 25 bp, probe
gtccatgtttgactattgtgatgac

SEQ ID NO: 241926 - DNA, 25 bp, probe
gtgccaggactggtcattgtgatca

SEQ ID NO: 241927 - DNA, 25 bp, probe
gtgccagtatggttcatctgtcaca

SEQ ID NO: 241928 - DNA, 25 bp, probe
gtgccagtatggttcatctgtcaca

SEQ ID NO: 241929 - DNA, 25 bp, probe
gtgccatatatcaattatggtcact

SEQ ID NO: 241930 - DNA, 25 bp, probe
gtgctcacttacattatgctcagtg

SEQ ID NO: 241931 - DNA, 25 bp, probe
gtgctcacttacattatgctcagtg

SEQ ID NO: 241932 - DNA, 25 bp, probe
gtgaagtctgacatttggagtctgg

SEQ ID NO: 241933 - DNA, 25 bp, probe
gtgctggtcatacatttgtggtctg

SEQ ID NO: 241934 - DNA, 25 bp, probe
gtgctggaccagaataattgcgact

SEQ ID NO: 241935 - DNA, 25 bp, probe
gtgcttgcaccagcacctatgtgaa

SEQ ID NO: 241936 - DNA, 25 bp, probe
gtgcttgctaaggacgcatggggaa

SEQ ID NO: 241937 - DNA, 25 bp, probe
gtgcttcgacatcatcgaggggctc

SEQ ID NO: 241938 - DNA, 25 bp, probe
gtgcgtctactgatggagtggggcg

SEQ ID NO: 241939 - DNA, 25 bp, probe
gtccatgtactcagtgatgaagggc

SEQ ID NO: 241940 - DNA, 25 bp, probe
gtccatgatgcactgttagaggcag

SEQ ID NO: 241941 - DNA, 25 bp, probe
gtccatgatgcactgttagaggcag

SEQ ID NO: 241942 - DNA, 25 bp, probe
gtccatcctgagtatcatgaggcag

SEQ ID NO: 241943 - DNA, 25 bp, probe
gtccatcctgagtatcatgaggcag

SEQ ID NO: 241944 - DNA, 25 bp, probe
gtccatcgtgacatcaaggatgaga

SEQ ID NO: 241945 - DNA, 25 bp, probe
gtccatgttacatcaatcaaatgca

SEQ ID NO: 241946 - DNA, 25 bp, probe
gtccatgtggtgtacacattagcca

SEQ ID NO: 241947 - DNA, 25 bp, probe
gtccatatggtgtacacaacggcgc

SEQ ID NO: 241948 - DNA, 25 bp, probe
gtgccaaggagtttcatacagcggt

SEQ ID NO: 241949 - DNA, 25 bp, probe
gtgccaaggagtttcatacagcggt

SEQ ID NO: 241950 - DNA, 25 bp, probe
gtgctgaagggtgccacagacaggg

SEQ ID NO: 241951 - DNA, 25 bp, probe
gtgcatgccagggacccaatcaagc

SEQ ID NO: 241952 - DNA, 25 bp, probe
gtgcatgccagggacccaatcaagc

SEQ ID NO: 241953 - DNA, 25 bp, probe
gtgccacaggaagccatcagcagtg

SEQ ID NO: 241954 - DNA, 25 bp, probe
gtgctcacggttggacttggtgtca

SEQ ID NO: 241955 - DNA, 25 bp, probe
gtccagcggaaggtcagcgggagca

SEQ ID NO: 241956 - DNA, 25 bp, probe
gtccacggagatgggcacgcggaga

SEQ ID NO: 241957 - DNA, 25 bp, probe
gtccacggagatgggcacgcggaga

SEQ ID NO: 241958 - DNA, 25 bp, probe
gtccacggagatgggcacgcggaga

SEQ ID NO: 241959 - DNA, 25 bp, probe
gtccactgtgggggcagagggagtg

SEQ ID NO: 241960 - DNA, 25 bp, probe
gtccatctgtggcgacgggtgatgc

SEQ ID NO: 241961 - DNA, 25 bp, probe
gtccatgtcttcctgcaacaggtgt

SEQ ID NO: 241962 - DNA, 25 bp, probe
gtccatgtcttcctgcaacaggtgt

SEQ ID NO: 241963 - DNA, 25 bp, probe
gtccatgtcttcctgcaacaggtgt

SEQ ID NO: 241964 - DNA, 25 bp, probe
gtgccatgcgttcgctgaaaggcat

SEQ ID NO: 241965 - DNA, 25 bp, probe
gtgccatcggttcaaagagactttt

SEQ ID NO: 241966 - DNA, 25 bp, probe
gtccagaggttagaatggcagctca

SEQ ID NO: 241967 - DNA, 25 bp, probe
gtccaaggtgtagtcataccctcaa

SEQ ID NO: 241968 - DNA, 25 bp, probe
gtccagaggatgtgggaaagctaat

SEQ ID NO: 241969 - DNA, 25 bp, probe
gtccagaggagctgtaccaactcat

SEQ ID NO: 241970 - DNA, 25 bp, probe
gtccatagagatctgacaccaaaca

SEQ ID NO: 241971 - DNA, 25 bp, probe
gtccaaggtcaaggcaccagcaaat

SEQ ID NO: 241972 - DNA, 25 bp, probe
gtccaggactaagaagatcatgatg

SEQ ID NO: 241973 - DNA, 25 bp, probe
gtccagcgcacttaagattgcttac

SEQ ID NO: 241974 - DNA, 25 bp, probe
gtgcctgagactgtcagaagttgac

SEQ ID NO: 241975 - DNA, 25 bp, probe
gtccatgagactttctgactaggaa

SEQ ID NO: 241976 - DNA, 25 bp, probe
gtccatgagactttctgactaggaa

SEQ ID NO: 241977 - DNA, 25 bp, probe
gtccagagactcttctgcatgggtg

SEQ ID NO: 241978 - DNA, 25 bp, probe
gtccaatgacatgtgtgctagagct

SEQ ID NO: 241979 - DNA, 25 bp, probe
gtgccagtcactgttctaatgctgg

SEQ ID NO: 241980 - DNA, 25 bp, probe
gtccaatcacatgtgtgggtgcgag

SEQ ID NO: 241981 - DNA, 25 bp, probe
gtccacccagtgctgtgtgtggcaa

SEQ ID NO: 241982 - DNA, 25 bp, probe
gtccagggccatcgtgggtgatgac

SEQ ID NO: 241983 - DNA, 25 bp, probe
gtccatgggccacatgtggctcagg

SEQ ID NO: 241984 - DNA, 25 bp, probe
gtccatgggccacatgtggctcagg

SEQ ID NO: 241985 - DNA, 25 bp, probe
gtccatgagacagcgactggctcac

SEQ ID NO: 241986 - DNA, 25 bp, probe
gtgcctcaagcagccattgagtatg

SEQ ID NO: 241987 - DNA, 25 bp, probe
gtgccaataccaccatagaggatga

SEQ ID NO: 241988 - DNA, 25 bp, probe
gtgccaataccaccatagaggatga

SEQ ID NO: 241989 - DNA, 25 bp, probe
gtgccaataccaccatagaggatga

SEQ ID NO: 241990 - DNA, 25 bp, probe
gtgccaaatccaggctagcaggatc

SEQ ID NO: 241991 - DNA, 25 bp, probe
gtccaacgagcaggtggcatggctg

SEQ ID NO: 241992 - DNA, 25 bp, probe
gtccaactgatggcccagatgcagc

SEQ ID NO: 241993 - DNA, 25 bp, probe
gtgccactggaggagccagtgccct

SEQ ID NO: 241994 - DNA, 25 bp, probe
gtgcgagggagaactaatgccgacg

SEQ ID NO: 241995 - DNA, 25 bp, probe
gtgcgagggagaactaatgccgacg

SEQ ID NO: 241996 - DNA, 25 bp, probe
gtccagctgggacctaatgctggcc

SEQ ID NO: 241997 - DNA, 25 bp, probe
gtccagtggctctggaagtgccctt

SEQ ID NO: 241998 - DNA, 25 bp, probe
gtgccagtacacttgcggagtacct

SEQ ID NO: 241999 - DNA, 25 bp, probe
gtgccagttgccagggcaagtcact

SEQ ID NO: 242000 - DNA, 25 bp, probe
gtccaggatggagggtccaatccta

SEQ ID NO: 242001 - DNA, 25 bp, probe
gtccaggatggagtgagctgcacac

SEQ ID NO: 242002 - DNA, 25 bp, probe
gtccatggctggtatggccatatga

SEQ ID NO: 242003 - DNA, 25 bp, probe
gtccatggctggtatggccatatga

SEQ ID NO: 242004 - DNA, 25 bp, probe
gtccagactcagtggatctgaagaa

SEQ ID NO: 242005 - DNA, 25 bp, probe
gtccagcagcgagagcttgtgagga

SEQ ID NO: 242006 - DNA, 25 bp, probe
gtgccccagcagtacatgagtgctc

SEQ ID NO: 242007 - DNA, 25 bp, probe
gtgcctggggtgtaatgagctcctg

SEQ ID NO: 242008 - DNA, 25 bp, probe
gtgcctggggtgtaatgagctcctg

SEQ ID NO: 242009 - DNA, 25 bp, probe
gtgctcagatggcttcctgagccct

SEQ ID NO: 242010 - DNA, 25 bp, probe
gtgccacctttgaccatgagcacca

SEQ ID NO: 242011 - DNA, 25 bp, probe
gtgctgacacatcattcccagcatc

SEQ ID NO: 242012 - DNA, 25 bp, probe
gtgctgacacatcattcccagcatc

SEQ ID NO: 242013 - DNA, 25 bp, probe
gtgctgaacctcttccgagaaatgg

SEQ ID NO: 242014 - DNA, 25 bp, probe
gtgctgaacctcttccgagaaatgg

SEQ ID NO: 242015 - DNA, 25 bp, probe
gtgctgccccactttgggaaggaag

SEQ ID NO: 242016 - DNA, 25 bp, probe
gtgctgccccactttgggaaggaag

SEQ ID NO: 242017 - DNA, 25 bp, probe
gtgcccctcagactggggaagagtc

SEQ ID NO: 242018 - DNA, 25 bp, probe
gtgcccctcagactggggaagagtc

SEQ ID NO: 242019 - DNA, 25 bp, probe
gtgcaccccgacaaggtgagcagag

SEQ ID NO: 242020 - DNA, 25 bp, probe
gtgcaccccgacaaggtgagcagag

SEQ ID NO: 242021 - DNA, 25 bp, probe
gtccagcagccgtaaggtggccaac

SEQ ID NO: 242022 - DNA, 25 bp, probe
gtccaggtcggagggatcacgagac

SEQ ID NO: 242023 - DNA, 25 bp, probe
gtccaggtggactgtgagaagtacc

SEQ ID NO: 242024 - DNA, 25 bp, probe
gtgccaggggagtcagggttgtagc

SEQ ID NO: 242025 - DNA, 25 bp, probe
gtgccctgggcttgcagggtatcta

SEQ ID NO: 242026 - DNA, 25 bp, probe
gtgccctgggcttgcagggtatcta

SEQ ID NO: 242027 - DNA, 25 bp, probe
gtccacatgtgggacagggctggtg

SEQ ID NO: 242028 - DNA, 25 bp, probe
gtccactgatcccaaaggctgggag

SEQ ID NO: 242029 - DNA, 25 bp, probe
gtccagctatcctgaaagtggatca

SEQ ID NO: 242030 - DNA, 25 bp, probe
gtccagcctcgttggaagaggaaca

SEQ ID NO: 242031 - DNA, 25 bp, probe
gtccagcactcgattgttgtaaact

SEQ ID NO: 242032 - DNA, 25 bp, probe
gtccagcactcgattgttgtaaact

SEQ ID NO: 242033 - DNA, 25 bp, probe
gtgcccagccagatttttcaaacaa

SEQ ID NO: 242034 - DNA, 25 bp, probe
gtgcccaggattatattagcattat

SEQ ID NO: 242035 - DNA, 25 bp, probe
gtgccacaagttaagatgctactgt

SEQ ID NO: 242036 - DNA, 25 bp, probe
gtccaaatgctgaaagacatctatg

SEQ ID NO: 242037 - DNA, 25 bp, probe
gtccaaatgctgaaagacatctatg

SEQ ID NO: 242038 - DNA, 25 bp, probe
gtccaagcatcagcaagacaatgac

SEQ ID NO: 242039 - DNA, 25 bp, probe
gtgcccagcatactcaagaagattc

SEQ ID NO: 242040 - DNA, 25 bp, probe
gtgcccaaactccaaagaatctatg

SEQ ID NO: 242041 - DNA, 25 bp, probe
tgtcctaaagcaattgaagttgtag

SEQ ID NO: 242042 - DNA, 25 bp, probe
gtgccttgccacattaaattgataa

SEQ ID NO: 242043 - DNA, 25 bp, probe
gtgcttatcctggtaaaatataaag

SEQ ID NO: 242044 - DNA, 25 bp, probe
gtgtgtagcccagaaaagtaaaata

SEQ ID NO: 242045 - DNA, 25 bp, probe
gtgtgtagcccagaaaagtaaaata

SEQ ID NO: 242046 - DNA, 25 bp, probe
gtgcttacccaggcaagaaaaaaca

SEQ ID NO: 242047 - DNA, 25 bp, probe
gtgccacctccagtgggaaacaaaa

SEQ ID NO: 242048 - DNA, 25 bp, probe
gtccagcctccgatgtaagtaatgg

SEQ ID NO: 242049 - DNA, 25 bp, probe
gtccagcctccgatgtaagtaatgg

SEQ ID NO: 242050 - DNA, 25 bp, probe
gtccagtctgccgctgatgagactg

SEQ ID NO: 242051 - DNA, 25 bp, probe
gtccagtctaagcagagagactgat

SEQ ID NO: 242052 - DNA, 25 bp, probe
gtgccaactgaagtaggagactgac

SEQ ID NO: 242053 - DNA, 25 bp, probe
gtgcgcagagctgtcatagggtccc

SEQ ID NO: 242054 - DNA, 25 bp, probe
gtgcgcagagctgtcatagggtccc

SEQ ID NO: 242055 - DNA, 25 bp, probe
gtgctggtgtttacagtgtgcccac

SEQ ID NO: 242056 - DNA, 25 bp, probe
gtgctggtgtttacagtgtgcccac

SEQ ID NO: 242057 - DNA, 25 bp, probe
gtgcttcgtctgaaagtgaactctc

SEQ ID NO: 242058 - DNA, 25 bp, probe
ggtttggctattttaactccacatg

SEQ ID NO: 242059 - DNA, 25 bp, probe
gtgtctgggtaacacatacacccat

SEQ ID NO: 242060 - DNA, 25 bp, probe
gtgataatttaagagctaaccagtt

SEQ ID NO: 242061 - DNA, 25 bp, probe
gtgataatttaagagctaaccagtt

SEQ ID NO: 242062 - DNA, 25 bp, probe
gtgtcttttgaagggctataccagt

SEQ ID NO: 242063 - DNA, 25 bp, probe
gtgctcattttgtggttctaatcat

SEQ ID NO: 242064 - DNA, 25 bp, probe
gtgctcattttgtggttctaatcat

SEQ ID NO: 242065 - DNA, 25 bp, probe
gtgccttggctgttgtatttgaatt

SEQ ID NO: 242066 - DNA, 25 bp, probe
gtgccactggagagtattcatttgt

SEQ ID NO: 242067 - DNA, 25 bp, probe
gtgccaataggcaagtatttttcca

SEQ ID NO: 242068 - DNA, 25 bp, probe
gtgccaataggcaagtatttttcca

SEQ ID NO: 242069 - DNA, 25 bp, probe
gtgcccagagacaagtgaaggtgtc

SEQ ID NO: 242070 - DNA, 25 bp, probe
gtccagagagaaagatgaatgttat

SEQ ID NO: 242071 - DNA, 25 bp, probe
gtccagagcgagttaatgtgtccat

SEQ ID NO: 242072 - DNA, 25 bp, probe
gtgccacagtagttaaagtacataa

SEQ ID NO: 242073 - DNA, 25 bp, probe
gtgcaaagatcgtaaaaggacaaaa

SEQ ID NO: 242074 - DNA, 25 bp, probe
gtgccaagtgcgagggggacatctt

SEQ ID NO: 242075 - DNA, 25 bp, probe
gtgccaatttcatgtgggggctcat

SEQ ID NO: 242076 - DNA, 25 bp, probe
gtgccaggcctatgttggaggacaa

SEQ ID NO: 242077 - DNA, 25 bp, probe
gtgccaactctgaagttgaagtgaa

SEQ ID NO: 242078 - DNA, 25 bp, probe
gtgaaacactgaacttatcagaaaa

SEQ ID NO: 242079 - DNA, 25 bp, probe
gtgaaaacatttcttaagcacaaat

SEQ ID NO: 242080 - DNA, 25 bp, probe
gtgaaaacgtggacctgatacaaca

SEQ ID NO: 242081 - DNA, 25 bp, probe
gtgaagacggtgtcaccctggatga

SEQ ID NO: 242082 - DNA, 25 bp, probe
gtgcaaatcggagacccggaaactg

SEQ ID NO: 242083 - DNA, 25 bp, probe
gggagcaagtggaaccggcgaaacg

SEQ ID NO: 242084 - DNA, 25 bp, probe
gtgaaccaggaggacctggcaagaa

SEQ ID NO: 242085 - DNA, 25 bp, probe
gtgccaccattgagaactccaggat

SEQ ID NO: 242086 - DNA, 25 bp, probe
gtgccgcactagagtacctgggcag

SEQ ID NO: 242087 - DNA, 25 bp, probe
gtgccctcaagcatggcaccttggg

SEQ ID NO: 242088 - DNA, 25 bp, probe
gtgcctgtaatcacagctacttggg

SEQ ID NO: 242089 - DNA, 25 bp, probe
gtgcgtttcttttgcatgactgtgg

SEQ ID NO: 242090 - DNA, 25 bp, probe
gtgcttttcttttacaagaggtagt

SEQ ID NO: 242091 - DNA, 25 bp, probe
gtgcccttacttcagcaaaggagaa

SEQ ID NO: 242092 - DNA, 25 bp, probe
gtgcctttgacttggtgaatatcca

SEQ ID NO: 242093 - DNA, 25 bp, probe
gtgcctttactgttgtgtggactgc

SEQ ID NO: 242094 - DNA, 25 bp, probe
gtgctgcttctacacatgtggtact

SEQ ID NO: 242095 - DNA, 25 bp, probe
tctgtgaatgtacaggcggaactgt

SEQ ID NO: 242096 - DNA, 25 bp, probe
tctgtgaatgtacaggcggaactgt

SEQ ID NO: 242097 - DNA, 25 bp, probe
gtgctgaagatagagctggagacct

SEQ ID NO: 242098 - DNA, 25 bp, probe
gtgctgctagatttgactgcaagat

SEQ ID NO: 242099 - DNA, 25 bp, probe
gtgctgtcagcaatatcctcattgc

SEQ ID NO: 242100 - DNA, 25 bp, probe
gtgctgtttttcctcatacaagtaa

SEQ ID NO: 242101 - DNA, 25 bp, probe
gtgctgtttgtcgtgaaaagcttaa

SEQ ID NO: 242102 - DNA, 25 bp, probe
gtgctgtttgtcgtgaaaagcttaa

SEQ ID NO: 242103 - DNA, 25 bp, probe
gtgcagtgttacgttagatagctct

SEQ ID NO: 242104 - DNA, 25 bp, probe
gtgcattttttttggaggtcattca

SEQ ID NO: 242105 - DNA, 25 bp, probe
gtgcattttttttggaggtcattca

SEQ ID NO: 242106 - DNA, 25 bp, probe
gtgcagttatttattatgcgtattc

SEQ ID NO: 242107 - DNA, 25 bp, probe
gtgcagtcttttgttactgggacac

SEQ ID NO: 242108 - DNA, 25 bp, probe
gtgatgcccttagatgtccggggct

SEQ ID NO: 242109 - DNA, 25 bp, probe
gtgcccccaagagtgtagggggcct

SEQ ID NO: 242110 - DNA, 25 bp, probe
gtgcccccaggaggtgtatgagctg

SEQ ID NO: 242111 - DNA, 25 bp, probe
gtgcccaccgtgagggctgagtgct

SEQ ID NO: 242112 - DNA, 25 bp, probe
gtgcctgtccgtataagctcaatga

SEQ ID NO: 242113 - DNA, 25 bp, probe
gtgccatgtgctgtattaagtgctt

SEQ ID NO: 242114 - DNA, 25 bp, probe
gtgccatgtgctgtattaagtgctt

SEQ ID NO: 242115 - DNA, 25 bp, probe
gtgctgctattattcaaaaggcctt

SEQ ID NO: 242116 - DNA, 25 bp, probe
gtgcctgccatgatcaaactggcct

SEQ ID NO: 242117 - DNA, 25 bp, probe
gtgccttcatgcagacagactgtgg

SEQ ID NO: 242118 - DNA, 25 bp, probe
gtgccatttgatgcagagacggagt

SEQ ID NO: 242119 - DNA, 25 bp, probe
gtgccatttgatgcagagacggagt

SEQ ID NO: 242120 - DNA, 25 bp, probe
gtgccttttgcagaagagggtgtgt

SEQ ID NO: 242121 - DNA, 25 bp, probe
gtgcctgttcgacatgggcggtgag

SEQ ID NO: 242122 - DNA, 25 bp, probe
gtgcccctgaatcatgggcacggag

SEQ ID NO: 242123 - DNA, 25 bp, probe
gtgctgtcacgcacaagggcacgtg

SEQ ID NO: 242124 - DNA, 25 bp, probe
gtgctgctcatgccatactgagggc

SEQ ID NO: 242125 - DNA, 25 bp, probe
gtgcttctccataatgatagagttt

SEQ ID NO: 242126 - DNA, 25 bp, probe
gtgcctacctcttagacatgttgtg

SEQ ID NO: 242127 - DNA, 25 bp, probe
gtgcctacctcttagacatgttgtg

SEQ ID NO: 242128 - DNA, 25 bp, probe
gtgcccctgtgcttataagggaggg

SEQ ID NO: 242129 - DNA, 25 bp, probe
gtgccggggcctgaaggtcagggtc

SEQ ID NO: 242130 - DNA, 25 bp, probe
gtgccggggcctgaaggtcagggtc

SEQ ID NO: 242131 - DNA, 25 bp, probe
gtgcggagaggcgaaactgagtcag

SEQ ID NO: 242132 - DNA, 25 bp, probe
gtgcctgaagagcctcgacagagaa

SEQ ID NO: 242133 - DNA, 25 bp, probe
gtgccataatgctgctcgcaggaaa

SEQ ID NO: 242134 - DNA, 25 bp, probe
gtgccatgttcgacttcagcgagaa

SEQ ID NO: 242135 - DNA, 25 bp, probe
gtgcgcattttgcattccatatgaa

SEQ ID NO: 242136 - DNA, 25 bp, probe
gtgcacattttccacggaaacagaa

SEQ ID NO: 242137 - DNA, 25 bp, probe
gtgcctgtagtcccaggtactcagg

SEQ ID NO: 242138 - DNA, 25 bp, probe
gtgccgtacttggaggacctgcacg

SEQ ID NO: 242139 - DNA, 25 bp, probe
gtgcactaacttcatgatgacccct

SEQ ID NO: 242140 - DNA, 25 bp, probe
gtgcaagaaggtcagcagcacccac

SEQ ID NO: 242141 - DNA, 25 bp, probe
gtgatggaaggttacaagtggcact

SEQ ID NO: 242142 - DNA, 25 bp, probe
gtgctttgaattcaccgtgtgcttt

SEQ ID NO: 242143 - DNA, 25 bp, probe
gtgctttgaattcaccgtgtgcttt

SEQ ID NO: 242144 - DNA, 25 bp, probe
gtgctgtgtgacatcatagtcctct

SEQ ID NO: 242145 - DNA, 25 bp, probe
gtgcatctctggacatgctttcttc

SEQ ID NO: 242146 - DNA, 25 bp, probe
gtgcattctagagtgcatatattta

SEQ ID NO: 242147 - DNA, 25 bp, probe
gtgcttcgaactattcatggaaaag

SEQ ID NO: 242148 - DNA, 25 bp, probe
gtgctgtctgcattttcttggagaa

SEQ ID NO: 242149 - DNA, 25 bp, probe
gtgctctctatctgtttaagacaaa

SEQ ID NO: 242150 - DNA, 25 bp, probe
gtgctgctgttctgtgtacataaag

SEQ ID NO: 242151 - DNA, 25 bp, probe
gtgccatgtgcctttataatgagaa

SEQ ID NO: 242152 - DNA, 25 bp, probe
gtgctctgtctcctgtgaagatgga

SEQ ID NO: 242153 - DNA, 25 bp, probe
gtgcgattcatcatatatcattgga

SEQ ID NO: 242154 - DNA, 25 bp, probe
gtgccttcagctctacagctaatca

SEQ ID NO: 242155 - DNA, 25 bp, probe
gtgccttgcgtacctcatgaaatac

SEQ ID NO: 242156 - DNA, 25 bp, probe
gtgccttgcgtacctcatgaaatac

SEQ ID NO: 242157 - DNA, 25 bp, probe
gtgccttggaacaatattgaattct

SEQ ID NO: 242158 - DNA, 25 bp, probe
gtgctgctttgatatataggacatt

SEQ ID NO: 242159 - DNA, 25 bp, probe
gtgcctcatatttcaatagtactgt

SEQ ID NO: 242160 - DNA, 25 bp, probe
gtgcctatatagtgactgattttaa

SEQ ID NO: 242161 - DNA, 25 bp, probe
gtgcctatatagtgactgattttaa

SEQ ID NO: 242162 - DNA, 25 bp, probe
gtgcagtagaaatacttttaaccat

SEQ ID NO: 242163 - DNA, 25 bp, probe
gtggtcaccgaatctgtactaagga

SEQ ID NO: 242164 - DNA, 25 bp, probe
gtgttccggaactttgacgtcgatg

SEQ ID NO: 242165 - DNA, 25 bp, probe
gtgtaccgtgggctgagaggggatg

SEQ ID NO: 242166 - DNA, 25 bp, probe
gtgacccaatgctcctggaggggca

SEQ ID NO: 242167 - DNA, 25 bp, probe
gtgaccagaatttcctggctcaggc

SEQ ID NO: 242168 - DNA, 25 bp, probe
gtgcaggaacacgagacaggccggc

SEQ ID NO: 242169 - DNA, 25 bp, probe
gtgcggcaagaacgcaagggggcaa

SEQ ID NO: 242170 - DNA, 25 bp, probe
gtgctggaagaattcaagacggaga

SEQ ID NO: 242171 - DNA, 25 bp, probe
gtgctggaagaattcaagacggaga

SEQ ID NO: 242172 - DNA, 25 bp, probe
gtgctgcagaaatacgacactgtag

SEQ ID NO: 242173 - DNA, 25 bp, probe
gtgctgcagaaatacgacactgtag

SEQ ID NO: 242174 - DNA, 25 bp, probe
gtccaaacaaacctcagtgtgatgg

SEQ ID NO: 242175 - DNA, 25 bp, probe
gtccaaacaaacctcagtgtgatgg

SEQ ID NO: 242176 - DNA, 25 bp, probe
gtccaatactgggttcagctgtatg

SEQ ID NO: 242177 - DNA, 25 bp, probe
gtccaaactggcctcatgagcagtc

SEQ ID NO: 242178 - DNA, 25 bp, probe
gtgcaaaacaggctctagcgttcga

SEQ ID NO: 242179 - DNA, 25 bp, probe
gtgaatgacgacagtcaagtttctt

SEQ ID NO: 242180 - DNA, 25 bp, probe
gtgaatgaagaaagtccagacctcg

SEQ ID NO: 242181 - DNA, 25 bp, probe
gtgcattaagaacgacgccactgcc

SEQ ID NO: 242182 - DNA, 25 bp, probe
gtgctctaataacgatgtatatatg

SEQ ID NO: 242183 - DNA, 25 bp, probe
gtgcttgaatatcagcgtgctaagt

SEQ ID NO: 242184 - DNA, 25 bp, probe
gtgccagaagatcgagcagtgtgac

SEQ ID NO: 242185 - DNA, 25 bp, probe
gtgccagaagcaacagaggtgccag

SEQ ID NO: 242186 - DNA, 25 bp, probe
gtgccatgtaaggcttggtgccagc

SEQ ID NO: 242187 - DNA, 25 bp, probe
gtgccagctttgctgtgggcaatgc

SEQ ID NO: 242188 - DNA, 25 bp, probe
gtgctcgctttctatgtagtttggt

SEQ ID NO: 242189 - DNA, 25 bp, probe
gtgctcgctttctatgtagtttggt

SEQ ID NO: 242190 - DNA, 25 bp, probe
gtgctggcagttcggctagatttct

SEQ ID NO: 242191 - DNA, 25 bp, probe
gtgctggcagttcggctagatttct

SEQ ID NO: 242192 - DNA, 25 bp, probe
gtgctggaggtgtcactgcagatgg

SEQ ID NO: 242193 - DNA, 25 bp, probe
gtgctggagcgcgtgcagacacagc

SEQ ID NO: 242194 - DNA, 25 bp, probe
gtgctggacgcgaacagctgccaga

SEQ ID NO: 242195 - DNA, 25 bp, probe
gtgctggaaatgaaactgacaaagg

SEQ ID NO: 242196 - DNA, 25 bp, probe
gtgctggaaatgaaactgacaaagg

SEQ ID NO: 242197 - DNA, 25 bp, probe
gtgcgtgaagcaagaactcctggag

SEQ ID NO: 242198 - DNA, 25 bp, probe
gtgcatgggacaagaacatatgctg

SEQ ID NO: 242199 - DNA, 25 bp, probe
gtgcttggacagcattctcatgtag

SEQ ID NO: 242200 - DNA, 25 bp, probe
gtgcttggaggggttcttaaattat

SEQ ID NO: 242201 - DNA, 25 bp, probe
gtgaaggagcgggttctagttagta

SEQ ID NO: 242202 - DNA, 25 bp, probe
gtgaaggagcgggttctagttagta

SEQ ID NO: 242203 - DNA, 25 bp, probe
gtgaaggatctggcttgtttttaaa

SEQ ID NO: 242204 - DNA, 25 bp, probe
gtgaataactgtgtttcctaccgaa

SEQ ID NO: 242205 - DNA, 25 bp, probe
tgattaagtcctatttttcacctaa

SEQ ID NO: 242206 - DNA, 25 bp, probe
tgtaaattccagtttggttccccag

SEQ ID NO: 242207 - DNA, 25 bp, probe
gtgcaaaagcccaaaggttcctaag

SEQ ID NO: 242208 - DNA, 25 bp, probe
gtgaaaagctaacaagtgttgtaac

SEQ ID NO: 242209 - DNA, 25 bp, probe
ggagacaggaaacacctacctccac

SEQ ID NO: 242210 - DNA, 25 bp, probe
gtgctgacggacacgtcgtacacgc

SEQ ID NO: 242211 - DNA, 25 bp, probe
gtgcatgactggagactggttttcg

SEQ ID NO: 242212 - DNA, 25 bp, probe
gtgctgacgccttactggcaatgct

SEQ ID NO: 242213 - DNA, 25 bp, probe
gtgctacgtcgccctggacttcgag

SEQ ID NO: 242214 - DNA, 25 bp, probe
gtgccagcagccgcggtaattccag

SEQ ID NO: 242215 - DNA, 25 bp, probe
gtgcctgcaccaggggtgcacaata

SEQ ID NO: 242216 - DNA, 25 bp, probe
gtgccaggcagtagggatccagata

SEQ ID NO: 242217 - DNA, 25 bp, probe
gtgccaggctgtaagcattctgagc

SEQ ID NO: 242218 - DNA, 25 bp, probe
gtgcctagctgtacagttatcaggg

SEQ ID NO: 242219 - DNA, 25 bp, probe
gtgcctatggagaagttcaacttgc

SEQ ID NO: 242220 - DNA, 25 bp, probe
gtgcgattgcaggtgtgttaactat

SEQ ID NO: 242221 - DNA, 25 bp, probe
gtgccatcgctggtgtgctaacaat

SEQ ID NO: 242222 - DNA, 25 bp, probe
gtgccatcgctggtgtgctaacaat

SEQ ID NO: 242223 - DNA, 25 bp, probe
gtgcctctatgggggaagcagacaa

SEQ ID NO: 242224 - DNA, 25 bp, probe
gtgcctctatgggggaagcagacaa

SEQ ID NO: 242225 - DNA, 25 bp, probe
gtgcctctaccattagtaagtctga

SEQ ID NO: 242226 - DNA, 25 bp, probe
gtgcctctcaccatcatgaaaagga

SEQ ID NO: 242227 - DNA, 25 bp, probe
gtgcctctcaccatcatgaaaagga

SEQ ID NO: 242228 - DNA, 25 bp, probe
gtgcctctcaccgcagaagagggag

SEQ ID NO: 242229 - DNA, 25 bp, probe
gtgccaccactagagacacagacag

SEQ ID NO: 242230 - DNA, 25 bp, probe
gtgccccacagagaacgatgatcgt

SEQ ID NO: 242231 - DNA, 25 bp, probe
gtgccaccaatagcttctgagtttt

SEQ ID NO: 242232 - DNA, 25 bp, probe
gtgccctgtaacctgactggttaac

SEQ ID NO: 242233 - DNA, 25 bp, probe
gtgcgccgctagtgtgggtttacac

SEQ ID NO: 242234 - DNA, 25 bp, probe
gtgcctggctaagtgggtttctgac

SEQ ID NO: 242235 - DNA, 25 bp, probe
gtgcctggctaagtgggtttctgac

SEQ ID NO: 242236 - DNA, 25 bp, probe
gtgccatggtatttgggtcctggga

SEQ ID NO: 242237 - DNA, 25 bp, probe
gtgtagcgttcttaggaatctggtg

SEQ ID NO: 242238 - DNA, 25 bp, probe
gtgctaggattacaggcatgagcta

SEQ ID NO: 242239 - DNA, 25 bp, probe
gtgctgggcatgaacaatgaggtga

SEQ ID NO: 242240 - DNA, 25 bp, probe
gtgctgggcatgaacaatgaggtga

SEQ ID NO: 242241 - DNA, 25 bp, probe
gtgctgatgtttacaatgatgccga

SEQ ID NO: 242242 - DNA, 25 bp, probe
gtgctggtttaaacattcagcacca

SEQ ID NO: 242243 - DNA, 25 bp, probe
gtgcacgtttcattaatccaaccaa

SEQ ID NO: 242244 - DNA, 25 bp, probe
gtgcctgattactgagtggccacca

SEQ ID NO: 242245 - DNA, 25 bp, probe
gtgcgtattgcctcagtggaggcgc

SEQ ID NO: 242246 - DNA, 25 bp, probe
gtgcgtattgcctcagtggaggcgc

SEQ ID NO: 242247 - DNA, 25 bp, probe
gtgccttgtggcaacgggaggagcg

SEQ ID NO: 242248 - DNA, 25 bp, probe
gtgccttgtggcaactggcggagca

SEQ ID NO: 242249 - DNA, 25 bp, probe
gtgccttgtggcaactggcggagca

SEQ ID NO: 242250 - DNA, 25 bp, probe
gtgcctctggacagcatggggaacc

SEQ ID NO: 242251 - DNA, 25 bp, probe
gtgccttggcagagagacgagaaac

SEQ ID NO: 242252 - DNA, 25 bp, probe
gtgccggggacacacacagagaacc

SEQ ID NO: 242253 - DNA, 25 bp, probe
gtgcccatggtggcggcgaagaaga

SEQ ID NO: 242254 - DNA, 25 bp, probe
gtgcccgcgtggctggaaggaaata

SEQ ID NO: 242255 - DNA, 25 bp, probe
gtgcccagcctgtgaggcactggca

SEQ ID NO: 242256 - DNA, 25 bp, probe
gtgcctgaggtctgatggcctctaa

SEQ ID NO: 242257 - DNA, 25 bp, probe
gtgcctgcagggatgcatgtgtccc

SEQ ID NO: 242258 - DNA, 25 bp, probe
gtgcctgcagggatgcatgtgtccc

SEQ ID NO: 242259 - DNA, 25 bp, probe
gtgcctgtaggcatgcagtgatagc

SEQ ID NO: 242260 - DNA, 25 bp, probe
gtgccagagcaggcgctgcaggaag

SEQ ID NO: 242261 - DNA, 25 bp, probe
gtgcctgagacgcggagacatggct

SEQ ID NO: 242262 - DNA, 25 bp, probe
gtgctgtagagtcggaaacaggcat

SEQ ID NO: 242263 - DNA, 25 bp, probe
gtgcagcgcatcttcgaaaacggct

SEQ ID NO: 242264 - DNA, 25 bp, probe
gtgcagactcaataaaatcatgtac

SEQ ID NO: 242265 - DNA, 25 bp, probe
gtgctggtcaaatcagaacacttct

SEQ ID NO: 242266 - DNA, 25 bp, probe
gtgcgagtggactaacaacagctgt

SEQ ID NO: 242267 - DNA, 25 bp, probe
gtgcccttgcctcataatagatgtg

SEQ ID NO: 242268 - DNA, 25 bp, probe
gtgcccgtggatgtccatatgtggc

SEQ ID NO: 242269 - DNA, 25 bp, probe
gtgcctctgaggaaaactatgtgcc

SEQ ID NO: 242270 - DNA, 25 bp, probe
gtgcctctgaggaaaactatgtgcc

SEQ ID NO: 242271 - DNA, 25 bp, probe
gtgccttatgtctatggattctctg

SEQ ID NO: 242272 - DNA, 25 bp, probe
gtgccttatgtctatggattctctg

SEQ ID NO: 242273 - DNA, 25 bp, probe
gtgcttattggctgccatggctctg

SEQ ID NO: 242274 - DNA, 25 bp, probe
gtgcttatcttcaaggctggcttaa

SEQ ID NO: 242275 - DNA, 25 bp, probe
gtgcttctttcatgtcaggcgttaa

SEQ ID NO: 242276 - DNA, 25 bp, probe
ggtcttactctaccagttttctgac

SEQ ID NO: 242277 - DNA, 25 bp, probe
gtgaattacacatcctcttgttctt

SEQ ID NO: 242278 - DNA, 25 bp, probe
gtgaaataactaccttccactctgg

SEQ ID NO: 242279 - DNA, 25 bp, probe
gtgaatataaaaggacttcatctcc

SEQ ID NO: 242280 - DNA, 25 bp, probe
gtgacacagaagattgccttacgct

SEQ ID NO: 242281 - DNA, 25 bp, probe
gtgaccacaaatgcttgcttggact

SEQ ID NO: 242282 - DNA, 25 bp, probe
gtgcactcaaagaacctcatttacc

SEQ ID NO: 242283 - DNA, 25 bp, probe
gtgctctccagtaactaactaacta

SEQ ID NO: 242284 - DNA, 25 bp, probe
gtgccatcaagtcactaagtcgcat

SEQ ID NO: 242285 - DNA, 25 bp, probe
gtgcctacagtggttcatatcccat

SEQ ID NO: 242286 - DNA, 25 bp, probe
gtgccatacatgttattgttttcaa

SEQ ID NO: 242287 - DNA, 25 bp, probe
gtgtataatgtgctttatttgcaaa

SEQ ID NO: 242288 - DNA, 25 bp, probe
gtgctgctaaggtatgcttatttga

SEQ ID NO: 242289 - DNA, 25 bp, probe
gtgccatcctggtagcagctattgt

SEQ ID NO: 242290 - DNA, 25 bp, probe
gtgcgttctggaccagctactgaat

SEQ ID NO: 242291 - DNA, 25 bp, probe
gtgaatacatgagccagcggctgga

SEQ ID NO: 242292 - DNA, 25 bp, probe
gtgaaacaggaccctgtgcttcctg

SEQ ID NO: 242293 - DNA, 25 bp, probe
gtgaaacaggaccctgtgcttcctg

SEQ ID NO: 242294 - DNA, 25 bp, probe
gtgtaactcgacccagtggtacaat

SEQ ID NO: 242295 - DNA, 25 bp, probe
gtgctcaacatcgtcaacgtggtgt

SEQ ID NO: 242296 - DNA, 25 bp, probe
gtgcctaggcctgggcagtggatgg

SEQ ID NO: 242297 - DNA, 25 bp, probe
gtgcctaggattgtgcctgtatgca

SEQ ID NO: 242298 - DNA, 25 bp, probe
gtgcctggtaagttgccttgtgatt

SEQ ID NO: 242299 - DNA, 25 bp, probe
gtgcctgggacagccatatgatttt

SEQ ID NO: 242300 - DNA, 25 bp, probe
gtgcctgcggccagtcttaaaattc

SEQ ID NO: 242301 - DNA, 25 bp, probe
gtgcctggacaatggtgtacaaata

SEQ ID NO: 242302 - DNA, 25 bp, probe
gtgcctggacaatggtgtacaaata

SEQ ID NO: 242303 - DNA, 25 bp, probe
gtgcaagccaaatggttccaataat

SEQ ID NO: 242304 - DNA, 25 bp, probe
gtgcaatggccagaaggtcccaaac

SEQ ID NO: 242305 - DNA, 25 bp, probe
gtgctgggcggagactgtctcctca

SEQ ID NO: 242306 - DNA, 25 bp, probe
gtgctcaatgcatatgccactgtta

SEQ ID NO: 242307 - DNA, 25 bp, probe
gtgctcttgctattaacgttatttg

SEQ ID NO: 242308 - DNA, 25 bp, probe
gtgctgtgttcagttcaggtttttg

SEQ ID NO: 242309 - DNA, 25 bp, probe
gtgcctttgcaaatcagtgtttttc

SEQ ID NO: 242310 - DNA, 25 bp, probe
gtgctgcatttaactggttatttct

SEQ ID NO: 242311 - DNA, 25 bp, probe
gtgctatttctataaaatcttcatt

SEQ ID NO: 242312 - DNA, 25 bp, probe
gtgctattttaccaacgtcgagatg

SEQ ID NO: 242313 - DNA, 25 bp, probe
gtgctaatgtttgagacgatggcag

SEQ ID NO: 242314 - DNA, 25 bp, probe
gtgcctcttttcagtagtgagcagc

SEQ ID NO: 242315 - DNA, 25 bp, probe
gtgccatttttcttctagcatcgag

SEQ ID NO: 242316 - DNA, 25 bp, probe
gtgccattccataatggcttccaga

SEQ ID NO: 242317 - DNA, 25 bp, probe
gtgcttgtacaactgtgcggccaag

SEQ ID NO: 242318 - DNA, 25 bp, probe
gtgctggctacacatttggacaaga

SEQ ID NO: 242319 - DNA, 25 bp, probe
gtgctggtccgcgtgaagaacaaga

SEQ ID NO: 242320 - DNA, 25 bp, probe
gtgaagtcacaggtgcaagcccacg

SEQ ID NO: 242321 - DNA, 25 bp, probe
gtgaagtcacaggtgcaagcccacg

SEQ ID NO: 242322 - DNA, 25 bp, probe
gtgaagtcacaggtgcaagcccacg

SEQ ID NO: 242323 - DNA, 25 bp, probe
gtgagcagtacatgaacacccggtg

SEQ ID NO: 242324 - DNA, 25 bp, probe
gtgacctatgacaaaacgccgctgg

SEQ ID NO: 242325 - DNA, 25 bp, probe
gtgaatctgtaaataaggcccaagg

SEQ ID NO: 242326 - DNA, 25 bp, probe
gtgaacgtaaaatgtgtcgctccgt

SEQ ID NO: 242327 - DNA, 25 bp, probe
gtgaagaccaaaaaggtcaccccat

SEQ ID NO: 242328 - DNA, 25 bp, probe
ggcaagacaaaatagtggtccacct

SEQ ID NO: 242329 - DNA, 25 bp, probe
tgtaaaataaaaggtcggaccagct

SEQ ID NO: 242330 - DNA, 25 bp, probe
tctaaggaaaaccgtaaacacagag

SEQ ID NO: 242331 - DNA, 25 bp, probe
ttaagggacaccctaataaagcaat

SEQ ID NO: 242332 - DNA, 25 bp, probe
tgtacgggacttcctaaaactctat

SEQ ID NO: 242333 - DNA, 25 bp, probe
gtgacgtggacatccgcaaagacct

SEQ ID NO: 242334 - DNA, 25 bp, probe
gtgccggagacggaccagtggacca

SEQ ID NO: 242335 - DNA, 25 bp, probe
gtgccggagacggaccagtggacca

SEQ ID NO: 242336 - DNA, 25 bp, probe
gtgcccagaagggcagctcctgttc

SEQ ID NO: 242337 - DNA, 25 bp, probe
gtgcccagaggagcagtactcaagc

SEQ ID NO: 242338 - DNA, 25 bp, probe
gtgcccagaggagcagtactcaagc

SEQ ID NO: 242339 - DNA, 25 bp, probe
gtgcactcggtacaccatcaaagca

SEQ ID NO: 242340 - DNA, 25 bp, probe
gtgcacttttacaagccgcaaaggc

SEQ ID NO: 242341 - DNA, 25 bp, probe
gtgctttttagaggagccactgggc

SEQ ID NO: 242342 - DNA, 25 bp, probe
gtgcttgtttacagcactactctgt

SEQ ID NO: 242343 - DNA, 25 bp, probe
gtgcttttcaataggaatcattctt

SEQ ID NO: 242344 - DNA, 25 bp, probe
gtgcttatccaactctgaatctttt

SEQ ID NO: 242345 - DNA, 25 bp, probe
gtgcttatccaactctgaatctttt

SEQ ID NO: 242346 - DNA, 25 bp, probe
gtgcctgtacaagctgatgttttgt

SEQ ID NO: 242347 - DNA, 25 bp, probe
gtgcctgtacaagctgatgttttgt

SEQ ID NO: 242348 - DNA, 25 bp, probe
gtgcctataaccatgttctatattc

SEQ ID NO: 242349 - DNA, 25 bp, probe
gtgcttctacacatttcatctaatt

SEQ ID NO: 242350 - DNA, 25 bp, probe
gtgcagtctacaacttcaccaaatt

SEQ ID NO: 242351 - DNA, 25 bp, probe
gtgcagtctacaacttcaccaaatt

SEQ ID NO: 242352 - DNA, 25 bp, probe
gtgcatgagctgtattcttcacagc

SEQ ID NO: 242353 - DNA, 25 bp, probe
gtgctgcacgtatgcagtatcctat

SEQ ID NO: 242354 - DNA, 25 bp, probe
gtgcgcactggaggagtacgtgagg

SEQ ID NO: 242355 - DNA, 25 bp, probe
gtgcgtctggaagttcctggagaag

SEQ ID NO: 242356 - DNA, 25 bp, probe
gtgcacttaaacgtgttgtggaatg

SEQ ID NO: 242357 - DNA, 25 bp, probe
gtgcacttaaactgtacttcaggga

SEQ ID NO: 242358 - DNA, 25 bp, probe
gtgcacccaaactacttctggatgg

SEQ ID NO: 242359 - DNA, 25 bp, probe
gtgcacccaaactacttctggatgg

SEQ ID NO: 242360 - DNA, 25 bp, probe
gtgcacccaaactacttctggatgg

SEQ ID NO: 242361 - DNA, 25 bp, probe
gtgcacccaaactacttctggatgg

SEQ ID NO: 242362 - DNA, 25 bp, probe
gtgaacctcaactactgctggatat

SEQ ID NO: 242363 - DNA, 25 bp, probe
gtgaatttgttctcgtgagcttctc

SEQ ID NO: 242364 - DNA, 25 bp, probe
gtgattttgtgttcagccgtgagtc

SEQ ID NO: 242365 - DNA, 25 bp, probe
gtgctctgttgtcacaggatgtttc

SEQ ID NO: 242366 - DNA, 25 bp, probe
gtgctctgttgtcacaggatgtttc

SEQ ID NO: 242367 - DNA, 25 bp, probe
gtgctatgcctgtaacaagagcatc

SEQ ID NO: 242368 - DNA, 25 bp, probe
gtgctgttcttattgcagatgaatc

SEQ ID NO: 242369 - DNA, 25 bp, probe
gtgcgctgtattttgcagattatgg

SEQ ID NO: 242370 - DNA, 25 bp, probe
gtgccctaatgcttgcattgtgctg

SEQ ID NO: 242371 - DNA, 25 bp, probe
gtgccctaatgcttgcattgtgctg

SEQ ID NO: 242372 - DNA, 25 bp, probe
gtgccctgccatggacatatggggc

SEQ ID NO: 242373 - DNA, 25 bp, probe
gtgcccgtcatggaagaggcggcca

SEQ ID NO: 242374 - DNA, 25 bp, probe
gtgcccatttgcatcagggctggcc

SEQ ID NO: 242375 - DNA, 25 bp, probe
gtgccctgcgtgaagagcatcgtga

SEQ ID NO: 242376 - DNA, 25 bp, probe
gtgcgccgtgtgaagactcagatgt

SEQ ID NO: 242377 - DNA, 25 bp, probe
gtgccgctgttcagcaagcagagga

SEQ ID NO: 242378 - DNA, 25 bp, probe
gtgccgctgttcagcaagcagagga

SEQ ID NO: 242379 - DNA, 25 bp, probe
gtgccctggaacgcaagaggatttc

SEQ ID NO: 242380 - DNA, 25 bp, probe
gtgcccgagaacgagaacaggatgg

SEQ ID NO: 242381 - DNA, 25 bp, probe
gtgagacggacacagacacggaccc

SEQ ID NO: 242382 - DNA, 25 bp, probe
gtgaggggacaaggggcaggtccca

SEQ ID NO: 242383 - DNA, 25 bp, probe
gtggtaggagttggggggctccact

SEQ ID NO: 242384 - DNA, 25 bp, probe
gtgagtcaggcctgggttggccacc

SEQ ID NO: 242385 - DNA, 25 bp, probe
gtgacaaggccctgagctttgtcct

SEQ ID NO: 242386 - DNA, 25 bp, probe
gtgtaacggccaacactttgttcgc

SEQ ID NO: 242387 - DNA, 25 bp, probe
gtgtaagggcttgcctggattctac

SEQ ID NO: 242388 - DNA, 25 bp, probe
gtgctaggaggtggactcaggactt

SEQ ID NO: 242389 - DNA, 25 bp, probe
gtgctaggaggtggactcaggactt

SEQ ID NO: 242390 - DNA, 25 bp, probe
gtgcctgtggagaggtaaagctggc

SEQ ID NO: 242391 - DNA, 25 bp, probe
gtgcgtgtgaaacagcgtaacggag

SEQ ID NO: 242392 - DNA, 25 bp, probe
gtgcggtgattacacacttgacagt

SEQ ID NO: 242393 - DNA, 25 bp, probe
gtgctgggattacaggcgtgagcca

SEQ ID NO: 242394 - DNA, 25 bp, probe
gtgcgggaccagcagaatttgccct

SEQ ID NO: 242395 - DNA, 25 bp, probe
gtgcgggaccagcagaatttgccct

SEQ ID NO: 242396 - DNA, 25 bp, probe
gtgcttagaacacaggtgtcttcct

SEQ ID NO: 242397 - DNA, 25 bp, probe
gtgcttggttgactaaccttgtcct

SEQ ID NO: 242398 - DNA, 25 bp, probe
gtgctctggttacattacctgacag

SEQ ID NO: 242399 - DNA, 25 bp, probe
gtgcactggttgtgatctacctgct

SEQ ID NO: 242400 - DNA, 25 bp, probe
gtgccgagctctatgaaaagctgcc

SEQ ID NO: 242401 - DNA, 25 bp, probe
gtgcgcgcgatgcattcgaagatct

SEQ ID NO: 242402 - DNA, 25 bp, probe
gtgcgcgcgatgcattcgaagatct

SEQ ID NO: 242403 - DNA, 25 bp, probe
gtgctctctgctggattctaaatta

SEQ ID NO: 242404 - DNA, 25 bp, probe
gtgcttcatgtcctcttgatgacat

SEQ ID NO: 242405 - DNA, 25 bp, probe
gtgcgcacagcttctttgatgaact

SEQ ID NO: 242406 - DNA, 25 bp, probe
gtgcgcacagcttctttgatgaact

SEQ ID NO: 242407 - DNA, 25 bp, probe
gtgctggcctgtttgtgatgatcag

SEQ ID NO: 242408 - DNA, 25 bp, probe
gtgcttgatctgacatttgtataca

SEQ ID NO: 242409 - DNA, 25 bp, probe
gtgctggacgaaagcctgaacaaaa

SEQ ID NO: 242410 - DNA, 25 bp, probe
gtgcgtggagtgcagctgctaaaaa

SEQ ID NO: 242411 - DNA, 25 bp, probe
gtgcgggtggggctgcagaagatca

SEQ ID NO: 242412 - DNA, 25 bp, probe
gtgcgggtggggctgcagaagatca

SEQ ID NO: 242413 - DNA, 25 bp, probe
gtgcgtggtgtgcggagacaagtcg

SEQ ID NO: 242414 - DNA, 25 bp, probe
gtgcgagggtggacgctacacagtg

SEQ ID NO: 242415 - DNA, 25 bp, probe
gtgctggggattaccatgtccagat

SEQ ID NO: 242416 - DNA, 25 bp, probe
gtgcttggtgctcaccattatgaat

SEQ ID NO: 242417 - DNA, 25 bp, probe
gtgcatcgcgtgatatccgttgatg

SEQ ID NO: 242418 - DNA, 25 bp, probe
gtgcttgcagatgctttcggtagag

SEQ ID NO: 242419 - DNA, 25 bp, probe
gtgcttgaggatgatccggaagcag

SEQ ID NO: 242420 - DNA, 25 bp, probe
gtgcggaggaagtagctggacaggc

SEQ ID NO: 242421 - DNA, 25 bp, probe
gtgcggaggaagtagctggacaggc

SEQ ID NO: 242422 - DNA, 25 bp, probe
gtgcgcagggcatttgggagagggc

SEQ ID NO: 242423 - DNA, 25 bp, probe
gtgcgcagggcatttgggagagggc

SEQ ID NO: 242424 - DNA, 25 bp, probe
gtgcgatggtctttctgtagaggac

SEQ ID NO: 242425 - DNA, 25 bp, probe
gtgcgaggccctccagggaggaagt

SEQ ID NO: 242426 - DNA, 25 bp, probe
gtgcgaagtctggtaaggacgaagc

SEQ ID NO: 242427 - DNA, 25 bp, probe
gtgcgaagtctggtaaggacgaagc

SEQ ID NO: 242428 - DNA, 25 bp, probe
gtgcatgaagttgtgaaggtcctac

SEQ ID NO: 242429 - DNA, 25 bp, probe
gtgcactacattggggagtctgcct

SEQ ID NO: 242430 - DNA, 25 bp, probe
gtgcactacttctaaggatgcccca

SEQ ID NO: 242431 - DNA, 25 bp, probe
gtgcccactaaatggtggctgttga

SEQ ID NO: 242432 - DNA, 25 bp, probe
gtgcactgcctaaacgggggaggac

SEQ ID NO: 242433 - DNA, 25 bp, probe
gtgccgccttagacggaggcaggag

SEQ ID NO: 242434 - DNA, 25 bp, probe
gtgctagttcatagggagcaggaag

SEQ ID NO: 242435 - DNA, 25 bp, probe
gtgcggttcattgactatgaatatg

SEQ ID NO: 242436 - DNA, 25 bp, probe
gtgaggttcattgtctccaaaaaca

SEQ ID NO: 242437 - DNA, 25 bp, probe
gtgaggttcattgtctccaaaaaca

SEQ ID NO: 242438 - DNA, 25 bp, probe
gtgcaagttcaatccctaaaacaaa

SEQ ID NO: 242439 - DNA, 25 bp, probe
tgactcttaaccccctagaaagaca

SEQ ID NO: 242440 - DNA, 25 bp, probe
gtgctcttgaagcccccaagtaaga

SEQ ID NO: 242441 - DNA, 25 bp, probe
gtgctcttgaagcccccaagtaaga

SEQ ID NO: 242442 - DNA, 25 bp, probe
gtgacttgatgacaccccagttcac

SEQ ID NO: 242443 - DNA, 25 bp, probe
gtgcactgactgtgaaacctttacc

SEQ ID NO: 242444 - DNA, 25 bp, probe
gtgcagtgatgtttacaaccaattg

SEQ ID NO: 242445 - DNA, 25 bp, probe
gtgcaggttatatcaggtcaattct

SEQ ID NO: 242446 - DNA, 25 bp, probe
gtgcaagctttaacagactaagttg

SEQ ID NO: 242447 - DNA, 25 bp, probe
gtgcccttgtgaaaggatgccgttg

SEQ ID NO: 242448 - DNA, 25 bp, probe
gtgccctgtgtaaatggatttgtgt

SEQ ID NO: 242449 - DNA, 25 bp, probe
gtgcgagtggctacaaggaggtggt

SEQ ID NO: 242450 - DNA, 25 bp, probe
gtgcgcattgagatccatggggtgc

SEQ ID NO: 242451 - DNA, 25 bp, probe
gtgcgccaagttgctgctggaagca

SEQ ID NO: 242452 - DNA, 25 bp, probe
gtgcgccaagttgctgctggaagca

SEQ ID NO: 242453 - DNA, 25 bp, probe
gtgctgatctagaggtgcaggagaa

SEQ ID NO: 242454 - DNA, 25 bp, probe
gtgctcattgagtggctgtgtggag

SEQ ID NO: 242455 - DNA, 25 bp, probe
gtgctccagcgggcacttggagatg

SEQ ID NO: 242456 - DNA, 25 bp, probe
gtgctccagcgggcacttggagatg

SEQ ID NO: 242457 - DNA, 25 bp, probe
gtgctacactggaatttggaaatct

SEQ ID NO: 242458 - DNA, 25 bp, probe
gtgctacactggaatttggaaatct

SEQ ID NO: 242459 - DNA, 25 bp, probe
tgctctacctccatttagggatttg

SEQ ID NO: 242460 - DNA, 25 bp, probe
gtgctctacctccatttagggattt

SEQ ID NO: 242461 - DNA, 25 bp, probe
gtgctctacctccatttagggattt

SEQ ID NO: 242462 - DNA, 25 bp, probe
gtgcattacccaaggtcgtgttttg

SEQ ID NO: 242463 - DNA, 25 bp, probe
gtgacccccagagaagcatgtatgt

SEQ ID NO: 242464 - DNA, 25 bp, probe
gtgactgccctgcagcaaagtggct

SEQ ID NO: 242465 - DNA, 25 bp, probe
gtgcactcacttcacaaatttgaat

SEQ ID NO: 242466 - DNA, 25 bp, probe
gtgcagatattcctaaagttttatt

SEQ ID NO: 242467 - DNA, 25 bp, probe
gtgcactttgcactagaagactttg

SEQ ID NO: 242468 - DNA, 25 bp, probe
gtgctcttaagcctaaatgccttag

SEQ ID NO: 242469 - DNA, 25 bp, probe
gtgctttgaacccaattctctatac

SEQ ID NO: 242470 - DNA, 25 bp, probe
gtgctttgaacccaattctctatac

SEQ ID NO: 242471 - DNA, 25 bp, probe
gtgaattatgaccaaatctccgata

SEQ ID NO: 242472 - DNA, 25 bp, probe
gtgctttatgaccagcttttctgat

SEQ ID NO: 242473 - DNA, 25 bp, probe
gtgctgatgtacatactttctcgta

SEQ ID NO: 242474 - DNA, 25 bp, probe
gtgcgtgtcaaatattcatctagtc

SEQ ID NO: 242475 - DNA, 25 bp, probe
gtgcgtgtaactgtagtgtagtcag

SEQ ID NO: 242476 - DNA, 25 bp, probe
gtgcaggtaacccttggtctgtaag

SEQ ID NO: 242477 - DNA, 25 bp, probe
gtgcgggtcataagcttgcgttgat

SEQ ID NO: 242478 - DNA, 25 bp, probe
gtgcgtgttcatatatgggcttgct

SEQ ID NO: 242479 - DNA, 25 bp, probe
gtgcaggtacatatgatggttccat

SEQ ID NO: 242480 - DNA, 25 bp, probe
gtgcggaagatgctgctggtgtggg

SEQ ID NO: 242481 - DNA, 25 bp, probe
gtgctggagcggatgcggtatgaag

SEQ ID NO: 242482 - DNA, 25 bp, probe
gtgctggagttgctggtgttgaaga

SEQ ID NO: 242483 - DNA, 25 bp, probe
gtgctggagatctttggctttgagg

SEQ ID NO: 242484 - DNA, 25 bp, probe
gtgcggcagatatctggagtctggg

SEQ ID NO: 242485 - DNA, 25 bp, probe
gtgctgtggtggatggacctgggca

SEQ ID NO: 242486 - DNA, 25 bp, probe
gtgttgtactggtgacctgggatgc

SEQ ID NO: 242487 - DNA, 25 bp, probe
gtgttgtactggtgacctgggatgc

SEQ ID NO: 242488 - DNA, 25 bp, probe
gtgcttgtcctggttattgtcggta

SEQ ID NO: 242489 - DNA, 25 bp, probe
gggctgcatcactgttatagggggt

SEQ ID NO: 242490 - DNA, 25 bp, probe
gggccatcgccatttttatgggggc

SEQ ID NO: 242491 - DNA, 25 bp, probe
gtgaccaggcctttttttggtggat

SEQ ID NO: 242492 - DNA, 25 bp, probe
gtgaaatggattgtattttggttta

SEQ ID NO: 242493 - DNA, 25 bp, probe
gtgaatcccaatggtattttacttt

SEQ ID NO: 242494 - DNA, 25 bp, probe
gtgcagattcaatgttcttgttaca

SEQ ID NO: 242495 - DNA, 25 bp, probe
gtgcagagtcactgtgtcatcgatg

SEQ ID NO: 242496 - DNA, 25 bp, probe
gtgcgcatctgccaggtggtctggc

SEQ ID NO: 242497 - DNA, 25 bp, probe
gtgcagcattgttggctgttcctgc

SEQ ID NO: 242498 - DNA, 25 bp, probe
gtgcgtatgaaagtgtgtgtctgct

SEQ ID NO: 242499 - DNA, 25 bp, probe
gtgcagtggcacaatcgtggctcac

SEQ ID NO: 242500 - DNA, 25 bp, probe
gtgcagtggcatgatcttggctcac

SEQ ID NO: 242501 - DNA, 25 bp, probe
gtgctggagctggctttgccaagct

SEQ ID NO: 242502 - DNA, 25 bp, probe
gtgctgaagctggtctgtgcagaca

SEQ ID NO: 242503 - DNA, 25 bp, probe
gtgctgaagctggtctgtgcagaca

SEQ ID NO: 242504 - DNA, 25 bp, probe
gtgcttagcgcaaatggcagctctc

SEQ ID NO: 242505 - DNA, 25 bp, probe
gtgcttagctcttcgatacttacac

SEQ ID NO: 242506 - DNA, 25 bp, probe
gtgctcagagtccctgctaatgtaa

SEQ ID NO: 242507 - DNA, 25 bp, probe
gtgctctgagcttgaattttgatac

SEQ ID NO: 242508 - DNA, 25 bp, probe
gtgctgctatgttgacattattctt

SEQ ID NO: 242509 - DNA, 25 bp, probe
gtgctgccatgtccacaagatttgg

SEQ ID NO: 242510 - DNA, 25 bp, probe
gtgctgctctcggagcagggtgatg

SEQ ID NO: 242511 - DNA, 25 bp, probe
gtgctgctctcggagcagggtgatg

SEQ ID NO: 242512 - DNA, 25 bp, probe
gtgcatctgtcagccagactggaca

SEQ ID NO: 242513 - DNA, 25 bp, probe
gtgctggagatgttcgactggaacc

SEQ ID NO: 242514 - DNA, 25 bp, probe
gtgctggcaggagctgactgtggac

SEQ ID NO: 242515 - DNA, 25 bp, probe
gtgcataaggacttggctgcgcgta

SEQ ID NO: 242516 - DNA, 25 bp, probe
gtgcataaggacttggctgcgcgta

SEQ ID NO: 242517 - DNA, 25 bp, probe
gtgctctgtgcgccaatggcgcggt

SEQ ID NO: 242518 - DNA, 25 bp, probe
gtgctctgtggaccacagcctaagc

SEQ ID NO: 242519 - DNA, 25 bp, probe
gtgctcatctgttgcacacagctca

SEQ ID NO: 242520 - DNA, 25 bp, probe
gtgcactgcagttcaacagccacac

SEQ ID NO: 242521 - DNA, 25 bp, probe
gtgcttgattccaaccagacacgaa

SEQ ID NO: 242522 - DNA, 25 bp, probe
gtgcttgaagccatcaaggccacca

SEQ ID NO: 242523 - DNA, 25 bp, probe
gtgcaggggccattcaaccaaagca

SEQ ID NO: 242524 - DNA, 25 bp, probe
gtgcaggagagtttcagggacaatt

SEQ ID NO: 242525 - DNA, 25 bp, probe
gtgcaagaagaaatctgagtcagca

SEQ ID NO: 242526 - DNA, 25 bp, probe
gtgctgaaaaatgctcatctctcac

SEQ ID NO: 242527 - DNA, 25 bp, probe
gtgctgaataaatctcttgctgaac

SEQ ID NO: 242528 - DNA, 25 bp, probe
gtgctgtattaagtgctttatgaac

SEQ ID NO: 242529 - DNA, 25 bp, probe
gtgctgtattaagtgctttatgaac

SEQ ID NO: 242530 - DNA, 25 bp, probe
gtgctggattccatgctgttgatgt

SEQ ID NO: 242531 - DNA, 25 bp, probe
gtgctggtgtttgcgggatgttggc

SEQ ID NO: 242532 - DNA, 25 bp, probe
gtgctgtggcttagccggaggggac

SEQ ID NO: 242533 - DNA, 25 bp, probe
gtgctggaattggccggacagggac

SEQ ID NO: 242534 - DNA, 25 bp, probe
gtgctggtgtgggtaggactggaac

SEQ ID NO: 242535 - DNA, 25 bp, probe
gtgctctgttgtgttggagggaagg

SEQ ID NO: 242536 - DNA, 25 bp, probe
gtgcttgcatttctagcgagctggc

SEQ ID NO: 242537 - DNA, 25 bp, probe
gtgcttctctacgatatggtgtgtg

SEQ ID NO: 242538 - DNA, 25 bp, probe
gtgcttgccaatagttgttttgttt

SEQ ID NO: 242539 - DNA, 25 bp, probe
gtgctgtacataagttgttctgtgt

SEQ ID NO: 242540 - DNA, 25 bp, probe
gtgctgatagcactcgtggtgtctg

SEQ ID NO: 242541 - DNA, 25 bp, probe
gtgctcatgaagccagtgcgtttcc

SEQ ID NO: 242542 - DNA, 25 bp, probe
gtgctcatgaagccagtgcgtttcc

SEQ ID NO: 242543 - DNA, 25 bp, probe
gtgctcatgaagccagtgcgtttcc

SEQ ID NO: 242544 - DNA, 25 bp, probe
gtgcatagcatacactgttttcaat

SEQ ID NO: 242545 - DNA, 25 bp, probe
gtgcatagcatacactgttttcaat

SEQ ID NO: 242546 - DNA, 25 bp, probe
gtgctgtgcaagtcactggtttttt

SEQ ID NO: 242547 - DNA, 25 bp, probe
gtgcttcaaaccctatgtgtggctt

SEQ ID NO: 242548 - DNA, 25 bp, probe
gtgcattcaaacgcactgctctgag

SEQ ID NO: 242549 - DNA, 25 bp, probe
gtgcttaaaagccatgtttaaactc

SEQ ID NO: 242550 - DNA, 25 bp, probe
gtgctacaccaatatttctatgaac

SEQ ID NO: 242551 - DNA, 25 bp, probe
gtgctacaccaatatttctatgaac

SEQ ID NO: 242552 - DNA, 25 bp, probe
gtgcaaccgcacagaaggctttatc

SEQ ID NO: 242553 - DNA, 25 bp, probe
gtgcaacaaacataccctttatctc

SEQ ID NO: 242554 - DNA, 25 bp, probe
gtgctctgaaaaagacaccgtttct

SEQ ID NO: 242555 - DNA, 25 bp, probe
gtgctagcaaggtaacctggccttt

SEQ ID NO: 242556 - DNA, 25 bp, probe
gtgctagcaaggtaacctggccttt

SEQ ID NO: 242557 - DNA, 25 bp, probe
gtgctgactgaggagggcacgactc

SEQ ID NO: 242558 - DNA, 25 bp, probe
gtgctgactgaggagggcacgactc

SEQ ID NO: 242559 - DNA, 25 bp, probe
gtgctgcagtggggggagatgccta

SEQ ID NO: 242560 - DNA, 25 bp, probe
gtgctgcaattgtccaggcgatgac

SEQ ID NO: 242561 - DNA, 25 bp, probe
gtgctcagactgtggattgaacgta

SEQ ID NO: 242562 - DNA, 25 bp, probe
gtgtagacttttttgtaagatacgg

SEQ ID NO: 242563 - DNA, 25 bp, probe
gtgctaactttgtattcttagacat

SEQ ID NO: 242564 - DNA, 25 bp, probe
gtgctaactttgtattcttagacat

SEQ ID NO: 242565 - DNA, 25 bp, probe
gtgctatcgttcaacttcaaaacat

SEQ ID NO: 242566 - DNA, 25 bp, probe
gtgctatccttcagatccaatcaag

SEQ ID NO: 242567 - DNA, 25 bp, probe
gtgctttttgggaccatcactgaga

SEQ ID NO: 242568 - DNA, 25 bp, probe
gtgctactgtggctgaggtacatgt

SEQ ID NO: 242569 - DNA, 25 bp, probe
gtgctacgtgctcatcattgctaag

SEQ ID NO: 242570 - DNA, 25 bp, probe
gtgcattaatgcctccatttacagc

SEQ ID NO: 242571 - DNA, 25 bp, probe
gtgctgctcttccttatttgcagcc

SEQ ID NO: 242572 - DNA, 25 bp, probe
gtgctgctcttccttatttgcagcc

SEQ ID NO: 242573 - DNA, 25 bp, probe
gtgctgttgcctctaatatgagaga

SEQ ID NO: 242574 - DNA, 25 bp, probe
gtgctgttcctatagcatggcagga

SEQ ID NO: 242575 - DNA, 25 bp, probe
gtgctgttcctatagcatggcagga

SEQ ID NO: 242576 - DNA, 25 bp, probe
gtgcagtctactttgctgaggtgga

SEQ ID NO: 242577 - DNA, 25 bp, probe
gtgactgctactttgggaatgggtc

SEQ ID NO: 242578 - DNA, 25 bp, probe
gtgcacctctctacttgggaggtac

SEQ ID NO: 242579 - DNA, 25 bp, probe
gtgcaatcctttctgtggatgaaat

SEQ ID NO: 242580 - DNA, 25 bp, probe
gtgttggctttgacctggaggaatt

SEQ ID NO: 242581 - DNA, 25 bp, probe
gtgctgtggtgcatggcagcggagg

SEQ ID NO: 242582 - DNA, 25 bp, probe
gtgctgtggtgcatggcagcggagg

SEQ ID NO: 242583 - DNA, 25 bp, probe
gtgctgtgtgtgacatagacaccag

SEQ ID NO: 242584 - DNA, 25 bp, probe
gtgctgtctggcggcaccaccatgt

SEQ ID NO: 242585 - DNA, 25 bp, probe
gtgctcaatggtgtctgcaccttct

SEQ ID NO: 242586 - DNA, 25 bp, probe
gtgctcacgtgtgtatgcacgtgtg

SEQ ID NO: 242587 - DNA, 25 bp, probe
gtgcattgcgttgtggaattgggaa

SEQ ID NO: 242588 - DNA, 25 bp, probe
gtgcaacctctgtggcaagcgagga

SEQ ID NO: 242589 - DNA, 25 bp, probe
gtgcagaaagctcgaccaagccgaa

SEQ ID NO: 242590 - DNA, 25 bp, probe
gtgagatcagatgtggccaagggaa

SEQ ID NO: 242591 - DNA, 25 bp, probe
gtgagatcagatgtggccaagggaa

SEQ ID NO: 242592 - DNA, 25 bp, probe
gtgacatcggttcaggaggagacag

SEQ ID NO: 242593 - DNA, 25 bp, probe
gtgaactggtctcactggaaccaga

SEQ ID NO: 242594 - DNA, 25 bp, probe
gtgaatgcggctgacattgagaacc

SEQ ID NO: 242595 - DNA, 25 bp, probe
gtgaagggcgtcaatctggaccaca

SEQ ID NO: 242596 - DNA, 25 bp, probe
gtgaagacggtcaacgagtcagcca

SEQ ID NO: 242597 - DNA, 25 bp, probe
gtgaaagtggtttagtgctagaagg

SEQ ID NO: 242598 - DNA, 25 bp, probe
gtgatcaagggtgtggttagtggag

SEQ ID NO: 242599 - DNA, 25 bp, probe
gtgcacacagggcgggtgtggggca

SEQ ID NO: 242600 - DNA, 25 bp, probe
gtgcacacagggcgggtgtggggca

SEQ ID NO: 242601 - DNA, 25 bp, probe
gtgaatgggctgggggtggggtggc

SEQ ID NO: 242602 - DNA, 25 bp, probe
gtgacagagggggtgggacaggggc

SEQ ID NO: 242603 - DNA, 25 bp, probe
gtgaagctggggttgaggatccatt

SEQ ID NO: 242604 - DNA, 25 bp, probe
gtgcaaagtgggacgcggcacctac

SEQ ID NO: 242605 - DNA, 25 bp, probe
gtgcaaagtgggacgcggcacctac

SEQ ID NO: 242606 - DNA, 25 bp, probe
gtgagaagtacagggcagaaccaag

SEQ ID NO: 242607 - DNA, 25 bp, probe
gtgcacaaggactggaactccaacc

SEQ ID NO: 242608 - DNA, 25 bp, probe
gtgcaggagggatgataaccaaaat

SEQ ID NO: 242609 - DNA, 25 bp, probe
gtgcacgaggtgaaggaccacaaat

SEQ ID NO: 242610 - DNA, 25 bp, probe
gtgcacgaggtgaaggaccacaaat

SEQ ID NO: 242611 - DNA, 25 bp, probe
gtgctgacagagctagtgtccaaaa

SEQ ID NO: 242612 - DNA, 25 bp, probe
gtgcatcgagatctgaagcccgaga

SEQ ID NO: 242613 - DNA, 25 bp, probe
gtgctaggcatggtgtcttcacagg

SEQ ID NO: 242614 - DNA, 25 bp, probe
gtgctaggcatggtgtcttcacagg

SEQ ID NO: 242615 - DNA, 25 bp, probe
gtgctcaacatatgctctgatgacg

SEQ ID NO: 242616 - DNA, 25 bp, probe
gtgcttcttcatggatctgtgacag

SEQ ID NO: 242617 - DNA, 25 bp, probe
gtgcttctccttgcgcatgaagagt

SEQ ID NO: 242618 - DNA, 25 bp, probe
gtgctcactcccaagggacagcaag

SEQ ID NO: 242619 - DNA, 25 bp, probe
gtgctgacccaggaggcatacacac

SEQ ID NO: 242620 - DNA, 25 bp, probe
gtgctgagggacgatatgtactatt

SEQ ID NO: 242621 - DNA, 25 bp, probe
gtgcatgatgacgaggatattgact

SEQ ID NO: 242622 - DNA, 25 bp, probe
gtgagatgaggctagcgattgccct

SEQ ID NO: 242623 - DNA, 25 bp, probe
gtgcacaagagcacgcaggcgcttc

SEQ ID NO: 242624 - DNA, 25 bp, probe
gtgcacaagagcacgcaggcgcttc

SEQ ID NO: 242625 - DNA, 25 bp, probe
gtgacacaggttctggccaatgatt

SEQ ID NO: 242626 - DNA, 25 bp, probe
gtgacaaagtcaacaggcaaggtaa

SEQ ID NO: 242627 - DNA, 25 bp, probe
gtgatcaaagccacactctgggctc

SEQ ID NO: 242628 - DNA, 25 bp, probe
gtgatcaaagccacactctgggctc

SEQ ID NO: 242629 - DNA, 25 bp, probe
gtgcatcaactgcaaactgctggtc

SEQ ID NO: 242630 - DNA, 25 bp, probe
gtgcatcaactgcaaactgctggtc

SEQ ID NO: 242631 - DNA, 25 bp, probe
gtgcatcaacggcaaagtgctgatc

SEQ ID NO: 242632 - DNA, 25 bp, probe
gtgcaaatgcagctgaaaccatatc

SEQ ID NO: 242633 - DNA, 25 bp, probe
gtgcagacagaggatgagtaccagt

SEQ ID NO: 242634 - DNA, 25 bp, probe
gtgctacatgagatggaaagcgtgt

SEQ ID NO: 242635 - DNA, 25 bp, probe
gtgctcactgtgtataggaatttgt

SEQ ID NO: 242636 - DNA, 25 bp, probe
gtgcacgattttgagaatgtactaa

SEQ ID NO: 242637 - DNA, 25 bp, probe
gtgaagtatttgaagccatcaacat

SEQ ID NO: 242638 - DNA, 25 bp, probe
gtgacgtgactcagaccatcaatac

SEQ ID NO: 242639 - DNA, 25 bp, probe
gtgacgtgactcagaccatcaatac

SEQ ID NO: 242640 - DNA, 25 bp, probe
gtgaatggcgtgagcccataatgga

SEQ ID NO: 242641 - DNA, 25 bp, probe
gtgaatggcgtgagcccataatgga

SEQ ID NO: 242642 - DNA, 25 bp, probe
gtgcacgacctaagacttcacaggg

SEQ ID NO: 242643 - DNA, 25 bp, probe
gtgcactacgagcagatctttggga

SEQ ID NO: 242644 - DNA, 25 bp, probe
gtgctctcgaattacataatgacga

SEQ ID NO: 242645 - DNA, 25 bp, probe
gtgcttgtgaagggatgagagagct

SEQ ID NO: 242646 - DNA, 25 bp, probe
gtgctcatgctggagtgctggagga

SEQ ID NO: 242647 - DNA, 25 bp, probe
gtgctcatgctggagtgctggagga

SEQ ID NO: 242648 - DNA, 25 bp, probe
gtgctcatctccggagctgatagca

SEQ ID NO: 242649 - DNA, 25 bp, probe
gtgcatatgcttgacagctttgaaa

SEQ ID NO: 242650 - DNA, 25 bp, probe
gtgcatagatatgaagacttgatga

SEQ ID NO: 242651 - DNA, 25 bp, probe
gtgcattacatgcagagtctgattg

SEQ ID NO: 242652 - DNA, 25 bp, probe
gtgctgatgatcagaatgctgcgat

SEQ ID NO: 242653 - DNA, 25 bp, probe
gtgcatgtgcacaggatgggaaatt

SEQ ID NO: 242654 - DNA, 25 bp, probe
gtgcattgccccttgggatatattt

SEQ ID NO: 242655 - DNA, 25 bp, probe
gtgcttgctaaatggtgtacatttc

SEQ ID NO: 242656 - DNA, 25 bp, probe
gtgcttctggtttgtcttatattct

SEQ ID NO: 242657 - DNA, 25 bp, probe
gtgctcctgatcaatttcgtatttc

SEQ ID NO: 242658 - DNA, 25 bp, probe
gtgcatcctacatctcaggttctac

SEQ ID NO: 242659 - DNA, 25 bp, probe
gtgcagcccaaggcacagggactgc

SEQ ID NO: 242660 - DNA, 25 bp, probe
gtgaagcctcccaagggactgaagt

SEQ ID NO: 242661 - DNA, 25 bp, probe
gtgaaaggcccttgggaatgaaggc

SEQ ID NO: 242662 - DNA, 25 bp, probe
gtgaaggagcctatggagttgtact

SEQ ID NO: 242663 - DNA, 25 bp, probe
gtgaaggagcctatggagttgtact

SEQ ID NO: 242664 - DNA, 25 bp, probe
gtgcaaggaggcttgctggacctaa

SEQ ID NO: 242665 - DNA, 25 bp, probe
gtgcaatgaaggtgataacagtaaa

SEQ ID NO: 242666 - DNA, 25 bp, probe
gtgcaaatagtgtcaaaagtaaatt

SEQ ID NO: 242667 - DNA, 25 bp, probe
gtgacacacactttgaagagtaaca

SEQ ID NO: 242668 - DNA, 25 bp, probe
gtgcatcaggcacttcggaagattc

SEQ ID NO: 242669 - DNA, 25 bp, probe
gtgcatcaggcacttcggaagattc

SEQ ID NO: 242670 - DNA, 25 bp, probe
gtgctccagcaagtctgagtctgat

SEQ ID NO: 242671 - DNA, 25 bp, probe
gtgctccagcaagtctgagtctgat

SEQ ID NO: 242672 - DNA, 25 bp, probe
gtgcatccagtattctggttttttg

SEQ ID NO: 242673 - DNA, 25 bp, probe
gtgcatccagtattctggttttttg

SEQ ID NO: 242674 - DNA, 25 bp, probe
gtgaccgatgctttggtttgggtga

SEQ ID NO: 242675 - DNA, 25 bp, probe
gtgaaaagtttggtaatgggatagg

SEQ ID NO: 242676 - DNA, 25 bp, probe
gtgaaaaacagtatattgggaagct

SEQ ID NO: 242677 - DNA, 25 bp, probe
gtgaagcaaatcagaaacttgtgaa

SEQ ID NO: 242678 - DNA, 25 bp, probe
gtgacggatatgtgaaatttgtaga

SEQ ID NO: 242679 - DNA, 25 bp, probe
gtgcaaaatctgttatagctttaaa

SEQ ID NO: 242680 - DNA, 25 bp, probe
gtgcaaaatctgttatagctttaaa

SEQ ID NO: 242681 - DNA, 25 bp, probe
gtgaacatattgcttagtaacaaat

SEQ ID NO: 242682 - DNA, 25 bp, probe
gtgaagctatggctctaaatgagaa

SEQ ID NO: 242683 - DNA, 25 bp, probe
gtgaactcatatttctaaggtaaga

SEQ ID NO: 242684 - DNA, 25 bp, probe
gtgagactccatctcttaaaaaaaa

SEQ ID NO: 242685 - DNA, 25 bp, probe
gtgcagaccacaacctcaaaacaaa

SEQ ID NO: 242686 - DNA, 25 bp, probe
gtgcatgacctctacattgaaaaca

SEQ ID NO: 242687 - DNA, 25 bp, probe
gtgcacagcactttattgttacaaa

SEQ ID NO: 242688 - DNA, 25 bp, probe
gtgctctacttcattgagtaaaatc

SEQ ID NO: 242689 - DNA, 25 bp, probe
gtgacgacttcgatagtagatgatt

SEQ ID NO: 242690 - DNA, 25 bp, probe
gtgaagaagtcgttcctactgacat

SEQ ID NO: 242691 - DNA, 25 bp, probe
gtgaaagaacttgcctcactgcacg

SEQ ID NO: 242692 - DNA, 25 bp, probe
gtgagaagctaaatgccctccaact

SEQ ID NO: 242693 - DNA, 25 bp, probe
gtgcatttgctatgtgccgtcagca

SEQ ID NO: 242694 - DNA, 25 bp, probe
gtgcattgttgatgaggattcgccc

SEQ ID NO: 242695 - DNA, 25 bp, probe
gtgctctgtgcctaaggtgaagcca

SEQ ID NO: 242696 - DNA, 25 bp, probe
gtgcttggcgtgtgggaatccaccc

SEQ ID NO: 242697 - DNA, 25 bp, probe
gtgttggctgtgagtctaataccag

SEQ ID NO: 242698 - DNA, 25 bp, probe
gtgctttttgacctgtcacaagcgc

SEQ ID NO: 242699 - DNA, 25 bp, probe
gtgctttggtgcaaggtacaaggcc

SEQ ID NO: 242700 - DNA, 25 bp, probe
gtgcttatgtatgaggtacaacctg

SEQ ID NO: 242701 - DNA, 25 bp, probe
gtgcttagtgagggggaagaccatg

SEQ ID NO: 242702 - DNA, 25 bp, probe
gtgctcttgtggtaggtggataaca

SEQ ID NO: 242703 - DNA, 25 bp, probe
gtgcatgatgggaaaggtattagat

SEQ ID NO: 242704 - DNA, 25 bp, probe
gtgcaggaagagcggctttgatatg

SEQ ID NO: 242705 - DNA, 25 bp, probe
gtgaaagcagaggggattttggatg

SEQ ID NO: 242706 - DNA, 25 bp, probe
gtgacaagaacatggttctgtgcct

SEQ ID NO: 242707 - DNA, 25 bp, probe
gtgacaagaacatggttctgtgcct

SEQ ID NO: 242708 - DNA, 25 bp, probe
gtgaaggcaccatgctgaagcggct

SEQ ID NO: 242709 - DNA, 25 bp, probe
gtgcaaggcctttttaggcactaga

SEQ ID NO: 242710 - DNA, 25 bp, probe
gtgcaaggcaccaacttgggcaaaa

SEQ ID NO: 242711 - DNA, 25 bp, probe
gtgcaaggtagaacttggggagaca

SEQ ID NO: 242712 - DNA, 25 bp, probe
gtgcaaggtagaacttggggagaca

SEQ ID NO: 242713 - DNA, 25 bp, probe
gtgaacttgagcactgtggggattc

SEQ ID NO: 242714 - DNA, 25 bp, probe
gtgctcactgggagggccaggactc

SEQ ID NO: 242715 - DNA, 25 bp, probe
gtgctatcagagcaaggcgctatgg

SEQ ID NO: 242716 - DNA, 25 bp, probe
gtgcattgcagagaacgtggtgggc

SEQ ID NO: 242717 - DNA, 25 bp, probe
gtgaatgcaaactccatcgttgagc

SEQ ID NO: 242718 - DNA, 25 bp, probe
gtgaaaatcagcaccttgtcagccc

SEQ ID NO: 242719 - DNA, 25 bp, probe
gtgaaaattgccgactttggcctct

SEQ ID NO: 242720 - DNA, 25 bp, probe
ggcacgagatatctaccgggccagt

SEQ ID NO: 242721 - DNA, 25 bp, probe
tgtcaaagattttacctgggatatg

SEQ ID NO: 242722 - DNA, 25 bp, probe
gtgaaattcttggaccggcgcaaga

SEQ ID NO: 242723 - DNA, 25 bp, probe
gtgaaattcttggaccggcgcaaga

SEQ ID NO: 242724 - DNA, 25 bp, probe
gtgaaattagtccccagtgcaaagc

SEQ ID NO: 242725 - DNA, 25 bp, probe
gtgaccttacgacgctcgtgaaagc

SEQ ID NO: 242726 - DNA, 25 bp, probe
gtgaccttacgacgctcgtgaaagc

SEQ ID NO: 242727 - DNA, 25 bp, probe
gtgtttttgcagagctcctgacagg

SEQ ID NO: 242728 - DNA, 25 bp, probe
gtgctttttgctgaccaggattggt

SEQ ID NO: 242729 - DNA, 25 bp, probe
gtgctcttttctaatccaaagggta

SEQ ID NO: 242730 - DNA, 25 bp, probe
gtgttattctgctccttaaggttaa

SEQ ID NO: 242731 - DNA, 25 bp, probe
gtgctatttctgtacagctatagag

SEQ ID NO: 242732 - DNA, 25 bp, probe
gtgctcatgtttgaagatgatggca

SEQ ID NO: 242733 - DNA, 25 bp, probe
gtgctcatcattgctaagatgcgca

SEQ ID NO: 242734 - DNA, 25 bp, probe
gtgcatacattcagagggccacact

SEQ ID NO: 242735 - DNA, 25 bp, probe
gtgcagctcagtgaagaagcctcct

SEQ ID NO: 242736 - DNA, 25 bp, probe
gtgagtcagatcaagagtcccttca

SEQ ID NO: 242737 - DNA, 25 bp, probe
gtgagtcagatcaagagtcccttca

SEQ ID NO: 242738 - DNA, 25 bp, probe
gtgaatggcattcagtctctctacg

SEQ ID NO: 242739 - DNA, 25 bp, probe
gtgcagtggcttcaatgctgtctgg

SEQ ID NO: 242740 - DNA, 25 bp, probe
gtgcagtggtgaaccattttggtga

SEQ ID NO: 242741 - DNA, 25 bp, probe
gtgcagggatattgccttatttgtc

SEQ ID NO: 242742 - DNA, 25 bp, probe
gtgcagggatattgccttatttgtc

SEQ ID NO: 242743 - DNA, 25 bp, probe
gtgcagtggctcatgcctgtaatcc

SEQ ID NO: 242744 - DNA, 25 bp, probe
gtgcagtcactaactctgatttcct

SEQ ID NO: 242745 - DNA, 25 bp, probe
gtgcattcatgtggatcctcttttt

SEQ ID NO: 242746 - DNA, 25 bp, probe
gtgaccgattatgctttctttggcc

SEQ ID NO: 242747 - DNA, 25 bp, probe
gtgaccgattatgctttctttggcc

SEQ ID NO: 242748 - DNA, 25 bp, probe
gtgcacaagattaccttcctgtttt

SEQ ID NO: 242749 - DNA, 25 bp, probe
gtgcaaagttgtgctgggtactgct

SEQ ID NO: 242750 - DNA, 25 bp, probe
gtgcaaaggagaagtggtttcatga

SEQ ID NO: 242751 - DNA, 25 bp, probe
gtgcaaagtaatttaatatgtacac

SEQ ID NO: 242752 - DNA, 25 bp, probe
gtgcaaatgtattaccaattgttca

SEQ ID NO: 242753 - DNA, 25 bp, probe
gtgacaatcttgacaccaattttaa

SEQ ID NO: 242754 - DNA, 25 bp, probe
gtgaaactggctttatagagttaac

SEQ ID NO: 242755 - DNA, 25 bp, probe
gtgagaactcatcgaaactggggaa

SEQ ID NO: 242756 - DNA, 25 bp, probe
gtgaatttctggtacgtgctggtga

SEQ ID NO: 242757 - DNA, 25 bp, probe
gtgaatatgtctacagacctggagg

SEQ ID NO: 242758 - DNA, 25 bp, probe
gtgaatatgtctacagacctggagg

SEQ ID NO: 242759 - DNA, 25 bp, probe
gtgaagattatctacaccgtgggcc

SEQ ID NO: 242760 - DNA, 25 bp, probe
gtgcaggcattactaaaagaaccac

SEQ ID NO: 242761 - DNA, 25 bp, probe
gtgcagtcatcaacaaaagggagaa

SEQ ID NO: 242762 - DNA, 25 bp, probe
gtgcagatcatcaagaagacggagt

SEQ ID NO: 242763 - DNA, 25 bp, probe
gtgctatcacatctatatccaagtt

SEQ ID NO: 242764 - DNA, 25 bp, probe
gtgcagtcagattctaagccctgtt

SEQ ID NO: 242765 - DNA, 25 bp, probe
gtgcagtcagattctaagccctgtt

SEQ ID NO: 242766 - DNA, 25 bp, probe
gtgcagccactgttaagccatgtgt

SEQ ID NO: 242767 - DNA, 25 bp, probe
gtgcagtggctgtacaacgaggtgc

SEQ ID NO: 242768 - DNA, 25 bp, probe
gtgcaaggatgtgaacaaggtcgcc

SEQ ID NO: 242769 - DNA, 25 bp, probe
gtgcaagtggatgcattcctgagtc

SEQ ID NO: 242770 - DNA, 25 bp, probe
gtgcaagtggatgcattcctgagtc

SEQ ID NO: 242771 - DNA, 25 bp, probe
gtgcatcaacgtgcttctgcagtac

SEQ ID NO: 242772 - DNA, 25 bp, probe
gtgcatggaaatgtcctccaacaat

SEQ ID NO: 242773 - DNA, 25 bp, probe
gtgcaggcgcagagtcctatagaac

SEQ ID NO: 242774 - DNA, 25 bp, probe
gtgcagctgtatgagacctatcaga

SEQ ID NO: 242775 - DNA, 25 bp, probe
gtgcacgttccagactatggacagc

SEQ ID NO: 242776 - DNA, 25 bp, probe
gtgcacatgtgttacccataaacac

SEQ ID NO: 242777 - DNA, 25 bp, probe
gtgacagttacggctgaagtggcag

SEQ ID NO: 242778 - DNA, 25 bp, probe
gtgaagaagacagttacctggcagg

SEQ ID NO: 242779 - DNA, 25 bp, probe
gtgaggaaggccctcaccttgatcg

SEQ ID NO: 242780 - DNA, 25 bp, probe
gtgaggaagattgatcagtctgaat

SEQ ID NO: 242781 - DNA, 25 bp, probe
gtgaaggagattgacatcgctgcca

SEQ ID NO: 242782 - DNA, 25 bp, probe
gtgcaagggcttgagttcattcaga

SEQ ID NO: 242783 - DNA, 25 bp, probe
gtgcaagggcttgagttcattcaga

SEQ ID NO: 242784 - DNA, 25 bp, probe
gtgcataggagcaattaggatctaa

SEQ ID NO: 242785 - DNA, 25 bp, probe
gtgcatcagggagattgagtctaga

SEQ ID NO: 242786 - DNA, 25 bp, probe
gtgcatgcgtggggtgtacctgtga

SEQ ID NO: 242787 - DNA, 25 bp, probe
gtgcagctctggaggtacgaaaaga

SEQ ID NO: 242788 - DNA, 25 bp, probe
gtgcagttgtttgaagtgaaggata

SEQ ID NO: 242789 - DNA, 25 bp, probe
gtgcagttgtttgaagtgaaggata

SEQ ID NO: 242790 - DNA, 25 bp, probe
gtgcagtatacgttgaatgtatatg

SEQ ID NO: 242791 - DNA, 25 bp, probe
gtgcagaatctctatgtatattcta

SEQ ID NO: 242792 - DNA, 25 bp, probe
gtgaatgatctctctgaatcctaag

SEQ ID NO: 242793 - DNA, 25 bp, probe
gtgaattctcatctcaataaatgat

SEQ ID NO: 242794 - DNA, 25 bp, probe
gtgaattggcaaacaagcaaaatgt

SEQ ID NO: 242795 - DNA, 25 bp, probe
gtgaattggcaagcaagaggaatgt

SEQ ID NO: 242796 - DNA, 25 bp, probe
gtgcagttggaaagcaaggtgcggc

SEQ ID NO: 242797 - DNA, 25 bp, probe
gtgcagtctgactacacagaggcgt

SEQ ID NO: 242798 - DNA, 25 bp, probe
gtgcagctgctgatggagcacgagc

SEQ ID NO: 242799 - DNA, 25 bp, probe
gtgcaggctgcatggcagaatcatc

SEQ ID NO: 242800 - DNA, 25 bp, probe
gtgcatgtgcgaaggaaaatcattt

SEQ ID NO: 242801 - DNA, 25 bp, probe
gtgcagactgctaaaacaaatctgt

SEQ ID NO: 242802 - DNA, 25 bp, probe
gtgcaggctgaaaaccatgacacct

SEQ ID NO: 242803 - DNA, 25 bp, probe
gtgcaactggagctggtgacaactc

SEQ ID NO: 242804 - DNA, 25 bp, probe
gtgaactgaatgcagcctggacact

SEQ ID NO: 242805 - DNA, 25 bp, probe
gtgagacgaatgatggctagatcga

SEQ ID NO: 242806 - DNA, 25 bp, probe
gtgcatgcaaacctgtgtgctcacc

SEQ ID NO: 242807 - DNA, 25 bp, probe
gtgcagacaggccatgtgagccacc

SEQ ID NO: 242808 - DNA, 25 bp, probe
gtgcagcgcatggcagagcatgtca

SEQ ID NO: 242809 - DNA, 25 bp, probe
gtgcagcgcatggcagagcatgtca

SEQ ID NO: 242810 - DNA, 25 bp, probe
gtgcacatgctggcattcaacatgt

SEQ ID NO: 242811 - DNA, 25 bp, probe
gtgcatgtgaccacaaatgcttgct

SEQ ID NO: 242812 - DNA, 25 bp, probe
gtgcagtattgcaccacagctctgc

SEQ ID NO: 242813 - DNA, 25 bp, probe
gtgcaatgaagcatctcaattgctg

SEQ ID NO: 242814 - DNA, 25 bp, probe
gtgcaacaggcattgctgaggtctg

SEQ ID NO: 242815 - DNA, 25 bp, probe
gtgcacaagtgttgtgtcgtgcagt

SEQ ID NO: 242816 - DNA, 25 bp, probe
gtgcaaaaatgtggtcccagtgtat

SEQ ID NO: 242817 - DNA, 25 bp, probe
gtgagacaagcaatttctcccttct

SEQ ID NO: 242818 - DNA, 25 bp, probe
gtgaaatagttggtatccctttact

SEQ ID NO: 242819 - DNA, 25 bp, probe
gtgaaaagtagtggggccccctgct

SEQ ID NO: 242820 - DNA, 25 bp, probe
gtgcacaataaagggggttctctct

SEQ ID NO: 242821 - DNA, 25 bp, probe
gtgcaattaaaccgagagatgtctt

SEQ ID NO: 242822 - DNA, 25 bp, probe
gtgcagaatctctgcgggagaattt

SEQ ID NO: 242823 - DNA, 25 bp, probe
gtgcagaatctcataggttgccaat

SEQ ID NO: 242824 - DNA, 25 bp, probe
gtgcagacactgaacagggtctcaa

SEQ ID NO: 242825 - DNA, 25 bp, probe
gtgcacaagctggagaggtgcgccc

SEQ ID NO: 242826 - DNA, 25 bp, probe
gtgcacctgtgctgggtgcgtagcg

SEQ ID NO: 242827 - DNA, 25 bp, probe
gtgcactgcttgaacgggggaggcc

SEQ ID NO: 242828 - DNA, 25 bp, probe
gtgcacgctctgatcaggggtgctg

SEQ ID NO: 242829 - DNA, 25 bp, probe
gtgcacgcatttgctgtgcgaggcc

SEQ ID NO: 242830 - DNA, 25 bp, probe
gtgcacgcatttgctgtgcgaggcc

SEQ ID NO: 242831 - DNA, 25 bp, probe
gtgcaggtgggcctgcacgagctgc

SEQ ID NO: 242832 - DNA, 25 bp, probe
gtgcaggggtgtccagaatctgcgt

SEQ ID NO: 242833 - DNA, 25 bp, probe
gtgcatggggtgaccacagaggagt

SEQ ID NO: 242834 - DNA, 25 bp, probe
gtgcaggggtgtggagtagggagct

SEQ ID NO: 242835 - DNA, 25 bp, probe
gtgaggaagtggggtatggaggaag

SEQ ID NO: 242836 - DNA, 25 bp, probe
gtgaccaatcgggagtagcaaggaa

SEQ ID NO: 242837 - DNA, 25 bp, probe
gtgaccaatcgggagtagcaaggaa

SEQ ID NO: 242838 - DNA, 25 bp, probe
ggaagaggtgtttgactgcatcgtc

SEQ ID NO: 242839 - DNA, 25 bp, probe
gtgacctgaagccttttgtcgttgc

SEQ ID NO: 242840 - DNA, 25 bp, probe
gtgacacgaacgatctttgccattc

SEQ ID NO: 242841 - DNA, 25 bp, probe
gtgaagtgaacaatactttgtaatt

SEQ ID NO: 242842 - DNA, 25 bp, probe
gtgaaatggccactactttaagtat

SEQ ID NO: 242843 - DNA, 25 bp, probe
gtgaaattccttttatgtctacttg

SEQ ID NO: 242844 - DNA, 25 bp, probe
gtgaacataaccaacttgttaccta

SEQ ID NO: 242845 - DNA, 25 bp, probe
gtgaagaaaccttacatgttaccaa

SEQ ID NO: 242846 - DNA, 25 bp, probe
gtgaaaagcccaggactttaccaat

SEQ ID NO: 242847 - DNA, 25 bp, probe
gtgaaaagcccaggactttaccaat

SEQ ID NO: 242848 - DNA, 25 bp, probe
gtgaaagagttcagacttatcacca

SEQ ID NO: 242849 - DNA, 25 bp, probe
gtgaatctcctaacagactttcagg

SEQ ID NO: 242850 - DNA, 25 bp, probe
gtgaaccctaaaccctatcatgagg

SEQ ID NO: 242851 - DNA, 25 bp, probe
gtgaagtgtctagagccctttaatg

SEQ ID NO: 242852 - DNA, 25 bp, probe
gtgaagctactgtgagtctttaaat

SEQ ID NO: 242853 - DNA, 25 bp, probe
gtgaagtactgcgtggtgtatgata

SEQ ID NO: 242854 - DNA, 25 bp, probe
gtgcagcattgacttgggtgaagat

SEQ ID NO: 242855 - DNA, 25 bp, probe
gtgcatcagtgacttagggctagga

SEQ ID NO: 242856 - DNA, 25 bp, probe
gtgcatcgctgtgtagtgtgaaaga

SEQ ID NO: 242857 - DNA, 25 bp, probe
gtgcatcagtgtggtagcttgctca

SEQ ID NO: 242858 - DNA, 25 bp, probe
gtgcatcatcatgggttgcttctgc

SEQ ID NO: 242859 - DNA, 25 bp, probe
gtgcagacaatgctgtgctttccag

SEQ ID NO: 242860 - DNA, 25 bp, probe
gtgcagacaatgctgtgctttccag

SEQ ID NO: 242861 - DNA, 25 bp, probe
gtgcagagcgtggttgtatctgggg

SEQ ID NO: 242862 - DNA, 25 bp, probe
gtgagttgggttgaagcagaggagt

SEQ ID NO: 242863 - DNA, 25 bp, probe
gtgacctggggagaaagttgagtgt

SEQ ID NO: 242864 - DNA, 25 bp, probe
gtgacctggggagaaagttgagtgt

SEQ ID NO: 242865 - DNA, 25 bp, probe
gtgaccatcgaggatccaaagtggg

SEQ ID NO: 242866 - DNA, 25 bp, probe
gtgacctcctggttgtaagtgttgg

SEQ ID NO: 242867 - DNA, 25 bp, probe
gtgacctcctggttgtaagtgttgg

SEQ ID NO: 242868 - DNA, 25 bp, probe
gtgaccgacaggtttgggatctgga

SEQ ID NO: 242869 - DNA, 25 bp, probe
gtgaacaacatagattggatttgga

SEQ ID NO: 242870 - DNA, 25 bp, probe
gtgaggaaaacctgccattgtggcc

SEQ ID NO: 242871 - DNA, 25 bp, probe
gtgattggtatatacccttctggac

SEQ ID NO: 242872 - DNA, 25 bp, probe
tgttctggttaagccgacactggac

SEQ ID NO: 242873 - DNA, 25 bp, probe
gggctggtggaagggcgagaccaac

SEQ ID NO: 242874 - DNA, 25 bp, probe
gtgactggttgagcgggcaggccag

SEQ ID NO: 242875 - DNA, 25 bp, probe
gtgaagctgttagaggagctacaga

SEQ ID NO: 242876 - DNA, 25 bp, probe
gtgaagctgttagaggagctacaga

SEQ ID NO: 242877 - DNA, 25 bp, probe
gtgaacattttcagaggcctcagtg

SEQ ID NO: 242878 - DNA, 25 bp, probe
gtgaacattttcagaggcctcagtg

SEQ ID NO: 242879 - DNA, 25 bp, probe
gtgaaaagcttaatgggctggccag

SEQ ID NO: 242880 - DNA, 25 bp, probe
gtgaaacgctcacagatgggctcca

SEQ ID NO: 242881 - DNA, 25 bp, probe
gtgatcaacccagagacgggcgagc

SEQ ID NO: 242882 - DNA, 25 bp, probe
gtgactacccaggcagatgggaggg

SEQ ID NO: 242883 - DNA, 25 bp, probe
gtgaatgaccgagtatgggagagac

SEQ ID NO: 242884 - DNA, 25 bp, probe
gtgaaagctagagatatggcagcga

SEQ ID NO: 242885 - DNA, 25 bp, probe
gtgaagcccgaggcaattcaccagc

SEQ ID NO: 242886 - DNA, 25 bp, probe
gtgaccctggaggctcttaagatga

SEQ ID NO: 242887 - DNA, 25 bp, probe
gtgacatcgcttgttcctaagtgaa

SEQ ID NO: 242888 - DNA, 25 bp, probe
gtgaatgcaggtcttgcctggaaaa

SEQ ID NO: 242889 - DNA, 25 bp, probe
gtgcaaggggaaacctgtgaaagct

SEQ ID NO: 242890 - DNA, 25 bp, probe
gtgacggggacatcttcaagaagct

SEQ ID NO: 242891 - DNA, 25 bp, probe
gtgacggcaggaacgtggacaagac

SEQ ID NO: 242892 - DNA, 25 bp, probe
gtgaggccggggcgagacaacattc

SEQ ID NO: 242893 - DNA, 25 bp, probe
gtgagggcaggctgaggcaacgagt

SEQ ID NO: 242894 - DNA, 25 bp, probe
gtgcagggaggacaggcacctacat

SEQ ID NO: 242895 - DNA, 25 bp, probe
gtgaaggtgggcccagggctgactc

SEQ ID NO: 242896 - DNA, 25 bp, probe
gtgaatgcgcaggatgcggatgggg

SEQ ID NO: 242897 - DNA, 25 bp, probe
gtgcaggcgcaggtgcaggtggaca

SEQ ID NO: 242898 - DNA, 25 bp, probe
gtgcatgcaagaggtggcaggggac

SEQ ID NO: 242899 - DNA, 25 bp, probe
gtgcatcgtgagggccagagacagg

SEQ ID NO: 242900 - DNA, 25 bp, probe
gtgcatcgtgagggccagagacagg

SEQ ID NO: 242901 - DNA, 25 bp, probe
gtgcatgagctcagtggagggcagg

SEQ ID NO: 242902 - DNA, 25 bp, probe
gtgcaggctcaagagctggcggagg

SEQ ID NO: 242903 - DNA, 25 bp, probe
gtgcaggtgccagtcaggggaagac

SEQ ID NO: 242904 - DNA, 25 bp, probe
gtgcagggccagcaagcacgagcag

SEQ ID NO: 242905 - DNA, 25 bp, probe
gtgcagggcaccaagaaggagggct

SEQ ID NO: 242906 - DNA, 25 bp, probe
gtgcaggcgcggagggcagaggcgc

SEQ ID NO: 242907 - DNA, 25 bp, probe
gtgcaggcgcggagggcagaggcgc

SEQ ID NO: 242908 - DNA, 25 bp, probe
gtgcactctgggtgaccagatggcc

SEQ ID NO: 242909 - DNA, 25 bp, probe
gtgactttgggcaagccaagtgccc

SEQ ID NO: 242910 - DNA, 25 bp, probe
gtgaatttaggcatctctggcatgc

SEQ ID NO: 242911 - DNA, 25 bp, probe
gtgaagctggtggactttggcatgg

SEQ ID NO: 242912 - DNA, 25 bp, probe
gtgaagatctgtgactttggccttg

SEQ ID NO: 242913 - DNA, 25 bp, probe
gtgaagtatctaattattggttgaa

SEQ ID NO: 242914 - DNA, 25 bp, probe
gtgaagattcttttcttaggtatac

SEQ ID NO: 242915 - DNA, 25 bp, probe
gtgaattagctttttctcagatgtt

SEQ ID NO: 242916 - DNA, 25 bp, probe
gtgaatttgcactgtttaatcatag

SEQ ID NO: 242917 - DNA, 25 bp, probe
gtgaatttatatttgcgtatacatt

SEQ ID NO: 242918 - DNA, 25 bp, probe
gtgagaattaacttggcctaatgct

SEQ ID NO: 242919 - DNA, 25 bp, probe
gtgggtattttctgcctaagtgcta

SEQ ID NO: 242920 - DNA, 25 bp, probe
gtgaggaatagttgagccccaagtc

SEQ ID NO: 242921 - DNA, 25 bp, probe
gtgaccagaagtttcgaccaagtat

SEQ ID NO: 242922 - DNA, 25 bp, probe
gtgcaccagaagatctacaccacct

SEQ ID NO: 242923 - DNA, 25 bp, probe
gtgcaagcgaagctctcaagcaccc

SEQ ID NO: 242924 - DNA, 25 bp, probe
gtgcaagaggaggccttagctccat

SEQ ID NO: 242925 - DNA, 25 bp, probe
gtgaaagccgcggctaagcgcatca

SEQ ID NO: 242926 - DNA, 25 bp, probe
gtgagcaagacagggcttaccatcc

SEQ ID NO: 242927 - DNA, 25 bp, probe
gtgcagctagtcgggtgtaattgcc

SEQ ID NO: 242928 - DNA, 25 bp, probe
gtgcagctactgcaggtgatcaaga

SEQ ID NO: 242929 - DNA, 25 bp, probe
gtgcagtagtgcagttcaccatgag

SEQ ID NO: 242930 - DNA, 25 bp, probe
gtgagccagtctagttcctgatgac

SEQ ID NO: 242931 - DNA, 25 bp, probe
gtgacctacattgtgcagtgcagcc

SEQ ID NO: 242932 - DNA, 25 bp, probe
gtgacctgtactcgtcagtggacac

SEQ ID NO: 242933 - DNA, 25 bp, probe
gtgaactgctccttggcagggattt

SEQ ID NO: 242934 - DNA, 25 bp, probe
gtgaacactgcttctcgaatggagt

SEQ ID NO: 242935 - DNA, 25 bp, probe
gtgaatatcctactcttcatgggct

SEQ ID NO: 242936 - DNA, 25 bp, probe
gtgaagactcagatgtctctgggca

SEQ ID NO: 242937 - DNA, 25 bp, probe
gtgcaagacagcactggcttgggtt

SEQ ID NO: 242938 - DNA, 25 bp, probe
gtgcaaacagcgtccattttttcat

SEQ ID NO: 242939 - DNA, 25 bp, probe
gtgaaaactccctattctcttaagc

SEQ ID NO: 242940 - DNA, 25 bp, probe
gtgaagatacaggccactcttccta

SEQ ID NO: 242941 - DNA, 25 bp, probe
gtgaaggtcactggactctagccta

SEQ ID NO: 242942 - DNA, 25 bp, probe
gtgaatggaagacacttacctaaca

SEQ ID NO: 242943 - DNA, 25 bp, probe
gtgaagggagacactctatctgtaa

SEQ ID NO: 242944 - DNA, 25 bp, probe
gtgacaggtggaccattcgatttga

SEQ ID NO: 242945 - DNA, 25 bp, probe
gtgacatgtgctggacactgtccat

SEQ ID NO: 242946 - DNA, 25 bp, probe
gtgagactgctgaacacattgccca

SEQ ID NO: 242947 - DNA, 25 bp, probe
gtgaattcatgcactagtctccatt

SEQ ID NO: 242948 - DNA, 25 bp, probe
gtgaattcatgcactagtctccatt

SEQ ID NO: 242949 - DNA, 25 bp, probe
gtgaattcatgatcaaggtttcctt

SEQ ID NO: 242950 - DNA, 25 bp, probe
gtgaattcatgatcaaggtttcctt

SEQ ID NO: 242951 - DNA, 25 bp, probe
gtgtactctatactggagttccctt

SEQ ID NO: 242952 - DNA, 25 bp, probe
gtgtactctatactggagttccctt

SEQ ID NO: 242953 - DNA, 25 bp, probe
gtgaactcctagctgtggtcaggct

SEQ ID NO: 242954 - DNA, 25 bp, probe
gtgaatctcgaaccgcatgttcagg

SEQ ID NO: 242955 - DNA, 25 bp, probe
gtgaatttgcaacagtaatcagagt

SEQ ID NO: 242956 - DNA, 25 bp, probe
gtgaatctggaatattacctgtgtc

SEQ ID NO: 242957 - DNA, 25 bp, probe
gtgagattttactaagacctgtttt

SEQ ID NO: 242958 - DNA, 25 bp, probe
gtgagattttactaagacctgtttt

SEQ ID NO: 242959 - DNA, 25 bp, probe
gtgaatttatccaaaacgccattgt

SEQ ID NO: 242960 - DNA, 25 bp, probe
gtgaggctattgggtaaccaccttt

SEQ ID NO: 242961 - DNA, 25 bp, probe
gtgaggcttctgggtgcataccagt

SEQ ID NO: 242962 - DNA, 25 bp, probe
gtgcagtttctaagcatgtagccag

SEQ ID NO: 242963 - DNA, 25 bp, probe
gtgacttgtctatgagggctcaggt

SEQ ID NO: 242964 - DNA, 25 bp, probe
gtgaatgtcatcttgaaaggtcagc

SEQ ID NO: 242965 - DNA, 25 bp, probe
gtgcaagatcagtggattggtccag

SEQ ID NO: 242966 - DNA, 25 bp, probe
gtgaagcacagggagagtgggaacc

SEQ ID NO: 242967 - DNA, 25 bp, probe
gtgaataattctagcgggggacctg

SEQ ID NO: 242968 - DNA, 25 bp, probe
gtgttgaatagcttgcggccaggac

SEQ ID NO: 242969 - DNA, 25 bp, probe
gtgacgagatccttcgtggggaacc

SEQ ID NO: 242970 - DNA, 25 bp, probe
gtgaagttcccttgtgggaggccct

SEQ ID NO: 242971 - DNA, 25 bp, probe
gtgaagatgtcccggtagcaaaccc

SEQ ID NO: 242972 - DNA, 25 bp, probe
gtgaatggcccactgaatagcaaaa

SEQ ID NO: 242973 - DNA, 25 bp, probe
gtgagggcagtcctgcaacatgtat

SEQ ID NO: 242974 - DNA, 25 bp, probe
gtgaaagatgtcccaggatccatgg

SEQ ID NO: 242975 - DNA, 25 bp, probe
gtgcagacatggtcccaggagcata

SEQ ID NO: 242976 - DNA, 25 bp, probe
gtgcaagagaggaccagccagctga

SEQ ID NO: 242977 - DNA, 25 bp, probe
gtgcagcgtgaggcttcagcctgga

SEQ ID NO: 242978 - DNA, 25 bp, probe
gtgacaggacctgctgacttgaagc

SEQ ID NO: 242979 - DNA, 25 bp, probe
gtgaagtgacctatgacaaaacgcc

SEQ ID NO: 242980 - DNA, 25 bp, probe
gtgaagatactcaatcgacagaaga

SEQ ID NO: 242981 - DNA, 25 bp, probe
gtgagaaactcaacagcagcttccc

SEQ ID NO: 242982 - DNA, 25 bp, probe
gtgagaagaaattaatctccccacc

SEQ ID NO: 242983 - DNA, 25 bp, probe
gtgacaaagacttaaatctctctcc

SEQ ID NO: 242984 - DNA, 25 bp, probe
gtgaagagcgacacaactgcctgct

SEQ ID NO: 242985 - DNA, 25 bp, probe
gtgaagacgaatatgatctgtgctg

SEQ ID NO: 242986 - DNA, 25 bp, probe
gtgcacgccgaaatttctgtttatt

SEQ ID NO: 242987 - DNA, 25 bp, probe
gtgactgtcagtattctcgctattt

SEQ ID NO: 242988 - DNA, 25 bp, probe
gtgaagctggtcatcttcgtcatct

SEQ ID NO: 242989 - DNA, 25 bp, probe
gtgaatgtgcgcattttgcattcca

SEQ ID NO: 242990 - DNA, 25 bp, probe
gtgaagatgacaatcatgttgcagc

SEQ ID NO: 242991 - DNA, 25 bp, probe
gtgatcgcatacatcatgaccgtca

SEQ ID NO: 242992 - DNA, 25 bp, probe
gtgagtgtgacaagcaatccgtgca

SEQ ID NO: 242993 - DNA, 25 bp, probe
gtgagtgtgacaagcaatccgtgca

SEQ ID NO: 242994 - DNA, 25 bp, probe
gtgcagtatgaaactcaccagcgag

SEQ ID NO: 242995 - DNA, 25 bp, probe
gtgacttgaacagactgagcgtgga

SEQ ID NO: 242996 - DNA, 25 bp, probe
gtgacacggagaccactgaggtgca

SEQ ID NO: 242997 - DNA, 25 bp, probe
gtgacacggagaccactgaggtgca

SEQ ID NO: 242998 - DNA, 25 bp, probe
gtgacacggactcaagtgggctggt

SEQ ID NO: 242999 - DNA, 25 bp, probe
gtgaaccgaagcgcaatgtggtggt

SEQ ID NO: 243000 - DNA, 25 bp, probe
gtgacccaaatcacagagtgccttt

SEQ ID NO: 243001 - DNA, 25 bp, probe
gtgaaccacctcatagagggctccc

SEQ ID NO: 243002 - DNA, 25 bp, probe
gtgaaaagtgccatcgagggcatca

SEQ ID NO: 243003 - DNA, 25 bp, probe
gtgaattttaaatgacctgcatcaa

SEQ ID NO: 243004 - DNA, 25 bp, probe
gtgaatgtttgccaagagacttgca

SEQ ID NO: 243005 - DNA, 25 bp, probe
gtgcaatctttcagcagcaacctga

SEQ ID NO: 243006 - DNA, 25 bp, probe
gtgcaatctttcagcagcaacctga

SEQ ID NO: 243007 - DNA, 25 bp, probe
gtgcaatttataagcaatatcgttt

SEQ ID NO: 243008 - DNA, 25 bp, probe
gtgcacatgttgaattttatctttt

SEQ ID NO: 243009 - DNA, 25 bp, probe
gtgcaaagtagattcgtagttagtt

SEQ ID NO: 243010 - DNA, 25 bp, probe
gtgcaaagtatccatgcggagttga

SEQ ID NO: 243011 - DNA, 25 bp, probe
gtgcaccagttcctaggtgtgtgcc

SEQ ID NO: 243012 - DNA, 25 bp, probe
gtgcaccagttcctaggtgtgtgcc

SEQ ID NO: 243013 - DNA, 25 bp, probe
gtgcacgcgctttaagtgtgctggg

SEQ ID NO: 243014 - DNA, 25 bp, probe
gtgcaacagctctgatggttgctgc

SEQ ID NO: 243015 - DNA, 25 bp, probe
gtgaacatgtcgctgtttgagaact

SEQ ID NO: 243016 - DNA, 25 bp, probe
gtgagactctctcatgtggctaaac

SEQ ID NO: 243017 - DNA, 25 bp, probe
gtgagcactatctttcaggaaattt

SEQ ID NO: 243018 - DNA, 25 bp, probe
gtgagcactatctttcaggaaattt

SEQ ID NO: 243019 - DNA, 25 bp, probe
gtgcagcctttgttattgcatacat

SEQ ID NO: 243020 - DNA, 25 bp, probe
gtgcagcaggggctatggcttctac

SEQ ID NO: 243021 - DNA, 25 bp, probe
gtgcagctgagcggctgtatgggcc

SEQ ID NO: 243022 - DNA, 25 bp, probe
gtgcagctgagcctcttgagggcag

SEQ ID NO: 243023 - DNA, 25 bp, probe
gtgatgaaggctctgcagcacgagc

SEQ ID NO: 243024 - DNA, 25 bp, probe
gtgatgacagctggttcctgtgatg

SEQ ID NO: 243025 - DNA, 25 bp, probe
gtgagagagttgctcctcagggtcc

SEQ ID NO: 243026 - DNA, 25 bp, probe
gtgagagagttgctcctcagggtcc

SEQ ID NO: 243027 - DNA, 25 bp, probe
gtgaagaggggccctctgggttgcc

SEQ ID NO: 243028 - DNA, 25 bp, probe
gtgacagcggaggggcactggtgtt

SEQ ID NO: 243029 - DNA, 25 bp, probe
gtgaggctgaccagagccggttgac

SEQ ID NO: 243030 - DNA, 25 bp, probe
gtgaggctgtcctgtacattgtggg

SEQ ID NO: 243031 - DNA, 25 bp, probe
gtgagggtctgcggaggcttgcagg

SEQ ID NO: 243032 - DNA, 25 bp, probe
gtgaagtgcctggtaagttgccttg

SEQ ID NO: 243033 - DNA, 25 bp, probe
gtgaaggctcttgatgtttggctta

SEQ ID NO: 243034 - DNA, 25 bp, probe
gtgaatggttgcaaagtgttgtctt

SEQ ID NO: 243035 - DNA, 25 bp, probe
gtgcaatgccttaggactttgtttg

SEQ ID NO: 243036 - DNA, 25 bp, probe
gtgaagcttatcccactgggttggg

SEQ ID NO: 243037 - DNA, 25 bp, probe
gtgagagttaaggatcttggggagg

SEQ ID NO: 243038 - DNA, 25 bp, probe
gtgacagaatcttgtatttgggcca

SEQ ID NO: 243039 - DNA, 25 bp, probe
gtgacaactctgtgctttggctgtc

SEQ ID NO: 243040 - DNA, 25 bp, probe
gtgaagtctctgtccatgttgagct

SEQ ID NO: 243041 - DNA, 25 bp, probe
gtgaagatctttgtggttgctacca

SEQ ID NO: 243042 - DNA, 25 bp, probe
ggtagaatttcccatgcatttacta

SEQ ID NO: 243043 - DNA, 25 bp, probe
gtgaaaacttcccatcaagttctaa

SEQ ID NO: 243044 - DNA, 25 bp, probe
gtgaacactcttggtagaagccctt

SEQ ID NO: 243045 - DNA, 25 bp, probe
gtgcacatcctgtatgtgtgtgaag

SEQ ID NO: 243046 - DNA, 25 bp, probe
gtgacatcagcgtagtgttttgacc

SEQ ID NO: 243047 - DNA, 25 bp, probe
gtgaatgaagcatttgactttgcaa

SEQ ID NO: 243048 - DNA, 25 bp, probe
gtgactggaattggcagctgttgga

SEQ ID NO: 243049 - DNA, 25 bp, probe
gtgactggcaagaggccttggcatg

SEQ ID NO: 243050 - DNA, 25 bp, probe
gtgactggcaagaggccttggcatg

SEQ ID NO: 243051 - DNA, 25 bp, probe
gtgactggtgaggggcctctagagg

SEQ ID NO: 243052 - DNA, 25 bp, probe
gtgacaggctggggcaacctgaagg

SEQ ID NO: 243053 - DNA, 25 bp, probe
gtgcaagctgtgcctacaactaaag

SEQ ID NO: 243054 - DNA, 25 bp, probe
gtgagtgtgtggaagagagtgaaag

SEQ ID NO: 243055 - DNA, 25 bp, probe
gtgcacgcatggctgagcatgtgtg

SEQ ID NO: 243056 - DNA, 25 bp, probe
gtgcacgcatggctgagcatgtgtg

SEQ ID NO: 243057 - DNA, 25 bp, probe
gtgcacgaggtggaggtggtcatca

SEQ ID NO: 243058 - DNA, 25 bp, probe
gtgcactggagtcatgggtgtctgc

SEQ ID NO: 243059 - DNA, 25 bp, probe
gtgcactgcaggtagagggtgggcc

SEQ ID NO: 243060 - DNA, 25 bp, probe
gtgcacatggcagagacagagctgg

SEQ ID NO: 243061 - DNA, 25 bp, probe
gtgcaatggcagtcagcatgcggcc

SEQ ID NO: 243062 - DNA, 25 bp, probe
gtgcaagatcatccacacggacatc

SEQ ID NO: 243063 - DNA, 25 bp, probe
gtgaagtatgcacacggagacagtg

SEQ ID NO: 243064 - DNA, 25 bp, probe
gtgaacctggtgtcggagcacatct

SEQ ID NO: 243065 - DNA, 25 bp, probe
gtgaaagtgattatgggaatcatag

SEQ ID NO: 243066 - DNA, 25 bp, probe
gtgaacagttcaaatgggaaagtgt

SEQ ID NO: 243067 - DNA, 25 bp, probe
gtgaacatttcaaggcgcatgcaca

SEQ ID NO: 243068 - DNA, 25 bp, probe
gtgaacatttcaaggcgcatgcaca

SEQ ID NO: 243069 - DNA, 25 bp, probe
gtgacagtctccaggggacatttca

SEQ ID NO: 243070 - DNA, 25 bp, probe
gtgacgtcttcttggggacgtatgt

SEQ ID NO: 243071 - DNA, 25 bp, probe
gtgacgcctgtcatggtggtgggca

SEQ ID NO: 243072 - DNA, 25 bp, probe
gtgcaagccttcctggaagaagcca

SEQ ID NO: 243073 - DNA, 25 bp, probe
gtgcaagcccacgtggatgcagacg

SEQ ID NO: 243074 - DNA, 25 bp, probe
gtgcaagcccacgtggatgcagatg

SEQ ID NO: 243075 - DNA, 25 bp, probe
gtgcaagcttaggctggggattctg

SEQ ID NO: 243076 - DNA, 25 bp, probe
gtgcaagtcttgggagcgtgatcta

SEQ ID NO: 243077 - DNA, 25 bp, probe
gtgcacatgctcacttgaggtgctt

SEQ ID NO: 243078 - DNA, 25 bp, probe
gtgcacatgcgcactctcatatgcc

SEQ ID NO: 243079 - DNA, 25 bp, probe
gtgcaatcagcaatgtcctacctga

SEQ ID NO: 243080 - DNA, 25 bp, probe
gtgacacgcatgatcctcatcgtgg

SEQ ID NO: 243081 - DNA, 25 bp, probe
gtgacagcagtgacagcagcgacag

SEQ ID NO: 243082 - DNA, 25 bp, probe
gtgacagcgtatgtgatgactgtga

SEQ ID NO: 243083 - DNA, 25 bp, probe
gtgaaggatagcaatcatgaccagt

SEQ ID NO: 243084 - DNA, 25 bp, probe
gtgaaggatagcaatcatgaccagt

SEQ ID NO: 243085 - DNA, 25 bp, probe
gtgaactcaggaatgtgcgccagtg

SEQ ID NO: 243086 - DNA, 25 bp, probe
gtgacaatgcaggaaagccatactg

SEQ ID NO: 243087 - DNA, 25 bp, probe
gtgagcttatgttacaggcaactga

SEQ ID NO: 243088 - DNA, 25 bp, probe
gtgagcttatgttacaggcaactga

SEQ ID NO: 243089 - DNA, 25 bp, probe
gtgacttagggctaggaacattctg

SEQ ID NO: 243090 - DNA, 25 bp, probe
gtgacttgagcccagagtgaacact

SEQ ID NO: 243091 - DNA, 25 bp, probe
gtgacattggccgtatgctggatgc

SEQ ID NO: 243092 - DNA, 25 bp, probe
gtgacatttcctgttgtgaagtaaa

SEQ ID NO: 243093 - DNA, 25 bp, probe
gtgacatttcctgttgtgaagtaaa

SEQ ID NO: 243094 - DNA, 25 bp, probe
tgtcacttttccctcgggaggaaat

SEQ ID NO: 243095 - DNA, 25 bp, probe
gtggttttcaccaaggaagtaaatg

SEQ ID NO: 243096 - DNA, 25 bp, probe
gtgaatttaacctggaaaagaatgt

SEQ ID NO: 243097 - DNA, 25 bp, probe
gtgacattctaaatcttgggagaaa

SEQ ID NO: 243098 - DNA, 25 bp, probe
gtgaattagcgactttggtcagaaa

SEQ ID NO: 243099 - DNA, 25 bp, probe
gtgacttcatgcccttttgggataa

SEQ ID NO: 243100 - DNA, 25 bp, probe
gtgatcttcatcactgggggtctca

SEQ ID NO: 243101 - DNA, 25 bp, probe
gtgacattcgccggggatgttggca

SEQ ID NO: 243102 - DNA, 25 bp, probe
gtgacattcgccggggatgttggca

SEQ ID NO: 243103 - DNA, 25 bp, probe
gtgcacagatgctcagattggtttg

SEQ ID NO: 243104 - DNA, 25 bp, probe
gtgcacaaccaccatgtggtcttct

SEQ ID NO: 243105 - DNA, 25 bp, probe
gtgagcagatccggaagaactttgc

SEQ ID NO: 243106 - DNA, 25 bp, probe
gtgaaatacctgcatgacctgggca

SEQ ID NO: 243107 - DNA, 25 bp, probe
gtgataaagccacaaccttgtgttt

SEQ ID NO: 243108 - DNA, 25 bp, probe
gtgtagttctgctgaatcctattcc

SEQ ID NO: 243109 - DNA, 25 bp, probe
gtgaactgtgtgtgaatctgctttt

SEQ ID NO: 243110 - DNA, 25 bp, probe
gtgcaactgtttagtcatgtgtttt

SEQ ID NO: 243111 - DNA, 25 bp, probe
gtgaatgtgaatatgacagtgtctt

SEQ ID NO: 243112 - DNA, 25 bp, probe
gtgaatgtgaatatgacagtgtctt

SEQ ID NO: 243113 - DNA, 25 bp, probe
gtgaagagacaaacgcagatgttta

SEQ ID NO: 243114 - DNA, 25 bp, probe
gtgagcggaattccatgcagtgtct

SEQ ID NO: 243115 - DNA, 25 bp, probe
gtgaggtgactgagcagggtctgaa

SEQ ID NO: 243116 - DNA, 25 bp, probe
gtgagctggaccagtgaggcctacc

SEQ ID NO: 243117 - DNA, 25 bp, probe
gtgatggtacgtaatgagttcccct

SEQ ID NO: 243118 - DNA, 25 bp, probe
gtgacagtaagtactttctctctct

SEQ ID NO: 243119 - DNA, 25 bp, probe
gtgcaaatcagagacctgacctctt

SEQ ID NO: 243120 - DNA, 25 bp, probe
gtgacgtcagagcaggtgacacgac

SEQ ID NO: 243121 - DNA, 25 bp, probe
gtgaagtaagcctgtgaaggaccag

SEQ ID NO: 243122 - DNA, 25 bp, probe
gtgacgcggacctggaaggcgagat

SEQ ID NO: 243123 - DNA, 25 bp, probe
gtgacgcggacctggaaggcgagat

SEQ ID NO: 243124 - DNA, 25 bp, probe
gtgacaggaacctgggtgcttggct

SEQ ID NO: 243125 - DNA, 25 bp, probe
gtgtttacgccactaagtctgtggt

SEQ ID NO: 243126 - DNA, 25 bp, probe
gtgtttacgccactaagtctgtggt

SEQ ID NO: 243127 - DNA, 25 bp, probe
gtgactatactggcatttcagatcc

SEQ ID NO: 243128 - DNA, 25 bp, probe
gtgaagacagcggatttcggcctgg

SEQ ID NO: 243129 - DNA, 25 bp, probe
gtgaagatggcagacttcggtgtgg

SEQ ID NO: 243130 - DNA, 25 bp, probe
gtgaagatggcagacttcggtgtgg

SEQ ID NO: 243131 - DNA, 25 bp, probe
gtgaaaggcagatgtttgattatgc

SEQ ID NO: 243132 - DNA, 25 bp, probe
gtgagataggaattctcagtgtttc

SEQ ID NO: 243133 - DNA, 25 bp, probe
gtgagtgagagagtgctgtcctttt

SEQ ID NO: 243134 - DNA, 25 bp, probe
gtgactcaaggcctgctgtttaatc

SEQ ID NO: 243135 - DNA, 25 bp, probe
gtgactcaaggcctgctgtttaatc

SEQ ID NO: 243136 - DNA, 25 bp, probe
gtgactcaaggcctgctgtttaatc

SEQ ID NO: 243137 - DNA, 25 bp, probe
gtgactaagggcagcatgtttaacc

SEQ ID NO: 243138 - DNA, 25 bp, probe
gtgagctgaagcgcaggtcaattaa

SEQ ID NO: 243139 - DNA, 25 bp, probe
gtgagctgaagcgcaggtcaattaa

SEQ ID NO: 243140 - DNA, 25 bp, probe
gtgagaatgaggacatttactataa

SEQ ID NO: 243141 - DNA, 25 bp, probe
gtgaaacgccatctctactaaaaat

SEQ ID NO: 243142 - DNA, 25 bp, probe
gtgaaactgcgaatggctcattaaa

SEQ ID NO: 243143 - DNA, 25 bp, probe
gtgaaactcggctgtattaatcacg

SEQ ID NO: 243144 - DNA, 25 bp, probe
gtgaatgattctgcactttgtaaac

SEQ ID NO: 243145 - DNA, 25 bp, probe
gtgaagtcgccagcatttataactc

SEQ ID NO: 243146 - DNA, 25 bp, probe
gtgaccttaaacttttacagctgac

SEQ ID NO: 243147 - DNA, 25 bp, probe
gtgacactgtgggaaatgttcacct

SEQ ID NO: 243148 - DNA, 25 bp, probe
gtgactctgggagaggtgacacctc

SEQ ID NO: 243149 - DNA, 25 bp, probe
gtgactctgggagaggtgacacctc

SEQ ID NO: 243150 - DNA, 25 bp, probe
gtgtctgcccgacagggagacggca

SEQ ID NO: 243151 - DNA, 25 bp, probe
gtgacccgaggcttgggagaccaca

SEQ ID NO: 243152 - DNA, 25 bp, probe
gtgaccatcgaggattgctgggacc

SEQ ID NO: 243153 - DNA, 25 bp, probe
gtgaagcttgatttctgctggtgac

SEQ ID NO: 243154 - DNA, 25 bp, probe
gtgaagcttgatttctgctggtgac

SEQ ID NO: 243155 - DNA, 25 bp, probe
gtgaatgctgtggttgtgctcaatg

SEQ ID NO: 243156 - DNA, 25 bp, probe
gtgacagctgtatattgctcagagc

SEQ ID NO: 243157 - DNA, 25 bp, probe
gtgacagataaattcggcaagccag

SEQ ID NO: 243158 - DNA, 25 bp, probe
gtgacagataaattcggcaagccag

SEQ ID NO: 243159 - DNA, 25 bp, probe
gtgactcaagacttccagagcctca

SEQ ID NO: 243160 - DNA, 25 bp, probe
gtgactcaagacttccagagcctca

SEQ ID NO: 243161 - DNA, 25 bp, probe
gtgagtccagatatctagcccacag

SEQ ID NO: 243162 - DNA, 25 bp, probe
gtgaggccagtaagctcagaaagat

SEQ ID NO: 243163 - DNA, 25 bp, probe
gtgaagacgatgaagccagggagca

SEQ ID NO: 243164 - DNA, 25 bp, probe
gtgaagacgctgtacatgctgggca

SEQ ID NO: 243165 - DNA, 25 bp, probe
gtgacagcaacaggcactgctactg

SEQ ID NO: 243166 - DNA, 25 bp, probe
gtgacagcacatctgacagcaatga

SEQ ID NO: 243167 - DNA, 25 bp, probe
gtgacgaagcagacaggcaatgagt

SEQ ID NO: 243168 - DNA, 25 bp, probe
gtgaggaagctttgccattagatct

SEQ ID NO: 243169 - DNA, 25 bp, probe
gtgaggaagctttgccattagatct

SEQ ID NO: 243170 - DNA, 25 bp, probe
gtgacaaaattacgtttatgtacta

SEQ ID NO: 243171 - DNA, 25 bp, probe
gtgaacaacactgctggtttgagac

SEQ ID NO: 243172 - DNA, 25 bp, probe
gtgaacaacactgctggtttgagac

SEQ ID NO: 243173 - DNA, 25 bp, probe
gtgaacgtgtcggtggtgtctgagg

SEQ ID NO: 243174 - DNA, 25 bp, probe
gtgaaagtctccgtggtggacacag

SEQ ID NO: 243175 - DNA, 25 bp, probe
gtgaaagtctccgtggtggacacag

SEQ ID NO: 243176 - DNA, 25 bp, probe
gtggaatgtccctggagtactatgg

SEQ ID NO: 243177 - DNA, 25 bp, probe
gtgaaatgtgcagattgtggtttga

SEQ ID NO: 243178 - DNA, 25 bp, probe
gtgaaattcaacctgtgtcttatag

SEQ ID NO: 243179 - DNA, 25 bp, probe
gtgacatttcaagctctgttggtgg

SEQ ID NO: 243180 - DNA, 25 bp, probe
gtgacacaacgagcactttctgcgg

SEQ ID NO: 243181 - DNA, 25 bp, probe
gtgacatcaagctccattgtttcgg

SEQ ID NO: 243182 - DNA, 25 bp, probe
gtgacatcaagctccattgtttcgg

SEQ ID NO: 243183 - DNA, 25 bp, probe
gtgatctcaagcccgaaaatatagt

SEQ ID NO: 243184 - DNA, 25 bp, probe
gtgtacaaccctagcctgataggtt

SEQ ID NO: 243185 - DNA, 25 bp, probe
gtgtacaaccctagcctgataggtt

SEQ ID NO: 243186 - DNA, 25 bp, probe
gtgatacaaacctgtcctggaattc

SEQ ID NO: 243187 - DNA, 25 bp, probe
gtgtttaaccatggtcaaaagacca

SEQ ID NO: 243188 - DNA, 25 bp, probe
gtgtcttgactacctttcaaaacca

SEQ ID NO: 243189 - DNA, 25 bp, probe
gtgtacagacctccgttcaataaat

SEQ ID NO: 243190 - DNA, 25 bp, probe
gtgtccaggcaatgcgaacccaaat

SEQ ID NO: 243191 - DNA, 25 bp, probe
gtgtccgtaaacaattcctctcacc

SEQ ID NO: 243192 - DNA, 25 bp, probe
gtgatctttaagtatacctcttccc

SEQ ID NO: 243193 - DNA, 25 bp, probe
gtgatataaaaatccctttcctctg

SEQ ID NO: 243194 - DNA, 25 bp, probe
gtgttggagggaacctgtttcacta

SEQ ID NO: 243195 - DNA, 25 bp, probe
gtgatggctggggaacaatgttcac

SEQ ID NO: 243196 - DNA, 25 bp, probe
gtgacgctgtgggaactcatgactc

SEQ ID NO: 243197 - DNA, 25 bp, probe
gtgacgctgtgggaactcatgactc

SEQ ID NO: 243198 - DNA, 25 bp, probe
gtgacactggcctagagcctgacac

SEQ ID NO: 243199 - DNA, 25 bp, probe
gtgacaatgatgctgagacgctgaa

SEQ ID NO: 243200 - DNA, 25 bp, probe
gtgaagagctgattgaggctgccaa

SEQ ID NO: 243201 - DNA, 25 bp, probe
gtgaaggctgcactgaagcggctta

SEQ ID NO: 243202 - DNA, 25 bp, probe
gtgaagatgctatgaacattgttga

SEQ ID NO: 243203 - DNA, 25 bp, probe
gtgaactgcttgaaactctgctgga

SEQ ID NO: 243204 - DNA, 25 bp, probe
gtgaactgctttctgctatatagaa

SEQ ID NO: 243205 - DNA, 25 bp, probe
gtgaaatgtttggtctttctaaacg

SEQ ID NO: 243206 - DNA, 25 bp, probe
gtgaaattgtctagtccttcgttat

SEQ ID NO: 243207 - DNA, 25 bp, probe
gtgaatgttgctgaactctttgtat

SEQ ID NO: 243208 - DNA, 25 bp, probe
gtgaatactgtgccaactttatgtg

SEQ ID NO: 243209 - DNA, 25 bp, probe
gtgactccacatcaactgatgctat

SEQ ID NO: 243210 - DNA, 25 bp, probe
gggcccacgaattctatgccaaaga

SEQ ID NO: 243211 - DNA, 25 bp, probe
gtgaccaacgaagagtgccagaaga

SEQ ID NO: 243212 - DNA, 25 bp, probe
gtgaccaacgaagagtgccagaaga

SEQ ID NO: 243213 - DNA, 25 bp, probe
gtgaacgtctaaaggcccagaagat

SEQ ID NO: 243214 - DNA, 25 bp, probe
gtgaccttcaaatggcaaagaggaa

SEQ ID NO: 243215 - DNA, 25 bp, probe
gtgacctacatcgacgagaagcggg

SEQ ID NO: 243216 - DNA, 25 bp, probe
gtgacctcctccgcagaagagagat

SEQ ID NO: 243217 - DNA, 25 bp, probe
gtgacctcctccgcagaagagagat

SEQ ID NO: 243218 - DNA, 25 bp, probe
gtgacgtctttctctcagaggagca

SEQ ID NO: 243219 - DNA, 25 bp, probe
gtgactgcttgtaaagctaaggtag

SEQ ID NO: 243220 - DNA, 25 bp, probe
gtgactgcttgtaaagctaaggtag

SEQ ID NO: 243221 - DNA, 25 bp, probe
gtgaggattgtcaacatgcagggcg

SEQ ID NO: 243222 - DNA, 25 bp, probe
gtgaggcttgtcagccaaagctgga

SEQ ID NO: 243223 - DNA, 25 bp, probe
gtgacctctgtcaccaatgtggacc

SEQ ID NO: 243224 - DNA, 25 bp, probe
gtgaacttgtgcgcaaatgtgcaga

SEQ ID NO: 243225 - DNA, 25 bp, probe
gtgaactttggggacttctgagatc

SEQ ID NO: 243226 - DNA, 25 bp, probe
gtgaacagtctgaggagccgcgagt

SEQ ID NO: 243227 - DNA, 25 bp, probe
gtgaacgtcgtgtgactcagtgcag

SEQ ID NO: 243228 - DNA, 25 bp, probe
gtgaacgtcgtgtgactcagtgcag

SEQ ID NO: 243229 - DNA, 25 bp, probe
gtgaactattttgacagcagatgag

SEQ ID NO: 243230 - DNA, 25 bp, probe
gtgagtgctattgtacatggcaaag

SEQ ID NO: 243231 - DNA, 25 bp, probe
gtgaagtcaacaataatggcagtaa

SEQ ID NO: 243232 - DNA, 25 bp, probe
gtgaatgctgcatcatctatgtgta

SEQ ID NO: 243233 - DNA, 25 bp, probe
gtgaactcaaacgatgtgcaataca

SEQ ID NO: 243234 - DNA, 25 bp, probe
gtgaagcctagacattcagagcagc

SEQ ID NO: 243235 - DNA, 25 bp, probe
gtgaacctggcagcaggcgagagcc

SEQ ID NO: 243236 - DNA, 25 bp, probe
gtgaagcgtcggccggagatgagcc

SEQ ID NO: 243237 - DNA, 25 bp, probe
gtgaagcgcatgcgcagcgggtggt

SEQ ID NO: 243238 - DNA, 25 bp, probe
gtgaagcagatgcgtgcacggagga

SEQ ID NO: 243239 - DNA, 25 bp, probe
gtgaatgagtgaagatcctggagga

SEQ ID NO: 243240 - DNA, 25 bp, probe
gtgacagagtcaagggtgtgtgcag

SEQ ID NO: 243241 - DNA, 25 bp, probe
gtgacagctgtcaggagtattctga

SEQ ID NO: 243242 - DNA, 25 bp, probe
gtgacaggaaggaagctttctagga

SEQ ID NO: 243243 - DNA, 25 bp, probe
gtgacaggaaggtatggctgctgtt

SEQ ID NO: 243244 - DNA, 25 bp, probe
gtgaagggcgcactgaggaggttgc

SEQ ID NO: 243245 - DNA, 25 bp, probe
gtgagacggagccggaagttattta

SEQ ID NO: 243246 - DNA, 25 bp, probe
gtggaggttcaagcaaggtatttca

SEQ ID NO: 243247 - DNA, 25 bp, probe
gtgagaggtttaggtcagtgttttt

SEQ ID NO: 243248 - DNA, 25 bp, probe
gtgaaggggatagggcgaggctgtg

SEQ ID NO: 243249 - DNA, 25 bp, probe
gtgaagcgggaagtctccaagggcc

SEQ ID NO: 243250 - DNA, 25 bp, probe
gtgagggagtaaaccagaggaggag

SEQ ID NO: 243251 - DNA, 25 bp, probe
gtgagaagcagttcatccacaggga

SEQ ID NO: 243252 - DNA, 25 bp, probe
gtgacacacagttatctctaggagt

SEQ ID NO: 243253 - DNA, 25 bp, probe
gtgacagcaagtacatccatccagc

SEQ ID NO: 243254 - DNA, 25 bp, probe
gtgaagctgagactcatggatcccc

SEQ ID NO: 243255 - DNA, 25 bp, probe
gtgttctgcaatgcaggcatcatca

SEQ ID NO: 243256 - DNA, 25 bp, probe
gtgacctccgcaagagcatgatcat

SEQ ID NO: 243257 - DNA, 25 bp, probe
gtgacctccgcaagagcatgatcat

SEQ ID NO: 243258 - DNA, 25 bp, probe
gtgacagcgatgccatagagagaat

SEQ ID NO: 243259 - DNA, 25 bp, probe
gtgacaactgcactgaatgacactt

SEQ ID NO: 243260 - DNA, 25 bp, probe
gtgactgcagtgctgtaaacttaac

SEQ ID NO: 243261 - DNA, 25 bp, probe
gtgactcagacgttagacctcttga

SEQ ID NO: 243262 - DNA, 25 bp, probe
gtgaacagatgcattgaggccttgg

SEQ ID NO: 243263 - DNA, 25 bp, probe
gtgaacagatgcattgaggccttgg

SEQ ID NO: 243264 - DNA, 25 bp, probe
gtgaacagtgctcttgtggtaggtg

SEQ ID NO: 243265 - DNA, 25 bp, probe
gtgaagagtgctttttgacctgtca

SEQ ID NO: 243266 - DNA, 25 bp, probe
gtgaagagtgctttttgacctgtca

SEQ ID NO: 243267 - DNA, 25 bp, probe
gtgacatattcattgtgttaccgta

SEQ ID NO: 243268 - DNA, 25 bp, probe
gtgacaatctgcaaggctgaacaac

SEQ ID NO: 243269 - DNA, 25 bp, probe
gtgacacacgactgctcatacaagc

SEQ ID NO: 243270 - DNA, 25 bp, probe
gtgaaagctgactattcaataggca

SEQ ID NO: 243271 - DNA, 25 bp, probe
gtgaaagacacagttactaggataa

SEQ ID NO: 243272 - DNA, 25 bp, probe
gtgacgatgaagtgtacgagctgat

SEQ ID NO: 243273 - DNA, 25 bp, probe
gtgaccaggagattgctaactgctt

SEQ ID NO: 243274 - DNA, 25 bp, probe
gtgacatcttgttcggaagtgcctc

SEQ ID NO: 243275 - DNA, 25 bp, probe
gtgacatcttgttcggaagtgcctc

SEQ ID NO: 243276 - DNA, 25 bp, probe
gtgaagtatggctgtaagtctcatg

SEQ ID NO: 243277 - DNA, 25 bp, probe
gtgaagtcgtattatacagtacatc

SEQ ID NO: 243278 - DNA, 25 bp, probe
gtgaagacagttttcctgaagctgc

SEQ ID NO: 243279 - DNA, 25 bp, probe
gtgaagacagttttcctgaagctgc

SEQ ID NO: 243280 - DNA, 25 bp, probe
gtgacaatcatttttcttaaggcct

SEQ ID NO: 243281 - DNA, 25 bp, probe
gtgacaacttcttatctttcagcgc

SEQ ID NO: 243282 - DNA, 25 bp, probe
gtgactggagacagggatgatggag

SEQ ID NO: 243283 - DNA, 25 bp, probe
gtgacttatgtctggggtgttgtga

SEQ ID NO: 243284 - DNA, 25 bp, probe
gtgtctatgggatggggtttgctgg

SEQ ID NO: 243285 - DNA, 25 bp, probe
gtgtctatgggatggggtttgctgg

SEQ ID NO: 243286 - DNA, 25 bp, probe
ggtcattttaagctagttgggccac

SEQ ID NO: 243287 - DNA, 25 bp, probe
gggcgttaacagcctttggagtcgc

SEQ ID NO: 243288 - DNA, 25 bp, probe
gtgtggcttaacggtatttcagaag

SEQ ID NO: 243289 - DNA, 25 bp, probe
gtgattgtggtgagcgtgttcatcg

SEQ ID NO: 243290 - DNA, 25 bp, probe
gtgagcatgggtacccatttgataa

SEQ ID NO: 243291 - DNA, 25 bp, probe
gtgactttatcagcactgtcataaa

SEQ ID NO: 243292 - DNA, 25 bp, probe
gtgactctgtaagtaagttaaatac

SEQ ID NO: 243293 - DNA, 25 bp, probe
gtgactaaatacaaactacattttc

SEQ ID NO: 243294 - DNA, 25 bp, probe
gtgttatgttacagtccagttttgt

SEQ ID NO: 243295 - DNA, 25 bp, probe
gtgttatgttacagtccagttttgt

SEQ ID NO: 243296 - DNA, 25 bp, probe
gtgatcttaaaccagctaactttct

SEQ ID NO: 243297 - DNA, 25 bp, probe
gtgatcttaaaccagctaactttct

SEQ ID NO: 243298 - DNA, 25 bp, probe
gtgacctaaactataagataaccca

SEQ ID NO: 243299 - DNA, 25 bp, probe
gtgacctaaactataagataaccca

SEQ ID NO: 243300 - DNA, 25 bp, probe
gtgacgtagaccatttttgaaaccg

SEQ ID NO: 243301 - DNA, 25 bp, probe
gtgaccgaacatttactttgaagac

SEQ ID NO: 243302 - DNA, 25 bp, probe
gtgatcctacctttgaacttgagga

SEQ ID NO: 243303 - DNA, 25 bp, probe
gtgaccatagtttatacactgtaca

SEQ ID NO: 243304 - DNA, 25 bp, probe
gtgaccatttggcatcaagttaaca

SEQ ID NO: 243305 - DNA, 25 bp, probe
gtgaccaaatggcaaatgagaacaa

SEQ ID NO: 243306 - DNA, 25 bp, probe
gtgaccaaatggcaaatgagaacaa

SEQ ID NO: 243307 - DNA, 25 bp, probe
gtgactgaagattcaacacagaaaa

SEQ ID NO: 243308 - DNA, 25 bp, probe
gtgaagacattaacattgcagaaaa

SEQ ID NO: 243309 - DNA, 25 bp, probe
gtgaagacattaacattgcagaaaa

SEQ ID NO: 243310 - DNA, 25 bp, probe
gtgaaacctcacaatgtcatgatag

SEQ ID NO: 243311 - DNA, 25 bp, probe
gtgaaactcacctttctgtgaagaa

SEQ ID NO: 243312 - DNA, 25 bp, probe
gtgaaactcacctttctgtgaagaa

SEQ ID NO: 243313 - DNA, 25 bp, probe
gtgaagcacccctttattgtggaac

SEQ ID NO: 243314 - DNA, 25 bp, probe
gtgaagcacccctttattgtggaac

SEQ ID NO: 243315 - DNA, 25 bp, probe
gtgaccctccacgaaaaggagaatc

SEQ ID NO: 243316 - DNA, 25 bp, probe
gtgaccgtgccaagaaaacgtaagc

SEQ ID NO: 243317 - DNA, 25 bp, probe
gtgaacgctacttatgtgaacgtaa

SEQ ID NO: 243318 - DNA, 25 bp, probe
gtgaacaatactttgtaatttatga

SEQ ID NO: 243319 - DNA, 25 bp, probe
gtgaactatgatattgtaatttttc

SEQ ID NO: 243320 - DNA, 25 bp, probe
gtgaactctcataattcaaattgta

SEQ ID NO: 243321 - DNA, 25 bp, probe
gtgaactgtctcatcaaaattctct

SEQ ID NO: 243322 - DNA, 25 bp, probe
gtgaagctggctactgaagatatcc

SEQ ID NO: 243323 - DNA, 25 bp, probe
gtgaactccatggtggacatctcca

SEQ ID NO: 243324 - DNA, 25 bp, probe
gtgacacccagcgttacataatcat

SEQ ID NO: 243325 - DNA, 25 bp, probe
gtgacacccagcgttacataatcat

SEQ ID NO: 243326 - DNA, 25 bp, probe
gtgacagccctcatgtagtcaaata

SEQ ID NO: 243327 - DNA, 25 bp, probe
gtgaagccctccaatatgctagtaa

SEQ ID NO: 243328 - DNA, 25 bp, probe
gtgaagctatcagagaagctaataa

SEQ ID NO: 243329 - DNA, 25 bp, probe
gtgaagctatcagagaagctaataa

SEQ ID NO: 243330 - DNA, 25 bp, probe
gtgatggtcatcaaagacagcccac

SEQ ID NO: 243331 - DNA, 25 bp, probe
gtgatggattcagtactcctcaacc

SEQ ID NO: 243332 - DNA, 25 bp, probe
gtgatggatggacagcttctttgcc

SEQ ID NO: 243333 - DNA, 25 bp, probe
gtgagtaggaaccctgtctcagtgc

SEQ ID NO: 243334 - DNA, 25 bp, probe
gtgagggtggagcacttcatgaacc

SEQ ID NO: 243335 - DNA, 25 bp, probe
gtgagggtggctctcaggtacatcc

SEQ ID NO: 243336 - DNA, 25 bp, probe
gtgagaggtggtaccatggccacat

SEQ ID NO: 243337 - DNA, 25 bp, probe
gtgatgcaggggtgtgaggcccagg

SEQ ID NO: 243338 - DNA, 25 bp, probe
gtgacaggatggcgccaaactcagc

SEQ ID NO: 243339 - DNA, 25 bp, probe
gtgacatggtggcggaggagcccat

SEQ ID NO: 243340 - DNA, 25 bp, probe
gtgacatggtggcggaggagcccat

SEQ ID NO: 243341 - DNA, 25 bp, probe
gtgacatggttcttggatttcctct

SEQ ID NO: 243342 - DNA, 25 bp, probe
gtgatgggcgtctgagtttcacatc

SEQ ID NO: 243343 - DNA, 25 bp, probe
gtgaggaggtatgggttttactgat

SEQ ID NO: 243344 - DNA, 25 bp, probe
gtgggaggatagggtccctgacgtg

SEQ ID NO: 243345 - DNA, 25 bp, probe
gtgatcggaaagggtcccttcagtg

SEQ ID NO: 243346 - DNA, 25 bp, probe
gtgttggaagaaggaccctgatgaa

SEQ ID NO: 243347 - DNA, 25 bp, probe
gtgttggaagaaggaccctgatgaa

SEQ ID NO: 243348 - DNA, 25 bp, probe
gtgtttggaaacctcctggtgatga

SEQ ID NO: 243349 - DNA, 25 bp, probe
gtgatttttgagtgtgccagggtaa

SEQ ID NO: 243350 - DNA, 25 bp, probe
gtgatgactttggcacgtcacggga

SEQ ID NO: 243351 - DNA, 25 bp, probe
gtgatgacgtaggacatgtgcttgg

SEQ ID NO: 243352 - DNA, 25 bp, probe
gtgatgacggaggagtagccggcca

SEQ ID NO: 243353 - DNA, 25 bp, probe
gtgagtggtgggcaggccagtggca

SEQ ID NO: 243354 - DNA, 25 bp, probe
gtgagtgaggggacaaggggcaggt

SEQ ID NO: 243355 - DNA, 25 bp, probe
gtgaggcggtgcacgaggtggaggt

SEQ ID NO: 243356 - DNA, 25 bp, probe
gtgatcgaggtgcaccgagtgggca

SEQ ID NO: 243357 - DNA, 25 bp, probe
gtgaaagtgagtgccgggggtgggt

SEQ ID NO: 243358 - DNA, 25 bp, probe
gtgatgtatggagcttcggggtgat

SEQ ID NO: 243359 - DNA, 25 bp, probe
gtgattcacaatctttggggttttc

SEQ ID NO: 243360 - DNA, 25 bp, probe
gtgaccacatacgtgttaggaggct

SEQ ID NO: 243361 - DNA, 25 bp, probe
gtgacccatttcctccaggaggaaa

SEQ ID NO: 243362 - DNA, 25 bp, probe
gtgaagccaacgctgccagaaagaa

SEQ ID NO: 243363 - DNA, 25 bp, probe
gtgaccacaccgatggagatacaga

SEQ ID NO: 243364 - DNA, 25 bp, probe
gtgatgttcccgatgggcgacaact

SEQ ID NO: 243365 - DNA, 25 bp, probe
gtgtttacctgagttggctgaaatg

SEQ ID NO: 243366 - DNA, 25 bp, probe
gtgtttacctaatcagtaggttcac

SEQ ID NO: 243367 - DNA, 25 bp, probe
gtgtttacctaatcagtaggttcac

SEQ ID NO: 243368 - DNA, 25 bp, probe
gtgttatgtcctgaaaataggtgac

SEQ ID NO: 243369 - DNA, 25 bp, probe
gtgttatgtcctgaaaataggtgac

SEQ ID NO: 243370 - DNA, 25 bp, probe
gtgtctgttcgagaacgtccagtgc

SEQ ID NO: 243371 - DNA, 25 bp, probe
ggatcagattcggacaatcgaccga

SEQ ID NO: 243372 - DNA, 25 bp, probe
ggatcagattcggacaatcgaccga

SEQ ID NO: 243373 - DNA, 25 bp, probe
gtgacatgttcgaaacctgtccata

SEQ ID NO: 243374 - DNA, 25 bp, probe
gtgacatgttcgaaacctgtccata

SEQ ID NO: 243375 - DNA, 25 bp, probe
gtgatcactaataaaatgcgtccaa

SEQ ID NO: 243376 - DNA, 25 bp, probe
gtgtccttataaactcttactcaaa

SEQ ID NO: 243377 - DNA, 25 bp, probe
gtgaactcctatacttttgacatta

SEQ ID NO: 243378 - DNA, 25 bp, probe
gtgagttcagtagctttggtattat

SEQ ID NO: 243379 - DNA, 25 bp, probe
gtgactggtggagctttgggtctct

SEQ ID NO: 243380 - DNA, 25 bp, probe
gggcttttagctctgtgggtgccct

SEQ ID NO: 243381 - DNA, 25 bp, probe
ggaggtcttgaccggtaagctgtcc

SEQ ID NO: 243382 - DNA, 25 bp, probe
gtgaaacttacacagtacctctccc

SEQ ID NO: 243383 - DNA, 25 bp, probe
gtgacaagtgtgtcccagtcaccct

SEQ ID NO: 243384 - DNA, 25 bp, probe
gtgacaagtgtgtcccagtcaccct

SEQ ID NO: 243385 - DNA, 25 bp, probe
gtgaaaggatggcctcattctcttt

SEQ ID NO: 243386 - DNA, 25 bp, probe
gtgaaaatattgccatctccactat

SEQ ID NO: 243387 - DNA, 25 bp, probe
gtgaaatgcttatgcttgtgtatat

SEQ ID NO: 243388 - DNA, 25 bp, probe
gtgatggccattgagcggtgtattg

SEQ ID NO: 243389 - DNA, 25 bp, probe
gtgtcccattggtgttgtcattgta

SEQ ID NO: 243390 - DNA, 25 bp, probe
gtgttactggtttcttacattgcca

SEQ ID NO: 243391 - DNA, 25 bp, probe
gtgttaatggtcacttagaataaaa

SEQ ID NO: 243392 - DNA, 25 bp, probe
gtgttagggtagcatgggattacag

SEQ ID NO: 243393 - DNA, 25 bp, probe
gtgaaaccgtagaagggtgcccagc

SEQ ID NO: 243394 - DNA, 25 bp, probe
gtgaaatctcgatggagtgggtccc

SEQ ID NO: 243395 - DNA, 25 bp, probe
gtgaaatctcgatggagtgggtccc

SEQ ID NO: 243396 - DNA, 25 bp, probe
gtgaaattggaagccgagatggacc

SEQ ID NO: 243397 - DNA, 25 bp, probe
ggaacattaaaacaatggctaccca

SEQ ID NO: 243398 - DNA, 25 bp, probe
ggaacattaaaacaatggctaccca

SEQ ID NO: 243399 - DNA, 25 bp, probe
gtgagacttacaatgataaatggct

SEQ ID NO: 243400 - DNA, 25 bp, probe
gtgagacttacaatgataaatggct

SEQ ID NO: 243401 - DNA, 25 bp, probe
gtgatgcccaaattgatttatgtaa

SEQ ID NO: 243402 - DNA, 25 bp, probe
gtgatgcccaaattgatttatgtaa

SEQ ID NO: 243403 - DNA, 25 bp, probe
gtgtgcctacagttaaaagcagtat

SEQ ID NO: 243404 - DNA, 25 bp, probe
gtgatcctggcagaagataagagga

SEQ ID NO: 243405 - DNA, 25 bp, probe
gtgatgagggcggtgagtacgacgg

SEQ ID NO: 243406 - DNA, 25 bp, probe
gtgaggggctacaagaaaacgcttt

SEQ ID NO: 243407 - DNA, 25 bp, probe
gtgggccccatgaaatcaaccactt

SEQ ID NO: 243408 - DNA, 25 bp, probe
gtgaggggctcactttggagccact

SEQ ID NO: 243409 - DNA, 25 bp, probe
gtgacagagctggcacctctgggat

SEQ ID NO: 243410 - DNA, 25 bp, probe
gtgacgacctcatcctggagatcga

SEQ ID NO: 243411 - DNA, 25 bp, probe
ggagtactatgtgccggagacggac

SEQ ID NO: 243412 - DNA, 25 bp, probe
ggagtactatgtgccggagacggac

SEQ ID NO: 243413 - DNA, 25 bp, probe
gtgagtaaaatcccctagagcagag

SEQ ID NO: 243414 - DNA, 25 bp, probe
gtgatgctgaacaaccccaaaaggg

SEQ ID NO: 243415 - DNA, 25 bp, probe
gtgagcaggacccactcatagcaaa

SEQ ID NO: 243416 - DNA, 25 bp, probe
gtgagcaggacccactcatagcaaa

SEQ ID NO: 243417 - DNA, 25 bp, probe
gtgagggatcgctttaatgcaagac

SEQ ID NO: 243418 - DNA, 25 bp, probe
gtgatggactcgttctgtagatgag

SEQ ID NO: 243419 - DNA, 25 bp, probe
gtgagctgacctatcagtatcggca

SEQ ID NO: 243420 - DNA, 25 bp, probe
gtgaacaccttttgtgacagctgca

SEQ ID NO: 243421 - DNA, 25 bp, probe
gtgaaaggttctatgagtgctgcaa

SEQ ID NO: 243422 - DNA, 25 bp, probe
gtgacagtcagttttatagtgtgca

SEQ ID NO: 243423 - DNA, 25 bp, probe
gtgacttgcggatttatgtttcagt

SEQ ID NO: 243424 - DNA, 25 bp, probe
gtgagggggatgtttttccaggaca

SEQ ID NO: 243425 - DNA, 25 bp, probe
gtgagtgggggcttgattactagga

SEQ ID NO: 243426 - DNA, 25 bp, probe
gtgagctgagatcgtgccgttactc

SEQ ID NO: 243427 - DNA, 25 bp, probe
gtgactatgtattgctagattgaat

SEQ ID NO: 243428 - DNA, 25 bp, probe
gtgacatgattatctacattgtagg

SEQ ID NO: 243429 - DNA, 25 bp, probe
gtgacatgattatctacattgtagg

SEQ ID NO: 243430 - DNA, 25 bp, probe
gtgactgctggatctacaagtggga

SEQ ID NO: 243431 - DNA, 25 bp, probe
gtgactgctggatctacaagtggga

SEQ ID NO: 243432 - DNA, 25 bp, probe
gtgacgtggtcagcatgcacaggag

SEQ ID NO: 243433 - DNA, 25 bp, probe
gtgacgtggtcagcatgcacaggag

SEQ ID NO: 243434 - DNA, 25 bp, probe
gtgagcgtgagaagccataagagag

SEQ ID NO: 243435 - DNA, 25 bp, probe
gtgacgctgagaccactagtgaatg

SEQ ID NO: 243436 - DNA, 25 bp, probe
gtgacgctgagaccactagtgaatg

SEQ ID NO: 243437 - DNA, 25 bp, probe
gtgacagctgagcggctgagtcctg

SEQ ID NO: 243438 - DNA, 25 bp, probe
gtgactctggtggacgcagagcact

SEQ ID NO: 243439 - DNA, 25 bp, probe
gtgacactggtgatcgcatacatca

SEQ ID NO: 243440 - DNA, 25 bp, probe
gtgacactggtgatcgcatacatca

SEQ ID NO: 243441 - DNA, 25 bp, probe
gtgacactggtgatcgcatacatca

SEQ ID NO: 243442 - DNA, 25 bp, probe
gtgacactggtgatcgcatacatca

SEQ ID NO: 243443 - DNA, 25 bp, probe
gtgacactggtgatcgcatacatca

SEQ ID NO: 243444 - DNA, 25 bp, probe
gtgacacgtctgttgcacaaatgca

SEQ ID NO: 243445 - DNA, 25 bp, probe
gtgacacgtctgttgcacaaatgca

SEQ ID NO: 243446 - DNA, 25 bp, probe
gtgaccgagctgcgcagcattatcc

SEQ ID NO: 243447 - DNA, 25 bp, probe
gtgacattgcaggtggccatgtttc

SEQ ID NO: 243448 - DNA, 25 bp, probe
gtgacatctgcattgatttcagtat

SEQ ID NO: 243449 - DNA, 25 bp, probe
gtgacatcatagtcctctactgcat

SEQ ID NO: 243450 - DNA, 25 bp, probe
gtgagagtatcaccttcctcaagga

SEQ ID NO: 243451 - DNA, 25 bp, probe
gtgagcagcaaatgcctttcaagaa

SEQ ID NO: 243452 - DNA, 25 bp, probe
gtgagcagccagggccatgttgcac

SEQ ID NO: 243453 - DNA, 25 bp, probe
gtgagcatactggccagtgtgatga

SEQ ID NO: 243454 - DNA, 25 bp, probe
gtgaaagctcgccagttgaaatttt

SEQ ID NO: 243455 - DNA, 25 bp, probe
gtgataatccttaaatgaacatttt

SEQ ID NO: 243456 - DNA, 25 bp, probe
gtgataatccttaaatgaacatttt

SEQ ID NO: 243457 - DNA, 25 bp, probe
gtgatgaacgctcgtaagacccctt

SEQ ID NO: 243458 - DNA, 25 bp, probe
gtgataacagcgtgggggtgctctt

SEQ ID NO: 243459 - DNA, 25 bp, probe
gtgtaaccggcttagggtctttgca

SEQ ID NO: 243460 - DNA, 25 bp, probe
gtgttcccacacggtggaggctttg

SEQ ID NO: 243461 - DNA, 25 bp, probe
gtgttattgaatgtgtggggtttcc

SEQ ID NO: 243462 - DNA, 25 bp, probe
gtgacctcttagcgggtggatttcc

SEQ ID NO: 243463 - DNA, 25 bp, probe
gtgaccttaaggatgtgacgttatt

SEQ ID NO: 243464 - DNA, 25 bp, probe
gtgaccttaaggatgtgacgttatt

SEQ ID NO: 243465 - DNA, 25 bp, probe
gtggacttaatcggttgaccctact

SEQ ID NO: 243466 - DNA, 25 bp, probe
gtgacatctgtattcaggttaccct

SEQ ID NO: 243467 - DNA, 25 bp, probe
gtgacagtttgggagttgatgacct

SEQ ID NO: 243468 - DNA, 25 bp, probe
gtgacagtttcttttgtgttcctat

SEQ ID NO: 243469 - DNA, 25 bp, probe
gtgagttttcattttggttttgtat

SEQ ID NO: 243470 - DNA, 25 bp, probe
gtgagtttctgcattaggacctaag

SEQ ID NO: 243471 - DNA, 25 bp, probe
gtgacccctgtctaagatgacttaa

SEQ ID NO: 243472 - DNA, 25 bp, probe
gtgaccctcgcctaagaggcgtgct

SEQ ID NO: 243473 - DNA, 25 bp, probe
gtgagtaccagcatatagagtgttt

SEQ ID NO: 243474 - DNA, 25 bp, probe
gtgagctaccaggaagaggggcgct

SEQ ID NO: 243475 - DNA, 25 bp, probe
gtgacttgcatcgtggagacagggc

SEQ ID NO: 243476 - DNA, 25 bp, probe
gtgacttcattggccagaggacgct

SEQ ID NO: 243477 - DNA, 25 bp, probe
gtgactccagtgactcagacgttag

SEQ ID NO: 243478 - DNA, 25 bp, probe
gtgaccagcagtactcaggtttgag

SEQ ID NO: 243479 - DNA, 25 bp, probe
gtgactctggtcataggacttggta

SEQ ID NO: 243480 - DNA, 25 bp, probe
gtgacattgtctataagcatttggc

SEQ ID NO: 243481 - DNA, 25 bp, probe
gtgacattgtctataagcatttggc

SEQ ID NO: 243482 - DNA, 25 bp, probe
gtgacttctctaccaagtctgatgt

SEQ ID NO: 243483 - DNA, 25 bp, probe
gtgacttttagggagcacaaacaag

SEQ ID NO: 243484 - DNA, 25 bp, probe
gtgacattatgtagcaaaccaaata

SEQ ID NO: 243485 - DNA, 25 bp, probe
gtgacattatgtagcaaaccaaata

SEQ ID NO: 243486 - DNA, 25 bp, probe
gtgacatagagtagttggccttata

SEQ ID NO: 243487 - DNA, 25 bp, probe
gtgacagtggacatctagttcataa

SEQ ID NO: 243488 - DNA, 25 bp, probe
gtgacatgggacacaagccacctga

SEQ ID NO: 243489 - DNA, 25 bp, probe
gtgactgggaaaatgcccatcctct

SEQ ID NO: 243490 - DNA, 25 bp, probe
gtgactgatggacgagtgtccacct

SEQ ID NO: 243491 - DNA, 25 bp, probe
gtgactttgagcctgtcaccaatcc

SEQ ID NO: 243492 - DNA, 25 bp, probe
gtgactttggattggctcgagatat

SEQ ID NO: 243493 - DNA, 25 bp, probe
gtgacttcggttgctctgagaagtt

SEQ ID NO: 243494 - DNA, 25 bp, probe
gtgacttccgttgtgctcaaatatg

SEQ ID NO: 243495 - DNA, 25 bp, probe
gtgacttcactttggtgccaatgga

SEQ ID NO: 243496 - DNA, 25 bp, probe
gtgacttcagtgtgtgtattgtgta

SEQ ID NO: 243497 - DNA, 25 bp, probe
gtgagcttgagcctttgatatcttg

SEQ ID NO: 243498 - DNA, 25 bp, probe
gtgagatcgaggccttcgatgcgga

SEQ ID NO: 243499 - DNA, 25 bp, probe
gtgagactcagccgctgtctcgccg

SEQ ID NO: 243500 - DNA, 25 bp, probe
gtgacaacagggttccagcacagca

SEQ ID NO: 243501 - DNA, 25 bp, probe
gtgacaccagtgggtcacttcagcc

SEQ ID NO: 243502 - DNA, 25 bp, probe
gtgacctatgtggattttagcatcc

SEQ ID NO: 243503 - DNA, 25 bp, probe
gtgacctgcttggatctagacagca

SEQ ID NO: 243504 - DNA, 25 bp, probe
gtgacctgctctggtcagatccaca

SEQ ID NO: 243505 - DNA, 25 bp, probe
gtgacctgctctggtcagatccaca

SEQ ID NO: 243506 - DNA, 25 bp, probe
gtgacctgtaggccatgttagcact

SEQ ID NO: 243507 - DNA, 25 bp, probe
gtgagaccttagcagtgctacagct

SEQ ID NO: 243508 - DNA, 25 bp, probe
gtgactactatacagactacgtggc

SEQ ID NO: 243509 - DNA, 25 bp, probe
gtgattccttatctacagaccgtgt

SEQ ID NO: 243510 - DNA, 25 bp, probe
gtgaggtgcaattcctacagaccag

SEQ ID NO: 243511 - DNA, 25 bp, probe
gtgagtggacatgacagggaacagg

SEQ ID NO: 243512 - DNA, 25 bp, probe
gtgactgagatcgcacaggatgaga

SEQ ID NO: 243513 - DNA, 25 bp, probe
gtgactgtgcaaacacaggggcaca

SEQ ID NO: 243514 - DNA, 25 bp, probe
gtgacctcattaacttggccaagaa

SEQ ID NO: 243515 - DNA, 25 bp, probe
gtgaccattttatttgtacagctga

SEQ ID NO: 243516 - DNA, 25 bp, probe
gtgtatattttctgtgcagccactg

SEQ ID NO: 243517 - DNA, 25 bp, probe
gtgataattttttatgcagccagta

SEQ ID NO: 243518 - DNA, 25 bp, probe
gtgacaactgttgacatgaccagaa

SEQ ID NO: 243519 - DNA, 25 bp, probe
gtgacaactgttgacatgaccagaa

SEQ ID NO: 243520 - DNA, 25 bp, probe
gtgttaccttggactgagccagaat

SEQ ID NO: 243521 - DNA, 25 bp, probe
gtgattcccttgcacagtcagggcc

SEQ ID NO: 243522 - DNA, 25 bp, probe
gtgatatactttgcaactggcgtcc

SEQ ID NO: 243523 - DNA, 25 bp, probe
gtgatagtccttgcaagtaagtcaa

SEQ ID NO: 243524 - DNA, 25 bp, probe
gtgagggccagagacaggaatgtaa

SEQ ID NO: 243525 - DNA, 25 bp, probe
gtgagagctccagaatccaagtgaa

SEQ ID NO: 243526 - DNA, 25 bp, probe
gtgagagcgtaggtcatcctcgtaa

SEQ ID NO: 243527 - DNA, 25 bp, probe
gtgagacttacagacgcatcctcaa

SEQ ID NO: 243528 - DNA, 25 bp, probe
gtgacagggaagaacgccctgacaa

SEQ ID NO: 243529 - DNA, 25 bp, probe
gtgacagggtggcagtcccatagcc

SEQ ID NO: 243530 - DNA, 25 bp, probe
gtgagggaggggacctccataccct

SEQ ID NO: 243531 - DNA, 25 bp, probe
gtgaggggccggacgagctcggccc

SEQ ID NO: 243532 - DNA, 25 bp, probe
gtgatggtgcggggaggaccggcac

SEQ ID NO: 243533 - DNA, 25 bp, probe
gtgatcgtggaggagaagggcgggc

SEQ ID NO: 243534 - DNA, 25 bp, probe
gtgacgctgagactggagggggagg

SEQ ID NO: 243535 - DNA, 25 bp, probe
gtgagacccagtggagggagcaaga

SEQ ID NO: 243536 - DNA, 25 bp, probe
gtgaccagcaactggacggcaagca

SEQ ID NO: 243537 - DNA, 25 bp, probe
gtgaccagcacctataaggatggga

SEQ ID NO: 243538 - DNA, 25 bp, probe
gtgagccagcactgcaagagcctgg

SEQ ID NO: 243539 - DNA, 25 bp, probe
gtgagctgccatgtgaagaccagat

SEQ ID NO: 243540 - DNA, 25 bp, probe
gtgacagcctatcagaaccacagga

SEQ ID NO: 243541 - DNA, 25 bp, probe
gtgagcccataatggatacacagag

SEQ ID NO: 243542 - DNA, 25 bp, probe
gtgacgcccaagtgaagcgcatgcg

SEQ ID NO: 243543 - DNA, 25 bp, probe
gtgagggccgagtgagagcgtgctc

SEQ ID NO: 243544 - DNA, 25 bp, probe
gtgagggccgagtgagagcgtgctc

SEQ ID NO: 243545 - DNA, 25 bp, probe
gtgagccaagccgcagaagcgtgcc

SEQ ID NO: 243546 - DNA, 25 bp, probe
gtgactcagtgtaccaaagttgccc

SEQ ID NO: 243547 - DNA, 25 bp, probe
gtgttacttacaaagaggtgctcag

SEQ ID NO: 243548 - DNA, 25 bp, probe
gtgtttttgaaaagtttgcagctta

SEQ ID NO: 243549 - DNA, 25 bp, probe
gtgtgttatggacaattaactgtta

SEQ ID NO: 243550 - DNA, 25 bp, probe
gtgactgttgtagcattttcctgtt

SEQ ID NO: 243551 - DNA, 25 bp, probe
gtgactttggcatcagtggctactg

SEQ ID NO: 243552 - DNA, 25 bp, probe
gtgacttcatgcttacttgtggatc

SEQ ID NO: 243553 - DNA, 25 bp, probe
gtgactctcagcgtatgttcaggac

SEQ ID NO: 243554 - DNA, 25 bp, probe
gtgttctgatgccacagttaggacc

SEQ ID NO: 243555 - DNA, 25 bp, probe
gtgttcgtgagattttaggttgcta

SEQ ID NO: 243556 - DNA, 25 bp, probe
gtgttcgttgaaagggtattgccct

SEQ ID NO: 243557 - DNA, 25 bp, probe
gtgttggttgccagtttatagtgcc

SEQ ID NO: 243558 - DNA, 25 bp, probe
gtgttggttgccagtttatagtgcc

SEQ ID NO: 243559 - DNA, 25 bp, probe
gtgattctgtcctacttgtacatag

SEQ ID NO: 243560 - DNA, 25 bp, probe
gtgacctgctactgttgcattgcaa

SEQ ID NO: 243561 - DNA, 25 bp, probe
gtgacctgtcaaggcttatgctaac

SEQ ID NO: 243562 - DNA, 25 bp, probe
gtgacctgtcaaggcttatgctaac

SEQ ID NO: 243563 - DNA, 25 bp, probe
gtgacctgtcaaggcttatgctaac

SEQ ID NO: 243564 - DNA, 25 bp, probe
gtgagcttatcatgctgtctttaca

SEQ ID NO: 243565 - DNA, 25 bp, probe
gtgactgatctctcgtgattgataa

SEQ ID NO: 243566 - DNA, 25 bp, probe
gtgactgatctctcgtgattgataa

SEQ ID NO: 243567 - DNA, 25 bp, probe
gtgactgactaccttgacttgaaat

SEQ ID NO: 243568 - DNA, 25 bp, probe
gtgactaccagtttgacatctacag

SEQ ID NO: 243569 - DNA, 25 bp, probe
gtgacttccgatggaaatctccaaa

SEQ ID NO: 243570 - DNA, 25 bp, probe
gtgacttcccatgtagagtggccaa

SEQ ID NO: 243571 - DNA, 25 bp, probe
gtgagctttgcctttgaggtgactc

SEQ ID NO: 243572 - DNA, 25 bp, probe
gtgagcttccgctcagcggagaagc

SEQ ID NO: 243573 - DNA, 25 bp, probe
gtgagatctccctctctgagaggag

SEQ ID NO: 243574 - DNA, 25 bp, probe
gtgagttcgctaatgagctcgagga

SEQ ID NO: 243575 - DNA, 25 bp, probe
gtgagttcgctaatgagctcgagga

SEQ ID NO: 243576 - DNA, 25 bp, probe
gtgatgcttgcgcaaagtcatggat

SEQ ID NO: 243577 - DNA, 25 bp, probe
gtgagttgcccattaattatgatta

SEQ ID NO: 243578 - DNA, 25 bp, probe
gtgagttgcccattaattatgatta

SEQ ID NO: 243579 - DNA, 25 bp, probe
gtgacattgttcttacttgattata

SEQ ID NO: 243580 - DNA, 25 bp, probe
gtgacattgttcttacttgattata

SEQ ID NO: 243581 - DNA, 25 bp, probe
gtgatcgtgatcccttttatttgca

SEQ ID NO: 243582 - DNA, 25 bp, probe
gtgatcgttggaatttggtcatcta

SEQ ID NO: 243583 - DNA, 25 bp, probe
gtgatcgttggaatttggtcatcta

SEQ ID NO: 243584 - DNA, 25 bp, probe
gtgacgtctggagcattggctgcat

SEQ ID NO: 243585 - DNA, 25 bp, probe
gtgacgtggtgaggatctacagccg

SEQ ID NO: 243586 - DNA, 25 bp, probe
gtgactgtatgccagttccaagcct

SEQ ID NO: 243587 - DNA, 25 bp, probe
gtgagcaatctgcagtctactggcc

SEQ ID NO: 243588 - DNA, 25 bp, probe
gtgagctgatcgctataactgccct

SEQ ID NO: 243589 - DNA, 25 bp, probe
gtgacatatcagcccatgaactcca

SEQ ID NO: 243590 - DNA, 25 bp, probe
gtgacttcatgctctgataactgcc

SEQ ID NO: 243591 - DNA, 25 bp, probe
gtgacgtgcactgtgaatcctggca

SEQ ID NO: 243592 - DNA, 25 bp, probe
gtgacggcgacaggcaactatggca

SEQ ID NO: 243593 - DNA, 25 bp, probe
gtgatagtggacagcaacttgagaa

SEQ ID NO: 243594 - DNA, 25 bp, probe
gtgattgtggactgtcaatcttaga

SEQ ID NO: 243595 - DNA, 25 bp, probe
gtgattttgagaagtatactcttga

SEQ ID NO: 243596 - DNA, 25 bp, probe
gtgtcgttttcataacttgctgaat

SEQ ID NO: 243597 - DNA, 25 bp, probe
gtgactctttcctaaagccaaagtt

SEQ ID NO: 243598 - DNA, 25 bp, probe
gtgactctttcctaaagccaaagtt

SEQ ID NO: 243599 - DNA, 25 bp, probe
gtgactttgtaacaactgctattgt

SEQ ID NO: 243600 - DNA, 25 bp, probe
gtgacttttgtcgaaagctgctttt

SEQ ID NO: 243601 - DNA, 25 bp, probe
gtgactttttaaatcgctgtcttga

SEQ ID NO: 243602 - DNA, 25 bp, probe
gtgactttttcaatatggactcatc

SEQ ID NO: 243603 - DNA, 25 bp, probe
gtgactttcttgttttgtctcaaaa

SEQ ID NO: 243604 - DNA, 25 bp, probe
gtgagatatttcaggtgggatcaaa

SEQ ID NO: 243605 - DNA, 25 bp, probe
gtgagaactgtcagggactacatca

SEQ ID NO: 243606 - DNA, 25 bp, probe
gtgagagactagcagaggacagact

SEQ ID NO: 243607 - DNA, 25 bp, probe
gtgaggatgtcactcagatggaacc

SEQ ID NO: 243608 - DNA, 25 bp, probe
gtgaggttcatactgtgctgatagc

SEQ ID NO: 243609 - DNA, 25 bp, probe
gtgaggtgctgatgagtgattgaca

SEQ ID NO: 243610 - DNA, 25 bp, probe
gtgaggtgctgatgagtgattgaca

SEQ ID NO: 243611 - DNA, 25 bp, probe
gtgaggttgttgaagattggaaatt

SEQ ID NO: 243612 - DNA, 25 bp, probe
gtgaggactgttggctgattggaaa

SEQ ID NO: 243613 - DNA, 25 bp, probe
gtgaggcatgctgaccacaatggac

SEQ ID NO: 243614 - DNA, 25 bp, probe
gtgaggcatgctgaccacaatggac

SEQ ID NO: 243615 - DNA, 25 bp, probe
gtgaggagcatcactaagtggacaa

SEQ ID NO: 243616 - DNA, 25 bp, probe
gtgagtgagataaccaatgccaaac

SEQ ID NO: 243617 - DNA, 25 bp, probe
gtgagctatgacagtgaaccgaagc

SEQ ID NO: 243618 - DNA, 25 bp, probe
gtgaggagactgctgagaccaaaag

SEQ ID NO: 243619 - DNA, 25 bp, probe
gggctgaagccacacagcccagaag

SEQ ID NO: 243620 - DNA, 25 bp, probe
gtgtctacaccaatatcagccacca

SEQ ID NO: 243621 - DNA, 25 bp, probe
gtgactcacccaagcatatataact

SEQ ID NO: 243622 - DNA, 25 bp, probe
gtgactacgagaaataacacatcat

SEQ ID NO: 243623 - DNA, 25 bp, probe
gtgactacgagaaataacacatcat

SEQ ID NO: 243624 - DNA, 25 bp, probe
gtgactgaagacaataaacattttt

SEQ ID NO: 243625 - DNA, 25 bp, probe
gtgagtgacaatcatttttcttaag

SEQ ID NO: 243626 - DNA, 25 bp, probe
gtgaggcaatatatctttctgtttt

SEQ ID NO: 243627 - DNA, 25 bp, probe
gtgagtcctttttttatggtgtcct

SEQ ID NO: 243628 - DNA, 25 bp, probe
gtgatgagcctgattttccatggga

SEQ ID NO: 243629 - DNA, 25 bp, probe
gtgatggccctcacgtatgaggaga

SEQ ID NO: 243630 - DNA, 25 bp, probe
gtgaggcagactttcaataaggaga

SEQ ID NO: 243631 - DNA, 25 bp, probe
gtgagggcatcttgtctttagtggt

SEQ ID NO: 243632 - DNA, 25 bp, probe
gtgtttgcatgctgtatgttacagg

SEQ ID NO: 243633 - DNA, 25 bp, probe
gtgatatatgccacaatgtttgggg

SEQ ID NO: 243634 - DNA, 25 bp, probe
gtgatgatgataaacaaggtggtga

SEQ ID NO: 243635 - DNA, 25 bp, probe
gtgatgatgataaacaaggtggtga

SEQ ID NO: 243636 - DNA, 25 bp, probe
gtgagaaaaaactagggctgacttc

SEQ ID NO: 243637 - DNA, 25 bp, probe
gtgaccccaagattcagaaggactt

SEQ ID NO: 243638 - DNA, 25 bp, probe
gtgaccccaagattcagaaggactt

SEQ ID NO: 243639 - DNA, 25 bp, probe
gtgaccccaagattcagaaggactt

SEQ ID NO: 243640 - DNA, 25 bp, probe
gtgacccagcagctatctaagtcac

SEQ ID NO: 243641 - DNA, 25 bp, probe
gtgacccagataattctgaatgtca

SEQ ID NO: 243642 - DNA, 25 bp, probe
gtgacccagataattctgaatgtca

SEQ ID NO: 243643 - DNA, 25 bp, probe
gtgacctcaacaagacagagtgtga

SEQ ID NO: 243644 - DNA, 25 bp, probe
gtgactaatatatagcaatgcttgc

SEQ ID NO: 243645 - DNA, 25 bp, probe
gtgactaatatatagcaatgcttgc

SEQ ID NO: 243646 - DNA, 25 bp, probe
gtgactaattagttggcatattgtt

SEQ ID NO: 243647 - DNA, 25 bp, probe
gtgactaattagttggcatattgtt

SEQ ID NO: 243648 - DNA, 25 bp, probe
gtgactcagtaaagtggattttttt

SEQ ID NO: 243649 - DNA, 25 bp, probe
gtgactcaacaaagggcttttccat

SEQ ID NO: 243650 - DNA, 25 bp, probe
gtgagctaaataaaggctgctgttc

SEQ ID NO: 243651 - DNA, 25 bp, probe
gtgagtgcgtatgaaagtgtgtgtc

SEQ ID NO: 243652 - DNA, 25 bp, probe
gtgatgacctgagacaagatgctgt

SEQ ID NO: 243653 - DNA, 25 bp, probe
gtgagatcctcagactactgcaacc

SEQ ID NO: 243654 - DNA, 25 bp, probe
gtgagatcctcagactactgcaacc

SEQ ID NO: 243655 - DNA, 25 bp, probe
gtgacctgctcagagtcattgcaga

SEQ ID NO: 243656 - DNA, 25 bp, probe
gtgacctcatgaaatgagttgcagc

SEQ ID NO: 243657 - DNA, 25 bp, probe
gtgaggtctgtgggagtctgcagat

SEQ ID NO: 243658 - DNA, 25 bp, probe
gtgatggctggtgtgattccaatcc

SEQ ID NO: 243659 - DNA, 25 bp, probe
gtgatggtggtgagcttcagcagcc

SEQ ID NO: 243660 - DNA, 25 bp, probe
gtgatgggtgtgtcatgttgcgtgt

SEQ ID NO: 243661 - DNA, 25 bp, probe
gtgagggatgagttgcatagctgat

SEQ ID NO: 243662 - DNA, 25 bp, probe
gtgaggctgattttgaagtgctcca

SEQ ID NO: 243663 - DNA, 25 bp, probe
gtgtggcagtattttagtaccgggt

SEQ ID NO: 243664 - DNA, 25 bp, probe
gtgtggcagtattttagtaccgggt

SEQ ID NO: 243665 - DNA, 25 bp, probe
gtgtggcatggaacttggtcagggt

SEQ ID NO: 243666 - DNA, 25 bp, probe
gtgaggcaggacagatggacaggtt

SEQ ID NO: 243667 - DNA, 25 bp, probe
gtgaggcaggacagatggacaggtt

SEQ ID NO: 243668 - DNA, 25 bp, probe
gtgatggggctcagatggactggga

SEQ ID NO: 243669 - DNA, 25 bp, probe
gtgagggatgcaacgaggacttgag

SEQ ID NO: 243670 - DNA, 25 bp, probe
gtggaccatcgatgaggtcttcggc

SEQ ID NO: 243671 - DNA, 25 bp, probe
gtgatgtcctttgagttgcttcctc

SEQ ID NO: 243672 - DNA, 25 bp, probe
gtgatgtcctttgagttgcttcctc

SEQ ID NO: 243673 - DNA, 25 bp, probe
gtgttccttaactattttgtctgcc

SEQ ID NO: 243674 - DNA, 25 bp, probe
gtgatattttagcactttggtagct

SEQ ID NO: 243675 - DNA, 25 bp, probe
gtgatattttagcactttggtagct

SEQ ID NO: 243676 - DNA, 25 bp, probe
gtgatattttcacactggtaaatgt

SEQ ID NO: 243677 - DNA, 25 bp, probe
gtgttgagaagggccgagtaaagtg

SEQ ID NO: 243678 - DNA, 25 bp, probe
gtgattgagtgagggcatgggtaaa

SEQ ID NO: 243679 - DNA, 25 bp, probe
gtgatgtcactagggcagggacagg

SEQ ID NO: 243680 - DNA, 25 bp, probe
gtgatgtgaagatggcagacttcgg

SEQ ID NO: 243681 - DNA, 25 bp, probe
gtgataagatcatccgactttatga

SEQ ID NO: 243682 - DNA, 25 bp, probe
gtgagaatgctctacggaaacatat

SEQ ID NO: 243683 - DNA, 25 bp, probe
gtgagatcaccaagcggagacgcaa

SEQ ID NO: 243684 - DNA, 25 bp, probe
gtgatcatcatcgcatggtgtacct

SEQ ID NO: 243685 - DNA, 25 bp, probe
gtgatcatctcagctgaagtgtggc

SEQ ID NO: 243686 - DNA, 25 bp, probe
gtgtctccacttcaggtggtacaca

SEQ ID NO: 243687 - DNA, 25 bp, probe
gtgactgaccctgaggcttgttaca

SEQ ID NO: 243688 - DNA, 25 bp, probe
gtgaggtcccttttgctatttggaa

SEQ ID NO: 243689 - DNA, 25 bp, probe
gtgggtcgtcttgtttctagcaaaa

SEQ ID NO: 243690 - DNA, 25 bp, probe
gtgggtcgtcttgtttctagcaaaa

SEQ ID NO: 243691 - DNA, 25 bp, probe
gtgaggtcagggttttagagagcag

SEQ ID NO: 243692 - DNA, 25 bp, probe
gtgagattcaggttttctctagagc

SEQ ID NO: 243693 - DNA, 25 bp, probe
gtgagattctggctgttctaaagtt

SEQ ID NO: 243694 - DNA, 25 bp, probe
gtgattctggagttctttgaaatgt

SEQ ID NO: 243695 - DNA, 25 bp, probe
gtgagtttagttgtgcatgcctttg

SEQ ID NO: 243696 - DNA, 25 bp, probe
gtgatgttgctgattcgctgcattt

SEQ ID NO: 243697 - DNA, 25 bp, probe
gtgatgtggtgggagcacagctttc

SEQ ID NO: 243698 - DNA, 25 bp, probe
gtgagatggggcaagcactgtgctt

SEQ ID NO: 243699 - DNA, 25 bp, probe
gtgatgatctgggcatatggggctg

SEQ ID NO: 243700 - DNA, 25 bp, probe
gtgagatgagcacccagggagtgac

SEQ ID NO: 243701 - DNA, 25 bp, probe
gtgagcggcacagatgatggggagc

SEQ ID NO: 243702 - DNA, 25 bp, probe
gtgagagtcatcgggcgtggaagct

SEQ ID NO: 243703 - DNA, 25 bp, probe
gtgagtttctctggttggaagggga

SEQ ID NO: 243704 - DNA, 25 bp, probe
gtgagatttctcacctcgagacagg

SEQ ID NO: 243705 - DNA, 25 bp, probe
gtgagaatttcttccttcagacggt

SEQ ID NO: 243706 - DNA, 25 bp, probe
gtgagaatttcttccttcagacggt

SEQ ID NO: 243707 - DNA, 25 bp, probe
gtgaggatgttttccagtatgaagt

SEQ ID NO: 243708 - DNA, 25 bp, probe
gtgatcgtattcttccagtgaaaac

SEQ ID NO: 243709 - DNA, 25 bp, probe
gtgatctgatcaacactctggttac

SEQ ID NO: 243710 - DNA, 25 bp, probe
gtgatagccagactgctgcgagcaa

SEQ ID NO: 243711 - DNA, 25 bp, probe
gtgatagccagactgctgcgagcaa

SEQ ID NO: 243712 - DNA, 25 bp, probe
gtgagactcgagccagtagcaaggg

SEQ ID NO: 243713 - DNA, 25 bp, probe
gtgagactcgagccagtagcaaggg

SEQ ID NO: 243714 - DNA, 25 bp, probe
gtgagcctcaggggccatgaaggag

SEQ ID NO: 243715 - DNA, 25 bp, probe
gtgacctcagtgctgaagacagaga

SEQ ID NO: 243716 - DNA, 25 bp, probe
gtgacctcagtgctgaagacagaga

SEQ ID NO: 243717 - DNA, 25 bp, probe
gtgacctcatgttcgagaagcagtc

SEQ ID NO: 243718 - DNA, 25 bp, probe
gtgacctcatgttcgagaagcagtc

SEQ ID NO: 243719 - DNA, 25 bp, probe
gtgaccacattctatggaacgctca

SEQ ID NO: 243720 - DNA, 25 bp, probe
gtgaccacattctatggaacgctca

SEQ ID NO: 243721 - DNA, 25 bp, probe
gtgtaaatggaaggcaaagcatcac

SEQ ID NO: 243722 - DNA, 25 bp, probe
gtgatagtttgaaagaagatgccag

SEQ ID NO: 243723 - DNA, 25 bp, probe
gtgatgagtcttcagtagagatgtt

SEQ ID NO: 243724 - DNA, 25 bp, probe
gtgatgcctgttgagtcagatgctt

SEQ ID NO: 243725 - DNA, 25 bp, probe
gtgatgcctgttgagtcagatgctt

SEQ ID NO: 243726 - DNA, 25 bp, probe
gtgatgcctgtaaaaatgacattca

SEQ ID NO: 243727 - DNA, 25 bp, probe
gtgacctgatgccaaatgagaatat

SEQ ID NO: 243728 - DNA, 25 bp, probe
gtgagctgctgaaaaagctactcat

SEQ ID NO: 243729 - DNA, 25 bp, probe
gtgattgctgcggaccgctacatca

SEQ ID NO: 243730 - DNA, 25 bp, probe
gtgattgctgcggaccgctacatca

SEQ ID NO: 243731 - DNA, 25 bp, probe
gtgattttgtggccctagataggat

SEQ ID NO: 243732 - DNA, 25 bp, probe
gtgattttgtggccctagataggat

SEQ ID NO: 243733 - DNA, 25 bp, probe
gtgttttgtcactctagaagagttc

SEQ ID NO: 243734 - DNA, 25 bp, probe
gtgttttacaccacagtaattccta

SEQ ID NO: 243735 - DNA, 25 bp, probe
gtgtaattcgacccgagaaattccg

SEQ ID NO: 243736 - DNA, 25 bp, probe
gtgatgatgtacgcggcaaggaatt

SEQ ID NO: 243737 - DNA, 25 bp, probe
gtgatttaccactgcacagaggagc

SEQ ID NO: 243738 - DNA, 25 bp, probe
gtgatgttccccaagtactgagact

SEQ ID NO: 243739 - DNA, 25 bp, probe
gtgatgttccccaagtactgagact

SEQ ID NO: 243740 - DNA, 25 bp, probe
gtgtcttctcccagaagtcagacgt

SEQ ID NO: 243741 - DNA, 25 bp, probe
gtgtctttgggcagtatgtagttat

SEQ ID NO: 243742 - DNA, 25 bp, probe
gtgtctactacagttgtattttttc

SEQ ID NO: 243743 - DNA, 25 bp, probe
gtgtttctccagaatggtgcctgtt

SEQ ID NO: 243744 - DNA, 25 bp, probe
gtgttctacaagtaagacgtgtgtg

SEQ ID NO: 243745 - DNA, 25 bp, probe
gtgttctacaagtaagacgtgtgtg

SEQ ID NO: 243746 - DNA, 25 bp, probe
gtgagtgctggctaaaagccctggg

SEQ ID NO: 243747 - DNA, 25 bp, probe
gtgggctactattatcccagtgacg

SEQ ID NO: 243748 - DNA, 25 bp, probe
gtgaggctactttatagctgcgtat

SEQ ID NO: 243749 - DNA, 25 bp, probe
gtgagactggctgtgagagtcagtt

SEQ ID NO: 243750 - DNA, 25 bp, probe
gtgatactgttcttgatggtcagaa

SEQ ID NO: 243751 - DNA, 25 bp, probe
gtgatcagttcctttgagaaaacaa

SEQ ID NO: 243752 - DNA, 25 bp, probe
gtgatgcattagcttctgggaacaa

SEQ ID NO: 243753 - DNA, 25 bp, probe
gtgattatgggaatcatagggaaag

SEQ ID NO: 243754 - DNA, 25 bp, probe
gtgatgtgtgggcatttggcgtgac

SEQ ID NO: 243755 - DNA, 25 bp, probe
gtgatgtgtggagttatggtgtgtg

SEQ ID NO: 243756 - DNA, 25 bp, probe
gtgatgtgtaccatactgtgtgctc

SEQ ID NO: 243757 - DNA, 25 bp, probe
gtgatggaaaccacttcctctacac

SEQ ID NO: 243758 - DNA, 25 bp, probe
gtgaggaacgccattgtcctcttct

SEQ ID NO: 243759 - DNA, 25 bp, probe
gtgttcaaagccattgggcttcctg

SEQ ID NO: 243760 - DNA, 25 bp, probe
gtgttcaaaccacggagttcacaac

SEQ ID NO: 243761 - DNA, 25 bp, probe
gtgttcaaaccacggagttcacaac

SEQ ID NO: 243762 - DNA, 25 bp, probe
gtgtaacaaccacgggtgtaagtgc

SEQ ID NO: 243763 - DNA, 25 bp, probe
gtgtaacaaccttgatcgtttcggc

SEQ ID NO: 243764 - DNA, 25 bp, probe
gtgtgaaaccatctcatggtcttgg

SEQ ID NO: 243765 - DNA, 25 bp, probe
gtgttaactcatttctcatgccatt

SEQ ID NO: 243766 - DNA, 25 bp, probe
gtgttaactcatttctcatgccatt

SEQ ID NO: 243767 - DNA, 25 bp, probe
gtgtctgaaccgttgcttgtggatt

SEQ ID NO: 243768 - DNA, 25 bp, probe
gtgtcagaggcacgttgatccttgt

SEQ ID NO: 243769 - DNA, 25 bp, probe
gtgaggcaggggagtctgcttgtct

SEQ ID NO: 243770 - DNA, 25 bp, probe
gtgaggaggaagagtctgttttaaa

SEQ ID NO: 243771 - DNA, 25 bp, probe
gtgagagagtgctgtccttttatta

SEQ ID NO: 243772 - DNA, 25 bp, probe
gtgaggattctgatcctttcaatat

SEQ ID NO: 243773 - DNA, 25 bp, probe
gtgagtgactgtactcctttctagg

SEQ ID NO: 243774 - DNA, 25 bp, probe
gtgagtatgtggacctcttttataa

SEQ ID NO: 243775 - DNA, 25 bp, probe
gggttaggctccatatttaaagata

SEQ ID NO: 243776 - DNA, 25 bp, probe
gtggtatcaggcccctgagttacta

SEQ ID NO: 243777 - DNA, 25 bp, probe
gtgattacaggcctgggtttgactg

SEQ ID NO: 243778 - DNA, 25 bp, probe
gtgttcaaggcccgcgacttgaaga

SEQ ID NO: 243779 - DNA, 25 bp, probe
gtgatacggggccagctgaaaaatg

SEQ ID NO: 243780 - DNA, 25 bp, probe
gtgtcaaggggccctaggaacctcg

SEQ ID NO: 243781 - DNA, 25 bp, probe
gtgtcaaggggccctaggaacctcg

SEQ ID NO: 243782 - DNA, 25 bp, probe
gtgttgggagccctttggagaacgc

SEQ ID NO: 243783 - DNA, 25 bp, probe
gtgtctttggcccatttgtaagtcc

SEQ ID NO: 243784 - DNA, 25 bp, probe
gtgtctttaaccatttagaggaact

SEQ ID NO: 243785 - DNA, 25 bp, probe
gtgtctttaaccatttagaggaact

SEQ ID NO: 243786 - DNA, 25 bp, probe
gtgtattctaactgttccaataaaa

SEQ ID NO: 243787 - DNA, 25 bp, probe
gtgtatttaaccagtcactattgat

SEQ ID NO: 243788 - DNA, 25 bp, probe
gtgtttctagggtgtagctgggtac

SEQ ID NO: 243789 - DNA, 25 bp, probe
gtgtcttctgacacttgtaggtggt

SEQ ID NO: 243790 - DNA, 25 bp, probe
ggtccccaacaatgtgaggggtcct

SEQ ID NO: 243791 - DNA, 25 bp, probe
ggttcctaatcctctaggaggtctc

SEQ ID NO: 243792 - DNA, 25 bp, probe
gtgttcctaagtattgggggtctgg

SEQ ID NO: 243793 - DNA, 25 bp, probe
gtgttggttggtattggtggtggta

SEQ ID NO: 243794 - DNA, 25 bp, probe
gtgtgggtgtcctgttggaggaggg

SEQ ID NO: 243795 - DNA, 25 bp, probe
gtgatgggttagtggatggaagggg

SEQ ID NO: 243796 - DNA, 25 bp, probe
gtgagagtgtcttcacggcaggaca

SEQ ID NO: 243797 - DNA, 25 bp, probe
gtgagttgtgattgcaccactgccc

SEQ ID NO: 243798 - DNA, 25 bp, probe
gtgagcgaagatcgagccactgcac

SEQ ID NO: 243799 - DNA, 25 bp, probe
gtgagccaagatcatgccactgcac

SEQ ID NO: 243800 - DNA, 25 bp, probe
gtgatggcgtgatatgcacctgcaa

SEQ ID NO: 243801 - DNA, 25 bp, probe
gtgatagcggaggcaccacgaagct

SEQ ID NO: 243802 - DNA, 25 bp, probe
gtgatatgcacctgcaacggagact

SEQ ID NO: 243803 - DNA, 25 bp, probe
gtgtcagagccactacatttaggct

SEQ ID NO: 243804 - DNA, 25 bp, probe
gtgataatgctccaagtctatgaac

SEQ ID NO: 243805 - DNA, 25 bp, probe
gtgataatgctccaagtctatgaac

SEQ ID NO: 243806 - DNA, 25 bp, probe
gtgatgaagatcaaagttctaagaa

SEQ ID NO: 243807 - DNA, 25 bp, probe
gtgatgtgcaatgaagcatctcaat

SEQ ID NO: 243808 - DNA, 25 bp, probe
gtgatggcaacattgaagtcaaatt

SEQ ID NO: 243809 - DNA, 25 bp, probe
gtgaccaaacaggcattaatattag

SEQ ID NO: 243810 - DNA, 25 bp, probe
gtgagtacaagagataatttcagag

SEQ ID NO: 243811 - DNA, 25 bp, probe
gtgagctaaaggctttgtctgcaga

SEQ ID NO: 243812 - DNA, 25 bp, probe
gtgagcttaccagggtctttgcaga

SEQ ID NO: 243813 - DNA, 25 bp, probe
gtgagcttaccagggtctttgcaga

SEQ ID NO: 243814 - DNA, 25 bp, probe
gtgagtatactaagggagttcattg

SEQ ID NO: 243815 - DNA, 25 bp, probe
gtgatttatttcctgggttcataga

SEQ ID NO: 243816 - DNA, 25 bp, probe
gtgattctgaattcttggatattac

SEQ ID NO: 243817 - DNA, 25 bp, probe
gtgatctttgcttttggcattgtcg

SEQ ID NO: 243818 - DNA, 25 bp, probe
gtgatctttgcttttggcattgtcg

SEQ ID NO: 243819 - DNA, 25 bp, probe
gtgttcattgctttcaagttggtgc

SEQ ID NO: 243820 - DNA, 25 bp, probe
gtgttcattgctttcaagttggtgc

SEQ ID NO: 243821 - DNA, 25 bp, probe
gtgatccaacatgtacagtatgtat

SEQ ID NO: 243822 - DNA, 25 bp, probe
gtgatccgagctctggagcgtggat

SEQ ID NO: 243823 - DNA, 25 bp, probe
gtgtcatcgatgagcggactgatgt

SEQ ID NO: 243824 - DNA, 25 bp, probe
gtgatagcagtgacagcagtgacag

SEQ ID NO: 243825 - DNA, 25 bp, probe
gtgttgagttcactgtgccagcatg

SEQ ID NO: 243826 - DNA, 25 bp, probe
gtgtttttgggaaagcaggaactga

SEQ ID NO: 243827 - DNA, 25 bp, probe
gtgtttacttaagaccgatagcagg

SEQ ID NO: 243828 - DNA, 25 bp, probe
gtgttctgtctaaaaaccagacaag

SEQ ID NO: 243829 - DNA, 25 bp, probe
gtgttctgtccaaaaagtcactgaa

SEQ ID NO: 243830 - DNA, 25 bp, probe
gtgttctacatcacaataatcccca

SEQ ID NO: 243831 - DNA, 25 bp, probe
gtgtctaacacaaattctattacca

SEQ ID NO: 243832 - DNA, 25 bp, probe
gtgtttcaaacgttctttatccaga

SEQ ID NO: 243833 - DNA, 25 bp, probe
gtgatcttctatcagtgtctttatg

SEQ ID NO: 243834 - DNA, 25 bp, probe
gtgttctcatatcatggatttctga

SEQ ID NO: 243835 - DNA, 25 bp, probe
gtgttctcatatcatggatttctga

SEQ ID NO: 243836 - DNA, 25 bp, probe
gtgttgcccagcctgggtgtcaata

SEQ ID NO: 243837 - DNA, 25 bp, probe
gtgttgtcgcaaaggggataatctg

SEQ ID NO: 243838 - DNA, 25 bp, probe
gtgtagtgctggagagggcatgata

SEQ ID NO: 243839 - DNA, 25 bp, probe
gtgtatgtgtggaggactttgcagg

SEQ ID NO: 243840 - DNA, 25 bp, probe
gtgatttgtgtagtgagcctttgaa

SEQ ID NO: 243841 - DNA, 25 bp, probe
gtgatttgtgtagtgagcctttgaa

SEQ ID NO: 243842 - DNA, 25 bp, probe
gtgatttgtgtagtgagcctttgaa

SEQ ID NO: 243843 - DNA, 25 bp, probe
gtgatttgtgtagtgagcctttgaa

SEQ ID NO: 243844 - DNA, 25 bp, probe
gtgattattgtatgagcctttgttt

SEQ ID NO: 243845 - DNA, 25 bp, probe
gtgtattcgtaacctcataattttt

SEQ ID NO: 243846 - DNA, 25 bp, probe
gtgttacagtcacaatctacttttc

SEQ ID NO: 243847 - DNA, 25 bp, probe
gtgatttcagattgtttgtttcttt

SEQ ID NO: 243848 - DNA, 25 bp, probe
gtgttctcagaatctgatgctttct

SEQ ID NO: 243849 - DNA, 25 bp, probe
gtgttctcagaatctgatgctttct

SEQ ID NO: 243850 - DNA, 25 bp, probe
gtgttccatacagccttggactagc

SEQ ID NO: 243851 - DNA, 25 bp, probe
gtgtatccatggggcggggaagagt

SEQ ID NO: 243852 - DNA, 25 bp, probe
gtgtactttgccgaggcggaagaag

SEQ ID NO: 243853 - DNA, 25 bp, probe
gtgtactttgccgaggcggaagaag

SEQ ID NO: 243854 - DNA, 25 bp, probe
gtgagcctttgtgatacgaattcaa

SEQ ID NO: 243855 - DNA, 25 bp, probe
gtgagcgtttgttgaacaagatgtg

SEQ ID NO: 243856 - DNA, 25 bp, probe
gtgttgtgcttgtaaatacacagtg

SEQ ID NO: 243857 - DNA, 25 bp, probe
gtgttgtgcttgtaaatacacagtg

SEQ ID NO: 243858 - DNA, 25 bp, probe
gtgatatgtattccaaaaaagtcat

SEQ ID NO: 243859 - DNA, 25 bp, probe
gtgagatttttactgaagaaagcat

SEQ ID NO: 243860 - DNA, 25 bp, probe
gtgagcatgctttaagatgaaaaaa

SEQ ID NO: 243861 - DNA, 25 bp, probe
gtgattgtcatgtaaggcttaacac

SEQ ID NO: 243862 - DNA, 25 bp, probe
gtgagttcagtccatctctataata

SEQ ID NO: 243863 - DNA, 25 bp, probe
gtgatgtccatgtcagacttcgagt

SEQ ID NO: 243864 - DNA, 25 bp, probe
gtgtgtatcacaagctcttcgatgc

SEQ ID NO: 243865 - DNA, 25 bp, probe
gtgtagaaagtggctgtcagaccga

SEQ ID NO: 243866 - DNA, 25 bp, probe
gtgtaacactggggacaactctgtc

SEQ ID NO: 243867 - DNA, 25 bp, probe
gtgataaattgggtcacagaggcag

SEQ ID NO: 243868 - DNA, 25 bp, probe
gtgagtgacatcggttcaggaggag

SEQ ID NO: 243869 - DNA, 25 bp, probe
gtgaggaaagcgtctctgagtgtag

SEQ ID NO: 243870 - DNA, 25 bp, probe
gtggaccaacggactgatttagaag

SEQ ID NO: 243871 - DNA, 25 bp, probe
gtgagaccaaccaatgtattagaga

SEQ ID NO: 243872 - DNA, 25 bp, probe
gtgagttctaccaatgtattgtcca

SEQ ID NO: 243873 - DNA, 25 bp, probe
gtgagtttctagaatactggtccat

SEQ ID NO: 243874 - DNA, 25 bp, probe
gtgatgtattcacgtaacatgcttg

SEQ ID NO: 243875 - DNA, 25 bp, probe
gtgatgtgatcttggctcactgcag

SEQ ID NO: 243876 - DNA, 25 bp, probe
gtgaggctgttgctcagcatgcagg

SEQ ID NO: 243877 - DNA, 25 bp, probe
gtgagatatttggatccatggtgta

SEQ ID NO: 243878 - DNA, 25 bp, probe
gtgatggatttggtgccatggtcta

SEQ ID NO: 243879 - DNA, 25 bp, probe
gtgatggatttggtgccatggtcta

SEQ ID NO: 243880 - DNA, 25 bp, probe
gtgatctgtacaggggcttgcctac

SEQ ID NO: 243881 - DNA, 25 bp, probe
gtgatctgtacaggggcttgcctac

SEQ ID NO: 243882 - DNA, 25 bp, probe
gtgtttatcgagccaaatggatatc

SEQ ID NO: 243883 - DNA, 25 bp, probe
gtgtctaattgggcaaactaaggaa

SEQ ID NO: 243884 - DNA, 25 bp, probe
gtgttaattatgaccaacttgagta

SEQ ID NO: 243885 - DNA, 25 bp, probe
gtgttaagtatgtcgccattgttgt

SEQ ID NO: 243886 - DNA, 25 bp, probe
gtgttaagtatgtcgccattgttgt

SEQ ID NO: 243887 - DNA, 25 bp, probe
gtgttctggtatgccccagagtgcc

SEQ ID NO: 243888 - DNA, 25 bp, probe
ggtgtctggtcgtcttcaaggacct

SEQ ID NO: 243889 - DNA, 25 bp, probe
gtgttcatgggcaaagtaagtactt

SEQ ID NO: 243890 - DNA, 25 bp, probe
gtgttcagtggcacctagaggcttg

SEQ ID NO: 243891 - DNA, 25 bp, probe
gtgattcagatgctgaggctcaagg

SEQ ID NO: 243892 - DNA, 25 bp, probe
gtgtatgcagtggtgatgcctaaag

SEQ ID NO: 243893 - DNA, 25 bp, probe
gtgatcatgagcaaggctgcctaca

SEQ ID NO: 243894 - DNA, 25 bp, probe
gtgatcatgagcaaggctgcctaca

SEQ ID NO: 243895 - DNA, 25 bp, probe
gtgatcagcatggaggtgacgaatg

SEQ ID NO: 243896 - DNA, 25 bp, probe
gtgatcagcatggaggtgacgaatg

SEQ ID NO: 243897 - DNA, 25 bp, probe
gtgatagaggtggctacagacgcac

SEQ ID NO: 243898 - DNA, 25 bp, probe
gtgatgacatggatatacaacagaa

SEQ ID NO: 243899 - DNA, 25 bp, probe
gtgattcacagagatattaagccag

SEQ ID NO: 243900 - DNA, 25 bp, probe
gtgatctcacctgttggaatgcact

SEQ ID NO: 243901 - DNA, 25 bp, probe
gtgtccaacgattcggactcggacc

SEQ ID NO: 243902 - DNA, 25 bp, probe
gtgtctaatcggtggaacagtgatg

SEQ ID NO: 243903 - DNA, 25 bp, probe
gtgatcagaaggctggggccagtgt

SEQ ID NO: 243904 - DNA, 25 bp, probe
gtgatcagaaggctggggccagtgt

SEQ ID NO: 243905 - DNA, 25 bp, probe
gtgattcataatctggtagacgtgt

SEQ ID NO: 243906 - DNA, 25 bp, probe
gtgatatttcatttgcttaactgta

SEQ ID NO: 243907 - DNA, 25 bp, probe
gtgatatttcatttgcttaactgta

SEQ ID NO: 243908 - DNA, 25 bp, probe
gtgattcttcatcttccaaggaaga

SEQ ID NO: 243909 - DNA, 25 bp, probe
gtgattcttcatcttccaaggaaga

SEQ ID NO: 243910 - DNA, 25 bp, probe
gtgttctgccagatcttaggtatag

SEQ ID NO: 243911 - DNA, 25 bp, probe
gtgttctgtggattcttactctgta

SEQ ID NO: 243912 - DNA, 25 bp, probe
gtgttcttggacttcaaccactttt

SEQ ID NO: 243913 - DNA, 25 bp, probe
gtgttcttggacttcaaccactttt

SEQ ID NO: 243914 - DNA, 25 bp, probe
gtgtatttggaactgcagggctatt

SEQ ID NO: 243915 - DNA, 25 bp, probe
gtgtatttggaactgcagggctatt

SEQ ID NO: 243916 - DNA, 25 bp, probe
gtgtcatgttaatgtgcctaatttc

SEQ ID NO: 243917 - DNA, 25 bp, probe
gtgtagtatacaaaccattatgatt

SEQ ID NO: 243918 - DNA, 25 bp, probe
gtgtgcagatatttccctaacatgt

SEQ ID NO: 243919 - DNA, 25 bp, probe
gtgtcagaattcaaacttcatcgga

SEQ ID NO: 243920 - DNA, 25 bp, probe
gtgttaggcctggcacagtgtctgg

SEQ ID NO: 243921 - DNA, 25 bp, probe
gtgttcagccacaccagtggtagct

SEQ ID NO: 243922 - DNA, 25 bp, probe
gtgattagagactgccagggtccat

SEQ ID NO: 243923 - DNA, 25 bp, probe
gtgtttctaaaggctgctggtcctc

SEQ ID NO: 243924 - DNA, 25 bp, probe
gtgtattttatatgctgtggctccc

SEQ ID NO: 243925 - DNA, 25 bp, probe
gtgttaataacatgcttttcctggg

SEQ ID NO: 243926 - DNA, 25 bp, probe
gtgtggtagaacactttcaaagagg

SEQ ID NO: 243927 - DNA, 25 bp, probe
gtgtttgagactcttttcactgcag

SEQ ID NO: 243928 - DNA, 25 bp, probe
gtgtattggtttaattgtcacaagc

SEQ ID NO: 243929 - DNA, 25 bp, probe
gtgatactggtagttggtgtgaaac

SEQ ID NO: 243930 - DNA, 25 bp, probe
gtgatagcattgctttcgtgtaaat

SEQ ID NO: 243931 - DNA, 25 bp, probe
gtgataattgcattttcctatcatt

SEQ ID NO: 243932 - DNA, 25 bp, probe
gtgtcatattaaacttctgatttca

SEQ ID NO: 243933 - DNA, 25 bp, probe
gtgatttttatagtctcgttttagg

SEQ ID NO: 243934 - DNA, 25 bp, probe
gtgatggtgtttgtcatctgctgga

SEQ ID NO: 243935 - DNA, 25 bp, probe
gtgatgtgttttgtgaccattgtcc

SEQ ID NO: 243936 - DNA, 25 bp, probe
gggtttttatggaccaatgccccag

SEQ ID NO: 243937 - DNA, 25 bp, probe
gtgttttatttggtctaataccctg

SEQ ID NO: 243938 - DNA, 25 bp, probe
gtgtcagttattatttactattacg

SEQ ID NO: 243939 - DNA, 25 bp, probe
gtgatttatttatttctacctttct

SEQ ID NO: 243940 - DNA, 25 bp, probe
gtgatttttgttttacatgtgggtt

SEQ ID NO: 243941 - DNA, 25 bp, probe
gtgttcccgttgtccctggcacaga

SEQ ID NO: 243942 - DNA, 25 bp, probe
gtgttttcttctaacctggcaagga

SEQ ID NO: 243943 - DNA, 25 bp, probe
gtgtttacttcagaacggcactaca

SEQ ID NO: 243944 - DNA, 25 bp, probe
gtgtttacttcagaacggcactaca

SEQ ID NO: 243945 - DNA, 25 bp, probe
gtgttttgattctaaaatggatctg

SEQ ID NO: 243946 - DNA, 25 bp, probe
gtgtagccgttatgaaaaacagtac

SEQ ID NO: 243947 - DNA, 25 bp, probe
gtgttgccgtgctcagacagaaacg

SEQ ID NO: 243948 - DNA, 25 bp, probe
gtgttgccgtgctcagacagaaacg

SEQ ID NO: 243949 - DNA, 25 bp, probe
gtgttggaagcagtcaccaagataa

SEQ ID NO: 243950 - DNA, 25 bp, probe
gtgattgaaggcattccaggaaaca

SEQ ID NO: 243951 - DNA, 25 bp, probe
gtgattgaaggcattccaggaaaca

SEQ ID NO: 243952 - DNA, 25 bp, probe
tgtttgaaccacattctggggaaga

SEQ ID NO: 243953 - DNA, 25 bp, probe
gtgttatcccacatattttgaaaat

SEQ ID NO: 243954 - DNA, 25 bp, probe
gtgattcccgaagaaattgacccat

SEQ ID NO: 243955 - DNA, 25 bp, probe
gtgttctccgtggtggaattgaccg

SEQ ID NO: 243956 - DNA, 25 bp, probe
gtgtacctgcttagttaattggctc

SEQ ID NO: 243957 - DNA, 25 bp, probe
gtgatatcttgtactattttcatcg

SEQ ID NO: 243958 - DNA, 25 bp, probe
gtgatatccgttgatgtgttgtcta

SEQ ID NO: 243959 - DNA, 25 bp, probe
gtgataagagttaacatttggctat

SEQ ID NO: 243960 - DNA, 25 bp, probe
gtgttatgactccagaatttcccaa

SEQ ID NO: 243961 - DNA, 25 bp, probe
gtgattcattcccaaatcttctaga

SEQ ID NO: 243962 - DNA, 25 bp, probe
gtgtcatgagctaccttactttaac

SEQ ID NO: 243963 - DNA, 25 bp, probe
gtgtcaaccagttatatacctaatc

SEQ ID NO: 243964 - DNA, 25 bp, probe
gtgatcaccaagtttcataatattt

SEQ ID NO: 243965 - DNA, 25 bp, probe
gtgattccttgtgtgctaacatata

SEQ ID NO: 243966 - DNA, 25 bp, probe
gtgaggcccatggttgagaaatgaa

SEQ ID NO: 243967 - DNA, 25 bp, probe
gtgaggtcctgccatagagcaaatg

SEQ ID NO: 243968 - DNA, 25 bp, probe
gtgatgatgcccgaagatgaaatag

SEQ ID NO: 243969 - DNA, 25 bp, probe
gtgatgctgaccgttggcactaagc

SEQ ID NO: 243970 - DNA, 25 bp, probe
gtgaggacatctgggtctcatttgc

SEQ ID NO: 243971 - DNA, 25 bp, probe
gtgaggagctgttgggtgtcttgcc

SEQ ID NO: 243972 - DNA, 25 bp, probe
gtgaggagctgttgggtgtcttgcc

SEQ ID NO: 243973 - DNA, 25 bp, probe
gtgaggagctgggaggagacatccc

SEQ ID NO: 243974 - DNA, 25 bp, probe
gtgagtggggagcagaaccgcacca

SEQ ID NO: 243975 - DNA, 25 bp, probe
gtgagggtggagacagacagcacca

SEQ ID NO: 243976 - DNA, 25 bp, probe
gtgagggggatgtcaccatggccaa

SEQ ID NO: 243977 - DNA, 25 bp, probe
gtgtgagggttggcactaggcccac

SEQ ID NO: 243978 - DNA, 25 bp, probe
gtgtgagggttggcactaggcccac

SEQ ID NO: 243979 - DNA, 25 bp, probe
gtgtaggtgaatgcaaactccatcg

SEQ ID NO: 243980 - DNA, 25 bp, probe
gtgtaggtgaatgcaaactccatcg

SEQ ID NO: 243981 - DNA, 25 bp, probe
gtgtaggtgaatgcaaactccatcg

SEQ ID NO: 243982 - DNA, 25 bp, probe
gtgttggtgatttgtagcccttctg

SEQ ID NO: 243983 - DNA, 25 bp, probe
gtgttggagaattctgattcctttt

SEQ ID NO: 243984 - DNA, 25 bp, probe
gtgttgtgagtccacatgagctccc

SEQ ID NO: 243985 - DNA, 25 bp, probe
gtgttgaatgcggcgcagtgctcca

SEQ ID NO: 243986 - DNA, 25 bp, probe
gtgtatagatgcagccgttgcaggc

SEQ ID NO: 243987 - DNA, 25 bp, probe
gtgtctcagcttagccgggagctgc

SEQ ID NO: 243988 - DNA, 25 bp, probe
gtgtacgatgtcatgctggggtgct

SEQ ID NO: 243989 - DNA, 25 bp, probe
gtgatgactgtgacggggctaggct

SEQ ID NO: 243990 - DNA, 25 bp, probe
gtgatgactgtgacggggctaggct

SEQ ID NO: 243991 - DNA, 25 bp, probe
gtgatgaggtcagtgggcttaggcc

SEQ ID NO: 243992 - DNA, 25 bp, probe
gtgtgaagacagcggatttcggcct

SEQ ID NO: 243993 - DNA, 25 bp, probe
gtgtgaaggtgggcgattttggatt

SEQ ID NO: 243994 - DNA, 25 bp, probe
gtgtcagagggtgccagggtggagg

SEQ ID NO: 243995 - DNA, 25 bp, probe
gtgttgacatccaccgggtgtgtgg

SEQ ID NO: 243996 - DNA, 25 bp, probe
gtgttgagcaacatggggctagtgg

SEQ ID NO: 243997 - DNA, 25 bp, probe
gtgatggacaatatttggctgcagg

SEQ ID NO: 243998 - DNA, 25 bp, probe
gtgatggacaatatttggctgcagg

SEQ ID NO: 243999 - DNA, 25 bp, probe
ggtgtccattgccatatcggctcgc

SEQ ID NO: 244000 - DNA, 25 bp, probe
gtgttgccaatgcagagctggttcg

SEQ ID NO: 244001 - DNA, 25 bp, probe
gtgtctacagtccagatgttcttcg

SEQ ID NO: 244002 - DNA, 25 bp, probe
gtgttgaacccagtttcattctgca

SEQ ID NO: 244003 - DNA, 25 bp, probe
gtgtgctcaacctacttacagtcac

SEQ ID NO: 244004 - DNA, 25 bp, probe
gtgtcatcaacctcctagaacatca

SEQ ID NO: 244005 - DNA, 25 bp, probe
gtgtcatcaacctcctagaacatca

SEQ ID NO: 244006 - DNA, 25 bp, probe
ggtccaccacccagagtaatagaac

SEQ ID NO: 244007 - DNA, 25 bp, probe
gtgtacaaacccagattgaagctaa

SEQ ID NO: 244008 - DNA, 25 bp, probe
gtgtaaataccaaagttccagctag

SEQ ID NO: 244009 - DNA, 25 bp, probe
gtgtaaataccaaagttccagctag

SEQ ID NO: 244010 - DNA, 25 bp, probe
gtgttgaacagctaccagttccaca

SEQ ID NO: 244011 - DNA, 25 bp, probe
gtgttgaacagctaccagttccaca

SEQ ID NO: 244012 - DNA, 25 bp, probe
gtgattctatcatgtacagtttcca

SEQ ID NO: 244013 - DNA, 25 bp, probe
gtgattctatcatgtacagtttcca

SEQ ID NO: 244014 - DNA, 25 bp, probe
gtgtactgtatagacagtttgtaaa

SEQ ID NO: 244015 - DNA, 25 bp, probe
gtgtactgattaaactgtcgtgtgt

SEQ ID NO: 244016 - DNA, 25 bp, probe
gtgtactggtatagcattgtggttt

SEQ ID NO: 244017 - DNA, 25 bp, probe
gtgtagctgggtacatattaagtgg

SEQ ID NO: 244018 - DNA, 25 bp, probe
gtgtcctgggatcgactgaagcggg

SEQ ID NO: 244019 - DNA, 25 bp, probe
gtgttctgggacaagctgaagcagt

SEQ ID NO: 244020 - DNA, 25 bp, probe
gtgtttgcggacatcagcaaagacc

SEQ ID NO: 244021 - DNA, 25 bp, probe
gtgattcttcgaaatctcaaagatc

SEQ ID NO: 244022 - DNA, 25 bp, probe
gtgatctacttgaagtcctgaagct

SEQ ID NO: 244023 - DNA, 25 bp, probe
gtgatcctctgggagatcttcacct

SEQ ID NO: 244024 - DNA, 25 bp, probe
gtgatgtcaatagtggactctcact

SEQ ID NO: 244025 - DNA, 25 bp, probe
gtgatgtattttagactcacatttt

SEQ ID NO: 244026 - DNA, 25 bp, probe
gtgatgtactgttctgagatctttt

SEQ ID NO: 244027 - DNA, 25 bp, probe
gtgatctgtcttgtaatattttgta

SEQ ID NO: 244028 - DNA, 25 bp, probe
gtgatcttttgcatcatgagtattt

SEQ ID NO: 244029 - DNA, 25 bp, probe
ggttatttttctcttgtaccataga

SEQ ID NO: 244030 - DNA, 25 bp, probe
gtgtttttgttgagtctgccattcg

SEQ ID NO: 244031 - DNA, 25 bp, probe
gtgttttcttagtgtctggatgttc

SEQ ID NO: 244032 - DNA, 25 bp, probe
gtgttatctccatgacttgggcatc

SEQ ID NO: 244033 - DNA, 25 bp, probe
gtgtcttccaaaccaggggatgccg

SEQ ID NO: 244034 - DNA, 25 bp, probe
gtgttctaaaacggcagcgagagct

SEQ ID NO: 244035 - DNA, 25 bp, probe
gtgttttaataagacgagaggacga

SEQ ID NO: 244036 - DNA, 25 bp, probe
ggttttaatccatactgggggcaga

SEQ ID NO: 244037 - DNA, 25 bp, probe
ggtgtttacaccaacgtggtcgagt

SEQ ID NO: 244038 - DNA, 25 bp, probe
ggtgtttacaccaacgtggtcgagt

SEQ ID NO: 244039 - DNA, 25 bp, probe
ggctctaggaaggttctgggttggg

SEQ ID NO: 244040 - DNA, 25 bp, probe
gtgtcccaagaggtgttgaggtagg

SEQ ID NO: 244041 - DNA, 25 bp, probe
gtgggcactaagggactgaggttgg

SEQ ID NO: 244042 - DNA, 25 bp, probe
gtgaggcacgaaacagggagggatt

SEQ ID NO: 244043 - DNA, 25 bp, probe
gtgaggaagcagcctgcagggggac

SEQ ID NO: 244044 - DNA, 25 bp, probe
gtgaggaacgcacagcggaaacata

SEQ ID NO: 244045 - DNA, 25 bp, probe
gtggggtcagcagaggtaccacgaa

SEQ ID NO: 244046 - DNA, 25 bp, probe
gtggggtcagcagaggtaccacgaa

SEQ ID NO: 244047 - DNA, 25 bp, probe
gtgtctggcccagaagtacttctgg

SEQ ID NO: 244048 - DNA, 25 bp, probe
gtgtctagcccatgggagaactctg

SEQ ID NO: 244049 - DNA, 25 bp, probe
gtgttaccgtaactagaaccttgct

SEQ ID NO: 244050 - DNA, 25 bp, probe
gtgttaccgtaactagaaccttgct

SEQ ID NO: 244051 - DNA, 25 bp, probe
gtgttacctaagtcattaactttgt

SEQ ID NO: 244052 - DNA, 25 bp, probe
gtgttatcctaaccaaactctacag

SEQ ID NO: 244053 - DNA, 25 bp, probe
gtgttggccatgaaccaaactcaga

SEQ ID NO: 244054 - DNA, 25 bp, probe
gtgttggccatgaaccaaactcaga

SEQ ID NO: 244055 - DNA, 25 bp, probe
gtgttgtcaacaaaccaagcatcag

SEQ ID NO: 244056 - DNA, 25 bp, probe
gtgttgccacaaacactgcagagac

SEQ ID NO: 244057 - DNA, 25 bp, probe
gtgatgtgccccacaagacacatca

SEQ ID NO: 244058 - DNA, 25 bp, probe
gtgatgaggaccacatcgctcacat

SEQ ID NO: 244059 - DNA, 25 bp, probe
gtgaggatgacacttctcagtgcct

SEQ ID NO: 244060 - DNA, 25 bp, probe
gtgatggcaaagatcttgtgcctca

SEQ ID NO: 244061 - DNA, 25 bp, probe
gtgatgctctatacgcttttggtcg

SEQ ID NO: 244062 - DNA, 25 bp, probe
gtgtctcctgtatttgttggagccc

SEQ ID NO: 244063 - DNA, 25 bp, probe
gtgatctacgcctttgttggagaga

SEQ ID NO: 244064 - DNA, 25 bp, probe
gtgatctacatgctttgtgagacga

SEQ ID NO: 244065 - DNA, 25 bp, probe
gtgatgtaatgcaaattgaggattt

SEQ ID NO: 244066 - DNA, 25 bp, probe
gtgatgtacatatcagtggtgacat

SEQ ID NO: 244067 - DNA, 25 bp, probe
gtgatgtacatatcagtggtgacat

SEQ ID NO: 244068 - DNA, 25 bp, probe
gtgtctactaactgggaaagcaagg

SEQ ID NO: 244069 - DNA, 25 bp, probe
gtgtctactaactgggaaagcaagg

SEQ ID NO: 244070 - DNA, 25 bp, probe
gtgttaggaacaaggtgcaccataa

SEQ ID NO: 244071 - DNA, 25 bp, probe
gtgtccctatgaagggatgaccaac

SEQ ID NO: 244072 - DNA, 25 bp, probe
gtgtcactctaaagggaactgtgac

SEQ ID NO: 244073 - DNA, 25 bp, probe
gtgtcccaaagcagtgcacaattcc

SEQ ID NO: 244074 - DNA, 25 bp, probe
gtgtcacaaaaggaggtcagtcctc

SEQ ID NO: 244075 - DNA, 25 bp, probe
gtgtcaacagacgggagtccagcca

SEQ ID NO: 244076 - DNA, 25 bp, probe
gtgtcaacagacgggagtccagcca

SEQ ID NO: 244077 - DNA, 25 bp, probe
gtgtaaagactgagcagaactgaaa

SEQ ID NO: 244078 - DNA, 25 bp, probe
gtgtcaaagaagtgcagaacgtact

SEQ ID NO: 244079 - DNA, 25 bp, probe
gtgtccgcaacctgcagaagcaagt

SEQ ID NO: 244080 - DNA, 25 bp, probe
gtgtccctaccagacacaaagatga

SEQ ID NO: 244081 - DNA, 25 bp, probe
gtgttcctaatctaaactaagaggt

SEQ ID NO: 244082 - DNA, 25 bp, probe
gtgttcctgcaacagcagaccaagc

SEQ ID NO: 244083 - DNA, 25 bp, probe
gtgtctcgctgcaaggctgcagacg

SEQ ID NO: 244084 - DNA, 25 bp, probe
gtgatgtcgctgtcaggatcatgcc

SEQ ID NO: 244085 - DNA, 25 bp, probe
gtgatgtcgctgtcaggatcatgcc

SEQ ID NO: 244086 - DNA, 25 bp, probe
gtgatcatcatggaatatgccagca

SEQ ID NO: 244087 - DNA, 25 bp, probe
gtgtcatcaatgtacatgccaacat

SEQ ID NO: 244088 - DNA, 25 bp, probe
gtgtcagaatgattactacctcagg

SEQ ID NO: 244089 - DNA, 25 bp, probe
gtgtcagaatgattactacctcagg

SEQ ID NO: 244090 - DNA, 25 bp, probe
gtgtcagtcagaggactgcaccatc

SEQ ID NO: 244091 - DNA, 25 bp, probe
gtgatcattcagggttcatctcact

SEQ ID NO: 244092 - DNA, 25 bp, probe
gtgatgatatcactggttcccaact

SEQ ID NO: 244093 - DNA, 25 bp, probe
gtgtgactagtgcttaccatactgg

SEQ ID NO: 244094 - DNA, 25 bp, probe
gtgtaccgcgggacaaatcctgagt

SEQ ID NO: 244095 - DNA, 25 bp, probe
gtgtaccgcgggacaaatcctgagt

SEQ ID NO: 244096 - DNA, 25 bp, probe
gtgtgacctggggagaaagttgagt

SEQ ID NO: 244097 - DNA, 25 bp, probe
gtgtacctaggtgagaagtttccag

SEQ ID NO: 244098 - DNA, 25 bp, probe
tgcttccctaacaggaaggtgtcca

SEQ ID NO: 244099 - DNA, 25 bp, probe
gtgtccctgactcagggtggtccca

SEQ ID NO: 244100 - DNA, 25 bp, probe
gtgtccctgactcagggtggtccca

SEQ ID NO: 244101 - DNA, 25 bp, probe
gtgattccaatccagggcgggatcc

SEQ ID NO: 244102 - DNA, 25 bp, probe
gtgatcagcaaacggggagggaagc

SEQ ID NO: 244103 - DNA, 25 bp, probe
gtgtcagattaccagttataggaac

SEQ ID NO: 244104 - DNA, 25 bp, probe
gtgtacatttcttgttaaccacgtt

SEQ ID NO: 244105 - DNA, 25 bp, probe
gtgtaattttggtttatgactctta

SEQ ID NO: 244106 - DNA, 25 bp, probe
gtgttgcattttcttgggaatgtgt

SEQ ID NO: 244107 - DNA, 25 bp, probe
gtgttttttgtcctggtatatcgtc

SEQ ID NO: 244108 - DNA, 25 bp, probe
gtgttttcttgtctggagtctgcac

SEQ ID NO: 244109 - DNA, 25 bp, probe
gtgttccacttcctgtggaggtggc

SEQ ID NO: 244110 - DNA, 25 bp, probe
gtgttctcctacatcatggtgtggc

SEQ ID NO: 244111 - DNA, 25 bp, probe
gtgttctctcagcttaggtctggac

SEQ ID NO: 244112 - DNA, 25 bp, probe
gtgttcaacagcctggaagactggc

SEQ ID NO: 244113 - DNA, 25 bp, probe
gtgtccccacaggatgaaacagctg

SEQ ID NO: 244114 - DNA, 25 bp, probe
gtgtccctgcctgaggatagcagct

SEQ ID NO: 244115 - DNA, 25 bp, probe
gtgtccctgcctgaggatagcagct

SEQ ID NO: 244116 - DNA, 25 bp, probe
gtgtcccatgtcgtgggctatatct

SEQ ID NO: 244117 - DNA, 25 bp, probe
gtgttaatctttgtgctatatggta

SEQ ID NO: 244118 - DNA, 25 bp, probe
gtgttacctttcaagtttatctcaa

SEQ ID NO: 244119 - DNA, 25 bp, probe
gtgtgtaccttattagttctctgct

SEQ ID NO: 244120 - DNA, 25 bp, probe
gtggtcctttggagttctgctgtat

SEQ ID NO: 244121 - DNA, 25 bp, probe
gtgtgaccttaggaagtctctgccc

SEQ ID NO: 244122 - DNA, 25 bp, probe
gtgatgactctttggagagggtcaa

SEQ ID NO: 244123 - DNA, 25 bp, probe
gtgtatcttttgcaagtgtctcaac

SEQ ID NO: 244124 - DNA, 25 bp, probe
gtgtaatgtttgttacctccaacag

SEQ ID NO: 244125 - DNA, 25 bp, probe
gtgtgaagggacttacctcccaaag

SEQ ID NO: 244126 - DNA, 25 bp, probe
gtgtgaagggacttacctcccaaag

SEQ ID NO: 244127 - DNA, 25 bp, probe
gtgttaaaggattaccccatataca

SEQ ID NO: 244128 - DNA, 25 bp, probe
gtgttaaaggattaccccatataca

SEQ ID NO: 244129 - DNA, 25 bp, probe
ggagttacaggagaccccgagacac

SEQ ID NO: 244130 - DNA, 25 bp, probe
ggagttacaggagaccccgagacac

SEQ ID NO: 244131 - DNA, 25 bp, probe
tcagagttttaaaccccaggaacag

SEQ ID NO: 244132 - DNA, 25 bp, probe
tccttttaaacctcaagtaacatct

SEQ ID NO: 244133 - DNA, 25 bp, probe
ggtttataaacctcagatggaagac

SEQ ID NO: 244134 - DNA, 25 bp, probe
gtgttttggataacttggtggaaca

SEQ ID NO: 244135 - DNA, 25 bp, probe
gtgttgtgtgcttgaacttttggga

SEQ ID NO: 244136 - DNA, 25 bp, probe
gtgtcattgatgaacagactgatgt

SEQ ID NO: 244137 - DNA, 25 bp, probe
gtgtataagctgatgctcagctgct

SEQ ID NO: 244138 - DNA, 25 bp, probe
gtgtcataagtggactatggtcgtc

SEQ ID NO: 244139 - DNA, 25 bp, probe
gtgtcacatcatggggctacgtccc

SEQ ID NO: 244140 - DNA, 25 bp, probe
gtgtcctgctgcaatgtgttctgtc

SEQ ID NO: 244141 - DNA, 25 bp, probe
gtgtcctgctgcaatgtgttctgtc

SEQ ID NO: 244142 - DNA, 25 bp, probe
gtgtccatcataatgtttcgcctta

SEQ ID NO: 244143 - DNA, 25 bp, probe
gtgtccatcataatgtttcgcctta

SEQ ID NO: 244144 - DNA, 25 bp, probe
gtgtacatacaagtgttctcacctc

SEQ ID NO: 244145 - DNA, 25 bp, probe
gtgtacatacaagtgttctcacctc

SEQ ID NO: 244146 - DNA, 25 bp, probe
gtgtcaacatttagtatgctacctc

SEQ ID NO: 244147 - DNA, 25 bp, probe
gtgttagctctgtcttagcaacctg

SEQ ID NO: 244148 - DNA, 25 bp, probe
gtgtgtgcagacaatcttagcatga

SEQ ID NO: 244149 - DNA, 25 bp, probe
gtgatgttgacatcactggcatggt

SEQ ID NO: 244150 - DNA, 25 bp, probe
gtgatcttgagctcagaggaggaga

SEQ ID NO: 244151 - DNA, 25 bp, probe
gtgatgctggattccgaggggcaca

SEQ ID NO: 244152 - DNA, 25 bp, probe
gtgtgcctgattactgagtggccac

SEQ ID NO: 244153 - DNA, 25 bp, probe
gtgatccattgtagcgaaggcactg

SEQ ID NO: 244154 - DNA, 25 bp, probe
gtgatgcctctgagggatgtcacag

SEQ ID NO: 244155 - DNA, 25 bp, probe
gtgatcgccatcagggagcacctgg

SEQ ID NO: 244156 - DNA, 25 bp, probe
gtgatcgccatcagggagcacctgg

SEQ ID NO: 244157 - DNA, 25 bp, probe
gtgatcgccatcagggagcacctgg

SEQ ID NO: 244158 - DNA, 25 bp, probe
gtgttgcactgcatagtgaacctgc

SEQ ID NO: 244159 - DNA, 25 bp, probe
gtgttccagtttcagcacatcatgg

SEQ ID NO: 244160 - DNA, 25 bp, probe
gtgattgccaagagcggcatctcct

SEQ ID NO: 244161 - DNA, 25 bp, probe
gtgttgtctgagacctgggtcgctt

SEQ ID NO: 244162 - DNA, 25 bp, probe
gtgtctgtccagactcagtggatct

SEQ ID NO: 244163 - DNA, 25 bp, probe
gtgttgaccatttatgctgcatagc

SEQ ID NO: 244164 - DNA, 25 bp, probe
gtgttgatcatgctgttgctcatgg

SEQ ID NO: 244165 - DNA, 25 bp, probe
gtgtttgttgagaatccatggctta

SEQ ID NO: 244166 - DNA, 25 bp, probe
gtgtcagcagtgggatacctgcgct

SEQ ID NO: 244167 - DNA, 25 bp, probe
gtgtcagcagtgggatacctgcgct

SEQ ID NO: 244168 - DNA, 25 bp, probe
gtgtactgagggtactggcctagcc

SEQ ID NO: 244169 - DNA, 25 bp, probe
gtgtatgaacggcacagaggcggcg

SEQ ID NO: 244170 - DNA, 25 bp, probe
gtgattaccagggactgaggggagg

SEQ ID NO: 244171 - DNA, 25 bp, probe
gtgattaaagcggtagaggaaggct

SEQ ID NO: 244172 - DNA, 25 bp, probe
gtgatcaaaagggctatgggaaggg

SEQ ID NO: 244173 - DNA, 25 bp, probe
gtgtaaaagcttgaggagaaattgt

SEQ ID NO: 244174 - DNA, 25 bp, probe
gtgtccgcaaatccaagggcaaatt

SEQ ID NO: 244175 - DNA, 25 bp, probe
gtgttgccccatccagagaatgaat

SEQ ID NO: 244176 - DNA, 25 bp, probe
gtgtgcccattaccagcaatcagga

SEQ ID NO: 244177 - DNA, 25 bp, probe
gtgatcacaccttggagcaacagca

SEQ ID NO: 244178 - DNA, 25 bp, probe
gtgtcacttcattgaaattcaccat

SEQ ID NO: 244179 - DNA, 25 bp, probe
gtgtcacttcattgaaattcaccat

SEQ ID NO: 244180 - DNA, 25 bp, probe
gtgtcacttcattgaaattcaccat

SEQ ID NO: 244181 - DNA, 25 bp, probe
gtgtagctgtgtcatgtatatacct

SEQ ID NO: 244182 - DNA, 25 bp, probe
gtgtaggtctcactgtaacaactat

SEQ ID NO: 244183 - DNA, 25 bp, probe
gtgtagagtcactggaaaccccact

SEQ ID NO: 244184 - DNA, 25 bp, probe
gtgtagcagggccaggaaaacccca

SEQ ID NO: 244185 - DNA, 25 bp, probe
gtgttcagctggccagcaaactttc

SEQ ID NO: 244186 - DNA, 25 bp, probe
gtgtcacctcaaatgcaatactttg

SEQ ID NO: 244187 - DNA, 25 bp, probe
gtgtcccatgcataacacactactg

SEQ ID NO: 244188 - DNA, 25 bp, probe
gtgttaagcacaaagcatcttcctt

SEQ ID NO: 244189 - DNA, 25 bp, probe
gtgtctataccaaagtctgccacta

SEQ ID NO: 244190 - DNA, 25 bp, probe
gtgtctacaccaaagtcgctgagta

SEQ ID NO: 244191 - DNA, 25 bp, probe
gtgttcatgcacaaaagggctcaaa

SEQ ID NO: 244192 - DNA, 25 bp, probe
gtgtctgcagaaaaacaagcccgac

SEQ ID NO: 244193 - DNA, 25 bp, probe
gtgtgccagcgaaaccaaaccatgc

SEQ ID NO: 244194 - DNA, 25 bp, probe
gtgtgccagcgaaaccaaaccatgc

SEQ ID NO: 244195 - DNA, 25 bp, probe
gtgttcgcagaaagccaaacttggc

SEQ ID NO: 244196 - DNA, 25 bp, probe
gtgttggaacacctcattttatggc

SEQ ID NO: 244197 - DNA, 25 bp, probe
gtgttagaagccatcgttctgtggc

SEQ ID NO: 244198 - DNA, 25 bp, probe
gtgttcttagaattcgcattttgcc

SEQ ID NO: 244199 - DNA, 25 bp, probe
gtgtttctaaaattgcttgcactgc

SEQ ID NO: 244200 - DNA, 25 bp, probe
gtgattccaagatcatccttcaccc

SEQ ID NO: 244201 - DNA, 25 bp, probe
gtgattccagataaccagctgtaac

SEQ ID NO: 244202 - DNA, 25 bp, probe
gtgttccaagtctctgtgtaaccag

SEQ ID NO: 244203 - DNA, 25 bp, probe
gtgattccaagtgcttatccaactc

SEQ ID NO: 244204 - DNA, 25 bp, probe
gtgattccaagtgcttatccaactc

SEQ ID NO: 244205 - DNA, 25 bp, probe
gtgtctgccatagtgacctaaaact

SEQ ID NO: 244206 - DNA, 25 bp, probe
gtgttcactaaactctgaataagca

SEQ ID NO: 244207 - DNA, 25 bp, probe
gtgattctctactacatcgtttcaa

SEQ ID NO: 244208 - DNA, 25 bp, probe
gtgatattccacaagattttgaaat

SEQ ID NO: 244209 - DNA, 25 bp, probe
gtgtgcaatcgctatgagtttctga

SEQ ID NO: 244210 - DNA, 25 bp, probe
gtgtgcaatcgctatgagtttctga

SEQ ID NO: 244211 - DNA, 25 bp, probe
gtgataatcctaactctactacgca

SEQ ID NO: 244212 - DNA, 25 bp, probe
gtgtattgccaaaactgattagcta

SEQ ID NO: 244213 - DNA, 25 bp, probe
gtgtcatgtcctatatctgatcaag

SEQ ID NO: 244214 - DNA, 25 bp, probe
gtgtgatgtcctttgagttgcttcc

SEQ ID NO: 244215 - DNA, 25 bp, probe
gtgtgatgtcctttgagttgcttcc

SEQ ID NO: 244216 - DNA, 25 bp, probe
gtgattgtgtacttagctttttcct

SEQ ID NO: 244217 - DNA, 25 bp, probe
gtgattttatttatttttactctct

SEQ ID NO: 244218 - DNA, 25 bp, probe
gtgtattgtatactttttttacata

SEQ ID NO: 244219 - DNA, 25 bp, probe
gtgattttaagttattgttgccaaa

SEQ ID NO: 244220 - DNA, 25 bp, probe
gtgttttgaatggtgttgtatgcct

SEQ ID NO: 244221 - DNA, 25 bp, probe
gtgtttgagttgaagtgttatacat

SEQ ID NO: 244222 - DNA, 25 bp, probe
gtgtaatatggacagtatctaactt

SEQ ID NO: 244223 - DNA, 25 bp, probe
gtgtaatatggacagtatctaactt

SEQ ID NO: 244224 - DNA, 25 bp, probe
gtgttttggcagcagcacatctaac

SEQ ID NO: 244225 - DNA, 25 bp, probe
gtgtgtcctgtgacaacactcatca

SEQ ID NO: 244226 - DNA, 25 bp, probe
gtgtgctcacttacattatgctcag

SEQ ID NO: 244227 - DNA, 25 bp, probe
gtgtgctcacttacattatgctcag

SEQ ID NO: 244228 - DNA, 25 bp, probe
gtgtgctccaaggtgtcacatcatg

SEQ ID NO: 244229 - DNA, 25 bp, probe
gtgatcacgagccattgtcattcaa

SEQ ID NO: 244230 - DNA, 25 bp, probe
gtgatcacgagccattgtcattcaa

SEQ ID NO: 244231 - DNA, 25 bp, probe
gtgatacaagattctgcacctcaaa

SEQ ID NO: 244232 - DNA, 25 bp, probe
gtgtaggtgatgtgccattccataa

SEQ ID NO: 244233 - DNA, 25 bp, probe
gtgtaggtgatgtgccattccataa

SEQ ID NO: 244234 - DNA, 25 bp, probe
gtgttggtttattgattctgtaaat

SEQ ID NO: 244235 - DNA, 25 bp, probe
gtgtttctttaatatttgaactcaa

SEQ ID NO: 244236 - DNA, 25 bp, probe
tgttttccttacccagtataaatat

SEQ ID NO: 244237 - DNA, 25 bp, probe
taatttctttacatactcaaaacca

SEQ ID NO: 244238 - DNA, 25 bp, probe
taatttctttacatactcaaaacca

SEQ ID NO: 244239 - DNA, 25 bp, probe
gtgattttattagctatctacaaag

SEQ ID NO: 244240 - DNA, 25 bp, probe
gtgtctgttatttcctaatcaaaaa

SEQ ID NO: 244241 - DNA, 25 bp, probe
gtgtcgttcttgacggtcacgaagc

SEQ ID NO: 244242 - DNA, 25 bp, probe
gtgttgttcttgaccgtcacgaagc

SEQ ID NO: 244243 - DNA, 25 bp, probe
gtgtttgtcattaacgttcaccaca

SEQ ID NO: 244244 - DNA, 25 bp, probe
gtgatttccattaaggccaactgca

SEQ ID NO: 244245 - DNA, 25 bp, probe
gtgatttgtattaagacagcactta

SEQ ID NO: 244246 - DNA, 25 bp, probe
gtgtctgtgtatattacaagcctac

SEQ ID NO: 244247 - DNA, 25 bp, probe
gtgttcggtactgagcagccactac

SEQ ID NO: 244248 - DNA, 25 bp, probe
gtgttcggtactgagcagccactac

SEQ ID NO: 244249 - DNA, 25 bp, probe
gtgttcctgtacataagcaaatgag

SEQ ID NO: 244250 - DNA, 25 bp, probe
gtgttcctgtacataagcaaatgag

SEQ ID NO: 244251 - DNA, 25 bp, probe
gtgttcctttctcacagtgacagga

SEQ ID NO: 244252 - DNA, 25 bp, probe
gtgttcctttctcacagtgacagga

SEQ ID NO: 244253 - DNA, 25 bp, probe
gtgggctctttacaagggcaagaca

SEQ ID NO: 244254 - DNA, 25 bp, probe
gtgtgaggttaactgaaagagcaaa

SEQ ID NO: 244255 - DNA, 25 bp, probe
gggctggtgggacttaggccaaaag

SEQ ID NO: 244256 - DNA, 25 bp, probe
gtgggagtgtggacttaggaaaaca

SEQ ID NO: 244257 - DNA, 25 bp, probe
gtggagaatggaggtttgaaagcaa

SEQ ID NO: 244258 - DNA, 25 bp, probe
gtgtataataatcttcgtccacaag

SEQ ID NO: 244259 - DNA, 25 bp, probe
gtgtaataaataatctctgtaccaa

SEQ ID NO: 244260 - DNA, 25 bp, probe
gtgttaccagtaatccattcactct

SEQ ID NO: 244261 - DNA, 25 bp, probe
gtgtaatccagtaaaatctcccttt

SEQ ID NO: 244262 - DNA, 25 bp, probe
gtgtagataagtaagaagtagtgtt

SEQ ID NO: 244263 - DNA, 25 bp, probe
gtgtatataaggtagtattcagtga

SEQ ID NO: 244264 - DNA, 25 bp, probe
gtgattaaactccattgttcagggt

SEQ ID NO: 244265 - DNA, 25 bp, probe
gtgttcttatcttctatgttacggt

SEQ ID NO: 244266 - DNA, 25 bp, probe
gtgttgtattctttttcattgggtg

SEQ ID NO: 244267 - DNA, 25 bp, probe
gtgttgatgacagtgtttacaggcg

SEQ ID NO: 244268 - DNA, 25 bp, probe
gtgttgatgacagtgtttacaggcg

SEQ ID NO: 244269 - DNA, 25 bp, probe
gtgttatacatttcttactgccgat

SEQ ID NO: 244270 - DNA, 25 bp, probe
gtgttacatcatctcattaaggcca

SEQ ID NO: 244271 - DNA, 25 bp, probe
gtgttatgcagaaaatatgaatggc

SEQ ID NO: 244272 - DNA, 25 bp, probe
gtgttcacattactatagatatgtc

SEQ ID NO: 244273 - DNA, 25 bp, probe
gtgtataattgggtgcagtggctca

SEQ ID NO: 244274 - DNA, 25 bp, probe
gtgtatgaaggaacagcagtggaca

SEQ ID NO: 244275 - DNA, 25 bp, probe
gtgtctatgagtgtctggatggcaa

SEQ ID NO: 244276 - DNA, 25 bp, probe
gtgtccagctctgttggaagcaaca

SEQ ID NO: 244277 - DNA, 25 bp, probe
gtgtccaccagtacattgacgcaga

SEQ ID NO: 244278 - DNA, 25 bp, probe
gtgtcttcaattccactgagcacaa

SEQ ID NO: 244279 - DNA, 25 bp, probe
gtgtcttcaatgtcaacagatccga

SEQ ID NO: 244280 - DNA, 25 bp, probe
gtgtttcaatcagatcagattgttg

SEQ ID NO: 244281 - DNA, 25 bp, probe
gtgtcttcagaaggtaagtgatatg

SEQ ID NO: 244282 - DNA, 25 bp, probe
gtgttgcagcaacctgtgacaggat

SEQ ID NO: 244283 - DNA, 25 bp, probe
gtgttgagcaggacaggcaaagaaa

SEQ ID NO: 244284 - DNA, 25 bp, probe
gtgtgcttcgtgacggtcaagaaca

SEQ ID NO: 244285 - DNA, 25 bp, probe
gtgtctgcaggtctgagtaacatca

SEQ ID NO: 244286 - DNA, 25 bp, probe
gtgtctgcaggtctgagtaacatca

SEQ ID NO: 244287 - DNA, 25 bp, probe
gtgtctaggtttggaccagagcctg

SEQ ID NO: 244288 - DNA, 25 bp, probe
gtgttattactatgagtcaggctct

SEQ ID NO: 244289 - DNA, 25 bp, probe
gtgttattactgacaaggcagacat

SEQ ID NO: 244290 - DNA, 25 bp, probe
ggtacatctacctaaaggactatta

SEQ ID NO: 244291 - DNA, 25 bp, probe
gtggaaccaaaataggcatccttac

SEQ ID NO: 244292 - DNA, 25 bp, probe
gtggcaacctcatgaacaggatctg

SEQ ID NO: 244293 - DNA, 25 bp, probe
gtgtgcacagtgtcacgaacagaca

SEQ ID NO: 244294 - DNA, 25 bp, probe
gtgtgcactgcatcaagcaaagcag

SEQ ID NO: 244295 - DNA, 25 bp, probe
gtggactgcgccagaagcaattgcc

SEQ ID NO: 244296 - DNA, 25 bp, probe
gtgtgaagaccaacatcgccttcct

SEQ ID NO: 244297 - DNA, 25 bp, probe
gtgttggacgccaataactgcgact

SEQ ID NO: 244298 - DNA, 25 bp, probe
gtgttgtatacagtagtgactccca

SEQ ID NO: 244299 - DNA, 25 bp, probe
gtgttggtacatatgatgatttcca

SEQ ID NO: 244300 - DNA, 25 bp, probe
gtgtccagctaagctgatgacttga

SEQ ID NO: 244301 - DNA, 25 bp, probe
gtgtccactattgattgtattatgc

SEQ ID NO: 244302 - DNA, 25 bp, probe
gtgtccactattgattgtattatgc

SEQ ID NO: 244303 - DNA, 25 bp, probe
gtgtctcagaatatttttgaggcga

SEQ ID NO: 244304 - DNA, 25 bp, probe
gtgttgaaatttgtcatggatggag

SEQ ID NO: 244305 - DNA, 25 bp, probe
gtgttgtagttttaaggttagcgtg

SEQ ID NO: 244306 - DNA, 25 bp, probe
gtgttgtggtaaaaagtgttagtat

SEQ ID NO: 244307 - DNA, 25 bp, probe
gtgttggagggaaggactggcggtt

SEQ ID NO: 244308 - DNA, 25 bp, probe
gtgttgtatgtgtggtgacttgcgg

SEQ ID NO: 244309 - DNA, 25 bp, probe
gtgtttcgcattcggcgttatctgg

SEQ ID NO: 244310 - DNA, 25 bp, probe
gtgtattctattttgcgtttcttac

SEQ ID NO: 244311 - DNA, 25 bp, probe
gtgttcgctttaatggtttccaggc

SEQ ID NO: 244312 - DNA, 25 bp, probe
gtgtgctcctcttttggatttacag

SEQ ID NO: 244313 - DNA, 25 bp, probe
gtgtgcggtctagtttaatcccatg

SEQ ID NO: 244314 - DNA, 25 bp, probe
gtggttgttcagtttgttcccatgt

SEQ ID NO: 244315 - DNA, 25 bp, probe
gtgtttgtacagtttaactcaatgg

SEQ ID NO: 244316 - DNA, 25 bp, probe
gtgttactcaaaaaaactactggat

SEQ ID NO: 244317 - DNA, 25 bp, probe
gtgttgaccaataaaatatctagtg

SEQ ID NO: 244318 - DNA, 25 bp, probe
gtgttatagaatgaacttgcataat

SEQ ID NO: 244319 - DNA, 25 bp, probe
gtgattagaacaacactgtttacat

SEQ ID NO: 244320 - DNA, 25 bp, probe
gtgttaaaatgtcgcttttcatctc

SEQ ID NO: 244321 - DNA, 25 bp, probe
gtgtaacaacagccgcttctggaac

SEQ ID NO: 244322 - DNA, 25 bp, probe
gtgtcaaatactggcctgatgagta

SEQ ID NO: 244323 - DNA, 25 bp, probe
gtgtgaagtactgcgtggtgtatga

SEQ ID NO: 244324 - DNA, 25 bp, probe
gtgtacaataccgtgtggtgaaaat

SEQ ID NO: 244325 - DNA, 25 bp, probe
gtgtacaataccgtgtggtgaaaat

SEQ ID NO: 244326 - DNA, 25 bp, probe
gtgttggaattctttggtgtaaata

SEQ ID NO: 244327 - DNA, 25 bp, probe
gtggtggtgtttctggattaaatcc

SEQ ID NO: 244328 - DNA, 25 bp, probe
gtgggggcatttctttatatcacct

SEQ ID NO: 244329 - DNA, 25 bp, probe
gtggtgggtggcacatgcttataac

SEQ ID NO: 244330 - DNA, 25 bp, probe
gtgtgtgggggtggaccgaatttgg

SEQ ID NO: 244331 - DNA, 25 bp, probe
ggttgtaggttttccagaagggatg

SEQ ID NO: 244332 - DNA, 25 bp, probe
ggttgtaggttttccagaagggatg

SEQ ID NO: 244333 - DNA, 25 bp, probe
gtgttctactgtttcctcaatagtg

SEQ ID NO: 244334 - DNA, 25 bp, probe
gtgttattggtacctctcatttggg

SEQ ID NO: 244335 - DNA, 25 bp, probe
gtgtttgggatactgcttattttat

SEQ ID NO: 244336 - DNA, 25 bp, probe
gtgtttgagagatttcctgttaggt

SEQ ID NO: 244337 - DNA, 25 bp, probe
gtgtctgctgagcaatgtcgtcttc

SEQ ID NO: 244338 - DNA, 25 bp, probe
gtgtgcggagacaagtcgagcggca

SEQ ID NO: 244339 - DNA, 25 bp, probe
gtgtcagggcagtaggctgggagtc

SEQ ID NO: 244340 - DNA, 25 bp, probe
gtgtcagggcagtaggctgggagtc

SEQ ID NO: 244341 - DNA, 25 bp, probe
ggtcatgggcgtggacgtaatgttc

SEQ ID NO: 244342 - DNA, 25 bp, probe
gggagggcttggagaatatttctac

SEQ ID NO: 244343 - DNA, 25 bp, probe
gtgtgaggtgttcgttgaaagggta

SEQ ID NO: 244344 - DNA, 25 bp, probe
ggagtgacttccgctcaaaagttaa

SEQ ID NO: 244345 - DNA, 25 bp, probe
ggagtgtttccctgttaaattgaat

SEQ ID NO: 244346 - DNA, 25 bp, probe
ggttgtttcccataatagaactgca

SEQ ID NO: 244347 - DNA, 25 bp, probe
gtgtatgatttcccacagttcagca

SEQ ID NO: 244348 - DNA, 25 bp, probe
gtgtagcagttcctgccagtgcaga

SEQ ID NO: 244349 - DNA, 25 bp, probe
gtgtactcttgccgagatgctgaga

SEQ ID NO: 244350 - DNA, 25 bp, probe
gtgtactcttgccgagatgctgaga

SEQ ID NO: 244351 - DNA, 25 bp, probe
gtgtcatcctgtgaggactgcaaag

SEQ ID NO: 244352 - DNA, 25 bp, probe
gtgtcaactgttagccacgcagatg

SEQ ID NO: 244353 - DNA, 25 bp, probe
gtgtaacgtttgattcagatacctt

SEQ ID NO: 244354 - DNA, 25 bp, probe
gtgtaaggtgtcttaatactgtcct

SEQ ID NO: 244355 - DNA, 25 bp, probe
gtgtcacggtgttatcaatcacttt

SEQ ID NO: 244356 - DNA, 25 bp, probe
gtgtactattggctgcagaatttgt

SEQ ID NO: 244357 - DNA, 25 bp, probe
gtgttctttgtcctgctgaatatgt

SEQ ID NO: 244358 - DNA, 25 bp, probe
gtgtttttcactgtgacattatcca

SEQ ID NO: 244359 - DNA, 25 bp, probe
gtgtttttgcaagggaatgaatcca

SEQ ID NO: 244360 - DNA, 25 bp, probe
gtgtttttgcaagggaatgaatcca

SEQ ID NO: 244361 - DNA, 25 bp, probe
gtgtctttatggaaggaagcctttt

SEQ ID NO: 244362 - DNA, 25 bp, probe
gtgtcctgttggaggagggcttgtt

SEQ ID NO: 244363 - DNA, 25 bp, probe
tgtctccagttgaaggaaggccttt

SEQ ID NO: 244364 - DNA, 25 bp, probe
gtgtccagtagtatgaaggccctgc

SEQ ID NO: 244365 - DNA, 25 bp, probe
gtgtcggtcagtcatggagttttca

SEQ ID NO: 244366 - DNA, 25 bp, probe
gtgtcattgtcactccatggattaa

SEQ ID NO: 244367 - DNA, 25 bp, probe
gtgttgtacgacgatgtatcaacag

SEQ ID NO: 244368 - DNA, 25 bp, probe
gtgttgctggcaccaatatcataat

SEQ ID NO: 244369 - DNA, 25 bp, probe
gtgttgctggcaccaatatcataat

SEQ ID NO: 244370 - DNA, 25 bp, probe
gtgttctgtcaccaactgaagtggc

SEQ ID NO: 244371 - DNA, 25 bp, probe
gtgtttgtcatttactcacattgag

SEQ ID NO: 244372 - DNA, 25 bp, probe
gtgtagttcattcacagcactggat

SEQ ID NO: 244373 - DNA, 25 bp, probe
gtgtagttcattcacagcactggat

SEQ ID NO: 244374 - DNA, 25 bp, probe
gtgtacttcttgtgcaagtcagact

SEQ ID NO: 244375 - DNA, 25 bp, probe
gtgttctgtgtcaaagaagtgcaga

SEQ ID NO: 244376 - DNA, 25 bp, probe
gtgttggtgtcagtagaggtagaga

SEQ ID NO: 244377 - DNA, 25 bp, probe
gtgttggtgtcagtagaggtagaga

SEQ ID NO: 244378 - DNA, 25 bp, probe
gtgttttgtacatgaagtaggaatc

SEQ ID NO: 244379 - DNA, 25 bp, probe
gtgttttgtacatgaagtaggaatc

SEQ ID NO: 244380 - DNA, 25 bp, probe
gtgtttcattacttgaatgtagtta

SEQ ID NO: 244381 - DNA, 25 bp, probe
gtgtcttgcctagcttgagggctta

SEQ ID NO: 244382 - DNA, 25 bp, probe
gtgtctcagagctgttaagggctta

SEQ ID NO: 244383 - DNA, 25 bp, probe
gtgtctcggcaacataaggagctgc

SEQ ID NO: 244384 - DNA, 25 bp, probe
gtgtcttggaatctagccgatggaa

SEQ ID NO: 244385 - DNA, 25 bp, probe
gtgtttgtgttcaaagcacggcgag

SEQ ID NO: 244386 - DNA, 25 bp, probe
gtgttttgtatgttagcatcgactc

SEQ ID NO: 244387 - DNA, 25 bp, probe
gtgttttatattaggacgactcagt

SEQ ID NO: 244388 - DNA, 25 bp, probe
gtgttttctttgagagcagtgcaca

SEQ ID NO: 244389 - DNA, 25 bp, probe
gtgtttcctctttgaagcaatgaca

SEQ ID NO: 244390 - DNA, 25 bp, probe
gtgtctctcctctcagggaagatcc

SEQ ID NO: 244391 - DNA, 25 bp, probe
gtgtttgctgccttactggaatacg

SEQ ID NO: 244392 - DNA, 25 bp, probe
gtgtaggctcaagaatgggcagcac

SEQ ID NO: 244393 - DNA, 25 bp, probe
gtgtgggcacccagtgggagcacac

SEQ ID NO: 244394 - DNA, 25 bp, probe
gtgtgggcacccagtgggagcacac

SEQ ID NO: 244395 - DNA, 25 bp, probe
gtgtgggaccccagggtatctagcg

SEQ ID NO: 244396 - DNA, 25 bp, probe
gtgggaacacctattggttctcctt

SEQ ID NO: 244397 - DNA, 25 bp, probe
gtgggaagagtcatgttttttttct

SEQ ID NO: 244398 - DNA, 25 bp, probe
gtggaaacgtttgccatattttctt

SEQ ID NO: 244399 - DNA, 25 bp, probe
gtggaagaccttcactgattgtttt

SEQ ID NO: 244400 - DNA, 25 bp, probe
gtgtgaagacccaaaacagctttgt

SEQ ID NO: 244401 - DNA, 25 bp, probe
gtgtgcaaaagcccaaaggttccta

SEQ ID NO: 244402 - DNA, 25 bp, probe
gtgtgcaaaagcccaaaggttccta

SEQ ID NO: 244403 - DNA, 25 bp, probe
gtgtgaaactcactccacaaaccct

SEQ ID NO: 244404 - DNA, 25 bp, probe
gtgtcataactccacagatcgaatc

SEQ ID NO: 244405 - DNA, 25 bp, probe
gtgtccacagctggacaggagagac

SEQ ID NO: 244406 - DNA, 25 bp, probe
gtgtcctcgcacgatacgaagtgct

SEQ ID NO: 244407 - DNA, 25 bp, probe
gtgtcctcgcacgatacgaagtgct

SEQ ID NO: 244408 - DNA, 25 bp, probe
gtgttcagccacataaaaatgctaa

SEQ ID NO: 244409 - DNA, 25 bp, probe
gtgttcagccacataaaaatgctaa

SEQ ID NO: 244410 - DNA, 25 bp, probe
gtgttcagagctgtaaaacatctga

SEQ ID NO: 244411 - DNA, 25 bp, probe
gtgttcgaggattagactgactgga

SEQ ID NO: 244412 - DNA, 25 bp, probe
gtgtttgcaggtgtgcaggacagaa

SEQ ID NO: 244413 - DNA, 25 bp, probe
gtgtagtcaggtgctcaatggagaa

SEQ ID NO: 244414 - DNA, 25 bp, probe
gtgtagccgtctgctggagtataca

SEQ ID NO: 244415 - DNA, 25 bp, probe
gtgttacttcattcagagtgttact

SEQ ID NO: 244416 - DNA, 25 bp, probe
gtgttagggctgtgagctgttcctc

SEQ ID NO: 244417 - DNA, 25 bp, probe
gtgtctagggcagagtatgttcttg

SEQ ID NO: 244418 - DNA, 25 bp, probe
gtgtcaggggacagcttgtgtcacc

SEQ ID NO: 244419 - DNA, 25 bp, probe
gtgtcttgggaacctgtgattaccc

SEQ ID NO: 244420 - DNA, 25 bp, probe
gtgtgttgggaagttctgttgaggc

SEQ ID NO: 244421 - DNA, 25 bp, probe
gtgtgttgggaagttctgttgaggc

SEQ ID NO: 244422 - DNA, 25 bp, probe
gtgtctgtgggaaattctcactggc

SEQ ID NO: 244423 - DNA, 25 bp, probe
gtgttttgtgaccattgtcctgggt

SEQ ID NO: 244424 - DNA, 25 bp, probe
gtgttttgatgctgctgattccttt

SEQ ID NO: 244425 - DNA, 25 bp, probe
gtgttttgatgctgctgattccttt

SEQ ID NO: 244426 - DNA, 25 bp, probe
gtgttttcatctttgttcacttgag

SEQ ID NO: 244427 - DNA, 25 bp, probe
gtgttttgaacttgatctttgtgac

SEQ ID NO: 244428 - DNA, 25 bp, probe
gtgtttaccactttctgttggaatc

SEQ ID NO: 244429 - DNA, 25 bp, probe
gggtttgccaatcttttaactctag

SEQ ID NO: 244430 - DNA, 25 bp, probe
gggatttccgagctgacggaagcct

SEQ ID NO: 244431 - DNA, 25 bp, probe
gtggtgtttgggctacagtacagtt

SEQ ID NO: 244432 - DNA, 25 bp, probe
tgtgggggtccatttgggtacgtct

SEQ ID NO: 244433 - DNA, 25 bp, probe
gtgggtgttacgtgcaggaacgtgg

SEQ ID NO: 244434 - DNA, 25 bp, probe
gggagcttcccgggataaactgagc

SEQ ID NO: 244435 - DNA, 25 bp, probe
gggagtgtcccaacatgtaaacgaa

SEQ ID NO: 244436 - DNA, 25 bp, probe
ggagaggaactcacttacgactata

SEQ ID NO: 244437 - DNA, 25 bp, probe
gggagtaaacaccttcaaatttcag

SEQ ID NO: 244438 - DNA, 25 bp, probe
ggttgtaaacccatattatttgcgt

SEQ ID NO: 244439 - DNA, 25 bp, probe
gtgtatggaaacacttctttcttcc

SEQ ID NO: 244440 - DNA, 25 bp, probe
ggtacccaaaacacattttccatat

SEQ ID NO: 244441 - DNA, 25 bp, probe
gtgtactccaattcttttttgtcct

SEQ ID NO: 244442 - DNA, 25 bp, probe
gtgtactgggtagtttatctttcca

SEQ ID NO: 244443 - DNA, 25 bp, probe
gtgtactgggtagtttatctttcca

SEQ ID NO: 244444 - DNA, 25 bp, probe
gtgtgactttgtagtctctttgtat

SEQ ID NO: 244445 - DNA, 25 bp, probe
gtgtagaatctctgtctagtttatt

SEQ ID NO: 244446 - DNA, 25 bp, probe
gtgtcagaagtctagcctcaggttt

SEQ ID NO: 244447 - DNA, 25 bp, probe
gtgtctcaagtactcactagatgtt

SEQ ID NO: 244448 - DNA, 25 bp, probe
gtgtccacagtactggccagaaaac

SEQ ID NO: 244449 - DNA, 25 bp, probe
gtgtccagcactcgattgttgtaaa

SEQ ID NO: 244450 - DNA, 25 bp, probe
gtgtcaagttggactctttgaactc

SEQ ID NO: 244451 - DNA, 25 bp, probe
gtgtccattcgggttattagcagct

SEQ ID NO: 244452 - DNA, 25 bp, probe
gtgtctgctttagagtacttgcacg

SEQ ID NO: 244453 - DNA, 25 bp, probe
gtgtttttctgctagtgacttgcac

SEQ ID NO: 244454 - DNA, 25 bp, probe
gtgttctaatcttaggcgcttcagg

SEQ ID NO: 244455 - DNA, 25 bp, probe
gtgtttaatatatctgggtgatgga

SEQ ID NO: 244456 - DNA, 25 bp, probe
gtgtctgattttttggctggtgaga

SEQ ID NO: 244457 - DNA, 25 bp, probe
gtgtctatgacgatgggctggagga

SEQ ID NO: 244458 - DNA, 25 bp, probe
gtgtctcaatgcctgggactggagg

SEQ ID NO: 244459 - DNA, 25 bp, probe
gtgtctagagctcaccagctagtga

SEQ ID NO: 244460 - DNA, 25 bp, probe
gtgtcaacagctcacaggagcgtga

SEQ ID NO: 244461 - DNA, 25 bp, probe
gtgtcaacagctcacaggagcgtga

SEQ ID NO: 244462 - DNA, 25 bp, probe
gtgtacgagctgatgcgtcagtgct

SEQ ID NO: 244463 - DNA, 25 bp, probe
gtgttcaggctcatggagcagtgct

SEQ ID NO: 244464 - DNA, 25 bp, probe
gtgtctgcattgtcactgttgactg

SEQ ID NO: 244465 - DNA, 25 bp, probe
gtgttttaacagcatgacttcttac

SEQ ID NO: 244466 - DNA, 25 bp, probe
gtgttttaacagcatgacttcttac

SEQ ID NO: 244467 - DNA, 25 bp, probe
gtgttattaacagaaattcatattt

SEQ ID NO: 244468 - DNA, 25 bp, probe
gtgtaacatcaaagcaaaatcctat

SEQ ID NO: 244469 - DNA, 25 bp, probe
gtgtaatcaacttcacattattcaa

SEQ ID NO: 244470 - DNA, 25 bp, probe
gtgtaatcaacttcacattattcaa

SEQ ID NO: 244471 - DNA, 25 bp, probe
gtgtatataagcctcacattttatg

SEQ ID NO: 244472 - DNA, 25 bp, probe
gtgtttacatggtactgtatgtatg

SEQ ID NO: 244473 - DNA, 25 bp, probe
gtgtttgacatgtgaagctatttga

SEQ ID NO: 244474 - DNA, 25 bp, probe
gtgtctggacagggacactggcttc

SEQ ID NO: 244475 - DNA, 25 bp, probe
gtgtcagcaaaattgaccgactgtc

SEQ ID NO: 244476 - DNA, 25 bp, probe
gtgtcagcaaaattgaccgactgtc

SEQ ID NO: 244477 - DNA, 25 bp, probe
gtgtatgaagaattgtcccctggct

SEQ ID NO: 244478 - DNA, 25 bp, probe
gtgtgcatcaagaagttacgcccct

SEQ ID NO: 244479 - DNA, 25 bp, probe
gtgtctcgagagaagatcaccctcc

SEQ ID NO: 244480 - DNA, 25 bp, probe
gtgtagcttcagaagttccctctct

SEQ ID NO: 244481 - DNA, 25 bp, probe
gtgtgagaatggaagagccccctcc

SEQ ID NO: 244482 - DNA, 25 bp, probe
gtgtatctaggtggacctcacttgt

SEQ ID NO: 244483 - DNA, 25 bp, probe
gtgtatctaggtggacctcacttgt

SEQ ID NO: 244484 - DNA, 25 bp, probe
gtgtatgcatcactggagacctact

SEQ ID NO: 244485 - DNA, 25 bp, probe
gtgtgcatgcatttaataccttttt

SEQ ID NO: 244486 - DNA, 25 bp, probe
gtgtatgcattgccctatgcactgt

SEQ ID NO: 244487 - DNA, 25 bp, probe
gtgtattgtgacatgaatgctgtca

SEQ ID NO: 244488 - DNA, 25 bp, probe
gtgtctctgtacatacacatgttcc

SEQ ID NO: 244489 - DNA, 25 bp, probe
gtggtcctgactcaacatgttactg

SEQ ID NO: 244490 - DNA, 25 bp, probe
gtgtatcctggtatcatatggctac

SEQ ID NO: 244491 - DNA, 25 bp, probe
gtgtactcgggaatccggcacaagg

SEQ ID NO: 244492 - DNA, 25 bp, probe
gtgtcctggggaatactggccatgc

SEQ ID NO: 244493 - DNA, 25 bp, probe
gtgtccatggggagcactggattgc

SEQ ID NO: 244494 - DNA, 25 bp, probe
gggccaggattggtgccaggaaggc

SEQ ID NO: 244495 - DNA, 25 bp, probe
gtgtctgcaggtagaatgcacagga

SEQ ID NO: 244496 - DNA, 25 bp, probe
gtgtcggaggagcagcagaagcagc

SEQ ID NO: 244497 - DNA, 25 bp, probe
gtgtgcatgggacaagaacatatgc

SEQ ID NO: 244498 - DNA, 25 bp, probe
gggcatgtaactccaaaatactagg

SEQ ID NO: 244499 - DNA, 25 bp, probe
gtgtatgtaacacaataaacaagct

SEQ ID NO: 244500 - DNA, 25 bp, probe
gtgtttgaacagcattgtaaaatgg

SEQ ID NO: 244501 - DNA, 25 bp, probe
gtgtcttagaccctgttatctactg

SEQ ID NO: 244502 - DNA, 25 bp, probe
gtgtcttagaccctgttatctactg

SEQ ID NO: 244503 - DNA, 25 bp, probe
gtgtttgcatagcttgtctttacat

SEQ ID NO: 244504 - DNA, 25 bp, probe
gtgtttcatcttcataattaatcat

SEQ ID NO: 244505 - DNA, 25 bp, probe
gtgtttcattacttcaaatacagca

SEQ ID NO: 244506 - DNA, 25 bp, probe
gtgtctgtaagttacaaagtcagga

SEQ ID NO: 244507 - DNA, 25 bp, probe
gtgtaaaagagttcaaagactgaga

SEQ ID NO: 244508 - DNA, 25 bp, probe
gtgtgaaatcaccttatcaaattaa

SEQ ID NO: 244509 - DNA, 25 bp, probe
gtgtgaaacccctagcatagagaca

SEQ ID NO: 244510 - DNA, 25 bp, probe
gtgtcaatacccgaaatgatgtact

SEQ ID NO: 244511 - DNA, 25 bp, probe
gtgtactgattgctataatggtgaa

SEQ ID NO: 244512 - DNA, 25 bp, probe
gtgtatctatatctgcataatgttt

SEQ ID NO: 244513 - DNA, 25 bp, probe
gtgtactggagcctgcattatgcac

SEQ ID NO: 244514 - DNA, 25 bp, probe
gtgtagctgggcacacatgcataca

SEQ ID NO: 244515 - DNA, 25 bp, probe
gtgtctgccgtgaagcacatgcatg

SEQ ID NO: 244516 - DNA, 25 bp, probe
gtgtcttctgcttatgaagcgcctt

SEQ ID NO: 244517 - DNA, 25 bp, probe
gtggatatctgtgtatatgcccgta

SEQ ID NO: 244518 - DNA, 25 bp, probe
gtgtatatatgtgcctcacacctga

SEQ ID NO: 244519 - DNA, 25 bp, probe
gtgtttagagctgtgcaccctagaa

SEQ ID NO: 244520 - DNA, 25 bp, probe
gtgtttagatcggaagtgcctacaa

SEQ ID NO: 244521 - DNA, 25 bp, probe
gtgtttacacatggagagatgcccc

SEQ ID NO: 244522 - DNA, 25 bp, probe
gtgtttcagcatttggagacatccc

SEQ ID NO: 244523 - DNA, 25 bp, probe
gtgtttgagcaggcatccagcaacc

SEQ ID NO: 244524 - DNA, 25 bp, probe
gtgtctatgagcttgcaccatattt

SEQ ID NO: 244525 - DNA, 25 bp, probe
gtgtcctgatgattcatggagtttg

SEQ ID NO: 244526 - DNA, 25 bp, probe
gtgtgacatgaacgtggactttgat

SEQ ID NO: 244527 - DNA, 25 bp, probe
gtgtaaaaggatgggtctggtttgc

SEQ ID NO: 244528 - DNA, 25 bp, probe
gtgtgctatgaagatgagggggttt

SEQ ID NO: 244529 - DNA, 25 bp, probe
gtgtgtcatacacagggcctagtac

SEQ ID NO: 244530 - DNA, 25 bp, probe
gtgtctgcaaatcatgtggaggaga

SEQ ID NO: 244531 - DNA, 25 bp, probe
gtgtccagaggcttgtgggcaatgt

SEQ ID NO: 244532 - DNA, 25 bp, probe
gtgtccagaggcatgtgaccagtgc

SEQ ID NO: 244533 - DNA, 25 bp, probe
gtgtagcaagatctgtgagcctggc

SEQ ID NO: 244534 - DNA, 25 bp, probe
gtgttaggaggctgcatgctctgga

SEQ ID NO: 244535 - DNA, 25 bp, probe
gtgtgaaggcaggttgcaactagaa

SEQ ID NO: 244536 - DNA, 25 bp, probe
gtgtgaaggcaggttgcaactagaa

SEQ ID NO: 244537 - DNA, 25 bp, probe
gtgtgaatcgggatgctaagcaaat

SEQ ID NO: 244538 - DNA, 25 bp, probe
gtgtacatcgtgctctgtgagacgt

SEQ ID NO: 244539 - DNA, 25 bp, probe
gtgtcactcagcaacactggtcacg

SEQ ID NO: 244540 - DNA, 25 bp, probe
gtgtcactcagcaacactggtcacg

SEQ ID NO: 244541 - DNA, 25 bp, probe
gtgtcctagcaaagctggatggggt

SEQ ID NO: 244542 - DNA, 25 bp, probe
gtgtcgaagacaagcaggcggcggg

SEQ ID NO: 244543 - DNA, 25 bp, probe
gtgtcgaagacaagcaggcggcggg

SEQ ID NO: 244544 - DNA, 25 bp, probe
gtgtcgtgaccaagagcacacctgt

SEQ ID NO: 244545 - DNA, 25 bp, probe
gtgtactgaccactgagatactcaa

SEQ ID NO: 244546 - DNA, 25 bp, probe
gtgtatggcaccctgccataccagc

SEQ ID NO: 244547 - DNA, 25 bp, probe
gtgtcctcatctgtccaatgacagc

SEQ ID NO: 244548 - DNA, 25 bp, probe
gtgtcatgccctggttcacagaggg

SEQ ID NO: 244549 - DNA, 25 bp, probe
gtgtcaccctggatgacatccggaa

SEQ ID NO: 244550 - DNA, 25 bp, probe
gtgtccgtgtaattgacaacgtgaa

SEQ ID NO: 244551 - DNA, 25 bp, probe
gtgtcaggggacatgatgagccagt

SEQ ID NO: 244552 - DNA, 25 bp, probe
gtgtcggtgtgccaggagatgctgc

SEQ ID NO: 244553 - DNA, 25 bp, probe
gtgtcagatgtggatatccagagcg

SEQ ID NO: 244554 - DNA, 25 bp, probe
gtgtcagactcaatcatcacaccca

SEQ ID NO: 244555 - DNA, 25 bp, probe
gtgtatgataacaacagcagcaccc

SEQ ID NO: 244556 - DNA, 25 bp, probe
gtgtattgaagaactgcatgcaggg

SEQ ID NO: 244557 - DNA, 25 bp, probe
gtgtatgagaagcactctgcccagt

SEQ ID NO: 244558 - DNA, 25 bp, probe
gtgtgagggttggcactaggcccac

SEQ ID NO: 244559 - DNA, 25 bp, probe
gtgtgagggttggcactaggcccac

SEQ ID NO: 244560 - DNA, 25 bp, probe
gtgtgagggttggcactaggcccac

SEQ ID NO: 244561 - DNA, 25 bp, probe
gtgtcaaatattcatctagtcccct

SEQ ID NO: 244562 - DNA, 25 bp, probe
gtgtcagtgataatgaatctggtca

SEQ ID NO: 244563 - DNA, 25 bp, probe
gtgtagcaataaaacggatcaactt

SEQ ID NO: 244564 - DNA, 25 bp, probe
gtgtagcaataaaacggatcaactt

SEQ ID NO: 244565 - DNA, 25 bp, probe
gtgtagagaaaaccgtgaagagatg

SEQ ID NO: 244566 - DNA, 25 bp, probe
gtgtagtgagattattcctgtaggt

SEQ ID NO: 244567 - DNA, 25 bp, probe
gtgtagttgtatatttgtaagatga

SEQ ID NO: 244568 - DNA, 25 bp, probe
gtgtagcttgctagtttgttttcta

SEQ ID NO: 244569 - DNA, 25 bp, probe
gtgtagcttgctagtttgttttcta

SEQ ID NO: 244570 - DNA, 25 bp, probe
gtgtatgtgttggtttattgattct

SEQ ID NO: 244571 - DNA, 25 bp, probe
gtgtatattgttgcttattgttttg

SEQ ID NO: 244572 - DNA, 25 bp, probe
gtgtttatgtgtgctcattttgtgg

SEQ ID NO: 244573 - DNA, 25 bp, probe
gtgtctgtattttctgattttttca

SEQ ID NO: 244574 - DNA, 25 bp, probe
gtgtttgattttgtttgatttccct

SEQ ID NO: 244575 - DNA, 25 bp, probe
gtgtttgttattgtaaattgctctc

SEQ ID NO: 244576 - DNA, 25 bp, probe
gtgtttttattgttaactcttgtct

SEQ ID NO: 244577 - DNA, 25 bp, probe
gtgtttattattatgtgactctttt

SEQ ID NO: 244578 - DNA, 25 bp, probe
gtgtttcttttggttccattgtttg

SEQ ID NO: 244579 - DNA, 25 bp, probe
gggcttcctttggtatcaaagtact

SEQ ID NO: 244580 - DNA, 25 bp, probe
gggtctccagttgttcatcaaccca

SEQ ID NO: 244581 - DNA, 25 bp, probe
gggtctccagttgttcatcaaccca

SEQ ID NO: 244582 - DNA, 25 bp, probe
ttggtctactgtgaactcttaccct

SEQ ID NO: 244583 - DNA, 25 bp, probe
gtgtcttaatgtggaagttaaccct

SEQ ID NO: 244584 - DNA, 25 bp, probe
gtgtttgagatggctacagggaagc

SEQ ID NO: 244585 - DNA, 25 bp, probe
gtgtttgtgtccttaggcaaagctg

SEQ ID NO: 244586 - DNA, 25 bp, probe
gtgtttctgtccggaggaaatggat

SEQ ID NO: 244587 - DNA, 25 bp, probe
gtgtttctcctctgcagagacatag

SEQ ID NO: 244588 - DNA, 25 bp, probe
gtgtgttacctgctccagaaagacc

SEQ ID NO: 244589 - DNA, 25 bp, probe
gtgtgttacctgctccagaaagacc

SEQ ID NO: 244590 - DNA, 25 bp, probe
gtgtctaatctccttctgagaagga

SEQ ID NO: 244591 - DNA, 25 bp, probe
gtgtctaatctccttctgagaagga

SEQ ID NO: 244592 - DNA, 25 bp, probe
gtgtacacatctattctcaaagcta

SEQ ID NO: 244593 - DNA, 25 bp, probe
gtgtatgcacctattgaaatatgtt

SEQ ID NO: 244594 - DNA, 25 bp, probe
gtgtaacctttttatcttgatgcat

SEQ ID NO: 244595 - DNA, 25 bp, probe
gtgtagcacccttatggtcttgcag

SEQ ID NO: 244596 - DNA, 25 bp, probe
gtgtgaaccttttgtgttgtcagac

SEQ ID NO: 244597 - DNA, 25 bp, probe
gtgtaccagttatctgttgctgcat

SEQ ID NO: 244598 - DNA, 25 bp, probe
gtgtctccaggtaactttgcttgat

SEQ ID NO: 244599 - DNA, 25 bp, probe
gtgtctccaggtaactttgcttgat

SEQ ID NO: 244600 - DNA, 25 bp, probe
gtgtctgacgtgtaaacttggaatc

SEQ ID NO: 244601 - DNA, 25 bp, probe
gtgtctgacgtgtaaacttggaatc

SEQ ID NO: 244602 - DNA, 25 bp, probe
gtgtcccgtgaaatacattttgttg

SEQ ID NO: 244603 - DNA, 25 bp, probe
gtgtatgcctggtttaccttttcac

SEQ ID NO: 244604 - DNA, 25 bp, probe
gtgtagccatgtctagacaccatgt

SEQ ID NO: 244605 - DNA, 25 bp, probe
gtgtagactggcctgaaccacagga

SEQ ID NO: 244606 - DNA, 25 bp, probe
gtgtcaaccatccagaacacaagga

SEQ ID NO: 244607 - DNA, 25 bp, probe
gtgtcaaccatccagaacacaagga

SEQ ID NO: 244608 - DNA, 25 bp, probe
gtgtacaacacggacaccgacgagt

SEQ ID NO: 244609 - DNA, 25 bp, probe
gtgtacaacacggacaccgacgagt

SEQ ID NO: 244610 - DNA, 25 bp, probe
ggtgaaaccgaagctcgactcttcc

SEQ ID NO: 244611 - DNA, 25 bp, probe
gggaagaacgaagccacctttgaag

SEQ ID NO: 244612 - DNA, 25 bp, probe
gtggtaaacaaatctcacctttggg

SEQ ID NO: 244613 - DNA, 25 bp, probe
gtggtggaaagtgtcaccctctttg

SEQ ID NO: 244614 - DNA, 25 bp, probe
ggtgtaaaatatctacctgccctct

SEQ ID NO: 244615 - DNA, 25 bp, probe
gtgtggaacgttctgagatcccctt

SEQ ID NO: 244616 - DNA, 25 bp, probe
gtgtgagtttgtcaagagacccctg

SEQ ID NO: 244617 - DNA, 25 bp, probe
gtgtgagtttgtcaagagacccctg

SEQ ID NO: 244618 - DNA, 25 bp, probe
tttatggctagacaggaacccttgc

SEQ ID NO: 244619 - DNA, 25 bp, probe
gtgtcagagcgattcctggaaccct

SEQ ID NO: 244620 - DNA, 25 bp, probe
gtgtcagagcgattcctggaaccct

SEQ ID NO: 244621 - DNA, 25 bp, probe
gtgtcagagcgattcctggaaccct

SEQ ID NO: 244622 - DNA, 25 bp, probe
gtgtgcagaagatcgtggtgcatcc

SEQ ID NO: 244623 - DNA, 25 bp, probe
gtgtgaaaggcccatggatcagctc

SEQ ID NO: 244624 - DNA, 25 bp, probe
gtgtgaaaggcccatggatcagctc

SEQ ID NO: 244625 - DNA, 25 bp, probe
gtgtaagtgccatctggtagctgta

SEQ ID NO: 244626 - DNA, 25 bp, probe
gtgtatagaccatcgatgccagcgt

SEQ ID NO: 244627 - DNA, 25 bp, probe
gtgtacaacacgcggcacgtgtgcg

SEQ ID NO: 244628 - DNA, 25 bp, probe
gtgtccaaatcggggattggtgagc

SEQ ID NO: 244629 - DNA, 25 bp, probe
gggactgacctggggatttggagta

SEQ ID NO: 244630 - DNA, 25 bp, probe
gtggaaagcgggaaatttgggtgat

SEQ ID NO: 244631 - DNA, 25 bp, probe
gtggaaagcgggaaatttgggtgat

SEQ ID NO: 244632 - DNA, 25 bp, probe
gtgggaagggacaggtgggggctgg

SEQ ID NO: 244633 - DNA, 25 bp, probe
gtggtacggcagaggcgggggaaag

SEQ ID NO: 244634 - DNA, 25 bp, probe
gtgtgacatagacaccagggaggga

SEQ ID NO: 244635 - DNA, 25 bp, probe
gtgtgcggcaagaacgcaagggggc

SEQ ID NO: 244636 - DNA, 25 bp, probe
gtgtgcggcaagaacgcaagggggc

SEQ ID NO: 244637 - DNA, 25 bp, probe
gtgtgcgacttggacaaggcctggg

SEQ ID NO: 244638 - DNA, 25 bp, probe
gtgtggccctggacaagccacagcc

SEQ ID NO: 244639 - DNA, 25 bp, probe
gtgtggccctggacaagccacagcc

SEQ ID NO: 244640 - DNA, 25 bp, probe
gtgtgctgtcacagaccagcttcag

SEQ ID NO: 244641 - DNA, 25 bp, probe
gtgtgctgtcacagaccagcttcag

SEQ ID NO: 244642 - DNA, 25 bp, probe
gtgtgctgtcacagaccagcttcag

SEQ ID NO: 244643 - DNA, 25 bp, probe
gtgtgctgaagggtgccacagacag

SEQ ID NO: 244644 - DNA, 25 bp, probe
gtgtgctgcaacgcgggcaaagtta

SEQ ID NO: 244645 - DNA, 25 bp, probe
gtggtgttcctaggccaaactggat

SEQ ID NO: 244646 - DNA, 25 bp, probe
gtgggacccttgtccacaattgtag

SEQ ID NO: 244647 - DNA, 25 bp, probe
ggtagaacactttcaaagaggtttg

SEQ ID NO: 244648 - DNA, 25 bp, probe
ggtgagaaaccacaacacaggtcta

SEQ ID NO: 244649 - DNA, 25 bp, probe
gtgtggaaagtgccgaaaccgtgct

SEQ ID NO: 244650 - DNA, 25 bp, probe
gtgtggctacgtcctaaaacctgcc

SEQ ID NO: 244651 - DNA, 25 bp, probe
gtgtgttctcagtgaaataactacc

SEQ ID NO: 244652 - DNA, 25 bp, probe
gtgtgcatttagcagaactcccttc

SEQ ID NO: 244653 - DNA, 25 bp, probe
gtgtgatttttatagtctcgtttta

SEQ ID NO: 244654 - DNA, 25 bp, probe
gtgtgatatttttttcttcgcttgt

SEQ ID NO: 244655 - DNA, 25 bp, probe
gtgtaaggattacttttcctgttga

SEQ ID NO: 244656 - DNA, 25 bp, probe
gtgtgaaaactccctattctcttaa

SEQ ID NO: 244657 - DNA, 25 bp, probe
gtgtgaacaagacgcctgttgtctg

SEQ ID NO: 244658 - DNA, 25 bp, probe
gtgtgaccaggagattgctaactgc

SEQ ID NO: 244659 - DNA, 25 bp, probe
gtgtcctatggagatattacagtgg

SEQ ID NO: 244660 - DNA, 25 bp, probe
gtgtccctgagcagagttacatgct

SEQ ID NO: 244661 - DNA, 25 bp, probe
gtgtcaactgagagtcatatacatt

SEQ ID NO: 244662 - DNA, 25 bp, probe
gtgtacaagggcttcatatacaatc

SEQ ID NO: 244663 - DNA, 25 bp, probe
gtgtgataaggcctactatacatta

SEQ ID NO: 244664 - DNA, 25 bp, probe
gtgtgattctgtcctacttgtacat

SEQ ID NO: 244665 - DNA, 25 bp, probe
gtgtgatttgtgctccattttttct

SEQ ID NO: 244666 - DNA, 25 bp, probe
gtgtgtttcatgctctggatttttt

SEQ ID NO: 244667 - DNA, 25 bp, probe
gggtattctcttggaattttcctag

SEQ ID NO: 244668 - DNA, 25 bp, probe
gggtattctcttggaattttcctag

SEQ ID NO: 244669 - DNA, 25 bp, probe
gtgtgtttctttaatatttgaactc

SEQ ID NO: 244670 - DNA, 25 bp, probe
gtggttcctattattctggatcctc

SEQ ID NO: 244671 - DNA, 25 bp, probe
gtggttcctattattctggatcctc

SEQ ID NO: 244672 - DNA, 25 bp, probe
gtggttccgcaagctggcggacttc

SEQ ID NO: 244673 - DNA, 25 bp, probe
gtggttccgcaagctggcggacttc

SEQ ID NO: 244674 - DNA, 25 bp, probe
gtggaaccattacgcccagggttca

SEQ ID NO: 244675 - DNA, 25 bp, probe
gggaccccaacagcgaggagaacag

SEQ ID NO: 244676 - DNA, 25 bp, probe
gggctcccgacagacgggagcaggg

SEQ ID NO: 244677 - DNA, 25 bp, probe
gggcatccccagtgacggaaagggc

SEQ ID NO: 244678 - DNA, 25 bp, probe
gggcatccccagtgacggaaagggc

SEQ ID NO: 244679 - DNA, 25 bp, probe
gggccaccaaatagcctaggaagtg

SEQ ID NO: 244680 - DNA, 25 bp, probe
gggaacccttacctaagtatgtgat

SEQ ID NO: 244681 - DNA, 25 bp, probe
gtggaactcagtcccctgaagaagt

SEQ ID NO: 244682 - DNA, 25 bp, probe
gtggaaacttctcccaagtgaagct

SEQ ID NO: 244683 - DNA, 25 bp, probe
gggtaaggacttgccagagaactac

SEQ ID NO: 244684 - DNA, 25 bp, probe
gtgggaagtactcagtcaagacccc

SEQ ID NO: 244685 - DNA, 25 bp, probe
gtggagaaccccgagtattgacacc

SEQ ID NO: 244686 - DNA, 25 bp, probe
gtgggaagccacagcagaaatggaa

SEQ ID NO: 244687 - DNA, 25 bp, probe
gtgggatcggcgcgacagtgtagaa

SEQ ID NO: 244688 - DNA, 25 bp, probe
gtgggcaccgggaagtggataattt

SEQ ID NO: 244689 - DNA, 25 bp, probe
gtgggcacggggagaggaaggcact

SEQ ID NO: 244690 - DNA, 25 bp, probe
gtgtggactgcgtgagggacaagaa

SEQ ID NO: 244691 - DNA, 25 bp, probe
gtgtggatcctaaccggaactggga

SEQ ID NO: 244692 - DNA, 25 bp, probe
gtgtggatcctaaccggaactggga

SEQ ID NO: 244693 - DNA, 25 bp, probe
gtggagtctgtgttccggaactttg

SEQ ID NO: 244694 - DNA, 25 bp, probe
gtgtggccgcagcggcgagaacttt

SEQ ID NO: 244695 - DNA, 25 bp, probe
gtgtcgcccaggcgacaaaagtgct

SEQ ID NO: 244696 - DNA, 25 bp, probe
gtgtctgcaaagtggtcaaaagtgc

SEQ ID NO: 244697 - DNA, 25 bp, probe
gtgtgtggcaagtggttgcaccaac

SEQ ID NO: 244698 - DNA, 25 bp, probe
ggtgtaatagttttgctgcccagtt

SEQ ID NO: 244699 - DNA, 25 bp, probe
gtgtgtcaaacgtttgcggccaatt

SEQ ID NO: 244700 - DNA, 25 bp, probe
gtgtggacgaagtttggcccaacct

SEQ ID NO: 244701 - DNA, 25 bp, probe
gtgtggacgaagtttggcccaacct

SEQ ID NO: 244702 - DNA, 25 bp, probe
gtgtggacgaagtttggcccaacct

SEQ ID NO: 244703 - DNA, 25 bp, probe
gtgtggacgaagtttggcccaacct

SEQ ID NO: 244704 - DNA, 25 bp, probe
gtgggaggattgtttgaggccggga

SEQ ID NO: 244705 - DNA, 25 bp, probe
gtgggacgattacttggacaccgtg

SEQ ID NO: 244706 - DNA, 25 bp, probe
gtggtgactattaccggatccaggg

SEQ ID NO: 244707 - DNA, 25 bp, probe
gtggtgactattaccggatccaggg

SEQ ID NO: 244708 - DNA, 25 bp, probe
gtgggtggactattcggacaagtac

SEQ ID NO: 244709 - DNA, 25 bp, probe
gtggcattgggtctgggatgaagta

SEQ ID NO: 244710 - DNA, 25 bp, probe
gtggtggaggtctgggactatgtca

SEQ ID NO: 244711 - DNA, 25 bp, probe
gtgtgtggaaggtgatctggctctg

SEQ ID NO: 244712 - DNA, 25 bp, probe
gggtggagggaaggcggtcttcctg

SEQ ID NO: 244713 - DNA, 25 bp, probe
gtgtgtgggtgaaactgggtgcgtc

SEQ ID NO: 244714 - DNA, 25 bp, probe
gtggattggagacaattgcctggtt

SEQ ID NO: 244715 - DNA, 25 bp, probe
gtggattggagacaattgcctggtt

SEQ ID NO: 244716 - DNA, 25 bp, probe
gggaaggctaagcatggcctggact

SEQ ID NO: 244717 - DNA, 25 bp, probe
gtgtaagccaaaagatgacctgaga

SEQ ID NO: 244718 - DNA, 25 bp, probe
gtgtaaaaaatcctgcatgcctaga

SEQ ID NO: 244719 - DNA, 25 bp, probe
gtgtaacaacattatctgaccaata

SEQ ID NO: 244720 - DNA, 25 bp, probe
gtgtaagctaaattgctgatccaaa

SEQ ID NO: 244721 - DNA, 25 bp, probe
gtgtaagctaaattgctgatccaaa

SEQ ID NO: 244722 - DNA, 25 bp, probe
gtggggctcgagttgccctgaagat

SEQ ID NO: 244723 - DNA, 25 bp, probe
gtggtcctggaaatcccttattgag

SEQ ID NO: 244724 - DNA, 25 bp, probe
gtggcttaggtagcccttttcattt

SEQ ID NO: 244725 - DNA, 25 bp, probe
gtgtgttaaaatgtcgcttttcatc

SEQ ID NO: 244726 - DNA, 25 bp, probe
gtggttaaacaaactctcatttgac

SEQ ID NO: 244727 - DNA, 25 bp, probe
gtgggtaagagcacggccactctac

SEQ ID NO: 244728 - DNA, 25 bp, probe
gtgggtaaaatcggccccacagcac

SEQ ID NO: 244729 - DNA, 25 bp, probe
gtggtctataaagtgactcggcccc

SEQ ID NO: 244730 - DNA, 25 bp, probe
gtggtcaagtaagtttagggagcta

SEQ ID NO: 244731 - DNA, 25 bp, probe
gtgggaagtgatgtcgtacggggag

SEQ ID NO: 244732 - DNA, 25 bp, probe
gtgggaatctgtgtaaccgtggaag

SEQ ID NO: 244733 - DNA, 25 bp, probe
gtgggtgaagctgtaccgcggagac

SEQ ID NO: 244734 - DNA, 25 bp, probe
gtggtggaacagcaaccggtgccac

SEQ ID NO: 244735 - DNA, 25 bp, probe
gtggggtacagtaaagaggcttcca

SEQ ID NO: 244736 - DNA, 25 bp, probe
gtggtgccaaacaaaaaggttctca

SEQ ID NO: 244737 - DNA, 25 bp, probe
gtggtgccaaacaaaaaggttctca

SEQ ID NO: 244738 - DNA, 25 bp, probe
gtggccccaaattagagttttctct

SEQ ID NO: 244739 - DNA, 25 bp, probe
gtgggcctaaaggagagttttctag

SEQ ID NO: 244740 - DNA, 25 bp, probe
gtgtgtgcccaggggtgagtgtttc

SEQ ID NO: 244741 - DNA, 25 bp, probe
gtgtggccccaggtgtcaaaatgac

SEQ ID NO: 244742 - DNA, 25 bp, probe
gtgtgaaactcggctgtattaatca

SEQ ID NO: 244743 - DNA, 25 bp, probe
gtggagaacaatggttttaatccat

SEQ ID NO: 244744 - DNA, 25 bp, probe
gtgggcacacttgctcatttttact

SEQ ID NO: 244745 - DNA, 25 bp, probe
gtgtgataactgatcttgttttatt

SEQ ID NO: 244746 - DNA, 25 bp, probe
gtgtgaagtctgacatttggagtct

SEQ ID NO: 244747 - DNA, 25 bp, probe
gtgtgcgtattgcctcagtggaggc

SEQ ID NO: 244748 - DNA, 25 bp, probe
gtgtgcgtattgcctcagtggaggc

SEQ ID NO: 244749 - DNA, 25 bp, probe
gtgtcctatgcgctcatgagcgtct

SEQ ID NO: 244750 - DNA, 25 bp, probe
gtgtcctgatgccgtgttcaggctc

SEQ ID NO: 244751 - DNA, 25 bp, probe
gtgtctctgagaaggctgctaacat

SEQ ID NO: 244752 - DNA, 25 bp, probe
gtgtcatcggggtcattatcaactg

SEQ ID NO: 244753 - DNA, 25 bp, probe
gtgtgcattcggctgcaaataacag

SEQ ID NO: 244754 - DNA, 25 bp, probe
gtgtcagtatgtctacctacatcag

SEQ ID NO: 244755 - DNA, 25 bp, probe
gtgtcaggtgtcttcttctacctga

SEQ ID NO: 244756 - DNA, 25 bp, probe
gtgtcaggtgtcttcttctacctga

SEQ ID NO: 244757 - DNA, 25 bp, probe
gtgtgccgtgtggctcaaaaccgaa

SEQ ID NO: 244758 - DNA, 25 bp, probe
gggctctgtttcagagaacggctac

SEQ ID NO: 244759 - DNA, 25 bp, probe
gggctctgtttcagagaacggctac

SEQ ID NO: 244760 - DNA, 25 bp, probe
gggcccgttgaggatgaggccgcta

SEQ ID NO: 244761 - DNA, 25 bp, probe
gggcctggtagagccaggcacccag

SEQ ID NO: 244762 - DNA, 25 bp, probe
gggcctggtagagccaggcacccag

SEQ ID NO: 244763 - DNA, 25 bp, probe
gtggactgaataaaccaggcaccga

SEQ ID NO: 244764 - DNA, 25 bp, probe
gtggacatgcgtgaccagcagtact

SEQ ID NO: 244765 - DNA, 25 bp, probe
gtgtgagcatgggtacccatttgat

SEQ ID NO: 244766 - DNA, 25 bp, probe
gtgggatggtgttaccttagctaac

SEQ ID NO: 244767 - DNA, 25 bp, probe
gtgggcaaggtcatccctgagctga

SEQ ID NO: 244768 - DNA, 25 bp, probe
gtgggcaaggtcatccctgagctga

SEQ ID NO: 244769 - DNA, 25 bp, probe
tgatgggaaggaaccccaagttggg

SEQ ID NO: 244770 - DNA, 25 bp, probe
tgatgggaaggaaccccaagttggg

SEQ ID NO: 244771 - DNA, 25 bp, probe
gtggaatttaatgacccagtgctgg

SEQ ID NO: 244772 - DNA, 25 bp, probe
gtgggacttattgaggtggtgcgaa

SEQ ID NO: 244773 - DNA, 25 bp, probe
gtgtgctggctttagacggggagaa

SEQ ID NO: 244774 - DNA, 25 bp, probe
gtgtgctggctttagacggggagaa

SEQ ID NO: 244775 - DNA, 25 bp, probe
gtgtaactgtgatcctgttggagaa

SEQ ID NO: 244776 - DNA, 25 bp, probe
gtgtcacacatcctacctttgatga

SEQ ID NO: 244777 - DNA, 25 bp, probe
gtgtgcacgcatggctgagcatgtg

SEQ ID NO: 244778 - DNA, 25 bp, probe
gtgtgctcagtgccatgaagatgga

SEQ ID NO: 244779 - DNA, 25 bp, probe
gtgtgatatatgccacaatgtttgg

SEQ ID NO: 244780 - DNA, 25 bp, probe
gtgtgactctagtctgtgtttgaga

SEQ ID NO: 244781 - DNA, 25 bp, probe
gtgtgcacctaattgtgtggctgaa

SEQ ID NO: 244782 - DNA, 25 bp, probe
gtgtcacatcaactttgtggataac

SEQ ID NO: 244783 - DNA, 25 bp, probe
gtgtcacatcaactttgtggataac

SEQ ID NO: 244784 - DNA, 25 bp, probe
gtgtgcacaatacttgtggcccaca

SEQ ID NO: 244785 - DNA, 25 bp, probe
gtgggagcatctccagtgctcccca

SEQ ID NO: 244786 - DNA, 25 bp, probe
gtgtggagtataggctgcatcatct

SEQ ID NO: 244787 - DNA, 25 bp, probe
gtgtgtggatcatacgcccaagtgt

SEQ ID NO: 244788 - DNA, 25 bp, probe
gtgtgtggatcatacgcccaagtgt

SEQ ID NO: 244789 - DNA, 25 bp, probe
gtgtctgtgtcttagacctgcaaac

SEQ ID NO: 244790 - DNA, 25 bp, probe
gtgtgcacatgtgttacccataaac

SEQ ID NO: 244791 - DNA, 25 bp, probe
gtgtgacgtggacatccgcaaagac

SEQ ID NO: 244792 - DNA, 25 bp, probe
gtgtgaaattagtccccagtgcaaa

SEQ ID NO: 244793 - DNA, 25 bp, probe
gtggaatagtacttactgcaatgct

SEQ ID NO: 244794 - DNA, 25 bp, probe
gtgtgatactaaggtttgactgcta

SEQ ID NO: 244795 - DNA, 25 bp, probe
gtgtgacactgatgagtttcactgt

SEQ ID NO: 244796 - DNA, 25 bp, probe
gtgtgacactgatgagtttcactgt

SEQ ID NO: 244797 - DNA, 25 bp, probe
gtgtgccactgtttgcttcaacagt

SEQ ID NO: 244798 - DNA, 25 bp, probe
gtgtgcctgctggaggcgtacaact

SEQ ID NO: 244799 - DNA, 25 bp, probe
gtgtgcttgctaaatggtgtacatt

SEQ ID NO: 244800 - DNA, 25 bp, probe
gtgtgcttgctaaatggtgtacatt

SEQ ID NO: 244801 - DNA, 25 bp, probe
gtgtgtgtgtgagcatgggtaccca

SEQ ID NO: 244802 - DNA, 25 bp, probe
gtgtgtgatctggtcactatgtgac

SEQ ID NO: 244803 - DNA, 25 bp, probe
gtgtctgttggtgtagatgcgcgtc

SEQ ID NO: 244804 - DNA, 25 bp, probe
gtgtctgttggtgtagatgcgcgtc

SEQ ID NO: 244805 - DNA, 25 bp, probe
gtgtccgtgggatatgaggcagacc

SEQ ID NO: 244806 - DNA, 25 bp, probe
gtgtcacctggggacatgggctatc

SEQ ID NO: 244807 - DNA, 25 bp, probe
gtgtctacttggaacggatgcattt

SEQ ID NO: 244808 - DNA, 25 bp, probe
gtgtcttgctatggaatatggaggt

SEQ ID NO: 244809 - DNA, 25 bp, probe
gtgtccttaggcaaagctgtgggag

SEQ ID NO: 244810 - DNA, 25 bp, probe
gtgtcgggaggttagctgcggaaag

SEQ ID NO: 244811 - DNA, 25 bp, probe
gtgtcgggaggttagctgcggaaag

SEQ ID NO: 244812 - DNA, 25 bp, probe
gtgtcccagaggaaagtgcgtcaga

SEQ ID NO: 244813 - DNA, 25 bp, probe
gtgtgtgcctcacgaaatggctgga

SEQ ID NO: 244814 - DNA, 25 bp, probe
gtgtgtgacatagacaccagggagg

SEQ ID NO: 244815 - DNA, 25 bp, probe
gtgtgtgaatcgggatgctaagcaa

SEQ ID NO: 244816 - DNA, 25 bp, probe
gtgtgctgaatccttgaatactcaa

SEQ ID NO: 244817 - DNA, 25 bp, probe
gtgtgccttcaaagaaactgacagc

SEQ ID NO: 244818 - DNA, 25 bp, probe
gtgtcctggaatgaatgaatacatc

SEQ ID NO: 244819 - DNA, 25 bp, probe
gtgggcatttctgcagtgaatacat

SEQ ID NO: 244820 - DNA, 25 bp, probe
gtggtggttctggcatttataattt

SEQ ID NO: 244821 - DNA, 25 bp, probe
ggaggaggccctgttgaagtttcgg

SEQ ID NO: 244822 - DNA, 25 bp, probe
gggagggccgcagaaaggccttctc

SEQ ID NO: 244823 - DNA, 25 bp, probe
gtgggggtgtgcagaatgggccccc

SEQ ID NO: 244824 - DNA, 25 bp, probe
gtggggcttacagaaatgactgccg

SEQ ID NO: 244825 - DNA, 25 bp, probe
gtgtcggtcaaattcactatgacta

SEQ ID NO: 244826 - DNA, 25 bp, probe
gtgtcggtcaaattcactatgacta

SEQ ID NO: 244827 - DNA, 25 bp, probe
gtgtgctgtctaaaatccaatgttg

SEQ ID NO: 244828 - DNA, 25 bp, probe
gtgtctgctcataagtacttgtgtc

SEQ ID NO: 244829 - DNA, 25 bp, probe
gtgtctgcatgcagtgtactgatta

SEQ ID NO: 244830 - DNA, 25 bp, probe
gtgtctcatcttggtaatgatgtcc

SEQ ID NO: 244831 - DNA, 25 bp, probe
gtgtcctgctgtgggagatcgtgac

SEQ ID NO: 244832 - DNA, 25 bp, probe
gtgtcgtcgatgtggcatgcgagcc

SEQ ID NO: 244833 - DNA, 25 bp, probe
gtgtcaggagaggaacagcgagtct

SEQ ID NO: 244834 - DNA, 25 bp, probe
gtgtcctgaaggccacggttcaggc

SEQ ID NO: 244835 - DNA, 25 bp, probe
gtgtcctgaaggccacggttcaggc

SEQ ID NO: 244836 - DNA, 25 bp, probe
gtgtcactgtaggtactgtgcccag

SEQ ID NO: 244837 - DNA, 25 bp, probe
gtgtccttagtcaactgtaccactg

SEQ ID NO: 244838 - DNA, 25 bp, probe
ggtgtctataccaaagtctgccact

SEQ ID NO: 244839 - DNA, 25 bp, probe
ggtgtctataccaaagtctgccact

SEQ ID NO: 244840 - DNA, 25 bp, probe
gtgtcttaacctaagtgctttcttg

SEQ ID NO: 244841 - DNA, 25 bp, probe
gtgtcctaaaaatggctaactgatg

SEQ ID NO: 244842 - DNA, 25 bp, probe
gtgtccatggaaaaggtcctactga

SEQ ID NO: 244843 - DNA, 25 bp, probe
gtgtccttgaattctggctaccact

SEQ ID NO: 244844 - DNA, 25 bp, probe
gtgtcccatgaatcttgtcataaca

SEQ ID NO: 244845 - DNA, 25 bp, probe
gtgtcccgagaaatgctggtcacaa

SEQ ID NO: 244846 - DNA, 25 bp, probe
gtgtctccgcagtgagggtgtcagc

SEQ ID NO: 244847 - DNA, 25 bp, probe
gtggtcccagctacaggggaggctg

SEQ ID NO: 244848 - DNA, 25 bp, probe
gtgtgcttgaacttttgggacgtgg

SEQ ID NO: 244849 - DNA, 25 bp, probe
gtgtcattacattgttcaggctacg

SEQ ID NO: 244850 - DNA, 25 bp, probe
gtgtcattacattgttcaggctacg

SEQ ID NO: 244851 - DNA, 25 bp, probe
gtgtctacacggttcagagcgacgt

SEQ ID NO: 244852 - DNA, 25 bp, probe
gtgtgctgatctagaggtgcaggag

SEQ ID NO: 244853 - DNA, 25 bp, probe
gtgtggatgctgagctgtgatggcg

SEQ ID NO: 244854 - DNA, 25 bp, probe
gtgtgtctgctgggcatgtggcagc

SEQ ID NO: 244855 - DNA, 25 bp, probe
gtgtgtgtgcatgtatgtgtgcaag

SEQ ID NO: 244856 - DNA, 25 bp, probe
gtgtctgtgctatttctgtacagct

SEQ ID NO: 244857 - DNA, 25 bp, probe
gtgtctgtgtaattattttgctctt

SEQ ID NO: 244858 - DNA, 25 bp, probe
gtgtctgtgtaattattttgctctt

SEQ ID NO: 244859 - DNA, 25 bp, probe
gtgtctgatgaaacatttttgcaaa

SEQ ID NO: 244860 - DNA, 25 bp, probe
gtgtcagtgagtttttcattgataa

SEQ ID NO: 244861 - DNA, 25 bp, probe
gtgtcattgtgttcatttagagaaa

SEQ ID NO: 244862 - DNA, 25 bp, probe
gtgtgctctttgatattctgaaaaa

SEQ ID NO: 244863 - DNA, 25 bp, probe
gtgtgctctttgatattctgaaaaa

SEQ ID NO: 244864 - DNA, 25 bp, probe
gtgtgcctcacgaaatggctggaaa

SEQ ID NO: 244865 - DNA, 25 bp, probe
gtgtgcccacgttgtagatgtggaa

SEQ ID NO: 244866 - DNA, 25 bp, probe
gtgtgcccacgttgtagatgtggaa

SEQ ID NO: 244867 - DNA, 25 bp, probe
gggcgaccactgttactgggacgcc

SEQ ID NO: 244868 - DNA, 25 bp, probe
gtggcaggtcactgtcactgccgac

SEQ ID NO: 244869 - DNA, 25 bp, probe
gtgtgagggcaagccctacaaccag

SEQ ID NO: 244870 - DNA, 25 bp, probe
gtgtgagggcaagccctacaaccag

SEQ ID NO: 244871 - DNA, 25 bp, probe
gtgtgaaggctagcctaacagaaca

SEQ ID NO: 244872 - DNA, 25 bp, probe
gtgtggggcttccctaagcataaag

SEQ ID NO: 244873 - DNA, 25 bp, probe
gtgtgctgtggttcggaagtctaag

SEQ ID NO: 244874 - DNA, 25 bp, probe
gtgtgctgtggttcggaagtctaag

SEQ ID NO: 244875 - DNA, 25 bp, probe
gtgtctctggatttctagcacatta

SEQ ID NO: 244876 - DNA, 25 bp, probe
gtgtcttctgtgttctacatcacaa

SEQ ID NO: 244877 - DNA, 25 bp, probe
gtgtcttctattataactgcatagt

SEQ ID NO: 244878 - DNA, 25 bp, probe
gtggttatattcccaacaacattaa

SEQ ID NO: 244879 - DNA, 25 bp, probe
gtggtgttgtatgccaagaaaattc

SEQ ID NO: 244880 - DNA, 25 bp, probe
gtggtgttttgtcacaatgacctgc

SEQ ID NO: 244881 - DNA, 25 bp, probe
gtgggttttaaattcgaagctcagg

SEQ ID NO: 244882 - DNA, 25 bp, probe
gtgtgtgttttatactgcaacaata

SEQ ID NO: 244883 - DNA, 25 bp, probe
gtgtgtgttttatactgcaacaata

SEQ ID NO: 244884 - DNA, 25 bp, probe
gtgtggtttatgaatacgtctgtat

SEQ ID NO: 244885 - DNA, 25 bp, probe
gtgtggttccagaaaagccaaagaa

SEQ ID NO: 244886 - DNA, 25 bp, probe
gtgggggccgtgaaggcccctgaag

SEQ ID NO: 244887 - DNA, 25 bp, probe
gtggggtcgcctaagcgacctttgg

SEQ ID NO: 244888 - DNA, 25 bp, probe
gtggggctttctatggagccatctg

SEQ ID NO: 244889 - DNA, 25 bp, probe
ggtgggttcttttgtacaccttctg

SEQ ID NO: 244890 - DNA, 25 bp, probe
ggtgggttcttttgtacaccttctg

SEQ ID NO: 244891 - DNA, 25 bp, probe
ggggttcttcagagaacaccctcta

SEQ ID NO: 244892 - DNA, 25 bp, probe
gtggagtttaagtgaccaccatcct

SEQ ID NO: 244893 - DNA, 25 bp, probe
gtgggtttccagtccactgaaacac

SEQ ID NO: 244894 - DNA, 25 bp, probe
gtgggaattccctcggaagaacttg

SEQ ID NO: 244895 - DNA, 25 bp, probe
gtgggaattccctcggaagaacttg

SEQ ID NO: 244896 - DNA, 25 bp, probe
gtgggaaattctcactggcgaaatt

SEQ ID NO: 244897 - DNA, 25 bp, probe
gtgggaaaatgctgggaccaaagat

SEQ ID NO: 244898 - DNA, 25 bp, probe
gtgggaacaggcagagggacaagag

SEQ ID NO: 244899 - DNA, 25 bp, probe
gtgggaccagggagaatgcccacag

SEQ ID NO: 244900 - DNA, 25 bp, probe
gtgggaccagattccaggtccaaag

SEQ ID NO: 244901 - DNA, 25 bp, probe
gtgggattagaagactatcaaaata

SEQ ID NO: 244902 - DNA, 25 bp, probe
gtgggttagtcgggtgccaggacaa

SEQ ID NO: 244903 - DNA, 25 bp, probe
gtgtggcttcatgaccgtaaggaaa

SEQ ID NO: 244904 - DNA, 25 bp, probe
gtgtgctttactacacagtttggtt

SEQ ID NO: 244905 - DNA, 25 bp, probe
gtgtgctttactacacagtttggtt

SEQ ID NO: 244906 - DNA, 25 bp, probe
gtgtctgtgacatttcctgttgtga

SEQ ID NO: 244907 - DNA, 25 bp, probe
gtgtctgtgacatttcctgttgtga

SEQ ID NO: 244908 - DNA, 25 bp, probe
gtgtggtgactgctttgtagtgaac

SEQ ID NO: 244909 - DNA, 25 bp, probe
gtgtggtgactgctttgtagtgaac

SEQ ID NO: 244910 - DNA, 25 bp, probe
gtgtgtggcagtattttagtaccgg

SEQ ID NO: 244911 - DNA, 25 bp, probe
gtgtgatgtgagttgttgttaagac

SEQ ID NO: 244912 - DNA, 25 bp, probe
gtgtgcaggacagttcatggtaatg

SEQ ID NO: 244913 - DNA, 25 bp, probe
gtgtgcaggacagttcatggtaatg

SEQ ID NO: 244914 - DNA, 25 bp, probe
gtgtcggagcacatctggtgcgagg

SEQ ID NO: 244915 - DNA, 25 bp, probe
gtgtcgacatcagttgtgtgtgggg

SEQ ID NO: 244916 - DNA, 25 bp, probe
gtgtctgagaacatgctgtgtgcgg

SEQ ID NO: 244917 - DNA, 25 bp, probe
gtgtctagaggcaacagtgttctga

SEQ ID NO: 244918 - DNA, 25 bp, probe
gtgtccaaagcaaagattctgctgg

SEQ ID NO: 244919 - DNA, 25 bp, probe
gtgtcctcaggcagaattgctggtg

SEQ ID NO: 244920 - DNA, 25 bp, probe
gtgtctctcaggatggtgctctgag

SEQ ID NO: 244921 - DNA, 25 bp, probe
gtgtctctgagagtagagtcactgg

SEQ ID NO: 244922 - DNA, 25 bp, probe
gtgtgcactaatgaggatcctaaag

SEQ ID NO: 244923 - DNA, 25 bp, probe
gtgtctcaaatgtaggtcgttcctt

SEQ ID NO: 244924 - DNA, 25 bp, probe
gtgtctcaaatgtaggtcgttcctt

SEQ ID NO: 244925 - DNA, 25 bp, probe
gtgtccagaatctgcgtctgagatc

SEQ ID NO: 244926 - DNA, 25 bp, probe
gtgtgccggatcggcgattggctcc

SEQ ID NO: 244927 - DNA, 25 bp, probe
gtgtgtgcttagcgcaaatggcagc

SEQ ID NO: 244928 - DNA, 25 bp, probe
gtgtgagcattactggctgaccgac

SEQ ID NO: 244929 - DNA, 25 bp, probe
gtgtgatcattactggccagcggac

SEQ ID NO: 244930 - DNA, 25 bp, probe
gtggatatcggcacgacggttttcc

SEQ ID NO: 244931 - DNA, 25 bp, probe
gtgggacaggcagaactgggtcttc

SEQ ID NO: 244932 - DNA, 25 bp, probe
gtggggaggcccaaatgatggatca

SEQ ID NO: 244933 - DNA, 25 bp, probe
gtggggaggcccaaatgatggatca

SEQ ID NO: 244934 - DNA, 25 bp, probe
gtgtgagggaccaatcctgtgacct

SEQ ID NO: 244935 - DNA, 25 bp, probe
gtgtgggaatccaccctgagacatg

SEQ ID NO: 244936 - DNA, 25 bp, probe
gtgtgggaaccaccttctagaagtg

SEQ ID NO: 244937 - DNA, 25 bp, probe
gtgtggggacattccctttgagagg

SEQ ID NO: 244938 - DNA, 25 bp, probe
gtgggaggaaaagtcctggctggga

SEQ ID NO: 244939 - DNA, 25 bp, probe
gtgggggccaaagcctgtgtgagaa

SEQ ID NO: 244940 - DNA, 25 bp, probe
gtgggcagccaacagttttgagaga

SEQ ID NO: 244941 - DNA, 25 bp, probe
gtggggccatgattggtttctaggc

SEQ ID NO: 244942 - DNA, 25 bp, probe
gtgtggggtcatagggcttgataga

SEQ ID NO: 244943 - DNA, 25 bp, probe
gtgtggggtcatagggcttgataga

SEQ ID NO: 244944 - DNA, 25 bp, probe
gtggccgttatctggaagtaaccat

SEQ ID NO: 244945 - DNA, 25 bp, probe
gggcctgaatactggccctggactc

SEQ ID NO: 244946 - DNA, 25 bp, probe
ggtggtattcagtggtccaggattc

SEQ ID NO: 244947 - DNA, 25 bp, probe
gggtactatatgtgggtagtattcc

SEQ ID NO: 244948 - DNA, 25 bp, probe
gtggaactttgctgtcgtgcttata

SEQ ID NO: 244949 - DNA, 25 bp, probe
gtggaactttgctgtcgtgcttata

SEQ ID NO: 244950 - DNA, 25 bp, probe
gtggacctgacctgccgtctagaaa

SEQ ID NO: 244951 - DNA, 25 bp, probe
gtggtctataactccaaataaacaa

SEQ ID NO: 244952 - DNA, 25 bp, probe
gtggcctataagttccgattggtgg

SEQ ID NO: 244953 - DNA, 25 bp, probe
gtggcctataagttccgattggtgg

SEQ ID NO: 244954 - DNA, 25 bp, probe
gtgggattaagctgcctattgtgtg

SEQ ID NO: 244955 - DNA, 25 bp, probe
gtgggcattaattataacaatatct

SEQ ID NO: 244956 - DNA, 25 bp, probe
gtgggcattatacaaaggcatatta

SEQ ID NO: 244957 - DNA, 25 bp, probe
gtgggcagggcattaaactgctaaa

SEQ ID NO: 244958 - DNA, 25 bp, probe
gtgggatcaagagagaccttctaca

SEQ ID NO: 244959 - DNA, 25 bp, probe
gtgtggccagaagtggaatctttac

SEQ ID NO: 244960 - DNA, 25 bp, probe
gtgggcaataatatggcatttaaga

SEQ ID NO: 244961 - DNA, 25 bp, probe
gtgggaacactgattcatatttaga

SEQ ID NO: 244962 - DNA, 25 bp, probe
gtggtatcaccttttcaaagtcagt

SEQ ID NO: 244963 - DNA, 25 bp, probe
gtggtagaacactttcaaagaggtt

SEQ ID NO: 244964 - DNA, 25 bp, probe
gtggtggaaacgtttgccatatttt

SEQ ID NO: 244965 - DNA, 25 bp, probe
gtggggcaagcaagtttctcttaat

SEQ ID NO: 244966 - DNA, 25 bp, probe
gtgtgtgggagaagttttataattg

SEQ ID NO: 244967 - DNA, 25 bp, probe
gtgtgtggggatttgcttgtatgta

SEQ ID NO: 244968 - DNA, 25 bp, probe
gtgtgtggggatttgcttgtatgta

SEQ ID NO: 244969 - DNA, 25 bp, probe
gtgtgctggggatgagaagtacggg

SEQ ID NO: 244970 - DNA, 25 bp, probe
gtgtgtggggaacatcggacggtgg

SEQ ID NO: 244971 - DNA, 25 bp, probe
gtggggaagaagtcacgaacgatgg

SEQ ID NO: 244972 - DNA, 25 bp, probe
gtgggggagggaagccaacagtagt

SEQ ID NO: 244973 - DNA, 25 bp, probe
gtggggtgaggagttggcaatttgg

SEQ ID NO: 244974 - DNA, 25 bp, probe
gtggggccaggaccatggccgaagc

SEQ ID NO: 244975 - DNA, 25 bp, probe
gtgggtgatcagaaggctggggcca

SEQ ID NO: 244976 - DNA, 25 bp, probe
gtgggtgatcagaaggctggggcca

SEQ ID NO: 244977 - DNA, 25 bp, probe
gtgtgtgtcaaacgtttgcggccaa

SEQ ID NO: 244978 - DNA, 25 bp, probe
gtgtggacgaggcttgtggtgacca

SEQ ID NO: 244979 - DNA, 25 bp, probe
gtgtggggcgtggatcgagtgtagc

SEQ ID NO: 244980 - DNA, 25 bp, probe
gtgtggggcgtggatcgagtgtagc

SEQ ID NO: 244981 - DNA, 25 bp, probe
gtgtgggtgggagtcagcacattca

SEQ ID NO: 244982 - DNA, 25 bp, probe
gtgtggggtggagccaaacaagtgt

SEQ ID NO: 244983 - DNA, 25 bp, probe
gtggggtaagaccccaaccactcag

SEQ ID NO: 244984 - DNA, 25 bp, probe
gtgggggaacacactagagaaccaa

SEQ ID NO: 244985 - DNA, 25 bp, probe
gtgggaagaaacactctgagcaagt

SEQ ID NO: 244986 - DNA, 25 bp, probe
gtgtgtaagagatgtcctcagagca

SEQ ID NO: 244987 - DNA, 25 bp, probe
gtgggcagggaatcctggagcactt

SEQ ID NO: 244988 - DNA, 25 bp, probe
gtgggaggggtagtcgaagagctct

SEQ ID NO: 244989 - DNA, 25 bp, probe
gtgtgtgagcagtgtaaagaaagaa

SEQ ID NO: 244990 - DNA, 25 bp, probe
gtgtggatcagttggtagaaataat

SEQ ID NO: 244991 - DNA, 25 bp, probe
gtgtggatcgtcatgtatacttacg

SEQ ID NO: 244992 - DNA, 25 bp, probe
gtgtgctgggtcatgtaaaatatta

SEQ ID NO: 244993 - DNA, 25 bp, probe
gtgtgctgggtcatgtaaaatatta

SEQ ID NO: 244994 - DNA, 25 bp, probe
gtgtgcttgagtgtgtgaacacgtg

SEQ ID NO: 244995 - DNA, 25 bp, probe
gtgtgctgtttgtttgcagaccaag

SEQ ID NO: 244996 - DNA, 25 bp, probe
gtgtgtttacaatgagaaaatggca

SEQ ID NO: 244997 - DNA, 25 bp, probe
gtgtgtttacaatgagaaaatggca

SEQ ID NO: 244998 - DNA, 25 bp, probe
gtgggtgttcagtgagtgtaaggca

SEQ ID NO: 244999 - DNA, 25 bp, probe
gtgtgtgtgtgtgtagcggaaaagg

SEQ ID NO: 245000 - DNA, 25 bp, probe
gtgtgtgtgtgtgtagcggaaaagg

SEQ ID NO: 245001 - DNA, 25 bp, probe
gtgtgtgtctgtgtgtgcatgtaca

SEQ ID NO: 245002 - DNA, 25 bp, probe
gtggcagatcttgttttacactccc

SEQ ID NO: 245003 - DNA, 25 bp, probe
gggccagctatgagtttgactctcc

SEQ ID NO: 245004 - DNA, 25 bp, probe
gggtagctagcccatgtttagatcc

SEQ ID NO: 245005 - DNA, 25 bp, probe
gtggtaccagcccatgaacaaattc

SEQ ID NO: 245006 - DNA, 25 bp, probe
gtgtccagctcagtatctgcaacaa

SEQ ID NO: 245007 - DNA, 25 bp, probe
gtgtccagctcagtatctgcaacaa

SEQ ID NO: 245008 - DNA, 25 bp, probe
ggtctgcccatggatctgcaaaatg

SEQ ID NO: 245009 - DNA, 25 bp, probe
gtgtctggccagactccatggcaaa

SEQ ID NO: 245010 - DNA, 25 bp, probe
gtgtctggccagactccatggcaaa

SEQ ID NO: 245011 - DNA, 25 bp, probe
gtgtgaggccatcaccatgtgagaa

SEQ ID NO: 245012 - DNA, 25 bp, probe
gtgtgatggccattgagcggtgtat

SEQ ID NO: 245013 - DNA, 25 bp, probe
gtgtgatgagcgctggggtggtgaa

SEQ ID NO: 245014 - DNA, 25 bp, probe
gtgtggatcctcggcagagggggca

SEQ ID NO: 245015 - DNA, 25 bp, probe
gtgtgggcttccttgagggaggcaa

SEQ ID NO: 245016 - DNA, 25 bp, probe
gtgtgggtacctcacccagatatca

SEQ ID NO: 245017 - DNA, 25 bp, probe
gtgtgggtacctcacccagatatca

SEQ ID NO: 245018 - DNA, 25 bp, probe
gtggggtggagccaaacaagtgtca

SEQ ID NO: 245019 - DNA, 25 bp, probe
gtgggagggactatatcaaagtaga

SEQ ID NO: 245020 - DNA, 25 bp, probe
gtgtggatggggtactacaacgggc

SEQ ID NO: 245021 - DNA, 25 bp, probe
gtgtgtgcggcaagaacgcaagggg

SEQ ID NO: 245022 - DNA, 25 bp, probe
gtgtgccggaatatcagcaggcggc

SEQ ID NO: 245023 - DNA, 25 bp, probe
gtgtgcggtgaactctggcagaggg

SEQ ID NO: 245024 - DNA, 25 bp, probe
gtgtgcggtgaactctggcagaggg

SEQ ID NO: 245025 - DNA, 25 bp, probe
gtgtgtcggacacctggaaggtggc

SEQ ID NO: 245026 - DNA, 25 bp, probe
gtggtgggcgcgccttaatgataag

SEQ ID NO: 245027 - DNA, 25 bp, probe
gtggtgtcatcggggtcattatcaa

SEQ ID NO: 245028 - DNA, 25 bp, probe
gtgggctaagcacgggccatatgaa

SEQ ID NO: 245029 - DNA, 25 bp, probe
gtggtcttgcacatttgcacataga

SEQ ID NO: 245030 - DNA, 25 bp, probe
gtgtgtcagtgagtttttcattgat

SEQ ID NO: 245031 - DNA, 25 bp, probe
gtgtgtcagtgcgtattgtaataaa

SEQ ID NO: 245032 - DNA, 25 bp, probe
gtgtgtcagccagacagggcatcaa

SEQ ID NO: 245033 - DNA, 25 bp, probe
gtgtgtcagccagacagggcatcaa

SEQ ID NO: 245034 - DNA, 25 bp, probe
gtgtgtgaacaagcggagcaccatc

SEQ ID NO: 245035 - DNA, 25 bp, probe
gtggtcaccagggaggagcccattt

SEQ ID NO: 245036 - DNA, 25 bp, probe
gtgggaacagcgcagtacgtttctc

SEQ ID NO: 245037 - DNA, 25 bp, probe
gtgggagtggcctgaagagtcctct

SEQ ID NO: 245038 - DNA, 25 bp, probe
gtgggagtggcctgaagagtcctct

SEQ ID NO: 245039 - DNA, 25 bp, probe
gtgggcagaatctcagaaggtcctc

SEQ ID NO: 245040 - DNA, 25 bp, probe
gtggtagcttgctcaacaggtgacc

SEQ ID NO: 245041 - DNA, 25 bp, probe
gtgggaactctgacaagggctgacc

SEQ ID NO: 245042 - DNA, 25 bp, probe
gtgggaactctgacaagggctgacc

SEQ ID NO: 245043 - DNA, 25 bp, probe
gtgggaactctgacaagggctgacc

SEQ ID NO: 245044 - DNA, 25 bp, probe
gtgggactccagagtatgtagcccc

SEQ ID NO: 245045 - DNA, 25 bp, probe
gtgggactcctatctatatggcccc

SEQ ID NO: 245046 - DNA, 25 bp, probe
gtggtactcctaattacattgctcc

SEQ ID NO: 245047 - DNA, 25 bp, probe
gtggtgatgcctaaaggaatgtcac

SEQ ID NO: 245048 - DNA, 25 bp, probe
gtgggctgcgctttgaggaagtccc

SEQ ID NO: 245049 - DNA, 25 bp, probe
gtgtggccgcaatattgtggccgca

SEQ ID NO: 245050 - DNA, 25 bp, probe
gtgtggccgaggctatgggcaaggt

SEQ ID NO: 245051 - DNA, 25 bp, probe
gtgggcctggtcctgagggcaggac

SEQ ID NO: 245052 - DNA, 25 bp, probe
gtgggcctggtcctgagggcaggac

SEQ ID NO: 245053 - DNA, 25 bp, probe
gtgggcgttgtcatcaagggagctt

SEQ ID NO: 245054 - DNA, 25 bp, probe
gtggaggtggtcggcaatggaacct

SEQ ID NO: 245055 - DNA, 25 bp, probe
gtgtggagtttcggaatccttctct

SEQ ID NO: 245056 - DNA, 25 bp, probe
gtgtggagtttcggaatccttctct

SEQ ID NO: 245057 - DNA, 25 bp, probe
gtggccagtttagagttctattaga

SEQ ID NO: 245058 - DNA, 25 bp, probe
gtggccagtttagagttctattaga

SEQ ID NO: 245059 - DNA, 25 bp, probe
gtggggtgtaactactagctttaga

SEQ ID NO: 245060 - DNA, 25 bp, probe
gtgggggcttgattactaggaatgg

SEQ ID NO: 245061 - DNA, 25 bp, probe
gtggtaggttctttctcaggaactc

SEQ ID NO: 245062 - DNA, 25 bp, probe
gtgtgtaggtctcactgtaacaact

SEQ ID NO: 245063 - DNA, 25 bp, probe
gtgtggatattcttaattaaaactc

SEQ ID NO: 245064 - DNA, 25 bp, probe
gtgtggtacatcgcgatatcaaagg

SEQ ID NO: 245065 - DNA, 25 bp, probe
gtgtgttcaacaacgtggccatagc

SEQ ID NO: 245066 - DNA, 25 bp, probe
gtgtgtatcaaaagagactaatgga

SEQ ID NO: 245067 - DNA, 25 bp, probe
gtggtattgaaagccgcactgatgg

SEQ ID NO: 245068 - DNA, 25 bp, probe
gtgtgagtgtgacagggccagtggg

SEQ ID NO: 245069 - DNA, 25 bp, probe
gtgggctgttgggatggccgtaggc

SEQ ID NO: 245070 - DNA, 25 bp, probe
gtgggaagtggccaggcggatggtg

SEQ ID NO: 245071 - DNA, 25 bp, probe
gtgggtagatgggcagggaggggtg

SEQ ID NO: 245072 - DNA, 25 bp, probe
gtgggtatgaggtgtgcagggggag

SEQ ID NO: 245073 - DNA, 25 bp, probe
gtgtgggtgaaggggatagggcgag

SEQ ID NO: 245074 - DNA, 25 bp, probe
gtggggaaccgcgagatagggcaga

SEQ ID NO: 245075 - DNA, 25 bp, probe
gtggggaacctgggtgaaggcacct

SEQ ID NO: 245076 - DNA, 25 bp, probe
gtggcggaacccaggaatctgtcct

SEQ ID NO: 245077 - DNA, 25 bp, probe
gtggggaaccacattgatattctac

SEQ ID NO: 245078 - DNA, 25 bp, probe
gtgggcaaactaagccgattttccg

SEQ ID NO: 245079 - DNA, 25 bp, probe
gtgggagaatctataccttgttcct

SEQ ID NO: 245080 - DNA, 25 bp, probe
gtgggagactttcaccttttgtcaa

SEQ ID NO: 245081 - DNA, 25 bp, probe
gtgggagactttcaccttttgtcaa

SEQ ID NO: 245082 - DNA, 25 bp, probe
gtgtgaatactgtgccaactttatg

SEQ ID NO: 245083 - DNA, 25 bp, probe
gtgtgaaacatgtattaacattcca

SEQ ID NO: 245084 - DNA, 25 bp, probe
gtgtgaagcaatcatttagttactt

SEQ ID NO: 245085 - DNA, 25 bp, probe
gtgtgaagcaaatttctagatatga

SEQ ID NO: 245086 - DNA, 25 bp, probe
gtgtgaagcaaatttctagatatga

SEQ ID NO: 245087 - DNA, 25 bp, probe
gtgtgagacctgattctcagtcaga

SEQ ID NO: 245088 - DNA, 25 bp, probe
gtgtggatcacttgctatccattaa

SEQ ID NO: 245089 - DNA, 25 bp, probe
gtgtgcgcacagggctttgttagca

SEQ ID NO: 245090 - DNA, 25 bp, probe
gtgggaatgggatttgttacaaatc

SEQ ID NO: 245091 - DNA, 25 bp, probe
gtggtagtttgatatcctcacaaag

SEQ ID NO: 245092 - DNA, 25 bp, probe
gtggtaaattaattcgagaggagag

SEQ ID NO: 245093 - DNA, 25 bp, probe
gtggctaacttaaggggagtgggtg

SEQ ID NO: 245094 - DNA, 25 bp, probe
gtggggatcctgagggaaggggcag

SEQ ID NO: 245095 - DNA, 25 bp, probe
gtgtggcagcacgtgtacgagaaga

SEQ ID NO: 245096 - DNA, 25 bp, probe
gtgtgcatcgctgtgtagtgtgaaa

SEQ ID NO: 245097 - DNA, 25 bp, probe
gtgtgctgatgtgggaagtgtttac

SEQ ID NO: 245098 - DNA, 25 bp, probe
gtgtgctattcgtaagttctgtgca

SEQ ID NO: 245099 - DNA, 25 bp, probe
gtgtgctattcgtaagttctgtgca

SEQ ID NO: 245100 - DNA, 25 bp, probe
gtgtgtcttctattataactgcata

SEQ ID NO: 245101 - DNA, 25 bp, probe
gtgtgtcatcctgtgaggactgcaa

SEQ ID NO: 245102 - DNA, 25 bp, probe
gtgggatccacactgagagagtgga

SEQ ID NO: 245103 - DNA, 25 bp, probe
gtgtgggcaccggagggtggaggga

SEQ ID NO: 245104 - DNA, 25 bp, probe
gtggtggtcaccaaggggcgggtga

SEQ ID NO: 245105 - DNA, 25 bp, probe
gtggtgcattctacagcgagaggcg

SEQ ID NO: 245106 - DNA, 25 bp, probe
gtgtgtcctgcatcaagaaggcctc

SEQ ID NO: 245107 - DNA, 25 bp, probe
gtgtgtcctgcatcaagaaggcctc

SEQ ID NO: 245108 - DNA, 25 bp, probe
gtgtgtgtgcgctacaagtcagcct

SEQ ID NO: 245109 - DNA, 25 bp, probe
gtgtggaggaaatggcaatcttatg

SEQ ID NO: 245110 - DNA, 25 bp, probe
gtgggaggcaagtgacccttaacac

SEQ ID NO: 245111 - DNA, 25 bp, probe
gtggggagcaggagatccagtttga

SEQ ID NO: 245112 - DNA, 25 bp, probe
gtgtggagaagccaagcagccagtc

SEQ ID NO: 245113 - DNA, 25 bp, probe
gtgtgcttagcgcaaatggcagctc

SEQ ID NO: 245114 - DNA, 25 bp, probe
gtggtaggccagtagtggcctccca

SEQ ID NO: 245115 - DNA, 25 bp, probe
gtggtcaaggttgtgacctccacag

SEQ ID NO: 245116 - DNA, 25 bp, probe
gtggctcaagggagtcaccttcaat

SEQ ID NO: 245117 - DNA, 25 bp, probe
gtggttagagatgatgcctccattc

SEQ ID NO: 245118 - DNA, 25 bp, probe
gtgggtacatcaagtccatctgaca

SEQ ID NO: 245119 - DNA, 25 bp, probe
gtggagaagccaagcagccagtcaa

SEQ ID NO: 245120 - DNA, 25 bp, probe
gtgtgcatgcaagaggtggcagggg

SEQ ID NO: 245121 - DNA, 25 bp, probe
gtgtgcatgcaagaggtggcagggg

SEQ ID NO: 245122 - DNA, 25 bp, probe
gtgtgcagctctgagggcagagggg

SEQ ID NO: 245123 - DNA, 25 bp, probe
gtgtgagtgcgtatgaaagtgtgtg

SEQ ID NO: 245124 - DNA, 25 bp, probe
gtgtgatttgtgttatactggttgt

SEQ ID NO: 245125 - DNA, 25 bp, probe
gtgtgatttgtgttatactggttgt

SEQ ID NO: 245126 - DNA, 25 bp, probe
gtgtgatcttgtttgtactttcttc

SEQ ID NO: 245127 - DNA, 25 bp, probe
gtgtgcacttgtttaagcgttgact

SEQ ID NO: 245128 - DNA, 25 bp, probe
gtgtgcacttgtttaagcgttgact

SEQ ID NO: 245129 - DNA, 25 bp, probe
gtgtgagtatgtatggatgcgtgga

SEQ ID NO: 245130 - DNA, 25 bp, probe
gtgtggctgtctgcgagattgggcc

SEQ ID NO: 245131 - DNA, 25 bp, probe
gtgtgtctgtgtgtgtgcttgggac

SEQ ID NO: 245132 - DNA, 25 bp, probe
gtgtgtgtgtgtgcaggggtggcag

SEQ ID NO: 245133 - DNA, 25 bp, probe
gtgtgctgtggtgcatggcagcgga

SEQ ID NO: 245134 - DNA, 25 bp, probe
gtgtgctgtggtgcatggcagcgga

SEQ ID NO: 245135 - DNA, 25 bp, probe
gtgtgagctggtggacggtgatgag

SEQ ID NO: 245136 - DNA, 25 bp, probe
gtgtgactcagtgcagagacagata

SEQ ID NO: 245137 - DNA, 25 bp, probe
gtgtgattcatttcaagcaacaaca

SEQ ID NO: 245138 - DNA, 25 bp, probe
gtggttcagtacggctgtaccaata

SEQ ID NO: 245139 - DNA, 25 bp, probe
gtggtacaataccattaaccaaagg

SEQ ID NO: 245140 - DNA, 25 bp, probe
gtggtggcaaaggtttattccagag

SEQ ID NO: 245141 - DNA, 25 bp, probe
gtggtggcaaaggtttattccagag

SEQ ID NO: 245142 - DNA, 25 bp, probe
gtgggccacagagctaaatgtacaa

SEQ ID NO: 245143 - DNA, 25 bp, probe
gtgggtctagacatactatattcag

SEQ ID NO: 245144 - DNA, 25 bp, probe
gtgtgatttaatatacattactgaa

SEQ ID NO: 245145 - DNA, 25 bp, probe
gtgtgtttcagcagaacatcctcgg

SEQ ID NO: 245146 - DNA, 25 bp, probe
gtggtttatgccaaagacatcgctg

SEQ ID NO: 245147 - DNA, 25 bp, probe
gtggtttatgccaaagacatcgctg

SEQ ID NO: 245148 - DNA, 25 bp, probe
gtgggcaactccaaagagcacttgc

SEQ ID NO: 245149 - DNA, 25 bp, probe
gtgggcaagctggccaaaatattgg

SEQ ID NO: 245150 - DNA, 25 bp, probe
gtgtgagctactggcccaagattat

SEQ ID NO: 245151 - DNA, 25 bp, probe
gtgtgtctcacagtgtccaatattc

SEQ ID NO: 245152 - DNA, 25 bp, probe
gtgggcactcaggtgcacatgatac

SEQ ID NO: 245153 - DNA, 25 bp, probe
gtgggcactcaggtgcacatgatac

SEQ ID NO: 245154 - DNA, 25 bp, probe
gtgggagctgtgttactagcactat

SEQ ID NO: 245155 - DNA, 25 bp, probe
gtgtgtgagcatgggtacccatttg

SEQ ID NO: 245156 - DNA, 25 bp, probe
gtgtgtagacacctaacctgtgtgg

SEQ ID NO: 245157 - DNA, 25 bp, probe
gtgtgggggccaaagcctgtgtgag

SEQ ID NO: 245158 - DNA, 25 bp, probe
gtgtgggggccaaagcctgtgtgag

SEQ ID NO: 245159 - DNA, 25 bp, probe
gtggggaggcacagagtttgctgcg

SEQ ID NO: 245160 - DNA, 25 bp, probe
gtggggagcgccggatttgctccca

SEQ ID NO: 245161 - DNA, 25 bp, probe
gtgtggctgacagtctcagtttgcc

SEQ ID NO: 245162 - DNA, 25 bp, probe
gtggtgtcagcactgctgcagtgtg

SEQ ID NO: 245163 - DNA, 25 bp, probe
gtgtgtctgagaatgatggctgtgg

SEQ ID NO: 245164 - DNA, 25 bp, probe
gtgtgttgagaagggccgagtaaag

SEQ ID NO: 245165 - DNA, 25 bp, probe
gtgtgtggcaaaggccgggtgttgg

SEQ ID NO: 245166 - DNA, 25 bp, probe
gtgtggtaacagcctggaggtgttc

SEQ ID NO: 245167 - DNA, 25 bp, probe
gtgtggcaaaggccgggtgttggcc

SEQ ID NO: 245168 - DNA, 25 bp, probe
gtgtgtggagggtatggagtggggc

SEQ ID NO: 245169 - DNA, 25 bp, probe
gtgtggagggtatggagtggggcct

SEQ ID NO: 245170 - DNA, 25 bp, probe
gtgtggacgtgctttgggggaggtc

SEQ ID NO: 245171 - DNA, 25 bp, probe
gtgggactgagtcagcggtggcgag

SEQ ID NO: 245172 - DNA, 25 bp, probe
gtgtggttggtcaaggagggatgtg

SEQ ID NO: 245173 - DNA, 25 bp, probe
gtgtggaagatgacaaggagggtca

SEQ ID NO: 245174 - DNA, 25 bp, probe
gtgggagactggttgcaaggtgtga

SEQ ID NO: 245175 - DNA, 25 bp, probe
gtgtggtagcttgctcaacaggtga

SEQ ID NO: 245176 - DNA, 25 bp, probe
gtgtgagaagttgctctgtgcctgt

SEQ ID NO: 245177 - DNA, 25 bp, probe
gtgtgaaactgtatctgccactcat

SEQ ID NO: 245178 - DNA, 25 bp, probe
gtgtgacatcatagtcctctactgc

SEQ ID NO: 245179 - DNA, 25 bp, probe
gtgtgacatcatagtcctctactgc

SEQ ID NO: 245180 - DNA, 25 bp, probe
gtgtgacaagcaatccgtgcactgc

SEQ ID NO: 245181 - DNA, 25 bp, probe
gtgtgacaagcaatccgtgcactgc

SEQ ID NO: 245182 - DNA, 25 bp, probe
gtgtgagctgagcaggcagtgcacc

SEQ ID NO: 245183 - DNA, 25 bp, probe
gtgtgatgctgaccgttggcactaa

SEQ ID NO: 245184 - DNA, 25 bp, probe
gtgtgatgctgaccgttggcactaa

SEQ ID NO: 245185 - DNA, 25 bp, probe
gtgggcatgatcctgtggaacacag

SEQ ID NO: 245186 - DNA, 25 bp, probe
gtggtgctatctctgaaacgagcgt

SEQ ID NO: 245187 - DNA, 25 bp, probe
gtgggctaggtttcaacctgcgcat

SEQ ID NO: 245188 - DNA, 25 bp, probe
gtgggttgtatcatccaactctatg

SEQ ID NO: 245189 - DNA, 25 bp, probe
gtggggagtcctttcaactcaagga

SEQ ID NO: 245190 - DNA, 25 bp, probe
gtgtggggtgctaaacagatctcag

SEQ ID NO: 245191 - DNA, 25 bp, probe
gtgtgagggctgcctcataagctcc

SEQ ID NO: 245192 - DNA, 25 bp, probe
gtgtgagagccagctcaacagcacc

SEQ ID NO: 245193 - DNA, 25 bp, probe
gtggtgacatgcaccaacagccgta

SEQ ID NO: 245194 - DNA, 25 bp, probe
gtgtgtacacaaccaacagtgatgt

SEQ ID NO: 245195 - DNA, 25 bp, probe
gtgtgtgcaaagtatccatgcggag

SEQ ID NO: 245196 - DNA, 25 bp, probe
gtgggggactggacgagatcagcag

SEQ ID NO: 245197 - DNA, 25 bp, probe
gtgggaggtcatcgaggtgtcctga

SEQ ID NO: 245198 - DNA, 25 bp, probe
gtgggaggtcatcgaggtgtcctga

SEQ ID NO: 245199 - DNA, 25 bp, probe
gtgggagagcctgggcaggatccca

SEQ ID NO: 245200 - DNA, 25 bp, probe
gtgggaagcctcaagtggagccgaa

SEQ ID NO: 245201 - DNA, 25 bp, probe
gtgggttcagctatgtggacctagt

SEQ ID NO: 245202 - DNA, 25 bp, probe
gtggtttactagcaggaatatttcc

SEQ ID NO: 245203 - DNA, 25 bp, probe
gtgtgtgattactagtaggaacatg

SEQ ID NO: 245204 - DNA, 25 bp, probe
gtgggtgaaataaaggcatactgtc

SEQ ID NO: 245205 - DNA, 25 bp, probe
gtggggtgctaaacagatctcagca

SEQ ID NO: 245206 - DNA, 25 bp, probe
gtgtgggagctaatgggaatcagct

SEQ ID NO: 245207 - DNA, 25 bp, probe
gtgtgtggagttatggagacctgct

SEQ ID NO: 245208 - DNA, 25 bp, probe
gtggtcaagccatttggggactctc

SEQ ID NO: 245209 - DNA, 25 bp, probe
gggtaagtattgcctggtgtcatcg

SEQ ID NO: 245210 - DNA, 25 bp, probe
gtgtgtgaagtactgcgtggtgtat

SEQ ID NO: 245211 - DNA, 25 bp, probe
gtgtgtgcaatatgaagctgacttt

SEQ ID NO: 245212 - DNA, 25 bp, probe
gtgtgtgcaatatgaagctgacttt

SEQ ID NO: 245213 - DNA, 25 bp, probe
gtgggcaatgaatatggccattctt

SEQ ID NO: 245214 - DNA, 25 bp, probe
gtgggcgaaatcttgagtcttctga

SEQ ID NO: 245215 - DNA, 25 bp, probe
gtgggtcttcataggcatgtttctg

SEQ ID NO: 245216 - DNA, 25 bp, probe
gtgggctattgccagacactttctg

SEQ ID NO: 245217 - DNA, 25 bp, probe
gggcctgaagtacacattctctgtg

SEQ ID NO: 245218 - DNA, 25 bp, probe
ggtgcttgtagttccagctactcag

SEQ ID NO: 245219 - DNA, 25 bp, probe
gtggttatagcttcccatatgccac

SEQ ID NO: 245220 - DNA, 25 bp, probe
gtggttatagcttcccatatgccac

SEQ ID NO: 245221 - DNA, 25 bp, probe
gtgtgttgaagccgggctcagacac

SEQ ID NO: 245222 - DNA, 25 bp, probe
gtgtgttggatgccctaccatatac

SEQ ID NO: 245223 - DNA, 25 bp, probe
gtgtgttggatgccctaccatatac

SEQ ID NO: 245224 - DNA, 25 bp, probe
gtgtgtatgcattgccctatgcact

SEQ ID NO: 245225 - DNA, 25 bp, probe
gtgtgttctacacctgcatgagtga

SEQ ID NO: 245226 - DNA, 25 bp, probe
gtgtgtttctgatctgatgcaagca

SEQ ID NO: 245227 - DNA, 25 bp, probe
gtgtgtctgagttacttgcagatct

SEQ ID NO: 245228 - DNA, 25 bp, probe
gtgtgtctgagttacttgcagatct

SEQ ID NO: 245229 - DNA, 25 bp, probe
gtgtgtatgttaatatctgatactg

SEQ ID NO: 245230 - DNA, 25 bp, probe
gtgtgtttattttatgatattgcta

SEQ ID NO: 245231 - DNA, 25 bp, probe
gtgtgattttccagaatattgcaat

SEQ ID NO: 245232 - DNA, 25 bp, probe
gtgtgatgtttggattgatatcgtg

SEQ ID NO: 245233 - DNA, 25 bp, probe
gtggtgatatactttgcaactggcg

SEQ ID NO: 245234 - DNA, 25 bp, probe
gtgggactcatctttgcagcaccac

SEQ ID NO: 245235 - DNA, 25 bp, probe
gtgggactcatctttgcagcaccac

SEQ ID NO: 245236 - DNA, 25 bp, probe
gtgggacatcatgacatcatcactg

SEQ ID NO: 245237 - DNA, 25 bp, probe
gtgggccatagcatctctattgtag

SEQ ID NO: 245238 - DNA, 25 bp, probe
gtgtggcctcagaatattttcttga

SEQ ID NO: 245239 - DNA, 25 bp, probe
gtgggtccgataatatctttgtgat

SEQ ID NO: 245240 - DNA, 25 bp, probe
gtgggtccgataatatctttgtgat

SEQ ID NO: 245241 - DNA, 25 bp, probe
gtgggtctgtgaatttctttaatgt

SEQ ID NO: 245242 - DNA, 25 bp, probe
gtgggttggggtgttgtgtatgtat

SEQ ID NO: 245243 - DNA, 25 bp, probe
gtgggggtgggaagtagcctatata

SEQ ID NO: 245244 - DNA, 25 bp, probe
gtgggagtctggataatgaccctga

SEQ ID NO: 245245 - DNA, 25 bp, probe
gtggagtcctagatgaatctaccat

SEQ ID NO: 245246 - DNA, 25 bp, probe
gggcttcaattgagaactccactcc

SEQ ID NO: 245247 - DNA, 25 bp, probe
gtggtccagaagaagctcctgccac

SEQ ID NO: 245248 - DNA, 25 bp, probe
gtggtccagaagaagctcctgccac

SEQ ID NO: 245249 - DNA, 25 bp, probe
gtggtccagaaaagatctgcatccg

SEQ ID NO: 245250 - DNA, 25 bp, probe
gtggtccagaaaagatctgcatccg

SEQ ID NO: 245251 - DNA, 25 bp, probe
gtggtcctaatatcatagatcactt

SEQ ID NO: 245252 - DNA, 25 bp, probe
gtggtccatgctaagtctaacactc

SEQ ID NO: 245253 - DNA, 25 bp, probe
gtgggccaatgaaatctgtaacctc

SEQ ID NO: 245254 - DNA, 25 bp, probe
gtgtgtggaccagaggaaacctcag

SEQ ID NO: 245255 - DNA, 25 bp, probe
gtggaggctttgcaggaaactctca

SEQ ID NO: 245256 - DNA, 25 bp, probe
gtggtgcctgtggagaggtaaagct

SEQ ID NO: 245257 - DNA, 25 bp, probe
gtgggctcttggtgtgatcacatat

SEQ ID NO: 245258 - DNA, 25 bp, probe
gtggtgccgatatgtgagacgaatg

SEQ ID NO: 245259 - DNA, 25 bp, probe
gtggtgccaatcagtggatcaagtt

SEQ ID NO: 245260 - DNA, 25 bp, probe
gtgtgtgcaactgatgtggatgaag

SEQ ID NO: 245261 - DNA, 25 bp, probe
gtgtgtgggcacgtgtggatgagcg

SEQ ID NO: 245262 - DNA, 25 bp, probe
gtggggcagcaccgtgaagacgaat

SEQ ID NO: 245263 - DNA, 25 bp, probe
gtgggagccccaggagagaggcaag

SEQ ID NO: 245264 - DNA, 25 bp, probe
gtgggagacccattggtcaggctca

SEQ ID NO: 245265 - DNA, 25 bp, probe
gtgggagacccattggtcaggctca

SEQ ID NO: 245266 - DNA, 25 bp, probe
gtgtgtatgtacattggtcaggtat

SEQ ID NO: 245267 - DNA, 25 bp, probe
gtgtggtctacgaggtcagggatgg

SEQ ID NO: 245268 - DNA, 25 bp, probe
gtggtgtctcggatggataaggtgg

SEQ ID NO: 245269 - DNA, 25 bp, probe
gtggtgtctcggatggataaggtgg

SEQ ID NO: 245270 - DNA, 25 bp, probe
gtggatgatccggtgctggaaggag

SEQ ID NO: 245271 - DNA, 25 bp, probe
gtggatcacgaggtcgggagttcga

SEQ ID NO: 245272 - DNA, 25 bp, probe
gtggatcaggggacgggatggggta

SEQ ID NO: 245273 - DNA, 25 bp, probe
gtggtagggaagcagtatgggtgca

SEQ ID NO: 245274 - DNA, 25 bp, probe
gtggatggggtactacaacgggcac

SEQ ID NO: 245275 - DNA, 25 bp, probe
gtggtgggggtgtgcagaatgggcc

SEQ ID NO: 245276 - DNA, 25 bp, probe
gtgggtggggtgaagagatcttgtg

SEQ ID NO: 245277 - DNA, 25 bp, probe
gtggggatttgtaagacttagatga

SEQ ID NO: 245278 - DNA, 25 bp, probe
gtggggagtaggttgcatctttgtt

SEQ ID NO: 245279 - DNA, 25 bp, probe
gtggggagtaggttgcatctttgtt

SEQ ID NO: 245280 - DNA, 25 bp, probe
gtgtggtgacttgcggatttatgtt

SEQ ID NO: 245281 - DNA, 25 bp, probe
gtggggagctcttcggaaaaattag

SEQ ID NO: 245282 - DNA, 25 bp, probe
gtgggccagccttatggaaagactc

SEQ ID NO: 245283 - DNA, 25 bp, probe
gtgggcagaactttcccaagcccaa

SEQ ID NO: 245284 - DNA, 25 bp, probe
gtggagagcacagagtcccagatcc

SEQ ID NO: 245285 - DNA, 25 bp, probe
gtgggccacacaagtgcagtagtgc

SEQ ID NO: 245286 - DNA, 25 bp, probe
gtgggcagcccaaaagatcaggggt

SEQ ID NO: 245287 - DNA, 25 bp, probe
gtgggcacatcagcaaaggcaaggg

SEQ ID NO: 245288 - DNA, 25 bp, probe
gtgggtctcgggcaggtagggacct

SEQ ID NO: 245289 - DNA, 25 bp, probe
gtggttcaagggcaggtagctgatg

SEQ ID NO: 245290 - DNA, 25 bp, probe
gtgggtaaggagcatcagccatgta

SEQ ID NO: 245291 - DNA, 25 bp, probe
gtggtctgatcatagaacaccttag

SEQ ID NO: 245292 - DNA, 25 bp, probe
gtggtctgatcatagaacaccttag

SEQ ID NO: 245293 - DNA, 25 bp, probe
gtggttgtcttacattctttttctt

SEQ ID NO: 245294 - DNA, 25 bp, probe
gtgtgtagactgtaactttttttca

SEQ ID NO: 245295 - DNA, 25 bp, probe
gtgtgtcgacatcagttgtgtgtgg

SEQ ID NO: 245296 - DNA, 25 bp, probe
gtgtgtccagcactcgattgttgta

SEQ ID NO: 245297 - DNA, 25 bp, probe
gtgtgtccaggaaattttgcaacgt

SEQ ID NO: 245298 - DNA, 25 bp, probe
gtgtgtaagtgtttgtttccaggat

SEQ ID NO: 245299 - DNA, 25 bp, probe
gtgtgtaaggtggcctattcctctg

SEQ ID NO: 245300 - DNA, 25 bp, probe
gtgtggatagtgccacttcaccttt

SEQ ID NO: 245301 - DNA, 25 bp, probe
gtgtgtgaagtgacctatgacaaaa

SEQ ID NO: 245302 - DNA, 25 bp, probe
gtgtgtgtatgctactacaaaaaag

SEQ ID NO: 245303 - DNA, 25 bp, probe
gggctggaatatctgcataaaaatg

SEQ ID NO: 245304 - DNA, 25 bp, probe
gtggtctgccaatctgtacaaaatg

SEQ ID NO: 245305 - DNA, 25 bp, probe
gtgtgtcgcccaggcgacaaaagtg

SEQ ID NO: 245306 - DNA, 25 bp, probe
gtggattctcttacagacaaagagt

SEQ ID NO: 245307 - DNA, 25 bp, probe
gtggttctgtaatgccaaaaggaat

SEQ ID NO: 245308 - DNA, 25 bp, probe
gtggttctgtaatgccaaaaggaat

SEQ ID NO: 245309 - DNA, 25 bp, probe
gtggttcggaagtctaagcagggca

SEQ ID NO: 245310 - DNA, 25 bp, probe
gtggttcggaagtctaagcagggca

SEQ ID NO: 245311 - DNA, 25 bp, probe
gtggttgccaaaagtggagcgagga

SEQ ID NO: 245312 - DNA, 25 bp, probe
gggacagccaaaagtaagtggagca

SEQ ID NO: 245313 - DNA, 25 bp, probe
gggacagccaaaagtaagtggagca

SEQ ID NO: 245314 - DNA, 25 bp, probe
gtggacaccctatttagtgatggaa

SEQ ID NO: 245315 - DNA, 25 bp, probe
gtggaagtccgactgggcagtggaa

SEQ ID NO: 245316 - DNA, 25 bp, probe
gtggcacgtgacagctagggttcaa

SEQ ID NO: 245317 - DNA, 25 bp, probe
gtggactggatcaacgaccggatac

SEQ ID NO: 245318 - DNA, 25 bp, probe
gtggcactaacctgcttgggtatgc

SEQ ID NO: 245319 - DNA, 25 bp, probe
gtggcactaacctgcttgggtatgc

SEQ ID NO: 245320 - DNA, 25 bp, probe
gtggcttacacctcactgtggtgtc

SEQ ID NO: 245321 - DNA, 25 bp, probe
gtggcttacacctcactgtggtgtc

SEQ ID NO: 245322 - DNA, 25 bp, probe
gtggtgaagatctgtgactttggcc

SEQ ID NO: 245323 - DNA, 25 bp, probe
gtgtgtgaactcctatacttttgac

SEQ ID NO: 245324 - DNA, 25 bp, probe
gtgtggaaccagggagctgtgggaa

SEQ ID NO: 245325 - DNA, 25 bp, probe
gtggtcaccaaggggcgggtgaagc

SEQ ID NO: 245326 - DNA, 25 bp, probe
gtggaaccagggagctgtgggaagc

SEQ ID NO: 245327 - DNA, 25 bp, probe
gtgggggcaggtagggggagatggc

SEQ ID NO: 245328 - DNA, 25 bp, probe
gtgggggcaggtagggggagatggc

SEQ ID NO: 245329 - DNA, 25 bp, probe
gtgggttcaggcgaagggtgaagcc

SEQ ID NO: 245330 - DNA, 25 bp, probe
gtgggcttgtgacacggactcaagt

SEQ ID NO: 245331 - DNA, 25 bp, probe
gtgggctttgcctaaggacacacaa

SEQ ID NO: 245332 - DNA, 25 bp, probe
gtgtgtgcttatgtatgaggtacaa

SEQ ID NO: 245333 - DNA, 25 bp, probe
gtggtgcttaccatgtgggagcagt

SEQ ID NO: 245334 - DNA, 25 bp, probe
gtggtgcgaaccagcattaacggat

SEQ ID NO: 245335 - DNA, 25 bp, probe
gtggtggatttcacttacaagaaaa

SEQ ID NO: 245336 - DNA, 25 bp, probe
gtggtagatttcggttagcagataa

SEQ ID NO: 245337 - DNA, 25 bp, probe
gtggtattagacactttgattaagt

SEQ ID NO: 245338 - DNA, 25 bp, probe
gtgggattaacaaccctggaagagt

SEQ ID NO: 245339 - DNA, 25 bp, probe
gtgtgtgtgtaacagacactggata

SEQ ID NO: 245340 - DNA, 25 bp, probe
gtgtgtgtgtaacagacactggata

SEQ ID NO: 245341 - DNA, 25 bp, probe
gtgtggtccagaaatgtactgtgta

SEQ ID NO: 245342 - DNA, 25 bp, probe
gtgtggtccagaaatgtactgtgta

SEQ ID NO: 245343 - DNA, 25 bp, probe
gtgtgggctgtgagtgtaagtgtga

SEQ ID NO: 245344 - DNA, 25 bp, probe
gtgtggactgtgagtgggtcattgt

SEQ ID NO: 245345 - DNA, 25 bp, probe
gtggtgagcggtttgcagtgtccgt

SEQ ID NO: 245346 - DNA, 25 bp, probe
gtgggaggtgtctcgagagaagatc

SEQ ID NO: 245347 - DNA, 25 bp, probe
gtggtgcacgtgaaccaggaggacc

SEQ ID NO: 245348 - DNA, 25 bp, probe
gtggtgccagttgccagggcaagtc

SEQ ID NO: 245349 - DNA, 25 bp, probe
gtgtgtggggatggccacgtgaagc

SEQ ID NO: 245350 - DNA, 25 bp, probe
gtgtgtggacagaatcccgtgatca

SEQ ID NO: 245351 - DNA, 25 bp, probe
gtgtgtgggcaatcccaggaagaca

SEQ ID NO: 245352 - DNA, 25 bp, probe
gtggatggagaaccccaataataac

SEQ ID NO: 245353 - DNA, 25 bp, probe
gtggatagaacgcaaacaacttgat

SEQ ID NO: 245354 - DNA, 25 bp, probe
gtggaaagtgccgaaaccgtgctga

SEQ ID NO: 245355 - DNA, 25 bp, probe
gtgggaagatcacttgaacctggga

SEQ ID NO: 245356 - DNA, 25 bp, probe
gtgggaaatcttctcacttggtgtg

SEQ ID NO: 245357 - DNA, 25 bp, probe
gtgtggacaattggttactggcttt

SEQ ID NO: 245358 - DNA, 25 bp, probe
gtgtggcctataagttccgattggt

SEQ ID NO: 245359 - DNA, 25 bp, probe
gtggagctctaagatctcctttaga

SEQ ID NO: 245360 - DNA, 25 bp, probe
gtgggcttcagatgagtcctatggg

SEQ ID NO: 245361 - DNA, 25 bp, probe
gtggtcggcaatggaacctacggac

SEQ ID NO: 245362 - DNA, 25 bp, probe
gtggtctggactgaacttccagaac

SEQ ID NO: 245363 - DNA, 25 bp, probe
gtggatgtaaatggaacttctgcaa

SEQ ID NO: 245364 - DNA, 25 bp, probe
gtggatgctaagaagagtgttgcta

SEQ ID NO: 245365 - DNA, 25 bp, probe
gtggtgcacaacgagaggaagctct

SEQ ID NO: 245366 - DNA, 25 bp, probe
gtggtgcacaaggactggaactcca

SEQ ID NO: 245367 - DNA, 25 bp, probe
gtggactatggcgacatggtcccca

SEQ ID NO: 245368 - DNA, 25 bp, probe
gtggatttctgagctctatccaggg

SEQ ID NO: 245369 - DNA, 25 bp, probe
gtggttagctcaaccaatggagagc

SEQ ID NO: 245370 - DNA, 25 bp, probe
gtggttagctcaaccaatggagagc

SEQ ID NO: 245371 - DNA, 25 bp, probe
gtgggatatccaccctttgagagcg

SEQ ID NO: 245372 - DNA, 25 bp, probe
gtgggaacaacagcttatatggcac

SEQ ID NO: 245373 - DNA, 25 bp, probe
gtgggatacctgcgcttgaaggaca

SEQ ID NO: 245374 - DNA, 25 bp, probe
gtgggatacctgcgcttgaaggaca

SEQ ID NO: 245375 - DNA, 25 bp, probe
gtggcgagacaaggccttggggaca

SEQ ID NO: 245376 - DNA, 25 bp, probe
gtggcggtcaatagccgtggtgttc

SEQ ID NO: 245377 - DNA, 25 bp, probe
gtggcggtcaatagccgtggtgttc

SEQ ID NO: 245378 - DNA, 25 bp, probe
gtggtggctcttaaggaggtgttcc

SEQ ID NO: 245379 - DNA, 25 bp, probe
gtgggacctagactctagagttctg

SEQ ID NO: 245380 - DNA, 25 bp, probe
gtgggacctagactctagagttctg

SEQ ID NO: 245381 - DNA, 25 bp, probe
gtggggactgaacctggaagatcat

SEQ ID NO: 245382 - DNA, 25 bp, probe
gtgggggataagtcttttgtcatca

SEQ ID NO: 245383 - DNA, 25 bp, probe
gtgggcatgtcatgtgtcttttcct

SEQ ID NO: 245384 - DNA, 25 bp, probe
gtggttgtgcggatccgcatcttct

SEQ ID NO: 245385 - DNA, 25 bp, probe
gtggtctgtgttgtcctgacatgta

SEQ ID NO: 245386 - DNA, 25 bp, probe
gtgtggtggttgtattggagcaggg

SEQ ID NO: 245387 - DNA, 25 bp, probe
gtgggtgtgttgtcatagagatggt

SEQ ID NO: 245388 - DNA, 25 bp, probe
gtgtggctgtgaggtcagggtttta

SEQ ID NO: 245389 - DNA, 25 bp, probe
gtggtctgaggggcagtagttgatg

SEQ ID NO: 245390 - DNA, 25 bp, probe
gtgtgtggaggaacgtggctatgag

SEQ ID NO: 245391 - DNA, 25 bp, probe
gtgtggtggggagggggatgaggag

SEQ ID NO: 245392 - DNA, 25 bp, probe
gtgtggtgcagggatcctgatgtgg

SEQ ID NO: 245393 - DNA, 25 bp, probe
gtggtgcatgtggagacactggggc

SEQ ID NO: 245394 - DNA, 25 bp, probe
gtggggatgaagtcctgtactgcta

SEQ ID NO: 245395 - DNA, 25 bp, probe
gtgtgggatgtattcctctaactat

SEQ ID NO: 245396 - DNA, 25 bp, probe
gtggattttttgcctctagacatat

SEQ ID NO: 245397 - DNA, 25 bp, probe
gtggatgtttcttgatgtgcagaac

SEQ ID NO: 245398 - DNA, 25 bp, probe
gtggagatttcctgtgagaacatgc

SEQ ID NO: 245399 - DNA, 25 bp, probe
gtggtgctatgtggccgggaagcct

SEQ ID NO: 245400 - DNA, 25 bp, probe
gtggtgaagtcacaggtgcaagccc

SEQ ID NO: 245401 - DNA, 25 bp, probe
gtgggaacattcgaggtgtcaccct

SEQ ID NO: 245402 - DNA, 25 bp, probe
gtgggagactttggcagtgccacct

SEQ ID NO: 245403 - DNA, 25 bp, probe
gtgggaactgttcagtggcctgtga

SEQ ID NO: 245404 - DNA, 25 bp, probe
gtgggaactgttctctgtgacatca

SEQ ID NO: 245405 - DNA, 25 bp, probe
gtgggaggtggttttctgactgaga

SEQ ID NO: 245406 - DNA, 25 bp, probe
gtgggaggtggttttctgactgaga

SEQ ID NO: 245407 - DNA, 25 bp, probe
gtggagagtgtggtcacctggattg

SEQ ID NO: 245408 - DNA, 25 bp, probe
gtggaggcggtaaatctgaagtggg

SEQ ID NO: 245409 - DNA, 25 bp, probe
gtgggaggttcaaacaagagtgggc

SEQ ID NO: 245410 - DNA, 25 bp, probe
gtgggcaggtatcaacattggggaa

SEQ ID NO: 245411 - DNA, 25 bp, probe
gtgggcaggtatcaacattggggaa

SEQ ID NO: 245412 - DNA, 25 bp, probe
gtggtgggattttcctgtgatggga

SEQ ID NO: 245413 - DNA, 25 bp, probe
gtggggaggcctagtttgggtgcaa

SEQ ID NO: 245414 - DNA, 25 bp, probe
gtggggaggtcacctttgggtgtgc

SEQ ID NO: 245415 - DNA, 25 bp, probe
gtggccgaggaaggctacggcgtgg

SEQ ID NO: 245416 - DNA, 25 bp, probe
gtggtaaggacaggtggaagtgtgg

SEQ ID NO: 245417 - DNA, 25 bp, probe
gtggtcagctgggcaagtggaaggg

SEQ ID NO: 245418 - DNA, 25 bp, probe
gtggtcagcatgcacaggagctcca

SEQ ID NO: 245419 - DNA, 25 bp, probe
gtggtcagcatgcacaggagctcca

SEQ ID NO: 245420 - DNA, 25 bp, probe
gtggaccaggacaggaccagatttt

SEQ ID NO: 245421 - DNA, 25 bp, probe
gtggactcaggacttcagaagcaac

SEQ ID NO: 245422 - DNA, 25 bp, probe
gtggactcaggacttcagaagcaac

SEQ ID NO: 245423 - DNA, 25 bp, probe
gtgggcagaatacttctcacagctc

SEQ ID NO: 245424 - DNA, 25 bp, probe
gtgggcagaatacttctcacagctc

SEQ ID NO: 245425 - DNA, 25 bp, probe
gtgggcagagacgtgaccaagccat

SEQ ID NO: 245426 - DNA, 25 bp, probe
gtgggcagagcaaaagacatcaaat

SEQ ID NO: 245427 - DNA, 25 bp, probe
gtggtgcgtgcatggagatcccaat

SEQ ID NO: 245428 - DNA, 25 bp, probe
gtggaggtgaaggactctgccaaac

SEQ ID NO: 245429 - DNA, 25 bp, probe
gtggaggtgaaggactctgccaaac

SEQ ID NO: 245430 - DNA, 25 bp, probe
gtgtggcggaagaacctgcaggata

SEQ ID NO: 245431 - DNA, 25 bp, probe
gtgggggtcagatgcactgaagtag

SEQ ID NO: 245432 - DNA, 25 bp, probe
gtgggtggcctgtatctagaagcta

SEQ ID NO: 245433 - DNA, 25 bp, probe
gtgggtggcctgtatctagaagcta

SEQ ID NO: 245434 - DNA, 25 bp, probe
gtggggtgagctttatagccagtag

SEQ ID NO: 245435 - DNA, 25 bp, probe
gtggtgtgtacatgttccgcatgga

SEQ ID NO: 245436 - DNA, 25 bp, probe
gtgggcctgagaacttcaccacgat

SEQ ID NO: 245437 - DNA, 25 bp, probe
gtggagggaatacctgcacccgaaa

SEQ ID NO: 245438 - DNA, 25 bp, probe
gtggatgaggactaccatctgaccg

SEQ ID NO: 245439 - DNA, 25 bp, probe
gtgtggatgaactactcctacagca

SEQ ID NO: 245440 - DNA, 25 bp, probe
gtgtggatgaactactcctacagca

SEQ ID NO: 245441 - DNA, 25 bp, probe
gtgggtggcacatgcttataacagc

SEQ ID NO: 245442 - DNA, 25 bp, probe
gtggatttccaccttgatggcatca

SEQ ID NO: 245443 - DNA, 25 bp, probe
gtggagttgtccatcgtgacatcaa

SEQ ID NO: 245444 - DNA, 25 bp, probe
gtggagttgtccatcgtgacatcaa

SEQ ID NO: 245445 - DNA, 25 bp, probe
gtgggattcttgcatcgagacatca

SEQ ID NO: 245446 - DNA, 25 bp, probe
gtgggagtcttgaaatgtcacagta

SEQ ID NO: 245447 - DNA, 25 bp, probe
gtgggagtactgagatgtgtgggtt

SEQ ID NO: 245448 - DNA, 25 bp, probe
gtgtggaggactttgcaggggatat

SEQ ID NO: 245449 - DNA, 25 bp, probe
gtggggaggctgctgaggggtagca

SEQ ID NO: 245450 - DNA, 25 bp, probe
gtgggccagggactggtggtcaaga

SEQ ID NO: 245451 - DNA, 25 bp, probe
gtgtggcatcgcagaatggcgagga

SEQ ID NO: 245452 - DNA, 25 bp, probe
gtgtggagccttacatactgggaga

SEQ ID NO: 245453 - DNA, 25 bp, probe
gtgggagactgtacacattggtggt

SEQ ID NO: 245454 - DNA, 25 bp, probe
gtgggagatcttgactttaccttgg

SEQ ID NO: 245455 - DNA, 25 bp, probe
gtgggagatcttgactttaccttgg

SEQ ID NO: 245456 - DNA, 25 bp, probe
gtgggagcaattaacatccgactct

SEQ ID NO: 245457 - DNA, 25 bp, probe
gtgggcactttcaagatgcggcaca

SEQ ID NO: 245458 - DNA, 25 bp, probe
gtggtcctttgcaagagcgcagacc

SEQ ID NO: 245459 - DNA, 25 bp, probe
gtggtgcatctgagccagtctcaga

SEQ ID NO: 245460 - DNA, 25 bp, probe
gtgggcaccgagaatgtgcacagac

SEQ ID NO: 245461 - DNA, 25 bp, probe
gtgggcaggtggtggcactgagccc

SEQ ID NO: 245462 - DNA, 25 bp, probe
gtgggggtgcaaggagactgtctgc

SEQ ID NO: 245463 - DNA, 25 bp, probe
gtgggtggtcactgagaccactccc

SEQ ID NO: 245464 - DNA, 25 bp, probe
gtgggtgtccagtccaggacactgg

SEQ ID NO: 245465 - DNA, 25 bp, probe
gtgggtgctgaaccatgaggacctg

SEQ ID NO: 245466 - DNA, 25 bp, probe
gtgggtgcagttcagcaagatcctg

SEQ ID NO: 245467 - DNA, 25 bp, probe
gtgggctcagagtctagcaaatgct

SEQ ID NO: 245468 - DNA, 25 bp, probe
gtgggctgcattctggctgagatgc

SEQ ID NO: 245469 - DNA, 25 bp, probe
gtgggctgtatcatggcagagatgc

SEQ ID NO: 245470 - DNA, 25 bp, probe
gtgggctgtatcatggcagagatgc

SEQ ID NO: 245471 - DNA, 25 bp, probe
gtgggatgctgacaggcagaagctg

SEQ ID NO: 245472 - DNA, 25 bp, probe
gtgggcatgctaagggcaaggctta

SEQ ID NO: 245473 - DNA, 25 bp, probe
gtggtcattggaaggccaggtccag

SEQ ID NO: 245474 - DNA, 25 bp, probe
gtggtgattagaaacatcaggtcct

SEQ ID NO: 245475 - DNA, 25 bp, probe
gtgggattttcaacatctggttcat

SEQ ID NO: 245476 - DNA, 25 bp, probe
gtggatgatttctggcagatggttt

SEQ ID NO: 245477 - DNA, 25 bp, probe
gtggtcatctactgggttgatttca

SEQ ID NO: 245478 - DNA, 25 bp, probe
gtggtcatctactgggttgatttca

SEQ ID NO: 245479 - DNA, 25 bp, probe
gtggcatcattataaggcttaattg

SEQ ID NO: 245480 - DNA, 25 bp, probe
gtggcatcattataaggcttaattg

SEQ ID NO: 245481 - DNA, 25 bp, probe
gtggactaacaacagctgtaggctg

SEQ ID NO: 245482 - DNA, 25 bp, probe
gtggccatcaaaaccctgaagcctg

SEQ ID NO: 245483 - DNA, 25 bp, probe
gtggcctctatgaatcccatgtagg

SEQ ID NO: 245484 - DNA, 25 bp, probe
gtggcacccagggcgaatggggccc

SEQ ID NO: 245485 - DNA, 25 bp, probe
gtggatcctcggcagagggggcagc

SEQ ID NO: 245486 - DNA, 25 bp, probe
gtggacgctacacagtgggtggttt

SEQ ID NO: 245487 - DNA, 25 bp, probe
gtggagctttctgaatagggaggtt

SEQ ID NO: 245488 - DNA, 25 bp, probe
gtggactattcggacaagtacggcc

SEQ ID NO: 245489 - DNA, 25 bp, probe
gtggagaatcggcccaagtatgcgg

SEQ ID NO: 245490 - DNA, 25 bp, probe
gtgggagagtggctgcactgtcatc

SEQ ID NO: 245491 - DNA, 25 bp, probe
gtggtggaggagcgcaccacgctga

SEQ ID NO: 245492 - DNA, 25 bp, probe
gtggggaagaagtcgcgcacgatgg

SEQ ID NO: 245493 - DNA, 25 bp, probe
gtggggaatgcaactctgctcagga

SEQ ID NO: 245494 - DNA, 25 bp, probe
gtggggatagaggcgctgtaggagc

SEQ ID NO: 245495 - DNA, 25 bp, probe
gtggtggtgcatggccgttcttagt

SEQ ID NO: 245496 - DNA, 25 bp, probe
gtggagtgtgcatccagtattctgg

SEQ ID NO: 245497 - DNA, 25 bp, probe
gtggaggtaacacagatgtctacaa

SEQ ID NO: 245498 - DNA, 25 bp, probe
gtggaggtaacacagatgtctacaa

SEQ ID NO: 245499 - DNA, 25 bp, probe
gtggggtgaacagctggtgccaaat

SEQ ID NO: 245500 - DNA, 25 bp, probe
gtgggtggaatcacggtgacacaga

SEQ ID NO: 245501 - DNA, 25 bp, probe
gtgggtgtttcctgagtgacacaga

SEQ ID NO: 245502 - DNA, 25 bp, probe
gtgggattattgaatgggtgaacaa

SEQ ID NO: 245503 - DNA, 25 bp, probe
gtgggtgtaggttacctgccacttc

SEQ ID NO: 245504 - DNA, 25 bp, probe
gtggtggtcctgatagttcgcacat

SEQ ID NO: 245505 - DNA, 25 bp, probe
gtggtggtcctgatagttcgcacat

SEQ ID NO: 245506 - DNA, 25 bp, probe
gtggatggtcacgatgtagttatag

SEQ ID NO: 245507 - DNA, 25 bp, probe
gtggatcgtcatgtatacttacggc

SEQ ID NO: 245508 - DNA, 25 bp, probe
gtggacgtagtcctctttaaggata

SEQ ID NO: 245509 - DNA, 25 bp, probe
gtggacttagtagttttaagcagaa

SEQ ID NO: 245510 - DNA, 25 bp, probe
gtggacgactaagattaatgaatgt

SEQ ID NO: 245511 - DNA, 25 bp, probe
gtggacgactaagattaatgaatgt

SEQ ID NO: 245512 - DNA, 25 bp, probe
gtggttggtccagatatgtagtagc

SEQ ID NO: 245513 - DNA, 25 bp, probe
gtggttggtccagatatgtagtagc

SEQ ID NO: 245514 - DNA, 25 bp, probe
gtggtctagtcctttataccgactc

SEQ ID NO: 245515 - DNA, 25 bp, probe
gtggttcattcctttcagccatcgt

SEQ ID NO: 245516 - DNA, 25 bp, probe
gtggtacaagccttggggactgaaa

SEQ ID NO: 245517 - DNA, 25 bp, probe
gtggtcggcgccaggtggaaaaaca

SEQ ID NO: 245518 - DNA, 25 bp, probe
gtggttttggcgagtgagaaacaac

SEQ ID NO: 245519 - DNA, 25 bp, probe
gtggtttggggcagatctgtagtaa

SEQ ID NO: 245520 - DNA, 25 bp, probe
gtgggtttagaaagactgaagtgac

SEQ ID NO: 245521 - DNA, 25 bp, probe
gtgggtttagaaagactgaagtgac

SEQ ID NO: 245522 - DNA, 25 bp, probe
gtgggctttcagaagagactcaagt

SEQ ID NO: 245523 - DNA, 25 bp, probe
gtggcaattgggagatactgatact

SEQ ID NO: 245524 - DNA, 25 bp, probe
gtggcattggacgggtaagtcagtg

SEQ ID NO: 245525 - DNA, 25 bp, probe
gtgggtgtgagagtggacggtatgt

SEQ ID NO: 245526 - DNA, 25 bp, probe
gtgggtgtgagtgggggcttgatta

SEQ ID NO: 245527 - DNA, 25 bp, probe
gtggagttgtgtgtggagttatgga

SEQ ID NO: 245528 - DNA, 25 bp, probe
gtggggtgttcttggaatatcttgt

SEQ ID NO: 245529 - DNA, 25 bp, probe
gtggtggttactggaattctgtttc

SEQ ID NO: 245530 - DNA, 25 bp, probe
tgtagggttacggaactcaactgaa

SEQ ID NO: 245531 - DNA, 25 bp, probe
tgttggttttcggaactgaggccat

SEQ ID NO: 245532 - DNA, 25 bp, probe
gtgggtcttttcaaacatagacaat

SEQ ID NO: 245533 - DNA, 25 bp, probe
gtggggcttccctaagcataaagat

SEQ ID NO: 245534 - DNA, 25 bp, probe
gtggcaccatttcctaaagtaactg

SEQ ID NO: 245535 - DNA, 25 bp, probe
gtggacctagtggaagggttacatg

SEQ ID NO: 245536 - DNA, 25 bp, probe
gtggagccttgttaagggactcaat

SEQ ID NO: 245537 - DNA, 25 bp, probe
gtggacccggacaaggatgaccaga

SEQ ID NO: 245538 - DNA, 25 bp, probe
gtggacccgaaaggagggcagagag

SEQ ID NO: 245539 - DNA, 25 bp, probe
gtggagaaagaatcgagtggtgaaa

SEQ ID NO: 245540 - DNA, 25 bp, probe
gtgggaggaggagagatgggtgaag

SEQ ID NO: 245541 - DNA, 25 bp, probe
gtgggggcaaggcagtagtggacag

SEQ ID NO: 245542 - DNA, 25 bp, probe
gtgggtaaaggcagccaggcgtgag

SEQ ID NO: 245543 - DNA, 25 bp, probe
ggtgggacacggagtttgcgtttga

SEQ ID NO: 245544 - DNA, 25 bp, probe
gggaacaactcgagctttgaggctt

SEQ ID NO: 245545 - DNA, 25 bp, probe
gggaatgaacttccgctttggtgct

SEQ ID NO: 245546 - DNA, 25 bp, probe
gtggataaacaggcactcttgtggg

SEQ ID NO: 245547 - DNA, 25 bp, probe
gtggataaacaggcactcttgtggg

SEQ ID NO: 245548 - DNA, 25 bp, probe
gtgggaagtcatgtcatttggagag

SEQ ID NO: 245549 - DNA, 25 bp, probe
gtgggaagcattctcctatgggcag

SEQ ID NO: 245550 - DNA, 25 bp, probe
gtgggagatcattactcgggggcag

SEQ ID NO: 245551 - DNA, 25 bp, probe
gtgggagatcattactcgggggcag

SEQ ID NO: 245552 - DNA, 25 bp, probe
gtgggagaagattctctgggggtcc

SEQ ID NO: 245553 - DNA, 25 bp, probe
gtgggatcacagaaatctggaaaaa

SEQ ID NO: 245554 - DNA, 25 bp, probe
gtggagatactttttggcgagaaaa

SEQ ID NO: 245555 - DNA, 25 bp, probe
gtggtgtggatcagttggtagaaat

SEQ ID NO: 245556 - DNA, 25 bp, probe
gtggtgtggatcagttggtagaaat

SEQ ID NO: 245557 - DNA, 25 bp, probe
gtggtgctggtttatgttctaggaa

SEQ ID NO: 245558 - DNA, 25 bp, probe
gtggtgtggagatactcttagagaa

SEQ ID NO: 245559 - DNA, 25 bp, probe
gtggtgctgggccagcacttcttca

SEQ ID NO: 245560 - DNA, 25 bp, probe
gggcctgcagaccatggttgttaat

SEQ ID NO: 245561 - DNA, 25 bp, probe
ggtgaccaattctgttttactaaat

SEQ ID NO: 245562 - DNA, 25 bp, probe
ggtcccaaacatcaatttcttaaca

SEQ ID NO: 245563 - DNA, 25 bp, probe
ggcctcctaagtctaatatttaaga

SEQ ID NO: 245564 - DNA, 25 bp, probe
gtggcccgaaatcgtagtgcttgta

SEQ ID NO: 245565 - DNA, 25 bp, probe
gtggtctccttacaatgagcttgga

SEQ ID NO: 245566 - DNA, 25 bp, probe
gtggatctcatcttactgtagtgtc

SEQ ID NO: 245567 - DNA, 25 bp, probe
gtggtctatgttggcgtctggatcc

SEQ ID NO: 245568 - DNA, 25 bp, probe
gtggtatcagtgggcgattggctcc

SEQ ID NO: 245569 - DNA, 25 bp, probe
gtgggtcatgtgaagcgaattctcc

SEQ ID NO: 245570 - DNA, 25 bp, probe
gtgggtcagggggagtctttgcacc

SEQ ID NO: 245571 - DNA, 25 bp, probe
gtgggtcagggggagtctttgcacc

SEQ ID NO: 245572 - DNA, 25 bp, probe
gtggcaaaggccgggtgttggccgg

SEQ ID NO: 245573 - DNA, 25 bp, probe
gtgggagaggccctggttgaagccc

SEQ ID NO: 245574 - DNA, 25 bp, probe
gtggatggacgctgggcttgaattc

SEQ ID NO: 245575 - DNA, 25 bp, probe
gtggggagcacatgggttataatga

SEQ ID NO: 245576 - DNA, 25 bp, probe
gtggggcaggaacggtggaggcaga

SEQ ID NO: 245577 - DNA, 25 bp, probe
ggacggggagggaggaggcagcgac

SEQ ID NO: 245578 - DNA, 25 bp, probe
gggcggggagggtgacagtggccgc

SEQ ID NO: 245579 - DNA, 25 bp, probe
gggcggggagggtgacagtggccgc

SEQ ID NO: 245580 - DNA, 25 bp, probe
gggcggcggtgggaaaaggtgtcag

SEQ ID NO: 245581 - DNA, 25 bp, probe
gggcgggtgtggggcatttaggcca

SEQ ID NO: 245582 - DNA, 25 bp, probe
gggcgggtgtggggcatttaggcca

SEQ ID NO: 245583 - DNA, 25 bp, probe
ggcctaggcaggaggcctggaaccc

SEQ ID NO: 245584 - DNA, 25 bp, probe
gggctgaggaggaggttaaaggcca

SEQ ID NO: 245585 - DNA, 25 bp, probe
gggctgaggaggaggttaaaggcca

SEQ ID NO: 245586 - DNA, 25 bp, probe
ggggcagctgggtggttaaagttca

SEQ ID NO: 245587 - DNA, 25 bp, probe
gtgggactcccatggttgtaaataa

SEQ ID NO: 245588 - DNA, 25 bp, probe
gtggataacacctgcttttcaaata

SEQ ID NO: 245589 - DNA, 25 bp, probe
gtggactgaaccgacttttctaaag

SEQ ID NO: 245590 - DNA, 25 bp, probe
gtggacaggcaccaatttctttaaa

SEQ ID NO: 245591 - DNA, 25 bp, probe
gtggacaggcaccaatttctttaaa

SEQ ID NO: 245592 - DNA, 25 bp, probe
gtggatagtgaccaactctgtgttg

SEQ ID NO: 245593 - DNA, 25 bp, probe
gtggatctgtttaacgtggctctgc

SEQ ID NO: 245594 - DNA, 25 bp, probe
gtggatctgtttaacgtggctctgc

SEQ ID NO: 245595 - DNA, 25 bp, probe
gtggtgcagtatatcaagaggctag

SEQ ID NO: 245596 - DNA, 25 bp, probe
gtggggcagatgatctaaatgaaga

SEQ ID NO: 245597 - DNA, 25 bp, probe
gtggtggcagagtctcaaagctgag

SEQ ID NO: 245598 - DNA, 25 bp, probe
gtgggaggctgaggcagcagactgg

SEQ ID NO: 245599 - DNA, 25 bp, probe
gtggtgaggcacaggatgactaggg

SEQ ID NO: 245600 - DNA, 25 bp, probe
gtggtaaccaggctgcgatcatgga

SEQ ID NO: 245601 - DNA, 25 bp, probe
gtggtagcaccacttctgatgagat

SEQ ID NO: 245602 - DNA, 25 bp, probe
gtggtatgcctgatcacagatggat

SEQ ID NO: 245603 - DNA, 25 bp, probe
gtggtatccattacacaatagacta

SEQ ID NO: 245604 - DNA, 25 bp, probe
gtggatacctctagtgcaatttata

SEQ ID NO: 245605 - DNA, 25 bp, probe
gtggatcacttgctatccattaaga

SEQ ID NO: 245606 - DNA, 25 bp, probe
gtggtctcaggatatccttatcaga

SEQ ID NO: 245607 - DNA, 25 bp, probe
gtggtggaggcagcactgttacaga

SEQ ID NO: 245608 - DNA, 25 bp, probe
gtggggagacaagctgatttgcagc

SEQ ID NO: 245609 - DNA, 25 bp, probe
gtggccgagaaagcagggtagacgt

SEQ ID NO: 245610 - DNA, 25 bp, probe
gggaatggaaaatggtgtagccgtt

SEQ ID NO: 245611 - DNA, 25 bp, probe
gtggttggaaggtgggttctgcgtg

SEQ ID NO: 245612 - DNA, 25 bp, probe
gtgggtggaaggtggttgtatgtta

SEQ ID NO: 245613 - DNA, 25 bp, probe
gtgggtggagggccagagtgtgtat

SEQ ID NO: 245614 - DNA, 25 bp, probe
gtgggtggagggccagagtgtgtat

SEQ ID NO: 245615 - DNA, 25 bp, probe
gtgggtgaaggggatagggcgaggc

SEQ ID NO: 245616 - DNA, 25 bp, probe
gtgggtggaggggagaggcagagcc

SEQ ID NO: 245617 - DNA, 25 bp, probe
gtggtgatggagtacgccagaggag

SEQ ID NO: 245618 - DNA, 25 bp, probe
gtgggatgtggatgcggattcaaga

SEQ ID NO: 245619 - DNA, 25 bp, probe
gtgggggtagagctgatccagagca

SEQ ID NO: 245620 - DNA, 25 bp, probe
gtgggtggtgagttctgactaaagg

SEQ ID NO: 245621 - DNA, 25 bp, probe
gtggggtgtgagtgcgtatgaaagt

SEQ ID NO: 245622 - DNA, 25 bp, probe
gtggcggtgaagacggtcaacgagt

SEQ ID NO: 245623 - DNA, 25 bp, probe
gtggtggatggacctgggcagaggg

SEQ ID NO: 245624 - DNA, 25 bp, probe
gtggtagaggagccatcgccacaac

SEQ ID NO: 245625 - DNA, 25 bp, probe
gtggtagaggagccatcgccacaac

SEQ ID NO: 245626 - DNA, 25 bp, probe
gtggtagaggagccatcgccacaac

SEQ ID NO: 245627 - DNA, 25 bp, probe
gtggggagaagtcagccagctactc

SEQ ID NO: 245628 - DNA, 25 bp, probe
gtgggtgggagtcagcacattcacg

SEQ ID NO: 245629 - DNA, 25 bp, probe
gtgggttgatttcagcacctacagt

SEQ ID NO: 245630 - DNA, 25 bp, probe
gtgggatgtatttgaagcacctgaa

SEQ ID NO: 245631 - DNA, 25 bp, probe
gtggtggcaatttaagcacaaaggt

SEQ ID NO: 245632 - DNA, 25 bp, probe
gtggtggcaatttaagcacaaaggt

SEQ ID NO: 245633 - DNA, 25 bp, probe
gtggtggtattttcaacaaacaggg

SEQ ID NO: 245634 - DNA, 25 bp, probe
gtggggtatgtcctggccaaaatgg

SEQ ID NO: 245635 - DNA, 25 bp, probe
gtggggatagtgatggcaactacat

SEQ ID NO: 245636 - DNA, 25 bp, probe
gtggggcacctgagcagaatctacc

SEQ ID NO: 245637 - DNA, 25 bp, probe
gtggggacctgataagaccatcagc

SEQ ID NO: 245638 - DNA, 25 bp, probe
gtgggtgatctgctaaagttcatcc

SEQ ID NO: 245639 - DNA, 25 bp, probe
gtggagctccatcatcaaatggcca

SEQ ID NO: 245640 - DNA, 25 bp, probe
gtggatgctcctgctagagtagcca

SEQ ID NO: 245641 - DNA, 25 bp, probe
gtggtggccatattctatggcaccc

SEQ ID NO: 245642 - DNA, 25 bp, probe
gtggtatccatgtgtatcgaccatg

SEQ ID NO: 245643 - DNA, 25 bp, probe
gtggtatccatgacggtgagcacct

SEQ ID NO: 245644 - DNA, 25 bp, probe
gtgggatccatttctgtgaactctt

SEQ ID NO: 245645 - DNA, 25 bp, probe
gtgggatccatttctgtgaactctt

SEQ ID NO: 245646 - DNA, 25 bp, probe
gtggtgtggatcgtcatgtatactt

SEQ ID NO: 245647 - DNA, 25 bp, probe
gtggtggacatgcttaatgacatct

SEQ ID NO: 245648 - DNA, 25 bp, probe
gtgggtgcctggtgaatcaatgatg

SEQ ID NO: 245649 - DNA, 25 bp, probe
gtgggtcctggatgcagttgatgac

SEQ ID NO: 245650 - DNA, 25 bp, probe
gtgggtcctggatgcagttgatgac

SEQ ID NO: 245651 - DNA, 25 bp, probe
gtggggcctgtggaatgagtgtgca

SEQ ID NO: 245652 - DNA, 25 bp, probe
gtggtgtctctctattatgggtcaa

SEQ ID NO: 245653 - DNA, 25 bp, probe
gtggtgtgcttaagtatcgggggga

SEQ ID NO: 245654 - DNA, 25 bp, probe
gtggtggctattttagggaagggtg

SEQ ID NO: 245655 - DNA, 25 bp, probe
ggggttttcgtacagcaaggcactg

SEQ ID NO: 245656 - DNA, 25 bp, probe
gtggggttttcgtacagcaaggcac

SEQ ID NO: 245657 - DNA, 25 bp, probe
gtgggatgattactcggacaccgtg

SEQ ID NO: 245658 - DNA, 25 bp, probe
gtggaggactgtgaggacacacggg

SEQ ID NO: 245659 - DNA, 25 bp, probe
gtggaggactgtgaggacacacggg

SEQ ID NO: 245660 - DNA, 25 bp, probe
gtggcaggattttcggaagctgggg

SEQ ID NO: 245661 - DNA, 25 bp, probe
gtggcaggattttcggaagctgggg

SEQ ID NO: 245662 - DNA, 25 bp, probe
gtggttgaggcgcggaagctggagg

SEQ ID NO: 245663 - DNA, 25 bp, probe
gtggttggagcgaatggaagttggg

SEQ ID NO: 245664 - DNA, 25 bp, probe
gtgggtgatgacgtaggacatgtgc

SEQ ID NO: 245665 - DNA, 25 bp, probe
gtggtgatgctgtcttcagtcagct

SEQ ID NO: 245666 - DNA, 25 bp, probe
gtggagacgattggggatgcttaca

SEQ ID NO: 245667 - DNA, 25 bp, probe
gtggcaaggactaagggctatgaca

SEQ ID NO: 245668 - DNA, 25 bp, probe
gtggtaggacacaaagttcttcagt

SEQ ID NO: 245669 - DNA, 25 bp, probe
gtggctcggtacaggttgtaagttc

SEQ ID NO: 245670 - DNA, 25 bp, probe
gtggttggcttggggtggccaatgg

SEQ ID NO: 245671 - DNA, 25 bp, probe
gtggtagcttaggaggatgtcgggg

SEQ ID NO: 245672 - DNA, 25 bp, probe
gtggttctaagccaggagccgagat

SEQ ID NO: 245673 - DNA, 25 bp, probe
gtggttctaagccaggagccgagat

SEQ ID NO: 245674 - DNA, 25 bp, probe
gtggtcatcaaaggagttcgcggag

SEQ ID NO: 245675 - DNA, 25 bp, probe
gtggtagcagtagattccaggagga

SEQ ID NO: 245676 - DNA, 25 bp, probe
gtggaacattacagtccaatggtat

SEQ ID NO: 245677 - DNA, 25 bp, probe
gtggcaaattccgggagcagtttaa

SEQ ID NO: 245678 - DNA, 25 bp, probe
gtggataatttccaggactgtcata

SEQ ID NO: 245679 - DNA, 25 bp, probe
gggaaaatccactatgacatctaag

SEQ ID NO: 245680 - DNA, 25 bp, probe
gtggagacaatccctcaggactagg

SEQ ID NO: 245681 - DNA, 25 bp, probe
gtggatgaaatcttgctcagaagct

SEQ ID NO: 245682 - DNA, 25 bp, probe
gtggatgaactactcctacagcagc

SEQ ID NO: 245683 - DNA, 25 bp, probe
gtggatgaactactcctacagcagc

SEQ ID NO: 245684 - DNA, 25 bp, probe
gtggaaagcttgtcttagaggcctt

SEQ ID NO: 245685 - DNA, 25 bp, probe
gtggattagctttctatagcagcac

SEQ ID NO: 245686 - DNA, 25 bp, probe
gtggtcttgctgaattagacagctc

SEQ ID NO: 245687 - DNA, 25 bp, probe
gtggtcttgctgaattagacagctc

SEQ ID NO: 245688 - DNA, 25 bp, probe
gtggtggctggtggtcatgaattca

SEQ ID NO: 245689 - DNA, 25 bp, probe
gtggtggctggtggtcatgaattca

SEQ ID NO: 245690 - DNA, 25 bp, probe
gtggttcatgtgtggagacattaga

SEQ ID NO: 245691 - DNA, 25 bp, probe
gtggatcatgtgcttgagcagactg

SEQ ID NO: 245692 - DNA, 25 bp, probe
gtggatcatgtgcttgagcagactg

SEQ ID NO: 245693 - DNA, 25 bp, probe
gtggaatgtactggagagactggct

SEQ ID NO: 245694 - DNA, 25 bp, probe
gtggaaaattcggagcactcgcctg

SEQ ID NO: 245695 - DNA, 25 bp, probe
gtggtaaacacggcagcctcttcat

SEQ ID NO: 245696 - DNA, 25 bp, probe
ggacgaggacgaggacctcttcgac

SEQ ID NO: 245697 - DNA, 25 bp, probe
ggtcgtggacgtagtcctctttaag

SEQ ID NO: 245698 - DNA, 25 bp, probe
ggacgaggcctttgacttcgttaag

SEQ ID NO: 245699 - DNA, 25 bp, probe
gggctaggccttttttatattgaag

SEQ ID NO: 245700 - DNA, 25 bp, probe
gggccaagcctctgttaaagtcatt

SEQ ID NO: 245701 - DNA, 25 bp, probe
gtggaagcagttcacttaaaggcca

SEQ ID NO: 245702 - DNA, 25 bp, probe
gtggtctcctctgacttcaacagcg

SEQ ID NO: 245703 - DNA, 25 bp, probe
gtggttccactggaagtctccagga

SEQ ID NO: 245704 - DNA, 25 bp, probe
gtggtctccaatggagagctccaag

SEQ ID NO: 245705 - DNA, 25 bp, probe
gtggatatccagagcgagcgcttca

SEQ ID NO: 245706 - DNA, 25 bp, probe
gtggagcaactgaaggagcctgtaa

SEQ ID NO: 245707 - DNA, 25 bp, probe
gtggaagattaaagggctgaatcat

SEQ ID NO: 245708 - DNA, 25 bp, probe
gtggatccgtacagcagtgtgaaca

SEQ ID NO: 245709 - DNA, 25 bp, probe
gtggagccttacatactgggagaat

SEQ ID NO: 245710 - DNA, 25 bp, probe
gtggagtcttcgagacttgggagct

SEQ ID NO: 245711 - DNA, 25 bp, probe
gtggggtgcatggaggaattgggac

SEQ ID NO: 245712 - DNA, 25 bp, probe
gtggtggtgcaggggacaagaggct

SEQ ID NO: 245713 - DNA, 25 bp, probe
gtggtctacaggctcatcaaaggaa

SEQ ID NO: 245714 - DNA, 25 bp, probe
gtggagcccaacttctaaaggtcaa

SEQ ID NO: 245715 - DNA, 25 bp, probe
gtggaacacaaaggctgataaactc

SEQ ID NO: 245716 - DNA, 25 bp, probe
gtggtacacacatccttggcaattc

SEQ ID NO: 245717 - DNA, 25 bp, probe
gtggtacacacatccttggcaattc

SEQ ID NO: 245718 - DNA, 25 bp, probe
gtggtgtcaggatccttggaagtca

SEQ ID NO: 245719 - DNA, 25 bp, probe
gtggctgggtaatcgggaagcccta

SEQ ID NO: 245720 - DNA, 25 bp, probe
gtggcgggtgaatctcgtgtagcct

SEQ ID NO: 245721 - DNA, 25 bp, probe
gtggatggggaattgatggttagcg

SEQ ID NO: 245722 - DNA, 25 bp, probe
gtggatgggcagatcttctgtctac

SEQ ID NO: 245723 - DNA, 25 bp, probe
gtggcttggctgaattactgttacc

SEQ ID NO: 245724 - DNA, 25 bp, probe
gtggcagcgcgtaacgtgctgttga

SEQ ID NO: 245725 - DNA, 25 bp, probe
gtggagcagctgatgtcgtgtttac

SEQ ID NO: 245726 - DNA, 25 bp, probe
gtggcagagtcttctatgttttcac

SEQ ID NO: 245727 - DNA, 25 bp, probe
gtggaggacattgtgacttggctca

SEQ ID NO: 245728 - DNA, 25 bp, probe
gtggtagagacagctacttactccc

SEQ ID NO: 245729 - DNA, 25 bp, probe
gtggataaccagtatcacttacaca

SEQ ID NO: 245730 - DNA, 25 bp, probe
gtggatttccataactttagcaaga

SEQ ID NO: 245731 - DNA, 25 bp, probe
gtggatcttccattaccaagaggac

SEQ ID NO: 245732 - DNA, 25 bp, probe
gtggatttccataacccaagagggg

SEQ ID NO: 245733 - DNA, 25 bp, probe
gtggaattccatgatcctgataggc

SEQ ID NO: 245734 - DNA, 25 bp, probe
gtggactagcaatacctgcaagtgc

SEQ ID NO: 245735 - DNA, 25 bp, probe
gtgggggcaaggacagctgcagagg

SEQ ID NO: 245736 - DNA, 25 bp, probe
gtggaggagctcttcaagctgctga

SEQ ID NO: 245737 - DNA, 25 bp, probe
gtggaaactgcagagagtcatgatc

SEQ ID NO: 245738 - DNA, 25 bp, probe
gtggtaactgcgagagcttgctgag

SEQ ID NO: 245739 - DNA, 25 bp, probe
gtggtgacattgcattagtctccct

SEQ ID NO: 245740 - DNA, 25 bp, probe
gtggtgaattacttcagctctcgca

SEQ ID NO: 245741 - DNA, 25 bp, probe
gtggtgagttacttggctcggagcg

SEQ ID NO: 245742 - DNA, 25 bp, probe
gtggtggttgtattggagcaggggg

SEQ ID NO: 245743 - DNA, 25 bp, probe
gtggtgttagctttgagggcaaggc

SEQ ID NO: 245744 - DNA, 25 bp, probe
gtggatgttgacacagaagccaagg

SEQ ID NO: 245745 - DNA, 25 bp, probe
gtggtgtatgataacaacagcagca

SEQ ID NO: 245746 - DNA, 25 bp, probe
gtggatgtatgttcaaacacctttt

SEQ ID NO: 245747 - DNA, 25 bp, probe
gtggatgtatgttcaaacacctttt

SEQ ID NO: 245748 - DNA, 25 bp, probe
gtggagttatggagacctgctttta

SEQ ID NO: 245749 - DNA, 25 bp, probe
gtggatttatagtagttcagtcata

SEQ ID NO: 245750 - DNA, 25 bp, probe
gtggtatatcattggaatccagttt

SEQ ID NO: 245751 - DNA, 25 bp, probe
gtggttatattggcaacctattctc

SEQ ID NO: 245752 - DNA, 25 bp, probe
gtggttatgatggaaaactttcacc

SEQ ID NO: 245753 - DNA, 25 bp, probe
gtggttgtgtgggaaacttccctgg

SEQ ID NO: 245754 - DNA, 25 bp, probe
gtggtaggtggataacacctgcttt

SEQ ID NO: 245755 - DNA, 25 bp, probe
gtggttggagactagaatcccatct

SEQ ID NO: 245756 - DNA, 25 bp, probe
gtggattttctaagcacattcaatc

SEQ ID NO: 245757 - DNA, 25 bp, probe
gtggagatattcatggacagtatac

SEQ ID NO: 245758 - DNA, 25 bp, probe
gtggagatattcatggacagtatac

SEQ ID NO: 245759 - DNA, 25 bp, probe
gtggagaagctccctgaagtaagca

SEQ ID NO: 245760 - DNA, 25 bp, probe
gtggacccacagcctaagctgagtg

SEQ ID NO: 245761 - DNA, 25 bp, probe
gtggagttcctacatgcagtgagtg

SEQ ID NO: 245762 - DNA, 25 bp, probe
gtggagattcacactatgcactggg

SEQ ID NO: 245763 - DNA, 25 bp, probe
gtggagctgtacaatctcatgcgtc

SEQ ID NO: 245764 - DNA, 25 bp, probe
gtggactctgcacatgtcttgtaca

SEQ ID NO: 245765 - DNA, 25 bp, probe
gtggactctcactgtctaggagcat

SEQ ID NO: 245766 - DNA, 25 bp, probe
gtggacttgattttctcagtgaagt

SEQ ID NO: 245767 - DNA, 25 bp, probe
gtggaaagatttcctcagttagtga

SEQ ID NO: 245768 - DNA, 25 bp, probe
gtggatggaatctgctttgttggga

SEQ ID NO: 245769 - DNA, 25 bp, probe
gtggatggaatctgctttgttggga

SEQ ID NO: 245770 - DNA, 25 bp, probe
gtggtgagtccagtgggggtgggac

SEQ ID NO: 245771 - DNA, 25 bp, probe
gtggtggggcaggaacggtggaggc

SEQ ID NO: 245772 - DNA, 25 bp, probe
gggctggggagtgcagaagttgggc

SEQ ID NO: 245773 - DNA, 25 bp, probe
gtggtgggcggggagaagataggga

SEQ ID NO: 245774 - DNA, 25 bp, probe
gtggacatgacagggaacaggaagg

SEQ ID NO: 245775 - DNA, 25 bp, probe
gtggcacagtatgacaaagagaagt

SEQ ID NO: 245776 - DNA, 25 bp, probe
gtggtcagaattacagtatgcacaa

SEQ ID NO: 245777 - DNA, 25 bp, probe
gtggtcagaattacagtatgcacaa

SEQ ID NO: 245778 - DNA, 25 bp, probe
gtggtctcagaaatcatgatgtaca

SEQ ID NO: 245779 - DNA, 25 bp, probe
gtggctccagaagtgctgctgagac

SEQ ID NO: 245780 - DNA, 25 bp, probe
gtggtccactgtgttgagacttcta

SEQ ID NO: 245781 - DNA, 25 bp, probe
gtggtctacgtcatagaattctcag

SEQ ID NO: 245782 - DNA, 25 bp, probe
gtggttaattacacattatcatgaa

SEQ ID NO: 245783 - DNA, 25 bp, probe
gtggcttaagctgaggattgctcta

SEQ ID NO: 245784 - DNA, 25 bp, probe
gtggttacatcattagcgaatcttg

SEQ ID NO: 245785 - DNA, 25 bp, probe
gtggtagagtcctaggacatctctg

SEQ ID NO: 245786 - DNA, 25 bp, probe
gtggtgagaggcatccagtatcttg

SEQ ID NO: 245787 - DNA, 25 bp, probe
gtggtgagaggcatccagtatcttg

SEQ ID NO: 245788 - DNA, 25 bp, probe
gtggtgcagggcaacgcagacatgt

SEQ ID NO: 245789 - DNA, 25 bp, probe
gggcctgtacagtgagacatttttc

SEQ ID NO: 245790 - DNA, 25 bp, probe
gtggccttcaactggatcattgttc

SEQ ID NO: 245791 - DNA, 25 bp, probe
gtggcactccatgcaagatgaattt

SEQ ID NO: 245792 - DNA, 25 bp, probe
gtggagaactgcccagatgagctct

SEQ ID NO: 245793 - DNA, 25 bp, probe
gtggagtataggctgcatcatcttt

SEQ ID NO: 245794 - DNA, 25 bp, probe
gtggtgcatacagtgttgacattct

SEQ ID NO: 245795 - DNA, 25 bp, probe
gtggtgatggtgtttgtcatctgct

SEQ ID NO: 245796 - DNA, 25 bp, probe
gtggtgatggctggtgtgattccaa

SEQ ID NO: 245797 - DNA, 25 bp, probe
gtggtggagtgcttggaccatgcca

SEQ ID NO: 245798 - DNA, 25 bp, probe
gtggtggcagtgctgagagttcctg

SEQ ID NO: 245799 - DNA, 25 bp, probe
gtggtggacaggaagcatgtccctg

SEQ ID NO: 245800 - DNA, 25 bp, probe
gtggatggaaggggctgacagacag

SEQ ID NO: 245801 - DNA, 25 bp, probe
gtggttgactagggctgggagcaga

SEQ ID NO: 245802 - DNA, 25 bp, probe
gtggttgactagggctgggagcaga

SEQ ID NO: 245803 - DNA, 25 bp, probe
gtggtagatggactggttgtggccc

SEQ ID NO: 245804 - DNA, 25 bp, probe
gtggtatcaggctgggagcggcctc

SEQ ID NO: 245805 - DNA, 25 bp, probe
gtggtcaaggcaacggccttccatc

SEQ ID NO: 245806 - DNA, 25 bp, probe
gtggccaagggaaggtctatcctct

SEQ ID NO: 245807 - DNA, 25 bp, probe
gggctttgggaggggtaagctgctt

SEQ ID NO: 245808 - DNA, 25 bp, probe
gggctacggaaggaggggacatgtc

SEQ ID NO: 245809 - DNA, 25 bp, probe
gtggtcacagaacccatagggaatg

SEQ ID NO: 245810 - DNA, 25 bp, probe
tgtagaaagagtcttggggaggttt

SEQ ID NO: 245811 - DNA, 25 bp, probe
tgtagaaagagtcttggggaggttt

SEQ ID NO: 245812 - DNA, 25 bp, probe
gtggaagagtgtatctggggtggga

SEQ ID NO: 245813 - DNA, 25 bp, probe
gtggagggattcctctgcgaggtgc

SEQ ID NO: 245814 - DNA, 25 bp, probe
gtggagaagatgttttcggtggcta

SEQ ID NO: 245815 - DNA, 25 bp, probe
gtggatagaatgtctttgcccattt

SEQ ID NO: 245816 - DNA, 25 bp, probe
gtggataagaccttgagccaccctt

SEQ ID NO: 245817 - DNA, 25 bp, probe
gtggaagaaccatgacctccacttg

SEQ ID NO: 245818 - DNA, 25 bp, probe
tctgttagaacctggcccgttagat

SEQ ID NO: 245819 - DNA, 25 bp, probe
tggtggaggacctggaccgtgtcct

SEQ ID NO: 245820 - DNA, 25 bp, probe
gggattggaaacggatgacgggcct

SEQ ID NO: 245821 - DNA, 25 bp, probe
gtggagtgggacagaagtcacggcc

SEQ ID NO: 245822 - DNA, 25 bp, probe
gtggagtgaggccagtaagctcaga

SEQ ID NO: 245823 - DNA, 25 bp, probe
gtggaggacgaggtaactcagcagc

SEQ ID NO: 245824 - DNA, 25 bp, probe
gtggaggaccttacaaccatgctgc

SEQ ID NO: 245825 - DNA, 25 bp, probe
gtggaggaccttacaaccatgctgc

SEQ ID NO: 245826 - DNA, 25 bp, probe
gtggaggaccttacaaccatgctgc

SEQ ID NO: 245827 - DNA, 25 bp, probe
gtggaggaacttttcaagctgctga

SEQ ID NO: 245828 - DNA, 25 bp, probe
gtggactgaacggaatcaagctctg

SEQ ID NO: 245829 - DNA, 25 bp, probe
gtggaagcaaatgaacaactcttca

SEQ ID NO: 245830 - DNA, 25 bp, probe
gtggagatcagattggatacagata

SEQ ID NO: 245831 - DNA, 25 bp, probe
gtggagacgaaggctgacagcatca

SEQ ID NO: 245832 - DNA, 25 bp, probe
gtggtacagatatctgtctgctcat

SEQ ID NO: 245833 - DNA, 25 bp, probe
gtggataggagaactgcagctgtca

SEQ ID NO: 245834 - DNA, 25 bp, probe
gtggttcagtattcattgatctcac

SEQ ID NO: 245835 - DNA, 25 bp, probe
gggagataatagctttcccacccta

SEQ ID NO: 245836 - DNA, 25 bp, probe
gggagataatagctttcccacccta

SEQ ID NO: 245837 - DNA, 25 bp, probe
gtggagtaactgcaattcaccacct

SEQ ID NO: 245838 - DNA, 25 bp, probe
gtggagtaactgcaattcaccacct

SEQ ID NO: 245839 - DNA, 25 bp, probe
gtggagtacagttcttgtgacacaa

SEQ ID NO: 245840 - DNA, 25 bp, probe
gtggctgtcaaatttagtgaacaac

SEQ ID NO: 245841 - DNA, 25 bp, probe
gtggctgtcaaatttagtgaacaac

SEQ ID NO: 245842 - DNA, 25 bp, probe
gtggcagtgaaaatacagtctagtt

SEQ ID NO: 245843 - DNA, 25 bp, probe
gtggcagtgaaaatacagtctagtt

SEQ ID NO: 245844 - DNA, 25 bp, probe
gtggcttgatggttaagacaggttt

SEQ ID NO: 245845 - DNA, 25 bp, probe
gtggatcgattagtgtcaaaggctt

SEQ ID NO: 245846 - DNA, 25 bp, probe
gtggtgcgtgtgtgtgaagtgacct

SEQ ID NO: 245847 - DNA, 25 bp, probe
gtggtcgcttactttgagtgatcct

SEQ ID NO: 245848 - DNA, 25 bp, probe
gtggttcttacagtgctggtgttta

SEQ ID NO: 245849 - DNA, 25 bp, probe
gtggtgatctgtacaggctgtgtgt

SEQ ID NO: 245850 - DNA, 25 bp, probe
gtggtgatctgtacaggctgtgtgt

SEQ ID NO: 245851 - DNA, 25 bp, probe
gtggtgatctgtagacttctggttg

SEQ ID NO: 245852 - DNA, 25 bp, probe
gtggtagataatacttctgagttgg

SEQ ID NO: 245853 - DNA, 25 bp, probe
gtggaagtggaagttctatttgtgc

SEQ ID NO: 245854 - DNA, 25 bp, probe
gtggtgcatatgaaggactttttct

SEQ ID NO: 245855 - DNA, 25 bp, probe
gtggacaagactcgcagattttctt

SEQ ID NO: 245856 - DNA, 25 bp, probe
gtggaaggaatccacagtttcctaa

SEQ ID NO: 245857 - DNA, 25 bp, probe
gggaaggagtcaacagtgtaactaa

SEQ ID NO: 245858 - DNA, 25 bp, probe
gtggataagattacacagattatac

SEQ ID NO: 245859 - DNA, 25 bp, probe
gtggataagcagttgccagtgacat

SEQ ID NO: 245860 - DNA, 25 bp, probe
gtggaatcagacctccaggagataa

SEQ ID NO: 245861 - DNA, 25 bp, probe
gtggattgagccctcttggaaagac

SEQ ID NO: 245862 - DNA, 25 bp, probe
gtggattgagccctcttggaaagac

SEQ ID NO: 245863 - DNA, 25 bp, probe
gtggtatcaagactctgtggcaaaa

SEQ ID NO: 245864 - DNA, 25 bp, probe
gtggtaatggattatgactggaaat

SEQ ID NO: 245865 - DNA, 25 bp, probe
gtggcataagaatttacggctagtc

SEQ ID NO: 245866 - DNA, 25 bp, probe
gtggcataagaatttacggctagtc

SEQ ID NO: 245867 - DNA, 25 bp, probe
gtggcagagaatttgtaacctgatt

SEQ ID NO: 245868 - DNA, 25 bp, probe
gtggcagttttttctgcaatctatt

SEQ ID NO: 245869 - DNA, 25 bp, probe
gtggtgtttctttgtacatttttca

SEQ ID NO: 245870 - DNA, 25 bp, probe
gtggtgcttctcatttattcttaaa

SEQ ID NO: 245871 - DNA, 25 bp, probe
gtggagtgttcagtctggaatttca

SEQ ID NO: 245872 - DNA, 25 bp, probe
gtggttgctgtggttggaattcttc

SEQ ID NO: 245873 - DNA, 25 bp, probe
gtggcttcttaatgtaactcttccc

SEQ ID NO: 245874 - DNA, 25 bp, probe
gtggtgacttagaattaactcgtgc

SEQ ID NO: 245875 - DNA, 25 bp, probe
gtggtgacttgcggatttatgtttc

SEQ ID NO: 245876 - DNA, 25 bp, probe
gtggtgacttgcggatttatgtttc

SEQ ID NO: 245877 - DNA, 25 bp, probe
gtggttttgctggatgtttggtctg

SEQ ID NO: 245878 - DNA, 25 bp, probe
gtggttattcttttctgtgtttgtt

SEQ ID NO: 245879 - DNA, 25 bp, probe
gtggattatatctttcttattgtag

SEQ ID NO: 245880 - DNA, 25 bp, probe
gtggcttaacggtatttcagaaggt

SEQ ID NO: 245881 - DNA, 25 bp, probe
gggcattacgggtgttgaaggtgtc

SEQ ID NO: 245882 - DNA, 25 bp, probe
gggcccctggtgtgtggcaaaggcc

SEQ ID NO: 245883 - DNA, 25 bp, probe
gtggccactctgggtggttctaagc

SEQ ID NO: 245884 - DNA, 25 bp, probe
gtggccatatttgggcagttcccag

SEQ ID NO: 245885 - DNA, 25 bp, probe
gggcagtttttgtctttcaccaaat

SEQ ID NO: 245886 - DNA, 25 bp, probe
gtggaatctttggttttgcatcata

SEQ ID NO: 245887 - DNA, 25 bp, probe
gtggattcatgtggcctgtttcatc

SEQ ID NO: 245888 - DNA, 25 bp, probe
gtggattcatgtggcctgtttcatc

SEQ ID NO: 245889 - DNA, 25 bp, probe
gtggtacaatgggcgcgttcagcca

SEQ ID NO: 245890 - DNA, 25 bp, probe
gtggtgccaatgtgccctggcaccc

SEQ ID NO: 245891 - DNA, 25 bp, probe
gtggtgccaatgtgccctggcaccc

SEQ ID NO: 245892 - DNA, 25 bp, probe
gtggctgtgaagtgccttaagcccg

SEQ ID NO: 245893 - DNA, 25 bp, probe
gtggaggacgaggcggaacgctccg

SEQ ID NO: 245894 - DNA, 25 bp, probe
gtggatgggtggggagcaaatcatc

SEQ ID NO: 245895 - DNA, 25 bp, probe
gtggaggccggaagatgccagctct

SEQ ID NO: 245896 - DNA, 25 bp, probe
gtggagcagcgcatgaagtcctgtt

SEQ ID NO: 245897 - DNA, 25 bp, probe
gtggaggaagctaagtgctgctgtt

SEQ ID NO: 245898 - DNA, 25 bp, probe
gtggtcaaggctacagatgtgctga

SEQ ID NO: 245899 - DNA, 25 bp, probe
gtggtcccgcacaatgagtgcagcg

SEQ ID NO: 245900 - DNA, 25 bp, probe
gtggatggcaccagaagtcatcaga

SEQ ID NO: 245901 - DNA, 25 bp, probe
gtggatggcaccagaagtcatcaga

SEQ ID NO: 245902 - DNA, 25 bp, probe
gtggatggcatcttataaatatgta

SEQ ID NO: 245903 - DNA, 25 bp, probe
gtggtagctccaccaaatcatgaac

SEQ ID NO: 245904 - DNA, 25 bp, probe
gtggctttgcaagtcaagtagaaca

SEQ ID NO: 245905 - DNA, 25 bp, probe
gtggctttgcaagtcaagtagaaca

SEQ ID NO: 245906 - DNA, 25 bp, probe
gtggtctgtgactcagaacctgaca

SEQ ID NO: 245907 - DNA, 25 bp, probe
gtggtctatcaccactgaattcatg

SEQ ID NO: 245908 - DNA, 25 bp, probe
gtggtatacaccctgagaaataaag

SEQ ID NO: 245909 - DNA, 25 bp, probe
gtggtatgagccgctgcagaagttt

SEQ ID NO: 245910 - DNA, 25 bp, probe
gtggactggacggtgcataggtttt

SEQ ID NO: 245911 - DNA, 25 bp, probe
gtggactggagtggagcattggctg

SEQ ID NO: 245912 - DNA, 25 bp, probe
gtggacagggttggaaactgcactg

SEQ ID NO: 245913 - DNA, 25 bp, probe
gtggtcttgggtggagcaactgaag

SEQ ID NO: 245914 - DNA, 25 bp, probe
gtggtttgagtgtctagcaaaggaa

SEQ ID NO: 245915 - DNA, 25 bp, probe
gtggaggtggctttcagaagaggat

SEQ ID NO: 245916 - DNA, 25 bp, probe
gtggaggggctggagagggggaggc

SEQ ID NO: 245917 - DNA, 25 bp, probe
gtggagggtatggagtggggcctga

SEQ ID NO: 245918 - DNA, 25 bp, probe
gtggaggccttcagcgaggaggcta

SEQ ID NO: 245919 - DNA, 25 bp, probe
gtggaggtcctcaggagtggagaga

SEQ ID NO: 245920 - DNA, 25 bp, probe
gtggaggctcccgtggagaggaggc

SEQ ID NO: 245921 - DNA, 25 bp, probe
gtggaggctatgctttggggggaca

SEQ ID NO: 245922 - DNA, 25 bp, probe
gtggatggcatgggcattacgggtg

SEQ ID NO: 245923 - DNA, 25 bp, probe
gtggcagccaggattcatctgcgga

SEQ ID NO: 245924 - DNA, 25 bp, probe
gtggccgaggttaaacggaatcaca

SEQ ID NO: 245925 - DNA, 25 bp, probe
gtggtcaaagtagaacaggttccag

SEQ ID NO: 245926 - DNA, 25 bp, probe
gtggtcaaaggggtggcaagtggcc

SEQ ID NO: 245927 - DNA, 25 bp, probe
gtggtcaaaggggtggcaagtggcc

SEQ ID NO: 245928 - DNA, 25 bp, probe
gggccaaaaggccattgaagtgcgc

SEQ ID NO: 245929 - DNA, 25 bp, probe
gtggcctcaaaggcacttaatttga

SEQ ID NO: 245930 - DNA, 25 bp, probe
gtggtcatcaaagacaaacctctga

SEQ ID NO: 245931 - DNA, 25 bp, probe
gtggtatatcaagccaaactttgtg

SEQ ID NO: 245932 - DNA, 25 bp, probe
gtggacaccaagacctttcatttgt

SEQ ID NO: 245933 - DNA, 25 bp, probe
gtggaccaagaattctttgacatcg

SEQ ID NO: 245934 - DNA, 25 bp, probe
gtggtcaacgtattcttcgagggca

SEQ ID NO: 245935 - DNA, 25 bp, probe
gtggtcaacgtattcttcgagggca

SEQ ID NO: 245936 - DNA, 25 bp, probe
gtggtcaagtgtctgttcgagaacg

SEQ ID NO: 245937 - DNA, 25 bp, probe
gtggctaagtgtccattatttacct

SEQ ID NO: 245938 - DNA, 25 bp, probe
gtggctaagtgtccattatttacct

SEQ ID NO: 245939 - DNA, 25 bp, probe
gggcgaactgtcgaatgttgcgaat

SEQ ID NO: 245940 - DNA, 25 bp, probe
gtggcgtacgacggtgttgagatca

SEQ ID NO: 245941 - DNA, 25 bp, probe
gtggaggacaaccagatggtggaga

SEQ ID NO: 245942 - DNA, 25 bp, probe
gtggagagatcaggggtttgggtgg

SEQ ID NO: 245943 - DNA, 25 bp, probe
gtggaggtacaggcagatcttccct

SEQ ID NO: 245944 - DNA, 25 bp, probe
gtggttggatcaaggactcattcct

SEQ ID NO: 245945 - DNA, 25 bp, probe
gggcttcagatgagtcctatgggag

SEQ ID NO: 245946 - DNA, 25 bp, probe
gtggttcaggcagccctatgcaaac

SEQ ID NO: 245947 - DNA, 25 bp, probe
gtggttcaggcagccctatgcaaac

SEQ ID NO: 245948 - DNA, 25 bp, probe
gtggattcaggatcagtctatgaca

SEQ ID NO: 245949 - DNA, 25 bp, probe
gtggcttcgtgttcgactatgagta

SEQ ID NO: 245950 - DNA, 25 bp, probe
gtggctatcctgctgaagcttggaa

SEQ ID NO: 245951 - DNA, 25 bp, probe
gtggtctgccagctaaaggtgaaga

SEQ ID NO: 245952 - DNA, 25 bp, probe
gtggtctgccagctaaaggtgaaga

SEQ ID NO: 245953 - DNA, 25 bp, probe
gtggaggccgtgaataagggaaaga

SEQ ID NO: 245954 - DNA, 25 bp, probe
gtggagcgtcgtgtcacagtggaca

SEQ ID NO: 245955 - DNA, 25 bp, probe
gtggctgcctttgatcacaggagca

SEQ ID NO: 245956 - DNA, 25 bp, probe
gtggttctctgtgtagatgcaaaca

SEQ ID NO: 245957 - DNA, 25 bp, probe
gtggtttgttgccacagtacaagtt

SEQ ID NO: 245958 - DNA, 25 bp, probe
gtggttaatctctcagtactagtta

SEQ ID NO: 245959 - DNA, 25 bp, probe
gtggctaaaccagcatttctgtgtt

SEQ ID NO: 245960 - DNA, 25 bp, probe
gtggctaaaccagcatttctgtgtt

SEQ ID NO: 245961 - DNA, 25 bp, probe
gggagaaacgttattattgcttcaa

SEQ ID NO: 245962 - DNA, 25 bp, probe
gggagaaacgttattattgcttcaa

SEQ ID NO: 245963 - DNA, 25 bp, probe
gggcaaaaccttgctaattttctca

SEQ ID NO: 245964 - DNA, 25 bp, probe
ggaacccaaaatgcttatttcttct

SEQ ID NO: 245965 - DNA, 25 bp, probe
tggaagccaaacaccggcattttat

SEQ ID NO: 245966 - DNA, 25 bp, probe
ggggctaggactgtgggcttttagc

SEQ ID NO: 245967 - DNA, 25 bp, probe
ggggtacagtaaagaggcttccaag

SEQ ID NO: 245968 - DNA, 25 bp, probe
gggctgtaaaaaagattaatcctat

SEQ ID NO: 245969 - DNA, 25 bp, probe
gtggcttacctaaatgttaaccaag

SEQ ID NO: 245970 - DNA, 25 bp, probe
gtggctgcctcctagaagtggaaca

SEQ ID NO: 245971 - DNA, 25 bp, probe
gtggcttctcacaatgaaacggact

SEQ ID NO: 245972 - DNA, 25 bp, probe
gtggatgaccacataagaaggcaat

SEQ ID NO: 245973 - DNA, 25 bp, probe
gtggaaaccttaaaggagcaatcaa

SEQ ID NO: 245974 - DNA, 25 bp, probe
gtggaaatccccaaatggagccaag

SEQ ID NO: 245975 - DNA, 25 bp, probe
gtggaaatccccaaatggagccaag

SEQ ID NO: 245976 - DNA, 25 bp, probe
gtggaaaccacactcaaagagacag

SEQ ID NO: 245977 - DNA, 25 bp, probe
gtggaaatgtaactaactgaaatga

SEQ ID NO: 245978 - DNA, 25 bp, probe
gtggaaatgtaactaactgaaatga

SEQ ID NO: 245979 - DNA, 25 bp, probe
gtggccaattattttgactggatta

SEQ ID NO: 245980 - DNA, 25 bp, probe
gtggccatttttatggctatgttgg

SEQ ID NO: 245981 - DNA, 25 bp, probe
gtggaagttctatttgtgcacgttc

SEQ ID NO: 245982 - DNA, 25 bp, probe
gtggaagttctatttgtgcacgttc

SEQ ID NO: 245983 - DNA, 25 bp, probe
gtggagagtttattcactgtcttat

SEQ ID NO: 245984 - DNA, 25 bp, probe
gtggagagtttattcactgtcttat

SEQ ID NO: 245985 - DNA, 25 bp, probe
gtggttgctgttaatattatcttat

SEQ ID NO: 245986 - DNA, 25 bp, probe
gtggtagcatttatgatttcatggt

SEQ ID NO: 245987 - DNA, 25 bp, probe
gtggaagatgtgtacgaactcatgt

SEQ ID NO: 245988 - DNA, 25 bp, probe
gtggaagatgtgtacgaactcatgt

SEQ ID NO: 245989 - DNA, 25 bp, probe
gtggaagaagtgactgtatgccagt

SEQ ID NO: 245990 - DNA, 25 bp, probe
gtggacgagaagccattcaccgtaa

SEQ ID NO: 245991 - DNA, 25 bp, probe
gtggaccaggaggattgcctttaat

SEQ ID NO: 245992 - DNA, 25 bp, probe
gtggagacagggcatttgagtttat

SEQ ID NO: 245993 - DNA, 25 bp, probe
gtggaaaatcagttgttaccattat

SEQ ID NO: 245994 - DNA, 25 bp, probe
gtggaaagatcaaattaacctgctt

SEQ ID NO: 245995 - DNA, 25 bp, probe
gtggaaagatcaaattaacctgctt

SEQ ID NO: 245996 - DNA, 25 bp, probe
gtggaacttctgtactacaacgctg

SEQ ID NO: 245997 - DNA, 25 bp, probe
gtggagcacttcagactagcattgt

SEQ ID NO: 245998 - DNA, 25 bp, probe
gtggagcacttcagactagcattgt

SEQ ID NO: 245999 - DNA, 25 bp, probe
gtggatgccttcctgaaatatgaga

SEQ ID NO: 246000 - DNA, 25 bp, probe
gtggatccactggtgaaagtgcaga

SEQ ID NO: 246001 - DNA, 25 bp, probe
gtggcatctgaaggctcaaaccaga

SEQ ID NO: 246002 - DNA, 25 bp, probe
gtggcagctatagtctggcaccaaa

SEQ ID NO: 246003 - DNA, 25 bp, probe
gtggcagcctgattcggggctgacc

SEQ ID NO: 246004 - DNA, 25 bp, probe
gtggagcaggattaccggctgccac

SEQ ID NO: 246005 - DNA, 25 bp, probe
gtggacatgtggtcagtgggctgca

SEQ ID NO: 246006 - DNA, 25 bp, probe
gtggactgcttggcagtgctaggag

SEQ ID NO: 246007 - DNA, 25 bp, probe
gtggatcacctgaggtcaggagttc

SEQ ID NO: 246008 - DNA, 25 bp, probe
gtggatctctggagccttggagttc

SEQ ID NO: 246009 - DNA, 25 bp, probe
gtggactatggtcgtcttaatggtg

SEQ ID NO: 246010 - DNA, 25 bp, probe
gtggattatgccaacagcttgaatg

SEQ ID NO: 246011 - DNA, 25 bp, probe
gtggatttccagactgtgccaagtt

SEQ ID NO: 246012 - DNA, 25 bp, probe
gtggatttccagactgtgccaagtt

SEQ ID NO: 246013 - DNA, 25 bp, probe
gtggataggcgaggatctgccaagg

SEQ ID NO: 246014 - DNA, 25 bp, probe
gtggatagactgtgcctgacagtgg

SEQ ID NO: 246015 - DNA, 25 bp, probe
gtggatatgttttgccgagaggtgt

SEQ ID NO: 246016 - DNA, 25 bp, probe
gtggacgtgctttgggggaggtctt

SEQ ID NO: 246017 - DNA, 25 bp, probe
gtggacggggagcaggtggagtatg

SEQ ID NO: 246018 - DNA, 25 bp, probe
gtggagggtgaggtgtaattatttg

SEQ ID NO: 246019 - DNA, 25 bp, probe
gtggaggaaggcagctggtatattc

SEQ ID NO: 246020 - DNA, 25 bp, probe
gtggagggccagagtgtgtataccc

SEQ ID NO: 246021 - DNA, 25 bp, probe
gggcaagttagcactttattcccgc

SEQ ID NO: 246022 - DNA, 25 bp, probe
gtggcctttagctttatgtatatcc

SEQ ID NO: 246023 - DNA, 25 bp, probe
gtggtatgcttacaattgtcatgtc

SEQ ID NO: 246024 - DNA, 25 bp, probe
gtggtattgttggaatgtcttgtga

SEQ ID NO: 246025 - DNA, 25 bp, probe
gtggtattgttggaatgtcttgtga

SEQ ID NO: 246026 - DNA, 25 bp, probe
gtggtttatctgcatggtattggaa

SEQ ID NO: 246027 - DNA, 25 bp, probe
gtggttcatatcccatggctataac

SEQ ID NO: 246028 - DNA, 25 bp, probe
gtggttgcagccacaggggcaacac

SEQ ID NO: 246029 - DNA, 25 bp, probe
gtggttctggcaagcggtggagacg

SEQ ID NO: 246030 - DNA, 25 bp, probe
gtggcttctgaaacgtgcattcaac

SEQ ID NO: 246031 - DNA, 25 bp, probe
gtggcatgattgaaccagtggtcaa

SEQ ID NO: 246032 - DNA, 25 bp, probe
gtggctcttgtaggagtgatgtcac

SEQ ID NO: 246033 - DNA, 25 bp, probe
gtggtatgtgctgctggtgctgaac

SEQ ID NO: 246034 - DNA, 25 bp, probe
gtggtatgtgctgctggtgctgaac

SEQ ID NO: 246035 - DNA, 25 bp, probe
gtggagagtgacatgtgctggacac

SEQ ID NO: 246036 - DNA, 25 bp, probe
gtggagatgtggaatggggggctgc

SEQ ID NO: 246037 - DNA, 25 bp, probe
gtggagagtgcggcgtgggggcact

SEQ ID NO: 246038 - DNA, 25 bp, probe
gtggaggggcctagagatgtgaccg

SEQ ID NO: 246039 - DNA, 25 bp, probe
gggaggtcttctcatatggacgggc

SEQ ID NO: 246040 - DNA, 25 bp, probe
gggaggtcttctcatatggacgggc

SEQ ID NO: 246041 - DNA, 25 bp, probe
gtggcaggttttcgagggacagttc

SEQ ID NO: 246042 - DNA, 25 bp, probe
gtggaagtatcttggttgtgacaga

SEQ ID NO: 246043 - DNA, 25 bp, probe
gtggacaatggcatagttgctacag

SEQ ID NO: 246044 - DNA, 25 bp, probe
gtggacaatggcatagttgctacag

SEQ ID NO: 246045 - DNA, 25 bp, probe
gtggataaggcttaggtgccaggct

SEQ ID NO: 246046 - DNA, 25 bp, probe
gtggatacagtttagtgagacaagc

SEQ ID NO: 246047 - DNA, 25 bp, probe
gtggacacaggcttggggacagacc

SEQ ID NO: 246048 - DNA, 25 bp, probe
gtggacgaggcttgtggtgaccagg

SEQ ID NO: 246049 - DNA, 25 bp, probe
gtggagcgaggatgatttcactagg

SEQ ID NO: 246050 - DNA, 25 bp, probe
gggccgagatgttgatccgaatagg

SEQ ID NO: 246051 - DNA, 25 bp, probe
gtggttcaactttctccagatgagg

SEQ ID NO: 246052 - DNA, 25 bp, probe
gtggctgccaatgacctcaagtggc

SEQ ID NO: 246053 - DNA, 25 bp, probe
gtggatcaaggacaccatcgtggcc

SEQ ID NO: 246054 - DNA, 25 bp, probe
gtggatcgaggacaccatagcggag

SEQ ID NO: 246055 - DNA, 25 bp, probe
gtggatcagggaaaccatgaagagg

SEQ ID NO: 246056 - DNA, 25 bp, probe
gtggcaagcgaaaactagaggaggt

SEQ ID NO: 246057 - DNA, 25 bp, probe
gtggacagcggaacatatgaggaag

SEQ ID NO: 246058 - DNA, 25 bp, probe
gtggactgcacaatgacagagaaga

SEQ ID NO: 246059 - DNA, 25 bp, probe
gtggatctcacagacagtgacaaag

SEQ ID NO: 246060 - DNA, 25 bp, probe
gtggatcgacaggtccatgaaaacc

SEQ ID NO: 246061 - DNA, 25 bp, probe
gtggagcagacaaccctgcacaaga

SEQ ID NO: 246062 - DNA, 25 bp, probe
gtggatcaggatatccccaagcttc

SEQ ID NO: 246063 - DNA, 25 bp, probe
gtggcacaggagactccaaggagct

SEQ ID NO: 246064 - DNA, 25 bp, probe
gtggagcagggactcagacccctga

SEQ ID NO: 246065 - DNA, 25 bp, probe
gtggaagtgcaaccaaccatcgcat

SEQ ID NO: 246066 - DNA, 25 bp, probe
gtggaattgaccgaaagctctatgt

SEQ ID NO: 246067 - DNA, 25 bp, probe
gtggaatcggcagtgactactttga

SEQ ID NO: 246068 - DNA, 25 bp, probe
gtggaagatggagtaatcaatatta

SEQ ID NO: 246069 - DNA, 25 bp, probe
gtggcaagggaatagcgacttagtg

SEQ ID NO: 246070 - DNA, 25 bp, probe
gggactggacaatttggggtagtga

SEQ ID NO: 246071 - DNA, 25 bp, probe
gggaaggaaaatattgagctaggca

SEQ ID NO: 246072 - DNA, 25 bp, probe
gggaaggaaaatattgagctaggca

SEQ ID NO: 246073 - DNA, 25 bp, probe
gtggcttggaatttcatttgagcaa

SEQ ID NO: 246074 - DNA, 25 bp, probe
gtggcggtgaagtcttgtcgagaga

SEQ ID NO: 246075 - DNA, 25 bp, probe
gtggatggtcattgcagtttaagag

SEQ ID NO: 246076 - DNA, 25 bp, probe
gtggagcagtgatgagtgtctaagg

SEQ ID NO: 246077 - DNA, 25 bp, probe
gggcacatgtgcagagaagctgaag

SEQ ID NO: 246078 - DNA, 25 bp, probe
gtggcagctgctgaaaactgaatga

SEQ ID NO: 246079 - DNA, 25 bp, probe
gggcggctgaaactcactgagcagc

SEQ ID NO: 246080 - DNA, 25 bp, probe
gggccagctaaacatgcttcatcgt

SEQ ID NO: 246081 - DNA, 25 bp, probe
gtggccctaatgtgttggacagctt

SEQ ID NO: 246082 - DNA, 25 bp, probe
gtggcacctttatgattgagaaccc

SEQ ID NO: 246083 - DNA, 25 bp, probe
gggcgtttgtggtatgctggacccc

SEQ ID NO: 246084 - DNA, 25 bp, probe
gtggcgagtttgacaatgctggcgc

SEQ ID NO: 246085 - DNA, 25 bp, probe
gtggccagtttggcttctggatggg

SEQ ID NO: 246086 - DNA, 25 bp, probe
gggccgaatctgacgttgggtgatt

SEQ ID NO: 246087 - DNA, 25 bp, probe
gggcctggtcgtcatgtaggtcagg

SEQ ID NO: 246088 - DNA, 25 bp, probe
gtggaccagacgagtggggatcaga

SEQ ID NO: 246089 - DNA, 25 bp, probe
gtggacccacgcaaggacagtgagc

SEQ ID NO: 246090 - DNA, 25 bp, probe
gtggacccacgcaaagatagcgaga

SEQ ID NO: 246091 - DNA, 25 bp, probe
gtggaccacagcctaagctgagtgt

SEQ ID NO: 246092 - DNA, 25 bp, probe
gtggaccaactttatctgataatca

SEQ ID NO: 246093 - DNA, 25 bp, probe
gtggaaatctgtcacatcgtactca

SEQ ID NO: 246094 - DNA, 25 bp, probe
gtggaagaaggccacatggctgaca

SEQ ID NO: 246095 - DNA, 25 bp, probe
gtggctgcaaaagctcatgcgctca

SEQ ID NO: 246096 - DNA, 25 bp, probe
gtggcttgcaacatgctcatgccag

SEQ ID NO: 246097 - DNA, 25 bp, probe
gtggccatgaatatgcagactgcag

SEQ ID NO: 246098 - DNA, 25 bp, probe
gtggccatagcagctgcacatgcca

SEQ ID NO: 246099 - DNA, 25 bp, probe
gtggctcatcagagagacgcaaccc

SEQ ID NO: 246100 - DNA, 25 bp, probe
gtggactgcagcagggagcagaccc

SEQ ID NO: 246101 - DNA, 25 bp, probe
gggtctgacaaaaggaccaccgtca

SEQ ID NO: 246102 - DNA, 25 bp, probe
gggctgcttaagaaggaccccaagc

SEQ ID NO: 246103 - DNA, 25 bp, probe
gggctgcttaagaaggaccccaagc

SEQ ID NO: 246104 - DNA, 25 bp, probe
gtggagctctcaggaagggccctga

SEQ ID NO: 246105 - DNA, 25 bp, probe
gtggctgcagtagcatagaggcgcc

SEQ ID NO: 246106 - DNA, 25 bp, probe
gtggctggatcagcagctgcagaag

SEQ ID NO: 246107 - DNA, 25 bp, probe
gtggcggtcatggaattcatatggt

SEQ ID NO: 246108 - DNA, 25 bp, probe
gtggcggcgctctagaatagtggat

SEQ ID NO: 246109 - DNA, 25 bp, probe
gtggcgactgcacagaatggctgac

SEQ ID NO: 246110 - DNA, 25 bp, probe
gggcgatgcctcagaatgcccacaa

SEQ ID NO: 246111 - DNA, 25 bp, probe
gggcgatgcctgggtttacaaaaga

SEQ ID NO: 246112 - DNA, 25 bp, probe
gtggcagagcctaggttcaaaccaa

SEQ ID NO: 246113 - DNA, 25 bp, probe
gtggagggctgtcgtttgaactctc

SEQ ID NO: 246114 - DNA, 25 bp, probe
gtggagggagtgcccaagagtccca

SEQ ID NO: 246115 - DNA, 25 bp, probe
gtggagggtcactcataggacacca

SEQ ID NO: 246116 - DNA, 25 bp, probe
gtggaggtctgagaatgacgatacc

SEQ ID NO: 246117 - DNA, 25 bp, probe
gtggagcttcgaggaagaacagagc

SEQ ID NO: 246118 - DNA, 25 bp, probe
gtggcacggaatgaaaacagagctt

SEQ ID NO: 246119 - DNA, 25 bp, probe
gggccggcctagagaagggcgtttg

SEQ ID NO: 246120 - DNA, 25 bp, probe
gggcctggcacttgcaaaagtgtgg

SEQ ID NO: 246121 - DNA, 25 bp, probe
tgcaaccccttacactatgatgtgg

SEQ ID NO: 246122 - DNA, 25 bp, probe
tggaactctttagaattggtggaaa

SEQ ID NO: 246123 - DNA, 25 bp, probe
gggaccttggaacaatggattgaaa

SEQ ID NO: 246124 - DNA, 25 bp, probe
gtggaccttctggaggaaggtgggg

SEQ ID NO: 246125 - DNA, 25 bp, probe
gtggcagccatcttggagctggacg

SEQ ID NO: 246126 - DNA, 25 bp, probe
gtggcatctatattggacagggcag

SEQ ID NO: 246127 - DNA, 25 bp, probe
gtggattattgtcacaggcatatgg

SEQ ID NO: 246128 - DNA, 25 bp, probe
gtggagaattggccagagcctgtgg

SEQ ID NO: 246129 - DNA, 25 bp, probe
gtggagaaggggtaccgcatggaac

SEQ ID NO: 246130 - DNA, 25 bp, probe
gtggagaaggggtaccgcatggaac

SEQ ID NO: 246131 - DNA, 25 bp, probe
gtggagccaaggcggctccaggcag

SEQ ID NO: 246132 - DNA, 25 bp, probe
gtggaagacagtgtgtgctcggaga

SEQ ID NO: 246133 - DNA, 25 bp, probe
gtggaagcactggacgtctcagagg

SEQ ID NO: 246134 - DNA, 25 bp, probe
gtggacactctggaggtgatacggc

SEQ ID NO: 246135 - DNA, 25 bp, probe
gtggagcacatcgagaagatggtgg

SEQ ID NO: 246136 - DNA, 25 bp, probe
gtggagactcgcaaggtggtgctga

SEQ ID NO: 246137 - DNA, 25 bp, probe
gtggagctcacgaaggctgaggctg

SEQ ID NO: 246138 - DNA, 25 bp, probe
gtggagctcagaggacggggagata

SEQ ID NO: 246139 - DNA, 25 bp, probe
gtggcagctaaggtatgggctaaac

SEQ ID NO: 246140 - DNA, 25 bp, probe
gtggcagctaaggtatgggctaaac

SEQ ID NO: 246141 - DNA, 25 bp, probe
gggcctgatggggaacctaccatcc

SEQ ID NO: 246142 - DNA, 25 bp, probe
gggcctacagtcagaaaaccatcgc

SEQ ID NO: 246143 - DNA, 25 bp, probe
gtggcatcttttgtaaaactgattc

SEQ ID NO: 246144 - DNA, 25 bp, probe
gtggatctctttcctagattagctt

SEQ ID NO: 246145 - DNA, 25 bp, probe
gtggatcctttcatagactacactg

SEQ ID NO: 246146 - DNA, 25 bp, probe
gtggcccttgtctcggataaagaag

SEQ ID NO: 246147 - DNA, 25 bp, probe
gtggcctcttttctttcagacagag

SEQ ID NO: 246148 - DNA, 25 bp, probe
gggccttctgaacattccaaaagtt

SEQ ID NO: 246149 - DNA, 25 bp, probe
gggccttctgaacattccaaaagtt

SEQ ID NO: 246150 - DNA, 25 bp, probe
gggcgtattcaacaaccaggagaac

SEQ ID NO: 246151 - DNA, 25 bp, probe
gggttccccagagactagtgagagt

SEQ ID NO: 246152 - DNA, 25 bp, probe
gggtctcacccaaatttatggggag

SEQ ID NO: 246153 - DNA, 25 bp, probe
gggcttcatcctcataatgtcagag

SEQ ID NO: 246154 - DNA, 25 bp, probe
gtggcttccactctgaggtgtggga

SEQ ID NO: 246155 - DNA, 25 bp, probe
gtggcccccgttgatgatgggcgaa

SEQ ID NO: 246156 - DNA, 25 bp, probe
gtggcccctaggtggatgaggccaa

SEQ ID NO: 246157 - DNA, 25 bp, probe
gtggcttcggggtcatggaggagaa

SEQ ID NO: 246158 - DNA, 25 bp, probe
gtggagggggtgtctggaagctgag

SEQ ID NO: 246159 - DNA, 25 bp, probe
gtggagcaggcggtggggagagatg

SEQ ID NO: 246160 - DNA, 25 bp, probe
gtggagcttctgagggatgcaggtg

SEQ ID NO: 246161 - DNA, 25 bp, probe
gtggcagttatgctgttactagtga

SEQ ID NO: 246162 - DNA, 25 bp, probe
gtggctcatttgctgagtaaatatg

SEQ ID NO: 246163 - DNA, 25 bp, probe
gtggctttctccatcatagaatagc

SEQ ID NO: 246164 - DNA, 25 bp, probe
gtggcttagcttgcctgagattgtg

SEQ ID NO: 246165 - DNA, 25 bp, probe
gtggcttggcacttgtgtggtattg

SEQ ID NO: 246166 - DNA, 25 bp, probe
gtggcttggcacttgtgtggtattg

SEQ ID NO: 246167 - DNA, 25 bp, probe
gtggctttgcacttcaaatttttca

SEQ ID NO: 246168 - DNA, 25 bp, probe
gggctttccactgagatctactgga

SEQ ID NO: 246169 - DNA, 25 bp, probe
gggctttccactgagatctactgga

SEQ ID NO: 246170 - DNA, 25 bp, probe
gggctaattacctaaccagcttgta

SEQ ID NO: 246171 - DNA, 25 bp, probe
gggcgacttaccaaaatcagccagt

SEQ ID NO: 246172 - DNA, 25 bp, probe
gggcgacttaccaaaatcagccagt

SEQ ID NO: 246173 - DNA, 25 bp, probe
gtggatgactctgcaaaagtgaccc

SEQ ID NO: 246174 - DNA, 25 bp, probe
gtggacactatggcccagaagaccc

SEQ ID NO: 246175 - DNA, 25 bp, probe
gtggacatctctgatcaagaaacca

SEQ ID NO: 246176 - DNA, 25 bp, probe
gtggaatcactgctacaaaacctgt

SEQ ID NO: 246177 - DNA, 25 bp, probe
gtggagatactcttagagaagaggc

SEQ ID NO: 246178 - DNA, 25 bp, probe
gtggagtttggtggatgacgtgcca

SEQ ID NO: 246179 - DNA, 25 bp, probe
gggagttcgagatcagtctggtcaa

SEQ ID NO: 246180 - DNA, 25 bp, probe
ggggttaaaaatacaggctctgagt

SEQ ID NO: 246181 - DNA, 25 bp, probe
gggggacaatgaaaacaggccagtt

SEQ ID NO: 246182 - DNA, 25 bp, probe
gggctggaaatgaaatccacccggt

SEQ ID NO: 246183 - DNA, 25 bp, probe
gggctcaaacttaactccagccctg

SEQ ID NO: 246184 - DNA, 25 bp, probe
gggccaaagctcaaatgcccaccat

SEQ ID NO: 246185 - DNA, 25 bp, probe
ggtacaaactcgacttcagacctcc

SEQ ID NO: 246186 - DNA, 25 bp, probe
ggtacaaactcgacttcagacctcc

SEQ ID NO: 246187 - DNA, 25 bp, probe
ggtagaaattaatacaattccctgt

SEQ ID NO: 246188 - DNA, 25 bp, probe
ggaaaaaggcactccaaggtcctgt

SEQ ID NO: 246189 - DNA, 25 bp, probe
ggaaaaaggcactccaaggtcctgt

SEQ ID NO: 246190 - DNA, 25 bp, probe
gtggaagggtactgactgggtttgt

SEQ ID NO: 246191 - DNA, 25 bp, probe
gtggaatgggtatcaccgtttttgg

SEQ ID NO: 246192 - DNA, 25 bp, probe
gtggaatggagtaaaccagtgaaag

SEQ ID NO: 246193 - DNA, 25 bp, probe
gggcactgggtacccaagtgaaggt

SEQ ID NO: 246194 - DNA, 25 bp, probe
gtggcagctgctctatttaatgaaa

SEQ ID NO: 246195 - DNA, 25 bp, probe
gtggcatggcggcagttacatatta

SEQ ID NO: 246196 - DNA, 25 bp, probe
gtggatggggcaaacttcattgtta

SEQ ID NO: 246197 - DNA, 25 bp, probe
gtggcagtgggagaatttttataca

SEQ ID NO: 246198 - DNA, 25 bp, probe
gtggcagtgggagaatttttataca

SEQ ID NO: 246199 - DNA, 25 bp, probe
gtggcattttcacattatttaaaaa

SEQ ID NO: 246200 - DNA, 25 bp, probe
ttggctttggggatacttctaaatt

SEQ ID NO: 246201 - DNA, 25 bp, probe
tacgctttggggctaattcttgctg

SEQ ID NO: 246202 - DNA, 25 bp, probe
gggccctgagggcctagcatttttt

SEQ ID NO: 246203 - DNA, 25 bp, probe
gggcctccttggcaatgcatttgat

SEQ ID NO: 246204 - DNA, 25 bp, probe
gggcctccttggcaatgcatttgat

SEQ ID NO: 246205 - DNA, 25 bp, probe
gggcctccttggcaatgcatttgat

SEQ ID NO: 246206 - DNA, 25 bp, probe
gggcctctttaccatagcttaagaa

SEQ ID NO: 246207 - DNA, 25 bp, probe
gggccttttaggaatttgggatgat

SEQ ID NO: 246208 - DNA, 25 bp, probe
gggcgtggggagcaaattgcccagt

SEQ ID NO: 246209 - DNA, 25 bp, probe
gggctgttggtgggaagttttcctg

SEQ ID NO: 246210 - DNA, 25 bp, probe
gggctgaaggtcagaagtaatcctg

SEQ ID NO: 246211 - DNA, 25 bp, probe
gggctgcaggactttgacctaatca

SEQ ID NO: 246212 - DNA, 25 bp, probe
gtggagaagagctatccccgatgat

SEQ ID NO: 246213 - DNA, 25 bp, probe
gtggagaaagcggtcctctgaaatg

SEQ ID NO: 246214 - DNA, 25 bp, probe
gtggaagaagctgtactcgacccca

SEQ ID NO: 246215 - DNA, 25 bp, probe
gtggaagaagctgtactcgacccca

SEQ ID NO: 246216 - DNA, 25 bp, probe
gtggaagaagctgtactcgacccca

SEQ ID NO: 246217 - DNA, 25 bp, probe
gtggaaggagctcaaacagacgact

SEQ ID NO: 246218 - DNA, 25 bp, probe
gtggcacctggtgaaaaacagacag

SEQ ID NO: 246219 - DNA, 25 bp, probe
gggcctcaggttctacaaatgccag

SEQ ID NO: 246220 - DNA, 25 bp, probe
ggtcctaatcttctgaacttggcgc

SEQ ID NO: 246221 - DNA, 25 bp, probe
tggccgaaatttctacacctgtgtc

SEQ ID NO: 246222 - DNA, 25 bp, probe
gggccataatttctgagcctcggtt

SEQ ID NO: 246223 - DNA, 25 bp, probe
gggccagagtgtgtatacccaggct

SEQ ID NO: 246224 - DNA, 25 bp, probe
gggccagagtgtgtatacccaggct

SEQ ID NO: 246225 - DNA, 25 bp, probe
gggaggttgtcattcagaaccaagt

SEQ ID NO: 246226 - DNA, 25 bp, probe
gggaggtttccatatcctcagattc

SEQ ID NO: 246227 - DNA, 25 bp, probe
gtggaagaataccagcttccttatc

SEQ ID NO: 246228 - DNA, 25 bp, probe
gtggagcataaaacagcatattctt

SEQ ID NO: 246229 - DNA, 25 bp, probe
gtggacagaggaaagcagtctttgg

SEQ ID NO: 246230 - DNA, 25 bp, probe
gtggacagaggaaagcagtctttgg

SEQ ID NO: 246231 - DNA, 25 bp, probe
gtggagaggtaaagctggctttcga

SEQ ID NO: 246232 - DNA, 25 bp, probe
gtggagaggatgtaacacgccccca

SEQ ID NO: 246233 - DNA, 25 bp, probe
gtggctgaggaggtgaacgccatcc

SEQ ID NO: 246234 - DNA, 25 bp, probe
gggcgcgcagtggatgaagcaaatc

SEQ ID NO: 246235 - DNA, 25 bp, probe
gtggctgctatgaaatgcaagccca

SEQ ID NO: 246236 - DNA, 25 bp, probe
gtggagcattggctgagagaccagg

SEQ ID NO: 246237 - DNA, 25 bp, probe
gtggagcattggctgagagaccagg

SEQ ID NO: 246238 - DNA, 25 bp, probe
gtggacactgtcataggagaaggag

SEQ ID NO: 246239 - DNA, 25 bp, probe
gtggacgaagcaattgtaaagcaga

SEQ ID NO: 246240 - DNA, 25 bp, probe
gtggaagcaagccttcaatgccacg

SEQ ID NO: 246241 - DNA, 25 bp, probe
gtggaagacatcctatctagctgca

SEQ ID NO: 246242 - DNA, 25 bp, probe
gtggacatagccctgtgatactgca

SEQ ID NO: 246243 - DNA, 25 bp, probe
gtggacagatgagggtgatgacagc

SEQ ID NO: 246244 - DNA, 25 bp, probe
gtggcacacacgtgtgattccagct

SEQ ID NO: 246245 - DNA, 25 bp, probe
gggcatcatacgtgactgtagaatt

SEQ ID NO: 246246 - DNA, 25 bp, probe
gggctcatgacacagcctgtttcaa

SEQ ID NO: 246247 - DNA, 25 bp, probe
gggccatgagctgactcatgctttt

SEQ ID NO: 246248 - DNA, 25 bp, probe
gggccatgagctgactcatgctttt

SEQ ID NO: 246249 - DNA, 25 bp, probe
gtggctcaagcaaggctaattgttt

SEQ ID NO: 246250 - DNA, 25 bp, probe
gggctatagccagaacatttacttc

SEQ ID NO: 246251 - DNA, 25 bp, probe
gggctatagccagaacatttacttc

SEQ ID NO: 246252 - DNA, 25 bp, probe
gggcccagaggtgacatttgacttt

SEQ ID NO: 246253 - DNA, 25 bp, probe
gggcccagacggtacatggggctgg

SEQ ID NO: 246254 - DNA, 25 bp, probe
ggtccgagaagggacatgtgggacg

SEQ ID NO: 246255 - DNA, 25 bp, probe
gggcctgagaacagccagggtgcac

SEQ ID NO: 246256 - DNA, 25 bp, probe
gtggctgctggatcagggcagccgg

SEQ ID NO: 246257 - DNA, 25 bp, probe
gtggctctgtacctggagcatggcg

SEQ ID NO: 246258 - DNA, 25 bp, probe
gtggactttagcatgcagagcagca

SEQ ID NO: 246259 - DNA, 25 bp, probe
gtggactttggctttagcatgacat

SEQ ID NO: 246260 - DNA, 25 bp, probe
gtggacttcatagcttactgacaga

SEQ ID NO: 246261 - DNA, 25 bp, probe
gtggcaattccagcttagcaacgca

SEQ ID NO: 246262 - DNA, 25 bp, probe
gtggcttaccaagatcacataccag

SEQ ID NO: 246263 - DNA, 25 bp, probe
gtggctgggctatgccaactcagcc

SEQ ID NO: 246264 - DNA, 25 bp, probe
gtggaagacatatctcacctcaact

SEQ ID NO: 246265 - DNA, 25 bp, probe
gtggaagattatgacgccacctccc

SEQ ID NO: 246266 - DNA, 25 bp, probe
gtggaagtccatctgacaaccccac

SEQ ID NO: 246267 - DNA, 25 bp, probe
gtggaaggactcatgaccacagtcc

SEQ ID NO: 246268 - DNA, 25 bp, probe
gtggaatggattacgagcctcaatg

SEQ ID NO: 246269 - DNA, 25 bp, probe
gtggaagaatataaacctgaagagg

SEQ ID NO: 246270 - DNA, 25 bp, probe
gtggagaattgattccccgaagacc

SEQ ID NO: 246271 - DNA, 25 bp, probe
ggtacctggtgtgccagcgaaacca

SEQ ID NO: 246272 - DNA, 25 bp, probe
ggtacctggtgtgccagcgaaacca

SEQ ID NO: 246273 - DNA, 25 bp, probe
gggcctatggtgtcccagtaaagcc

SEQ ID NO: 246274 - DNA, 25 bp, probe
gtggctctgatgctgagcgaagcta

SEQ ID NO: 246275 - DNA, 25 bp, probe
gtggctctgatgctgagcgaagcta

SEQ ID NO: 246276 - DNA, 25 bp, probe
gtggcttatggggtagcagtcaata

SEQ ID NO: 246277 - DNA, 25 bp, probe
gtggcttcatgaccgtaaggaaatg

SEQ ID NO: 246278 - DNA, 25 bp, probe
gtggctgtcagaccgagagtagcaa

SEQ ID NO: 246279 - DNA, 25 bp, probe
gtggctgtacaacgaggtgcagctc

SEQ ID NO: 246280 - DNA, 25 bp, probe
gtggcctagccaagacgtggcattc

SEQ ID NO: 246281 - DNA, 25 bp, probe
gtggcctagccaagacgtggcattc

SEQ ID NO: 246282 - DNA, 25 bp, probe
gggctaatgctcaaagctgtgcagc

SEQ ID NO: 246283 - DNA, 25 bp, probe
gggcttcattgctgatgtggaccta

SEQ ID NO: 246284 - DNA, 25 bp, probe
gggcttcattgctgatgtggaccta

SEQ ID NO: 246285 - DNA, 25 bp, probe
gggctctagggttgctggagcctga

SEQ ID NO: 246286 - DNA, 25 bp, probe
gggccttgcggcacaggactgtgcc

SEQ ID NO: 246287 - DNA, 25 bp, probe
gtggcgtcctggttcaaggatgtca

SEQ ID NO: 246288 - DNA, 25 bp, probe
gtggcgtcctggttcaaggatgtca

SEQ ID NO: 246289 - DNA, 25 bp, probe
gtggcgtcctggttcaaggatgtca

SEQ ID NO: 246290 - DNA, 25 bp, probe
gtggcgtcctggttcaaggatgtca

SEQ ID NO: 246291 - DNA, 25 bp, probe
gggcgtcatcatagaggaagggaag

SEQ ID NO: 246292 - DNA, 25 bp, probe
gggctacgattggctgaagtaccag

SEQ ID NO: 246293 - DNA, 25 bp, probe
gggcgaattctaggaaccccagact

SEQ ID NO: 246294 - DNA, 25 bp, probe
gggcgaattctgcagatatccatca

SEQ ID NO: 246295 - DNA, 25 bp, probe
gggctgttccagagattcgatcctc

SEQ ID NO: 246296 - DNA, 25 bp, probe
ggtcttattcagaccccagatcaac

SEQ ID NO: 246297 - DNA, 25 bp, probe
gtggctgtagcttatcccaagtcaa

SEQ ID NO: 246298 - DNA, 25 bp, probe
gtggctgtagcttatcccaagtcaa

SEQ ID NO: 246299 - DNA, 25 bp, probe
gtggctgctaatttacagaagattg

SEQ ID NO: 246300 - DNA, 25 bp, probe
gtggctgtgaacttgaatgaacact

SEQ ID NO: 246301 - DNA, 25 bp, probe
gggctgatgtgggctagtaagactc

SEQ ID NO: 246302 - DNA, 25 bp, probe
gggctgtgtggcatcgcagaatggc

SEQ ID NO: 246303 - DNA, 25 bp, probe
gggctgggactaagtcacagggatc

SEQ ID NO: 246304 - DNA, 25 bp, probe
gtggctggggcatggaaggcaagat

SEQ ID NO: 246305 - DNA, 25 bp, probe
gggcggggctggagatcatcagaaa

SEQ ID NO: 246306 - DNA, 25 bp, probe
gggcgtggtggtgagtgcctgtaat

SEQ ID NO: 246307 - DNA, 25 bp, probe
gtggcctgggagttcagcttttaga

SEQ ID NO: 246308 - DNA, 25 bp, probe
gtggctgtgaggtcagggttttaga

SEQ ID NO: 246309 - DNA, 25 bp, probe
gggcttgtgcattcagatttttaaa

SEQ ID NO: 246310 - DNA, 25 bp, probe
gggcttgtgcattcagatttttaaa

SEQ ID NO: 246311 - DNA, 25 bp, probe
gggccgttaggagtatttgaatggg

SEQ ID NO: 246312 - DNA, 25 bp, probe
gtggctcctatctgtgttttgaatg

SEQ ID NO: 246313 - DNA, 25 bp, probe
gggctctcaaattcttcctggagag

SEQ ID NO: 246314 - DNA, 25 bp, probe
gggctctcaaattcttcctggagag

SEQ ID NO: 246315 - DNA, 25 bp, probe
gtggccatcaaatgcattgccaagg

SEQ ID NO: 246316 - DNA, 25 bp, probe
gtggcaacagaaacaggcacaactg

SEQ ID NO: 246317 - DNA, 25 bp, probe
gtggctacagacgaagcaaaggctg

SEQ ID NO: 246318 - DNA, 25 bp, probe
gtggaatcgaatcagaagtggtggc

SEQ ID NO: 246319 - DNA, 25 bp, probe
gtggaccgtctttaatgtcttctgc

SEQ ID NO: 246320 - DNA, 25 bp, probe
gtggaacctgtttaatgttatgagg

SEQ ID NO: 246321 - DNA, 25 bp, probe
gtggaaccggcgaaacgacatgggg

SEQ ID NO: 246322 - DNA, 25 bp, probe
gtggaactggtggaaaccctgctga

SEQ ID NO: 246323 - DNA, 25 bp, probe
gtggaactggtggaaaccctgctga

SEQ ID NO: 246324 - DNA, 25 bp, probe
gtggctccgaggaaaatcactccta

SEQ ID NO: 246325 - DNA, 25 bp, probe
gggctctcagagctaagacacactt

SEQ ID NO: 246326 - DNA, 25 bp, probe
gtggcccatgagttaggtcatacgt

SEQ ID NO: 246327 - DNA, 25 bp, probe
gtggcccatgtttagatgacattgc

SEQ ID NO: 246328 - DNA, 25 bp, probe
gtggactctgtggccaagacaatgg

SEQ ID NO: 246329 - DNA, 25 bp, probe
gtggactgtgatgccacacagagtg

SEQ ID NO: 246330 - DNA, 25 bp, probe
gtggcagcgtgttggagcgcgagtc

SEQ ID NO: 246331 - DNA, 25 bp, probe
gtggcacttcaatgagacggtgctc

SEQ ID NO: 246332 - DNA, 25 bp, probe
gtggcacttcaatgagacggtgctc

SEQ ID NO: 246333 - DNA, 25 bp, probe
gtggacaaaagggcatgctggttcc

SEQ ID NO: 246334 - DNA, 25 bp, probe
gggaaataccgagtggatttccata

SEQ ID NO: 246335 - DNA, 25 bp, probe
gggctgattatccggtggctttagc

SEQ ID NO: 246336 - DNA, 25 bp, probe
gggcagttacctggttgctgtttta

SEQ ID NO: 246337 - DNA, 25 bp, probe
gggcttgtactcactttaatttgaa

SEQ ID NO: 246338 - DNA, 25 bp, probe
gggccatttctcagctataaattgc

SEQ ID NO: 246339 - DNA, 25 bp, probe
gtggctactttcacttcagagtgtc

SEQ ID NO: 246340 - DNA, 25 bp, probe
gtggcttctttcaactttagtactt

SEQ ID NO: 246341 - DNA, 25 bp, probe
gtggctgccagtagcagactgttaa

SEQ ID NO: 246342 - DNA, 25 bp, probe
gtggcccagtatgagccctagaaga

SEQ ID NO: 246343 - DNA, 25 bp, probe
gtggaaatgaatgggcatcctggac

SEQ ID NO: 246344 - DNA, 25 bp, probe
gtggaaatgcataggtgatctggga

SEQ ID NO: 246345 - DNA, 25 bp, probe
gtggaaatctggagactggtcagag

SEQ ID NO: 246346 - DNA, 25 bp, probe
gtggaaatttcaagcacttttgcac

SEQ ID NO: 246347 - DNA, 25 bp, probe
gggctacattcctaactcatattaa

SEQ ID NO: 246348 - DNA, 25 bp, probe
gggctacattcctaactcatattaa

SEQ ID NO: 246349 - DNA, 25 bp, probe
gggcttcattgccagaacacattat

SEQ ID NO: 246350 - DNA, 25 bp, probe
gggctggctagggacatcatgaatg

SEQ ID NO: 246351 - DNA, 25 bp, probe
gggctgtgtgatatatgccacaatg

SEQ ID NO: 246352 - DNA, 25 bp, probe
gtggcagtcaagatcatctcaaaga

SEQ ID NO: 246353 - DNA, 25 bp, probe
gtggctgtcaagatcatcgaccgca

SEQ ID NO: 246354 - DNA, 25 bp, probe
gggctgctgaagcccacggcctgca

SEQ ID NO: 246355 - DNA, 25 bp, probe
gggccatcaaggtactgtgcctagc

SEQ ID NO: 246356 - DNA, 25 bp, probe
gtggctgataaggacacttccaatg

SEQ ID NO: 246357 - DNA, 25 bp, probe
gtggctgtagaatcatccatccgtc

SEQ ID NO: 246358 - DNA, 25 bp, probe
gtggcatgtatgtgcagactcttgg

SEQ ID NO: 246359 - DNA, 25 bp, probe
gtggcatggcacagaaacttggctc

SEQ ID NO: 246360 - DNA, 25 bp, probe
gtggcatggcacagaaacttggctc

SEQ ID NO: 246361 - DNA, 25 bp, probe
gtggctgatcctaaatactggagat

SEQ ID NO: 246362 - DNA, 25 bp, probe
gtggctcatcctacctgttaggagc

SEQ ID NO: 246363 - DNA, 25 bp, probe
gtggctcatcctacctgttaggagc

SEQ ID NO: 246364 - DNA, 25 bp, probe
gtggccactctttcatggtggtggc

SEQ ID NO: 246365 - DNA, 25 bp, probe
gtggcaccactattcaggtgaggct

SEQ ID NO: 246366 - DNA, 25 bp, probe
gtggccaccagctacgagagtagcc

SEQ ID NO: 246367 - DNA, 25 bp, probe
gtggcaaccagcatggaggtcgacg

SEQ ID NO: 246368 - DNA, 25 bp, probe
gtggcaaccagcatggaggtcgacg

SEQ ID NO: 246369 - DNA, 25 bp, probe
gtggacaccacatttgaggctggag

SEQ ID NO: 246370 - DNA, 25 bp, probe
gtggacatgagccatttgaggggag

SEQ ID NO: 246371 - DNA, 25 bp, probe
gtggacatgactgcttatgggaggc

SEQ ID NO: 246372 - DNA, 25 bp, probe
gggccatagcatctctattgtagcc

SEQ ID NO: 246373 - DNA, 25 bp, probe
gggctcatccacggtgttgcatgag

SEQ ID NO: 246374 - DNA, 25 bp, probe
gggctgcaacaaccagtagctcatg

SEQ ID NO: 246375 - DNA, 25 bp, probe
gggctgcaatgccgccgatatgatg

SEQ ID NO: 246376 - DNA, 25 bp, probe
gtggctgcaacggcatgaacttggg

SEQ ID NO: 246377 - DNA, 25 bp, probe
gtggctgcaacggcatgaacttggg

SEQ ID NO: 246378 - DNA, 25 bp, probe
gtggccaaagcgaacagcctggagc

SEQ ID NO: 246379 - DNA, 25 bp, probe
gtggccaaagcgaacagcctggagc

SEQ ID NO: 246380 - DNA, 25 bp, probe
gtggccaaggtgaatagcacaggtt

SEQ ID NO: 246381 - DNA, 25 bp, probe
gtggcaaaagctctacagcatttta

SEQ ID NO: 246382 - DNA, 25 bp, probe
gtggcatattacctgtaacatgttt

SEQ ID NO: 246383 - DNA, 25 bp, probe
gtggaatatgaccctaccagaggtt

SEQ ID NO: 246384 - DNA, 25 bp, probe
gggagatctggcattaccagtacct

SEQ ID NO: 246385 - DNA, 25 bp, probe
ggaagatctggtgtagctccttcgg

SEQ ID NO: 246386 - DNA, 25 bp, probe
ggaagaggatggatccccttctagt

SEQ ID NO: 246387 - DNA, 25 bp, probe
gggaatttgggtggaccccatagat

SEQ ID NO: 246388 - DNA, 25 bp, probe
gggagttagggcagaaccctacttg

SEQ ID NO: 246389 - DNA, 25 bp, probe
gggattaaggaatgaacctcttttg

SEQ ID NO: 246390 - DNA, 25 bp, probe
gtggctggaaggaaatagacccttt

SEQ ID NO: 246391 - DNA, 25 bp, probe
gggcttgggtgtagaagaccctgtg

SEQ ID NO: 246392 - DNA, 25 bp, probe
gggcttgggtgtagaagaccctgtg

SEQ ID NO: 246393 - DNA, 25 bp, probe
gggcttggatgacagcagaaccaac

SEQ ID NO: 246394 - DNA, 25 bp, probe
gtggcttcctgatggcagaaaaatc

SEQ ID NO: 246395 - DNA, 25 bp, probe
gtggaagctgtgaggcaagagaaac

SEQ ID NO: 246396 - DNA, 25 bp, probe
gtggaagcatttcgcgatggacaga

SEQ ID NO: 246397 - DNA, 25 bp, probe
gtggacaatctcagctgggtcaata

SEQ ID NO: 246398 - DNA, 25 bp, probe
gtggacaatctcagctgggtcaata

SEQ ID NO: 246399 - DNA, 25 bp, probe
gtggacaatctcagctgggtcaata

SEQ ID NO: 246400 - DNA, 25 bp, probe
gtggacaatctcagctgggtcaata

SEQ ID NO: 246401 - DNA, 25 bp, probe
gtggacagaacatgctgtgttccat

SEQ ID NO: 246402 - DNA, 25 bp, probe
gtggcatcagatacagttttcctat

SEQ ID NO: 246403 - DNA, 25 bp, probe
gtggcatcagatacagttttcctat

SEQ ID NO: 246404 - DNA, 25 bp, probe
gtggcatcaagcattttataacttt

SEQ ID NO: 246405 - DNA, 25 bp, probe
gtggcagccacattttttgttcatt

SEQ ID NO: 246406 - DNA, 25 bp, probe
gggctacatcatatgctttgttcct

SEQ ID NO: 246407 - DNA, 25 bp, probe
gggctacatcatatgctttgttcct

SEQ ID NO: 246408 - DNA, 25 bp, probe
gggcttcatgcttatgttggctgtg

SEQ ID NO: 246409 - DNA, 25 bp, probe
gggctgttgccatgaaggcttgcag

SEQ ID NO: 246410 - DNA, 25 bp, probe
gggctggtggaacaagccgaggcag

SEQ ID NO: 246411 - DNA, 25 bp, probe
gggctggggacacaacaatgactga

SEQ ID NO: 246412 - DNA, 25 bp, probe
gggcagtgggcctaaagcagggctg

SEQ ID NO: 246413 - DNA, 25 bp, probe
gggctttggccttaaaggcgctgtc

SEQ ID NO: 246414 - DNA, 25 bp, probe
gggctatattcctgacaaaagttcc

SEQ ID NO: 246415 - DNA, 25 bp, probe
gggctgtatttgtgcactaaatctt

SEQ ID NO: 246416 - DNA, 25 bp, probe
gtggctgttggttggcttgaaatgc

SEQ ID NO: 246417 - DNA, 25 bp, probe
gggcattcgtattgcgccgctagag

SEQ ID NO: 246418 - DNA, 25 bp, probe
gggcatccagtgacggcaggaacgt

SEQ ID NO: 246419 - DNA, 25 bp, probe
gtggcatcgcagtctcttagaattt

SEQ ID NO: 246420 - DNA, 25 bp, probe
gtggcctagacttctgagtaattaa

SEQ ID NO: 246421 - DNA, 25 bp, probe
gtggcctagacttctgagtaattaa

SEQ ID NO: 246422 - DNA, 25 bp, probe
gggccacaactttggaatgtttcat

SEQ ID NO: 246423 - DNA, 25 bp, probe
gggctacaattctttgagttcttaa

SEQ ID NO: 246424 - DNA, 25 bp, probe
gggctccaggatttgaatcttctct

SEQ ID NO: 246425 - DNA, 25 bp, probe
gtggcggaggaagtgaatgccatcc

SEQ ID NO: 246426 - DNA, 25 bp, probe
gtggcgctgaggaagctgatactgt

SEQ ID NO: 246427 - DNA, 25 bp, probe
gtggctgggcagagctgcatcatcc

SEQ ID NO: 246428 - DNA, 25 bp, probe
gtggctgtgccaaactcattgattt

SEQ ID NO: 246429 - DNA, 25 bp, probe
gtggctgtgccaaactcattgattt

SEQ ID NO: 246430 - DNA, 25 bp, probe
gtggcatatgcgacggccatggact

SEQ ID NO: 246431 - DNA, 25 bp, probe
gtggcagatgctaggaccaaggctg

SEQ ID NO: 246432 - DNA, 25 bp, probe
gtggcaagcatcagcaggaattgct

SEQ ID NO: 246433 - DNA, 25 bp, probe
gtggcaagactactggacttctatc

SEQ ID NO: 246434 - DNA, 25 bp, probe
gtggcctggatccaggacttcatca

SEQ ID NO: 246435 - DNA, 25 bp, probe
gtggccatattctatggcaccctca

SEQ ID NO: 246436 - DNA, 25 bp, probe
gggcagccatgaatgtagcgcccca

SEQ ID NO: 246437 - DNA, 25 bp, probe
gtggcagtgagaatgtgggcccccc

SEQ ID NO: 246438 - DNA, 25 bp, probe
gtggcggagaagctgctacagctgc

SEQ ID NO: 246439 - DNA, 25 bp, probe
gtggcaaggtcaccatggatgggcg

SEQ ID NO: 246440 - DNA, 25 bp, probe
gtggccgagaagctgcgtgtggcag

SEQ ID NO: 246441 - DNA, 25 bp, probe
gtggcactgggacgtaagtggcgca

SEQ ID NO: 246442 - DNA, 25 bp, probe
gtggaagcgccaggtgatggtgggc

SEQ ID NO: 246443 - DNA, 25 bp, probe
gtggaagaggaggctgggcaggcgc

SEQ ID NO: 246444 - DNA, 25 bp, probe
gtggaagggagaagcgacgcccctc

SEQ ID NO: 246445 - DNA, 25 bp, probe
ggtccagtgggaggggcccaagatc

SEQ ID NO: 246446 - DNA, 25 bp, probe
gggctaggtgggagagcccaagccc

SEQ ID NO: 246447 - DNA, 25 bp, probe
gtggcagaggggccactacccaagg

SEQ ID NO: 246448 - DNA, 25 bp, probe
gtggaattgaacgactacccagaag

SEQ ID NO: 246449 - DNA, 25 bp, probe
gtggaaaaagccctccgtagaagtg

SEQ ID NO: 246450 - DNA, 25 bp, probe
gggattgaaacccagggtcgtcacg

SEQ ID NO: 246451 - DNA, 25 bp, probe
gggcactaacccaggggatgccacc

SEQ ID NO: 246452 - DNA, 25 bp, probe
gggctaaacactttgggcagactga

SEQ ID NO: 246453 - DNA, 25 bp, probe
gggctaaacactttgggcagactga

SEQ ID NO: 246454 - DNA, 25 bp, probe
gtggctttaacattttatgcaacta

SEQ ID NO: 246455 - DNA, 25 bp, probe
gggccattaaaagctcagctcctat

SEQ ID NO: 246456 - DNA, 25 bp, probe
ggtgttgtaaaagatcagccttcag

SEQ ID NO: 246457 - DNA, 25 bp, probe
ggtgatcggaaagggtcccttcagt

SEQ ID NO: 246458 - DNA, 25 bp, probe
gggacaggaaccaagtcctttgcgt

SEQ ID NO: 246459 - DNA, 25 bp, probe
gggacaggaaccaagtcctttgcgt

SEQ ID NO: 246460 - DNA, 25 bp, probe
gtggcaaggacagctagttatactc

SEQ ID NO: 246461 - DNA, 25 bp, probe
gtggcagacagaatcactatttcaa

SEQ ID NO: 246462 - DNA, 25 bp, probe
gtggaagcggtcttgatttcagaag

SEQ ID NO: 246463 - DNA, 25 bp, probe
gtggcaaaggtttattccagagaag

SEQ ID NO: 246464 - DNA, 25 bp, probe
gtggcaactgaaattataccaggca

SEQ ID NO: 246465 - DNA, 25 bp, probe
gtggcaactgaaattataccaggca

SEQ ID NO: 246466 - DNA, 25 bp, probe
gtggcaactgaaattataccaggca

SEQ ID NO: 246467 - DNA, 25 bp, probe
gtggcaacggacaaaactctggcac

SEQ ID NO: 246468 - DNA, 25 bp, probe
gtggccactgtgcaaaccacatgga

SEQ ID NO: 246469 - DNA, 25 bp, probe
gtggcgacgatgaacatgccgttgg

SEQ ID NO: 246470 - DNA, 25 bp, probe
gtggcgacgatgaacatgccgttgg

SEQ ID NO: 246471 - DNA, 25 bp, probe
gtggcgacgatgaacatgccgttgg

SEQ ID NO: 246472 - DNA, 25 bp, probe
gtggccaggttaaggatgtaggtca

SEQ ID NO: 246473 - DNA, 25 bp, probe
gggcaaggttaggtgaaggaccaag

SEQ ID NO: 246474 - DNA, 25 bp, probe
gggccggagaaggtgctcaggagca

SEQ ID NO: 246475 - DNA, 25 bp, probe
gggcgtggaagggcattaggagtgt

SEQ ID NO: 246476 - DNA, 25 bp, probe
gggcgtggcaagggaatagcgactt

SEQ ID NO: 246477 - DNA, 25 bp, probe
gggcaggacaagggcctgggatttg

SEQ ID NO: 246478 - DNA, 25 bp, probe
gggctggagaacgccgagatctacg

SEQ ID NO: 246479 - DNA, 25 bp, probe
gggctgtagaacacatagatactag

SEQ ID NO: 246480 - DNA, 25 bp, probe
gggcattgaatagacaagtaaagct

SEQ ID NO: 246481 - DNA, 25 bp, probe
gggcattgaatagacaagtaaagct

SEQ ID NO: 246482 - DNA, 25 bp, probe
gggccggaagacgaacatcattgac

SEQ ID NO: 246483 - DNA, 25 bp, probe
gtggcaaggaagctagaacttacca

SEQ ID NO: 246484 - DNA, 25 bp, probe
gggcgagggagggcgaactgtcgaa

SEQ ID NO: 246485 - DNA, 25 bp, probe
gggccgccaaggggagcaagtggaa

SEQ ID NO: 246486 - DNA, 25 bp, probe
gggcctactagagtctgaacagctg

SEQ ID NO: 246487 - DNA, 25 bp, probe
gggaataccacagtcattagccttc

SEQ ID NO: 246488 - DNA, 25 bp, probe
ggtaagatcccttttatgcacctag

SEQ ID NO: 246489 - DNA, 25 bp, probe
gggcataatcattccagttaccgta

SEQ ID NO: 246490 - DNA, 25 bp, probe
gggcataatcattccagttaccgta

SEQ ID NO: 246491 - DNA, 25 bp, probe
gtggaaggtacctttacctgcgagg

SEQ ID NO: 246492 - DNA, 25 bp, probe
gtggcgaatgtaaacgtccgcgcgg

SEQ ID NO: 246493 - DNA, 25 bp, probe
gtggccaggtataactttgccgccc

SEQ ID NO: 246494 - DNA, 25 bp, probe
gtggccaggtataactttgccgccc

SEQ ID NO: 246495 - DNA, 25 bp, probe
gggctctggattaatcaattaccca

SEQ ID NO: 246496 - DNA, 25 bp, probe
gtggccaggagttacttctatgcct

SEQ ID NO: 246497 - DNA, 25 bp, probe
gtggctagtggtttgcctaagagaa

SEQ ID NO: 246498 - DNA, 25 bp, probe
gtggctacatagttaccattaggaa

SEQ ID NO: 246499 - DNA, 25 bp, probe
gtggcaatgaaattacctgctacga

SEQ ID NO: 246500 - DNA, 25 bp, probe
gtggcattacaattagtagtgggca

SEQ ID NO: 246501 - DNA, 25 bp, probe
gtggctgtcatcagtggtgaggagg

SEQ ID NO: 246502 - DNA, 25 bp, probe
gtggctgtgctggttggagcaggaa

SEQ ID NO: 246503 - DNA, 25 bp, probe
gtggctgatcggcatggagctggtc

SEQ ID NO: 246504 - DNA, 25 bp, probe
gtggctaccaggagagcaggtgaca

SEQ ID NO: 246505 - DNA, 25 bp, probe
gtggcatatccattgtggaaactgg

SEQ ID NO: 246506 - DNA, 25 bp, probe
gtggcattcctttaggaatgctgtg

SEQ ID NO: 246507 - DNA, 25 bp, probe
gtggcatttttatcgtgctcatctg

SEQ ID NO: 246508 - DNA, 25 bp, probe
gtggctctttctgatagtgtcagta

SEQ ID NO: 246509 - DNA, 25 bp, probe
gggctgcttgctgtatgagttatgt

SEQ ID NO: 246510 - DNA, 25 bp, probe
gtggctgctttggcttggtgaagcc

SEQ ID NO: 246511 - DNA, 25 bp, probe
gtggcttatgtcatttacacacaga

SEQ ID NO: 246512 - DNA, 25 bp, probe
gtggcttatgtcatttacacacaga

SEQ ID NO: 246513 - DNA, 25 bp, probe
gtggctgcttgtataaactgcaaga

SEQ ID NO: 246514 - DNA, 25 bp, probe
gggctggtttccaaacagaggattt

SEQ ID NO: 246515 - DNA, 25 bp, probe
gggctggtttccaaacagaggattt

SEQ ID NO: 246516 - DNA, 25 bp, probe
gtggctgtctttcggaaaatggtta

SEQ ID NO: 246517 - DNA, 25 bp, probe
gtggcttcttagttagtaatggtga

SEQ ID NO: 246518 - DNA, 25 bp, probe
gtggcttcttagttagtaatggtga

SEQ ID NO: 246519 - DNA, 25 bp, probe
gggctctggtaggtactaatggtga

SEQ ID NO: 246520 - DNA, 25 bp, probe
gggcttgtctcgatactaacagtga

SEQ ID NO: 246521 - DNA, 25 bp, probe
gggccatgattggtttctaggcagt

SEQ ID NO: 246522 - DNA, 25 bp, probe
gggcactgagtgttgaatttccaga

SEQ ID NO: 246523 - DNA, 25 bp, probe
gggcactgagtgttgaatttccaga

SEQ ID NO: 246524 - DNA, 25 bp, probe
gtggccgaggactttgattgcacat

SEQ ID NO: 246525 - DNA, 25 bp, probe
gtggcaaatggaacttctctgatct

SEQ ID NO: 246526 - DNA, 25 bp, probe
gtggcaaatggaacttctctgatct

SEQ ID NO: 246527 - DNA, 25 bp, probe
gggctacttgagtttgctagatctg

SEQ ID NO: 246528 - DNA, 25 bp, probe
gggctacttgagtttgctagatctg

SEQ ID NO: 246529 - DNA, 25 bp, probe
gggctgagcggaacattctagagtc

SEQ ID NO: 246530 - DNA, 25 bp, probe
gggctgagcggaacattctagagtc

SEQ ID NO: 246531 - DNA, 25 bp, probe
gggctggaggaattagtaagtgctc

SEQ ID NO: 246532 - DNA, 25 bp, probe
gtggcggaggaagcagctagttctt

SEQ ID NO: 246533 - DNA, 25 bp, probe
gggcagcaagggtgcccagcttttg

SEQ ID NO: 246534 - DNA, 25 bp, probe
gggcagcaagggtgcccagcttttg

SEQ ID NO: 246535 - DNA, 25 bp, probe
gtggcagaaggtgtcgtcgatgtgg

SEQ ID NO: 246536 - DNA, 25 bp, probe
gtggctgagaggagccggctgtgga

SEQ ID NO: 246537 - DNA, 25 bp, probe
gtggctacacgaggagctgagctgg

SEQ ID NO: 246538 - DNA, 25 bp, probe
gtggcaactggcggagcagatgcat

SEQ ID NO: 246539 - DNA, 25 bp, probe
gtggcaactggcggagcagatgcat

SEQ ID NO: 246540 - DNA, 25 bp, probe
gtggctggtgaggctgcacagagca

SEQ ID NO: 246541 - DNA, 25 bp, probe
gtggcgagtgaaggcaccatgctga

SEQ ID NO: 246542 - DNA, 25 bp, probe
gtggcgagtgaaggcaccatgctga

SEQ ID NO: 246543 - DNA, 25 bp, probe
gggcggagcaagtccagcttgaaga

SEQ ID NO: 246544 - DNA, 25 bp, probe
gggccggatcaagagcctgcaaact

SEQ ID NO: 246545 - DNA, 25 bp, probe
gggcctggaaggagcattgcagaac

SEQ ID NO: 246546 - DNA, 25 bp, probe
gggccgtcaccgaatatgtgcagaa

SEQ ID NO: 246547 - DNA, 25 bp, probe
gggccagatgcaccggcagaaagca

SEQ ID NO: 246548 - DNA, 25 bp, probe
gtggccagggacggcatgagcagga

SEQ ID NO: 246549 - DNA, 25 bp, probe
gtggccagggacggcatgagcagga

SEQ ID NO: 246550 - DNA, 25 bp, probe
gggctcagggcctgatggggaacct

SEQ ID NO: 246551 - DNA, 25 bp, probe
gggctggcggctgtggatgaaaacc

SEQ ID NO: 246552 - DNA, 25 bp, probe
gggctggagggcatgggaaaagtcc

SEQ ID NO: 246553 - DNA, 25 bp, probe
gtggcaggggccatgtggtaaaggg

SEQ ID NO: 246554 - DNA, 25 bp, probe
gtggcagtggcagcaatggtgacaa

SEQ ID NO: 246555 - DNA, 25 bp, probe
gtggcatgtacccctatgtggccac

SEQ ID NO: 246556 - DNA, 25 bp, probe
gtggcatgtacccctatgtggccac

SEQ ID NO: 246557 - DNA, 25 bp, probe
gggcatgtcccgatatctggatatc

SEQ ID NO: 246558 - DNA, 25 bp, probe
gggctgtggccgaggcatggatcag

SEQ ID NO: 246559 - DNA, 25 bp, probe
gggcgagaccagaggggacggaagc

SEQ ID NO: 246560 - DNA, 25 bp, probe
gggcgagaccagaggggacggaagc

SEQ ID NO: 246561 - DNA, 25 bp, probe
gggcacacccctgaggggagtaagg

SEQ ID NO: 246562 - DNA, 25 bp, probe
ggagcccactttgaaggtataacag

SEQ ID NO: 246563 - DNA, 25 bp, probe
ggagcccactttgaaggtataacag

SEQ ID NO: 246564 - DNA, 25 bp, probe
tcgaaacgtcttgcgggtgtgaacc

SEQ ID NO: 246565 - DNA, 25 bp, probe
tcgaaagttgcctcggggatgtgca

SEQ ID NO: 246566 - DNA, 25 bp, probe
tcctacaggtcggtgggggtggaga

SEQ ID NO: 246567 - DNA, 25 bp, probe
tctctaaaaagacttgtaggtggga

SEQ ID NO: 246568 - DNA, 25 bp, probe
tgtcgtgaaaagcttaatgggctgg

SEQ ID NO: 246569 - DNA, 25 bp, probe
gtggcgaatgaacaaaatcctgggc

SEQ ID NO: 246570 - DNA, 25 bp, probe
gggctcaaagactaaaattcttgtg

SEQ ID NO: 246571 - DNA, 25 bp, probe
gtggccaaaggcatggaattcctgg

SEQ ID NO: 246572 - DNA, 25 bp, probe
gtggcggttagcattggatttgctg

SEQ ID NO: 246573 - DNA, 25 bp, probe
gtggcctttatgattggaatgttca

SEQ ID NO: 246574 - DNA, 25 bp, probe
gtggcagcttttctgttaagggagc

SEQ ID NO: 246575 - DNA, 25 bp, probe
gggcatttggttattaatagcgtgc

SEQ ID NO: 246576 - DNA, 25 bp, probe
gggcatttggttattaatagcgtgc

SEQ ID NO: 246577 - DNA, 25 bp, probe
gtggctcttcgttgtttagaacttc

SEQ ID NO: 246578 - DNA, 25 bp, probe
ggggcgggtagttttgaactctcag

SEQ ID NO: 246579 - DNA, 25 bp, probe
gggggtcccaggtgtgaagctgggg

SEQ ID NO: 246580 - DNA, 25 bp, probe
gggggtcccaggtgtgaagctgggg

SEQ ID NO: 246581 - DNA, 25 bp, probe
ggggggacggagaggaacaaggatg

SEQ ID NO: 246582 - DNA, 25 bp, probe
gggaagtacgggatctacaccaagg

SEQ ID NO: 246583 - DNA, 25 bp, probe
gggaagtgacggtttaatgggcaca

SEQ ID NO: 246584 - DNA, 25 bp, probe
gggcctggagggtattaaagagaca

SEQ ID NO: 246585 - DNA, 25 bp, probe
gggcagtggcggcaacgacaaagaa

SEQ ID NO: 246586 - DNA, 25 bp, probe
gggcccagcgaggcaaggaacacag

SEQ ID NO: 246587 - DNA, 25 bp, probe
gtggctccggagcaagtgaagaagc

SEQ ID NO: 246588 - DNA, 25 bp, probe
gtggctccggagcaagtgaagaagc

SEQ ID NO: 246589 - DNA, 25 bp, probe
gggcccgctcagcagggaagtggcc

SEQ ID NO: 246590 - DNA, 25 bp, probe
gggcccctctgttgaacaaatggcc

SEQ ID NO: 246591 - DNA, 25 bp, probe
gggcgccacggtcaacatggatggc

SEQ ID NO: 246592 - DNA, 25 bp, probe
gggcgccacggtcaacatggatggc

SEQ ID NO: 246593 - DNA, 25 bp, probe
gtggcgcagccttggtaacgccatg

SEQ ID NO: 246594 - DNA, 25 bp, probe
gtggctcacgcctgtaatcccagca

SEQ ID NO: 246595 - DNA, 25 bp, probe
gggccacgctcttgaggaagcccag

SEQ ID NO: 246596 - DNA, 25 bp, probe
gtggctgcacgatttatggaaaaca

SEQ ID NO: 246597 - DNA, 25 bp, probe
gtggctgacgaatttgtttctacag

SEQ ID NO: 246598 - DNA, 25 bp, probe
gtggctgacagtctcagtttgccag

SEQ ID NO: 246599 - DNA, 25 bp, probe
gtggctgtgagtctagtttttgctt

SEQ ID NO: 246600 - DNA, 25 bp, probe
gtggctatagttactgattttttat

SEQ ID NO: 246601 - DNA, 25 bp, probe
gggctaattcttgctgaacttcttc

SEQ ID NO: 246602 - DNA, 25 bp, probe
gggtcaatatttggccagtaccttt

SEQ ID NO: 246603 - DNA, 25 bp, probe
ggacgaagtattgcctgtccctttg

SEQ ID NO: 246604 - DNA, 25 bp, probe
ggcaggaaggacggggaccttctgt

SEQ ID NO: 246605 - DNA, 25 bp, probe
ggggaaggaacacagtctttcgaca

SEQ ID NO: 246606 - DNA, 25 bp, probe
ggggaaggaacacagtctttcgaca

SEQ ID NO: 246607 - DNA, 25 bp, probe
gggaaacgaacggagtccatcccag

SEQ ID NO: 246608 - DNA, 25 bp, probe
gggccaccgagaggttttctggccg

SEQ ID NO: 246609 - DNA, 25 bp, probe
gggccaccatgaaaaccttctgtgg

SEQ ID NO: 246610 - DNA, 25 bp, probe
gggccgcccatataattcacttggg

SEQ ID NO: 246611 - DNA, 25 bp, probe
gggccgcccatataattcacttggg

SEQ ID NO: 246612 - DNA, 25 bp, probe
gggaagctccataaatgtcaccttg

SEQ ID NO: 246613 - DNA, 25 bp, probe
gggccagcccaggattgtacgtggg

SEQ ID NO: 246614 - DNA, 25 bp, probe
gtggcctgaaagcacttagcgggcg

SEQ ID NO: 246615 - DNA, 25 bp, probe
gggcgccataatcaattggctgggc

SEQ ID NO: 246616 - DNA, 25 bp, probe
gggcggcataatgaagggtgaagca

SEQ ID NO: 246617 - DNA, 25 bp, probe
gggcgcctatgggaaggtgttcaag

SEQ ID NO: 246618 - DNA, 25 bp, probe
gggccagttttacagtgtacattgg

SEQ ID NO: 246619 - DNA, 25 bp, probe
gggccagaattatttaggggcctgg

SEQ ID NO: 246620 - DNA, 25 bp, probe
gggccagaattatttaggggcctgg

SEQ ID NO: 246621 - DNA, 25 bp, probe
gtggcgatgactttatttgcggagc

SEQ ID NO: 246622 - DNA, 25 bp, probe
gggcgtgagctgtcagtttgggcct

SEQ ID NO: 246623 - DNA, 25 bp, probe
gggcccagctgcctatgtaaggcct

SEQ ID NO: 246624 - DNA, 25 bp, probe
gtggccacacgctggtatagagctc

SEQ ID NO: 246625 - DNA, 25 bp, probe
gggctacaatgcggagttacactcc

SEQ ID NO: 246626 - DNA, 25 bp, probe
gggcagaatctcagaaggtcctcct

SEQ ID NO: 246627 - DNA, 25 bp, probe
gggcaaagtctggaaggctccttcg

SEQ ID NO: 246628 - DNA, 25 bp, probe
gggcaaagtctggaaggctccttcg

SEQ ID NO: 246629 - DNA, 25 bp, probe
gtggctaagatgcaacaggctattt

SEQ ID NO: 246630 - DNA, 25 bp, probe
gggccatggatgggacaggagtctt

SEQ ID NO: 246631 - DNA, 25 bp, probe
gggccagggtgggaggattgtttga

SEQ ID NO: 246632 - DNA, 25 bp, probe
gtggccaagggtgaggtggccaaaa

SEQ ID NO: 246633 - DNA, 25 bp, probe
gtggccaagactgtgaggatgacgc

SEQ ID NO: 246634 - DNA, 25 bp, probe
gtggccaagactgtgaggatgacgc

SEQ ID NO: 246635 - DNA, 25 bp, probe
gtggccacagccttgatgaagctca

SEQ ID NO: 246636 - DNA, 25 bp, probe
gtggccattgacatgtggagcctgg

SEQ ID NO: 246637 - DNA, 25 bp, probe
gtggctcaattacgaggagcactgg

SEQ ID NO: 246638 - DNA, 25 bp, probe
gtggccacatatactgggctgatcc

SEQ ID NO: 246639 - DNA, 25 bp, probe
gtggccacaactgggatgccacctg

SEQ ID NO: 246640 - DNA, 25 bp, probe
gtggccacaactgggatgccacctg

SEQ ID NO: 246641 - DNA, 25 bp, probe
gtggccatcaaggtggtggaccggc

SEQ ID NO: 246642 - DNA, 25 bp, probe
gggccagagatggacgtgtaccagg

SEQ ID NO: 246643 - DNA, 25 bp, probe
gtggccaggcggatggtgagcaatg

SEQ ID NO: 246644 - DNA, 25 bp, probe
gtggctgagcggaagggtgagaggg

SEQ ID NO: 246645 - DNA, 25 bp, probe
gtggctgagcggaagggtgagaggg

SEQ ID NO: 246646 - DNA, 25 bp, probe
gtggctgcatgccaaggggaagagc

SEQ ID NO: 246647 - DNA, 25 bp, probe
gtggctgcatggcaggtcttaagga

SEQ ID NO: 246648 - DNA, 25 bp, probe
gggcatgctgggcaatttcactgtg

SEQ ID NO: 246649 - DNA, 25 bp, probe
gggcagccttcatatttgccattgt

SEQ ID NO: 246650 - DNA, 25 bp, probe
gggcagctttaatggtggtttttat

SEQ ID NO: 246651 - DNA, 25 bp, probe
gggcctgtggaagcgatggtggatt

SEQ ID NO: 246652 - DNA, 25 bp, probe
gtggcctggtgggtcagggggagtc

SEQ ID NO: 246653 - DNA, 25 bp, probe
gtggcctggtgggtcagggggagtc

SEQ ID NO: 246654 - DNA, 25 bp, probe
gggcgtggttggaaggtgggttctg

SEQ ID NO: 246655 - DNA, 25 bp, probe
gggccatgtggtaaagggggtggct

SEQ ID NO: 246656 - DNA, 25 bp, probe
gggcctggggcctgagagaattggc

SEQ ID NO: 246657 - DNA, 25 bp, probe
gggccaggcccctggatgaatatcc

SEQ ID NO: 246658 - DNA, 25 bp, probe
gggccagagcaagcgctgtaaaccc

SEQ ID NO: 246659 - DNA, 25 bp, probe
gggccagagcaagcgctgtaaaccc

SEQ ID NO: 246660 - DNA, 25 bp, probe
gggccagagcaagcgctgtaaaccc

SEQ ID NO: 246661 - DNA, 25 bp, probe
gtggcctgaagagtcctctgaatga

SEQ ID NO: 246662 - DNA, 25 bp, probe
gggccattgagagcacatctcgagt

SEQ ID NO: 246663 - DNA, 25 bp, probe
gtggctttgagaggcaactttgccc

SEQ ID NO: 246664 - DNA, 25 bp, probe
gtggccgacatgggcaagatttccc

SEQ ID NO: 246665 - DNA, 25 bp, probe
gggcccatgatggccatagatttgc

SEQ ID NO: 246666 - DNA, 25 bp, probe
gggccacatgtggctcaggatggct

SEQ ID NO: 246667 - DNA, 25 bp, probe
gggccacatgtggctcaggatggct

SEQ ID NO: 246668 - DNA, 25 bp, probe
gggctactgcatgctgaagtggctc

SEQ ID NO: 246669 - DNA, 25 bp, probe
gggctggcctgacacaatggtagct

SEQ ID NO: 246670 - DNA, 25 bp, probe
gggctggattggcaggtgtgggctc

SEQ ID NO: 246671 - DNA, 25 bp, probe
gggctggattggcaggtgtgggctc

SEQ ID NO: 246672 - DNA, 25 bp, probe
gtggctggtgtgctggggattacca

SEQ ID NO: 246673 - DNA, 25 bp, probe
gtggcgtgggtggcagaggatcccc

SEQ ID NO: 246674 - DNA, 25 bp, probe
gtggctgatgggccacaggatggcc

SEQ ID NO: 246675 - DNA, 25 bp, probe
gtggctgatggcaccatgtgtggtc

SEQ ID NO: 246676 - DNA, 25 bp, probe
gggacatgatgagccagttggccct

SEQ ID NO: 246677 - DNA, 25 bp, probe
gggcctggcccatgtatggccagga

SEQ ID NO: 246678 - DNA, 25 bp, probe
gggcccagaccatgattgaacataa

SEQ ID NO: 246679 - DNA, 25 bp, probe
gggcacccctataacagaacaaatc

SEQ ID NO: 246680 - DNA, 25 bp, probe
ggctacggctttgaaggagcaaatt

SEQ ID NO: 246681 - DNA, 25 bp, probe
ggctagctagctgtgttagaagtag

SEQ ID NO: 246682 - DNA, 25 bp, probe
ggctagctagctgtgttagaagtag

SEQ ID NO: 246683 - DNA, 25 bp, probe
ggctaaagggttgaaactgagtctt

SEQ ID NO: 246684 - DNA, 25 bp, probe
ggtcaaagattttgcccaactggtc

SEQ ID NO: 246685 - DNA, 25 bp, probe
gggccaagtatttcccaagccaagc

SEQ ID NO: 246686 - DNA, 25 bp, probe
ggaccaagaatcacccaaccaaaag

SEQ ID NO: 246687 - DNA, 25 bp, probe
gtggccaaggaaccttcaacgaaag

SEQ ID NO: 246688 - DNA, 25 bp, probe
gtggcccaagtcattcaaaagaaag

SEQ ID NO: 246689 - DNA, 25 bp, probe
gtggcgatcaagaaattcaaggaca

SEQ ID NO: 246690 - DNA, 25 bp, probe
gtggcgatcaagaaattcaaggaca

SEQ ID NO: 246691 - DNA, 25 bp, probe
gggcccagaggccactaagagacac

SEQ ID NO: 246692 - DNA, 25 bp, probe
gtggccacgaggttaaagaagctgc

SEQ ID NO: 246693 - DNA, 25 bp, probe
gggccaagaagtcccaagacctgcg

SEQ ID NO: 246694 - DNA, 25 bp, probe
gggccaggaagtttgcgagggctgc

SEQ ID NO: 246695 - DNA, 25 bp, probe
gggccaggaagtttgcgagggctgc

SEQ ID NO: 246696 - DNA, 25 bp, probe
gggccgcgtggtgtggaatggcagc

SEQ ID NO: 246697 - DNA, 25 bp, probe
gggccaggttagaggcagatggcac

SEQ ID NO: 246698 - DNA, 25 bp, probe
gggccagcgttatcaggcagaaatc

SEQ ID NO: 246699 - DNA, 25 bp, probe
ttgtcatgaactatatccgtaacct

SEQ ID NO: 246700 - DNA, 25 bp, probe
gggctaaagtacctgcaccaagaaa

SEQ ID NO: 246701 - DNA, 25 bp, probe
gggcaaaagcttcccattcaaatac

SEQ ID NO: 246702 - DNA, 25 bp, probe
gggcagagggttcctccaaagaaca

SEQ ID NO: 246703 - DNA, 25 bp, probe
gggtgggagactttccattaaatca

SEQ ID NO: 246704 - DNA, 25 bp, probe
gggctaggtgttgaacttagttaat

SEQ ID NO: 246705 - DNA, 25 bp, probe
gggctaagggctgtgagcttatgtt

SEQ ID NO: 246706 - DNA, 25 bp, probe
gggctaagggctgtgagcttatgtt

SEQ ID NO: 246707 - DNA, 25 bp, probe
gggccagggactggtggtcaagatt

SEQ ID NO: 246708 - DNA, 25 bp, probe
gggcaaggtgagagttaaggatctt

SEQ ID NO: 246709 - DNA, 25 bp, probe
gggaaggtgcatattatcacggatg

SEQ ID NO: 246710 - DNA, 25 bp, probe
gggaactgtgacatttcaagctctg

SEQ ID NO: 246711 - DNA, 25 bp, probe
gggcagggatacatctcgaggccag

SEQ ID NO: 246712 - DNA, 25 bp, probe
gggccagagaaaattcaaggcatgg

SEQ ID NO: 246713 - DNA, 25 bp, probe
gggccctgaaagttcatatggtggg

SEQ ID NO: 246714 - DNA, 25 bp, probe
gggccacgaggacttcgtgcagtgg

SEQ ID NO: 246715 - DNA, 25 bp, probe
gggccgctgggacatggctgaaagg

SEQ ID NO: 246716 - DNA, 25 bp, probe
gtggcccatggtagaatggcagaaa

SEQ ID NO: 246717 - DNA, 25 bp, probe
gtggcccatggtagaatggcagaaa

SEQ ID NO: 246718 - DNA, 25 bp, probe
gggccacatgcgagtattaataaat

SEQ ID NO: 246719 - DNA, 25 bp, probe
gggccacgcaacatcaataaacaaa

SEQ ID NO: 246720 - DNA, 25 bp, probe
gtggcctggaaaatcagatgtggac

SEQ ID NO: 246721 - DNA, 25 bp, probe
gggccaggacgaaagtgtggacagc

SEQ ID NO: 246722 - DNA, 25 bp, probe
gggccggagggcaagggatgccagt

SEQ ID NO: 246723 - DNA, 25 bp, probe
gggccagtggggaactgagggcaag

SEQ ID NO: 246724 - DNA, 25 bp, probe
gggccagagtgggtagtggggaatg

SEQ ID NO: 246725 - DNA, 25 bp, probe
gggcctggtcctgagggcaggacag

SEQ ID NO: 246726 - DNA, 25 bp, probe
gggcttaggcttggactggatggaa

SEQ ID NO: 246727 - DNA, 25 bp, probe
gggcttagagctggcatgaccaatg

SEQ ID NO: 246728 - DNA, 25 bp, probe
gggccagagacgggaccaggaagga

SEQ ID NO: 246729 - DNA, 25 bp, probe
gggccacagaagaagatcatcagta

SEQ ID NO: 246730 - DNA, 25 bp, probe
gggcccaatgtatgatctattacgg

SEQ ID NO: 246731 - DNA, 25 bp, probe
gtggccagaagtggaatctttacag

SEQ ID NO: 246732 - DNA, 25 bp, probe
gtggccagaagtggaatctttacag

SEQ ID NO: 246733 - DNA, 25 bp, probe
gggccagatattcgaagcttacaac

SEQ ID NO: 246734 - DNA, 25 bp, probe
gggccagatgagcagaagctctcga

SEQ ID NO: 246735 - DNA, 25 bp, probe
gtggccagcaaggagcagcagctcc

SEQ ID NO: 246736 - DNA, 25 bp, probe
gggccatcaagctagcagactttgg

SEQ ID NO: 246737 - DNA, 25 bp, probe
gggctgcatcatgggggagctgttg

SEQ ID NO: 246738 - DNA, 25 bp, probe
gggctgcatcatgggggagctgttg

SEQ ID NO: 246739 - DNA, 25 bp, probe
gggcttcatgggagcagacgctgcc

SEQ ID NO: 246740 - DNA, 25 bp, probe
gggcctcaaggcaatgaaggctgca

SEQ ID NO: 246741 - DNA, 25 bp, probe
gggctctgactacagaagtggcctt

SEQ ID NO: 246742 - DNA, 25 bp, probe
gggcctgtcctaagtgagggtctgc

SEQ ID NO: 246743 - DNA, 25 bp, probe
gggctctgttgcaagagggggtccc

SEQ ID NO: 246744 - DNA, 25 bp, probe
gggctgcgaatctagaggagggggc

SEQ ID NO: 246745 - DNA, 25 bp, probe
gtggcggagatcggggagggcgcct

SEQ ID NO: 246746 - DNA, 25 bp, probe
gtggctgggatgggcgtggggagcc

SEQ ID NO: 246747 - DNA, 25 bp, probe
gtggctgggatgggcgtggggagcc

SEQ ID NO: 246748 - DNA, 25 bp, probe
gggctgtggatgggtggggagcaaa

SEQ ID NO: 246749 - DNA, 25 bp, probe
gggcttggagaccgtcatggtgaaa

SEQ ID NO: 246750 - DNA, 25 bp, probe
gggctgtggaggttgatattattaa

SEQ ID NO: 246751 - DNA, 25 bp, probe
gggctggtagctgtactattttcac

SEQ ID NO: 246752 - DNA, 25 bp, probe
gggctggtagctgtactattttcac

SEQ ID NO: 246753 - DNA, 25 bp, probe
gggctggtgtccctaaggttgtaca

SEQ ID NO: 246754 - DNA, 25 bp, probe
gggctggtgacccagtcagagttgt

SEQ ID NO: 246755 - DNA, 25 bp, probe
gggctgcgtccaaagaggactctgc

SEQ ID NO: 246756 - DNA, 25 bp, probe
gggccattcaaccaaagcagacatc

SEQ ID NO: 246757 - DNA, 25 bp, probe
gggccattccaaagatgagaactct

SEQ ID NO: 246758 - DNA, 25 bp, probe
gggccattgcctgagatggtgttct

SEQ ID NO: 246759 - DNA, 25 bp, probe
gggcatccgcctggataatgcttcc

SEQ ID NO: 246760 - DNA, 25 bp, probe
gggcccgcttcaaagatgcttgcgg

SEQ ID NO: 246761 - DNA, 25 bp, probe
gggcccgtgccataattggggcaga

SEQ ID NO: 246762 - DNA, 25 bp, probe
gggcccgtgccataattggggcaga

SEQ ID NO: 246763 - DNA, 25 bp, probe
gggcccgaggcttagtcagcagggc

SEQ ID NO: 246764 - DNA, 25 bp, probe
gggcccgaggcttagtcagcagggc

SEQ ID NO: 246765 - DNA, 25 bp, probe
ggtgcccacagtgtcaggcactggg

SEQ ID NO: 246766 - DNA, 25 bp, probe
gggcactcaaatgtggcacctggtg

SEQ ID NO: 246767 - DNA, 25 bp, probe
gggcctagggagccgcaccttgtca

SEQ ID NO: 246768 - DNA, 25 bp, probe
gtggcgttggtggggacactggtac

SEQ ID NO: 246769 - DNA, 25 bp, probe
gtggcgtttggtgggcatcacaagc

SEQ ID NO: 246770 - DNA, 25 bp, probe
gggcacgtctgttgtaatgcaaagc

SEQ ID NO: 246771 - DNA, 25 bp, probe
gggccagtctgatcacgatcataga

SEQ ID NO: 246772 - DNA, 25 bp, probe
gggccacctggagagatcatccatc

SEQ ID NO: 246773 - DNA, 25 bp, probe
gggctacacggagaagcagcgccgg

SEQ ID NO: 246774 - DNA, 25 bp, probe
gggctgatcctgaatggcacaggcc

SEQ ID NO: 246775 - DNA, 25 bp, probe
gggctgatcctgaatggcacaggcc

SEQ ID NO: 246776 - DNA, 25 bp, probe
gggcatcatccggatgctggagttc

SEQ ID NO: 246777 - DNA, 25 bp, probe
gggcacttcgcattgtgaggtttac

SEQ ID NO: 246778 - DNA, 25 bp, probe
gggcacttcgcattgtgaggtttac

SEQ ID NO: 246779 - DNA, 25 bp, probe
gggccttccacatgctggtaaatgc

SEQ ID NO: 246780 - DNA, 25 bp, probe
gggccaactcattcgtgggaacagc

SEQ ID NO: 246781 - DNA, 25 bp, probe
gtggccaatctagtcctggaacaat

SEQ ID NO: 246782 - DNA, 25 bp, probe
gtggccaagcttcctaagaacaaaa

SEQ ID NO: 246783 - DNA, 25 bp, probe
gtggcctctttgtctaaaacaataa

SEQ ID NO: 246784 - DNA, 25 bp, probe
gtggcctctttgtctaaaacaataa

SEQ ID NO: 246785 - DNA, 25 bp, probe
gggctttgcttttcaaaccagagaa

SEQ ID NO: 246786 - DNA, 25 bp, probe
gggcctggcctttgaaaactggagg

SEQ ID NO: 246787 - DNA, 25 bp, probe
gggcctgaccaaaaatatactgggt

SEQ ID NO: 246788 - DNA, 25 bp, probe
gggcgtattcacatagacatcttgg

SEQ ID NO: 246789 - DNA, 25 bp, probe
gggcgtattcacatagacatcttgg

SEQ ID NO: 246790 - DNA, 25 bp, probe
gggggcattacgcaacttggtgagg

SEQ ID NO: 246791 - DNA, 25 bp, probe
gggccgatgtctgggaacttgggac

SEQ ID NO: 246792 - DNA, 25 bp, probe
gggccgatgtctgggaacttgggac

SEQ ID NO: 246793 - DNA, 25 bp, probe
gtggccgcagcggcgagaactttga

SEQ ID NO: 246794 - DNA, 25 bp, probe
gtggcccagcctggagtacagtggc

SEQ ID NO: 246795 - DNA, 25 bp, probe
gtggcccagctgaggttctgtggcc

SEQ ID NO: 246796 - DNA, 25 bp, probe
gggcagcaagagagcctatttggga

SEQ ID NO: 246797 - DNA, 25 bp, probe
gggctcagagcgagccagcttttga

SEQ ID NO: 246798 - DNA, 25 bp, probe
gtggccatggtgagggtgtgttggg

SEQ ID NO: 246799 - DNA, 25 bp, probe
gggccaggcatgatgtgtggggctg

SEQ ID NO: 246800 - DNA, 25 bp, probe
gggctctgtgagaggtggggcagtc

SEQ ID NO: 246801 - DNA, 25 bp, probe
gggctcttcagcacctagaagctgg

SEQ ID NO: 246802 - DNA, 25 bp, probe
tgggccaggtgcacctaaaggctga

SEQ ID NO: 246803 - DNA, 25 bp, probe
tgggccaggtgcacctaaaggctga

SEQ ID NO: 246804 - DNA, 25 bp, probe
gggccagatggcatcctggcttggg

SEQ ID NO: 246805 - DNA, 25 bp, probe
gggccagatggcatcctggcttggg

SEQ ID NO: 246806 - DNA, 25 bp, probe
gggccagatggacctgctagatttg

SEQ ID NO: 246807 - DNA, 25 bp, probe
gggccttgtgtttatagctttgtca

SEQ ID NO: 246808 - DNA, 25 bp, probe
gggttctctgatgattacttgtgta

SEQ ID NO: 246809 - DNA, 25 bp, probe
gggctgaattatgtagacttgtgtt

SEQ ID NO: 246810 - DNA, 25 bp, probe
gggctacactatctaacatctggct

SEQ ID NO: 246811 - DNA, 25 bp, probe
gggaaactaccgacaacttctggag

SEQ ID NO: 246812 - DNA, 25 bp, probe
gggaaactaccgacaacttctggag

SEQ ID NO: 246813 - DNA, 25 bp, probe
gggcagaactttcccaagcccaaag

SEQ ID NO: 246814 - DNA, 25 bp, probe
gggcagagacgtgaccaagccatcc

SEQ ID NO: 246815 - DNA, 25 bp, probe
gggcagatcactctcaagaaggacc

SEQ ID NO: 246816 - DNA, 25 bp, probe
gggcagatcactctcaagaaggacc

SEQ ID NO: 246817 - DNA, 25 bp, probe
gggcagtcagtagcagaggacgatc

SEQ ID NO: 246818 - DNA, 25 bp, probe
gggctgccacgaccaagtgacagca

SEQ ID NO: 246819 - DNA, 25 bp, probe
gggccacactggaccatgtgaacag

SEQ ID NO: 246820 - DNA, 25 bp, probe
gggcccacttgtctgtaatggtgtg

SEQ ID NO: 246821 - DNA, 25 bp, probe
gggcctgaagttcttaagctgtcat

SEQ ID NO: 246822 - DNA, 25 bp, probe
gggcctagcattttttctactgtaa

SEQ ID NO: 246823 - DNA, 25 bp, probe
gggcctacactctgtgttattgcat

SEQ ID NO: 246824 - DNA, 25 bp, probe
gggaatgaactctagttttctaaca

SEQ ID NO: 246825 - DNA, 25 bp, probe
gggaatgaactctagttttctaaca

SEQ ID NO: 246826 - DNA, 25 bp, probe
gggaaatccttcagcaattctaatc

SEQ ID NO: 246827 - DNA, 25 bp, probe
gggaaaactgtcgccagttgtgcac

SEQ ID NO: 246828 - DNA, 25 bp, probe
gggagtgaaattatccagggatgcc

SEQ ID NO: 246829 - DNA, 25 bp, probe
ggggggagaactcctagggtggctg

SEQ ID NO: 246830 - DNA, 25 bp, probe
gggaatgggggcagccaaggggctg

SEQ ID NO: 246831 - DNA, 25 bp, probe
gggcctggggaaagccaggatggcc

SEQ ID NO: 246832 - DNA, 25 bp, probe
gggctgtggagtgaggccagtaagc

SEQ ID NO: 246833 - DNA, 25 bp, probe
gggctgctggaataggacactcaag

SEQ ID NO: 246834 - DNA, 25 bp, probe
gggcatgggaaatcgaattcctgct

SEQ ID NO: 246835 - DNA, 25 bp, probe
gggctggagaagaaccttctccgta

SEQ ID NO: 246836 - DNA, 25 bp, probe
gggcttggagaatatttctactaca

SEQ ID NO: 246837 - DNA, 25 bp, probe
tgggctttcggtgtttgtaataagt

SEQ ID NO: 246838 - DNA, 25 bp, probe
gggctattggttgtgctatgtcaat

SEQ ID NO: 246839 - DNA, 25 bp, probe
gggctattggttgtgctatgtcaat

SEQ ID NO: 246840 - DNA, 25 bp, probe
gggctgcatgctattccattttgca

SEQ ID NO: 246841 - DNA, 25 bp, probe
gggctgcatgctattccattttgca

SEQ ID NO: 246842 - DNA, 25 bp, probe
gggcttctgtggtgcattctacagc

SEQ ID NO: 246843 - DNA, 25 bp, probe
gggcttcttgaaggactagagcagt

SEQ ID NO: 246844 - DNA, 25 bp, probe
gggcttcttgaaggactagagcagt

SEQ ID NO: 246845 - DNA, 25 bp, probe
gggctcactataataggtaggagtt

SEQ ID NO: 246846 - DNA, 25 bp, probe
gggcatcacgatgattgagttggcc

SEQ ID NO: 246847 - DNA, 25 bp, probe
gggctctctgacaaggagtgtgccg

SEQ ID NO: 246848 - DNA, 25 bp, probe
gggctgctgtgagatggaattccag

SEQ ID NO: 246849 - DNA, 25 bp, probe
gggcctggactgtgacattgacatc

SEQ ID NO: 246850 - DNA, 25 bp, probe
gggctctgtgactcccattaatgac

SEQ ID NO: 246851 - DNA, 25 bp, probe
gggctctgggcagccacagaaaagc

SEQ ID NO: 246852 - DNA, 25 bp, probe
gggctctgcagagcaaactggaaag

SEQ ID NO: 246853 - DNA, 25 bp, probe
gggcaccatcatgaagatcggcatc

SEQ ID NO: 246854 - DNA, 25 bp, probe
gggcaacacagtgagactccatctc

SEQ ID NO: 246855 - DNA, 25 bp, probe
gggctacaagatggatgcccccgac

SEQ ID NO: 246856 - DNA, 25 bp, probe
gggctacaagatggatgcccccgac

SEQ ID NO: 246857 - DNA, 25 bp, probe
gggccaagagagcagtgaccactga

SEQ ID NO: 246858 - DNA, 25 bp, probe
gggcatcaggtgtagggaccctgcc

SEQ ID NO: 246859 - DNA, 25 bp, probe
gggcatgagtgtcaggggtcccaga

SEQ ID NO: 246860 - DNA, 25 bp, probe
gggcagtggtcaagtgtctgttcga

SEQ ID NO: 246861 - DNA, 25 bp, probe
ggtcatggggagggtagcaccaggc

SEQ ID NO: 246862 - DNA, 25 bp, probe
ggtcatggggagggtagcaccaggc

SEQ ID NO: 246863 - DNA, 25 bp, probe
gggcatggagtacctggagagcaag

SEQ ID NO: 246864 - DNA, 25 bp, probe
gggagggtctcacggaactagtgac

SEQ ID NO: 246865 - DNA, 25 bp, probe
gggacgagttcatcactactagaca

SEQ ID NO: 246866 - DNA, 25 bp, probe
gggcaggaaataacctcactatccc

SEQ ID NO: 246867 - DNA, 25 bp, probe
gggaaaaacaacctccatatcctgg

SEQ ID NO: 246868 - DNA, 25 bp, probe
gggaacaggacaagccagcttacct

SEQ ID NO: 246869 - DNA, 25 bp, probe
gggcaaaggcagggccacttttgaa

SEQ ID NO: 246870 - DNA, 25 bp, probe
gggaaagatccggccagttattgaa

SEQ ID NO: 246871 - DNA, 25 bp, probe
gggcatgaggtcagaccaggatttg

SEQ ID NO: 246872 - DNA, 25 bp, probe
gggcagagagtcaaggcccagcagc

SEQ ID NO: 246873 - DNA, 25 bp, probe
gggcaggaatcaaggagcctccgtt

SEQ ID NO: 246874 - DNA, 25 bp, probe
gggctgggcagatgagatcctactt

SEQ ID NO: 246875 - DNA, 25 bp, probe
gggcgtggctgatgggccacaggat

SEQ ID NO: 246876 - DNA, 25 bp, probe
gggccaggtacgggcagacgtgaag

SEQ ID NO: 246877 - DNA, 25 bp, probe
gggcctggtcactgtagaagatgag

SEQ ID NO: 246878 - DNA, 25 bp, probe
gggcctggtcactgtagaagatgag

SEQ ID NO: 246879 - DNA, 25 bp, probe
gggcctaggctgcattgaaaagagc

SEQ ID NO: 246880 - DNA, 25 bp, probe
gggcctaggctgcattgaaaagagc

SEQ ID NO: 246881 - DNA, 25 bp, probe
gggcatcatgcatcgagatgtgaag

SEQ ID NO: 246882 - DNA, 25 bp, probe
gggccatgcaggagcttgaagcact

SEQ ID NO: 246883 - DNA, 25 bp, probe
gggtcatggcagactctatgcaaga

SEQ ID NO: 246884 - DNA, 25 bp, probe
gggctcaggcaagtatcagatggac

SEQ ID NO: 246885 - DNA, 25 bp, probe
gggccagtgacaatctgcaaggctg

SEQ ID NO: 246886 - DNA, 25 bp, probe
gggcccagccaagtgcagagaatgt

SEQ ID NO: 246887 - DNA, 25 bp, probe
gggcccagccaagtgcagagaatgt

SEQ ID NO: 246888 - DNA, 25 bp, probe
gggctacaccaatagaagtgttatg

SEQ ID NO: 246889 - DNA, 25 bp, probe
gggctatgaccacttcatgaagttt

SEQ ID NO: 246890 - DNA, 25 bp, probe
gggcttcacacagtctcagattgat

SEQ ID NO: 246891 - DNA, 25 bp, probe
gggcttcacacagtctcagattgat

SEQ ID NO: 246892 - DNA, 25 bp, probe
gggcttacaagctcagatggctgac

SEQ ID NO: 246893 - DNA, 25 bp, probe
gggccacacaagtgcagtagtgcag

SEQ ID NO: 246894 - DNA, 25 bp, probe
gggccgcacaattggagagggcagc

SEQ ID NO: 246895 - DNA, 25 bp, probe
gggctggacatttgtggcagtgctg

SEQ ID NO: 246896 - DNA, 25 bp, probe
gggctgcacgagtgtggcagcagct

SEQ ID NO: 246897 - DNA, 25 bp, probe
gggccatggcagtggcaagctcttc

SEQ ID NO: 246898 - DNA, 25 bp, probe
gggctgatgggaactgcaacgtcat

SEQ ID NO: 246899 - DNA, 25 bp, probe
gggctataccaagtccatcgacatc

SEQ ID NO: 246900 - DNA, 25 bp, probe
gggctctaccaagacataatgcact

SEQ ID NO: 246901 - DNA, 25 bp, probe
gggctctaccaagacataatgcact

SEQ ID NO: 246902 - DNA, 25 bp, probe
gggcagtactaacattagagacatg

SEQ ID NO: 246903 - DNA, 25 bp, probe
gggccttctgattccgaagacactg

SEQ ID NO: 246904 - DNA, 25 bp, probe
gggccttctgattccgaagacactg

SEQ ID NO: 246905 - DNA, 25 bp, probe
gggcacattcttgtggcaagcatca

SEQ ID NO: 246906 - DNA, 25 bp, probe
gggcaaattctgttagcaatgtagt

SEQ ID NO: 246907 - DNA, 25 bp, probe
gggcaaattctgttagcaatgtagt

SEQ ID NO: 246908 - DNA, 25 bp, probe
gggccatttcagttagctagtgagt

SEQ ID NO: 246909 - DNA, 25 bp, probe
gggccttggcagtgcaggagaggag

SEQ ID NO: 246910 - DNA, 25 bp, probe
gggcctcggagatgatcagaggtga

SEQ ID NO: 246911 - DNA, 25 bp, probe
gggcctcggagatgatcagaggtga

SEQ ID NO: 246912 - DNA, 25 bp, probe
gggctgcgggagaataagtgggatc

SEQ ID NO: 246913 - DNA, 25 bp, probe
gggctgcgggagaataagtgggatc

SEQ ID NO: 246914 - DNA, 25 bp, probe
gggcatgttagaactgaggtgggct

SEQ ID NO: 246915 - DNA, 25 bp, probe
gggcatgctaagggcaaggcttact

SEQ ID NO: 246916 - DNA, 25 bp, probe
gggctaggagcagtgtgaggctgta

SEQ ID NO: 246917 - DNA, 25 bp, probe
gggcatggccaggggaagcagaagg

SEQ ID NO: 246918 - DNA, 25 bp, probe
gggcatgggctagaagaggagaggg

SEQ ID NO: 246919 - DNA, 25 bp, probe
gggcttggctacaacgaggagcaga

SEQ ID NO: 246920 - DNA, 25 bp, probe
gggcagaagccatatcgagggatga

SEQ ID NO: 246921 - DNA, 25 bp, probe
gggcaggaacggtggaggcagaggt

SEQ ID NO: 246922 - DNA, 25 bp, probe
gggcgaaagcaacgggactgctggg

SEQ ID NO: 246923 - DNA, 25 bp, probe
gggctgaaagcacaggtggcatatg

SEQ ID NO: 246924 - DNA, 25 bp, probe
gggctaaggctgtggtgcctcagcc

SEQ ID NO: 246925 - DNA, 25 bp, probe
gggcttcgtgtatggacctcaagcg

SEQ ID NO: 246926 - DNA, 25 bp, probe
gggcttcgtgtatggacctcaagcg

SEQ ID NO: 246927 - DNA, 25 bp, probe
gggcttcaatgcgaaggacgcgcaa

SEQ ID NO: 246928 - DNA, 25 bp, probe
gggcctcctgagaaggacaggcaaa

SEQ ID NO: 246929 - DNA, 25 bp, probe
gggcccagtggataagcggaagggt

SEQ ID NO: 246930 - DNA, 25 bp, probe
gggccctgaggcttgaagcttgaag

SEQ ID NO: 246931 - DNA, 25 bp, probe
gggctgcctagtgctaacgggcatg

SEQ ID NO: 246932 - DNA, 25 bp, probe
gggctggcattgccctcaacgacca

SEQ ID NO: 246933 - DNA, 25 bp, probe
gggctggcattgccctcaacgacca

SEQ ID NO: 246934 - DNA, 25 bp, probe
gggcatggattacttacacgccaag

SEQ ID NO: 246935 - DNA, 25 bp, probe
gggcatggagttaagatccctcaca

SEQ ID NO: 246936 - DNA, 25 bp, probe
gggcatggagttaagatccctcaca

SEQ ID NO: 246937 - DNA, 25 bp, probe
gggcatggactaccagatgaccaca

SEQ ID NO: 246938 - DNA, 25 bp, probe
gggcatggactaccagatgaccaca

SEQ ID NO: 246939 - DNA, 25 bp, probe
gggcatggcctacatggaacgcatg

SEQ ID NO: 246940 - DNA, 25 bp, probe
gggctggcgttttggaatgcaattt

SEQ ID NO: 246941 - DNA, 25 bp, probe
gggcatggcgagtctagaaacctat

SEQ ID NO: 246942 - DNA, 25 bp, probe
gggctgcgcggatgatgagggccca

SEQ ID NO: 246943 - DNA, 25 bp, probe
gggctgcagaaatcatggaggccta

SEQ ID NO: 246944 - DNA, 25 bp, probe
gggcggcaagtgaggatgcagtcca

SEQ ID NO: 246945 - DNA, 25 bp, probe
gggcaggagaggaagatttgtctac

SEQ ID NO: 246946 - DNA, 25 bp, probe
gggcaggagaggaagatttgtctac

SEQ ID NO: 246947 - DNA, 25 bp, probe
gggccgagtaaagtgtgatcattac

SEQ ID NO: 246948 - DNA, 25 bp, probe
gggcctggtacaagggaatgtcaca

SEQ ID NO: 246949 - DNA, 25 bp, probe
gggcctgtataccggataatgactc

SEQ ID NO: 246950 - DNA, 25 bp, probe
gggcctgtataccggataatgactc

SEQ ID NO: 246951 - DNA, 25 bp, probe
gggcctctagagggtacatagtaca

SEQ ID NO: 246952 - DNA, 25 bp, probe
gggcgctctagaggataacaagcat

SEQ ID NO: 246953 - DNA, 25 bp, probe
gggccgtgatgacctgagacaagat

SEQ ID NO: 246954 - DNA, 25 bp, probe
gggccgtgtggctaggaaactggac

SEQ ID NO: 246955 - DNA, 25 bp, probe
gggcggggcgcagggaagagtgcgg

SEQ ID NO: 246956 - DNA, 25 bp, probe
ggccagtcagggagggctagggggc

SEQ ID NO: 246957 - DNA, 25 bp, probe
ggtagccgtagttggactgacgggc

SEQ ID NO: 246958 - DNA, 25 bp, probe
gggaccctcctacactacagagggg

SEQ ID NO: 246959 - DNA, 25 bp, probe
gggaccccgtttttaagatgcatgg

SEQ ID NO: 246960 - DNA, 25 bp, probe
gggacacgtgggatttagggaggat

SEQ ID NO: 246961 - DNA, 25 bp, probe
gggacacgtgggatttagggaggat

SEQ ID NO: 246962 - DNA, 25 bp, probe
gggacataggggtttctggaccaag

SEQ ID NO: 246963 - DNA, 25 bp, probe
gggcctaggggttgtcatgtatgaa

SEQ ID NO: 246964 - DNA, 25 bp, probe
gggcttgatgggctatgtcagtggc

SEQ ID NO: 246965 - DNA, 25 bp, probe
gggctagagatgccaaggcctgtgc

SEQ ID NO: 246966 - DNA, 25 bp, probe
gggaatggatgaaagccacatgtct

SEQ ID NO: 246967 - DNA, 25 bp, probe
gggaatggatgaaagccacatgtct

SEQ ID NO: 246968 - DNA, 25 bp, probe
gggcaagctgtgtgcatgcacgggc

SEQ ID NO: 246969 - DNA, 25 bp, probe
gggaatatgcgaagctgccgcgtgc

SEQ ID NO: 246970 - DNA, 25 bp, probe
gggaatatgcgaagctgccgcgtgc

SEQ ID NO: 246971 - DNA, 25 bp, probe
gggaagatcaagcggctgcgttccc

SEQ ID NO: 246972 - DNA, 25 bp, probe
gggcagaacataccgggtggtccct

SEQ ID NO: 246973 - DNA, 25 bp, probe
gggcggccattgagagctttgtctc

SEQ ID NO: 246974 - DNA, 25 bp, probe
gggcggccattgagagctttgtctc

SEQ ID NO: 246975 - DNA, 25 bp, probe
gggctgaacatgtccgagtttgtct

SEQ ID NO: 246976 - DNA, 25 bp, probe
gggctcatatcttacggttttgtgc

SEQ ID NO: 246977 - DNA, 25 bp, probe
gggctacatttgtgctttctgcagt

SEQ ID NO: 246978 - DNA, 25 bp, probe
gggttcagtttagttcttggtatct

SEQ ID NO: 246979 - DNA, 25 bp, probe
gggttcagtttagttcttagtatct

SEQ ID NO: 246980 - DNA, 25 bp, probe
gggttcagtttagttcttagtatct

SEQ ID NO: 246981 - DNA, 25 bp, probe
gggaactttaacactctagctattc

SEQ ID NO: 246982 - DNA, 25 bp, probe
gggaagttctgttgaggcttagttt

SEQ ID NO: 246983 - DNA, 25 bp, probe
gggaagttctgttgaggcttagttt

SEQ ID NO: 246984 - DNA, 25 bp, probe
gggagcagtttaaggctgccttctc

SEQ ID NO: 246985 - DNA, 25 bp, probe
gggactgttctgaagaacctttcca

SEQ ID NO: 246986 - DNA, 25 bp, probe
gggctctgtattgcagacatcacct

SEQ ID NO: 246987 - DNA, 25 bp, probe
gggctttctatggagccatctgctt

SEQ ID NO: 246988 - DNA, 25 bp, probe
gggcttgaaatggacatctgtgatg

SEQ ID NO: 246989 - DNA, 25 bp, probe
gggcattccagagagacagctgatg

SEQ ID NO: 246990 - DNA, 25 bp, probe
gggctttcaagcagagcacattccc

SEQ ID NO: 246991 - DNA, 25 bp, probe
gggctgtgtcaacagcagcctcaac

SEQ ID NO: 246992 - DNA, 25 bp, probe
gggcatgaccaaagtcaccacagac

SEQ ID NO: 246993 - DNA, 25 bp, probe
gggcatgaccaaagtcaccacagac

SEQ ID NO: 246994 - DNA, 25 bp, probe
gggcatgtaacaaggatctccagtc

SEQ ID NO: 246995 - DNA, 25 bp, probe
gggcatgtaacaaggatctccagtc

SEQ ID NO: 246996 - DNA, 25 bp, probe
gggcatgtaacaaggatctccagtc

SEQ ID NO: 246997 - DNA, 25 bp, probe
gggcattaactatattgctacagca

SEQ ID NO: 246998 - DNA, 25 bp, probe
gggctggacatataattgctggctg

SEQ ID NO: 246999 - DNA, 25 bp, probe
gggcaggacatcaatacactgctgc

SEQ ID NO: 247000 - DNA, 25 bp, probe
gggcatgcgtgtgaacttcgggaaa

SEQ ID NO: 247001 - DNA, 25 bp, probe
gggctatgaagtggagcttcgagga

SEQ ID NO: 247002 - DNA, 25 bp, probe
gggcaataatatggcatttaagagg

SEQ ID NO: 247003 - DNA, 25 bp, probe
gggcagctacaagtgcagctgtgac

SEQ ID NO: 247004 - DNA, 25 bp, probe
gggcatctacaagcagggcctcaaa

SEQ ID NO: 247005 - DNA, 25 bp, probe
gggatctggaccggggagtacaaat

SEQ ID NO: 247006 - DNA, 25 bp, probe
gggaagcgacgggtggagtacaata

SEQ ID NO: 247007 - DNA, 25 bp, probe
gggaaggtgacagcgagaaagacaa

SEQ ID NO: 247008 - DNA, 25 bp, probe
gggcagtgcctatgcctgggaagaa

SEQ ID NO: 247009 - DNA, 25 bp, probe
gggcattacgcaacttggtgaggag

SEQ ID NO: 247010 - DNA, 25 bp, probe
gggcttcattagtgaggctgaccag

SEQ ID NO: 247011 - DNA, 25 bp, probe
gggctctctcattcttggagtgaaa

SEQ ID NO: 247012 - DNA, 25 bp, probe
gggcccatcctgatggagctgcaga

SEQ ID NO: 247013 - DNA, 25 bp, probe
gggcatcaaggccaatgaagtgcag

SEQ ID NO: 247014 - DNA, 25 bp, probe
gggcatcaaggccaatgaagtgcag

SEQ ID NO: 247015 - DNA, 25 bp, probe
gggctacggcagctgaagtggacgc

SEQ ID NO: 247016 - DNA, 25 bp, probe
gggctacggcagctgaagtggacgc

SEQ ID NO: 247017 - DNA, 25 bp, probe
gggcatcctgggctacactgagcac

SEQ ID NO: 247018 - DNA, 25 bp, probe
gggctcttggtgtgatcacatatgc

SEQ ID NO: 247019 - DNA, 25 bp, probe
gggctcttggagtgctcatgtttga

SEQ ID NO: 247020 - DNA, 25 bp, probe
gggctcttggagtgctcatgtttga

SEQ ID NO: 247021 - DNA, 25 bp, probe
gggaattggcattttcgtaggaaag

SEQ ID NO: 247022 - DNA, 25 bp, probe
gggagtctggaagcctgttggttag

SEQ ID NO: 247023 - DNA, 25 bp, probe
tcgggaatgaacttccgctttggtg

SEQ ID NO: 247024 - DNA, 25 bp, probe
gggtgaagaactgccgtttgtgggg

SEQ ID NO: 247025 - DNA, 25 bp, probe
gggagaacaaccacatttttctttg

SEQ ID NO: 247026 - DNA, 25 bp, probe
gggacaaatagctcgattttttgta

SEQ ID NO: 247027 - DNA, 25 bp, probe
gggaatgaatccattattctatttt

SEQ ID NO: 247028 - DNA, 25 bp, probe
gggaatgaatccattattctatttt

SEQ ID NO: 247029 - DNA, 25 bp, probe
gggaagagagtcattcaccaattct

SEQ ID NO: 247030 - DNA, 25 bp, probe
gggaaggacacgtacgacagcacct

SEQ ID NO: 247031 - DNA, 25 bp, probe
gggagaggccttaaatttgcaacta

SEQ ID NO: 247032 - DNA, 25 bp, probe
gggataactgctatcctttaccaga

SEQ ID NO: 247033 - DNA, 25 bp, probe
gggaagccttttggctataaccagt

SEQ ID NO: 247034 - DNA, 25 bp, probe
gggaagtttgcggctctgaaaaact

SEQ ID NO: 247035 - DNA, 25 bp, probe
gggacggtttggtcagactataaat

SEQ ID NO: 247036 - DNA, 25 bp, probe
gggaaattttggtgaagtatataag

SEQ ID NO: 247037 - DNA, 25 bp, probe
gggaaggtcttcgttggcaatttca

SEQ ID NO: 247038 - DNA, 25 bp, probe
tgggaagatggcacgggtcttttca

SEQ ID NO: 247039 - DNA, 25 bp, probe
gggaagagggacgtgttcattttct

SEQ ID NO: 247040 - DNA, 25 bp, probe
gggactagttgagttgtatctttag

SEQ ID NO: 247041 - DNA, 25 bp, probe
gggcatggactaatttgtatctgtt

SEQ ID NO: 247042 - DNA, 25 bp, probe
gggctgtacttggttaacttgattt

SEQ ID NO: 247043 - DNA, 25 bp, probe
gggagttcattgatttggttgattt

SEQ ID NO: 247044 - DNA, 25 bp, probe
ggtgacctcttagcgggtggatttc

SEQ ID NO: 247045 - DNA, 25 bp, probe
gggccctgatttgctgggcagtttt

SEQ ID NO: 247046 - DNA, 25 bp, probe
gggcacagccattgtggtggggttt

SEQ ID NO: 247047 - DNA, 25 bp, probe
gggctaccactgtggtgcgtgtgtg

SEQ ID NO: 247048 - DNA, 25 bp, probe
gggcttctgcggtgaggcaggggag

SEQ ID NO: 247049 - DNA, 25 bp, probe
gggcatttggcgtgaccatgtggga

SEQ ID NO: 247050 - DNA, 25 bp, probe
gggcatttgggagagggctgcaggt

SEQ ID NO: 247051 - DNA, 25 bp, probe
gggctttggcgccaggagatgccat

SEQ ID NO: 247052 - DNA, 25 bp, probe
gggtagtgcctgcagggatgcatgt

SEQ ID NO: 247053 - DNA, 25 bp, probe
gggcgattcctgggggacagaagcc

SEQ ID NO: 247054 - DNA, 25 bp, probe
gggagatcacgctggggaaacggat

SEQ ID NO: 247055 - DNA, 25 bp, probe
gggaccacctgagcgagaagagggt

SEQ ID NO: 247056 - DNA, 25 bp, probe
gggaccggttggccaaggagtggca

SEQ ID NO: 247057 - DNA, 25 bp, probe
gggaccgaattaaggaatggctggg

SEQ ID NO: 247058 - DNA, 25 bp, probe
ggtcccagagtttggtacaggccaa

SEQ ID NO: 247059 - DNA, 25 bp, probe
ggtcccagagtttggtacaggccaa

SEQ ID NO: 247060 - DNA, 25 bp, probe
gggctcccagttacagaaaggccaa

SEQ ID NO: 247061 - DNA, 25 bp, probe
gggctgcccagtatctgaaggtgga

SEQ ID NO: 247062 - DNA, 25 bp, probe
gggcgtgcgtgtaactgtagtgtag

SEQ ID NO: 247063 - DNA, 25 bp, probe
gggcagtgcggaagatgctgctggt

SEQ ID NO: 247064 - DNA, 25 bp, probe
gggcgagcgtgattgtgctgcgccc

SEQ ID NO: 247065 - DNA, 25 bp, probe
gggcgagcgtgattgtgctgcgccc

SEQ ID NO: 247066 - DNA, 25 bp, probe
gggcagatgttggcagctcttgccc

SEQ ID NO: 247067 - DNA, 25 bp, probe
gggcagatattggacacttccttat

SEQ ID NO: 247068 - DNA, 25 bp, probe
gggcaacatagcgagacctcatctc

SEQ ID NO: 247069 - DNA, 25 bp, probe
gggcaacagagcgagactccatctc

SEQ ID NO: 247070 - DNA, 25 bp, probe
gggctgagaggggatgatgccatca

SEQ ID NO: 247071 - DNA, 25 bp, probe
gggatggcacgagatatctaccggg

SEQ ID NO: 247072 - DNA, 25 bp, probe
gggcagagcagccggaacttcggcc

SEQ ID NO: 247073 - DNA, 25 bp, probe
gggcagagactcaggagcccgagcc

SEQ ID NO: 247074 - DNA, 25 bp, probe
gggcagagactcaggagcccgagcc

SEQ ID NO: 247075 - DNA, 25 bp, probe
gggcagtgaaccatgtgccctgccc

SEQ ID NO: 247076 - DNA, 25 bp, probe
gggcatgtgagaatcgtttccttcc

SEQ ID NO: 247077 - DNA, 25 bp, probe
gggcagatgagatcctactttctcc

SEQ ID NO: 247078 - DNA, 25 bp, probe
gggcaggagcaaggctgagttctgc

SEQ ID NO: 247079 - DNA, 25 bp, probe
gggcaaggcaagggaattcccacag

SEQ ID NO: 247080 - DNA, 25 bp, probe
gggaaggaagcaaacagtggtcatc

SEQ ID NO: 247081 - DNA, 25 bp, probe
gggaaggaatcagcctgtgtggggt

SEQ ID NO: 247082 - DNA, 25 bp, probe
gggaaggagatgaacggccgggtca

SEQ ID NO: 247083 - DNA, 25 bp, probe
gggaaggaatttgggctccacggca

SEQ ID NO: 247084 - DNA, 25 bp, probe
gggaatagcattgtgcgtgtccgga

SEQ ID NO: 247085 - DNA, 25 bp, probe
gggaagagactgtatccttcacagg

SEQ ID NO: 247086 - DNA, 25 bp, probe
gggaaagagacttgaccccaggact

SEQ ID NO: 247087 - DNA, 25 bp, probe
gggaaaccctagaccatgtcagata

SEQ ID NO: 247088 - DNA, 25 bp, probe
gggaaacaccatggaggatgtagtc

SEQ ID NO: 247089 - DNA, 25 bp, probe
gggaatcacccacgttgtgaatgcc

SEQ ID NO: 247090 - DNA, 25 bp, probe
gggcaacactctgagttctggtgcc

SEQ ID NO: 247091 - DNA, 25 bp, probe
gggcaatataccaatctcctgaggc

SEQ ID NO: 247092 - DNA, 25 bp, probe
gggaaatatgcccttctcatggcag

SEQ ID NO: 247093 - DNA, 25 bp, probe
gggacagtcagtggctttctcagcc

SEQ ID NO: 247094 - DNA, 25 bp, probe
gggaaacagtggcatattctcatgg

SEQ ID NO: 247095 - DNA, 25 bp, probe
gggaaacagtgactgctactttggg

SEQ ID NO: 247096 - DNA, 25 bp, probe
gggacgtcaatgcttactattcggt

SEQ ID NO: 247097 - DNA, 25 bp, probe
gggacagtgtcatctaaatattccg

SEQ ID NO: 247098 - DNA, 25 bp, probe
gggaatccacacttaatataattcg

SEQ ID NO: 247099 - DNA, 25 bp, probe
gggatttgccctcagaagagacctg

SEQ ID NO: 247100 - DNA, 25 bp, probe
gggaatccccggcaagaggagtgaa

SEQ ID NO: 247101 - DNA, 25 bp, probe
gggagtcccaggattcaaggtggaa

SEQ ID NO: 247102 - DNA, 25 bp, probe
gggagctgcccagcaagcaaatggg

SEQ ID NO: 247103 - DNA, 25 bp, probe
gggcacgcccagtgagaacatctgg

SEQ ID NO: 247104 - DNA, 25 bp, probe
gggcatcctggatttagaacatgga

SEQ ID NO: 247105 - DNA, 25 bp, probe
gggcaacggagtaaacctgctccaa

SEQ ID NO: 247106 - DNA, 25 bp, probe
gggcagaaggcgaaagtccagctgc

SEQ ID NO: 247107 - DNA, 25 bp, probe
gggagaatacgaacagcctggtggt

SEQ ID NO: 247108 - DNA, 25 bp, probe
gggagaagactatccttggagattc

SEQ ID NO: 247109 - DNA, 25 bp, probe
gggagaagactatccttggagattc

SEQ ID NO: 247110 - DNA, 25 bp, probe
gggcaaggcatatgtgtaaatttca

SEQ ID NO: 247111 - DNA, 25 bp, probe
gggcaaggcatatgtgtaaatttca

SEQ ID NO: 247112 - DNA, 25 bp, probe
gggctcaggcaatttatgaaagcca

SEQ ID NO: 247113 - DNA, 25 bp, probe
gggctactgcactttgtgaaggatt

SEQ ID NO: 247114 - DNA, 25 bp, probe
gggcaaggcagtagtggacagggtt

SEQ ID NO: 247115 - DNA, 25 bp, probe
gggaaatgcaggaaggccgggttgt

SEQ ID NO: 247116 - DNA, 25 bp, probe
gggaactgcaataacctgggagttt

SEQ ID NO: 247117 - DNA, 25 bp, probe
gggaacatgacccagcctgaaagat

SEQ ID NO: 247118 - DNA, 25 bp, probe
gggctaccacagcagccgagagaag

SEQ ID NO: 247119 - DNA, 25 bp, probe
gggctcaccatacacaagtaaataa

SEQ ID NO: 247120 - DNA, 25 bp, probe
gggaaccacaaacagtatcaggaaa

SEQ ID NO: 247121 - DNA, 25 bp, probe
gggaagaaacaagagccattaaaat

SEQ ID NO: 247122 - DNA, 25 bp, probe
gggaaaaacatccaagcactttaat

SEQ ID NO: 247123 - DNA, 25 bp, probe
gggcaggaaacgccaagaactgctg

SEQ ID NO: 247124 - DNA, 25 bp, probe
gggcaggatcccatcagaaaggtgc

SEQ ID NO: 247125 - DNA, 25 bp, probe
gggaagtcatccacaaagacctggt

SEQ ID NO: 247126 - DNA, 25 bp, probe
gggaagttcctcatacagatcctgc

SEQ ID NO: 247127 - DNA, 25 bp, probe
gggaagttcaccagcaagtcggatg

SEQ ID NO: 247128 - DNA, 25 bp, probe
gggaagttcaccagcaagtcggatg

SEQ ID NO: 247129 - DNA, 25 bp, probe
gggacggtactgagatatctcggct

SEQ ID NO: 247130 - DNA, 25 bp, probe
gggactgagtactggattgtccgga

SEQ ID NO: 247131 - DNA, 25 bp, probe
gggtctggattttgtaggtccgact

SEQ ID NO: 247132 - DNA, 25 bp, probe
gggtctggattttgtaggtccgact

SEQ ID NO: 247133 - DNA, 25 bp, probe
gggcattggttgctatatgttccga

SEQ ID NO: 247134 - DNA, 25 bp, probe
gggacatggattcttgatcttcctt

SEQ ID NO: 247135 - DNA, 25 bp, probe
gggaaaggtattagatttactgcta

SEQ ID NO: 247136 - DNA, 25 bp, probe
gggaaagtgctacacatttaactct

SEQ ID NO: 247137 - DNA, 25 bp, probe
gggcagaaggaagacttcatccctc

SEQ ID NO: 247138 - DNA, 25 bp, probe
gggctttcgaacaacaatattcacc

SEQ ID NO: 247139 - DNA, 25 bp, probe
gggcttccaggacagcaaattccac

SEQ ID NO: 247140 - DNA, 25 bp, probe
gggcttccgggggtgagattcaagc

SEQ ID NO: 247141 - DNA, 25 bp, probe
gggcttgtagggggagagaccagga

SEQ ID NO: 247142 - DNA, 25 bp, probe
gggctcgaagcacaggagagaccag

SEQ ID NO: 247143 - DNA, 25 bp, probe
gggctccacagagagctgcaacacc

SEQ ID NO: 247144 - DNA, 25 bp, probe
gggctagccagttactggtcatgcc

SEQ ID NO: 247145 - DNA, 25 bp, probe
gggaatgtcaattacggctaccagc

SEQ ID NO: 247146 - DNA, 25 bp, probe
gggctatgtgcacttgaaggtgacc

SEQ ID NO: 247147 - DNA, 25 bp, probe
gggtcagtgcatctcagggagaacc

SEQ ID NO: 247148 - DNA, 25 bp, probe
gggctgcattgtgtatggtgccacc

SEQ ID NO: 247149 - DNA, 25 bp, probe
gggctgcattgggttggtggcccac

SEQ ID NO: 247150 - DNA, 25 bp, probe
gggctgcattgggttggtggcccac

SEQ ID NO: 247151 - DNA, 25 bp, probe
gggcatcatgggggatttggcacaa

SEQ ID NO: 247152 - DNA, 25 bp, probe
gggctctggtaattttggaactgtg

SEQ ID NO: 247153 - DNA, 25 bp, probe
gggctctgtttttattggaagactc

SEQ ID NO: 247154 - DNA, 25 bp, probe
gggctctgtatatagctatgaagaa

SEQ ID NO: 247155 - DNA, 25 bp, probe
gggcttcatatacaatcaggagatt

SEQ ID NO: 247156 - DNA, 25 bp, probe
gggcttcattaggactgagactttg

SEQ ID NO: 247157 - DNA, 25 bp, probe
gggctttatgtgaactatgatattg

SEQ ID NO: 247158 - DNA, 25 bp, probe
gggctttatggagatattcactttg

SEQ ID NO: 247159 - DNA, 25 bp, probe
gggcttttggattatgtgtacagtt

SEQ ID NO: 247160 - DNA, 25 bp, probe
gggctatgtgtacttcttgtgcaag

SEQ ID NO: 247161 - DNA, 25 bp, probe
gggcatcaggtactgtttatacagc

SEQ ID NO: 247162 - DNA, 25 bp, probe
gggcaccctactatgtgctacagct

SEQ ID NO: 247163 - DNA, 25 bp, probe
gggcagcccaagacatgctttaaat

SEQ ID NO: 247164 - DNA, 25 bp, probe
gggcaacgcagacatgttctggaag

SEQ ID NO: 247165 - DNA, 25 bp, probe
gggaacagcaggttaccaggactga

SEQ ID NO: 247166 - DNA, 25 bp, probe
gggacaggcattgttgccaggggtg

SEQ ID NO: 247167 - DNA, 25 bp, probe
gggacaggcagtactgtctgcagcg

SEQ ID NO: 247168 - DNA, 25 bp, probe
gggaaggatccaggttcgcttccgt

SEQ ID NO: 247169 - DNA, 25 bp, probe
gggcaaggattctctgtacgcccag

SEQ ID NO: 247170 - DNA, 25 bp, probe
gggcaggggaagtcttagctgccgc

SEQ ID NO: 247171 - DNA, 25 bp, probe
gggcaaaggggtgaagcgcaggcct

SEQ ID NO: 247172 - DNA, 25 bp, probe
gggaaatggggtgaacggtgctggc

SEQ ID NO: 247173 - DNA, 25 bp, probe
gggaaatggggtgaacggtgctggc

SEQ ID NO: 247174 - DNA, 25 bp, probe
gggaacaggtaaggagaatgggtgg

SEQ ID NO: 247175 - DNA, 25 bp, probe
gggcaaagcgttatgagaagctgga

SEQ ID NO: 247176 - DNA, 25 bp, probe
gggcatgacacgaatattgctgatg

SEQ ID NO: 247177 - DNA, 25 bp, probe
gggcagcgaggatatcatgatgatg

SEQ ID NO: 247178 - DNA, 25 bp, probe
gggcagcgaggatatcatgatgatg

SEQ ID NO: 247179 - DNA, 25 bp, probe
gggcagctagtggccatgctgcagg

SEQ ID NO: 247180 - DNA, 25 bp, probe
gggcagagacagtctcatcgcagtc

SEQ ID NO: 247181 - DNA, 25 bp, probe
gggcaagatgcagctgaagatggag

SEQ ID NO: 247182 - DNA, 25 bp, probe
gggaagaacacaaggatcgagaaac

SEQ ID NO: 247183 - DNA, 25 bp, probe
gggaagtgacacgtctgttgcacaa

SEQ ID NO: 247184 - DNA, 25 bp, probe
gggaagtgacacgtctgttgcacaa

SEQ ID NO: 247185 - DNA, 25 bp, probe
gggcatttcacgaactgttcacact

SEQ ID NO: 247186 - DNA, 25 bp, probe
gggctcagctcattaaggctctaca

SEQ ID NO: 247187 - DNA, 25 bp, probe
gggcttgcgatgtaagatgtgcaaa

SEQ ID NO: 247188 - DNA, 25 bp, probe
gggcttgctgtggaagtggaagttc

SEQ ID NO: 247189 - DNA, 25 bp, probe
gggcttggaggaggcaagactgttc

SEQ ID NO: 247190 - DNA, 25 bp, probe
gggctagggagaatgcagagaggtt

SEQ ID NO: 247191 - DNA, 25 bp, probe
gggacagggcatcatgggggatttg

SEQ ID NO: 247192 - DNA, 25 bp, probe
gggaaggagcacaaggggaaatcag

SEQ ID NO: 247193 - DNA, 25 bp, probe
gggcatgaggaaggaggcggtgcag

SEQ ID NO: 247194 - DNA, 25 bp, probe
gggcatgggagaaggtggtgtcagc

SEQ ID NO: 247195 - DNA, 25 bp, probe
gggcattgccagattggcttgtggc

SEQ ID NO: 247196 - DNA, 25 bp, probe
gggctcccagaagtgtgtggctgag

SEQ ID NO: 247197 - DNA, 25 bp, probe
gggcacaccaagtctggggtgcagc

SEQ ID NO: 247198 - DNA, 25 bp, probe
gggcaagacaagtgagggatgcaac

SEQ ID NO: 247199 - DNA, 25 bp, probe
gggaactccaacaagggagcaaatc

SEQ ID NO: 247200 - DNA, 25 bp, probe
gggacaaccaccaggtgtcaaatga

SEQ ID NO: 247201 - DNA, 25 bp, probe
gggaatagcgacttagtgttctaaa

SEQ ID NO: 247202 - DNA, 25 bp, probe
gggaagccacctaagaatgtttaca

SEQ ID NO: 247203 - DNA, 25 bp, probe
gggaccctccatgagagttttggac

SEQ ID NO: 247204 - DNA, 25 bp, probe
tggaaacccccgaggagttggatct

SEQ ID NO: 247205 - DNA, 25 bp, probe
gggaacccagccctggggtatgagc

SEQ ID NO: 247206 - DNA, 25 bp, probe
gggaacaaaggctgcagggtctgac

SEQ ID NO: 247207 - DNA, 25 bp, probe
gggagcaaaagtctgcgaccatcgt

SEQ ID NO: 247208 - DNA, 25 bp, probe
gggacaattactggggacaattgca

SEQ ID NO: 247209 - DNA, 25 bp, probe
gggacgattacttggacaccgtgaa

SEQ ID NO: 247210 - DNA, 25 bp, probe
gggcttgattactaggaatggaggt

SEQ ID NO: 247211 - DNA, 25 bp, probe
gggcttgttgattgtgggattgtgg

SEQ ID NO: 247212 - DNA, 25 bp, probe
gggacatttttgaggcatttgaagc

SEQ ID NO: 247213 - DNA, 25 bp, probe
gggatttttcgtctattgtaagaat

SEQ ID NO: 247214 - DNA, 25 bp, probe
gggtattttctgcctaagtgctacg

SEQ ID NO: 247215 - DNA, 25 bp, probe
gggtattgatgtgccccaggtagtg

SEQ ID NO: 247216 - DNA, 25 bp, probe
gggtctcagttagcccaagtttctt

SEQ ID NO: 247217 - DNA, 25 bp, probe
ggtggactttataccctgagtttag

SEQ ID NO: 247218 - DNA, 25 bp, probe
ggtggttgtgaatgcccttttagga

SEQ ID NO: 247219 - DNA, 25 bp, probe
gggtgtggtagaacactttcaaaga

SEQ ID NO: 247220 - DNA, 25 bp, probe
ggggggaagtaattgtctcgaaatg

SEQ ID NO: 247221 - DNA, 25 bp, probe
gggaaggtagaaatggtctctggca

SEQ ID NO: 247222 - DNA, 25 bp, probe
gggaaggcttgaaaggtgtatggaa

SEQ ID NO: 247223 - DNA, 25 bp, probe
gggaaggcttgaaaggtgtatggaa

SEQ ID NO: 247224 - DNA, 25 bp, probe
gggagagacttgttaggaatggggt

SEQ ID NO: 247225 - DNA, 25 bp, probe
ggggaaaggttctgcaagttgccat

SEQ ID NO: 247226 - DNA, 25 bp, probe
gggtaagggctcaggaagttgctcc

SEQ ID NO: 247227 - DNA, 25 bp, probe
gggaaaggtgtcagtccgttctgga

SEQ ID NO: 247228 - DNA, 25 bp, probe
gggaaagtgggcagtcagtctagct

SEQ ID NO: 247229 - DNA, 25 bp, probe
gggaatgggaggaaccaggccacat

SEQ ID NO: 247230 - DNA, 25 bp, probe
gggacacctgggcaaagacgaattc

SEQ ID NO: 247231 - DNA, 25 bp, probe
gggaactcttggtacctggaaatgt

SEQ ID NO: 247232 - DNA, 25 bp, probe
gggcaagctgccagtcaagtggaca

SEQ ID NO: 247233 - DNA, 25 bp, probe
gggctacttcatggaggatgggaga

SEQ ID NO: 247234 - DNA, 25 bp, probe
gggctaaggatttgaagctggcaga

SEQ ID NO: 247235 - DNA, 25 bp, probe
gggctaagactttaactcagagcaa

SEQ ID NO: 247236 - DNA, 25 bp, probe
gggctaggacttttcatctaggata

SEQ ID NO: 247237 - DNA, 25 bp, probe
gggctatgggtttgctttggtgttg

SEQ ID NO: 247238 - DNA, 25 bp, probe
gggctatgggtttgctttggtgttg

SEQ ID NO: 247239 - DNA, 25 bp, probe
gggctatggtttgggtatggtttgc

SEQ ID NO: 247240 - DNA, 25 bp, probe
gggctatggtttgggtatggtttgc

SEQ ID NO: 247241 - DNA, 25 bp, probe
gggttctatttctgtatgcccttgg

SEQ ID NO: 247242 - DNA, 25 bp, probe
gggttttttgcacatgaccctgtga

SEQ ID NO: 247243 - DNA, 25 bp, probe
gggctacggggacatgaggcccatc

SEQ ID NO: 247244 - DNA, 25 bp, probe
gggaactgggaagatgctggcccca

SEQ ID NO: 247245 - DNA, 25 bp, probe
ggaaaccaggaagcctagcatccca

SEQ ID NO: 247246 - DNA, 25 bp, probe
ggaaaccaggaagcctagcatccca

SEQ ID NO: 247247 - DNA, 25 bp, probe
ggaaaccaggaagcctagcatccca

SEQ ID NO: 247248 - DNA, 25 bp, probe
ggaaaccaggaagcctagcatccca

SEQ ID NO: 247249 - DNA, 25 bp, probe
gggacaccagtgaaacttgaaccgg

SEQ ID NO: 247250 - DNA, 25 bp, probe
gggcagcaccgtgaagacgaatatg

SEQ ID NO: 247251 - DNA, 25 bp, probe
gggcaacctcaggaagttactagag

SEQ ID NO: 247252 - DNA, 25 bp, probe
gggaggctctaggaaggttctgggt

SEQ ID NO: 247253 - DNA, 25 bp, probe
gggaagccatcagagggttctcgct

SEQ ID NO: 247254 - DNA, 25 bp, probe
gggaaccacagcagcggttgaacat

SEQ ID NO: 247255 - DNA, 25 bp, probe
gggcacccaggaagggttgaccagg

SEQ ID NO: 247256 - DNA, 25 bp, probe
gggcacccaggaagggttgaccagg

SEQ ID NO: 247257 - DNA, 25 bp, probe
gggaaccccatattggatggcacct

SEQ ID NO: 247258 - DNA, 25 bp, probe
gggaagtctgtcgattggtggtcct

SEQ ID NO: 247259 - DNA, 25 bp, probe
ggtgaagatctgtgactttggcctt

SEQ ID NO: 247260 - DNA, 25 bp, probe
gggcagagttgtcatcttggagact

SEQ ID NO: 247261 - DNA, 25 bp, probe
gggaatactggccatgcctggagac

SEQ ID NO: 247262 - DNA, 25 bp, probe
gggaacagctgctttgccatagacc

SEQ ID NO: 247263 - DNA, 25 bp, probe
gggaacagcagcagtgccatagcca

SEQ ID NO: 247264 - DNA, 25 bp, probe
gggacatcatgaatgactccaacta

SEQ ID NO: 247265 - DNA, 25 bp, probe
gggaatgcaactctgctcaggatca

SEQ ID NO: 247266 - DNA, 25 bp, probe
gggaatgcacctcttctttgattcc

SEQ ID NO: 247267 - DNA, 25 bp, probe
gggcagaaggtggtccagttttcgc

SEQ ID NO: 247268 - DNA, 25 bp, probe
ggggatagtgggggcgtttttgcag

SEQ ID NO: 247269 - DNA, 25 bp, probe
gggcaaaggggagggttcttggatg

SEQ ID NO: 247270 - DNA, 25 bp, probe
gggacaaggggcaggtcccaggagc

SEQ ID NO: 247271 - DNA, 25 bp, probe
gggaaagccaggatggcccgaggaa

SEQ ID NO: 247272 - DNA, 25 bp, probe
gggaaagccagaaggggcacgcctg

SEQ ID NO: 247273 - DNA, 25 bp, probe
gggaactgacagagcaaccacccat

SEQ ID NO: 247274 - DNA, 25 bp, probe
gggacctaaagggactacctctgtg

SEQ ID NO: 247275 - DNA, 25 bp, probe
gggtccttcggagatatctacctgg

SEQ ID NO: 247276 - DNA, 25 bp, probe
gggtcctttggacaggtggccaagt

SEQ ID NO: 247277 - DNA, 25 bp, probe
ggggtcctttggacaggtggccaag

SEQ ID NO: 247278 - DNA, 25 bp, probe
gggcaggcagctcaggaaggaccca

SEQ ID NO: 247279 - DNA, 25 bp, probe
gggaagcctaggaaagataccgaag

SEQ ID NO: 247280 - DNA, 25 bp, probe
gggaaaatctgggaaagcactggaa

SEQ ID NO: 247281 - DNA, 25 bp, probe
gggaaaatctgggaaagcactggaa

SEQ ID NO: 247282 - DNA, 25 bp, probe
gggagatattcaacaggagggcgga

SEQ ID NO: 247283 - DNA, 25 bp, probe
gggcatcgagatgacggcatggagg

SEQ ID NO: 247284 - DNA, 25 bp, probe
gggcagagagacgctggagccaggc

SEQ ID NO: 247285 - DNA, 25 bp, probe
gggcagtggtacctgtggtcaggtg

SEQ ID NO: 247286 - DNA, 25 bp, probe
gggcagggtcagcatgaggagggga

SEQ ID NO: 247287 - DNA, 25 bp, probe
gggcacagtgggcaatgggctggtg

SEQ ID NO: 247288 - DNA, 25 bp, probe
gggcagtgttagagcagggctggtc

SEQ ID NO: 247289 - DNA, 25 bp, probe
gggcaggatctaagccaggcctgga

SEQ ID NO: 247290 - DNA, 25 bp, probe
ggtgggatttccgagctgacggaag

SEQ ID NO: 247291 - DNA, 25 bp, probe
gggcttgtttgcagactgggtgagg

SEQ ID NO: 247292 - DNA, 25 bp, probe
gggctttttaaatttggtgccgatg

SEQ ID NO: 247293 - DNA, 25 bp, probe
gggcttttcctattgatttgggagt

SEQ ID NO: 247294 - DNA, 25 bp, probe
gggtcttgcccttgaataactaagt

SEQ ID NO: 247295 - DNA, 25 bp, probe
gggcttgtgccctttgatgaaataa

SEQ ID NO: 247296 - DNA, 25 bp, probe
gggctttcactctggtgaaactgtt

SEQ ID NO: 247297 - DNA, 25 bp, probe
gggctttaactcctgctagaacagt

SEQ ID NO: 247298 - DNA, 25 bp, probe
gggcatttgacactcttgcaaaagc

SEQ ID NO: 247299 - DNA, 25 bp, probe
gggcatcttcacatccaagacagat

SEQ ID NO: 247300 - DNA, 25 bp, probe
gggcatcctcaaatccatcatgaag

SEQ ID NO: 247301 - DNA, 25 bp, probe
gggcatcttgaaacacagcagcaaa

SEQ ID NO: 247302 - DNA, 25 bp, probe
gggcttatgcagaccagcaagctgt

SEQ ID NO: 247303 - DNA, 25 bp, probe
gggcttctgagggcatcataggggg

SEQ ID NO: 247304 - DNA, 25 bp, probe
gggcttctgacgccaaatgggcttc

SEQ ID NO: 247305 - DNA, 25 bp, probe
gggcttctgacgccaaatgggcttc

SEQ ID NO: 247306 - DNA, 25 bp, probe
gggcacattcaacaaagtgctcttc

SEQ ID NO: 247307 - DNA, 25 bp, probe
gggcagcttctattagccagtcttt

SEQ ID NO: 247308 - DNA, 25 bp, probe
gggcagctgactaaagaatgtatct

SEQ ID NO: 247309 - DNA, 25 bp, probe
gggcaggtttaagcatgagatgttt

SEQ ID NO: 247310 - DNA, 25 bp, probe
gggcaggtgtttggcttagtatttg

SEQ ID NO: 247311 - DNA, 25 bp, probe
gggcaggatgttcactctatttatt

SEQ ID NO: 247312 - DNA, 25 bp, probe
gggcagagattatatccctatcttc

SEQ ID NO: 247313 - DNA, 25 bp, probe
gggtgaaatgacgttgccgattcac

SEQ ID NO: 247314 - DNA, 25 bp, probe
gggacaagtggcgttcagccacccg

SEQ ID NO: 247315 - DNA, 25 bp, probe
gggcacaggtgggtgtcatgccctg

SEQ ID NO: 247316 - DNA, 25 bp, probe
gggacagatgtgctgctgttcccag

SEQ ID NO: 247317 - DNA, 25 bp, probe
gggagagattgaagtgtggcaccaa

SEQ ID NO: 247318 - DNA, 25 bp, probe
gggaaatctatcttgtctgcaagaa

SEQ ID NO: 247319 - DNA, 25 bp, probe
gggaaatctatcttgtctgcaagaa

SEQ ID NO: 247320 - DNA, 25 bp, probe
gggaagacattggctccataagcaa

SEQ ID NO: 247321 - DNA, 25 bp, probe
gggcaatgatttccctgcagaagga

SEQ ID NO: 247322 - DNA, 25 bp, probe
gggcaagatttcccaggaactatga

SEQ ID NO: 247323 - DNA, 25 bp, probe
gggaagactattccagagacgaaga

SEQ ID NO: 247324 - DNA, 25 bp, probe
gggacaatatttcagacggagcaaa

SEQ ID NO: 247325 - DNA, 25 bp, probe
gggcaaaagcctcagtcggcaaaag

SEQ ID NO: 247326 - DNA, 25 bp, probe
gggcagaaagtcctagaactcagaa

SEQ ID NO: 247327 - DNA, 25 bp, probe
gggcagaaagtcctagaactcagaa

SEQ ID NO: 247328 - DNA, 25 bp, probe
gggagaagactcctacaacccgaat

SEQ ID NO: 247329 - DNA, 25 bp, probe
gggatcaggagggtccaaagccgac

SEQ ID NO: 247330 - DNA, 25 bp, probe
gggatcaggagggtccaaagccgac

SEQ ID NO: 247331 - DNA, 25 bp, probe
gggcacaggaggtcctcaagggtat

SEQ ID NO: 247332 - DNA, 25 bp, probe
gggcacgagaacccaaagggaatag

SEQ ID NO: 247333 - DNA, 25 bp, probe
gggcagaggagcagaataagttggt

SEQ ID NO: 247334 - DNA, 25 bp, probe
gggcaggtagctgatgctaagttgg

SEQ ID NO: 247335 - DNA, 25 bp, probe
gggcaagggatgccagtaagtctgc

SEQ ID NO: 247336 - DNA, 25 bp, probe
gggcataggtgaccgctgtgagaac

SEQ ID NO: 247337 - DNA, 25 bp, probe
ggggatggttcagtgcttcgaacta

SEQ ID NO: 247338 - DNA, 25 bp, probe
gggaatctggcttggttcgagatag

SEQ ID NO: 247339 - DNA, 25 bp, probe
gggaatctggcttggttcgagatag

SEQ ID NO: 247340 - DNA, 25 bp, probe
gggcaggtgagcaggatgccgagga

SEQ ID NO: 247341 - DNA, 25 bp, probe
gggcatgggaaaagtccagaaacct

SEQ ID NO: 247342 - DNA, 25 bp, probe
gggcaaggagaaagcaccgacaatc

SEQ ID NO: 247343 - DNA, 25 bp, probe
gggcaaggagaaagcaccgacaatc

SEQ ID NO: 247344 - DNA, 25 bp, probe
gggcaaagacattctatccaccaac

SEQ ID NO: 247345 - DNA, 25 bp, probe
gggaaaaactcattgtatccaacga

SEQ ID NO: 247346 - DNA, 25 bp, probe
gggaaaaagccagtctaggaaagag

SEQ ID NO: 247347 - DNA, 25 bp, probe
gggaaaaagccagtctaggaaagag

SEQ ID NO: 247348 - DNA, 25 bp, probe
gggaacttcatctccttggacaaag

SEQ ID NO: 247349 - DNA, 25 bp, probe
gggaacttcatctccttggacaaag

SEQ ID NO: 247350 - DNA, 25 bp, probe
gggagaaattttctctggacccagt

SEQ ID NO: 247351 - DNA, 25 bp, probe
gggaccaagttgtgtctggttccac

SEQ ID NO: 247352 - DNA, 25 bp, probe
gggcacccagtggggtgctgagtgg

SEQ ID NO: 247353 - DNA, 25 bp, probe
gggcagagcacagcggggtgagagg

SEQ ID NO: 247354 - DNA, 25 bp, probe
gggcaacactgcaggacagtcaagg

SEQ ID NO: 247355 - DNA, 25 bp, probe
gggcattcttgcaggagcaggccag

SEQ ID NO: 247356 - DNA, 25 bp, probe
gggcattctctggttggaggacaga

SEQ ID NO: 247357 - DNA, 25 bp, probe
gggcagcctcatgtctgctaaaaca

SEQ ID NO: 247358 - DNA, 25 bp, probe
gggcagagtatgttcttgaagaaag

SEQ ID NO: 247359 - DNA, 25 bp, probe
gggcaggtatcaacattggggaaga

SEQ ID NO: 247360 - DNA, 25 bp, probe
gggcaggtacgcggggtatgcaaag

SEQ ID NO: 247361 - DNA, 25 bp, probe
gggcatgacccctgagttatgaagg

SEQ ID NO: 247362 - DNA, 25 bp, probe
gggcaaaatcgcttcagttaaactg

SEQ ID NO: 247363 - DNA, 25 bp, probe
gggcaagtatcctaagttagcacat

SEQ ID NO: 247364 - DNA, 25 bp, probe
gggcaatgatgtgtgcaagtacgac

SEQ ID NO: 247365 - DNA, 25 bp, probe
gggcattgtatctgatagccactaa

SEQ ID NO: 247366 - DNA, 25 bp, probe
gggatcgtccagaaagccggagact

SEQ ID NO: 247367 - DNA, 25 bp, probe
gggcaagagccagaagccaggcaca

SEQ ID NO: 247368 - DNA, 25 bp, probe
gggcaagagcctggaagcctctata

SEQ ID NO: 247369 - DNA, 25 bp, probe
gggaatcacctgaaacagcttccag

SEQ ID NO: 247370 - DNA, 25 bp, probe
gggcaacatatttaagatttccagc

SEQ ID NO: 247371 - DNA, 25 bp, probe
gggcaagatatttctgagacattta

SEQ ID NO: 247372 - DNA, 25 bp, probe
gggaggatgtacgtggccatgtatg

SEQ ID NO: 247373 - DNA, 25 bp, probe
gggaacagtgaggtgcccagctagc

SEQ ID NO: 247374 - DNA, 25 bp, probe
gggaatactatgccatgaccagctt

SEQ ID NO: 247375 - DNA, 25 bp, probe
gggcaatacagaccatcaagcaata

SEQ ID NO: 247376 - DNA, 25 bp, probe
gggaaccgaagccaagtgataaagc

SEQ ID NO: 247377 - DNA, 25 bp, probe
gggaagcactgatgccaaggatgat

SEQ ID NO: 247378 - DNA, 25 bp, probe
gggcacatcagcaaaggcaagggca

SEQ ID NO: 247379 - DNA, 25 bp, probe
gggcaacacaaggacatggtgcgca

SEQ ID NO: 247380 - DNA, 25 bp, probe
gggcaaagacagcaagagagctgca

SEQ ID NO: 247381 - DNA, 25 bp, probe
gggactgaggagcgaggcctgaagc

SEQ ID NO: 247382 - DNA, 25 bp, probe
gggactgaggagcgaggcctgaagc

SEQ ID NO: 247383 - DNA, 25 bp, probe
gggactcagctcgggtggccgagca

SEQ ID NO: 247384 - DNA, 25 bp, probe
gggagctactcaggactcacgtagc

SEQ ID NO: 247385 - DNA, 25 bp, probe
gggaatatcctggcactgaggtcac

SEQ ID NO: 247386 - DNA, 25 bp, probe
gggcagttcagtggcctgaaccctg

SEQ ID NO: 247387 - DNA, 25 bp, probe
gggcatttcagtggcagtgctgtac

SEQ ID NO: 247388 - DNA, 25 bp, probe
gggcattacagaagagcatattcga

SEQ ID NO: 247389 - DNA, 25 bp, probe
gggcatttcatgtcaatggaatcat

SEQ ID NO: 247390 - DNA, 25 bp, probe
gggcatgggattgtgggatcattgg

SEQ ID NO: 247391 - DNA, 25 bp, probe
gggcagggaatcctggagcacttgt

SEQ ID NO: 247392 - DNA, 25 bp, probe
gggcagggaatcctggagcacttgt

SEQ ID NO: 247393 - DNA, 25 bp, probe
gggcagaggaatgtagggcctgcat

SEQ ID NO: 247394 - DNA, 25 bp, probe
gggcagggacaggataagagggatt

SEQ ID NO: 247395 - DNA, 25 bp, probe
gggcatttagaggaagaaggctgaa

SEQ ID NO: 247396 - DNA, 25 bp, probe
gggcaattggcgggcatggaggtgg

SEQ ID NO: 247397 - DNA, 25 bp, probe
gggcacatcgtctggatgctgaatt

SEQ ID NO: 247398 - DNA, 25 bp, probe
gggcatcttgtctttagtggtttct

SEQ ID NO: 247399 - DNA, 25 bp, probe
gggcaccgtttcaaggtggatgtgt

SEQ ID NO: 247400 - DNA, 25 bp, probe
gggacctggcccagtttatggtgca

SEQ ID NO: 247401 - DNA, 25 bp, probe
gggatttgggtcagttgtagttgcc

SEQ ID NO: 247402 - DNA, 25 bp, probe
gggacctggttatgttgttattctc

SEQ ID NO: 247403 - DNA, 25 bp, probe
gggacacggagtttgcgtttgaggt

SEQ ID NO: 247404 - DNA, 25 bp, probe
gggacacaatcctagtcagctttga

SEQ ID NO: 247405 - DNA, 25 bp, probe
gggaacatgtcggagtccttcagag

SEQ ID NO: 247406 - DNA, 25 bp, probe
gggcaatttcagccaggacattagg

SEQ ID NO: 247407 - DNA, 25 bp, probe
gggcagattacagtgggacaaagaa

SEQ ID NO: 247408 - DNA, 25 bp, probe
gggaagctggattgggacaacagga

SEQ ID NO: 247409 - DNA, 25 bp, probe
gggaatggagtatctgagcaacagg

SEQ ID NO: 247410 - DNA, 25 bp, probe
gggcaacgagaagctaaccatgcag

SEQ ID NO: 247411 - DNA, 25 bp, probe
gggcaacctggagaagacctgagac

SEQ ID NO: 247412 - DNA, 25 bp, probe
gggcaacctggagaagacctgagac

SEQ ID NO: 247413 - DNA, 25 bp, probe
gggaatcctggaagacttcctgcag

SEQ ID NO: 247414 - DNA, 25 bp, probe
gggcacatacggattcttgctgccg

SEQ ID NO: 247415 - DNA, 25 bp, probe
gggagattcatgccagtctggtgcc

SEQ ID NO: 247416 - DNA, 25 bp, probe
gggagattcatgccagtctggtgcc

SEQ ID NO: 247417 - DNA, 25 bp, probe
gggagaccagcaaatcggtgcactg

SEQ ID NO: 247418 - DNA, 25 bp, probe
gggaagacgctaatctgtgacatct

SEQ ID NO: 247419 - DNA, 25 bp, probe
gggacagacctctctgaagtgtctc

SEQ ID NO: 247420 - DNA, 25 bp, probe
gggagcagacctctagagcaggatt

SEQ ID NO: 247421 - DNA, 25 bp, probe
gggacatgtctggccaagacgtgat

SEQ ID NO: 247422 - DNA, 25 bp, probe
gggactcattctgaacacgtgaaag

SEQ ID NO: 247423 - DNA, 25 bp, probe
gggactattacacacaaaacaaatt

SEQ ID NO: 247424 - DNA, 25 bp, probe
gggacatttacatcaaaaggggatc

SEQ ID NO: 247425 - DNA, 25 bp, probe
gggcactcccaataatgaagtgtgg

SEQ ID NO: 247426 - DNA, 25 bp, probe
gggcactcccaataatgaagtgtgg

SEQ ID NO: 247427 - DNA, 25 bp, probe
gggacacccagacagatgagattgt

SEQ ID NO: 247428 - DNA, 25 bp, probe
gggatgtcccgagaggaagctgatg

SEQ ID NO: 247429 - DNA, 25 bp, probe
gggaaagcggcagaggaaggataca

SEQ ID NO: 247430 - DNA, 25 bp, probe
gggaccaggaaggaactgaggacca

SEQ ID NO: 247431 - DNA, 25 bp, probe
gggacccagcaagggcacttaacaa

SEQ ID NO: 247432 - DNA, 25 bp, probe
gggacccagcaagggcacttaacaa

SEQ ID NO: 247433 - DNA, 25 bp, probe
ggtgaccgatgtacaggactttcct

SEQ ID NO: 247434 - DNA, 25 bp, probe
gggacacgggtcagattgtggccat

SEQ ID NO: 247435 - DNA, 25 bp, probe
gggcaagcaggagtacgtgctgtcg

SEQ ID NO: 247436 - DNA, 25 bp, probe
gggcacgcaggtgcatggtcttcaa

SEQ ID NO: 247437 - DNA, 25 bp, probe
gggcaggccagtcatgtgttaagtt

SEQ ID NO: 247438 - DNA, 25 bp, probe
gggcatgcgctagccaggtagagag

SEQ ID NO: 247439 - DNA, 25 bp, probe
gggcatgcgctagccaggtagagag

SEQ ID NO: 247440 - DNA, 25 bp, probe
gggatcggcgcgacagtgtagaaag

SEQ ID NO: 247441 - DNA, 25 bp, probe
gggatcagagctccatcagtaagac

SEQ ID NO: 247442 - DNA, 25 bp, probe
gggcacacagtgcaatgtgaaagca

SEQ ID NO: 247443 - DNA, 25 bp, probe
gggcacagaggtggctgtgcgaaga

SEQ ID NO: 247444 - DNA, 25 bp, probe
gggcagagatggacgtgaggaacgc

SEQ ID NO: 247445 - DNA, 25 bp, probe
gggcactgaggcggagcaggtgacc

SEQ ID NO: 247446 - DNA, 25 bp, probe
gggcagtggcagtgagaatgtgggc

SEQ ID NO: 247447 - DNA, 25 bp, probe
gggaatggagatgtcaattgtggta

SEQ ID NO: 247448 - DNA, 25 bp, probe
gggaaaagaggtttgcatgctggta

SEQ ID NO: 247449 - DNA, 25 bp, probe
gggaagaaagcccattcatgactta

SEQ ID NO: 247450 - DNA, 25 bp, probe
gggaaaaagacctcacacttggcaa

SEQ ID NO: 247451 - DNA, 25 bp, probe
gggaacaaaacgttcacaacatcgt

SEQ ID NO: 247452 - DNA, 25 bp, probe
gggaggcgaaaggcgttcaatacgt

SEQ ID NO: 247453 - DNA, 25 bp, probe
gggaagcataaagccttctctacgt

SEQ ID NO: 247454 - DNA, 25 bp, probe
gggagcagaaacagccattgcggcc

SEQ ID NO: 247455 - DNA, 25 bp, probe
gggcagtaaaatgggcaatcgacgc

SEQ ID NO: 247456 - DNA, 25 bp, probe
gggcagtaaaatgggcaatcgacgc

SEQ ID NO: 247457 - DNA, 25 bp, probe
gggagtacaaatgcgagatcgagct

SEQ ID NO: 247458 - DNA, 25 bp, probe
gggagaactaatgccgacgtgatga

SEQ ID NO: 247459 - DNA, 25 bp, probe
gggagaactaatgccgacgtgatga

SEQ ID NO: 247460 - DNA, 25 bp, probe
gggaaactcaatcctagaagctgat

SEQ ID NO: 247461 - DNA, 25 bp, probe
gggaatacctgacctaggtatgata

SEQ ID NO: 247462 - DNA, 25 bp, probe
gggaatacctgacctaggtatgata

SEQ ID NO: 247463 - DNA, 25 bp, probe
gggaaaagtgaagtatggctgtaag

SEQ ID NO: 247464 - DNA, 25 bp, probe
gggaaacagggttatcaatgccaag

SEQ ID NO: 247465 - DNA, 25 bp, probe
gggaaacaaggcttccagtgccaag

SEQ ID NO: 247466 - DNA, 25 bp, probe
gggaaacaaggcttccagtgccaag

SEQ ID NO: 247467 - DNA, 25 bp, probe
gggaaggacagacatcaagtgccag

SEQ ID NO: 247468 - DNA, 25 bp, probe
gggaacccgacatcaagctgacgga

SEQ ID NO: 247469 - DNA, 25 bp, probe
gggaacccgacatcaagctgacgga

SEQ ID NO: 247470 - DNA, 25 bp, probe
gggaacccaagcagtagagagcgat

SEQ ID NO: 247471 - DNA, 25 bp, probe
gggagccccaaggcgtagaagcctt

SEQ ID NO: 247472 - DNA, 25 bp, probe
gggtctcggaagggaagtagccatc

SEQ ID NO: 247473 - DNA, 25 bp, probe
gggtctaaagggctatgcctccatt

SEQ ID NO: 247474 - DNA, 25 bp, probe
gggtacaagaagcctgttctgtcca

SEQ ID NO: 247475 - DNA, 25 bp, probe
gggtatcgagaacatttgcgaactg

SEQ ID NO: 247476 - DNA, 25 bp, probe
gggaacagctcatcaattacgaatt

SEQ ID NO: 247477 - DNA, 25 bp, probe
gggaacagctcatcaattacgaatt

SEQ ID NO: 247478 - DNA, 25 bp, probe
gggacacatgtttcacattgacttt

SEQ ID NO: 247479 - DNA, 25 bp, probe
gggacacatgtttcacattgacttt

SEQ ID NO: 247480 - DNA, 25 bp, probe
gggaagcttttgtctatgctttcat

SEQ ID NO: 247481 - DNA, 25 bp, probe
gggcagatttcttgactcagtttgg

SEQ ID NO: 247482 - DNA, 25 bp, probe
gggcagatcttctgtctacatggtg

SEQ ID NO: 247483 - DNA, 25 bp, probe
gggacacactgatacttcatgggaa

SEQ ID NO: 247484 - DNA, 25 bp, probe
gggaaatctactcctttgggcgagt

SEQ ID NO: 247485 - DNA, 25 bp, probe
gggaaactgccatgctttttggatg

SEQ ID NO: 247486 - DNA, 25 bp, probe
gggttactgccattgatattcctgt

SEQ ID NO: 247487 - DNA, 25 bp, probe
gggttaactgtgtatattgactttc

SEQ ID NO: 247488 - DNA, 25 bp, probe
gggtctgagactgaaaatggtttac

SEQ ID NO: 247489 - DNA, 25 bp, probe
ggtgtctggcccagaagtacttctg

SEQ ID NO: 247490 - DNA, 25 bp, probe
ggtgtctggcccagaagtacttctg

SEQ ID NO: 247491 - DNA, 25 bp, probe
gggagtggccacagaaaattcttct

SEQ ID NO: 247492 - DNA, 25 bp, probe
gggaattggctcatgaaggttcttc

SEQ ID NO: 247493 - DNA, 25 bp, probe
gggaattggcatgatgctcaccttc

SEQ ID NO: 247494 - DNA, 25 bp, probe
gggaattggcatgatgctcaccttc

SEQ ID NO: 247495 - DNA, 25 bp, probe
gggcaagcggatggagtgcccacca

SEQ ID NO: 247496 - DNA, 25 bp, probe
gggcaagcggatggagtgcccacca

SEQ ID NO: 247497 - DNA, 25 bp, probe
gggaagcagtatgggtgcagtcccc

SEQ ID NO: 247498 - DNA, 25 bp, probe
gggcaatggtcatcgattgtctcac

SEQ ID NO: 247499 - DNA, 25 bp, probe
gggcaatgggcgtgttgctctatga

SEQ ID NO: 247500 - DNA, 25 bp, probe
gggagtcagggttgtagccaagacg

SEQ ID NO: 247501 - DNA, 25 bp, probe
gggcaatcgggaaggagcacaaggg

SEQ ID NO: 247502 - DNA, 25 bp, probe
gggacacgtggcgggagcagaagga

SEQ ID NO: 247503 - DNA, 25 bp, probe
gggaccggatcagcactcgaaggtc

SEQ ID NO: 247504 - DNA, 25 bp, probe
gggaacgagaactactgatagggct

SEQ ID NO: 247505 - DNA, 25 bp, probe
gggaaatggaagtgtgcaagctgcc

SEQ ID NO: 247506 - DNA, 25 bp, probe
gggaaatggaagtgtgcaagctgcc

SEQ ID NO: 247507 - DNA, 25 bp, probe
gggaaagcaaggagatgcaagcatc

SEQ ID NO: 247508 - DNA, 25 bp, probe
gggaaagcaaggagatgcaagcatc

SEQ ID NO: 247509 - DNA, 25 bp, probe
gggaaaagcaagaacacatacactg

SEQ ID NO: 247510 - DNA, 25 bp, probe
gggaaaacaagaggccaaatatagt

SEQ ID NO: 247511 - DNA, 25 bp, probe
gggaatgaaccatggcacctttgag

SEQ ID NO: 247512 - DNA, 25 bp, probe
gggaatgtaaatggtgcacctgctt

SEQ ID NO: 247513 - DNA, 25 bp, probe
gggcagatgctgtattttgcacctg

SEQ ID NO: 247514 - DNA, 25 bp, probe
gggcagactgtgaacttgactgggt

SEQ ID NO: 247515 - DNA, 25 bp, probe
gggaatttaacttactcaagcaata

SEQ ID NO: 247516 - DNA, 25 bp, probe
gggacattctccattcaaaaaatac

SEQ ID NO: 247517 - DNA, 25 bp, probe
gggacgattcgtttgaaagagagta

SEQ ID NO: 247518 - DNA, 25 bp, probe
gggacgattcgtttgaaagagagta

SEQ ID NO: 247519 - DNA, 25 bp, probe
gggacagttcgttatgcatcaatca

SEQ ID NO: 247520 - DNA, 25 bp, probe
gggaagaactattgtgctcagagac

SEQ ID NO: 247521 - DNA, 25 bp, probe
gggacagagcatgacagagcgccag

SEQ ID NO: 247522 - DNA, 25 bp, probe
gggacaagcataagaaggaggcgga

SEQ ID NO: 247523 - DNA, 25 bp, probe
gggacaatgaattctcagggggggt

SEQ ID NO: 247524 - DNA, 25 bp, probe
gggaatatacatgtcaagaagcaga

SEQ ID NO: 247525 - DNA, 25 bp, probe
gggaatatacatgtcaagaagcaga

SEQ ID NO: 247526 - DNA, 25 bp, probe
gggcaaatactctgcaagatgtgct

SEQ ID NO: 247527 - DNA, 25 bp, probe
gggcaatgacccttgaagatattca

SEQ ID NO: 247528 - DNA, 25 bp, probe
gggaattcactgctgggatgttgca

SEQ ID NO: 247529 - DNA, 25 bp, probe
gggaattcactgctgggatgttgca

SEQ ID NO: 247530 - DNA, 25 bp, probe
gggattacagtgggggcatttcttt

SEQ ID NO: 247531 - DNA, 25 bp, probe
ggaactagaatgagggcccctgatt

SEQ ID NO: 247532 - DNA, 25 bp, probe
gggagccaggatactggggtccttt

SEQ ID NO: 247533 - DNA, 25 bp, probe
gggagccaggatactggggtccttt

SEQ ID NO: 247534 - DNA, 25 bp, probe
gggcagactgaaattgtggatcttc

SEQ ID NO: 247535 - DNA, 25 bp, probe
gggacaggcagaactgggtcttcaa

SEQ ID NO: 247536 - DNA, 25 bp, probe
gggacaggatgcaaaagaggctcca

SEQ ID NO: 247537 - DNA, 25 bp, probe
gggacagttgccaggaggataccaa

SEQ ID NO: 247538 - DNA, 25 bp, probe
gggtagattacctcggataccacaa

SEQ ID NO: 247539 - DNA, 25 bp, probe
gggtaagtcaacacatggaacttaa

SEQ ID NO: 247540 - DNA, 25 bp, probe
gggaaaatcagagaaggcaaattca

SEQ ID NO: 247541 - DNA, 25 bp, probe
gggaaaatctgaccataagaaattt

SEQ ID NO: 247542 - DNA, 25 bp, probe
gggaaggctctgtccagaaaggatt

SEQ ID NO: 247543 - DNA, 25 bp, probe
gggacagtgttatgagcgaaggaat

SEQ ID NO: 247544 - DNA, 25 bp, probe
gggaatgcggtgaggcagtgtggaa

SEQ ID NO: 247545 - DNA, 25 bp, probe
gggatacggtgattgctagttgtga

SEQ ID NO: 247546 - DNA, 25 bp, probe
gggaacattggattgatgctgttga

SEQ ID NO: 247547 - DNA, 25 bp, probe
gggaagctggggacattgctatgca

SEQ ID NO: 247548 - DNA, 25 bp, probe
gggcaagctggagttaataatctat

SEQ ID NO: 247549 - DNA, 25 bp, probe
gggcacacagggttaatgagtctct

SEQ ID NO: 247550 - DNA, 25 bp, probe
gggcagcacagggaatatttttgta

SEQ ID NO: 247551 - DNA, 25 bp, probe
gggcagcacagggaatatttttgta

SEQ ID NO: 247552 - DNA, 25 bp, probe
gggagaaagcaatacgtttgtgcag

SEQ ID NO: 247553 - DNA, 25 bp, probe
gggatatgacaagcaaggtttctgg

SEQ ID NO: 247554 - DNA, 25 bp, probe
gggaagaaacaggatggctttctgt

SEQ ID NO: 247555 - DNA, 25 bp, probe
gggacacccaaggatatgtcttctg

SEQ ID NO: 247556 - DNA, 25 bp, probe
gggacccaatcaagcatttttatct

SEQ ID NO: 247557 - DNA, 25 bp, probe
gggatcgtcaaatctttttcaaatt

SEQ ID NO: 247558 - DNA, 25 bp, probe
gggaggatcaaattcctgacttaca

SEQ ID NO: 247559 - DNA, 25 bp, probe
gggagaataagagccggcagatccg

SEQ ID NO: 247560 - DNA, 25 bp, probe
gggagattataacagctgggttcgc

SEQ ID NO: 247561 - DNA, 25 bp, probe
gggaacaagacacggctgggttgga

SEQ ID NO: 247562 - DNA, 25 bp, probe
gggagaacagccaggtgaggtggga

SEQ ID NO: 247563 - DNA, 25 bp, probe
gggcagctactccaaggtgaaggtg

SEQ ID NO: 247564 - DNA, 25 bp, probe
gggcagcctcgttaggacaaggctg

SEQ ID NO: 247565 - DNA, 25 bp, probe
gggcagccctgaaaggacaggctcc

SEQ ID NO: 247566 - DNA, 25 bp, probe
gggcagccctgaaaggacaggctcc

SEQ ID NO: 247567 - DNA, 25 bp, probe
gggcagccagagaaaggagcagaga

SEQ ID NO: 247568 - DNA, 25 bp, probe
gggcaccatggaaaacacaaatgtg

SEQ ID NO: 247569 - DNA, 25 bp, probe
gggcacctgcgcagatagagacaat

SEQ ID NO: 247570 - DNA, 25 bp, probe
gggatgcagctgctggcatggagta

SEQ ID NO: 247571 - DNA, 25 bp, probe
gggaggctgtagccaggaaaccctc

SEQ ID NO: 247572 - DNA, 25 bp, probe
gggaatctgcaacaacaaacaacac

SEQ ID NO: 247573 - DNA, 25 bp, probe
gggtatctggatcaacccgacaact

SEQ ID NO: 247574 - DNA, 25 bp, probe
gggacatctacaaagaccccagcta

SEQ ID NO: 247575 - DNA, 25 bp, probe
gggaagtatttaattgcccatgata

SEQ ID NO: 247576 - DNA, 25 bp, probe
gggaagtatttaattgcccatgata

SEQ ID NO: 247577 - DNA, 25 bp, probe
gggaaggatcttatgctacagtata

SEQ ID NO: 247578 - DNA, 25 bp, probe
gggaaggatttatttacagtgtgtt

SEQ ID NO: 247579 - DNA, 25 bp, probe
gggaggtgcaggggaaactgtgttt

SEQ ID NO: 247580 - DNA, 25 bp, probe
gggagtgacggcatatgaactgctg

SEQ ID NO: 247581 - DNA, 25 bp, probe
gggtgctgaaccatgaggacctggt

SEQ ID NO: 247582 - DNA, 25 bp, probe
gggactaagcgcagggagacgctgc

SEQ ID NO: 247583 - DNA, 25 bp, probe
gggactctgactcaattgtacctgc

SEQ ID NO: 247584 - DNA, 25 bp, probe
gggagttacttacatgttcatctgc

SEQ ID NO: 247585 - DNA, 25 bp, probe
gggagttacttacatgttcatctgc

SEQ ID NO: 247586 - DNA, 25 bp, probe
gggaatggattgtagatatttcacc

SEQ ID NO: 247587 - DNA, 25 bp, probe
gggactggcttaggtgtctccagac

SEQ ID NO: 247588 - DNA, 25 bp, probe
gggaagatatattgggttcacattc

SEQ ID NO: 247589 - DNA, 25 bp, probe
gggcaaatatattaataccagttca

SEQ ID NO: 247590 - DNA, 25 bp, probe
gggaaaatgaagtcagcacacttta

SEQ ID NO: 247591 - DNA, 25 bp, probe
gggaaattgacatgcagaaatatta

SEQ ID NO: 247592 - DNA, 25 bp, probe
gggaaaatgacaaagaacagctcaa

SEQ ID NO: 247593 - DNA, 25 bp, probe
gggaatgagcccagagaacagcgaa

SEQ ID NO: 247594 - DNA, 25 bp, probe
gggcacatactgactgggacacagg

SEQ ID NO: 247595 - DNA, 25 bp, probe
gggcaacagctacctggacaaggtg

SEQ ID NO: 247596 - DNA, 25 bp, probe
gggaagagccaggcatggcatagag

SEQ ID NO: 247597 - DNA, 25 bp, probe
gggacaactgcggtgatgatgtaaa

SEQ ID NO: 247598 - DNA, 25 bp, probe
gggaaactggtgggatatggaacat

SEQ ID NO: 247599 - DNA, 25 bp, probe
gggaacctgggtatggtgagacggt

SEQ ID NO: 247600 - DNA, 25 bp, probe
gggaaccgcgagatagggcagatca

SEQ ID NO: 247601 - DNA, 25 bp, probe
gggaagtcagggtatcagatgggat

SEQ ID NO: 247602 - DNA, 25 bp, probe
gggtagtggggaatgaaggggactg

SEQ ID NO: 247603 - DNA, 25 bp, probe
gggtatgatcgagaggaaacgggca

SEQ ID NO: 247604 - DNA, 25 bp, probe
gggatattctggaggagcccgggga

SEQ ID NO: 247605 - DNA, 25 bp, probe
gggaattgtgtaaacacctctgggg

SEQ ID NO: 247606 - DNA, 25 bp, probe
gggaaatgagaagacggctcggtga

SEQ ID NO: 247607 - DNA, 25 bp, probe
gggaaatgagaagacggctcggtga

SEQ ID NO: 247608 - DNA, 25 bp, probe
gggacgtgagttggagcggccacgt

SEQ ID NO: 247609 - DNA, 25 bp, probe
gggaattgatggttagcgaggccgt

SEQ ID NO: 247610 - DNA, 25 bp, probe
gggaatctgaagtggggcagcccag

SEQ ID NO: 247611 - DNA, 25 bp, probe
gggacatcatcaagggtgaggcaga

SEQ ID NO: 247612 - DNA, 25 bp, probe
gggacgtaagtggcgcagtctgaat

SEQ ID NO: 247613 - DNA, 25 bp, probe
gggagcttgaatggagggtctggtg

SEQ ID NO: 247614 - DNA, 25 bp, probe
gggatcgactgaagcgggtatggag

SEQ ID NO: 247615 - DNA, 25 bp, probe
gggacaactagggctgcgaatctag

SEQ ID NO: 247616 - DNA, 25 bp, probe
gggaattctagggctgccaaatcat

SEQ ID NO: 247617 - DNA, 25 bp, probe
gggaacacgatggacctcaagaatc

SEQ ID NO: 247618 - DNA, 25 bp, probe
gggaactcagttgcatcctacaatt

SEQ ID NO: 247619 - DNA, 25 bp, probe
gggaacctgatgggctcctacaggt

SEQ ID NO: 247620 - DNA, 25 bp, probe
gggaagttggtagctctgaaggtga

SEQ ID NO: 247621 - DNA, 25 bp, probe
gggaagttggtagctctgaaggtga

SEQ ID NO: 247622 - DNA, 25 bp, probe
gggaatgttggtgccttttgtgcca

SEQ ID NO: 247623 - DNA, 25 bp, probe
gggacatgttaggcccttgttttct

SEQ ID NO: 247624 - DNA, 25 bp, probe
ggtgccttcgtgaaggcttttgttc

SEQ ID NO: 247625 - DNA, 25 bp, probe
gggacattccacaaccattttggac

SEQ ID NO: 247626 - DNA, 25 bp, probe
gggaatctcaacaaccagggatcag

SEQ ID NO: 247627 - DNA, 25 bp, probe
gggaatctcaacaaccagggatcag

SEQ ID NO: 247628 - DNA, 25 bp, probe
ttggttccaactcaacctatcttac

SEQ ID NO: 247629 - DNA, 25 bp, probe
ggtgttccaagtattccatctttta

SEQ ID NO: 247630 - DNA, 25 bp, probe
gggtatgaaagtgcctgccttgttt

SEQ ID NO: 247631 - DNA, 25 bp, probe
gggaaacagagtggcctggctgatt

SEQ ID NO: 247632 - DNA, 25 bp, probe
gggaaacagagtggcctggctgatt

SEQ ID NO: 247633 - DNA, 25 bp, probe
gggaaaacgtcacgctgaatatatg

SEQ ID NO: 247634 - DNA, 25 bp, probe
gggagaatgacttcgttaatatcat

SEQ ID NO: 247635 - DNA, 25 bp, probe
gggaaatcttatattccatatatta

SEQ ID NO: 247636 - DNA, 25 bp, probe
gggaaattgtaaatcctgtgtttca

SEQ ID NO: 247637 - DNA, 25 bp, probe
gggaatgtattatcacctgttagta

SEQ ID NO: 247638 - DNA, 25 bp, probe
gggaagtgtttacacatggagagat

SEQ ID NO: 247639 - DNA, 25 bp, probe
gggaagctgtactacgacaatgaga

SEQ ID NO: 247640 - DNA, 25 bp, probe
gggaagccaacagtagtaatgatga

SEQ ID NO: 247641 - DNA, 25 bp, probe
gggaactgcaacgtcattaagtcaa

SEQ ID NO: 247642 - DNA, 25 bp, probe
ggggatccaaccaattcaattaatg

SEQ ID NO: 247643 - DNA, 25 bp, probe
ggggatccaaccaattcaattaatg

SEQ ID NO: 247644 - DNA, 25 bp, probe
gggacatccatagccttcaaaaata

SEQ ID NO: 247645 - DNA, 25 bp, probe
gggacatccatagccttcaaaaata

SEQ ID NO: 247646 - DNA, 25 bp, probe
gggacatccatagccttcaaaaata

SEQ ID NO: 247647 - DNA, 25 bp, probe
gggactccatgctccttgagaggag

SEQ ID NO: 247648 - DNA, 25 bp, probe
gggtcccttggccatatcaaggcag

SEQ ID NO: 247649 - DNA, 25 bp, probe
gggtcccatattgggtcaagctgct

SEQ ID NO: 247650 - DNA, 25 bp, probe
gggacttctgcatgttgtccatgcc

SEQ ID NO: 247651 - DNA, 25 bp, probe
gggacttctgcatgttgtccatgcc

SEQ ID NO: 247652 - DNA, 25 bp, probe
gggacttcgactttgtgtcagagcg

SEQ ID NO: 247653 - DNA, 25 bp, probe
gggacttcgactttgtgtcagagcg

SEQ ID NO: 247654 - DNA, 25 bp, probe
gggacttcgactttgtgtcagagcg

SEQ ID NO: 247655 - DNA, 25 bp, probe
gggactttgagtttgtatggggagg

SEQ ID NO: 247656 - DNA, 25 bp, probe
ggcgccttaggtacttattccagat

SEQ ID NO: 247657 - DNA, 25 bp, probe
gggaatttggtgaatttccacagaa

SEQ ID NO: 247658 - DNA, 25 bp, probe
gggaattgctggtactatttatgta

SEQ ID NO: 247659 - DNA, 25 bp, probe
gggacattgagatcacttgtcttgt

SEQ ID NO: 247660 - DNA, 25 bp, probe
gggcaattggaataatgtcctgtta

SEQ ID NO: 247661 - DNA, 25 bp, probe
gggcaattggaataatgtcctgtta

SEQ ID NO: 247662 - DNA, 25 bp, probe
gggaaatggattcttgtcctgttgt

SEQ ID NO: 247663 - DNA, 25 bp, probe
gggaaatggattcttgtcctgttgt

SEQ ID NO: 247664 - DNA, 25 bp, probe
gggagaatctataccttgttccttt

SEQ ID NO: 247665 - DNA, 25 bp, probe
gggaaatatgagatccctgcccagt

SEQ ID NO: 247666 - DNA, 25 bp, probe
gggaaaatggctttcccactctgtg

SEQ ID NO: 247667 - DNA, 25 bp, probe
gggaagtatgtgaagtcgccagcat

SEQ ID NO: 247668 - DNA, 25 bp, probe
gggcaatggatcctgagaagccaga

SEQ ID NO: 247669 - DNA, 25 bp, probe
gggaagctgcatatgatgaaagaga

SEQ ID NO: 247670 - DNA, 25 bp, probe
gggaacgctttgtccacagtgaaaa

SEQ ID NO: 247671 - DNA, 25 bp, probe
gggaaccatttgtgcaacgacagag

SEQ ID NO: 247672 - DNA, 25 bp, probe
gggaagccagtgacactaaaacaag

SEQ ID NO: 247673 - DNA, 25 bp, probe
gggaagccatggaaatacaagtcaa

SEQ ID NO: 247674 - DNA, 25 bp, probe
gggatacctggatgtaaaatatata

SEQ ID NO: 247675 - DNA, 25 bp, probe
gggaacggcgaaccgcaacatataa

SEQ ID NO: 247676 - DNA, 25 bp, probe
gggaactgggacacgcagagcatga

SEQ ID NO: 247677 - DNA, 25 bp, probe
gggaagtgggaggacgtagagcaga

SEQ ID NO: 247678 - DNA, 25 bp, probe
gggacaggtgggggctgggagtaga

SEQ ID NO: 247679 - DNA, 25 bp, probe
gggaaggaagatgctggggatgtac

SEQ ID NO: 247680 - DNA, 25 bp, probe
gggacaagagacgctggcgcaagat

SEQ ID NO: 247681 - DNA, 25 bp, probe
gggacaagattcttggtgccaccat

SEQ ID NO: 247682 - DNA, 25 bp, probe
gggacaaagtgcttggtgtctggct

SEQ ID NO: 247683 - DNA, 25 bp, probe
gggagaaagttgagtgtcaggggac

SEQ ID NO: 247684 - DNA, 25 bp, probe
gggaagacggtgagtgtggctgtga

SEQ ID NO: 247685 - DNA, 25 bp, probe
gggaaactgtgaacggctcatggta

SEQ ID NO: 247686 - DNA, 25 bp, probe
gggactactggaatcaggcttggtt

SEQ ID NO: 247687 - DNA, 25 bp, probe
gggactggtggtcaagattggtgat

SEQ ID NO: 247688 - DNA, 25 bp, probe
gggactgctgggagaggaggggtag

SEQ ID NO: 247689 - DNA, 25 bp, probe
gggaatgaggagtgggggggagtgc

SEQ ID NO: 247690 - DNA, 25 bp, probe
gggaaggagcagtcagtgttgtggg

SEQ ID NO: 247691 - DNA, 25 bp, probe
gggaagatgaagttggctgtgcagg

SEQ ID NO: 247692 - DNA, 25 bp, probe
gggaatgctgtcgggactgagcagg

SEQ ID NO: 247693 - DNA, 25 bp, probe
gggaacgtctgttgagagagcggca

SEQ ID NO: 247694 - DNA, 25 bp, probe
gggaacgtctgttgagagagcggca

SEQ ID NO: 247695 - DNA, 25 bp, probe
gggaagcgttcttggaagcatgggg

SEQ ID NO: 247696 - DNA, 25 bp, probe
gggagttgttcatggagagaaagga

SEQ ID NO: 247697 - DNA, 25 bp, probe
gggagttgttcatggagagaaagga

SEQ ID NO: 247698 - DNA, 25 bp, probe
gggatgttgttcccgtaaattacat

SEQ ID NO: 247699 - DNA, 25 bp, probe
gggagtctgcttgtcttagatgttg

SEQ ID NO: 247700 - DNA, 25 bp, probe
gggtgattttaagttattgttgcca

SEQ ID NO: 247701 - DNA, 25 bp, probe
gggtgattttaagttattgttgcca

SEQ ID NO: 247702 - DNA, 25 bp, probe
ggggatatttaaggtagcttcagct

SEQ ID NO: 247703 - DNA, 25 bp, probe
gggaatatgtaagtcaggagttaga

SEQ ID NO: 247704 - DNA, 25 bp, probe
gggaatatgtaagtcaggagttaga

SEQ ID NO: 247705 - DNA, 25 bp, probe
gggagaaggaagtcattgccttcag

SEQ ID NO: 247706 - DNA, 25 bp, probe
gggagaaggaagtcattgccttcag

SEQ ID NO: 247707 - DNA, 25 bp, probe
gggaaagagagcctattctcacaca

SEQ ID NO: 247708 - DNA, 25 bp, probe
gggaaagagagcctattctcacaca

SEQ ID NO: 247709 - DNA, 25 bp, probe
gggaccagggagaatgcccacaggc

SEQ ID NO: 247710 - DNA, 25 bp, probe
gggaccagcagaatttgccctacgg

SEQ ID NO: 247711 - DNA, 25 bp, probe
gggaccagcagaatttgccctacgg

SEQ ID NO: 247712 - DNA, 25 bp, probe
gggagaggcagaacatagccctggc

SEQ ID NO: 247713 - DNA, 25 bp, probe
gggaaggtggcagtgaacctggcca

SEQ ID NO: 247714 - DNA, 25 bp, probe
gggaaggtgagactcctactgtcca

SEQ ID NO: 247715 - DNA, 25 bp, probe
gggagatggcatgagtattgacgtc

SEQ ID NO: 247716 - DNA, 25 bp, probe
gggaagtgctgctagatttgactgc

SEQ ID NO: 247717 - DNA, 25 bp, probe
gggagcagtgtggagagcttgcccc

SEQ ID NO: 247718 - DNA, 25 bp, probe
gggaaggggatggctggatgtgctc

SEQ ID NO: 247719 - DNA, 25 bp, probe
gggaaggagctgccgcaggtgtgtg

SEQ ID NO: 247720 - DNA, 25 bp, probe
gggaagtactccctggtgatggagt

SEQ ID NO: 247721 - DNA, 25 bp, probe
gggaagcgacatctggagctatgga

SEQ ID NO: 247722 - DNA, 25 bp, probe
gggaagcgacatctggagctatgga

SEQ ID NO: 247723 - DNA, 25 bp, probe
gggaaggagatgctgtagtcagcag

SEQ ID NO: 247724 - DNA, 25 bp, probe
gggagactggacattaaaggggcta

SEQ ID NO: 247725 - DNA, 25 bp, probe
ggggactggacaatttggggtagtg

SEQ ID NO: 247726 - DNA, 25 bp, probe
gggagactgtacacattggtggttt

SEQ ID NO: 247727 - DNA, 25 bp, probe
gggaagcggccctaagggagtgtct

SEQ ID NO: 247728 - DNA, 25 bp, probe
ggtgcaaaggctctacgtgcaagtc

SEQ ID NO: 247729 - DNA, 25 bp, probe
ggtgataaccttctctggcagagtg

SEQ ID NO: 247730 - DNA, 25 bp, probe
gggaaacccagcttctggagggttg

SEQ ID NO: 247731 - DNA, 25 bp, probe
gggaagtggccagtttggagtggtc

SEQ ID NO: 247732 - DNA, 25 bp, probe
gggaagtgagccctctggaggtagt

SEQ ID NO: 247733 - DNA, 25 bp, probe
gggaatggcatacatcgagcggaag

SEQ ID NO: 247734 - DNA, 25 bp, probe
gggaaccatcaggtcagatctggaa

SEQ ID NO: 247735 - DNA, 25 bp, probe
gggacatgctgatgaatcaactgag

SEQ ID NO: 247736 - DNA, 25 bp, probe
gggacatgccatgcattcaatgcta

SEQ ID NO: 247737 - DNA, 25 bp, probe
gggagtgtcacctcaaatgcaatac

SEQ ID NO: 247738 - DNA, 25 bp, probe
gggagttctcattgtaaccctaaca

SEQ ID NO: 247739 - DNA, 25 bp, probe
gggactttatcagattccagctgag

SEQ ID NO: 247740 - DNA, 25 bp, probe
gggacctgaacagactgcacagcta

SEQ ID NO: 247741 - DNA, 25 bp, probe
gggacctggcagttgcaacacagta

SEQ ID NO: 247742 - DNA, 25 bp, probe
gggacctggcagttgcaacacagta

SEQ ID NO: 247743 - DNA, 25 bp, probe
gggacacggcagtgatgctgcggtc

SEQ ID NO: 247744 - DNA, 25 bp, probe
gggacacggcagtgatgctgcggtc

SEQ ID NO: 247745 - DNA, 25 bp, probe
gggacaaagaattggatctggatca

SEQ ID NO: 247746 - DNA, 25 bp, probe
gggacaatggaaaggctgttatatg

SEQ ID NO: 247747 - DNA, 25 bp, probe
gggacaagcagaacaggtgtggaag

SEQ ID NO: 247748 - DNA, 25 bp, probe
gggagagacgtactctgagggcagc

SEQ ID NO: 247749 - DNA, 25 bp, probe
gggaagcctaagtctaaggactcca

SEQ ID NO: 247750 - DNA, 25 bp, probe
gggacaggctcccaataacaacacc

SEQ ID NO: 247751 - DNA, 25 bp, probe
gggaagctcctccagtgaagtagcc

SEQ ID NO: 247752 - DNA, 25 bp, probe
gggaactgttctctgtgacatcatc

SEQ ID NO: 247753 - DNA, 25 bp, probe
gggaactggttcaagagacactgct

SEQ ID NO: 247754 - DNA, 25 bp, probe
gggaacaatgttcacagatactttt

SEQ ID NO: 247755 - DNA, 25 bp, probe
gggaacaatttccaaaactgtccag

SEQ ID NO: 247756 - DNA, 25 bp, probe
gggaacagaagatccataactttag

SEQ ID NO: 247757 - DNA, 25 bp, probe
gggaagctcaatgatacaaacattt

SEQ ID NO: 247758 - DNA, 25 bp, probe
gggaaccatgatgataaaattatac

SEQ ID NO: 247759 - DNA, 25 bp, probe
gggacactatattacaaatattact

SEQ ID NO: 247760 - DNA, 25 bp, probe
gggacaaagataccaaaattgccaa

SEQ ID NO: 247761 - DNA, 25 bp, probe
gggtaacaatgcctcagaagcctgc

SEQ ID NO: 247762 - DNA, 25 bp, probe
gggaagtactcagtcaagacccctg

SEQ ID NO: 247763 - DNA, 25 bp, probe
gggaactggctcagcataggccaac

SEQ ID NO: 247764 - DNA, 25 bp, probe
gggagactcctcagtagggcaacat

SEQ ID NO: 247765 - DNA, 25 bp, probe
gggaaataagcaaagagggcaatcg

SEQ ID NO: 247766 - DNA, 25 bp, probe
gggaaaccacattaaggtgctcaca

SEQ ID NO: 247767 - DNA, 25 bp, probe
gggaacatccacaatgagtggtcat

SEQ ID NO: 247768 - DNA, 25 bp, probe
gggacaagctcactcagagcagcgt

SEQ ID NO: 247769 - DNA, 25 bp, probe
gggagaaggttgcagagcacttccc

SEQ ID NO: 247770 - DNA, 25 bp, probe
gggaggagtggtgggtgcagtcccc

SEQ ID NO: 247771 - DNA, 25 bp, probe
gggaggagtggtgggtgcagtcccc

SEQ ID NO: 247772 - DNA, 25 bp, probe
gggacagcagcggatgtgttcagtc

SEQ ID NO: 247773 - DNA, 25 bp, probe
gggacagagcagaactttcaccttc

SEQ ID NO: 247774 - DNA, 25 bp, probe
gggaagaggcaagtttaatcatatt

SEQ ID NO: 247775 - DNA, 25 bp, probe
gggaagggtgggtctagacatacta

SEQ ID NO: 247776 - DNA, 25 bp, probe
gggagaaggtggtgtcagcaaactc

SEQ ID NO: 247777 - DNA, 25 bp, probe
gggttctagggctgtagaacacata

SEQ ID NO: 247778 - DNA, 25 bp, probe
gggttctagggctgtagaacacata

SEQ ID NO: 247779 - DNA, 25 bp, probe
gggactcaaggaccaggtgaacact

SEQ ID NO: 247780 - DNA, 25 bp, probe
gggaagccgaagcaggaggatcact

SEQ ID NO: 247781 - DNA, 25 bp, probe
gggagacacgaagcaggaaacactg

SEQ ID NO: 247782 - DNA, 25 bp, probe
gggagacacgaagcaggaaacactg

SEQ ID NO: 247783 - DNA, 25 bp, probe
gggaaatggaaggcaagaaacacga

SEQ ID NO: 247784 - DNA, 25 bp, probe
gggaagaggaagggagaggcaagca

SEQ ID NO: 247785 - DNA, 25 bp, probe
gggacagctggaacccagaggacgc

SEQ ID NO: 247786 - DNA, 25 bp, probe
gggagattgtgaccctggcagaaca

SEQ ID NO: 247787 - DNA, 25 bp, probe
gggagaatgtcaatcgtgtcagcta

SEQ ID NO: 247788 - DNA, 25 bp, probe
gggagaatgtcaatcgtgtcagcta

SEQ ID NO: 247789 - DNA, 25 bp, probe
gggagactgtcaagaggtgcacaga

SEQ ID NO: 247790 - DNA, 25 bp, probe
gggatggtacagggtgtgacaacat

SEQ ID NO: 247791 - DNA, 25 bp, probe
gggatggttaaaattgacaatctac

SEQ ID NO: 247792 - DNA, 25 bp, probe
gggatggttaaaattgacaatctac

SEQ ID NO: 247793 - DNA, 25 bp, probe
gggagagattagacactggaggttt

SEQ ID NO: 247794 - DNA, 25 bp, probe
gggagagattagacactggaggttt

SEQ ID NO: 247795 - DNA, 25 bp, probe
gggatgtcactactgactgtgaggt

SEQ ID NO: 247796 - DNA, 25 bp, probe
gggatgaccaacccggaggtgattc

SEQ ID NO: 247797 - DNA, 25 bp, probe
gggaactaactcggtcattgctgtt

SEQ ID NO: 247798 - DNA, 25 bp, probe
gggaaaataccccatcattcatgct

SEQ ID NO: 247799 - DNA, 25 bp, probe
gggaaaataccccatcattcatgct

SEQ ID NO: 247800 - DNA, 25 bp, probe
gggtctcagaacttctacttctctg

SEQ ID NO: 247801 - DNA, 25 bp, probe
gggtccaacagctctttgagtaggc

SEQ ID NO: 247802 - DNA, 25 bp, probe
ggagtaaaagacattcaaaagcaca

SEQ ID NO: 247803 - DNA, 25 bp, probe
gggtaccgaaatactcataagccac

SEQ ID NO: 247804 - DNA, 25 bp, probe
gggtagtcgaagagctctggtggca

SEQ ID NO: 247805 - DNA, 25 bp, probe
gggagagtcagctatcttgtctggt

SEQ ID NO: 247806 - DNA, 25 bp, probe
gggacagacatcaacttttggatcc

SEQ ID NO: 247807 - DNA, 25 bp, probe
gggacagagcctagtggtaaatcca

SEQ ID NO: 247808 - DNA, 25 bp, probe
gggagcggccaggtgtttacaccaa

SEQ ID NO: 247809 - DNA, 25 bp, probe
gggagcggccaggtgtttacaccaa

SEQ ID NO: 247810 - DNA, 25 bp, probe
gggacgattctgtgttttctccaga

SEQ ID NO: 247811 - DNA, 25 bp, probe
gggagtgatttggttctttgcccta

SEQ ID NO: 247812 - DNA, 25 bp, probe
gggagacaggtctgtcttctgccag

SEQ ID NO: 247813 - DNA, 25 bp, probe
gggagaaggtgcttgggcttctgcg

SEQ ID NO: 247814 - DNA, 25 bp, probe
gggagaagttcccgtgcatgtgtgg

SEQ ID NO: 247815 - DNA, 25 bp, probe
gggagaattgcccttggattatgtg

SEQ ID NO: 247816 - DNA, 25 bp, probe
gggagcagggcttctctagattatt

SEQ ID NO: 247817 - DNA, 25 bp, probe
gggagatactctccctgacatttct

SEQ ID NO: 247818 - DNA, 25 bp, probe
gggagatactgtccttatttttcac

SEQ ID NO: 247819 - DNA, 25 bp, probe
gggacatacgttgtgattgatattc

SEQ ID NO: 247820 - DNA, 25 bp, probe
gggactaacatcgaagcatctgaat

SEQ ID NO: 247821 - DNA, 25 bp, probe
gggactgaagccaaagttatgcaag

SEQ ID NO: 247822 - DNA, 25 bp, probe
gggactggacatcccatgttcagca

SEQ ID NO: 247823 - DNA, 25 bp, probe
gggatcttgatctcacatgttgccc

SEQ ID NO: 247824 - DNA, 25 bp, probe
gggagcatcttcagcaagttcacct

SEQ ID NO: 247825 - DNA, 25 bp, probe
gggatcatccttgcaggtatactct

SEQ ID NO: 247826 - DNA, 25 bp, probe
gggagctttggctgagtgatactgc

SEQ ID NO: 247827 - DNA, 25 bp, probe
gggagttggggccactgaactccaa

SEQ ID NO: 247828 - DNA, 25 bp, probe
gggagttggggccactgaactccaa

SEQ ID NO: 247829 - DNA, 25 bp, probe
gggacttggggctgagagagtataa

SEQ ID NO: 247830 - DNA, 25 bp, probe
gggacagtgaggcaggagaagaaca

SEQ ID NO: 247831 - DNA, 25 bp, probe
gggacagggatgagtgggggccacc

SEQ ID NO: 247832 - DNA, 25 bp, probe
gggactggcatgttggtgggtggtc

SEQ ID NO: 247833 - DNA, 25 bp, probe
gggagctgctgtttaggtggtgctg

SEQ ID NO: 247834 - DNA, 25 bp, probe
gggactgagtgtaccgtggatctgt

SEQ ID NO: 247835 - DNA, 25 bp, probe
gggactgagtgtaccgtggatctgt

SEQ ID NO: 247836 - DNA, 25 bp, probe
gggactggcatcaccatggtgatct

SEQ ID NO: 247837 - DNA, 25 bp, probe
gggactggcatcaccatggtgatct

SEQ ID NO: 247838 - DNA, 25 bp, probe
gggacaggataagagggattaggga

SEQ ID NO: 247839 - DNA, 25 bp, probe
gggacaggctagctagctgtgttag

SEQ ID NO: 247840 - DNA, 25 bp, probe
gggacaggctagctagctgtgttag

SEQ ID NO: 247841 - DNA, 25 bp, probe
tgggaagttactctcatggttatgg

SEQ ID NO: 247842 - DNA, 25 bp, probe
tgggaagttactctcatggttatgg

SEQ ID NO: 247843 - DNA, 25 bp, probe
gggaactttctatgcaatgttcagg

SEQ ID NO: 247844 - DNA, 25 bp, probe
gggacactgcgggggaagttgcagg

SEQ ID NO: 247845 - DNA, 25 bp, probe
gggacactgcgggggaagttgcagg

SEQ ID NO: 247846 - DNA, 25 bp, probe
gggaacatggaggaggaagggaaga

SEQ ID NO: 247847 - DNA, 25 bp, probe
gggagaattactgggcaagggaaat

SEQ ID NO: 247848 - DNA, 25 bp, probe
gggagaattactgggcaagggaaat

SEQ ID NO: 247849 - DNA, 25 bp, probe
gggtaatttagtggaagggatggat

SEQ ID NO: 247850 - DNA, 25 bp, probe
gggtaatttggttcattaagtacat

SEQ ID NO: 247851 - DNA, 25 bp, probe
gggacttttgtcatttcaaagacat

SEQ ID NO: 247852 - DNA, 25 bp, probe
tcggattttcctcttaacaaacaat

SEQ ID NO: 247853 - DNA, 25 bp, probe
tcgatttttccagtaccaagtaact

SEQ ID NO: 247854 - DNA, 25 bp, probe
ggctattttaactccacatgtaatc

SEQ ID NO: 247855 - DNA, 25 bp, probe
gggtaattaatttcaacatttgtgc

SEQ ID NO: 247856 - DNA, 25 bp, probe
gggtttgcaaaacaacttcgaggag

SEQ ID NO: 247857 - DNA, 25 bp, probe
gggtaaaagccacatttaggaggtg

SEQ ID NO: 247858 - DNA, 25 bp, probe
gggtaaaagccacatttaggaggtg

SEQ ID NO: 247859 - DNA, 25 bp, probe
gggattacagagcccaataaaggat

SEQ ID NO: 247860 - DNA, 25 bp, probe
gggtgagacggagccggaagttatt

SEQ ID NO: 247861 - DNA, 25 bp, probe
gggtgggtgtgagagtggacggtat

SEQ ID NO: 247862 - DNA, 25 bp, probe
gggatgggaggagaggacaagggaa

SEQ ID NO: 247863 - DNA, 25 bp, probe
gggagtaggtgggggaacactgaga

SEQ ID NO: 247864 - DNA, 25 bp, probe
gggacttgggagagtgagacccagt

SEQ ID NO: 247865 - DNA, 25 bp, probe
gggacatttggacaggtggctaagt

SEQ ID NO: 247866 - DNA, 25 bp, probe
ggggatttgggtcagttgtagttgc

SEQ ID NO: 247867 - DNA, 25 bp, probe
gggactttgaggcctacacgaagat

SEQ ID NO: 247868 - DNA, 25 bp, probe
gggactttgggcgccaagaagcatg

SEQ ID NO: 247869 - DNA, 25 bp, probe
gggaactttgtgtaccaaaatgcac

SEQ ID NO: 247870 - DNA, 25 bp, probe
gggaactcgctggctcagaaaagag

SEQ ID NO: 247871 - DNA, 25 bp, probe
gggaacttccaaagatgaagagggc

SEQ ID NO: 247872 - DNA, 25 bp, probe
gggaacttcctatgcaaggcagtcc

SEQ ID NO: 247873 - DNA, 25 bp, probe
gggacaccctaataaagcaatcgca

SEQ ID NO: 247874 - DNA, 25 bp, probe
gggacccaaatacaatagagacgct

SEQ ID NO: 247875 - DNA, 25 bp, probe
gggacccaacatttgtaggggcact

SEQ ID NO: 247876 - DNA, 25 bp, probe
gggaccaccttgtttatggcaggtt

SEQ ID NO: 247877 - DNA, 25 bp, probe
gggaccaagtgacctttggggatat

SEQ ID NO: 247878 - DNA, 25 bp, probe
gggaggttgtgggcattgatgggga

SEQ ID NO: 247879 - DNA, 25 bp, probe
gggagttctgggcattaagatcggc

SEQ ID NO: 247880 - DNA, 25 bp, probe
ggctagttttagcttcctttgtggc

SEQ ID NO: 247881 - DNA, 25 bp, probe
gggagcttgttacaggagtctttgg

SEQ ID NO: 247882 - DNA, 25 bp, probe
gggagcttgttacaggagtctttgg

SEQ ID NO: 247883 - DNA, 25 bp, probe
gggacttgcaaaaagggtcagtatg

SEQ ID NO: 247884 - DNA, 25 bp, probe
gggacttcaataacatgagtggcag

SEQ ID NO: 247885 - DNA, 25 bp, probe
gggacttcaataacatgagtggcag

SEQ ID NO: 247886 - DNA, 25 bp, probe
gggacactacaaacatggggagcca

SEQ ID NO: 247887 - DNA, 25 bp, probe
gggacagctgctctacagtgtggac

SEQ ID NO: 247888 - DNA, 25 bp, probe
gggagcggctggaacgattggagat

SEQ ID NO: 247889 - DNA, 25 bp, probe
gggagctgcctgatgtaggtaaagc

SEQ ID NO: 247890 - DNA, 25 bp, probe
gggagctgcctgatgtaggtaaagc

SEQ ID NO: 247891 - DNA, 25 bp, probe
gggactccgaggtggagatgatggc

SEQ ID NO: 247892 - DNA, 25 bp, probe
gggagcccgacgtgaatgcagagaa

SEQ ID NO: 247893 - DNA, 25 bp, probe
gggacccgtggagaattggccagag

SEQ ID NO: 247894 - DNA, 25 bp, probe
gggacccgtggagaattggccagag

SEQ ID NO: 247895 - DNA, 25 bp, probe
gggacccgtggagaattggccagag

SEQ ID NO: 247896 - DNA, 25 bp, probe
gggatccccttaagaagtggtaatg

SEQ ID NO: 247897 - DNA, 25 bp, probe
ggtcaccaattcaaaaagcggttca

SEQ ID NO: 247898 - DNA, 25 bp, probe
gggagccttgaaaaaactggagtca

SEQ ID NO: 247899 - DNA, 25 bp, probe
gggaggcttggagacagtctgaccc

SEQ ID NO: 247900 - DNA, 25 bp, probe
gggagacattccaaaaatcaagcca

SEQ ID NO: 247901 - DNA, 25 bp, probe
gggatggaggcacctagaacaagcc

SEQ ID NO: 247902 - DNA, 25 bp, probe
gggactgtggtccattgtacaagcc

SEQ ID NO: 247903 - DNA, 25 bp, probe
gggattggcaatgatttaagcacct

SEQ ID NO: 247904 - DNA, 25 bp, probe
gggattggcaatgatttaagcacct

SEQ ID NO: 247905 - DNA, 25 bp, probe
gggagtggctctgtaaggacgcctt

SEQ ID NO: 247906 - DNA, 25 bp, probe
gggaaatctgtagaaggatgtcctt

SEQ ID NO: 247907 - DNA, 25 bp, probe
gggaccttgtgctgagggatgattt

SEQ ID NO: 247908 - DNA, 25 bp, probe
gggacagggccagtgttggagaatt

SEQ ID NO: 247909 - DNA, 25 bp, probe
gggagagacccagtgatgtggcaaa

SEQ ID NO: 247910 - DNA, 25 bp, probe
gggaacaacagcttatatggcacca

SEQ ID NO: 247911 - DNA, 25 bp, probe
gggaacaacagcttatatggcacca

SEQ ID NO: 247912 - DNA, 25 bp, probe
gggactccagagtatgtagccccag

SEQ ID NO: 247913 - DNA, 25 bp, probe
gggacgaagcgtatcagcgtaagag

SEQ ID NO: 247914 - DNA, 25 bp, probe
ggtgcccaaggtaaaggtcctacag

SEQ ID NO: 247915 - DNA, 25 bp, probe
gggaccttgtgggaccagtcccaca

SEQ ID NO: 247916 - DNA, 25 bp, probe
gggacgcgttcataactgtcctcaa

SEQ ID NO: 247917 - DNA, 25 bp, probe
gggactgttcaataagaatcctagg

SEQ ID NO: 247918 - DNA, 25 bp, probe
gggacgcattcaaaaagatgatctt

SEQ ID NO: 247919 - DNA, 25 bp, probe
gggaaattgcttacaaggcgcttaa

SEQ ID NO: 247920 - DNA, 25 bp, probe
gggaaattgatccaaaggacctgac

SEQ ID NO: 247921 - DNA, 25 bp, probe
gggaaattcacctgcatcgaggtaa

SEQ ID NO: 247922 - DNA, 25 bp, probe
gggaaattcacctgcatcgaggtaa

SEQ ID NO: 247923 - DNA, 25 bp, probe
gggaccttattcttcatgtatggga

SEQ ID NO: 247924 - DNA, 25 bp, probe
gggaccctgatttgcatagatgtgg

SEQ ID NO: 247925 - DNA, 25 bp, probe
gggacagcaagtgagcagagatgta

SEQ ID NO: 247926 - DNA, 25 bp, probe
gggacatgcaagggccagaagtagc

SEQ ID NO: 247927 - DNA, 25 bp, probe
gggagccagatggtctgagaagtga

SEQ ID NO: 247928 - DNA, 25 bp, probe
gggagtgcatttcctgagtagtaaa

SEQ ID NO: 247929 - DNA, 25 bp, probe
gggactgtttcagacttggaaaggt

SEQ ID NO: 247930 - DNA, 25 bp, probe
gggtcttttcaattcttcggcaaga

SEQ ID NO: 247931 - DNA, 25 bp, probe
gggtcttttcaattcttcggcaaga

SEQ ID NO: 247932 - DNA, 25 bp, probe
gggtccttctccttatgtgggaaat

SEQ ID NO: 247933 - DNA, 25 bp, probe
ggggtcacttccttcatgtaagact

SEQ ID NO: 247934 - DNA, 25 bp, probe
gggagtcctcatgtgtattgaatgc

SEQ ID NO: 247935 - DNA, 25 bp, probe
gggagccgcaccttgtcatgtacca

SEQ ID NO: 247936 - DNA, 25 bp, probe
gggagcggcagcacatactgtacgc

SEQ ID NO: 247937 - DNA, 25 bp, probe
gggactggcagcttcaaattccttg

SEQ ID NO: 247938 - DNA, 25 bp, probe
gggactcagcatgtcaacatatctc

SEQ ID NO: 247939 - DNA, 25 bp, probe
gggacatcatgacatcatcactgat

SEQ ID NO: 247940 - DNA, 25 bp, probe
gggacatcatgacatcatcactgat

SEQ ID NO: 247941 - DNA, 25 bp, probe
gggacacagagatgcatcccatccc

SEQ ID NO: 247942 - DNA, 25 bp, probe
gggacacagagatgcatcccatccc

SEQ ID NO: 247943 - DNA, 25 bp, probe
gggagatatgagggctcaagtcgca

SEQ ID NO: 247944 - DNA, 25 bp, probe
gggagatggcgatgctcatagctca

SEQ ID NO: 247945 - DNA, 25 bp, probe
gggagatgagcttctctgcataatt

SEQ ID NO: 247946 - DNA, 25 bp, probe
gggagatgagcttctctgcataatt

SEQ ID NO: 247947 - DNA, 25 bp, probe
gggactgagcattgtgtcaacctgt

SEQ ID NO: 247948 - DNA, 25 bp, probe
gggagctgatatacttcactcactt

SEQ ID NO: 247949 - DNA, 25 bp, probe
gggagtgattttggccacactgtca

SEQ ID NO: 247950 - DNA, 25 bp, probe
ggggatatgtaagtgcccttgtgaa

SEQ ID NO: 247951 - DNA, 25 bp, probe
gggagaatttaggatcttgttgaat

SEQ ID NO: 247952 - DNA, 25 bp, probe
ggggaacatggagccttggtgtatt

SEQ ID NO: 247953 - DNA, 25 bp, probe
ggggaactgggttcccatgctttgt

SEQ ID NO: 247954 - DNA, 25 bp, probe
gggacaatagagtttaccagcttgg

SEQ ID NO: 247955 - DNA, 25 bp, probe
gggaaattgagatccaggctcatct

SEQ ID NO: 247956 - DNA, 25 bp, probe
gggaaatataatgccatggtgctgg

SEQ ID NO: 247957 - DNA, 25 bp, probe
gggataaaactgttcatggatgcaa

SEQ ID NO: 247958 - DNA, 25 bp, probe
gggaaagagagtttgcgtagcagcc

SEQ ID NO: 247959 - DNA, 25 bp, probe
gggaaaggtgctcaaggaggacttg

SEQ ID NO: 247960 - DNA, 25 bp, probe
gggagaagggctgttgggagaattt

SEQ ID NO: 247961 - DNA, 25 bp, probe
gggaaagggatggtcaggcccagtt

SEQ ID NO: 247962 - DNA, 25 bp, probe
gggacagggaatgctgaggcctcga

SEQ ID NO: 247963 - DNA, 25 bp, probe
gggacaggaagggggaggctctagg

SEQ ID NO: 247964 - DNA, 25 bp, probe
gggacatgaacgagcaggaggtact

SEQ ID NO: 247965 - DNA, 25 bp, probe
gggagaaactcggaaagctgtactg

SEQ ID NO: 247966 - DNA, 25 bp, probe
gggagataccgtgaaacattacaag

SEQ ID NO: 247967 - DNA, 25 bp, probe
gggagtaacagggcagaaatgatta

SEQ ID NO: 247968 - DNA, 25 bp, probe
gggagcgaaaaaccattacattaag

SEQ ID NO: 247969 - DNA, 25 bp, probe
ggtgactcaaacagccaaacgaaac

SEQ ID NO: 247970 - DNA, 25 bp, probe
ggtgactcaaacagccaaacgaaac

SEQ ID NO: 247971 - DNA, 25 bp, probe
gggactatgaatgggcaaaactgaa

SEQ ID NO: 247972 - DNA, 25 bp, probe
gggagttagcatcactaacctgaca

SEQ ID NO: 247973 - DNA, 25 bp, probe
gggatttagtgccactgaagcctgc

SEQ ID NO: 247974 - DNA, 25 bp, probe
gggttggaggctccaggaggctggc

SEQ ID NO: 247975 - DNA, 25 bp, probe
ggtgtatggatccaccgtcggattc

SEQ ID NO: 247976 - DNA, 25 bp, probe
gggtttttccatggcatcagtatac

SEQ ID NO: 247977 - DNA, 25 bp, probe
gggttgcttaaggtcatgcagctta

SEQ ID NO: 247978 - DNA, 25 bp, probe
gggagtgcgatgtggatccagctgt

SEQ ID NO: 247979 - DNA, 25 bp, probe
gggacaagagcaagctgatccagct

SEQ ID NO: 247980 - DNA, 25 bp, probe
gggagcgagagaatggctccaacct

SEQ ID NO: 247981 - DNA, 25 bp, probe
gggagcgagagaatggctccaacct

SEQ ID NO: 247982 - DNA, 25 bp, probe
gggagagaaatactgtccattccac

SEQ ID NO: 247983 - DNA, 25 bp, probe
gggagagaaatactgtccattccac

SEQ ID NO: 247984 - DNA, 25 bp, probe
gggagaacaaagctgaggtccagat

SEQ ID NO: 247985 - DNA, 25 bp, probe
gggaaataacagctgtggctcacgt

SEQ ID NO: 247986 - DNA, 25 bp, probe
gggactcattactctgtgcagtcag

SEQ ID NO: 247987 - DNA, 25 bp, probe
gggactctttagtcttgggattgtt

SEQ ID NO: 247988 - DNA, 25 bp, probe
gggactttatgttttcatggtttat

SEQ ID NO: 247989 - DNA, 25 bp, probe
gggatttttcattcttaggctttca

SEQ ID NO: 247990 - DNA, 25 bp, probe
gggattgttttagtgttggcagtaa

SEQ ID NO: 247991 - DNA, 25 bp, probe
gggagagttctctaggttggagtgg

SEQ ID NO: 247992 - DNA, 25 bp, probe
gggagagttctctaggttggagtgg

SEQ ID NO: 247993 - DNA, 25 bp, probe
gggaggatcctgggagaaggaggga

SEQ ID NO: 247994 - DNA, 25 bp, probe
gggaggattcggggactgagaggag

SEQ ID NO: 247995 - DNA, 25 bp, probe
gggaggattcggggactgagaggag

SEQ ID NO: 247996 - DNA, 25 bp, probe
gggggttctgccataataggagggg

SEQ ID NO: 247997 - DNA, 25 bp, probe
gggagtgtaattttgagcatatgga

SEQ ID NO: 247998 - DNA, 25 bp, probe
gggagtgtaattttgagcatatgga

SEQ ID NO: 247999 - DNA, 25 bp, probe
gggagtgatttattgtttgtgaacc

SEQ ID NO: 248000 - DNA, 25 bp, probe
gggagatgttggcacctttgaattc

SEQ ID NO: 248001 - DNA, 25 bp, probe
gggagatgttggcacctttgaattc

SEQ ID NO: 248002 - DNA, 25 bp, probe
gggatgtttgcccatactgaagaca

SEQ ID NO: 248003 - DNA, 25 bp, probe
gggatgtgattgggaaggaattgca

SEQ ID NO: 248004 - DNA, 25 bp, probe
gggattcttccaaaggccttcaaat

SEQ ID NO: 248005 - DNA, 25 bp, probe
gggtagttgccaataacctgaagaa

SEQ ID NO: 248006 - DNA, 25 bp, probe
gggttatccctgaaacctgcataga

SEQ ID NO: 248007 - DNA, 25 bp, probe
gggacttcctaaaactctatcaggt

SEQ ID NO: 248008 - DNA, 25 bp, probe
gggactcccttgaagaatttcatgt

SEQ ID NO: 248009 - DNA, 25 bp, probe
gggactcccttgaagaatttcatgt

SEQ ID NO: 248010 - DNA, 25 bp, probe
ggtgaccactttcaactcttgagtt

SEQ ID NO: 248011 - DNA, 25 bp, probe
gggagccagcttttaacgttcagcc

SEQ ID NO: 248012 - DNA, 25 bp, probe
gggagccagcttttaacgttcagcc

SEQ ID NO: 248013 - DNA, 25 bp, probe
gggagcataagtttacagcctacag

SEQ ID NO: 248014 - DNA, 25 bp, probe
gggacactgaattgaacaccatact

SEQ ID NO: 248015 - DNA, 25 bp, probe
gggacacaggatggacaagcccacc

SEQ ID NO: 248016 - DNA, 25 bp, probe
gggactcaaagcagcaatgcccctc

SEQ ID NO: 248017 - DNA, 25 bp, probe
gggaccaaactgtatatgagcccag

SEQ ID NO: 248018 - DNA, 25 bp, probe
gggacaaatatcgacgtcagctccg

SEQ ID NO: 248019 - DNA, 25 bp, probe
gggatccaagatcaggtcgcagacg

SEQ ID NO: 248020 - DNA, 25 bp, probe
gggactatgatgagaggccagcaca

SEQ ID NO: 248021 - DNA, 25 bp, probe
gggacattgcagagtggcctagagc

SEQ ID NO: 248022 - DNA, 25 bp, probe
gggacacaggaacgtcctagagctg

SEQ ID NO: 248023 - DNA, 25 bp, probe
gggatcatttaaagatcgcggaatg

SEQ ID NO: 248024 - DNA, 25 bp, probe
gggttttcaccttagcaacaatggg

SEQ ID NO: 248025 - DNA, 25 bp, probe
gggtatttcctcatggtatcaaaga

SEQ ID NO: 248026 - DNA, 25 bp, probe
gggttcattttgcctttctgaataa

SEQ ID NO: 248027 - DNA, 25 bp, probe
gggttcacattgaaatatgtctata

SEQ ID NO: 248028 - DNA, 25 bp, probe
gggttcacctgaacacagagtgtat

SEQ ID NO: 248029 - DNA, 25 bp, probe
gggagtacactggtgtctagctgtt

SEQ ID NO: 248030 - DNA, 25 bp, probe
gggagaaccatcatttcacagttaa

SEQ ID NO: 248031 - DNA, 25 bp, probe
gggagaaccatcatttcacagttaa

SEQ ID NO: 248032 - DNA, 25 bp, probe
gggtagacacaaaactacaggtcaa

SEQ ID NO: 248033 - DNA, 25 bp, probe
gggagaggcaagcaactaggtacaa

SEQ ID NO: 248034 - DNA, 25 bp, probe
gggagcaagacagagacgcaggatg

SEQ ID NO: 248035 - DNA, 25 bp, probe
gggagagagaccacacgcagtattg

SEQ ID NO: 248036 - DNA, 25 bp, probe
gggatgaagaacagactgggtgtgt

SEQ ID NO: 248037 - DNA, 25 bp, probe
gggatgacgactccaaggtgggctt

SEQ ID NO: 248038 - DNA, 25 bp, probe
gggatctgggctcaagttgagctgt

SEQ ID NO: 248039 - DNA, 25 bp, probe
gggactgtggatctcactggaagct

SEQ ID NO: 248040 - DNA, 25 bp, probe
gggacttggctgtctgatctatgaa

SEQ ID NO: 248041 - DNA, 25 bp, probe
gggacttggtggaatcctagaaagc

SEQ ID NO: 248042 - DNA, 25 bp, probe
gggacttggtggaatcctagaaagc

SEQ ID NO: 248043 - DNA, 25 bp, probe
gggtttttggtcactcacaacctga

SEQ ID NO: 248044 - DNA, 25 bp, probe
gggatttttggctacacacaaacca

SEQ ID NO: 248045 - DNA, 25 bp, probe
gggatttttggctacacacaaacca

SEQ ID NO: 248046 - DNA, 25 bp, probe
gggagtgaccggaaacatcaaaatc

SEQ ID NO: 248047 - DNA, 25 bp, probe
gggatgagaccagaagccataaggc

SEQ ID NO: 248048 - DNA, 25 bp, probe
gggatgaaaaggctgcttcaaggcc

SEQ ID NO: 248049 - DNA, 25 bp, probe
gggatgatgggagagctctggcaga

SEQ ID NO: 248050 - DNA, 25 bp, probe
gggagctgtgggaagccacagcaga

SEQ ID NO: 248051 - DNA, 25 bp, probe
gggactgagggttactccagttgct

SEQ ID NO: 248052 - DNA, 25 bp, probe
gggactaagagtacctttgcctgct

SEQ ID NO: 248053 - DNA, 25 bp, probe
gggatcaagagagaccttctacagg

SEQ ID NO: 248054 - DNA, 25 bp, probe
gggtcaaggagaagggatgccaagt

SEQ ID NO: 248055 - DNA, 25 bp, probe
gggtcaaggagaagggatgccaagt

SEQ ID NO: 248056 - DNA, 25 bp, probe
gggtcaagggatgaagacctgcagt

SEQ ID NO: 248057 - DNA, 25 bp, probe
gggtcaagaggctcaaacctcattc

SEQ ID NO: 248058 - DNA, 25 bp, probe
gggtcaagaggctcaaacctcattc

SEQ ID NO: 248059 - DNA, 25 bp, probe
gggtcgagtccagtgagaaactcaa

SEQ ID NO: 248060 - DNA, 25 bp, probe
gggacctttcagacaaaaatgcaag

SEQ ID NO: 248061 - DNA, 25 bp, probe
gggacctttcagacaaaaatgcaag

SEQ ID NO: 248062 - DNA, 25 bp, probe
gggacattttcaagacacagacaaa

SEQ ID NO: 248063 - DNA, 25 bp, probe
gggaccttgatgacaacaatgacaa

SEQ ID NO: 248064 - DNA, 25 bp, probe
gggacctatgcagaagctataagtg

SEQ ID NO: 248065 - DNA, 25 bp, probe
gggacctgaaggtcagtatatggag

SEQ ID NO: 248066 - DNA, 25 bp, probe
gggacccaggtggctgtgaatgtca

SEQ ID NO: 248067 - DNA, 25 bp, probe
gggaccacgggcgaggacgtgaagc

SEQ ID NO: 248068 - DNA, 25 bp, probe
gggaccgtggggagatcatcgaccc

SEQ ID NO: 248069 - DNA, 25 bp, probe
gggactggcatggggggatctcaga

SEQ ID NO: 248070 - DNA, 25 bp, probe
gggactccagtggggaactcagcaa

SEQ ID NO: 248071 - DNA, 25 bp, probe
gggagcctcagtgagggcactggga

SEQ ID NO: 248072 - DNA, 25 bp, probe
gggacctagtctcagggatggagca

SEQ ID NO: 248073 - DNA, 25 bp, probe
gggacctgtttttgaggatcagcac

SEQ ID NO: 248074 - DNA, 25 bp, probe
gggagccatgggaggatctgtccac

SEQ ID NO: 248075 - DNA, 25 bp, probe
gggagctgtgggagtgattttggcc

SEQ ID NO: 248076 - DNA, 25 bp, probe
gggacgtggccaagggtgaggtggc

SEQ ID NO: 248077 - DNA, 25 bp, probe
gggagatggacgacacggtgggggc

SEQ ID NO: 248078 - DNA, 25 bp, probe
gggagatggacgacacggtgggggc

SEQ ID NO: 248079 - DNA, 25 bp, probe
gggatgggttaagcctgcagggatc

SEQ ID NO: 248080 - DNA, 25 bp, probe
gggagggtgaaagtgattatgggaa

SEQ ID NO: 248081 - DNA, 25 bp, probe
gggagcgggaagaggagatgacagg

SEQ ID NO: 248082 - DNA, 25 bp, probe
gggagcttggatggaagagtaccag

SEQ ID NO: 248083 - DNA, 25 bp, probe
gggagcttggatggaagagtaccag

SEQ ID NO: 248084 - DNA, 25 bp, probe
gggagctcatggtgagggataccca

SEQ ID NO: 248085 - DNA, 25 bp, probe
gggagctctggttcaaggcagtccc

SEQ ID NO: 248086 - DNA, 25 bp, probe
gggacttggcatttaggattccatc

SEQ ID NO: 248087 - DNA, 25 bp, probe
gggacttggcagccagaaacatcct

SEQ ID NO: 248088 - DNA, 25 bp, probe
gggacctcaagccagaaaatctcat

SEQ ID NO: 248089 - DNA, 25 bp, probe
gggaccagaagccgtccaatgtgct

SEQ ID NO: 248090 - DNA, 25 bp, probe
gggactcaatacggtgtttggatat

SEQ ID NO: 248091 - DNA, 25 bp, probe
gggactgcataaaccttgcttgtga

SEQ ID NO: 248092 - DNA, 25 bp, probe
gggagagtaaccctgtctaatgaaa

SEQ ID NO: 248093 - DNA, 25 bp, probe
gggaggtgtacaaggggatcgacaa

SEQ ID NO: 248094 - DNA, 25 bp, probe
gggagaggtctcagtggttagagct

SEQ ID NO: 248095 - DNA, 25 bp, probe
gggagtggtcagactgtcgtcttac

SEQ ID NO: 248096 - DNA, 25 bp, probe
gggagtgttctgatgccacagttag

SEQ ID NO: 248097 - DNA, 25 bp, probe
gggactggacacaagccagggctgg

SEQ ID NO: 248098 - DNA, 25 bp, probe
gggactggatcaaagagaacactgg

SEQ ID NO: 248099 - DNA, 25 bp, probe
gggactctatccattgagcacattt

SEQ ID NO: 248100 - DNA, 25 bp, probe
gggactctccatatgtgagcactat

SEQ ID NO: 248101 - DNA, 25 bp, probe
gggtctacctaactgagcctagata

SEQ ID NO: 248102 - DNA, 25 bp, probe
gggtatacgctgaagctgacttccg

SEQ ID NO: 248103 - DNA, 25 bp, probe
gggattacagctgtcatgaatttcc

SEQ ID NO: 248104 - DNA, 25 bp, probe
gggatgtcaaaccctgaagtgatcc

SEQ ID NO: 248105 - DNA, 25 bp, probe
gggattatggaagcatgtggtgacc

SEQ ID NO: 248106 - DNA, 25 bp, probe
gggatcttcagaaccatatggtggc

SEQ ID NO: 248107 - DNA, 25 bp, probe
ggagttccagaaagcactagtacgg

SEQ ID NO: 248108 - DNA, 25 bp, probe
gggttcctgaatgcaccataatcgc

SEQ ID NO: 248109 - DNA, 25 bp, probe
gggttcctgaatgcaccataatcgc

SEQ ID NO: 248110 - DNA, 25 bp, probe
gggttcctgaatgcaccataatcgc

SEQ ID NO: 248111 - DNA, 25 bp, probe
gggattcctgaagatcgcagacttt

SEQ ID NO: 248112 - DNA, 25 bp, probe
gggattcctgaagatcgcagacttt

SEQ ID NO: 248113 - DNA, 25 bp, probe
gggttgtgtgaagacagcggatttc

SEQ ID NO: 248114 - DNA, 25 bp, probe
gggatgttttacaaagcggatcact

SEQ ID NO: 248115 - DNA, 25 bp, probe
gggatgttttacaaagcggatcact

SEQ ID NO: 248116 - DNA, 25 bp, probe
gggatcctttacagagcgggatgcc

SEQ ID NO: 248117 - DNA, 25 bp, probe
gggagttgtaacagagcagtgccag

SEQ ID NO: 248118 - DNA, 25 bp, probe
gggacttttccatttgcatgtacag

SEQ ID NO: 248119 - DNA, 25 bp, probe
gggactgctttggtcatgaagctac

SEQ ID NO: 248120 - DNA, 25 bp, probe
gggactgtctctggtagagatggcg

SEQ ID NO: 248121 - DNA, 25 bp, probe
gggacttcatgagaagactggtgca

SEQ ID NO: 248122 - DNA, 25 bp, probe
gggactttcacttgaatcttgctgc

SEQ ID NO: 248123 - DNA, 25 bp, probe
gggtgatttcctggattctactggg

SEQ ID NO: 248124 - DNA, 25 bp, probe
gggtgatttcctggattctactggg

SEQ ID NO: 248125 - DNA, 25 bp, probe
gggtagttctggaaagctactttgt

SEQ ID NO: 248126 - DNA, 25 bp, probe
gggtaggactggaacctttattgca

SEQ ID NO: 248127 - DNA, 25 bp, probe
gggataggactagcaccattttaag

SEQ ID NO: 248128 - DNA, 25 bp, probe
gggtgtggcctaggaagttttccag

SEQ ID NO: 248129 - DNA, 25 bp, probe
gggagttcctagcaagttgactaaa

SEQ ID NO: 248130 - DNA, 25 bp, probe
gggaggatcgcttgatattttttta

SEQ ID NO: 248131 - DNA, 25 bp, probe
gggaggaagctcccatgttgtttaa

SEQ ID NO: 248132 - DNA, 25 bp, probe
gggagagtagcagagcatgggttac

SEQ ID NO: 248133 - DNA, 25 bp, probe
gggagagctacacactgaggcttcc

SEQ ID NO: 248134 - DNA, 25 bp, probe
gggagagcctcagcatatactcttc

SEQ ID NO: 248135 - DNA, 25 bp, probe
gggagaagtcagccagctactcttc

SEQ ID NO: 248136 - DNA, 25 bp, probe
gggagaacatggccaatagtcatat

SEQ ID NO: 248137 - DNA, 25 bp, probe
gggagaggagggaatcgtacatttt

SEQ ID NO: 248138 - DNA, 25 bp, probe
gggatgaggggaaatgcgtagaagg

SEQ ID NO: 248139 - DNA, 25 bp, probe
gggagggcgcctatgggaaggtgtt

SEQ ID NO: 248140 - DNA, 25 bp, probe
gggacggccctgaagagtgcaagga

SEQ ID NO: 248141 - DNA, 25 bp, probe
gggactccaagtcaagtgaaggacc

SEQ ID NO: 248142 - DNA, 25 bp, probe
gggatgcccaaggccagaatgacgg

SEQ ID NO: 248143 - DNA, 25 bp, probe
gggatccagtgaagccagaagccaa

SEQ ID NO: 248144 - DNA, 25 bp, probe
gggatcatcctgcaggagatagcac

SEQ ID NO: 248145 - DNA, 25 bp, probe
gggatcacactggttggtcatcaaa

SEQ ID NO: 248146 - DNA, 25 bp, probe
gggagattcatgcgatgtgtccaat

SEQ ID NO: 248147 - DNA, 25 bp, probe
gggagcaggacacatggtcatcccc

SEQ ID NO: 248148 - DNA, 25 bp, probe
gggagcaagacatcatctgtcatca

SEQ ID NO: 248149 - DNA, 25 bp, probe
gggatgcaagacttcaattacctta

SEQ ID NO: 248150 - DNA, 25 bp, probe
gggatcaggaatacctctactaaca

SEQ ID NO: 248151 - DNA, 25 bp, probe
gggatcagtagttcctacccatagt

SEQ ID NO: 248152 - DNA, 25 bp, probe
gggtgcctgagttttgactccaatc

SEQ ID NO: 248153 - DNA, 25 bp, probe
gggtcagtgagcagtatttccacaa

SEQ ID NO: 248154 - DNA, 25 bp, probe
gggtcagtgagcagtatttccacaa

SEQ ID NO: 248155 - DNA, 25 bp, probe
gggtactgagagtctgcacttaaca

SEQ ID NO: 248156 - DNA, 25 bp, probe
gggatattaggatattgctcaaaat

SEQ ID NO: 248157 - DNA, 25 bp, probe
gggatataactgtaatgccaccaca

SEQ ID NO: 248158 - DNA, 25 bp, probe
gggatataactgtaatgccaccaca

SEQ ID NO: 248159 - DNA, 25 bp, probe
gggatagcaagttcagcaccatcgc

SEQ ID NO: 248160 - DNA, 25 bp, probe
gggagagaagatagcagggcatggc

SEQ ID NO: 248161 - DNA, 25 bp, probe
gggactgaagaactgggaggctgcc

SEQ ID NO: 248162 - DNA, 25 bp, probe
gggagtgaaaaccactgcaggctgc

SEQ ID NO: 248163 - DNA, 25 bp, probe
gggagtgaaaaccactgcaggctgc

SEQ ID NO: 248164 - DNA, 25 bp, probe
gggagtgaaatgtgcagattgtggt

SEQ ID NO: 248165 - DNA, 25 bp, probe
gggagtgaatggaagaaggtggcga

SEQ ID NO: 248166 - DNA, 25 bp, probe
gggactgaaggtgggcaaggtgaga

SEQ ID NO: 248167 - DNA, 25 bp, probe
gggactggggctgaaggttgaagag

SEQ ID NO: 248168 - DNA, 25 bp, probe
gggactggaggttgatagtttaagt

SEQ ID NO: 248169 - DNA, 25 bp, probe
gggactggaggttgatagtttaagt

SEQ ID NO: 248170 - DNA, 25 bp, probe
ggtggctcggtacaggttgtaagtt

SEQ ID NO: 248171 - DNA, 25 bp, probe
gggagctcggtaccagagtgtaaca

SEQ ID NO: 248172 - DNA, 25 bp, probe
gggagctctggcaagctataggaga

SEQ ID NO: 248173 - DNA, 25 bp, probe
gggagcctgtatgctaaggtgaaga

SEQ ID NO: 248174 - DNA, 25 bp, probe
gggaccatgtatgtatcatggcgga

SEQ ID NO: 248175 - DNA, 25 bp, probe
gggagaagtctctattcaggtggac

SEQ ID NO: 248176 - DNA, 25 bp, probe
gggaccagatgtcatctctggtcag

SEQ ID NO: 248177 - DNA, 25 bp, probe
gggatctcgtatctttaaaaagcag

SEQ ID NO: 248178 - DNA, 25 bp, probe
gggagggactatatcaaagtagaag

SEQ ID NO: 248179 - DNA, 25 bp, probe
ggggaccacttctataagagaaaca

SEQ ID NO: 248180 - DNA, 25 bp, probe
gggaggaagtcctatcaagagagag

SEQ ID NO: 248181 - DNA, 25 bp, probe
gggagcggagtgacagtaagcagga

SEQ ID NO: 248182 - DNA, 25 bp, probe
gggactggagtgtggagctgcagga

SEQ ID NO: 248183 - DNA, 25 bp, probe
gggagctgggtgaatgaggtgctgg

SEQ ID NO: 248184 - DNA, 25 bp, probe
gggagctgagggaataattgatgag

SEQ ID NO: 248185 - DNA, 25 bp, probe
gggagagaggggcaagcatgatatg

SEQ ID NO: 248186 - DNA, 25 bp, probe
gggagagaggggcaagcatgatatg

SEQ ID NO: 248187 - DNA, 25 bp, probe
gggagaggtgagctaacatttgcta

SEQ ID NO: 248188 - DNA, 25 bp, probe
gggagaccagaggacccttgtctca

SEQ ID NO: 248189 - DNA, 25 bp, probe
gggagcaaaggtacagtctcttctc

SEQ ID NO: 248190 - DNA, 25 bp, probe
ggggagtaggttgcatctttgttga

SEQ ID NO: 248191 - DNA, 25 bp, probe
gggggaaggatttgactttacagca

SEQ ID NO: 248192 - DNA, 25 bp, probe
gggtggattggatttgtctttggtg

SEQ ID NO: 248193 - DNA, 25 bp, probe
ggtggagtccgatgattctcttttg

SEQ ID NO: 248194 - DNA, 25 bp, probe
gggagatggaaatattttgttgtgt

SEQ ID NO: 248195 - DNA, 25 bp, probe
gggagcagtataaagcttatttgta

SEQ ID NO: 248196 - DNA, 25 bp, probe
gggaggtacaattgccatatgattt

SEQ ID NO: 248197 - DNA, 25 bp, probe
gggagtggaccatgcttatgtcacc

SEQ ID NO: 248198 - DNA, 25 bp, probe
gggagtggaccatgcttatgtcacc

SEQ ID NO: 248199 - DNA, 25 bp, probe
gggagtaactgctggtagtgccttc

SEQ ID NO: 248200 - DNA, 25 bp, probe
gggaggacgtgatgagtgaggactt

SEQ ID NO: 248201 - DNA, 25 bp, probe
gggaggaacagatgagacagtggct

SEQ ID NO: 248202 - DNA, 25 bp, probe
gggaccaaagactagacagaattca

SEQ ID NO: 248203 - DNA, 25 bp, probe
gggagtcaaagaaaacagagtcatc

SEQ ID NO: 248204 - DNA, 25 bp, probe
gggagtcaaagaaaacagagtcatc

SEQ ID NO: 248205 - DNA, 25 bp, probe
gggaccaagagaaagaagcagatat

SEQ ID NO: 248206 - DNA, 25 bp, probe
gggacgcagaggcaaagacacagca

SEQ ID NO: 248207 - DNA, 25 bp, probe
gggacgcagaggcaaagacacagca

SEQ ID NO: 248208 - DNA, 25 bp, probe
gggagccaatgtccatagtaaagca

SEQ ID NO: 248209 - DNA, 25 bp, probe
gggagcctttgcaatcatgaacaac

SEQ ID NO: 248210 - DNA, 25 bp, probe
gggaccttgctgtaagaaactgcct

SEQ ID NO: 248211 - DNA, 25 bp, probe
gggtcctgtgtgaaaatccccttct

SEQ ID NO: 248212 - DNA, 25 bp, probe
gggtcctgactcaaaacccagtgag

SEQ ID NO: 248213 - DNA, 25 bp, probe
gggtttgactgtgcttaccaatgag

SEQ ID NO: 248214 - DNA, 25 bp, probe
gggtttgactgtgcttaccaatgag

SEQ ID NO: 248215 - DNA, 25 bp, probe
gggtttcactgtgttagccagggtg

SEQ ID NO: 248216 - DNA, 25 bp, probe
gggattctttatgtgtaaatgggga

SEQ ID NO: 248217 - DNA, 25 bp, probe
gggagtgtttatcgagccaaatgga

SEQ ID NO: 248218 - DNA, 25 bp, probe
gggattttcttatgcgccagaggat

SEQ ID NO: 248219 - DNA, 25 bp, probe
gggattttcttatgcgccagaggat

SEQ ID NO: 248220 - DNA, 25 bp, probe
ggtgtttcgtgtgctgctaaggtat

SEQ ID NO: 248221 - DNA, 25 bp, probe
gggatttctggttatgtcaaggctc

SEQ ID NO: 248222 - DNA, 25 bp, probe
gggttctcaagatttattcaggatc

SEQ ID NO: 248223 - DNA, 25 bp, probe
gggtttccatgatccattaaatgcc

SEQ ID NO: 248224 - DNA, 25 bp, probe
ggggttgcattgtccttttagtgcc

SEQ ID NO: 248225 - DNA, 25 bp, probe
ggggttgcattgtccttttagtgcc

SEQ ID NO: 248226 - DNA, 25 bp, probe
gggtctgtgaatttctttaatgtct

SEQ ID NO: 248227 - DNA, 25 bp, probe
gggatagtactaagcatttcagttc

SEQ ID NO: 248228 - DNA, 25 bp, probe
gggtggtgaccaatgcattaccttc

SEQ ID NO: 248229 - DNA, 25 bp, probe
gggtagctgccacttgaacaaaatc

SEQ ID NO: 248230 - DNA, 25 bp, probe
gggatacatgtcttagaaaattcac

SEQ ID NO: 248231 - DNA, 25 bp, probe
gggatacatgtcttagaaaattcac

SEQ ID NO: 248232 - DNA, 25 bp, probe
gggagagcagccttgtggaaattga

SEQ ID NO: 248233 - DNA, 25 bp, probe
gggtagcagccagcatggaaaggaa

SEQ ID NO: 248234 - DNA, 25 bp, probe
gggagacacacccatggaaagccac

SEQ ID NO: 248235 - DNA, 25 bp, probe
gggagaccacagccttagtatgaca

SEQ ID NO: 248236 - DNA, 25 bp, probe
gggatacctgcgcttgaaggacatc

SEQ ID NO: 248237 - DNA, 25 bp, probe
gggatacctgcgcttgaaggacatc

SEQ ID NO: 248238 - DNA, 25 bp, probe
gggtccctgcaggtcatgaggggcc

SEQ ID NO: 248239 - DNA, 25 bp, probe
gggtcctatgggaacagagggtctt

SEQ ID NO: 248240 - DNA, 25 bp, probe
gggttcttggatgtggaagggcttt

SEQ ID NO: 248241 - DNA, 25 bp, probe
gggatagttccgtgtaagggctttg

SEQ ID NO: 248242 - DNA, 25 bp, probe
gggatatgttccacgtaacttgctg

SEQ ID NO: 248243 - DNA, 25 bp, probe
gggatttgtagttgcgacttcttcg

SEQ ID NO: 248244 - DNA, 25 bp, probe
gggatttgtagttgcgacttcttcg

SEQ ID NO: 248245 - DNA, 25 bp, probe
gggttagtggggctttctatggagc

SEQ ID NO: 248246 - DNA, 25 bp, probe
gggtcttgggaagtggttcttgtca

SEQ ID NO: 248247 - DNA, 25 bp, probe
gggatcattgggaaaggtgtactta

SEQ ID NO: 248248 - DNA, 25 bp, probe
gggatcattgggaaaggtgtactta

SEQ ID NO: 248249 - DNA, 25 bp, probe
gggatactcagggacagggcatcat

SEQ ID NO: 248250 - DNA, 25 bp, probe
gggagattatgttgacagaggatat

SEQ ID NO: 248251 - DNA, 25 bp, probe
gggagatcatgatgcagaaggattt

SEQ ID NO: 248252 - DNA, 25 bp, probe
gggagatgagcaatcaggaggttat

SEQ ID NO: 248253 - DNA, 25 bp, probe
gggtgctggcaagaagctgcttatc

SEQ ID NO: 248254 - DNA, 25 bp, probe
gggatcttcaagggagtgtaatttt

SEQ ID NO: 248255 - DNA, 25 bp, probe
ggattcctaacgattcaaattaccg

SEQ ID NO: 248256 - DNA, 25 bp, probe
tggttcctaaaaatcccaaatcaag

SEQ ID NO: 248257 - DNA, 25 bp, probe
ggttttcaaacattcctcaacttat

SEQ ID NO: 248258 - DNA, 25 bp, probe
ggcgcttttaacagcaagcaacttt

SEQ ID NO: 248259 - DNA, 25 bp, probe
gggtttctcaaaggcaatccagctt

SEQ ID NO: 248260 - DNA, 25 bp, probe
gggattgttctgtacgaactgatga

SEQ ID NO: 248261 - DNA, 25 bp, probe
gggatcgttacccgaactgcatcag

SEQ ID NO: 248262 - DNA, 25 bp, probe
gggatcgtcatgtgggaagtcatgt

SEQ ID NO: 248263 - DNA, 25 bp, probe
gggttgcctcacgcaaatgtatttc

SEQ ID NO: 248264 - DNA, 25 bp, probe
gggttcctacgcaaaagtcaaatct

SEQ ID NO: 248265 - DNA, 25 bp, probe
gggtagactacgaccaggtgaagat

SEQ ID NO: 248266 - DNA, 25 bp, probe
gggttcatctagggacacgttagga

SEQ ID NO: 248267 - DNA, 25 bp, probe
gggttcctagtactgcaattcggga

SEQ ID NO: 248268 - DNA, 25 bp, probe
gggtgatgctctatacgcttttggt

SEQ ID NO: 248269 - DNA, 25 bp, probe
gggagatgtccaatcaggatgtaat

SEQ ID NO: 248270 - DNA, 25 bp, probe
gggagagctcaaactggctgatttt

SEQ ID NO: 248271 - DNA, 25 bp, probe
gggagagtcaaacggtgcttctctt

SEQ ID NO: 248272 - DNA, 25 bp, probe
gggagagtcaaacggtgcttctctt

SEQ ID NO: 248273 - DNA, 25 bp, probe
gggtattcacaacaggcctgacttg

SEQ ID NO: 248274 - DNA, 25 bp, probe
gggtattacatacaccattgttgga

SEQ ID NO: 248275 - DNA, 25 bp, probe
gggattgtactataccagtaagtgc

SEQ ID NO: 248276 - DNA, 25 bp, probe
gggatagtcaggtaaacagttggtc

SEQ ID NO: 248277 - DNA, 25 bp, probe
gggatagtggtgtggatcagttggt

SEQ ID NO: 248278 - DNA, 25 bp, probe
gggatacagaagaggccatgtgtct

SEQ ID NO: 248279 - DNA, 25 bp, probe
gggatacagaagaggccatgtgtct

SEQ ID NO: 248280 - DNA, 25 bp, probe
gggataaaatgaggctccaatacat

SEQ ID NO: 248281 - DNA, 25 bp, probe
gggatagaaatggcagcaaaattta

SEQ ID NO: 248282 - DNA, 25 bp, probe
ggtattgtaccccaaaattctgcat

SEQ ID NO: 248283 - DNA, 25 bp, probe
gggttgtacctccataaaacagtag

SEQ ID NO: 248284 - DNA, 25 bp, probe
ggggttatccctgaaacctgcatag

SEQ ID NO: 248285 - DNA, 25 bp, probe
ggggcaaatgccattgaaaccgcta

SEQ ID NO: 248286 - DNA, 25 bp, probe
ggggcaaatgccattgaaaccgcta

SEQ ID NO: 248287 - DNA, 25 bp, probe
gggtccaatcctaggacagccttgt

SEQ ID NO: 248288 - DNA, 25 bp, probe
gggatccatttctgtgaactcttct

SEQ ID NO: 248289 - DNA, 25 bp, probe
gggatccaacttgtgaaatgcttca

SEQ ID NO: 248290 - DNA, 25 bp, probe
gggtctgcaactttggaaaactcct

SEQ ID NO: 248291 - DNA, 25 bp, probe
gggtctgcaagtctagacaactgct

SEQ ID NO: 248292 - DNA, 25 bp, probe
gggtctgcatacattgcataaggct

SEQ ID NO: 248293 - DNA, 25 bp, probe
ggtcacttagccttcttaggcaaac

SEQ ID NO: 248294 - DNA, 25 bp, probe
ggtccttgcggcatcagttacaaaa

SEQ ID NO: 248295 - DNA, 25 bp, probe
gggtttgcgggtagttgcacggaca

SEQ ID NO: 248296 - DNA, 25 bp, probe
tgggtttcattttggattgaccgaa

SEQ ID NO: 248297 - DNA, 25 bp, probe
ggggctatcttttggtatacttgtg

SEQ ID NO: 248298 - DNA, 25 bp, probe
ggtggtattttggctgttacttttg

SEQ ID NO: 248299 - DNA, 25 bp, probe
ggggtattttctactgttgcttaat

SEQ ID NO: 248300 - DNA, 25 bp, probe
gggtaaattttgatgtcgcattata

SEQ ID NO: 248301 - DNA, 25 bp, probe
gggtaaattttgatgtcgcattata

SEQ ID NO: 248302 - DNA, 25 bp, probe
gggatacttagtggtatgtctcttt

SEQ ID NO: 248303 - DNA, 25 bp, probe
gggatacgaagtggatacctctagt

SEQ ID NO: 248304 - DNA, 25 bp, probe
gggagacaagagcattacccagctt

SEQ ID NO: 248305 - DNA, 25 bp, probe
gggagcactatgtccatgtgaacgc

SEQ ID NO: 248306 - DNA, 25 bp, probe
gggagcagtttgcagcagagcatcc

SEQ ID NO: 248307 - DNA, 25 bp, probe
gggagatgtcttagaggcagcacca

SEQ ID NO: 248308 - DNA, 25 bp, probe
gggagagcttttaggctacacagca

SEQ ID NO: 248309 - DNA, 25 bp, probe
gggagagctgcttaatgtgctttaa

SEQ ID NO: 248310 - DNA, 25 bp, probe
gggatactgcttattttatgatagt

SEQ ID NO: 248311 - DNA, 25 bp, probe
gggtagtctgtgcttgtaatccagc

SEQ ID NO: 248312 - DNA, 25 bp, probe
gggtaactgtggcattggacgggta

SEQ ID NO: 248313 - DNA, 25 bp, probe
gggagaagcttgcctttgaactgga

SEQ ID NO: 248314 - DNA, 25 bp, probe
gggagaatttgaccttgtacagaga

SEQ ID NO: 248315 - DNA, 25 bp, probe
gggagaagcttacctttctggagga

SEQ ID NO: 248316 - DNA, 25 bp, probe
gggagggacaagccctggggagaga

SEQ ID NO: 248317 - DNA, 25 bp, probe
gggagaggggaacgtgggaatagca

SEQ ID NO: 248318 - DNA, 25 bp, probe
gggagaggggaacgtgggaatagca

SEQ ID NO: 248319 - DNA, 25 bp, probe
gggatgaagggctgcgcttaaaaca

SEQ ID NO: 248320 - DNA, 25 bp, probe
gggtgacaaggcgtctcttcaaaca

SEQ ID NO: 248321 - DNA, 25 bp, probe
gggtgacaagtttccccaagagcgg

SEQ ID NO: 248322 - DNA, 25 bp, probe
gggtaagtttctgatgctgactggc

SEQ ID NO: 248323 - DNA, 25 bp, probe
gggttagtatccaattgtgttgcca

SEQ ID NO: 248324 - DNA, 25 bp, probe
gggttgaataaaatgtgtcttgtcc

SEQ ID NO: 248325 - DNA, 25 bp, probe
gggagtgggaactgttctctgtgac

SEQ ID NO: 248326 - DNA, 25 bp, probe
gggagggagagtggagggtttgacg

SEQ ID NO: 248327 - DNA, 25 bp, probe
gggagcaagaggagagggatgtcgg

SEQ ID NO: 248328 - DNA, 25 bp, probe
gggaggagaaccctggtgagtcgaa

SEQ ID NO: 248329 - DNA, 25 bp, probe
gggagagtgagacccagtggaggga

SEQ ID NO: 248330 - DNA, 25 bp, probe
gggaggttgatggcgagtggtgctg

SEQ ID NO: 248331 - DNA, 25 bp, probe
gggaggttgctaggagatgtgtatc

SEQ ID NO: 248332 - DNA, 25 bp, probe
gggaggtgtctcgagagaagatcac

SEQ ID NO: 248333 - DNA, 25 bp, probe
gggagatgtgtctacagagaaggtc

SEQ ID NO: 248334 - DNA, 25 bp, probe
gggagatgtgtctacagagaaggtc

SEQ ID NO: 248335 - DNA, 25 bp, probe
gggatgatctcattaataagaagat

SEQ ID NO: 248336 - DNA, 25 bp, probe
gggattcacttaacaaaagcaagaa

SEQ ID NO: 248337 - DNA, 25 bp, probe
gggagacactctatctgtaatccaa

SEQ ID NO: 248338 - DNA, 25 bp, probe
gggagtactatagtgttcaacagca

SEQ ID NO: 248339 - DNA, 25 bp, probe
gggagtgttaaattccaaacagctg

SEQ ID NO: 248340 - DNA, 25 bp, probe
gggattgttaagaacgacattcagt

SEQ ID NO: 248341 - DNA, 25 bp, probe
ggacctgttaacaatcatacttgga

SEQ ID NO: 248342 - DNA, 25 bp, probe
ggtccttctacaacaaggtttggca

SEQ ID NO: 248343 - DNA, 25 bp, probe
ggatcgtcttaaaattggtctagga

SEQ ID NO: 248344 - DNA, 25 bp, probe
gggagatctttaataatggtgctag

SEQ ID NO: 248345 - DNA, 25 bp, probe
gggagttcattcaaaagtgcctgca

SEQ ID NO: 248346 - DNA, 25 bp, probe
gggaggacaagcaataactctctac

SEQ ID NO: 248347 - DNA, 25 bp, probe
gggaggacaagcaataactctctac

SEQ ID NO: 248348 - DNA, 25 bp, probe
gggaggatcaagctagacttcaagg

SEQ ID NO: 248349 - DNA, 25 bp, probe
gggaggatttgcttgaacccaagag

SEQ ID NO: 248350 - DNA, 25 bp, probe
gggaggatgtaaatagccgcacaaa

SEQ ID NO: 248351 - DNA, 25 bp, probe
gggagggtaatgtgcaccacagggg

SEQ ID NO: 248352 - DNA, 25 bp, probe
gggagggtaggtgagagtcagggtg

SEQ ID NO: 248353 - DNA, 25 bp, probe
gggagggggagagaggtcaggccag

SEQ ID NO: 248354 - DNA, 25 bp, probe
gggagggggagagaggtcaggccag

SEQ ID NO: 248355 - DNA, 25 bp, probe
gggaggtgctgcggaaaaccgccca

SEQ ID NO: 248356 - DNA, 25 bp, probe
gggagtgctgcggaggggacacagc

SEQ ID NO: 248357 - DNA, 25 bp, probe
gggagtgctgcggaggggacacagc

SEQ ID NO: 248358 - DNA, 25 bp, probe
gggaggctgacttgttgatgaatcc

SEQ ID NO: 248359 - DNA, 25 bp, probe
gggaggggtagtcgaagagctctgg

SEQ ID NO: 248360 - DNA, 25 bp, probe
gggagagggacgtgagagagcatgc

SEQ ID NO: 248361 - DNA, 25 bp, probe
gggagaggaaggtgagtatgaggct

SEQ ID NO: 248362 - DNA, 25 bp, probe
gggagaggaacgtggaacaggagca

SEQ ID NO: 248363 - DNA, 25 bp, probe
gggagggtacgatttgctaaagaga

SEQ ID NO: 248364 - DNA, 25 bp, probe
gggagtttaagatatgcggtgagga

SEQ ID NO: 248365 - DNA, 25 bp, probe
gggagtcagtgtggcaaagcggggg

SEQ ID NO: 248366 - DNA, 25 bp, probe
gggaggaggcatagaacacaggcgg

SEQ ID NO: 248367 - DNA, 25 bp, probe
gggagacagtcatgtgaccaggcgc

SEQ ID NO: 248368 - DNA, 25 bp, probe
gggagacagatgggtggatcagggg

SEQ ID NO: 248369 - DNA, 25 bp, probe
gggagacagcagcctgtatgtggtg

SEQ ID NO: 248370 - DNA, 25 bp, probe
gggagacagcagcctgtatgtggtg

SEQ ID NO: 248371 - DNA, 25 bp, probe
gggagtctcagccgaagagagctgg

SEQ ID NO: 248372 - DNA, 25 bp, probe
gggagatcctggcatagcacagggt

SEQ ID NO: 248373 - DNA, 25 bp, probe
gggaggcggcagaatgcagccagag

SEQ ID NO: 248374 - DNA, 25 bp, probe
gggagagcgatacatcacgcatgag

SEQ ID NO: 248375 - DNA, 25 bp, probe
gggagagcgatacatcacgcatgag

SEQ ID NO: 248376 - DNA, 25 bp, probe
gggagtgatcactaacaccatagta

SEQ ID NO: 248377 - DNA, 25 bp, probe
gggtgctatcaatgccacatcacag

SEQ ID NO: 248378 - DNA, 25 bp, probe
ggtgtgcattcggctgcaaataaca

SEQ ID NO: 248379 - DNA, 25 bp, probe
gggtttcagcccagcagaagcatta

SEQ ID NO: 248380 - DNA, 25 bp, probe
gggtattagccaaagatgccaggat

SEQ ID NO: 248381 - DNA, 25 bp, probe
gggatttggcacaaaatggagcatt

SEQ ID NO: 248382 - DNA, 25 bp, probe
gggatacaggaattagctggtcatg

SEQ ID NO: 248383 - DNA, 25 bp, probe
gggatgacatggaatcgttagaata

SEQ ID NO: 248384 - DNA, 25 bp, probe
gggtcataagcttgcgttgattaag

SEQ ID NO: 248385 - DNA, 25 bp, probe
gggtcataagcttgcgttgattaag

SEQ ID NO: 248386 - DNA, 25 bp, probe
gggagatcgactacactgcataccc

SEQ ID NO: 248387 - DNA, 25 bp, probe
gggagatccttcgtcaaaacaccct

SEQ ID NO: 248388 - DNA, 25 bp, probe
ggtatcaccagagaaaaagcccctg

SEQ ID NO: 248389 - DNA, 25 bp, probe
gggtcccgtggaggaaaccacattg

SEQ ID NO: 248390 - DNA, 25 bp, probe
gggtcccgtggaggaaaccacattg

SEQ ID NO: 248391 - DNA, 25 bp, probe
gggtccggtggctgcaaagatcagt

SEQ ID NO: 248392 - DNA, 25 bp, probe
ggggccagggtctccaaggagacgc

SEQ ID NO: 248393 - DNA, 25 bp, probe
ggggccagggctaaaaatggacaag

SEQ ID NO: 248394 - DNA, 25 bp, probe
gggagttgatggaaccaaatagaaa

SEQ ID NO: 248395 - DNA, 25 bp, probe
gggtttgagtaaatacaaagactga

SEQ ID NO: 248396 - DNA, 25 bp, probe
gggtttaatgtcaaatcaaggcaaa

SEQ ID NO: 248397 - DNA, 25 bp, probe
gggtcctcaaagaagtaaggccaca

SEQ ID NO: 248398 - DNA, 25 bp, probe
gggtcctcaaagaagtaaggccaca

SEQ ID NO: 248399 - DNA, 25 bp, probe
gggttctcaatcataaaggtgccac

SEQ ID NO: 248400 - DNA, 25 bp, probe
gggttctcaatcataaaggtgccac

SEQ ID NO: 248401 - DNA, 25 bp, probe
gggtttccatcatgtcaaggtcaca

SEQ ID NO: 248402 - DNA, 25 bp, probe
gggtttccatcatgtcaaggtcaca

SEQ ID NO: 248403 - DNA, 25 bp, probe
gggtcttacgaaatgaagtccacaa

SEQ ID NO: 248404 - DNA, 25 bp, probe
gggtcttacgaaatgaagtccacaa

SEQ ID NO: 248405 - DNA, 25 bp, probe
gggtttgccagtcagttgctcaaaa

SEQ ID NO: 248406 - DNA, 25 bp, probe
gggatctagctcttcgagtggatca

SEQ ID NO: 248407 - DNA, 25 bp, probe
gggatctagcgagagagatgcagaa

SEQ ID NO: 248408 - DNA, 25 bp, probe
gggatcaggccaagaggatcaatca

SEQ ID NO: 248409 - DNA, 25 bp, probe
gggaggagcctggagtgtaattacc

SEQ ID NO: 248410 - DNA, 25 bp, probe
gggggcagcagccaagtttacttca

SEQ ID NO: 248411 - DNA, 25 bp, probe
gggaggcagcagagaacttcctata

SEQ ID NO: 248412 - DNA, 25 bp, probe
gggaggcagcagagaacttcctata

SEQ ID NO: 248413 - DNA, 25 bp, probe
ggaggaggcactgaaattactaatt

SEQ ID NO: 248414 - DNA, 25 bp, probe
ggggaagcctcagagattacacagt

SEQ ID NO: 248415 - DNA, 25 bp, probe
gggtaagcaccagggacaataagga

SEQ ID NO: 248416 - DNA, 25 bp, probe
ggtggaagggcgagaccaacggacg

SEQ ID NO: 248417 - DNA, 25 bp, probe
gggttacaggcgagttccctgtggc

SEQ ID NO: 248418 - DNA, 25 bp, probe
gggtctccaaggagacgcctctgtg

SEQ ID NO: 248419 - DNA, 25 bp, probe
gggattacagggatgagccaccgcg

SEQ ID NO: 248420 - DNA, 25 bp, probe
gggattcaaggactgatccctcctc

SEQ ID NO: 248421 - DNA, 25 bp, probe
gggagtgagagtatcaccttcctca

SEQ ID NO: 248422 - DNA, 25 bp, probe
gggagtgatggatggacagcttctt

SEQ ID NO: 248423 - DNA, 25 bp, probe
gggagtgggagtcaagtgtgcctgc

SEQ ID NO: 248424 - DNA, 25 bp, probe
gggagattgtggatagactgtgcct

SEQ ID NO: 248425 - DNA, 25 bp, probe
gggagattgtggatagactgtgcct

SEQ ID NO: 248426 - DNA, 25 bp, probe
gggagtcttgaaatgtcacagtagt

SEQ ID NO: 248427 - DNA, 25 bp, probe
gggagttatggaatggtgatgaagt

SEQ ID NO: 248428 - DNA, 25 bp, probe
ggaggcctagtttgggtgcaagtag

SEQ ID NO: 248429 - DNA, 25 bp, probe
ggagtgcctgaatagcttggaaaag

SEQ ID NO: 248430 - DNA, 25 bp, probe
ggggacttaaactgctgaattcacc

SEQ ID NO: 248431 - DNA, 25 bp, probe
ggggagggaccctgagcaagtccct

SEQ ID NO: 248432 - DNA, 25 bp, probe
gggagggtacatggatgaggcaggt

SEQ ID NO: 248433 - DNA, 25 bp, probe
gggagtgaggttgggcagtgtggtg

SEQ ID NO: 248434 - DNA, 25 bp, probe
gggagtgatggatggacaggtgaga

SEQ ID NO: 248435 - DNA, 25 bp, probe
gggaggctgagatgggaggatcact

SEQ ID NO: 248436 - DNA, 25 bp, probe
gggagttaaacagcagcaacactaa

SEQ ID NO: 248437 - DNA, 25 bp, probe
gggagttaaacagcagcaacactaa

SEQ ID NO: 248438 - DNA, 25 bp, probe
ggggctaaatccgcagcaaactgcc

SEQ ID NO: 248439 - DNA, 25 bp, probe
gggtgcttactaaaaggaggcagcc

SEQ ID NO: 248440 - DNA, 25 bp, probe
gggtataaaagaaggccgcgcagcc

SEQ ID NO: 248441 - DNA, 25 bp, probe
gggtaaatataaggagcaagggcgc

SEQ ID NO: 248442 - DNA, 25 bp, probe
gggttagcaaaaagagcctgggctg

SEQ ID NO: 248443 - DNA, 25 bp, probe
gggagggcaaaaaggctcgggtgat

SEQ ID NO: 248444 - DNA, 25 bp, probe
gggagggaaaggatgttgggctaag

SEQ ID NO: 248445 - DNA, 25 bp, probe
gggaggagaagggttacttgctgct

SEQ ID NO: 248446 - DNA, 25 bp, probe
gggaggagaaggtcccgcatggacg

SEQ ID NO: 248447 - DNA, 25 bp, probe
gggaggatagggtccctgacgtgcc

SEQ ID NO: 248448 - DNA, 25 bp, probe
gggaggatagggtccctgacgtgcc

SEQ ID NO: 248449 - DNA, 25 bp, probe
gggaggagatggtttcctatttcct

SEQ ID NO: 248450 - DNA, 25 bp, probe
ggtgaggggtgagtttcctccatcc

SEQ ID NO: 248451 - DNA, 25 bp, probe
gggaggtggttcctattcaccaact

SEQ ID NO: 248452 - DNA, 25 bp, probe
gggagggtgcttggcacttattgaa

SEQ ID NO: 248453 - DNA, 25 bp, probe
gggaggaggcctggatcatgttaag

SEQ ID NO: 248454 - DNA, 25 bp, probe
gggatgggcctatgattgttcatga

SEQ ID NO: 248455 - DNA, 25 bp, probe
gggatgggtccattatatgatccat

SEQ ID NO: 248456 - DNA, 25 bp, probe
gggtgtggggcatttaggccatgct

SEQ ID NO: 248457 - DNA, 25 bp, probe
ggtagtggggtcttcaggtcagaat

SEQ ID NO: 248458 - DNA, 25 bp, probe
gggagtcggttagtcattgatagaa

SEQ ID NO: 248459 - DNA, 25 bp, probe
gggggccagattgcatattgaacac

SEQ ID NO: 248460 - DNA, 25 bp, probe
gggaggcatcagttgctatatatta

SEQ ID NO: 248461 - DNA, 25 bp, probe
gggagtgtcatctatgtctatttta

SEQ ID NO: 248462 - DNA, 25 bp, probe
gggaggttcattgtgattaatagtc

SEQ ID NO: 248463 - DNA, 25 bp, probe
gggggatctatcccgttaacagatc

SEQ ID NO: 248464 - DNA, 25 bp, probe
gggggatctatcccgttaacagatc

SEQ ID NO: 248465 - DNA, 25 bp, probe
gggaggcttacagggtgtacacaca

SEQ ID NO: 248466 - DNA, 25 bp, probe
gggaggattctatgaggcaaccaca

SEQ ID NO: 248467 - DNA, 25 bp, probe
gggatggatttgacctagacctcac

SEQ ID NO: 248468 - DNA, 25 bp, probe
gggattataggcacaagacaccaca

SEQ ID NO: 248469 - DNA, 25 bp, probe
gggttggcgacatcaagaaccacaa

SEQ ID NO: 248470 - DNA, 25 bp, probe
gggttgggttcctgaatgcaccata

SEQ ID NO: 248471 - DNA, 25 bp, probe
gggttgggttcctgaatgcaccata

SEQ ID NO: 248472 - DNA, 25 bp, probe
gggttgggttcctgaatgcaccata

SEQ ID NO: 248473 - DNA, 25 bp, probe
gggtctaggggagagagtccctgag

SEQ ID NO: 248474 - DNA, 25 bp, probe
gggatgtagcctcggaagcatggcc

SEQ ID NO: 248475 - DNA, 25 bp, probe
gggattcgacattggaaatcacttc

SEQ ID NO: 248476 - DNA, 25 bp, probe
gggatatggaatttgataagcagtt

SEQ ID NO: 248477 - DNA, 25 bp, probe
gggatatggtgcatctttacagtac

SEQ ID NO: 248478 - DNA, 25 bp, probe
gggatatggtgcatttcttgtctac

SEQ ID NO: 248479 - DNA, 25 bp, probe
gggatgattgctcgattgtttggtt

SEQ ID NO: 248480 - DNA, 25 bp, probe
gggatgattgctcgattgtttggtt

SEQ ID NO: 248481 - DNA, 25 bp, probe
gggaggcattcacctttatgtgtta

SEQ ID NO: 248482 - DNA, 25 bp, probe
gggatgacatattacatgctgtagt

SEQ ID NO: 248483 - DNA, 25 bp, probe
gggatgctcatgtgacagcagtttg

SEQ ID NO: 248484 - DNA, 25 bp, probe
gggagtatggagtacagctgtctgg

SEQ ID NO: 248485 - DNA, 25 bp, probe
gggagtgtacagaacatcttctggg

SEQ ID NO: 248486 - DNA, 25 bp, probe
gggaggtggttttctgactgagatg

SEQ ID NO: 248487 - DNA, 25 bp, probe
gggaggtggttttctgactgagatg

SEQ ID NO: 248488 - DNA, 25 bp, probe
gggatggtgtttgacttcggaggaa

SEQ ID NO: 248489 - DNA, 25 bp, probe
gggatcggtttctgtatgcgaagtt

SEQ ID NO: 248490 - DNA, 25 bp, probe
gggatcgttttttatatctcaggtg

SEQ ID NO: 248491 - DNA, 25 bp, probe
gggattgctttcatctaattctggc

SEQ ID NO: 248492 - DNA, 25 bp, probe
gggatttgttatccaaaatgctggt

SEQ ID NO: 248493 - DNA, 25 bp, probe
gggatttgttatccaaaatgctggt

SEQ ID NO: 248494 - DNA, 25 bp, probe
gggttttctatttgaacatgtgcct

SEQ ID NO: 248495 - DNA, 25 bp, probe
gggtcttgagccataaactggcgta

SEQ ID NO: 248496 - DNA, 25 bp, probe
gggtgttatgtcctgaaaataggtg

SEQ ID NO: 248497 - DNA, 25 bp, probe
ggtgattttgtggccctagatagga

SEQ ID NO: 248498 - DNA, 25 bp, probe
ggtgattttgtggccctagatagga

SEQ ID NO: 248499 - DNA, 25 bp, probe
ggtgtcttttccactcctatggaaa

SEQ ID NO: 248500 - DNA, 25 bp, probe
gggtttacttcatgacacttggaaa

SEQ ID NO: 248501 - DNA, 25 bp, probe
gggtttatgattatactcacgagga

SEQ ID NO: 248502 - DNA, 25 bp, probe
gggttttgggtctaccagagtcaga

SEQ ID NO: 248503 - DNA, 25 bp, probe
gggatctttgagcttgtggaggtgg

SEQ ID NO: 248504 - DNA, 25 bp, probe
gggaggttgaggtgggaggatttgc

SEQ ID NO: 248505 - DNA, 25 bp, probe
gggaggtagaaggggaggacactgg

SEQ ID NO: 248506 - DNA, 25 bp, probe
gggtctgtttaggccaggccaacac

SEQ ID NO: 248507 - DNA, 25 bp, probe
gggttatttcatagacgatcaaaac

SEQ ID NO: 248508 - DNA, 25 bp, probe
gggtttcattgctgcagatatcaaa

SEQ ID NO: 248509 - DNA, 25 bp, probe
gggtttcattgctgcagatatcaaa

SEQ ID NO: 248510 - DNA, 25 bp, probe
ggtgttctcacctggtaaaattgta

SEQ ID NO: 248511 - DNA, 25 bp, probe
ggtgtgtcgcccaggcgacaaaagt

SEQ ID NO: 248512 - DNA, 25 bp, probe
gggttctcaatacggtaccaaagat

SEQ ID NO: 248513 - DNA, 25 bp, probe
gggttctcaatacggtaccaaagat

SEQ ID NO: 248514 - DNA, 25 bp, probe
gggattcctcaaaggttgaaggaga

SEQ ID NO: 248515 - DNA, 25 bp, probe
gggatccctgtagtgagttttggaa

SEQ ID NO: 248516 - DNA, 25 bp, probe
gggaggcctggagtcaggtttgggg

SEQ ID NO: 248517 - DNA, 25 bp, probe
gggaggcgggaggctttagtggtgg

SEQ ID NO: 248518 - DNA, 25 bp, probe
gggaggcgggaggctttagtggtgg

SEQ ID NO: 248519 - DNA, 25 bp, probe
gggatggggagtcggttagtcattg

SEQ ID NO: 248520 - DNA, 25 bp, probe
gggtcagggagcaggtgtggtttga

SEQ ID NO: 248521 - DNA, 25 bp, probe
gggttcggcagatggtggtggtaaa

SEQ ID NO: 248522 - DNA, 25 bp, probe
gggaggcgggagtggagtggaagaa

SEQ ID NO: 248523 - DNA, 25 bp, probe
gggaggcgggagtggagtggaagaa

SEQ ID NO: 248524 - DNA, 25 bp, probe
gggaggcgagtggttggtgggcaaa

SEQ ID NO: 248525 - DNA, 25 bp, probe
gggagggggctaagagaggagcaaa

SEQ ID NO: 248526 - DNA, 25 bp, probe
gggaggggatgctactgatgggaat

SEQ ID NO: 248527 - DNA, 25 bp, probe
gggaggatggagcagtgagcgggtc

SEQ ID NO: 248528 - DNA, 25 bp, probe
gggaggctgtgaagaggaggaaggc

SEQ ID NO: 248529 - DNA, 25 bp, probe
gggaggacgtagagcagagaagaga

SEQ ID NO: 248530 - DNA, 25 bp, probe
gggaggcacacccggcaaatgagaa

SEQ ID NO: 248531 - DNA, 25 bp, probe
gggattatgcacttcccaattggga

SEQ ID NO: 248532 - DNA, 25 bp, probe
gggatagttcttacacaattgagga

SEQ ID NO: 248533 - DNA, 25 bp, probe
gggatacttctaaattttgggagct

SEQ ID NO: 248534 - DNA, 25 bp, probe
gggatacttctaatttggtggtgtt

SEQ ID NO: 248535 - DNA, 25 bp, probe
gggtagctattcaattaggggagtc

SEQ ID NO: 248536 - DNA, 25 bp, probe
gggtgcctatttattggggatctgc

SEQ ID NO: 248537 - DNA, 25 bp, probe
gggatgcctttgctaagggaaccaa

SEQ ID NO: 248538 - DNA, 25 bp, probe
gggttgcttctgctaagtaatgaat

SEQ ID NO: 248539 - DNA, 25 bp, probe
gggtgatgccttctcagagtcaacc

SEQ ID NO: 248540 - DNA, 25 bp, probe
gggttgctcctcttatggtagaagc

SEQ ID NO: 248541 - DNA, 25 bp, probe
gggaggcaacattaatggtaccagc

SEQ ID NO: 248542 - DNA, 25 bp, probe
gggatggcaatgagaatggacacca

SEQ ID NO: 248543 - DNA, 25 bp, probe
gggatgtactgtccaacgagcaggt

SEQ ID NO: 248544 - DNA, 25 bp, probe
gggatgacctgtaccacaagaggct

SEQ ID NO: 248545 - DNA, 25 bp, probe
gggatcctcttcatgcacaagatga

SEQ ID NO: 248546 - DNA, 25 bp, probe
gggaggcttatctcactgagtgagc

SEQ ID NO: 248547 - DNA, 25 bp, probe
gggatggtctatgccagaggctgac

SEQ ID NO: 248548 - DNA, 25 bp, probe
gggatgggaatagcagaaccaccat

SEQ ID NO: 248549 - DNA, 25 bp, probe
gggatggtgaaaccgaagctcgact

SEQ ID NO: 248550 - DNA, 25 bp, probe
gggatgtggaacattacagtccaat

SEQ ID NO: 248551 - DNA, 25 bp, probe
gggatagacagtgttcacagttatt

SEQ ID NO: 248552 - DNA, 25 bp, probe
gggtcaacagatgtaagcgtcttac

SEQ ID NO: 248553 - DNA, 25 bp, probe
ggggccagtcatgtgaagcgtttac

SEQ ID NO: 248554 - DNA, 25 bp, probe
gggtgccactgtaagaagcttttcc

SEQ ID NO: 248555 - DNA, 25 bp, probe
gggtgccactgtaagaagcttttcc

SEQ ID NO: 248556 - DNA, 25 bp, probe
ggtgtatccttttgaagcagtcctt

SEQ ID NO: 248557 - DNA, 25 bp, probe
ggtgcaccgttttggcaagcacctt

SEQ ID NO: 248558 - DNA, 25 bp, probe
gggatccaggcattatacggacctc

SEQ ID NO: 248559 - DNA, 25 bp, probe
gggtccagtatttacggaggcgttg

SEQ ID NO: 248560 - DNA, 25 bp, probe
gggtccattaacaaagcgggctttg

SEQ ID NO: 248561 - DNA, 25 bp, probe
gggtccatatgaccaagcgggggtc

SEQ ID NO: 248562 - DNA, 25 bp, probe
gggtccatatgaccaagcgggggtc

SEQ ID NO: 248563 - DNA, 25 bp, probe
gggtcgaatctggaatgggagggtc

SEQ ID NO: 248564 - DNA, 25 bp, probe
gggttgcaagggaacagagagggac

SEQ ID NO: 248565 - DNA, 25 bp, probe
gggaggcataggagaagggtcgggc

SEQ ID NO: 248566 - DNA, 25 bp, probe
gggaggctgaggtgggaggatcgct

SEQ ID NO: 248567 - DNA, 25 bp, probe
gggaggtcgaggtaggtggatcacc

SEQ ID NO: 248568 - DNA, 25 bp, probe
gggatggcctggaatgagagggtca

SEQ ID NO: 248569 - DNA, 25 bp, probe
gggtcaactggcgaagagcaggcca

SEQ ID NO: 248570 - DNA, 25 bp, probe
gggtacatagtacaccatggagcac

SEQ ID NO: 248571 - DNA, 25 bp, probe
gggtacatagtacaccatggagcac

SEQ ID NO: 248572 - DNA, 25 bp, probe
gggtccattatatgatccatgaacc

SEQ ID NO: 248573 - DNA, 25 bp, probe
gggtccattatatgatccatgaacc

SEQ ID NO: 248574 - DNA, 25 bp, probe
gggatgcagaaatatcaccatgaaa

SEQ ID NO: 248575 - DNA, 25 bp, probe
gggatgcagaaatatcaccatgaaa

SEQ ID NO: 248576 - DNA, 25 bp, probe
gggatgctggcaatgaaacaataca

SEQ ID NO: 248577 - DNA, 25 bp, probe
gggatgctggcaatgaaacaataca

SEQ ID NO: 248578 - DNA, 25 bp, probe
gggatgtgaaacctcacaatgtcat

SEQ ID NO: 248579 - DNA, 25 bp, probe
gggatgtgcaaagagaacatattcg

SEQ ID NO: 248580 - DNA, 25 bp, probe
gggatggaagaggcctccatcttcg

SEQ ID NO: 248581 - DNA, 25 bp, probe
gggaggatacatatccgcattgcca

SEQ ID NO: 248582 - DNA, 25 bp, probe
gggaggatggtaatcacagcattgc

SEQ ID NO: 248583 - DNA, 25 bp, probe
gggattaggtatttgcatgcgctgc

SEQ ID NO: 248584 - DNA, 25 bp, probe
gggatgccagtaagtctgcaggtgc

SEQ ID NO: 248585 - DNA, 25 bp, probe
gggtgctgatgtacgagatgatggc

SEQ ID NO: 248586 - DNA, 25 bp, probe
gggatgttgctaaatagattataat

SEQ ID NO: 248587 - DNA, 25 bp, probe
gggttcctgctttcagataattatt

SEQ ID NO: 248588 - DNA, 25 bp, probe
gggtacactgacttcagctacttta

SEQ ID NO: 248589 - DNA, 25 bp, probe
gggataacagtcttactctctctta

SEQ ID NO: 248590 - DNA, 25 bp, probe
gggatgaacagtgttttatgctggg

SEQ ID NO: 248591 - DNA, 25 bp, probe
gggtcaacagttttcctatgctttg

SEQ ID NO: 248592 - DNA, 25 bp, probe
gggtcaacagttttcctatgctttg

SEQ ID NO: 248593 - DNA, 25 bp, probe
gggtatacagagacatgtcctgggt

SEQ ID NO: 248594 - DNA, 25 bp, probe
gggatgaacacagttctgccggcag

SEQ ID NO: 248595 - DNA, 25 bp, probe
gggatgaacacagttctgccggcag

SEQ ID NO: 248596 - DNA, 25 bp, probe
gggatgaacacagttctgccggcag

SEQ ID NO: 248597 - DNA, 25 bp, probe
gggaggcacagagtttgctgcgagc

SEQ ID NO: 248598 - DNA, 25 bp, probe
gggaggcaaggattcatgtcagggt

SEQ ID NO: 248599 - DNA, 25 bp, probe
gggaggcaaggattcctgccagggt

SEQ ID NO: 248600 - DNA, 25 bp, probe
ggggccagaggatcaggccccggga

SEQ ID NO: 248601 - DNA, 25 bp, probe
gggtgaagaacagcggaggccgggt

SEQ ID NO: 248602 - DNA, 25 bp, probe
gggatgaagacctgcagtgagcccc

SEQ ID NO: 248603 - DNA, 25 bp, probe
gggatggcacgctggagtatgcccc

SEQ ID NO: 248604 - DNA, 25 bp, probe
gggaggcaccatgcaaatgtcttcc

SEQ ID NO: 248605 - DNA, 25 bp, probe
gggattaccatgtccagatactgtc

SEQ ID NO: 248606 - DNA, 25 bp, probe
gggattaatcagtcaggatcttgat

SEQ ID NO: 248607 - DNA, 25 bp, probe
gggattaatcttgggtgcatttgta

SEQ ID NO: 248608 - DNA, 25 bp, probe
gggattaatcttgggtgcatttgta

SEQ ID NO: 248609 - DNA, 25 bp, probe
gggatcttgatcatggggctggtgt

SEQ ID NO: 248610 - DNA, 25 bp, probe
gggtctatgatggtggggatttacg

SEQ ID NO: 248611 - DNA, 25 bp, probe
gggatgctactgatgggaatgatta

SEQ ID NO: 248612 - DNA, 25 bp, probe
gggtgtgagtgggggcttgattact

SEQ ID NO: 248613 - DNA, 25 bp, probe
gggttggtcaaatgtcttgtgtcat

SEQ ID NO: 248614 - DNA, 25 bp, probe
gggatgtggtgacattgttttgtca

SEQ ID NO: 248615 - DNA, 25 bp, probe
gggttgggattatgctgctgttata

SEQ ID NO: 248616 - DNA, 25 bp, probe
gggattctggatgcaacgtctttac

SEQ ID NO: 248617 - DNA, 25 bp, probe
gggatgtctggctgcaaagactatt

SEQ ID NO: 248618 - DNA, 25 bp, probe
gggatggctggattgagcaatgagc

SEQ ID NO: 248619 - DNA, 25 bp, probe
gggaggcatgagtgagctacagtgg

SEQ ID NO: 248620 - DNA, 25 bp, probe
ggggagcaaggctgctaagtggaag

SEQ ID NO: 248621 - DNA, 25 bp, probe
gggtaaagtcggaccagtgtcaagg

SEQ ID NO: 248622 - DNA, 25 bp, probe
gggttaatccatgttcaattcaagg

SEQ ID NO: 248623 - DNA, 25 bp, probe
gggattaaccatgatgtcacttcag

SEQ ID NO: 248624 - DNA, 25 bp, probe
gggataaatcaagagtcctcagcac

SEQ ID NO: 248625 - DNA, 25 bp, probe
gggataaatcaagagtcctcagcac

SEQ ID NO: 248626 - DNA, 25 bp, probe
gggattgaattaaaacagctgcgac

SEQ ID NO: 248627 - DNA, 25 bp, probe
gggattgaattaaaacagctgcgac

SEQ ID NO: 248628 - DNA, 25 bp, probe
gggttgaattcacattccctgactt

SEQ ID NO: 248629 - DNA, 25 bp, probe
gggttgaattcacattccctgactt

SEQ ID NO: 248630 - DNA, 25 bp, probe
gggtcttattcagaccccagatcaa

SEQ ID NO: 248631 - DNA, 25 bp, probe
gggatgattactcggacaccgtgaa

SEQ ID NO: 248632 - DNA, 25 bp, probe
gggtggatacttgaaccccagacgc

SEQ ID NO: 248633 - DNA, 25 bp, probe
gggggatgatgtgaaaccaggaacc

SEQ ID NO: 248634 - DNA, 25 bp, probe
gggtggctgcttgtataaactgcaa

SEQ ID NO: 248635 - DNA, 25 bp, probe
gggatgcctggatcattcagaagga

SEQ ID NO: 248636 - DNA, 25 bp, probe
gggatgcctggatcattcagaagga

SEQ ID NO: 248637 - DNA, 25 bp, probe
gggatggctaaaattccaaggtgca

SEQ ID NO: 248638 - DNA, 25 bp, probe
gggtggtagataatacttctgagtt

SEQ ID NO: 248639 - DNA, 25 bp, probe
gggatgcagtagtaggcactgttga

SEQ ID NO: 248640 - DNA, 25 bp, probe
gggatgcagtagtaggcactgttga

SEQ ID NO: 248641 - DNA, 25 bp, probe
gggatgattaaaggcagcatttgat

SEQ ID NO: 248642 - DNA, 25 bp, probe
gggatgatgtaaatagaggctagct

SEQ ID NO: 248643 - DNA, 25 bp, probe
gggtgagaaggtggaggctatgctt

SEQ ID NO: 248644 - DNA, 25 bp, probe
gggtaacatggcttgggcctttggg

SEQ ID NO: 248645 - DNA, 25 bp, probe
gggtcatatcatccacatcgacttt

SEQ ID NO: 248646 - DNA, 25 bp, probe
gggatgaccatggactggatgcttt

SEQ ID NO: 248647 - DNA, 25 bp, probe
gggatagctaggtctgcagatgcag

SEQ ID NO: 248648 - DNA, 25 bp, probe
gggataccgtgaggcagtgcaaaga

SEQ ID NO: 248649 - DNA, 25 bp, probe
gggtcactgcctccaagtgaaagat

SEQ ID NO: 248650 - DNA, 25 bp, probe
gggtacagtctactagtgaattagc

SEQ ID NO: 248651 - DNA, 25 bp, probe
gggtacagtttttggcattgctaga

SEQ ID NO: 248652 - DNA, 25 bp, probe
gggtacatttataattgcatctagg

SEQ ID NO: 248653 - DNA, 25 bp, probe
gggtacatttataattgcatctagg

SEQ ID NO: 248654 - DNA, 25 bp, probe
ggggtcattttctaatgcttcaggt

SEQ ID NO: 248655 - DNA, 25 bp, probe
gggggcacctggaaaattcaggctg

SEQ ID NO: 248656 - DNA, 25 bp, probe
gggggcacctggagggatgccccca

SEQ ID NO: 248657 - DNA, 25 bp, probe
ggggccaacgaagcgtgatcagccg

SEQ ID NO: 248658 - DNA, 25 bp, probe
gggttcaggcgaagggtgaagccat

SEQ ID NO: 248659 - DNA, 25 bp, probe
gggattattgaatgggtgaacaaca

SEQ ID NO: 248660 - DNA, 25 bp, probe
gggttattgcaatgctcattcagac

SEQ ID NO: 248661 - DNA, 25 bp, probe
gggtatatctaatggcttgagcaca

SEQ ID NO: 248662 - DNA, 25 bp, probe
gggtttgctcagttgagtgtcagct

SEQ ID NO: 248663 - DNA, 25 bp, probe
gggtatgtctacctggcagatactc

SEQ ID NO: 248664 - DNA, 25 bp, probe
ggggatttagtgccactgaagcctg

SEQ ID NO: 248665 - DNA, 25 bp, probe
gggttctgtattgcagctaagctca

SEQ ID NO: 248666 - DNA, 25 bp, probe
gggttcacgatgaccgtgtagtgca

SEQ ID NO: 248667 - DNA, 25 bp, probe
gggttcacatggtccagactgagtg

SEQ ID NO: 248668 - DNA, 25 bp, probe
gggatgtgatccggcatccttgagt

SEQ ID NO: 248669 - DNA, 25 bp, probe
gggatatgcatgatggctccccact

SEQ ID NO: 248670 - DNA, 25 bp, probe
gggtgaggcagtgggtcccacttcc

SEQ ID NO: 248671 - DNA, 25 bp, probe
gggtgaggcagtgggtcccacttcc

SEQ ID NO: 248672 - DNA, 25 bp, probe
gggtgacagagtgagactccaactc

SEQ ID NO: 248673 - DNA, 25 bp, probe
gggtgattggtccaccctgaagctg

SEQ ID NO: 248674 - DNA, 25 bp, probe
gggtactggcatcagagcctggtgc

SEQ ID NO: 248675 - DNA, 25 bp, probe
gggattcggaggaacctgagtgcct

SEQ ID NO: 248676 - DNA, 25 bp, probe
gggattcggaggaacctgagtgcct

SEQ ID NO: 248677 - DNA, 25 bp, probe
gggatctggggactaccagagactc

SEQ ID NO: 248678 - DNA, 25 bp, probe
gggtgtggtggacatcctgaagacc

SEQ ID NO: 248679 - DNA, 25 bp, probe
gggtatagtcaatatgcctgcagga

SEQ ID NO: 248680 - DNA, 25 bp, probe
gggttgagaatggaatcctctgtgg

SEQ ID NO: 248681 - DNA, 25 bp, probe
gggtgatggcgtgatatgcacctgc

SEQ ID NO: 248682 - DNA, 25 bp, probe
gggtcaaggatgctcacatcctgcc

SEQ ID NO: 248683 - DNA, 25 bp, probe
gggtctaatgtgatccaccattttc

SEQ ID NO: 248684 - DNA, 25 bp, probe
gggttaatatggctcttcataattc

SEQ ID NO: 248685 - DNA, 25 bp, probe
gggtaaaagttggctctgtagatcc

SEQ ID NO: 248686 - DNA, 25 bp, probe
gggtaaaagttggctctgtagatcc

SEQ ID NO: 248687 - DNA, 25 bp, probe
gggataaatactaccactgcaagtg

SEQ ID NO: 248688 - DNA, 25 bp, probe
gggtcagcagaggtaccacgaagct

SEQ ID NO: 248689 - DNA, 25 bp, probe
gggtcagcagaggtaccacgaagct

SEQ ID NO: 248690 - DNA, 25 bp, probe
gggtccagacaggccacaagaagtc

SEQ ID NO: 248691 - DNA, 25 bp, probe
gggtccagagcacctcaaacaattt

SEQ ID NO: 248692 - DNA, 25 bp, probe
gggatacggcaagcatgaatgcaat

SEQ ID NO: 248693 - DNA, 25 bp, probe
gggtacctgcaagcagaacttccaa

SEQ ID NO: 248694 - DNA, 25 bp, probe
ggggtcctcaacggagagtacgaga

SEQ ID NO: 248695 - DNA, 25 bp, probe
gggtggagtaactgcaattcaccac

SEQ ID NO: 248696 - DNA, 25 bp, probe
gggtaaggtaatgaatctctccatc

SEQ ID NO: 248697 - DNA, 25 bp, probe
gggtaagggaatggtcaagactgag

SEQ ID NO: 248698 - DNA, 25 bp, probe
gggtactgggtaagtcaacacatgg

SEQ ID NO: 248699 - DNA, 25 bp, probe
gggttttggcagcgtcaagtcagag

SEQ ID NO: 248700 - DNA, 25 bp, probe
gggtttggccagcgtcatggaaaga

SEQ ID NO: 248701 - DNA, 25 bp, probe
gggtttggggacactgctgaaagca

SEQ ID NO: 248702 - DNA, 25 bp, probe
gggtttagttcaacatttgcaaaga

SEQ ID NO: 248703 - DNA, 25 bp, probe
gggttaagaggctctttctgcagaa

SEQ ID NO: 248704 - DNA, 25 bp, probe
gggttcaagagattctcctgcctca

SEQ ID NO: 248705 - DNA, 25 bp, probe
gggttcaagcgattcttgtgcctaa

SEQ ID NO: 248706 - DNA, 25 bp, probe
gggattaatagcttttgacctcaag

SEQ ID NO: 248707 - DNA, 25 bp, probe
gggatctaactgttgttactggaag

SEQ ID NO: 248708 - DNA, 25 bp, probe
gggatctaactgttgttactggaag

SEQ ID NO: 248709 - DNA, 25 bp, probe
gggatcttcctgattttcatcgaga

SEQ ID NO: 248710 - DNA, 25 bp, probe
gggatcgccaggcgttttctgagca

SEQ ID NO: 248711 - DNA, 25 bp, probe
gggtgcctagttgacttactgacaa

SEQ ID NO: 248712 - DNA, 25 bp, probe
gggggtatggttttgtcactgccca

SEQ ID NO: 248713 - DNA, 25 bp, probe
gggggtatggttttgtcactgccca

SEQ ID NO: 248714 - DNA, 25 bp, probe
gggggaggtcttgctggcaagcgta

SEQ ID NO: 248715 - DNA, 25 bp, probe
ggggtgggctttgcctaaggacaca

SEQ ID NO: 248716 - DNA, 25 bp, probe
gggtgtggggtgaggtagtgaaaag

SEQ ID NO: 248717 - DNA, 25 bp, probe
gggtgaaggtaaggaatgagggaag

SEQ ID NO: 248718 - DNA, 25 bp, probe
gggtgaaggtaaggaatgagggaag

SEQ ID NO: 248719 - DNA, 25 bp, probe
gggtagggcacagggaagagggagg

SEQ ID NO: 248720 - DNA, 25 bp, probe
gggtcagggtgcaaggaagaggctt

SEQ ID NO: 248721 - DNA, 25 bp, probe
gggtgaaggcattagctgggtgttt

SEQ ID NO: 248722 - DNA, 25 bp, probe
gggtgcacaataaagggggttctct

SEQ ID NO: 248723 - DNA, 25 bp, probe
gggtccgtggaccaggaggattgcc

SEQ ID NO: 248724 - DNA, 25 bp, probe
gggtaggtgagagtcagggtgcagg

SEQ ID NO: 248725 - DNA, 25 bp, probe
gggtaggctatcaggaagtgcaggc

SEQ ID NO: 248726 - DNA, 25 bp, probe
gggtacacattaggtaagctgggcg

SEQ ID NO: 248727 - DNA, 25 bp, probe
ggggtccattgtggatccactggtg

SEQ ID NO: 248728 - DNA, 25 bp, probe
ggggctcgaagggtccttgtagccg

SEQ ID NO: 248729 - DNA, 25 bp, probe
ggggctcgaagggtccttgtagccg

SEQ ID NO: 248730 - DNA, 25 bp, probe
tgggactgtaagccttcccgtaaat

SEQ ID NO: 248731 - DNA, 25 bp, probe
tgggactgtaagccttcccgtaaat

SEQ ID NO: 248732 - DNA, 25 bp, probe
ggtgacgttcagcctttgtcaataa

SEQ ID NO: 248733 - DNA, 25 bp, probe
gggttgtgctaatttctgtccagaa

SEQ ID NO: 248734 - DNA, 25 bp, probe
gggattgtgttttgtcactctagaa

SEQ ID NO: 248735 - DNA, 25 bp, probe
ggtgttggaagcagtcaccaagata

SEQ ID NO: 248736 - DNA, 25 bp, probe
gggatttgcaatggtgtcaccacgg

SEQ ID NO: 248737 - DNA, 25 bp, probe
gggtgtctgacagtggcgacgatga

SEQ ID NO: 248738 - DNA, 25 bp, probe
gggtgtctgacagtggcgacgatga

SEQ ID NO: 248739 - DNA, 25 bp, probe
gggtttgacagtggaatcgatcgta

SEQ ID NO: 248740 - DNA, 25 bp, probe
gggtttgacagtggaatcgatcgta

SEQ ID NO: 248741 - DNA, 25 bp, probe
gggtttagaatatgatctattttat

SEQ ID NO: 248742 - DNA, 25 bp, probe
gggttttactgatatggttcttatt

SEQ ID NO: 248743 - DNA, 25 bp, probe
gggatttacctacttggtttcagtg

SEQ ID NO: 248744 - DNA, 25 bp, probe
gggatttacctacttggtttcagtg

SEQ ID NO: 248745 - DNA, 25 bp, probe
gggttggacctagtggtgttgtcgt

SEQ ID NO: 248746 - DNA, 25 bp, probe
gggtgttgaactaggggggatattg

SEQ ID NO: 248747 - DNA, 25 bp, probe
gggtcggaactggagtgcagggaac

SEQ ID NO: 248748 - DNA, 25 bp, probe
gggttgagaccagcactctgtgaaa

SEQ ID NO: 248749 - DNA, 25 bp, probe
gggtactggcctagccatgtggaat

SEQ ID NO: 248750 - DNA, 25 bp, probe
gggtgccaggcctatgttggaggac

SEQ ID NO: 248751 - DNA, 25 bp, probe
gggtctgggctattggctggagcca

SEQ ID NO: 248752 - DNA, 25 bp, probe
gggtccgagtgattggaagctccac

SEQ ID NO: 248753 - DNA, 25 bp, probe
gggtccctatgagtgtagagcccat

SEQ ID NO: 248754 - DNA, 25 bp, probe
gggtcacctgatctgtcagagtgga

SEQ ID NO: 248755 - DNA, 25 bp, probe
gggtcttcaagacttcaggtgccag

SEQ ID NO: 248756 - DNA, 25 bp, probe
gggtttcttgacaatggggtcaggc

SEQ ID NO: 248757 - DNA, 25 bp, probe
gggtcgctttcctagtacatgtagg

SEQ ID NO: 248758 - DNA, 25 bp, probe
gggttgttctcttgggaagtcaggg

SEQ ID NO: 248759 - DNA, 25 bp, probe
gggttttcgtacagcaaggcactgg

SEQ ID NO: 248760 - DNA, 25 bp, probe
gggttgttagtagtgccagaggcac

SEQ ID NO: 248761 - DNA, 25 bp, probe
gggtttgataatctgccagggacat

SEQ ID NO: 248762 - DNA, 25 bp, probe
ggggttggacatctctagtgtagct

SEQ ID NO: 248763 - DNA, 25 bp, probe
gggtgcaggtaacccttggtctgta

SEQ ID NO: 248764 - DNA, 25 bp, probe
gggtgcaggtaacccttggtctgta

SEQ ID NO: 248765 - DNA, 25 bp, probe
ggggagagtaaccctgtctaatgaa

SEQ ID NO: 248766 - DNA, 25 bp, probe
ggggatgcttaagaaattagtggaa

SEQ ID NO: 248767 - DNA, 25 bp, probe
ggggatttgtaagacttagatgaga

SEQ ID NO: 248768 - DNA, 25 bp, probe
ggggtggattatatacattcaaaaa

SEQ ID NO: 248769 - DNA, 25 bp, probe
tggggtaaatgtgtacctaatgaaa

SEQ ID NO: 248770 - DNA, 25 bp, probe
gggggcaaagacctacccagatact

SEQ ID NO: 248771 - DNA, 25 bp, probe
gggggcaaaggagtggcttgaaact

SEQ ID NO: 248772 - DNA, 25 bp, probe
gggggcaaaggtttgaagacacagc

SEQ ID NO: 248773 - DNA, 25 bp, probe
ggcggggaggggtgaaacacttcag

SEQ ID NO: 248774 - DNA, 25 bp, probe
gggtgggcagggcattaaactgcta

SEQ ID NO: 248775 - DNA, 25 bp, probe
gggtgcaggggtgtccagaatctgc

SEQ ID NO: 248776 - DNA, 25 bp, probe
gggattgtgaggacccaggaatcat

SEQ ID NO: 248777 - DNA, 25 bp, probe
gggattcgaggcgtgcgagtggact

SEQ ID NO: 248778 - DNA, 25 bp, probe
gggattcagggcttcagaggacagg

SEQ ID NO: 248779 - DNA, 25 bp, probe
gggtctcacggaactagtgacggcg

SEQ ID NO: 248780 - DNA, 25 bp, probe
gggtctccgtcatcatgaacacggc

SEQ ID NO: 248781 - DNA, 25 bp, probe
gggtctccgtcatcatgaacacggc

SEQ ID NO: 248782 - DNA, 25 bp, probe
gggtgctcttcaatgactcaacacg

SEQ ID NO: 248783 - DNA, 25 bp, probe
gggtctcattcgtgtgacatacaga

SEQ ID NO: 248784 - DNA, 25 bp, probe
gggtatcagatgggatggacatcca

SEQ ID NO: 248785 - DNA, 25 bp, probe
gggtcacagaggcagaaatcacaat

SEQ ID NO: 248786 - DNA, 25 bp, probe
gggtacagcagacagtgtcacatca

SEQ ID NO: 248787 - DNA, 25 bp, probe
gggtcaggagcattcatgtacctca

SEQ ID NO: 248788 - DNA, 25 bp, probe
gggtcaggagcattcatgtacctca

SEQ ID NO: 248789 - DNA, 25 bp, probe
gggtcagatgcactgaagtagccaa

SEQ ID NO: 248790 - DNA, 25 bp, probe
gggtcacaggtaaagcagccaattt

SEQ ID NO: 248791 - DNA, 25 bp, probe
gggtcacggtactagcatttgttat

SEQ ID NO: 248792 - DNA, 25 bp, probe
gggtcctgcaattctacagtttctt

SEQ ID NO: 248793 - DNA, 25 bp, probe
gggtcctgcaattctacagtttctt

SEQ ID NO: 248794 - DNA, 25 bp, probe
gggatttgcaatgaacatttccatt

SEQ ID NO: 248795 - DNA, 25 bp, probe
gggtatctatatgaacttgacacag

SEQ ID NO: 248796 - DNA, 25 bp, probe
gggtatgccaattacacttacaata

SEQ ID NO: 248797 - DNA, 25 bp, probe
gggtatctcaattcccttataaatc

SEQ ID NO: 248798 - DNA, 25 bp, probe
gggtatctcaattcccttataaatc

SEQ ID NO: 248799 - DNA, 25 bp, probe
gggttcaacttgacgcttgcaaaat

SEQ ID NO: 248800 - DNA, 25 bp, probe
gggttaacatcaaagctggcaactt

SEQ ID NO: 248801 - DNA, 25 bp, probe
gggttttatgcaaacgcactcacct

SEQ ID NO: 248802 - DNA, 25 bp, probe
gggttcatataaacactcactctgt

SEQ ID NO: 248803 - DNA, 25 bp, probe
gggttgcaatacaaactgctcttga

SEQ ID NO: 248804 - DNA, 25 bp, probe
gggattcaaacctgcatattgtgat

SEQ ID NO: 248805 - DNA, 25 bp, probe
gggttccagacggagcagattcgca

SEQ ID NO: 248806 - DNA, 25 bp, probe
gggttctgagaggaggcagcaatcc

SEQ ID NO: 248807 - DNA, 25 bp, probe
gggttgggaggcgatcagcagatac

SEQ ID NO: 248808 - DNA, 25 bp, probe
gggattggtgacagacatagtgaca

SEQ ID NO: 248809 - DNA, 25 bp, probe
gggatttggcctggatacagtagag

SEQ ID NO: 248810 - DNA, 25 bp, probe
gggatttgcttgggatacagaagag

SEQ ID NO: 248811 - DNA, 25 bp, probe
gggatttgcattgatgaaacagtga

SEQ ID NO: 248812 - DNA, 25 bp, probe
gggtatcagctctgtgataacagcg

SEQ ID NO: 248813 - DNA, 25 bp, probe
gggtggagctccatcatcaaatggc

SEQ ID NO: 248814 - DNA, 25 bp, probe
ggggccagtctgatcacgatcatag

SEQ ID NO: 248815 - DNA, 25 bp, probe
gggtccgtgctggttctgaataaag

SEQ ID NO: 248816 - DNA, 25 bp, probe
gggtctggattattgtcataagaag

SEQ ID NO: 248817 - DNA, 25 bp, probe
gggtgatggatcacaacacatcaat

SEQ ID NO: 248818 - DNA, 25 bp, probe
gggtgtggagctccaagactttcca

SEQ ID NO: 248819 - DNA, 25 bp, probe
gggtgggatctagatgacctcttga

SEQ ID NO: 248820 - DNA, 25 bp, probe
gggtggtgtggagatactcttagag

SEQ ID NO: 248821 - DNA, 25 bp, probe
gggtgggcagaagacattttagaat

SEQ ID NO: 248822 - DNA, 25 bp, probe
gggggagggtgatgcattaattaat

SEQ ID NO: 248823 - DNA, 25 bp, probe
ggggcgtgggattgaattaaaacag

SEQ ID NO: 248824 - DNA, 25 bp, probe
ggggaggggaagccatggaaataca

SEQ ID NO: 248825 - DNA, 25 bp, probe
ggggagggagagcgtggatcctacc

SEQ ID NO: 248826 - DNA, 25 bp, probe
ggggactagaaagaggccctgccct

SEQ ID NO: 248827 - DNA, 25 bp, probe
gggggccagagatcagggcccccac

SEQ ID NO: 248828 - DNA, 25 bp, probe
ggggagctgaatgcggacgacccca

SEQ ID NO: 248829 - DNA, 25 bp, probe
ggggtggagcacgagaacggcaccg

SEQ ID NO: 248830 - DNA, 25 bp, probe
ggggggatccaagatcaggtcgcag

SEQ ID NO: 248831 - DNA, 25 bp, probe
ggtggggaaaggatctggttcatgg

SEQ ID NO: 248832 - DNA, 25 bp, probe
ggtggaggaatacacttatttatga

SEQ ID NO: 248833 - DNA, 25 bp, probe
ggtcggtatatgaggctttctacac

SEQ ID NO: 248834 - DNA, 25 bp, probe
ggtctttaagattggctcgtataac

SEQ ID NO: 248835 - DNA, 25 bp, probe
ggtccttaacacagtcgtgaacaaa

SEQ ID NO: 248836 - DNA, 25 bp, probe
ggtcctggacccagttgtacctaat

SEQ ID NO: 248837 - DNA, 25 bp, probe
ggtcgggacaccagtgaaacttgaa

SEQ ID NO: 248838 - DNA, 25 bp, probe
gggtcgggacaccagtgaaacttga

SEQ ID NO: 248839 - DNA, 25 bp, probe
gggtcggacaacaagctcaagaccg

SEQ ID NO: 248840 - DNA, 25 bp, probe
gggtctggacaattcggcgaagtct

SEQ ID NO: 248841 - DNA, 25 bp, probe
ggggtggccatatttgggcagttcc

SEQ ID NO: 248842 - DNA, 25 bp, probe
ggggtggccatatttgggcagttcc

SEQ ID NO: 248843 - DNA, 25 bp, probe
gggttcccctgatgggagtcatcaa

SEQ ID NO: 248844 - DNA, 25 bp, probe
gggttctcctttatgaaatgctgat

SEQ ID NO: 248845 - DNA, 25 bp, probe
gggtgtccgtgtaattgacaacgtg

SEQ ID NO: 248846 - DNA, 25 bp, probe
gggtgtccgtgtaattgacaacgtg

SEQ ID NO: 248847 - DNA, 25 bp, probe
ggtgtggcttctcacaatgaaacgg

SEQ ID NO: 248848 - DNA, 25 bp, probe
gggtccctgctgcaaaggacagtgg

SEQ ID NO: 248849 - DNA, 25 bp, probe
ggtgttccgagacaaggtcctggga

SEQ ID NO: 248850 - DNA, 25 bp, probe
gggtcaccaggtgacagggtctggg

SEQ ID NO: 248851 - DNA, 25 bp, probe
gggtcaccaggtgacagggtctggg

SEQ ID NO: 248852 - DNA, 25 bp, probe
gggtaaggtgggtcaggtgttgcgc

SEQ ID NO: 248853 - DNA, 25 bp, probe
gggtatagccggcacatggtggtga

SEQ ID NO: 248854 - DNA, 25 bp, probe
gggtttgcacaaattctgagttgga

SEQ ID NO: 248855 - DNA, 25 bp, probe
gggtttcacacaaaggaattgacat

SEQ ID NO: 248856 - DNA, 25 bp, probe
gggtcatttacaagaagttccacat

SEQ ID NO: 248857 - DNA, 25 bp, probe
gggtctttctcaggagcagttaagt

SEQ ID NO: 248858 - DNA, 25 bp, probe
gggttgatttcagcacctacagtgt

SEQ ID NO: 248859 - DNA, 25 bp, probe
gggtggatttctgagctctatccag

SEQ ID NO: 248860 - DNA, 25 bp, probe
gggtggtatcttggcagttgaagct

SEQ ID NO: 248861 - DNA, 25 bp, probe
gggttttattgccagttatagcttg

SEQ ID NO: 248862 - DNA, 25 bp, probe
gggtttgcttgcttaggagtagttg

SEQ ID NO: 248863 - DNA, 25 bp, probe
gggtttgcttgcttaggagtagttg

SEQ ID NO: 248864 - DNA, 25 bp, probe
gggtcttcattggttggactccttt

SEQ ID NO: 248865 - DNA, 25 bp, probe
ggagactaaactttatacttcattt

SEQ ID NO: 248866 - DNA, 25 bp, probe
gggtactgacctttatgacttcttt

SEQ ID NO: 248867 - DNA, 25 bp, probe
gggtactgacctttatgacttcttt

SEQ ID NO: 248868 - DNA, 25 bp, probe
gggtcactaactctggagtgagcct

SEQ ID NO: 248869 - DNA, 25 bp, probe
gggtatcgaatgtacaggaagagcc

SEQ ID NO: 248870 - DNA, 25 bp, probe
gggttgcatgaatctgcaggagaca

SEQ ID NO: 248871 - DNA, 25 bp, probe
gggttgcatgaatctgcaggagaca

SEQ ID NO: 248872 - DNA, 25 bp, probe
gggttcatagacctgaggcaatgag

SEQ ID NO: 248873 - DNA, 25 bp, probe
gggtaaaggcagccaggcgtgagca

SEQ ID NO: 248874 - DNA, 25 bp, probe
gggtaaaggcagccaggcgtgagca

SEQ ID NO: 248875 - DNA, 25 bp, probe
gggtatccggcagaatgggcatgca

SEQ ID NO: 248876 - DNA, 25 bp, probe
gggtaccaagatgaatgtgggaatc

SEQ ID NO: 248877 - DNA, 25 bp, probe
gggtaaccagcctaagtggaatctt

SEQ ID NO: 248878 - DNA, 25 bp, probe
gggtacctcagttataaggagtctg

SEQ ID NO: 248879 - DNA, 25 bp, probe
gggtcacttccttcatgtaagactt

SEQ ID NO: 248880 - DNA, 25 bp, probe
tggggactgtcctactgtaacccct

SEQ ID NO: 248881 - DNA, 25 bp, probe
gggtattcttcatgcaggagacccc

SEQ ID NO: 248882 - DNA, 25 bp, probe
gggtttctgccatggacaaattgcc

SEQ ID NO: 248883 - DNA, 25 bp, probe
ggtgtctagctgttgtggactttag

SEQ ID NO: 248884 - DNA, 25 bp, probe
gggttaggcattaatgtttctatct

SEQ ID NO: 248885 - DNA, 25 bp, probe
gggtaaggcctgatcatagtattct

SEQ ID NO: 248886 - DNA, 25 bp, probe
gggtcaatggtgcaattagtaactt

SEQ ID NO: 248887 - DNA, 25 bp, probe
gggtcagctggtctctatgaatatg

SEQ ID NO: 248888 - DNA, 25 bp, probe
gggttgtcagatagtctatgtatgt

SEQ ID NO: 248889 - DNA, 25 bp, probe
gggttgtcagatagtctatgtatgt

SEQ ID NO: 248890 - DNA, 25 bp, probe
gggtgtacagctagctgttgctctg

SEQ ID NO: 248891 - DNA, 25 bp, probe
gggtgctgacagagctagtgtccaa

SEQ ID NO: 248892 - DNA, 25 bp, probe
gggttatcaatgccaagtgtgcaca

SEQ ID NO: 248893 - DNA, 25 bp, probe
gggtcttagcattgatcagtgacac

SEQ ID NO: 248894 - DNA, 25 bp, probe
gggtctgctagcaaggggacacgtg

SEQ ID NO: 248895 - DNA, 25 bp, probe
gggtctgctagcaaggggacacgtg

SEQ ID NO: 248896 - DNA, 25 bp, probe
gggtctccacaacatggaagatgtc

SEQ ID NO: 248897 - DNA, 25 bp, probe
gggtctaccagagtcagagatcagc

SEQ ID NO: 248898 - DNA, 25 bp, probe
gggtctaccagagtcagagatcagc

SEQ ID NO: 248899 - DNA, 25 bp, probe
gggtcatgtcacacatggatgatcc

SEQ ID NO: 248900 - DNA, 25 bp, probe
ggggcagatcacagatggcatggtc

SEQ ID NO: 248901 - DNA, 25 bp, probe
gggtcaacatcccagagagtgtctg

SEQ ID NO: 248902 - DNA, 25 bp, probe
gggtcatcaatgctggcaagagtcg

SEQ ID NO: 248903 - DNA, 25 bp, probe
gggtacacgagcacaacgtgcaggt

SEQ ID NO: 248904 - DNA, 25 bp, probe
gggtcacccacatcaaggtcatgtg

SEQ ID NO: 248905 - DNA, 25 bp, probe
gggtaccacatggtccatttcatgt

SEQ ID NO: 248906 - DNA, 25 bp, probe
ggctcaagccctgtcagattttgag

SEQ ID NO: 248907 - DNA, 25 bp, probe
ggtcccccaggaagatctttgggat

SEQ ID NO: 248908 - DNA, 25 bp, probe
ggtcccccaggaagatctttgggat

SEQ ID NO: 248909 - DNA, 25 bp, probe
ggtttccaaggtgcacattttccac

SEQ ID NO: 248910 - DNA, 25 bp, probe
ggttgcctaaagtggctatagttac

SEQ ID NO: 248911 - DNA, 25 bp, probe
ggttgcctaaagtggctatagttac

SEQ ID NO: 248912 - DNA, 25 bp, probe
ggtgatgcctaaaggaatgtcacgc

SEQ ID NO: 248913 - DNA, 25 bp, probe
ggtgagcagtacatgaacacccggt

SEQ ID NO: 248914 - DNA, 25 bp, probe
ggtgaaggagctgaaccgtctgggg

SEQ ID NO: 248915 - DNA, 25 bp, probe
ggagaagggtaataggttggttgca

SEQ ID NO: 248916 - DNA, 25 bp, probe
ggggggacgctataggatgtgggga

SEQ ID NO: 248917 - DNA, 25 bp, probe
gggtgggaaggtaaggatggtcgtg

SEQ ID NO: 248918 - DNA, 25 bp, probe
gggtgggaggattgtttgaggccgg

SEQ ID NO: 248919 - DNA, 25 bp, probe
gggtggaagatgtttatgccaggcc

SEQ ID NO: 248920 - DNA, 25 bp, probe
gggtggaagatgtttatgccaggcc

SEQ ID NO: 248921 - DNA, 25 bp, probe
ggggtgaagcggcatcaccacaagc

SEQ ID NO: 248922 - DNA, 25 bp, probe
ggggtcatcaggacggacccatcat

SEQ ID NO: 248923 - DNA, 25 bp, probe
ggggagcactggattgctctcccat

SEQ ID NO: 248924 - DNA, 25 bp, probe
ggaggacactttgtgatttccatta

SEQ ID NO: 248925 - DNA, 25 bp, probe
ggggttcttggctaaatcccatcca

SEQ ID NO: 248926 - DNA, 25 bp, probe
ggggttgctgtagagatagccccca

SEQ ID NO: 248927 - DNA, 25 bp, probe
ggggttgttggcctgaagatgcccc

SEQ ID NO: 248928 - DNA, 25 bp, probe
gggtgtctggaagctgagcaggccc

SEQ ID NO: 248929 - DNA, 25 bp, probe
gggtgcgtagataatctgacaggca

SEQ ID NO: 248930 - DNA, 25 bp, probe
gggtgcgtagataatctgacaggca

SEQ ID NO: 248931 - DNA, 25 bp, probe
gggtgctgtgtgagcattactggct

SEQ ID NO: 248932 - DNA, 25 bp, probe
gggtctggcagaattctatcatcct

SEQ ID NO: 248933 - DNA, 25 bp, probe
gggtcagtgcaggttatgagatcct

SEQ ID NO: 248934 - DNA, 25 bp, probe
ggtgctaatgcaagctttgagaagg

SEQ ID NO: 248935 - DNA, 25 bp, probe
ggtgctaatgcaagctttgagaagg

SEQ ID NO: 248936 - DNA, 25 bp, probe
ggtgtaagtgccatctggtagctgt

SEQ ID NO: 248937 - DNA, 25 bp, probe
gggtgcaagtaggtctgattgagct

SEQ ID NO: 248938 - DNA, 25 bp, probe
gggtgaagctggtcatcttcgtcat

SEQ ID NO: 248939 - DNA, 25 bp, probe
gggtgcatagctgttttagctgagg

SEQ ID NO: 248940 - DNA, 25 bp, probe
gggtgtcagatccttaaacgtgtgt

SEQ ID NO: 248941 - DNA, 25 bp, probe
gggtacagacagagaagcacgtgtt

SEQ ID NO: 248942 - DNA, 25 bp, probe
tcgtgaacaaaattaaccgtgctaa

SEQ ID NO: 248943 - DNA, 25 bp, probe
tcgtgaacaaaattaaccgtgctaa

SEQ ID NO: 248944 - DNA, 25 bp, probe
ggtgaaatttggtgagactggctaa

SEQ ID NO: 248945 - DNA, 25 bp, probe
ggtgaaatttggtgagactggctaa

SEQ ID NO: 248946 - DNA, 25 bp, probe
ggtaagtttcagtggagctcagagg

SEQ ID NO: 248947 - DNA, 25 bp, probe
ggggagtctttgtggattctgaggc

SEQ ID NO: 248948 - DNA, 25 bp, probe
ggggattgtgttttgtcactctaga

SEQ ID NO: 248949 - DNA, 25 bp, probe
ggggattgtgttttgtcactctaga

SEQ ID NO: 248950 - DNA, 25 bp, probe
gggtgatttgttgattggcaatgag

SEQ ID NO: 248951 - DNA, 25 bp, probe
ggggcacatgccttggatttgaaga

SEQ ID NO: 248952 - DNA, 25 bp, probe
gggtgcagagcgtggttgtatctgg

SEQ ID NO: 248953 - DNA, 25 bp, probe
ggggaacctgaggcttgttcttgaa

SEQ ID NO: 248954 - DNA, 25 bp, probe
ggggaacccagacatcttaaagaat

SEQ ID NO: 248955 - DNA, 25 bp, probe
ggggaacccagacatcttaaagaat

SEQ ID NO: 248956 - DNA, 25 bp, probe
tggggtgacccgaggcttgggagac

SEQ ID NO: 248957 - DNA, 25 bp, probe
gggggaccctttgtcatgaagagcc

SEQ ID NO: 248958 - DNA, 25 bp, probe
ggagggaaccatgtctccagaagcc

SEQ ID NO: 248959 - DNA, 25 bp, probe
ggagggaagctttgcctcctaatcc

SEQ ID NO: 248960 - DNA, 25 bp, probe
gggggaccttctactcagaatatcc

SEQ ID NO: 248961 - DNA, 25 bp, probe
gggggaccttctactcagaatatcc

SEQ ID NO: 248962 - DNA, 25 bp, probe
gggtggaatctaaatcattaactcc

SEQ ID NO: 248963 - DNA, 25 bp, probe
gggggaggcaacaacaaaatcgcac

SEQ ID NO: 248964 - DNA, 25 bp, probe
gggtgtggcagatctactgaatatc

SEQ ID NO: 248965 - DNA, 25 bp, probe
gggtgctagcgttgagacgactcac

SEQ ID NO: 248966 - DNA, 25 bp, probe
ggtgtctatgagataggcggcctcg

SEQ ID NO: 248967 - DNA, 25 bp, probe
gggtttgagcagaacgggcccagtg

SEQ ID NO: 248968 - DNA, 25 bp, probe
gggggtgtgcagaatgggccccctg

SEQ ID NO: 248969 - DNA, 25 bp, probe
ggggagggtaatgtgcaccacaggg

SEQ ID NO: 248970 - DNA, 25 bp, probe
ggggagggtaggtgagagtcagggt

SEQ ID NO: 248971 - DNA, 25 bp, probe
gggtcatggggagggtagcaccagg

SEQ ID NO: 248972 - DNA, 25 bp, probe
gggtatggtgagacggtgacgagag

SEQ ID NO: 248973 - DNA, 25 bp, probe
gggtgatggctgtgcccagaagaac

SEQ ID NO: 248974 - DNA, 25 bp, probe
gggtggcctgtatctagaagctaga

SEQ ID NO: 248975 - DNA, 25 bp, probe
gggtggcctgtatctagaagctaga

SEQ ID NO: 248976 - DNA, 25 bp, probe
gggtgcccttacttcagcaaaggag

SEQ ID NO: 248977 - DNA, 25 bp, probe
gggggtgtctaggtagcaacaggta

SEQ ID NO: 248978 - DNA, 25 bp, probe
ggggagtaataggaccagagcggta

SEQ ID NO: 248979 - DNA, 25 bp, probe
ggggatttataaactcatcagggac

SEQ ID NO: 248980 - DNA, 25 bp, probe
ggggcttttggaattcgcattgaga

SEQ ID NO: 248981 - DNA, 25 bp, probe
ggggcttttatgtttgtccgatgga

SEQ ID NO: 248982 - DNA, 25 bp, probe
gggtcttttttgaatgtccatgagg

SEQ ID NO: 248983 - DNA, 25 bp, probe
gggtctttgtctagggaggaaggag

SEQ ID NO: 248984 - DNA, 25 bp, probe
gggtctttgtctagggaggaaggag

SEQ ID NO: 248985 - DNA, 25 bp, probe
gggtcgaccgggagaggaaggtgag

SEQ ID NO: 248986 - DNA, 25 bp, probe
gggtctgaaaggttgggggaggctg

SEQ ID NO: 248987 - DNA, 25 bp, probe
gggtgaaggggatagggcgaggctg

SEQ ID NO: 248988 - DNA, 25 bp, probe
gggtgggagtaacagggcagaaatg

SEQ ID NO: 248989 - DNA, 25 bp, probe
gggtgggagaaagggtaggagatgt

SEQ ID NO: 248990 - DNA, 25 bp, probe
ggggggtgaagaaagtgcaagggct

SEQ ID NO: 248991 - DNA, 25 bp, probe
gggtggacgctacacagtgggtggt

SEQ ID NO: 248992 - DNA, 25 bp, probe
gggtgagccagtggaacagcgggag

SEQ ID NO: 248993 - DNA, 25 bp, probe
gggggcaaggagaaagcaccgacaa

SEQ ID NO: 248994 - DNA, 25 bp, probe
ggggaaagccaggatggcccgagga

SEQ ID NO: 248995 - DNA, 25 bp, probe
ggggaaagccaggatggcccgagga

SEQ ID NO: 248996 - DNA, 25 bp, probe
ggggagtagctattgggaacaggga

SEQ ID NO: 248997 - DNA, 25 bp, probe
gggtagaagtggtggacctgtgcaa

SEQ ID NO: 248998 - DNA, 25 bp, probe
gggtgaaagtggtttagtgctagaa

SEQ ID NO: 248999 - DNA, 25 bp, probe
gggtgcaaacttgttttctatctcc

SEQ ID NO: 249000 - DNA, 25 bp, probe
gggggagacttgatgttccacatcc

SEQ ID NO: 249001 - DNA, 25 bp, probe
gggggagacttgatgttccacatcc

SEQ ID NO: 249002 - DNA, 25 bp, probe
ggggtggaccgaatttggcaagaat

SEQ ID NO: 249003 - DNA, 25 bp, probe
gggtgtatgacccagttgtcctgaa

SEQ ID NO: 249004 - DNA, 25 bp, probe
ggggatgtacagcagttctacgacc

SEQ ID NO: 249005 - DNA, 25 bp, probe
ggaggaaaaggacccatacggctcg

SEQ ID NO: 249006 - DNA, 25 bp, probe
ggggcaaacggagtacagacgtctc

SEQ ID NO: 249007 - DNA, 25 bp, probe
ggggaaccgcgagatagggcagatc

SEQ ID NO: 249008 - DNA, 25 bp, probe
ggggaccccagatgaggtggtgtgg

SEQ ID NO: 249009 - DNA, 25 bp, probe
gggggcccaggatgtagatattgta

SEQ ID NO: 249010 - DNA, 25 bp, probe
ggaggccctgatggtactaaagttc

SEQ ID NO: 249011 - DNA, 25 bp, probe
ggggagtctttgcaccaaagatgtc

SEQ ID NO: 249012 - DNA, 25 bp, probe
ggggatttcatctgagccagtcagt

SEQ ID NO: 249013 - DNA, 25 bp, probe
gggtcaggtatgtgagctctatggt

SEQ ID NO: 249014 - DNA, 25 bp, probe
gggtgctggtgatgacacactttgt

SEQ ID NO: 249015 - DNA, 25 bp, probe
gggtgaagccatagaacatatttgc

SEQ ID NO: 249016 - DNA, 25 bp, probe
gggtgccatggcagctacatattct

SEQ ID NO: 249017 - DNA, 25 bp, probe
gggtcactaccagtacaagagcatc

SEQ ID NO: 249018 - DNA, 25 bp, probe
gggtgcactacttctaaggatgccc

SEQ ID NO: 249019 - DNA, 25 bp, probe
gggtcttgactcttaatgcatgtgg

SEQ ID NO: 249020 - DNA, 25 bp, probe
gggtatcatggctattgagatggta

SEQ ID NO: 249021 - DNA, 25 bp, probe
gggtgactgcagattatgatggtaa

SEQ ID NO: 249022 - DNA, 25 bp, probe
gggtgcagcaggctcaaaggcataa

SEQ ID NO: 249023 - DNA, 25 bp, probe
gggtcatcagagccacaattacaac

SEQ ID NO: 249024 - DNA, 25 bp, probe
gggtgctatgattcaccaaaacaac

SEQ ID NO: 249025 - DNA, 25 bp, probe
gggtgaataatctcaacaaacagca

SEQ ID NO: 249026 - DNA, 25 bp, probe
gggtgtgatacagcctacataaaga

SEQ ID NO: 249027 - DNA, 25 bp, probe
gggtggcaagtggcctcagagaaac

SEQ ID NO: 249028 - DNA, 25 bp, probe
gggggaagtcacagatgaagcacct

SEQ ID NO: 249029 - DNA, 25 bp, probe
ggggagggccgcagaaaggccttct

SEQ ID NO: 249030 - DNA, 25 bp, probe
gggtggaggaggtgaactgggcttc

SEQ ID NO: 249031 - DNA, 25 bp, probe
ggggttgtaggtgaaggagcctatg

SEQ ID NO: 249032 - DNA, 25 bp, probe
ggggttgtaggtgaaggagcctatg

SEQ ID NO: 249033 - DNA, 25 bp, probe
ggggtcttcaggtcagaatggagat

SEQ ID NO: 249034 - DNA, 25 bp, probe
gggtgtcctgaacagcaaggttggc

SEQ ID NO: 249035 - DNA, 25 bp, probe
gggtgtcctgaacagcaaggttggc

SEQ ID NO: 249036 - DNA, 25 bp, probe
ggggtactgcaggggaagggctggc

SEQ ID NO: 249037 - DNA, 25 bp, probe
ggggtactgcaggggaagggctggc

SEQ ID NO: 249038 - DNA, 25 bp, probe
gggtgaaccatggggcgagagaggc

SEQ ID NO: 249039 - DNA, 25 bp, probe
gggtgaagccatgtgtagcagttcc

SEQ ID NO: 249040 - DNA, 25 bp, probe
gggtgaagccatgtgtagcagttcc

SEQ ID NO: 249041 - DNA, 25 bp, probe
gggggcacacagagtgagcagtacc

SEQ ID NO: 249042 - DNA, 25 bp, probe
gggtcctgccagagggcagtgaggg

SEQ ID NO: 249043 - DNA, 25 bp, probe
gggtcctgccagagggcagtgaggg

SEQ ID NO: 249044 - DNA, 25 bp, probe
gggtctcgtcaggaggtgcctgaga

SEQ ID NO: 249045 - DNA, 25 bp, probe
gggtccaatcatgaggcacctaata

SEQ ID NO: 249046 - DNA, 25 bp, probe
gggtccaatcatgaggcacctaata

SEQ ID NO: 249047 - DNA, 25 bp, probe
gggtactatcattagtcccatgtta

SEQ ID NO: 249048 - DNA, 25 bp, probe
ggggagaaatcatctcccagcaata

SEQ ID NO: 249049 - DNA, 25 bp, probe
ggggagaaatcatctcccagcaata

SEQ ID NO: 249050 - DNA, 25 bp, probe
gggtgataaccagacattcatggaa

SEQ ID NO: 249051 - DNA, 25 bp, probe
ggggactaccagagactctgggaaa

SEQ ID NO: 249052 - DNA, 25 bp, probe
ggggcctcaacagaactaaagaaga

SEQ ID NO: 249053 - DNA, 25 bp, probe
ggcggcaacgacaaagaaaaggaag

SEQ ID NO: 249054 - DNA, 25 bp, probe
gggtcatcctgagaaggtcatggga

SEQ ID NO: 249055 - DNA, 25 bp, probe
gggtcccacataaagcagtcaggaa

SEQ ID NO: 249056 - DNA, 25 bp, probe
gggtcgcagccatgaagtgtcacca

SEQ ID NO: 249057 - DNA, 25 bp, probe
gggtggcagtcacggagtgaatcct

SEQ ID NO: 249058 - DNA, 25 bp, probe
ggggatggggcccaggaatctgcat

SEQ ID NO: 249059 - DNA, 25 bp, probe
gggtggggagggagatatttatttg

SEQ ID NO: 249060 - DNA, 25 bp, probe
tatgtgggtctgtgaatttctttaa

SEQ ID NO: 249061 - DNA, 25 bp, probe
ggggctgggggaaggaagcaaacag

SEQ ID NO: 249062 - DNA, 25 bp, probe
ggggtgctgggcttaagggccagaa

SEQ ID NO: 249063 - DNA, 25 bp, probe
ggggtcatgtgtgttaggaacatca

SEQ ID NO: 249064 - DNA, 25 bp, probe
gggtggctgcacgatttatggaaaa

SEQ ID NO: 249065 - DNA, 25 bp, probe
gggtgctaaatgtttgatggggaaa

SEQ ID NO: 249066 - DNA, 25 bp, probe
gggtgctaaatgtttgatggggaaa

SEQ ID NO: 249067 - DNA, 25 bp, probe
ggggaatgactagaatggggcaata

SEQ ID NO: 249068 - DNA, 25 bp, probe
ggggaagacgcccattgagacactg

SEQ ID NO: 249069 - DNA, 25 bp, probe
gggtgggatccacactgagagagtg

SEQ ID NO: 249070 - DNA, 25 bp, probe
gggtgggaatgtccactggaaagaa

SEQ ID NO: 249071 - DNA, 25 bp, probe
gggtgggaacaggcagagggacaag

SEQ ID NO: 249072 - DNA, 25 bp, probe
gggtgggaacaggcagagggacaag

SEQ ID NO: 249073 - DNA, 25 bp, probe
ggtagggacacagatgaccgacctg

SEQ ID NO: 249074 - DNA, 25 bp, probe
ggtcaggaaccacctcaaaaagtgc

SEQ ID NO: 249075 - DNA, 25 bp, probe
ggtcaggaaccacctcaaaaagtgc

SEQ ID NO: 249076 - DNA, 25 bp, probe
ggtcctgctacccagtaaaaatcca

SEQ ID NO: 249077 - DNA, 25 bp, probe
ggttcgttaccgtgaacgcatcacc

SEQ ID NO: 249078 - DNA, 25 bp, probe
gggtcgttaccagagatttacccat

SEQ ID NO: 249079 - DNA, 25 bp, probe
gggtcgtaaatgacgagctttaccg

SEQ ID NO: 249080 - DNA, 25 bp, probe
ggtgtgttaactattgccttaccgg

SEQ ID NO: 249081 - DNA, 25 bp, probe
ggggtgtaactgcttgtctttcagc

SEQ ID NO: 249082 - DNA, 25 bp, probe
gggggcaagcggctttgtttcagcc

SEQ ID NO: 249083 - DNA, 25 bp, probe
gggggcaagcggctttgtttcagcc

SEQ ID NO: 249084 - DNA, 25 bp, probe
ggggtgaagggacacagtcttgagc

SEQ ID NO: 249085 - DNA, 25 bp, probe
gggggtcaggaacactacactgcac

SEQ ID NO: 249086 - DNA, 25 bp, probe
gggggtcaggaacactacactgcac

SEQ ID NO: 249087 - DNA, 25 bp, probe
gggggtgcaggaagctcaacccctc

SEQ ID NO: 249088 - DNA, 25 bp, probe
gggggtctgagtctagagcccccaa

SEQ ID NO: 249089 - DNA, 25 bp, probe
gggtggttgaatgatttcccactca

SEQ ID NO: 249090 - DNA, 25 bp, probe
gggtgacgtggtgaggatctacagc

SEQ ID NO: 249091 - DNA, 25 bp, probe
gggtggtggtgataggtataagtgg

SEQ ID NO: 249092 - DNA, 25 bp, probe
ggggcatgggtggctacgtaaagat

SEQ ID NO: 249093 - DNA, 25 bp, probe
ggtgtgtgaggtgttcgttgaaagg

SEQ ID NO: 249094 - DNA, 25 bp, probe
ggtgtgtgggagaagttttataatt

SEQ ID NO: 249095 - DNA, 25 bp, probe
ggtgtgtgggagaagttttataatt

SEQ ID NO: 249096 - DNA, 25 bp, probe
ggggtgtggaggacttaatcaaatc

SEQ ID NO: 249097 - DNA, 25 bp, probe
ggggtgtggaggacttaatcaaatc

SEQ ID NO: 249098 - DNA, 25 bp, probe
ggcggagttggtacttttgctatac

SEQ ID NO: 249099 - DNA, 25 bp, probe
ggggagtcggttagtcattgataga

SEQ ID NO: 249100 - DNA, 25 bp, probe
ggggagtcggttagtcattgataga

SEQ ID NO: 249101 - DNA, 25 bp, probe
gggggatcctgttatttatgacaac

SEQ ID NO: 249102 - DNA, 25 bp, probe
ggtgctggtttatgttctaggaact

SEQ ID NO: 249103 - DNA, 25 bp, probe
ggggagtgttaaattccaaacagct

SEQ ID NO: 249104 - DNA, 25 bp, probe
ggggaggttccacattgaaaacaca

SEQ ID NO: 249105 - DNA, 25 bp, probe
ggtgctatcgttcaacttcaaaaca

SEQ ID NO: 249106 - DNA, 25 bp, probe
gggtcgtcttgtttctagcaaaaca

SEQ ID NO: 249107 - DNA, 25 bp, probe
gggtcgtcttgtttctagcaaaaca

SEQ ID NO: 249108 - DNA, 25 bp, probe
gggtcctattgtttgggacacagac

SEQ ID NO: 249109 - DNA, 25 bp, probe
gggtgggtgatttagggacagccag

SEQ ID NO: 249110 - DNA, 25 bp, probe
gggtggaggtggagtggctacacga

SEQ ID NO: 249111 - DNA, 25 bp, probe
ggtaggagttggggggctccactga

SEQ ID NO: 249112 - DNA, 25 bp, probe
ggtgggggtgagggtagcccttgag

SEQ ID NO: 249113 - DNA, 25 bp, probe
ggtgtgtggggacattccctttgag

SEQ ID NO: 249114 - DNA, 25 bp, probe
ggtgtgtggggacattccctttgag

SEQ ID NO: 249115 - DNA, 25 bp, probe
gggtgttggttgcattttctttgaa

SEQ ID NO: 249116 - DNA, 25 bp, probe
gggtgatcatggctgttttgtcttt

SEQ ID NO: 249117 - DNA, 25 bp, probe
ggtgacttgcggatttatgtttcag

SEQ ID NO: 249118 - DNA, 25 bp, probe
ggggtccagtgcattttgtttctgt

SEQ ID NO: 249119 - DNA, 25 bp, probe
ggggtacagtttttggcattgctag

SEQ ID NO: 249120 - DNA, 25 bp, probe
ggggtccacttgtctgtaatggggt

SEQ ID NO: 249121 - DNA, 25 bp, probe
ggtgttgccaaatatgtcctggggt

SEQ ID NO: 249122 - DNA, 25 bp, probe
ggtgttgccaaatatgtcctggggt

SEQ ID NO: 249123 - DNA, 25 bp, probe
gggtcagcacgttcagttacgggag

SEQ ID NO: 249124 - DNA, 25 bp, probe
gggtcagaaggattcctatgtgggc

SEQ ID NO: 249125 - DNA, 25 bp, probe
gggtccaatgtgtgacttgctgtgg

SEQ ID NO: 249126 - DNA, 25 bp, probe
gggtctctactgtatgaactgctga

SEQ ID NO: 249127 - DNA, 25 bp, probe
gggtctctactgtatgaactgctga

SEQ ID NO: 249128 - DNA, 25 bp, probe
gggtctctgctatatgtatctatga

SEQ ID NO: 249129 - DNA, 25 bp, probe
gggtcagcagcttagtgtatcaaca

SEQ ID NO: 249130 - DNA, 25 bp, probe
gggtcactgctgtatggactcatcc

SEQ ID NO: 249131 - DNA, 25 bp, probe
gggtcactgctctatggacttatcc

SEQ ID NO: 249132 - DNA, 25 bp, probe
gggtctcacatcaatggaaatcttc

SEQ ID NO: 249133 - DNA, 25 bp, probe
gggtggatgctcatggaaatattct

SEQ ID NO: 249134 - DNA, 25 bp, probe
gggggattccatcaaaactgttgtt

SEQ ID NO: 249135 - DNA, 25 bp, probe
ggggatgttccacacaaacttaaat

SEQ ID NO: 249136 - DNA, 25 bp, probe
ggtgggaatcccaaaactgcttaga

SEQ ID NO: 249137 - DNA, 25 bp, probe
ggtgggaatcccaaaactgcttaga

SEQ ID NO: 249138 - DNA, 25 bp, probe
gggggaatgtcttacaacctgagga

SEQ ID NO: 249139 - DNA, 25 bp, probe
ggggaagagttgtacgcccaggcaa

SEQ ID NO: 249140 - DNA, 25 bp, probe
ggggttgtgttgtcacccaagagat

SEQ ID NO: 249141 - DNA, 25 bp, probe
gggggtgggtggggtgaagagatct

SEQ ID NO: 249142 - DNA, 25 bp, probe
ggggagtaggtgggggaacactgag

SEQ ID NO: 249143 - DNA, 25 bp, probe
gggggtcgagtccagtgagaaactc

SEQ ID NO: 249144 - DNA, 25 bp, probe
gggggatggagaggaggtctaccat

SEQ ID NO: 249145 - DNA, 25 bp, probe
gggtggacgctgtgggcttcagcgt

SEQ ID NO: 249146 - DNA, 25 bp, probe
gggtggtcgtgaggtgactgagcag

SEQ ID NO: 249147 - DNA, 25 bp, probe
ggggttgctggaggtgacaaggatt

SEQ ID NO: 249148 - DNA, 25 bp, probe
gggtgatgctggtgaggcaccagga

SEQ ID NO: 249149 - DNA, 25 bp, probe
gggtcatggagaagcgggcctggaa

SEQ ID NO: 249150 - DNA, 25 bp, probe
gggtcattatcaactgggactgtga

SEQ ID NO: 249151 - DNA, 25 bp, probe
gggtctcctcgggggagcagatgag

SEQ ID NO: 249152 - DNA, 25 bp, probe
gggtctgaccccttgtgggatgaaa

SEQ ID NO: 249153 - DNA, 25 bp, probe
gggggacctccatggggatggagga

SEQ ID NO: 249154 - DNA, 25 bp, probe
ggtggaggctatgctttggggggac

SEQ ID NO: 249155 - DNA, 25 bp, probe
ggtggaggctatgctttggggggac

SEQ ID NO: 249156 - DNA, 25 bp, probe
ggtggaggctatgctttggggggac

SEQ ID NO: 249157 - DNA, 25 bp, probe
gggtgatggtatggatgctgttggg

SEQ ID NO: 249158 - DNA, 25 bp, probe
ggggtggttgtggttatgtgcagga

SEQ ID NO: 249159 - DNA, 25 bp, probe
ggggttgtgtgtgttaggcagagct

SEQ ID NO: 249160 - DNA, 25 bp, probe
ggggttgtgtgtgttaggcagagct

SEQ ID NO: 249161 - DNA, 25 bp, probe
ggggttgatgggctgggtgcatgcc

SEQ ID NO: 249162 - DNA, 25 bp, probe
ggggttgatgggctgggtgcatgcc

SEQ ID NO: 249163 - DNA, 25 bp, probe
ggggagttaggcatggggagctcca

SEQ ID NO: 249164 - DNA, 25 bp, probe
ggggagttaggcatggggagctcca

SEQ ID NO: 249165 - DNA, 25 bp, probe
ggggttttctcacggaaatgttcag

SEQ ID NO: 249166 - DNA, 25 bp, probe
ggggtgacactgtgggaaatgttca

SEQ ID NO: 249167 - DNA, 25 bp, probe
gggggaatgctgtcgggactgagca

SEQ ID NO: 249168 - DNA, 25 bp, probe
gggtgtccagaatctgcgtctgaga

SEQ ID NO: 249169 - DNA, 25 bp, probe
ggggatccagtatctctttgaggat

SEQ ID NO: 249170 - DNA, 25 bp, probe
ggggaccagctaacactggctgatt

SEQ ID NO: 249171 - DNA, 25 bp, probe
ggggaccagctaacactggctgatt

SEQ ID NO: 249172 - DNA, 25 bp, probe
ggaggaggctccaatacgactactc

SEQ ID NO: 249173 - DNA, 25 bp, probe
ggtgggactcctgattatgtaactc

SEQ ID NO: 249174 - DNA, 25 bp, probe
gggtggactggtgtgagggcagacc

SEQ ID NO: 249175 - DNA, 25 bp, probe
gggtggactcagatgggtgggacac

SEQ ID NO: 249176 - DNA, 25 bp, probe
gggtcgcctggattgggatgagaac

SEQ ID NO: 249177 - DNA, 25 bp, probe
gggtctgccatgctctggaggagca

SEQ ID NO: 249178 - DNA, 25 bp, probe
ggggatgcacatttcgatgaggacg

SEQ ID NO: 249179 - DNA, 25 bp, probe
gggtggatcatgtgcttgagcagac

SEQ ID NO: 249180 - DNA, 25 bp, probe
gggtggatcatgtgcttgagcagac

SEQ ID NO: 249181 - DNA, 25 bp, probe
gggtgacaatgatgctgagacgctg

SEQ ID NO: 249182 - DNA, 25 bp, probe
gggtgcctattacctgaagctggag

SEQ ID NO: 249183 - DNA, 25 bp, probe
gggtgcctttatgcagcaaggatgt

SEQ ID NO: 249184 - DNA, 25 bp, probe
gggtgtgtttgaaatcatcggagtc

SEQ ID NO: 249185 - DNA, 25 bp, probe
gggtggtttatctgcatggtattgg

SEQ ID NO: 249186 - DNA, 25 bp, probe
gggtggttcaagggcaggtagctga

SEQ ID NO: 249187 - DNA, 25 bp, probe
ggtaggtgacacgtggactctagta

SEQ ID NO: 249188 - DNA, 25 bp, probe
ggtgaggggaccctactctgttatc

SEQ ID NO: 249189 - DNA, 25 bp, probe
gggtggagggccagagtgtgtatac

SEQ ID NO: 249190 - DNA, 25 bp, probe
gggtgtcgagtgcggagcagttgat

SEQ ID NO: 249191 - DNA, 25 bp, probe
ggggtcacggtactagcatttgtta

SEQ ID NO: 249192 - DNA, 25 bp, probe
ggggatccctgtagtgagttttgga

SEQ ID NO: 249193 - DNA, 25 bp, probe
ggggcactttgtacaaatccttgta

SEQ ID NO: 249194 - DNA, 25 bp, probe
ggtggacttgtttacacaccctggt

SEQ ID NO: 249195 - DNA, 25 bp, probe
gggtgagcagtacatgaacacccgg

SEQ ID NO: 249196 - DNA, 25 bp, probe
gggtggcagtgaggaccaccttcac

SEQ ID NO: 249197 - DNA, 25 bp, probe
gggtcgcattataacagtcgtgtac

SEQ ID NO: 249198 - DNA, 25 bp, probe
gggtcgcattataacagtcgtgtac

SEQ ID NO: 249199 - DNA, 25 bp, probe
gggtggatgtgaaacgggatgtgag

SEQ ID NO: 249200 - DNA, 25 bp, probe
gggtgagcagattggacgggggaac

SEQ ID NO: 249201 - DNA, 25 bp, probe
ggggatgcgactgtagggtgggtcc

SEQ ID NO: 249202 - DNA, 25 bp, probe
ggggatgcgactgtagggtgggtcc

SEQ ID NO: 249203 - DNA, 25 bp, probe
gggtgatgcagggaggaggggaggt

SEQ ID NO: 249204 - DNA, 25 bp, probe
gggtgagaagtacagggcagaacca

SEQ ID NO: 249205 - DNA, 25 bp, probe
gggtgaaagtgattatgggaatcat

SEQ ID NO: 249206 - DNA, 25 bp, probe
gggtgaatctggcaatggtggacta

SEQ ID NO: 249207 - DNA, 25 bp, probe
gggtgcaccatgccagagttgtggc

SEQ ID NO: 249208 - DNA, 25 bp, probe
gggtcctgtgctggagtatatgaca

SEQ ID NO: 249209 - DNA, 25 bp, probe
gggtcctggatgcagttgatgacat

SEQ ID NO: 249210 - DNA, 25 bp, probe
gggtcctggatgcagttgatgacat

SEQ ID NO: 249211 - DNA, 25 bp, probe
gggtgcgctggaggagctggagaac

SEQ ID NO: 249212 - DNA, 25 bp, probe
gggtgcgctggaggagctggagaac

SEQ ID NO: 249213 - DNA, 25 bp, probe
gggtgtcgtgaccaagagcacacct

SEQ ID NO: 249214 - DNA, 25 bp, probe
gggtgctgtgtgtgacatagacacc

SEQ ID NO: 249215 - DNA, 25 bp, probe
ggggagtgggagtctcagcaatctc

SEQ ID NO: 249216 - DNA, 25 bp, probe
gggtgggaggacacaccatgctccc

SEQ ID NO: 249217 - DNA, 25 bp, probe
gggtgtgagaggaagccaccctcgc

SEQ ID NO: 249218 - DNA, 25 bp, probe
gggggcagaaggactcagcgcccct

SEQ ID NO: 249219 - DNA, 25 bp, probe
ggtgggcaatggccaccatgtctgc

SEQ ID NO: 249220 - DNA, 25 bp, probe
ggtgggcaatggccaccatgtctgc

SEQ ID NO: 249221 - DNA, 25 bp, probe
gggtggatttgttgccatgtgcacc

SEQ ID NO: 249222 - DNA, 25 bp, probe
gggtgaattctggatggcttgcctc

SEQ ID NO: 249223 - DNA, 25 bp, probe
gggtgttcatcatgaggattgcttc

SEQ ID NO: 249224 - DNA, 25 bp, probe
gggtgatcctctgggagatcttcac

SEQ ID NO: 249225 - DNA, 25 bp, probe
gggtgatcctctgggagatcttcac

SEQ ID NO: 249226 - DNA, 25 bp, probe
gggtgctcctgtgggagatcttcac

SEQ ID NO: 249227 - DNA, 25 bp, probe
gggtgctacttggtcattattcata

SEQ ID NO: 249228 - DNA, 25 bp, probe
gggtgtagctgggtacatattaagt

SEQ ID NO: 249229 - DNA, 25 bp, probe
ggggtacggtatatcttgaatgtca

SEQ ID NO: 249230 - DNA, 25 bp, probe
ggggaacgaggagatctgtgtttac

SEQ ID NO: 249231 - DNA, 25 bp, probe
gggtgaacaagggcaaagacattta

SEQ ID NO: 249232 - DNA, 25 bp, probe
gggtgacaagggtacactgacttca

SEQ ID NO: 249233 - DNA, 25 bp, probe
gggtgatcaccataatcatctggct

SEQ ID NO: 249234 - DNA, 25 bp, probe
gggtgatcaccataatcatctggct

SEQ ID NO: 249235 - DNA, 25 bp, probe
gggtgaaatttatcattggctatct

SEQ ID NO: 249236 - DNA, 25 bp, probe
ggggtggtttatctgcatggtattg

SEQ ID NO: 249237 - DNA, 25 bp, probe
gggggagttaaagctggcagatttc

SEQ ID NO: 249238 - DNA, 25 bp, probe
gggggagttaaagctggcagatttc

SEQ ID NO: 249239 - DNA, 25 bp, probe
gggggagctgcacagggtggcagtc

SEQ ID NO: 249240 - DNA, 25 bp, probe
gggggagctgcacagggtggcagtc

SEQ ID NO: 249241 - DNA, 25 bp, probe
gggggagctcagcaagcagtttgtc

SEQ ID NO: 249242 - DNA, 25 bp, probe
ggtggaagctagttctctgttggtc

SEQ ID NO: 249243 - DNA, 25 bp, probe
ggggacctagacctcaggtggtctc

SEQ ID NO: 249244 - DNA, 25 bp, probe
ggggacctagacctcaggtggtctc

SEQ ID NO: 249245 - DNA, 25 bp, probe
ggactacgtcgatctaggtgtgacc

SEQ ID NO: 249246 - DNA, 25 bp, probe
ggactacgtcgatctaggtgtgacc

SEQ ID NO: 249247 - DNA, 25 bp, probe
ggacgtttgtgatgatcacgttcct

SEQ ID NO: 249248 - DNA, 25 bp, probe
ggtggttgtgtgggaaacttccctg

SEQ ID NO: 249249 - DNA, 25 bp, probe
gggtgacactgtgggaaatgttcac

SEQ ID NO: 249250 - DNA, 25 bp, probe
gggtgaaggatgcagcagaatttgc

SEQ ID NO: 249251 - DNA, 25 bp, probe
gggtgagagggctctccatttgcta

SEQ ID NO: 249252 - DNA, 25 bp, probe
gggtgaagtctctgtccatgttgag

SEQ ID NO: 249253 - DNA, 25 bp, probe
gggtgaagtctctgtccatgttgag

SEQ ID NO: 249254 - DNA, 25 bp, probe
gggtgacttctctaccaagtctgat

SEQ ID NO: 249255 - DNA, 25 bp, probe
gggtgacttctctaccaagtctgat

SEQ ID NO: 249256 - DNA, 25 bp, probe
gggtgccttggaacgcaagtttatg

SEQ ID NO: 249257 - DNA, 25 bp, probe
ggggactcaggcaaccaaatacaat

SEQ ID NO: 249258 - DNA, 25 bp, probe
gggggcacaggaatgtcgaagcaaa

SEQ ID NO: 249259 - DNA, 25 bp, probe
gggggagcccaggtatgagaaagaa

SEQ ID NO: 249260 - DNA, 25 bp, probe
gggggagcccaggtatgagaaagaa

SEQ ID NO: 249261 - DNA, 25 bp, probe
ggggggaccctggagaatgcagaca

SEQ ID NO: 249262 - DNA, 25 bp, probe
gggtgggaacctatcatacagactg

SEQ ID NO: 249263 - DNA, 25 bp, probe
ggggataatacctatttcacaaggt

SEQ ID NO: 249264 - DNA, 25 bp, probe
ggggcaaatacctgatctgcaagat

SEQ ID NO: 249265 - DNA, 25 bp, probe
ggggcaaatacctgatctgcaagat

SEQ ID NO: 249266 - DNA, 25 bp, probe
gggggatatagccatgactcccgac

SEQ ID NO: 249267 - DNA, 25 bp, probe
ggggagtgatgtacatccaaccgtc

SEQ ID NO: 249268 - DNA, 25 bp, probe
ggggagctacatgtgtcaatgccgt

SEQ ID NO: 249269 - DNA, 25 bp, probe
gggtgatgtgaagatggcagacttc

SEQ ID NO: 249270 - DNA, 25 bp, probe
gggggtgaaacacctgcacgacaac

SEQ ID NO: 249271 - DNA, 25 bp, probe
gggtggtggaccttatggtccacac

SEQ ID NO: 249272 - DNA, 25 bp, probe
gggtggtggacctcatggcccacat

SEQ ID NO: 249273 - DNA, 25 bp, probe
gggtggggggatttatgcacgcaat

SEQ ID NO: 249274 - DNA, 25 bp, probe
gggtgggggaactcacatctgagca

SEQ ID NO: 249275 - DNA, 25 bp, probe
gggtgtgagggaccaatcctgtgac

SEQ ID NO: 249276 - DNA, 25 bp, probe
gggtgctggcggtgcacatgtttat

SEQ ID NO: 249277 - DNA, 25 bp, probe
gggtgctggcggtgcacatgtttat

SEQ ID NO: 249278 - DNA, 25 bp, probe
gggtgatgacgtaggacatgtgctt

SEQ ID NO: 249279 - DNA, 25 bp, probe
gggggacctatgcagaagctataag

SEQ ID NO: 249280 - DNA, 25 bp, probe
ggggcagcaccgtgaagacgaatat

SEQ ID NO: 249281 - DNA, 25 bp, probe
gggtgacaaggatggcagcctggag

SEQ ID NO: 249282 - DNA, 25 bp, probe
gggtgaacaacactgctggtttgag

SEQ ID NO: 249283 - DNA, 25 bp, probe
gggtgaacaacactgctggtttgag

SEQ ID NO: 249284 - DNA, 25 bp, probe
gggtgatcaagggtgtggttagtgg

SEQ ID NO: 249285 - DNA, 25 bp, probe
ggagtgacgaagggggctccagggg

SEQ ID NO: 249286 - DNA, 25 bp, probe
gggtgacgaatacgagctctacagg

SEQ ID NO: 249287 - DNA, 25 bp, probe
gggtgcactgacaaagtatagaagg

SEQ ID NO: 249288 - DNA, 25 bp, probe
gggtgacgcccaagtgaagcgcatg

SEQ ID NO: 249289 - DNA, 25 bp, probe
gggggctgcctcagtgcaatggcag

SEQ ID NO: 249290 - DNA, 25 bp, probe
gggtgtgctcacttacattatgctc

SEQ ID NO: 249291 - DNA, 25 bp, probe
gggtgtgctcacttacattatgctc

SEQ ID NO: 249292 - DNA, 25 bp, probe
gggtgtgctcacttacattatgctc

SEQ ID NO: 249293 - DNA, 25 bp, probe
ggggtgcagtcttacatgattgtcc

SEQ ID NO: 249294 - DNA, 25 bp, probe
ggggtgcagtcttacatgattgtcc

SEQ ID NO: 249295 - DNA, 25 bp, probe
ggggtcaggcagaatatggtgtcca

SEQ ID NO: 249296 - DNA, 25 bp, probe
ggggattgtaaaatggtgtgaccac

SEQ ID NO: 249297 - DNA, 25 bp, probe
gggtggtggaaaattcggagcactc

SEQ ID NO: 249298 - DNA, 25 bp, probe
gggtggtggaaaattcggagcactc

SEQ ID NO: 249299 - DNA, 25 bp, probe
gggtggtgtgaaggagtctgtgggc

SEQ ID NO: 249300 - DNA, 25 bp, probe
gggtggtggaatgatgcgtgatcgt

SEQ ID NO: 249301 - DNA, 25 bp, probe
gggtggtggaatgatgcgtgatcgt

SEQ ID NO: 249302 - DNA, 25 bp, probe
gggtgttgtatgtgtggtgacttgc

SEQ ID NO: 249303 - DNA, 25 bp, probe
ggggtcctgtgctggagtatatgac

SEQ ID NO: 249304 - DNA, 25 bp, probe
gggggcctgggccaggcatgatgtg

SEQ ID NO: 249305 - DNA, 25 bp, probe
gggggtgctgatgtacgagatgatg

SEQ ID NO: 249306 - DNA, 25 bp, probe
gggtgtggtcatgtacgagatgatg

SEQ ID NO: 249307 - DNA, 25 bp, probe
gggtgtgagtgcgtatgaaagtgtg

SEQ ID NO: 249308 - DNA, 25 bp, probe
ggggtggagccaaacaagtgtcagc

SEQ ID NO: 249309 - DNA, 25 bp, probe
gggtgtgcgacttggacaaggcctg

SEQ ID NO: 249310 - DNA, 25 bp, probe
gggtgtatagtgttcacaaactgtg

SEQ ID NO: 249311 - DNA, 25 bp, probe
gggtgtaagtgccatctggtagctg

SEQ ID NO: 249312 - DNA, 25 bp, probe
gggtgtgagagtggacggtatgtgt

SEQ ID NO: 249313 - DNA, 25 bp, probe
gggggaggtggcagttatgctgtta

SEQ ID NO: 249314 - DNA, 25 bp, probe
gggggaggatggtaatcacagcatt

SEQ ID NO: 249315 - DNA, 25 bp, probe
gggggcagggaaacacatggatgat

SEQ ID NO: 249316 - DNA, 25 bp, probe
gggggcagggaaacacatggatgat

SEQ ID NO: 249317 - DNA, 25 bp, probe
gggggagaaacaaaatctgcagatg

SEQ ID NO: 249318 - DNA, 25 bp, probe
ggggagagaatggctatttcaggat

SEQ ID NO: 249319 - DNA, 25 bp, probe
gggtgatatgttggtagattctaat

SEQ ID NO: 249320 - DNA, 25 bp, probe
ggggtatgagctgccaagtctattt

SEQ ID NO: 249321 - DNA, 25 bp, probe
ggtggttatattggcaacctattct

SEQ ID NO: 249322 - DNA, 25 bp, probe
ggggttgagaatggaatcctctgtg

SEQ ID NO: 249323 - DNA, 25 bp, probe
ggggtggacgagggagtgtctgtaa

SEQ ID NO: 249324 - DNA, 25 bp, probe
ggggggacaatctgactcgagtcaa

SEQ ID NO: 249325 - DNA, 25 bp, probe
gggggcaaaaatagagtcaggctcc

SEQ ID NO: 249326 - DNA, 25 bp, probe
gggggcaaaaatagagtcaggctcc

SEQ ID NO: 249327 - DNA, 25 bp, probe
ggggagcagagacactaacgacttc

SEQ ID NO: 249328 - DNA, 25 bp, probe
ggggacgaagccttagagggtgaca

SEQ ID NO: 249329 - DNA, 25 bp, probe
ggggactgtggagaactggactgac

SEQ ID NO: 249330 - DNA, 25 bp, probe
ggggacgctgtcacaggggacaggc

SEQ ID NO: 249331 - DNA, 25 bp, probe
ggggacgctgtcacaggggacaggc

SEQ ID NO: 249332 - DNA, 25 bp, probe
ggggaggtgtacaaggggatcgaca

SEQ ID NO: 249333 - DNA, 25 bp, probe
gggtgagggataaaatgaggctcca

SEQ ID NO: 249334 - DNA, 25 bp, probe
gggtgagggataaaatgaggctcca

SEQ ID NO: 249335 - DNA, 25 bp, probe
ggggacggctgtaatggtggctatc

SEQ ID NO: 249336 - DNA, 25 bp, probe
ggggaagtctggatgggttactata

SEQ ID NO: 249337 - DNA, 25 bp, probe
ggggaggtgtggatggggtactaca

SEQ ID NO: 249338 - DNA, 25 bp, probe
gggggagggtgggcagggatactca

SEQ ID NO: 249339 - DNA, 25 bp, probe
ggtggaacggtgagcagggaacatg

SEQ ID NO: 249340 - DNA, 25 bp, probe
ggggaaagattacctggaccagctg

SEQ ID NO: 249341 - DNA, 25 bp, probe
ggggaaagattacctggaccagctg

SEQ ID NO: 249342 - DNA, 25 bp, probe
gggggaagattgtgggcactctgtg

SEQ ID NO: 249343 - DNA, 25 bp, probe
ggtggtgaaaattgccgactttggc

SEQ ID NO: 249344 - DNA, 25 bp, probe
ggtggttacacggaaagcttatggc

SEQ ID NO: 249345 - DNA, 25 bp, probe
ggggtgataccaggagaccccatgg

SEQ ID NO: 249346 - DNA, 25 bp, probe
gggtgtacctgtgagagcaccctgt

SEQ ID NO: 249347 - DNA, 25 bp, probe
gggggatcctgggaggatcctggga

SEQ ID NO: 249348 - DNA, 25 bp, probe
gggggatctggggactaccagagac

SEQ ID NO: 249349 - DNA, 25 bp, probe
gggggtctggtctacatgacaaaaa

SEQ ID NO: 249350 - DNA, 25 bp, probe
ggggagttggattctctgaaggcaa

SEQ ID NO: 249351 - DNA, 25 bp, probe
ggggagttggattctctgaaggcaa

SEQ ID NO: 249352 - DNA, 25 bp, probe
ggggaatgtgtagccttcaggaaaa

SEQ ID NO: 249353 - DNA, 25 bp, probe
ggggcatttgggcactgtaggaaaa

SEQ ID NO: 249354 - DNA, 25 bp, probe
gggggttcaaggcataaggataata

SEQ ID NO: 249355 - DNA, 25 bp, probe
gggggttgcaagggaacagagaggg

SEQ ID NO: 249356 - DNA, 25 bp, probe
ggggcgtggcaagggaatagcgact

SEQ ID NO: 249357 - DNA, 25 bp, probe
ggggcagggtcgggaagggacatgc

SEQ ID NO: 249358 - DNA, 25 bp, probe
ggggcagggtcgggaagggacatgc

SEQ ID NO: 249359 - DNA, 25 bp, probe
ggggcaggtagggggagatggcctt

SEQ ID NO: 249360 - DNA, 25 bp, probe
ggggcacccagtggggtgctgagtg

SEQ ID NO: 249361 - DNA, 25 bp, probe
ggggacctgattgggtgggagctgg

SEQ ID NO: 249362 - DNA, 25 bp, probe
gggggcctattccaggaggagtggg

SEQ ID NO: 249363 - DNA, 25 bp, probe
gggggcctattccaggaggagtggg

SEQ ID NO: 249364 - DNA, 25 bp, probe
ggggcctattccaggaggagtggga

SEQ ID NO: 249365 - DNA, 25 bp, probe
ggggttccaagcaggaggtggggca

SEQ ID NO: 249366 - DNA, 25 bp, probe
ggggtctaaagctgtgtgtgttgag

SEQ ID NO: 249367 - DNA, 25 bp, probe
ggggcatttaacatggtttattggg

SEQ ID NO: 249368 - DNA, 25 bp, probe
ggggcatttaacatggtttattggg

SEQ ID NO: 249369 - DNA, 25 bp, probe
ggtggcatttacgtgctttatatga

SEQ ID NO: 249370 - DNA, 25 bp, probe
ggtggcatttacgtgctttatatga

SEQ ID NO: 249371 - DNA, 25 bp, probe
ggtggagcttcaaagattacgagaa

SEQ ID NO: 249372 - DNA, 25 bp, probe
ggtggagcttcaaagattacgagaa

SEQ ID NO: 249373 - DNA, 25 bp, probe
gggtgatctgctaaagttcatccgg

SEQ ID NO: 249374 - DNA, 25 bp, probe
gggtgattgccaagagcggcatctc

SEQ ID NO: 249375 - DNA, 25 bp, probe
gggtggagtgcagtggtgcgatctc

SEQ ID NO: 249376 - DNA, 25 bp, probe
gggggatgctgcttagctgatcccg

SEQ ID NO: 249377 - DNA, 25 bp, probe
gggtggagcacttcatgaaccacag

SEQ ID NO: 249378 - DNA, 25 bp, probe
ggtgtaagacttcaagccaagcgta

SEQ ID NO: 249379 - DNA, 25 bp, probe
gggtgtaagacttcaagccaagcgt

SEQ ID NO: 249380 - DNA, 25 bp, probe
gggtgtaagacttcaagccaagcgt

SEQ ID NO: 249381 - DNA, 25 bp, probe
gggtgtacacacaagaaggtgggct

SEQ ID NO: 249382 - DNA, 25 bp, probe
gggtggagccaaacaagtgtcagcc

SEQ ID NO: 249383 - DNA, 25 bp, probe
gggtggagatcagattggatacaga

SEQ ID NO: 249384 - DNA, 25 bp, probe
ggggagagacccagtgatgtggcaa

SEQ ID NO: 249385 - DNA, 25 bp, probe
ggggagagacccagtgatgtggcaa

SEQ ID NO: 249386 - DNA, 25 bp, probe
ggggagagacgtactctgagggcag

SEQ ID NO: 249387 - DNA, 25 bp, probe
gggtggagatggccattgcgagggg

SEQ ID NO: 249388 - DNA, 25 bp, probe
gggtgtggatggcagtgtggggagg

SEQ ID NO: 249389 - DNA, 25 bp, probe
gggggagggtaggtgagagtcaggg

SEQ ID NO: 249390 - DNA, 25 bp, probe
gggggctggagttgaggaggaagga

SEQ ID NO: 249391 - DNA, 25 bp, probe
gggggtcgagctggatgagggagaa

SEQ ID NO: 249392 - DNA, 25 bp, probe
gggtgtccagaggcttgtgggcaat

SEQ ID NO: 249393 - DNA, 25 bp, probe
gggtgtcacaatgttgagggtctgt

SEQ ID NO: 249394 - DNA, 25 bp, probe
gggggcagcagtgcttagagcttct

SEQ ID NO: 249395 - DNA, 25 bp, probe
gggtggcacagatctgggcagttag

SEQ ID NO: 249396 - DNA, 25 bp, probe
gggtggccatatttgggcagttccc

SEQ ID NO: 249397 - DNA, 25 bp, probe
gggtggccacaactgggatgccacc

SEQ ID NO: 249398 - DNA, 25 bp, probe
ggggaggacacatttggaccacagc

SEQ ID NO: 249399 - DNA, 25 bp, probe
ggggtgtaagacttcaagccaagcg

SEQ ID NO: 249400 - DNA, 25 bp, probe
gggggagaaatccttgagccagggc

SEQ ID NO: 249401 - DNA, 25 bp, probe
gggtggacagaagcttgtggggtgc

SEQ ID NO: 249402 - DNA, 25 bp, probe
gggtgtagaagaccctgtgggtgaa

SEQ ID NO: 249403 - DNA, 25 bp, probe
gggtgtagaagaccctgtgggtgaa

SEQ ID NO: 249404 - DNA, 25 bp, probe
ggggctaatcaaatccaatggggga

SEQ ID NO: 249405 - DNA, 25 bp, probe
tggggggattttaagtggaagtgca

SEQ ID NO: 249406 - DNA, 25 bp, probe
gggggcctctatgaattaaagatca

SEQ ID NO: 249407 - DNA, 25 bp, probe
gggggcaactgtggaaccagggtat

SEQ ID NO: 249408 - DNA, 25 bp, probe
gggggcaaaggtgacaacagaatga

SEQ ID NO: 249409 - DNA, 25 bp, probe
gggggcaaaggtgacaacagaatga

SEQ ID NO: 249410 - DNA, 25 bp, probe
ggggagaaaggagtacaaataggat

SEQ ID NO: 249411 - DNA, 25 bp, probe
ggggaggacggagttcagagggtgt

SEQ ID NO: 249412 - DNA, 25 bp, probe
ggggggagctggatccagagctgga

SEQ ID NO: 249413 - DNA, 25 bp, probe
ggggtggagctccatcatcaaatgg

SEQ ID NO: 249414 - DNA, 25 bp, probe
ggggtgtgcaaccacaagcaggagt

SEQ ID NO: 249415 - DNA, 25 bp, probe
gggggtgaattggcaagcaagagga

SEQ ID NO: 249416 - DNA, 25 bp, probe
ggggttgcaagggaacagagaggga

SEQ ID NO: 249417 - DNA, 25 bp, probe
ggtgatcttgggcagaacataccgg

SEQ ID NO: 249418 - DNA, 25 bp, probe
ggggcacctgagcagaatctacccg

SEQ ID NO: 249419 - DNA, 25 bp, probe
ggggacctaggaattgcccgagtgt

SEQ ID NO: 249420 - DNA, 25 bp, probe
ggggacctaggaattgcccgagtgt

SEQ ID NO: 249421 - DNA, 25 bp, probe
ggggactttgggcgccaagaagcat

SEQ ID NO: 249422 - DNA, 25 bp, probe
ggtggatcggtgggccaacaaggga

SEQ ID NO: 249423 - DNA, 25 bp, probe
gggggccagtggggaactgagggca

SEQ ID NO: 249424 - DNA, 25 bp, probe
gggggagcaggatgagacctttgga

SEQ ID NO: 249425 - DNA, 25 bp, probe
gggggaaggaatcagcctgtgtggg

SEQ ID NO: 249426 - DNA, 25 bp, probe
gggggagatgtgcattaccagtggg

SEQ ID NO: 249427 - DNA, 25 bp, probe
gggggacaggcattgttgccagggg

SEQ ID NO: 249428 - DNA, 25 bp, probe
ggggtcattgccaatgatatggcag

SEQ ID NO: 249429 - DNA, 25 bp, probe
gggggatggcctggaatgagagggt

SEQ ID NO: 249430 - DNA, 25 bp, probe
gggggacagcactgaaagggtgtga

SEQ ID NO: 249431 - DNA, 25 bp, probe
gggtggagcaactgaaggagcctgt

SEQ ID NO: 249432 - DNA, 25 bp, probe
gggtgtggcactttggggagaccat

SEQ ID NO: 249433 - DNA, 25 bp, probe
ggggatggccaaggggtgacatctt

SEQ ID NO: 249434 - DNA, 25 bp, probe
ggggattcctagggtgaagcagact

SEQ ID NO: 249435 - DNA, 25 bp, probe
ggggtatcctgtaggcaagatcgac

SEQ ID NO: 249436 - DNA, 25 bp, probe
ggggtgtcacgtggtgcaaaaggcc

SEQ ID NO: 249437 - DNA, 25 bp, probe
ggggattacagctgtcatgaatttc

SEQ ID NO: 249438 - DNA, 25 bp, probe
ggggttccaggaatctcattcattc

SEQ ID NO: 249439 - DNA, 25 bp, probe
ggggtctcacaggactcatttgtgt

SEQ ID NO: 249440 - DNA, 25 bp, probe
ggggtctacactgcaatcatatgtg

SEQ ID NO: 249441 - DNA, 25 bp, probe
ggtggctatatcaatgccagcttca

SEQ ID NO: 249442 - DNA, 25 bp, probe
ggggctgaatcattcaactgcctcc

SEQ ID NO: 249443 - DNA, 25 bp, probe
ggggctgaatcattcaactgcctcc

SEQ ID NO: 249444 - DNA, 25 bp, probe
ggggtggaaatgtactgcaggctct

SEQ ID NO: 249445 - DNA, 25 bp, probe
ggggtggaaatgtactgcaggctct

SEQ ID NO: 249446 - DNA, 25 bp, probe
ggggctgaagaaggcattgggtatg

SEQ ID NO: 249447 - DNA, 25 bp, probe
ggtggttaatgtggacggttatgac

SEQ ID NO: 249448 - DNA, 25 bp, probe
ggtggttgtattggagcagggggaa

SEQ ID NO: 249449 - DNA, 25 bp, probe
tggctgtatttaagttcaagggaaa

SEQ ID NO: 249450 - DNA, 25 bp, probe
ggtcgaacttgactatctagaggaa

SEQ ID NO: 249451 - DNA, 25 bp, probe
gggggccttggaatctatagtatag

SEQ ID NO: 249452 - DNA, 25 bp, probe
gggggccttggaatctatagtatag

SEQ ID NO: 249453 - DNA, 25 bp, probe
ggggccttggaatctatagtataga

SEQ ID NO: 249454 - DNA, 25 bp, probe
ggggtcgggagatcctcatgaagga

SEQ ID NO: 249455 - DNA, 25 bp, probe
ggggtcgggagatcctcatgaagga

SEQ ID NO: 249456 - DNA, 25 bp, probe
ggggtcagcagaggtaccacgaagc

SEQ ID NO: 249457 - DNA, 25 bp, probe
ggggtcagcagaggtaccacgaagc

SEQ ID NO: 249458 - DNA, 25 bp, probe
ggggtcgcgaagaaatcacagccaa

SEQ ID NO: 249459 - DNA, 25 bp, probe
ggggtcgcgaagaaatcacagccaa

SEQ ID NO: 249460 - DNA, 25 bp, probe
ggggatgggacataagccaccaatc

SEQ ID NO: 249461 - DNA, 25 bp, probe
ggggatgggacataagccaccaatc

SEQ ID NO: 249462 - DNA, 25 bp, probe
ggggctggtgtatggatccaccgtc

SEQ ID NO: 249463 - DNA, 25 bp, probe
ggggtggcagtgaggaccaccttca

SEQ ID NO: 249464 - DNA, 25 bp, probe
ggggggcaagatggaggccacaccc

SEQ ID NO: 249465 - DNA, 25 bp, probe
ggggggcaagatggaggccacaccc

SEQ ID NO: 249466 - DNA, 25 bp, probe
ggggcagccaaggggctgcaaagcc

SEQ ID NO: 249467 - DNA, 25 bp, probe
ggggatgcccaaggccagaatgacg

SEQ ID NO: 249468 - DNA, 25 bp, probe
ggggtgcttcaaggtatcacatcat

SEQ ID NO: 249469 - DNA, 25 bp, probe
gggggaagatcaggtcatactatct

SEQ ID NO: 249470 - DNA, 25 bp, probe
gggtggatagcaagtatattctaaa

SEQ ID NO: 249471 - DNA, 25 bp, probe
gggggaagcagacaatggattatga

SEQ ID NO: 249472 - DNA, 25 bp, probe
gggggaagcagacaatggattatga

SEQ ID NO: 249473 - DNA, 25 bp, probe
gggggaatcaagcatctggttgacc

SEQ ID NO: 249474 - DNA, 25 bp, probe
gggggaatcaagcatctggttgacc

SEQ ID NO: 249475 - DNA, 25 bp, probe
ggggcggcataatgaagggtgaagc

SEQ ID NO: 249476 - DNA, 25 bp, probe
ggggggctgagagagcaagaaaagc

SEQ ID NO: 249477 - DNA, 25 bp, probe
gggggcactgagaaccaaggagagc

SEQ ID NO: 249478 - DNA, 25 bp, probe
gggggcactgagaaccaaggagagc

SEQ ID NO: 249479 - DNA, 25 bp, probe
ggggggctgcagaaatcatggaggc

SEQ ID NO: 249480 - DNA, 25 bp, probe
ggggaggcccagaagcagggatgcc

SEQ ID NO: 249481 - DNA, 25 bp, probe
ggggaggcaacgagagtgctatgtg

SEQ ID NO: 249482 - DNA, 25 bp, probe
ggggaggcaacgagagtgctatgtg

SEQ ID NO: 249483 - DNA, 25 bp, probe
ggggacgaagcgtatcagcgtaaga

SEQ ID NO: 249484 - DNA, 25 bp, probe
ggggagcagaatcacctgtgcaaaa

SEQ ID NO: 249485 - DNA, 25 bp, probe
ggggtgcagacatgagcaaggctca

SEQ ID NO: 249486 - DNA, 25 bp, probe
ggggtgcagacatgagcaaggctca

SEQ ID NO: 249487 - DNA, 25 bp, probe
ggggtcatcctgagaaggtcatggg

SEQ ID NO: 249488 - DNA, 25 bp, probe
ggggagaaagttgagtgtcagggga

SEQ ID NO: 249489 - DNA, 25 bp, probe
ggtggggaagttgctggggtggaga

SEQ ID NO: 249490 - DNA, 25 bp, probe
ggggggacaggagagggagtggtga

SEQ ID NO: 249491 - DNA, 25 bp, probe
ggggaggccaggaggtgggtgggat

SEQ ID NO: 249492 - DNA, 25 bp, probe
ggggaacatcggacggtggtgtgaa

SEQ ID NO: 249493 - DNA, 25 bp, probe
ggtggagtatcacacggttctctga

SEQ ID NO: 249494 - DNA, 25 bp, probe
ggggatgcttacatggtggtatctg

SEQ ID NO: 249495 - DNA, 25 bp, probe
ggggtgctcttcaatgactcaacac

SEQ ID NO: 249496 - DNA, 25 bp, probe
ggggacatctctggagactcatctc

SEQ ID NO: 249497 - DNA, 25 bp, probe
ggggctttctatggagccatctgct

SEQ ID NO: 249498 - DNA, 25 bp, probe
ggggcagaatttggaggctcagttt

SEQ ID NO: 249499 - DNA, 25 bp, probe
gggggatatggtgcatttcttgtct

SEQ ID NO: 249500 - DNA, 25 bp, probe
ggtcaggattggccctgggtttgct

SEQ ID NO: 249501 - DNA, 25 bp, probe
ggtgaggctcggcttggattattct

SEQ ID NO: 249502 - DNA, 25 bp, probe
ggtgggtcagggggagtctttgcac

SEQ ID NO: 249503 - DNA, 25 bp, probe
ggtgggcaaacaggtggttttcatc

SEQ ID NO: 249504 - DNA, 25 bp, probe
ggggcctacactctgtgttattgca

SEQ ID NO: 249505 - DNA, 25 bp, probe
ggggcaccaactaattttgttgttg

SEQ ID NO: 249506 - DNA, 25 bp, probe
ggggaacagaatatcctcgatctct

SEQ ID NO: 249507 - DNA, 25 bp, probe
ggggaatagaaagcccacagtcttc

SEQ ID NO: 249508 - DNA, 25 bp, probe
ggggaatagaaagcccacagtcttc

SEQ ID NO: 249509 - DNA, 25 bp, probe
ggggctaaaagggctgtacagttat

SEQ ID NO: 249510 - DNA, 25 bp, probe
ggggaatatagagagttgacagtaa

SEQ ID NO: 249511 - DNA, 25 bp, probe
gggggcaaggcagtagtggacaggg

SEQ ID NO: 249512 - DNA, 25 bp, probe
ggggtgcaaggagactgtctgcagc

SEQ ID NO: 249513 - DNA, 25 bp, probe
gggggagagaatgacttctgccttc

SEQ ID NO: 249514 - DNA, 25 bp, probe
gggggagcagaatgagattcggatt

SEQ ID NO: 249515 - DNA, 25 bp, probe
ggggatgaagaacagactgggtgtg

SEQ ID NO: 249516 - DNA, 25 bp, probe
ggggaaaaagtcacagagatgctgg

SEQ ID NO: 249517 - DNA, 25 bp, probe
ggggaattcacttcttcaaagcagg

SEQ ID NO: 249518 - DNA, 25 bp, probe
ggtggcaattccagcttagcaacgc

SEQ ID NO: 249519 - DNA, 25 bp, probe
ggtgttacccaaggtcacaaggccg

SEQ ID NO: 249520 - DNA, 25 bp, probe
ggtggccaccaggtggtaccgagcc

SEQ ID NO: 249521 - DNA, 25 bp, probe
ggtggccaccaggtggtaccgagcc

SEQ ID NO: 249522 - DNA, 25 bp, probe
ggggtgcagtgggtgttaccaggca

SEQ ID NO: 249523 - DNA, 25 bp, probe
gggggagggggattagctagactag

SEQ ID NO: 249524 - DNA, 25 bp, probe
ggggagagtggggatgggggagaag

SEQ ID NO: 249525 - DNA, 25 bp, probe
ggggaactgagggcaaggggatata

SEQ ID NO: 249526 - DNA, 25 bp, probe
gggggactatgtggacaggggcaag

SEQ ID NO: 249527 - DNA, 25 bp, probe
gggggacttgtggacatgactgtct

SEQ ID NO: 249528 - DNA, 25 bp, probe
gggggacttgtggacatgactgtct

SEQ ID NO: 249529 - DNA, 25 bp, probe
gggggacttggggctgagagagtat

SEQ ID NO: 249530 - DNA, 25 bp, probe
ggtggtgaagtaggcggaagggatg

SEQ ID NO: 249531 - DNA, 25 bp, probe
gggggcaatccagtgggaaggaggt

SEQ ID NO: 249532 - DNA, 25 bp, probe
gggggcaatccagtgggaaggaggt

SEQ ID NO: 249533 - DNA, 25 bp, probe
ggggctgccccagcggaatgggcag

SEQ ID NO: 249534 - DNA, 25 bp, probe
ggggctcccgacagacgggagcagg

SEQ ID NO: 249535 - DNA, 25 bp, probe
ggggcctccgatgaagcagaggaaa

SEQ ID NO: 249536 - DNA, 25 bp, probe
ggggcacaccaaaatcatgacacta

SEQ ID NO: 249537 - DNA, 25 bp, probe
ggggcacaccaaaatcatgacacta

SEQ ID NO: 249538 - DNA, 25 bp, probe
ggggcccagcaaatagcagcctttc

SEQ ID NO: 249539 - DNA, 25 bp, probe
ggggttagcaatagcaaactctata

SEQ ID NO: 249540 - DNA, 25 bp, probe
ggggttagcaatagcaaactctata

SEQ ID NO: 249541 - DNA, 25 bp, probe
ggtgttaacattccaagactctaga

SEQ ID NO: 249542 - DNA, 25 bp, probe
ggtgttaacattccaagactctaga

SEQ ID NO: 249543 - DNA, 25 bp, probe
ggggtggcaagatcaagctcttaga

SEQ ID NO: 249544 - DNA, 25 bp, probe
gggggtctagaccaggattatagag

SEQ ID NO: 249545 - DNA, 25 bp, probe
ggtgtggcctaggaagttttccaga

SEQ ID NO: 249546 - DNA, 25 bp, probe
ggtgtacccagggtttttcagctca

SEQ ID NO: 249547 - DNA, 25 bp, probe
ggtgtccctaaggttgtacagactc

SEQ ID NO: 249548 - DNA, 25 bp, probe
ggtgatgggaaagcattgtaaatgt

SEQ ID NO: 249549 - DNA, 25 bp, probe
ggtggtggaaagtactgtgaacagt

SEQ ID NO: 249550 - DNA, 25 bp, probe
ggggaaagatcattatttaacctag

SEQ ID NO: 249551 - DNA, 25 bp, probe
ggggaacacaaaagtggagtcctag

SEQ ID NO: 249552 - DNA, 25 bp, probe
tgggaagggacataggggtttctgg

SEQ ID NO: 249553 - DNA, 25 bp, probe
ggggagaagagcaaagggcgctttt

SEQ ID NO: 249554 - DNA, 25 bp, probe
ggggagaagagcaaagggcgctttt

SEQ ID NO: 249555 - DNA, 25 bp, probe
gggggagagagcaagatgggttcct

SEQ ID NO: 249556 - DNA, 25 bp, probe
gggggagagagcaagatgggttcct

SEQ ID NO: 249557 - DNA, 25 bp, probe
gggggaagtgtacagagatgtctct

SEQ ID NO: 249558 - DNA, 25 bp, probe
ggggcaggactgtaaaggtgactcg

SEQ ID NO: 249559 - DNA, 25 bp, probe
ggggcagagaaaggaagcgtgcact

SEQ ID NO: 249560 - DNA, 25 bp, probe
ggggagccataagggacatgtcttt

SEQ ID NO: 249561 - DNA, 25 bp, probe
ggggaccaaaaccatgcattcctaa

SEQ ID NO: 249562 - DNA, 25 bp, probe
ggggaccaaaaccatgcattcctaa

SEQ ID NO: 249563 - DNA, 25 bp, probe
ggggttcttacaggtgactctgcta

SEQ ID NO: 249564 - DNA, 25 bp, probe
ggggttttgtaatgacagtgctaaa

SEQ ID NO: 249565 - DNA, 25 bp, probe
ggggcttagtgtctggacagggaca

SEQ ID NO: 249566 - DNA, 25 bp, probe
ggtgtcgtgggtgttacgtgcagga

SEQ ID NO: 249567 - DNA, 25 bp, probe
ggtgttgggcttgttgattgtggga

SEQ ID NO: 249568 - DNA, 25 bp, probe
ggtgttgggcttgttgattgtggga

SEQ ID NO: 249569 - DNA, 25 bp, probe
ggtgtttacttgttctttgttggca

SEQ ID NO: 249570 - DNA, 25 bp, probe
ggggattagtttattcttgtggcat

SEQ ID NO: 249571 - DNA, 25 bp, probe
ggagaagggtatatttaatgagcga

SEQ ID NO: 249572 - DNA, 25 bp, probe
ggaacaagggtgcctaataaataca

SEQ ID NO: 249573 - DNA, 25 bp, probe
ggagaaagaaggcttaacattaagt

SEQ ID NO: 249574 - DNA, 25 bp, probe
ggggagatcaagctctgtaactttg

SEQ ID NO: 249575 - DNA, 25 bp, probe
ggggattcagaaattgatcaactct

SEQ ID NO: 249576 - DNA, 25 bp, probe
ggggatgatgcgtattgttaagacc

SEQ ID NO: 249577 - DNA, 25 bp, probe
ggggcaggagagtctgttatcaccc

SEQ ID NO: 249578 - DNA, 25 bp, probe
ggggcaggagagtctgttatcaccc

SEQ ID NO: 249579 - DNA, 25 bp, probe
ggggaaaatggcattctcccacttt

SEQ ID NO: 249580 - DNA, 25 bp, probe
ggagtgaaacagcaaaccccaaatc

SEQ ID NO: 249581 - DNA, 25 bp, probe
ggtgctgaaaacgttagcctctaaa

SEQ ID NO: 249582 - DNA, 25 bp, probe
ggtggtaatttttcacctctgaaat

SEQ ID NO: 249583 - DNA, 25 bp, probe
ggggggatttatgcacgcaatgata

SEQ ID NO: 249584 - DNA, 25 bp, probe
gggggtcttaaccccagtgatgact

SEQ ID NO: 249585 - DNA, 25 bp, probe
gggggatttagtgccactgaagcct

SEQ ID NO: 249586 - DNA, 25 bp, probe
ggtgggtttccagtccactgaaaca

SEQ ID NO: 249587 - DNA, 25 bp, probe
ggtggagtctgtgttgcacctagga

SEQ ID NO: 249588 - DNA, 25 bp, probe
ggggagtcgaacaatgcgtccaatg

SEQ ID NO: 249589 - DNA, 25 bp, probe
ggggcagtatgatgttgctgttaag

SEQ ID NO: 249590 - DNA, 25 bp, probe
ggggaaatctatcttgtctgcaaga

SEQ ID NO: 249591 - DNA, 25 bp, probe
ggggaaatctatcttgtctgcaaga

SEQ ID NO: 249592 - DNA, 25 bp, probe
ggggcaaacttcattgttaaccaca

SEQ ID NO: 249593 - DNA, 25 bp, probe
ggggcaaacttcattgttaaccaca

SEQ ID NO: 249594 - DNA, 25 bp, probe
ggggagaactttgtgttacagctta

SEQ ID NO: 249595 - DNA, 25 bp, probe
ggggcagataccttcaatttaaggc

SEQ ID NO: 249596 - DNA, 25 bp, probe
ggtgagaggagccccattttaggtc

SEQ ID NO: 249597 - DNA, 25 bp, probe
ggtgagaggagccccattttaggtc

SEQ ID NO: 249598 - DNA, 25 bp, probe
ggtggaagcagttcacttaaaggcc

SEQ ID NO: 249599 - DNA, 25 bp, probe
ggtggaaatgcctcctctgaaggcc

SEQ ID NO: 249600 - DNA, 25 bp, probe
ggggccattggagtccctgaaggac

SEQ ID NO: 249601 - DNA, 25 bp, probe
ggggctgttggagtcccagaattgc

SEQ ID NO: 249602 - DNA, 25 bp, probe
ggggcgattgtgccaagcgcaaaag

SEQ ID NO: 249603 - DNA, 25 bp, probe
ggggtgatgtgccccacaagacaca

SEQ ID NO: 249604 - DNA, 25 bp, probe
ggggagatggctgatgcccagaaca

SEQ ID NO: 249605 - DNA, 25 bp, probe
ggggtgtgctgtggtgcatggcagc

SEQ ID NO: 249606 - DNA, 25 bp, probe
ggggtgtttacgagcagctgtgagt

SEQ ID NO: 249607 - DNA, 25 bp, probe
ggggtgtttacgagcagctgtgagt

SEQ ID NO: 249608 - DNA, 25 bp, probe
ggggcgtggatcgagtgtagctgtg

SEQ ID NO: 249609 - DNA, 25 bp, probe
ggggcgtggatcgagtgtagctgtg

SEQ ID NO: 249610 - DNA, 25 bp, probe
ggggcagggagagctgctgagccta

SEQ ID NO: 249611 - DNA, 25 bp, probe
ggggcagggagagctgctgagccta

SEQ ID NO: 249612 - DNA, 25 bp, probe
ggggcgtggagaactctgatcgaga

SEQ ID NO: 249613 - DNA, 25 bp, probe
ggggcctggcagaaactattatgga

SEQ ID NO: 249614 - DNA, 25 bp, probe
ggggcctgacaatggccaagttatt

SEQ ID NO: 249615 - DNA, 25 bp, probe
ggggcctacagatcagtaggtgaat

SEQ ID NO: 249616 - DNA, 25 bp, probe
gggggttcagaatattggtggcatc

SEQ ID NO: 249617 - DNA, 25 bp, probe
gggggttcagaatattggtggcatc

SEQ ID NO: 249618 - DNA, 25 bp, probe
ggggtctatagaattattttacata

SEQ ID NO: 249619 - DNA, 25 bp, probe
ggggttctcaagatttattcaggat

SEQ ID NO: 249620 - DNA, 25 bp, probe
ggggcttctgcatgtgaaaaacggt

SEQ ID NO: 249621 - DNA, 25 bp, probe
ggggctttgattgcaaaagactggg

SEQ ID NO: 249622 - DNA, 25 bp, probe
ggggtcagggtccaagaggaatggg

SEQ ID NO: 249623 - DNA, 25 bp, probe
ggggcgcgaggtcgattgggaagga

SEQ ID NO: 249624 - DNA, 25 bp, probe
ggggagccagggctatgggagcagc

SEQ ID NO: 249625 - DNA, 25 bp, probe
ggggagccagggctatgggagcagc

SEQ ID NO: 249626 - DNA, 25 bp, probe
gggggtcagatgcactgaagtagcc

SEQ ID NO: 249627 - DNA, 25 bp, probe
ggggtccagaaccatgagatgtatg

SEQ ID NO: 249628 - DNA, 25 bp, probe
ggggcccaggaggatgagtatggac

SEQ ID NO: 249629 - DNA, 25 bp, probe
gggggtcaggcagccagtgagatga

SEQ ID NO: 249630 - DNA, 25 bp, probe
gggggtgcaggtgtgagtggacccc

SEQ ID NO: 249631 - DNA, 25 bp, probe
ggggggcaggtgtagagttgagaaa

SEQ ID NO: 249632 - DNA, 25 bp, probe
ggggtagaggagggcatgggaggga

SEQ ID NO: 249633 - DNA, 25 bp, probe
ggggtaggcagatgggccaaggtga

SEQ ID NO: 249634 - DNA, 25 bp, probe
ggggcaaggcagtagtggacagggt

SEQ ID NO: 249635 - DNA, 25 bp, probe
ggtgagaatggcgaagtccggcaag

SEQ ID NO: 249636 - DNA, 25 bp, probe
ggcgaaatcagcacgtggtggctca

SEQ ID NO: 249637 - DNA, 25 bp, probe
ggcgaaatcagcacgtggtggctca

SEQ ID NO: 249638 - DNA, 25 bp, probe
ggggagctgcacagggtggcagtca

SEQ ID NO: 249639 - DNA, 25 bp, probe
ggggtgctggcagtggggaggacac

SEQ ID NO: 249640 - DNA, 25 bp, probe
ggggtgcggacaaggtgggagagcc

SEQ ID NO: 249641 - DNA, 25 bp, probe
ggggtgcggacaaggtgggagagcc

SEQ ID NO: 249642 - DNA, 25 bp, probe
ggggggaatctgaagtggggcagcc

SEQ ID NO: 249643 - DNA, 25 bp, probe
ggtggaaaaatgagggctggagcca

SEQ ID NO: 249644 - DNA, 25 bp, probe
ggggaatacttatgcatggggagcc

SEQ ID NO: 249645 - DNA, 25 bp, probe
ggggatccctgtacagaggagggcc

SEQ ID NO: 249646 - DNA, 25 bp, probe
ggggtctcctgaataaatagagtat

SEQ ID NO: 249647 - DNA, 25 bp, probe
ggggtctcctgaataaatagagtat

SEQ ID NO: 249648 - DNA, 25 bp, probe
ggggaagccatggaaatacaagtca

SEQ ID NO: 249649 - DNA, 25 bp, probe
ggggaagctcatcggcaaagtggcc

SEQ ID NO: 249650 - DNA, 25 bp, probe
ggggaagctcatcggcaaagtggcc

SEQ ID NO: 249651 - DNA, 25 bp, probe
ggggcacaggcatgccaaatttgca

SEQ ID NO: 249652 - DNA, 25 bp, probe
ggggcagctggctctaaagtcagtg

SEQ ID NO: 249653 - DNA, 25 bp, probe
ggggcagctggctctaaagtcagtg

SEQ ID NO: 249654 - DNA, 25 bp, probe
ggggcagctggctctaaagtcagtg

SEQ ID NO: 249655 - DNA, 25 bp, probe
ggggcagctggctctaaagtcagtg

SEQ ID NO: 249656 - DNA, 25 bp, probe
ggtgtggtgacagataaattcggca

SEQ ID NO: 249657 - DNA, 25 bp, probe
ggtgtggtgacagataaattcggca

SEQ ID NO: 249658 - DNA, 25 bp, probe
ggagtggtccatgctaagtctaaca

SEQ ID NO: 249659 - DNA, 25 bp, probe
ggagtggtccatgctaagtctaaca

SEQ ID NO: 249660 - DNA, 25 bp, probe
ggaggttccctttgtgattaccaga

SEQ ID NO: 249661 - DNA, 25 bp, probe
ggaggttccctttgtgattaccaga

SEQ ID NO: 249662 - DNA, 25 bp, probe
ggggttctcctttatgaaatgctga

SEQ ID NO: 249663 - DNA, 25 bp, probe
ggggtgtgagtgcgtatgaaagtgt

SEQ ID NO: 249664 - DNA, 25 bp, probe
ggtggtgtgaatattggaactggct

SEQ ID NO: 249665 - DNA, 25 bp, probe
ggggaggccacaataggctacgggg

SEQ ID NO: 249666 - DNA, 25 bp, probe
ggtgggcagcccaaaagatcagggg

SEQ ID NO: 249667 - DNA, 25 bp, probe
ggggagctgtacgattacatcagtg

SEQ ID NO: 249668 - DNA, 25 bp, probe
ggggatctcagagcttacaggctga

SEQ ID NO: 249669 - DNA, 25 bp, probe
ggggacatctatgcttacatggaga

SEQ ID NO: 249670 - DNA, 25 bp, probe
ggggtcatcaatgctggcaagagtc

SEQ ID NO: 249671 - DNA, 25 bp, probe
ggggtcacagaagcagcaaagcctc

SEQ ID NO: 249672 - DNA, 25 bp, probe
ggggtcacagaagcagcaaagcctc

SEQ ID NO: 249673 - DNA, 25 bp, probe
ggggaacagcgagcagatcaaagcc

SEQ ID NO: 249674 - DNA, 25 bp, probe
ggggagtgtgggtgatcagaaggct

SEQ ID NO: 249675 - DNA, 25 bp, probe
ggtgaacagtgctcttgtggtaggt

SEQ ID NO: 249676 - DNA, 25 bp, probe
ggtgaacagtgctcttgtggtaggt

SEQ ID NO: 249677 - DNA, 25 bp, probe
ggtgaacagcaatcttgccagtgtg

SEQ ID NO: 249678 - DNA, 25 bp, probe
ggggaaaactgtcgccagttgtgca

SEQ ID NO: 249679 - DNA, 25 bp, probe
ggggaaggaatcagcctgtgtgggg

SEQ ID NO: 249680 - DNA, 25 bp, probe
ggtggcaaagacacctgtgtgggtg

SEQ ID NO: 249681 - DNA, 25 bp, probe
ggtggctaaataacgtgctaaggga

SEQ ID NO: 249682 - DNA, 25 bp, probe
ggttgctataaaatccgttcgtaag

SEQ ID NO: 249683 - DNA, 25 bp, probe
ggtataaatagaaccgccttaagag

SEQ ID NO: 249684 - DNA, 25 bp, probe
ggtggaaaaatagccccaagcagag

SEQ ID NO: 249685 - DNA, 25 bp, probe
ggggcagacaaaaccctcaataaag

SEQ ID NO: 249686 - DNA, 25 bp, probe
ggggaccaaattccattcaaatgaa

SEQ ID NO: 249687 - DNA, 25 bp, probe
ggggaccaaattccattcaaatgaa

SEQ ID NO: 249688 - DNA, 25 bp, probe
ggggattcaaattctagtaataggc

SEQ ID NO: 249689 - DNA, 25 bp, probe
ggggaccgaattaaggaatggctgg

SEQ ID NO: 249690 - DNA, 25 bp, probe
ggggaacaggtaaggagaatgggtg

SEQ ID NO: 249691 - DNA, 25 bp, probe
ggggaccatggtgataaacagtgag

SEQ ID NO: 249692 - DNA, 25 bp, probe
ggggccacttggatgagaacgtgag

SEQ ID NO: 249693 - DNA, 25 bp, probe
ggggcctgtacgaggtactcatgga

SEQ ID NO: 249694 - DNA, 25 bp, probe
ggggactgaacctggaagatcatgg

SEQ ID NO: 249695 - DNA, 25 bp, probe
ggggagctgaactgggaagataata

SEQ ID NO: 249696 - DNA, 25 bp, probe
ggggtctgaggctgtggaagtccga

SEQ ID NO: 249697 - DNA, 25 bp, probe
ggggtatgcagggtctggaagttgg

SEQ ID NO: 249698 - DNA, 25 bp, probe
ggggctatggtggggaggagaaggt

SEQ ID NO: 249699 - DNA, 25 bp, probe
ggggctttgtgcagtatggaacagg

SEQ ID NO: 249700 - DNA, 25 bp, probe
ggggtccagcctcgttggaagagga

SEQ ID NO: 249701 - DNA, 25 bp, probe
ggggtcgcctggattgggatgagaa

SEQ ID NO: 249702 - DNA, 25 bp, probe
ggggttccatgaattgtggggaagc

SEQ ID NO: 249703 - DNA, 25 bp, probe
ggggttccatgaattgtggggaagc

SEQ ID NO: 249704 - DNA, 25 bp, probe
ggggtcccagggatgaggaatcgcc

SEQ ID NO: 249705 - DNA, 25 bp, probe
ggggtcaccagaggatgtgcaggaa

SEQ ID NO: 249706 - DNA, 25 bp, probe
ggggtacagcgtagatgtgaaaaaa

SEQ ID NO: 249707 - DNA, 25 bp, probe
ggggaaggaggcttgtagaaagcaa

SEQ ID NO: 249708 - DNA, 25 bp, probe
ggggtagtgaagtatgggaaatgga

SEQ ID NO: 249709 - DNA, 25 bp, probe
ggggaagtcaagaatggggcctggg

SEQ ID NO: 249710 - DNA, 25 bp, probe
ggtggggtaggcagatgggccaagg

SEQ ID NO: 249711 - DNA, 25 bp, probe
ggtggaggtcctgcgggagaaagtg

SEQ ID NO: 249712 - DNA, 25 bp, probe
ggtgtgtgttcggaggggtgaaagc

SEQ ID NO: 249713 - DNA, 25 bp, probe
ggtggcgtacgacggtgttgagatc

SEQ ID NO: 249714 - DNA, 25 bp, probe
ggggctgtgaaacgggattgtacta

SEQ ID NO: 249715 - DNA, 25 bp, probe
ggggctggaatgctgggtatgctct

SEQ ID NO: 249716 - DNA, 25 bp, probe
ggggctgtggaggttgatattatta

SEQ ID NO: 249717 - DNA, 25 bp, probe
ggggagtggcaggggatgatttgtt

SEQ ID NO: 249718 - DNA, 25 bp, probe
ggtggaaggaggcgcactttcctcc

SEQ ID NO: 249719 - DNA, 25 bp, probe
ggggaagggtggcattctgctgacc

SEQ ID NO: 249720 - DNA, 25 bp, probe
ggggagaagggacattccacaacca

SEQ ID NO: 249721 - DNA, 25 bp, probe
ggggagaagggacattccacaacca

SEQ ID NO: 249722 - DNA, 25 bp, probe
ggaggagaaagacaatcccaaacaa

SEQ ID NO: 249723 - DNA, 25 bp, probe
ggtggagaagggctagcccaccgca

SEQ ID NO: 249724 - DNA, 25 bp, probe
ggtggagaagggctagcccaccgca

SEQ ID NO: 249725 - DNA, 25 bp, probe
ggtgggaaaaggtgtcaggcaccat

SEQ ID NO: 249726 - DNA, 25 bp, probe
ggggacaaatatcgacgtcagctcc

SEQ ID NO: 249727 - DNA, 25 bp, probe
ggggagaagtgaggacgtcacgcag

SEQ ID NO: 249728 - DNA, 25 bp, probe
ggggcaaagtgagggccatccaaca

SEQ ID NO: 249729 - DNA, 25 bp, probe
ggtgatagaagtcgggccctgaaaa

SEQ ID NO: 249730 - DNA, 25 bp, probe
ggtcatacaggccagggaacataag

SEQ ID NO: 249731 - DNA, 25 bp, probe
ggtgctgacggacacgtcgtacacg

SEQ ID NO: 249732 - DNA, 25 bp, probe
ggtgctgacggacacgtcgtacacg

SEQ ID NO: 249733 - DNA, 25 bp, probe
ggtgaagctggtcatcttcgtcatc

SEQ ID NO: 249734 - DNA, 25 bp, probe
ggggatatggtgcatttcttgtcta

SEQ ID NO: 249735 - DNA, 25 bp, probe
ggtggacagagtatttctttgggta

SEQ ID NO: 249736 - DNA, 25 bp, probe
ggtggacagagtatttctttgggta

SEQ ID NO: 249737 - DNA, 25 bp, probe
ggtgtgacttttaattagttcaggt

SEQ ID NO: 249738 - DNA, 25 bp, probe
ggtgtacatttcttgttaaccacgt

SEQ ID NO: 249739 - DNA, 25 bp, probe
ggtgtacatttcttgttaaccacgt

SEQ ID NO: 249740 - DNA, 25 bp, probe
ggctgtactttcaggttccaaagaa

SEQ ID NO: 249741 - DNA, 25 bp, probe
ggctgtactttcaggttccaaagaa

SEQ ID NO: 249742 - DNA, 25 bp, probe
ggggcagcttctgaggttgccaaag

SEQ ID NO: 249743 - DNA, 25 bp, probe
ggggcagcttctgaggttgccaaag

SEQ ID NO: 249744 - DNA, 25 bp, probe
ggtggcctatatgatctgcctacat

SEQ ID NO: 249745 - DNA, 25 bp, probe
ggggcagtgatatcacatagtacat

SEQ ID NO: 249746 - DNA, 25 bp, probe
ggggcagtgatatcacatagtacat

SEQ ID NO: 249747 - DNA, 25 bp, probe
ggggcagagttgtcatcttggagac

SEQ ID NO: 249748 - DNA, 25 bp, probe
ggggagatggattctcttcgttcac

SEQ ID NO: 249749 - DNA, 25 bp, probe
ggggcagggatacatctcgaggcca

SEQ ID NO: 249750 - DNA, 25 bp, probe
ggggaggtgaagaccctgatgatcc

SEQ ID NO: 249751 - DNA, 25 bp, probe
ggggagtgtttttcactgtgacatt

SEQ ID NO: 249752 - DNA, 25 bp, probe
ggggagtgtttttcactgtgacatt

SEQ ID NO: 249753 - DNA, 25 bp, probe
ggtggaggtgatatggcattctgaa

SEQ ID NO: 249754 - DNA, 25 bp, probe
ggggatgggatttctgattcagtat

SEQ ID NO: 249755 - DNA, 25 bp, probe
ggggaagagatttcatgtctaacta

SEQ ID NO: 249756 - DNA, 25 bp, probe
ggggaagagatttcatgtctaacta

SEQ ID NO: 249757 - DNA, 25 bp, probe
ggggttagatattttctcaatgctc

SEQ ID NO: 249758 - DNA, 25 bp, probe
ggggtcaagcaaagcttcctggtgg

SEQ ID NO: 249759 - DNA, 25 bp, probe
tggccccaaaagccttacggtcatg

SEQ ID NO: 249760 - DNA, 25 bp, probe
ggacccaaaatttctaggtgtgcca

SEQ ID NO: 249761 - DNA, 25 bp, probe
ggtgtccaacagagtctaggctggg

SEQ ID NO: 249762 - DNA, 25 bp, probe
ggtgaagaactgccgtttgtggggt

SEQ ID NO: 249763 - DNA, 25 bp, probe
ggggaggcacagagtttgctgcgag

SEQ ID NO: 249764 - DNA, 25 bp, probe
ggggatgtgcaagatgtggcaggcg

SEQ ID NO: 249765 - DNA, 25 bp, probe
ggggcagtattgacagtggcccagc

SEQ ID NO: 249766 - DNA, 25 bp, probe
ggggatgctgcttagctgatcccgc

SEQ ID NO: 249767 - DNA, 25 bp, probe
ggggatgctgcttagctgatcccgc

SEQ ID NO: 249768 - DNA, 25 bp, probe
ggggatgctcatcactggagactgc

SEQ ID NO: 249769 - DNA, 25 bp, probe
ggggatgctgctgatgtgcagagac

SEQ ID NO: 249770 - DNA, 25 bp, probe
ggggatgctgctgatgtgcagagac

SEQ ID NO: 249771 - DNA, 25 bp, probe
ggggcatcttgactatcagataaaa

SEQ ID NO: 249772 - DNA, 25 bp, probe
ggggatccgagtgcagatccacagc

SEQ ID NO: 249773 - DNA, 25 bp, probe
ggggatcactgaaccagacacagca

SEQ ID NO: 249774 - DNA, 25 bp, probe
ggggcaagcctgtatagacagcact

SEQ ID NO: 249775 - DNA, 25 bp, probe
ggggaagactattccagagacgaag

SEQ ID NO: 249776 - DNA, 25 bp, probe
ggggataagtatgcagaaatctgaa

SEQ ID NO: 249777 - DNA, 25 bp, probe
ggtgggaagtagcctatatactaac

SEQ ID NO: 249778 - DNA, 25 bp, probe
ggtggaggaggacctaaggacagac

SEQ ID NO: 249779 - DNA, 25 bp, probe
ggggctgaaggtcagaagtaatcct

SEQ ID NO: 249780 - DNA, 25 bp, probe
ggggctgagcgatccagggaagatc

SEQ ID NO: 249781 - DNA, 25 bp, probe
ggggatgacgatgccaagtacacct

SEQ ID NO: 249782 - DNA, 25 bp, probe
ggggaggctgagacgcaaggatcac

SEQ ID NO: 249783 - DNA, 25 bp, probe
ggggaggtggagcagatagtgtctg

SEQ ID NO: 249784 - DNA, 25 bp, probe
ggggatgatttacggcaagatatgc

SEQ ID NO: 249785 - DNA, 25 bp, probe
ggggctgctattttggaccagatgt

SEQ ID NO: 249786 - DNA, 25 bp, probe
ggggatgctactgatgggaatgatt

SEQ ID NO: 249787 - DNA, 25 bp, probe
ggggagatcatcgggggacatgagg

SEQ ID NO: 249788 - DNA, 25 bp, probe
ggtggctgcatgccaaggggaagag

SEQ ID NO: 249789 - DNA, 25 bp, probe
ggtgttggcaccggaggcatggaaa

SEQ ID NO: 249790 - DNA, 25 bp, probe
ggtgtggaaccagggagctgtggga

SEQ ID NO: 249791 - DNA, 25 bp, probe
ggtgtggaaccagggagctgtggga

SEQ ID NO: 249792 - DNA, 25 bp, probe
ggttagacgccagaggttgggcttc

SEQ ID NO: 249793 - DNA, 25 bp, probe
ggttaagcggcaggcaggattgggc

SEQ ID NO: 249794 - DNA, 25 bp, probe
ggtcaagatgctgaccagccagggg

SEQ ID NO: 249795 - DNA, 25 bp, probe
ggtacagagagatccccgaggggaa

SEQ ID NO: 249796 - DNA, 25 bp, probe
ggtgtcgggacatggttgggggaat

SEQ ID NO: 249797 - DNA, 25 bp, probe
ggggaggagagcagggaggggggca

SEQ ID NO: 249798 - DNA, 25 bp, probe
ggggaatgaggagtgggggggagtg

SEQ ID NO: 249799 - DNA, 25 bp, probe
ggggatggaggagctgggggatcct

SEQ ID NO: 249800 - DNA, 25 bp, probe
ggggcaggatggggctgggaagtcc

SEQ ID NO: 249801 - DNA, 25 bp, probe
ggggatgttggcaggatgtgaattc

SEQ ID NO: 249802 - DNA, 25 bp, probe
ggggaaatgcgtagaaggaattctg

SEQ ID NO: 249803 - DNA, 25 bp, probe
ggggataagctgaggtgactaaatg

SEQ ID NO: 249804 - DNA, 25 bp, probe
ggggatatagtgatggggctcagat

SEQ ID NO: 249805 - DNA, 25 bp, probe
ggggctagaggcctgatggttagtg

SEQ ID NO: 249806 - DNA, 25 bp, probe
ggggctgaatgtgcgagtccatagc

SEQ ID NO: 249807 - DNA, 25 bp, probe
ggggagaatgctgagagtggtatca

SEQ ID NO: 249808 - DNA, 25 bp, probe
ggggcagagccctatgcagggctac

SEQ ID NO: 249809 - DNA, 25 bp, probe
ggggaaccacattgatattctactg

SEQ ID NO: 249810 - DNA, 25 bp, probe
ggggaaagcctgcatatattatcgt

SEQ ID NO: 249811 - DNA, 25 bp, probe
ggggataacctgtactatggacact

SEQ ID NO: 249812 - DNA, 25 bp, probe
ggggcataagccttttatggccctc

SEQ ID NO: 249813 - DNA, 25 bp, probe
ggggacaattgcatttatggcacct

SEQ ID NO: 249814 - DNA, 25 bp, probe
ggggatcacattggtatgtttatgc

SEQ ID NO: 249815 - DNA, 25 bp, probe
ggggagcatcattctgttatacttc

SEQ ID NO: 249816 - DNA, 25 bp, probe
ggggagtctgcttgtcttagatgtt

SEQ ID NO: 249817 - DNA, 25 bp, probe
ggggaatcatgttgctgtaacagtt

SEQ ID NO: 249818 - DNA, 25 bp, probe
ggggataatgatgcttaccatggtt

SEQ ID NO: 249819 - DNA, 25 bp, probe
ggtggttttgccagagaatggtctt

SEQ ID NO: 249820 - DNA, 25 bp, probe
ggtggttttgctggatgtttggtct

SEQ ID NO: 249821 - DNA, 25 bp, probe
ggtggttttcaggagtccgaggtag

SEQ ID NO: 249822 - DNA, 25 bp, probe
ggtgggtttagcaggctgcagcagg

SEQ ID NO: 249823 - DNA, 25 bp, probe
ggggagttcttactggtgagatgct

SEQ ID NO: 249824 - DNA, 25 bp, probe
ggggagtgaatttgctagtgggtac

SEQ ID NO: 249825 - DNA, 25 bp, probe
ggggctgagcctgagtgagtgggat

SEQ ID NO: 249826 - DNA, 25 bp, probe
ggggatggcctggaatgagagggtc

SEQ ID NO: 249827 - DNA, 25 bp, probe
ggggatcagccgggatgggctgcgc

SEQ ID NO: 249828 - DNA, 25 bp, probe
ggggacagcggggagcagattgccg

SEQ ID NO: 249829 - DNA, 25 bp, probe
ggtggacagggacacaatcctagtc

SEQ ID NO: 249830 - DNA, 25 bp, probe
ggtggaagagtgtgcaaacctttcg

SEQ ID NO: 249831 - DNA, 25 bp, probe
ggggagaggatgtgaaccccgcctg

SEQ ID NO: 249832 - DNA, 25 bp, probe
ggggagaggatgtgaaccccgcctg

SEQ ID NO: 249833 - DNA, 25 bp, probe
ggtgtagagttgtgtgaaaccccta

SEQ ID NO: 249834 - DNA, 25 bp, probe
ggtgtccagttcaagagaacccacc

SEQ ID NO: 249835 - DNA, 25 bp, probe
ggggccagtgtaaggcatagggaat

SEQ ID NO: 249836 - DNA, 25 bp, probe
ggggccagtgtaaggcatagggaat

SEQ ID NO: 249837 - DNA, 25 bp, probe
ggggagcatgggaagtgacggttta

SEQ ID NO: 249838 - DNA, 25 bp, probe
ggggacacggcagtgatgctgcggt

SEQ ID NO: 249839 - DNA, 25 bp, probe
ggggacctggtggatgctgaggagt

SEQ ID NO: 249840 - DNA, 25 bp, probe
ggggaagcaggtcagtatggagtct

SEQ ID NO: 249841 - DNA, 25 bp, probe
ggggaagcaggtcagtatggagtct

SEQ ID NO: 249842 - DNA, 25 bp, probe
ggggcaacagggaatgaagctggtt

SEQ ID NO: 249843 - DNA, 25 bp, probe
ggggcaacagggaatgaagctggtt

SEQ ID NO: 249844 - DNA, 25 bp, probe
ggtgtcctcaggcagaattgctggt

SEQ ID NO: 249845 - DNA, 25 bp, probe
ggggctctcagggagaactgcttcc

SEQ ID NO: 249846 - DNA, 25 bp, probe
ggtggcctaatggattatgctttcc

SEQ ID NO: 249847 - DNA, 25 bp, probe
ggtggccatcaaatgcattgccaag

SEQ ID NO: 249848 - DNA, 25 bp, probe
ggtggctctctgactgatgtggtca

SEQ ID NO: 249849 - DNA, 25 bp, probe
ggggcagtgatgactgagatgcctc

SEQ ID NO: 249850 - DNA, 25 bp, probe
ggggcagtgatgactgagatgcctc

SEQ ID NO: 249851 - DNA, 25 bp, probe
ggggatgtggctggagcatgagcca

SEQ ID NO: 249852 - DNA, 25 bp, probe
ggtggctgatgatggtgtgactcag

SEQ ID NO: 249853 - DNA, 25 bp, probe
ggtggctgatgatggtgtgactcag

SEQ ID NO: 249854 - DNA, 25 bp, probe
ggtggcttgcaacatgctcatgcca

SEQ ID NO: 249855 - DNA, 25 bp, probe
ggtggccatgaatatgcagactgca

SEQ ID NO: 249856 - DNA, 25 bp, probe
ggtggccataaaagtcattgataag

SEQ ID NO: 249857 - DNA, 25 bp, probe
ggtggaacaaatatcattaagctga

SEQ ID NO: 249858 - DNA, 25 bp, probe
ggggacaagagaactgtctcatagt

SEQ ID NO: 249859 - DNA, 25 bp, probe
ggggacaagagaactgtctcatagt

SEQ ID NO: 249860 - DNA, 25 bp, probe
ggggaacatggtttgactcatctta

SEQ ID NO: 249861 - DNA, 25 bp, probe
ggtggtcaaggttgtgacctccaca

SEQ ID NO: 249862 - DNA, 25 bp, probe
ggtgagtccatagctctaatctacc

SEQ ID NO: 249863 - DNA, 25 bp, probe
ggtgctctccagtaactaactaact

SEQ ID NO: 249864 - DNA, 25 bp, probe
ggtgtacctgtataaactgaactgt

SEQ ID NO: 249865 - DNA, 25 bp, probe
ggtggaacaaaatgtactgaactgg

SEQ ID NO: 249866 - DNA, 25 bp, probe
ggggaacatgaaaagagactaggtg

SEQ ID NO: 249867 - DNA, 25 bp, probe
ggggcagatctgtagtaaacaatgg

SEQ ID NO: 249868 - DNA, 25 bp, probe
ggggaatctggagctacacacagga

SEQ ID NO: 249869 - DNA, 25 bp, probe
ggggaatctggagctacacacagga

SEQ ID NO: 249870 - DNA, 25 bp, probe
ggggagaggcagaacatagccctgg

SEQ ID NO: 249871 - DNA, 25 bp, probe
ggggaggatggtaatcacagcattg

SEQ ID NO: 249872 - DNA, 25 bp, probe
ggggacatgagttttccagctttta

SEQ ID NO: 249873 - DNA, 25 bp, probe
ggaggtcatgggtgtaactttttct

SEQ ID NO: 249874 - DNA, 25 bp, probe
tggaaacattttctttctttttctg

SEQ ID NO: 249875 - DNA, 25 bp, probe
ggggagctgtttctattttatttat

SEQ ID NO: 249876 - DNA, 25 bp, probe
ggggagcttcggttattgtcatcca

SEQ ID NO: 249877 - DNA, 25 bp, probe
ggtggagccaaacaagtgtcagcca

SEQ ID NO: 249878 - DNA, 25 bp, probe
ggtggaacagcaaccggtgccacca

SEQ ID NO: 249879 - DNA, 25 bp, probe
ggtggaacagcaaccggtgccacca

SEQ ID NO: 249880 - DNA, 25 bp, probe
ggggcaaatcatgcccctggagcca

SEQ ID NO: 249881 - DNA, 25 bp, probe
ggggcaaatcatgcccctggagcca

SEQ ID NO: 249882 - DNA, 25 bp, probe
ggaccagaacatgaccggctgggcc

SEQ ID NO: 249883 - DNA, 25 bp, probe
ggtcaggcaagtgagcaccggggac

SEQ ID NO: 249884 - DNA, 25 bp, probe
ggtcaatatactgtacctcgggccg

SEQ ID NO: 249885 - DNA, 25 bp, probe
ggtctgcattttgtgcaccgggacc

SEQ ID NO: 249886 - DNA, 25 bp, probe
ggtgtggattgtgtcaggccttacc

SEQ ID NO: 249887 - DNA, 25 bp, probe
ggtgatggtagtttctacccatacc

SEQ ID NO: 249888 - DNA, 25 bp, probe
ggtggcaggaatacttcacctttcc

SEQ ID NO: 249889 - DNA, 25 bp, probe
ggtgggagacatgttcaattacttc

SEQ ID NO: 249890 - DNA, 25 bp, probe
ggggagagacatgaggcaatttctg

SEQ ID NO: 249891 - DNA, 25 bp, probe
ggggagagacatgaggcaatttctg

SEQ ID NO: 249892 - DNA, 25 bp, probe
ggtgtgaatattgtgccaatttcat

SEQ ID NO: 249893 - DNA, 25 bp, probe
ggtgtgaatactgtgccaactttat

SEQ ID NO: 249894 - DNA, 25 bp, probe
ggggagaagtttgcgactctgacag

SEQ ID NO: 249895 - DNA, 25 bp, probe
ggggaagtgattggcctaaagtcag

SEQ ID NO: 249896 - DNA, 25 bp, probe
ggggaagccatttgccatagaagga

SEQ ID NO: 249897 - DNA, 25 bp, probe
ggggaacaagcttgtgcaagaagaa

SEQ ID NO: 249898 - DNA, 25 bp, probe
ggggccacaactttggtgaagaagg

SEQ ID NO: 249899 - DNA, 25 bp, probe
ggggccacaactttggtgaagaagg

SEQ ID NO: 249900 - DNA, 25 bp, probe
ggggccaaagcctgtgtgagaagtt

SEQ ID NO: 249901 - DNA, 25 bp, probe
ggggccaaagcctgtgtgagaagtt

SEQ ID NO: 249902 - DNA, 25 bp, probe
ggggcatcaaaggtgtggtgacaga

SEQ ID NO: 249903 - DNA, 25 bp, probe
ggggcagtgatggttgccaggacga

SEQ ID NO: 249904 - DNA, 25 bp, probe
ggtggaggatggtgtcaagcagtgt

SEQ ID NO: 249905 - DNA, 25 bp, probe
ggggagctagagtatgacaaggtgc

SEQ ID NO: 249906 - DNA, 25 bp, probe
ggggccatagaccatacatacgatc

SEQ ID NO: 249907 - DNA, 25 bp, probe
ggggcctgggaaactgaaatgccca

SEQ ID NO: 249908 - DNA, 25 bp, probe
ggggaatgggaaacggacacctcat

SEQ ID NO: 249909 - DNA, 25 bp, probe
ggtaactgaggagaggggcgcctcc

SEQ ID NO: 249910 - DNA, 25 bp, probe
ggtggactcggagaccgaggccgtg

SEQ ID NO: 249911 - DNA, 25 bp, probe
ggtggtgcccgagaacgagaacagg

SEQ ID NO: 249912 - DNA, 25 bp, probe
ggggagcatgacacaaccgaataca

SEQ ID NO: 249913 - DNA, 25 bp, probe
ggtggagcgagtgcagaggttttca

SEQ ID NO: 249914 - DNA, 25 bp, probe
ggtggagcgagtgcagaggttttca

SEQ ID NO: 249915 - DNA, 25 bp, probe
ggggacatcacttagaagttcttat

SEQ ID NO: 249916 - DNA, 25 bp, probe
ggtggaacctcaagaatgactttat

SEQ ID NO: 249917 - DNA, 25 bp, probe
ggtggaaactgcagagagtcatgat

SEQ ID NO: 249918 - DNA, 25 bp, probe
ggggaacatgtgagggactgtctga

SEQ ID NO: 249919 - DNA, 25 bp, probe
ggggaagttgcaggggacactggag

SEQ ID NO: 249920 - DNA, 25 bp, probe
ggggaagttgcaggggacactggag

SEQ ID NO: 249921 - DNA, 25 bp, probe
ggggaagaatgctctggctacggag

SEQ ID NO: 249922 - DNA, 25 bp, probe
ggggaagaatgctctggctacggag

SEQ ID NO: 249923 - DNA, 25 bp, probe
ggtggaagataatgtactactgaag

SEQ ID NO: 249924 - DNA, 25 bp, probe
ggggaagtacgggatctacaccaag

SEQ ID NO: 249925 - DNA, 25 bp, probe
ggggaatgctgtcgggactgagcag

SEQ ID NO: 249926 - DNA, 25 bp, probe
ggggagcgctatcgcagggagatgc

SEQ ID NO: 249927 - DNA, 25 bp, probe
ggtggggctagaaggagccatggag

SEQ ID NO: 249928 - DNA, 25 bp, probe
ggtgtggggcatttaggccatgctg

SEQ ID NO: 249929 - DNA, 25 bp, probe
ggtgtatgtacattttgtgccttga

SEQ ID NO: 249930 - DNA, 25 bp, probe
ggtgtattgcctacattgggtttga

SEQ ID NO: 249931 - DNA, 25 bp, probe
ggtggatatgcaccacatcttggtc

SEQ ID NO: 249932 - DNA, 25 bp, probe
ggtgagttcatttactggtgtacgg

SEQ ID NO: 249933 - DNA, 25 bp, probe
ggtggcatttttatcgtgctcatct

SEQ ID NO: 249934 - DNA, 25 bp, probe
ggtggctctgtaatgattcagcgtg

SEQ ID NO: 249935 - DNA, 25 bp, probe
ggggctgctgtaattaccgagcaag

SEQ ID NO: 249936 - DNA, 25 bp, probe
ggggctctgtatatagctatgaaga

SEQ ID NO: 249937 - DNA, 25 bp, probe
ggggctctgtatatagctatgaaga

SEQ ID NO: 249938 - DNA, 25 bp, probe
ggggcttatatgactcatgtgtgtt

SEQ ID NO: 249939 - DNA, 25 bp, probe
ggtggtttatctgcatggtattgga

SEQ ID NO: 249940 - DNA, 25 bp, probe
ggtgtgctattcactgatggtcagg

SEQ ID NO: 249941 - DNA, 25 bp, probe
ggtgtgctattcactgatggtcagg

SEQ ID NO: 249942 - DNA, 25 bp, probe
ggtgttgactgtcctttcaaggaaa

SEQ ID NO: 249943 - DNA, 25 bp, probe
ggtgtctacatgtttgcttagaggc

SEQ ID NO: 249944 - DNA, 25 bp, probe
ggtgttgaaatttgtcatggatgga

SEQ ID NO: 249945 - DNA, 25 bp, probe
ggtggtggagaaggacaactggatc

SEQ ID NO: 249946 - DNA, 25 bp, probe
ggtggtggagaaggacaactggatc

SEQ ID NO: 249947 - DNA, 25 bp, probe
ggggctgtgaaacgctcacagatgg

SEQ ID NO: 249948 - DNA, 25 bp, probe
ggtgctcttcaatgactcaacacgc

SEQ ID NO: 249949 - DNA, 25 bp, probe
ggtgtcatggcttacctgttcacca

SEQ ID NO: 249950 - DNA, 25 bp, probe
ggtgaatggaagacacttacctaac

SEQ ID NO: 249951 - DNA, 25 bp, probe
ggtggggaagacgcccattgagaca

SEQ ID NO: 249952 - DNA, 25 bp, probe
ggtggcgagaagatggctctcttgg

SEQ ID NO: 249953 - DNA, 25 bp, probe
ggtggcgagaagatggctctcttgg

SEQ ID NO: 249954 - DNA, 25 bp, probe
ggtgggtagagttagttcctgtgaa

SEQ ID NO: 249955 - DNA, 25 bp, probe
ggtgaattatgaccaaatctccgat

SEQ ID NO: 249956 - DNA, 25 bp, probe
ggtggtcatcaagcacaaccggttc

SEQ ID NO: 249957 - DNA, 25 bp, probe
ggttttagatgccacaaagcggtta

SEQ ID NO: 249958 - DNA, 25 bp, probe
ggtgtttcaggaatactacgggctt

SEQ ID NO: 249959 - DNA, 25 bp, probe
ggggcttctggacagtagcttgact

SEQ ID NO: 249960 - DNA, 25 bp, probe
ggggctgtatttcagtagttgtaga

SEQ ID NO: 249961 - DNA, 25 bp, probe
ggggcttgacttttgtataggtaga

SEQ ID NO: 249962 - DNA, 25 bp, probe
ggaggcctgaaaattgtagggttat

SEQ ID NO: 249963 - DNA, 25 bp, probe
ggggcaaagaaattgcaaggacttt

SEQ ID NO: 249964 - DNA, 25 bp, probe
ggggaaaccacattaaggtgctcac

SEQ ID NO: 249965 - DNA, 25 bp, probe
ggggaaactcaatcagcaggacttc

SEQ ID NO: 249966 - DNA, 25 bp, probe
ggggaagcactcgtgtgcaacagac

SEQ ID NO: 249967 - DNA, 25 bp, probe
ggggaagcttccatgatgcacagta

SEQ ID NO: 249968 - DNA, 25 bp, probe
ggtggggcttccaatgatggcagtc

SEQ ID NO: 249969 - DNA, 25 bp, probe
ggtggggcttccaatgatggcagtc

SEQ ID NO: 249970 - DNA, 25 bp, probe
ggtgggcctgtatatagggtccatg

SEQ ID NO: 249971 - DNA, 25 bp, probe
ggtggacttggtcaacaggatgcaa

SEQ ID NO: 249972 - DNA, 25 bp, probe
ggggcatttggacctgtaggaaaag

SEQ ID NO: 249973 - DNA, 25 bp, probe
ggggcattctctggttggaggacag

SEQ ID NO: 249974 - DNA, 25 bp, probe
ggggcacaccaagtctggggtgcag

SEQ ID NO: 249975 - DNA, 25 bp, probe
ggtgtgccatccagtgccgggtcac

SEQ ID NO: 249976 - DNA, 25 bp, probe
ggtgagtctaaggatccaaggctac

SEQ ID NO: 249977 - DNA, 25 bp, probe
ggtggcagatgctaggaccaaggct

SEQ ID NO: 249978 - DNA, 25 bp, probe
ggggaacaatgttcacagatacttt

SEQ ID NO: 249979 - DNA, 25 bp, probe
ggtgtgtacttagctcagatacttg

SEQ ID NO: 249980 - DNA, 25 bp, probe
ggggcttcttcagcacagagacccc

SEQ ID NO: 249981 - DNA, 25 bp, probe
ggtgtgttttgcacagcacacccca

SEQ ID NO: 249982 - DNA, 25 bp, probe
ggtgttttgtcacaatgacctgctc

SEQ ID NO: 249983 - DNA, 25 bp, probe
ggtggttgtgatggtaggatccttc

SEQ ID NO: 249984 - DNA, 25 bp, probe
ggtggttgtgatggtaggatccttc

SEQ ID NO: 249985 - DNA, 25 bp, probe
ggtggtactgtttcaggaccatcat

SEQ ID NO: 249986 - DNA, 25 bp, probe
ggtggacagcggaacatatgaggaa

SEQ ID NO: 249987 - DNA, 25 bp, probe
ggggacatcggcaaggagatgtaca

SEQ ID NO: 249988 - DNA, 25 bp, probe
ggggcattcgtcagagctgtggaaa

SEQ ID NO: 249989 - DNA, 25 bp, probe
ggggcattcgtcagagctgtggaaa

SEQ ID NO: 249990 - DNA, 25 bp, probe
ggggcaggtgtagagttgagaaaac

SEQ ID NO: 249991 - DNA, 25 bp, probe
ggtggggtgtgagtgcgtatgaaag

SEQ ID NO: 249992 - DNA, 25 bp, probe
ggtgtggacgatcctgtgggagaag

SEQ ID NO: 249993 - DNA, 25 bp, probe
ggtgtcgggacacctgggcaaagac

SEQ ID NO: 249994 - DNA, 25 bp, probe
ggtgttgggagccctttggagaacg

SEQ ID NO: 249995 - DNA, 25 bp, probe
ggggaagaagcgctttgggcacatt

SEQ ID NO: 249996 - DNA, 25 bp, probe
ggggaagaagcgctttgggcacatt

SEQ ID NO: 249997 - DNA, 25 bp, probe
ggggaagaggtgcttcggccagcac

SEQ ID NO: 249998 - DNA, 25 bp, probe
ggggacaagaggctgtgggtgcagg

SEQ ID NO: 249999 - DNA, 25 bp, probe
ggggctgtggatgggtggggagcaa

SEQ ID NO: 250000 - DNA, 25 bp, probe
ggggcttgcctgtgttgagagaata

SEQ ID NO: 250001 - DNA, 25 bp, probe
ggggcttcctgaggggagacagagc

SEQ ID NO: 250002 - DNA, 25 bp, probe
ggggcctactagagtctgaacagct

SEQ ID NO: 250003 - DNA, 25 bp, probe
ggggcctagaagacagttcccagga

SEQ ID NO: 250004 - DNA, 25 bp, probe
ggggccttaaattggatgccacttt

SEQ ID NO: 250005 - DNA, 25 bp, probe
ggggctttgacattgggaaccattt

SEQ ID NO: 250006 - DNA, 25 bp, probe
ggtggctttgcctatgtggagatca

SEQ ID NO: 250007 - DNA, 25 bp, probe
ggggcttggctgcaggagatgccat

SEQ ID NO: 250008 - DNA, 25 bp, probe
ggggcagtcctggagtagacacttt

SEQ ID NO: 250009 - DNA, 25 bp, probe
ggggcagtcctggagtagacacttt

SEQ ID NO: 250010 - DNA, 25 bp, probe
ggtggcagtcacggagtgaatcctg

SEQ ID NO: 250011 - DNA, 25 bp, probe
ggggcaggagcaaggctgagttctg

SEQ ID NO: 250012 - DNA, 25 bp, probe
ggtggagtggctacacgaggagctg

SEQ ID NO: 250013 - DNA, 25 bp, probe
ggtggagctgcttatcaaaaacgaa

SEQ ID NO: 250014 - DNA, 25 bp, probe
ggtggactctgttgctaaaacaatt

SEQ ID NO: 250015 - DNA, 25 bp, probe
ggtggagacggtgaacatcagcaat

SEQ ID NO: 250016 - DNA, 25 bp, probe
ggtgtatacgagaaaagcccatgac

SEQ ID NO: 250017 - DNA, 25 bp, probe
ggtgttaagatataaggcattgcct

SEQ ID NO: 250018 - DNA, 25 bp, probe
ggtggaacagattcacaagtttgcc

SEQ ID NO: 250019 - DNA, 25 bp, probe
ggggcaagcatgatatgttgttaga

SEQ ID NO: 250020 - DNA, 25 bp, probe
ggggcaagcatgatatgttgttaga

SEQ ID NO: 250021 - DNA, 25 bp, probe
ggggaagatgaggagttctgggctg

SEQ ID NO: 250022 - DNA, 25 bp, probe
ggggaagatgaggagttctgggctg

SEQ ID NO: 250023 - DNA, 25 bp, probe
ggtgggagtggccagtgttggcggt

SEQ ID NO: 250024 - DNA, 25 bp, probe
ggggcaggtgagcaggatgccgagg

SEQ ID NO: 250025 - DNA, 25 bp, probe
ggggcaggtgagcaggatgccgagg

SEQ ID NO: 250026 - DNA, 25 bp, probe
ggggcaggtgagcaggatgccgagg

SEQ ID NO: 250027 - DNA, 25 bp, probe
ggggcgcttgagaacagcagggagg

SEQ ID NO: 250028 - DNA, 25 bp, probe
ggtgtcgtcatgctcaacagagtga

SEQ ID NO: 250029 - DNA, 25 bp, probe
ggtgtccacgttctgcaaggactgt

SEQ ID NO: 250030 - DNA, 25 bp, probe
ggggcccgttgattacagagagcat

SEQ ID NO: 250031 - DNA, 25 bp, probe
ggtgactacttttagagcaaggctg

SEQ ID NO: 250032 - DNA, 25 bp, probe
ggtggcattcctttaggaatgctgt

SEQ ID NO: 250033 - DNA, 25 bp, probe
ggggcttccaatgatggcagtcatc

SEQ ID NO: 250034 - DNA, 25 bp, probe
ggggcttccaatgatggcagtcatc

SEQ ID NO: 250035 - DNA, 25 bp, probe
ggtggttgccaacctgaatgtcctt

SEQ ID NO: 250036 - DNA, 25 bp, probe
ggtggtgtcagcaaactcaagtccc

SEQ ID NO: 250037 - DNA, 25 bp, probe
ggtggtgtcagcaaactcaagtccc

SEQ ID NO: 250038 - DNA, 25 bp, probe
ggtggtgtcagcaaactcaagtccc

SEQ ID NO: 250039 - DNA, 25 bp, probe
ggtggttcagtcactgcttgttgac

SEQ ID NO: 250040 - DNA, 25 bp, probe
ggtggttagctcaaccaatggagag

SEQ ID NO: 250041 - DNA, 25 bp, probe
ggtgccaaattctaccgtggaatgt

SEQ ID NO: 250042 - DNA, 25 bp, probe
ggtccatttttgcacttgtaagtca

SEQ ID NO: 250043 - DNA, 25 bp, probe
ggttcaagtttccaattaaagtcat

SEQ ID NO: 250044 - DNA, 25 bp, probe
ggttcaagtttccaattaaagtcat

SEQ ID NO: 250045 - DNA, 25 bp, probe
ggtgtgacaggatcctttaaagata

SEQ ID NO: 250046 - DNA, 25 bp, probe
ggtgtgacaggatcctttaaagata

SEQ ID NO: 250047 - DNA, 25 bp, probe
ggtggacggactgtaattgatagat

SEQ ID NO: 250048 - DNA, 25 bp, probe
ggtggagggcaggtttaagcatgag

SEQ ID NO: 250049 - DNA, 25 bp, probe
ggtggctgcatggcaggtcttaagg

SEQ ID NO: 250050 - DNA, 25 bp, probe
ggggctgctgggagtacaagtgcaa

SEQ ID NO: 250051 - DNA, 25 bp, probe
ggggctctggtaggtactaatggtg

SEQ ID NO: 250052 - DNA, 25 bp, probe
ggggctctgaaaaaagtaattggca

SEQ ID NO: 250053 - DNA, 25 bp, probe
ggggctcccagttacagaaaggcca

SEQ ID NO: 250054 - DNA, 25 bp, probe
ggggctgccaagcatgagagaaaag

SEQ ID NO: 250055 - DNA, 25 bp, probe
ggggcacctgcgcagatagagacaa

SEQ ID NO: 250056 - DNA, 25 bp, probe
ggggcacctgcgcagatagagacaa

SEQ ID NO: 250057 - DNA, 25 bp, probe
ggtggacctgtgcactcagtaaaac

SEQ ID NO: 250058 - DNA, 25 bp, probe
ggtgataccgtggtcacggcaaagg

SEQ ID NO: 250059 - DNA, 25 bp, probe
ggtggtcctgtgggcacaggctgca

SEQ ID NO: 250060 - DNA, 25 bp, probe
ggggctcactgtgggaatttgggga

SEQ ID NO: 250061 - DNA, 25 bp, probe
ggggcacctggaaaattcaggctga

SEQ ID NO: 250062 - DNA, 25 bp, probe
ggggcgactggaggaagccaggcga

SEQ ID NO: 250063 - DNA, 25 bp, probe
ggggcgcagggaagagtgcgggccc

SEQ ID NO: 250064 - DNA, 25 bp, probe
ggggccagctgaaaaatgggggtct

SEQ ID NO: 250065 - DNA, 25 bp, probe
ggtgggcactgataaaggaaggtac

SEQ ID NO: 250066 - DNA, 25 bp, probe
ggtgggaacagttacgaggcagtta

SEQ ID NO: 250067 - DNA, 25 bp, probe
ggtggcaataaataccagacacgta

SEQ ID NO: 250068 - DNA, 25 bp, probe
ggtgtggtatatcaagccaaacttt

SEQ ID NO: 250069 - DNA, 25 bp, probe
ggggctgagagacaaggcatgaact

SEQ ID NO: 250070 - DNA, 25 bp, probe
ggggctagcgagaaagatgcagagg

SEQ ID NO: 250071 - DNA, 25 bp, probe
ggggctagacagactggcagagagt

SEQ ID NO: 250072 - DNA, 25 bp, probe
ggggcaatacagaccatcaagcaat

SEQ ID NO: 250073 - DNA, 25 bp, probe
ggggcacatgaggcatcctgaagca

SEQ ID NO: 250074 - DNA, 25 bp, probe
ggggccatgcaggagcttgaagcac

SEQ ID NO: 250075 - DNA, 25 bp, probe
ggtggacatgcacagctaacatgga

SEQ ID NO: 250076 - DNA, 25 bp, probe
ggtggacatgcacagctaacatgga

SEQ ID NO: 250077 - DNA, 25 bp, probe
ggtggactgcttggcagtgctagga

SEQ ID NO: 250078 - DNA, 25 bp, probe
ggggcagatgttggcagctcttgcc

SEQ ID NO: 250079 - DNA, 25 bp, probe
ggggcagtatctggtcctgtgcccc

SEQ ID NO: 250080 - DNA, 25 bp, probe
ggggcagctgacagtttgtggcatc

SEQ ID NO: 250081 - DNA, 25 bp, probe
ggggcagcgtctggacagtgaggcc

SEQ ID NO: 250082 - DNA, 25 bp, probe
ggggcagcgatagactctggggatg

SEQ ID NO: 250083 - DNA, 25 bp, probe
ggtgagcagttagagtaggtgaatt

SEQ ID NO: 250084 - DNA, 25 bp, probe
ggtgtggctgtgaggtcagggtttt

SEQ ID NO: 250085 - DNA, 25 bp, probe
ggttttatgaagcttgagtttttct

SEQ ID NO: 250086 - DNA, 25 bp, probe
ggatattacttatgtctaatttttt

SEQ ID NO: 250087 - DNA, 25 bp, probe
ggtgcttgagttgttgtcgtttttt

SEQ ID NO: 250088 - DNA, 25 bp, probe
ggtgcttgagttgttgtcgtttttt

SEQ ID NO: 250089 - DNA, 25 bp, probe
ggcttccagtctgtgtttggttttt

SEQ ID NO: 250090 - DNA, 25 bp, probe
ggtgactcgaatgtgttttgctgtg

SEQ ID NO: 250091 - DNA, 25 bp, probe
ggtggtgccctgattgttggcatgg

SEQ ID NO: 250092 - DNA, 25 bp, probe
ggtgaagccctgtgtggtagattgg

SEQ ID NO: 250093 - DNA, 25 bp, probe
ggtgagaccctgtagggcacagggc

SEQ ID NO: 250094 - DNA, 25 bp, probe
ggtgagaccctgtagggcacagggc

SEQ ID NO: 250095 - DNA, 25 bp, probe
ggtggacccggccattgatgaaggc

SEQ ID NO: 250096 - DNA, 25 bp, probe
ggtggaggccgtggctatggttgga

SEQ ID NO: 250097 - DNA, 25 bp, probe
ggggctggccgtggagatgaagggt

SEQ ID NO: 250098 - DNA, 25 bp, probe
ggggctggccgtggagatgaagggt

SEQ ID NO: 250099 - DNA, 25 bp, probe
ggtggctggctggggaagaacaggt

SEQ ID NO: 250100 - DNA, 25 bp, probe
ggtggctggctggggaagaacaggt

SEQ ID NO: 250101 - DNA, 25 bp, probe
ggggcgctgaggcagaagaacgtgc

SEQ ID NO: 250102 - DNA, 25 bp, probe
ggggcactaagcagagagcccagtg

SEQ ID NO: 250103 - DNA, 25 bp, probe
ggtgaagctaacagggcacatactg

SEQ ID NO: 250104 - DNA, 25 bp, probe
ggtgtgtgctggaggggacatccgc

SEQ ID NO: 250105 - DNA, 25 bp, probe
ggtggtgctggtccggaaggacgac

SEQ ID NO: 250106 - DNA, 25 bp, probe
ggtggttggctacggatttgaaagc

SEQ ID NO: 250107 - DNA, 25 bp, probe
ggtggttggctacggctttgaagga

SEQ ID NO: 250108 - DNA, 25 bp, probe
ggtgtggtagaacactttcaaagag

SEQ ID NO: 250109 - DNA, 25 bp, probe
ggtgtggcttaacggtatttcagaa

SEQ ID NO: 250110 - DNA, 25 bp, probe
ggtggaccaacggactgatttagaa

SEQ ID NO: 250111 - DNA, 25 bp, probe
ggtggccctcaacactgagattgag

SEQ ID NO: 250112 - DNA, 25 bp, probe
ggggccactgaactccaagataaag

SEQ ID NO: 250113 - DNA, 25 bp, probe
ggtgtgccagcgaaaccaaaccatg

SEQ ID NO: 250114 - DNA, 25 bp, probe
ggtgtgccagcgaaaccaaaccatg

SEQ ID NO: 250115 - DNA, 25 bp, probe
ggtggagcacgagaacggcaccgac

SEQ ID NO: 250116 - DNA, 25 bp, probe
ggtggaggctgggaacggaatccct

SEQ ID NO: 250117 - DNA, 25 bp, probe
ggtggagggccagagtgtgtatacc

SEQ ID NO: 250118 - DNA, 25 bp, probe
ggtggagggccagagtgtgtatacc

SEQ ID NO: 250119 - DNA, 25 bp, probe
ggtggaggaccagatgatgcaaaag

SEQ ID NO: 250120 - DNA, 25 bp, probe
ggtggacgagcgtccgcatgctaat

SEQ ID NO: 250121 - DNA, 25 bp, probe
ggtggacgatgcctgcaacgtgaac

SEQ ID NO: 250122 - DNA, 25 bp, probe
ggtgaccagcaactggacggcaagc

SEQ ID NO: 250123 - DNA, 25 bp, probe
ggggctagccagttactggtcatgc

SEQ ID NO: 250124 - DNA, 25 bp, probe
ggtggtcaccattttctattcagcc

SEQ ID NO: 250125 - DNA, 25 bp, probe
ggtggtgccaatgtgccctggcacc

SEQ ID NO: 250126 - DNA, 25 bp, probe
ggtggacctcatggcccacatggcc

SEQ ID NO: 250127 - DNA, 25 bp, probe
ggtggagctccatcatcaaatggcc

SEQ ID NO: 250128 - DNA, 25 bp, probe
ggtggagacctgaatcagtatgtcc

SEQ ID NO: 250129 - DNA, 25 bp, probe
ggtggaagactgcacttgagctgcg

SEQ ID NO: 250130 - DNA, 25 bp, probe
ggtggacaagtccacgtggctgctc

SEQ ID NO: 250131 - DNA, 25 bp, probe
ggtggacatttggagcactggcgtc

SEQ ID NO: 250132 - DNA, 25 bp, probe
ggtggacatctccaagatgcacatg

SEQ ID NO: 250133 - DNA, 25 bp, probe
ggtggacagtcctgatgacacagcc

SEQ ID NO: 250134 - DNA, 25 bp, probe
ggtggacagtcctgatgacacagcc

SEQ ID NO: 250135 - DNA, 25 bp, probe
ggtggccatattctatggcaccctc

SEQ ID NO: 250136 - DNA, 25 bp, probe
ggtgatagcatgtggctgggaccca

SEQ ID NO: 250137 - DNA, 25 bp, probe
ggtaaattggtcaggaactattaat

SEQ ID NO: 250138 - DNA, 25 bp, probe
ggtgaagtaaccagaagactttcag

SEQ ID NO: 250139 - DNA, 25 bp, probe
ggtacaaataccagaattatacttg

SEQ ID NO: 250140 - DNA, 25 bp, probe
ggtgacaaaattacgtttatgtact

SEQ ID NO: 250141 - DNA, 25 bp, probe
ggtgacatattattacttttttggg

SEQ ID NO: 250142 - DNA, 25 bp, probe
ggtggataaagtactccatgtttgg

SEQ ID NO: 250143 - DNA, 25 bp, probe
ggtggaaagagaactcagcagatca

SEQ ID NO: 250144 - DNA, 25 bp, probe
ggtggacctgaaatggcgccacacg

SEQ ID NO: 250145 - DNA, 25 bp, probe
ggtggtcctgatagttcgcacattt

SEQ ID NO: 250146 - DNA, 25 bp, probe
ggtggtcgttttactcaacatgcta

SEQ ID NO: 250147 - DNA, 25 bp, probe
ggtgttcagcttgttgccaacagtt

SEQ ID NO: 250148 - DNA, 25 bp, probe
ggtgttactggtttcttacattgcc

SEQ ID NO: 250149 - DNA, 25 bp, probe
ggtgggagggtgtctttactatgtc

SEQ ID NO: 250150 - DNA, 25 bp, probe
ggtgggaggaaggcgagtcctcatg

SEQ ID NO: 250151 - DNA, 25 bp, probe
ggtggcggtcaagaagatccgctgc

SEQ ID NO: 250152 - DNA, 25 bp, probe
ggtgacagggaagaacgccctgaca

SEQ ID NO: 250153 - DNA, 25 bp, probe
ggtgagcagcggacttcaaaaactg

SEQ ID NO: 250154 - DNA, 25 bp, probe
ggtgagcagcggacttcaaaaactg

SEQ ID NO: 250155 - DNA, 25 bp, probe
ggtggtgcaggacatcgagcaaagt

SEQ ID NO: 250156 - DNA, 25 bp, probe
ggtggtgcaggggacaagaggctgt

SEQ ID NO: 250157 - DNA, 25 bp, probe
ggtggctgagggcatgagctacctg

SEQ ID NO: 250158 - DNA, 25 bp, probe
ggtggctgagggcatgagctacctg

SEQ ID NO: 250159 - DNA, 25 bp, probe
ggggctgaaggctagcaaaccgagc

SEQ ID NO: 250160 - DNA, 25 bp, probe
ggggctgaagccacacagcccagaa

SEQ ID NO: 250161 - DNA, 25 bp, probe
ggtggtagaggagccatcgccacaa

SEQ ID NO: 250162 - DNA, 25 bp, probe
ggtggccatgggatttcaggccaag

SEQ ID NO: 250163 - DNA, 25 bp, probe
ggggctctagggttgctggagcctg

SEQ ID NO: 250164 - DNA, 25 bp, probe
ggtgtgtctttttagtggagtcgta

SEQ ID NO: 250165 - DNA, 25 bp, probe
ggtgtgcatcgctgtgtagtgtgaa

SEQ ID NO: 250166 - DNA, 25 bp, probe
ggtgtatgcagtggtgatgcctaaa

SEQ ID NO: 250167 - DNA, 25 bp, probe
ggtgtgatgagtcttcagtagagat

SEQ ID NO: 250168 - DNA, 25 bp, probe
ggtggctcaatctctagtattataa

SEQ ID NO: 250169 - DNA, 25 bp, probe
ggggctcgaatggctatgtaaaaat

SEQ ID NO: 250170 - DNA, 25 bp, probe
ggggccgaagaattgtgagaacaga

SEQ ID NO: 250171 - DNA, 25 bp, probe
ggggcccactgtttggagaggatgg

SEQ ID NO: 250172 - DNA, 25 bp, probe
ggaggcccctttgtagaccagggct

SEQ ID NO: 250173 - DNA, 25 bp, probe
ggaggcccctttgtagaccagggct

SEQ ID NO: 250174 - DNA, 25 bp, probe
ggggccccttgatctgtaaaggtgt

SEQ ID NO: 250175 - DNA, 25 bp, probe
ggggcccactattcctgaataaggg

SEQ ID NO: 250176 - DNA, 25 bp, probe
ggggccatacgattgaaaatcaatg

SEQ ID NO: 250177 - DNA, 25 bp, probe
ggtggccacatccaagaagtacaag

SEQ ID NO: 250178 - DNA, 25 bp, probe
ggggctccactgtgaagaacaccat

SEQ ID NO: 250179 - DNA, 25 bp, probe
ggggctcaacggaacagacatctcc

SEQ ID NO: 250180 - DNA, 25 bp, probe
ggaactggacaagacgacccagggc

SEQ ID NO: 250181 - DNA, 25 bp, probe
ggagagcttcaagaaggacccccgc

SEQ ID NO: 250182 - DNA, 25 bp, probe
ggaggctttagtggtggaaccccag

SEQ ID NO: 250183 - DNA, 25 bp, probe
ggaggctttagtggtggaaccccag

SEQ ID NO: 250184 - DNA, 25 bp, probe
ggggctcttaaggtacagaactcca

SEQ ID NO: 250185 - DNA, 25 bp, probe
ggtggatctaaaactcaagaacaaa

SEQ ID NO: 250186 - DNA, 25 bp, probe
ggtggctgtgaaaaccctgaagcca

SEQ ID NO: 250187 - DNA, 25 bp, probe
ggtggccatcaaaaccctgaagcct

SEQ ID NO: 250188 - DNA, 25 bp, probe
ggtgatataaaaatccctttcctct

SEQ ID NO: 250189 - DNA, 25 bp, probe
ggtgaataacaagccttctcctatc

SEQ ID NO: 250190 - DNA, 25 bp, probe
ggtgtgtaaggtggcctattcctct

SEQ ID NO: 250191 - DNA, 25 bp, probe
ggggccaagattgggaactgcccat

SEQ ID NO: 250192 - DNA, 25 bp, probe
ggtggccatatttgggcagttccca

SEQ ID NO: 250193 - DNA, 25 bp, probe
ggtggccatatttgggcagttccca

SEQ ID NO: 250194 - DNA, 25 bp, probe
ggtggactatggcgacatggtcccc

SEQ ID NO: 250195 - DNA, 25 bp, probe
ggtggactatggcgacatggtcccc

SEQ ID NO: 250196 - DNA, 25 bp, probe
ggggccaagggcgatgcaggacccc

SEQ ID NO: 250197 - DNA, 25 bp, probe
ggggcctgaaggtcagggtcaccca

SEQ ID NO: 250198 - DNA, 25 bp, probe
ggtggccctgagggaggcattcacc

SEQ ID NO: 250199 - DNA, 25 bp, probe
ggtggctttcagaagaggattgtcc

SEQ ID NO: 250200 - DNA, 25 bp, probe
ggtggctgttccacagagaagtcta

SEQ ID NO: 250201 - DNA, 25 bp, probe
ggggcccttcaggagaacaatgtga

SEQ ID NO: 250202 - DNA, 25 bp, probe
ggtgtccccacaggatgaaacagct

SEQ ID NO: 250203 - DNA, 25 bp, probe
ggtgtcccacacaagtgtgaccaat

SEQ ID NO: 250204 - DNA, 25 bp, probe
ggtgcatcgccagcatttcgatcct

SEQ ID NO: 250205 - DNA, 25 bp, probe
ggtgttgacagattttctatccttc

SEQ ID NO: 250206 - DNA, 25 bp, probe
ggtgtaaattttattgccttggata

SEQ ID NO: 250207 - DNA, 25 bp, probe
ggtggaggatttgtttgagtacgaa

SEQ ID NO: 250208 - DNA, 25 bp, probe
ggtccccacttgctttgagataaaa

SEQ ID NO: 250209 - DNA, 25 bp, probe
ggtcaaccagtacccttacatataa

SEQ ID NO: 250210 - DNA, 25 bp, probe
ggtggagcagagagttcttacttat

SEQ ID NO: 250211 - DNA, 25 bp, probe
ggtgtgtgcatacagtttctgcctg

SEQ ID NO: 250212 - DNA, 25 bp, probe
ggtggcatcatgtaactgctaacct

SEQ ID NO: 250213 - DNA, 25 bp, probe
ggtggcatcatgtaactgctaacct

SEQ ID NO: 250214 - DNA, 25 bp, probe
ggtggcaatagaactgtgcccctcc

SEQ ID NO: 250215 - DNA, 25 bp, probe
ggtggcaatagaactgtgcccctcc

SEQ ID NO: 250216 - DNA, 25 bp, probe
ggtgacaacagtggtggcaactcct

SEQ ID NO: 250217 - DNA, 25 bp, probe
ggtgtcaagcagtgtgaccgctact

SEQ ID NO: 250218 - DNA, 25 bp, probe
ggtgtccatatctaggaccttgtct

SEQ ID NO: 250219 - DNA, 25 bp, probe
ggtgtaaataagtcataccttctta

SEQ ID NO: 250220 - DNA, 25 bp, probe
ggtggagaaagcactgacctgtcat

SEQ ID NO: 250221 - DNA, 25 bp, probe
ggggcgatatcctctgacgtatcat

SEQ ID NO: 250222 - DNA, 25 bp, probe
ggtgtcagtatccaggctttgtaca

SEQ ID NO: 250223 - DNA, 25 bp, probe
ggtgccagttgccagggcaagtcac

SEQ ID NO: 250224 - DNA, 25 bp, probe
ggtccagttggagaccgtcaacctt

SEQ ID NO: 250225 - DNA, 25 bp, probe
ggtgccagtttagagctcctggaca

SEQ ID NO: 250226 - DNA, 25 bp, probe
ggtgatactttgggtgcatttggaa

SEQ ID NO: 250227 - DNA, 25 bp, probe
ggtgaagcgatgtggagttagtgaa

SEQ ID NO: 250228 - DNA, 25 bp, probe
ggtgaacaacactgctggtttgaga

SEQ ID NO: 250229 - DNA, 25 bp, probe
ggtgaacaacactgctggtttgaga

SEQ ID NO: 250230 - DNA, 25 bp, probe
ggtgataaacagtgaggatgaggaa

SEQ ID NO: 250231 - DNA, 25 bp, probe
ggtggcaaaagataccttggaaatg

SEQ ID NO: 250232 - DNA, 25 bp, probe
ggtgagacagaacaatccctaaagg

SEQ ID NO: 250233 - DNA, 25 bp, probe
ggtggcacgaatggatactcctgaa

SEQ ID NO: 250234 - DNA, 25 bp, probe
ggtggaagcaatgtactctgctgct

SEQ ID NO: 250235 - DNA, 25 bp, probe
ggtgggagaatctataccttgttcc

SEQ ID NO: 250236 - DNA, 25 bp, probe
ggtgcaggaaaattcatccttaagc

SEQ ID NO: 250237 - DNA, 25 bp, probe
ggtggcagtgaggaccaccttcacc

SEQ ID NO: 250238 - DNA, 25 bp, probe
ggtggcagtgaggaccaccttcacc

SEQ ID NO: 250239 - DNA, 25 bp, probe
ggtcgcacagaggtcaaccagtgca

SEQ ID NO: 250240 - DNA, 25 bp, probe
ggtggagatgatggctcagctcctg

SEQ ID NO: 250241 - DNA, 25 bp, probe
ggtggactgtgggatgcatgccctg

SEQ ID NO: 250242 - DNA, 25 bp, probe
ggtggactgtgggatgcatgccctg

SEQ ID NO: 250243 - DNA, 25 bp, probe
ggtggaaatgtactgcaggctctgg

SEQ ID NO: 250244 - DNA, 25 bp, probe
ggtggcgagtgaaggcaccatgctg

SEQ ID NO: 250245 - DNA, 25 bp, probe
ggtgagcggaatggccgccggaacc

SEQ ID NO: 250246 - DNA, 25 bp, probe
ggtgagcggaatggccgccggaacc

SEQ ID NO: 250247 - DNA, 25 bp, probe
ggtggcgctagaggccatggaggca

SEQ ID NO: 250248 - DNA, 25 bp, probe
ggtggctgggaggcatcagttgcta

SEQ ID NO: 250249 - DNA, 25 bp, probe
ggtgggcaggcagatgatgaagtac

SEQ ID NO: 250250 - DNA, 25 bp, probe
ggtggagctggcaacaggacagttt

SEQ ID NO: 250251 - DNA, 25 bp, probe
ggtgagacggagccggaagttattt

SEQ ID NO: 250252 - DNA, 25 bp, probe
ggtggagggtgggaagagtcatgtt

SEQ ID NO: 250253 - DNA, 25 bp, probe
ggtggtttgtgggaggaatagtgtc

SEQ ID NO: 250254 - DNA, 25 bp, probe
ggtgttttgctgtgggaaatatttt

SEQ ID NO: 250255 - DNA, 25 bp, probe
ggtgttttcgcccaaatcattattt

SEQ ID NO: 250256 - DNA, 25 bp, probe
ggtgtttatcgtaacagttcataat

SEQ ID NO: 250257 - DNA, 25 bp, probe
ggtggtcttttcacagctcaaagag

SEQ ID NO: 250258 - DNA, 25 bp, probe
ggtgggcaaggtgagagttaaggat

SEQ ID NO: 250259 - DNA, 25 bp, probe
ggtgggcaaggtgagagttaaggat

SEQ ID NO: 250260 - DNA, 25 bp, probe
ggccgtgccggtgaaagtgaccgac

SEQ ID NO: 250261 - DNA, 25 bp, probe
ggcggggagggtgacagtggccgcc

SEQ ID NO: 250262 - DNA, 25 bp, probe
ggtgggggtgtgcagaatgggcccc

SEQ ID NO: 250263 - DNA, 25 bp, probe
ggtgagggaggcctgaaatgtttcc

SEQ ID NO: 250264 - DNA, 25 bp, probe
ggtggacgcagagcacttagttacc

SEQ ID NO: 250265 - DNA, 25 bp, probe
ggtggtatcaggcccctgagttact

SEQ ID NO: 250266 - DNA, 25 bp, probe
ggtgtggtgcagggatcctgatgtg

SEQ ID NO: 250267 - DNA, 25 bp, probe
ggtgtgagtgcgtatgaaagtgtgt

SEQ ID NO: 250268 - DNA, 25 bp, probe
ggtggatgggaaaatggtggtggaa

SEQ ID NO: 250269 - DNA, 25 bp, probe
ggtggatgggaaaatggtggtggaa

SEQ ID NO: 250270 - DNA, 25 bp, probe
ggtggcagtggagtagggaatggga

SEQ ID NO: 250271 - DNA, 25 bp, probe
ggtggaggtgattgcaggaaaagag

SEQ ID NO: 250272 - DNA, 25 bp, probe
ggtgtagcgatggagcaggaaactg

SEQ ID NO: 250273 - DNA, 25 bp, probe
ggtgtagtatgtccagtaatactgt

SEQ ID NO: 250274 - DNA, 25 bp, probe
ggtggagatctgcctagtgttactg

SEQ ID NO: 250275 - DNA, 25 bp, probe
ggtggagcagtgatgagtgtctaag

SEQ ID NO: 250276 - DNA, 25 bp, probe
ggtggcagcaccaggtgggacagag

SEQ ID NO: 250277 - DNA, 25 bp, probe
ggtgccccctggggggcacagccag

SEQ ID NO: 250278 - DNA, 25 bp, probe
ggtggccaagtgcttggatcacaaa

SEQ ID NO: 250279 - DNA, 25 bp, probe
ggtgtacaaggggatcgacaaccac

SEQ ID NO: 250280 - DNA, 25 bp, probe
ggtgtcctacgtgaaggcaatcgac

SEQ ID NO: 250281 - DNA, 25 bp, probe
ggtgtccctcttttatggaacagcc

SEQ ID NO: 250282 - DNA, 25 bp, probe
ggtgtgcctcagtatatttaaactc

SEQ ID NO: 250283 - DNA, 25 bp, probe
ggtggcatcaagcattttataactt

SEQ ID NO: 250284 - DNA, 25 bp, probe
ggtggaaaatcagttgttaccatta

SEQ ID NO: 250285 - DNA, 25 bp, probe
ggtgtaatgaaggcttgtcttcctc

SEQ ID NO: 250286 - DNA, 25 bp, probe
ggtgatacagcatgaggattttctc

SEQ ID NO: 250287 - DNA, 25 bp, probe
ggtgaactttgggctttttctcaat

SEQ ID NO: 250288 - DNA, 25 bp, probe
ggtgggcatgtcatgtgtcttttcc

SEQ ID NO: 250289 - DNA, 25 bp, probe
ggtggcagcagtcaggtttatttca

SEQ ID NO: 250290 - DNA, 25 bp, probe
ggtggcatatgttaagttttgcttc

SEQ ID NO: 250291 - DNA, 25 bp, probe
ggtggcaatgtaactcatttttttg

SEQ ID NO: 250292 - DNA, 25 bp, probe
ggtccatttcataccatttgggttg

SEQ ID NO: 250293 - DNA, 25 bp, probe
ggtccatttccccgcagcggggatc

SEQ ID NO: 250294 - DNA, 25 bp, probe
ggtgccctatcccgcaaaatgggct

SEQ ID NO: 250295 - DNA, 25 bp, probe
ggacggtacatcctgaatgggggca

SEQ ID NO: 250296 - DNA, 25 bp, probe
ggtgatcctaacatatcaggccatg

SEQ ID NO: 250297 - DNA, 25 bp, probe
ggtggctgtcaaattattgtaagtc

SEQ ID NO: 250298 - DNA, 25 bp, probe
ggtggtggcccttatagccacagtc

SEQ ID NO: 250299 - DNA, 25 bp, probe
ggtggctgtgttttacaccacagta

SEQ ID NO: 250300 - DNA, 25 bp, probe
ggtggctgtgttttacaccacagta

SEQ ID NO: 250301 - DNA, 25 bp, probe
ggtcgggagttcgagaccagcctga

SEQ ID NO: 250302 - DNA, 25 bp, probe
ggtgggaggttggagagccaggtga

SEQ ID NO: 250303 - DNA, 25 bp, probe
ggtgggaggatgacttgaacgcagg

SEQ ID NO: 250304 - DNA, 25 bp, probe
ggtgggtagatcatctgaggtcagg

SEQ ID NO: 250305 - DNA, 25 bp, probe
ggtgaggttgtcatgtcagcggagc

SEQ ID NO: 250306 - DNA, 25 bp, probe
ggtgaggttgtcatgtcagcggagc

SEQ ID NO: 250307 - DNA, 25 bp, probe
ggtgggctggatgccacacagatgg

SEQ ID NO: 250308 - DNA, 25 bp, probe
ggtggtgcagatgaccaacgacgac

SEQ ID NO: 250309 - DNA, 25 bp, probe
ggtggatcactgggaagacgaagcc

SEQ ID NO: 250310 - DNA, 25 bp, probe
ggtggacacgggagacagcgagccc

SEQ ID NO: 250311 - DNA, 25 bp, probe
ggtggctgccagggggcaaggagaa

SEQ ID NO: 250312 - DNA, 25 bp, probe
ggtgaaccagcagctactagggaga

SEQ ID NO: 250313 - DNA, 25 bp, probe
ggtgaaccagcagctactagggaga

SEQ ID NO: 250314 - DNA, 25 bp, probe
ggtggaccagactgactggtgagga

SEQ ID NO: 250315 - DNA, 25 bp, probe
ggtggattggatttgtctttggtga

SEQ ID NO: 250316 - DNA, 25 bp, probe
ggtggattggatttgtctttggtga

SEQ ID NO: 250317 - DNA, 25 bp, probe
ggtggtgctggtttatgttctagga

SEQ ID NO: 250318 - DNA, 25 bp, probe
ggtggtgtggagatactcttagaga

SEQ ID NO: 250319 - DNA, 25 bp, probe
ggtagctttagaagactcaggagga

SEQ ID NO: 250320 - DNA, 25 bp, probe
ggtgaccttcaaatggcaaagagga

SEQ ID NO: 250321 - DNA, 25 bp, probe
ggtgtccttatgttggaaactcaag

SEQ ID NO: 250322 - DNA, 25 bp, probe
gatatagatttttctggaccaacca

SEQ ID NO: 250323 - DNA, 25 bp, probe
ggtgtccttatgttggaaactcaag

SEQ ID NO: 250324 - DNA, 25 bp, probe
ggtgtcaccagattttggtcaccaa

SEQ ID NO: 250325 - DNA, 25 bp, probe
ggtgtaccagttatctgttgctgca

SEQ ID NO: 250326 - DNA, 25 bp, probe
ggtggaccattcgatttgatgtctc

SEQ ID NO: 250327 - DNA, 25 bp, probe
ggtggcagctgtaggcattcagatg

SEQ ID NO: 250328 - DNA, 25 bp, probe
ggtgacctgcttggatctagacagc

SEQ ID NO: 250329 - DNA, 25 bp, probe
ggtgaagctcttcgtgcgagaacct

SEQ ID NO: 250330 - DNA, 25 bp, probe
ggtggacctggagctggagagcttc

SEQ ID NO: 250331 - DNA, 25 bp, probe
ggtgtgacctggggagaaagttgag

SEQ ID NO: 250332 - DNA, 25 bp, probe
ggtgtgcaacttgcgggaattcaag

SEQ ID NO: 250333 - DNA, 25 bp, probe
ggtgtgaatattgtggggactctgc

SEQ ID NO: 250334 - DNA, 25 bp, probe
ggtgtaatttttcatggatcagtta

SEQ ID NO: 250335 - DNA, 25 bp, probe
ggtgtaatttttcatggatcagtta

SEQ ID NO: 250336 - DNA, 25 bp, probe
ggtgtttaagcttctctgtacagtt

SEQ ID NO: 250337 - DNA, 25 bp, probe
ggtgttctagagccatttgcataca

SEQ ID NO: 250338 - DNA, 25 bp, probe
ggtggtcatggctcttagctaacct

SEQ ID NO: 250339 - DNA, 25 bp, probe
ggtgtgctcacttacattatgctca

SEQ ID NO: 250340 - DNA, 25 bp, probe
ggtgagctacgtcattattgagcca

SEQ ID NO: 250341 - DNA, 25 bp, probe
ggtggctatcaatattggatggcga

SEQ ID NO: 250342 - DNA, 25 bp, probe
ggtggtacatcttgttgaattcaat

SEQ ID NO: 250343 - DNA, 25 bp, probe
ggtgtgaaactcggctgtattaatc

SEQ ID NO: 250344 - DNA, 25 bp, probe
ggtgtgatcaatgcgctgatgtgat

SEQ ID NO: 250345 - DNA, 25 bp, probe
ggtgtgatcaatgcgctgatgtgat

SEQ ID NO: 250346 - DNA, 25 bp, probe
ggtgtcagcactgctgcagtgtggg

SEQ ID NO: 250347 - DNA, 25 bp, probe
ggtgtcagatgctctcaggagggtg

SEQ ID NO: 250348 - DNA, 25 bp, probe
ggtgtcagatgctctcaggagggtg

SEQ ID NO: 250349 - DNA, 25 bp, probe
ggtgtcaatgatgatgggctggagg

SEQ ID NO: 250350 - DNA, 25 bp, probe
ggtgtttacgagcagctgtgagtga

SEQ ID NO: 250351 - DNA, 25 bp, probe
ggtggttcaagggcaggtagctgat

SEQ ID NO: 250352 - DNA, 25 bp, probe
ggtgggtaaggcctgatcatagtat

SEQ ID NO: 250353 - DNA, 25 bp, probe
ggtggtggacggactgtaattgata

SEQ ID NO: 250354 - DNA, 25 bp, probe
ggtggtggggagagctggatttgaa

SEQ ID NO: 250355 - DNA, 25 bp, probe
ggagggatggggagtcggttagtca

SEQ ID NO: 250356 - DNA, 25 bp, probe
ggtgggggtgaaggatgggttcagt

SEQ ID NO: 250357 - DNA, 25 bp, probe
ggtgggggccaagtcacaggttggc

SEQ ID NO: 250358 - DNA, 25 bp, probe
ggtgaggtggccaaaaccagaacca

SEQ ID NO: 250359 - DNA, 25 bp, probe
ggtgcggggagacattccaaaaatc

SEQ ID NO: 250360 - DNA, 25 bp, probe
ggtgcgaggtggagggctaacaaga

SEQ ID NO: 250361 - DNA, 25 bp, probe
ggtgtgggagtgatggtggaagata

SEQ ID NO: 250362 - DNA, 25 bp, probe
ggtggactgagtggtgcgaggtgga

SEQ ID NO: 250363 - DNA, 25 bp, probe
ggtggatcaggggacgggatggggt

SEQ ID NO: 250364 - DNA, 25 bp, probe
ggtggcaagagggaatgtcagcagg

SEQ ID NO: 250365 - DNA, 25 bp, probe
ggtggtagactggtagtgagcagca

SEQ ID NO: 250366 - DNA, 25 bp, probe
ggtgtagaggcggagaggagccaag

SEQ ID NO: 250367 - DNA, 25 bp, probe
ggtgatcaagaagacggagacagac

SEQ ID NO: 250368 - DNA, 25 bp, probe
ggtttggcaaggagcctggcgacct

SEQ ID NO: 250369 - DNA, 25 bp, probe
ggtgtttgcgggatgttggctgccc

SEQ ID NO: 250370 - DNA, 25 bp, probe
ggtggtgtctgaggaggtctgcagt

SEQ ID NO: 250371 - DNA, 25 bp, probe
ggtggtcagagacgggtcatctgtc

SEQ ID NO: 250372 - DNA, 25 bp, probe
ggtggtcagagacgggtcatctgtc

SEQ ID NO: 250373 - DNA, 25 bp, probe
ggtggtggcagccaggattcatctg

SEQ ID NO: 250374 - DNA, 25 bp, probe
ggtgaggtggcatggtccattctca

SEQ ID NO: 250375 - DNA, 25 bp, probe
ggtggtgatggctggtgtgattcca

SEQ ID NO: 250376 - DNA, 25 bp, probe
ggtggagacgattggggatgcttac

SEQ ID NO: 250377 - DNA, 25 bp, probe
ggtggaaaccatcggtgatgcgtac

SEQ ID NO: 250378 - DNA, 25 bp, probe
ggtggaaaccacgggcatcaccacc

SEQ ID NO: 250379 - DNA, 25 bp, probe
ggtggactcctcagaggacgacacc

SEQ ID NO: 250380 - DNA, 25 bp, probe
ggtgtgtcatcctgtgaggactgca

SEQ ID NO: 250381 - DNA, 25 bp, probe
ggtggggcatcagtgatgggactga

SEQ ID NO: 250382 - DNA, 25 bp, probe
ggtgggcagcattagcagatggtta

SEQ ID NO: 250383 - DNA, 25 bp, probe
ggtgctggagtatgcggctgtcaac

SEQ ID NO: 250384 - DNA, 25 bp, probe
ggtgttcagtgaatgcgactcctca

SEQ ID NO: 250385 - DNA, 25 bp, probe
ggtgtctgagtgaaggaccgcgctc

SEQ ID NO: 250386 - DNA, 25 bp, probe
ggtggagagcacagagtcccagatc

SEQ ID NO: 250387 - DNA, 25 bp, probe
ggtggtgatgactgagaccttagct

SEQ ID NO: 250388 - DNA, 25 bp, probe
ggtggtagcccttgatgctttacat

SEQ ID NO: 250389 - DNA, 25 bp, probe
ggtggtttgtcttgacatttgaata

SEQ ID NO: 250390 - DNA, 25 bp, probe
ggtggtttgtcttgacatttgaata

SEQ ID NO: 250391 - DNA, 25 bp, probe
ggtgacccagtcagagttgtgcaca

SEQ ID NO: 250392 - DNA, 25 bp, probe
ggtgtcccagtaaagccaatgaccc

SEQ ID NO: 250393 - DNA, 25 bp, probe
ggtgcccaagtaattcactacagcc

SEQ ID NO: 250394 - DNA, 25 bp, probe
ggagacctaggcagtctgcaaatga

SEQ ID NO: 250395 - DNA, 25 bp, probe
ggagccctttcggttcaagaagagc

SEQ ID NO: 250396 - DNA, 25 bp, probe
ggtgacctattctaactcaaggagg

SEQ ID NO: 250397 - DNA, 25 bp, probe
ggtgatctgctaaagttcatccgga

SEQ ID NO: 250398 - DNA, 25 bp, probe
ggtgattgctacacttttggcagca

SEQ ID NO: 250399 - DNA, 25 bp, probe
ggtgaaggagcgggctttggcgcca

SEQ ID NO: 250400 - DNA, 25 bp, probe
ggtgagaggaaatgttgactggcca

SEQ ID NO: 250401 - DNA, 25 bp, probe
ggtgctggaaagtgtggcctagcca

SEQ ID NO: 250402 - DNA, 25 bp, probe
ggtgggcacaagtattacacatcag

SEQ ID NO: 250403 - DNA, 25 bp, probe
ggtggagcacttcatgaaccacagc

SEQ ID NO: 250404 - DNA, 25 bp, probe
ggtggagcatttcaagaagacgggg

SEQ ID NO: 250405 - DNA, 25 bp, probe
ggtggacatgtcctgaaggacaagg

SEQ ID NO: 250406 - DNA, 25 bp, probe
ggtggatcatgtgcttgagcagact

SEQ ID NO: 250407 - DNA, 25 bp, probe
ggtggatcatgtgcttgagcagact

SEQ ID NO: 250408 - DNA, 25 bp, probe
ggtggatgcagtggtccaggactgg

SEQ ID NO: 250409 - DNA, 25 bp, probe
ggtgaatacatgagccagcggctgg

SEQ ID NO: 250410 - DNA, 25 bp, probe
ggtgagacacgtggagcaggtcctg

SEQ ID NO: 250411 - DNA, 25 bp, probe
ggtgatcaccgtgaggcagcaccga

SEQ ID NO: 250412 - DNA, 25 bp, probe
ggtgatcaccgtgaggcagcaccga

SEQ ID NO: 250413 - DNA, 25 bp, probe
ggtgtgcggagtcctggcacaccga

SEQ ID NO: 250414 - DNA, 25 bp, probe
ggtggggcagcaccgtgaagacgaa

SEQ ID NO: 250415 - DNA, 25 bp, probe
ggtcggcgccaggtggaaaaacagc

SEQ ID NO: 250416 - DNA, 25 bp, probe
ggtggggtatcaccagagaaaaagc

SEQ ID NO: 250417 - DNA, 25 bp, probe
ggtggagcgtggtccagagagacac

SEQ ID NO: 250418 - DNA, 25 bp, probe
ggtggagcgtggtccagagagacac

SEQ ID NO: 250419 - DNA, 25 bp, probe
ggtggagcgaggctacaggatgccc

SEQ ID NO: 250420 - DNA, 25 bp, probe
ggtgatggaaggttacaagtggcac

SEQ ID NO: 250421 - DNA, 25 bp, probe
ggtgataaattgggtcacagaggca

SEQ ID NO: 250422 - DNA, 25 bp, probe
ggtgattgtttccgtaagcagtatg

SEQ ID NO: 250423 - DNA, 25 bp, probe
ggtgactgattttggcttagcggtg

SEQ ID NO: 250424 - DNA, 25 bp, probe
ggtgcacatgatacaaggacatagc

SEQ ID NO: 250425 - DNA, 25 bp, probe
ggtgcacatgatacaaggacatagc

SEQ ID NO: 250426 - DNA, 25 bp, probe
ggtgatcatcataatacaacttcaa

SEQ ID NO: 250427 - DNA, 25 bp, probe
ggtgactgatgagtaagttctgagg

SEQ ID NO: 250428 - DNA, 25 bp, probe
ggtgactgatgagtaagttctgagg

SEQ ID NO: 250429 - DNA, 25 bp, probe
ggtgacgtggtgaggatctacagcc

SEQ ID NO: 250430 - DNA, 25 bp, probe
ggtgaagcgggaagtctccaagggc

SEQ ID NO: 250431 - DNA, 25 bp, probe
ggtgcaggggaaagttaaaggtgat

SEQ ID NO: 250432 - DNA, 25 bp, probe
ggtgcaggggaaagttaaaggtgat

SEQ ID NO: 250433 - DNA, 25 bp, probe
ggtgaggtggactgcattacagggg

SEQ ID NO: 250434 - DNA, 25 bp, probe
ggtgggtgtgagagtggacggtatg

SEQ ID NO: 250435 - DNA, 25 bp, probe
ggtgcaggtggacagggactggaat

SEQ ID NO: 250436 - DNA, 25 bp, probe
ggtgagggcaggctgaggcaacgag

SEQ ID NO: 250437 - DNA, 25 bp, probe
ggtggagtgaggttgaagattcctg

SEQ ID NO: 250438 - DNA, 25 bp, probe
ggtgggagctggttgaattgtcttt

SEQ ID NO: 250439 - DNA, 25 bp, probe
ggtgggcacttggagtttgcttgtt

SEQ ID NO: 250440 - DNA, 25 bp, probe
ggtgggcaatgggcgtgttgctcta

SEQ ID NO: 250441 - DNA, 25 bp, probe
ggtggatgaagggtatctctatata

SEQ ID NO: 250442 - DNA, 25 bp, probe
ggtgaagaagtcgttcctactgaca

SEQ ID NO: 250443 - DNA, 25 bp, probe
ggtgaaaagtcattgttgtctacac

SEQ ID NO: 250444 - DNA, 25 bp, probe
ggtgtccagagccaaggcttctacc

SEQ ID NO: 250445 - DNA, 25 bp, probe
ggtgtccatgcacacatggtgtccc

SEQ ID NO: 250446 - DNA, 25 bp, probe
ggtgcatacattcagagggccacac

SEQ ID NO: 250447 - DNA, 25 bp, probe
ggtgtatgagctccagaggctgctc

SEQ ID NO: 250448 - DNA, 25 bp, probe
ggtgctatgaagctgatggtctatt

SEQ ID NO: 250449 - DNA, 25 bp, probe
ggtgatgacacactttgtgtgctga

SEQ ID NO: 250450 - DNA, 25 bp, probe
ggtgatgacacactttgtgtgctga

SEQ ID NO: 250451 - DNA, 25 bp, probe
ggtgagaggcatccagtatcttgaa

SEQ ID NO: 250452 - DNA, 25 bp, probe
ggtgagaggcatccagtatcttgaa

SEQ ID NO: 250453 - DNA, 25 bp, probe
ggtggaggcagccagggcttacctg

SEQ ID NO: 250454 - DNA, 25 bp, probe
ggtggatggcagtatgcggtctatc

SEQ ID NO: 250455 - DNA, 25 bp, probe
ggtggatgtcagcacgaatgtgtca

SEQ ID NO: 250456 - DNA, 25 bp, probe
ggtggatgtgaccaaggtatcaatg

SEQ ID NO: 250457 - DNA, 25 bp, probe
ggtggatgtgaccaaggtatcaatg

SEQ ID NO: 250458 - DNA, 25 bp, probe
ggtggagtactacactcagcagcag

SEQ ID NO: 250459 - DNA, 25 bp, probe
ggtgaaggactacctgtggcagatg

SEQ ID NO: 250460 - DNA, 25 bp, probe
ggtgaagaaaagtctgagggtcctc

SEQ ID NO: 250461 - DNA, 25 bp, probe
ggtggatgagaagcctcgggctgca

SEQ ID NO: 250462 - DNA, 25 bp, probe
ggtggtagacatgtgcatcagggag

SEQ ID NO: 250463 - DNA, 25 bp, probe
ggtggtagacatgtgcatcagggag

SEQ ID NO: 250464 - DNA, 25 bp, probe
ggtggtagacatgtgcatcagggag

SEQ ID NO: 250465 - DNA, 25 bp, probe
ggtggtagacatgtgcatcagggag

SEQ ID NO: 250466 - DNA, 25 bp, probe
ggtggtggtgatgatcgcagggata

SEQ ID NO: 250467 - DNA, 25 bp, probe
ggtggtggtgatgatcgcagggata

SEQ ID NO: 250468 - DNA, 25 bp, probe
ggtggatgacgtgccaaggagcaca

SEQ ID NO: 250469 - DNA, 25 bp, probe
ggtgtacacattagccaatgagaac

SEQ ID NO: 250470 - DNA, 25 bp, probe
ggtgtatcagttagtgcaggaagta

SEQ ID NO: 250471 - DNA, 25 bp, probe
ggtgtgacagtttgggagttgatga

SEQ ID NO: 250472 - DNA, 25 bp, probe
ggtggtatgtttgggagactgctga

SEQ ID NO: 250473 - DNA, 25 bp, probe
ggtgtttggtatgggaaccttctct

SEQ ID NO: 250474 - DNA, 25 bp, probe
ggtgttgtcgtgagtgccacctaac

SEQ ID NO: 250475 - DNA, 25 bp, probe
ggtgttttcttaatgcctcacattg

SEQ ID NO: 250476 - DNA, 25 bp, probe
ggtcctgtttcgaatcactagtgta

SEQ ID NO: 250477 - DNA, 25 bp, probe
ggtgtggcttactatttcattgtgt

SEQ ID NO: 250478 - DNA, 25 bp, probe
ggtgctggacaagttcattcacgtg

SEQ ID NO: 250479 - DNA, 25 bp, probe
ggtgctataggagtaattgtcggac

SEQ ID NO: 250480 - DNA, 25 bp, probe
ggtgagaaggcagatatttctgtga

SEQ ID NO: 250481 - DNA, 25 bp, probe
ggtggattccatgacatatattgta

SEQ ID NO: 250482 - DNA, 25 bp, probe
ggtggtatcaatgaatatagttcca

SEQ ID NO: 250483 - DNA, 25 bp, probe
ggtggtgcacaagaagatgaggccc

SEQ ID NO: 250484 - DNA, 25 bp, probe
ggtggtgcaggaagaagcagcgggc

SEQ ID NO: 250485 - DNA, 25 bp, probe
ggtgtttgagaagatgcggggaggc

SEQ ID NO: 250486 - DNA, 25 bp, probe
ggtgttgtgagatgcctgtgtcaga

SEQ ID NO: 250487 - DNA, 25 bp, probe
ggtgttgtgagtccacatgagctcc

SEQ ID NO: 250488 - DNA, 25 bp, probe
ggtgatgcttgagtgcacagagacc

SEQ ID NO: 250489 - DNA, 25 bp, probe
ggtgatgtgccccacaagacacatc

SEQ ID NO: 250490 - DNA, 25 bp, probe
ggtgtcatcgacacaagtccaccaa

SEQ ID NO: 250491 - DNA, 25 bp, probe
ggtgtgatcaaggccacacccacca

SEQ ID NO: 250492 - DNA, 25 bp, probe
ggtggtagagaccacaagtatctac

SEQ ID NO: 250493 - DNA, 25 bp, probe
ggtcgccatcaagaaagtattgcag

SEQ ID NO: 250494 - DNA, 25 bp, probe
ggtgatgttcaacagaagtgaagac

SEQ ID NO: 250495 - DNA, 25 bp, probe
ggtgaactggaatataggcaagaga

SEQ ID NO: 250496 - DNA, 25 bp, probe
ggtgaacattgcaatagaaatccaa

SEQ ID NO: 250497 - DNA, 25 bp, probe
ggtggtcaggcgtagatcaccagaa

SEQ ID NO: 250498 - DNA, 25 bp, probe
ggtgtggaggcagcactcaccaaac

SEQ ID NO: 250499 - DNA, 25 bp, probe
ggtggggcaggatctcagccataaa

SEQ ID NO: 250500 - DNA, 25 bp, probe
ggtgtgctggggattaccatgtcca

SEQ ID NO: 250501 - DNA, 25 bp, probe
ggtgtaggggtaggcacctggcatc

SEQ ID NO: 250502 - DNA, 25 bp, probe
ggtgaagaagcgaacagtcctgatc

SEQ ID NO: 250503 - DNA, 25 bp, probe
ggtgtcagaattaagctgcctcagt

SEQ ID NO: 250504 - DNA, 25 bp, probe
ggtgtcagacatttgatttcatcac

SEQ ID NO: 250505 - DNA, 25 bp, probe
ggtgtgaaagtgtcatcttcactgc

SEQ ID NO: 250506 - DNA, 25 bp, probe
ggtgtatagtgttcacaaactgtga

SEQ ID NO: 250507 - DNA, 25 bp, probe
ggtgtcataatgatgctacaactta

SEQ ID NO: 250508 - DNA, 25 bp, probe
ggtgtgatcacatatgctttactta

SEQ ID NO: 250509 - DNA, 25 bp, probe
ggtgtggccaggagttacttctatg

SEQ ID NO: 250510 - DNA, 25 bp, probe
ggtccagccggagtttatttaatga

SEQ ID NO: 250511 - DNA, 25 bp, probe
ggtgtcacgctgttttttttaatgt

SEQ ID NO: 250512 - DNA, 25 bp, probe
ggtgtcacgctgttttttttaatgt

SEQ ID NO: 250513 - DNA, 25 bp, probe
ggtgatcggatctgtttcatttata

SEQ ID NO: 250514 - DNA, 25 bp, probe
ggtgaggacatctgggtctcatttg

SEQ ID NO: 250515 - DNA, 25 bp, probe
ggtgagtgagagagtgctgtccttt

SEQ ID NO: 250516 - DNA, 25 bp, probe
ggtgatgggaatggcttatccttca

SEQ ID NO: 250517 - DNA, 25 bp, probe
ggtgtgcgtcaaggactactgcttc

SEQ ID NO: 250518 - DNA, 25 bp, probe
ggtgtgcgtcaaggactactgcttc

SEQ ID NO: 250519 - DNA, 25 bp, probe
ggtgcagctgactgagacgacatgc

SEQ ID NO: 250520 - DNA, 25 bp, probe
ggtgcagtacagcagggcctgaata

SEQ ID NO: 250521 - DNA, 25 bp, probe
ggtacttactagagcctgagaacag

SEQ ID NO: 250522 - DNA, 25 bp, probe
ggtacgtgactatccctaataacaa

SEQ ID NO: 250523 - DNA, 25 bp, probe
ggtacgtgactatccctaataacaa

SEQ ID NO: 250524 - DNA, 25 bp, probe
ggtccagaagaatcccttctagaaa

SEQ ID NO: 250525 - DNA, 25 bp, probe
ggtcctggaaatcccttattgaggg

SEQ ID NO: 250526 - DNA, 25 bp, probe
ggtcctgatagttcgcacatttttg

SEQ ID NO: 250527 - DNA, 25 bp, probe
ggtcctgatagttcgcacatttttg

SEQ ID NO: 250528 - DNA, 25 bp, probe
ggtccagacgaaggagcagtttgag

SEQ ID NO: 250529 - DNA, 25 bp, probe
ggtgccaatcagtggatcaagttta

SEQ ID NO: 250530 - DNA, 25 bp, probe
ggaccagaagtcctatcgactttat

SEQ ID NO: 250531 - DNA, 25 bp, probe
ggcagccggtaacagctgaccttat

SEQ ID NO: 250532 - DNA, 25 bp, probe
ggtggggtactggcatcagagcctg

SEQ ID NO: 250533 - DNA, 25 bp, probe
ggtggtgagcatgtaacatgagctt

SEQ ID NO: 250534 - DNA, 25 bp, probe
ggtgagctgatcgctataactgccc

SEQ ID NO: 250535 - DNA, 25 bp, probe
ggtctgtgatgcccttagatgtccg

SEQ ID NO: 250536 - DNA, 25 bp, probe
ggtgactgatgatgctctggtgtac

SEQ ID NO: 250537 - DNA, 25 bp, probe
ggtgcacgtgaaccaggaggacctg

SEQ ID NO: 250538 - DNA, 25 bp, probe
ggtgattcagaacctggagcgaggc

SEQ ID NO: 250539 - DNA, 25 bp, probe
ggtgtggagatactcttagagaaga

SEQ ID NO: 250540 - DNA, 25 bp, probe
ggtgggagaagtatgcaggcgagca

SEQ ID NO: 250541 - DNA, 25 bp, probe
ggtgggataaacaatgaagcctgca

SEQ ID NO: 250542 - DNA, 25 bp, probe
ggtgttaaaacatttagcgtcacag

SEQ ID NO: 250543 - DNA, 25 bp, probe
ggtgttacggaaatcggcctacaag

SEQ ID NO: 250544 - DNA, 25 bp, probe
ggtggtaagagaaacctgccttcac

SEQ ID NO: 250545 - DNA, 25 bp, probe
ggtttaaggctgaggctgccctgac

SEQ ID NO: 250546 - DNA, 25 bp, probe
ggtgaagaaagtcaggctgccctcc

SEQ ID NO: 250547 - DNA, 25 bp, probe
ggtgaagacggtcaacgagtcagcc

SEQ ID NO: 250548 - DNA, 25 bp, probe
ggtgacacacagcaacaacgaaaca

SEQ ID NO: 250549 - DNA, 25 bp, probe
ggtgaaccaagtaggagtgaaagca

SEQ ID NO: 250550 - DNA, 25 bp, probe
ggtgaaccaagtaggagtgaaagca

SEQ ID NO: 250551 - DNA, 25 bp, probe
ggtgaagccacactagggtgaagcc

SEQ ID NO: 250552 - DNA, 25 bp, probe
ggtaacctactaggtgctgaccttc

SEQ ID NO: 250553 - DNA, 25 bp, probe
ggtcaatagccgtggtgttcagttc

SEQ ID NO: 250554 - DNA, 25 bp, probe
ggtcaatagccgtggtgttcagttc

SEQ ID NO: 250555 - DNA, 25 bp, probe
ggtgatcaagggtgtggttagtgga

SEQ ID NO: 250556 - DNA, 25 bp, probe
ggtgtaatcagctggggagtagtgg

SEQ ID NO: 250557 - DNA, 25 bp, probe
ggtgtcaacagctcacaggagcgtg

SEQ ID NO: 250558 - DNA, 25 bp, probe
ggtgtctcaggctgcctgagtcgtg

SEQ ID NO: 250559 - DNA, 25 bp, probe
ggtgtctcaggctgcctgagtcgtg

SEQ ID NO: 250560 - DNA, 25 bp, probe
ggtgtgccggatcggcgattggctc

SEQ ID NO: 250561 - DNA, 25 bp, probe
ggtgattccgcagtgagagagtggc

SEQ ID NO: 250562 - DNA, 25 bp, probe
ggtggtggtgcaggaggagggcggc

SEQ ID NO: 250563 - DNA, 25 bp, probe
ggtggtggtgcaggaggagggcggc

SEQ ID NO: 250564 - DNA, 25 bp, probe
ggtgggcatgaggaaggaggcggtg

SEQ ID NO: 250565 - DNA, 25 bp, probe
ggtgttcaagaaacgtgacagtgtg

SEQ ID NO: 250566 - DNA, 25 bp, probe
ggtgttagaagccatcgttctgtgg

SEQ ID NO: 250567 - DNA, 25 bp, probe
ggtgttatcaatcactttgtctgtg

SEQ ID NO: 250568 - DNA, 25 bp, probe
ggtgtttatactgatttgattgtgc

SEQ ID NO: 250569 - DNA, 25 bp, probe
ggtgatgttcatcttgtgtttctgt

SEQ ID NO: 250570 - DNA, 25 bp, probe
ggtgttcatgtctcatggtattcgg

SEQ ID NO: 250571 - DNA, 25 bp, probe
ggtgttcatgtctcatggtattcgg

SEQ ID NO: 250572 - DNA, 25 bp, probe
ggtgatgccttctcagagtcaacct

SEQ ID NO: 250573 - DNA, 25 bp, probe
ggtgactgctttgtagtgaactttc

SEQ ID NO: 250574 - DNA, 25 bp, probe
ggtgactgctttgtagtgaactttc

SEQ ID NO: 250575 - DNA, 25 bp, probe
ggtgatttgtatgctcattgaactt

SEQ ID NO: 250576 - DNA, 25 bp, probe
ggtgattctggtatcatggtgttta

SEQ ID NO: 250577 - DNA, 25 bp, probe
ggtgtgtcttatagtgatggttgta

SEQ ID NO: 250578 - DNA, 25 bp, probe
ggtccgcctttggcattgtgtgtac

SEQ ID NO: 250579 - DNA, 25 bp, probe
ggtccccagcattgcagtatggtgt

SEQ ID NO: 250580 - DNA, 25 bp, probe
ggtgtgtcgacatcagttgtgtgtg

SEQ ID NO: 250581 - DNA, 25 bp, probe
ggtgtgagagtggacggtatgtgtg

SEQ ID NO: 250582 - DNA, 25 bp, probe
ggtgagatggtgacgctggacgtgg

SEQ ID NO: 250583 - DNA, 25 bp, probe
ggtgtgcatgggacaagaacatatg

SEQ ID NO: 250584 - DNA, 25 bp, probe
ggtgtttgtacatacacatatgcag

SEQ ID NO: 250585 - DNA, 25 bp, probe
ggtgttggtacatatgatgatttcc

SEQ ID NO: 250586 - DNA, 25 bp, probe
ggtgttgggaagactctcatactcc

SEQ ID NO: 250587 - DNA, 25 bp, probe
ggtgttgggaagactctcatactcc

SEQ ID NO: 250588 - DNA, 25 bp, probe
ggtgttgagggaagcactgatgcca

SEQ ID NO: 250589 - DNA, 25 bp, probe
ggtgttgagggaagcactgatgcca

SEQ ID NO: 250590 - DNA, 25 bp, probe
ggtgggggtagagctgatccagagc

SEQ ID NO: 250591 - DNA, 25 bp, probe
ggtgtgtgtggatcatacgcccaag

SEQ ID NO: 250592 - DNA, 25 bp, probe
ggtgtgtgtggatcatacgcccaag

SEQ ID NO: 250593 - DNA, 25 bp, probe
ggtgtatgataacaacagcagcacc

SEQ ID NO: 250594 - DNA, 25 bp, probe
ggtgtatgatgcctgtatggagaca

SEQ ID NO: 250595 - DNA, 25 bp, probe
ggtgtggatcgtcatgtatacttac

SEQ ID NO: 250596 - DNA, 25 bp, probe
ggtgtggaagcatgatatgtactat

SEQ ID NO: 250597 - DNA, 25 bp, probe
ggtgctggtacttattggtatttac

SEQ ID NO: 250598 - DNA, 25 bp, probe
ggtgtgttactatgggagattgtta

SEQ ID NO: 250599 - DNA, 25 bp, probe
ggtgagtatactaagggagttcatt

SEQ ID NO: 250600 - DNA, 25 bp, probe
ggtaggcttctaagcctagtcctgc

SEQ ID NO: 250601 - DNA, 25 bp, probe
tgtgaaggtcttaaagaaggacgtc

SEQ ID NO: 250602 - DNA, 25 bp, probe
tggatatgttgtttaacggtaccca

SEQ ID NO: 250603 - DNA, 25 bp, probe
tggatatgttgtttaacggtaccca

SEQ ID NO: 250604 - DNA, 25 bp, probe
ggtgtgtgtgtttggactggtggcc

SEQ ID NO: 250605 - DNA, 25 bp, probe
ggtgatggcctttggggagcggcct

SEQ ID NO: 250606 - DNA, 25 bp, probe
ggtgctggtccggaaggacgacctg

SEQ ID NO: 250607 - DNA, 25 bp, probe
ggtgctgcgttatgtagctcaggac

SEQ ID NO: 250608 - DNA, 25 bp, probe
ggtgatgctgtcttcagtcagctga

SEQ ID NO: 250609 - DNA, 25 bp, probe
ggtgtgctgatctagaggtgcagga

SEQ ID NO: 250610 - DNA, 25 bp, probe
ggtgtctgaggaggtctgcagtaag

SEQ ID NO: 250611 - DNA, 25 bp, probe
ggtgttgatggatggctctgtgaag

SEQ ID NO: 250612 - DNA, 25 bp, probe
ggtgttgccacaaagcctggaatct

SEQ ID NO: 250613 - DNA, 25 bp, probe
ggtgattgtcaagacccagcgagct

SEQ ID NO: 250614 - DNA, 25 bp, probe
ggtgaagaacttgcaccagcgtctg

SEQ ID NO: 250615 - DNA, 25 bp, probe
ggtgatatactttgcaactggcgtc

SEQ ID NO: 250616 - DNA, 25 bp, probe
ggtgttgactgcagctcactgtaac

SEQ ID NO: 250617 - DNA, 25 bp, probe
ggtgtatactctgtgattgatcaac

SEQ ID NO: 250618 - DNA, 25 bp, probe
ggtgtattccatggacatgttccac

SEQ ID NO: 250619 - DNA, 25 bp, probe
ggtgtattccatggacatgttccac

SEQ ID NO: 250620 - DNA, 25 bp, probe
ggtgcttactcaaagagtgtccact

SEQ ID NO: 250621 - DNA, 25 bp, probe
ggtgcttactcaaagagtgtccact

SEQ ID NO: 250622 - DNA, 25 bp, probe
ggtgcattaccggaagtggatcaag

SEQ ID NO: 250623 - DNA, 25 bp, probe
ggtaaagtcggaccagtgtcaagga

SEQ ID NO: 250624 - DNA, 25 bp, probe
ggtgaaagtggtttagtgctagaag

SEQ ID NO: 250625 - DNA, 25 bp, probe
ggtgatagcattgctttcgtgtaaa

SEQ ID NO: 250626 - DNA, 25 bp, probe
ggtgaaagtctccgtggtggacaca

SEQ ID NO: 250627 - DNA, 25 bp, probe
ggtgaaagcttactggaatgaactt

SEQ ID NO: 250628 - DNA, 25 bp, probe
ggtgtttcattgttgtgcaatgcaa

SEQ ID NO: 250629 - DNA, 25 bp, probe
ggtgattgtgcacgattttgagaat

SEQ ID NO: 250630 - DNA, 25 bp, probe
ggtgttggggatgtttgctacctcc

SEQ ID NO: 250631 - DNA, 25 bp, probe
ggtgttgggtgagcagattggacgg

SEQ ID NO: 250632 - DNA, 25 bp, probe
ggtctgggggctggagttgaggagg

SEQ ID NO: 250633 - DNA, 25 bp, probe
ggccggaagcggggctgttggcggc

SEQ ID NO: 250634 - DNA, 25 bp, probe
ggtcggaagagggcaggggctgcat

SEQ ID NO: 250635 - DNA, 25 bp, probe
ggtgcaggaagatccaggaggtttg

SEQ ID NO: 250636 - DNA, 25 bp, probe
ggtgcgcattgagatccatggggtg

SEQ ID NO: 250637 - DNA, 25 bp, probe
ggtccttacaagacgggaggcagca

SEQ ID NO: 250638 - DNA, 25 bp, probe
ggtccttacaagacgggaggcagca

SEQ ID NO: 250639 - DNA, 25 bp, probe
ggtcctatacaagtcagttaaggaa

SEQ ID NO: 250640 - DNA, 25 bp, probe
ggtccttaaatacgatgaacatggg

SEQ ID NO: 250641 - DNA, 25 bp, probe
ggtgttctaaaacggcagcgagagc

SEQ ID NO: 250642 - DNA, 25 bp, probe
ggtgtatcggtatgggatgcagaac

SEQ ID NO: 250643 - DNA, 25 bp, probe
ggtgtttggtctaggatggagatcc

SEQ ID NO: 250644 - DNA, 25 bp, probe
ggtgtttggtctaggatggagatcc

SEQ ID NO: 250645 - DNA, 25 bp, probe
ggttaaacgtagcatgtggcatcgc

SEQ ID NO: 250646 - DNA, 25 bp, probe
ggtgctgggactgagccagtcccag

SEQ ID NO: 250647 - DNA, 25 bp, probe
ggtgtggctggtgactattatcgga

SEQ ID NO: 250648 - DNA, 25 bp, probe
ggtgtagctgggtacatattaagtg

SEQ ID NO: 250649 - DNA, 25 bp, probe
ggtgtcctatggagatattacagtg

SEQ ID NO: 250650 - DNA, 25 bp, probe
ggtgtacctggaaaactactatatc

SEQ ID NO: 250651 - DNA, 25 bp, probe
ggtgggcgtggagagtgtatctttt

SEQ ID NO: 250652 - DNA, 25 bp, probe
ggtgaggcaatgggaaagctcactt

SEQ ID NO: 250653 - DNA, 25 bp, probe
ggtgtcctatgtgaaagccattgac

SEQ ID NO: 250654 - DNA, 25 bp, probe
ggtgtcctatgtgaaagccattgac

SEQ ID NO: 250655 - DNA, 25 bp, probe
ggtgctcttcgtgtactggaagatc

SEQ ID NO: 250656 - DNA, 25 bp, probe
ggtgctcttcgtgtactggaagatc

SEQ ID NO: 250657 - DNA, 25 bp, probe
ggtgatcttctcaactatctaagaa

SEQ ID NO: 250658 - DNA, 25 bp, probe
ggtgagcttgtgctatatgctaaga

SEQ ID NO: 250659 - DNA, 25 bp, probe
ggtgacctgtaggccatgttagcac

SEQ ID NO: 250660 - DNA, 25 bp, probe
ggtgaatctggggcttggtacacag

SEQ ID NO: 250661 - DNA, 25 bp, probe
ggtgtacttgtggttggctatggtg

SEQ ID NO: 250662 - DNA, 25 bp, probe
ggtgaacggtgcctgggtgcaggct

SEQ ID NO: 250663 - DNA, 25 bp, probe
ggtgtacgatgtcatgctggggtgc

SEQ ID NO: 250664 - DNA, 25 bp, probe
ggtgatctttggtctgaagggctat

SEQ ID NO: 250665 - DNA, 25 bp, probe
ggtgtcacctggggacatgggctat

SEQ ID NO: 250666 - DNA, 25 bp, probe
ggtgccgccaggagctagcggcaca

SEQ ID NO: 250667 - DNA, 25 bp, probe
ggtgacccaggagatcacagatgaa

SEQ ID NO: 250668 - DNA, 25 bp, probe
ggtgacgcccaagtgaagcgcatgc

SEQ ID NO: 250669 - DNA, 25 bp, probe
ggtgacgcccaagtgaagcgcatgc

SEQ ID NO: 250670 - DNA, 25 bp, probe
ggtgaaggccaagtacacagcccag

SEQ ID NO: 250671 - DNA, 25 bp, probe
ggtgaaggccaagtacacagcccag

SEQ ID NO: 250672 - DNA, 25 bp, probe
ggtgaagtcacaggtgcaagcccac

SEQ ID NO: 250673 - DNA, 25 bp, probe
ggtgacagcattgcttaagcccaga

SEQ ID NO: 250674 - DNA, 25 bp, probe
ggtgagcgttctcctagaagacaga

SEQ ID NO: 250675 - DNA, 25 bp, probe
ggtgatgcttttccggaagagtccc

SEQ ID NO: 250676 - DNA, 25 bp, probe
ggtgcagtttccagggtgcagtaca

SEQ ID NO: 250677 - DNA, 25 bp, probe
ggtgcagtatatcaagaggctagaa

SEQ ID NO: 250678 - DNA, 25 bp, probe
ggtgcagtatatcaagaggctagaa

SEQ ID NO: 250679 - DNA, 25 bp, probe
ggtgccgatatgtgagacgaatgat

SEQ ID NO: 250680 - DNA, 25 bp, probe
ggtgcctgtgtctgcagaaaaacaa

SEQ ID NO: 250681 - DNA, 25 bp, probe
ggtgcctgtgtctgcagaaaaacaa

SEQ ID NO: 250682 - DNA, 25 bp, probe
ggtgaaagcaaccatgcaaaagaaa

SEQ ID NO: 250683 - DNA, 25 bp, probe
ggtgaccgctgtgagaacaagataa

SEQ ID NO: 250684 - DNA, 25 bp, probe
ggtgcaccgcggcattaagggggtg

SEQ ID NO: 250685 - DNA, 25 bp, probe
ggtgcagccccttttgaaaggggtg

SEQ ID NO: 250686 - DNA, 25 bp, probe
ggtccccgtttgtcaaagaggatgg

SEQ ID NO: 250687 - DNA, 25 bp, probe
ggtgcaccggggcatcaaaggtgtg

SEQ ID NO: 250688 - DNA, 25 bp, probe
ggtcccgaaagattgcaactttggc

SEQ ID NO: 250689 - DNA, 25 bp, probe
ggtgccccaaaatgcaagattttcc

SEQ ID NO: 250690 - DNA, 25 bp, probe
ggtgccccaaaatgcaagattttcc

SEQ ID NO: 250691 - DNA, 25 bp, probe
ggtgacccaaatcacagagtgcctt

SEQ ID NO: 250692 - DNA, 25 bp, probe
ggtccccaaacttatggacactgcc

SEQ ID NO: 250693 - DNA, 25 bp, probe
ggtccagccattcttcaggaccacc

SEQ ID NO: 250694 - DNA, 25 bp, probe
ggtccagccattcttcaggaccacc

SEQ ID NO: 250695 - DNA, 25 bp, probe
ggtccagccattcttcaggaccacc

SEQ ID NO: 250696 - DNA, 25 bp, probe
ggtgcactacttctaaggatgcccc

SEQ ID NO: 250697 - DNA, 25 bp, probe
ggtgaccattgacaaagtcagcccc

SEQ ID NO: 250698 - DNA, 25 bp, probe
ggtgaccattgacaaagtcagcccc

SEQ ID NO: 250699 - DNA, 25 bp, probe
ggtgacaacggcaaaccatccaccc

SEQ ID NO: 250700 - DNA, 25 bp, probe
ggtgacaacggcaaaccatccaccc

SEQ ID NO: 250701 - DNA, 25 bp, probe
ggtgaagatgcgcaaacgctacagc

SEQ ID NO: 250702 - DNA, 25 bp, probe
ggtgaagggtgatgcaggatatgcc

SEQ ID NO: 250703 - DNA, 25 bp, probe
ggtgaaggggatagggcgaggctgt

SEQ ID NO: 250704 - DNA, 25 bp, probe
ggtgaagggagaacccatcggctct

SEQ ID NO: 250705 - DNA, 25 bp, probe
ggtgaagggagaacccatcggctct

SEQ ID NO: 250706 - DNA, 25 bp, probe
ggtccagggaatatctgtcgcagct

SEQ ID NO: 250707 - DNA, 25 bp, probe
ggtcctgggatatttctggaaccga

SEQ ID NO: 250708 - DNA, 25 bp, probe
ggtcagggagagtttgggaactgca

SEQ ID NO: 250709 - DNA, 25 bp, probe
ggtcggagggatcacgagacacaga

SEQ ID NO: 250710 - DNA, 25 bp, probe
ggtccaaggtatctggaagcctctg

SEQ ID NO: 250711 - DNA, 25 bp, probe
ggtccacgacaaggtggttgcccgg

SEQ ID NO: 250712 - DNA, 25 bp, probe
ggtccactgtgaagctgggttctcc

SEQ ID NO: 250713 - DNA, 25 bp, probe
ggtgacactgtgggaaatgttcacc

SEQ ID NO: 250714 - DNA, 25 bp, probe
ggtgagcgctgtgagatggatgtat

SEQ ID NO: 250715 - DNA, 25 bp, probe
ggtgcacctgtgctgggtgcgtagc

SEQ ID NO: 250716 - DNA, 25 bp, probe
ggtgaggcaggggagtctgcttgtc

SEQ ID NO: 250717 - DNA, 25 bp, probe
ggtgcaagcagtccgaggctgcttt

SEQ ID NO: 250718 - DNA, 25 bp, probe
ggtgaagcacatcaaggtggtggag

SEQ ID NO: 250719 - DNA, 25 bp, probe
ggtgaagcacagggagagtgggaac

SEQ ID NO: 250720 - DNA, 25 bp, probe
ggtgacgctgagactggagggggag

SEQ ID NO: 250721 - DNA, 25 bp, probe
ggtgatcctggcagaagataagagg

SEQ ID NO: 250722 - DNA, 25 bp, probe
ggtgatcttggaaaaatgtagttta

SEQ ID NO: 250723 - DNA, 25 bp, probe
ggtgtcctggaaagcaagttctaaa

SEQ ID NO: 250724 - DNA, 25 bp, probe
ggtcccgatggacgaagacttcaaa

SEQ ID NO: 250725 - DNA, 25 bp, probe
ggtccacatcctgctaagacgttta

SEQ ID NO: 250726 - DNA, 25 bp, probe
ggtacctctcatgttaagtgttctt

SEQ ID NO: 250727 - DNA, 25 bp, probe
ggtgaaattgctcttgaaggctggc

SEQ ID NO: 250728 - DNA, 25 bp, probe
ggtcgaattgttcgtgaaggctggc

SEQ ID NO: 250729 - DNA, 25 bp, probe
ggtcggcaccttcggcaaagtgaag

SEQ ID NO: 250730 - DNA, 25 bp, probe
ggtagggcagccagagaaaggagca

SEQ ID NO: 250731 - DNA, 25 bp, probe
ggtgacggccctcatctatgaggaa

SEQ ID NO: 250732 - DNA, 25 bp, probe
ggtgaggggcctctagagggtacat

SEQ ID NO: 250733 - DNA, 25 bp, probe
ggtgaggggccaacaccaaggccca

SEQ ID NO: 250734 - DNA, 25 bp, probe
ggtgctgggacatcaatgccaacgc

SEQ ID NO: 250735 - DNA, 25 bp, probe
ggtgtcgtgaccaagagcacacctg

SEQ ID NO: 250736 - DNA, 25 bp, probe
ggtgactggacaatgaagacactct

SEQ ID NO: 250737 - DNA, 25 bp, probe
ggtgtctcgagagaagatcaccctc

SEQ ID NO: 250738 - DNA, 25 bp, probe
ggtccatgctaagtctaacactcct

SEQ ID NO: 250739 - DNA, 25 bp, probe
ggtccatgctaagtctaacactcct

SEQ ID NO: 250740 - DNA, 25 bp, probe
ggtcgtcatgtaggtcaggaccttg

SEQ ID NO: 250741 - DNA, 25 bp, probe
ggtcctgtgcaagggctggaactgg

SEQ ID NO: 250742 - DNA, 25 bp, probe
ggtcctggcaaggcgcagggaagtc

SEQ ID NO: 250743 - DNA, 25 bp, probe
ggattcttcgaggagtaaatgagtc

SEQ ID NO: 250744 - DNA, 25 bp, probe
ggtgttgtgcgaggaattaatgaaa

SEQ ID NO: 250745 - DNA, 25 bp, probe
ggtgttgtgcgaggaattaatgaaa

SEQ ID NO: 250746 - DNA, 25 bp, probe
ggtgtatccgaggaagccaaggagc

SEQ ID NO: 250747 - DNA, 25 bp, probe
ggtgagctccgagaccaacaagagc

SEQ ID NO: 250748 - DNA, 25 bp, probe
ggtgactcctgaaactctgcagaaa

SEQ ID NO: 250749 - DNA, 25 bp, probe
ggtgacatcatcaagatccttaaca

SEQ ID NO: 250750 - DNA, 25 bp, probe
ggtgatgctcaaggaaatctaccac

SEQ ID NO: 250751 - DNA, 25 bp, probe
ggtgagcacatgagataggccccac

SEQ ID NO: 250752 - DNA, 25 bp, probe
ggtgtcactgtcctatgggaccatc

SEQ ID NO: 250753 - DNA, 25 bp, probe
ggtgtcactgtcctatgggaccatc

SEQ ID NO: 250754 - DNA, 25 bp, probe
ggtgtcaggatccttggaagtcatc

SEQ ID NO: 250755 - DNA, 25 bp, probe
ggtgacatgtaccctgtgacaattg

SEQ ID NO: 250756 - DNA, 25 bp, probe
ggtgaatgagactacgctgaaaatc

SEQ ID NO: 250757 - DNA, 25 bp, probe
ggtgaagagcacgggtacagcagac

SEQ ID NO: 250758 - DNA, 25 bp, probe
ggtgaagagcacgggtacagcagac

SEQ ID NO: 250759 - DNA, 25 bp, probe
ggtgactgaacaggtgacccagagc

SEQ ID NO: 250760 - DNA, 25 bp, probe
ggtgtctcagacactgaccaaatct

SEQ ID NO: 250761 - DNA, 25 bp, probe
ggtgttctcaccttgaaatcttata

SEQ ID NO: 250762 - DNA, 25 bp, probe
ggtgttcaccaagttagattattac

SEQ ID NO: 250763 - DNA, 25 bp, probe
ggtgttgaccaataaaatatctagt

SEQ ID NO: 250764 - DNA, 25 bp, probe
ggttgggcacaataaacaaccaagt

SEQ ID NO: 250765 - DNA, 25 bp, probe
ggtaggtgaaaataatgttctgaaa

SEQ ID NO: 250766 - DNA, 25 bp, probe
ggtgaaatagctgaacggttctgaa

SEQ ID NO: 250767 - DNA, 25 bp, probe
ggtgaaatagctgaacggttctgaa

SEQ ID NO: 250768 - DNA, 25 bp, probe
ggtgaaaagctaagcaaggatttga

SEQ ID NO: 250769 - DNA, 25 bp, probe
ggtgagcacggccaacaaagctgtt

SEQ ID NO: 250770 - DNA, 25 bp, probe
ggtgatgactgagaccttagctgtc

SEQ ID NO: 250771 - DNA, 25 bp, probe
ggtgatgacgattgctctcttgcac

SEQ ID NO: 250772 - DNA, 25 bp, probe
ggtgatgactttactctgtgtccgg

SEQ ID NO: 250773 - DNA, 25 bp, probe
ggtgatgactttactctgtgtccgg

SEQ ID NO: 250774 - DNA, 25 bp, probe
ggtgcaatgttttcttgttccttgt

SEQ ID NO: 250775 - DNA, 25 bp, probe
ggtaatatttttgtgatctttgatg

SEQ ID NO: 250776 - DNA, 25 bp, probe
ggtgacaagctgttctttacctcta

SEQ ID NO: 250777 - DNA, 25 bp, probe
ggtgacagtggaatctttgtctctt

SEQ ID NO: 250778 - DNA, 25 bp, probe
ggtgacaaggcagtctcttgctctc

SEQ ID NO: 250779 - DNA, 25 bp, probe
ggtgacaaggcagtctcttgctctc

SEQ ID NO: 250780 - DNA, 25 bp, probe
ggtgaagagctgattgaggctgcca

SEQ ID NO: 250781 - DNA, 25 bp, probe
ggtgaagagctgattgaggctgcca

SEQ ID NO: 250782 - DNA, 25 bp, probe
ggtgcacagagaagtctacaggcct

SEQ ID NO: 250783 - DNA, 25 bp, probe
ggtgccacatgacccttgtggcaca

SEQ ID NO: 250784 - DNA, 25 bp, probe
ggtgctgcaagagcgtttccaagtc

SEQ ID NO: 250785 - DNA, 25 bp, probe
ggtgccaacagagacttccaaatgg

SEQ ID NO: 250786 - DNA, 25 bp, probe
ggtgctctgggagatcttcacctac

SEQ ID NO: 250787 - DNA, 25 bp, probe
ggtgttggtgatttgtagcccttct

SEQ ID NO: 250788 - DNA, 25 bp, probe
ggtgcctggtaatttatctctttgc

SEQ ID NO: 250789 - DNA, 25 bp, probe
ggtgtatccagattgctttgctttt

SEQ ID NO: 250790 - DNA, 25 bp, probe
ggtgcataccagtcttaccaattat

SEQ ID NO: 250791 - DNA, 25 bp, probe
ggtgatctcaagtctaataacattt

SEQ ID NO: 250792 - DNA, 25 bp, probe
ggtgcctggagcctactaaatgctc

SEQ ID NO: 250793 - DNA, 25 bp, probe
ggtgcctgaatgtcgactggattcc

SEQ ID NO: 250794 - DNA, 25 bp, probe
ggtcttgaagctgacccatttgccc

SEQ ID NO: 250795 - DNA, 25 bp, probe
ggtcttcatccagatgccaaatatg

SEQ ID NO: 250796 - DNA, 25 bp, probe
ggttgtcttcctcgccaaaaggagg

SEQ ID NO: 250797 - DNA, 25 bp, probe
ggtcttcgtggacccacgcaaggac

SEQ ID NO: 250798 - DNA, 25 bp, probe
ggtccctgggagtgacggcatatga

SEQ ID NO: 250799 - DNA, 25 bp, probe
ggtccaggggagctgcctgatgtag

SEQ ID NO: 250800 - DNA, 25 bp, probe
ggttgctggattatgggtggttgcc

SEQ ID NO: 250801 - DNA, 25 bp, probe
ggtgagcaggaaattggggtgttgg

SEQ ID NO: 250802 - DNA, 25 bp, probe
ggtgagcagggaacatgtcggagtc

SEQ ID NO: 250803 - DNA, 25 bp, probe
ggtcgcagacgaacctgagagaatc

SEQ ID NO: 250804 - DNA, 25 bp, probe
ggtccacaggtgcacagagaagtct

SEQ ID NO: 250805 - DNA, 25 bp, probe
ggtccacaggtgcacagagaagtct

SEQ ID NO: 250806 - DNA, 25 bp, probe
ggtccacgggtggcaggaattcaga

SEQ ID NO: 250807 - DNA, 25 bp, probe
ggtccagtggtttcggcaagggagt

SEQ ID NO: 250808 - DNA, 25 bp, probe
ggtgcctacctaacggaagggagca

SEQ ID NO: 250809 - DNA, 25 bp, probe
ggtgcctacttccactgtaagaaag

SEQ ID NO: 250810 - DNA, 25 bp, probe
ggtgcacattttccacggaaacaga

SEQ ID NO: 250811 - DNA, 25 bp, probe
ggtgcacaagcacttcacggaagac

SEQ ID NO: 250812 - DNA, 25 bp, probe
ggtgccatacccagggatgagcaac

SEQ ID NO: 250813 - DNA, 25 bp, probe
ggtcctcaccacagatggaattaac

SEQ ID NO: 250814 - DNA, 25 bp, probe
ggtcgctccccaagatggaggggaa

SEQ ID NO: 250815 - DNA, 25 bp, probe
ggtcgatgcaacgagtgatgaggtt

SEQ ID NO: 250816 - DNA, 25 bp, probe
ggacctgaagccctggggcttacgt

SEQ ID NO: 250817 - DNA, 25 bp, probe
ggatttggaccttggtacttcaagt

SEQ ID NO: 250818 - DNA, 25 bp, probe
ggtgttgtatgtgtggtgacttgcg

SEQ ID NO: 250819 - DNA, 25 bp, probe
ggtgttttttggtatgcaagtcagc

SEQ ID NO: 250820 - DNA, 25 bp, probe
ggtgacttttagggagcacaaacaa

SEQ ID NO: 250821 - DNA, 25 bp, probe
ggtcgtcttgtttctagcaaaacag

SEQ ID NO: 250822 - DNA, 25 bp, probe
ggtcctattgtttgggacacagacc

SEQ ID NO: 250823 - DNA, 25 bp, probe
ggtcgcctctggcagcgaaaagacc

SEQ ID NO: 250824 - DNA, 25 bp, probe
ggtcatcaaagacagcccacaaacc

SEQ ID NO: 250825 - DNA, 25 bp, probe
ggtcaaagacagcgctcaaaactcg

SEQ ID NO: 250826 - DNA, 25 bp, probe
ggttggaacctgcaataaactcgct

SEQ ID NO: 250827 - DNA, 25 bp, probe
ggttggaacctgcaataaactcgct

SEQ ID NO: 250828 - DNA, 25 bp, probe
ggtcgttaccagagatttacccatc

SEQ ID NO: 250829 - DNA, 25 bp, probe
ggcccaatacttgcaagtgacaagc

SEQ ID NO: 250830 - DNA, 25 bp, probe
ggtctgtaactatggacttaccttc

SEQ ID NO: 250831 - DNA, 25 bp, probe
ggtcttaaagaaggacgtcatcctt

SEQ ID NO: 250832 - DNA, 25 bp, probe
ggtaacaaagtgagacctccctgtc

SEQ ID NO: 250833 - DNA, 25 bp, probe
ggtaccgcgaggagagcgacagcct

SEQ ID NO: 250834 - DNA, 25 bp, probe
ggtccactgcaagatgggcgtcagc

SEQ ID NO: 250835 - DNA, 25 bp, probe
ggtccatgtcaaaaggcattgatac

SEQ ID NO: 250836 - DNA, 25 bp, probe
ggtcaatgtatccaatcagcagtat

SEQ ID NO: 250837 - DNA, 25 bp, probe
ggtccagatatgtagtagcatttgg

SEQ ID NO: 250838 - DNA, 25 bp, probe
ggtgctggcacttattgcaatttaa

SEQ ID NO: 250839 - DNA, 25 bp, probe
ggtgatgggcgtctgagtttcacat

SEQ ID NO: 250840 - DNA, 25 bp, probe
ggtgactggcctctagtttatataa

SEQ ID NO: 250841 - DNA, 25 bp, probe
ggtgttggtgattgtattttaatta

SEQ ID NO: 250842 - DNA, 25 bp, probe
ggtgttcagttactgagtttcaaaa

SEQ ID NO: 250843 - DNA, 25 bp, probe
ggtgttgcaattggctctttctaaa

SEQ ID NO: 250844 - DNA, 25 bp, probe
ggtctaccattgcttgttcagagaa

SEQ ID NO: 250845 - DNA, 25 bp, probe
ggtctaccattgcttgttcagagaa

SEQ ID NO: 250846 - DNA, 25 bp, probe
ggtgcatagcagatggtttccacat

SEQ ID NO: 250847 - DNA, 25 bp, probe
ggtgatggctggtgtgattccaatc

SEQ ID NO: 250848 - DNA, 25 bp, probe
ggtgatggcgtgatatgcacctgca

SEQ ID NO: 250849 - DNA, 25 bp, probe
ggtcttctgcagactcatgcagccc

SEQ ID NO: 250850 - DNA, 25 bp, probe
ggtccgcatcatcatcatgctgacc

SEQ ID NO: 250851 - DNA, 25 bp, probe
ggtccgcatcatcatcatgctgacc

SEQ ID NO: 250852 - DNA, 25 bp, probe
ggtgatcgcatacatcatgaccgtc

SEQ ID NO: 250853 - DNA, 25 bp, probe
ggtgatcgcatacatcatgaccgtc

SEQ ID NO: 250854 - DNA, 25 bp, probe
ggtgatcgcatacatcatgaccgtc

SEQ ID NO: 250855 - DNA, 25 bp, probe
ggtgatcgcatacatcatgaccgtc

SEQ ID NO: 250856 - DNA, 25 bp, probe
ggtcatcagtgacctcagtagcctc

SEQ ID NO: 250857 - DNA, 25 bp, probe
ggtcatcagtatgtcctacgtcatc

SEQ ID NO: 250858 - DNA, 25 bp, probe
ggtgcacatgtttatcgaccggcac

SEQ ID NO: 250859 - DNA, 25 bp, probe
ggtgccagttcaacagattctgaca

SEQ ID NO: 250860 - DNA, 25 bp, probe
ggtgccagtttggagctcctggaag

SEQ ID NO: 250861 - DNA, 25 bp, probe
ggtgacatgtttacagctgggtgtg

SEQ ID NO: 250862 - DNA, 25 bp, probe
ggtgataggtataagtggtgtgtgt

SEQ ID NO: 250863 - DNA, 25 bp, probe
ggtgcacgcgctttaagtgtgctgg

SEQ ID NO: 250864 - DNA, 25 bp, probe
ggtgcccgtcatggaagaggcggcc

SEQ ID NO: 250865 - DNA, 25 bp, probe
ggtgcacactaagaacagcctggtc

SEQ ID NO: 250866 - DNA, 25 bp, probe
ggtcatcactaagaaatcaggtgta

SEQ ID NO: 250867 - DNA, 25 bp, probe
ggtcatcactaagaaatcaggtgta

SEQ ID NO: 250868 - DNA, 25 bp, probe
ggtctagctacagtgaaatctcgat

SEQ ID NO: 250869 - DNA, 25 bp, probe
ggtctagctacagtgaaatctcgat

SEQ ID NO: 250870 - DNA, 25 bp, probe
ggtcgacacaaggtacttcgatgat

SEQ ID NO: 250871 - DNA, 25 bp, probe
ggtctgagaatgacgatacccgtga

SEQ ID NO: 250872 - DNA, 25 bp, probe
ggtgctgaagataggaaccattcaa

SEQ ID NO: 250873 - DNA, 25 bp, probe
ggtctgatttcaggatactctgtca

SEQ ID NO: 250874 - DNA, 25 bp, probe
ggtccatttcatgtgatctattact

SEQ ID NO: 250875 - DNA, 25 bp, probe
ggtccaagacacttattcatacatc

SEQ ID NO: 250876 - DNA, 25 bp, probe
ggtcccagtcgatgtccatgaatac

SEQ ID NO: 250877 - DNA, 25 bp, probe
ggtgcgcctgctggaagatgccgat

SEQ ID NO: 250878 - DNA, 25 bp, probe
ggtgctgagtgggcagaatctcaga

SEQ ID NO: 250879 - DNA, 25 bp, probe
ggtgcgcaaggcgggcatcgcgcac

SEQ ID NO: 250880 - DNA, 25 bp, probe
ggtgagcagagcttggtgcctctgc

SEQ ID NO: 250881 - DNA, 25 bp, probe
ggtgatgtggcaattgtgtgccatc

SEQ ID NO: 250882 - DNA, 25 bp, probe
ggtgcatctggcacgtggccaggag

SEQ ID NO: 250883 - DNA, 25 bp, probe
ggtgagcggcacagatgatggggag

SEQ ID NO: 250884 - DNA, 25 bp, probe
ggtgcctggcacggagtttgtgcag

SEQ ID NO: 250885 - DNA, 25 bp, probe
ggtgcctggcacggagtttgtgcag

SEQ ID NO: 250886 - DNA, 25 bp, probe
ggtgcaggtcagcacgttgctgtcg

SEQ ID NO: 250887 - DNA, 25 bp, probe
ggtgcaagtaggtctgattgagctt

SEQ ID NO: 250888 - DNA, 25 bp, probe
ggtagaagtcagtcggtatgctctg

SEQ ID NO: 250889 - DNA, 25 bp, probe
ggtgattatgtagggcaggtgtctg

SEQ ID NO: 250890 - DNA, 25 bp, probe
ggtgattgtggtgagcgtgttcatc

SEQ ID NO: 250891 - DNA, 25 bp, probe
ggtgatgtggtagatccttatgtct

SEQ ID NO: 250892 - DNA, 25 bp, probe
ggtgattggatgtgtccagttaata

SEQ ID NO: 250893 - DNA, 25 bp, probe
ggtgatgcttattctgtacagtaaa

SEQ ID NO: 250894 - DNA, 25 bp, probe
ggtgattgctagttgtgactgaaga

SEQ ID NO: 250895 - DNA, 25 bp, probe
ggtgacccaggtagaggaagatatg

SEQ ID NO: 250896 - DNA, 25 bp, probe
ggtgacccatgaccagaggggatcc

SEQ ID NO: 250897 - DNA, 25 bp, probe
ggtgaggcctgcactgattggggcc

SEQ ID NO: 250898 - DNA, 25 bp, probe
ggtgaggcctgcactgattggggcc

SEQ ID NO: 250899 - DNA, 25 bp, probe
ggtgaggctcacagtactggtttcc

SEQ ID NO: 250900 - DNA, 25 bp, probe
ggtagaccctagcaagggtcctcca

SEQ ID NO: 250901 - DNA, 25 bp, probe
ggtctgaaccggcagatgtgtgtcc

SEQ ID NO: 250902 - DNA, 25 bp, probe
ggtgctgaacgggaagaagtggcgg

SEQ ID NO: 250903 - DNA, 25 bp, probe
ggtctctaagaatataagtggggga

SEQ ID NO: 250904 - DNA, 25 bp, probe
ggtctaggagcctgagaggtgaggg

SEQ ID NO: 250905 - DNA, 25 bp, probe
ggatcaagctagacttcaaggcggg

SEQ ID NO: 250906 - DNA, 25 bp, probe
ggatcaagctagacttcaaggcggg

SEQ ID NO: 250907 - DNA, 25 bp, probe
ggtgaagctatggctctaaatgaga

SEQ ID NO: 250908 - DNA, 25 bp, probe
ggtctagcctgggtatgaagaagtt

SEQ ID NO: 250909 - DNA, 25 bp, probe
ggtcctcaagggtatgaatagtgtt

SEQ ID NO: 250910 - DNA, 25 bp, probe
ggtctgtccacgcaatggaacatta

SEQ ID NO: 250911 - DNA, 25 bp, probe
ggtcgtcctttgagtgacaacttct

SEQ ID NO: 250912 - DNA, 25 bp, probe
ggtcgtcctttgagtgacaacttct

SEQ ID NO: 250913 - DNA, 25 bp, probe
ggtctttccttatgggataccagcc

SEQ ID NO: 250914 - DNA, 25 bp, probe
ggtctaagacttttggtgaacacgt

SEQ ID NO: 250915 - DNA, 25 bp, probe
ggtctaagacttttggtgaacacgt

SEQ ID NO: 250916 - DNA, 25 bp, probe
ggtcttaactttaggtaactctgct

SEQ ID NO: 250917 - DNA, 25 bp, probe
ggtcttaactttaggtaactctgct

SEQ ID NO: 250918 - DNA, 25 bp, probe
ggatttaaactaattgaaactgtat

SEQ ID NO: 250919 - DNA, 25 bp, probe
ggatttaaagtcagtcacaaaggct

SEQ ID NO: 250920 - DNA, 25 bp, probe
ggtttaaatggcacccacagtgaca

SEQ ID NO: 250921 - DNA, 25 bp, probe
ggttcaaaaggttacccacgacatg

SEQ ID NO: 250922 - DNA, 25 bp, probe
ggtataccaaggttacctcagtggt

SEQ ID NO: 250923 - DNA, 25 bp, probe
ggtaactcaaggctaccaagtgaag

SEQ ID NO: 250924 - DNA, 25 bp, probe
ggtaactccaggacatgcacctggg

SEQ ID NO: 250925 - DNA, 25 bp, probe
ggtgcacacccagggatgccctgga

SEQ ID NO: 250926 - DNA, 25 bp, probe
ggtgcccatcaagtggatggcgctg

SEQ ID NO: 250927 - DNA, 25 bp, probe
ggtgcacccaaagtgggtgctgacg

SEQ ID NO: 250928 - DNA, 25 bp, probe
ggtgccctactgattttgctgaggt

SEQ ID NO: 250929 - DNA, 25 bp, probe
ggatgcccaaccagattcggaggat

SEQ ID NO: 250930 - DNA, 25 bp, probe
ggatcctaaccggaactgggatgca

SEQ ID NO: 250931 - DNA, 25 bp, probe
ggatcctaaccggaactgggatgca

SEQ ID NO: 250932 - DNA, 25 bp, probe
ggtgcacagagaagtctacaggcct

SEQ ID NO: 250933 - DNA, 25 bp, probe
ggtccatgcacaggtgtagcatgtc

SEQ ID NO: 250934 - DNA, 25 bp, probe
ggtgcactgatcgctgccaatgcac

SEQ ID NO: 250935 - DNA, 25 bp, probe
ggtgactcctttgcatgatgcactg

SEQ ID NO: 250936 - DNA, 25 bp, probe
ggtgacttctctaccaagtctgatg

SEQ ID NO: 250937 - DNA, 25 bp, probe
ggtgaggtctctctaagtcaggctg

SEQ ID NO: 250938 - DNA, 25 bp, probe
ggtgaggtctctctaagtcaggctg

SEQ ID NO: 250939 - DNA, 25 bp, probe
ggtgaagacgctgtacatgctgggc

SEQ ID NO: 250940 - DNA, 25 bp, probe
ggtgaagtggtggtacagtggcaga

SEQ ID NO: 250941 - DNA, 25 bp, probe
ggtgaagctggtggactttggcatg

SEQ ID NO: 250942 - DNA, 25 bp, probe
ggtgaagttgtgcaatattggaggc

SEQ ID NO: 250943 - DNA, 25 bp, probe
ggtgaaggtggccacatccaagaag

SEQ ID NO: 250944 - DNA, 25 bp, probe
ggtgcatggggtgaccacagaggag

SEQ ID NO: 250945 - DNA, 25 bp, probe
ggtgatggaggatcaaccacaggtt

SEQ ID NO: 250946 - DNA, 25 bp, probe
ggtgatgtcagggtgataaccagac

SEQ ID NO: 250947 - DNA, 25 bp, probe
ggtgcagtcggctgagaaactggca

SEQ ID NO: 250948 - DNA, 25 bp, probe
ggtgctgctgcgtaaggaatctcgg

SEQ ID NO: 250949 - DNA, 25 bp, probe
ggtgctgatgagtgattgacacaca

SEQ ID NO: 250950 - DNA, 25 bp, probe
ggtgctggagcaggtggagcgaggc

SEQ ID NO: 250951 - DNA, 25 bp, probe
ggtgctgaagttcgtcatggatggc

SEQ ID NO: 250952 - DNA, 25 bp, probe
ggtctgaagggctatgtggctgagc

SEQ ID NO: 250953 - DNA, 25 bp, probe
ggtgctggaggacaatgactatggc

SEQ ID NO: 250954 - DNA, 25 bp, probe
ggtgcaggggacaagaggctgtggg

SEQ ID NO: 250955 - DNA, 25 bp, probe
ggtcagggtgaatcagatgggggac

SEQ ID NO: 250956 - DNA, 25 bp, probe
ggtgaggaagcagcctgcaggggga

SEQ ID NO: 250957 - DNA, 25 bp, probe
ggtgcggatagggcactgaggggtg

SEQ ID NO: 250958 - DNA, 25 bp, probe
ggtgctggacagtgaccagagggtc

SEQ ID NO: 250959 - DNA, 25 bp, probe
ggtgctgagctgtatggtccagcag

SEQ ID NO: 250960 - DNA, 25 bp, probe
ggtgcaaggagactgtctgcagctt

SEQ ID NO: 250961 - DNA, 25 bp, probe
ggtgacggtgatcgtgctgcagtac

SEQ ID NO: 250962 - DNA, 25 bp, probe
ggtgacagacttcatgctgtgtgtc

SEQ ID NO: 250963 - DNA, 25 bp, probe
ggtgacagagttcatgttgtgtgct

SEQ ID NO: 250964 - DNA, 25 bp, probe
ggtgacagagttcatgttgtgtgct

SEQ ID NO: 250965 - DNA, 25 bp, probe
ggtgaagattatggaagtgacagct

SEQ ID NO: 250966 - DNA, 25 bp, probe
ggtgagcagcgaacgaaggagcagt

SEQ ID NO: 250967 - DNA, 25 bp, probe
ggtgagcagcgaacgaaggagcagt

SEQ ID NO: 250968 - DNA, 25 bp, probe
ggtgagcaggatgccgaggagatca

SEQ ID NO: 250969 - DNA, 25 bp, probe
ggtgagcaggatgccgaggagatca

SEQ ID NO: 250970 - DNA, 25 bp, probe
ggtgcagaggtgagcagaggagtcc

SEQ ID NO: 250971 - DNA, 25 bp, probe
ggtgagagtctgagtcaatggattt

SEQ ID NO: 250972 - DNA, 25 bp, probe
ggtgagttcagtagctttggtatta

SEQ ID NO: 250973 - DNA, 25 bp, probe
ggtgcagcttcaatgtctttctgaa

SEQ ID NO: 250974 - DNA, 25 bp, probe
ggtgactctgctaacttatcatgga

SEQ ID NO: 250975 - DNA, 25 bp, probe
ggtgcatctgcaataactcgagaaa

SEQ ID NO: 250976 - DNA, 25 bp, probe
ggtcctgcacatgagtggaaataca

SEQ ID NO: 250977 - DNA, 25 bp, probe
ggtgactgagcagggtctgaaagaa

SEQ ID NO: 250978 - DNA, 25 bp, probe
ggtgactgcaaggagcctgacaagt

SEQ ID NO: 250979 - DNA, 25 bp, probe
ggatatccaaggccactacattgag

SEQ ID NO: 250980 - DNA, 25 bp, probe
ggtctccaggagcgtgacactggtg

SEQ ID NO: 250981 - DNA, 25 bp, probe
ggtctccaggagcgtgacactggtg

SEQ ID NO: 250982 - DNA, 25 bp, probe
ggtctccaggagcgtgacactggtg

SEQ ID NO: 250983 - DNA, 25 bp, probe
ggtctccaggagcgtgacactggtg

SEQ ID NO: 250984 - DNA, 25 bp, probe
ggtctccaggagcgtgacactggtg

SEQ ID NO: 250985 - DNA, 25 bp, probe
ggtctactgggttggatacctgtat

SEQ ID NO: 250986 - DNA, 25 bp, probe
ggttacggagtgggaacacctattg

SEQ ID NO: 250987 - DNA, 25 bp, probe
ggtaccccagtgggtgatcaccata

SEQ ID NO: 250988 - DNA, 25 bp, probe
ggtaccccagtgggtgatcaccata

SEQ ID NO: 250989 - DNA, 25 bp, probe
ggtaaggccagggtgtgaagggact

SEQ ID NO: 250990 - DNA, 25 bp, probe
ggtaaggacaggtggaagtgtggca

SEQ ID NO: 250991 - DNA, 25 bp, probe
ggtacaccacggtggccgtgaagat

SEQ ID NO: 250992 - DNA, 25 bp, probe
ggtccaccgggacttgaagctgaaa

SEQ ID NO: 250993 - DNA, 25 bp, probe
ggtcccggaagacatagatgctccc

SEQ ID NO: 250994 - DNA, 25 bp, probe
ggtccacggatccagaaacaagccc

SEQ ID NO: 250995 - DNA, 25 bp, probe
ggtgcttctggactggataaccaac

SEQ ID NO: 250996 - DNA, 25 bp, probe
ggtgcacaaggactggaactccaac

SEQ ID NO: 250997 - DNA, 25 bp, probe
ggtgacaaggattgggtcccacata

SEQ ID NO: 250998 - DNA, 25 bp, probe
ggtgaaagtgattatgggaatcata

SEQ ID NO: 250999 - DNA, 25 bp, probe
ggtacctggaaatgtgaatctggaa

SEQ ID NO: 251000 - DNA, 25 bp, probe
ggtccttgggactagtagatcagaa

SEQ ID NO: 251001 - DNA, 25 bp, probe
ggtcagtatgggttagggaaaacat

SEQ ID NO: 251002 - DNA, 25 bp, probe
ggaaaagtggtcaaggcaacggcct

SEQ ID NO: 251003 - DNA, 25 bp, probe
ggaattagtaacaggaactgaggcg

SEQ ID NO: 251004 - DNA, 25 bp, probe
ggtttggccaaaaagtacagagaca

SEQ ID NO: 251005 - DNA, 25 bp, probe
ggttctcggtacttaggacttgatc

SEQ ID NO: 251006 - DNA, 25 bp, probe
ggtcttcctatctggaatgactaga

SEQ ID NO: 251007 - DNA, 25 bp, probe
ggtcctctttattgtcaagagccag

SEQ ID NO: 251008 - DNA, 25 bp, probe
ggtcctgttctatgggagtgtcatc

SEQ ID NO: 251009 - DNA, 25 bp, probe
ggtctgtgggcaaggggcaggatct

SEQ ID NO: 251010 - DNA, 25 bp, probe
ggtgctggggggagagcgcaatacc

SEQ ID NO: 251011 - DNA, 25 bp, probe
ggtgcaggtgagcttggaggactac

SEQ ID NO: 251012 - DNA, 25 bp, probe
ggtgcaggagagtttcagggacaat

SEQ ID NO: 251013 - DNA, 25 bp, probe
ggtgcgggagtagcaggtccgcatc

SEQ ID NO: 251014 - DNA, 25 bp, probe
ggtgcgggagtagcaggtccgcatc

SEQ ID NO: 251015 - DNA, 25 bp, probe
ggtgccgtacttggaggacctgcac

SEQ ID NO: 251016 - DNA, 25 bp, probe
tcgacgaacactacgagtaccggca

SEQ ID NO: 251017 - DNA, 25 bp, probe
tggaaggacattcaggtacccgggt

SEQ ID NO: 251018 - DNA, 25 bp, probe
ggtccgaatcagtaggtgaccccgc

SEQ ID NO: 251019 - DNA, 25 bp, probe
ggtccgaatcagtaggtgaccccgc

SEQ ID NO: 251020 - DNA, 25 bp, probe
ggtctctgcagcaaaaagtccccgc

SEQ ID NO: 251021 - DNA, 25 bp, probe
ggtctctgcagcaaaaagtccccgc

SEQ ID NO: 251022 - DNA, 25 bp, probe
ggtcctgcagaatactccacaaggc

SEQ ID NO: 251023 - DNA, 25 bp, probe
ggtgctctgcgagaacttcccagag

SEQ ID NO: 251024 - DNA, 25 bp, probe
ggtcttcgacagcatcgtcaacgac

SEQ ID NO: 251025 - DNA, 25 bp, probe
ggtgcttcttgccagtattctaaga

SEQ ID NO: 251026 - DNA, 25 bp, probe
ggtgcatctttacagtactataata

SEQ ID NO: 251027 - DNA, 25 bp, probe
ggtgcctccttgattggcttaatag

SEQ ID NO: 251028 - DNA, 25 bp, probe
ggtccccaaatgatgtgcttagaac

SEQ ID NO: 251029 - DNA, 25 bp, probe
ggtccccagattctgctctaagggg

SEQ ID NO: 251030 - DNA, 25 bp, probe
tggtgccgtcagatccttaaaggtc

SEQ ID NO: 251031 - DNA, 25 bp, probe
ggtccttcattgtcctgtaagggtg

SEQ ID NO: 251032 - DNA, 25 bp, probe
ggtccttcattgtcctgtaagggtg

SEQ ID NO: 251033 - DNA, 25 bp, probe
ggtcatgtggctgcctttaagggtg

SEQ ID NO: 251034 - DNA, 25 bp, probe
ggtgcatggccttagctttctaggc

SEQ ID NO: 251035 - DNA, 25 bp, probe
ggtgctgaggatacagctcttctca

SEQ ID NO: 251036 - DNA, 25 bp, probe
ggtgcagcagtgatcaatggctctc

SEQ ID NO: 251037 - DNA, 25 bp, probe
ggtgcagcagtgatcaatggctctc

SEQ ID NO: 251038 - DNA, 25 bp, probe
ggtgcagcagctagtggaagacatc

SEQ ID NO: 251039 - DNA, 25 bp, probe
ggtgcacatgctgaggaaggccaag

SEQ ID NO: 251040 - DNA, 25 bp, probe
ggtgcacatgctgaggaaggccaag

SEQ ID NO: 251041 - DNA, 25 bp, probe
ggtgcacatgctggcattcaacatg

SEQ ID NO: 251042 - DNA, 25 bp, probe
ggtgcacatgctggcattcaacatg

SEQ ID NO: 251043 - DNA, 25 bp, probe
ggtgcagggcaacgcagacatgttc

SEQ ID NO: 251044 - DNA, 25 bp, probe
ggtgcaggacatcgagcaaagtgta

SEQ ID NO: 251045 - DNA, 25 bp, probe
ggtgcagtccatcgagcacaagctg

SEQ ID NO: 251046 - DNA, 25 bp, probe
ggtgcagtccatcgagcacaagctg

SEQ ID NO: 251047 - DNA, 25 bp, probe
ggtgctaccagtgcaaagctgctaa

SEQ ID NO: 251048 - DNA, 25 bp, probe
ggtctaccagagtcagagatcagct

SEQ ID NO: 251049 - DNA, 25 bp, probe
ggtctaacactggcatgttcaaagc

SEQ ID NO: 251050 - DNA, 25 bp, probe
ggtcattaccagtcattaaagtcca

SEQ ID NO: 251051 - DNA, 25 bp, probe
ggtcattaccagtcattaaagtcca

SEQ ID NO: 251052 - DNA, 25 bp, probe
ggtctgtttccaggtcagaaaccat

SEQ ID NO: 251053 - DNA, 25 bp, probe
ggtgcggttgaagaagaatgaccaa

SEQ ID NO: 251054 - DNA, 25 bp, probe
ggtgcaggaataagggaaaggccca

SEQ ID NO: 251055 - DNA, 25 bp, probe
ggtgaaattggagccaaaggcctaa

SEQ ID NO: 251056 - DNA, 25 bp, probe
ggtgaaattggagccaaaggcctaa

SEQ ID NO: 251057 - DNA, 25 bp, probe
ggtgaaattggaagccgagatggac

SEQ ID NO: 251058 - DNA, 25 bp, probe
ggtgaacgtggaggactgtgaggac

SEQ ID NO: 251059 - DNA, 25 bp, probe
ggtgaaggtgagaccctgtagggca

SEQ ID NO: 251060 - DNA, 25 bp, probe
ggtgaaggtgagaccctgtagggca

SEQ ID NO: 251061 - DNA, 25 bp, probe
ggtgaaggccaagttctgtgaggcc

SEQ ID NO: 251062 - DNA, 25 bp, probe
ggtgaaggctaaaactgctacatcc

SEQ ID NO: 251063 - DNA, 25 bp, probe
ggtacaggtcaaagaggtcctctcc

SEQ ID NO: 251064 - DNA, 25 bp, probe
ggtgacactgactgagatgttctct

SEQ ID NO: 251065 - DNA, 25 bp, probe
ggtgacttaatggaagttgcatcag

SEQ ID NO: 251066 - DNA, 25 bp, probe
ggtgactcatcaatggatatgtgtt

SEQ ID NO: 251067 - DNA, 25 bp, probe
ggtcctgatcctggtggtgttgatc

SEQ ID NO: 251068 - DNA, 25 bp, probe
ggtgcacgaggtggaggtggtcatc

SEQ ID NO: 251069 - DNA, 25 bp, probe
ggtgactgatggacgagtgtccacc

SEQ ID NO: 251070 - DNA, 25 bp, probe
ggtcgcgcggatcatgatgccaacc

SEQ ID NO: 251071 - DNA, 25 bp, probe
ggtgcggtggaaagggcatcaaccc

SEQ ID NO: 251072 - DNA, 25 bp, probe
ggtcaggggcagaggtgcacacctc

SEQ ID NO: 251073 - DNA, 25 bp, probe
ggtcagaggtggaggctattctctt

SEQ ID NO: 251074 - DNA, 25 bp, probe
ggtcagtggcagggggtatttcagt

SEQ ID NO: 251075 - DNA, 25 bp, probe
ggtcgggcaagacggtggagtcgtg

SEQ ID NO: 251076 - DNA, 25 bp, probe
ggtctggatctccctggggagtggg

SEQ ID NO: 251077 - DNA, 25 bp, probe
ggtctggatctccctggggagtggg

SEQ ID NO: 251078 - DNA, 25 bp, probe
ggtcacagacttctggcctaggacc

SEQ ID NO: 251079 - DNA, 25 bp, probe
ggtcacagacttctggcctaggacc

SEQ ID NO: 251080 - DNA, 25 bp, probe
ggtccagatcctacggcttatgagg

SEQ ID NO: 251081 - DNA, 25 bp, probe
ggtctcgtcaggaggtgcctgagag

SEQ ID NO: 251082 - DNA, 25 bp, probe
ggtcggcttggaaggagccatggag

SEQ ID NO: 251083 - DNA, 25 bp, probe
ggtcaccaggtgacagggtctgggt

SEQ ID NO: 251084 - DNA, 25 bp, probe
ggtgctagatggcatccagtatctg

SEQ ID NO: 251085 - DNA, 25 bp, probe
ggtgctggcattgttgctgattctg

SEQ ID NO: 251086 - DNA, 25 bp, probe
ggtgcagagcgtggttgtatctggg

SEQ ID NO: 251087 - DNA, 25 bp, probe
ggtgcaggctggcattgtgagctgg

SEQ ID NO: 251088 - DNA, 25 bp, probe
ggtgcaggctggcattgtgagctgg

SEQ ID NO: 251089 - DNA, 25 bp, probe
ggtgcactgtgctgcaggggtgagc

SEQ ID NO: 251090 - DNA, 25 bp, probe
ggtgcactgtgctgcaggggtgagc

SEQ ID NO: 251091 - DNA, 25 bp, probe
ggtgacatttgggagacatgtgaca

SEQ ID NO: 251092 - DNA, 25 bp, probe
ggtgacaatgatgctgagacgctga

SEQ ID NO: 251093 - DNA, 25 bp, probe
ggtcagcattgaggtcacctgcttt

SEQ ID NO: 251094 - DNA, 25 bp, probe
ggtcgagtacgtggactggattctg

SEQ ID NO: 251095 - DNA, 25 bp, probe
ggtcgagtacgtggactggattctg

SEQ ID NO: 251096 - DNA, 25 bp, probe
ggtaagtaatgagggctgagtttgc

SEQ ID NO: 251097 - DNA, 25 bp, probe
ggtgcacaataaagggggttctctc

SEQ ID NO: 251098 - DNA, 25 bp, probe
ggtgcacaataaagggggttctctc

SEQ ID NO: 251099 - DNA, 25 bp, probe
ggtccattaacaaagcgggctttgc

SEQ ID NO: 251100 - DNA, 25 bp, probe
ggtcctcggagcagtgaggggccgc

SEQ ID NO: 251101 - DNA, 25 bp, probe
ggtcctcggagcagtgaggggccgc

SEQ ID NO: 251102 - DNA, 25 bp, probe
ggtgcctctggacagcatggggaac

SEQ ID NO: 251103 - DNA, 25 bp, probe
ggtccacaggtcaactgcagggaga

SEQ ID NO: 251104 - DNA, 25 bp, probe
ggtccacaggtcaactgcagggaga

SEQ ID NO: 251105 - DNA, 25 bp, probe
ggtccaaagtcaccatgaggccacc

SEQ ID NO: 251106 - DNA, 25 bp, probe
ggtgccaagactggctagaggccct

SEQ ID NO: 251107 - DNA, 25 bp, probe
ggtgctgaagatagagctggagacc

SEQ ID NO: 251108 - DNA, 25 bp, probe
ggtgctgaagatagagctggagacc

SEQ ID NO: 251109 - DNA, 25 bp, probe
ggtctgaattcaagcatgagaaatc

SEQ ID NO: 251110 - DNA, 25 bp, probe
ggtctggtgctgaggatacagctct

SEQ ID NO: 251111 - DNA, 25 bp, probe
ggtgctggtgctcttaacaattttg

SEQ ID NO: 251112 - DNA, 25 bp, probe
ggtgcttatcttctaataagattta

SEQ ID NO: 251113 - DNA, 25 bp, probe
ggtgctttatctcattatatttgtg

SEQ ID NO: 251114 - DNA, 25 bp, probe
ggtgcgtttcttttgcatgactgtg

SEQ ID NO: 251115 - DNA, 25 bp, probe
ggtgcgtttcttttgcatgactgtg

SEQ ID NO: 251116 - DNA, 25 bp, probe
ggtgctgatgctactaaggatgacg

SEQ ID NO: 251117 - DNA, 25 bp, probe
ggtgctgtctatgcacaggtgtgag

SEQ ID NO: 251118 - DNA, 25 bp, probe
ggtgcgtctactgatggagtggggc

SEQ ID NO: 251119 - DNA, 25 bp, probe
ggtgcattctacagcgagaggcgag

SEQ ID NO: 251120 - DNA, 25 bp, probe
ggtctgtccagatcacaaggggcag

SEQ ID NO: 251121 - DNA, 25 bp, probe
ggtctgtccagatcacaaggggcag

SEQ ID NO: 251122 - DNA, 25 bp, probe
ggtgcttcctgaccaaaaagatgag

SEQ ID NO: 251123 - DNA, 25 bp, probe
ggtgcttcacacctcaggaaagatg

SEQ ID NO: 251124 - DNA, 25 bp, probe
ggtgctgcgagagcacaaggacagt

SEQ ID NO: 251125 - DNA, 25 bp, probe
ggtgcagcagcagcgcaacgctgaa

SEQ ID NO: 251126 - DNA, 25 bp, probe
ggtgcagcagcagcgcaacgctgaa

SEQ ID NO: 251127 - DNA, 25 bp, probe
ggtgcagtgcgagctgaagcgaaaa

SEQ ID NO: 251128 - DNA, 25 bp, probe
ggtgcagtgcgagctgaagcgaaaa

SEQ ID NO: 251129 - DNA, 25 bp, probe
ggtgcaggcatctcgagaagataaa

SEQ ID NO: 251130 - DNA, 25 bp, probe
ggtcagttcaacatgcatagtaaaa

SEQ ID NO: 251131 - DNA, 25 bp, probe
ggtcagttcaacatgcatagtaaaa

SEQ ID NO: 251132 - DNA, 25 bp, probe
ggtcaactccaaggcaaatgtccaa

SEQ ID NO: 251133 - DNA, 25 bp, probe
ggtgcaagccccgagaaatgcgagc

SEQ ID NO: 251134 - DNA, 25 bp, probe
ggtgcagagaccccagcacagaagc

SEQ ID NO: 251135 - DNA, 25 bp, probe
ggtcagatgccggacgacatgaagg

SEQ ID NO: 251136 - DNA, 25 bp, probe
ggtgaatggcggtcacatatccagg

SEQ ID NO: 251137 - DNA, 25 bp, probe
ggtgaatggcggtcacatatccagg

SEQ ID NO: 251138 - DNA, 25 bp, probe
ggtgaagaccctgatgatccagctg

SEQ ID NO: 251139 - DNA, 25 bp, probe
ggtgcagcagacgttaaactcactc

SEQ ID NO: 251140 - DNA, 25 bp, probe
ggtgcacagattgctgaaactgtgg

SEQ ID NO: 251141 - DNA, 25 bp, probe
ggtgcatagtaggagagacctgtgc

SEQ ID NO: 251142 - DNA, 25 bp, probe
ggtgcaaaagctacagacctgtctc

SEQ ID NO: 251143 - DNA, 25 bp, probe
ggtgcaatcaatcttggctcactac

SEQ ID NO: 251144 - DNA, 25 bp, probe
ggtgcaatcaatcttggctcactac

SEQ ID NO: 251145 - DNA, 25 bp, probe
ggtcttgcaagtttgtctaccagta

SEQ ID NO: 251146 - DNA, 25 bp, probe
ggtctgaagaggatgctctacaaga

SEQ ID NO: 251147 - DNA, 25 bp, probe
ggtgcccggagagtcttacaagaga

SEQ ID NO: 251148 - DNA, 25 bp, probe
ggtgcacactgaaattttacttgaa

SEQ ID NO: 251149 - DNA, 25 bp, probe
ggtgcacactgaaattttacttgaa

SEQ ID NO: 251150 - DNA, 25 bp, probe
ggtccagcagctacatttacacatc

SEQ ID NO: 251151 - DNA, 25 bp, probe
ggtgcaatcagcaatgtcctacctg

SEQ ID NO: 251152 - DNA, 25 bp, probe
ggtcacaagttgccatctaccttgg

SEQ ID NO: 251153 - DNA, 25 bp, probe
ggtcatcgcctatatgctacttagc

SEQ ID NO: 251154 - DNA, 25 bp, probe
ggtatcctcaaacctgacattgctg

SEQ ID NO: 251155 - DNA, 25 bp, probe
ggtccccaacagcgatactgctgtt

SEQ ID NO: 251156 - DNA, 25 bp, probe
ggtgcaccctgcaggagatacagct

SEQ ID NO: 251157 - DNA, 25 bp, probe
ggtcccttgacgtcatgaagagcta

SEQ ID NO: 251158 - DNA, 25 bp, probe
ggtccattgtacaagccaagatttc

SEQ ID NO: 251159 - DNA, 25 bp, probe
ggtccattgtacaagccaagatttc

SEQ ID NO: 251160 - DNA, 25 bp, probe
ggtcgttataaaccaatattgtgaa

SEQ ID NO: 251161 - DNA, 25 bp, probe
ggtcgttataaaccaatattgtgaa

SEQ ID NO: 251162 - DNA, 25 bp, probe
ggtcctattcaaagccaaatggaga

SEQ ID NO: 251163 - DNA, 25 bp, probe
ggtcctgacctacctcaggtggaac

SEQ ID NO: 251164 - DNA, 25 bp, probe
ggtccgactacacagcagtgttaac

SEQ ID NO: 251165 - DNA, 25 bp, probe
ggtccgactacacagcagtgttaac

SEQ ID NO: 251166 - DNA, 25 bp, probe
ggtgccaagtatcctacgttacaac

SEQ ID NO: 251167 - DNA, 25 bp, probe
ggcccaggttcataccttatttgct

SEQ ID NO: 251168 - DNA, 25 bp, probe
ggtccaggattctgtaatgctttac

SEQ ID NO: 251169 - DNA, 25 bp, probe
ggtccaggttatagtcatgactgtc

SEQ ID NO: 251170 - DNA, 25 bp, probe
ggtccagggctagtgacttgtgtcc

SEQ ID NO: 251171 - DNA, 25 bp, probe
ggtcgtgaggtgactgagcagggtc

SEQ ID NO: 251172 - DNA, 25 bp, probe
ggtccatcagtatcggcagtggctg

SEQ ID NO: 251173 - DNA, 25 bp, probe
ggtgcgcaagaagcggcagatggcg

SEQ ID NO: 251174 - DNA, 25 bp, probe
ggtcatcaaacagtcggcctatgac

SEQ ID NO: 251175 - DNA, 25 bp, probe
ggtgccaaaagtgggccaaatgggc

SEQ ID NO: 251176 - DNA, 25 bp, probe
ggtgcctgaaagctgggagcgtggg

SEQ ID NO: 251177 - DNA, 25 bp, probe
ggtgccagaaaacagtacatgatga

SEQ ID NO: 251178 - DNA, 25 bp, probe
ggtgctgaaaaagatgttgatgtta

SEQ ID NO: 251179 - DNA, 25 bp, probe
ggtgctcaaggaggacttggtttca

SEQ ID NO: 251180 - DNA, 25 bp, probe
ggtgcattacgtgggcattgtcttt

SEQ ID NO: 251181 - DNA, 25 bp, probe
ggtgcattacgtgggcattgtcttt

SEQ ID NO: 251182 - DNA, 25 bp, probe
ggtcagagacgggtcatctgtcgct

SEQ ID NO: 251183 - DNA, 25 bp, probe
ggtcagagacgggtcatctgtcgct

SEQ ID NO: 251184 - DNA, 25 bp, probe
ggtccatactgggccagtctgtgct

SEQ ID NO: 251185 - DNA, 25 bp, probe
ggtccattgtggatccactggtgaa

SEQ ID NO: 251186 - DNA, 25 bp, probe
ggtaatgaatctctccatctgggaa

SEQ ID NO: 251187 - DNA, 25 bp, probe
ggtgaatgcagattccatcgctgag

SEQ ID NO: 251188 - DNA, 25 bp, probe
ggagattgcttatacctggaaacta

SEQ ID NO: 251189 - DNA, 25 bp, probe
ggtatgttgttaacctggtagatta

SEQ ID NO: 251190 - DNA, 25 bp, probe
ggtagttttgggtcagttatattca

SEQ ID NO: 251191 - DNA, 25 bp, probe
ggtagcattttgtgtctttactcca

SEQ ID NO: 251192 - DNA, 25 bp, probe
ggtagttcataaaggtttacagtga

SEQ ID NO: 251193 - DNA, 25 bp, probe
ggtttccaaaacaagtttagcatga

SEQ ID NO: 251194 - DNA, 25 bp, probe
ggtttccaaaacaagtttagcatga

SEQ ID NO: 251195 - DNA, 25 bp, probe
ggttatcttaaatagatcttaggca

SEQ ID NO: 251196 - DNA, 25 bp, probe
ggtttttactggcaaggtcaggcct

SEQ ID NO: 251197 - DNA, 25 bp, probe
ggtttttactggcaaggtcaggcct

SEQ ID NO: 251198 - DNA, 25 bp, probe
ggttttatgggtcagagttccgact

SEQ ID NO: 251199 - DNA, 25 bp, probe
ggtttcgagggtgaggtgaaggcca

SEQ ID NO: 251200 - DNA, 25 bp, probe
ggtttcgagggtgaggtgaaggcca

SEQ ID NO: 251201 - DNA, 25 bp, probe
ggttctcgggactgaaggaaggcca

SEQ ID NO: 251202 - DNA, 25 bp, probe
ggtctgtggggagggcaaaaaggct

SEQ ID NO: 251203 - DNA, 25 bp, probe
ggtctgtgggagtctgcagatagaa

SEQ ID NO: 251204 - DNA, 25 bp, probe
ggtgcttggtggtcagagacgggtc

SEQ ID NO: 251205 - DNA, 25 bp, probe
ggtgcttggtggtcagagacgggtc

SEQ ID NO: 251206 - DNA, 25 bp, probe
ggtgctgtgtgtgacatagacacca

SEQ ID NO: 251207 - DNA, 25 bp, probe
ggtgctgttatgagcagctcttcca

SEQ ID NO: 251208 - DNA, 25 bp, probe
ggtgctgttataagatggtatccta

SEQ ID NO: 251209 - DNA, 25 bp, probe
ggtgctgttataagatggtatccta

SEQ ID NO: 251210 - DNA, 25 bp, probe
ggtgcagtcttacatgattgtcctc

SEQ ID NO: 251211 - DNA, 25 bp, probe
ggtgcagtcttacatgattgtcctc

SEQ ID NO: 251212 - DNA, 25 bp, probe
ggtgcctttaccaatggtctctata

SEQ ID NO: 251213 - DNA, 25 bp, probe
ggtgcctttaccaatggtctctata

SEQ ID NO: 251214 - DNA, 25 bp, probe
ggtgccttctcggctcttgacactt

SEQ ID NO: 251215 - DNA, 25 bp, probe
ggtgcagtggctcatgcctgtaatc

SEQ ID NO: 251216 - DNA, 25 bp, probe
ggtgcagtggctcacacttgtaacc

SEQ ID NO: 251217 - DNA, 25 bp, probe
ggtgcagtggctcacacctttaatc

SEQ ID NO: 251218 - DNA, 25 bp, probe
ggtgcagctggttaacgtgtttgct

SEQ ID NO: 251219 - DNA, 25 bp, probe
ggtgccatggtctataatgtttcat

SEQ ID NO: 251220 - DNA, 25 bp, probe
ggtgccatggtctataatgtttcat

SEQ ID NO: 251221 - DNA, 25 bp, probe
ggtgcctggtgaatcaatgatggtg

SEQ ID NO: 251222 - DNA, 25 bp, probe
ggtgcagctgggcttcattagtgag

SEQ ID NO: 251223 - DNA, 25 bp, probe
ggtgcactggagaatctattattta

SEQ ID NO: 251224 - DNA, 25 bp, probe
ggtgcacgccgaaatttctgtttat

SEQ ID NO: 251225 - DNA, 25 bp, probe
ggtccgataatatctttgtgataat

SEQ ID NO: 251226 - DNA, 25 bp, probe
ggtcggatgacttggcgtgtctgaa

SEQ ID NO: 251227 - DNA, 25 bp, probe
ggtcaggtgagcagtaggtcatcca

SEQ ID NO: 251228 - DNA, 25 bp, probe
ggtgcaggctggaagatacaggctc

SEQ ID NO: 251229 - DNA, 25 bp, probe
ggtgctggtgaagatgaccgcccag

SEQ ID NO: 251230 - DNA, 25 bp, probe
ggtgctgcatggcaccatatccgca

SEQ ID NO: 251231 - DNA, 25 bp, probe
ggtgcatgatgacgaggatattgac

SEQ ID NO: 251232 - DNA, 25 bp, probe
ggtcaggagccacctatgtgacttt

SEQ ID NO: 251233 - DNA, 25 bp, probe
ggtccaagccatcaagtgctttctt

SEQ ID NO: 251234 - DNA, 25 bp, probe
ggtccaaactgaataggcttgctca

SEQ ID NO: 251235 - DNA, 25 bp, probe
ggtcgtcacctgggagacagtccag

SEQ ID NO: 251236 - DNA, 25 bp, probe
ggtcagctctccaggagcaagtcct

SEQ ID NO: 251237 - DNA, 25 bp, probe
ggtcatggtccctagagactaccta

SEQ ID NO: 251238 - DNA, 25 bp, probe
ggtcatctgtcgctaaggcgcaacc

SEQ ID NO: 251239 - DNA, 25 bp, probe
ggtcatctgtcgctaaggcgcaacc

SEQ ID NO: 251240 - DNA, 25 bp, probe
ggtctgcgtcgaagacagaatggac

SEQ ID NO: 251241 - DNA, 25 bp, probe
ggtctgcgtcgaagacagaatggac

SEQ ID NO: 251242 - DNA, 25 bp, probe
ggtctgctccctggacagagaggaa

SEQ ID NO: 251243 - DNA, 25 bp, probe
ggtctctctcctggatcagggtgga

SEQ ID NO: 251244 - DNA, 25 bp, probe
ggtctctctcctggatcagggtgga

SEQ ID NO: 251245 - DNA, 25 bp, probe
ggtctgttccataatgatggctgtg

SEQ ID NO: 251246 - DNA, 25 bp, probe
ggtcctggcctgaagacagtgtgtg

SEQ ID NO: 251247 - DNA, 25 bp, probe
ggtactggcctagccatgtggaatt

SEQ ID NO: 251248 - DNA, 25 bp, probe
ggtagctgagccaaacacgtaggat

SEQ ID NO: 251249 - DNA, 25 bp, probe
ggtcctgatgaacacctacagtgtt

SEQ ID NO: 251250 - DNA, 25 bp, probe
ggtccaggaacttcctatggccttt

SEQ ID NO: 251251 - DNA, 25 bp, probe
ggtttagttctatctgaggccgatg

SEQ ID NO: 251252 - DNA, 25 bp, probe
ggtttagttctatctgaggccgatg

SEQ ID NO: 251253 - DNA, 25 bp, probe
ggtttttccagtgtgacccagataa

SEQ ID NO: 251254 - DNA, 25 bp, probe
ggtttttccagtgtgacccagataa

SEQ ID NO: 251255 - DNA, 25 bp, probe
ggtctatttctagttattacccaga

SEQ ID NO: 251256 - DNA, 25 bp, probe
ggtctatttctagttattacccaga

SEQ ID NO: 251257 - DNA, 25 bp, probe
ggtctatttctagttattacccaga

SEQ ID NO: 251258 - DNA, 25 bp, probe
ggtgcatatgaaggactttttctac

SEQ ID NO: 251259 - DNA, 25 bp, probe
ggtctaaaaggaattattgccacaa

SEQ ID NO: 251260 - DNA, 25 bp, probe
ggtcttgaccggtaagctgtccaaa

SEQ ID NO: 251261 - DNA, 25 bp, probe
ggtctcatgaccagtcaagggcaag

SEQ ID NO: 251262 - DNA, 25 bp, probe
ggttcaaggctcatagagggccagg

SEQ ID NO: 251263 - DNA, 25 bp, probe
ggttaaggctgaggaaaggccagct

SEQ ID NO: 251264 - DNA, 25 bp, probe
ggataatttctatgaaatcgcgctt

SEQ ID NO: 251265 - DNA, 25 bp, probe
ggaattgtttttatggaggctttgc

SEQ ID NO: 251266 - DNA, 25 bp, probe
ggattttgagtatctcggacctttc

SEQ ID NO: 251267 - DNA, 25 bp, probe
ggtcttcgagtatatgcggcacggg

SEQ ID NO: 251268 - DNA, 25 bp, probe
ggtcttcaagacttcaggtgccagg

SEQ ID NO: 251269 - DNA, 25 bp, probe
ggtcggaaatcttcgtttcaggtca

SEQ ID NO: 251270 - DNA, 25 bp, probe
ggtcaggaactattaattccatgtg

SEQ ID NO: 251271 - DNA, 25 bp, probe
ggtcttgaagataacattggccttt

SEQ ID NO: 251272 - DNA, 25 bp, probe
ggtgcttgttgtacctatgggtctg

SEQ ID NO: 251273 - DNA, 25 bp, probe
ggtctgtttgccacttgatggggcc

SEQ ID NO: 251274 - DNA, 25 bp, probe
ggtcctttgccatgtctggggaggc

SEQ ID NO: 251275 - DNA, 25 bp, probe
ggtccttctccttatgtgggaaatg

SEQ ID NO: 251276 - DNA, 25 bp, probe
ggtccattctcctaagtaaagcctg

SEQ ID NO: 251277 - DNA, 25 bp, probe
ggtccatcttggtcaaggacaccca

SEQ ID NO: 251278 - DNA, 25 bp, probe
ggtcctttggacaggtggccaagtg

SEQ ID NO: 251279 - DNA, 25 bp, probe
ggttttattggcagtgggcacaagg

SEQ ID NO: 251280 - DNA, 25 bp, probe
ggttttattggcagtgggcacaagg

SEQ ID NO: 251281 - DNA, 25 bp, probe
ggatatattttgggtcgggatccaa

SEQ ID NO: 251282 - DNA, 25 bp, probe
ggtcataggacttggtagggtccca

SEQ ID NO: 251283 - DNA, 25 bp, probe
ggtcataatccttagtgagggtgcc

SEQ ID NO: 251284 - DNA, 25 bp, probe
ggtcttcatgctggtagctgggggc

SEQ ID NO: 251285 - DNA, 25 bp, probe
ggtcttatcatggacaatttgggct

SEQ ID NO: 251286 - DNA, 25 bp, probe
ggtctacctggacattctaggctag

SEQ ID NO: 251287 - DNA, 25 bp, probe
ggttagggggaatcaagcatctggt

SEQ ID NO: 251288 - DNA, 25 bp, probe
ggttagggggaatcaagcatctggt

SEQ ID NO: 251289 - DNA, 25 bp, probe
ggatatatttggcaaccaaattctg

SEQ ID NO: 251290 - DNA, 25 bp, probe
ggtcagttatgacaacagcaacttt

SEQ ID NO: 251291 - DNA, 25 bp, probe
ggtcacatttcaggaagcatcaaca

SEQ ID NO: 251292 - DNA, 25 bp, probe
ggtcgtttccaggagctggacagca

SEQ ID NO: 251293 - DNA, 25 bp, probe
ggtcctttgcaagagcgcagaccac

SEQ ID NO: 251294 - DNA, 25 bp, probe
ggtcctattgcagtcctggcaaaca

SEQ ID NO: 251295 - DNA, 25 bp, probe
ggtcctatggcagcgtatacaaagc

SEQ ID NO: 251296 - DNA, 25 bp, probe
ggtcactttgccattatgcaaatgg

SEQ ID NO: 251297 - DNA, 25 bp, probe
ggtcactttgccattatgcaaatgg

SEQ ID NO: 251298 - DNA, 25 bp, probe
ggtccacgtggaattgtgggtggtg

SEQ ID NO: 251299 - DNA, 25 bp, probe
ggtccacgtggaattgtgggtggtg

SEQ ID NO: 251300 - DNA, 25 bp, probe
ggtaggcgtgagagtgtgggtttta

SEQ ID NO: 251301 - DNA, 25 bp, probe
ggtccgctgggagggagggttgtgt

SEQ ID NO: 251302 - DNA, 25 bp, probe
ggtccgctgggagggagggttgtgt

SEQ ID NO: 251303 - DNA, 25 bp, probe
ggtccactgtgggggcagagggagt

SEQ ID NO: 251304 - DNA, 25 bp, probe
ggtgccactcagagtggagaagctg

SEQ ID NO: 251305 - DNA, 25 bp, probe
ggtgccactcagagtggagaagctg

SEQ ID NO: 251306 - DNA, 25 bp, probe
ggtgccacgcatcttcatgaagggc

SEQ ID NO: 251307 - DNA, 25 bp, probe
ggtgccaggatgcttcgcagaggca

SEQ ID NO: 251308 - DNA, 25 bp, probe
ggtccaggagcacatcaagagggtt

SEQ ID NO: 251309 - DNA, 25 bp, probe
ggtagaggtcatcatcaatacagag

SEQ ID NO: 251310 - DNA, 25 bp, probe
ggtagcagacttttcagcagaaggt

SEQ ID NO: 251311 - DNA, 25 bp, probe
ggtcagggttttagagagcagtggc

SEQ ID NO: 251312 - DNA, 25 bp, probe
ggtcagggttttagagagcagtggc

SEQ ID NO: 251313 - DNA, 25 bp, probe
ggtgcccgtctgatggggagatggc

SEQ ID NO: 251314 - DNA, 25 bp, probe
ggtcccagtgttagggtagcatggg

SEQ ID NO: 251315 - DNA, 25 bp, probe
ggtgccacagatctggaggtatgat

SEQ ID NO: 251316 - DNA, 25 bp, probe
ggtccagaaccatgagatgtatgat

SEQ ID NO: 251317 - DNA, 25 bp, probe
ggtccgatactctgagagaagtcaa

SEQ ID NO: 251318 - DNA, 25 bp, probe
ggtactgaaaatgagaaaatcccca

SEQ ID NO: 251319 - DNA, 25 bp, probe
ggtacgcggcaagcaacaaatccac

SEQ ID NO: 251320 - DNA, 25 bp, probe
ggtacgcggcaagcaacaaatccac

SEQ ID NO: 251321 - DNA, 25 bp, probe
ggtaccagcccatgaacaaattcct

SEQ ID NO: 251322 - DNA, 25 bp, probe
ggtaccagcccatgaacaaattcct

SEQ ID NO: 251323 - DNA, 25 bp, probe
ggtcccggcctggaatatatattct

SEQ ID NO: 251324 - DNA, 25 bp, probe
ggtccagactgctggaaactttctc

SEQ ID NO: 251325 - DNA, 25 bp, probe
ggtctactagcaacaacaactttct

SEQ ID NO: 251326 - DNA, 25 bp, probe
ggtctcactgtaacaactatttgtt

SEQ ID NO: 251327 - DNA, 25 bp, probe
ggtccctaggggtgattatctatgt

SEQ ID NO: 251328 - DNA, 25 bp, probe
ggtcaccaaatgggttgattactct

SEQ ID NO: 251329 - DNA, 25 bp, probe
ggtcaccatggatgggcgagtcaac

SEQ ID NO: 251330 - DNA, 25 bp, probe
ggtcatcctgagaaggtcatgggaa

SEQ ID NO: 251331 - DNA, 25 bp, probe
ggtcgcctggattgggatgagaaca

SEQ ID NO: 251332 - DNA, 25 bp, probe
ggtccctttgtgtgtgaggacagca

SEQ ID NO: 251333 - DNA, 25 bp, probe
ggtgccactttctcaagatgaaaac

SEQ ID NO: 251334 - DNA, 25 bp, probe
ggtcaacttccggaatgtgaaagcc

SEQ ID NO: 251335 - DNA, 25 bp, probe
ggtcgactcattgaattaaatcagc

SEQ ID NO: 251336 - DNA, 25 bp, probe
ggtcgactcattgaattaaatcagc

SEQ ID NO: 251337 - DNA, 25 bp, probe
ggtcgagctattattcttacaccct

SEQ ID NO: 251338 - DNA, 25 bp, probe
ggtcagagtttacttgctatataga

SEQ ID NO: 251339 - DNA, 25 bp, probe
ggtacctatggagttgtgtataagg

SEQ ID NO: 251340 - DNA, 25 bp, probe
ggtcttattggaattgcttatgaag

SEQ ID NO: 251341 - DNA, 25 bp, probe
ggtattcgggaaggcatttgtggga

SEQ ID NO: 251342 - DNA, 25 bp, probe
ggtattcgggaaggcatttgtggga

SEQ ID NO: 251343 - DNA, 25 bp, probe
ggtattcgggaaggcatttgtggga

SEQ ID NO: 251344 - DNA, 25 bp, probe
ggtctttgggttggaggctccagga

SEQ ID NO: 251345 - DNA, 25 bp, probe
ggtctttgggttggaggctccagga

SEQ ID NO: 251346 - DNA, 25 bp, probe
ggtattttggtgtggagctccatag

SEQ ID NO: 251347 - DNA, 25 bp, probe
ggtaatttactgtggtctctaagtt

SEQ ID NO: 251348 - DNA, 25 bp, probe
ggctacaatttcaggtttgccaagt

SEQ ID NO: 251349 - DNA, 25 bp, probe
ggtacaatctcagaggttggtcaat

SEQ ID NO: 251350 - DNA, 25 bp, probe
ggtactgtccgcaaggttcatgtga

SEQ ID NO: 251351 - DNA, 25 bp, probe
ggtccctgaggctaagtggcaggtc

SEQ ID NO: 251352 - DNA, 25 bp, probe
ggtcccagaagaggaggccagtcac

SEQ ID NO: 251353 - DNA, 25 bp, probe
ggtcaccagggaggagcccatttac

SEQ ID NO: 251354 - DNA, 25 bp, probe
ggtacagagacgtcagtccctttga

SEQ ID NO: 251355 - DNA, 25 bp, probe
ggtacagaagccgaggacgtgcttg

SEQ ID NO: 251356 - DNA, 25 bp, probe
ggtgccatgaagccaggtgactggt

SEQ ID NO: 251357 - DNA, 25 bp, probe
ggtgcctgagagcagaatgaataat

SEQ ID NO: 251358 - DNA, 25 bp, probe
ggtcctgagagcaacaagaatcatg

SEQ ID NO: 251359 - DNA, 25 bp, probe
ggtcccagaggaagagagactgcag

SEQ ID NO: 251360 - DNA, 25 bp, probe
ggtgcccgttgaggagcaggatgcc

SEQ ID NO: 251361 - DNA, 25 bp, probe
ggtcagccttcatggagcaggatgc

SEQ ID NO: 251362 - DNA, 25 bp, probe
ggtagccttagggtgctgagtgcct

SEQ ID NO: 251363 - DNA, 25 bp, probe
ggtcacctttgggtgtgcggtgtgc

SEQ ID NO: 251364 - DNA, 25 bp, probe
ggtccttttggacagaggtgctaat

SEQ ID NO: 251365 - DNA, 25 bp, probe
ggtccttttggacagaggtgctaat

SEQ ID NO: 251366 - DNA, 25 bp, probe
ggtttggttggagaagggagttatg

SEQ ID NO: 251367 - DNA, 25 bp, probe
ggtaaggtttaggaatggtggatga

SEQ ID NO: 251368 - DNA, 25 bp, probe
ggttgcgggttgtcgaagggtggat

SEQ ID NO: 251369 - DNA, 25 bp, probe
ggattgggggtggcccaggggatgc

SEQ ID NO: 251370 - DNA, 25 bp, probe
ggtctggctgggttctccagaggga

SEQ ID NO: 251371 - DNA, 25 bp, probe
ggttcttgcgcgtctatcgcaggag

SEQ ID NO: 251372 - DNA, 25 bp, probe
ggtcacgtgcggttcattgactatg

SEQ ID NO: 251373 - DNA, 25 bp, probe
ggtccctggagataagatccactgc

SEQ ID NO: 251374 - DNA, 25 bp, probe
ggtccctggagataagatccactgc

SEQ ID NO: 251375 - DNA, 25 bp, probe
ggtcctctgaacacagagtccctga

SEQ ID NO: 251376 - DNA, 25 bp, probe
ggtcctcagaaccctgaatgcaact

SEQ ID NO: 251377 - DNA, 25 bp, probe
ggtgcctatggagaagttcaacttg

SEQ ID NO: 251378 - DNA, 25 bp, probe
ggtgcctgtggagaggtaaagctgg

SEQ ID NO: 251379 - DNA, 25 bp, probe
ggtcctgggcctatgtcaagaagtg

SEQ ID NO: 251380 - DNA, 25 bp, probe
ggtcctgggcctatgtcaagaagtg

SEQ ID NO: 251381 - DNA, 25 bp, probe
ggtcctgggcctatgtcaagaagtg

SEQ ID NO: 251382 - DNA, 25 bp, probe
ggtcctgggcctatgtcaagaagtg

SEQ ID NO: 251383 - DNA, 25 bp, probe
ggtcctgtgcaaatagtgtcaaaag

SEQ ID NO: 251384 - DNA, 25 bp, probe
ggtactgcacattttgtacaaagat

SEQ ID NO: 251385 - DNA, 25 bp, probe
ggtatctacatatttctgtaacttg

SEQ ID NO: 251386 - DNA, 25 bp, probe
ggtactactaatattattcctggtc

SEQ ID NO: 251387 - DNA, 25 bp, probe
ggtaccaaagatataatcacctagg

SEQ ID NO: 251388 - DNA, 25 bp, probe
ggtaccaaagatataatcacctagg

SEQ ID NO: 251389 - DNA, 25 bp, probe
tggtactttaggttaatccctcaag

SEQ ID NO: 251390 - DNA, 25 bp, probe
ggtacatgcccaggtaaattcccaa

SEQ ID NO: 251391 - DNA, 25 bp, probe
ggtgccagcagccgcggtaattcca

SEQ ID NO: 251392 - DNA, 25 bp, probe
ggtgccaagcgccatggcttagacc

SEQ ID NO: 251393 - DNA, 25 bp, probe
ggtctcattggcaatgtttcgatag

SEQ ID NO: 251394 - DNA, 25 bp, probe
ggtccctgatgcagtgcttcagatg

SEQ ID NO: 251395 - DNA, 25 bp, probe
ggtccattcatgagatattcaagat

SEQ ID NO: 251396 - DNA, 25 bp, probe
ggtccgacagcaagctaccaagagc

SEQ ID NO: 251397 - DNA, 25 bp, probe
ggtccataccaagtaatagaggcac

SEQ ID NO: 251398 - DNA, 25 bp, probe
ggtaatcagccacaacataacgggg

SEQ ID NO: 251399 - DNA, 25 bp, probe
ggtaatcagccacaacataacgggg

SEQ ID NO: 251400 - DNA, 25 bp, probe
ggtagctgcagccaaatcataaacg

SEQ ID NO: 251401 - DNA, 25 bp, probe
ggtagtggtaagaaaagccagccaa

SEQ ID NO: 251402 - DNA, 25 bp, probe
ggtagtagactagtggaaatcccca

SEQ ID NO: 251403 - DNA, 25 bp, probe
ggtaatgcaacctttgaaactttgt

SEQ ID NO: 251404 - DNA, 25 bp, probe
ggtactatttatgtaacactttgta

SEQ ID NO: 251405 - DNA, 25 bp, probe
ggtaaatatgccactacagctcgta

SEQ ID NO: 251406 - DNA, 25 bp, probe
ggtaaatatgccactacagctcgta

SEQ ID NO: 251407 - DNA, 25 bp, probe
ggagcaattaacatccgactctgta

SEQ ID NO: 251408 - DNA, 25 bp, probe
ggtctattttctcctagatgcttgt

SEQ ID NO: 251409 - DNA, 25 bp, probe
ggtctattttctcctagatgcttgt

SEQ ID NO: 251410 - DNA, 25 bp, probe
ggtcattttttcctaacttactctg

SEQ ID NO: 251411 - DNA, 25 bp, probe
ggtcattttttcctaacttactctg

SEQ ID NO: 251412 - DNA, 25 bp, probe
ggtagagttttccaccagtctgaaa

SEQ ID NO: 251413 - DNA, 25 bp, probe
ggtagagttttccaccagtctgaaa

SEQ ID NO: 251414 - DNA, 25 bp, probe
ggtaagttattcctatcctgtggac

SEQ ID NO: 251415 - DNA, 25 bp, probe
ggtaattgtcaatgcttccctggac

SEQ ID NO: 251416 - DNA, 25 bp, probe
ggtccagagtcaactgttcccataa

SEQ ID NO: 251417 - DNA, 25 bp, probe
ggtccaagtgtactgttggccgcag

SEQ ID NO: 251418 - DNA, 25 bp, probe
ggtccaacagaacacatggcctaga

SEQ ID NO: 251419 - DNA, 25 bp, probe
ggtgccaacagtgttaggcctggca

SEQ ID NO: 251420 - DNA, 25 bp, probe
ggtgccaacagtgttaggcctggca

SEQ ID NO: 251421 - DNA, 25 bp, probe
ggtgccaccattgagaactccagga

SEQ ID NO: 251422 - DNA, 25 bp, probe
ggtccagaacatcaaactccaaacc

SEQ ID NO: 251423 - DNA, 25 bp, probe
ggtccagagatgccaagaagctcac

SEQ ID NO: 251424 - DNA, 25 bp, probe
ggtcctggatcacagaactcatttc

SEQ ID NO: 251425 - DNA, 25 bp, probe
ggtctggggggaccactttgatcgg

SEQ ID NO: 251426 - DNA, 25 bp, probe
ggtctggagagggacaagtttgata

SEQ ID NO: 251427 - DNA, 25 bp, probe
ggtctgcatcagctttttgtattaa

SEQ ID NO: 251428 - DNA, 25 bp, probe
ggtctgcatcagctttttgtattaa

SEQ ID NO: 251429 - DNA, 25 bp, probe
ggtctctgggtatcatggctattga

SEQ ID NO: 251430 - DNA, 25 bp, probe
ggtctcgtggtaaaactgttaatga

SEQ ID NO: 251431 - DNA, 25 bp, probe
ggtccattggccttaagtgtctaga

SEQ ID NO: 251432 - DNA, 25 bp, probe
ggtctcatttcttgtaaagtataac

SEQ ID NO: 251433 - DNA, 25 bp, probe
ggtcattgctgttgaaaaagattaa

SEQ ID NO: 251434 - DNA, 25 bp, probe
ggtcctgcgggagaaagtgtatgca

SEQ ID NO: 251435 - DNA, 25 bp, probe
ggtccgcgggaggatggagcagtga

SEQ ID NO: 251436 - DNA, 25 bp, probe
ggtactaggggctgggatgtggggt

SEQ ID NO: 251437 - DNA, 25 bp, probe
ggtcctggggacagcagagtgtggg

SEQ ID NO: 251438 - DNA, 25 bp, probe
ggtcagggggccacagagaaggggc

SEQ ID NO: 251439 - DNA, 25 bp, probe
ggtcagggggccacagagaaggggc

SEQ ID NO: 251440 - DNA, 25 bp, probe
ggtcgaccgggagaggaaggtgagt

SEQ ID NO: 251441 - DNA, 25 bp, probe
ggtaccggggacttgggagagtgag

SEQ ID NO: 251442 - DNA, 25 bp, probe
ggtacacgggccagggaaatgccag

SEQ ID NO: 251443 - DNA, 25 bp, probe
ggtacacgggccagggaaatgccag

SEQ ID NO: 251444 - DNA, 25 bp, probe
ggctgaaggggctgggggaaggaag

SEQ ID NO: 251445 - DNA, 25 bp, probe
ggtacggcagaggcgggggaaagag

SEQ ID NO: 251446 - DNA, 25 bp, probe
ggtcatccctgagctgaacgggaag

SEQ ID NO: 251447 - DNA, 25 bp, probe
ggtcatcaccattggcaatgagcgg

SEQ ID NO: 251448 - DNA, 25 bp, probe
ggtctcattcttccaagctgagagt

SEQ ID NO: 251449 - DNA, 25 bp, probe
ggtctcattcttccaagctgagagt

SEQ ID NO: 251450 - DNA, 25 bp, probe
ggtccttctggatcaggagtgtgtg

SEQ ID NO: 251451 - DNA, 25 bp, probe
ggtcatcatgaacaacagggtgtgt

SEQ ID NO: 251452 - DNA, 25 bp, probe
ggtcatcatgaacaacagggtgtgt

SEQ ID NO: 251453 - DNA, 25 bp, probe
ggtcagctgagtccgaggaggtgtc

SEQ ID NO: 251454 - DNA, 25 bp, probe
ggtcgtgatctgtacaggggcttgc

SEQ ID NO: 251455 - DNA, 25 bp, probe
ggtttacgagatgtggctcttcgtt

SEQ ID NO: 251456 - DNA, 25 bp, probe
ggatcttttagtgtggctccggtac

SEQ ID NO: 251457 - DNA, 25 bp, probe
ggatcttttagtgtggctccggtac

SEQ ID NO: 251458 - DNA, 25 bp, probe
ggtcccttcagtgttgtacgacgat

SEQ ID NO: 251459 - DNA, 25 bp, probe
ggatcccctggtgtattatttttca

SEQ ID NO: 251460 - DNA, 25 bp, probe
ggtcccgtcgtagcaattatattta

SEQ ID NO: 251461 - DNA, 25 bp, probe
ggtcccatgacagtagacaaaaatg

SEQ ID NO: 251462 - DNA, 25 bp, probe
ggtcctgatgggggaacaccactgg

SEQ ID NO: 251463 - DNA, 25 bp, probe
ggtcctgatgggggaacaccactgg

SEQ ID NO: 251464 - DNA, 25 bp, probe
ggctctttggggctagacagactgg

SEQ ID NO: 251465 - DNA, 25 bp, probe
tccttggataacctgtaccgactgg

SEQ ID NO: 251466 - DNA, 25 bp, probe
ggttgaattcacattccctgacttt

SEQ ID NO: 251467 - DNA, 25 bp, probe
ggtattaaactttcacctgccactt

SEQ ID NO: 251468 - DNA, 25 bp, probe
ggtcatgtaacaggtaaccacaatt

SEQ ID NO: 251469 - DNA, 25 bp, probe
ggtcatgtaacaggtaaccacaatt

SEQ ID NO: 251470 - DNA, 25 bp, probe
ggtcatagccaaggtaactgcaaaa

SEQ ID NO: 251471 - DNA, 25 bp, probe
ggatcgacctaacacatctgaaata

SEQ ID NO: 251472 - DNA, 25 bp, probe
ggtccatctattaacgcactaataa

SEQ ID NO: 251473 - DNA, 25 bp, probe
ggtccatattagattgcatccaaga

SEQ ID NO: 251474 - DNA, 25 bp, probe
ggtccagattatacatccattgcaa

SEQ ID NO: 251475 - DNA, 25 bp, probe
ggtcctgttatttatgcttgctgca

SEQ ID NO: 251476 - DNA, 25 bp, probe
ggccctggttttacattacatttca

SEQ ID NO: 251477 - DNA, 25 bp, probe
ggtctctgttttcaatataattctt

SEQ ID NO: 251478 - DNA, 25 bp, probe
ggtcttcgttggcaatttcagtcaa

SEQ ID NO: 251479 - DNA, 25 bp, probe
ggtatctcaggtctgaatcttcacc

SEQ ID NO: 251480 - DNA, 25 bp, probe
ggtccatcagagctctgatttccca

SEQ ID NO: 251481 - DNA, 25 bp, probe
ggtccatcctgacctggtatggtca

SEQ ID NO: 251482 - DNA, 25 bp, probe
ggtctccttgatgcttttggacata

SEQ ID NO: 251483 - DNA, 25 bp, probe
ggtcccttggccatatcaaggcagc

SEQ ID NO: 251484 - DNA, 25 bp, probe
ggtcccttgggtacatcacatatac

SEQ ID NO: 251485 - DNA, 25 bp, probe
ggtcccttgggtacatcacatatac

SEQ ID NO: 251486 - DNA, 25 bp, probe
ggtcatcctcgtaaacatatcagta

SEQ ID NO: 251487 - DNA, 25 bp, probe
ggtctgccttgtacaagaaaaccga

SEQ ID NO: 251488 - DNA, 25 bp, probe
ggtcccttgtaagaaatgtccattc

SEQ ID NO: 251489 - DNA, 25 bp, probe
ggttacctcaaagacaattgcctcc

SEQ ID NO: 251490 - DNA, 25 bp, probe
ggtctgcaactttggaaaactcctc

SEQ ID NO: 251491 - DNA, 25 bp, probe
ggttatacgtaccacggattctctt

SEQ ID NO: 251492 - DNA, 25 bp, probe
ggtctgacaaggacccgtgtcacat

SEQ ID NO: 251493 - DNA, 25 bp, probe
ggtcatgaagctttcctatggtcct

SEQ ID NO: 251494 - DNA, 25 bp, probe
ggtcatgaagctacacaaacctttc

SEQ ID NO: 251495 - DNA, 25 bp, probe
ggtctggtgtatgcaaattgtatgg

SEQ ID NO: 251496 - DNA, 25 bp, probe
ggtctcctgttcgaactcgagggac

SEQ ID NO: 251497 - DNA, 25 bp, probe
ggtctactgcattaaatcctgtgtg

SEQ ID NO: 251498 - DNA, 25 bp, probe
ggtctgtgctgtgcaagtcactggt

SEQ ID NO: 251499 - DNA, 25 bp, probe
ggtcttgttcacgaggcagatctgt

SEQ ID NO: 251500 - DNA, 25 bp, probe
ggtcttgttcacgaggcagatctgt

SEQ ID NO: 251501 - DNA, 25 bp, probe
ggtcccagtcagccatggagagctg

SEQ ID NO: 251502 - DNA, 25 bp, probe
ggtcccagtcagccatggagagctg

SEQ ID NO: 251503 - DNA, 25 bp, probe
ggtcaacacaagccatgtcagcagc

SEQ ID NO: 251504 - DNA, 25 bp, probe
ggtaataaatacacagcatgcagac

SEQ ID NO: 251505 - DNA, 25 bp, probe
ggtaataaatacacagcatgcagac

SEQ ID NO: 251506 - DNA, 25 bp, probe
ggtacataaacaagtcctcagtggt

SEQ ID NO: 251507 - DNA, 25 bp, probe
ggttcaaagggagcccagtggttgc

SEQ ID NO: 251508 - DNA, 25 bp, probe
ggtagcaaaggggcacctgaggttc

SEQ ID NO: 251509 - DNA, 25 bp, probe
ggtagactggtgggcacttggagtt

SEQ ID NO: 251510 - DNA, 25 bp, probe
ggtagatctgctcactcaagtggac

SEQ ID NO: 251511 - DNA, 25 bp, probe
ggtagattggacatcacagtacacc

SEQ ID NO: 251512 - DNA, 25 bp, probe
ggtccttgctaaatctagataccag

SEQ ID NO: 251513 - DNA, 25 bp, probe
ggtccgtgctggttctgaataaagc

SEQ ID NO: 251514 - DNA, 25 bp, probe
ggatccttggtggtctactgaatca

SEQ ID NO: 251515 - DNA, 25 bp, probe
ggtcacataggggctgctccagacc

SEQ ID NO: 251516 - DNA, 25 bp, probe
ggtcagcttcaggccttctggaagc

SEQ ID NO: 251517 - DNA, 25 bp, probe
ggtcactgggctgtgtcatgtacac

SEQ ID NO: 251518 - DNA, 25 bp, probe
ggtcctcagactgttctgaagcacc

SEQ ID NO: 251519 - DNA, 25 bp, probe
ggtcccatggctgaagctggagcag

SEQ ID NO: 251520 - DNA, 25 bp, probe
ggtcgcaccttcaaagtgggcagct

SEQ ID NO: 251521 - DNA, 25 bp, probe
ggtcgcaccttcaaagtgggcagct

SEQ ID NO: 251522 - DNA, 25 bp, probe
ggtcacagccttgtgatgtgtggag

SEQ ID NO: 251523 - DNA, 25 bp, probe
ggtcaagatcttagctgtatggagt

SEQ ID NO: 251524 - DNA, 25 bp, probe
ggtagcggttgagtgcgatggctgt

SEQ ID NO: 251525 - DNA, 25 bp, probe
ggtactgagatatctcggcttccgc

SEQ ID NO: 251526 - DNA, 25 bp, probe
ggtactgaatcctgggctacaggaa

SEQ ID NO: 251527 - DNA, 25 bp, probe
ggtagctgagggcatggcctacatg

SEQ ID NO: 251528 - DNA, 25 bp, probe
ggtagagcagagcctgaccctaaaa

SEQ ID NO: 251529 - DNA, 25 bp, probe
ggtagagcagagcctgaccctaaaa

SEQ ID NO: 251530 - DNA, 25 bp, probe
ggtagtctacggtcactaagcaata

SEQ ID NO: 251531 - DNA, 25 bp, probe
ggtagcctagaacagctaagaccac

SEQ ID NO: 251532 - DNA, 25 bp, probe
gagacaactggaagagtatcagggg

SEQ ID NO: 251533 - DNA, 25 bp, probe
ggtacctcctaggagtacaagtgcc

SEQ ID NO: 251534 - DNA, 25 bp, probe
ggtagactcctaaaatacagttgac

SEQ ID NO: 251535 - DNA, 25 bp, probe
ggtagactcctaaaatacagttgac

SEQ ID NO: 251536 - DNA, 25 bp, probe
ggtcccacctagaacatcagagttg

SEQ ID NO: 251537 - DNA, 25 bp, probe
ggtctccttctggatcaacatggat

SEQ ID NO: 251538 - DNA, 25 bp, probe
ggtctcctctgacttcaacagcgac

SEQ ID NO: 251539 - DNA, 25 bp, probe
ggtctctactgtatgaactgctgac

SEQ ID NO: 251540 - DNA, 25 bp, probe
ggtcttacatgaaatcagcggagcc

SEQ ID NO: 251541 - DNA, 25 bp, probe
ggtctagcatatcagtcactgggcc

SEQ ID NO: 251542 - DNA, 25 bp, probe
ggtctagcatatcagtcactgggcc

SEQ ID NO: 251543 - DNA, 25 bp, probe
ggtctcagctgtactctatcaggaa

SEQ ID NO: 251544 - DNA, 25 bp, probe
ggtctcagctgtactctatcaggaa

SEQ ID NO: 251545 - DNA, 25 bp, probe
ggtctcagagctgtgaatcagccag

SEQ ID NO: 251546 - DNA, 25 bp, probe
ggtcctcagatgggaattgcacagt

SEQ ID NO: 251547 - DNA, 25 bp, probe
ggtcctgctgatcaatttcatcttc

SEQ ID NO: 251548 - DNA, 25 bp, probe
ggtcctgctgtttttgatgagcctt

SEQ ID NO: 251549 - DNA, 25 bp, probe
ggtagcttgctcaacaggtgacctt

SEQ ID NO: 251550 - DNA, 25 bp, probe
ggtctcattctgggctgtgaacaat

SEQ ID NO: 251551 - DNA, 25 bp, probe
ggtctcattctgggctgtgaacaat

SEQ ID NO: 251552 - DNA, 25 bp, probe
ggtctcttctatgcagtgggcactc

SEQ ID NO: 251553 - DNA, 25 bp, probe
ggtctctgtgctatagtggaatctt

SEQ ID NO: 251554 - DNA, 25 bp, probe
ggtctcatacggtcagtcattattt

SEQ ID NO: 251555 - DNA, 25 bp, probe
ggtctcccacaggtgtattactttg

SEQ ID NO: 251556 - DNA, 25 bp, probe
ggtcttccagatgtgtaatacatta

SEQ ID NO: 251557 - DNA, 25 bp, probe
ggttgcaccaacataaaaaggaaat

SEQ ID NO: 251558 - DNA, 25 bp, probe
ggtaaccacaattacaaaatggcaa

SEQ ID NO: 251559 - DNA, 25 bp, probe
ggtaaccacctttctatacaggaga

SEQ ID NO: 251560 - DNA, 25 bp, probe
ggtacaaatccgctctgataaaaga

SEQ ID NO: 251561 - DNA, 25 bp, probe
ggtacaaatccgctctgataaaaga

SEQ ID NO: 251562 - DNA, 25 bp, probe
ggtaccaatgccgtttccatagaaa

SEQ ID NO: 251563 - DNA, 25 bp, probe
ggtcaccagagagctttcagctgag

SEQ ID NO: 251564 - DNA, 25 bp, probe
ggtcaccagagagctttcagctgag

SEQ ID NO: 251565 - DNA, 25 bp, probe
ggtcatccgggccatgatcaagaag

SEQ ID NO: 251566 - DNA, 25 bp, probe
ggtcattgccaaccttacatgaacg

SEQ ID NO: 251567 - DNA, 25 bp, probe
ggtcggaacgccatactggatggca

SEQ ID NO: 251568 - DNA, 25 bp, probe
ggtcatctgagtatcattaagagta

SEQ ID NO: 251569 - DNA, 25 bp, probe
ggtcatcatcgattctactttagaa

SEQ ID NO: 251570 - DNA, 25 bp, probe
ggtctgctcattttcaattccaaac

SEQ ID NO: 251571 - DNA, 25 bp, probe
ggtctcttttatcctatcacaaaaa

SEQ ID NO: 251572 - DNA, 25 bp, probe
ggtatttcaggtgttaaatgaaaag

SEQ ID NO: 251573 - DNA, 25 bp, probe
ggaatttttggtataaagctaaatg

SEQ ID NO: 251574 - DNA, 25 bp, probe
ggttgtttatttatctaaggacact

SEQ ID NO: 251575 - DNA, 25 bp, probe
ggttgtttatttatctaaggacact

SEQ ID NO: 251576 - DNA, 25 bp, probe
ggtctgtgctttcagaaatacagga

SEQ ID NO: 251577 - DNA, 25 bp, probe
ggtctgtgctttcagaaatacagga

SEQ ID NO: 251578 - DNA, 25 bp, probe
ggatttgtttgagtacgaagggtgc

SEQ ID NO: 251579 - DNA, 25 bp, probe
ggatttgtttgagtacgaagggtgc

SEQ ID NO: 251580 - DNA, 25 bp, probe
ggtcttagatgtccaaccaaggggc

SEQ ID NO: 251581 - DNA, 25 bp, probe
ggtcttagatgtccaaccaaggggc

SEQ ID NO: 251582 - DNA, 25 bp, probe
ggtcatgttggcagaactcaagggc

SEQ ID NO: 251583 - DNA, 25 bp, probe
ggtcagctgggcaagtggaaggggc

SEQ ID NO: 251584 - DNA, 25 bp, probe
ggtcaggcagccagtgagatgaggg

SEQ ID NO: 251585 - DNA, 25 bp, probe
ggtcatggcagactctatgcaagag

SEQ ID NO: 251586 - DNA, 25 bp, probe
ggtcttgcacatttgcacatagaga

SEQ ID NO: 251587 - DNA, 25 bp, probe
ggtctctggcattgaagtagatgag

SEQ ID NO: 251588 - DNA, 25 bp, probe
ggtctctggcattgaagtagatgag

SEQ ID NO: 251589 - DNA, 25 bp, probe
ggtcttggctgttcattgattgaga

SEQ ID NO: 251590 - DNA, 25 bp, probe
ggtcatgttctttcagcttatggca

SEQ ID NO: 251591 - DNA, 25 bp, probe
ggtctgcagtctggaagcttgtctg

SEQ ID NO: 251592 - DNA, 25 bp, probe
ggtctcaaccaggactgctgtgtgg

SEQ ID NO: 251593 - DNA, 25 bp, probe
ggtctataacagtcacccttggagc

SEQ ID NO: 251594 - DNA, 25 bp, probe
ggtctggacacagtgcccgtgtcgg

SEQ ID NO: 251595 - DNA, 25 bp, probe
ggtcgatcacaactggggaggaggt

SEQ ID NO: 251596 - DNA, 25 bp, probe
ggtaatcaagagaggaggtgaagat

SEQ ID NO: 251597 - DNA, 25 bp, probe
ggtagctgaggggcggaagatgaag

SEQ ID NO: 251598 - DNA, 25 bp, probe
ggtaccagtggaggaatagaacagg

SEQ ID NO: 251599 - DNA, 25 bp, probe
ggtaccagtggaggaatagaacagg

SEQ ID NO: 251600 - DNA, 25 bp, probe
ggtatcagtgggcgattggctccag

SEQ ID NO: 251601 - DNA, 25 bp, probe
ggttgctaaccgaattagccgagtt

SEQ ID NO: 251602 - DNA, 25 bp, probe
ggttgctaaccgaattagccgagtt

SEQ ID NO: 251603 - DNA, 25 bp, probe
ggtatgtaaaagacaatactcttgt

SEQ ID NO: 251604 - DNA, 25 bp, probe
ggttgtaggaataagtttctaatgt

SEQ ID NO: 251605 - DNA, 25 bp, probe
ggtcgacagagaaaaccttcaccat

SEQ ID NO: 251606 - DNA, 25 bp, probe
ggtcaaggatgctcacatcctgccc

SEQ ID NO: 251607 - DNA, 25 bp, probe
ggtacatggatgaggcaggtgggtg

SEQ ID NO: 251608 - DNA, 25 bp, probe
ggtcacattattttggttgcttgat

SEQ ID NO: 251609 - DNA, 25 bp, probe
ggtctcttggtgttagtgatgctgg

SEQ ID NO: 251610 - DNA, 25 bp, probe
ggtctcttggtgttagtgatgctgg

SEQ ID NO: 251611 - DNA, 25 bp, probe
ggtcatcttgtggcttagttgtaga

SEQ ID NO: 251612 - DNA, 25 bp, probe
ggattcgttcacgttcttgtaacac

SEQ ID NO: 251613 - DNA, 25 bp, probe
ggattcgttcacgttcttgtaacac

SEQ ID NO: 251614 - DNA, 25 bp, probe
ggtatcagaaactttgttgtgcaaa

SEQ ID NO: 251615 - DNA, 25 bp, probe
ggtcgcccatgattttactgtcaaa

SEQ ID NO: 251616 - DNA, 25 bp, probe
ggtcccatcagtttgaacagttgtc

SEQ ID NO: 251617 - DNA, 25 bp, probe
ggtcccatcagtttgaacagttgtc

SEQ ID NO: 251618 - DNA, 25 bp, probe
ggtcacctggattggctacttttgc

SEQ ID NO: 251619 - DNA, 25 bp, probe
ggtcaccagggctgcttttaactct

SEQ ID NO: 251620 - DNA, 25 bp, probe
ggtcaaggagagggttttggccgct

SEQ ID NO: 251621 - DNA, 25 bp, probe
ggtcaaggagagggttttggccgct

SEQ ID NO: 251622 - DNA, 25 bp, probe
ggtcaaggagagggttttggccgct

SEQ ID NO: 251623 - DNA, 25 bp, probe
ggtagaggaaggctatcgtctgcca

SEQ ID NO: 251624 - DNA, 25 bp, probe
ggtaggcaatttcttgcaaccacca

SEQ ID NO: 251625 - DNA, 25 bp, probe
ggtaaccatttgagctgcaattcag

SEQ ID NO: 251626 - DNA, 25 bp, probe
ggtaccttttgcagtgacaggcagg

SEQ ID NO: 251627 - DNA, 25 bp, probe
ggtcagcccttgtgagtaagtgggt

SEQ ID NO: 251628 - DNA, 25 bp, probe
ggtagcccttgatgctttacataga

SEQ ID NO: 251629 - DNA, 25 bp, probe
ggtcaccctgaagatttacatgggc

SEQ ID NO: 251630 - DNA, 25 bp, probe
ggtcacaccgaaggtatcgaacggc

SEQ ID NO: 251631 - DNA, 25 bp, probe
ggtcacaccgaaggtatcgaacggc

SEQ ID NO: 251632 - DNA, 25 bp, probe
ggatccacctaaggtcaggagtttg

SEQ ID NO: 251633 - DNA, 25 bp, probe
ggagcccagccatgggggtttaggg

SEQ ID NO: 251634 - DNA, 25 bp, probe
ggagtactgcgatgaggggacttta

SEQ ID NO: 251635 - DNA, 25 bp, probe
ggagtactgcgatgaggggacttta

SEQ ID NO: 251636 - DNA, 25 bp, probe
ggttttgccagagaatggtctttac

SEQ ID NO: 251637 - DNA, 25 bp, probe
ggatggttcccagagggtttccatg

SEQ ID NO: 251638 - DNA, 25 bp, probe
ggatcgttttatgcggttcttacag

SEQ ID NO: 251639 - DNA, 25 bp, probe
ggttgttttatgtggcaattgggag

SEQ ID NO: 251640 - DNA, 25 bp, probe
ggtttgagtaaatacaaagactgaa

SEQ ID NO: 251641 - DNA, 25 bp, probe
ggtttagaaaattcccctgtgcatg

SEQ ID NO: 251642 - DNA, 25 bp, probe
ggtttctgagaacattccctgatcc

SEQ ID NO: 251643 - DNA, 25 bp, probe
ggtctgtgtcagtattaccaccaga

SEQ ID NO: 251644 - DNA, 25 bp, probe
ggtcatgtgtgttaggaacatcaaa

SEQ ID NO: 251645 - DNA, 25 bp, probe
ggtctgtgctgtttgtcgtgaaaag

SEQ ID NO: 251646 - DNA, 25 bp, probe
ggtctgtgctgtttgtcgtgaaaag

SEQ ID NO: 251647 - DNA, 25 bp, probe
ggtctggattattgtcataagaaga

SEQ ID NO: 251648 - DNA, 25 bp, probe
ggtctggacaactttgacacacagt

SEQ ID NO: 251649 - DNA, 25 bp, probe
ggtctgaggaactataagccatatg

SEQ ID NO: 251650 - DNA, 25 bp, probe
ggtctctgcgaagtcaaaggcctga

SEQ ID NO: 251651 - DNA, 25 bp, probe
ggtcttggcaaacagggactgagct

SEQ ID NO: 251652 - DNA, 25 bp, probe
ggacttagccggcgcctgcacgtgt

SEQ ID NO: 251653 - DNA, 25 bp, probe
ggacggaaggtcagttgccatggtt

SEQ ID NO: 251654 - DNA, 25 bp, probe
ggtctggaatggactgggtgccacg

SEQ ID NO: 251655 - DNA, 25 bp, probe
ggttcctattattctggatcctcgt

SEQ ID NO: 251656 - DNA, 25 bp, probe
ggttcctattattctggatcctcgt

SEQ ID NO: 251657 - DNA, 25 bp, probe
ggtcatgcagctctttcaggaccat

SEQ ID NO: 251658 - DNA, 25 bp, probe
ggtcatcagtgacttcaagcctgga

SEQ ID NO: 251659 - DNA, 25 bp, probe
ggtcatcaggacgagcaagtctctg

SEQ ID NO: 251660 - DNA, 25 bp, probe
ggtcttctgcacgagcaagtttctc

SEQ ID NO: 251661 - DNA, 25 bp, probe
ggtcttctgcacgagcaagtttctc

SEQ ID NO: 251662 - DNA, 25 bp, probe
ggtcatggagcacaggttcttcctc

SEQ ID NO: 251663 - DNA, 25 bp, probe
ggtacaactgaaggctgtgttccca

SEQ ID NO: 251664 - DNA, 25 bp, probe
ggttaccatgacgaggcaatttcca

SEQ ID NO: 251665 - DNA, 25 bp, probe
ggtaaccaggctgcgatcatggaac

SEQ ID NO: 251666 - DNA, 25 bp, probe
ggtaacctgcgtgctttataagcct

SEQ ID NO: 251667 - DNA, 25 bp, probe
ggtaaacagttggttgttctggcca

SEQ ID NO: 251668 - DNA, 25 bp, probe
ggtactagatttattttaggctgct

SEQ ID NO: 251669 - DNA, 25 bp, probe
ggtcattttttttttctgtgctggt

SEQ ID NO: 251670 - DNA, 25 bp, probe
ggtctttttactttggagctctgtc

SEQ ID NO: 251671 - DNA, 25 bp, probe
ggtctttattgagcacctactatat

SEQ ID NO: 251672 - DNA, 25 bp, probe
ggtctatgtggacccacgcaaagat

SEQ ID NO: 251673 - DNA, 25 bp, probe
ggtcacagggatcaacgaatagtaa

SEQ ID NO: 251674 - DNA, 25 bp, probe
ggtagctcggcaccaactaagaaaa

SEQ ID NO: 251675 - DNA, 25 bp, probe
ggtagctcggcaccaactaagaaaa

SEQ ID NO: 251676 - DNA, 25 bp, probe
ggtactcctgaaaggctgtagaaaa

SEQ ID NO: 251677 - DNA, 25 bp, probe
ggtactcctgaaaggctgtagaaaa

SEQ ID NO: 251678 - DNA, 25 bp, probe
ggtcactccgattctgagtgccaca

SEQ ID NO: 251679 - DNA, 25 bp, probe
ggtacctggattcagatgactcatc

SEQ ID NO: 251680 - DNA, 25 bp, probe
ggtcagccttatagcagcaatagta

SEQ ID NO: 251681 - DNA, 25 bp, probe
ggtcagtctctactgggacatgtta

SEQ ID NO: 251682 - DNA, 25 bp, probe
ggtcagtgctgggcggagactgtct

SEQ ID NO: 251683 - DNA, 25 bp, probe
ggtcatgtgcgagggtggacgctac

SEQ ID NO: 251684 - DNA, 25 bp, probe
ggtcatacacagggctggacctcac

SEQ ID NO: 251685 - DNA, 25 bp, probe
ggtcatacacagggctggacctcac

SEQ ID NO: 251686 - DNA, 25 bp, probe
cggcagacgatgccacgacggtgga

SEQ ID NO: 251687 - DNA, 25 bp, probe
ggtcaacacaggttatgtagattcc

SEQ ID NO: 251688 - DNA, 25 bp, probe
ggtctgtccaagattatggatgatg

SEQ ID NO: 251689 - DNA, 25 bp, probe
ggtctgtccaagattatggatgatg

SEQ ID NO: 251690 - DNA, 25 bp, probe
ggtctctgctgaaggttgtaagtgg

SEQ ID NO: 251691 - DNA, 25 bp, probe
ggtcatctggtgtgctgatctagag

SEQ ID NO: 251692 - DNA, 25 bp, probe
ggtctcagcggatggacaatagcca

SEQ ID NO: 251693 - DNA, 25 bp, probe
ggtcagcagaggtaccacgaagcta

SEQ ID NO: 251694 - DNA, 25 bp, probe
ggtcagcagaggtaccacgaagcta

SEQ ID NO: 251695 - DNA, 25 bp, probe
ggtcagaagtaatcctgagaaatgt

SEQ ID NO: 251696 - DNA, 25 bp, probe
ggtaccagaacatctcgtgaagagc

SEQ ID NO: 251697 - DNA, 25 bp, probe
ggtaacctgacactctcaggagaca

SEQ ID NO: 251698 - DNA, 25 bp, probe
ggtaacctgacactctcaggagaca

SEQ ID NO: 251699 - DNA, 25 bp, probe
ggtaacccaattgcgaatgccacca

SEQ ID NO: 251700 - DNA, 25 bp, probe
ggtaactccaatgttgaatcccttt

SEQ ID NO: 251701 - DNA, 25 bp, probe
ggtactctgggagattgtgaccctg

SEQ ID NO: 251702 - DNA, 25 bp, probe
ggtactcttgggcatattttccatg

SEQ ID NO: 251703 - DNA, 25 bp, probe
ggtactatatgtgggtagtattcca

SEQ ID NO: 251704 - DNA, 25 bp, probe
ggtcactgaagtggttgtgccattc

SEQ ID NO: 251705 - DNA, 25 bp, probe
ggtcactgaagtggttgtgccattc

SEQ ID NO: 251706 - DNA, 25 bp, probe
ggtcactgcaaggggatgctgcacc

SEQ ID NO: 251707 - DNA, 25 bp, probe
ggtcactatagctgactctgcacta

SEQ ID NO: 251708 - DNA, 25 bp, probe
ggtagcggaaaattctcactcagtg

SEQ ID NO: 251709 - DNA, 25 bp, probe
ggtcagggactgaatcttgcccgtt

SEQ ID NO: 251710 - DNA, 25 bp, probe
ggtcaggagcactggctgtggacgt

SEQ ID NO: 251711 - DNA, 25 bp, probe
ggtcaggagcactggctgtggacgt

SEQ ID NO: 251712 - DNA, 25 bp, probe
ggtcagaagacatgcctggagggat

SEQ ID NO: 251713 - DNA, 25 bp, probe
ggtcagaacacgatctggggggggg

SEQ ID NO: 251714 - DNA, 25 bp, probe
ggtcagaaactttcctggcaggcac

SEQ ID NO: 251715 - DNA, 25 bp, probe
ggtcagaaactttcctggcaggcac

SEQ ID NO: 251716 - DNA, 25 bp, probe
ggtcaacattctgatcctgtcagtc

SEQ ID NO: 251717 - DNA, 25 bp, probe
ggtcatcctgttttctagtgcagtg

SEQ ID NO: 251718 - DNA, 25 bp, probe
ggtcttctgttttgaagctcatggg

SEQ ID NO: 251719 - DNA, 25 bp, probe
ggtcactcagggtcaatactcaggg

SEQ ID NO: 251720 - DNA, 25 bp, probe
ggtcatacagggtaagcaccaggga

SEQ ID NO: 251721 - DNA, 25 bp, probe
ggtctacatgctcaaacaccagggt

SEQ ID NO: 251722 - DNA, 25 bp, probe
ggtctatgattgacaagtaccaggc

SEQ ID NO: 251723 - DNA, 25 bp, probe
ggtcttgcaatgactcgtattcaga

SEQ ID NO: 251724 - DNA, 25 bp, probe
ggtcagtctagagtctgtgcaccag

SEQ ID NO: 251725 - DNA, 25 bp, probe
ggtcatgcagcttagctaatgccaa

SEQ ID NO: 251726 - DNA, 25 bp, probe
ggtcatgcagctggatcaggtggga

SEQ ID NO: 251727 - DNA, 25 bp, probe
ggtcatcagatactcagaggctgta

SEQ ID NO: 251728 - DNA, 25 bp, probe
ggtcatcagatactcagaggctgta

SEQ ID NO: 251729 - DNA, 25 bp, probe
ggtcagcactgactactggctgtac

SEQ ID NO: 251730 - DNA, 25 bp, probe
ggtcacagcgacccaggatgctgac

SEQ ID NO: 251731 - DNA, 25 bp, probe
ggtcagagcaaacccagtgtgatgc

SEQ ID NO: 251732 - DNA, 25 bp, probe
ggtagcagcaatccctaatatatat

SEQ ID NO: 251733 - DNA, 25 bp, probe
ggtaagaaaagctacagtcattttt

SEQ ID NO: 251734 - DNA, 25 bp, probe
ggtataataatcgtgagcgtttgtt

SEQ ID NO: 251735 - DNA, 25 bp, probe
ggtaaatatacccacaggttctatg

SEQ ID NO: 251736 - DNA, 25 bp, probe
ggtaaatatacccacaggttctatg

SEQ ID NO: 251737 - DNA, 25 bp, probe
ggtactttaccatatgttgctccag

SEQ ID NO: 251738 - DNA, 25 bp, probe
ggtacttgctacagaatgtggccaa

SEQ ID NO: 251739 - DNA, 25 bp, probe
ggtagggctacaggggtgggtgatt

SEQ ID NO: 251740 - DNA, 25 bp, probe
ggtcatcgagaacgcgggggagttc

SEQ ID NO: 251741 - DNA, 25 bp, probe
ggtctcagggcacggaggcagaact

SEQ ID NO: 251742 - DNA, 25 bp, probe
ggtctcagggcacggaggcagaact

SEQ ID NO: 251743 - DNA, 25 bp, probe
ggtctccgaggcccaggagactcca

SEQ ID NO: 251744 - DNA, 25 bp, probe
ggtcatccgtctgctgcagaaactc

SEQ ID NO: 251745 - DNA, 25 bp, probe
ggtcactcttatggctgaagaacac

SEQ ID NO: 251746 - DNA, 25 bp, probe
ggtcactgtttcttcaagtacacac

SEQ ID NO: 251747 - DNA, 25 bp, probe
ggtcttgccatttgtcagactgacc

SEQ ID NO: 251748 - DNA, 25 bp, probe
ggtctatgtcattggtttctgatgc

SEQ ID NO: 251749 - DNA, 25 bp, probe
ggtaggatattgactaactgagctc

SEQ ID NO: 251750 - DNA, 25 bp, probe
ggtcagggatacgtcaactggctca

SEQ ID NO: 251751 - DNA, 25 bp, probe
ggtcatgtggatttccagactgtgc

SEQ ID NO: 251752 - DNA, 25 bp, probe
ggtcatgtggatttccagactgtgc

SEQ ID NO: 251753 - DNA, 25 bp, probe
ggtcatgtgagcatactggccagtg

SEQ ID NO: 251754 - DNA, 25 bp, probe
ggtcatttactacgtgcgagatggc

SEQ ID NO: 251755 - DNA, 25 bp, probe
ggtcttttcttcttgcagagcaagg

SEQ ID NO: 251756 - DNA, 25 bp, probe
ggtctatttcttccatgattagagg

SEQ ID NO: 251757 - DNA, 25 bp, probe
ggtaatcctgctcagtacgagagga

SEQ ID NO: 251758 - DNA, 25 bp, probe
ggtttccggctactgacagtggtag

SEQ ID NO: 251759 - DNA, 25 bp, probe
ggtttccggctactgacagtggtag

SEQ ID NO: 251760 - DNA, 25 bp, probe
ggtcttgccgccaacgatgcaagtg

SEQ ID NO: 251761 - DNA, 25 bp, probe
ggtcttgccgccaacgatgcaagtg

SEQ ID NO: 251762 - DNA, 25 bp, probe
ggtcttgccgccaacgatgcaagtg

SEQ ID NO: 251763 - DNA, 25 bp, probe
ggtaatgctgaggctattgctgaat

SEQ ID NO: 251764 - DNA, 25 bp, probe
ggtaagtggagttgggaaatacaag

SEQ ID NO: 251765 - DNA, 25 bp, probe
ggtaaggacttgccagagaactaca

SEQ ID NO: 251766 - DNA, 25 bp, probe
ggtctatggccccatgaagaactac

SEQ ID NO: 251767 - DNA, 25 bp, probe
ggttttggcctgcaagtactacacc

SEQ ID NO: 251768 - DNA, 25 bp, probe
ggtatttcagctcccaagtttagtt

SEQ ID NO: 251769 - DNA, 25 bp, probe
ggtattttctgcctaagtgctacgt

SEQ ID NO: 251770 - DNA, 25 bp, probe
ggtaattctccctaaggaatctgaa

SEQ ID NO: 251771 - DNA, 25 bp, probe
ggtataaccccaacgagaagctgaa

SEQ ID NO: 251772 - DNA, 25 bp, probe
ggtcacagaacccatagggaatgga

SEQ ID NO: 251773 - DNA, 25 bp, probe
ggtcacagtgaccaaatggcaaatg

SEQ ID NO: 251774 - DNA, 25 bp, probe
ggtcacagtgaccaaatggcaaatg

SEQ ID NO: 251775 - DNA, 25 bp, probe
ggtcaaagactctaactcatgccat

SEQ ID NO: 251776 - DNA, 25 bp, probe
ggtcaaaaccaaactcttattctca

SEQ ID NO: 251777 - DNA, 25 bp, probe
ggtcaagaacacacacactgttccc

SEQ ID NO: 251778 - DNA, 25 bp, probe
ggtcaagaacacacacactgttccc

SEQ ID NO: 251779 - DNA, 25 bp, probe
ggtaaaacacattgccctgttgctc

SEQ ID NO: 251780 - DNA, 25 bp, probe
ggtaaaacacattgccctgttgctc

SEQ ID NO: 251781 - DNA, 25 bp, probe
ggtatagtggtatgtgcctgtagtc

SEQ ID NO: 251782 - DNA, 25 bp, probe
ggttacggcatagcctatgtacatc

SEQ ID NO: 251783 - DNA, 25 bp, probe
ggttacggcatagcctatgtacatc

SEQ ID NO: 251784 - DNA, 25 bp, probe
ggtctacaccattatgcttattatt

SEQ ID NO: 251785 - DNA, 25 bp, probe
ggtctaaatctttgtgtactttatt

SEQ ID NO: 251786 - DNA, 25 bp, probe
ggtcaccagatcctagtgtagttct

SEQ ID NO: 251787 - DNA, 25 bp, probe
ggtaaagattgtagtgcatggtttt

SEQ ID NO: 251788 - DNA, 25 bp, probe
ggtaaagattgtagtgcatggtttt

SEQ ID NO: 251789 - DNA, 25 bp, probe
ggtaaagctataattatggcttata

SEQ ID NO: 251790 - DNA, 25 bp, probe
ggtaaagctgttggaatgagtatgt

SEQ ID NO: 251791 - DNA, 25 bp, probe
ggtcacaactgtaggcaagacattt

SEQ ID NO: 251792 - DNA, 25 bp, probe
ggtagcaattctacccagagccttc

SEQ ID NO: 251793 - DNA, 25 bp, probe
ggtcaaattccagcatgataacttc

SEQ ID NO: 251794 - DNA, 25 bp, probe
ggtcaaattccagcatgataacttc

SEQ ID NO: 251795 - DNA, 25 bp, probe
ggtcaagttccaggttgatatcacc

SEQ ID NO: 251796 - DNA, 25 bp, probe
ggtaatcattctcaggtgttctcac

SEQ ID NO: 251797 - DNA, 25 bp, probe
ggatggattttcaccgattctactt

SEQ ID NO: 251798 - DNA, 25 bp, probe
ggaggatttagtacccaaatcgtct

SEQ ID NO: 251799 - DNA, 25 bp, probe
ggaggaattcgagcctcaaaatttg

SEQ ID NO: 251800 - DNA, 25 bp, probe
ggaggaattgggacctggttatgtt

SEQ ID NO: 251801 - DNA, 25 bp, probe
ggtttatgtagggcactgtgctggg

SEQ ID NO: 251802 - DNA, 25 bp, probe
ggttatgtgtaactagcgttggagt

SEQ ID NO: 251803 - DNA, 25 bp, probe
ggataactgttacacttttagtaga

SEQ ID NO: 251804 - DNA, 25 bp, probe
ggataactgttacacttttagtaga

SEQ ID NO: 251805 - DNA, 25 bp, probe
ggtaagttctactcattttcacttc

SEQ ID NO: 251806 - DNA, 25 bp, probe
ggtagagacagctacttactcccca

SEQ ID NO: 251807 - DNA, 25 bp, probe
ggtaggcagcagtgttgcagcaacc

SEQ ID NO: 251808 - DNA, 25 bp, probe
ggtcaaagagattgtagcacagcac

SEQ ID NO: 251809 - DNA, 25 bp, probe
ggtcagcaacagacttcgactggct

SEQ ID NO: 251810 - DNA, 25 bp, probe
ggtcagaacacaggccgaatccagg

SEQ ID NO: 251811 - DNA, 25 bp, probe
ggtcagaacacaggccgaatccagg

SEQ ID NO: 251812 - DNA, 25 bp, probe
ggtcaaacaaagcagggccgggcct

SEQ ID NO: 251813 - DNA, 25 bp, probe
ggtacaaatcaacaaggccaagagc

SEQ ID NO: 251814 - DNA, 25 bp, probe
ggtagaaataatcaaggtcctggga

SEQ ID NO: 251815 - DNA, 25 bp, probe
ggtagaatgtaagaagaggccaggg

SEQ ID NO: 251816 - DNA, 25 bp, probe
ggtaaatggacaaaagctagctagt

SEQ ID NO: 251817 - DNA, 25 bp, probe
ggtaacttacagacattgtgttttc

SEQ ID NO: 251818 - DNA, 25 bp, probe
ggtcttgcattatgtgtcattgttt

SEQ ID NO: 251819 - DNA, 25 bp, probe
ggtcactccatcgatgttcttcttc

SEQ ID NO: 251820 - DNA, 25 bp, probe
ggtcatctactgggttgatttcatc

SEQ ID NO: 251821 - DNA, 25 bp, probe
ggtattactgagctcggcatttgga

SEQ ID NO: 251822 - DNA, 25 bp, probe
ggtattaatttggccgcatttatca

SEQ ID NO: 251823 - DNA, 25 bp, probe
ggtaataaattgtcctataaactat

SEQ ID NO: 251824 - DNA, 25 bp, probe
ggtactaataatcctcttgcaaaat

SEQ ID NO: 251825 - DNA, 25 bp, probe
ggtagtttgatatcctcacaaagca

SEQ ID NO: 251826 - DNA, 25 bp, probe
ggtagattctaatggctttattgca

SEQ ID NO: 251827 - DNA, 25 bp, probe
ggtactactagatgtctttaggcag

SEQ ID NO: 251828 - DNA, 25 bp, probe
ggtatatttagcctcttttagaagt

SEQ ID NO: 251829 - DNA, 25 bp, probe
ggttcgtttgctcttctgggaagag

SEQ ID NO: 251830 - DNA, 25 bp, probe
ggttttgcccggatcattggagaga

SEQ ID NO: 251831 - DNA, 25 bp, probe
ggttttggggggacgctataggatg

SEQ ID NO: 251832 - DNA, 25 bp, probe
ggtttggggctaagaagttcaccag

SEQ ID NO: 251833 - DNA, 25 bp, probe
ggtcttagaagcatagaaaatccct

SEQ ID NO: 251834 - DNA, 25 bp, probe
ggtttgagggtttgcagaaagccag

SEQ ID NO: 251835 - DNA, 25 bp, probe
ggtttgggtgattgccaagagcggc

SEQ ID NO: 251836 - DNA, 25 bp, probe
ggttctggaggaaccgcaagccgga

SEQ ID NO: 251837 - DNA, 25 bp, probe
ggttggggaaacagcatctccaagc

SEQ ID NO: 251838 - DNA, 25 bp, probe
ggttggggaaacagcatctccaagc

SEQ ID NO: 251839 - DNA, 25 bp, probe
ggtttgggaaccatcaggtcagatc

SEQ ID NO: 251840 - DNA, 25 bp, probe
ggttttgggtctaccagagtcagag

SEQ ID NO: 251841 - DNA, 25 bp, probe
ggtttcgtgttcaccatggaacatt

SEQ ID NO: 251842 - DNA, 25 bp, probe
ggtttggttaatacacagaaatatc

SEQ ID NO: 251843 - DNA, 25 bp, probe
ggtttgggccacacaaagtatattt

SEQ ID NO: 251844 - DNA, 25 bp, probe
ggtttggggcagatctgtagtaaac

SEQ ID NO: 251845 - DNA, 25 bp, probe
ggtcagggggagtctttgcaccaaa

SEQ ID NO: 251846 - DNA, 25 bp, probe
ggtcagggggagtctttgcaccaaa

SEQ ID NO: 251847 - DNA, 25 bp, probe
ggtcagttcgggatgtggcacagac

SEQ ID NO: 251848 - DNA, 25 bp, probe
ggtcaactggccgtggtggcagatg

SEQ ID NO: 251849 - DNA, 25 bp, probe
ggtagattgctggcctgttgtaggt

SEQ ID NO: 251850 - DNA, 25 bp, probe
ggtaacctggcctttgtgaattcat

SEQ ID NO: 251851 - DNA, 25 bp, probe
ggtaacctggcctttgtgaattcat

SEQ ID NO: 251852 - DNA, 25 bp, probe
ggtagacactacttatttgttacat

SEQ ID NO: 251853 - DNA, 25 bp, probe
ggtagatccttatgtctatgttgaa

SEQ ID NO: 251854 - DNA, 25 bp, probe
ggtaatggttatatgtatttgtaca

SEQ ID NO: 251855 - DNA, 25 bp, probe
ggtcatgggtgtaactttttctcat

SEQ ID NO: 251856 - DNA, 25 bp, probe
ggtcatcagggacccattgttctct

SEQ ID NO: 251857 - DNA, 25 bp, probe
ggtcaagagagccctatgctgtatt

SEQ ID NO: 251858 - DNA, 25 bp, probe
ggtcatgaggggcctatgcctttac

SEQ ID NO: 251859 - DNA, 25 bp, probe
ggtagatgtgaggtttccactatca

SEQ ID NO: 251860 - DNA, 25 bp, probe
ggtacagctaagatttgcacatttc

SEQ ID NO: 251861 - DNA, 25 bp, probe
ggtacagctaagatttgcacatttc

SEQ ID NO: 251862 - DNA, 25 bp, probe
ggtacactacaaatgtgctgagtta

SEQ ID NO: 251863 - DNA, 25 bp, probe
ggtcacagtgaaagtggtggctgcc

SEQ ID NO: 251864 - DNA, 25 bp, probe
ggtcactgtagaagatgagcaggcg

SEQ ID NO: 251865 - DNA, 25 bp, probe
ggtcatgttcacagtaggggtggtg

SEQ ID NO: 251866 - DNA, 25 bp, probe
ggtcatgcttacactgatacaggga

SEQ ID NO: 251867 - DNA, 25 bp, probe
ggtagaagcagtgtgatccagggat

SEQ ID NO: 251868 - DNA, 25 bp, probe
ggtatgttcttgatgaccagtatgt

SEQ ID NO: 251869 - DNA, 25 bp, probe
ggtacttactgtggacttcatagct

SEQ ID NO: 251870 - DNA, 25 bp, probe
ggtactaatttgtagctgctctgaa

SEQ ID NO: 251871 - DNA, 25 bp, probe
ggtcactactttagagccactcaag

SEQ ID NO: 251872 - DNA, 25 bp, probe
ggtcactgctgtatggactcatcca

SEQ ID NO: 251873 - DNA, 25 bp, probe
ggtcatgtgatgcaagccagcttac

SEQ ID NO: 251874 - DNA, 25 bp, probe
ggtcatgtgatgcaagccagcttac

SEQ ID NO: 251875 - DNA, 25 bp, probe
ggtcatctgcgtggtcaagctgaac

SEQ ID NO: 251876 - DNA, 25 bp, probe
ggtatgcggatgaggagctccagct

SEQ ID NO: 251877 - DNA, 25 bp, probe
ggtatgcggatgaggagctccagct

SEQ ID NO: 251878 - DNA, 25 bp, probe
ggtacagtgaggaccccacagtacc

SEQ ID NO: 251879 - DNA, 25 bp, probe
ggtaggtggataacacctgcttttc

SEQ ID NO: 251880 - DNA, 25 bp, probe
ggtaggtcattaacaccacttcttt

SEQ ID NO: 251881 - DNA, 25 bp, probe
ggtcatgtatcctatgaaccttctt

SEQ ID NO: 251882 - DNA, 25 bp, probe
ggtagcatagctctgtacatctttt

SEQ ID NO: 251883 - DNA, 25 bp, probe
ggtatatggctcctgaaatgcttga

SEQ ID NO: 251884 - DNA, 25 bp, probe
ggtatatggctcctgaaatgcttga

SEQ ID NO: 251885 - DNA, 25 bp, probe
ggtaagatgccgcatcaccaggcac

SEQ ID NO: 251886 - DNA, 25 bp, probe
ggtaatgatccagaccgaggcacct

SEQ ID NO: 251887 - DNA, 25 bp, probe
ggttggtcaattaccgtggcacact

SEQ ID NO: 251888 - DNA, 25 bp, probe
ggtatttaattatttgggagactgt

SEQ ID NO: 251889 - DNA, 25 bp, probe
ggtttctaccttctgtgacaagtgt

SEQ ID NO: 251890 - DNA, 25 bp, probe
ggtttctaccttctgtgacaagtgt

SEQ ID NO: 251891 - DNA, 25 bp, probe
ggcttctgcttagttttttctagtt

SEQ ID NO: 251892 - DNA, 25 bp, probe
ggtttgttcactgtatgtccttggt

SEQ ID NO: 251893 - DNA, 25 bp, probe
ggtttttcagctcattacactaaga

SEQ ID NO: 251894 - DNA, 25 bp, probe
ggtttttggaattatgtctgctgaa

SEQ ID NO: 251895 - DNA, 25 bp, probe
ggtttttggaattatgtctgctgaa

SEQ ID NO: 251896 - DNA, 25 bp, probe
ggtttaagcggatatcggggacatc

SEQ ID NO: 251897 - DNA, 25 bp, probe
ggtttaagcggatatcggggacatc

SEQ ID NO: 251898 - DNA, 25 bp, probe
ggttctaaatggtttcagtggcaaa

SEQ ID NO: 251899 - DNA, 25 bp, probe
ggttcaagccatagagttggggcct

SEQ ID NO: 251900 - DNA, 25 bp, probe
ggtacatgttcaaagatggggagcc

SEQ ID NO: 251901 - DNA, 25 bp, probe
ggttcagttcacagagattgagggc

SEQ ID NO: 251902 - DNA, 25 bp, probe
ggttcgtccaatgtttgggtgccct

SEQ ID NO: 251903 - DNA, 25 bp, probe
ggttctggaccaagttcgacgtggc

SEQ ID NO: 251904 - DNA, 25 bp, probe
ggttctggaccaagttcgacgtggc

SEQ ID NO: 251905 - DNA, 25 bp, probe
ggtttgagacctattctgaccaaac

SEQ ID NO: 251906 - DNA, 25 bp, probe
ggtagtggaccaaaatcttctagaa

SEQ ID NO: 251907 - DNA, 25 bp, probe
ggtcagtaagcctcattatttggaa

SEQ ID NO: 251908 - DNA, 25 bp, probe
ggtcagtatatctacctaatctgtt

SEQ ID NO: 251909 - DNA, 25 bp, probe
ggtagtatacccctatgcagtgtat

SEQ ID NO: 251910 - DNA, 25 bp, probe
ggtaattacagcccttgagcgtggt

SEQ ID NO: 251911 - DNA, 25 bp, probe
ggtcacttccattccagatgggtga

SEQ ID NO: 251912 - DNA, 25 bp, probe
ggttatttcttgccagaggggaatg

SEQ ID NO: 251913 - DNA, 25 bp, probe
ggattacttactcaagttggtcata

SEQ ID NO: 251914 - DNA, 25 bp, probe
ggttacgacctggtagtgagaacat

SEQ ID NO: 251915 - DNA, 25 bp, probe
ggttaactgcctcatatgtgggaca

SEQ ID NO: 251916 - DNA, 25 bp, probe
ggtttcaacccatggtgggacacgg

SEQ ID NO: 251917 - DNA, 25 bp, probe
ggattttcggaagctggggacacgg

SEQ ID NO: 251918 - DNA, 25 bp, probe
ggttttcaggagtccgaggtagcct

SEQ ID NO: 251919 - DNA, 25 bp, probe
ggttttaggataaggggtcatcaat

SEQ ID NO: 251920 - DNA, 25 bp, probe
ggttgtattggagcagggggaattg

SEQ ID NO: 251921 - DNA, 25 bp, probe
ggttttctgtgagatgcggccagtc

SEQ ID NO: 251922 - DNA, 25 bp, probe
ggttacttggactatgcccagtctc

SEQ ID NO: 251923 - DNA, 25 bp, probe
ggtttcctggaacttccagattcag

SEQ ID NO: 251924 - DNA, 25 bp, probe
ggttttactgaagtatccagttctt

SEQ ID NO: 251925 - DNA, 25 bp, probe
ggtacttcaaaggctcatcaagtcc

SEQ ID NO: 251926 - DNA, 25 bp, probe
ggtacttcaaaggctcatcaagtcc

SEQ ID NO: 251927 - DNA, 25 bp, probe
ggtatttaagcaatctcatccagag

SEQ ID NO: 251928 - DNA, 25 bp, probe
ggtttctaggcagttcaaagcagga

SEQ ID NO: 251929 - DNA, 25 bp, probe
ggtttgcttggcatatctaaaggtg

SEQ ID NO: 251930 - DNA, 25 bp, probe
ggtcaatcttgactagattaagagt

SEQ ID NO: 251931 - DNA, 25 bp, probe
ggtaagtggataagattacacagat

SEQ ID NO: 251932 - DNA, 25 bp, probe
ggtcaaatggatagccctacacaga

SEQ ID NO: 251933 - DNA, 25 bp, probe
ggtcactatgtgactgcctttacgg

SEQ ID NO: 251934 - DNA, 25 bp, probe
ggtcaatatatcatcctttggcatc

SEQ ID NO: 251935 - DNA, 25 bp, probe
ggtcaaccatgacccttgcaggtgc

SEQ ID NO: 251936 - DNA, 25 bp, probe
ggtcaatgcctgagagggcggtcct

SEQ ID NO: 251937 - DNA, 25 bp, probe
ggtacatcctgaatgggggcagtga

SEQ ID NO: 251938 - DNA, 25 bp, probe
ggtcaagggatgaagacctgcagtg

SEQ ID NO: 251939 - DNA, 25 bp, probe
ggtcaaggtgagcggcacagatgat

SEQ ID NO: 251940 - DNA, 25 bp, probe
ggtcaaggccaactgagaagcatgg

SEQ ID NO: 251941 - DNA, 25 bp, probe
ggtcacctgccatgatggaaatgac

SEQ ID NO: 251942 - DNA, 25 bp, probe
ggtcacccaatttcgaatgtcactc

SEQ ID NO: 251943 - DNA, 25 bp, probe
ggtacaggccaattccaagtcatat

SEQ ID NO: 251944 - DNA, 25 bp, probe
ggtacaggccaattccaagtcatat

SEQ ID NO: 251945 - DNA, 25 bp, probe
ggtcaagggttattgcaatgctcat

SEQ ID NO: 251946 - DNA, 25 bp, probe
ggtcaaaggtcatcatcattacatt

SEQ ID NO: 251947 - DNA, 25 bp, probe
ggtcacagaggcagaaatcacaatt

SEQ ID NO: 251948 - DNA, 25 bp, probe
ggtcagagactaagaattgcagatt

SEQ ID NO: 251949 - DNA, 25 bp, probe
ggtagcagtctagggattaacttcc

SEQ ID NO: 251950 - DNA, 25 bp, probe
ggtatcaggcccctgagttactatt

SEQ ID NO: 251951 - DNA, 25 bp, probe
ggtatagagctcccgaattagtatt

SEQ ID NO: 251952 - DNA, 25 bp, probe
ggtaacatctcctgaaaagcttgta

SEQ ID NO: 251953 - DNA, 25 bp, probe
ggtaacttctcactagtcaggctag

SEQ ID NO: 251954 - DNA, 25 bp, probe
ggtaacatatctatatgccatatga

SEQ ID NO: 251955 - DNA, 25 bp, probe
ggtaacatatctatatgccatatga

SEQ ID NO: 251956 - DNA, 25 bp, probe
ggtaacacagccatcattcttgcat

SEQ ID NO: 251957 - DNA, 25 bp, probe
ggtaacatccctgacatctatgaga

SEQ ID NO: 251958 - DNA, 25 bp, probe
ggtataccgacttacatattgtggg

SEQ ID NO: 251959 - DNA, 25 bp, probe
ggtaacttgccacatgatattgatg

SEQ ID NO: 251960 - DNA, 25 bp, probe
ggtacagatctccagaagtattgct

SEQ ID NO: 251961 - DNA, 25 bp, probe
ggtacagatctccagaagtattgct

SEQ ID NO: 251962 - DNA, 25 bp, probe
ggttcagtgcttcgaactattcatg

SEQ ID NO: 251963 - DNA, 25 bp, probe
ggtacaggctggagattttcacata

SEQ ID NO: 251964 - DNA, 25 bp, probe
ggttgggcaggcaatttttcactct

SEQ ID NO: 251965 - DNA, 25 bp, probe
ggtaaagcagccaattttgtacaca

SEQ ID NO: 251966 - DNA, 25 bp, probe
ggtagccatactgatttggaaagca

SEQ ID NO: 251967 - DNA, 25 bp, probe
ggtagccatactgatttggaaagca

SEQ ID NO: 251968 - DNA, 25 bp, probe
ggtactcttctgtttgtgggcagag

SEQ ID NO: 251969 - DNA, 25 bp, probe
ggtagaccctgttagggacagagcc

SEQ ID NO: 251970 - DNA, 25 bp, probe
ggtagactacgaccaggtgaagatc

SEQ ID NO: 251971 - DNA, 25 bp, probe
ggtaatccagctcctggcgataatg

SEQ ID NO: 251972 - DNA, 25 bp, probe
ggtatattcagtctctgtgtaatca

SEQ ID NO: 251973 - DNA, 25 bp, probe
ggtaaattgcatttctcttcaaaaa

SEQ ID NO: 251974 - DNA, 25 bp, probe
ggtcaaatgtcttgtgtcataaata

SEQ ID NO: 251975 - DNA, 25 bp, probe
ggtacatatgatgatttccatacta

SEQ ID NO: 251976 - DNA, 25 bp, probe
ggtatcagaatggtgttccttctcc

SEQ ID NO: 251977 - DNA, 25 bp, probe
ggttcaaatgttgttctcttcttta

SEQ ID NO: 251978 - DNA, 25 bp, probe
ggtaaatattactgttcttctacat

SEQ ID NO: 251979 - DNA, 25 bp, probe
ggtaaatatagatccttcttcagaa

SEQ ID NO: 251980 - DNA, 25 bp, probe
ggtcaaatcagaacacttcttccag

SEQ ID NO: 251981 - DNA, 25 bp, probe
ggtcaagctggagaatctcttcgag

SEQ ID NO: 251982 - DNA, 25 bp, probe
ggtacagccagagctacatcttcct

SEQ ID NO: 251983 - DNA, 25 bp, probe
ggtaactcagaggatattttgcttc

SEQ ID NO: 251984 - DNA, 25 bp, probe
ggatacccaatgcaaattacttact

SEQ ID NO: 251985 - DNA, 25 bp, probe
ggtacctgcaagcagaacttccaaa

SEQ ID NO: 251986 - DNA, 25 bp, probe
ggtacttcaagtttattctctgcag

SEQ ID NO: 251987 - DNA, 25 bp, probe
ggtacttaggacttgatcctgtggt

SEQ ID NO: 251988 - DNA, 25 bp, probe
ggtcacttcggcaaggtcagcttgt

SEQ ID NO: 251989 - DNA, 25 bp, probe
ggtagcaccaggcatagccactttt

SEQ ID NO: 251990 - DNA, 25 bp, probe
ggttgcctcaatataaccttttatt

SEQ ID NO: 251991 - DNA, 25 bp, probe
tggttctttcacaggcacgtttatt

SEQ ID NO: 251992 - DNA, 25 bp, probe
ggattttacatctggatttttagtc

SEQ ID NO: 251993 - DNA, 25 bp, probe
ggtttttcacttagctttcattcag

SEQ ID NO: 251994 - DNA, 25 bp, probe
ggtttaattcagagtatcaagtcag

SEQ ID NO: 251995 - DNA, 25 bp, probe
ggtacaaagtagaaatcaatagtca

SEQ ID NO: 251996 - DNA, 25 bp, probe
ggtacaatgttaaaggaatattcac

SEQ ID NO: 251997 - DNA, 25 bp, probe
ggtagcttttacactgaatttctaa

SEQ ID NO: 251998 - DNA, 25 bp, probe
ggtagcttttacactgaatttctaa

SEQ ID NO: 251999 - DNA, 25 bp, probe
ggtacctgttgtcttaatgcattta

SEQ ID NO: 252000 - DNA, 25 bp, probe
ggtcacttccttcatgtaagacttt

SEQ ID NO: 252001 - DNA, 25 bp, probe
ggattctttcctgtaaagtcttatc

SEQ ID NO: 252002 - DNA, 25 bp, probe
ggatttagtacccaaatcgtcttat

SEQ ID NO: 252003 - DNA, 25 bp, probe
ggcttgggtatctcaattcccttat

SEQ ID NO: 252004 - DNA, 25 bp, probe
ggtttggttcacacataccaccata

SEQ ID NO: 252005 - DNA, 25 bp, probe
ggttgggttcctgaatgcaccataa

SEQ ID NO: 252006 - DNA, 25 bp, probe
ggtatgtgactatgtctaaactcat

SEQ ID NO: 252007 - DNA, 25 bp, probe
ggtatgtgcctgtagtcccaggtac

SEQ ID NO: 252008 - DNA, 25 bp, probe
ggtatgtgctcatagtttagcatat

SEQ ID NO: 252009 - DNA, 25 bp, probe
ggtagttcgaagaattggcagaatc

SEQ ID NO: 252010 - DNA, 25 bp, probe
ggtatttcaaagaatcgtgttcata

SEQ ID NO: 252011 - DNA, 25 bp, probe
ggttcttacagtgctggtgtttaca

SEQ ID NO: 252012 - DNA, 25 bp, probe
ggttcttacagtgctggtgtttaca

SEQ ID NO: 252013 - DNA, 25 bp, probe
ggtttgctacaagatggttactgga

SEQ ID NO: 252014 - DNA, 25 bp, probe
ggtttgctacaagatggttactgga

SEQ ID NO: 252015 - DNA, 25 bp, probe
ggtttgcatttagatcatttagctg

SEQ ID NO: 252016 - DNA, 25 bp, probe
ggtttttccatggcatcagtatacc

SEQ ID NO: 252017 - DNA, 25 bp, probe
ggttaattctgtccaacaaacacac

SEQ ID NO: 252018 - DNA, 25 bp, probe
ggttatttctctttcacggaacaat

SEQ ID NO: 252019 - DNA, 25 bp, probe
ggcacttgttattttccaggaacct

SEQ ID NO: 252020 - DNA, 25 bp, probe
ggcacttgttattttccaggaacct

SEQ ID NO: 252021 - DNA, 25 bp, probe
ggatctctttgactatatcacagag

SEQ ID NO: 252022 - DNA, 25 bp, probe
ggtcaattgtcactgtcatcagaat

SEQ ID NO: 252023 - DNA, 25 bp, probe
ggtattgtacatgtgctcagactcc

SEQ ID NO: 252024 - DNA, 25 bp, probe
ggtattgtacatgtgctcagactcc

SEQ ID NO: 252025 - DNA, 25 bp, probe
ggttctgtacatgtggaaaactcac

SEQ ID NO: 252026 - DNA, 25 bp, probe
ggttgcagccacaggggcaacacct

SEQ ID NO: 252027 - DNA, 25 bp, probe
ggttatccaagaggcatccataccc

SEQ ID NO: 252028 - DNA, 25 bp, probe
ggtaatcacagcattgctctcgacc

SEQ ID NO: 252029 - DNA, 25 bp, probe
ggtagatgcacaccttgtgccactg

SEQ ID NO: 252030 - DNA, 25 bp, probe
ggtagatgcacaccttgtgccactg

SEQ ID NO: 252031 - DNA, 25 bp, probe
ggtatatgctcatctgagtgacgga

SEQ ID NO: 252032 - DNA, 25 bp, probe
ggtactacaacgggcacacgaaggt

SEQ ID NO: 252033 - DNA, 25 bp, probe
ggtatataccaagttaaagacaggg

SEQ ID NO: 252034 - DNA, 25 bp, probe
ggtattttcgagataaagcacaggc

SEQ ID NO: 252035 - DNA, 25 bp, probe
ggtttcattcctaataaaggcaggc

SEQ ID NO: 252036 - DNA, 25 bp, probe
ggtttcagtggcaaatacataacat

SEQ ID NO: 252037 - DNA, 25 bp, probe
ggttgtcttgtggaaaccacagcca

SEQ ID NO: 252038 - DNA, 25 bp, probe
ggtatgtcattctggataaatcccc

SEQ ID NO: 252039 - DNA, 25 bp, probe
ggtagctgattctggaagcaacgtt

SEQ ID NO: 252040 - DNA, 25 bp, probe
ggtactatgattaaaagccactgtt

SEQ ID NO: 252041 - DNA, 25 bp, probe
ggttttattctcagagccattaaac

SEQ ID NO: 252042 - DNA, 25 bp, probe
ggttttttgcacatgaccctgtgaa

SEQ ID NO: 252043 - DNA, 25 bp, probe
ggttattgcaagttccaacctggaa

SEQ ID NO: 252044 - DNA, 25 bp, probe
ggttacaggagtaccagacgtggct

SEQ ID NO: 252045 - DNA, 25 bp, probe
ggttacaggagtaccagacgtggct

SEQ ID NO: 252046 - DNA, 25 bp, probe
ggattacatcggtattaacttggca

SEQ ID NO: 252047 - DNA, 25 bp, probe
ggttaatcttgccaaaacttactca

SEQ ID NO: 252048 - DNA, 25 bp, probe
ggttaatcttgccaaaacttactca

SEQ ID NO: 252049 - DNA, 25 bp, probe
ggtatccattaggaaacagtataat

SEQ ID NO: 252050 - DNA, 25 bp, probe
ggtactcgtcagcaaaaattgacat

SEQ ID NO: 252051 - DNA, 25 bp, probe
ggtactctgctcatagaaatcttaa

SEQ ID NO: 252052 - DNA, 25 bp, probe
ggtactctgctcatagaaatcttaa

SEQ ID NO: 252053 - DNA, 25 bp, probe
ggtacactgtcttggtaagcctgga

SEQ ID NO: 252054 - DNA, 25 bp, probe
ggtacagatgactgggatacctgga

SEQ ID NO: 252055 - DNA, 25 bp, probe
ggtacagatgactgggatacctgga

SEQ ID NO: 252056 - DNA, 25 bp, probe
ggtagaggcccgggaagccatcaga

SEQ ID NO: 252057 - DNA, 25 bp, probe
ggtagacgctcccaagaagtcagag

SEQ ID NO: 252058 - DNA, 25 bp, probe
ggtcacacgccacataacagacaaa

SEQ ID NO: 252059 - DNA, 25 bp, probe
ggtaccagtaacttagtgacacata

SEQ ID NO: 252060 - DNA, 25 bp, probe
ggtaccatgatcaacaggatgttac

SEQ ID NO: 252061 - DNA, 25 bp, probe
ggtcaacagatgtaagcgtcttact

SEQ ID NO: 252062 - DNA, 25 bp, probe
ggtagggaggaaggatgctgtagta

SEQ ID NO: 252063 - DNA, 25 bp, probe
ggtagggaggaaggatgctgtagta

SEQ ID NO: 252064 - DNA, 25 bp, probe
ggtaggcagagttactcgtgtacta

SEQ ID NO: 252065 - DNA, 25 bp, probe
ggtaggcagagttactcgtgtacta

SEQ ID NO: 252066 - DNA, 25 bp, probe
ggtagggagtgattttattattgtg

SEQ ID NO: 252067 - DNA, 25 bp, probe
ggttggggtggcttagcagatccgg

SEQ ID NO: 252068 - DNA, 25 bp, probe
ggatctggaagtgattcaagtccaa

SEQ ID NO: 252069 - DNA, 25 bp, probe
ggatctggaagtgattcaagtccaa

SEQ ID NO: 252070 - DNA, 25 bp, probe
ggatgccgaggagatcaaggtccag

SEQ ID NO: 252071 - DNA, 25 bp, probe
ggatcactgggggcactgagaacca

SEQ ID NO: 252072 - DNA, 25 bp, probe
ggtcaaaccggaggagagactcacc

SEQ ID NO: 252073 - DNA, 25 bp, probe
ggtaggcccaggtgggatgctcacc

SEQ ID NO: 252074 - DNA, 25 bp, probe
ggtaggtggcacactgggtgcccaa

SEQ ID NO: 252075 - DNA, 25 bp, probe
ggtagggccacgaggagtagccagg

SEQ ID NO: 252076 - DNA, 25 bp, probe
ggtaggggcaggaggagccacatga

SEQ ID NO: 252077 - DNA, 25 bp, probe
ggtaggagggagagtagcagagcat

SEQ ID NO: 252078 - DNA, 25 bp, probe
ggtacaagggaatgtcacaagcaca

SEQ ID NO: 252079 - DNA, 25 bp, probe
ggtacaaggggcagcccaagacatg

SEQ ID NO: 252080 - DNA, 25 bp, probe
ggttcaggggtgaggtgaagattgc

SEQ ID NO: 252081 - DNA, 25 bp, probe
ggtttgacgtggagtgtggggatga

SEQ ID NO: 252082 - DNA, 25 bp, probe
ggttagcaccgcaggtgtagagaag

SEQ ID NO: 252083 - DNA, 25 bp, probe
ggattattacagggtgggaggacac

SEQ ID NO: 252084 - DNA, 25 bp, probe
ggttattgtcggtatcggagttctt

SEQ ID NO: 252085 - DNA, 25 bp, probe
ggttgactgtgtccattcgggttat

SEQ ID NO: 252086 - DNA, 25 bp, probe
ggtagacgggactcgagtgatgatt

SEQ ID NO: 252087 - DNA, 25 bp, probe
ggtatacgggaatgctggcaagttc

SEQ ID NO: 252088 - DNA, 25 bp, probe
ggtagggggagatggccttgctcct

SEQ ID NO: 252089 - DNA, 25 bp, probe
ggtagggggagatggccttgctcct

SEQ ID NO: 252090 - DNA, 25 bp, probe
ggtagttgtggacagccatcttcac

SEQ ID NO: 252091 - DNA, 25 bp, probe
ggtagttctggaaaccttctgtgaa

SEQ ID NO: 252092 - DNA, 25 bp, probe
ggtattatcgggaaccatttgtgca

SEQ ID NO: 252093 - DNA, 25 bp, probe
ggttttaggtgtgcatcgctgtgta

SEQ ID NO: 252094 - DNA, 25 bp, probe
ggtttcttcgttgcattgcctgaga

SEQ ID NO: 252095 - DNA, 25 bp, probe
ggttttctttctgcattaaaatgct

SEQ ID NO: 252096 - DNA, 25 bp, probe
ggaccccagtctaggaattaaatct

SEQ ID NO: 252097 - DNA, 25 bp, probe
ggatccctcacctcagaagtaagac

SEQ ID NO: 252098 - DNA, 25 bp, probe
ggttcctggctgtcaccaagtagga

SEQ ID NO: 252099 - DNA, 25 bp, probe
ggttcctggctgtcaccaagtagga

SEQ ID NO: 252100 - DNA, 25 bp, probe
ggttctctggtgtaaaaaagatgac

SEQ ID NO: 252101 - DNA, 25 bp, probe
ggttgctggaggtgacaaggattgg

SEQ ID NO: 252102 - DNA, 25 bp, probe
ggttctgtaacaatatcaaggacca

SEQ ID NO: 252103 - DNA, 25 bp, probe
ggttctgtaacaatatcaaggacca

SEQ ID NO: 252104 - DNA, 25 bp, probe
ggtttgtaactgtttcatagaagag

SEQ ID NO: 252105 - DNA, 25 bp, probe
ggtttgttactggcttcagaaagct

SEQ ID NO: 252106 - DNA, 25 bp, probe
ggttacctacatgaactgcaaagca

SEQ ID NO: 252107 - DNA, 25 bp, probe
ggttacctacatgaactgcaaagca

SEQ ID NO: 252108 - DNA, 25 bp, probe
ggttactataacaacagtaccaagg

SEQ ID NO: 252109 - DNA, 25 bp, probe
ggttctttgagacacagtaccctgg

SEQ ID NO: 252110 - DNA, 25 bp, probe
ggtagtttagatcccatgtcacctc

SEQ ID NO: 252111 - DNA, 25 bp, probe
ggtactcctaattacattgctcctg

SEQ ID NO: 252112 - DNA, 25 bp, probe
ggtactcctaattacattgctcctg

SEQ ID NO: 252113 - DNA, 25 bp, probe
ggtagctctttatagcattcattct

SEQ ID NO: 252114 - DNA, 25 bp, probe
ggtaccagttctaagatgtctcttg

SEQ ID NO: 252115 - DNA, 25 bp, probe
ggtaacagtttaatcatctcacttg

SEQ ID NO: 252116 - DNA, 25 bp, probe
ggtaacatgtggtttcttgcctttg

SEQ ID NO: 252117 - DNA, 25 bp, probe
ggtaccgatggactgactatggctc

SEQ ID NO: 252118 - DNA, 25 bp, probe
ggtactgcggaaattcttgtgcgca

SEQ ID NO: 252119 - DNA, 25 bp, probe
ggtacgaagagatgtcttctgtgcc

SEQ ID NO: 252120 - DNA, 25 bp, probe
ggtacgaagagatgtcttctgtgcc

SEQ ID NO: 252121 - DNA, 25 bp, probe
ggtacacaaggattatgcatttttt

SEQ ID NO: 252122 - DNA, 25 bp, probe
ggtagccactgctagatatttattt

SEQ ID NO: 252123 - DNA, 25 bp, probe
ggtacatcttgttgaattcaatatt

SEQ ID NO: 252124 - DNA, 25 bp, probe
ggtacatgcctgttaatattcatgt

SEQ ID NO: 252125 - DNA, 25 bp, probe
ggtacaccatcaaagcagatgtctt

SEQ ID NO: 252126 - DNA, 25 bp, probe
ggtatgaccttgggaagacattggc

SEQ ID NO: 252127 - DNA, 25 bp, probe
ggttccctgtggcaagagaagtttt

SEQ ID NO: 252128 - DNA, 25 bp, probe
ggttcaccaggtcagggagagtttg

SEQ ID NO: 252129 - DNA, 25 bp, probe
ggttgtactggtcagtggacatctg

SEQ ID NO: 252130 - DNA, 25 bp, probe
ggttgcagactgctcaaaccattcg

SEQ ID NO: 252131 - DNA, 25 bp, probe
ggttggctctacaaataccattgga

SEQ ID NO: 252132 - DNA, 25 bp, probe
ggttttctaccatttcgactggatc

SEQ ID NO: 252133 - DNA, 25 bp, probe
ggttttctaccatttcgactggatc

SEQ ID NO: 252134 - DNA, 25 bp, probe
ggttttctaccatttcgactggatc

SEQ ID NO: 252135 - DNA, 25 bp, probe
ggttttgctaccattctaatgcatg

SEQ ID NO: 252136 - DNA, 25 bp, probe
ggttttccacgcagactgtagctgc

SEQ ID NO: 252137 - DNA, 25 bp, probe
ggtttcttgacaatggggtcaggcc

SEQ ID NO: 252138 - DNA, 25 bp, probe
ggtacactgtgccatgggggtaagc

SEQ ID NO: 252139 - DNA, 25 bp, probe
ggtagacatgtgcatcagggagatt

SEQ ID NO: 252140 - DNA, 25 bp, probe
ggtaacatggagaggcagcagacgg

SEQ ID NO: 252141 - DNA, 25 bp, probe
ggttgaattagaatacacagccctg

SEQ ID NO: 252142 - DNA, 25 bp, probe
ggttgaaggcaaaaccaactctcta

SEQ ID NO: 252143 - DNA, 25 bp, probe
ggtagaaggagagcctccatacctc

SEQ ID NO: 252144 - DNA, 25 bp, probe
ggtacagggtgtgacaacatgacct

SEQ ID NO: 252145 - DNA, 25 bp, probe
ggtacaggaggggcatccctcagcc

SEQ ID NO: 252146 - DNA, 25 bp, probe
ggtacacagggttcatcatctacac

SEQ ID NO: 252147 - DNA, 25 bp, probe
ggtacatatgggttcacattgaaat

SEQ ID NO: 252148 - DNA, 25 bp, probe
ggtactggtatgttaatggataatc

SEQ ID NO: 252149 - DNA, 25 bp, probe
ggtactgaaagccttagggaagctg

SEQ ID NO: 252150 - DNA, 25 bp, probe
ggtacagcgtacctggagggatgca

SEQ ID NO: 252151 - DNA, 25 bp, probe
ggtacagtgaaactgcgaatggctc

SEQ ID NO: 252152 - DNA, 25 bp, probe
ggtatcatgttgccacctgagggcc

SEQ ID NO: 252153 - DNA, 25 bp, probe
ggtactgttggagttgatgggcacc

SEQ ID NO: 252154 - DNA, 25 bp, probe
ggtacgacagtgccgtgctgggcac

SEQ ID NO: 252155 - DNA, 25 bp, probe
ggtacaacactgccctggagatgac

SEQ ID NO: 252156 - DNA, 25 bp, probe
ggtacacactgaggccttgatgata

SEQ ID NO: 252157 - DNA, 25 bp, probe
ggtatcactctgtctggcaatggtg

SEQ ID NO: 252158 - DNA, 25 bp, probe
ggtatcactctgtctggcaatggtg

SEQ ID NO: 252159 - DNA, 25 bp, probe
ggtagagctacagtgtgaatgtgga

SEQ ID NO: 252160 - DNA, 25 bp, probe
ggtagatggaacagcatgtggtgaa

SEQ ID NO: 252161 - DNA, 25 bp, probe
ggtagatggaacagcatgtggtgaa

SEQ ID NO: 252162 - DNA, 25 bp, probe
ggtatggtgaacagtgctcttgtgg

SEQ ID NO: 252163 - DNA, 25 bp, probe
ggtatggtgaacagtgctcttgtgg

SEQ ID NO: 252164 - DNA, 25 bp, probe
ggtatggagtccagtctaagcagag

SEQ ID NO: 252165 - DNA, 25 bp, probe
ggtaggagtcaatctgccacagaag

SEQ ID NO: 252166 - DNA, 25 bp, probe
ggtttggtgtcaacagctcacagga

SEQ ID NO: 252167 - DNA, 25 bp, probe
ggtactgtttatacagcactagaca

SEQ ID NO: 252168 - DNA, 25 bp, probe
ggtacggaatcgactgcatcatgaa

SEQ ID NO: 252169 - DNA, 25 bp, probe
ggtacagcagacagtgtcacatcaa

SEQ ID NO: 252170 - DNA, 25 bp, probe
ggtacacagactattgacatcagca

SEQ ID NO: 252171 - DNA, 25 bp, probe
ggtacacagactattgacatcagca

SEQ ID NO: 252172 - DNA, 25 bp, probe
ggtaaagccatgttaaatgacttga

SEQ ID NO: 252173 - DNA, 25 bp, probe
ggtaaagccatgttaaatgacttga

SEQ ID NO: 252174 - DNA, 25 bp, probe
ggttaatccatgttcaattcaaggt

SEQ ID NO: 252175 - DNA, 25 bp, probe
ggtaaatccacttaatcacatacag

SEQ ID NO: 252176 - DNA, 25 bp, probe
ggtattattacttggcattcacagc

SEQ ID NO: 252177 - DNA, 25 bp, probe
ggtataattgatggattcttccatc

SEQ ID NO: 252178 - DNA, 25 bp, probe
ggttaattgtgagcatcctcctgca

SEQ ID NO: 252179 - DNA, 25 bp, probe
ggttaattgtgagcatcctcctgca

SEQ ID NO: 252180 - DNA, 25 bp, probe
ggttacttgctgctcacactatata

SEQ ID NO: 252181 - DNA, 25 bp, probe
ggttatggtgccttgcagcactgtt

SEQ ID NO: 252182 - DNA, 25 bp, probe
ggtatcatggtggtgtcgtgcatct

SEQ ID NO: 252183 - DNA, 25 bp, probe
ggtacatcgagtacatgtgtgacat

SEQ ID NO: 252184 - DNA, 25 bp, probe
ggtacatcgagtacatgtgtgacat

SEQ ID NO: 252185 - DNA, 25 bp, probe
ggtagccatcttacagcttagcacc

SEQ ID NO: 252186 - DNA, 25 bp, probe
ggtacctctgtgccatgaaaatcac

SEQ ID NO: 252187 - DNA, 25 bp, probe
ggtatttgcatgcgctgcagataac

SEQ ID NO: 252188 - DNA, 25 bp, probe
ggtttgctgctgcctattgtagatc

SEQ ID NO: 252189 - DNA, 25 bp, probe
ggtttgctgctgcctattgtagatc

SEQ ID NO: 252190 - DNA, 25 bp, probe
ggtttgctctgatcattgctgattc

SEQ ID NO: 252191 - DNA, 25 bp, probe
ggtttgctgagcggcttatgttctg

SEQ ID NO: 252192 - DNA, 25 bp, probe
ggtttgatagctcgctgttatcctg

SEQ ID NO: 252193 - DNA, 25 bp, probe
ggtttggcatgtcctgttttgatag

SEQ ID NO: 252194 - DNA, 25 bp, probe
ggttttcagatctaggatttgaagt

SEQ ID NO: 252195 - DNA, 25 bp, probe
ggtttatcattctctattttcagat

SEQ ID NO: 252196 - DNA, 25 bp, probe
ggtatgtaaatctcttagtgtcact

SEQ ID NO: 252197 - DNA, 25 bp, probe
ggtatgtaaatctcttagtgtcact

SEQ ID NO: 252198 - DNA, 25 bp, probe
ggatcatgatgccaacctcttacgt

SEQ ID NO: 252199 - DNA, 25 bp, probe
ggtattgcatattccatttacggtt

SEQ ID NO: 252200 - DNA, 25 bp, probe
ggtactctattccttatatggagtt

SEQ ID NO: 252201 - DNA, 25 bp, probe
ggttcctggggaatatagagagttg

SEQ ID NO: 252202 - DNA, 25 bp, probe
ggttggcttgggatttgaactggaa

SEQ ID NO: 252203 - DNA, 25 bp, probe
ggttggctacggctttgaaggagca

SEQ ID NO: 252204 - DNA, 25 bp, probe
ggtagccagttgaatttatggaatc

SEQ ID NO: 252205 - DNA, 25 bp, probe
ggtagccagttgaatttatggaatc

SEQ ID NO: 252206 - DNA, 25 bp, probe
ggtagccagttgaatttatggaatc

SEQ ID NO: 252207 - DNA, 25 bp, probe
ggttgcttttaagttatggcaatta

SEQ ID NO: 252208 - DNA, 25 bp, probe
ggttcgttcttatttaaagcaatat

SEQ ID NO: 252209 - DNA, 25 bp, probe
ggttagagtcttttctacagactaa

SEQ ID NO: 252210 - DNA, 25 bp, probe
ggtattacctttttcaagctcagat

SEQ ID NO: 252211 - DNA, 25 bp, probe
ggtatttcttttcgtacctctatca

SEQ ID NO: 252212 - DNA, 25 bp, probe
ggtattttgcatatctttttttcat

SEQ ID NO: 252213 - DNA, 25 bp, probe
ggtttgcttcaagctgtaatttagc

SEQ ID NO: 252214 - DNA, 25 bp, probe
ggtttctctcaatgtgaaatctgga

SEQ ID NO: 252215 - DNA, 25 bp, probe
ggtttctctcaatgtgaaatctgga

SEQ ID NO: 252216 - DNA, 25 bp, probe
ggtttctattgatctggaagggact

SEQ ID NO: 252217 - DNA, 25 bp, probe
ggtactccgtgatcatgagcaaggc

SEQ ID NO: 252218 - DNA, 25 bp, probe
ggtactccgtgatcatgagcaaggc

SEQ ID NO: 252219 - DNA, 25 bp, probe
ggtacccatgctaaccatgctagcc

SEQ ID NO: 252220 - DNA, 25 bp, probe
ggttctcaacagacccagtgagccc

SEQ ID NO: 252221 - DNA, 25 bp, probe
ggtatttcaacggccaggactgcca

SEQ ID NO: 252222 - DNA, 25 bp, probe
ggtactgtgaacgtcgtgtgactca

SEQ ID NO: 252223 - DNA, 25 bp, probe
ggtactgtgaacgtcgtgtgactca

SEQ ID NO: 252224 - DNA, 25 bp, probe
ggtttggcaactgcgtggagctgca

SEQ ID NO: 252225 - DNA, 25 bp, probe
ggtttggaagctgcggaggacgtgg

SEQ ID NO: 252226 - DNA, 25 bp, probe
ggtttggaatgttcagaggaagcag

SEQ ID NO: 252227 - DNA, 25 bp, probe
ggtatattgaaatcgttgaagcgag

SEQ ID NO: 252228 - DNA, 25 bp, probe
ggttaatgtggacggttatgactac

SEQ ID NO: 252229 - DNA, 25 bp, probe
ggttcacattctggagttctcttta

SEQ ID NO: 252230 - DNA, 25 bp, probe
ggttaaacaaactctcatttgactg

SEQ ID NO: 252231 - DNA, 25 bp, probe
ggttgaaacatatctcttatcttac

SEQ ID NO: 252232 - DNA, 25 bp, probe
ggtttcaaacagacctttgcatgaa

SEQ ID NO: 252233 - DNA, 25 bp, probe
ggttaaaaagattgcaatgcgagaa

SEQ ID NO: 252234 - DNA, 25 bp, probe
ggttgccaaaagtggagcgaggatg

SEQ ID NO: 252235 - DNA, 25 bp, probe
ggtaccccaagaaggatgtgagagg

SEQ ID NO: 252236 - DNA, 25 bp, probe
ggtaccagttaaagccagtggcagc

SEQ ID NO: 252237 - DNA, 25 bp, probe
ggtactgcaggggaagggctggctg

SEQ ID NO: 252238 - DNA, 25 bp, probe
ggtagctagcgtgtgagggttggca

SEQ ID NO: 252239 - DNA, 25 bp, probe
ggtttagagctcctagaagttggtc

SEQ ID NO: 252240 - DNA, 25 bp, probe
tggtttggaaagggaatgttggtgc

SEQ ID NO: 252241 - DNA, 25 bp, probe
ggtttggacaactttgattctcagt

SEQ ID NO: 252242 - DNA, 25 bp, probe
ggtagatggatataatcctcccgta

SEQ ID NO: 252243 - DNA, 25 bp, probe
ggtagatggatataatcctcccgta

SEQ ID NO: 252244 - DNA, 25 bp, probe
ggtataggatttgacactgccagag

SEQ ID NO: 252245 - DNA, 25 bp, probe
ggtataggatttgacactgccagag

SEQ ID NO: 252246 - DNA, 25 bp, probe
ggtatggctggtgcaaaagctacag

SEQ ID NO: 252247 - DNA, 25 bp, probe
ggtatgtcctggccaaaatggaaga

SEQ ID NO: 252248 - DNA, 25 bp, probe
ggtatgctgcctctgtaaattcatg

SEQ ID NO: 252249 - DNA, 25 bp, probe
ggttatgcacatcatttaagtaggc

SEQ ID NO: 252250 - DNA, 25 bp, probe
ggttcagaagagtgtcaagttggac

SEQ ID NO: 252251 - DNA, 25 bp, probe
ggttaacagcagtcctttgtaaaca

SEQ ID NO: 252252 - DNA, 25 bp, probe
ggttccatagtatcttttacaaaat

SEQ ID NO: 252253 - DNA, 25 bp, probe
ggtttcaactggattatttaaatat

SEQ ID NO: 252254 - DNA, 25 bp, probe
ggtttaattgtcacaagcttaattt

SEQ ID NO: 252255 - DNA, 25 bp, probe
ggtagggcttgtactcactttaatt

SEQ ID NO: 252256 - DNA, 25 bp, probe
tggaaggtccgagtctttttagtgt

SEQ ID NO: 252257 - DNA, 25 bp, probe
tggaaggtccgagtctttttagtgt

SEQ ID NO: 252258 - DNA, 25 bp, probe
ggaatgggtcctgttatttatgctt

SEQ ID NO: 252259 - DNA, 25 bp, probe
ggacgggaactgctctttaattatt

SEQ ID NO: 252260 - DNA, 25 bp, probe
ggacggtgaacggccatgtgttaat

SEQ ID NO: 252261 - DNA, 25 bp, probe
ggaaggatacggacctcttaaagca

SEQ ID NO: 252262 - DNA, 25 bp, probe
ggtagagtcctaggacatctctgta

SEQ ID NO: 252263 - DNA, 25 bp, probe
ggtagctttctaggattccaccaag

SEQ ID NO: 252264 - DNA, 25 bp, probe
ggtagctttctaggattccaccaag

SEQ ID NO: 252265 - DNA, 25 bp, probe
ggtagctgtactattttcactcaga

SEQ ID NO: 252266 - DNA, 25 bp, probe
ggtagctgtactattttcactcaga

SEQ ID NO: 252267 - DNA, 25 bp, probe
ggtagcttcagctagcttttaggaa

SEQ ID NO: 252268 - DNA, 25 bp, probe
ggtacgctgcaaagcctttgggacc

SEQ ID NO: 252269 - DNA, 25 bp, probe
ggtacccggacagttacgagtccat

SEQ ID NO: 252270 - DNA, 25 bp, probe
ggatcgcccgagtgggacgattact

SEQ ID NO: 252271 - DNA, 25 bp, probe
ggactcggcgggggagtcatttaat

SEQ ID NO: 252272 - DNA, 25 bp, probe
ggactcggcgggggagtcatttaat

SEQ ID NO: 252273 - DNA, 25 bp, probe
ggcaccaggtgaaggaagttttaat

SEQ ID NO: 252274 - DNA, 25 bp, probe
ggagtcaggtttggggttttcagat

SEQ ID NO: 252275 - DNA, 25 bp, probe
ggagtcaggtttggggttttcagat

SEQ ID NO: 252276 - DNA, 25 bp, probe
ggagtcgtgttcagggaattgggat

SEQ ID NO: 252277 - DNA, 25 bp, probe
ggttctatgttaaagccacttagta

SEQ ID NO: 252278 - DNA, 25 bp, probe
ggtttcagtagagcagctaccacat

SEQ ID NO: 252279 - DNA, 25 bp, probe
ggtttaggagaggaattcaccattc

SEQ ID NO: 252280 - DNA, 25 bp, probe
ggtattatagttcatcttcccattc

SEQ ID NO: 252281 - DNA, 25 bp, probe
ggtagtgatttttattctgcccatt

SEQ ID NO: 252282 - DNA, 25 bp, probe
ggtagtgtcttttcttttacatagt

SEQ ID NO: 252283 - DNA, 25 bp, probe
ggtagtgagtaattctttgataaga

SEQ ID NO: 252284 - DNA, 25 bp, probe
ggtagtgagtaattctttgataaga

SEQ ID NO: 252285 - DNA, 25 bp, probe
ggttggagaaacttgtggatttggt

SEQ ID NO: 252286 - DNA, 25 bp, probe
ggttggagcgaatggaagttgggtg

SEQ ID NO: 252287 - DNA, 25 bp, probe
ggtttacgcaatagcgacgcgctgg

SEQ ID NO: 252288 - DNA, 25 bp, probe
ggttataccacactagaggctgtgg

SEQ ID NO: 252289 - DNA, 25 bp, probe
ggtttggccagggaggcgcagggac

SEQ ID NO: 252290 - DNA, 25 bp, probe
ggtaggtgagagtcagggtgcaggg

SEQ ID NO: 252291 - DNA, 25 bp, probe
ggtatgaggtgtgcagggggagctg

SEQ ID NO: 252292 - DNA, 25 bp, probe
ggtatgttattgccagggagtgagg

SEQ ID NO: 252293 - DNA, 25 bp, probe
ggttggtgattatgtagggcaggtg

SEQ ID NO: 252294 - DNA, 25 bp, probe
ggttggttatattctggggcttgga

SEQ ID NO: 252295 - DNA, 25 bp, probe
ggattggtttattgccgtgtgctat

SEQ ID NO: 252296 - DNA, 25 bp, probe
ggttggtacaataggcttttcatca

SEQ ID NO: 252297 - DNA, 25 bp, probe
ggttacccagacacttcttttggtg

SEQ ID NO: 252298 - DNA, 25 bp, probe
ggttacccagacacttcttttggtg

SEQ ID NO: 252299 - DNA, 25 bp, probe
ggattaccagaagactttccgcgtg

SEQ ID NO: 252300 - DNA, 25 bp, probe
ggttaaaatagcggcctgtgcccag

SEQ ID NO: 252301 - DNA, 25 bp, probe
tggtttaaattctctttgtccaggt

SEQ ID NO: 252302 - DNA, 25 bp, probe
ggtttcagaattttgcattgcagtc

SEQ ID NO: 252303 - DNA, 25 bp, probe
ggttccctatgtgcgattgcaggtg

SEQ ID NO: 252304 - DNA, 25 bp, probe
ggttcccattgtgagtgtgctagcc

SEQ ID NO: 252305 - DNA, 25 bp, probe
ggttctctctgtgtttattagcctt

SEQ ID NO: 252306 - DNA, 25 bp, probe
ggttctctctgtgtttattagcctt

SEQ ID NO: 252307 - DNA, 25 bp, probe
ggtttccttattgttgactgctttg

SEQ ID NO: 252308 - DNA, 25 bp, probe
ggtttccttattgttgactgctttg

SEQ ID NO: 252309 - DNA, 25 bp, probe
ggtttggttttgatatgaatgttgc

SEQ ID NO: 252310 - DNA, 25 bp, probe
ggtttggggtattaatgcaatgtgt

SEQ ID NO: 252311 - DNA, 25 bp, probe
ggtttggggacattgagatcacttg

SEQ ID NO: 252312 - DNA, 25 bp, probe
ggtttggggacattgagatcacttg

SEQ ID NO: 252313 - DNA, 25 bp, probe
ggtattcagtggtccaggattctgt

SEQ ID NO: 252314 - DNA, 25 bp, probe
ggtttcagctgttggtcgttctgag

SEQ ID NO: 252315 - DNA, 25 bp, probe
ggtttcaggatactcatcagtcctg

SEQ ID NO: 252316 - DNA, 25 bp, probe
ggtagttggattccacatgtcctgc

SEQ ID NO: 252317 - DNA, 25 bp, probe
ggtagcctggtcttcattgtcagga

SEQ ID NO: 252318 - DNA, 25 bp, probe
ggtacctcgttaagatgtagtgact

SEQ ID NO: 252319 - DNA, 25 bp, probe
ggtacctagtctttgaatttgttga

SEQ ID NO: 252320 - DNA, 25 bp, probe
ggagactctaattttggattccttg

SEQ ID NO: 252321 - DNA, 25 bp, probe
ggtatcttaatgtgtggatattctt

SEQ ID NO: 252322 - DNA, 25 bp, probe
ggtatccgaatgttggatgtactgg

SEQ ID NO: 252323 - DNA, 25 bp, probe
ggttccacatggtatagttactgag

SEQ ID NO: 252324 - DNA, 25 bp, probe
ggttgcccaggcatagttttggccg

SEQ ID NO: 252325 - DNA, 25 bp, probe
ggtttccagcgtggattttgtggac

SEQ ID NO: 252326 - DNA, 25 bp, probe
ggtttccagcgtggattttgtggac

SEQ ID NO: 252327 - DNA, 25 bp, probe
ggttcttgatcggatgtttctgtgg

SEQ ID NO: 252328 - DNA, 25 bp, probe
ggttcgagataggagcttttctgtg

SEQ ID NO: 252329 - DNA, 25 bp, probe
ggttcgagataggagcttttctgtg

SEQ ID NO: 252330 - DNA, 25 bp, probe
ggattctaaggaatttcttatctga

SEQ ID NO: 252331 - DNA, 25 bp, probe
ggttcaagggcaggtagctgatgct

SEQ ID NO: 252332 - DNA, 25 bp, probe
ggttgccaggacgaattgagataat

SEQ ID NO: 252333 - DNA, 25 bp, probe
ggttgccaggacgaattgagataat

SEQ ID NO: 252334 - DNA, 25 bp, probe
ggttcctgaactgtcaggtatcatg

SEQ ID NO: 252335 - DNA, 25 bp, probe
ggttcctgaactgtcaggtatcatg

SEQ ID NO: 252336 - DNA, 25 bp, probe
ggtttcgcagagcactgaagtacat

SEQ ID NO: 252337 - DNA, 25 bp, probe
ggttgtccgaaaataattccttgat

SEQ ID NO: 252338 - DNA, 25 bp, probe
ggttctcttaaaattctatcgaaat

SEQ ID NO: 252339 - DNA, 25 bp, probe
ggttctcttaaaattctatcgaaat

SEQ ID NO: 252340 - DNA, 25 bp, probe
ggttatcttaaatggctacctaaat

SEQ ID NO: 252341 - DNA, 25 bp, probe
ggtatgctctgtgacaaggctacgc

SEQ ID NO: 252342 - DNA, 25 bp, probe
ggtatcatgtgaaacagtggttgcc

SEQ ID NO: 252343 - DNA, 25 bp, probe
ggtagctgtagattctggacctgcc

SEQ ID NO: 252344 - DNA, 25 bp, probe
ggtatgtctagattgacccttgatt

SEQ ID NO: 252345 - DNA, 25 bp, probe
ggtagtgctaataactctcctgtct

SEQ ID NO: 252346 - DNA, 25 bp, probe
ggtattgtaatgaatatctgcttta

SEQ ID NO: 252347 - DNA, 25 bp, probe
ggtatggaagtgaatctctgcaagg

SEQ ID NO: 252348 - DNA, 25 bp, probe
ggtattagatttactgctaatgagg

SEQ ID NO: 252349 - DNA, 25 bp, probe
ggtagataatacttctgagttgggg

SEQ ID NO: 252350 - DNA, 25 bp, probe
ggtagatcaacaattctttttgggg

SEQ ID NO: 252351 - DNA, 25 bp, probe
ggtagcaacaaacttattgtatgtc

SEQ ID NO: 252352 - DNA, 25 bp, probe
ggtagaaatggtctctggcattgaa

SEQ ID NO: 252353 - DNA, 25 bp, probe
ggtataacaggttcctgccagtgag

SEQ ID NO: 252354 - DNA, 25 bp, probe
ggtataacaggttcctgccagtgag

SEQ ID NO: 252355 - DNA, 25 bp, probe
ggttttcatggtgcacatgccggag

SEQ ID NO: 252356 - DNA, 25 bp, probe
ggttttctggatggttcccagaggg

SEQ ID NO: 252357 - DNA, 25 bp, probe
ggttttcgaatttatcagtgcaaga

SEQ ID NO: 252358 - DNA, 25 bp, probe
ggtttttgaatttctgcaccaagat

SEQ ID NO: 252359 - DNA, 25 bp, probe
ggtttcttgtgcactggcaccaagt

SEQ ID NO: 252360 - DNA, 25 bp, probe
ggttctgtattgcagctaagctcaa

SEQ ID NO: 252361 - DNA, 25 bp, probe
ggtatgctgcaaataactagccatt

SEQ ID NO: 252362 - DNA, 25 bp, probe
ggtatgcccatgaatcacatggctc

SEQ ID NO: 252363 - DNA, 25 bp, probe
ggtatgcaacggtcactgatgcgcc

SEQ ID NO: 252364 - DNA, 25 bp, probe
ggtagggctgcagcactgatgccca

SEQ ID NO: 252365 - DNA, 25 bp, probe
ggtagcaagacagaatcatcctcag

SEQ ID NO: 252366 - DNA, 25 bp, probe
ggtagaatgtcagtccaatctccaa

SEQ ID NO: 252367 - DNA, 25 bp, probe
ggtagtcagtatggctcaaccagcc

SEQ ID NO: 252368 - DNA, 25 bp, probe
ggtaggcagatgggccaaggtgacc

SEQ ID NO: 252369 - DNA, 25 bp, probe
ggtatgacatgaccagccaagagaa

SEQ ID NO: 252370 - DNA, 25 bp, probe
ggtatgacatgaccagccaagagaa

SEQ ID NO: 252371 - DNA, 25 bp, probe
ggtatgacataaagctgcagtgcac

SEQ ID NO: 252372 - DNA, 25 bp, probe
ggtatgcaccactgagcaggaccag

SEQ ID NO: 252373 - DNA, 25 bp, probe
ggttagctcaaccaatggagagctg

SEQ ID NO: 252374 - DNA, 25 bp, probe
ggttctgtagagccaattagacttg

SEQ ID NO: 252375 - DNA, 25 bp, probe
ggttctatgcaatcaattagcagcc

SEQ ID NO: 252376 - DNA, 25 bp, probe
ggttcctccaaagaacagcactgat

SEQ ID NO: 252377 - DNA, 25 bp, probe
ggttccctgcagacaggaaaggttg

SEQ ID NO: 252378 - DNA, 25 bp, probe
ggttcctgccagtgagaaatgggga

SEQ ID NO: 252379 - DNA, 25 bp, probe
ggttcctgccagtgagaaatgggga

SEQ ID NO: 252380 - DNA, 25 bp, probe
ggttcctccgtgaagaagaccatgg

SEQ ID NO: 252381 - DNA, 25 bp, probe
ggatcttttttataacaccagtgta

SEQ ID NO: 252382 - DNA, 25 bp, probe
ggatcttttttataacaccagtgta

SEQ ID NO: 252383 - DNA, 25 bp, probe
ggttcttttgtttaggcaccagatg

SEQ ID NO: 252384 - DNA, 25 bp, probe
ggttcttttgtttaggcaccagatg

SEQ ID NO: 252385 - DNA, 25 bp, probe
ggttttgtggtttttgatgactctg

SEQ ID NO: 252386 - DNA, 25 bp, probe
ggttttggatcttgaatgtggtctc

SEQ ID NO: 252387 - DNA, 25 bp, probe
ggttttacatcccagagggctgcat

SEQ ID NO: 252388 - DNA, 25 bp, probe
ggttgaaacacccgaggttcaatga

SEQ ID NO: 252389 - DNA, 25 bp, probe
ggattgaaacccagggtcgtcacgc

SEQ ID NO: 252390 - DNA, 25 bp, probe
ggttatgagatccttggggtccacc

SEQ ID NO: 252391 - DNA, 25 bp, probe
ggttctctgtcaagtggcggtaaag

SEQ ID NO: 252392 - DNA, 25 bp, probe
ggttttgctctaggcagactaaagg

SEQ ID NO: 252393 - DNA, 25 bp, probe
ggttttgctctaggcagactaaagg

SEQ ID NO: 252394 - DNA, 25 bp, probe
ggttatccctgaaacctgcatagag

SEQ ID NO: 252395 - DNA, 25 bp, probe
ggtttcaccatgttagccgggatgg

SEQ ID NO: 252396 - DNA, 25 bp, probe
ggtttcaccatgttggccaggatga

SEQ ID NO: 252397 - DNA, 25 bp, probe
ggtttcacttttggcaacgtgcctg

SEQ ID NO: 252398 - DNA, 25 bp, probe
ggtttatttcttagaacattgttca

SEQ ID NO: 252399 - DNA, 25 bp, probe
ggttcttcccttcatgatagtattc

SEQ ID NO: 252400 - DNA, 25 bp, probe
ggttcatatcccatggctataaccc

SEQ ID NO: 252401 - DNA, 25 bp, probe
ggttcattcgatgagacctgtaccc

SEQ ID NO: 252402 - DNA, 25 bp, probe
ggttatgggatgggtcactgcctcc

SEQ ID NO: 252403 - DNA, 25 bp, probe
ggttatgggatgggtcactgcctcc

SEQ ID NO: 252404 - DNA, 25 bp, probe
ggttatcggcagtggagctactgct

SEQ ID NO: 252405 - DNA, 25 bp, probe
ggttatggaggtctgactaggcatg

SEQ ID NO: 252406 - DNA, 25 bp, probe
ggtttcaccgtgttagccaggatgg

SEQ ID NO: 252407 - DNA, 25 bp, probe
ggtttcctgcctgaggctgcaggac

SEQ ID NO: 252408 - DNA, 25 bp, probe
ggtttcctgcctatggtgagatcag

SEQ ID NO: 252409 - DNA, 25 bp, probe
ggtttcctgcctatggtgagatcag

SEQ ID NO: 252410 - DNA, 25 bp, probe
ggattcccacgtatgcggagtgagc

SEQ ID NO: 252411 - DNA, 25 bp, probe
ggttcacgaccaattggacggatga

SEQ ID NO: 252412 - DNA, 25 bp, probe
ggttccaaccatcttaaagtgaatg

SEQ ID NO: 252413 - DNA, 25 bp, probe
ggtatccaagcctggggaagggcag

SEQ ID NO: 252414 - DNA, 25 bp, probe
ggtatccagaggtgagggaggcctg

SEQ ID NO: 252415 - DNA, 25 bp, probe
tgtaccccagggggtggagccctgt

SEQ ID NO: 252416 - DNA, 25 bp, probe
ggagcgtaagaagaaacacccagat

SEQ ID NO: 252417 - DNA, 25 bp, probe
ggatttaacagaggaacccactcga

SEQ ID NO: 252418 - DNA, 25 bp, probe
ggatttttcaaaggacgctacgcga

SEQ ID NO: 252419 - DNA, 25 bp, probe
ggttgaccactgtggaatgtactgg

SEQ ID NO: 252420 - DNA, 25 bp, probe
ggttgaccactgtggaatgtactgg

SEQ ID NO: 252421 - DNA, 25 bp, probe
ggtttgccactgtgaagcttgattt

SEQ ID NO: 252422 - DNA, 25 bp, probe
ggtttgccactgtgaagcttgattt

SEQ ID NO: 252423 - DNA, 25 bp, probe
ggttctatactgtgtagattgctgg

SEQ ID NO: 252424 - DNA, 25 bp, probe
ggattctgaactcttcaatttggag

SEQ ID NO: 252425 - DNA, 25 bp, probe
ggactggaacctttattgcattgga

SEQ ID NO: 252426 - DNA, 25 bp, probe
ggactggagcccatgtaggtttgca

SEQ ID NO: 252427 - DNA, 25 bp, probe
ggactacgcccaagcaaggtttgat

SEQ ID NO: 252428 - DNA, 25 bp, probe
ggactacgcccaagcaaggtttgat

SEQ ID NO: 252429 - DNA, 25 bp, probe
ggacttccctgcagcacgtcgctta

SEQ ID NO: 252430 - DNA, 25 bp, probe
ggtttctgcctcagatcgatttgct

SEQ ID NO: 252431 - DNA, 25 bp, probe
ggtttgtcttcaagatgcaatactt

SEQ ID NO: 252432 - DNA, 25 bp, probe
ggtttgctctccagataatcactag

SEQ ID NO: 252433 - DNA, 25 bp, probe
ggtttctcccatagagagtgctgaa

SEQ ID NO: 252434 - DNA, 25 bp, probe
ggtttctctccatgtgctatatgaa

SEQ ID NO: 252435 - DNA, 25 bp, probe
ggatctctcctttttataacaaatc

SEQ ID NO: 252436 - DNA, 25 bp, probe
ggagtccctgaagcctaacagaaca

SEQ ID NO: 252437 - DNA, 25 bp, probe
ggaaacttgaggtcacttactaaat

SEQ ID NO: 252438 - DNA, 25 bp, probe
ggatcaatcatctcagaatcttact

SEQ ID NO: 252439 - DNA, 25 bp, probe
ggtagtgctgcttctgaagttatct

SEQ ID NO: 252440 - DNA, 25 bp, probe
ggtatgtctctttaagttttgatta

SEQ ID NO: 252441 - DNA, 25 bp, probe
ggtttcttttgatcatttttgttct

SEQ ID NO: 252442 - DNA, 25 bp, probe
ggtttcttttgatcatttttgttct

SEQ ID NO: 252443 - DNA, 25 bp, probe
ggtttcttacattgccattttctat

SEQ ID NO: 252444 - DNA, 25 bp, probe
ggtttatctacaatctcaaatccta

SEQ ID NO: 252445 - DNA, 25 bp, probe
ggtttacagatattgctgccagatc

SEQ ID NO: 252446 - DNA, 25 bp, probe
ggtatatacaatttgcagtgcagtg

SEQ ID NO: 252447 - DNA, 25 bp, probe
ggtatatacaatttgcagtgcagtg

SEQ ID NO: 252448 - DNA, 25 bp, probe
ggtatgtcaccatcatgaacactca

SEQ ID NO: 252449 - DNA, 25 bp, probe
ggtatgtcaccatcatgaacactca

SEQ ID NO: 252450 - DNA, 25 bp, probe
ggtatgtcactcccgagaatgcaga

SEQ ID NO: 252451 - DNA, 25 bp, probe
ggtatggactgcatggacaatgaga

SEQ ID NO: 252452 - DNA, 25 bp, probe
ggtagggtcataccacagggaaata

SEQ ID NO: 252453 - DNA, 25 bp, probe
ggataggaggcttccaagtagtaaa

SEQ ID NO: 252454 - DNA, 25 bp, probe
ggtaggtgtccatgcagattttatt

SEQ ID NO: 252455 - DNA, 25 bp, probe
ggttgagcttcaagatggttttttt

SEQ ID NO: 252456 - DNA, 25 bp, probe
ggttgactgtgcaatgttatttact

SEQ ID NO: 252457 - DNA, 25 bp, probe
ggtatggctgctgtttgattatgca

SEQ ID NO: 252458 - DNA, 25 bp, probe
ggtatggctgctgtttgattatgca

SEQ ID NO: 252459 - DNA, 25 bp, probe
ggtatctctcatgtttgatgtattt

SEQ ID NO: 252460 - DNA, 25 bp, probe
ggtatccctttactatgattaattt

SEQ ID NO: 252461 - DNA, 25 bp, probe
ggttcccataatagcttccagtatt

SEQ ID NO: 252462 - DNA, 25 bp, probe
ggttcctctgaaagtcccagaagaa

SEQ ID NO: 252463 - DNA, 25 bp, probe
ggttcctctgaaagtcccagaagaa

SEQ ID NO: 252464 - DNA, 25 bp, probe
ggttccactggaagtctccaggaga

SEQ ID NO: 252465 - DNA, 25 bp, probe
ggttccatctggagtcttaatgtag

SEQ ID NO: 252466 - DNA, 25 bp, probe
ggttcctcggagtacttaacacaga

SEQ ID NO: 252467 - DNA, 25 bp, probe
ggttcctcggagtacttaacacaga

SEQ ID NO: 252468 - DNA, 25 bp, probe
ggttttcgaaattcttcttatccag

SEQ ID NO: 252469 - DNA, 25 bp, probe
ggttttcgaaattcttcttatccag

SEQ ID NO: 252470 - DNA, 25 bp, probe
ggttcccaaagatcttggtgctcca

SEQ ID NO: 252471 - DNA, 25 bp, probe
ggttgccaataatacactaattcct

SEQ ID NO: 252472 - DNA, 25 bp, probe
ggttgtgaaccaactgccttaacct

SEQ ID NO: 252473 - DNA, 25 bp, probe
ggttgctggacgaacaccattcaaa

SEQ ID NO: 252474 - DNA, 25 bp, probe
ggttgctggacgaacaccattcaaa

SEQ ID NO: 252475 - DNA, 25 bp, probe
ggtatcgtggataatgcccactaga

SEQ ID NO: 252476 - DNA, 25 bp, probe
ggtatgtgtggatgatgctgccagg

SEQ ID NO: 252477 - DNA, 25 bp, probe
ggtatttggatttgctcaaggacac

SEQ ID NO: 252478 - DNA, 25 bp, probe
ggtatttggatttgctcaaggacac

SEQ ID NO: 252479 - DNA, 25 bp, probe
ggtatatgaggctttctacacaaag

SEQ ID NO: 252480 - DNA, 25 bp, probe
ggtatgtgaggcgtgcgtgaagcaa

SEQ ID NO: 252481 - DNA, 25 bp, probe
ggttgtgaggggttgttgcaatgaa

SEQ ID NO: 252482 - DNA, 25 bp, probe
ggattgtgatgggagttttcctaat

SEQ ID NO: 252483 - DNA, 25 bp, probe
ggattgtgatgggagttttcctaat

SEQ ID NO: 252484 - DNA, 25 bp, probe
ggatttctgggtctttcctgagact

SEQ ID NO: 252485 - DNA, 25 bp, probe
ggattccatggttttttcgaggaca

SEQ ID NO: 252486 - DNA, 25 bp, probe
ggttgctatggttttatctaacaaa

SEQ ID NO: 252487 - DNA, 25 bp, probe
ggtttttgtttgatcccacagcaat

SEQ ID NO: 252488 - DNA, 25 bp, probe
ggttatgttgttattctcggactgt

SEQ ID NO: 252489 - DNA, 25 bp, probe
ggttgaggtatttgtttcttgacta

SEQ ID NO: 252490 - DNA, 25 bp, probe
ggttgtcagtttcattttaacgagt

SEQ ID NO: 252491 - DNA, 25 bp, probe
ggtttcgttttcatgctttaccaga

SEQ ID NO: 252492 - DNA, 25 bp, probe
ggtatataattctcttcttaaccga

SEQ ID NO: 252493 - DNA, 25 bp, probe
ggttcaaaccaccattctgtagcca

SEQ ID NO: 252494 - DNA, 25 bp, probe
ggttgcgaactggtgacctgtaggc

SEQ ID NO: 252495 - DNA, 25 bp, probe
ggttgcaggacgcctacctgatgaa

SEQ ID NO: 252496 - DNA, 25 bp, probe
ggtatgctggagagttactctgcaa

SEQ ID NO: 252497 - DNA, 25 bp, probe
ggtattggaataactcacagggata

SEQ ID NO: 252498 - DNA, 25 bp, probe
ggaactgtgagtgtctaaggttgaa

SEQ ID NO: 252499 - DNA, 25 bp, probe
ggattcttcacttgttaaggtagta

SEQ ID NO: 252500 - DNA, 25 bp, probe
ggttcttcagtcgatatatgggcta

SEQ ID NO: 252501 - DNA, 25 bp, probe
ggttcttcagtcgatatatgggcta

SEQ ID NO: 252502 - DNA, 25 bp, probe
ggttcttcagtcgatatatgggcta

SEQ ID NO: 252503 - DNA, 25 bp, probe
ggttttcactcatttgattggtttg

SEQ ID NO: 252504 - DNA, 25 bp, probe
ggttttgcatgtctgcatgaaggtc

SEQ ID NO: 252505 - DNA, 25 bp, probe
ggtttggcattcctcaatagttgct

SEQ ID NO: 252506 - DNA, 25 bp, probe
ggttagtcattgatagaactacttt

SEQ ID NO: 252507 - DNA, 25 bp, probe
ggttagtgttaatgatcctgtctta

SEQ ID NO: 252508 - DNA, 25 bp, probe
ggtattgatttcacagtcagctgct

SEQ ID NO: 252509 - DNA, 25 bp, probe
ggtttgtggttgacttcatctcatc

SEQ ID NO: 252510 - DNA, 25 bp, probe
ggtttgtggttgacttcatctcatc

SEQ ID NO: 252511 - DNA, 25 bp, probe
ggtttgtggctacagcttatgcatc

SEQ ID NO: 252512 - DNA, 25 bp, probe
ggtttgcgcctgtcaagtgcgagcc

SEQ ID NO: 252513 - DNA, 25 bp, probe
ggtttgtgctctactggttgagcct

SEQ ID NO: 252514 - DNA, 25 bp, probe
ggttctatgatttgtagctctaggt

SEQ ID NO: 252515 - DNA, 25 bp, probe
ggttttaggtcttgcatatcagttt

SEQ ID NO: 252516 - DNA, 25 bp, probe
ggttttgagtatatcaatcctcttt

SEQ ID NO: 252517 - DNA, 25 bp, probe
ggttttgagtatatcaatcctcttt

SEQ ID NO: 252518 - DNA, 25 bp, probe
ggtttatgcatttttctatccttgg

SEQ ID NO: 252519 - DNA, 25 bp, probe
ggtttggcttgtttttcttgcatgg

SEQ ID NO: 252520 - DNA, 25 bp, probe
ggttttgctttttgattcttgtagc

SEQ ID NO: 252521 - DNA, 25 bp, probe
ggatttgttttgtgttttgtttgag

SEQ ID NO: 252522 - DNA, 25 bp, probe
ggatgtttttgttagagtagacttt

SEQ ID NO: 252523 - DNA, 25 bp, probe
ggttgttaattatggatcaacagtg

SEQ ID NO: 252524 - DNA, 25 bp, probe
ggttttgctttatggctagacagga

SEQ ID NO: 252525 - DNA, 25 bp, probe
ggttttgctttatggctagacagga

SEQ ID NO: 252526 - DNA, 25 bp, probe
ggttttctttcatctgatgtgtcag

SEQ ID NO: 252527 - DNA, 25 bp, probe
ggttttctttcatctgatgtgtcag

SEQ ID NO: 252528 - DNA, 25 bp, probe
ggattactttttgtctgtgtctggg

SEQ ID NO: 252529 - DNA, 25 bp, probe
ggttattttgttggcattggtcatt

SEQ ID NO: 252530 - DNA, 25 bp, probe
ggttgtttcattgtcatagatgcca

SEQ ID NO: 252531 - DNA, 25 bp, probe
ggttgtttcattgtcatagatgcca

SEQ ID NO: 252532 - DNA, 25 bp, probe
ggttttctcacattttggtctcaag

SEQ ID NO: 252533 - DNA, 25 bp, probe
ggattatgtgtacagttggttcatc

SEQ ID NO: 252534 - DNA, 25 bp, probe
ggatttgcagggagttggggccact

SEQ ID NO: 252535 - DNA, 25 bp, probe
ggttatcaggggattgaggtcacct

SEQ ID NO: 252536 - DNA, 25 bp, probe
ggttcatctggagtttcttggggcc

SEQ ID NO: 252537 - DNA, 25 bp, probe
ggtttctgcggaagtcactgggtcc

SEQ ID NO: 252538 - DNA, 25 bp, probe
ggtttctgcggaagtcactgggtcc

SEQ ID NO: 252539 - DNA, 25 bp, probe
ggttttgctggatgtttggtctgaa

SEQ ID NO: 252540 - DNA, 25 bp, probe
ggtttatctgcatggtattggaata

SEQ ID NO: 252541 - DNA, 25 bp, probe
ggtttcagtgaatgttctggatgat

SEQ ID NO: 252542 - DNA, 25 bp, probe
ggtttcatgaaatgttctaatgtat

SEQ ID NO: 252543 - DNA, 25 bp, probe
ggtttcatgaaatgttctaatgtat

SEQ ID NO: 252544 - DNA, 25 bp, probe
ggttattgagaatatctatgattta

SEQ ID NO: 252545 - DNA, 25 bp, probe
ggtatttcagaaggtcatcagattg

SEQ ID NO: 252546 - DNA, 25 bp, probe
ggtatttcacaacttatgacacgaa

SEQ ID NO: 252547 - DNA, 25 bp, probe
ggattattaacctctgagcagtgat

SEQ ID NO: 252548 - DNA, 25 bp, probe
ggataatccaacccctgagaggaca

SEQ ID NO: 252549 - DNA, 25 bp, probe
ggattaaccggctgcagagggtcaa

SEQ ID NO: 252550 - DNA, 25 bp, probe
ggattaaccggctgcagagggtcaa

SEQ ID NO: 252551 - DNA, 25 bp, probe
ggattaacaaccctggaagagtcca

SEQ ID NO: 252552 - DNA, 25 bp, probe
ggttggatcaacagtgtgggttcct

SEQ ID NO: 252553 - DNA, 25 bp, probe
ggttggatcaacagtgtgggttcct

SEQ ID NO: 252554 - DNA, 25 bp, probe
ggttggtaaggggttggtatctcag

SEQ ID NO: 252555 - DNA, 25 bp, probe
ggttggtaggaagcgaggtgagaag

SEQ ID NO: 252556 - DNA, 25 bp, probe
ggttggtaaaactggatgtgagaac

SEQ ID NO: 252557 - DNA, 25 bp, probe
ggttgtgttcaacagaggaggaaac

SEQ ID NO: 252558 - DNA, 25 bp, probe
ggttcagctgtatggaggggaaaac

SEQ ID NO: 252559 - DNA, 25 bp, probe
ggttagtgctggcgcgggagcaata

SEQ ID NO: 252560 - DNA, 25 bp, probe
ggttttggaggacctggagccagca

SEQ ID NO: 252561 - DNA, 25 bp, probe
ggttttacaggtcattaccagtcat

SEQ ID NO: 252562 - DNA, 25 bp, probe
ggtattctcaaggcttgcattacca

SEQ ID NO: 252563 - DNA, 25 bp, probe
ggtattctcaaggcttgcattacca

SEQ ID NO: 252564 - DNA, 25 bp, probe
ggtatttgcaatttgctatctacca

SEQ ID NO: 252565 - DNA, 25 bp, probe
ggttgttcaacattgtttactgggt

SEQ ID NO: 252566 - DNA, 25 bp, probe
ggtttttgaatgtctttcactcctt

SEQ ID NO: 252567 - DNA, 25 bp, probe
ggtttttataccattcagatcactg

SEQ ID NO: 252568 - DNA, 25 bp, probe
ggttatgtataatacttagatcctc

SEQ ID NO: 252569 - DNA, 25 bp, probe
ggtttgagatgcttcccttgaattc

SEQ ID NO: 252570 - DNA, 25 bp, probe
ggtttgagatgcttcccttgaattc

SEQ ID NO: 252571 - DNA, 25 bp, probe
ggtttacatgttccaatatgattcc

SEQ ID NO: 252572 - DNA, 25 bp, probe
ggtttacatgttccaatatgattcc

SEQ ID NO: 252573 - DNA, 25 bp, probe
ggttatactttgctgacgattcaca

SEQ ID NO: 252574 - DNA, 25 bp, probe
ggttatactttgctgacgattcaca

SEQ ID NO: 252575 - DNA, 25 bp, probe
ggttacttgtatatcgctattgaat

SEQ ID NO: 252576 - DNA, 25 bp, probe
ggttactgggcaatttctatatcag

SEQ ID NO: 252577 - DNA, 25 bp, probe
ggttatcggcgatgtgatctaacaa

SEQ ID NO: 252578 - DNA, 25 bp, probe
ggattacggccaggagatacaacca

SEQ ID NO: 252579 - DNA, 25 bp, probe
ggttccttgtgtgggatcacgatcc

SEQ ID NO: 252580 - DNA, 25 bp, probe
ggttcctgtgagtagccaaggcatc

SEQ ID NO: 252581 - DNA, 25 bp, probe
ggatctggggactaccagagactct

SEQ ID NO: 252582 - DNA, 25 bp, probe
ggatctggggactaccagagactct

SEQ ID NO: 252583 - DNA, 25 bp, probe
ggatctggggactaccagagactct

SEQ ID NO: 252584 - DNA, 25 bp, probe
ggttgtgaggaccaagcacgcctct

SEQ ID NO: 252585 - DNA, 25 bp, probe
ggttgagcagttaaaacggcttcag

SEQ ID NO: 252586 - DNA, 25 bp, probe
ggttgaaaatgttataggcacttgc

SEQ ID NO: 252587 - DNA, 25 bp, probe
ggttacaacgtatatggcatcgaaa

SEQ ID NO: 252588 - DNA, 25 bp, probe
ggttagcaattgggaatggctggga

SEQ ID NO: 252589 - DNA, 25 bp, probe
ggatgtacacccggaaaggggagtg

SEQ ID NO: 252590 - DNA, 25 bp, probe
ggataaccacctgaaagggatgatt

SEQ ID NO: 252591 - DNA, 25 bp, probe
ggagaagtcccctatcggggcattg

SEQ ID NO: 252592 - DNA, 25 bp, probe
ggatgaagtcctgattccttccaag

SEQ ID NO: 252593 - DNA, 25 bp, probe
ggaaagacctggctcctttcagaac

SEQ ID NO: 252594 - DNA, 25 bp, probe
ggataagacccgagctttgattgac

SEQ ID NO: 252595 - DNA, 25 bp, probe
ggataaccccagaaagttggctgcc

SEQ ID NO: 252596 - DNA, 25 bp, probe
ggcaattccctcaaaaattagtcct

SEQ ID NO: 252597 - DNA, 25 bp, probe
ggcaattccctcaaaaattagtcct

SEQ ID NO: 252598 - DNA, 25 bp, probe
ggatgtaccttaaacaagtagccct

SEQ ID NO: 252599 - DNA, 25 bp, probe
ggatgtaccttaaacaagtagccct

SEQ ID NO: 252600 - DNA, 25 bp, probe
ggttacacggaaagcttatggccct

SEQ ID NO: 252601 - DNA, 25 bp, probe
ggttatcagccaccaggctttggct

SEQ ID NO: 252602 - DNA, 25 bp, probe
ggttatcagccaccaggctttggct

SEQ ID NO: 252603 - DNA, 25 bp, probe
ggttgcaaccaggtggtatcaggcc

SEQ ID NO: 252604 - DNA, 25 bp, probe
ggttcacaccattttgtttagacaa

SEQ ID NO: 252605 - DNA, 25 bp, probe
ggttcctctctacttggggaaatca

SEQ ID NO: 252606 - DNA, 25 bp, probe
ggattccctctactatggggacctc

SEQ ID NO: 252607 - DNA, 25 bp, probe
ggttccccagagactagtgagagtc

SEQ ID NO: 252608 - DNA, 25 bp, probe
ggtttctcaggtggcaatgtaactc

SEQ ID NO: 252609 - DNA, 25 bp, probe
ggtttcactggggagagctacacac

SEQ ID NO: 252610 - DNA, 25 bp, probe
ggttgaacatcaaggagatctacaa

SEQ ID NO: 252611 - DNA, 25 bp, probe
ggttgaacatcaaggagatctacaa

SEQ ID NO: 252612 - DNA, 25 bp, probe
ggttgaacatcaaggagatctacaa

SEQ ID NO: 252613 - DNA, 25 bp, probe
ggttgaacatcaaggagatctacaa

SEQ ID NO: 252614 - DNA, 25 bp, probe
ggttcaaagatgaccagtcaatcag

SEQ ID NO: 252615 - DNA, 25 bp, probe
ggttaataaacaagccattgcagcg

SEQ ID NO: 252616 - DNA, 25 bp, probe
ggttaataacgagttctctagcgct

SEQ ID NO: 252617 - DNA, 25 bp, probe
ggttaataacgagttctctagcgct

SEQ ID NO: 252618 - DNA, 25 bp, probe
ggttcaatgaacctttcctagggct

SEQ ID NO: 252619 - DNA, 25 bp, probe
tggttgactaaccttgtcctaatac

SEQ ID NO: 252620 - DNA, 25 bp, probe
ggttttaaagatagttgctaatcct

SEQ ID NO: 252621 - DNA, 25 bp, probe
ggttttgaagagtcccttaatatgt

SEQ ID NO: 252622 - DNA, 25 bp, probe
ggattcttaaagaacactttcaaat

SEQ ID NO: 252623 - DNA, 25 bp, probe
ggattcttaaagaacactttcaaat

SEQ ID NO: 252624 - DNA, 25 bp, probe
ggttcctaaacaactcactttgaga

SEQ ID NO: 252625 - DNA, 25 bp, probe
ggttccacaagtaatgtcatgtttg

SEQ ID NO: 252626 - DNA, 25 bp, probe
ggttccacaagtaatgtcatgtttg

SEQ ID NO: 252627 - DNA, 25 bp, probe
ggttcgcaaagtgcaaagctttctt

SEQ ID NO: 252628 - DNA, 25 bp, probe
ggttagtcaaatggccagactattt

SEQ ID NO: 252629 - DNA, 25 bp, probe
ggttctctgcacattggaacttgtc

SEQ ID NO: 252630 - DNA, 25 bp, probe
ggatctactgacattagcactttgt

SEQ ID NO: 252631 - DNA, 25 bp, probe
ggtttatcacatgtagctcttttgc

SEQ ID NO: 252632 - DNA, 25 bp, probe
ggtttatcaatgattcatgtttccc

SEQ ID NO: 252633 - DNA, 25 bp, probe
ggttccattgatgtgggatttccct

SEQ ID NO: 252634 - DNA, 25 bp, probe
ggttccattgtttggagacattcct

SEQ ID NO: 252635 - DNA, 25 bp, probe
ggattgcctttgtagttaatgtact

SEQ ID NO: 252636 - DNA, 25 bp, probe
ggattgcctttgtagttaatgtact

SEQ ID NO: 252637 - DNA, 25 bp, probe
ggttggctcgtgtgcattaagtcaa

SEQ ID NO: 252638 - DNA, 25 bp, probe
ggtttcctgtggtcatgatcaagat

SEQ ID NO: 252639 - DNA, 25 bp, probe
ggtttccatatcctcagattcagaa

SEQ ID NO: 252640 - DNA, 25 bp, probe
ggattatgggtcctgcaattctaca

SEQ ID NO: 252641 - DNA, 25 bp, probe
ggattatgggtcctgcaattctaca

SEQ ID NO: 252642 - DNA, 25 bp, probe
ggttatggctgtggcaaaggcaaaa

SEQ ID NO: 252643 - DNA, 25 bp, probe
ggttctgggaggcaacagcattaag

SEQ ID NO: 252644 - DNA, 25 bp, probe
ggttcgggcgagcaatgctgcagtc

SEQ ID NO: 252645 - DNA, 25 bp, probe
ggttgctgtggttggaattcttctt

SEQ ID NO: 252646 - DNA, 25 bp, probe
ggattgttggggtacatttactgtg

SEQ ID NO: 252647 - DNA, 25 bp, probe
ggtttctggtgcctatttattcatt

SEQ ID NO: 252648 - DNA, 25 bp, probe
ggttttgcagtgcgatggtctttct

SEQ ID NO: 252649 - DNA, 25 bp, probe
ggttgttgaggccagagtatcgccc

SEQ ID NO: 252650 - DNA, 25 bp, probe
ggttgtggaagacagaatcatctcc

SEQ ID NO: 252651 - DNA, 25 bp, probe
ggttttgaagtccaagagcatccca

SEQ ID NO: 252652 - DNA, 25 bp, probe
ggtttcatgcaattgccaaacataa

SEQ ID NO: 252653 - DNA, 25 bp, probe
ggttgagatgctaagccaaacatca

SEQ ID NO: 252654 - DNA, 25 bp, probe
ggttgagatgctaagccaaacatca

SEQ ID NO: 252655 - DNA, 25 bp, probe
ggttgaggtctacctaacctaagct

SEQ ID NO: 252656 - DNA, 25 bp, probe
ggttgggtttatagcagacctaaat

SEQ ID NO: 252657 - DNA, 25 bp, probe
ggttggtctttattgagcacctact

SEQ ID NO: 252658 - DNA, 25 bp, probe
ggttctttgattaaggagctctatt

SEQ ID NO: 252659 - DNA, 25 bp, probe
ggttcatgcttttatcaagagatct

SEQ ID NO: 252660 - DNA, 25 bp, probe
ggttcatgcttttatcaagagatct

SEQ ID NO: 252661 - DNA, 25 bp, probe
ggttcactgttagccagaatctggg

SEQ ID NO: 252662 - DNA, 25 bp, probe
ggttcctgaatgcaccataatcgct

SEQ ID NO: 252663 - DNA, 25 bp, probe
ggttgtgccattcaaccagatccct

SEQ ID NO: 252664 - DNA, 25 bp, probe
ggttgtgccattcaaccagatccct

SEQ ID NO: 252665 - DNA, 25 bp, probe
ggattatcccttagccaacattcct

SEQ ID NO: 252666 - DNA, 25 bp, probe
ggtttccgctgtcaaacatgtggtt

SEQ ID NO: 252667 - DNA, 25 bp, probe
ggttttcagctattagcaactgtgc

SEQ ID NO: 252668 - DNA, 25 bp, probe
ggttcattgcagaagaggccgcggc

SEQ ID NO: 252669 - DNA, 25 bp, probe
ggttcattgcagaagaggccgcggc

SEQ ID NO: 252670 - DNA, 25 bp, probe
ggttgtgtaaaaccctgcggctgaa

SEQ ID NO: 252671 - DNA, 25 bp, probe
ggttggtccgaatcatccaggataa

SEQ ID NO: 252672 - DNA, 25 bp, probe
ggatttgtccatcaacttcaggaat

SEQ ID NO: 252673 - DNA, 25 bp, probe
ggttggcctgagcaacctagtaaga

SEQ ID NO: 252674 - DNA, 25 bp, probe
ggttggcagctgatcagacctcaat

SEQ ID NO: 252675 - DNA, 25 bp, probe
ggttggcagctgatcagacctcaat

SEQ ID NO: 252676 - DNA, 25 bp, probe
ggttggcagcattccatgagctgat

SEQ ID NO: 252677 - DNA, 25 bp, probe
ggttgccacatcttagcaagcacca

SEQ ID NO: 252678 - DNA, 25 bp, probe
ggttgccacatcttagcaagcacca

SEQ ID NO: 252679 - DNA, 25 bp, probe
ggttgcactatatctgtgagctctc

SEQ ID NO: 252680 - DNA, 25 bp, probe
ggttgccatatatcatctacttctt

SEQ ID NO: 252681 - DNA, 25 bp, probe
ggttcacaacatgcatctaagtgtt

SEQ ID NO: 252682 - DNA, 25 bp, probe
ggttcacaacatgcatctaagtgtt

SEQ ID NO: 252683 - DNA, 25 bp, probe
ggatctacacccaccagagtgatgt

SEQ ID NO: 252684 - DNA, 25 bp, probe
ggttggcccacaccaaagtgataag

SEQ ID NO: 252685 - DNA, 25 bp, probe
ggttgggccacagaagaagatcatc

SEQ ID NO: 252686 - DNA, 25 bp, probe
ggattggtgccaggaaggcagacac

SEQ ID NO: 252687 - DNA, 25 bp, probe
ggattggaccatgaatgatatgcta

SEQ ID NO: 252688 - DNA, 25 bp, probe
ggataccgctcaaaagaagctccaa

SEQ ID NO: 252689 - DNA, 25 bp, probe
ggaaatcactgtctacaacaccaac

SEQ ID NO: 252690 - DNA, 25 bp, probe
ggaaatcactgtctacaacaccaac

SEQ ID NO: 252691 - DNA, 25 bp, probe
ggactatcaatgacttcagttacct

SEQ ID NO: 252692 - DNA, 25 bp, probe
ggttcacatcagacgagagattgag

SEQ ID NO: 252693 - DNA, 25 bp, probe
ggatcgaccagtcagagttcgaagg

SEQ ID NO: 252694 - DNA, 25 bp, probe
ggatcggcgcgacagtgtagaaagt

SEQ ID NO: 252695 - DNA, 25 bp, probe
ggatcaggccaagaggatcaatcac

SEQ ID NO: 252696 - DNA, 25 bp, probe
ggatcaacccagagctgaaccagaa

SEQ ID NO: 252697 - DNA, 25 bp, probe
ggataccccacaagtagaatataga

SEQ ID NO: 252698 - DNA, 25 bp, probe
ggagccacacgacaggggtaacctg

SEQ ID NO: 252699 - DNA, 25 bp, probe
ggagccacacgacaggggtaacctg

SEQ ID NO: 252700 - DNA, 25 bp, probe
ggcgaaacgacatgggggagaccct

SEQ ID NO: 252701 - DNA, 25 bp, probe
tggcggaacggttgggggttcagca

SEQ ID NO: 252702 - DNA, 25 bp, probe
tggggtagactgagggattttagcc

SEQ ID NO: 252703 - DNA, 25 bp, probe
ggaggaagaatgagtctactttgga

SEQ ID NO: 252704 - DNA, 25 bp, probe
ggagatgaagcagggccgtactttg

SEQ ID NO: 252705 - DNA, 25 bp, probe
tgaacaaaaggtgcctattcttttt

SEQ ID NO: 252706 - DNA, 25 bp, probe
ggatacaacagggaccaatttattt

SEQ ID NO: 252707 - DNA, 25 bp, probe
ggataagcactagatctcccttaat

SEQ ID NO: 252708 - DNA, 25 bp, probe
ggatacgaatatgcctacctgaagg

SEQ ID NO: 252709 - DNA, 25 bp, probe
ggattcgtacccgtaagctgaagta

SEQ ID NO: 252710 - DNA, 25 bp, probe
ggattgcctgagcccaggaggtgga

SEQ ID NO: 252711 - DNA, 25 bp, probe
ggttgcttaactggctgtggggagt

SEQ ID NO: 252712 - DNA, 25 bp, probe
ggttgcagtgaatgggctgggggtg

SEQ ID NO: 252713 - DNA, 25 bp, probe
ggttgagggacaggattaggcaggg

SEQ ID NO: 252714 - DNA, 25 bp, probe
ggatatggggcctcgcgaggcaagg

SEQ ID NO: 252715 - DNA, 25 bp, probe
ggatatggggcctcgcgaggcaagg

SEQ ID NO: 252716 - DNA, 25 bp, probe
ggattaaggcttgggcggacaaagg

SEQ ID NO: 252717 - DNA, 25 bp, probe
ggttgtgggcattgatggggaagga

SEQ ID NO: 252718 - DNA, 25 bp, probe
ggttgggcagtgtggtggatgggca

SEQ ID NO: 252719 - DNA, 25 bp, probe
ggttgggcagtgtggtggatgggca

SEQ ID NO: 252720 - DNA, 25 bp, probe
ggttgggcagtgtggtggatgggca

SEQ ID NO: 252721 - DNA, 25 bp, probe
ggttgggctggagggtgcaattgag

SEQ ID NO: 252722 - DNA, 25 bp, probe
ggttcgtgtggagttgtgtgtggag

SEQ ID NO: 252723 - DNA, 25 bp, probe
ggttccttggagaagctgatttgcc

SEQ ID NO: 252724 - DNA, 25 bp, probe
ggttccttggagaagctgatttgcc

SEQ ID NO: 252725 - DNA, 25 bp, probe
tggtaccaaggagaggttttgctca

SEQ ID NO: 252726 - DNA, 25 bp, probe
tggtaccaaggagaggttttgctca

SEQ ID NO: 252727 - DNA, 25 bp, probe
ggttcttagctagcagtttttctcc

SEQ ID NO: 252728 - DNA, 25 bp, probe
ggttttctcattgtctttttgcatc

SEQ ID NO: 252729 - DNA, 25 bp, probe
ggttatatctcatctttgagtttct

SEQ ID NO: 252730 - DNA, 25 bp, probe
ggtttattctgagtttctgcatttt

SEQ ID NO: 252731 - DNA, 25 bp, probe
ggttttatctgagtgaaatactgta

SEQ ID NO: 252732 - DNA, 25 bp, probe
ggttttcataatgcaatgtaacata

SEQ ID NO: 252733 - DNA, 25 bp, probe
ggatttgctctcgaaaatgttaatc

SEQ ID NO: 252734 - DNA, 25 bp, probe
ggattactgccacagcaagggaatc

SEQ ID NO: 252735 - DNA, 25 bp, probe
ggattactgtgcttccaacgtcatt

SEQ ID NO: 252736 - DNA, 25 bp, probe
ggattactgtgcttccaacgtcatt

SEQ ID NO: 252737 - DNA, 25 bp, probe
ggttcataggccataatcgaatgtg

SEQ ID NO: 252738 - DNA, 25 bp, probe
ggttgcaaaccatacatggccattg

SEQ ID NO: 252739 - DNA, 25 bp, probe
ggttggagactagaatcccatctgt

SEQ ID NO: 252740 - DNA, 25 bp, probe
ggttgggagctcttaatagtcagta

SEQ ID NO: 252741 - DNA, 25 bp, probe
ggttcttgagcatttaatcctagta

SEQ ID NO: 252742 - DNA, 25 bp, probe
ggttttagcatcttcttcagcaaat

SEQ ID NO: 252743 - DNA, 25 bp, probe
ggttataagctgggccgcacaattg

SEQ ID NO: 252744 - DNA, 25 bp, probe
ggttacaagtggcacttcaatgaga

SEQ ID NO: 252745 - DNA, 25 bp, probe
ggttgaagggatggacttccacaga

SEQ ID NO: 252746 - DNA, 25 bp, probe
ggttggaaggatagactgcccccta

SEQ ID NO: 252747 - DNA, 25 bp, probe
ggttggaaggatagactgcccccta

SEQ ID NO: 252748 - DNA, 25 bp, probe
ggttgagaatggaatcctctgtgga

SEQ ID NO: 252749 - DNA, 25 bp, probe
ggttgagaatggaatcctctgtgga

SEQ ID NO: 252750 - DNA, 25 bp, probe
ggatgatagcttggattccctaggt

SEQ ID NO: 252751 - DNA, 25 bp, probe
ggatagaatgtctttgcccattttt

SEQ ID NO: 252752 - DNA, 25 bp, probe
ggattttgatatcttcctttgtcat

SEQ ID NO: 252753 - DNA, 25 bp, probe
ggttatctggaagttcagtctttta

SEQ ID NO: 252754 - DNA, 25 bp, probe
ggataagcggaagggtttatttgca

SEQ ID NO: 252755 - DNA, 25 bp, probe
ggatttcgagaatgccttctatttc

SEQ ID NO: 252756 - DNA, 25 bp, probe
ggttctgaagaaggccttccaggcc

SEQ ID NO: 252757 - DNA, 25 bp, probe
ggttctgaataaagcaggacccgcc

SEQ ID NO: 252758 - DNA, 25 bp, probe
ggttcagcaagagaggcagacccag

SEQ ID NO: 252759 - DNA, 25 bp, probe
ggttagctatgcaaagtcatgagaa

SEQ ID NO: 252760 - DNA, 25 bp, probe
ggttacgagctgaagtgagcaggat

SEQ ID NO: 252761 - DNA, 25 bp, probe
ggttattcagggtctgagcagcagt

SEQ ID NO: 252762 - DNA, 25 bp, probe
ggttattcacatggagctggatcat

SEQ ID NO: 252763 - DNA, 25 bp, probe
ggttcacgctgctagcgtggacata

SEQ ID NO: 252764 - DNA, 25 bp, probe
ggttcaacttgacgcttgcaaaatt

SEQ ID NO: 252765 - DNA, 25 bp, probe
ggcttatacttctgtggaaactttg

SEQ ID NO: 252766 - DNA, 25 bp, probe
ggcttatacttctgtggaaactttg

SEQ ID NO: 252767 - DNA, 25 bp, probe
ggttgtacctccataaaacagtagc

SEQ ID NO: 252768 - DNA, 25 bp, probe
ggattgggtcccacataaagcagtc

SEQ ID NO: 252769 - DNA, 25 bp, probe
ggatgtcgcgtcctggtttaaggat

SEQ ID NO: 252770 - DNA, 25 bp, probe
ggatctccagtccacaagttgaaga

SEQ ID NO: 252771 - DNA, 25 bp, probe
ggatctccagtccacaagttgaaga

SEQ ID NO: 252772 - DNA, 25 bp, probe
ggatctccagtccacaagttgaaga

SEQ ID NO: 252773 - DNA, 25 bp, probe
ggattatgatttcaaggcgaagctg

SEQ ID NO: 252774 - DNA, 25 bp, probe
ggatccatttgtcaactggaagtgc

SEQ ID NO: 252775 - DNA, 25 bp, probe
ggctccggatggagcctggggctgc

SEQ ID NO: 252776 - DNA, 25 bp, probe
ggttcagcgtggactggtgggcgct

SEQ ID NO: 252777 - DNA, 25 bp, probe
ggttacagtgagccgagatcatgcc

SEQ ID NO: 252778 - DNA, 25 bp, probe
ggattacagtgggggcatttcttta

SEQ ID NO: 252779 - DNA, 25 bp, probe
ggattaaggtgttgacttgcctctt

SEQ ID NO: 252780 - DNA, 25 bp, probe
ggatttagggtcacatgctgcaggc

SEQ ID NO: 252781 - DNA, 25 bp, probe
ggttaacgtgtttgctgagcaggac

SEQ ID NO: 252782 - DNA, 25 bp, probe
ggttgaggcgcggaagctggaggcc

SEQ ID NO: 252783 - DNA, 25 bp, probe
ggattgaatgtgaaacgggggcacc

SEQ ID NO: 252784 - DNA, 25 bp, probe
ggttgcaagggaacagagagggacc

SEQ ID NO: 252785 - DNA, 25 bp, probe
ggttcatggtggattagcagatgga

SEQ ID NO: 252786 - DNA, 25 bp, probe
ggttcggaagtctaagcagggcagg

SEQ ID NO: 252787 - DNA, 25 bp, probe
ggttcggaagtctaagcagggcagg

SEQ ID NO: 252788 - DNA, 25 bp, probe
ggttctggaaagtgagctgaagcgc

SEQ ID NO: 252789 - DNA, 25 bp, probe
ggttcctaagcctggctgcaaagaa

SEQ ID NO: 252790 - DNA, 25 bp, probe
ggttcctttctgtccattgaaacaa

SEQ ID NO: 252791 - DNA, 25 bp, probe
ggttatataatccccattaacaaag

SEQ ID NO: 252792 - DNA, 25 bp, probe
ggttgtatagtgccccattaggcca

SEQ ID NO: 252793 - DNA, 25 bp, probe
ggttgttctgtgctcctaatgacac

SEQ ID NO: 252794 - DNA, 25 bp, probe
ggttatattggcaacctattctcac

SEQ ID NO: 252795 - DNA, 25 bp, probe
ggttgcgttgacagcattatgcttc

SEQ ID NO: 252796 - DNA, 25 bp, probe
ggttgcacttgctttgattgaatgt

SEQ ID NO: 252797 - DNA, 25 bp, probe
ggttatcaatgccaagtgtgcacat

SEQ ID NO: 252798 - DNA, 25 bp, probe
ggttacaggacttctgtgcattgta

SEQ ID NO: 252799 - DNA, 25 bp, probe
ggttggagcgaatctgctagtgaag

SEQ ID NO: 252800 - DNA, 25 bp, probe
ggttgagtgcgatggctgtgaggaa

SEQ ID NO: 252801 - DNA, 25 bp, probe
ggttgaatgccatccagcaggaata

SEQ ID NO: 252802 - DNA, 25 bp, probe
ggttgcacagaatcctccaagatac

SEQ ID NO: 252803 - DNA, 25 bp, probe
ggttctcgtacagccatatgagtgc

SEQ ID NO: 252804 - DNA, 25 bp, probe
ggttctcttcaagtcgcagatagag

SEQ ID NO: 252805 - DNA, 25 bp, probe
ggttcatttaatgcagacactggaa

SEQ ID NO: 252806 - DNA, 25 bp, probe
ggttctcatttagcagacatcgcaa

SEQ ID NO: 252807 - DNA, 25 bp, probe
ggttctcagcttagctaagtccatc

SEQ ID NO: 252808 - DNA, 25 bp, probe
ggttcaagatttaaagcatcagata

SEQ ID NO: 252809 - DNA, 25 bp, probe
ggttcacaactgtatccagaaggag

SEQ ID NO: 252810 - DNA, 25 bp, probe
ggttcagtcctagcaagaagcgaga

SEQ ID NO: 252811 - DNA, 25 bp, probe
ggttaatacacagaaatatctagaa

SEQ ID NO: 252812 - DNA, 25 bp, probe
ggttaatactcatgaaatatctatt

SEQ ID NO: 252813 - DNA, 25 bp, probe
ggttcacacaccagatgtaactgtt

SEQ ID NO: 252814 - DNA, 25 bp, probe
ggttccaagccgactttcatgagct

SEQ ID NO: 252815 - DNA, 25 bp, probe
ggattctcagtcgagtttccagagc

SEQ ID NO: 252816 - DNA, 25 bp, probe
ggattgactgtggaatccatgccag

SEQ ID NO: 252817 - DNA, 25 bp, probe
ggatcaagctgttatgaacaccaga

SEQ ID NO: 252818 - DNA, 25 bp, probe
ggatagactgtgcagtgacctccac

SEQ ID NO: 252819 - DNA, 25 bp, probe
ggattgcaggtgcatgccaccatgc

SEQ ID NO: 252820 - DNA, 25 bp, probe
ggttcaggcagttctgcctcagcct

SEQ ID NO: 252821 - DNA, 25 bp, probe
ggttccagagcttgatctgggcatt

SEQ ID NO: 252822 - DNA, 25 bp, probe
ggatcccagcacatcactgtagaat

SEQ ID NO: 252823 - DNA, 25 bp, probe
ggatacagatacgtaagtgaatatt

SEQ ID NO: 252824 - DNA, 25 bp, probe
ggttcagatgacgaagcagatcttg

SEQ ID NO: 252825 - DNA, 25 bp, probe
ggttgcaatacaaactgctcttgac

SEQ ID NO: 252826 - DNA, 25 bp, probe
ggttgcaagaaatttctcttcaagc

SEQ ID NO: 252827 - DNA, 25 bp, probe
ggatatccaaaatggccgtgcaagc

SEQ ID NO: 252828 - DNA, 25 bp, probe
ggttctcaaagctggcccagatgct

SEQ ID NO: 252829 - DNA, 25 bp, probe
ggttatcaagaaagtgccctgtgct

SEQ ID NO: 252830 - DNA, 25 bp, probe
ggttcatgggtaagtttctgatgct

SEQ ID NO: 252831 - DNA, 25 bp, probe
ggttctgggattaatcagtcaggat

SEQ ID NO: 252832 - DNA, 25 bp, probe
ggttcattgtgattaatagtcttat

SEQ ID NO: 252833 - DNA, 25 bp, probe
ggttaagtcttattagtgtctattc

SEQ ID NO: 252834 - DNA, 25 bp, probe
ggttataggtttgtgttttctgcca

SEQ ID NO: 252835 - DNA, 25 bp, probe
ggttcaaagatcatcaatttttctg

SEQ ID NO: 252836 - DNA, 25 bp, probe
ggatctaaaactttattcttctctc

SEQ ID NO: 252837 - DNA, 25 bp, probe
ggatgaaaaccttaatagttctgcc

SEQ ID NO: 252838 - DNA, 25 bp, probe
ggatacaaaccatagtaggcaatac

SEQ ID NO: 252839 - DNA, 25 bp, probe
ggatacaaaccatagtaggcaatac

SEQ ID NO: 252840 - DNA, 25 bp, probe
ggttcagtacggctgtaccaataca

SEQ ID NO: 252841 - DNA, 25 bp, probe
ggttcagttgtacttgtcctgcaaa

SEQ ID NO: 252842 - DNA, 25 bp, probe
ggaaacaggactattgacaggacta

SEQ ID NO: 252843 - DNA, 25 bp, probe
ggatattaggatattgctcaaaatt

SEQ ID NO: 252844 - DNA, 25 bp, probe
ggataagagtctacatcttctagaa

SEQ ID NO: 252845 - DNA, 25 bp, probe
ggattcgagtgaacagtgcctccca

SEQ ID NO: 252846 - DNA, 25 bp, probe
ggttctgacagaaattggccccaaa

SEQ ID NO: 252847 - DNA, 25 bp, probe
ggttagacatgttttaccaggataa

SEQ ID NO: 252848 - DNA, 25 bp, probe
ggttagacatgttttaccaggataa

SEQ ID NO: 252849 - DNA, 25 bp, probe
ggttggcaattgtttcaaccagttt

SEQ ID NO: 252850 - DNA, 25 bp, probe
ggattggcaactgtgttacctttca

SEQ ID NO: 252851 - DNA, 25 bp, probe
ggattggcaactgtgttacctttca

SEQ ID NO: 252852 - DNA, 25 bp, probe
ggattggaacatgatttatagttaa

SEQ ID NO: 252853 - DNA, 25 bp, probe
ggttggattttagttacagctgtga

SEQ ID NO: 252854 - DNA, 25 bp, probe
ggttcgattttcatttgagcagcca

SEQ ID NO: 252855 - DNA, 25 bp, probe
ggttcgattttcatttgagcagcca

SEQ ID NO: 252856 - DNA, 25 bp, probe
ggttctgtgtctgcaaggatgagtg

SEQ ID NO: 252857 - DNA, 25 bp, probe
ggttcttgacatcacacgatgaggc

SEQ ID NO: 252858 - DNA, 25 bp, probe
ggttgatatcacctacacggagggt

SEQ ID NO: 252859 - DNA, 25 bp, probe
ggttgatatcacctacacggagggt

SEQ ID NO: 252860 - DNA, 25 bp, probe
ggttgtatatgctctgaagtggggt

SEQ ID NO: 252861 - DNA, 25 bp, probe
ggattggcgactcctgaagttgggg

SEQ ID NO: 252862 - DNA, 25 bp, probe
ggattgggtgctgctagagggtgtg

SEQ ID NO: 252863 - DNA, 25 bp, probe
ggattttgactggtagggagagagg

SEQ ID NO: 252864 - DNA, 25 bp, probe
ggattatagatcagctaagggaggc

SEQ ID NO: 252865 - DNA, 25 bp, probe
ggttagcagataactcagattggag

SEQ ID NO: 252866 - DNA, 25 bp, probe
ggattactgtagatgcagtatatgg

SEQ ID NO: 252867 - DNA, 25 bp, probe
ggattacatgtaactgttttggttg

SEQ ID NO: 252868 - DNA, 25 bp, probe
ggttaaatacctgtgttcagattgt

SEQ ID NO: 252869 - DNA, 25 bp, probe
ggttggaatttcattgtatcgcatt

SEQ ID NO: 252870 - DNA, 25 bp, probe
ggttgggattatgctgctgttatat

SEQ ID NO: 252871 - DNA, 25 bp, probe
ggttaatgcactaatcatggatttt

SEQ ID NO: 252872 - DNA, 25 bp, probe
ggttaatgcactaatcatggatttt

SEQ ID NO: 252873 - DNA, 25 bp, probe
ggatcccagcctatatggcaatggc

SEQ ID NO: 252874 - DNA, 25 bp, probe
ggatcccagcctatatggcaatggc

SEQ ID NO: 252875 - DNA, 25 bp, probe
ggatcccagtaaatatgggttgaat

SEQ ID NO: 252876 - DNA, 25 bp, probe
ggatccccttctagtgaggattcaa

SEQ ID NO: 252877 - DNA, 25 bp, probe
ggatcacctgaggtcgggagttcga

SEQ ID NO: 252878 - DNA, 25 bp, probe
ggttgtgtgaagacagcggatttcg

SEQ ID NO: 252879 - DNA, 25 bp, probe
ggttggtgtcagacatttgatttca

SEQ ID NO: 252880 - DNA, 25 bp, probe
ggatcaggtctaccattgcttgttc

SEQ ID NO: 252881 - DNA, 25 bp, probe
ggatcaggtctaccattgcttgttc

SEQ ID NO: 252882 - DNA, 25 bp, probe
ggttcagtcactgcttgttgacatc

SEQ ID NO: 252883 - DNA, 25 bp, probe
ggatttgccaattcatatattgcca

SEQ ID NO: 252884 - DNA, 25 bp, probe
ggatttgccaattcatatattgcca

SEQ ID NO: 252885 - DNA, 25 bp, probe
ggttgtgccatttaaaggtgagaga

SEQ ID NO: 252886 - DNA, 25 bp, probe
ggttgtgccatttaaaggtgagaga

SEQ ID NO: 252887 - DNA, 25 bp, probe
ggatttgccttattgaagaagacag

SEQ ID NO: 252888 - DNA, 25 bp, probe
ggattcagcacagtaagcaaaaaag

SEQ ID NO: 252889 - DNA, 25 bp, probe
ggttcagaatcaacatctcacacaa

SEQ ID NO: 252890 - DNA, 25 bp, probe
ggttcatgcagaccagatctcaact

SEQ ID NO: 252891 - DNA, 25 bp, probe
ggttcatgcagaccagatctcaact

SEQ ID NO: 252892 - DNA, 25 bp, probe
ggttctagttgcttcatggactaaa

SEQ ID NO: 252893 - DNA, 25 bp, probe
ggttctagttgcttcatggactaaa

SEQ ID NO: 252894 - DNA, 25 bp, probe
ggttctatttaatggacatgagata

SEQ ID NO: 252895 - DNA, 25 bp, probe
ggatactcctgaaacaggtatggaa

SEQ ID NO: 252896 - DNA, 25 bp, probe
ggatcagattataaactggattaca

SEQ ID NO: 252897 - DNA, 25 bp, probe
ggatagattcaagacctttacctca

SEQ ID NO: 252898 - DNA, 25 bp, probe
ggatcaaaacactcctgatttcact

SEQ ID NO: 252899 - DNA, 25 bp, probe
ggaataatacctgcctttaaggact

SEQ ID NO: 252900 - DNA, 25 bp, probe
tgtaaaaccaccgcattctagggtt

SEQ ID NO: 252901 - DNA, 25 bp, probe
ggaggaacaaactcttcttggggag

SEQ ID NO: 252902 - DNA, 25 bp, probe
ggaggaaaccacattgtcggatgag

SEQ ID NO: 252903 - DNA, 25 bp, probe
ggaggaaaccacattgtcggatgag

SEQ ID NO: 252904 - DNA, 25 bp, probe
ggagtatgaaaccctttctaagaag

SEQ ID NO: 252905 - DNA, 25 bp, probe
ggttcttcaacaactttgctgcaaa

SEQ ID NO: 252906 - DNA, 25 bp, probe
ggttcctcacatattattggtcaag

SEQ ID NO: 252907 - DNA, 25 bp, probe
ggttccacaatcatctattgagtgt

SEQ ID NO: 252908 - DNA, 25 bp, probe
ggattcctaatcactcagagcagtc

SEQ ID NO: 252909 - DNA, 25 bp, probe
ggatttctgagtgactcagcagcct

SEQ ID NO: 252910 - DNA, 25 bp, probe
ggataactgagagcaccggtgctat

SEQ ID NO: 252911 - DNA, 25 bp, probe
ggatgaactcagccaactacagtcc

SEQ ID NO: 252912 - DNA, 25 bp, probe
ggataattgccgcatggactgtccg

SEQ ID NO: 252913 - DNA, 25 bp, probe
ggatcatctgaggtcgggaattcgg

SEQ ID NO: 252914 - DNA, 25 bp, probe
ggacctggcttttggcaatttgttt

SEQ ID NO: 252915 - DNA, 25 bp, probe
ggttctcagttttggcaattcttgt

SEQ ID NO: 252916 - DNA, 25 bp, probe
ggttctaggtttcaaagatgctgtg

SEQ ID NO: 252917 - DNA, 25 bp, probe
ggttctaggtttcaaagatgctgtg

SEQ ID NO: 252918 - DNA, 25 bp, probe
ggttccagtttgcccaatggagttg

SEQ ID NO: 252919 - DNA, 25 bp, probe
ggctatgggtttgctttggtgttgt

SEQ ID NO: 252920 - DNA, 25 bp, probe
ggatcagggctatggtttgggtatg

SEQ ID NO: 252921 - DNA, 25 bp, probe
ggatcagggctatggtttgggtatg

SEQ ID NO: 252922 - DNA, 25 bp, probe
ggattgggctaaacactttgggcag

SEQ ID NO: 252923 - DNA, 25 bp, probe
ggattgggctaaacactttgggcag

SEQ ID NO: 252924 - DNA, 25 bp, probe
ggttggagaacaaacttgggcagcc

SEQ ID NO: 252925 - DNA, 25 bp, probe
ggttccagagagtgaggtaggtgct

SEQ ID NO: 252926 - DNA, 25 bp, probe
ggttcccaggcaggatgagctgggg

SEQ ID NO: 252927 - DNA, 25 bp, probe
ggttctccagagggagtgctgcgga

SEQ ID NO: 252928 - DNA, 25 bp, probe
ggttctgctatgaggcagtggtgag

SEQ ID NO: 252929 - DNA, 25 bp, probe
ggttcttatgaccagactgctgtgc

SEQ ID NO: 252930 - DNA, 25 bp, probe
ggttcttatgaccagactgctgtgc

SEQ ID NO: 252931 - DNA, 25 bp, probe
ggttgtatgtgatcagaagctgcgt

SEQ ID NO: 252932 - DNA, 25 bp, probe
ggttggtgcatctaatgaaggcagt

SEQ ID NO: 252933 - DNA, 25 bp, probe
ggttggtctcgaggcagaggtcatg

SEQ ID NO: 252934 - DNA, 25 bp, probe
ggttgtgtcccaagaggtgttgagg

SEQ ID NO: 252935 - DNA, 25 bp, probe
ggttgactgccaaatgggttgttag

SEQ ID NO: 252936 - DNA, 25 bp, probe
ggttgaccctactgtggattggtgg

SEQ ID NO: 252937 - DNA, 25 bp, probe
ggttgaccctactgtggattggtgg

SEQ ID NO: 252938 - DNA, 25 bp, probe
ggatttacctacttggtttcagtga

SEQ ID NO: 252939 - DNA, 25 bp, probe
ggatttacctacttggtttcagtga

SEQ ID NO: 252940 - DNA, 25 bp, probe
ggatttcgcctaagtgatattacag

SEQ ID NO: 252941 - DNA, 25 bp, probe
ggattaccccatatacatgtgacta

SEQ ID NO: 252942 - DNA, 25 bp, probe
ggatttccgtctctggtgtagctga

SEQ ID NO: 252943 - DNA, 25 bp, probe
ggattttccattcaaggttgtgctt

SEQ ID NO: 252944 - DNA, 25 bp, probe
ggatttccaggcataaagttggcgt

SEQ ID NO: 252945 - DNA, 25 bp, probe
ggttgacacagttgtagggttacag

SEQ ID NO: 252946 - DNA, 25 bp, probe
ggttgtcactgttgtacggtgtcta

SEQ ID NO: 252947 - DNA, 25 bp, probe
ggattgatacgttttgagtatgtat

SEQ ID NO: 252948 - DNA, 25 bp, probe
ggattatgaaagtctagagtagctg

SEQ ID NO: 252949 - DNA, 25 bp, probe
ggttcatggaagccatagagtacat

SEQ ID NO: 252950 - DNA, 25 bp, probe
ggattatggaagcatgtggtgacca

SEQ ID NO: 252951 - DNA, 25 bp, probe
ggatattcaggacgtgggtgccttt

SEQ ID NO: 252952 - DNA, 25 bp, probe
ggatattcaggacgtgggtgccttt

SEQ ID NO: 252953 - DNA, 25 bp, probe
ggatcaacagtgtgggttcctgtcc

SEQ ID NO: 252954 - DNA, 25 bp, probe
ggatcaacagtgtgggttcctgtcc

SEQ ID NO: 252955 - DNA, 25 bp, probe
ggatcacctgggggatatagccatg

SEQ ID NO: 252956 - DNA, 25 bp, probe
ggataccattggtgtcatgatcaga

SEQ ID NO: 252957 - DNA, 25 bp, probe
ggttggctatggtgatcttaatggg

SEQ ID NO: 252958 - DNA, 25 bp, probe
ggcactttaagggatcttcaaggga

SEQ ID NO: 252959 - DNA, 25 bp, probe
ggcactttaagggatcttcaaggga

SEQ ID NO: 252960 - DNA, 25 bp, probe
ggaaattaaagcattctcccggaat

SEQ ID NO: 252961 - DNA, 25 bp, probe
ggatagaaaatacttcactgccggg

SEQ ID NO: 252962 - DNA, 25 bp, probe
ggatcttccaatattgactgcctgg

SEQ ID NO: 252963 - DNA, 25 bp, probe
ggatttgccaagattgaccaaggtg

SEQ ID NO: 252964 - DNA, 25 bp, probe
ggatccccagagttggtccaaggag

SEQ ID NO: 252965 - DNA, 25 bp, probe
ggacccgaacactgatcgctgggtg

SEQ ID NO: 252966 - DNA, 25 bp, probe
ggatccctgaaatctgatcttggta

SEQ ID NO: 252967 - DNA, 25 bp, probe
ggatccctgtagtgagttttggaaa

SEQ ID NO: 252968 - DNA, 25 bp, probe
ggatcgcttgatatttttttagaat

SEQ ID NO: 252969 - DNA, 25 bp, probe
ggatcaccaaggatgtagttctaca

SEQ ID NO: 252970 - DNA, 25 bp, probe
ggatcacctgaggtcaggagttcaa

SEQ ID NO: 252971 - DNA, 25 bp, probe
ggttcctggcagaggatgcactcaa

SEQ ID NO: 252972 - DNA, 25 bp, probe
ggattcctgagcgaataagcctaca

SEQ ID NO: 252973 - DNA, 25 bp, probe
ggattctcgacttcaaaggatacat

SEQ ID NO: 252974 - DNA, 25 bp, probe
ggattctcgacttcaaaggatacat

SEQ ID NO: 252975 - DNA, 25 bp, probe
ggattgtcaacaactgaaagtacat

SEQ ID NO: 252976 - DNA, 25 bp, probe
ggatttgcaaaacttatacgacttt

SEQ ID NO: 252977 - DNA, 25 bp, probe
ggatttgcatacattcttcaagatc

SEQ ID NO: 252978 - DNA, 25 bp, probe
ggattggataacttcgtgataaacc

SEQ ID NO: 252979 - DNA, 25 bp, probe
ggattgggacaacaggacagagacc

SEQ ID NO: 252980 - DNA, 25 bp, probe
ggattgtggaaaatggagccatgac

SEQ ID NO: 252981 - DNA, 25 bp, probe
ggattgtggaaaatggagccatgac

SEQ ID NO: 252982 - DNA, 25 bp, probe
ggttgctggttgtggactatgccac

SEQ ID NO: 252983 - DNA, 25 bp, probe
ggttgtggtatgtgtttgatgctat

SEQ ID NO: 252984 - DNA, 25 bp, probe
ggttgtggtatgtgtttgatgctat

SEQ ID NO: 252985 - DNA, 25 bp, probe
ggttggggtgttgtgtatgtatgtg

SEQ ID NO: 252986 - DNA, 25 bp, probe
ggttggcatcgttgtttttgaatgt

SEQ ID NO: 252987 - DNA, 25 bp, probe
ggttgcacacagttttgtttatgca

SEQ ID NO: 252988 - DNA, 25 bp, probe
ggttgcacacagttttgtttatgca

SEQ ID NO: 252989 - DNA, 25 bp, probe
ggataaatcagtggttatttaggga

SEQ ID NO: 252990 - DNA, 25 bp, probe
ggataaacaggcactcttgtgggaa

SEQ ID NO: 252991 - DNA, 25 bp, probe
ggataaacaggcactcttgtgggaa

SEQ ID NO: 252992 - DNA, 25 bp, probe
ggataaagggatccccgtggatgac

SEQ ID NO: 252993 - DNA, 25 bp, probe
ggataaagggatccccgtggatgac

SEQ ID NO: 252994 - DNA, 25 bp, probe
ggataaggtggagctaccgaacagc

SEQ ID NO: 252995 - DNA, 25 bp, probe
ggatccgggatgagtaccgcgacaa

SEQ ID NO: 252996 - DNA, 25 bp, probe
ggttccagtgagagaaaccaaccac

SEQ ID NO: 252997 - DNA, 25 bp, probe
ggattccaaggtgaggcccaactga

SEQ ID NO: 252998 - DNA, 25 bp, probe
ggattcgaaccagcaagctcacaac

SEQ ID NO: 252999 - DNA, 25 bp, probe
ggttctgcaagttgccattgtacaa

SEQ ID NO: 253000 - DNA, 25 bp, probe
ggatttatagtagttcagtcataaa

SEQ ID NO: 253001 - DNA, 25 bp, probe
ggttgtgtagctgtgtcatgtatat

SEQ ID NO: 253002 - DNA, 25 bp, probe
ggattgttggcagatatagttcatg

SEQ ID NO: 253003 - DNA, 25 bp, probe
ggatatttgaactccatgcttgatg

SEQ ID NO: 253004 - DNA, 25 bp, probe
ggattgtagaacttctctctctgct

SEQ ID NO: 253005 - DNA, 25 bp, probe
ggatagtagaatcgccactgtctgc

SEQ ID NO: 253006 - DNA, 25 bp, probe
ggttgaagcagcccgaagactgcct

SEQ ID NO: 253007 - DNA, 25 bp, probe
ggttgaggacgtgggagactgtaca

SEQ ID NO: 253008 - DNA, 25 bp, probe
ggttgatgtggcctgaaagcactta

SEQ ID NO: 253009 - DNA, 25 bp, probe
ggatctgcataaccgcacagacact

SEQ ID NO: 253010 - DNA, 25 bp, probe
ggattgcaatatctgaagccctccc

SEQ ID NO: 253011 - DNA, 25 bp, probe
ggattgcaatatctgaagccctccc

SEQ ID NO: 253012 - DNA, 25 bp, probe
ggattcaagcagctgcttcaacccc

SEQ ID NO: 253013 - DNA, 25 bp, probe
ggattcaagcagctgcttcaacccc

SEQ ID NO: 253014 - DNA, 25 bp, probe
ggatatacagacatgttaccagcac

SEQ ID NO: 253015 - DNA, 25 bp, probe
ggttccatgccaagtaacagcagag

SEQ ID NO: 253016 - DNA, 25 bp, probe
ggatgctcctgctagagtagccaca

SEQ ID NO: 253017 - DNA, 25 bp, probe
ggttgtgctgcaggcatataccaag

SEQ ID NO: 253018 - DNA, 25 bp, probe
ggttctgctgcagtatgtagtcgaa

SEQ ID NO: 253019 - DNA, 25 bp, probe
ggttctggcacattggaaagcacac

SEQ ID NO: 253020 - DNA, 25 bp, probe
ggattatggcaatgagaagaccttg

SEQ ID NO: 253021 - DNA, 25 bp, probe
ggattactcaaatacatgaactctg

SEQ ID NO: 253022 - DNA, 25 bp, probe
ggatattcttaattaaaactcattt

SEQ ID NO: 253023 - DNA, 25 bp, probe
ggatgtcgctaatcataataaaatt

SEQ ID NO: 253024 - DNA, 25 bp, probe
ggaggccaaacaggaatggagaatc

SEQ ID NO: 253025 - DNA, 25 bp, probe
ggagactaaaaagcagtggacttaa

SEQ ID NO: 253026 - DNA, 25 bp, probe
ggctgagataaatcccgggacctga

SEQ ID NO: 253027 - DNA, 25 bp, probe
ggatagaagattccccggaagccca

SEQ ID NO: 253028 - DNA, 25 bp, probe
ggttgcagcagatggtgtgggtacc

SEQ ID NO: 253029 - DNA, 25 bp, probe
ggttgcagcagatggtgtgggtacc

SEQ ID NO: 253030 - DNA, 25 bp, probe
ggatttgagacggcttggagtgact

SEQ ID NO: 253031 - DNA, 25 bp, probe
ggatttggccatattggatacctgg

SEQ ID NO: 253032 - DNA, 25 bp, probe
ggatactaccaactactatcaccat

SEQ ID NO: 253033 - DNA, 25 bp, probe
ggatacattcagaactagtaccaat

SEQ ID NO: 253034 - DNA, 25 bp, probe
ggatacatatccgcattgccaaaat

SEQ ID NO: 253035 - DNA, 25 bp, probe
ggataatacctatttcacaaggttg

SEQ ID NO: 253036 - DNA, 25 bp, probe
ggatcaatatcagttttcctatcgt

SEQ ID NO: 253037 - DNA, 25 bp, probe
ggatcacagaccatttctttctttc

SEQ ID NO: 253038 - DNA, 25 bp, probe
ggatcacagaccatttctttctttc

SEQ ID NO: 253039 - DNA, 25 bp, probe
ggatccaaaatgtggcgtttttcta

SEQ ID NO: 253040 - DNA, 25 bp, probe
ggatccggcaatgtgaagcttttgt

SEQ ID NO: 253041 - DNA, 25 bp, probe
ggatccatttctgtgaactcttctg

SEQ ID NO: 253042 - DNA, 25 bp, probe
ggatccatttctgtgaactcttctg

SEQ ID NO: 253043 - DNA, 25 bp, probe
ggatccagtggttgttacattctgg

SEQ ID NO: 253044 - DNA, 25 bp, probe
ggattggtgtcttagtacacttgtg

SEQ ID NO: 253045 - DNA, 25 bp, probe
ggattaggtctctgttgactggctg

SEQ ID NO: 253046 - DNA, 25 bp, probe
ggattaggtctctgttgactggctg

SEQ ID NO: 253047 - DNA, 25 bp, probe
ggatcaaagtctgttctggcggcat

SEQ ID NO: 253048 - DNA, 25 bp, probe
ggatcagaagtcgcagctctggtgg

SEQ ID NO: 253049 - DNA, 25 bp, probe
ggatcatacgcccaagtgtgggggc

SEQ ID NO: 253050 - DNA, 25 bp, probe
ggatcatacgcccaagtgtgggggc

SEQ ID NO: 253051 - DNA, 25 bp, probe
ggatgctccccgaggtgggagcggc

SEQ ID NO: 253052 - DNA, 25 bp, probe
ggatctccctggggagtgggtcctg

SEQ ID NO: 253053 - DNA, 25 bp, probe
ggatctccctggggagtgggtcctg

SEQ ID NO: 253054 - DNA, 25 bp, probe
ggatgctcaccagcagaaatggttc

SEQ ID NO: 253055 - DNA, 25 bp, probe
ggtcaaaagggcaagtgcctctcca

SEQ ID NO: 253056 - DNA, 25 bp, probe
ggatcctttcatagactacactgtc

SEQ ID NO: 253057 - DNA, 25 bp, probe
ggatcgtcatgtatacttacggcaa

SEQ ID NO: 253058 - DNA, 25 bp, probe
ggatagtctcccatttaagcagcta

SEQ ID NO: 253059 - DNA, 25 bp, probe
ggattgtccggaattcatggggtga

SEQ ID NO: 253060 - DNA, 25 bp, probe
ggaggtcccaaatatgtggtctatc

SEQ ID NO: 253061 - DNA, 25 bp, probe
ggatttctcaaaaggatttgtcttc

SEQ ID NO: 253062 - DNA, 25 bp, probe
ggattatttgaatgtttatggcacc

SEQ ID NO: 253063 - DNA, 25 bp, probe
ggatctttcagacaaactcatcccc

SEQ ID NO: 253064 - DNA, 25 bp, probe
ggatctttcagacaaactcatcccc

SEQ ID NO: 253065 - DNA, 25 bp, probe
ggatatgttaagtaacactcaacca

SEQ ID NO: 253066 - DNA, 25 bp, probe
ggagatattacagtggaactgaaga

SEQ ID NO: 253067 - DNA, 25 bp, probe
ggatccattcacagagacctagcag

SEQ ID NO: 253068 - DNA, 25 bp, probe
ggatccccacattgttgagtggcac

SEQ ID NO: 253069 - DNA, 25 bp, probe
ggatcacgatcccattggacgagac

SEQ ID NO: 253070 - DNA, 25 bp, probe
ggattgtgcattcctaggcacaaaa

SEQ ID NO: 253071 - DNA, 25 bp, probe
ggattgtgcattcctaggcacaaaa

SEQ ID NO: 253072 - DNA, 25 bp, probe
ggatctagctcttcgagtggatcaa

SEQ ID NO: 253073 - DNA, 25 bp, probe
ggactactccaagtttggcaacacc

SEQ ID NO: 253074 - DNA, 25 bp, probe
ggactactccaagtttggcaacacc

SEQ ID NO: 253075 - DNA, 25 bp, probe
ggaatctcttaagttttgcccaaag

SEQ ID NO: 253076 - DNA, 25 bp, probe
ggataccacaagtgctttcccaaga

SEQ ID NO: 253077 - DNA, 25 bp, probe
ggataactgctatcctttaccagag

SEQ ID NO: 253078 - DNA, 25 bp, probe
ggataaccagtatcacttacacaaa

SEQ ID NO: 253079 - DNA, 25 bp, probe
ggagggcctgtgtgagttacgcccc

SEQ ID NO: 253080 - DNA, 25 bp, probe
ggaggttttaacatcttctcccact

SEQ ID NO: 253081 - DNA, 25 bp, probe
ggatgagtttagaaacttttcctat

SEQ ID NO: 253082 - DNA, 25 bp, probe
ggagaggtctagcaaaatgattaaa

SEQ ID NO: 253083 - DNA, 25 bp, probe
ggactagactaccaagtagttcaaa

SEQ ID NO: 253084 - DNA, 25 bp, probe
ggatctaacttcagagtgcagtcta

SEQ ID NO: 253085 - DNA, 25 bp, probe
ggatctcagagcttacaggctgagc

SEQ ID NO: 253086 - DNA, 25 bp, probe
ggatcacgcagctcaagattgccag

SEQ ID NO: 253087 - DNA, 25 bp, probe
ggttgcagtgagccaagatcatgcc

SEQ ID NO: 253088 - DNA, 25 bp, probe
ggttgcagtgagccaagatcacgcc

SEQ ID NO: 253089 - DNA, 25 bp, probe
ggttgcagtgagctgagatcgtgcc

SEQ ID NO: 253090 - DNA, 25 bp, probe
ggttgcaggaatccagcaggctcac

SEQ ID NO: 253091 - DNA, 25 bp, probe
ggatgctggaggtccacaggtcaac

SEQ ID NO: 253092 - DNA, 25 bp, probe
ggataagattacacagattatacag

SEQ ID NO: 253093 - DNA, 25 bp, probe
ggatagccctacacagatatttgag

SEQ ID NO: 253094 - DNA, 25 bp, probe
ggaggccctggaaaattttgtgctt

SEQ ID NO: 253095 - DNA, 25 bp, probe
ggaggccctggaaaattttgtgctt

SEQ ID NO: 253096 - DNA, 25 bp, probe
ggatttcacctgagaatttggcttt

SEQ ID NO: 253097 - DNA, 25 bp, probe
ggattccactcttcggagttgcagt

SEQ ID NO: 253098 - DNA, 25 bp, probe
ggattccacctacttatttcagatt

SEQ ID NO: 253099 - DNA, 25 bp, probe
ggatttacaccagtcttttgtgttt

SEQ ID NO: 253100 - DNA, 25 bp, probe
ggattttatggagcattttttgtag

SEQ ID NO: 253101 - DNA, 25 bp, probe
ggatattattggtctctctaggttt

SEQ ID NO: 253102 - DNA, 25 bp, probe
ggatacctttgattttgtgtgtttc

SEQ ID NO: 253103 - DNA, 25 bp, probe
ggatacttctaatttggtggtgttt

SEQ ID NO: 253104 - DNA, 25 bp, probe
ggatacttctaaattttgggagctc

SEQ ID NO: 253105 - DNA, 25 bp, probe
ggatcaccccagaatagttaaactc

SEQ ID NO: 253106 - DNA, 25 bp, probe
ggatacctttagtagttaactctct

SEQ ID NO: 253107 - DNA, 25 bp, probe
ggattatctcttccaagttattttg

SEQ ID NO: 253108 - DNA, 25 bp, probe
ggatgttactagcaacttccttgga

SEQ ID NO: 253109 - DNA, 25 bp, probe
ggatgcctagtacaaatgctctttg

SEQ ID NO: 253110 - DNA, 25 bp, probe
ggatcctaatgacaaagttacgcgc

SEQ ID NO: 253111 - DNA, 25 bp, probe
ggattccaaatgcaaggtcctcctc

SEQ ID NO: 253112 - DNA, 25 bp, probe
ggattctagagtgaacttccacacc

SEQ ID NO: 253113 - DNA, 25 bp, probe
ggatgatcatgagcggcaactacca

SEQ ID NO: 253114 - DNA, 25 bp, probe
ggattccagcagtgaatgctagaca

SEQ ID NO: 253115 - DNA, 25 bp, probe
ggattccgaggggcacatcaaaatc

SEQ ID NO: 253116 - DNA, 25 bp, probe
ggatcttcaagtcccatcatagaaa

SEQ ID NO: 253117 - DNA, 25 bp, probe
ggatttattgacttcatcggccaag

SEQ ID NO: 253118 - DNA, 25 bp, probe
ggttgtgatctacctgctaggcaag

SEQ ID NO: 253119 - DNA, 25 bp, probe
gtcagggactacatcaacagaagcc

SEQ ID NO: 253120 - DNA, 25 bp, probe
ggatatgcttgttctgcagcttatt

SEQ ID NO: 253121 - DNA, 25 bp, probe
ggatatgcttgttctgcagcttatt

SEQ ID NO: 253122 - DNA, 25 bp, probe
ggatatctgctggaagcctcaagaa

SEQ ID NO: 253123 - DNA, 25 bp, probe
ggattgcttgaaaggtgcaaggaga

SEQ ID NO: 253124 - DNA, 25 bp, probe
ggattattgaatgggtgaacaacac

SEQ ID NO: 253125 - DNA, 25 bp, probe
ggttgattgatgtgggacagcagcc

SEQ ID NO: 253126 - DNA, 25 bp, probe
ggttgatgggctgggtgcatgccag

SEQ ID NO: 253127 - DNA, 25 bp, probe
ggttgatggcgagtggtgctgaagg

SEQ ID NO: 253128 - DNA, 25 bp, probe
ggatgctcattgggtgttctgtaga

SEQ ID NO: 253129 - DNA, 25 bp, probe
ggatcatggtctgggtttccaaaac

SEQ ID NO: 253130 - DNA, 25 bp, probe
ggatataatcttcttaccaaaaatg

SEQ ID NO: 253131 - DNA, 25 bp, probe
ggatcaagaagacactacaaaaaat

SEQ ID NO: 253132 - DNA, 25 bp, probe
ggatcaagaacacatgttctaaaca

SEQ ID NO: 253133 - DNA, 25 bp, probe
ggatgaggccagggcttggctacaa

SEQ ID NO: 253134 - DNA, 25 bp, probe
ggaggcagccagggcttacctgtac

SEQ ID NO: 253135 - DNA, 25 bp, probe
ggcggaccaaatgtcaccagtactg

SEQ ID NO: 253136 - DNA, 25 bp, probe
ggcggagtctattttacgcgtcgcc

SEQ ID NO: 253137 - DNA, 25 bp, probe
ggagtggtgattattcccctggagc

SEQ ID NO: 253138 - DNA, 25 bp, probe
ggagtctgagaatattggccctttc

SEQ ID NO: 253139 - DNA, 25 bp, probe
ggatttggagaggtttgcgcctgtc

SEQ ID NO: 253140 - DNA, 25 bp, probe
ggatttttagacattgctgctgctg

SEQ ID NO: 253141 - DNA, 25 bp, probe
ggatttttcatgtcttgaggttttg

SEQ ID NO: 253142 - DNA, 25 bp, probe
ggatttctggggaagaggtgcttcg

SEQ ID NO: 253143 - DNA, 25 bp, probe
ggatttgctgttcgacaagagcttg

SEQ ID NO: 253144 - DNA, 25 bp, probe
ggatgaactatctgaaaacttggtt

SEQ ID NO: 253145 - DNA, 25 bp, probe
ggatgaagttttaaatactcttgaa

SEQ ID NO: 253146 - DNA, 25 bp, probe
ggaatttttgcccagtcgttctgga

SEQ ID NO: 253147 - DNA, 25 bp, probe
ggatattttgcttctggtagtaagg

SEQ ID NO: 253148 - DNA, 25 bp, probe
ggatttgcctgttctgggcatttca

SEQ ID NO: 253149 - DNA, 25 bp, probe
ggatgccgttgtttggagattgact

SEQ ID NO: 253150 - DNA, 25 bp, probe
ggatccgctttgacgtgatggtgaa

SEQ ID NO: 253151 - DNA, 25 bp, probe
ggattgatgctgttgatcaggattg

SEQ ID NO: 253152 - DNA, 25 bp, probe
ggatcatagtgcttgcagctgtcct

SEQ ID NO: 253153 - DNA, 25 bp, probe
ggataatgctgttgcctcatctata

SEQ ID NO: 253154 - DNA, 25 bp, probe
ggatacagttagctgccttcgaata

SEQ ID NO: 253155 - DNA, 25 bp, probe
ggatctctgttatgtgccatttttc

SEQ ID NO: 253156 - DNA, 25 bp, probe
ggattgtgcttcattccaatctatt

SEQ ID NO: 253157 - DNA, 25 bp, probe
ggttgttgtattgcaattcactgtg

SEQ ID NO: 253158 - DNA, 25 bp, probe
ggatttagttattcaattttgtgga

SEQ ID NO: 253159 - DNA, 25 bp, probe
ggatttgtagttgcgacttcttcga

SEQ ID NO: 253160 - DNA, 25 bp, probe
ggattttagttacagctgtgatttg

SEQ ID NO: 253161 - DNA, 25 bp, probe
ggattccaggttatatctcatcttt

SEQ ID NO: 253162 - DNA, 25 bp, probe
ggatatgtcaggaatgtgattcttc

SEQ ID NO: 253163 - DNA, 25 bp, probe
ggatcagggtggatcatgtgcttga

SEQ ID NO: 253164 - DNA, 25 bp, probe
ggatcagggtggatcatgtgcttga

SEQ ID NO: 253165 - DNA, 25 bp, probe
ggatctgctaaactctatgtttgaa

SEQ ID NO: 253166 - DNA, 25 bp, probe
ggatatgcattttctttttgctgaa

SEQ ID NO: 253167 - DNA, 25 bp, probe
ggatctcatttgactttgttttgat

SEQ ID NO: 253168 - DNA, 25 bp, probe
ggatctcctcagatctttggttttt

SEQ ID NO: 253169 - DNA, 25 bp, probe
ggatgctgcctactttggtgagatc

SEQ ID NO: 253170 - DNA, 25 bp, probe
ggatctgcagttactttgaagacat

SEQ ID NO: 253171 - DNA, 25 bp, probe
ggatctggtgttacaatggaattca

SEQ ID NO: 253172 - DNA, 25 bp, probe
ggatctgttttccaagagattctga

SEQ ID NO: 253173 - DNA, 25 bp, probe
ggatcttctttggtttgatgttccc

SEQ ID NO: 253174 - DNA, 25 bp, probe
ggatcttttttgtgtatggcaccag

SEQ ID NO: 253175 - DNA, 25 bp, probe
ggattgttttagtgttggcagtaat

SEQ ID NO: 253176 - DNA, 25 bp, probe
ggatctggctgttgagttgacgggt

SEQ ID NO: 253177 - DNA, 25 bp, probe
ggttggcttgaaatgcatagcgttt

SEQ ID NO: 253178 - DNA, 25 bp, probe
ggattggctcgagatatcatgagtg

SEQ ID NO: 253179 - DNA, 25 bp, probe
ggattgtcaccagacctgcaatcta

SEQ ID NO: 253180 - DNA, 25 bp, probe
ggatcgtgaccagcacctataagga

SEQ ID NO: 253181 - DNA, 25 bp, probe
ggatctgctgcagaaccttctgaag

SEQ ID NO: 253182 - DNA, 25 bp, probe
ggatctgctgcagaaccttctgaag

SEQ ID NO: 253183 - DNA, 25 bp, probe
atgactacatcatgcacatccttat

SEQ ID NO: 253184 - DNA, 25 bp, probe
ggataccgcagctaggaataatgga

SEQ ID NO: 253185 - DNA, 25 bp, probe
ggatcacccagctgaaaatcgccag

SEQ ID NO: 253186 - DNA, 25 bp, probe
ggatgcccgctataccaatgggcac

SEQ ID NO: 253187 - DNA, 25 bp, probe
ggatcgcggcagcaacacgatcggc

SEQ ID NO: 253188 - DNA, 25 bp, probe
ggatcggaagcatcgacagcaccac

SEQ ID NO: 253189 - DNA, 25 bp, probe
ggatggtgaaaccgaagctcgactc

SEQ ID NO: 253190 - DNA, 25 bp, probe
ggattggaatagttcaagccgggcg

SEQ ID NO: 253191 - DNA, 25 bp, probe
ggattggaaacggatgacgggcctc

SEQ ID NO: 253192 - DNA, 25 bp, probe
ggattggaaacggatgacgggcctc

SEQ ID NO: 253193 - DNA, 25 bp, probe
ggacggaagatcgggagcgggtcct

SEQ ID NO: 253194 - DNA, 25 bp, probe
ggatcaggggacgggatggggtaca

SEQ ID NO: 253195 - DNA, 25 bp, probe
ggagatgctggtgaggggtccgtac

SEQ ID NO: 253196 - DNA, 25 bp, probe
ggatcactgtgtagggggacagctg

SEQ ID NO: 253197 - DNA, 25 bp, probe
ggatcactgtgtagggggacagctg

SEQ ID NO: 253198 - DNA, 25 bp, probe
ggatagtggtggggacagcaaggac

SEQ ID NO: 253199 - DNA, 25 bp, probe
ggatttggagacggaggaaggcagc

SEQ ID NO: 253200 - DNA, 25 bp, probe
ggatttgtgagtgctgggacggccc

SEQ ID NO: 253201 - DNA, 25 bp, probe
ggattctgtaatgctttacacaggc

SEQ ID NO: 253202 - DNA, 25 bp, probe
ggatccttgacaactttatcagcca

SEQ ID NO: 253203 - DNA, 25 bp, probe
tggtcgcttacatcactttactcca

SEQ ID NO: 253204 - DNA, 25 bp, probe
ggatcctttagttcattgtccacca

SEQ ID NO: 253205 - DNA, 25 bp, probe
ggatcctacatagggatctgaaacc

SEQ ID NO: 253206 - DNA, 25 bp, probe
ggatccggatgagcaattggaaacc

SEQ ID NO: 253207 - DNA, 25 bp, probe
ggatccatgggagcattctcaaagg

SEQ ID NO: 253208 - DNA, 25 bp, probe
ggatccatgggcacatcagagacaa

SEQ ID NO: 253209 - DNA, 25 bp, probe
ggatccattgagacgtatgaacagg

SEQ ID NO: 253210 - DNA, 25 bp, probe
ggatctcttggccacagataatagg

SEQ ID NO: 253211 - DNA, 25 bp, probe
ggatttctgctgctcgagaaaggaa

SEQ ID NO: 253212 - DNA, 25 bp, probe
ggatttgtctttggtgaacattgca

SEQ ID NO: 253213 - DNA, 25 bp, probe
ggattgtgttttgtcactctagaag

SEQ ID NO: 253214 - DNA, 25 bp, probe
ggaggccggattgtactgtatgggg

SEQ ID NO: 253215 - DNA, 25 bp, probe
ggaggacggacgttactctgtggac

SEQ ID NO: 253216 - DNA, 25 bp, probe
ggagggcggaagtagagtcctccaa

SEQ ID NO: 253217 - DNA, 25 bp, probe
ggagtggggtggttatgtttccatg

SEQ ID NO: 253218 - DNA, 25 bp, probe
ggttggtgtgggttcattggcattc

SEQ ID NO: 253219 - DNA, 25 bp, probe
ggttgggatgggataggactagcac

SEQ ID NO: 253220 - DNA, 25 bp, probe
ggttgggatgttctatggagctgcc

SEQ ID NO: 253221 - DNA, 25 bp, probe
ggatatgaccagtggctatggcctg

SEQ ID NO: 253222 - DNA, 25 bp, probe
ggttggaccaagctatgcaggtgac

SEQ ID NO: 253223 - DNA, 25 bp, probe
ggttggagcctccggagcagaggaa

SEQ ID NO: 253224 - DNA, 25 bp, probe
ggattgtacgtgggagaggcagaaa

SEQ ID NO: 253225 - DNA, 25 bp, probe
ggatttccaaggcacgtgcagcaaa

SEQ ID NO: 253226 - DNA, 25 bp, probe
ggatcttccaagagcaagtggagaa

SEQ ID NO: 253227 - DNA, 25 bp, probe
ggattatgcacttcccaattgggat

SEQ ID NO: 253228 - DNA, 25 bp, probe
ggattatgcacttcccaattgggat

SEQ ID NO: 253229 - DNA, 25 bp, probe
ggatattattaagcacattgtggca

SEQ ID NO: 253230 - DNA, 25 bp, probe
ggatgattactcggacaccgtgaag

SEQ ID NO: 253231 - DNA, 25 bp, probe
ggataaactaaacacgtgacacaaa

SEQ ID NO: 253232 - DNA, 25 bp, probe
ggataaactaaacacgtgacacaaa

SEQ ID NO: 253233 - DNA, 25 bp, probe
ggatagaacgcaaacaacttgatta

SEQ ID NO: 253234 - DNA, 25 bp, probe
tccatgaaaactaacaaccctttga

SEQ ID NO: 253235 - DNA, 25 bp, probe
ggatatacaacagaaaacactttga

SEQ ID NO: 253236 - DNA, 25 bp, probe
ggatgaacaccgtgaacctcagtta

SEQ ID NO: 253237 - DNA, 25 bp, probe
ggatgaacaccgtgaacctcagtta

SEQ ID NO: 253238 - DNA, 25 bp, probe
ggattacaggcgtgagccactgcgc

SEQ ID NO: 253239 - DNA, 25 bp, probe
ggattacaggcgtgagccactgcgc

SEQ ID NO: 253240 - DNA, 25 bp, probe
ggattacaggcgtaagccactgcgc

SEQ ID NO: 253241 - DNA, 25 bp, probe
ggagtaaccgtattgttcgcgtcat

SEQ ID NO: 253242 - DNA, 25 bp, probe
ggaggaaccgaggtgttgccagtgc

SEQ ID NO: 253243 - DNA, 25 bp, probe
ggaaaccctcgtggaggccgtgaat

SEQ ID NO: 253244 - DNA, 25 bp, probe
ggagaaccttcgtggtggaacaaat

SEQ ID NO: 253245 - DNA, 25 bp, probe
ggagaaccctggtgagtcgaatcac

SEQ ID NO: 253246 - DNA, 25 bp, probe
ggaaaccaggtaccgatggactgac

SEQ ID NO: 253247 - DNA, 25 bp, probe
ggataccgaggcaagagggcgacca

SEQ ID NO: 253248 - DNA, 25 bp, probe
ggatgagggggcaaaggtgacaaca

SEQ ID NO: 253249 - DNA, 25 bp, probe
ggatgagggggcaaaggtgacaaca

SEQ ID NO: 253250 - DNA, 25 bp, probe
ggatgccgtcagctgaggggaaaca

SEQ ID NO: 253251 - DNA, 25 bp, probe
ggatgccgcctttaactggagcaaa

SEQ ID NO: 253252 - DNA, 25 bp, probe
ggatcctgcgcttgatcaactgaac

SEQ ID NO: 253253 - DNA, 25 bp, probe
ggatattgacattgatacagtgaag

SEQ ID NO: 253254 - DNA, 25 bp, probe
ggatatgctccatgacaagtggtac

SEQ ID NO: 253255 - DNA, 25 bp, probe
ggattgcatgcaacaacaaaggcta

SEQ ID NO: 253256 - DNA, 25 bp, probe
ggatgacagatccataaagagagta

SEQ ID NO: 253257 - DNA, 25 bp, probe
ggatcagagctccatcagtaagact

SEQ ID NO: 253258 - DNA, 25 bp, probe
ggatgcaactcaaattcagatgatc

SEQ ID NO: 253259 - DNA, 25 bp, probe
ggatgctactgatgggaatgattaa

SEQ ID NO: 253260 - DNA, 25 bp, probe
ggatctcactgttgaggaaggccag

SEQ ID NO: 253261 - DNA, 25 bp, probe
ggatctgcctgaaaccaacatcctg

SEQ ID NO: 253262 - DNA, 25 bp, probe
ggattcgtgacaacatgcgaccgtg

SEQ ID NO: 253263 - DNA, 25 bp, probe
ggattcagaaattgatcaactcttc

SEQ ID NO: 253264 - DNA, 25 bp, probe
ggatattgactaactgagctccttc

SEQ ID NO: 253265 - DNA, 25 bp, probe
ggatcagtactgaactcagttccat

SEQ ID NO: 253266 - DNA, 25 bp, probe
ggataaatcgatactgctggccaat

SEQ ID NO: 253267 - DNA, 25 bp, probe
ggataaatcgatactgctggccaat

SEQ ID NO: 253268 - DNA, 25 bp, probe
ggatatgaataatagcatagcccat

SEQ ID NO: 253269 - DNA, 25 bp, probe
ggatatgaataatagcatagcccat

SEQ ID NO: 253270 - DNA, 25 bp, probe
ggatatggaacatggctctgagcag

SEQ ID NO: 253271 - DNA, 25 bp, probe
ggattgtcaacatgcagggcgagcc

SEQ ID NO: 253272 - DNA, 25 bp, probe
ggatcttcctcaagagaatgccctc

SEQ ID NO: 253273 - DNA, 25 bp, probe
ggatatacccatcatggtgacactg

SEQ ID NO: 253274 - DNA, 25 bp, probe
ggattaactgaggagctgttatctc

SEQ ID NO: 253275 - DNA, 25 bp, probe
ggagctgaacgtgtttggacctaat

SEQ ID NO: 253276 - DNA, 25 bp, probe
ggatccatacttgcatttggcacca

SEQ ID NO: 253277 - DNA, 25 bp, probe
ggattatacttggcatagtggcaca

SEQ ID NO: 253278 - DNA, 25 bp, probe
ggattcatcctggtctgagacctca

SEQ ID NO: 253279 - DNA, 25 bp, probe
ggattctcaatggatgctggattct

SEQ ID NO: 253280 - DNA, 25 bp, probe
ggattctcagtcatgaagatgtcat

SEQ ID NO: 253281 - DNA, 25 bp, probe
ggattctcagtcatgaagatgtcat

SEQ ID NO: 253282 - DNA, 25 bp, probe
ggatagctcattaagaagtgcagca

SEQ ID NO: 253283 - DNA, 25 bp, probe
ggatagctcattaagaagtgcagca

SEQ ID NO: 253284 - DNA, 25 bp, probe
ggatcgtcatgtgggaagtcatgtc

SEQ ID NO: 253285 - DNA, 25 bp, probe
ggatttctctgggcaaattgtcgcc

SEQ ID NO: 253286 - DNA, 25 bp, probe
ggagggccagggccaatttctgacc

SEQ ID NO: 253287 - DNA, 25 bp, probe
ggagaggccggcctcaaatctttcc

SEQ ID NO: 253288 - DNA, 25 bp, probe
ggaggccttcgggaagaggcttcct

SEQ ID NO: 253289 - DNA, 25 bp, probe
ggattgctctactggaaggacacgc

SEQ ID NO: 253290 - DNA, 25 bp, probe
ggattggctgtcattgcatcggacc

SEQ ID NO: 253291 - DNA, 25 bp, probe
ggattggtgagccagctgctggaat

SEQ ID NO: 253292 - DNA, 25 bp, probe
ggattggtgagccagctgctggaat

SEQ ID NO: 253293 - DNA, 25 bp, probe
ggattggtgagccagctgctggaat

SEQ ID NO: 253294 - DNA, 25 bp, probe
ggattgggcagaactgatgagatga

SEQ ID NO: 253295 - DNA, 25 bp, probe
ggattcctgccttttgatgatgaaa

SEQ ID NO: 253296 - DNA, 25 bp, probe
ggattgctctcccattatgagcatc

SEQ ID NO: 253297 - DNA, 25 bp, probe
ggattgcctgcttagatgataaaat

SEQ ID NO: 253298 - DNA, 25 bp, probe
ggaggactatattgtctaaaattag

SEQ ID NO: 253299 - DNA, 25 bp, probe
ggaggactatattgtctaaaattag

SEQ ID NO: 253300 - DNA, 25 bp, probe
ggatcttctaatggtccaaatcttt

SEQ ID NO: 253301 - DNA, 25 bp, probe
ggatttgctcaaggacacgaacctt

SEQ ID NO: 253302 - DNA, 25 bp, probe
ggatttgctcaaggacacgaacctt

SEQ ID NO: 253303 - DNA, 25 bp, probe
ggatactgcctactgacaaaaccta

SEQ ID NO: 253304 - DNA, 25 bp, probe
ggatatcactccgatgacacagaca

SEQ ID NO: 253305 - DNA, 25 bp, probe
ggatacctgcgcttgaaggacatca

SEQ ID NO: 253306 - DNA, 25 bp, probe
ggatacctgcgcttgaaggacatca

SEQ ID NO: 253307 - DNA, 25 bp, probe
ggatatccgacatgaagccagtgac

SEQ ID NO: 253308 - DNA, 25 bp, probe
ggatacttgaatggacctctataaa

SEQ ID NO: 253309 - DNA, 25 bp, probe
ggatcagttaagtacacttgaagga

SEQ ID NO: 253310 - DNA, 25 bp, probe
ggaagtaaagaatgctggaaagttg

SEQ ID NO: 253311 - DNA, 25 bp, probe
ggatcgaggacaccatagcggagaa

SEQ ID NO: 253312 - DNA, 25 bp, probe
ggatcggagccatcatcgcgccaaa

SEQ ID NO: 253313 - DNA, 25 bp, probe
ggatcgccatccggatcacggcaat

SEQ ID NO: 253314 - DNA, 25 bp, probe
ggattgctgctctccattaggagac

SEQ ID NO: 253315 - DNA, 25 bp, probe
ggatttgctctccggaaggaattct

SEQ ID NO: 253316 - DNA, 25 bp, probe
ggatttatgctcatgaactaaattt

SEQ ID NO: 253317 - DNA, 25 bp, probe
ggatttagtctgtagcacaaaaatt

SEQ ID NO: 253318 - DNA, 25 bp, probe
ggattgtagatatttcaccaagaat

SEQ ID NO: 253319 - DNA, 25 bp, probe
tagctgggtacatattaagtggctt

SEQ ID NO: 253320 - DNA, 25 bp, probe
ggattctgaatataacatatagcct

SEQ ID NO: 253321 - DNA, 25 bp, probe
ggattctgatcctttcaatatacgt

SEQ ID NO: 253322 - DNA, 25 bp, probe
ggattctgatcctttcaatatacgt

SEQ ID NO: 253323 - DNA, 25 bp, probe
ggatattagccattccgaaatctgt

SEQ ID NO: 253324 - DNA, 25 bp, probe
ggatattagccattccgaaatctgt

SEQ ID NO: 253325 - DNA, 25 bp, probe
ggattgaaccttactacagcatcta

SEQ ID NO: 253326 - DNA, 25 bp, probe
ggattgaaccttactacagcatcta

SEQ ID NO: 253327 - DNA, 25 bp, probe
ggattgagaactcttcagccatgat

SEQ ID NO: 253328 - DNA, 25 bp, probe
ggaaagcatcctctccaaagttgga

SEQ ID NO: 253329 - DNA, 25 bp, probe
ggaaaacgtgttctaatcttaggcg

SEQ ID NO: 253330 - DNA, 25 bp, probe
ggatgcaaactgttatgtaaatctg

SEQ ID NO: 253331 - DNA, 25 bp, probe
ggatctgaactgttgcttaaagaga

SEQ ID NO: 253332 - DNA, 25 bp, probe
ggatctgaactgttgcttaaagaga

SEQ ID NO: 253333 - DNA, 25 bp, probe
ggatctagacagcatctgttcaaag

SEQ ID NO: 253334 - DNA, 25 bp, probe
ggatcaattcggtgattgcaaataa

SEQ ID NO: 253335 - DNA, 25 bp, probe
ggatatatcctcatggctcgaaata

SEQ ID NO: 253336 - DNA, 25 bp, probe
ggattacctttggatccatttgtca

SEQ ID NO: 253337 - DNA, 25 bp, probe
ggatgaactcttcgagtccatccgt

SEQ ID NO: 253338 - DNA, 25 bp, probe
ggaggactctatttggatcctggat

SEQ ID NO: 253339 - DNA, 25 bp, probe
ggatgaggccagatacagtcctgga

SEQ ID NO: 253340 - DNA, 25 bp, probe
ggatagggcactgaggggtggcgcg

SEQ ID NO: 253341 - DNA, 25 bp, probe
ggatagggcactgaggggtggcgcg

SEQ ID NO: 253342 - DNA, 25 bp, probe
ggatcaggtgccaaaggtgatgtgg

SEQ ID NO: 253343 - DNA, 25 bp, probe
ggatctggaacatatgagctatttg

SEQ ID NO: 253344 - DNA, 25 bp, probe
ggatccagaaactagagttcatgtt

SEQ ID NO: 253345 - DNA, 25 bp, probe
ggatgccaacaatgtgacttatgtc

SEQ ID NO: 253346 - DNA, 25 bp, probe
ggatacgacaacttgcacgtatttt

SEQ ID NO: 253347 - DNA, 25 bp, probe
ggattttcaacatctggttcattta

SEQ ID NO: 253348 - DNA, 25 bp, probe
ggatatcactgagacctggtttttt

SEQ ID NO: 253349 - DNA, 25 bp, probe
ggattcaagaatcactgctggttgt

SEQ ID NO: 253350 - DNA, 25 bp, probe
ggattattgatagtactcttggttt

SEQ ID NO: 253351 - DNA, 25 bp, probe
ggattagtaatgtgcattcaggtga

SEQ ID NO: 253352 - DNA, 25 bp, probe
ggattcatgtcagggtgattctggt

SEQ ID NO: 253353 - DNA, 25 bp, probe
ggagcatctgaagttgcagtcttgc

SEQ ID NO: 253354 - DNA, 25 bp, probe
ggatcatcataagttgtatctgggc

SEQ ID NO: 253355 - DNA, 25 bp, probe
ggatacaatggctgtttggttccag

SEQ ID NO: 253356 - DNA, 25 bp, probe
ggatacagggcccttttttgcaggc

SEQ ID NO: 253357 - DNA, 25 bp, probe
ggatacggacctcttaaagcacacc

SEQ ID NO: 253358 - DNA, 25 bp, probe
ggatgaagggctgcgcttaaaacac

SEQ ID NO: 253359 - DNA, 25 bp, probe
ggatgaagggctgcgcttaaaacac

SEQ ID NO: 253360 - DNA, 25 bp, probe
ggataaggccagggtaccatggaga

SEQ ID NO: 253361 - DNA, 25 bp, probe
ggctttggcagcaggttcactgtta

SEQ ID NO: 253362 - DNA, 25 bp, probe
ggattattctgcaggttcatctcag

SEQ ID NO: 253363 - DNA, 25 bp, probe
ggataaactgagcctgttcattctg

SEQ ID NO: 253364 - DNA, 25 bp, probe
ggataacagcagtatcggccttgtg

SEQ ID NO: 253365 - DNA, 25 bp, probe
ggatatctacagcaccgactattac

SEQ ID NO: 253366 - DNA, 25 bp, probe
ggcagttaaatatcctctactacct

SEQ ID NO: 253367 - DNA, 25 bp, probe
ggcgtttcctactcctaatgagagt

SEQ ID NO: 253368 - DNA, 25 bp, probe
ggatttttctacttcttcagtggat

SEQ ID NO: 253369 - DNA, 25 bp, probe
ggatcttcatttaatgtttactgtt

SEQ ID NO: 253370 - DNA, 25 bp, probe
ggattctctttaatattgtacagtt

SEQ ID NO: 253371 - DNA, 25 bp, probe
ggatttacttctaactgtgatcagt

SEQ ID NO: 253372 - DNA, 25 bp, probe
ggatttgacttcagccaggtgaact

SEQ ID NO: 253373 - DNA, 25 bp, probe
ggatgcttgagtcttaccgtaattg

SEQ ID NO: 253374 - DNA, 25 bp, probe
ggatgatggttgattacctgtaccg

SEQ ID NO: 253375 - DNA, 25 bp, probe
ggatgactatgtcttagaagttcgg

SEQ ID NO: 253376 - DNA, 25 bp, probe
ggatttagtgccactgaagcctgcg

SEQ ID NO: 253377 - DNA, 25 bp, probe
ggatattgttgccatcaatgacccc

SEQ ID NO: 253378 - DNA, 25 bp, probe
ggatagtggatggcattgaggactc

SEQ ID NO: 253379 - DNA, 25 bp, probe
ggattttgtgcctgtgcagattgca

SEQ ID NO: 253380 - DNA, 25 bp, probe
ggattttgtcgcagtcacgatcaac

SEQ ID NO: 253381 - DNA, 25 bp, probe
ggattttcaagttgtccagacactc

SEQ ID NO: 253382 - DNA, 25 bp, probe
ggattattcaagaattctaccaaat

SEQ ID NO: 253383 - DNA, 25 bp, probe
ggattacatcataaacctcccataa

SEQ ID NO: 253384 - DNA, 25 bp, probe
ggataacaaaaactccctcattagc

SEQ ID NO: 253385 - DNA, 25 bp, probe
ggatacaaaagcagagctcccatct

SEQ ID NO: 253386 - DNA, 25 bp, probe
ggatacaaaagcagagctcccatct

SEQ ID NO: 253387 - DNA, 25 bp, probe
ggatatcagtgaaggtctctccctc

SEQ ID NO: 253388 - DNA, 25 bp, probe
ggatatcagtattttccctcaatca

SEQ ID NO: 253389 - DNA, 25 bp, probe
ggatatctgtgtatatgcccgtatg

SEQ ID NO: 253390 - DNA, 25 bp, probe
ggatcatctacaagattgtccgtag

SEQ ID NO: 253391 - DNA, 25 bp, probe
ggatattcagatgtatgtgcccttc

SEQ ID NO: 253392 - DNA, 25 bp, probe
ggatgactcatagaatggccttttt

SEQ ID NO: 253393 - DNA, 25 bp, probe
ggatgagccagaggccgagccatat

SEQ ID NO: 253394 - DNA, 25 bp, probe
ggatagcaagaccacagcgctgatc

SEQ ID NO: 253395 - DNA, 25 bp, probe
ggatagcaagaccacagcgctgatc

SEQ ID NO: 253396 - DNA, 25 bp, probe
ggatccagagacctgctccagatcc

SEQ ID NO: 253397 - DNA, 25 bp, probe
ggatccagaattttcactgcagcca

SEQ ID NO: 253398 - DNA, 25 bp, probe
ggatccagaattttcactgcagcca

SEQ ID NO: 253399 - DNA, 25 bp, probe
ggatctcagtcaaaggcattcgcca

SEQ ID NO: 253400 - DNA, 25 bp, probe
ggatgatttcactaggcatttggca

SEQ ID NO: 253401 - DNA, 25 bp, probe
ggatataattcatgcgctcgatgta

SEQ ID NO: 253402 - DNA, 25 bp, probe
ggatataattcatgcgctcgatgta

SEQ ID NO: 253403 - DNA, 25 bp, probe
ggatatatatcctcctgagaaagac

SEQ ID NO: 253404 - DNA, 25 bp, probe
ggatctaagccaggcctggaagtcc

SEQ ID NO: 253405 - DNA, 25 bp, probe
ggatgtaagcctggcccataatgtg

SEQ ID NO: 253406 - DNA, 25 bp, probe
ggatgtaagcctggcccataatgtg

SEQ ID NO: 253407 - DNA, 25 bp, probe
ggatgaatatgatgtcctcatagaa

SEQ ID NO: 253408 - DNA, 25 bp, probe
ggatcaatcacattagctcctggaa

SEQ ID NO: 253409 - DNA, 25 bp, probe
ggatctcaaccaagcacatatggag

SEQ ID NO: 253410 - DNA, 25 bp, probe
ggatgcatcacactcaaggacagga

SEQ ID NO: 253411 - DNA, 25 bp, probe
ggatgaacctatgggagaggacgag

SEQ ID NO: 253412 - DNA, 25 bp, probe
ggatgaacctatgggagaggacgag

SEQ ID NO: 253413 - DNA, 25 bp, probe
ggatccattttgtggatggcaccag

SEQ ID NO: 253414 - DNA, 25 bp, probe
ggatccattttgtggatggcaccag

SEQ ID NO: 253415 - DNA, 25 bp, probe
ggatgccataaagaggatcgaccag

SEQ ID NO: 253416 - DNA, 25 bp, probe
ggagttcaagtccgacaacaccgtg

SEQ ID NO: 253417 - DNA, 25 bp, probe
ggagttcaagtccgacaacaccgtg

SEQ ID NO: 253418 - DNA, 25 bp, probe
ggagttcaagtccgacaacaccgtg

SEQ ID NO: 253419 - DNA, 25 bp, probe
ggagttcaagtccgacaacaccgtg

SEQ ID NO: 253420 - DNA, 25 bp, probe
ggattacatagtcaacgagcctcct

SEQ ID NO: 253421 - DNA, 25 bp, probe
ggattacatagtcaacgagcctcct

SEQ ID NO: 253422 - DNA, 25 bp, probe
ggatgtgaccgtcaaaatgcgcccc

SEQ ID NO: 253423 - DNA, 25 bp, probe
ggattatattgtctcaacatggtcc

SEQ ID NO: 253424 - DNA, 25 bp, probe
ggatgtgtctggtttcctaggtgac

SEQ ID NO: 253425 - DNA, 25 bp, probe
ggatgccagtggaatcacctgtggg

SEQ ID NO: 253426 - DNA, 25 bp, probe
ggatgtcgaaaacctcatctacgag

SEQ ID NO: 253427 - DNA, 25 bp, probe
ggagatcgtcaagtacgaccgcgag

SEQ ID NO: 253428 - DNA, 25 bp, probe
ggagatcgtcaagtacgaccgcgag

SEQ ID NO: 253429 - DNA, 25 bp, probe
ggatgcctgtaaggatcccgggagc

SEQ ID NO: 253430 - DNA, 25 bp, probe
ggatgccctacaggactctagtggt

SEQ ID NO: 253431 - DNA, 25 bp, probe
ggattattacaggatctatgtaggt

SEQ ID NO: 253432 - DNA, 25 bp, probe
ggataactacagtactgcttcatct

SEQ ID NO: 253433 - DNA, 25 bp, probe
ggataatgaagtgatcatcttcttc

SEQ ID NO: 253434 - DNA, 25 bp, probe
ggatcagaagttgtcactcattgtc

SEQ ID NO: 253435 - DNA, 25 bp, probe
ggataagcagttgccagtgacattc

SEQ ID NO: 253436 - DNA, 25 bp, probe
ggatgaagagaggtccagtatgctt

SEQ ID NO: 253437 - DNA, 25 bp, probe
ggataaagatgacttcgtagcagca

SEQ ID NO: 253438 - DNA, 25 bp, probe
ggataaagatggctctggcaagctg

SEQ ID NO: 253439 - DNA, 25 bp, probe
ggatagatcgaggacctggcgagta

SEQ ID NO: 253440 - DNA, 25 bp, probe
ggatagatcgaggacctggcgagta

SEQ ID NO: 253441 - DNA, 25 bp, probe
ggatgtgatccggcatccttgagtt

SEQ ID NO: 253442 - DNA, 25 bp, probe
ggatatcatctagtgatcttttgca

SEQ ID NO: 253443 - DNA, 25 bp, probe
ggatatcatctagtgatcttttgca

SEQ ID NO: 253444 - DNA, 25 bp, probe
ggatactcatcagtcctgattagcc

SEQ ID NO: 253445 - DNA, 25 bp, probe
ggatgtacagcagttctacgacctg

SEQ ID NO: 253446 - DNA, 25 bp, probe
ggatctgcacagtcttctaagtcac

SEQ ID NO: 253447 - DNA, 25 bp, probe
ggatcaccaactacagcaagaacta

SEQ ID NO: 253448 - DNA, 25 bp, probe
ggatcacaacacatcaataaactga

SEQ ID NO: 253449 - DNA, 25 bp, probe
ggaccaacctcagaaaagccaactc

SEQ ID NO: 253450 - DNA, 25 bp, probe
ggaccaacctcagaaaagccaactc

SEQ ID NO: 253451 - DNA, 25 bp, probe
ggagggacactctaacacaactttc

SEQ ID NO: 253452 - DNA, 25 bp, probe
ggaggctgcaacatacctcaatcct

SEQ ID NO: 253453 - DNA, 25 bp, probe
ggagattaaccgtcggcacatcact

SEQ ID NO: 253454 - DNA, 25 bp, probe
ggatgatgagattacgggagacaca

SEQ ID NO: 253455 - DNA, 25 bp, probe
ggatatgtgaaatttgtagaactgg

SEQ ID NO: 253456 - DNA, 25 bp, probe
ggatcatgataacacttcaccactc

SEQ ID NO: 253457 - DNA, 25 bp, probe
ggatagattgaaactgccagcttcc

SEQ ID NO: 253458 - DNA, 25 bp, probe
ggatagatgatgaaatcccccctcc

SEQ ID NO: 253459 - DNA, 25 bp, probe
ggatattgtggaatcatcatcgccc

SEQ ID NO: 253460 - DNA, 25 bp, probe
ggatcattgatccgatcgacggcac

SEQ ID NO: 253461 - DNA, 25 bp, probe
ggatcactgtgtcacaactgtcatc

SEQ ID NO: 253462 - DNA, 25 bp, probe
ggatatgtgttggaaaactgctttc

SEQ ID NO: 253463 - DNA, 25 bp, probe
ggatcattggagagaagtctttccg

SEQ ID NO: 253464 - DNA, 25 bp, probe
ggagactgaagcagaaaccctgcac

SEQ ID NO: 253465 - DNA, 25 bp, probe
tggatgactacttaaacaccccact

SEQ ID NO: 253466 - DNA, 25 bp, probe
tggatgactacttaaacaccccact

SEQ ID NO: 253467 - DNA, 25 bp, probe
ggatgactctgcaaaagtgaccccc

SEQ ID NO: 253468 - DNA, 25 bp, probe
ggacattctgtaaactgtccctccc

SEQ ID NO: 253469 - DNA, 25 bp, probe
ggatctttggaatctcttggttcct

SEQ ID NO: 253470 - DNA, 25 bp, probe
ggatcaactgtacgcctttggtatc

SEQ ID NO: 253471 - DNA, 25 bp, probe
ggatcaacagaacttctttgtcttc

SEQ ID NO: 253472 - DNA, 25 bp, probe
ggatcaacagaacttctttgtcttc

SEQ ID NO: 253473 - DNA, 25 bp, probe
ggatcccagcaagctatcttgtctc

SEQ ID NO: 253474 - DNA, 25 bp, probe
ggatgaccagaaatttctggattcc

SEQ ID NO: 253475 - DNA, 25 bp, probe
ggagccaaaaatattgagaccccca

SEQ ID NO: 253476 - DNA, 25 bp, probe
ggagaaaagcttatgaacaccaact

SEQ ID NO: 253477 - DNA, 25 bp, probe
ggagatcagcaagttaattaccaaa

SEQ ID NO: 253478 - DNA, 25 bp, probe
ggagatcagcaagttaattaccaaa

SEQ ID NO: 253479 - DNA, 25 bp, probe
ggagtcggttagtcattgatagaac

SEQ ID NO: 253480 - DNA, 25 bp, probe
ggatgaaaggcctcttgtccgatcc

SEQ ID NO: 253481 - DNA, 25 bp, probe
ggatcagtaccacttttgctacgat

SEQ ID NO: 253482 - DNA, 25 bp, probe
ggatgagtaccagttctgttaccag

SEQ ID NO: 253483 - DNA, 25 bp, probe
ggatgattacagtttctgggcccta

SEQ ID NO: 253484 - DNA, 25 bp, probe
ggatagcatacacgctggtgggcca

SEQ ID NO: 253485 - DNA, 25 bp, probe
ggatagcatacacgctggtgggcca

SEQ ID NO: 253486 - DNA, 25 bp, probe
ggatatcgacagcagattatctcca

SEQ ID NO: 253487 - DNA, 25 bp, probe
ggatatccacatcaatggacaaagc

SEQ ID NO: 253488 - DNA, 25 bp, probe
ggatatccacatcaatggacaaagc

SEQ ID NO: 253489 - DNA, 25 bp, probe
ggatattgctcaaaattatataatc

SEQ ID NO: 253490 - DNA, 25 bp, probe
ggatactgcttattttatgatagtt

SEQ ID NO: 253491 - DNA, 25 bp, probe
ggaggtgcatttataattcagtctg

SEQ ID NO: 253492 - DNA, 25 bp, probe
ggatgtctggttcatactccagcct

SEQ ID NO: 253493 - DNA, 25 bp, probe
ggatacctgttttactatcagccaa

SEQ ID NO: 253494 - DNA, 25 bp, probe
ggatttggctttgactatagcacaa

SEQ ID NO: 253495 - DNA, 25 bp, probe
ggatttgccaattccactcattaca

SEQ ID NO: 253496 - DNA, 25 bp, probe
ggatgtcagacaataccactggtta

SEQ ID NO: 253497 - DNA, 25 bp, probe
ggatcttacaaaatcacagagctct

SEQ ID NO: 253498 - DNA, 25 bp, probe
ggatcatgtaaatgctcaaagatgt

SEQ ID NO: 253499 - DNA, 25 bp, probe
ggatcatgtaaatgctcaaagatgt

SEQ ID NO: 253500 - DNA, 25 bp, probe
ggatcagagaacttgccagatagaa

SEQ ID NO: 253501 - DNA, 25 bp, probe
ggatcagagaacttgccagatagaa

SEQ ID NO: 253502 - DNA, 25 bp, probe
ggatgcacgagactggttgatgaaa

SEQ ID NO: 253503 - DNA, 25 bp, probe
ggatacagagcagtgcctttgaaga

SEQ ID NO: 253504 - DNA, 25 bp, probe
ggatcaagagagaccttctacagga

SEQ ID NO: 253505 - DNA, 25 bp, probe
ggataaggggtcatcaatgctggca

SEQ ID NO: 253506 - DNA, 25 bp, probe
ggataatggaggcctggactctgag

SEQ ID NO: 253507 - DNA, 25 bp, probe
ggatggaagaggcctccatcttcgt

SEQ ID NO: 253508 - DNA, 25 bp, probe
ggatgggaagtactggcgattctct

SEQ ID NO: 253509 - DNA, 25 bp, probe
ggatgggtggggagcaaatcatctg

SEQ ID NO: 253510 - DNA, 25 bp, probe
ggatgtagtcctggtgagaatttat

SEQ ID NO: 253511 - DNA, 25 bp, probe
ggatatctgtcccttcagacattta

SEQ ID NO: 253512 - DNA, 25 bp, probe
ggatatgatgtccgctctgatgtct

SEQ ID NO: 253513 - DNA, 25 bp, probe
ggatctgcatgcacaatctgggtcc

SEQ ID NO: 253514 - DNA, 25 bp, probe
ggatctgcatgcacaatctgggtcc

SEQ ID NO: 253515 - DNA, 25 bp, probe
ggatccagctgtgagatgctgcgct

SEQ ID NO: 253516 - DNA, 25 bp, probe
ggatccagctgtgagatgctgcgct

SEQ ID NO: 253517 - DNA, 25 bp, probe
ggatcgcctgtcagttgagtgtcgg

SEQ ID NO: 253518 - DNA, 25 bp, probe
ggatgcgactgtagggtgggtcctg

SEQ ID NO: 253519 - DNA, 25 bp, probe
ggatgcgactgtagggtgggtcctg

SEQ ID NO: 253520 - DNA, 25 bp, probe
ggatctagtgttgctgcgagtgacc

SEQ ID NO: 253521 - DNA, 25 bp, probe
ggatcattgttcacatggaagagcc

SEQ ID NO: 253522 - DNA, 25 bp, probe
ggatcttcagtcacattgacgacct

SEQ ID NO: 253523 - DNA, 25 bp, probe
ggatcttgagtcccattagctgtga

SEQ ID NO: 253524 - DNA, 25 bp, probe
ggatctgggctcaagttgagctgta

SEQ ID NO: 253525 - DNA, 25 bp, probe
ggatctggggcctacagatcagtag

SEQ ID NO: 253526 - DNA, 25 bp, probe
ggatgctgtgtagataagtaagaag

SEQ ID NO: 253527 - DNA, 25 bp, probe
ggatgctgtgttgtcaacaaaccaa

SEQ ID NO: 253528 - DNA, 25 bp, probe
ggatgcttgaagctgtacaaaagct

SEQ ID NO: 253529 - DNA, 25 bp, probe
ggatgcttgaagctgtacaaaagct

SEQ ID NO: 253530 - DNA, 25 bp, probe
ggatcctatggactccaaacaagct

SEQ ID NO: 253531 - DNA, 25 bp, probe
ggatcgctttaatgcaagacaattc

SEQ ID NO: 253532 - DNA, 25 bp, probe
ggatcacagttacacaggagaggtt

SEQ ID NO: 253533 - DNA, 25 bp, probe
ggatacacttgatgagagatgagag

SEQ ID NO: 253534 - DNA, 25 bp, probe
ggatcctcttcatgcacaagatgag

SEQ ID NO: 253535 - DNA, 25 bp, probe
ggatcagcttccacagcatcaagca

SEQ ID NO: 253536 - DNA, 25 bp, probe
ggatgcctcctgaaagcatcatgta

SEQ ID NO: 253537 - DNA, 25 bp, probe
ggatctattcttcagatattcaaaa

SEQ ID NO: 253538 - DNA, 25 bp, probe
ggatcttactgcacagctttctgag

SEQ ID NO: 253539 - DNA, 25 bp, probe
ggatcttactgcacagctttctgag

SEQ ID NO: 253540 - DNA, 25 bp, probe
ggatctgatcccagttttctggaag

SEQ ID NO: 253541 - DNA, 25 bp, probe
ggagttaccttgttttctggacagt

SEQ ID NO: 253542 - DNA, 25 bp, probe
ggaggtactttgtcccaaaaagatg

SEQ ID NO: 253543 - DNA, 25 bp, probe
ggatgggacttttgtcatttcaaag

SEQ ID NO: 253544 - DNA, 25 bp, probe
ggataggtgtttggtaatgttgaag

SEQ ID NO: 253545 - DNA, 25 bp, probe
ggatctgcacagtttggtttttgca

SEQ ID NO: 253546 - DNA, 25 bp, probe
ggatctgctatgtcttcgtgtttgc

SEQ ID NO: 253547 - DNA, 25 bp, probe
ggatcagttgtctcagctgatttca

SEQ ID NO: 253548 - DNA, 25 bp, probe
ggatcaacgatatcaatgagttctt

SEQ ID NO: 253549 - DNA, 25 bp, probe
ggatcaacttgaacgaatatttctg

SEQ ID NO: 253550 - DNA, 25 bp, probe
ggatcaacttgaacgaatatttctg

SEQ ID NO: 253551 - DNA, 25 bp, probe
ggatacaccagggcgagcattttcg

SEQ ID NO: 253552 - DNA, 25 bp, probe
ggatacagccaaggctggcttctgg

SEQ ID NO: 253553 - DNA, 25 bp, probe
ggatcacatcactggaagctccatg

SEQ ID NO: 253554 - DNA, 25 bp, probe
ggatatccagagcgagcgcttcagg

SEQ ID NO: 253555 - DNA, 25 bp, probe
ggatatccaagctggtcccatggat

SEQ ID NO: 253556 - DNA, 25 bp, probe
ggataccaatgaggtgacccaggag

SEQ ID NO: 253557 - DNA, 25 bp, probe
ggatgacggatgaggactctgggct

SEQ ID NO: 253558 - DNA, 25 bp, probe
ggatcggggcagagactcaggagcc

SEQ ID NO: 253559 - DNA, 25 bp, probe
ggatcggggcagagactcaggagcc

SEQ ID NO: 253560 - DNA, 25 bp, probe
ggatcggtgtgaaataacgggccca

SEQ ID NO: 253561 - DNA, 25 bp, probe
ggatggggtactacaacgggcacac

SEQ ID NO: 253562 - DNA, 25 bp, probe
ggatggggtactacaacgggcacac

SEQ ID NO: 253563 - DNA, 25 bp, probe
ggatggggagacacatttcgtcctc

SEQ ID NO: 253564 - DNA, 25 bp, probe
ggagggggacaggcattgttgccag

SEQ ID NO: 253565 - DNA, 25 bp, probe
ggatgaggagggcgtgtggtgctat

SEQ ID NO: 253566 - DNA, 25 bp, probe
ggatggggagtcggttagtcattga

SEQ ID NO: 253567 - DNA, 25 bp, probe
ggagcaaaaggcggttcgtcttcaa

SEQ ID NO: 253568 - DNA, 25 bp, probe
ggagcaaaaggcggttcgtcttcaa

SEQ ID NO: 253569 - DNA, 25 bp, probe
ggacaaaagggcatgctggttccta

SEQ ID NO: 253570 - DNA, 25 bp, probe
ggagcagaaaagcaggggtgtcgtc

SEQ ID NO: 253571 - DNA, 25 bp, probe
ggatctccaagacggatggcgtttg

SEQ ID NO: 253572 - DNA, 25 bp, probe
tctatgttacggtgatgggtttgac

SEQ ID NO: 253573 - DNA, 25 bp, probe
tgaattatccggtcgggttttattg

SEQ ID NO: 253574 - DNA, 25 bp, probe
ggatctgatcctttctggtttttat

SEQ ID NO: 253575 - DNA, 25 bp, probe
ggatctattatgttatgtgtctatt

SEQ ID NO: 253576 - DNA, 25 bp, probe
ggatctattatgttatgtgtctatt

SEQ ID NO: 253577 - DNA, 25 bp, probe
ggatatggtgcatttcttgtctact

SEQ ID NO: 253578 - DNA, 25 bp, probe
ggatatgtgtgcaatttttgtatgt

SEQ ID NO: 253579 - DNA, 25 bp, probe
ggatgattgctcgattgtttggttt

SEQ ID NO: 253580 - DNA, 25 bp, probe
ggatgattgctcgattgtttggttt

SEQ ID NO: 253581 - DNA, 25 bp, probe
ggatgacactaattgttagctgttt

SEQ ID NO: 253582 - DNA, 25 bp, probe
ggaccatctcagtctttatttgtgt

SEQ ID NO: 253583 - DNA, 25 bp, probe
ggatcacttgagcctattagttgga

SEQ ID NO: 253584 - DNA, 25 bp, probe
ggatctttgagcttgtggaggtggt

SEQ ID NO: 253585 - DNA, 25 bp, probe
ggatctctggagccttggagttctt

SEQ ID NO: 253586 - DNA, 25 bp, probe
ggatctctggagccttggagttctt

SEQ ID NO: 253587 - DNA, 25 bp, probe
ggatcattggatctcaggagttgga

SEQ ID NO: 253588 - DNA, 25 bp, probe
ggatcacttgaggtcaggagttgga

SEQ ID NO: 253589 - DNA, 25 bp, probe
ggatcgcttgaggccaggagtttga

SEQ ID NO: 253590 - DNA, 25 bp, probe
ggatcacttgaggccaggagtttga

SEQ ID NO: 253591 - DNA, 25 bp, probe
ggatcactggaggccaagagttgga

SEQ ID NO: 253592 - DNA, 25 bp, probe
ggatcctaggaagaggtctgatgac

SEQ ID NO: 253593 - DNA, 25 bp, probe
ggatcaccgtgaaggaagtggacct

SEQ ID NO: 253594 - DNA, 25 bp, probe
ggatcaccgtgaaggaagtggacct

SEQ ID NO: 253595 - DNA, 25 bp, probe
ggacccttgaaggtcacttagcctt

SEQ ID NO: 253596 - DNA, 25 bp, probe
tgaaccgtttagggcaaatcaccct

SEQ ID NO: 253597 - DNA, 25 bp, probe
ggatccagtaaattgtcaaataccc

SEQ ID NO: 253598 - DNA, 25 bp, probe
ggatccatcatatagttcaaccatg

SEQ ID NO: 253599 - DNA, 25 bp, probe
ggatgccaatagtcagttcaccagc

SEQ ID NO: 253600 - DNA, 25 bp, probe
ggatgccaatagtcagttcaccagc

SEQ ID NO: 253601 - DNA, 25 bp, probe
ggatgccaaaaacttactcgatgtc

SEQ ID NO: 253602 - DNA, 25 bp, probe
ggatccaaaaaaccattcaggccaa

SEQ ID NO: 253603 - DNA, 25 bp, probe
ggatccaaataaacgccttggtgga

SEQ ID NO: 253604 - DNA, 25 bp, probe
ggatcccatcagaaaacctttgagg

SEQ ID NO: 253605 - DNA, 25 bp, probe
tggggcctcattaaccctttagaga

SEQ ID NO: 253606 - DNA, 25 bp, probe
tggggcctcattaaccctttagaga

SEQ ID NO: 253607 - DNA, 25 bp, probe
ggatagccttgttatctactttagg

SEQ ID NO: 253608 - DNA, 25 bp, probe
ggaggcccttcatgtagttcttggc

SEQ ID NO: 253609 - DNA, 25 bp, probe
ggacgagcccagtgtagttgtgtgg

SEQ ID NO: 253610 - DNA, 25 bp, probe
ggacgaagccatccgattcttggtc

SEQ ID NO: 253611 - DNA, 25 bp, probe
ggatcagtagttcctacccatagtc

SEQ ID NO: 253612 - DNA, 25 bp, probe
ggatcagtagttcctacccatagtc

SEQ ID NO: 253613 - DNA, 25 bp, probe
ggatcttttcatcctaccagatgag

SEQ ID NO: 253614 - DNA, 25 bp, probe
ggatgtttatcatgttccaggatca

SEQ ID NO: 253615 - DNA, 25 bp, probe
ggatgtttatcatgttccaggatca

SEQ ID NO: 253616 - DNA, 25 bp, probe
ggatgctttatcagatccaaagaaa

SEQ ID NO: 253617 - DNA, 25 bp, probe
ggatcttttcatcctcgagacagga

SEQ ID NO: 253618 - DNA, 25 bp, probe
ggatgtattactccttagccatggc

SEQ ID NO: 253619 - DNA, 25 bp, probe
ggatgtattactccttagccatggc

SEQ ID NO: 253620 - DNA, 25 bp, probe
ggatgtatggtcactgggctgtgtc

SEQ ID NO: 253621 - DNA, 25 bp, probe
ggatgtggtgacattgttttgtcaa

SEQ ID NO: 253622 - DNA, 25 bp, probe
ggagggtcctattgtttgggacaca

SEQ ID NO: 253623 - DNA, 25 bp, probe
ggagggactctttagtcttgggatt

SEQ ID NO: 253624 - DNA, 25 bp, probe
ggagggtgaaagtgattatgggaat

SEQ ID NO: 253625 - DNA, 25 bp, probe
ggatgggaaaggtgtgtttgcagtg

SEQ ID NO: 253626 - DNA, 25 bp, probe
ggaggagctgaagatggtgaactca

SEQ ID NO: 253627 - DNA, 25 bp, probe
ggaggaaggcagctggtatattcag

SEQ ID NO: 253628 - DNA, 25 bp, probe
ggatgaccggagcaggataattgaa

SEQ ID NO: 253629 - DNA, 25 bp, probe
ggatgaccggagcaggataattgaa

SEQ ID NO: 253630 - DNA, 25 bp, probe
ggatgttcggggtgacactgtggga

SEQ ID NO: 253631 - DNA, 25 bp, probe
tggagtttgggggaaggggaatcat

SEQ ID NO: 253632 - DNA, 25 bp, probe
ggacccggaggctcacagggaacaa

SEQ ID NO: 253633 - DNA, 25 bp, probe
ggacccggaggctcacagggaacaa

SEQ ID NO: 253634 - DNA, 25 bp, probe
ggatcccggggacatgatgcgggaa

SEQ ID NO: 253635 - DNA, 25 bp, probe
ggatgcccaaggccagaatgacggg

SEQ ID NO: 253636 - DNA, 25 bp, probe
ggatcctcacagtcatggaggcacc

SEQ ID NO: 253637 - DNA, 25 bp, probe
ggatactcacattaggaggaccatg

SEQ ID NO: 253638 - DNA, 25 bp, probe
ggatactcacattaggaggaccatg

SEQ ID NO: 253639 - DNA, 25 bp, probe
ggatacatctcgaggccagtcatcc

SEQ ID NO: 253640 - DNA, 25 bp, probe
ggatactacgcttgctgaagttcac

SEQ ID NO: 253641 - DNA, 25 bp, probe
ggatgtcaaaccctgaagtgatccg

SEQ ID NO: 253642 - DNA, 25 bp, probe
ggatccatggacggagacagggccg

SEQ ID NO: 253643 - DNA, 25 bp, probe
ggatgaatttctgggccaggtgcac

SEQ ID NO: 253644 - DNA, 25 bp, probe
ggatgaatttctgggccaggtgcac

SEQ ID NO: 253645 - DNA, 25 bp, probe
ggatggtgctgtctatgcacaggtg

SEQ ID NO: 253646 - DNA, 25 bp, probe
ggatggctgctggtttcacagaagt

SEQ ID NO: 253647 - DNA, 25 bp, probe
ggatcgggcctcttcatggaagata

SEQ ID NO: 253648 - DNA, 25 bp, probe
ggatggagggtatctggatcaaccc

SEQ ID NO: 253649 - DNA, 25 bp, probe
ggatggaagggaaccttccagccaa

SEQ ID NO: 253650 - DNA, 25 bp, probe
ggatgcaaggggtgccataccctac

SEQ ID NO: 253651 - DNA, 25 bp, probe
ggataacgggaaagccagccctctc

SEQ ID NO: 253652 - DNA, 25 bp, probe
ggatgatacaagtagggccaacccc

SEQ ID NO: 253653 - DNA, 25 bp, probe
ggatgatacaagtagggccaacccc

SEQ ID NO: 253654 - DNA, 25 bp, probe
ggatccacatcacagaggccaagaa

SEQ ID NO: 253655 - DNA, 25 bp, probe
ggatccacatcacagaggccaagaa

SEQ ID NO: 253656 - DNA, 25 bp, probe
ggatgccacagccaatgatgtgcct

SEQ ID NO: 253657 - DNA, 25 bp, probe
ggatgacagcagccgagaccattgc

SEQ ID NO: 253658 - DNA, 25 bp, probe
ggatgacagcagtgctgaagatgag

SEQ ID NO: 253659 - DNA, 25 bp, probe
ggatcaccagaacaaggcaggctac

SEQ ID NO: 253660 - DNA, 25 bp, probe
ggatgacctgtaccacaagaggcta

SEQ ID NO: 253661 - DNA, 25 bp, probe
ggatgacacttgcaaaagcttgtga

SEQ ID NO: 253662 - DNA, 25 bp, probe
ggagaacatcgccgacaacgggggt

SEQ ID NO: 253663 - DNA, 25 bp, probe
ggagaacatcgccgacaacgggggt

SEQ ID NO: 253664 - DNA, 25 bp, probe
ggaggacaaggtgctggggggtcat

SEQ ID NO: 253665 - DNA, 25 bp, probe
ggaggaagaggtccacgacaaggtg

SEQ ID NO: 253666 - DNA, 25 bp, probe
ggaggaaccgcaagccggagaggat

SEQ ID NO: 253667 - DNA, 25 bp, probe
ggagtgccaaagtccggagaaggat

SEQ ID NO: 253668 - DNA, 25 bp, probe
ggaggtcgacgtgcaggagaagcta

SEQ ID NO: 253669 - DNA, 25 bp, probe
ggaggtcgacgtgcaggagaagcta

SEQ ID NO: 253670 - DNA, 25 bp, probe
ggagggtgtcgtgaccaagagcaca

SEQ ID NO: 253671 - DNA, 25 bp, probe
ggaggctttacacaccaaagaagcc

SEQ ID NO: 253672 - DNA, 25 bp, probe
ggaggctttggcatgacttaagagg

SEQ ID NO: 253673 - DNA, 25 bp, probe
ggatgctgtatttcactcctgtaag

SEQ ID NO: 253674 - DNA, 25 bp, probe
ggatgctgatctaatcagtagcttg

SEQ ID NO: 253675 - DNA, 25 bp, probe
ggatggcatcatctcagatatattt

SEQ ID NO: 253676 - DNA, 25 bp, probe
ggatggcatcatctcagatatattt

SEQ ID NO: 253677 - DNA, 25 bp, probe
ggaggcatcaaaggctgcatccgtt

SEQ ID NO: 253678 - DNA, 25 bp, probe
ggatggcaaatgctccatcagctgt

SEQ ID NO: 253679 - DNA, 25 bp, probe
ggaggcatagtgctgacatatattc

SEQ ID NO: 253680 - DNA, 25 bp, probe
ggatggtaatcacagcattgctctc

SEQ ID NO: 253681 - DNA, 25 bp, probe
ggatctctaaagagcatctgattct

SEQ ID NO: 253682 - DNA, 25 bp, probe
ggacttggacagagattttcaagga

SEQ ID NO: 253683 - DNA, 25 bp, probe
ggatgctttataaatttgttcaaag

SEQ ID NO: 253684 - DNA, 25 bp, probe
ggatgtatgatatgcttggtttaaa

SEQ ID NO: 253685 - DNA, 25 bp, probe
ggatgccagtaagtctgcaggtgcg

SEQ ID NO: 253686 - DNA, 25 bp, probe
ggatgccgcagaccattatctggcg

SEQ ID NO: 253687 - DNA, 25 bp, probe
ggatgacgcagaccaaatcgagccg

SEQ ID NO: 253688 - DNA, 25 bp, probe
ggatgtcgcagaagagtgtcagaac

SEQ ID NO: 253689 - DNA, 25 bp, probe
ggatgtcgcagaagagtgtcagaac

SEQ ID NO: 253690 - DNA, 25 bp, probe
ggatcaccacatgagtggctggagc

SEQ ID NO: 253691 - DNA, 25 bp, probe
ggatccatagcagccatgtgctgga

SEQ ID NO: 253692 - DNA, 25 bp, probe
ggatccatggcaggacggtgtgacc

SEQ ID NO: 253693 - DNA, 25 bp, probe
ggatgctctacaagaatatggggtc

SEQ ID NO: 253694 - DNA, 25 bp, probe
ggatgctctcagcaatatttagtac

SEQ ID NO: 253695 - DNA, 25 bp, probe
ggatgccgcatatgaagttactagc

SEQ ID NO: 253696 - DNA, 25 bp, probe
ggatctctttcctagattagcttct

SEQ ID NO: 253697 - DNA, 25 bp, probe
ggatgtcttgggagagtatcttgct

SEQ ID NO: 253698 - DNA, 25 bp, probe
ggagttttaatgcaggattcgttca

SEQ ID NO: 253699 - DNA, 25 bp, probe
ggagttttaatgcaggattcgttca

SEQ ID NO: 253700 - DNA, 25 bp, probe
ggatctgtttaacgtggctctgcag

SEQ ID NO: 253701 - DNA, 25 bp, probe
ggatcattctgtaaggtcctctgaa

SEQ ID NO: 253702 - DNA, 25 bp, probe
ggatcattctgtaaggtcctctgaa

SEQ ID NO: 253703 - DNA, 25 bp, probe
ggatcattggattcagttcccaaaa

SEQ ID NO: 253704 - DNA, 25 bp, probe
ggatgagctggatcagctttccaag

SEQ ID NO: 253705 - DNA, 25 bp, probe
ggatcctgtgcatcagtgacttagg

SEQ ID NO: 253706 - DNA, 25 bp, probe
ggatccaggcactatgttctctgaa

SEQ ID NO: 253707 - DNA, 25 bp, probe
ggatccaggcactatgttctctgaa

SEQ ID NO: 253708 - DNA, 25 bp, probe
ggatgcccagggattcctgaagatc

SEQ ID NO: 253709 - DNA, 25 bp, probe
ggatcttcgggcagccaatcaacac

SEQ ID NO: 253710 - DNA, 25 bp, probe
ggatctttggtctactctatcacaa

SEQ ID NO: 253711 - DNA, 25 bp, probe
ggatgctgtttttccattctacacc

SEQ ID NO: 253712 - DNA, 25 bp, probe
ggatgctatactcatccttttctcc

SEQ ID NO: 253713 - DNA, 25 bp, probe
ggatgtttccaatgctttgatccct

SEQ ID NO: 253714 - DNA, 25 bp, probe
ggagctattacatagtttatccagt

SEQ ID NO: 253715 - DNA, 25 bp, probe
ggagctattacatagtttatccagt

SEQ ID NO: 253716 - DNA, 25 bp, probe
ggcattactaaaagaaccaccagat

SEQ ID NO: 253717 - DNA, 25 bp, probe
ggatgttcttaaagagttccacaag

SEQ ID NO: 253718 - DNA, 25 bp, probe
ggagtgtgttaaaggattaccccat

SEQ ID NO: 253719 - DNA, 25 bp, probe
ggagtgtgttaaaggattaccccat

SEQ ID NO: 253720 - DNA, 25 bp, probe
ggagtggcatagagggaatccccca

SEQ ID NO: 253721 - DNA, 25 bp, probe
ggatctgggcagaggggtcatccgc

SEQ ID NO: 253722 - DNA, 25 bp, probe
ggatctaaggtagtgggccattata

SEQ ID NO: 253723 - DNA, 25 bp, probe
ggatccaaagaaacggctgactaca

SEQ ID NO: 253724 - DNA, 25 bp, probe
ggatcccatcagaaaggtgctgact

SEQ ID NO: 253725 - DNA, 25 bp, probe
ggatcgccatagaaagtcttgcaga

SEQ ID NO: 253726 - DNA, 25 bp, probe
ggatccgcattgacgtcattgtgca

SEQ ID NO: 253727 - DNA, 25 bp, probe
ggatcccggatgtcatcatgggcat

SEQ ID NO: 253728 - DNA, 25 bp, probe
ggatgccgcggagcacagagtgatt

SEQ ID NO: 253729 - DNA, 25 bp, probe
ggatgccgcggagcacagagtgatt

SEQ ID NO: 253730 - DNA, 25 bp, probe
ggatgccctggacctaagtgacatc

SEQ ID NO: 253731 - DNA, 25 bp, probe
ggatggctctggacgtgaagtctcg

SEQ ID NO: 253732 - DNA, 25 bp, probe
ggaggccgcagtgggacgttctgcg

SEQ ID NO: 253733 - DNA, 25 bp, probe
ggaggccttctggggattattggtg

SEQ ID NO: 253734 - DNA, 25 bp, probe
ggagtggagcctgcggcttaatttg

SEQ ID NO: 253735 - DNA, 25 bp, probe
ggcaggggccatgtggtaaaggggg

SEQ ID NO: 253736 - DNA, 25 bp, probe
tggcaggggccatgtggtaaagggg

SEQ ID NO: 253737 - DNA, 25 bp, probe
ggagggaggtattcgtaaggatggg

SEQ ID NO: 253738 - DNA, 25 bp, probe
tggacgggggaactttggcgaagtg

SEQ ID NO: 253739 - DNA, 25 bp, probe
tggtaggagggatgtccgggccaag

SEQ ID NO: 253740 - DNA, 25 bp, probe
ggaggttgggaggtccaaggtcaag

SEQ ID NO: 253741 - DNA, 25 bp, probe
ggaggtggtggagaacgtgggcatg

SEQ ID NO: 253742 - DNA, 25 bp, probe
ggagagtgtcattgacccgtttggg

SEQ ID NO: 253743 - DNA, 25 bp, probe
ggatcaggtctgttcctgttactgt

SEQ ID NO: 253744 - DNA, 25 bp, probe
ggatgcagccatgttgcacgattaa

SEQ ID NO: 253745 - DNA, 25 bp, probe
ggatgcatgccctggcaacattgaa

SEQ ID NO: 253746 - DNA, 25 bp, probe
ggatgcatgccctggcaacattgaa

SEQ ID NO: 253747 - DNA, 25 bp, probe
ggatcctcactcgacagaacagtca

SEQ ID NO: 253748 - DNA, 25 bp, probe
ggatgcactacaaccagacaggtca

SEQ ID NO: 253749 - DNA, 25 bp, probe
ggatgcttacccgagacagatagat

SEQ ID NO: 253750 - DNA, 25 bp, probe
ggagttggaccacactgtgagcatg

SEQ ID NO: 253751 - DNA, 25 bp, probe
ggatggtgaacagcaatcttgccag

SEQ ID NO: 253752 - DNA, 25 bp, probe
ggatggagaggcggcctcgtgccat

SEQ ID NO: 253753 - DNA, 25 bp, probe
ggatgaggatggtgcctctgaggaa

SEQ ID NO: 253754 - DNA, 25 bp, probe
ggatggtcagtctctactgggacat

SEQ ID NO: 253755 - DNA, 25 bp, probe
ggatggtcagtctctactgggacat

SEQ ID NO: 253756 - DNA, 25 bp, probe
ggatgtctggcttgcctgaagggag

SEQ ID NO: 253757 - DNA, 25 bp, probe
ggatgcttcttacctgtcagaggag

SEQ ID NO: 253758 - DNA, 25 bp, probe
ggatctgctgtttgaagcgcagcag

SEQ ID NO: 253759 - DNA, 25 bp, probe
ggatcatgtgcttgagcagactgta

SEQ ID NO: 253760 - DNA, 25 bp, probe
ggatcatgtgcttgagcagactgta

SEQ ID NO: 253761 - DNA, 25 bp, probe
ggatgctcatgtgacagcagtttgc

SEQ ID NO: 253762 - DNA, 25 bp, probe
ggatgcagatgtgcacatgtgtgtg

SEQ ID NO: 253763 - DNA, 25 bp, probe
ggatgcagtggagtgtggtggccag

SEQ ID NO: 253764 - DNA, 25 bp, probe
ggatgatgacatcttggattgctag

SEQ ID NO: 253765 - DNA, 25 bp, probe
ggatgatgacatcttggattgctag

SEQ ID NO: 253766 - DNA, 25 bp, probe
ggatgctgaaccttgtttgtcagtg

SEQ ID NO: 253767 - DNA, 25 bp, probe
ggatgctgaaatttttcccatggaa

SEQ ID NO: 253768 - DNA, 25 bp, probe
ggatgctgaaatttttcccatggaa

SEQ ID NO: 253769 - DNA, 25 bp, probe
ggatgaacaaatataccaagaagat

SEQ ID NO: 253770 - DNA, 25 bp, probe
ggatgcaaaaacgattccgaaacat

SEQ ID NO: 253771 - DNA, 25 bp, probe
ggagtgcgagaagcattcccaaccc

SEQ ID NO: 253772 - DNA, 25 bp, probe
ggaggccgaagacttcaccattttc

SEQ ID NO: 253773 - DNA, 25 bp, probe
ggaggaagtaagttaccaacttgca

SEQ ID NO: 253774 - DNA, 25 bp, probe
ggaggagttaacgcagccagacgga

SEQ ID NO: 253775 - DNA, 25 bp, probe
ggagggtaatgtgcaccacaggggc

SEQ ID NO: 253776 - DNA, 25 bp, probe
ggagggaaattcctccaagcctgcg

SEQ ID NO: 253777 - DNA, 25 bp, probe
ggagggaaattgcttacaaggcgct

SEQ ID NO: 253778 - DNA, 25 bp, probe
ggagggattattcttccagtagttg

SEQ ID NO: 253779 - DNA, 25 bp, probe
ggaggagagttacttgaccgtattc

SEQ ID NO: 253780 - DNA, 25 bp, probe
ggaggacgtttcagaggtcttcttt

SEQ ID NO: 253781 - DNA, 25 bp, probe
ggatggactctaatgcagggacctg

SEQ ID NO: 253782 - DNA, 25 bp, probe
ggatggactctaatgcagggacctg

SEQ ID NO: 253783 - DNA, 25 bp, probe
ggatgcaggttttggaggacctgga

SEQ ID NO: 253784 - DNA, 25 bp, probe
ggagagtttctagggtgatggtatg

SEQ ID NO: 253785 - DNA, 25 bp, probe
ggatggttggatacaggtggctggg

SEQ ID NO: 253786 - DNA, 25 bp, probe
ggatggttggatacaggtggctggg

SEQ ID NO: 253787 - DNA, 25 bp, probe
ggatcgtgttaacggaggcggtggg

SEQ ID NO: 253788 - DNA, 25 bp, probe
ggatcgtgttaacggaggcggtggg

SEQ ID NO: 253789 - DNA, 25 bp, probe
ggatgatgattgcgcagggaggggt

SEQ ID NO: 253790 - DNA, 25 bp, probe
ggatgcagagtcagcagaactgggg

SEQ ID NO: 253791 - DNA, 25 bp, probe
ggatgcaggcatggagcagctcacc

SEQ ID NO: 253792 - DNA, 25 bp, probe
ggatgacgatgccaagtacacctgc

SEQ ID NO: 253793 - DNA, 25 bp, probe
ggagtctgggatttgcaattctgga

SEQ ID NO: 253794 - DNA, 25 bp, probe
ggagtctgcttgtcttagatgttgg

SEQ ID NO: 253795 - DNA, 25 bp, probe
ggatgcttattcttttagtctgttt

SEQ ID NO: 253796 - DNA, 25 bp, probe
ggatgttcactctatttattgggga

SEQ ID NO: 253797 - DNA, 25 bp, probe
ggatgcttgcctttctgatatatgg

SEQ ID NO: 253798 - DNA, 25 bp, probe
ggatgctgctgctcttcgcaagctg

SEQ ID NO: 253799 - DNA, 25 bp, probe
ggatgagctgcaactttctgacctc

SEQ ID NO: 253800 - DNA, 25 bp, probe
ggatggccaagtatgagatctccgc

SEQ ID NO: 253801 - DNA, 25 bp, probe
ggatggccaagtatgagatctccgc

SEQ ID NO: 253802 - DNA, 25 bp, probe
ggatgagtacgtgcgtgtctgggcc

SEQ ID NO: 253803 - DNA, 25 bp, probe
ggatgaggacttgaaggtggagctt

SEQ ID NO: 253804 - DNA, 25 bp, probe
ggatgaagttggacagcaggtggag

SEQ ID NO: 253805 - DNA, 25 bp, probe
ggagtcagtgtggcaaagcgggggc

SEQ ID NO: 253806 - DNA, 25 bp, probe
ggagtccatgttgcaataggttctc

SEQ ID NO: 253807 - DNA, 25 bp, probe
ggagtccagtttgtgcaagacaccc

SEQ ID NO: 253808 - DNA, 25 bp, probe
ggagtccagtttgtgcaagacaccc

SEQ ID NO: 253809 - DNA, 25 bp, probe
ggagttttatatgctaaaacaccca

SEQ ID NO: 253810 - DNA, 25 bp, probe
ggagtatatttctcataattctgca

SEQ ID NO: 253811 - DNA, 25 bp, probe
ggatgtattttgtactatatgactt

SEQ ID NO: 253812 - DNA, 25 bp, probe
ggatgtattgttcacattatggctt

SEQ ID NO: 253813 - DNA, 25 bp, probe
tgggtatctcttagacttaggaatg

SEQ ID NO: 253814 - DNA, 25 bp, probe
ggaggactcatcagtttagggatta

SEQ ID NO: 253815 - DNA, 25 bp, probe
ggatgggctctctgacaaggagtgt

SEQ ID NO: 253816 - DNA, 25 bp, probe
ggaggagttacgtagagagggtggc

SEQ ID NO: 253817 - DNA, 25 bp, probe
ggagggttcacatgtatgatacagt

SEQ ID NO: 253818 - DNA, 25 bp, probe
ggagggttcacatgtatgatacagt

SEQ ID NO: 253819 - DNA, 25 bp, probe
ggagtgggtgcctggtgaatcaatg

SEQ ID NO: 253820 - DNA, 25 bp, probe
ggatgtggacatgttggttgacagg

SEQ ID NO: 253821 - DNA, 25 bp, probe
ggatgtggcacagacgtccatcagc

SEQ ID NO: 253822 - DNA, 25 bp, probe
ggatgaggccgctagaggcctgagg

SEQ ID NO: 253823 - DNA, 25 bp, probe
ggatgaggcggacggagaccaggac

SEQ ID NO: 253824 - DNA, 25 bp, probe
ggagaggctagaaccaagaagggct

SEQ ID NO: 253825 - DNA, 25 bp, probe
ggagatcctacaaacacgtcagtgg

SEQ ID NO: 253826 - DNA, 25 bp, probe
ggaggcagaactgaatgcccgtctg

SEQ ID NO: 253827 - DNA, 25 bp, probe
ggaggcagaactgaatgcccgtctg

SEQ ID NO: 253828 - DNA, 25 bp, probe
ggaggcacctagaacaagcctgttg

SEQ ID NO: 253829 - DNA, 25 bp, probe
ggagagccgctataggacgcttcgg

SEQ ID NO: 253830 - DNA, 25 bp, probe
ggaggcccttgtagagggccacgtc

SEQ ID NO: 253831 - DNA, 25 bp, probe
ggaggagactgtgtagggtccggcg

SEQ ID NO: 253832 - DNA, 25 bp, probe
ggagggggtccatgtggaccaggcg

SEQ ID NO: 253833 - DNA, 25 bp, probe
ggaggtgcagggaagaggggccggc

SEQ ID NO: 253834 - DNA, 25 bp, probe
ggatcctggaggaaagggcgtattc

SEQ ID NO: 253835 - DNA, 25 bp, probe
ggatcctggaggaaagggcgtattc

SEQ ID NO: 253836 - DNA, 25 bp, probe
ggatggcatgggcattacgggtgtt

SEQ ID NO: 253837 - DNA, 25 bp, probe
ggaggcagtggctagtggggtgaac

SEQ ID NO: 253838 - DNA, 25 bp, probe
ggatggaggagctgggggatcctgg

SEQ ID NO: 253839 - DNA, 25 bp, probe
ggaggaggaaaccgtcgaactgcca

SEQ ID NO: 253840 - DNA, 25 bp, probe
ggaggggaaaaatctgaccagcatc

SEQ ID NO: 253841 - DNA, 25 bp, probe
ggaggtggtgaatttttaatcagca

SEQ ID NO: 253842 - DNA, 25 bp, probe
ggagggtctggattattgtcataag

SEQ ID NO: 253843 - DNA, 25 bp, probe
ggatgggcccaacattgacaacatg

SEQ ID NO: 253844 - DNA, 25 bp, probe
ggagggccgcaacattagcaagacc

SEQ ID NO: 253845 - DNA, 25 bp, probe
ggatggtgggaacatatcccagtgc

SEQ ID NO: 253846 - DNA, 25 bp, probe
ggagactgggaaaaggccgcagggc

SEQ ID NO: 253847 - DNA, 25 bp, probe
ggagactgggaaaaggccgcagggc

SEQ ID NO: 253848 - DNA, 25 bp, probe
ggagactttgttcatggctggggac

SEQ ID NO: 253849 - DNA, 25 bp, probe
ggagactttgttcatggctggggac

SEQ ID NO: 253850 - DNA, 25 bp, probe
ggatgacttttttatacaatggaat

SEQ ID NO: 253851 - DNA, 25 bp, probe
ggatgatttttttgaacttggtagt

SEQ ID NO: 253852 - DNA, 25 bp, probe
ggagtttgtattttcttatgggcca

SEQ ID NO: 253853 - DNA, 25 bp, probe
ggatggtcgtttatcctttgacctg

SEQ ID NO: 253854 - DNA, 25 bp, probe
ggagtgggtcccatcagtttgaaca

SEQ ID NO: 253855 - DNA, 25 bp, probe
ggagtgggtcccatcagtttgaaca

SEQ ID NO: 253856 - DNA, 25 bp, probe
ggaggaggatgcaggccaggttaaa

SEQ ID NO: 253857 - DNA, 25 bp, probe
ggaggaggaggtttaggtcaagaag

SEQ ID NO: 253858 - DNA, 25 bp, probe
ggaggggaagggtagggcagccaga

SEQ ID NO: 253859 - DNA, 25 bp, probe
ggaggagagaaaagccatggccgac

SEQ ID NO: 253860 - DNA, 25 bp, probe
ggaggagagaaaagccatggccgac

SEQ ID NO: 253861 - DNA, 25 bp, probe
ggaggcgcaaagaaggcatcagaag

SEQ ID NO: 253862 - DNA, 25 bp, probe
ggatggtgaaccagcagctactagg

SEQ ID NO: 253863 - DNA, 25 bp, probe
ggatggtgaaccagcagctactagg

SEQ ID NO: 253864 - DNA, 25 bp, probe
ggatgggcaaactgcaggcctggga

SEQ ID NO: 253865 - DNA, 25 bp, probe
ggatgggcaaactgcaggcctggga

SEQ ID NO: 253866 - DNA, 25 bp, probe
ggatgaggactaccatctgaccgag

SEQ ID NO: 253867 - DNA, 25 bp, probe
ggatggaactaactttcctggactg

SEQ ID NO: 253868 - DNA, 25 bp, probe
ggatggcaacatcaaatacctggac

SEQ ID NO: 253869 - DNA, 25 bp, probe
ggatggcaaagaaaccaccataacg

SEQ ID NO: 253870 - DNA, 25 bp, probe
ggatggcaaagaaaccaccataacg

SEQ ID NO: 253871 - DNA, 25 bp, probe
ggatggagactggtgaccccatcac

SEQ ID NO: 253872 - DNA, 25 bp, probe
ggatggagactggtgaccccatcac

SEQ ID NO: 253873 - DNA, 25 bp, probe
ggatgtaatagctgatcccactctc

SEQ ID NO: 253874 - DNA, 25 bp, probe
ggatgtgaacaaggtcgcctactgc

SEQ ID NO: 253875 - DNA, 25 bp, probe
ggatgagaacgaagtggcaaccagc

SEQ ID NO: 253876 - DNA, 25 bp, probe
ggatgagaacgaagtggcaaccagc

SEQ ID NO: 253877 - DNA, 25 bp, probe
ggatggaaggggctgacagacagcc

SEQ ID NO: 253878 - DNA, 25 bp, probe
ggaggcagtggccaactgccagaca

SEQ ID NO: 253879 - DNA, 25 bp, probe
ggaggagatgctccaaaccatacca

SEQ ID NO: 253880 - DNA, 25 bp, probe
ggaggagacacgaaggccataccgg

SEQ ID NO: 253881 - DNA, 25 bp, probe
ggatgagcaaccccgaggtcatccg

SEQ ID NO: 253882 - DNA, 25 bp, probe
ggatggaagctgctggaagtcccag

SEQ ID NO: 253883 - DNA, 25 bp, probe
ggatggaaagcttggaagtccagtg

SEQ ID NO: 253884 - DNA, 25 bp, probe
ggatggataaggtggaacgcctgaa

SEQ ID NO: 253885 - DNA, 25 bp, probe
ggatggataaggtggaacgcctgaa

SEQ ID NO: 253886 - DNA, 25 bp, probe
ggatggtggaggtggaatgcccgag

SEQ ID NO: 253887 - DNA, 25 bp, probe
ggaggtggaggctgggaacggaatc

SEQ ID NO: 253888 - DNA, 25 bp, probe
ggaggtggaggctgggaacggaatc

SEQ ID NO: 253889 - DNA, 25 bp, probe
ggaggctggaagggctggcagatcg

SEQ ID NO: 253890 - DNA, 25 bp, probe
ggagtcttgaaatgtcacagtagta

SEQ ID NO: 253891 - DNA, 25 bp, probe
ggagactgcatgacaatcatccaca

SEQ ID NO: 253892 - DNA, 25 bp, probe
ggaggctgcagtaagctatgatcat

SEQ ID NO: 253893 - DNA, 25 bp, probe
ggatggcatacattgagcgcatgaa

SEQ ID NO: 253894 - DNA, 25 bp, probe
ggatgagcagaaaatgagctgagct

SEQ ID NO: 253895 - DNA, 25 bp, probe
ggatgagcagaaaatgagctgagct

SEQ ID NO: 253896 - DNA, 25 bp, probe
ggatgaagtgatatggtgagcagcg

SEQ ID NO: 253897 - DNA, 25 bp, probe
ggatgaagtgatatggtgagcagcg

SEQ ID NO: 253898 - DNA, 25 bp, probe
ggatgagaatgaaagcttaggctgc

SEQ ID NO: 253899 - DNA, 25 bp, probe
ggatgatacagtctccatcaggcag

SEQ ID NO: 253900 - DNA, 25 bp, probe
ggatgaactgtcatccagaccatgt

SEQ ID NO: 253901 - DNA, 25 bp, probe
ggagataattttgcaactcatgtta

SEQ ID NO: 253902 - DNA, 25 bp, probe
ggaggcagattaaggaaccagtgaa

SEQ ID NO: 253903 - DNA, 25 bp, probe
ggaggacttaatcaaatcacaagca

SEQ ID NO: 253904 - DNA, 25 bp, probe
ggaggacttaatcaaatcacaagca

SEQ ID NO: 253905 - DNA, 25 bp, probe
ggaggacctgaattgtatcatcaac

SEQ ID NO: 253906 - DNA, 25 bp, probe
ggatggacacattatatctccaaca

SEQ ID NO: 253907 - DNA, 25 bp, probe
ggatggacacattatatctccaaca

SEQ ID NO: 253908 - DNA, 25 bp, probe
ggatgagaacatcgtgatcgccgag

SEQ ID NO: 253909 - DNA, 25 bp, probe
ggatgagaacatcgtgatcgccgag

SEQ ID NO: 253910 - DNA, 25 bp, probe
ggatggataccaaatggcccagcct

SEQ ID NO: 253911 - DNA, 25 bp, probe
ggatgtgtacctgtgggtcagctcc

SEQ ID NO: 253912 - DNA, 25 bp, probe
ggatgagaacgtgagcggctactcc

SEQ ID NO: 253913 - DNA, 25 bp, probe
ggagacgaagcgggcggctacgtca

SEQ ID NO: 253914 - DNA, 25 bp, probe
ggagaagaagactggcctagagatg

SEQ ID NO: 253915 - DNA, 25 bp, probe
ggagtcagaagaccaggctacaagg

SEQ ID NO: 253916 - DNA, 25 bp, probe
ggatgtaaatggaacttctgcaagg

SEQ ID NO: 253917 - DNA, 25 bp, probe
ggatgttgaaaaagttctgcagata

SEQ ID NO: 253918 - DNA, 25 bp, probe
ggatgtgtttacagtcattcgatat

SEQ ID NO: 253919 - DNA, 25 bp, probe
ggatggtgattactggagattgctt

SEQ ID NO: 253920 - DNA, 25 bp, probe
ggatgagctgtgtagggagatattc

SEQ ID NO: 253921 - DNA, 25 bp, probe
ggatgcagttgatgacatgaagatt

SEQ ID NO: 253922 - DNA, 25 bp, probe
ggatgcagttgatgacatgaagatt

SEQ ID NO: 253923 - DNA, 25 bp, probe
ggatgaattcattcactgaatatgt

SEQ ID NO: 253924 - DNA, 25 bp, probe
ggatgacaccattgcctacatgaac

SEQ ID NO: 253925 - DNA, 25 bp, probe
ggatgcaggccaggttaaaacccag

SEQ ID NO: 253926 - DNA, 25 bp, probe
ggagggctcggagaagaacctgcac

SEQ ID NO: 253927 - DNA, 25 bp, probe
ggagggcttcgtgtatggacctcaa

SEQ ID NO: 253928 - DNA, 25 bp, probe
ggagggcttcgtgtatggacctcaa

SEQ ID NO: 253929 - DNA, 25 bp, probe
ggaggtggtcggcaatggaacctac

SEQ ID NO: 253930 - DNA, 25 bp, probe
ggaggctggctgggggagaaacccg

SEQ ID NO: 253931 - DNA, 25 bp, probe
ggatgagcggcgggatgctgaagag

SEQ ID NO: 253932 - DNA, 25 bp, probe
ggatgagcggcgggatgctgaagag

SEQ ID NO: 253933 - DNA, 25 bp, probe
ggatgactggccagttgagctcagg

SEQ ID NO: 253934 - DNA, 25 bp, probe
ggatgatgtcccagtcaatgcatcg

SEQ ID NO: 253935 - DNA, 25 bp, probe
ggatgtgtctgctactgtcattcag

SEQ ID NO: 253936 - DNA, 25 bp, probe
ggatgtgactgtagctgtaagcaga

SEQ ID NO: 253937 - DNA, 25 bp, probe
ggaggcactgcaaatgatcaaaggc

SEQ ID NO: 253938 - DNA, 25 bp, probe
ggaggactcagttcacaaaatgcaa

SEQ ID NO: 253939 - DNA, 25 bp, probe
ggaggcaccagtaaaatagaccagt

SEQ ID NO: 253940 - DNA, 25 bp, probe
ggagggatcgtggaagaataccaat

SEQ ID NO: 253941 - DNA, 25 bp, probe
ggaggcgccctggacataaagagct

SEQ ID NO: 253942 - DNA, 25 bp, probe
ggatgatcgcccgataaagacggat

SEQ ID NO: 253943 - DNA, 25 bp, probe
ggatgacctacctaaggagcggctg

SEQ ID NO: 253944 - DNA, 25 bp, probe
ggatgacccatttaaggacagcagg

SEQ ID NO: 253945 - DNA, 25 bp, probe
ggatgaccacataagaaggcaattt

SEQ ID NO: 253946 - DNA, 25 bp, probe
ggatgagctcaaatcgaccaaattt

SEQ ID NO: 253947 - DNA, 25 bp, probe
ggatggtcagaataacaacttgtaa

SEQ ID NO: 253948 - DNA, 25 bp, probe
ggagagtcaaaaacatgcagcctta

SEQ ID NO: 253949 - DNA, 25 bp, probe
ggagagtcaaaaacatgcagcctta

SEQ ID NO: 253950 - DNA, 25 bp, probe
ggagggcaacaatttcgtgcatcga

SEQ ID NO: 253951 - DNA, 25 bp, probe
ggaggtgatacggcatccggaagaa

SEQ ID NO: 253952 - DNA, 25 bp, probe
ggaggtgcatcaggcacttcggaag

SEQ ID NO: 253953 - DNA, 25 bp, probe
ggaggtgcatcaggcacttcggaag

SEQ ID NO: 253954 - DNA, 25 bp, probe
ggatggggaggagagcagggagggg

SEQ ID NO: 253955 - DNA, 25 bp, probe
ggagtgtggaagatgacaaggaggg

SEQ ID NO: 253956 - DNA, 25 bp, probe
ggaggaggacacagcacaagggcac

SEQ ID NO: 253957 - DNA, 25 bp, probe
ggagtgggacagaagtcacggcccc

SEQ ID NO: 253958 - DNA, 25 bp, probe
ggatgtgagaacaaagtcacgcagt

SEQ ID NO: 253959 - DNA, 25 bp, probe
ggatgaaagccacatgtctgtgtgt

SEQ ID NO: 253960 - DNA, 25 bp, probe
ggatgaaagccacatgtctgtgtgt

SEQ ID NO: 253961 - DNA, 25 bp, probe
ggaggaatgcctttcagggtgtggt

SEQ ID NO: 253962 - DNA, 25 bp, probe
ggagttcatggctccggagatggtg

SEQ ID NO: 253963 - DNA, 25 bp, probe
ggagggatcagctcctgggtgtgtc

SEQ ID NO: 253964 - DNA, 25 bp, probe
ggagggacagtctggaggtcccaga

SEQ ID NO: 253965 - DNA, 25 bp, probe
ggatgggcagcagtggggcaggtcc

SEQ ID NO: 253966 - DNA, 25 bp, probe
ggatgggacacgtggggagtggggt

SEQ ID NO: 253967 - DNA, 25 bp, probe
ggagagggatggtggggaaggggtg

SEQ ID NO: 253968 - DNA, 25 bp, probe
ggagagcagggaggggggcaagggg

SEQ ID NO: 253969 - DNA, 25 bp, probe
ggagacaattatcgggggcaagggt

SEQ ID NO: 253970 - DNA, 25 bp, probe
ggaggagactcctctggagaagggt

SEQ ID NO: 253971 - DNA, 25 bp, probe
ggagtaaccctgcctttgaaagatt

SEQ ID NO: 253972 - DNA, 25 bp, probe
ggactgaaccgacttttctaaagct

SEQ ID NO: 253973 - DNA, 25 bp, probe
ggaagaaccccactcagttagaagg

SEQ ID NO: 253974 - DNA, 25 bp, probe
ggaggggctcccgacagacgggagc

SEQ ID NO: 253975 - DNA, 25 bp, probe
ggatggggctcagaatgcagacctg

SEQ ID NO: 253976 - DNA, 25 bp, probe
ggatgtgaggttcagcagtgccgtg

SEQ ID NO: 253977 - DNA, 25 bp, probe
ggatgtggaacattacagtccaatg

SEQ ID NO: 253978 - DNA, 25 bp, probe
ggatggagaccatgtctgtgccatc

SEQ ID NO: 253979 - DNA, 25 bp, probe
ggatggagaccatgtctgtgccatc

SEQ ID NO: 253980 - DNA, 25 bp, probe
ggatggagcagccatggctatggca

SEQ ID NO: 253981 - DNA, 25 bp, probe
ggatgcagagagccagcacgatgcc

SEQ ID NO: 253982 - DNA, 25 bp, probe
ggacacactggaagcgagccttcaa

SEQ ID NO: 253983 - DNA, 25 bp, probe
ggacacactggaagcgagccttcaa

SEQ ID NO: 253984 - DNA, 25 bp, probe
ggaccagtacagcgaggttaatgcc

SEQ ID NO: 253985 - DNA, 25 bp, probe
ggagttgtacaacaggttacgagct

SEQ ID NO: 253986 - DNA, 25 bp, probe
ggagaggtaaagctggctttcgaga

SEQ ID NO: 253987 - DNA, 25 bp, probe
ggatgaagcaaatcgtgtccttcga

SEQ ID NO: 253988 - DNA, 25 bp, probe
ggatgatgagtatgtcagttctttt

SEQ ID NO: 253989 - DNA, 25 bp, probe
ggatgatgagtatgtcagttctttt

SEQ ID NO: 253990 - DNA, 25 bp, probe
ggatgtatgtgacgtggttcttctg

SEQ ID NO: 253991 - DNA, 25 bp, probe
ggatgattatagcaggttcctggtt

SEQ ID NO: 253992 - DNA, 25 bp, probe
ggatgattatagcaggttcctggtt

SEQ ID NO: 253993 - DNA, 25 bp, probe
ggatgagcttaatggtgtttggtct

SEQ ID NO: 253994 - DNA, 25 bp, probe
ggatgagcttaatggtgtttggtct

SEQ ID NO: 253995 - DNA, 25 bp, probe
ggatggcaagcatatggtctttggc

SEQ ID NO: 253996 - DNA, 25 bp, probe
ggatgatgaggaggaggtcttcgac

SEQ ID NO: 253997 - DNA, 25 bp, probe
ggatgtgaggagaggtctagcaaaa

SEQ ID NO: 253998 - DNA, 25 bp, probe
ggatgcatagggaggtcctatggca

SEQ ID NO: 253999 - DNA, 25 bp, probe
ggatgtgatgggcggcctggatggc

SEQ ID NO: 254000 - DNA, 25 bp, probe
ggatgttctagcatggctgccaatg

SEQ ID NO: 254001 - DNA, 25 bp, probe
ggatgttctatggagctgccacatt

SEQ ID NO: 254002 - DNA, 25 bp, probe
ggatggcttcatgatgtacctgttg

SEQ ID NO: 254003 - DNA, 25 bp, probe
ggaggtatcaaactagctgctatgt

SEQ ID NO: 254004 - DNA, 25 bp, probe
ggagttgaaaacagacttcattaaa

SEQ ID NO: 254005 - DNA, 25 bp, probe
ggagttgaaaacagacttcattaaa

SEQ ID NO: 254006 - DNA, 25 bp, probe
ggatgtatgttcaaacaccttttag

SEQ ID NO: 254007 - DNA, 25 bp, probe
ggagtatgtttcccactttattatg

SEQ ID NO: 254008 - DNA, 25 bp, probe
ggagtatgtttcccactttattatg

SEQ ID NO: 254009 - DNA, 25 bp, probe
ggatgttggtgttccacgtgtttta

SEQ ID NO: 254010 - DNA, 25 bp, probe
ggatgtatggtttctctcaatgtga

SEQ ID NO: 254011 - DNA, 25 bp, probe
ggatgtatggtttctctcaatgtga

SEQ ID NO: 254012 - DNA, 25 bp, probe
ggatgtaactagtctaccagtgacc

SEQ ID NO: 254013 - DNA, 25 bp, probe
ggatgttagaatttgaccctgccca

SEQ ID NO: 254014 - DNA, 25 bp, probe
ggatgctataatgagtcctccccaa

SEQ ID NO: 254015 - DNA, 25 bp, probe
ggatgctctaacgaattaccacaaa

SEQ ID NO: 254016 - DNA, 25 bp, probe
ggaggctaacgagtctacctccctc

SEQ ID NO: 254017 - DNA, 25 bp, probe
ggagtggaaggagctcacttaccag

SEQ ID NO: 254018 - DNA, 25 bp, probe
ggagggtaggtctgcattataactg

SEQ ID NO: 254019 - DNA, 25 bp, probe
ggaggctgtaatcattttataatct

SEQ ID NO: 254020 - DNA, 25 bp, probe
ggaggctgtaatcattttataatct

SEQ ID NO: 254021 - DNA, 25 bp, probe
ggaggactacattaactcttattgt

SEQ ID NO: 254022 - DNA, 25 bp, probe
ggaggacaagcaataactctctaca

SEQ ID NO: 254023 - DNA, 25 bp, probe
ggatgtatcagtgtggagccttaca

SEQ ID NO: 254024 - DNA, 25 bp, probe
ggatgaccatggactggatgcttta

SEQ ID NO: 254025 - DNA, 25 bp, probe
ggatgagtctgaagtgctagctgtt

SEQ ID NO: 254026 - DNA, 25 bp, probe
ggatgacgctgatgtggagtggaaa

SEQ ID NO: 254027 - DNA, 25 bp, probe
ggatgagcgctgtggcggctgaaat

SEQ ID NO: 254028 - DNA, 25 bp, probe
ggatgcagccagagagcgtctcaaa

SEQ ID NO: 254029 - DNA, 25 bp, probe
ggatgactcgggacgtgtatgagac

SEQ ID NO: 254030 - DNA, 25 bp, probe
ggatgcactcaacacggtgtgaatc

SEQ ID NO: 254031 - DNA, 25 bp, probe
ggatgcagtgaaccttgagaaaatc

SEQ ID NO: 254032 - DNA, 25 bp, probe
ggatgagtgggccattgagaagaaa

SEQ ID NO: 254033 - DNA, 25 bp, probe
ggatgagtgctgacatgtctgaaat

SEQ ID NO: 254034 - DNA, 25 bp, probe
ggatgatgacgtggactgcacaatg

SEQ ID NO: 254035 - DNA, 25 bp, probe
ggatgcagacgtgcacatgtgtgtg

SEQ ID NO: 254036 - DNA, 25 bp, probe
ggatgcagatgagttcacttgggac

SEQ ID NO: 254037 - DNA, 25 bp, probe
ggatgatggaagccaccatattgac

SEQ ID NO: 254038 - DNA, 25 bp, probe
ggatgttgtcaggaatcatgatctg

SEQ ID NO: 254039 - DNA, 25 bp, probe
ggatgttgtcaggaatcatgatctg

SEQ ID NO: 254040 - DNA, 25 bp, probe
ggatgatcttatggaagctgtgact

SEQ ID NO: 254041 - DNA, 25 bp, probe
ggatggcattgaggactctggcagc

SEQ ID NO: 254042 - DNA, 25 bp, probe
ggatgtcatcaatgccgtggagcag

SEQ ID NO: 254043 - DNA, 25 bp, probe
ggatggatgacatcccagggctgct

SEQ ID NO: 254044 - DNA, 25 bp, probe
ggatgcaaacaccagccgaggatgt

SEQ ID NO: 254045 - DNA, 25 bp, probe
ggatgacatcatctacactcaggac

SEQ ID NO: 254046 - DNA, 25 bp, probe
ggatgacatcatctacactcaggac

SEQ ID NO: 254047 - DNA, 25 bp, probe
ggatggatgcatcacactcaaggac

SEQ ID NO: 254048 - DNA, 25 bp, probe
ggatgagtgcagcacgcaggaggcc

SEQ ID NO: 254049 - DNA, 25 bp, probe
ggagcagtgagcccaaggacagacc

SEQ ID NO: 254050 - DNA, 25 bp, probe
ggagaggcagcagacggacaacctg

SEQ ID NO: 254051 - DNA, 25 bp, probe
ggatgggataaaggtggctgacctg

SEQ ID NO: 254052 - DNA, 25 bp, probe
ggatggcagcaatggcgctgtgcgg

SEQ ID NO: 254053 - DNA, 25 bp, probe
ggatgtcagagctaccagtgtgctg

SEQ ID NO: 254054 - DNA, 25 bp, probe
ggaggcagcattaacagttctacac

SEQ ID NO: 254055 - DNA, 25 bp, probe
ggaggacgtgagccagtttgatacc

SEQ ID NO: 254056 - DNA, 25 bp, probe
ggaggaagcatctgagtttgagacc

SEQ ID NO: 254057 - DNA, 25 bp, probe
ggaggaagcactaggatgttcaggc

SEQ ID NO: 254058 - DNA, 25 bp, probe
ggaggaagccaggcgagtggggccc

SEQ ID NO: 254059 - DNA, 25 bp, probe
ggagccaaaggcctaatggggccct

SEQ ID NO: 254060 - DNA, 25 bp, probe
ggagccaaaggcctaatggggccct

SEQ ID NO: 254061 - DNA, 25 bp, probe
ggagctactcggataagcagggcct

SEQ ID NO: 254062 - DNA, 25 bp, probe
ggagtacgggttcagcgtggactgg

SEQ ID NO: 254063 - DNA, 25 bp, probe
ggagtagggtgtcccagtggggttg

SEQ ID NO: 254064 - DNA, 25 bp, probe
ggagtaactattcccagtcagaggc

SEQ ID NO: 254065 - DNA, 25 bp, probe
ggagtgtgaagctgaccagctcgcg

SEQ ID NO: 254066 - DNA, 25 bp, probe
ggagtgtgaagctgaccagctcgcg

SEQ ID NO: 254067 - DNA, 25 bp, probe
ggaggatcaagctagacttcaaggc

SEQ ID NO: 254068 - DNA, 25 bp, probe
ggaggatcaagctagacttcaaggc

SEQ ID NO: 254069 - DNA, 25 bp, probe
ggaggaccatcgagctaaaggtttg

SEQ ID NO: 254070 - DNA, 25 bp, probe
ggaggatcccagaactataatgagg

SEQ ID NO: 254071 - DNA, 25 bp, probe
ggagtgatgccagaaggtttgggaa

SEQ ID NO: 254072 - DNA, 25 bp, probe
ggatggagcagtgagcgggtctggg

SEQ ID NO: 254073 - DNA, 25 bp, probe
ggatggagatggtatcatcaagctc

SEQ ID NO: 254074 - DNA, 25 bp, probe
ggatgtggcagctgattccatgtct

SEQ ID NO: 254075 - DNA, 25 bp, probe
ggagttgacattttggcatgtgctc

SEQ ID NO: 254076 - DNA, 25 bp, probe
ggagtcaactattatctgcaactgc

SEQ ID NO: 254077 - DNA, 25 bp, probe
ggatgatgtacttctctcagtactt

SEQ ID NO: 254078 - DNA, 25 bp, probe
ggatgagtcaagttctcgtcgttgc

SEQ ID NO: 254079 - DNA, 25 bp, probe
ggatgagtcaagttctcgtcgttgc

SEQ ID NO: 254080 - DNA, 25 bp, probe
ggaggctaagcagtctctgttttgc

SEQ ID NO: 254081 - DNA, 25 bp, probe
ggaggctaatatttttcatgctatc

SEQ ID NO: 254082 - DNA, 25 bp, probe
ggagaccacattgtaattgttctta

SEQ ID NO: 254083 - DNA, 25 bp, probe
ggagtcaacagtgtaactaaatttc

SEQ ID NO: 254084 - DNA, 25 bp, probe
ggatggcgacatgttcaactactat

SEQ ID NO: 254085 - DNA, 25 bp, probe
tggacggtatttcaacggccaggac

SEQ ID NO: 254086 - DNA, 25 bp, probe
ggacgggagttcaagacggctaagt

SEQ ID NO: 254087 - DNA, 25 bp, probe
ggacctggacggcagaaggcaaagg

SEQ ID NO: 254088 - DNA, 25 bp, probe
ggacccacacgacgggaagacaagt

SEQ ID NO: 254089 - DNA, 25 bp, probe
ggaccaatcaaagaggggacctgct

SEQ ID NO: 254090 - DNA, 25 bp, probe
ggagaagaaagagcctgaagacctt

SEQ ID NO: 254091 - DNA, 25 bp, probe
ggagaaaaactcaggcaagacctct

SEQ ID NO: 254092 - DNA, 25 bp, probe
ggaggatccaaagtgggaattccct

SEQ ID NO: 254093 - DNA, 25 bp, probe
ggagtgtggaaagtgccgaaaccgt

SEQ ID NO: 254094 - DNA, 25 bp, probe
ggaggtggaaactgcagagagtcat

SEQ ID NO: 254095 - DNA, 25 bp, probe
ggaggatggtaatcacagcattgct

SEQ ID NO: 254096 - DNA, 25 bp, probe
ggaggaagtgaatgccatcctcaag

SEQ ID NO: 254097 - DNA, 25 bp, probe
ggaggaagtatgtgaccccaaattc

SEQ ID NO: 254098 - DNA, 25 bp, probe
ggatggatttggtggcctgacatga

SEQ ID NO: 254099 - DNA, 25 bp, probe
ggatgacttgtgcagaactctacga

SEQ ID NO: 254100 - DNA, 25 bp, probe
ggatgagcaattggaaacccttcat

SEQ ID NO: 254101 - DNA, 25 bp, probe
acagttctgactatgacaaccctga

SEQ ID NO: 254102 - DNA, 25 bp, probe
ggatgagagggcccagaagaccttc

SEQ ID NO: 254103 - DNA, 25 bp, probe
ggatgagagggcccagaagaccttc

SEQ ID NO: 254104 - DNA, 25 bp, probe
ggaggctgtagccaggaaaccctct

SEQ ID NO: 254105 - DNA, 25 bp, probe
ggagagctttgctgaattccatccc

SEQ ID NO: 254106 - DNA, 25 bp, probe
ggatgagttgtgtgaataccccaag

SEQ ID NO: 254107 - DNA, 25 bp, probe
ggagtttggtggatgacgtgccaag

SEQ ID NO: 254108 - DNA, 25 bp, probe
ggaggtacgaggatgtcgtccagga

SEQ ID NO: 254109 - DNA, 25 bp, probe
ggaggaagaaggcgtcttccacttc

SEQ ID NO: 254110 - DNA, 25 bp, probe
ggaggaggcaaggtcctagtccact

SEQ ID NO: 254111 - DNA, 25 bp, probe
ggatggaggcgaactctttgaccgg

SEQ ID NO: 254112 - DNA, 25 bp, probe
ggatggaggcgaactctttgaccgg

SEQ ID NO: 254113 - DNA, 25 bp, probe
ggaggagaagaactttgtgcaccgt

SEQ ID NO: 254114 - DNA, 25 bp, probe
ggaggacagaggcctctgtcgcact

SEQ ID NO: 254115 - DNA, 25 bp, probe
ggaggccagagctgagcactcagcc

SEQ ID NO: 254116 - DNA, 25 bp, probe
ggaggccagagctgagcactcagcc

SEQ ID NO: 254117 - DNA, 25 bp, probe
ggatgatccggaagcagcttacacc

SEQ ID NO: 254118 - DNA, 25 bp, probe
ggagtactgcgatgaggggacttta

SEQ ID NO: 254119 - DNA, 25 bp, probe
ggagtatttgaatgggatgcctttg

SEQ ID NO: 254120 - DNA, 25 bp, probe
ggagtttcatacagcggtgtctcag

SEQ ID NO: 254121 - DNA, 25 bp, probe
ggagtttcatacagcggtgtctcag

SEQ ID NO: 254122 - DNA, 25 bp, probe
ggaggttcaagcaaggtatttcagg

SEQ ID NO: 254123 - DNA, 25 bp, probe
ggaggaagcaaggggtgtggttgag

SEQ ID NO: 254124 - DNA, 25 bp, probe
ggaggaagcattgactggtcctatg

SEQ ID NO: 254125 - DNA, 25 bp, probe
ggaggaagcattgactggtcctatg

SEQ ID NO: 254126 - DNA, 25 bp, probe
ggaggaagagctggacgaagccgtg

SEQ ID NO: 254127 - DNA, 25 bp, probe
ggaggagagactcaccatcgaggga

SEQ ID NO: 254128 - DNA, 25 bp, probe
ggaggaggtagctagcgtgtgaggg

SEQ ID NO: 254129 - DNA, 25 bp, probe
ggaggaggtagctagcgtgtgaggg

SEQ ID NO: 254130 - DNA, 25 bp, probe
ggaggaggtagctagcgtgtgaggg

SEQ ID NO: 254131 - DNA, 25 bp, probe
ggaggaggtagctagcgtgtgaggg

SEQ ID NO: 254132 - DNA, 25 bp, probe
ggatggaggtgtccaagttgctgcc

SEQ ID NO: 254133 - DNA, 25 bp, probe
ggatggatggaatcaaaatctctca

SEQ ID NO: 254134 - DNA, 25 bp, probe
ggatggagatcctacaaacacgtca

SEQ ID NO: 254135 - DNA, 25 bp, probe
ggatggagatcctacaaacacgtca

SEQ ID NO: 254136 - DNA, 25 bp, probe
ggatgtggattccaccaacagccgg

SEQ ID NO: 254137 - DNA, 25 bp, probe
ggatgtggattccaccaacagccgg

SEQ ID NO: 254138 - DNA, 25 bp, probe
ggagggtgtcctgaacagcaaggtt

SEQ ID NO: 254139 - DNA, 25 bp, probe
ggagggtgtcctgaacagcaaggtt

SEQ ID NO: 254140 - DNA, 25 bp, probe
ggaggggtagtcgaagagctctggt

SEQ ID NO: 254141 - DNA, 25 bp, probe
ggaggggctggagtcaagatagcgg

SEQ ID NO: 254142 - DNA, 25 bp, probe
ggatgggcgcttgttcaatgagcag

SEQ ID NO: 254143 - DNA, 25 bp, probe
ggatgggcgcttgttcaatgagcag

SEQ ID NO: 254144 - DNA, 25 bp, probe
ggatgggcgcttgttcaatgagcag

SEQ ID NO: 254145 - DNA, 25 bp, probe
ggaggacgacctgtcacagatcatg

SEQ ID NO: 254146 - DNA, 25 bp, probe
ggaggagcatgatctggtccaattt

SEQ ID NO: 254147 - DNA, 25 bp, probe
ggaggcaggcaagaggccaatgctt

SEQ ID NO: 254148 - DNA, 25 bp, probe
ggaggcagccatataggccttttaa

SEQ ID NO: 254149 - DNA, 25 bp, probe
ggaggctgccaattatggctctttt

SEQ ID NO: 254150 - DNA, 25 bp, probe
ggaggtgacgaatgtgatcttccta

SEQ ID NO: 254151 - DNA, 25 bp, probe
ggaggcagactgatggcgattccct

SEQ ID NO: 254152 - DNA, 25 bp, probe
ggatgtcagtctcttggcagtgtcc

SEQ ID NO: 254153 - DNA, 25 bp, probe
ggatgtcagtctcttggcagtgtcc

SEQ ID NO: 254154 - DNA, 25 bp, probe
ggatgatcagtccggggcgctgcat

SEQ ID NO: 254155 - DNA, 25 bp, probe
ggatgatcacatggaaggcggcgca

SEQ ID NO: 254156 - DNA, 25 bp, probe
ggatgatcacatggaaggcggcgca

SEQ ID NO: 254157 - DNA, 25 bp, probe
ggatgtgccatgcaatggtgtctgt

SEQ ID NO: 254158 - DNA, 25 bp, probe
ggatgatgatagctatggtgtagat

SEQ ID NO: 254159 - DNA, 25 bp, probe
ggatgtatggtgtaggtgtggacat

SEQ ID NO: 254160 - DNA, 25 bp, probe
ggatggatcaggtgcggctgatgaa

SEQ ID NO: 254161 - DNA, 25 bp, probe
ggatgtgaaggctgctgtgaggaga

SEQ ID NO: 254162 - DNA, 25 bp, probe
ggatgtgaaggctgctgtgaggaga

SEQ ID NO: 254163 - DNA, 25 bp, probe
ggatggcaaggcctgtgcgacagat

SEQ ID NO: 254164 - DNA, 25 bp, probe
ggatggtatggactgcatggacaat

SEQ ID NO: 254165 - DNA, 25 bp, probe
ggatgattaatcctcagaacaatgg

SEQ ID NO: 254166 - DNA, 25 bp, probe
ggatgatctcattaataagaagatt

SEQ ID NO: 254167 - DNA, 25 bp, probe
ggatgttacagctcaaaagatttat

SEQ ID NO: 254168 - DNA, 25 bp, probe
ggatgttacagctcaaaagatttat

SEQ ID NO: 254169 - DNA, 25 bp, probe
ggatgtgttctctcaaaacatgttc

SEQ ID NO: 254170 - DNA, 25 bp, probe
ggatgatttctgtccacacaaaggt

SEQ ID NO: 254171 - DNA, 25 bp, probe
ggatgtatttgaagcacctgaatag

SEQ ID NO: 254172 - DNA, 25 bp, probe
ggatgattttggaaccatgcaagtg

SEQ ID NO: 254173 - DNA, 25 bp, probe
ggatgtgttcatcctactcagcaag

SEQ ID NO: 254174 - DNA, 25 bp, probe
ggagtctttgctgacattgagcagt

SEQ ID NO: 254175 - DNA, 25 bp, probe
ggatgtcatttccatcatattgtaa

SEQ ID NO: 254176 - DNA, 25 bp, probe
ggatgtcttcaccaaaggttatgga

SEQ ID NO: 254177 - DNA, 25 bp, probe
ggagcacctccatagacgtgtaaat

SEQ ID NO: 254178 - DNA, 25 bp, probe
ggaggtcatccattaggaattaaat

SEQ ID NO: 254179 - DNA, 25 bp, probe
ggaagtacgtttaaatgtggaagag

SEQ ID NO: 254180 - DNA, 25 bp, probe
ggaagtacgtttaaatgtggaagag

SEQ ID NO: 254181 - DNA, 25 bp, probe
ggaggaactttttaagctgctgaag

SEQ ID NO: 254182 - DNA, 25 bp, probe
ggaggaagatttgaacgtgctgacg

SEQ ID NO: 254183 - DNA, 25 bp, probe
ggaggaaatcctgagagcatctcga

SEQ ID NO: 254184 - DNA, 25 bp, probe
ggaggaaatcctgagagcatctcga

SEQ ID NO: 254185 - DNA, 25 bp, probe
ggaggacagctcacaggaattctga

SEQ ID NO: 254186 - DNA, 25 bp, probe
ggaggagcagcaactagatgaacct

SEQ ID NO: 254187 - DNA, 25 bp, probe
ggaggcccagactatatgaaactca

SEQ ID NO: 254188 - DNA, 25 bp, probe
ggatgtccttgcacttaaactcatt

SEQ ID NO: 254189 - DNA, 25 bp, probe
ggagtccattcttctttagggcagt

SEQ ID NO: 254190 - DNA, 25 bp, probe
ggatgtccctctttggggttgactt

SEQ ID NO: 254191 - DNA, 25 bp, probe
ggatgtcccacgggagcagggtgcc

SEQ ID NO: 254192 - DNA, 25 bp, probe
ggatgtctcaaccggcagatccggg

SEQ ID NO: 254193 - DNA, 25 bp, probe
ggatgtgcttatgcaggattccagg

SEQ ID NO: 254194 - DNA, 25 bp, probe
ggatgtgcttatgcaggattccagg

SEQ ID NO: 254195 - DNA, 25 bp, probe
ggatgtgcttatgcaggattccagg

SEQ ID NO: 254196 - DNA, 25 bp, probe
ggatgttttcctattcatcaggctg

SEQ ID NO: 254197 - DNA, 25 bp, probe
ggatgttttcctattcatcaggctg

SEQ ID NO: 254198 - DNA, 25 bp, probe
ggagttttcctaatatgctggtgcc

SEQ ID NO: 254199 - DNA, 25 bp, probe
ggaggtcttctcatatggacgggct

SEQ ID NO: 254200 - DNA, 25 bp, probe
ggaggtctacatcaagaatggggat

SEQ ID NO: 254201 - DNA, 25 bp, probe
ggaggtgaggcacgagctgaaggag

SEQ ID NO: 254202 - DNA, 25 bp, probe
ggaggcgctggcagagtacgaggcc

SEQ ID NO: 254203 - DNA, 25 bp, probe
ggaggcgctggcagagtacgaggcc

SEQ ID NO: 254204 - DNA, 25 bp, probe
ggaggcctggatcatgttaaggcag

SEQ ID NO: 254205 - DNA, 25 bp, probe
ggaggcccagaccatgtttgggcaa

SEQ ID NO: 254206 - DNA, 25 bp, probe
ggaggcaccaatctctggggagaaa

SEQ ID NO: 254207 - DNA, 25 bp, probe
ggagggacaagccctggggagagaa

SEQ ID NO: 254208 - DNA, 25 bp, probe
ggagtcagaaagcagtggggaagat

SEQ ID NO: 254209 - DNA, 25 bp, probe
ggagtcagaaagcagtggggaagat

SEQ ID NO: 254210 - DNA, 25 bp, probe
ggagtcagaaagcagtggggaagat

SEQ ID NO: 254211 - DNA, 25 bp, probe
ggaggggaagcaagatgggtaaggg

SEQ ID NO: 254212 - DNA, 25 bp, probe
ggaggtgagaagtggtggtaaaagg

SEQ ID NO: 254213 - DNA, 25 bp, probe
ggatggtggaagcagttcacttaaa

SEQ ID NO: 254214 - DNA, 25 bp, probe
ggatggagactacgagtttcttaag

SEQ ID NO: 254215 - DNA, 25 bp, probe
ggatggagaatgtgcagttatttat

SEQ ID NO: 254216 - DNA, 25 bp, probe
ggatggtgaagtcacattagtgtgt

SEQ ID NO: 254217 - DNA, 25 bp, probe
ggaggtgaatgttttctagagattc

SEQ ID NO: 254218 - DNA, 25 bp, probe
ggaggtacaattgccatatgatttc

SEQ ID NO: 254219 - DNA, 25 bp, probe
ggagtcccaggagtttgatgattta

SEQ ID NO: 254220 - DNA, 25 bp, probe
ggaggtctaccatttttgattaaca

SEQ ID NO: 254221 - DNA, 25 bp, probe
ggaggctataggatcttatgtaaac

SEQ ID NO: 254222 - DNA, 25 bp, probe
ggaggttgtcagaccgttgtaaatc

SEQ ID NO: 254223 - DNA, 25 bp, probe
ggaggtggtggacggactgtaattg

SEQ ID NO: 254224 - DNA, 25 bp, probe
ggagttggctggactggttgtttca

SEQ ID NO: 254225 - DNA, 25 bp, probe
ggagttggctggactggttgtttca

SEQ ID NO: 254226 - DNA, 25 bp, probe
ggagttcattgatttggttgatttg

SEQ ID NO: 254227 - DNA, 25 bp, probe
ggagccacttaagagattattgtgc

SEQ ID NO: 254228 - DNA, 25 bp, probe
ggaaacttggccaggtatttcttca

SEQ ID NO: 254229 - DNA, 25 bp, probe
ggaaacttggccaggtatttcttca

SEQ ID NO: 254230 - DNA, 25 bp, probe
ggaggtcatggagcacaggttcttc

SEQ ID NO: 254231 - DNA, 25 bp, probe
ggaggtcatggagcacaggttcttc

SEQ ID NO: 254232 - DNA, 25 bp, probe
ggatggacggcggacaggcagtccc

SEQ ID NO: 254233 - DNA, 25 bp, probe
ggaggacgaggcggaacgctccgcc

SEQ ID NO: 254234 - DNA, 25 bp, probe
ggaggagcaagggggccacatcccc

SEQ ID NO: 254235 - DNA, 25 bp, probe
ggagggcaagggatgccagtaagtc

SEQ ID NO: 254236 - DNA, 25 bp, probe
ggaggacacggggtccagagtgagt

SEQ ID NO: 254237 - DNA, 25 bp, probe
ggaggacacggggtccagagtgagt

SEQ ID NO: 254238 - DNA, 25 bp, probe
ggaggaaggcgggaccacaggagcc

SEQ ID NO: 254239 - DNA, 25 bp, probe
ggaggaagcggagacatcacaagga

SEQ ID NO: 254240 - DNA, 25 bp, probe
ggaggaagcggagacatcacaagga

SEQ ID NO: 254241 - DNA, 25 bp, probe
ggagggggagaaccatcaatacgaa

SEQ ID NO: 254242 - DNA, 25 bp, probe
ggatgggggatctatcccgttaaca

SEQ ID NO: 254243 - DNA, 25 bp, probe
ggatgggggatctatcccgttaaca

SEQ ID NO: 254244 - DNA, 25 bp, probe
ggagtgaggtatttcccgtctaaca

SEQ ID NO: 254245 - DNA, 25 bp, probe
ggaggggtaacttgcacctctgacc

SEQ ID NO: 254246 - DNA, 25 bp, probe
ggagggggctacatgaccaatgcct

SEQ ID NO: 254247 - DNA, 25 bp, probe
ggagtgggtgtagtagaaattcagt

SEQ ID NO: 254248 - DNA, 25 bp, probe
ggaggattgcctttaatattttgta

SEQ ID NO: 254249 - DNA, 25 bp, probe
ggaggttgactgtgcaatgttattt

SEQ ID NO: 254250 - DNA, 25 bp, probe
ggagtttgagtatcggttagtgctg

SEQ ID NO: 254251 - DNA, 25 bp, probe
ggagtttgcgtttgaggtagttgtg

SEQ ID NO: 254252 - DNA, 25 bp, probe
ggagtgtcagcagctatagtgaagt

SEQ ID NO: 254253 - DNA, 25 bp, probe
ggaggatgagctgtgtagggagata

SEQ ID NO: 254254 - DNA, 25 bp, probe
ggaggctcagtttatcagagggatt

SEQ ID NO: 254255 - DNA, 25 bp, probe
ggaggctgtgcttatctcagagggt

SEQ ID NO: 254256 - DNA, 25 bp, probe
ggagtgacttattctaagcctcatc

SEQ ID NO: 254257 - DNA, 25 bp, probe
ggagtgacttattctaagcctcatc

SEQ ID NO: 254258 - DNA, 25 bp, probe
ggagtacttaacacagattgacatg

SEQ ID NO: 254259 - DNA, 25 bp, probe
ggagtacttaacacagattgacatg

SEQ ID NO: 254260 - DNA, 25 bp, probe
ggagtagtaaagcctcaaggacatc

SEQ ID NO: 254261 - DNA, 25 bp, probe
ggagtggtcagctgggcaagtggaa

SEQ ID NO: 254262 - DNA, 25 bp, probe
ggagtggtcagctgggcaagtggaa

SEQ ID NO: 254263 - DNA, 25 bp, probe
ggagggtaaggccagggtgtgaagg

SEQ ID NO: 254264 - DNA, 25 bp, probe
ggagggtttgcgggtagttgcacgg

SEQ ID NO: 254265 - DNA, 25 bp, probe
ggaggactttgcaggggatatgcat

SEQ ID NO: 254266 - DNA, 25 bp, probe
ggaggataggtcaggtgcgttatct

SEQ ID NO: 254267 - DNA, 25 bp, probe
ggagttaggtggaagccagatttta

SEQ ID NO: 254268 - DNA, 25 bp, probe
ggatggacaggtgagaacacatttt

SEQ ID NO: 254269 - DNA, 25 bp, probe
ggatggtcgtggaagaaggcaggat

SEQ ID NO: 254270 - DNA, 25 bp, probe
ggatggtcgtggaagaaggcaggat

SEQ ID NO: 254271 - DNA, 25 bp, probe
ggatggtcgtggaagaaggcaggat

SEQ ID NO: 254272 - DNA, 25 bp, probe
ggaggacctggcaagaattggtatc

SEQ ID NO: 254273 - DNA, 25 bp, probe
ggagggcctggtacaagggaatgtc

SEQ ID NO: 254274 - DNA, 25 bp, probe
ggaggccctgagccgagggtgggcc

SEQ ID NO: 254275 - DNA, 25 bp, probe
ggaggccctgggcaggatgttcact

SEQ ID NO: 254276 - DNA, 25 bp, probe
ggaggccagctgagtaggcagcctg

SEQ ID NO: 254277 - DNA, 25 bp, probe
ggaggctgacgatgagtggaccaag

SEQ ID NO: 254278 - DNA, 25 bp, probe
ggaggctgacgatgagtggaccaag

SEQ ID NO: 254279 - DNA, 25 bp, probe
ggaggcagaggatggaggcagcagc

SEQ ID NO: 254280 - DNA, 25 bp, probe
ggaggcgaagatgatgaacagactg

SEQ ID NO: 254281 - DNA, 25 bp, probe
ggaggcgcagaaggagaacggcatc

SEQ ID NO: 254282 - DNA, 25 bp, probe
ggaggatgtgtatgagaacctgcac

SEQ ID NO: 254283 - DNA, 25 bp, probe
ggaggatgtcagttgctgaacaggt

SEQ ID NO: 254284 - DNA, 25 bp, probe
ggaggatgtcagttgctgaacaggt

SEQ ID NO: 254285 - DNA, 25 bp, probe
ggaggctgtcagcatcttgaaagct

SEQ ID NO: 254286 - DNA, 25 bp, probe
ggaggcttgctggacctaaaatcaa

SEQ ID NO: 254287 - DNA, 25 bp, probe
ggaggaggtcgatcaaagaatcaag

SEQ ID NO: 254288 - DNA, 25 bp, probe
ggaggggcagagagaaaaatccatt

SEQ ID NO: 254289 - DNA, 25 bp, probe
ggatgggggagaagggacattccac

SEQ ID NO: 254290 - DNA, 25 bp, probe
ggatgggggagaagggacattccac

SEQ ID NO: 254291 - DNA, 25 bp, probe
ggaggaggtgaatggccaagtcctt

SEQ ID NO: 254292 - DNA, 25 bp, probe
ggaggaggtgaatggccaagtcctt

SEQ ID NO: 254293 - DNA, 25 bp, probe
ggaggacaatgactatggccgggcc

SEQ ID NO: 254294 - DNA, 25 bp, probe
ggaggacaatgactatggccgggcc

SEQ ID NO: 254295 - DNA, 25 bp, probe
ggaggacaatgactatggccgggcc

SEQ ID NO: 254296 - DNA, 25 bp, probe
ggagaggcagaacatagccctggcc

SEQ ID NO: 254297 - DNA, 25 bp, probe
ggagatggatcaatcaaacccggct

SEQ ID NO: 254298 - DNA, 25 bp, probe
ggagaggtcttcaaggtgcgctcca

SEQ ID NO: 254299 - DNA, 25 bp, probe
ggaggcgctcttaataactcccaat

SEQ ID NO: 254300 - DNA, 25 bp, probe
ggagggtatctggatcaacccgaca

SEQ ID NO: 254301 - DNA, 25 bp, probe
ggaggactgtgaggacacacgggaa

SEQ ID NO: 254302 - DNA, 25 bp, probe
ggaggactgtgaggacacacgggaa

SEQ ID NO: 254303 - DNA, 25 bp, probe
ggaggatcgcttgaggccaggagtt

SEQ ID NO: 254304 - DNA, 25 bp, probe
ggaggattgcttgagacctagcaat

SEQ ID NO: 254305 - DNA, 25 bp, probe
ggaggaatcttacttctccacagtg

SEQ ID NO: 254306 - DNA, 25 bp, probe
ggaggcaattgcactgtgtagccgt

SEQ ID NO: 254307 - DNA, 25 bp, probe
ggagggtatggagtggggcctgatg

SEQ ID NO: 254308 - DNA, 25 bp, probe
ggaggttatcggcagtggagctact

SEQ ID NO: 254309 - DNA, 25 bp, probe
ggaggttatcggcagtggagctact

SEQ ID NO: 254310 - DNA, 25 bp, probe
ggaggccttcagcgaggaggctagc

SEQ ID NO: 254311 - DNA, 25 bp, probe
ggaggccttcaagaggctgatgcca

SEQ ID NO: 254312 - DNA, 25 bp, probe
ggaggccagtcacaatggacagcgc

SEQ ID NO: 254313 - DNA, 25 bp, probe
ggatggctctgttaaattgactgac

SEQ ID NO: 254314 - DNA, 25 bp, probe
ggatggctcctctaagaatctcaca

SEQ ID NO: 254315 - DNA, 25 bp, probe
ggaggcttccaactgaatatgagag

SEQ ID NO: 254316 - DNA, 25 bp, probe
ggaggcttgcactcgcaagagaagg

SEQ ID NO: 254317 - DNA, 25 bp, probe
ggaggtgatcctggcagaagataag

SEQ ID NO: 254318 - DNA, 25 bp, probe
ggaggcgatcaggagggagctagca

SEQ ID NO: 254319 - DNA, 25 bp, probe
ggaggctacggcaggagctgctcaa

SEQ ID NO: 254320 - DNA, 25 bp, probe
ggagtctacaccaaggtctacaact

SEQ ID NO: 254321 - DNA, 25 bp, probe
ggagttatcactcaagctgtaatga

SEQ ID NO: 254322 - DNA, 25 bp, probe
ggagagtaaccctgtctaatgaaac

SEQ ID NO: 254323 - DNA, 25 bp, probe
ggaggagaaccctggtgagtcgaat

SEQ ID NO: 254324 - DNA, 25 bp, probe
ggaggagaacctcatggatggtgga

SEQ ID NO: 254325 - DNA, 25 bp, probe
ggaggactacgtcgatctaggtgtg

SEQ ID NO: 254326 - DNA, 25 bp, probe
ggaggactacgtcgatctaggtgtg

SEQ ID NO: 254327 - DNA, 25 bp, probe
ggaggccataggcttcattgactgg

SEQ ID NO: 254328 - DNA, 25 bp, probe
ggaggccgtgggagaatggctgggc

SEQ ID NO: 254329 - DNA, 25 bp, probe
ggagggtaggtgagagtcagggtgc

SEQ ID NO: 254330 - DNA, 25 bp, probe
ggaggcagtgggatggaggagcgcc

SEQ ID NO: 254331 - DNA, 25 bp, probe
ggaggaggaggaaggcgggaccaca

SEQ ID NO: 254332 - DNA, 25 bp, probe
ggagggggctaagagaggagcaaag

SEQ ID NO: 254333 - DNA, 25 bp, probe
ggaggcgctatgaaactcaggtaca

SEQ ID NO: 254334 - DNA, 25 bp, probe
ggatggctcttgaaagtctggttaa

SEQ ID NO: 254335 - DNA, 25 bp, probe
ggaggcttgtactgctttgttgaat

SEQ ID NO: 254336 - DNA, 25 bp, probe
ggaggcttgtactgctttgttgaat

SEQ ID NO: 254337 - DNA, 25 bp, probe
ggagtgtggaaatattgatcttaat

SEQ ID NO: 254338 - DNA, 25 bp, probe
ggaggtgaagaagtcgttcctactg

SEQ ID NO: 254339 - DNA, 25 bp, probe
ggagttgaaaatgctttcctcagtg

SEQ ID NO: 254340 - DNA, 25 bp, probe
ggagttatctaagctcttgtaagtg

SEQ ID NO: 254341 - DNA, 25 bp, probe
ggagtcgtgtatggtagggtaagtg

SEQ ID NO: 254342 - DNA, 25 bp, probe
ggagtcggaatcccagagaaaagct

SEQ ID NO: 254343 - DNA, 25 bp, probe
ggaggctgggatctagcgagagaga

SEQ ID NO: 254344 - DNA, 25 bp, probe
ggaggggtgttatctcatgagagct

SEQ ID NO: 254345 - DNA, 25 bp, probe
ggagggggagtgttctctcaagaag

SEQ ID NO: 254346 - DNA, 25 bp, probe
ggagtcagggttgtagccaagacgc

SEQ ID NO: 254347 - DNA, 25 bp, probe
ggagtctggcgttatctccacaatg

SEQ ID NO: 254348 - DNA, 25 bp, probe
ggagtctggactaagctccatccac

SEQ ID NO: 254349 - DNA, 25 bp, probe
ggagaggactcaatagctccacccc

SEQ ID NO: 254350 - DNA, 25 bp, probe
ggagatgatactggtccttagcccc

SEQ ID NO: 254351 - DNA, 25 bp, probe
ggaggatattggtgttggctcctac

SEQ ID NO: 254352 - DNA, 25 bp, probe
ggaggagaatggtgttattactgac

SEQ ID NO: 254353 - DNA, 25 bp, probe
ggaggagccggttgactattacgcc

SEQ ID NO: 254354 - DNA, 25 bp, probe
ggagagcagcccatgtaacttacag

SEQ ID NO: 254355 - DNA, 25 bp, probe
ggaggcaagctcaatgtacatctta

SEQ ID NO: 254356 - DNA, 25 bp, probe
ggaggcaagctcaatgtacatctta

SEQ ID NO: 254357 - DNA, 25 bp, probe
ggaggtgaccagtcttcatttgaaa

SEQ ID NO: 254358 - DNA, 25 bp, probe
ggaggtgacaaggattgggtcccac

SEQ ID NO: 254359 - DNA, 25 bp, probe
ggaggtggagatcattgggctccct

SEQ ID NO: 254360 - DNA, 25 bp, probe
ggaggggagctatttggacttttgg

SEQ ID NO: 254361 - DNA, 25 bp, probe
ggagggaagccgtgaattcagttgg

SEQ ID NO: 254362 - DNA, 25 bp, probe
ggaggagaccctggttttcatggtg

SEQ ID NO: 254363 - DNA, 25 bp, probe
ggaggaataccaggttattcatgga

SEQ ID NO: 254364 - DNA, 25 bp, probe
ggatggcagtatgcggtctatcacc

SEQ ID NO: 254365 - DNA, 25 bp, probe
ggaggcaccatggagcagggatcac

SEQ ID NO: 254366 - DNA, 25 bp, probe
ggaggcaccacgaagctgtgaactc

SEQ ID NO: 254367 - DNA, 25 bp, probe
ggaggccgacggccagaagatctcc

SEQ ID NO: 254368 - DNA, 25 bp, probe
ggaggccgaggcaggaagatcactt

SEQ ID NO: 254369 - DNA, 25 bp, probe
ggaggccgaggtgggaggatcattg

SEQ ID NO: 254370 - DNA, 25 bp, probe
ggaggccgaggcgggtggatcatga

SEQ ID NO: 254371 - DNA, 25 bp, probe
ggaggcgggagtggagtggaagaag

SEQ ID NO: 254372 - DNA, 25 bp, probe
ggagggaggcgtgggatgggaatag

SEQ ID NO: 254373 - DNA, 25 bp, probe
ggagtgtgggttggcaggaggaaga

SEQ ID NO: 254374 - DNA, 25 bp, probe
ggaggcagtgggagcggtggaagag

SEQ ID NO: 254375 - DNA, 25 bp, probe
ggaggaggaggatggggaggagagc

SEQ ID NO: 254376 - DNA, 25 bp, probe
ggaggggggcaaggggaaggagatg

SEQ ID NO: 254377 - DNA, 25 bp, probe
ggagggagggagagtggagggtttg

SEQ ID NO: 254378 - DNA, 25 bp, probe
ggagtggaggggctggagaggggga

SEQ ID NO: 254379 - DNA, 25 bp, probe
ggagggaggagagaggagggtgaga

SEQ ID NO: 254380 - DNA, 25 bp, probe
ggaggaccaggagacggctgtgtag

SEQ ID NO: 254381 - DNA, 25 bp, probe
ggaggaactggacaggggctgctgg

SEQ ID NO: 254382 - DNA, 25 bp, probe
ggaggccacggtcaatgacttctgg

SEQ ID NO: 254383 - DNA, 25 bp, probe
ggaggcccaggtcatgaagaagctg

SEQ ID NO: 254384 - DNA, 25 bp, probe
ggaggctcacagggaacaagacacg

SEQ ID NO: 254385 - DNA, 25 bp, probe
ggaggctcacagggaacaagacacg

SEQ ID NO: 254386 - DNA, 25 bp, probe
ggaggctcctgagaatcaacccaac

SEQ ID NO: 254387 - DNA, 25 bp, probe
ggagtgttctggcaactacacagca

SEQ ID NO: 254388 - DNA, 25 bp, probe
ggagttgtccatcgtgacatcaagg

SEQ ID NO: 254389 - DNA, 25 bp, probe
ggagtgttcaatagataccacgaat

SEQ ID NO: 254390 - DNA, 25 bp, probe
ggaggagaagataatcaccaggaca

SEQ ID NO: 254391 - DNA, 25 bp, probe
ggaggagaagataatcaccaggaca

SEQ ID NO: 254392 - DNA, 25 bp, probe
ggaggcagacaagcccaatggcatg

SEQ ID NO: 254393 - DNA, 25 bp, probe
ggaggcaagcaagctctcttgccga

SEQ ID NO: 254394 - DNA, 25 bp, probe
ggaggcaccacaggtctatgtgtgc

SEQ ID NO: 254395 - DNA, 25 bp, probe
ggaggctcccatgggctaggagcag

SEQ ID NO: 254396 - DNA, 25 bp, probe
ggaggcttatctcactgagtgagca

SEQ ID NO: 254397 - DNA, 25 bp, probe
ggaggttagcatccagcgacagatc

SEQ ID NO: 254398 - DNA, 25 bp, probe
ggaggtctgagaatgacgatacccg

SEQ ID NO: 254399 - DNA, 25 bp, probe
ggaggcttacagggtgtacacacaa

SEQ ID NO: 254400 - DNA, 25 bp, probe
ggaggcttggagacagtctgaccca

SEQ ID NO: 254401 - DNA, 25 bp, probe
ggaggctggagaggacttcacctct

SEQ ID NO: 254402 - DNA, 25 bp, probe
ggagtgtgaggagggatccatactt

SEQ ID NO: 254403 - DNA, 25 bp, probe
ggaggctgaggtgggaggatgactt

SEQ ID NO: 254404 - DNA, 25 bp, probe
ggaggctgaggcaggtggatcacct

SEQ ID NO: 254405 - DNA, 25 bp, probe
ggaggctgagacagaagaatcgctt

SEQ ID NO: 254406 - DNA, 25 bp, probe
ggaggctgacgcataagacttgctt

SEQ ID NO: 254407 - DNA, 25 bp, probe
ggaggcacaggcacaaagcattgct

SEQ ID NO: 254408 - DNA, 25 bp, probe
ggagagcaaagcactaaggaattca

SEQ ID NO: 254409 - DNA, 25 bp, probe
ggaggcaagcacaaactaggaagac

SEQ ID NO: 254410 - DNA, 25 bp, probe
ggaggcacgcagaaagctcagccag

SEQ ID NO: 254411 - DNA, 25 bp, probe
ggaggcggcagaatgcagccagagg

SEQ ID NO: 254412 - DNA, 25 bp, probe
ggaggcatggaaaagcacaggctgt

SEQ ID NO: 254413 - DNA, 25 bp, probe
ggaggcagcggcttaagggcgatgc

SEQ ID NO: 254414 - DNA, 25 bp, probe
ggaggcagcccctagaaaggaggga

SEQ ID NO: 254415 - DNA, 25 bp, probe
ggagggcctcctgagaaggacaggc

SEQ ID NO: 254416 - DNA, 25 bp, probe
ggagggtctatggggagaggaactc

SEQ ID NO: 254417 - DNA, 25 bp, probe
ggagaggttttgctcacagggactc

SEQ ID NO: 254418 - DNA, 25 bp, probe
ggaggggatttgcaatggtgtcacc

SEQ ID NO: 254419 - DNA, 25 bp, probe
ggaggtgttcttcaatgattgtaac

SEQ ID NO: 254420 - DNA, 25 bp, probe
ggaggtgtttgatgccatatttgca

SEQ ID NO: 254421 - DNA, 25 bp, probe
ggaggcgttgtgaatgtgtcccatg

SEQ ID NO: 254422 - DNA, 25 bp, probe
ggaggggatgctactgatgggaatg

SEQ ID NO: 254423 - DNA, 25 bp, probe
ggaggtgtatgagctgatgctgggg

SEQ ID NO: 254424 - DNA, 25 bp, probe
ggaggtgtatgagctgatgctgggg

SEQ ID NO: 254425 - DNA, 25 bp, probe
ggaggatttgagacggcttggagtg

SEQ ID NO: 254426 - DNA, 25 bp, probe
ggaggagttcagagtctagctggga

SEQ ID NO: 254427 - DNA, 25 bp, probe
ggaggaaataagcgtgcagctggga

SEQ ID NO: 254428 - DNA, 25 bp, probe
ggaggagatctatgacttcctggac

SEQ ID NO: 254429 - DNA, 25 bp, probe
ggagggactaagtcagtcgtcatac

SEQ ID NO: 254430 - DNA, 25 bp, probe
ggagatggacatcgagtcccagcct

SEQ ID NO: 254431 - DNA, 25 bp, probe
ggaggctatatcatggccacatcct

SEQ ID NO: 254432 - DNA, 25 bp, probe
ggagtctatgatgttacaatggtca

SEQ ID NO: 254433 - DNA, 25 bp, probe
ggagtttgtcaataaatgcctcatc

SEQ ID NO: 254434 - DNA, 25 bp, probe
ggagttattcagttaatgacccttt

SEQ ID NO: 254435 - DNA, 25 bp, probe
ggaggaatgtcacctgaaattactt

SEQ ID NO: 254436 - DNA, 25 bp, probe
ggagggcttcatcctcataatgtca

SEQ ID NO: 254437 - DNA, 25 bp, probe
ggaggactgtcaggcactgactcat

SEQ ID NO: 254438 - DNA, 25 bp, probe
ggaggaagcatctgattgagacatg

SEQ ID NO: 254439 - DNA, 25 bp, probe
ggaggcacagagtttgctgcgagct

SEQ ID NO: 254440 - DNA, 25 bp, probe
ggaggacagattgtgctgggaggca

SEQ ID NO: 254441 - DNA, 25 bp, probe
ggaggagcagctaggatggaaggga

SEQ ID NO: 254442 - DNA, 25 bp, probe
ggaggagacatcccaggaaaagaat

SEQ ID NO: 254443 - DNA, 25 bp, probe
ggaggagatgcccaagaaaaagagc

SEQ ID NO: 254444 - DNA, 25 bp, probe
ggaggagagctacagcaccagatat

SEQ ID NO: 254445 - DNA, 25 bp, probe
ggagtggagtatctgaagaatgatc

SEQ ID NO: 254446 - DNA, 25 bp, probe
ggagaggagaacactagacatgcca

SEQ ID NO: 254447 - DNA, 25 bp, probe
ggaggggcagaaccaagacagcaca

SEQ ID NO: 254448 - DNA, 25 bp, probe
ggaggggcagaaccaagacagcaca

SEQ ID NO: 254449 - DNA, 25 bp, probe
ggagttgatggaaccaaatagaaaa

SEQ ID NO: 254450 - DNA, 25 bp, probe
ggagtatgatccagccaaaagaatt

SEQ ID NO: 254451 - DNA, 25 bp, probe
ggaggatgtccttgcacttaaactc

SEQ ID NO: 254452 - DNA, 25 bp, probe
ggaggtctcatttcttgtaaagtat

SEQ ID NO: 254453 - DNA, 25 bp, probe
ggaggactcaaaagggacagagcta

SEQ ID NO: 254454 - DNA, 25 bp, probe
ggaggactcaagcaatggagagcgg

SEQ ID NO: 254455 - DNA, 25 bp, probe
ggaggtgcctgaaagctgggagcgt

SEQ ID NO: 254456 - DNA, 25 bp, probe
ggagatggccattgcgaggggaaga

SEQ ID NO: 254457 - DNA, 25 bp, probe
ggagatggccattgcgaggggaaga

SEQ ID NO: 254458 - DNA, 25 bp, probe
ggagtgcaccagtcttggggaagag

SEQ ID NO: 254459 - DNA, 25 bp, probe
ggaggactacacatggcctacagac

SEQ ID NO: 254460 - DNA, 25 bp, probe
ggaggacaatcagtatgtggtacaa

SEQ ID NO: 254461 - DNA, 25 bp, probe
ggacaacaatgagaagcttcaaact

SEQ ID NO: 254462 - DNA, 25 bp, probe
ggagtccctgattcaagttcaggac

SEQ ID NO: 254463 - DNA, 25 bp, probe
ggagtccctgattcaagttcaggac

SEQ ID NO: 254464 - DNA, 25 bp, probe
ggagtacaccatcaagtcgcactcc

SEQ ID NO: 254465 - DNA, 25 bp, probe
ggagtacaccatcaagtcgcactcc

SEQ ID NO: 254466 - DNA, 25 bp, probe
ggagtgtcacctcaaatgcaatact

SEQ ID NO: 254467 - DNA, 25 bp, probe
ggaggacccaaaggagcagaagctt

SEQ ID NO: 254468 - DNA, 25 bp, probe
ggagtacgacaagatgcgggacttt

SEQ ID NO: 254469 - DNA, 25 bp, probe
ggagtacgacaagatgcgggacttt

SEQ ID NO: 254470 - DNA, 25 bp, probe
ggagtgggctaagcacgggccatat

SEQ ID NO: 254471 - DNA, 25 bp, probe
ggagggggaatggcagcaggggttg

SEQ ID NO: 254472 - DNA, 25 bp, probe
ggagggggaatggcagcaggggttg

SEQ ID NO: 254473 - DNA, 25 bp, probe
ggaggaggaggaagaggcggctgtt

SEQ ID NO: 254474 - DNA, 25 bp, probe
ggaggaggagtactggaggttttgc

SEQ ID NO: 254475 - DNA, 25 bp, probe
ggaggaggagcatgtggagcgattc

SEQ ID NO: 254476 - DNA, 25 bp, probe
ggaggatggagcagtgagcgggtct

SEQ ID NO: 254477 - DNA, 25 bp, probe
ggaggagatgaccagtgccttggcc

SEQ ID NO: 254478 - DNA, 25 bp, probe
ggaggcaaatccagagcctggctcc

SEQ ID NO: 254479 - DNA, 25 bp, probe
ggagaggcctggagacctagctcca

SEQ ID NO: 254480 - DNA, 25 bp, probe
ggagaggccagtacgacgtggccat

SEQ ID NO: 254481 - DNA, 25 bp, probe
ggactggccgtttgacgatggggcg

SEQ ID NO: 254482 - DNA, 25 bp, probe
ggaggagccactattccagaaggct

SEQ ID NO: 254483 - DNA, 25 bp, probe
ggaggactctgcatttaccaagcac

SEQ ID NO: 254484 - DNA, 25 bp, probe
ggaggactctgcatttaccaagcac

SEQ ID NO: 254485 - DNA, 25 bp, probe
ggaggacctcggcagagccaagagg

SEQ ID NO: 254486 - DNA, 25 bp, probe
ggaggacctcggcagagccaagagg

SEQ ID NO: 254487 - DNA, 25 bp, probe
ggagagttcttccgagaccaaggga

SEQ ID NO: 254488 - DNA, 25 bp, probe
ggagagttcttccgagaccaaggga

SEQ ID NO: 254489 - DNA, 25 bp, probe
ggagagttcttccgagaccaaggga

SEQ ID NO: 254490 - DNA, 25 bp, probe
ggagaattgcttgaacccgggagac

SEQ ID NO: 254491 - DNA, 25 bp, probe
ggagaatcgcttaaacctgggagac

SEQ ID NO: 254492 - DNA, 25 bp, probe
ggagaacttccttcacaagtgggac

SEQ ID NO: 254493 - DNA, 25 bp, probe
ggagctaaacttcaaaggcgctgaa

SEQ ID NO: 254494 - DNA, 25 bp, probe
ggagctaaacttcaaaggcgctgaa

SEQ ID NO: 254495 - DNA, 25 bp, probe
ggaggagcagaggtggaaagtggga

SEQ ID NO: 254496 - DNA, 25 bp, probe
ggaggatgaagctggagaaggccgc

SEQ ID NO: 254497 - DNA, 25 bp, probe
ggagtggcagactcgagagtggcca

SEQ ID NO: 254498 - DNA, 25 bp, probe
ggaggagagcattagcggagtgcgc

SEQ ID NO: 254499 - DNA, 25 bp, probe
ggaggaggaggagggactgagcggc

SEQ ID NO: 254500 - DNA, 25 bp, probe
ggaggaggaggaggagcagaggtgg

SEQ ID NO: 254501 - DNA, 25 bp, probe
ggaggggagcaaggctgctaagtgg

SEQ ID NO: 254502 - DNA, 25 bp, probe
ggaggggacgctggctaaagtgggt

SEQ ID NO: 254503 - DNA, 25 bp, probe
ggagggagtggcagctatagtctgg

SEQ ID NO: 254504 - DNA, 25 bp, probe
ggagggcctggtgcataatggctgg

SEQ ID NO: 254505 - DNA, 25 bp, probe
ggagagtcaccaattcatacaccgg

SEQ ID NO: 254506 - DNA, 25 bp, probe
ggagaacagttacaatccctgggga

SEQ ID NO: 254507 - DNA, 25 bp, probe
ggagcaatcagttccaaacccagaa

SEQ ID NO: 254508 - DNA, 25 bp, probe
ggaggtcattgagtgcattacccaa

SEQ ID NO: 254509 - DNA, 25 bp, probe
ggaggtcattgagtgcattacccaa

SEQ ID NO: 254510 - DNA, 25 bp, probe
ggaggtcattgagtgcattacccaa

SEQ ID NO: 254511 - DNA, 25 bp, probe
ggaggtcattgagtgcattacccaa

SEQ ID NO: 254512 - DNA, 25 bp, probe
ggaggtcatcgaggtgtcctgaccc

SEQ ID NO: 254513 - DNA, 25 bp, probe
ggaggtcatcgaggtgtcctgaccc

SEQ ID NO: 254514 - DNA, 25 bp, probe
ggaggtgatcgaggtgcaccgagtg

SEQ ID NO: 254515 - DNA, 25 bp, probe
ggagggatgtctggctgcaaagact

SEQ ID NO: 254516 - DNA, 25 bp, probe
ggaggagattgtgcgagccatgacc

SEQ ID NO: 254517 - DNA, 25 bp, probe
ggaggtttggaggcagcgataccag

SEQ ID NO: 254518 - DNA, 25 bp, probe
ggaggtgaaggactctgccaaacag

SEQ ID NO: 254519 - DNA, 25 bp, probe
ggaggtgaaggactctgccaaacag

SEQ ID NO: 254520 - DNA, 25 bp, probe
ggaggagaccgactgcggctatgac

SEQ ID NO: 254521 - DNA, 25 bp, probe
ggaggagagctctagtgagcacctg

SEQ ID NO: 254522 - DNA, 25 bp, probe
ggagggatctgctgcagaaccttct

SEQ ID NO: 254523 - DNA, 25 bp, probe
ggagggatctgctgcagaaccttct

SEQ ID NO: 254524 - DNA, 25 bp, probe
ggagtggatcagggaaaccatgaag

SEQ ID NO: 254525 - DNA, 25 bp, probe
ggagtattaaattaacacatgcaag

SEQ ID NO: 254526 - DNA, 25 bp, probe
ggagtattaaattaacacatgcaag

SEQ ID NO: 254527 - DNA, 25 bp, probe
ggagtcttaacattggccagcatct

SEQ ID NO: 254528 - DNA, 25 bp, probe
ggagtcttcataacgctaagcattg

SEQ ID NO: 254529 - DNA, 25 bp, probe
ggagatgttgacatcgctggccttc

SEQ ID NO: 254530 - DNA, 25 bp, probe
ggagtttgtcttcatgaagattcct

SEQ ID NO: 254531 - DNA, 25 bp, probe
ggaggtgtctcgagagaagatcacc

SEQ ID NO: 254532 - DNA, 25 bp, probe
ggaggattctagagtgaacttccac

SEQ ID NO: 254533 - DNA, 25 bp, probe
ggagaaggtcagagccaaattccaa

SEQ ID NO: 254534 - DNA, 25 bp, probe
ggagaaagccaaacgctgtaaccga

SEQ ID NO: 254535 - DNA, 25 bp, probe
ggagagaaattatccatggaaccaa

SEQ ID NO: 254536 - DNA, 25 bp, probe
ggagaaattatagttaggcttccat

SEQ ID NO: 254537 - DNA, 25 bp, probe
ggagaaattatagttaggcttccat

SEQ ID NO: 254538 - DNA, 25 bp, probe
ggagaaagttgagtgtcaggggaca

SEQ ID NO: 254539 - DNA, 25 bp, probe
ggagatcaatttggtgacggaaaac

SEQ ID NO: 254540 - DNA, 25 bp, probe
ggagatcaatttggtgacggaaaac

SEQ ID NO: 254541 - DNA, 25 bp, probe
ggagatattgttgtactggacccag

SEQ ID NO: 254542 - DNA, 25 bp, probe
ggagaccgatatttaaggaccccag

SEQ ID NO: 254543 - DNA, 25 bp, probe
ggagacggtacagctgaggaacccg

SEQ ID NO: 254544 - DNA, 25 bp, probe
ggagaggagttccttactaacccag

SEQ ID NO: 254545 - DNA, 25 bp, probe
ggagaggagttccttactaacccag

SEQ ID NO: 254546 - DNA, 25 bp, probe
ggagaggatttggtccctcaactat

SEQ ID NO: 254547 - DNA, 25 bp, probe
ggagacccattggtcaggctcagca

SEQ ID NO: 254548 - DNA, 25 bp, probe
ggagacgacttactagatctcatac

SEQ ID NO: 254549 - DNA, 25 bp, probe
ggagatgccattgctgaaatccgac

SEQ ID NO: 254550 - DNA, 25 bp, probe
ggagtacagtggcacgatctcggct

SEQ ID NO: 254551 - DNA, 25 bp, probe
ggagtacagtggcacgatctcggct

SEQ ID NO: 254552 - DNA, 25 bp, probe
ggagagaagggctatttccggctgc

SEQ ID NO: 254553 - DNA, 25 bp, probe
ggagagtggagggtttgacgggcct

SEQ ID NO: 254554 - DNA, 25 bp, probe
ggagttggaagtgtgtgatctgtgg

SEQ ID NO: 254555 - DNA, 25 bp, probe
ggagttggttagaatttctgtgttt

SEQ ID NO: 254556 - DNA, 25 bp, probe
ggagagtggttgctgttaatattat

SEQ ID NO: 254557 - DNA, 25 bp, probe
ggaggtgtggatggggtactacaac

SEQ ID NO: 254558 - DNA, 25 bp, probe
ggaggtgtacaaggggatcgacaac

SEQ ID NO: 254559 - DNA, 25 bp, probe
ggagggtaaggaaggcagcaccaaa

SEQ ID NO: 254560 - DNA, 25 bp, probe
ggaggagtaagggggctgtcacaaa

SEQ ID NO: 254561 - DNA, 25 bp, probe
ggagatacaaaacgggctacaccaa

SEQ ID NO: 254562 - DNA, 25 bp, probe
ggagaatccaagcgaggtcaacaga

SEQ ID NO: 254563 - DNA, 25 bp, probe
ggagaatccaagcgaggtcaacaga

SEQ ID NO: 254564 - DNA, 25 bp, probe
ggcaagtcgaggcaatggaaaagct

SEQ ID NO: 254565 - DNA, 25 bp, probe
ggaggactgagctggggaaaatctg

SEQ ID NO: 254566 - DNA, 25 bp, probe
ggaggacgtctccaagtatccagac

SEQ ID NO: 254567 - DNA, 25 bp, probe
ggaggagcgtgcggaagaaccacat

SEQ ID NO: 254568 - DNA, 25 bp, probe
ggaggatggtgcctgagacaaccct

SEQ ID NO: 254569 - DNA, 25 bp, probe
ggaggatggtgcctgagacaaccct

SEQ ID NO: 254570 - DNA, 25 bp, probe
ggaggatggggctcagaatgcagac

SEQ ID NO: 254571 - DNA, 25 bp, probe
ggaggtggtggatgaaatcagcatg

SEQ ID NO: 254572 - DNA, 25 bp, probe
ggaggtcctgcgggagaaagtgtat

SEQ ID NO: 254573 - DNA, 25 bp, probe
ggctggtctcgtggtaaaactgtta

SEQ ID NO: 254574 - DNA, 25 bp, probe
ggcattttcgtaggaaagaggacta

SEQ ID NO: 254575 - DNA, 25 bp, probe
ggcccttttaggcacagggcaccta

SEQ ID NO: 254576 - DNA, 25 bp, probe
ggcaccttttaactaacccatatgt

SEQ ID NO: 254577 - DNA, 25 bp, probe
ggaccaaaggaacatagccctagtt

SEQ ID NO: 254578 - DNA, 25 bp, probe
ggagccacaattgaggataccccga

SEQ ID NO: 254579 - DNA, 25 bp, probe
ggaggtcaatctgattgtcctgacc

SEQ ID NO: 254580 - DNA, 25 bp, probe
ggaggagtatttttgtgcctcagac

SEQ ID NO: 254581 - DNA, 25 bp, probe
ggcgatgactttatttgcggagcat

SEQ ID NO: 254582 - DNA, 25 bp, probe
ggaggagcatttcatttggagtgat

SEQ ID NO: 254583 - DNA, 25 bp, probe
ggaggtcatttactacgtgcgagat

SEQ ID NO: 254584 - DNA, 25 bp, probe
ggaggttttagaactctgcagtatt

SEQ ID NO: 254585 - DNA, 25 bp, probe
ggagagttttagaaccagcacatcc

SEQ ID NO: 254586 - DNA, 25 bp, probe
ggagagttttagaaccagcacatcc

SEQ ID NO: 254587 - DNA, 25 bp, probe
ggagattcttaagacgacatgcttc

SEQ ID NO: 254588 - DNA, 25 bp, probe
ggagaacttcaagtccttcatcttc

SEQ ID NO: 254589 - DNA, 25 bp, probe
ggagtcatgtgagatttctgtcctc

SEQ ID NO: 254590 - DNA, 25 bp, probe
ggaggatgatgtggttgtcatggca

SEQ ID NO: 254591 - DNA, 25 bp, probe
ggagtgtgcatccagtattctggtt

SEQ ID NO: 254592 - DNA, 25 bp, probe
ggaggtctggcaagatagatggtgt

SEQ ID NO: 254593 - DNA, 25 bp, probe
ggaggttggaaaatgtagtgtttgt

SEQ ID NO: 254594 - DNA, 25 bp, probe
ggagagattagacactggaggtttt

SEQ ID NO: 254595 - DNA, 25 bp, probe
ggagcagttaagtactcagggtgga

SEQ ID NO: 254596 - DNA, 25 bp, probe
ggaggttcagtggagatcagcaagt

SEQ ID NO: 254597 - DNA, 25 bp, probe
ggagtgttggtggagatcagagtgc

SEQ ID NO: 254598 - DNA, 25 bp, probe
ggagatagtcgggcaatcttgtgtc

SEQ ID NO: 254599 - DNA, 25 bp, probe
ggagtatgctgccataaattttgtt

SEQ ID NO: 254600 - DNA, 25 bp, probe
ggagtatgctgccataaattttgtt

SEQ ID NO: 254601 - DNA, 25 bp, probe
ggagtagctcagacctgtttttatt

SEQ ID NO: 254602 - DNA, 25 bp, probe
ggagtacaagtgcctggggtgtaat

SEQ ID NO: 254603 - DNA, 25 bp, probe
ggagttcaatgctgggagaggtcca

SEQ ID NO: 254604 - DNA, 25 bp, probe
ggagctcctatcggagggtcttcca

SEQ ID NO: 254605 - DNA, 25 bp, probe
ggagactttcacaagtggtttccat

SEQ ID NO: 254606 - DNA, 25 bp, probe
ggagactttcacaagtggtttccat

SEQ ID NO: 254607 - DNA, 25 bp, probe
ggagactgtctcaagagggcactgg

SEQ ID NO: 254608 - DNA, 25 bp, probe
ggagatgagcccaaagtgccaggga

SEQ ID NO: 254609 - DNA, 25 bp, probe
ggagagatcccctggcttgcagaaa

SEQ ID NO: 254610 - DNA, 25 bp, probe
ggacagatccacaggtatgtaaaag

SEQ ID NO: 254611 - DNA, 25 bp, probe
ggacagatccacaggtatgtaaaag

SEQ ID NO: 254612 - DNA, 25 bp, probe
ggagcggcccgtgtatgaacgaagc

SEQ ID NO: 254613 - DNA, 25 bp, probe
ggaggaggccgtgtgaagacagagg

SEQ ID NO: 254614 - DNA, 25 bp, probe
ggaggaggtggtgggacacacgcag

SEQ ID NO: 254615 - DNA, 25 bp, probe
ggaggagtggagtgaatccctggct

SEQ ID NO: 254616 - DNA, 25 bp, probe
ggagggtggagggattcctctgcga

SEQ ID NO: 254617 - DNA, 25 bp, probe
ggaggaggcagaaggatgcatcccc

SEQ ID NO: 254618 - DNA, 25 bp, probe
ggaggagagagcagcttctgccact

SEQ ID NO: 254619 - DNA, 25 bp, probe
ggaggagagagcagcttctgccact

SEQ ID NO: 254620 - DNA, 25 bp, probe
ggaggggtgatgactttggcacgtc

SEQ ID NO: 254621 - DNA, 25 bp, probe
ggagaggggcatgcacatgcccacg

SEQ ID NO: 254622 - DNA, 25 bp, probe
ggagcagaaacagccattgcggccc

SEQ ID NO: 254623 - DNA, 25 bp, probe
ggagaaaggtcgctgtgtggcctca

SEQ ID NO: 254624 - DNA, 25 bp, probe
ggagagaatggtcgggtggtcagcc

SEQ ID NO: 254625 - DNA, 25 bp, probe
ggagagctatggaagggccgctggc

SEQ ID NO: 254626 - DNA, 25 bp, probe
ggaggatgaggatggtgcctctgag

SEQ ID NO: 254627 - DNA, 25 bp, probe
ggaggaggttatgagcctgctgcag

SEQ ID NO: 254628 - DNA, 25 bp, probe
ggaggagttggaccacactgtgagc

SEQ ID NO: 254629 - DNA, 25 bp, probe
ggaggagttggaccacactgtgagc

SEQ ID NO: 254630 - DNA, 25 bp, probe
ggaggagatgcaggatgcccacgtc

SEQ ID NO: 254631 - DNA, 25 bp, probe
ggagagaatgacttctgccttcatc

SEQ ID NO: 254632 - DNA, 25 bp, probe
ggagagttgagatttcctcctccct

SEQ ID NO: 254633 - DNA, 25 bp, probe
ggagggtggagtaactgcaattcac

SEQ ID NO: 254634 - DNA, 25 bp, probe
ggaggatgggagatgcgtgcagagc

SEQ ID NO: 254635 - DNA, 25 bp, probe
ggaggatgggagatgcgtgcagagc

SEQ ID NO: 254636 - DNA, 25 bp, probe
ggagtatggagtacagctgtctggc

SEQ ID NO: 254637 - DNA, 25 bp, probe
ggagatgatgggagccagttggata

SEQ ID NO: 254638 - DNA, 25 bp, probe
ggagtgagcttgagcctttgatatc

SEQ ID NO: 254639 - DNA, 25 bp, probe
ggagatggtctgcatcagctttttg

SEQ ID NO: 254640 - DNA, 25 bp, probe
ggagatggtctgcatcagctttttg

SEQ ID NO: 254641 - DNA, 25 bp, probe
ggagagtgtcagaactcttctgctg

SEQ ID NO: 254642 - DNA, 25 bp, probe
ggaggtgaatgagactacgctgaaa

SEQ ID NO: 254643 - DNA, 25 bp, probe
ggaggtgcaaaggctctacgtgcaa

SEQ ID NO: 254644 - DNA, 25 bp, probe
ggaggtgacaaggcagtctcttgct

SEQ ID NO: 254645 - DNA, 25 bp, probe
ggagttaaagagcagcctggctaac

SEQ ID NO: 254646 - DNA, 25 bp, probe
ggagttaaacagcagcaacactaaa

SEQ ID NO: 254647 - DNA, 25 bp, probe
ggagttcaagaactacaactttcca

SEQ ID NO: 254648 - DNA, 25 bp, probe
ggagttcaagaactacaactttcca

SEQ ID NO: 254649 - DNA, 25 bp, probe
ggagttgttgaacacagtggtacta

SEQ ID NO: 254650 - DNA, 25 bp, probe
ggagttctgtaacagcatggcgaac

SEQ ID NO: 254651 - DNA, 25 bp, probe
ggagttagagaatatgctgggccaa

SEQ ID NO: 254652 - DNA, 25 bp, probe
ggagttagagaatatgctgggccaa

SEQ ID NO: 254653 - DNA, 25 bp, probe
ggagactaaggcaaattgggccatt

SEQ ID NO: 254654 - DNA, 25 bp, probe
ggagaccagaggacccttgtctcac

SEQ ID NO: 254655 - DNA, 25 bp, probe
ggaaccaagcagacgttatttacgt

SEQ ID NO: 254656 - DNA, 25 bp, probe
ggaacgaggagatctgtgtttactt

SEQ ID NO: 254657 - DNA, 25 bp, probe
ggagactgtggaaagttgttattta

SEQ ID NO: 254658 - DNA, 25 bp, probe
ggagatctggagtggtctttcctct

SEQ ID NO: 254659 - DNA, 25 bp, probe
ggagtgtgattgtggttttcatgtg

SEQ ID NO: 254660 - DNA, 25 bp, probe
ggagggcagtatgagctttttgctg

SEQ ID NO: 254661 - DNA, 25 bp, probe
ggaggggattctccctttatcatca

SEQ ID NO: 254662 - DNA, 25 bp, probe
ggaggggattctccctttatcatca

SEQ ID NO: 254663 - DNA, 25 bp, probe
ggaggggattctccctttatcatca

SEQ ID NO: 254664 - DNA, 25 bp, probe
ggagtgggaacacctattggttctc

SEQ ID NO: 254665 - DNA, 25 bp, probe
ggagtggtgaaaatctccgattttg

SEQ ID NO: 254666 - DNA, 25 bp, probe
ggaggtcaaaatttcctaattctgg

SEQ ID NO: 254667 - DNA, 25 bp, probe
ggaggtgccaacagtgttaggcctg

SEQ ID NO: 254668 - DNA, 25 bp, probe
ggaggtgccaacagtgttaggcctg

SEQ ID NO: 254669 - DNA, 25 bp, probe
ggagggccagagtgtgtatacccag

SEQ ID NO: 254670 - DNA, 25 bp, probe
ggaggtggcagttatgctgttacta

SEQ ID NO: 254671 - DNA, 25 bp, probe
ggagggatgaattagctggtacctg

SEQ ID NO: 254672 - DNA, 25 bp, probe
ggagagaagttaactgagattccta

SEQ ID NO: 254673 - DNA, 25 bp, probe
ggagagaagttaactgagattccta

SEQ ID NO: 254674 - DNA, 25 bp, probe
ggagatagcacttcgcagtggtcct

SEQ ID NO: 254675 - DNA, 25 bp, probe
ggagtcagcacattcacgatactgt

SEQ ID NO: 254676 - DNA, 25 bp, probe
ggagatcatggcaacagagctactg

SEQ ID NO: 254677 - DNA, 25 bp, probe
ggagatcatggcaacagagctactg

SEQ ID NO: 254678 - DNA, 25 bp, probe
ggagatcttgcaacatggccatgtg

SEQ ID NO: 254679 - DNA, 25 bp, probe
ggagatgcttgaaggcatgcctgga

SEQ ID NO: 254680 - DNA, 25 bp, probe
ggagtgtagctagcagcgtggagac

SEQ ID NO: 254681 - DNA, 25 bp, probe
ggagtggacagatgagggtgatgac

SEQ ID NO: 254682 - DNA, 25 bp, probe
ggagaagcacagcagccggaagatc

SEQ ID NO: 254683 - DNA, 25 bp, probe
ggagcagcctcgaaactgtgacgat

SEQ ID NO: 254684 - DNA, 25 bp, probe
ggagaacctgaaacaaatccatttt

SEQ ID NO: 254685 - DNA, 25 bp, probe
ggaggtgcctgagagcagaatgaat

SEQ ID NO: 254686 - DNA, 25 bp, probe
ggaggtgcaccataagcaggagagc

SEQ ID NO: 254687 - DNA, 25 bp, probe
ggagggtccaatcctaggacagcct

SEQ ID NO: 254688 - DNA, 25 bp, probe
ggagggtccaatcatgaggcaccta

SEQ ID NO: 254689 - DNA, 25 bp, probe
ggagggtccaatcatgaggcaccta

SEQ ID NO: 254690 - DNA, 25 bp, probe
ggaggtgacaagccgcatacgcacc

SEQ ID NO: 254691 - DNA, 25 bp, probe
ggagttgatgaacccatcatgctgg

SEQ ID NO: 254692 - DNA, 25 bp, probe
ggagactagaatcccatctgtgctc

SEQ ID NO: 254693 - DNA, 25 bp, probe
ggagtcaatggagtccatgtgtgca

SEQ ID NO: 254694 - DNA, 25 bp, probe
ggagggaggtattcgtgcagcatat

SEQ ID NO: 254695 - DNA, 25 bp, probe
ggaggggcagtgttagagcagggct

SEQ ID NO: 254696 - DNA, 25 bp, probe
ggagggctcggatgcagagatcggc

SEQ ID NO: 254697 - DNA, 25 bp, probe
ggaggttgaggctgcagtgagctgt

SEQ ID NO: 254698 - DNA, 25 bp, probe
ggaggttgatggcgagtggtgctga

SEQ ID NO: 254699 - DNA, 25 bp, probe
ggaggtatgataggtcaggggctag

SEQ ID NO: 254700 - DNA, 25 bp, probe
ggaggtcatgaatgtggtgttgcca

SEQ ID NO: 254701 - DNA, 25 bp, probe
ggaggtcatgcagtggtttgggccg

SEQ ID NO: 254702 - DNA, 25 bp, probe
ggaggtcagctgagtccgaggaggt

SEQ ID NO: 254703 - DNA, 25 bp, probe
ggagcattaatgaggcctacgggta

SEQ ID NO: 254704 - DNA, 25 bp, probe
ggagttcaagcgcgctttcgtgcgc

SEQ ID NO: 254705 - DNA, 25 bp, probe
ggagttcacagcagccttatggagg

SEQ ID NO: 254706 - DNA, 25 bp, probe
ggagttcacagcagccttatggagg

SEQ ID NO: 254707 - DNA, 25 bp, probe
ggagttcaccagtgttagaagtgaa

SEQ ID NO: 254708 - DNA, 25 bp, probe
ggagattcccagttaaaaggctcca

SEQ ID NO: 254709 - DNA, 25 bp, probe
ggacttcaccgtcaagatcggggac

SEQ ID NO: 254710 - DNA, 25 bp, probe
ggacgtaccgacaatggtctggggt

SEQ ID NO: 254711 - DNA, 25 bp, probe
ggaggtcagcaggacaagagtgcgg

SEQ ID NO: 254712 - DNA, 25 bp, probe
ggagtccagcggaaggtcagcggga

SEQ ID NO: 254713 - DNA, 25 bp, probe
ggagtcaccttgaggacactcggtt

SEQ ID NO: 254714 - DNA, 25 bp, probe
ggagacactctatctgtaatccaag

SEQ ID NO: 254715 - DNA, 25 bp, probe
ggagcactcccaagctgtgaatgtc

SEQ ID NO: 254716 - DNA, 25 bp, probe
ggagatcatgcagcatcgcttcttt

SEQ ID NO: 254717 - DNA, 25 bp, probe
ggagttgaactgccttatgtttggg

SEQ ID NO: 254718 - DNA, 25 bp, probe
ggagtggagactctttagcttgcgg

SEQ ID NO: 254719 - DNA, 25 bp, probe
ggagggaacctgtttcactatggcc

SEQ ID NO: 254720 - DNA, 25 bp, probe
ggagaagaaccttctccgtatccca

SEQ ID NO: 254721 - DNA, 25 bp, probe
ggagaacaaccttcaactcttacca

SEQ ID NO: 254722 - DNA, 25 bp, probe
ggagaaagcaccgacaatctttgat

SEQ ID NO: 254723 - DNA, 25 bp, probe
ggagcgggaacttaacattctgata

SEQ ID NO: 254724 - DNA, 25 bp, probe
ggaggtggactcaggacttcagaag

SEQ ID NO: 254725 - DNA, 25 bp, probe
ggaggtggactcaggacttcagaag

SEQ ID NO: 254726 - DNA, 25 bp, probe
tggacttccaccaggcacgggaaga

SEQ ID NO: 254727 - DNA, 25 bp, probe
ggaccccaacaggaactgggacgct

SEQ ID NO: 254728 - DNA, 25 bp, probe
ggaccccaagaatactggccatatt

SEQ ID NO: 254729 - DNA, 25 bp, probe
ggagacccaggatttagggtcacat

SEQ ID NO: 254730 - DNA, 25 bp, probe
ggagtagccggccagtcgaggctac

SEQ ID NO: 254731 - DNA, 25 bp, probe
ggagttggggcacagcgaggtactg

SEQ ID NO: 254732 - DNA, 25 bp, probe
ggagttgtccaaccacgaggtgatg

SEQ ID NO: 254733 - DNA, 25 bp, probe
ggagaccctaagccaagaaggagaa

SEQ ID NO: 254734 - DNA, 25 bp, probe
ggagaccaagaaaccactaggaatt

SEQ ID NO: 254735 - DNA, 25 bp, probe
ggagaaagaaagtacccagcaaatg

SEQ ID NO: 254736 - DNA, 25 bp, probe
ggagaccgtggacagaccaataatg

SEQ ID NO: 254737 - DNA, 25 bp, probe
tggagaccgtggacagaccaataat

SEQ ID NO: 254738 - DNA, 25 bp, probe
ggagagctggggaaaccacattaag

SEQ ID NO: 254739 - DNA, 25 bp, probe
ggagagctggggaaaccacattaag

SEQ ID NO: 254740 - DNA, 25 bp, probe
ggaggtggtgaaaatcaagctttgg

SEQ ID NO: 254741 - DNA, 25 bp, probe
ggaggtggtgaaaatcaagctttgg

SEQ ID NO: 254742 - DNA, 25 bp, probe
ggagacgtggacagccaacgttggt

SEQ ID NO: 254743 - DNA, 25 bp, probe
ggagacgggggagcagcacgatttt

SEQ ID NO: 254744 - DNA, 25 bp, probe
ggagacgggggagcagcacgatttt

SEQ ID NO: 254745 - DNA, 25 bp, probe
ggagggtgggaagagtcatgttttt

SEQ ID NO: 254746 - DNA, 25 bp, probe
ggagaggtcgaatttactgcttttt

SEQ ID NO: 254747 - DNA, 25 bp, probe
ggagtagaggatgttcctgcttctc

SEQ ID NO: 254748 - DNA, 25 bp, probe
ggagtagctcaaggtctcctgttcg

SEQ ID NO: 254749 - DNA, 25 bp, probe
ggagttgcacaaggtccacggatcc

SEQ ID NO: 254750 - DNA, 25 bp, probe
ggagagccacaaggctagccgagac

SEQ ID NO: 254751 - DNA, 25 bp, probe
ggagagcaacaatgcttggctgacc

SEQ ID NO: 254752 - DNA, 25 bp, probe
ggagagcaacaatgcttggctgacc

SEQ ID NO: 254753 - DNA, 25 bp, probe
ggagacacatctggaatttgctgca

SEQ ID NO: 254754 - DNA, 25 bp, probe
ggagtcacagatcaactactgctcg

SEQ ID NO: 254755 - DNA, 25 bp, probe
ggagataagatgaatctcttctccc

SEQ ID NO: 254756 - DNA, 25 bp, probe
ggagtgcagggaacatggaggagga

SEQ ID NO: 254757 - DNA, 25 bp, probe
ggaggggaagatgggagagcgatac

SEQ ID NO: 254758 - DNA, 25 bp, probe
ggagggcaaggaaggcagcatggag

SEQ ID NO: 254759 - DNA, 25 bp, probe
ggagggctaggcttgggatgagctg

SEQ ID NO: 254760 - DNA, 25 bp, probe
ggaggtgtaggctggagagacattg

SEQ ID NO: 254761 - DNA, 25 bp, probe
ggaggtgttcagtcggaggaattgt

SEQ ID NO: 254762 - DNA, 25 bp, probe
ggaggtgttcagtcggaggaattgt

SEQ ID NO: 254763 - DNA, 25 bp, probe
ggagcgaattaaagcagaaggcatt

SEQ ID NO: 254764 - DNA, 25 bp, probe
ggagcgaattaaagcagaaggcatt

SEQ ID NO: 254765 - DNA, 25 bp, probe
ggagtcacaatctcagcaacgagca

SEQ ID NO: 254766 - DNA, 25 bp, probe
ggagtcacaatctcagcaacgagca

SEQ ID NO: 254767 - DNA, 25 bp, probe
ggagtccagtctaagcagagagact

SEQ ID NO: 254768 - DNA, 25 bp, probe
ggagaacgccatcatccaggagatc

SEQ ID NO: 254769 - DNA, 25 bp, probe
ggagagacgtactctgagggcagcg

SEQ ID NO: 254770 - DNA, 25 bp, probe
ggagagatggattcacactgggccc

SEQ ID NO: 254771 - DNA, 25 bp, probe
ggagaaggcacaccatggtacctcc

SEQ ID NO: 254772 - DNA, 25 bp, probe
ggagaaggcacaccatggtacctcc

SEQ ID NO: 254773 - DNA, 25 bp, probe
ggagaaccacagccaagttcattgc

SEQ ID NO: 254774 - DNA, 25 bp, probe
ggagatcccaatacggactcactgg

SEQ ID NO: 254775 - DNA, 25 bp, probe
ggagagcctcagaatgggatttggg

SEQ ID NO: 254776 - DNA, 25 bp, probe
ggagacctgattcgggagatctggc

SEQ ID NO: 254777 - DNA, 25 bp, probe
ggagggctgatcaaggccaagctgg

SEQ ID NO: 254778 - DNA, 25 bp, probe
ggaggggatctgtgtcactgtaggt

SEQ ID NO: 254779 - DNA, 25 bp, probe
ggaggggagttcttactggtgagat

SEQ ID NO: 254780 - DNA, 25 bp, probe
ggagccggcagtccttaaggaagag

SEQ ID NO: 254781 - DNA, 25 bp, probe
ggagagggcagctactccaaggtga

SEQ ID NO: 254782 - DNA, 25 bp, probe
ggagagggcagctactccaaggtga

SEQ ID NO: 254783 - DNA, 25 bp, probe
ggagaaggaccgaaccaagtgagcc

SEQ ID NO: 254784 - DNA, 25 bp, probe
ggagaaggacactgcatcccagatc

SEQ ID NO: 254785 - DNA, 25 bp, probe
ggagaagggctttctccacatgctc

SEQ ID NO: 254786 - DNA, 25 bp, probe
ggagagactgagactgactccctta

SEQ ID NO: 254787 - DNA, 25 bp, probe
ggagcagagctaagtggcttcccat

SEQ ID NO: 254788 - DNA, 25 bp, probe
ggagatgagccgaggcttgctcgct

SEQ ID NO: 254789 - DNA, 25 bp, probe
ggagagagcaagatgggttccttgg

SEQ ID NO: 254790 - DNA, 25 bp, probe
ggagagagcaagatgggttccttgg

SEQ ID NO: 254791 - DNA, 25 bp, probe
ggagaacacccttggtggcttatgg

SEQ ID NO: 254792 - DNA, 25 bp, probe
ggagaaactccaagatgaggatttg

SEQ ID NO: 254793 - DNA, 25 bp, probe
ggagtgaactgccacaagcagtgca

SEQ ID NO: 254794 - DNA, 25 bp, probe
ggagtgattcagatgctgaggctca

SEQ ID NO: 254795 - DNA, 25 bp, probe
ggagactgatagcatgtgatggctc

SEQ ID NO: 254796 - DNA, 25 bp, probe
ggagagcattagcggagtgcgcatg

SEQ ID NO: 254797 - DNA, 25 bp, probe
ggagtcattgaagaagctgctgcga

SEQ ID NO: 254798 - DNA, 25 bp, probe
ggagtgtgtgaagtactgcgtggtg

SEQ ID NO: 254799 - DNA, 25 bp, probe
ggagtttgaatttctgccaggattg

SEQ ID NO: 254800 - DNA, 25 bp, probe
ggagttgtagatatcttccagactg

SEQ ID NO: 254801 - DNA, 25 bp, probe
ggagttctagttagctcagggcctg

SEQ ID NO: 254802 - DNA, 25 bp, probe
ggagttctgtgaaggtggagacctg

SEQ ID NO: 254803 - DNA, 25 bp, probe
ggagttcctgaacgagaaggcgcgc

SEQ ID NO: 254804 - DNA, 25 bp, probe
ggagtctctggacaagaagctggga

SEQ ID NO: 254805 - DNA, 25 bp, probe
ggagggagagcggagaaactgggat

SEQ ID NO: 254806 - DNA, 25 bp, probe
ggagggagagcggagaaactgggat

SEQ ID NO: 254807 - DNA, 25 bp, probe
ggagttagaggggacatcacttaga

SEQ ID NO: 254808 - DNA, 25 bp, probe
ggagctttgggtctctactgtatga

SEQ ID NO: 254809 - DNA, 25 bp, probe
ggagttatggagacctgcttttatc

SEQ ID NO: 254810 - DNA, 25 bp, probe
ggagtagtggatgtctgcaaaaacc

SEQ ID NO: 254811 - DNA, 25 bp, probe
ggagtggcttgaaactgcaaaaagt

SEQ ID NO: 254812 - DNA, 25 bp, probe
ggagagcttatgaccaatgtaaaaa

SEQ ID NO: 254813 - DNA, 25 bp, probe
ggagagcttatgaccaatgtaaaaa

SEQ ID NO: 254814 - DNA, 25 bp, probe
ggagagcttcctcattgttaaggca

SEQ ID NO: 254815 - DNA, 25 bp, probe
ggagagttcccatgtcaaaatgaca

SEQ ID NO: 254816 - DNA, 25 bp, probe
ggagatgtcatcacaataaaaacca

SEQ ID NO: 254817 - DNA, 25 bp, probe
ggagatgtcatcacaataaaaacca

SEQ ID NO: 254818 - DNA, 25 bp, probe
ggagatgtacatcattaaggagggc

SEQ ID NO: 254819 - DNA, 25 bp, probe
ggagtgctaatgtttgagacgatgg

SEQ ID NO: 254820 - DNA, 25 bp, probe
ggagtcatagcatgtgtgtaaactt

SEQ ID NO: 254821 - DNA, 25 bp, probe
ggagtcagactggctgtgtcaaatc

SEQ ID NO: 254822 - DNA, 25 bp, probe
ggagtagatattgattactatcata

SEQ ID NO: 254823 - DNA, 25 bp, probe
ggagttacttctatgcctgattaca

SEQ ID NO: 254824 - DNA, 25 bp, probe
ggagagtatcttgctgggcaagttc

SEQ ID NO: 254825 - DNA, 25 bp, probe
ggagactctcccgtggtgagattcc

SEQ ID NO: 254826 - DNA, 25 bp, probe
ggagtgcctcctaatggtaatcatt

SEQ ID NO: 254827 - DNA, 25 bp, probe
ggagtcctcctgatggaagttgtca

SEQ ID NO: 254828 - DNA, 25 bp, probe
ggagtccttcgcaggcatagcctgc

SEQ ID NO: 254829 - DNA, 25 bp, probe
ggagtccttcgcaggcatagcctgc

SEQ ID NO: 254830 - DNA, 25 bp, probe
ggagtcccttgcgggaagactgcca

SEQ ID NO: 254831 - DNA, 25 bp, probe
ggagtcgttgtgcctcagtatgacc

SEQ ID NO: 254832 - DNA, 25 bp, probe
ggagtcagcgttcaatcttgacctt

SEQ ID NO: 254833 - DNA, 25 bp, probe
ggagaacgtggagacggcgtgcatt

SEQ ID NO: 254834 - DNA, 25 bp, probe
ggagaacgccgagatctacgactat

SEQ ID NO: 254835 - DNA, 25 bp, probe
ggagaacccagtgaccagcgggaaa

SEQ ID NO: 254836 - DNA, 25 bp, probe
ggagatatcccgtttcaaggctgta

SEQ ID NO: 254837 - DNA, 25 bp, probe
ggagatatcccgtttcaaggctgta

SEQ ID NO: 254838 - DNA, 25 bp, probe
ggagatattcaacaggagggcggaa

SEQ ID NO: 254839 - DNA, 25 bp, probe
ggagttacgtagagagggtggccac

SEQ ID NO: 254840 - DNA, 25 bp, probe
ggagctcaacgtgacggtggtgacg

SEQ ID NO: 254841 - DNA, 25 bp, probe
ggagctcaacgtgacggtggtgacg

SEQ ID NO: 254842 - DNA, 25 bp, probe
ggagggagagtggagggtttgacgg

SEQ ID NO: 254843 - DNA, 25 bp, probe
ggagggaagtgctgctagatttgac

SEQ ID NO: 254844 - DNA, 25 bp, probe
ggagaggactgggcagcttgttgaa

SEQ ID NO: 254845 - DNA, 25 bp, probe
ggagagagactccagctgggttgga

SEQ ID NO: 254846 - DNA, 25 bp, probe
ggagagtgacaccatggagggtaca

SEQ ID NO: 254847 - DNA, 25 bp, probe
ggagagtgacaccatggagggtaca

SEQ ID NO: 254848 - DNA, 25 bp, probe
ggagagtcacctgaaggggaacatg

SEQ ID NO: 254849 - DNA, 25 bp, probe
ggagaacctcgtgcagtgggaaatg

SEQ ID NO: 254850 - DNA, 25 bp, probe
ggagaacctcgtgcagtgggaaatg

SEQ ID NO: 254851 - DNA, 25 bp, probe
ggagaactacgtgtgaaggtattca

SEQ ID NO: 254852 - DNA, 25 bp, probe
ggagaacacacagctgtaatcgttt

SEQ ID NO: 254853 - DNA, 25 bp, probe
ggagaaggcaaatgtaatcatgttc

SEQ ID NO: 254854 - DNA, 25 bp, probe
ggagaagccgtgtgctcttcattat

SEQ ID NO: 254855 - DNA, 25 bp, probe
ggagaagccgtgtgctcttcattat

SEQ ID NO: 254856 - DNA, 25 bp, probe
ggagtaccaattgccttattatgac

SEQ ID NO: 254857 - DNA, 25 bp, probe
ggagtaccaattgccttattatgac

SEQ ID NO: 254858 - DNA, 25 bp, probe
ggagagaaaaccacttagactgcac

SEQ ID NO: 254859 - DNA, 25 bp, probe
ggagtagggactaactatagcacaa

SEQ ID NO: 254860 - DNA, 25 bp, probe
ggagtgaggccagtaagctcagaaa

SEQ ID NO: 254861 - DNA, 25 bp, probe
ggagtgagagattacaagctcttaa

SEQ ID NO: 254862 - DNA, 25 bp, probe
ggagtgagagattacaagctcttaa

SEQ ID NO: 254863 - DNA, 25 bp, probe
ggagattgagtctagaggtcttaat

SEQ ID NO: 254864 - DNA, 25 bp, probe
ggagattgagtctagaggtcttaat

SEQ ID NO: 254865 - DNA, 25 bp, probe
ggagaagaatccaatgagtttacta

SEQ ID NO: 254866 - DNA, 25 bp, probe
ggagacagggcatttgagtttatat

SEQ ID NO: 254867 - DNA, 25 bp, probe
ggagaagctgggtgatggttccttt

SEQ ID NO: 254868 - DNA, 25 bp, probe
ggagaggtgcggggagacattccaa

SEQ ID NO: 254869 - DNA, 25 bp, probe
ggagatcctgggagaagactcatag

SEQ ID NO: 254870 - DNA, 25 bp, probe
ggagtacgccgtcaagatcattgag

SEQ ID NO: 254871 - DNA, 25 bp, probe
ggagtaaactggcaagatgtatatg

SEQ ID NO: 254872 - DNA, 25 bp, probe
ggagtagaactgttaaggcacactg

SEQ ID NO: 254873 - DNA, 25 bp, probe
ggagtagaactgttaaggcacactg

SEQ ID NO: 254874 - DNA, 25 bp, probe
ggagttggtggagtactaccagtgc

SEQ ID NO: 254875 - DNA, 25 bp, probe
ggagttcgtgaagctcaagtcggac

SEQ ID NO: 254876 - DNA, 25 bp, probe
ggagttcgtgaagctcaagtcggac

SEQ ID NO: 254877 - DNA, 25 bp, probe
ggagttttgccaggcatcaagtggc

SEQ ID NO: 254878 - DNA, 25 bp, probe
ggagattcctgcaacctcaagagac

SEQ ID NO: 254879 - DNA, 25 bp, probe
ggagtcttctgacagtgccaatacc

SEQ ID NO: 254880 - DNA, 25 bp, probe
ggaacttgtagtaggccaataagcc

SEQ ID NO: 254881 - DNA, 25 bp, probe
ggagacagtgtaatggaccaaaggc

SEQ ID NO: 254882 - DNA, 25 bp, probe
ggagagggtatcttagcacaattac

SEQ ID NO: 254883 - DNA, 25 bp, probe
ggagtgggttgatttcagcacctac

SEQ ID NO: 254884 - DNA, 25 bp, probe
ggagtatgggggtgatcacctacat

SEQ ID NO: 254885 - DNA, 25 bp, probe
ggagtaggtgggggaacactgagaa

SEQ ID NO: 254886 - DNA, 25 bp, probe
ggctggagggcatgggaaaagtcca

SEQ ID NO: 254887 - DNA, 25 bp, probe
ggagagagggattcgaaaacagtcc

SEQ ID NO: 254888 - DNA, 25 bp, probe
ggagtgacgacttcgatagtagatg

SEQ ID NO: 254889 - DNA, 25 bp, probe
ggagtggtccatttaggtgaatggc

SEQ ID NO: 254890 - DNA, 25 bp, probe
ggagtggtccatttaggtgaatggc

SEQ ID NO: 254891 - DNA, 25 bp, probe
ggagttctcgcgtgatgggaaggct

SEQ ID NO: 254892 - DNA, 25 bp, probe
ggagttccagagtgtgaggagatgg

SEQ ID NO: 254893 - DNA, 25 bp, probe
ggagtcttcgagacttgggagctgc

SEQ ID NO: 254894 - DNA, 25 bp, probe
ggagttctggctacttgaggaccaa

SEQ ID NO: 254895 - DNA, 25 bp, probe
ggagttgctggtgttgaagatatca

SEQ ID NO: 254896 - DNA, 25 bp, probe
ggagttgctgcttttccaggaatga

SEQ ID NO: 254897 - DNA, 25 bp, probe
ggagtttttcattgtcgctattgat

SEQ ID NO: 254898 - DNA, 25 bp, probe
ggagtgtttatcgagccaaatggat

SEQ ID NO: 254899 - DNA, 25 bp, probe
ggagtgatttaccactgcacagagg

SEQ ID NO: 254900 - DNA, 25 bp, probe
ggagtatttcctgtgccaggtatac

SEQ ID NO: 254901 - DNA, 25 bp, probe
ggagtttgtcaagatcctgcgctat

SEQ ID NO: 254902 - DNA, 25 bp, probe
ggagtgtctgtaaggactcagtgtt

SEQ ID NO: 254903 - DNA, 25 bp, probe
ggaagttttgggagtgtttatcgag

SEQ ID NO: 254904 - DNA, 25 bp, probe
ggagattatttgctgccgtggtttc

SEQ ID NO: 254905 - DNA, 25 bp, probe
ggagatctacttcatccatgggctt

SEQ ID NO: 254906 - DNA, 25 bp, probe
ggagatcgagttcatgtacaagcct

SEQ ID NO: 254907 - DNA, 25 bp, probe
ggagaccatggatcagtaccacttt

SEQ ID NO: 254908 - DNA, 25 bp, probe
ggagacgcaaggcctgtcaggcctg

SEQ ID NO: 254909 - DNA, 25 bp, probe
ggagaacctgtggctggacagcgtc

SEQ ID NO: 254910 - DNA, 25 bp, probe
ggagagacctgtgcaaatctgagct

SEQ ID NO: 254911 - DNA, 25 bp, probe
ggagtagccttgtccagacgaagtg

SEQ ID NO: 254912 - DNA, 25 bp, probe
ggagtacctggagagcaagaagctt

SEQ ID NO: 254913 - DNA, 25 bp, probe
ggagtacctggagagcaagtgctgc

SEQ ID NO: 254914 - DNA, 25 bp, probe
ggagtgacgctgtgggaactcatga

SEQ ID NO: 254915 - DNA, 25 bp, probe
ggagtgctgcggaggggacacagca

SEQ ID NO: 254916 - DNA, 25 bp, probe
ggagatccaggagggtgtaaataac

SEQ ID NO: 254917 - DNA, 25 bp, probe
ggagatcaaggagcgcttcacctcc

SEQ ID NO: 254918 - DNA, 25 bp, probe
ggagatcaaggagcgcttcacctcc

SEQ ID NO: 254919 - DNA, 25 bp, probe
ggagaagagcaagggttccctcaag

SEQ ID NO: 254920 - DNA, 25 bp, probe
ggagatgatgggaaggaaccccaag

SEQ ID NO: 254921 - DNA, 25 bp, probe
ggagatgacaggaagcgacgcctct

SEQ ID NO: 254922 - DNA, 25 bp, probe
ggagtaagatgtgtgagcgcactcg

SEQ ID NO: 254923 - DNA, 25 bp, probe
ggagttcgtatgttgatgacatctg

SEQ ID NO: 254924 - DNA, 25 bp, probe
ggagtacagttcttgtgacacaata

SEQ ID NO: 254925 - DNA, 25 bp, probe
ggagagacagttttacatagcttaa

SEQ ID NO: 254926 - DNA, 25 bp, probe
ggagagtattttagaaactccaatg

SEQ ID NO: 254927 - DNA, 25 bp, probe
ggacattaggttagccaagaccctg

SEQ ID NO: 254928 - DNA, 25 bp, probe
ggccttcgggaagaggcttcctggg

SEQ ID NO: 254929 - DNA, 25 bp, probe
ggcctttggaaacaagctgtgccca

SEQ ID NO: 254930 - DNA, 25 bp, probe
ggagctctttaatcctgactgtgcc

SEQ ID NO: 254931 - DNA, 25 bp, probe
ggagttttcaggagcttttgacact

SEQ ID NO: 254932 - DNA, 25 bp, probe
ggacttttatacagcttttgcaaac

SEQ ID NO: 254933 - DNA, 25 bp, probe
ggaccgtttagaatgctatgtaaaa

SEQ ID NO: 254934 - DNA, 25 bp, probe
ggactcctaaaagtgctacttacag

SEQ ID NO: 254935 - DNA, 25 bp, probe
ggagtcctcatacaatctactttac

SEQ ID NO: 254936 - DNA, 25 bp, probe
ggagatggccattctaactactgtt

SEQ ID NO: 254937 - DNA, 25 bp, probe
ggagagctgctatgctaaacctcct

SEQ ID NO: 254938 - DNA, 25 bp, probe
ggagagctgctatgctaaacctcct

SEQ ID NO: 254939 - DNA, 25 bp, probe
ggagactccaaggagctactgacat

SEQ ID NO: 254940 - DNA, 25 bp, probe
ggagagctctagtgagcacctgacc

SEQ ID NO: 254941 - DNA, 25 bp, probe
ggagatgttgtatggacctgcagtc

SEQ ID NO: 254942 - DNA, 25 bp, probe
ggagatgttgtatggacctgcagtc

SEQ ID NO: 254943 - DNA, 25 bp, probe
ggcactgacgtactgtgacctacac

SEQ ID NO: 254944 - DNA, 25 bp, probe
ggcatggccttccgtgtccccactg

SEQ ID NO: 254945 - DNA, 25 bp, probe
ggagtctttggaattatccctcatg

SEQ ID NO: 254946 - DNA, 25 bp, probe
ggagtctttggaattatccctcatg

SEQ ID NO: 254947 - DNA, 25 bp, probe
ggagtctgtgggtgtgttgtcatag

SEQ ID NO: 254948 - DNA, 25 bp, probe
ggagtttgaggctgcagtgagttat

SEQ ID NO: 254949 - DNA, 25 bp, probe
ggagtgcctgtacaagctgatgttt

SEQ ID NO: 254950 - DNA, 25 bp, probe
ggagtgcctgtacaagctgatgttt

SEQ ID NO: 254951 - DNA, 25 bp, probe
ggagtgctcatgtttgaagatgatg

SEQ ID NO: 254952 - DNA, 25 bp, probe
ggagtctgcagatagaaagcattac

SEQ ID NO: 254953 - DNA, 25 bp, probe
ggagatgctatcaagaagaagtttg

SEQ ID NO: 254954 - DNA, 25 bp, probe
ggagattatctcgtggatagttcat

SEQ ID NO: 254955 - DNA, 25 bp, probe
ggagcactactccgagaagttacga

SEQ ID NO: 254956 - DNA, 25 bp, probe
ggagagctactccgtatacgtgtac

SEQ ID NO: 254957 - DNA, 25 bp, probe
ggagcagtactctagtaacctggag

SEQ ID NO: 254958 - DNA, 25 bp, probe
ggagactgaacttgtggaccatgta

SEQ ID NO: 254959 - DNA, 25 bp, probe
ggagagcgtactgcggtcagtgcag

SEQ ID NO: 254960 - DNA, 25 bp, probe
ggagagcgtactgcggtcagtgcag

SEQ ID NO: 254961 - DNA, 25 bp, probe
ggagatgtggaactcgggctgtcag

SEQ ID NO: 254962 - DNA, 25 bp, probe
ggagatgtggaatggggggctgcca

SEQ ID NO: 254963 - DNA, 25 bp, probe
ggagaggaaggggtggctggctccc

SEQ ID NO: 254964 - DNA, 25 bp, probe
ggagaggaaggtgagtatgaggctg

SEQ ID NO: 254965 - DNA, 25 bp, probe
ggagcggaaggtgacgcgcatggtg

SEQ ID NO: 254966 - DNA, 25 bp, probe
ggcacgggggtgtgggagcagaccg

SEQ ID NO: 254967 - DNA, 25 bp, probe
ggcacccaggggtggatagggatcc

SEQ ID NO: 254968 - DNA, 25 bp, probe
ggagcccaggggtgatggagacttt

SEQ ID NO: 254969 - DNA, 25 bp, probe
ggacccgggcaagaatgagacctac

SEQ ID NO: 254970 - DNA, 25 bp, probe
tgtacctgcgtctaaaaaggcccaa

SEQ ID NO: 254971 - DNA, 25 bp, probe
ggactccgagcacaataaactcaaa

SEQ ID NO: 254972 - DNA, 25 bp, probe
ggagctactggctgagattaaggca

SEQ ID NO: 254973 - DNA, 25 bp, probe
ggagctacgctgtggtttattctta

SEQ ID NO: 254974 - DNA, 25 bp, probe
ggagcttcctacttttgagtttctc

SEQ ID NO: 254975 - DNA, 25 bp, probe
ggagttcctagcaagttgactaaac

SEQ ID NO: 254976 - DNA, 25 bp, probe
ggagtatgccccagttgacataact

SEQ ID NO: 254977 - DNA, 25 bp, probe
ggagtatgcttcacctagaaacaga

SEQ ID NO: 254978 - DNA, 25 bp, probe
ggagtctctctaccactggatgaaa

SEQ ID NO: 254979 - DNA, 25 bp, probe
ggagttgtctaccacggagaataca

SEQ ID NO: 254980 - DNA, 25 bp, probe
ggagtcagtctatagcgcaaaccac

SEQ ID NO: 254981 - DNA, 25 bp, probe
ggagtagccaggtaggcgagacaca

SEQ ID NO: 254982 - DNA, 25 bp, probe
ggagatacagctctagataagaata

SEQ ID NO: 254983 - DNA, 25 bp, probe
ggagttgcaggactatgttcagaaa

SEQ ID NO: 254984 - DNA, 25 bp, probe
ggagttcaagtcgtgtgtccacaga

SEQ ID NO: 254985 - DNA, 25 bp, probe
ggagtcttcagtgtgtgagcctcca

SEQ ID NO: 254986 - DNA, 25 bp, probe
ggagagcttcaagcagctggacacc

SEQ ID NO: 254987 - DNA, 25 bp, probe
ggagagcttcaagcagctggacacc

SEQ ID NO: 254988 - DNA, 25 bp, probe
ggagaagctagggcagctggagacc

SEQ ID NO: 254989 - DNA, 25 bp, probe
ggagaagctagggcagctggagacc

SEQ ID NO: 254990 - DNA, 25 bp, probe
ggagaagcaagggttgggcccagtg

SEQ ID NO: 254991 - DNA, 25 bp, probe
ggagatgaccggctatgtggccacg

SEQ ID NO: 254992 - DNA, 25 bp, probe
ggagatgaccggctatgtggccacg

SEQ ID NO: 254993 - DNA, 25 bp, probe
ggagatgattttcttgcatgtgcaa

SEQ ID NO: 254994 - DNA, 25 bp, probe
ggagatgaggtcaagctacattaga

SEQ ID NO: 254995 - DNA, 25 bp, probe
ggagatgaggtcaagctacattaga

SEQ ID NO: 254996 - DNA, 25 bp, probe
ggagatgatggctcagctcctgggg

SEQ ID NO: 254997 - DNA, 25 bp, probe
ggagcatgggactgtctctggtaga

SEQ ID NO: 254998 - DNA, 25 bp, probe
ggagcatgtggagcgattccggtat

SEQ ID NO: 254999 - DNA, 25 bp, probe
ggagcagtgtgaggctgtaacttat

SEQ ID NO: 255000 - DNA, 25 bp, probe
ggagcatagtaccatagaaatttgg

SEQ ID NO: 255001 - DNA, 25 bp, probe
ggagaactacttaaatatattcgca

SEQ ID NO: 255002 - DNA, 25 bp, probe
ggagaggctatccaaatttgaatct

SEQ ID NO: 255003 - DNA, 25 bp, probe
ggagagcctgcagacctatagattt

SEQ ID NO: 255004 - DNA, 25 bp, probe
ggagaccaacccctatatatttaat

SEQ ID NO: 255005 - DNA, 25 bp, probe
ggagacacaagcccgaaaactttca

SEQ ID NO: 255006 - DNA, 25 bp, probe
ggagacccggcggaaagatctgggc

SEQ ID NO: 255007 - DNA, 25 bp, probe
ggagacccggcggaaagatctgggc

SEQ ID NO: 255008 - DNA, 25 bp, probe
ggagagctgctgagcctaaagactg

SEQ ID NO: 255009 - DNA, 25 bp, probe
ggagacttggtgtccaacagagtct

SEQ ID NO: 255010 - DNA, 25 bp, probe
ggagatcctggcatagcacagggtc

SEQ ID NO: 255011 - DNA, 25 bp, probe
ggagaagaggctgtgcaagatgttc

SEQ ID NO: 255012 - DNA, 25 bp, probe
ggagaagaggctgtgcaagatgttc

SEQ ID NO: 255013 - DNA, 25 bp, probe
ggagtacggctgctgcaaggagctg

SEQ ID NO: 255014 - DNA, 25 bp, probe
ggagtacgggcagcacaggtgaagg

SEQ ID NO: 255015 - DNA, 25 bp, probe
ggagttcgcggaggcagaggatgga

SEQ ID NO: 255016 - DNA, 25 bp, probe
ggagttcgaggagggcatggtggag

SEQ ID NO: 255017 - DNA, 25 bp, probe
ggagtaagagggaatgcggtgaggc

SEQ ID NO: 255018 - DNA, 25 bp, probe
ggagccaaagggatgccctatctga

SEQ ID NO: 255019 - DNA, 25 bp, probe
ggacttaggagagttcccagatcgc

SEQ ID NO: 255020 - DNA, 25 bp, probe
ggcacttcggaagattctctgtatc

SEQ ID NO: 255021 - DNA, 25 bp, probe
ggcacttcggaagattctctgtatc

SEQ ID NO: 255022 - DNA, 25 bp, probe
ggactggccaaggaatacattgacc

SEQ ID NO: 255023 - DNA, 25 bp, probe
ggagcgtcctgagacagcgaggacc

SEQ ID NO: 255024 - DNA, 25 bp, probe
ggagcgtcctgagacagcgaggacc

SEQ ID NO: 255025 - DNA, 25 bp, probe
ggactatattgtgaacgagccacct

SEQ ID NO: 255026 - DNA, 25 bp, probe
ggagttgtggtggaacagcaaccgg

SEQ ID NO: 255027 - DNA, 25 bp, probe
ggagttgtacttaaatgcagacaca

SEQ ID NO: 255028 - DNA, 25 bp, probe
ggagttgtacttaaatgcagacaca

SEQ ID NO: 255029 - DNA, 25 bp, probe
ggagttaatttttgtcagcaacaaa

SEQ ID NO: 255030 - DNA, 25 bp, probe
ggagtttattatctacatcagaata

SEQ ID NO: 255031 - DNA, 25 bp, probe
ggagtataagttctactatgcgtca

SEQ ID NO: 255032 - DNA, 25 bp, probe
ggagaataacttcttgctacagcat

SEQ ID NO: 255033 - DNA, 25 bp, probe
ggagaatcaacagcgtttgcaagca

SEQ ID NO: 255034 - DNA, 25 bp, probe
ggagttcaacactgtctctcaatca

SEQ ID NO: 255035 - DNA, 25 bp, probe
ggagttcacatatagttcagcattt

SEQ ID NO: 255036 - DNA, 25 bp, probe
ggagttcagcagtcacacgctgact

SEQ ID NO: 255037 - DNA, 25 bp, probe
ggagttcaagaccagcctggccaac

SEQ ID NO: 255038 - DNA, 25 bp, probe
ggagtttgagaccagcctgagcaac

SEQ ID NO: 255039 - DNA, 25 bp, probe
ggagttggagatcagcatgggccac

SEQ ID NO: 255040 - DNA, 25 bp, probe
ggagattgggtctagcacatgtcac

SEQ ID NO: 255041 - DNA, 25 bp, probe
ggagattgggtctagcacatgtcac

SEQ ID NO: 255042 - DNA, 25 bp, probe
ggagattggtgggacgagttcatca

SEQ ID NO: 255043 - DNA, 25 bp, probe
ggagttggtgccttccagtattatc

SEQ ID NO: 255044 - DNA, 25 bp, probe
ggagcttttgcagcatccattttta

SEQ ID NO: 255045 - DNA, 25 bp, probe
ggagtataggctgcatcatctttga

SEQ ID NO: 255046 - DNA, 25 bp, probe
ggagataggagctcatatctgacag

SEQ ID NO: 255047 - DNA, 25 bp, probe
ggagatcaaactggtctgcaagcaa

SEQ ID NO: 255048 - DNA, 25 bp, probe
ggagatcaaactggtctgcaagcaa

SEQ ID NO: 255049 - DNA, 25 bp, probe
ggagatcaatgcattcctcacagat

SEQ ID NO: 255050 - DNA, 25 bp, probe
ggagatcaatgcattcctcacagat

SEQ ID NO: 255051 - DNA, 25 bp, probe
ggagacagaagttcaccagcagcta

SEQ ID NO: 255052 - DNA, 25 bp, probe
ggagatagaatttaggccagtcagt

SEQ ID NO: 255053 - DNA, 25 bp, probe
ggagttacatcttaacacaggcaat

SEQ ID NO: 255054 - DNA, 25 bp, probe
ggagttacatcttaacacaggcaat

SEQ ID NO: 255055 - DNA, 25 bp, probe
ggagagtgactctggtcataggact

SEQ ID NO: 255056 - DNA, 25 bp, probe
ggagagtttcagggacaattactgg

SEQ ID NO: 255057 - DNA, 25 bp, probe
ggagagttctcggagccatttgtac

SEQ ID NO: 255058 - DNA, 25 bp, probe
ggagagttctcggagccatttgtac

SEQ ID NO: 255059 - DNA, 25 bp, probe
ggagagtgcatttgaagcagataat

SEQ ID NO: 255060 - DNA, 25 bp, probe
ggagagaggttgaggatgcactggc

SEQ ID NO: 255061 - DNA, 25 bp, probe
ggagaagctggtagggtaagggaga

SEQ ID NO: 255062 - DNA, 25 bp, probe
ggagaagtctggcgaggaaggaatg

SEQ ID NO: 255063 - DNA, 25 bp, probe
ggacaagtgtggcggtgggtgaaag

SEQ ID NO: 255064 - DNA, 25 bp, probe
ggagcaaagtgagggccgagtgaga

SEQ ID NO: 255065 - DNA, 25 bp, probe
ggagcaaagtgagggccgagtgaga

SEQ ID NO: 255066 - DNA, 25 bp, probe
ggagcaaagtgagggccgagtgaga

SEQ ID NO: 255067 - DNA, 25 bp, probe
ggagaagagctatccccgatgatga

SEQ ID NO: 255068 - DNA, 25 bp, probe
ggagattgaggatgctgcccagttt

SEQ ID NO: 255069 - DNA, 25 bp, probe
ggagattcatgcgatgtgtccaatc

SEQ ID NO: 255070 - DNA, 25 bp, probe
ggagcattcatgtacctcaaaccct

SEQ ID NO: 255071 - DNA, 25 bp, probe
ggagcattcatgtacctcaaaccct

SEQ ID NO: 255072 - DNA, 25 bp, probe
ggagttcattcatctcaatataaat

SEQ ID NO: 255073 - DNA, 25 bp, probe
ggagttcattcatctcaatataaat

SEQ ID NO: 255074 - DNA, 25 bp, probe
ggagtatattcagctcaatgcacta

SEQ ID NO: 255075 - DNA, 25 bp, probe
ggagaatgtgtctgcattgtcactg

SEQ ID NO: 255076 - DNA, 25 bp, probe
ggagagggtcaagtctgctcttgac

SEQ ID NO: 255077 - DNA, 25 bp, probe
ggagacagcagtatttttctgactt

SEQ ID NO: 255078 - DNA, 25 bp, probe
ggagaccgtgtgatttgtgtagtga

SEQ ID NO: 255079 - DNA, 25 bp, probe
ggagaaactgtgaattggagaaatg

SEQ ID NO: 255080 - DNA, 25 bp, probe
ggagaaactgtgaattggagaaatg

SEQ ID NO: 255081 - DNA, 25 bp, probe
ggagcaaattcgaataacagcaagt

SEQ ID NO: 255082 - DNA, 25 bp, probe
ggagcaagaataccaagacaaattc

SEQ ID NO: 255083 - DNA, 25 bp, probe
ggagatcaaaaccatgaagaaattc

SEQ ID NO: 255084 - DNA, 25 bp, probe
ggagtataagcccatcaagaaagtc

SEQ ID NO: 255085 - DNA, 25 bp, probe
ggagcttagccccaaggaatatgcc

SEQ ID NO: 255086 - DNA, 25 bp, probe
ggagttggcccaagaaacataaaca

SEQ ID NO: 255087 - DNA, 25 bp, probe
ggagttggcccaagaaacataaaca

SEQ ID NO: 255088 - DNA, 25 bp, probe
ggagttcacagcctagaagaagaaa

SEQ ID NO: 255089 - DNA, 25 bp, probe
ggagacatatagctcagatggaatg

SEQ ID NO: 255090 - DNA, 25 bp, probe
ggagacatcacttgccaatgtacat

SEQ ID NO: 255091 - DNA, 25 bp, probe
ggagaataccacagagctccagtgg

SEQ ID NO: 255092 - DNA, 25 bp, probe
ggagtataccagaaattcacactga

SEQ ID NO: 255093 - DNA, 25 bp, probe
ggagttcctcatgatcttcaacagt

SEQ ID NO: 255094 - DNA, 25 bp, probe
ggagttcctcatgatcttcaacagt

SEQ ID NO: 255095 - DNA, 25 bp, probe
ggagactcctcagtagggcaacatt

SEQ ID NO: 255096 - DNA, 25 bp, probe
ggagatcatctttaagggcaaagga

SEQ ID NO: 255097 - DNA, 25 bp, probe
ggagatcatctttaagggcaaagga

SEQ ID NO: 255098 - DNA, 25 bp, probe
ggagaccaactatgtggagaacaat

SEQ ID NO: 255099 - DNA, 25 bp, probe
ggagaccaacaatggctgtcacaag

SEQ ID NO: 255100 - DNA, 25 bp, probe
ggagaccaacaatggctgtcacaag

SEQ ID NO: 255101 - DNA, 25 bp, probe
ggagaccagcaaatcggtgcactga

SEQ ID NO: 255102 - DNA, 25 bp, probe
ggagatccagcggcatctggatgcc

SEQ ID NO: 255103 - DNA, 25 bp, probe
ggagatatgagggctcaagtcgcaa

SEQ ID NO: 255104 - DNA, 25 bp, probe
ggagattcagaggcagcaagcacta

SEQ ID NO: 255105 - DNA, 25 bp, probe
ggagattcagcaaaacagatgtagg

SEQ ID NO: 255106 - DNA, 25 bp, probe
ggagattcctgatgaagtgaagctg

SEQ ID NO: 255107 - DNA, 25 bp, probe
ggagttctgctgtatgagatgttgg

SEQ ID NO: 255108 - DNA, 25 bp, probe
ggagatctctcgtctcaatcaggag

SEQ ID NO: 255109 - DNA, 25 bp, probe
ggagcattgatctgcatccaaggcc

SEQ ID NO: 255110 - DNA, 25 bp, probe
ggagcagagaaggcacacaaacgag

SEQ ID NO: 255111 - DNA, 25 bp, probe
ggagaggaaggccacaggtgtgggc

SEQ ID NO: 255112 - DNA, 25 bp, probe
ggagactttggatcggttggtgcca

SEQ ID NO: 255113 - DNA, 25 bp, probe
ggagacttttgatggcttttggcag

SEQ ID NO: 255114 - DNA, 25 bp, probe
ggagaacattggtggcatttttatc

SEQ ID NO: 255115 - DNA, 25 bp, probe
ggagacgattggggatgcttacatg

SEQ ID NO: 255116 - DNA, 25 bp, probe
ggagatctatggccgggttggctgg

SEQ ID NO: 255117 - DNA, 25 bp, probe
ggagacgggcgctagatttggggct

SEQ ID NO: 255118 - DNA, 25 bp, probe
ggagacagatgggtggatcagggga

SEQ ID NO: 255119 - DNA, 25 bp, probe
ggaccaggcggtggacagatgggta

SEQ ID NO: 255120 - DNA, 25 bp, probe
ggagaaggcggtggatcgcaggcgg

SEQ ID NO: 255121 - DNA, 25 bp, probe
ggagaaggcggtggatcgcaggcgg

SEQ ID NO: 255122 - DNA, 25 bp, probe
ggagatcagtgcctggttccaggag

SEQ ID NO: 255123 - DNA, 25 bp, probe
ggagaaggagggagacatgagcatg

SEQ ID NO: 255124 - DNA, 25 bp, probe
ggagaggcgaaactgagtcagagcg

SEQ ID NO: 255125 - DNA, 25 bp, probe
ggagatgaagcatagctgagtagtt

SEQ ID NO: 255126 - DNA, 25 bp, probe
ggagatgcagcagatggtgaaattg

SEQ ID NO: 255127 - DNA, 25 bp, probe
ggagatcacgctggggaaacggata

SEQ ID NO: 255128 - DNA, 25 bp, probe
ggagccacgggattgtaactggagc

SEQ ID NO: 255129 - DNA, 25 bp, probe
ggagacccggaaactgatcagggca

SEQ ID NO: 255130 - DNA, 25 bp, probe
ggagcacatcttcaaactacaggag

SEQ ID NO: 255131 - DNA, 25 bp, probe
ggagaacatggccaatagtcatatg

SEQ ID NO: 255132 - DNA, 25 bp, probe
ggagatcaatggcatgaaatcagac

SEQ ID NO: 255133 - DNA, 25 bp, probe
ggagatcaatggcatgaaatcagac

SEQ ID NO: 255134 - DNA, 25 bp, probe
ggagaagatgacaatgccaatcata

SEQ ID NO: 255135 - DNA, 25 bp, probe
ggagaagctgatttgccaagatgca

SEQ ID NO: 255136 - DNA, 25 bp, probe
ggagaagctgatttgccaagatgca

SEQ ID NO: 255137 - DNA, 25 bp, probe
ggagaagcactggatccaaagcatg

SEQ ID NO: 255138 - DNA, 25 bp, probe
ggagaagctcatggtcaagatcggg

SEQ ID NO: 255139 - DNA, 25 bp, probe
ggagagactcaccatcgagggagtg

SEQ ID NO: 255140 - DNA, 25 bp, probe
ggagagaatggcccgagggaggagg

SEQ ID NO: 255141 - DNA, 25 bp, probe
ggagaaaggttcgtgtggagttgtg

SEQ ID NO: 255142 - DNA, 25 bp, probe
ggagaggagggtcctattgtttggg

SEQ ID NO: 255143 - DNA, 25 bp, probe
ggaatggaaggtgctaatctttgct

SEQ ID NO: 255144 - DNA, 25 bp, probe
ggagaggaccgagctattctcctgg

SEQ ID NO: 255145 - DNA, 25 bp, probe
ggagcaaacggagcaacactctcgc

SEQ ID NO: 255146 - DNA, 25 bp, probe
ggagaaaccagctaaagacctgcag

SEQ ID NO: 255147 - DNA, 25 bp, probe
ggagaaaccatgcacatagaatacg

SEQ ID NO: 255148 - DNA, 25 bp, probe
ggagaacatctatcctatgaataag

SEQ ID NO: 255149 - DNA, 25 bp, probe
ggagaacatctatcctatgaataag

SEQ ID NO: 255150 - DNA, 25 bp, probe
ggagaagctctgaagcccatgtatg

SEQ ID NO: 255151 - DNA, 25 bp, probe
ggagaacatctttgacactctgcag

SEQ ID NO: 255152 - DNA, 25 bp, probe
ggagaacatctttgacactctgcag

SEQ ID NO: 255153 - DNA, 25 bp, probe
ggagagatattctgcatcagtttgc

SEQ ID NO: 255154 - DNA, 25 bp, probe
ggagctgaattcgtgccagtgcatt

SEQ ID NO: 255155 - DNA, 25 bp, probe
ggagctgaattcgtgccagtgcatt

SEQ ID NO: 255156 - DNA, 25 bp, probe
ggagatcagattggatacagatatg

SEQ ID NO: 255157 - DNA, 25 bp, probe
ggagcaatgtcagtatatagtagaa

SEQ ID NO: 255158 - DNA, 25 bp, probe
ggagcaagtcctgtgtggcaaaact

SEQ ID NO: 255159 - DNA, 25 bp, probe
ggagaagcattcagtgatggcaaca

SEQ ID NO: 255160 - DNA, 25 bp, probe
ggagagctctacagctatggaacat

SEQ ID NO: 255161 - DNA, 25 bp, probe
ggagagccaggcttggatggaacat

SEQ ID NO: 255162 - DNA, 25 bp, probe
ggagatgccacctgagttaatgaag

SEQ ID NO: 255163 - DNA, 25 bp, probe
ggagatgtgtcctggaatgaatgaa

SEQ ID NO: 255164 - DNA, 25 bp, probe
ggagatttcctgtgagaacatgcgt

SEQ ID NO: 255165 - DNA, 25 bp, probe
ggagatcttcacctatggaaagcag

SEQ ID NO: 255166 - DNA, 25 bp, probe
ggagatcgtcacaatagtaacatca

SEQ ID NO: 255167 - DNA, 25 bp, probe
ggagagtgtgaaatccagcaactga

SEQ ID NO: 255168 - DNA, 25 bp, probe
ggagatggctgatgcccagaacatt

SEQ ID NO: 255169 - DNA, 25 bp, probe
ggagttgtactgggcataatcattc

SEQ ID NO: 255170 - DNA, 25 bp, probe
ggagttgtactgggcataatcattc

SEQ ID NO: 255171 - DNA, 25 bp, probe
ggagatagccactggccaggcattc

SEQ ID NO: 255172 - DNA, 25 bp, probe
ggagagagaccacacgcagtattga

SEQ ID NO: 255173 - DNA, 25 bp, probe
ggagaggagcgacaggcctaaattt

SEQ ID NO: 255174 - DNA, 25 bp, probe
ggagatggagggggtcccaagcact

SEQ ID NO: 255175 - DNA, 25 bp, probe
ggagaaggaaggctccatctccagt

SEQ ID NO: 255176 - DNA, 25 bp, probe
ggagaagcaggtggactccagccca

SEQ ID NO: 255177 - DNA, 25 bp, probe
ggagacacaggttattgtcccacac

SEQ ID NO: 255178 - DNA, 25 bp, probe
ggagacacaggttattgtcccacac

SEQ ID NO: 255179 - DNA, 25 bp, probe
ggagaattggatatctgtcccttca

SEQ ID NO: 255180 - DNA, 25 bp, probe
ggagacatttgactgtcttcctctt

SEQ ID NO: 255181 - DNA, 25 bp, probe
ggagaatctataccttgttccttta

SEQ ID NO: 255182 - DNA, 25 bp, probe
ggagaccctagagtggtttccatct

SEQ ID NO: 255183 - DNA, 25 bp, probe
ggagcagtttaaggctgccttctcc

SEQ ID NO: 255184 - DNA, 25 bp, probe
ggagatattttaggcccctgcaact

SEQ ID NO: 255185 - DNA, 25 bp, probe
ggagacttttgcagcgacctgcaag

SEQ ID NO: 255186 - DNA, 25 bp, probe
ggagactggttttcggagcaaagga

SEQ ID NO: 255187 - DNA, 25 bp, probe
ggacacggtttaactgtcccagcga

SEQ ID NO: 255188 - DNA, 25 bp, probe
ggaccggattttctggagacggcag

SEQ ID NO: 255189 - DNA, 25 bp, probe
ggaccgcgtcttgtacagaagccgc

SEQ ID NO: 255190 - DNA, 25 bp, probe
ggagatctgtgtttacttaagaccg

SEQ ID NO: 255191 - DNA, 25 bp, probe
ggagaattgattccccgaagacccg

SEQ ID NO: 255192 - DNA, 25 bp, probe
ggagaagttttcagcagttgccccg

SEQ ID NO: 255193 - DNA, 25 bp, probe
ggagaaggtgcttgggcttctgcgg

SEQ ID NO: 255194 - DNA, 25 bp, probe
ggagaagcgcctggggttcagagat

SEQ ID NO: 255195 - DNA, 25 bp, probe
ggagttggctgcagcagctttcgaa

SEQ ID NO: 255196 - DNA, 25 bp, probe
ggagttggctgcagcagctttcgaa

SEQ ID NO: 255197 - DNA, 25 bp, probe
ggagttgtgtgtggagttatggaga

SEQ ID NO: 255198 - DNA, 25 bp, probe
ggagattctatgtgcttttatcaga

SEQ ID NO: 255199 - DNA, 25 bp, probe
ggagattctatgtgcttttatcaga

SEQ ID NO: 255200 - DNA, 25 bp, probe
ggagagctgcttaatgtgctttaaa

SEQ ID NO: 255201 - DNA, 25 bp, probe
ggagactgtcgaaggtcaccaaatc

SEQ ID NO: 255202 - DNA, 25 bp, probe
ggagactgccagtggagacggaatc

SEQ ID NO: 255203 - DNA, 25 bp, probe
ggagactgcgactgggaagaacact

SEQ ID NO: 255204 - DNA, 25 bp, probe
ggagacgttagggagaaccatcatt

SEQ ID NO: 255205 - DNA, 25 bp, probe
ggagacgttagggagaaccatcatt

SEQ ID NO: 255206 - DNA, 25 bp, probe
ggagcagctgcttagggagcaacca

SEQ ID NO: 255207 - DNA, 25 bp, probe
ggagcagctgcttagggagcaacca

SEQ ID NO: 255208 - DNA, 25 bp, probe
ggagagctcaaagagaagcacaagc

SEQ ID NO: 255209 - DNA, 25 bp, probe
ggagctgctaaagcggcgtgagcag

SEQ ID NO: 255210 - DNA, 25 bp, probe
ggagcatgtgaacatcgaggctact

SEQ ID NO: 255211 - DNA, 25 bp, probe
ggagagctacagcaccagatatgcc

SEQ ID NO: 255212 - DNA, 25 bp, probe
ggagctcttcagcactgaaaccgag

SEQ ID NO: 255213 - DNA, 25 bp, probe
ggactattcggacaagtacggcctt

SEQ ID NO: 255214 - DNA, 25 bp, probe
ggaccttaggaatgaggactggggc

SEQ ID NO: 255215 - DNA, 25 bp, probe
ggaccgaattaaggaatggctgggg

SEQ ID NO: 255216 - DNA, 25 bp, probe
ggaccgaactaggaaatggccagaa

SEQ ID NO: 255217 - DNA, 25 bp, probe
ggaccaaactacttacttgctctaa

SEQ ID NO: 255218 - DNA, 25 bp, probe
ggagccaaaatcaaatagcttggga

SEQ ID NO: 255219 - DNA, 25 bp, probe
ggagcccaacgagatgatgcgggag

SEQ ID NO: 255220 - DNA, 25 bp, probe
ggagcccaacgagatgatgcgggag

SEQ ID NO: 255221 - DNA, 25 bp, probe
ggagaaaagccagatgacagggagc

SEQ ID NO: 255222 - DNA, 25 bp, probe
ggagaaaaccaccaacagcagcgag

SEQ ID NO: 255223 - DNA, 25 bp, probe
ggagatgaatactacagctacgacg

SEQ ID NO: 255224 - DNA, 25 bp, probe
ggagctgagtatgacagcaccaagc

SEQ ID NO: 255225 - DNA, 25 bp, probe
ggagcagcagatgctcacagaccac

SEQ ID NO: 255226 - DNA, 25 bp, probe
ggagacactgtcaacatggcatcca

SEQ ID NO: 255227 - DNA, 25 bp, probe
ggagccattcacaagcagaatccaa

SEQ ID NO: 255228 - DNA, 25 bp, probe
ggagccatgatctctcagattgcag

SEQ ID NO: 255229 - DNA, 25 bp, probe
ggagccatgatctctcagattgcag

SEQ ID NO: 255230 - DNA, 25 bp, probe
ggagctctacaacatcatgatgcgc

SEQ ID NO: 255231 - DNA, 25 bp, probe
ggagatctacagggacatgtactga

SEQ ID NO: 255232 - DNA, 25 bp, probe
ggagatctacagggacatgtactga

SEQ ID NO: 255233 - DNA, 25 bp, probe
ggagacttgcaggagaccgtgtgat

SEQ ID NO: 255234 - DNA, 25 bp, probe
ggagacttgcaggagaccgtgtgat

SEQ ID NO: 255235 - DNA, 25 bp, probe
ggagacttcagagatcaagtgtgca

SEQ ID NO: 255236 - DNA, 25 bp, probe
tgtggacttcaagaaatgtggactt

SEQ ID NO: 255237 - DNA, 25 bp, probe
ggagatcggaatgaaggtggcactg

SEQ ID NO: 255238 - DNA, 25 bp, probe
ggagctcggtaccagagtgtaacaa

SEQ ID NO: 255239 - DNA, 25 bp, probe
ggagctcctgttcagggatattctg

SEQ ID NO: 255240 - DNA, 25 bp, probe
ggagctcctgcgggcagggaagtct

SEQ ID NO: 255241 - DNA, 25 bp, probe
ggagctgtcccctagtgagggactg

SEQ ID NO: 255242 - DNA, 25 bp, probe
ggagcttctacctgaagaacgtgca

SEQ ID NO: 255243 - DNA, 25 bp, probe
ggagacttaccacggcaagtttgcc

SEQ ID NO: 255244 - DNA, 25 bp, probe
ggagagttactctgcaaagttctca

SEQ ID NO: 255245 - DNA, 25 bp, probe
ggagagaaactcagcatgacgcttg

SEQ ID NO: 255246 - DNA, 25 bp, probe
ggagaaacacctagcatcatcagtc

SEQ ID NO: 255247 - DNA, 25 bp, probe
ggagaagacaccttgtgctcatggg

SEQ ID NO: 255248 - DNA, 25 bp, probe
ggagcatagcaagccaggagatggg

SEQ ID NO: 255249 - DNA, 25 bp, probe
ggagacacaacaggcagatgcaatc

SEQ ID NO: 255250 - DNA, 25 bp, probe
ggagacacaacaggcagatgcaatc

SEQ ID NO: 255251 - DNA, 25 bp, probe
ggagatcaaacatcaatcatccctg

SEQ ID NO: 255252 - DNA, 25 bp, probe
ggagcagcagaagttccgctcccag

SEQ ID NO: 255253 - DNA, 25 bp, probe
ggagacaggtctgtcttctgccaga

SEQ ID NO: 255254 - DNA, 25 bp, probe
ggagacaggtctgtcttctgccaga

SEQ ID NO: 255255 - DNA, 25 bp, probe
ggagagaggagtgttctgtccagga

SEQ ID NO: 255256 - DNA, 25 bp, probe
ggagaaatggatctgactgcccgga

SEQ ID NO: 255257 - DNA, 25 bp, probe
ggagaaatggatctgactgcccgga

SEQ ID NO: 255258 - DNA, 25 bp, probe
ggagacaaggatcctgttgtgcggt

SEQ ID NO: 255259 - DNA, 25 bp, probe
ggagcaggggatccttctgcaaggc

SEQ ID NO: 255260 - DNA, 25 bp, probe
ggagcaggtggacaagctgggccgc

SEQ ID NO: 255261 - DNA, 25 bp, probe
ggagcagggcagagcaagggccccg

SEQ ID NO: 255262 - DNA, 25 bp, probe
ggagcagggcagagcaagggccccg

SEQ ID NO: 255263 - DNA, 25 bp, probe
ggagctgaatacagcctgaggcctc

SEQ ID NO: 255264 - DNA, 25 bp, probe
ggagcagccaacaagcaggggctct

SEQ ID NO: 255265 - DNA, 25 bp, probe
ggagcagccaacaagcaggggctct

SEQ ID NO: 255266 - DNA, 25 bp, probe
ggagacacatatcacagatgccttc

SEQ ID NO: 255267 - DNA, 25 bp, probe
ggagactcatctcaggacactgatc

SEQ ID NO: 255268 - DNA, 25 bp, probe
ggagcagcaactagatgaacctgtc

SEQ ID NO: 255269 - DNA, 25 bp, probe
ggagcagcaactagatgaacctgtc

SEQ ID NO: 255270 - DNA, 25 bp, probe
ggagactagcacatgaactattcat

SEQ ID NO: 255271 - DNA, 25 bp, probe
ggagacgcaggcacaactctttata

SEQ ID NO: 255272 - DNA, 25 bp, probe
ggagacaagtgtcacagcctggttg

SEQ ID NO: 255273 - DNA, 25 bp, probe
ggagacaagtgaccaagatgctgtt

SEQ ID NO: 255274 - DNA, 25 bp, probe
ggagatgagagttccagattgttct

SEQ ID NO: 255275 - DNA, 25 bp, probe
ggagcatgaaaaccactagttcaat

SEQ ID NO: 255276 - DNA, 25 bp, probe
ggagctgaaagaccctgacattcat

SEQ ID NO: 255277 - DNA, 25 bp, probe
ggagctgaaagaccctgacattcat

SEQ ID NO: 255278 - DNA, 25 bp, probe
ggagcagaaagaacaggagctttgt

SEQ ID NO: 255279 - DNA, 25 bp, probe
ggagaggatgaagcctgtctttctt

SEQ ID NO: 255280 - DNA, 25 bp, probe
ggagctggcaaaacgctcctggttc

SEQ ID NO: 255281 - DNA, 25 bp, probe
ggagctggcaaaacgctcctggttc

SEQ ID NO: 255282 - DNA, 25 bp, probe
ggagctggcaaaacgctcctggttc

SEQ ID NO: 255283 - DNA, 25 bp, probe
ggagatggagaatggctattggtgg

SEQ ID NO: 255284 - DNA, 25 bp, probe
ggagatggagactggtcctgtgtgc

SEQ ID NO: 255285 - DNA, 25 bp, probe
ggagaggtacggaatcgactgcatc

SEQ ID NO: 255286 - DNA, 25 bp, probe
ggagatgccaaccgttcaacatcct

SEQ ID NO: 255287 - DNA, 25 bp, probe
ggagatgccaagacgaataccttct

SEQ ID NO: 255288 - DNA, 25 bp, probe
ggagaacgtgatggaatacctgcac

SEQ ID NO: 255289 - DNA, 25 bp, probe
ggagaaagtacagatgccctcagct

SEQ ID NO: 255290 - DNA, 25 bp, probe
ggagcaagagaacattcctctgcag

SEQ ID NO: 255291 - DNA, 25 bp, probe
ggagcttggaagtcatacccgaaaa

SEQ ID NO: 255292 - DNA, 25 bp, probe
ggacttcaataattacggctgccaa

SEQ ID NO: 255293 - DNA, 25 bp, probe
ggactataagaatacatttcccaaa

SEQ ID NO: 255294 - DNA, 25 bp, probe
ggacgtcaaggacagatctttcctg

SEQ ID NO: 255295 - DNA, 25 bp, probe
ggagcaaaggtacagtctcttctct

SEQ ID NO: 255296 - DNA, 25 bp, probe
ggagacataaggcagttttcactct

SEQ ID NO: 255297 - DNA, 25 bp, probe
ggagaatcaaactgcctgtctccct

SEQ ID NO: 255298 - DNA, 25 bp, probe
ggagacaacaactacttgactatgc

SEQ ID NO: 255299 - DNA, 25 bp, probe
ggagcatcttcagcaagttcacctc

SEQ ID NO: 255300 - DNA, 25 bp, probe
ggagcacgtcatcaggttatatacc

SEQ ID NO: 255301 - DNA, 25 bp, probe
ggacctggtagtgcttattcaccac

SEQ ID NO: 255302 - DNA, 25 bp, probe
ggagacaggaagggcctttggccgc

SEQ ID NO: 255303 - DNA, 25 bp, probe
ggagacggaaaaggatcctcactcg

SEQ ID NO: 255304 - DNA, 25 bp, probe
ggagaacagaaatccacgctcaatc

SEQ ID NO: 255305 - DNA, 25 bp, probe
ggagaacagaaatccacgctcaatc

SEQ ID NO: 255306 - DNA, 25 bp, probe
ggagaaaaacacggaccatgacatc

SEQ ID NO: 255307 - DNA, 25 bp, probe
ggagaaacaagagtgggccatagcc

SEQ ID NO: 255308 - DNA, 25 bp, probe
ggactcaacgatactctggacaagg

SEQ ID NO: 255309 - DNA, 25 bp, probe
ggagctcaatatgtcctggaacagg

SEQ ID NO: 255310 - DNA, 25 bp, probe
ggacatcaagtccatcctgagtatc

SEQ ID NO: 255311 - DNA, 25 bp, probe
ggacatcaagtccatcctgagtatc

SEQ ID NO: 255312 - DNA, 25 bp, probe
ggagctgatagcactctcgagttct

SEQ ID NO: 255313 - DNA, 25 bp, probe
ggagctatcaggcctgcacagaagt

SEQ ID NO: 255314 - DNA, 25 bp, probe
ggagcattcgctgctggtgaattga

SEQ ID NO: 255315 - DNA, 25 bp, probe
ggagatgggctggatgaggactcag

SEQ ID NO: 255316 - DNA, 25 bp, probe
ggagatggcgctgagaagcttcgga

SEQ ID NO: 255317 - DNA, 25 bp, probe
ggagatgtcgggaagcagattggag

SEQ ID NO: 255318 - DNA, 25 bp, probe
ggagatgtcgggaagcagattggag

SEQ ID NO: 255319 - DNA, 25 bp, probe
ggagcttctgagggatgcaggtggc

SEQ ID NO: 255320 - DNA, 25 bp, probe
ggagacctaccagtgcagggtgacc

SEQ ID NO: 255321 - DNA, 25 bp, probe
ggagacctacaaactgaagtgcaag

SEQ ID NO: 255322 - DNA, 25 bp, probe
ggagaaccatcaatacgaatacgag

SEQ ID NO: 255323 - DNA, 25 bp, probe
ggagaccacagcctacagaataaag

SEQ ID NO: 255324 - DNA, 25 bp, probe
ggagagccagcccataagaaaacgg

SEQ ID NO: 255325 - DNA, 25 bp, probe
ggagacgccggcaagaagaaaccag

SEQ ID NO: 255326 - DNA, 25 bp, probe
ggagacgtcggagaacgacaccaaa

SEQ ID NO: 255327 - DNA, 25 bp, probe
ggagacgtcggagaacgacaccaaa

SEQ ID NO: 255328 - DNA, 25 bp, probe
ggagaggacgagattagcccacaaa

SEQ ID NO: 255329 - DNA, 25 bp, probe
ggagaggacgagattagcccacaaa

SEQ ID NO: 255330 - DNA, 25 bp, probe
ggagaaagggttcatgcacacacgt

SEQ ID NO: 255331 - DNA, 25 bp, probe
ggagaacaggagtttgatgatgcaa

SEQ ID NO: 255332 - DNA, 25 bp, probe
ggagaaggtgatgatctgggcatat

SEQ ID NO: 255333 - DNA, 25 bp, probe
ggagaagggtcctatggcagcgtat

SEQ ID NO: 255334 - DNA, 25 bp, probe
ggagaatgttgggtaggcagccagc

SEQ ID NO: 255335 - DNA, 25 bp, probe
ggagaatgttgggtaggcagccagc

SEQ ID NO: 255336 - DNA, 25 bp, probe
ggagcgatgttgggctcaggaccca

SEQ ID NO: 255337 - DNA, 25 bp, probe
ggagctgggatttgtcggcagcgcc

SEQ ID NO: 255338 - DNA, 25 bp, probe
ggagcagtgatgagtgtctaaggca

SEQ ID NO: 255339 - DNA, 25 bp, probe
ggagcgcatcagtgttctctgaggt

SEQ ID NO: 255340 - DNA, 25 bp, probe
ggagcgcatcagtgttctctgaggt

SEQ ID NO: 255341 - DNA, 25 bp, probe
ggagcagatacaggctggtatagag

SEQ ID NO: 255342 - DNA, 25 bp, probe
ggagagctatatacggctgttgcag

SEQ ID NO: 255343 - DNA, 25 bp, probe
ggagagattgatccatgtctgtttg

SEQ ID NO: 255344 - DNA, 25 bp, probe
ggagacatatcactcaatttctctg

SEQ ID NO: 255345 - DNA, 25 bp, probe
ggagagattcctgttgttgctatca

SEQ ID NO: 255346 - DNA, 25 bp, probe
ggagacttccatgcttttgatggca

SEQ ID NO: 255347 - DNA, 25 bp, probe
ggagacttcttggcttggtgaggaa

SEQ ID NO: 255348 - DNA, 25 bp, probe
ggagacttcttggcttggtgaggaa

SEQ ID NO: 255349 - DNA, 25 bp, probe
ggagactgtctgcagcttagggcag

SEQ ID NO: 255350 - DNA, 25 bp, probe
ggagagccctgggctggaggctgag

SEQ ID NO: 255351 - DNA, 25 bp, probe
ggagaccccatggggatatctatgg

SEQ ID NO: 255352 - DNA, 25 bp, probe
ggagacgcctctgtgaagatctctg

SEQ ID NO: 255353 - DNA, 25 bp, probe
ggagagcattctgggtaataccatg

SEQ ID NO: 255354 - DNA, 25 bp, probe
ggagacatgggaggatacatatccg

SEQ ID NO: 255355 - DNA, 25 bp, probe
ggagaagctggaggcatatctactt

SEQ ID NO: 255356 - DNA, 25 bp, probe
ggagaagctggaggcatatctactt

SEQ ID NO: 255357 - DNA, 25 bp, probe
ggagaagggcaggcatatggagtat

SEQ ID NO: 255358 - DNA, 25 bp, probe
ggagagagtggcatcaatattgtca

SEQ ID NO: 255359 - DNA, 25 bp, probe
ggagacgtgctcatcgtcatctatc

SEQ ID NO: 255360 - DNA, 25 bp, probe
ggagacgtgctcatcgtcatctatc

SEQ ID NO: 255361 - DNA, 25 bp, probe
ggagactgtgctctcgacagattct

SEQ ID NO: 255362 - DNA, 25 bp, probe
ggagacatgttcaattacttcctct

SEQ ID NO: 255363 - DNA, 25 bp, probe
ggagacatggttccgactaccattg

SEQ ID NO: 255364 - DNA, 25 bp, probe
ggagcctggactaggactcccataa

SEQ ID NO: 255365 - DNA, 25 bp, probe
ggaccatggagcggtacctaaaaca

SEQ ID NO: 255366 - DNA, 25 bp, probe
ggaccagtgaggagcccataaatgt

SEQ ID NO: 255367 - DNA, 25 bp, probe
ggacctccacgaacttgaatcaatt

SEQ ID NO: 255368 - DNA, 25 bp, probe
ggacggccctgaagagtgcaaggat

SEQ ID NO: 255369 - DNA, 25 bp, probe
ggacacgccccataggaagtagtag

SEQ ID NO: 255370 - DNA, 25 bp, probe
ggacctgccccagggggaggattcg

SEQ ID NO: 255371 - DNA, 25 bp, probe
ggagacgccctgagcgaaggggtgg

SEQ ID NO: 255372 - DNA, 25 bp, probe
ggagacgccctgagcgaaggggtgg

SEQ ID NO: 255373 - DNA, 25 bp, probe
ggagacattaagatagaaggggctg

SEQ ID NO: 255374 - DNA, 25 bp, probe
ggagaccggaattgagaggtggggg

SEQ ID NO: 255375 - DNA, 25 bp, probe
ggaacaccgtgttggaggtccaggg

SEQ ID NO: 255376 - DNA, 25 bp, probe
ggagcccgagtttgggaccaaggtg

SEQ ID NO: 255377 - DNA, 25 bp, probe
ggagctcacggcttaaagcccaagc

SEQ ID NO: 255378 - DNA, 25 bp, probe
ggaccaaggagatgaagcaaacaca

SEQ ID NO: 255379 - DNA, 25 bp, probe
ggaccaggaagagaaccagttcaga

SEQ ID NO: 255380 - DNA, 25 bp, probe
ggaccattttgagaatcccgtctgc

SEQ ID NO: 255381 - DNA, 25 bp, probe
ggaccattttgagaatcccgtctgc

SEQ ID NO: 255382 - DNA, 25 bp, probe
ggaccattaggggaccattctgttc

SEQ ID NO: 255383 - DNA, 25 bp, probe
ggaccttagggcatgaagccttttt

SEQ ID NO: 255384 - DNA, 25 bp, probe
ggaccgtgggtcagaatcatttcgt

SEQ ID NO: 255385 - DNA, 25 bp, probe
ggaccctgagagattatactttcgt

SEQ ID NO: 255386 - DNA, 25 bp, probe
ggacgtgctggacatcgagcagttc

SEQ ID NO: 255387 - DNA, 25 bp, probe
ggacgctatggagatccagctgttt

SEQ ID NO: 255388 - DNA, 25 bp, probe
ggagcagctaggcttacagcattgc

SEQ ID NO: 255389 - DNA, 25 bp, probe
ggagcagctaggcttacagcattgc

SEQ ID NO: 255390 - DNA, 25 bp, probe
ggagagcaagtcattcacgcgctcc

SEQ ID NO: 255391 - DNA, 25 bp, probe
ggagacatattcaactcctctgctc

SEQ ID NO: 255392 - DNA, 25 bp, probe
ggagacacagtgaacactgcttctc

SEQ ID NO: 255393 - DNA, 25 bp, probe
ggagacacagtgaacactgcttctc

SEQ ID NO: 255394 - DNA, 25 bp, probe
ggagcaggtgaagcagtgggcggca

SEQ ID NO: 255395 - DNA, 25 bp, probe
ggagcaggtgaagcagtgggcggca

SEQ ID NO: 255396 - DNA, 25 bp, probe
ggagctggacaaggtgggaggacac

SEQ ID NO: 255397 - DNA, 25 bp, probe
ggagcatagaaacggggaggaggaa

SEQ ID NO: 255398 - DNA, 25 bp, probe
ggagctgccccacggtggggagggc

SEQ ID NO: 255399 - DNA, 25 bp, probe
ggagctgccccacggtggggagggc

SEQ ID NO: 255400 - DNA, 25 bp, probe
ggactgtttcagacttggaaaggtc

SEQ ID NO: 255401 - DNA, 25 bp, probe
ggacttgtaattttcaaagcagggc

SEQ ID NO: 255402 - DNA, 25 bp, probe
ggagctactgacattcctaagagtg

SEQ ID NO: 255403 - DNA, 25 bp, probe
ggagctactgctgtggttcaggcag

SEQ ID NO: 255404 - DNA, 25 bp, probe
ggagcagatcttcgtggtcatcaaa

SEQ ID NO: 255405 - DNA, 25 bp, probe
ggagacatctgtctggcgatcagca

SEQ ID NO: 255406 - DNA, 25 bp, probe
ggcagccatgctggcctgtgcccag

SEQ ID NO: 255407 - DNA, 25 bp, probe
ggagagatgctcgcagctcaatcac

SEQ ID NO: 255408 - DNA, 25 bp, probe
ggagagatatctagcagctcttcca

SEQ ID NO: 255409 - DNA, 25 bp, probe
ggagacagacatgagtcttcacccg

SEQ ID NO: 255410 - DNA, 25 bp, probe
ggagaacaaggactctctccactcc

SEQ ID NO: 255411 - DNA, 25 bp, probe
ggagaacaaggactctctccactcc

SEQ ID NO: 255412 - DNA, 25 bp, probe
ggagaagcacggtgtcatccaccgc

SEQ ID NO: 255413 - DNA, 25 bp, probe
ggagaagcacggtgtcatccaccgc

SEQ ID NO: 255414 - DNA, 25 bp, probe
ggagcaagtgggtgttctgcacacc

SEQ ID NO: 255415 - DNA, 25 bp, probe
ggagaagtgaggacgtcacgcagac

SEQ ID NO: 255416 - DNA, 25 bp, probe
ggagacaggaggagtaggaggaggc

SEQ ID NO: 255417 - DNA, 25 bp, probe
ggaccagtggttttggcgagtgaga

SEQ ID NO: 255418 - DNA, 25 bp, probe
ggaccagtaggtttcatggttacga

SEQ ID NO: 255419 - DNA, 25 bp, probe
ggagccgtcaaatccagaggctagc

SEQ ID NO: 255420 - DNA, 25 bp, probe
ggagcaaggcattataccaaagcta

SEQ ID NO: 255421 - DNA, 25 bp, probe
ggagaaggcgaattggaaagtggtc

SEQ ID NO: 255422 - DNA, 25 bp, probe
ggagaaggccagtatgggaaggtgt

SEQ ID NO: 255423 - DNA, 25 bp, probe
ggagaaggcagacacggaagagatg

SEQ ID NO: 255424 - DNA, 25 bp, probe
ggagaacagtgagaggccaagattg

SEQ ID NO: 255425 - DNA, 25 bp, probe
ggagaagcaggtgcagtccatcgag

SEQ ID NO: 255426 - DNA, 25 bp, probe
ggagaagcaggcggcttgcctggaa

SEQ ID NO: 255427 - DNA, 25 bp, probe
ggagaatgcagacagtgcccgaagg

SEQ ID NO: 255428 - DNA, 25 bp, probe
ggagaagaaggcaacccaaatggtg

SEQ ID NO: 255429 - DNA, 25 bp, probe
ggacaccaatgcggacaccaaatgg

SEQ ID NO: 255430 - DNA, 25 bp, probe
ggacatgtccatgtgacacacgact

SEQ ID NO: 255431 - DNA, 25 bp, probe
ggagctggcctggctgaaggagcat

SEQ ID NO: 255432 - DNA, 25 bp, probe
ggagcaggctctgatgctgagaggc

SEQ ID NO: 255433 - DNA, 25 bp, probe
ggagcggattggatggtgggggtga

SEQ ID NO: 255434 - DNA, 25 bp, probe
ggagcagtctttgaggctggtggtt

SEQ ID NO: 255435 - DNA, 25 bp, probe
ggagcctctttccaagttgtatggt

SEQ ID NO: 255436 - DNA, 25 bp, probe
ggagcttgtgttctcagaatctgat

SEQ ID NO: 255437 - DNA, 25 bp, probe
ggagcttgtgttctcagaatctgat

SEQ ID NO: 255438 - DNA, 25 bp, probe
ggagctctggttactctttgagatt

SEQ ID NO: 255439 - DNA, 25 bp, probe
ggagccttgctatttcagtgggtat

SEQ ID NO: 255440 - DNA, 25 bp, probe
ggagccttgctatttcagtgggtat

SEQ ID NO: 255441 - DNA, 25 bp, probe
ggagctttcataaaaatgggatgca

SEQ ID NO: 255442 - DNA, 25 bp, probe
ggagctttctgaatagggaggttaa

SEQ ID NO: 255443 - DNA, 25 bp, probe
ggagctatttcttgatggaagtgag

SEQ ID NO: 255444 - DNA, 25 bp, probe
ggaccaggcttgctgtgaagtggtg

SEQ ID NO: 255445 - DNA, 25 bp, probe
ggacgtcagttctgtccatgtggga

SEQ ID NO: 255446 - DNA, 25 bp, probe
ggactgtaccggatcacagagaaaa

SEQ ID NO: 255447 - DNA, 25 bp, probe
ggagctgtgagccagtattcattta

SEQ ID NO: 255448 - DNA, 25 bp, probe
ggagctgacccaaatccatatgtca

SEQ ID NO: 255449 - DNA, 25 bp, probe
ggagctgaggttgacatcacaggca

SEQ ID NO: 255450 - DNA, 25 bp, probe
ggagctggatgaacaaatataccaa

SEQ ID NO: 255451 - DNA, 25 bp, probe
ggagcaaatgcaaataattacacca

SEQ ID NO: 255452 - DNA, 25 bp, probe
ggagcacgctgccaatgatgtttca

SEQ ID NO: 255453 - DNA, 25 bp, probe
ggagcacgcatggtattgacttaaa

SEQ ID NO: 255454 - DNA, 25 bp, probe
ggagcagccatggctatggcacaaa

SEQ ID NO: 255455 - DNA, 25 bp, probe
ggagcatggagattatacagacaaa

SEQ ID NO: 255456 - DNA, 25 bp, probe
ggagctgcggattgtcatcaaaaag

SEQ ID NO: 255457 - DNA, 25 bp, probe
ggagctgaggaatttgcaacgagag

SEQ ID NO: 255458 - DNA, 25 bp, probe
ggagaagggtcttgcatacaatagt

SEQ ID NO: 255459 - DNA, 25 bp, probe
ggagaagagagcctatgctacaatc

SEQ ID NO: 255460 - DNA, 25 bp, probe
ggagaagagagcctatgctacaatc

SEQ ID NO: 255461 - DNA, 25 bp, probe
ggagctagatcacgtttcacaatta

SEQ ID NO: 255462 - DNA, 25 bp, probe
ggacgaatccgtgtccgagtctgac

SEQ ID NO: 255463 - DNA, 25 bp, probe
ggacctcaccgtggggaagatctac

SEQ ID NO: 255464 - DNA, 25 bp, probe
ggactataccctgagataagcttat

SEQ ID NO: 255465 - DNA, 25 bp, probe
ggactataccctgagataagcttat

SEQ ID NO: 255466 - DNA, 25 bp, probe
ggagcgacttccaggatatagccct

SEQ ID NO: 255467 - DNA, 25 bp, probe
ggagctcacttaccaggaagtcctc

SEQ ID NO: 255468 - DNA, 25 bp, probe
ggagctcacttaccaggaagtcctc

SEQ ID NO: 255469 - DNA, 25 bp, probe
ggagccacattctgacttcagatcc

SEQ ID NO: 255470 - DNA, 25 bp, probe
ggagccacattctgacttcagatcc

SEQ ID NO: 255471 - DNA, 25 bp, probe
ggaccagagcggtatctctggcacc

SEQ ID NO: 255472 - DNA, 25 bp, probe
ggaccagagcggtatctctggcacc

SEQ ID NO: 255473 - DNA, 25 bp, probe
ggagcacaacgtttcctatccaaaa

SEQ ID NO: 255474 - DNA, 25 bp, probe
ggagcaatacctgtggcatcaccaa

SEQ ID NO: 255475 - DNA, 25 bp, probe
ggagcaaactctgctgtctaacctg

SEQ ID NO: 255476 - DNA, 25 bp, probe
ggagcaagtccagcttgaagacgct

SEQ ID NO: 255477 - DNA, 25 bp, probe
ggagctcttcaagctgctgaaggag

SEQ ID NO: 255478 - DNA, 25 bp, probe
ggacctcacgatggtgctgaaaacc

SEQ ID NO: 255479 - DNA, 25 bp, probe
ggaccaaaatcttctagaaacacat

SEQ ID NO: 255480 - DNA, 25 bp, probe
ggacgaacaccattcaaagattaca

SEQ ID NO: 255481 - DNA, 25 bp, probe
ggacgaacaccattcaaagattaca

SEQ ID NO: 255482 - DNA, 25 bp, probe
ggagcgagatccctccaaaatcaag

SEQ ID NO: 255483 - DNA, 25 bp, probe
ggagcaagacaccatctcaaaaaat

SEQ ID NO: 255484 - DNA, 25 bp, probe
ggagcagtacacagtcagatgaaaa

SEQ ID NO: 255485 - DNA, 25 bp, probe
ggagcagtacaggttcctgtaccac

SEQ ID NO: 255486 - DNA, 25 bp, probe
ggagcagtatatctacctccacgac

SEQ ID NO: 255487 - DNA, 25 bp, probe
ggagacttgatgttccacatccaaa

SEQ ID NO: 255488 - DNA, 25 bp, probe
ggagacttgatgttccacatccaaa

SEQ ID NO: 255489 - DNA, 25 bp, probe
ggagaaatatggtactcattaaaaa

SEQ ID NO: 255490 - DNA, 25 bp, probe
ggagaaactagctctgatcctaaca

SEQ ID NO: 255491 - DNA, 25 bp, probe
ggagaaacatagctctgattctgat

SEQ ID NO: 255492 - DNA, 25 bp, probe
ggagaagctacagcctgtgctcagt

SEQ ID NO: 255493 - DNA, 25 bp, probe
ggagaagtttgcgactctgacagag

SEQ ID NO: 255494 - DNA, 25 bp, probe
ggagacccttgtggttgactagggc

SEQ ID NO: 255495 - DNA, 25 bp, probe
ggagcaacctttgtatattggagac

SEQ ID NO: 255496 - DNA, 25 bp, probe
ggagcagtcctatgcttttattcag

SEQ ID NO: 255497 - DNA, 25 bp, probe
ggactgtactacgactcttaagaga

SEQ ID NO: 255498 - DNA, 25 bp, probe
ggacttcctaaaactctatcaggtc

SEQ ID NO: 255499 - DNA, 25 bp, probe
ggagcttgccttgtaatcaacagag

SEQ ID NO: 255500 - DNA, 25 bp, probe
ggagcttgccttgtaatcaacagag

SEQ ID NO: 255501 - DNA, 25 bp, probe
ggagcgaggcctgaagcattactgg

SEQ ID NO: 255502 - DNA, 25 bp, probe
ggagaagggctgcaacattcgcaca

SEQ ID NO: 255503 - DNA, 25 bp, probe
ggagaaggcttgtattagtcccaag

SEQ ID NO: 255504 - DNA, 25 bp, probe
ggagaatggtgttattactgacaag

SEQ ID NO: 255505 - DNA, 25 bp, probe
ggagaatggtgtgatcacctgtcac

SEQ ID NO: 255506 - DNA, 25 bp, probe
ggagaaggttgcagagcacttccca

SEQ ID NO: 255507 - DNA, 25 bp, probe
ggagaaggtcccggacctcatcagc

SEQ ID NO: 255508 - DNA, 25 bp, probe
ggagaaggtcccggacctcatcagc

SEQ ID NO: 255509 - DNA, 25 bp, probe
ggagaaggtcccggacctcatcagc

SEQ ID NO: 255510 - DNA, 25 bp, probe
ggagaaggtgccccaaaatgcaaga

SEQ ID NO: 255511 - DNA, 25 bp, probe
ggagaagaagcgagaaacatcaatg

SEQ ID NO: 255512 - DNA, 25 bp, probe
ggagaagaagcgagaaacatcaatg

SEQ ID NO: 255513 - DNA, 25 bp, probe
ggagaagacgaaagccaacatcaag

SEQ ID NO: 255514 - DNA, 25 bp, probe
ggagaagggacattccacaaccatt

SEQ ID NO: 255515 - DNA, 25 bp, probe
ggagaagggacattccacaaccatt

SEQ ID NO: 255516 - DNA, 25 bp, probe
ggagcagattgtcactcccaaggct

SEQ ID NO: 255517 - DNA, 25 bp, probe
ggagaattgtcatgttccaaggaga

SEQ ID NO: 255518 - DNA, 25 bp, probe
ggaaagttttcctcaaggagcagct

SEQ ID NO: 255519 - DNA, 25 bp, probe
ggaaactttgggcacagaagacagc

SEQ ID NO: 255520 - DNA, 25 bp, probe
ggaaacgctaagttaagacaggcct

SEQ ID NO: 255521 - DNA, 25 bp, probe
ggaaacgctaagttaagacaggcct

SEQ ID NO: 255522 - DNA, 25 bp, probe
ggaagacacttacctaacaagtact

SEQ ID NO: 255523 - DNA, 25 bp, probe
ggagctacgtgtggggaacaagtac

SEQ ID NO: 255524 - DNA, 25 bp, probe
ggagaatggtctgggagcaaaagtc

SEQ ID NO: 255525 - DNA, 25 bp, probe
ggagaaggtatagtggaatgagtgt

SEQ ID NO: 255526 - DNA, 25 bp, probe
ggagaaggattactgtagatgcagt

SEQ ID NO: 255527 - DNA, 25 bp, probe
ggagaatggctattggtggtgcagg

SEQ ID NO: 255528 - DNA, 25 bp, probe
ggagaatggctattggtggtgcagg

SEQ ID NO: 255529 - DNA, 25 bp, probe
ggagaattctactctgtctgcaagt

SEQ ID NO: 255530 - DNA, 25 bp, probe
ggactgattctgacatcttatgcca

SEQ ID NO: 255531 - DNA, 25 bp, probe
ggagctgaacatctcaggtgccatg

SEQ ID NO: 255532 - DNA, 25 bp, probe
ggagctgacactgttcagctgcctc

SEQ ID NO: 255533 - DNA, 25 bp, probe
ggagctacgttttgcagggctcagt

SEQ ID NO: 255534 - DNA, 25 bp, probe
ggacgtggctttgcaagtcaagtag

SEQ ID NO: 255535 - DNA, 25 bp, probe
ggacgtggctttgcaagtcaagtag

SEQ ID NO: 255536 - DNA, 25 bp, probe
ggacgtgagttggagcggccacgtg

SEQ ID NO: 255537 - DNA, 25 bp, probe
ggacgatgacatgggggacctggtg

SEQ ID NO: 255538 - DNA, 25 bp, probe
ggaccagaaggtcgtcacctgggag

SEQ ID NO: 255539 - DNA, 25 bp, probe
ggagcgcaggaaggcgatctcctgg

SEQ ID NO: 255540 - DNA, 25 bp, probe
ggacgacatgaagggcatctccggg

SEQ ID NO: 255541 - DNA, 25 bp, probe
ggactgtgtaagggcttgcctggat

SEQ ID NO: 255542 - DNA, 25 bp, probe
ggagctcctagaagactgttgggat

SEQ ID NO: 255543 - DNA, 25 bp, probe
ggagcaccaaggaaattgtggctat

SEQ ID NO: 255544 - DNA, 25 bp, probe
ggagcccagatttattcagtggcaa

SEQ ID NO: 255545 - DNA, 25 bp, probe
ggagcaccagaggactgatcacggc

SEQ ID NO: 255546 - DNA, 25 bp, probe
ggagcaccagaggactgatcacggc

SEQ ID NO: 255547 - DNA, 25 bp, probe
ggagcacaagagagtgtccggcttc

SEQ ID NO: 255548 - DNA, 25 bp, probe
ggagaatccaattgtacctgatgtt

SEQ ID NO: 255549 - DNA, 25 bp, probe
ggagaatggctgagtgagccagact

SEQ ID NO: 255550 - DNA, 25 bp, probe
ggagcaggcttgtggcagcctgatt

SEQ ID NO: 255551 - DNA, 25 bp, probe
ggagcagacctctagagcaggattt

SEQ ID NO: 255552 - DNA, 25 bp, probe
ggagcagggcttagcaggagcagtt

SEQ ID NO: 255553 - DNA, 25 bp, probe
ggagcaggccagtggagagcagctg

SEQ ID NO: 255554 - DNA, 25 bp, probe
ggagcaggcggtggggagagatgga

SEQ ID NO: 255555 - DNA, 25 bp, probe
ggagcaggcgggctgaggagagtgg

SEQ ID NO: 255556 - DNA, 25 bp, probe
ggagcagaggggcagaggcccacat

SEQ ID NO: 255557 - DNA, 25 bp, probe
ggagcaggaggtggagattcccagt

SEQ ID NO: 255558 - DNA, 25 bp, probe
ggagcaggagtgtcctgatgattca

SEQ ID NO: 255559 - DNA, 25 bp, probe
ggagcaacatgtggctctgtacctg

SEQ ID NO: 255560 - DNA, 25 bp, probe
ggagctgacagtgcttctacacatt

SEQ ID NO: 255561 - DNA, 25 bp, probe
ggagcagacagtaatattaccaaca

SEQ ID NO: 255562 - DNA, 25 bp, probe
ggagcagacagtaatattaccaaca

SEQ ID NO: 255563 - DNA, 25 bp, probe
ggagctgccgaaatgtgttccagtc

SEQ ID NO: 255564 - DNA, 25 bp, probe
ggagctcttgcttttggtacatgcc

SEQ ID NO: 255565 - DNA, 25 bp, probe
ggagcctgagtgatgtggcccaggc

SEQ ID NO: 255566 - DNA, 25 bp, probe
ggaccagggagaatgcccacaggcc

SEQ ID NO: 255567 - DNA, 25 bp, probe
ggaccagtggaggtgccagggaggc

SEQ ID NO: 255568 - DNA, 25 bp, probe
ggagcactttgggtccaagaatgcc

SEQ ID NO: 255569 - DNA, 25 bp, probe
ggactacttgccgccagaaatgatt

SEQ ID NO: 255570 - DNA, 25 bp, probe
ggactgaattttgccaattactata

SEQ ID NO: 255571 - DNA, 25 bp, probe
ggaccaatattggagcgaattaaag

SEQ ID NO: 255572 - DNA, 25 bp, probe
ggaccaatattggagcgaattaaag

SEQ ID NO: 255573 - DNA, 25 bp, probe
ggaccacttgttgtacatctgaata

SEQ ID NO: 255574 - DNA, 25 bp, probe
ggacccttgtccacaattgtagttt

SEQ ID NO: 255575 - DNA, 25 bp, probe
ggaccttcatgtgccaaacgtcagt

SEQ ID NO: 255576 - DNA, 25 bp, probe
ggagcctctaagccaaagagcccgt

SEQ ID NO: 255577 - DNA, 25 bp, probe
ggagccactattccagaaggctcca

SEQ ID NO: 255578 - DNA, 25 bp, probe
ggagccctctgaagaggaggccccc

SEQ ID NO: 255579 - DNA, 25 bp, probe
ggagctatgcctcagtggcaacctc

SEQ ID NO: 255580 - DNA, 25 bp, probe
ggagcaggcatcttagggcattccc

SEQ ID NO: 255581 - DNA, 25 bp, probe
ggagctgctgtccgaggtgcagctg

SEQ ID NO: 255582 - DNA, 25 bp, probe
ggagcctctttgagtgcggacaaga

SEQ ID NO: 255583 - DNA, 25 bp, probe
ggacctgctttgagatttcctgaca

SEQ ID NO: 255584 - DNA, 25 bp, probe
ggaccagtttgaatttgccctgaca

SEQ ID NO: 255585 - DNA, 25 bp, probe
ggacccgtggagaattggccagagc

SEQ ID NO: 255586 - DNA, 25 bp, probe
ggcaggtagggggagatggccttgc

SEQ ID NO: 255587 - DNA, 25 bp, probe
ggcaggtagggggagatggccttgc

SEQ ID NO: 255588 - DNA, 25 bp, probe
ggagcactcaggagggttccttggt

SEQ ID NO: 255589 - DNA, 25 bp, probe
ggacctcaggggacaggtacctggt

SEQ ID NO: 255590 - DNA, 25 bp, probe
ggacctcaggggacaggtacctggt

SEQ ID NO: 255591 - DNA, 25 bp, probe
ggagcctgtccaggaagttcaccga

SEQ ID NO: 255592 - DNA, 25 bp, probe
ggagcttgtccggaagattgcaaat

SEQ ID NO: 255593 - DNA, 25 bp, probe
ggagcactcgcctgaagttgaagat

SEQ ID NO: 255594 - DNA, 25 bp, probe
ggagccccaaaatgcagataagatc

SEQ ID NO: 255595 - DNA, 25 bp, probe
ggaccccaaagtgatcaagatgaat

SEQ ID NO: 255596 - DNA, 25 bp, probe
ggaccccaaagtgatcaagatgaat

SEQ ID NO: 255597 - DNA, 25 bp, probe
ggagcccataacataacagaggaag

SEQ ID NO: 255598 - DNA, 25 bp, probe
ggagcccataacataacagaggaag

SEQ ID NO: 255599 - DNA, 25 bp, probe
ggagccttgaaaaaactggagtcag

SEQ ID NO: 255600 - DNA, 25 bp, probe
ggacttgaaaatacagactgggcta

SEQ ID NO: 255601 - DNA, 25 bp, probe
ggagctggacaggtaatggtgggaa

SEQ ID NO: 255602 - DNA, 25 bp, probe
ggagcggatgcggtatgaaggcgtg

SEQ ID NO: 255603 - DNA, 25 bp, probe
ggagcggatgcctattacgagatgg

SEQ ID NO: 255604 - DNA, 25 bp, probe
ggactggatccaggagacgatgaag

SEQ ID NO: 255605 - DNA, 25 bp, probe
ggacgcttcacaggacaggaaagtg

SEQ ID NO: 255606 - DNA, 25 bp, probe
ggagcagttccagaaggagaaggag

SEQ ID NO: 255607 - DNA, 25 bp, probe
ggactggctccgcacggagaacgag

SEQ ID NO: 255608 - DNA, 25 bp, probe
ggagctgtgctgccggaaaaagccg

SEQ ID NO: 255609 - DNA, 25 bp, probe
ggagctgtgctgccggaaaaagccg

SEQ ID NO: 255610 - DNA, 25 bp, probe
ggagctgatgggtgcattaactgca

SEQ ID NO: 255611 - DNA, 25 bp, probe
ggagcaagagcgagctctcaaagca

SEQ ID NO: 255612 - DNA, 25 bp, probe
ggaccagagccaagctgtaaagttt

SEQ ID NO: 255613 - DNA, 25 bp, probe
ggaccagagccaggctgtgaagttt

SEQ ID NO: 255614 - DNA, 25 bp, probe
ggaccaggcacctgtcgagtgtatc

SEQ ID NO: 255615 - DNA, 25 bp, probe
ggaccaggacaggaccagattttgg

SEQ ID NO: 255616 - DNA, 25 bp, probe
ggagcaagtaatgacggactctggg

SEQ ID NO: 255617 - DNA, 25 bp, probe
ggacggtgatgaggaaggacttgac

SEQ ID NO: 255618 - DNA, 25 bp, probe
ggaccaggatgaaaaggaccagcaa

SEQ ID NO: 255619 - DNA, 25 bp, probe
ggacgcgagcagatgaacgaacaga

SEQ ID NO: 255620 - DNA, 25 bp, probe
ggactgtgaggacacacgggaagtg

SEQ ID NO: 255621 - DNA, 25 bp, probe
ggactggaggaacacagagaaatcc

SEQ ID NO: 255622 - DNA, 25 bp, probe
ggactttgaggcctacacgaagatt

SEQ ID NO: 255623 - DNA, 25 bp, probe
ggagcctatggagttgtacttaaat

SEQ ID NO: 255624 - DNA, 25 bp, probe
ggagcctatggagttgtacttaaat

SEQ ID NO: 255625 - DNA, 25 bp, probe
ggagctctttgaccgtattgtggaa

SEQ ID NO: 255626 - DNA, 25 bp, probe
ggagctatttggacttttgggacac

SEQ ID NO: 255627 - DNA, 25 bp, probe
ggagctatttggacttttgggacac

SEQ ID NO: 255628 - DNA, 25 bp, probe
ggaccatttcctttgtggggtgcac

SEQ ID NO: 255629 - DNA, 25 bp, probe
ggaccatttcctttgtggggtgcac

SEQ ID NO: 255630 - DNA, 25 bp, probe
ggacgttagactgttgggacagcca

SEQ ID NO: 255631 - DNA, 25 bp, probe
ggacgttactctgtggactactcca

SEQ ID NO: 255632 - DNA, 25 bp, probe
ggacgttactctgtggactactcca

SEQ ID NO: 255633 - DNA, 25 bp, probe
ggactgtggtccattgtacaagcca

SEQ ID NO: 255634 - DNA, 25 bp, probe
ggactttatcctgagtcagaaccag

SEQ ID NO: 255635 - DNA, 25 bp, probe
ggactattaccgtgtgcagggccgg

SEQ ID NO: 255636 - DNA, 25 bp, probe
ggactttaccaatggctgtgagact

SEQ ID NO: 255637 - DNA, 25 bp, probe
ggactttaccaatggctgtgagact

SEQ ID NO: 255638 - DNA, 25 bp, probe
ggacctctaccaaaacatatgatac

SEQ ID NO: 255639 - DNA, 25 bp, probe
ggacctctaccaaaacatatgatac

SEQ ID NO: 255640 - DNA, 25 bp, probe
ggacctctaccaaaacatatgatac

SEQ ID NO: 255641 - DNA, 25 bp, probe
ggacctctaccaaaacatatgatac

SEQ ID NO: 255642 - DNA, 25 bp, probe
ggagcccacacgaaaagatattgcc

SEQ ID NO: 255643 - DNA, 25 bp, probe
ggagcagccagcctgaaaagtgaac

SEQ ID NO: 255644 - DNA, 25 bp, probe
ggacctccttgagatagtaacaaca

SEQ ID NO: 255645 - DNA, 25 bp, probe
ggagcctttggagaagtgtatgaag

SEQ ID NO: 255646 - DNA, 25 bp, probe
ggagccatttgggtatatgggcata

SEQ ID NO: 255647 - DNA, 25 bp, probe
ggagctcattgtggaggtcctagaa

SEQ ID NO: 255648 - DNA, 25 bp, probe
ggagctctcagtggggagcacatgg

SEQ ID NO: 255649 - DNA, 25 bp, probe
ggagcattggctgagagaccaggag

SEQ ID NO: 255650 - DNA, 25 bp, probe
ggagcagggcttactgagcagtggg

SEQ ID NO: 255651 - DNA, 25 bp, probe
ggagcggggctgacagcaggtgtgc

SEQ ID NO: 255652 - DNA, 25 bp, probe
ggagcggggctgacagcaggtgtgc

SEQ ID NO: 255653 - DNA, 25 bp, probe
ggagcggggctgacagcaggtgtgc

SEQ ID NO: 255654 - DNA, 25 bp, probe
ggagcgggcggacctgaagatgctc

SEQ ID NO: 255655 - DNA, 25 bp, probe
ggagcggggagacctgggatagcaa

SEQ ID NO: 255656 - DNA, 25 bp, probe
ggacgaaggggagtgagcttgagcc

SEQ ID NO: 255657 - DNA, 25 bp, probe
ggacgaaagcgaggcggtctgcagc

SEQ ID NO: 255658 - DNA, 25 bp, probe
ggcagtcaggaggcctggtgttccg

SEQ ID NO: 255659 - DNA, 25 bp, probe
ggcttagggcagaggtgcaccctgc

SEQ ID NO: 255660 - DNA, 25 bp, probe
ggctcgggtgcagagttcaccctgt

SEQ ID NO: 255661 - DNA, 25 bp, probe
ggctcgggtgcagagttcaccctgt

SEQ ID NO: 255662 - DNA, 25 bp, probe
ggacggggcacaagtgtcaggcgcc

SEQ ID NO: 255663 - DNA, 25 bp, probe
ggacctggtggcaaatggggccctt

SEQ ID NO: 255664 - DNA, 25 bp, probe
ggacgtggtccagaagaagctcctg

SEQ ID NO: 255665 - DNA, 25 bp, probe
ggagcgtggtccagagagacaccag

SEQ ID NO: 255666 - DNA, 25 bp, probe
ggactgtgagtctgggcacgtccaa

SEQ ID NO: 255667 - DNA, 25 bp, probe
ggagcgtgacactggtgatcgcata

SEQ ID NO: 255668 - DNA, 25 bp, probe
ggagcgtgacactggtgatcgcata

SEQ ID NO: 255669 - DNA, 25 bp, probe
ggagcgtgacactggtgatcgcata

SEQ ID NO: 255670 - DNA, 25 bp, probe
ggagcgtgacactggtgatcgcata

SEQ ID NO: 255671 - DNA, 25 bp, probe
ggagcgtgacactggtgatcgcata

SEQ ID NO: 255672 - DNA, 25 bp, probe
ggactggaacaaggtgtccaaggct

SEQ ID NO: 255673 - DNA, 25 bp, probe
ggacttcaaaaactgtcaaagaatc

SEQ ID NO: 255674 - DNA, 25 bp, probe
ggacttcaaaaactgtcaaagaatc

SEQ ID NO: 255675 - DNA, 25 bp, probe
ggactggcaggacaggtcatcagat

SEQ ID NO: 255676 - DNA, 25 bp, probe
ggactggcaggacaggtcatcagat

SEQ ID NO: 255677 - DNA, 25 bp, probe
ggagctggggatctggattcctggt

SEQ ID NO: 255678 - DNA, 25 bp, probe
ggagcgggtgtgctcacttacatta

SEQ ID NO: 255679 - DNA, 25 bp, probe
ggagcgggtgtgctcacttacatta

SEQ ID NO: 255680 - DNA, 25 bp, probe
ggagcgtcgtgtcacagtggacaga

SEQ ID NO: 255681 - DNA, 25 bp, probe
ggagcagccggcagacagaggcaag

SEQ ID NO: 255682 - DNA, 25 bp, probe
ggagccttggcatcatcgtatgcaa

SEQ ID NO: 255683 - DNA, 25 bp, probe
ggagccttggcatcatcgtatgcaa

SEQ ID NO: 255684 - DNA, 25 bp, probe
ggagccaaggctaatgtgctgactg

SEQ ID NO: 255685 - DNA, 25 bp, probe
ggagccacttcttgatgtgctacaa

SEQ ID NO: 255686 - DNA, 25 bp, probe
ggagccatttgcaaggatgcaacgg

SEQ ID NO: 255687 - DNA, 25 bp, probe
ggaccttgtctgtggcaatcaggag

SEQ ID NO: 255688 - DNA, 25 bp, probe
ggacctggatcccgagactaggagc

SEQ ID NO: 255689 - DNA, 25 bp, probe
ggaccacgatgcgctgaaggaggac

SEQ ID NO: 255690 - DNA, 25 bp, probe
ggagccacaatgtgatagaggtggc

SEQ ID NO: 255691 - DNA, 25 bp, probe
ggagctagagtatgacaaggtgcca

SEQ ID NO: 255692 - DNA, 25 bp, probe
ggagcggagtgctgaagcagagagc

SEQ ID NO: 255693 - DNA, 25 bp, probe
ggagcagggtgatgtgaagatggca

SEQ ID NO: 255694 - DNA, 25 bp, probe
ggagcagtttgagatggccatctcc

SEQ ID NO: 255695 - DNA, 25 bp, probe
ggagcagtttcagcaggaatgttat

SEQ ID NO: 255696 - DNA, 25 bp, probe
ggagcaggttcaccagctttatgat

SEQ ID NO: 255697 - DNA, 25 bp, probe
agtcctgcttagagcccttaaaaag

SEQ ID NO: 255698 - DNA, 25 bp, probe
ggagctgatggatgtgagcctggtg

SEQ ID NO: 255699 - DNA, 25 bp, probe
ggagctgatggatgtgagcctggtg

SEQ ID NO: 255700 - DNA, 25 bp, probe
ggagctgtgatgtatggagtgttgg

SEQ ID NO: 255701 - DNA, 25 bp, probe
ggagctgatgtttgggtgccaggtg

SEQ ID NO: 255702 - DNA, 25 bp, probe
ggatccattgcagaaatagcctgtt

SEQ ID NO: 255703 - DNA, 25 bp, probe
ggagctatgggatcgtcatgtggga

SEQ ID NO: 255704 - DNA, 25 bp, probe
ggagctatggggtcaccatgtggga

SEQ ID NO: 255705 - DNA, 25 bp, probe
ggagctgggggatcctgggaggatc

SEQ ID NO: 255706 - DNA, 25 bp, probe
ggacttgggagagccgctataggac

SEQ ID NO: 255707 - DNA, 25 bp, probe
ggactcctgaaagccctgaaggttt

SEQ ID NO: 255708 - DNA, 25 bp, probe
ggaccagcagaatttgccctacggt

SEQ ID NO: 255709 - DNA, 25 bp, probe
ggaccagcagaatttgccctacggt

SEQ ID NO: 255710 - DNA, 25 bp, probe
ggaacaagaagcaccactacaggga

SEQ ID NO: 255711 - DNA, 25 bp, probe
ggactggataaccaacctccagagg

SEQ ID NO: 255712 - DNA, 25 bp, probe
ggactggatatagtgcttatcatta

SEQ ID NO: 255713 - DNA, 25 bp, probe
ggagctggcattattgttactgaag

SEQ ID NO: 255714 - DNA, 25 bp, probe
ggagctggcattattgttactgaag

SEQ ID NO: 255715 - DNA, 25 bp, probe
ggactggttgtttcattgtcataga

SEQ ID NO: 255716 - DNA, 25 bp, probe
ggactggttgtttcattgtcataga

SEQ ID NO: 255717 - DNA, 25 bp, probe
ggaccagtggtttccagtcatgagc

SEQ ID NO: 255718 - DNA, 25 bp, probe
ggagccagatggtctgagaagtgaa

SEQ ID NO: 255719 - DNA, 25 bp, probe
ggagcactgctggaaaaagatgaag

SEQ ID NO: 255720 - DNA, 25 bp, probe
ggacctgctggagaagatgctggag

SEQ ID NO: 255721 - DNA, 25 bp, probe
ggacctgatggacaaagcaggagat

SEQ ID NO: 255722 - DNA, 25 bp, probe
ggagcctgagaggtgaggggtgagt

SEQ ID NO: 255723 - DNA, 25 bp, probe
ggagcctgagctagggggtgtggcc

SEQ ID NO: 255724 - DNA, 25 bp, probe
ggagcctgagctagggggtgtggcc

SEQ ID NO: 255725 - DNA, 25 bp, probe
ggactctggcctcagaggacatccc

SEQ ID NO: 255726 - DNA, 25 bp, probe
ggacttagctctgaggagtaccccc

SEQ ID NO: 255727 - DNA, 25 bp, probe
ggactctcactgtctaggagcatca

SEQ ID NO: 255728 - DNA, 25 bp, probe
ggaccatcagtgactcatgctggat

SEQ ID NO: 255729 - DNA, 25 bp, probe
ggacctcagaccttgggatttggca

SEQ ID NO: 255730 - DNA, 25 bp, probe
ggaccgagccattgaggaatttaca

SEQ ID NO: 255731 - DNA, 25 bp, probe
ggagccgcacgttaagtgccattac

SEQ ID NO: 255732 - DNA, 25 bp, probe
ggacttcgagcttcacactaataac

SEQ ID NO: 255733 - DNA, 25 bp, probe
ggagcttccagattcaattgaaagt

SEQ ID NO: 255734 - DNA, 25 bp, probe
ggcagattccaatgagaccaacggg

SEQ ID NO: 255735 - DNA, 25 bp, probe
ggagaattcatatacaaatcacgga

SEQ ID NO: 255736 - DNA, 25 bp, probe
ggagccatgacaagaacaaagccac

SEQ ID NO: 255737 - DNA, 25 bp, probe
ggagccatgacaagaacaaagccac

SEQ ID NO: 255738 - DNA, 25 bp, probe
ggaccatgacatcaaaaggccttgg

SEQ ID NO: 255739 - DNA, 25 bp, probe
tgaactgaactgaaaaggtggcctg

SEQ ID NO: 255740 - DNA, 25 bp, probe
ggagctgacatcacaaggtgctggc

SEQ ID NO: 255741 - DNA, 25 bp, probe
ggagcagattcgcaagcggctgcgc

SEQ ID NO: 255742 - DNA, 25 bp, probe
ggagcaatacatcgaagcatgtctc

SEQ ID NO: 255743 - DNA, 25 bp, probe
ggaaatcctgagagcatctcgaata

SEQ ID NO: 255744 - DNA, 25 bp, probe
ggaaatcctgagagcatctcgaata

SEQ ID NO: 255745 - DNA, 25 bp, probe
ggagcaacactgatactgtcgatga

SEQ ID NO: 255746 - DNA, 25 bp, probe
ggagcactgcatcgagtttgtggtg

SEQ ID NO: 255747 - DNA, 25 bp, probe
ggagcatctgcaaagtctgagcagg

SEQ ID NO: 255748 - DNA, 25 bp, probe
ggagcattgcagaacacagcagggt

SEQ ID NO: 255749 - DNA, 25 bp, probe
ggagcagtaatggcagcagccgggg

SEQ ID NO: 255750 - DNA, 25 bp, probe
ggagcaaagcaggaggtcttgggct

SEQ ID NO: 255751 - DNA, 25 bp, probe
ggagcccaatgctggtgttggtggc

SEQ ID NO: 255752 - DNA, 25 bp, probe
ggagcacatcaagagggtttcggat

SEQ ID NO: 255753 - DNA, 25 bp, probe
ggagcagctggacagaggtttctgg

SEQ ID NO: 255754 - DNA, 25 bp, probe
ggagcactggtatatgagcttgtgg

SEQ ID NO: 255755 - DNA, 25 bp, probe
ggagcttgggaaagaatatgtggcg

SEQ ID NO: 255756 - DNA, 25 bp, probe
ggagctttggagtgttgatgtggga

SEQ ID NO: 255757 - DNA, 25 bp, probe
ggacctccgagagctggaggggaag

SEQ ID NO: 255758 - DNA, 25 bp, probe
ggcacccctaggcttggaaggaaga

SEQ ID NO: 255759 - DNA, 25 bp, probe
ggaccaccaacgcttgaatatggct

SEQ ID NO: 255760 - DNA, 25 bp, probe
ggactgcacgaaggtttacaaggac

SEQ ID NO: 255761 - DNA, 25 bp, probe
ggagctgcagccaggttggcatcaa

SEQ ID NO: 255762 - DNA, 25 bp, probe
ggagctgcagccagctggaaggaca

SEQ ID NO: 255763 - DNA, 25 bp, probe
ggagctgatgacaagaggagcccca

SEQ ID NO: 255764 - DNA, 25 bp, probe
ggagctggagcaagaataccaagac

SEQ ID NO: 255765 - DNA, 25 bp, probe
ggagctcagagctgcagagcccaaa

SEQ ID NO: 255766 - DNA, 25 bp, probe
ggagcatcgagaggaggccagatgt

SEQ ID NO: 255767 - DNA, 25 bp, probe
ggagctgcgaggccaaacagcagct

SEQ ID NO: 255768 - DNA, 25 bp, probe
ggacctaggcaaaaccactgaagaa

SEQ ID NO: 255769 - DNA, 25 bp, probe
ggactttggcaaagagcctgcgcaa

SEQ ID NO: 255770 - DNA, 25 bp, probe
ggacccggccattgatgaaggcaag

SEQ ID NO: 255771 - DNA, 25 bp, probe
ggactccaagtcaagtgaaggaccc

SEQ ID NO: 255772 - DNA, 25 bp, probe
ggacctgctagatttggaagggcac

SEQ ID NO: 255773 - DNA, 25 bp, probe
ggaccatctagttgctctgaggatg

SEQ ID NO: 255774 - DNA, 25 bp, probe
ggagccctcagttttatggatccca

SEQ ID NO: 255775 - DNA, 25 bp, probe
ggaccagatttagtcaatggatccc

SEQ ID NO: 255776 - DNA, 25 bp, probe
ggagctcaatgtcaccgtggtgacc

SEQ ID NO: 255777 - DNA, 25 bp, probe
ggagctgcacttgtctggtgaggac

SEQ ID NO: 255778 - DNA, 25 bp, probe
ggagcggctggaacgattggagatc

SEQ ID NO: 255779 - DNA, 25 bp, probe
ggagcttcatgatagccttgtgaca

SEQ ID NO: 255780 - DNA, 25 bp, probe
ggagcttcacgttgccgagtggaag

SEQ ID NO: 255781 - DNA, 25 bp, probe
ggagcattacgatccacgattattg

SEQ ID NO: 255782 - DNA, 25 bp, probe
ggagctgtacaatctcatgcgtcta

SEQ ID NO: 255783 - DNA, 25 bp, probe
ggagctgtaccaactcatgaggctg

SEQ ID NO: 255784 - DNA, 25 bp, probe
ggagctgtaccaactcatgaggctg

SEQ ID NO: 255785 - DNA, 25 bp, probe
ggagcctaatatagccaggagctgc

SEQ ID NO: 255786 - DNA, 25 bp, probe
ggagctcacagaatcccagtagcac

SEQ ID NO: 255787 - DNA, 25 bp, probe
ggaccacagattggcctccaatcaa

SEQ ID NO: 255788 - DNA, 25 bp, probe
ggaccacagcatgaacctttagaac

SEQ ID NO: 255789 - DNA, 25 bp, probe
ggagccactgattatacctctagta

SEQ ID NO: 255790 - DNA, 25 bp, probe
ggagccactgattatacctctagta

SEQ ID NO: 255791 - DNA, 25 bp, probe
ggaccacgaatattctttctgtcca

SEQ ID NO: 255792 - DNA, 25 bp, probe
ggagctcagcaagcagtttgtctgc

SEQ ID NO: 255793 - DNA, 25 bp, probe
ggagctgcgcaaactgttggtcgct

SEQ ID NO: 255794 - DNA, 25 bp, probe
ggagctgccacattcatgtatgtct

SEQ ID NO: 255795 - DNA, 25 bp, probe
ggagcgatgcactttgtagatgctg

SEQ ID NO: 255796 - DNA, 25 bp, probe
ggagcgatgcactttgtagatgctg

SEQ ID NO: 255797 - DNA, 25 bp, probe
ggagctagacgtggacaagcgcctg

SEQ ID NO: 255798 - DNA, 25 bp, probe
ggagctggaggtgtcagagggtgcc

SEQ ID NO: 255799 - DNA, 25 bp, probe
ggacgccagaggggcagtgggtgcc

SEQ ID NO: 255800 - DNA, 25 bp, probe
ggacgtctcagagggcgtttgtggc

SEQ ID NO: 255801 - DNA, 25 bp, probe
ggacgttcaacatggtgaggggcta

SEQ ID NO: 255802 - DNA, 25 bp, probe
ggacaggtcccagaagaggaggcca

SEQ ID NO: 255803 - DNA, 25 bp, probe
ggaccgtctacctaaaaatggcagc

SEQ ID NO: 255804 - DNA, 25 bp, probe
ggacctgtgcactcagtaaaacgca

SEQ ID NO: 255805 - DNA, 25 bp, probe
ggacctgtgcactcagtaaaacgca

SEQ ID NO: 255806 - DNA, 25 bp, probe
ggactttgaatgccagccaaaggcc

SEQ ID NO: 255807 - DNA, 25 bp, probe
ggactttgaatgccagccaaaggcc

SEQ ID NO: 255808 - DNA, 25 bp, probe
ggagctttgacaaggaactttccta

SEQ ID NO: 255809 - DNA, 25 bp, probe
ggagctggcaacaggacagtttccc

SEQ ID NO: 255810 - DNA, 25 bp, probe
ggagctggcaacaggacagtttccc

SEQ ID NO: 255811 - DNA, 25 bp, probe
ggactggtcagcagtgccttagaca

SEQ ID NO: 255812 - DNA, 25 bp, probe
ggacggagagctccagacctaacac

SEQ ID NO: 255813 - DNA, 25 bp, probe
ggacaaacggcggagcctgaacagc

SEQ ID NO: 255814 - DNA, 25 bp, probe
ggacaaacggcggagcctgaacagc

SEQ ID NO: 255815 - DNA, 25 bp, probe
ggacaaacaggttggtaggaagcga

SEQ ID NO: 255816 - DNA, 25 bp, probe
ggaccaaggctgaaggttaagagcg

SEQ ID NO: 255817 - DNA, 25 bp, probe
ggcaacgagtgggaggttcaaacaa

SEQ ID NO: 255818 - DNA, 25 bp, probe
ggacaggggcgtgggattgaattaa

SEQ ID NO: 255819 - DNA, 25 bp, probe
ggcacagtttggtccgttagaatta

SEQ ID NO: 255820 - DNA, 25 bp, probe
ggcaagtatttgatggtttccttaa

SEQ ID NO: 255821 - DNA, 25 bp, probe
ggagcagttttaacgtttcgctctc

SEQ ID NO: 255822 - DNA, 25 bp, probe
ggagcagttttaacgtttcgctctc

SEQ ID NO: 255823 - DNA, 25 bp, probe
ggaatttatttatgttctcaacgca

SEQ ID NO: 255824 - DNA, 25 bp, probe
ggaatttatttatgttctcaacgca

SEQ ID NO: 255825 - DNA, 25 bp, probe
ggactttgtttgtgttccaggacaa

SEQ ID NO: 255826 - DNA, 25 bp, probe
ggactttgtttgtgttccaggacaa

SEQ ID NO: 255827 - DNA, 25 bp, probe
ggacttcctttgggactaagcgcag

SEQ ID NO: 255828 - DNA, 25 bp, probe
tggatcctcctcagaaactaccgga

SEQ ID NO: 255829 - DNA, 25 bp, probe
ggaccttctactcagaatatcccga

SEQ ID NO: 255830 - DNA, 25 bp, probe
ggaccttctactcagaatatcccga

SEQ ID NO: 255831 - DNA, 25 bp, probe
ggacctctttggggcaagatccagg

SEQ ID NO: 255832 - DNA, 25 bp, probe
ggaccacgatgtcggtgcagaacga

SEQ ID NO: 255833 - DNA, 25 bp, probe
ggaccacgatgtcggtgcagaacga

SEQ ID NO: 255834 - DNA, 25 bp, probe
ggactaatttggcgcagatgacaga

SEQ ID NO: 255835 - DNA, 25 bp, probe
ggagctttgtgtttgtgagagacta

SEQ ID NO: 255836 - DNA, 25 bp, probe
ggacttgcttcatgcttgagaatgc

SEQ ID NO: 255837 - DNA, 25 bp, probe
ggacttgcttcatgcttgagaatgc

SEQ ID NO: 255838 - DNA, 25 bp, probe
ggacttggtgcagttctcatgatag

SEQ ID NO: 255839 - DNA, 25 bp, probe
ggagcctggagaggatctatgcttg

SEQ ID NO: 255840 - DNA, 25 bp, probe
ggagccaggagtgtgctgtctggca

SEQ ID NO: 255841 - DNA, 25 bp, probe
ggagctatggagtgctgctgtggga

SEQ ID NO: 255842 - DNA, 25 bp, probe
ggagctatggagtgctgctgtggga

SEQ ID NO: 255843 - DNA, 25 bp, probe
ggagcgtgggtgcgctggaggagct

SEQ ID NO: 255844 - DNA, 25 bp, probe
ggagcgtgggtgcgctggaggagct

SEQ ID NO: 255845 - DNA, 25 bp, probe
ggagctggctaccggaggggagctc

SEQ ID NO: 255846 - DNA, 25 bp, probe
ggagctcctgactggaagaaagcct

SEQ ID NO: 255847 - DNA, 25 bp, probe
ggagctcctgactggaagaaagcct

SEQ ID NO: 255848 - DNA, 25 bp, probe
ggagctgcacaagaggaggaaagcc

SEQ ID NO: 255849 - DNA, 25 bp, probe
ggagcgcacgctggaggagtggaag

SEQ ID NO: 255850 - DNA, 25 bp, probe
ggagcctccggagcagaggaagaag

SEQ ID NO: 255851 - DNA, 25 bp, probe
ggaccagtcccagagcaggaatggg

SEQ ID NO: 255852 - DNA, 25 bp, probe
ggaccatgatctgatgggactactg

SEQ ID NO: 255853 - DNA, 25 bp, probe
ggaccagaataattgcgactacgaa

SEQ ID NO: 255854 - DNA, 25 bp, probe
ggactcagaaagtggttgccataaa

SEQ ID NO: 255855 - DNA, 25 bp, probe
ggaccaaaagatgtgccatataaaa

SEQ ID NO: 255856 - DNA, 25 bp, probe
ggagctcagaagatttccatctaaa

SEQ ID NO: 255857 - DNA, 25 bp, probe
ggactcatgaccacagtccatgcca

SEQ ID NO: 255858 - DNA, 25 bp, probe
ggagccaaacaagtgtcagccacac

SEQ ID NO: 255859 - DNA, 25 bp, probe
ggagctgaaaacataacccactctg

SEQ ID NO: 255860 - DNA, 25 bp, probe
ggagcatgacacaaccgaatacaaa

SEQ ID NO: 255861 - DNA, 25 bp, probe
ggagcatgaaaaagcgaacatcaac

SEQ ID NO: 255862 - DNA, 25 bp, probe
ggagcatgcatggaaggcctgaata

SEQ ID NO: 255863 - DNA, 25 bp, probe
ggagccagatagtgcctgaatccca

SEQ ID NO: 255864 - DNA, 25 bp, probe
ggagccagctgaacggctcacagcc

SEQ ID NO: 255865 - DNA, 25 bp, probe
ggagcgtgctgaaaggccaaaattt

SEQ ID NO: 255866 - DNA, 25 bp, probe
ggagcgtgtgaaagcagaggggatt

SEQ ID NO: 255867 - DNA, 25 bp, probe
ggagccttacatactgggagaattt

SEQ ID NO: 255868 - DNA, 25 bp, probe
ggagctttcaagatggtaggatatt

SEQ ID NO: 255869 - DNA, 25 bp, probe
ggagctttcaagatggtaggatatt

SEQ ID NO: 255870 - DNA, 25 bp, probe
ggacttaaagtttgtcagtgacgtt

SEQ ID NO: 255871 - DNA, 25 bp, probe
ggacctgaaggtcagtatatggagt

SEQ ID NO: 255872 - DNA, 25 bp, probe
ggcactcttactgcctgtaaggagt

SEQ ID NO: 255873 - DNA, 25 bp, probe
ggcactcttactgcctgtaaggagt

SEQ ID NO: 255874 - DNA, 25 bp, probe
ggaccctgacccagatcaaagtgtc

SEQ ID NO: 255875 - DNA, 25 bp, probe
ggacccgaagcccaggctgaagagt

SEQ ID NO: 255876 - DNA, 25 bp, probe
ggacccgaagcccaggctgaagagt

SEQ ID NO: 255877 - DNA, 25 bp, probe
ggacgcatggacgcagggcgacaat

SEQ ID NO: 255878 - DNA, 25 bp, probe
ggaccattgggaagggcaactttgc

SEQ ID NO: 255879 - DNA, 25 bp, probe
ggactgcttggatactggaatgatt

SEQ ID NO: 255880 - DNA, 25 bp, probe
ggactgccaggataacgaattggaa

SEQ ID NO: 255881 - DNA, 25 bp, probe
ggaccaaagactagacagaattcag

SEQ ID NO: 255882 - DNA, 25 bp, probe
ggacctcaagccagaaaatctcatc

SEQ ID NO: 255883 - DNA, 25 bp, probe
ggacctagagtcaaggatggatctg

SEQ ID NO: 255884 - DNA, 25 bp, probe
ggaccaaccatctatggctgggctg

SEQ ID NO: 255885 - DNA, 25 bp, probe
ggaccagatccagcggctggtgctc

SEQ ID NO: 255886 - DNA, 25 bp, probe
ggaccagagacccggcatggtccag

SEQ ID NO: 255887 - DNA, 25 bp, probe
ggaccagagacccggcatggtccag

SEQ ID NO: 255888 - DNA, 25 bp, probe
ggaccaggagacaggcttctccatc

SEQ ID NO: 255889 - DNA, 25 bp, probe
ggaccagcaaaatacatctcgcctg

SEQ ID NO: 255890 - DNA, 25 bp, probe
ggaccagcaaaatacatctcgcctg

SEQ ID NO: 255891 - DNA, 25 bp, probe
ggagcctgcagattataactctcaa

SEQ ID NO: 255892 - DNA, 25 bp, probe
ggagctccatcatcaaatggccaat

SEQ ID NO: 255893 - DNA, 25 bp, probe
ggagctctttccaaatggactagac

SEQ ID NO: 255894 - DNA, 25 bp, probe
ggacttcatgatgtatagaacgggc

SEQ ID NO: 255895 - DNA, 25 bp, probe
ggacatgtatcagatgctgagacac

SEQ ID NO: 255896 - DNA, 25 bp, probe
ggactgcaacaggcttgtgcaacaa

SEQ ID NO: 255897 - DNA, 25 bp, probe
ggagcggatggagttgctgcaggca

SEQ ID NO: 255898 - DNA, 25 bp, probe
ggagcggatggagttgctgcaggca

SEQ ID NO: 255899 - DNA, 25 bp, probe
ggagcggctggggtgaagcagcacc

SEQ ID NO: 255900 - DNA, 25 bp, probe
ggagcggctggggtgaagcagcacc

SEQ ID NO: 255901 - DNA, 25 bp, probe
ggagctgcccagtattgaaggcctc

SEQ ID NO: 255902 - DNA, 25 bp, probe
ggagctgcccagtattgaaggcctc

SEQ ID NO: 255903 - DNA, 25 bp, probe
ggagctgcccagtattgaaggcctc

SEQ ID NO: 255904 - DNA, 25 bp, probe
ggagctcctagattctggcattagt

SEQ ID NO: 255905 - DNA, 25 bp, probe
ggagctcctagattctggcattagt

SEQ ID NO: 255906 - DNA, 25 bp, probe
ggagctctttgatcgactcattgct

SEQ ID NO: 255907 - DNA, 25 bp, probe
ggagctgtgcttagagggctctcct

SEQ ID NO: 255908 - DNA, 25 bp, probe
ggagctgtctactgggcatgctcca

SEQ ID NO: 255909 - DNA, 25 bp, probe
ggagcctcggggtgatgctctatac

SEQ ID NO: 255910 - DNA, 25 bp, probe
ggagccactgggggagatgtgcatt

SEQ ID NO: 255911 - DNA, 25 bp, probe
ggagctcagtaacataactgcttct

SEQ ID NO: 255912 - DNA, 25 bp, probe
ggagctcagtaacataactgcttct

SEQ ID NO: 255913 - DNA, 25 bp, probe
ggaccagatcaatatcaactttgta

SEQ ID NO: 255914 - DNA, 25 bp, probe
ggaccaactgataccattttctgtt

SEQ ID NO: 255915 - DNA, 25 bp, probe
ggagctaatctgaccgttctattgt

SEQ ID NO: 255916 - DNA, 25 bp, probe
ggagctaatctgaccgttctattgt

SEQ ID NO: 255917 - DNA, 25 bp, probe
ggactagtacattcctgttattttc

SEQ ID NO: 255918 - DNA, 25 bp, probe
ggactatttattgataatgttttgc

SEQ ID NO: 255919 - DNA, 25 bp, probe
ggactgtcattgagtttattttagc

SEQ ID NO: 255920 - DNA, 25 bp, probe
ggagctggttgaattgtctttatta

SEQ ID NO: 255921 - DNA, 25 bp, probe
ggagctaatgtcaattgttatttta

SEQ ID NO: 255922 - DNA, 25 bp, probe
ggagctaatgtcaattgttatttta

SEQ ID NO: 255923 - DNA, 25 bp, probe
ggactagtgcctgtttattcttact

SEQ ID NO: 255924 - DNA, 25 bp, probe
ggacaaatttactgtaccttactat

SEQ ID NO: 255925 - DNA, 25 bp, probe
tggaaacaaccctgtactttcagca

SEQ ID NO: 255926 - DNA, 25 bp, probe
ggaaacctactgtggactttatcct

SEQ ID NO: 255927 - DNA, 25 bp, probe
ggaaacctagcagaggaaagtgtaa

SEQ ID NO: 255928 - DNA, 25 bp, probe
ggaaagggagggtgaaagtgattat

SEQ ID NO: 255929 - DNA, 25 bp, probe
ggaaaggggaactgcctcagtgaga

SEQ ID NO: 255930 - DNA, 25 bp, probe
ggaaaggggaactgcctcagtgaga

SEQ ID NO: 255931 - DNA, 25 bp, probe
tgtgcaaaagcccaaaggttcctaa

SEQ ID NO: 255932 - DNA, 25 bp, probe
tgtccaaagccctttactttcttat

SEQ ID NO: 255933 - DNA, 25 bp, probe
ggaaaatcctcagaagtttctctta

SEQ ID NO: 255934 - DNA, 25 bp, probe
ggaaaaaccaccagttacttgagtg

SEQ ID NO: 255935 - DNA, 25 bp, probe
ggaaaaacaacctccatatcctggc

SEQ ID NO: 255936 - DNA, 25 bp, probe
ggaaaataaaacactctggtcttgc

SEQ ID NO: 255937 - DNA, 25 bp, probe
ggaccttccaaaatatctctttcct

SEQ ID NO: 255938 - DNA, 25 bp, probe
ggacctgcccaagatatgtattctc

SEQ ID NO: 255939 - DNA, 25 bp, probe
ggacctgcgggacaagattcttggt

SEQ ID NO: 255940 - DNA, 25 bp, probe
ggacctgcggagctacgttttgcag

SEQ ID NO: 255941 - DNA, 25 bp, probe
ggacctgcgagcagctaatgttctg

SEQ ID NO: 255942 - DNA, 25 bp, probe
ggagccgaggattccaatgttgcct

SEQ ID NO: 255943 - DNA, 25 bp, probe
ggagcctcaggcactgaaggtcctg

SEQ ID NO: 255944 - DNA, 25 bp, probe
ggacctcaagcgttggaggtagcag

SEQ ID NO: 255945 - DNA, 25 bp, probe
ggacctacaggattggggcatggcc

SEQ ID NO: 255946 - DNA, 25 bp, probe
ggaccgaagtgattgtggactgtca

SEQ ID NO: 255947 - DNA, 25 bp, probe
ggaccacagagttttggaagttcag

SEQ ID NO: 255948 - DNA, 25 bp, probe
ggagctccaggtattgccaaggtca

SEQ ID NO: 255949 - DNA, 25 bp, probe
ggagccaaggctctaggcaaggcca

SEQ ID NO: 255950 - DNA, 25 bp, probe
ggagcctcagttttcagcggaggtc

SEQ ID NO: 255951 - DNA, 25 bp, probe
ggactctcatgcacttatcgagatg

SEQ ID NO: 255952 - DNA, 25 bp, probe
ggagctctggcaagctataggagag

SEQ ID NO: 255953 - DNA, 25 bp, probe
ggagctctgggacaatggcgcaggt

SEQ ID NO: 255954 - DNA, 25 bp, probe
ggagctgtgtggtaacagcctggag

SEQ ID NO: 255955 - DNA, 25 bp, probe
ggacatgttggttgacaggcgagca

SEQ ID NO: 255956 - DNA, 25 bp, probe
ggacatgacagggaacaggaaggtg

SEQ ID NO: 255957 - DNA, 25 bp, probe
ggactactggaatcaggcttggttc

SEQ ID NO: 255958 - DNA, 25 bp, probe
ggactcctggcctgagtttgagtgt

SEQ ID NO: 255959 - DNA, 25 bp, probe
ggacacggagtttgcgtttgaggta

SEQ ID NO: 255960 - DNA, 25 bp, probe
ggagccagaagtggggctttgggtg

SEQ ID NO: 255961 - DNA, 25 bp, probe
ggagcccaagtttgagtttgctgtg

SEQ ID NO: 255962 - DNA, 25 bp, probe
ggagccccacataatagatttcatt

SEQ ID NO: 255963 - DNA, 25 bp, probe
ggaccccaagatagacgcttcatgt

SEQ ID NO: 255964 - DNA, 25 bp, probe
ggacgctcaaggaggtgctgacatg

SEQ ID NO: 255965 - DNA, 25 bp, probe
ggaccccgatgcagagtgctgcaaa

SEQ ID NO: 255966 - DNA, 25 bp, probe
ggacttcctggaggaggtgcaccat

SEQ ID NO: 255967 - DNA, 25 bp, probe
ggacttccaaagtggtcacctacag

SEQ ID NO: 255968 - DNA, 25 bp, probe
ggacttctcagaggcagggcagcac

SEQ ID NO: 255969 - DNA, 25 bp, probe
ggacttccagagacatggctcagat

SEQ ID NO: 255970 - DNA, 25 bp, probe
ggactacaggagatgctgtcactta

SEQ ID NO: 255971 - DNA, 25 bp, probe
ggactgagtgtaccgtggatctgtt

SEQ ID NO: 255972 - DNA, 25 bp, probe
ggacctgagtaggcctggtcagtta

SEQ ID NO: 255973 - DNA, 25 bp, probe
ggacctcagtcggcttaatcagagt

SEQ ID NO: 255974 - DNA, 25 bp, probe
ggagccaaggcggctccaggcagga

SEQ ID NO: 255975 - DNA, 25 bp, probe
ggacgaaggccagcgcttgaggccc

SEQ ID NO: 255976 - DNA, 25 bp, probe
ggacttggagggggcgtgcaggccc

SEQ ID NO: 255977 - DNA, 25 bp, probe
ggacctggagaagatcggcatgggt

SEQ ID NO: 255978 - DNA, 25 bp, probe
ggacctgcggaggctacggcaggag

SEQ ID NO: 255979 - DNA, 25 bp, probe
ggagcctggcaagttcacaagcagg

SEQ ID NO: 255980 - DNA, 25 bp, probe
ggagcctggaactgcatcagtgact

SEQ ID NO: 255981 - DNA, 25 bp, probe
ggagcgtagtaatgcaatcatagct

SEQ ID NO: 255982 - DNA, 25 bp, probe
ggacgttcagaaggatatcatagtg

SEQ ID NO: 255983 - DNA, 25 bp, probe
ggaccattcgatttgatgtctcgga

SEQ ID NO: 255984 - DNA, 25 bp, probe
ggactttctgatttagtgacagaac

SEQ ID NO: 255985 - DNA, 25 bp, probe
ggacgtgtctgttatttcctaatca

SEQ ID NO: 255986 - DNA, 25 bp, probe
ggacctccatgttatttccaatgac

SEQ ID NO: 255987 - DNA, 25 bp, probe
ggactctatcattgatttgtcccag

SEQ ID NO: 255988 - DNA, 25 bp, probe
ggactgtttggtatgagctgcaagc

SEQ ID NO: 255989 - DNA, 25 bp, probe
ggactcttctggcagctagttagtg

SEQ ID NO: 255990 - DNA, 25 bp, probe
ggactcgtagcaccagggtttggag

SEQ ID NO: 255991 - DNA, 25 bp, probe
ggaccttaagccagttatcgatggg

SEQ ID NO: 255992 - DNA, 25 bp, probe
ggaccctgagggagctgttggatag

SEQ ID NO: 255993 - DNA, 25 bp, probe
ggaccctgagggagctgttggatag

SEQ ID NO: 255994 - DNA, 25 bp, probe
ggaccctgtagggtgccatttggag

SEQ ID NO: 255995 - DNA, 25 bp, probe
ggaaacggaggctcggattgtgggg

SEQ ID NO: 255996 - DNA, 25 bp, probe
ggaaatggggtctcagaacttctac

SEQ ID NO: 255997 - DNA, 25 bp, probe
ggacaatcgggtacaagagacttaa

SEQ ID NO: 255998 - DNA, 25 bp, probe
ggagccctcaggtcacaaagaattt

SEQ ID NO: 255999 - DNA, 25 bp, probe
ggagcctctccgtgaagaattttac

SEQ ID NO: 256000 - DNA, 25 bp, probe
ggaccgttctgataacatttttatg

SEQ ID NO: 256001 - DNA, 25 bp, probe
ggaccagtttgacttcacttttgtt

SEQ ID NO: 256002 - DNA, 25 bp, probe
ggaccttgtattctccgtattctat

SEQ ID NO: 256003 - DNA, 25 bp, probe
ggacctaggaattgcccgagtgtta

SEQ ID NO: 256004 - DNA, 25 bp, probe
ggacctaggaattgcccgagtgtta

SEQ ID NO: 256005 - DNA, 25 bp, probe
ggacctcaaaatcctgcctaatgat

SEQ ID NO: 256006 - DNA, 25 bp, probe
ggacccgtgtcacatcgtgaatatt

SEQ ID NO: 256007 - DNA, 25 bp, probe
ggacctcttcgacatcgaggatgac

SEQ ID NO: 256008 - DNA, 25 bp, probe
ggacctcttcgacatcgaggatgac

SEQ ID NO: 256009 - DNA, 25 bp, probe
ggacccatacggctcgatgggggcc

SEQ ID NO: 256010 - DNA, 25 bp, probe
ggacccatacggctcgatgggggcc

SEQ ID NO: 256011 - DNA, 25 bp, probe
ggaccacaagcgttacctggtgggc

SEQ ID NO: 256012 - DNA, 25 bp, probe
ggaccccagtgagaggcggtgggct

SEQ ID NO: 256013 - DNA, 25 bp, probe
ggaccccactggctgagaatctggg

SEQ ID NO: 256014 - DNA, 25 bp, probe
ggacaactagggctgcgaatctaga

SEQ ID NO: 256015 - DNA, 25 bp, probe
ggactacaagggcatggctcacaaa

SEQ ID NO: 256016 - DNA, 25 bp, probe
ggacagaaaagggagagctaccaaa

SEQ ID NO: 256017 - DNA, 25 bp, probe
ggactgaataaaccaggcaccgaaa

SEQ ID NO: 256018 - DNA, 25 bp, probe
ggacgaaagacacagtgcactcaga

SEQ ID NO: 256019 - DNA, 25 bp, probe
ggacctaagtgacatcaactcagag

SEQ ID NO: 256020 - DNA, 25 bp, probe
ggacctcaagtgcgagaaccttctc

SEQ ID NO: 256021 - DNA, 25 bp, probe
ggacctaaagggactacctctgtgc

SEQ ID NO: 256022 - DNA, 25 bp, probe
ggacctgaaggtttccaacttgctc

SEQ ID NO: 256023 - DNA, 25 bp, probe
ggacctgaaggtttccaacttgctc

SEQ ID NO: 256024 - DNA, 25 bp, probe
ggaccgaagagtctcaatgcacctt

SEQ ID NO: 256025 - DNA, 25 bp, probe
ggaccagacacaggtccctgagcct

SEQ ID NO: 256026 - DNA, 25 bp, probe
ggaccagaagccgtccaatgtgctc

SEQ ID NO: 256027 - DNA, 25 bp, probe
ggcaccaagggcctccttggcaatg

SEQ ID NO: 256028 - DNA, 25 bp, probe
ggaccaagttcgacgtggctgattg

SEQ ID NO: 256029 - DNA, 25 bp, probe
ggaccaagttcgacgtggctgattg

SEQ ID NO: 256030 - DNA, 25 bp, probe
ggagccaagttcccaatcaagtggt

SEQ ID NO: 256031 - DNA, 25 bp, probe
ggagcgcaagatcaccttaatggtg

SEQ ID NO: 256032 - DNA, 25 bp, probe
ggaaactcagagtcggaacggagaa

SEQ ID NO: 256033 - DNA, 25 bp, probe
ggacgggcagattggggagggaaag

SEQ ID NO: 256034 - DNA, 25 bp, probe
ggacgggcagattggggagggaaag

SEQ ID NO: 256035 - DNA, 25 bp, probe
ggagcgtgggaggcgggagtggagt

SEQ ID NO: 256036 - DNA, 25 bp, probe
ggagcgtgggaggcgggagtggagt

SEQ ID NO: 256037 - DNA, 25 bp, probe
ggagcgtgggaggcgggagtggagt

SEQ ID NO: 256038 - DNA, 25 bp, probe
ggacggggagcaggtggagtatggg

SEQ ID NO: 256039 - DNA, 25 bp, probe
ggacaggtaatggtgggaatagggc

SEQ ID NO: 256040 - DNA, 25 bp, probe
ggaaactcgtggtggaaagtgtcac

SEQ ID NO: 256041 - DNA, 25 bp, probe
ggcaaacttttatgtaggcagatta

SEQ ID NO: 256042 - DNA, 25 bp, probe
ggcaaacttttatgtaggcagatta

SEQ ID NO: 256043 - DNA, 25 bp, probe
ggaccctttctatctagataatatt

SEQ ID NO: 256044 - DNA, 25 bp, probe
ggaccctttctatctagataatatt

SEQ ID NO: 256045 - DNA, 25 bp, probe
ggacttcggcctctctaagaagatt

SEQ ID NO: 256046 - DNA, 25 bp, probe
ggacgtagtcctctttaaggataag

SEQ ID NO: 256047 - DNA, 25 bp, probe
tggacgtagtcctctttaaggataa

SEQ ID NO: 256048 - DNA, 25 bp, probe
tggaagttgggacatgttaaggaaa

SEQ ID NO: 256049 - DNA, 25 bp, probe
ggaaggagtcaacagtgtaactaaa

SEQ ID NO: 256050 - DNA, 25 bp, probe
ggaaaagctcattaacttaactgac

SEQ ID NO: 256051 - DNA, 25 bp, probe
ggacatagacctccagattgtaaat

SEQ ID NO: 256052 - DNA, 25 bp, probe
ggacatagacctccagattgtaaat

SEQ ID NO: 256053 - DNA, 25 bp, probe
ggacgagttcatcactactagacag

SEQ ID NO: 256054 - DNA, 25 bp, probe
ggagcgaggatgatttcactaggca

SEQ ID NO: 256055 - DNA, 25 bp, probe
ggacggagcttgttatcgcaaatgc

SEQ ID NO: 256056 - DNA, 25 bp, probe
ggacgagagcttgaacagaaatcac

SEQ ID NO: 256057 - DNA, 25 bp, probe
ggactgagcctggcccatagaaaca

SEQ ID NO: 256058 - DNA, 25 bp, probe
ggactgagcctggcccatagaaaca

SEQ ID NO: 256059 - DNA, 25 bp, probe
ggactctgaaggccacattaaactc

SEQ ID NO: 256060 - DNA, 25 bp, probe
ggaccgagtgactactatacagact

SEQ ID NO: 256061 - DNA, 25 bp, probe
ggaccgggaggatgtgaagaatgag

SEQ ID NO: 256062 - DNA, 25 bp, probe
ggaccgggaggatgtgaagaatgag

SEQ ID NO: 256063 - DNA, 25 bp, probe
ggagccgagggtgctttagagaggt

SEQ ID NO: 256064 - DNA, 25 bp, probe
ggcaccgagggagttttctgggtgt

SEQ ID NO: 256065 - DNA, 25 bp, probe
ggacccgggcagttagtggggctgc

SEQ ID NO: 256066 - DNA, 25 bp, probe
ggacgctgtgggcttcagcgtcggt

SEQ ID NO: 256067 - DNA, 25 bp, probe
ggactctgggctgggaagccctgtt

SEQ ID NO: 256068 - DNA, 25 bp, probe
ggacttaccttgcaagcgatcctat

SEQ ID NO: 256069 - DNA, 25 bp, probe
ggactataccgagtatcaggattta

SEQ ID NO: 256070 - DNA, 25 bp, probe
ggacattgtcgcaagtcacagaatt

SEQ ID NO: 256071 - DNA, 25 bp, probe
ggacttatggcttatacttctgtgg

SEQ ID NO: 256072 - DNA, 25 bp, probe
ggacttatggcttatacttctgtgg

SEQ ID NO: 256073 - DNA, 25 bp, probe
ggaccacagcgataatcttcttaga

SEQ ID NO: 256074 - DNA, 25 bp, probe
ggaccatcgagctaaaggtttgggc

SEQ ID NO: 256075 - DNA, 25 bp, probe
ggaccattgctgtgaaggtggtggg

SEQ ID NO: 256076 - DNA, 25 bp, probe
ggactttcttggtgcggcagagggt

SEQ ID NO: 256077 - DNA, 25 bp, probe
ggacttgttttgtgggaagtggcca

SEQ ID NO: 256078 - DNA, 25 bp, probe
ggacttggtgtcagtgggaaagggc

SEQ ID NO: 256079 - DNA, 25 bp, probe
ggactgtgaattttggtgatgtaaa

SEQ ID NO: 256080 - DNA, 25 bp, probe
ggactggacaatttggggtagtgaa

SEQ ID NO: 256081 - DNA, 25 bp, probe
ggacatgcggcctgcatggtgggag

SEQ ID NO: 256082 - DNA, 25 bp, probe
ggacgatagcttggagggatggaga

SEQ ID NO: 256083 - DNA, 25 bp, probe
ggacctagtctcagggatggagcag

SEQ ID NO: 256084 - DNA, 25 bp, probe
ggacttcacatcatttcgggaagac

SEQ ID NO: 256085 - DNA, 25 bp, probe
ggacttcacatcatttcgggaagac

SEQ ID NO: 256086 - DNA, 25 bp, probe
ggactacacattcttctgtggcagt

SEQ ID NO: 256087 - DNA, 25 bp, probe
ggactacacattcttctgtggcagt

SEQ ID NO: 256088 - DNA, 25 bp, probe
ggacttcagccgctattgcaagatg

SEQ ID NO: 256089 - DNA, 25 bp, probe
ggaccaagcgggaattccagctgca

SEQ ID NO: 256090 - DNA, 25 bp, probe
ggaccaagcgggaattccagctgca

SEQ ID NO: 256091 - DNA, 25 bp, probe
ggagccaagggaaaatagagatgat

SEQ ID NO: 256092 - DNA, 25 bp, probe
ggagcccagtggttgcaatgaaaga

SEQ ID NO: 256093 - DNA, 25 bp, probe
ggagcgccgtgtcctatgaggacag

SEQ ID NO: 256094 - DNA, 25 bp, probe
ggacagcggaacatatgaggaagtt

SEQ ID NO: 256095 - DNA, 25 bp, probe
ggacctgaggccacaggccaagttc

SEQ ID NO: 256096 - DNA, 25 bp, probe
ggacctctggccaaatggtacatgt

SEQ ID NO: 256097 - DNA, 25 bp, probe
ggagccaatggcctttggatcactg

SEQ ID NO: 256098 - DNA, 25 bp, probe
ggagccatttgtacatttcatcact

SEQ ID NO: 256099 - DNA, 25 bp, probe
ggagccatttgtacatttcatcact

SEQ ID NO: 256100 - DNA, 25 bp, probe
ggaccagatgttacttccaagattc

SEQ ID NO: 256101 - DNA, 25 bp, probe
ggaccatgagaaactttttgaatta

SEQ ID NO: 256102 - DNA, 25 bp, probe
ggaccatagtttcttgttaacatat

SEQ ID NO: 256103 - DNA, 25 bp, probe
ggaaatgaatttcttgggcaatata

SEQ ID NO: 256104 - DNA, 25 bp, probe
ggacagaggtttctgggagacctac

SEQ ID NO: 256105 - DNA, 25 bp, probe
ggaatagtgtttatggaaatcttta

SEQ ID NO: 256106 - DNA, 25 bp, probe
ggactactttgataagcaagacttc

SEQ ID NO: 256107 - DNA, 25 bp, probe
ggagccacagttgaggacagtagtt

SEQ ID NO: 256108 - DNA, 25 bp, probe
ggactccagtcgggatatcagtcgg

SEQ ID NO: 256109 - DNA, 25 bp, probe
ggacctcctgcggaagaagctggaa

SEQ ID NO: 256110 - DNA, 25 bp, probe
ggacctactctggaaaggcggcgga

SEQ ID NO: 256111 - DNA, 25 bp, probe
ggacctacctgatcagggagcggcc

SEQ ID NO: 256112 - DNA, 25 bp, probe
ggagccagacactccagggatcagt

SEQ ID NO: 256113 - DNA, 25 bp, probe
ggagccagacactccagggatcagt

SEQ ID NO: 256114 - DNA, 25 bp, probe
ggacgcgtcatcactgcagaaacgt

SEQ ID NO: 256115 - DNA, 25 bp, probe
ggaccagccatcacagagcaaagtg

SEQ ID NO: 256116 - DNA, 25 bp, probe
ggaccatcactgagagtcaggagtt

SEQ ID NO: 256117 - DNA, 25 bp, probe
ggaccagccagctgactgcagagaa

SEQ ID NO: 256118 - DNA, 25 bp, probe
ggacccacacaggatcaagaagcac

SEQ ID NO: 256119 - DNA, 25 bp, probe
ggaccccaatgcgacaagtagttca

SEQ ID NO: 256120 - DNA, 25 bp, probe
ggaccccagagaggaaaaagtgact

SEQ ID NO: 256121 - DNA, 25 bp, probe
ggaccccagagaggaaaaagtgact

SEQ ID NO: 256122 - DNA, 25 bp, probe
ggagccccagaagaaacgcagtcct

SEQ ID NO: 256123 - DNA, 25 bp, probe
ggcacgtcggaagttcaaacagatc

SEQ ID NO: 256124 - DNA, 25 bp, probe
ggcacgtcggaagttcaaacagatc

SEQ ID NO: 256125 - DNA, 25 bp, probe
ggacctggaaacatccaacaaggac

SEQ ID NO: 256126 - DNA, 25 bp, probe
ggacctggaaacatccaacaaggac

SEQ ID NO: 256127 - DNA, 25 bp, probe
ggaccaaagaacactcgaaaagagc

SEQ ID NO: 256128 - DNA, 25 bp, probe
ggaccaacacctccttcaagaaaag

SEQ ID NO: 256129 - DNA, 25 bp, probe
ggaccaacatcattcctgtgatcga

SEQ ID NO: 256130 - DNA, 25 bp, probe
ggaccagatacattccgtgtacatc

SEQ ID NO: 256131 - DNA, 25 bp, probe
ggacaagttcattcacgtggcacag

SEQ ID NO: 256132 - DNA, 25 bp, probe
ggacgaggcttgtggtgaccaggcc

SEQ ID NO: 256133 - DNA, 25 bp, probe
tggacggtttgctgtttgccaagtc

SEQ ID NO: 256134 - DNA, 25 bp, probe
ggacggttttgctttatggctagac

SEQ ID NO: 256135 - DNA, 25 bp, probe
ggacggttttgctttatggctagac

SEQ ID NO: 256136 - DNA, 25 bp, probe
ggactggttttcacattagaagaca

SEQ ID NO: 256137 - DNA, 25 bp, probe
ggactggttttcacattagaagaca

SEQ ID NO: 256138 - DNA, 25 bp, probe
ggactttattctaacttgagatcag

SEQ ID NO: 256139 - DNA, 25 bp, probe
ggactttattctaacttgagatcag

SEQ ID NO: 256140 - DNA, 25 bp, probe
ggacttttgtccatatgtagaattt

SEQ ID NO: 256141 - DNA, 25 bp, probe
ggacttttgtccatatgtagaattt

SEQ ID NO: 256142 - DNA, 25 bp, probe
ggacatttgggttgtttcccatctt

SEQ ID NO: 256143 - DNA, 25 bp, probe
ggactttggttccatgttttcattg

SEQ ID NO: 256144 - DNA, 25 bp, probe
ggactttggttccatgttttcattg

SEQ ID NO: 256145 - DNA, 25 bp, probe
tgggaaaggtattagatttactgct

SEQ ID NO: 256146 - DNA, 25 bp, probe
ggaaaggtattagatttactgctaa

SEQ ID NO: 256147 - DNA, 25 bp, probe
ggaagaggactcaaaagtctggcct

SEQ ID NO: 256148 - DNA, 25 bp, probe
ggcaggggttggaaacttagcactt

SEQ ID NO: 256149 - DNA, 25 bp, probe
tcaggtatgggtctaacttaccctt

SEQ ID NO: 256150 - DNA, 25 bp, probe
taggttgaaggcaaaaccaactctc

SEQ ID NO: 256151 - DNA, 25 bp, probe
tggtttaaacattcagcaccaaagc

SEQ ID NO: 256152 - DNA, 25 bp, probe
tggttaaagaattccactataaact

SEQ ID NO: 256153 - DNA, 25 bp, probe
tggttaaagaattccactataaact

SEQ ID NO: 256154 - DNA, 25 bp, probe
tgggataaaaaatcggaactactgt

SEQ ID NO: 256155 - DNA, 25 bp, probe
tgggggtgaaaagcccaccattcgt

SEQ ID NO: 256156 - DNA, 25 bp, probe
tgggggtggaagtgccctggaagcc

SEQ ID NO: 256157 - DNA, 25 bp, probe
ggacggtgtggggcagccctgaaag

SEQ ID NO: 256158 - DNA, 25 bp, probe
ggacgaatggagaggcacccaaatg

SEQ ID NO: 256159 - DNA, 25 bp, probe
ggaaaaccatacagcgccacaaatg

SEQ ID NO: 256160 - DNA, 25 bp, probe
ggaaaaccacggcaaacttgatgtc

SEQ ID NO: 256161 - DNA, 25 bp, probe
ggacctaccacttgaaaccattagt

SEQ ID NO: 256162 - DNA, 25 bp, probe
ggcacctaccttttacaaattcaga

SEQ ID NO: 256163 - DNA, 25 bp, probe
ggacctacttctttgtagataacca

SEQ ID NO: 256164 - DNA, 25 bp, probe
ggaccacttactggtgaaagcaacc

SEQ ID NO: 256165 - DNA, 25 bp, probe
ggaccacttactggtgaaagcaacc

SEQ ID NO: 256166 - DNA, 25 bp, probe
ggaccacttactggtgaaagcaacc

SEQ ID NO: 256167 - DNA, 25 bp, probe
ggacctttacatggcagctaacagt

SEQ ID NO: 256168 - DNA, 25 bp, probe
ggacccttggcatttgccaacagct

SEQ ID NO: 256169 - DNA, 25 bp, probe
ggaccgtggtgattgtggtgagcgt

SEQ ID NO: 256170 - DNA, 25 bp, probe
ggaccactgattatgggtgctcgga

SEQ ID NO: 256171 - DNA, 25 bp, probe
ggactgactatggctcgaggtctac

SEQ ID NO: 256172 - DNA, 25 bp, probe
ggactgcactgaaagctgcaggctt

SEQ ID NO: 256173 - DNA, 25 bp, probe
ggactgcgccagaagcaattgccta

SEQ ID NO: 256174 - DNA, 25 bp, probe
ggactggctatgatggtgtgctcca

SEQ ID NO: 256175 - DNA, 25 bp, probe
ggacgagtgggaggtgtctcgagag

SEQ ID NO: 256176 - DNA, 25 bp, probe
ggacgagtgggaggtgtctcgagag

SEQ ID NO: 256177 - DNA, 25 bp, probe
ggacgacgtgaatggcatccggcac

SEQ ID NO: 256178 - DNA, 25 bp, probe
ggaccatcgatgaggtcttcggctt

SEQ ID NO: 256179 - DNA, 25 bp, probe
ggaccataaatgtgttactggcttt

SEQ ID NO: 256180 - DNA, 25 bp, probe
tggaactactttatctacggattta

SEQ ID NO: 256181 - DNA, 25 bp, probe
ggaactactttatctacggatttag

SEQ ID NO: 256182 - DNA, 25 bp, probe
ggaatttcttcgagctatgggcctt

SEQ ID NO: 256183 - DNA, 25 bp, probe
ggaagttttctgaggctggctgtaa

SEQ ID NO: 256184 - DNA, 25 bp, probe
ggacctttttgtgactgtgtgcttc

SEQ ID NO: 256185 - DNA, 25 bp, probe
ggaccattgctttgttacagatctt

SEQ ID NO: 256186 - DNA, 25 bp, probe
ggaccatgcttatgtcaccagtatt

SEQ ID NO: 256187 - DNA, 25 bp, probe
ggaccatgcttatgtcaccagtatt

SEQ ID NO: 256188 - DNA, 25 bp, probe
ggaccatttatggatgacaacaatt

SEQ ID NO: 256189 - DNA, 25 bp, probe
ggaccatttatggatgacaacaatt

SEQ ID NO: 256190 - DNA, 25 bp, probe
ggaccttgagtggagaaatggatgt

SEQ ID NO: 256191 - DNA, 25 bp, probe
ggacctggcggatgaaatgatatgc

SEQ ID NO: 256192 - DNA, 25 bp, probe
ggacctggcggatgaaatgatatgc

SEQ ID NO: 256193 - DNA, 25 bp, probe
ggacgtgggagactgtacacattgg

SEQ ID NO: 256194 - DNA, 25 bp, probe
ggactggtggcatcatgtaactgct

SEQ ID NO: 256195 - DNA, 25 bp, probe
ggactggtggcatcatgtaactgct

SEQ ID NO: 256196 - DNA, 25 bp, probe
ggactggattgacagtatcctggcc

SEQ ID NO: 256197 - DNA, 25 bp, probe
ggacggatgattacagtttctgggc

SEQ ID NO: 256198 - DNA, 25 bp, probe
ggactagcaatttatgcttcttggg

SEQ ID NO: 256199 - DNA, 25 bp, probe
ggacatggctgactttgccatcctg

SEQ ID NO: 256200 - DNA, 25 bp, probe
ggacatgaatgtattgtacactgac

SEQ ID NO: 256201 - DNA, 25 bp, probe
ggacatgccagtagtgtaagcagct

SEQ ID NO: 256202 - DNA, 25 bp, probe
ggactgctgtgtggtctacaggctc

SEQ ID NO: 256203 - DNA, 25 bp, probe
ggacctgttgctagcaggcaatctc

SEQ ID NO: 256204 - DNA, 25 bp, probe
ggactcgtttaccgagacatcaagc

SEQ ID NO: 256205 - DNA, 25 bp, probe
ggaccagttcaagccataatgcaag

SEQ ID NO: 256206 - DNA, 25 bp, probe
ggacgagattagcccacaaactgaa

SEQ ID NO: 256207 - DNA, 25 bp, probe
ggacgagattagcccacaaactgaa

SEQ ID NO: 256208 - DNA, 25 bp, probe
ggacgcagatctctcctaaagctgc

SEQ ID NO: 256209 - DNA, 25 bp, probe
ggaccacatcgctcacatagtggag

SEQ ID NO: 256210 - DNA, 25 bp, probe
ggaccacagcctaagctgagtgtga

SEQ ID NO: 256211 - DNA, 25 bp, probe
ggaccacccataaatgacagtgact

SEQ ID NO: 256212 - DNA, 25 bp, probe
ggaccccagctagtcagacatgatc

SEQ ID NO: 256213 - DNA, 25 bp, probe
ggaccaccattatcagagagcactg

SEQ ID NO: 256214 - DNA, 25 bp, probe
ggacgactcagtatccgagagctga

SEQ ID NO: 256215 - DNA, 25 bp, probe
ggacgtctgagtagcaggaggagag

SEQ ID NO: 256216 - DNA, 25 bp, probe
ggactccagagaagggatggtgaaa

SEQ ID NO: 256217 - DNA, 25 bp, probe
ggacctcatcagccaggtgttggcc

SEQ ID NO: 256218 - DNA, 25 bp, probe
ggacctcatcagccaggtgttggcc

SEQ ID NO: 256219 - DNA, 25 bp, probe
ggacctcatcagccaggtgttggcc

SEQ ID NO: 256220 - DNA, 25 bp, probe
ggacacttccttatttgtcaccaaa

SEQ ID NO: 256221 - DNA, 25 bp, probe
ggacacgtcagttttgtgttaaata

SEQ ID NO: 256222 - DNA, 25 bp, probe
ggacacgtcagttttgtgttaaata

SEQ ID NO: 256223 - DNA, 25 bp, probe
ggacgcttcggaatgtgggaaatga

SEQ ID NO: 256224 - DNA, 25 bp, probe
ggacccacgtgtacttgggcgatga

SEQ ID NO: 256225 - DNA, 25 bp, probe
ggacagccctgggtctaggggagag

SEQ ID NO: 256226 - DNA, 25 bp, probe
ggacagcctcccttcgatggggagg

SEQ ID NO: 256227 - DNA, 25 bp, probe
ggactcccataaatcactggggggc

SEQ ID NO: 256228 - DNA, 25 bp, probe
ggacccgcagagatcaggggacttg

SEQ ID NO: 256229 - DNA, 25 bp, probe
ggacccaggcaagcacggaacaagc

SEQ ID NO: 256230 - DNA, 25 bp, probe
ggactttgcaaagaagggatcacag

SEQ ID NO: 256231 - DNA, 25 bp, probe
ggacttcgctaagcaagtgcctggt

SEQ ID NO: 256232 - DNA, 25 bp, probe
ggacggcgtagaggatagatcgagg

SEQ ID NO: 256233 - DNA, 25 bp, probe
ggacatggcgtatgtcatcaacggg

SEQ ID NO: 256234 - DNA, 25 bp, probe
ggacatggcttcaagtacactgaag

SEQ ID NO: 256235 - DNA, 25 bp, probe
ggacatggcttcaagtacactgaag

SEQ ID NO: 256236 - DNA, 25 bp, probe
ggactggctttgctgccagtacctg

SEQ ID NO: 256237 - DNA, 25 bp, probe
ggacagtgtctatatccacgaccat

SEQ ID NO: 256238 - DNA, 25 bp, probe
ggacattgacgagacagagtaccat

SEQ ID NO: 256239 - DNA, 25 bp, probe
ggacatctactgccacaagttcatc

SEQ ID NO: 256240 - DNA, 25 bp, probe
ggacatctactgccacaagttcatc

SEQ ID NO: 256241 - DNA, 25 bp, probe
ggacagaagcatccagcagattcag

SEQ ID NO: 256242 - DNA, 25 bp, probe
ggacgcttgagccagaatctcagga

SEQ ID NO: 256243 - DNA, 25 bp, probe
ggactgctggcagaaagacaggaac

SEQ ID NO: 256244 - DNA, 25 bp, probe
ggactgggactgtcaatgaagacag

SEQ ID NO: 256245 - DNA, 25 bp, probe
ggactgggactgtcaatgaagacag

SEQ ID NO: 256246 - DNA, 25 bp, probe
ggacggcaccgctaagaagaatggc

SEQ ID NO: 256247 - DNA, 25 bp, probe
ggacggcaccgctaagaagaatggc

SEQ ID NO: 256248 - DNA, 25 bp, probe
ggactgtgaagtcaacaataatggc

SEQ ID NO: 256249 - DNA, 25 bp, probe
ggactggacagaaaatctcataagg

SEQ ID NO: 256250 - DNA, 25 bp, probe
ggaccgagcaaaagactcagtggat

SEQ ID NO: 256251 - DNA, 25 bp, probe
ggaccgcagaccagcaacagtagta

SEQ ID NO: 256252 - DNA, 25 bp, probe
ggaccgcagaccagcaacagtagta

SEQ ID NO: 256253 - DNA, 25 bp, probe
ggaccatggcccgagaaagtgagaa

SEQ ID NO: 256254 - DNA, 25 bp, probe
ggaccatgtactgcagaaactgagg

SEQ ID NO: 256255 - DNA, 25 bp, probe
ggacttctgcaatagatgacactga

SEQ ID NO: 256256 - DNA, 25 bp, probe
ggacccatgtgtgggcatgatcctg

SEQ ID NO: 256257 - DNA, 25 bp, probe
ggaccagatcgtggtgcagaaagga

SEQ ID NO: 256258 - DNA, 25 bp, probe
ggactggattgagggcaaggagcgg

SEQ ID NO: 256259 - DNA, 25 bp, probe
ggactggattgagggcaaggagcgg

SEQ ID NO: 256260 - DNA, 25 bp, probe
ggactttgggcgccaagaagcatgg

SEQ ID NO: 256261 - DNA, 25 bp, probe
ggacaatttgggctagaggcaggaa

SEQ ID NO: 256262 - DNA, 25 bp, probe
ggacaatttggggtagtgaagtatg

SEQ ID NO: 256263 - DNA, 25 bp, probe
ggacatcttaggagttggaagtgga

SEQ ID NO: 256264 - DNA, 25 bp, probe
ggactctttggacgccatggaaggt

SEQ ID NO: 256265 - DNA, 25 bp, probe
ggacttaatgtaccacatccaaagc

SEQ ID NO: 256266 - DNA, 25 bp, probe
ggacctaaaatcaatgatcgagaag

SEQ ID NO: 256267 - DNA, 25 bp, probe
ggacattaaactctgataggagagg

SEQ ID NO: 256268 - DNA, 25 bp, probe
ggacattaaaatctccaggcctgtg

SEQ ID NO: 256269 - DNA, 25 bp, probe
ggacctacaacatgatccagtacta

SEQ ID NO: 256270 - DNA, 25 bp, probe
ggacctgaactattagcacgtcact

SEQ ID NO: 256271 - DNA, 25 bp, probe
ggacctagaatggtgtgccagagca

SEQ ID NO: 256272 - DNA, 25 bp, probe
ggacctatacatgatgcacctacat

SEQ ID NO: 256273 - DNA, 25 bp, probe
ggactttagcatgcagagcagcaaa

SEQ ID NO: 256274 - DNA, 25 bp, probe
ggacatttaatgaaactgagagaca

SEQ ID NO: 256275 - DNA, 25 bp, probe
ggacctgtgaaactactgaggccag

SEQ ID NO: 256276 - DNA, 25 bp, probe
ggaccctgagaactctcatgagccc

SEQ ID NO: 256277 - DNA, 25 bp, probe
ggacctgggcaatgcacagagcctc

SEQ ID NO: 256278 - DNA, 25 bp, probe
ggacctgggcagtggaatggctagg

SEQ ID NO: 256279 - DNA, 25 bp, probe
ggactctgggctgctggaataggac

SEQ ID NO: 256280 - DNA, 25 bp, probe
ggacctgagtctgctatattttcat

SEQ ID NO: 256281 - DNA, 25 bp, probe
ggacctgaggtcacaagttgccatc

SEQ ID NO: 256282 - DNA, 25 bp, probe
ggacctgaggtcacaagttgccatc

SEQ ID NO: 256283 - DNA, 25 bp, probe
ggacctgaggtcacaagttgccatc

SEQ ID NO: 256284 - DNA, 25 bp, probe
ggacctggtgctgatcagagtggct

SEQ ID NO: 256285 - DNA, 25 bp, probe
ggacctggggcgactggaggaagcc

SEQ ID NO: 256286 - DNA, 25 bp, probe
ggacctggccctgcagcagggacac

SEQ ID NO: 256287 - DNA, 25 bp, probe
ggacctggctaaagacacggaccca

SEQ ID NO: 256288 - DNA, 25 bp, probe
ggacctggctaaagacacggaccca

SEQ ID NO: 256289 - DNA, 25 bp, probe
ggacctggtaaccaaggtcagcgac

SEQ ID NO: 256290 - DNA, 25 bp, probe
ggacagctggaacccagaggacgcc

SEQ ID NO: 256291 - DNA, 25 bp, probe
tggaccttatggtccacacggcctc

SEQ ID NO: 256292 - DNA, 25 bp, probe
ggacgtgcttgaagccatcaaggcc

SEQ ID NO: 256293 - DNA, 25 bp, probe
ggacggcaggaagcgcaagcgcagc

SEQ ID NO: 256294 - DNA, 25 bp, probe
ggaccgcattgatgtccagcagctg

SEQ ID NO: 256295 - DNA, 25 bp, probe
ggacctaatgaacatgcagcactgc

SEQ ID NO: 256296 - DNA, 25 bp, probe
ggacctggtgagcctaggcatctct

SEQ ID NO: 256297 - DNA, 25 bp, probe
ggacctggtgagcctaggcatctct

SEQ ID NO: 256298 - DNA, 25 bp, probe
ggacctgattgacttgtgtgagctc

SEQ ID NO: 256299 - DNA, 25 bp, probe
ggaccgattgacctgtcatgtccct

SEQ ID NO: 256300 - DNA, 25 bp, probe
ggacactggtaccttcttcagtgct

SEQ ID NO: 256301 - DNA, 25 bp, probe
ggacagtggtatggttcttgcctca

SEQ ID NO: 256302 - DNA, 25 bp, probe
ggactttgtgctagtcctggcactg

SEQ ID NO: 256303 - DNA, 25 bp, probe
ggactttgtgctcatgttggccatc

SEQ ID NO: 256304 - DNA, 25 bp, probe
ggactgtggtatcagattggagtcg

SEQ ID NO: 256305 - DNA, 25 bp, probe
ggactgggcacgcaggtgcatggtc

SEQ ID NO: 256306 - DNA, 25 bp, probe
ggactggccagcctggtgaaggtgt

SEQ ID NO: 256307 - DNA, 25 bp, probe
ggactggccagcctggtgaaggtgt

SEQ ID NO: 256308 - DNA, 25 bp, probe
ggactgggcagcttgttgaaggctc

SEQ ID NO: 256309 - DNA, 25 bp, probe
ggactggcagatgtggtttgcagcc

SEQ ID NO: 256310 - DNA, 25 bp, probe
ggactggcgagatttttgctcaggc

SEQ ID NO: 256311 - DNA, 25 bp, probe
ggacattcgaggaattggccgctgt

SEQ ID NO: 256312 - DNA, 25 bp, probe
ggacttcaagcgaaaggcacgcagc

SEQ ID NO: 256313 - DNA, 25 bp, probe
ggactctgcaaggaagggatcggct

SEQ ID NO: 256314 - DNA, 25 bp, probe
ggactctgcaaggaagggatcggct

SEQ ID NO: 256315 - DNA, 25 bp, probe
ggactgctcagaggggcgattccct

SEQ ID NO: 256316 - DNA, 25 bp, probe
ggactgctcagaggggcgattccct

SEQ ID NO: 256317 - DNA, 25 bp, probe
ggacaccgaggtgggcagatcactt

SEQ ID NO: 256318 - DNA, 25 bp, probe
ggacccgtggatgagtacatgctgc

SEQ ID NO: 256319 - DNA, 25 bp, probe
ggacccctggatgcaaacaccagcc

SEQ ID NO: 256320 - DNA, 25 bp, probe
ggaccccgtgtcaaagacaccagct

SEQ ID NO: 256321 - DNA, 25 bp, probe
ggaccctgatcattcaagacacaac

SEQ ID NO: 256322 - DNA, 25 bp, probe
ggacccagaattaacccatacaaat

SEQ ID NO: 256323 - DNA, 25 bp, probe
ggacccagttgtacctaatcacaga

SEQ ID NO: 256324 - DNA, 25 bp, probe
ggactcgaatttacagaaagccaca

SEQ ID NO: 256325 - DNA, 25 bp, probe
ggactccactttcagaggagataga

SEQ ID NO: 256326 - DNA, 25 bp, probe
ggacccactcatagcaaaggcagat

SEQ ID NO: 256327 - DNA, 25 bp, probe
ggacccacgcaaagatagcgagaaa

SEQ ID NO: 256328 - DNA, 25 bp, probe
ggacccacgcaaggacagtgagcgc

SEQ ID NO: 256329 - DNA, 25 bp, probe
ggacgacggacagcacatgtggagg

SEQ ID NO: 256330 - DNA, 25 bp, probe
ggacggcgagaagtgaaggcagaag

SEQ ID NO: 256331 - DNA, 25 bp, probe
ggacgaggatgaagagaggtggcaa

SEQ ID NO: 256332 - DNA, 25 bp, probe
ggacggtgcataggttttggcaacc

SEQ ID NO: 256333 - DNA, 25 bp, probe
ggacgggaaagtgaagcccagccgg

SEQ ID NO: 256334 - DNA, 25 bp, probe
ggaaggggagcatgaaacccaccac

SEQ ID NO: 256335 - DNA, 25 bp, probe
ggacggctggagtaacaacacccat

SEQ ID NO: 256336 - DNA, 25 bp, probe
ggactttgaagatatcacccacctc

SEQ ID NO: 256337 - DNA, 25 bp, probe
tggagcattaaaggtaacccctgcc

SEQ ID NO: 256338 - DNA, 25 bp, probe
ggacttgaaaatcaaagcccatgtc

SEQ ID NO: 256339 - DNA, 25 bp, probe
ggacaaaattatgaccacccttctc

SEQ ID NO: 256340 - DNA, 25 bp, probe
ggaaaggactcagtttgcacccttt

SEQ ID NO: 256341 - DNA, 25 bp, probe
ggaaaggcactgggtacctcagggt

SEQ ID NO: 256342 - DNA, 25 bp, probe
ggacagattactgagcttgtcccgg

SEQ ID NO: 256343 - DNA, 25 bp, probe
ggacagattactgagcttgtcccgg

SEQ ID NO: 256344 - DNA, 25 bp, probe
ggacatcttcctggagatcgtcacc

SEQ ID NO: 256345 - DNA, 25 bp, probe
ggacactgtccatgaagcactgagc

SEQ ID NO: 256346 - DNA, 25 bp, probe
ggacactgtccatgaagcactgagc

SEQ ID NO: 256347 - DNA, 25 bp, probe
ggacacttccaatgagtccagctca

SEQ ID NO: 256348 - DNA, 25 bp, probe
ggaactactagataaccagtggtta

SEQ ID NO: 256349 - DNA, 25 bp, probe
ggaacatcaaaggaaaccacggagt

SEQ ID NO: 256350 - DNA, 25 bp, probe
ggaacttcgcatcaataccaagggt

SEQ ID NO: 256351 - DNA, 25 bp, probe
ggaacttcgcatcaataccaagggt

SEQ ID NO: 256352 - DNA, 25 bp, probe
ggacatcttccaatgattaaccagg

SEQ ID NO: 256353 - DNA, 25 bp, probe
ggacactgtgtcaatcattagtaac

SEQ ID NO: 256354 - DNA, 25 bp, probe
ggacactgtgtcaatcattagtaac

SEQ ID NO: 256355 - DNA, 25 bp, probe
ggacctggctgtcttgagaatagct

SEQ ID NO: 256356 - DNA, 25 bp, probe
ggacctgatgttccacatgcagagg

SEQ ID NO: 256357 - DNA, 25 bp, probe
ggacctggatctggcattggagggg

SEQ ID NO: 256358 - DNA, 25 bp, probe
ggacgctggcctgggatgagagggc

SEQ ID NO: 256359 - DNA, 25 bp, probe
ggacgctggcctgggatgagagggc

SEQ ID NO: 256360 - DNA, 25 bp, probe
ggacctgcacaagggatgcgggccc

SEQ ID NO: 256361 - DNA, 25 bp, probe
ggacctgcacaagggatgcgggccc

SEQ ID NO: 256362 - DNA, 25 bp, probe
ggacctgcacaagggatgcgggccc

SEQ ID NO: 256363 - DNA, 25 bp, probe
ggactcatgagattaggttgggccc

SEQ ID NO: 256364 - DNA, 25 bp, probe
ggacttgagactttggtcccagccc

SEQ ID NO: 256365 - DNA, 25 bp, probe
ggacaccaactaatgctgactccac

SEQ ID NO: 256366 - DNA, 25 bp, probe
ggacaccaactaatgctgactccac

SEQ ID NO: 256367 - DNA, 25 bp, probe
ggacccatgactctgtagccagaag

SEQ ID NO: 256368 - DNA, 25 bp, probe
ggcacccaagctaagggtattagcc

SEQ ID NO: 256369 - DNA, 25 bp, probe
ggacccaagatagaggtttatattc

SEQ ID NO: 256370 - DNA, 25 bp, probe
ggacccaatcaagcatttttatctt

SEQ ID NO: 256371 - DNA, 25 bp, probe
ggacacaccgaatctatgatttctg

SEQ ID NO: 256372 - DNA, 25 bp, probe
ggactacgcaaagaatctattcatg

SEQ ID NO: 256373 - DNA, 25 bp, probe
tggcagaacgaacaccacattttga

SEQ ID NO: 256374 - DNA, 25 bp, probe
ggactcacgttaactcacatttata

SEQ ID NO: 256375 - DNA, 25 bp, probe
ggactcaggtaacctgcgtgcttta

SEQ ID NO: 256376 - DNA, 25 bp, probe
ggactatggctatggaggtgatttt

SEQ ID NO: 256377 - DNA, 25 bp, probe
ggacgatcctgtgggagaagtctct

SEQ ID NO: 256378 - DNA, 25 bp, probe
ggacgccacgatgcatggcaatgcc

SEQ ID NO: 256379 - DNA, 25 bp, probe
ggacgtcacagagcagctggatgcc

SEQ ID NO: 256380 - DNA, 25 bp, probe
ggacaccaaggcaagctgctatgat

SEQ ID NO: 256381 - DNA, 25 bp, probe
ggacaccaagacaggcttgaggccc

SEQ ID NO: 256382 - DNA, 25 bp, probe
ggaaatccgcaaagtgttggacgcc

SEQ ID NO: 256383 - DNA, 25 bp, probe
ggaaatccgcaaagtgttggacgcc

SEQ ID NO: 256384 - DNA, 25 bp, probe
ggaaatccgcaaagtgttggacgcc

SEQ ID NO: 256385 - DNA, 25 bp, probe
ggaaataagcaaagagggcaatcgc

SEQ ID NO: 256386 - DNA, 25 bp, probe
ggacaagaccaaagaggggtccatt

SEQ ID NO: 256387 - DNA, 25 bp, probe
ggacagataccaaagaggggtacca

SEQ ID NO: 256388 - DNA, 25 bp, probe
tgtacagtagcacaaccctggtggc

SEQ ID NO: 256389 - DNA, 25 bp, probe
tggatcgtgaaaaactcttggggtc

SEQ ID NO: 256390 - DNA, 25 bp, probe
ggaactgaactgaactcttttgggc

SEQ ID NO: 256391 - DNA, 25 bp, probe
ggaattgcgcaacacctttagggag

SEQ ID NO: 256392 - DNA, 25 bp, probe
ggaattgcgcaacacctttagggag

SEQ ID NO: 256393 - DNA, 25 bp, probe
ggacattcaaagtgccctgtgcagg

SEQ ID NO: 256394 - DNA, 25 bp, probe
ggacattcaaagtgccctgtgcagg

SEQ ID NO: 256395 - DNA, 25 bp, probe
ggacgtggcaatgagacctggcagg

SEQ ID NO: 256396 - DNA, 25 bp, probe
ggacctggctgaggaggaggccgcg

SEQ ID NO: 256397 - DNA, 25 bp, probe
ggacccccactgggggcatcgaggc

SEQ ID NO: 256398 - DNA, 25 bp, probe
ggaccccctcaggggaacagcgagc

SEQ ID NO: 256399 - DNA, 25 bp, probe
ggaatgccactccaggggtacagtt

SEQ ID NO: 256400 - DNA, 25 bp, probe
ggaatgccactccaggggtacagtt

SEQ ID NO: 256401 - DNA, 25 bp, probe
ggaatttctaggtcgtgctacaact

SEQ ID NO: 256402 - DNA, 25 bp, probe
ggactttcataaattgagtacaatc

SEQ ID NO: 256403 - DNA, 25 bp, probe
ggacctggcaagaattggtatcaca

SEQ ID NO: 256404 - DNA, 25 bp, probe
ggaccggcaggagtttgtctgcctc

SEQ ID NO: 256405 - DNA, 25 bp, probe
ggacggacaggaacattcattgccc

SEQ ID NO: 256406 - DNA, 25 bp, probe
ggacgaaaagatcttctgctgccac

SEQ ID NO: 256407 - DNA, 25 bp, probe
ggacgtacacaatatcctgctgctg

SEQ ID NO: 256408 - DNA, 25 bp, probe
ggacgtcctggatatcgagcagttc

SEQ ID NO: 256409 - DNA, 25 bp, probe
ggacgtcctggatatcgagcagttc

SEQ ID NO: 256410 - DNA, 25 bp, probe
ggacgtccaggatggagtgagctgc

SEQ ID NO: 256411 - DNA, 25 bp, probe
ggacgatgcctgcaacgtgaacatc

SEQ ID NO: 256412 - DNA, 25 bp, probe
ggacggcctggacttgaaactcagc

SEQ ID NO: 256413 - DNA, 25 bp, probe
ggacgggatggggtacacagccagc

SEQ ID NO: 256414 - DNA, 25 bp, probe
ggacagtagatgggccgacacacac

SEQ ID NO: 256415 - DNA, 25 bp, probe
ggactctcagacactcagaagcaac

SEQ ID NO: 256416 - DNA, 25 bp, probe
ggacgaagcaattgtaaagcagatc

SEQ ID NO: 256417 - DNA, 25 bp, probe
ggaaagatgccaagtgagattgcaa

SEQ ID NO: 256418 - DNA, 25 bp, probe
ggaaagatgccaagtgagattgcaa

SEQ ID NO: 256419 - DNA, 25 bp, probe
ggaaaagtaagcatctctgcagaaa

SEQ ID NO: 256420 - DNA, 25 bp, probe
ggacatgagagctcagcttccgaca

SEQ ID NO: 256421 - DNA, 25 bp, probe
ggacatgaagagcacctccagcatc

SEQ ID NO: 256422 - DNA, 25 bp, probe
ggactcacagctgactccaagctgc

SEQ ID NO: 256423 - DNA, 25 bp, probe
ggactcacagctgactccaagctgc

SEQ ID NO: 256424 - DNA, 25 bp, probe
ggactcacagctgactccaagctgc

SEQ ID NO: 256425 - DNA, 25 bp, probe
ggactcacagctgactccaagctgc

SEQ ID NO: 256426 - DNA, 25 bp, probe
ggactcacagctgactccaagctgc

SEQ ID NO: 256427 - DNA, 25 bp, probe
ggacacaccagtgtctaagcgctcc

SEQ ID NO: 256428 - DNA, 25 bp, probe
ggactaccagatgaccacaagttgc

SEQ ID NO: 256429 - DNA, 25 bp, probe
ggactaccagatgaccacaagttgc

SEQ ID NO: 256430 - DNA, 25 bp, probe
ggacttcaggatccactagacagtt

SEQ ID NO: 256431 - DNA, 25 bp, probe
ggactacatctactgatgctagaca

SEQ ID NO: 256432 - DNA, 25 bp, probe
ggacatcacagccctgatggctgcc

SEQ ID NO: 256433 - DNA, 25 bp, probe
ggacatatggccaatgtgcatgtgc

SEQ ID NO: 256434 - DNA, 25 bp, probe
ggacatcatgtctttgtcagtgcca

SEQ ID NO: 256435 - DNA, 25 bp, probe
ggacatcatgtctttgtcagtgcca

SEQ ID NO: 256436 - DNA, 25 bp, probe
ggacatctctagtgtagctgccaca

SEQ ID NO: 256437 - DNA, 25 bp, probe
ggactccatgagcggcaatgtcaca

SEQ ID NO: 256438 - DNA, 25 bp, probe
ggactctcagaatcgcactgaccag

SEQ ID NO: 256439 - DNA, 25 bp, probe
ggaattacaacggtcgacgagctcg

SEQ ID NO: 256440 - DNA, 25 bp, probe
ggaagtacaaccgcaacgagaccta

SEQ ID NO: 256441 - DNA, 25 bp, probe
ggaagataaccacaaggccgacatc

SEQ ID NO: 256442 - DNA, 25 bp, probe
ggaataattccggaaacagctacac

SEQ ID NO: 256443 - DNA, 25 bp, probe
ggaaacatacccaggaagtacagtt

SEQ ID NO: 256444 - DNA, 25 bp, probe
ggaaattcacgacggaaagcgacgt

SEQ ID NO: 256445 - DNA, 25 bp, probe
ggaaattcacgacggaaagcgacgt

SEQ ID NO: 256446 - DNA, 25 bp, probe
ggactattcagggagctgcaaatgc

SEQ ID NO: 256447 - DNA, 25 bp, probe
ggactaacatcgaagcatctgaatc

SEQ ID NO: 256448 - DNA, 25 bp, probe
ggactgtcaatcttagatagattct

SEQ ID NO: 256449 - DNA, 25 bp, probe
ggacgttcattgtgattgatattct

SEQ ID NO: 256450 - DNA, 25 bp, probe
ggacgtgctcattgagtggctgtgt

SEQ ID NO: 256451 - DNA, 25 bp, probe
ggacattgctgctgagctgtggtta

SEQ ID NO: 256452 - DNA, 25 bp, probe
ggacaatctcctggttgtgcttatc

SEQ ID NO: 256453 - DNA, 25 bp, probe
ggacacaagccagggctgggacaat

SEQ ID NO: 256454 - DNA, 25 bp, probe
ggactaatggaccagtgaggagccc

SEQ ID NO: 256455 - DNA, 25 bp, probe
ggaaataggagccctggttccacca

SEQ ID NO: 256456 - DNA, 25 bp, probe
ggacgatggaggcagttttccaaaa

SEQ ID NO: 256457 - DNA, 25 bp, probe
ggaaggggggccatagcccatcaag

SEQ ID NO: 256458 - DNA, 25 bp, probe
ggaaggggggccatagcccatcaag

SEQ ID NO: 256459 - DNA, 25 bp, probe
ggactacgtgggtgtactccatcaa

SEQ ID NO: 256460 - DNA, 25 bp, probe
ggacgacctatttgagtccatcctc

SEQ ID NO: 256461 - DNA, 25 bp, probe
ggacgagtttgatctggccattctc

SEQ ID NO: 256462 - DNA, 25 bp, probe
ggactcagtttaccttaatgcctta

SEQ ID NO: 256463 - DNA, 25 bp, probe
ggacttatttgacctttagccatca

SEQ ID NO: 256464 - DNA, 25 bp, probe
ggactttgttctttttagccatgaa

SEQ ID NO: 256465 - DNA, 25 bp, probe
ggacttcgactttgtgtcagagcga

SEQ ID NO: 256466 - DNA, 25 bp, probe
ggacaattcacttcattgaccagga

SEQ ID NO: 256467 - DNA, 25 bp, probe
ggacgattacttggacaccgtgaag

SEQ ID NO: 256468 - DNA, 25 bp, probe
ggactttcacttgaatcttgctgct

SEQ ID NO: 256469 - DNA, 25 bp, probe
ggactcttactgctaacttttgtgt

SEQ ID NO: 256470 - DNA, 25 bp, probe
ggactttattcggaagcttctggtt

SEQ ID NO: 256471 - DNA, 25 bp, probe
ggactttattcggaagcttctggtt

SEQ ID NO: 256472 - DNA, 25 bp, probe
ggactttttgtgggactccagagta

SEQ ID NO: 256473 - DNA, 25 bp, probe
ggactctttgtgataaacactgaaa

SEQ ID NO: 256474 - DNA, 25 bp, probe
ggactctttgtgataaacactgaaa

SEQ ID NO: 256475 - DNA, 25 bp, probe
ggacttctgtgcattgtaaacataa

SEQ ID NO: 256476 - DNA, 25 bp, probe
ggacttctgtgcattgtaaacataa

SEQ ID NO: 256477 - DNA, 25 bp, probe
ggactatgctatgaatttatacaag

SEQ ID NO: 256478 - DNA, 25 bp, probe
ggacgatgaagccatcattgctgct

SEQ ID NO: 256479 - DNA, 25 bp, probe
ggactgatgagggcactccatctat

SEQ ID NO: 256480 - DNA, 25 bp, probe
ggacgtgagagagcatgccttcttc

SEQ ID NO: 256481 - DNA, 25 bp, probe
ggactgctgggagaactttgtggtg

SEQ ID NO: 256482 - DNA, 25 bp, probe
ggacgagggcaggacactgattgtt

SEQ ID NO: 256483 - DNA, 25 bp, probe
ggacggggaggcaacgagagtgcta

SEQ ID NO: 256484 - DNA, 25 bp, probe
ggactcccctggacacagaggtgcc

SEQ ID NO: 256485 - DNA, 25 bp, probe
ggactacctagagaccatggctcca

SEQ ID NO: 256486 - DNA, 25 bp, probe
ggactactccaagttccaggagctg

SEQ ID NO: 256487 - DNA, 25 bp, probe
ggacgactgccaaggactgaggaca

SEQ ID NO: 256488 - DNA, 25 bp, probe
ggactacacacaatacagtggtata

SEQ ID NO: 256489 - DNA, 25 bp, probe
ggactactccactcagattgacatg

SEQ ID NO: 256490 - DNA, 25 bp, probe
ggactgactcctggaagacagcctg

SEQ ID NO: 256491 - DNA, 25 bp, probe
ggacttggcagccagaaacatcctg

SEQ ID NO: 256492 - DNA, 25 bp, probe
ggcacttaccaaaatgacatcgctt

SEQ ID NO: 256493 - DNA, 25 bp, probe
ggacttgaacaaagatggaagcatt

SEQ ID NO: 256494 - DNA, 25 bp, probe
ggactcagaagttcaagctaaatat

SEQ ID NO: 256495 - DNA, 25 bp, probe
ggactagaatgttcacaccacgatc

SEQ ID NO: 256496 - DNA, 25 bp, probe
ggactaaagtattccacaaatctta

SEQ ID NO: 256497 - DNA, 25 bp, probe
ggactaaagtattccacaaatctta

SEQ ID NO: 256498 - DNA, 25 bp, probe
ggaaagccagttcaccaaatcttca

SEQ ID NO: 256499 - DNA, 25 bp, probe
ggaaatcaggtagaccatattctaa

SEQ ID NO: 256500 - DNA, 25 bp, probe
ggaagtcgacagttaaaatggtaca

SEQ ID NO: 256501 - DNA, 25 bp, probe
ggaagcctaagtctaaggactccat

SEQ ID NO: 256502 - DNA, 25 bp, probe
ggaatccttaggctacgttttcatg

SEQ ID NO: 256503 - DNA, 25 bp, probe
ggacagtttcagaggccttattttg

SEQ ID NO: 256504 - DNA, 25 bp, probe
ggacagtttcagaggccttattttg

SEQ ID NO: 256505 - DNA, 25 bp, probe
ggacagccttatgagggtttgcttg

SEQ ID NO: 256506 - DNA, 25 bp, probe
ggacgacttcatccgggaggtcaat

SEQ ID NO: 256507 - DNA, 25 bp, probe
ggactacttcagagagaggttccta

SEQ ID NO: 256508 - DNA, 25 bp, probe
ggactttctcagaaggtgtttggta

SEQ ID NO: 256509 - DNA, 25 bp, probe
ggacatttccaagtatgtttggtga

SEQ ID NO: 256510 - DNA, 25 bp, probe
ggacacattgcccagaatgttttgt

SEQ ID NO: 256511 - DNA, 25 bp, probe
ggaaatgtcctaggttttctttgtg

SEQ ID NO: 256512 - DNA, 25 bp, probe
ggaaagtcctctcttttgcatattc

SEQ ID NO: 256513 - DNA, 25 bp, probe
ggcaggagtacctaattttagattt

SEQ ID NO: 256514 - DNA, 25 bp, probe
tgggggctaaaagggctgtacagtt

SEQ ID NO: 256515 - DNA, 25 bp, probe
ggaactccaaaagggcttcaatgcg

SEQ ID NO: 256516 - DNA, 25 bp, probe
ggacactcgtaatgtggcctttgag

SEQ ID NO: 256517 - DNA, 25 bp, probe
ggacagccacgaaacagggctagta

SEQ ID NO: 256518 - DNA, 25 bp, probe
ggacagccacgaaacagggctagta

SEQ ID NO: 256519 - DNA, 25 bp, probe
ggacatgaacgagcaggaggtacta

SEQ ID NO: 256520 - DNA, 25 bp, probe
ggaagaaatgctgcctaggtcctag

SEQ ID NO: 256521 - DNA, 25 bp, probe
ggaaaaattccagcaggccatcgat

SEQ ID NO: 256522 - DNA, 25 bp, probe
ggactacacattcaggaggcacaaa

SEQ ID NO: 256523 - DNA, 25 bp, probe
ggactatcactgtctgggggacaat

SEQ ID NO: 256524 - DNA, 25 bp, probe
ggactatcactgtctgggggacaat

SEQ ID NO: 256525 - DNA, 25 bp, probe
ggactcatccaccaggggatgaaat

SEQ ID NO: 256526 - DNA, 25 bp, probe
ggactcaaacgcgtggaaaatatct

SEQ ID NO: 256527 - DNA, 25 bp, probe
ggacatccatagccttcaaaaatat

SEQ ID NO: 256528 - DNA, 25 bp, probe
ggacaagaacgcagcacttcagaat

SEQ ID NO: 256529 - DNA, 25 bp, probe
ggacaagaacgcagcacttcagaat

SEQ ID NO: 256530 - DNA, 25 bp, probe
ggacaccaacacatgatcccagaga

SEQ ID NO: 256531 - DNA, 25 bp, probe
ggacacgaaccttattaaaactcag

SEQ ID NO: 256532 - DNA, 25 bp, probe
ggacacgaaccttattaaaactcag

SEQ ID NO: 256533 - DNA, 25 bp, probe
ggacagttaccttattcaaacatca

SEQ ID NO: 256534 - DNA, 25 bp, probe
ggacagttaccttattcaaacatca

SEQ ID NO: 256535 - DNA, 25 bp, probe
ggaaatttgacatcatccccactat

SEQ ID NO: 256536 - DNA, 25 bp, probe
ggaaatttgacatcatccccactat

SEQ ID NO: 256537 - DNA, 25 bp, probe
tgagactgaagggaaatcccccttt

SEQ ID NO: 256538 - DNA, 25 bp, probe
tgagactgaagggaaatcccccttt

SEQ ID NO: 256539 - DNA, 25 bp, probe
ggactgcagcagggagcagacccgc

SEQ ID NO: 256540 - DNA, 25 bp, probe
ggactgcagcagggagcagacccgc

SEQ ID NO: 256541 - DNA, 25 bp, probe
ggactcaagggacagagcacttcca

SEQ ID NO: 256542 - DNA, 25 bp, probe
ggactaagaagatcatgatgcactt

SEQ ID NO: 256543 - DNA, 25 bp, probe
ggacatacaaaatcaatcttttcct

SEQ ID NO: 256544 - DNA, 25 bp, probe
ggactttacacaatcctctattacc

SEQ ID NO: 256545 - DNA, 25 bp, probe
ggactttacacaatcctctattacc

SEQ ID NO: 256546 - DNA, 25 bp, probe
ggactgttacagctgagcattatga

SEQ ID NO: 256547 - DNA, 25 bp, probe
ggactttcagcgggagattcagatc

SEQ ID NO: 256548 - DNA, 25 bp, probe
ggacatccttggggagattgctgtg

SEQ ID NO: 256549 - DNA, 25 bp, probe
ggactctcacggtgacatgtttaca

SEQ ID NO: 256550 - DNA, 25 bp, probe
ggactctcacggtgacatgtttaca

SEQ ID NO: 256551 - DNA, 25 bp, probe
ggactctatccattgagcacatttt

SEQ ID NO: 256552 - DNA, 25 bp, probe
ggactctatccattgagcacatttt

SEQ ID NO: 256553 - DNA, 25 bp, probe
ggactttctcttggacattgtaaac

SEQ ID NO: 256554 - DNA, 25 bp, probe
ggacttctcttctgagctggtagaa

SEQ ID NO: 256555 - DNA, 25 bp, probe
ggaattctttataagggcaagtatc

SEQ ID NO: 256556 - DNA, 25 bp, probe
ggacattctttaatagtcaactgta

SEQ ID NO: 256557 - DNA, 25 bp, probe
ggacattctttaatagtcaactgta

SEQ ID NO: 256558 - DNA, 25 bp, probe
ggacggtttatgagcacacaattat

SEQ ID NO: 256559 - DNA, 25 bp, probe
ggacaagattcttggtgccaccatt

SEQ ID NO: 256560 - DNA, 25 bp, probe
ggacatcgaatcagtttaccttcag

SEQ ID NO: 256561 - DNA, 25 bp, probe
ggacatcgaatcagtttaccttcag

SEQ ID NO: 256562 - DNA, 25 bp, probe
ggacattgtgtcagattaccagtta

SEQ ID NO: 256563 - DNA, 25 bp, probe
ggaactttacagatgaccagattag

SEQ ID NO: 256564 - DNA, 25 bp, probe
ggaactttacagatgaccagattag

SEQ ID NO: 256565 - DNA, 25 bp, probe
ggaaatttcaaatctaagtttggca

SEQ ID NO: 256566 - DNA, 25 bp, probe
ggaacttgaaagcaaatacatttgg

SEQ ID NO: 256567 - DNA, 25 bp, probe
ggaacttgaaagcaaatacatttgg

SEQ ID NO: 256568 - DNA, 25 bp, probe
ggaaatgtaaacgaaggctgacttg

SEQ ID NO: 256569 - DNA, 25 bp, probe
ggctaattaagagattttgccttga

SEQ ID NO: 256570 - DNA, 25 bp, probe
ggctataaaacgattttctgttgct

SEQ ID NO: 256571 - DNA, 25 bp, probe
tggaagaaacacactattggttttt

SEQ ID NO: 256572 - DNA, 25 bp, probe
tggaagaaacacactattggttttt

SEQ ID NO: 256573 - DNA, 25 bp, probe
ggaaagggctatctttgttctttgt

SEQ ID NO: 256574 - DNA, 25 bp, probe
ggaaacttccatattctgtttttga

SEQ ID NO: 256575 - DNA, 25 bp, probe
ggacttttccacattgtggttccac

SEQ ID NO: 256576 - DNA, 25 bp, probe
ggacttgaacccatatttgtacacc

SEQ ID NO: 256577 - DNA, 25 bp, probe
ggactgtgtagttgtatatttgtaa

SEQ ID NO: 256578 - DNA, 25 bp, probe
ggacatgagccgggtgatcttttac

SEQ ID NO: 256579 - DNA, 25 bp, probe
ggacatagccctgtgatactgcatc

SEQ ID NO: 256580 - DNA, 25 bp, probe
ggactaggactcccataaatcactg

SEQ ID NO: 256581 - DNA, 25 bp, probe
ggacttgtactagcagagagtcctg

SEQ ID NO: 256582 - DNA, 25 bp, probe
ggactggacacaagccagggctggg

SEQ ID NO: 256583 - DNA, 25 bp, probe
ggacttgcacacagggaggctgtag

SEQ ID NO: 256584 - DNA, 25 bp, probe
ggactctgacattgatggcgaggcg

SEQ ID NO: 256585 - DNA, 25 bp, probe
ggacatgactgcttatgggaggcgg

SEQ ID NO: 256586 - DNA, 25 bp, probe
ggactcaagcaatggagagcggcga

SEQ ID NO: 256587 - DNA, 25 bp, probe
ggacatcatcaagggtgaggcagag

SEQ ID NO: 256588 - DNA, 25 bp, probe
ggactgcacaatgacagagaagagg

SEQ ID NO: 256589 - DNA, 25 bp, probe
ggactgcatggacaatgagaggcgg

SEQ ID NO: 256590 - DNA, 25 bp, probe
ggactctggaccgtgtgaagctagg

SEQ ID NO: 256591 - DNA, 25 bp, probe
ggacatcggcaaggagatgtacatc

SEQ ID NO: 256592 - DNA, 25 bp, probe
ggacatgcggtactgaggtgcagac

SEQ ID NO: 256593 - DNA, 25 bp, probe
ggacatgtggtcagtgggctgcatc

SEQ ID NO: 256594 - DNA, 25 bp, probe
ggactggtttgccatgggatgcagc

SEQ ID NO: 256595 - DNA, 25 bp, probe
ggactggtgtcctatggagatatta

SEQ ID NO: 256596 - DNA, 25 bp, probe
ggactctgttgctaaaacaattgat

SEQ ID NO: 256597 - DNA, 25 bp, probe
ggactggatgctttataaatttgtt

SEQ ID NO: 256598 - DNA, 25 bp, probe
ggactcatatatttaagccttttgt

SEQ ID NO: 256599 - DNA, 25 bp, probe
ggacacattcagctaacgtatttta

SEQ ID NO: 256600 - DNA, 25 bp, probe
ggaaattaactatctgtacttataa

SEQ ID NO: 256601 - DNA, 25 bp, probe
ggcacaagtcaacttgcttctcctt

SEQ ID NO: 256602 - DNA, 25 bp, probe
ggacagaagggtccttctccttatg

SEQ ID NO: 256603 - DNA, 25 bp, probe
ggaagaaggcgtcttccacttccac

SEQ ID NO: 256604 - DNA, 25 bp, probe
ggaacatagactgttttacctccac

SEQ ID NO: 256605 - DNA, 25 bp, probe
ggaagttactagagtctaccccatc

SEQ ID NO: 256606 - DNA, 25 bp, probe
ggacaatctgactcgagtcaacccc

SEQ ID NO: 256607 - DNA, 25 bp, probe
ggactatcaagtgctggtcttctac

SEQ ID NO: 256608 - DNA, 25 bp, probe
ggactatcaagtgctggtcttctac

SEQ ID NO: 256609 - DNA, 25 bp, probe
ggactatcatctgttgattctcttg

SEQ ID NO: 256610 - DNA, 25 bp, probe
ggactatcatctgttgattctcttg

SEQ ID NO: 256611 - DNA, 25 bp, probe
ggactctcattacttttttatggaa

SEQ ID NO: 256612 - DNA, 25 bp, probe
ggactctttaccctagaaggaagag

SEQ ID NO: 256613 - DNA, 25 bp, probe
ggaaatttactccctggggaagatg

SEQ ID NO: 256614 - DNA, 25 bp, probe
ggcaaggtaacctgggaggcaacaa

SEQ ID NO: 256615 - DNA, 25 bp, probe
ggcaaggtaacctgggaggcaacaa

SEQ ID NO: 256616 - DNA, 25 bp, probe
ggacaagcataagaaggaggcggaa

SEQ ID NO: 256617 - DNA, 25 bp, probe
ggactccaaagccaagacgcggagc

SEQ ID NO: 256618 - DNA, 25 bp, probe
ggactcccaacacaagacaaagctc

SEQ ID NO: 256619 - DNA, 25 bp, probe
tggactcccggaagaactacaactg

SEQ ID NO: 256620 - DNA, 25 bp, probe
ggacacccagcgaagacacatggcc

SEQ ID NO: 256621 - DNA, 25 bp, probe
ggacaccagccgggaaacagatttg

SEQ ID NO: 256622 - DNA, 25 bp, probe
ggacatcacaaccacaaaacaattc

SEQ ID NO: 256623 - DNA, 25 bp, probe
ggacaccacatatataaaccatgtc

SEQ ID NO: 256624 - DNA, 25 bp, probe
ggacattcctgttgataacccaatc

SEQ ID NO: 256625 - DNA, 25 bp, probe
ggacatttcggataactccagcagc

SEQ ID NO: 256626 - DNA, 25 bp, probe
ggaatttggctgtggagtaagaggg

SEQ ID NO: 256627 - DNA, 25 bp, probe
ggacatttgatgctggtagtatgga

SEQ ID NO: 256628 - DNA, 25 bp, probe
ggacattgtaaacgtattttgatca

SEQ ID NO: 256629 - DNA, 25 bp, probe
ggacattgtaaacgtattttgatca

SEQ ID NO: 256630 - DNA, 25 bp, probe
ggacaattaatgatgcctttctgat

SEQ ID NO: 256631 - DNA, 25 bp, probe
ggacaattaatgatgcctttctgat

SEQ ID NO: 256632 - DNA, 25 bp, probe
ggacagattaagggcttcattcggc

SEQ ID NO: 256633 - DNA, 25 bp, probe
ggaaactagaggcttcttggtgaag

SEQ ID NO: 256634 - DNA, 25 bp, probe
ggaaaatgtagtgtttgtgtgtgtc

SEQ ID NO: 256635 - DNA, 25 bp, probe
ggaaaagtagtccttcagatctttc

SEQ ID NO: 256636 - DNA, 25 bp, probe
ggaaaagtagtccttcagatctttc

SEQ ID NO: 256637 - DNA, 25 bp, probe
ggaaacaaagttctagcatttacaa

SEQ ID NO: 256638 - DNA, 25 bp, probe
ggaaaatagtttctacttgcaatat

SEQ ID NO: 256639 - DNA, 25 bp, probe
ggacatcaaattctttccttccaga

SEQ ID NO: 256640 - DNA, 25 bp, probe
ggacacaaattggcttccatttcct

SEQ ID NO: 256641 - DNA, 25 bp, probe
ggacaatgagaggcggccgcatttc

SEQ ID NO: 256642 - DNA, 25 bp, probe
ggacaacagagcaagaccctgtctt

SEQ ID NO: 256643 - DNA, 25 bp, probe
ggacaaataaaactcgctgacttcg

SEQ ID NO: 256644 - DNA, 25 bp, probe
ggacaaagaattggatctggatcat

SEQ ID NO: 256645 - DNA, 25 bp, probe
ggacacaatgctgtggacaggcacc

SEQ ID NO: 256646 - DNA, 25 bp, probe
ggacactggtccgagaagggacatg

SEQ ID NO: 256647 - DNA, 25 bp, probe
ggacattgggcctatattgcagggt

SEQ ID NO: 256648 - DNA, 25 bp, probe
ggacagatggaccaaaagatgggtg

SEQ ID NO: 256649 - DNA, 25 bp, probe
ggacaatcgaccgaaagcaagaggt

SEQ ID NO: 256650 - DNA, 25 bp, probe
ggacaacaagctcaagaccgaggtg

SEQ ID NO: 256651 - DNA, 25 bp, probe
ggacaacaagagcgaaactccgtct

SEQ ID NO: 256652 - DNA, 25 bp, probe
ggacaacttgagtggagacattttt

SEQ ID NO: 256653 - DNA, 25 bp, probe
ggacaggtagagacacagcagacat

SEQ ID NO: 256654 - DNA, 25 bp, probe
ggacagctgggccgacagcagaata

SEQ ID NO: 256655 - DNA, 25 bp, probe
ggacatggaggcctgacagctgttg

SEQ ID NO: 256656 - DNA, 25 bp, probe
ggacatggagagtgacgatgcctgg

SEQ ID NO: 256657 - DNA, 25 bp, probe
ggacaggagcgatgcactttgtaga

SEQ ID NO: 256658 - DNA, 25 bp, probe
ggacaggagcgatgcactttgtaga

SEQ ID NO: 256659 - DNA, 25 bp, probe
ggacaggagaatggcacactttcaa

SEQ ID NO: 256660 - DNA, 25 bp, probe
ggacagggacacaatcctagtcagc

SEQ ID NO: 256661 - DNA, 25 bp, probe
ggactttgacctaatcagagtcatc

SEQ ID NO: 256662 - DNA, 25 bp, probe
ggaaattacctgaaacagcttctca

SEQ ID NO: 256663 - DNA, 25 bp, probe
ggaacctacggacaggtgtacaagg

SEQ ID NO: 256664 - DNA, 25 bp, probe
ggaaccaacgtcatcgttgccaaca

SEQ ID NO: 256665 - DNA, 25 bp, probe
ggaactgcaacgtcattaagtcaaa

SEQ ID NO: 256666 - DNA, 25 bp, probe
ggaaagccacccagatactgcagaa

SEQ ID NO: 256667 - DNA, 25 bp, probe
ggaaacctctccgagtactgaggaa

SEQ ID NO: 256668 - DNA, 25 bp, probe
ggacacctttcacagctatcaggga

SEQ ID NO: 256669 - DNA, 25 bp, probe
ggacacctttcacagctatcaggga

SEQ ID NO: 256670 - DNA, 25 bp, probe
ggaaacctctccgagtactgaggaa

SEQ ID NO: 256671 - DNA, 25 bp, probe
ggaaagccaggatggcccgaggaag

SEQ ID NO: 256672 - DNA, 25 bp, probe
ggaaagccaggatggcccgaggaag

SEQ ID NO: 256673 - DNA, 25 bp, probe
ggaaatgtcaggggcggggagggtg

SEQ ID NO: 256674 - DNA, 25 bp, probe
ggaaatgtcaggggcggggagggtg

SEQ ID NO: 256675 - DNA, 25 bp, probe
ggacatgagtcaggggcaccatgga

SEQ ID NO: 256676 - DNA, 25 bp, probe
ggacagcagtgaggtcctgccatag

SEQ ID NO: 256677 - DNA, 25 bp, probe
ggacagcgtggtactggctgcgagt

SEQ ID NO: 256678 - DNA, 25 bp, probe
ggactctgctggaaaagcggaggtt

SEQ ID NO: 256679 - DNA, 25 bp, probe
ggactcgctggacgacagcggcagc

SEQ ID NO: 256680 - DNA, 25 bp, probe
ggacaggtgtgacacagccacagca

SEQ ID NO: 256681 - DNA, 25 bp, probe
ggaaatctgtcacatcgtactcaat

SEQ ID NO: 256682 - DNA, 25 bp, probe
ggaacctgtcaaaattaccttgtat

SEQ ID NO: 256683 - DNA, 25 bp, probe
ggaacttgtgggaacattccaactt

SEQ ID NO: 256684 - DNA, 25 bp, probe
ggaaatttgtagcatcaactagaat

SEQ ID NO: 256685 - DNA, 25 bp, probe
ggaagtttgctcgttcaaaactttg

SEQ ID NO: 256686 - DNA, 25 bp, probe
ggaagatttcctgaaaaaatgggag

SEQ ID NO: 256687 - DNA, 25 bp, probe
ggaaacttctcccaagtgaagcttg

SEQ ID NO: 256688 - DNA, 25 bp, probe
ggaaagttcctcaagatggagactt

SEQ ID NO: 256689 - DNA, 25 bp, probe
ggaaaatactgctctgtggaacctc

SEQ ID NO: 256690 - DNA, 25 bp, probe
ggaaaccatcttcatcggtactcca

SEQ ID NO: 256691 - DNA, 25 bp, probe
ggaaagccatttcattgtggccctg

SEQ ID NO: 256692 - DNA, 25 bp, probe
ggaaatggagggtgactggccctgg

SEQ ID NO: 256693 - DNA, 25 bp, probe
ggacaaggtgggagagccctacggt

SEQ ID NO: 256694 - DNA, 25 bp, probe
ggacaaggtgggagagccctacggt

SEQ ID NO: 256695 - DNA, 25 bp, probe
ggaagaggctacagggccaaacgct

SEQ ID NO: 256696 - DNA, 25 bp, probe
ggactaggtggcagaggccaaccca

SEQ ID NO: 256697 - DNA, 25 bp, probe
ggacatggaggggcagaaccaagac

SEQ ID NO: 256698 - DNA, 25 bp, probe
ggacatgcggctgcagatgaaccag

SEQ ID NO: 256699 - DNA, 25 bp, probe
ggaacgtgggaatagcacaggaatc

SEQ ID NO: 256700 - DNA, 25 bp, probe
ggaacgtgggaatagcacaggaatc

SEQ ID NO: 256701 - DNA, 25 bp, probe
ggaactatttggttgggcaggcaat

SEQ ID NO: 256702 - DNA, 25 bp, probe
ggaacgtcctggtttgtgtggcagt

SEQ ID NO: 256703 - DNA, 25 bp, probe
ggaacttttggataatggtgcaggc

SEQ ID NO: 256704 - DNA, 25 bp, probe
ggaagcgtgttacttacaaagaggt

SEQ ID NO: 256705 - DNA, 25 bp, probe
ggacaggtggtaaagacacttgtgg

SEQ ID NO: 256706 - DNA, 25 bp, probe
ggacaggatggtgaacagcaatctt

SEQ ID NO: 256707 - DNA, 25 bp, probe
ggacagatgagggtgatgacagcaa

SEQ ID NO: 256708 - DNA, 25 bp, probe
ggacagtgtggcttgtcacaggcct

SEQ ID NO: 256709 - DNA, 25 bp, probe
ggaaagatgcgaacatactggctct

SEQ ID NO: 256710 - DNA, 25 bp, probe
ggaaagatgcgaacatactggctct

SEQ ID NO: 256711 - DNA, 25 bp, probe
ggaaagatgcgaacatactggctct

SEQ ID NO: 256712 - DNA, 25 bp, probe
ggacttgggagacgagatggcctgc

SEQ ID NO: 256713 - DNA, 25 bp, probe
ggactcagggaagagactcacatgc

SEQ ID NO: 256714 - DNA, 25 bp, probe
ggactagtggagtcctgagtcagca

SEQ ID NO: 256715 - DNA, 25 bp, probe
ggacttctgggtactgagaagcagc

SEQ ID NO: 256716 - DNA, 25 bp, probe
ggactttgtggtacggcagaggcgg

SEQ ID NO: 256717 - DNA, 25 bp, probe
ggaatttgggtctggagttctggct

SEQ ID NO: 256718 - DNA, 25 bp, probe
ggaatgggccgttaggagtatttga

SEQ ID NO: 256719 - DNA, 25 bp, probe
ggaagaggccggaggagtaggacac

SEQ ID NO: 256720 - DNA, 25 bp, probe
ggctagaagccgggtggttccagcc

SEQ ID NO: 256721 - DNA, 25 bp, probe
ggcaaaaggcctggggtgtacaccg

SEQ ID NO: 256722 - DNA, 25 bp, probe
ggaaatagcccggaggtgttcagtc

SEQ ID NO: 256723 - DNA, 25 bp, probe
ggaaatagcccggaggtgttcagtc

SEQ ID NO: 256724 - DNA, 25 bp, probe
ggaagaacccgttgttgtccattgc

SEQ ID NO: 256725 - DNA, 25 bp, probe
ggaaaactgtcgccagttgtgcact

SEQ ID NO: 256726 - DNA, 25 bp, probe
ggaaatcattgtgggattgctagct

SEQ ID NO: 256727 - DNA, 25 bp, probe
ggaaatcattgtgggattgctagct

SEQ ID NO: 256728 - DNA, 25 bp, probe
ggaaatctagtcatcataccagttg

SEQ ID NO: 256729 - DNA, 25 bp, probe
ggaaatctagtcatcataccagttg

SEQ ID NO: 256730 - DNA, 25 bp, probe
ggaaatgcagggatctccagaagtg

SEQ ID NO: 256731 - DNA, 25 bp, probe
ggaacacgatggacctcaagaatca

SEQ ID NO: 256732 - DNA, 25 bp, probe
ggaaaggtgacttgccaaaataact

SEQ ID NO: 256733 - DNA, 25 bp, probe
ggaaaggtgacttgccaaaataact

SEQ ID NO: 256734 - DNA, 25 bp, probe
ggaatttggcctttcagaaattgcc

SEQ ID NO: 256735 - DNA, 25 bp, probe
ggacagttgggcaccaatactcgcc

SEQ ID NO: 256736 - DNA, 25 bp, probe
ggaactttataaacaatgcacccct

SEQ ID NO: 256737 - DNA, 25 bp, probe
ggaactttataaacaatgcacccct

SEQ ID NO: 256738 - DNA, 25 bp, probe
ggcaaaattattacccatacgtctt

SEQ ID NO: 256739 - DNA, 25 bp, probe
ggaaaattatttgtgctcagctgac

SEQ ID NO: 256740 - DNA, 25 bp, probe
ggaaaatctttgtcttcaagctcca

SEQ ID NO: 256741 - DNA, 25 bp, probe
ggacaaacttctgcgatacgaccat

SEQ ID NO: 256742 - DNA, 25 bp, probe
ggacaaacttctgcgatacgaccat

SEQ ID NO: 256743 - DNA, 25 bp, probe
ggaaacctgttctgattccattctt

SEQ ID NO: 256744 - DNA, 25 bp, probe
ggacaaccttattaagctcgtcact

SEQ ID NO: 256745 - DNA, 25 bp, probe
tggaaaaggttatagctttgccttg

SEQ ID NO: 256746 - DNA, 25 bp, probe
ggaaacgttgtggaacttcgcatca

SEQ ID NO: 256747 - DNA, 25 bp, probe
ggaaacgttgtggaacttcgcatca

SEQ ID NO: 256748 - DNA, 25 bp, probe
ggacaagccttctgaaagggatgcc

SEQ ID NO: 256749 - DNA, 25 bp, probe
ggacacggtgtggaaagaggggctc

SEQ ID NO: 256750 - DNA, 25 bp, probe
ggaaaggctgttatatggaatgtct

SEQ ID NO: 256751 - DNA, 25 bp, probe
ggaaagggctatgtgggagagtcag

SEQ ID NO: 256752 - DNA, 25 bp, probe
ggacacagacagatcctggggagtt

SEQ ID NO: 256753 - DNA, 25 bp, probe
ggcaatcgactgcatcacgcaggga

SEQ ID NO: 256754 - DNA, 25 bp, probe
ggcaatcgactgcatcacgcaggga

SEQ ID NO: 256755 - DNA, 25 bp, probe
ggacaccaccagacactaggatggg

SEQ ID NO: 256756 - DNA, 25 bp, probe
ggacactacacagccaaggcggaca

SEQ ID NO: 256757 - DNA, 25 bp, probe
ggacagggtcagtacaagtcaggac

SEQ ID NO: 256758 - DNA, 25 bp, probe
ggacaggttgatgccagagccgtaa

SEQ ID NO: 256759 - DNA, 25 bp, probe
ggacagctctacaccagagagtgct

SEQ ID NO: 256760 - DNA, 25 bp, probe
ggaaccttcaacgaaaggcctcaat

SEQ ID NO: 256761 - DNA, 25 bp, probe
ggaaccttcaacgaaaggcctcaat

SEQ ID NO: 256762 - DNA, 25 bp, probe
ggcaaactcttagccaaggcttctt

SEQ ID NO: 256763 - DNA, 25 bp, probe
ggcaaactcttagccaaggcttctt

SEQ ID NO: 256764 - DNA, 25 bp, probe
ggactaccttttccaagtgatcctg

SEQ ID NO: 256765 - DNA, 25 bp, probe
ggaacctttattgcattggaccgaa

SEQ ID NO: 256766 - DNA, 25 bp, probe
ggaaagctttgcatttaaaccagaa

SEQ ID NO: 256767 - DNA, 25 bp, probe
ggaaacctatctttaccaactacag

SEQ ID NO: 256768 - DNA, 25 bp, probe
ggaaaccaagtcagacgacacctcc

SEQ ID NO: 256769 - DNA, 25 bp, probe
ggaaaccaagtcagacgacacctcc

SEQ ID NO: 256770 - DNA, 25 bp, probe
ggaaatggaaggatacggacctctt

SEQ ID NO: 256771 - DNA, 25 bp, probe
ggaaagcgacgggtaatgcggcatt

SEQ ID NO: 256772 - DNA, 25 bp, probe
ggaaagcgacgtggtgaagatctgt

SEQ ID NO: 256773 - DNA, 25 bp, probe
ggacaagggccaggtgacaggtgat

SEQ ID NO: 256774 - DNA, 25 bp, probe
ggacaagaggtggccataaagcaga

SEQ ID NO: 256775 - DNA, 25 bp, probe
ggaacgacatgtggcgcaaaagaaa

SEQ ID NO: 256776 - DNA, 25 bp, probe
ggaaatgtcctccaacaataaagag

SEQ ID NO: 256777 - DNA, 25 bp, probe
ggaaatgtgcatataacgtacaatg

SEQ ID NO: 256778 - DNA, 25 bp, probe
ggaaattcatagcccaggttcttga

SEQ ID NO: 256779 - DNA, 25 bp, probe
ggactttgattgcacattgttgttt

SEQ ID NO: 256780 - DNA, 25 bp, probe
ggacttttctgctatttactgctct

SEQ ID NO: 256781 - DNA, 25 bp, probe
ggacattttctggcttgtcattctg

SEQ ID NO: 256782 - DNA, 25 bp, probe
ggacatctttgccctgggcattatc

SEQ ID NO: 256783 - DNA, 25 bp, probe
ggaacttctggactgtaattaccca

SEQ ID NO: 256784 - DNA, 25 bp, probe
ggaactctctattgtgttttaggtc

SEQ ID NO: 256785 - DNA, 25 bp, probe
ggacacctgaatcatttattgtggt

SEQ ID NO: 256786 - DNA, 25 bp, probe
ggacacgtggtgcattttgcttgtt

SEQ ID NO: 256787 - DNA, 25 bp, probe
ggaaaagggcaaaatcgcttcagtt

SEQ ID NO: 256788 - DNA, 25 bp, probe
ggaacaagggctacaatcgctctct

SEQ ID NO: 256789 - DNA, 25 bp, probe
ggaaaacggcagacctcagtcatcc

SEQ ID NO: 256790 - DNA, 25 bp, probe
ggaaaacggcagacctcagtcatcc

SEQ ID NO: 256791 - DNA, 25 bp, probe
ggaacaacagaagcaccgtatttcg

SEQ ID NO: 256792 - DNA, 25 bp, probe
ggaaagaagagagaccgagctaatt

SEQ ID NO: 256793 - DNA, 25 bp, probe
ggaaagaagagagaccgagctaatt

SEQ ID NO: 256794 - DNA, 25 bp, probe
ggaaagtgccgaaaccgtgctgaaa

SEQ ID NO: 256795 - DNA, 25 bp, probe
ggaagaacttgaaagggtcaaaatg

SEQ ID NO: 256796 - DNA, 25 bp, probe
ggaaaacttgaagagctccaaagca

SEQ ID NO: 256797 - DNA, 25 bp, probe
ggaaaacttgaagagctccaaagca

SEQ ID NO: 256798 - DNA, 25 bp, probe
ggacaaaggacagaagaccaaagca

SEQ ID NO: 256799 - DNA, 25 bp, probe
ggacaagaccaagttagaccagaaa

SEQ ID NO: 256800 - DNA, 25 bp, probe
ggaataacctatgctgaacccacgc

SEQ ID NO: 256801 - DNA, 25 bp, probe
ggaaaagcctctttgttatcggcct

SEQ ID NO: 256802 - DNA, 25 bp, probe
ggaaacagcagcattcggtatccct

SEQ ID NO: 256803 - DNA, 25 bp, probe
ggaaacccatattctggtatccaag

SEQ ID NO: 256804 - DNA, 25 bp, probe
tggaaacctgacggtgctgtacggg

SEQ ID NO: 256805 - DNA, 25 bp, probe
ggacaccatctaccagatcatgtac

SEQ ID NO: 256806 - DNA, 25 bp, probe
ggacactattatcactaagaccttg

SEQ ID NO: 256807 - DNA, 25 bp, probe
ggaaccagttccttaatgacgtaga

SEQ ID NO: 256808 - DNA, 25 bp, probe
ggaacactttcctgagatgcactta

SEQ ID NO: 256809 - DNA, 25 bp, probe
ggacagcagcttctcggaatgcatg

SEQ ID NO: 256810 - DNA, 25 bp, probe
ggacagagatatgcccagagatgca

SEQ ID NO: 256811 - DNA, 25 bp, probe
ggaacgcatcatgcatgcaaggcca

SEQ ID NO: 256812 - DNA, 25 bp, probe
ggaagcctattggaaggccacacac

SEQ ID NO: 256813 - DNA, 25 bp, probe
ggaaatttgggagagccatacataa

SEQ ID NO: 256814 - DNA, 25 bp, probe
ggaaaaggtagcttacctgacacaa

SEQ ID NO: 256815 - DNA, 25 bp, probe
ggaaaaggatcctcactcgacagaa

SEQ ID NO: 256816 - DNA, 25 bp, probe
ggaaaaaattcagcgtcgacctcat

SEQ ID NO: 256817 - DNA, 25 bp, probe
ggaaaaaattcagcgtcgacctcat

SEQ ID NO: 256818 - DNA, 25 bp, probe
ggaataaaccacacttagtcctgat

SEQ ID NO: 256819 - DNA, 25 bp, probe
ggaaaacttccaacttgtgttctca

SEQ ID NO: 256820 - DNA, 25 bp, probe
ggaaaacttagctcctgcttttgat

SEQ ID NO: 256821 - DNA, 25 bp, probe
ggaaatactttgtaactttgtatat

SEQ ID NO: 256822 - DNA, 25 bp, probe
ggacagtatctctttacttcatttc

SEQ ID NO: 256823 - DNA, 25 bp, probe
ggcacacaatctttacttacttttc

SEQ ID NO: 256824 - DNA, 25 bp, probe
ggacacatttccactataattttac

SEQ ID NO: 256825 - DNA, 25 bp, probe
ggacaagtgttcactcacatctgta

SEQ ID NO: 256826 - DNA, 25 bp, probe
ggacaagtgttcactcacatctgta

SEQ ID NO: 256827 - DNA, 25 bp, probe
ggaaattcttgtgcgcacacttgat

SEQ ID NO: 256828 - DNA, 25 bp, probe
ggacaatatttggctgcaggaaggc

SEQ ID NO: 256829 - DNA, 25 bp, probe
ggaaatgactgtgagcggagcaagc

SEQ ID NO: 256830 - DNA, 25 bp, probe
ggaagctgactgccgagtactgaac

SEQ ID NO: 256831 - DNA, 25 bp, probe
ggaagctgactgccgagtactgaac

SEQ ID NO: 256832 - DNA, 25 bp, probe
ggacatgctgaggcaacagagaatg

SEQ ID NO: 256833 - DNA, 25 bp, probe
ggacatgtcccaggatgagaaggtg

SEQ ID NO: 256834 - DNA, 25 bp, probe
ggacattcaacaagaaatcacagtg

SEQ ID NO: 256835 - DNA, 25 bp, probe
ggacaccatagcggagaactcctga

SEQ ID NO: 256836 - DNA, 25 bp, probe
ggacagcaccaggagataattttga

SEQ ID NO: 256837 - DNA, 25 bp, probe
ggacagcacagacacagaatatttt

SEQ ID NO: 256838 - DNA, 25 bp, probe
ggacagcaacttgagaaatgctctt

SEQ ID NO: 256839 - DNA, 25 bp, probe
ggaacaaatgccttgaaatgctgct

SEQ ID NO: 256840 - DNA, 25 bp, probe
ggaacagaatgactctgacaaccgt

SEQ ID NO: 256841 - DNA, 25 bp, probe
ggaacagaatgactctgacaaccgt

SEQ ID NO: 256842 - DNA, 25 bp, probe
ggacacattatatctccaacaaggt

SEQ ID NO: 256843 - DNA, 25 bp, probe
ggacacattatatctccaacaaggt

SEQ ID NO: 256844 - DNA, 25 bp, probe
ggaaaataaactccaagcagccagt

SEQ ID NO: 256845 - DNA, 25 bp, probe
ggaaatgattactgtcaaaccagca

SEQ ID NO: 256846 - DNA, 25 bp, probe
ggaaatgattactgtcaaaccagca

SEQ ID NO: 256847 - DNA, 25 bp, probe
ggacttctctcctgaagaacacgca

SEQ ID NO: 256848 - DNA, 25 bp, probe
ggacttccagctgtggatgaacacc

SEQ ID NO: 256849 - DNA, 25 bp, probe
ggacattccctttgagagggaccag

SEQ ID NO: 256850 - DNA, 25 bp, probe
ggaaatcccttattgagggcccaga

SEQ ID NO: 256851 - DNA, 25 bp, probe
ggaaacccttcatgaagcactgaaa

SEQ ID NO: 256852 - DNA, 25 bp, probe
ggaagcccactttatctaaatgata

SEQ ID NO: 256853 - DNA, 25 bp, probe
ggcaacacgacttgaaataaataaa

SEQ ID NO: 256854 - DNA, 25 bp, probe
ggcaacacgacttgaaataaataaa

SEQ ID NO: 256855 - DNA, 25 bp, probe
ggaacacgacttcaactcgaaagag

SEQ ID NO: 256856 - DNA, 25 bp, probe
ggaatacggagagaacggtctggca

SEQ ID NO: 256857 - DNA, 25 bp, probe
ggaacaacgagcagaaggccctggc

SEQ ID NO: 256858 - DNA, 25 bp, probe
ggacaaactgctgcgatatgaccac

SEQ ID NO: 256859 - DNA, 25 bp, probe
ggacttacagtcagagatgacctta

SEQ ID NO: 256860 - DNA, 25 bp, probe
ggaatttcagtatgagtgactttga

SEQ ID NO: 256861 - DNA, 25 bp, probe
ggaatttcagtatgagtgactttga

SEQ ID NO: 256862 - DNA, 25 bp, probe
ggaatttgggaaggtgactcgaatg

SEQ ID NO: 256863 - DNA, 25 bp, probe
ggaatcttaggaactagaccaaagg

SEQ ID NO: 256864 - DNA, 25 bp, probe
ggaagcctaggaaagataccgaaga

SEQ ID NO: 256865 - DNA, 25 bp, probe
ggaaccttgcaacggtatccaggga

SEQ ID NO: 256866 - DNA, 25 bp, probe
ggaaccggaactctgaggggtgaca

SEQ ID NO: 256867 - DNA, 25 bp, probe
ggaaacaggaaacagtggcggcatg

SEQ ID NO: 256868 - DNA, 25 bp, probe
ggaattctgtgataaagggaccttg

SEQ ID NO: 256869 - DNA, 25 bp, probe
ggaattctgtgataaagggaccttg

SEQ ID NO: 256870 - DNA, 25 bp, probe
ggaattttgctacatggggtctggg

SEQ ID NO: 256871 - DNA, 25 bp, probe
ggacattcttggctagtggtggctg

SEQ ID NO: 256872 - DNA, 25 bp, probe
ggacattcttggctagtggtggctg

SEQ ID NO: 256873 - DNA, 25 bp, probe
ggacaatcttggctattctgttggc

SEQ ID NO: 256874 - DNA, 25 bp, probe
ggacagtgggagctgtgttactagc

SEQ ID NO: 256875 - DNA, 25 bp, probe
ggacagtgaggacagttatgtcttg

SEQ ID NO: 256876 - DNA, 25 bp, probe
ggacagtgaggacagttatgtcttg

SEQ ID NO: 256877 - DNA, 25 bp, probe
ggacaagactcgcagattttcttgg

SEQ ID NO: 256878 - DNA, 25 bp, probe
ggacacaggtgccaaattctaccgt

SEQ ID NO: 256879 - DNA, 25 bp, probe
ggacacaggatggacaagcccacca

SEQ ID NO: 256880 - DNA, 25 bp, probe
ggacacagaatggataagccagcca

SEQ ID NO: 256881 - DNA, 25 bp, probe
ggacaggatgcaaaagaggctccag

SEQ ID NO: 256882 - DNA, 25 bp, probe
ggaaggtgaacaagtgctaccgggg

SEQ ID NO: 256883 - DNA, 25 bp, probe
ggacaggaagcagaggtccctggag

SEQ ID NO: 256884 - DNA, 25 bp, probe
ggaaagcatcagatttgtccctgga

SEQ ID NO: 256885 - DNA, 25 bp, probe
ggaaaccagtgcctttaggtgagat

SEQ ID NO: 256886 - DNA, 25 bp, probe
ggaaaggagtccattatcgctgggc

SEQ ID NO: 256887 - DNA, 25 bp, probe
ggaaaaggtctcattatatattggg

SEQ ID NO: 256888 - DNA, 25 bp, probe
ggaaaacgtcacgctgaatatatga

SEQ ID NO: 256889 - DNA, 25 bp, probe
ggaaaccgttctgtgatatcatgga

SEQ ID NO: 256890 - DNA, 25 bp, probe
ggaaacgattttctgtatgatgtta

SEQ ID NO: 256891 - DNA, 25 bp, probe
ggaaatgcctccataaatatgatct

SEQ ID NO: 256892 - DNA, 25 bp, probe
ggaaattctccactaagtctgacgt

SEQ ID NO: 256893 - DNA, 25 bp, probe
ggaaatccccaaagagctctggatg

SEQ ID NO: 256894 - DNA, 25 bp, probe
ggaaatacgtcagcagatcctggat

SEQ ID NO: 256895 - DNA, 25 bp, probe
ggaacaactgccggtgatactggta

SEQ ID NO: 256896 - DNA, 25 bp, probe
ggaagcctctgggtgacaaaagtaa

SEQ ID NO: 256897 - DNA, 25 bp, probe
ggacagttctgctcagcaaaattgt

SEQ ID NO: 256898 - DNA, 25 bp, probe
ggacagtgttgcatagcagatttgg

SEQ ID NO: 256899 - DNA, 25 bp, probe
ggacagtattgagtcagatgatcct

SEQ ID NO: 256900 - DNA, 25 bp, probe
ggaagctgctttggcgagatcagta

SEQ ID NO: 256901 - DNA, 25 bp, probe
ggaatgcataatcgctgctggctga

SEQ ID NO: 256902 - DNA, 25 bp, probe
ggacatataattgctggctggtggg

SEQ ID NO: 256903 - DNA, 25 bp, probe
ggacattcaggtacccgggtaggct

SEQ ID NO: 256904 - DNA, 25 bp, probe
ggaaatgcaggaaggccgggttgtg

SEQ ID NO: 256905 - DNA, 25 bp, probe
ggaaatgcaggaaggccgggttgtg

SEQ ID NO: 256906 - DNA, 25 bp, probe
ggaattccgaactcgcatggttatg

SEQ ID NO: 256907 - DNA, 25 bp, probe
ggacattacacagcatacgcaactc

SEQ ID NO: 256908 - DNA, 25 bp, probe
ggacactgacctgaacgcagtcatc

SEQ ID NO: 256909 - DNA, 25 bp, probe
ggacaagaaatggattctcagtcat

SEQ ID NO: 256910 - DNA, 25 bp, probe
ggacaagaaatggattctcagtcat

SEQ ID NO: 256911 - DNA, 25 bp, probe
ggacagcagcatacatggcacctga

SEQ ID NO: 256912 - DNA, 25 bp, probe
ggacagcagcatacatggcacctga

SEQ ID NO: 256913 - DNA, 25 bp, probe
ggacagcacagacttcaccagcacc

SEQ ID NO: 256914 - DNA, 25 bp, probe
ggacagcaagaaatccaccagccat

SEQ ID NO: 256915 - DNA, 25 bp, probe
ggacagcaaggacctcagcgaggtc

SEQ ID NO: 256916 - DNA, 25 bp, probe
ggaacatagcgaatccgaatggatc

SEQ ID NO: 256917 - DNA, 25 bp, probe
ggaactagtgacggcgacaggcaac

SEQ ID NO: 256918 - DNA, 25 bp, probe
ggaacacagtaccatgcagaagtta

SEQ ID NO: 256919 - DNA, 25 bp, probe
ggacagacacaacggcaacattatg

SEQ ID NO: 256920 - DNA, 25 bp, probe
ggaaacagcaatcccaaataatgtc

SEQ ID NO: 256921 - DNA, 25 bp, probe
ggaaaagagctctcaattttttatt

SEQ ID NO: 256922 - DNA, 25 bp, probe
tggaattgggctttcggtgtttgta

SEQ ID NO: 256923 - DNA, 25 bp, probe
ggacatctggggagcgggtgtgctc

SEQ ID NO: 256924 - DNA, 25 bp, probe
ggacatctggggagcgggtgtgctc

SEQ ID NO: 256925 - DNA, 25 bp, probe
ggacacgggcgtggacgtgtgggcc

SEQ ID NO: 256926 - DNA, 25 bp, probe
ggacactggaggagacacggtgggc

SEQ ID NO: 256927 - DNA, 25 bp, probe
ggacactggaggagacacggtgggc

SEQ ID NO: 256928 - DNA, 25 bp, probe
ggaaatgagaagacggctcggtgag

SEQ ID NO: 256929 - DNA, 25 bp, probe
ggaaatgaaatccacccggtatctc

SEQ ID NO: 256930 - DNA, 25 bp, probe
ggaaatgagatgtccacctaaaatt

SEQ ID NO: 256931 - DNA, 25 bp, probe
ggaactgaatgaccccaacagacct

SEQ ID NO: 256932 - DNA, 25 bp, probe
ggaactgaatgaccccaacagacct

SEQ ID NO: 256933 - DNA, 25 bp, probe
ggaacaaatgcgtcccatactggcc

SEQ ID NO: 256934 - DNA, 25 bp, probe
ggaacaaaatgtactgaactggaag

SEQ ID NO: 256935 - DNA, 25 bp, probe
ggacaagaaaggcctgagactcaaa

SEQ ID NO: 256936 - DNA, 25 bp, probe
ggacaagaaaggcctgagactcaaa

SEQ ID NO: 256937 - DNA, 25 bp, probe
ggacacagaatgcgggagtgtacag

SEQ ID NO: 256938 - DNA, 25 bp, probe
ggaaagggacggggtgcagacggca

SEQ ID NO: 256939 - DNA, 25 bp, probe
ggacaagggagcgctggtgtacggc

SEQ ID NO: 256940 - DNA, 25 bp, probe
ggacaagggagcgctggtgtacggc

SEQ ID NO: 256941 - DNA, 25 bp, probe
ggacatgagggagattgtgtgcatc

SEQ ID NO: 256942 - DNA, 25 bp, probe
ggacataggggtttctggaccaagt

SEQ ID NO: 256943 - DNA, 25 bp, probe
ggacatagggcaatttggggctcaa

SEQ ID NO: 256944 - DNA, 25 bp, probe
ggaaagagacgacttgggacgcaac

SEQ ID NO: 256945 - DNA, 25 bp, probe
ggaaagagacgacttgggacgcaac

SEQ ID NO: 256946 - DNA, 25 bp, probe
ggacaaaggcaacttcctgaccgag

SEQ ID NO: 256947 - DNA, 25 bp, probe
ggaaagagcactcttcactgaccgg

SEQ ID NO: 256948 - DNA, 25 bp, probe
ggaaagagcactcttcactgaccgg

SEQ ID NO: 256949 - DNA, 25 bp, probe
ggacacagaccttttcagtatgtca

SEQ ID NO: 256950 - DNA, 25 bp, probe
ggaacaacctagaagctttgctgca

SEQ ID NO: 256951 - DNA, 25 bp, probe
ggaacaacctagaagctttgctgca

SEQ ID NO: 256952 - DNA, 25 bp, probe
ggaacaacctagaagctttgctgca

SEQ ID NO: 256953 - DNA, 25 bp, probe
ggacagcatcaaggagggcttctcc

SEQ ID NO: 256954 - DNA, 25 bp, probe
ggacagcatcaaggagggcttctcc

SEQ ID NO: 256955 - DNA, 25 bp, probe
ggacagctccaaggagttgtctcct

SEQ ID NO: 256956 - DNA, 25 bp, probe
ggacacccaaggatatgtcttctga

SEQ ID NO: 256957 - DNA, 25 bp, probe
ggacactcaagacttttgactgcca

SEQ ID NO: 256958 - DNA, 25 bp, probe
ggaacgcaagtttatggtcaccctt

SEQ ID NO: 256959 - DNA, 25 bp, probe
ggaaagcagtctttggaaaccattt

SEQ ID NO: 256960 - DNA, 25 bp, probe
ggaaagcagtctttggaaaccattt

SEQ ID NO: 256961 - DNA, 25 bp, probe
ggaacacagtctttcgacaagaaga

SEQ ID NO: 256962 - DNA, 25 bp, probe
ggaacacagtctttcgacaagaaga

SEQ ID NO: 256963 - DNA, 25 bp, probe
ggacagactgtcattcaaaatagga

SEQ ID NO: 256964 - DNA, 25 bp, probe
ggacagtttccctacaagaactgca

SEQ ID NO: 256965 - DNA, 25 bp, probe
ggacacttttattacaacagagcaa

SEQ ID NO: 256966 - DNA, 25 bp, probe
ggacaccctaataaagcaatcgcaa

SEQ ID NO: 256967 - DNA, 25 bp, probe
ggacaccgtacaacatcatggtgct

SEQ ID NO: 256968 - DNA, 25 bp, probe
ggaaagctaataagcatgatggtag

SEQ ID NO: 256969 - DNA, 25 bp, probe
ggaaagtagcaaggcataatgtaat

SEQ ID NO: 256970 - DNA, 25 bp, probe
ggaaggttgaagctccattcatacc

SEQ ID NO: 256971 - DNA, 25 bp, probe
ggacaggaaggagaccatggctctc

SEQ ID NO: 256972 - DNA, 25 bp, probe
ggacagagacggagacctctgccta

SEQ ID NO: 256973 - DNA, 25 bp, probe
ggacaggccgggaagttcagcctga

SEQ ID NO: 256974 - DNA, 25 bp, probe
ggacagggttggaaactgcactgga

SEQ ID NO: 256975 - DNA, 25 bp, probe
atgcagctgtttttaacccacgttt

SEQ ID NO: 256976 - DNA, 25 bp, probe
ggacaagctgatacgtaacccaagt

SEQ ID NO: 256977 - DNA, 25 bp, probe
ggaaagtcattctttacaccacagt

SEQ ID NO: 256978 - DNA, 25 bp, probe
ggaaaatgcatccatactcacctcc

SEQ ID NO: 256979 - DNA, 25 bp, probe
ggaaaatgcatccatactcacctcc

SEQ ID NO: 256980 - DNA, 25 bp, probe
ggaacaatcccaaatgcactgtctt

SEQ ID NO: 256981 - DNA, 25 bp, probe
ggaaagtgccctcgatcagtttcct

SEQ ID NO: 256982 - DNA, 25 bp, probe
ggaaagtgccctcgatcagtttcct

SEQ ID NO: 256983 - DNA, 25 bp, probe
ggaaagtccctcgaaaatacgctat

SEQ ID NO: 256984 - DNA, 25 bp, probe
ggaaagtccattagaaagtcagccc

SEQ ID NO: 256985 - DNA, 25 bp, probe
ggacaaatgcctatgaaattaaact

SEQ ID NO: 256986 - DNA, 25 bp, probe
ggaaaatcctagaaaaggccataat

SEQ ID NO: 256987 - DNA, 25 bp, probe
ggaaacatcctactggtagatggaa

SEQ ID NO: 256988 - DNA, 25 bp, probe
ggacactgatccactggctcagtgg

SEQ ID NO: 256989 - DNA, 25 bp, probe
ggacacttctcttgcagaccaagag

SEQ ID NO: 256990 - DNA, 25 bp, probe
ggacagcttctttgcccaaaatgca

SEQ ID NO: 256991 - DNA, 25 bp, probe
ggaaatctatcttgtctgcaagaat

SEQ ID NO: 256992 - DNA, 25 bp, probe
ggaaatggcattactctgaaataaa

SEQ ID NO: 256993 - DNA, 25 bp, probe
ggaaatggcattactctgaaataaa

SEQ ID NO: 256994 - DNA, 25 bp, probe
ggaaatggctctgctgatgcaagca

SEQ ID NO: 256995 - DNA, 25 bp, probe
ggaaattgtgcggctcagcaaggag

SEQ ID NO: 256996 - DNA, 25 bp, probe
ggacaaatggcgttcagcagcgggt

SEQ ID NO: 256997 - DNA, 25 bp, probe
ggaaagatggattccaggagggctt

SEQ ID NO: 256998 - DNA, 25 bp, probe
ggaacgtggaacaggagcaggctct

SEQ ID NO: 256999 - DNA, 25 bp, probe
ggacaggtggaagtgtggcaggggc

SEQ ID NO: 257000 - DNA, 25 bp, probe
ggacagtaatgatgtgatgggcagc

SEQ ID NO: 257001 - DNA, 25 bp, probe
ggacagtagcattagaattgtggaa

SEQ ID NO: 257002 - DNA, 25 bp, probe
ggacagtgacatcttgttcggaagt

SEQ ID NO: 257003 - DNA, 25 bp, probe
ggacagtgacatcttgttcggaagt

SEQ ID NO: 257004 - DNA, 25 bp, probe
ggacagaacatgctgtgttccatac

SEQ ID NO: 257005 - DNA, 25 bp, probe
ggacaaatcttgttgtattaacagc

SEQ ID NO: 257006 - DNA, 25 bp, probe
ggcacaaactcttggtttcttcaac

SEQ ID NO: 257007 - DNA, 25 bp, probe
ggcacaaaattacctcattcttcct

SEQ ID NO: 257008 - DNA, 25 bp, probe
ggcacaaaattacctcattcttcct

SEQ ID NO: 257009 - DNA, 25 bp, probe
ggacaaacacagacccatctttagg

SEQ ID NO: 257010 - DNA, 25 bp, probe
ggacaaacacagacccatctttagg

SEQ ID NO: 257011 - DNA, 25 bp, probe
ggacaacaggcacacaatctttact

SEQ ID NO: 257012 - DNA, 25 bp, probe
ggacaacaggcacacaatctttact

SEQ ID NO: 257013 - DNA, 25 bp, probe
ggaaagcaggaactgagttcattac

SEQ ID NO: 257014 - DNA, 25 bp, probe
ggacaagacaataaagggatgtatc

SEQ ID NO: 257015 - DNA, 25 bp, probe
ggaaagcacactcagaaggcttcat

SEQ ID NO: 257016 - DNA, 25 bp, probe
ggacagacctctctgaagtgtctcc

SEQ ID NO: 257017 - DNA, 25 bp, probe
ggaagacctggcagaggaggctccg

SEQ ID NO: 257018 - DNA, 25 bp, probe
ggaaacttagcttttgatgtctcca

SEQ ID NO: 257019 - DNA, 25 bp, probe
ggaaacatgtccagtgttgctgccc

SEQ ID NO: 257020 - DNA, 25 bp, probe
ggaaagcaaacacctttcctccagc

SEQ ID NO: 257021 - DNA, 25 bp, probe
ggaacagcaaaagtcttatccccag

SEQ ID NO: 257022 - DNA, 25 bp, probe
ggaacaaagaagctgtgaccccagc

SEQ ID NO: 257023 - DNA, 25 bp, probe
ggaatcatttacagggacctcaagc

SEQ ID NO: 257024 - DNA, 25 bp, probe
ggaaattgatccaaaggacctgacc

SEQ ID NO: 257025 - DNA, 25 bp, probe
ggaaatgttctaaaggtggtgaggc

SEQ ID NO: 257026 - DNA, 25 bp, probe
ggaaatgttctaaaggtggtgaggc

SEQ ID NO: 257027 - DNA, 25 bp, probe
ggaaatgctgtttcagggctggatg

SEQ ID NO: 257028 - DNA, 25 bp, probe
ggaaagtgttcaaggccagatatgc

SEQ ID NO: 257029 - DNA, 25 bp, probe
ggaaatggatcttaggccactggac

SEQ ID NO: 257030 - DNA, 25 bp, probe
ggaaattgagatccaggctcatcta

SEQ ID NO: 257031 - DNA, 25 bp, probe
ggaaattaagcaggacatctcaagt

SEQ ID NO: 257032 - DNA, 25 bp, probe
ggaaattcaacgtccactggaggaa

SEQ ID NO: 257033 - DNA, 25 bp, probe
ggaaattcaacgtccactggaggaa

SEQ ID NO: 257034 - DNA, 25 bp, probe
ggaaatagctacgacgctgcgggga

SEQ ID NO: 257035 - DNA, 25 bp, probe
ggacacagagaacatccgcagggtg

SEQ ID NO: 257036 - DNA, 25 bp, probe
ggacaccgacgagtgggagcgggac

SEQ ID NO: 257037 - DNA, 25 bp, probe
ggacaagaacgagtgtcggtgagga

SEQ ID NO: 257038 - DNA, 25 bp, probe
ggacaaatatcgacgtcagctccgt

SEQ ID NO: 257039 - DNA, 25 bp, probe
ggacaactatgaccagcttgttcgc

SEQ ID NO: 257040 - DNA, 25 bp, probe
ggaacaccagattcagctgcggacc

SEQ ID NO: 257041 - DNA, 25 bp, probe
ggaacaccagattcagctgcggacc

SEQ ID NO: 257042 - DNA, 25 bp, probe
ggacacggcagtgatgctgcggtct

SEQ ID NO: 257043 - DNA, 25 bp, probe
ggacacgtatgagagctatggcctt

SEQ ID NO: 257044 - DNA, 25 bp, probe
ggacacagctaagacttctgacgtc

SEQ ID NO: 257045 - DNA, 25 bp, probe
ggacaagatcaggatagctttggtg

SEQ ID NO: 257046 - DNA, 25 bp, probe
ggacaaacatgggagctcggcgtcc

SEQ ID NO: 257047 - DNA, 25 bp, probe
ggacaaacatgggagctcggcgtcc

SEQ ID NO: 257048 - DNA, 25 bp, probe
ggaaatcactggggcggtggagcct

SEQ ID NO: 257049 - DNA, 25 bp, probe
ggacactccagggcacaggaggaca

SEQ ID NO: 257050 - DNA, 25 bp, probe
ggacagacatagcccaaggaggcac

SEQ ID NO: 257051 - DNA, 25 bp, probe
ggacagaaagcgccataacagcatc

SEQ ID NO: 257052 - DNA, 25 bp, probe
ggacagccaagacgtagatccatcc

SEQ ID NO: 257053 - DNA, 25 bp, probe
ggaagctcagtgctgtagtccaact

SEQ ID NO: 257054 - DNA, 25 bp, probe
ggacaatcagtatgtggtacaactg

SEQ ID NO: 257055 - DNA, 25 bp, probe
ggaaagcagccatggttccaactct

SEQ ID NO: 257056 - DNA, 25 bp, probe
ggaaagcagccatggttccaactct

SEQ ID NO: 257057 - DNA, 25 bp, probe
ggaaagcagccatggttccaactct

SEQ ID NO: 257058 - DNA, 25 bp, probe
ggaaagcagccatggttccaactct

SEQ ID NO: 257059 - DNA, 25 bp, probe
ggaagcaaggactagattcctcctc

SEQ ID NO: 257060 - DNA, 25 bp, probe
ggaaacgggctaattcttgctccat

SEQ ID NO: 257061 - DNA, 25 bp, probe
ggaattggttttactgttcttcagc

SEQ ID NO: 257062 - DNA, 25 bp, probe
ggaaatggcttctttaaactgtgag

SEQ ID NO: 257063 - DNA, 25 bp, probe
ggaaaggtgtcagtccgttctggat

SEQ ID NO: 257064 - DNA, 25 bp, probe
ggacaagcagtggagctgccggatc

SEQ ID NO: 257065 - DNA, 25 bp, probe
ggacaacgagtacacggctcgggaa

SEQ ID NO: 257066 - DNA, 25 bp, probe
ggacaacgagtacacagccagggag

SEQ ID NO: 257067 - DNA, 25 bp, probe
ggacaactggatcaccatccaggag

SEQ ID NO: 257068 - DNA, 25 bp, probe
ggacaactggatccacatcacagag

SEQ ID NO: 257069 - DNA, 25 bp, probe
ggacaagttatgcctaatagcaggc

SEQ ID NO: 257070 - DNA, 25 bp, probe
ggacaagcaataactctctacagga

SEQ ID NO: 257071 - DNA, 25 bp, probe
ggacaagcaataactctctacagga

SEQ ID NO: 257072 - DNA, 25 bp, probe
ggaaagcaagcacctagcatgacaa

SEQ ID NO: 257073 - DNA, 25 bp, probe
ggacaacaatcatgcctcagagaca

SEQ ID NO: 257074 - DNA, 25 bp, probe
ggaaacagagcatgcctcgagaagg

SEQ ID NO: 257075 - DNA, 25 bp, probe
ggaaatcagacagtacctggcacag

SEQ ID NO: 257076 - DNA, 25 bp, probe
ggacactcaacaagacctgaacagg

SEQ ID NO: 257077 - DNA, 25 bp, probe
ggacactcaacaagacctgaacagg

SEQ ID NO: 257078 - DNA, 25 bp, probe
ggacactcaaaaacacaaaggccgg

SEQ ID NO: 257079 - DNA, 25 bp, probe
ggaactatactaccaaaagagccca

SEQ ID NO: 257080 - DNA, 25 bp, probe
ggaagtatcccaccaagaaacaaca

SEQ ID NO: 257081 - DNA, 25 bp, probe
ggaaattctcactggcgaaattcca

SEQ ID NO: 257082 - DNA, 25 bp, probe
ggaacagtctacaagggaaagtggc

SEQ ID NO: 257083 - DNA, 25 bp, probe
ggaaaggtgcaaagaaaacctggat

SEQ ID NO: 257084 - DNA, 25 bp, probe
ggctgaaggtcagaagtaatcctga

SEQ ID NO: 257085 - DNA, 25 bp, probe
ggacaagggcatgaggtcagaccag

SEQ ID NO: 257086 - DNA, 25 bp, probe
ggacaaaagcatcaggcgaggccac

SEQ ID NO: 257087 - DNA, 25 bp, probe
ggaaaaacgcaaggctgaagctctg

SEQ ID NO: 257088 - DNA, 25 bp, probe
ggaaaagcaggctgattgagaccag

SEQ ID NO: 257089 - DNA, 25 bp, probe
ggaaattgctgggcttctgagagcc

SEQ ID NO: 257090 - DNA, 25 bp, probe
ggacaactctccttttgatggacct

SEQ ID NO: 257091 - DNA, 25 bp, probe
ggacaaatcccggctgaatgagacc

SEQ ID NO: 257092 - DNA, 25 bp, probe
ggacaaagtgcagagtgaagatggc

SEQ ID NO: 257093 - DNA, 25 bp, probe
ggaaatggtgagcgctgtgagatgg

SEQ ID NO: 257094 - DNA, 25 bp, probe
ggaaatgcgaaaggttgtatgtgat

SEQ ID NO: 257095 - DNA, 25 bp, probe
ggacaatggaaaggctgttatatgg

SEQ ID NO: 257096 - DNA, 25 bp, probe
ggacaaggaggtggctgtaaagaag

SEQ ID NO: 257097 - DNA, 25 bp, probe
ggacaagtgggtgctgaaccatgag

SEQ ID NO: 257098 - DNA, 25 bp, probe
ggacaacgtactactggaccacgaa

SEQ ID NO: 257099 - DNA, 25 bp, probe
ggaaatcgtagctatcatcacctcc

SEQ ID NO: 257100 - DNA, 25 bp, probe
ggaaatggtaatccagctcctggcg

SEQ ID NO: 257101 - DNA, 25 bp, probe
ggaaatctttgacatgctcctggca

SEQ ID NO: 257102 - DNA, 25 bp, probe
ggaaatttggagaagttgcggcaga

SEQ ID NO: 257103 - DNA, 25 bp, probe
ggaaatggagcctaagtctgtggtg

SEQ ID NO: 257104 - DNA, 25 bp, probe
ggaaatgtactgcaggctctgggtc

SEQ ID NO: 257105 - DNA, 25 bp, probe
ggaaagtacatttgtccaggaatca

SEQ ID NO: 257106 - DNA, 25 bp, probe
ggaaaggacttatccatcaatataa

SEQ ID NO: 257107 - DNA, 25 bp, probe
ggaaagtatctgaaaagtcttataa

SEQ ID NO: 257108 - DNA, 25 bp, probe
ggaaagtatctgaaaagtcttataa

SEQ ID NO: 257109 - DNA, 25 bp, probe
ggaacgtatcttatatggattttga

SEQ ID NO: 257110 - DNA, 25 bp, probe
ggaaggtgtttcattttggtgtgca

SEQ ID NO: 257111 - DNA, 25 bp, probe
ggaagttatttgcctttagtggtgt

SEQ ID NO: 257112 - DNA, 25 bp, probe
ggaagccttttggctataaccagtc

SEQ ID NO: 257113 - DNA, 25 bp, probe
ggaaccttgcattattttaccagca

SEQ ID NO: 257114 - DNA, 25 bp, probe
ggaacactatgtgtattaatccact

SEQ ID NO: 257115 - DNA, 25 bp, probe
ggaacactgattcatatttagaaaa

SEQ ID NO: 257116 - DNA, 25 bp, probe
ggaaaaagcatccatgatattgaaa

SEQ ID NO: 257117 - DNA, 25 bp, probe
ggaaaggagccacaatgtgatagag

SEQ ID NO: 257118 - DNA, 25 bp, probe
ggaaaggaggcatgcctctgatatg

SEQ ID NO: 257119 - DNA, 25 bp, probe
ggaaattgaggatgacgctgatgtg

SEQ ID NO: 257120 - DNA, 25 bp, probe
ggaaattgtaaatcctgtgtttcat

SEQ ID NO: 257121 - DNA, 25 bp, probe
ggacacttgaaggtactcaggtttc

SEQ ID NO: 257122 - DNA, 25 bp, probe
ggacacttgaaggtactcaggtttc

SEQ ID NO: 257123 - DNA, 25 bp, probe
ggaaccgcaagccggagaggatttg

SEQ ID NO: 257124 - DNA, 25 bp, probe
ggaaacccagggaacaggacatgtt

SEQ ID NO: 257125 - DNA, 25 bp, probe
ggaaacccagggaacaggacatgtt

SEQ ID NO: 257126 - DNA, 25 bp, probe
ggaaacccagtgacaatgcaggaaa

SEQ ID NO: 257127 - DNA, 25 bp, probe
ggaaagcccaacgaccatggagaga

SEQ ID NO: 257128 - DNA, 25 bp, probe
ggacaaccacaaggcagacatcagc

SEQ ID NO: 257129 - DNA, 25 bp, probe
ggaaagccagaaggggcacgcctgc

SEQ ID NO: 257130 - DNA, 25 bp, probe
ggaacgtcaaagaaagcgccgctca

SEQ ID NO: 257131 - DNA, 25 bp, probe
ggaaataacaatgaggcatgggcta

SEQ ID NO: 257132 - DNA, 25 bp, probe
ggaaaaacagcaaagtcatgctgac

SEQ ID NO: 257133 - DNA, 25 bp, probe
ggaaaataattgaaggcactgaagt

SEQ ID NO: 257134 - DNA, 25 bp, probe
ggaaaataattgaaggcactgaagt

SEQ ID NO: 257135 - DNA, 25 bp, probe
ggaaacaaaagtcggcagagattta

SEQ ID NO: 257136 - DNA, 25 bp, probe
ggaaaacacagacttccatgagttt

SEQ ID NO: 257137 - DNA, 25 bp, probe
ggaaataaaacctactgatttgtat

SEQ ID NO: 257138 - DNA, 25 bp, probe
ggaaataaaacctactgatttgtat

SEQ ID NO: 257139 - DNA, 25 bp, probe
ggaaaaaaccttggtgtgtgttatg

SEQ ID NO: 257140 - DNA, 25 bp, probe
ggaaagtaacccacattctgttcag

SEQ ID NO: 257141 - DNA, 25 bp, probe
ggaaagtaacccacattctgttcag

SEQ ID NO: 257142 - DNA, 25 bp, probe
ggaaattcagactcttacattgttc

SEQ ID NO: 257143 - DNA, 25 bp, probe
ggacaatccaactctgtccttctta

SEQ ID NO: 257144 - DNA, 25 bp, probe
ggaacatcccaggacgtcagttctg

SEQ ID NO: 257145 - DNA, 25 bp, probe
ggaacttctgcaaggcagtaattcc

SEQ ID NO: 257146 - DNA, 25 bp, probe
tggaacttgctcgggttcaattaaa

SEQ ID NO: 257147 - DNA, 25 bp, probe
ggaacttgctcgggttcaattaaag

SEQ ID NO: 257148 - DNA, 25 bp, probe
ggaactatctccaaatttttctaag

SEQ ID NO: 257149 - DNA, 25 bp, probe
ggaaaaccacagcattttatctatt

SEQ ID NO: 257150 - DNA, 25 bp, probe
ggaaatgttcagagattttgactac

SEQ ID NO: 257151 - DNA, 25 bp, probe
ggaagttacaatctacttcagtgac

SEQ ID NO: 257152 - DNA, 25 bp, probe
ggaaggaagaaacactatccataag

SEQ ID NO: 257153 - DNA, 25 bp, probe
ggaaggaagaaacactatccataag

SEQ ID NO: 257154 - DNA, 25 bp, probe
ggaaccttcaaacaccatccaaagg

SEQ ID NO: 257155 - DNA, 25 bp, probe
ggaaccttcaaacaccatccaaagg

SEQ ID NO: 257156 - DNA, 25 bp, probe
ggaacaattcacaccaccaataata

SEQ ID NO: 257157 - DNA, 25 bp, probe
ggaacacactagagaaccaaaaatg

SEQ ID NO: 257158 - DNA, 25 bp, probe
ggaaagctcaatcagatacaaaaac

SEQ ID NO: 257159 - DNA, 25 bp, probe
ggacaagatcaaaacacccaagctt

SEQ ID NO: 257160 - DNA, 25 bp, probe
ggacaagatcaaaacacccaagctt

SEQ ID NO: 257161 - DNA, 25 bp, probe
ggacaacaaacatcacccatacaga

SEQ ID NO: 257162 - DNA, 25 bp, probe
ggaaagcaaagcttccccagagacg

SEQ ID NO: 257163 - DNA, 25 bp, probe
ggaaatcagcaagtccacccagaat

SEQ ID NO: 257164 - DNA, 25 bp, probe
ggaacagacacagctaacgcagaat

SEQ ID NO: 257165 - DNA, 25 bp, probe
ggcacacaataggttaatcgaaaaa

SEQ ID NO: 257166 - DNA, 25 bp, probe
ggaaattaccttaatatgcaagact

SEQ ID NO: 257167 - DNA, 25 bp, probe
ggaatattacctgtgtcatcaaagt

SEQ ID NO: 257168 - DNA, 25 bp, probe
ggaagctatagcatggtcgtgaaag

SEQ ID NO: 257169 - DNA, 25 bp, probe
ggaattaacttcatggtgaatagtc

SEQ ID NO: 257170 - DNA, 25 bp, probe
ggaagtaacaccaaggtacaatgtt

SEQ ID NO: 257171 - DNA, 25 bp, probe
ggaagtaacaccaaggtacaatgtt

SEQ ID NO: 257172 - DNA, 25 bp, probe
ggaagcttcaccagggtaaagttgg

SEQ ID NO: 257173 - DNA, 25 bp, probe
ggaactgtcctcaaggtgctagatt

SEQ ID NO: 257174 - DNA, 25 bp, probe
ggaactagactcccaagctggacta

SEQ ID NO: 257175 - DNA, 25 bp, probe
ggaacatagaactcatgacggaaga

SEQ ID NO: 257176 - DNA, 25 bp, probe
ggaatcaaacataccatgaccccaa

SEQ ID NO: 257177 - DNA, 25 bp, probe
ggaacaagacaagatccacctgatc

SEQ ID NO: 257178 - DNA, 25 bp, probe
ggcaacaagataccagatccccttg

SEQ ID NO: 257179 - DNA, 25 bp, probe
ggaatgcaaatgttcaaagccttag

SEQ ID NO: 257180 - DNA, 25 bp, probe
ggaatgcaaatgttcaaagccttag

SEQ ID NO: 257181 - DNA, 25 bp, probe
ggaagcacaatttccaccttatttt

SEQ ID NO: 257182 - DNA, 25 bp, probe
ggaacacaataattcccttgttaga

SEQ ID NO: 257183 - DNA, 25 bp, probe
ggaacacaataattcccttgttaga

SEQ ID NO: 257184 - DNA, 25 bp, probe
ggaagctccataaatgtcaccttgg

SEQ ID NO: 257185 - DNA, 25 bp, probe
ggaattccatgcagtgtcttgctgg

SEQ ID NO: 257186 - DNA, 25 bp, probe
ggaactaactcggtcattgctgttg

SEQ ID NO: 257187 - DNA, 25 bp, probe
ggaagctcagactggttgagttcag

SEQ ID NO: 257188 - DNA, 25 bp, probe
ggaagacagccctgtgattgttatg

SEQ ID NO: 257189 - DNA, 25 bp, probe
ggaaatacccttcttttatgagcag

SEQ ID NO: 257190 - DNA, 25 bp, probe
ggaaatacccttcttttatgagcag

SEQ ID NO: 257191 - DNA, 25 bp, probe
ggaaaacctcttttttgtgatggag

SEQ ID NO: 257192 - DNA, 25 bp, probe
ggaaattcactcatattaatggagg

SEQ ID NO: 257193 - DNA, 25 bp, probe
ggaacattccttagtctcaagggct

SEQ ID NO: 257194 - DNA, 25 bp, probe
ggaaaacccattgctgaaggagctg

SEQ ID NO: 257195 - DNA, 25 bp, probe
ggaaaaccgatcgtctctaggatga

SEQ ID NO: 257196 - DNA, 25 bp, probe
ggaagacatccagtgtacctacgga

SEQ ID NO: 257197 - DNA, 25 bp, probe
ggaaggatccaggttcgcttccgtt

SEQ ID NO: 257198 - DNA, 25 bp, probe
ggaagtgcctatgttatcttccctg

SEQ ID NO: 257199 - DNA, 25 bp, probe
ggaatgtcacctgaaattacttctt

SEQ ID NO: 257200 - DNA, 25 bp, probe
ggaagtcaactttagttttgctttg

SEQ ID NO: 257201 - DNA, 25 bp, probe
ggaagccaactctgaggaagtcttt

SEQ ID NO: 257202 - DNA, 25 bp, probe
ggaagccatgtcaaggttaagtctt

SEQ ID NO: 257203 - DNA, 25 bp, probe
ggaagccatgtcaaggttaagtctt

SEQ ID NO: 257204 - DNA, 25 bp, probe
ggaatgtagatggtgacttaatgga

SEQ ID NO: 257205 - DNA, 25 bp, probe
ggaatgtggcacatgcagatacaaa

SEQ ID NO: 257206 - DNA, 25 bp, probe
ggcagttgcaacacagtaagtcagg

SEQ ID NO: 257207 - DNA, 25 bp, probe
ggcagttgcaacacagtaagtcagg

SEQ ID NO: 257208 - DNA, 25 bp, probe
ggcgacaaaccgctaagtctggagg

SEQ ID NO: 257209 - DNA, 25 bp, probe
ggcgacaaaccgctaagtctggagg

SEQ ID NO: 257210 - DNA, 25 bp, probe
ggaacaagacacggctgggttggat

SEQ ID NO: 257211 - DNA, 25 bp, probe
ggaacaagacacggctgggttggat

SEQ ID NO: 257212 - DNA, 25 bp, probe
ggaaccaaacaccttcagtgctggt

SEQ ID NO: 257213 - DNA, 25 bp, probe
ggaaccaagtcctttgcgtgtggcc

SEQ ID NO: 257214 - DNA, 25 bp, probe
ggaaccaagtcctttgcgtgtggcc

SEQ ID NO: 257215 - DNA, 25 bp, probe
ggaaagacgtttttgtgctgtgggc

SEQ ID NO: 257216 - DNA, 25 bp, probe
ggaaaagtgttttcatttctcagga

SEQ ID NO: 257217 - DNA, 25 bp, probe
ggaaagcaatcacttgtcattttgc

SEQ ID NO: 257218 - DNA, 25 bp, probe
ggaaagcaatcacttctcactttgc

SEQ ID NO: 257219 - DNA, 25 bp, probe
ggaacatgaattctcagacattgtg

SEQ ID NO: 257220 - DNA, 25 bp, probe
ggaaagataccgaagattagtggag

SEQ ID NO: 257221 - DNA, 25 bp, probe
ggaagaattccagatcatccgtggg

SEQ ID NO: 257222 - DNA, 25 bp, probe
ggaactgcaaaacacagccgtggcg

SEQ ID NO: 257223 - DNA, 25 bp, probe
ggaaagaaatgagagcagacagtgc

SEQ ID NO: 257224 - DNA, 25 bp, probe
ggacaaggacgaggatcaggtgcac

SEQ ID NO: 257225 - DNA, 25 bp, probe
ggacaagagacgctggcgcaagatc

SEQ ID NO: 257226 - DNA, 25 bp, probe
ggaaatgcagtcccgaggctatgaa

SEQ ID NO: 257227 - DNA, 25 bp, probe
ggaaagcattgcctctaggggagag

SEQ ID NO: 257228 - DNA, 25 bp, probe
ggaagctgaatgctcggaggtagaa

SEQ ID NO: 257229 - DNA, 25 bp, probe
ggaaattcatttgtgtggtcagaga

SEQ ID NO: 257230 - DNA, 25 bp, probe
ggaaattcatttgtgtggtcagaga

SEQ ID NO: 257231 - DNA, 25 bp, probe
ggaaatcttctcacttggtgtgaat

SEQ ID NO: 257232 - DNA, 25 bp, probe
ggaaatgctgttaacctggcagtat

SEQ ID NO: 257233 - DNA, 25 bp, probe
ggaacagtgtatcagccaggagaag

SEQ ID NO: 257234 - DNA, 25 bp, probe
ggaacaattgcacaccagcaaaggc

SEQ ID NO: 257235 - DNA, 25 bp, probe
ggaaaagctgactcatatgaaaagc

SEQ ID NO: 257236 - DNA, 25 bp, probe
ggaagcaactaatctagataacttg

SEQ ID NO: 257237 - DNA, 25 bp, probe
ggaagcaactaatctagataacttg

SEQ ID NO: 257238 - DNA, 25 bp, probe
ggaaaatctgaccataagaaattta

SEQ ID NO: 257239 - DNA, 25 bp, probe
ggaaaactactctagaggccattta

SEQ ID NO: 257240 - DNA, 25 bp, probe
ggaagaaatactcataagccacctc

SEQ ID NO: 257241 - DNA, 25 bp, probe
ggaacaaaacgttcacaacatcgtc

SEQ ID NO: 257242 - DNA, 25 bp, probe
ggaaaaaaggcttcatgaagcccct

SEQ ID NO: 257243 - DNA, 25 bp, probe
ggaagaaagaaagatcaagtccctg

SEQ ID NO: 257244 - DNA, 25 bp, probe
ggaaagaaaacagctcaggcacccc

SEQ ID NO: 257245 - DNA, 25 bp, probe
ggaaatagaacctctaggcaccctc

SEQ ID NO: 257246 - DNA, 25 bp, probe
ggaacaaaacctgatacatcaccct

SEQ ID NO: 257247 - DNA, 25 bp, probe
ggaaaagaatttgatactcctctgt

SEQ ID NO: 257248 - DNA, 25 bp, probe
ggaaccaaatttaagactctcgcat

SEQ ID NO: 257249 - DNA, 25 bp, probe
ggaacccaagtttgattttgccatg

SEQ ID NO: 257250 - DNA, 25 bp, probe
ggaacccaagtttgattttgccatg

SEQ ID NO: 257251 - DNA, 25 bp, probe
ggaaatccatatttattttgtaatt

SEQ ID NO: 257252 - DNA, 25 bp, probe
ggaaatccaaatgtctggggaaatc

SEQ ID NO: 257253 - DNA, 25 bp, probe
ggaagcccagatatttggaggaaca

SEQ ID NO: 257254 - DNA, 25 bp, probe
tgaagagcccctctacgtggggaca

SEQ ID NO: 257255 - DNA, 25 bp, probe
taagaccctaccaactacggtccag

SEQ ID NO: 257256 - DNA, 25 bp, probe
ggaacccataccaaagactggaccg

SEQ ID NO: 257257 - DNA, 25 bp, probe
ggaaccctgaaggaagtctggtcgc

SEQ ID NO: 257258 - DNA, 25 bp, probe
ggaaccacgaatgaaagctgctgcc

SEQ ID NO: 257259 - DNA, 25 bp, probe
ggcagaccgataaaaagacctccag

SEQ ID NO: 257260 - DNA, 25 bp, probe
ggaaccaaatagaaaaactccatgt

SEQ ID NO: 257261 - DNA, 25 bp, probe
ggaacccagtgacaatggacctctt

SEQ ID NO: 257262 - DNA, 25 bp, probe
ggaacctactgagaagagcaccctg

SEQ ID NO: 257263 - DNA, 25 bp, probe
ggaactttgcgatacatgagcccag

SEQ ID NO: 257264 - DNA, 25 bp, probe
ggaactttgcgatacatgagcccag

SEQ ID NO: 257265 - DNA, 25 bp, probe
ggaaatgttggcagtagatgctcca

SEQ ID NO: 257266 - DNA, 25 bp, probe
ggaaatgttggcagtagatgctcca

SEQ ID NO: 257267 - DNA, 25 bp, probe
ggaaatgctctgtacaaagatataa

SEQ ID NO: 257268 - DNA, 25 bp, probe
ggaaatgctcatttaatagatattc

SEQ ID NO: 257269 - DNA, 25 bp, probe
ggaaatctcttgcaagctaatgctc

SEQ ID NO: 257270 - DNA, 25 bp, probe
ggaaatctgtagcagcagcagaacc

SEQ ID NO: 257271 - DNA, 25 bp, probe
ggaaactgatcagggcagctgctct

SEQ ID NO: 257272 - DNA, 25 bp, probe
ggaaatctgtaacgcagcttccgta

SEQ ID NO: 257273 - DNA, 25 bp, probe
ggaactctggaatgcaggctgccag

SEQ ID NO: 257274 - DNA, 25 bp, probe
ggaacttgtggttgaggcagggcca

SEQ ID NO: 257275 - DNA, 25 bp, probe
ggaaatggagtttgcagtaatgagc

SEQ ID NO: 257276 - DNA, 25 bp, probe
ggaaatggagtttgcagtaatgagc

SEQ ID NO: 257277 - DNA, 25 bp, probe
ggaaatggtttgtcttcaagatgca

SEQ ID NO: 257278 - DNA, 25 bp, probe
ggaaatgtgacttcactttggtgcc

SEQ ID NO: 257279 - DNA, 25 bp, probe
ggaacattacagtccaatggtatgc

SEQ ID NO: 257280 - DNA, 25 bp, probe
ggaagactgaaagcaaggtggccca

SEQ ID NO: 257281 - DNA, 25 bp, probe
ggaagactaaatgatcactgccccc

SEQ ID NO: 257282 - DNA, 25 bp, probe
ggaaacagaactcgatgcactgacc

SEQ ID NO: 257283 - DNA, 25 bp, probe
ggaaacagtggcggcatgaagctcc

SEQ ID NO: 257284 - DNA, 25 bp, probe
ggaaacgtgcgaagcacaggctgaa

SEQ ID NO: 257285 - DNA, 25 bp, probe
ggaaagcgtgccaatcaacatgctg

SEQ ID NO: 257286 - DNA, 25 bp, probe
ggaacacatgatccaacagactatg

SEQ ID NO: 257287 - DNA, 25 bp, probe
ggaacacagcagagtctgtgccatg

SEQ ID NO: 257288 - DNA, 25 bp, probe
ggaacagaagttcctgtctctggca

SEQ ID NO: 257289 - DNA, 25 bp, probe
ggaaatacagggacaggctcccaat

SEQ ID NO: 257290 - DNA, 25 bp, probe
ggaaaattggagaaggatcctatgg

SEQ ID NO: 257291 - DNA, 25 bp, probe
ggaacgattgggttgtcatcctcaa

SEQ ID NO: 257292 - DNA, 25 bp, probe
ggaaccataatggactcctcctata

SEQ ID NO: 257293 - DNA, 25 bp, probe
ggaaccataatggactcctcctata

SEQ ID NO: 257294 - DNA, 25 bp, probe
ggaatcctgaagagccactcatttt

SEQ ID NO: 257295 - DNA, 25 bp, probe
ggcagaccgaagagaatacattgat

SEQ ID NO: 257296 - DNA, 25 bp, probe
ggcagaccgaagagaatacattgat

SEQ ID NO: 257297 - DNA, 25 bp, probe
ggaactggagacaatgaaaatcttg

SEQ ID NO: 257298 - DNA, 25 bp, probe
ggaagcaggaacatgagggtcagcg

SEQ ID NO: 257299 - DNA, 25 bp, probe
ggaagcaggaacatgagggtcagcg

SEQ ID NO: 257300 - DNA, 25 bp, probe
ggaagcattgacagtgggcctccag

SEQ ID NO: 257301 - DNA, 25 bp, probe
ggaagccttctgagcgatgccttcc

SEQ ID NO: 257302 - DNA, 25 bp, probe
ggaactatgtctgtgcaagccttcc

SEQ ID NO: 257303 - DNA, 25 bp, probe
ggaactatgtctgtgcaagccttcc

SEQ ID NO: 257304 - DNA, 25 bp, probe
ggaactgtgacatttcaagctctgt

SEQ ID NO: 257305 - DNA, 25 bp, probe
ggaacggatgcatttcattcacagg

SEQ ID NO: 257306 - DNA, 25 bp, probe
ggaacctgagtgcctcagtcatcgc

SEQ ID NO: 257307 - DNA, 25 bp, probe
ggaacctgagtgcctcagtcatcgc

SEQ ID NO: 257308 - DNA, 25 bp, probe
ggaaatggatgcttgcctttctgat

SEQ ID NO: 257309 - DNA, 25 bp, probe
ggaaatgtgcaaccactgcttcttg

SEQ ID NO: 257310 - DNA, 25 bp, probe
ggaaatgtgcaaccactgcttcttg

SEQ ID NO: 257311 - DNA, 25 bp, probe
ggaaatgtgcaaccactgcttcttg

SEQ ID NO: 257312 - DNA, 25 bp, probe
ggaaagtgaaccttgggtgtgaggg

SEQ ID NO: 257313 - DNA, 25 bp, probe
ggaaggtaacactttgggtcctgtg

SEQ ID NO: 257314 - DNA, 25 bp, probe
ggaagtctgtcgattggtggtcctt

SEQ ID NO: 257315 - DNA, 25 bp, probe
tggaagctagttctctgttggtcct

SEQ ID NO: 257316 - DNA, 25 bp, probe
tggaagctagttctctgttggtcct

SEQ ID NO: 257317 - DNA, 25 bp, probe
ggaactggtgacacgagaggtgccc

SEQ ID NO: 257318 - DNA, 25 bp, probe
ggaacggtgagcagggaacatgtcg

SEQ ID NO: 257319 - DNA, 25 bp, probe
ggaacctgtcagggcagtacaatgt

SEQ ID NO: 257320 - DNA, 25 bp, probe
ggaacctgtcctgacaacattgtgt

SEQ ID NO: 257321 - DNA, 25 bp, probe
ggaacttctgtactacaacgctggt

SEQ ID NO: 257322 - DNA, 25 bp, probe
ggaacttctgtactacaacgctggt

SEQ ID NO: 257323 - DNA, 25 bp, probe
ggaactttgcttccaaacactggtg

SEQ ID NO: 257324 - DNA, 25 bp, probe
ggaactttcctaagaaaccgctgat

SEQ ID NO: 257325 - DNA, 25 bp, probe
ggaaatcgccactggagatatcccg

SEQ ID NO: 257326 - DNA, 25 bp, probe
ggaaagtgcaagtggatgcattcct

SEQ ID NO: 257327 - DNA, 25 bp, probe
ggaaagaacaggtcgtgtctcctcc

SEQ ID NO: 257328 - DNA, 25 bp, probe
ggaaaggacttcctttctcactgcc

SEQ ID NO: 257329 - DNA, 25 bp, probe
ggaaaggacttcctttctcactgcc

SEQ ID NO: 257330 - DNA, 25 bp, probe
ggaaaggacttcctttctcactgcc

SEQ ID NO: 257331 - DNA, 25 bp, probe
ggaaaggatcttgggtcctatccct

SEQ ID NO: 257332 - DNA, 25 bp, probe
ggaaaggattcttggacctctacca

SEQ ID NO: 257333 - DNA, 25 bp, probe
ggaaaggattcttggacctctacca

SEQ ID NO: 257334 - DNA, 25 bp, probe
ggaaaggattcttggacctctacca

SEQ ID NO: 257335 - DNA, 25 bp, probe
ggaaaggattcttggacctctacca

SEQ ID NO: 257336 - DNA, 25 bp, probe
ggaaagtgtctcaagtactcactag

SEQ ID NO: 257337 - DNA, 25 bp, probe
ggaaacagttattatcgctgactaa

SEQ ID NO: 257338 - DNA, 25 bp, probe
ggaacagcaggttaccaggactgag

SEQ ID NO: 257339 - DNA, 25 bp, probe
ggaaagggatgaacagccaagtagc

SEQ ID NO: 257340 - DNA, 25 bp, probe
ggaaactggatgaacaggatgtata

SEQ ID NO: 257341 - DNA, 25 bp, probe
ggaaaatcggaatgttggatcagct

SEQ ID NO: 257342 - DNA, 25 bp, probe
ggaaccagggagctgtgggaagcca

SEQ ID NO: 257343 - DNA, 25 bp, probe
ggaaagcagtggaactggccggacc

SEQ ID NO: 257344 - DNA, 25 bp, probe
ggaagaagtggattttgccggctgg

SEQ ID NO: 257345 - DNA, 25 bp, probe
ggaagtaggacttgtagtagagctg

SEQ ID NO: 257346 - DNA, 25 bp, probe
ggaactttgacgtcgatggggatgg

SEQ ID NO: 257347 - DNA, 25 bp, probe
ggaaagctgtgaagacattggggat

SEQ ID NO: 257348 - DNA, 25 bp, probe
ggaaagcagcgaagacactgggtat

SEQ ID NO: 257349 - DNA, 25 bp, probe
ggaaagcagcgaagacactgggtat

SEQ ID NO: 257350 - DNA, 25 bp, probe
ggaaatggcagaagccagctgcgga

SEQ ID NO: 257351 - DNA, 25 bp, probe
ggaaatggcagaagccagctgcgga

SEQ ID NO: 257352 - DNA, 25 bp, probe
ggaaatggcagaagccagctgcgga

SEQ ID NO: 257353 - DNA, 25 bp, probe
ggaaatggagttgagctgggagcgg

SEQ ID NO: 257354 - DNA, 25 bp, probe
ggaaatggggtatgcagggtctgga

SEQ ID NO: 257355 - DNA, 25 bp, probe
ggaactcgggtgaagagaagtacga

SEQ ID NO: 257356 - DNA, 25 bp, probe
ggaagccggggagggcagttgagga

SEQ ID NO: 257357 - DNA, 25 bp, probe
ggaacgagacggtggacgtggagga

SEQ ID NO: 257358 - DNA, 25 bp, probe
ggaagaagggggcaacagggaatga

SEQ ID NO: 257359 - DNA, 25 bp, probe
ggaagaagggggcaacagggaatga

SEQ ID NO: 257360 - DNA, 25 bp, probe
ggcaatgaagaagaaggggggaagt

SEQ ID NO: 257361 - DNA, 25 bp, probe
ggaatacagtaggtagaagggccag

SEQ ID NO: 257362 - DNA, 25 bp, probe
ggaaaaccaggatgatggtggccgt

SEQ ID NO: 257363 - DNA, 25 bp, probe
ggaacagattcacaagtttgcccag

SEQ ID NO: 257364 - DNA, 25 bp, probe
ggaaagaatgctgagattttgccca

SEQ ID NO: 257365 - DNA, 25 bp, probe
ggaacagacagcagaacttgacctt

SEQ ID NO: 257366 - DNA, 25 bp, probe
ggaacagacagcagaacttgacctt

SEQ ID NO: 257367 - DNA, 25 bp, probe
ggaaagtatgtcctagcttagccat

SEQ ID NO: 257368 - DNA, 25 bp, probe
ggaaagtgtggcctagccaagacgt

SEQ ID NO: 257369 - DNA, 25 bp, probe
ggaagtgatgtgggtggaaggtggt

SEQ ID NO: 257370 - DNA, 25 bp, probe
ggaagttgtggataaaaatggtgga

SEQ ID NO: 257371 - DNA, 25 bp, probe
ggaacttcgtcatccaaatatagtc

SEQ ID NO: 257372 - DNA, 25 bp, probe
ggaacttcgtcatccaaatatagtc

SEQ ID NO: 257373 - DNA, 25 bp, probe
ggaacttcgtcatccaaatatagtc

SEQ ID NO: 257374 - DNA, 25 bp, probe
ggaacttcttgattcaaagtaagtc

SEQ ID NO: 257375 - DNA, 25 bp, probe
ggaacttcttgattcaaagtaagtc

SEQ ID NO: 257376 - DNA, 25 bp, probe
ggaaacgttgaatacatgtccagct

SEQ ID NO: 257377 - DNA, 25 bp, probe
ggccaaggtttgagatgcttccctt

SEQ ID NO: 257378 - DNA, 25 bp, probe
ggccaaggtttgagatgcttccctt

SEQ ID NO: 257379 - DNA, 25 bp, probe
ggaaaagttctcagatgttcatcct

SEQ ID NO: 257380 - DNA, 25 bp, probe
ggaaaagttctcagatgttcatcct

SEQ ID NO: 257381 - DNA, 25 bp, probe
ggaaaagttctcagatgttcatcct

SEQ ID NO: 257382 - DNA, 25 bp, probe
ggaaaccatcttcaatgctgtcatg

SEQ ID NO: 257383 - DNA, 25 bp, probe
ggaaaactcgctcaagctgtcatgt

SEQ ID NO: 257384 - DNA, 25 bp, probe
ggaaagttgcgttacctgtcactat

SEQ ID NO: 257385 - DNA, 25 bp, probe
ggaaagttgcgttacctgtcactat

SEQ ID NO: 257386 - DNA, 25 bp, probe
ggaacagttactcacctgtggcttc

SEQ ID NO: 257387 - DNA, 25 bp, probe
ggaacaggtacttgaaaggggctct

SEQ ID NO: 257388 - DNA, 25 bp, probe
ggaacaaggacattcaaagtgccct

SEQ ID NO: 257389 - DNA, 25 bp, probe
ggaacacggacatgaagagggccct

SEQ ID NO: 257390 - DNA, 25 bp, probe
ggaaccgggcaaatggagggccgct

SEQ ID NO: 257391 - DNA, 25 bp, probe
ggaacgggagatatgagggctcaag

SEQ ID NO: 257392 - DNA, 25 bp, probe
ggaaaagcggacatcagctggtcaa

SEQ ID NO: 257393 - DNA, 25 bp, probe
ggaaaatcaatggctccagtgatta

SEQ ID NO: 257394 - DNA, 25 bp, probe
ggaaaatcaatggctccagtgatta

SEQ ID NO: 257395 - DNA, 25 bp, probe
ggaaactttgagcccagtgagtagc

SEQ ID NO: 257396 - DNA, 25 bp, probe
ggaaacatctgtcacgagcggtatg

SEQ ID NO: 257397 - DNA, 25 bp, probe
ggaaacatctgtcacgagcggtatg

SEQ ID NO: 257398 - DNA, 25 bp, probe
tgggagccttgaaagggggttggat

SEQ ID NO: 257399 - DNA, 25 bp, probe
ggaaactccaaacagggcttgcgat

SEQ ID NO: 257400 - DNA, 25 bp, probe
ggaaacccaaagaagctgtggagga

SEQ ID NO: 257401 - DNA, 25 bp, probe
ggaaaattctccttactgggatagt

SEQ ID NO: 257402 - DNA, 25 bp, probe
ggaaaatgttctttcaagtgcaaag

SEQ ID NO: 257403 - DNA, 25 bp, probe
ggaaagattgtttgtcactggatac

SEQ ID NO: 257404 - DNA, 25 bp, probe
ggaatggtctcttttatcctatcac

SEQ ID NO: 257405 - DNA, 25 bp, probe
ggaagagctctgaaattaccaaatc

SEQ ID NO: 257406 - DNA, 25 bp, probe
gagagattagacactggaggttttt

SEQ ID NO: 257407 - DNA, 25 bp, probe
ggaaaatcagatgtggaccaacttt

SEQ ID NO: 257408 - DNA, 25 bp, probe
ggaaaatcagatgtggaccaacttt

SEQ ID NO: 257409 - DNA, 25 bp, probe
ggaaaatcagatgtggaccaacttt

SEQ ID NO: 257410 - DNA, 25 bp, probe
ggaaagatcagtgaagacagcaatc

SEQ ID NO: 257411 - DNA, 25 bp, probe
ggaaagtgagctgaagcgcaggtca

SEQ ID NO: 257412 - DNA, 25 bp, probe
ggaagcagtgagtcggggacagtca

SEQ ID NO: 257413 - DNA, 25 bp, probe
ggaactgatggtgcggaggagaccc

SEQ ID NO: 257414 - DNA, 25 bp, probe
ggaactgcatgctggcaggggacat

SEQ ID NO: 257415 - DNA, 25 bp, probe
ggaagctgcagcacgcagcggagaa

SEQ ID NO: 257416 - DNA, 25 bp, probe
ggaagcttctacgcgctagagagga

SEQ ID NO: 257417 - DNA, 25 bp, probe
ggaagtttagagagctaagattatc

SEQ ID NO: 257418 - DNA, 25 bp, probe
ggaactttaacactctagctattct

SEQ ID NO: 257419 - DNA, 25 bp, probe
ggaactttcgaactgcaaatatgcc

SEQ ID NO: 257420 - DNA, 25 bp, probe
ggaactttcgaactgcaaatatgcc

SEQ ID NO: 257421 - DNA, 25 bp, probe
ggaactttgctgtcgtgcttataat

SEQ ID NO: 257422 - DNA, 25 bp, probe
ggaactttgctgtcgtgcttataat

SEQ ID NO: 257423 - DNA, 25 bp, probe
ggaagcttgtgcacattcatttttt

SEQ ID NO: 257424 - DNA, 25 bp, probe
ggaagcttgtgcacattcatttttt

SEQ ID NO: 257425 - DNA, 25 bp, probe
ggaacaagacagccttcacttttct

SEQ ID NO: 257426 - DNA, 25 bp, probe
ggaaagattaccagcaacatgttct

SEQ ID NO: 257427 - DNA, 25 bp, probe
ggaaagattaccaacaacatgttct

SEQ ID NO: 257428 - DNA, 25 bp, probe
ggaaaaggacaatcaggatgtcatc

SEQ ID NO: 257429 - DNA, 25 bp, probe
ggaacagggactttcacttgaatct

SEQ ID NO: 257430 - DNA, 25 bp, probe
ggaaaagacaccttgcctataatta

SEQ ID NO: 257431 - DNA, 25 bp, probe
ggaaaaacagtctactgcttatgaa

SEQ ID NO: 257432 - DNA, 25 bp, probe
ggaaactccaatttctcttgcatgg

SEQ ID NO: 257433 - DNA, 25 bp, probe
tcgaaacctcgtttttggcaagtct

SEQ ID NO: 257434 - DNA, 25 bp, probe
tcgaaacctcgtttttggcaagtct

SEQ ID NO: 257435 - DNA, 25 bp, probe
ggaaacacttctttcttccaatgcc

SEQ ID NO: 257436 - DNA, 25 bp, probe
ggaaacacttctttcttccaatgcc

SEQ ID NO: 257437 - DNA, 25 bp, probe
ggaaaaccacatttgtgacgcaaaa

SEQ ID NO: 257438 - DNA, 25 bp, probe
ggaaaagccatatcttgcaccagca

SEQ ID NO: 257439 - DNA, 25 bp, probe
ggaaaacatcttagttgatgctaca

SEQ ID NO: 257440 - DNA, 25 bp, probe
ggaaaccacattaaggtgctcacaa

SEQ ID NO: 257441 - DNA, 25 bp, probe
ggaaaccatcattagcagttgtccc

SEQ ID NO: 257442 - DNA, 25 bp, probe
ggaaaccatgagtgtgctagcatca

SEQ ID NO: 257443 - DNA, 25 bp, probe
ggaaactgcagagagtcatgatcat

SEQ ID NO: 257444 - DNA, 25 bp, probe
ggaaaatcagagaaggcaaattcag

SEQ ID NO: 257445 - DNA, 25 bp, probe
ggaagttcagatgttgatcaactag

SEQ ID NO: 257446 - DNA, 25 bp, probe
ggaagtcctcatcgattggcaactt

SEQ ID NO: 257447 - DNA, 25 bp, probe
ggaagacctcttaatggcatagcac

SEQ ID NO: 257448 - DNA, 25 bp, probe
ggaagacctcttaatggcatagcac

SEQ ID NO: 257449 - DNA, 25 bp, probe
ggaaacaatcctagagagctcagag

SEQ ID NO: 257450 - DNA, 25 bp, probe
ggaaagctgttctataggcacatca

SEQ ID NO: 257451 - DNA, 25 bp, probe
ggaacagctgtgccaaagacctcac

SEQ ID NO: 257452 - DNA, 25 bp, probe
ggaacatttggctatcatgcacctg

SEQ ID NO: 257453 - DNA, 25 bp, probe
ggaacatttggctatcatgcacctg

SEQ ID NO: 257454 - DNA, 25 bp, probe
ggcttcatgtttgaaagctcgccgg

SEQ ID NO: 257455 - DNA, 25 bp, probe
ggctaggctatttaaactccctcat

SEQ ID NO: 257456 - DNA, 25 bp, probe
ggaaggtactaataatcctcttgca

SEQ ID NO: 257457 - DNA, 25 bp, probe
ggaaggccctaaagaaggcttatga

SEQ ID NO: 257458 - DNA, 25 bp, probe
ggaagggctttgaacaatgtttaga

SEQ ID NO: 257459 - DNA, 25 bp, probe
ggaagggctttgaacaatgtttaga

SEQ ID NO: 257460 - DNA, 25 bp, probe
ggaagatttcttgactatttcacca

SEQ ID NO: 257461 - DNA, 25 bp, probe
ggaacattgttcatcgtgatttaaa

SEQ ID NO: 257462 - DNA, 25 bp, probe
ggaacattgttcatcgtgatttaaa

SEQ ID NO: 257463 - DNA, 25 bp, probe
ggaaaatatgtaactggaatctcaa

SEQ ID NO: 257464 - DNA, 25 bp, probe
ggaacagtttatagagaacttcaga

SEQ ID NO: 257465 - DNA, 25 bp, probe
ggaacattttctaaatcagcttgat

SEQ ID NO: 257466 - DNA, 25 bp, probe
ggaacaatttccaaaactgtccagg

SEQ ID NO: 257467 - DNA, 25 bp, probe
ggaaaatgtcccaagaagctctcgg

SEQ ID NO: 257468 - DNA, 25 bp, probe
ggaacgacttctgtaagctccagga

SEQ ID NO: 257469 - DNA, 25 bp, probe
ggaacgacttctgtaagctccagga

SEQ ID NO: 257470 - DNA, 25 bp, probe
ggaagcgacccagaaatggcaggga

SEQ ID NO: 257471 - DNA, 25 bp, probe
ggaacccactcgaaactggagacca

SEQ ID NO: 257472 - DNA, 25 bp, probe
ggaaagccaacgggatcagaggacc

SEQ ID NO: 257473 - DNA, 25 bp, probe
ggaacccagagcggaggctgggatc

SEQ ID NO: 257474 - DNA, 25 bp, probe
ggaagagccaagccacaggctttcc

SEQ ID NO: 257475 - DNA, 25 bp, probe
ggaagagccaagccacaggctttcc

SEQ ID NO: 257476 - DNA, 25 bp, probe
ggaaagcatccctaagtgttgtcag

SEQ ID NO: 257477 - DNA, 25 bp, probe
ggaaagcatccctaagtgttgtcag

SEQ ID NO: 257478 - DNA, 25 bp, probe
ggaacagatcgaccaatttgtgaag

SEQ ID NO: 257479 - DNA, 25 bp, probe
ggaacagatgtggcatcttttgtaa

SEQ ID NO: 257480 - DNA, 25 bp, probe
ggaacagcatgtggtgaaatcaaaa

SEQ ID NO: 257481 - DNA, 25 bp, probe
ggaacagcatgtggtgaaatcaaaa

SEQ ID NO: 257482 - DNA, 25 bp, probe
ggaagactgcatgtccaaacgaagt

SEQ ID NO: 257483 - DNA, 25 bp, probe
ggaaggcgtcaatcctacgggatca

SEQ ID NO: 257484 - DNA, 25 bp, probe
ggaagagtgtgcaaacctttcgaga

SEQ ID NO: 257485 - DNA, 25 bp, probe
ggaaacactgctgacctttgcaaag

SEQ ID NO: 257486 - DNA, 25 bp, probe
ggaaaagtctggtcctgatctccaa

SEQ ID NO: 257487 - DNA, 25 bp, probe
ggaaacagtcattggaatgttgcac

SEQ ID NO: 257488 - DNA, 25 bp, probe
ggaaacagtcattggaatgttgcac

SEQ ID NO: 257489 - DNA, 25 bp, probe
ggaaagcgtctctgagtgtagcagg

SEQ ID NO: 257490 - DNA, 25 bp, probe
tggagaagggtatatttaatgagcg

SEQ ID NO: 257491 - DNA, 25 bp, probe
ggaaggggttggattgcaatatctg

SEQ ID NO: 257492 - DNA, 25 bp, probe
ggaaggggttggattgcaatatctg

SEQ ID NO: 257493 - DNA, 25 bp, probe
ggaagcggtcttgatttcagaagga

SEQ ID NO: 257494 - DNA, 25 bp, probe
ggaatgggagaagactatccttgga

SEQ ID NO: 257495 - DNA, 25 bp, probe
ggaatgaaaacagagcttcccgtgc

SEQ ID NO: 257496 - DNA, 25 bp, probe
ggaaaaatacatgtgcttccacaac

SEQ ID NO: 257497 - DNA, 25 bp, probe
ggaaaaatacatgtgcttccacaac

SEQ ID NO: 257498 - DNA, 25 bp, probe
ggaaaagaatatggtgtcaccctac

SEQ ID NO: 257499 - DNA, 25 bp, probe
ggaagaaatcaaagttgccctataa

SEQ ID NO: 257500 - DNA, 25 bp, probe
ggaagaaatcaaagttgccctataa

SEQ ID NO: 257501 - DNA, 25 bp, probe
ggaatgtactagagttgcccataac

SEQ ID NO: 257502 - DNA, 25 bp, probe
ggaaaacaagatgtctgccaacaac

SEQ ID NO: 257503 - DNA, 25 bp, probe
ggaaaccacagtgaattacacagat

SEQ ID NO: 257504 - DNA, 25 bp, probe
ggaacacgcccggacatatatccag

SEQ ID NO: 257505 - DNA, 25 bp, probe
ggaaacgccaagaactgctggccgt

SEQ ID NO: 257506 - DNA, 25 bp, probe
ggaaacgccaagaactgctggccgt

SEQ ID NO: 257507 - DNA, 25 bp, probe
ggaaactgacaaatactggggtgtc

SEQ ID NO: 257508 - DNA, 25 bp, probe
ggaaaccgccgcaatgggggtgtct

SEQ ID NO: 257509 - DNA, 25 bp, probe
ggaatactcgggcaccagcggtgcc

SEQ ID NO: 257510 - DNA, 25 bp, probe
ggaaacactgggcacgagattggca

SEQ ID NO: 257511 - DNA, 25 bp, probe
ggaaaatagggaacatgtgtatgtc

SEQ ID NO: 257512 - DNA, 25 bp, probe
ggaaaatgagggtgctgctggggtg

SEQ ID NO: 257513 - DNA, 25 bp, probe
ggaatgacaaggtacgttttggatg

SEQ ID NO: 257514 - DNA, 25 bp, probe
ggaatgacaaggtacgttttggatg

SEQ ID NO: 257515 - DNA, 25 bp, probe
ggaatagcgacttagtgttctaaat

SEQ ID NO: 257516 - DNA, 25 bp, probe
tgtgaagggacttacctcccaaagg

SEQ ID NO: 257517 - DNA, 25 bp, probe
ggaaggaggtacacacctcaaagag

SEQ ID NO: 257518 - DNA, 25 bp, probe
ggcaacggagtaaacctgctccaaa

SEQ ID NO: 257519 - DNA, 25 bp, probe
ggaacaagattaaggcctggcagaa

SEQ ID NO: 257520 - DNA, 25 bp, probe
ggaatgtcaattacggctaccagca

SEQ ID NO: 257521 - DNA, 25 bp, probe
ggaaggtatttcagctcccaagttt

SEQ ID NO: 257522 - DNA, 25 bp, probe
ggaagagatggtctttaccacagtg

SEQ ID NO: 257523 - DNA, 25 bp, probe
ggaagaacatggtttccaccaagat

SEQ ID NO: 257524 - DNA, 25 bp, probe
ggaagcaacgtgtttgacatcctgg

SEQ ID NO: 257525 - DNA, 25 bp, probe
ggaaaacgagtgcctgaactgcatg

SEQ ID NO: 257526 - DNA, 25 bp, probe
ggaaaacgagtgcctgaactgcatg

SEQ ID NO: 257527 - DNA, 25 bp, probe
ggaaacatctgatttctgaactatc

SEQ ID NO: 257528 - DNA, 25 bp, probe
ggaaaatctgatttgtggtctattt

SEQ ID NO: 257529 - DNA, 25 bp, probe
ggaaaatctgatttgtggtctattt

SEQ ID NO: 257530 - DNA, 25 bp, probe
ggaaaatcatatccatggatctctt

SEQ ID NO: 257531 - DNA, 25 bp, probe
ggaaacagacatactcattcatttg

SEQ ID NO: 257532 - DNA, 25 bp, probe
ggaaacagattcattgtctgtctga

SEQ ID NO: 257533 - DNA, 25 bp, probe
ggaaaagtctcagtgtgctttggaa

SEQ ID NO: 257534 - DNA, 25 bp, probe
ggaaactctccatgattattagaag

SEQ ID NO: 257535 - DNA, 25 bp, probe
ggaaactctccatgattattagaag

SEQ ID NO: 257536 - DNA, 25 bp, probe
ggaagacgtcacaaattttcagggc

SEQ ID NO: 257537 - DNA, 25 bp, probe
ggaactggtgcaggagagtttcagg

SEQ ID NO: 257538 - DNA, 25 bp, probe
ggaacatgtgattaggctgtattca

SEQ ID NO: 257539 - DNA, 25 bp, probe
ggaacatgtgattaggctgtattca

SEQ ID NO: 257540 - DNA, 25 bp, probe
ggaatgtgatactgcctgtttgcaa

SEQ ID NO: 257541 - DNA, 25 bp, probe
ggaatggttcctacgttgtgtatta

SEQ ID NO: 257542 - DNA, 25 bp, probe
ggaatgggaatctggcttggttcga

SEQ ID NO: 257543 - DNA, 25 bp, probe
ggaatgggaatctggcttggttcga

SEQ ID NO: 257544 - DNA, 25 bp, probe
ggaaggagatgaacggccgggtcag

SEQ ID NO: 257545 - DNA, 25 bp, probe
ggaaggaatgtttccctgggcgaca

SEQ ID NO: 257546 - DNA, 25 bp, probe
ggaatgtgagagctacaccgtccga

SEQ ID NO: 257547 - DNA, 25 bp, probe
ggaacagatgatttcagcccttcct

SEQ ID NO: 257548 - DNA, 25 bp, probe
ggaacaatattgaattctcttagct

SEQ ID NO: 257549 - DNA, 25 bp, probe
ggaacaaatcgtttctcagaagtac

SEQ ID NO: 257550 - DNA, 25 bp, probe
ggaaacaagcgttcctggaattaat

SEQ ID NO: 257551 - DNA, 25 bp, probe
ggaaacaagcgttcctggaattaat

SEQ ID NO: 257552 - DNA, 25 bp, probe
ggaaacaagcgttcctggaattaat

SEQ ID NO: 257553 - DNA, 25 bp, probe
ggaacgcaagagttactggaaaaat

SEQ ID NO: 257554 - DNA, 25 bp, probe
ggaacacaggaaatcaggggaaaca

SEQ ID NO: 257555 - DNA, 25 bp, probe
ggaacaagctgagacggatgataat

SEQ ID NO: 257556 - DNA, 25 bp, probe
ggaacaactagaaccaagatctgat

SEQ ID NO: 257557 - DNA, 25 bp, probe
ggaaaagcaagaacacatacactgg

SEQ ID NO: 257558 - DNA, 25 bp, probe
ggaaacagccatgtgcctaactgag

SEQ ID NO: 257559 - DNA, 25 bp, probe
ggaaacagcctagctctgatagtga

SEQ ID NO: 257560 - DNA, 25 bp, probe
ggaacacacgctttctgtgtattta

SEQ ID NO: 257561 - DNA, 25 bp, probe
ggaacaaggctcctctatggttgta

SEQ ID NO: 257562 - DNA, 25 bp, probe
ggaactgggctacttgagtttgcta

SEQ ID NO: 257563 - DNA, 25 bp, probe
ggaactgggctacttgagtttgcta

SEQ ID NO: 257564 - DNA, 25 bp, probe
ggaactgaggcgatagaattggcgc

SEQ ID NO: 257565 - DNA, 25 bp, probe
ggaacatgagggtcagcgacgtggg

SEQ ID NO: 257566 - DNA, 25 bp, probe
ggaacatgagggtcagcgacgtggg

SEQ ID NO: 257567 - DNA, 25 bp, probe
ggaacaacaatggcacatccgtgga

SEQ ID NO: 257568 - DNA, 25 bp, probe
ggaaaatcagcagagcctcgtgaat

SEQ ID NO: 257569 - DNA, 25 bp, probe
ggaaaatcagcagagcctcgtgaat

SEQ ID NO: 257570 - DNA, 25 bp, probe
ggaaaatagcaaagccatcagccaa

SEQ ID NO: 257571 - DNA, 25 bp, probe
ggaacaccataaagcgcacacaacc

SEQ ID NO: 257572 - DNA, 25 bp, probe
ggaacaccataaagcgcacacaacc

SEQ ID NO: 257573 - DNA, 25 bp, probe
ggaacactggcaaagccacataacc

SEQ ID NO: 257574 - DNA, 25 bp, probe
ggaacagcgagcagatcaaagcccc

SEQ ID NO: 257575 - DNA, 25 bp, probe
ggaacagcaatggtgtcagtatcca

SEQ ID NO: 257576 - DNA, 25 bp, probe
ggaacatgaatggtttaaacaggac

SEQ ID NO: 257577 - DNA, 25 bp, probe
ggaacattctgctgtcggaaagcga

SEQ ID NO: 257578 - DNA, 25 bp, probe
ggaactgaccagctcagcgaggagc

SEQ ID NO: 257579 - DNA, 25 bp, probe
ggaactgaccagctcagcgaggagc

SEQ ID NO: 257580 - DNA, 25 bp, probe
ggaacatgtcttcaagcgagctagc

SEQ ID NO: 257581 - DNA, 25 bp, probe
ggaacagtgggtaaggagcatcagc

SEQ ID NO: 257582 - DNA, 25 bp, probe
ggaacagtgggtaaggagcatcagc

SEQ ID NO: 257583 - DNA, 25 bp, probe
ggaacgtgcgtggtgaggacagcgg

SEQ ID NO: 257584 - DNA, 25 bp, probe
ggaacagggtgattgaggaaagtga

SEQ ID NO: 257585 - DNA, 25 bp, probe
ggaacacaggtttgggatcatagat

SEQ ID NO: 257586 - DNA, 25 bp, probe
ggaaaagaatgttggatatgatgtt

SEQ ID NO: 257587 - DNA, 25 bp, probe
ggaataatactggtggatataatcc

SEQ ID NO: 257588 - DNA, 25 bp, probe
ggaatctagccgatggaaaatacct

SEQ ID NO: 257589 - DNA, 25 bp, probe
ggaattaccaatcagcttataactt

SEQ ID NO: 257590 - DNA, 25 bp, probe
ggaactcaccaacattattcatagt

SEQ ID NO: 257591 - DNA, 25 bp, probe
ggaactcaccaacattattcatagt

SEQ ID NO: 257592 - DNA, 25 bp, probe
ggaactgcagggctatttctacagc

SEQ ID NO: 257593 - DNA, 25 bp, probe
ggaactgcagggctatttctacagc

SEQ ID NO: 257594 - DNA, 25 bp, probe
ggaaccaagaggtatatggctcctg

SEQ ID NO: 257595 - DNA, 25 bp, probe
ggaaccaagaggtatatggctcctg

SEQ ID NO: 257596 - DNA, 25 bp, probe
ggaatcctggtgaatatagtgctgc

SEQ ID NO: 257597 - DNA, 25 bp, probe
ggaagctgcgctcgattctattcgc

SEQ ID NO: 257598 - DNA, 25 bp, probe
ggaagctggagctaatgttgatgcc

SEQ ID NO: 257599 - DNA, 25 bp, probe
ggaacagctagatatatgagcataa

SEQ ID NO: 257600 - DNA, 25 bp, probe
ggaagacatcctatctagctgcaag

SEQ ID NO: 257601 - DNA, 25 bp, probe
ggaagacagtctcacagaggaaggg

SEQ ID NO: 257602 - DNA, 25 bp, probe
ggcggctctcgccaaaaggaaggag

SEQ ID NO: 257603 - DNA, 25 bp, probe
ggcagatcactctcaagaaggacca

SEQ ID NO: 257604 - DNA, 25 bp, probe
ggaacatcttcctgacagaatgcca

SEQ ID NO: 257605 - DNA, 25 bp, probe
ggaacatcttcctgacagaatgcca

SEQ ID NO: 257606 - DNA, 25 bp, probe
ggcagagatttatccaataatggac

SEQ ID NO: 257607 - DNA, 25 bp, probe
ggaaggttacaacgtatatggcatc

SEQ ID NO: 257608 - DNA, 25 bp, probe
ggaaggttacaagtggcacttcaat

SEQ ID NO: 257609 - DNA, 25 bp, probe
ggaaggtctataacagtcacccttg

SEQ ID NO: 257610 - DNA, 25 bp, probe
ggaagagacttaaggctacgcccac

SEQ ID NO: 257611 - DNA, 25 bp, probe
ggaagagacttaaggctacgcccac

SEQ ID NO: 257612 - DNA, 25 bp, probe
ggaagaagtaaagcatcccttcatc

SEQ ID NO: 257613 - DNA, 25 bp, probe
ggaagaatgtattcggcaccttccc

SEQ ID NO: 257614 - DNA, 25 bp, probe
ggaacgtttgatgggactctccctt

SEQ ID NO: 257615 - DNA, 25 bp, probe
ggaacgtttgatgggactctccctt

SEQ ID NO: 257616 - DNA, 25 bp, probe
ggaactgttctctgtgacatcatcc

SEQ ID NO: 257617 - DNA, 25 bp, probe
ggaacatgattccacagcccatgat

SEQ ID NO: 257618 - DNA, 25 bp, probe
ggaacatgattccacagcccatgat

SEQ ID NO: 257619 - DNA, 25 bp, probe
ggaacagcattggagatgccttctc

SEQ ID NO: 257620 - DNA, 25 bp, probe
ggaacagcttgatgcacacagactc

SEQ ID NO: 257621 - DNA, 25 bp, probe
ggaatagttgagccccaagtcctga

SEQ ID NO: 257622 - DNA, 25 bp, probe
ggaaggactcatgaccacagtccat

SEQ ID NO: 257623 - DNA, 25 bp, probe
ggaagtagccatcacaccattaaaa

SEQ ID NO: 257624 - DNA, 25 bp, probe
ggaaaagccatagcaggagttatta

SEQ ID NO: 257625 - DNA, 25 bp, probe
ggaaaagcaaaccagaatcttattt

SEQ ID NO: 257626 - DNA, 25 bp, probe
ggcagggaaaacggcaccttttcat

SEQ ID NO: 257627 - DNA, 25 bp, probe
ggcagggcagcacagggaatatttt

SEQ ID NO: 257628 - DNA, 25 bp, probe
ggaagtcgcaaagagaaagtgatgt

SEQ ID NO: 257629 - DNA, 25 bp, probe
ggaagtccaatagggcaaattgaat

SEQ ID NO: 257630 - DNA, 25 bp, probe
ggaacggcgaaccgcaacatataat

SEQ ID NO: 257631 - DNA, 25 bp, probe
ggaacagggaactgtcctacactgc

SEQ ID NO: 257632 - DNA, 25 bp, probe
ggaacaggagatgcaagccactaac

SEQ ID NO: 257633 - DNA, 25 bp, probe
ggaacaggagatgcaagccactaac

SEQ ID NO: 257634 - DNA, 25 bp, probe
ggcaaaggagcagagaactttgaca

SEQ ID NO: 257635 - DNA, 25 bp, probe
ggaagaggagcctggactaggactc

SEQ ID NO: 257636 - DNA, 25 bp, probe
ggaagaggaggctgggcaggcgcct

SEQ ID NO: 257637 - DNA, 25 bp, probe
ggaagaggaggctgggcaggcgcct

SEQ ID NO: 257638 - DNA, 25 bp, probe
ggaagctgaaggagctggaggtgtc

SEQ ID NO: 257639 - DNA, 25 bp, probe
ggaagctgagcaagaaatggaggaa

SEQ ID NO: 257640 - DNA, 25 bp, probe
ggaagctgcacattgaccaaaggag

SEQ ID NO: 257641 - DNA, 25 bp, probe
ggaaggccttgatgaagggcagccg

SEQ ID NO: 257642 - DNA, 25 bp, probe
ggaaggcactggtgatgtcccagga

SEQ ID NO: 257643 - DNA, 25 bp, probe
ggaagagatcggtacagacccaagc

SEQ ID NO: 257644 - DNA, 25 bp, probe
ggcacagagccatggaaacccaaag

SEQ ID NO: 257645 - DNA, 25 bp, probe
ggcaagaggctgtcgaaaggtccca

SEQ ID NO: 257646 - DNA, 25 bp, probe
ggcaagaggctgtcgaaaggtccca

SEQ ID NO: 257647 - DNA, 25 bp, probe
ggaagacagaaccaaattatctcca

SEQ ID NO: 257648 - DNA, 25 bp, probe
ggaagacaaactaccaatttctcgt

SEQ ID NO: 257649 - DNA, 25 bp, probe
ggcaaatcaaacactgccatttagt

SEQ ID NO: 257650 - DNA, 25 bp, probe
ggcacaataaacattctctgttttg

SEQ ID NO: 257651 - DNA, 25 bp, probe
ggaaaaggaagtgttgctctcattg

SEQ ID NO: 257652 - DNA, 25 bp, probe
ggaacagacagaacggtgtctctca

SEQ ID NO: 257653 - DNA, 25 bp, probe
ggaataataagccgggatctaccat

SEQ ID NO: 257654 - DNA, 25 bp, probe
ggaatgaatcctcagggagctccct

SEQ ID NO: 257655 - DNA, 25 bp, probe
ggaatgaatcctcagggagctccct

SEQ ID NO: 257656 - DNA, 25 bp, probe
ggaatgaatcctcagggagctccct

SEQ ID NO: 257657 - DNA, 25 bp, probe
ggaatgaatcctcagggagctccct

SEQ ID NO: 257658 - DNA, 25 bp, probe
ggaagaactacaactgggccatcac

SEQ ID NO: 257659 - DNA, 25 bp, probe
ggaagacaaagaactgggctctggt

SEQ ID NO: 257660 - DNA, 25 bp, probe
ggaagaaacaggatggctttctgta

SEQ ID NO: 257661 - DNA, 25 bp, probe
ggaagagaacagtgtggggtgctaa

SEQ ID NO: 257662 - DNA, 25 bp, probe
ggaacagaatcctggggcttgcaaa

SEQ ID NO: 257663 - DNA, 25 bp, probe
ggaagatacttcttgaccctggaaa

SEQ ID NO: 257664 - DNA, 25 bp, probe
ggaatagtttcctgtcctgagacga

SEQ ID NO: 257665 - DNA, 25 bp, probe
ggaatggcttacatcgagcgcatga

SEQ ID NO: 257666 - DNA, 25 bp, probe
ggaatggcttacatcgagcgcatga

SEQ ID NO: 257667 - DNA, 25 bp, probe
ggaagcgactacattgaccagctga

SEQ ID NO: 257668 - DNA, 25 bp, probe
ggaatgggccagatggacctgctag

SEQ ID NO: 257669 - DNA, 25 bp, probe
ggaagggccagaatggtcgcacctt

SEQ ID NO: 257670 - DNA, 25 bp, probe
ggaacctgcgcagtgtggttagctt

SEQ ID NO: 257671 - DNA, 25 bp, probe
ggaaccatgcaagtggcgactgcac

SEQ ID NO: 257672 - DNA, 25 bp, probe
ggaagccagaacgcagactgcaggg

SEQ ID NO: 257673 - DNA, 25 bp, probe
taaagccaatgacccccaaggtggt

SEQ ID NO: 257674 - DNA, 25 bp, probe
tccacagggacgacccggaggtggt

SEQ ID NO: 257675 - DNA, 25 bp, probe
tccacagggacgacccggaggtggt

SEQ ID NO: 257676 - DNA, 25 bp, probe
ggcactggtgatgtcccaggaggta

SEQ ID NO: 257677 - DNA, 25 bp, probe
ggaagtgctgatgtcacgtgggtta

SEQ ID NO: 257678 - DNA, 25 bp, probe
ggaagtgctgatgtcacgtgggtta

SEQ ID NO: 257679 - DNA, 25 bp, probe
ggaactggcaggaactgtgggttgt

SEQ ID NO: 257680 - DNA, 25 bp, probe
ggaactggggtggctatcaatattg

SEQ ID NO: 257681 - DNA, 25 bp, probe
ggaactagatgacgctttaagatat

SEQ ID NO: 257682 - DNA, 25 bp, probe
ggaacctgatgggctcctacaggtc

SEQ ID NO: 257683 - DNA, 25 bp, probe
ggaacttgggacgccagaggggcag

SEQ ID NO: 257684 - DNA, 25 bp, probe
ggaaccagaacatcccaagggaact

SEQ ID NO: 257685 - DNA, 25 bp, probe
ggcacccagaagagccgcaaggacc

SEQ ID NO: 257686 - DNA, 25 bp, probe
ggaaccggaggtctgcgaggacctg

SEQ ID NO: 257687 - DNA, 25 bp, probe
ggaacctgtgaattgtactggatga

SEQ ID NO: 257688 - DNA, 25 bp, probe
ggaagcctgccgaaaacaggagcaa

SEQ ID NO: 257689 - DNA, 25 bp, probe
ggaaccagcccaatagaagtacaga

SEQ ID NO: 257690 - DNA, 25 bp, probe
ggaacccagctctaatacattccaa

SEQ ID NO: 257691 - DNA, 25 bp, probe
ggaacccagctctaatacattccaa

SEQ ID NO: 257692 - DNA, 25 bp, probe
ggaacagccatttatatgtatcttc

SEQ ID NO: 257693 - DNA, 25 bp, probe
ggaagactagctttattatggtttt

SEQ ID NO: 257694 - DNA, 25 bp, probe
ggaagttgaatagtttcatggaagc

SEQ ID NO: 257695 - DNA, 25 bp, probe
ggaagtggaaacttctcccaagtga

SEQ ID NO: 257696 - DNA, 25 bp, probe
ggcaggaggaaggcgttctccacct

SEQ ID NO: 257697 - DNA, 25 bp, probe
ggcaggaggaaggcgttctccacct

SEQ ID NO: 257698 - DNA, 25 bp, probe
ggcaggaagagacctttcctctgac

SEQ ID NO: 257699 - DNA, 25 bp, probe
ggaatgtacagctctgttcctttcc

SEQ ID NO: 257700 - DNA, 25 bp, probe
ggaagcatccctatctacagtttcc

SEQ ID NO: 257701 - DNA, 25 bp, probe
ggaacatcctgaattctagagttga

SEQ ID NO: 257702 - DNA, 25 bp, probe
ggaacatctgctcaacatgaagtgc

SEQ ID NO: 257703 - DNA, 25 bp, probe
ggaacaggctctgcgcatgagcgtg

SEQ ID NO: 257704 - DNA, 25 bp, probe
ggaacatgcaggagccatggctgga

SEQ ID NO: 257705 - DNA, 25 bp, probe
ggaacatgcaggagccatggctgga

SEQ ID NO: 257706 - DNA, 25 bp, probe
ggaacaggagcaggctctgatgctg

SEQ ID NO: 257707 - DNA, 25 bp, probe
ggaacacgtgcagctactgcaggtg

SEQ ID NO: 257708 - DNA, 25 bp, probe
ggaagacttcatgctgttggcagta

SEQ ID NO: 257709 - DNA, 25 bp, probe
ggaagaaaattcctctggcaatacc

SEQ ID NO: 257710 - DNA, 25 bp, probe
ggaagaaggaccctgatgaaagacc

SEQ ID NO: 257711 - DNA, 25 bp, probe
ggaagaaggaccctgatgaaagacc

SEQ ID NO: 257712 - DNA, 25 bp, probe
ggaagaaggccacatggctgacatt

SEQ ID NO: 257713 - DNA, 25 bp, probe
ggaactaggctcttatgtgtgcctt

SEQ ID NO: 257714 - DNA, 25 bp, probe
ggaacaaatgcttatatggcgcctg

SEQ ID NO: 257715 - DNA, 25 bp, probe
ggaacaacagcttatatggcaccag

SEQ ID NO: 257716 - DNA, 25 bp, probe
ggaactgaccattatatgccttcac

SEQ ID NO: 257717 - DNA, 25 bp, probe
ggaagtgcacctttgacatgttcaa

SEQ ID NO: 257718 - DNA, 25 bp, probe
ggaagtgcccataggaaatagagag

SEQ ID NO: 257719 - DNA, 25 bp, probe
ggaacatgcccctggagaggatgaa

SEQ ID NO: 257720 - DNA, 25 bp, probe
ggaactgccgcccagggaagtgagc

SEQ ID NO: 257721 - DNA, 25 bp, probe
ggaagggccctgaggaaggcacact

SEQ ID NO: 257722 - DNA, 25 bp, probe
ggaagggccctgaggaaggcacact

SEQ ID NO: 257723 - DNA, 25 bp, probe
ggaagacgccatcagggaagccaca

SEQ ID NO: 257724 - DNA, 25 bp, probe
ggaagacgacagcagtgaggcggac

SEQ ID NO: 257725 - DNA, 25 bp, probe
ggaacctgacgtagctgcaaaggac

SEQ ID NO: 257726 - DNA, 25 bp, probe
ggaacccatgggatgataagctgat

SEQ ID NO: 257727 - DNA, 25 bp, probe
ggaacttgctgtattgctgacctgg

SEQ ID NO: 257728 - DNA, 25 bp, probe
ggaacatatgctcatttgagaaagg

SEQ ID NO: 257729 - DNA, 25 bp, probe
ggaacatagccacatctagatagat

SEQ ID NO: 257730 - DNA, 25 bp, probe
ggaacatagccacatctagatagat

SEQ ID NO: 257731 - DNA, 25 bp, probe
ggaagaagccaacctcatgaagacc

SEQ ID NO: 257732 - DNA, 25 bp, probe
ggaaggagcacaaggggaaatcagc

SEQ ID NO: 257733 - DNA, 25 bp, probe
ggaagaggaaagtatgtaaatggag

SEQ ID NO: 257734 - DNA, 25 bp, probe
ggcaaaggaatatattgatccggag

SEQ ID NO: 257735 - DNA, 25 bp, probe
ggaacagggactttgagaccaggaa

SEQ ID NO: 257736 - DNA, 25 bp, probe
ggaagaggttctttgagacacagta

SEQ ID NO: 257737 - DNA, 25 bp, probe
ggaagtttactattcaacacatata

SEQ ID NO: 257738 - DNA, 25 bp, probe
ggaagtttacatcctcctaaattgg

SEQ ID NO: 257739 - DNA, 25 bp, probe
ggcaagtttgccaattccgaagtgg

SEQ ID NO: 257740 - DNA, 25 bp, probe
ggaagttgtgcggtttctagataag

SEQ ID NO: 257741 - DNA, 25 bp, probe
ggaagcttgatggatgttctgctca

SEQ ID NO: 257742 - DNA, 25 bp, probe
ggaacatctcatcagtgtccagaag

SEQ ID NO: 257743 - DNA, 25 bp, probe
ggaacatgtcggagtccttcagaga

SEQ ID NO: 257744 - DNA, 25 bp, probe
ggaactagaggagggcctagcagag

SEQ ID NO: 257745 - DNA, 25 bp, probe
ggaactgagaccatcagccatagag

SEQ ID NO: 257746 - DNA, 25 bp, probe
ggaactagaccaaaggcgctgggaa

SEQ ID NO: 257747 - DNA, 25 bp, probe
ggaagtcccgtatgaggatgtcgaa

SEQ ID NO: 257748 - DNA, 25 bp, probe
ggaatgtctcgtcaagaggatggtg

SEQ ID NO: 257749 - DNA, 25 bp, probe
ggaagtacagtttcaaggatgaaga

SEQ ID NO: 257750 - DNA, 25 bp, probe
ggaaggacgcttgcaagggagattc

SEQ ID NO: 257751 - DNA, 25 bp, probe
ggaaggcctgtacttttggtcattc

SEQ ID NO: 257752 - DNA, 25 bp, probe
ggaagagctcttcggtttctgagca

SEQ ID NO: 257753 - DNA, 25 bp, probe
ggaagaaattggcatttgctgacaa

SEQ ID NO: 257754 - DNA, 25 bp, probe
ggaagactggtggtacatgggagaa

SEQ ID NO: 257755 - DNA, 25 bp, probe
ggaagcctgggggcacctggaaaat

SEQ ID NO: 257756 - DNA, 25 bp, probe
ggaacctggctgagaccaaaacaac

SEQ ID NO: 257757 - DNA, 25 bp, probe
ggaacctggagcagaccacaaatga

SEQ ID NO: 257758 - DNA, 25 bp, probe
ggaacgtggacaagactcgcagatt

SEQ ID NO: 257759 - DNA, 25 bp, probe
ggaactaggagccatgatctctcag

SEQ ID NO: 257760 - DNA, 25 bp, probe
ggaactaggagccatgatctctcag

SEQ ID NO: 257761 - DNA, 25 bp, probe
ggaacttcagagcatgtgctccagc

SEQ ID NO: 257762 - DNA, 25 bp, probe
ggaagctacagtgagtctgaggcca

SEQ ID NO: 257763 - DNA, 25 bp, probe
ggaagccacaatgttcttggcccat

SEQ ID NO: 257764 - DNA, 25 bp, probe
ggcaaccataattctctttggtgca

SEQ ID NO: 257765 - DNA, 25 bp, probe
ggaatgaattatcctgccttggatg

SEQ ID NO: 257766 - DNA, 25 bp, probe
ggaagcagtatcagtgcactcaggt

SEQ ID NO: 257767 - DNA, 25 bp, probe
ggaagcagtatgggtgcagtcccct

SEQ ID NO: 257768 - DNA, 25 bp, probe
ggaacagtaaagacagtgccaccaa

SEQ ID NO: 257769 - DNA, 25 bp, probe
ggaagcctaaagaaatctcaccgaa

SEQ ID NO: 257770 - DNA, 25 bp, probe
ggcaagccagtcaaaaacgcccgga

SEQ ID NO: 257771 - DNA, 25 bp, probe
ggcaagccagtcaaaaacgcccgga

SEQ ID NO: 257772 - DNA, 25 bp, probe
ggaagaaccaattaacaccaatgaa

SEQ ID NO: 257773 - DNA, 25 bp, probe
ggaagcaaaagtaagaagcagcatt

SEQ ID NO: 257774 - DNA, 25 bp, probe
ggaattacaaatgagaagagtctac

SEQ ID NO: 257775 - DNA, 25 bp, probe
ggaattacttggggaacttatacag

SEQ ID NO: 257776 - DNA, 25 bp, probe
ggcactcccggagcaaagtctatga

SEQ ID NO: 257777 - DNA, 25 bp, probe
ggcaacgggagattatttgtttgaa

SEQ ID NO: 257778 - DNA, 25 bp, probe
ggaactggaagatgtattttatcaa

SEQ ID NO: 257779 - DNA, 25 bp, probe
ggaacgaaatagcttatttgaataa

SEQ ID NO: 257780 - DNA, 25 bp, probe
ggaagcgcaagatggtctccttcca

SEQ ID NO: 257781 - DNA, 25 bp, probe
ggaactcttcaaggtctcttttcat

SEQ ID NO: 257782 - DNA, 25 bp, probe
ggaattcagtagttactgctgttta

SEQ ID NO: 257783 - DNA, 25 bp, probe
ggaattcagtagttactgctgttta

SEQ ID NO: 257784 - DNA, 25 bp, probe
ggaattccttgtaactggagctcgg

SEQ ID NO: 257785 - DNA, 25 bp, probe
ggaattcacttttttcatgacctag

SEQ ID NO: 257786 - DNA, 25 bp, probe
ggaactacttgtacttcattgtgct

SEQ ID NO: 257787 - DNA, 25 bp, probe
ggaatgaacttccgctttggtgcta

SEQ ID NO: 257788 - DNA, 25 bp, probe
ggcaatggccttgtcatttgggtag

SEQ ID NO: 257789 - DNA, 25 bp, probe
ggcaatttttgagttgttggattac

SEQ ID NO: 257790 - DNA, 25 bp, probe
ggaagtatatctatatgatcttgat

SEQ ID NO: 257791 - DNA, 25 bp, probe
ggaagtatatctatatgatcttgat

SEQ ID NO: 257792 - DNA, 25 bp, probe
ggcaaccatttcaatgagtttgcag

SEQ ID NO: 257793 - DNA, 25 bp, probe
ggcaactacttcaaggtttcgagag

SEQ ID NO: 257794 - DNA, 25 bp, probe
ggaacatagccctagtttaagagaa

SEQ ID NO: 257795 - DNA, 25 bp, probe
ggaagcaaccagcaaattaactaat

SEQ ID NO: 257796 - DNA, 25 bp, probe
tggatcaccccagaatagttaaact

SEQ ID NO: 257797 - DNA, 25 bp, probe
ggaagcccacagccaaagtgataga

SEQ ID NO: 257798 - DNA, 25 bp, probe
ggaacccaagtccaagcataccaac

SEQ ID NO: 257799 - DNA, 25 bp, probe
ggaatcccaaaccagacagaaacca

SEQ ID NO: 257800 - DNA, 25 bp, probe
ggaacatctccaacagaagcaaaac

SEQ ID NO: 257801 - DNA, 25 bp, probe
ggaacatcaacaaccagtcaaaata

SEQ ID NO: 257802 - DNA, 25 bp, probe
ggaagcaaacagtggtcatcaaagg

SEQ ID NO: 257803 - DNA, 25 bp, probe
ggcaccaaacgctggtcacaacagc

SEQ ID NO: 257804 - DNA, 25 bp, probe
ggaattaactggcttcatcaccagc

SEQ ID NO: 257805 - DNA, 25 bp, probe
ggaattaactggcttcatcaccagc

SEQ ID NO: 257806 - DNA, 25 bp, probe
ggaactaacagtttcaataccagca

SEQ ID NO: 257807 - DNA, 25 bp, probe
ggaactacactcttgagcaatacca

SEQ ID NO: 257808 - DNA, 25 bp, probe
ggaactacactcttgagcaatacca

SEQ ID NO: 257809 - DNA, 25 bp, probe
ggaacatctactcagcagactacta

SEQ ID NO: 257810 - DNA, 25 bp, probe
ggaagctggattcagttgctactag

SEQ ID NO: 257811 - DNA, 25 bp, probe
ggaagctgtatattcatgtatgcta

SEQ ID NO: 257812 - DNA, 25 bp, probe
ggaagctgtatattcatgtatgcta

SEQ ID NO: 257813 - DNA, 25 bp, probe
ggaactgtgaagtttgatggaaaca

SEQ ID NO: 257814 - DNA, 25 bp, probe
ggaactgtgaagtttgatggaaaca

SEQ ID NO: 257815 - DNA, 25 bp, probe
ggaagttgtagatttcattcaatca

SEQ ID NO: 257816 - DNA, 25 bp, probe
ggaagaagggataatagacacatca

SEQ ID NO: 257817 - DNA, 25 bp, probe
ggaacatatgggaaccaacgtcatc

SEQ ID NO: 257818 - DNA, 25 bp, probe
ggaagctattgcctaaatcagcgtc

SEQ ID NO: 257819 - DNA, 25 bp, probe
ggaagctattgcctaaatcagcgtc

SEQ ID NO: 257820 - DNA, 25 bp, probe
ggaagctcattgcccgatgaacttt

SEQ ID NO: 257821 - DNA, 25 bp, probe
ggaaccagggcctgacattttataa

SEQ ID NO: 257822 - DNA, 25 bp, probe
ggaactgagttcattacatctttaa

SEQ ID NO: 257823 - DNA, 25 bp, probe
ggaagccagtatctgtcatatgctg

SEQ ID NO: 257824 - DNA, 25 bp, probe
ggaagcttgaacctgaattgcattt

SEQ ID NO: 257825 - DNA, 25 bp, probe
ggaagttgcatcagaggtccatatt

SEQ ID NO: 257826 - DNA, 25 bp, probe
ggaatattcagcagaggacagtgtt

SEQ ID NO: 257827 - DNA, 25 bp, probe
ggaacatttgaacatgaatgctgtt

SEQ ID NO: 257828 - DNA, 25 bp, probe
ggaactctggggcaagacatgtcta

SEQ ID NO: 257829 - DNA, 25 bp, probe
ggaatcgcggtacaaactggcatga

SEQ ID NO: 257830 - DNA, 25 bp, probe
ggaatcgcggtacaaactggcatga

SEQ ID NO: 257831 - DNA, 25 bp, probe
ggaatcagcctgtgtggggtggagc

SEQ ID NO: 257832 - DNA, 25 bp, probe
ggaacgacttggtgctggagttgct

SEQ ID NO: 257833 - DNA, 25 bp, probe
ggaaccaccgagtgctgaaggatga

SEQ ID NO: 257834 - DNA, 25 bp, probe
ggaaccaccgagtgctgaaggatga

SEQ ID NO: 257835 - DNA, 25 bp, probe
ggaaccccagagttctcagaggcac

SEQ ID NO: 257836 - DNA, 25 bp, probe
ggaaccccagagttctcagaggcac

SEQ ID NO: 257837 - DNA, 25 bp, probe
ggaattgcccgagtgttagagaacc

SEQ ID NO: 257838 - DNA, 25 bp, probe
ggaatctacctgtggtgactgaacg

SEQ ID NO: 257839 - DNA, 25 bp, probe
ggaatctacctgtggtgactgaacg

SEQ ID NO: 257840 - DNA, 25 bp, probe
ggaattacaatgatgcggaagaaag

SEQ ID NO: 257841 - DNA, 25 bp, probe
ggaactcatgttatgctctaaacga

SEQ ID NO: 257842 - DNA, 25 bp, probe
ggaatgttgtttgcctaccaagata

SEQ ID NO: 257843 - DNA, 25 bp, probe
ggaagtgtgtttgcctaaaacaatc

SEQ ID NO: 257844 - DNA, 25 bp, probe
ggcaaggtttaaacataaatccaca

SEQ ID NO: 257845 - DNA, 25 bp, probe
ggcactgggttttcaaacattcctc

SEQ ID NO: 257846 - DNA, 25 bp, probe
ggcactgggttttcaaacattcctc

SEQ ID NO: 257847 - DNA, 25 bp, probe
ggccgcggttgtagaaaggtcaaag

SEQ ID NO: 257848 - DNA, 25 bp, probe
ggcggcggtgggaaaaggtgtcagg

SEQ ID NO: 257849 - DNA, 25 bp, probe
ggaactgggagggaagggtgagacg

SEQ ID NO: 257850 - DNA, 25 bp, probe
ggcaacctggttgaagggatggact

SEQ ID NO: 257851 - DNA, 25 bp, probe
ggcaacctggttgaagggatggact

SEQ ID NO: 257852 - DNA, 25 bp, probe
ggcaacctggttgaagggatggact

SEQ ID NO: 257853 - DNA, 25 bp, probe
ggcaacctggttgaagggatggact

SEQ ID NO: 257854 - DNA, 25 bp, probe
ggcaacctggttgaagggatggact

SEQ ID NO: 257855 - DNA, 25 bp, probe
ggaacctgtggtgatagagaagaca

SEQ ID NO: 257856 - DNA, 25 bp, probe
ggaacgctttgtccacagtgaaaat

SEQ ID NO: 257857 - DNA, 25 bp, probe
ggaagccaattgtccaagtcaggag

SEQ ID NO: 257858 - DNA, 25 bp, probe
ggaagttcaccagcaagtcggatgt

SEQ ID NO: 257859 - DNA, 25 bp, probe
ggaagttatctagcaagccgctggg

SEQ ID NO: 257860 - DNA, 25 bp, probe
ggaagttatctagcaagccgctggg

SEQ ID NO: 257861 - DNA, 25 bp, probe
ggaagataactgagcagcaccgtcg

SEQ ID NO: 257862 - DNA, 25 bp, probe
ggaagagagactgcagcagaggcga

SEQ ID NO: 257863 - DNA, 25 bp, probe
ggaagaagcagcgggcaggtgtgat

SEQ ID NO: 257864 - DNA, 25 bp, probe
ggaagaagcagcgggcaggtgtgat

SEQ ID NO: 257865 - DNA, 25 bp, probe
ggaagagagaggcctgggtgtgacc

SEQ ID NO: 257866 - DNA, 25 bp, probe
ggaagaagagggagagatggagcaa

SEQ ID NO: 257867 - DNA, 25 bp, probe
ggaagaagagggagagatggagcaa

SEQ ID NO: 257868 - DNA, 25 bp, probe
ggaagcttggtaccgagaggagaat

SEQ ID NO: 257869 - DNA, 25 bp, probe
ggaagcatcccttcctgcaagggat

SEQ ID NO: 257870 - DNA, 25 bp, probe
ggaatcatactttccaaagatttgt

SEQ ID NO: 257871 - DNA, 25 bp, probe
ggaatcatactttccaaagatttgt

SEQ ID NO: 257872 - DNA, 25 bp, probe
ggaagctcaatgatacaaacatttg

SEQ ID NO: 257873 - DNA, 25 bp, probe
ggaaccacatgcagacaaagatttc

SEQ ID NO: 257874 - DNA, 25 bp, probe
ggaatccctgggcaaagatttcctc

SEQ ID NO: 257875 - DNA, 25 bp, probe
ggaactccttggctcaagcaatcct

SEQ ID NO: 257876 - DNA, 25 bp, probe
ggaatccgctttcaaagacatagcc

SEQ ID NO: 257877 - DNA, 25 bp, probe
ggaatccgctttcaaagacatagcc

SEQ ID NO: 257878 - DNA, 25 bp, probe
ggaactcctttccaaagccatattt

SEQ ID NO: 257879 - DNA, 25 bp, probe
ggaagacgtgttggaacacctcatt

SEQ ID NO: 257880 - DNA, 25 bp, probe
ggaagaggtgtttgactgcatcgtc

SEQ ID NO: 257881 - DNA, 25 bp, probe
ggaagaggtgtttgactgcatcgtc

SEQ ID NO: 257882 - DNA, 25 bp, probe
gaaagggctacagacttcactgacc

SEQ ID NO: 257883 - DNA, 25 bp, probe
ggaatatgagatgctaactagtttg

SEQ ID NO: 257884 - DNA, 25 bp, probe
ggaagagggccatcaaactcattgt

SEQ ID NO: 257885 - DNA, 25 bp, probe
ggaattcgagcctcaaaatttgctg

SEQ ID NO: 257886 - DNA, 25 bp, probe
ggaattccaggaaagaacttcaggt

SEQ ID NO: 257887 - DNA, 25 bp, probe
ggcaattcttagagacatttccggt

SEQ ID NO: 257888 - DNA, 25 bp, probe
ggaatcctaaaaactctgcttcggt

SEQ ID NO: 257889 - DNA, 25 bp, probe
ggaacctgcaataaactcgctgttc

SEQ ID NO: 257890 - DNA, 25 bp, probe
ggaagcctctataacaaggctgctc

SEQ ID NO: 257891 - DNA, 25 bp, probe
ggaacgcctgaaacaggtgctgctc

SEQ ID NO: 257892 - DNA, 25 bp, probe
ggaacgcctgaaacaggtgctgctc

SEQ ID NO: 257893 - DNA, 25 bp, probe
ggaaccgcgagatagggcagatcac

SEQ ID NO: 257894 - DNA, 25 bp, probe
ggaaccgcgagatagggcagatcac

SEQ ID NO: 257895 - DNA, 25 bp, probe
ggaaccgctggacgagggcggcttg

SEQ ID NO: 257896 - DNA, 25 bp, probe
ggaaccgctggacgagggcggcttg

SEQ ID NO: 257897 - DNA, 25 bp, probe
ggcacatccgtggaggacggccaga

SEQ ID NO: 257898 - DNA, 25 bp, probe
ggaactgcctggtgacagagaagaa

SEQ ID NO: 257899 - DNA, 25 bp, probe
ggaactgcctggtgggcgagaacat

SEQ ID NO: 257900 - DNA, 25 bp, probe
ggaactgcggtgttgggagagtctt

SEQ ID NO: 257901 - DNA, 25 bp, probe
ggaattggtgattacagtagcactt

SEQ ID NO: 257902 - DNA, 25 bp, probe
ggaagttgtctataatgagccgtta

SEQ ID NO: 257903 - DNA, 25 bp, probe
ggaagctctggctgagagcgaccgt

SEQ ID NO: 257904 - DNA, 25 bp, probe
ggaatatcttgtgactgcgacctcc

SEQ ID NO: 257905 - DNA, 25 bp, probe
ggaatgttattgaagccgtttacaa

SEQ ID NO: 257906 - DNA, 25 bp, probe
ggaagatctacgcagccatgatgat

SEQ ID NO: 257907 - DNA, 25 bp, probe
ggaagactgcacttgagctgcgttt

SEQ ID NO: 257908 - DNA, 25 bp, probe
ggaagactgcacttgagctgcgttt

SEQ ID NO: 257909 - DNA, 25 bp, probe
ggaagcattgactggtcctatgatt

SEQ ID NO: 257910 - DNA, 25 bp, probe
ggaagatctacaaggctgccaagtt

SEQ ID NO: 257911 - DNA, 25 bp, probe
ggaagatctacaaggctgccaagtt

SEQ ID NO: 257912 - DNA, 25 bp, probe
ggaagccatgaagaagcgcaagttc

SEQ ID NO: 257913 - DNA, 25 bp, probe
ggcaaccgaaactagcagcaaagta

SEQ ID NO: 257914 - DNA, 25 bp, probe
ggcaaagcccacttagcaaaagcca

SEQ ID NO: 257915 - DNA, 25 bp, probe
ggaagagtccactgccaaaagagta

SEQ ID NO: 257916 - DNA, 25 bp, probe
ggaagagtgccatacccaggcatga

SEQ ID NO: 257917 - DNA, 25 bp, probe
ggaagagtgccatacccaggcatga

SEQ ID NO: 257918 - DNA, 25 bp, probe
ggaagagcatgataactgtcagagc

SEQ ID NO: 257919 - DNA, 25 bp, probe
ggaagagcatgataactgtcagagc

SEQ ID NO: 257920 - DNA, 25 bp, probe
ggaatcacagaatggtccagcactt

SEQ ID NO: 257921 - DNA, 25 bp, probe
ggaagacatgaatgcacactagcct

SEQ ID NO: 257922 - DNA, 25 bp, probe
ggaagccatagagtacatcgatgcc

SEQ ID NO: 257923 - DNA, 25 bp, probe
ggaagccatagagtacatcgatgcc

SEQ ID NO: 257924 - DNA, 25 bp, probe
ggaagcatgtaggagaatccaagcg

SEQ ID NO: 257925 - DNA, 25 bp, probe
ggaagcagatcagagcacacgtacg

SEQ ID NO: 257926 - DNA, 25 bp, probe
ggaagctgacagaagcagcgttcct

SEQ ID NO: 257927 - DNA, 25 bp, probe
ggaagctaagtgctgctgtttcttt

SEQ ID NO: 257928 - DNA, 25 bp, probe
ggaagctctaggcattgttctcttt

SEQ ID NO: 257929 - DNA, 25 bp, probe
ggaagatgcaatctgatttgtcctt

SEQ ID NO: 257930 - DNA, 25 bp, probe
ggaagagcattcggattgcaactgc

SEQ ID NO: 257931 - DNA, 25 bp, probe
ggaaggcatggtggaagccactgcc

SEQ ID NO: 257932 - DNA, 25 bp, probe
ggaagtgcattagtagaagccacct

SEQ ID NO: 257933 - DNA, 25 bp, probe
ggcagttggtgagaaacaagccata

SEQ ID NO: 257934 - DNA, 25 bp, probe
ggcagtgggtaggcagaaagcattc

SEQ ID NO: 257935 - DNA, 25 bp, probe
ggcacggggagaggaaggcactcct

SEQ ID NO: 257936 - DNA, 25 bp, probe
ggaaggggttcctagtactgcaatt

SEQ ID NO: 257937 - DNA, 25 bp, probe
ggaatggggtctcctggtcccattc

SEQ ID NO: 257938 - DNA, 25 bp, probe
ggaagaagagctgctctggtctcca

SEQ ID NO: 257939 - DNA, 25 bp, probe
ggaagtaggtgccattggtcattct

SEQ ID NO: 257940 - DNA, 25 bp, probe
ggaagcatatgcctacttgtaattt

SEQ ID NO: 257941 - DNA, 25 bp, probe
ggcaactgagccactgaagaatttt

SEQ ID NO: 257942 - DNA, 25 bp, probe
ggcaactgagccactgaagaatttt

SEQ ID NO: 257943 - DNA, 25 bp, probe
ggaattggcctattggcaagatcgc

SEQ ID NO: 257944 - DNA, 25 bp, probe
ggaattggcctattggcaagatcgc

SEQ ID NO: 257945 - DNA, 25 bp, probe
ggaatattgagtacatcgccaagtg

SEQ ID NO: 257946 - DNA, 25 bp, probe
ggaagatcgaaagtgcgaatctgac

SEQ ID NO: 257947 - DNA, 25 bp, probe
ggaagacgacgaggactgctatggc

SEQ ID NO: 257948 - DNA, 25 bp, probe
ggaagtctgaactgactctagagga

SEQ ID NO: 257949 - DNA, 25 bp, probe
ggaagctgtgaagatgcctgtgggc

SEQ ID NO: 257950 - DNA, 25 bp, probe
ggaataagatcagagccattgggaa

SEQ ID NO: 257951 - DNA, 25 bp, probe
ggaagtgaaaggcccttgggaatga

SEQ ID NO: 257952 - DNA, 25 bp, probe
ggaaggaaaggacagtccaggcatt

SEQ ID NO: 257953 - DNA, 25 bp, probe
ggaaggaggggacatgtctcccgat

SEQ ID NO: 257954 - DNA, 25 bp, probe
tggaaggaggcgcactttcctcctg

SEQ ID NO: 257955 - DNA, 25 bp, probe
tggaaggaggcgcactttcctcctg

SEQ ID NO: 257956 - DNA, 25 bp, probe
tggaaggaggcgcactttcctcctg

SEQ ID NO: 257957 - DNA, 25 bp, probe
ggcaatggagggccaccaaactttg

SEQ ID NO: 257958 - DNA, 25 bp, probe
ggcaatggagggccaccaaactttg

SEQ ID NO: 257959 - DNA, 25 bp, probe
ggcaatggagggccaccaaactttg

SEQ ID NO: 257960 - DNA, 25 bp, probe
ggcaatggagggccaccaaactttg

SEQ ID NO: 257961 - DNA, 25 bp, probe
ggcagaggtagccccctaaatgggc

SEQ ID NO: 257962 - DNA, 25 bp, probe
ggaagtgtgaggcacgaaacaggga

SEQ ID NO: 257963 - DNA, 25 bp, probe
ggaagtgtgaggcacgaaacaggga

SEQ ID NO: 257964 - DNA, 25 bp, probe
ggaagcgtgaaggccgagaagcaag

SEQ ID NO: 257965 - DNA, 25 bp, probe
ggaaccgaagccaagtgataaagcc

SEQ ID NO: 257966 - DNA, 25 bp, probe
ggaattgcttatgaaggaaaagcca

SEQ ID NO: 257967 - DNA, 25 bp, probe
ggaatcgtcctctgggaaatcgcca

SEQ ID NO: 257968 - DNA, 25 bp, probe
ggaatcgtcctctgggaaatcgcca

SEQ ID NO: 257969 - DNA, 25 bp, probe
ggaatcgtcctctgggaaatcgcca

SEQ ID NO: 257970 - DNA, 25 bp, probe
ggaatgcaggctgccagatggtggc

SEQ ID NO: 257971 - DNA, 25 bp, probe
ggaagcaggtcaccaagatgctggc

SEQ ID NO: 257972 - DNA, 25 bp, probe
ggaaggctgtcagacaggctggggg

SEQ ID NO: 257973 - DNA, 25 bp, probe
ggaagagctggacgaagccgtggag

SEQ ID NO: 257974 - DNA, 25 bp, probe
ggaagaagctgtcaagagccaggga

SEQ ID NO: 257975 - DNA, 25 bp, probe
ggaaggaggtggaagactgcacttg

SEQ ID NO: 257976 - DNA, 25 bp, probe
ggaaggaggtggaagactgcacttg

SEQ ID NO: 257977 - DNA, 25 bp, probe
ggaatggggtggaacatctgaacca

SEQ ID NO: 257978 - DNA, 25 bp, probe
ggaaggcgagatgagccctgaagag

SEQ ID NO: 257979 - DNA, 25 bp, probe
ggctaggccgagggccttgggagct

SEQ ID NO: 257980 - DNA, 25 bp, probe
ggcaagacggtggagtcgtggcggc

SEQ ID NO: 257981 - DNA, 25 bp, probe
tggaagcccgtggaatcctacggcc

SEQ ID NO: 257982 - DNA, 25 bp, probe
ggaaccacattgatattctactggc

SEQ ID NO: 257983 - DNA, 25 bp, probe
ggaagccacaggcgattctatggtc

SEQ ID NO: 257984 - DNA, 25 bp, probe
tggaagccatagagtacatcgatgc

SEQ ID NO: 257985 - DNA, 25 bp, probe
ggaagccatggaaatacaagtcaaa

SEQ ID NO: 257986 - DNA, 25 bp, probe
ggaagtcggaaacatggtcagaaca

SEQ ID NO: 257987 - DNA, 25 bp, probe
ggaaggggaaacacagctgatgaac

SEQ ID NO: 257988 - DNA, 25 bp, probe
ggcaatgggcgattatttgtttgaa

SEQ ID NO: 257989 - DNA, 25 bp, probe
ggaagagtcatgttttttttctcct

SEQ ID NO: 257990 - DNA, 25 bp, probe
tggaaggtaagttctgtcgttcttt

SEQ ID NO: 257991 - DNA, 25 bp, probe
ggaagagtaggttctcggtacttag

SEQ ID NO: 257992 - DNA, 25 bp, probe
ggaagagtgggttccaagacacctg

SEQ ID NO: 257993 - DNA, 25 bp, probe
ggaagcactaggttggcagagacac

SEQ ID NO: 257994 - DNA, 25 bp, probe
ggaagcactaggatgttcaggcagg

SEQ ID NO: 257995 - DNA, 25 bp, probe
ggaagagaagttgtactggcagggg

SEQ ID NO: 257996 - DNA, 25 bp, probe
ggaagagaagttgtactggcagggg

SEQ ID NO: 257997 - DNA, 25 bp, probe
ggaaggaaggtgggacgtggggatg

SEQ ID NO: 257998 - DNA, 25 bp, probe
ggcaaggacgggcagattggggagg

SEQ ID NO: 257999 - DNA, 25 bp, probe
ggcaaggacgggcagattggggagg

SEQ ID NO: 258000 - DNA, 25 bp, probe
ggcattcaaccggggcaagcgggag

SEQ ID NO: 258001 - DNA, 25 bp, probe
tggattaaccggctgcagagggtca

SEQ ID NO: 258002 - DNA, 25 bp, probe
tggaaagtggcctgtcaagtggtac

SEQ ID NO: 258003 - DNA, 25 bp, probe
tggaagtgggccagtcctggttgtc

SEQ ID NO: 258004 - DNA, 25 bp, probe
ggaagggcagcgacttcctggttga

SEQ ID NO: 258005 - DNA, 25 bp, probe
ggaagggcaggtgtcctacgatgac

SEQ ID NO: 258006 - DNA, 25 bp, probe
ggaagggcgccagatacaaccttgc

SEQ ID NO: 258007 - DNA, 25 bp, probe
ggaatggacccagtgatacaaacct

SEQ ID NO: 258008 - DNA, 25 bp, probe
ggaatggatgtcgctaatcataata

SEQ ID NO: 258009 - DNA, 25 bp, probe
ggaaggtgtttttgtcatgcatgga

SEQ ID NO: 258010 - DNA, 25 bp, probe
ggaatggttgtatatgctctgaagt

SEQ ID NO: 258011 - DNA, 25 bp, probe
ggaaggttcacaacatgcatctaag

SEQ ID NO: 258012 - DNA, 25 bp, probe
ggaaggttcacaacatgcatctaag

SEQ ID NO: 258013 - DNA, 25 bp, probe
ggaatctgatatcaacatatcctag

SEQ ID NO: 258014 - DNA, 25 bp, probe
ggaatatgcattgaagcaaattgaa

SEQ ID NO: 258015 - DNA, 25 bp, probe
ggaagcagtcaccaagataatctga

SEQ ID NO: 258016 - DNA, 25 bp, probe
ggaagcaggccgagagacttgcacc

SEQ ID NO: 258017 - DNA, 25 bp, probe
ggaagcatggggagtgatgtacatc

SEQ ID NO: 258018 - DNA, 25 bp, probe
ggaagccactgtcaatgattagatc

SEQ ID NO: 258019 - DNA, 25 bp, probe
ggaatccatgtgcccaggattatat

SEQ ID NO: 258020 - DNA, 25 bp, probe
ggaagatagatgcccagagaaaatg

SEQ ID NO: 258021 - DNA, 25 bp, probe
ggaagatagatgcccagagaaaatg

SEQ ID NO: 258022 - DNA, 25 bp, probe
ggaagtttgcactgtaacatatgcc

SEQ ID NO: 258023 - DNA, 25 bp, probe
ggaagctttgccattagatctagac

SEQ ID NO: 258024 - DNA, 25 bp, probe
ggaattttccttgtgtgtagctgct

SEQ ID NO: 258025 - DNA, 25 bp, probe
ggaattttccttgtgtgtagctgct

SEQ ID NO: 258026 - DNA, 25 bp, probe
ggaatctatgatgctatctttgata

SEQ ID NO: 258027 - DNA, 25 bp, probe
ggaatcttaacttcatgtgagctat

SEQ ID NO: 258028 - DNA, 25 bp, probe
ggaatttcagccaataggagccagc

SEQ ID NO: 258029 - DNA, 25 bp, probe
ggaatgtccagactgtgggtgtagg

SEQ ID NO: 258030 - DNA, 25 bp, probe
ggcagtttcgagtgggcggaggatt

SEQ ID NO: 258031 - DNA, 25 bp, probe
ggcagttactcctgaggggctgaac

SEQ ID NO: 258032 - DNA, 25 bp, probe
ggcggtaaatctgaagtgggaactt

SEQ ID NO: 258033 - DNA, 25 bp, probe
ggcaggattttcggaagctggggac

SEQ ID NO: 258034 - DNA, 25 bp, probe
ggcggtccttacaagacgggaggca

SEQ ID NO: 258035 - DNA, 25 bp, probe
ggcggtccttacaagacgggaggca

SEQ ID NO: 258036 - DNA, 25 bp, probe
ggctcggctatatcaattccgggtt

SEQ ID NO: 258037 - DNA, 25 bp, probe
ggcctgaccaaaaatatactgggtt

SEQ ID NO: 258038 - DNA, 25 bp, probe
ggcagcgccccaaagttttgggtct

SEQ ID NO: 258039 - DNA, 25 bp, probe
ggccccctaaagacctgggctacat

SEQ ID NO: 258040 - DNA, 25 bp, probe
ggcgcccagtaacctttggaaacat

SEQ ID NO: 258041 - DNA, 25 bp, probe
ggctgggggttggtcttggaaacag

SEQ ID NO: 258042 - DNA, 25 bp, probe
ggcttgggcctaggctgcattgaaa

SEQ ID NO: 258043 - DNA, 25 bp, probe
ggcgattggctccaggccattaaaa

SEQ ID NO: 258044 - DNA, 25 bp, probe
ggaaggcgcttcaccatcaagataa

SEQ ID NO: 258045 - DNA, 25 bp, probe
ggaaggccttcggcctacaattcca

SEQ ID NO: 258046 - DNA, 25 bp, probe
ggaagtgttatcaccaacacagtgc

SEQ ID NO: 258047 - DNA, 25 bp, probe
ggaagttgtccgaacagacagcctg

SEQ ID NO: 258048 - DNA, 25 bp, probe
ggaagttgtccgaacagacagcctg

SEQ ID NO: 258049 - DNA, 25 bp, probe
ggaagtttgcgagggctgcacagtc

SEQ ID NO: 258050 - DNA, 25 bp, probe
ggaagtttgcgagggctgcacagtc

SEQ ID NO: 258051 - DNA, 25 bp, probe
ggaagcatttcgcgatggacagact

SEQ ID NO: 258052 - DNA, 25 bp, probe
ggaagtcttctgctgtgctggaaat

SEQ ID NO: 258053 - DNA, 25 bp, probe
ggaagaggcggccatgctgtggcca

SEQ ID NO: 258054 - DNA, 25 bp, probe
ggaatgtagggcctgcatggagaag

SEQ ID NO: 258055 - DNA, 25 bp, probe
ggaattctgattgctgaggtgggtg

SEQ ID NO: 258056 - DNA, 25 bp, probe
ggaatgcctttcagggtgtggtcta

SEQ ID NO: 258057 - DNA, 25 bp, probe
ggaatctcttttatggagcttgctc

SEQ ID NO: 258058 - DNA, 25 bp, probe
ggcaactctgttcaatgggatcttc

SEQ ID NO: 258059 - DNA, 25 bp, probe
ggaagctcttaattatgggagatac

SEQ ID NO: 258060 - DNA, 25 bp, probe
ggaatctgctttgttgggagtgatg

SEQ ID NO: 258061 - DNA, 25 bp, probe
ggcaactttttcctgaatgagtatc

SEQ ID NO: 258062 - DNA, 25 bp, probe
ggaagcttgtctgctctatagaaat

SEQ ID NO: 258063 - DNA, 25 bp, probe
ggaaggctactggcattaattatta

SEQ ID NO: 258064 - DNA, 25 bp, probe
ggaaggtaccgatatcattgagcta

SEQ ID NO: 258065 - DNA, 25 bp, probe
ggaagtgtacacctaatcactggag

SEQ ID NO: 258066 - DNA, 25 bp, probe
ggaagtggaacccaagcaatgctga

SEQ ID NO: 258067 - DNA, 25 bp, probe
ggaagtgtggaagagcagttgaaat

SEQ ID NO: 258068 - DNA, 25 bp, probe
ggaagaaagagaacatgcaattgaa

SEQ ID NO: 258069 - DNA, 25 bp, probe
ggaagacaagagccaagcaactgag

SEQ ID NO: 258070 - DNA, 25 bp, probe
ggaagcaataagccattctaagagc

SEQ ID NO: 258071 - DNA, 25 bp, probe
ggaagcatgatatgtactatagtga

SEQ ID NO: 258072 - DNA, 25 bp, probe
ggaagagaacgcgcttgatggatag

SEQ ID NO: 258073 - DNA, 25 bp, probe
ggaagaagatttgctggtagaagtc

SEQ ID NO: 258074 - DNA, 25 bp, probe
ggaagaatatttgccctagaatgcc

SEQ ID NO: 258075 - DNA, 25 bp, probe
ggaagattatgatgcctcctccaag

SEQ ID NO: 258076 - DNA, 25 bp, probe
ggaagatttgtctacttgctccact

SEQ ID NO: 258077 - DNA, 25 bp, probe
ggaagatttgtctacttgctccact

SEQ ID NO: 258078 - DNA, 25 bp, probe
ggaagcatgttttatagtgttcatc

SEQ ID NO: 258079 - DNA, 25 bp, probe
ggaaggatttcactcagctgttccc

SEQ ID NO: 258080 - DNA, 25 bp, probe
ggaagtgactgtgggatgtttgcct

SEQ ID NO: 258081 - DNA, 25 bp, probe
ggaagaagctgagtcgcacttctcc

SEQ ID NO: 258082 - DNA, 25 bp, probe
ggaagattgctgctcagaatatcat

SEQ ID NO: 258083 - DNA, 25 bp, probe
ggaagactctgaacaatgacatcat

SEQ ID NO: 258084 - DNA, 25 bp, probe
ggaagactggcaccatgaggccatc

SEQ ID NO: 258085 - DNA, 25 bp, probe
ggcagctatttccacatggctgcct

SEQ ID NO: 258086 - DNA, 25 bp, probe
ggcagcattccatactgcctcatca

SEQ ID NO: 258087 - DNA, 25 bp, probe
ggaattccaagggccacatgcgagt

SEQ ID NO: 258088 - DNA, 25 bp, probe
ggaagtccttaggtgcagtgcggct

SEQ ID NO: 258089 - DNA, 25 bp, probe
ggaatgatgcgtgatcgtgatggaa

SEQ ID NO: 258090 - DNA, 25 bp, probe
ggaatgatgcgtgatcgtgatggaa

SEQ ID NO: 258091 - DNA, 25 bp, probe
ggaatgcatttccatcagtgaagaa

SEQ ID NO: 258092 - DNA, 25 bp, probe
ggaatatattcacgagcatgagtat

SEQ ID NO: 258093 - DNA, 25 bp, probe
ggaatatttaaacagtagcttagca

SEQ ID NO: 258094 - DNA, 25 bp, probe
ggaatatgtatataccaggttttag

SEQ ID NO: 258095 - DNA, 25 bp, probe
ggaagatgtttatgccaggcctaga

SEQ ID NO: 258096 - DNA, 25 bp, probe
ggaagatgtttatgccaggcctaga

SEQ ID NO: 258097 - DNA, 25 bp, probe
ggaagaatcctgtgacaagcactta

SEQ ID NO: 258098 - DNA, 25 bp, probe
ggaagtttctggccatcaatgccac

SEQ ID NO: 258099 - DNA, 25 bp, probe
ggaagtttctggccatcaatgccac

SEQ ID NO: 258100 - DNA, 25 bp, probe
ggaagcatgtttacaccaatgccaa

SEQ ID NO: 258101 - DNA, 25 bp, probe
ggaatagtacttactgcaatgctcg

SEQ ID NO: 258102 - DNA, 25 bp, probe
ggaatagctattctcaatacatctg

SEQ ID NO: 258103 - DNA, 25 bp, probe
ggaatagctattctcaatacatctg

SEQ ID NO: 258104 - DNA, 25 bp, probe
ggaatcatgttgctgtaacagttgg

SEQ ID NO: 258105 - DNA, 25 bp, probe
ggaagcagttcacttaaaggccatg

SEQ ID NO: 258106 - DNA, 25 bp, probe
ggaagaggtaatcaagagaggaggt

SEQ ID NO: 258107 - DNA, 25 bp, probe
ggaaggggactcatcagaagtggga

SEQ ID NO: 258108 - DNA, 25 bp, probe
ggcaaggtacctctcaagagggcct

SEQ ID NO: 258109 - DNA, 25 bp, probe
ggaaggtgtccagttcaagagaacc

SEQ ID NO: 258110 - DNA, 25 bp, probe
ggaaggattacggccaggagataca

SEQ ID NO: 258111 - DNA, 25 bp, probe
ggaaggatgaagggcccgagaacat

SEQ ID NO: 258112 - DNA, 25 bp, probe
ggaaggagataggtggctcctaaaa

SEQ ID NO: 258113 - DNA, 25 bp, probe
ggaagaggcatagggagtccttaaa

SEQ ID NO: 258114 - DNA, 25 bp, probe
ggaagaaagcaaggcagtccattca

SEQ ID NO: 258115 - DNA, 25 bp, probe
ggaagaagaaacgagctgtcattat

SEQ ID NO: 258116 - DNA, 25 bp, probe
ggaagaaaaacttcattgctgtcag

SEQ ID NO: 258117 - DNA, 25 bp, probe
ggaatagaagcccttgttgctgtag

SEQ ID NO: 258118 - DNA, 25 bp, probe
ggaatcaggaatcttaacttcatgt

SEQ ID NO: 258119 - DNA, 25 bp, probe
ggaatcaggcttggttcattttaat

SEQ ID NO: 258120 - DNA, 25 bp, probe
ggaatacctttgcatcacatcttca

SEQ ID NO: 258121 - DNA, 25 bp, probe
ggaatcttacttctccacagtgaag

SEQ ID NO: 258122 - DNA, 25 bp, probe
tggaatctttctaaccctagctaac

SEQ ID NO: 258123 - DNA, 25 bp, probe
tggaatctttctaaccctagctaac

SEQ ID NO: 258124 - DNA, 25 bp, probe
tgaaacttgaatgtcccttccaact

SEQ ID NO: 258125 - DNA, 25 bp, probe
ggaatgcttaatggacctttccagc

SEQ ID NO: 258126 - DNA, 25 bp, probe
tggaatttacagtaactgtccccaa

SEQ ID NO: 258127 - DNA, 25 bp, probe
ggaattcgccaataggcggacgaga

SEQ ID NO: 258128 - DNA, 25 bp, probe
ggaattcgccaataggcggacgaga

SEQ ID NO: 258129 - DNA, 25 bp, probe
ggaatggccaccactgggaaggagg

SEQ ID NO: 258130 - DNA, 25 bp, probe
ggaatgggtcctatgggaacagagg

SEQ ID NO: 258131 - DNA, 25 bp, probe
ggaatgtggtttattgagcaaagga

SEQ ID NO: 258132 - DNA, 25 bp, probe
ggaatcgtgattattgtgatacaag

SEQ ID NO: 258133 - DNA, 25 bp, probe
ggaatcgtgattattgtgatacaag

SEQ ID NO: 258134 - DNA, 25 bp, probe
ggaatcctgtttgctgagtacaact

SEQ ID NO: 258135 - DNA, 25 bp, probe
ggaattcttcggcctgagtaactgt

SEQ ID NO: 258136 - DNA, 25 bp, probe
ggaattctacctggagaccagagct

SEQ ID NO: 258137 - DNA, 25 bp, probe
ggaattctacattgggacccagttg

SEQ ID NO: 258138 - DNA, 25 bp, probe
ggaattcaagcgtgaacccatattg

SEQ ID NO: 258139 - DNA, 25 bp, probe
ggaattcaagcgtgaacccatattg

SEQ ID NO: 258140 - DNA, 25 bp, probe
ggaattgaacgactacccagaagtg

SEQ ID NO: 258141 - DNA, 25 bp, probe
ggaagtggacggcaccgctaagaag

SEQ ID NO: 258142 - DNA, 25 bp, probe
ggaagtggacggcaccgctaagaag

SEQ ID NO: 258143 - DNA, 25 bp, probe
ggaagtggcatggccatgaccctga

SEQ ID NO: 258144 - DNA, 25 bp, probe
ggaagtcagctgttctggcacagtg

SEQ ID NO: 258145 - DNA, 25 bp, probe
tggaagtcgtttcaggacatggggc

SEQ ID NO: 258146 - DNA, 25 bp, probe
tggaagtcgtttcaggacatggggc

SEQ ID NO: 258147 - DNA, 25 bp, probe
ggaagggttctgccagagacgggcc

SEQ ID NO: 258148 - DNA, 25 bp, probe
ggaatggaggtgggagggcgggtct

SEQ ID NO: 258149 - DNA, 25 bp, probe
ggaatgaggagtgggggggagtgct

SEQ ID NO: 258150 - DNA, 25 bp, probe
ggaatgaggagtggttcctggtggg

SEQ ID NO: 258151 - DNA, 25 bp, probe
ggcaatggggtgtggcactttgggg

SEQ ID NO: 258152 - DNA, 25 bp, probe
ggcaatggggtgtggcactttgggg

SEQ ID NO: 258153 - DNA, 25 bp, probe
ggcaagggaatagcgacttagtgtt

SEQ ID NO: 258154 - DNA, 25 bp, probe
ggaagttagtgatccacttgaggtt

SEQ ID NO: 258155 - DNA, 25 bp, probe
ggcagatgttgagtgccacccagta

SEQ ID NO: 258156 - DNA, 25 bp, probe
ggcaagttcacagctcaccattgcc

SEQ ID NO: 258157 - DNA, 25 bp, probe
ggaatattcactttacctagcaggg

SEQ ID NO: 258158 - DNA, 25 bp, probe
ggaagactacttcactgctacagag

SEQ ID NO: 258159 - DNA, 25 bp, probe
ggaagactacttcactgctacagag

SEQ ID NO: 258160 - DNA, 25 bp, probe
ggaagactcattgaacatatgcaag

SEQ ID NO: 258161 - DNA, 25 bp, probe
ggaagagtctggatctctgatgatc

SEQ ID NO: 258162 - DNA, 25 bp, probe
ggaagagactgtatccttcacaggg

SEQ ID NO: 258163 - DNA, 25 bp, probe
ggaagagactgtgatcccagaagac

SEQ ID NO: 258164 - DNA, 25 bp, probe
ggaaggatcttatgctacagtatac

SEQ ID NO: 258165 - DNA, 25 bp, probe
ggaaggacttatggtatcagatacc

SEQ ID NO: 258166 - DNA, 25 bp, probe
ggaaggacttatggtatcagatacc

SEQ ID NO: 258167 - DNA, 25 bp, probe
ggaagaggcttaagtatgttcattt

SEQ ID NO: 258168 - DNA, 25 bp, probe
ggaatatgacttaagtatctcctaa

SEQ ID NO: 258169 - DNA, 25 bp, probe
ggcaaagaatctgttattactagca

SEQ ID NO: 258170 - DNA, 25 bp, probe
ggcaaagaatctgttattactagca

SEQ ID NO: 258171 - DNA, 25 bp, probe
ggaaggagatctttatctttctggt

SEQ ID NO: 258172 - DNA, 25 bp, probe
ggaaggcagctggtatattcagtct

SEQ ID NO: 258173 - DNA, 25 bp, probe
ggaatgcatgccagtaatgtatttt

SEQ ID NO: 258174 - DNA, 25 bp, probe
ggaatatagtcagtaatttatctta

SEQ ID NO: 258175 - DNA, 25 bp, probe
ggaatagtgataggagttttcttat

SEQ ID NO: 258176 - DNA, 25 bp, probe
ggaatcagtgatttcagattgtttg

SEQ ID NO: 258177 - DNA, 25 bp, probe
ggaagtggattttgcaggttggctc

SEQ ID NO: 258178 - DNA, 25 bp, probe
ggaagatgccatatgagagatttac

SEQ ID NO: 258179 - DNA, 25 bp, probe
ggaatacacatcctgaagatctcgt

SEQ ID NO: 258180 - DNA, 25 bp, probe
ggcaagagcacaaaatgagttcaga

SEQ ID NO: 258181 - DNA, 25 bp, probe
ggcaagtaatccaggtatgagaatc

SEQ ID NO: 258182 - DNA, 25 bp, probe
ggaaggaatgcctgatcttgcccat

SEQ ID NO: 258183 - DNA, 25 bp, probe
ggaattgaagtctgcagccaggcct

SEQ ID NO: 258184 - DNA, 25 bp, probe
ggaattgaagtctgcagccaggcct

SEQ ID NO: 258185 - DNA, 25 bp, probe
ggaatgtgaggatcgcttcacgcct

SEQ ID NO: 258186 - DNA, 25 bp, probe
ggaattggtaaacatcatgttcctg

SEQ ID NO: 258187 - DNA, 25 bp, probe
ggaataagtatgaaaacagttctct

SEQ ID NO: 258188 - DNA, 25 bp, probe
ggaataatgaataaccactctaatc

SEQ ID NO: 258189 - DNA, 25 bp, probe
ggaatggatgaaagccacatgtctg

SEQ ID NO: 258190 - DNA, 25 bp, probe
ggaatgagatggagctcacggctta

SEQ ID NO: 258191 - DNA, 25 bp, probe
ggaagagggaactacggcgagagag

SEQ ID NO: 258192 - DNA, 25 bp, probe
ggaagagggagggagggaggagaga

SEQ ID NO: 258193 - DNA, 25 bp, probe
ggaagaggaagcgtggcaggagagg

SEQ ID NO: 258194 - DNA, 25 bp, probe
ggaagaggacatcatcagcaggata

SEQ ID NO: 258195 - DNA, 25 bp, probe
ggaaggccatgaccacagtgaaagt

SEQ ID NO: 258196 - DNA, 25 bp, probe
ggaaggccagctcaccgtgagcagg

SEQ ID NO: 258197 - DNA, 25 bp, probe
ggaaggctggcatcatccagtgagg

SEQ ID NO: 258198 - DNA, 25 bp, probe
ggaatactggccatgcctggagaca

SEQ ID NO: 258199 - DNA, 25 bp, probe
ggaatactgcacctataaaacacat

SEQ ID NO: 258200 - DNA, 25 bp, probe
ggcacatttcacatatcgactacct

SEQ ID NO: 258201 - DNA, 25 bp, probe
ggaatctctccatctgtaattcctc

SEQ ID NO: 258202 - DNA, 25 bp, probe
tggaagctggcctaattgaaccccc

SEQ ID NO: 258203 - DNA, 25 bp, probe
tggaagctggcctaattgaaccccc

SEQ ID NO: 258204 - DNA, 25 bp, probe
ggaaggggctagactcaagccggct

SEQ ID NO: 258205 - DNA, 25 bp, probe
ggaagtaagaacacatcatgccagg

SEQ ID NO: 258206 - DNA, 25 bp, probe
ggaagtaagaacacatcatgccagg

SEQ ID NO: 258207 - DNA, 25 bp, probe
ggaagatgagaattccaccccagct

SEQ ID NO: 258208 - DNA, 25 bp, probe
ggaagaggcgattcaacacaccatt

SEQ ID NO: 258209 - DNA, 25 bp, probe
ggaagggcaataccagcagcagcct

SEQ ID NO: 258210 - DNA, 25 bp, probe
ggaagtgagaaaccgctctgccttc

SEQ ID NO: 258211 - DNA, 25 bp, probe
ggaagagggcaggggctgcatcctc

SEQ ID NO: 258212 - DNA, 25 bp, probe
ggaagaggctgctggttatgcccag

SEQ ID NO: 258213 - DNA, 25 bp, probe
ggcaaacttcattgttaaccacatg

SEQ ID NO: 258214 - DNA, 25 bp, probe
ggcaaacttcattgttaaccacatg

SEQ ID NO: 258215 - DNA, 25 bp, probe
ggcaaattgtcgcctttacaacgcc

SEQ ID NO: 258216 - DNA, 25 bp, probe
ggaagtatgagtgctgattcaaacc

SEQ ID NO: 258217 - DNA, 25 bp, probe
ggcaagcatatggtctttggcaagc

SEQ ID NO: 258218 - DNA, 25 bp, probe
ggcaacattgaagttcgatcatggt

SEQ ID NO: 258219 - DNA, 25 bp, probe
ggaatatgatgatgtcacaatcaag

SEQ ID NO: 258220 - DNA, 25 bp, probe
ggaatagcatgttagcagcagtgaa

SEQ ID NO: 258221 - DNA, 25 bp, probe
ggaatagcatgttagcagcagtgaa

SEQ ID NO: 258222 - DNA, 25 bp, probe
ggaatgatcatgaatgcaaagggaa

SEQ ID NO: 258223 - DNA, 25 bp, probe
ggaatccctatgtcaagtgagaaaa

SEQ ID NO: 258224 - DNA, 25 bp, probe
ggaatccctatgtcaagtgagaaaa

SEQ ID NO: 258225 - DNA, 25 bp, probe
ggcaatcccggctttgatgagcaga

SEQ ID NO: 258226 - DNA, 25 bp, probe
ggcaatcccggctttgatgagcaga

SEQ ID NO: 258227 - DNA, 25 bp, probe
ggaatccctgctgattgtgcagaac

SEQ ID NO: 258228 - DNA, 25 bp, probe
ggaatccacacttaatataattcgc

SEQ ID NO: 258229 - DNA, 25 bp, probe
ggaatctcactcttgtttttcacag

SEQ ID NO: 258230 - DNA, 25 bp, probe
ggcaattgaatccctttttgatcat

SEQ ID NO: 258231 - DNA, 25 bp, probe
ggaatatgaccgttatgttgctatc

SEQ ID NO: 258232 - DNA, 25 bp, probe
ggaagatcctggtgcattgtgctgt

SEQ ID NO: 258233 - DNA, 25 bp, probe
ggaagatcctggtgcattgtgctgt

SEQ ID NO: 258234 - DNA, 25 bp, probe
ggaagatcctggtgcattgtgctgt

SEQ ID NO: 258235 - DNA, 25 bp, probe
ggaagatcctggtgcattgtgctgt

SEQ ID NO: 258236 - DNA, 25 bp, probe
ggaagtggcatgcaacatggagctg

SEQ ID NO: 258237 - DNA, 25 bp, probe
ggaagtcgagacaacatgagtgtga

SEQ ID NO: 258238 - DNA, 25 bp, probe
ggaaggccatcaatgcctgagggca

SEQ ID NO: 258239 - DNA, 25 bp, probe
ggaaggcaccctagcagagggacag

SEQ ID NO: 258240 - DNA, 25 bp, probe
ggcaaggaccgaactaggaaatggc

SEQ ID NO: 258241 - DNA, 25 bp, probe
ggcaaagagggcaatcaagacaaca

SEQ ID NO: 258242 - DNA, 25 bp, probe
ggaatagagctagatgggatcagaa

SEQ ID NO: 258243 - DNA, 25 bp, probe
ggaataactcacagggatattaaac

SEQ ID NO: 258244 - DNA, 25 bp, probe
ggaatacctatcagagtatatacac

SEQ ID NO: 258245 - DNA, 25 bp, probe
ggaaggcactacacagtttactttt

SEQ ID NO: 258246 - DNA, 25 bp, probe
ggaaggcactacacagtttactttt

SEQ ID NO: 258247 - DNA, 25 bp, probe
ggcaaggccgaagtcagcgagtttt

SEQ ID NO: 258248 - DNA, 25 bp, probe
ggcaaggcggagatcctgaagtaca

SEQ ID NO: 258249 - DNA, 25 bp, probe
ggaaggagtgttttctacaggatcc

SEQ ID NO: 258250 - DNA, 25 bp, probe
ggaagtggtgcagtatatcaagagg

SEQ ID NO: 258251 - DNA, 25 bp, probe
ggaagtggagatcatggcaacagag

SEQ ID NO: 258252 - DNA, 25 bp, probe
ggaagtggagatcatggcaacagag

SEQ ID NO: 258253 - DNA, 25 bp, probe
ggaagtgtgataaaagagaggagtt

SEQ ID NO: 258254 - DNA, 25 bp, probe
ggaagatttctattataaggaattt

SEQ ID NO: 258255 - DNA, 25 bp, probe
ggaagatgctgcgtatccagaagga

SEQ ID NO: 258256 - DNA, 25 bp, probe
ggcaatgatgtcgatgaccagttga

SEQ ID NO: 258257 - DNA, 25 bp, probe
ggaatgatctattaccaggtgacta

SEQ ID NO: 258258 - DNA, 25 bp, probe
ggaatgactgtaggccgtgtgttgg

SEQ ID NO: 258259 - DNA, 25 bp, probe
ggaagattgtgggcactctgtgtgc

SEQ ID NO: 258260 - DNA, 25 bp, probe
ggaagattggcatagcagctgtggt

SEQ ID NO: 258261 - DNA, 25 bp, probe
ggaagatgtctatgaactgattgaa

SEQ ID NO: 258262 - DNA, 25 bp, probe
ggaagatgtgaccgcaagtgataaa

SEQ ID NO: 258263 - DNA, 25 bp, probe
ggcaagtgtgacccacagtgactct

SEQ ID NO: 258264 - DNA, 25 bp, probe
ggcaagtgtgacccacagtgactct

SEQ ID NO: 258265 - DNA, 25 bp, probe
ggcactgggagtagacacatgaaca

SEQ ID NO: 258266 - DNA, 25 bp, probe
ggcacattggaaagcacactcagaa

SEQ ID NO: 258267 - DNA, 25 bp, probe
ggaattcgtgcaggaagccatgaaa

SEQ ID NO: 258268 - DNA, 25 bp, probe
ggaattcgtgcaggaagccatgaaa

SEQ ID NO: 258269 - DNA, 25 bp, probe
ggaatgatggatgagtagccaagga

SEQ ID NO: 258270 - DNA, 25 bp, probe
ggaatgatggatgagtagccaagga

SEQ ID NO: 258271 - DNA, 25 bp, probe
ggaatgtgatgagcagccaggaagt

SEQ ID NO: 258272 - DNA, 25 bp, probe
ggcatgaggtcagaccaggatttgc

SEQ ID NO: 258273 - DNA, 25 bp, probe
ggcaaaggcagggccacttttgaag

SEQ ID NO: 258274 - DNA, 25 bp, probe
ggcaaatggagggccgcttcacagg

SEQ ID NO: 258275 - DNA, 25 bp, probe
ggcaaatggagggccgcttcacagg

SEQ ID NO: 258276 - DNA, 25 bp, probe
ggaagattgaggttcctggacagat

SEQ ID NO: 258277 - DNA, 25 bp, probe
ggaagttctggactgccagcagaca

SEQ ID NO: 258278 - DNA, 25 bp, probe
ggaagttcacgactgcgagtgacgt

SEQ ID NO: 258279 - DNA, 25 bp, probe
ggaaggctgaggaaggaggatcgct

SEQ ID NO: 258280 - DNA, 25 bp, probe
ggaagggagggagcagccactcctc

SEQ ID NO: 258281 - DNA, 25 bp, probe
ggaatgggaggaaccaggccacatt

SEQ ID NO: 258282 - DNA, 25 bp, probe
ggaaggagattgggctcgctccaca

SEQ ID NO: 258283 - DNA, 25 bp, probe
ggaaggactgacagaagcatccata

SEQ ID NO: 258284 - DNA, 25 bp, probe
ggaaggacagacatcaagtgccaga

SEQ ID NO: 258285 - DNA, 25 bp, probe
ggaaggcaaagcatcacatgtatta

SEQ ID NO: 258286 - DNA, 25 bp, probe
ggaagtcaaagttctcatggtcaga

SEQ ID NO: 258287 - DNA, 25 bp, probe
ggaagtacaaggactcatctgtggt

SEQ ID NO: 258288 - DNA, 25 bp, probe
ggaagtacaaggactcatctgtggt

SEQ ID NO: 258289 - DNA, 25 bp, probe
ggaattataaagtcatctcttctct

SEQ ID NO: 258290 - DNA, 25 bp, probe
ggaatcagaagatgaccctgtcata

SEQ ID NO: 258291 - DNA, 25 bp, probe
ggcgacaaaagtgctaggattacag

SEQ ID NO: 258292 - DNA, 25 bp, probe
ggaatcaaaagggcagtggtttcac

SEQ ID NO: 258293 - DNA, 25 bp, probe
ggaatggaaacttgaggtcacttac

SEQ ID NO: 258294 - DNA, 25 bp, probe
ggaatggaccaatgaggtggtatca

SEQ ID NO: 258295 - DNA, 25 bp, probe
ggaatgaatccaagtgaaggctttc

SEQ ID NO: 258296 - DNA, 25 bp, probe
ggcaagaacgcaagggggcaagtcc

SEQ ID NO: 258297 - DNA, 25 bp, probe
ggcaagaacgcaagggggcaagtcc

SEQ ID NO: 258298 - DNA, 25 bp, probe
ggcactaacctgcttgggtatgcag

SEQ ID NO: 258299 - DNA, 25 bp, probe
ggcactaacctgcttgggtatgcag

SEQ ID NO: 258300 - DNA, 25 bp, probe
ggcagcaaacctcctgggtttgaaa

SEQ ID NO: 258301 - DNA, 25 bp, probe
ggcagcaaacctcctgggtttgaaa

SEQ ID NO: 258302 - DNA, 25 bp, probe
ggcagtagtggacagggttggaaac

SEQ ID NO: 258303 - DNA, 25 bp, probe
ggcgacgatgaacatgccgttggtt

SEQ ID NO: 258304 - DNA, 25 bp, probe
ggaaggctgtgaaagccactctggt

SEQ ID NO: 258305 - DNA, 25 bp, probe
ggaaggctgtgaaagccactctggt

SEQ ID NO: 258306 - DNA, 25 bp, probe
ggaagtgtggcaggggccatgtggt

SEQ ID NO: 258307 - DNA, 25 bp, probe
ggaagtggccaggcggatggtgagc

SEQ ID NO: 258308 - DNA, 25 bp, probe
ggaaggaatcagcctgtgtggggtg

SEQ ID NO: 258309 - DNA, 25 bp, probe
ggaaggagaagactgggctagggag

SEQ ID NO: 258310 - DNA, 25 bp, probe
ggaattgcagaaacagggccgccag

SEQ ID NO: 258311 - DNA, 25 bp, probe
ggaagtcagagtgcagggccagcaa

SEQ ID NO: 258312 - DNA, 25 bp, probe
ggaagtgccagtgcagcggcagtgc

SEQ ID NO: 258313 - DNA, 25 bp, probe
ggaagtgacagtgacagtgacagtg

SEQ ID NO: 258314 - DNA, 25 bp, probe
ggcaatggaacctacggacaggtgt

SEQ ID NO: 258315 - DNA, 25 bp, probe
ggaattgaaccgatggaggctgtat

SEQ ID NO: 258316 - DNA, 25 bp, probe
ggaattcccagtaagtgcgggtcat

SEQ ID NO: 258317 - DNA, 25 bp, probe
ggaattgaccgaaagctctatgttt

SEQ ID NO: 258318 - DNA, 25 bp, probe
ggaatatgcccgttggtctatgatt

SEQ ID NO: 258319 - DNA, 25 bp, probe
ggaatcatgatctgactttaattgt

SEQ ID NO: 258320 - DNA, 25 bp, probe
ggaatatattggccttctacagcta

SEQ ID NO: 258321 - DNA, 25 bp, probe
ggcaatttggggctcaaagtgaggg

SEQ ID NO: 258322 - DNA, 25 bp, probe
ggaatggggggcacacagagtgagc

SEQ ID NO: 258323 - DNA, 25 bp, probe
ggcagtacgggtgaccgagtgcagc

SEQ ID NO: 258324 - DNA, 25 bp, probe
ggaatccggagtgttgggacagcgg

SEQ ID NO: 258325 - DNA, 25 bp, probe
ggcacccgaggcattatttgaccgg

SEQ ID NO: 258326 - DNA, 25 bp, probe
ggctcccggggggaatctgaagtgg

SEQ ID NO: 258327 - DNA, 25 bp, probe
ggctcccagggtttaatgtggaatt

SEQ ID NO: 258328 - DNA, 25 bp, probe
ggctcccagggtttaatgtggaatt

SEQ ID NO: 258329 - DNA, 25 bp, probe
ggctgtccacgtacttaatttactt

SEQ ID NO: 258330 - DNA, 25 bp, probe
tggtatcaaagtactttacttgggt

SEQ ID NO: 258331 - DNA, 25 bp, probe
ggaatacaactgactttatgatatg

SEQ ID NO: 258332 - DNA, 25 bp, probe
ggaatgccagggacattttcaagac

SEQ ID NO: 258333 - DNA, 25 bp, probe
ggaattcagggcactcatgatccag

SEQ ID NO: 258334 - DNA, 25 bp, probe
ggaattcagggcactcatgatccag

SEQ ID NO: 258335 - DNA, 25 bp, probe
ggaattgggagcacgatgactctga

SEQ ID NO: 258336 - DNA, 25 bp, probe
ggaatacgtggaaggtacgctcact

SEQ ID NO: 258337 - DNA, 25 bp, probe
ggaatgtctgggaagttactctcat

SEQ ID NO: 258338 - DNA, 25 bp, probe
ggaatgtctgtaaattctaatactt

SEQ ID NO: 258339 - DNA, 25 bp, probe
ggaagtctgtttttatcaatatgat

SEQ ID NO: 258340 - DNA, 25 bp, probe
ggcaagatctgtttttgctttgtgt

SEQ ID NO: 258341 - DNA, 25 bp, probe
tggacgacttcatccgggaggtcaa

SEQ ID NO: 258342 - DNA, 25 bp, probe
tggagagaagtctttccggaggtca

SEQ ID NO: 258343 - DNA, 25 bp, probe
ggaatgaagggtcccgtggctgtca

SEQ ID NO: 258344 - DNA, 25 bp, probe
ggaataatggacgccgctggcagtc

SEQ ID NO: 258345 - DNA, 25 bp, probe
ggcactgaaggaggcgtccgagagt

SEQ ID NO: 258346 - DNA, 25 bp, probe
ggcactaaccaggctgtatctggac

SEQ ID NO: 258347 - DNA, 25 bp, probe
ggcactaaccaggctgtatctggac

SEQ ID NO: 258348 - DNA, 25 bp, probe
ggcaaaacgcagtctgtacaaaaaa

SEQ ID NO: 258349 - DNA, 25 bp, probe
ggcagacaaggcccgttacgaaaga

SEQ ID NO: 258350 - DNA, 25 bp, probe
ggcacacaaggacaactaagggcag

SEQ ID NO: 258351 - DNA, 25 bp, probe
ggcacacaaggacaactaagggcag

SEQ ID NO: 258352 - DNA, 25 bp, probe
ggcaagcacggaacaagctgagacg

SEQ ID NO: 258353 - DNA, 25 bp, probe
ggaatcacctgaaacagcttccaga

SEQ ID NO: 258354 - DNA, 25 bp, probe
ggaatatcctgatggaggctccaca

SEQ ID NO: 258355 - DNA, 25 bp, probe
ggaattgcctgctggggtgatgcag

SEQ ID NO: 258356 - DNA, 25 bp, probe
ggaattgcctgctggggtgatgcag

SEQ ID NO: 258357 - DNA, 25 bp, probe
ggaaggcctggagggggatgagtcc

SEQ ID NO: 258358 - DNA, 25 bp, probe
ggaaggcagggaggaggcagagaag

SEQ ID NO: 258359 - DNA, 25 bp, probe
ggcaaggactaagggctatgacaaa

SEQ ID NO: 258360 - DNA, 25 bp, probe
ggaatctttacaggactataagaat

SEQ ID NO: 258361 - DNA, 25 bp, probe
ggcaactttatgcgaaatccaaatc

SEQ ID NO: 258362 - DNA, 25 bp, probe
ggcaaattcaggcgaattccatacc

SEQ ID NO: 258363 - DNA, 25 bp, probe
ggcaaggccaggcggaaggtgaccg

SEQ ID NO: 258364 - DNA, 25 bp, probe
ggaaggccagaggttgaaagtgatc

SEQ ID NO: 258365 - DNA, 25 bp, probe
ggaaggtctccatttgatattgttg

SEQ ID NO: 258366 - DNA, 25 bp, probe
ggaaggactccatttgatactgttg

SEQ ID NO: 258367 - DNA, 25 bp, probe
ggcgacgacccattcgaacgtctgc

SEQ ID NO: 258368 - DNA, 25 bp, probe
ggcagaagatgtcattcgacacgga

SEQ ID NO: 258369 - DNA, 25 bp, probe
ggcagaaagctgcagtgccacctga

SEQ ID NO: 258370 - DNA, 25 bp, probe
ggcaataagccatggtaccagggtt

SEQ ID NO: 258371 - DNA, 25 bp, probe
ggcaaaagttggctatccagagttt

SEQ ID NO: 258372 - DNA, 25 bp, probe
ggcaactgtgttacctttcaagttt

SEQ ID NO: 258373 - DNA, 25 bp, probe
ggcacctgttaaacttggaggcttt

SEQ ID NO: 258374 - DNA, 25 bp, probe
ggcacactgctcagtgactcgagca

SEQ ID NO: 258375 - DNA, 25 bp, probe
ggcacactgctcagtgactcgagca

SEQ ID NO: 258376 - DNA, 25 bp, probe
ggcaatgatctcagggctcagtggc

SEQ ID NO: 258377 - DNA, 25 bp, probe
ggcaaatcttgccgttatcatggcg

SEQ ID NO: 258378 - DNA, 25 bp, probe
ggcaattttgcactgtgtggctacg

SEQ ID NO: 258379 - DNA, 25 bp, probe
ggaatgcttcacatatgtcctcaag

SEQ ID NO: 258380 - DNA, 25 bp, probe
ggaatatgacagcacttcagccaag

SEQ ID NO: 258381 - DNA, 25 bp, probe
ggaatatgacagcacttcagccaag

SEQ ID NO: 258382 - DNA, 25 bp, probe
ggaatatgaagccatctacctagca

SEQ ID NO: 258383 - DNA, 25 bp, probe
ggaatcagaagcctgtggtcaaagt

SEQ ID NO: 258384 - DNA, 25 bp, probe
ggaatctgaatcttgtggtctgagg

SEQ ID NO: 258385 - DNA, 25 bp, probe
ggaatggcatacatcgagcggaaga

SEQ ID NO: 258386 - DNA, 25 bp, probe
ggcaaggctgtcaattacaggaagt

SEQ ID NO: 258387 - DNA, 25 bp, probe
ggcaaggcagtagtggacagggttg

SEQ ID NO: 258388 - DNA, 25 bp, probe
ggaatgggctaacacaggagatgat

SEQ ID NO: 258389 - DNA, 25 bp, probe
ggaaggtgctaatctttgctgtctt

SEQ ID NO: 258390 - DNA, 25 bp, probe
ggaaggagaaggcctttgctgcctg

SEQ ID NO: 258391 - DNA, 25 bp, probe
ggaaggagaaggcctttgctgcctg

SEQ ID NO: 258392 - DNA, 25 bp, probe
ggaaggaggatcgcttgaggccagg

SEQ ID NO: 258393 - DNA, 25 bp, probe
ggaagggagctttcaagatggtagg

SEQ ID NO: 258394 - DNA, 25 bp, probe
ggaagggagctttcaagatggtagg

SEQ ID NO: 258395 - DNA, 25 bp, probe
ggcaaaagactatggactggaaggc

SEQ ID NO: 258396 - DNA, 25 bp, probe
ggaatatccttttggacgcagaagg

SEQ ID NO: 258397 - DNA, 25 bp, probe
ggcaccatgccatttcgggcagaaa

SEQ ID NO: 258398 - DNA, 25 bp, probe
ggcaccatccaaatgctgttgaacc

SEQ ID NO: 258399 - DNA, 25 bp, probe
ggcaacaccatcaaagtgcccacac

SEQ ID NO: 258400 - DNA, 25 bp, probe
ggcaatacatgagcaagtcccctcc

SEQ ID NO: 258401 - DNA, 25 bp, probe
ggcaatgaagaagtatcctcacctc

SEQ ID NO: 258402 - DNA, 25 bp, probe
ggcaattagcgatatagcataccca

SEQ ID NO: 258403 - DNA, 25 bp, probe
ggcaggttgccagagcacataacga

SEQ ID NO: 258404 - DNA, 25 bp, probe
ggcaggactccagatgaggacaaga

SEQ ID NO: 258405 - DNA, 25 bp, probe
ggcaggactccagatgaggacaaga

SEQ ID NO: 258406 - DNA, 25 bp, probe
ggaatgactagagggagccaagagg

SEQ ID NO: 258407 - DNA, 25 bp, probe
ggaatgactagagggagccaagagg

SEQ ID NO: 258408 - DNA, 25 bp, probe
ggaatgacattagtggaaccgggct

SEQ ID NO: 258409 - DNA, 25 bp, probe
ggcagtccggcagggagaccgggag

SEQ ID NO: 258410 - DNA, 25 bp, probe
ggcagagccaccaggaactcgaaaa

SEQ ID NO: 258411 - DNA, 25 bp, probe
ggcgctcagacattttaaccggaac

SEQ ID NO: 258412 - DNA, 25 bp, probe
tagtgtatgagctcctaacgggcaa

SEQ ID NO: 258413 - DNA, 25 bp, probe
tagtttacttcctaaatttcagtag

SEQ ID NO: 258414 - DNA, 25 bp, probe
tactgttaccctcagaagtttgggc

SEQ ID NO: 258415 - DNA, 25 bp, probe
tgtcttttcctaccagtggtttcgg

SEQ ID NO: 258416 - DNA, 25 bp, probe
tggttttactgggatttttatcgag

SEQ ID NO: 258417 - DNA, 25 bp, probe
tggagaaatactgggatttttacca

SEQ ID NO: 258418 - DNA, 25 bp, probe
ggcacaaaaggggatggccgtgacc

SEQ ID NO: 258419 - DNA, 25 bp, probe
ggcaacatcaagcgggaccgtgccc

SEQ ID NO: 258420 - DNA, 25 bp, probe
ggaattcagaggctggccttgtgcc

SEQ ID NO: 258421 - DNA, 25 bp, probe
ggaattagatgacagcgacttggca

SEQ ID NO: 258422 - DNA, 25 bp, probe
ggaatttgcagtgaagatcattgac

SEQ ID NO: 258423 - DNA, 25 bp, probe
ggaattctcagtgtttcaaatgcaa

SEQ ID NO: 258424 - DNA, 25 bp, probe
ggcaattccgtcttcttaatctgaa

SEQ ID NO: 258425 - DNA, 25 bp, probe
ggaattccccctttcaatgatgaaa

SEQ ID NO: 258426 - DNA, 25 bp, probe
ggaattcagctctcacattagtatg

SEQ ID NO: 258427 - DNA, 25 bp, probe
ggaatctctttggaattgggagcac

SEQ ID NO: 258428 - DNA, 25 bp, probe
ggaatggtttgagcatcatggtcac

SEQ ID NO: 258429 - DNA, 25 bp, probe
ggaatggtttgagcatcatggtcac

SEQ ID NO: 258430 - DNA, 25 bp, probe
ggaatggtttgagcatcatggtcac

SEQ ID NO: 258431 - DNA, 25 bp, probe
ggaatttgtctaacacatttcaagg

SEQ ID NO: 258432 - DNA, 25 bp, probe
ggaatcatctttaaagttataagga

SEQ ID NO: 258433 - DNA, 25 bp, probe
ggaatatctacaaaagttatgacta

SEQ ID NO: 258434 - DNA, 25 bp, probe
ggaattcagcaatatcctttgacaa

SEQ ID NO: 258435 - DNA, 25 bp, probe
ggaatgtagacatctgccagttact

SEQ ID NO: 258436 - DNA, 25 bp, probe
ggcaattagagatcgaagcctccta

SEQ ID NO: 258437 - DNA, 25 bp, probe
ggctttgggaactaactcggtcatt

SEQ ID NO: 258438 - DNA, 25 bp, probe
ggcttctcctttttagcaaggcctt

SEQ ID NO: 258439 - DNA, 25 bp, probe
ggcttctcacaatgaaacggactct

SEQ ID NO: 258440 - DNA, 25 bp, probe
ggcccaaagaagcaaggaaccaaat

SEQ ID NO: 258441 - DNA, 25 bp, probe
ggcaccaagcggaaaataaactcca

SEQ ID NO: 258442 - DNA, 25 bp, probe
ggcaccaagcggaaaataaactcca

SEQ ID NO: 258443 - DNA, 25 bp, probe
ggcagccaagtggatggaactaact

SEQ ID NO: 258444 - DNA, 25 bp, probe
ggcaggcacacaaggacaactaagg

SEQ ID NO: 258445 - DNA, 25 bp, probe
ggcaggcacacaaggacaactaagg

SEQ ID NO: 258446 - DNA, 25 bp, probe
ggcagccgcacactatgagcaacat

SEQ ID NO: 258447 - DNA, 25 bp, probe
ggcacgcccagtgagaacatctggc

SEQ ID NO: 258448 - DNA, 25 bp, probe
ggcacgcccagtgagaacatctggc

SEQ ID NO: 258449 - DNA, 25 bp, probe
ggcaaccacgagacagacaacatga

SEQ ID NO: 258450 - DNA, 25 bp, probe
tgtgtcatcaatgtacatgccaaca

SEQ ID NO: 258451 - DNA, 25 bp, probe
ggaatcagtcagtatctgcagaaca

SEQ ID NO: 258452 - DNA, 25 bp, probe
ggaatcatgtactctgtgaaaaaaa

SEQ ID NO: 258453 - DNA, 25 bp, probe
tggcagtggttctggtactaaaaat

SEQ ID NO: 258454 - DNA, 25 bp, probe
ggcagctgaaatggtggtagccctt

SEQ ID NO: 258455 - DNA, 25 bp, probe
ggcacatgaattgggacgaccttct

SEQ ID NO: 258456 - DNA, 25 bp, probe
ggcacatgaattgggacgaccttct

SEQ ID NO: 258457 - DNA, 25 bp, probe
ggcacatgaattgggacgaccttct

SEQ ID NO: 258458 - DNA, 25 bp, probe
ggcaccagcatattggacaacctcc

SEQ ID NO: 258459 - DNA, 25 bp, probe
ggcaaagcaggtgagcaacctcatc

SEQ ID NO: 258460 - DNA, 25 bp, probe
ggcaacgaggacatgaaagctattc

SEQ ID NO: 258461 - DNA, 25 bp, probe
ggcaagctgcaggtttgtaatgcaa

SEQ ID NO: 258462 - DNA, 25 bp, probe
ggaatgctgggaagtgctaggcagg

SEQ ID NO: 258463 - DNA, 25 bp, probe
ggaatggtgatgaagtgtaggaata

SEQ ID NO: 258464 - DNA, 25 bp, probe
ggaatttatgctttctcaagatgtt

SEQ ID NO: 258465 - DNA, 25 bp, probe
ggaatttatgctttctcaagatgtt

SEQ ID NO: 258466 - DNA, 25 bp, probe
ggaatttatgctttctcaagatgtt

SEQ ID NO: 258467 - DNA, 25 bp, probe
ggaattgtttatacacaactttgca

SEQ ID NO: 258468 - DNA, 25 bp, probe
ggaatagcagtttcatacaactggg

SEQ ID NO: 258469 - DNA, 25 bp, probe
ggcaaagcgttatgagaagctggac

SEQ ID NO: 258470 - DNA, 25 bp, probe
ggcacgagcttccagaaaagcgtcc

SEQ ID NO: 258471 - DNA, 25 bp, probe
ggcacagaccccaacagaaattttg

SEQ ID NO: 258472 - DNA, 25 bp, probe
ggaatactgcccaaagggaagcttg

SEQ ID NO: 258473 - DNA, 25 bp, probe
ggaatactaccaagagggagagatt

SEQ ID NO: 258474 - DNA, 25 bp, probe
tggaatatgccagcaaaggggagct

SEQ ID NO: 258475 - DNA, 25 bp, probe
ggaattgcacagtaggatgtggaac

SEQ ID NO: 258476 - DNA, 25 bp, probe
ggaattgcacaatccatgaacagca

SEQ ID NO: 258477 - DNA, 25 bp, probe
ggaattccatgatcctgataggcaa

SEQ ID NO: 258478 - DNA, 25 bp, probe
ggaatatattgatccggagacaaag

SEQ ID NO: 258479 - DNA, 25 bp, probe
ggaataatgtcctgttagataaaca

SEQ ID NO: 258480 - DNA, 25 bp, probe
ggaataatgtcctgttagataaaca

SEQ ID NO: 258481 - DNA, 25 bp, probe
tccagtacttcctgccataaaactc

SEQ ID NO: 258482 - DNA, 25 bp, probe
taataaatgtctcagccaaaaacct

SEQ ID NO: 258483 - DNA, 25 bp, probe
tggttaagttggcccaagaagacac

SEQ ID NO: 258484 - DNA, 25 bp, probe
ggcactgaagttgtccaggaaattc

SEQ ID NO: 258485 - DNA, 25 bp, probe
ggcactgaagttgtccaggaaattc

SEQ ID NO: 258486 - DNA, 25 bp, probe
ggcacgaggattattcaagaattct

SEQ ID NO: 258487 - DNA, 25 bp, probe
ggcacggaatgaaaacagagcttcc

SEQ ID NO: 258488 - DNA, 25 bp, probe
ggcactgccagactgaaccagagct

SEQ ID NO: 258489 - DNA, 25 bp, probe
ggcaatgccagggacatcatcaagg

SEQ ID NO: 258490 - DNA, 25 bp, probe
ggcactcctggagatatgaaggatt

SEQ ID NO: 258491 - DNA, 25 bp, probe
ggcacacacgtagacaagggcagct

SEQ ID NO: 258492 - DNA, 25 bp, probe
ggcaacacctatgaagggcgtccca

SEQ ID NO: 258493 - DNA, 25 bp, probe
ggcacagcccttcctaagtgggctc

SEQ ID NO: 258494 - DNA, 25 bp, probe
ggcgcacctttagcaggtggactcc

SEQ ID NO: 258495 - DNA, 25 bp, probe
ggcccactttattctgaggaataca

SEQ ID NO: 258496 - DNA, 25 bp, probe
ggcaacttcctgaccgaggatcaaa

SEQ ID NO: 258497 - DNA, 25 bp, probe
ggcaatgcttccacagcgtaaatac

SEQ ID NO: 258498 - DNA, 25 bp, probe
ggcaatgatttaagcaccttcacta

SEQ ID NO: 258499 - DNA, 25 bp, probe
ggcaatgatttaagcaccttcacta

SEQ ID NO: 258500 - DNA, 25 bp, probe
ggcattagctaaaaccttccatgtc

SEQ ID NO: 258501 - DNA, 25 bp, probe
ggcacttctcacaaactttctagtg

SEQ ID NO: 258502 - DNA, 25 bp, probe
ggcactgtccaggtgaacttctacg

SEQ ID NO: 258503 - DNA, 25 bp, probe
ggcacgttaactcgaattctcacaa

SEQ ID NO: 258504 - DNA, 25 bp, probe
ggcactggatcatgctgtaacaata

SEQ ID NO: 258505 - DNA, 25 bp, probe
ggcaatgtttcgatagacagcataa

SEQ ID NO: 258506 - DNA, 25 bp, probe
ggcaagctcttcgtacaggacgaaa

SEQ ID NO: 258507 - DNA, 25 bp, probe
ggaatcatcatcgcccaggaagaga

SEQ ID NO: 258508 - DNA, 25 bp, probe
ggaatctctctctcaacaaaaggta

SEQ ID NO: 258509 - DNA, 25 bp, probe
ggaatctctctctcaacaaaaggta

SEQ ID NO: 258510 - DNA, 25 bp, probe
ggaattcttcaatcgcagagctctg

SEQ ID NO: 258511 - DNA, 25 bp, probe
ggcaattgcttatactcaatgcttt

SEQ ID NO: 258512 - DNA, 25 bp, probe
ggcaattattaatgatacctattct

SEQ ID NO: 258513 - DNA, 25 bp, probe
tggagatttttttgtaccagcttta

SEQ ID NO: 258514 - DNA, 25 bp, probe
ggaatttcttgtttctccagatttt

SEQ ID NO: 258515 - DNA, 25 bp, probe
ggaatcccattgatcttctagctac

SEQ ID NO: 258516 - DNA, 25 bp, probe
ggctaagccacgagttctacgattc

SEQ ID NO: 258517 - DNA, 25 bp, probe
ggcaaaacacgatgttctgacattg

SEQ ID NO: 258518 - DNA, 25 bp, probe
ggcaaccacaggcagcatttagcac

SEQ ID NO: 258519 - DNA, 25 bp, probe
ggcaaaacgatgggcagtttcacag

SEQ ID NO: 258520 - DNA, 25 bp, probe
ggcaaagactgtcagagcttcttct

SEQ ID NO: 258521 - DNA, 25 bp, probe
ggcaaagactgtcagagcttcttct

SEQ ID NO: 258522 - DNA, 25 bp, probe
ggcaaaacgtcctttgcattatctg

SEQ ID NO: 258523 - DNA, 25 bp, probe
ggcaaagacccagaacatcatgtat

SEQ ID NO: 258524 - DNA, 25 bp, probe
ggcacaaacccatgcaagcgttagt

SEQ ID NO: 258525 - DNA, 25 bp, probe
ggcaaagactatcccaaggttattt

SEQ ID NO: 258526 - DNA, 25 bp, probe
ggcaaccaatcatgtacaggttctt

SEQ ID NO: 258527 - DNA, 25 bp, probe
ggaatcccacaaacaatggctgctt

SEQ ID NO: 258528 - DNA, 25 bp, probe
ggcactggaccaatacaagttgcga

SEQ ID NO: 258529 - DNA, 25 bp, probe
ggcaccgaaaatgctgatgtccaga

SEQ ID NO: 258530 - DNA, 25 bp, probe
ggcacatgccagaagtgccggtccg

SEQ ID NO: 258531 - DNA, 25 bp, probe
ggcacagccagaattccctgtgacc

SEQ ID NO: 258532 - DNA, 25 bp, probe
ggcacagccagaattccctgtgacc

SEQ ID NO: 258533 - DNA, 25 bp, probe
ggcacccagattaccgtggaagatc

SEQ ID NO: 258534 - DNA, 25 bp, probe
ggcacccaggaatgcgggggtctgc

SEQ ID NO: 258535 - DNA, 25 bp, probe
ggccacctagaaaggggcccattca

SEQ ID NO: 258536 - DNA, 25 bp, probe
ggcaccatctaatagcgggttactt

SEQ ID NO: 258537 - DNA, 25 bp, probe
ggcagccatcttcaaggtgggagac

SEQ ID NO: 258538 - DNA, 25 bp, probe
ggcagcgtgggtaaggtgggtcagg

SEQ ID NO: 258539 - DNA, 25 bp, probe
ggcagcgtgggtaaggtgggtcagg

SEQ ID NO: 258540 - DNA, 25 bp, probe
gtagcaagtttcctaaggtacaata

SEQ ID NO: 258541 - DNA, 25 bp, probe
ggcaagggcagacaaggcccgttac

SEQ ID NO: 258542 - DNA, 25 bp, probe
ggcagaactgggcaatacccctacc

SEQ ID NO: 258543 - DNA, 25 bp, probe
ggcaaagttgtgcaattacctaaca

SEQ ID NO: 258544 - DNA, 25 bp, probe
ggcaaagctttagacatgtcctatg

SEQ ID NO: 258545 - DNA, 25 bp, probe
ggcaaggcttaaaggctgacacatt

SEQ ID NO: 258546 - DNA, 25 bp, probe
ggaatgcctataatacatcttagat

SEQ ID NO: 258547 - DNA, 25 bp, probe
ggaatgccaaagacaatgcagtcag

SEQ ID NO: 258548 - DNA, 25 bp, probe
ggcacatcagcaaaggcaagggcag

SEQ ID NO: 258549 - DNA, 25 bp, probe
ggcagctagttagtgccatggcaca

SEQ ID NO: 258550 - DNA, 25 bp, probe
ggcacattcttgtggcaagcatcag

SEQ ID NO: 258551 - DNA, 25 bp, probe
ggcacactttgcactgatatatcat

SEQ ID NO: 258552 - DNA, 25 bp, probe
ggcacaatcttgacttgtcaattac

SEQ ID NO: 258553 - DNA, 25 bp, probe
ggaattcctgtcactgaaatacgtt

SEQ ID NO: 258554 - DNA, 25 bp, probe
ggaatatcctggcactgaggtcact

SEQ ID NO: 258555 - DNA, 25 bp, probe
ggaatgctgtcgggactgagcaggc

SEQ ID NO: 258556 - DNA, 25 bp, probe
ggaatagcacaggaatctgagagac

SEQ ID NO: 258557 - DNA, 25 bp, probe
ggaatagcacaggaatctgagagac

SEQ ID NO: 258558 - DNA, 25 bp, probe
ggaataccacagtcattagccttct

SEQ ID NO: 258559 - DNA, 25 bp, probe
ggaatagccacacagacagtgcttc

SEQ ID NO: 258560 - DNA, 25 bp, probe
ggcaccaccaactagacatgtgttc

SEQ ID NO: 258561 - DNA, 25 bp, probe
ggcaccaccaactagacatgtgttc

SEQ ID NO: 258562 - DNA, 25 bp, probe
ggcactcccaataatgaagtgtggc

SEQ ID NO: 258563 - DNA, 25 bp, probe
ggcactcccaataatgaagtgtggc

SEQ ID NO: 258564 - DNA, 25 bp, probe
ggcactcccaataatgaagtgtggc

SEQ ID NO: 258565 - DNA, 25 bp, probe
ggcaatacacctctgaacatgtgtg

SEQ ID NO: 258566 - DNA, 25 bp, probe
ggcaatcgcctccttggaggctctg

SEQ ID NO: 258567 - DNA, 25 bp, probe
ggcaattgcactgtgtagccgtctg

SEQ ID NO: 258568 - DNA, 25 bp, probe
ggcacagtgccaggcagtagggatc

SEQ ID NO: 258569 - DNA, 25 bp, probe
ggcagcgtctggacagtgaggcctc

SEQ ID NO: 258570 - DNA, 25 bp, probe
ggcagcgtctggacagtgaggcctc

SEQ ID NO: 258571 - DNA, 25 bp, probe
ggcactgtgcctacaggtgctacgc

SEQ ID NO: 258572 - DNA, 25 bp, probe
ggcactgtgcctacaggtgctacgc

SEQ ID NO: 258573 - DNA, 25 bp, probe
ggcactggggctagggtcacagccc

SEQ ID NO: 258574 - DNA, 25 bp, probe
ggcactggggctagggtcacagccc

SEQ ID NO: 258575 - DNA, 25 bp, probe
ggcacaggggtctgagtaccagccc

SEQ ID NO: 258576 - DNA, 25 bp, probe
ggcagcaggcgcgcaaattacccac

SEQ ID NO: 258577 - DNA, 25 bp, probe
ggcagcaggcgcgcaaattacccac

SEQ ID NO: 258578 - DNA, 25 bp, probe
ggcacagctgtggccaggtataact

SEQ ID NO: 258579 - DNA, 25 bp, probe
ggcacagctgtggccaggtataact

SEQ ID NO: 258580 - DNA, 25 bp, probe
ggcaccttggcagctgatgcaaact

SEQ ID NO: 258581 - DNA, 25 bp, probe
ggaatcttggcgttcagcagagtca

SEQ ID NO: 258582 - DNA, 25 bp, probe
ggcactttgggcttggctagatcac

SEQ ID NO: 258583 - DNA, 25 bp, probe
ggcaattcggtcaattgtcactgtc

SEQ ID NO: 258584 - DNA, 25 bp, probe
ggcatgagtatgagcacaactttca

SEQ ID NO: 258585 - DNA, 25 bp, probe
ggcatgagtatgagcacaactttca

SEQ ID NO: 258586 - DNA, 25 bp, probe
ggcagttctgcaatgccatagcatt

SEQ ID NO: 258587 - DNA, 25 bp, probe
ggaatttgcaacgagagattgaaat

SEQ ID NO: 258588 - DNA, 25 bp, probe
ggcactttcactgagagttgagtca

SEQ ID NO: 258589 - DNA, 25 bp, probe
ggcactttcactgagagttgagtca

SEQ ID NO: 258590 - DNA, 25 bp, probe
ggcaaggtagtggaagactggctga

SEQ ID NO: 258591 - DNA, 25 bp, probe
ggcaagttagttaagtatcactgat

SEQ ID NO: 258592 - DNA, 25 bp, probe
ggcacagaaagattaagttaccggc

SEQ ID NO: 258593 - DNA, 25 bp, probe
ggcagcagaatatatattttaccta

SEQ ID NO: 258594 - DNA, 25 bp, probe
ggcagcaggttggtgattcagtccg

SEQ ID NO: 258595 - DNA, 25 bp, probe
tggaacgctgtggtcattttctcta

SEQ ID NO: 258596 - DNA, 25 bp, probe
ggcacatcactgagtcagtcaactc

SEQ ID NO: 258597 - DNA, 25 bp, probe
ggcaatcacgccgtattacatctct

SEQ ID NO: 258598 - DNA, 25 bp, probe
ggcaatcacgccgtattacatctct

SEQ ID NO: 258599 - DNA, 25 bp, probe
ggcaacaggacagtttccctacaag

SEQ ID NO: 258600 - DNA, 25 bp, probe
ggcaaggtagactctcccaaaagaa

SEQ ID NO: 258601 - DNA, 25 bp, probe
ggcaaggaaaccccatacagaagaa

SEQ ID NO: 258602 - DNA, 25 bp, probe
ggcaaggaaaccccatacagaagaa

SEQ ID NO: 258603 - DNA, 25 bp, probe
ggcaagtatgaatttcctgacaaag

SEQ ID NO: 258604 - DNA, 25 bp, probe
cgaactgaactaggcctggtggaag

SEQ ID NO: 258605 - DNA, 25 bp, probe
ggcaatattaccttgacagaatcat

SEQ ID NO: 258606 - DNA, 25 bp, probe
ggcacctgtagcctgtgaagaaacc

SEQ ID NO: 258607 - DNA, 25 bp, probe
tggaatcgtcctctgggaaatcgcc

SEQ ID NO: 258608 - DNA, 25 bp, probe
ggaatcagacctccaggagataatc

SEQ ID NO: 258609 - DNA, 25 bp, probe
ggcaatcgacgcacagctaatatcc

SEQ ID NO: 258610 - DNA, 25 bp, probe
ggcaatgcgggcacacgctcttaca

SEQ ID NO: 258611 - DNA, 25 bp, probe
ggcaatgagtgtgtgacagccattg

SEQ ID NO: 258612 - DNA, 25 bp, probe
ggcaatgatttggcaacagtgcggg

SEQ ID NO: 258613 - DNA, 25 bp, probe
ggcacgagattggcagacaggcaga

SEQ ID NO: 258614 - DNA, 25 bp, probe
ggcacgagctgaaggctagcaaacc

SEQ ID NO: 258615 - DNA, 25 bp, probe
ggcaaagtgagggccatccaacacc

SEQ ID NO: 258616 - DNA, 25 bp, probe
ggcaaggagcggaacatccgggccc

SEQ ID NO: 258617 - DNA, 25 bp, probe
ggcaaggagcggaacatccgggccc

SEQ ID NO: 258618 - DNA, 25 bp, probe
ggcagaggatgttgtaccgggacca

SEQ ID NO: 258619 - DNA, 25 bp, probe
ggcttgagactagacgggggcagcg

SEQ ID NO: 258620 - DNA, 25 bp, probe
ggctggaacttgtggttgaggcagg

SEQ ID NO: 258621 - DNA, 25 bp, probe
ggcatgtgtaaggaaggattacggc

SEQ ID NO: 258622 - DNA, 25 bp, probe
ggcattgctagatgcagagaaccct

SEQ ID NO: 258623 - DNA, 25 bp, probe
ggcattgctagatgcagagaaccct

SEQ ID NO: 258624 - DNA, 25 bp, probe
ggcacagctcagtatggagtcacca

SEQ ID NO: 258625 - DNA, 25 bp, probe
ggcaagtgaggatgcagtccagccg

SEQ ID NO: 258626 - DNA, 25 bp, probe
ggcaactgtggcaaagtctcgaaga

SEQ ID NO: 258627 - DNA, 25 bp, probe
ggcgatagtcgttttcttgcaaatg

SEQ ID NO: 258628 - DNA, 25 bp, probe
ggcgatagtcgttttcttgcaaatg

SEQ ID NO: 258629 - DNA, 25 bp, probe
ggcgatagtcgttttcttgcaaatg

SEQ ID NO: 258630 - DNA, 25 bp, probe
ggcaaaggcgatattataaacatta

SEQ ID NO: 258631 - DNA, 25 bp, probe
ggcagaaggccagattttgaacttg

SEQ ID NO: 258632 - DNA, 25 bp, probe
ggcaagaggcatggcttttctacac

SEQ ID NO: 258633 - DNA, 25 bp, probe
ggcaagggataactcttctaacaca

SEQ ID NO: 258634 - DNA, 25 bp, probe
ggcaagaggatccaggtcctattca

SEQ ID NO: 258635 - DNA, 25 bp, probe
ggcaagaggatccaggtcctattca

SEQ ID NO: 258636 - DNA, 25 bp, probe
ggcaatgggcaatggtcatcgattg

SEQ ID NO: 258637 - DNA, 25 bp, probe
ggcaaggtccactgtgactgagccc

SEQ ID NO: 258638 - DNA, 25 bp, probe
ggcaatggtctatttgttcaggcac

SEQ ID NO: 258639 - DNA, 25 bp, probe
ggcattttctaacttaggaagccac

SEQ ID NO: 258640 - DNA, 25 bp, probe
ggaattttcaagctatggataccct

SEQ ID NO: 258641 - DNA, 25 bp, probe
ggaattgtgtgccgcgatttgaacc

SEQ ID NO: 258642 - DNA, 25 bp, probe
ggcaattgtctacccatttaagtca

SEQ ID NO: 258643 - DNA, 25 bp, probe
ggcagactggtacctcgttaagatg

SEQ ID NO: 258644 - DNA, 25 bp, probe
ggcaatgcggctgcactggtggaag

SEQ ID NO: 258645 - DNA, 25 bp, probe
ggcaaggtcatccctgagctgaacg

SEQ ID NO: 258646 - DNA, 25 bp, probe
ggcaagtctgcaacctggcagaaaa

SEQ ID NO: 258647 - DNA, 25 bp, probe
ggcaggttcacttgcggacaggaat

SEQ ID NO: 258648 - DNA, 25 bp, probe
ggcaggcagtccttgggaagcctag

SEQ ID NO: 258649 - DNA, 25 bp, probe
ggcaagcacaaactaggaagactag

SEQ ID NO: 258650 - DNA, 25 bp, probe
ggcaccacaaccaagtacaaaatga

SEQ ID NO: 258651 - DNA, 25 bp, probe
ggcaccaaagccatatcacaaattt

SEQ ID NO: 258652 - DNA, 25 bp, probe
ggcaacaacaaaatcgcacagacac

SEQ ID NO: 258653 - DNA, 25 bp, probe
ggcaaaacaacaatggtcagcaaca

SEQ ID NO: 258654 - DNA, 25 bp, probe
ggcagaagataagaggacgcagaag

SEQ ID NO: 258655 - DNA, 25 bp, probe
ggcagaaggaggtgcgactgcagct

SEQ ID NO: 258656 - DNA, 25 bp, probe
ggcacagaaatggttccctgagctg

SEQ ID NO: 258657 - DNA, 25 bp, probe
ggcactcaaatgtggcacctggtga

SEQ ID NO: 258658 - DNA, 25 bp, probe
ggcaccagaagtgggcaaaagaaag

SEQ ID NO: 258659 - DNA, 25 bp, probe
ggcaccagaagtcatcagaatgcaa

SEQ ID NO: 258660 - DNA, 25 bp, probe
ggcaccagaagtcatcagaatgcaa

SEQ ID NO: 258661 - DNA, 25 bp, probe
ggcacacaggtgtccattcagatga

SEQ ID NO: 258662 - DNA, 25 bp, probe
ggcaataggtgtgaacagggaactc

SEQ ID NO: 258663 - DNA, 25 bp, probe
ggcatttggtacccaagggaagctg

SEQ ID NO: 258664 - DNA, 25 bp, probe
ggaattgctgtgtcccagaggaaag

SEQ ID NO: 258665 - DNA, 25 bp, probe
ggaattgtggcccagagaggcccag

SEQ ID NO: 258666 - DNA, 25 bp, probe
ggaattgtggcccagagaggcccag

SEQ ID NO: 258667 - DNA, 25 bp, probe
ggcacagtggaccgggcaggtgtcc

SEQ ID NO: 258668 - DNA, 25 bp, probe
ggcacaggccaaggggaggccagcc

SEQ ID NO: 258669 - DNA, 25 bp, probe
ggcacagggcataagggaggaggaa

SEQ ID NO: 258670 - DNA, 25 bp, probe
ggcaagctggaacttgggtggggag

SEQ ID NO: 258671 - DNA, 25 bp, probe
ggcaaggtagagggcgagttggagg

SEQ ID NO: 258672 - DNA, 25 bp, probe
ggcatgggttggggtagtgggtggg

SEQ ID NO: 258673 - DNA, 25 bp, probe
ggcagggccggcagtaggtggggcc

SEQ ID NO: 258674 - DNA, 25 bp, probe
ggcagaagccgtgggtgtgcctagg

SEQ ID NO: 258675 - DNA, 25 bp, probe
ggcagaatctcagaaggtcctcctg

SEQ ID NO: 258676 - DNA, 25 bp, probe
ggcaagtcttcttaggatctgatcc

SEQ ID NO: 258677 - DNA, 25 bp, probe
ggaattcactattcaggacattctg

SEQ ID NO: 258678 - DNA, 25 bp, probe
ggcactccatctatgcgagagcttc

SEQ ID NO: 258679 - DNA, 25 bp, probe
ggcacagccattatcatgtatgttg

SEQ ID NO: 258680 - DNA, 25 bp, probe
ggcatgggcattacgggtgttgaag

SEQ ID NO: 258681 - DNA, 25 bp, probe
ggcaaggagataggggtgtatgagc

SEQ ID NO: 258682 - DNA, 25 bp, probe
ggcaaggagttgggtttggatcaaa

SEQ ID NO: 258683 - DNA, 25 bp, probe
ggcaagggagctgggccttggcatc

SEQ ID NO: 258684 - DNA, 25 bp, probe
ggcacagtgaaggctgtccttaccc

SEQ ID NO: 258685 - DNA, 25 bp, probe
ggcacttgaatcttggactgaacct

SEQ ID NO: 258686 - DNA, 25 bp, probe
ggcactatgttctctgaagaactgt

SEQ ID NO: 258687 - DNA, 25 bp, probe
ggcacttttccttgttgatattgct

SEQ ID NO: 258688 - DNA, 25 bp, probe
ggaatttaccggctgagagatgctc

SEQ ID NO: 258689 - DNA, 25 bp, probe
ggaatttctggcaggctggaagctc

SEQ ID NO: 258690 - DNA, 25 bp, probe
ggcaagttctgtggttctgagaagc

SEQ ID NO: 258691 - DNA, 25 bp, probe
ggcaagaacgtcgatgctgggaaag

SEQ ID NO: 258692 - DNA, 25 bp, probe
ggcaaaaggcgcggtgtggcaaagg

SEQ ID NO: 258693 - DNA, 25 bp, probe
ggcaaaggggcgcgaggtcgattgg

SEQ ID NO: 258694 - DNA, 25 bp, probe
tgccaaagtactgttggttcgatta

SEQ ID NO: 258695 - DNA, 25 bp, probe
ggcaacagtactggttgggttgacc

SEQ ID NO: 258696 - DNA, 25 bp, probe
ggcaacagtactggttgggttgacc

SEQ ID NO: 258697 - DNA, 25 bp, probe
ggcacacgttcacattgcggtgatg

SEQ ID NO: 258698 - DNA, 25 bp, probe
ggcaaccttgcctttgagaatgaga

SEQ ID NO: 258699 - DNA, 25 bp, probe
ggcaactggtactttgatgaagaga

SEQ ID NO: 258700 - DNA, 25 bp, probe
ggcaacatatcttcgttatgtaaga

SEQ ID NO: 258701 - DNA, 25 bp, probe
ggcaactccacggctttgtgaagat

SEQ ID NO: 258702 - DNA, 25 bp, probe
ggcaactccacggctttgtgaagat

SEQ ID NO: 258703 - DNA, 25 bp, probe
ggcaacggacagccaagacgtagat

SEQ ID NO: 258704 - DNA, 25 bp, probe
ggcaacgagaagctaaccatgcaga

SEQ ID NO: 258705 - DNA, 25 bp, probe
ggcaagggatgccagtaagtctgca

SEQ ID NO: 258706 - DNA, 25 bp, probe
ggcaaggtcatgttggcagaactca

SEQ ID NO: 258707 - DNA, 25 bp, probe
ggcaagagatcatatcctcagacca

SEQ ID NO: 258708 - DNA, 25 bp, probe
ggcaaggtcaggccttcaaggcacc

SEQ ID NO: 258709 - DNA, 25 bp, probe
ggcaaggtcaggccttcaaggcacc

SEQ ID NO: 258710 - DNA, 25 bp, probe
ggcaaagtcagagcccacaggtgcc

SEQ ID NO: 258711 - DNA, 25 bp, probe
ggcaagaatgagagtcccaggatcc

SEQ ID NO: 258712 - DNA, 25 bp, probe
ggcacgaatggatactcctgaaaca

SEQ ID NO: 258713 - DNA, 25 bp, probe
ggcactgaacaagcagaccaacaac

SEQ ID NO: 258714 - DNA, 25 bp, probe
ggcaggagaagaaagccgaatctat

SEQ ID NO: 258715 - DNA, 25 bp, probe
ggcaggagaagaaagccgaatctat

SEQ ID NO: 258716 - DNA, 25 bp, probe
ggcagaggacagattctagcttttc

SEQ ID NO: 258717 - DNA, 25 bp, probe
ggcaaggaagaacatggtttccacc

SEQ ID NO: 258718 - DNA, 25 bp, probe
ggcacaggaagctgtatcatttaca

SEQ ID NO: 258719 - DNA, 25 bp, probe
ggcacagagacctgtccatggtccc

SEQ ID NO: 258720 - DNA, 25 bp, probe
ggcacaaaagaaccgcatgactcct

SEQ ID NO: 258721 - DNA, 25 bp, probe
ggcacaaaagaaccgcatgactcct

SEQ ID NO: 258722 - DNA, 25 bp, probe
ggcaaacggaagcctgtgactgagg

SEQ ID NO: 258723 - DNA, 25 bp, probe
ggcaggactgtaaaggtgactcgga

SEQ ID NO: 258724 - DNA, 25 bp, probe
ggcagcggcttaagggcgatgcctg

SEQ ID NO: 258725 - DNA, 25 bp, probe
ggcagccctgaaaggacaggctcct

SEQ ID NO: 258726 - DNA, 25 bp, probe
ggcagcccaaaagatcaggggtgga

SEQ ID NO: 258727 - DNA, 25 bp, probe
ggcacccgaagctttgcggggagaa

SEQ ID NO: 258728 - DNA, 25 bp, probe
ggcactgcgaattttctgcgtgggg

SEQ ID NO: 258729 - DNA, 25 bp, probe
ggcaatcttatgtgtgctgaaggac

SEQ ID NO: 258730 - DNA, 25 bp, probe
ggcaatatatatggagaggagggac

SEQ ID NO: 258731 - DNA, 25 bp, probe
ggcatgaacctgggaggcggagctt

SEQ ID NO: 258732 - DNA, 25 bp, probe
ggcagatcacttcaggtcaggagtt

SEQ ID NO: 258733 - DNA, 25 bp, probe
ggcagcatgtttaacccaggtgaag

SEQ ID NO: 258734 - DNA, 25 bp, probe
ggcacaatttcaactccatgcggtt

SEQ ID NO: 258735 - DNA, 25 bp, probe
ggcaatataccaatctcctgaggct

SEQ ID NO: 258736 - DNA, 25 bp, probe
ggcaagtacgcaagcctcgattctc

SEQ ID NO: 258737 - DNA, 25 bp, probe
ggcaagtacgcaagcctcgattctc

SEQ ID NO: 258738 - DNA, 25 bp, probe
ggcagagtttgcttgcccaattgcc

SEQ ID NO: 258739 - DNA, 25 bp, probe
ggcagagtttgcttgcccaattgcc

SEQ ID NO: 258740 - DNA, 25 bp, probe
ggcacagctgtttctgaaagtagcc

SEQ ID NO: 258741 - DNA, 25 bp, probe
ggcaacaggttgcaattgtagctca

SEQ ID NO: 258742 - DNA, 25 bp, probe
ggcaactgtgggcaataatatggca

SEQ ID NO: 258743 - DNA, 25 bp, probe
ggcactcaggtgcacatgatacaag

SEQ ID NO: 258744 - DNA, 25 bp, probe
ggcactcaggtgcacatgatacaag

SEQ ID NO: 258745 - DNA, 25 bp, probe
ggcaatcgggaaggagcacaagggg

SEQ ID NO: 258746 - DNA, 25 bp, probe
ggcaagcgtggagcaggagcagcag

SEQ ID NO: 258747 - DNA, 25 bp, probe
ggcacagaggtggctgtgcgaagag

SEQ ID NO: 258748 - DNA, 25 bp, probe
ggcaatggtgcgcctgctggaagat

SEQ ID NO: 258749 - DNA, 25 bp, probe
ggcaaatgtccaagcatcagcaaga

SEQ ID NO: 258750 - DNA, 25 bp, probe
ggcaacagtctaagatgagagcctg

SEQ ID NO: 258751 - DNA, 25 bp, probe
ggcaaagtttcaaagagctcttggc

SEQ ID NO: 258752 - DNA, 25 bp, probe
ggcacagagtttgctgcgagctctc

SEQ ID NO: 258753 - DNA, 25 bp, probe
ggcaagaattggtatcacagccatc

SEQ ID NO: 258754 - DNA, 25 bp, probe
ggcaaaatggcactgaatcatccat

SEQ ID NO: 258755 - DNA, 25 bp, probe
ggcaatcaaagccttttgatcatgt

SEQ ID NO: 258756 - DNA, 25 bp, probe
ggcaatcaagagagtctaatatatt

SEQ ID NO: 258757 - DNA, 25 bp, probe
ggcaatcattaaagtgcatagattt

SEQ ID NO: 258758 - DNA, 25 bp, probe
ggcaagcagccatgtgtctaatttt

SEQ ID NO: 258759 - DNA, 25 bp, probe
ggcagacactgcaagctgtaaattt

SEQ ID NO: 258760 - DNA, 25 bp, probe
ggcacacaatgctattgaaattact

SEQ ID NO: 258761 - DNA, 25 bp, probe
ggcacacaatgctattgaaattact

SEQ ID NO: 258762 - DNA, 25 bp, probe
ggcacctaaacagattcttctggac

SEQ ID NO: 258763 - DNA, 25 bp, probe
ggcaggtaaatccaagctccctgga

SEQ ID NO: 258764 - DNA, 25 bp, probe
tggagttcaagagacacttcctgaa

SEQ ID NO: 258765 - DNA, 25 bp, probe
ggcactgtcaaagtgtacctgccta

SEQ ID NO: 258766 - DNA, 25 bp, probe
ggcacttataaccaaagcccaaagt

SEQ ID NO: 258767 - DNA, 25 bp, probe
ggcacgagaacccaaagggaataga

SEQ ID NO: 258768 - DNA, 25 bp, probe
ggcacaggagactccaaggagctac

SEQ ID NO: 258769 - DNA, 25 bp, probe
ggcacagggagatgctcaggggcca

SEQ ID NO: 258770 - DNA, 25 bp, probe
ggcaaggaggactttgtggggcatc

SEQ ID NO: 258771 - DNA, 25 bp, probe
ggcaatcctggaggtctggggactc

SEQ ID NO: 258772 - DNA, 25 bp, probe
ggcaatcctggaggtctggggactc

SEQ ID NO: 258773 - DNA, 25 bp, probe
ggcaatcctggaggtctggggactc

SEQ ID NO: 258774 - DNA, 25 bp, probe
ggcaatcctggaggtctggggactc

SEQ ID NO: 258775 - DNA, 25 bp, probe
ggcaaccatggcaggtgggctagcc

SEQ ID NO: 258776 - DNA, 25 bp, probe
ggcaacacatctgtggatcaggata

SEQ ID NO: 258777 - DNA, 25 bp, probe
ggcaacacatctgtggatcaggata

SEQ ID NO: 258778 - DNA, 25 bp, probe
ggcaaatccatgcaggacaagcaga

SEQ ID NO: 258779 - DNA, 25 bp, probe
ggcaattccagcttagcaacgcaga

SEQ ID NO: 258780 - DNA, 25 bp, probe
ggcatggcctacatggaacgcatga

SEQ ID NO: 258781 - DNA, 25 bp, probe
ggcaagctcactactagaacacatt

SEQ ID NO: 258782 - DNA, 25 bp, probe
ggcaagctcactactagaacacatt

SEQ ID NO: 258783 - DNA, 25 bp, probe
ggcaatatcatcaccacacgcactt

SEQ ID NO: 258784 - DNA, 25 bp, probe
ggcactacgccaagatcagcgactt

SEQ ID NO: 258785 - DNA, 25 bp, probe
ggcactgacgggcaagtgacttctg

SEQ ID NO: 258786 - DNA, 25 bp, probe
ggcagctgcacgcaggacaggtgct

SEQ ID NO: 258787 - DNA, 25 bp, probe
ggcactgagcagtacgtgagtgtgc

SEQ ID NO: 258788 - DNA, 25 bp, probe
ggcacaatgaggaccaggcttgctg

SEQ ID NO: 258789 - DNA, 25 bp, probe
ggcacaatgagtgtctctgctggtg

SEQ ID NO: 258790 - DNA, 25 bp, probe
ggcaagcagagagtgatgcttctgt

SEQ ID NO: 258791 - DNA, 25 bp, probe
ggcagggagcatgagcctcatttcc

SEQ ID NO: 258792 - DNA, 25 bp, probe
ggcagtgtaatgggactcattctga

SEQ ID NO: 258793 - DNA, 25 bp, probe
ggcaggtgtgatgctgaccgttggc

SEQ ID NO: 258794 - DNA, 25 bp, probe
ggcaggtgtgatgctgaccgttggc

SEQ ID NO: 258795 - DNA, 25 bp, probe
ggcattgagaatgtacctgaagagc

SEQ ID NO: 258796 - DNA, 25 bp, probe
ggcttcatacaatggccgccagagg

SEQ ID NO: 258797 - DNA, 25 bp, probe
ggcattcgtattgcgccgctagagg

SEQ ID NO: 258798 - DNA, 25 bp, probe
ggcactcaatttccagacggcagat

SEQ ID NO: 258799 - DNA, 25 bp, probe
ggcaagaactggcctgagcagggat

SEQ ID NO: 258800 - DNA, 25 bp, probe
ggcaaacagggactgagctgtaacc

SEQ ID NO: 258801 - DNA, 25 bp, probe
ggcaccgaagggagctctgaagcac

SEQ ID NO: 258802 - DNA, 25 bp, probe
ggcgtctaagtgtttgggaagcaac

SEQ ID NO: 258803 - DNA, 25 bp, probe
taaggcttaattgtggaaagctaag

SEQ ID NO: 258804 - DNA, 25 bp, probe
tggagggtagttttcaaaactcaag

SEQ ID NO: 258805 - DNA, 25 bp, probe
ggcggatggttttccaaaactccag

SEQ ID NO: 258806 - DNA, 25 bp, probe
ggcaggattgtcttaaaaacccagc

SEQ ID NO: 258807 - DNA, 25 bp, probe
ggcaggacgtctaagctgaaaccca

SEQ ID NO: 258808 - DNA, 25 bp, probe
ggcagtgcaggcattactaaaagaa

SEQ ID NO: 258809 - DNA, 25 bp, probe
ggcagcagagaacttcctataactg

SEQ ID NO: 258810 - DNA, 25 bp, probe
ggcagcacacaccggctgttatgac

SEQ ID NO: 258811 - DNA, 25 bp, probe
ggcactgcacaccttgtatattgtc

SEQ ID NO: 258812 - DNA, 25 bp, probe
ggcaggctcaccagtgattgctgct

SEQ ID NO: 258813 - DNA, 25 bp, probe
ggcagccatccctagatgttggttt

SEQ ID NO: 258814 - DNA, 25 bp, probe
ggcagccgtcatcgatgagattgtg

SEQ ID NO: 258815 - DNA, 25 bp, probe
ggcaagctgctactacagcatgggg

SEQ ID NO: 258816 - DNA, 25 bp, probe
ggcaacctcatgaacaggatctggg

SEQ ID NO: 258817 - DNA, 25 bp, probe
ggcaaacactgaaggcatccatgcg

SEQ ID NO: 258818 - DNA, 25 bp, probe
ggcactggcacagtcaggaccagcg

SEQ ID NO: 258819 - DNA, 25 bp, probe
ggcaatgcgaacccaaatgcagcag

SEQ ID NO: 258820 - DNA, 25 bp, probe
ggcaatggttgcccagaagaggaaa

SEQ ID NO: 258821 - DNA, 25 bp, probe
ggcatttgttcctgaacaggagggc

SEQ ID NO: 258822 - DNA, 25 bp, probe
ggcaacctattctcactaagatggg

SEQ ID NO: 258823 - DNA, 25 bp, probe
ggcaggaaagtctgcctcacgcagg

SEQ ID NO: 258824 - DNA, 25 bp, probe
ggcagggagaactgtccagcgagga

SEQ ID NO: 258825 - DNA, 25 bp, probe
ggcaggacaaactgaccagtgagtc

SEQ ID NO: 258826 - DNA, 25 bp, probe
ggcagcaaaatttaacacctaggcc

SEQ ID NO: 258827 - DNA, 25 bp, probe
ggcaaaacatataccacccatagtg

SEQ ID NO: 258828 - DNA, 25 bp, probe
ggcaccaccatgtaccctggcattg

SEQ ID NO: 258829 - DNA, 25 bp, probe
ggcacaggactgtgccctgtgctgt

SEQ ID NO: 258830 - DNA, 25 bp, probe
ggcaagggcaaggccttgcagctct

SEQ ID NO: 258831 - DNA, 25 bp, probe
ggcatggtggcatgcgcctgtaatc

SEQ ID NO: 258832 - DNA, 25 bp, probe
ggcatggtggaagccactgccatga

SEQ ID NO: 258833 - DNA, 25 bp, probe
ggcaggggggatccaagatcaggtc

SEQ ID NO: 258834 - DNA, 25 bp, probe
ggcgggcaacgagaagctaaccatg

SEQ ID NO: 258835 - DNA, 25 bp, probe
ggcatgggaaaagtccagaaacctg

SEQ ID NO: 258836 - DNA, 25 bp, probe
ggcatggaaaccttgccacatgaaa

SEQ ID NO: 258837 - DNA, 25 bp, probe
ggcatggactacttgagccaaaaac

SEQ ID NO: 258838 - DNA, 25 bp, probe
ggcaacatctactgagctaatagcc

SEQ ID NO: 258839 - DNA, 25 bp, probe
ggcaagcattactggaaacatcctc

SEQ ID NO: 258840 - DNA, 25 bp, probe
ggcaactaatctttcaaaatcatcc

SEQ ID NO: 258841 - DNA, 25 bp, probe
ggcaactgacttgtcattaaaacct

SEQ ID NO: 258842 - DNA, 25 bp, probe
ggcaacggccttccatctgaaaggc

SEQ ID NO: 258843 - DNA, 25 bp, probe
ggcaacgaccagtctcagtacaaga

SEQ ID NO: 258844 - DNA, 25 bp, probe
ggcaactacacagcaagcaaacagg

SEQ ID NO: 258845 - DNA, 25 bp, probe
ggcacctcaactgtgacaatcagca

SEQ ID NO: 258846 - DNA, 25 bp, probe
ggcaactcagatgacttcctcagcc

SEQ ID NO: 258847 - DNA, 25 bp, probe
ggcaagtagtaagctgcctgcctcc

SEQ ID NO: 258848 - DNA, 25 bp, probe
ggcaagtagtaagctgcctgcctcc

SEQ ID NO: 258849 - DNA, 25 bp, probe
ggcaaaaatagagtcaggctcctcc

SEQ ID NO: 258850 - DNA, 25 bp, probe
ggcaagaacacaagtggaggcagcc

SEQ ID NO: 258851 - DNA, 25 bp, probe
ggcagctaacacatgaatgaggcca

SEQ ID NO: 258852 - DNA, 25 bp, probe
ggcagcattaacagttctacacatt

SEQ ID NO: 258853 - DNA, 25 bp, probe
ggcaaaaacagccttctagcacact

SEQ ID NO: 258854 - DNA, 25 bp, probe
ggcaaaaatctcctcggaacacgcc

SEQ ID NO: 258855 - DNA, 25 bp, probe
ggcaaaaatctcctcagaacacgcc

SEQ ID NO: 258856 - DNA, 25 bp, probe
ggcaacaaattttcagtcatcactg

SEQ ID NO: 258857 - DNA, 25 bp, probe
ggcaactctgtgatccagtcaacat

SEQ ID NO: 258858 - DNA, 25 bp, probe
ggcagcaccgtgaagacgaatatga

SEQ ID NO: 258859 - DNA, 25 bp, probe
ggcagcagcacatctaacgagtagc

SEQ ID NO: 258860 - DNA, 25 bp, probe
ggcagcagcacatctaacgagtagc

SEQ ID NO: 258861 - DNA, 25 bp, probe
ggcagccagggcttacctgtacact

SEQ ID NO: 258862 - DNA, 25 bp, probe
ggcagccgggcttcaaaagcaacat

SEQ ID NO: 258863 - DNA, 25 bp, probe
ggcagctcgggcaggggagaacatt

SEQ ID NO: 258864 - DNA, 25 bp, probe
ggcacattgcccatggctgggaaca

SEQ ID NO: 258865 - DNA, 25 bp, probe
ggcatatggcccagacggcaaacca

SEQ ID NO: 258866 - DNA, 25 bp, probe
ggcagaggcccgaacttgaatacct

SEQ ID NO: 258867 - DNA, 25 bp, probe
ggcagagccactggttttgagaacc

SEQ ID NO: 258868 - DNA, 25 bp, probe
ggcagcctatctcattatctaatga

SEQ ID NO: 258869 - DNA, 25 bp, probe
ggcagcctatctcattatctaatga

SEQ ID NO: 258870 - DNA, 25 bp, probe
ggcacctacatccttattgacatgg

SEQ ID NO: 258871 - DNA, 25 bp, probe
ggcatcggcaccatcattggacatg

SEQ ID NO: 258872 - DNA, 25 bp, probe
ggcactcgcaggatcctgcagtgct

SEQ ID NO: 258873 - DNA, 25 bp, probe
ggcacttcaatgagacggtgctcac

SEQ ID NO: 258874 - DNA, 25 bp, probe
ggcacttcaatgagacggtgctcac

SEQ ID NO: 258875 - DNA, 25 bp, probe
ggcacagtcaatatacaggagtcag

SEQ ID NO: 258876 - DNA, 25 bp, probe
ggcacagtcaatatacaggagtcag

SEQ ID NO: 258877 - DNA, 25 bp, probe
ggcacagggctaattagtggacaag

SEQ ID NO: 258878 - DNA, 25 bp, probe
ggcacagggctaattagtggacaag

SEQ ID NO: 258879 - DNA, 25 bp, probe
ggcaaaggctatctacgacctgaga

SEQ ID NO: 258880 - DNA, 25 bp, probe
ggcaaagctttgatccgacatctga

SEQ ID NO: 258881 - DNA, 25 bp, probe
ggcacaattttttctggaatctcac

SEQ ID NO: 258882 - DNA, 25 bp, probe
ggcaaattctaccactgtattaaca

SEQ ID NO: 258883 - DNA, 25 bp, probe
ggcaaacctaatcttatcttccaag

SEQ ID NO: 258884 - DNA, 25 bp, probe
ggcaaagactacattgttcttccga

SEQ ID NO: 258885 - DNA, 25 bp, probe
ggcagacatacaacacctgtacttt

SEQ ID NO: 258886 - DNA, 25 bp, probe
ggctatcccagagccgtgaactttg

SEQ ID NO: 258887 - DNA, 25 bp, probe
ggcattccggttgatgctaacttct

SEQ ID NO: 258888 - DNA, 25 bp, probe
ggcattagtgtagattccaactttc

SEQ ID NO: 258889 - DNA, 25 bp, probe
ggcattagtgtagattccaactttc

SEQ ID NO: 258890 - DNA, 25 bp, probe
ggcaaggtgtagtatgtccagtaat

SEQ ID NO: 258891 - DNA, 25 bp, probe
ggcaactgaaattataccaggcaat

SEQ ID NO: 258892 - DNA, 25 bp, probe
ggcaaaacctgaatatccagtgaat

SEQ ID NO: 258893 - DNA, 25 bp, probe
ggcaaatacctgatctgcaagatgc

SEQ ID NO: 258894 - DNA, 25 bp, probe
ggcaaactactaacatgcattgtga

SEQ ID NO: 258895 - DNA, 25 bp, probe
ggcaagacatttaccatgctgtgag

SEQ ID NO: 258896 - DNA, 25 bp, probe
ggcaaatatgtaccagctgtggaga

SEQ ID NO: 258897 - DNA, 25 bp, probe
ggcaactatgtgaaagcgtgtgctg

SEQ ID NO: 258898 - DNA, 25 bp, probe
ggcaacatgttgagaccctgtgtct

SEQ ID NO: 258899 - DNA, 25 bp, probe
ggcaaatttgatagagaactgtact

SEQ ID NO: 258900 - DNA, 25 bp, probe
ggcagacatctggaaaacctgtgac

SEQ ID NO: 258901 - DNA, 25 bp, probe
ggcacatgcttataacagcactttg

SEQ ID NO: 258902 - DNA, 25 bp, probe
ggcaccgctaagcaagcattgtctg

SEQ ID NO: 258903 - DNA, 25 bp, probe
ggcacaggtgcaagtaaaattcgtc

SEQ ID NO: 258904 - DNA, 25 bp, probe
ggcactgggcagagaaagctggggc

SEQ ID NO: 258905 - DNA, 25 bp, probe
ggcactggcggtcaagtgtggagga

SEQ ID NO: 258906 - DNA, 25 bp, probe
ggcactggacttcaagcgaaaggca

SEQ ID NO: 258907 - DNA, 25 bp, probe
ggcaggcggttccagggagacaagc

SEQ ID NO: 258908 - DNA, 25 bp, probe
ggcagctgcggtccatcttggtcaa

SEQ ID NO: 258909 - DNA, 25 bp, probe
ggcagctgctggatatgttcaacaa

SEQ ID NO: 258910 - DNA, 25 bp, probe
ggcagctgctctatttaatgaaagc

SEQ ID NO: 258911 - DNA, 25 bp, probe
ggcagagtcctcttgtacttcaaga

SEQ ID NO: 258912 - DNA, 25 bp, probe
ggcagaggcagtgtggcctccaatc

SEQ ID NO: 258913 - DNA, 25 bp, probe
ggcagcaaggatgtggtccgctacc

SEQ ID NO: 258914 - DNA, 25 bp, probe
ggcagccaggaatgtgttggtcacc

SEQ ID NO: 258915 - DNA, 25 bp, probe
ggcagcgcgtaacgtgctgttgacc

SEQ ID NO: 258916 - DNA, 25 bp, probe
ggcaacagagaatgatgctggtgca

SEQ ID NO: 258917 - DNA, 25 bp, probe
ggcaaacatgaattgactgggcata

SEQ ID NO: 258918 - DNA, 25 bp, probe
ggcacaactggaagacttggaacct

SEQ ID NO: 258919 - DNA, 25 bp, probe
ggcaggctcggttactaggaacact

SEQ ID NO: 258920 - DNA, 25 bp, probe
ggcagcccaggtaactgggccagca

SEQ ID NO: 258921 - DNA, 25 bp, probe
ggcagcccagagagacctgccaact

SEQ ID NO: 258922 - DNA, 25 bp, probe
ggcacccacagtgacatgcttaagt

SEQ ID NO: 258923 - DNA, 25 bp, probe
ggcaccaaacgctatatgcctccag

SEQ ID NO: 258924 - DNA, 25 bp, probe
ggcaccagaagcgcattctttgcag

SEQ ID NO: 258925 - DNA, 25 bp, probe
ggcaaacatacagatccagagtcag

SEQ ID NO: 258926 - DNA, 25 bp, probe
ggcaagaacactgtgcacatggtca

SEQ ID NO: 258927 - DNA, 25 bp, probe
ggcaagagaacaagatcctgtctca

SEQ ID NO: 258928 - DNA, 25 bp, probe
ggcaacagaatgagactctgtctca

SEQ ID NO: 258929 - DNA, 25 bp, probe
ggcaacacagtgaggccttatctca

SEQ ID NO: 258930 - DNA, 25 bp, probe
ggcagtcacagggggcctgtgtcac

SEQ ID NO: 258931 - DNA, 25 bp, probe
ggcaggaatgtgtggcagatttagt

SEQ ID NO: 258932 - DNA, 25 bp, probe
ggcagggaagaggcaagtttaatca

SEQ ID NO: 258933 - DNA, 25 bp, probe
ggcatgggaagggtggggtttccat

SEQ ID NO: 258934 - DNA, 25 bp, probe
ggcagctaaaagttgggggtgttct

SEQ ID NO: 258935 - DNA, 25 bp, probe
ggcaaatagaattgggctggggttt

SEQ ID NO: 258936 - DNA, 25 bp, probe
ggcaaacagcagtgatggctgggga

SEQ ID NO: 258937 - DNA, 25 bp, probe
ggcacagtcaggtgggctgttggga

SEQ ID NO: 258938 - DNA, 25 bp, probe
ggcagcagacatgaagcgggtagtg

SEQ ID NO: 258939 - DNA, 25 bp, probe
ggcagctgaaaaagttggatgaaga

SEQ ID NO: 258940 - DNA, 25 bp, probe
ggcagctcgaaactgtttggtaaac

SEQ ID NO: 258941 - DNA, 25 bp, probe
ggcagccagaaacatcctggtagct

SEQ ID NO: 258942 - DNA, 25 bp, probe
ggcagccaacaaggcctcgttggcc

SEQ ID NO: 258943 - DNA, 25 bp, probe
ggcacctaataatgcctttgggcag

SEQ ID NO: 258944 - DNA, 25 bp, probe
ggcacctaataatgcctttgggcag

SEQ ID NO: 258945 - DNA, 25 bp, probe
ggcacctagaacaagcctgttgggt

SEQ ID NO: 258946 - DNA, 25 bp, probe
ggcacaccaaagggcagtggggctg

SEQ ID NO: 258947 - DNA, 25 bp, probe
ggcacaccaaagggcagtggggctg

SEQ ID NO: 258948 - DNA, 25 bp, probe
ggcagcaccaaagttgaggagaaca

SEQ ID NO: 258949 - DNA, 25 bp, probe
ggcagcaccaaagttgaggagaaca

SEQ ID NO: 258950 - DNA, 25 bp, probe
ggcaccagaagctttgcgtggagaa

SEQ ID NO: 258951 - DNA, 25 bp, probe
ggcaccagacacttctggggatggt

SEQ ID NO: 258952 - DNA, 25 bp, probe
ggcacaccaagtctggggtgcagct

SEQ ID NO: 258953 - DNA, 25 bp, probe
ggcacagcacaggtggtgggaggtg

SEQ ID NO: 258954 - DNA, 25 bp, probe
ggcacaaagcattgcttgggttggt

SEQ ID NO: 258955 - DNA, 25 bp, probe
ggcagacacagccctatgggtcatg

SEQ ID NO: 258956 - DNA, 25 bp, probe
ggcaacacaaggacatggtgcgcat

SEQ ID NO: 258957 - DNA, 25 bp, probe
ggcaacacaaggagttcctgcgcct

SEQ ID NO: 258958 - DNA, 25 bp, probe
ggcaacacaaggagttcctgcgcct

SEQ ID NO: 258959 - DNA, 25 bp, probe
ggcagacagcgggtatgttccggcc

SEQ ID NO: 258960 - DNA, 25 bp, probe
ggcagagaggggcaggcttgggcac

SEQ ID NO: 258961 - DNA, 25 bp, probe
ggcaggggagtgccaaggttgtcct

SEQ ID NO: 258962 - DNA, 25 bp, probe
ggcagggggaggatggtaatcacag

SEQ ID NO: 258963 - DNA, 25 bp, probe
ggcaggggagtctgcttgtcttaga

SEQ ID NO: 258964 - DNA, 25 bp, probe
ggcagcaaggtcgtagctgtgttaa

SEQ ID NO: 258965 - DNA, 25 bp, probe
ggcaggaactggggtggctatcaat

SEQ ID NO: 258966 - DNA, 25 bp, probe
ggcaggacactgattgtttatagga

SEQ ID NO: 258967 - DNA, 25 bp, probe
ggcgtaactggtatttcttgtgtgt

SEQ ID NO: 258968 - DNA, 25 bp, probe
ggcgtaactggtatttcttgtgtgt

SEQ ID NO: 258969 - DNA, 25 bp, probe
ggcaggaactgtgggttgtgttggt

SEQ ID NO: 258970 - DNA, 25 bp, probe
tggggaaggggtgtttggcgaagtg

SEQ ID NO: 258971 - DNA, 25 bp, probe
ggccgaagttgcctcttttaggaat

SEQ ID NO: 258972 - DNA, 25 bp, probe
ggcggcaagcattttcttgattaca

SEQ ID NO: 258973 - DNA, 25 bp, probe
ggcagctatgggtttcttttgatca

SEQ ID NO: 258974 - DNA, 25 bp, probe
ggcagctatgggtttcttttgatca

SEQ ID NO: 258975 - DNA, 25 bp, probe
ggcagctatgggtttcttttgatca

SEQ ID NO: 258976 - DNA, 25 bp, probe
ggcagttcggctagatttctgtctt

SEQ ID NO: 258977 - DNA, 25 bp, probe
ggcagcagatctgtatatttttttc

SEQ ID NO: 258978 - DNA, 25 bp, probe
ggcacagatcttttcattgctattc

SEQ ID NO: 258979 - DNA, 25 bp, probe
ggcacaatcgtggctcactgtaacc

SEQ ID NO: 258980 - DNA, 25 bp, probe
ggcaggatctgaactcgctttacct

SEQ ID NO: 258981 - DNA, 25 bp, probe
ggcagagattatatccctatcttct

SEQ ID NO: 258982 - DNA, 25 bp, probe
ggcaggaatacttcacctttcctct

SEQ ID NO: 258983 - DNA, 25 bp, probe
ggcaggaagacagccctgtgattgt

SEQ ID NO: 258984 - DNA, 25 bp, probe
ggcaggatcgacgcgcttctgtatg

SEQ ID NO: 258985 - DNA, 25 bp, probe
ggcagatgacggggagttaggcatg

SEQ ID NO: 258986 - DNA, 25 bp, probe
ggcagatgacggggagttaggcatg

SEQ ID NO: 258987 - DNA, 25 bp, probe
ggcatggaatggagcagttaagtac

SEQ ID NO: 258988 - DNA, 25 bp, probe
ggcagagtaagggagcaaaggtaca

SEQ ID NO: 258989 - DNA, 25 bp, probe
ggcagacaagggtcgcacagaggtc

SEQ ID NO: 258990 - DNA, 25 bp, probe
ggcagacaagggtcgcacagaggtc

SEQ ID NO: 258991 - DNA, 25 bp, probe
ggcaaacagcagaagcccagggcct

SEQ ID NO: 258992 - DNA, 25 bp, probe
ggcattaccagtacctgagctggcc

SEQ ID NO: 258993 - DNA, 25 bp, probe
ggcagaaaagttgggagcatggcag

SEQ ID NO: 258994 - DNA, 25 bp, probe
ggcacaggatgactagggaatggca

SEQ ID NO: 258995 - DNA, 25 bp, probe
ggcacagcctggtggtggtggcaat

SEQ ID NO: 258996 - DNA, 25 bp, probe
ggcagcagccgggatcgatggtggc

SEQ ID NO: 258997 - DNA, 25 bp, probe
ggcaccaccaggagtggagcctgcg

SEQ ID NO: 258998 - DNA, 25 bp, probe
ggcaccatggggagactgtcctgcc

SEQ ID NO: 258999 - DNA, 25 bp, probe
ggcaccgattggtgagctgatcgct

SEQ ID NO: 259000 - DNA, 25 bp, probe
ggcagctcctagccatagagcttcc

SEQ ID NO: 259001 - DNA, 25 bp, probe
ggcagcatcatcaaggcaatttatc

SEQ ID NO: 259002 - DNA, 25 bp, probe
ggcagcaccaagtctttcaacgtga

SEQ ID NO: 259003 - DNA, 25 bp, probe
ggcatggccaagattgacaacctgt

SEQ ID NO: 259004 - DNA, 25 bp, probe
ggcaggacaacgagaaagccctaag

SEQ ID NO: 259005 - DNA, 25 bp, probe
ggcagtgaacatcccggagagcctc

SEQ ID NO: 259006 - DNA, 25 bp, probe
ggcagtgaacatcccggagagcctc

SEQ ID NO: 259007 - DNA, 25 bp, probe
ggcagagattgctgacgggatggcc

SEQ ID NO: 259008 - DNA, 25 bp, probe
ggcagaatgtgctaccagtggtcat

SEQ ID NO: 259009 - DNA, 25 bp, probe
ggcagagactgatcggctgcgcgaa

SEQ ID NO: 259010 - DNA, 25 bp, probe
ggcaaagctgtgggagtcttgaaat

SEQ ID NO: 259011 - DNA, 25 bp, probe
ggcacttgtgtggtattgttggaat

SEQ ID NO: 259012 - DNA, 25 bp, probe
ggcacttgtgtggtattgttggaat

SEQ ID NO: 259013 - DNA, 25 bp, probe
ggcacatgttgttctcattgaccgt

SEQ ID NO: 259014 - DNA, 25 bp, probe
ggcagcagttgcttactgaacgcca

SEQ ID NO: 259015 - DNA, 25 bp, probe
ggcagagatcgccaacatgtcactg

SEQ ID NO: 259016 - DNA, 25 bp, probe
ggcagagccctatgcagggctacga

SEQ ID NO: 259017 - DNA, 25 bp, probe
ggcagatgcccaacgggcactatcg

SEQ ID NO: 259018 - DNA, 25 bp, probe
ggcagatgcccaacgggcactatcg

SEQ ID NO: 259019 - DNA, 25 bp, probe
ggcaggatgcctggggacagttcag

SEQ ID NO: 259020 - DNA, 25 bp, probe
ggcagagagcgaagtgtactcttgg

SEQ ID NO: 259021 - DNA, 25 bp, probe
ggcagctgacagtttgtggcatctt

SEQ ID NO: 259022 - DNA, 25 bp, probe
ggcagtggattcatgtggcctgttt

SEQ ID NO: 259023 - DNA, 25 bp, probe
ggcagtggattcatgtggcctgttt

SEQ ID NO: 259024 - DNA, 25 bp, probe
ggcagaggaatgtagggcctgcatg

SEQ ID NO: 259025 - DNA, 25 bp, probe
ggcagaggatggaggcagcagcgtg

SEQ ID NO: 259026 - DNA, 25 bp, probe
ggcagcgggtagggcacagggaaga

SEQ ID NO: 259027 - DNA, 25 bp, probe
ggcactgggctacaatgcggagtta

SEQ ID NO: 259028 - DNA, 25 bp, probe
ggcactttgcaaggattgtggagtt

SEQ ID NO: 259029 - DNA, 25 bp, probe
ggcacaagtgcaggcgtttggaggc

SEQ ID NO: 259030 - DNA, 25 bp, probe
ggcacagtgaggactgttctggaga

SEQ ID NO: 259031 - DNA, 25 bp, probe
ggcagagctcggagcctcattgaga

SEQ ID NO: 259032 - DNA, 25 bp, probe
ggcaggtcggcttttacatgatggg

SEQ ID NO: 259033 - DNA, 25 bp, probe
ggcactgaaggcttttgagcaagag

SEQ ID NO: 259034 - DNA, 25 bp, probe
ggcagctccaggttctggacaaccg

SEQ ID NO: 259035 - DNA, 25 bp, probe
ggcagctccaggttctggacaaccg

SEQ ID NO: 259036 - DNA, 25 bp, probe
ggcagctccaggttctggacaaccg

SEQ ID NO: 259037 - DNA, 25 bp, probe
ggcagctccaggttctggacaaccg

SEQ ID NO: 259038 - DNA, 25 bp, probe
ggcagctccaggttctggacaaccg

SEQ ID NO: 259039 - DNA, 25 bp, probe
tggcgattcaggttctcttgccaca

SEQ ID NO: 259040 - DNA, 25 bp, probe
tggcgattcaggttctcttgccaca

SEQ ID NO: 259041 - DNA, 25 bp, probe
tggcgattcaggttctcttgccaca

SEQ ID NO: 259042 - DNA, 25 bp, probe
ggcacatacggattcttgctgccgg

SEQ ID NO: 259043 - DNA, 25 bp, probe
ggcacaggcatgccaaatttgcatc

SEQ ID NO: 259044 - DNA, 25 bp, probe
ggcacaggcacaaagcattgcttgg

SEQ ID NO: 259045 - DNA, 25 bp, probe
ggcagcagtgttgcagcaacctgtg

SEQ ID NO: 259046 - DNA, 25 bp, probe
ggcagatggcttgtgcagaagattg

SEQ ID NO: 259047 - DNA, 25 bp, probe
tgaatttcctgacaaagactgggca

SEQ ID NO: 259048 - DNA, 25 bp, probe
tgtttctcccaggtaatccgggaag

SEQ ID NO: 259049 - DNA, 25 bp, probe
ggcttccccagcaaagattagggaa

SEQ ID NO: 259050 - DNA, 25 bp, probe
ggcttcctgcccaaactggatggga

SEQ ID NO: 259051 - DNA, 25 bp, probe
ggcttggcacctaataccagattaa

SEQ ID NO: 259052 - DNA, 25 bp, probe
ggctgctgtccggaaagttttagaa

SEQ ID NO: 259053 - DNA, 25 bp, probe
ggctttgccgtcaactttttcaaag

SEQ ID NO: 259054 - DNA, 25 bp, probe
ggcttttttcctattcttatcaaag

SEQ ID NO: 259055 - DNA, 25 bp, probe
tgaggcctcttcccaatttaaacaa

SEQ ID NO: 259056 - DNA, 25 bp, probe
tgggctcttaccaagtttaaacaca

SEQ ID NO: 259057 - DNA, 25 bp, probe
ggcgatttatcgatggtccaaaccg

SEQ ID NO: 259058 - DNA, 25 bp, probe
ggcatcattttcgagggtctaaaat

SEQ ID NO: 259059 - DNA, 25 bp, probe
ggcattatttgaccggatctacacc

SEQ ID NO: 259060 - DNA, 25 bp, probe
ggcattgcttacacggatgccttcc

SEQ ID NO: 259061 - DNA, 25 bp, probe
ggcatttaaaacccagattatccct

SEQ ID NO: 259062 - DNA, 25 bp, probe
ggcatgttcaaagccacattatttc

SEQ ID NO: 259063 - DNA, 25 bp, probe
ggcagctgatcagacctcaataatt

SEQ ID NO: 259064 - DNA, 25 bp, probe
ggcagctgatcagacctcaataatt

SEQ ID NO: 259065 - DNA, 25 bp, probe
ggcacaatatgggcactttaaatga

SEQ ID NO: 259066 - DNA, 25 bp, probe
ggcaccagcagagtcactttgacaa

SEQ ID NO: 259067 - DNA, 25 bp, probe
ggcaccagcatggagacctcatgac

SEQ ID NO: 259068 - DNA, 25 bp, probe
ggcagctgagtgcatgacctctgcc

SEQ ID NO: 259069 - DNA, 25 bp, probe
ggcagctgagtgcatgacctctgcc

SEQ ID NO: 259070 - DNA, 25 bp, probe
ggcttagtttgatcttccatggtgg

SEQ ID NO: 259071 - DNA, 25 bp, probe
ggcttgagttctcggtaccatgacc

SEQ ID NO: 259072 - DNA, 25 bp, probe
ggcattagcaattcgtcgactagac

SEQ ID NO: 259073 - DNA, 25 bp, probe
ggcattagcaattcgtcgactagac

SEQ ID NO: 259074 - DNA, 25 bp, probe
ggcattgtacaccgggatctcaagc

SEQ ID NO: 259075 - DNA, 25 bp, probe
ggcttgtgaggccggaatccgggct

SEQ ID NO: 259076 - DNA, 25 bp, probe
ggctattagtatcagaacggggctc

SEQ ID NO: 259077 - DNA, 25 bp, probe
ggctattttagggaagggtgatgta

SEQ ID NO: 259078 - DNA, 25 bp, probe
ggcacttcgcaaggagaagggttta

SEQ ID NO: 259079 - DNA, 25 bp, probe
ggcacctcgagagagaagggcccgg

SEQ ID NO: 259080 - DNA, 25 bp, probe
ggcacctcctgtggagaaggccggg

SEQ ID NO: 259081 - DNA, 25 bp, probe
ggcacaccctgggggagaacatcgc

SEQ ID NO: 259082 - DNA, 25 bp, probe
ggcagacactcgggtggcaacaatt

SEQ ID NO: 259083 - DNA, 25 bp, probe
ggcagcacgtcagggtcataaaaat

SEQ ID NO: 259084 - DNA, 25 bp, probe
ggcagcacgtcagggtcataaaaat

SEQ ID NO: 259085 - DNA, 25 bp, probe
ggcagcacagactctcttaataaga

SEQ ID NO: 259086 - DNA, 25 bp, probe
ggcacaagacaccacaataattatt

SEQ ID NO: 259087 - DNA, 25 bp, probe
ggctcaaaccagacaagcggctacc

SEQ ID NO: 259088 - DNA, 25 bp, probe
tggtaaaccagttctccgaacccat

SEQ ID NO: 259089 - DNA, 25 bp, probe
tggtaacaaatatcgctaaacctta

SEQ ID NO: 259090 - DNA, 25 bp, probe
tggaatagccaataagcttaaagct

SEQ ID NO: 259091 - DNA, 25 bp, probe
ggcagtggcccataagtgtaaaata

SEQ ID NO: 259092 - DNA, 25 bp, probe
ggcagaggacagtaaaagcaaagag

SEQ ID NO: 259093 - DNA, 25 bp, probe
ggcacaagcagacaaaatcaacatg

SEQ ID NO: 259094 - DNA, 25 bp, probe
ggcagagccgatcagaactacaatt

SEQ ID NO: 259095 - DNA, 25 bp, probe
ggcggcaggatctgaactcgcttta

SEQ ID NO: 259096 - DNA, 25 bp, probe
ggcagtcagttcaaaaccttctgga

SEQ ID NO: 259097 - DNA, 25 bp, probe
ggcagatatgtttcaagacgctgta

SEQ ID NO: 259098 - DNA, 25 bp, probe
ggcacacaatattcaatgacccctt

SEQ ID NO: 259099 - DNA, 25 bp, probe
ggcatcgcagtgctaaacatcccta

SEQ ID NO: 259100 - DNA, 25 bp, probe
ggcactgcaggaggagaaccgcgac

SEQ ID NO: 259101 - DNA, 25 bp, probe
ggcagcagggatgagcccttggaca

SEQ ID NO: 259102 - DNA, 25 bp, probe
ggcacgggtggaagcagcattggac

SEQ ID NO: 259103 - DNA, 25 bp, probe
ggcagcagtggcagtggcagcaatg

SEQ ID NO: 259104 - DNA, 25 bp, probe
ggcagcagtggcagtggcagcaatg

SEQ ID NO: 259105 - DNA, 25 bp, probe
ggcagcagtggcagtggcagcaatg

SEQ ID NO: 259106 - DNA, 25 bp, probe
ggcagcctgcgcagacgacaaggct

SEQ ID NO: 259107 - DNA, 25 bp, probe
ggcagcctcgttaggacaaggctgt

SEQ ID NO: 259108 - DNA, 25 bp, probe
tgtccccactttgacatagctgtca

SEQ ID NO: 259109 - DNA, 25 bp, probe
tgtccccactttgacatagctgtca

SEQ ID NO: 259110 - DNA, 25 bp, probe
ggccaaacctctgttcagtgtaaat

SEQ ID NO: 259111 - DNA, 25 bp, probe
ggccaaacctctgttcagtgtaaat

SEQ ID NO: 259112 - DNA, 25 bp, probe
ggcaccaaccctgcattgcaggttg

SEQ ID NO: 259113 - DNA, 25 bp, probe
ggcaccaagcctcaagtggggctga

SEQ ID NO: 259114 - DNA, 25 bp, probe
ggcaccaagaccgaaaagctggagc

SEQ ID NO: 259115 - DNA, 25 bp, probe
tgtgcaaatagtgtcaaaagtaaat

SEQ ID NO: 259116 - DNA, 25 bp, probe
ggcatttaggaattagaagtcaaag

SEQ ID NO: 259117 - DNA, 25 bp, probe
ggcatggctgggaacccaagtccaa

SEQ ID NO: 259118 - DNA, 25 bp, probe
ggcacctgggagagtaagtccagca

SEQ ID NO: 259119 - DNA, 25 bp, probe
ggcacttattgcaatttaacaccag

SEQ ID NO: 259120 - DNA, 25 bp, probe
tggtttatgactcttaaccccctag

SEQ ID NO: 259121 - DNA, 25 bp, probe
ggctgttatgaccttctaaaaacca

SEQ ID NO: 259122 - DNA, 25 bp, probe
ggcttggatttgctctcgaaaatgt

SEQ ID NO: 259123 - DNA, 25 bp, probe
ggcttggatttgctctcgaaaatgt

SEQ ID NO: 259124 - DNA, 25 bp, probe
ggcattaagtggttcctattattct

SEQ ID NO: 259125 - DNA, 25 bp, probe
ggcattaagtggttcctattattct

SEQ ID NO: 259126 - DNA, 25 bp, probe
ggcttatgaggattttccgaattct

SEQ ID NO: 259127 - DNA, 25 bp, probe
ggcttctgtgtatctaggtggacct

SEQ ID NO: 259128 - DNA, 25 bp, probe
ggcttctgtgtatctaggtggacct

SEQ ID NO: 259129 - DNA, 25 bp, probe
ggcttcggggactggattgacagta

SEQ ID NO: 259130 - DNA, 25 bp, probe
ggcttctaggaagcggcacttcacc

SEQ ID NO: 259131 - DNA, 25 bp, probe
ggctcctacggagaggtcttcaagg

SEQ ID NO: 259132 - DNA, 25 bp, probe
ggctcctccttagagttcacagaac

SEQ ID NO: 259133 - DNA, 25 bp, probe
ggctccctggtagaatacaccacac

SEQ ID NO: 259134 - DNA, 25 bp, probe
ggcacacctgctgagtaaaacaaat

SEQ ID NO: 259135 - DNA, 25 bp, probe
ggcacgcttctctgttacaaataga

SEQ ID NO: 259136 - DNA, 25 bp, probe
ggcagagttactcgtgtactaatag

SEQ ID NO: 259137 - DNA, 25 bp, probe
ggcatagtccaccgtgacattaaag

SEQ ID NO: 259138 - DNA, 25 bp, probe
ggcatcattctgggggcctttatca

SEQ ID NO: 259139 - DNA, 25 bp, probe
ggcagttctcgggtgtgttttgcac

SEQ ID NO: 259140 - DNA, 25 bp, probe
ggcagatcccacaggagtttgtcaa

SEQ ID NO: 259141 - DNA, 25 bp, probe
ggcagatcccacaggagtttgtcaa

SEQ ID NO: 259142 - DNA, 25 bp, probe
ggcagttcaaagcaggatatgttaa

SEQ ID NO: 259143 - DNA, 25 bp, probe
ggcagttcaaagcaggatatgttaa

SEQ ID NO: 259144 - DNA, 25 bp, probe
ggcagtctccaacaccataggaagc

SEQ ID NO: 259145 - DNA, 25 bp, probe
ggcagctccacgccgaaaaatgaag

SEQ ID NO: 259146 - DNA, 25 bp, probe
ggcagctccacgccgaaaaatgaag

SEQ ID NO: 259147 - DNA, 25 bp, probe
ggcaccatcctcagaacaggaacag

SEQ ID NO: 259148 - DNA, 25 bp, probe
ggctccttcacaaaccagagaccaa

SEQ ID NO: 259149 - DNA, 25 bp, probe
ggctccttcacaaaccagagaccaa

SEQ ID NO: 259150 - DNA, 25 bp, probe
ggctcctctaagaatctcacaggac

SEQ ID NO: 259151 - DNA, 25 bp, probe
tggcttccttagagtccaaatcctt

SEQ ID NO: 259152 - DNA, 25 bp, probe
tggcttccttagagtccaaatcctt

SEQ ID NO: 259153 - DNA, 25 bp, probe
ggcttcctttggtatcaaagtactt

SEQ ID NO: 259154 - DNA, 25 bp, probe
ggcttcttctggggtaaagaccttg

SEQ ID NO: 259155 - DNA, 25 bp, probe
ggcagcttttggggttagatatttt

SEQ ID NO: 259156 - DNA, 25 bp, probe
ggcactcttgtgggaatataaaatg

SEQ ID NO: 259157 - DNA, 25 bp, probe
ggcactttgtggcaagattttcatg

SEQ ID NO: 259158 - DNA, 25 bp, probe
ggcactgttgattcaaatttatcct

SEQ ID NO: 259159 - DNA, 25 bp, probe
ggcactgttgattcaaatttatcct

SEQ ID NO: 259160 - DNA, 25 bp, probe
ggcactgaatcatccatattttaat

SEQ ID NO: 259161 - DNA, 25 bp, probe
ggcactgaatcatccatattttaat

SEQ ID NO: 259162 - DNA, 25 bp, probe
ggcactgaatcatccatattttaat

SEQ ID NO: 259163 - DNA, 25 bp, probe
ggcactgaatcatccatattttaat

SEQ ID NO: 259164 - DNA, 25 bp, probe
ggcaccaaatcccatatattcttct

SEQ ID NO: 259165 - DNA, 25 bp, probe
ggcactgaccattttatatggattt

SEQ ID NO: 259166 - DNA, 25 bp, probe
ggcactacacagtttacttttatat

SEQ ID NO: 259167 - DNA, 25 bp, probe
ggcacttcaattttgcactgtcttt

SEQ ID NO: 259168 - DNA, 25 bp, probe
ggcactgtatatattgtagacttgt

SEQ ID NO: 259169 - DNA, 25 bp, probe
ggcacattgaattcttggatgcagt

SEQ ID NO: 259170 - DNA, 25 bp, probe
ggcacaggactgactctgggatgct

SEQ ID NO: 259171 - DNA, 25 bp, probe
ggcagaggagtgagctctgtggtcc

SEQ ID NO: 259172 - DNA, 25 bp, probe
ggcagaggggatgtctggcttgcct

SEQ ID NO: 259173 - DNA, 25 bp, probe
ggcagcggtgaaggctgtggtggcc

SEQ ID NO: 259174 - DNA, 25 bp, probe
ggcagagcagctgagggaggggcgc

SEQ ID NO: 259175 - DNA, 25 bp, probe
ggcagagcagctgagggaggggcgc

SEQ ID NO: 259176 - DNA, 25 bp, probe
ggcagagcagctgagggaggggcgc

SEQ ID NO: 259177 - DNA, 25 bp, probe
ggcagagagcttggagggggcgtgg

SEQ ID NO: 259178 - DNA, 25 bp, probe
ggcagagagatagccgggctccagg

SEQ ID NO: 259179 - DNA, 25 bp, probe
ggcacgtggaggaggagcccagagt

SEQ ID NO: 259180 - DNA, 25 bp, probe
ggcagtgaggttagggagccaccag

SEQ ID NO: 259181 - DNA, 25 bp, probe
ggcggaggttgcggttagccgagat

SEQ ID NO: 259182 - DNA, 25 bp, probe
ggcacgactgttgttacactcgagc

SEQ ID NO: 259183 - DNA, 25 bp, probe
ggcacgggttcggtgaactcatgcg

SEQ ID NO: 259184 - DNA, 25 bp, probe
ggcactggtgtttctagatagtgaa

SEQ ID NO: 259185 - DNA, 25 bp, probe
ggcactggtgtttctagatagtgaa

SEQ ID NO: 259186 - DNA, 25 bp, probe
ggcactgttgtttcacaagatgatg

SEQ ID NO: 259187 - DNA, 25 bp, probe
ggcactattgaattcacgagcatcg

SEQ ID NO: 259188 - DNA, 25 bp, probe
ggcactactgcaggagaggagcttg

SEQ ID NO: 259189 - DNA, 25 bp, probe
ggcacctgcgcagatagagacaatc

SEQ ID NO: 259190 - DNA, 25 bp, probe
ggcaccatctctgtggtgaagtcac

SEQ ID NO: 259191 - DNA, 25 bp, probe
ggcaccatctctgtggtgaagtcac

SEQ ID NO: 259192 - DNA, 25 bp, probe
ggcaccatctctgtggtgaagtcac

SEQ ID NO: 259193 - DNA, 25 bp, probe
ggcactgctactgtgaggagggctg

SEQ ID NO: 259194 - DNA, 25 bp, probe
ggcactgtcagccaatgtggggggt

SEQ ID NO: 259195 - DNA, 25 bp, probe
ggcactgtcagagaatctggagttg

SEQ ID NO: 259196 - DNA, 25 bp, probe
ggcactctggaatacttgcagctga

SEQ ID NO: 259197 - DNA, 25 bp, probe
ggcactccagaatatctggcaccag

SEQ ID NO: 259198 - DNA, 25 bp, probe
ggcactccgatatgacagctaaagc

SEQ ID NO: 259199 - DNA, 25 bp, probe
ggcagctggagaccaacatggaaac

SEQ ID NO: 259200 - DNA, 25 bp, probe
ggcagctggtgacggagcatgcgca

SEQ ID NO: 259201 - DNA, 25 bp, probe
ggcagctggtgacggagcatgcgca

SEQ ID NO: 259202 - DNA, 25 bp, probe
ggcagcatttgatgatagcaagaca

SEQ ID NO: 259203 - DNA, 25 bp, probe
ggcagcttctgaggttgccaaaggc

SEQ ID NO: 259204 - DNA, 25 bp, probe
ggcagcttctgaggttgccaaaggc

SEQ ID NO: 259205 - DNA, 25 bp, probe
ggcagtttgcaacttgcacggggag

SEQ ID NO: 259206 - DNA, 25 bp, probe
ggcaggtccatacagcatgggtggc

SEQ ID NO: 259207 - DNA, 25 bp, probe
ggcagcgctcaaaccagtgaggctg

SEQ ID NO: 259208 - DNA, 25 bp, probe
ggcagtgccagacccagaagagggc

SEQ ID NO: 259209 - DNA, 25 bp, probe
ggcagcggagcatcgagaggaggcc

SEQ ID NO: 259210 - DNA, 25 bp, probe
ggcaccatggttagagggaggcaca

SEQ ID NO: 259211 - DNA, 25 bp, probe
ggcaccaagtccattttgctgagcc

SEQ ID NO: 259212 - DNA, 25 bp, probe
ggcaccagagttgatctttggagcc

SEQ ID NO: 259213 - DNA, 25 bp, probe
ggcaccagcagtcctgaagttggca

SEQ ID NO: 259214 - DNA, 25 bp, probe
ggcaccaagtacaaagtgggaccaa

SEQ ID NO: 259215 - DNA, 25 bp, probe
ggcaccaagtacaaagtgggaccaa

SEQ ID NO: 259216 - DNA, 25 bp, probe
ggcaccaagtacacatatggcccgg

SEQ ID NO: 259217 - DNA, 25 bp, probe
ggcacccaggaagggttgaccaggg

SEQ ID NO: 259218 - DNA, 25 bp, probe
ggcacccatggatcgctggtgacac

SEQ ID NO: 259219 - DNA, 25 bp, probe
ggcatcccagaggcaaggggacctg

SEQ ID NO: 259220 - DNA, 25 bp, probe
ggcatgctaagggcaaggcttactt

SEQ ID NO: 259221 - DNA, 25 bp, probe
ggctgtaagtctcatggttcagtcc

SEQ ID NO: 259222 - DNA, 25 bp, probe
ggctccactaatctctttagtaaat

SEQ ID NO: 259223 - DNA, 25 bp, probe
ggctgaattactgttaccctcagaa

SEQ ID NO: 259224 - DNA, 25 bp, probe
ggcttattcttatttaatccatgtg

SEQ ID NO: 259225 - DNA, 25 bp, probe
ggcttttctgcaataaagtcacgag

SEQ ID NO: 259226 - DNA, 25 bp, probe
ggcttctgtacagtcaggtctgctc

SEQ ID NO: 259227 - DNA, 25 bp, probe
ggcttgttactgccttttgtcaaat

SEQ ID NO: 259228 - DNA, 25 bp, probe
ggcttgttactgccttttgtcaaat

SEQ ID NO: 259229 - DNA, 25 bp, probe
ggcatgagttggggtaatttcctat

SEQ ID NO: 259230 - DNA, 25 bp, probe
ggcatagggctgtgtatgatttccc

SEQ ID NO: 259231 - DNA, 25 bp, probe
ggcatcagggacagtttttccacgg

SEQ ID NO: 259232 - DNA, 25 bp, probe
ggcagctggtgacacttttctcagc

SEQ ID NO: 259233 - DNA, 25 bp, probe
ggcagagagtgagatctccctctct

SEQ ID NO: 259234 - DNA, 25 bp, probe
ggcagaatgtgcacttccactgctc

SEQ ID NO: 259235 - DNA, 25 bp, probe
ggcagattgactcctaccatggagc

SEQ ID NO: 259236 - DNA, 25 bp, probe
ggcagccatgacctgtataaggtgg

SEQ ID NO: 259237 - DNA, 25 bp, probe
ggcacctgaggtcatcaagcagtcg

SEQ ID NO: 259238 - DNA, 25 bp, probe
ggcacctgaagtcatcactcgtgcc

SEQ ID NO: 259239 - DNA, 25 bp, probe
ggcaccgagaacctagcacgtgcca

SEQ ID NO: 259240 - DNA, 25 bp, probe
ggcaccggagtccctgaaggatggg

SEQ ID NO: 259241 - DNA, 25 bp, probe
ggcacgcggagaacctcgtgcagtg

SEQ ID NO: 259242 - DNA, 25 bp, probe
ggcatggtagcacacacctgtagtc

SEQ ID NO: 259243 - DNA, 25 bp, probe
ggcaggttgtggaactcagatattc

SEQ ID NO: 259244 - DNA, 25 bp, probe
ggcatggcttgggtatctcaattcc

SEQ ID NO: 259245 - DNA, 25 bp, probe
ggcatggcttgggtatctcaattcc

SEQ ID NO: 259246 - DNA, 25 bp, probe
ggcatgacaatgctgctacaaaatc

SEQ ID NO: 259247 - DNA, 25 bp, probe
ggcagaatcacagtctcacatactg

SEQ ID NO: 259248 - DNA, 25 bp, probe
ggcagagctgaagctacatgctcac

SEQ ID NO: 259249 - DNA, 25 bp, probe
ggcaggctgaattgtgatcctacct

SEQ ID NO: 259250 - DNA, 25 bp, probe
ggcacctgagctgtgacctgatgcc

SEQ ID NO: 259251 - DNA, 25 bp, probe
ggcagccagagctcagacctgagcc

SEQ ID NO: 259252 - DNA, 25 bp, probe
ggcacgccagaaggatgccgcagac

SEQ ID NO: 259253 - DNA, 25 bp, probe
ggcagaacggagcatcagccagacc

SEQ ID NO: 259254 - DNA, 25 bp, probe
ggcagagacgtgaccaagccatccc

SEQ ID NO: 259255 - DNA, 25 bp, probe
ggcagagaggcaatcatcaatctcc

SEQ ID NO: 259256 - DNA, 25 bp, probe
ggcagaatgagatgatcgaatctgg

SEQ ID NO: 259257 - DNA, 25 bp, probe
ggcagaagcacttgtcagaggtgga

SEQ ID NO: 259258 - DNA, 25 bp, probe
ggcagcccctagaaaggagggaggc

SEQ ID NO: 259259 - DNA, 25 bp, probe
ggcacctacggcaaagtcaagcggg

SEQ ID NO: 259260 - DNA, 25 bp, probe
ggcatcagctactgacacgtaaggt

SEQ ID NO: 259261 - DNA, 25 bp, probe
ggcagagctgtgtcgcacagcagtg

SEQ ID NO: 259262 - DNA, 25 bp, probe
ggcagcagtggtggcagcagtggca

SEQ ID NO: 259263 - DNA, 25 bp, probe
ggcagcagtggtggcagcagtggca

SEQ ID NO: 259264 - DNA, 25 bp, probe
ggcagcagtggtggcagcagtggca

SEQ ID NO: 259265 - DNA, 25 bp, probe
ggcagcagtggtggcagcagtggca

SEQ ID NO: 259266 - DNA, 25 bp, probe
ggcagagctgagagccatggcctgc

SEQ ID NO: 259267 - DNA, 25 bp, probe
ggcagtgctgaaaatccactctgca

SEQ ID NO: 259268 - DNA, 25 bp, probe
tggcgacgatgaacatgccgttggt

SEQ ID NO: 259269 - DNA, 25 bp, probe
ggcagacgatgccacgacggtggac

SEQ ID NO: 259270 - DNA, 25 bp, probe
ggcagagatggaccaggcggtggac

SEQ ID NO: 259271 - DNA, 25 bp, probe
ggcagtgcaggagaggaggcgtccc

SEQ ID NO: 259272 - DNA, 25 bp, probe
ggcagtcagtagcagaggacgatcc

SEQ ID NO: 259273 - DNA, 25 bp, probe
ggcagctgagattcgaaagcaccat

SEQ ID NO: 259274 - DNA, 25 bp, probe
ggcactggtcacaaagctcagctgt

SEQ ID NO: 259275 - DNA, 25 bp, probe
ggcagctggctctaaagtcagtgag

SEQ ID NO: 259276 - DNA, 25 bp, probe
ggcagatgagcttacaagtattgaa

SEQ ID NO: 259277 - DNA, 25 bp, probe
ggcagatgagcttacaagtattgaa

SEQ ID NO: 259278 - DNA, 25 bp, probe
ggcagtgtttgaacagcattgtaaa

SEQ ID NO: 259279 - DNA, 25 bp, probe
ggcagcttgttgaaggctcgtcaaa

SEQ ID NO: 259280 - DNA, 25 bp, probe
ggcagctctttaatgtacttcaaaa

SEQ ID NO: 259281 - DNA, 25 bp, probe
ggcgacatgttcaactactataaga

SEQ ID NO: 259282 - DNA, 25 bp, probe
ggcagcaggttcactgttagccaga

SEQ ID NO: 259283 - DNA, 25 bp, probe
ggcagagttgtcatcttggagacta

SEQ ID NO: 259284 - DNA, 25 bp, probe
ggcagattatcgacatctttgaagc

SEQ ID NO: 259285 - DNA, 25 bp, probe
ggcagcaggagccactgggtgaaga

SEQ ID NO: 259286 - DNA, 25 bp, probe
ggcagcttgaaactgagatgtgaac

SEQ ID NO: 259287 - DNA, 25 bp, probe
ggcagcattgcaatagtgaggcaga

SEQ ID NO: 259288 - DNA, 25 bp, probe
ggcagcagagcaacactctgtctca

SEQ ID NO: 259289 - DNA, 25 bp, probe
ggcagcactcattcacttgataaat

SEQ ID NO: 259290 - DNA, 25 bp, probe
ggcagagctgcatcatccttgcagg

SEQ ID NO: 259291 - DNA, 25 bp, probe
ggcaggaggatcacttgagcctatt

SEQ ID NO: 259292 - DNA, 25 bp, probe
ggcaccatgtctacctatgaactac

SEQ ID NO: 259293 - DNA, 25 bp, probe
ggcatccaggtaggaatgcggcttc

SEQ ID NO: 259294 - DNA, 25 bp, probe
ggcaccaaataccgcagcgagtcct

SEQ ID NO: 259295 - DNA, 25 bp, probe
ggcaccaaataccgcagcgagtcct

SEQ ID NO: 259296 - DNA, 25 bp, probe
ggcaccagagaaccgtggatgtctt

SEQ ID NO: 259297 - DNA, 25 bp, probe
ggcaccgagatgagcgtggacgttg

SEQ ID NO: 259298 - DNA, 25 bp, probe
ggcatccagtgacggcaggaacgtg

SEQ ID NO: 259299 - DNA, 25 bp, probe
ggcaccatgtggctcagtggaagac

SEQ ID NO: 259300 - DNA, 25 bp, probe
ggcaccatgtggctcagtggaagac

SEQ ID NO: 259301 - DNA, 25 bp, probe
ggcaccatggtgatcaatgcagagg

SEQ ID NO: 259302 - DNA, 25 bp, probe
ggcagcttgctgaattcacgatggg

SEQ ID NO: 259303 - DNA, 25 bp, probe
ggcatttggcgtgaccatgtgggaa

SEQ ID NO: 259304 - DNA, 25 bp, probe
ggcattttgtgggtggagggccaga

SEQ ID NO: 259305 - DNA, 25 bp, probe
ggcagactggtggcagtggagtagg

SEQ ID NO: 259306 - DNA, 25 bp, probe
ggcagcctgactcagggaggcgagc

SEQ ID NO: 259307 - DNA, 25 bp, probe
ggcagcccacccagagggcaagatg

SEQ ID NO: 259308 - DNA, 25 bp, probe
ggcacccgccagagaggggaaggta

SEQ ID NO: 259309 - DNA, 25 bp, probe
ggcggtatccagaggtgagggaggc

SEQ ID NO: 259310 - DNA, 25 bp, probe
ggcagatcccagagggcgagggggc

SEQ ID NO: 259311 - DNA, 25 bp, probe
ggcatgaccaatgggggtggggaag

SEQ ID NO: 259312 - DNA, 25 bp, probe
ggcatgaacaaccgggaggtgctgg

SEQ ID NO: 259313 - DNA, 25 bp, probe
ggcatgaacaaccgggaggtgctgg

SEQ ID NO: 259314 - DNA, 25 bp, probe
ggcagaatctatttgggacttcatg

SEQ ID NO: 259315 - DNA, 25 bp, probe
ggcagaatctatttgggacttcatg

SEQ ID NO: 259316 - DNA, 25 bp, probe
ggcagcaacatagagcagtacattc

SEQ ID NO: 259317 - DNA, 25 bp, probe
ggcagcaacatcaatacctcagctt

SEQ ID NO: 259318 - DNA, 25 bp, probe
ggcaggacatcaatacactgctgct

SEQ ID NO: 259319 - DNA, 25 bp, probe
ggcagggagtatacattgctgtttc

SEQ ID NO: 259320 - DNA, 25 bp, probe
ggcagggaatgaagctttgattttt

SEQ ID NO: 259321 - DNA, 25 bp, probe
ggctatgggagcagcttttttttcc

SEQ ID NO: 259322 - DNA, 25 bp, probe
ggctatgggagcagcttttttttcc

SEQ ID NO: 259323 - DNA, 25 bp, probe
ggctttggggagcctttttcattag

SEQ ID NO: 259324 - DNA, 25 bp, probe
ggctttgtgggccctagtagtcttt

SEQ ID NO: 259325 - DNA, 25 bp, probe
ggctttttgcctacggcatagttct

SEQ ID NO: 259326 - DNA, 25 bp, probe
ggctttttgcctacggcatagttct

SEQ ID NO: 259327 - DNA, 25 bp, probe
ggcagttttactctgtgaagctcct

SEQ ID NO: 259328 - DNA, 25 bp, probe
ggcagacatttgtcagaatgctgac

SEQ ID NO: 259329 - DNA, 25 bp, probe
ggcatgactttgacagactccaggc

SEQ ID NO: 259330 - DNA, 25 bp, probe
ggcagacctggaagctgttcagctc

SEQ ID NO: 259331 - DNA, 25 bp, probe
ggcagaaggcgaaagtccagctgcc

SEQ ID NO: 259332 - DNA, 25 bp, probe
ggcagaagccaggaattccacaccc

SEQ ID NO: 259333 - DNA, 25 bp, probe
ggcagaagccaggaattccacaccc

SEQ ID NO: 259334 - DNA, 25 bp, probe
ggctaaggcaagaatatgccccaac

SEQ ID NO: 259335 - DNA, 25 bp, probe
ggcataggaaatggtatccagaatg

SEQ ID NO: 259336 - DNA, 25 bp, probe
ggctggggaacaatgttcacagata

SEQ ID NO: 259337 - DNA, 25 bp, probe
ggctcgtgtgcattaagtcaacaaa

SEQ ID NO: 259338 - DNA, 25 bp, probe
ggcatcgtacataatttttcaatat

SEQ ID NO: 259339 - DNA, 25 bp, probe
ggcacctcatttggctttgtgaatt

SEQ ID NO: 259340 - DNA, 25 bp, probe
ggcacctcatttggctttgtgaatt

SEQ ID NO: 259341 - DNA, 25 bp, probe
ggcagacatatttgcctttggcctt

SEQ ID NO: 259342 - DNA, 25 bp, probe
ggcagagcttttgcatttcctgtgt

SEQ ID NO: 259343 - DNA, 25 bp, probe
ggcagcagcttgaagagtttggctg

SEQ ID NO: 259344 - DNA, 25 bp, probe
ggcagtgcggaagatgctgctggtg

SEQ ID NO: 259345 - DNA, 25 bp, probe
ggcagatgggaaaactcatgacaga

SEQ ID NO: 259346 - DNA, 25 bp, probe
ggcagtgggacaatcgccagagggt

SEQ ID NO: 259347 - DNA, 25 bp, probe
ggcagggatacatctcgaggccagt

SEQ ID NO: 259348 - DNA, 25 bp, probe
ggcaggacaagcactcgatccgtgc

SEQ ID NO: 259349 - DNA, 25 bp, probe
ggcaggacacaaactccctgcctgc

SEQ ID NO: 259350 - DNA, 25 bp, probe
ggcaggacaggaaccaactgagcca

SEQ ID NO: 259351 - DNA, 25 bp, probe
ggcagtgacagtaaccactcaacca

SEQ ID NO: 259352 - DNA, 25 bp, probe
ggcagtgaaaaaacacctatccaag

SEQ ID NO: 259353 - DNA, 25 bp, probe
ggcagtgaaaaaacacctatccaag

SEQ ID NO: 259354 - DNA, 25 bp, probe
ggcaggaaataacctcactatcccg

SEQ ID NO: 259355 - DNA, 25 bp, probe
ggcagaggaaaacgcttctttctcc

SEQ ID NO: 259356 - DNA, 25 bp, probe
ggctctggaaacctgttctgattcc

SEQ ID NO: 259357 - DNA, 25 bp, probe
ggcgttaacagcctttggagtcgca

SEQ ID NO: 259358 - DNA, 25 bp, probe
ggcgtttacaccaaagtcagccgct

SEQ ID NO: 259359 - DNA, 25 bp, probe
ggctttacacaccaaagaagccggc

SEQ ID NO: 259360 - DNA, 25 bp, probe
tggctttcaaaaccgtaagcccagg

SEQ ID NO: 259361 - DNA, 25 bp, probe
ggctttcagaaaaccaacgccaaga

SEQ ID NO: 259362 - DNA, 25 bp, probe
ggctattgctgaataatggctatca

SEQ ID NO: 259363 - DNA, 25 bp, probe
ggctattgctgaataatggctatca

SEQ ID NO: 259364 - DNA, 25 bp, probe
tggccttcaattcttgcttttttgc

SEQ ID NO: 259365 - DNA, 25 bp, probe
ggcagccaaaatgttgcttgatggt

SEQ ID NO: 259366 - DNA, 25 bp, probe
ggcagccaaaatgttgcttgatggt

SEQ ID NO: 259367 - DNA, 25 bp, probe
ggcagcttaacattgacttcttggt

SEQ ID NO: 259368 - DNA, 25 bp, probe
ggcagcttcaaaagggatcgggctc

SEQ ID NO: 259369 - DNA, 25 bp, probe
ggcagcttcaaaagggatcgggctc

SEQ ID NO: 259370 - DNA, 25 bp, probe
ggcagctttagaaagtaggtgtgtg

SEQ ID NO: 259371 - DNA, 25 bp, probe
ggcagcttttttatcagccttgctt

SEQ ID NO: 259372 - DNA, 25 bp, probe
ggcagtttctaacttgtgtttcttg

SEQ ID NO: 259373 - DNA, 25 bp, probe
ggcagttctcattagtggtgttgta

SEQ ID NO: 259374 - DNA, 25 bp, probe
ggcatggtccttgtgatggtattac

SEQ ID NO: 259375 - DNA, 25 bp, probe
ggcagggacttctgcatgttgtcca

SEQ ID NO: 259376 - DNA, 25 bp, probe
ggcagggacttctgcatgttgtcca

SEQ ID NO: 259377 - DNA, 25 bp, probe
ggcagggatttgtgcatcttattca

SEQ ID NO: 259378 - DNA, 25 bp, probe
ggcaggcgcaaactcgattttctac

SEQ ID NO: 259379 - DNA, 25 bp, probe
ggcagggcatgaggagatgattttc

SEQ ID NO: 259380 - DNA, 25 bp, probe
ggcaggcattgaggaagagtcttgg

SEQ ID NO: 259381 - DNA, 25 bp, probe
ggcagtgatggggccaagattggga

SEQ ID NO: 259382 - DNA, 25 bp, probe
ggcagtgatgggttagtggatggaa

SEQ ID NO: 259383 - DNA, 25 bp, probe
ggcagactgggtaagggagcagggc

SEQ ID NO: 259384 - DNA, 25 bp, probe
ggcagaaggacccaggtgagcggcc

SEQ ID NO: 259385 - DNA, 25 bp, probe
ggcagaaggacccaggtgagcggcc

SEQ ID NO: 259386 - DNA, 25 bp, probe
ggcagaagatgagtttgtgtactgg

SEQ ID NO: 259387 - DNA, 25 bp, probe
ggcagaatgctagctctgagccagt

SEQ ID NO: 259388 - DNA, 25 bp, probe
ggcagaatgctagctctgagccagt

SEQ ID NO: 259389 - DNA, 25 bp, probe
ggcagaatgctagctctgagccagt

SEQ ID NO: 259390 - DNA, 25 bp, probe
ggcagaagctgtgctctgaagctag

SEQ ID NO: 259391 - DNA, 25 bp, probe
ggcagaagctgtgctctgaagctag

SEQ ID NO: 259392 - DNA, 25 bp, probe
ggcagaatgggcatgcagccagccg

SEQ ID NO: 259393 - DNA, 25 bp, probe
ggcagatattggagagaacacatta

SEQ ID NO: 259394 - DNA, 25 bp, probe
ggcagtcttatgtgcaaagatcgta

SEQ ID NO: 259395 - DNA, 25 bp, probe
ggcagatctgcttggggaagctagt

SEQ ID NO: 259396 - DNA, 25 bp, probe
ggcagctctgatcaggaaagtgagg

SEQ ID NO: 259397 - DNA, 25 bp, probe
ggcagtggctgaaggaagaatatgg

SEQ ID NO: 259398 - DNA, 25 bp, probe
ggcagtggctgaaggaagaatatgg

SEQ ID NO: 259399 - DNA, 25 bp, probe
ggcagctgaatgatagacaaatagt

SEQ ID NO: 259400 - DNA, 25 bp, probe
ggcagcagaagaccaaagcagttgt

SEQ ID NO: 259401 - DNA, 25 bp, probe
ggcagaagagagaccaacgtttgac

SEQ ID NO: 259402 - DNA, 25 bp, probe
ggcagaagagagaccaacgtttgac

SEQ ID NO: 259403 - DNA, 25 bp, probe
ggcagcccaagaaaacgcgtctgac

SEQ ID NO: 259404 - DNA, 25 bp, probe
ggccctaaattacagcgtcatcaag

SEQ ID NO: 259405 - DNA, 25 bp, probe
ggctttaatacgtgagcgtgctaaa

SEQ ID NO: 259406 - DNA, 25 bp, probe
ggcatgttagaactgaggtgggcta

SEQ ID NO: 259407 - DNA, 25 bp, probe
ggcagcgagaaactgcatggtcgcc

SEQ ID NO: 259408 - DNA, 25 bp, probe
ggcatggagaacattggtggcattt

SEQ ID NO: 259409 - DNA, 25 bp, probe
ggcagcagaaactttcgctggatgg

SEQ ID NO: 259410 - DNA, 25 bp, probe
tggagcagaaaccctacgggaaggc

SEQ ID NO: 259411 - DNA, 25 bp, probe
tggactggagacgcgggcggaattc

SEQ ID NO: 259412 - DNA, 25 bp, probe
tgtgagggtgactctgggggacccc

SEQ ID NO: 259413 - DNA, 25 bp, probe
ggcagggatagctgggtggtgacct

SEQ ID NO: 259414 - DNA, 25 bp, probe
tgggttaagcctgcagggatcccgg

SEQ ID NO: 259415 - DNA, 25 bp, probe
tgggttaagcctgcagggatcccgg

SEQ ID NO: 259416 - DNA, 25 bp, probe
ggcagttacaccactgaggcattcc

SEQ ID NO: 259417 - DNA, 25 bp, probe
ggcagttagaccaacagaggcttga

SEQ ID NO: 259418 - DNA, 25 bp, probe
ggcagtcttccttggcaaggcttaa

SEQ ID NO: 259419 - DNA, 25 bp, probe
ggcgtttctttgccgatttttgaat

SEQ ID NO: 259420 - DNA, 25 bp, probe
ggcgtttctttgccgatttttgaat

SEQ ID NO: 259421 - DNA, 25 bp, probe
ggcagtatctctctgcctatttatt

SEQ ID NO: 259422 - DNA, 25 bp, probe
ggcagtctgtgtcttgctatggaat

SEQ ID NO: 259423 - DNA, 25 bp, probe
ggcatggaggtgggtgcttgtagtt

SEQ ID NO: 259424 - DNA, 25 bp, probe
ggcagatgggagggttgtgcttgtg

SEQ ID NO: 259425 - DNA, 25 bp, probe
ggcagtgagtggcgtaggctctgga

SEQ ID NO: 259426 - DNA, 25 bp, probe
ggcagtgagtggcgtaggctctgga

SEQ ID NO: 259427 - DNA, 25 bp, probe
ggcagatggaggctgctcagtcggg

SEQ ID NO: 259428 - DNA, 25 bp, probe
ggcagtgctgagagttcctgctggg

SEQ ID NO: 259429 - DNA, 25 bp, probe
ggcagtgtaggcgacagcctcatgg

SEQ ID NO: 259430 - DNA, 25 bp, probe
ggctgcttaggaaacctcacgactg

SEQ ID NO: 259431 - DNA, 25 bp, probe
ggcttttgactggaccgagtgacta

SEQ ID NO: 259432 - DNA, 25 bp, probe
ggctgctttgttgtcctgatatggc

SEQ ID NO: 259433 - DNA, 25 bp, probe
ggctgctttgttgtcctgatatggc

SEQ ID NO: 259434 - DNA, 25 bp, probe
ggcattgtgtttgggccgacactgc

SEQ ID NO: 259435 - DNA, 25 bp, probe
ggcttggttgggggcctcaagaaca

SEQ ID NO: 259436 - DNA, 25 bp, probe
ggcttaattgtggaaagctaagtac

SEQ ID NO: 259437 - DNA, 25 bp, probe
ggcttgatttgtttagactgaagga

SEQ ID NO: 259438 - DNA, 25 bp, probe
ggctgacctcgtttgagcctgaagc

SEQ ID NO: 259439 - DNA, 25 bp, probe
ggctgacctcgtttgagcctgaagc

SEQ ID NO: 259440 - DNA, 25 bp, probe
ggctgacctcgtttgagcctgaagc

SEQ ID NO: 259441 - DNA, 25 bp, probe
ggctgacctcgtttgagcctgaagc

SEQ ID NO: 259442 - DNA, 25 bp, probe
ggctgacctcgtttgagcctgaagc

SEQ ID NO: 259443 - DNA, 25 bp, probe
tggctgtcatggcttatgaccgcta

SEQ ID NO: 259444 - DNA, 25 bp, probe
tgtcttcagtttgagaaccttaaaa

SEQ ID NO: 259445 - DNA, 25 bp, probe
ggctccaattttagagaacttgaaa

SEQ ID NO: 259446 - DNA, 25 bp, probe
ggcgggatttttaatagctgtaatt

SEQ ID NO: 259447 - DNA, 25 bp, probe
ggcgggatttttaatagctgtaatt

SEQ ID NO: 259448 - DNA, 25 bp, probe
ggctgtgagtctagtttttgcttta

SEQ ID NO: 259449 - DNA, 25 bp, probe
ggcatgagtgtctatgactctttgg

SEQ ID NO: 259450 - DNA, 25 bp, probe
ggctgaggtaagctgcttcggggga

SEQ ID NO: 259451 - DNA, 25 bp, probe
ggcggattaaggcttgggcggacaa

SEQ ID NO: 259452 - DNA, 25 bp, probe
ggcagtcgtaagggttgcggcgtga

SEQ ID NO: 259453 - DNA, 25 bp, probe
ggcattctctagataatgtggggga

SEQ ID NO: 259454 - DNA, 25 bp, probe
ggcattgcctactcatgctattggg

SEQ ID NO: 259455 - DNA, 25 bp, probe
ggctaccaagtgaagatttgggtac

SEQ ID NO: 259456 - DNA, 25 bp, probe
ggctttccactgagatctactggat

SEQ ID NO: 259457 - DNA, 25 bp, probe
ggcatttccgccagaatggcggctg

SEQ ID NO: 259458 - DNA, 25 bp, probe
ggcaggtgacccaagacagagctga

SEQ ID NO: 259459 - DNA, 25 bp, probe
ggcagggtctccacaacatggaaga

SEQ ID NO: 259460 - DNA, 25 bp, probe
ggcagggataacacacaatgagagg

SEQ ID NO: 259461 - DNA, 25 bp, probe
ggcagaggatgcactcaacacggtg

SEQ ID NO: 259462 - DNA, 25 bp, probe
ggcagggatcattgggaaaggtgta

SEQ ID NO: 259463 - DNA, 25 bp, probe
ggcagggactgagtgtaccgtggat

SEQ ID NO: 259464 - DNA, 25 bp, probe
ggcagggactgagtgtaccgtggat

SEQ ID NO: 259465 - DNA, 25 bp, probe
ggcaggtagctgatgctaagttggt

SEQ ID NO: 259466 - DNA, 25 bp, probe
ggcaggtcctgattgaaggggaggc

SEQ ID NO: 259467 - DNA, 25 bp, probe
ggcaggtcctgattgaaggggaggc

SEQ ID NO: 259468 - DNA, 25 bp, probe
ggcatggtccattctcaagggacgt

SEQ ID NO: 259469 - DNA, 25 bp, probe
ggcatggtccagacgaaggagcagt

SEQ ID NO: 259470 - DNA, 25 bp, probe
ggcatggtccagacgaaggagcagt

SEQ ID NO: 259471 - DNA, 25 bp, probe
ggcagaggcgaactgtagagtgcag

SEQ ID NO: 259472 - DNA, 25 bp, probe
ggcagggatgctagattaatgtcag

SEQ ID NO: 259473 - DNA, 25 bp, probe
ggcatgctgggcaatttcactgtgc

SEQ ID NO: 259474 - DNA, 25 bp, probe
ggcatagcagatgacttccgtgccc

SEQ ID NO: 259475 - DNA, 25 bp, probe
ggcagtgaagaagtatccccacctc

SEQ ID NO: 259476 - DNA, 25 bp, probe
ggcagtgaagaagtatccccacctc

SEQ ID NO: 259477 - DNA, 25 bp, probe
ggcattataattgtcctcacacctc

SEQ ID NO: 259478 - DNA, 25 bp, probe
ggctttattatatcttacacccaaa

SEQ ID NO: 259479 - DNA, 25 bp, probe
ggctattgttaatgcagtaccctgc

SEQ ID NO: 259480 - DNA, 25 bp, probe
ggctacctatttggcagtgacgtgg

SEQ ID NO: 259481 - DNA, 25 bp, probe
ggctacctatttggcagtgacgtgg

SEQ ID NO: 259482 - DNA, 25 bp, probe
ggctactattatcccagtgacgcat

SEQ ID NO: 259483 - DNA, 25 bp, probe
ggctactattatcccagtgacgcat

SEQ ID NO: 259484 - DNA, 25 bp, probe
ggcatcgcagaatggcgaggacgcc

SEQ ID NO: 259485 - DNA, 25 bp, probe
ggcaggcagagacgctgctgcaggc

SEQ ID NO: 259486 - DNA, 25 bp, probe
ggcagagaagaggcatctcagagcc

SEQ ID NO: 259487 - DNA, 25 bp, probe
ggcagagaagaggcatctcagagcc

SEQ ID NO: 259488 - DNA, 25 bp, probe
ggcatggaagcacacatagacaccc

SEQ ID NO: 259489 - DNA, 25 bp, probe
ggcatggaagcacacatagacaccc

SEQ ID NO: 259490 - DNA, 25 bp, probe
ggcatggcaagactccatatctaca

SEQ ID NO: 259491 - DNA, 25 bp, probe
ggcaggaaactgcatatcttctggt

SEQ ID NO: 259492 - DNA, 25 bp, probe
ggcaggaaacgccaagaactgctgg

SEQ ID NO: 259493 - DNA, 25 bp, probe
ggcagaatcatttacataaacacgg

SEQ ID NO: 259494 - DNA, 25 bp, probe
ggcagaatcatttacataaacacgg

SEQ ID NO: 259495 - DNA, 25 bp, probe
ggcagattctgtttgcaagatccac

SEQ ID NO: 259496 - DNA, 25 bp, probe
ggcagacctgattcaacaactcagc

SEQ ID NO: 259497 - DNA, 25 bp, probe
ggcttcctgatacaagacgacttcg

SEQ ID NO: 259498 - DNA, 25 bp, probe
ggctggcctgacacaatggtagctc

SEQ ID NO: 259499 - DNA, 25 bp, probe
ggcagagttgaagacagagctacac

SEQ ID NO: 259500 - DNA, 25 bp, probe
ggcagatgctaggaccaaggctgaa

SEQ ID NO: 259501 - DNA, 25 bp, probe
ggcagcagctgaggaggccggctgc

SEQ ID NO: 259502 - DNA, 25 bp, probe
ggcatgagctacctggaggagcagc

SEQ ID NO: 259503 - DNA, 25 bp, probe
ggcagatggagcctatcaggaagat

SEQ ID NO: 259504 - DNA, 25 bp, probe
ggcagaagaggttcatggcaatata

SEQ ID NO: 259505 - DNA, 25 bp, probe
ggcagacaagcccaatggcatgaaa

SEQ ID NO: 259506 - DNA, 25 bp, probe
ggcagcaagcactacagagtcagaa

SEQ ID NO: 259507 - DNA, 25 bp, probe
ggcgaccaccaaagtcaaacgacta

SEQ ID NO: 259508 - DNA, 25 bp, probe
ggctaaacactatgtaaatgtgaat

SEQ ID NO: 259509 - DNA, 25 bp, probe
ggctaaacactatgtaaatgtgaat

SEQ ID NO: 259510 - DNA, 25 bp, probe
ggcatcatacgtgactgtagaattg

SEQ ID NO: 259511 - DNA, 25 bp, probe
ggcattcagattggagcctacaatt

SEQ ID NO: 259512 - DNA, 25 bp, probe
ggcatcattataaggcttaattgtg

SEQ ID NO: 259513 - DNA, 25 bp, probe
ggcatcgctattgtctgtaatgtct

SEQ ID NO: 259514 - DNA, 25 bp, probe
ggcagtgtattagtaggagagctct

SEQ ID NO: 259515 - DNA, 25 bp, probe
ggcagtggagctactgctgtggttc

SEQ ID NO: 259516 - DNA, 25 bp, probe
ggcagaggcctgcatgtgggtgcca

SEQ ID NO: 259517 - DNA, 25 bp, probe
ggcagaacctgaagctggttctcca

SEQ ID NO: 259518 - DNA, 25 bp, probe
ggcagaacctgaagctggttctcca

SEQ ID NO: 259519 - DNA, 25 bp, probe
ggcataacactaaggcgcagactcc

SEQ ID NO: 259520 - DNA, 25 bp, probe
ggcttatactagctcctgacttagg

SEQ ID NO: 259521 - DNA, 25 bp, probe
ggcttacctgtacactgacttgaga

SEQ ID NO: 259522 - DNA, 25 bp, probe
ggctaaccgtgatagtccttgcaag

SEQ ID NO: 259523 - DNA, 25 bp, probe
ggctctacatcgtcactgagtacat

SEQ ID NO: 259524 - DNA, 25 bp, probe
ggctctacatcgtcactgagtacat

SEQ ID NO: 259525 - DNA, 25 bp, probe
ggctctacatcgtcactgagtacat

SEQ ID NO: 259526 - DNA, 25 bp, probe
tggctttcccagactagaaattttg

SEQ ID NO: 259527 - DNA, 25 bp, probe
ggctttcccagactagaaattttgt

SEQ ID NO: 259528 - DNA, 25 bp, probe
tcctctaactcacagtgggttttgt

SEQ ID NO: 259529 - DNA, 25 bp, probe
tccttcaacaccttagtggggtttg

SEQ ID NO: 259530 - DNA, 25 bp, probe
tggttcaggcccggaggagggtttg

SEQ ID NO: 259531 - DNA, 25 bp, probe
tggtttagctcttaagtaggggtat

SEQ ID NO: 259532 - DNA, 25 bp, probe
tggtttagctcttaagtaggggtat

SEQ ID NO: 259533 - DNA, 25 bp, probe
tggtttattcttaagttacgtggat

SEQ ID NO: 259534 - DNA, 25 bp, probe
ggcttttggattatgtgtacagttg

SEQ ID NO: 259535 - DNA, 25 bp, probe
ggcttttggcaatttgtttctctgt

SEQ ID NO: 259536 - DNA, 25 bp, probe
ggcagttatggttttctttcatctg

SEQ ID NO: 259537 - DNA, 25 bp, probe
ggcagttatggttttctttcatctg

SEQ ID NO: 259538 - DNA, 25 bp, probe
ggcagatttcgagatagctattgat

SEQ ID NO: 259539 - DNA, 25 bp, probe
ggcagatttcgagatagctattgat

SEQ ID NO: 259540 - DNA, 25 bp, probe
ggcagtttggggaagtctggatggg

SEQ ID NO: 259541 - DNA, 25 bp, probe
ggcagttttgggaaatctcatcgtc

SEQ ID NO: 259542 - DNA, 25 bp, probe
ggcgtcttaggaatactccacggcc

SEQ ID NO: 259543 - DNA, 25 bp, probe
ggccctttgtgaagacgacgcggct

SEQ ID NO: 259544 - DNA, 25 bp, probe
ggccctttgtgaagacgacgcggct

SEQ ID NO: 259545 - DNA, 25 bp, probe
ggcgccttttgtaacggtcagaagc

SEQ ID NO: 259546 - DNA, 25 bp, probe
ggcagactttcaataaggagatcaa

SEQ ID NO: 259547 - DNA, 25 bp, probe
ggcagtctttctatagaaatccaat

SEQ ID NO: 259548 - DNA, 25 bp, probe
ggcagacgtttatacaacaccacgg

SEQ ID NO: 259549 - DNA, 25 bp, probe
ggcagagttctttaaaacacaccag

SEQ ID NO: 259550 - DNA, 25 bp, probe
ggcagtggtttcacatcagcgacac

SEQ ID NO: 259551 - DNA, 25 bp, probe
ggcttgagttctgcgcacgcaggat

SEQ ID NO: 259552 - DNA, 25 bp, probe
ggcatggattgtggaagactgggca

SEQ ID NO: 259553 - DNA, 25 bp, probe
ggctgccatgttggggcatcttgac

SEQ ID NO: 259554 - DNA, 25 bp, probe
ggcttcctatgaggagatcctgccg

SEQ ID NO: 259555 - DNA, 25 bp, probe
ggcttcctatgaggagatcctgccg

SEQ ID NO: 259556 - DNA, 25 bp, probe
ggcattactatgtcatggtcatctg

SEQ ID NO: 259557 - DNA, 25 bp, probe
ggcatgttgcagacaggagtcactg

SEQ ID NO: 259558 - DNA, 25 bp, probe
ggcatgctccagacataaatagctc

SEQ ID NO: 259559 - DNA, 25 bp, probe
ggctgttcgaatttattctcttact

SEQ ID NO: 259560 - DNA, 25 bp, probe
ggctttcgagtatatcctgtacaac

SEQ ID NO: 259561 - DNA, 25 bp, probe
tggctttggggatacttctaaattt

SEQ ID NO: 259562 - DNA, 25 bp, probe
ggcattcgaggagccctttgaactt

SEQ ID NO: 259563 - DNA, 25 bp, probe
ggctgtttggatcctcctttgaaaa

SEQ ID NO: 259564 - DNA, 25 bp, probe
ggctgtttggatcctcctttgaaaa

SEQ ID NO: 259565 - DNA, 25 bp, probe
ggcatttatttattcgtgcttcaaa

SEQ ID NO: 259566 - DNA, 25 bp, probe
ggcattgattttgatcctttactac

SEQ ID NO: 259567 - DNA, 25 bp, probe
ggcctatgttagggcctttgcccag

SEQ ID NO: 259568 - DNA, 25 bp, probe
ggcagtattccaaggcactttgctc

SEQ ID NO: 259569 - DNA, 25 bp, probe
ggcaggaatccaagtgcatttctta

SEQ ID NO: 259570 - DNA, 25 bp, probe
ggcaggagtcctggaaattctccac

SEQ ID NO: 259571 - DNA, 25 bp, probe
ggcaggaacgtggacaagactcgca

SEQ ID NO: 259572 - DNA, 25 bp, probe
ggcaggtaggatctgaagaaggcac

SEQ ID NO: 259573 - DNA, 25 bp, probe
ggcaggtgacgtgtggaaagtctag

SEQ ID NO: 259574 - DNA, 25 bp, probe
ggcagaaaggctgtggaaagctgta

SEQ ID NO: 259575 - DNA, 25 bp, probe
ggcaggaacagagggtgaaagggac

SEQ ID NO: 259576 - DNA, 25 bp, probe
ggcaggaacagagggtgaaagggac

SEQ ID NO: 259577 - DNA, 25 bp, probe
ggcagtgggagcggtggaagaggag

SEQ ID NO: 259578 - DNA, 25 bp, probe
ggcagtgggagcggtggaagaggag

SEQ ID NO: 259579 - DNA, 25 bp, probe
ggcagtagagcggggcaaagtgagg

SEQ ID NO: 259580 - DNA, 25 bp, probe
ggcaggaaccgagtctccagtgagg

SEQ ID NO: 259581 - DNA, 25 bp, probe
ggcagtgtgtcccagtttgaggagt

SEQ ID NO: 259582 - DNA, 25 bp, probe
ggcctttgcaatttgttaaggttca

SEQ ID NO: 259583 - DNA, 25 bp, probe
ggcctttgcaatttgttaaggttca

SEQ ID NO: 259584 - DNA, 25 bp, probe
tggcttataccttccttaaggtact

SEQ ID NO: 259585 - DNA, 25 bp, probe
ggcattacgggtgttgaaggtgtct

SEQ ID NO: 259586 - DNA, 25 bp, probe
ggcagaggcgggggaaagagagttt

SEQ ID NO: 259587 - DNA, 25 bp, probe
ggcaggggagactgagatggaaata

SEQ ID NO: 259588 - DNA, 25 bp, probe
ggcggtggtggctggtggtttaaag

SEQ ID NO: 259589 - DNA, 25 bp, probe
ggcctatgttggagggagttaaata

SEQ ID NO: 259590 - DNA, 25 bp, probe
ggctctacgggcactgggtaaagaa

SEQ ID NO: 259591 - DNA, 25 bp, probe
ggcatcagagcgtgcagacggagga

SEQ ID NO: 259592 - DNA, 25 bp, probe
ggcagagagcagggcaatttgtgga

SEQ ID NO: 259593 - DNA, 25 bp, probe
ggcagagagcagggcaatttgtgga

SEQ ID NO: 259594 - DNA, 25 bp, probe
ggcagaggcgcagaatcctgtgagg

SEQ ID NO: 259595 - DNA, 25 bp, probe
ggcagagagccacgcaaacatgggt

SEQ ID NO: 259596 - DNA, 25 bp, probe
ggcaggacacagccatagtctcagc

SEQ ID NO: 259597 - DNA, 25 bp, probe
ggcaggagcaaggctgagttctgca

SEQ ID NO: 259598 - DNA, 25 bp, probe
ggcaggcagctagcgagtttgaccc

SEQ ID NO: 259599 - DNA, 25 bp, probe
ggcatggcgtagagggtgctgcccc

SEQ ID NO: 259600 - DNA, 25 bp, probe
ggcatggggtgggggattccatcaa

SEQ ID NO: 259601 - DNA, 25 bp, probe
ggcaggtggtgggagttgttcatgg

SEQ ID NO: 259602 - DNA, 25 bp, probe
ggcaggggtagctagcgtgtgccag

SEQ ID NO: 259603 - DNA, 25 bp, probe
ggcaggagactgactacgtgctcaa

SEQ ID NO: 259604 - DNA, 25 bp, probe
ggcaggaagctggcttctgggagag

SEQ ID NO: 259605 - DNA, 25 bp, probe
ggcaggggtggtttatctgcatggt

SEQ ID NO: 259606 - DNA, 25 bp, probe
ggcaggagggaggcttttgctgttc

SEQ ID NO: 259607 - DNA, 25 bp, probe
ggcttgacaggggctatgggtttgc

SEQ ID NO: 259608 - DNA, 25 bp, probe
tggctggaaggggactattttcgtc

SEQ ID NO: 259609 - DNA, 25 bp, probe
ggctggaaggggactattttcgtca

SEQ ID NO: 259610 - DNA, 25 bp, probe
tggggccggagtatctatttctaca

SEQ ID NO: 259611 - DNA, 25 bp, probe
ggctgagggcggagtctattttacg

SEQ ID NO: 259612 - DNA, 25 bp, probe
ggctgagggcggagtctattttacg

SEQ ID NO: 259613 - DNA, 25 bp, probe
ggctgtggggagtgtttttgtatca

SEQ ID NO: 259614 - DNA, 25 bp, probe
ggctttgtgttgcgttttgtgtctc

SEQ ID NO: 259615 - DNA, 25 bp, probe
ggctttgtgttgcgttttgtgtctc

SEQ ID NO: 259616 - DNA, 25 bp, probe
ggctcttgtgttttttttcttctgc

SEQ ID NO: 259617 - DNA, 25 bp, probe
ggctactttcttacatgttttcctc

SEQ ID NO: 259618 - DNA, 25 bp, probe
ggcatagcctatgtacatctttacc

SEQ ID NO: 259619 - DNA, 25 bp, probe
ggcatagcctatgtacatctttacc

SEQ ID NO: 259620 - DNA, 25 bp, probe
ggcttccaagcattactttaacctc

SEQ ID NO: 259621 - DNA, 25 bp, probe
ggctatgcaaactctctcattaacc

SEQ ID NO: 259622 - DNA, 25 bp, probe
ggctatatcaatgccagcttcatta

SEQ ID NO: 259623 - DNA, 25 bp, probe
ggcatattgccaggccagcagatct

SEQ ID NO: 259624 - DNA, 25 bp, probe
ggcatattgccaggccagcagatct

SEQ ID NO: 259625 - DNA, 25 bp, probe
ggcatttctttccagacatctaata

SEQ ID NO: 259626 - DNA, 25 bp, probe
ggcatttatattcagagcatctaga

SEQ ID NO: 259627 - DNA, 25 bp, probe
ggcatctctttggctgaacatcgag

SEQ ID NO: 259628 - DNA, 25 bp, probe
ggcatctctttggctgaacatcgag

SEQ ID NO: 259629 - DNA, 25 bp, probe
ggcattgctgctttcaaccagcgac

SEQ ID NO: 259630 - DNA, 25 bp, probe
ggcatctggtaggcatcacgagctg

SEQ ID NO: 259631 - DNA, 25 bp, probe
ggcatctggtaggcatcacgagctg

SEQ ID NO: 259632 - DNA, 25 bp, probe
ggcttggctcgaatcatcgacagtg

SEQ ID NO: 259633 - DNA, 25 bp, probe
ggctatgtcggaagacgacgaggac

SEQ ID NO: 259634 - DNA, 25 bp, probe
ggcttgcctggaacagatacgggag

SEQ ID NO: 259635 - DNA, 25 bp, probe
ggcagtcctggagtagacactttgg

SEQ ID NO: 259636 - DNA, 25 bp, probe
ggcagtcctggagtagacactttgg

SEQ ID NO: 259637 - DNA, 25 bp, probe
ggcagtcttgaaattgtcactcgct

SEQ ID NO: 259638 - DNA, 25 bp, probe
ggcagtcttgaaattgtcactcgct

SEQ ID NO: 259639 - DNA, 25 bp, probe
ggcatatgtgtaaatttcactttta

SEQ ID NO: 259640 - DNA, 25 bp, probe
ggcagttcacaattttcaccattta

SEQ ID NO: 259641 - DNA, 25 bp, probe
ggcagtgtcaaaattggcagaacct

SEQ ID NO: 259642 - DNA, 25 bp, probe
ggcagtgtcaaaattggcagaacct

SEQ ID NO: 259643 - DNA, 25 bp, probe
ggcagtgacactgtaggagcatagc

SEQ ID NO: 259644 - DNA, 25 bp, probe
ggcatgctgaccacaatggacagta

SEQ ID NO: 259645 - DNA, 25 bp, probe
ggcatgcgagtaacaagggcatgga

SEQ ID NO: 259646 - DNA, 25 bp, probe
ggcatggtgtcttcacaggaggcaa

SEQ ID NO: 259647 - DNA, 25 bp, probe
ggcatgcgtgtgaacttcgggaaat

SEQ ID NO: 259648 - DNA, 25 bp, probe
ggcatcaggtgtgtgtgccgggaca

SEQ ID NO: 259649 - DNA, 25 bp, probe
ggcatacagttcttgactttggaca

SEQ ID NO: 259650 - DNA, 25 bp, probe
ggcatcttcttcatactatcgggcc

SEQ ID NO: 259651 - DNA, 25 bp, probe
ggcatcttcttcatactatcgggcc

SEQ ID NO: 259652 - DNA, 25 bp, probe
ggcatcttcattgttctggcagccg

SEQ ID NO: 259653 - DNA, 25 bp, probe
ggcatacatggtgattctcctgccc

SEQ ID NO: 259654 - DNA, 25 bp, probe
ggcatacatggtgattctcctgccc

SEQ ID NO: 259655 - DNA, 25 bp, probe
ggcatggcagggcagtggctagccc

SEQ ID NO: 259656 - DNA, 25 bp, probe
ggcagtgtggtggatgggcacccag

SEQ ID NO: 259657 - DNA, 25 bp, probe
ggcagtgtggtggatgggcacccag

SEQ ID NO: 259658 - DNA, 25 bp, probe
ggcatgttggtgggtggtcactgag

SEQ ID NO: 259659 - DNA, 25 bp, probe
ggcaggcggatcatgaggtcaggag

SEQ ID NO: 259660 - DNA, 25 bp, probe
ggcggcgtgtgaagactgaagtgtt

SEQ ID NO: 259661 - DNA, 25 bp, probe
ggcagggggatatggtgcgtttcct

SEQ ID NO: 259662 - DNA, 25 bp, probe
ggcagggggatatggtgcgtttcct

SEQ ID NO: 259663 - DNA, 25 bp, probe
ggcaggggtgaaggagcgggttcta

SEQ ID NO: 259664 - DNA, 25 bp, probe
ggcaggaggcagaaagacgggtgtt

SEQ ID NO: 259665 - DNA, 25 bp, probe
ggcaggggcaggggcagggagagcc

SEQ ID NO: 259666 - DNA, 25 bp, probe
ggcagtgggcacaaggaggtgagaa

SEQ ID NO: 259667 - DNA, 25 bp, probe
ggcattgttgccaggggtgaggccg

SEQ ID NO: 259668 - DNA, 25 bp, probe
ggcatggctaggaggggggagtccc

SEQ ID NO: 259669 - DNA, 25 bp, probe
ggctctgccacgaggacgtggaggc

SEQ ID NO: 259670 - DNA, 25 bp, probe
ggctttatcgtggagaaggctgggg

SEQ ID NO: 259671 - DNA, 25 bp, probe
tggctttcacgggggagggttgtat

SEQ ID NO: 259672 - DNA, 25 bp, probe
ggcatccccagggaaggggttgctg

SEQ ID NO: 259673 - DNA, 25 bp, probe
ggctcccacggagaccgtgggcttg

SEQ ID NO: 259674 - DNA, 25 bp, probe
ggctccccgaatgggtagcttggct

SEQ ID NO: 259675 - DNA, 25 bp, probe
ggctccccgaatgggtagcttggct

SEQ ID NO: 259676 - DNA, 25 bp, probe
ggctcgcccgagtgggatgattact

SEQ ID NO: 259677 - DNA, 25 bp, probe
ggcatcaccacggtgctgacgatga

SEQ ID NO: 259678 - DNA, 25 bp, probe
ggcatcaccaagagcgacttgcgcc

SEQ ID NO: 259679 - DNA, 25 bp, probe
ggcatcaccatggtgatcttctccc

SEQ ID NO: 259680 - DNA, 25 bp, probe
ggcatcaccatggtgatcttctccc

SEQ ID NO: 259681 - DNA, 25 bp, probe
ggcataaaggtggcttctgctccag

SEQ ID NO: 259682 - DNA, 25 bp, probe
ggctcactgagcaggctttatctgg

SEQ ID NO: 259683 - DNA, 25 bp, probe
ggcatagtggcacattatattatgg

SEQ ID NO: 259684 - DNA, 25 bp, probe
ggcatatggcattttctaacttagg

SEQ ID NO: 259685 - DNA, 25 bp, probe
ggcatatggcattttctaacttagg

SEQ ID NO: 259686 - DNA, 25 bp, probe
ggcttgtgattaactgtggcggcag

SEQ ID NO: 259687 - DNA, 25 bp, probe
ggcttgttgattgtgggattgtggg

SEQ ID NO: 259688 - DNA, 25 bp, probe
ggcttggtgcttgtacaactgtgcg

SEQ ID NO: 259689 - DNA, 25 bp, probe
ggcttgatttttcacaatgttgcaa

SEQ ID NO: 259690 - DNA, 25 bp, probe
ggcttgatttttcacaatgttgcaa

SEQ ID NO: 259691 - DNA, 25 bp, probe
ggctctttggtttacaactcgaaag

SEQ ID NO: 259692 - DNA, 25 bp, probe
ggctatttgtgtcaatacccgaaat

SEQ ID NO: 259693 - DNA, 25 bp, probe
ggcttttcattcaaaatctgcccaa

SEQ ID NO: 259694 - DNA, 25 bp, probe
ggctctgttccacatatatttccac

SEQ ID NO: 259695 - DNA, 25 bp, probe
ggcttatgattcagattgttatcta

SEQ ID NO: 259696 - DNA, 25 bp, probe
ggcttctgttcatttcgtttaatta

SEQ ID NO: 259697 - DNA, 25 bp, probe
ggctttgtaataatcagtcttaaga

SEQ ID NO: 259698 - DNA, 25 bp, probe
ggcttttatttcagtgccatacatg

SEQ ID NO: 259699 - DNA, 25 bp, probe
ggcatctctgttttcagtgggctat

SEQ ID NO: 259700 - DNA, 25 bp, probe
ggcaggctgtgacttgaaggctgtt

SEQ ID NO: 259701 - DNA, 25 bp, probe
ggcagtgctggagattcagggcaat

SEQ ID NO: 259702 - DNA, 25 bp, probe
ggcttgtggcaatatcaatgtcaat

SEQ ID NO: 259703 - DNA, 25 bp, probe
ggctgtaaaaaagattaatcctata

SEQ ID NO: 259704 - DNA, 25 bp, probe
ggcttaaaaatagctgctaatctgt

SEQ ID NO: 259705 - DNA, 25 bp, probe
ggcttgaaagaaaatccacattgcg

SEQ ID NO: 259706 - DNA, 25 bp, probe
ggcttgaaagaaaatccacattgcg

SEQ ID NO: 259707 - DNA, 25 bp, probe
ggctttgggatgatctcccatgtcg

SEQ ID NO: 259708 - DNA, 25 bp, probe
ggctttgtttatagcttgcgcattc

SEQ ID NO: 259709 - DNA, 25 bp, probe
ggcttgtgccattcagatgttcttc

SEQ ID NO: 259710 - DNA, 25 bp, probe
tggcatttgccatatcatcatcttt

SEQ ID NO: 259711 - DNA, 25 bp, probe
ggcatttgccatatcatcatctttt

SEQ ID NO: 259712 - DNA, 25 bp, probe
ggcatttgtcaactgctttacctcc

SEQ ID NO: 259713 - DNA, 25 bp, probe
ggcagtgttcagagcttgatcacgt

SEQ ID NO: 259714 - DNA, 25 bp, probe
ggcattgttgtgggcatatacctct

SEQ ID NO: 259715 - DNA, 25 bp, probe
ggctggttgtgtaaaaccctgcggc

SEQ ID NO: 259716 - DNA, 25 bp, probe
ggcgctggaagaaaaacttcattgc

SEQ ID NO: 259717 - DNA, 25 bp, probe
ggctcggctcaaggaaagccatttc

SEQ ID NO: 259718 - DNA, 25 bp, probe
ggctcctgttaaaaacaaagtgcag

SEQ ID NO: 259719 - DNA, 25 bp, probe
ggctcctgttaaaaacaaagtgcag

SEQ ID NO: 259720 - DNA, 25 bp, probe
ggctaccttcaaaacccaagcagcc

SEQ ID NO: 259721 - DNA, 25 bp, probe
ggctaccttcaaaacccaagcagcc

SEQ ID NO: 259722 - DNA, 25 bp, probe
ggccacagtaacaccctgaagatac

SEQ ID NO: 259723 - DNA, 25 bp, probe
ggccacagtaacaccctgaagatac

SEQ ID NO: 259724 - DNA, 25 bp, probe
ggccaatgtaggaacccaaaatgct

SEQ ID NO: 259725 - DNA, 25 bp, probe
ggctcctgacggggccgaagaattg

SEQ ID NO: 259726 - DNA, 25 bp, probe
ggctacggcaggagctgctcaagac

SEQ ID NO: 259727 - DNA, 25 bp, probe
ggctacaacaagaccctactaagac

SEQ ID NO: 259728 - DNA, 25 bp, probe
ggcattccaaataccagaacataaa

SEQ ID NO: 259729 - DNA, 25 bp, probe
ggcagtggcggcaacgacaaagaaa

SEQ ID NO: 259730 - DNA, 25 bp, probe
ggccaagggaaccactgaagaaatg

SEQ ID NO: 259731 - DNA, 25 bp, probe
ggctaagcagaaactaccaaagaaa

SEQ ID NO: 259732 - DNA, 25 bp, probe
ggctaagcagaaactaccaaagaaa

SEQ ID NO: 259733 - DNA, 25 bp, probe
ggcttacagaaatgactgccggtca

SEQ ID NO: 259734 - DNA, 25 bp, probe
ggcattagctggtctaactgcccgg

SEQ ID NO: 259735 - DNA, 25 bp, probe
ggcatgaagctgtagggactcatct

SEQ ID NO: 259736 - DNA, 25 bp, probe
ggcatccatgtgtgcaaaccatctg

SEQ ID NO: 259737 - DNA, 25 bp, probe
ggctctgcgggagaagacactaagg

SEQ ID NO: 259738 - DNA, 25 bp, probe
ggcatctgaaggctcaaaccagaca

SEQ ID NO: 259739 - DNA, 25 bp, probe
ggcatcaagggcttcaacaccctgc

SEQ ID NO: 259740 - DNA, 25 bp, probe
ggcatcaagggcttcaacaccctgc

SEQ ID NO: 259741 - DNA, 25 bp, probe
ggctcaagggagtcaccttcaatgt

SEQ ID NO: 259742 - DNA, 25 bp, probe
ggctcaagggagtcaccttcaatgt

SEQ ID NO: 259743 - DNA, 25 bp, probe
ggctacatcctgatacctataagtt

SEQ ID NO: 259744 - DNA, 25 bp, probe
ggctaatccttttctagtgtgagtt

SEQ ID NO: 259745 - DNA, 25 bp, probe
ggctaatccttttctagtgtgagtt

SEQ ID NO: 259746 - DNA, 25 bp, probe
ggctttctcttcaattcggtaagtt

SEQ ID NO: 259747 - DNA, 25 bp, probe
ggcttcccttgccatcacgggaagg

SEQ ID NO: 259748 - DNA, 25 bp, probe
ggcttcctcttgtatgcaggagaga

SEQ ID NO: 259749 - DNA, 25 bp, probe
ggcttccagcattgtcctgggagtc

SEQ ID NO: 259750 - DNA, 25 bp, probe
ggcttccagcattgtcctgggagtc

SEQ ID NO: 259751 - DNA, 25 bp, probe
ggctactaactaactgggagacctt

SEQ ID NO: 259752 - DNA, 25 bp, probe
ggctacaatacacactggaacaact

SEQ ID NO: 259753 - DNA, 25 bp, probe
ggctacaatacacactggaacaact

SEQ ID NO: 259754 - DNA, 25 bp, probe
ggcttgcctacagaggaaaggatcc

SEQ ID NO: 259755 - DNA, 25 bp, probe
ggcttatgctaacaggagacttgca

SEQ ID NO: 259756 - DNA, 25 bp, probe
ggcttccaggagcgatcgtttgcaa

SEQ ID NO: 259757 - DNA, 25 bp, probe
ggcttcaaggctttgcaaggttcta

SEQ ID NO: 259758 - DNA, 25 bp, probe
ggctttggccttaaaggcgctgtca

SEQ ID NO: 259759 - DNA, 25 bp, probe
ggctatattcctgacaaaagttcca

SEQ ID NO: 259760 - DNA, 25 bp, probe
ggcatattacctgtaacatgtttaa

SEQ ID NO: 259761 - DNA, 25 bp, probe
ggctattacccattgaagaaaagaa

SEQ ID NO: 259762 - DNA, 25 bp, probe
ggctattacccattgaagaaaagaa

SEQ ID NO: 259763 - DNA, 25 bp, probe
ggcttcatgaccgtaaggaaatgga

SEQ ID NO: 259764 - DNA, 25 bp, probe
ggcttaacggtatttcagaaggtca

SEQ ID NO: 259765 - DNA, 25 bp, probe
ggctttgacggttattgcaggtttc

SEQ ID NO: 259766 - DNA, 25 bp, probe
ggcttctgaagggccagacgggttt

SEQ ID NO: 259767 - DNA, 25 bp, probe
ggcttaagggcgatgcctgggttta

SEQ ID NO: 259768 - DNA, 25 bp, probe
ggctcattaggggagatgggggtct

SEQ ID NO: 259769 - DNA, 25 bp, probe
ggctcactgtgggaatttggggagt

SEQ ID NO: 259770 - DNA, 25 bp, probe
ggcatcaccatggtactgtgggggg

SEQ ID NO: 259771 - DNA, 25 bp, probe
ggctagccagttactggtcatgcct

SEQ ID NO: 259772 - DNA, 25 bp, probe
ggcatccatcgtgtctgagatcatg

SEQ ID NO: 259773 - DNA, 25 bp, probe
ggcatccatctggcagattggaagc

SEQ ID NO: 259774 - DNA, 25 bp, probe
ggcatcacctgcattgttaatgcta

SEQ ID NO: 259775 - DNA, 25 bp, probe
ggcatcaacacttttattcttaagc

SEQ ID NO: 259776 - DNA, 25 bp, probe
ggcatcaaccaccatggatttttac

SEQ ID NO: 259777 - DNA, 25 bp, probe
tgggcaaacaggtggttttcatcct

SEQ ID NO: 259778 - DNA, 25 bp, probe
ggctataaaggtaggtctgttaact

SEQ ID NO: 259779 - DNA, 25 bp, probe
ggcttccaatgttaggtttgctaca

SEQ ID NO: 259780 - DNA, 25 bp, probe
ggcttccaatgttaggtttgctaca

SEQ ID NO: 259781 - DNA, 25 bp, probe
ggcttccactggggagaagtccagc

SEQ ID NO: 259782 - DNA, 25 bp, probe
ggcttcacgccgggagaagccacct

SEQ ID NO: 259783 - DNA, 25 bp, probe
ggcttaccatcagctgaaggccaat

SEQ ID NO: 259784 - DNA, 25 bp, probe
ggcttgtcacaggcctagagtctga

SEQ ID NO: 259785 - DNA, 25 bp, probe
ggcatcttctaccgcaagaagctga

SEQ ID NO: 259786 - DNA, 25 bp, probe
ggcatctctaaccataacacaggag

SEQ ID NO: 259787 - DNA, 25 bp, probe
ggcatcagtatacctgagccagaag

SEQ ID NO: 259788 - DNA, 25 bp, probe
ggcatcagtatacctgagccagaag

SEQ ID NO: 259789 - DNA, 25 bp, probe
ggcatcagtgtcccgtgaaatacat

SEQ ID NO: 259790 - DNA, 25 bp, probe
ggcatcaggtttctgcatgaaaatc

SEQ ID NO: 259791 - DNA, 25 bp, probe
ggctcttttctagtgagaaagtccc

SEQ ID NO: 259792 - DNA, 25 bp, probe
tggtttattgtagaaaagttgaggt

SEQ ID NO: 259793 - DNA, 25 bp, probe
ggccttactggaccataaagttaat

SEQ ID NO: 259794 - DNA, 25 bp, probe
ggccttactggaccataaagttaat

SEQ ID NO: 259795 - DNA, 25 bp, probe
ggctcttgttggataaaagcttttt

SEQ ID NO: 259796 - DNA, 25 bp, probe
ggctctttgtgtgtaacacctttac

SEQ ID NO: 259797 - DNA, 25 bp, probe
ggcatcttttgtaaaactgattctt

SEQ ID NO: 259798 - DNA, 25 bp, probe
ggcattttttcattctacagcataa

SEQ ID NO: 259799 - DNA, 25 bp, probe
ggcttgttttctagcatatcactga

SEQ ID NO: 259800 - DNA, 25 bp, probe
ggcttggcatttgccatatcatcat

SEQ ID NO: 259801 - DNA, 25 bp, probe
ggcttggcctatggccatttttctt

SEQ ID NO: 259802 - DNA, 25 bp, probe
ggcatgggaatcaggcatttttgct

SEQ ID NO: 259803 - DNA, 25 bp, probe
ggcatgtagaactttcatttcttgc

SEQ ID NO: 259804 - DNA, 25 bp, probe
ggcatgcttgactatttcttatttc

SEQ ID NO: 259805 - DNA, 25 bp, probe
ggcatttacgtttctctgatgctcc

SEQ ID NO: 259806 - DNA, 25 bp, probe
ggctactgacagtggtagagtccta

SEQ ID NO: 259807 - DNA, 25 bp, probe
ggctgacataatcctcgaatgttcc

SEQ ID NO: 259808 - DNA, 25 bp, probe
ggctcactgaaggctcgaaggcact

SEQ ID NO: 259809 - DNA, 25 bp, probe
ggcatacatcgagcggaagaactac

SEQ ID NO: 259810 - DNA, 25 bp, probe
ggcataactgtgacgaaagcaactt

SEQ ID NO: 259811 - DNA, 25 bp, probe
ggcaggagctgtgcttagagggctc

SEQ ID NO: 259812 - DNA, 25 bp, probe
ggcatgggcttcattgaacaggcca

SEQ ID NO: 259813 - DNA, 25 bp, probe
ggcaggatgtgaattcagaacagaa

SEQ ID NO: 259814 - DNA, 25 bp, probe
ggcaggcatgtcatcgacagcacag

SEQ ID NO: 259815 - DNA, 25 bp, probe
ggcaggagctgctcaagaccgaggc

SEQ ID NO: 259816 - DNA, 25 bp, probe
ggcaggagaatggcatgaacccggg

SEQ ID NO: 259817 - DNA, 25 bp, probe
ggcaggagaatggcgtgaacccagg

SEQ ID NO: 259818 - DNA, 25 bp, probe
ggcaggagagtctgttatcacccaa

SEQ ID NO: 259819 - DNA, 25 bp, probe
ggcaggagagtctgttatcacccaa

SEQ ID NO: 259820 - DNA, 25 bp, probe
ggcaggagagtcacttgaaccgggg

SEQ ID NO: 259821 - DNA, 25 bp, probe
ggcaggagactagctggaaccaggg

SEQ ID NO: 259822 - DNA, 25 bp, probe
ggcaggcagcacacagagggaccta

SEQ ID NO: 259823 - DNA, 25 bp, probe
tggcattggccagacagggacgttc

SEQ ID NO: 259824 - DNA, 25 bp, probe
ggctctggccatgtcacaggcaagt

SEQ ID NO: 259825 - DNA, 25 bp, probe
ggcttcatcctcataatgtcagagt

SEQ ID NO: 259826 - DNA, 25 bp, probe
ggcttgcatcccagatgtgttggag

SEQ ID NO: 259827 - DNA, 25 bp, probe
ggctacattgccaaagctgtgctga

SEQ ID NO: 259828 - DNA, 25 bp, probe
ggcatgagagtgcctactctggctt

SEQ ID NO: 259829 - DNA, 25 bp, probe
ggcaggcagtggaatctgaattgtt

SEQ ID NO: 259830 - DNA, 25 bp, probe
ggcaggcatgctgattcctgaagtt

SEQ ID NO: 259831 - DNA, 25 bp, probe
ggcaggctgccgttgctaaatgatt

SEQ ID NO: 259832 - DNA, 25 bp, probe
ggcatgtcccgagtgcttgaggatg

SEQ ID NO: 259833 - DNA, 25 bp, probe
ggcatgtcccgatatctggatatct

SEQ ID NO: 259834 - DNA, 25 bp, probe
ggcatgatccgcaaacagtagatag

SEQ ID NO: 259835 - DNA, 25 bp, probe
ggcatcatctcagatatatttgata

SEQ ID NO: 259836 - DNA, 25 bp, probe
ggccccgcaaaagttgaaacatgaa

SEQ ID NO: 259837 - DNA, 25 bp, probe
ggccccgcaaaagttgaaacatgaa

SEQ ID NO: 259838 - DNA, 25 bp, probe
ggcatccccagtgacggaaagggca

SEQ ID NO: 259839 - DNA, 25 bp, probe
ggcattcgtcagagctgtggaaaga

SEQ ID NO: 259840 - DNA, 25 bp, probe
ggctactctcgaaattggacagcga

SEQ ID NO: 259841 - DNA, 25 bp, probe
ggcttcttggtcaatcttgactaga

SEQ ID NO: 259842 - DNA, 25 bp, probe
ggctccttgacctcttgagaagagg

SEQ ID NO: 259843 - DNA, 25 bp, probe
ggctcctctgtacacttgcaaaatg

SEQ ID NO: 259844 - DNA, 25 bp, probe
ggctttaggcagcagcttgaagagt

SEQ ID NO: 259845 - DNA, 25 bp, probe
ggctttgaccactaccatatctggt

SEQ ID NO: 259846 - DNA, 25 bp, probe
ggcttagagctggcatgaccaatgg

SEQ ID NO: 259847 - DNA, 25 bp, probe
ggcttagcagatccggacagggccc

SEQ ID NO: 259848 - DNA, 25 bp, probe
ggcttatggtttggcagcagaagac

SEQ ID NO: 259849 - DNA, 25 bp, probe
ggcattattgttactgaagctggtg

SEQ ID NO: 259850 - DNA, 25 bp, probe
ggcattattgttactgaagctggtg

SEQ ID NO: 259851 - DNA, 25 bp, probe
ggcattcctttaggaatgctgtgtg

SEQ ID NO: 259852 - DNA, 25 bp, probe
ggcattgcttattatgtgagtgggg

SEQ ID NO: 259853 - DNA, 25 bp, probe
ggcttgtatatgccaatagtgctgc

SEQ ID NO: 259854 - DNA, 25 bp, probe
ggcttgtttacaaattgatcctgct

SEQ ID NO: 259855 - DNA, 25 bp, probe
ggcttatcttacactggatcaccaa

SEQ ID NO: 259856 - DNA, 25 bp, probe
ggcttatcttacactggatcaccaa

SEQ ID NO: 259857 - DNA, 25 bp, probe
ggctcttagttcagctgctggcact

SEQ ID NO: 259858 - DNA, 25 bp, probe
ggctttggtggcagcatggacagtg

SEQ ID NO: 259859 - DNA, 25 bp, probe
ggctaaggtggcattgtctcatggc

SEQ ID NO: 259860 - DNA, 25 bp, probe
tggctaccggcatgtctatttggaa

SEQ ID NO: 259861 - DNA, 25 bp, probe
ggctacatgtacttttaccgcagga

SEQ ID NO: 259862 - DNA, 25 bp, probe
ggcattttcaagcatatacccagga

SEQ ID NO: 259863 - DNA, 25 bp, probe
ggctatatctgcggtgaaagcccgg

SEQ ID NO: 259864 - DNA, 25 bp, probe
ggcattcaattcctgcagaaaccgg

SEQ ID NO: 259865 - DNA, 25 bp, probe
ggcatgtcatttgcacacaaaaata

SEQ ID NO: 259866 - DNA, 25 bp, probe
ggcttcattaccgccatcataaaga

SEQ ID NO: 259867 - DNA, 25 bp, probe
ggctttgtcccagtttcatatacag

SEQ ID NO: 259868 - DNA, 25 bp, probe
ggctttctgttggctatttatacct

SEQ ID NO: 259869 - DNA, 25 bp, probe
ggcttcggtgggtattttctgccta

SEQ ID NO: 259870 - DNA, 25 bp, probe
ggcattcggatggggttctccagcc

SEQ ID NO: 259871 - DNA, 25 bp, probe
ggcttcgtgaaggagttctcccaca

SEQ ID NO: 259872 - DNA, 25 bp, probe
ggctacgtgtgactagtgcttacca

SEQ ID NO: 259873 - DNA, 25 bp, probe
ggctacgtgtgactagtgcttacca

SEQ ID NO: 259874 - DNA, 25 bp, probe
ggcttctatttctatgtgagtacca

SEQ ID NO: 259875 - DNA, 25 bp, probe
ggctattaatgttgtgcagagttgc

SEQ ID NO: 259876 - DNA, 25 bp, probe
ggcataatgaagggtgaagcatgga

SEQ ID NO: 259877 - DNA, 25 bp, probe
ggcatcctgagacagttgcacagtg

SEQ ID NO: 259878 - DNA, 25 bp, probe
ggcatccttgagtttgctcacagtg

SEQ ID NO: 259879 - DNA, 25 bp, probe
ggcatcctgtggtgtccatgaggta

SEQ ID NO: 259880 - DNA, 25 bp, probe
ggcatggggagctccagaaggtcac

SEQ ID NO: 259881 - DNA, 25 bp, probe
ggcatgggtggctccaggagatgga

SEQ ID NO: 259882 - DNA, 25 bp, probe
ggcatggaatggtacacaaggatta

SEQ ID NO: 259883 - DNA, 25 bp, probe
ggcatggccatgggtccagaggata

SEQ ID NO: 259884 - DNA, 25 bp, probe
ggcatggccatgggtccagaggata

SEQ ID NO: 259885 - DNA, 25 bp, probe
ggcatgtgcaaggagtcctgcaatg

SEQ ID NO: 259886 - DNA, 25 bp, probe
ggcattgctcagggtcagatgacag

SEQ ID NO: 259887 - DNA, 25 bp, probe
ggcattgctgaggtctgagcagggc

SEQ ID NO: 259888 - DNA, 25 bp, probe
ggcatgattgtcactgatgagcccg

SEQ ID NO: 259889 - DNA, 25 bp, probe
ggcatcatcgtcatagaggctggcg

SEQ ID NO: 259890 - DNA, 25 bp, probe
ggcatcacgatgattgagttggcca

SEQ ID NO: 259891 - DNA, 25 bp, probe
ggcttggctgttcgatttgagccag

SEQ ID NO: 259892 - DNA, 25 bp, probe
ggctctagcgttcgaacgcactgat

SEQ ID NO: 259893 - DNA, 25 bp, probe
ggctatcgagtctgaatctgcacta

SEQ ID NO: 259894 - DNA, 25 bp, probe
ggctacaggtgcatcaactgcaaac

SEQ ID NO: 259895 - DNA, 25 bp, probe
ggctacaggtgcatcaactgcaaac

SEQ ID NO: 259896 - DNA, 25 bp, probe
ggctccatcttcattacggaactca

SEQ ID NO: 259897 - DNA, 25 bp, probe
ggcatccttacaaatcaggaagact

SEQ ID NO: 259898 - DNA, 25 bp, probe
ggcatcctcatataattaaactgta

SEQ ID NO: 259899 - DNA, 25 bp, probe
ggctcccaacaatgctatacagcgc

SEQ ID NO: 259900 - DNA, 25 bp, probe
ggctcccaacaatgctatacagcgc

SEQ ID NO: 259901 - DNA, 25 bp, probe
ggcatcccaacattgtgcatatgct

SEQ ID NO: 259902 - DNA, 25 bp, probe
ggcatcatccaaggaatagactcct

SEQ ID NO: 259903 - DNA, 25 bp, probe
ggcatcagccagtccacaggactac

SEQ ID NO: 259904 - DNA, 25 bp, probe
ggcttgcagactcacagacactgac

SEQ ID NO: 259905 - DNA, 25 bp, probe
ggcatcatgcgaaggaactctctga

SEQ ID NO: 259906 - DNA, 25 bp, probe
ggcatctaacatcatcatcttctaa

SEQ ID NO: 259907 - DNA, 25 bp, probe
ggcatctatactccaagcgactaga

SEQ ID NO: 259908 - DNA, 25 bp, probe
ggcatctatactccaagcgactaga

SEQ ID NO: 259909 - DNA, 25 bp, probe
ggcttaccatccaagaggctacaag

SEQ ID NO: 259910 - DNA, 25 bp, probe
ggcattactgcagttagaagctcga

SEQ ID NO: 259911 - DNA, 25 bp, probe
ggcattacatcgcatagaaatcaat

SEQ ID NO: 259912 - DNA, 25 bp, probe
ggctataagggaagattgtcaatat

SEQ ID NO: 259913 - DNA, 25 bp, probe
ggcatatgcgagcaaagcattctca

SEQ ID NO: 259914 - DNA, 25 bp, probe
ggcttgctgcatggcaataactcat

SEQ ID NO: 259915 - DNA, 25 bp, probe
ggcatcacatgctcaatgactctct

SEQ ID NO: 259916 - DNA, 25 bp, probe
ggcatgcacgttcagacagctgcat

SEQ ID NO: 259917 - DNA, 25 bp, probe
ggcatccactatcgagatcatgctg

SEQ ID NO: 259918 - DNA, 25 bp, probe
ggcatgccactgtttatgcattgaa

SEQ ID NO: 259919 - DNA, 25 bp, probe
ggcatgccaaatttgcatcacatac

SEQ ID NO: 259920 - DNA, 25 bp, probe
ggcatgctgataccatcccaatagc

SEQ ID NO: 259921 - DNA, 25 bp, probe
ggcatgagatgctgaccctggagcc

SEQ ID NO: 259922 - DNA, 25 bp, probe
ggcatgagtattgacgtcgacacgg

SEQ ID NO: 259923 - DNA, 25 bp, probe
ggctatgctttggggggacaggcca

SEQ ID NO: 259924 - DNA, 25 bp, probe
ggctcagttcttggaggtcaagggc

SEQ ID NO: 259925 - DNA, 25 bp, probe
ggctgcatcttctatgagatggcca

SEQ ID NO: 259926 - DNA, 25 bp, probe
ggctaatgctcaaagctgtgcagca

SEQ ID NO: 259927 - DNA, 25 bp, probe
ggctatcatgcacctgagtatgcaa

SEQ ID NO: 259928 - DNA, 25 bp, probe
ggctatcatgcacctgagtatgcaa

SEQ ID NO: 259929 - DNA, 25 bp, probe
ggctgtaggactcttgaattcctag

SEQ ID NO: 259930 - DNA, 25 bp, probe
ggctttggcattgttggatttcata

SEQ ID NO: 259931 - DNA, 25 bp, probe
ggctttgtgctggcctttgagttca

SEQ ID NO: 259932 - DNA, 25 bp, probe
ggcttcgtgttcgactatgagtacg

SEQ ID NO: 259933 - DNA, 25 bp, probe
ggcttctgggtcagtgagcagtatt

SEQ ID NO: 259934 - DNA, 25 bp, probe
ggcttctgggtcagtgagcagtatt

SEQ ID NO: 259935 - DNA, 25 bp, probe
ggcattgggtctgggatgaagtatt

SEQ ID NO: 259936 - DNA, 25 bp, probe
ggctatgtggctgagcggaagggtg

SEQ ID NO: 259937 - DNA, 25 bp, probe
ggctaatgtgctgactgaggagggc

SEQ ID NO: 259938 - DNA, 25 bp, probe
ggctaatgtgctgactgaggagggc

SEQ ID NO: 259939 - DNA, 25 bp, probe
ggcatctttggctctcaaggtggcc

SEQ ID NO: 259940 - DNA, 25 bp, probe
ggcatctttggctctcaaggtggcc

SEQ ID NO: 259941 - DNA, 25 bp, probe
ggcatctttggctctcaaggtggcc

SEQ ID NO: 259942 - DNA, 25 bp, probe
ggcatctttggctctcaaggtggcc

SEQ ID NO: 259943 - DNA, 25 bp, probe
ggcatctttggcgagctgaacgtgt

SEQ ID NO: 259944 - DNA, 25 bp, probe
ggcatctttggcgagctgaacgtgt

SEQ ID NO: 259945 - DNA, 25 bp, probe
ggcatcgtatcctatggacggtcgg

SEQ ID NO: 259946 - DNA, 25 bp, probe
tggccgtagccttcggggtgaaggt

SEQ ID NO: 259947 - DNA, 25 bp, probe
tggccgtagccttcggggtgaaggt

SEQ ID NO: 259948 - DNA, 25 bp, probe
ggcggtcgaaagcggagtgaaagag

SEQ ID NO: 259949 - DNA, 25 bp, probe
ggctagtaacaaaggtagtggtaag

SEQ ID NO: 259950 - DNA, 25 bp, probe
ggctagaaaaagaggctgtgggcag

SEQ ID NO: 259951 - DNA, 25 bp, probe
ggctaagatgaatgaggggtttgag

SEQ ID NO: 259952 - DNA, 25 bp, probe
ggctaaagttaatgctgcttttacc

SEQ ID NO: 259953 - DNA, 25 bp, probe
ggctacaactaccaagcttttgaca

SEQ ID NO: 259954 - DNA, 25 bp, probe
ggcatccaacaaagttatgtttaaa

SEQ ID NO: 259955 - DNA, 25 bp, probe
ggctccagaaagtttgatggatgga

SEQ ID NO: 259956 - DNA, 25 bp, probe
ggcatcctcaaatccatcatgaaga

SEQ ID NO: 259957 - DNA, 25 bp, probe
ggctctacaaataccattggaaatg

SEQ ID NO: 259958 - DNA, 25 bp, probe
ggcctcagtaacatcatcggtatca

SEQ ID NO: 259959 - DNA, 25 bp, probe
ggcataatgtaatttagctagtttt

SEQ ID NO: 259960 - DNA, 25 bp, probe
ggcatagcgctatttgtagttactt

SEQ ID NO: 259961 - DNA, 25 bp, probe
ggcatcgtgtattccatatgtctat

SEQ ID NO: 259962 - DNA, 25 bp, probe
ggcattgtgtcttgctagtctgaat

SEQ ID NO: 259963 - DNA, 25 bp, probe
ggcttgtactgctttgttgaataaa

SEQ ID NO: 259964 - DNA, 25 bp, probe
ggctttacttgttggtgaagttcaa

SEQ ID NO: 259965 - DNA, 25 bp, probe
ggctttacttgttggtgaagttcaa

SEQ ID NO: 259966 - DNA, 25 bp, probe
ggcatcttacatttaggctacttca

SEQ ID NO: 259967 - DNA, 25 bp, probe
ggcattctatcttgtaggacactgt

SEQ ID NO: 259968 - DNA, 25 bp, probe
ggcttctactgtacaggacactggc

SEQ ID NO: 259969 - DNA, 25 bp, probe
ggcttctactgtacaggacactggc

SEQ ID NO: 259970 - DNA, 25 bp, probe
ggctacagacttcactgaccaggcc

SEQ ID NO: 259971 - DNA, 25 bp, probe
ggctacagacttcactgaccaggcc

SEQ ID NO: 259972 - DNA, 25 bp, probe
ggctcaagtacacacatgaccagct

SEQ ID NO: 259973 - DNA, 25 bp, probe
ggctaaaactgctacatccacagat

SEQ ID NO: 259974 - DNA, 25 bp, probe
ggctaaaactgctacatccacagat

SEQ ID NO: 259975 - DNA, 25 bp, probe
ggctgctatgaaatgcaagcccaaa

SEQ ID NO: 259976 - DNA, 25 bp, probe
ggcttgtgctcaatgcatatgccac

SEQ ID NO: 259977 - DNA, 25 bp, probe
ggcttggctgcaggagatgccattg

SEQ ID NO: 259978 - DNA, 25 bp, probe
ggcattgttgctggaatcatcttta

SEQ ID NO: 259979 - DNA, 25 bp, probe
ggcatctgatttgcatattcattca

SEQ ID NO: 259980 - DNA, 25 bp, probe
ggctcctttcagaactcatatcagt

SEQ ID NO: 259981 - DNA, 25 bp, probe
ggctcctttcagaactcatatcagt

SEQ ID NO: 259982 - DNA, 25 bp, probe
ggctgcgcaattactactatgacgt

SEQ ID NO: 259983 - DNA, 25 bp, probe
ggcattgtaatagtactgaacccag

SEQ ID NO: 259984 - DNA, 25 bp, probe
ggcttgtattagtcccaagccacag

SEQ ID NO: 259985 - DNA, 25 bp, probe
ggcttgttacattggcacagagcca

SEQ ID NO: 259986 - DNA, 25 bp, probe
ggcttgatagacctggcactgccta

SEQ ID NO: 259987 - DNA, 25 bp, probe
ggcttgatagacctggcactgccta

SEQ ID NO: 259988 - DNA, 25 bp, probe
ggcttctcagatagggcttggctac

SEQ ID NO: 259989 - DNA, 25 bp, probe
ggcatctctcagaagaggtttctcg

SEQ ID NO: 259990 - DNA, 25 bp, probe
ggcatctctcagaagaggtttctcg

SEQ ID NO: 259991 - DNA, 25 bp, probe
ggctgcccggaaggatttccagagg

SEQ ID NO: 259992 - DNA, 25 bp, probe
ggctcccgaggagcaccccgtgctg

SEQ ID NO: 259993 - DNA, 25 bp, probe
ggctttaatggagacacgcccctga

SEQ ID NO: 259994 - DNA, 25 bp, probe
ggctttccggcagaacgcatccact

SEQ ID NO: 259995 - DNA, 25 bp, probe
ggccttctatggggtagcaacccag

SEQ ID NO: 259996 - DNA, 25 bp, probe
ggctcttcttggctaagaaaccaga

SEQ ID NO: 259997 - DNA, 25 bp, probe
ggctcttcttggctaagaaaccaga

SEQ ID NO: 259998 - DNA, 25 bp, probe
ggcttctcgggtgaagaactgccgt

SEQ ID NO: 259999 - DNA, 25 bp, probe
ggctttagtggtggaaccccagagt

SEQ ID NO: 260000 - DNA, 25 bp, probe
ggctttagtggtggaaccccagagt

SEQ ID NO: 260001 - DNA, 25 bp, probe
ggctttggtgcggggtacacaagag

SEQ ID NO: 260002 - DNA, 25 bp, probe
ggctttgtttggatgtaatttaggg

SEQ ID NO: 260003 - DNA, 25 bp, probe
ggctatcttccactgtttattttgg

SEQ ID NO: 260004 - DNA, 25 bp, probe
ggctacttcaatcttgttcggggac

SEQ ID NO: 260005 - DNA, 25 bp, probe
tggctacttcaatcttgttcgggga

SEQ ID NO: 260006 - DNA, 25 bp, probe
ggctatattatattccatttaatgg

SEQ ID NO: 260007 - DNA, 25 bp, probe
ggctaactatatttgctttttgcta

SEQ ID NO: 260008 - DNA, 25 bp, probe
ggctatttgtaaagcagtgttttag

SEQ ID NO: 260009 - DNA, 25 bp, probe
ggcttttttaatccatggtttcaga

SEQ ID NO: 260010 - DNA, 25 bp, probe
ggcttgtttttcttgcatggtttgg

SEQ ID NO: 260011 - DNA, 25 bp, probe
ggctagctttgtttaatgtcttatg

SEQ ID NO: 260012 - DNA, 25 bp, probe
ggctactcttgacttagacctatac

SEQ ID NO: 260013 - DNA, 25 bp, probe
ggctactttcacttcagagtgtcat

SEQ ID NO: 260014 - DNA, 25 bp, probe
ggcttggattattctgcaggttcat

SEQ ID NO: 260015 - DNA, 25 bp, probe
ggcttggattattctgcaggttcat

SEQ ID NO: 260016 - DNA, 25 bp, probe
tggctgtgactgaagtcggctttcc

SEQ ID NO: 260017 - DNA, 25 bp, probe
ggctctagctacttggactattcag

SEQ ID NO: 260018 - DNA, 25 bp, probe
ggcttgtgctgacataactttcaat

SEQ ID NO: 260019 - DNA, 25 bp, probe
ggcttttgggagcagctcatccact

SEQ ID NO: 260020 - DNA, 25 bp, probe
ggcgtgttggtgtgcgcctgtaatc

SEQ ID NO: 260021 - DNA, 25 bp, probe
ggctttgtggtgagggcaatgaccc

SEQ ID NO: 260022 - DNA, 25 bp, probe
ggcttgttagtgatgtggagttcct

SEQ ID NO: 260023 - DNA, 25 bp, probe
ggctatgaaaagagtgatggttcct

SEQ ID NO: 260024 - DNA, 25 bp, probe
ggctataaactgaattaggcagtct

SEQ ID NO: 260025 - DNA, 25 bp, probe
ggcttaaatgcaatattcctggtat

SEQ ID NO: 260026 - DNA, 25 bp, probe
ggcttgaaatgcatagcgtttaatt

SEQ ID NO: 260027 - DNA, 25 bp, probe
ggcttatcaagcctagtgtaaattt

SEQ ID NO: 260028 - DNA, 25 bp, probe
ggcttagaacgctggtgcaatgttt

SEQ ID NO: 260029 - DNA, 25 bp, probe
ggcttcttgagccctgaaaatgtat

SEQ ID NO: 260030 - DNA, 25 bp, probe
ggcttcatggagctctgtcaaaatg

SEQ ID NO: 260031 - DNA, 25 bp, probe
ggcttgctggacctaaaatcaatga

SEQ ID NO: 260032 - DNA, 25 bp, probe
ggctttcgacgaaacatctctgcaa

SEQ ID NO: 260033 - DNA, 25 bp, probe
ggcttttgacagaggcagtaaatta

SEQ ID NO: 260034 - DNA, 25 bp, probe
ggcttttgggaacagctcatcaatt

SEQ ID NO: 260035 - DNA, 25 bp, probe
ggcttttgggaacagctcatcaatt

SEQ ID NO: 260036 - DNA, 25 bp, probe
ggcttgttgagccaggtacttcctt

SEQ ID NO: 260037 - DNA, 25 bp, probe
ggcttgcattggtcaggatagaggc

SEQ ID NO: 260038 - DNA, 25 bp, probe
ggctatgttgagtacgtaggctgtg

SEQ ID NO: 260039 - DNA, 25 bp, probe
ggctttggggatgatgaggcttgca

SEQ ID NO: 260040 - DNA, 25 bp, probe
ggcatttggagagcaagggttcatc

SEQ ID NO: 260041 - DNA, 25 bp, probe
ggctacggagcagagagtggttcct

SEQ ID NO: 260042 - DNA, 25 bp, probe
ggctacggagcagagagtggttcct

SEQ ID NO: 260043 - DNA, 25 bp, probe
ggcttcttgagctaagggggacacc

SEQ ID NO: 260044 - DNA, 25 bp, probe
ggctttaaaatcctgtgggacaaat

SEQ ID NO: 260045 - DNA, 25 bp, probe
ggctcttgaaagtctggttaataac

SEQ ID NO: 260046 - DNA, 25 bp, probe
ggctcttgaaagtctggttaataac

SEQ ID NO: 260047 - DNA, 25 bp, probe
ggcccgcaactgtggccgagaaagc

SEQ ID NO: 260048 - DNA, 25 bp, probe
ggctcaacaacctggcggagaaagc

SEQ ID NO: 260049 - DNA, 25 bp, probe
tgtgtaaaaccctgcggctgaacca

SEQ ID NO: 260050 - DNA, 25 bp, probe
tgtgtaaaaccctgcggctgaacca

SEQ ID NO: 260051 - DNA, 25 bp, probe
tgtctcataatcaaatatcgcttta

SEQ ID NO: 260052 - DNA, 25 bp, probe
ggctatatcaattccgggttgaacc

SEQ ID NO: 260053 - DNA, 25 bp, probe
ggctaaaattccaaggtgcatcgac

SEQ ID NO: 260054 - DNA, 25 bp, probe
ggctcagaggtcactcagggtcaat

SEQ ID NO: 260055 - DNA, 25 bp, probe
ggctacttgacaaccagcggtacta

SEQ ID NO: 260056 - DNA, 25 bp, probe
ggctacactatctaacatctggctg

SEQ ID NO: 260057 - DNA, 25 bp, probe
ggctgtactatgttaactgagtgac

SEQ ID NO: 260058 - DNA, 25 bp, probe
ggcttatgtcatttacacacagaaa

SEQ ID NO: 260059 - DNA, 25 bp, probe
ggcttatccgatgtgctacatgaga

SEQ ID NO: 260060 - DNA, 25 bp, probe
ggcttatccgatgtgctacatgaga

SEQ ID NO: 260061 - DNA, 25 bp, probe
ggcttcatcgtaactgcttctagag

SEQ ID NO: 260062 - DNA, 25 bp, probe
ggcttcatcgtaactgcttctagag

SEQ ID NO: 260063 - DNA, 25 bp, probe
ggctcttcggatgtcttctagacat

SEQ ID NO: 260064 - DNA, 25 bp, probe
ggctcttcggatgtcttctagacat

SEQ ID NO: 260065 - DNA, 25 bp, probe
ggctcttggagtgctcatgtttgaa

SEQ ID NO: 260066 - DNA, 25 bp, probe
ggcttctggagagtattgctgttga

SEQ ID NO: 260067 - DNA, 25 bp, probe
ggcttcatgatgtacctgttgtcgc

SEQ ID NO: 260068 - DNA, 25 bp, probe
ggcttagcaggagcagtttctggcc

SEQ ID NO: 260069 - DNA, 25 bp, probe
ggctaacatagcacagtatttactg

SEQ ID NO: 260070 - DNA, 25 bp, probe
ggctcacaagacacatttgtccccc

SEQ ID NO: 260071 - DNA, 25 bp, probe
ggctcacaagacacatttgtccccc

SEQ ID NO: 260072 - DNA, 25 bp, probe
ggctcaacagaatattccacctgcc

SEQ ID NO: 260073 - DNA, 25 bp, probe
ggcttgacatgctgtattccacgag

SEQ ID NO: 260074 - DNA, 25 bp, probe
ggctcatgaaggttcttctcaaggg

SEQ ID NO: 260075 - DNA, 25 bp, probe
ggcttgcctggattctacatacaag

SEQ ID NO: 260076 - DNA, 25 bp, probe
ggctcttcataattctaagactaat

SEQ ID NO: 260077 - DNA, 25 bp, probe
ggctttaaatcacagtgcacaatat

SEQ ID NO: 260078 - DNA, 25 bp, probe
tggcttctaaaaccctgccaaatcc

SEQ ID NO: 260079 - DNA, 25 bp, probe
ggcttctaaaaccctgccaaatcct

SEQ ID NO: 260080 - DNA, 25 bp, probe
ggctatcacacagacagaatccaaa

SEQ ID NO: 260081 - DNA, 25 bp, probe
ggcttcaatgcgaaggacgcgcaaa

SEQ ID NO: 260082 - DNA, 25 bp, probe
ggcttctgcctgaagatggagctgc

SEQ ID NO: 260083 - DNA, 25 bp, probe
ggctatctacgacctgagatctgct

SEQ ID NO: 260084 - DNA, 25 bp, probe
ggctatgtattatgtgacatcgctt

SEQ ID NO: 260085 - DNA, 25 bp, probe
ggcattgctactaagtacaagctgg

SEQ ID NO: 260086 - DNA, 25 bp, probe
ggctttcactctggtgaaactgttc

SEQ ID NO: 260087 - DNA, 25 bp, probe
ggcttctaccatgaaatcctggcca

SEQ ID NO: 260088 - DNA, 25 bp, probe
ggctaaagaatctcaatctcttgaa

SEQ ID NO: 260089 - DNA, 25 bp, probe
ggctgaaaagactgtgttgggaagg

SEQ ID NO: 260090 - DNA, 25 bp, probe
tggcgaagaagtcctggtttgggaa

SEQ ID NO: 260091 - DNA, 25 bp, probe
ggcctataagttccgattggtggta

SEQ ID NO: 260092 - DNA, 25 bp, probe
ggctctgtaaggacgccttgatgct

SEQ ID NO: 260093 - DNA, 25 bp, probe
ggcttgaaatggacatctgtgatgg

SEQ ID NO: 260094 - DNA, 25 bp, probe
ggcttccaactgaatatgagaggaa

SEQ ID NO: 260095 - DNA, 25 bp, probe
ggcccaaccttttcataggagatgc

SEQ ID NO: 260096 - DNA, 25 bp, probe
ggcccaaccttttcataggagatgc

SEQ ID NO: 260097 - DNA, 25 bp, probe
ggcccaaccttttcataggagatgc

SEQ ID NO: 260098 - DNA, 25 bp, probe
ggcccaaccttttcataggagatgc

SEQ ID NO: 260099 - DNA, 25 bp, probe
ggctcaagactttctaactgggatg

SEQ ID NO: 260100 - DNA, 25 bp, probe
ggctctgaacttcatgaaggggtgt

SEQ ID NO: 260101 - DNA, 25 bp, probe
ggctctgaacttcatgaaggggtgt

SEQ ID NO: 260102 - DNA, 25 bp, probe
ggctctgaacttcatgaaggggtgt

SEQ ID NO: 260103 - DNA, 25 bp, probe
ggccgaagacctcaagggtggctgt

SEQ ID NO: 260104 - DNA, 25 bp, probe
ggctaacaccttcagtagcgtggct

SEQ ID NO: 260105 - DNA, 25 bp, probe
ggctaaccactttaaagctattctt

SEQ ID NO: 260106 - DNA, 25 bp, probe
ggctttccatcacttattacaattt

SEQ ID NO: 260107 - DNA, 25 bp, probe
ggctttctccatcatagaatagcat

SEQ ID NO: 260108 - DNA, 25 bp, probe
ggctttcctacctagatgagcaggc

SEQ ID NO: 260109 - DNA, 25 bp, probe
ggctttgcagtcccatagaacagaa

SEQ ID NO: 260110 - DNA, 25 bp, probe
ggcttgcgcctcaacagagatgaca

SEQ ID NO: 260111 - DNA, 25 bp, probe
ggctgcccgtcaaatggatggctcc

SEQ ID NO: 260112 - DNA, 25 bp, probe
ggcttccatggacaggatggccgcc

SEQ ID NO: 260113 - DNA, 25 bp, probe
ggcttcaattgagaactccactccc

SEQ ID NO: 260114 - DNA, 25 bp, probe
ggctgattttggtaagtcgcccctc

SEQ ID NO: 260115 - DNA, 25 bp, probe
ggctgattttggtaagtcgcccctc

SEQ ID NO: 260116 - DNA, 25 bp, probe
ggctagatgttttaagctacagctc

SEQ ID NO: 260117 - DNA, 25 bp, probe
ggcttatgtcttcacactactagta

SEQ ID NO: 260118 - DNA, 25 bp, probe
ggctttggcttatcaagcctagtgt

SEQ ID NO: 260119 - DNA, 25 bp, probe
ggctttgagtatatcaacccattat

SEQ ID NO: 260120 - DNA, 25 bp, probe
ggcttctcttatactaacccagagt

SEQ ID NO: 260121 - DNA, 25 bp, probe
ggcttctcttatactaacccagagt

SEQ ID NO: 260122 - DNA, 25 bp, probe
ggctccattagaactgtgaccctag

SEQ ID NO: 260123 - DNA, 25 bp, probe
ggctccatcgagacctatgagcagg

SEQ ID NO: 260124 - DNA, 25 bp, probe
ggctgcctcagagcattcagaattc

SEQ ID NO: 260125 - DNA, 25 bp, probe
ggctgcctcagagcattcagaattc

SEQ ID NO: 260126 - DNA, 25 bp, probe
ggctcacaaggtaccattatatgca

SEQ ID NO: 260127 - DNA, 25 bp, probe
ggctcagcatagggtcactttgcca

SEQ ID NO: 260128 - DNA, 25 bp, probe
ggctagcaaccatactatatcctta

SEQ ID NO: 260129 - DNA, 25 bp, probe
ggctccaaagcagactttcttgaga

SEQ ID NO: 260130 - DNA, 25 bp, probe
ggctccaaagcagactttcttgaga

SEQ ID NO: 260131 - DNA, 25 bp, probe
ggctttcaagcagagcacattccca

SEQ ID NO: 260132 - DNA, 25 bp, probe
ggctttcaaagcaacagctcagctc

SEQ ID NO: 260133 - DNA, 25 bp, probe
ggctttcaaagcaacagctcagctc

SEQ ID NO: 260134 - DNA, 25 bp, probe
ggcttcctgaactcacatcagtcaa

SEQ ID NO: 260135 - DNA, 25 bp, probe
ggcttcactgaagtgctaccagtgg

SEQ ID NO: 260136 - DNA, 25 bp, probe
ggcttgcctgaagggagtggctctg

SEQ ID NO: 260137 - DNA, 25 bp, probe
ggcttggagcaagtgggtgttctgc

SEQ ID NO: 260138 - DNA, 25 bp, probe
ggcttggtacacagggttcatcatc

SEQ ID NO: 260139 - DNA, 25 bp, probe
ggctgggaagactgtttcatcctct

SEQ ID NO: 260140 - DNA, 25 bp, probe
ggctgcactgaagcggcttatccac

SEQ ID NO: 260141 - DNA, 25 bp, probe
ggctgacgatgagtggaccaagcgg

SEQ ID NO: 260142 - DNA, 25 bp, probe
ggctgacgatgagtggaccaagcgg

SEQ ID NO: 260143 - DNA, 25 bp, probe
ggctgctcagtcgggagccagcagc

SEQ ID NO: 260144 - DNA, 25 bp, probe
ggctgctcagtcgggagccagcagc

SEQ ID NO: 260145 - DNA, 25 bp, probe
ggctctagcccaaggctcagaggag

SEQ ID NO: 260146 - DNA, 25 bp, probe
ggctgtactgccaaggtacctaggt

SEQ ID NO: 260147 - DNA, 25 bp, probe
ggcttcactccttaaaagttggtgg

SEQ ID NO: 260148 - DNA, 25 bp, probe
ggcttcactccttaaaagttggtgg

SEQ ID NO: 260149 - DNA, 25 bp, probe
ggcttagttctaaagagactgtttg

SEQ ID NO: 260150 - DNA, 25 bp, probe
ggctcttctttgaaatgaggtcatt

SEQ ID NO: 260151 - DNA, 25 bp, probe
ggctcttctttgaaatgaggtcatt

SEQ ID NO: 260152 - DNA, 25 bp, probe
ggctcttttactatcaagtcagatg

SEQ ID NO: 260153 - DNA, 25 bp, probe
ggcttctgcattactattaactctg

SEQ ID NO: 260154 - DNA, 25 bp, probe
ggccatagcatctctattgtagccc

SEQ ID NO: 260155 - DNA, 25 bp, probe
ggctcaatgcacaactattgcccac

SEQ ID NO: 260156 - DNA, 25 bp, probe
ggctgatgacagtattattcctacc

SEQ ID NO: 260157 - DNA, 25 bp, probe
ggctcgacaatttaccaattcctgt

SEQ ID NO: 260158 - DNA, 25 bp, probe
ggctaaggatactaccaactactat

SEQ ID NO: 260159 - DNA, 25 bp, probe
ggctaaggaaatacaatccctctga

SEQ ID NO: 260160 - DNA, 25 bp, probe
ggctaaggaaatacaatccctctga

SEQ ID NO: 260161 - DNA, 25 bp, probe
ggctgaaggctagcaaaccgagcga

SEQ ID NO: 260162 - DNA, 25 bp, probe
ggctctaggctatctacacactaaa

SEQ ID NO: 260163 - DNA, 25 bp, probe
ggctcatacttatatagcacttact

SEQ ID NO: 260164 - DNA, 25 bp, probe
ggcttacagctgaaacaagcttcct

SEQ ID NO: 260165 - DNA, 25 bp, probe
ggctctacgtgcaagtcaacaagtt

SEQ ID NO: 260166 - DNA, 25 bp, probe
ggctctacgtgcaagtcaacaagtt

SEQ ID NO: 260167 - DNA, 25 bp, probe
ggctctgacaggcatggtactagat

SEQ ID NO: 260168 - DNA, 25 bp, probe
ggctctgaaggcccaactgtcagac

SEQ ID NO: 260169 - DNA, 25 bp, probe
ggctattcaggcactacgagcaacg

SEQ ID NO: 260170 - DNA, 25 bp, probe
ggctcattaagccttttggacacag

SEQ ID NO: 260171 - DNA, 25 bp, probe
ggctgattgtagcttgttacccaag

SEQ ID NO: 260172 - DNA, 25 bp, probe
ggctgattgtagcttgttacccaag

SEQ ID NO: 260173 - DNA, 25 bp, probe
ggctttagatgacatttagccctaa

SEQ ID NO: 260174 - DNA, 25 bp, probe
ggctttatgctgtgtttatgccccc

SEQ ID NO: 260175 - DNA, 25 bp, probe
ggctttgcgtgaagtttatgctcat

SEQ ID NO: 260176 - DNA, 25 bp, probe
ggctttgcgtgaagtttatgctcat

SEQ ID NO: 260177 - DNA, 25 bp, probe
ggctttatgtgaactatgatattgt

SEQ ID NO: 260178 - DNA, 25 bp, probe
ggctttatgtgatatacctgagtgt

SEQ ID NO: 260179 - DNA, 25 bp, probe
ggctttatgtgatatacctgagtgt

SEQ ID NO: 260180 - DNA, 25 bp, probe
ggctttgcatagattccctgagcag

SEQ ID NO: 260181 - DNA, 25 bp, probe
ggcttttatgtttgtccgatggaga

SEQ ID NO: 260182 - DNA, 25 bp, probe
ggcggctttgtttgttcgtgaggcc

SEQ ID NO: 260183 - DNA, 25 bp, probe
ggctggtctttttactttggagctc

SEQ ID NO: 260184 - DNA, 25 bp, probe
ggcttttctttcaatcttaggagac

SEQ ID NO: 260185 - DNA, 25 bp, probe
ggcttttcttgttagatggaaggcc

SEQ ID NO: 260186 - DNA, 25 bp, probe
ggctctcttcttcaaaggaccaggt

SEQ ID NO: 260187 - DNA, 25 bp, probe
ggctgaattcttcaaagacacacgc

SEQ ID NO: 260188 - DNA, 25 bp, probe
ggctcgagtctttaatataacccca

SEQ ID NO: 260189 - DNA, 25 bp, probe
ggctagagtttcttctcatcagagc

SEQ ID NO: 260190 - DNA, 25 bp, probe
ggctcagagctttgtcacttgccac

SEQ ID NO: 260191 - DNA, 25 bp, probe
ggctgcaaatgttgttccgccacac

SEQ ID NO: 260192 - DNA, 25 bp, probe
ggctcgatcagtagttatctataca

SEQ ID NO: 260193 - DNA, 25 bp, probe
ggctcgacatgtgcttgcatttcta

SEQ ID NO: 260194 - DNA, 25 bp, probe
ggctccatcatggttggtatttatg

SEQ ID NO: 260195 - DNA, 25 bp, probe
ggctccatcatggttggtatttatg

SEQ ID NO: 260196 - DNA, 25 bp, probe
ggctctgcatcacttaggtattcgt

SEQ ID NO: 260197 - DNA, 25 bp, probe
ggctctgcatcacttaggtattcgt

SEQ ID NO: 260198 - DNA, 25 bp, probe
ggctcagccagctatgggtatctgc

SEQ ID NO: 260199 - DNA, 25 bp, probe
tggccatgcctggagacatatcact

SEQ ID NO: 260200 - DNA, 25 bp, probe
tggccactgcaggagatgccacctg

SEQ ID NO: 260201 - DNA, 25 bp, probe
ggctgcagctagaaaaactcttaga

SEQ ID NO: 260202 - DNA, 25 bp, probe
ggctgctgtagatgactacttgggc

SEQ ID NO: 260203 - DNA, 25 bp, probe
ggctgattatccggtggctttagcc

SEQ ID NO: 260204 - DNA, 25 bp, probe
ggcctgaaccaggtggccttactcc

SEQ ID NO: 260205 - DNA, 25 bp, probe
ggcctgaaccaggtggccttactcc

SEQ ID NO: 260206 - DNA, 25 bp, probe
ggccatgaacgggaaccggcctatc

SEQ ID NO: 260207 - DNA, 25 bp, probe
ggctctgaacgaggacctggactca

SEQ ID NO: 260208 - DNA, 25 bp, probe
ggctcagcaacgtgaaataacgcaa

SEQ ID NO: 260209 - DNA, 25 bp, probe
tggcaccaagcggaaaataaactcc

SEQ ID NO: 260210 - DNA, 25 bp, probe
ggctacagagtggtaaacaaatctc

SEQ ID NO: 260211 - DNA, 25 bp, probe
ggctacaggggtttcacagcagaca

SEQ ID NO: 260212 - DNA, 25 bp, probe
ggctcagcagggtgggaacaggcag

SEQ ID NO: 260213 - DNA, 25 bp, probe
ggctgcaaggggtggactgtgggat

SEQ ID NO: 260214 - DNA, 25 bp, probe
tggctaagacgggttggggagcaga

SEQ ID NO: 260215 - DNA, 25 bp, probe
tggctaagacgggttggggagcaga

SEQ ID NO: 260216 - DNA, 25 bp, probe
ggctacagacacgtgtacctagaag

SEQ ID NO: 260217 - DNA, 25 bp, probe
ggctaagactttaactcagagcaag

SEQ ID NO: 260218 - DNA, 25 bp, probe
ggctataaccagtctcagcaagaca

SEQ ID NO: 260219 - DNA, 25 bp, probe
ggcgtgtaccgcatgcgcaagaagc

SEQ ID NO: 260220 - DNA, 25 bp, probe
ggcggtccgctggggaagatgccgc

SEQ ID NO: 260221 - DNA, 25 bp, probe
ggcctgcaccccagtataagggcct

SEQ ID NO: 260222 - DNA, 25 bp, probe
ggcccaagccgcagttaagggggca

SEQ ID NO: 260223 - DNA, 25 bp, probe
ggccccatcggtgtgtaaggtggcc

SEQ ID NO: 260224 - DNA, 25 bp, probe
ggcggcgctcggagcggaaggtgac

SEQ ID NO: 260225 - DNA, 25 bp, probe
ggctgtgcccgtaaggggaagtacg

SEQ ID NO: 260226 - DNA, 25 bp, probe
ggctcttccggaaggggaggaagcg

SEQ ID NO: 260227 - DNA, 25 bp, probe
ggctctaccaggttatggagacaga

SEQ ID NO: 260228 - DNA, 25 bp, probe
ggctctaccaggttatggagacaga

SEQ ID NO: 260229 - DNA, 25 bp, probe
ggctcaacggggccaagatgaagca

SEQ ID NO: 260230 - DNA, 25 bp, probe
ggctccgcacggagaacgagctgca

SEQ ID NO: 260231 - DNA, 25 bp, probe
ggccaggcacggaggctcgtgcatg

SEQ ID NO: 260232 - DNA, 25 bp, probe
ggctcatggtcaaggtggcctctgt

SEQ ID NO: 260233 - DNA, 25 bp, probe
ggctaagtgaagatgacaatcatgt

SEQ ID NO: 260234 - DNA, 25 bp, probe
ggctaaatccgcagcaaactgccgt

SEQ ID NO: 260235 - DNA, 25 bp, probe
ggctactatcccgagaaatctccag

SEQ ID NO: 260236 - DNA, 25 bp, probe
ggctacttcaacgagaacttccgcc

SEQ ID NO: 260237 - DNA, 25 bp, probe
ggctgacctgaaggagacgtaccgc

SEQ ID NO: 260238 - DNA, 25 bp, probe
ggctaccaggagagcaggtgacaca

SEQ ID NO: 260239 - DNA, 25 bp, probe
ggctttcgacagagatggtgagaag

SEQ ID NO: 260240 - DNA, 25 bp, probe
ggctttcggatcagctaggaagaca

SEQ ID NO: 260241 - DNA, 25 bp, probe
ggctttagcatgacattcggggaaa

SEQ ID NO: 260242 - DNA, 25 bp, probe
ggctttagcatgacattcggggaaa

SEQ ID NO: 260243 - DNA, 25 bp, probe
ggctttggcatgacttaagaggaag

SEQ ID NO: 260244 - DNA, 25 bp, probe
ggcgtcggtttttagcatatgtggt

SEQ ID NO: 260245 - DNA, 25 bp, probe
ggcttcacgtggtttggagatgggt

SEQ ID NO: 260246 - DNA, 25 bp, probe
ggcttactggagctggaccagcgga

SEQ ID NO: 260247 - DNA, 25 bp, probe
ggctgtactgagaggggtcaggctg

SEQ ID NO: 260248 - DNA, 25 bp, probe
ggctcacgtgagagtgtcttcacgg

SEQ ID NO: 260249 - DNA, 25 bp, probe
ggctcagaggaacagatcttgaagt

SEQ ID NO: 260250 - DNA, 25 bp, probe
ggctcagaggaacagatcttgaagt

SEQ ID NO: 260251 - DNA, 25 bp, probe
ggctatgggagtctgagtgtgcaca

SEQ ID NO: 260252 - DNA, 25 bp, probe
ggctttgactgggtttgtcacatgg

SEQ ID NO: 260253 - DNA, 25 bp, probe
ggctttcagtggtttgttcctggaa

SEQ ID NO: 260254 - DNA, 25 bp, probe
ggctttggggactatgttgttggca

SEQ ID NO: 260255 - DNA, 25 bp, probe
ggctgggttggatatgcctttgccg

SEQ ID NO: 260256 - DNA, 25 bp, probe
ggctgggcctggcctatttaagccc

SEQ ID NO: 260257 - DNA, 25 bp, probe
ggctcatgacacagcctgtttcaac

SEQ ID NO: 260258 - DNA, 25 bp, probe
ggctagatcactcactgttgtagct

SEQ ID NO: 260259 - DNA, 25 bp, probe
ggctacatgcacaagaccattaaga

SEQ ID NO: 260260 - DNA, 25 bp, probe
ggctacatgcacaagaccattaaga

SEQ ID NO: 260261 - DNA, 25 bp, probe
ggctacacacaaaccagtatcgctc

SEQ ID NO: 260262 - DNA, 25 bp, probe
ggctacacacaaaccagtatcgctc

SEQ ID NO: 260263 - DNA, 25 bp, probe
ggctacactgagcaccaggtggtct

SEQ ID NO: 260264 - DNA, 25 bp, probe
ggctagcatctacgacaagcgctgc

SEQ ID NO: 260265 - DNA, 25 bp, probe
ggcttatgcagaccagcaagctgtg

SEQ ID NO: 260266 - DNA, 25 bp, probe
ggctctgatattccatgaatgtatc

SEQ ID NO: 260267 - DNA, 25 bp, probe
ggctgcatgctattccattttgcag

SEQ ID NO: 260268 - DNA, 25 bp, probe
ggctgctgtcattttatgctaagta

SEQ ID NO: 260269 - DNA, 25 bp, probe
ggctgttcattgattgagactgtag

SEQ ID NO: 260270 - DNA, 25 bp, probe
ggctgatttctggattaagcatgaa

SEQ ID NO: 260271 - DNA, 25 bp, probe
ggctgatttctggattaagcatgaa

SEQ ID NO: 260272 - DNA, 25 bp, probe
ggctgtgatccgggaaagcaggaag

SEQ ID NO: 260273 - DNA, 25 bp, probe
ggcttatctcactgagtgagcagaa

SEQ ID NO: 260274 - DNA, 25 bp, probe
ggctactctgctccagcatgaaaat

SEQ ID NO: 260275 - DNA, 25 bp, probe
ggctgatctcccagatgaactacct

SEQ ID NO: 260276 - DNA, 25 bp, probe
ggctgatctcccagatgaactacct

SEQ ID NO: 260277 - DNA, 25 bp, probe
ggctgttctaacatgtgtctacctg

SEQ ID NO: 260278 - DNA, 25 bp, probe
ggctgttctaaagttggcctgtgct

SEQ ID NO: 260279 - DNA, 25 bp, probe
ggctgttctaaagttggcctgtgct

SEQ ID NO: 260280 - DNA, 25 bp, probe
ggctttgccaagatggtgccttcta

SEQ ID NO: 260281 - DNA, 25 bp, probe
ggctgggccaagaaggatctagtct

SEQ ID NO: 260282 - DNA, 25 bp, probe
ggctgaggcgggaggatcgcttgat

SEQ ID NO: 260283 - DNA, 25 bp, probe
ggctaggcttgggatgagctgggtt

SEQ ID NO: 260284 - DNA, 25 bp, probe
ggctcagccttggacatggaggcct

SEQ ID NO: 260285 - DNA, 25 bp, probe
ggctcccatccctatggaggaacaa

SEQ ID NO: 260286 - DNA, 25 bp, probe
ggctccaagttcaaggaggtcaaga

SEQ ID NO: 260287 - DNA, 25 bp, probe
ggctgaaggttaagagcgtgtgaac

SEQ ID NO: 260288 - DNA, 25 bp, probe
ggcgtaagcttaaggcagcggtgaa

SEQ ID NO: 260289 - DNA, 25 bp, probe
ggcgtttatttctgcagggctgaaa

SEQ ID NO: 260290 - DNA, 25 bp, probe
ggctttcttttctgataggctacca

SEQ ID NO: 260291 - DNA, 25 bp, probe
ggctgtttccttttgcatctggaac

SEQ ID NO: 260292 - DNA, 25 bp, probe
ggctttgatgccagcatccttggat

SEQ ID NO: 260293 - DNA, 25 bp, probe
ggctctcagagcataatccttggca

SEQ ID NO: 260294 - DNA, 25 bp, probe
ggctgctctgatcatttccatgatg

SEQ ID NO: 260295 - DNA, 25 bp, probe
ggctcacatattttggccagtggtc

SEQ ID NO: 260296 - DNA, 25 bp, probe
ggctcctgcagtttgtgactgggtc

SEQ ID NO: 260297 - DNA, 25 bp, probe
ggctctctggatttgtggtagatgg

SEQ ID NO: 260298 - DNA, 25 bp, probe
ggctcactgtttagtgctgagagtg

SEQ ID NO: 260299 - DNA, 25 bp, probe
ggctcagctgatcctgacatgggag

SEQ ID NO: 260300 - DNA, 25 bp, probe
ggctcagggcctgatggggaaccta

SEQ ID NO: 260301 - DNA, 25 bp, probe
ggctagaggcctgatggttagtgtt

SEQ ID NO: 260302 - DNA, 25 bp, probe
ggctagaggcactatggacttcagg

SEQ ID NO: 260303 - DNA, 25 bp, probe
ggctgatgggaactgcaacgtcatt

SEQ ID NO: 260304 - DNA, 25 bp, probe
ggctgatcctgaatggcacaggcca

SEQ ID NO: 260305 - DNA, 25 bp, probe
ggctgcatcactgttatagggggtg

SEQ ID NO: 260306 - DNA, 25 bp, probe
ggctgactcccttcaggagtggagg

SEQ ID NO: 260307 - DNA, 25 bp, probe
ggctcccctgctgaaggtggggatt

SEQ ID NO: 260308 - DNA, 25 bp, probe
ggctcccctgctgaaggtggggatt

SEQ ID NO: 260309 - DNA, 25 bp, probe
tggtccggtttgtggtggaagatta

SEQ ID NO: 260310 - DNA, 25 bp, probe
ggccgggttgtgaggggttgttgca

SEQ ID NO: 260311 - DNA, 25 bp, probe
ggccgggttgtgaggggttgttgca

SEQ ID NO: 260312 - DNA, 25 bp, probe
ggctacggaaggaggggacatgtct

SEQ ID NO: 260313 - DNA, 25 bp, probe
tggccccccaggaggggagctattt

SEQ ID NO: 260314 - DNA, 25 bp, probe
tccccctaagagacctggacttaag

SEQ ID NO: 260315 - DNA, 25 bp, probe
tcccctccagggcactgggattaca

SEQ ID NO: 260316 - DNA, 25 bp, probe
ggcctcccaaactgctgggattaca

SEQ ID NO: 260317 - DNA, 25 bp, probe
ggctctcggagaaagtgtgtgtatt

SEQ ID NO: 260318 - DNA, 25 bp, probe
ggctctcagggaacagcagcagtgc

SEQ ID NO: 260319 - DNA, 25 bp, probe
ggctacagaggccacacatggtcca

SEQ ID NO: 260320 - DNA, 25 bp, probe
ggctcacagaccgtcaagtatgctc

SEQ ID NO: 260321 - DNA, 25 bp, probe
ggctacatggcacctgaagttgtca

SEQ ID NO: 260322 - DNA, 25 bp, probe
ggctataagcacttggaattgtact

SEQ ID NO: 260323 - DNA, 25 bp, probe
ggctatggaacttctggactgtaat

SEQ ID NO: 260324 - DNA, 25 bp, probe
ggctaggaacattctgctgtcggaa

SEQ ID NO: 260325 - DNA, 25 bp, probe
ggctcaggatattcactctgtggtc

SEQ ID NO: 260326 - DNA, 25 bp, probe
ggctaagatgcaacaggctatttct

SEQ ID NO: 260327 - DNA, 25 bp, probe
ggctgagaatctaagttctgtgcct

SEQ ID NO: 260328 - DNA, 25 bp, probe
ggctcaagtcgcaatgtatctgctg

SEQ ID NO: 260329 - DNA, 25 bp, probe
ggctcaagtcgcaatgtatctgctg

SEQ ID NO: 260330 - DNA, 25 bp, probe
ggctgaatgtgcgagtccatagctg

SEQ ID NO: 260331 - DNA, 25 bp, probe
ggctgtagcacaggcttcacagtga

SEQ ID NO: 260332 - DNA, 25 bp, probe
ggctctacagcggctgaatgaggaa

SEQ ID NO: 260333 - DNA, 25 bp, probe
ggctccatcactggtgactgatgaa

SEQ ID NO: 260334 - DNA, 25 bp, probe
ggctctctgactgatgtggtcacag

SEQ ID NO: 260335 - DNA, 25 bp, probe
ggctcttcacaatgctgtgtgtgca

SEQ ID NO: 260336 - DNA, 25 bp, probe
ggctttcagcaattcttgcgtaaac

SEQ ID NO: 260337 - DNA, 25 bp, probe
ggctttgctcgagctgtgcggaacc

SEQ ID NO: 260338 - DNA, 25 bp, probe
ggctgttgctcagcatgcaggggcc

SEQ ID NO: 260339 - DNA, 25 bp, probe
ggctttgggcctaggggccttatca

SEQ ID NO: 260340 - DNA, 25 bp, probe
ggctttggcgccaggagatgccatt

SEQ ID NO: 260341 - DNA, 25 bp, probe
ggctttgacctggaggaattcttaa

SEQ ID NO: 260342 - DNA, 25 bp, probe
ggctcttgacacttagccgctgtct

SEQ ID NO: 260343 - DNA, 25 bp, probe
ggctctgtgagaggtggggcagtca

SEQ ID NO: 260344 - DNA, 25 bp, probe
ggcgtgaatgaggtggattactgcc

SEQ ID NO: 260345 - DNA, 25 bp, probe
ggctatgttgacatggcatcacctc

SEQ ID NO: 260346 - DNA, 25 bp, probe
ggctattgttgcattgtacagcact

SEQ ID NO: 260347 - DNA, 25 bp, probe
ggctattccatccatctggaagcac

SEQ ID NO: 260348 - DNA, 25 bp, probe
ggctattccatccatctggaagcac

SEQ ID NO: 260349 - DNA, 25 bp, probe
ggctgttggcatttctgtaaactgc

SEQ ID NO: 260350 - DNA, 25 bp, probe
ggctgttggcatttctgtaaactgc

SEQ ID NO: 260351 - DNA, 25 bp, probe
ggctgttggttggcttgaaatgcat

SEQ ID NO: 260352 - DNA, 25 bp, probe
ggctgaggaggaatcttacttctcc

SEQ ID NO: 260353 - DNA, 25 bp, probe
ggctgcggtgagtgtatgcaccctc

SEQ ID NO: 260354 - DNA, 25 bp, probe
ggctgcggtgagtgtatgcaccctc

SEQ ID NO: 260355 - DNA, 25 bp, probe
ggctcaggcactgagactaccgctc

SEQ ID NO: 260356 - DNA, 25 bp, probe
ggctcacgcctgtaatcccagcact

SEQ ID NO: 260357 - DNA, 25 bp, probe
ggctcatgggtgtgcaccacaactc

SEQ ID NO: 260358 - DNA, 25 bp, probe
ggctaagttatacccaaagctcact

SEQ ID NO: 260359 - DNA, 25 bp, probe
ggctaagtgtgaagcctcctaccct

SEQ ID NO: 260360 - DNA, 25 bp, probe
ggctactgtgtagcttcttatgtcc

SEQ ID NO: 260361 - DNA, 25 bp, probe
ggctaatttagctgctgccgatttc

SEQ ID NO: 260362 - DNA, 25 bp, probe
ggctaattacctaaccagcttgtat

SEQ ID NO: 260363 - DNA, 25 bp, probe
ggctacgaagtcaaacccagtttga

SEQ ID NO: 260364 - DNA, 25 bp, probe
ggctacgaagtcaaacccagtttga

SEQ ID NO: 260365 - DNA, 25 bp, probe
ggctaccaggaggaaatccagttgt

SEQ ID NO: 260366 - DNA, 25 bp, probe
ggctacacatttggacaagacattt

SEQ ID NO: 260367 - DNA, 25 bp, probe
ggctcacgcattcagccaggagatg

SEQ ID NO: 260368 - DNA, 25 bp, probe
ggctcactcttgctgcagaggaagc

SEQ ID NO: 260369 - DNA, 25 bp, probe
ggctcactcttgctgcagaggaagc

SEQ ID NO: 260370 - DNA, 25 bp, probe
ggctatcacaggctcagggcaaaga

SEQ ID NO: 260371 - DNA, 25 bp, probe
ggctatgacagtctgctacgcaaaa

SEQ ID NO: 260372 - DNA, 25 bp, probe
ggctatgagtgtctggacggcaagg

SEQ ID NO: 260373 - DNA, 25 bp, probe
ggctgaagtaccagacctgctagag

SEQ ID NO: 260374 - DNA, 25 bp, probe
ggctgaagtaccagacctgctagag

SEQ ID NO: 260375 - DNA, 25 bp, probe
ggctgaagtaccagacctgctagag

SEQ ID NO: 260376 - DNA, 25 bp, probe
ggctgggaacggaatccctgagctg

SEQ ID NO: 260377 - DNA, 25 bp, probe
ggctgggataaagacttctgacaga

SEQ ID NO: 260378 - DNA, 25 bp, probe
ggctgggaaggctagacttcctcag

SEQ ID NO: 260379 - DNA, 25 bp, probe
ggcgtgaggggagacatccgccagc

SEQ ID NO: 260380 - DNA, 25 bp, probe
ggcggaggaagtgaatgccatcctc

SEQ ID NO: 260381 - DNA, 25 bp, probe
ggcggcaaaacctatcatcaactgt

SEQ ID NO: 260382 - DNA, 25 bp, probe
ggctacacactcacaagcaaacttc

SEQ ID NO: 260383 - DNA, 25 bp, probe
ggctaaactgccaacatgcagaatt

SEQ ID NO: 260384 - DNA, 25 bp, probe
ggctcaaatctccttatggatagtg

SEQ ID NO: 260385 - DNA, 25 bp, probe
ggctcaaatctccttatggatagtg

SEQ ID NO: 260386 - DNA, 25 bp, probe
ggctgcatactcccagtcgggagtg

SEQ ID NO: 260387 - DNA, 25 bp, probe
ggctgcatactcccagtcgggagtg

SEQ ID NO: 260388 - DNA, 25 bp, probe
ggctgcatactcccagtcgggagtg

SEQ ID NO: 260389 - DNA, 25 bp, probe
ggccaaagccgagcggaaggggcta

SEQ ID NO: 260390 - DNA, 25 bp, probe
ggctgatgaaacgccggaagtccgt

SEQ ID NO: 260391 - DNA, 25 bp, probe
ggctgatgaaacgccggaagtccgt

SEQ ID NO: 260392 - DNA, 25 bp, probe
ggctgttgacaagcaaggaaagact

SEQ ID NO: 260393 - DNA, 25 bp, probe
ggctgttccacagagaagtctagga

SEQ ID NO: 260394 - DNA, 25 bp, probe
ggctatctcacaccagaacagtttg

SEQ ID NO: 260395 - DNA, 25 bp, probe
ggctacatgcaacagtggattgtat

SEQ ID NO: 260396 - DNA, 25 bp, probe
ggctcattgccacagtacaagctaa

SEQ ID NO: 260397 - DNA, 25 bp, probe
ggctgatttgccaccaaagcttcaa

SEQ ID NO: 260398 - DNA, 25 bp, probe
ggctagttcatcaaccattagttta

SEQ ID NO: 260399 - DNA, 25 bp, probe
ggctagtccaagtgcagtgatgttt

SEQ ID NO: 260400 - DNA, 25 bp, probe
ggctcagtcctagttcaggatttgg

SEQ ID NO: 260401 - DNA, 25 bp, probe
ggctcgtataacaacaggtatatga

SEQ ID NO: 260402 - DNA, 25 bp, probe
ggctctttaatccatctggaaatga

SEQ ID NO: 260403 - DNA, 25 bp, probe
ggctcatttttgtcatcatggcggt

SEQ ID NO: 260404 - DNA, 25 bp, probe
ggctgtatacattgattctggtggt

SEQ ID NO: 260405 - DNA, 25 bp, probe
ggctcagatcctggatttgcaggga

SEQ ID NO: 260406 - DNA, 25 bp, probe
ggctcagatcctggatttgcaggga

SEQ ID NO: 260407 - DNA, 25 bp, probe
ggctcaactttaattggaggacaag

SEQ ID NO: 260408 - DNA, 25 bp, probe
ggctcaactttaattggaggacaag

SEQ ID NO: 260409 - DNA, 25 bp, probe
ggctgaactgttggttgagactgca

SEQ ID NO: 260410 - DNA, 25 bp, probe
ggctgaagctggagcagcggattgc

SEQ ID NO: 260411 - DNA, 25 bp, probe
ggctcacactggaagcagctacagt

SEQ ID NO: 260412 - DNA, 25 bp, probe
ggctcacactggaagcagctacagt

SEQ ID NO: 260413 - DNA, 25 bp, probe
ggctcaccatgtaacatctggcttg

SEQ ID NO: 260414 - DNA, 25 bp, probe
ggctatcaagtggagatgtgctttg

SEQ ID NO: 260415 - DNA, 25 bp, probe
ggctatcaagtggagatgtgctttg

SEQ ID NO: 260416 - DNA, 25 bp, probe
ggctgatgcggaggacgtgatctac

SEQ ID NO: 260417 - DNA, 25 bp, probe
ggctgctcgggcagaggtctatctc

SEQ ID NO: 260418 - DNA, 25 bp, probe
ggcggcataatgaagggtgaagcat

SEQ ID NO: 260419 - DNA, 25 bp, probe
ggcggtaaagaggtgaaaggatgaa

SEQ ID NO: 260420 - DNA, 25 bp, probe
ggcggtgaagacggtcaacgagtca

SEQ ID NO: 260421 - DNA, 25 bp, probe
ggctgtgaaaaccctgaagccagga

SEQ ID NO: 260422 - DNA, 25 bp, probe
ggctctgaaacccgaggatgccaag

SEQ ID NO: 260423 - DNA, 25 bp, probe
ggctctggacacgagctacgtgatc

SEQ ID NO: 260424 - DNA, 25 bp, probe
ggctctggatcaggtctaccattgc

SEQ ID NO: 260425 - DNA, 25 bp, probe
ggctctggatcaggtctaccattgc

SEQ ID NO: 260426 - DNA, 25 bp, probe
ggctctgtgtagggcctgagcttgc

SEQ ID NO: 260427 - DNA, 25 bp, probe
ggctctggtaggtactaatggtgat

SEQ ID NO: 260428 - DNA, 25 bp, probe
ggctctgaaatggaatatattggtt

SEQ ID NO: 260429 - DNA, 25 bp, probe
ggctccagtgattaatagatgggtt

SEQ ID NO: 260430 - DNA, 25 bp, probe
ggctccagtgattaatagatgggtt

SEQ ID NO: 260431 - DNA, 25 bp, probe
ggctccaggaagaccaatagcgtct

SEQ ID NO: 260432 - DNA, 25 bp, probe
ggctccaggaagaccaatagcgtct

SEQ ID NO: 260433 - DNA, 25 bp, probe
ggctcacagggaacaagacacggct

SEQ ID NO: 260434 - DNA, 25 bp, probe
ggctcacagggaacaagacacggct

SEQ ID NO: 260435 - DNA, 25 bp, probe
ggctcacagggctgaaaggggcttt

SEQ ID NO: 260436 - DNA, 25 bp, probe
ggctctggggcccaagggattgttt

SEQ ID NO: 260437 - DNA, 25 bp, probe
ggctgttggttccacagggatctga

SEQ ID NO: 260438 - DNA, 25 bp, probe
ggctctgggtcacagaggagcatgc

SEQ ID NO: 260439 - DNA, 25 bp, probe
ggctctacagcagcaagaggagtcc

SEQ ID NO: 260440 - DNA, 25 bp, probe
ggctcatctacagtaaggacagtct

SEQ ID NO: 260441 - DNA, 25 bp, probe
ggctagcaaaccgagcgatcatgtc

SEQ ID NO: 260442 - DNA, 25 bp, probe
ggctagcaaaccgagcgatcatgtc

SEQ ID NO: 260443 - DNA, 25 bp, probe
ggctacataacacatctatgatgct

SEQ ID NO: 260444 - DNA, 25 bp, probe
ggctactgaagatatccgagtcaac

SEQ ID NO: 260445 - DNA, 25 bp, probe
ggctgcactgaaataacctggtaaa

SEQ ID NO: 260446 - DNA, 25 bp, probe
ggctcactgagcatcaaaaggggaa

SEQ ID NO: 260447 - DNA, 25 bp, probe
ggctcagcgccatcaaaatggtcca

SEQ ID NO: 260448 - DNA, 25 bp, probe
ggctgagcgctttgcaataagcatc

SEQ ID NO: 260449 - DNA, 25 bp, probe
ggctgagcgctttgcaataagcatc

SEQ ID NO: 260450 - DNA, 25 bp, probe
ggctgtgccttaattcagaacacca

SEQ ID NO: 260451 - DNA, 25 bp, probe
ggctgagctgttactaggacaacca

SEQ ID NO: 260452 - DNA, 25 bp, probe
ggcgacaattaggagagccagaaaa

SEQ ID NO: 260453 - DNA, 25 bp, probe
ggcgagcacgaactagaccaagcga

SEQ ID NO: 260454 - DNA, 25 bp, probe
ggcgtccgagagtgctcggcaggac

SEQ ID NO: 260455 - DNA, 25 bp, probe
ggcggtcagtcacggacggatagac

SEQ ID NO: 260456 - DNA, 25 bp, probe
ggcgggagtctcagccgaagagagc

SEQ ID NO: 260457 - DNA, 25 bp, probe
ggctggtttccttgtaacagggtga

SEQ ID NO: 260458 - DNA, 25 bp, probe
ggctcggttactaggaacactggct

SEQ ID NO: 260459 - DNA, 25 bp, probe
ggctcttgactacttggaactaggc

SEQ ID NO: 260460 - DNA, 25 bp, probe
ggccctaccagagggaacacggcct

SEQ ID NO: 260461 - DNA, 25 bp, probe
ggccctaccagagggaacacggcct

SEQ ID NO: 260462 - DNA, 25 bp, probe
ggccctggctaatgggcccgaggct

SEQ ID NO: 260463 - DNA, 25 bp, probe
ggccctggctaatgggcccgaggct

SEQ ID NO: 260464 - DNA, 25 bp, probe
ggctgccatgaggaagtgggcctaa

SEQ ID NO: 260465 - DNA, 25 bp, probe
ggctctgatgctgagaggcttgcct

SEQ ID NO: 260466 - DNA, 25 bp, probe
ggctctgatgctgagaggcttgcct

SEQ ID NO: 260467 - DNA, 25 bp, probe
ggctctgatgctaagcagctgtatg

SEQ ID NO: 260468 - DNA, 25 bp, probe
ggctctgatgctaagcagctgtatg

SEQ ID NO: 260469 - DNA, 25 bp, probe
ggctgcttgctgtatgagttatgtg

SEQ ID NO: 260470 - DNA, 25 bp, probe
ggctcgtctcaaagatatcagtagc

SEQ ID NO: 260471 - DNA, 25 bp, probe
ggctggtctcaaacttctggactca

SEQ ID NO: 260472 - DNA, 25 bp, probe
ggctgagctgcagagtcttcggcag

SEQ ID NO: 260473 - DNA, 25 bp, probe
ggctgagctgcagagtcttcggcag

SEQ ID NO: 260474 - DNA, 25 bp, probe
ggctgcaggagatgccattgctgaa

SEQ ID NO: 260475 - DNA, 25 bp, probe
ggccagggtaccatggagaaaatgg

SEQ ID NO: 260476 - DNA, 25 bp, probe
ggctcggaggaccctggaaaacaga

SEQ ID NO: 260477 - DNA, 25 bp, probe
ggctctgcagagcaaactggaaaga

SEQ ID NO: 260478 - DNA, 25 bp, probe
ggctccgaggtggagctgagacact

SEQ ID NO: 260479 - DNA, 25 bp, probe
ggctccagaagtgctgctgagacag

SEQ ID NO: 260480 - DNA, 25 bp, probe
ggctccaaatctgcctagaaaacct

SEQ ID NO: 260481 - DNA, 25 bp, probe
ggctcacaaacaggcaccagagaag

SEQ ID NO: 260482 - DNA, 25 bp, probe
ggctccataagcaatgccaagagaa

SEQ ID NO: 260483 - DNA, 25 bp, probe
ggctcttaggcaatcacatagtgaa

SEQ ID NO: 260484 - DNA, 25 bp, probe
ggctcttaggcaatcacatagtgaa

SEQ ID NO: 260485 - DNA, 25 bp, probe
ggctcttgagaggtcccagtcagcc

SEQ ID NO: 260486 - DNA, 25 bp, probe
ggctcttgagaggtcccagtcagcc

SEQ ID NO: 260487 - DNA, 25 bp, probe
ggctcttagcagcttccagattgac

SEQ ID NO: 260488 - DNA, 25 bp, probe
ggctctgtaatgctttagcatgtga

SEQ ID NO: 260489 - DNA, 25 bp, probe
ggctcatgcatgctgccattaactt

SEQ ID NO: 260490 - DNA, 25 bp, probe
ggctcagtggtcaatgtgaatccta

SEQ ID NO: 260491 - DNA, 25 bp, probe
ggctctgttgatgagcagaacgctt

SEQ ID NO: 260492 - DNA, 25 bp, probe
ggctcatggaggagcaaacactgcc

SEQ ID NO: 260493 - DNA, 25 bp, probe
ggctcaacggaacagacatctccgc

SEQ ID NO: 260494 - DNA, 25 bp, probe
ggcctacgaatagcagaatctcgga

SEQ ID NO: 260495 - DNA, 25 bp, probe
ggcctacgaatagcagaatctcgga

SEQ ID NO: 260496 - DNA, 25 bp, probe
ggctctaggaatgccggcatgctgg

SEQ ID NO: 260497 - DNA, 25 bp, probe
ggctcaaggagttcctgggcgagca

SEQ ID NO: 260498 - DNA, 25 bp, probe
ggccccgatggtcttacaggcaaat

SEQ ID NO: 260499 - DNA, 25 bp, probe
ggctctccaaggcctttgcaaagta

SEQ ID NO: 260500 - DNA, 25 bp, probe
ggctgttacagggatcatgtaaact

SEQ ID NO: 260501 - DNA, 25 bp, probe
ggctgttacgtgggaaacaccatgg

SEQ ID NO: 260502 - DNA, 25 bp, probe
ggctgtaattctgagaagatccgca

SEQ ID NO: 260503 - DNA, 25 bp, probe
ggctgtatttgcactcattatcacc

SEQ ID NO: 260504 - DNA, 25 bp, probe
ggctgtatttgcactcattatcacc

SEQ ID NO: 260505 - DNA, 25 bp, probe
tggctgagaattctcctttagacag

SEQ ID NO: 260506 - DNA, 25 bp, probe
ggctgagaattctcctttagacagt

SEQ ID NO: 260507 - DNA, 25 bp, probe
ggctgaggcactgcctttctagtat

SEQ ID NO: 260508 - DNA, 25 bp, probe
ggccagtggcccatgtttagatgac

SEQ ID NO: 260509 - DNA, 25 bp, probe
ggctctctggcttaagtttagaagt

SEQ ID NO: 260510 - DNA, 25 bp, probe
ggctcctgtttgacgtggtggtcat

SEQ ID NO: 260511 - DNA, 25 bp, probe
ggctcagctgtatgaaggttggaca

SEQ ID NO: 260512 - DNA, 25 bp, probe
ggctcagctgtatgaaggttggaca

SEQ ID NO: 260513 - DNA, 25 bp, probe
ggctctgctggagcgggtgggaacc

SEQ ID NO: 260514 - DNA, 25 bp, probe
ggctcagtgatggagcggtggctgg

SEQ ID NO: 260515 - DNA, 25 bp, probe
ggctcaagagctggcggaggggcat

SEQ ID NO: 260516 - DNA, 25 bp, probe
ggctgagcaactgggctgtagggca

SEQ ID NO: 260517 - DNA, 25 bp, probe
ggctgagaagtgggttcaggcgaag

SEQ ID NO: 260518 - DNA, 25 bp, probe
ggcggtattgtcgtgggggaggaat

SEQ ID NO: 260519 - DNA, 25 bp, probe
ggcgagatatctggtgggggaggga

SEQ ID NO: 260520 - DNA, 25 bp, probe
ggctgatgtactggtacaggaagtt

SEQ ID NO: 260521 - DNA, 25 bp, probe
ggctctgtatatagctatgaagaaa

SEQ ID NO: 260522 - DNA, 25 bp, probe
ggctcagtgcacgacttatcagaaa

SEQ ID NO: 260523 - DNA, 25 bp, probe
ggctctgtgctgcacgtatgcagta

SEQ ID NO: 260524 - DNA, 25 bp, probe
ggctgtgtgcgttggcaatgcctgc

SEQ ID NO: 260525 - DNA, 25 bp, probe
ggctctgatgcagtgcccagaggcc

SEQ ID NO: 260526 - DNA, 25 bp, probe
ggctcttgcactgtgacagagctgc

SEQ ID NO: 260527 - DNA, 25 bp, probe
ggctcaggagcagggacaagctcac

SEQ ID NO: 260528 - DNA, 25 bp, probe
ggctcagggcaaagaagtggcctcc

SEQ ID NO: 260529 - DNA, 25 bp, probe
ggctgcggtgagccgagattgcgcc

SEQ ID NO: 260530 - DNA, 25 bp, probe
ggctggtgtgctggggattaccatg

SEQ ID NO: 260531 - DNA, 25 bp, probe
ggctggggtcggggaacagatgaat

SEQ ID NO: 260532 - DNA, 25 bp, probe
ggctcgaggtctacggagaaatgga

SEQ ID NO: 260533 - DNA, 25 bp, probe
ggctcatcaagtcccgaggaaagtc

SEQ ID NO: 260534 - DNA, 25 bp, probe
ggctcatcaagtcccgaggaaagtc

SEQ ID NO: 260535 - DNA, 25 bp, probe
ggctgccactacctggaggaaaatc

SEQ ID NO: 260536 - DNA, 25 bp, probe
ggctccatctgtttggagaaaatac

SEQ ID NO: 260537 - DNA, 25 bp, probe
ggctcaaagtgagggagaaaacctg

SEQ ID NO: 260538 - DNA, 25 bp, probe
ggctcgaaggccatggcatgaaccc

SEQ ID NO: 260539 - DNA, 25 bp, probe
ggctcgagaagcattcatcattact

SEQ ID NO: 260540 - DNA, 25 bp, probe
ggctcgagaagcattcatcattact

SEQ ID NO: 260541 - DNA, 25 bp, probe
ggctcagaaagctttcaacgccttt

SEQ ID NO: 260542 - DNA, 25 bp, probe
ggctcgcaaatctttgatacggccg

SEQ ID NO: 260543 - DNA, 25 bp, probe
ggctgcgcaaatggatgttcatctg

SEQ ID NO: 260544 - DNA, 25 bp, probe
ggctgcgcaaatggatgttcatctg

SEQ ID NO: 260545 - DNA, 25 bp, probe
ggctgccaacattctggtgtctgac

SEQ ID NO: 260546 - DNA, 25 bp, probe
ggctgccaacattctggtgtctgac

SEQ ID NO: 260547 - DNA, 25 bp, probe
ggctgctgaagcccacggcctgcac

SEQ ID NO: 260548 - DNA, 25 bp, probe
ggctgtgaggcttatcttcaccatc

SEQ ID NO: 260549 - DNA, 25 bp, probe
ggctgtgcaagatgttctacgccgt

SEQ ID NO: 260550 - DNA, 25 bp, probe
ggctgtgaagtgccttaagcccgat

SEQ ID NO: 260551 - DNA, 25 bp, probe
ggctgctgcaaggagctggccagcc

SEQ ID NO: 260552 - DNA, 25 bp, probe
ggcgcatgcgcataggcgcacatga

SEQ ID NO: 260553 - DNA, 25 bp, probe
ggcgcatgcgcataggcgcacatga

SEQ ID NO: 260554 - DNA, 25 bp, probe
ggctctgctgtgtagatgccacaac

SEQ ID NO: 260555 - DNA, 25 bp, probe
ggctgtgtgatatatgccacaatgt

SEQ ID NO: 260556 - DNA, 25 bp, probe
ggctggcaatgagctcaaccatgta

SEQ ID NO: 260557 - DNA, 25 bp, probe
ggctcagaagagcctctgtccagcc

SEQ ID NO: 260558 - DNA, 25 bp, probe
ggctgacaagatccacagtgtgagc

SEQ ID NO: 260559 - DNA, 25 bp, probe
ggctgacaagatccacagtgtgagc

SEQ ID NO: 260560 - DNA, 25 bp, probe
ggctgacaagatccacagtgtgagc

SEQ ID NO: 260561 - DNA, 25 bp, probe
ggctgccacgaccaagtgacagcaa

SEQ ID NO: 260562 - DNA, 25 bp, probe
ggctgcctttcaaagtgagacaagg

SEQ ID NO: 260563 - DNA, 25 bp, probe
ggctggttatcaggcagtgaaacgt

SEQ ID NO: 260564 - DNA, 25 bp, probe
ggctgagattaaggcaggcaagagc

SEQ ID NO: 260565 - DNA, 25 bp, probe
ggctcctgaaagactagcaagcagc

SEQ ID NO: 260566 - DNA, 25 bp, probe
ggctcctgaaatgcttgatgataca

SEQ ID NO: 260567 - DNA, 25 bp, probe
ggctcctgaaatgcttgatgataca

SEQ ID NO: 260568 - DNA, 25 bp, probe
ggctctctatatacctgtgaatatg

SEQ ID NO: 260569 - DNA, 25 bp, probe
ggctgtcaacaacctgctaagtgac

SEQ ID NO: 260570 - DNA, 25 bp, probe
ggctgtcaacaacctgctaagtgac

SEQ ID NO: 260571 - DNA, 25 bp, probe
ggctgtcaattacaggaagtactgg

SEQ ID NO: 260572 - DNA, 25 bp, probe
ggctctcaaacacgggaagttcacc

SEQ ID NO: 260573 - DNA, 25 bp, probe
ggctctcaaacacgggaagttcacc

SEQ ID NO: 260574 - DNA, 25 bp, probe
ggctccacaagcagcggaagcctga

SEQ ID NO: 260575 - DNA, 25 bp, probe
ggctcagtcaagattggagacctcg

SEQ ID NO: 260576 - DNA, 25 bp, probe
ggctcaggcaagtatcagatggacc

SEQ ID NO: 260577 - DNA, 25 bp, probe
ggctcgagatatcatgagtgattcc

SEQ ID NO: 260578 - DNA, 25 bp, probe
ggctccatgaaggatgcaggcttcc

SEQ ID NO: 260579 - DNA, 25 bp, probe
ggctccattgaggagaacttcctgc

SEQ ID NO: 260580 - DNA, 25 bp, probe
ggctcttttctaccaatgtttgctt

SEQ ID NO: 260581 - DNA, 25 bp, probe
ggccaactgggacccaggttgccat

SEQ ID NO: 260582 - DNA, 25 bp, probe
ggccattctgggacctaagtttaag

SEQ ID NO: 260583 - DNA, 25 bp, probe
tggcttccatagatcctaagctctt

SEQ ID NO: 260584 - DNA, 25 bp, probe
tggcctcctaatagcctaacagggc

SEQ ID NO: 260585 - DNA, 25 bp, probe
ggctcccgacagacgggagcagggc

SEQ ID NO: 260586 - DNA, 25 bp, probe
ggctccggagcaaccagtgggggag

SEQ ID NO: 260587 - DNA, 25 bp, probe
ggctcatcgagaaaaagtttgggac

SEQ ID NO: 260588 - DNA, 25 bp, probe
ggctctgtagatccaggttttggga

SEQ ID NO: 260589 - DNA, 25 bp, probe
ggctctgtagatccaggttttggga

SEQ ID NO: 260590 - DNA, 25 bp, probe
ggctgtgaggtcagggttttagaga

SEQ ID NO: 260591 - DNA, 25 bp, probe
ggctggtttacgccgctttctgaca

SEQ ID NO: 260592 - DNA, 25 bp, probe
ggctggcttctgggaggagtttgag

SEQ ID NO: 260593 - DNA, 25 bp, probe
ggctggagtctggactggctgagat

SEQ ID NO: 260594 - DNA, 25 bp, probe
ggcgcgacatgcagacgccgagatg

SEQ ID NO: 260595 - DNA, 25 bp, probe
ggcgcagatgacagatgccaatggg

SEQ ID NO: 260596 - DNA, 25 bp, probe
ggcgtcagatattgctgcctctgag

SEQ ID NO: 260597 - DNA, 25 bp, probe
ggcgctgagtacgtcgtggagtcca

SEQ ID NO: 260598 - DNA, 25 bp, probe
ggcgggtaaattaggaatctgcact

SEQ ID NO: 260599 - DNA, 25 bp, probe
ggctggcttaagtataaaattgttt

SEQ ID NO: 260600 - DNA, 25 bp, probe
tggcggctaaatcatcccaatttat

SEQ ID NO: 260601 - DNA, 25 bp, probe
tggcggctaaatcatcccaatttat

SEQ ID NO: 260602 - DNA, 25 bp, probe
ggcgtctatgaatgaccagtgtttt

SEQ ID NO: 260603 - DNA, 25 bp, probe
ggctgctcccaaggacgatgggttc

SEQ ID NO: 260604 - DNA, 25 bp, probe
ggcccacctatgggcgtaggcgggg

SEQ ID NO: 260605 - DNA, 25 bp, probe
ggccctccgacgcggaggtggtgga

SEQ ID NO: 260606 - DNA, 25 bp, probe
ggccctccgacgcggaggtggtgga

SEQ ID NO: 260607 - DNA, 25 bp, probe
ggctcttctccccgtgtaggggagc

SEQ ID NO: 260608 - DNA, 25 bp, probe
ggctccctcgtctgtgtagtggaga

SEQ ID NO: 260609 - DNA, 25 bp, probe
ggctgcaacggtcacctagaggaca

SEQ ID NO: 260610 - DNA, 25 bp, probe
ggctgcaacggcatgaacttgggat

SEQ ID NO: 260611 - DNA, 25 bp, probe
ggctgcaacggcatgaacttgggat

SEQ ID NO: 260612 - DNA, 25 bp, probe
ggctgcaacaaccagtagctcatgg

SEQ ID NO: 260613 - DNA, 25 bp, probe
ggctgcagaagatcagtcactctcg

SEQ ID NO: 260614 - DNA, 25 bp, probe
ggctgcagaagatcagtcactctcg

SEQ ID NO: 260615 - DNA, 25 bp, probe
ggctgagggcatgagctacctggag

SEQ ID NO: 260616 - DNA, 25 bp, probe
ggctgagggcatgagctacctggag

SEQ ID NO: 260617 - DNA, 25 bp, probe
ggctgagatggatcatctgagcctc

SEQ ID NO: 260618 - DNA, 25 bp, probe
ggctgagaggggatgatgccatcaa

SEQ ID NO: 260619 - DNA, 25 bp, probe
ggctgaaggagcatctgtcccagct

SEQ ID NO: 260620 - DNA, 25 bp, probe
ggctgcagaggagctcattactagg

SEQ ID NO: 260621 - DNA, 25 bp, probe
ggctcggctgctggacattgacgag

SEQ ID NO: 260622 - DNA, 25 bp, probe
ggctgctggacattgacgagacaga

SEQ ID NO: 260623 - DNA, 25 bp, probe
ggctgggcaataacgaaggacactc

SEQ ID NO: 260624 - DNA, 25 bp, probe
ggctgagggagctcctagaagactg

SEQ ID NO: 260625 - DNA, 25 bp, probe
ggctggtgggttgcaagaaatttct

SEQ ID NO: 260626 - DNA, 25 bp, probe
ggctgcggggtaggagagggttctg

SEQ ID NO: 260627 - DNA, 25 bp, probe
ggctggggttgaagtttggagtctg

SEQ ID NO: 260628 - DNA, 25 bp, probe
ggctgggccaggaagtttgcgaggg

SEQ ID NO: 260629 - DNA, 25 bp, probe
ggctgggccaggaagtttgcgaggg

SEQ ID NO: 260630 - DNA, 25 bp, probe
ggcgggccagtgagttcgctaatga

SEQ ID NO: 260631 - DNA, 25 bp, probe
ggctgtaccagaaaatccctaagac

SEQ ID NO: 260632 - DNA, 25 bp, probe
ggctgagaccaaaacaactgtccag

SEQ ID NO: 260633 - DNA, 25 bp, probe
ggctgagttagtgacagggtggcag

SEQ ID NO: 260634 - DNA, 25 bp, probe
ggctccggcagtgagaggataggca

SEQ ID NO: 260635 - DNA, 25 bp, probe
ggctcccgtggcctgtagaatagcc

SEQ ID NO: 260636 - DNA, 25 bp, probe
ggctcccgtggcctgtagaatagcc

SEQ ID NO: 260637 - DNA, 25 bp, probe
ggccgcggggctctccagaacatca

SEQ ID NO: 260638 - DNA, 25 bp, probe
ggcgagtcagggagttaaacagcag

SEQ ID NO: 260639 - DNA, 25 bp, probe
ggcgagtcagggagttaaacagcag

SEQ ID NO: 260640 - DNA, 25 bp, probe
ggccactttggggtgtacaccaggg

SEQ ID NO: 260641 - DNA, 25 bp, probe
ggctcatttggggaggtgtacaagg

SEQ ID NO: 260642 - DNA, 25 bp, probe
ggctccttcggcatggtgtatgagg

SEQ ID NO: 260643 - DNA, 25 bp, probe
ggctccttcggcatggtgtatgagg

SEQ ID NO: 260644 - DNA, 25 bp, probe
ggctcctatgggtcggtatatgagg

SEQ ID NO: 260645 - DNA, 25 bp, probe
ggctccctgggaatgtgacttgagc

SEQ ID NO: 260646 - DNA, 25 bp, probe
ggctccctgtggactgcagcaggga

SEQ ID NO: 260647 - DNA, 25 bp, probe
ggctccttctggaagcagttgctgt

SEQ ID NO: 260648 - DNA, 25 bp, probe
ggctccagttggaacactttcctga

SEQ ID NO: 260649 - DNA, 25 bp, probe
ggctcccttgaaaagcatttctctc

SEQ ID NO: 260650 - DNA, 25 bp, probe
ggctcccttgaaaagcatttctctc

SEQ ID NO: 260651 - DNA, 25 bp, probe
ggctgccgttgctaaatgatttaat

SEQ ID NO: 260652 - DNA, 25 bp, probe
ggctgctagttatcatctggttcct

SEQ ID NO: 260653 - DNA, 25 bp, probe
ggctgctagttatcatctggttcct

SEQ ID NO: 260654 - DNA, 25 bp, probe
ggctctagttaaagtgtgtatccat

SEQ ID NO: 260655 - DNA, 25 bp, probe
ggctctagttaaagtgtgtatccat

SEQ ID NO: 260656 - DNA, 25 bp, probe
ggctctatgcggtaaagcgttccat

SEQ ID NO: 260657 - DNA, 25 bp, probe
ggctctagatggcaaagcccactta

SEQ ID NO: 260658 - DNA, 25 bp, probe
ggcgtggttgtgaaagcgcccttct

SEQ ID NO: 260659 - DNA, 25 bp, probe
ggcgtggttgtgaaagcgcccttct

SEQ ID NO: 260660 - DNA, 25 bp, probe
ggctgaggaggtgaacgccatcctc

SEQ ID NO: 260661 - DNA, 25 bp, probe
ggctgggaatttcatggacccctca

SEQ ID NO: 260662 - DNA, 25 bp, probe
ggctgggaacatgctaggcaccgcc

SEQ ID NO: 260663 - DNA, 25 bp, probe
ggctgggaacatgacccagcctgaa

SEQ ID NO: 260664 - DNA, 25 bp, probe
ggctggacaaatgtccttgccttca

SEQ ID NO: 260665 - DNA, 25 bp, probe
ggctggctcaaaggtagtgagttct

SEQ ID NO: 260666 - DNA, 25 bp, probe
ggctgaggcaacgagtgggaggttc

SEQ ID NO: 260667 - DNA, 25 bp, probe
ggctcggctatctggggagcagatt

SEQ ID NO: 260668 - DNA, 25 bp, probe
ggctctgaggtctggtacagcaatg

SEQ ID NO: 260669 - DNA, 25 bp, probe
ggctctgaggtctggtacagcaatg

SEQ ID NO: 260670 - DNA, 25 bp, probe
ggctctgagaactggtactctcagt

SEQ ID NO: 260671 - DNA, 25 bp, probe
ggctcgaagcacaggagagaccagt

SEQ ID NO: 260672 - DNA, 25 bp, probe
ggccggctttgtgggaggccagttc

SEQ ID NO: 260673 - DNA, 25 bp, probe
ggccggagggcaagggatgccagta

SEQ ID NO: 260674 - DNA, 25 bp, probe
ggctcgtggggaagcggctgagcct

SEQ ID NO: 260675 - DNA, 25 bp, probe
ggctcgtggggaagcggctgagcct

SEQ ID NO: 260676 - DNA, 25 bp, probe
ggctgtgcgggcaactgggtcagcc

SEQ ID NO: 260677 - DNA, 25 bp, probe
ggctgtgcgggcaactgggtcagcc

SEQ ID NO: 260678 - DNA, 25 bp, probe
ggctgtcagtgacatcagcggtcag

SEQ ID NO: 260679 - DNA, 25 bp, probe
ggctgcctgcgacagatgaggtatc

SEQ ID NO: 260680 - DNA, 25 bp, probe
ggctcgtggcagagatgatttactg

SEQ ID NO: 260681 - DNA, 25 bp, probe
ggctctgtccagaaaggattgaatg

SEQ ID NO: 260682 - DNA, 25 bp, probe
ggctctgtcacagcacagggtgtga

SEQ ID NO: 260683 - DNA, 25 bp, probe
ggctctgtaatgattcagcgtgtga

SEQ ID NO: 260684 - DNA, 25 bp, probe
ggctctgtgcagtgttacgttagat

SEQ ID NO: 260685 - DNA, 25 bp, probe
ggctcgtcaaaagtagcgcttagtt

SEQ ID NO: 260686 - DNA, 25 bp, probe
ggctcgtcaaaaacagctggggtcc

SEQ ID NO: 260687 - DNA, 25 bp, probe
ggctctgtagaatcacggtgctggt

SEQ ID NO: 260688 - DNA, 25 bp, probe
ggctctgtctgaacagaaggtctgg

SEQ ID NO: 260689 - DNA, 25 bp, probe
ggctgaactgaatagaggtcttgat

SEQ ID NO: 260690 - DNA, 25 bp, probe
ggctgtattaatcacgcgatgttga

SEQ ID NO: 260691 - DNA, 25 bp, probe
ggctgaagaacaaccgcaggtcgaa

SEQ ID NO: 260692 - DNA, 25 bp, probe
ggctgaagaacaaccgcaggtcgaa

SEQ ID NO: 260693 - DNA, 25 bp, probe
ggctgaagaacaaccacaggtgaaa

SEQ ID NO: 260694 - DNA, 25 bp, probe
ggctgaagaacaaccacaggtgaaa

SEQ ID NO: 260695 - DNA, 25 bp, probe
ggctgtagcttatcccaagtcaaag

SEQ ID NO: 260696 - DNA, 25 bp, probe
ggctgtagcttatcccaagtcaaag

SEQ ID NO: 260697 - DNA, 25 bp, probe
ggctgtgagcttatgttacaggcaa

SEQ ID NO: 260698 - DNA, 25 bp, probe
ggctctgacaagaagtctgccacca

SEQ ID NO: 260699 - DNA, 25 bp, probe
ggctccactggaagatctcgcagcc

SEQ ID NO: 260700 - DNA, 25 bp, probe
ggctccactgtgaagaacaccatgg

SEQ ID NO: 260701 - DNA, 25 bp, probe
ggctccctcatcaacgaacagtggg

SEQ ID NO: 260702 - DNA, 25 bp, probe
ggcgccctacaatattgcatttttc

SEQ ID NO: 260703 - DNA, 25 bp, probe
ggcccttacgaaatggtgttcaaga

SEQ ID NO: 260704 - DNA, 25 bp, probe
ggctcctgtcaaaattggttttcac

SEQ ID NO: 260705 - DNA, 25 bp, probe
ggctccagtgagaacaaggctttga

SEQ ID NO: 260706 - DNA, 25 bp, probe
ggctccgaggaaaatcactcctaca

SEQ ID NO: 260707 - DNA, 25 bp, probe
ggcccaaagtgaagtcacccagaga

SEQ ID NO: 260708 - DNA, 25 bp, probe
ggctcgcagaaggacgtcctaaaca

SEQ ID NO: 260709 - DNA, 25 bp, probe
ggctgttatatggaatgtctgtaaa

SEQ ID NO: 260710 - DNA, 25 bp, probe
ggctgcacaacagacatttgtagat

SEQ ID NO: 260711 - DNA, 25 bp, probe
ggctgagaagaggaattgtaatgat

SEQ ID NO: 260712 - DNA, 25 bp, probe
ggcggtggagcctttatatcatggg

SEQ ID NO: 260713 - DNA, 25 bp, probe
ggctggttgggtttatagcagacct

SEQ ID NO: 260714 - DNA, 25 bp, probe
ggcgcgcttcgagggaatatgcgaa

SEQ ID NO: 260715 - DNA, 25 bp, probe
ggctgcgctttgaggaagtcccaga

SEQ ID NO: 260716 - DNA, 25 bp, probe
ggctcctttaggcagtgtcaaaatt

SEQ ID NO: 260717 - DNA, 25 bp, probe
ggctcctttaggcagtgtcaaaatt

SEQ ID NO: 260718 - DNA, 25 bp, probe
ggctccgggggaagtctcagagaag

SEQ ID NO: 260719 - DNA, 25 bp, probe
ggctccaaggctgttcctagaagag

SEQ ID NO: 260720 - DNA, 25 bp, probe
ggcccagtgtctgttggtgtagatg

SEQ ID NO: 260721 - DNA, 25 bp, probe
ggccgaactgctgtatgggctctac

SEQ ID NO: 260722 - DNA, 25 bp, probe
ggctctgtacctggagcatggcgcc

SEQ ID NO: 260723 - DNA, 25 bp, probe
ggctgtgctatccctgtacgcctct

SEQ ID NO: 260724 - DNA, 25 bp, probe
ggctgtgctatccctgtacgcctct

SEQ ID NO: 260725 - DNA, 25 bp, probe
ggcgttatctccacaatgcctatgc

SEQ ID NO: 260726 - DNA, 25 bp, probe
ggcgttatctccacaatgcctatgc

SEQ ID NO: 260727 - DNA, 25 bp, probe
ggcgtgatatgcacctgcaacggag

SEQ ID NO: 260728 - DNA, 25 bp, probe
ggcggcaatcgtgcgcaatgaagtg

SEQ ID NO: 260729 - DNA, 25 bp, probe
ggctggataagaaccctgagagggg

SEQ ID NO: 260730 - DNA, 25 bp, probe
ggctggataagaaccctgagagggg

SEQ ID NO: 260731 - DNA, 25 bp, probe
ggctggttagcgtccagctcaggga

SEQ ID NO: 260732 - DNA, 25 bp, probe
ggcggctgatgagaaagccaggaag

SEQ ID NO: 260733 - DNA, 25 bp, probe
ggcgcctgggcaaagtgctatggga

SEQ ID NO: 260734 - DNA, 25 bp, probe
ggcgacaagtcaatattctgtagga

SEQ ID NO: 260735 - DNA, 25 bp, probe
ggcgacaagtcaatattctgtagga

SEQ ID NO: 260736 - DNA, 25 bp, probe
ggctccacactagatctgttagaac

SEQ ID NO: 260737 - DNA, 25 bp, probe
tggctgaaccaagttcgtgtcgaaa

SEQ ID NO: 260738 - DNA, 25 bp, probe
tggctatggtgatcttaatgggaaa

SEQ ID NO: 260739 - DNA, 25 bp, probe
ggctccggagatggtgaagggagaa

SEQ ID NO: 260740 - DNA, 25 bp, probe
ggcggtgggcatggtgaaggaagtt

SEQ ID NO: 260741 - DNA, 25 bp, probe
ggcggaggggtggaaaatcagttgt

SEQ ID NO: 260742 - DNA, 25 bp, probe
ggcggaggggtggaaaatcagttgt

SEQ ID NO: 260743 - DNA, 25 bp, probe
ggctgaagggttgaaactgactctt

SEQ ID NO: 260744 - DNA, 25 bp, probe
ggcgaaggactttatagacaaacta

SEQ ID NO: 260745 - DNA, 25 bp, probe
ggcgggggctcattaaaaatagtca

SEQ ID NO: 260746 - DNA, 25 bp, probe
ggctgggcctgaccaaaaatatact

SEQ ID NO: 260747 - DNA, 25 bp, probe
ggctgggagtgaccggaaacatcaa

SEQ ID NO: 260748 - DNA, 25 bp, probe
ggctgattgccgctcggaaacacat

SEQ ID NO: 260749 - DNA, 25 bp, probe
ggctgatccaggctggttatcacca

SEQ ID NO: 260750 - DNA, 25 bp, probe
ggctggaaggcactggtgatgtccc

SEQ ID NO: 260751 - DNA, 25 bp, probe
ggctggaacgattggagatcccgcc

SEQ ID NO: 260752 - DNA, 25 bp, probe
ggcggaactgtacgaacagctccct

SEQ ID NO: 260753 - DNA, 25 bp, probe
ggcggaactgtacgaacagctccct

SEQ ID NO: 260754 - DNA, 25 bp, probe
ggcggagatcctgaagtacatcctc

SEQ ID NO: 260755 - DNA, 25 bp, probe
ggcggagatcctgaagtacatcctc

SEQ ID NO: 260756 - DNA, 25 bp, probe
ggctgggaccttgatgacaacaatg

SEQ ID NO: 260757 - DNA, 25 bp, probe
ggcccgaacttgaatacctaatgtc

SEQ ID NO: 260758 - DNA, 25 bp, probe
ggcccagaaactcaaccatcaatgg

SEQ ID NO: 260759 - DNA, 25 bp, probe
ggcccagaaactcaaccatcaatgg

SEQ ID NO: 260760 - DNA, 25 bp, probe
ggccttagaaagcaacctgcctgga

SEQ ID NO: 260761 - DNA, 25 bp, probe
ggcccatagaaacatgacactgacc

SEQ ID NO: 260762 - DNA, 25 bp, probe
ggctcctgggaacgagaactactga

SEQ ID NO: 260763 - DNA, 25 bp, probe
ggctgccgcagggcactgaaagccc

SEQ ID NO: 260764 - DNA, 25 bp, probe
ggctccacagagagctgcaacacca

SEQ ID NO: 260765 - DNA, 25 bp, probe
ggctgacaaccagggaacccatttc

SEQ ID NO: 260766 - DNA, 25 bp, probe
ggctgacaatcctggaaatctgttc

SEQ ID NO: 260767 - DNA, 25 bp, probe
ggctccaatacatgggaagctttgc

SEQ ID NO: 260768 - DNA, 25 bp, probe
ggctccaatacatgggaagctttgc

SEQ ID NO: 260769 - DNA, 25 bp, probe
ggctcctaagtcagggtgttatgtc

SEQ ID NO: 260770 - DNA, 25 bp, probe
ggctcctaagtcagggtgttatgtc

SEQ ID NO: 260771 - DNA, 25 bp, probe
ggctcctgaagtctgggagggacac

SEQ ID NO: 260772 - DNA, 25 bp, probe
ggctgtcgaaaggtcccaggaacac

SEQ ID NO: 260773 - DNA, 25 bp, probe
ggctgtcgaaaggtcccaggaacac

SEQ ID NO: 260774 - DNA, 25 bp, probe
ggcgggatgaagggctgcgcttaaa

SEQ ID NO: 260775 - DNA, 25 bp, probe
ggcgggatgaagggctgcgcttaaa

SEQ ID NO: 260776 - DNA, 25 bp, probe
ggcgggtagactggagagtctacag

SEQ ID NO: 260777 - DNA, 25 bp, probe
ggctgggtggagtggtgtctagccc

SEQ ID NO: 260778 - DNA, 25 bp, probe
ggctgcagaaggcggggttcacgca

SEQ ID NO: 260779 - DNA, 25 bp, probe
tggctgaaaggtgtggggtcagcgg

SEQ ID NO: 260780 - DNA, 25 bp, probe
ggctgaaaggtgtggggtcagcggg

SEQ ID NO: 260781 - DNA, 25 bp, probe
ggcgaaactgagtcagagcggggcg

SEQ ID NO: 260782 - DNA, 25 bp, probe
ggctgtggagctctcaggaagggcc

SEQ ID NO: 260783 - DNA, 25 bp, probe
ggctgtggacgttcagatgcagagc

SEQ ID NO: 260784 - DNA, 25 bp, probe
ggctgctgagggaacaccagtgctc

SEQ ID NO: 260785 - DNA, 25 bp, probe
ggctggatgccacacagatggtctc

SEQ ID NO: 260786 - DNA, 25 bp, probe
ggctccatgtcagaagatgaatttt

SEQ ID NO: 260787 - DNA, 25 bp, probe
ggctggatgccctaaataatttttt

SEQ ID NO: 260788 - DNA, 25 bp, probe
ggctggatgccctaaataatttttt

SEQ ID NO: 260789 - DNA, 25 bp, probe
ggctgttctgcactgaaaaggttct

SEQ ID NO: 260790 - DNA, 25 bp, probe
ggcgcatttccacaaagaggtcttc

SEQ ID NO: 260791 - DNA, 25 bp, probe
ggctgctggtcctcaaagagggatc

SEQ ID NO: 260792 - DNA, 25 bp, probe
ggccaagctctctgcaaatggaaat

SEQ ID NO: 260793 - DNA, 25 bp, probe
ggctgaagcctcagtcatgacgcaa

SEQ ID NO: 260794 - DNA, 25 bp, probe
ggctgaagccacacagcccagaagg

SEQ ID NO: 260795 - DNA, 25 bp, probe
ggccaaatcaccgacctgaaggcgg

SEQ ID NO: 260796 - DNA, 25 bp, probe
ggcgctacaaccacgagacagagtg

SEQ ID NO: 260797 - DNA, 25 bp, probe
ggctgaacagccctgggagacaagg

SEQ ID NO: 260798 - DNA, 25 bp, probe
ggctgagagctcagatttagaaagc

SEQ ID NO: 260799 - DNA, 25 bp, probe
ggctgacagtctcagtttgccagtc

SEQ ID NO: 260800 - DNA, 25 bp, probe
ggctgaaggatgccatgtttgcctc

SEQ ID NO: 260801 - DNA, 25 bp, probe
ggctgtgagagtcagttatctctac

SEQ ID NO: 260802 - DNA, 25 bp, probe
ggctgtgagagtcagttatctctac

SEQ ID NO: 260803 - DNA, 25 bp, probe
ggctggactggttgtttcattgtca

SEQ ID NO: 260804 - DNA, 25 bp, probe
ggctggactggttgtttcattgtca

SEQ ID NO: 260805 - DNA, 25 bp, probe
ggctgaggcaggagagtcacttgaa

SEQ ID NO: 260806 - DNA, 25 bp, probe
ggctgaggcaggaggatcacttgag

SEQ ID NO: 260807 - DNA, 25 bp, probe
ggctgaggcaggtggatcacctgag

SEQ ID NO: 260808 - DNA, 25 bp, probe
ggcggtcaaggcggaagccatgaag

SEQ ID NO: 260809 - DNA, 25 bp, probe
ggcgagaccagaggggacggaagca

SEQ ID NO: 260810 - DNA, 25 bp, probe
ggcgcagagcctttgggaataaaaa

SEQ ID NO: 260811 - DNA, 25 bp, probe
ggcgaggcctggagtaacacaaagt

SEQ ID NO: 260812 - DNA, 25 bp, probe
ggctgccccgaggaagacaacaaag

SEQ ID NO: 260813 - DNA, 25 bp, probe
ggccctctctgaaaaggaaaccagg

SEQ ID NO: 260814 - DNA, 25 bp, probe
ggctgcacctctatgtcaggattac

SEQ ID NO: 260815 - DNA, 25 bp, probe
ggctgccccggtgaatgttattgga

SEQ ID NO: 260816 - DNA, 25 bp, probe
ggctgcccatcatcttaatgtttgg

SEQ ID NO: 260817 - DNA, 25 bp, probe
ggctgcccatcatcttaatgtttgg

SEQ ID NO: 260818 - DNA, 25 bp, probe
ggctgagcagccatcttagatttct

SEQ ID NO: 260819 - DNA, 25 bp, probe
ggctgacaaagatgtagtttccatc

SEQ ID NO: 260820 - DNA, 25 bp, probe
ggctgcaaagactatttttatcctg

SEQ ID NO: 260821 - DNA, 25 bp, probe
ggctgcaatctgtcttgatttctcc

SEQ ID NO: 260822 - DNA, 25 bp, probe
ggctgcaggctgaatgtctattatc

SEQ ID NO: 260823 - DNA, 25 bp, probe
ggctgctggctgaattaggttagag

SEQ ID NO: 260824 - DNA, 25 bp, probe
ggcctcagctgtttaagtttaccgg

SEQ ID NO: 260825 - DNA, 25 bp, probe
ggctccaggccattaaaatggaccg

SEQ ID NO: 260826 - DNA, 25 bp, probe
ggccgggaacaacaatggcacatcc

SEQ ID NO: 260827 - DNA, 25 bp, probe
ggctggggtgaaaccaagccctggt

SEQ ID NO: 260828 - DNA, 25 bp, probe
ggctggggtgaaaccaagccctggt

SEQ ID NO: 260829 - DNA, 25 bp, probe
ggctgggtgtgacagcacagagcca

SEQ ID NO: 260830 - DNA, 25 bp, probe
ggctgtggtgaccgcaacaagccag

SEQ ID NO: 260831 - DNA, 25 bp, probe
ggctgtgagcagacccggacagcca

SEQ ID NO: 260832 - DNA, 25 bp, probe
ggctgaatgagaccacggagaccca

SEQ ID NO: 260833 - DNA, 25 bp, probe
ggctgcgatcatggaactagatgac

SEQ ID NO: 260834 - DNA, 25 bp, probe
ggctgcatggcagaatcatcaaatc

SEQ ID NO: 260835 - DNA, 25 bp, probe
ggctgcatgtcagggtgtcagatcc

SEQ ID NO: 260836 - DNA, 25 bp, probe
ggctgcaatgcagctggtgctgttc

SEQ ID NO: 260837 - DNA, 25 bp, probe
ggctgcaatgcagcatgttgccctg

SEQ ID NO: 260838 - DNA, 25 bp, probe
ggctgcagtgagccatgttcacacc

SEQ ID NO: 260839 - DNA, 25 bp, probe
ggctgcagtgagccatgatggcacc

SEQ ID NO: 260840 - DNA, 25 bp, probe
ggctgagtgcagacatggccactgt

SEQ ID NO: 260841 - DNA, 25 bp, probe
ggctgagtgcagctgagcggctgta

SEQ ID NO: 260842 - DNA, 25 bp, probe
ggctgcggcagcagacatggcttac

SEQ ID NO: 260843 - DNA, 25 bp, probe
ggcgggcatgccaaaagctatgggt

SEQ ID NO: 260844 - DNA, 25 bp, probe
ggcgggcatgccaaaagctatgggt

SEQ ID NO: 260845 - DNA, 25 bp, probe
ggctgatggtgtaaacagctctgca

SEQ ID NO: 260846 - DNA, 25 bp, probe
ggctgcaaagtgacaactgcactga

SEQ ID NO: 260847 - DNA, 25 bp, probe
ggctgccaagaggaacgacttctgt

SEQ ID NO: 260848 - DNA, 25 bp, probe
ggctccagagatggtcacatgaccc

SEQ ID NO: 260849 - DNA, 25 bp, probe
ggctccagagtggggatgacatgca

SEQ ID NO: 260850 - DNA, 25 bp, probe
ggctccagagtggggatgacatgca

SEQ ID NO: 260851 - DNA, 25 bp, probe
ggcgcaatgagtggggctacgcctg

SEQ ID NO: 260852 - DNA, 25 bp, probe
ggcgcactgaggaggttgctgggga

SEQ ID NO: 260853 - DNA, 25 bp, probe
ggctgaccaggacctgttgctggag

SEQ ID NO: 260854 - DNA, 25 bp, probe
ggctgaccaggacctgttgctggag

SEQ ID NO: 260855 - DNA, 25 bp, probe
ggcgaatcagcgcttgatttggcaa

SEQ ID NO: 260856 - DNA, 25 bp, probe
ggcgatcagccctctgagagtgagc

SEQ ID NO: 260857 - DNA, 25 bp, probe
ggcggcccagtggctgagaggagcc

SEQ ID NO: 260858 - DNA, 25 bp, probe
ggcggcccagtggctgagaggagcc

SEQ ID NO: 260859 - DNA, 25 bp, probe
ggcccccgttgatgatgggcgaatt

SEQ ID NO: 260860 - DNA, 25 bp, probe
ggcccagacggtacatggggctggt

SEQ ID NO: 260861 - DNA, 25 bp, probe
ggcccggagttagggctgagccagt

SEQ ID NO: 260862 - DNA, 25 bp, probe
ggccacgagtttgcggtgaagatta

SEQ ID NO: 260863 - DNA, 25 bp, probe
ggccattgtgttaaaggaaaggatt

SEQ ID NO: 260864 - DNA, 25 bp, probe
ggcctggtgggtcagggggagtctt

SEQ ID NO: 260865 - DNA, 25 bp, probe
ggccccagtggtcaggaaaagtgca

SEQ ID NO: 260866 - DNA, 25 bp, probe
ggcgtcacggtgcaaggagacgtgc

SEQ ID NO: 260867 - DNA, 25 bp, probe
ggctgccagggggcaaggagaaagc

SEQ ID NO: 260868 - DNA, 25 bp, probe
ggcgcaagacggaccagagcgaaag

SEQ ID NO: 260869 - DNA, 25 bp, probe
ggctgcatggcaggtcttaaggaag

SEQ ID NO: 260870 - DNA, 25 bp, probe
ggctgcatgccaaggggaagagcga

SEQ ID NO: 260871 - DNA, 25 bp, probe
ggctgctgcatttaggtggagactt

SEQ ID NO: 260872 - DNA, 25 bp, probe
ggctggcatcatccagtgaggaggc

SEQ ID NO: 260873 - DNA, 25 bp, probe
ggctggcagcattgcaatagtgagg

SEQ ID NO: 260874 - DNA, 25 bp, probe
ggctgtgatgcccacacagcatcag

SEQ ID NO: 260875 - DNA, 25 bp, probe
ggctgagatgctggacaaatcgccc

SEQ ID NO: 260876 - DNA, 25 bp, probe
ggcggtcatggaattcatatggtcc

SEQ ID NO: 260877 - DNA, 25 bp, probe
tggctggtgactattatcggataca

SEQ ID NO: 260878 - DNA, 25 bp, probe
ggctgctgtttgattatgcagagca

SEQ ID NO: 260879 - DNA, 25 bp, probe
ggctgctgtttgattatgcagagca

SEQ ID NO: 260880 - DNA, 25 bp, probe
ggcgctgtactacctgaaggagaag

SEQ ID NO: 260881 - DNA, 25 bp, probe
ggcgctgtactacctgaaggagaag

SEQ ID NO: 260882 - DNA, 25 bp, probe
ggctgcccagtatctgaaggtggag

SEQ ID NO: 260883 - DNA, 25 bp, probe
ggctgacctggaactagaggagggc

SEQ ID NO: 260884 - DNA, 25 bp, probe
ggctgacctgcgagtgtgacaagag

SEQ ID NO: 260885 - DNA, 25 bp, probe
ggctgctgcctgctggagaggaaga

SEQ ID NO: 260886 - DNA, 25 bp, probe
ggctgctgcattgtgggtgatgacg

SEQ ID NO: 260887 - DNA, 25 bp, probe
ggctgagcatgtgtgggtgggagtc

SEQ ID NO: 260888 - DNA, 25 bp, probe
ggctgagaggagccggctgtggagc

SEQ ID NO: 260889 - DNA, 25 bp, probe
ggctgagaggagccggctgtggagc

SEQ ID NO: 260890 - DNA, 25 bp, probe
ggctggagagccagggtcgagcggc

SEQ ID NO: 260891 - DNA, 25 bp, probe
ggctggagagccagggtcgagcggc

SEQ ID NO: 260892 - DNA, 25 bp, probe
ggctgaggccctgacgtggatgggc

SEQ ID NO: 260893 - DNA, 25 bp, probe
ggctgaggccctgacgtggatgggc

SEQ ID NO: 260894 - DNA, 25 bp, probe
ggctgggcccctagactagagggca

SEQ ID NO: 260895 - DNA, 25 bp, probe
ggctggacctccgagagctggaggg

SEQ ID NO: 260896 - DNA, 25 bp, probe
ggctggacctccgagagctggaggg

SEQ ID NO: 260897 - DNA, 25 bp, probe
ggctgagcattctcagaccttcatg

SEQ ID NO: 260898 - DNA, 25 bp, probe
ggctgctgcatacaaaccttgcata

SEQ ID NO: 260899 - DNA, 25 bp, probe
ggccgcattgctaagatgcctgtta

SEQ ID NO: 260900 - DNA, 25 bp, probe
ggcggcatggcaagactccatatct

SEQ ID NO: 260901 - DNA, 25 bp, probe
ggctggcgtgcaagatcgcagactt

SEQ ID NO: 260902 - DNA, 25 bp, probe
ggctgtgcattacatgcagagtctg

SEQ ID NO: 260903 - DNA, 25 bp, probe
ggctgtattgcactgccagatgtgg

SEQ ID NO: 260904 - DNA, 25 bp, probe
ggctgatgtgaatgcgcaggatgcg

SEQ ID NO: 260905 - DNA, 25 bp, probe
ggctgattgacatgtcggcgcagat

SEQ ID NO: 260906 - DNA, 25 bp, probe
ggctgtacaacgaggtgcagctccc

SEQ ID NO: 260907 - DNA, 25 bp, probe
ggctgtacacactggaactgcaatc

SEQ ID NO: 260908 - DNA, 25 bp, probe
ggctgtgtctacttggaacggatgc

SEQ ID NO: 260909 - DNA, 25 bp, probe
ggctgtcccacaatgggaggaaatg

SEQ ID NO: 260910 - DNA, 25 bp, probe
ggctgtcccagggggcaagaagggg

SEQ ID NO: 260911 - DNA, 25 bp, probe
ggctgtcaccaagtaggaagaagaa

SEQ ID NO: 260912 - DNA, 25 bp, probe
ggctgtcatcactcgagcagaaaag

SEQ ID NO: 260913 - DNA, 25 bp, probe
ggctgtcatcactcgagcagaaaag

SEQ ID NO: 260914 - DNA, 25 bp, probe
ggctgatctccttcacaggatacac

SEQ ID NO: 260915 - DNA, 25 bp, probe
tggctgcacctctatgtcaggatta

SEQ ID NO: 260916 - DNA, 25 bp, probe
ggctgcatccaattgttgctttgac

SEQ ID NO: 260917 - DNA, 25 bp, probe
ggctgtctcagactctttttgtacc

SEQ ID NO: 260918 - DNA, 25 bp, probe
ggctgtcagcagcaatggccttttc

SEQ ID NO: 260919 - DNA, 25 bp, probe
ggctgtcagcatcttgaaagctttc

SEQ ID NO: 260920 - DNA, 25 bp, probe
ggctggcgttttggaatgcaatttg

SEQ ID NO: 260921 - DNA, 25 bp, probe
ggctgggcttttgcatggcaatgga

SEQ ID NO: 260922 - DNA, 25 bp, probe
ggctgtggctatgtgctgaagccag

SEQ ID NO: 260923 - DNA, 25 bp, probe
ggctgatgagctccaacataacaga

SEQ ID NO: 260924 - DNA, 25 bp, probe
ggctgcatcactcccagatgaaggt

SEQ ID NO: 260925 - DNA, 25 bp, probe
ggctgcatcactcccagatgaaggt

SEQ ID NO: 260926 - DNA, 25 bp, probe
ggcccagctgcctatgtaaggcctt

SEQ ID NO: 260927 - DNA, 25 bp, probe
ggctgaagtggcttagaaggcctca

SEQ ID NO: 260928 - DNA, 25 bp, probe
ggctgaagtggcttagaaggcctca

SEQ ID NO: 260929 - DNA, 25 bp, probe
ggctgatcagagcttaccagcccca

SEQ ID NO: 260930 - DNA, 25 bp, probe
ggcgatcaggatggacaccgtccac

SEQ ID NO: 260931 - DNA, 25 bp, probe
ggcgtctgagtttcacatctgggcc

SEQ ID NO: 260932 - DNA, 25 bp, probe
ggcgtctgagtttcacatctgggcc

SEQ ID NO: 260933 - DNA, 25 bp, probe
ggctgagctgcggaaatactgggtc

SEQ ID NO: 260934 - DNA, 25 bp, probe
ggctgcacgcggcatcagagcgtgc

SEQ ID NO: 260935 - DNA, 25 bp, probe
ggctgcactggtggaagaagcgatc

SEQ ID NO: 260936 - DNA, 25 bp, probe
ggctgcactggtgttgtgagatgcc

SEQ ID NO: 260937 - DNA, 25 bp, probe
ggctgagcctggctggagagctgct

SEQ ID NO: 260938 - DNA, 25 bp, probe
ggctgagcctggctggagagctgct

SEQ ID NO: 260939 - DNA, 25 bp, probe
ggctgcagcagaggcctgaggagtg

SEQ ID NO: 260940 - DNA, 25 bp, probe
ggctgcagcagaggcctgaggagtg

SEQ ID NO: 260941 - DNA, 25 bp, probe
ggctgagaacgggaagcttgtcatc

SEQ ID NO: 260942 - DNA, 25 bp, probe
ggctgtgcgaacggaagctcttcat

SEQ ID NO: 260943 - DNA, 25 bp, probe
ggcccgaaatcgtagtgcttgtact

SEQ ID NO: 260944 - DNA, 25 bp, probe
ggccctagcttggaggacttgtttg

SEQ ID NO: 260945 - DNA, 25 bp, probe
ggccccgttggaagactgagtgccc

SEQ ID NO: 260946 - DNA, 25 bp, probe
ggccccgttggaagactgagtgccc

SEQ ID NO: 260947 - DNA, 25 bp, probe
ggcccctggcttaagaaggtcgcct

SEQ ID NO: 260948 - DNA, 25 bp, probe
ggccctcagggacagtgaggtccca

SEQ ID NO: 260949 - DNA, 25 bp, probe
ggcctgcacagtcttgaggccgacc

SEQ ID NO: 260950 - DNA, 25 bp, probe
ggcccagaggactggggtgactcac

SEQ ID NO: 260951 - DNA, 25 bp, probe
ggcggtgcacgaggtggaggtggtc

SEQ ID NO: 260952 - DNA, 25 bp, probe
ggctgggccagaggtggaggctcat

SEQ ID NO: 260953 - DNA, 25 bp, probe
ggctgtgcccagaagaacaggcctg

SEQ ID NO: 260954 - DNA, 25 bp, probe
ggctgtcccaaagagcagtgcaatt

SEQ ID NO: 260955 - DNA, 25 bp, probe
ggctgtcccaaagagcagtgcaatt

SEQ ID NO: 260956 - DNA, 25 bp, probe
ggctgtgctacatcaacagcaccgt

SEQ ID NO: 260957 - DNA, 25 bp, probe
ggctggcaggacaaactgaccagtg

SEQ ID NO: 260958 - DNA, 25 bp, probe
ggctgtgggggctcatgacacagcc

SEQ ID NO: 260959 - DNA, 25 bp, probe
ggctgggagagacaagtcacagcgc

SEQ ID NO: 260960 - DNA, 25 bp, probe
ggctggaagatacaggctcagaggt

SEQ ID NO: 260961 - DNA, 25 bp, probe
ggctggaagagcctctggacaggtt

SEQ ID NO: 260962 - DNA, 25 bp, probe
ggctggagagacattgtgggtgtgt

SEQ ID NO: 260963 - DNA, 25 bp, probe
ggctgggagaaggtgcttgggcttc

SEQ ID NO: 260964 - DNA, 25 bp, probe
ggcggaggaagcagctagttcttcc

SEQ ID NO: 260965 - DNA, 25 bp, probe
ggctgggagtagaggatgttcctgc

SEQ ID NO: 260966 - DNA, 25 bp, probe
ggctgggtgttgatagattttctgt

SEQ ID NO: 260967 - DNA, 25 bp, probe
ggctgggggtgtggcaattgttgcc

SEQ ID NO: 260968 - DNA, 25 bp, probe
ggctggtggtttgaattgtgtgctt

SEQ ID NO: 260969 - DNA, 25 bp, probe
ggctgttgtttcttatgttgttgca

SEQ ID NO: 260970 - DNA, 25 bp, probe
ggctgattgttgtgacattggccgt

SEQ ID NO: 260971 - DNA, 25 bp, probe
ggctgtcatttgccgacagagcact

SEQ ID NO: 260972 - DNA, 25 bp, probe
ggctgtctttcactgaatgcttctg

SEQ ID NO: 260973 - DNA, 25 bp, probe
ggctgggttcattacatgattcatg

SEQ ID NO: 260974 - DNA, 25 bp, probe
ggctgtgagtctaataccagcttgg

SEQ ID NO: 260975 - DNA, 25 bp, probe
ggctgtggagtgaggccagtaagct

SEQ ID NO: 260976 - DNA, 25 bp, probe
ggctgtggatgggtggggagcaaat

SEQ ID NO: 260977 - DNA, 25 bp, probe
ggctgtttggtgattgggcaagatt

SEQ ID NO: 260978 - DNA, 25 bp, probe
ggctgtttgggaccatggagcggta

SEQ ID NO: 260979 - DNA, 25 bp, probe
ggcgttggaagaactggagtcttca

SEQ ID NO: 260980 - DNA, 25 bp, probe
ggcgtgggacggacaggaacattca

SEQ ID NO: 260981 - DNA, 25 bp, probe
ggctgtggcaacggacaaaactctg

SEQ ID NO: 260982 - DNA, 25 bp, probe
ggctgtggcaacggacaaaactctg

SEQ ID NO: 260983 - DNA, 25 bp, probe
ggctgtggaacaggccagcaacctc

SEQ ID NO: 260984 - DNA, 25 bp, probe
ggcgggaatcacctgaaacagcttc

SEQ ID NO: 260985 - DNA, 25 bp, probe
ggctggagtcaccttgaggacactc

SEQ ID NO: 260986 - DNA, 25 bp, probe
ggctggagtcaccttgaggacactc

SEQ ID NO: 260987 - DNA, 25 bp, probe
ggctgggcactgctgtgggacagcc

SEQ ID NO: 260988 - DNA, 25 bp, probe
ggcgtgatgcaggggtgtgaggccc

SEQ ID NO: 260989 - DNA, 25 bp, probe
ggctggatggggctcgagaggcagc

SEQ ID NO: 260990 - DNA, 25 bp, probe
ggcgggctggtgttctaagagcccc

SEQ ID NO: 260991 - DNA, 25 bp, probe
ggcgaggtggagctctcagagagcg

SEQ ID NO: 260992 - DNA, 25 bp, probe
ggccagtcgaggctacaggatccgt

SEQ ID NO: 260993 - DNA, 25 bp, probe
ggccgccgcggaataataagccggg

SEQ ID NO: 260994 - DNA, 25 bp, probe
ggccgccgcggaataataagccggg

SEQ ID NO: 260995 - DNA, 25 bp, probe
ggccctggggaagaaacaagagcca

SEQ ID NO: 260996 - DNA, 25 bp, probe
ggccaccggtgacggcaaacattac

SEQ ID NO: 260997 - DNA, 25 bp, probe
ggccactgtaaactggccgacttcg

SEQ ID NO: 260998 - DNA, 25 bp, probe
ggccactgtaaactggccgacttcg

SEQ ID NO: 260999 - DNA, 25 bp, probe
ggccttttaaatcgacgtctctctc

SEQ ID NO: 261000 - DNA, 25 bp, probe
ggccttatctgactatatccagttt

SEQ ID NO: 261001 - DNA, 25 bp, probe
ggcctggattgaaatgtccctggtt

SEQ ID NO: 261002 - DNA, 25 bp, probe
tgggggaggtaatgccctgttgtta

SEQ ID NO: 261003 - DNA, 25 bp, probe
tgggggaggtaatgccctgttgtta

SEQ ID NO: 261004 - DNA, 25 bp, probe
ggctggcaaggaagaacccgttgtt

SEQ ID NO: 261005 - DNA, 25 bp, probe
ggctgataaggacacttccaatgag

SEQ ID NO: 261006 - DNA, 25 bp, probe
ggctgtaggtgtgcactgtctattt

SEQ ID NO: 261007 - DNA, 25 bp, probe
ggccatatttgggcagttcccagtc

SEQ ID NO: 261008 - DNA, 25 bp, probe
ggccatatttgggcagttcccagtc

SEQ ID NO: 261009 - DNA, 25 bp, probe
ggccttcttggagagtcaccaattc

SEQ ID NO: 261010 - DNA, 25 bp, probe
ggcctttgtggtcaccaaccagacc

SEQ ID NO: 261011 - DNA, 25 bp, probe
ggcgttatttgtcatcacaagtcaa

SEQ ID NO: 261012 - DNA, 25 bp, probe
ggcgttatttgtcatcacaagtcaa

SEQ ID NO: 261013 - DNA, 25 bp, probe
ggctgtttccttcaacacatactat

SEQ ID NO: 261014 - DNA, 25 bp, probe
ggctgtgttgccacaaacactgcag

SEQ ID NO: 261015 - DNA, 25 bp, probe
ggctggggcagcatcgaaccagagg

SEQ ID NO: 261016 - DNA, 25 bp, probe
ggctgggagaggggaacgtgggaat

SEQ ID NO: 261017 - DNA, 25 bp, probe
ggctgggagaggggaacgtgggaat

SEQ ID NO: 261018 - DNA, 25 bp, probe
ggcggagaaagccaaacgctgtaac

SEQ ID NO: 261019 - DNA, 25 bp, probe
ggcgtggcaagggaatagcgactta

SEQ ID NO: 261020 - DNA, 25 bp, probe
ggctggagaatgcgagccgggtgtt

SEQ ID NO: 261021 - DNA, 25 bp, probe
ggctgtgaacaatgatgcttttgtg

SEQ ID NO: 261022 - DNA, 25 bp, probe
ggctgtgccaaactcattgattttg

SEQ ID NO: 261023 - DNA, 25 bp, probe
ggctggccaagcaattattattatg

SEQ ID NO: 261024 - DNA, 25 bp, probe
ggctggccaagcaattattattatg

SEQ ID NO: 261025 - DNA, 25 bp, probe
ggctgatgcccagaacatttcactg

SEQ ID NO: 261026 - DNA, 25 bp, probe
ggctgatatcctgaatcttgcccct

SEQ ID NO: 261027 - DNA, 25 bp, probe
ggcgaacggcagaatgcctaccgtg

SEQ ID NO: 261028 - DNA, 25 bp, probe
ggcgagcctgtagacctatcggctc

SEQ ID NO: 261029 - DNA, 25 bp, probe
ggcggccactacgccatgaagatcc

SEQ ID NO: 261030 - DNA, 25 bp, probe
ggcggccaaagccctagcaaattta

SEQ ID NO: 261031 - DNA, 25 bp, probe
ggcgagtcaaaaactcagatctatc

SEQ ID NO: 261032 - DNA, 25 bp, probe
ggcgactgcacagaatggctgactt

SEQ ID NO: 261033 - DNA, 25 bp, probe
ggccattgcagtggataggtacgtc

SEQ ID NO: 261034 - DNA, 25 bp, probe
ggccatggccatggcaacatgctca

SEQ ID NO: 261035 - DNA, 25 bp, probe
ggcgatgctgacaagcttctgcaca

SEQ ID NO: 261036 - DNA, 25 bp, probe
ggcgatgctgacaagcttctgcaca

SEQ ID NO: 261037 - DNA, 25 bp, probe
ggcgatgctgacaagcttctgcaca

SEQ ID NO: 261038 - DNA, 25 bp, probe
ggcgatgctgacaagcttctgcaca

SEQ ID NO: 261039 - DNA, 25 bp, probe
ggcgcagtacaagttcatctacgtg

SEQ ID NO: 261040 - DNA, 25 bp, probe
ggctgatttcagattctctaggaaa

SEQ ID NO: 261041 - DNA, 25 bp, probe
ggctgattccatgttcttgggcaac

SEQ ID NO: 261042 - DNA, 25 bp, probe
ggctgattccatgttcttgggcaac

SEQ ID NO: 261043 - DNA, 25 bp, probe
ggcgactcctagatccagggatagc

SEQ ID NO: 261044 - DNA, 25 bp, probe
ggcgactcctagatccagggatagc

SEQ ID NO: 261045 - DNA, 25 bp, probe
ggcgaactgtagagtgcagggaccc

SEQ ID NO: 261046 - DNA, 25 bp, probe
tggcgatgactttatttgcggagca

SEQ ID NO: 261047 - DNA, 25 bp, probe
tggcgcgagcttttgactctggcca

SEQ ID NO: 261048 - DNA, 25 bp, probe
tggcggactgtgacgccacgtgaca

SEQ ID NO: 261049 - DNA, 25 bp, probe
ggctggatggtgagtcacttgagtg

SEQ ID NO: 261050 - DNA, 25 bp, probe
ggctgattttgaagtgctccatgat

SEQ ID NO: 261051 - DNA, 25 bp, probe
ggcgataatgtgtgtctcctgtatt

SEQ ID NO: 261052 - DNA, 25 bp, probe
ggcgaaattccattcgctcatctca

SEQ ID NO: 261053 - DNA, 25 bp, probe
ggctgataattccagtggtccatgg

SEQ ID NO: 261054 - DNA, 25 bp, probe
ggctgtgcaaggcatgggttatcag

SEQ ID NO: 261055 - DNA, 25 bp, probe
ggctgtgcgaggtgaggttgtcatg

SEQ ID NO: 261056 - DNA, 25 bp, probe
ggctgtgatgggtcggagattcctg

SEQ ID NO: 261057 - DNA, 25 bp, probe
ggcgtgtctgaaactgaattctcgt

SEQ ID NO: 261058 - DNA, 25 bp, probe
ggctggtgcaaaagctacagacctg

SEQ ID NO: 261059 - DNA, 25 bp, probe
ggctgtgctcaaagggagcggccag

SEQ ID NO: 261060 - DNA, 25 bp, probe
ggctgtgctcaaagggagcggccag

SEQ ID NO: 261061 - DNA, 25 bp, probe
ggctgtgctcaatggtgtctgcacc

SEQ ID NO: 261062 - DNA, 25 bp, probe
ggctgtctcacttgtgtgaatcttc

SEQ ID NO: 261063 - DNA, 25 bp, probe
ggctgtcgactgggctaagtctgga

SEQ ID NO: 261064 - DNA, 25 bp, probe
ggcgtcccgaaggaagctcatggag

SEQ ID NO: 261065 - DNA, 25 bp, probe
ggcccgctgggagggtacatggatg

SEQ ID NO: 261066 - DNA, 25 bp, probe
ggctgtcagtatgacatttcacggg

SEQ ID NO: 261067 - DNA, 25 bp, probe
ggctggcttgatgatcattgttcca

SEQ ID NO: 261068 - DNA, 25 bp, probe
ggcgctgcttcagatttggcctaaa

SEQ ID NO: 261069 - DNA, 25 bp, probe
ggcgtgctaatggatgttacaggta

SEQ ID NO: 261070 - DNA, 25 bp, probe
ggctgtcgacaggtgtctgacgtgt

SEQ ID NO: 261071 - DNA, 25 bp, probe
ggctgtcgacaggtgtctgacgtgt

SEQ ID NO: 261072 - DNA, 25 bp, probe
ggcggcagagatgctggtagcgctg

SEQ ID NO: 261073 - DNA, 25 bp, probe
ggcggcagagatgctggtagcgctg

SEQ ID NO: 261074 - DNA, 25 bp, probe
ggcggcagagattgctgacgggatg

SEQ ID NO: 261075 - DNA, 25 bp, probe
ggcggtgagtacgacggaatgcagg

SEQ ID NO: 261076 - DNA, 25 bp, probe
ggctgggatctagcgagagagatgc

SEQ ID NO: 261077 - DNA, 25 bp, probe
ggctgggatctagcgagagagatgc

SEQ ID NO: 261078 - DNA, 25 bp, probe
ggctggaaacatgcaggagctgtcc

SEQ ID NO: 261079 - DNA, 25 bp, probe
ggcggatcatgaggtcaggagttcc

SEQ ID NO: 261080 - DNA, 25 bp, probe
ggcgagatgctcgtgtgcagagagc

SEQ ID NO: 261081 - DNA, 25 bp, probe
ggctggagtgcagtggtgcgatctc

SEQ ID NO: 261082 - DNA, 25 bp, probe
ggctggagctgagtatgacagcacc

SEQ ID NO: 261083 - DNA, 25 bp, probe
ggcgagagatgcttagagacccaga

SEQ ID NO: 261084 - DNA, 25 bp, probe
tggcgacaggcagtccatgatccta

SEQ ID NO: 261085 - DNA, 25 bp, probe
ggcgaaggcaatcacatttatgcat

SEQ ID NO: 261086 - DNA, 25 bp, probe
ggcgagagacacacatccttcgcca

SEQ ID NO: 261087 - DNA, 25 bp, probe
ggcggagaatcatagcacttcggtg

SEQ ID NO: 261088 - DNA, 25 bp, probe
ggcggaacaataagcagcatatcta

SEQ ID NO: 261089 - DNA, 25 bp, probe
ggcggaggacattagagacatctac

SEQ ID NO: 261090 - DNA, 25 bp, probe
tggcgtacctcatgaagaccaagca

SEQ ID NO: 261091 - DNA, 25 bp, probe
ggcgtacctcatgaagaccaagcag

SEQ ID NO: 261092 - DNA, 25 bp, probe
ggcgtactgacaggtggaccaacgg

SEQ ID NO: 261093 - DNA, 25 bp, probe
ggcgattgtggagggcctcctgaag

SEQ ID NO: 261094 - DNA, 25 bp, probe
ggcgtgtgcgagtggctacaaggag

SEQ ID NO: 261095 - DNA, 25 bp, probe
ggcgtgggaggggtagtcgaagagc

SEQ ID NO: 261096 - DNA, 25 bp, probe
ggctgtgggggtctgagtctagagc

SEQ ID NO: 261097 - DNA, 25 bp, probe
ggctggggagagacgtactctgagg

SEQ ID NO: 261098 - DNA, 25 bp, probe
ggctggggagagacgtactctgagg

SEQ ID NO: 261099 - DNA, 25 bp, probe
ggcggggaagtacagctcagagttc

SEQ ID NO: 261100 - DNA, 25 bp, probe
tggcgaaaaagtggttccaagtgtc

SEQ ID NO: 261101 - DNA, 25 bp, probe
ggccagaaatacagttctccggcct

SEQ ID NO: 261102 - DNA, 25 bp, probe
ggccaagaaatatgggtcctggaga

SEQ ID NO: 261103 - DNA, 25 bp, probe
ggcccaatgtatttggattcttaaa

SEQ ID NO: 261104 - DNA, 25 bp, probe
ggcctcatcttacaggtcctaaatc

SEQ ID NO: 261105 - DNA, 25 bp, probe
ggcgcatcattaaggatgtggtgct

SEQ ID NO: 261106 - DNA, 25 bp, probe
ggcgccttaaggatgttctagcatg

SEQ ID NO: 261107 - DNA, 25 bp, probe
tggccctcgagaggttttccgatcc

SEQ ID NO: 261108 - DNA, 25 bp, probe
ggccttatgagggtcctctacttca

SEQ ID NO: 261109 - DNA, 25 bp, probe
ggccgctccaggaattctgaagttc

SEQ ID NO: 261110 - DNA, 25 bp, probe
ggccctgcgggagattaaggctctg

SEQ ID NO: 261111 - DNA, 25 bp, probe
ggccctcaccgagtatgtgcgggcg

SEQ ID NO: 261112 - DNA, 25 bp, probe
ggccgtcaccgaatatgtgcagaaa

SEQ ID NO: 261113 - DNA, 25 bp, probe
ggcggtccagcattatattgaaaca

SEQ ID NO: 261114 - DNA, 25 bp, probe
ggcgtgagcccataatggatacaca

SEQ ID NO: 261115 - DNA, 25 bp, probe
ggcgtgagcccataatggatacaca

SEQ ID NO: 261116 - DNA, 25 bp, probe
ggctggtgctgccaaaaagaaaagc

SEQ ID NO: 261117 - DNA, 25 bp, probe
ggctggaccgatatgaaagaaacac

SEQ ID NO: 261118 - DNA, 25 bp, probe
ggctggaccgatatgaaagaaacac

SEQ ID NO: 261119 - DNA, 25 bp, probe
ggcggaccgagacaatcgagagcat

SEQ ID NO: 261120 - DNA, 25 bp, probe
ggctggcccgagtgatagaggacag

SEQ ID NO: 261121 - DNA, 25 bp, probe
ggctgtgcactgcatggtctaggga

SEQ ID NO: 261122 - DNA, 25 bp, probe
ggctggccgtatgatctgtgtggat

SEQ ID NO: 261123 - DNA, 25 bp, probe
ggctgtcctgtacattgtgggatgt

SEQ ID NO: 261124 - DNA, 25 bp, probe
ggctgtagctgatgcctggggagag

SEQ ID NO: 261125 - DNA, 25 bp, probe
ggctgtttggtgcctgaaggatggc

SEQ ID NO: 261126 - DNA, 25 bp, probe
ggctgggtggggcatcagtgatggg

SEQ ID NO: 261127 - DNA, 25 bp, probe
ggctggctatgggagtctgagtgtg

SEQ ID NO: 261128 - DNA, 25 bp, probe
ggctgtgattgagtgagggcatggg

SEQ ID NO: 261129 - DNA, 25 bp, probe
ggctgtgtggcatcgcagaatggcg

SEQ ID NO: 261130 - DNA, 25 bp, probe
ggcgatgtgatctaacaaatgctca

SEQ ID NO: 261131 - DNA, 25 bp, probe
ggctgtattcaaagcagatcaccat

SEQ ID NO: 261132 - DNA, 25 bp, probe
ggctgtattcaaagcagatcaccat

SEQ ID NO: 261133 - DNA, 25 bp, probe
tggcgaatgtaaacgtccgcgcggt

SEQ ID NO: 261134 - DNA, 25 bp, probe
tggcgaatgtaaacgtccgcgcggt

SEQ ID NO: 261135 - DNA, 25 bp, probe
tggctacagggaagcctccactggc

SEQ ID NO: 261136 - DNA, 25 bp, probe
tggcccctggggatttataaactca

SEQ ID NO: 261137 - DNA, 25 bp, probe
ggcccctggggatttataaactcat

SEQ ID NO: 261138 - DNA, 25 bp, probe
ggcgtcgtcacggttaaagagaaat

SEQ ID NO: 261139 - DNA, 25 bp, probe
ggcgtcgtcacggttaaagagaaat

SEQ ID NO: 261140 - DNA, 25 bp, probe
ggctgtcagaccgagagtagcaagg

SEQ ID NO: 261141 - DNA, 25 bp, probe
ggctggaatctggagagctagaacc

SEQ ID NO: 261142 - DNA, 25 bp, probe
ggctgtgtgttggctgagctgttac

SEQ ID NO: 261143 - DNA, 25 bp, probe
ggctgtggtatcaagactctgtggc

SEQ ID NO: 261144 - DNA, 25 bp, probe
ggctggagctacaaacgtgtggaga

SEQ ID NO: 261145 - DNA, 25 bp, probe
ggcgagacaacattccgttggcagc

SEQ ID NO: 261146 - DNA, 25 bp, probe
ggcgtacgacggtgttgagatcact

SEQ ID NO: 261147 - DNA, 25 bp, probe
ggctgtccccagcaagtgtaggagt

SEQ ID NO: 261148 - DNA, 25 bp, probe
ggcgccacctatgtatggtcatgga

SEQ ID NO: 261149 - DNA, 25 bp, probe
ggccccctatcacagactgtgagat

SEQ ID NO: 261150 - DNA, 25 bp, probe
ggccccaccacaaggtttcatagcc

SEQ ID NO: 261151 - DNA, 25 bp, probe
ggccccaccacaaggtttcatagcc

SEQ ID NO: 261152 - DNA, 25 bp, probe
ggccctcccagtggaggcatcttac

SEQ ID NO: 261153 - DNA, 25 bp, probe
ggcgcctggtcaccagggctgcttt

SEQ ID NO: 261154 - DNA, 25 bp, probe
ggccgattccaaacattgtgctcgt

SEQ ID NO: 261155 - DNA, 25 bp, probe
ggccaaatccaagatcgagcgagtg

SEQ ID NO: 261156 - DNA, 25 bp, probe
ggcgcagaatcctgtgagggtgact

SEQ ID NO: 261157 - DNA, 25 bp, probe
ggccagatgtcccggaggggactga

SEQ ID NO: 261158 - DNA, 25 bp, probe
ggctgggttctccagagggagtgct

SEQ ID NO: 261159 - DNA, 25 bp, probe
ggcgtggtactctgggagattgtga

SEQ ID NO: 261160 - DNA, 25 bp, probe
ggctgggccctctgagaggttggaa

SEQ ID NO: 261161 - DNA, 25 bp, probe
ggctggggccacttggatgagaacg

SEQ ID NO: 261162 - DNA, 25 bp, probe
ggctggggccagttatgattgcaag

SEQ ID NO: 261163 - DNA, 25 bp, probe
ggctggggctatctgagcagctcac

SEQ ID NO: 261164 - DNA, 25 bp, probe
ggctgtggagccaaggcggctccag

SEQ ID NO: 261165 - DNA, 25 bp, probe
ggctggtgagtggagggagtgccca

SEQ ID NO: 261166 - DNA, 25 bp, probe
ggccggagttagagaggcctctgca

SEQ ID NO: 261167 - DNA, 25 bp, probe
ggcccgttgaggatgaggccgctag

SEQ ID NO: 261168 - DNA, 25 bp, probe
ggcgggattcggaggaacctgagtg

SEQ ID NO: 261169 - DNA, 25 bp, probe
ggcgggattcggaggaacctgagtg

SEQ ID NO: 261170 - DNA, 25 bp, probe
ggcgagaattcgaggagacccggcg

SEQ ID NO: 261171 - DNA, 25 bp, probe
ggcgagaattcgaggagacccggcg

SEQ ID NO: 261172 - DNA, 25 bp, probe
ggcgaagtgttcagcggacgcctgc

SEQ ID NO: 261173 - DNA, 25 bp, probe
ggcgagtggttggtgggcaaacagg

SEQ ID NO: 261174 - DNA, 25 bp, probe
ggctggtggaagggcgagaccaacg

SEQ ID NO: 261175 - DNA, 25 bp, probe
ggctggatagaactgggacaaacac

SEQ ID NO: 261176 - DNA, 25 bp, probe
ggctggatagaactgggacaaacac

SEQ ID NO: 261177 - DNA, 25 bp, probe
ggctggacacaggattcagaaagac

SEQ ID NO: 261178 - DNA, 25 bp, probe
ggctgggcacaggctacagagacag

SEQ ID NO: 261179 - DNA, 25 bp, probe
ggctggacacacatggaggcagcag

SEQ ID NO: 261180 - DNA, 25 bp, probe
ggccgcaacagcaggggcgatatcc

SEQ ID NO: 261181 - DNA, 25 bp, probe
ggcccgaggaagaggcagaagccgt

SEQ ID NO: 261182 - DNA, 25 bp, probe
ggcgggtggaggagctgcagaaccg

SEQ ID NO: 261183 - DNA, 25 bp, probe
ggcggcgggaggaggcagcgccgcc

SEQ ID NO: 261184 - DNA, 25 bp, probe
ggcggcaggagagagaggctggcct

SEQ ID NO: 261185 - DNA, 25 bp, probe
ggcggcaagggcaaggccttgcagc

SEQ ID NO: 261186 - DNA, 25 bp, probe
ggcggcatcgtgatagacacttcgg

SEQ ID NO: 261187 - DNA, 25 bp, probe
ggcctgcacaggttaaccgtcagac

SEQ ID NO: 261188 - DNA, 25 bp, probe
ggcctgcacaggttaaccgtcagac

SEQ ID NO: 261189 - DNA, 25 bp, probe
ggccgaaatggtcaacgccatgcac

SEQ ID NO: 261190 - DNA, 25 bp, probe
ggcctagtgggtcattggccatctc

SEQ ID NO: 261191 - DNA, 25 bp, probe
ggcgtggggagcaaattgcccagtg

SEQ ID NO: 261192 - DNA, 25 bp, probe
ggcgtggcaggagaacagccgtgtc

SEQ ID NO: 261193 - DNA, 25 bp, probe
ggctgtgaggaagacaacgctggcc

SEQ ID NO: 261194 - DNA, 25 bp, probe
ggcggatccactgaaacatgggctc

SEQ ID NO: 261195 - DNA, 25 bp, probe
ggccaaaaccagaaccagcagtctc

SEQ ID NO: 261196 - DNA, 25 bp, probe
ggccatcaaactcattgtcactgtc

SEQ ID NO: 261197 - DNA, 25 bp, probe
ggcgatgcacaacagattatacggc

SEQ ID NO: 261198 - DNA, 25 bp, probe
ggcgatgcactcgacgatgtagaag

SEQ ID NO: 261199 - DNA, 25 bp, probe
ggcgatcaggagggagctagcactg

SEQ ID NO: 261200 - DNA, 25 bp, probe
ggcgctcagggaaagctggactact

SEQ ID NO: 261201 - DNA, 25 bp, probe
ggcgtcaggccaaagggactgggga

SEQ ID NO: 261202 - DNA, 25 bp, probe
ggcgtcgtcacaaagcgaaagccga

SEQ ID NO: 261203 - DNA, 25 bp, probe
ggcgcctctcaagaaaacgctggag

SEQ ID NO: 261204 - DNA, 25 bp, probe
ggcgcctctcaagaaaacgctggag

SEQ ID NO: 261205 - DNA, 25 bp, probe
tgcccctctaccagaaaagcgtgtg

SEQ ID NO: 261206 - DNA, 25 bp, probe
ggcctcctactcagaatccgaggtg

SEQ ID NO: 261207 - DNA, 25 bp, probe
ggcctccccagctgagtaagaagct

SEQ ID NO: 261208 - DNA, 25 bp, probe
ggcccacatccaggagtgtaagcac

SEQ ID NO: 261209 - DNA, 25 bp, probe
ggcgtcctctcaggaggcaagcaga

SEQ ID NO: 261210 - DNA, 25 bp, probe
ggcgtcctctcaggaggcaagcaga

SEQ ID NO: 261211 - DNA, 25 bp, probe
ggctgggtcctggggacagcagagt

SEQ ID NO: 261212 - DNA, 25 bp, probe
ggctggaattctggcggagggcatg

SEQ ID NO: 261213 - DNA, 25 bp, probe
ggcggcactactgcaggagaggagc

SEQ ID NO: 261214 - DNA, 25 bp, probe
ggcggcgcaggcgcagaggagagcg

SEQ ID NO: 261215 - DNA, 25 bp, probe
ggcgggcagtgcggaagatgctgct

SEQ ID NO: 261216 - DNA, 25 bp, probe
ggcggcaagtgaggatgcagtccag

SEQ ID NO: 261217 - DNA, 25 bp, probe
ggcgagctagaggtgaagatccgcg

SEQ ID NO: 261218 - DNA, 25 bp, probe
ggctggctaactggaagcatgtagg

SEQ ID NO: 261219 - DNA, 25 bp, probe
ggcgagtgaaggcaccatgctgaag

SEQ ID NO: 261220 - DNA, 25 bp, probe
ggccgctgagggcacaaggaattag

SEQ ID NO: 261221 - DNA, 25 bp, probe
ggcccacatggcctccaaggagtaa

SEQ ID NO: 261222 - DNA, 25 bp, probe
gaacacaattgatacttcaggtgct

SEQ ID NO: 261223 - DNA, 25 bp, probe
ggcccgcgacttgaagaacggaggc

SEQ ID NO: 261224 - DNA, 25 bp, probe
ggcgcccacaatatccagagacggg

SEQ ID NO: 261225 - DNA, 25 bp, probe
ggccaccaggaactgcctggtcggg

SEQ ID NO: 261226 - DNA, 25 bp, probe
tggacccggaactgatggtgcggag

SEQ ID NO: 261227 - DNA, 25 bp, probe
ggcccaggagggtctatggggagag

SEQ ID NO: 261228 - DNA, 25 bp, probe
ggccaagcaggctggtttgcaagaa

SEQ ID NO: 261229 - DNA, 25 bp, probe
tggcgggcatggtgggttgttgaat

SEQ ID NO: 261230 - DNA, 25 bp, probe
tggcggccttcaaggtggtggtgca

SEQ ID NO: 261231 - DNA, 25 bp, probe
tggcggccttcaaggtggtggtgca

SEQ ID NO: 261232 - DNA, 25 bp, probe
ggcgtgcttctctacgatatggtgt

SEQ ID NO: 261233 - DNA, 25 bp, probe
ggcgtcatactctaccatatggtgg

SEQ ID NO: 261234 - DNA, 25 bp, probe
ggcgtcaatctggaccacacagacg

SEQ ID NO: 261235 - DNA, 25 bp, probe
ggcgtctacagcaacgagctgcagg

SEQ ID NO: 261236 - DNA, 25 bp, probe
ggcgggagcagaaggagcagcgggc

SEQ ID NO: 261237 - DNA, 25 bp, probe
ggccgtggtgaagacaggagcccgc

SEQ ID NO: 261238 - DNA, 25 bp, probe
ggccgggttcaaagggagcccagtg

SEQ ID NO: 261239 - DNA, 25 bp, probe
tgggtgggttaacgccaagcaaagg

SEQ ID NO: 261240 - DNA, 25 bp, probe
ggcgttggtcaaagcggagaccacg

SEQ ID NO: 261241 - DNA, 25 bp, probe
ggcgcttgagaacagcagggaggac

SEQ ID NO: 261242 - DNA, 25 bp, probe
ggcgctttaacaaggagggtggcac

SEQ ID NO: 261243 - DNA, 25 bp, probe
ggcgtatgtcatcaacgggggtgac

SEQ ID NO: 261244 - DNA, 25 bp, probe
ggcccttcatcctggaggggtgagg

SEQ ID NO: 261245 - DNA, 25 bp, probe
ggcccttcatcctggaggggtgaga

SEQ ID NO: 261246 - DNA, 25 bp, probe
ggccctgcctggtggcaagagggaa

SEQ ID NO: 261247 - DNA, 25 bp, probe
ggccgtgggggttgaggcagggcaa

SEQ ID NO: 261248 - DNA, 25 bp, probe
ggccgtgggggttgaggcagggcaa

SEQ ID NO: 261249 - DNA, 25 bp, probe
ggcgggaggttgatggcgagtggtg

SEQ ID NO: 261250 - DNA, 25 bp, probe
ggctggacggatgttgggagtgggg

SEQ ID NO: 261251 - DNA, 25 bp, probe
ggctggacggatgttgggagtgggg

SEQ ID NO: 261252 - DNA, 25 bp, probe
ggcggacgagagtttggcgcatgcg

SEQ ID NO: 261253 - DNA, 25 bp, probe
ggctggaagctgctttggcgagatc

SEQ ID NO: 261254 - DNA, 25 bp, probe
ggctggaagctgctttggcgagatc

SEQ ID NO: 261255 - DNA, 25 bp, probe
ggcggtagctgattctggaagcaac

SEQ ID NO: 261256 - DNA, 25 bp, probe
ggcggtagctgattctggaagcaac

SEQ ID NO: 261257 - DNA, 25 bp, probe
ggctgggtgtggtcatgtacgagat

SEQ ID NO: 261258 - DNA, 25 bp, probe
ggctgggtgtggtcatgtacgagat

SEQ ID NO: 261259 - DNA, 25 bp, probe
ggctgggtgtggtcatgtacgagat

SEQ ID NO: 261260 - DNA, 25 bp, probe
ggctggtgcgagggcatgaacgaga

SEQ ID NO: 261261 - DNA, 25 bp, probe
ggcgagtgcaagaccagagacaacc

SEQ ID NO: 261262 - DNA, 25 bp, probe
ggcggtgaggatgcacatgagcacc

SEQ ID NO: 261263 - DNA, 25 bp, probe
ggccgtgagaatgcacatgagcacc

SEQ ID NO: 261264 - DNA, 25 bp, probe
ggccgtagatgtgtgggccctgggc

SEQ ID NO: 261265 - DNA, 25 bp, probe
ggcgtggagagtgagggctccctgc

SEQ ID NO: 261266 - DNA, 25 bp, probe
ggcctggaatgagagggtcaagcca

SEQ ID NO: 261267 - DNA, 25 bp, probe
ggcctgacctggaaggtgaaggtga

SEQ ID NO: 261268 - DNA, 25 bp, probe
ggcctgacctggaaggtgaaggtga

SEQ ID NO: 261269 - DNA, 25 bp, probe
ggcctggcctggcagtggtgtaaga

SEQ ID NO: 261270 - DNA, 25 bp, probe
ggcgaggcggaaagatggattccag

SEQ ID NO: 261271 - DNA, 25 bp, probe
ggcgaggcggaaagatggattccag

SEQ ID NO: 261272 - DNA, 25 bp, probe
ggcgcagggacatggggcaagccag

SEQ ID NO: 261273 - DNA, 25 bp, probe
ggccggagacaagtgaccaagatgc

SEQ ID NO: 261274 - DNA, 25 bp, probe
ggcgtgcgagtggactaacaacagc

SEQ ID NO: 261275 - DNA, 25 bp, probe
ggcgagggggacagacagacagcct

SEQ ID NO: 261276 - DNA, 25 bp, probe
ggcgggagtggagtggaagaagagg

SEQ ID NO: 261277 - DNA, 25 bp, probe
ggcggggctggagatcatcagaaaa

SEQ ID NO: 261278 - DNA, 25 bp, probe
ggcggacctgaagatgctcacaaac

SEQ ID NO: 261279 - DNA, 25 bp, probe
ggcggccttatagactctaaaggtt

SEQ ID NO: 261280 - DNA, 25 bp, probe
ggcggccttatagactctaaaggtt

SEQ ID NO: 261281 - DNA, 25 bp, probe
ggcccctggtatggacactgaaagg

SEQ ID NO: 261282 - DNA, 25 bp, probe
ggcccgtgggaccatgacttaggga

SEQ ID NO: 261283 - DNA, 25 bp, probe
ggcccctgggacaatgacccagaag

SEQ ID NO: 261284 - DNA, 25 bp, probe
ggcccactgggtgaaggcccaagcc

SEQ ID NO: 261285 - DNA, 25 bp, probe
tggctaacacggtgaaaccccacct

SEQ ID NO: 261286 - DNA, 25 bp, probe
tggctaacacggtgaaaccccgtct

SEQ ID NO: 261287 - DNA, 25 bp, probe
tggagaaccccaataataacccgat

SEQ ID NO: 261288 - DNA, 25 bp, probe
tgtaaacctagccaaaattaccagt

SEQ ID NO: 261289 - DNA, 25 bp, probe
tgaggtccttaccaaagtcctacag

SEQ ID NO: 261290 - DNA, 25 bp, probe
ggcggccaagacaaaattcactaca

SEQ ID NO: 261291 - DNA, 25 bp, probe
ggcggcctggataaaatagacttga

SEQ ID NO: 261292 - DNA, 25 bp, probe
ggccagttgagctcaggaaggttat

SEQ ID NO: 261293 - DNA, 25 bp, probe
ggcctgtgggaatgggatttgttac

SEQ ID NO: 261294 - DNA, 25 bp, probe
ggcctgtaagatttgtggtgttcct

SEQ ID NO: 261295 - DNA, 25 bp, probe
ggccgtacatgttaagggcatttca

SEQ ID NO: 261296 - DNA, 25 bp, probe
ggccgaacattttcagaaatctttc

SEQ ID NO: 261297 - DNA, 25 bp, probe
ggcggagactgtctcctcaagttct

SEQ ID NO: 261298 - DNA, 25 bp, probe
ggcgagagaggtttacacatgaggt

SEQ ID NO: 261299 - DNA, 25 bp, probe
ggcgtgggagttcacagcagcctta

SEQ ID NO: 261300 - DNA, 25 bp, probe
ggcgtgggagttcacagcagcctta

SEQ ID NO: 261301 - DNA, 25 bp, probe
ggcggtagagttccaaaccattcac

SEQ ID NO: 261302 - DNA, 25 bp, probe
ggcgagatcagtatccttaacatta

SEQ ID NO: 261303 - DNA, 25 bp, probe
ggcgagatcagtatccttaacatta

SEQ ID NO: 261304 - DNA, 25 bp, probe
ggcggatcaaaacctacaagattca

SEQ ID NO: 261305 - DNA, 25 bp, probe
ggctggatccaacacaaacagttcc

SEQ ID NO: 261306 - DNA, 25 bp, probe
ggccccatcaatcaaaactgtttca

SEQ ID NO: 261307 - DNA, 25 bp, probe
tgtccacattaaactaacagcatta

SEQ ID NO: 261308 - DNA, 25 bp, probe
tggcaaaatggcactgaatcatcca

SEQ ID NO: 261309 - DNA, 25 bp, probe
ggcgcacaaagcaggatatgtccaa

SEQ ID NO: 261310 - DNA, 25 bp, probe
ggcgcagacctcaatgcgtgagtcc

SEQ ID NO: 261311 - DNA, 25 bp, probe
ggccgacccaagggagtgtcagcct

SEQ ID NO: 261312 - DNA, 25 bp, probe
ggccgagtacaaggccagtggcggc

SEQ ID NO: 261313 - DNA, 25 bp, probe
ggccggtcggaagagggcaggggct

SEQ ID NO: 261314 - DNA, 25 bp, probe
ggccgggggacatttggacaggtgg

SEQ ID NO: 261315 - DNA, 25 bp, probe
ggccatcggggggtgggagggatgg

SEQ ID NO: 261316 - DNA, 25 bp, probe
ggcccgcgggagactgggagggaga

SEQ ID NO: 261317 - DNA, 25 bp, probe
ggccctccagggaggaagtcagagt

SEQ ID NO: 261318 - DNA, 25 bp, probe
ggcctttcgtggaggtgactatggt

SEQ ID NO: 261319 - DNA, 25 bp, probe
ggcctttcttgtatgtgtagcttgc

SEQ ID NO: 261320 - DNA, 25 bp, probe
ggcctcctccatcagggtgaggctc

SEQ ID NO: 261321 - DNA, 25 bp, probe
ggcgttcagccacccgagattgagc

SEQ ID NO: 261322 - DNA, 25 bp, probe
tggcgttcagccacccgagattgag

SEQ ID NO: 261323 - DNA, 25 bp, probe
ggcgttcagcagagtcagggatggg

SEQ ID NO: 261324 - DNA, 25 bp, probe
ggcgttcagcagagtcagggatggg

SEQ ID NO: 261325 - DNA, 25 bp, probe
ggcgcttctgcgagaagggcgagga

SEQ ID NO: 261326 - DNA, 25 bp, probe
ggccttctggaagcatggagtgcag

SEQ ID NO: 261327 - DNA, 25 bp, probe
ggccttcgaagggtggcttgctggc

SEQ ID NO: 261328 - DNA, 25 bp, probe
ggccttttgagtgtgactcgtagct

SEQ ID NO: 261329 - DNA, 25 bp, probe
ggccctcctggggtacaggaagctg

SEQ ID NO: 261330 - DNA, 25 bp, probe
ggccctcctggggtacaggaagctg

SEQ ID NO: 261331 - DNA, 25 bp, probe
ggccccactggggaaataacagctg

SEQ ID NO: 261332 - DNA, 25 bp, probe
ggccccagatggttaagtgctaaat

SEQ ID NO: 261333 - DNA, 25 bp, probe
ggcccagaaggacacagttgcatca

SEQ ID NO: 261334 - DNA, 25 bp, probe
ggcggaattaaaacagcattgaacc

SEQ ID NO: 261335 - DNA, 25 bp, probe
ggcggaattaaaacagcattgaacc

SEQ ID NO: 261336 - DNA, 25 bp, probe
ggcctgacctaatccaagtgaaccc

SEQ ID NO: 261337 - DNA, 25 bp, probe
ggccaaactgtctcaaagagcaacc

SEQ ID NO: 261338 - DNA, 25 bp, probe
tgtcacaaccagcaacaaagggacc

SEQ ID NO: 261339 - DNA, 25 bp, probe
tgtcacaaccagcaacaaagggacc

SEQ ID NO: 261340 - DNA, 25 bp, probe
tgtcgcaagtcacagaattatttga

SEQ ID NO: 261341 - DNA, 25 bp, probe
tagccaactatgggtttagttcaac

SEQ ID NO: 261342 - DNA, 25 bp, probe
tcacccgcccacatttaattaacag

SEQ ID NO: 261343 - DNA, 25 bp, probe
tccactcttcggagttgcagttaac

SEQ ID NO: 261344 - DNA, 25 bp, probe
tgccctcgaaggagtgcttttccac

SEQ ID NO: 261345 - DNA, 25 bp, probe
tgactcggaaggaggtctacatcaa

SEQ ID NO: 261346 - DNA, 25 bp, probe
tggcctggaaggaacctcttaaaat

SEQ ID NO: 261347 - DNA, 25 bp, probe
ggcgtggaaggttgctttcacacag

SEQ ID NO: 261348 - DNA, 25 bp, probe
ggcgtggagacggttgtgtgacaat

SEQ ID NO: 261349 - DNA, 25 bp, probe
ggcgggagagccaataatgagactt

SEQ ID NO: 261350 - DNA, 25 bp, probe
ggcggagcagatgcatattatgaaa

SEQ ID NO: 261351 - DNA, 25 bp, probe
ggcggagcagatgcatattatgaaa

SEQ ID NO: 261352 - DNA, 25 bp, probe
ggcgcaggtgctgattctgtcaaga

SEQ ID NO: 261353 - DNA, 25 bp, probe
ggcgatgcctgggtttacaaaagat

SEQ ID NO: 261354 - DNA, 25 bp, probe
ggcgtcctgagcactttgcaagaga

SEQ ID NO: 261355 - DNA, 25 bp, probe
ggcctcctagaggcttagaaaactc

SEQ ID NO: 261356 - DNA, 25 bp, probe
ggcccctggtgtgtggcaaaggccg

SEQ ID NO: 261357 - DNA, 25 bp, probe
ggccctcggactttggcaaagagcc

SEQ ID NO: 261358 - DNA, 25 bp, probe
tggacactttacctttctaagacct

SEQ ID NO: 261359 - DNA, 25 bp, probe
ggcctgcttctatgtatttatcaac

SEQ ID NO: 261360 - DNA, 25 bp, probe
ggcctgttatattggtactgagcca

SEQ ID NO: 261361 - DNA, 25 bp, probe
ggcgctgttcaaaggccttgagaaa

SEQ ID NO: 261362 - DNA, 25 bp, probe
ggcgtgttcgtcaaggtgaagctaa

SEQ ID NO: 261363 - DNA, 25 bp, probe
ggcgttatctggaaagtggactgaa

SEQ ID NO: 261364 - DNA, 25 bp, probe
ggcgttacagcgcaacagcagcctg

SEQ ID NO: 261365 - DNA, 25 bp, probe
ggcgctgatgaccccggacaccgac

SEQ ID NO: 261366 - DNA, 25 bp, probe
ggcggacacccaggagaacgtgatg

SEQ ID NO: 261367 - DNA, 25 bp, probe
ggcggcacgctgaaggaaacgtgcg

SEQ ID NO: 261368 - DNA, 25 bp, probe
ggccccgtgagtggacatgacaggg

SEQ ID NO: 261369 - DNA, 25 bp, probe
ggcgctgggaagggacataggggtt

SEQ ID NO: 261370 - DNA, 25 bp, probe
ggcctgtggacccgaaaggagggca

SEQ ID NO: 261371 - DNA, 25 bp, probe
ggcctgttacctggtgaaggagcgg

SEQ ID NO: 261372 - DNA, 25 bp, probe
ggcctttgacttcgttaagcagcgc

SEQ ID NO: 261373 - DNA, 25 bp, probe
ggccagcctggcatcagtttaggcc

SEQ ID NO: 261374 - DNA, 25 bp, probe
ggccccagagctcatctttggagcc

SEQ ID NO: 261375 - DNA, 25 bp, probe
tggccacctacctcattttagagca

SEQ ID NO: 261376 - DNA, 25 bp, probe
tggccacctacctcattttagagca

SEQ ID NO: 261377 - DNA, 25 bp, probe
tggtccttaacagagtttgggggag

SEQ ID NO: 261378 - DNA, 25 bp, probe
tgggcgttaacagcctttggagtcg

SEQ ID NO: 261379 - DNA, 25 bp, probe
tggcccaggaaaaacctgtgggttg

SEQ ID NO: 261380 - DNA, 25 bp, probe
ggccgaggtaaatacagtgaagtat

SEQ ID NO: 261381 - DNA, 25 bp, probe
ggcccgagctcagaaacagctgtcg

SEQ ID NO: 261382 - DNA, 25 bp, probe
ggccgagtgccagaggaagctgaag

SEQ ID NO: 261383 - DNA, 25 bp, probe
ggcgcagagtcctatagaacagagt

SEQ ID NO: 261384 - DNA, 25 bp, probe
ggcctgcagtgcgtgaagtacattc

SEQ ID NO: 261385 - DNA, 25 bp, probe
ggcgcagattgctgaagggatggca

SEQ ID NO: 261386 - DNA, 25 bp, probe
ggcgcgtctcatcaaggacgatgag

SEQ ID NO: 261387 - DNA, 25 bp, probe
ggcccttgcaggaggacaagatgca

SEQ ID NO: 261388 - DNA, 25 bp, probe
ggcccttgcaggaggacaagatgca

SEQ ID NO: 261389 - DNA, 25 bp, probe
ggcctcccagaatggaaagtcccag

SEQ ID NO: 261390 - DNA, 25 bp, probe
ggccttccgtgatggaaaccacttc

SEQ ID NO: 261391 - DNA, 25 bp, probe
tagcgtacatctaaggaaaaccgta

SEQ ID NO: 261392 - DNA, 25 bp, probe
ggcccagatcctatgaaaacctata

SEQ ID NO: 261393 - DNA, 25 bp, probe
ggccaggacctgacaaatacccaat

SEQ ID NO: 261394 - DNA, 25 bp, probe
ggccaggacctgacaaatacccaat

SEQ ID NO: 261395 - DNA, 25 bp, probe
ggccagtatgccacagaatgtccta

SEQ ID NO: 261396 - DNA, 25 bp, probe
ggccatcaatgccacaaacatgtcc

SEQ ID NO: 261397 - DNA, 25 bp, probe
ggccatcaatgccacaaacatgtcc

SEQ ID NO: 261398 - DNA, 25 bp, probe
ggccatcatcatgcaagaagtagtg

SEQ ID NO: 261399 - DNA, 25 bp, probe
ggcctagtcagatggatgtagatac

SEQ ID NO: 261400 - DNA, 25 bp, probe
ggcctagtcagatggatgtagatac

SEQ ID NO: 261401 - DNA, 25 bp, probe
ggccggtcagactgtataatcctcc

SEQ ID NO: 261402 - DNA, 25 bp, probe
ggccctgatgagaacgctaagacct

SEQ ID NO: 261403 - DNA, 25 bp, probe
ggccctgttgtaggcttgttctgtt

SEQ ID NO: 261404 - DNA, 25 bp, probe
ggcgcattgttggaggggtttggtg

SEQ ID NO: 261405 - DNA, 25 bp, probe
tggccatggtaccggggacttggga

SEQ ID NO: 261406 - DNA, 25 bp, probe
tggccatggtaccggggacttggga

SEQ ID NO: 261407 - DNA, 25 bp, probe
tggccaggtgaatctggggcttggt

SEQ ID NO: 261408 - DNA, 25 bp, probe
tggccagttgtaaaaggttgtcctt

SEQ ID NO: 261409 - DNA, 25 bp, probe
ggccatgtggtaaagggggtggctt

SEQ ID NO: 261410 - DNA, 25 bp, probe
ggcccctttaaggcgcggggcattg

SEQ ID NO: 261411 - DNA, 25 bp, probe
ggcccgttgaagttccagggagctt

SEQ ID NO: 261412 - DNA, 25 bp, probe
ggccctgtggtctccaatggagagc

SEQ ID NO: 261413 - DNA, 25 bp, probe
ggcgacgggtgatgctcaaggaaat

SEQ ID NO: 261414 - DNA, 25 bp, probe
ggcgagggcgtttggagaggaggag

SEQ ID NO: 261415 - DNA, 25 bp, probe
ggcgagtgggtaaaggcagccaggc

SEQ ID NO: 261416 - DNA, 25 bp, probe
ggcgagtgggtaaaggcagccaggc

SEQ ID NO: 261417 - DNA, 25 bp, probe
ggcggtgggaaaaggtgtcaggcac

SEQ ID NO: 261418 - DNA, 25 bp, probe
ggcggtgggaagctggtgctcagct

SEQ ID NO: 261419 - DNA, 25 bp, probe
ggccagggggtgcaggtgtgagtgg

SEQ ID NO: 261420 - DNA, 25 bp, probe
ggccgcggtgttcatgcaatatggc

SEQ ID NO: 261421 - DNA, 25 bp, probe
ggccgagaggcttccacagaagcag

SEQ ID NO: 261422 - DNA, 25 bp, probe
ggccgagaggcttccacagaagcag

SEQ ID NO: 261423 - DNA, 25 bp, probe
ggccgagaagctgcgtgtggcagcg

SEQ ID NO: 261424 - DNA, 25 bp, probe
ggcgtagaagccttgttgaagctgt

SEQ ID NO: 261425 - DNA, 25 bp, probe
ggcgctgagaagcttcggaagctgc

SEQ ID NO: 261426 - DNA, 25 bp, probe
ggcggaggcgccattgaaagcatgg

SEQ ID NO: 261427 - DNA, 25 bp, probe
ggccaagcctctgttaaagtcattg

SEQ ID NO: 261428 - DNA, 25 bp, probe
tggcccagcgccaagtaaacagggt

SEQ ID NO: 261429 - DNA, 25 bp, probe
ggcgccatcgccaagtaagaaagtg

SEQ ID NO: 261430 - DNA, 25 bp, probe
ggcgccatcgccaagtaagaaagtg

SEQ ID NO: 261431 - DNA, 25 bp, probe
ggcgaccgctcgttaacatatacaa

SEQ ID NO: 261432 - DNA, 25 bp, probe
ggcgaaccatatttacctatacgga

SEQ ID NO: 261433 - DNA, 25 bp, probe
ggcgaacctccaaacacagagacgg

SEQ ID NO: 261434 - DNA, 25 bp, probe
ggcccacctcctaagaacaacatgg

SEQ ID NO: 261435 - DNA, 25 bp, probe
ggcccacctcctaagaacaacatgg

SEQ ID NO: 261436 - DNA, 25 bp, probe
ggccccctgtctgaagaaacagaag

SEQ ID NO: 261437 - DNA, 25 bp, probe
ggcctacctgatgatgaagaaacgg

SEQ ID NO: 261438 - DNA, 25 bp, probe
ggcccaggtgagctgaagacaaacc

SEQ ID NO: 261439 - DNA, 25 bp, probe
ggcccagagggtgggtgccaattcc

SEQ ID NO: 261440 - DNA, 25 bp, probe
ggcccagaggggagtgccacaaagt

SEQ ID NO: 261441 - DNA, 25 bp, probe
ggcccaggggaattggtgattacag

SEQ ID NO: 261442 - DNA, 25 bp, probe
ggcccagggaaagttcctgtcacat

SEQ ID NO: 261443 - DNA, 25 bp, probe
ggcccagggaccaatctttggagaa

SEQ ID NO: 261444 - DNA, 25 bp, probe
ggcctgagggatgcccagttgtaac

SEQ ID NO: 261445 - DNA, 25 bp, probe
ggcccgaggtgggcatgcagcgtgc

SEQ ID NO: 261446 - DNA, 25 bp, probe
ggcgccggagtggcatgaagctgta

SEQ ID NO: 261447 - DNA, 25 bp, probe
ggcgcccacagtgatgatgtcgaga

SEQ ID NO: 261448 - DNA, 25 bp, probe
ggcgcctccttggcattataacaaa

SEQ ID NO: 261449 - DNA, 25 bp, probe
ggcccacctggccttaataacaatg

SEQ ID NO: 261450 - DNA, 25 bp, probe
ggcccacctggccttaataacaatg

SEQ ID NO: 261451 - DNA, 25 bp, probe
ggcccaacgtgctgtggtaacagag

SEQ ID NO: 261452 - DNA, 25 bp, probe
ggcccaacgtctgcatgggagacca

SEQ ID NO: 261453 - DNA, 25 bp, probe
ggcctacacgaagatttgtgatcca

SEQ ID NO: 261454 - DNA, 25 bp, probe
ggccaaaggaatacagtttatagca

SEQ ID NO: 261455 - DNA, 25 bp, probe
ggccaaaggaatacagtttatagca

SEQ ID NO: 261456 - DNA, 25 bp, probe
tggctacaactaccaagcttttgac

SEQ ID NO: 261457 - DNA, 25 bp, probe
ggcccaagaacatgatgctttgtga

SEQ ID NO: 261458 - DNA, 25 bp, probe
ggccacacgaaactgtttagtgggt

SEQ ID NO: 261459 - DNA, 25 bp, probe
ggccacacgaaactgtttagtgggt

SEQ ID NO: 261460 - DNA, 25 bp, probe
ggccacacgaaactgtttagtgggt

SEQ ID NO: 261461 - DNA, 25 bp, probe
ggcccagctgtatggtcttgggagg

SEQ ID NO: 261462 - DNA, 25 bp, probe
ggcccagctgtatggtcttgggagg

SEQ ID NO: 261463 - DNA, 25 bp, probe
ggcccggatccaggattctgggagg

SEQ ID NO: 261464 - DNA, 25 bp, probe
ggccctgaaacaggaatggggcaaa

SEQ ID NO: 261465 - DNA, 25 bp, probe
ggcctggaaaatcagatgtggacca

SEQ ID NO: 261466 - DNA, 25 bp, probe
ggcctggtacaagggaatgtcacaa

SEQ ID NO: 261467 - DNA, 25 bp, probe
ggcctggtagagccaggcacccagt

SEQ ID NO: 261468 - DNA, 25 bp, probe
ggcctggtccagttggagaccgtca

SEQ ID NO: 261469 - DNA, 25 bp, probe
ggcgctgacttctatggaaaccaga

SEQ ID NO: 261470 - DNA, 25 bp, probe
ggcctttgacaaaacagacacagaa

SEQ ID NO: 261471 - DNA, 25 bp, probe
ggcctttgacaaaacagacacagaa

SEQ ID NO: 261472 - DNA, 25 bp, probe
ggccattaatatcaccaacaatgag

SEQ ID NO: 261473 - DNA, 25 bp, probe
ggcctaactatgcctcgaacttcag

SEQ ID NO: 261474 - DNA, 25 bp, probe
ggcctaactatgcctcgaacttcag

SEQ ID NO: 261475 - DNA, 25 bp, probe
ggccatagcctatcggaagttcact

SEQ ID NO: 261476 - DNA, 25 bp, probe
ggccatggctcctacggagaggtct

SEQ ID NO: 261477 - DNA, 25 bp, probe
ggccagcaggtggacagggggcctc

SEQ ID NO: 261478 - DNA, 25 bp, probe
ggcgacagcgagaacggtggcgccg

SEQ ID NO: 261479 - DNA, 25 bp, probe
ggcgcagagcaactatcagggcagc

SEQ ID NO: 261480 - DNA, 25 bp, probe
ggcgcaggagatggacagggccacg

SEQ ID NO: 261481 - DNA, 25 bp, probe
ggcgctggcagagtacgaggccagg

SEQ ID NO: 261482 - DNA, 25 bp, probe
ggcgcatggggtccgagtgattgga

SEQ ID NO: 261483 - DNA, 25 bp, probe
ggccatgggtgggggaatagtagac

SEQ ID NO: 261484 - DNA, 25 bp, probe
ggccaggagtttgagactagcctag

SEQ ID NO: 261485 - DNA, 25 bp, probe
ggcgctatggtcaggagacccttag

SEQ ID NO: 261486 - DNA, 25 bp, probe
ggcgttctctcttgagagaccctct

SEQ ID NO: 261487 - DNA, 25 bp, probe
ggcgtctgttccaacagatcctttc

SEQ ID NO: 261488 - DNA, 25 bp, probe
ggcgtccttccagaggctctggaca

SEQ ID NO: 261489 - DNA, 25 bp, probe
ggcgttttctgagcatacctggaaa

SEQ ID NO: 261490 - DNA, 25 bp, probe
ggcgtttttgcgagaactgctgaaa

SEQ ID NO: 261491 - DNA, 25 bp, probe
ggcgttttggaatgcaatttgcaca

SEQ ID NO: 261492 - DNA, 25 bp, probe
tggcgttggtggggacactggtacc

SEQ ID NO: 261493 - DNA, 25 bp, probe
ggccttcagggtcaccaggtgacag

SEQ ID NO: 261494 - DNA, 25 bp, probe
ggcctacagagcgtatagcctggtg

SEQ ID NO: 261495 - DNA, 25 bp, probe
ggcctgaaagcacttagcgggcgcg

SEQ ID NO: 261496 - DNA, 25 bp, probe
ggcgcgccaagcgcaaggtgacacg

SEQ ID NO: 261497 - DNA, 25 bp, probe
ggcgctcggagcggaaggtgacgcg

SEQ ID NO: 261498 - DNA, 25 bp, probe
ggcctcgcgaggcaaggctacaggt

SEQ ID NO: 261499 - DNA, 25 bp, probe
ggcctcgcgaggcaaggctacaggt

SEQ ID NO: 261500 - DNA, 25 bp, probe
ggccacctactccaagagtaagttc

SEQ ID NO: 261501 - DNA, 25 bp, probe
ggcgcactgctttgaaacctatagt

SEQ ID NO: 261502 - DNA, 25 bp, probe
ggccctcttggaggaggcgaagatg

SEQ ID NO: 261503 - DNA, 25 bp, probe
ggcccacagcggggaggccaagagg

SEQ ID NO: 261504 - DNA, 25 bp, probe
ggccccaggtggaagcaggcggagg

SEQ ID NO: 261505 - DNA, 25 bp, probe
tggcccaagtttatggcctggagag

SEQ ID NO: 261506 - DNA, 25 bp, probe
ggcccaaggtatccaagcctgggga

SEQ ID NO: 261507 - DNA, 25 bp, probe
ggcccacaggtttaaggctgaggct

SEQ ID NO: 261508 - DNA, 25 bp, probe
ggcccacaggtttaaggctgaggct

SEQ ID NO: 261509 - DNA, 25 bp, probe
ggcccaggagatgtaagacttctgt

SEQ ID NO: 261510 - DNA, 25 bp, probe
ggccactgtggggcttagacatgat

SEQ ID NO: 261511 - DNA, 25 bp, probe
ggccacttggagggtagcagaacaa

SEQ ID NO: 261512 - DNA, 25 bp, probe
ggcctcttgggatgtcagaaatcta

SEQ ID NO: 261513 - DNA, 25 bp, probe
ggccctggggcaaatcatgcccctg

SEQ ID NO: 261514 - DNA, 25 bp, probe
ggccctggggcaaatcatgcccctg

SEQ ID NO: 261515 - DNA, 25 bp, probe
ggcgcgtttgtgtatatctgcctcc

SEQ ID NO: 261516 - DNA, 25 bp, probe
tgtccactttgatttccagacctca

SEQ ID NO: 261517 - DNA, 25 bp, probe
tgtccactttgatttccagacctca

SEQ ID NO: 261518 - DNA, 25 bp, probe
ggccaggttacctacatgaactgca

SEQ ID NO: 261519 - DNA, 25 bp, probe
ggccaggttacctacatgaactgca

SEQ ID NO: 261520 - DNA, 25 bp, probe
ggccaggttaaggatgtaggtcaca

SEQ ID NO: 261521 - DNA, 25 bp, probe
ggcctgttgtaggtggtagggacac

SEQ ID NO: 261522 - DNA, 25 bp, probe
ggccgttgccatgttgacggtgaga

SEQ ID NO: 261523 - DNA, 25 bp, probe
tggctcgtcgttgtatcacaggagg

SEQ ID NO: 261524 - DNA, 25 bp, probe
ggccgactttggactaagcaaggtc

SEQ ID NO: 261525 - DNA, 25 bp, probe
ggcctagtttgggtgcaagtaggtc

SEQ ID NO: 261526 - DNA, 25 bp, probe
ggcgctagatttggggctcagaagg

SEQ ID NO: 261527 - DNA, 25 bp, probe
ggccaagtttcccattaagtggaca

SEQ ID NO: 261528 - DNA, 25 bp, probe
ggcgcaaatccctcaggaagcttga

SEQ ID NO: 261529 - DNA, 25 bp, probe
ggcccaagtccagctggaagcttga

SEQ ID NO: 261530 - DNA, 25 bp, probe
ggccccacccagcagggagttgggg

SEQ ID NO: 261531 - DNA, 25 bp, probe
ggccccacccagcagactgaggggc

SEQ ID NO: 261532 - DNA, 25 bp, probe
ggccccacccagcagactgaggggc

SEQ ID NO: 261533 - DNA, 25 bp, probe
ggcccccggagaagactgaggagga

SEQ ID NO: 261534 - DNA, 25 bp, probe
ggcctcccccaagggtgtgagagga

SEQ ID NO: 261535 - DNA, 25 bp, probe
ggcctacattccaatggggcggagc

SEQ ID NO: 261536 - DNA, 25 bp, probe
ggcctacattccaatggggcggagc

SEQ ID NO: 261537 - DNA, 25 bp, probe
ggccgttctctcgtgggagacgcag

SEQ ID NO: 261538 - DNA, 25 bp, probe
ggccctacttccaggatggatgcat

SEQ ID NO: 261539 - DNA, 25 bp, probe
ggccctagcattactagatgcagtt

SEQ ID NO: 261540 - DNA, 25 bp, probe
ggcctctcagcagttcatatgccgt

SEQ ID NO: 261541 - DNA, 25 bp, probe
ggcctcatgagcagtcagcatgctc

SEQ ID NO: 261542 - DNA, 25 bp, probe
ggccctgacattggagcctgggcat

SEQ ID NO: 261543 - DNA, 25 bp, probe
ggcccttcaatatccatggagtctc

SEQ ID NO: 261544 - DNA, 25 bp, probe
ggccccatacaatgtcatggtgctc

SEQ ID NO: 261545 - DNA, 25 bp, probe
ggccctcattaatgacacttgtccc

SEQ ID NO: 261546 - DNA, 25 bp, probe
ggccctcattaatgacacttgtccc

SEQ ID NO: 261547 - DNA, 25 bp, probe
ggcctgcttcacaacagacatttcc

SEQ ID NO: 261548 - DNA, 25 bp, probe
ggcccaggagatcaggcatcttctc

SEQ ID NO: 261549 - DNA, 25 bp, probe
ggcccaaatgtcagggttctgctcg

SEQ ID NO: 261550 - DNA, 25 bp, probe
ggcccttatgacatggtgttccaaa

SEQ ID NO: 261551 - DNA, 25 bp, probe
ggcccatccatcttatgaggatccc

SEQ ID NO: 261552 - DNA, 25 bp, probe
ggccccactcacaatgatggtgcag

SEQ ID NO: 261553 - DNA, 25 bp, probe
ggccccactcacaatgatggtgcag

SEQ ID NO: 261554 - DNA, 25 bp, probe
ggcctgccacagcctagatgggcag

SEQ ID NO: 261555 - DNA, 25 bp, probe
ggcgttcaagtctagtcgagcaagc

SEQ ID NO: 261556 - DNA, 25 bp, probe
ggcgcttcaggcggagttggtactt

SEQ ID NO: 261557 - DNA, 25 bp, probe
ggccctgaggcggatgtatggtcac

SEQ ID NO: 261558 - DNA, 25 bp, probe
ggccctgcagggagtctgcattcaa

SEQ ID NO: 261559 - DNA, 25 bp, probe
tggacccatttcagtccattgcagc

SEQ ID NO: 261560 - DNA, 25 bp, probe
tggatcctgaacaggtacctgagct

SEQ ID NO: 261561 - DNA, 25 bp, probe
tggctcctgggaacgagaactactg

SEQ ID NO: 261562 - DNA, 25 bp, probe
ggcctacatggaacgcatgaactac

SEQ ID NO: 261563 - DNA, 25 bp, probe
ggcgctgccgcgcagcttgaacgac

SEQ ID NO: 261564 - DNA, 25 bp, probe
ggcccagcgcagcgcttgcaaagag

SEQ ID NO: 261565 - DNA, 25 bp, probe
ggcccaagatctctgctcagagaag

SEQ ID NO: 261566 - DNA, 25 bp, probe
ggccaaagtcaaatccaaggctgag

SEQ ID NO: 261567 - DNA, 25 bp, probe
ggcgcgacagtgtagaaagtggctg

SEQ ID NO: 261568 - DNA, 25 bp, probe
ggcgatggatgtcaaaagtggtgga

SEQ ID NO: 261569 - DNA, 25 bp, probe
ggcgatggatgtcaaaagtggtgga

SEQ ID NO: 261570 - DNA, 25 bp, probe
ggcgatgtgttatagacggtgctca

SEQ ID NO: 261571 - DNA, 25 bp, probe
ggcgatgtgttatagacggtgctca

SEQ ID NO: 261572 - DNA, 25 bp, probe
ggcgagtggtggaaggcgcagtccc

SEQ ID NO: 261573 - DNA, 25 bp, probe
ggcgcagtggtttgtggatgcaccc

SEQ ID NO: 261574 - DNA, 25 bp, probe
ggcgcagtggtttgtggatgcaccc

SEQ ID NO: 261575 - DNA, 25 bp, probe
ggcctgtagtggtggagacacgccc

SEQ ID NO: 261576 - DNA, 25 bp, probe
ggccttcagggagtgagggattatc

SEQ ID NO: 261577 - DNA, 25 bp, probe
ggcgctacagcaggagtgcatgagg

SEQ ID NO: 261578 - DNA, 25 bp, probe
ggcgccagagctgcagagctagtgt

SEQ ID NO: 261579 - DNA, 25 bp, probe
ggcccagcgatgccaaggaggtcat

SEQ ID NO: 261580 - DNA, 25 bp, probe
ggcccagcgatgccaaggaggtcat

SEQ ID NO: 261581 - DNA, 25 bp, probe
ggcccacggcaggagggcggatctt

SEQ ID NO: 261582 - DNA, 25 bp, probe
ggccaccaagtggaggggggctgct

SEQ ID NO: 261583 - DNA, 25 bp, probe
ggccctggagatggggggcctggct

SEQ ID NO: 261584 - DNA, 25 bp, probe
ggcccagtggctgagaggagccggc

SEQ ID NO: 261585 - DNA, 25 bp, probe
ggcccagtggctgagaggagccggc

SEQ ID NO: 261586 - DNA, 25 bp, probe
ggccagcaaggtggaagggccccca

SEQ ID NO: 261587 - DNA, 25 bp, probe
ggcccagcaggggaggggcccctgc

SEQ ID NO: 261588 - DNA, 25 bp, probe
ggcccagaagatcagaaggcgccca

SEQ ID NO: 261589 - DNA, 25 bp, probe
ggcccagaggatcacggggctgcga

SEQ ID NO: 261590 - DNA, 25 bp, probe
ggcccagaggatcacggggctgcga

SEQ ID NO: 261591 - DNA, 25 bp, probe
ggcccagatagataaggagagtgat

SEQ ID NO: 261592 - DNA, 25 bp, probe
ggcccagaagacccaggcagtgtag

SEQ ID NO: 261593 - DNA, 25 bp, probe
ggcccacaaaagccaggactctctg

SEQ ID NO: 261594 - DNA, 25 bp, probe
ggcccgcaataaaagcaacacccct

SEQ ID NO: 261595 - DNA, 25 bp, probe
ggccctgcaaaaatataaccattac

SEQ ID NO: 261596 - DNA, 25 bp, probe
ggccctgcaaaaatataaccattac

SEQ ID NO: 261597 - DNA, 25 bp, probe
ggcccaggaaagatctgcatccata

SEQ ID NO: 261598 - DNA, 25 bp, probe
ggcgctgcaggaagaatgccttcca

SEQ ID NO: 261599 - DNA, 25 bp, probe
ggcctgaagcattactggttcacat

SEQ ID NO: 261600 - DNA, 25 bp, probe
tggcctgacgactcgtgctattttt

SEQ ID NO: 261601 - DNA, 25 bp, probe
ggccaagaactcagtcatttttctg

SEQ ID NO: 261602 - DNA, 25 bp, probe
ggcctggaaacgattttctgtatga

SEQ ID NO: 261603 - DNA, 25 bp, probe
ggcctagagaagggcgtttgctttg

SEQ ID NO: 261604 - DNA, 25 bp, probe
ggccgaagtcagcgagttttatttg

SEQ ID NO: 261605 - DNA, 25 bp, probe
ggccaaggtcagcgactttggtctc

SEQ ID NO: 261606 - DNA, 25 bp, probe
ggccaaggacactgaattttccacc

SEQ ID NO: 261607 - DNA, 25 bp, probe
ggccttgaacaactggtttatctac

SEQ ID NO: 261608 - DNA, 25 bp, probe
ggccttgtaaggctgtttccttttg

SEQ ID NO: 261609 - DNA, 25 bp, probe
ggccttctacagctattactgaatt

SEQ ID NO: 261610 - DNA, 25 bp, probe
ggcctataccagtattttctagttt

SEQ ID NO: 261611 - DNA, 25 bp, probe
tggccattactacactttttacttt

SEQ ID NO: 261612 - DNA, 25 bp, probe
ggcctatactagtccacgtcatgga

SEQ ID NO: 261613 - DNA, 25 bp, probe
ggcctgaactgggccattgatcaga

SEQ ID NO: 261614 - DNA, 25 bp, probe
ggcctgtagtgacacattactcaat

SEQ ID NO: 261615 - DNA, 25 bp, probe
ggccttagtgagcgagtcatggatt

SEQ ID NO: 261616 - DNA, 25 bp, probe
ggcctgtacgaggtactcatggaaa

SEQ ID NO: 261617 - DNA, 25 bp, probe
ggcctctagagggtacatagtacac

SEQ ID NO: 261618 - DNA, 25 bp, probe
ggcgctctagaggataacaagcata

SEQ ID NO: 261619 - DNA, 25 bp, probe
ggcgctgaagagatatattacaaac

SEQ ID NO: 261620 - DNA, 25 bp, probe
ggcgctgaagagatatattacaaac

SEQ ID NO: 261621 - DNA, 25 bp, probe
ggcgctgaagtgcctgaagtgatca

SEQ ID NO: 261622 - DNA, 25 bp, probe
ggcgcatgcggcagcagagaaagca

SEQ ID NO: 261623 - DNA, 25 bp, probe
ggcgcaccaggttggagagacaatt

SEQ ID NO: 261624 - DNA, 25 bp, probe
ggccctcagcttttagagacacaaa

SEQ ID NO: 261625 - DNA, 25 bp, probe
ggcccttgctgggtgagggcacacc

SEQ ID NO: 261626 - DNA, 25 bp, probe
ggcccttgctgggtgagggcacacc

SEQ ID NO: 261627 - DNA, 25 bp, probe
ggccgagagtggggatgggcgcacc

SEQ ID NO: 261628 - DNA, 25 bp, probe
ggccgcagctgtgtggcatggaact

SEQ ID NO: 261629 - DNA, 25 bp, probe
ggcctcatggtctgctgtgcagaga

SEQ ID NO: 261630 - DNA, 25 bp, probe
ggcctatgcctttgagagcaagacc

SEQ ID NO: 261631 - DNA, 25 bp, probe
ggcctatgcctttgagagcaagacc

SEQ ID NO: 261632 - DNA, 25 bp, probe
ggcctgtcctgataagcgctatgcc

SEQ ID NO: 261633 - DNA, 25 bp, probe
ggcctgtgggagcaagacatcatct

SEQ ID NO: 261634 - DNA, 25 bp, probe
tggccagtgggcagggaatcctgga

SEQ ID NO: 261635 - DNA, 25 bp, probe
ggccgttactagtggatccgagctc

SEQ ID NO: 261636 - DNA, 25 bp, probe
ggccgagtaaagtgtgatcattact

SEQ ID NO: 261637 - DNA, 25 bp, probe
ggccgagtacgagtttgactctcct

SEQ ID NO: 261638 - DNA, 25 bp, probe
ggcccaaaagctgttgcactacctc

SEQ ID NO: 261639 - DNA, 25 bp, probe
ggcctgaaaagtgctggccggcggc

SEQ ID NO: 261640 - DNA, 25 bp, probe
ggccgaagaggtgcaggcctgggcg

SEQ ID NO: 261641 - DNA, 25 bp, probe
ggccgaaggtcaggactcatctggg

SEQ ID NO: 261642 - DNA, 25 bp, probe
ggccgaaggtcaggactcatctggg

SEQ ID NO: 261643 - DNA, 25 bp, probe
ggcctgaagtacacattctctgtgg

SEQ ID NO: 261644 - DNA, 25 bp, probe
ggcctgaagatgccccgttattgtc

SEQ ID NO: 261645 - DNA, 25 bp, probe
ggcctgaagatgccccgttattgtc

SEQ ID NO: 261646 - DNA, 25 bp, probe
ggcctgaagatgccccgttattgtc

SEQ ID NO: 261647 - DNA, 25 bp, probe
ggccatacagggaggttcattgtga

SEQ ID NO: 261648 - DNA, 25 bp, probe
tggccaacgacgaggagtcagacga

SEQ ID NO: 261649 - DNA, 25 bp, probe
tggtcaacctttgtgagaagccgta

SEQ ID NO: 261650 - DNA, 25 bp, probe
tggtcaacctttgtgagaagccgta

SEQ ID NO: 261651 - DNA, 25 bp, probe
ggcccttgctttgtatgcaacctta

SEQ ID NO: 261652 - DNA, 25 bp, probe
ggccttagctttctaggccactggg

SEQ ID NO: 261653 - DNA, 25 bp, probe
ggccagtggtttctcaaccagggga

SEQ ID NO: 261654 - DNA, 25 bp, probe
ggccagggtttacccagtgggacag

SEQ ID NO: 261655 - DNA, 25 bp, probe
ggccaggagtcggagtacgggaaca

SEQ ID NO: 261656 - DNA, 25 bp, probe
ggccgagaggggctacagctggtac

SEQ ID NO: 261657 - DNA, 25 bp, probe
ggccggacagggacatacgttgtga

SEQ ID NO: 261658 - DNA, 25 bp, probe
tggccggacagggacatacgttgtg

SEQ ID NO: 261659 - DNA, 25 bp, probe
ggccgaggcaggaagatcacttgag

SEQ ID NO: 261660 - DNA, 25 bp, probe
tggccgcagcggcgagaactttgac

SEQ ID NO: 261661 - DNA, 25 bp, probe
ggcccagcagctctgagcagtattt

SEQ ID NO: 261662 - DNA, 25 bp, probe
tggctctagctacttggactattca

SEQ ID NO: 261663 - DNA, 25 bp, probe
tggctctaccagctggctttgagca

SEQ ID NO: 261664 - DNA, 25 bp, probe
tggcctagccatgtggaattcccta

SEQ ID NO: 261665 - DNA, 25 bp, probe
tggcgttcccacttgatttagccat

SEQ ID NO: 261666 - DNA, 25 bp, probe
tggcggcctacagagcgtatagcct

SEQ ID NO: 261667 - DNA, 25 bp, probe
tggcgggtgaatctcgtgtagcctc

SEQ ID NO: 261668 - DNA, 25 bp, probe
tggcgggaaagctcatcgccagcac

SEQ ID NO: 261669 - DNA, 25 bp, probe
ggccgtgaaacagctgcagcacagc

SEQ ID NO: 261670 - DNA, 25 bp, probe
ggccagctaaacatgcttcatcgtc

SEQ ID NO: 261671 - DNA, 25 bp, probe
ggccaggcatggtggcttacgcctg

SEQ ID NO: 261672 - DNA, 25 bp, probe
ggccaagtgcaattgacttcccttt

SEQ ID NO: 261673 - DNA, 25 bp, probe
ggccagagtgtgtatacccaggctt

SEQ ID NO: 261674 - DNA, 25 bp, probe
ggccgagatgttgatccgaatagga

SEQ ID NO: 261675 - DNA, 25 bp, probe
ggcctggattctgaggcaggaagga

SEQ ID NO: 261676 - DNA, 25 bp, probe
ggcctgaacacctgagggactggac

SEQ ID NO: 261677 - DNA, 25 bp, probe
ggcctgaacacctgagggactggac

SEQ ID NO: 261678 - DNA, 25 bp, probe
ggcctgtaacaagaatggactgtgg

SEQ ID NO: 261679 - DNA, 25 bp, probe
ggcctacaaaaagatcgagctggag

SEQ ID NO: 261680 - DNA, 25 bp, probe
ggccgccagacagacttcggcatgt

SEQ ID NO: 261681 - DNA, 25 bp, probe
ggccgccagacagacttcggcatgt

SEQ ID NO: 261682 - DNA, 25 bp, probe
ggccccatgacagattcatcgaact

SEQ ID NO: 261683 - DNA, 25 bp, probe
ggccctcagagaaggatccagaatc

SEQ ID NO: 261684 - DNA, 25 bp, probe
ggccctcacgtatgaggagaagccg

SEQ ID NO: 261685 - DNA, 25 bp, probe
ggcctgacatatctgagggagaagc

SEQ ID NO: 261686 - DNA, 25 bp, probe
tggcgctcatttctgactgggaatg

SEQ ID NO: 261687 - DNA, 25 bp, probe
ggcctgcaggtgggacttagaggat

SEQ ID NO: 261688 - DNA, 25 bp, probe
ggcccagtgtggggtcatagggctt

SEQ ID NO: 261689 - DNA, 25 bp, probe
ggcccagtgtggggtcatagggctt

SEQ ID NO: 261690 - DNA, 25 bp, probe
ggcccagtgtggacgcactgtggaa

SEQ ID NO: 261691 - DNA, 25 bp, probe
ggccacaggttgaagcagcccgaag

SEQ ID NO: 261692 - DNA, 25 bp, probe
tggccacggtgggcagcccaaaaga

SEQ ID NO: 261693 - DNA, 25 bp, probe
ggcccgggtggcggtcaagaagatc

SEQ ID NO: 261694 - DNA, 25 bp, probe
ggcccagggcttgggtgtagaagac

SEQ ID NO: 261695 - DNA, 25 bp, probe
ggccctagagcttctggatttcaac

SEQ ID NO: 261696 - DNA, 25 bp, probe
ggccctcaagcatgcttggattcat

SEQ ID NO: 261697 - DNA, 25 bp, probe
ggcccataacaatttggtatatgct

SEQ ID NO: 261698 - DNA, 25 bp, probe
ggcctctaacctgtgatgtcacact

SEQ ID NO: 261699 - DNA, 25 bp, probe
ggcctctaacctgtgatgtcacact

SEQ ID NO: 261700 - DNA, 25 bp, probe
ggccccaacaggggatgctcatcac

SEQ ID NO: 261701 - DNA, 25 bp, probe
ggccccagccaaggaacctaaagtg

SEQ ID NO: 261702 - DNA, 25 bp, probe
ggccccagccaaggaacctaaagtg

SEQ ID NO: 261703 - DNA, 25 bp, probe
ggcccaccgaagggtactgaagagc

SEQ ID NO: 261704 - DNA, 25 bp, probe
ggcccacaccaaagtgataagaaga

SEQ ID NO: 261705 - DNA, 25 bp, probe
ggcccactgccctgtgataaaatgt

SEQ ID NO: 261706 - DNA, 25 bp, probe
ggccatcttccttgggaggataatt

SEQ ID NO: 261707 - DNA, 25 bp, probe
ggcctcatcctttgggaggttgcta

SEQ ID NO: 261708 - DNA, 25 bp, probe
ggcctgcacctgatgtggaggtaca

SEQ ID NO: 261709 - DNA, 25 bp, probe
ggccctgtctgcagtcagaggagga

SEQ ID NO: 261710 - DNA, 25 bp, probe
ggccctgtctgcagtcagaggagga

SEQ ID NO: 261711 - DNA, 25 bp, probe
ggccctgtctgcagtcagaggagga

SEQ ID NO: 261712 - DNA, 25 bp, probe
ggcccgtaagttcgcaggcaggggt

SEQ ID NO: 261713 - DNA, 25 bp, probe
ggcgccaagaagcatgggagagagg

SEQ ID NO: 261714 - DNA, 25 bp, probe
ggcccaggagaggttgaagagagag

SEQ ID NO: 261715 - DNA, 25 bp, probe
ggcccagccaagtgcagagaatgtg

SEQ ID NO: 261716 - DNA, 25 bp, probe
ggcctgacgcacaggcggaagctgc

SEQ ID NO: 261717 - DNA, 25 bp, probe
ggcctgacgcacaggcggaagctgc

SEQ ID NO: 261718 - DNA, 25 bp, probe
tggccgatgtacagggacacaccag

SEQ ID NO: 261719 - DNA, 25 bp, probe
tggcatctcagtcaagggcgccaac

SEQ ID NO: 261720 - DNA, 25 bp, probe
tggcatctcagtcaagggcgccaac

SEQ ID NO: 261721 - DNA, 25 bp, probe
tggcccagttcaacgcagccaatga

SEQ ID NO: 261722 - DNA, 25 bp, probe
tggcccagttcaacgcagccaatga

SEQ ID NO: 261723 - DNA, 25 bp, probe
ggcccaggaatcggagcgaagcaga

SEQ ID NO: 261724 - DNA, 25 bp, probe
ggcccagagcaccgtgcaggaagca

SEQ ID NO: 261725 - DNA, 25 bp, probe
ggcctcagagacagcgcgagtagca

SEQ ID NO: 261726 - DNA, 25 bp, probe
ggcctgggactaccaggcctgcacc

SEQ ID NO: 261727 - DNA, 25 bp, probe
ggcctgggactaccaggcctgcacc

SEQ ID NO: 261728 - DNA, 25 bp, probe
ggcctggtcactgtagaagatgagc

SEQ ID NO: 261729 - DNA, 25 bp, probe
ggccgttgccatggtggacggactc

SEQ ID NO: 261730 - DNA, 25 bp, probe
ggccatgttggcaagtgtgacccac

SEQ ID NO: 261731 - DNA, 25 bp, probe
ggccatgttggcaagtgtgacccac

SEQ ID NO: 261732 - DNA, 25 bp, probe
ggccatcttgacagtgttttttctt

SEQ ID NO: 261733 - DNA, 25 bp, probe
tggccatcttgaggggttttctaac

SEQ ID NO: 261734 - DNA, 25 bp, probe
ggcctcttgaggagtcgctgttgaa

SEQ ID NO: 261735 - DNA, 25 bp, probe
ggcctcttgaggagtcgctgttgaa

SEQ ID NO: 261736 - DNA, 25 bp, probe
ggcctcttgaggagtcgctgttgaa

SEQ ID NO: 261737 - DNA, 25 bp, probe
ggccctaaggtgcacatgctgagga

SEQ ID NO: 261738 - DNA, 25 bp, probe
ggccctaaagtcgacatatggtctc

SEQ ID NO: 261739 - DNA, 25 bp, probe
ggccccaaagtggatgtctggttca

SEQ ID NO: 261740 - DNA, 25 bp, probe
ggcccagaaagtgattcatttgtaa

SEQ ID NO: 261741 - DNA, 25 bp, probe
ggcccagcattgctggttctattta

SEQ ID NO: 261742 - DNA, 25 bp, probe
ggcccagcaatgagggacttgggag

SEQ ID NO: 261743 - DNA, 25 bp, probe
ggcccagcaagaagggcttgggttc

SEQ ID NO: 261744 - DNA, 25 bp, probe
ggcccagaaagtctttgggcattgc

SEQ ID NO: 261745 - DNA, 25 bp, probe
tggcctcaataccttgtttaggatt

SEQ ID NO: 261746 - DNA, 25 bp, probe
tggccaaaagagttgttgctgaact

SEQ ID NO: 261747 - DNA, 25 bp, probe
ggccaaaagagttgttgctgaactt

SEQ ID NO: 261748 - DNA, 25 bp, probe
ggccaaggagttcatctctaagctt

SEQ ID NO: 261749 - DNA, 25 bp, probe
ggccaaggactttattcggaagctt

SEQ ID NO: 261750 - DNA, 25 bp, probe
ggccaaaagctgtgaaaatgacctt

SEQ ID NO: 261751 - DNA, 25 bp, probe
ggccaaaatgagtacaaaaggtctg

SEQ ID NO: 261752 - DNA, 25 bp, probe
ggccaacaaaaaacagaacttcaag

SEQ ID NO: 261753 - DNA, 25 bp, probe
ggccatgaaccaaactcagaagatt

SEQ ID NO: 261754 - DNA, 25 bp, probe
ggccatgaaccaaactcagaagatt

SEQ ID NO: 261755 - DNA, 25 bp, probe
ggccatagaccatacatacgatcag

SEQ ID NO: 261756 - DNA, 25 bp, probe
ggcccagccagataatacatgataa

SEQ ID NO: 261757 - DNA, 25 bp, probe
ggcccagcctggagtacagtggcac

SEQ ID NO: 261758 - DNA, 25 bp, probe
ggcccagcctggagtacagtggcac

SEQ ID NO: 261759 - DNA, 25 bp, probe
ggcccggctgcgggagacgtgggcc

SEQ ID NO: 261760 - DNA, 25 bp, probe
ggccctgggcagggggtgatgtgcc

SEQ ID NO: 261761 - DNA, 25 bp, probe
ggcccgttcagtgtggtgtggcagc

SEQ ID NO: 261762 - DNA, 25 bp, probe
ggccatcttccaggtggggtgaggc

SEQ ID NO: 261763 - DNA, 25 bp, probe
ggcccttgctgcagagttggtggag

SEQ ID NO: 261764 - DNA, 25 bp, probe
ggccttggccttggatttgatggag

SEQ ID NO: 261765 - DNA, 25 bp, probe
ggccctggacatcttctttgaggcc

SEQ ID NO: 261766 - DNA, 25 bp, probe
ggccgtggacatgtggtcagtgggc

SEQ ID NO: 261767 - DNA, 25 bp, probe
ggccgtggacaggctagtgagtttc

SEQ ID NO: 261768 - DNA, 25 bp, probe
ggccggctgcaggccaagatggcat

SEQ ID NO: 261769 - DNA, 25 bp, probe
ggccaacagatgaccaagagatgct

SEQ ID NO: 261770 - DNA, 25 bp, probe
tggctgcaacattgtgaccatagtt

SEQ ID NO: 261771 - DNA, 25 bp, probe
tggctgtgatctttgactgctaggg

SEQ ID NO: 261772 - DNA, 25 bp, probe
tggcgtgatatgcacctgcaacgga

SEQ ID NO: 261773 - DNA, 25 bp, probe
tggctgtgatagccatgactccccg

SEQ ID NO: 261774 - DNA, 25 bp, probe
ggcccagtgtggacgcactgtggaa

SEQ ID NO: 261775 - DNA, 25 bp, probe
ggccgcagcggcgagaactttgaca

SEQ ID NO: 261776 - DNA, 25 bp, probe
ggccgagagacttgcaccttggcca

SEQ ID NO: 261777 - DNA, 25 bp, probe
ggccctggcaagtcagtcttagaac

SEQ ID NO: 261778 - DNA, 25 bp, probe
ggccacaagaagtcagctatacaga

SEQ ID NO: 261779 - DNA, 25 bp, probe
ggcctggagagcgtgagctatgaca

SEQ ID NO: 261780 - DNA, 25 bp, probe
ggcctggatggcgacatgttcaact

SEQ ID NO: 261781 - DNA, 25 bp, probe
ggcctgcaggagcacgtcatcaggt

SEQ ID NO: 261782 - DNA, 25 bp, probe
ggcctgggatacggatcatgggaaa

SEQ ID NO: 261783 - DNA, 25 bp, probe
ggcctggcagaaactattatggaaa

SEQ ID NO: 261784 - DNA, 25 bp, probe
ggcctccgaagactgtttgagacaa

SEQ ID NO: 261785 - DNA, 25 bp, probe
ggcctctctaagaagatttacagtg

SEQ ID NO: 261786 - DNA, 25 bp, probe
ggcctccttggcaatgcatttgatg

SEQ ID NO: 261787 - DNA, 25 bp, probe
ggccgtcgctggatcagattgcggc

SEQ ID NO: 261788 - DNA, 25 bp, probe
ggccctccttcagtgagattgccag

SEQ ID NO: 261789 - DNA, 25 bp, probe
ggccctccttcagtgagattgccag

SEQ ID NO: 261790 - DNA, 25 bp, probe
ggccctgcccaatgagactctaggg

SEQ ID NO: 261791 - DNA, 25 bp, probe
ggccctgactcagagggccagagtg

SEQ ID NO: 261792 - DNA, 25 bp, probe
ggccttggctcaaaatggccagaag

SEQ ID NO: 261793 - DNA, 25 bp, probe
ggccttggctcaaaatggccagaag

SEQ ID NO: 261794 - DNA, 25 bp, probe
ggccttggcttggaaggctggagct

SEQ ID NO: 261795 - DNA, 25 bp, probe
tggccttcccgagaggcgtgatgca

SEQ ID NO: 261796 - DNA, 25 bp, probe
ggcctgtcctaagtgagggtctgcg

SEQ ID NO: 261797 - DNA, 25 bp, probe
ggcctgttcaactacaagcggctgc

SEQ ID NO: 261798 - DNA, 25 bp, probe
tggctgttttccaaatacgtgccga

SEQ ID NO: 261799 - DNA, 25 bp, probe
tggctgtttaccatgtcactgccta

SEQ ID NO: 261800 - DNA, 25 bp, probe
tggctttggaagctgagcagtaaga

SEQ ID NO: 261801 - DNA, 25 bp, probe
tggctttggaagctgagcagtaaga

SEQ ID NO: 261802 - DNA, 25 bp, probe
tggtttggccaaaaagtacagagac

SEQ ID NO: 261803 - DNA, 25 bp, probe
tggccttgtgcctactaattcaaca

SEQ ID NO: 261804 - DNA, 25 bp, probe
ggcctgtgtcatgtgctaattccta

SEQ ID NO: 261805 - DNA, 25 bp, probe
ggcctgagttagactatttcccaca

SEQ ID NO: 261806 - DNA, 25 bp, probe
ggcctgagttagactatttcccaca

SEQ ID NO: 261807 - DNA, 25 bp, probe
tggccaggtataactttgccgcccg

SEQ ID NO: 261808 - DNA, 25 bp, probe
tggccaggtataactttgccgcccg

SEQ ID NO: 261809 - DNA, 25 bp, probe
tggccaggtataactttgccgcccg

SEQ ID NO: 261810 - DNA, 25 bp, probe
ggccaaggaatacattgaccccgaa

SEQ ID NO: 261811 - DNA, 25 bp, probe
ggccaaggagtacctgtaccacaag

SEQ ID NO: 261812 - DNA, 25 bp, probe
ggccttggatttcctggacaaactg

SEQ ID NO: 261813 - DNA, 25 bp, probe
ggcctgatgagtatgctctaaaaga

SEQ ID NO: 261814 - DNA, 25 bp, probe
ggccgtggaagggcaacacaaggac

SEQ ID NO: 261815 - DNA, 25 bp, probe
ggccggagacctcaagccggcagac

SEQ ID NO: 261816 - DNA, 25 bp, probe
tggccggagacctcaagccggcaga

SEQ ID NO: 261817 - DNA, 25 bp, probe
tggcgaggaactcaataaagtgctt

SEQ ID NO: 261818 - DNA, 25 bp, probe
ggcctgataactctgtacgaggctt

SEQ ID NO: 261819 - DNA, 25 bp, probe
tggcctaatcacctttccaaggccc

SEQ ID NO: 261820 - DNA, 25 bp, probe
ggccgagtatggctgcctcaaggcc

SEQ ID NO: 261821 - DNA, 25 bp, probe
ggccggggctgaagccacacagccc

SEQ ID NO: 261822 - DNA, 25 bp, probe
ggccgcgggctcagctaccgcggcc

SEQ ID NO: 261823 - DNA, 25 bp, probe
ggcccgggccatcgccattgctgcg

SEQ ID NO: 261824 - DNA, 25 bp, probe
ggccctgtggtctgcaatggacagc

SEQ ID NO: 261825 - DNA, 25 bp, probe
ggcctcttcgctacacaattgaaga

SEQ ID NO: 261826 - DNA, 25 bp, probe
ggccttcaccatacagacttgacag

SEQ ID NO: 261827 - DNA, 25 bp, probe
gtccatggaaaaggtcctactgagc

SEQ ID NO: 261828 - DNA, 25 bp, probe
ggccgtgacacaggttctggccaat

SEQ ID NO: 261829 - DNA, 25 bp, probe
ggcctatgaccgctatgtggccatt

SEQ ID NO: 261830 - DNA, 25 bp, probe
ggccttggatcgctaagctggctct

SEQ ID NO: 261831 - DNA, 25 bp, probe
ggccttcgtcatcagcaacatcggc

SEQ ID NO: 261832 - DNA, 25 bp, probe
ggccttcgtcatcagcaacatcggc

SEQ ID NO: 261833 - DNA, 25 bp, probe
ggccttcgacatcgtcaagcagagg

SEQ ID NO: 261834 - DNA, 25 bp, probe
ggccaacgaagcgtgatcagccgtg

SEQ ID NO: 261835 - DNA, 25 bp, probe
tggccaatctagtcctggaacaatt

SEQ ID NO: 261836 - DNA, 25 bp, probe
ggccaatctagtcctggaacaattg

SEQ ID NO: 261837 - DNA, 25 bp, probe
ggccaagaagaggaccaacatcatt

SEQ ID NO: 261838 - DNA, 25 bp, probe
ggccagagccaagaaacactttcag

SEQ ID NO: 261839 - DNA, 25 bp, probe
ggccagcctcaagagggctttcgag

SEQ ID NO: 261840 - DNA, 25 bp, probe
ggccagcctcaagagggctttcgag

SEQ ID NO: 261841 - DNA, 25 bp, probe
ggcctgcccacaaactgactttgtg

SEQ ID NO: 261842 - DNA, 25 bp, probe
ggcctcatctcatatactgaaccta

SEQ ID NO: 261843 - DNA, 25 bp, probe
ggcccccaatggtcagaagagccat

SEQ ID NO: 261844 - DNA, 25 bp, probe
ggcccccatctgggatgatgggaga

SEQ ID NO: 261845 - DNA, 25 bp, probe
ggcccccacatggtgatgttgacat

SEQ ID NO: 261846 - DNA, 25 bp, probe
tggcccccacatggtgatgttgaca

SEQ ID NO: 261847 - DNA, 25 bp, probe
tggcccccacatggtgatgttgaca

SEQ ID NO: 261848 - DNA, 25 bp, probe
ggccctgctccaggagatcaaggag

SEQ ID NO: 261849 - DNA, 25 bp, probe
ggccctgctccaggagatcaaggag

SEQ ID NO: 261850 - DNA, 25 bp, probe
ggccctgtgcaggctgaaaaccatg

SEQ ID NO: 261851 - DNA, 25 bp, probe
ggccgccatgcactcaataaagaat

SEQ ID NO: 261852 - DNA, 25 bp, probe
ggccgctcagcacagaagaaggatg

SEQ ID NO: 261853 - DNA, 25 bp, probe
ggccgctcagcacagaagaaggatg

SEQ ID NO: 261854 - DNA, 25 bp, probe
ggccctgagcatgcaggccaaggag

SEQ ID NO: 261855 - DNA, 25 bp, probe
ggcccgagtgatagaggacagcgag

SEQ ID NO: 261856 - DNA, 25 bp, probe
ggccctgaggatgaagctcatggag

SEQ ID NO: 261857 - DNA, 25 bp, probe
ggccgtgcaagcttaggctggggat

SEQ ID NO: 261858 - DNA, 25 bp, probe
ggcccgcaagttggccgaggtgggc

SEQ ID NO: 261859 - DNA, 25 bp, probe
ggccccaacatgggcaagggtggag

SEQ ID NO: 261860 - DNA, 25 bp, probe
ggccccaacatgggcaagggtggag

SEQ ID NO: 261861 - DNA, 25 bp, probe
ggcccctggtgtgcaaggtgaatgg

SEQ ID NO: 261862 - DNA, 25 bp, probe
ggccccagaggtcctaagtggagga

SEQ ID NO: 261863 - DNA, 25 bp, probe
tggccccagaggtcctaagtggagg

SEQ ID NO: 261864 - DNA, 25 bp, probe
tggccccagaggtcctaagtggagg

SEQ ID NO: 261865 - DNA, 25 bp, probe
ggccccgagagggcgagaccagagg

SEQ ID NO: 261866 - DNA, 25 bp, probe
ggccccaagagcggcttcctggggc

SEQ ID NO: 261867 - DNA, 25 bp, probe
ggccccgatgaggggtcctgaggag

SEQ ID NO: 261868 - DNA, 25 bp, probe
ggccagcctagaggtggcttctggc

SEQ ID NO: 261869 - DNA, 25 bp, probe
ggcccgctgatgtgtgatggtgtgc

SEQ ID NO: 261870 - DNA, 25 bp, probe
ggcctcagatgtttggagctttgga

SEQ ID NO: 261871 - DNA, 25 bp, probe
ggccctgatgatgatgaagtttgcg

SEQ ID NO: 261872 - DNA, 25 bp, probe
ggccatcctgcagaagcaactgtct

SEQ ID NO: 261873 - DNA, 25 bp, probe
ggcctgcatatggtatagcatcgga

SEQ ID NO: 261874 - DNA, 25 bp, probe
ggccgaagccatcggcatcatgaga

SEQ ID NO: 261875 - DNA, 25 bp, probe
ggcctggattatctgcactcagagc

SEQ ID NO: 261876 - DNA, 25 bp, probe
ggcctggattatctgcactcagagc

SEQ ID NO: 261877 - DNA, 25 bp, probe
ggcctatgagcctaatgaccacagc

SEQ ID NO: 261878 - DNA, 25 bp, probe
ggcctatgagccggtccagaggccc

SEQ ID NO: 261879 - DNA, 25 bp, probe
ggccaaagcggtacaaggcccgcgg

SEQ ID NO: 261880 - DNA, 25 bp, probe
ggccaaagcggtacaaggcccgcgg

SEQ ID NO: 261881 - DNA, 25 bp, probe
ggccaagacgtgatcaaggctgtgg

SEQ ID NO: 261882 - DNA, 25 bp, probe
ggccacgacagggctctgagaggct

SEQ ID NO: 261883 - DNA, 25 bp, probe
ggccagcgtctacgacggcaagtac

SEQ ID NO: 261884 - DNA, 25 bp, probe
ggccgccatctacgaggagaaggag

SEQ ID NO: 261885 - DNA, 25 bp, probe
ggccgacttcggaatgtgcaaggag

SEQ ID NO: 261886 - DNA, 25 bp, probe
ggccttttcaagcagtggatggaga

SEQ ID NO: 261887 - DNA, 25 bp, probe
ggccttcggaagcatgttgtgtgag

SEQ ID NO: 261888 - DNA, 25 bp, probe
ggccttcggaagcatgttgtgtgag

SEQ ID NO: 261889 - DNA, 25 bp, probe
ggcccctggtgacatttgtggtggg

SEQ ID NO: 261890 - DNA, 25 bp, probe
ggcccctggatgaatatcctgtggg

SEQ ID NO: 261891 - DNA, 25 bp, probe
ggccgacgtgagctacctgatggcc

SEQ ID NO: 261892 - DNA, 25 bp, probe
tggccgacgtgagctacctgatggc

SEQ ID NO: 261893 - DNA, 25 bp, probe
ggcctgcacggagctgggcatccgc

SEQ ID NO: 261894 - DNA, 25 bp, probe
ggcctgctcaaagcggcaggctccc

SEQ ID NO: 261895 - DNA, 25 bp, probe
ggcctggatacagtagaggtgtgcc

SEQ ID NO: 261896 - DNA, 25 bp, probe
ggccgagcaaaggagcaggctccct

SEQ ID NO: 261897 - DNA, 25 bp, probe
ggccgatctattgtgagcagcccac

SEQ ID NO: 261898 - DNA, 25 bp, probe
ggccgtgtatgggatgaccttcaaa

SEQ ID NO: 261899 - DNA, 25 bp, probe
ggcctggaattggatacaactcaac

SEQ ID NO: 261900 - DNA, 25 bp, probe
ggcctggaattggatacaactcaac

SEQ ID NO: 261901 - DNA, 25 bp, probe
ggcctgttccatggcataacactaa

SEQ ID NO: 261902 - DNA, 25 bp, probe
ggccatggatgttgccttagcctta

SEQ ID NO: 261903 - DNA, 25 bp, probe
ggcctggagcaacatgtggctctgt

SEQ ID NO: 261904 - DNA, 25 bp, probe
ggcctggagcaacatgtggctctgt

SEQ ID NO: 261905 - DNA, 25 bp, probe
tggcctgctactggcgagtgtttgt

SEQ ID NO: 261906 - DNA, 25 bp, probe
ggcctgctactggcgagtgtttgtg

SEQ ID NO: 261907 - DNA, 25 bp, probe
ggcctggacgaggaggcctctgggc

SEQ ID NO: 261908 - DNA, 25 bp, probe
ggccgagggcatggagtacctggag

SEQ ID NO: 261909 - DNA, 25 bp, probe
ggccgagggcagagatggacgtgag

SEQ ID NO: 261910 - DNA, 25 bp, probe
ggccagaaggacagcaggaaagggg

SEQ ID NO: 261911 - DNA, 25 bp, probe
ggccatggaggcagtaggacaaggt

SEQ ID NO: 261912 - DNA, 25 bp, probe
ggccatcgtggtagtaaacctgatc

SEQ ID NO: 261913 - DNA, 25 bp, probe
ggccactatgcgggtagactacgac

SEQ ID NO: 261914 - DNA, 25 bp, probe
tggccactatgcgggtagactacga

SEQ ID NO: 261915 - DNA, 25 bp, probe
ggccagttcgttggatggctcttga

SEQ ID NO: 261916 - DNA, 25 bp, probe
ggccagactctcatcttgatgtctt

SEQ ID NO: 261917 - DNA, 25 bp, probe
ggccacactgtcaacatttgttaga

SEQ ID NO: 261918 - DNA, 25 bp, probe
ggccccgtgatcaaggtgaacagca

SEQ ID NO: 261919 - DNA, 25 bp, probe
ggccccgtgatcaaggtgaacagca

SEQ ID NO: 261920 - DNA, 25 bp, probe
ggccccaagtgcagagtcaaggcag

SEQ ID NO: 261921 - DNA, 25 bp, probe
ggccgccagaggacgttcagaagga

SEQ ID NO: 261922 - DNA, 25 bp, probe
ggccccatggagcgggcaggggcag

SEQ ID NO: 261923 - DNA, 25 bp, probe
ggccccaggcaaggtagagggcgag

SEQ ID NO: 261924 - DNA, 25 bp, probe
ggccaacggcgagctagaggtgaag

SEQ ID NO: 261925 - DNA, 25 bp, probe
ggccaaccgcgagaagatgacccag

SEQ ID NO: 261926 - DNA, 25 bp, probe
ggccaaccgcgagaagatgacccag

SEQ ID NO: 261927 - DNA, 25 bp, probe
ggccacctcctaaaaggcccagaga

SEQ ID NO: 261928 - DNA, 25 bp, probe
ggcccctgattatactacaccagaa

SEQ ID NO: 261929 - DNA, 25 bp, probe
ggccgacaaatactactacacaaga

SEQ ID NO: 261930 - DNA, 25 bp, probe
ggccgtcaacaacggtgactttgag

SEQ ID NO: 261931 - DNA, 25 bp, probe
ggccgtcaacaacggtgactttgag

SEQ ID NO: 261932 - DNA, 25 bp, probe
ggccgtcaacaacggtgactttgag

SEQ ID NO: 261933 - DNA, 25 bp, probe
ggccgtcaacaacggtgactttgag

SEQ ID NO: 261934 - DNA, 25 bp, probe
ggccccaattatccaatagtctaat

SEQ ID NO: 261935 - DNA, 25 bp, probe
ggccaactttatcctatcacttgaa

SEQ ID NO: 261936 - DNA, 25 bp, probe
ggccaagtgcataagactaaggagc

SEQ ID NO: 261937 - DNA, 25 bp, probe
ggcctctggacaagacaaggggcac

SEQ ID NO: 261938 - DNA, 25 bp, probe
ggcctctggacaagacaaggggcac

SEQ ID NO: 261939 - DNA, 25 bp, probe
ggccactgaactccaagataaagac

SEQ ID NO: 261940 - DNA, 25 bp, probe
ggcctatggtgtcccagtaaagcca

SEQ ID NO: 261941 - DNA, 25 bp, probe
ggcctatggtgtcccagtaaagcca

SEQ ID NO: 261942 - DNA, 25 bp, probe
ggcctatccggcgcagtaattacag

SEQ ID NO: 261943 - DNA, 25 bp, probe
ggcctatccctggaaggacagtatc

SEQ ID NO: 261944 - DNA, 25 bp, probe
ggccgcatacctgaaagatggttac

SEQ ID NO: 261945 - DNA, 25 bp, probe
tgtgcccagtacagaaaggtgttac

SEQ ID NO: 261946 - DNA, 25 bp, probe
tggcggagtacttggaagcctattg

SEQ ID NO: 261947 - DNA, 25 bp, probe
ggccaagaaattcgacagcctcctg

SEQ ID NO: 261948 - DNA, 25 bp, probe
ggccaagaaattcgacagcctcctg

SEQ ID NO: 261949 - DNA, 25 bp, probe
ggccaaaatcaacatcgtctaccag

SEQ ID NO: 261950 - DNA, 25 bp, probe
ggccaagaaggatctagtctgccca

SEQ ID NO: 261951 - DNA, 25 bp, probe
ggccaaggaacaactgagtcgcgag

SEQ ID NO: 261952 - DNA, 25 bp, probe
ggccaagggaccagagaagcagttg

SEQ ID NO: 261953 - DNA, 25 bp, probe
ggccggtggaccagactgactggtg

SEQ ID NO: 261954 - DNA, 25 bp, probe
ggcctggtggaaggaggcgcacttt

SEQ ID NO: 261955 - DNA, 25 bp, probe
ggcctgtgtcctgaaggccacggtt

SEQ ID NO: 261956 - DNA, 25 bp, probe
ggcctgtgtcctgaaggccacggtt

SEQ ID NO: 261957 - DNA, 25 bp, probe
tggcctgtgtcctgaaggccacggt

SEQ ID NO: 261958 - DNA, 25 bp, probe
tggcctgagtcgtgggggatggact

SEQ ID NO: 261959 - DNA, 25 bp, probe
ggcctgagtcgtgggggatggactc

SEQ ID NO: 261960 - DNA, 25 bp, probe
ggcctggtcctgagggcaggacagg

SEQ ID NO: 261961 - DNA, 25 bp, probe
ggccatcctttgtgaagctggaaca

SEQ ID NO: 261962 - DNA, 25 bp, probe
ggccacgctaggtgaacaggggctg

SEQ ID NO: 261963 - DNA, 25 bp, probe
ggccacgggaaagagctggggcagg

SEQ ID NO: 261964 - DNA, 25 bp, probe
ggccacagcaggaaatccctggggc

SEQ ID NO: 261965 - DNA, 25 bp, probe
ggccacagatgggcacattcttgtg

SEQ ID NO: 261966 - DNA, 25 bp, probe
ggccattgaagtgcgctctttgcaa

SEQ ID NO: 261967 - DNA, 25 bp, probe
ggccattgacgtggcctgcgatctc

SEQ ID NO: 261968 - DNA, 25 bp, probe
ggccattgacgtggcctgcgatctc

SEQ ID NO: 261969 - DNA, 25 bp, probe
ggccttgcactggcagccaagatca

SEQ ID NO: 261970 - DNA, 25 bp, probe
ggccttgcactggcagccaagatca

SEQ ID NO: 261971 - DNA, 25 bp, probe
ggcctcagcttgggctagagatgcc

SEQ ID NO: 261972 - DNA, 25 bp, probe
ggccatgcagctgtcgtggagctgc

SEQ ID NO: 261973 - DNA, 25 bp, probe
ggcctcgctcaagattgacttgaga

SEQ ID NO: 261974 - DNA, 25 bp, probe
ggcctccatccagaatggcaaagac

SEQ ID NO: 261975 - DNA, 25 bp, probe
ggcctccatccagaatggcaaagac

SEQ ID NO: 261976 - DNA, 25 bp, probe
ggcctccattcaggactacacgagg

SEQ ID NO: 261977 - DNA, 25 bp, probe
ggcctcctatggtaaagacgaagac

SEQ ID NO: 261978 - DNA, 25 bp, probe
ggccttgctagagtaattgaagata

SEQ ID NO: 261979 - DNA, 25 bp, probe
ggcctgtctatatttttaaaaagca

SEQ ID NO: 261980 - DNA, 25 bp, probe
tgatccccaattttttttgaaagag

SEQ ID NO: 261981 - DNA, 25 bp, probe
tgacacccctgacttttattaaaga

SEQ ID NO: 261982 - DNA, 25 bp, probe
tgaactcgggtttcttagtaagaca

SEQ ID NO: 261983 - DNA, 25 bp, probe
tggccggggtcttttctgtaagaga

SEQ ID NO: 261984 - DNA, 25 bp, probe
tggcctgggagttcagcttttagag

SEQ ID NO: 261985 - DNA, 25 bp, probe
tggcctctggctagtcagtttttca

SEQ ID NO: 261986 - DNA, 25 bp, probe
tggcctaggtcaccaattttatata

SEQ ID NO: 261987 - DNA, 25 bp, probe
ggcctaattctgaaagtcctcatat

SEQ ID NO: 261988 - DNA, 25 bp, probe
ggcctaaatcttaagtgagcagttt

SEQ ID NO: 261989 - DNA, 25 bp, probe
tggcctaaatcttaagtgagcagtt

SEQ ID NO: 261990 - DNA, 25 bp, probe
ggcctgggatgtttctgaactttgg

SEQ ID NO: 261991 - DNA, 25 bp, probe
ggcctcctggtgtttggattttgat

SEQ ID NO: 261992 - DNA, 25 bp, probe
ggccgcactactctttgatgtatta

SEQ ID NO: 261993 - DNA, 25 bp, probe
ggccaactaatcttctgtgcagata

SEQ ID NO: 261994 - DNA, 25 bp, probe
ggccaactaatcttctgtgcagata

SEQ ID NO: 261995 - DNA, 25 bp, probe
ggcctgatcatagtattctgtcaga

SEQ ID NO: 261996 - DNA, 25 bp, probe
ggccttaagtatcttcatgaaaacc

SEQ ID NO: 261997 - DNA, 25 bp, probe
tggcctttcgtatctccatgaaaac

SEQ ID NO: 261998 - DNA, 25 bp, probe
ggccttgttttgactctcagagaac

SEQ ID NO: 261999 - DNA, 25 bp, probe
ggccttttatttctcagtacaatgt

SEQ ID NO: 262000 - DNA, 25 bp, probe
ggccttttttgtcagcataatcgtc

SEQ ID NO: 262001 - DNA, 25 bp, probe
tccagttaccgtatactactcagtc

SEQ ID NO: 262002 - DNA, 25 bp, probe
tccagttaccgtatactactcagtc

SEQ ID NO: 262003 - DNA, 25 bp, probe
tcgagctcaacggtttaccctcgga

SEQ ID NO: 262004 - DNA, 25 bp, probe
tcgagctcaacggtttaccctcgga

SEQ ID NO: 262005 - DNA, 25 bp, probe
tggagtccacgtttaactcctctgg

SEQ ID NO: 262006 - DNA, 25 bp, probe
tggactcctcagaggacgacaccga

SEQ ID NO: 262007 - DNA, 25 bp, probe
ggcctcctgagaaggacaggcaaag

SEQ ID NO: 262008 - DNA, 25 bp, probe
tggatccctgtgtggtaggagttgg

SEQ ID NO: 262009 - DNA, 25 bp, probe
tggcccaggcctcggtagggggcca

SEQ ID NO: 262010 - DNA, 25 bp, probe
tggcccaggcctcggtagggggcca

SEQ ID NO: 262011 - DNA, 25 bp, probe
ggccggaggaaccgaggtgttgcca

SEQ ID NO: 262012 - DNA, 25 bp, probe
ggccggagatgagccgaggcttgct

SEQ ID NO: 262013 - DNA, 25 bp, probe
ggccagggtgctccctgggattcac

SEQ ID NO: 262014 - DNA, 25 bp, probe
ggccagggtgctccctgggattcac

SEQ ID NO: 262015 - DNA, 25 bp, probe
tggctggggtccccgaagatctcag

SEQ ID NO: 262016 - DNA, 25 bp, probe
tggctggtgagttcacccgactgga

SEQ ID NO: 262017 - DNA, 25 bp, probe
tggcgagtgagaaacaacagggtga

SEQ ID NO: 262018 - DNA, 25 bp, probe
ggccagcgtgtacaacacgcggcac

SEQ ID NO: 262019 - DNA, 25 bp, probe
ggccagcgtgcattcaaacgcactg

SEQ ID NO: 262020 - DNA, 25 bp, probe
ggcctggtgactccatgatggacga

SEQ ID NO: 262021 - DNA, 25 bp, probe
ggcctggtcagttatgacaacagca

SEQ ID NO: 262022 - DNA, 25 bp, probe
ggcctgggcagatgatgccagcacc

SEQ ID NO: 262023 - DNA, 25 bp, probe
ggccttggagcatgagaccagtgac

SEQ ID NO: 262024 - DNA, 25 bp, probe
ggccgtgatgacctgagacaagatg

SEQ ID NO: 262025 - DNA, 25 bp, probe
ggccagtaagctcagaaagatgact

SEQ ID NO: 262026 - DNA, 25 bp, probe
ggccattaagatcctggacaagacc

SEQ ID NO: 262027 - DNA, 25 bp, probe
ggccattcttgatggaaccagatcc

SEQ ID NO: 262028 - DNA, 25 bp, probe
ggccttcttggaagagaacaacctg

SEQ ID NO: 262029 - DNA, 25 bp, probe
ggccatagtttcagagaatcaccct

SEQ ID NO: 262030 - DNA, 25 bp, probe
ggccatgggtccagaggatactact

SEQ ID NO: 262031 - DNA, 25 bp, probe
ggccatgggtccagaggatactact

SEQ ID NO: 262032 - DNA, 25 bp, probe
ggccatgagttactcgggaggctga

SEQ ID NO: 262033 - DNA, 25 bp, probe
ggcctgagattttagcaagctcctg

SEQ ID NO: 262034 - DNA, 25 bp, probe
ggccgtgatgtgtctgaaacacctg

SEQ ID NO: 262035 - DNA, 25 bp, probe
ggccatggtggaagaactcatccgt

SEQ ID NO: 262036 - DNA, 25 bp, probe
ggccatggtggaagaactcatccgt

SEQ ID NO: 262037 - DNA, 25 bp, probe
ggcctgatggggaacctaccatccg

SEQ ID NO: 262038 - DNA, 25 bp, probe
ggccatattggatacctggtcacca

SEQ ID NO: 262039 - DNA, 25 bp, probe
ggcctatgtgaacattcttgcccaa

SEQ ID NO: 262040 - DNA, 25 bp, probe
ggcctttgtatgagctgcattgccc

SEQ ID NO: 262041 - DNA, 25 bp, probe
ggccggttatgcacatcatttaagt

SEQ ID NO: 262042 - DNA, 25 bp, probe
tggccggttatgcacatcatttaag

SEQ ID NO: 262043 - DNA, 25 bp, probe
ggcctttgcatacacctttatgaga

SEQ ID NO: 262044 - DNA, 25 bp, probe
tcgaaattggaggactcctttgagg

SEQ ID NO: 262045 - DNA, 25 bp, probe
tagtaagtagatgatcccgttgagg

SEQ ID NO: 262046 - DNA, 25 bp, probe
tggtaaatatgtgctccgcttttgt

SEQ ID NO: 262047 - DNA, 25 bp, probe
tggcctgaagatgccccgttattgt

SEQ ID NO: 262048 - DNA, 25 bp, probe
tgggctcagaatgccccggaaggaa

SEQ ID NO: 262049 - DNA, 25 bp, probe
ggcctagggagcactcaggagggtt

SEQ ID NO: 262050 - DNA, 25 bp, probe
ggcctggtgtggaaccagggagctg

SEQ ID NO: 262051 - DNA, 25 bp, probe
ggcctggggtcaggccgggcagagc

SEQ ID NO: 262052 - DNA, 25 bp, probe
ggccacgggatgtagcctcggaagc

SEQ ID NO: 262053 - DNA, 25 bp, probe
ggccacgaggagtagccaggtaggc

SEQ ID NO: 262054 - DNA, 25 bp, probe
ggccaggattggtgccaggaaggca

SEQ ID NO: 262055 - DNA, 25 bp, probe
ggccaggttgggggcagtgttgtgg

SEQ ID NO: 262056 - DNA, 25 bp, probe
ggccggtgggaggtgcatggcatcg

SEQ ID NO: 262057 - DNA, 25 bp, probe
ggcctggctgctagagttgtggtgg

SEQ ID NO: 262058 - DNA, 25 bp, probe
ggcctggctgctagagttgtggtgg

SEQ ID NO: 262059 - DNA, 25 bp, probe
ggccagcttgtcggtatcatggtgg

SEQ ID NO: 262060 - DNA, 25 bp, probe
ggccaaatgttggtgatcataggac

SEQ ID NO: 262061 - DNA, 25 bp, probe
ggcctcacgttggtgtctagagctc

SEQ ID NO: 262062 - DNA, 25 bp, probe
ggcctacactctgtgttattgcatc

SEQ ID NO: 262063 - DNA, 25 bp, probe
ggccttactgcttttgaacctgaag

SEQ ID NO: 262064 - DNA, 25 bp, probe
ggccttgcctcctttaagatgtgga

SEQ ID NO: 262065 - DNA, 25 bp, probe
ggccttgcctcctttaagatgtgga

SEQ ID NO: 262066 - DNA, 25 bp, probe
ggccatgtcctctcttaataggtgg

SEQ ID NO: 262067 - DNA, 25 bp, probe
ggccatttctcagctataaattgcg

SEQ ID NO: 262068 - DNA, 25 bp, probe
ggcctaccacgcctatcagaagtgg

SEQ ID NO: 262069 - DNA, 25 bp, probe
tggtaactcaaggctaccaagtgaa

SEQ ID NO: 262070 - DNA, 25 bp, probe
tgtccaaccaagatatcccaggacg

SEQ ID NO: 262071 - DNA, 25 bp, probe
ggccacaccctaattcacagatgga

SEQ ID NO: 262072 - DNA, 25 bp, probe
ggcctccattctatgtacagtgatg

SEQ ID NO: 262073 - DNA, 25 bp, probe
ggccttattgccatgttggtagttc

SEQ ID NO: 262074 - DNA, 25 bp, probe
ggcctctacctcctgggagttatac

SEQ ID NO: 262075 - DNA, 25 bp, probe
ggcctataccgcttgcaggatttga

SEQ ID NO: 262076 - DNA, 25 bp, probe
ggcctagagcctgtgggacactatg

SEQ ID NO: 262077 - DNA, 25 bp, probe
ggccatggagcgtggtagccacttc

SEQ ID NO: 262078 - DNA, 25 bp, probe
ggccagagcaggtgcgcaggcacct

SEQ ID NO: 262079 - DNA, 25 bp, probe
ggcctagcgatggagggacactcta

SEQ ID NO: 262080 - DNA, 25 bp, probe
ggcctatgggaatggctactccagc

SEQ ID NO: 262081 - DNA, 25 bp, probe
tggccttgggagagatgccttccag

SEQ ID NO: 262082 - DNA, 25 bp, probe
ggcctagggagccgcaccttgtcat

SEQ ID NO: 262083 - DNA, 25 bp, probe
ggccttgatgaagggcagccgactc

SEQ ID NO: 262084 - DNA, 25 bp, probe
ggcctctgaggatcagatagtgact

SEQ ID NO: 262085 - DNA, 25 bp, probe
tgggttgcagactcagtagcgtttt

SEQ ID NO: 262086 - DNA, 25 bp, probe
tggccctgcaaaccattgagcgtag

SEQ ID NO: 262087 - DNA, 25 bp, probe
ggcctagcacgcctcattgaggaca

SEQ ID NO: 262088 - DNA, 25 bp, probe
ggcctagcacgcctcattgaggaca

SEQ ID NO: 262089 - DNA, 25 bp, probe
ggcctagcacgcctcattgaggaca

SEQ ID NO: 262090 - DNA, 25 bp, probe
ggccatgaacgcctttggagacatg

SEQ ID NO: 262091 - DNA, 25 bp, probe
tggccatgaacgcctttggagacat

SEQ ID NO: 262092 - DNA, 25 bp, probe
tgtcctgtaacctcatcgggattgt

SEQ ID NO: 262093 - DNA, 25 bp, probe
ggccattaaagctcaaggtgcattt

SEQ ID NO: 262094 - DNA, 25 bp, probe
ggccatgaacataggacacgcttct

SEQ ID NO: 262095 - DNA, 25 bp, probe
ggcctaatgctaatgagattgttcc

SEQ ID NO: 262096 - DNA, 25 bp, probe
ggcctgaataattgcagtagctcta

SEQ ID NO: 262097 - DNA, 25 bp, probe
ggcctgacacaatggtagctctgaa

SEQ ID NO: 262098 - DNA, 25 bp, probe
ggcctgcaactatgttcagtgatga

SEQ ID NO: 262099 - DNA, 25 bp, probe
ggcctgcaactatgttcagtgatga

SEQ ID NO: 262100 - DNA, 25 bp, probe
ggcctgcgatctcagtgacaatgat

SEQ ID NO: 262101 - DNA, 25 bp, probe
ggcctccaaacaaacactggagatc

SEQ ID NO: 262102 - DNA, 25 bp, probe
ggccagccaaaaagactgtgcgtat

SEQ ID NO: 262103 - DNA, 25 bp, probe
ggccagcccaaggatgaggtggact

SEQ ID NO: 262104 - DNA, 25 bp, probe
ggccaggagcacgcatggtattgac

SEQ ID NO: 262105 - DNA, 25 bp, probe
ggccagggactggtggtcaagattg

SEQ ID NO: 262106 - DNA, 25 bp, probe
tggctcggtacaggttgtaagttct

SEQ ID NO: 262107 - DNA, 25 bp, probe
ggccatgtgttaatgttacgatgtt

SEQ ID NO: 262108 - DNA, 25 bp, probe
ggcctgtttgtgatgatcagctcag

SEQ ID NO: 262109 - DNA, 25 bp, probe
ggccattcttgcttagacagtcagc

SEQ ID NO: 262110 - DNA, 25 bp, probe
ggccattcaaccaaagcagacatct

SEQ ID NO: 262111 - DNA, 25 bp, probe
ggccatcaccatgtgagaagacatc

SEQ ID NO: 262112 - DNA, 25 bp, probe
ggccatgcagaagctgagcacaccc

SEQ ID NO: 262113 - DNA, 25 bp, probe
ggccatatcaaggcagcacggccca

SEQ ID NO: 262114 - DNA, 25 bp, probe
ggcctagctcagatgatgcgggagt

SEQ ID NO: 262115 - DNA, 25 bp, probe
ggccatcagcttcttgtgtggtgtc

SEQ ID NO: 262116 - DNA, 25 bp, probe
tggccatcagctctggctgtgtagg

SEQ ID NO: 262117 - DNA, 25 bp, probe
tggccatcagctctggctgtgtagg

SEQ ID NO: 262118 - DNA, 25 bp, probe
ggccacagtcctggaggtgaggcac

SEQ ID NO: 262119 - DNA, 25 bp, probe
ggcctgcggccaggcagaggaagag

SEQ ID NO: 262120 - DNA, 25 bp, probe
ggcctgaggagtggcaggaaagagg

SEQ ID NO: 262121 - DNA, 25 bp, probe
tggcctgagctcccggaaaagattg

SEQ ID NO: 262122 - DNA, 25 bp, probe
tggcctaaccctcagaaacactggg

SEQ ID NO: 262123 - DNA, 25 bp, probe
ggccaaagaccggagaaaccattgt

SEQ ID NO: 262124 - DNA, 25 bp, probe
ggccaacgacgaggagtcagacgat

SEQ ID NO: 262125 - DNA, 25 bp, probe
ggcctttcctgcgagagtcagatgc

SEQ ID NO: 262126 - DNA, 25 bp, probe
ggcctttctggcatgcagccaggtg

SEQ ID NO: 262127 - DNA, 25 bp, probe
ggccttactgggcccagagcagaga

SEQ ID NO: 262128 - DNA, 25 bp, probe
ggccttttggtagcaactgtgcatg

SEQ ID NO: 262129 - DNA, 25 bp, probe
ggcctttggaggaacaatcggctgc

SEQ ID NO: 262130 - DNA, 25 bp, probe
tggctttgggaactaactcggtcat

SEQ ID NO: 262131 - DNA, 25 bp, probe
tggctctggacgtgaagtctcgggc

SEQ ID NO: 262132 - DNA, 25 bp, probe
ggcctctggactgaactctggggcc

SEQ ID NO: 262133 - DNA, 25 bp, probe
ggcctgcgagaagaacggcgtggct

SEQ ID NO: 262134 - DNA, 25 bp, probe
ggccacggagtggcaacaggcaggg

SEQ ID NO: 262135 - DNA, 25 bp, probe
tggctccactcagtgtctaaggcac

SEQ ID NO: 262136 - DNA, 25 bp, probe
tggcccccatttacagcaggagtta

SEQ ID NO: 262137 - DNA, 25 bp, probe
ggccactccattgacagcagtttgg

SEQ ID NO: 262138 - DNA, 25 bp, probe
ggcctctgatacagacagcagtcta

SEQ ID NO: 262139 - DNA, 25 bp, probe
ggcctctgatacagacagcagtcta

SEQ ID NO: 262140 - DNA, 25 bp, probe
tggccttgaacttccagacgccagg

SEQ ID NO: 262141 - DNA, 25 bp, probe
tggcctgtggacccgaaaggagggc

SEQ ID NO: 262142 - DNA, 25 bp, probe
ggccagggacggcatgagcaggagg

SEQ ID NO: 262143 - DNA, 25 bp, probe
ggccagaagatctcctggcaggcag

SEQ ID NO: 262144 - DNA, 25 bp, probe
tggccagaatatgaccgtcagcgtg

SEQ ID NO: 262145 - DNA, 25 bp, probe
ggcctcaatgatgactgtggacctg

SEQ ID NO: 262146 - DNA, 25 bp, probe
ggcctgaagagtttgaccactatgt

SEQ ID NO: 262147 - DNA, 25 bp, probe
ggcctgaagagtttgaccactatgt

SEQ ID NO: 262148 - DNA, 25 bp, probe
tggccgaggactttgattgcacatt

SEQ ID NO: 262149 - DNA, 25 bp, probe
tggcctgaaagctctagtaattaaa

SEQ ID NO: 262150 - DNA, 25 bp, probe
tggcctttggcacctgggagagtaa

SEQ ID NO: 262151 - DNA, 25 bp, probe
ggcctttgtgacttgtctagcagat

SEQ ID NO: 262152 - DNA, 25 bp, probe
ggccttcagatgtctgtgatttctg

SEQ ID NO: 262153 - DNA, 25 bp, probe
ggccttaggcatctgcattgtttgc

SEQ ID NO: 262154 - DNA, 25 bp, probe
ggcctattggcaagatcgcatgttt

SEQ ID NO: 262155 - DNA, 25 bp, probe
ggcctttgtgaattcatgcactagt

SEQ ID NO: 262156 - DNA, 25 bp, probe
ggcctttgtgaattcatgcactagt

SEQ ID NO: 262157 - DNA, 25 bp, probe
ggccttggatgaacttgcttcactt

SEQ ID NO: 262158 - DNA, 25 bp, probe
ggcctttatcaacagctgtctcaat

SEQ ID NO: 262159 - DNA, 25 bp, probe
tggccttttttctacgaatgcacta

SEQ ID NO: 262160 - DNA, 25 bp, probe
ggccttttttctacgaatgcactac

SEQ ID NO: 262161 - DNA, 25 bp, probe
ggcctcttttctttcagacagagaa

SEQ ID NO: 262162 - DNA, 25 bp, probe
ggcctgctgtttaatcacagataag

SEQ ID NO: 262163 - DNA, 25 bp, probe
ggcctctgtcttttacacagtggtc

SEQ ID NO: 262164 - DNA, 25 bp, probe
tggactcgtttatggcacagccatt

SEQ ID NO: 262165 - DNA, 25 bp, probe
tggcccagtttatggtgcagaatgg

SEQ ID NO: 262166 - DNA, 25 bp, probe
ggccacatctctgaggtgtcagaat

SEQ ID NO: 262167 - DNA, 25 bp, probe
ggccagatattcgaagcttacaaca

SEQ ID NO: 262168 - DNA, 25 bp, probe
ggccatgtgtctcagagctgttaag

SEQ ID NO: 262169 - DNA, 25 bp, probe
tggccatccctctaaatgttctagg

SEQ ID NO: 262170 - DNA, 25 bp, probe
tggccattcctgaagcgattggctt

SEQ ID NO: 262171 - DNA, 25 bp, probe
ggccagcacctgaagaattgatggg

SEQ ID NO: 262172 - DNA, 25 bp, probe
tggccaacctaaaattatgtgtgtc

SEQ ID NO: 262173 - DNA, 25 bp, probe
ggccacacagaaatcgttaagttcc

SEQ ID NO: 262174 - DNA, 25 bp, probe
ggcctacagaggtgggcaggagtcc

SEQ ID NO: 262175 - DNA, 25 bp, probe
ggcctcaaagttggggcaggctggc

SEQ ID NO: 262176 - DNA, 25 bp, probe
ggcctaatcatttgggagatggctc

SEQ ID NO: 262177 - DNA, 25 bp, probe
ggccaactcattcgtgggaacagcg

SEQ ID NO: 262178 - DNA, 25 bp, probe
ggccactacattctgggtgacacgc

SEQ ID NO: 262179 - DNA, 25 bp, probe
ggccatctgactaaactgggacttg

SEQ ID NO: 262180 - DNA, 25 bp, probe
ggccatctgactaaactgggacttg

SEQ ID NO: 262181 - DNA, 25 bp, probe
ggcctctaataaactgtgtcctata

SEQ ID NO: 262182 - DNA, 25 bp, probe
tggccttcaaaaacattgcctccaa

SEQ ID NO: 262183 - DNA, 25 bp, probe
tggccttcaaaaacattgcctccaa

SEQ ID NO: 262184 - DNA, 25 bp, probe
ggccagtcttaaaattcctgctccc

SEQ ID NO: 262185 - DNA, 25 bp, probe
tggacgttcccaaaatcctgtccag

SEQ ID NO: 262186 - DNA, 25 bp, probe
tggactttggcctacaatttcccag

SEQ ID NO: 262187 - DNA, 25 bp, probe
ggccttatttcatatgtttcctcaa

SEQ ID NO: 262188 - DNA, 25 bp, probe
ggcctttagctttatgtatatcctg

SEQ ID NO: 262189 - DNA, 25 bp, probe
ggccttggacactgtgtcaatcatt

SEQ ID NO: 262190 - DNA, 25 bp, probe
ggccttggtacttatggcagaatct

SEQ ID NO: 262191 - DNA, 25 bp, probe
ggccttggtacttatggcagaatct

SEQ ID NO: 262192 - DNA, 25 bp, probe
ggccttcctcatgatctgtgagaac

SEQ ID NO: 262193 - DNA, 25 bp, probe
ggccttcctcatgatctgtgagaac

SEQ ID NO: 262194 - DNA, 25 bp, probe
ggccttcctcatgatctgtgagaac

SEQ ID NO: 262195 - DNA, 25 bp, probe
tggctcttcgttgtttagaacttca

SEQ ID NO: 262196 - DNA, 25 bp, probe
tggccattctttgggtatgggacat

SEQ ID NO: 262197 - DNA, 25 bp, probe
tggaattctttggtgtaaataaacg

SEQ ID NO: 262198 - DNA, 25 bp, probe
tggaagtcatacccgaaaaagcaaa

SEQ ID NO: 262199 - DNA, 25 bp, probe
tggctttagccgtgcaaatccaaaa

SEQ ID NO: 262200 - DNA, 25 bp, probe
ggccttctgccgggaaagctagaaa

SEQ ID NO: 262201 - DNA, 25 bp, probe
ggcctcgctgcagcaagagaacaag

SEQ ID NO: 262202 - DNA, 25 bp, probe
ggccatccgagcggtggcaaagcag

SEQ ID NO: 262203 - DNA, 25 bp, probe
ggccatcaaatgcattgccaaggag

SEQ ID NO: 262204 - DNA, 25 bp, probe
tggccatcaaatgcattgccaagga

SEQ ID NO: 262205 - DNA, 25 bp, probe
ggccatgaatatgcagactgcaggg

SEQ ID NO: 262206 - DNA, 25 bp, probe
ggcctaatgacaggtcagatgtgga

SEQ ID NO: 262207 - DNA, 25 bp, probe
tggccgagatgactgcccagaggga

SEQ ID NO: 262208 - DNA, 25 bp, probe
tggcctgatgagtatgctctaaaag

SEQ ID NO: 262209 - DNA, 25 bp, probe
ggccatgtggatactatccaatttt

SEQ ID NO: 262210 - DNA, 25 bp, probe
ggccagtggatagtgaccaactctg

SEQ ID NO: 262211 - DNA, 25 bp, probe
ggccaggtgttggcagccaactgct

SEQ ID NO: 262212 - DNA, 25 bp, probe
tggccatggtgttacccatgaccat

SEQ ID NO: 262213 - DNA, 25 bp, probe
ggccatgacagatgaatccgacaca

SEQ ID NO: 262214 - DNA, 25 bp, probe
ggccttcagcagcatgatgccaggc

SEQ ID NO: 262215 - DNA, 25 bp, probe
ggccttcagcagcatgatgccaggc

SEQ ID NO: 262216 - DNA, 25 bp, probe
ggccatcacactcatggctgcagtg

SEQ ID NO: 262217 - DNA, 25 bp, probe
ggccaccagctggaggacatgctgc

SEQ ID NO: 262218 - DNA, 25 bp, probe
ggccactgctgtttggatgagcttc

SEQ ID NO: 262219 - DNA, 25 bp, probe
ggccatctgatggactggtgtccta

SEQ ID NO: 262220 - DNA, 25 bp, probe
ggccactctgggtggttctaagcca

SEQ ID NO: 262221 - DNA, 25 bp, probe
ggccactctgggtggttctaagcca

SEQ ID NO: 262222 - DNA, 25 bp, probe
ggccactctgggtggttctaagcca

SEQ ID NO: 262223 - DNA, 25 bp, probe
ggccttctggtttggtgtcaacagc

SEQ ID NO: 262224 - DNA, 25 bp, probe
ggccttctggtttggtgtcaacagc

SEQ ID NO: 262225 - DNA, 25 bp, probe
ggccagtatgggaaggtgtacacct

SEQ ID NO: 262226 - DNA, 25 bp, probe
tgggctgtaaaaaagattaatccta

SEQ ID NO: 262227 - DNA, 25 bp, probe
tggccccaaattagagttttctctt

SEQ ID NO: 262228 - DNA, 25 bp, probe
tggccccatcaagacgtggtgattt

SEQ ID NO: 262229 - DNA, 25 bp, probe
ggccaccatcatcggcgagtgggta

SEQ ID NO: 262230 - DNA, 25 bp, probe
ggccacaactgccaaatgggcttga

SEQ ID NO: 262231 - DNA, 25 bp, probe
ggccagcagctcaggagcaggcctt

SEQ ID NO: 262232 - DNA, 25 bp, probe
ggccagcagatctgactagtcaatt

SEQ ID NO: 262233 - DNA, 25 bp, probe
ggccagcagatctgactagtcaatt

SEQ ID NO: 262234 - DNA, 25 bp, probe
ggccagactttgtcatcaataactt

SEQ ID NO: 262235 - DNA, 25 bp, probe
tggccaaggtcatccatgacaactt

SEQ ID NO: 262236 - DNA, 25 bp, probe
ggccaaggtctacatcaatgactcc

SEQ ID NO: 262237 - DNA, 25 bp, probe
ggccatcaagaaagtcaaagaccac

SEQ ID NO: 262238 - DNA, 25 bp, probe
ggcctatatgatctgcctacataca

SEQ ID NO: 262239 - DNA, 25 bp, probe
tggcctttgaccggtacattgcaat

SEQ ID NO: 262240 - DNA, 25 bp, probe
tggccttgtacttgcttgtattgta

SEQ ID NO: 262241 - DNA, 25 bp, probe
ggccttgtcatttgggtagttggat

SEQ ID NO: 262242 - DNA, 25 bp, probe
tggccttgtcatttgggtagttgga

SEQ ID NO: 262243 - DNA, 25 bp, probe
ggccattgcttggggggattatgga

SEQ ID NO: 262244 - DNA, 25 bp, probe
ggccattgcgaggggaagaatttga

SEQ ID NO: 262245 - DNA, 25 bp, probe
ggccattgcgaggggaagaatttga

SEQ ID NO: 262246 - DNA, 25 bp, probe
ggccttgggtgggattgagtttgtt

SEQ ID NO: 262247 - DNA, 25 bp, probe
tggccttgggtgggattgagtttgt

SEQ ID NO: 262248 - DNA, 25 bp, probe
tggccatttggagatttactttgta

SEQ ID NO: 262249 - DNA, 25 bp, probe
tggacatttgttgacttggttttac

SEQ ID NO: 262250 - DNA, 25 bp, probe
ggccatagatttgccttgtggtgtt

SEQ ID NO: 262251 - DNA, 25 bp, probe
ggccaagcatttcccacttggcgaa

SEQ ID NO: 262252 - DNA, 25 bp, probe
ggccaagatgtacagcagcttccag

SEQ ID NO: 262253 - DNA, 25 bp, probe
ggccttgtgtagaatcactcgccat

SEQ ID NO: 262254 - DNA, 25 bp, probe
ggccttgtgtagaatcactcgccat

SEQ ID NO: 262255 - DNA, 25 bp, probe
ggcctagcctagaatcctagcctag

SEQ ID NO: 262256 - DNA, 25 bp, probe
tggcttcagtcggcaacgcaagcgc

SEQ ID NO: 262257 - DNA, 25 bp, probe
tggccggggctgaagccacacagcc

SEQ ID NO: 262258 - DNA, 25 bp, probe
tgtcctgggattcaacccactatta

SEQ ID NO: 262259 - DNA, 25 bp, probe
tgcagttgggttcaaatgccaaata

SEQ ID NO: 262260 - DNA, 25 bp, probe
tggctgcatggccttctcaaagatc

SEQ ID NO: 262261 - DNA, 25 bp, probe
tggctgcaggcctcagtaacatcat

SEQ ID NO: 262262 - DNA, 25 bp, probe
ggccatgtgacatcaataagcaaac

SEQ ID NO: 262263 - DNA, 25 bp, probe
ggccattgacttcatagactccatc

SEQ ID NO: 262264 - DNA, 25 bp, probe
ggccactgattacttcatgactgcc

SEQ ID NO: 262265 - DNA, 25 bp, probe
ggcctatcggagctatgtgctgcac

SEQ ID NO: 262266 - DNA, 25 bp, probe
tggcttatcttacactggatcacca

SEQ ID NO: 262267 - DNA, 25 bp, probe
tggcttatcttatgatctgggatca

SEQ ID NO: 262268 - DNA, 25 bp, probe
tggcgagatttttgctcaggcgttc

SEQ ID NO: 262269 - DNA, 25 bp, probe
tggctggtcctggagacagaagttc

SEQ ID NO: 262270 - DNA, 25 bp, probe
tggctggtcctggagacagaagttc

SEQ ID NO: 262271 - DNA, 25 bp, probe
tggctggtatctggcagcacacacc

SEQ ID NO: 262272 - DNA, 25 bp, probe
tggcgcagtctgaatggcggcacgc

SEQ ID NO: 262273 - DNA, 25 bp, probe
ggccagtctgacaggtgcttcagtg

SEQ ID NO: 262274 - DNA, 25 bp, probe
ggccagtctgacaggtgcttcagtg

SEQ ID NO: 262275 - DNA, 25 bp, probe
tggccatgactggcgaagtctccct

SEQ ID NO: 262276 - DNA, 25 bp, probe
tggcggttgggaggtatcccatccc

SEQ ID NO: 262277 - DNA, 25 bp, probe
tagaggtttgggctaccccactata

SEQ ID NO: 262278 - DNA, 25 bp, probe
ttacaacctgggcaatcccggcttt

SEQ ID NO: 262279 - DNA, 25 bp, probe
ttacaacctgggcaatcccggcttt

SEQ ID NO: 262280 - DNA, 25 bp, probe
tgctaaccggtgagtgaccgcggcc

SEQ ID NO: 262281 - DNA, 25 bp, probe
tggaaggtgggtgtagccgtggcta

SEQ ID NO: 262282 - DNA, 25 bp, probe
tggaaattgggtgtgccctggctcc

SEQ ID NO: 262283 - DNA, 25 bp, probe
tggccaagttggcgtgccaggtgtc

SEQ ID NO: 262284 - DNA, 25 bp, probe
ggccagaatatgaccgtcagcgtgg

SEQ ID NO: 262285 - DNA, 25 bp, probe
ggccagagatggacgtgtaccaggg

SEQ ID NO: 262286 - DNA, 25 bp, probe
ggccagaatgacgggaacacaggaa

SEQ ID NO: 262287 - DNA, 25 bp, probe
tggaagaatccccacgaacgcgata

SEQ ID NO: 262288 - DNA, 25 bp, probe
tggacaaacttctgcgatacgacca

SEQ ID NO: 262289 - DNA, 25 bp, probe
tggaagcaacgttctttccattcac

SEQ ID NO: 262290 - DNA, 25 bp, probe
tggcaaccacaaatctttccaactc

SEQ ID NO: 262291 - DNA, 25 bp, probe
tgtaaggccaactatttacaagttt

SEQ ID NO: 262292 - DNA, 25 bp, probe
tgtaattggtccttattcccttatt

SEQ ID NO: 262293 - DNA, 25 bp, probe
tgtaacggtttaatacctttgaatg

SEQ ID NO: 262294 - DNA, 25 bp, probe
tggaaaggaattttaacctataatg

SEQ ID NO: 262295 - DNA, 25 bp, probe
tggaaagggagggtgaaagtgatta

SEQ ID NO: 262296 - DNA, 25 bp, probe
tggcctagggagcactcaggagggt

SEQ ID NO: 262297 - DNA, 25 bp, probe
tggctcacagggctgaaaggggctt

SEQ ID NO: 262298 - DNA, 25 bp, probe
tggcccttgggagacagatgggtgg

SEQ ID NO: 262299 - DNA, 25 bp, probe
tggccctggggggccattcgattcg

SEQ ID NO: 262300 - DNA, 25 bp, probe
tggcaacgggagattatttgtttga

SEQ ID NO: 262301 - DNA, 25 bp, probe
tggactccctggtggttgagtttaa

SEQ ID NO: 262302 - DNA, 25 bp, probe
tggagacccatgtgggcttaggctt

SEQ ID NO: 262303 - DNA, 25 bp, probe
tggatgaacttgcttcacttcaggt

SEQ ID NO: 262304 - DNA, 25 bp, probe
tggatgaacttgcttcacttcaggt

SEQ ID NO: 262305 - DNA, 25 bp, probe
tggctgaggctgaaatctccttcac

SEQ ID NO: 262306 - DNA, 25 bp, probe
tggctgaggctgaaatctccttcac

SEQ ID NO: 262307 - DNA, 25 bp, probe
tggctgaggctgaaatctccttcac

SEQ ID NO: 262308 - DNA, 25 bp, probe
tggctgggcagagctgcatcatcct

SEQ ID NO: 262309 - DNA, 25 bp, probe
tggccggcagagggcacaccggcct

SEQ ID NO: 262310 - DNA, 25 bp, probe
tggccaagtatgagatctccgccct

SEQ ID NO: 262311 - DNA, 25 bp, probe
tggccaagtatgagatctccgccct

SEQ ID NO: 262312 - DNA, 25 bp, probe
ggccaatgttgtggtctaagctcaa

SEQ ID NO: 262313 - DNA, 25 bp, probe
ggccaagtgcttggatcacaaaaac

SEQ ID NO: 262314 - DNA, 25 bp, probe
ggccttttccgctacaagagtatcc

SEQ ID NO: 262315 - DNA, 25 bp, probe
tggcctttcccagagctggagttgg

SEQ ID NO: 262316 - DNA, 25 bp, probe
ggccttccaggagcaggagcagggg

SEQ ID NO: 262317 - DNA, 25 bp, probe
ggccatccgggagacaggacgggct

SEQ ID NO: 262318 - DNA, 25 bp, probe
tggcctccagggcgcaggggagggt

SEQ ID NO: 262319 - DNA, 25 bp, probe
tggcctccaagtccacagtggaacc

SEQ ID NO: 262320 - DNA, 25 bp, probe
tggcctccacgtcatcaaggccact

SEQ ID NO: 262321 - DNA, 25 bp, probe
tggcctccaagtggtaccagttcta

SEQ ID NO: 262322 - DNA, 25 bp, probe
tggccccaagtagagccagccagaa

SEQ ID NO: 262323 - DNA, 25 bp, probe
tggccccagagctcttggagcagaa

SEQ ID NO: 262324 - DNA, 25 bp, probe
tggctgccttactacattgggatca

SEQ ID NO: 262325 - DNA, 25 bp, probe
tggctgccattatcagcatccctac

SEQ ID NO: 262326 - DNA, 25 bp, probe
tggctcagctttgccatctcaatga

SEQ ID NO: 262327 - DNA, 25 bp, probe
tggctcagctttgccatctcaatga

SEQ ID NO: 262328 - DNA, 25 bp, probe
ggccatcatttgcccagatattggt

SEQ ID NO: 262329 - DNA, 25 bp, probe
tggcttcactgaaccagatcttgga

SEQ ID NO: 262330 - DNA, 25 bp, probe
tggcttctgtgtatctaggtggacc

SEQ ID NO: 262331 - DNA, 25 bp, probe
tggctctgctggagcgggtgggaac

SEQ ID NO: 262332 - DNA, 25 bp, probe
tggccgtgtgggtggatgtcgaaac

SEQ ID NO: 262333 - DNA, 25 bp, probe
tggccgtgtgggtggatgtcgaaac

SEQ ID NO: 262334 - DNA, 25 bp, probe
tggcgagtggggtgagtgctctgca

SEQ ID NO: 262335 - DNA, 25 bp, probe
tggcgacaggcccatatgcaggccc

SEQ ID NO: 262336 - DNA, 25 bp, probe
tggcgactgcacagaatggctgact

SEQ ID NO: 262337 - DNA, 25 bp, probe
tggccatgtcacaggcaagttcaca

SEQ ID NO: 262338 - DNA, 25 bp, probe
ggccatgtcacagggatagatggac

SEQ ID NO: 262339 - DNA, 25 bp, probe
tggccattactggtgctgtgatgca

SEQ ID NO: 262340 - DNA, 25 bp, probe
tggccatcatgagcgtgctctacct

SEQ ID NO: 262341 - DNA, 25 bp, probe
ggccacatggctgacattagctctc

SEQ ID NO: 262342 - DNA, 25 bp, probe
ggccacagagctaaatgtacaagcc

SEQ ID NO: 262343 - DNA, 25 bp, probe
tggcccaacaaccatctacagaaca

SEQ ID NO: 262344 - DNA, 25 bp, probe
ggccacattcagttcttatcaaaga

SEQ ID NO: 262345 - DNA, 25 bp, probe
ggccaagttattgtgattgaaggca

SEQ ID NO: 262346 - DNA, 25 bp, probe
tggacttcctttgggactaagcgca

SEQ ID NO: 262347 - DNA, 25 bp, probe
tggcttaccccttggaataagccaa

SEQ ID NO: 262348 - DNA, 25 bp, probe
tggctacacccctcatgggaagaaa

SEQ ID NO: 262349 - DNA, 25 bp, probe
tggcttcccctcccaaggaggatga

SEQ ID NO: 262350 - DNA, 25 bp, probe
tggctccccaactggaggggcagga

SEQ ID NO: 262351 - DNA, 25 bp, probe
tggccctgaaacaggaatggggcaa

SEQ ID NO: 262352 - DNA, 25 bp, probe
tggctccggagatggtgaagggaga

SEQ ID NO: 262353 - DNA, 25 bp, probe
tggcgacgggtgatgctcaaggaaa

SEQ ID NO: 262354 - DNA, 25 bp, probe
tggccacagcagctttgtacacgaa

SEQ ID NO: 262355 - DNA, 25 bp, probe
tggcttacagcattttcttcacgaa

SEQ ID NO: 262356 - DNA, 25 bp, probe
tggcttgatgatcattgttccacca

SEQ ID NO: 262357 - DNA, 25 bp, probe
tggctcttgattttgtctgccacag

SEQ ID NO: 262358 - DNA, 25 bp, probe
tggctcttgattttgtctgccacag

SEQ ID NO: 262359 - DNA, 25 bp, probe
tggccaccatattatgcatgcccac

SEQ ID NO: 262360 - DNA, 25 bp, probe
tggccaccatattatgcatgcccac

SEQ ID NO: 262361 - DNA, 25 bp, probe
tggccaagtagtggcagccatccag

SEQ ID NO: 262362 - DNA, 25 bp, probe
ggccaagtagtggcagccatccagc

SEQ ID NO: 262363 - DNA, 25 bp, probe
ggccaagtagtggcagccatccagc

SEQ ID NO: 262364 - DNA, 25 bp, probe
ggccaggtagtggccctgagcagca

SEQ ID NO: 262365 - DNA, 25 bp, probe
ggccaggaagtagcacaggctgagt

SEQ ID NO: 262366 - DNA, 25 bp, probe
ggccaggtagcgcgcaactgctggc

SEQ ID NO: 262367 - DNA, 25 bp, probe
ggccaggtagcgcgcaactgctggc

SEQ ID NO: 262368 - DNA, 25 bp, probe
ggccatggaggtggtcaacagcggc

SEQ ID NO: 262369 - DNA, 25 bp, probe
ggccatggaggtggtcaacagcggc

SEQ ID NO: 262370 - DNA, 25 bp, probe
tggccagaagttggacatcaagtcc

SEQ ID NO: 262371 - DNA, 25 bp, probe
tggccagaagttggacatcaagtcc

SEQ ID NO: 262372 - DNA, 25 bp, probe
ggccatgcctggagacatatcactc

SEQ ID NO: 262373 - DNA, 25 bp, probe
ggccatgcctggagacatatcactc

SEQ ID NO: 262374 - DNA, 25 bp, probe
ggccatgttgagctacttcaagccg

SEQ ID NO: 262375 - DNA, 25 bp, probe
ggccatgttagcctggtcaagatgc

SEQ ID NO: 262376 - DNA, 25 bp, probe
ggccacatgtcactgatggtcagat

SEQ ID NO: 262377 - DNA, 25 bp, probe
ggccacatgtcactgatggtcagat

SEQ ID NO: 262378 - DNA, 25 bp, probe
ggccacatgtcactgatggtcagat

SEQ ID NO: 262379 - DNA, 25 bp, probe
ggccacagtaattggtcatgtgatg

SEQ ID NO: 262380 - DNA, 25 bp, probe
tggccacagtaattggtcatgtgat

SEQ ID NO: 262381 - DNA, 25 bp, probe
tggctgcactgtcatcgttatgctg

SEQ ID NO: 262382 - DNA, 25 bp, probe
tggctactgggtggactctgtggcc

SEQ ID NO: 262383 - DNA, 25 bp, probe
tgtctccagacctgacctggggaca

SEQ ID NO: 262384 - DNA, 25 bp, probe
tggccaaactaccgccggaggagat

SEQ ID NO: 262385 - DNA, 25 bp, probe
tggccacacgcaactgtctagtggg

SEQ ID NO: 262386 - DNA, 25 bp, probe
ggccacacgcaactgtctagtgggc

SEQ ID NO: 262387 - DNA, 25 bp, probe
ggccaagccacacaatcagtggggc

SEQ ID NO: 262388 - DNA, 25 bp, probe
ggccaagccaagcagggggccacag

SEQ ID NO: 262389 - DNA, 25 bp, probe
ggccaaaacgtacggagacaacagg

SEQ ID NO: 262390 - DNA, 25 bp, probe
ggccaaaaagtacagagacaacagg

SEQ ID NO: 262391 - DNA, 25 bp, probe
ggccaaaattgtgcgcaatgccaag

SEQ ID NO: 262392 - DNA, 25 bp, probe
tggccaaaaagtacagagacaacag

SEQ ID NO: 262393 - DNA, 25 bp, probe
ggccacaaactgttcaacacacaca

SEQ ID NO: 262394 - DNA, 25 bp, probe
ggccacagacgccaggcaacaaaat

SEQ ID NO: 262395 - DNA, 25 bp, probe
ggccactgcctgcaggcaagagatg

SEQ ID NO: 262396 - DNA, 25 bp, probe
ggccacgactgttgttacactggag

SEQ ID NO: 262397 - DNA, 25 bp, probe
tggccacgactgttgttacactcga

SEQ ID NO: 262398 - DNA, 25 bp, probe
ggccacaactgtcacgacattctgc

SEQ ID NO: 262399 - DNA, 25 bp, probe
ggccacaagtggtcactggttttcc

SEQ ID NO: 262400 - DNA, 25 bp, probe
ggccaaagcctgtgtgagaagttgc

SEQ ID NO: 262401 - DNA, 25 bp, probe
ggccaacgcacggggagaggctgtg

SEQ ID NO: 262402 - DNA, 25 bp, probe
ggccatacagacccgaagtgaggag

SEQ ID NO: 262403 - DNA, 25 bp, probe
ggccatcaagacgctcaagtcgggc

SEQ ID NO: 262404 - DNA, 25 bp, probe
ggccatcaatgaaggctccatgtct

SEQ ID NO: 262405 - DNA, 25 bp, probe
ggccacgagagcatctacagtttgt

SEQ ID NO: 262406 - DNA, 25 bp, probe
ggccagcgacgcaatcagaaagttt

SEQ ID NO: 262407 - DNA, 25 bp, probe
ggccagcgacgcaatcagaaagttt

SEQ ID NO: 262408 - DNA, 25 bp, probe
ggccatggatgggacaggagtcttt

SEQ ID NO: 262409 - DNA, 25 bp, probe
tggcgtggagcccacaggattcagc

SEQ ID NO: 262410 - DNA, 25 bp, probe
tggcgtggagcccacaggattcagc

SEQ ID NO: 262411 - DNA, 25 bp, probe
tggctgtaagtctcatggttcagtc

SEQ ID NO: 262412 - DNA, 25 bp, probe
ggccaacatgagaatccaggatctg

SEQ ID NO: 262413 - DNA, 25 bp, probe
ggccaccaagaacaaatgcatgaca

SEQ ID NO: 262414 - DNA, 25 bp, probe
ggccagacaagtacccaagcaggaa

SEQ ID NO: 262415 - DNA, 25 bp, probe
ggccagtgcaagcatcagccagaag

SEQ ID NO: 262416 - DNA, 25 bp, probe
ggccagtgcaagcatcagccagaag

SEQ ID NO: 262417 - DNA, 25 bp, probe
ggccagtgcaagcatcagccagaag

SEQ ID NO: 262418 - DNA, 25 bp, probe
ggccaatcaagaccagaagaaccac

SEQ ID NO: 262419 - DNA, 25 bp, probe
ggccagagcaagcgctgtaaaccct

SEQ ID NO: 262420 - DNA, 25 bp, probe
ggccagagcacctgcgtatgaatct

SEQ ID NO: 262421 - DNA, 25 bp, probe
tggcctggcacggaggtataacccc

SEQ ID NO: 262422 - DNA, 25 bp, probe
tggcccgcgctggagtttcaatacc

SEQ ID NO: 262423 - DNA, 25 bp, probe
tggccactctgggtggttctaagcc

SEQ ID NO: 262424 - DNA, 25 bp, probe
tggcctcatggggtggttctaggac

SEQ ID NO: 262425 - DNA, 25 bp, probe
tggcctgcaggtgggacttagagga

SEQ ID NO: 262426 - DNA, 25 bp, probe
tggccagaagtggaatctttacagg

SEQ ID NO: 262427 - DNA, 25 bp, probe
tggccatcgagtcactgaattacag

SEQ ID NO: 262428 - DNA, 25 bp, probe
tggcccgggacaatgaattctcagg

SEQ ID NO: 262429 - DNA, 25 bp, probe
tggctgcccggaaggatttccagag

SEQ ID NO: 262430 - DNA, 25 bp, probe
tggctccgaggaaaatcactcctac

SEQ ID NO: 262431 - DNA, 25 bp, probe
tggcttctacgatgagtgcctgcgc

SEQ ID NO: 262432 - DNA, 25 bp, probe
tggctttgagctggggcccagtgcc

SEQ ID NO: 262433 - DNA, 25 bp, probe
tggctttgagctggggcccagtgcc

SEQ ID NO: 262434 - DNA, 25 bp, probe
tggcctggacatgagccgggtgatc

SEQ ID NO: 262435 - DNA, 25 bp, probe
tggcctggacatgagccgggtgatc

SEQ ID NO: 262436 - DNA, 25 bp, probe
tggttgggaggaccagagcctgtct

SEQ ID NO: 262437 - DNA, 25 bp, probe
tggctgtgttgacggagccactctt

SEQ ID NO: 262438 - DNA, 25 bp, probe
tggcttcaagcaggtacttctctgt

SEQ ID NO: 262439 - DNA, 25 bp, probe
tggcttaacggtatttcagaaggtc

SEQ ID NO: 262440 - DNA, 25 bp, probe
tctttggagagtattttagaaactc

SEQ ID NO: 262441 - DNA, 25 bp, probe
tctctagggccttttttcaataact

SEQ ID NO: 262442 - DNA, 25 bp, probe
tctctagggccttttttcaataact

SEQ ID NO: 262443 - DNA, 25 bp, probe
tacttcgtcttctaatttcaaaaat

SEQ ID NO: 262444 - DNA, 25 bp, probe
tggcttcttaatcttttcacaaata

SEQ ID NO: 262445 - DNA, 25 bp, probe
tggttgcttttaagttatggcaatt

SEQ ID NO: 262446 - DNA, 25 bp, probe
tggctttttcttttaatgaatactt

SEQ ID NO: 262447 - DNA, 25 bp, probe
tggttttgactcacctgaaagtttt

SEQ ID NO: 262448 - DNA, 25 bp, probe
tggttttgactcacctgaaagtttt

SEQ ID NO: 262449 - DNA, 25 bp, probe
tggggctggaccacgtgagcaaaat

SEQ ID NO: 262450 - DNA, 25 bp, probe
ggccagctggatgttcttaaagagt

SEQ ID NO: 262451 - DNA, 25 bp, probe
tggccagctggatgttcttaaagag

SEQ ID NO: 262452 - DNA, 25 bp, probe
tggccctggggttcttcagagaaca

SEQ ID NO: 262453 - DNA, 25 bp, probe
tggccctcatggccaacgacgagga

SEQ ID NO: 262454 - DNA, 25 bp, probe
tggccctcatggccaacgacgagga

SEQ ID NO: 262455 - DNA, 25 bp, probe
tggccttagcttgacggcagggccc

SEQ ID NO: 262456 - DNA, 25 bp, probe
tggccttagcttgacggcagggccc

SEQ ID NO: 262457 - DNA, 25 bp, probe
tggcctttggatcactgggggcact

SEQ ID NO: 262458 - DNA, 25 bp, probe
tggctggactggaggctgggtggcc

SEQ ID NO: 262459 - DNA, 25 bp, probe
tggctggcgagtggggtgagtgctc

SEQ ID NO: 262460 - DNA, 25 bp, probe
tggctgggagtggtggctcatgcct

SEQ ID NO: 262461 - DNA, 25 bp, probe
tggctgggagtggtggctcatgcct

SEQ ID NO: 262462 - DNA, 25 bp, probe
tggctggtgagagtgtggctacctc

SEQ ID NO: 262463 - DNA, 25 bp, probe
tggctgggaacatgacccagcctga

SEQ ID NO: 262464 - DNA, 25 bp, probe
tggccggagcagtgaaccagcacgg

SEQ ID NO: 262465 - DNA, 25 bp, probe
tggccggagcagtgaaccagcacgg

SEQ ID NO: 262466 - DNA, 25 bp, probe
tggccagtggagtggtccatgctaa

SEQ ID NO: 262467 - DNA, 25 bp, probe
tggccagtactcgggacagactaag

SEQ ID NO: 262468 - DNA, 25 bp, probe
ggccacgtatcagggaaattgcagg

SEQ ID NO: 262469 - DNA, 25 bp, probe
ggccactgccaaggcgacaagtcaa

SEQ ID NO: 262470 - DNA, 25 bp, probe
ggccactgccaaggcgacaagtcaa

SEQ ID NO: 262471 - DNA, 25 bp, probe
ggccagtcacaatggacagcgccgg

SEQ ID NO: 262472 - DNA, 25 bp, probe
ggccagtcacaatggacagcgccgg

SEQ ID NO: 262473 - DNA, 25 bp, probe
ggccagaccaatggctgagagccac

SEQ ID NO: 262474 - DNA, 25 bp, probe
ggccagaccctggctggaagccaga

SEQ ID NO: 262475 - DNA, 25 bp, probe
ggccagaccctcaaagctagtatga

SEQ ID NO: 262476 - DNA, 25 bp, probe
ggccagaccctcaaagctagtatga

SEQ ID NO: 262477 - DNA, 25 bp, probe
tggccacccgtggaagtagctattg

SEQ ID NO: 262478 - DNA, 25 bp, probe
ggccaacaagggaggactcattgca

SEQ ID NO: 262479 - DNA, 25 bp, probe
ggccagctcaagatagcggactttg

SEQ ID NO: 262480 - DNA, 25 bp, probe
ggccacatcaagatcactgactttg

SEQ ID NO: 262481 - DNA, 25 bp, probe
tggcccacaagcagatctactactc

SEQ ID NO: 262482 - DNA, 25 bp, probe
tggccacaaagttgatgcagttttc

SEQ ID NO: 262483 - DNA, 25 bp, probe
tggctgtgcaaaatggtgacttgga

SEQ ID NO: 262484 - DNA, 25 bp, probe
tggctgtgcaaaatggtgacttgga

SEQ ID NO: 262485 - DNA, 25 bp, probe
tggcctgacacaatggtagctctga

SEQ ID NO: 262486 - DNA, 25 bp, probe
ggccagaactcaagtcactgctctg

SEQ ID NO: 262487 - DNA, 25 bp, probe
tggcgaagatctacttcatctcctg

SEQ ID NO: 262488 - DNA, 25 bp, probe
tggccaagtgctctgagatcacctt

SEQ ID NO: 262489 - DNA, 25 bp, probe
ggccagagttgcaaagatcttttcc

SEQ ID NO: 262490 - DNA, 25 bp, probe
tggccagagccaagaaacactttca

SEQ ID NO: 262491 - DNA, 25 bp, probe
ggccaacacaagtgacctatgtgga

SEQ ID NO: 262492 - DNA, 25 bp, probe
ggccaatcccaatgactttgagaga

SEQ ID NO: 262493 - DNA, 25 bp, probe
ggccacggtcaatgacttctggcag

SEQ ID NO: 262494 - DNA, 25 bp, probe
ggccacgggcaaacactacggtgcc

SEQ ID NO: 262495 - DNA, 25 bp, probe
ggccaagggaaggagctctggttcc

SEQ ID NO: 262496 - DNA, 25 bp, probe
ggccaaggggtgacatcttaattcc

SEQ ID NO: 262497 - DNA, 25 bp, probe
ggccaaggggagccttgtggactac

SEQ ID NO: 262498 - DNA, 25 bp, probe
ggccaaatgacacgacttgggggca

SEQ ID NO: 262499 - DNA, 25 bp, probe
ggccagaatgaagtcctgggtcagg

SEQ ID NO: 262500 - DNA, 25 bp, probe
tggtcaggaaactcgggtctggaca

SEQ ID NO: 262501 - DNA, 25 bp, probe
tgggacggaagatcgggagcgggtc

SEQ ID NO: 262502 - DNA, 25 bp, probe
tggcgacagcgagaacggtggcgcc

SEQ ID NO: 262503 - DNA, 25 bp, probe
ggccagcacggagagcgtgagccca

SEQ ID NO: 262504 - DNA, 25 bp, probe
ggccacaggtcagactctgagctgc

SEQ ID NO: 262505 - DNA, 25 bp, probe
ggccaaggacacgggcaagctgcca

SEQ ID NO: 262506 - DNA, 25 bp, probe
ggccagaggacgctggccttcagca

SEQ ID NO: 262507 - DNA, 25 bp, probe
ggccagaggatgcctgctggatttc

SEQ ID NO: 262508 - DNA, 25 bp, probe
ggccactgtcattgctgaagtttat

SEQ ID NO: 262509 - DNA, 25 bp, probe
ggccactgacatcgtgacaggtctg

SEQ ID NO: 262510 - DNA, 25 bp, probe
ggccaccatcagcatgacaactgtg

SEQ ID NO: 262511 - DNA, 25 bp, probe
ggccacaagcacgatgagtgaaggg

SEQ ID NO: 262512 - DNA, 25 bp, probe
ggccagcaagcacgagcagtgtgag

SEQ ID NO: 262513 - DNA, 25 bp, probe
tggccaggatgtcgccagcattacc

SEQ ID NO: 262514 - DNA, 25 bp, probe
tggctcgacatgtgcttgcatttct

SEQ ID NO: 262515 - DNA, 25 bp, probe
tggccaaatgcacctgtgcagctgc

SEQ ID NO: 262516 - DNA, 25 bp, probe
ggccaaatgcacctgtgcagctgca

SEQ ID NO: 262517 - DNA, 25 bp, probe
ggccaacatgatggctgggctgagc

SEQ ID NO: 262518 - DNA, 25 bp, probe
ggccaaatatatgggccaggctttg

SEQ ID NO: 262519 - DNA, 25 bp, probe
ggccaaatatatgggccaggctttg

SEQ ID NO: 262520 - DNA, 25 bp, probe
ggccaagacaatggatgccggctgc

SEQ ID NO: 262521 - DNA, 25 bp, probe
ggccaagacgtggatgttcctgctc

SEQ ID NO: 262522 - DNA, 25 bp, probe
ggccagaatttggagtcccttgaat

SEQ ID NO: 262523 - DNA, 25 bp, probe
ggccaagattgggaactgcccattc

SEQ ID NO: 262524 - DNA, 25 bp, probe
ggccaagattgacagacacctaata

SEQ ID NO: 262525 - DNA, 25 bp, probe
ggccaagaggatcaatcacattagc

SEQ ID NO: 262526 - DNA, 25 bp, probe
ggccaagattgacaacctgttgcag

SEQ ID NO: 262527 - DNA, 25 bp, probe
ggccaagatttgcagaacttgtgga

SEQ ID NO: 262528 - DNA, 25 bp, probe
tggcatcaagcattttataactttt

SEQ ID NO: 262529 - DNA, 25 bp, probe
tggatagaacgcaaacaacttgatt

SEQ ID NO: 262530 - DNA, 25 bp, probe
tggaggaccttacaaccatgctgct

SEQ ID NO: 262531 - DNA, 25 bp, probe
tggattgacagtatcctggccttct

SEQ ID NO: 262532 - DNA, 25 bp, probe
tggattgacagtatcctggccttct

SEQ ID NO: 262533 - DNA, 25 bp, probe
tggagctgaacatctcaggtgccat

SEQ ID NO: 262534 - DNA, 25 bp, probe
tggcagcgagaaactgcatggtcgc

SEQ ID NO: 262535 - DNA, 25 bp, probe
tggctgcagcagctacgagagtcct

SEQ ID NO: 262536 - DNA, 25 bp, probe
tggctgcagcagctacgagagtcct

SEQ ID NO: 262537 - DNA, 25 bp, probe
tggccatgtgcgttcacagcatgtc

SEQ ID NO: 262538 - DNA, 25 bp, probe
tggcctgtggcaatgacatcgccct

SEQ ID NO: 262539 - DNA, 25 bp, probe
tggcactggtcacaaagctcagctg

SEQ ID NO: 262540 - DNA, 25 bp, probe
tggcatcggtgcttgggcagtgcct

SEQ ID NO: 262541 - DNA, 25 bp, probe
tggcatcggtgcttgggcagtgcct

SEQ ID NO: 262542 - DNA, 25 bp, probe
tggccgccttcatggaggcatcatg

SEQ ID NO: 262543 - DNA, 25 bp, probe
tggcgcagccttggtaacgccatgg

SEQ ID NO: 262544 - DNA, 25 bp, probe
tggcctgcacttgtacagtttgggt

SEQ ID NO: 262545 - DNA, 25 bp, probe
tggaacctcgaaacgtcttgcgggt

SEQ ID NO: 262546 - DNA, 25 bp, probe
tggccacctggaaccagatcctgga

SEQ ID NO: 262547 - DNA, 25 bp, probe
tggctattgttacccagtggtgtga

SEQ ID NO: 262548 - DNA, 25 bp, probe
tggctacgggatctcagtggaggac

SEQ ID NO: 262549 - DNA, 25 bp, probe
tggctacgggatctcagtggaggac

SEQ ID NO: 262550 - DNA, 25 bp, probe
tggccacgggggcagtgtgaggacc

SEQ ID NO: 262551 - DNA, 25 bp, probe
ggccaaggtgggtagatcatctgag

SEQ ID NO: 262552 - DNA, 25 bp, probe
tggccaatgtgcaggtggtcctcag

SEQ ID NO: 262553 - DNA, 25 bp, probe
tggccatctgatggactggtgtcct

SEQ ID NO: 262554 - DNA, 25 bp, probe
tggccatctgatggactggtgtcct

SEQ ID NO: 262555 - DNA, 25 bp, probe
tggcttcatgatgtacctgttgtcg

SEQ ID NO: 262556 - DNA, 25 bp, probe
tggcttctttaaactgtgagcacgc

SEQ ID NO: 262557 - DNA, 25 bp, probe
tggcttcttgtttaggctgaatcct

SEQ ID NO: 262558 - DNA, 25 bp, probe
tggccacgagtttgcggtgaagatt

SEQ ID NO: 262559 - DNA, 25 bp, probe
ggccaagcagtgcctgcctatgaaa

SEQ ID NO: 262560 - DNA, 25 bp, probe
ggccaagaggtttgctctgaagacc

SEQ ID NO: 262561 - DNA, 25 bp, probe
ggccacaggccaagttctaagacaa

SEQ ID NO: 262562 - DNA, 25 bp, probe
ggccacacctcaatggagcagaaga

SEQ ID NO: 262563 - DNA, 25 bp, probe
ggccacctgcacagctggatggtgg

SEQ ID NO: 262564 - DNA, 25 bp, probe
tggcccacacagcgtgcatgatggg

SEQ ID NO: 262565 - DNA, 25 bp, probe
tggcccacacagcgtgcatgatggg

SEQ ID NO: 262566 - DNA, 25 bp, probe
tggacaatccggggatgtcctgccg

SEQ ID NO: 262567 - DNA, 25 bp, probe
tggagaaccattgtcatatacccgg

SEQ ID NO: 262568 - DNA, 25 bp, probe
tggagaaggcttgtattagtcccaa

SEQ ID NO: 262569 - DNA, 25 bp, probe
tggaggtgggtgcttgtagttccag

SEQ ID NO: 262570 - DNA, 25 bp, probe
tggcatggttaaagtggttttcact

SEQ ID NO: 262571 - DNA, 25 bp, probe
tggctgcctttaagggtgatttggg

SEQ ID NO: 262572 - DNA, 25 bp, probe
tggctgcctttaagggtgatttggg

SEQ ID NO: 262573 - DNA, 25 bp, probe
tggctgaactttgggttcatttggg

SEQ ID NO: 262574 - DNA, 25 bp, probe
tggccaactcttctgtgtttgtaga

SEQ ID NO: 262575 - DNA, 25 bp, probe
tggctaagacctcctgtttgtcttc

SEQ ID NO: 262576 - DNA, 25 bp, probe
tggcccaggacacagtttggctcat

SEQ ID NO: 262577 - DNA, 25 bp, probe
tggcccacgtagcaaaaagatattt

SEQ ID NO: 262578 - DNA, 25 bp, probe
tggctttgcaaagaaaataggattt

SEQ ID NO: 262579 - DNA, 25 bp, probe
ttgtaggcgattgaaagaaggaact

SEQ ID NO: 262580 - DNA, 25 bp, probe
taaatgcccattgtacgactgtaac

SEQ ID NO: 262581 - DNA, 25 bp, probe
tggagtccctgtttaagactgaaac

SEQ ID NO: 262582 - DNA, 25 bp, probe
tggcctcctttgcccaagttgaaac

SEQ ID NO: 262583 - DNA, 25 bp, probe
tggcctcctatacacaaattctact

SEQ ID NO: 262584 - DNA, 25 bp, probe
tggctacctaaattgaaatcctttt

SEQ ID NO: 262585 - DNA, 25 bp, probe
ggccaatctagaacgtggattcctt

SEQ ID NO: 262586 - DNA, 25 bp, probe
ggccaaccagatgctgggcgatctc

SEQ ID NO: 262587 - DNA, 25 bp, probe
ggccaacaatatgcttgaggctccc

SEQ ID NO: 262588 - DNA, 25 bp, probe
ggccaacacaaggtatgtcactccc

SEQ ID NO: 262589 - DNA, 25 bp, probe
ggccaagagagacattgcctccacc

SEQ ID NO: 262590 - DNA, 25 bp, probe
ggccacagaaaattcttctccactt

SEQ ID NO: 262591 - DNA, 25 bp, probe
tggcctcagggaactcgttcccttc

SEQ ID NO: 262592 - DNA, 25 bp, probe
tggcctcagggaactcgttcccttc

SEQ ID NO: 262593 - DNA, 25 bp, probe
tggcctgcgggaggctgtgtacact

SEQ ID NO: 262594 - DNA, 25 bp, probe
tggcctgggccattgggaagctgta

SEQ ID NO: 262595 - DNA, 25 bp, probe
tggcctgtgcccaggctggagctga

SEQ ID NO: 262596 - DNA, 25 bp, probe
tggcgcttgagcaccgcatcggctg

SEQ ID NO: 262597 - DNA, 25 bp, probe
tggcctatgatcgctatgtcgccat

SEQ ID NO: 262598 - DNA, 25 bp, probe
tggcgctgagatccctcagacagca

SEQ ID NO: 262599 - DNA, 25 bp, probe
tggcgggctctgttgatgagcagaa

SEQ ID NO: 262600 - DNA, 25 bp, probe
tggcgagatgctcgtgtgcagagag

SEQ ID NO: 262601 - DNA, 25 bp, probe
ggccacatgtggctcaggatggctt

SEQ ID NO: 262602 - DNA, 25 bp, probe
tggccagcgtggtctacgctgtcat

SEQ ID NO: 262603 - DNA, 25 bp, probe
tggcctattggcaagatcgcatgtt

SEQ ID NO: 262604 - DNA, 25 bp, probe
tggcctattggcaagatcgcatgtt

SEQ ID NO: 262605 - DNA, 25 bp, probe
tggcctcttgagcagtggctggtcc

SEQ ID NO: 262606 - DNA, 25 bp, probe
tggcctgtagaatagcctgtggcct

SEQ ID NO: 262607 - DNA, 25 bp, probe
tggccaaagcgaacagcctggagcc

SEQ ID NO: 262608 - DNA, 25 bp, probe
tggcgcgacatgcagacgccgagat

SEQ ID NO: 262609 - DNA, 25 bp, probe
tggcctgcacagagagcatgggtga

SEQ ID NO: 262610 - DNA, 25 bp, probe
tggccatgcagctgtcgtggagctg

SEQ ID NO: 262611 - DNA, 25 bp, probe
tggccatgcacaaacggacagccca

SEQ ID NO: 262612 - DNA, 25 bp, probe
tggctcagcacacaggactgaccca

SEQ ID NO: 262613 - DNA, 25 bp, probe
tggctcagcacacaggactgaccca

SEQ ID NO: 262614 - DNA, 25 bp, probe
tggctcagcacacaggactgaccca

SEQ ID NO: 262615 - DNA, 25 bp, probe
tggctacacatttggacaagacatt

SEQ ID NO: 262616 - DNA, 25 bp, probe
tggcaggcactgtggacacccagtt

SEQ ID NO: 262617 - DNA, 25 bp, probe
tggaggatttagtacccaaatcgtc

SEQ ID NO: 262618 - DNA, 25 bp, probe
tggagtatgcttcacctagaaacag

SEQ ID NO: 262619 - DNA, 25 bp, probe
tggcttggatttgctctcgaaaatg

SEQ ID NO: 262620 - DNA, 25 bp, probe
tggctgttttgtgactgttacattg

SEQ ID NO: 262621 - DNA, 25 bp, probe
tggctcttttgggccttttaggaat

SEQ ID NO: 262622 - DNA, 25 bp, probe
tggttttttccagagttagatcctc

SEQ ID NO: 262623 - DNA, 25 bp, probe
tggttttttccagagttagatcctc

SEQ ID NO: 262624 - DNA, 25 bp, probe
tggatttgctctcgaaaatgttaat

SEQ ID NO: 262625 - DNA, 25 bp, probe
tggtttgatcctgaaatgttaaaca

SEQ ID NO: 262626 - DNA, 25 bp, probe
tggcttctgatgtcccaaatgctcc

SEQ ID NO: 262627 - DNA, 25 bp, probe
tggcttctacaccaaagtgctcaac

SEQ ID NO: 262628 - DNA, 25 bp, probe
tggctcgtggcagagtcatggtaat

SEQ ID NO: 262629 - DNA, 25 bp, probe
tggctcgtggcagagtcatggtaat

SEQ ID NO: 262630 - DNA, 25 bp, probe
tggcctttaccattatgctgtaatg

SEQ ID NO: 262631 - DNA, 25 bp, probe
tggcgtcttcaccaccatggagaag

SEQ ID NO: 262632 - DNA, 25 bp, probe
tggcttgcagaaaatccagaaaatg

SEQ ID NO: 262633 - DNA, 25 bp, probe
tggctataaccagtctcagcaagac

SEQ ID NO: 262634 - DNA, 25 bp, probe
tggctctgtcaggcagaacagcagg

SEQ ID NO: 262635 - DNA, 25 bp, probe
tggctttagcacaatattcagggag

SEQ ID NO: 262636 - DNA, 25 bp, probe
tggccctggcaagattgaaggatgt

SEQ ID NO: 262637 - DNA, 25 bp, probe
tggccttggtacttatggcagaatc

SEQ ID NO: 262638 - DNA, 25 bp, probe
tggccttggtacttatggcagaatc

SEQ ID NO: 262639 - DNA, 25 bp, probe
tggctctcaggtacatcctggcagg

SEQ ID NO: 262640 - DNA, 25 bp, probe
tggcagccagaaacatcctggtagc

SEQ ID NO: 262641 - DNA, 25 bp, probe
tggcatcgtgatggactccggtgac

SEQ ID NO: 262642 - DNA, 25 bp, probe
tggcagatgctaggaccaaggctga

SEQ ID NO: 262643 - DNA, 25 bp, probe
tggcagtctcagtccaaaagtgttg

SEQ ID NO: 262644 - DNA, 25 bp, probe
tggcagctctcatcatgaatgatag

SEQ ID NO: 262645 - DNA, 25 bp, probe
tggcgtccagcactgatgtgtctac

SEQ ID NO: 262646 - DNA, 25 bp, probe
tggcatgtcccgagtgcttgaggat

SEQ ID NO: 262647 - DNA, 25 bp, probe
tggctgccaactattttgaggatgt

SEQ ID NO: 262648 - DNA, 25 bp, probe
tggcccaaccttttcataggagatg

SEQ ID NO: 262649 - DNA, 25 bp, probe
tggccctcaccgagtatgtgcgggc

SEQ ID NO: 262650 - DNA, 25 bp, probe
tggcgcctacgaggacgtggcgggt

SEQ ID NO: 262651 - DNA, 25 bp, probe
tggccctcagctgggacagtgggga

SEQ ID NO: 262652 - DNA, 25 bp, probe
tggccagaactcagacgctgggccc

SEQ ID NO: 262653 - DNA, 25 bp, probe
tggccagtggtcagaggtggagccc

SEQ ID NO: 262654 - DNA, 25 bp, probe
tggcctgtgtgtgtggacgagaagc

SEQ ID NO: 262655 - DNA, 25 bp, probe
tggctgctgtttgattatgcagagc

SEQ ID NO: 262656 - DNA, 25 bp, probe
tggctgctgtttgattatgcagagc

SEQ ID NO: 262657 - DNA, 25 bp, probe
tggctgtgctattatagaaatggct

SEQ ID NO: 262658 - DNA, 25 bp, probe
tggctggcagtcttgaaattgtcac

SEQ ID NO: 262659 - DNA, 25 bp, probe
tggctgatgcccagaacatttcact

SEQ ID NO: 262660 - DNA, 25 bp, probe
tggctgtggccacagacaacttcat

SEQ ID NO: 262661 - DNA, 25 bp, probe
tggcgtcctggttcaaggatgtcat

SEQ ID NO: 262662 - DNA, 25 bp, probe
tggccctgctggcaacaaagtcatc

SEQ ID NO: 262663 - DNA, 25 bp, probe
tggccgcgtgggggcagaagtgcac

SEQ ID NO: 262664 - DNA, 25 bp, probe
tggaccgctataggctgcagaaggc

SEQ ID NO: 262665 - DNA, 25 bp, probe
tggcaccgtcaaggctgagaacggg

SEQ ID NO: 262666 - DNA, 25 bp, probe
tggcaccgtcaaggctgagaacggg

SEQ ID NO: 262667 - DNA, 25 bp, probe
tggcctcgctgcagcaagagaacaa

SEQ ID NO: 262668 - DNA, 25 bp, probe
tggccaagcttcctaagaacaaaaa

SEQ ID NO: 262669 - DNA, 25 bp, probe
ggccaactctcgtagtggaactaat

SEQ ID NO: 262670 - DNA, 25 bp, probe
ggccaactctcgtagtggaactaat

SEQ ID NO: 262671 - DNA, 25 bp, probe
tggccaactctcgtagtggaactaa

SEQ ID NO: 262672 - DNA, 25 bp, probe
tggccgccatctacgaggagaagga

SEQ ID NO: 262673 - DNA, 25 bp, probe
tggccgccatctacgaggagaagga

SEQ ID NO: 262674 - DNA, 25 bp, probe
tggccggtggaccagactgactggt

SEQ ID NO: 262675 - DNA, 25 bp, probe
tggccgtgctggtgattctgatcgg

SEQ ID NO: 262676 - DNA, 25 bp, probe
tggcatagttggagtctctgactgt

SEQ ID NO: 262677 - DNA, 25 bp, probe
tggcctgtgggatgtcactactgac

SEQ ID NO: 262678 - DNA, 25 bp, probe
tggcctgactggttgtcagaatgga

SEQ ID NO: 262679 - DNA, 25 bp, probe
tggcctgatgctaatgtgtaaatgg

SEQ ID NO: 262680 - DNA, 25 bp, probe
tggccttgctagagtaattgaagat

SEQ ID NO: 262681 - DNA, 25 bp, probe
tggcctttatgattggaatgttcaa

SEQ ID NO: 262682 - DNA, 25 bp, probe
tggcgttttggaatgcaatttgcac

SEQ ID NO: 262683 - DNA, 25 bp, probe
tggagggtggagttgaaaatgatca

SEQ ID NO: 262684 - DNA, 25 bp, probe
tgggaagcgaacttacacaatgtat

SEQ ID NO: 262685 - DNA, 25 bp, probe
tgtagttgcgacttcttcgatagtt

SEQ ID NO: 262686 - DNA, 25 bp, probe
tggatgcttgagtcttaccgtaatt

SEQ ID NO: 262687 - DNA, 25 bp, probe
tggagtatgcggctgtcaactacct

SEQ ID NO: 262688 - DNA, 25 bp, probe
tggctgtggcaacggacaaaactct

SEQ ID NO: 262689 - DNA, 25 bp, probe
tggctgggccagttcccagaagctt

SEQ ID NO: 262690 - DNA, 25 bp, probe
tggcctgacaagtatcccagcaaga

SEQ ID NO: 262691 - DNA, 25 bp, probe
tggccaacagatgaccaagagatgc

SEQ ID NO: 262692 - DNA, 25 bp, probe
tggccaacatactacccaaatctga

SEQ ID NO: 262693 - DNA, 25 bp, probe
tggcccaacaattcccagattctga

SEQ ID NO: 262694 - DNA, 25 bp, probe
tggcctcagaggacatcccagattt

SEQ ID NO: 262695 - DNA, 25 bp, probe
tggccgctgagggcacaaggaatta

SEQ ID NO: 262696 - DNA, 25 bp, probe
tggctctggggcccaagggattgtt

SEQ ID NO: 262697 - DNA, 25 bp, probe
tggctgggtgggtttgcaggacgtc

SEQ ID NO: 262698 - DNA, 25 bp, probe
tggcagaagatgagtttgtgtactg

SEQ ID NO: 262699 - DNA, 25 bp, probe
tggcgtgaccagctttgtttctgcc

SEQ ID NO: 262700 - DNA, 25 bp, probe
tggcacctatctctttttttgccat

SEQ ID NO: 262701 - DNA, 25 bp, probe
tggcacttattgcaatttaacacca

SEQ ID NO: 262702 - DNA, 25 bp, probe
tggaatgtctgtaaattctaatact

SEQ ID NO: 262703 - DNA, 25 bp, probe
tggacatcgtaaagactagaatagt

SEQ ID NO: 262704 - DNA, 25 bp, probe
tggacatcgtaaagactagaatagt

SEQ ID NO: 262705 - DNA, 25 bp, probe
tggccatctggaatatgcattaaat

SEQ ID NO: 262706 - DNA, 25 bp, probe
tggccatgttagcctggtcaagatg

SEQ ID NO: 262707 - DNA, 25 bp, probe
tggctcatgttcacatgtcctgagg

SEQ ID NO: 262708 - DNA, 25 bp, probe
tggctatttcaggattcttcgagga

SEQ ID NO: 262709 - DNA, 25 bp, probe
tggcagattatcgacatctttgaag

SEQ ID NO: 262710 - DNA, 25 bp, probe
tggcagttatctccattttggaaga

SEQ ID NO: 262711 - DNA, 25 bp, probe
tggcagttatctccattttggaaga

SEQ ID NO: 262712 - DNA, 25 bp, probe
tggagacgctcccatttttgatgaa

SEQ ID NO: 262713 - DNA, 25 bp, probe
tggcatctaccccatgttttataag

SEQ ID NO: 262714 - DNA, 25 bp, probe
tggcactaactgctttcctgaatgg

SEQ ID NO: 262715 - DNA, 25 bp, probe
tggcacataactgtctccttaacca

SEQ ID NO: 262716 - DNA, 25 bp, probe
tggaataagctacgtcctcaacgcc

SEQ ID NO: 262717 - DNA, 25 bp, probe
tggctaaagacacggacccactcaa

SEQ ID NO: 262718 - DNA, 25 bp, probe
tggctaaagacacggacccactcaa

SEQ ID NO: 262719 - DNA, 25 bp, probe
tggctgaagagcaagggacctagtc

SEQ ID NO: 262720 - DNA, 25 bp, probe
tggcatagaggttgtggcccttctt

SEQ ID NO: 262721 - DNA, 25 bp, probe
tggctgggcgagatgagcaccgagc

SEQ ID NO: 262722 - DNA, 25 bp, probe
tggcactggcgggatggccagggct

SEQ ID NO: 262723 - DNA, 25 bp, probe
tggcagcgttggtggccagtggtgt

SEQ ID NO: 262724 - DNA, 25 bp, probe
tggagcagttggtgtggcacgtgcg

SEQ ID NO: 262725 - DNA, 25 bp, probe
tggccgtaccactggcatcgtgatg

SEQ ID NO: 262726 - DNA, 25 bp, probe
tggcgcgtctcatcaaggacgatga

SEQ ID NO: 262727 - DNA, 25 bp, probe
tggccgtccaaatgtgagcatgagg

SEQ ID NO: 262728 - DNA, 25 bp, probe
tggcacattgcccaacgtgactaca

SEQ ID NO: 262729 - DNA, 25 bp, probe
tggacatcccgagagtgctggacat

SEQ ID NO: 262730 - DNA, 25 bp, probe
tggccatctcagggtttctggtgat

SEQ ID NO: 262731 - DNA, 25 bp, probe
tggacatcatcaaggattcctgggt

SEQ ID NO: 262732 - DNA, 25 bp, probe
tggacatataattgctggctggtgg

SEQ ID NO: 262733 - DNA, 25 bp, probe
ggccaatgtgcatgtgcacaggatg

SEQ ID NO: 262734 - DNA, 25 bp, probe
tggccaatgtgcatgtgcacaggat

SEQ ID NO: 262735 - DNA, 25 bp, probe
tggccatcatgtatagcgccgtcac

SEQ ID NO: 262736 - DNA, 25 bp, probe
tggcactcagataatagtgacgctg

SEQ ID NO: 262737 - DNA, 25 bp, probe
tggcctgcgatctcagtgacaatga

SEQ ID NO: 262738 - DNA, 25 bp, probe
tggcctgcgatctcagtgacaatga

SEQ ID NO: 262739 - DNA, 25 bp, probe
tggcctggagagcgtgagctatgac

SEQ ID NO: 262740 - DNA, 25 bp, probe
tggcgcgccaggcggacgaggagat

SEQ ID NO: 262741 - DNA, 25 bp, probe
tggcgagcagggcggtgggaagctg

SEQ ID NO: 262742 - DNA, 25 bp, probe
tggcggcgggaggttgatggcgagt

SEQ ID NO: 262743 - DNA, 25 bp, probe
tggcggtgaagacggtcaacgagtc

SEQ ID NO: 262744 - DNA, 25 bp, probe
tggcgaggacagcgtggtactggct

SEQ ID NO: 262745 - DNA, 25 bp, probe
tggccaggaagggtcgctctgggct

SEQ ID NO: 262746 - DNA, 25 bp, probe
tggcatcatgcgaaggaactctctg

SEQ ID NO: 262747 - DNA, 25 bp, probe
tggcatgcacgttcagacagctgca

SEQ ID NO: 262748 - DNA, 25 bp, probe
tggcagcattgcaatagtgaggcag

SEQ ID NO: 262749 - DNA, 25 bp, probe
tggcctacatcattgagcaggcagg

SEQ ID NO: 262750 - DNA, 25 bp, probe
tggccatgaatatgcagactgcagg

SEQ ID NO: 262751 - DNA, 25 bp, probe
tggccatatcaaggcagcacggccc

SEQ ID NO: 262752 - DNA, 25 bp, probe
tggcacttcaatgagacggtgctca

SEQ ID NO: 262753 - DNA, 25 bp, probe
tggcactggagtcaggcaggttcca

SEQ ID NO: 262754 - DNA, 25 bp, probe
tggcggctgtggaaggggatcccag

SEQ ID NO: 262755 - DNA, 25 bp, probe
tggcttccatggacaggatggccgc

SEQ ID NO: 262756 - DNA, 25 bp, probe
tggctcacctggaggagctgcagcc

SEQ ID NO: 262757 - DNA, 25 bp, probe
tggccatcaaggtggtggaccggcg

SEQ ID NO: 262758 - DNA, 25 bp, probe
tggcctgcaaggtggctgacttcgg

SEQ ID NO: 262759 - DNA, 25 bp, probe
tggcctgcaaggtggctgacttcgg

SEQ ID NO: 262760 - DNA, 25 bp, probe
tggccatcacggttttgattctcca

SEQ ID NO: 262761 - DNA, 25 bp, probe
tggccaacaatatgcttgaggctcc

SEQ ID NO: 262762 - DNA, 25 bp, probe
tggccaaagacggcttgcagcagtc

SEQ ID NO: 262763 - DNA, 25 bp, probe
tggccagggacggcatgagcaggag

SEQ ID NO: 262764 - DNA, 25 bp, probe
tggccagtgtccctatgaagggatg

SEQ ID NO: 262765 - DNA, 25 bp, probe
tggccgactgcctgtgaagtggatg

SEQ ID NO: 262766 - DNA, 25 bp, probe
tggcacgcactgccactataaggct

SEQ ID NO: 262767 - DNA, 25 bp, probe
tggcccacagtgactgtaaagtgtg

SEQ ID NO: 262768 - DNA, 25 bp, probe
tggcccagccagagctataattgtt

SEQ ID NO: 262769 - DNA, 25 bp, probe
tggcctggacagagaagaatgatgg

SEQ ID NO: 262770 - DNA, 25 bp, probe
tggccttaagtgtctagagcatctg

SEQ ID NO: 262771 - DNA, 25 bp, probe
tggccattaagacgctgaaggaggg

SEQ ID NO: 262772 - DNA, 25 bp, probe
tggccctaaggtgcacatgctgagg

SEQ ID NO: 262773 - DNA, 25 bp, probe
tggccctaaggtgcacatgctgagg

SEQ ID NO: 262774 - DNA, 25 bp, probe
tggccctaaggtgcacatgctgagg

SEQ ID NO: 262775 - DNA, 25 bp, probe
tggccctgactggtacaccgtgggc

SEQ ID NO: 262776 - DNA, 25 bp, probe
tggccctgactggtacaccgtgggc

SEQ ID NO: 262777 - DNA, 25 bp, probe
tggcccatgttggtagccactgcta

SEQ ID NO: 262778 - DNA, 25 bp, probe
tggccagagcttagtcacgcagcct

SEQ ID NO: 262779 - DNA, 25 bp, probe
tggctcaatgtctttcgcagatcgc

SEQ ID NO: 262780 - DNA, 25 bp, probe
tggctcaatgtctttcgcagatcgc

SEQ ID NO: 262781 - DNA, 25 bp, probe
tggctgcagcagctttcgaatcaga

SEQ ID NO: 262782 - DNA, 25 bp, probe
tggctgcagcagctttcgaatcaga

SEQ ID NO: 262783 - DNA, 25 bp, probe
tggcccatcatgacattgggtagca

SEQ ID NO: 262784 - DNA, 25 bp, probe
tggcgctcagcagatatttgaagct

SEQ ID NO: 262785 - DNA, 25 bp, probe
tggccatggaggtctttgtcatctt

SEQ ID NO: 262786 - DNA, 25 bp, probe
tggccatggaggtctttgtcatctt

SEQ ID NO: 262787 - DNA, 25 bp, probe
tggccatggagcgtggtagccactt

SEQ ID NO: 262788 - DNA, 25 bp, probe
tggccttagcctagctagcacagtt

SEQ ID NO: 262789 - DNA, 25 bp, probe
tggcccttgctttgtatgcaacctt

SEQ ID NO: 262790 - DNA, 25 bp, probe
tggcctcttttctttcagacagaga

SEQ ID NO: 262791 - DNA, 25 bp, probe
tggcttctttccattgtcacaggca

SEQ ID NO: 262792 - DNA, 25 bp, probe
tggccatctttcttatcttaattgc

SEQ ID NO: 262793 - DNA, 25 bp, probe
tggcctgcttttggagtcctattgt

SEQ ID NO: 262794 - DNA, 25 bp, probe
tggcctttttaatgagctattgtta

SEQ ID NO: 262795 - DNA, 25 bp, probe
tggctttgtttgtttgttttcttct

SEQ ID NO: 262796 - DNA, 25 bp, probe
tggcagtttctaacttgtgtttctt

SEQ ID NO: 262797 - DNA, 25 bp, probe
tggcgagccatgttctttggtttct

SEQ ID NO: 262798 - DNA, 25 bp, probe
tggcgagtctgcttctttgcaggtc

SEQ ID NO: 262799 - DNA, 25 bp, probe
tggcgagtctgcttctttgcaggtc

SEQ ID NO: 262800 - DNA, 25 bp, probe
tggatggttcctttatgcagcttgg

SEQ ID NO: 262801 - DNA, 25 bp, probe
tggatggttcctttatgcagcttgg

SEQ ID NO: 262802 - DNA, 25 bp, probe
tggaatgtgcatactttaggtttgt

SEQ ID NO: 262803 - DNA, 25 bp, probe
tggaaccttattccagcagttgttc

SEQ ID NO: 262804 - DNA, 25 bp, probe
tggaatgcacttaatagctggtttt

SEQ ID NO: 262805 - DNA, 25 bp, probe
tggcagcagcacatctaacgagtag

SEQ ID NO: 262806 - DNA, 25 bp, probe
tggacatgacagggaacaggaaggt

SEQ ID NO: 262807 - DNA, 25 bp, probe
tggaaccggcgaaacgacatggggg

SEQ ID NO: 262808 - DNA, 25 bp, probe
tggaaacacggaaacgcctggctaa

SEQ ID NO: 262809 - DNA, 25 bp, probe
tggaaaacgtacaaagcctgactta

SEQ ID NO: 262810 - DNA, 25 bp, probe
tggaaaacttccaacttgtgttctc

SEQ ID NO: 262811 - DNA, 25 bp, probe
tggaaatagttccgtttgtttctct

SEQ ID NO: 262812 - DNA, 25 bp, probe
tggaaatagttccgtttgtttctct

SEQ ID NO: 262813 - DNA, 25 bp, probe
tggacaaaagggcatgctggttcct

SEQ ID NO: 262814 - DNA, 25 bp, probe
tggaaaatgggggcaggggtcctga

SEQ ID NO: 262815 - DNA, 25 bp, probe
tggagacaatcgggaaggggtcctt

SEQ ID NO: 262816 - DNA, 25 bp, probe
taagcgcttcagtggggttatccta

SEQ ID NO: 262817 - DNA, 25 bp, probe
tgcaaccaacagtaaggacttacgt

SEQ ID NO: 262818 - DNA, 25 bp, probe
tggtctctacctaatggacctccgt

SEQ ID NO: 262819 - DNA, 25 bp, probe
tggacctaccgatgagacgctggac

SEQ ID NO: 262820 - DNA, 25 bp, probe
tggacctaccgatgagacgctggac

SEQ ID NO: 262821 - DNA, 25 bp, probe
tggacgtaccgacaatggtctgggg

SEQ ID NO: 262822 - DNA, 25 bp, probe
tgagacgttccgcaaacgcttggtc

SEQ ID NO: 262823 - DNA, 25 bp, probe
tgagacgttccgcaaacgcttggtc

SEQ ID NO: 262824 - DNA, 25 bp, probe
tgtacggtagtgcaaccctggtggc

SEQ ID NO: 262825 - DNA, 25 bp, probe
taatcagtgtagagaaaaccgtgaa

SEQ ID NO: 262826 - DNA, 25 bp, probe
tggcggctgtggatgaaaaccgtga

SEQ ID NO: 262827 - DNA, 25 bp, probe
tggctggtgggttgcaagaaatttc

SEQ ID NO: 262828 - DNA, 25 bp, probe
tggccgagtggttgctataaaatcc

SEQ ID NO: 262829 - DNA, 25 bp, probe
tggcggatggttttccaaaactcca

SEQ ID NO: 262830 - DNA, 25 bp, probe
tgtttgcactgtaccccaaaaccaa

SEQ ID NO: 262831 - DNA, 25 bp, probe
tgtttgcactgtaccccaaaaccaa

SEQ ID NO: 262832 - DNA, 25 bp, probe
tgtttcacttttgggtaaatacaca

SEQ ID NO: 262833 - DNA, 25 bp, probe
tggccttctttgtggtacaaatcaa

SEQ ID NO: 262834 - DNA, 25 bp, probe
tggctcccctggtgcaaaacaatta

SEQ ID NO: 262835 - DNA, 25 bp, probe
tggcatccctttttcataaattatt

SEQ ID NO: 262836 - DNA, 25 bp, probe
tggacagccactgccaaaaaatatg

SEQ ID NO: 262837 - DNA, 25 bp, probe
tggcagctccacgccgaaaaatgaa

SEQ ID NO: 262838 - DNA, 25 bp, probe
tggcagctccacgccgaaaaatgaa

SEQ ID NO: 262839 - DNA, 25 bp, probe
tgcaacgccacctttaaaaagacct

SEQ ID NO: 262840 - DNA, 25 bp, probe
tggccctcacgtatgaggagaagcc

SEQ ID NO: 262841 - DNA, 25 bp, probe
tggcctccctagattggctgagagc

SEQ ID NO: 262842 - DNA, 25 bp, probe
tggcctccctgcgaacgcgggagga

SEQ ID NO: 262843 - DNA, 25 bp, probe
tggcctccctgcgaacgcgggagga

SEQ ID NO: 262844 - DNA, 25 bp, probe
tggcgtatgtcatcaacgggggtga

SEQ ID NO: 262845 - DNA, 25 bp, probe
tggcgaagagcaggccagggggctt

SEQ ID NO: 262846 - DNA, 25 bp, probe
tggcggaacctgccagatggacgct

SEQ ID NO: 262847 - DNA, 25 bp, probe
tggcgggaatcacctgaaacagctt

SEQ ID NO: 262848 - DNA, 25 bp, probe
tggctggggaacaatgttcacagat

SEQ ID NO: 262849 - DNA, 25 bp, probe
tggcgcggtgaggcaaggtgacgat

SEQ ID NO: 262850 - DNA, 25 bp, probe
tggctgctttgacaaggcagacgtc

SEQ ID NO: 262851 - DNA, 25 bp, probe
tggctcagtcaagattggagacctc

SEQ ID NO: 262852 - DNA, 25 bp, probe
tggctgcatgccaaggggaagagcg

SEQ ID NO: 262853 - DNA, 25 bp, probe
tggctcacccagggatcaaggcgct

SEQ ID NO: 262854 - DNA, 25 bp, probe
tggccccgctgcagtgaagagctgc

SEQ ID NO: 262855 - DNA, 25 bp, probe
tggccccgctgcagtgaagagctgc

SEQ ID NO: 262856 - DNA, 25 bp, probe
tggccccgctgcagtgaagagctgc

SEQ ID NO: 262857 - DNA, 25 bp, probe
tggccctgagcgagtggagtctgcc

SEQ ID NO: 262858 - DNA, 25 bp, probe
tggcgcctgaggtgctggaggacaa

SEQ ID NO: 262859 - DNA, 25 bp, probe
tggcgcctgaggtgctggaggacaa

SEQ ID NO: 262860 - DNA, 25 bp, probe
tggcccgaggcatgcagtatctgga

SEQ ID NO: 262861 - DNA, 25 bp, probe
tggcccgaggcatgcagtatctgga

SEQ ID NO: 262862 - DNA, 25 bp, probe
tggcacctgaggtggtgactcgaaa

SEQ ID NO: 262863 - DNA, 25 bp, probe
tggccggagagggggcagccagagc

SEQ ID NO: 262864 - DNA, 25 bp, probe
tggcctggaatgagagggtcaagcc

SEQ ID NO: 262865 - DNA, 25 bp, probe
tggcccaaatgtcagggttctgctc

SEQ ID NO: 262866 - DNA, 25 bp, probe
tggctcctaagtcagggtgttatgt

SEQ ID NO: 262867 - DNA, 25 bp, probe
tggcccacatgacggggggatgtag

SEQ ID NO: 262868 - DNA, 25 bp, probe
tggcccagaccctgtgggcatggag

SEQ ID NO: 262869 - DNA, 25 bp, probe
tggccgagacctccagggccaaaga

SEQ ID NO: 262870 - DNA, 25 bp, probe
tggactgaacttccagaacaaaagc

SEQ ID NO: 262871 - DNA, 25 bp, probe
tggaccaacttttatgtaacaaaca

SEQ ID NO: 262872 - DNA, 25 bp, probe
tggaaactttttagttctcactaca

SEQ ID NO: 262873 - DNA, 25 bp, probe
tggaaactttccattttattcaaga

SEQ ID NO: 262874 - DNA, 25 bp, probe
tggaacctttccaactggatcccaa

SEQ ID NO: 262875 - DNA, 25 bp, probe
tggaacactatgtgtattaatccac

SEQ ID NO: 262876 - DNA, 25 bp, probe
tggaacccatgattcctaaacccgg

SEQ ID NO: 262877 - DNA, 25 bp, probe
tggatcactgatacactcctaccat

SEQ ID NO: 262878 - DNA, 25 bp, probe
tggcatcattataaggcttaattgt

SEQ ID NO: 262879 - DNA, 25 bp, probe
tggctctgtaatgctttagcatgtg

SEQ ID NO: 262880 - DNA, 25 bp, probe
tggcatgatgctcaccttcaatgct

SEQ ID NO: 262881 - DNA, 25 bp, probe
tggctgatgctggcctgtaattttt

SEQ ID NO: 262882 - DNA, 25 bp, probe
tggctgagtgcagctgagcggctgt

SEQ ID NO: 262883 - DNA, 25 bp, probe
tggctgaggtcaaggatgtgctgat

SEQ ID NO: 262884 - DNA, 25 bp, probe
tggctagagtttcttctcatcagag

SEQ ID NO: 262885 - DNA, 25 bp, probe
tggaaggtttgcgtgctcttcacag

SEQ ID NO: 262886 - DNA, 25 bp, probe
tggcacagttgttgcaatcctcgtc

SEQ ID NO: 262887 - DNA, 25 bp, probe
tggcacagttgttgcaatcctcgtc

SEQ ID NO: 262888 - DNA, 25 bp, probe
tggcagttcggctagatttctgtct

SEQ ID NO: 262889 - DNA, 25 bp, probe
tggagtataggctgcatcatctttg

SEQ ID NO: 262890 - DNA, 25 bp, probe
tggacaaatgtccttgccttcattt

SEQ ID NO: 262891 - DNA, 25 bp, probe
tggacaaatgtccttgccttcattt

SEQ ID NO: 262892 - DNA, 25 bp, probe
tggaaacttagcactttatatttat

SEQ ID NO: 262893 - DNA, 25 bp, probe
tgggtcagcactttaccttttttct

SEQ ID NO: 262894 - DNA, 25 bp, probe
tggcgtcatactctaccatatggtg

SEQ ID NO: 262895 - DNA, 25 bp, probe
tggcgttacagcgcaacagcagcct

SEQ ID NO: 262896 - DNA, 25 bp, probe
tggctgggctatgccaactcagccc

SEQ ID NO: 262897 - DNA, 25 bp, probe
tggctgggtgtctgaactggcaaac

SEQ ID NO: 262898 - DNA, 25 bp, probe
tggggcctcccagaatggaaagtcc

SEQ ID NO: 262899 - DNA, 25 bp, probe
tggcggctctcgccaaaaggaagga

SEQ ID NO: 262900 - DNA, 25 bp, probe
tggcggacagcgccagcgagagcga

SEQ ID NO: 262901 - DNA, 25 bp, probe
tggcgaggacgccatcaagcagcac

SEQ ID NO: 262902 - DNA, 25 bp, probe
tggcccagatgctgatacacagcac

SEQ ID NO: 262903 - DNA, 25 bp, probe
tggcctgcatggagtacagcagcat

SEQ ID NO: 262904 - DNA, 25 bp, probe
tggactgcaggcacaaagacccaaa

SEQ ID NO: 262905 - DNA, 25 bp, probe
tggatatagccttttaacctgcaaa

SEQ ID NO: 262906 - DNA, 25 bp, probe
tggaagactcttatccatctgtgaa

SEQ ID NO: 262907 - DNA, 25 bp, probe
tggagagattcatattcatttgtat

SEQ ID NO: 262908 - DNA, 25 bp, probe
tggaggtgcatttataattcagtct

SEQ ID NO: 262909 - DNA, 25 bp, probe
tggaggtttctgtacctcgcttgga

SEQ ID NO: 262910 - DNA, 25 bp, probe
tggaggtttctgtacctcgcttgga

SEQ ID NO: 262911 - DNA, 25 bp, probe
tggaggtggacgtggcgtcctggtt

SEQ ID NO: 262912 - DNA, 25 bp, probe
tggaggtggacgtggcgtcctggtt

SEQ ID NO: 262913 - DNA, 25 bp, probe
tggaggtggacgtggcgtcctggtt

SEQ ID NO: 262914 - DNA, 25 bp, probe
tgagaagaggggtggcccccgttga

SEQ ID NO: 262915 - DNA, 25 bp, probe
tggacaaggtggggggccccactct

SEQ ID NO: 262916 - DNA, 25 bp, probe
tggacaaggtggggggccccactct

SEQ ID NO: 262917 - DNA, 25 bp, probe
tggacaaggtggtgttacccaactt

SEQ ID NO: 262918 - DNA, 25 bp, probe
tggaccctgtggggtatagccggca

SEQ ID NO: 262919 - DNA, 25 bp, probe
tggacctgtgggtgttcaccctgca

SEQ ID NO: 262920 - DNA, 25 bp, probe
tggacctgtgggtgttcaccctgca

SEQ ID NO: 262921 - DNA, 25 bp, probe
tggaacgattggagatcccgcctcc

SEQ ID NO: 262922 - DNA, 25 bp, probe
tggacaactttgagtacctcacccg

SEQ ID NO: 262923 - DNA, 25 bp, probe
tggacaccaactaatgctgactcca

SEQ ID NO: 262924 - DNA, 25 bp, probe
tggaaacaacttggagaccacctta

SEQ ID NO: 262925 - DNA, 25 bp, probe
tgagaaaaacccaagaccgctcggg

SEQ ID NO: 262926 - DNA, 25 bp, probe
tggacaagatgatccggaaccccgc

SEQ ID NO: 262927 - DNA, 25 bp, probe
tggaaaacaatcccaacaggcccgt

SEQ ID NO: 262928 - DNA, 25 bp, probe
tggatataaaacctaaatcccctat

SEQ ID NO: 262929 - DNA, 25 bp, probe
tggaaagcaaagtcaaaacccagtt

SEQ ID NO: 262930 - DNA, 25 bp, probe
tggaaagcaaagtcaaaacccagtt

SEQ ID NO: 262931 - DNA, 25 bp, probe
tggaatcaggaatcttaacttcatg

SEQ ID NO: 262932 - DNA, 25 bp, probe
tggaatcaggcttggttcattttaa

SEQ ID NO: 262933 - DNA, 25 bp, probe
tggaaagtgtcaccctctttgtaca

SEQ ID NO: 262934 - DNA, 25 bp, probe
tggaaagtgtcaccctctttgtaca

SEQ ID NO: 262935 - DNA, 25 bp, probe
tggaatcagtggctacttggtggac

SEQ ID NO: 262936 - DNA, 25 bp, probe
tggactcgggggtattttggtcaca

SEQ ID NO: 262937 - DNA, 25 bp, probe
tggcacccgaggcattatttgaccg

SEQ ID NO: 262938 - DNA, 25 bp, probe
tggcacccgaggcattatttgaccg

SEQ ID NO: 262939 - DNA, 25 bp, probe
tggcagccatggtgtatttttgtcc

SEQ ID NO: 262940 - DNA, 25 bp, probe
tgtggccaggtataactttgccgcc

SEQ ID NO: 262941 - DNA, 25 bp, probe
tggacacaggtgccaaattctaccg

SEQ ID NO: 262942 - DNA, 25 bp, probe
tggacaaagggatccccagccagag

SEQ ID NO: 262943 - DNA, 25 bp, probe
tggacacttgggtcacctgacccgt

SEQ ID NO: 262944 - DNA, 25 bp, probe
tggaaagatgggtccactgccacgt

SEQ ID NO: 262945 - DNA, 25 bp, probe
tggaaagatgggtccactgccacgt

SEQ ID NO: 262946 - DNA, 25 bp, probe
tggaaagatgggtccactgccacgt

SEQ ID NO: 262947 - DNA, 25 bp, probe
tggaaaaggtcctactgagcagctt

SEQ ID NO: 262948 - DNA, 25 bp, probe
gaagatggtgtcccagagcttcacc

SEQ ID NO: 262949 - DNA, 25 bp, probe
tggactatgggggacacacgcccct

SEQ ID NO: 262950 - DNA, 25 bp, probe
tggaaatggccggaaacctccagaa

SEQ ID NO: 262951 - DNA, 25 bp, probe
tggcaaattccatggcaccgtcaag

SEQ ID NO: 262952 - DNA, 25 bp, probe
tggctatagtcccgatgacctgatc

SEQ ID NO: 262953 - DNA, 25 bp, probe
tggcttatcccgcatgagcaggagc

SEQ ID NO: 262954 - DNA, 25 bp, probe
tggcttagccggaggggacgtggcc

SEQ ID NO: 262955 - DNA, 25 bp, probe
tggcttagccggaggggacgtggcc

SEQ ID NO: 262956 - DNA, 25 bp, probe
tggcttcccgcactagggaacgggt

SEQ ID NO: 262957 - DNA, 25 bp, probe
tggcttccctcgagtggagccagac

SEQ ID NO: 262958 - DNA, 25 bp, probe
tggctgtcaccaagtaggaagaaga

SEQ ID NO: 262959 - DNA, 25 bp, probe
tggcatgccaccaatgccaggaaac

SEQ ID NO: 262960 - DNA, 25 bp, probe
tggctgccccgaggaagacaacaaa

SEQ ID NO: 262961 - DNA, 25 bp, probe
tgtgcccctggattggaaccaaata

SEQ ID NO: 262962 - DNA, 25 bp, probe
tggcatctcttgcacagtaaccttt

SEQ ID NO: 262963 - DNA, 25 bp, probe
tggcatctcttgcacagtaaccttt

SEQ ID NO: 262964 - DNA, 25 bp, probe
tggcaattcttgtgtcaacccattt

SEQ ID NO: 262965 - DNA, 25 bp, probe
tggctgatttcatccgcaacaaact

SEQ ID NO: 262966 - DNA, 25 bp, probe
tggctactctgctccagcatgaaaa

SEQ ID NO: 262967 - DNA, 25 bp, probe
tggctactctgctccagcatgaaaa

SEQ ID NO: 262968 - DNA, 25 bp, probe
tggctactgtgtggccacgtacgtg

SEQ ID NO: 262969 - DNA, 25 bp, probe
tggctgagcgtggtccacggaggca

SEQ ID NO: 262970 - DNA, 25 bp, probe
tggcgagggcgtttggagaggagga

SEQ ID NO: 262971 - DNA, 25 bp, probe
tggcgattctctgagggcaggggga

SEQ ID NO: 262972 - DNA, 25 bp, probe
tggcaagctataggagagaatgggg

SEQ ID NO: 262973 - DNA, 25 bp, probe
tggcaagttcacaagcaggctgcac

SEQ ID NO: 262974 - DNA, 25 bp, probe
tggcatggctggccaactggcagac

SEQ ID NO: 262975 - DNA, 25 bp, probe
tggcactgcatacaatctgaggcct

SEQ ID NO: 262976 - DNA, 25 bp, probe
tggacatgtatcagatgctgagaca

SEQ ID NO: 262977 - DNA, 25 bp, probe
tggcagattgtttgtgctttcaaca

SEQ ID NO: 262978 - DNA, 25 bp, probe
tggcattttgctggtcagttcctgc

SEQ ID NO: 262979 - DNA, 25 bp, probe
tggcaagctgtgcttcatgttccga

SEQ ID NO: 262980 - DNA, 25 bp, probe
tggcaactgggtccttacagctgcc

SEQ ID NO: 262981 - DNA, 25 bp, probe
tggcgggacgtgcttgaagccatca

SEQ ID NO: 262982 - DNA, 25 bp, probe
tggcagggacagacttggacacaaa

SEQ ID NO: 262983 - DNA, 25 bp, probe
tggcatggagatgcctttcaccaag

SEQ ID NO: 262984 - DNA, 25 bp, probe
tggcaaaacccactgtgaccatcag

SEQ ID NO: 262985 - DNA, 25 bp, probe
tggaaaccctcatgctaaactgtct

SEQ ID NO: 262986 - DNA, 25 bp, probe
tgaaaaccctgaagccaggaactat

SEQ ID NO: 262987 - DNA, 25 bp, probe
tggaaacttctcccaagtgaagctt

SEQ ID NO: 262988 - DNA, 25 bp, probe
tggaacctacggacaggtgtacaag

SEQ ID NO: 262989 - DNA, 25 bp, probe
tgagcaccttaaggaaggtaaaagc

SEQ ID NO: 262990 - DNA, 25 bp, probe
tggacctaaaatcaatgatcgagaa

SEQ ID NO: 262991 - DNA, 25 bp, probe
tgtaacagcaacttgtcaaacctaa

SEQ ID NO: 262992 - DNA, 25 bp, probe
tggcaacacgacttgaaataaataa

SEQ ID NO: 262993 - DNA, 25 bp, probe
tggcaatcctcatatcttagagaaa

SEQ ID NO: 262994 - DNA, 25 bp, probe
tggctgatttcaggatgattacatg

SEQ ID NO: 262995 - DNA, 25 bp, probe
tggcgataacagtcatgtggagatg

SEQ ID NO: 262996 - DNA, 25 bp, probe
tggctgctatcatttgctgtggaga

SEQ ID NO: 262997 - DNA, 25 bp, probe
tggctgctatcatttgctgtggaga

SEQ ID NO: 262998 - DNA, 25 bp, probe
tggctttgcagtaatgtgtatcaga

SEQ ID NO: 262999 - DNA, 25 bp, probe
tggctgtatgactgaagtaataact

SEQ ID NO: 263000 - DNA, 25 bp, probe
tggctgtcagaccgagagtagcaag

SEQ ID NO: 263001 - DNA, 25 bp, probe
tggctgagagaccaggagggcactg

SEQ ID NO: 263002 - DNA, 25 bp, probe
tggcatgggcaatgggctggacatc

SEQ ID NO: 263003 - DNA, 25 bp, probe
tggctggagaaggagtccgagcagg

SEQ ID NO: 263004 - DNA, 25 bp, probe
tggagccaaggcggctccaggcagg

SEQ ID NO: 263005 - DNA, 25 bp, probe
tcgagggggcctggccagtcattga

SEQ ID NO: 263006 - DNA, 25 bp, probe
tggcatggggggatctcagagctta

SEQ ID NO: 263007 - DNA, 25 bp, probe
tggcttgtaggggctccagagcctg

SEQ ID NO: 263008 - DNA, 25 bp, probe
tggctcttgagtgtgctccaggcca

SEQ ID NO: 263009 - DNA, 25 bp, probe
tggcgaggagtccagctctgaggac

SEQ ID NO: 263010 - DNA, 25 bp, probe
tgggaccatggccgccaatgagacc

SEQ ID NO: 263011 - DNA, 25 bp, probe
tggaatttaccggctgagagatgct

SEQ ID NO: 263012 - DNA, 25 bp, probe
tggaattctggcggagggcatgagc

SEQ ID NO: 263013 - DNA, 25 bp, probe
tggcatattctgactgagacccaga

SEQ ID NO: 263014 - DNA, 25 bp, probe
tggacttctgcaatagatgacactg

SEQ ID NO: 263015 - DNA, 25 bp, probe
tggacagcttctactgtgaccttcc

SEQ ID NO: 263016 - DNA, 25 bp, probe
tggctcgcttcattcctgaagtggc

SEQ ID NO: 263017 - DNA, 25 bp, probe
tggctgccttttcatgtagctcagc

SEQ ID NO: 263018 - DNA, 25 bp, probe
tggctggtgttaaatggagctattc

SEQ ID NO: 263019 - DNA, 25 bp, probe
tggctggtttggaatgcttcttctc

SEQ ID NO: 263020 - DNA, 25 bp, probe
tggctccttaggaacagctcttcac

SEQ ID NO: 263021 - DNA, 25 bp, probe
tggctgccatactggacagctcggg

SEQ ID NO: 263022 - DNA, 25 bp, probe
tggcgaagactgagtcaccgcggac

SEQ ID NO: 263023 - DNA, 25 bp, probe
tggcgaagactgagtcaccgcggac

SEQ ID NO: 263024 - DNA, 25 bp, probe
tggcgaagactgagtcaccgcggac

SEQ ID NO: 263025 - DNA, 25 bp, probe
tggctaggccgagggccttgggagc

SEQ ID NO: 263026 - DNA, 25 bp, probe
tggcatgggcattacgggtgttgaa

SEQ ID NO: 263027 - DNA, 25 bp, probe
tggctcgcccgagtgggatgattac

SEQ ID NO: 263028 - DNA, 25 bp, probe
tggcgagccagaactgggaaccccg

SEQ ID NO: 263029 - DNA, 25 bp, probe
tggcaggccgatttgggaaccaagc

SEQ ID NO: 263030 - DNA, 25 bp, probe
tggcagagcctaggttcaaaccaag

SEQ ID NO: 263031 - DNA, 25 bp, probe
tggcagaatcacagtctcacatact

SEQ ID NO: 263032 - DNA, 25 bp, probe
tggaaatcttgcaattcacataatt

SEQ ID NO: 263033 - DNA, 25 bp, probe
tggaacttctgcaaggcagtaattc

SEQ ID NO: 263034 - DNA, 25 bp, probe
tggaagctatccaagagcccactgt

SEQ ID NO: 263035 - DNA, 25 bp, probe
tggctagcaaccatactatatcctt

SEQ ID NO: 263036 - DNA, 25 bp, probe
tgttacaacacggacgaaccttgaa

SEQ ID NO: 263037 - DNA, 25 bp, probe
tgtacctaacgccctatttttgcaa

SEQ ID NO: 263038 - DNA, 25 bp, probe
tggaccaaactgggctttccttaga

SEQ ID NO: 263039 - DNA, 25 bp, probe
tggacccacatcagcggtatactgc

SEQ ID NO: 263040 - DNA, 25 bp, probe
tggacatccgcaaagacctgtacgc

SEQ ID NO: 263041 - DNA, 25 bp, probe
tggacatcctgaagaccacgtgcca

SEQ ID NO: 263042 - DNA, 25 bp, probe
tggaccacgaaggccactgtaaact

SEQ ID NO: 263043 - DNA, 25 bp, probe
tggaccacgaaggccactgtaaact

SEQ ID NO: 263044 - DNA, 25 bp, probe
tggaccgcacggtcccagattacac

SEQ ID NO: 263045 - DNA, 25 bp, probe
tggacccaggaatccaagtgccacc

SEQ ID NO: 263046 - DNA, 25 bp, probe
tggacgtgaggaacgccattgtcct

SEQ ID NO: 263047 - DNA, 25 bp, probe
tggcaagcgaggacacgcctttgcc

SEQ ID NO: 263048 - DNA, 25 bp, probe
tggctagacaggaacccttgcatcc

SEQ ID NO: 263049 - DNA, 25 bp, probe
tggctagacaggaacccttgcatcc

SEQ ID NO: 263050 - DNA, 25 bp, probe
tggcgagtgaaggcaccatgctgaa

SEQ ID NO: 263051 - DNA, 25 bp, probe
tgtgaagtaaaagagggacccctgc

SEQ ID NO: 263052 - DNA, 25 bp, probe
tggagaaaaactcaggcaagacctc

SEQ ID NO: 263053 - DNA, 25 bp, probe
tggagaattgattccccgaagaccc

SEQ ID NO: 263054 - DNA, 25 bp, probe
tggcaccctaaagccgaaatgcgcc

SEQ ID NO: 263055 - DNA, 25 bp, probe
tggacagcttctttgcccaaaatgc

SEQ ID NO: 263056 - DNA, 25 bp, probe
tggaagttcgcccgagcaaaactct

SEQ ID NO: 263057 - DNA, 25 bp, probe
tggaagttcgcccgagcaaaactct

SEQ ID NO: 263058 - DNA, 25 bp, probe
tggcatagtccaccgtgacattaaa

SEQ ID NO: 263059 - DNA, 25 bp, probe
tggcgggcacacagtgcaatgtgaa

SEQ ID NO: 263060 - DNA, 25 bp, probe
tggcgggcacagggtcaggtgctga

SEQ ID NO: 263061 - DNA, 25 bp, probe
tggcaggccactgattacttcatga

SEQ ID NO: 263062 - DNA, 25 bp, probe
tggctcacgcctgtaatcccagcac

SEQ ID NO: 263063 - DNA, 25 bp, probe
tggctctcggtgttgacatccaccg

SEQ ID NO: 263064 - DNA, 25 bp, probe
tggagcacggtttaagcaccactgg

SEQ ID NO: 263065 - DNA, 25 bp, probe
tggcagatcttgttttacactccca

SEQ ID NO: 263066 - DNA, 25 bp, probe
tggcagatcttgttttacactccca

SEQ ID NO: 263067 - DNA, 25 bp, probe
tggcatgtcctgttttgatagtaaa

SEQ ID NO: 263068 - DNA, 25 bp, probe
tggctgcaccatttttgtaggcctg

SEQ ID NO: 263069 - DNA, 25 bp, probe
tggctaccacttctgtggtggctcc

SEQ ID NO: 263070 - DNA, 25 bp, probe
tggctgttacttttgtttgcccacg

SEQ ID NO: 263071 - DNA, 25 bp, probe
tggctggggctttagccaagccacc

SEQ ID NO: 263072 - DNA, 25 bp, probe
tggcggagggcatgagcctgggact

SEQ ID NO: 263073 - DNA, 25 bp, probe
tggcaggggacatgacctggctggc

SEQ ID NO: 263074 - DNA, 25 bp, probe
tggctgaggaggtgaacgccatcct

SEQ ID NO: 263075 - DNA, 25 bp, probe
tggcgaggagaggcgggcggatttg

SEQ ID NO: 263076 - DNA, 25 bp, probe
tggcttgacaggggctatgggtttg

SEQ ID NO: 263077 - DNA, 25 bp, probe
tggcttacaagcggcttctgcggat

SEQ ID NO: 263078 - DNA, 25 bp, probe
tggcgtctaagtgtttgggaagcaa

SEQ ID NO: 263079 - DNA, 25 bp, probe
tggcaggtaattgtttttacaaaga

SEQ ID NO: 263080 - DNA, 25 bp, probe
tggcatcgtacataatttttcaata

SEQ ID NO: 263081 - DNA, 25 bp, probe
tggcatcgtacataatttttcaata

SEQ ID NO: 263082 - DNA, 25 bp, probe
tggctcagtgaggctaattttataa

SEQ ID NO: 263083 - DNA, 25 bp, probe
tggctcagctctcaatttagtataa

SEQ ID NO: 263084 - DNA, 25 bp, probe
tggcatcacctgcattgttaatgct

SEQ ID NO: 263085 - DNA, 25 bp, probe
tggcatgagccggaacctctatgct

SEQ ID NO: 263086 - DNA, 25 bp, probe
tggaagctgggatccgctactttga

SEQ ID NO: 263087 - DNA, 25 bp, probe
tggaagggaccccagatacctgtga

SEQ ID NO: 263088 - DNA, 25 bp, probe
tggaatctggagagctagaacctgg

SEQ ID NO: 263089 - DNA, 25 bp, probe
tggaatccgacttggggaccatggt

SEQ ID NO: 263090 - DNA, 25 bp, probe
tggaatgcccagctagttaaagaat

SEQ ID NO: 263091 - DNA, 25 bp, probe
tggataccgcagctaggaataatgg

SEQ ID NO: 263092 - DNA, 25 bp, probe
tggcatcctcgggcttgggagaatg

SEQ ID NO: 263093 - DNA, 25 bp, probe
tggctcctgtgccagttgggaacat

SEQ ID NO: 263094 - DNA, 25 bp, probe
tggctcttctgcccaattggaggaa

SEQ ID NO: 263095 - DNA, 25 bp, probe
tggcttctgtgggccagtggggatc

SEQ ID NO: 263096 - DNA, 25 bp, probe
tggctgggatgggcgtggggagccc

SEQ ID NO: 263097 - DNA, 25 bp, probe
tggctgggatgggcgtggggagccc

SEQ ID NO: 263098 - DNA, 25 bp, probe
tggcaatggtagcctgtggggatgc

SEQ ID NO: 263099 - DNA, 25 bp, probe
tggcagagagatagccgggctccag

SEQ ID NO: 263100 - DNA, 25 bp, probe
tggcagagagatagccgggctccag

SEQ ID NO: 263101 - DNA, 25 bp, probe
tggcagaggtagccccctaaatggg

SEQ ID NO: 263102 - DNA, 25 bp, probe
tggcagaggtagccccctaaatggg

SEQ ID NO: 263103 - DNA, 25 bp, probe
tggcagggataacacacaatgagag

SEQ ID NO: 263104 - DNA, 25 bp, probe
tggcggcttcaacatatccatcaca

SEQ ID NO: 263105 - DNA, 25 bp, probe
tggcagagttctttaaaacacacca

SEQ ID NO: 263106 - DNA, 25 bp, probe
tggaggcctgcctcaacaaagaccc

SEQ ID NO: 263107 - DNA, 25 bp, probe
tggacctgtgccgctacaaggacag

SEQ ID NO: 263108 - DNA, 25 bp, probe
tggacctgtgccgctacaaggacag

SEQ ID NO: 263109 - DNA, 25 bp, probe
tggaagggcgagaccaacggacggg

SEQ ID NO: 263110 - DNA, 25 bp, probe
tggaagggcaacacaaggacatggt

SEQ ID NO: 263111 - DNA, 25 bp, probe
tggacagcggaacatatgaggaagt

SEQ ID NO: 263112 - DNA, 25 bp, probe
tggaagggttacatgatggacactt

SEQ ID NO: 263113 - DNA, 25 bp, probe
tggaaggccctaaagaaggcttatg

SEQ ID NO: 263114 - DNA, 25 bp, probe
tggaagagcctctggacaggtttgg

SEQ ID NO: 263115 - DNA, 25 bp, probe
tggctatcatcctggggacgtttgc

SEQ ID NO: 263116 - DNA, 25 bp, probe
tggctatcatcctggggacgtttgc

SEQ ID NO: 263117 - DNA, 25 bp, probe
tggctaccggaggggagctctttga

SEQ ID NO: 263118 - DNA, 25 bp, probe
tggtcaccagggaggagcccattta

SEQ ID NO: 263119 - DNA, 25 bp, probe
tggaccaaaggaacatagccctagt

SEQ ID NO: 263120 - DNA, 25 bp, probe
tggagaaaaggttctgtgccctcag

SEQ ID NO: 263121 - DNA, 25 bp, probe
tggaaaatcacttgtttgccccaga

SEQ ID NO: 263122 - DNA, 25 bp, probe
tggcaccaaacgctatatgcctcca

SEQ ID NO: 263123 - DNA, 25 bp, probe
tggcaagaacactgtgcacatggtc

SEQ ID NO: 263124 - DNA, 25 bp, probe
tggcaagtattctctccatggagtg

SEQ ID NO: 263125 - DNA, 25 bp, probe
tggaagaactcttcggctgtgggga

SEQ ID NO: 263126 - DNA, 25 bp, probe
tggaaaattccatgctgtgcgctgg

SEQ ID NO: 263127 - DNA, 25 bp, probe
tggagaagttcctggtcattgtctt

SEQ ID NO: 263128 - DNA, 25 bp, probe
tggagaagttcctggtcattgtctt

SEQ ID NO: 263129 - DNA, 25 bp, probe
tggcagacgctttctgggacctgcc

SEQ ID NO: 263130 - DNA, 25 bp, probe
tggcagaatctatttgggacttcat

SEQ ID NO: 263131 - DNA, 25 bp, probe
tggaatttaagtcgtgtgttcacag

SEQ ID NO: 263132 - DNA, 25 bp, probe
tgcggagttacactcccgactaagc

SEQ ID NO: 263133 - DNA, 25 bp, probe
tggaagtcgaacacgcggctgaagc

SEQ ID NO: 263134 - DNA, 25 bp, probe
tggaagccgggtttccggaagctcg

SEQ ID NO: 263135 - DNA, 25 bp, probe
tggaaccagggagctgtgggaagcc

SEQ ID NO: 263136 - DNA, 25 bp, probe
tggacaatccgggactgtgggggcg

SEQ ID NO: 263137 - DNA, 25 bp, probe
tggttatcagccaccaggctttggc

SEQ ID NO: 263138 - DNA, 25 bp, probe
tggttatcagccaccaggctttggc

SEQ ID NO: 263139 - DNA, 25 bp, probe
tgggtcggcacaacctgtttgagcc

SEQ ID NO: 263140 - DNA, 25 bp, probe
tgggtcggcacaacctgtttgagcc

SEQ ID NO: 263141 - DNA, 25 bp, probe
tgggtccgaatcagtaggtgacccc

SEQ ID NO: 263142 - DNA, 25 bp, probe
tggagacggtacagctgaggaaccc

SEQ ID NO: 263143 - DNA, 25 bp, probe
tggagacgggcggggaggccaaact

SEQ ID NO: 263144 - DNA, 25 bp, probe
tgacaatggggtcaggccccagagg

SEQ ID NO: 263145 - DNA, 25 bp, probe
tggaatgagggtccaggcctgtcaa

SEQ ID NO: 263146 - DNA, 25 bp, probe
tggcagagcatgtcagctgccaccc

SEQ ID NO: 263147 - DNA, 25 bp, probe
tggcagagcatgtcagctgccaccc

SEQ ID NO: 263148 - DNA, 25 bp, probe
tggagcagctcatgcggcattactg

SEQ ID NO: 263149 - DNA, 25 bp, probe
tggcaggctcaccagtgattgctgc

SEQ ID NO: 263150 - DNA, 25 bp, probe
tggcatagcacagggtcatggtgac

SEQ ID NO: 263151 - DNA, 25 bp, probe
tggcaagtcagccttcgctatgatg

SEQ ID NO: 263152 - DNA, 25 bp, probe
tggagtgctcatgtttgaagatgat

SEQ ID NO: 263153 - DNA, 25 bp, probe
tggagtgacgacttcgatagtagat

SEQ ID NO: 263154 - DNA, 25 bp, probe
tggcaggaggacccgatttctgagt

SEQ ID NO: 263155 - DNA, 25 bp, probe
tggcagaaggacccaggtgagcggc

SEQ ID NO: 263156 - DNA, 25 bp, probe
tggaatagttcaagccgggcgcagt

SEQ ID NO: 263157 - DNA, 25 bp, probe
tggaaactatagatgcgggcaaggc

SEQ ID NO: 263158 - DNA, 25 bp, probe
tggaaagtttttgggacatgcacag

SEQ ID NO: 263159 - DNA, 25 bp, probe
tggaaagtttttgggacatgcacag

SEQ ID NO: 263160 - DNA, 25 bp, probe
tggaaggttacaagtggcacttcaa

SEQ ID NO: 263161 - DNA, 25 bp, probe
tggacagggtaggcaggctcggtta

SEQ ID NO: 263162 - DNA, 25 bp, probe
tggaagggccagaatggtcgcacct

SEQ ID NO: 263163 - DNA, 25 bp, probe
tggcaacggacaaaactctggcacc

SEQ ID NO: 263164 - DNA, 25 bp, probe
tggcaacggacaaaactctggcacc

SEQ ID NO: 263165 - DNA, 25 bp, probe
tggcaaggaggtcgacctctgggcc

SEQ ID NO: 263166 - DNA, 25 bp, probe
tggagaggacttcacctctgtggtc

SEQ ID NO: 263167 - DNA, 25 bp, probe
tggagaggacttcacctctgtggtc

SEQ ID NO: 263168 - DNA, 25 bp, probe
tggagaagagctatccccgatgatg

SEQ ID NO: 263169 - DNA, 25 bp, probe
tggaagagtccaatccaccgaactc

SEQ ID NO: 263170 - DNA, 25 bp, probe
tggcatagagggaatcccccagccc

SEQ ID NO: 263171 - DNA, 25 bp, probe
tggcatagtatgtttcctgcccaca

SEQ ID NO: 263172 - DNA, 25 bp, probe
tggctagtgaacactgctgcactaa

SEQ ID NO: 263173 - DNA, 25 bp, probe
tggctgagtgagccagactgcaccc

SEQ ID NO: 263174 - DNA, 25 bp, probe
tggctgagctggagtccagcgcact

SEQ ID NO: 263175 - DNA, 25 bp, probe
tggcatgcgggggcatcagcagcca

SEQ ID NO: 263176 - DNA, 25 bp, probe
tggcagggcagtggctagcccggaa

SEQ ID NO: 263177 - DNA, 25 bp, probe
tggcacagtccagtggacccaggaa

SEQ ID NO: 263178 - DNA, 25 bp, probe
tggcactgtccaggtgaacttctac

SEQ ID NO: 263179 - DNA, 25 bp, probe
tggcactgtaaggtgcttgctcccc

SEQ ID NO: 263180 - DNA, 25 bp, probe
tggcttgaaatgcctggagcacctc

SEQ ID NO: 263181 - DNA, 25 bp, probe
tggcttgtcattctgtacactgacc

SEQ ID NO: 263182 - DNA, 25 bp, probe
tggctatctcttcctggatatcatc

SEQ ID NO: 263183 - DNA, 25 bp, probe
tggaatcctctgtggatgacggcgc

SEQ ID NO: 263184 - DNA, 25 bp, probe
tggaatcctctgtggatgacggcgc

SEQ ID NO: 263185 - DNA, 25 bp, probe
tggacccctgggcagggggcgggat

SEQ ID NO: 263186 - DNA, 25 bp, probe
tggagctgccccacggtggggaggg

SEQ ID NO: 263187 - DNA, 25 bp, probe
tggcattctcccacttttgatggat

SEQ ID NO: 263188 - DNA, 25 bp, probe
tggctaccccgagggtggcattgat

SEQ ID NO: 263189 - DNA, 25 bp, probe
tggcatgaacctgggaggtggaggt

SEQ ID NO: 263190 - DNA, 25 bp, probe
tggcaaatctgctagggatcttgat

SEQ ID NO: 263191 - DNA, 25 bp, probe
tggctgaatccttgtgtgatatttt

SEQ ID NO: 263192 - DNA, 25 bp, probe
tggctgcatcatactcttggagttt

SEQ ID NO: 263193 - DNA, 25 bp, probe
tggctgcatcatactcttggagttt

SEQ ID NO: 263194 - DNA, 25 bp, probe
tggcttctgacttatgggctgctta

SEQ ID NO: 263195 - DNA, 25 bp, probe
tggctttgtgcttggggctatttgt

SEQ ID NO: 263196 - DNA, 25 bp, probe
tggcattgggtctgggatgaagtat

SEQ ID NO: 263197 - DNA, 25 bp, probe
tggctgcagggtcttccatgaagaa

SEQ ID NO: 263198 - DNA, 25 bp, probe
tggctcgagtccatacgcatgaaac

SEQ ID NO: 263199 - DNA, 25 bp, probe
tggcacagatgcccacgtatgtgaa

SEQ ID NO: 263200 - DNA, 25 bp, probe
tggcaggactccagatgaggacaag

SEQ ID NO: 263201 - DNA, 25 bp, probe
tggagaccccttggggagcaggctc

SEQ ID NO: 263202 - DNA, 25 bp, probe
tggaagcctctgtgttggtgtggat

SEQ ID NO: 263203 - DNA, 25 bp, probe
tggctacttcagaggctgaggtgga

SEQ ID NO: 263204 - DNA, 25 bp, probe
tggcagcgtccgaggctgaggtgga

SEQ ID NO: 263205 - DNA, 25 bp, probe
tggcagcccaggtaactgggccagc

SEQ ID NO: 263206 - DNA, 25 bp, probe
tggaccacgtgtgccttggtcacta

SEQ ID NO: 263207 - DNA, 25 bp, probe
tggaccacgtgtgccttggtcacta

SEQ ID NO: 263208 - DNA, 25 bp, probe
tgggccactggggactttatttatt

SEQ ID NO: 263209 - DNA, 25 bp, probe
tggtccttaggatgtattttgtact

SEQ ID NO: 263210 - DNA, 25 bp, probe
tggtccttaggatgtattttgtact

SEQ ID NO: 263211 - DNA, 25 bp, probe
tggtccccgtagctattttaatatt

SEQ ID NO: 263212 - DNA, 25 bp, probe
tggtcgcccatgattttactgtcaa

SEQ ID NO: 263213 - DNA, 25 bp, probe
tggatgccagcaccatttttactcc

SEQ ID NO: 263214 - DNA, 25 bp, probe
tggaccagatgaaattcttctgtcc

SEQ ID NO: 263215 - DNA, 25 bp, probe
tggacccaaaccagactgtcctggc

SEQ ID NO: 263216 - DNA, 25 bp, probe
tggactccaaagccaagacgcggag

SEQ ID NO: 263217 - DNA, 25 bp, probe
tggactgcacaatgacagagaagag

SEQ ID NO: 263218 - DNA, 25 bp, probe
tggacagccatatacaggcccagca

SEQ ID NO: 263219 - DNA, 25 bp, probe
tggacgccaataactgcgactatga

SEQ ID NO: 263220 - DNA, 25 bp, probe
tggataccaatgttccgactggaga

SEQ ID NO: 263221 - DNA, 25 bp, probe
tgtacagcctgatgtaggacttgga

SEQ ID NO: 263222 - DNA, 25 bp, probe
tggaacctgcaataaactcgctgtt

SEQ ID NO: 263223 - DNA, 25 bp, probe
tggagacctggataaagcatacacc

SEQ ID NO: 263224 - DNA, 25 bp, probe
tggacgaaggaacaacacacacaca

SEQ ID NO: 263225 - DNA, 25 bp, probe
tggaccaaggacgtggatgaccctc

SEQ ID NO: 263226 - DNA, 25 bp, probe
tggaccaaggacgtggatgaccctc

SEQ ID NO: 263227 - DNA, 25 bp, probe
tggaccaaggacgtggatgaccctc

SEQ ID NO: 263228 - DNA, 25 bp, probe
tggacgcagagcacttagttaccct

SEQ ID NO: 263229 - DNA, 25 bp, probe
tggagctgcagacttaccgttacca

SEQ ID NO: 263230 - DNA, 25 bp, probe
tggagctgcagacttaccgttacca

SEQ ID NO: 263231 - DNA, 25 bp, probe
tggagctggaggttctgcgctatac

SEQ ID NO: 263232 - DNA, 25 bp, probe
tggcagctgattccatgtctgggat

SEQ ID NO: 263233 - DNA, 25 bp, probe
tggagcatgtgcactggcatggaat

SEQ ID NO: 263234 - DNA, 25 bp, probe
tggacgagcgtccgcatgctaatcg

SEQ ID NO: 263235 - DNA, 25 bp, probe
tggactgattctgacatcttatgcc

SEQ ID NO: 263236 - DNA, 25 bp, probe
tggaattatccctcatgtgatgcct

SEQ ID NO: 263237 - DNA, 25 bp, probe
tggaattatccctcatgtgatgcct

SEQ ID NO: 263238 - DNA, 25 bp, probe
tggagtcctgccgtagcatgattgc

SEQ ID NO: 263239 - DNA, 25 bp, probe
tggaaggggcagtatgatgttgctg

SEQ ID NO: 263240 - DNA, 25 bp, probe
tggaaggggcagtatgatgttgctg

SEQ ID NO: 263241 - DNA, 25 bp, probe
tggcaggggtggtttatctgcatgg

SEQ ID NO: 263242 - DNA, 25 bp, probe
tggcaccaggggtttcctgagctga

SEQ ID NO: 263243 - DNA, 25 bp, probe
tggcaccgtgagggttgggacccac

SEQ ID NO: 263244 - DNA, 25 bp, probe
tggaaggctggagcttcggaccaag

SEQ ID NO: 263245 - DNA, 25 bp, probe
tggaaggtgctgaactgctctggac

SEQ ID NO: 263246 - DNA, 25 bp, probe
tggcagaggcatcactgcgctttga

SEQ ID NO: 263247 - DNA, 25 bp, probe
tggcagggcacttgccctggtggct

SEQ ID NO: 263248 - DNA, 25 bp, probe
tggagtagcaattcttcagcagctg

SEQ ID NO: 263249 - DNA, 25 bp, probe
tggaatacctttgcatcacatcttc

SEQ ID NO: 263250 - DNA, 25 bp, probe
tggaatcaccgactactgaatctcc

SEQ ID NO: 263251 - DNA, 25 bp, probe
tggaactgcatcagtgactgaattc

SEQ ID NO: 263252 - DNA, 25 bp, probe
tggaactgcatcagtgactgaattc

SEQ ID NO: 263253 - DNA, 25 bp, probe
tggcaccatctctgtggtgaagtca

SEQ ID NO: 263254 - DNA, 25 bp, probe
tggcagaactcaagggcaaagatga

SEQ ID NO: 263255 - DNA, 25 bp, probe
tggcagaagataagaggacgcagaa

SEQ ID NO: 263256 - DNA, 25 bp, probe
tggcaacagctcagcccattcaaag

SEQ ID NO: 263257 - DNA, 25 bp, probe
tggcaacctattctcactaagatgg

SEQ ID NO: 263258 - DNA, 25 bp, probe
tggaatcctattctcttattctcag

SEQ ID NO: 263259 - DNA, 25 bp, probe
tggtatactttgctttttctaggta

SEQ ID NO: 263260 - DNA, 25 bp, probe
tggttactttgctgttcactttggc

SEQ ID NO: 263261 - DNA, 25 bp, probe
tggttactttgctgttcactttggc

SEQ ID NO: 263262 - DNA, 25 bp, probe
tgtttcctttgaccaacatctttcc

SEQ ID NO: 263263 - DNA, 25 bp, probe
tggttccatttagactactttcctc

SEQ ID NO: 263264 - DNA, 25 bp, probe
tggttcaatttacgactgcctatcg

SEQ ID NO: 263265 - DNA, 25 bp, probe
tggcttcatgtttgaaagctcgccg

SEQ ID NO: 263266 - DNA, 25 bp, probe
tgtgtaattcaatcatcgatcctct

SEQ ID NO: 263267 - DNA, 25 bp, probe
tggaaatgtgcaaccactgcttctt

SEQ ID NO: 263268 - DNA, 25 bp, probe
tggcagtgtgtaaccctctgcttta

SEQ ID NO: 263269 - DNA, 25 bp, probe
tggcagtgtgtaaccctctgcttta

SEQ ID NO: 263270 - DNA, 25 bp, probe
tggcatttgaataacccagtttaaa

SEQ ID NO: 263271 - DNA, 25 bp, probe
tggcattccaaataccagaacataa

SEQ ID NO: 263272 - DNA, 25 bp, probe
tggcagtcatagtattaatcagaaa

SEQ ID NO: 263273 - DNA, 25 bp, probe
tggcagtcatagtattaatcagaaa

SEQ ID NO: 263274 - DNA, 25 bp, probe
tggcagtgcaggcattactaaaaga

SEQ ID NO: 263275 - DNA, 25 bp, probe
tggcagcggttggtcaaaagaatga

SEQ ID NO: 263276 - DNA, 25 bp, probe
tggcagtgggggacataggagaagg

SEQ ID NO: 263277 - DNA, 25 bp, probe
tggcagtagatgctccaaggagaca

SEQ ID NO: 263278 - DNA, 25 bp, probe
tggcagtagatgctccaaggagaca

SEQ ID NO: 263279 - DNA, 25 bp, probe
tggcagtcagtaaccataggtgact

SEQ ID NO: 263280 - DNA, 25 bp, probe
tggatgacaaagaaattgagaatct

SEQ ID NO: 263281 - DNA, 25 bp, probe
tggagcctacaattatatggagatt

SEQ ID NO: 263282 - DNA, 25 bp, probe
tggagcctacaattatatggagatt

SEQ ID NO: 263283 - DNA, 25 bp, probe
tggagctctaaatcgttaattttaa

SEQ ID NO: 263284 - DNA, 25 bp, probe
tggtcttgccagtgccttaattgtt

SEQ ID NO: 263285 - DNA, 25 bp, probe
tggtccccaagacctctatatttgc

SEQ ID NO: 263286 - DNA, 25 bp, probe
tggactaaaagatctatacatgtag

SEQ ID NO: 263287 - DNA, 25 bp, probe
tggcaggaaccgagtctccagtgag

SEQ ID NO: 263288 - DNA, 25 bp, probe
tggcatggtggttgggacccagtgg

SEQ ID NO: 263289 - DNA, 25 bp, probe
tggaagctctgttgcaggtgtccgg

SEQ ID NO: 263290 - DNA, 25 bp, probe
tggcatacctcatgcagagtcgccg

SEQ ID NO: 263291 - DNA, 25 bp, probe
tggcatcaccgttgtggactggccg

SEQ ID NO: 263292 - DNA, 25 bp, probe
tggcacagtgccttgggactggact

SEQ ID NO: 263293 - DNA, 25 bp, probe
tggagcctggcacaggactgactct

SEQ ID NO: 263294 - DNA, 25 bp, probe
tggcatgttggtcatagtctgcact

SEQ ID NO: 263295 - DNA, 25 bp, probe
tggcatgttggtcatagtctgcact

SEQ ID NO: 263296 - DNA, 25 bp, probe
tggctatgggagtctgagtgtgcac

SEQ ID NO: 263297 - DNA, 25 bp, probe
tggcagatgcggggggcttgccagc

SEQ ID NO: 263298 - DNA, 25 bp, probe
tggatagggacggacacatcaagct

SEQ ID NO: 263299 - DNA, 25 bp, probe
tggaaagtgccgaaaccgtgctgaa

SEQ ID NO: 263300 - DNA, 25 bp, probe
tggacaatggactcaaccctgtatg

SEQ ID NO: 263301 - DNA, 25 bp, probe
tggtcgtggacgtagtcctctttaa

SEQ ID NO: 263302 - DNA, 25 bp, probe
tggactggttcatagccgtctgtta

SEQ ID NO: 263303 - DNA, 25 bp, probe
tggactttgtcatggcactcatcta

SEQ ID NO: 263304 - DNA, 25 bp, probe
tggcatttttatcgtgctcatctgt

SEQ ID NO: 263305 - DNA, 25 bp, probe
tggcattcctttaggaatgctgtgt

SEQ ID NO: 263306 - DNA, 25 bp, probe
tggcttctgtgttctacacagtggt

SEQ ID NO: 263307 - DNA, 25 bp, probe
tggcttcttggtcaatcttgactag

SEQ ID NO: 263308 - DNA, 25 bp, probe
tggaaccgggctatgttgactcaga

SEQ ID NO: 263309 - DNA, 25 bp, probe
tggaaccgggctagggaactgctgg

SEQ ID NO: 263310 - DNA, 25 bp, probe
tggtcccaggagcatagaaacgggg

SEQ ID NO: 263311 - DNA, 25 bp, probe
tggacctcagtgttgtggagaatgg

SEQ ID NO: 263312 - DNA, 25 bp, probe
tggcttctcagttctttggttggaa

SEQ ID NO: 263313 - DNA, 25 bp, probe
tggcttctgcagtacttttattatc

SEQ ID NO: 263314 - DNA, 25 bp, probe
tggcttatgtgattttctgtttaca

SEQ ID NO: 263315 - DNA, 25 bp, probe
tggcaattgtgcttttctttttctt

SEQ ID NO: 263316 - DNA, 25 bp, probe
tggcaattgtgcttttctttttctt

SEQ ID NO: 263317 - DNA, 25 bp, probe
tggaatattttatcctgtattcttg

SEQ ID NO: 263318 - DNA, 25 bp, probe
tggagtatttgtaacttctaaattt

SEQ ID NO: 263319 - DNA, 25 bp, probe
tggcagtgtttgaacagcattgtaa

SEQ ID NO: 263320 - DNA, 25 bp, probe
tggcactttgtggcaagattttcat

SEQ ID NO: 263321 - DNA, 25 bp, probe
tggcaactgtgggcaataatatggc

SEQ ID NO: 263322 - DNA, 25 bp, probe
tggaagctgtgaggcaagagaaaca

SEQ ID NO: 263323 - DNA, 25 bp, probe
tggcagcctggagattgagcagtga

SEQ ID NO: 263324 - DNA, 25 bp, probe
tggcatcctgagacagttgcacagt

SEQ ID NO: 263325 - DNA, 25 bp, probe
tggcatccatgtgcagcttactggc

SEQ ID NO: 263326 - DNA, 25 bp, probe
tggcattggatgggtaactgtggca

SEQ ID NO: 263327 - DNA, 25 bp, probe
tggcagtcgacagatacctggccat

SEQ ID NO: 263328 - DNA, 25 bp, probe
tggactgggatgtgcaccatggcca

SEQ ID NO: 263329 - DNA, 25 bp, probe
tggaacagacaatgcctatgtggct

SEQ ID NO: 263330 - DNA, 25 bp, probe
tggaacagacaatgcctatgtggct

SEQ ID NO: 263331 - DNA, 25 bp, probe
tggaagaaaaacttcattgctgtca

SEQ ID NO: 263332 - DNA, 25 bp, probe
tggaagaggtaatttattcttcttt

SEQ ID NO: 263333 - DNA, 25 bp, probe
tggaaggggccagttgctgtttttt

SEQ ID NO: 263334 - DNA, 25 bp, probe
tggagtggggtaaaagtgtattttg

SEQ ID NO: 263335 - DNA, 25 bp, probe
tcgagggggtttgggtgagggcttg

SEQ ID NO: 263336 - DNA, 25 bp, probe
tggagggggtgtctggaagctgagc

SEQ ID NO: 263337 - DNA, 25 bp, probe
tggacggcctggacttgaaactcag

SEQ ID NO: 263338 - DNA, 25 bp, probe
tggacgtactggtttaacctcctat

SEQ ID NO: 263339 - DNA, 25 bp, probe
tggtcgtggtgggatttacctactt

SEQ ID NO: 263340 - DNA, 25 bp, probe
tggatagggtggggtctccatctac

SEQ ID NO: 263341 - DNA, 25 bp, probe
tggaagggctggcagatcgcttccc

SEQ ID NO: 263342 - DNA, 25 bp, probe
tggaatgggagggtctggcttcagc

SEQ ID NO: 263343 - DNA, 25 bp, probe
tggcaatcggcatgcaatagacatt

SEQ ID NO: 263344 - DNA, 25 bp, probe
tggcagatattggagagaacacatt

SEQ ID NO: 263345 - DNA, 25 bp, probe
tggcaatgtttcgatagacagcata

SEQ ID NO: 263346 - DNA, 25 bp, probe
tggttgtgtcccaagaggtgttgag

SEQ ID NO: 263347 - DNA, 25 bp, probe
tggactttctcagaaggtgtttggt

SEQ ID NO: 263348 - DNA, 25 bp, probe
tggcacctcttccgaatgggttttc

SEQ ID NO: 263349 - DNA, 25 bp, probe
tggcacctcatttggctttgtgaat

SEQ ID NO: 263350 - DNA, 25 bp, probe
tggcacctcatttggctttgtgaat

SEQ ID NO: 263351 - DNA, 25 bp, probe
tggacggagatcgagttcatgtaca

SEQ ID NO: 263352 - DNA, 25 bp, probe
tggcagcggcagaggctagcagcaa

SEQ ID NO: 263353 - DNA, 25 bp, probe
tggcagatggcgtggcaggagaaca

SEQ ID NO: 263354 - DNA, 25 bp, probe
tggcagatatggtatggatcgtaaa

SEQ ID NO: 263355 - DNA, 25 bp, probe
tggcagatatggtatggatcgtaaa

SEQ ID NO: 263356 - DNA, 25 bp, probe
tggaattagctcagacaggaaaaga

SEQ ID NO: 263357 - DNA, 25 bp, probe
tggaataactcacagggatattaaa

SEQ ID NO: 263358 - DNA, 25 bp, probe
tggaaaggtactaggatttctcaaa

SEQ ID NO: 263359 - DNA, 25 bp, probe
tggaaggagtgagaggggacaaaac

SEQ ID NO: 263360 - DNA, 25 bp, probe
tggaaggtggcagcggggtcactga

SEQ ID NO: 263361 - DNA, 25 bp, probe
tggaaggtggcagcggggtcactga

SEQ ID NO: 263362 - DNA, 25 bp, probe
tggaagatcatggacctggtgcccc

SEQ ID NO: 263363 - DNA, 25 bp, probe
tggagctgacatcacaaggtgctgg

SEQ ID NO: 263364 - DNA, 25 bp, probe
tggactaagcaaggtctgtgctggg

SEQ ID NO: 263365 - DNA, 25 bp, probe
tggcagctaacacatgaatgaggcc

SEQ ID NO: 263366 - DNA, 25 bp, probe
tggcatctaccggacagagagccac

SEQ ID NO: 263367 - DNA, 25 bp, probe
tggcatctaccggacagagagccac

SEQ ID NO: 263368 - DNA, 25 bp, probe
tggatggacctgggcagagggcact

SEQ ID NO: 263369 - DNA, 25 bp, probe
tggagtactgcgatgaggggacttt

SEQ ID NO: 263370 - DNA, 25 bp, probe
tggactatggctatggaggtgattt

SEQ ID NO: 263371 - DNA, 25 bp, probe
tggacaagctgtgggaagcgttctt

SEQ ID NO: 263372 - DNA, 25 bp, probe
tggacaacttcgtaggtagccttaa

SEQ ID NO: 263373 - DNA, 25 bp, probe
tggacaatgacccagtggttcctaa

SEQ ID NO: 263374 - DNA, 25 bp, probe
tggaccatgatctgatgggactact

SEQ ID NO: 263375 - DNA, 25 bp, probe
tggagcacgagcagacggacatcac

SEQ ID NO: 263376 - DNA, 25 bp, probe
tggagcacgagcagacggacatcac

SEQ ID NO: 263377 - DNA, 25 bp, probe
tggacacgagctacgtgatcctgcc

SEQ ID NO: 263378 - DNA, 25 bp, probe
tggaagctgcggaggacgtggagga

SEQ ID NO: 263379 - DNA, 25 bp, probe
tggaagctgcggaggacgtggagga

SEQ ID NO: 263380 - DNA, 25 bp, probe
tggcaaggcgcagggaagtcggggg

SEQ ID NO: 263381 - DNA, 25 bp, probe
tggaggtgccaggggagtcagggtt

SEQ ID NO: 263382 - DNA, 25 bp, probe
tggagaggaatggtgtggtcaacag

SEQ ID NO: 263383 - DNA, 25 bp, probe
tggaatggatatcctgtgcgtccga

SEQ ID NO: 263384 - DNA, 25 bp, probe
tggcaatggtagtcagcacgtggcg

SEQ ID NO: 263385 - DNA, 25 bp, probe
tggcagtgcgtcaatcagagcgtcc

SEQ ID NO: 263386 - DNA, 25 bp, probe
tggcagtgcgtcaatcagagcgtcc

SEQ ID NO: 263387 - DNA, 25 bp, probe
tggcagtgcgtcaatcagagcgtcc

SEQ ID NO: 263388 - DNA, 25 bp, probe
tggcagtgcgtcaatcagagcgtcc

SEQ ID NO: 263389 - DNA, 25 bp, probe
tggcagtgcgtcaatcagagcgtcc

SEQ ID NO: 263390 - DNA, 25 bp, probe
tggcatgatgcctcatcaacagccc

SEQ ID NO: 263391 - DNA, 25 bp, probe
tggcatggtctgtgcaggcagcagc

SEQ ID NO: 263392 - DNA, 25 bp, probe
tggcagcgtgttggagcgcgagtcc

SEQ ID NO: 263393 - DNA, 25 bp, probe
tggcagctagttagtgccatggcac

SEQ ID NO: 263394 - DNA, 25 bp, probe
tggcagcagcagtggtggcagcagc

SEQ ID NO: 263395 - DNA, 25 bp, probe
tggcagcagcagtggtggcagcagc

SEQ ID NO: 263396 - DNA, 25 bp, probe
tggcagcagcagtggtggcagcagc

SEQ ID NO: 263397 - DNA, 25 bp, probe
tggcagcagcagtggtggcagcagc

SEQ ID NO: 263398 - DNA, 25 bp, probe
tggcaatcaggagattctgcagcac

SEQ ID NO: 263399 - DNA, 25 bp, probe
tggcacagaggatgtttgcccccag

SEQ ID NO: 263400 - DNA, 25 bp, probe
tggacagagttaggctccacaccta

SEQ ID NO: 263401 - DNA, 25 bp, probe
tggacagagttaggctccacaccta

SEQ ID NO: 263402 - DNA, 25 bp, probe
tggacaagacatttctgaaaccttt

SEQ ID NO: 263403 - DNA, 25 bp, probe
tggactggatgctttataaatttgt

SEQ ID NO: 263404 - DNA, 25 bp, probe
tggactggtgtcctatggagatatt

SEQ ID NO: 263405 - DNA, 25 bp, probe
tggactggtgtcctatggagatatt

SEQ ID NO: 263406 - DNA, 25 bp, probe
tggaaggccgctttggagattgttc

SEQ ID NO: 263407 - DNA, 25 bp, probe
tggattggccgcattgaaattcctc

SEQ ID NO: 263408 - DNA, 25 bp, probe
tggcactgtccgatatgccagcatc

SEQ ID NO: 263409 - DNA, 25 bp, probe
tggacattgacactttgccaacacg

SEQ ID NO: 263410 - DNA, 25 bp, probe
tggacatcaacactgtggtcagagc

SEQ ID NO: 263411 - DNA, 25 bp, probe
tggcaatacatccatgatgttttcc

SEQ ID NO: 263412 - DNA, 25 bp, probe
tggactcatcatagccagttttcct

SEQ ID NO: 263413 - DNA, 25 bp, probe
tggactcttctggcagctagttagt

SEQ ID NO: 263414 - DNA, 25 bp, probe
tggactctttgaactctgttgctgt

SEQ ID NO: 263415 - DNA, 25 bp, probe
tggcacctttgaattctacatcctg

SEQ ID NO: 263416 - DNA, 25 bp, probe
tggacaagttatgcctaatagcagg

SEQ ID NO: 263417 - DNA, 25 bp, probe
tggacatcaggttgactctaaatca

SEQ ID NO: 263418 - DNA, 25 bp, probe
tggactaggactcccataaatcact

SEQ ID NO: 263419 - DNA, 25 bp, probe
tggcaaaaacagccttctagcacac

SEQ ID NO: 263420 - DNA, 25 bp, probe
tggaaaagtagtccttcagatcttt

SEQ ID NO: 263421 - DNA, 25 bp, probe
tggaaaattcatgcctgtaggttta

SEQ ID NO: 263422 - DNA, 25 bp, probe
tggttaatctcttctaaaggaattt

SEQ ID NO: 263423 - DNA, 25 bp, probe
tggaagaattcttctgtaacagaat

SEQ ID NO: 263424 - DNA, 25 bp, probe
tggacagaacatgctgtgttccata

SEQ ID NO: 263425 - DNA, 25 bp, probe
tggtcaagactgttgtcatcatcct

SEQ ID NO: 263426 - DNA, 25 bp, probe
tggtcaagactgttgtcatcatcct

SEQ ID NO: 263427 - DNA, 25 bp, probe
tggcagaagcctttgtgatctcacc

SEQ ID NO: 263428 - DNA, 25 bp, probe
tgggaacgctttgtccacagtgaaa

SEQ ID NO: 263429 - DNA, 25 bp, probe
tggaaacccttcatgaagcactgaa

SEQ ID NO: 263430 - DNA, 25 bp, probe
tggaacacctcattttatggcacca

SEQ ID NO: 263431 - DNA, 25 bp, probe
tggaactattatctacatgtacctg

SEQ ID NO: 263432 - DNA, 25 bp, probe
tggaggtttttaacagaacgtgtat

SEQ ID NO: 263433 - DNA, 25 bp, probe
tggaccttagtactgtaaattcttt

SEQ ID NO: 263434 - DNA, 25 bp, probe
tggaccttagtactgtaaattcttt

SEQ ID NO: 263435 - DNA, 25 bp, probe
tggaggttagtctgtggcctttttt

SEQ ID NO: 263436 - DNA, 25 bp, probe
tggagtttagtttgttccttaacat

SEQ ID NO: 263437 - DNA, 25 bp, probe
tggaacttaattttctcatttcaaa

SEQ ID NO: 263438 - DNA, 25 bp, probe
tggtgatattaatatctccattcca

SEQ ID NO: 263439 - DNA, 25 bp, probe
tggtgatattaatatctccattcca

SEQ ID NO: 263440 - DNA, 25 bp, probe
tggaattataaagtcatctcttctc

SEQ ID NO: 263441 - DNA, 25 bp, probe
tggaaatcatttagtgcatccttac

SEQ ID NO: 263442 - DNA, 25 bp, probe
tggcaatcattaaagtgcatagatt

SEQ ID NO: 263443 - DNA, 25 bp, probe
tggcagcataccacacagcaaatat

SEQ ID NO: 263444 - DNA, 25 bp, probe
tggcagcataccacacagcaaatat

SEQ ID NO: 263445 - DNA, 25 bp, probe
tggagattccatcacaaacatcatg

SEQ ID NO: 263446 - DNA, 25 bp, probe
tggagattccatcacaaacatcatg

SEQ ID NO: 263447 - DNA, 25 bp, probe
tggagattccatcacaaacatcatg

SEQ ID NO: 263448 - DNA, 25 bp, probe
tggagtcttctttcaaaccagtggg

SEQ ID NO: 263449 - DNA, 25 bp, probe
tggttccttttgtggcttgggaggc

SEQ ID NO: 263450 - DNA, 25 bp, probe
tggttttttggaggtctgtctgaag

SEQ ID NO: 263451 - DNA, 25 bp, probe
tggttttttggaggtctgtctgaag

SEQ ID NO: 263452 - DNA, 25 bp, probe
tggttatattctggggcttggagac

SEQ ID NO: 263453 - DNA, 25 bp, probe
tggaaatcactggggcggtggagcc

SEQ ID NO: 263454 - DNA, 25 bp, probe
tggcaacatcaagcgggaccgtgcc

SEQ ID NO: 263455 - DNA, 25 bp, probe
tggcagaagccagctgcggagtctt

SEQ ID NO: 263456 - DNA, 25 bp, probe
tggagtagacactttggaccttgcc

SEQ ID NO: 263457 - DNA, 25 bp, probe
tggagtagacactttggaccttgcc

SEQ ID NO: 263458 - DNA, 25 bp, probe
tggagataacactggtgcctcctgc

SEQ ID NO: 263459 - DNA, 25 bp, probe
tggaaaatcacacagttttcaggct

SEQ ID NO: 263460 - DNA, 25 bp, probe
tggaaaggccatcggctttgtcaag

SEQ ID NO: 263461 - DNA, 25 bp, probe
tggaaatcccatcaccatcttccag

SEQ ID NO: 263462 - DNA, 25 bp, probe
tggaggagcacctgaactttctgga

SEQ ID NO: 263463 - DNA, 25 bp, probe
tggagaagacctgagacatcccggc

SEQ ID NO: 263464 - DNA, 25 bp, probe
tggagaagacctgagacatcccggc

SEQ ID NO: 263465 - DNA, 25 bp, probe
tggaagaactctgggaactacgggg

SEQ ID NO: 263466 - DNA, 25 bp, probe
tggtaggacttggtgtaccgtgggg

SEQ ID NO: 263467 - DNA, 25 bp, probe
tgggaggacttcattgacctgggcc

SEQ ID NO: 263468 - DNA, 25 bp, probe
tgggggatttagtgccactgaagcc

SEQ ID NO: 263469 - DNA, 25 bp, probe
tggtctggtttactgggaaatagcc

SEQ ID NO: 263470 - DNA, 25 bp, probe
tggtctggtttactgggaaatagcc

SEQ ID NO: 263471 - DNA, 25 bp, probe
tgtgttttttaaatggaactatctc

SEQ ID NO: 263472 - DNA, 25 bp, probe
tgtatttgtttgtacggaccataaa

SEQ ID NO: 263473 - DNA, 25 bp, probe
tggacatttttttcgaatcttaatt

SEQ ID NO: 263474 - DNA, 25 bp, probe
tggacttttctgataaatcttggca

SEQ ID NO: 263475 - DNA, 25 bp, probe
tcggcatttacgtggatatctgggc

SEQ ID NO: 263476 - DNA, 25 bp, probe
tggagatttcctgtgagaacatgcg

SEQ ID NO: 263477 - DNA, 25 bp, probe
tggagattcccagttaaaaggctcc

SEQ ID NO: 263478 - DNA, 25 bp, probe
ggagctgtgttactagcactatata

SEQ ID NO: 263479 - DNA, 25 bp, probe
tggatttccgtctctggtgtagctg

SEQ ID NO: 263480 - DNA, 25 bp, probe
tgggttccttcaactggtatggtga

SEQ ID NO: 263481 - DNA, 25 bp, probe
tggtttccttcaacgtacgtagaag

SEQ ID NO: 263482 - DNA, 25 bp, probe
tggtgttttgtaccggcacgggata

SEQ ID NO: 263483 - DNA, 25 bp, probe
tggagtactatgtgccggagacgga

SEQ ID NO: 263484 - DNA, 25 bp, probe
tggactgaataaaccaggcaccgaa

SEQ ID NO: 263485 - DNA, 25 bp, probe
tggactgtaattacccagatcctat

SEQ ID NO: 263486 - DNA, 25 bp, probe
tggagagcacagagtcccagatcct

SEQ ID NO: 263487 - DNA, 25 bp, probe
tggcaagagatcatatcctcagacc

SEQ ID NO: 263488 - DNA, 25 bp, probe
tggcaaggtcatgttggcagaactc

SEQ ID NO: 263489 - DNA, 25 bp, probe
tggaagtatctgctatgggactatt

SEQ ID NO: 263490 - DNA, 25 bp, probe
tggcaagctcttcgtacaggacgaa

SEQ ID NO: 263491 - DNA, 25 bp, probe
tggataccttggaaatggccggaaa

SEQ ID NO: 263492 - DNA, 25 bp, probe
tggataccttgtgatttccaagaac

SEQ ID NO: 263493 - DNA, 25 bp, probe
tggataccttgtgatttccaagaac

SEQ ID NO: 263494 - DNA, 25 bp, probe
tggagccctttcggttcaagaagag

SEQ ID NO: 263495 - DNA, 25 bp, probe
tggacactttttggatcacaagaag

SEQ ID NO: 263496 - DNA, 25 bp, probe
tggaagcgtgttacttacaaagagg

SEQ ID NO: 263497 - DNA, 25 bp, probe
tggacagcgtctctttaatcatcaa

SEQ ID NO: 263498 - DNA, 25 bp, probe
tggaacagcatgtggtgaaatcaaa

SEQ ID NO: 263499 - DNA, 25 bp, probe
tggaatggcagccggggcaccaaag

SEQ ID NO: 263500 - DNA, 25 bp, probe
tggagatctgcaggcggctggagcc

SEQ ID NO: 263501 - DNA, 25 bp, probe
tggagatctgcaggcggctggagcc

SEQ ID NO: 263502 - DNA, 25 bp, probe
tggaactgcatcccaaggagctcag

SEQ ID NO: 263503 - DNA, 25 bp, probe
tggcacctgaggtcatcaagcagtc

SEQ ID NO: 263504 - DNA, 25 bp, probe
tggcacctgaagtcatcactcgtgc

SEQ ID NO: 263505 - DNA, 25 bp, probe
tggcactggaaggccttcggcctac

SEQ ID NO: 263506 - DNA, 25 bp, probe
tggcactaacctgcttgggtatgca

SEQ ID NO: 263507 - DNA, 25 bp, probe
tggcactaacctgcttgggtatgca

SEQ ID NO: 263508 - DNA, 25 bp, probe
tggcactgaatcatccatattttaa

SEQ ID NO: 263509 - DNA, 25 bp, probe
tggactgaaccgacttttctaaagc

SEQ ID NO: 263510 - DNA, 25 bp, probe
aacattaaagtgcaggtcagtgaac

SEQ ID NO: 263511 - DNA, 25 bp, probe
tggacctcacttgtttttagaagtc

SEQ ID NO: 263512 - DNA, 25 bp, probe
tggacttcctgatattgttgataca

SEQ ID NO: 263513 - DNA, 25 bp, probe
tggacttcctgatattgttgataca

SEQ ID NO: 263514 - DNA, 25 bp, probe
tggaattccatgatcctgataggca

SEQ ID NO: 263515 - DNA, 25 bp, probe
tggatttgaagttcctgaataacca

SEQ ID NO: 263516 - DNA, 25 bp, probe
tggacaaaaacttctcaaatcacac

SEQ ID NO: 263517 - DNA, 25 bp, probe
tggacaagaaccgatgtgaattact

SEQ ID NO: 263518 - DNA, 25 bp, probe
tggagaagacaccttgtgctcatgg

SEQ ID NO: 263519 - DNA, 25 bp, probe
tggaatatgcccgttggtctatgat

SEQ ID NO: 263520 - DNA, 25 bp, probe
tggaaatcacacgtctggcttcaca

SEQ ID NO: 263521 - DNA, 25 bp, probe
tggaagatacaggctcagaggttta

SEQ ID NO: 263522 - DNA, 25 bp, probe
tggaatgcaggctgccagatggtgg

SEQ ID NO: 263523 - DNA, 25 bp, probe
tggaagcatttcgcgatggacagac

SEQ ID NO: 263524 - DNA, 25 bp, probe
tggacagctactgccagatgccaaa

SEQ ID NO: 263525 - DNA, 25 bp, probe
tggcacgtggccaggagccatgaca

SEQ ID NO: 263526 - DNA, 25 bp, probe
tggactgtaggcagcctgccagtga

SEQ ID NO: 263527 - DNA, 25 bp, probe
tggactgtaggcagcctgccagtga

SEQ ID NO: 263528 - DNA, 25 bp, probe
tggacagatattctgcctccatggt

SEQ ID NO: 263529 - DNA, 25 bp, probe
tggcacagaaatggttccctgagct

SEQ ID NO: 263530 - DNA, 25 bp, probe
tgggcaaactactccctacttaagg

SEQ ID NO: 263531 - DNA, 25 bp, probe
tgggcaaactaagccgattttccgg

SEQ ID NO: 263532 - DNA, 25 bp, probe
tgggctttctaaaccagtgagttcc

SEQ ID NO: 263533 - DNA, 25 bp, probe
tggagagttaaacacagatgacccc

SEQ ID NO: 263534 - DNA, 25 bp, probe
tgtgggttcggaaagcccatcccac

SEQ ID NO: 263535 - DNA, 25 bp, probe
tggggtctgaagggagcccaaccag

SEQ ID NO: 263536 - DNA, 25 bp, probe
tggggtttaagaagcccaagccttg

SEQ ID NO: 263537 - DNA, 25 bp, probe
tggggatttaaaaacattcgccgag

SEQ ID NO: 263538 - DNA, 25 bp, probe
tggaggtacgaaaagaggggaagag

SEQ ID NO: 263539 - DNA, 25 bp, probe
tggggtacagtaaagaggcttccaa

SEQ ID NO: 263540 - DNA, 25 bp, probe
tggcacggaatgaaaacagagcttc

SEQ ID NO: 263541 - DNA, 25 bp, probe
tggaaggcgatgcacaacagattat

SEQ ID NO: 263542 - DNA, 25 bp, probe
tggaagagctgggctaccacatcta

SEQ ID NO: 263543 - DNA, 25 bp, probe
tggaagagctgggctaccacatcta

SEQ ID NO: 263544 - DNA, 25 bp, probe
tggaagtgctgcttcattccactta

SEQ ID NO: 263545 - DNA, 25 bp, probe
tggataatgctgttgcctcatctat

SEQ ID NO: 263546 - DNA, 25 bp, probe
tggagacatgcatttgctaactcat

SEQ ID NO: 263547 - DNA, 25 bp, probe
tggagacatgcatttgctaactcat

SEQ ID NO: 263548 - DNA, 25 bp, probe
tggagccagaataagacctcttatc

SEQ ID NO: 263549 - DNA, 25 bp, probe
tggaagatacataaaagtgctttgc

SEQ ID NO: 263550 - DNA, 25 bp, probe
tggacagaccaataatgctgcttct

SEQ ID NO: 263551 - DNA, 25 bp, probe
tggaaggcaaagcatcacatgtatt

SEQ ID NO: 263552 - DNA, 25 bp, probe
tggaagtgcaaccaaccatcgcatt

SEQ ID NO: 263553 - DNA, 25 bp, probe
tggaatgacaaccacagccatctat

SEQ ID NO: 263554 - DNA, 25 bp, probe
tggacgacaacggccacattattct

SEQ ID NO: 263555 - DNA, 25 bp, probe
tggagtaaccgacaatatatttatt

SEQ ID NO: 263556 - DNA, 25 bp, probe
tggagtaactaaggtcattgttttt

SEQ ID NO: 263557 - DNA, 25 bp, probe
tggaggtgactatggttggcccaca

SEQ ID NO: 263558 - DNA, 25 bp, probe
tggagcggaaagtgggcccatcgac

SEQ ID NO: 263559 - DNA, 25 bp, probe
tggagcggaaagtgggcccatcgac

SEQ ID NO: 263560 - DNA, 25 bp, probe
tggagcaggaattggggtcaccccc

SEQ ID NO: 263561 - DNA, 25 bp, probe
tggaaggagatgcggctgagacccc

SEQ ID NO: 263562 - DNA, 25 bp, probe
tggaagaggagctggccgacatctt

SEQ ID NO: 263563 - DNA, 25 bp, probe
tggacagaaagcgccataacagcat

SEQ ID NO: 263564 - DNA, 25 bp, probe
tggacagtagatgggccgacacaca

SEQ ID NO: 263565 - DNA, 25 bp, probe
tggaagtttgcttctctgagcctca

SEQ ID NO: 263566 - DNA, 25 bp, probe
tggacaaactgctgcgatatgacca

SEQ ID NO: 263567 - DNA, 25 bp, probe
tggaccacactgtgagcatgcagta

SEQ ID NO: 263568 - DNA, 25 bp, probe
tggacacacatggaggcagcagctg

SEQ ID NO: 263569 - DNA, 25 bp, probe
tggaataatggacgccgctggcagt

SEQ ID NO: 263570 - DNA, 25 bp, probe
tggacacagaggtgcccatggagcg

SEQ ID NO: 263571 - DNA, 25 bp, probe
tggacaagggaagggggaggcccag

SEQ ID NO: 263572 - DNA, 25 bp, probe
tggaaaagcggaggttggagccacc

SEQ ID NO: 263573 - DNA, 25 bp, probe
tggacacagtgcccgtgtcggagcc

SEQ ID NO: 263574 - DNA, 25 bp, probe
tggacatgctgggccggatcaagag

SEQ ID NO: 263575 - DNA, 25 bp, probe
tggacatgctgggccggatcaagag

SEQ ID NO: 263576 - DNA, 25 bp, probe
tggagagcgtgagctatgacagtga

SEQ ID NO: 263577 - DNA, 25 bp, probe
tggagactctgattgtcatgccact

SEQ ID NO: 263578 - DNA, 25 bp, probe
tggagccactgattatacctctagt

SEQ ID NO: 263579 - DNA, 25 bp, probe
tggacaacattttactactgaggga

SEQ ID NO: 263580 - DNA, 25 bp, probe
tggaacaattgcacaccagcaaagg

SEQ ID NO: 263581 - DNA, 25 bp, probe
tggaatctctctctcaacaaaaggt

SEQ ID NO: 263582 - DNA, 25 bp, probe
tggaaatgtcctccaacaataaaga

SEQ ID NO: 263583 - DNA, 25 bp, probe
tggaacagtctacaagggaaagtgg

SEQ ID NO: 263584 - DNA, 25 bp, probe
tggtacagttcagacaggacaaagt

SEQ ID NO: 263585 - DNA, 25 bp, probe
tggtacagttcagacaggacaaagt

SEQ ID NO: 263586 - DNA, 25 bp, probe
tggagaagccaagcagccagtcaac

SEQ ID NO: 263587 - DNA, 25 bp, probe
tggaagatgaagtccagccacccaa

SEQ ID NO: 263588 - DNA, 25 bp, probe
tggaagatgaagtccagccacccaa

SEQ ID NO: 263589 - DNA, 25 bp, probe
tggaagtgaatctctgcaaggctga

SEQ ID NO: 263590 - DNA, 25 bp, probe
tggagatgtacagcctgaaggatga

SEQ ID NO: 263591 - DNA, 25 bp, probe
tggaagtacagtttcaaggatgaag

SEQ ID NO: 263592 - DNA, 25 bp, probe
tggacgtgaagtctcgggcaaagcg

SEQ ID NO: 263593 - DNA, 25 bp, probe
tgtccgttcagggtctagccaaaat

SEQ ID NO: 263594 - DNA, 25 bp, probe
tgacttttagggagcacaaacaaga

SEQ ID NO: 263595 - DNA, 25 bp, probe
tgactgttcttgcgggggataaaaa

SEQ ID NO: 263596 - DNA, 25 bp, probe
tggattccttggtggaggaaaataa

SEQ ID NO: 263597 - DNA, 25 bp, probe
tggagcccttgaaaggtgaaaagta

SEQ ID NO: 263598 - DNA, 25 bp, probe
tggagctacgtgtggggaacaagta

SEQ ID NO: 263599 - DNA, 25 bp, probe
tgggcattcctaggggagaaaataa

SEQ ID NO: 263600 - DNA, 25 bp, probe
tgtatgcaccctccaggggacaact

SEQ ID NO: 263601 - DNA, 25 bp, probe
tgtatgcaccctccaggggacaact

SEQ ID NO: 263602 - DNA, 25 bp, probe
tggacagcgcctgaggcggccaatt

SEQ ID NO: 263603 - DNA, 25 bp, probe
tggacagcgcctgaggcggccaatt

SEQ ID NO: 263604 - DNA, 25 bp, probe
tggacagcaccggaagctcttaatt

SEQ ID NO: 263605 - DNA, 25 bp, probe
tggaatgaccagagacatctatgaa

SEQ ID NO: 263606 - DNA, 25 bp, probe
tggaagactacttcactgctacaga

SEQ ID NO: 263607 - DNA, 25 bp, probe
tggaagactcactgacggagctcag

SEQ ID NO: 263608 - DNA, 25 bp, probe
tggaagtgcccataggaaatagaga

SEQ ID NO: 263609 - DNA, 25 bp, probe
tggaaggccccaggtggaagcaggc

SEQ ID NO: 263610 - DNA, 25 bp, probe
tggacgctggcctgggatgagaggg

SEQ ID NO: 263611 - DNA, 25 bp, probe
tggacgctggcctgggatgagaggg

SEQ ID NO: 263612 - DNA, 25 bp, probe
tggacgctggcctgggatgagaggg

SEQ ID NO: 263613 - DNA, 25 bp, probe
tggacttcgtcgttggaggaggccg

SEQ ID NO: 263614 - DNA, 25 bp, probe
tggaacttgtggttgaggcagggcc

SEQ ID NO: 263615 - DNA, 25 bp, probe
tggaatttgtggctgatgaaggcat

SEQ ID NO: 263616 - DNA, 25 bp, probe
tggattttgtcgcagtcacgatcaa

SEQ ID NO: 263617 - DNA, 25 bp, probe
tggacatttatggagcagtgcacga

SEQ ID NO: 263618 - DNA, 25 bp, probe
tggacgttggctacaggactgatga

SEQ ID NO: 263619 - DNA, 25 bp, probe
tggacagttcgcttctacacaagaa

SEQ ID NO: 263620 - DNA, 25 bp, probe
tggaagacatcctatctagctgcaa

SEQ ID NO: 263621 - DNA, 25 bp, probe
tggagagatcatccatctgctggca

SEQ ID NO: 263622 - DNA, 25 bp, probe
tggacatcacagccctgatggctgc

SEQ ID NO: 263623 - DNA, 25 bp, probe
tggacaaaggcccaggaccagtgac

SEQ ID NO: 263624 - DNA, 25 bp, probe
tggacaaatgcctatgaaattaaac

SEQ ID NO: 263625 - DNA, 25 bp, probe
tggaaattaccttaatatgcaagac

SEQ ID NO: 263626 - DNA, 25 bp, probe
tggaactccagcctaagtatgaaga

SEQ ID NO: 263627 - DNA, 25 bp, probe
tggactcatccaccaggggatgaaa

SEQ ID NO: 263628 - DNA, 25 bp, probe
tggacagatccacaggtatgtaaaa

SEQ ID NO: 263629 - DNA, 25 bp, probe
tggagcagaccacaaatgaataaaa

SEQ ID NO: 263630 - DNA, 25 bp, probe
tggatctacccaaagaaacaatatt

SEQ ID NO: 263631 - DNA, 25 bp, probe
tggacacccgcatgtgtaacaacag

SEQ ID NO: 263632 - DNA, 25 bp, probe
tggacatagccctgtgatactgcat

SEQ ID NO: 263633 - DNA, 25 bp, probe
tggatcaactcctatgcataaagct

SEQ ID NO: 263634 - DNA, 25 bp, probe
tggatcaactcctatgcataaagct

SEQ ID NO: 263635 - DNA, 25 bp, probe
tggtgctacgtctttaaggcgggga

SEQ ID NO: 263636 - DNA, 25 bp, probe
tggatctccgtcttttcagaagtgc

SEQ ID NO: 263637 - DNA, 25 bp, probe
tgtaacaggtcttattggaattgct

SEQ ID NO: 263638 - DNA, 25 bp, probe
tggaaaggctgttatatggaatgtc

SEQ ID NO: 263639 - DNA, 25 bp, probe
tggagaagggtcctatggcagcgta

SEQ ID NO: 263640 - DNA, 25 bp, probe
tggagcacgtggagatgctgtgcat

SEQ ID NO: 263641 - DNA, 25 bp, probe
tggaacagtgcgagtgcttcggggg

SEQ ID NO: 263642 - DNA, 25 bp, probe
tggacaatggagacctgattcggga

SEQ ID NO: 263643 - DNA, 25 bp, probe
tggacctggatcccgagactaggag

SEQ ID NO: 263644 - DNA, 25 bp, probe
tggatcggagtttacaagctcaggc

SEQ ID NO: 263645 - DNA, 25 bp, probe
tggatcggttggtgccactgaatgg

SEQ ID NO: 263646 - DNA, 25 bp, probe
tggacgtgattggactcccaggaga

SEQ ID NO: 263647 - DNA, 25 bp, probe
tggaagtgagtggcccaccagagcc

SEQ ID NO: 263648 - DNA, 25 bp, probe
tggaagtgagtggcccaccagagcc

SEQ ID NO: 263649 - DNA, 25 bp, probe
tggaagtggtgggcacacccagccc

SEQ ID NO: 263650 - DNA, 25 bp, probe
tggaagtggtgggcacacccagccc

SEQ ID NO: 263651 - DNA, 25 bp, probe
tggaagtggtgggcacacccagccc

SEQ ID NO: 263652 - DNA, 25 bp, probe
tggaaaggttcaggcaactcctcct

SEQ ID NO: 263653 - DNA, 25 bp, probe
tggaaaggttcaggcaactcctcct

SEQ ID NO: 263654 - DNA, 25 bp, probe
tggaaggttccataactggccagct

SEQ ID NO: 263655 - DNA, 25 bp, probe
tgtgaaagttcttaacctgcccaaa

SEQ ID NO: 263656 - DNA, 25 bp, probe
tggaagagcttacaacctgccttaa

SEQ ID NO: 263657 - DNA, 25 bp, probe
tggaagagctatctcaccagctcct

SEQ ID NO: 263658 - DNA, 25 bp, probe
tggaccactatgatcacaccatcga

SEQ ID NO: 263659 - DNA, 25 bp, probe
tggaacccagaggacgccaagagca

SEQ ID NO: 263660 - DNA, 25 bp, probe
tggacacccagttcatcgacgagaa

SEQ ID NO: 263661 - DNA, 25 bp, probe
tggaagcagcacatctacaaggaga

SEQ ID NO: 263662 - DNA, 25 bp, probe
tggacatgagccatttgaggggaga

SEQ ID NO: 263663 - DNA, 25 bp, probe
tggactggccgtttgacgatggggc

SEQ ID NO: 263664 - DNA, 25 bp, probe
tggactgcgctggacgatagcttgg

SEQ ID NO: 263665 - DNA, 25 bp, probe
tggacctgtgctgtgagtgtgtgga

SEQ ID NO: 263666 - DNA, 25 bp, probe
tggacctgctgacatagtggatgga

SEQ ID NO: 263667 - DNA, 25 bp, probe
tggagccttacatactgggagaatt

SEQ ID NO: 263668 - DNA, 25 bp, probe
tggagacctacaaactgaagtgcaa

SEQ ID NO: 263669 - DNA, 25 bp, probe
tggaacatctgctcaacatgaagtg

SEQ ID NO: 263670 - DNA, 25 bp, probe
tggacaccgtacaacatcatggtgc

SEQ ID NO: 263671 - DNA, 25 bp, probe
tggaagccactgtcaatgattagat

SEQ ID NO: 263672 - DNA, 25 bp, probe
tggacaggatcttcacagcgtagct

SEQ ID NO: 263673 - DNA, 25 bp, probe
tggacaagttcattcacgtggcaca

SEQ ID NO: 263674 - DNA, 25 bp, probe
tggacaacgtactactggaccacga

SEQ ID NO: 263675 - DNA, 25 bp, probe
tggaacaagaccactggatccagga

SEQ ID NO: 263676 - DNA, 25 bp, probe
tggaacaagaccactggatccagga

SEQ ID NO: 263677 - DNA, 25 bp, probe
tggagaaacccacagcagatgcaga

SEQ ID NO: 263678 - DNA, 25 bp, probe
tggaaactatcatggacagagagaa

SEQ ID NO: 263679 - DNA, 25 bp, probe
tggaaaaatagccccaagcagagaa

SEQ ID NO: 263680 - DNA, 25 bp, probe
tgtattaaatacacccagccagtta

SEQ ID NO: 263681 - DNA, 25 bp, probe
tgtttgaaataaagtccttagttag

SEQ ID NO: 263682 - DNA, 25 bp, probe
tgttaataagaaaccctaagccaag

SEQ ID NO: 263683 - DNA, 25 bp, probe
tgttaacgaaataaccaagactcga

SEQ ID NO: 263684 - DNA, 25 bp, probe
tgtacaacaacctcaccaacgtgga

SEQ ID NO: 263685 - DNA, 25 bp, probe
tggacacaaacatccagctcaagcc

SEQ ID NO: 263686 - DNA, 25 bp, probe
tggagtcagaactgcctctgagctg

SEQ ID NO: 263687 - DNA, 25 bp, probe
tggagaaagcactgacctgtcatgc

SEQ ID NO: 263688 - DNA, 25 bp, probe
tggagaaggacccgcagagatcagg

SEQ ID NO: 263689 - DNA, 25 bp, probe
tggaagaggggacaggtccctcacc

SEQ ID NO: 263690 - DNA, 25 bp, probe
tgaagaaggcgacccggttcatcat

SEQ ID NO: 263691 - DNA, 25 bp, probe
tggagaaggtcagcagccctttcat

SEQ ID NO: 263692 - DNA, 25 bp, probe
tggagaccatgaaacagcccttcct

SEQ ID NO: 263693 - DNA, 25 bp, probe
tggagccactgaagagccgactgtg

SEQ ID NO: 263694 - DNA, 25 bp, probe
tggaccgcagaccagcaacagtagt

SEQ ID NO: 263695 - DNA, 25 bp, probe
tggacaccaggccaggtggtactgc

SEQ ID NO: 263696 - DNA, 25 bp, probe
tggacaccaggccaggtggtactgc

SEQ ID NO: 263697 - DNA, 25 bp, probe
tggaagccaggacgtcaggctgacc

SEQ ID NO: 263698 - DNA, 25 bp, probe
tggacctcatggcccacatggcctc

SEQ ID NO: 263699 - DNA, 25 bp, probe
tggagttcatggctccggagatggt

SEQ ID NO: 263700 - DNA, 25 bp, probe
tggacctcagccccaaagagattgt

SEQ ID NO: 263701 - DNA, 25 bp, probe
tggactgccaggataacgaattgga

SEQ ID NO: 263702 - DNA, 25 bp, probe
tggaacctgtttaatgttatgagga

SEQ ID NO: 263703 - DNA, 25 bp, probe
tggaaccatttttggcatctataga

SEQ ID NO: 263704 - DNA, 25 bp, probe
tggaagcctccttggagctcttcaa

SEQ ID NO: 263705 - DNA, 25 bp, probe
tggagatgccttctcggatttcaca

SEQ ID NO: 263706 - DNA, 25 bp, probe
tggagctgcctagcggggatcagcc

SEQ ID NO: 263707 - DNA, 25 bp, probe
tggaggacgaggcggaacgctccgc

SEQ ID NO: 263708 - DNA, 25 bp, probe
tggagtcccggaagtgtatccaccg

SEQ ID NO: 263709 - DNA, 25 bp, probe
tggaaaccaggaagcctagcatccc

SEQ ID NO: 263710 - DNA, 25 bp, probe
tggtagagacagctacttactcccc

SEQ ID NO: 263711 - DNA, 25 bp, probe
tgtgaagagccaaaactttcccctg

SEQ ID NO: 263712 - DNA, 25 bp, probe
tggacaggctagtgagtttccaccc

SEQ ID NO: 263713 - DNA, 25 bp, probe
tggaagcgatggtggatttctctgg

SEQ ID NO: 263714 - DNA, 25 bp, probe
tggaagcaaagggtattctcttgga

SEQ ID NO: 263715 - DNA, 25 bp, probe
tggaagcaaagggtattctcttgga

SEQ ID NO: 263716 - DNA, 25 bp, probe
tggaagctaatggcctgttgctcct

SEQ ID NO: 263717 - DNA, 25 bp, probe
tggaagctaatggcctgttgctcct

SEQ ID NO: 263718 - DNA, 25 bp, probe
tggactgcaaggccactgtcattgc

SEQ ID NO: 263719 - DNA, 25 bp, probe
tggactgcaaggccactgtcattgc

SEQ ID NO: 263720 - DNA, 25 bp, probe
tggaagcttgtgcacattcattttt

SEQ ID NO: 263721 - DNA, 25 bp, probe
tggacactctctcatcttaatttta

SEQ ID NO: 263722 - DNA, 25 bp, probe
tggagacatccccatgttattcttt

SEQ ID NO: 263723 - DNA, 25 bp, probe
tggagagctcctactttgattcttt

SEQ ID NO: 263724 - DNA, 25 bp, probe
tggagagtccttgctttctgatatg

SEQ ID NO: 263725 - DNA, 25 bp, probe
tggagagcttcctcattgttaaggc

SEQ ID NO: 263726 - DNA, 25 bp, probe
tggagttgtccatcgtgacatcaag

SEQ ID NO: 263727 - DNA, 25 bp, probe
tggagtctggactggctgagataag

SEQ ID NO: 263728 - DNA, 25 bp, probe
tggagatctgaggtcactgctgtga

SEQ ID NO: 263729 - DNA, 25 bp, probe
tggagtcatgatgggccgctggaca

SEQ ID NO: 263730 - DNA, 25 bp, probe
tggacctggctggccgggacctgac

SEQ ID NO: 263731 - DNA, 25 bp, probe
tggagccatgggggttggccactac

SEQ ID NO: 263732 - DNA, 25 bp, probe
tggacatatggggccttggcgtcat

SEQ ID NO: 263733 - DNA, 25 bp, probe
tggacatgtgggctcttggtgtgat

SEQ ID NO: 263734 - DNA, 25 bp, probe
tggacaggtggccaagtgcttggat

SEQ ID NO: 263735 - DNA, 25 bp, probe
tggacagagggccagagtgggtagt

SEQ ID NO: 263736 - DNA, 25 bp, probe
tggaaagacagctggatgtggtgaa

SEQ ID NO: 263737 - DNA, 25 bp, probe
tggaaatgaatgaggcacagccgta

SEQ ID NO: 263738 - DNA, 25 bp, probe
tggacaatgagaggcggccgcattt

SEQ ID NO: 263739 - DNA, 25 bp, probe
tggacagatgagggtgatgacagca

SEQ ID NO: 263740 - DNA, 25 bp, probe
tggagcagatagtgtctgcactgct

SEQ ID NO: 263741 - DNA, 25 bp, probe
tggagagacaattggcatcagtgaa

SEQ ID NO: 263742 - DNA, 25 bp, probe
tggaggactcaagcaatggagagcg

SEQ ID NO: 263743 - DNA, 25 bp, probe
tggagcccctagaagaggatggcca

SEQ ID NO: 263744 - DNA, 25 bp, probe
tggagcccccgaaggatggagacca

SEQ ID NO: 263745 - DNA, 25 bp, probe
tggagcccccgaaggatggagacca

SEQ ID NO: 263746 - DNA, 25 bp, probe
tggacacaagccagggctgggacaa

SEQ ID NO: 263747 - DNA, 25 bp, probe
tggacgactgccaaggactgaggac

SEQ ID NO: 263748 - DNA, 25 bp, probe
tggacgaagcaattgtaaagcagat

SEQ ID NO: 263749 - DNA, 25 bp, probe
tggacagggcagatctagagagaat

SEQ ID NO: 263750 - DNA, 25 bp, probe
tggacagaggtttctgggagaccta

SEQ ID NO: 263751 - DNA, 25 bp, probe
tggactcggtctttgaggagccgct

SEQ ID NO: 263752 - DNA, 25 bp, probe
tggactgcatggacaatgagaggcg

SEQ ID NO: 263753 - DNA, 25 bp, probe
tggaggctggtcatcgcatgtcagc

SEQ ID NO: 263754 - DNA, 25 bp, probe
tggatggctgccatcttgctgagca

SEQ ID NO: 263755 - DNA, 25 bp, probe
tggagcggcctgactgggagaccgc

SEQ ID NO: 263756 - DNA, 25 bp, probe
tggagcggcctgactgggagaccgc

SEQ ID NO: 263757 - DNA, 25 bp, probe
tggagcggcctgactgggagaccgc

SEQ ID NO: 263758 - DNA, 25 bp, probe
tggagcggatccagggcatgaccaa

SEQ ID NO: 263759 - DNA, 25 bp, probe
tggagcggatccagggcatgaccaa

SEQ ID NO: 263760 - DNA, 25 bp, probe
tggagccaaacaagtgtcagccaca

SEQ ID NO: 263761 - DNA, 25 bp, probe
tggacctatacatgatgcacctaca

SEQ ID NO: 263762 - DNA, 25 bp, probe
tggacactttcaagcatactgatga

SEQ ID NO: 263763 - DNA, 25 bp, probe
tggacactttcaagcatactgatga

SEQ ID NO: 263764 - DNA, 25 bp, probe
tggacactatgtcacatgcacatgg

SEQ ID NO: 263765 - DNA, 25 bp, probe
tggacacgtggccacaaatctggga

SEQ ID NO: 263766 - DNA, 25 bp, probe
tggaacagtatgccaataacttgga

SEQ ID NO: 263767 - DNA, 25 bp, probe
tggaccagtgtgcctatggacttag

SEQ ID NO: 263768 - DNA, 25 bp, probe
tggactagagagtaagcgacttaga

SEQ ID NO: 263769 - DNA, 25 bp, probe
tggactagcaatttatgcttcttgg

SEQ ID NO: 263770 - DNA, 25 bp, probe
tggacctgcaatctatgcttcagct

SEQ ID NO: 263771 - DNA, 25 bp, probe
tggacctcaaaatcctgcctaatga

SEQ ID NO: 263772 - DNA, 25 bp, probe
tggacttaagagaatttgcctcaga

SEQ ID NO: 263773 - DNA, 25 bp, probe
tggactccacggatgcgtgggcaga

SEQ ID NO: 263774 - DNA, 25 bp, probe
tggacctccgagagctggaggggaa

SEQ ID NO: 263775 - DNA, 25 bp, probe
tggtcccccaggggcgaggggagag

SEQ ID NO: 263776 - DNA, 25 bp, probe
tggtatgacccagccgaagtggagg

SEQ ID NO: 263777 - DNA, 25 bp, probe
tggggtcccctgctagaagtggggg

SEQ ID NO: 263778 - DNA, 25 bp, probe
tggggtcccctgctagaagtggggg

SEQ ID NO: 263779 - DNA, 25 bp, probe
tcaagggcgccctgaaaagggggct

SEQ ID NO: 263780 - DNA, 25 bp, probe
tggagggcctcctgagaaggacagg

SEQ ID NO: 263781 - DNA, 25 bp, probe
tggagaacggcgtgggtggcaacag

SEQ ID NO: 263782 - DNA, 25 bp, probe
tcagaaaggggttcgcaaggaaagt

SEQ ID NO: 263783 - DNA, 25 bp, probe
tggagaaggggtaccgcatggaacc

SEQ ID NO: 263784 - DNA, 25 bp, probe
tggagatcattgggctccctgtgga

SEQ ID NO: 263785 - DNA, 25 bp, probe
tggagatcattgggctccctgtgga

SEQ ID NO: 263786 - DNA, 25 bp, probe
tggagagcacgtcgtgaccttgggg

SEQ ID NO: 263787 - DNA, 25 bp, probe
tggagaacgtgggcatgctgctggt

SEQ ID NO: 263788 - DNA, 25 bp, probe
tggagaacgtgggcatgctgctggt

SEQ ID NO: 263789 - DNA, 25 bp, probe
tggagaacgtgggcatgctgctggt

SEQ ID NO: 263790 - DNA, 25 bp, probe
tggagcaatctcgcagtgcagtggt

SEQ ID NO: 263791 - DNA, 25 bp, probe
tggagaatgcgagccgggtgttcca

SEQ ID NO: 263792 - DNA, 25 bp, probe
tggagaatgcgagccgggtgttcca

SEQ ID NO: 263793 - DNA, 25 bp, probe
tggaaaggaagacggcgtgctgctc

SEQ ID NO: 263794 - DNA, 25 bp, probe
tggagaagtggagcggcggtcgcgg

SEQ ID NO: 263795 - DNA, 25 bp, probe
tggagaagtggagcggcggtcgcgg

SEQ ID NO: 263796 - DNA, 25 bp, probe
tggacgagggcagtgcctcggtggc

SEQ ID NO: 263797 - DNA, 25 bp, probe
tggacagggtgctgtcggcctatga

SEQ ID NO: 263798 - DNA, 25 bp, probe
tgtagcggttgccagggaccttaag

SEQ ID NO: 263799 - DNA, 25 bp, probe
tggagcggtacccggacagttacga

SEQ ID NO: 263800 - DNA, 25 bp, probe
tggacgggacggcagacgatgccac

SEQ ID NO: 263801 - DNA, 25 bp, probe
tggacgggacggcagacgatgccac

SEQ ID NO: 263802 - DNA, 25 bp, probe
tggacaagggcatgaggtcagacca

SEQ ID NO: 263803 - DNA, 25 bp, probe
tggaccagaggctggcactcatcac

SEQ ID NO: 263804 - DNA, 25 bp, probe
tggacctgagtgtcggtcacagccc

SEQ ID NO: 263805 - DNA, 25 bp, probe
tggaccgagtgactactatacagac

SEQ ID NO: 263806 - DNA, 25 bp, probe
tggagctggaggactggctttgctg

SEQ ID NO: 263807 - DNA, 25 bp, probe
tggagcatgagaccagtgaccccga

SEQ ID NO: 263808 - DNA, 25 bp, probe
tggagagcaagtgctgcatccaccg

SEQ ID NO: 263809 - DNA, 25 bp, probe
tggagagcaagtgctgcatccaccg

SEQ ID NO: 263810 - DNA, 25 bp, probe
tggatcagataactccatcccaatg

SEQ ID NO: 263811 - DNA, 25 bp, probe
tggtcgctgaccggaccgaatgttt

SEQ ID NO: 263812 - DNA, 25 bp, probe
tggtgccgatatgtgagacgaatga

SEQ ID NO: 263813 - DNA, 25 bp, probe
tggagccggtgcagcagacgttaaa

SEQ ID NO: 263814 - DNA, 25 bp, probe
tggacactggtccgagaagggacat

SEQ ID NO: 263815 - DNA, 25 bp, probe
tggatcaacgaccggatacggcctc

SEQ ID NO: 263816 - DNA, 25 bp, probe
tggacctcagcgggagaactggctc

SEQ ID NO: 263817 - DNA, 25 bp, probe
tggtctgtacaggctgaagccccct

SEQ ID NO: 263818 - DNA, 25 bp, probe
tggttgagactgcatcatagcccac

SEQ ID NO: 263819 - DNA, 25 bp, probe
tggtatggactgcatggacaatgag

SEQ ID NO: 263820 - DNA, 25 bp, probe
tggttgatcctgccagtagcatatg

SEQ ID NO: 263821 - DNA, 25 bp, probe
tggagcgaccagctgtcagctgcag

SEQ ID NO: 263822 - DNA, 25 bp, probe
tggagctactgctgtggttcaggca

SEQ ID NO: 263823 - DNA, 25 bp, probe
tggagctactgctgtggttcaggca

SEQ ID NO: 263824 - DNA, 25 bp, probe
tggagtgactcttgtcggtcaccag

SEQ ID NO: 263825 - DNA, 25 bp, probe
tggaggtctcatttcttgtaaagta

SEQ ID NO: 263826 - DNA, 25 bp, probe
tggataagcccaaaattgaaagtca

SEQ ID NO: 263827 - DNA, 25 bp, probe
tggataagcccaaaattgaaagtca

SEQ ID NO: 263828 - DNA, 25 bp, probe
tgggaacccatgaaattgaccccca

SEQ ID NO: 263829 - DNA, 25 bp, probe
tggagaactgggatttgaacccccg

SEQ ID NO: 263830 - DNA, 25 bp, probe
tggagcaagtgggtgttctgcacac

SEQ ID NO: 263831 - DNA, 25 bp, probe
tggagccagctgagaggtctattta

SEQ ID NO: 263832 - DNA, 25 bp, probe
tggatgccacacagatggtctccgt

SEQ ID NO: 263833 - DNA, 25 bp, probe
tggaggcaagatcgtgggctccttg

SEQ ID NO: 263834 - DNA, 25 bp, probe
tggagtgcaggtgtgggctctaggc

SEQ ID NO: 263835 - DNA, 25 bp, probe
tggagcgaggatgatttcactaggc

SEQ ID NO: 263836 - DNA, 25 bp, probe
tggaggagccactattccagaaggc

SEQ ID NO: 263837 - DNA, 25 bp, probe
tggagagagccctttgcaggatgca

SEQ ID NO: 263838 - DNA, 25 bp, probe
tggagagagccctttgcaggatgca

SEQ ID NO: 263839 - DNA, 25 bp, probe
tggagagagccctttgcaggatgca

SEQ ID NO: 263840 - DNA, 25 bp, probe
tggagatgcccactttgatgatgat

SEQ ID NO: 263841 - DNA, 25 bp, probe
tggatatctgtcccttcagacattt

SEQ ID NO: 263842 - DNA, 25 bp, probe
tggagatgttcgactggaacctgga

SEQ ID NO: 263843 - DNA, 25 bp, probe
tggagttcaagaagccaacgctgag

SEQ ID NO: 263844 - DNA, 25 bp, probe
tggagttaagatccctcacaggacc

SEQ ID NO: 263845 - DNA, 25 bp, probe
tggagttaagatccctcacaggacc

SEQ ID NO: 263846 - DNA, 25 bp, probe
tggagttgaagtcacctggtcacct

SEQ ID NO: 263847 - DNA, 25 bp, probe
tggatttcaggtcacttccattcca

SEQ ID NO: 263848 - DNA, 25 bp, probe
tggataccacctggaggttttcctt

SEQ ID NO: 263849 - DNA, 25 bp, probe
tggtacagacagaggtattttttga

SEQ ID NO: 263850 - DNA, 25 bp, probe
tggtaaacagttggttgttctggcc

SEQ ID NO: 263851 - DNA, 25 bp, probe
tggtaaagcaattcctccttgtcac

SEQ ID NO: 263852 - DNA, 25 bp, probe
tggttaaacaaactctcatttgact

SEQ ID NO: 263853 - DNA, 25 bp, probe
tggtttagaaagcttgccctggtgc

SEQ ID NO: 263854 - DNA, 25 bp, probe
tggtttacgagatgtggctcttcgt

SEQ ID NO: 263855 - DNA, 25 bp, probe
tggttgtgcctagaatggctttggt

SEQ ID NO: 263856 - DNA, 25 bp, probe
tggaccctgtagggtgccatttgga

SEQ ID NO: 263857 - DNA, 25 bp, probe
tggactccaaacaagctcactgtgt

SEQ ID NO: 263858 - DNA, 25 bp, probe
tggattccaggagggcttcgtgtat

SEQ ID NO: 263859 - DNA, 25 bp, probe
tggatcgcccgagtgggacgattac

SEQ ID NO: 263860 - DNA, 25 bp, probe
tggacaccgcagatgaagacttcta

SEQ ID NO: 263861 - DNA, 25 bp, probe
tggacaccgcagatgaagacttcta

SEQ ID NO: 263862 - DNA, 25 bp, probe
tggacagtcctgatgacacagccct

SEQ ID NO: 263863 - DNA, 25 bp, probe
tggacagtcctgatgacacagccct

SEQ ID NO: 263864 - DNA, 25 bp, probe
tggatcgactctatcatccaacgct

SEQ ID NO: 263865 - DNA, 25 bp, probe
tggactacatctactgatgctagac

SEQ ID NO: 263866 - DNA, 25 bp, probe
tggactctctgcaatctacgtgaaa

SEQ ID NO: 263867 - DNA, 25 bp, probe
tggactggctccgcacggagaacga

SEQ ID NO: 263868 - DNA, 25 bp, probe
tggaggagctgtgctgccggaaaaa

SEQ ID NO: 263869 - DNA, 25 bp, probe
tggaggagctgtgctgccggaaaaa

SEQ ID NO: 263870 - DNA, 25 bp, probe
tggagaggctgaggttgcgccacta

SEQ ID NO: 263871 - DNA, 25 bp, probe
tggagaggctgaggttgcgccacta

SEQ ID NO: 263872 - DNA, 25 bp, probe
tggacatggcagttgttgctccacc

SEQ ID NO: 263873 - DNA, 25 bp, probe
tggacatggcagttgttgctccacc

SEQ ID NO: 263874 - DNA, 25 bp, probe
tggacagtgaggcctctgtccacgc

SEQ ID NO: 263875 - DNA, 25 bp, probe
tggataggagcctgctggtcacagc

SEQ ID NO: 263876 - DNA, 25 bp, probe
tggatatccagagcgagcgcttcag

SEQ ID NO: 263877 - DNA, 25 bp, probe
tggatctccatacggaggcgccagg

SEQ ID NO: 263878 - DNA, 25 bp, probe
tggatctgctgtttgaagcgcagca

SEQ ID NO: 263879 - DNA, 25 bp, probe
tggagctgctgtccgaggtgcagct

SEQ ID NO: 263880 - DNA, 25 bp, probe
tggagtgcagtggcgcaatctcagc

SEQ ID NO: 263881 - DNA, 25 bp, probe
tggagtgcagtggtgcgatctcggc

SEQ ID NO: 263882 - DNA, 25 bp, probe
tggagtgcagtggtgcgatctcggc

SEQ ID NO: 263883 - DNA, 25 bp, probe
tggagtgcagtggcgtgatctcggc

SEQ ID NO: 263884 - DNA, 25 bp, probe
tggagtgcagtggcgtgatctcggc

SEQ ID NO: 263885 - DNA, 25 bp, probe
tggagtggaccactcatctgcaggc

SEQ ID NO: 263886 - DNA, 25 bp, probe
tggagtcaacaaccatcgagtttgt

SEQ ID NO: 263887 - DNA, 25 bp, probe
tggagtcaacaaccatcgagtttgt

SEQ ID NO: 263888 - DNA, 25 bp, probe
tggagttaaatattctgggtttcct

SEQ ID NO: 263889 - DNA, 25 bp, probe
tggagattcacactatgcactggga

SEQ ID NO: 263890 - DNA, 25 bp, probe
tggatggtgctgtctatgcacaggt

SEQ ID NO: 263891 - DNA, 25 bp, probe
tggagctgcttgtgatgcacatgga

SEQ ID NO: 263892 - DNA, 25 bp, probe
tggagcgctctgatggacaaaaaag

SEQ ID NO: 263893 - DNA, 25 bp, probe
tggagcgggtgggaaccaaacacct

SEQ ID NO: 263894 - DNA, 25 bp, probe
tggagggtgtcgtgaccaagagcac

SEQ ID NO: 263895 - DNA, 25 bp, probe
tggagaaaggcgcagacctcaatgc

SEQ ID NO: 263896 - DNA, 25 bp, probe
tggagcaaacgtcaactgtgctgtc

SEQ ID NO: 263897 - DNA, 25 bp, probe
tggaggaaatggcaatcttatgtgt

SEQ ID NO: 263898 - DNA, 25 bp, probe
tggtacttatggcagaatctatttg

SEQ ID NO: 263899 - DNA, 25 bp, probe
tggtacttatggcagaatctatttg

SEQ ID NO: 263900 - DNA, 25 bp, probe
tggttatattggcaacctattctca

SEQ ID NO: 263901 - DNA, 25 bp, probe
tggtttttatggaccaccattatca

SEQ ID NO: 263902 - DNA, 25 bp, probe
tggtatatttgtaaagcgccttaat

SEQ ID NO: 263903 - DNA, 25 bp, probe
tggtgtcatttagtaaggattttat

SEQ ID NO: 263904 - DNA, 25 bp, probe
tggtgccttcgtgaaggcttttgtt

SEQ ID NO: 263905 - DNA, 25 bp, probe
tggtcactttgtggtctgtgctttc

SEQ ID NO: 263906 - DNA, 25 bp, probe
tggacattttctggcttgtcattct

SEQ ID NO: 263907 - DNA, 25 bp, probe
tggacctgattctagtttattctaa

SEQ ID NO: 263908 - DNA, 25 bp, probe
tggacttttcaactactttctctac

SEQ ID NO: 263909 - DNA, 25 bp, probe
tgggttttcaaacattcctcaactt

SEQ ID NO: 263910 - DNA, 25 bp, probe
tggagttctctttattttccaccac

SEQ ID NO: 263911 - DNA, 25 bp, probe
tggagctctcacagtgttttaccca

SEQ ID NO: 263912 - DNA, 25 bp, probe
tggagtcagcgtagttcttttccta

SEQ ID NO: 263913 - DNA, 25 bp, probe
tggagtccgatgattctcttttgca

SEQ ID NO: 263914 - DNA, 25 bp, probe
tgggacacggagtttgcgtttgagg

SEQ ID NO: 263915 - DNA, 25 bp, probe
tggaccggaagctgggtgtctacgt

SEQ ID NO: 263916 - DNA, 25 bp, probe
tggacggggagcaggtggagtatgg

SEQ ID NO: 263917 - DNA, 25 bp, probe
tggactgggtgccacggtggactta

SEQ ID NO: 263918 - DNA, 25 bp, probe
tggacagggtggacgctgtgggctt

SEQ ID NO: 263919 - DNA, 25 bp, probe
tggagcgtcgtgtcacagtggacag

SEQ ID NO: 263920 - DNA, 25 bp, probe
tggacttcgagcaagagatggccac

SEQ ID NO: 263921 - DNA, 25 bp, probe
tggagttctgacagttccagcacgt

SEQ ID NO: 263922 - DNA, 25 bp, probe
tggactcagctagctgttcaatgaa

SEQ ID NO: 263923 - DNA, 25 bp, probe
tggactcgccagagacatctataaa

SEQ ID NO: 263924 - DNA, 25 bp, probe
tggatcttccacacaattaaacagc

SEQ ID NO: 263925 - DNA, 25 bp, probe
tggacttccacagattctacttcga

SEQ ID NO: 263926 - DNA, 25 bp, probe
tggttatgcccaggagtctcaaagg

SEQ ID NO: 263927 - DNA, 25 bp, probe
tggtcagcatgcacaggagctccaa

SEQ ID NO: 263928 - DNA, 25 bp, probe
tggtcagcatgcacaggagctccaa

SEQ ID NO: 263929 - DNA, 25 bp, probe
tggatgcacgcacatgccaatgcac

SEQ ID NO: 263930 - DNA, 25 bp, probe
tggatgaagacattgctcacaagca

SEQ ID NO: 263931 - DNA, 25 bp, probe
tggagatagaattctgcgacgcaca

SEQ ID NO: 263932 - DNA, 25 bp, probe
tggagaagactcttgcttccaccaa

SEQ ID NO: 263933 - DNA, 25 bp, probe
tggactatggcgacatggtccccag

SEQ ID NO: 263934 - DNA, 25 bp, probe
tggactatggcgacatggtccccag

SEQ ID NO: 263935 - DNA, 25 bp, probe
tggacctggctggatgagccgccac

SEQ ID NO: 263936 - DNA, 25 bp, probe
tggacctgaggccacaggccaagtt

SEQ ID NO: 263937 - DNA, 25 bp, probe
tggatccgagctcggtaccaagctt

SEQ ID NO: 263938 - DNA, 25 bp, probe
tggacttcagtgtgtcaccatttta

SEQ ID NO: 263939 - DNA, 25 bp, probe
tggacttgcggaggtccctttatgc

SEQ ID NO: 263940 - DNA, 25 bp, probe
tggaccgggacattgccctgatgaa

SEQ ID NO: 263941 - DNA, 25 bp, probe
tggatcatctacaagattgtccgta

SEQ ID NO: 263942 - DNA, 25 bp, probe
tggatgctctcagcaatatttagta

SEQ ID NO: 263943 - DNA, 25 bp, probe
tggatctcctcagatctttggtttt

SEQ ID NO: 263944 - DNA, 25 bp, probe
tgtatctttagtattcaggttgtga

SEQ ID NO: 263945 - DNA, 25 bp, probe
tgtttattggttggtttttgtgaag

SEQ ID NO: 263946 - DNA, 25 bp, probe
tgttctttggttggtaaggcctaag

SEQ ID NO: 263947 - DNA, 25 bp, probe
tggttttggttttgactcacctgaa

SEQ ID NO: 263948 - DNA, 25 bp, probe
tggttgtagtgggaagtcccgcgaa

SEQ ID NO: 263949 - DNA, 25 bp, probe
tggagtctagtgcagggaccgtggc

SEQ ID NO: 263950 - DNA, 25 bp, probe
tggactctaatgcagggacctgaac

SEQ ID NO: 263951 - DNA, 25 bp, probe
tggactctaatgcagggacctgaac

SEQ ID NO: 263952 - DNA, 25 bp, probe
tggactctaagctggagctcttgga

SEQ ID NO: 263953 - DNA, 25 bp, probe
tggacctggagctggagagcttcaa

SEQ ID NO: 263954 - DNA, 25 bp, probe
tggacctggagcgcatgcaggcttc

SEQ ID NO: 263955 - DNA, 25 bp, probe
tggactgtggggtcaactgcttcat

SEQ ID NO: 263956 - DNA, 25 bp, probe
tggagctcatggtgctcaacgtgcc

SEQ ID NO: 263957 - DNA, 25 bp, probe
tggagcttgtgttctcagaatctga

SEQ ID NO: 263958 - DNA, 25 bp, probe
tggagattgtgttcattgctttcaa

SEQ ID NO: 263959 - DNA, 25 bp, probe
tggagattgtgttcattgctttcaa

SEQ ID NO: 263960 - DNA, 25 bp, probe
tggagacgctgcagcagtgggtgaa

SEQ ID NO: 263961 - DNA, 25 bp, probe
tggagctccatcatcaaatggccaa

SEQ ID NO: 263962 - DNA, 25 bp, probe
tggactcgttctgtagatgagagaa

SEQ ID NO: 263963 - DNA, 25 bp, probe
tgggtcgtcttgtttctagcaaaac

SEQ ID NO: 263964 - DNA, 25 bp, probe
tgggtcgtcttgtttctagcaaaac

SEQ ID NO: 263965 - DNA, 25 bp, probe
tgggtccgccttaatctggaaggcc

SEQ ID NO: 263966 - DNA, 25 bp, probe
tggagtccgcagagcactcggaacc

SEQ ID NO: 263967 - DNA, 25 bp, probe
tggagtcacggaacattggccgccc

SEQ ID NO: 263968 - DNA, 25 bp, probe
tggagtactgtgaactcgggaccct

SEQ ID NO: 263969 - DNA, 25 bp, probe
tggagaaatggatgtctggtacaac

SEQ ID NO: 263970 - DNA, 25 bp, probe
tggagaattggatatctgtcccttc

SEQ ID NO: 263971 - DNA, 25 bp, probe
tggagggggaacttcttgcttctca

SEQ ID NO: 263972 - DNA, 25 bp, probe
tggagggggaacttcttgcttctca

SEQ ID NO: 263973 - DNA, 25 bp, probe
tggagggggactttgtgctcatgtt

SEQ ID NO: 263974 - DNA, 25 bp, probe
tggagggaacctgtttcactatggc

SEQ ID NO: 263975 - DNA, 25 bp, probe
tggaggcgaactctttgaccggatc

SEQ ID NO: 263976 - DNA, 25 bp, probe
tggaggcgaactctttgaccggatc

SEQ ID NO: 263977 - DNA, 25 bp, probe
tggagggaagctgtactgtcccacc

SEQ ID NO: 263978 - DNA, 25 bp, probe
tggagggaagctgtactgtcccacc

SEQ ID NO: 263979 - DNA, 25 bp, probe
tggaggtacaggcagatcttcccta

SEQ ID NO: 263980 - DNA, 25 bp, probe
tggaggtaaggccttctgcatcatc

SEQ ID NO: 263981 - DNA, 25 bp, probe
tggtattcagcaagccaatcctatc

SEQ ID NO: 263982 - DNA, 25 bp, probe
tggtcatgcctgtacataaagcata

SEQ ID NO: 263983 - DNA, 25 bp, probe
tggtcatgcctgtacataaagcata

SEQ ID NO: 263984 - DNA, 25 bp, probe
tggtctctggcattgaagtagatga

SEQ ID NO: 263985 - DNA, 25 bp, probe
tgtggccttgttgaattatgttgtg

SEQ ID NO: 263986 - DNA, 25 bp, probe
tgtgacgtttcgggtttgtttccat

SEQ ID NO: 263987 - DNA, 25 bp, probe
tgtgacgtttcgggtttgtttccat

SEQ ID NO: 263988 - DNA, 25 bp, probe
tgtgacgtttcgggtttgtttccat

SEQ ID NO: 263989 - DNA, 25 bp, probe
tgggtgggattgagtttgttctcct

SEQ ID NO: 263990 - DNA, 25 bp, probe
tggggtggggggagctatttccaag

SEQ ID NO: 263991 - DNA, 25 bp, probe
tggaggtggggacgattggatctat

SEQ ID NO: 263992 - DNA, 25 bp, probe
tggagtctggggtgtgttgtcatag

SEQ ID NO: 263993 - DNA, 25 bp, probe
tggagtttggtggatgacgtgccaa

SEQ ID NO: 263994 - DNA, 25 bp, probe
tggagcttctgagggatgcaggtgg

SEQ ID NO: 263995 - DNA, 25 bp, probe
tggagcttgctcttgggaggtttcc

SEQ ID NO: 263996 - DNA, 25 bp, probe
tggagcattgtctgggtgtttctgc

SEQ ID NO: 263997 - DNA, 25 bp, probe
tggagatgtggaatggggggctgcc

SEQ ID NO: 263998 - DNA, 25 bp, probe
tggagggtatggagtggggcctgat

SEQ ID NO: 263999 - DNA, 25 bp, probe
tggagagtgcggcgtgggggcactg

SEQ ID NO: 264000 - DNA, 25 bp, probe
tggagagtgggagctctgagggcct

SEQ ID NO: 264001 - DNA, 25 bp, probe
tggagctggaggagctcctgcgggc

SEQ ID NO: 264002 - DNA, 25 bp, probe
tggagctggaggagctcctgcgggc

SEQ ID NO: 264003 - DNA, 25 bp, probe
tggagcggggaaaccgcagctcagc

SEQ ID NO: 264004 - DNA, 25 bp, probe
tggagcggggaaaccgcagctcagc

SEQ ID NO: 264005 - DNA, 25 bp, probe
tggagctgggggcagggcagcacag

SEQ ID NO: 264006 - DNA, 25 bp, probe
tggagcgggcaggggcagagagcat

SEQ ID NO: 264007 - DNA, 25 bp, probe
tggagcggggctgacagcaggtgtg

SEQ ID NO: 264008 - DNA, 25 bp, probe
tggatggcatgggcattacgggtgt

SEQ ID NO: 264009 - DNA, 25 bp, probe
tggaggagcccagacaggagtgtgt

SEQ ID NO: 264010 - DNA, 25 bp, probe
tggaggactacgagccggtgtttga

SEQ ID NO: 264011 - DNA, 25 bp, probe
tggagggaaggactggcggttctgg

SEQ ID NO: 264012 - DNA, 25 bp, probe
tggagaggtaaagctggctttcgag

SEQ ID NO: 264013 - DNA, 25 bp, probe
tggagaggagtaactcgtgtcccga

SEQ ID NO: 264014 - DNA, 25 bp, probe
tggagaggagtaactcgtgtcccga

SEQ ID NO: 264015 - DNA, 25 bp, probe
tggagggcagtccctcagaatccca

SEQ ID NO: 264016 - DNA, 25 bp, probe
tggggccagatgagccagcattcca

SEQ ID NO: 264017 - DNA, 25 bp, probe
tggaggcacgtgtggatctcatcga

SEQ ID NO: 264018 - DNA, 25 bp, probe
tggagtacagtggcacgatctcggc

SEQ ID NO: 264019 - DNA, 25 bp, probe
tggaggccaaccagatgctgggcga

SEQ ID NO: 264020 - DNA, 25 bp, probe
tggagtgctaatgtttgagacgatg

SEQ ID NO: 264021 - DNA, 25 bp, probe
tggagctctacagcttcgtgtggtt

SEQ ID NO: 264022 - DNA, 25 bp, probe
tggagtcctattgtcgtgcatgtgg

SEQ ID NO: 264023 - DNA, 25 bp, probe
tggagtctgtccgagtttgcagggt

SEQ ID NO: 264024 - DNA, 25 bp, probe
tggatttgctcggcttttgactgga

SEQ ID NO: 264025 - DNA, 25 bp, probe
tggatcttgctcctctgtgaggaac

SEQ ID NO: 264026 - DNA, 25 bp, probe
tggatttacttctttatcaagcatc

SEQ ID NO: 264027 - DNA, 25 bp, probe
tggagtccactggcgtcttcaccac

SEQ ID NO: 264028 - DNA, 25 bp, probe
tggattgaacgcagactccacacac

SEQ ID NO: 264029 - DNA, 25 bp, probe
tggaggacctggagccagcagcaac

SEQ ID NO: 264030 - DNA, 25 bp, probe
tggagcgtctgcagtactgcactca

SEQ ID NO: 264031 - DNA, 25 bp, probe
tggagctgcaggaggagctgacccc

SEQ ID NO: 264032 - DNA, 25 bp, probe
tggagcaggtgcctggaggaccctc

SEQ ID NO: 264033 - DNA, 25 bp, probe
tggagaggaagaagaccaccccaac

SEQ ID NO: 264034 - DNA, 25 bp, probe
tggagaggatgtaacacgcccccag

SEQ ID NO: 264035 - DNA, 25 bp, probe
tggagaggatggtattcaggctttc

SEQ ID NO: 264036 - DNA, 25 bp, probe
tggagggtacaattgccagctcccc

SEQ ID NO: 264037 - DNA, 25 bp, probe
tggagggtacaattgccagctcccc

SEQ ID NO: 264038 - DNA, 25 bp, probe
tggagggtatctggatcaacccgac

SEQ ID NO: 264039 - DNA, 25 bp, probe
tggttgtgttctatcaaccccacca

SEQ ID NO: 264040 - DNA, 25 bp, probe
tggtgcttttatacaaatacccact

SEQ ID NO: 264041 - DNA, 25 bp, probe
tggtgcttttatacaaatacccact

SEQ ID NO: 264042 - DNA, 25 bp, probe
tggtgggttctgacattattcttcc

SEQ ID NO: 264043 - DNA, 25 bp, probe
tggtcggcttcagagtttccacaga

SEQ ID NO: 264044 - DNA, 25 bp, probe
tggtcacacccatggtgaatcccct

SEQ ID NO: 264045 - DNA, 25 bp, probe
tggtatctccctttaaaccaagtat

SEQ ID NO: 264046 - DNA, 25 bp, probe
tggtccccgtttgtcaaagaggatg

SEQ ID NO: 264047 - DNA, 25 bp, probe
tggtccaccattgtgttaataggga

SEQ ID NO: 264048 - DNA, 25 bp, probe
tggtccccagtgagaaggaagtgga

SEQ ID NO: 264049 - DNA, 25 bp, probe
tgctcccccgtgtgtattagaatgc

SEQ ID NO: 264050 - DNA, 25 bp, probe
tggaccaacggactgatttagaaga

SEQ ID NO: 264051 - DNA, 25 bp, probe
tggatccagggatgctaagtagaaa

SEQ ID NO: 264052 - DNA, 25 bp, probe
tggtcctaggagtcattactaatga

SEQ ID NO: 264053 - DNA, 25 bp, probe
tggtcctaggagtcattactaatga

SEQ ID NO: 264054 - DNA, 25 bp, probe
tggagctttgggtctctactgtatg

SEQ ID NO: 264055 - DNA, 25 bp, probe
tggtcatcagtatgtcctacgtcat

SEQ ID NO: 264056 - DNA, 25 bp, probe
tggttcatggaagccatagagtaca

SEQ ID NO: 264057 - DNA, 25 bp, probe
tggatcaaggacaccatcgcagcca

SEQ ID NO: 264058 - DNA, 25 bp, probe
tggatgacagcagaaccaacacacc

SEQ ID NO: 264059 - DNA, 25 bp, probe
tggatgaactactcctacagcagcc

SEQ ID NO: 264060 - DNA, 25 bp, probe
tggatgaactactcctacagcagcc

SEQ ID NO: 264061 - DNA, 25 bp, probe
tggagaaggattactgtagatgcag

SEQ ID NO: 264062 - DNA, 25 bp, probe
tggagcgagctgtttgtgttgaatg

SEQ ID NO: 264063 - DNA, 25 bp, probe
tggagcgagctgttcgtgctcaacg

SEQ ID NO: 264064 - DNA, 25 bp, probe
tggagcgaggctacaggatgccctg

SEQ ID NO: 264065 - DNA, 25 bp, probe
tggagcgaggctacaggatgccctg

SEQ ID NO: 264066 - DNA, 25 bp, probe
tggagtgagcctcaggggccatgaa

SEQ ID NO: 264067 - DNA, 25 bp, probe
tggagctacacacaggagggatcag

SEQ ID NO: 264068 - DNA, 25 bp, probe
tggatgctccccgaggtgggagcgg

SEQ ID NO: 264069 - DNA, 25 bp, probe
tggaggcctcctgggtatggaccag

SEQ ID NO: 264070 - DNA, 25 bp, probe
tggagggtctttctcaggagcagtt

SEQ ID NO: 264071 - DNA, 25 bp, probe
tggagggtctttaacattgccaaaa

SEQ ID NO: 264072 - DNA, 25 bp, probe
tggagggtctggattattgtcataa

SEQ ID NO: 264073 - DNA, 25 bp, probe
tggagggtgtgggggatattttgtt

SEQ ID NO: 264074 - DNA, 25 bp, probe
tggtgtgtgggagaagttttataat

SEQ ID NO: 264075 - DNA, 25 bp, probe
tgggttgtgaaatactcttccaaaa

SEQ ID NO: 264076 - DNA, 25 bp, probe
tactgggtagtttatctttccaaag

SEQ ID NO: 264077 - DNA, 25 bp, probe
tactgggtagtttatctttccaaag

SEQ ID NO: 264078 - DNA, 25 bp, probe
tttaagtaggcattatttaccagaa

SEQ ID NO: 264079 - DNA, 25 bp, probe
tcaggaagttacttggttcccataa

SEQ ID NO: 264080 - DNA, 25 bp, probe
tggtaagttgccttgtgattccctt

SEQ ID NO: 264081 - DNA, 25 bp, probe
tgtccaactggctctgatacttcca

SEQ ID NO: 264082 - DNA, 25 bp, probe
tgtccaactggctctgatacttcca

SEQ ID NO: 264083 - DNA, 25 bp, probe
tggaccacgagatcgatggctccca

SEQ ID NO: 264084 - DNA, 25 bp, probe
tggaccacgagatcgatggctccca

SEQ ID NO: 264085 - DNA, 25 bp, probe
tggagaggccagtacgacgtggcca

SEQ ID NO: 264086 - DNA, 25 bp, probe
tggagatactcttagagaagaggct

SEQ ID NO: 264087 - DNA, 25 bp, probe
tggtatatgctcatctgagtgacgg

SEQ ID NO: 264088 - DNA, 25 bp, probe
tggtttcatacttgaagacggatat

SEQ ID NO: 264089 - DNA, 25 bp, probe
tggtttcatacttgaagacggatat

SEQ ID NO: 264090 - DNA, 25 bp, probe
tggttttactgaagtatccagttct

SEQ ID NO: 264091 - DNA, 25 bp, probe
tggtttctatgggttaggggtcttg

SEQ ID NO: 264092 - DNA, 25 bp, probe
tggtttctatgggttaggggtcttg

SEQ ID NO: 264093 - DNA, 25 bp, probe
tgaggttccaggggggagtactcca

SEQ ID NO: 264094 - DNA, 25 bp, probe
tggagttatacgggggcagccctct

SEQ ID NO: 264095 - DNA, 25 bp, probe
tggagttatacgggggcagccctct

SEQ ID NO: 264096 - DNA, 25 bp, probe
tggagctgataaccgggctggcggc

SEQ ID NO: 264097 - DNA, 25 bp, probe
tggagctgcaaaatccggtgtaggc

SEQ ID NO: 264098 - DNA, 25 bp, probe
tggatctaacttcccagggggcagg

SEQ ID NO: 264099 - DNA, 25 bp, probe
tggttaatctttcctgatggtacag

SEQ ID NO: 264100 - DNA, 25 bp, probe
tggttaatttttcctgcatgttctg

SEQ ID NO: 264101 - DNA, 25 bp, probe
tggattatgttaaatggccgtcatt

SEQ ID NO: 264102 - DNA, 25 bp, probe
tggtcaattaccgtggcacactttc

SEQ ID NO: 264103 - DNA, 25 bp, probe
tggtcaattaccgtggcacactttc

SEQ ID NO: 264104 - DNA, 25 bp, probe
tggttttaacctgatgctccactgt

SEQ ID NO: 264105 - DNA, 25 bp, probe
tggttttaattatactccatgtgta

SEQ ID NO: 264106 - DNA, 25 bp, probe
tggggttaaaaccatcaccatttga

SEQ ID NO: 264107 - DNA, 25 bp, probe
tggggttctaaatatacaacttgta

SEQ ID NO: 264108 - DNA, 25 bp, probe
tggggtttaaatatccaggtgtgcc

SEQ ID NO: 264109 - DNA, 25 bp, probe
tgttggtttggataaccggttgcac

SEQ ID NO: 264110 - DNA, 25 bp, probe
tttgttttggaatttaccggctgag

SEQ ID NO: 264111 - DNA, 25 bp, probe
tggttttttaatttacttgagagtg

SEQ ID NO: 264112 - DNA, 25 bp, probe
tggtttttacaccttgatttcgagg

SEQ ID NO: 264113 - DNA, 25 bp, probe
tggtgtggcttaacggtatttcaga

SEQ ID NO: 264114 - DNA, 25 bp, probe
tggtggtatattacggaaatacgga

SEQ ID NO: 264115 - DNA, 25 bp, probe
tggttgttattttagacataaacga

SEQ ID NO: 264116 - DNA, 25 bp, probe
tggtctgtttccaggtcagaaacca

SEQ ID NO: 264117 - DNA, 25 bp, probe
tggtcaatttcctctcggagaacaa

SEQ ID NO: 264118 - DNA, 25 bp, probe
tggtttgtgttctccgtggtggaat

SEQ ID NO: 264119 - DNA, 25 bp, probe
tggtaaatgtttccctggctgggcg

SEQ ID NO: 264120 - DNA, 25 bp, probe
tggttgaatgatttcccactcaggg

SEQ ID NO: 264121 - DNA, 25 bp, probe
tgtgttgagaagggccgagtaaagt

SEQ ID NO: 264122 - DNA, 25 bp, probe
tggttgaaacacccgaggttcaatg

SEQ ID NO: 264123 - DNA, 25 bp, probe
tggattgaaatgtccctggtttcta

SEQ ID NO: 264124 - DNA, 25 bp, probe
tggatggaacatgcccacaacttgt

SEQ ID NO: 264125 - DNA, 25 bp, probe
tggatcaggatatccccaagcttca

SEQ ID NO: 264126 - DNA, 25 bp, probe
tggaggggaaccaacaacagcatct

SEQ ID NO: 264127 - DNA, 25 bp, probe
tggagtggagaactctgacagccct

SEQ ID NO: 264128 - DNA, 25 bp, probe
tggagtgtggtgcttaatccgctgg

SEQ ID NO: 264129 - DNA, 25 bp, probe
tggagtgtggtgcttaatccgctgg

SEQ ID NO: 264130 - DNA, 25 bp, probe
tggagttgaatgattattccagata

SEQ ID NO: 264131 - DNA, 25 bp, probe
tgtgtcttggtcttcaatcccagaa

SEQ ID NO: 264132 - DNA, 25 bp, probe
tggatgctctctatttagcggagaa

SEQ ID NO: 264133 - DNA, 25 bp, probe
tggatctctttgactatatcacaga

SEQ ID NO: 264134 - DNA, 25 bp, probe
tggtctccattgcatttcaaaggag

SEQ ID NO: 264135 - DNA, 25 bp, probe
tggtcagcacagcgtttcaaaaagt

SEQ ID NO: 264136 - DNA, 25 bp, probe
tggtacacgcaggtttcccaaaact

SEQ ID NO: 264137 - DNA, 25 bp, probe
tggtacacgcaggtttcccaaaact

SEQ ID NO: 264138 - DNA, 25 bp, probe
tgtgtacaccaaggttaccaactac

SEQ ID NO: 264139 - DNA, 25 bp, probe
tgggaagcccggactgaccaaatca

SEQ ID NO: 264140 - DNA, 25 bp, probe
tgtggatggcacaaagaaaccaaat

SEQ ID NO: 264141 - DNA, 25 bp, probe
tgggctcgcagaaggacgtcctaaa

SEQ ID NO: 264142 - DNA, 25 bp, probe
tggagtatgaaaccctttctaagaa

SEQ ID NO: 264143 - DNA, 25 bp, probe
tgggttacacagctttaccgaccac

SEQ ID NO: 264144 - DNA, 25 bp, probe
tgggttacacagctttaccgaccac

SEQ ID NO: 264145 - DNA, 25 bp, probe
tgggtatcaccgtttttggcaacaa

SEQ ID NO: 264146 - DNA, 25 bp, probe
tgtgtggacactacagattttacat

SEQ ID NO: 264147 - DNA, 25 bp, probe
tgtgtccagcactcgattgttgtaa

SEQ ID NO: 264148 - DNA, 25 bp, probe
tgtgtccagcactcgattgttgtaa

SEQ ID NO: 264149 - DNA, 25 bp, probe
tggatccaactagattgcttttaac

SEQ ID NO: 264150 - DNA, 25 bp, probe
tggagtctacacaaaagttattaac

SEQ ID NO: 264151 - DNA, 25 bp, probe
tggagtctacacaaaagttattaac

SEQ ID NO: 264152 - DNA, 25 bp, probe
tggattccacactgcactgttaata

SEQ ID NO: 264153 - DNA, 25 bp, probe
tggattctgaacacgctggtaaata

SEQ ID NO: 264154 - DNA, 25 bp, probe
tggtactgaaaccctgccattgaat

SEQ ID NO: 264155 - DNA, 25 bp, probe
tggtactgaaaccctgccattgaat

SEQ ID NO: 264156 - DNA, 25 bp, probe
tggatatggagatgggtctgattaa

SEQ ID NO: 264157 - DNA, 25 bp, probe
tggtttgagacctattctgaccaaa

SEQ ID NO: 264158 - DNA, 25 bp, probe
tggatttccaccttgatggcatcag

SEQ ID NO: 264159 - DNA, 25 bp, probe
tggattatctgcactcagagcgcaa

SEQ ID NO: 264160 - DNA, 25 bp, probe
tggattatctgcactcagagcgcaa

SEQ ID NO: 264161 - DNA, 25 bp, probe
tggagacatatagctcagatggaat

SEQ ID NO: 264162 - DNA, 25 bp, probe
tggatgcagtgaaccttgagaaaat

SEQ ID NO: 264163 - DNA, 25 bp, probe
tggaggatgagctgtgtagggagat

SEQ ID NO: 264164 - DNA, 25 bp, probe
tggagcattggctgagagaccagga

SEQ ID NO: 264165 - DNA, 25 bp, probe
tggagcagtacatgggaaaggaggc

SEQ ID NO: 264166 - DNA, 25 bp, probe
tgtgagaactcatcgaaactgggga

SEQ ID NO: 264167 - DNA, 25 bp, probe
tggagctgatccagtaacctcggag

SEQ ID NO: 264168 - DNA, 25 bp, probe
tggagctcttcaaattcaccatcgg

SEQ ID NO: 264169 - DNA, 25 bp, probe
tggagcacttcatgaaccacagcat

SEQ ID NO: 264170 - DNA, 25 bp, probe
tggagtcttcataacgctaagcatt

SEQ ID NO: 264171 - DNA, 25 bp, probe
tggagattatacagacaaagcattt

SEQ ID NO: 264172 - DNA, 25 bp, probe
tggtattgtaccccaaaattctgca

SEQ ID NO: 264173 - DNA, 25 bp, probe
tggagagttactctgcaaagttctc

SEQ ID NO: 264174 - DNA, 25 bp, probe
tgggagtttctggaaaggtactagg

SEQ ID NO: 264175 - DNA, 25 bp, probe
tggaggattgtacatataaatacta

SEQ ID NO: 264176 - DNA, 25 bp, probe
tggaggtggtcggcaatggaaccta

SEQ ID NO: 264177 - DNA, 25 bp, probe
tggaggggcaggacaaaaacctaga

SEQ ID NO: 264178 - DNA, 25 bp, probe
tggagggagcagcctcacacaagca

SEQ ID NO: 264179 - DNA, 25 bp, probe
tggaggtgcgcagtggactcacagc

SEQ ID NO: 264180 - DNA, 25 bp, probe
tggaggtgcgcagtggactcacagc

SEQ ID NO: 264181 - DNA, 25 bp, probe
tggaggtgcgcagtggactcacagc

SEQ ID NO: 264182 - DNA, 25 bp, probe
tggaggtgcgcagtggactcacagc

SEQ ID NO: 264183 - DNA, 25 bp, probe
tggaggtgcgcagtggactcacagc

SEQ ID NO: 264184 - DNA, 25 bp, probe
tggaggatgcctgcgagcatctggc

SEQ ID NO: 264185 - DNA, 25 bp, probe
tggaggatgcctgcgagcatctggc

SEQ ID NO: 264186 - DNA, 25 bp, probe
tggaggaagttctacactcgcctca

SEQ ID NO: 264187 - DNA, 25 bp, probe
tggaggaaggatgtccctgcactga

SEQ ID NO: 264188 - DNA, 25 bp, probe
tggaggacaagaaggccctgcactg

SEQ ID NO: 264189 - DNA, 25 bp, probe
tggagatcagcatgggccacgtagc

SEQ ID NO: 264190 - DNA, 25 bp, probe
tggagacacagtgaacactgcttct

SEQ ID NO: 264191 - DNA, 25 bp, probe
tggagataagatgaatctcttctcc

SEQ ID NO: 264192 - DNA, 25 bp, probe
tggatcccaattcatttcatctact

SEQ ID NO: 264193 - DNA, 25 bp, probe
tggataaacttgcttcagacttttt

SEQ ID NO: 264194 - DNA, 25 bp, probe
tggatattacttatgtctaattttt

SEQ ID NO: 264195 - DNA, 25 bp, probe
tggaggaagctaaatgtataatgtt

SEQ ID NO: 264196 - DNA, 25 bp, probe
tggaggaaggcagctggtatattca

SEQ ID NO: 264197 - DNA, 25 bp, probe
tggaggagaagggcgggctctacat

SEQ ID NO: 264198 - DNA, 25 bp, probe
tggaggagaagggcgggctctacat

SEQ ID NO: 264199 - DNA, 25 bp, probe
tggaggagaagcaggcggcttgcct

SEQ ID NO: 264200 - DNA, 25 bp, probe
tggaggagaagcaggcggcttgcct

SEQ ID NO: 264201 - DNA, 25 bp, probe
tggaggattgtcaccagacctgcaa

SEQ ID NO: 264202 - DNA, 25 bp, probe
tggaggattgtcaccagacctgcaa

SEQ ID NO: 264203 - DNA, 25 bp, probe
tggatctgtttaacgtggctctgca

SEQ ID NO: 264204 - DNA, 25 bp, probe
tggatctgtttaacgtggctctgca

SEQ ID NO: 264205 - DNA, 25 bp, probe
tggatccacagtcacgtgggctcca

SEQ ID NO: 264206 - DNA, 25 bp, probe
tggttacgtcagtcgtgtgcagctc

SEQ ID NO: 264207 - DNA, 25 bp, probe
tggttacgtcagtcgtgtgcagctc

SEQ ID NO: 264208 - DNA, 25 bp, probe
tggtctagtctatgcagtcgagttc

SEQ ID NO: 264209 - DNA, 25 bp, probe
tggtcagattccaaagtcctttctt

SEQ ID NO: 264210 - DNA, 25 bp, probe
tggtcaaatcagaacacttcttcca

SEQ ID NO: 264211 - DNA, 25 bp, probe
tggtaaaatcaagtcctcttgcaag

SEQ ID NO: 264212 - DNA, 25 bp, probe
tggtcaaagtcattgcccacggcaa

SEQ ID NO: 264213 - DNA, 25 bp, probe
tggtcatggcggaggccatcggcat

SEQ ID NO: 264214 - DNA, 25 bp, probe
tggtcatgcctgctgtgggcatgga

SEQ ID NO: 264215 - DNA, 25 bp, probe
tggtcagcagtgccttagacagcaa

SEQ ID NO: 264216 - DNA, 25 bp, probe
tggatcaagctgttatgaacaccag

SEQ ID NO: 264217 - DNA, 25 bp, probe
tggatcaagtttaagtcagtcagtt

SEQ ID NO: 264218 - DNA, 25 bp, probe
tggtaagtggataagattacacaga

SEQ ID NO: 264219 - DNA, 25 bp, probe
tggtcaatcttgactagattaagag

SEQ ID NO: 264220 - DNA, 25 bp, probe
tggataatgcttccgccttccaagg

SEQ ID NO: 264221 - DNA, 25 bp, probe
tggtgacctgtaggccatgttagca

SEQ ID NO: 264222 - DNA, 25 bp, probe
tggatacctctagtgcaatttataa

SEQ ID NO: 264223 - DNA, 25 bp, probe
tggtacagtctacaagtgcattaaa

SEQ ID NO: 264224 - DNA, 25 bp, probe
tggataagattacacagattataca

SEQ ID NO: 264225 - DNA, 25 bp, probe
tggatccaggaacagcaggtcccag

SEQ ID NO: 264226 - DNA, 25 bp, probe
tggtcctggagacagaagttcacca

SEQ ID NO: 264227 - DNA, 25 bp, probe
tggtcctggagacagaagttcacca

SEQ ID NO: 264228 - DNA, 25 bp, probe
tggtactggggtaaatgtgtaccta

SEQ ID NO: 264229 - DNA, 25 bp, probe
tgggcctgggttccagggaaggcta

SEQ ID NO: 264230 - DNA, 25 bp, probe
tggagtcggcgcgcaaagcgaaagc

SEQ ID NO: 264231 - DNA, 25 bp, probe
tggagtgcggagcctcattacgaga

SEQ ID NO: 264232 - DNA, 25 bp, probe
tggagttcacagcctagaagaagaa

SEQ ID NO: 264233 - DNA, 25 bp, probe
tgggtttcggggtgaagcaagttca

SEQ ID NO: 264234 - DNA, 25 bp, probe
tgggtttcggggtgaagcaagttca

SEQ ID NO: 264235 - DNA, 25 bp, probe
tgggttttgggtctaccagagtcag

SEQ ID NO: 264236 - DNA, 25 bp, probe
tgggttttgggtctaccagagtcag

SEQ ID NO: 264237 - DNA, 25 bp, probe
tggtcttttggaatcttactcacag

SEQ ID NO: 264238 - DNA, 25 bp, probe
tggtcttttggaatcttactcacag

SEQ ID NO: 264239 - DNA, 25 bp, probe
acatcttctgggaatggtgagctgg

SEQ ID NO: 264240 - DNA, 25 bp, probe
tggtgccttctgggctactttataa

SEQ ID NO: 264241 - DNA, 25 bp, probe
tggagagttctcggagccatttgta

SEQ ID NO: 264242 - DNA, 25 bp, probe
tggagacctccaaaccagtatctga

SEQ ID NO: 264243 - DNA, 25 bp, probe
tggatgacctcggcaactgcaggtt

SEQ ID NO: 264244 - DNA, 25 bp, probe
tggatgacctcggcaactgcaggtt

SEQ ID NO: 264245 - DNA, 25 bp, probe
tgtgcaagggctggaactggcgtct

SEQ ID NO: 264246 - DNA, 25 bp, probe
tggagaggtctccaagtggcttcag

SEQ ID NO: 264247 - DNA, 25 bp, probe
tggagaggtctccaagtggcttcag

SEQ ID NO: 264248 - DNA, 25 bp, probe
tggagagcgaccctactgggacatg

SEQ ID NO: 264249 - DNA, 25 bp, probe
tggaggggcaccatgtgtgagccgc

SEQ ID NO: 264250 - DNA, 25 bp, probe
tggaggggcaccatgtgtgagccgc

SEQ ID NO: 264251 - DNA, 25 bp, probe
tggtcgggcaagacggtggagtcgt

SEQ ID NO: 264252 - DNA, 25 bp, probe
tggttccgcaagctggcggacttcc

SEQ ID NO: 264253 - DNA, 25 bp, probe
tggttccgcaagctggcggacttcc

SEQ ID NO: 264254 - DNA, 25 bp, probe
tggttcaaatccatgtggtgacatt

SEQ ID NO: 264255 - DNA, 25 bp, probe
tggagataagatccactgcttggac

SEQ ID NO: 264256 - DNA, 25 bp, probe
tggaggagtgagtccctatgctgac

SEQ ID NO: 264257 - DNA, 25 bp, probe
tggagagactggcttctcagctgag

SEQ ID NO: 264258 - DNA, 25 bp, probe
tggagagactggcttctcagctgag

SEQ ID NO: 264259 - DNA, 25 bp, probe
tggagatgacggactgtgatgaggg

SEQ ID NO: 264260 - DNA, 25 bp, probe
tggagaggctgtggctgggatgggc

SEQ ID NO: 264261 - DNA, 25 bp, probe
tggatcaggggacgggatggggtac

SEQ ID NO: 264262 - DNA, 25 bp, probe
tggatagtgggggtgggcggaacgc

SEQ ID NO: 264263 - DNA, 25 bp, probe
tggatgtgtgggccttgggcgtaac

SEQ ID NO: 264264 - DNA, 25 bp, probe
tggatgtgtgggccttgggcgtaac

SEQ ID NO: 264265 - DNA, 25 bp, probe
tggatgactggccagttgagctcag

SEQ ID NO: 264266 - DNA, 25 bp, probe
tggatacccaagaggcatccacacc

SEQ ID NO: 264267 - DNA, 25 bp, probe
tggtgtcccagtaaagccaatgacc

SEQ ID NO: 264268 - DNA, 25 bp, probe
tggtccctaaaacccatctgatgtc

SEQ ID NO: 264269 - DNA, 25 bp, probe
tggtcacctaacactgacacggtct

SEQ ID NO: 264270 - DNA, 25 bp, probe
tggtcacaccaaacagctaactttc

SEQ ID NO: 264271 - DNA, 25 bp, probe
tgtgtatcgtaaccagccagatcct

SEQ ID NO: 264272 - DNA, 25 bp, probe
tggattactacaaccacaacctgga

SEQ ID NO: 264273 - DNA, 25 bp, probe
tggttccaactctcaaacacggagg

SEQ ID NO: 264274 - DNA, 25 bp, probe
tggatttcaaatctaaagcgggaag

SEQ ID NO: 264275 - DNA, 25 bp, probe
tggtttgagggctttaactgggaag

SEQ ID NO: 264276 - DNA, 25 bp, probe
tggttgatttggttttactgtgaaa

SEQ ID NO: 264277 - DNA, 25 bp, probe
tggttattatttttgtcacggaaag

SEQ ID NO: 264278 - DNA, 25 bp, probe
tggttttatctacgttattggaaag

SEQ ID NO: 264279 - DNA, 25 bp, probe
tggttagaatttggctttgggagaa

SEQ ID NO: 264280 - DNA, 25 bp, probe
tggttcggttccttgtgtgggatca

SEQ ID NO: 264281 - DNA, 25 bp, probe
tggttgtgaatgcccttttaggagc

SEQ ID NO: 264282 - DNA, 25 bp, probe
tggtttggatacacttgatgagaga

SEQ ID NO: 264283 - DNA, 25 bp, probe
tggtttggatacacttgatgagaga

SEQ ID NO: 264284 - DNA, 25 bp, probe
tggagttggggcacagcgaggtact

SEQ ID NO: 264285 - DNA, 25 bp, probe
tggagtgtgtgaagtactgcgtggt

SEQ ID NO: 264286 - DNA, 25 bp, probe
tggagtgtgaagctgaccagctcgc

SEQ ID NO: 264287 - DNA, 25 bp, probe
tggagagtgaagcagatctccacac

SEQ ID NO: 264288 - DNA, 25 bp, probe
tggagaggggcatgcacatgcccac

SEQ ID NO: 264289 - DNA, 25 bp, probe
tggagaggtcacggagatgcccgcc

SEQ ID NO: 264290 - DNA, 25 bp, probe
tggagatgtgtgtccgaggctacct

SEQ ID NO: 264291 - DNA, 25 bp, probe
tggagatgtgtgtccaggctacctg

SEQ ID NO: 264292 - DNA, 25 bp, probe
tggagatgctgtaccagtgccaggg

SEQ ID NO: 264293 - DNA, 25 bp, probe
tggatcctgaatccagcaacgcgag

SEQ ID NO: 264294 - DNA, 25 bp, probe
tggatctagcattggcacagacccc

SEQ ID NO: 264295 - DNA, 25 bp, probe
tggatcagattcggacaatcgaccg

SEQ ID NO: 264296 - DNA, 25 bp, probe
tggatccactctggacactcaacaa

SEQ ID NO: 264297 - DNA, 25 bp, probe
tggataagccagccaactgcaccaa

SEQ ID NO: 264298 - DNA, 25 bp, probe
tggagaggccagacaactgcagcga

SEQ ID NO: 264299 - DNA, 25 bp, probe
tggaggagctcttcaagctgctgaa

SEQ ID NO: 264300 - DNA, 25 bp, probe
tggttgagctcagtggagccatgaa

SEQ ID NO: 264301 - DNA, 25 bp, probe
tggtctgaccctgacaaggacgtgc

SEQ ID NO: 264302 - DNA, 25 bp, probe
tggtctgccaggtgaacggtgcctg

SEQ ID NO: 264303 - DNA, 25 bp, probe
tggtctgccaggtgaacggtgcctg

SEQ ID NO: 264304 - DNA, 25 bp, probe
tggatctgccacctagcagacgtgg

SEQ ID NO: 264305 - DNA, 25 bp, probe
tggatctgccacctagcagacgtgg

SEQ ID NO: 264306 - DNA, 25 bp, probe
tggatacccttagtgggatgatgta

SEQ ID NO: 264307 - DNA, 25 bp, probe
tggatttccgtagtattgatgatga

SEQ ID NO: 264308 - DNA, 25 bp, probe
tggatactgccgatctactggctgc

SEQ ID NO: 264309 - DNA, 25 bp, probe
tggataggcagccacattggtcctc

SEQ ID NO: 264310 - DNA, 25 bp, probe
tggaggcgctggacaaggtcctgct

SEQ ID NO: 264311 - DNA, 25 bp, probe
tggaggcgctggacaaggtcctgct

SEQ ID NO: 264312 - DNA, 25 bp, probe
tggatggccgtgaatgggtgcccac

SEQ ID NO: 264313 - DNA, 25 bp, probe
tggataccaatgaggtgacccagga

SEQ ID NO: 264314 - DNA, 25 bp, probe
tggatgtcgcgtcctggtttaagga

SEQ ID NO: 264315 - DNA, 25 bp, probe
tggagggtttcaagacttcagagga

SEQ ID NO: 264316 - DNA, 25 bp, probe
tggggatttgtaagacttagatgag

SEQ ID NO: 264317 - DNA, 25 bp, probe
tggggctccttaaaccagaatggga

SEQ ID NO: 264318 - DNA, 25 bp, probe
tggggtcctagatgccaaaggggtt

SEQ ID NO: 264319 - DNA, 25 bp, probe
tcgtggtactcatggctcacgggag

SEQ ID NO: 264320 - DNA, 25 bp, probe
tcgtggaaaccacactcaaagagac

SEQ ID NO: 264321 - DNA, 25 bp, probe
tggtaaaatcgcacaccaacaccag

SEQ ID NO: 264322 - DNA, 25 bp, probe
tggtaaaatcgcacaccaacaccag

SEQ ID NO: 264323 - DNA, 25 bp, probe
tggtcaaaccagagcacgaaacaac

SEQ ID NO: 264324 - DNA, 25 bp, probe
tggtcaaacaaactctctgaacccc

SEQ ID NO: 264325 - DNA, 25 bp, probe
tggatcaaaagcaaccttgtcccgc

SEQ ID NO: 264326 - DNA, 25 bp, probe
tggaggaaatcctgagagcatctcg

SEQ ID NO: 264327 - DNA, 25 bp, probe
tggaggagtacgtgaggagccagta

SEQ ID NO: 264328 - DNA, 25 bp, probe
tggatggagtcacgaccaggacctt

SEQ ID NO: 264329 - DNA, 25 bp, probe
tggatggatgacatcccagggctgc

SEQ ID NO: 264330 - DNA, 25 bp, probe
tggaggagatcctcacacagctggc

SEQ ID NO: 264331 - DNA, 25 bp, probe
tggaggagttggaccacactgtgag

SEQ ID NO: 264332 - DNA, 25 bp, probe
tggagggcaaggaaggcagcatgga

SEQ ID NO: 264333 - DNA, 25 bp, probe
tggaggacagagctcagtgcctgac

SEQ ID NO: 264334 - DNA, 25 bp, probe
tggatggcgaggacagcgtggtact

SEQ ID NO: 264335 - DNA, 25 bp, probe
tggaggccagggccagggcaatcct

SEQ ID NO: 264336 - DNA, 25 bp, probe
tggaggccagggccagggcaatcct

SEQ ID NO: 264337 - DNA, 25 bp, probe
tggaggccagggccagggcaatcct

SEQ ID NO: 264338 - DNA, 25 bp, probe
tggaggccagggccagggcaatcct

SEQ ID NO: 264339 - DNA, 25 bp, probe
tggaggccgtgtccaaagactttgc

SEQ ID NO: 264340 - DNA, 25 bp, probe
tggaggccgtggccgagatgactgc

SEQ ID NO: 264341 - DNA, 25 bp, probe
tggaggccgtggccgagatgactgc

SEQ ID NO: 264342 - DNA, 25 bp, probe
tggggccttaatgatgatgagctca

SEQ ID NO: 264343 - DNA, 25 bp, probe
tggatggagcttctaatgtcattca

SEQ ID NO: 264344 - DNA, 25 bp, probe
tggaggatctacgtgacgcttctca

SEQ ID NO: 264345 - DNA, 25 bp, probe
tggaggtctgagaatgacgataccc

SEQ ID NO: 264346 - DNA, 25 bp, probe
tggagggccagagtgtgtataccca

SEQ ID NO: 264347 - DNA, 25 bp, probe
tggagtgggagaggtcgggcgccac

SEQ ID NO: 264348 - DNA, 25 bp, probe
tggatgggcgagtcaacgggggcct

SEQ ID NO: 264349 - DNA, 25 bp, probe
tggatggagggtatctggatcaacc

SEQ ID NO: 264350 - DNA, 25 bp, probe
tggaggagtcgtctcaactccatcc

SEQ ID NO: 264351 - DNA, 25 bp, probe
tggagtggtccatgctaagtctaac

SEQ ID NO: 264352 - DNA, 25 bp, probe
tgggtggaccccatagattcaactt

SEQ ID NO: 264353 - DNA, 25 bp, probe
tggggaaaccctacaagtccctcat

SEQ ID NO: 264354 - DNA, 25 bp, probe
tggggaaaccctacaagtccctcat

SEQ ID NO: 264355 - DNA, 25 bp, probe
tgggagctaacctttatcccacctt

SEQ ID NO: 264356 - DNA, 25 bp, probe
tggtgatgtttgcatttaccctcct

SEQ ID NO: 264357 - DNA, 25 bp, probe
tggtgttgggcgagtacgaccgtgc

SEQ ID NO: 264358 - DNA, 25 bp, probe
tggttctggaggaaccgcaagccgg

SEQ ID NO: 264359 - DNA, 25 bp, probe
tggtccgaggagaacccaatgtttc

SEQ ID NO: 264360 - DNA, 25 bp, probe
tggtgccgatgttgaacttttttta

SEQ ID NO: 264361 - DNA, 25 bp, probe
tggatcacaagttgatgacttttcc

SEQ ID NO: 264362 - DNA, 25 bp, probe
tggagggcatgttcagagcttttca

SEQ ID NO: 264363 - DNA, 25 bp, probe
tggaggcagcattaacagttctaca

SEQ ID NO: 264364 - DNA, 25 bp, probe
tggagtcagaagaccaggctacaag

SEQ ID NO: 264365 - DNA, 25 bp, probe
tggagtctgaacatcagtaccaagg

SEQ ID NO: 264366 - DNA, 25 bp, probe
tggtgcatttacagctgttaaagtg

SEQ ID NO: 264367 - DNA, 25 bp, probe
tggtgcatttacagctgttaaagtg

SEQ ID NO: 264368 - DNA, 25 bp, probe
tggtgcacttaaactgtacttcagg

SEQ ID NO: 264369 - DNA, 25 bp, probe
tggtctttgaagggtggcttgccgg

SEQ ID NO: 264370 - DNA, 25 bp, probe
tggtctttgggttggaggctccagg

SEQ ID NO: 264371 - DNA, 25 bp, probe
tggtctttgggttggaggctccagg

SEQ ID NO: 264372 - DNA, 25 bp, probe
tggtactatgaggtcggggcattac

SEQ ID NO: 264373 - DNA, 25 bp, probe
tggtagctgaggggcggaagatgaa

SEQ ID NO: 264374 - DNA, 25 bp, probe
tggagtgtgagagaggagcaggtga

SEQ ID NO: 264375 - DNA, 25 bp, probe
tggagtgctggaggagcagccccga

SEQ ID NO: 264376 - DNA, 25 bp, probe
tggagtgctggaggagcagccccga

SEQ ID NO: 264377 - DNA, 25 bp, probe
tggagtgtggaggcagcagcggcac

SEQ ID NO: 264378 - DNA, 25 bp, probe
tggagtgtgcagacagccatgcgtg

SEQ ID NO: 264379 - DNA, 25 bp, probe
tggagtgtgcagacagccatgcgtg

SEQ ID NO: 264380 - DNA, 25 bp, probe
tggagtgtcagcagctatagtgaag

SEQ ID NO: 264381 - DNA, 25 bp, probe
tggagtgctccatgaatgaggacca

SEQ ID NO: 264382 - DNA, 25 bp, probe
tggagtccagtctaagcagagagac

SEQ ID NO: 264383 - DNA, 25 bp, probe
tggatgtccccttcaacaaggtcat

SEQ ID NO: 264384 - DNA, 25 bp, probe
tggttcctacttaaatgatttcata

SEQ ID NO: 264385 - DNA, 25 bp, probe
tggtcccatactaccctagggcaaa

SEQ ID NO: 264386 - DNA, 25 bp, probe
tggtcggcaatggaacctacggaca

SEQ ID NO: 264387 - DNA, 25 bp, probe
tggatcaggaaggtcaccggccgat

SEQ ID NO: 264388 - DNA, 25 bp, probe
tggtgcaggagagtttcagggacaa

SEQ ID NO: 264389 - DNA, 25 bp, probe
tggtcatgcagctctttcaggacca

SEQ ID NO: 264390 - DNA, 25 bp, probe
tggtaagcgttaacagctcccactg

SEQ ID NO: 264391 - DNA, 25 bp, probe
tgggaaggtagagccccagactctg

SEQ ID NO: 264392 - DNA, 25 bp, probe
tgggaaactttttccggagcctgtg

SEQ ID NO: 264393 - DNA, 25 bp, probe
tggtgacacggtactaccgggcgcc

SEQ ID NO: 264394 - DNA, 25 bp, probe
tggtggactacatctaccaaggccc

SEQ ID NO: 264395 - DNA, 25 bp, probe
tggaggactacatcaacgaccgcca

SEQ ID NO: 264396 - DNA, 25 bp, probe
tggagtgggacagaagtcacggccc

SEQ ID NO: 264397 - DNA, 25 bp, probe
tggagggcaggatagagccaccgcc

SEQ ID NO: 264398 - DNA, 25 bp, probe
tggagggcaggatagagccaccgcc

SEQ ID NO: 264399 - DNA, 25 bp, probe
tggaggcagacagactgcaccaccc

SEQ ID NO: 264400 - DNA, 25 bp, probe
tggaggcaaacatgctggagccccc

SEQ ID NO: 264401 - DNA, 25 bp, probe
tggaggcaaacatgctggagccccc

SEQ ID NO: 264402 - DNA, 25 bp, probe
tggtagcaactgtgcatggcagccc

SEQ ID NO: 264403 - DNA, 25 bp, probe
tggttcagcaagagaggcagaccca

SEQ ID NO: 264404 - DNA, 25 bp, probe
tggtatcagggaagagggctcacaa

SEQ ID NO: 264405 - DNA, 25 bp, probe
tggtatcagggaagagggctcacaa

SEQ ID NO: 264406 - DNA, 25 bp, probe
tggtcacagcgacccaggatgctga

SEQ ID NO: 264407 - DNA, 25 bp, probe
tggatgcatcatcatacagaggtga

SEQ ID NO: 264408 - DNA, 25 bp, probe
tggatcatgtgcttgagcagactgt

SEQ ID NO: 264409 - DNA, 25 bp, probe
tggtcagtcacaagaacttcaacct

SEQ ID NO: 264410 - DNA, 25 bp, probe
tggtcagtcacaagaacttcaacct

SEQ ID NO: 264411 - DNA, 25 bp, probe
tggtaatcacagcattgctctcgac

SEQ ID NO: 264412 - DNA, 25 bp, probe
tggataccaggccatgtgccatggt

SEQ ID NO: 264413 - DNA, 25 bp, probe
tggtcatcacagccgcatacgtgag

SEQ ID NO: 264414 - DNA, 25 bp, probe
tggtcatcaagcacaaccggttcac

SEQ ID NO: 264415 - DNA, 25 bp, probe
tggtcaaacttcatgcggtggtcac

SEQ ID NO: 264416 - DNA, 25 bp, probe
tgggccaagcccagaagtggtccgc

SEQ ID NO: 264417 - DNA, 25 bp, probe
tggtggaacccagaaacggacgccg

SEQ ID NO: 264418 - DNA, 25 bp, probe
tggaggcagcactcaccaaacagga

SEQ ID NO: 264419 - DNA, 25 bp, probe
tggaggaagtggtgcaagagaggac

SEQ ID NO: 264420 - DNA, 25 bp, probe
tggaggagaggcggagccagcaggg

SEQ ID NO: 264421 - DNA, 25 bp, probe
tggatggggctcgagaggcagccgg

SEQ ID NO: 264422 - DNA, 25 bp, probe
tggatggggctcgagaggcagccgg

SEQ ID NO: 264423 - DNA, 25 bp, probe
tggagtgggcatcacagccagggtg

SEQ ID NO: 264424 - DNA, 25 bp, probe
tggaggggatgcgactgtagggtgg

SEQ ID NO: 264425 - DNA, 25 bp, probe
tggaggggatgcgactgtagggtgg

SEQ ID NO: 264426 - DNA, 25 bp, probe
tggagggctggagcttcagcgaggg

SEQ ID NO: 264427 - DNA, 25 bp, probe
tggggacgaagcgtatcagcgtaag

SEQ ID NO: 264428 - DNA, 25 bp, probe
tggaggacaatcagtatgtggtaca

SEQ ID NO: 264429 - DNA, 25 bp, probe
tggagggaagccttttggctataac

SEQ ID NO: 264430 - DNA, 25 bp, probe
tggaggtgggacctcctgcggaaga

SEQ ID NO: 264431 - DNA, 25 bp, probe
tggaggagctgggggatcctgggag

SEQ ID NO: 264432 - DNA, 25 bp, probe
tggaggaggagcaggggcgtggagg

SEQ ID NO: 264433 - DNA, 25 bp, probe
tggaggaggagcaggggcgtggagg

SEQ ID NO: 264434 - DNA, 25 bp, probe
tggaggaggtgacgctgttggtgga

SEQ ID NO: 264435 - DNA, 25 bp, probe
tggaggaggtgacgctgttggtgga

SEQ ID NO: 264436 - DNA, 25 bp, probe
tggaggcggtgccagtctagagctt

SEQ ID NO: 264437 - DNA, 25 bp, probe
tggaggagtcggctctgagagctct

SEQ ID NO: 264438 - DNA, 25 bp, probe
tggaggaacgtggctatgagaaccc

SEQ ID NO: 264439 - DNA, 25 bp, probe
tggaggagacacggtgggctacacc

SEQ ID NO: 264440 - DNA, 25 bp, probe
tggttgcagccacaggggcaacacc

SEQ ID NO: 264441 - DNA, 25 bp, probe
tggttctgcagacaccaagccaacc

SEQ ID NO: 264442 - DNA, 25 bp, probe
tggttctcagacccgacattaacct

SEQ ID NO: 264443 - DNA, 25 bp, probe
tggtcctcagaaccctgaatgcaac

SEQ ID NO: 264444 - DNA, 25 bp, probe
tgggtggcaattccagcttagcaac

SEQ ID NO: 264445 - DNA, 25 bp, probe
tggaggaatcttggcgttcagcaga

SEQ ID NO: 264446 - DNA, 25 bp, probe
tggaggatgtgcggctcgtacacag

SEQ ID NO: 264447 - DNA, 25 bp, probe
tggaggcagccagggcttacctgta

SEQ ID NO: 264448 - DNA, 25 bp, probe
tggaggcaacatgagttccctggtt

SEQ ID NO: 264449 - DNA, 25 bp, probe
tggggaacccttacctaagtatgtg

SEQ ID NO: 264450 - DNA, 25 bp, probe
tggatgggaccagaacttaacattt

SEQ ID NO: 264451 - DNA, 25 bp, probe
tggtgaagtccagcagccgtaaggt

SEQ ID NO: 264452 - DNA, 25 bp, probe
tggtgaagtccagcagccgtaaggt

SEQ ID NO: 264453 - DNA, 25 bp, probe
tggtaactgcgagagcttgctgagg

SEQ ID NO: 264454 - DNA, 25 bp, probe
tggatgacatccggaaaattgagcg

SEQ ID NO: 264455 - DNA, 25 bp, probe
tggatgcctcctgaaagcatcatgt

SEQ ID NO: 264456 - DNA, 25 bp, probe
tggatggctcttgaaagtctggtta

SEQ ID NO: 264457 - DNA, 25 bp, probe
tgtgagtgcgtatgaaagtgtgtgt

SEQ ID NO: 264458 - DNA, 25 bp, probe
tggatggcttcatgatgtacctgtt

SEQ ID NO: 264459 - DNA, 25 bp, probe
tggaggcatcaaaggctgcatccgt

SEQ ID NO: 264460 - DNA, 25 bp, probe
tggatgacactgacaggcacagccc

SEQ ID NO: 264461 - DNA, 25 bp, probe
tggatgacactgacaggcacagccc

SEQ ID NO: 264462 - DNA, 25 bp, probe
tggatgtctgtgagagccatgccca

SEQ ID NO: 264463 - DNA, 25 bp, probe
tggaggtgcatttgacctgctctca

SEQ ID NO: 264464 - DNA, 25 bp, probe
tggaggagatgccaaccgttcaaca

SEQ ID NO: 264465 - DNA, 25 bp, probe
tgggcggtgaaacttttccagatga

SEQ ID NO: 264466 - DNA, 25 bp, probe
tggtgggtgtagttttaccgtgaga

SEQ ID NO: 264467 - DNA, 25 bp, probe
tggggtgtgtgaattcctaccccga

SEQ ID NO: 264468 - DNA, 25 bp, probe
tggaggatgtctcctctttgaaccc

SEQ ID NO: 264469 - DNA, 25 bp, probe
tggaggttgctgacctgtgcgattg

SEQ ID NO: 264470 - DNA, 25 bp, probe
tggatgaaagccacatgtctgtgtg

SEQ ID NO: 264471 - DNA, 25 bp, probe
tggatgagaagcctcgggctgcagg

SEQ ID NO: 264472 - DNA, 25 bp, probe
tggatggagagcgtgcagtgccgcc

SEQ ID NO: 264473 - DNA, 25 bp, probe
tggatggagagcgtgcagtgccgcc

SEQ ID NO: 264474 - DNA, 25 bp, probe
tggatgtggcagctgattccatgtc

SEQ ID NO: 264475 - DNA, 25 bp, probe
tggatgagccagagtcccatttctc

SEQ ID NO: 264476 - DNA, 25 bp, probe
tggatgagacaggcctgaccattct

SEQ ID NO: 264477 - DNA, 25 bp, probe
tggatgcagacgccctgtacaatca

SEQ ID NO: 264478 - DNA, 25 bp, probe
tggtagcaccacttctgatgagatt

SEQ ID NO: 264479 - DNA, 25 bp, probe
tggatggccatcgagtcactgaatt

SEQ ID NO: 264480 - DNA, 25 bp, probe
tggaggtcacgattctgtcattttg

SEQ ID NO: 264481 - DNA, 25 bp, probe
tggatggtattgtagcatgtattgt

SEQ ID NO: 264482 - DNA, 25 bp, probe
tggtcgtattgggcgcctggtcacc

SEQ ID NO: 264483 - DNA, 25 bp, probe
tggatatttattgacctcgtcctcc

SEQ ID NO: 264484 - DNA, 25 bp, probe
tggatatttattgacctcgtcctcc

SEQ ID NO: 264485 - DNA, 25 bp, probe
tggtttggagctgatcgcttctccc

SEQ ID NO: 264486 - DNA, 25 bp, probe
tgttttggactctctgtggtccctt

SEQ ID NO: 264487 - DNA, 25 bp, probe
tggtagatggactggttgtggccct

SEQ ID NO: 264488 - DNA, 25 bp, probe
tggtagatggactggttgtggccct

SEQ ID NO: 264489 - DNA, 25 bp, probe
tgtgtaaggagaacgtcttccccgg

SEQ ID NO: 264490 - DNA, 25 bp, probe
tcgttaccagagatttacccatcgg

SEQ ID NO: 264491 - DNA, 25 bp, probe
tggattccaaacattttcgacagtg

SEQ ID NO: 264492 - DNA, 25 bp, probe
tggttattctacatttctagaaagt

SEQ ID NO: 264493 - DNA, 25 bp, probe
tggtgttcctaccttggtcaagaaa

SEQ ID NO: 264494 - DNA, 25 bp, probe
tggtgcccctagctttatatatgga

SEQ ID NO: 264495 - DNA, 25 bp, probe
tggtctgtccaagattatggatgat

SEQ ID NO: 264496 - DNA, 25 bp, probe
tggttccggggagtatgtgatgata

SEQ ID NO: 264497 - DNA, 25 bp, probe
tggttactggagctctagctgccta

SEQ ID NO: 264498 - DNA, 25 bp, probe
tggttactggagctctagctgccta

SEQ ID NO: 264499 - DNA, 25 bp, probe
tggtctatgccagaggctgaccctg

SEQ ID NO: 264500 - DNA, 25 bp, probe
tggtttctcaggtactgatcccttc

SEQ ID NO: 264501 - DNA, 25 bp, probe
tggtttctcaggtactgatcccttc

SEQ ID NO: 264502 - DNA, 25 bp, probe
tggttttcggaactgaggccatgat

SEQ ID NO: 264503 - DNA, 25 bp, probe
tggtctactctatcacaaggccagt

SEQ ID NO: 264504 - DNA, 25 bp, probe
tggtcacctcacaagccaatgtaca

SEQ ID NO: 264505 - DNA, 25 bp, probe
tggtcaacgccatgcaccagaaatt

SEQ ID NO: 264506 - DNA, 25 bp, probe
tggtcagaccgctcaccaagaacaa

SEQ ID NO: 264507 - DNA, 25 bp, probe
tggtcagaccgctcaccaagaacaa

SEQ ID NO: 264508 - DNA, 25 bp, probe
tggtcagcgccctggacaagatgat

SEQ ID NO: 264509 - DNA, 25 bp, probe
tggtcagtgcccagagacaagtgaa

SEQ ID NO: 264510 - DNA, 25 bp, probe
tagtagtgccagaggcaccctgaca

SEQ ID NO: 264511 - DNA, 25 bp, probe
tggtgaggccctgggcctccagagc

SEQ ID NO: 264512 - DNA, 25 bp, probe
tggtcgggacttctctcatgatgac

SEQ ID NO: 264513 - DNA, 25 bp, probe
tggtcaggtgccatgtgctgtatta

SEQ ID NO: 264514 - DNA, 25 bp, probe
tggatcctatgtctgtgctgttagc

SEQ ID NO: 264515 - DNA, 25 bp, probe
tggatcctcagtagtgtctttgcag

SEQ ID NO: 264516 - DNA, 25 bp, probe
tggtatatcgtcattccatctgcag

SEQ ID NO: 264517 - DNA, 25 bp, probe
tggtattcaggctttctcatgtcct

SEQ ID NO: 264518 - DNA, 25 bp, probe
tggtattcaggctttctcatgtcct

SEQ ID NO: 264519 - DNA, 25 bp, probe
tggttccatggagttctgatctttg

SEQ ID NO: 264520 - DNA, 25 bp, probe
tggttccatggagttctgatctttg

SEQ ID NO: 264521 - DNA, 25 bp, probe
tggttcctggcttgtagtgtgcctg

SEQ ID NO: 264522 - DNA, 25 bp, probe
tggtttattgccgtgtgctatgcct

SEQ ID NO: 264523 - DNA, 25 bp, probe
tggtttattgccgtgtgctatgcct

SEQ ID NO: 264524 - DNA, 25 bp, probe
tggtttctagacttgtgctgatcgt

SEQ ID NO: 264525 - DNA, 25 bp, probe
tggttcctgtgatgagcctgatttt

SEQ ID NO: 264526 - DNA, 25 bp, probe
tggattccttatgcagtggtgtctg

SEQ ID NO: 264527 - DNA, 25 bp, probe
tggattccttatgcagtggtgtctg

SEQ ID NO: 264528 - DNA, 25 bp, probe
tggttcctcttgtcaaggtttggga

SEQ ID NO: 264529 - DNA, 25 bp, probe
tgggtgcccttgtcattgaggttag

SEQ ID NO: 264530 - DNA, 25 bp, probe
tgtgacctcgttcactgggtgtagt

SEQ ID NO: 264531 - DNA, 25 bp, probe
tgggcacacgttcacattgcggtga

SEQ ID NO: 264532 - DNA, 25 bp, probe
gagtggtggaaactgggacaatatt

SEQ ID NO: 264533 - DNA, 25 bp, probe
tggaggacgttggagactgggagca

SEQ ID NO: 264534 - DNA, 25 bp, probe
tggggaaggtaaagcggcgacggcg

SEQ ID NO: 264535 - DNA, 25 bp, probe
tggggaaggtaaagcggcgacggcg

SEQ ID NO: 264536 - DNA, 25 bp, probe
tggggaagtgtcttacccaaggtca

SEQ ID NO: 264537 - DNA, 25 bp, probe
tgttcgtacttacacccatgaggtg

SEQ ID NO: 264538 - DNA, 25 bp, probe
tggttttcttgagacctcagatgtg

SEQ ID NO: 264539 - DNA, 25 bp, probe
tggttctctcaaaataaccagtggc

SEQ ID NO: 264540 - DNA, 25 bp, probe
tgtgatttttaagaacctgctggca

SEQ ID NO: 264541 - DNA, 25 bp, probe
tgggattcttaagtgaacctttcta

SEQ ID NO: 264542 - DNA, 25 bp, probe
tgtggtttttgccataacctttaat

SEQ ID NO: 264543 - DNA, 25 bp, probe
tggggtgtttgacatccacttgtaa

SEQ ID NO: 264544 - DNA, 25 bp, probe
tgtggggatttgcttgtatgtatta

SEQ ID NO: 264545 - DNA, 25 bp, probe
tgtggggatttgcttgtatgtatta

SEQ ID NO: 264546 - DNA, 25 bp, probe
tggggtgtacctgtttatctgttaa

SEQ ID NO: 264547 - DNA, 25 bp, probe
tggggtggttatgtttccatggtta

SEQ ID NO: 264548 - DNA, 25 bp, probe
tggtttccttgtttcttcacaattt

SEQ ID NO: 264549 - DNA, 25 bp, probe
tggtgttactggtttcttacattgc

SEQ ID NO: 264550 - DNA, 25 bp, probe
tggtgttccacgtgttttattcctg

SEQ ID NO: 264551 - DNA, 25 bp, probe
tggtttcatggccggttttatcagc

SEQ ID NO: 264552 - DNA, 25 bp, probe
tggtattcaggtaactcatttacag

SEQ ID NO: 264553 - DNA, 25 bp, probe
tgtgttggagggaacctgtttcact

SEQ ID NO: 264554 - DNA, 25 bp, probe
tgtgctttggggaccggtattatcg

SEQ ID NO: 264555 - DNA, 25 bp, probe
tgtgtagagggggcgggtagttttg

SEQ ID NO: 264556 - DNA, 25 bp, probe
tgggagggggttggttagctttgca

SEQ ID NO: 264557 - DNA, 25 bp, probe
tgtgggtggttgtgttccagtttca

SEQ ID NO: 264558 - DNA, 25 bp, probe
tggtttgaattgtgtgcttaccttc

SEQ ID NO: 264559 - DNA, 25 bp, probe
tggattggctacttttgcttcactt

SEQ ID NO: 264560 - DNA, 25 bp, probe
tggtatatgcttgcttatcttaatt

SEQ ID NO: 264561 - DNA, 25 bp, probe
tggtttggtacagttcataattcac

SEQ ID NO: 264562 - DNA, 25 bp, probe
tggtttggtacagttcataattcac

SEQ ID NO: 264563 - DNA, 25 bp, probe
tgggcctggatgagttcaacttcat

SEQ ID NO: 264564 - DNA, 25 bp, probe
tggttcagctatacagttaatttat

SEQ ID NO: 264565 - DNA, 25 bp, probe
tggtacctgttgtcttaatgcattt

SEQ ID NO: 264566 - DNA, 25 bp, probe
tggttctcttcgtcatgatcaacaa

SEQ ID NO: 264567 - DNA, 25 bp, probe
tgggctccttagtcagatgcctaaa

SEQ ID NO: 264568 - DNA, 25 bp, probe
tggatgacctcatggagtcctcata

SEQ ID NO: 264569 - DNA, 25 bp, probe
tggtcacaataaagagtctccaaat

SEQ ID NO: 264570 - DNA, 25 bp, probe
tggtcaaactttttccagcaaaatg

SEQ ID NO: 264571 - DNA, 25 bp, probe
tggtcactactttagagccactcaa

SEQ ID NO: 264572 - DNA, 25 bp, probe
tggtcttggcttcatggcaaccact

SEQ ID NO: 264573 - DNA, 25 bp, probe
tggtcctttgcaagagcgcagacca

SEQ ID NO: 264574 - DNA, 25 bp, probe
tggatcactgggggcactgagaacc

SEQ ID NO: 264575 - DNA, 25 bp, probe
tggatctctggagccttggagttct

SEQ ID NO: 264576 - DNA, 25 bp, probe
tggatctgctgggtcaattccttct

SEQ ID NO: 264577 - DNA, 25 bp, probe
tggatctgctgggtcaattccttct

SEQ ID NO: 264578 - DNA, 25 bp, probe
tggatctgctgggtcaattccttct

SEQ ID NO: 264579 - DNA, 25 bp, probe
tggatctgctgggtcaattccttct

SEQ ID NO: 264580 - DNA, 25 bp, probe
tggatctgctgggtcaattccttct

SEQ ID NO: 264581 - DNA, 25 bp, probe
tggatctgctgggtcaattccttct

SEQ ID NO: 264582 - DNA, 25 bp, probe
tggatccagtggttgttacattctg

SEQ ID NO: 264583 - DNA, 25 bp, probe
tggtctgtgggccatttaacctgga

SEQ ID NO: 264584 - DNA, 25 bp, probe
tggtttgggaacttcatcagcctgg

SEQ ID NO: 264585 - DNA, 25 bp, probe
tggtttgtggattccctcaaccaga

SEQ ID NO: 264586 - DNA, 25 bp, probe
tggtttgggtgttccttccaagaag

SEQ ID NO: 264587 - DNA, 25 bp, probe
tggttgtgtgggaaacttccctggg

SEQ ID NO: 264588 - DNA, 25 bp, probe
tggttgctgtggttggaattcttct

SEQ ID NO: 264589 - DNA, 25 bp, probe
tggttttgggtgtacagtcttgtgt

SEQ ID NO: 264590 - DNA, 25 bp, probe
tggttttaggtgtgcatcgctgtgt

SEQ ID NO: 264591 - DNA, 25 bp, probe
tggatgttcggggtgacactgtggg

SEQ ID NO: 264592 - DNA, 25 bp, probe
tggtcttctgttttgaagctcatgg

SEQ ID NO: 264593 - DNA, 25 bp, probe
tggtcgtcttcaaggacctgagcgg

SEQ ID NO: 264594 - DNA, 25 bp, probe
tggttgtgtaaaaccctgcggctga

SEQ ID NO: 264595 - DNA, 25 bp, probe
tggtagtgcttattcaccactgctg

SEQ ID NO: 264596 - DNA, 25 bp, probe
tggatgatttctacacagccacgga

SEQ ID NO: 264597 - DNA, 25 bp, probe
tggatgatttctacacagccacgga

SEQ ID NO: 264598 - DNA, 25 bp, probe
tggatgaagttggacagcaggtgga

SEQ ID NO: 264599 - DNA, 25 bp, probe
tggatgtaaatggaacttctgcaag

SEQ ID NO: 264600 - DNA, 25 bp, probe
tggttagctatgcaaagtcatgaga

SEQ ID NO: 264601 - DNA, 25 bp, probe
tggtaatgtcatgtaaatgctgata

SEQ ID NO: 264602 - DNA, 25 bp, probe
tggtttgtcatggagttctgtgaag

SEQ ID NO: 264603 - DNA, 25 bp, probe
tggttttgcccggatcattggagag

SEQ ID NO: 264604 - DNA, 25 bp, probe
tggtttatctgcatggtattggaat

SEQ ID NO: 264605 - DNA, 25 bp, probe
tggtttctctgatggttctgggcag

SEQ ID NO: 264606 - DNA, 25 bp, probe
tggtctccttgatgcttttggacat

SEQ ID NO: 264607 - DNA, 25 bp, probe
tggtaactgctttgcttcttgagta

SEQ ID NO: 264608 - DNA, 25 bp, probe
tggtaatgctaatctttccagtttc

SEQ ID NO: 264609 - DNA, 25 bp, probe
tggatgaactacttcttgtgccgtg

SEQ ID NO: 264610 - DNA, 25 bp, probe
tggatgcggtggtgcattgtgggcc

SEQ ID NO: 264611 - DNA, 25 bp, probe
tggatcagggtggatcatgtgcttg

SEQ ID NO: 264612 - DNA, 25 bp, probe
tggatcaggtctaccattgcttgtt

SEQ ID NO: 264613 - DNA, 25 bp, probe
tggtcagctgggtctattttgtggg

SEQ ID NO: 264614 - DNA, 25 bp, probe
tggtcagctgggtctattttgtggg

SEQ ID NO: 264615 - DNA, 25 bp, probe
tggtcatcttgtggcttagttgtag

SEQ ID NO: 264616 - DNA, 25 bp, probe
tggtttggttttattctcagagcca

SEQ ID NO: 264617 - DNA, 25 bp, probe
tggtttggaatgcttcttctcaggc

SEQ ID NO: 264618 - DNA, 25 bp, probe
tggattgtagaacttctctctctgc

SEQ ID NO: 264619 - DNA, 25 bp, probe
tggattctagcatttctacttgcct

SEQ ID NO: 264620 - DNA, 25 bp, probe
tggattcatcagcatttggaccaat

SEQ ID NO: 264621 - DNA, 25 bp, probe
tggtcatatctgcaccgagttccat

SEQ ID NO: 264622 - DNA, 25 bp, probe
tggtcatcatggaatgttgtttgcc

SEQ ID NO: 264623 - DNA, 25 bp, probe
tggtatgcatttttatgttagctgt

SEQ ID NO: 264624 - DNA, 25 bp, probe
tggtgctgattttccttatcagcta

SEQ ID NO: 264625 - DNA, 25 bp, probe
tggggattaccatgtccagatactg

SEQ ID NO: 264626 - DNA, 25 bp, probe
tggggcagtatctggtcctgtgccc

SEQ ID NO: 264627 - DNA, 25 bp, probe
tggggacttctcaggtcgtgtcccc

SEQ ID NO: 264628 - DNA, 25 bp, probe
tggggatttgagggctttcttctcc

SEQ ID NO: 264629 - DNA, 25 bp, probe
tggtcttttaagtctgttttgctct

SEQ ID NO: 264630 - DNA, 25 bp, probe
tggttttggaaggtttgcgtgctct

SEQ ID NO: 264631 - DNA, 25 bp, probe
tggttttgctggatgtttggtctga

SEQ ID NO: 264632 - DNA, 25 bp, probe
tggattttgccggctggttgtgtaa

SEQ ID NO: 264633 - DNA, 25 bp, probe
tggattttgccggctggttgtgtaa

SEQ ID NO: 264634 - DNA, 25 bp, probe
tggtttgtgctctactggttgagcc

SEQ ID NO: 264635 - DNA, 25 bp, probe
tggtcttgttcataggggagccttt

SEQ ID NO: 264636 - DNA, 25 bp, probe
tggatagtttctttgcggggtgtgt

SEQ ID NO: 264637 - DNA, 25 bp, probe
tggttggttatattctggggcttgg

SEQ ID NO: 264638 - DNA, 25 bp, probe
tggggtggtaaatcaggtgcctggt

SEQ ID NO: 264639 - DNA, 25 bp, probe
tggataggggaacagcaggcagggc

SEQ ID NO: 264640 - DNA, 25 bp, probe
tggttgaggcgcggaagctggaggc

SEQ ID NO: 264641 - DNA, 25 bp, probe
tggtcgggcagccgcacactatgag

SEQ ID NO: 264642 - DNA, 25 bp, probe
tggtggcggaggaagcagctagttc

SEQ ID NO: 264643 - DNA, 25 bp, probe
tggttcaagggcaggtagctgatgc

SEQ ID NO: 264644 - DNA, 25 bp, probe
tgtggtaaggacaggtggaagtgtg

SEQ ID NO: 264645 - DNA, 25 bp, probe
tgtgtgtagagggggcgggtagttt

SEQ ID NO: 264646 - DNA, 25 bp, probe
tgtgtgtgacgtttcgggtttgttt

SEQ ID NO: 264647 - DNA, 25 bp, probe
tggtgtgtcactggtcaacctttgt

SEQ ID NO: 264648 - DNA, 25 bp, probe
tggttgctatatgttccgaattgat

SEQ ID NO: 264649 - DNA, 25 bp, probe
tggggattacagctgtcatgaattt

SEQ ID NO: 264650 - DNA, 25 bp, probe
tgtggggtacatcatttctataatt

SEQ ID NO: 264651 - DNA, 25 bp, probe
tgtggggtacatcatttctataatt

SEQ ID NO: 264652 - DNA, 25 bp, probe
tgagggttcgatccaattttagggg

SEQ ID NO: 264653 - DNA, 25 bp, probe
tggggtgtctgtgttatttgtgggg

SEQ ID NO: 264654 - DNA, 25 bp, probe
tggggatacttctaaattttgggag

SEQ ID NO: 264655 - DNA, 25 bp, probe
tggggacgttcctaaacactgaggg

SEQ ID NO: 264656 - DNA, 25 bp, probe
tggggaaggcccttacgaaatggtg

SEQ ID NO: 264657 - DNA, 25 bp, probe
tggggaaagccaggatggcccgagg

SEQ ID NO: 264658 - DNA, 25 bp, probe
tggttctaagccaggagccgagatg

SEQ ID NO: 264659 - DNA, 25 bp, probe
tggatttaaccctgtgtgggaagaa

SEQ ID NO: 264660 - DNA, 25 bp, probe
tggtttcaacccatggtgggacacg

SEQ ID NO: 264661 - DNA, 25 bp, probe
tggtttgcacatttcaggggggtca

SEQ ID NO: 264662 - DNA, 25 bp, probe
tggatttctatgttatgccggtggt

SEQ ID NO: 264663 - DNA, 25 bp, probe
tggttcatgcttttatcaagagatc

SEQ ID NO: 264664 - DNA, 25 bp, probe
tggtcactcttgtttgctatggact

SEQ ID NO: 264665 - DNA, 25 bp, probe
tggtcactcttgtttgctatggact

SEQ ID NO: 264666 - DNA, 25 bp, probe
tggtcttttctgctgctagcaactc

SEQ ID NO: 264667 - DNA, 25 bp, probe
tgggtgttttgtggccatcacactc

SEQ ID NO: 264668 - DNA, 25 bp, probe
tggtttcagttgtagcaatccccat

SEQ ID NO: 264669 - DNA, 25 bp, probe
tggtgttcgtggtgttcatccatgc

SEQ ID NO: 264670 - DNA, 25 bp, probe
tggtcttcttgttactgaccctgca

SEQ ID NO: 264671 - DNA, 25 bp, probe
tggttacatatttagcgcacccaga

SEQ ID NO: 264672 - DNA, 25 bp, probe
tggattggatctttagccaccctga

SEQ ID NO: 264673 - DNA, 25 bp, probe
tggttgtgtttttgcagagctcctg

SEQ ID NO: 264674 - DNA, 25 bp, probe
tggttgtgtttttgcagagctcctg

SEQ ID NO: 264675 - DNA, 25 bp, probe
tggtttgatttcactggagcctgct

SEQ ID NO: 264676 - DNA, 25 bp, probe
tggtagctgtagattctggacctgc

SEQ ID NO: 264677 - DNA, 25 bp, probe
tggatttgtgagtgctgggacggcc

SEQ ID NO: 264678 - DNA, 25 bp, probe
tggtttatgaggcagtggccgggcg

SEQ ID NO: 264679 - DNA, 25 bp, probe
tggtgactattaccggatccagggc

SEQ ID NO: 264680 - DNA, 25 bp, probe
tgtggcagtattttagtaccgggtt

SEQ ID NO: 264681 - DNA, 25 bp, probe
tgggcagtttcacagttcatccagc

SEQ ID NO: 264682 - DNA, 25 bp, probe
tggtagtcagtatggctcaaccagc

SEQ ID NO: 264683 - DNA, 25 bp, probe
tgtgttgtaaaagtggaacccagtg

SEQ ID NO: 264684 - DNA, 25 bp, probe
tggtgtggtcactgtaagaacctgg

SEQ ID NO: 264685 - DNA, 25 bp, probe
tggatcaagtcctgaagaaagcggg

SEQ ID NO: 264686 - DNA, 25 bp, probe
tggtcaggtcactcagaaaaatggc

SEQ ID NO: 264687 - DNA, 25 bp, probe
tggtaatcctgctcagtacgagagg

SEQ ID NO: 264688 - DNA, 25 bp, probe
tggtaacctcgtggaggggatggat

SEQ ID NO: 264689 - DNA, 25 bp, probe
tggttagcaccgcaggtgtagagaa

SEQ ID NO: 264690 - DNA, 25 bp, probe
tggtgggtttcggggtgaagcaagt

SEQ ID NO: 264691 - DNA, 25 bp, probe
tgggaaaatccctggtagagccatt

SEQ ID NO: 264692 - DNA, 25 bp, probe
tgggaaatagcccttggtgtgggtt

SEQ ID NO: 264693 - DNA, 25 bp, probe
tgggcccaacgtctgcatgggagac

SEQ ID NO: 264694 - DNA, 25 bp, probe
tgggagccagacactccagggatca

SEQ ID NO: 264695 - DNA, 25 bp, probe
tgggagaagactatccttggagatt

SEQ ID NO: 264696 - DNA, 25 bp, probe
tgtgggacaaatttactgtacctta

SEQ ID NO: 264697 - DNA, 25 bp, probe
tggtgtaatgttttacaaatccttt

SEQ ID NO: 264698 - DNA, 25 bp, probe
tggtgtattatttttcaagcccctc

SEQ ID NO: 264699 - DNA, 25 bp, probe
tggtttttattccataatgcctccc

SEQ ID NO: 264700 - DNA, 25 bp, probe
tggtgtttcttttataactttgcag

SEQ ID NO: 264701 - DNA, 25 bp, probe
tggtttatgttctaggaactcttca

SEQ ID NO: 264702 - DNA, 25 bp, probe
tgggacgattacttggacaccgtga

SEQ ID NO: 264703 - DNA, 25 bp, probe
tggtgatggatggtttggaaaggga

SEQ ID NO: 264704 - DNA, 25 bp, probe
tggtcagctgggcaagtggaagggg

SEQ ID NO: 264705 - DNA, 25 bp, probe
tggtcctcaccacagatggaattaa

SEQ ID NO: 264706 - DNA, 25 bp, probe
tggtcacttccaccgtgaagcgaaa

SEQ ID NO: 264707 - DNA, 25 bp, probe
tgggcccctcggctgaagagaagat

SEQ ID NO: 264708 - DNA, 25 bp, probe
tggggcctcagctgtttaagtttac

SEQ ID NO: 264709 - DNA, 25 bp, probe
tgtggaccttgtattctccgtattc

SEQ ID NO: 264710 - DNA, 25 bp, probe
tgtgagggcttggtttccttattgt

SEQ ID NO: 264711 - DNA, 25 bp, probe
tgtgagggcttggtttccttattgt

SEQ ID NO: 264712 - DNA, 25 bp, probe
tgtgcttggttgactaaccttgtcc

SEQ ID NO: 264713 - DNA, 25 bp, probe
tggatttgttgccatgtgcaccttg

SEQ ID NO: 264714 - DNA, 25 bp, probe
tggtgctgtgatgcacattccttcg

SEQ ID NO: 264715 - DNA, 25 bp, probe
tggtgagcctaggcatctctttggc

SEQ ID NO: 264716 - DNA, 25 bp, probe
tggtgagcctaggcatctctttggc

SEQ ID NO: 264717 - DNA, 25 bp, probe
tggtcaccatggtcattgtgcttac

SEQ ID NO: 264718 - DNA, 25 bp, probe
tggtcaccatggtcattgtgcttac

SEQ ID NO: 264719 - DNA, 25 bp, probe
tggtacatatgatgatttccatact

SEQ ID NO: 264720 - DNA, 25 bp, probe
tggtactgtacagctggctctactt

SEQ ID NO: 264721 - DNA, 25 bp, probe
tggtatcaggcccctgagttactat

SEQ ID NO: 264722 - DNA, 25 bp, probe
tggttcaggcagccctatgcaaacc

SEQ ID NO: 264723 - DNA, 25 bp, probe
tggttagcgaggccgtgcagggcca

SEQ ID NO: 264724 - DNA, 25 bp, probe
tggttagctcaaccaatggagagct

SEQ ID NO: 264725 - DNA, 25 bp, probe
tggattagcatcagtgaagaacgtt

SEQ ID NO: 264726 - DNA, 25 bp, probe
tggttcagtcctagcaagaagcgag

SEQ ID NO: 264727 - DNA, 25 bp, probe
tggtctccatcttcaatgagaagga

SEQ ID NO: 264728 - DNA, 25 bp, probe
tggattctatgatgaatgcaaacga

SEQ ID NO: 264729 - DNA, 25 bp, probe
tggattctatgatgaatgcaaacga

SEQ ID NO: 264730 - DNA, 25 bp, probe
tggttttagatgccacaaagcggtt

SEQ ID NO: 264731 - DNA, 25 bp, probe
tggggtataggcccaaactgccttc

SEQ ID NO: 264732 - DNA, 25 bp, probe
tggggtaagaccccaaccactcaga

SEQ ID NO: 264733 - DNA, 25 bp, probe
tggggtaagaccccaaccactcaga

SEQ ID NO: 264734 - DNA, 25 bp, probe
tggggaagaacgaagccacctttga

SEQ ID NO: 264735 - DNA, 25 bp, probe
tggtgccacaaagaatgccacagtg

SEQ ID NO: 264736 - DNA, 25 bp, probe
tggtgccacaaagaatgccacagtg

SEQ ID NO: 264737 - DNA, 25 bp, probe
tggttccatcaagactgtgcaccca

SEQ ID NO: 264738 - DNA, 25 bp, probe
tggattcacaaagctgtgttctctc

SEQ ID NO: 264739 - DNA, 25 bp, probe
tggattcaaagagatatgccgttat

SEQ ID NO: 264740 - DNA, 25 bp, probe
tggttgaaactgccatagccatgct

SEQ ID NO: 264741 - DNA, 25 bp, probe
tggattatagaccagtggcactgtt

SEQ ID NO: 264742 - DNA, 25 bp, probe
tggattcatcagtctcggaacctca

SEQ ID NO: 264743 - DNA, 25 bp, probe
tggtatgctggagagttactctgca

SEQ ID NO: 264744 - DNA, 25 bp, probe
tggtcattgtgatcagttactccaa

SEQ ID NO: 264745 - DNA, 25 bp, probe
tggtcaatgctctaagtgaagatac

SEQ ID NO: 264746 - DNA, 25 bp, probe
tggtccactgcaagatgggcgtcag

SEQ ID NO: 264747 - DNA, 25 bp, probe
tggtgccaccattgagaactccagg

SEQ ID NO: 264748 - DNA, 25 bp, probe
tggtgtcctatggagatattacagt

SEQ ID NO: 264749 - DNA, 25 bp, probe
tggtgctctctatctgtttaagaca

SEQ ID NO: 264750 - DNA, 25 bp, probe
tggtgtgttttttcattaatgacaa

SEQ ID NO: 264751 - DNA, 25 bp, probe
tggttggctcgtgtgcattaagtca

SEQ ID NO: 264752 - DNA, 25 bp, probe
tgggtcccttggccatatcaaggca

SEQ ID NO: 264753 - DNA, 25 bp, probe
tggattccgaggggcacatcaaaat

SEQ ID NO: 264754 - DNA, 25 bp, probe
tggtttctgagaggtcctcaacaag

SEQ ID NO: 264755 - DNA, 25 bp, probe
tggttatgcggcggatccgaaaaga

SEQ ID NO: 264756 - DNA, 25 bp, probe
tggtgtatgagggcaatgccaggga

SEQ ID NO: 264757 - DNA, 25 bp, probe
tggtgaacaatgcctaccggggact

SEQ ID NO: 264758 - DNA, 25 bp, probe
tggtatttgtgcatcctcggggcac

SEQ ID NO: 264759 - DNA, 25 bp, probe
tgtgtttgtgatgttttggagtaca

SEQ ID NO: 264760 - DNA, 25 bp, probe
tggttttaggataaggggtcatcaa

SEQ ID NO: 264761 - DNA, 25 bp, probe
tggttttcagaaaggggttcgcaag

SEQ ID NO: 264762 - DNA, 25 bp, probe
tggtatggtcatggaaggggcttcc

SEQ ID NO: 264763 - DNA, 25 bp, probe
tgctgtcgattaagaccggagcttg

SEQ ID NO: 264764 - DNA, 25 bp, probe
tgtgacgttattaccagtgaactaa

SEQ ID NO: 264765 - DNA, 25 bp, probe
tgtgacgttattaccagtgaactaa

SEQ ID NO: 264766 - DNA, 25 bp, probe
tgtgtcggttttcaataacaagaac

SEQ ID NO: 264767 - DNA, 25 bp, probe
tggttgggttgaccagtaagtagaa

SEQ ID NO: 264768 - DNA, 25 bp, probe
tggtttggggcagatctgtagtaaa

SEQ ID NO: 264769 - DNA, 25 bp, probe
tggttggcctgagcaacctagtaag

SEQ ID NO: 264770 - DNA, 25 bp, probe
tggttcctctgagaagcctggatcc

SEQ ID NO: 264771 - DNA, 25 bp, probe
tggtggccttggccaagagcctacg

SEQ ID NO: 264772 - DNA, 25 bp, probe
tgggtcttcagatcataaactacgt

SEQ ID NO: 264773 - DNA, 25 bp, probe
tgggtatgggctacaaagagaacgt

SEQ ID NO: 264774 - DNA, 25 bp, probe
tggtggatgacgtgccaaggagcac

SEQ ID NO: 264775 - DNA, 25 bp, probe
tggtggtgccaatgtgccctggcac

SEQ ID NO: 264776 - DNA, 25 bp, probe
tggtggtgccaatgtgccctggcac

SEQ ID NO: 264777 - DNA, 25 bp, probe
tggttggagccatgttgagcccact

SEQ ID NO: 264778 - DNA, 25 bp, probe
cctgctaagtttccaagcagtaaac

SEQ ID NO: 264779 - DNA, 25 bp, probe
tggtgcaaggtacaaggcccacacc

SEQ ID NO: 264780 - DNA, 25 bp, probe
tggtcaaggacacccaggccatgaa

SEQ ID NO: 264781 - DNA, 25 bp, probe
tggtcctgaaccgcatggcaaaagg

SEQ ID NO: 264782 - DNA, 25 bp, probe
tggtcctgaaccgcatggcaaaagg

SEQ ID NO: 264783 - DNA, 25 bp, probe
tgtggcttaacggtatttcagaagg

SEQ ID NO: 264784 - DNA, 25 bp, probe
tggtgagaaacagctttatcgtaga

SEQ ID NO: 264785 - DNA, 25 bp, probe
tgtgaaaactccctattctcttaag

SEQ ID NO: 264786 - DNA, 25 bp, probe
tggtatcaatctctcaatgttttta

SEQ ID NO: 264787 - DNA, 25 bp, probe
tggtatcaatctctcaatgttttta

SEQ ID NO: 264788 - DNA, 25 bp, probe
tggtagccactgctagatatttatt

SEQ ID NO: 264789 - DNA, 25 bp, probe
tggtacacctctttacgtatatgat

SEQ ID NO: 264790 - DNA, 25 bp, probe
tggtacacctctttacgtatatgat

SEQ ID NO: 264791 - DNA, 25 bp, probe
tggttctggttatacttccattatc

SEQ ID NO: 264792 - DNA, 25 bp, probe
tggttcccataatagcttccagtat

SEQ ID NO: 264793 - DNA, 25 bp, probe
tggttccatcaatacctgatccaga

SEQ ID NO: 264794 - DNA, 25 bp, probe
tggttccatcaatacctgatccaga

SEQ ID NO: 264795 - DNA, 25 bp, probe
tggtttacactaacattatgacaaa

SEQ ID NO: 264796 - DNA, 25 bp, probe
tggttaacgccttcatttatagatg

SEQ ID NO: 264797 - DNA, 25 bp, probe
tggtgttacccatgaccatgaagat

SEQ ID NO: 264798 - DNA, 25 bp, probe
tggtaccagcccatgaacaaattcc

SEQ ID NO: 264799 - DNA, 25 bp, probe
tggtgacacagccctcaacaaaaac

SEQ ID NO: 264800 - DNA, 25 bp, probe
tggtcactgcaatccaagcatgaaa

SEQ ID NO: 264801 - DNA, 25 bp, probe
tggtcacagaacccatagggaatgg

SEQ ID NO: 264802 - DNA, 25 bp, probe
tggtaaggacaggtggaagtgtggc

SEQ ID NO: 264803 - DNA, 25 bp, probe
tggtccgagaagggacatgtgggac

SEQ ID NO: 264804 - DNA, 25 bp, probe
tggtacgacaaaggagagtgcggca

SEQ ID NO: 264805 - DNA, 25 bp, probe
tgtgtacgtgccggacgagtgggag

SEQ ID NO: 264806 - DNA, 25 bp, probe
tggtctaatccgggcaggtgctgga

SEQ ID NO: 264807 - DNA, 25 bp, probe
tggtctaatccgggcaggtgctgga

SEQ ID NO: 264808 - DNA, 25 bp, probe
tgggtcaataagggcaggtggttca

SEQ ID NO: 264809 - DNA, 25 bp, probe
tgggtcaataagggcaggtggttca

SEQ ID NO: 264810 - DNA, 25 bp, probe
tggggcctacactctgtgttattgc

SEQ ID NO: 264811 - DNA, 25 bp, probe
tggggtcgtcaaagagtttttgcct

SEQ ID NO: 264812 - DNA, 25 bp, probe
tggggcttttctagtgctttttggc

SEQ ID NO: 264813 - DNA, 25 bp, probe
tggttgcttttttattattttgctt

SEQ ID NO: 264814 - DNA, 25 bp, probe
tgctgtccttttattaaacttattt

SEQ ID NO: 264815 - DNA, 25 bp, probe
tgggcgtcctggctgtaaacattta

SEQ ID NO: 264816 - DNA, 25 bp, probe
tggggacaaggccatccatcaacat

SEQ ID NO: 264817 - DNA, 25 bp, probe
tgtgggaaagggacccgaagcccag

SEQ ID NO: 264818 - DNA, 25 bp, probe
tgtgggaaagggacccgaagcccag

SEQ ID NO: 264819 - DNA, 25 bp, probe
tggtggccagaggtgtcacccaaac

SEQ ID NO: 264820 - DNA, 25 bp, probe
tggtccataggtgtcatcgcctaca

SEQ ID NO: 264821 - DNA, 25 bp, probe
tggtcctaggctggacacaggattc

SEQ ID NO: 264822 - DNA, 25 bp, probe
tggtcacattcaccgacatcggact

SEQ ID NO: 264823 - DNA, 25 bp, probe
tggtcacattcaccgacatcggact

SEQ ID NO: 264824 - DNA, 25 bp, probe
tggttcttcagtcgatatatgggct

SEQ ID NO: 264825 - DNA, 25 bp, probe
tggtccaacagtcgtatcctggtga

SEQ ID NO: 264826 - DNA, 25 bp, probe
tggtccaacagtcgtatcctggtga

SEQ ID NO: 264827 - DNA, 25 bp, probe
tggtcatcaaaggagttcgcggagg

SEQ ID NO: 264828 - DNA, 25 bp, probe
tggtccagagactcttctgcatggg

SEQ ID NO: 264829 - DNA, 25 bp, probe
tgggcaaagacgaattcatgctgtc

SEQ ID NO: 264830 - DNA, 25 bp, probe
tggtgcagacgatgtaattgattac

SEQ ID NO: 264831 - DNA, 25 bp, probe
tggtgcagagaattttattcagcat

SEQ ID NO: 264832 - DNA, 25 bp, probe
tggtcagtacatggattcttcactt

SEQ ID NO: 264833 - DNA, 25 bp, probe
tggtcctgctgatcaatttcatctt

SEQ ID NO: 264834 - DNA, 25 bp, probe
tggtcacatctgaattttgtacttc

SEQ ID NO: 264835 - DNA, 25 bp, probe
tggtcacatctgaattttgtacttc

SEQ ID NO: 264836 - DNA, 25 bp, probe
tggtgactatattttctgcttctaa

SEQ ID NO: 264837 - DNA, 25 bp, probe
tggtagaatttcccatgcatttact

SEQ ID NO: 264838 - DNA, 25 bp, probe
tggtagcacattgcggggcattcgt

SEQ ID NO: 264839 - DNA, 25 bp, probe
tggtactattatgtgggtgatgcct

SEQ ID NO: 264840 - DNA, 25 bp, probe
tggtagcttgctcaacaggtgacct

SEQ ID NO: 264841 - DNA, 25 bp, probe
tggtcaggtgagcagtaggtcatcc

SEQ ID NO: 264842 - DNA, 25 bp, probe
tggtcaggttgtttgatgtgtgcac

SEQ ID NO: 264843 - DNA, 25 bp, probe
tggtatggatgctgttgggtgcact

SEQ ID NO: 264844 - DNA, 25 bp, probe
tggtatgccgcatctggagggccat

SEQ ID NO: 264845 - DNA, 25 bp, probe
tggtagacgtgtgtggaggccagcc

SEQ ID NO: 264846 - DNA, 25 bp, probe
tggtaattcgattgggggcccatcc

SEQ ID NO: 264847 - DNA, 25 bp, probe
tggtccattctcaagggacgtcctc

SEQ ID NO: 264848 - DNA, 25 bp, probe
tggtccagttggagaccgtcaacct

SEQ ID NO: 264849 - DNA, 25 bp, probe
tggtgccagttgccagggcaagtca

SEQ ID NO: 264850 - DNA, 25 bp, probe
tggtcacagacttctggcctaggac

SEQ ID NO: 264851 - DNA, 25 bp, probe
tggtgaaacttctcctgatgcatca

SEQ ID NO: 264852 - DNA, 25 bp, probe
tggtgaagttgttcccattctgagc

SEQ ID NO: 264853 - DNA, 25 bp, probe
tggttttcatggtgcacatgccgga

SEQ ID NO: 264854 - DNA, 25 bp, probe
tggtgtttgagttcctcagccagga

SEQ ID NO: 264855 - DNA, 25 bp, probe
tggtggtgatgctgtcttcagtcag

SEQ ID NO: 264856 - DNA, 25 bp, probe
tggtgcaggcgctgattctttcaag

SEQ ID NO: 264857 - DNA, 25 bp, probe
tgtgtctgatcctcatttttcaacc

SEQ ID NO: 264858 - DNA, 25 bp, probe
tggtacatccagtcactttgccaga

SEQ ID NO: 264859 - DNA, 25 bp, probe
tggtcactccgattctgagtgccac

SEQ ID NO: 264860 - DNA, 25 bp, probe
tggtcactcacaacctgaattcacc

SEQ ID NO: 264861 - DNA, 25 bp, probe
tggtactcctaattacattgctcct

SEQ ID NO: 264862 - DNA, 25 bp, probe
tggtagctctatttagcagttgtcc

SEQ ID NO: 264863 - DNA, 25 bp, probe
tggtgaccgagctgggatcgtccag

SEQ ID NO: 264864 - DNA, 25 bp, probe
tgtggcaccgtgagggttgggaccc

SEQ ID NO: 264865 - DNA, 25 bp, probe
tggtcccagtgttagggtagcatgg

SEQ ID NO: 264866 - DNA, 25 bp, probe
tggtcccagtgtatgacctgctgct

SEQ ID NO: 264867 - DNA, 25 bp, probe
tggtcctgagtctactcagcctgga

SEQ ID NO: 264868 - DNA, 25 bp, probe
tggtcctgagtctactcagcctgga

SEQ ID NO: 264869 - DNA, 25 bp, probe
tggtccggatggtctagtctatgca

SEQ ID NO: 264870 - DNA, 25 bp, probe
tggtccaggggctgagcctgagtga

SEQ ID NO: 264871 - DNA, 25 bp, probe
tggtccaggggctgagcctgagtga

SEQ ID NO: 264872 - DNA, 25 bp, probe
tggtccctgggagtgacggcatatg

SEQ ID NO: 264873 - DNA, 25 bp, probe
tggtccctggcgaggaggagcagaa

SEQ ID NO: 264874 - DNA, 25 bp, probe
tggtagctctgaagggaggggaaga

SEQ ID NO: 264875 - DNA, 25 bp, probe
tggtagatggaacagcatgtggtga

SEQ ID NO: 264876 - DNA, 25 bp, probe
tggtctgaagggctatgtggctgag

SEQ ID NO: 264877 - DNA, 25 bp, probe
tggtctcattggcaatgtttcgata

SEQ ID NO: 264878 - DNA, 25 bp, probe
tggtgccattgtaacttcatgtaaa

SEQ ID NO: 264879 - DNA, 25 bp, probe
tggggtcacttccttcatgtaagac

SEQ ID NO: 264880 - DNA, 25 bp, probe
tggtcccaccattgttcatgatgag

SEQ ID NO: 264881 - DNA, 25 bp, probe
tggtgaagacgctgtacatgctggg

SEQ ID NO: 264882 - DNA, 25 bp, probe
tggtgaaggccaagttctgtgaggc

SEQ ID NO: 264883 - DNA, 25 bp, probe
tggtcagaggtaagatgggagggct

SEQ ID NO: 264884 - DNA, 25 bp, probe
tggtcaggaaggccatgggaggaca

SEQ ID NO: 264885 - DNA, 25 bp, probe
tggtcaggactgagcaggggactgg

SEQ ID NO: 264886 - DNA, 25 bp, probe
tggtgaggagctcacctacgactac

SEQ ID NO: 264887 - DNA, 25 bp, probe
tggtgggacgagttcatcactacta

SEQ ID NO: 264888 - DNA, 25 bp, probe
tggtggtgactcatttccatgccat

SEQ ID NO: 264889 - DNA, 25 bp, probe
tggtcgcggcacgtttacagccgca

SEQ ID NO: 264890 - DNA, 25 bp, probe
tggtcaacatgaagcgtttcccaga

SEQ ID NO: 264891 - DNA, 25 bp, probe
tggtcaacagaagctggtgctacaa

SEQ ID NO: 264892 - DNA, 25 bp, probe
tggtcacagaaggctctgggctcca

SEQ ID NO: 264893 - DNA, 25 bp, probe
tggtctcagaggacctggtggccaa

SEQ ID NO: 264894 - DNA, 25 bp, probe
tggtccatgagacagcgactggctc

SEQ ID NO: 264895 - DNA, 25 bp, probe
tggtccagcatgagatcctttgctc

SEQ ID NO: 264896 - DNA, 25 bp, probe
tggtcgagcgatggatttccgtctc

SEQ ID NO: 264897 - DNA, 25 bp, probe
tggtccatgctaagtctaacactcc

SEQ ID NO: 264898 - DNA, 25 bp, probe
tggtcactctcatgttggacacggg

SEQ ID NO: 264899 - DNA, 25 bp, probe
tggtgccctaggtggaatccagaac

SEQ ID NO: 264900 - DNA, 25 bp, probe
tggggcctgggctgtggacagaagg

SEQ ID NO: 264901 - DNA, 25 bp, probe
tgggtggccggctggggatatatag

SEQ ID NO: 264902 - DNA, 25 bp, probe
tggtgtcgggtgttggtgggtagag

SEQ ID NO: 264903 - DNA, 25 bp, probe
tgggatgggggcttatggggtggca

SEQ ID NO: 264904 - DNA, 25 bp, probe
tggtgtggggcgtggatcgagtgta

SEQ ID NO: 264905 - DNA, 25 bp, probe
tgggtgccacggtggacttagctct

SEQ ID NO: 264906 - DNA, 25 bp, probe
tggtggccaaggtcagcgactttgg

SEQ ID NO: 264907 - DNA, 25 bp, probe
tggtacctggattcagatgactcat

SEQ ID NO: 264908 - DNA, 25 bp, probe
tggtcacctggattggctacttttg

SEQ ID NO: 264909 - DNA, 25 bp, probe
tggtcaccgggaacctggttcagtt

SEQ ID NO: 264910 - DNA, 25 bp, probe
tggtaccgagtgatccgtcatacga

SEQ ID NO: 264911 - DNA, 25 bp, probe
tgggagctggggatctggattcctg

SEQ ID NO: 264912 - DNA, 25 bp, probe
tgggggaggatcactatttccgttc

SEQ ID NO: 264913 - DNA, 25 bp, probe
tgggggaggtctttaagtctattgt

SEQ ID NO: 264914 - DNA, 25 bp, probe
tggggctggttataagagcctatgt

SEQ ID NO: 264915 - DNA, 25 bp, probe
tggggctgtgttttgagcagcaggt

SEQ ID NO: 264916 - DNA, 25 bp, probe
tggtcatgcttacactgatacaggg

SEQ ID NO: 264917 - DNA, 25 bp, probe
tggtctgttatgcacgcatctaccg

SEQ ID NO: 264918 - DNA, 25 bp, probe
tggtctttaccacagtgatgccgcc

SEQ ID NO: 264919 - DNA, 25 bp, probe
tggtcttctaccatagtccagtggc

SEQ ID NO: 264920 - DNA, 25 bp, probe
tggtcttctaccatagtccagtggc

SEQ ID NO: 264921 - DNA, 25 bp, probe
tggtttggacacagtgctccagctg

SEQ ID NO: 264922 - DNA, 25 bp, probe
tggtttggtgtcaacagctcacagg

SEQ ID NO: 264923 - DNA, 25 bp, probe
tggtttgcaggtaacatggagaggc

SEQ ID NO: 264924 - DNA, 25 bp, probe
tgaggattgcggaaaaccaggaaaa

SEQ ID NO: 264925 - DNA, 25 bp, probe
tgtggaatggagtaaaccagtgaaa

SEQ ID NO: 264926 - DNA, 25 bp, probe
tggtattggaataactcacagggat

SEQ ID NO: 264927 - DNA, 25 bp, probe
tggtagggaaagactctgcacctgc

SEQ ID NO: 264928 - DNA, 25 bp, probe
tggtgagtgtgagcagctgcctcaa

SEQ ID NO: 264929 - DNA, 25 bp, probe
tggtaggagtcaatctgccacagaa

SEQ ID NO: 264930 - DNA, 25 bp, probe
tggtatggagtccagtctaagcaga

SEQ ID NO: 264931 - DNA, 25 bp, probe
tggtgcatctgagccagtctcagaa

SEQ ID NO: 264932 - DNA, 25 bp, probe
tggtgatcgcatacatcatgaccgt

SEQ ID NO: 264933 - DNA, 25 bp, probe
tggtgtggcactccatgcaagatga

SEQ ID NO: 264934 - DNA, 25 bp, probe
tggtttgctctgatcattgctgatt

SEQ ID NO: 264935 - DNA, 25 bp, probe
tggtttgctcagtcttctgaactcc

SEQ ID NO: 264936 - DNA, 25 bp, probe
tggtgtccatgaggtaccacagctc

SEQ ID NO: 264937 - DNA, 25 bp, probe
tggtgtgccagcgaaaccaaaccat

SEQ ID NO: 264938 - DNA, 25 bp, probe
tggtgtgccagcgaaaccaaaccat

SEQ ID NO: 264939 - DNA, 25 bp, probe
tggtggactccaaagccaagacgcg

SEQ ID NO: 264940 - DNA, 25 bp, probe
tggtggactccaaagccaagacgcg

SEQ ID NO: 264941 - DNA, 25 bp, probe
tggtggactccaaagccaagacgcg

SEQ ID NO: 264942 - DNA, 25 bp, probe
tggtgcgccccaaaggcgtggtcgc

SEQ ID NO: 264943 - DNA, 25 bp, probe
tggtagtacttgcagatggtggacg

SEQ ID NO: 264944 - DNA, 25 bp, probe
tggtcaggttacaaatggctagtag

SEQ ID NO: 264945 - DNA, 25 bp, probe
tggtaccttcttcagtgctgagtag

SEQ ID NO: 264946 - DNA, 25 bp, probe
tggtactcttttcatcatggtgatg

SEQ ID NO: 264947 - DNA, 25 bp, probe
tggtagctttagaagactcaggagg

SEQ ID NO: 264948 - DNA, 25 bp, probe
tggtcgctcgttacggtcagggata

SEQ ID NO: 264949 - DNA, 25 bp, probe
tggggtggcttagcagatccggaca

SEQ ID NO: 264950 - DNA, 25 bp, probe
tgggagtgtttatcgagccaaatgg

SEQ ID NO: 264951 - DNA, 25 bp, probe
tggtgacttttagggagcacaaaca

SEQ ID NO: 264952 - DNA, 25 bp, probe
tggtgactggtgaggggcctctaga

SEQ ID NO: 264953 - DNA, 25 bp, probe
tgggtttgctgtggggacctgattg

SEQ ID NO: 264954 - DNA, 25 bp, probe
tggggctctggtaggtactaatggt

SEQ ID NO: 264955 - DNA, 25 bp, probe
tgggttcctgtgagtagccaaggca

SEQ ID NO: 264956 - DNA, 25 bp, probe
tgggcgtccagggcgtaggaagccg

SEQ ID NO: 264957 - DNA, 25 bp, probe
tggggcccagacggtacatggggct

SEQ ID NO: 264958 - DNA, 25 bp, probe
tgggtgagccagtggaacagcggga

SEQ ID NO: 264959 - DNA, 25 bp, probe
tggggggcgcttgagaacagcaggg

SEQ ID NO: 264960 - DNA, 25 bp, probe
ttggaaggccctaaagaaggcttat

SEQ ID NO: 264961 - DNA, 25 bp, probe
ttggaagtcccctgaaaggtcctat

SEQ ID NO: 264962 - DNA, 25 bp, probe
tgggaactgctcaccggagaagtcc

SEQ ID NO: 264963 - DNA, 25 bp, probe
tggtaacaggcatccttgccaagcc

SEQ ID NO: 264964 - DNA, 25 bp, probe
tggggttttcgtacagcaaggcact

SEQ ID NO: 264965 - DNA, 25 bp, probe
tggggtctttttatgcatttgcatt

SEQ ID NO: 264966 - DNA, 25 bp, probe
tggggtttatgtcagtcattttggt

SEQ ID NO: 264967 - DNA, 25 bp, probe
tggggtttggtgcagtttccagggt

SEQ ID NO: 264968 - DNA, 25 bp, probe
tggggttctggaccaagttcgacgt

SEQ ID NO: 264969 - DNA, 25 bp, probe
tggggttctggaccaagttcgacgt

SEQ ID NO: 264970 - DNA, 25 bp, probe
tggtggttgggacccagtggcaggg

SEQ ID NO: 264971 - DNA, 25 bp, probe
tgggagtcagggagccctggggttt

SEQ ID NO: 264972 - DNA, 25 bp, probe
tggtgatgtaggtggtccctggtgc

SEQ ID NO: 264973 - DNA, 25 bp, probe
tggtgtaattttgtcctctctgtgt

SEQ ID NO: 264974 - DNA, 25 bp, probe
tggtgtaattttgtcctctctgtgt

SEQ ID NO: 264975 - DNA, 25 bp, probe
tggtctgaattctcctaactccatt

SEQ ID NO: 264976 - DNA, 25 bp, probe
tcgaactttctgactctaagctcct

SEQ ID NO: 264977 - DNA, 25 bp, probe
tgtgaacgttttctaactgcctcgt

SEQ ID NO: 264978 - DNA, 25 bp, probe
tgtgaacgttttctaactgcctcgt

SEQ ID NO: 264979 - DNA, 25 bp, probe
tggtgacctctttcgatgaactgca

SEQ ID NO: 264980 - DNA, 25 bp, probe
tgtgtacatcgtcacggaactcatg

SEQ ID NO: 264981 - DNA, 25 bp, probe
tggtacatgcctgttaatattcatg

SEQ ID NO: 264982 - DNA, 25 bp, probe
tggtgaatgcgtacatgtagatttc

SEQ ID NO: 264983 - DNA, 25 bp, probe
tggtgattgggcaagattgaatttg

SEQ ID NO: 264984 - DNA, 25 bp, probe
tggtcatggggcaaagtatcactta

SEQ ID NO: 264985 - DNA, 25 bp, probe
tggtaggggcactgtgtgcactggc

SEQ ID NO: 264986 - DNA, 25 bp, probe
tggtggggccagtgggttggccagc

SEQ ID NO: 264987 - DNA, 25 bp, probe
tggtggggccagtgggttggccagc

SEQ ID NO: 264988 - DNA, 25 bp, probe
tgtgggggcgagtggttccccacaa

SEQ ID NO: 264989 - DNA, 25 bp, probe
tgtgggggcgagtggttccccacaa

SEQ ID NO: 264990 - DNA, 25 bp, probe
tggtgtgggggcgagtggttcccca

SEQ ID NO: 264991 - DNA, 25 bp, probe
tggtgtgggggcgagtggttcccca

SEQ ID NO: 264992 - DNA, 25 bp, probe
tgggtcagggggagtctttgcacca

SEQ ID NO: 264993 - DNA, 25 bp, probe
tgggttagggaaaacattccatcct

SEQ ID NO: 264994 - DNA, 25 bp, probe
tgggtgaagggtacccaggaccact

SEQ ID NO: 264995 - DNA, 25 bp, probe
tggtctataaagtgactcggcccct

SEQ ID NO: 264996 - DNA, 25 bp, probe
tggtctataaagtgactcggcccct

SEQ ID NO: 264997 - DNA, 25 bp, probe
tggtcaatgaaaaccacatcgcccc

SEQ ID NO: 264998 - DNA, 25 bp, probe
tggtgaagagagagccaaagccctc

SEQ ID NO: 264999 - DNA, 25 bp, probe
tgtgtcacgagatccaaacaccctc

SEQ ID NO: 265000 - DNA, 25 bp, probe
tgtgccagcgaaaccaaaccatgcc

SEQ ID NO: 265001 - DNA, 25 bp, probe
tgtgccagcgaaaccaaaccatgcc

SEQ ID NO: 265002 - DNA, 25 bp, probe
tgggagctgaattccaagcccaggg

SEQ ID NO: 265003 - DNA, 25 bp, probe
tgggagctgaattccaagcccaggg

SEQ ID NO: 265004 - DNA, 25 bp, probe
tggggagaaagttgagtgtcagggg

SEQ ID NO: 265005 - DNA, 25 bp, probe
tgggaaaataattagttacagtggg

SEQ ID NO: 265006 - DNA, 25 bp, probe
tgtggaataacttaagtaacagtga

SEQ ID NO: 265007 - DNA, 25 bp, probe
tgggatgattactcggacaccgtga

SEQ ID NO: 265008 - DNA, 25 bp, probe
tgaggtttccaaagggaactggaca

SEQ ID NO: 265009 - DNA, 25 bp, probe
tggtgtctagcccatgggagaactc

SEQ ID NO: 265010 - DNA, 25 bp, probe
tggtgtgtcgcccaggcgacaaaag

SEQ ID NO: 265011 - DNA, 25 bp, probe
tggtgtgtcgcccaggcgacaaaag

SEQ ID NO: 265012 - DNA, 25 bp, probe
tggtgatggcaagaggctgtcgaaa

SEQ ID NO: 265013 - DNA, 25 bp, probe
tggtgtgaaactcggctgtattaat

SEQ ID NO: 265014 - DNA, 25 bp, probe
tggggatacgtccatctttttaagg

SEQ ID NO: 265015 - DNA, 25 bp, probe
tggggaaaggcacactgttataaag

SEQ ID NO: 265016 - DNA, 25 bp, probe
tggggcaataacaaatcatttctaa

SEQ ID NO: 265017 - DNA, 25 bp, probe
tggtggcacacacctagtagtcccg

SEQ ID NO: 265018 - DNA, 25 bp, probe
tggtgtccagtagtatgaaggccct

SEQ ID NO: 265019 - DNA, 25 bp, probe
tggtgtccagtagtatgaaggccct

SEQ ID NO: 265020 - DNA, 25 bp, probe
tggtgtccagtagtatgaaggccct

SEQ ID NO: 265021 - DNA, 25 bp, probe
tggtgcccagctgccagaaagcaca

SEQ ID NO: 265022 - DNA, 25 bp, probe
tggtctctcgccatctatagataca

SEQ ID NO: 265023 - DNA, 25 bp, probe
tggtctcacggcagcacgatgaaga

SEQ ID NO: 265024 - DNA, 25 bp, probe
tggtcttgccgccaacgatgcaagt

SEQ ID NO: 265025 - DNA, 25 bp, probe
tggtgttcaagaaacgtgacagtgt

SEQ ID NO: 265026 - DNA, 25 bp, probe
tggtgtcaacagctcacaggagcgt

SEQ ID NO: 265027 - DNA, 25 bp, probe
tggtgtcagacgccatctttgacct

SEQ ID NO: 265028 - DNA, 25 bp, probe
tggtgacagtggaatctttgtctct

SEQ ID NO: 265029 - DNA, 25 bp, probe
tgggaagtggttcttgtcagcccga

SEQ ID NO: 265030 - DNA, 25 bp, probe
tgggaaggtgttcaaggcccgcgac

SEQ ID NO: 265031 - DNA, 25 bp, probe
tggggaggtgtacaaggggatcgac

SEQ ID NO: 265032 - DNA, 25 bp, probe
tggggagggtagcaccaggcatagc

SEQ ID NO: 265033 - DNA, 25 bp, probe
tggggaggactacacatggcctaca

SEQ ID NO: 265034 - DNA, 25 bp, probe
tggtggggaatgcaactctgctcag

SEQ ID NO: 265035 - DNA, 25 bp, probe
tggtggggtcaccaactactcacca

SEQ ID NO: 265036 - DNA, 25 bp, probe
tggggagagtcaaagacccccgagg

SEQ ID NO: 265037 - DNA, 25 bp, probe
tgtggggaacaagtaccgcctggga

SEQ ID NO: 265038 - DNA, 25 bp, probe
tgggggaccaagaatcacccaacca

SEQ ID NO: 265039 - DNA, 25 bp, probe
tgggaaaaagacacacccacaccgt

SEQ ID NO: 265040 - DNA, 25 bp, probe
tggtaaaacgagctctggccacagc

SEQ ID NO: 265041 - DNA, 25 bp, probe
tggtgaaaccgaagctcgactcttc

SEQ ID NO: 265042 - DNA, 25 bp, probe
tggtgactactggagactgctgccc

SEQ ID NO: 265043 - DNA, 25 bp, probe
tggtgacagaggtgatcgcctactc

SEQ ID NO: 265044 - DNA, 25 bp, probe
tggtgaaggagcggggcttggctgc

SEQ ID NO: 265045 - DNA, 25 bp, probe
tggtgaaggagcgggctttggcgcc

SEQ ID NO: 265046 - DNA, 25 bp, probe
tggtgttgggagccctttggagaac

SEQ ID NO: 265047 - DNA, 25 bp, probe
tgggttgggagacctattcctactc

SEQ ID NO: 265048 - DNA, 25 bp, probe
tggtcattggcatgactcgcatccc

SEQ ID NO: 265049 - DNA, 25 bp, probe
tggtgcaaagcatcactccacatca

SEQ ID NO: 265050 - DNA, 25 bp, probe
tggtgacagacatagtgacaacatc

SEQ ID NO: 265051 - DNA, 25 bp, probe
tggtgacatcactgcaggactttca

SEQ ID NO: 265052 - DNA, 25 bp, probe
tgggatgtcccgggacgtgtacagc

SEQ ID NO: 265053 - DNA, 25 bp, probe
tgggatgtcccgggacgtgtacagc

SEQ ID NO: 265054 - DNA, 25 bp, probe
tgaagtgtaccgctcggtggacctg

SEQ ID NO: 265055 - DNA, 25 bp, probe
tgttggaatccgacttggggaccat

SEQ ID NO: 265056 - DNA, 25 bp, probe
tgtgtagacaccctcttgggtccaa

SEQ ID NO: 265057 - DNA, 25 bp, probe
tggtcatgaagctttcctatggtcc

SEQ ID NO: 265058 - DNA, 25 bp, probe
tggtcattacatttgccatatcaaa

SEQ ID NO: 265059 - DNA, 25 bp, probe
tggtcttacatgatggtggcagaag

SEQ ID NO: 265060 - DNA, 25 bp, probe
tggtcttcaacaaggagggggaaag

SEQ ID NO: 265061 - DNA, 25 bp, probe
tggtgccaaacatggaggtgggcag

SEQ ID NO: 265062 - DNA, 25 bp, probe
tggggaatgtctgggaagctgggga

SEQ ID NO: 265063 - DNA, 25 bp, probe
tgggagatcgtgaccctagggggaa

SEQ ID NO: 265064 - DNA, 25 bp, probe
tgggaaatgtagccctgggtttaat

SEQ ID NO: 265065 - DNA, 25 bp, probe
tgtgaaaaaagagcttgttaatgat

SEQ ID NO: 265066 - DNA, 25 bp, probe
tggggaaaacaccttggatactgct

SEQ ID NO: 265067 - DNA, 25 bp, probe
tgggggaagaatgctctggctacgg

SEQ ID NO: 265068 - DNA, 25 bp, probe
tgggttggcgaagcctggtaaagct

SEQ ID NO: 265069 - DNA, 25 bp, probe
tgggagggggacccgtggagaattg

SEQ ID NO: 265070 - DNA, 25 bp, probe
tggtgagggagatcacgctggggaa

SEQ ID NO: 265071 - DNA, 25 bp, probe
tggggcgcaggagagccaggggaaa

SEQ ID NO: 265072 - DNA, 25 bp, probe
tggtgctggggcggagcaagtccag

SEQ ID NO: 265073 - DNA, 25 bp, probe
tggtgcgcaggggcgagtgggacgc

SEQ ID NO: 265074 - DNA, 25 bp, probe
tggtcagctggggcgagggctgtgc

SEQ ID NO: 265075 - DNA, 25 bp, probe
tgtggcagcatgtgtggggacggct

SEQ ID NO: 265076 - DNA, 25 bp, probe
tgggcacaacggcttacatggcacc

SEQ ID NO: 265077 - DNA, 25 bp, probe
tgggaacaacagcttatatggcacc

SEQ ID NO: 265078 - DNA, 25 bp, probe
tgtggccaacacttgtttctgaaac

SEQ ID NO: 265079 - DNA, 25 bp, probe
tggtgccaacacagttgccaaaccc

SEQ ID NO: 265080 - DNA, 25 bp, probe
tggtgtcttcacaggaggcaaatcc

SEQ ID NO: 265081 - DNA, 25 bp, probe
tggtgccccaggagcaggaacatgc

SEQ ID NO: 265082 - DNA, 25 bp, probe
tggggccaacgaagcgtgatcagcc

SEQ ID NO: 265083 - DNA, 25 bp, probe
tggggacagacctgagcatgaccac

SEQ ID NO: 265084 - DNA, 25 bp, probe
tggggacagaaccgtcactcagatc

SEQ ID NO: 265085 - DNA, 25 bp, probe
tggtggagagcacagagtcccagat

SEQ ID NO: 265086 - DNA, 25 bp, probe
tggggaagagtaggttctcggtact

SEQ ID NO: 265087 - DNA, 25 bp, probe
tggggcagcagcagggttttggttg

SEQ ID NO: 265088 - DNA, 25 bp, probe
tggtgggacacggagtttgcgtttg

SEQ ID NO: 265089 - DNA, 25 bp, probe
tgggatgggaagaaggggcgtttgt

SEQ ID NO: 265090 - DNA, 25 bp, probe
tgggggtcgtgttgtgggagatttt

SEQ ID NO: 265091 - DNA, 25 bp, probe
tgggggtcgtgttgtgggagatttt

SEQ ID NO: 265092 - DNA, 25 bp, probe
tggggttttacatgttggcattctt

SEQ ID NO: 265093 - DNA, 25 bp, probe
tggggacttaacaactttatcctat

SEQ ID NO: 265094 - DNA, 25 bp, probe
tggggacttaacaactttatcctat

SEQ ID NO: 265095 - DNA, 25 bp, probe
tgggagaatctataccttgttcctt

SEQ ID NO: 265096 - DNA, 25 bp, probe
tgggagttctagaaccacttcctgc

SEQ ID NO: 265097 - DNA, 25 bp, probe
tggggagatcatcgacccctttgtg

SEQ ID NO: 265098 - DNA, 25 bp, probe
tggggtgaagcagcaccccgtgttc

SEQ ID NO: 265099 - DNA, 25 bp, probe
tgggtggatgtcgaaacccaggtac

SEQ ID NO: 265100 - DNA, 25 bp, probe
tgggtggatgtcgaaacccaggtac

SEQ ID NO: 265101 - DNA, 25 bp, probe
tggtggcgcatgcctgtaattccag

SEQ ID NO: 265102 - DNA, 25 bp, probe
tggtggagtactaccagtgccactc

SEQ ID NO: 265103 - DNA, 25 bp, probe
tggtggagtactaccagtgccactc

SEQ ID NO: 265104 - DNA, 25 bp, probe
tggtggagacctgcgttatcacctg

SEQ ID NO: 265105 - DNA, 25 bp, probe
tgggtggagtggtgtctagcccatg

SEQ ID NO: 265106 - DNA, 25 bp, probe
tggtggaatatggtttgtgacccaa

SEQ ID NO: 265107 - DNA, 25 bp, probe
tggtggacggtttgctgtttgccaa

SEQ ID NO: 265108 - DNA, 25 bp, probe
tggtgtaagaaccacgtgcttccca

SEQ ID NO: 265109 - DNA, 25 bp, probe
tggtgtaagaaccacgtgcttccca

SEQ ID NO: 265110 - DNA, 25 bp, probe
tggggagaaacaccgggtttcagct

SEQ ID NO: 265111 - DNA, 25 bp, probe
tggggagaaacaccgggtttcagct

SEQ ID NO: 265112 - DNA, 25 bp, probe
tggggtgaacggtgctggcagttcg

SEQ ID NO: 265113 - DNA, 25 bp, probe
tggggagacgggcgctagatttggg

SEQ ID NO: 265114 - DNA, 25 bp, probe
tgggagagggggggattgattagaa

SEQ ID NO: 265115 - DNA, 25 bp, probe
tgggaatgtgtgccggaatatcagc

SEQ ID NO: 265116 - DNA, 25 bp, probe
tgggtacctcacccagatatcatcc

SEQ ID NO: 265117 - DNA, 25 bp, probe
tgggtacctcacccagatatcatcc

SEQ ID NO: 265118 - DNA, 25 bp, probe
tggtgatggccctcacgtatgagga

SEQ ID NO: 265119 - DNA, 25 bp, probe
tggtgattacagtagcactttggga

SEQ ID NO: 265120 - DNA, 25 bp, probe
tggtcttatcatggacaatttgggc

SEQ ID NO: 265121 - DNA, 25 bp, probe
tgagtctattcagctccaattttca

SEQ ID NO: 265122 - DNA, 25 bp, probe
tgagtctattcagctccaattttca

SEQ ID NO: 265123 - DNA, 25 bp, probe
tggtgattaaactccattgttcagg

SEQ ID NO: 265124 - DNA, 25 bp, probe
tgggttaatccatgttcaattcaag

SEQ ID NO: 265125 - DNA, 25 bp, probe
tggggtagattatgatttaggaagc

SEQ ID NO: 265126 - DNA, 25 bp, probe
tggggagagtccggtttactgaccg

SEQ ID NO: 265127 - DNA, 25 bp, probe
tgggaggttacctttctacaaccag

SEQ ID NO: 265128 - DNA, 25 bp, probe
tgggggtatattttgtaaccactgg

SEQ ID NO: 265129 - DNA, 25 bp, probe
tggggtattattttgtggcccgtga

SEQ ID NO: 265130 - DNA, 25 bp, probe
tgggttttcactttgtcacccagtc

SEQ ID NO: 265131 - DNA, 25 bp, probe
tgggttcatccaggttgttcccagc

SEQ ID NO: 265132 - DNA, 25 bp, probe
tgggctcttcaaggtctttacccca

SEQ ID NO: 265133 - DNA, 25 bp, probe
tgggtgttcaaggcccttacaccct

SEQ ID NO: 265134 - DNA, 25 bp, probe
tgggtttccagtccactgaaacacc

SEQ ID NO: 265135 - DNA, 25 bp, probe
tggtgttgccgcgccatctgccacc

SEQ ID NO: 265136 - DNA, 25 bp, probe
tggtgtacatgccaggcgacgtgcc

SEQ ID NO: 265137 - DNA, 25 bp, probe
tggtgcttctggtggactctgcacc

SEQ ID NO: 265138 - DNA, 25 bp, probe
tggtctatcttctgcatgaacccat

SEQ ID NO: 265139 - DNA, 25 bp, probe
tggtccctcatctacatggacagcc

SEQ ID NO: 265140 - DNA, 25 bp, probe
tggtctcttctatgcagtgggcact

SEQ ID NO: 265141 - DNA, 25 bp, probe
tggtcttgtctatgcaggcatgcac

SEQ ID NO: 265142 - DNA, 25 bp, probe
tggtgacgtcagagcaggtgacacg

SEQ ID NO: 265143 - DNA, 25 bp, probe
tggtgacccagatgcacagagctct

SEQ ID NO: 265144 - DNA, 25 bp, probe
tggtgacccagatgcacagagctct

SEQ ID NO: 265145 - DNA, 25 bp, probe
tggtgtgcccacagcaaatgctgca

SEQ ID NO: 265146 - DNA, 25 bp, probe
tggtgatgcctaaaggaatgtcacg

SEQ ID NO: 265147 - DNA, 25 bp, probe
tggggactattaccgtgtgcagggc

SEQ ID NO: 265148 - DNA, 25 bp, probe
tggggactttgggcgccaagaagca

SEQ ID NO: 265149 - DNA, 25 bp, probe
tggggactttgggatggcacgagat

SEQ ID NO: 265150 - DNA, 25 bp, probe
tggtggttttaggtgtgcatcgctg

SEQ ID NO: 265151 - DNA, 25 bp, probe
tggtcgtttctatgcattcaggctg

SEQ ID NO: 265152 - DNA, 25 bp, probe
tggtggttactgactgcatccaggt

SEQ ID NO: 265153 - DNA, 25 bp, probe
tggtggtgtttgggctacagtacag

SEQ ID NO: 265154 - DNA, 25 bp, probe
tggggttgttggcctgaagatgccc

SEQ ID NO: 265155 - DNA, 25 bp, probe
tgggctccttctggaagcagttgct

SEQ ID NO: 265156 - DNA, 25 bp, probe
tgggtctctactgtatgaactgctg

SEQ ID NO: 265157 - DNA, 25 bp, probe
tggtggcattcctttaggaatgctg

SEQ ID NO: 265158 - DNA, 25 bp, probe
tggtctcttggaattatggcaattg

SEQ ID NO: 265159 - DNA, 25 bp, probe
tggtctctgggtatcatggctattg

SEQ ID NO: 265160 - DNA, 25 bp, probe
tggtcttcgagtatatgcggcacgg

SEQ ID NO: 265161 - DNA, 25 bp, probe
tggtctgtgggctgtatcatggcag

SEQ ID NO: 265162 - DNA, 25 bp, probe
tggtgtgtgggaaggccatgacaga

SEQ ID NO: 265163 - DNA, 25 bp, probe
tggtgtgtgggaaggccatgacaga

SEQ ID NO: 265164 - DNA, 25 bp, probe
tggtgttagtgatgctggagaagag

SEQ ID NO: 265165 - DNA, 25 bp, probe
tggtgttagtgatgctggagaagag

SEQ ID NO: 265166 - DNA, 25 bp, probe
tggggctcagatggactgggaggag

SEQ ID NO: 265167 - DNA, 25 bp, probe
tggggccctgaaatggggtgggagg

SEQ ID NO: 265168 - DNA, 25 bp, probe
tggggccctgaaatggggtgggagg

SEQ ID NO: 265169 - DNA, 25 bp, probe
tggggactggacaatttggggtagt

SEQ ID NO: 265170 - DNA, 25 bp, probe
tggggaggtcacctttgggtgtgcg

SEQ ID NO: 265171 - DNA, 25 bp, probe
tggggcctgtcctaagtgagggtct

SEQ ID NO: 265172 - DNA, 25 bp, probe
tggggacagacctctctgaagtgtc

SEQ ID NO: 265173 - DNA, 25 bp, probe
tggggaaggcccttatgacatggtg

SEQ ID NO: 265174 - DNA, 25 bp, probe
tgggggaggccctgggcaggatgtt

SEQ ID NO: 265175 - DNA, 25 bp, probe
tgggggactcggcgggggagtcatt

SEQ ID NO: 265176 - DNA, 25 bp, probe
tgggggactcggcgggggagtcatt

SEQ ID NO: 265177 - DNA, 25 bp, probe
tggggaggcaagtgtggggggtcct

SEQ ID NO: 265178 - DNA, 25 bp, probe
tggtgaagccaagcgggaggggagc

SEQ ID NO: 265179 - DNA, 25 bp, probe
tggtgaagccaagcgggaggggagc

SEQ ID NO: 265180 - DNA, 25 bp, probe
tggggaacaagggggctgtgggcgt

SEQ ID NO: 265181 - DNA, 25 bp, probe
tgggggcattttgtgggtggagggc

SEQ ID NO: 265182 - DNA, 25 bp, probe
tgggggcattttgtgggtggagggc

SEQ ID NO: 265183 - DNA, 25 bp, probe
tgggtggttttgctggatgtttggt

SEQ ID NO: 265184 - DNA, 25 bp, probe
tgggcgtttgttgttgcattgttgg

SEQ ID NO: 265185 - DNA, 25 bp, probe
tgggagttgtttattcctgctcgtg

SEQ ID NO: 265186 - DNA, 25 bp, probe
tgggacttgctcttatgttgcccca

SEQ ID NO: 265187 - DNA, 25 bp, probe
tggggtctctgctatatgtatctat

SEQ ID NO: 265188 - DNA, 25 bp, probe
tgggtttctgtaagtttttcctcat

SEQ ID NO: 265189 - DNA, 25 bp, probe
tgggtattttagctcttgttctcct

SEQ ID NO: 265190 - DNA, 25 bp, probe
tgggttttctcattgtctttttgca

SEQ ID NO: 265191 - DNA, 25 bp, probe
tgggttttctcattgtctttttgca

SEQ ID NO: 265192 - DNA, 25 bp, probe
tggtggtgttcgtggtgttcatcca

SEQ ID NO: 265193 - DNA, 25 bp, probe
tggtgagggccgtggtcatgacacc

SEQ ID NO: 265194 - DNA, 25 bp, probe
tggtgagggccgtggtcatgacacc

SEQ ID NO: 265195 - DNA, 25 bp, probe
tggggggtcatgagtgccaacccca

SEQ ID NO: 265196 - DNA, 25 bp, probe
tggggggatctcagagcttacaggc

SEQ ID NO: 265197 - DNA, 25 bp, probe
tggtgaggtaccacagcttgtgctg

SEQ ID NO: 265198 - DNA, 25 bp, probe
tggtgaatgtctgttcagctcttct

SEQ ID NO: 265199 - DNA, 25 bp, probe
tggtgacttcaaattctcttcatct

SEQ ID NO: 265200 - DNA, 25 bp, probe
tggtgatctagacagcttcttcctg

SEQ ID NO: 265201 - DNA, 25 bp, probe
tggtgatctagacagcttcttcctg

SEQ ID NO: 265202 - DNA, 25 bp, probe
tggtgccacaactgtttatcctttt

SEQ ID NO: 265203 - DNA, 25 bp, probe
tggtggatagaatgtctttgcccat

SEQ ID NO: 265204 - DNA, 25 bp, probe
tggtgtttgaatattgtgaccacac

SEQ ID NO: 265205 - DNA, 25 bp, probe
tggtgcttgtacaactgtgcggcca

SEQ ID NO: 265206 - DNA, 25 bp, probe
tggtgtttacagtgtgcccacatct

SEQ ID NO: 265207 - DNA, 25 bp, probe
tggtgtttacagtgtgcccacatct

SEQ ID NO: 265208 - DNA, 25 bp, probe
tgtgtattccattccgctcgccaca

SEQ ID NO: 265209 - DNA, 25 bp, probe
tgggaatcctatactctgagcccat

SEQ ID NO: 265210 - DNA, 25 bp, probe
tgggccatggttaccaagtccctaa

SEQ ID NO: 265211 - DNA, 25 bp, probe
tgggcctggtagagccaggcaccca

SEQ ID NO: 265212 - DNA, 25 bp, probe
tggtgacatggcgggtgcgaggccc

SEQ ID NO: 265213 - DNA, 25 bp, probe
tgacttcagcgaagcggtcgagccc

SEQ ID NO: 265214 - DNA, 25 bp, probe
tgatcctctgcgtgggagggcttgg

SEQ ID NO: 265215 - DNA, 25 bp, probe
tctccgggatggtgcggagccgggg

SEQ ID NO: 265216 - DNA, 25 bp, probe
tgatcccggtggtgggatccacgct

SEQ ID NO: 265217 - DNA, 25 bp, probe
tgtgcccaggggtgagtgtttctca

SEQ ID NO: 265218 - DNA, 25 bp, probe
tgtgtgcctggctaagtgggtttct

SEQ ID NO: 265219 - DNA, 25 bp, probe
tgtgtgcctggctaagtgggtttct

SEQ ID NO: 265220 - DNA, 25 bp, probe
tggtccactgtgaagctgggttctc

SEQ ID NO: 265221 - DNA, 25 bp, probe
tggtgcagttgtatgctgtggtttc

SEQ ID NO: 265222 - DNA, 25 bp, probe
tggtgagttcagtagctttggtatt

SEQ ID NO: 265223 - DNA, 25 bp, probe
tggtgaggtccaagctgttgctgtt

SEQ ID NO: 265224 - DNA, 25 bp, probe
tggtgtggtgcagggatcctgatgt

SEQ ID NO: 265225 - DNA, 25 bp, probe
tggtgagagtgtggctacctctgcg

SEQ ID NO: 265226 - DNA, 25 bp, probe
tggtgcagttgtatggcgtctgcac

SEQ ID NO: 265227 - DNA, 25 bp, probe
tggtgcgtgtgaatctgtgggcgcc

SEQ ID NO: 265228 - DNA, 25 bp, probe
tggtgtgtctgaacgatggccgcat

SEQ ID NO: 265229 - DNA, 25 bp, probe
tggtgtgtctgaacgatggccgcat

SEQ ID NO: 265230 - DNA, 25 bp, probe
tggtgctgtctatgcacaggtgtga

SEQ ID NO: 265231 - DNA, 25 bp, probe
tggtgcgtctactgatggagtgggg

SEQ ID NO: 265232 - DNA, 25 bp, probe
tggtcgatcacaactggggaggagg

SEQ ID NO: 265233 - DNA, 25 bp, probe
tggggcggcataatgaagggtgaag

SEQ ID NO: 265234 - DNA, 25 bp, probe
tggggatggtacagggtgtgacaac

SEQ ID NO: 265235 - DNA, 25 bp, probe
tgggagattttcacctatggcaaac

SEQ ID NO: 265236 - DNA, 25 bp, probe
tgggagattttcacctatggcaaac

SEQ ID NO: 265237 - DNA, 25 bp, probe
tgggtgtttatcacgttcagagaaa

SEQ ID NO: 265238 - DNA, 25 bp, probe
tggtgctggtttatgttctaggaac

SEQ ID NO: 265239 - DNA, 25 bp, probe
tggtgctggtctcagtgtcagtgat

SEQ ID NO: 265240 - DNA, 25 bp, probe
tggtgtggatcgtcatgtatactta

SEQ ID NO: 265241 - DNA, 25 bp, probe
tgtgtgtattcacgcagttactcgc

SEQ ID NO: 265242 - DNA, 25 bp, probe
tgtgtgtattcacgcagttactcgc

SEQ ID NO: 265243 - DNA, 25 bp, probe
tggtgtatctcaggagctcttctct

SEQ ID NO: 265244 - DNA, 25 bp, probe
tggtgctcatcttggagctgtgctc

SEQ ID NO: 265245 - DNA, 25 bp, probe
tggtgtgactcagtatgctctgctg

SEQ ID NO: 265246 - DNA, 25 bp, probe
tggtgtgactcagtatgctctgctg

SEQ ID NO: 265247 - DNA, 25 bp, probe
tggtggactatgaacactgctccag

SEQ ID NO: 265248 - DNA, 25 bp, probe
tggtggctgttgaacacctctgcac

SEQ ID NO: 265249 - DNA, 25 bp, probe
tggtggcatttttatcgtgctcatc

SEQ ID NO: 265250 - DNA, 25 bp, probe
tggtgagcccttgaggtgtgtctcc

SEQ ID NO: 265251 - DNA, 25 bp, probe
tggtgacctcttagcgggtggattt

SEQ ID NO: 265252 - DNA, 25 bp, probe
tggtgcacctgtgctgggtgcgtag

SEQ ID NO: 265253 - DNA, 25 bp, probe
tggtgaacagtgctcttgtggtagg

SEQ ID NO: 265254 - DNA, 25 bp, probe
tgggtgactggcctctagtttatat

SEQ ID NO: 265255 - DNA, 25 bp, probe
tggggagtcggttagtcattgatag

SEQ ID NO: 265256 - DNA, 25 bp, probe
tggggaggggtattcttcatgcagg

SEQ ID NO: 265257 - DNA, 25 bp, probe
tggtgaatggcaagtattctctcca

SEQ ID NO: 265258 - DNA, 25 bp, probe
tggtgaacagcaacttggtctgcaa

SEQ ID NO: 265259 - DNA, 25 bp, probe
tggtgagatcagcatcgggactcca

SEQ ID NO: 265260 - DNA, 25 bp, probe
tggtgcacaaggactggaactccaa

SEQ ID NO: 265261 - DNA, 25 bp, probe
tggacaggcaccaatttctttaaag

SEQ ID NO: 265262 - DNA, 25 bp, probe
tggtgcgagctggcacccacatcct

SEQ ID NO: 265263 - DNA, 25 bp, probe
tggggagctgcccagcaagcaaatg

SEQ ID NO: 265264 - DNA, 25 bp, probe
tggggatgcccaaggccagaatgac

SEQ ID NO: 265265 - DNA, 25 bp, probe
tggtggacctcatggcccacatggc

SEQ ID NO: 265266 - DNA, 25 bp, probe
tggtgcgaaggcacccgacatacag

SEQ ID NO: 265267 - DNA, 25 bp, probe
tggtggggcagcaccgtgaagacga

SEQ ID NO: 265268 - DNA, 25 bp, probe
tggtggaacagcaaccggtgccacc

SEQ ID NO: 265269 - DNA, 25 bp, probe
tggggtactacaacgggcacacgaa

SEQ ID NO: 265270 - DNA, 25 bp, probe
tggtggtacgacaaaggagagtgcg

SEQ ID NO: 265271 - DNA, 25 bp, probe
tggggtgaccacagaggagtgccag

SEQ ID NO: 265272 - DNA, 25 bp, probe
tgggggactcaattggagcggccgt

SEQ ID NO: 265273 - DNA, 25 bp, probe
tgggggactcaattggagcggccgt

SEQ ID NO: 265274 - DNA, 25 bp, probe
tgggtggttctaagccaggagccga

SEQ ID NO: 265275 - DNA, 25 bp, probe
tgggtggttctaagccaggagccga

SEQ ID NO: 265276 - DNA, 25 bp, probe
tgggtggttctaagccaggagccga

SEQ ID NO: 265277 - DNA, 25 bp, probe
tggggagtggtttccaggagctgcc

SEQ ID NO: 265278 - DNA, 25 bp, probe
tgggctggccgatgtacagggacac

SEQ ID NO: 265279 - DNA, 25 bp, probe
tggggtctgctggcgaacggcagaa

SEQ ID NO: 265280 - DNA, 25 bp, probe
tggggacgctgtcacaggggacagg

SEQ ID NO: 265281 - DNA, 25 bp, probe
tgggacacgtggggagtggggtggg

SEQ ID NO: 265282 - DNA, 25 bp, probe
tggtgacctgggaatgggggcagcc

SEQ ID NO: 265283 - DNA, 25 bp, probe
tggtggtcaggatgggtgggagccc

SEQ ID NO: 265284 - DNA, 25 bp, probe
tggtgtgccggatcggcgattggct

SEQ ID NO: 265285 - DNA, 25 bp, probe
tggtggctcaaatctccttatggat

SEQ ID NO: 265286 - DNA, 25 bp, probe
tggtggctcaaatctccttatggat

SEQ ID NO: 265287 - DNA, 25 bp, probe
tggtgcgctgcatgagactacaaag

SEQ ID NO: 265288 - DNA, 25 bp, probe
tggtggctgcatggcaggtcttaag

SEQ ID NO: 265289 - DNA, 25 bp, probe
tggtgggtggcacatgcttataaca

SEQ ID NO: 265290 - DNA, 25 bp, probe
tggtgcctgtggagaggtaaagctg

SEQ ID NO: 265291 - DNA, 25 bp, probe
tggtgcctctggacagcatggggaa

SEQ ID NO: 265292 - DNA, 25 bp, probe
tggtggctcggtacaggttgtaagt

SEQ ID NO: 265293 - DNA, 25 bp, probe
tggggcttggctccaagttcaagga

SEQ ID NO: 265294 - DNA, 25 bp, probe
tgggtgaagcgcctcagttacacag

SEQ ID NO: 265295 - DNA, 25 bp, probe
tgtggcgacgggtgatgctcaagga

SEQ ID NO: 265296 - DNA, 25 bp, probe
tggggacagggaggacccagagctg

SEQ ID NO: 265297 - DNA, 25 bp, probe
tgggtgacagagcaagaccccgtcc

SEQ ID NO: 265298 - DNA, 25 bp, probe
tgggtaaagcaatactgccgctgcc

SEQ ID NO: 265299 - DNA, 25 bp, probe
tgtggtggaacagcaaccggtgcca

SEQ ID NO: 265300 - DNA, 25 bp, probe
tgtggtggaacagcaaccggtgcca

SEQ ID NO: 265301 - DNA, 25 bp, probe
tgggtctgacaaggacccgtgtcac

SEQ ID NO: 265302 - DNA, 25 bp, probe
tgagtattgacgtcgacacggtgtc

SEQ ID NO: 265303 - DNA, 25 bp, probe
tggtgactttgtggaccgaggctcc

SEQ ID NO: 265304 - DNA, 25 bp, probe
tggtgaattgattcgacctgactgc

SEQ ID NO: 265305 - DNA, 25 bp, probe
tggtggtctgattcataccctagcc

SEQ ID NO: 265306 - DNA, 25 bp, probe
tggtgatactgtcaagccctatcct

SEQ ID NO: 265307 - DNA, 25 bp, probe
tgggttcctgaatgcaccataatcg

SEQ ID NO: 265308 - DNA, 25 bp, probe
tggggtttgtagtcccaacttgctg

SEQ ID NO: 265309 - DNA, 25 bp, probe
tggggtattgtcaccgacagtggcc

SEQ ID NO: 265310 - DNA, 25 bp, probe
tgtggggacttctcaggtcgtgtcc

SEQ ID NO: 265311 - DNA, 25 bp, probe
tgtctgggcttgctacaggtgggtc

SEQ ID NO: 265312 - DNA, 25 bp, probe
tgtctgggcttgctacaggtgggtc

SEQ ID NO: 265313 - DNA, 25 bp, probe
tggtgcatggttctaagcgtgcccc

SEQ ID NO: 265314 - DNA, 25 bp, probe
tggtgcgtgtgtgtgaagtgaccta

SEQ ID NO: 265315 - DNA, 25 bp, probe
tggtgcagaggtgagcagaggagtc

SEQ ID NO: 265316 - DNA, 25 bp, probe
tggtgctgcggtcggagagcgagga

SEQ ID NO: 265317 - DNA, 25 bp, probe
tggtgtgtgtgaatgcagaagggaa

SEQ ID NO: 265318 - DNA, 25 bp, probe
tggtgatggagtacgccagaggagg

SEQ ID NO: 265319 - DNA, 25 bp, probe
tgggagagattagacactggaggtt

SEQ ID NO: 265320 - DNA, 25 bp, probe
tggggaacatagaactcatgacgga

SEQ ID NO: 265321 - DNA, 25 bp, probe
tggtgctgaaacaaaggagacggaa

SEQ ID NO: 265322 - DNA, 25 bp, probe
tgggctcgaagcacaggagagacca

SEQ ID NO: 265323 - DNA, 25 bp, probe
tggtgaagtcacaggtgcaagccca

SEQ ID NO: 265324 - DNA, 25 bp, probe
tgggaaatccctcgagaatccctgc

SEQ ID NO: 265325 - DNA, 25 bp, probe
tgggaattccctcggaagaacttgg

SEQ ID NO: 265326 - DNA, 25 bp, probe
tggtgaacctggcggatggcaacgg

SEQ ID NO: 265327 - DNA, 25 bp, probe
tggtgaagcacagggagagtgggaa

SEQ ID NO: 265328 - DNA, 25 bp, probe
tggtgaatctcttggaagtgtgtaa

SEQ ID NO: 265329 - DNA, 25 bp, probe
tgggaactctgacaagggctgacct

SEQ ID NO: 265330 - DNA, 25 bp, probe
tgggaagtctgtcgattggtggtcc

SEQ ID NO: 265331 - DNA, 25 bp, probe
tgtggaagatgacaaggagggtcac

SEQ ID NO: 265332 - DNA, 25 bp, probe
tgggaaatgaggaggggcccgagtc

SEQ ID NO: 265333 - DNA, 25 bp, probe
tgggagaagaggtggtggtcgtttc

SEQ ID NO: 265334 - DNA, 25 bp, probe
tgtggagacgggttagtggggcttt

SEQ ID NO: 265335 - DNA, 25 bp, probe
tgtggaacctcttttggaggacgtt

SEQ ID NO: 265336 - DNA, 25 bp, probe
tgggatacctgcgcttgaaggacat

SEQ ID NO: 265337 - DNA, 25 bp, probe
tgggtatttttctgaagatacatca

SEQ ID NO: 265338 - DNA, 25 bp, probe
tgggttcgtttcagaagtgcctcac

SEQ ID NO: 265339 - DNA, 25 bp, probe
tggtgttgcttatgaggaaggttca

SEQ ID NO: 265340 - DNA, 25 bp, probe
tggtgtggtctacgaggtcagggat

SEQ ID NO: 265341 - DNA, 25 bp, probe
tgggtggatcatctgaggtcgggaa

SEQ ID NO: 265342 - DNA, 25 bp, probe
tgggtgggcatgggaggtaggggtg

SEQ ID NO: 265343 - DNA, 25 bp, probe
tggggtcctggcaaggcgcagggaa

SEQ ID NO: 265344 - DNA, 25 bp, probe
tggggcctcgcgaggcaaggctaca

SEQ ID NO: 265345 - DNA, 25 bp, probe
tggggcctcgcgaggcaaggctaca

SEQ ID NO: 265346 - DNA, 25 bp, probe
tgggtgccatcgagaacaaggtgga

SEQ ID NO: 265347 - DNA, 25 bp, probe
tgggagccttgaaaaaactggagtc

SEQ ID NO: 265348 - DNA, 25 bp, probe
tgggcctttgatagacccacttggg

SEQ ID NO: 265349 - DNA, 25 bp, probe
tgggggttgcattgtccttttagtg

SEQ ID NO: 265350 - DNA, 25 bp, probe
tggggagttccaggacttgcttcat

SEQ ID NO: 265351 - DNA, 25 bp, probe
tggggagttccaggacttgcttcat

SEQ ID NO: 265352 - DNA, 25 bp, probe
tggggagattgctgtgtctatcgtg

SEQ ID NO: 265353 - DNA, 25 bp, probe
tgggagagatcccctggcttgcaga

SEQ ID NO: 265354 - DNA, 25 bp, probe
tgggaagatacggcctgcttctacc

SEQ ID NO: 265355 - DNA, 25 bp, probe
tgggaagatacggcctgcttctacc

SEQ ID NO: 265356 - DNA, 25 bp, probe
tggtggaaggaggcgcactttcctc

SEQ ID NO: 265357 - DNA, 25 bp, probe
tgtgggaaggggcttctcatccact

SEQ ID NO: 265358 - DNA, 25 bp, probe
tgggggagaggcgtttgccatcact

SEQ ID NO: 265359 - DNA, 25 bp, probe
tgggagggagggttgtgtcaggctt

SEQ ID NO: 265360 - DNA, 25 bp, probe
tgggagggagggttgtgtcaggctt

SEQ ID NO: 265361 - DNA, 25 bp, probe
tgtgggggagggttggtggtatatt

SEQ ID NO: 265362 - DNA, 25 bp, probe
tgtgggggagggttggtggtatatt

SEQ ID NO: 265363 - DNA, 25 bp, probe
tggggataagggttgcgggttgtcg

SEQ ID NO: 265364 - DNA, 25 bp, probe
tggggtggaggtcagggtggaggga

SEQ ID NO: 265365 - DNA, 25 bp, probe
tggggtgggagtaacagggcagaaa

SEQ ID NO: 265366 - DNA, 25 bp, probe
tggggggagaggacaaagccacgcc

SEQ ID NO: 265367 - DNA, 25 bp, probe
tggggggagaggacaaagccacgcc

SEQ ID NO: 265368 - DNA, 25 bp, probe
tggtgggggtgtgcagaatgggccc

SEQ ID NO: 265369 - DNA, 25 bp, probe
tgggcgtggggagcaaattgcccag

SEQ ID NO: 265370 - DNA, 25 bp, probe
tggtggttggggtatatctcctcga

SEQ ID NO: 265371 - DNA, 25 bp, probe
tggggctagggtcacagcccctaac

SEQ ID NO: 265372 - DNA, 25 bp, probe
tggggctagggtcacagcccctaac

SEQ ID NO: 265373 - DNA, 25 bp, probe
tgggctgccaggttcaaggccctta

SEQ ID NO: 265374 - DNA, 25 bp, probe
tggtgtcagcaaactcaagtcccat

SEQ ID NO: 265375 - DNA, 25 bp, probe
tggtgtcagcaaactcaagtcccat

SEQ ID NO: 265376 - DNA, 25 bp, probe
tggtggaaaactctacctcatcctt

SEQ ID NO: 265377 - DNA, 25 bp, probe
tggtggaaggcctctaccttcacac

SEQ ID NO: 265378 - DNA, 25 bp, probe
tttggaaggccagactccattccca

SEQ ID NO: 265379 - DNA, 25 bp, probe
tccaggtcaaccatgacccttgcag

SEQ ID NO: 265380 - DNA, 25 bp, probe
tgggttatactcagacccttcgacc

SEQ ID NO: 265381 - DNA, 25 bp, probe
tgggtcttattcagaccccagatca

SEQ ID NO: 265382 - DNA, 25 bp, probe
tggggttcaacttgacgcttgcaaa

SEQ ID NO: 265383 - DNA, 25 bp, probe
tgggaaccaacgtcatcgttgccaa

SEQ ID NO: 265384 - DNA, 25 bp, probe
tgggaacttcagggcggtttcaacg

SEQ ID NO: 265385 - DNA, 25 bp, probe
tgggacaactagggctgcgaatcta

SEQ ID NO: 265386 - DNA, 25 bp, probe
tgggagccacgggattgtaactgga

SEQ ID NO: 265387 - DNA, 25 bp, probe
tggggccagcgtgcattcaaacgca

SEQ ID NO: 265388 - DNA, 25 bp, probe
tggggtagcagtcaataaactcact

SEQ ID NO: 265389 - DNA, 25 bp, probe
tggggtagcagtcaataaactcact

SEQ ID NO: 265390 - DNA, 25 bp, probe
tggggtggtggatcatcaaaacatt

SEQ ID NO: 265391 - DNA, 25 bp, probe
tggtggctggtggtttaaaggttga

SEQ ID NO: 265392 - DNA, 25 bp, probe
tggtgttgactgactttaacaaggt

SEQ ID NO: 265393 - DNA, 25 bp, probe
tgtggttcggaagtctaagcagggc

SEQ ID NO: 265394 - DNA, 25 bp, probe
tgggattgcggccatttcaagacag

SEQ ID NO: 265395 - DNA, 25 bp, probe
tggtgatggaaggttacaagtggca

SEQ ID NO: 265396 - DNA, 25 bp, probe
tggtgtctggtcgtcttcaaggacc

SEQ ID NO: 265397 - DNA, 25 bp, probe
tggtgtctggtcgtcttcaaggacc

SEQ ID NO: 265398 - DNA, 25 bp, probe
tgtggttttccagttaaaacgcaag

SEQ ID NO: 265399 - DNA, 25 bp, probe
tgtggtttaggggaaagagactggg

SEQ ID NO: 265400 - DNA, 25 bp, probe
tgggcatttcacgggaagggttggt

SEQ ID NO: 265401 - DNA, 25 bp, probe
tgggcatttcacgggaagggttggt

SEQ ID NO: 265402 - DNA, 25 bp, probe
tgtgactcttcagatggggagtgtt

SEQ ID NO: 265403 - DNA, 25 bp, probe
tgtgaccgtgccaagaaaacgtaag

SEQ ID NO: 265404 - DNA, 25 bp, probe
tgtgacctggggagaaagttgagtg

SEQ ID NO: 265405 - DNA, 25 bp, probe
tgggctggggtgagaaagccattga

SEQ ID NO: 265406 - DNA, 25 bp, probe
tgggctggggagagaaggccataga

SEQ ID NO: 265407 - DNA, 25 bp, probe
tggggagcggagtgacagtaagcag

SEQ ID NO: 265408 - DNA, 25 bp, probe
tgggcacgcggagaacctcgtgcag

SEQ ID NO: 265409 - DNA, 25 bp, probe
tgagagggcccagaagaccttcgta

SEQ ID NO: 265410 - DNA, 25 bp, probe
tgagagggcccagaagaccttcgta

SEQ ID NO: 265411 - DNA, 25 bp, probe
tgagagggcccagaagaccttcgta

SEQ ID NO: 265412 - DNA, 25 bp, probe
tgggaggccaaggcaggaggattgc

SEQ ID NO: 265413 - DNA, 25 bp, probe
tgggaggccaagacgggcggatcac

SEQ ID NO: 265414 - DNA, 25 bp, probe
tgggagtccaaggtgggcggatcac

SEQ ID NO: 265415 - DNA, 25 bp, probe
tgggagtggccagtgttggcggttc

SEQ ID NO: 265416 - DNA, 25 bp, probe
tggggtgtggcactttggggagacc

SEQ ID NO: 265417 - DNA, 25 bp, probe
tggggagcagggaacgggacaggcc

SEQ ID NO: 265418 - DNA, 25 bp, probe
tggtggagcagacaaccctgcacaa

SEQ ID NO: 265419 - DNA, 25 bp, probe
tggggagcatgaacaacactcgcct

SEQ ID NO: 265420 - DNA, 25 bp, probe
tggtgtatgataacaacagcagcac

SEQ ID NO: 265421 - DNA, 25 bp, probe
tgtgtctgtaaagtgctcacagctc

SEQ ID NO: 265422 - DNA, 25 bp, probe
tggtgtgctccaaggtgtcacatca

SEQ ID NO: 265423 - DNA, 25 bp, probe
tggggtcagcagaggtaccacgaag

SEQ ID NO: 265424 - DNA, 25 bp, probe
tggggtcagcagaggtaccacgaag

SEQ ID NO: 265425 - DNA, 25 bp, probe
tggggaagctgaggcgtaccccaca

SEQ ID NO: 265426 - DNA, 25 bp, probe
tggggcacctgagcagaatctaccc

SEQ ID NO: 265427 - DNA, 25 bp, probe
tgtggacaccagtgtgaaaatacac

SEQ ID NO: 265428 - DNA, 25 bp, probe
tgtggacaccagtgtgaaaatacac

SEQ ID NO: 265429 - DNA, 25 bp, probe
tgggaagctcaatgatacaaacatt

SEQ ID NO: 265430 - DNA, 25 bp, probe
tgtgaagtcgtattatacagtacat

SEQ ID NO: 265431 - DNA, 25 bp, probe
tgtggacctgttaacaatcatactt

SEQ ID NO: 265432 - DNA, 25 bp, probe
tggtggccgtgaaacagctgcagca

SEQ ID NO: 265433 - DNA, 25 bp, probe
tggtggcccagatgacggcagaaga

SEQ ID NO: 265434 - DNA, 25 bp, probe
tggtggcggcgaagaagagaaagat

SEQ ID NO: 265435 - DNA, 25 bp, probe
tggtgggaggaaagagtgcaaggtc

SEQ ID NO: 265436 - DNA, 25 bp, probe
tgggggagggctggactgcaaggcc

SEQ ID NO: 265437 - DNA, 25 bp, probe
tgggggagggctggactgcaaggcc

SEQ ID NO: 265438 - DNA, 25 bp, probe
tggggccaggaccatggccgaagcc

SEQ ID NO: 265439 - DNA, 25 bp, probe
tgggagccagttggatagccccatg

SEQ ID NO: 265440 - DNA, 25 bp, probe
tggtgggcttcagatgagtcctatg

SEQ ID NO: 265441 - DNA, 25 bp, probe
tgggggcttcagaatgggccctgaa

SEQ ID NO: 265442 - DNA, 25 bp, probe
tgggggtagcagactggagcccagg

SEQ ID NO: 265443 - DNA, 25 bp, probe
tgggggtggaggagactcctctgga

SEQ ID NO: 265444 - DNA, 25 bp, probe
tggggcgtggcaagggaatagcgac

SEQ ID NO: 265445 - DNA, 25 bp, probe
tgggggttgcaagggaacagagagg

SEQ ID NO: 265446 - DNA, 25 bp, probe
tggtgtggaaccagggagctgtggg

SEQ ID NO: 265447 - DNA, 25 bp, probe
tggtggagaacgtgggcatgctgct

SEQ ID NO: 265448 - DNA, 25 bp, probe
tggggtaccacatggtccatttcat

SEQ ID NO: 265449 - DNA, 25 bp, probe
tgtaggtaaatctagtttacttcct

SEQ ID NO: 265450 - DNA, 25 bp, probe
tgtaggtaaatctagtttacttcct

SEQ ID NO: 265451 - DNA, 25 bp, probe
tgtctggctaattttttgtattttt

SEQ ID NO: 265452 - DNA, 25 bp, probe
tggtggtgtttctttgtacattttt

SEQ ID NO: 265453 - DNA, 25 bp, probe
tggtggtgttctttaaggaatttct

SEQ ID NO: 265454 - DNA, 25 bp, probe
tggtggccccaaattagagttttct

SEQ ID NO: 265455 - DNA, 25 bp, probe
tggggcagggtgtttagaattttct

SEQ ID NO: 265456 - DNA, 25 bp, probe
tggggaggggagttccaagtgtgcc

SEQ ID NO: 265457 - DNA, 25 bp, probe
tgggggtgagggtagcccttgagcc

SEQ ID NO: 265458 - DNA, 25 bp, probe
tgggggtgtggatagcagcctgtac

SEQ ID NO: 265459 - DNA, 25 bp, probe
tggtgggattgttgtacagcctctc

SEQ ID NO: 265460 - DNA, 25 bp, probe
tgggggatgagtttgccagactccc

SEQ ID NO: 265461 - DNA, 25 bp, probe
tgggtggaaggtggctgcagacccc

SEQ ID NO: 265462 - DNA, 25 bp, probe
tgggttacgaggctgcagacttcca

SEQ ID NO: 265463 - DNA, 25 bp, probe
tggggtaggaggatgggctcgccca

SEQ ID NO: 265464 - DNA, 25 bp, probe
tggggtaggaggatgggctcgccca

SEQ ID NO: 265465 - DNA, 25 bp, probe
tgggtgaaggggatagggcgaggct

SEQ ID NO: 265466 - DNA, 25 bp, probe
tgggagaaggggtttggaggacaat

SEQ ID NO: 265467 - DNA, 25 bp, probe
tgggagaaggggtttggaggacaat

SEQ ID NO: 265468 - DNA, 25 bp, probe
tggggaagacgttcttgacgtgttt

SEQ ID NO: 265469 - DNA, 25 bp, probe
tggggagaagagtatgcttcctttt

SEQ ID NO: 265470 - DNA, 25 bp, probe
tggggtcaacagttttcctatgctt

SEQ ID NO: 265471 - DNA, 25 bp, probe
tggggtcaacagttttcctatgctt

SEQ ID NO: 265472 - DNA, 25 bp, probe
tggggtcatagatgtttccttgcct

SEQ ID NO: 265473 - DNA, 25 bp, probe
tggggtcatagatgtttccttgcct

SEQ ID NO: 265474 - DNA, 25 bp, probe
tggggtcatagatgtttccttgcct

SEQ ID NO: 265475 - DNA, 25 bp, probe
tggggacatcaatggcttttcagcc

SEQ ID NO: 265476 - DNA, 25 bp, probe
tggggacatcaatggcttttcagcc

SEQ ID NO: 265477 - DNA, 25 bp, probe
tggggatctggattcctggttccct

SEQ ID NO: 265478 - DNA, 25 bp, probe
tggggaggtgtcacatggtgcccct

SEQ ID NO: 265479 - DNA, 25 bp, probe
tggggcaggtgaagacttggtgcca

SEQ ID NO: 265480 - DNA, 25 bp, probe
tggggcaggtgaagacttggtgcca

SEQ ID NO: 265481 - DNA, 25 bp, probe
tgggtaggtgacctgcttggatcta

SEQ ID NO: 265482 - DNA, 25 bp, probe
tgggccagggactggtggtcaagat

SEQ ID NO: 265483 - DNA, 25 bp, probe
tgggtgactggatgggggtacagaa

SEQ ID NO: 265484 - DNA, 25 bp, probe
tgggtgactggatgggggtacagaa

SEQ ID NO: 265485 - DNA, 25 bp, probe
tgggtcctgtgcaagggctggaact

SEQ ID NO: 265486 - DNA, 25 bp, probe
tgggtcctgggagggtgggtgaaat

SEQ ID NO: 265487 - DNA, 25 bp, probe
tgggtccgaggcgggggacagaagg

SEQ ID NO: 265488 - DNA, 25 bp, probe
tgggcaacagggtcggggaagcagc

SEQ ID NO: 265489 - DNA, 25 bp, probe
tgggaaaggataccgaggcaagagg

SEQ ID NO: 265490 - DNA, 25 bp, probe
tgggaagaggtccctaggctgcaga

SEQ ID NO: 265491 - DNA, 25 bp, probe
tggtggaagcggtcttgatttcaga

SEQ ID NO: 265492 - DNA, 25 bp, probe
tggtggtgagcgttctcctagaaga

SEQ ID NO: 265493 - DNA, 25 bp, probe
tggtgtggagatactcttagagaag

SEQ ID NO: 265494 - DNA, 25 bp, probe
tgggcagcacagactctcttaataa

SEQ ID NO: 265495 - DNA, 25 bp, probe
tggtggatctcacctctttgaaagc

SEQ ID NO: 265496 - DNA, 25 bp, probe
tggtggttcatgcctgtaatcccag

SEQ ID NO: 265497 - DNA, 25 bp, probe
tggtggctcacgcctgtaatcccag

SEQ ID NO: 265498 - DNA, 25 bp, probe
tgggtgtactccatcaacaacgttc

SEQ ID NO: 265499 - DNA, 25 bp, probe
tgtggttgacccagatatctccgtt

SEQ ID NO: 265500 - DNA, 25 bp, probe
tgggactaacaacatgatcttcttt

SEQ ID NO: 265501 - DNA, 25 bp, probe
tgggtcaacagatgtaagcgtctta

SEQ ID NO: 265502 - DNA, 25 bp, probe
tgtggccagaagtggaatctttaca

SEQ ID NO: 265503 - DNA, 25 bp, probe
tggggctgagagtgggactctagcc

SEQ ID NO: 265504 - DNA, 25 bp, probe
tggggtcaggtatgtgagctctatg

SEQ ID NO: 265505 - DNA, 25 bp, probe
tggggaccattatgtgcagctgcca

SEQ ID NO: 265506 - DNA, 25 bp, probe
tggggtcctatatgagccatgtcct

SEQ ID NO: 265507 - DNA, 25 bp, probe
tgggcagcttgttgaaggctcgtca

SEQ ID NO: 265508 - DNA, 25 bp, probe
tgtggcagggggatggcaggttggg

SEQ ID NO: 265509 - DNA, 25 bp, probe
tgggagcgtgggaggcgggagtgga

SEQ ID NO: 265510 - DNA, 25 bp, probe
tgggagcgtgggaggcgggagtgga

SEQ ID NO: 265511 - DNA, 25 bp, probe
tgggagcgtgggaggcgggagtgga

SEQ ID NO: 265512 - DNA, 25 bp, probe
tgggacggggagggtgggatggacg

SEQ ID NO: 265513 - DNA, 25 bp, probe
tggtggggaaggggtggagctgggg

SEQ ID NO: 265514 - DNA, 25 bp, probe
tggtggggagaggcatggctggggt

SEQ ID NO: 265515 - DNA, 25 bp, probe
tggggagtagtggatgtctgcaaaa

SEQ ID NO: 265516 - DNA, 25 bp, probe
tggggtgtgagtgcgtatgaaagtg

SEQ ID NO: 265517 - DNA, 25 bp, probe
tggggttcctccgtgaagaagacca

SEQ ID NO: 265518 - DNA, 25 bp, probe
tgggggctcccagttacagaaaggc

SEQ ID NO: 265519 - DNA, 25 bp, probe
tgggggtcaccaattcaaaaagcgg

SEQ ID NO: 265520 - DNA, 25 bp, probe
tgggagagaccctttaagagaagag

SEQ ID NO: 265521 - DNA, 25 bp, probe
tggggagactcctcagtagggcaac

SEQ ID NO: 265522 - DNA, 25 bp, probe
tggggaaccgcgagatagggcagat

SEQ ID NO: 265523 - DNA, 25 bp, probe
tggggcagatcccagagggcgaggg

SEQ ID NO: 265524 - DNA, 25 bp, probe
tggggcagcaccgtgaagacgaata

SEQ ID NO: 265525 - DNA, 25 bp, probe
tggggcagatctgtagtaaacaatg

SEQ ID NO: 265526 - DNA, 25 bp, probe
tggggcgactcctgatgaagcacaa

SEQ ID NO: 265527 - DNA, 25 bp, probe
tggggcgactcctgatgaagcacaa

SEQ ID NO: 265528 - DNA, 25 bp, probe
tggggaacaagcttgtgcaagaaga

SEQ ID NO: 265529 - DNA, 25 bp, probe
tggggaaacagcatctccaagcagc

SEQ ID NO: 265530 - DNA, 25 bp, probe
tggggaaacagcatctccaagcagc

SEQ ID NO: 265531 - DNA, 25 bp, probe
tggggaaatcaggtgcagcggccat

SEQ ID NO: 265532 - DNA, 25 bp, probe
tggggaaggcgactgagccatgctc

SEQ ID NO: 265533 - DNA, 25 bp, probe
tggtggcagcatggacagtggccct

SEQ ID NO: 265534 - DNA, 25 bp, probe
tggggcagcaagggtgcccagcttt

SEQ ID NO: 265535 - DNA, 25 bp, probe
tggggcagcaagggtgcccagcttt

SEQ ID NO: 265536 - DNA, 25 bp, probe
tgggcacccagtgggagcacacttt

SEQ ID NO: 265537 - DNA, 25 bp, probe
tgggcacccagtgggagcacacttt

SEQ ID NO: 265538 - DNA, 25 bp, probe
tgggagacagcaccgtggacagcaa

SEQ ID NO: 265539 - DNA, 25 bp, probe
tgggagacagcaccgtggacagcaa

SEQ ID NO: 265540 - DNA, 25 bp, probe
tggggacagcgtggtaggcagcagt

SEQ ID NO: 265541 - DNA, 25 bp, probe
tggggacgggcagtacaagcgctgc

SEQ ID NO: 265542 - DNA, 25 bp, probe
tggggagggcgagtcagagcagggc

SEQ ID NO: 265543 - DNA, 25 bp, probe
tggggagggaccctgagcaagtccc

SEQ ID NO: 265544 - DNA, 25 bp, probe
tgtggagaggtaaagctggctttcg

SEQ ID NO: 265545 - DNA, 25 bp, probe
tggggcaggagcaaggctgagttct

SEQ ID NO: 265546 - DNA, 25 bp, probe
tgggcaaaggcagggccacttttga

SEQ ID NO: 265547 - DNA, 25 bp, probe
tgggcaaaggcagggccacttttga

SEQ ID NO: 265548 - DNA, 25 bp, probe
tgtggaaaacaggcccggattcgca

SEQ ID NO: 265549 - DNA, 25 bp, probe
tgggggaccgtggggagatcatcga

SEQ ID NO: 265550 - DNA, 25 bp, probe
tgggatcgtcatgtgggaagtcatg

SEQ ID NO: 265551 - DNA, 25 bp, probe
tgggatggagaactggcctatgtga

SEQ ID NO: 265552 - DNA, 25 bp, probe
tgggtgtaggaggggctgcagcaga

SEQ ID NO: 265553 - DNA, 25 bp, probe
tgggtgtaggaggggctgcagcaga

SEQ ID NO: 265554 - DNA, 25 bp, probe
tggggctctagggttgctggagcct

SEQ ID NO: 265555 - DNA, 25 bp, probe
tgggatctttgagcttgtggaggtg

SEQ ID NO: 265556 - DNA, 25 bp, probe
tgggcttttggattatgtgtacagt

SEQ ID NO: 265557 - DNA, 25 bp, probe
tgggtctgtggacatagggcaattt

SEQ ID NO: 265558 - DNA, 25 bp, probe
tgggtctgtggacatagggcaattt

SEQ ID NO: 265559 - DNA, 25 bp, probe
tgtggtcttgttcacgaggcagatc

SEQ ID NO: 265560 - DNA, 25 bp, probe
tgtggtcttgttcacgaggcagatc

SEQ ID NO: 265561 - DNA, 25 bp, probe
tgtgactttggggtcagcgggcagc

SEQ ID NO: 265562 - DNA, 25 bp, probe
tgtggaatggaagttcgcccgagca

SEQ ID NO: 265563 - DNA, 25 bp, probe
tgtggaatggaagttcgcccgagca

SEQ ID NO: 265564 - DNA, 25 bp, probe
tgtgtaaggaaggattacggccagg

SEQ ID NO: 265565 - DNA, 25 bp, probe
tgggatgtggaacattacagtccaa

SEQ ID NO: 265566 - DNA, 25 bp, probe
tgggatgtggattgagtatctcaga

SEQ ID NO: 265567 - DNA, 25 bp, probe
tgggtgtcagatgatgcctcccagg

SEQ ID NO: 265568 - DNA, 25 bp, probe
tgggtgtcagatgatgcctcccagg

SEQ ID NO: 265569 - DNA, 25 bp, probe
tggtggccatcaaatgcattgccaa

SEQ ID NO: 265570 - DNA, 25 bp, probe
tggtggccatgaatatgcagactgc

SEQ ID NO: 265571 - DNA, 25 bp, probe
tggtggctgatgttcatcgcactct

SEQ ID NO: 265572 - DNA, 25 bp, probe
tgggatgctgattgtctctttgtat

SEQ ID NO: 265573 - DNA, 25 bp, probe
tgtgattaatagtcttattgacatc

SEQ ID NO: 265574 - DNA, 25 bp, probe
tgtgatctcagagtagcccatttcc

SEQ ID NO: 265575 - DNA, 25 bp, probe
tgtgtcacaactgtcatcactgtcc

SEQ ID NO: 265576 - DNA, 25 bp, probe
tgggcacaaggtcctacatgtcgcc

SEQ ID NO: 265577 - DNA, 25 bp, probe
tgggactacgaggctcacgtcccga

SEQ ID NO: 265578 - DNA, 25 bp, probe
tgggaagcctaggaaagataccgaa

SEQ ID NO: 265579 - DNA, 25 bp, probe
tggggagctccagaaggtcaccaga

SEQ ID NO: 265580 - DNA, 25 bp, probe
tgggggctccatgaaggatgcaggc

SEQ ID NO: 265581 - DNA, 25 bp, probe
tgggagtggcctgaagagtcctctg

SEQ ID NO: 265582 - DNA, 25 bp, probe
tgtggacgcactgtggaagctcctc

SEQ ID NO: 265583 - DNA, 25 bp, probe
tgtggacgcactgtggaagctcctc

SEQ ID NO: 265584 - DNA, 25 bp, probe
tgggactattgctgtgatcgtcttt

SEQ ID NO: 265585 - DNA, 25 bp, probe
tgggacaattatttgactacttttt

SEQ ID NO: 265586 - DNA, 25 bp, probe
tgtgtgaaagtatctgactttggaa

SEQ ID NO: 265587 - DNA, 25 bp, probe
tgggataccttactacttgggaatt

SEQ ID NO: 265588 - DNA, 25 bp, probe
tgggatcccttactggatcgtgaaa

SEQ ID NO: 265589 - DNA, 25 bp, probe
tggggtcacttacggatgagtctga

SEQ ID NO: 265590 - DNA, 25 bp, probe
tggggtcacttacggatgagtctga

SEQ ID NO: 265591 - DNA, 25 bp, probe
tgggttcagcgttgaggcagagagc

SEQ ID NO: 265592 - DNA, 25 bp, probe
tggggtcatggggagggtagcacca

SEQ ID NO: 265593 - DNA, 25 bp, probe
tggggctgaaggtcagaagtaatcc

SEQ ID NO: 265594 - DNA, 25 bp, probe
tgggccggagggcaagggatgccag

SEQ ID NO: 265595 - DNA, 25 bp, probe
tgggggtcatggagaagcgggcctg

SEQ ID NO: 265596 - DNA, 25 bp, probe
tggggagccaggagacagcagggtc

SEQ ID NO: 265597 - DNA, 25 bp, probe
tgggatggacggcggacaggcagtc

SEQ ID NO: 265598 - DNA, 25 bp, probe
tgtgaatggccggtgggaaatcttc

SEQ ID NO: 265599 - DNA, 25 bp, probe
tgtcaaggggccctaggaacctcga

SEQ ID NO: 265600 - DNA, 25 bp, probe
tgtcgaaaggtcccaggaacaccgg

SEQ ID NO: 265601 - DNA, 25 bp, probe
tgtcgaaaggtcccaggaacaccgg

SEQ ID NO: 265602 - DNA, 25 bp, probe
tgtggtaaattaattcgagaggaga

SEQ ID NO: 265603 - DNA, 25 bp, probe
tggggaagactattccagagacgaa

SEQ ID NO: 265604 - DNA, 25 bp, probe
tgggagaaactagctctgatcctaa

SEQ ID NO: 265605 - DNA, 25 bp, probe
tggggaaatctatcttgtctgcaag

SEQ ID NO: 265606 - DNA, 25 bp, probe
tggggaaatctatcttgtctgcaag

SEQ ID NO: 265607 - DNA, 25 bp, probe
tggggaccctgaatctttgctagga

SEQ ID NO: 265608 - DNA, 25 bp, probe
tggggagacgtgactctggtggacg

SEQ ID NO: 265609 - DNA, 25 bp, probe
tgggggcaaggcagtagtggacagg

SEQ ID NO: 265610 - DNA, 25 bp, probe
tgtgggtgaaggggatagggcgagg

SEQ ID NO: 265611 - DNA, 25 bp, probe
tgggtggatcaggggacgggatggg

SEQ ID NO: 265612 - DNA, 25 bp, probe
tgggtgtgagagtggacggtatgtg

SEQ ID NO: 265613 - DNA, 25 bp, probe
tgggtggttcaagggcaggtagctg

SEQ ID NO: 265614 - DNA, 25 bp, probe
tgggtggttaaccactggttttcag

SEQ ID NO: 265615 - DNA, 25 bp, probe
tgtggggttccaggtagagtttttg

SEQ ID NO: 265616 - DNA, 25 bp, probe
tgtggaggtttctgtacctcgcttg

SEQ ID NO: 265617 - DNA, 25 bp, probe
tgggctaggtttcaacctgcgcatt

SEQ ID NO: 265618 - DNA, 25 bp, probe
tgtggctacgtcctaaaacctgcct

SEQ ID NO: 265619 - DNA, 25 bp, probe
tgtggcaacggacaaaactctggca

SEQ ID NO: 265620 - DNA, 25 bp, probe
tgggcaacggagtaaacctgctcca

SEQ ID NO: 265621 - DNA, 25 bp, probe
tgggagagccgctataggacgcttc

SEQ ID NO: 265622 - DNA, 25 bp, probe
tgggagagccgctataggacgcttc

SEQ ID NO: 265623 - DNA, 25 bp, probe
tgggaagcggcatcatggcacgcca

SEQ ID NO: 265624 - DNA, 25 bp, probe
tgggaggcggcagaatgcagccaga

SEQ ID NO: 265625 - DNA, 25 bp, probe
tgggagggacactacacagccaagg

SEQ ID NO: 265626 - DNA, 25 bp, probe
tgggggtggagctccatcatcaaat

SEQ ID NO: 265627 - DNA, 25 bp, probe
tgggggagaagggacattccacaac

SEQ ID NO: 265628 - DNA, 25 bp, probe
tgggggagggtggatatccaaacca

SEQ ID NO: 265629 - DNA, 25 bp, probe
tgggcagggggtgatgtgccccaca

SEQ ID NO: 265630 - DNA, 25 bp, probe
tgttggggggatgaggacctcctac

SEQ ID NO: 265631 - DNA, 25 bp, probe
tgtctgaaggggaaaggcattcttt

SEQ ID NO: 265632 - DNA, 25 bp, probe
tgtggacagaggctacccactttgg

SEQ ID NO: 265633 - DNA, 25 bp, probe
tgggtcaagacggatcaggctctcc

SEQ ID NO: 265634 - DNA, 25 bp, probe
tgggtgcaagtaggtctgattgagc

SEQ ID NO: 265635 - DNA, 25 bp, probe
tgggtgggatttccgagctgacgga

SEQ ID NO: 265636 - DNA, 25 bp, probe
tggggagagcttcacagagctcgca

SEQ ID NO: 265637 - DNA, 25 bp, probe
tggggagaagtccagcacgatgcgc

SEQ ID NO: 265638 - DNA, 25 bp, probe
tggggagaagtccagcacgatgcgc

SEQ ID NO: 265639 - DNA, 25 bp, probe
tggggtgacagtcatcatcagggcc

SEQ ID NO: 265640 - DNA, 25 bp, probe
tggggagatcagcatcatcaacatc

SEQ ID NO: 265641 - DNA, 25 bp, probe
tgggctacactatctaacatctggc

SEQ ID NO: 265642 - DNA, 25 bp, probe
tgggctacactgagcaccaggtggt

SEQ ID NO: 265643 - DNA, 25 bp, probe
tgggtaccagatgaccactgacagt

SEQ ID NO: 265644 - DNA, 25 bp, probe
tggggatgccagtaactttgacgac

SEQ ID NO: 265645 - DNA, 25 bp, probe
tggggaggcacagagtttgctgcga

SEQ ID NO: 265646 - DNA, 25 bp, probe
tgggggtcacagagcatgttctcgc

SEQ ID NO: 265647 - DNA, 25 bp, probe
tgggaggcacagcagcctgtatctc

SEQ ID NO: 265648 - DNA, 25 bp, probe
tgggatggcaaaagtgtggttccag

SEQ ID NO: 265649 - DNA, 25 bp, probe
tgggatggcaaaagtgtggttccag

SEQ ID NO: 265650 - DNA, 25 bp, probe
tgggtgatcaagggtgtggttagtg

SEQ ID NO: 265651 - DNA, 25 bp, probe
tgggtgaaactgggtgcgtctgagc

SEQ ID NO: 265652 - DNA, 25 bp, probe
tgggtgcagagcgtggttgtatctg

SEQ ID NO: 265653 - DNA, 25 bp, probe
tgggggacctggtggatgctgagga

SEQ ID NO: 265654 - DNA, 25 bp, probe
tgggaggggatgctactgatgggaa

SEQ ID NO: 265655 - DNA, 25 bp, probe
tgggaggcggagcttgcagtgagcc

SEQ ID NO: 265656 - DNA, 25 bp, probe
tgggcccaggcaggtctgcaagggc

SEQ ID NO: 265657 - DNA, 25 bp, probe
tgggcccagctgcctatgtaaggcc

SEQ ID NO: 265658 - DNA, 25 bp, probe
tgggcccagctgcctatgtaaggcc

SEQ ID NO: 265659 - DNA, 25 bp, probe
tgggcccagctgcctatgtaaggcc

SEQ ID NO: 265660 - DNA, 25 bp, probe
tgggcctcaggttctacaaatgcca

SEQ ID NO: 265661 - DNA, 25 bp, probe
tgggcccaaggaattcagaagagct

SEQ ID NO: 265662 - DNA, 25 bp, probe
tgggcctggcaggactccagatgag

SEQ ID NO: 265663 - DNA, 25 bp, probe
tggggtatgcagggtctggaagttg

SEQ ID NO: 265664 - DNA, 25 bp, probe
tgggcattacgggtgttgaaggtgt

SEQ ID NO: 265665 - DNA, 25 bp, probe
tgggctttcactctggtgaaactgt

SEQ ID NO: 265666 - DNA, 25 bp, probe
tgtgcgccttccccgagtggaaggc

SEQ ID NO: 265667 - DNA, 25 bp, probe
tgtcgcctttcctgggtgacaatga

SEQ ID NO: 265668 - DNA, 25 bp, probe
tgggcctggtcctgagggcaggaca

SEQ ID NO: 265669 - DNA, 25 bp, probe
tggggagggtgaggcagggcaggga

SEQ ID NO: 265670 - DNA, 25 bp, probe
tggggagggtgaggcagggcaggga

SEQ ID NO: 265671 - DNA, 25 bp, probe
tggggaggtgtatgagggactggta

SEQ ID NO: 265672 - DNA, 25 bp, probe
tgggggagctgttgaatgggtcccc

SEQ ID NO: 265673 - DNA, 25 bp, probe
tgggggagctgttgaatgggtcccc

SEQ ID NO: 265674 - DNA, 25 bp, probe
tgggggtgtgcagaatgggccccct

SEQ ID NO: 265675 - DNA, 25 bp, probe
tggggagaggcaacagggcagcccc

SEQ ID NO: 265676 - DNA, 25 bp, probe
tggggacgagatcgaggaccccgcg

SEQ ID NO: 265677 - DNA, 25 bp, probe
tgggacctagtgggaatccccggca

SEQ ID NO: 265678 - DNA, 25 bp, probe
tgggaccagggagaatgcccacagg

SEQ ID NO: 265679 - DNA, 25 bp, probe
tgggtcaagggatgaagacctgcag

SEQ ID NO: 265680 - DNA, 25 bp, probe
tgggatcacaggcatgaaccaccac

SEQ ID NO: 265681 - DNA, 25 bp, probe
tgggatcaagagagaccttctacag

SEQ ID NO: 265682 - DNA, 25 bp, probe
tgggtcacagagtgaaattcgatct

SEQ ID NO: 265683 - DNA, 25 bp, probe
tgggctacaatgcggagttacactc

SEQ ID NO: 265684 - DNA, 25 bp, probe
tgcgggaccagcagaatttgcccta

SEQ ID NO: 265685 - DNA, 25 bp, probe
tgggggcggcaagcattttcttgat

SEQ ID NO: 265686 - DNA, 25 bp, probe
tgtggcccgaaatcgtagtgcttgt

SEQ ID NO: 265687 - DNA, 25 bp, probe
tgggcccaaacagcctcagttaact

SEQ ID NO: 265688 - DNA, 25 bp, probe
tgggcccaacatatccatttttaaa

SEQ ID NO: 265689 - DNA, 25 bp, probe
tgggcccaacatatccatttttaaa

SEQ ID NO: 265690 - DNA, 25 bp, probe
tgggcatccaacaaagttatgttta

SEQ ID NO: 265691 - DNA, 25 bp, probe
tgggaggctgcccattgtttggttg

SEQ ID NO: 265692 - DNA, 25 bp, probe
tgtgggacccctggatatgtggccc

SEQ ID NO: 265693 - DNA, 25 bp, probe
tgtggaactccgggatacgtggccc

SEQ ID NO: 265694 - DNA, 25 bp, probe
tggggtcatcctgagaaggtcatgg

SEQ ID NO: 265695 - DNA, 25 bp, probe
tgggaatatcctggcactgaggtca

SEQ ID NO: 265696 - DNA, 25 bp, probe
tgggacatgaacgagcaggaggtac

SEQ ID NO: 265697 - DNA, 25 bp, probe
tgggcatgctaagggcaaggcttac

SEQ ID NO: 265698 - DNA, 25 bp, probe
tgaggtgtaattgcacaagtaaaaa

SEQ ID NO: 265699 - DNA, 25 bp, probe
tgtggctgtagactgatcacagagt

SEQ ID NO: 265700 - DNA, 25 bp, probe
tgtggctgtagactgatcacagagt

SEQ ID NO: 265701 - DNA, 25 bp, probe
tggggtgcgtcgtcatagagatggt

SEQ ID NO: 265702 - DNA, 25 bp, probe
tggggtgtgttgtcatagagatggt

SEQ ID NO: 265703 - DNA, 25 bp, probe
tgggagatgagaatgtacggctgtg

SEQ ID NO: 265704 - DNA, 25 bp, probe
tgggagatgagaatgtacggctgtg

SEQ ID NO: 265705 - DNA, 25 bp, probe
tggggtgagaagtacagggcagaac

SEQ ID NO: 265706 - DNA, 25 bp, probe
tgggctctgcagagcaaactggaaa

SEQ ID NO: 265707 - DNA, 25 bp, probe
tgggcatttaggtagactggataaa

SEQ ID NO: 265708 - DNA, 25 bp, probe
tgggccttcagggagtgagggatta

SEQ ID NO: 265709 - DNA, 25 bp, probe
tgtggacccgaaaggagggcagaga

SEQ ID NO: 265710 - DNA, 25 bp, probe
tgtggccctagataggatggccaag

SEQ ID NO: 265711 - DNA, 25 bp, probe
tgtggccctagataggatggccaag

SEQ ID NO: 265712 - DNA, 25 bp, probe
tgggcagcctgactcagggaggcga

SEQ ID NO: 265713 - DNA, 25 bp, probe
tgggagtctgagtgtgcacaagcag

SEQ ID NO: 265714 - DNA, 25 bp, probe
tgggtgtctcgcaccataagccaat

SEQ ID NO: 265715 - DNA, 25 bp, probe
tgggtgtagactggcctgaaccaca

SEQ ID NO: 265716 - DNA, 25 bp, probe
tggggtacattccttgatttccagg

SEQ ID NO: 265717 - DNA, 25 bp, probe
tggggataatacctatttcacaagg

SEQ ID NO: 265718 - DNA, 25 bp, probe
tggggatacatccctatggtcatca

SEQ ID NO: 265719 - DNA, 25 bp, probe
tggggtacaaggacatgagagctca

SEQ ID NO: 265720 - DNA, 25 bp, probe
tgggtggacacaaggcacggccacg

SEQ ID NO: 265721 - DNA, 25 bp, probe
tgggctggagtctggactggctgag

SEQ ID NO: 265722 - DNA, 25 bp, probe
tgggctggagcagtttggggcaggg

SEQ ID NO: 265723 - DNA, 25 bp, probe
tgggggatgcagctgctggcatgga

SEQ ID NO: 265724 - DNA, 25 bp, probe
tggggaggaggcctggatcatgtta

SEQ ID NO: 265725 - DNA, 25 bp, probe
tgggaggagaccctggttttcatgg

SEQ ID NO: 265726 - DNA, 25 bp, probe
tgggcaggaaccgtgggatcgccag

SEQ ID NO: 265727 - DNA, 25 bp, probe
tgggcaggaaccgtgggatcgccag

SEQ ID NO: 265728 - DNA, 25 bp, probe
tgggcagattacagtgggacaaaga

SEQ ID NO: 265729 - DNA, 25 bp, probe
tgggagagtatcttgctgggcaagt

SEQ ID NO: 265730 - DNA, 25 bp, probe
tgggaagtcatgtcatttggagaga

SEQ ID NO: 265731 - DNA, 25 bp, probe
tgggaaatcgccactggagatatcc

SEQ ID NO: 265732 - DNA, 25 bp, probe
tgggagtgtcccaacatgtaaacga

SEQ ID NO: 265733 - DNA, 25 bp, probe
tggggtgtcaccaagcaaggctacc

SEQ ID NO: 265734 - DNA, 25 bp, probe
tgggtggtcactgagaccactccct

SEQ ID NO: 265735 - DNA, 25 bp, probe
tgggtggtcagtacatgctccatct

SEQ ID NO: 265736 - DNA, 25 bp, probe
tgggctgtgtcaacagcagcctcaa

SEQ ID NO: 265737 - DNA, 25 bp, probe
tgggggcatgctacaagccctcatc

SEQ ID NO: 265738 - DNA, 25 bp, probe
tgggggcatgctacaagccctcatc

SEQ ID NO: 265739 - DNA, 25 bp, probe
tgggcggcatggcaagactccatat

SEQ ID NO: 265740 - DNA, 25 bp, probe
tgggcggcatggtgcaagttgaata

SEQ ID NO: 265741 - DNA, 25 bp, probe
tgtggcggaggatccaggaagctac

SEQ ID NO: 265742 - DNA, 25 bp, probe
tgggcggcaggatctgaactcgctt

SEQ ID NO: 265743 - DNA, 25 bp, probe
tgggatggaggaatcggcccagccc

SEQ ID NO: 265744 - DNA, 25 bp, probe
tgggtgacagagtgagacccccact

SEQ ID NO: 265745 - DNA, 25 bp, probe
tgggtgacagagtgagatctgcctc

SEQ ID NO: 265746 - DNA, 25 bp, probe
tgggtgacagagtgagatctgcctc

SEQ ID NO: 265747 - DNA, 25 bp, probe
tgggatgaacaagatcctgcccggc

SEQ ID NO: 265748 - DNA, 25 bp, probe
tgggtgaacaacactgctggtttga

SEQ ID NO: 265749 - DNA, 25 bp, probe
tgggtgaacaacactgctggtttga

SEQ ID NO: 265750 - DNA, 25 bp, probe
tggggtgaagagatcttgtgatttt

SEQ ID NO: 265751 - DNA, 25 bp, probe
tgtggaggaaggcagctggtatatt

SEQ ID NO: 265752 - DNA, 25 bp, probe
tgggtggagggccagagtgtgtata

SEQ ID NO: 265753 - DNA, 25 bp, probe
tgggtgggtgggaaatatgatgtat

SEQ ID NO: 265754 - DNA, 25 bp, probe
tgggatatgtgttggaaaactgctt

SEQ ID NO: 265755 - DNA, 25 bp, probe
tgggtatggttgctagcttcagctc

SEQ ID NO: 265756 - DNA, 25 bp, probe
tgggaatggcttatccttcatgtca

SEQ ID NO: 265757 - DNA, 25 bp, probe
tgggaaggctagacttcctcagccc

SEQ ID NO: 265758 - DNA, 25 bp, probe
tgggaaggctagacttcctcagccc

SEQ ID NO: 265759 - DNA, 25 bp, probe
tgggtatgcagcagcctgctcagtc

SEQ ID NO: 265760 - DNA, 25 bp, probe
tgggtatgcagcagcctgctcagtc

SEQ ID NO: 265761 - DNA, 25 bp, probe
tgggatcatggaacttgcactgctg

SEQ ID NO: 265762 - DNA, 25 bp, probe
tgggctatgccaactcagccctgaa

SEQ ID NO: 265763 - DNA, 25 bp, probe
tgggcaatgagcaccagcatctcta

SEQ ID NO: 265764 - DNA, 25 bp, probe
tgggcaatgagcaccagcatctcta

SEQ ID NO: 265765 - DNA, 25 bp, probe
tgggaatcatgaactccttcgtcaa

SEQ ID NO: 265766 - DNA, 25 bp, probe
ttagagtaattcacttcaggaagtt

SEQ ID NO: 265767 - DNA, 25 bp, probe
tgggagaccttcagcttaggggttt

SEQ ID NO: 265768 - DNA, 25 bp, probe
tgggagatcttcactttagggggct

SEQ ID NO: 265769 - DNA, 25 bp, probe
tgggatatccaccctttgagagcgc

SEQ ID NO: 265770 - DNA, 25 bp, probe
tgggcaatttctatatcaggacagc

SEQ ID NO: 265771 - DNA, 25 bp, probe
tgggctattccatccatctggaagc

SEQ ID NO: 265772 - DNA, 25 bp, probe
tgggctattccatccatctggaagc

SEQ ID NO: 265773 - DNA, 25 bp, probe
tgggttggcccaagatgctgtgacc

SEQ ID NO: 265774 - DNA, 25 bp, probe
tgggctttgcacaggtctggtgctc

SEQ ID NO: 265775 - DNA, 25 bp, probe
tgggctttgcacaggtctggtgctc

SEQ ID NO: 265776 - DNA, 25 bp, probe
tgggctgtcgacaggtgtctgacgt

SEQ ID NO: 265777 - DNA, 25 bp, probe
tgggcagcacgtcagggtcataaaa

SEQ ID NO: 265778 - DNA, 25 bp, probe
tgggcagcacgtcagggtcataaaa

SEQ ID NO: 265779 - DNA, 25 bp, probe
tgggcctatgtcaagaagtgcaaaa

SEQ ID NO: 265780 - DNA, 25 bp, probe
tgggattattgaatgggtgaacaac

SEQ ID NO: 265781 - DNA, 25 bp, probe
tgtgcgattgctgtagcggttgcca

SEQ ID NO: 265782 - DNA, 25 bp, probe
tgggatgctgctctagggatactca

SEQ ID NO: 265783 - DNA, 25 bp, probe
tgggatgcatgccctggcaacattg

SEQ ID NO: 265784 - DNA, 25 bp, probe
tgggcatcaccatggtactgtgggg

SEQ ID NO: 265785 - DNA, 25 bp, probe
tgggcatcacgatgattgagttggc

SEQ ID NO: 265786 - DNA, 25 bp, probe
tgggccagagatggacgtgtaccag

SEQ ID NO: 265787 - DNA, 25 bp, probe
tgggagcatggcagacagggaaggg

SEQ ID NO: 265788 - DNA, 25 bp, probe
tgggcagggatactcagggacaggg

SEQ ID NO: 265789 - DNA, 25 bp, probe
tgggcagtgatgtcactagggcagg

SEQ ID NO: 265790 - DNA, 25 bp, probe
tgggcagtgtccgcatgcggaggcc

SEQ ID NO: 265791 - DNA, 25 bp, probe
tgggcagtgtccgcatgcggaggcc

SEQ ID NO: 265792 - DNA, 25 bp, probe
tgggagttcctgagtggagcaccct

SEQ ID NO: 265793 - DNA, 25 bp, probe
tgggagaactctgagtggccacctc

SEQ ID NO: 265794 - DNA, 25 bp, probe
tgggaacacctattggttctcctta

SEQ ID NO: 265795 - DNA, 25 bp, probe
tgggacacacctgtggtcctagcta

SEQ ID NO: 265796 - DNA, 25 bp, probe
tgggactactggaatcaggcttggt

SEQ ID NO: 265797 - DNA, 25 bp, probe
tgggtaacaggcctcaagcaagtct

SEQ ID NO: 265798 - DNA, 25 bp, probe
tgggcttccagggtcaaggagctgc

SEQ ID NO: 265799 - DNA, 25 bp, probe
tgtatgtactcaggttcagggcccg

SEQ ID NO: 265800 - DNA, 25 bp, probe
tgggtgtggcagttacagggcccag

SEQ ID NO: 265801 - DNA, 25 bp, probe
tgggtgcatgggattctgcgtgccc

SEQ ID NO: 265802 - DNA, 25 bp, probe
tgggttgggattatgctgctgttat

SEQ ID NO: 265803 - DNA, 25 bp, probe
tcggttgaccctactgtggattggt

SEQ ID NO: 265804 - DNA, 25 bp, probe
tgggtctgaccccttgtgggatgaa

SEQ ID NO: 265805 - DNA, 25 bp, probe
tgggaccccctcaggggaacagcga

SEQ ID NO: 265806 - DNA, 25 bp, probe
taggaccacccaaagtaggtgaagg

SEQ ID NO: 265807 - DNA, 25 bp, probe
taggaccacccaaagtaggtgaagg

SEQ ID NO: 265808 - DNA, 25 bp, probe
tcaggaaccccagtctggggtaggg

SEQ ID NO: 265809 - DNA, 25 bp, probe
tgggacctccgcactgggaggaggc

SEQ ID NO: 265810 - DNA, 25 bp, probe
tgggacctccggactgggaggggag

SEQ ID NO: 265811 - DNA, 25 bp, probe
tgggcccccaagtggtaggagggag

SEQ ID NO: 265812 - DNA, 25 bp, probe
tgtgggcccccaagtggtaggaggg

SEQ ID NO: 265813 - DNA, 25 bp, probe
tgtctggcccttgctgggtgagggc

SEQ ID NO: 265814 - DNA, 25 bp, probe
tgtctggcccttgctgggtgagggc

SEQ ID NO: 265815 - DNA, 25 bp, probe
tttggcaacagtgcgggtggtcctc

SEQ ID NO: 265816 - DNA, 25 bp, probe
tttggcaacagtgcgggtggtcctc

SEQ ID NO: 265817 - DNA, 25 bp, probe
tgggcagaacataccgggtggtccc

SEQ ID NO: 265818 - DNA, 25 bp, probe
tgggctgataaacccggggtgacct

SEQ ID NO: 265819 - DNA, 25 bp, probe
tgggattgaaacccagggtcgtcac

SEQ ID NO: 265820 - DNA, 25 bp, probe
tgggatgtgactttcgggtgtcggg

SEQ ID NO: 265821 - DNA, 25 bp, probe
tgggagaactttgtggtgctggggc

SEQ ID NO: 265822 - DNA, 25 bp, probe
tgggaaacgtcccttgtcaggagac

SEQ ID NO: 265823 - DNA, 25 bp, probe
tgggaaacgtcccttgtcaggagac

SEQ ID NO: 265824 - DNA, 25 bp, probe
tgggataactgctatcctttaccag

SEQ ID NO: 265825 - DNA, 25 bp, probe
tgggatgtctctgtccacattaaac

SEQ ID NO: 265826 - DNA, 25 bp, probe
tgggatgatctcattaataagaaga

SEQ ID NO: 265827 - DNA, 25 bp, probe
tgggatactgcttattttatgatag

SEQ ID NO: 265828 - DNA, 25 bp, probe
tgggatgattgctcgattgtttggt

SEQ ID NO: 265829 - DNA, 25 bp, probe
tgggatgattgctcgattgtttggt

SEQ ID NO: 265830 - DNA, 25 bp, probe
tgggcagattgtcaacatgttggac

SEQ ID NO: 265831 - DNA, 25 bp, probe
tgggagtggtggctcatgcctgtaa

SEQ ID NO: 265832 - DNA, 25 bp, probe
tgggagtggtggctcatgcctgtaa

SEQ ID NO: 265833 - DNA, 25 bp, probe
tgtggatgggtggggagcaaatcat

SEQ ID NO: 265834 - DNA, 25 bp, probe
tgggaggtgtctcgagagaagatca

SEQ ID NO: 265835 - DNA, 25 bp, probe
tgtgaacgtcgtgtgactcagtgca

SEQ ID NO: 265836 - DNA, 25 bp, probe
tgtggaggccacagctgacactggc

SEQ ID NO: 265837 - DNA, 25 bp, probe
tgggcaggcgcactttagcctaagt

SEQ ID NO: 265838 - DNA, 25 bp, probe
tgggctgcaggactttgacctaatc

SEQ ID NO: 265839 - DNA, 25 bp, probe
tgtggtagagacagctacttactcc

SEQ ID NO: 265840 - DNA, 25 bp, probe
tgggaacagcgcagtacgtttctcc

SEQ ID NO: 265841 - DNA, 25 bp, probe
tgggagacagaggcgtcctttcgcc

SEQ ID NO: 265842 - DNA, 25 bp, probe
tgggagtcaagtgtgcctgctatcc

SEQ ID NO: 265843 - DNA, 25 bp, probe
tgggttcaaatgattctcctgcctc

SEQ ID NO: 265844 - DNA, 25 bp, probe
tgggggcaaagattgtcccctctgc

SEQ ID NO: 265845 - DNA, 25 bp, probe
tgggggcaaagattgtcccctctgc

SEQ ID NO: 265846 - DNA, 25 bp, probe
tgggggcaaagattgtcccctctgc

SEQ ID NO: 265847 - DNA, 25 bp, probe
tgggaccacaaatgtgagcccaccc

SEQ ID NO: 265848 - DNA, 25 bp, probe
tgggactccatattggatggcccca

SEQ ID NO: 265849 - DNA, 25 bp, probe
tgggcacattcttgtggcaagcatc

SEQ ID NO: 265850 - DNA, 25 bp, probe
tgggcagcttctgttggcagagctt

SEQ ID NO: 265851 - DNA, 25 bp, probe
tgggcattatcatctgggcaatgat

SEQ ID NO: 265852 - DNA, 25 bp, probe
tgggctctctcattcttggagtgaa

SEQ ID NO: 265853 - DNA, 25 bp, probe
tgtgttttcttgtctggagtctgca

SEQ ID NO: 265854 - DNA, 25 bp, probe
ttcaatttctagaggaactttttct

SEQ ID NO: 265855 - DNA, 25 bp, probe
tgtccattttggagggatccatttt

SEQ ID NO: 265856 - DNA, 25 bp, probe
tcttcgagttggagcggctcctcta

SEQ ID NO: 265857 - DNA, 25 bp, probe
tcttggctcttttgggccttttagg

SEQ ID NO: 265858 - DNA, 25 bp, probe
tgtctggtccttcggggtgttaatg

SEQ ID NO: 265859 - DNA, 25 bp, probe
tgtgggtctatttctagttattacc

SEQ ID NO: 265860 - DNA, 25 bp, probe
tgtggtgattctcctcatagttatt

SEQ ID NO: 265861 - DNA, 25 bp, probe
tgggtgtgtatcttcttatctcatt

SEQ ID NO: 265862 - DNA, 25 bp, probe
tgtggggtgatcttgttcacactcc

SEQ ID NO: 265863 - DNA, 25 bp, probe
tgtggagcgtgacattctcaccttt

SEQ ID NO: 265864 - DNA, 25 bp, probe
tgtgggtgaagtctctgtccatgtt

SEQ ID NO: 265865 - DNA, 25 bp, probe
tgggtgtacagtcttgtgtgcctgg

SEQ ID NO: 265866 - DNA, 25 bp, probe
tgggtgtccagaggcttgtgggcaa

SEQ ID NO: 265867 - DNA, 25 bp, probe
tgggtgtccagaggcatgtgaccag

SEQ ID NO: 265868 - DNA, 25 bp, probe
tgggtgtcctcaggcagaattgctg

SEQ ID NO: 265869 - DNA, 25 bp, probe
tgggctgtatttggagatcatgggc

SEQ ID NO: 265870 - DNA, 25 bp, probe
tgggcagatcacttcaggtcaggag

SEQ ID NO: 265871 - DNA, 25 bp, probe
tgggagatacagttcagagagtgac

SEQ ID NO: 265872 - DNA, 25 bp, probe
tgggagatgaccaatcaagatgtga

SEQ ID NO: 265873 - DNA, 25 bp, probe
tgtaggtgtttaagaattggttttg

SEQ ID NO: 265874 - DNA, 25 bp, probe
tgtggggtttcccctcaggaatttg

SEQ ID NO: 265875 - DNA, 25 bp, probe
tgtgtgtggttttcctttggggacg

SEQ ID NO: 265876 - DNA, 25 bp, probe
tgtgtgggtttttgccattggacaa

SEQ ID NO: 265877 - DNA, 25 bp, probe
tgtggggcatttaggccatgctgtg

SEQ ID NO: 265878 - DNA, 25 bp, probe
tgtgtagcagttcctgccagtgcag

SEQ ID NO: 265879 - DNA, 25 bp, probe
tgggcacagtggactcagcagtgac

SEQ ID NO: 265880 - DNA, 25 bp, probe
tgggctcagggcctgatggggaacc

SEQ ID NO: 265881 - DNA, 25 bp, probe
tgggtgcatgctaggatgatggggc

SEQ ID NO: 265882 - DNA, 25 bp, probe
tgggcatgcagcgtgcttatgggcc

SEQ ID NO: 265883 - DNA, 25 bp, probe
tgggtgcaggctggcattgtgagct

SEQ ID NO: 265884 - DNA, 25 bp, probe
tgggaggtgcatggcatcggcagcc

SEQ ID NO: 265885 - DNA, 25 bp, probe
tgtggatggtgtgcacggtcttggc

SEQ ID NO: 265886 - DNA, 25 bp, probe
tgggaggtcatcgaggtgtcctgac

SEQ ID NO: 265887 - DNA, 25 bp, probe
tgggagattcatgcgatgtgtccaa

SEQ ID NO: 265888 - DNA, 25 bp, probe
tgggaacgcatcctgagaggccaac

SEQ ID NO: 265889 - DNA, 25 bp, probe
tgggatcacctctgaggcctgaata

SEQ ID NO: 265890 - DNA, 25 bp, probe
tgggagcctctttgagtgcggacaa

SEQ ID NO: 265891 - DNA, 25 bp, probe
tgggagacccattggtcaggctcag

SEQ ID NO: 265892 - DNA, 25 bp, probe
tgtggtgacgtcagaccacctcgag

SEQ ID NO: 265893 - DNA, 25 bp, probe
tgggctacgtgaatagcgccctcaa

SEQ ID NO: 265894 - DNA, 25 bp, probe
tgggtacatggactacgcccaagca

SEQ ID NO: 265895 - DNA, 25 bp, probe
tgggatacatggatctggcctcaag

SEQ ID NO: 265896 - DNA, 25 bp, probe
tgggaactcatgactctgggccaga

SEQ ID NO: 265897 - DNA, 25 bp, probe
tgggaactcatgactctgggccaga

SEQ ID NO: 265898 - DNA, 25 bp, probe
tgggtgacaatgatgctgagacgct

SEQ ID NO: 265899 - DNA, 25 bp, probe
tgggtcacagaggagcatgccacgc

SEQ ID NO: 265900 - DNA, 25 bp, probe
tgggtacagcaaactcagcacagcc

SEQ ID NO: 265901 - DNA, 25 bp, probe
tgggatatcaggcactgagccactg

SEQ ID NO: 265902 - DNA, 25 bp, probe
tgggatatcaggcactgagccactg

SEQ ID NO: 265903 - DNA, 25 bp, probe
tgggaaccacgagtgtgccagcatc

SEQ ID NO: 265904 - DNA, 25 bp, probe
tgggagaacccagtgaccagcggga

SEQ ID NO: 265905 - DNA, 25 bp, probe
tgggagagagcatccttccaacagg

SEQ ID NO: 265906 - DNA, 25 bp, probe
tgggaagagcagcactatccccagc

SEQ ID NO: 265907 - DNA, 25 bp, probe
tgggtaacagccattctggccactt

SEQ ID NO: 265908 - DNA, 25 bp, probe
tgtggaaccaccattggacctatct

SEQ ID NO: 265909 - DNA, 25 bp, probe
tgtggaaccaccattggacctatct

SEQ ID NO: 265910 - DNA, 25 bp, probe
tgtgagggaccaatcctgtgacctc

SEQ ID NO: 265911 - DNA, 25 bp, probe
tgtgcaaggaggcttgctggaccta

SEQ ID NO: 265912 - DNA, 25 bp, probe
tgtccgggagaagtgcatggccctc

SEQ ID NO: 265913 - DNA, 25 bp, probe
tgtgatcggaggaagtgcacccgcc

SEQ ID NO: 265914 - DNA, 25 bp, probe
tgtgtggggtgttcatccccatgct

SEQ ID NO: 265915 - DNA, 25 bp, probe
tgtgtggggtgttcatccccatgct

SEQ ID NO: 265916 - DNA, 25 bp, probe
tgggaggggtagtcgaagagctctg

SEQ ID NO: 265917 - DNA, 25 bp, probe
tgggagtgggggtcagagaggcaga

SEQ ID NO: 265918 - DNA, 25 bp, probe
tgggagtgggggtcagagaggcaga

SEQ ID NO: 265919 - DNA, 25 bp, probe
tgggaacgatggcccagaggcgcag

SEQ ID NO: 265920 - DNA, 25 bp, probe
tgggcagaccggctgagtggctgcc

SEQ ID NO: 265921 - DNA, 25 bp, probe
tgggagaatgtgccgggtggctggc

SEQ ID NO: 265922 - DNA, 25 bp, probe
tgggagaatgtgccgggtggctggc

SEQ ID NO: 265923 - DNA, 25 bp, probe
tgggagagaggacatctgctggctg

SEQ ID NO: 265924 - DNA, 25 bp, probe
tgggagcagagagaagcctggcgcc

SEQ ID NO: 265925 - DNA, 25 bp, probe
tgggcagagatggctactccgacag

SEQ ID NO: 265926 - DNA, 25 bp, probe
tgggagctgatgaaactcacaaatg

SEQ ID NO: 265927 - DNA, 25 bp, probe
tgggagttgatggaaccaaatagaa

SEQ ID NO: 265928 - DNA, 25 bp, probe
tgggcagtggcggcaacgacaaaga

SEQ ID NO: 265929 - DNA, 25 bp, probe
tgggcagtggcggcaacgacaaaga

SEQ ID NO: 265930 - DNA, 25 bp, probe
tgggatcggcgcgacagtgtagaaa

SEQ ID NO: 265931 - DNA, 25 bp, probe
tgtggacctgccgcagagtctgaaa

SEQ ID NO: 265932 - DNA, 25 bp, probe
tgtgggcaaggggcaggatctaagc

SEQ ID NO: 265933 - DNA, 25 bp, probe
tgttgagaagggccgagtaaagtgt

SEQ ID NO: 265934 - DNA, 25 bp, probe
tgtggagaaggccgggtatgtttta

SEQ ID NO: 265935 - DNA, 25 bp, probe
tgtggagaaggccgggtatgtttta

SEQ ID NO: 265936 - DNA, 25 bp, probe
tgtggtaaagggggtggcttggtca

SEQ ID NO: 265937 - DNA, 25 bp, probe
tagcgttacacccggtggtcgggca

SEQ ID NO: 265938 - DNA, 25 bp, probe
tagcgttacacccggtggtcgggca

SEQ ID NO: 265939 - DNA, 25 bp, probe
tccgtttaccttcatggtgctgttg

SEQ ID NO: 265940 - DNA, 25 bp, probe
tgggatttacctacttggtttcagt

SEQ ID NO: 265941 - DNA, 25 bp, probe
tgggaatatacccagtgtgtgttct

SEQ ID NO: 265942 - DNA, 25 bp, probe
tgggaactaactcggtcattgctgt

SEQ ID NO: 265943 - DNA, 25 bp, probe
tgggaactcttcaaggtctcttttc

SEQ ID NO: 265944 - DNA, 25 bp, probe
tgggaacatctcacgagctttccta

SEQ ID NO: 265945 - DNA, 25 bp, probe
tgggtacctgcaagcagaacttcca

SEQ ID NO: 265946 - DNA, 25 bp, probe
tgtggtactcctaattacattgctc

SEQ ID NO: 265947 - DNA, 25 bp, probe
tgtgaggtttccactatcaatgcct

SEQ ID NO: 265948 - DNA, 25 bp, probe
tgtgacagctgcatacccaaaacct

SEQ ID NO: 265949 - DNA, 25 bp, probe
tgtgccggatgtacccggagacctt

SEQ ID NO: 265950 - DNA, 25 bp, probe
tgtgtctggtttcctaggtgacgcc

SEQ ID NO: 265951 - DNA, 25 bp, probe
tgtgtctggtttcctaggtgacgcc

SEQ ID NO: 265952 - DNA, 25 bp, probe
tgtgctgtggttcggaagtctaagc

SEQ ID NO: 265953 - DNA, 25 bp, probe
tgggcatggtgaaggaagttgtccg

SEQ ID NO: 265954 - DNA, 25 bp, probe
tgggcatgcaggtgacaagggccct

SEQ ID NO: 265955 - DNA, 25 bp, probe
tgggcacgagattggcagacaggca

SEQ ID NO: 265956 - DNA, 25 bp, probe
tgggcacgagattggcagacaggca

SEQ ID NO: 265957 - DNA, 25 bp, probe
tgggcacgagattggcagacaggca

SEQ ID NO: 265958 - DNA, 25 bp, probe
tgggcacgagattggcagacaggca

SEQ ID NO: 265959 - DNA, 25 bp, probe
tgggcttagagctggcatgaccaat

SEQ ID NO: 265960 - DNA, 25 bp, probe
tgaccttaggcatggagaaaattac

SEQ ID NO: 265961 - DNA, 25 bp, probe
tgaccacttacttggataaagttcc

SEQ ID NO: 265962 - DNA, 25 bp, probe
tgtggccttagttggtatggaaatc

SEQ ID NO: 265963 - DNA, 25 bp, probe
tgtggctcttcgttgtttagaactt

SEQ ID NO: 265964 - DNA, 25 bp, probe
tgggccttgctgttaaattcaacag

SEQ ID NO: 265965 - DNA, 25 bp, probe
tgggatacgctatgaactctcaccg

SEQ ID NO: 265966 - DNA, 25 bp, probe
tgggatacgctatgaactctcaccg

SEQ ID NO: 265967 - DNA, 25 bp, probe
tgggatgacttatgacacttgcaca

SEQ ID NO: 265968 - DNA, 25 bp, probe
tgggagcatcttcagcaagttcacc

SEQ ID NO: 265969 - DNA, 25 bp, probe
tgggacactatgaagaggtgttcca

SEQ ID NO: 265970 - DNA, 25 bp, probe
tgggagacgagatggcctgcgtcca

SEQ ID NO: 265971 - DNA, 25 bp, probe
tgggaacggaatccctgagctgcct

SEQ ID NO: 265972 - DNA, 25 bp, probe
tgggaacggaatccctgagctgcct

SEQ ID NO: 265973 - DNA, 25 bp, probe
tgggaacggaatccctgagctgcct

SEQ ID NO: 265974 - DNA, 25 bp, probe
tgggaagggagccttctcagtcctc

SEQ ID NO: 265975 - DNA, 25 bp, probe
tgggtagttggattccacatgtcct

SEQ ID NO: 265976 - DNA, 25 bp, probe
tgtggttgctgtggttggaattctt

SEQ ID NO: 265977 - DNA, 25 bp, probe
tgtggtttgtggggctatggttttg

SEQ ID NO: 265978 - DNA, 25 bp, probe
tgggttggggcagttacctggttgc

SEQ ID NO: 265979 - DNA, 25 bp, probe
tgtggattggtgggtttcggggtga

SEQ ID NO: 265980 - DNA, 25 bp, probe
tgtggattggtgggtttcggggtga

SEQ ID NO: 265981 - DNA, 25 bp, probe
tgtggactggccgtttgacgatggg

SEQ ID NO: 265982 - DNA, 25 bp, probe
tgtggatgctctctatttagcggag

SEQ ID NO: 265983 - DNA, 25 bp, probe
tgtgaagcatccggttactgggcaa

SEQ ID NO: 265984 - DNA, 25 bp, probe
tgtggagccttacatactgggagaa

SEQ ID NO: 265985 - DNA, 25 bp, probe
tgggcagcccaaaagatcaggggtg

SEQ ID NO: 265986 - DNA, 25 bp, probe
tgggcactcccaataatgaagtgtg

SEQ ID NO: 265987 - DNA, 25 bp, probe
tgggcctgaccaaaaatatactggg

SEQ ID NO: 265988 - DNA, 25 bp, probe
tgggcccagccagataatacatgat

SEQ ID NO: 265989 - DNA, 25 bp, probe
tgggctacaccgagacaagcgctaa

SEQ ID NO: 265990 - DNA, 25 bp, probe
tgggctacaccgagacaagcgctaa

SEQ ID NO: 265991 - DNA, 25 bp, probe
tgtggtatcacaagtcccaagcctt

SEQ ID NO: 265992 - DNA, 25 bp, probe
tgtgagttatcagccactcaggctc

SEQ ID NO: 265993 - DNA, 25 bp, probe
tgtgagaaatcaccgattgcccttg

SEQ ID NO: 265994 - DNA, 25 bp, probe
tgtgaaatacaaggttcccttctgc

SEQ ID NO: 265995 - DNA, 25 bp, probe
tgtgaaatagttggtatccctttac

SEQ ID NO: 265996 - DNA, 25 bp, probe
tgtgaaaaggtggttcctgctgctg

SEQ ID NO: 265997 - DNA, 25 bp, probe
tgtgaaaactggttcctcagtgctg

SEQ ID NO: 265998 - DNA, 25 bp, probe
tgggaacttgggacgccagaggggc

SEQ ID NO: 265999 - DNA, 25 bp, probe
tgggaacttgggacgccagaggggc

SEQ ID NO: 266000 - DNA, 25 bp, probe
tgggagacaagggaaggcaggtggt

SEQ ID NO: 266001 - DNA, 25 bp, probe
tgggagacaagggaaggcaggtggt

SEQ ID NO: 266002 - DNA, 25 bp, probe
tgggaaaaggtgtcaggcaccatgg

SEQ ID NO: 266003 - DNA, 25 bp, probe
tgaaccaagggttagacgccagagg

SEQ ID NO: 266004 - DNA, 25 bp, probe
tgtgaccaaggacatgacactggaa

SEQ ID NO: 266005 - DNA, 25 bp, probe
tgtgccctgggggcaacctgatgca

SEQ ID NO: 266006 - DNA, 25 bp, probe
tgtcgactcggggaacagctatgac

SEQ ID NO: 266007 - DNA, 25 bp, probe
tgtgtcctggggtacacactgaggc

SEQ ID NO: 266008 - DNA, 25 bp, probe
tgtgattctggggaagtcccggccc

SEQ ID NO: 266009 - DNA, 25 bp, probe
tgtgattctggggaagtcccggccc

SEQ ID NO: 266010 - DNA, 25 bp, probe
tgtcatgatgctggagccagacccc

SEQ ID NO: 266011 - DNA, 25 bp, probe
tgtcatactctgcacgaactcgacc

SEQ ID NO: 266012 - DNA, 25 bp, probe
tgtcatactctgcacgaactcgacc

SEQ ID NO: 266013 - DNA, 25 bp, probe
tgtcttccttaccaagtgaactcca

SEQ ID NO: 266014 - DNA, 25 bp, probe
tgtgtacctaatgaaaagatctcca

SEQ ID NO: 266015 - DNA, 25 bp, probe
tgagaccaaactgcaaaacatccca

SEQ ID NO: 266016 - DNA, 25 bp, probe
tgtgtgcaaaagcccaaaggttcct

SEQ ID NO: 266017 - DNA, 25 bp, probe
tgtcaaagaagtgcagaacgtactc

SEQ ID NO: 266018 - DNA, 25 bp, probe
tgtgctataaaggggaacttcccct

SEQ ID NO: 266019 - DNA, 25 bp, probe
tgggagagaaggcgaaccacctccg

SEQ ID NO: 266020 - DNA, 25 bp, probe
tgggagagaaggcgaaccacctccg

SEQ ID NO: 266021 - DNA, 25 bp, probe
tgggattacagacgtgacccaccgc

SEQ ID NO: 266022 - DNA, 25 bp, probe
tgggattacaggcgtgttccaccac

SEQ ID NO: 266023 - DNA, 25 bp, probe
tgggattacaggcgtgagccgccca

SEQ ID NO: 266024 - DNA, 25 bp, probe
tgggattacaggcgtgagccaccgt

SEQ ID NO: 266025 - DNA, 25 bp, probe
tgggattacaggcgtgagccaccgc

SEQ ID NO: 266026 - DNA, 25 bp, probe
tgggactacaggggatgtgccacca

SEQ ID NO: 266027 - DNA, 25 bp, probe
tgggactcagcagcccatgtgacaa

SEQ ID NO: 266028 - DNA, 25 bp, probe
tgtggaatcagacctccaggagata

SEQ ID NO: 266029 - DNA, 25 bp, probe
tgggcaagaacagtacaaaatagct

SEQ ID NO: 266030 - DNA, 25 bp, probe
tgtggtagaacactttcaaagaggt

SEQ ID NO: 266031 - DNA, 25 bp, probe
tgggatctcaacatgtataaaagtg

SEQ ID NO: 266032 - DNA, 25 bp, probe
tgggatctcaacatgtataaaagtg

SEQ ID NO: 266033 - DNA, 25 bp, probe
tgtggtgtacacattagccaatgag

SEQ ID NO: 266034 - DNA, 25 bp, probe
tgtgttgtgtccattttgcaaaccc

SEQ ID NO: 266035 - DNA, 25 bp, probe
tgtgtcttgactacctttcaaaacc

SEQ ID NO: 266036 - DNA, 25 bp, probe
tgtggtaacttcctatagcagcaat

SEQ ID NO: 266037 - DNA, 25 bp, probe
tgtggtaacttcctatagcagcaat

SEQ ID NO: 266038 - DNA, 25 bp, probe
tgtggatgaactactcctacagcag

SEQ ID NO: 266039 - DNA, 25 bp, probe
tgtgatgataatcacccccagcaga

SEQ ID NO: 266040 - DNA, 25 bp, probe
tgtgatgatcctcatatggcccagt

SEQ ID NO: 266041 - DNA, 25 bp, probe
ttgagcaccttaaggaaggtaaaag

SEQ ID NO: 266042 - DNA, 25 bp, probe
tgtgacaccttaccggagtaaaagt

SEQ ID NO: 266043 - DNA, 25 bp, probe
tgtgtagccgtctgctggagtatac

SEQ ID NO: 266044 - DNA, 25 bp, probe
tgtgtgacggctgcctgaagttctc

SEQ ID NO: 266045 - DNA, 25 bp, probe
tgggaatggatatcagaagatttgg

SEQ ID NO: 266046 - DNA, 25 bp, probe
tgtggcaagcgaggacacgcctttg

SEQ ID NO: 266047 - DNA, 25 bp, probe
tgggagacgcaggcacaactcttta

SEQ ID NO: 266048 - DNA, 25 bp, probe
tgggcaacgagcaaaactccatctc

SEQ ID NO: 266049 - DNA, 25 bp, probe
tgggaagactctcatactccatcat

SEQ ID NO: 266050 - DNA, 25 bp, probe
tgggaagactctcatactccatcat

SEQ ID NO: 266051 - DNA, 25 bp, probe
tgggaaaatctattcctgccaccac

SEQ ID NO: 266052 - DNA, 25 bp, probe
tgggcaaacataattactgccggac

SEQ ID NO: 266053 - DNA, 25 bp, probe
tgggcagggcttagtgcccagggcc

SEQ ID NO: 266054 - DNA, 25 bp, probe
tgggaggtgctgatgctctgtaggg

SEQ ID NO: 266055 - DNA, 25 bp, probe
tgggcagtgctaaggcttgggccgg

SEQ ID NO: 266056 - DNA, 25 bp, probe
tgggagcagtaagctgtcggcaggg

SEQ ID NO: 266057 - DNA, 25 bp, probe
tgtgatggagtacctcaacggaggg

SEQ ID NO: 266058 - DNA, 25 bp, probe
tgtgatggaatactgcccaaaggga

SEQ ID NO: 266059 - DNA, 25 bp, probe
tgtggagaaatcctgcccagagggc

SEQ ID NO: 266060 - DNA, 25 bp, probe
tgtggctgtttccagtccaaagtgc

SEQ ID NO: 266061 - DNA, 25 bp, probe
tgggctgcttactagtctcaagaga

SEQ ID NO: 266062 - DNA, 25 bp, probe
tgggctgatcctgaatggcacaggc

SEQ ID NO: 266063 - DNA, 25 bp, probe
tgtggccaccatgaaggccaccctg

SEQ ID NO: 266064 - DNA, 25 bp, probe
tgggcgatctcatcaaggtgacgcc

SEQ ID NO: 266065 - DNA, 25 bp, probe
tgggaatctcgttgagcgttcggcg

SEQ ID NO: 266066 - DNA, 25 bp, probe
tgggaatctcgttgagcgttcggcg

SEQ ID NO: 266067 - DNA, 25 bp, probe
tgggcaactctgtgatccagtcaac

SEQ ID NO: 266068 - DNA, 25 bp, probe
tgtggaccactatgatcacaccatc

SEQ ID NO: 266069 - DNA, 25 bp, probe
tctggacccttataaaatcctgtgc

SEQ ID NO: 266070 - DNA, 25 bp, probe
tgtagaacctataacaaattctttt

SEQ ID NO: 266071 - DNA, 25 bp, probe
tgtagaacctataacaaattctttt

SEQ ID NO: 266072 - DNA, 25 bp, probe
tgtaaacctctgaaggaatttatgc

SEQ ID NO: 266073 - DNA, 25 bp, probe
tgtggcaactacaaaggatgtttag

SEQ ID NO: 266074 - DNA, 25 bp, probe
tgtggaactgcaagacgagatatgt

SEQ ID NO: 266075 - DNA, 25 bp, probe
tgtgggcagtgcttgctggaagaga

SEQ ID NO: 266076 - DNA, 25 bp, probe
tgtggaggtggtcggcaatggaacc

SEQ ID NO: 266077 - DNA, 25 bp, probe
tgggcagtgtggtggatgggcaccc

SEQ ID NO: 266078 - DNA, 25 bp, probe
tgtgtgggtgattcagggggcccgc

SEQ ID NO: 266079 - DNA, 25 bp, probe
tgtggggagatccactgggaccccc

SEQ ID NO: 266080 - DNA, 25 bp, probe
tgtggggaagccttggaatgccctt

SEQ ID NO: 266081 - DNA, 25 bp, probe
tgtgggggtggaggagactcctctg

SEQ ID NO: 266082 - DNA, 25 bp, probe
tgtgggccttgggcgtaacgctata

SEQ ID NO: 266083 - DNA, 25 bp, probe
tgtgggccttgggcgtaacgctata

SEQ ID NO: 266084 - DNA, 25 bp, probe
tgtggaggacgaggcggaacgctcc

SEQ ID NO: 266085 - DNA, 25 bp, probe
tgtgggagacctgggcgaatgcttc

SEQ ID NO: 266086 - DNA, 25 bp, probe
tgtgtgggacactggactacttgcc

SEQ ID NO: 266087 - DNA, 25 bp, probe
tgtgtgaagacagcggatttcggcc

SEQ ID NO: 266088 - DNA, 25 bp, probe
ttagggtagcatgggattacagggc

SEQ ID NO: 266089 - DNA, 25 bp, probe
tttgtcgtgaaaagcttaatgggct

SEQ ID NO: 266090 - DNA, 25 bp, probe
ttgtcgtgaaaagcttaatgggctg

SEQ ID NO: 266091 - DNA, 25 bp, probe
ttgttgtaaaatgtaaaggtcactt

SEQ ID NO: 266092 - DNA, 25 bp, probe
tgttttcaaattctaaagtccactt

SEQ ID NO: 266093 - DNA, 25 bp, probe
tgttttgaagtccttgaacttccga

SEQ ID NO: 266094 - DNA, 25 bp, probe
tgggctctgtgagcctttactttgc

SEQ ID NO: 266095 - DNA, 25 bp, probe
tgggccagtaggcatcttagcttgg

SEQ ID NO: 266096 - DNA, 25 bp, probe
tgggccaactggccattctgacttc

SEQ ID NO: 266097 - DNA, 25 bp, probe
tgggcatcaactggttcttactcta

SEQ ID NO: 266098 - DNA, 25 bp, probe
tgggcatcaacacttttattcttaa

SEQ ID NO: 266099 - DNA, 25 bp, probe
tgggcatgtgcccatttctatgtgt

SEQ ID NO: 266100 - DNA, 25 bp, probe
tgggctagtccagtgtctatattta

SEQ ID NO: 266101 - DNA, 25 bp, probe
tgggcatccgcctggataatgcttc

SEQ ID NO: 266102 - DNA, 25 bp, probe
tgtgacatccgccctgtgatgaagc

SEQ ID NO: 266103 - DNA, 25 bp, probe
tgtgtgcatgcacgggcgttgtgcc

SEQ ID NO: 266104 - DNA, 25 bp, probe
tgtggcacagggggtttgggaaaca

SEQ ID NO: 266105 - DNA, 25 bp, probe
tgtggcacagggggtttgggaaaca

SEQ ID NO: 266106 - DNA, 25 bp, probe
tgggccagggttgtcgtgggtagta

SEQ ID NO: 266107 - DNA, 25 bp, probe
tgggcagcgtgggtaaggtgggtca

SEQ ID NO: 266108 - DNA, 25 bp, probe
tgggcagcgtgggtaaggtgggtca

SEQ ID NO: 266109 - DNA, 25 bp, probe
tgggacgcgtggtcaaggtggagaa

SEQ ID NO: 266110 - DNA, 25 bp, probe
tgggagcggctggaacgattggaga

SEQ ID NO: 266111 - DNA, 25 bp, probe
tgggagcggctggaatttgtcaatg

SEQ ID NO: 266112 - DNA, 25 bp, probe
tgggcaggtgtggactgctttcctc

SEQ ID NO: 266113 - DNA, 25 bp, probe
tgggcaggtggtggcactgagcccc

SEQ ID NO: 266114 - DNA, 25 bp, probe
tgggctggatgccacacagatggtc

SEQ ID NO: 266115 - DNA, 25 bp, probe
tgtgggtgtctacagatcagccatc

SEQ ID NO: 266116 - DNA, 25 bp, probe
tgtgaggatttacccatcccaggca

SEQ ID NO: 266117 - DNA, 25 bp, probe
tgtggatatttctccatcctaaaaa

SEQ ID NO: 266118 - DNA, 25 bp, probe
tgtgtggatttctcacccttagaag

SEQ ID NO: 266119 - DNA, 25 bp, probe
tgtggtgttgactgtcctttcaagg

SEQ ID NO: 266120 - DNA, 25 bp, probe
tgggctttgagacgtcagcctttaa

SEQ ID NO: 266121 - DNA, 25 bp, probe
tgggctttgacaagtggcctttcat

SEQ ID NO: 266122 - DNA, 25 bp, probe
tgggcatatgtgtcagtggggctct

SEQ ID NO: 266123 - DNA, 25 bp, probe
tgggcctgttcattggggccagcat

SEQ ID NO: 266124 - DNA, 25 bp, probe
tgggctcggctatctggggagcaga

SEQ ID NO: 266125 - DNA, 25 bp, probe
tgggctcggctatctggggagcaga

SEQ ID NO: 266126 - DNA, 25 bp, probe
tgggccctgcatttctggggcagga

SEQ ID NO: 266127 - DNA, 25 bp, probe
tgggagcagcggtttggggagcaga

SEQ ID NO: 266128 - DNA, 25 bp, probe
tgggcacagaggtggctgtgcgaag

SEQ ID NO: 266129 - DNA, 25 bp, probe
tgggacgaggatacctgtctccaga

SEQ ID NO: 266130 - DNA, 25 bp, probe
tgggacgaggatacctgtctccaga

SEQ ID NO: 266131 - DNA, 25 bp, probe
tgtggccgaggactttgattgcaca

SEQ ID NO: 266132 - DNA, 25 bp, probe
tgggcctgcagtgatccattgtagc

SEQ ID NO: 266133 - DNA, 25 bp, probe
tgggccatagcatctctattgtagc

SEQ ID NO: 266134 - DNA, 25 bp, probe
tgtggacatgactgtctaagcacag

SEQ ID NO: 266135 - DNA, 25 bp, probe
tgtggacatgactgtctaagcacag

SEQ ID NO: 266136 - DNA, 25 bp, probe
tgtgaaaaccctgaagccaggaact

SEQ ID NO: 266137 - DNA, 25 bp, probe
tgtgaataaagccacataaccagcg

SEQ ID NO: 266138 - DNA, 25 bp, probe
tgggacataagccaccaatccctga

SEQ ID NO: 266139 - DNA, 25 bp, probe
tgtggcaaaaccagaggccctggac

SEQ ID NO: 266140 - DNA, 25 bp, probe
tgtggcaaaaccagaggccctggac

SEQ ID NO: 266141 - DNA, 25 bp, probe
tgtggacaaacatgggagctcggcg

SEQ ID NO: 266142 - DNA, 25 bp, probe
tgtggacaaacatgggagctcggcg

SEQ ID NO: 266143 - DNA, 25 bp, probe
tgtgggacaacataagctgctggcc

SEQ ID NO: 266144 - DNA, 25 bp, probe
tgggccctgacattggagcctgggc

SEQ ID NO: 266145 - DNA, 25 bp, probe
tgggcctatgatctaggctctcgcc

SEQ ID NO: 266146 - DNA, 25 bp, probe
tgggcgtggctgatgggccacagga

SEQ ID NO: 266147 - DNA, 25 bp, probe
tgggcgggtggtgggccaaggagga

SEQ ID NO: 266148 - DNA, 25 bp, probe
tgtgagacggggtggccagagggga

SEQ ID NO: 266149 - DNA, 25 bp, probe
tgtgtggcctggtgggtcaggggga

SEQ ID NO: 266150 - DNA, 25 bp, probe
tgtgtgggtgaaggggatagggcga

SEQ ID NO: 266151 - DNA, 25 bp, probe
tgtgcttgggacgggtggggaggtc

SEQ ID NO: 266152 - DNA, 25 bp, probe
tgtgtgtgtagagggggcgggtagt

SEQ ID NO: 266153 - DNA, 25 bp, probe
tgtgatgtgggagaggccagcctgg

SEQ ID NO: 266154 - DNA, 25 bp, probe
tgtgtgggtgggagtcagcacattc

SEQ ID NO: 266155 - DNA, 25 bp, probe
tctgtaggtgggcttccaaggtcct

SEQ ID NO: 266156 - DNA, 25 bp, probe
tgtgggtgtggcagttacagggccc

SEQ ID NO: 266157 - DNA, 25 bp, probe
tgtggagtggaaatttgcaagggcc

SEQ ID NO: 266158 - DNA, 25 bp, probe
tgggcaatgagatggtctgcagggg

SEQ ID NO: 266159 - DNA, 25 bp, probe
tgggccagaccgctaggagcggccc

SEQ ID NO: 266160 - DNA, 25 bp, probe
tgggccagaccgctaggagcggccc

SEQ ID NO: 266161 - DNA, 25 bp, probe
tgggccatgcagaggaaggacagag

SEQ ID NO: 266162 - DNA, 25 bp, probe
tgggccatcaccagagaggggctgg

SEQ ID NO: 266163 - DNA, 25 bp, probe
tgggccatcctcacatgtgacaaag

SEQ ID NO: 266164 - DNA, 25 bp, probe
tgggcacctccattctgtgaggaag

SEQ ID NO: 266165 - DNA, 25 bp, probe
tgggcacctccattctgtgaggaag

SEQ ID NO: 266166 - DNA, 25 bp, probe
tgggcacctacaaccgcaaatatgc

SEQ ID NO: 266167 - DNA, 25 bp, probe
tgggaacccaagtccaagcatacca

SEQ ID NO: 266168 - DNA, 25 bp, probe
tgtgtgaaactcactccacaaaccc

SEQ ID NO: 266169 - DNA, 25 bp, probe
tgtgatacccatagcttccatgaga

SEQ ID NO: 266170 - DNA, 25 bp, probe
tgtgatctcacctgttggaatgcac

SEQ ID NO: 266171 - DNA, 25 bp, probe
tgtggtgccgtacttggaggacctg

SEQ ID NO: 266172 - DNA, 25 bp, probe
tgtggtgccgtacttggaggacctg

SEQ ID NO: 266173 - DNA, 25 bp, probe
tgtggagctctcaggaagggccctg

SEQ ID NO: 266174 - DNA, 25 bp, probe
tgtggacgcctaggcaagagcggcc

SEQ ID NO: 266175 - DNA, 25 bp, probe
tgggcaaccattccaaggggcttac

SEQ ID NO: 266176 - DNA, 25 bp, probe
tgggcatttattccaaagtgggatc

SEQ ID NO: 266177 - DNA, 25 bp, probe
tgggcatgttagaactgaggtgggc

SEQ ID NO: 266178 - DNA, 25 bp, probe
tgggaattgcacagtaggatgtgga

SEQ ID NO: 266179 - DNA, 25 bp, probe
tgggaatccaccctgagacatgctg

SEQ ID NO: 266180 - DNA, 25 bp, probe
tgtggtaaccaggctgcgatcatgg

SEQ ID NO: 266181 - DNA, 25 bp, probe
tgtggccagggacggcatgagcagg

SEQ ID NO: 266182 - DNA, 25 bp, probe
tgtggcagcggcagaggctagcagc

SEQ ID NO: 266183 - DNA, 25 bp, probe
tgtggccggcatcagagtggagagc

SEQ ID NO: 266184 - DNA, 25 bp, probe
tgggcgccaagaagcatgggagaga

SEQ ID NO: 266185 - DNA, 25 bp, probe
tgggacaagagacgctggcgcaaga

SEQ ID NO: 266186 - DNA, 25 bp, probe
tgggaacatgacccagcctgaaaga

SEQ ID NO: 266187 - DNA, 25 bp, probe
tgggcataagtcctgcaaggaaagc

SEQ ID NO: 266188 - DNA, 25 bp, probe
tgggcatccccagtgacggaaaggg

SEQ ID NO: 266189 - DNA, 25 bp, probe
tgggcatgtcccgatatctggatat

SEQ ID NO: 266190 - DNA, 25 bp, probe
tgtgacatctctccagtacttaatc

SEQ ID NO: 266191 - DNA, 25 bp, probe
tgtactgcctgggctaatgctcaaa

SEQ ID NO: 266192 - DNA, 25 bp, probe
tgggcttctgtggtgcattctacag

SEQ ID NO: 266193 - DNA, 25 bp, probe
tgtccattcgggttattagcagcta

SEQ ID NO: 266194 - DNA, 25 bp, probe
tgctccttgctggtttttaacttgg

SEQ ID NO: 266195 - DNA, 25 bp, probe
tctaccgtccttgtcataactttgt

SEQ ID NO: 266196 - DNA, 25 bp, probe
tgtaccgtcctttccaatacgattt

SEQ ID NO: 266197 - DNA, 25 bp, probe
tgtgaacgtttttgccaatcactgc

SEQ ID NO: 266198 - DNA, 25 bp, probe
tgtgaattgtttgcacttgtgcctg

SEQ ID NO: 266199 - DNA, 25 bp, probe
tgtgaattgtttgcacttgtgcctg

SEQ ID NO: 266200 - DNA, 25 bp, probe
tgtctggcttaagtccttagctgcg

SEQ ID NO: 266201 - DNA, 25 bp, probe
tgtgggctacatagtcctttgcagt

SEQ ID NO: 266202 - DNA, 25 bp, probe
tgtggagctccaagactttccagac

SEQ ID NO: 266203 - DNA, 25 bp, probe
tgggaatcccaggatgctgcccaac

SEQ ID NO: 266204 - DNA, 25 bp, probe
tgggccaggcaagatggctcacacc

SEQ ID NO: 266205 - DNA, 25 bp, probe
tgggccagggcaggaatgccactcc

SEQ ID NO: 266206 - DNA, 25 bp, probe
tgggcacagggctgcgtgcccatct

SEQ ID NO: 266207 - DNA, 25 bp, probe
tgggaagggcacctgtgctggttgc

SEQ ID NO: 266208 - DNA, 25 bp, probe
tgtggacaaaagggcatgctggttc

SEQ ID NO: 266209 - DNA, 25 bp, probe
tgtgggtagtattccagcatccttc

SEQ ID NO: 266210 - DNA, 25 bp, probe
tgtggcttttatttcagtgccatac

SEQ ID NO: 266211 - DNA, 25 bp, probe
tgtggttcttattactgctggctcc

SEQ ID NO: 266212 - DNA, 25 bp, probe
tgtgtggaattcttactgtgatgtg

SEQ ID NO: 266213 - DNA, 25 bp, probe
tgtgtggaattcttactgtgatgtg

SEQ ID NO: 266214 - DNA, 25 bp, probe
tgtgtgctgcaattgtccaggcgat

SEQ ID NO: 266215 - DNA, 25 bp, probe
tgtgtcctgaaggccacggttcagg

SEQ ID NO: 266216 - DNA, 25 bp, probe
tgtgtttgagatggctacagggaag

SEQ ID NO: 266217 - DNA, 25 bp, probe
tgtccttactgcccaaggaagggga

SEQ ID NO: 266218 - DNA, 25 bp, probe
tgtgcctgtaactctgagggggggc

SEQ ID NO: 266219 - DNA, 25 bp, probe
tgacctggacaatccgggactgtgg

SEQ ID NO: 266220 - DNA, 25 bp, probe
tgtgcggaaccacccggggctgctg

SEQ ID NO: 266221 - DNA, 25 bp, probe
tgtgaaagccacttccaagggctgc

SEQ ID NO: 266222 - DNA, 25 bp, probe
tgggaatgcgctcttcacaggaaga

SEQ ID NO: 266223 - DNA, 25 bp, probe
tgtggagctcctgttcagggatatt

SEQ ID NO: 266224 - DNA, 25 bp, probe
tgtggaacctgtttaatgttatgag

SEQ ID NO: 266225 - DNA, 25 bp, probe
tgtgaaaggcagatgtttgattatg

SEQ ID NO: 266226 - DNA, 25 bp, probe
tgctaagggcaaggcttacttgaag

SEQ ID NO: 266227 - DNA, 25 bp, probe
tgtgattgggcatttgcctactttt

SEQ ID NO: 266228 - DNA, 25 bp, probe
tgtggttggctatggtgatcttaat

SEQ ID NO: 266229 - DNA, 25 bp, probe
tgtggttgcagccacaggggcaaca

SEQ ID NO: 266230 - DNA, 25 bp, probe
tgtggtgccccaggagcaggaacat

SEQ ID NO: 266231 - DNA, 25 bp, probe
tgtggtctcgtcagagagcaggaat

SEQ ID NO: 266232 - DNA, 25 bp, probe
tgtggtagcttgctcaacaggtgac

SEQ ID NO: 266233 - DNA, 25 bp, probe
tgtgagtgagcattcttagacgagt

SEQ ID NO: 266234 - DNA, 25 bp, probe
tgtgagtgagcattcttagacgagt

SEQ ID NO: 266235 - DNA, 25 bp, probe
tgatcgtgcagctgctgggcacgcc

SEQ ID NO: 266236 - DNA, 25 bp, probe
tgatcgtgcagctgctgggcacgcc

SEQ ID NO: 266237 - DNA, 25 bp, probe
tgtcgtgctgaaatggtccgtcacc

SEQ ID NO: 266238 - DNA, 25 bp, probe
tgtcggccgaagccatcggcatcat

SEQ ID NO: 266239 - DNA, 25 bp, probe
tgtctggacagggacactggcttca

SEQ ID NO: 266240 - DNA, 25 bp, probe
tgggcatcaggcccagcttgtggag

SEQ ID NO: 266241 - DNA, 25 bp, probe
tgggcttctcctgcatgggagttgt

SEQ ID NO: 266242 - DNA, 25 bp, probe
tgtggcttatttgctgggtacgtga

SEQ ID NO: 266243 - DNA, 25 bp, probe
tgtggcttatttgctgggtacgtga

SEQ ID NO: 266244 - DNA, 25 bp, probe
tgggctacatttgtgctttctgcag

SEQ ID NO: 266245 - DNA, 25 bp, probe
tgggcaactttttcctgaatgagta

SEQ ID NO: 266246 - DNA, 25 bp, probe
tgggaatgtttttagctggtggcaa

SEQ ID NO: 266247 - DNA, 25 bp, probe
tgtgggattattgaatgggtgaaca

SEQ ID NO: 266248 - DNA, 25 bp, probe
tgtgggcttcctcgagggaggcaag

SEQ ID NO: 266249 - DNA, 25 bp, probe
tgcacgtgtcccgggtcgaccagca

SEQ ID NO: 266250 - DNA, 25 bp, probe
tgggctgtgcacacggttgagccgc

SEQ ID NO: 266251 - DNA, 25 bp, probe
tgggctgtgcacacggttgagccgc

SEQ ID NO: 266252 - DNA, 25 bp, probe
tgtggctcagcacacaggactgacc

SEQ ID NO: 266253 - DNA, 25 bp, probe
tgtggtgcattctacagcgagaggc

SEQ ID NO: 266254 - DNA, 25 bp, probe
tgtggatgatgattgcgcagggagg

SEQ ID NO: 266255 - DNA, 25 bp, probe
tgggctgagagtggatggaatggat

SEQ ID NO: 266256 - DNA, 25 bp, probe
tgggctgagagtggatggaatggat

SEQ ID NO: 266257 - DNA, 25 bp, probe
tgggcatgtgagtgtggcacacctc

SEQ ID NO: 266258 - DNA, 25 bp, probe
tgggcagttgggaaatcagctctct

SEQ ID NO: 266259 - DNA, 25 bp, probe
tgtggcactcttcacaatcactgtt

SEQ ID NO: 266260 - DNA, 25 bp, probe
tgtggcactcttcagtacatggccc

SEQ ID NO: 266261 - DNA, 25 bp, probe
tgtggcactcttcagtacatggccc

SEQ ID NO: 266262 - DNA, 25 bp, probe
tgtggccctaaattacagcgtcatc

SEQ ID NO: 266263 - DNA, 25 bp, probe
tgtggactgctctagcaaaccctat

SEQ ID NO: 266264 - DNA, 25 bp, probe
tgtgtggctgtatgccagactcatc

SEQ ID NO: 266265 - DNA, 25 bp, probe
tgtgtggagtataggctgcatcatc

SEQ ID NO: 266266 - DNA, 25 bp, probe
tgtgtggagtataggctgcatcatc

SEQ ID NO: 266267 - DNA, 25 bp, probe
tgtgggatgttcagcactgtccctt

SEQ ID NO: 266268 - DNA, 25 bp, probe
tgaggagaggggcccattcaccttt

SEQ ID NO: 266269 - DNA, 25 bp, probe
tgtgtaaggtggcctattcctctgt

SEQ ID NO: 266270 - DNA, 25 bp, probe
tgtgtacagttggttcatccctttt

SEQ ID NO: 266271 - DNA, 25 bp, probe
tgtgttagatcaggttctgccttcc

SEQ ID NO: 266272 - DNA, 25 bp, probe
tgtgtggcaaaactgcctcctacgg

SEQ ID NO: 266273 - DNA, 25 bp, probe
tgtgtggcaaaactgcctcctacgg

SEQ ID NO: 266274 - DNA, 25 bp, probe
tgtgggagtactctcatcactacag

SEQ ID NO: 266275 - DNA, 25 bp, probe
tgtgttttggcatcagctactgaca

SEQ ID NO: 266276 - DNA, 25 bp, probe
tgtggtccatgagacagcgactggc

SEQ ID NO: 266277 - DNA, 25 bp, probe
tgtggcttcaaggacatcagggcca

SEQ ID NO: 266278 - DNA, 25 bp, probe
tgtggctgtatgccagactcatccc

SEQ ID NO: 266279 - DNA, 25 bp, probe
tgtggctgtatgccagactcatccc

SEQ ID NO: 266280 - DNA, 25 bp, probe
tgtggctgagtgaagagcacccgct

SEQ ID NO: 266281 - DNA, 25 bp, probe
tgggctgtgtcatgtacacgctgct

SEQ ID NO: 266282 - DNA, 25 bp, probe
tgggctgtgtgatatatgccacaat

SEQ ID NO: 266283 - DNA, 25 bp, probe
tgggctgcttgctgtatgagttatg

SEQ ID NO: 266284 - DNA, 25 bp, probe
tgggctcttggagtgctcatgtttg

SEQ ID NO: 266285 - DNA, 25 bp, probe
tgtccttacagaggcctctttactg

SEQ ID NO: 266286 - DNA, 25 bp, probe
tgatccttgccaaacgttttttctt

SEQ ID NO: 266287 - DNA, 25 bp, probe
tgatccttgccaaacgttttttctt

SEQ ID NO: 266288 - DNA, 25 bp, probe
tgacctccaaccaggtggtctttcg

SEQ ID NO: 266289 - DNA, 25 bp, probe
tgtcctccagacttagcggtttgtc

SEQ ID NO: 266290 - DNA, 25 bp, probe
tgtgcttgccatgtgtaggagtctg

SEQ ID NO: 266291 - DNA, 25 bp, probe
tgtgggctgcatcatgggggagctg

SEQ ID NO: 266292 - DNA, 25 bp, probe
tgtgggctgcatcatgggggagctg

SEQ ID NO: 266293 - DNA, 25 bp, probe
tgtgcagggctgttggtgggaagtt

SEQ ID NO: 266294 - DNA, 25 bp, probe
tgtgttgggcgtggttggaaggtgg

SEQ ID NO: 266295 - DNA, 25 bp, probe
tgtcctgggattgtgcaagaaggtc

SEQ ID NO: 266296 - DNA, 25 bp, probe
tgtgtctgcaaagtggtcaaaagtg

SEQ ID NO: 266297 - DNA, 25 bp, probe
tgtgtcgcccaggcgacaaaagtgc

SEQ ID NO: 266298 - DNA, 25 bp, probe
tgattgccgaagtgaagaaagcatc

SEQ ID NO: 266299 - DNA, 25 bp, probe
tgtggcacggaatgaaaacagagct

SEQ ID NO: 266300 - DNA, 25 bp, probe
tgggccggatcaagagcctgcaaac

SEQ ID NO: 266301 - DNA, 25 bp, probe
tgtgggaggtgctgatgctctgtag

SEQ ID NO: 266302 - DNA, 25 bp, probe
tgtgggcaaggcatatgtgtaaatt

SEQ ID NO: 266303 - DNA, 25 bp, probe
tgggccatttctcagctataaattg

SEQ ID NO: 266304 - DNA, 25 bp, probe
tgtgttctttccactgacaaatgag

SEQ ID NO: 266305 - DNA, 25 bp, probe
tgatacttcccacaccacaaatggg

SEQ ID NO: 266306 - DNA, 25 bp, probe
tgtgcacttttacaagccgcaaagg

SEQ ID NO: 266307 - DNA, 25 bp, probe
tgcgattttgttaacccagcgacga

SEQ ID NO: 266308 - DNA, 25 bp, probe
tgtgtttgtgttcaaagcacggcga

SEQ ID NO: 266309 - DNA, 25 bp, probe
tgtggtgggtatcaggaggcagcgg

SEQ ID NO: 266310 - DNA, 25 bp, probe
tgtgtgtgggcctggtagtagccgc

SEQ ID NO: 266311 - DNA, 25 bp, probe
tgtgtgtgggcctggtagtagccgc

SEQ ID NO: 266312 - DNA, 25 bp, probe
tgtgttgttgccatggtaatcctgc

SEQ ID NO: 266313 - DNA, 25 bp, probe
tgtgttttgagcagcaggtagcctg

SEQ ID NO: 266314 - DNA, 25 bp, probe
tgtgtctctgggagcggagaccggc

SEQ ID NO: 266315 - DNA, 25 bp, probe
tgtgactctgggtggaagtgcccag

SEQ ID NO: 266316 - DNA, 25 bp, probe
tgtgacctaggggaaacagcctcat

SEQ ID NO: 266317 - DNA, 25 bp, probe
tgtgacctaggggaaacagcctcat

SEQ ID NO: 266318 - DNA, 25 bp, probe
tgtggctccgaggaaaatcactcct

SEQ ID NO: 266319 - DNA, 25 bp, probe
tgtggatgccaaaaacttactcgat

SEQ ID NO: 266320 - DNA, 25 bp, probe
tgtggtcaacacaggttatgtagat

SEQ ID NO: 266321 - DNA, 25 bp, probe
tgtggtccaccgggacttgaagctg

SEQ ID NO: 266322 - DNA, 25 bp, probe
tgtgtttctcctgtacttgaccaca

SEQ ID NO: 266323 - DNA, 25 bp, probe
tgtttactgcacacctattacctat

SEQ ID NO: 266324 - DNA, 25 bp, probe
tgtgttccatacagccttggactag

SEQ ID NO: 266325 - DNA, 25 bp, probe
tgtgtcccaagaggtgttgaggtag

SEQ ID NO: 266326 - DNA, 25 bp, probe
tgtgcccccaggacctgtaagtaat

SEQ ID NO: 266327 - DNA, 25 bp, probe
tgttacccagagaactttccaaaca

SEQ ID NO: 266328 - DNA, 25 bp, probe
tgtggactgaaccgacttttctaaa

SEQ ID NO: 266329 - DNA, 25 bp, probe
tgtgtagtctacctttattttttat

SEQ ID NO: 266330 - DNA, 25 bp, probe
tgtgtagtctacctttattttttat

SEQ ID NO: 266331 - DNA, 25 bp, probe
tttcttctaggttttcttggcccag

SEQ ID NO: 266332 - DNA, 25 bp, probe
tgtgactttatgcttttcgtgggcc

SEQ ID NO: 266333 - DNA, 25 bp, probe
tgtgactttatgcttttcgtgggcc

SEQ ID NO: 266334 - DNA, 25 bp, probe
tgtgacatttcaagctctgttggtg

SEQ ID NO: 266335 - DNA, 25 bp, probe
tgtgtcctatgaaggggtgtggggt

SEQ ID NO: 266336 - DNA, 25 bp, probe
tgtgtgtcgatgatgggaaaaaggt

SEQ ID NO: 266337 - DNA, 25 bp, probe
tgtgtgtgcatgtatgtgtgcaaga

SEQ ID NO: 266338 - DNA, 25 bp, probe
tgtgtgtctgtaggtgcgcacttac

SEQ ID NO: 266339 - DNA, 25 bp, probe
tgtgaatctgtgggcgcccaaggcc

SEQ ID NO: 266340 - DNA, 25 bp, probe
tgtgtgtgtgtgtgcgctacaagtc

SEQ ID NO: 266341 - DNA, 25 bp, probe
tgtgcagatatttccctaacatgtc

SEQ ID NO: 266342 - DNA, 25 bp, probe
tgtggcagattgactcctaccatgg

SEQ ID NO: 266343 - DNA, 25 bp, probe
tgtggcagtatgatcacctcacggc

SEQ ID NO: 266344 - DNA, 25 bp, probe
tgtggcagtcagtaaccataggtga

SEQ ID NO: 266345 - DNA, 25 bp, probe
tgtggctgtcagtgacatcagcggt

SEQ ID NO: 266346 - DNA, 25 bp, probe
tgtggctgtctgcgagattgggcct

SEQ ID NO: 266347 - DNA, 25 bp, probe
tgggcttctgcggtgaggcagggga

SEQ ID NO: 266348 - DNA, 25 bp, probe
tgggcatttggcgtgaccatgtggg

SEQ ID NO: 266349 - DNA, 25 bp, probe
tgggcatcctggcatagccagatga

SEQ ID NO: 266350 - DNA, 25 bp, probe
tgtgtggcttggatggcgcagagaa

SEQ ID NO: 266351 - DNA, 25 bp, probe
tgtgggctatggagacacccacccg

SEQ ID NO: 266352 - DNA, 25 bp, probe
tgtgggccatggtgcccacagcacc

SEQ ID NO: 266353 - DNA, 25 bp, probe
tgtggagcacgatgtgcccagcacc

SEQ ID NO: 266354 - DNA, 25 bp, probe
tgtggagcacgatgtgcccagcacc

SEQ ID NO: 266355 - DNA, 25 bp, probe
tgtgctgccacggcaggcccaggcc

SEQ ID NO: 266356 - DNA, 25 bp, probe
tgtggacatggccaggcttggtccc

SEQ ID NO: 266357 - DNA, 25 bp, probe
tgggccatcctatcatctggagccc

SEQ ID NO: 266358 - DNA, 25 bp, probe
tgtggtccgctacctgctggaccac

SEQ ID NO: 266359 - DNA, 25 bp, probe
tgtggttcagtacggctgtaccaat

SEQ ID NO: 266360 - DNA, 25 bp, probe
tgtgtctctgagaaggctgctaaca

SEQ ID NO: 266361 - DNA, 25 bp, probe
tgtggccagagcaggtgcgcaggca

SEQ ID NO: 266362 - DNA, 25 bp, probe
tgtggccagagcaggtgcgcaggca

SEQ ID NO: 266363 - DNA, 25 bp, probe
tgtgggatgcatgccctggcaacat

SEQ ID NO: 266364 - DNA, 25 bp, probe
tgtgggatgcatgccctggcaacat

SEQ ID NO: 266365 - DNA, 25 bp, probe
tgtgtggatgatgctgccagggcgc

SEQ ID NO: 266366 - DNA, 25 bp, probe
tgtgtggatgatgctgccagggcgc

SEQ ID NO: 266367 - DNA, 25 bp, probe
tgtgtgacatagacaccagggaggg

SEQ ID NO: 266368 - DNA, 25 bp, probe
tgtgacatagacaccagggagggag

SEQ ID NO: 266369 - DNA, 25 bp, probe
tgtgcaaaccttggctcaggaagga

SEQ ID NO: 266370 - DNA, 25 bp, probe
tgtgaagtggcttctccgtacgatt

SEQ ID NO: 266371 - DNA, 25 bp, probe
tgtacagctgtgaccttacgacgct

SEQ ID NO: 266372 - DNA, 25 bp, probe
tgtacagctgtgaccttacgacgct

SEQ ID NO: 266373 - DNA, 25 bp, probe
tgtacagctgtgaccttacgacgct

SEQ ID NO: 266374 - DNA, 25 bp, probe
tgtacagctgtgaccttacgacgct

SEQ ID NO: 266375 - DNA, 25 bp, probe
tgtggcagctttgcttacgcttgcc

SEQ ID NO: 266376 - DNA, 25 bp, probe
tgtggcagctttgcttacgcttgcc

SEQ ID NO: 266377 - DNA, 25 bp, probe
tgtgagggtgtgcattacctgcatc

SEQ ID NO: 266378 - DNA, 25 bp, probe
tgtgagggtgtgcattacctgcatc

SEQ ID NO: 266379 - DNA, 25 bp, probe
tgtgcaggggccattcaaccaaagc

SEQ ID NO: 266380 - DNA, 25 bp, probe
tgtggctgggctatgccaactcagc

SEQ ID NO: 266381 - DNA, 25 bp, probe
tgtggcgggtgaatctcgtgtagcc

SEQ ID NO: 266382 - DNA, 25 bp, probe
tgtgtggggatggccacgtgaagcc

SEQ ID NO: 266383 - DNA, 25 bp, probe
tgtggggcagctgctgccttacagc

SEQ ID NO: 266384 - DNA, 25 bp, probe
tgtggggcagctgctgccttacagc

SEQ ID NO: 266385 - DNA, 25 bp, probe
tgtggaggcagcactcaccaaacag

SEQ ID NO: 266386 - DNA, 25 bp, probe
tgtggaccagagccaagctgtaaag

SEQ ID NO: 266387 - DNA, 25 bp, probe
tgtcgagaaccctgctgtacaagag

SEQ ID NO: 266388 - DNA, 25 bp, probe
tgtcgcagtcacgatcaacttaggc

SEQ ID NO: 266389 - DNA, 25 bp, probe
tgtggagccaaggcggctccaggca

SEQ ID NO: 266390 - DNA, 25 bp, probe
tgtggtgcacaagcggtgccatgaa

SEQ ID NO: 266391 - DNA, 25 bp, probe
tgtggtgaaatcaaaatcactgatt

SEQ ID NO: 266392 - DNA, 25 bp, probe
tgtggtcacctcacaagccaatgta

SEQ ID NO: 266393 - DNA, 25 bp, probe
tgtggtcacctcacaagccaatgta

SEQ ID NO: 266394 - DNA, 25 bp, probe
tgggccaaatctataccaagctcaa

SEQ ID NO: 266395 - DNA, 25 bp, probe
tgggctccagttatatgcccacctc

SEQ ID NO: 266396 - DNA, 25 bp, probe
tgggctccagttatatgcccacctc

SEQ ID NO: 266397 - DNA, 25 bp, probe
tgtggcccgtgtattcattcccaca

SEQ ID NO: 266398 - DNA, 25 bp, probe
tgtggcctcgtttttagtcatttaa

SEQ ID NO: 266399 - DNA, 25 bp, probe
tgtggcctgcagtcatgtttcggct

SEQ ID NO: 266400 - DNA, 25 bp, probe
tgtggcctgcagggtgcaggcgtgc

SEQ ID NO: 266401 - DNA, 25 bp, probe
tgtggcctgcagggtgcaggcgtgc

SEQ ID NO: 266402 - DNA, 25 bp, probe
tgtggactgcaggccacatctttgc

SEQ ID NO: 266403 - DNA, 25 bp, probe
tgtggacaggcaccaatttctttaa

SEQ ID NO: 266404 - DNA, 25 bp, probe
tgtgggcaggatacttttccatggc

SEQ ID NO: 266405 - DNA, 25 bp, probe
tgtggagcgattccggtatggctgg

SEQ ID NO: 266406 - DNA, 25 bp, probe
tgtgggttttcttctatgtgtggaa

SEQ ID NO: 266407 - DNA, 25 bp, probe
tgtggtgtctctctattatgggtca

SEQ ID NO: 266408 - DNA, 25 bp, probe
tgggctggacatataattgctggct

SEQ ID NO: 266409 - DNA, 25 bp, probe
tgggccaactaatcttctgtgcaga

SEQ ID NO: 266410 - DNA, 25 bp, probe
tgggccaactaatcttctgtgcaga

SEQ ID NO: 266411 - DNA, 25 bp, probe
tgtgggccctagtagtctttgtcac

SEQ ID NO: 266412 - DNA, 25 bp, probe
tgtggtcctctttgatatctttgtc

SEQ ID NO: 266413 - DNA, 25 bp, probe
tgggctgattccatgttcttgggca

SEQ ID NO: 266414 - DNA, 25 bp, probe
tgggctgctttctttgtgtgtggcc

SEQ ID NO: 266415 - DNA, 25 bp, probe
tgtgtgtgtttggactggtggccca

SEQ ID NO: 266416 - DNA, 25 bp, probe
tgtgtgcttttggagcgggcagggg

SEQ ID NO: 266417 - DNA, 25 bp, probe
tgtgtgcttttggagcgggcagggg

SEQ ID NO: 266418 - DNA, 25 bp, probe
tgtgtggtatctgaggctggcaaag

SEQ ID NO: 266419 - DNA, 25 bp, probe
tgtgtggtctcagaggctctgcttc

SEQ ID NO: 266420 - DNA, 25 bp, probe
tgtgtgctgcacggtgcaggcctca

SEQ ID NO: 266421 - DNA, 25 bp, probe
tgtggtgcatctgagccagtctcag

SEQ ID NO: 266422 - DNA, 25 bp, probe
tgtggccatcacactcatggctgca

SEQ ID NO: 266423 - DNA, 25 bp, probe
tgggccagctaaacatgcttcatcg

SEQ ID NO: 266424 - DNA, 25 bp, probe
tgtggccacagacaacttcatcagc

SEQ ID NO: 266425 - DNA, 25 bp, probe
tgtggtcacagagacctgtatggat

SEQ ID NO: 266426 - DNA, 25 bp, probe
tgtggtcattgatctccctatcaat

SEQ ID NO: 266427 - DNA, 25 bp, probe
tgtggtggtgaactccccacaaggc

SEQ ID NO: 266428 - DNA, 25 bp, probe
tgtaagggaaactgccagcaacgca

SEQ ID NO: 266429 - DNA, 25 bp, probe
tgtgagcaggaagcacggggccacc

SEQ ID NO: 266430 - DNA, 25 bp, probe
tgtgagcaggaagcacggggccacc

SEQ ID NO: 266431 - DNA, 25 bp, probe
tgtgagcaggaagcacggggccacc

SEQ ID NO: 266432 - DNA, 25 bp, probe
tgtggacgaagtttggcccaacctt

SEQ ID NO: 266433 - DNA, 25 bp, probe
tgtggacccttttggtttagctctt

SEQ ID NO: 266434 - DNA, 25 bp, probe
tgtggacccttttggtttagctctt

SEQ ID NO: 266435 - DNA, 25 bp, probe
tgtcgatcccttctgaggtatggcc

SEQ ID NO: 266436 - DNA, 25 bp, probe
tgtgttccctgtctcaggtcaagca

SEQ ID NO: 266437 - DNA, 25 bp, probe
tgtgctatccctgtacgcctctggc

SEQ ID NO: 266438 - DNA, 25 bp, probe
tgtgtgttctatgggaccctcttca

SEQ ID NO: 266439 - DNA, 25 bp, probe
tgtgtgttctatgggaccctcttca

SEQ ID NO: 266440 - DNA, 25 bp, probe
tgtgtgtgtctgtaggtgcgcactt

SEQ ID NO: 266441 - DNA, 25 bp, probe
tgtggtgttgaccatatggctcgtg

SEQ ID NO: 266442 - DNA, 25 bp, probe
tgtggatccaactagattgctttta

SEQ ID NO: 266443 - DNA, 25 bp, probe
tgtggaccaactttatctgataatc

SEQ ID NO: 266444 - DNA, 25 bp, probe
tgtggaccaactttatctgataatc

SEQ ID NO: 266445 - DNA, 25 bp, probe
tgtggaacccattgtgacgatgagt

SEQ ID NO: 266446 - DNA, 25 bp, probe
tgtggaacccattgtgacgatgagt

SEQ ID NO: 266447 - DNA, 25 bp, probe
tgtgggaccagatgtcatctctggt

SEQ ID NO: 266448 - DNA, 25 bp, probe
tgtgggaagtcatgtcatttggaga

SEQ ID NO: 266449 - DNA, 25 bp, probe
tgtgggaactcatgactctgggcca

SEQ ID NO: 266450 - DNA, 25 bp, probe
tgtggagtactatgtgccggagacg

SEQ ID NO: 266451 - DNA, 25 bp, probe
tgtggagtactatgtgccggagacg

SEQ ID NO: 266452 - DNA, 25 bp, probe
tgtggagcgtcgtgtcacagtggac

SEQ ID NO: 266453 - DNA, 25 bp, probe
tgtggcagcgttggtggccagtggt

SEQ ID NO: 266454 - DNA, 25 bp, probe
tgtggggtatagccggcacatggtg

SEQ ID NO: 266455 - DNA, 25 bp, probe
tgtccggagatacctactcaggcgg

SEQ ID NO: 266456 - DNA, 25 bp, probe
tgtccaggtgaacttctacggggac

SEQ ID NO: 266457 - DNA, 25 bp, probe
tgacccggaagcacttggaggacac

SEQ ID NO: 266458 - DNA, 25 bp, probe
tgaaggggaagacctattccgacgg

SEQ ID NO: 266459 - DNA, 25 bp, probe
taggagtgggagtgtttctaagggg

SEQ ID NO: 266460 - DNA, 25 bp, probe
tgaggatttgggttttctataaggg

SEQ ID NO: 266461 - DNA, 25 bp, probe
tgaggaagtaagggtttagcaaggt

SEQ ID NO: 266462 - DNA, 25 bp, probe
tgtcaaagttacagtttacgcagga

SEQ ID NO: 266463 - DNA, 25 bp, probe
tgtaaattctaatacttgaagtgga

SEQ ID NO: 266464 - DNA, 25 bp, probe
tgtaagtcccagctacttgcaaggc

SEQ ID NO: 266465 - DNA, 25 bp, probe
tgtacattcccactctaattgctaa

SEQ ID NO: 266466 - DNA, 25 bp, probe
tgtattttccatactgagtttaaaa

SEQ ID NO: 266467 - DNA, 25 bp, probe
tgtgcagatattcctaaagttttat

SEQ ID NO: 266468 - DNA, 25 bp, probe
tgtggcatcattataaggcttaatt

SEQ ID NO: 266469 - DNA, 25 bp, probe
tgtggcctttgcaatttgttaaggt

SEQ ID NO: 266470 - DNA, 25 bp, probe
tgtggagctttggcatcttgctctg

SEQ ID NO: 266471 - DNA, 25 bp, probe
tgtggattgtgtcctatgcgctcat

SEQ ID NO: 266472 - DNA, 25 bp, probe
tgtggacgttcagatgcagagcata

SEQ ID NO: 266473 - DNA, 25 bp, probe
tgtggactgtcaatcttagatagat

SEQ ID NO: 266474 - DNA, 25 bp, probe
tgtgggctgcatcttctatgagatg

SEQ ID NO: 266475 - DNA, 25 bp, probe
tgtgtggtcagcttttggaaggcca

SEQ ID NO: 266476 - DNA, 25 bp, probe
tgtgtctgtctattttgatccggcc

SEQ ID NO: 266477 - DNA, 25 bp, probe
tgtgtgctgatttctgctttcacca

SEQ ID NO: 266478 - DNA, 25 bp, probe
tgtgtgagcatctctgtgtacccac

SEQ ID NO: 266479 - DNA, 25 bp, probe
tgtggcagccatcttggagctggac

SEQ ID NO: 266480 - DNA, 25 bp, probe
tgtggccgcaggttatgcgctgtac

SEQ ID NO: 266481 - DNA, 25 bp, probe
tgtgaaagcaggtgtgcgtgcacac

SEQ ID NO: 266482 - DNA, 25 bp, probe
tgtgaaagcaggtgtgcgtgcacac

SEQ ID NO: 266483 - DNA, 25 bp, probe
tgtgatcagaagctgcgtcccaaca

SEQ ID NO: 266484 - DNA, 25 bp, probe
tgtcacagctaaggagcatgcccat

SEQ ID NO: 266485 - DNA, 25 bp, probe
tgtctcagcatccaggagggcttca

SEQ ID NO: 266486 - DNA, 25 bp, probe
tgtgctgccatcctggatacgggca

SEQ ID NO: 266487 - DNA, 25 bp, probe
tgtggccaatctagtcctggaacaa

SEQ ID NO: 266488 - DNA, 25 bp, probe
tgtgggaatccaccctgagacatgc

SEQ ID NO: 266489 - DNA, 25 bp, probe
tgtggatttccaccttgatggcatc

SEQ ID NO: 266490 - DNA, 25 bp, probe
tgtggcgttctctcttgagagaccc

SEQ ID NO: 266491 - DNA, 25 bp, probe
tgtgggaatttggggagtggctgcc

SEQ ID NO: 266492 - DNA, 25 bp, probe
tgtggagtttggtggatgacgtgcc

SEQ ID NO: 266493 - DNA, 25 bp, probe
tgtggagttatggtgtgtgatgggg

SEQ ID NO: 266494 - DNA, 25 bp, probe
tgtgtcaggcttgggggatgggctc

SEQ ID NO: 266495 - DNA, 25 bp, probe
tgtgtgcattccaggggactgtgtc

SEQ ID NO: 266496 - DNA, 25 bp, probe
tgtgtgcattccaggggactgtgtc

SEQ ID NO: 266497 - DNA, 25 bp, probe
tgtgtcactctaaagggaactgtga

SEQ ID NO: 266498 - DNA, 25 bp, probe
tgtggcactttggggagaccatgtg

SEQ ID NO: 266499 - DNA, 25 bp, probe
tgtggagatttcctgtgagaacatg

SEQ ID NO: 266500 - DNA, 25 bp, probe
tgtgttttgtcactctagaagagtt

SEQ ID NO: 266501 - DNA, 25 bp, probe
tgtgtgatttgtgttatactggttg

SEQ ID NO: 266502 - DNA, 25 bp, probe
tgtggatttctatgttatgccggtg

SEQ ID NO: 266503 - DNA, 25 bp, probe
tgtggttagcataggttatactttg

SEQ ID NO: 266504 - DNA, 25 bp, probe
tgtgcaagtcactggttttttatga

SEQ ID NO: 266505 - DNA, 25 bp, probe
tgtgaagtactgcgtggtgtatgat

SEQ ID NO: 266506 - DNA, 25 bp, probe
tgtgtggtgacttgcggatttatgt

SEQ ID NO: 266507 - DNA, 25 bp, probe
tgtgtgggcatttggcgtgaccatg

SEQ ID NO: 266508 - DNA, 25 bp, probe
tgtggaagcatttcgcgatggacag

SEQ ID NO: 266509 - DNA, 25 bp, probe
tgtgtgtgacatagacaccagggag

SEQ ID NO: 266510 - DNA, 25 bp, probe
tgtgtggatcaccatcatcaagctg

SEQ ID NO: 266511 - DNA, 25 bp, probe
tgtgtgtgctcagtgccatgaagat

SEQ ID NO: 266512 - DNA, 25 bp, probe
tgtgtgactcaaaccaaatcactga

SEQ ID NO: 266513 - DNA, 25 bp, probe
tgtgtgtgcctcacgaaatggctgg

SEQ ID NO: 266514 - DNA, 25 bp, probe
tgtgtgtagctgctcggacactcag

SEQ ID NO: 266515 - DNA, 25 bp, probe
tgtgtgtagctgctcggacactcag

SEQ ID NO: 266516 - DNA, 25 bp, probe
tgtgtgtgcacgcatggctgagcat

SEQ ID NO: 266517 - DNA, 25 bp, probe
tgtgtatgcaggcatcctcagctac

SEQ ID NO: 266518 - DNA, 25 bp, probe
tgtgcactgcaggaacctactgaga

SEQ ID NO: 266519 - DNA, 25 bp, probe
tgtgcctcctaatatcatttgtact

SEQ ID NO: 266520 - DNA, 25 bp, probe
tgtggctcctatctgtgttttgaat

SEQ ID NO: 266521 - DNA, 25 bp, probe
tgtgtcctgctgcaatgtgttctgt

SEQ ID NO: 266522 - DNA, 25 bp, probe
tgtgggctgtccaagtgacctggaa

SEQ ID NO: 266523 - DNA, 25 bp, probe
tgtgggatttccctacttgctgtat

SEQ ID NO: 266524 - DNA, 25 bp, probe
tgtgggcatttggcgtgaccatgtg

SEQ ID NO: 266525 - DNA, 25 bp, probe
tctgtaattttcttaccatcgggta

SEQ ID NO: 266526 - DNA, 25 bp, probe
tctgtaataattgccctccggcgag

SEQ ID NO: 266527 - DNA, 25 bp, probe
tgtgtaatatacagcctctccaacg

SEQ ID NO: 266528 - DNA, 25 bp, probe
tgtgtaccatactgtgtgctccagc

SEQ ID NO: 266529 - DNA, 25 bp, probe
tgtgtcacttcattgaggtcctggg

SEQ ID NO: 266530 - DNA, 25 bp, probe
tgtgtggctgtgatgagcccctgag

SEQ ID NO: 266531 - DNA, 25 bp, probe
tgtgggtctgagatgccctttgaaa

SEQ ID NO: 266532 - DNA, 25 bp, probe
tgtggagtgcggagcctcattacga

SEQ ID NO: 266533 - DNA, 25 bp, probe
tgtgaggctggaatctcccattcac

SEQ ID NO: 266534 - DNA, 25 bp, probe
tgtgaggctggaatctcccattcac

SEQ ID NO: 266535 - DNA, 25 bp, probe
tgtgacaggaattctccctggcatt

SEQ ID NO: 266536 - DNA, 25 bp, probe
tgtgtgatggtgcactccagggcat

SEQ ID NO: 266537 - DNA, 25 bp, probe
tgtgggagtgcactgtgctctgggc

SEQ ID NO: 266538 - DNA, 25 bp, probe
tgtgggagtgcactgtgctctgggc

SEQ ID NO: 266539 - DNA, 25 bp, probe
tgtgctgtggtgcatggcagcggag

SEQ ID NO: 266540 - DNA, 25 bp, probe
tgtgtattctgttggcagctgcggc

SEQ ID NO: 266541 - DNA, 25 bp, probe
tgtgctatgcctttgtgttctcagc

SEQ ID NO: 266542 - DNA, 25 bp, probe
tgtgaagtactccagttctcagcca

SEQ ID NO: 266543 - DNA, 25 bp, probe
tgtatgactgccatgagttccacca

SEQ ID NO: 266544 - DNA, 25 bp, probe
tgtacatggtcaccatgtctcccca

SEQ ID NO: 266545 - DNA, 25 bp, probe
tgtgaggagaattctgtcccctacc

SEQ ID NO: 266546 - DNA, 25 bp, probe
tgtgaggagaattctgtcccctacc

SEQ ID NO: 266547 - DNA, 25 bp, probe
tgtgatgcagatcacacttggccct

SEQ ID NO: 266548 - DNA, 25 bp, probe
tgtgcatatgcttgacagctttgaa

SEQ ID NO: 266549 - DNA, 25 bp, probe
tgtgtagctgtgtcatgtatatacc

SEQ ID NO: 266550 - DNA, 25 bp, probe
tgtgatagaggtggctacagacgca

SEQ ID NO: 266551 - DNA, 25 bp, probe
tgtgagagccagctcaacagcaccg

SEQ ID NO: 266552 - DNA, 25 bp, probe
tgtgagagccagctcaacagcaccg

SEQ ID NO: 266553 - DNA, 25 bp, probe
tgtgcaagaaggtcagcagcaccca

SEQ ID NO: 266554 - DNA, 25 bp, probe
tgtggtgaaggagcagtcccagcct

SEQ ID NO: 266555 - DNA, 25 bp, probe
tgtggcttgggaggccatggccagc

SEQ ID NO: 266556 - DNA, 25 bp, probe
tgtgtgctctggcgggcaggacaca

SEQ ID NO: 266557 - DNA, 25 bp, probe
tgtgtgctctggcgggcaggacaca

SEQ ID NO: 266558 - DNA, 25 bp, probe
tgtggtgctggggcggagcaagtcc

SEQ ID NO: 266559 - DNA, 25 bp, probe
tgtgaagcggcagcaggagccactg

SEQ ID NO: 266560 - DNA, 25 bp, probe
tgtgaagcggcagcaggagccactg

SEQ ID NO: 266561 - DNA, 25 bp, probe
tgtggatggagagcgtgcagtgccg

SEQ ID NO: 266562 - DNA, 25 bp, probe
tgtggatggagagcgtgcagtgccg

SEQ ID NO: 266563 - DNA, 25 bp, probe
tgtggagtgaggccagtaagctcag

SEQ ID NO: 266564 - DNA, 25 bp, probe
tgtggagggctggagcttcagcgag

SEQ ID NO: 266565 - DNA, 25 bp, probe
tgtgtgatggtggtgagcttcagca

SEQ ID NO: 266566 - DNA, 25 bp, probe
tgtgtgatggtggtgagcttcagca

SEQ ID NO: 266567 - DNA, 25 bp, probe
tgtgtagctgctcggacactcagac

SEQ ID NO: 266568 - DNA, 25 bp, probe
tgtgtagctgctcggacactcagac

SEQ ID NO: 266569 - DNA, 25 bp, probe
tgtgtgagcaggacccactcatagc

SEQ ID NO: 266570 - DNA, 25 bp, probe
tgtgtgtgaagtgacctatgacaaa

SEQ ID NO: 266571 - DNA, 25 bp, probe
tgtgtgttggctgagctgttactag

SEQ ID NO: 266572 - DNA, 25 bp, probe
tgtggtcacctggattggctacttt

SEQ ID NO: 266573 - DNA, 25 bp, probe
tgtggtgcacaaggactggaactcc

SEQ ID NO: 266574 - DNA, 25 bp, probe
tgtgttcaaagcacggcgaggcctt

SEQ ID NO: 266575 - DNA, 25 bp, probe
tgtttaagcgttgactgggcctggc

SEQ ID NO: 266576 - DNA, 25 bp, probe
tgtttaagcgttgactgggcctggc

SEQ ID NO: 266577 - DNA, 25 bp, probe
tgttttacgtttttgagcctgcttc

SEQ ID NO: 266578 - DNA, 25 bp, probe
tgttttccaactattagcccttttg

SEQ ID NO: 266579 - DNA, 25 bp, probe
tgtgttttaagtatatgagtgcccc

SEQ ID NO: 266580 - DNA, 25 bp, probe
tgtggatttatagtagttcagtcat

SEQ ID NO: 266581 - DNA, 25 bp, probe
tgtggattgtcttctttttgtataa

SEQ ID NO: 266582 - DNA, 25 bp, probe
tgtgggtgtgtatcttcttatctca

SEQ ID NO: 266583 - DNA, 25 bp, probe
tgtggtttatcattctctattttca

SEQ ID NO: 266584 - DNA, 25 bp, probe
tgtggaatcctattctcttattctc

SEQ ID NO: 266585 - DNA, 25 bp, probe
tgtgaaattctctttcctgtagtcc

SEQ ID NO: 266586 - DNA, 25 bp, probe
tgtgtcaaatactggcctgatgagt

SEQ ID NO: 266587 - DNA, 25 bp, probe
tgtgtcaaatactggtctgaagagg

SEQ ID NO: 266588 - DNA, 25 bp, probe
tgtgatcaaaagggctatgggaagg

SEQ ID NO: 266589 - DNA, 25 bp, probe
tgtgtgaagtactgcgtggtgtatg

SEQ ID NO: 266590 - DNA, 25 bp, probe
tgtgtgtgtgtgtgtcttggtgaag

SEQ ID NO: 266591 - DNA, 25 bp, probe
tgtgatgtgtggagtataggctgca

SEQ ID NO: 266592 - DNA, 25 bp, probe
tgtgtatgggggaaggcgctgggtg

SEQ ID NO: 266593 - DNA, 25 bp, probe
tgtgtagggggacagctgtggctgg

SEQ ID NO: 266594 - DNA, 25 bp, probe
tgtgtagggggacagctgtggctgg

SEQ ID NO: 266595 - DNA, 25 bp, probe
tgtgtggcagggggatggcaggttg

SEQ ID NO: 266596 - DNA, 25 bp, probe
tgtgtctgcaggtagaatgcacagg

SEQ ID NO: 266597 - DNA, 25 bp, probe
tgtgcccaggattatattagcatta

SEQ ID NO: 266598 - DNA, 25 bp, probe
tgtgcagcctttcatgttgacatta

SEQ ID NO: 266599 - DNA, 25 bp, probe
tgtgcatcgctgtgtagtgtgaaag

SEQ ID NO: 266600 - DNA, 25 bp, probe
tgtgtactggccaagtcgagaagaa

SEQ ID NO: 266601 - DNA, 25 bp, probe
tgtgtgacttgtggcgtcttataaa

SEQ ID NO: 266602 - DNA, 25 bp, probe
tgtgtgacttgtggcgtcttataaa

SEQ ID NO: 266603 - DNA, 25 bp, probe
tgtggtcttgttcacatgctccacg

SEQ ID NO: 266604 - DNA, 25 bp, probe
tgtgcgtcaaggactactgcttcgc

SEQ ID NO: 266605 - DNA, 25 bp, probe
tgtgcgtcaaggactactgcttcgc

SEQ ID NO: 266606 - DNA, 25 bp, probe
tgtgcattccaggggactgtgtctc

SEQ ID NO: 266607 - DNA, 25 bp, probe
tgtgcattccaggggactgtgtctc

SEQ ID NO: 266608 - DNA, 25 bp, probe
tgtcatctccagcaaaccagtattt

SEQ ID NO: 266609 - DNA, 25 bp, probe
tgtactcgggaatccggcacaaggc

SEQ ID NO: 266610 - DNA, 25 bp, probe
tgatgactcagggtgacccggccaa

SEQ ID NO: 266611 - DNA, 25 bp, probe
tgatgactcagggtgacccggccaa

SEQ ID NO: 266612 - DNA, 25 bp, probe
tgtcaccacggccacattctgtggc

SEQ ID NO: 266613 - DNA, 25 bp, probe
tgtgacacagcttgtacagtctgat

SEQ ID NO: 266614 - DNA, 25 bp, probe
tgtgatgcctgttgagtcagatgct

SEQ ID NO: 266615 - DNA, 25 bp, probe
tgtgtgcacgcatggctgagcatgt

SEQ ID NO: 266616 - DNA, 25 bp, probe
tgtgctgaagctggtctgtgcagac

SEQ ID NO: 266617 - DNA, 25 bp, probe
tgtgctgaagctggtctgtgcagac

SEQ ID NO: 266618 - DNA, 25 bp, probe
tgtgtgtatgcattgccctatgcac

SEQ ID NO: 266619 - DNA, 25 bp, probe
tgtgtatgcattgccctatgcactg

SEQ ID NO: 266620 - DNA, 25 bp, probe
tgtcgtgcatgtgggatgtatttga

SEQ ID NO: 266621 - DNA, 25 bp, probe
tgtggtgctcttcgtgtactggaag

SEQ ID NO: 266622 - DNA, 25 bp, probe
tgtggtgctcttcgtgtactggaag

SEQ ID NO: 266623 - DNA, 25 bp, probe
tgtaggcctcatcttacaggtccta

SEQ ID NO: 266624 - DNA, 25 bp, probe
tgttccccatttaaagttctggagc

SEQ ID NO: 266625 - DNA, 25 bp, probe
tgtgtcccccataaaagatatgttg

SEQ ID NO: 266626 - DNA, 25 bp, probe
tgtgtcccccataaaagatatgttg

SEQ ID NO: 266627 - DNA, 25 bp, probe
tgtgtgcctggcgagaagaatattt

SEQ ID NO: 266628 - DNA, 25 bp, probe
tgtgtgcctcacgaaatggctggaa

SEQ ID NO: 266629 - DNA, 25 bp, probe
tgtctggtgcccaatcccaggaagt

SEQ ID NO: 266630 - DNA, 25 bp, probe
tgtccattaccaaagcctggaagtt

SEQ ID NO: 266631 - DNA, 25 bp, probe
tgtccattaccaaagcctggaagtt

SEQ ID NO: 266632 - DNA, 25 bp, probe
tgtgctattcatcccatacctggga

SEQ ID NO: 266633 - DNA, 25 bp, probe
tgtgctctgtatccagacacacttg

SEQ ID NO: 266634 - DNA, 25 bp, probe
tgtcatcgatgacagatccctggcc

SEQ ID NO: 266635 - DNA, 25 bp, probe
tgtctcgagagaagatcaccctcct

SEQ ID NO: 266636 - DNA, 25 bp, probe
tgtgcctgagaggtactgcctctct

SEQ ID NO: 266637 - DNA, 25 bp, probe
tgtgaaactgtatctgccactcatt

SEQ ID NO: 266638 - DNA, 25 bp, probe
tgtgtgaaactgtatctgccactca

SEQ ID NO: 266639 - DNA, 25 bp, probe
tgtgtccaacgattcggactcggac

SEQ ID NO: 266640 - DNA, 25 bp, probe
tgtgtccaaccgtaggagccacagc

SEQ ID NO: 266641 - DNA, 25 bp, probe
tgtgtccaaccgtaggagccacagc

SEQ ID NO: 266642 - DNA, 25 bp, probe
tgtggtcaccagggaggagcccatt

SEQ ID NO: 266643 - DNA, 25 bp, probe
tgtcgtatccggagagagctatata

SEQ ID NO: 266644 - DNA, 25 bp, probe
tgtcgattaagaccggagcttgtcc

SEQ ID NO: 266645 - DNA, 25 bp, probe
tgtgtgttcaagtgcgtgactgtat

SEQ ID NO: 266646 - DNA, 25 bp, probe
tgtggtttggggcagatctgtagta

SEQ ID NO: 266647 - DNA, 25 bp, probe
tgtgatgtgttgggcgtggttggaa

SEQ ID NO: 266648 - DNA, 25 bp, probe
tgtgtgattggactcgtttatggca

SEQ ID NO: 266649 - DNA, 25 bp, probe
tgtccatctgggcctttgtatgagc

SEQ ID NO: 266650 - DNA, 25 bp, probe
tgtcctatggagatattacagtgga

SEQ ID NO: 266651 - DNA, 25 bp, probe
tgctcccgtggaagattaaagggct

SEQ ID NO: 266652 - DNA, 25 bp, probe
tgtctcctatggacgaaacaatggc

SEQ ID NO: 266653 - DNA, 25 bp, probe
tgtgatctcaagcccgaaaatatag

SEQ ID NO: 266654 - DNA, 25 bp, probe
tgtgtcaatacccgaaatgatgtac

SEQ ID NO: 266655 - DNA, 25 bp, probe
tgtgtcttagacctgcaaacagcta

SEQ ID NO: 266656 - DNA, 25 bp, probe
tgtgtcaaagaagtgcagaacgtac

SEQ ID NO: 266657 - DNA, 25 bp, probe
tgttcaaagggcaaaacgaaccaat

SEQ ID NO: 266658 - DNA, 25 bp, probe
tgtacaaggggatcgacaaccacac

SEQ ID NO: 266659 - DNA, 25 bp, probe
tgaccttggggagcagcaccccagc

SEQ ID NO: 266660 - DNA, 25 bp, probe
tgaagtggggccacgaggccatcga

SEQ ID NO: 266661 - DNA, 25 bp, probe
tgtattgcgggcgctctagaggata

SEQ ID NO: 266662 - DNA, 25 bp, probe
tgtgggtggagggccagagtgtgta

SEQ ID NO: 266663 - DNA, 25 bp, probe
tgtggtgtggcagcggcagaggcta

SEQ ID NO: 266664 - DNA, 25 bp, probe
tgtggtctacgaggtcagggatggt

SEQ ID NO: 266665 - DNA, 25 bp, probe
tgtggatcatacgcccaagtgtggg

SEQ ID NO: 266666 - DNA, 25 bp, probe
tgtggatcatacgcccaagtgtggg

SEQ ID NO: 266667 - DNA, 25 bp, probe
tgtgacaacaccaccaagcctggtg

SEQ ID NO: 266668 - DNA, 25 bp, probe
tgtgcataaaacaccaaattctggt

SEQ ID NO: 266669 - DNA, 25 bp, probe
tgtgcaattaacagccaacattata

SEQ ID NO: 266670 - DNA, 25 bp, probe
tgtccagtaacattcgcaaaataat

SEQ ID NO: 266671 - DNA, 25 bp, probe
tgtccagtaacattcgcaaaataat

SEQ ID NO: 266672 - DNA, 25 bp, probe
tgtccagctaacagcggctcaagaa

SEQ ID NO: 266673 - DNA, 25 bp, probe
tgtctttgcaccacgtctaggaaga

SEQ ID NO: 266674 - DNA, 25 bp, probe
tgctcagggcccacattaaggaaat

SEQ ID NO: 266675 - DNA, 25 bp, probe
tgtctggactacagttcaagtggac

SEQ ID NO: 266676 - DNA, 25 bp, probe
tgtcttgactacctttcaaaaccag

SEQ ID NO: 266677 - DNA, 25 bp, probe
tgtcttcacaatagtcttcaacaag

SEQ ID NO: 266678 - DNA, 25 bp, probe
tgtgcttcaatttgtccttcagtag

SEQ ID NO: 266679 - DNA, 25 bp, probe
tgtgcagcttactggccattgcagt

SEQ ID NO: 266680 - DNA, 25 bp, probe
tgtgatcattactggccagcggacc

SEQ ID NO: 266681 - DNA, 25 bp, probe
tgtgctgatctagaggtgcaggaga

SEQ ID NO: 266682 - DNA, 25 bp, probe
tgtgctatctatggccctgcaaaaa

SEQ ID NO: 266683 - DNA, 25 bp, probe
tgtgcagtattgccaccagaagaaa

SEQ ID NO: 266684 - DNA, 25 bp, probe
tgtgagcaatgtgctgaaagagata

SEQ ID NO: 266685 - DNA, 25 bp, probe
tgtgagattgcaaccagaagctgga

SEQ ID NO: 266686 - DNA, 25 bp, probe
tgtgagattgcaaccagaagctgga

SEQ ID NO: 266687 - DNA, 25 bp, probe
tgtggttgctaccagacaggctcag

SEQ ID NO: 266688 - DNA, 25 bp, probe
tgtgcggtgcattggagacgtccgt

SEQ ID NO: 266689 - DNA, 25 bp, probe
tgtggtctgcaatggacagctccaa

SEQ ID NO: 266690 - DNA, 25 bp, probe
tgtgtgcccaaaaaagtgctcagaa

SEQ ID NO: 266691 - DNA, 25 bp, probe
tgtgtctccagaattgcaaccatag

SEQ ID NO: 266692 - DNA, 25 bp, probe
tgtgtgccactgtttgcttcaacag

SEQ ID NO: 266693 - DNA, 25 bp, probe
tgtgagctctcaaatgtcttcttcc

SEQ ID NO: 266694 - DNA, 25 bp, probe
tgtggttattatttttgtcacggaa

SEQ ID NO: 266695 - DNA, 25 bp, probe
tgtgtagttgtatatttgtaagatg

SEQ ID NO: 266696 - DNA, 25 bp, probe
tgctgtcagcctaccgttttaggtg

SEQ ID NO: 266697 - DNA, 25 bp, probe
tgtgtagccacctatgttttaggca

SEQ ID NO: 266698 - DNA, 25 bp, probe
tgtgtagcttcttatgtccttggga

SEQ ID NO: 266699 - DNA, 25 bp, probe
tgtgtcagattaccagttataggaa

SEQ ID NO: 266700 - DNA, 25 bp, probe
tgtgtccatccatcaggtgaagaaa

SEQ ID NO: 266701 - DNA, 25 bp, probe
tgtcccacctaacgttgcaactggg

SEQ ID NO: 266702 - DNA, 25 bp, probe
tgtcccacctaacgttgcaactggg

SEQ ID NO: 266703 - DNA, 25 bp, probe
tgtcccccaagagggtgcttcgagg

SEQ ID NO: 266704 - DNA, 25 bp, probe
tccacgacaaggtggttgcccggga

SEQ ID NO: 266705 - DNA, 25 bp, probe
tcccgaccggttggagtgggcggag

SEQ ID NO: 266706 - DNA, 25 bp, probe
tcgcccccgaaatcctgcggggaga

SEQ ID NO: 266707 - DNA, 25 bp, probe
tgctgcccccagaaaaaggccgggt

SEQ ID NO: 266708 - DNA, 25 bp, probe
tgctgcccccagaaaaaggccgggt

SEQ ID NO: 266709 - DNA, 25 bp, probe
tgtccaactattcaaaggctaaggt

SEQ ID NO: 266710 - DNA, 25 bp, probe
tgtcaaactgtttagcaaatgtaag

SEQ ID NO: 266711 - DNA, 25 bp, probe
tgtcaaactgtttagcaaatgtaag

SEQ ID NO: 266712 - DNA, 25 bp, probe
tgtgaacactgatgcaagaaacttg

SEQ ID NO: 266713 - DNA, 25 bp, probe
tgtgaaactttctgaagccttgtca

SEQ ID NO: 266714 - DNA, 25 bp, probe
tgtgaaactctacagaaccctggcc

SEQ ID NO: 266715 - DNA, 25 bp, probe
tgtgaaactctacagaaccctggcc

SEQ ID NO: 266716 - DNA, 25 bp, probe
tgtgttacccataaacactgccatc

SEQ ID NO: 266717 - DNA, 25 bp, probe
tgtgggactacaggtactcgccacc

SEQ ID NO: 266718 - DNA, 25 bp, probe
tgtgggggacgcttacatcaggcgc

SEQ ID NO: 266719 - DNA, 25 bp, probe
tgtggggggcgcttgagaacagcag

SEQ ID NO: 266720 - DNA, 25 bp, probe
tgtggtcggggccaacaacagagct

SEQ ID NO: 266721 - DNA, 25 bp, probe
tgtggtcggggccaacaacagagct

SEQ ID NO: 266722 - DNA, 25 bp, probe
tgtgcggaccggcagagaacaaatg

SEQ ID NO: 266723 - DNA, 25 bp, probe
tgtgggaccagggagaatgcccaca

SEQ ID NO: 266724 - DNA, 25 bp, probe
tgtgaaggtcgtggagttgcccacc

SEQ ID NO: 266725 - DNA, 25 bp, probe
tgtgtagaatcactcgccattctcc

SEQ ID NO: 266726 - DNA, 25 bp, probe
tgttaaaatgtcgcttttcatctcc

SEQ ID NO: 266727 - DNA, 25 bp, probe
tgtgttaaaatgtcgcttttcatct

SEQ ID NO: 266728 - DNA, 25 bp, probe
tgtgtgtctaaatggcttctttgtt

SEQ ID NO: 266729 - DNA, 25 bp, probe
tgtgttttatactgcaacaatatgc

SEQ ID NO: 266730 - DNA, 25 bp, probe
tgtgcttttcaataggaatcattct

SEQ ID NO: 266731 - DNA, 25 bp, probe
tgtcttttacacagtggtcattccc

SEQ ID NO: 266732 - DNA, 25 bp, probe
tgtttgttactctgtcgttatccag

SEQ ID NO: 266733 - DNA, 25 bp, probe
tgtttgttactctgtcgttatccag

SEQ ID NO: 266734 - DNA, 25 bp, probe
tgtgcttttaatgtacgttacagct

SEQ ID NO: 266735 - DNA, 25 bp, probe
tgtgttttgaatggtgttgtatgcc

SEQ ID NO: 266736 - DNA, 25 bp, probe
tgtgtgttgggacgtttttctgcct

SEQ ID NO: 266737 - DNA, 25 bp, probe
tgtgacttcggtcttcttgttttta

SEQ ID NO: 266738 - DNA, 25 bp, probe
tgtgatgtttgtattcttttttttt

SEQ ID NO: 266739 - DNA, 25 bp, probe
tgtgtttatgcccccaatttatttt

SEQ ID NO: 266740 - DNA, 25 bp, probe
tgtgtttcatgctctggattttttt

SEQ ID NO: 266741 - DNA, 25 bp, probe
tgtgttcatcctactcagcaagttt

SEQ ID NO: 266742 - DNA, 25 bp, probe
tgtgttcatattctgtctagtgtag

SEQ ID NO: 266743 - DNA, 25 bp, probe
tgtggtgaatgtgttttttaaatgg

SEQ ID NO: 266744 - DNA, 25 bp, probe
tgtgagtctagtttttgctttacca

SEQ ID NO: 266745 - DNA, 25 bp, probe
tgtgattctgaattcttggatatta

SEQ ID NO: 266746 - DNA, 25 bp, probe
tgtatcattaatgtaggtttagata

SEQ ID NO: 266747 - DNA, 25 bp, probe
tgtcatattcatctttggtttacta

SEQ ID NO: 266748 - DNA, 25 bp, probe
tgtgtcattgtttgttggctttatc

SEQ ID NO: 266749 - DNA, 25 bp, probe
tgtgtatgcgtttgggattgttctg

SEQ ID NO: 266750 - DNA, 25 bp, probe
tgtgctatggtgtggccattttcac

SEQ ID NO: 266751 - DNA, 25 bp, probe
tgtgtcaggggacagcttgtgtcac

SEQ ID NO: 266752 - DNA, 25 bp, probe
tgtgtcttgggaacctgtgattacc

SEQ ID NO: 266753 - DNA, 25 bp, probe
tgtgttctacacagtggtgattccc

SEQ ID NO: 266754 - DNA, 25 bp, probe
tgtgctttcacgggtgagcctaccc

SEQ ID NO: 266755 - DNA, 25 bp, probe
tgtgtctgtaggtgcgcacttacct

SEQ ID NO: 266756 - DNA, 25 bp, probe
tgtgttttgtgtggggcttccctaa

SEQ ID NO: 266757 - DNA, 25 bp, probe
tgtgtcttttgaagggctataccag

SEQ ID NO: 266758 - DNA, 25 bp, probe
tgttcttgggatagtccttccgtgc

SEQ ID NO: 266759 - DNA, 25 bp, probe
tgttcttgggatagtccttccgtgc

SEQ ID NO: 266760 - DNA, 25 bp, probe
tgtctgctttagagtacttgcacgg

SEQ ID NO: 266761 - DNA, 25 bp, probe
tgtgtccttgtgagacacttggcac

SEQ ID NO: 266762 - DNA, 25 bp, probe
tgtgtactgtaaggacgtgctggac

SEQ ID NO: 266763 - DNA, 25 bp, probe
tgtgatgactgtgacggggctaggc

SEQ ID NO: 266764 - DNA, 25 bp, probe
tgtgaactcctagctgtggtcaggc

SEQ ID NO: 266765 - DNA, 25 bp, probe
tgtccccgctcagtctttgagcgag

SEQ ID NO: 266766 - DNA, 25 bp, probe
tgtcgcgtcctggtttaaggatgtc

SEQ ID NO: 266767 - DNA, 25 bp, probe
tgtcgattggtggtcctttggagtt

SEQ ID NO: 266768 - DNA, 25 bp, probe
tgtgagttgagtctcctctctgaga

SEQ ID NO: 266769 - DNA, 25 bp, probe
tgtgactcaaggcctgctgtttaat

SEQ ID NO: 266770 - DNA, 25 bp, probe
tgtgaccagcagcaggcttttttcc

SEQ ID NO: 266771 - DNA, 25 bp, probe
tgtgaccacaaatgcttgcttggac

SEQ ID NO: 266772 - DNA, 25 bp, probe
tgtgaaccagccagatgttcggccc

SEQ ID NO: 266773 - DNA, 25 bp, probe
tgtgcagacacagcactgtttgaga

SEQ ID NO: 266774 - DNA, 25 bp, probe
tgtgcagacaatgctgtgctttcca

SEQ ID NO: 266775 - DNA, 25 bp, probe
tgtcaacagatccgactttggcctc

SEQ ID NO: 266776 - DNA, 25 bp, probe
tgtcaacagatccgactttggcctc

SEQ ID NO: 266777 - DNA, 25 bp, probe
tgtcgacatcaacacatttcgcctc

SEQ ID NO: 266778 - DNA, 25 bp, probe
tgtaatatcagaaatggttggcctg

SEQ ID NO: 266779 - DNA, 25 bp, probe
tgtcagactaatcaggcttatccga

SEQ ID NO: 266780 - DNA, 25 bp, probe
tgtgagacgaatgatggctagatcg

SEQ ID NO: 266781 - DNA, 25 bp, probe
tgtgaagctcactgtgagcaatgtg

SEQ ID NO: 266782 - DNA, 25 bp, probe
tgtgacagcgtatgtgatgactgtg

SEQ ID NO: 266783 - DNA, 25 bp, probe
tgtgaccttaggaagtctctgcccc

SEQ ID NO: 266784 - DNA, 25 bp, probe
tgtgaccttaggaagtctctgcccc

SEQ ID NO: 266785 - DNA, 25 bp, probe
tgtgaccttacgacgctcgtgaaag

SEQ ID NO: 266786 - DNA, 25 bp, probe
tgtgatccttccgaagtcctgaagc

SEQ ID NO: 266787 - DNA, 25 bp, probe
tgtgacctcccagaaccatggaagc

SEQ ID NO: 266788 - DNA, 25 bp, probe
tgtgaggacccaggaatcatcagga

SEQ ID NO: 266789 - DNA, 25 bp, probe
tgtgaggacccaggaatcatcagga

SEQ ID NO: 266790 - DNA, 25 bp, probe
tgtgtggatctgacagggtatagga

SEQ ID NO: 266791 - DNA, 25 bp, probe
tgtgttgactgacgagccgaggggt

SEQ ID NO: 266792 - DNA, 25 bp, probe
tgtgaggggagccacctgagggctg

SEQ ID NO: 266793 - DNA, 25 bp, probe
tgtgagaggtggggcagtcaaggtg

SEQ ID NO: 266794 - DNA, 25 bp, probe
tgtgaagatggcagacttcggtgtg

SEQ ID NO: 266795 - DNA, 25 bp, probe
tgtcaagtggtacgctccggaatgc

SEQ ID NO: 266796 - DNA, 25 bp, probe
tgtccagtggatacagccctgggcg

SEQ ID NO: 266797 - DNA, 25 bp, probe
tgtccagtggatacagccctgggcg

SEQ ID NO: 266798 - DNA, 25 bp, probe
ttccaaggcattttagcggggaggg

SEQ ID NO: 266799 - DNA, 25 bp, probe
ttaccagggactgaggggaggggag

SEQ ID NO: 266800 - DNA, 25 bp, probe
tgtaccaaagacagtggtggtccgg

SEQ ID NO: 266801 - DNA, 25 bp, probe
tgtcccaaagtgagtaaaatcccct

SEQ ID NO: 266802 - DNA, 25 bp, probe
tgtcccaaagtgagtaaaatcccct

SEQ ID NO: 266803 - DNA, 25 bp, probe
tgtgcccacttcaacgaaaaccacc

SEQ ID NO: 266804 - DNA, 25 bp, probe
tgtgcctcagtatgaccgaacacgc

SEQ ID NO: 266805 - DNA, 25 bp, probe
tgtcccagtaaagccaatgaccccc

SEQ ID NO: 266806 - DNA, 25 bp, probe
tgtgctcggaaatcccaaagctccc

SEQ ID NO: 266807 - DNA, 25 bp, probe
tgtcttgtactgacacatccaaagc

SEQ ID NO: 266808 - DNA, 25 bp, probe
tctgttaactattatccaaacaaat

SEQ ID NO: 266809 - DNA, 25 bp, probe
tgtgtcccactgttattaaagcaaa

SEQ ID NO: 266810 - DNA, 25 bp, probe
tgtgtcccctgatttggggagaata

SEQ ID NO: 266811 - DNA, 25 bp, probe
tgtgcctcccattttatggtggtat

SEQ ID NO: 266812 - DNA, 25 bp, probe
tgtgcttcctcttcaacagggagct

SEQ ID NO: 266813 - DNA, 25 bp, probe
tgtgcttcctcttcaacagggagct

SEQ ID NO: 266814 - DNA, 25 bp, probe
tgtgattcactttaacctgatggtt

SEQ ID NO: 266815 - DNA, 25 bp, probe
tgtgtttctgtgtagtagctcgtgt

SEQ ID NO: 266816 - DNA, 25 bp, probe
tgtgttttgcaaaatagcagctgta

SEQ ID NO: 266817 - DNA, 25 bp, probe
tgtgtttctccaatgtcaactgctg

SEQ ID NO: 266818 - DNA, 25 bp, probe
tgtgtttctccaatgtcaactgctg

SEQ ID NO: 266819 - DNA, 25 bp, probe
tgtgtgctctgcttcaatgtagtca

SEQ ID NO: 266820 - DNA, 25 bp, probe
tgtgacagccctcatgtagtcaaat

SEQ ID NO: 266821 - DNA, 25 bp, probe
tgtgaagctcctcagatatgttagc

SEQ ID NO: 266822 - DNA, 25 bp, probe
tgtgttccaaggcattttagcgggg

SEQ ID NO: 266823 - DNA, 25 bp, probe
tgtgttccaaggcattttagcgggg

SEQ ID NO: 266824 - DNA, 25 bp, probe
tcctatacaagtcagttaaggaagt

SEQ ID NO: 266825 - DNA, 25 bp, probe
ttttaaacgaagagacagaactgtc

SEQ ID NO: 266826 - DNA, 25 bp, probe
tgttattaaccacaatgacgacctg

SEQ ID NO: 266827 - DNA, 25 bp, probe
tgtgacttaaccaaacgaacaacga

SEQ ID NO: 266828 - DNA, 25 bp, probe
tgatagttaccggaacgaaatagct

SEQ ID NO: 266829 - DNA, 25 bp, probe
tgtcgtcgtctccgtatcgaaatga

SEQ ID NO: 266830 - DNA, 25 bp, probe
tgtcgtcgtctccgtatcgaaatga

SEQ ID NO: 266831 - DNA, 25 bp, probe
tgtcttcgtggcggtcatggaattc

SEQ ID NO: 266832 - DNA, 25 bp, probe
tgtcttcattggggttggttgctgc

SEQ ID NO: 266833 - DNA, 25 bp, probe
tgtgtccattcgggttattagcagc

SEQ ID NO: 266834 - DNA, 25 bp, probe
tgtgaaactcggctgtattaatcac

SEQ ID NO: 266835 - DNA, 25 bp, probe
tgtgaacgattacggtctttatgac

SEQ ID NO: 266836 - DNA, 25 bp, probe
tgtgaaccttttgtgttgtcagact

SEQ ID NO: 266837 - DNA, 25 bp, probe
tgtgaactgtcttccttgttctagc

SEQ ID NO: 266838 - DNA, 25 bp, probe
tgtgaagtttgcaagcttgctttag

SEQ ID NO: 266839 - DNA, 25 bp, probe
tgtgatagctgtagtttctttcata

SEQ ID NO: 266840 - DNA, 25 bp, probe
tgtgatagctgtagtttctttcata

SEQ ID NO: 266841 - DNA, 25 bp, probe
tgtgtagtacttatgctgctctcaa

SEQ ID NO: 266842 - DNA, 25 bp, probe
tgtgtagtacttatgctgctctcaa

SEQ ID NO: 266843 - DNA, 25 bp, probe
tgtgaggaacaagggtgcctaataa

SEQ ID NO: 266844 - DNA, 25 bp, probe
tgtgagcaggagaagcggtgcccac

SEQ ID NO: 266845 - DNA, 25 bp, probe
tgtgatgggcggcctggatggcgac

SEQ ID NO: 266846 - DNA, 25 bp, probe
tgtgaatgcgcaggatgcggatggg

SEQ ID NO: 266847 - DNA, 25 bp, probe
tgatcatgtccaggaccgtctacct

SEQ ID NO: 266848 - DNA, 25 bp, probe
tgtgctgtcacagaccagcttcagg

SEQ ID NO: 266849 - DNA, 25 bp, probe
tgtgagtctaataccagcttgggaa

SEQ ID NO: 266850 - DNA, 25 bp, probe
tgtgtgcttaatttactctgttgta

SEQ ID NO: 266851 - DNA, 25 bp, probe
tgtgtgcttaatttactctgttgta

SEQ ID NO: 266852 - DNA, 25 bp, probe
tgtgtgcttaatttactctgttgta

SEQ ID NO: 266853 - DNA, 25 bp, probe
tgtgtgcttaatttactctgttgta

SEQ ID NO: 266854 - DNA, 25 bp, probe
tgtgtttctattgacttcaatgata

SEQ ID NO: 266855 - DNA, 25 bp, probe
tgtgtttttcttacactcatttgaa

SEQ ID NO: 266856 - DNA, 25 bp, probe
tgtctatttacatccgtccttacaa

SEQ ID NO: 266857 - DNA, 25 bp, probe
tgatttttatagtctcgttttagga

SEQ ID NO: 266858 - DNA, 25 bp, probe
tgtttaggataaccagtgtatttta

SEQ ID NO: 266859 - DNA, 25 bp, probe
tgtttcagcctaacccaggagctta

SEQ ID NO: 266860 - DNA, 25 bp, probe
tgtttcagcctaacccaggagctta

SEQ ID NO: 266861 - DNA, 25 bp, probe
tgtttaccttgttacggatttaatg

SEQ ID NO: 266862 - DNA, 25 bp, probe
tgtctagagccctttaatgttttaa

SEQ ID NO: 266863 - DNA, 25 bp, probe
tgtgtaggccttttattgtttgttg

SEQ ID NO: 266864 - DNA, 25 bp, probe
tgtgttggcccttctttctaagaag

SEQ ID NO: 266865 - DNA, 25 bp, probe
tgtgttggtttattgattctgtaaa

SEQ ID NO: 266866 - DNA, 25 bp, probe
tgtgtactgtatagacagtttgtaa

SEQ ID NO: 266867 - DNA, 25 bp, probe
tgtgctacataggagaagtttggaa

SEQ ID NO: 266868 - DNA, 25 bp, probe
tgtcgtccaggaaagattgtgcaga

SEQ ID NO: 266869 - DNA, 25 bp, probe
tgtctgtcccgcaagggcggcaaga

SEQ ID NO: 266870 - DNA, 25 bp, probe
tgtgagctccctggagcggcggaag

SEQ ID NO: 266871 - DNA, 25 bp, probe
tgtgactacccaggcagatgggagg

SEQ ID NO: 266872 - DNA, 25 bp, probe
tgtgattaccagatgcacagctgag

SEQ ID NO: 266873 - DNA, 25 bp, probe
tgtgattaccagatgcacagctgag

SEQ ID NO: 266874 - DNA, 25 bp, probe
tgtgacaaccaggagccctgtctgt

SEQ ID NO: 266875 - DNA, 25 bp, probe
tgtctaccgagatgcccatctcttc

SEQ ID NO: 266876 - DNA, 25 bp, probe
tgtctaccgagatgcccatctcttc

SEQ ID NO: 266877 - DNA, 25 bp, probe
tgtctacacgctcaccgtgtttgca

SEQ ID NO: 266878 - DNA, 25 bp, probe
gacagcagtgacagcagcgatagca

SEQ ID NO: 266879 - DNA, 25 bp, probe
tgtgaactgtctttcattgggatgt

SEQ ID NO: 266880 - DNA, 25 bp, probe
tgtgaactgtctttcattgggatgt

SEQ ID NO: 266881 - DNA, 25 bp, probe
tgtgaactattgtctcttggaggaa

SEQ ID NO: 266882 - DNA, 25 bp, probe
tgtgccttagtgtctacttgcagga

SEQ ID NO: 266883 - DNA, 25 bp, probe
tgtcgtgacgtattactctggaaaa

SEQ ID NO: 266884 - DNA, 25 bp, probe
tgtcgtgggctatatctgcggtgaa

SEQ ID NO: 266885 - DNA, 25 bp, probe
tgtccggaattcatggggtgaacca

SEQ ID NO: 266886 - DNA, 25 bp, probe
tgtcttttcaataagggagaaacct

SEQ ID NO: 266887 - DNA, 25 bp, probe
tgtgcttatctactccgtggagaaa

SEQ ID NO: 266888 - DNA, 25 bp, probe
tgtgcctttgagtccggtggacgat

SEQ ID NO: 266889 - DNA, 25 bp, probe
tgtcctatgaaggggtgtggggtga

SEQ ID NO: 266890 - DNA, 25 bp, probe
tgtcctgcatcaagaaggcctcggg

SEQ ID NO: 266891 - DNA, 25 bp, probe
tgtcctgcatcaagaaggcctcggg

SEQ ID NO: 266892 - DNA, 25 bp, probe
tgtcagctgtgcactgacggccagt

SEQ ID NO: 266893 - DNA, 25 bp, probe
tgtgcactggcaccaagtgcgggtc

SEQ ID NO: 266894 - DNA, 25 bp, probe
tgtgcactgcaggtagagggtgggc

SEQ ID NO: 266895 - DNA, 25 bp, probe
tgtgcactgcatggtctagggacgt

SEQ ID NO: 266896 - DNA, 25 bp, probe
tgtgaagccttcatggtcagcggga

SEQ ID NO: 266897 - DNA, 25 bp, probe
tgtgaagccttcatggtcagcggga

SEQ ID NO: 266898 - DNA, 25 bp, probe
tgtgatgcccttagatgtccggggc

SEQ ID NO: 266899 - DNA, 25 bp, probe
tgtgcaccttacattcctagagagc

SEQ ID NO: 266900 - DNA, 25 bp, probe
tgtgacctacacatcatcaagcggg

SEQ ID NO: 266901 - DNA, 25 bp, probe
tgtgagccgccaatatcatcaccag

SEQ ID NO: 266902 - DNA, 25 bp, probe
tgtgcagccactgttaagccatgtg

SEQ ID NO: 266903 - DNA, 25 bp, probe
tgtgctgctagtgttccacgatgtg

SEQ ID NO: 266904 - DNA, 25 bp, probe
tgtgctggaggtgtcactgcagatg

SEQ ID NO: 266905 - DNA, 25 bp, probe
tgtgctgagcagctttgcattgcca

SEQ ID NO: 266906 - DNA, 25 bp, probe
tgtgctacgtgctcatcattgctaa

SEQ ID NO: 266907 - DNA, 25 bp, probe
tgtgctgcacggtgcaggcctcatc

SEQ ID NO: 266908 - DNA, 25 bp, probe
tgtgtgcagggactgattcctcagc

SEQ ID NO: 266909 - DNA, 25 bp, probe
tgtgtgcaggatctgtttgcccact

SEQ ID NO: 266910 - DNA, 25 bp, probe
tgtgtgcaggatctgtttgcccact

SEQ ID NO: 266911 - DNA, 25 bp, probe
tgtgatgagagacagctttggaatc

SEQ ID NO: 266912 - DNA, 25 bp, probe
tgtgatgtgagttgttgttaagaca

SEQ ID NO: 266913 - DNA, 25 bp, probe
tgtgatggactcgttctgtagatga

SEQ ID NO: 266914 - DNA, 25 bp, probe
tgtgcatgacctctacattgaaaac

SEQ ID NO: 266915 - DNA, 25 bp, probe
tgtctgtctgccctagcattagaaa

SEQ ID NO: 266916 - DNA, 25 bp, probe
tgtgtttccgctttgtaagacagta

SEQ ID NO: 266917 - DNA, 25 bp, probe
tgtattttggttagctatgcaaagt

SEQ ID NO: 266918 - DNA, 25 bp, probe
tgtagtggtggagacacgcccagtg

SEQ ID NO: 266919 - DNA, 25 bp, probe
tgtgtctgggaactacctgcccagc

SEQ ID NO: 266920 - DNA, 25 bp, probe
tgtgtctgcaggaaggagctcccca

SEQ ID NO: 266921 - DNA, 25 bp, probe
tgtgtctgcaaggatgagtgggcca

SEQ ID NO: 266922 - DNA, 25 bp, probe
tgtgctgctctacgagatgctggtg

SEQ ID NO: 266923 - DNA, 25 bp, probe
tgtgctgctctacgagatgctggtg

SEQ ID NO: 266924 - DNA, 25 bp, probe
tgtgctgctctacgagatgctggtt

SEQ ID NO: 266925 - DNA, 25 bp, probe
tgtgctcatctcctaagtagctctt

SEQ ID NO: 266926 - DNA, 25 bp, probe
tgtgctcacttacattatgctcagt

SEQ ID NO: 266927 - DNA, 25 bp, probe
tgtgctcacccacagagcatggggt

SEQ ID NO: 266928 - DNA, 25 bp, probe
tgtcatcaccaacaaatggtttcaa

SEQ ID NO: 266929 - DNA, 25 bp, probe
tgtccccaagacactgggcttcaaa

SEQ ID NO: 266930 - DNA, 25 bp, probe
tgtccccagcccagtgggcattgga

SEQ ID NO: 266931 - DNA, 25 bp, probe
tgtcacctcacctcgggaaatgaga

SEQ ID NO: 266932 - DNA, 25 bp, probe
tgtaacaaccacgggtgtaagtgcc

SEQ ID NO: 266933 - DNA, 25 bp, probe
tgtactccagcctgggtgacagagt

SEQ ID NO: 266934 - DNA, 25 bp, probe
tgtacactgaccttaggcatggaga

SEQ ID NO: 266935 - DNA, 25 bp, probe
tgtccactgatcccaaaggctggga

SEQ ID NO: 266936 - DNA, 25 bp, probe
tgtctcctcagccaggaaggggtaa

SEQ ID NO: 266937 - DNA, 25 bp, probe
tgtcccgcaccacggagaaggagct

SEQ ID NO: 266938 - DNA, 25 bp, probe
tgtgcccaggtcaggagcaaattga

SEQ ID NO: 266939 - DNA, 25 bp, probe
tgtccgaggtgcagctgcaacagta

SEQ ID NO: 266940 - DNA, 25 bp, probe
tgtgacgacaggattgcagaagtgg

SEQ ID NO: 266941 - DNA, 25 bp, probe
tgtgaccaccaagatgccagcagga

SEQ ID NO: 266942 - DNA, 25 bp, probe
tgtgattcttcatcttccaaggaag

SEQ ID NO: 266943 - DNA, 25 bp, probe
tgtactttcaggttccaaagaatgc

SEQ ID NO: 266944 - DNA, 25 bp, probe
tgtactttcaggttccaaagaatgc

SEQ ID NO: 266945 - DNA, 25 bp, probe
tgttctttcaagtgcaaagtaattt

SEQ ID NO: 266946 - DNA, 25 bp, probe
tgtgtcttcccagcacaaacctaat

SEQ ID NO: 266947 - DNA, 25 bp, probe
tgttcttcccaaagcaagcacctgg

SEQ ID NO: 266948 - DNA, 25 bp, probe
tgtgtcttccacaatgactgcatcc

SEQ ID NO: 266949 - DNA, 25 bp, probe
tgtgttgccacaaacactgcagaga

SEQ ID NO: 266950 - DNA, 25 bp, probe
tgtctgtgcctcaatttgtgcaaac

SEQ ID NO: 266951 - DNA, 25 bp, probe
tgtctcagactctttttgtacctgg

SEQ ID NO: 266952 - DNA, 25 bp, probe
tgtctcagactctttttgtacctgg

SEQ ID NO: 266953 - DNA, 25 bp, probe
tgtccagatatgtccttaggtcctg

SEQ ID NO: 266954 - DNA, 25 bp, probe
tgtctggtcgtcttcaaggacctga

SEQ ID NO: 266955 - DNA, 25 bp, probe
tgtcatgcagttccttgaaaaacta

SEQ ID NO: 266956 - DNA, 25 bp, probe
tgtgctgtttgtcgtgaaaagctta

SEQ ID NO: 266957 - DNA, 25 bp, probe
tgtgcttgtttacagcactactctg

SEQ ID NO: 266958 - DNA, 25 bp, probe
tgtgcttacttctggactggtcagc

SEQ ID NO: 266959 - DNA, 25 bp, probe
tgtgcgtccatatttaacatgtaaa

SEQ ID NO: 266960 - DNA, 25 bp, probe
tgtgagtctcattctttaagataca

SEQ ID NO: 266961 - DNA, 25 bp, probe
tgctagtgttctgtctaaaaaccag

SEQ ID NO: 266962 - DNA, 25 bp, probe
tgtaatatctgtgctctaataacga

SEQ ID NO: 266963 - DNA, 25 bp, probe
tgtgtataatgtgctttatttgcaa

SEQ ID NO: 266964 - DNA, 25 bp, probe
tgtgtaactgtgatcctgttggaga

SEQ ID NO: 266965 - DNA, 25 bp, probe
tgttaacagatgatccatttgaaca

SEQ ID NO: 266966 - DNA, 25 bp, probe
tgtccaacaaccgctttgtgcataa

SEQ ID NO: 266967 - DNA, 25 bp, probe
tgtctcttcataccggttttatgac

SEQ ID NO: 266968 - DNA, 25 bp, probe
tgtgtcttcaacagcatctttcttt

SEQ ID NO: 266969 - DNA, 25 bp, probe
tgtgttctcagaatctgatgctttc

SEQ ID NO: 266970 - DNA, 25 bp, probe
tgtgattctcagactaacttccaga

SEQ ID NO: 266971 - DNA, 25 bp, probe
tgtgtcttcatgactgttgcttcct

SEQ ID NO: 266972 - DNA, 25 bp, probe
tgtgcctctatgtgcacatgttcct

SEQ ID NO: 266973 - DNA, 25 bp, probe
tgtgcctctatgtgcacatgttcct

SEQ ID NO: 266974 - DNA, 25 bp, probe
tgtgtcatcctgtgaggactgcaaa

SEQ ID NO: 266975 - DNA, 25 bp, probe
tgtgaatgaggactgtgaactgaag

SEQ ID NO: 266976 - DNA, 25 bp, probe
tgtgtatgagaacctgcacactaag

SEQ ID NO: 266977 - DNA, 25 bp, probe
tgtgatacaagattctgcacctcaa

SEQ ID NO: 266978 - DNA, 25 bp, probe
tgtgatacaagattctgcacctcaa

SEQ ID NO: 266979 - DNA, 25 bp, probe
tgtgcatggaaatgtcctccaacaa

SEQ ID NO: 266980 - DNA, 25 bp, probe
tgtgcctgaaatttcccgagagaat

SEQ ID NO: 266981 - DNA, 25 bp, probe
tgtgccgaggtctgcgtcgaagaca

SEQ ID NO: 266982 - DNA, 25 bp, probe
tgtgccgaggtctgcgtcgaagaca

SEQ ID NO: 266983 - DNA, 25 bp, probe
tgtgtcagagcgattcctggaaccc

SEQ ID NO: 266984 - DNA, 25 bp, probe
tgtgccaggcagatcctctggacac

SEQ ID NO: 266985 - DNA, 25 bp, probe
tgtgccataatgctgctcgcaggaa

SEQ ID NO: 266986 - DNA, 25 bp, probe
tgtccataaggaattcgatgatgac

SEQ ID NO: 266987 - DNA, 25 bp, probe
tgtcagcattatggcaattccttgc

SEQ ID NO: 266988 - DNA, 25 bp, probe
tgtgcgcattttgcattccatatga

SEQ ID NO: 266989 - DNA, 25 bp, probe
tgtgccaagtcgactatgccttaga

SEQ ID NO: 266990 - DNA, 25 bp, probe
tgtgccaagtcgactatgccttaga

SEQ ID NO: 266991 - DNA, 25 bp, probe
tgtgtcaaggccatgatcctgctca

SEQ ID NO: 266992 - DNA, 25 bp, probe
tgtctcaaggcagttaattctcatt

SEQ ID NO: 266993 - DNA, 25 bp, probe
tgtctgaagcagcttcacactctgc

SEQ ID NO: 266994 - DNA, 25 bp, probe
tgtcttcaagcgagctagcccttgt

SEQ ID NO: 266995 - DNA, 25 bp, probe
tgtccttagtcaactgtaccactgt

SEQ ID NO: 266996 - DNA, 25 bp, probe
tgtccttcagtagttggccaatctt

SEQ ID NO: 266997 - DNA, 25 bp, probe
tgtccttcagtagttggccaatctt

SEQ ID NO: 266998 - DNA, 25 bp, probe
tgtactccaggagggtccaatcatg

SEQ ID NO: 266999 - DNA, 25 bp, probe
tgtactccaggagggtccaatcatg

SEQ ID NO: 267000 - DNA, 25 bp, probe
tgtgcttcaagtggggctcccactc

SEQ ID NO: 267001 - DNA, 25 bp, probe
tgtgcttcaagtggggctcccactc

SEQ ID NO: 267002 - DNA, 25 bp, probe
tgtgttatagacggtgctcactccc

SEQ ID NO: 267003 - DNA, 25 bp, probe
tgtgactctggataagtcacttcct

SEQ ID NO: 267004 - DNA, 25 bp, probe
tgtgacgcagccacaattcactgtc

SEQ ID NO: 267005 - DNA, 25 bp, probe
tgtaacagactgccacatacacact

SEQ ID NO: 267006 - DNA, 25 bp, probe
tgtacactatctggcacatatgcgc

SEQ ID NO: 267007 - DNA, 25 bp, probe
tgtcaaatactggcctgatgagtat

SEQ ID NO: 267008 - DNA, 25 bp, probe
tgtcaaatgtctctatggattctga

SEQ ID NO: 267009 - DNA, 25 bp, probe
tgtccacatgttcctgatggccagg

SEQ ID NO: 267010 - DNA, 25 bp, probe
tgtcacatcgtactcaataccactt

SEQ ID NO: 267011 - DNA, 25 bp, probe
tgtccacgtttaatactttgttttg

SEQ ID NO: 267012 - DNA, 25 bp, probe
tgtccacgttgtttcacatctggtt

SEQ ID NO: 267013 - DNA, 25 bp, probe
tgtccacgttgtttcacatctggtt

SEQ ID NO: 267014 - DNA, 25 bp, probe
tgtgccactgtttgcttcaacagta

SEQ ID NO: 267015 - DNA, 25 bp, probe
tgtccaatttactgaccgtacacca

SEQ ID NO: 267016 - DNA, 25 bp, probe
tgtcagttttaacactcattaacac

SEQ ID NO: 267017 - DNA, 25 bp, probe
tgatcagttactccaaaattttaca

SEQ ID NO: 267018 - DNA, 25 bp, probe
tgtgcactttgctcaaaattttaaa

SEQ ID NO: 267019 - DNA, 25 bp, probe
tgtgcaccattaggaaaatcttctc

SEQ ID NO: 267020 - DNA, 25 bp, probe
tgtgacacaatagccaagatttcca

SEQ ID NO: 267021 - DNA, 25 bp, probe
tgtgactcaagacttccagagcctc

SEQ ID NO: 267022 - DNA, 25 bp, probe
tgtgaccatgatttcattcagcccc

SEQ ID NO: 267023 - DNA, 25 bp, probe
tgtgacaacatctttatcaccggcc

SEQ ID NO: 267024 - DNA, 25 bp, probe
tgtaaactcacaaacacttggctcc

SEQ ID NO: 267025 - DNA, 25 bp, probe
tgtcaagactccgacacctgaacca

SEQ ID NO: 267026 - DNA, 25 bp, probe
tgtcaaataccctaatgcttcccag

SEQ ID NO: 267027 - DNA, 25 bp, probe
tgtgccaataaccttgtcaaccact

SEQ ID NO: 267028 - DNA, 25 bp, probe
tgtgccaataaccttgtcaaccact

SEQ ID NO: 267029 - DNA, 25 bp, probe
tgattccaagtgcttatccaactct

SEQ ID NO: 267030 - DNA, 25 bp, probe
tgattccaagtgcttatccaactct

SEQ ID NO: 267031 - DNA, 25 bp, probe
tgtcctgttgtcttaatccaattct

SEQ ID NO: 267032 - DNA, 25 bp, probe
tgtcctgttgtcttaatccaattct

SEQ ID NO: 267033 - DNA, 25 bp, probe
tgcctgaggtcattcacatgcttca

SEQ ID NO: 267034 - DNA, 25 bp, probe
tgtgctttgcctgattatctcttac

SEQ ID NO: 267035 - DNA, 25 bp, probe
tgtgtttgcatagcttgtctttaca

SEQ ID NO: 267036 - DNA, 25 bp, probe
tgtgctgtctcatgtcttatttttg

SEQ ID NO: 267037 - DNA, 25 bp, probe
tgtgcctgtagctcattttattatg

SEQ ID NO: 267038 - DNA, 25 bp, probe
tgtccttgatgctcatattgttccc

SEQ ID NO: 267039 - DNA, 25 bp, probe
tgtcttgctgtgtactcattgtctt

SEQ ID NO: 267040 - DNA, 25 bp, probe
tgtgctgatctggaccatctttgtc

SEQ ID NO: 267041 - DNA, 25 bp, probe
tgtgctaaggaggcatgttttcttc

SEQ ID NO: 267042 - DNA, 25 bp, probe
tgtgaaatggtcctgtttttgggta

SEQ ID NO: 267043 - DNA, 25 bp, probe
tgtgaaagcagaggggattttggat

SEQ ID NO: 267044 - DNA, 25 bp, probe
tgtgccgtgaacctcgttttgagat

SEQ ID NO: 267045 - DNA, 25 bp, probe
tgtgccttggctgttgtatttgaat

SEQ ID NO: 267046 - DNA, 25 bp, probe
tgtgcctaatttcatgtatcttgta

SEQ ID NO: 267047 - DNA, 25 bp, probe
cacagtgatgatgtcgagatcggaa

SEQ ID NO: 267048 - DNA, 25 bp, probe
tgtgcccaattcagtgttgtgtatg

SEQ ID NO: 267049 - DNA, 25 bp, probe
tgtctgccaactacatgtgtcctta

SEQ ID NO: 267050 - DNA, 25 bp, probe
tgtgatggcctgttgctgggcctta

SEQ ID NO: 267051 - DNA, 25 bp, probe
tgtacagtctgcttgtgggctctga

SEQ ID NO: 267052 - DNA, 25 bp, probe
tgtcaagctcatttcctggtatgac

SEQ ID NO: 267053 - DNA, 25 bp, probe
tgtcatggcgaagactgagtcaccg

SEQ ID NO: 267054 - DNA, 25 bp, probe
tgtgatgcgcacattagcgagtgag

SEQ ID NO: 267055 - DNA, 25 bp, probe
tgtgcttgcatttctagcgagctgg

SEQ ID NO: 267056 - DNA, 25 bp, probe
tgtgctggattcctgattgcctgga

SEQ ID NO: 267057 - DNA, 25 bp, probe
tgtgctggattcctgattgcctgga

SEQ ID NO: 267058 - DNA, 25 bp, probe
tgtgctgaatccttgaatactcaat

SEQ ID NO: 267059 - DNA, 25 bp, probe
tgtgctgacctctgatatggcatat

SEQ ID NO: 267060 - DNA, 25 bp, probe
tgtctgcacacatctttggctgatg

SEQ ID NO: 267061 - DNA, 25 bp, probe
tgtctcagcatcagtatatcccatg

SEQ ID NO: 267062 - DNA, 25 bp, probe
tgtccccaagtgaatctcctaacag

SEQ ID NO: 267063 - DNA, 25 bp, probe
tgtccccaagtgaatctcctaacag

SEQ ID NO: 267064 - DNA, 25 bp, probe
tgtcccaatgggaaccacaaacagt

SEQ ID NO: 267065 - DNA, 25 bp, probe
tgtcttcagtggcaccctcagaaaa

SEQ ID NO: 267066 - DNA, 25 bp, probe
tgtaaaggagtcccccagacaatgg

SEQ ID NO: 267067 - DNA, 25 bp, probe
tgtgacaagtatgacgcccaggcac

SEQ ID NO: 267068 - DNA, 25 bp, probe
tgtgaaggtcatggacctgcccacc

SEQ ID NO: 267069 - DNA, 25 bp, probe
tgtgagaagtaccagggcttcccca

SEQ ID NO: 267070 - DNA, 25 bp, probe
tgtgagaagtaccagggcttcccca

SEQ ID NO: 267071 - DNA, 25 bp, probe
tgtccaagtccattggctgtacccc

SEQ ID NO: 267072 - DNA, 25 bp, probe
tgtccaagtccattggctgtacccc

SEQ ID NO: 267073 - DNA, 25 bp, probe
tgtccaggcctgagccaatgcaacc

SEQ ID NO: 267074 - DNA, 25 bp, probe
tgtccaggcctgagccaatgcaacc

SEQ ID NO: 267075 - DNA, 25 bp, probe
tgtctgaggccttgtgctgcaaaat

SEQ ID NO: 267076 - DNA, 25 bp, probe
tgtgcagagtcactgtgtcatcgat

SEQ ID NO: 267077 - DNA, 25 bp, probe
tgtcagagtcacctgatgtcaacct

SEQ ID NO: 267078 - DNA, 25 bp, probe
tgtcaagtcgacatctaacgtttta

SEQ ID NO: 267079 - DNA, 25 bp, probe
tgtcaagtctgacgtctggagcctg

SEQ ID NO: 267080 - DNA, 25 bp, probe
tgtccgctctgatgtctggagtttg

SEQ ID NO: 267081 - DNA, 25 bp, probe
tgtccgatggagatttgttttgttt

SEQ ID NO: 267082 - DNA, 25 bp, probe
tgtcacccgaattttctttggtatt

SEQ ID NO: 267083 - DNA, 25 bp, probe
tgtcaccaccaaactcaatcatttt

SEQ ID NO: 267084 - DNA, 25 bp, probe
tgtcatcttggagactaaagaatat

SEQ ID NO: 267085 - DNA, 25 bp, probe
tgtcctccagcagagtaacattatt

SEQ ID NO: 267086 - DNA, 25 bp, probe
tgtgccaccagaacccaagaagatt

SEQ ID NO: 267087 - DNA, 25 bp, probe
tgtccacaaatgtcctcagagggtc

SEQ ID NO: 267088 - DNA, 25 bp, probe
tgtctacacgaacctctgcaagttc

SEQ ID NO: 267089 - DNA, 25 bp, probe
tgtctcttccaacctctgaaaacca

SEQ ID NO: 267090 - DNA, 25 bp, probe
tgtcccctcaaggctcgaggacacc

SEQ ID NO: 267091 - DNA, 25 bp, probe
tgtccttcatcatcgccgagatggt

SEQ ID NO: 267092 - DNA, 25 bp, probe
tgtccttcatcatcgccgagatggt

SEQ ID NO: 267093 - DNA, 25 bp, probe
tgtctgcctatagcagccattgtgg

SEQ ID NO: 267094 - DNA, 25 bp, probe
tgtccacagtcaatgctgccttgtg

SEQ ID NO: 267095 - DNA, 25 bp, probe
tgtccacagtcaatgctgccttgtg

SEQ ID NO: 267096 - DNA, 25 bp, probe
tgtcagtaggcagctcctttgggac

SEQ ID NO: 267097 - DNA, 25 bp, probe
tgtcccaggggtatatttagaccct

SEQ ID NO: 267098 - DNA, 25 bp, probe
tgtctccatgtgcgtccatatttaa

SEQ ID NO: 267099 - DNA, 25 bp, probe
tgtgcctcagttttcctatttgtaa

SEQ ID NO: 267100 - DNA, 25 bp, probe
tgtgcctcagttttcctatttgtaa

SEQ ID NO: 267101 - DNA, 25 bp, probe
tgtccctggtttctattgatctgga

SEQ ID NO: 267102 - DNA, 25 bp, probe
tgtccttttcattagtattatacga

SEQ ID NO: 267103 - DNA, 25 bp, probe
tgtccttttcattagtattatacga

SEQ ID NO: 267104 - DNA, 25 bp, probe
tgtagttttatttccactaagtgaa

SEQ ID NO: 267105 - DNA, 25 bp, probe
tgtccttatttttcacagctgaaga

SEQ ID NO: 267106 - DNA, 25 bp, probe
tcccatattttgacccggaagttat

SEQ ID NO: 267107 - DNA, 25 bp, probe
tcccatattttgacccggaagttat

SEQ ID NO: 267108 - DNA, 25 bp, probe
tccaatttttactcagtgactgttg

SEQ ID NO: 267109 - DNA, 25 bp, probe
tgtactttttaagagctcaatttga

SEQ ID NO: 267110 - DNA, 25 bp, probe
tgtacattttccgaaactacagtta

SEQ ID NO: 267111 - DNA, 25 bp, probe
tgtgacactgcttttgaaacatcaa

SEQ ID NO: 267112 - DNA, 25 bp, probe
tgtgcacagcttctggtaacaaata

SEQ ID NO: 267113 - DNA, 25 bp, probe
tgtgctgctgttctgtgtacataaa

SEQ ID NO: 267114 - DNA, 25 bp, probe
tgtgcactgtctatttacatccgtc

SEQ ID NO: 267115 - DNA, 25 bp, probe
tgtgctctgacaacccttatgcacc

SEQ ID NO: 267116 - DNA, 25 bp, probe
tgtgctcaacatatgctctgatgac

SEQ ID NO: 267117 - DNA, 25 bp, probe
tgtgctgcaccatgtgtgtgaccag

SEQ ID NO: 267118 - DNA, 25 bp, probe
tgtgctgcaccatgtgtgtgaccag

SEQ ID NO: 267119 - DNA, 25 bp, probe
tgtgctaggcatggtgtcttcacag

SEQ ID NO: 267120 - DNA, 25 bp, probe
tgtgcaccatctgtgtgctctacac

SEQ ID NO: 267121 - DNA, 25 bp, probe
tgtgcacaagtgttgtgtcgtgcag

SEQ ID NO: 267122 - DNA, 25 bp, probe
tgtgcacagagatctggctgcaaga

SEQ ID NO: 267123 - DNA, 25 bp, probe
tgtgcaagatgttctacgccgtcac

SEQ ID NO: 267124 - DNA, 25 bp, probe
tgtgctacacttgcacctggtactg

SEQ ID NO: 267125 - DNA, 25 bp, probe
tgtgcattcaatcaactctggcttc

SEQ ID NO: 267126 - DNA, 25 bp, probe
tgtgcttcattccaatctattgctt

SEQ ID NO: 267127 - DNA, 25 bp, probe
tgtgctggttgccacatcttagcaa

SEQ ID NO: 267128 - DNA, 25 bp, probe
tgtgctggttgccacatcttagcaa

SEQ ID NO: 267129 - DNA, 25 bp, probe
tgtgaggtaggtgttgtgcgaggaa

SEQ ID NO: 267130 - DNA, 25 bp, probe
tgtgaggtaggtgttgtgcgaggaa

SEQ ID NO: 267131 - DNA, 25 bp, probe
tgtgagaggtgggcgctttggaggt

SEQ ID NO: 267132 - DNA, 25 bp, probe
tgtgcacagattcccgactgtggcg

SEQ ID NO: 267133 - DNA, 25 bp, probe
tgtgcacagattcccgactgtggcg

SEQ ID NO: 267134 - DNA, 25 bp, probe
tgtcggtgtgccaggagatgctgca

SEQ ID NO: 267135 - DNA, 25 bp, probe
tgtctctgttgcttcggggcataag

SEQ ID NO: 267136 - DNA, 25 bp, probe
tgtcccaatcctggaggtcatccat

SEQ ID NO: 267137 - DNA, 25 bp, probe
tgtccatcaacttcaggaatatgaa

SEQ ID NO: 267138 - DNA, 25 bp, probe
tgtccagcagcagcctacaagtata

SEQ ID NO: 267139 - DNA, 25 bp, probe
tgtgcccttctcgtaaagttgttca

SEQ ID NO: 267140 - DNA, 25 bp, probe
tgtgccttctccatatgaagtcaga

SEQ ID NO: 267141 - DNA, 25 bp, probe
tgtgcctctctaatgaagaacaaat

SEQ ID NO: 267142 - DNA, 25 bp, probe
tgtgcattcatcaaaggagaagttt

SEQ ID NO: 267143 - DNA, 25 bp, probe
tgtgcattaccagtgggacctctca

SEQ ID NO: 267144 - DNA, 25 bp, probe
tgtgcttagctcttcgatacttaca

SEQ ID NO: 267145 - DNA, 25 bp, probe
tgtgctacgcactctgcaacaaagc

SEQ ID NO: 267146 - DNA, 25 bp, probe
tgtgctacgcactctgcaacaaagc

SEQ ID NO: 267147 - DNA, 25 bp, probe
tgtgcttgagcagactgtaaaagtc

SEQ ID NO: 267148 - DNA, 25 bp, probe
tgtgcttccacaacatgtctgatga

SEQ ID NO: 267149 - DNA, 25 bp, probe
tgtgcttccacaacatgtctgatga

SEQ ID NO: 267150 - DNA, 25 bp, probe
tgtgctgatcccacttgcaatgact

SEQ ID NO: 267151 - DNA, 25 bp, probe
tgtgctgatcccacttgcaatgact

SEQ ID NO: 267152 - DNA, 25 bp, probe
tgtgcctctcacatcattaagcact

SEQ ID NO: 267153 - DNA, 25 bp, probe
tgtgacttcatgctctgataactgc

SEQ ID NO: 267154 - DNA, 25 bp, probe
tgtgactgccagctctaaatctcga

SEQ ID NO: 267155 - DNA, 25 bp, probe
tgtgagctgccatgttgatagtatc

SEQ ID NO: 267156 - DNA, 25 bp, probe
tgtgactgactaccttgacttgaaa

SEQ ID NO: 267157 - DNA, 25 bp, probe
tgtccgcctgagcttgcatttgaaa

SEQ ID NO: 267158 - DNA, 25 bp, probe
tgtccgcctgagcttgcatttgaaa

SEQ ID NO: 267159 - DNA, 25 bp, probe
tgtcccctgggaggattctgggaag

SEQ ID NO: 267160 - DNA, 25 bp, probe
tgtcccctgggaggattctgggaag

SEQ ID NO: 267161 - DNA, 25 bp, probe
tgtccccttgccgagttgagggcag

SEQ ID NO: 267162 - DNA, 25 bp, probe
tgtccccttgccgagttgagggcag

SEQ ID NO: 267163 - DNA, 25 bp, probe
tgtcccacttcgaagtggaggtctg

SEQ ID NO: 267164 - DNA, 25 bp, probe
tgtcaaaattggaggttcgtctggc

SEQ ID NO: 267165 - DNA, 25 bp, probe
tgtaatttattgttgcgttcctctg

SEQ ID NO: 267166 - DNA, 25 bp, probe
tgtaatcctgtaggttggtacttcc

SEQ ID NO: 267167 - DNA, 25 bp, probe
tgtatccctgttgtgaggttccttc

SEQ ID NO: 267168 - DNA, 25 bp, probe
tgaaaccaattggctctggggccca

SEQ ID NO: 267169 - DNA, 25 bp, probe
tgcggcctgcacagaaccgggccca

SEQ ID NO: 267170 - DNA, 25 bp, probe
tctgggtgccctgaaagggcccttc

SEQ ID NO: 267171 - DNA, 25 bp, probe
tgtgcgtgtccggaaaagggctcca

SEQ ID NO: 267172 - DNA, 25 bp, probe
tgtaggcccgactcacagggccagc

SEQ ID NO: 267173 - DNA, 25 bp, probe
tgtacaccaaacttccaggaggagg

SEQ ID NO: 267174 - DNA, 25 bp, probe
tgtgaacctggacatcgccaaagag

SEQ ID NO: 267175 - DNA, 25 bp, probe
tgtcaaccgggagtcagctatcaag

SEQ ID NO: 267176 - DNA, 25 bp, probe
tgtcatcaccgagggctgcgtgagc

SEQ ID NO: 267177 - DNA, 25 bp, probe
tgtctgcttcgagggcaggaacccc

SEQ ID NO: 267178 - DNA, 25 bp, probe
tgtctgcttcgagggcaggaacccc

SEQ ID NO: 267179 - DNA, 25 bp, probe
tgtgcttggcgtgtgggaatccacc

SEQ ID NO: 267180 - DNA, 25 bp, probe
tgtcccgagtgcttgaggatgatcc

SEQ ID NO: 267181 - DNA, 25 bp, probe
tgtgccccattgtcagtgggtccac

SEQ ID NO: 267182 - DNA, 25 bp, probe
tgtccatggtagtcagtatggctca

SEQ ID NO: 267183 - DNA, 25 bp, probe
tgtgctgcacgtatgcagtatccta

SEQ ID NO: 267184 - DNA, 25 bp, probe
tgtgcatgggacaagaacatatgct

SEQ ID NO: 267185 - DNA, 25 bp, probe
tgtgcatggtgcccagaagctggcc

SEQ ID NO: 267186 - DNA, 25 bp, probe
tgtgcaagctgccaagactgtctct

SEQ ID NO: 267187 - DNA, 25 bp, probe
tgtgcaagctgccaagactgtctct

SEQ ID NO: 267188 - DNA, 25 bp, probe
tgtgactgaggctagaagctgccat

SEQ ID NO: 267189 - DNA, 25 bp, probe
tgtgactgaggctagaagctgccat

SEQ ID NO: 267190 - DNA, 25 bp, probe
tgtgctctgcaggtggaaagcccag

SEQ ID NO: 267191 - DNA, 25 bp, probe
tgtgctctggcgggcaggacacaaa

SEQ ID NO: 267192 - DNA, 25 bp, probe
tgtgactgagggcctggtcaccaca

SEQ ID NO: 267193 - DNA, 25 bp, probe
tgtcatgcatggaggcaggtcccca

SEQ ID NO: 267194 - DNA, 25 bp, probe
tgtcatcagtggtgaggaggactca

SEQ ID NO: 267195 - DNA, 25 bp, probe
tgtcatctcgagtgaggcaggacca

SEQ ID NO: 267196 - DNA, 25 bp, probe
tgtcagccaatgtggggggtcctga

SEQ ID NO: 267197 - DNA, 25 bp, probe
tgtcaccggatcctgggtggtctgc

SEQ ID NO: 267198 - DNA, 25 bp, probe
tgtcccaggattagcagagtggagg

SEQ ID NO: 267199 - DNA, 25 bp, probe
tgtgccagaagatcgagcagtgtga

SEQ ID NO: 267200 - DNA, 25 bp, probe
tgtgacaaagggccagcagtctacc

SEQ ID NO: 267201 - DNA, 25 bp, probe
tgtgacagagaggctgcccactgtt

SEQ ID NO: 267202 - DNA, 25 bp, probe
tgtgaagctgggttctcctgttcac

SEQ ID NO: 267203 - DNA, 25 bp, probe
tgtgaaggaggctgccctcattgcc

SEQ ID NO: 267204 - DNA, 25 bp, probe
tgtaggggccatagaccatacatac

SEQ ID NO: 267205 - DNA, 25 bp, probe
tgtcagaggtggaaacactacagac

SEQ ID NO: 267206 - DNA, 25 bp, probe
tgtctggtatttaaactgaaacata

SEQ ID NO: 267207 - DNA, 25 bp, probe
tgactcatgtaccccaactaatacc

SEQ ID NO: 267208 - DNA, 25 bp, probe
tgagtcttaccgtaattgataacaa

SEQ ID NO: 267209 - DNA, 25 bp, probe
tgactgttcctctttttaagaacaa

SEQ ID NO: 267210 - DNA, 25 bp, probe
tgactgttcctctttttaagaacaa

SEQ ID NO: 267211 - DNA, 25 bp, probe
tgtagttccctattttaacctcaat

SEQ ID NO: 267212 - DNA, 25 bp, probe
tgtgaaccccaaattcgagcacctc

SEQ ID NO: 267213 - DNA, 25 bp, probe
tgtaatcccagctactcgggaggct

SEQ ID NO: 267214 - DNA, 25 bp, probe
tgtaatcccagcactttgggaggcc

SEQ ID NO: 267215 - DNA, 25 bp, probe
tgtttccgaatgttttagttagcct

SEQ ID NO: 267216 - DNA, 25 bp, probe
tgcttttcgaagttttaacagtcat

SEQ ID NO: 267217 - DNA, 25 bp, probe
tgtcttttgaagggctataccagtt

SEQ ID NO: 267218 - DNA, 25 bp, probe
tgtaccttaagcatttcccagctgt

SEQ ID NO: 267219 - DNA, 25 bp, probe
tgtaaacattagctctttccactgc

SEQ ID NO: 267220 - DNA, 25 bp, probe
tgtcaattactaccctttcacaagc

SEQ ID NO: 267221 - DNA, 25 bp, probe
tgtgcacatgtgttacccataaaca

SEQ ID NO: 267222 - DNA, 25 bp, probe
tgtgcaatgttcaatacctcatata

SEQ ID NO: 267223 - DNA, 25 bp, probe
tgtgaatgtttttgccatttttttt

SEQ ID NO: 267224 - DNA, 25 bp, probe
tgtgaatgagcttgtagtgtttgtt

SEQ ID NO: 267225 - DNA, 25 bp, probe
tgtgaaatgcttcatgttttacaaa

SEQ ID NO: 267226 - DNA, 25 bp, probe
tgtcgaagctatctgctctgttaaa

SEQ ID NO: 267227 - DNA, 25 bp, probe
tgtctaatgaacaggtgttgaaatt

SEQ ID NO: 267228 - DNA, 25 bp, probe
tgtgaagtgaacaatactttgtaat

SEQ ID NO: 267229 - DNA, 25 bp, probe
tgtgaagtcaacaataatggcagta

SEQ ID NO: 267230 - DNA, 25 bp, probe
tgtgaagtctgacatttggagtctg

SEQ ID NO: 267231 - DNA, 25 bp, probe
tgtgaagacagcggatttcggcctg

SEQ ID NO: 267232 - DNA, 25 bp, probe
tgtaaggaaggattacggccaggag

SEQ ID NO: 267233 - DNA, 25 bp, probe
tgttcaggcacgccagaaggatgcc

SEQ ID NO: 267234 - DNA, 25 bp, probe
tgtctctggacggcagctatgcgac

SEQ ID NO: 267235 - DNA, 25 bp, probe
tgtcctgataagcgctatgccatgg

SEQ ID NO: 267236 - DNA, 25 bp, probe
tgtcttcatttgtgttgccatggca

SEQ ID NO: 267237 - DNA, 25 bp, probe
tgtccgatcctgagttgcagaggaa

SEQ ID NO: 267238 - DNA, 25 bp, probe
tgtacagacctccgttcaataaatt

SEQ ID NO: 267239 - DNA, 25 bp, probe
tgttaaactctagttcttaagttgt

SEQ ID NO: 267240 - DNA, 25 bp, probe
tgctgtagaagtgagtttgtaaata

SEQ ID NO: 267241 - DNA, 25 bp, probe
tgtcctggcgtcggtttttagcata

SEQ ID NO: 267242 - DNA, 25 bp, probe
tgtccattgtgacagtttgtttaat

SEQ ID NO: 267243 - DNA, 25 bp, probe
tgtcctttgtatctctaagttacat

SEQ ID NO: 267244 - DNA, 25 bp, probe
tgtcctattttccgctggtgtatca

SEQ ID NO: 267245 - DNA, 25 bp, probe
tgtcctgttcttggtcatgtatgtg

SEQ ID NO: 267246 - DNA, 25 bp, probe
tgtctctgttgcacagatctgtttt

SEQ ID NO: 267247 - DNA, 25 bp, probe
tttttggcattgcaactgtggcata

SEQ ID NO: 267248 - DNA, 25 bp, probe
tgtactccatcaacaacgttctcat

SEQ ID NO: 267249 - DNA, 25 bp, probe
tgtacccatgtgtacagcctaccca

SEQ ID NO: 267250 - DNA, 25 bp, probe
tgtccacaatgatcaactacgccca

SEQ ID NO: 267251 - DNA, 25 bp, probe
tgtccacattgagtcagactgctcc

SEQ ID NO: 267252 - DNA, 25 bp, probe
tgtgctccagcaagtctgagtctga

SEQ ID NO: 267253 - DNA, 25 bp, probe
tgtgctcatcaaactctcagcatat

SEQ ID NO: 267254 - DNA, 25 bp, probe
tgtgctgaggcaactatggcataga

SEQ ID NO: 267255 - DNA, 25 bp, probe
tgtgcgcacagcttctttgatgaac

SEQ ID NO: 267256 - DNA, 25 bp, probe
tgtgcttcatgtcctcttgatgaca

SEQ ID NO: 267257 - DNA, 25 bp, probe
tgtgcttcatgtcctcttgatgaca

SEQ ID NO: 267258 - DNA, 25 bp, probe
tgtgcactgcaccacgattgtgaca

SEQ ID NO: 267259 - DNA, 25 bp, probe
tgtgcctcacacctgaattgaaaat

SEQ ID NO: 267260 - DNA, 25 bp, probe
tgtcgctccatccgaaatcacaaca

SEQ ID NO: 267261 - DNA, 25 bp, probe
tgtcctccaacaataaagagctcaa

SEQ ID NO: 267262 - DNA, 25 bp, probe
tgtacccccagtaaagagctttctc

SEQ ID NO: 267263 - DNA, 25 bp, probe
tgtacccccagtaaagagctttctc

SEQ ID NO: 267264 - DNA, 25 bp, probe
tgtacccccagtaaagagctttctc

SEQ ID NO: 267265 - DNA, 25 bp, probe
tgtacccacccaaaatgattatttt

SEQ ID NO: 267266 - DNA, 25 bp, probe
tgtaggcctcctaagtctaatattt

SEQ ID NO: 267267 - DNA, 25 bp, probe
tgtcatgcgaccctaggactttttt

SEQ ID NO: 267268 - DNA, 25 bp, probe
tgtacaatacttcagactgtttttt

SEQ ID NO: 267269 - DNA, 25 bp, probe
tgaaccccattctgtatgttttcat

SEQ ID NO: 267270 - DNA, 25 bp, probe
tgtaacctcatcgggattgtctttt

SEQ ID NO: 267271 - DNA, 25 bp, probe
tgttaagacctcctattgagttttc

SEQ ID NO: 267272 - DNA, 25 bp, probe
tgttaggaactcctttcctagttat

SEQ ID NO: 267273 - DNA, 25 bp, probe
tgtactggatacattttccattttt

SEQ ID NO: 267274 - DNA, 25 bp, probe
tgtgaatggaaatttttctcttcca

SEQ ID NO: 267275 - DNA, 25 bp, probe
tgcgaaaataccagttttgctctct

SEQ ID NO: 267276 - DNA, 25 bp, probe
tcgcaaaaacctttatccctacagg

SEQ ID NO: 267277 - DNA, 25 bp, probe
tgtagcaaaaccagaatccctcagc

SEQ ID NO: 267278 - DNA, 25 bp, probe
tgtacagcaacagaggtacctcttg

SEQ ID NO: 267279 - DNA, 25 bp, probe
tgataccatacgaagagccactcct

SEQ ID NO: 267280 - DNA, 25 bp, probe
tgataccatacgaagagccactcct

SEQ ID NO: 267281 - DNA, 25 bp, probe
tccactaacgtactatcactccatt

SEQ ID NO: 267282 - DNA, 25 bp, probe
tccactaacgtactatcactccatt

SEQ ID NO: 267283 - DNA, 25 bp, probe
tgtcttataggtttacactgccaaa

SEQ ID NO: 267284 - DNA, 25 bp, probe
tgtctgttaggggatactttaagaa

SEQ ID NO: 267285 - DNA, 25 bp, probe
tgtctttaagtcgtgtttgtaaaag

SEQ ID NO: 267286 - DNA, 25 bp, probe
tgtctgtccagactcagtggatctg

SEQ ID NO: 267287 - DNA, 25 bp, probe
tgtttcggagtccaggactggcagg

SEQ ID NO: 267288 - DNA, 25 bp, probe
tgtttcggagtccaggactggcagg

SEQ ID NO: 267289 - DNA, 25 bp, probe
tgtatccttggcccaggagagcggg

SEQ ID NO: 267290 - DNA, 25 bp, probe
tgtatacttggatatggcgggggga

SEQ ID NO: 267291 - DNA, 25 bp, probe
ttcaccttaacatgtgggaagggac

SEQ ID NO: 267292 - DNA, 25 bp, probe
tgtcccttcaaacgcctgggagggc

SEQ ID NO: 267293 - DNA, 25 bp, probe
tgttcctttataggccaaggaccgc

SEQ ID NO: 267294 - DNA, 25 bp, probe
tgttcccatatatttaaaataccca

SEQ ID NO: 267295 - DNA, 25 bp, probe
tgtctcccttgagaaaacaactcca

SEQ ID NO: 267296 - DNA, 25 bp, probe
tgactccagcctgaatcgaacctac

SEQ ID NO: 267297 - DNA, 25 bp, probe
tgtccctgcactgatacagaagctg

SEQ ID NO: 267298 - DNA, 25 bp, probe
tgtccctgcagtgcccataggcccg

SEQ ID NO: 267299 - DNA, 25 bp, probe
tgtacctggctcggctcaaggaaag

SEQ ID NO: 267300 - DNA, 25 bp, probe
tgtgcacctggcaccaagcggaaaa

SEQ ID NO: 267301 - DNA, 25 bp, probe
tgtccttctgcaccgaaatggaaat

SEQ ID NO: 267302 - DNA, 25 bp, probe
tgtccatcccatggcaaaacgagat

SEQ ID NO: 267303 - DNA, 25 bp, probe
tgtccacgcccagaacaacagttgg

SEQ ID NO: 267304 - DNA, 25 bp, probe
tgtccacgcccgcaacaaggtgggc

SEQ ID NO: 267305 - DNA, 25 bp, probe
tgtccacgcccgcaacaaggtgggc

SEQ ID NO: 267306 - DNA, 25 bp, probe
tgtcaacctgccctggaaccagggg

SEQ ID NO: 267307 - DNA, 25 bp, probe
tgtgcaacctctgtggcaagcgagg

SEQ ID NO: 267308 - DNA, 25 bp, probe
tgtgctacaaatggggccacacaga

SEQ ID NO: 267309 - DNA, 25 bp, probe
tgtctgaaacaaacagtcacaagca

SEQ ID NO: 267310 - DNA, 25 bp, probe
tgtctacaccatacacgcaaaagac

SEQ ID NO: 267311 - DNA, 25 bp, probe
tgtcatgtaccatcaataaagtacc

SEQ ID NO: 267312 - DNA, 25 bp, probe
tgtcagataccacctataaaatata

SEQ ID NO: 267313 - DNA, 25 bp, probe
tgtagtcactaccagtaccaatgat

SEQ ID NO: 267314 - DNA, 25 bp, probe
tgtatataccctcatcaccaagatg

SEQ ID NO: 267315 - DNA, 25 bp, probe
tgtatataccctcatcaccaagatg

SEQ ID NO: 267316 - DNA, 25 bp, probe
tgtattactcatattaccaaggaat

SEQ ID NO: 267317 - DNA, 25 bp, probe
tttgtatacagagaaccggatgaat

SEQ ID NO: 267318 - DNA, 25 bp, probe
tgcttgaaacaggtacacgggccag

SEQ ID NO: 267319 - DNA, 25 bp, probe
tgtctgggagcagcttcaactggcc

SEQ ID NO: 267320 - DNA, 25 bp, probe
tgtctctgagaaggctgctaacatt

SEQ ID NO: 267321 - DNA, 25 bp, probe
tgtccatagagatctgacaccaaac

SEQ ID NO: 267322 - DNA, 25 bp, probe
tgtgcgcaatgccaaggacacagca

SEQ ID NO: 267323 - DNA, 25 bp, probe
tgtgcagacagccatgcgtggccac

SEQ ID NO: 267324 - DNA, 25 bp, probe
tgtgcagacagccatgcgtggccac

SEQ ID NO: 267325 - DNA, 25 bp, probe
tgtcagacagcgttgcagaggactg

SEQ ID NO: 267326 - DNA, 25 bp, probe
tgtccacatgtgggacagggctggt

SEQ ID NO: 267327 - DNA, 25 bp, probe
tgtcccagatctaggcaggcctagg

SEQ ID NO: 267328 - DNA, 25 bp, probe
tgtcccagtcaatgcatcggcaggg

SEQ ID NO: 267329 - DNA, 25 bp, probe
tgtgcccctgaatcatgggcacgga

SEQ ID NO: 267330 - DNA, 25 bp, probe
tgtcgccactgacagctggagcatc

SEQ ID NO: 267331 - DNA, 25 bp, probe
tgtccccatcagcctgctgggacac

SEQ ID NO: 267332 - DNA, 25 bp, probe
tgtcctccatctacttagggatcga

SEQ ID NO: 267333 - DNA, 25 bp, probe
tgtccgcttctagaaagagtgcaga

SEQ ID NO: 267334 - DNA, 25 bp, probe
tgtcaccttctagaccacatgatag

SEQ ID NO: 267335 - DNA, 25 bp, probe
tgtagagttctaataccaaagacag

SEQ ID NO: 267336 - DNA, 25 bp, probe
tgtcaagcttcaagttagccaagaa

SEQ ID NO: 267337 - DNA, 25 bp, probe
tgtcaacatccacactaggcaggaa

SEQ ID NO: 267338 - DNA, 25 bp, probe
tgtgcagtcatcaacaaaagggaga

SEQ ID NO: 267339 - DNA, 25 bp, probe
tgtgcgtgatcagcattgacaggta

SEQ ID NO: 267340 - DNA, 25 bp, probe
tgtcggacacctggaaggtggcaaa

SEQ ID NO: 267341 - DNA, 25 bp, probe
tgtctccacccgcaagtgctggaga

SEQ ID NO: 267342 - DNA, 25 bp, probe
tgtcctaatacgctatgtgcttggc

SEQ ID NO: 267343 - DNA, 25 bp, probe
tgtcctgaaggccacggttcaggcc

SEQ ID NO: 267344 - DNA, 25 bp, probe
tgtcctggggtccagggtcaggcgt

SEQ ID NO: 267345 - DNA, 25 bp, probe
tgtgcagggacagcgagcggtcctg

SEQ ID NO: 267346 - DNA, 25 bp, probe
tgtgcagggacagcgagcggtcctg

SEQ ID NO: 267347 - DNA, 25 bp, probe
tgtgccggatcggcgattggctcca

SEQ ID NO: 267348 - DNA, 25 bp, probe
tgtcatgcggtttccaaggtgcaca

SEQ ID NO: 267349 - DNA, 25 bp, probe
tgtcgttgccttcacagtggacaat

SEQ ID NO: 267350 - DNA, 25 bp, probe
tgtcttaccagtgacgctgctgaca

SEQ ID NO: 267351 - DNA, 25 bp, probe
tgtctaacctgtgaccagtctgacc

SEQ ID NO: 267352 - DNA, 25 bp, probe
tgtctaactgctagtaaccctaccg

SEQ ID NO: 267353 - DNA, 25 bp, probe
tgtctactccaagaaaccaacgctg

SEQ ID NO: 267354 - DNA, 25 bp, probe
tgtgcttctccaaaaacacccatcc

SEQ ID NO: 267355 - DNA, 25 bp, probe
tgtgcttctccaaaaacacccatcc

SEQ ID NO: 267356 - DNA, 25 bp, probe
tgtgcttttctccaagtcagcaccc

SEQ ID NO: 267357 - DNA, 25 bp, probe
tgtcaattccctactggacagcacc

SEQ ID NO: 267358 - DNA, 25 bp, probe
tgtaaattgttccgtgaagccgcgc

SEQ ID NO: 267359 - DNA, 25 bp, probe
tgtaatcagtgtagagaaaaccgtg

SEQ ID NO: 267360 - DNA, 25 bp, probe
tgttacctgctccagaaagaccttc

SEQ ID NO: 267361 - DNA, 25 bp, probe
tgttacctgctccagaaagaccttc

SEQ ID NO: 267362 - DNA, 25 bp, probe
tgatgaacgctcgtaagaccccttt

SEQ ID NO: 267363 - DNA, 25 bp, probe
tgataaaaagcttgtacctcctttt

SEQ ID NO: 267364 - DNA, 25 bp, probe
tgtaaaagacaatactcttgtgtta

SEQ ID NO: 267365 - DNA, 25 bp, probe
tgtagtaaacaatggtgattttatt

SEQ ID NO: 267366 - DNA, 25 bp, probe
tgtctttaacaatgtctattggtaa

SEQ ID NO: 267367 - DNA, 25 bp, probe
tgtccctcaaacaatgtcatttcag

SEQ ID NO: 267368 - DNA, 25 bp, probe
tgtccctcaaacaatgtcatttcag

SEQ ID NO: 267369 - DNA, 25 bp, probe
tgctcctccaaaacatcctttagat

SEQ ID NO: 267370 - DNA, 25 bp, probe
tgtcctacaatatcattttcctggg

SEQ ID NO: 267371 - DNA, 25 bp, probe
tgtctctaaatgtcaagttgttctg

SEQ ID NO: 267372 - DNA, 25 bp, probe
tgtcttcaagatgcaatacttttct

SEQ ID NO: 267373 - DNA, 25 bp, probe
tgttagcatcgactctttcttttta

SEQ ID NO: 267374 - DNA, 25 bp, probe
tgtccaagcgagagttctgttttca

SEQ ID NO: 267375 - DNA, 25 bp, probe
tgtacatataggcagtattttttct

SEQ ID NO: 267376 - DNA, 25 bp, probe
tgtacatataggcagtattttttct

SEQ ID NO: 267377 - DNA, 25 bp, probe
tgtcagttcagtcggaacaaagttt

SEQ ID NO: 267378 - DNA, 25 bp, probe
tgtccattcatgagtgtgacatgaa

SEQ ID NO: 267379 - DNA, 25 bp, probe
tgtctatctctgttgctgagatcag

SEQ ID NO: 267380 - DNA, 25 bp, probe
tgtcttcattgtggctgccatcttg

SEQ ID NO: 267381 - DNA, 25 bp, probe
tgttctaatgtggctccttttcaag

SEQ ID NO: 267382 - DNA, 25 bp, probe
tgtctttctgtgatgccttattctt

SEQ ID NO: 267383 - DNA, 25 bp, probe
tgtctttacatggggttttcaattt

SEQ ID NO: 267384 - DNA, 25 bp, probe
tgtctttaggcagcagcttttaata

SEQ ID NO: 267385 - DNA, 25 bp, probe
tgtctttggagagtattttagaaac

SEQ ID NO: 267386 - DNA, 25 bp, probe
tgctattcttaggtttctacgaaac

SEQ ID NO: 267387 - DNA, 25 bp, probe
tgtaatgtgtaatttctttctgaaa

SEQ ID NO: 267388 - DNA, 25 bp, probe
tgttaggaacaaggtgcaccataag

SEQ ID NO: 267389 - DNA, 25 bp, probe
tgtctgggaacccagctgcctaaca

SEQ ID NO: 267390 - DNA, 25 bp, probe
tgtccggggctgcacgcgcgctaca

SEQ ID NO: 267391 - DNA, 25 bp, probe
tgtccctggagcaaacggagcaaca

SEQ ID NO: 267392 - DNA, 25 bp, probe
tgtcctctcgccaaaggcgcacaaa

SEQ ID NO: 267393 - DNA, 25 bp, probe
tgtccttcactgtaactgatgaaaa

SEQ ID NO: 267394 - DNA, 25 bp, probe
tgtccttcactgtaactgatgaaaa

SEQ ID NO: 267395 - DNA, 25 bp, probe
tgtgccattctttaacataagagta

SEQ ID NO: 267396 - DNA, 25 bp, probe
tgtgctgtttttcctcatacaagta

SEQ ID NO: 267397 - DNA, 25 bp, probe
tgtgctgtttttataacttttgtaa

SEQ ID NO: 267398 - DNA, 25 bp, probe
tgatcctttattctttctatttgtc

SEQ ID NO: 267399 - DNA, 25 bp, probe
tgctttgttttggaatttaccggct

SEQ ID NO: 267400 - DNA, 25 bp, probe
tgtctttgagttgtggtggacgctg

SEQ ID NO: 267401 - DNA, 25 bp, probe
tgtccttaggtcctggtctacatgc

SEQ ID NO: 267402 - DNA, 25 bp, probe
tgtccctcgtgaggctggatctcaa

SEQ ID NO: 267403 - DNA, 25 bp, probe
tgtcatcctttgagctgctgactgc

SEQ ID NO: 267404 - DNA, 25 bp, probe
tgtctccattctaacctgactggca

SEQ ID NO: 267405 - DNA, 25 bp, probe
tgtctatttttgtcactgtcggaac

SEQ ID NO: 267406 - DNA, 25 bp, probe
tgtctatttttgtcactgtcggaac

SEQ ID NO: 267407 - DNA, 25 bp, probe
tgtgctgacctttacactgtgtagt

SEQ ID NO: 267408 - DNA, 25 bp, probe
tgtagaaccagatcactatgttgta

SEQ ID NO: 267409 - DNA, 25 bp, probe
tgtaaaccaatgatctgctgctgtg

SEQ ID NO: 267410 - DNA, 25 bp, probe
tgctctatacgcttttggtcggacg

SEQ ID NO: 267411 - DNA, 25 bp, probe
tgtccagcaccatcttggtcgtgaa

SEQ ID NO: 267412 - DNA, 25 bp, probe
tgtccccaatcactatagtccatga

SEQ ID NO: 267413 - DNA, 25 bp, probe
tgtccaccatgatttcatagcccag

SEQ ID NO: 267414 - DNA, 25 bp, probe
tgtcctgcacaagatcaagcacccc

SEQ ID NO: 267415 - DNA, 25 bp, probe
tgtttgacgacgaaaacacagccca

SEQ ID NO: 267416 - DNA, 25 bp, probe
tgctaagacgtttaaaacagcctaa

SEQ ID NO: 267417 - DNA, 25 bp, probe
tgctggaccggatgttaacctttaa

SEQ ID NO: 267418 - DNA, 25 bp, probe
tctggaccccaagatagacgcttca

SEQ ID NO: 267419 - DNA, 25 bp, probe
ttacacaccaaagaagccggcgcct

SEQ ID NO: 267420 - DNA, 25 bp, probe
tgtaaaccataagtacaggggtctc

SEQ ID NO: 267421 - DNA, 25 bp, probe
tgtcaagactgatactactggggct

SEQ ID NO: 267422 - DNA, 25 bp, probe
tgtaagacagggacggggcggccca

SEQ ID NO: 267423 - DNA, 25 bp, probe
tgtccgcatcgtcggcgggaaggct

SEQ ID NO: 267424 - DNA, 25 bp, probe
tgtcctccaagccagcgggaatggc

SEQ ID NO: 267425 - DNA, 25 bp, probe
tgtcctccaagccagcgggaatggc

SEQ ID NO: 267426 - DNA, 25 bp, probe
tgtgctgtgtattggggggagctgg

SEQ ID NO: 267427 - DNA, 25 bp, probe
tgtcggatctggccgaggtggtgcg

SEQ ID NO: 267428 - DNA, 25 bp, probe
tgtctgcagtcagaggaggacgtga

SEQ ID NO: 267429 - DNA, 25 bp, probe
tgttggtaggtcctagacgtggttc

SEQ ID NO: 267430 - DNA, 25 bp, probe
tgtctggttgtgtcccaagaggtgt

SEQ ID NO: 267431 - DNA, 25 bp, probe
tgtctggatgtggaagagcttaagg

SEQ ID NO: 267432 - DNA, 25 bp, probe
tgtaagctgttggaggtcaaaggct

SEQ ID NO: 267433 - DNA, 25 bp, probe
tgtgcctggtgtcacgccaggaggc

SEQ ID NO: 267434 - DNA, 25 bp, probe
tgtgcctggtgtcacgccaggaggc

SEQ ID NO: 267435 - DNA, 25 bp, probe
tgtccaatgtgtgccctcagagggc

SEQ ID NO: 267436 - DNA, 25 bp, probe
tgtaaatggaacttctgcaaggcag

SEQ ID NO: 267437 - DNA, 25 bp, probe
tgtaaaggtgactcggatgctcaag

SEQ ID NO: 267438 - DNA, 25 bp, probe
tgtacaaagtggtgccgatatgtga

SEQ ID NO: 267439 - DNA, 25 bp, probe
tgtcccaagaggtgttgaggtaggt

SEQ ID NO: 267440 - DNA, 25 bp, probe
tgtccccaggtcttgtgtgggtggc

SEQ ID NO: 267441 - DNA, 25 bp, probe
tgtgcccagggtgggtgtctggcac

SEQ ID NO: 267442 - DNA, 25 bp, probe
tgttctacggggctgccatgtacac

SEQ ID NO: 267443 - DNA, 25 bp, probe
tgttctacggggctgccatgtacac

SEQ ID NO: 267444 - DNA, 25 bp, probe
tgttttcaaagcccccgataatcgc

SEQ ID NO: 267445 - DNA, 25 bp, probe
tgtatttcaaaatcacccaaaactt

SEQ ID NO: 267446 - DNA, 25 bp, probe
tgcttcttaaaatagccataaaggg

SEQ ID NO: 267447 - DNA, 25 bp, probe
tgtaccccaaaattctgcatagatt

SEQ ID NO: 267448 - DNA, 25 bp, probe
tgtaccccaaaattctgcatagatt

SEQ ID NO: 267449 - DNA, 25 bp, probe
tgtccaaagcaaagattctgctggt

SEQ ID NO: 267450 - DNA, 25 bp, probe
tgtctcaaagattaagccatgcatg

SEQ ID NO: 267451 - DNA, 25 bp, probe
tgtatggcaagttaagaagcacaga

SEQ ID NO: 267452 - DNA, 25 bp, probe
tgtacgacgatgtatcaacagagaa

SEQ ID NO: 267453 - DNA, 25 bp, probe
tgtactactgattaaactgaactta

SEQ ID NO: 267454 - DNA, 25 bp, probe
tgtactcttgcaaacagggaagttt

SEQ ID NO: 267455 - DNA, 25 bp, probe
tgtctcttctaaaagcggaagcgct

SEQ ID NO: 267456 - DNA, 25 bp, probe
tgtctatttcaatatagaactgttc

SEQ ID NO: 267457 - DNA, 25 bp, probe
tgattgattcatctgtaaaagggtc

SEQ ID NO: 267458 - DNA, 25 bp, probe
tgttgactgactttaacaaggttca

SEQ ID NO: 267459 - DNA, 25 bp, probe
tgtaagtgcctataaccatgttcta

SEQ ID NO: 267460 - DNA, 25 bp, probe
tgtgccacgtttcagttcagttctg

SEQ ID NO: 267461 - DNA, 25 bp, probe
tgtgccacagtttcgagtttttcga

SEQ ID NO: 267462 - DNA, 25 bp, probe
tgtcgccagttgtgcacttttacaa

SEQ ID NO: 267463 - DNA, 25 bp, probe
tgttctcagatatggtcttaaaaga

SEQ ID NO: 267464 - DNA, 25 bp, probe
tgttacgaccctgttcacaaaactc

SEQ ID NO: 267465 - DNA, 25 bp, probe
tgttaaacccttaacaacatcaaca

SEQ ID NO: 267466 - DNA, 25 bp, probe
tgtaaaaccactggacagagggcca

SEQ ID NO: 267467 - DNA, 25 bp, probe
tgtcctggaccctgtagggtgccat

SEQ ID NO: 267468 - DNA, 25 bp, probe
tgtcctggttcccgatgaacgtgca

SEQ ID NO: 267469 - DNA, 25 bp, probe
tgtcctggttcccgatgaacgtgca

SEQ ID NO: 267470 - DNA, 25 bp, probe
tgtccttgtgccgtagtgaccaggc

SEQ ID NO: 267471 - DNA, 25 bp, probe
tgtccttgtgccgtagtgaccaggc

SEQ ID NO: 267472 - DNA, 25 bp, probe
tgtccggcgcctggagtataagccc

SEQ ID NO: 267473 - DNA, 25 bp, probe
tgtccggtttgcagtacttgcacac

SEQ ID NO: 267474 - DNA, 25 bp, probe
tgtcccactttgagtacgtcaagaa

SEQ ID NO: 267475 - DNA, 25 bp, probe
tgttacttttctccctagttagaca

SEQ ID NO: 267476 - DNA, 25 bp, probe
tgtttgttttgcaccttgtctaagg

SEQ ID NO: 267477 - DNA, 25 bp, probe
tgttgtctttatcgactttgtaaaa

SEQ ID NO: 267478 - DNA, 25 bp, probe
tgtctggagctttggagtgttgatg

SEQ ID NO: 267479 - DNA, 25 bp, probe
tgtctaggactgtgtgtgttcggct

SEQ ID NO: 267480 - DNA, 25 bp, probe
tgtctaggactgtgtgtgttcggct

SEQ ID NO: 267481 - DNA, 25 bp, probe
tgatctgaggggtggtgcctacttc

SEQ ID NO: 267482 - DNA, 25 bp, probe
tgtaggtgagcctgggcagcttctg

SEQ ID NO: 267483 - DNA, 25 bp, probe
tgtacttcctgcgaggaggcttcga

SEQ ID NO: 267484 - DNA, 25 bp, probe
tgtacgtgatcgtggagtgcgccgc

SEQ ID NO: 267485 - DNA, 25 bp, probe
tgtacgtgatcgtggagtgcgccgc

SEQ ID NO: 267486 - DNA, 25 bp, probe
tgtatcagatgctgagacacatgtc

SEQ ID NO: 267487 - DNA, 25 bp, probe
tgtacaatcgtttcatcattcggcg

SEQ ID NO: 267488 - DNA, 25 bp, probe
tgtacaggggcttgcctacagagga

SEQ ID NO: 267489 - DNA, 25 bp, probe
tgtacaggggcttgcctacagagga

SEQ ID NO: 267490 - DNA, 25 bp, probe
tgtatgcagtggtgatgcctaaagg

SEQ ID NO: 267491 - DNA, 25 bp, probe
tgtagctgggtacatattaagtggc

SEQ ID NO: 267492 - DNA, 25 bp, probe
tgtacttggtgaccaccctgatggg

SEQ ID NO: 267493 - DNA, 25 bp, probe
tgtctctctagttgaaccctgggaa

SEQ ID NO: 267494 - DNA, 25 bp, probe
tgtcttgtaaagagccctgagcaga

SEQ ID NO: 267495 - DNA, 25 bp, probe
tgtcttgggaagaggtttctgtaac

SEQ ID NO: 267496 - DNA, 25 bp, probe
tgtttgggtaatttggttcattaag

SEQ ID NO: 267497 - DNA, 25 bp, probe
tgtttggatgtaatttagggtacta

SEQ ID NO: 267498 - DNA, 25 bp, probe
tgtttgggtgtgtgatagggttctc

SEQ ID NO: 267499 - DNA, 25 bp, probe
tgttaagatttgtgaagtgtttcct

SEQ ID NO: 267500 - DNA, 25 bp, probe
tgtagaattatttttacgatttcca

SEQ ID NO: 267501 - DNA, 25 bp, probe
tgtagaaacagtgttgccatattct

SEQ ID NO: 267502 - DNA, 25 bp, probe
tgtaaatcctgtgtttcattacttg

SEQ ID NO: 267503 - DNA, 25 bp, probe
tgtcaaacacttcttatcatctgga

SEQ ID NO: 267504 - DNA, 25 bp, probe
tgtcaggaatgtgattcttcatctt

SEQ ID NO: 267505 - DNA, 25 bp, probe
tgtcaagactgaaaattctcatgct

SEQ ID NO: 267506 - DNA, 25 bp, probe
tgtcaagaagctgccatacctgcca

SEQ ID NO: 267507 - DNA, 25 bp, probe
tgtacaagcctgggaacctgagccg

SEQ ID NO: 267508 - DNA, 25 bp, probe
ttaccacgggtgatagccagactgc

SEQ ID NO: 267509 - DNA, 25 bp, probe
tgtagctacgagatggtaccgagct

SEQ ID NO: 267510 - DNA, 25 bp, probe
tgtatctactagtgtggccgaggct

SEQ ID NO: 267511 - DNA, 25 bp, probe
tgtcttactggtggatgaggctggt

SEQ ID NO: 267512 - DNA, 25 bp, probe
tgtttaacgtggctctgcagcagtc

SEQ ID NO: 267513 - DNA, 25 bp, probe
tgtttaacgtggctctgcagcagtc

SEQ ID NO: 267514 - DNA, 25 bp, probe
tgtttagggtgcccttacttcagca

SEQ ID NO: 267515 - DNA, 25 bp, probe
tgtctgtaggtgcgcacttacctgc

SEQ ID NO: 267516 - DNA, 25 bp, probe
tgtctgacacaatatcaccagagca

SEQ ID NO: 267517 - DNA, 25 bp, probe
tgtcatttcacattgtatgccagaa

SEQ ID NO: 267518 - DNA, 25 bp, probe
tgtcacagtcacaatgtattgcata

SEQ ID NO: 267519 - DNA, 25 bp, probe
tgtccagcactcgattgttgtaaac

SEQ ID NO: 267520 - DNA, 25 bp, probe
tgtccacttagaatgtttgaaatgc

SEQ ID NO: 267521 - DNA, 25 bp, probe
tgtccctctggcagttgtgtgatga

SEQ ID NO: 267522 - DNA, 25 bp, probe
tgtccctggtgcagaggtgagcaga

SEQ ID NO: 267523 - DNA, 25 bp, probe
tgtccacgggtctaggagcctgaga

SEQ ID NO: 267524 - DNA, 25 bp, probe
tgatccattgtagcgaaggcactgg

SEQ ID NO: 267525 - DNA, 25 bp, probe
tgtctgctttacctggaggtcatgg

SEQ ID NO: 267526 - DNA, 25 bp, probe
tgtcaatgattagatcgggtctcgg

SEQ ID NO: 267527 - DNA, 25 bp, probe
tgtaaatatccttcgggctttgttt

SEQ ID NO: 267528 - DNA, 25 bp, probe
tgtaaattatttgccctggagtttt

SEQ ID NO: 267529 - DNA, 25 bp, probe
tctaagtttattgccttgggttatt

SEQ ID NO: 267530 - DNA, 25 bp, probe
tgtagcttcttatgtccttgggatt

SEQ ID NO: 267531 - DNA, 25 bp, probe
tgtcgtatcttatgctgcgtactgc

SEQ ID NO: 267532 - DNA, 25 bp, probe
tgtcctcctgtccagtggatacagc

SEQ ID NO: 267533 - DNA, 25 bp, probe
tgtcctcctgtccagtggatacagc

SEQ ID NO: 267534 - DNA, 25 bp, probe
tgtcctcacactgagctgtatcgcc

SEQ ID NO: 267535 - DNA, 25 bp, probe
tgtcccttgctgtatgctgatcatc

SEQ ID NO: 267536 - DNA, 25 bp, probe
tgtcctctggcttattgcctcagag

SEQ ID NO: 267537 - DNA, 25 bp, probe
tgtcctctggcttattgcctcagag

SEQ ID NO: 267538 - DNA, 25 bp, probe
tgtccaggagctaatctgaccgttc

SEQ ID NO: 267539 - DNA, 25 bp, probe
tgtccaggagctaatctgaccgttc

SEQ ID NO: 267540 - DNA, 25 bp, probe
tgtacgagatgctcattggccagtc

SEQ ID NO: 267541 - DNA, 25 bp, probe
tgtccagagatgctcataggtcact

SEQ ID NO: 267542 - DNA, 25 bp, probe
tgtccagagtgcgtatgggcagccc

SEQ ID NO: 267543 - DNA, 25 bp, probe
tgtccttgtcatgatgctggagcca

SEQ ID NO: 267544 - DNA, 25 bp, probe
tgtccttgtgagacacttggcacag

SEQ ID NO: 267545 - DNA, 25 bp, probe
tgtccctggagtactatggcatcga

SEQ ID NO: 267546 - DNA, 25 bp, probe
tgtccctggagtactatggcatcga

SEQ ID NO: 267547 - DNA, 25 bp, probe
tgtccctggcctctgaggatcagat

SEQ ID NO: 267548 - DNA, 25 bp, probe
tgtccggtcctggctgaaacatgac

SEQ ID NO: 267549 - DNA, 25 bp, probe
tgtctggaggccacggtcaatgact

SEQ ID NO: 267550 - DNA, 25 bp, probe
tgtcagtgagcagatccggaagaac

SEQ ID NO: 267551 - DNA, 25 bp, probe
tgtcagtgagcagatccggaagaac

SEQ ID NO: 267552 - DNA, 25 bp, probe
tgtcattgcatcggacctaccataa

SEQ ID NO: 267553 - DNA, 25 bp, probe
tgtcattgtctccaacttcaattac

SEQ ID NO: 267554 - DNA, 25 bp, probe
tgtttctccagatttttaatacgtt

SEQ ID NO: 267555 - DNA, 25 bp, probe
tgctttcctggaatttccaaagctt

SEQ ID NO: 267556 - DNA, 25 bp, probe
tgtttgcactggacatattccctac

SEQ ID NO: 267557 - DNA, 25 bp, probe
tgtttgacagcggaaaccctggaaa

SEQ ID NO: 267558 - DNA, 25 bp, probe
tgtctgtgaagccatggaatacctg

SEQ ID NO: 267559 - DNA, 25 bp, probe
tgtctgcgaggccatggaatacctg

SEQ ID NO: 267560 - DNA, 25 bp, probe
tgctcagaggggcgattccctcgtc

SEQ ID NO: 267561 - DNA, 25 bp, probe
tgctcagaggggcgattccctcgtc

SEQ ID NO: 267562 - DNA, 25 bp, probe
tgtcattgggggtcagacctcggcc

SEQ ID NO: 267563 - DNA, 25 bp, probe
tgtctttggggttcacgagtgtgca

SEQ ID NO: 267564 - DNA, 25 bp, probe
tgtccctggggattatcctgttctg

SEQ ID NO: 267565 - DNA, 25 bp, probe
tgtccctggggattatcctgttctg

SEQ ID NO: 267566 - DNA, 25 bp, probe
tgtactcggcgggagattctgtcct

SEQ ID NO: 267567 - DNA, 25 bp, probe
tgtcactctaaagggaactgtgaca

SEQ ID NO: 267568 - DNA, 25 bp, probe
tgtctcccagaagggtcagctggga

SEQ ID NO: 267569 - DNA, 25 bp, probe
tgtcacccaaaccggcaggtgcgat

SEQ ID NO: 267570 - DNA, 25 bp, probe
tgtcaacaccaccgggcatttggtg

SEQ ID NO: 267571 - DNA, 25 bp, probe
tgtcaccagcgcacacgctgatttg

SEQ ID NO: 267572 - DNA, 25 bp, probe
tgtcccatgccaactccatgatgaa

SEQ ID NO: 267573 - DNA, 25 bp, probe
tgtctcctgcactgccaatatgcaa

SEQ ID NO: 267574 - DNA, 25 bp, probe
tgtccctaccagacacaaagatgaa

SEQ ID NO: 267575 - DNA, 25 bp, probe
tgtcggtcaccagaagaagatcatg

SEQ ID NO: 267576 - DNA, 25 bp, probe
tgtcgcccaggcgacaaaagtgcta

SEQ ID NO: 267577 - DNA, 25 bp, probe
tgtctgcaaagtggtcaaaagtgct

SEQ ID NO: 267578 - DNA, 25 bp, probe
tttctacggttgcaaactgctgacc

SEQ ID NO: 267579 - DNA, 25 bp, probe
tgtaccgcgctatgctgaaaatgga

SEQ ID NO: 267580 - DNA, 25 bp, probe
tgtccctgctgtttttgcatttgga

SEQ ID NO: 267581 - DNA, 25 bp, probe
tgtacctgcttagttaattggctca

SEQ ID NO: 267582 - DNA, 25 bp, probe
tgtacttgccttgttttcttcagta

SEQ ID NO: 267583 - DNA, 25 bp, probe
tgtacatttcttgttaaccacgtta

SEQ ID NO: 267584 - DNA, 25 bp, probe
tgtaccttcaattgaaaacctcgtt

SEQ ID NO: 267585 - DNA, 25 bp, probe
tgtaccttcaattgaaaacctcgtt

SEQ ID NO: 267586 - DNA, 25 bp, probe
tgtcacctccagtgactaccgggta

SEQ ID NO: 267587 - DNA, 25 bp, probe
tgatcttgggcagaacataccgggt

SEQ ID NO: 267588 - DNA, 25 bp, probe
tgtcttgggctggacatataattgc

SEQ ID NO: 267589 - DNA, 25 bp, probe
tgtcgggactgagcaggcaatggcc

SEQ ID NO: 267590 - DNA, 25 bp, probe
tgtcgtggacacgcgtgattgaccc

SEQ ID NO: 267591 - DNA, 25 bp, probe
tgtcctggtatatcgtcattccatc

SEQ ID NO: 267592 - DNA, 25 bp, probe
tgtccgtggatgaggccaccacagc

SEQ ID NO: 267593 - DNA, 25 bp, probe
tgtcagcgtggaccactaaccagcc

SEQ ID NO: 267594 - DNA, 25 bp, probe
tgtcacgtggtgcaaaaggcctccc

SEQ ID NO: 267595 - DNA, 25 bp, probe
tgtcacgtggtgcaaaaggcctccc

SEQ ID NO: 267596 - DNA, 25 bp, probe
tgtctctgtgttcgggaaggtctcc

SEQ ID NO: 267597 - DNA, 25 bp, probe
tgtctctgcctgtcggggacagact

SEQ ID NO: 267598 - DNA, 25 bp, probe
tgtttgtccactgccaggcaggcat

SEQ ID NO: 267599 - DNA, 25 bp, probe
tgtttgttacctccaacagaactaa

SEQ ID NO: 267600 - DNA, 25 bp, probe
tgtttgttacctccaacagaactaa

SEQ ID NO: 267601 - DNA, 25 bp, probe
tgttttaaccattaacttgtcaaat

SEQ ID NO: 267602 - DNA, 25 bp, probe
tgtctgttacacaatgatcattttg

SEQ ID NO: 267603 - DNA, 25 bp, probe
tgtctggaccctttctatctagata

SEQ ID NO: 267604 - DNA, 25 bp, probe
tgtctggaccctttctatctagata

SEQ ID NO: 267605 - DNA, 25 bp, probe
tgtcctgacgttttgttgcttatac

SEQ ID NO: 267606 - DNA, 25 bp, probe
tgtcctaattcttctgtcctgagaa

SEQ ID NO: 267607 - DNA, 25 bp, probe
tgttctttgttagtctcttgaaact

SEQ ID NO: 267608 - DNA, 25 bp, probe
tgatgttttccatctcttcagcaaa

SEQ ID NO: 267609 - DNA, 25 bp, probe
tgtctttgtcagtgccatgtccaca

SEQ ID NO: 267610 - DNA, 25 bp, probe
tgtctttgtcagtgccatgtccaca

SEQ ID NO: 267611 - DNA, 25 bp, probe
tgtcctcttgatgacattctgccca

SEQ ID NO: 267612 - DNA, 25 bp, probe
tgtctctaatgttagtactgcccat

SEQ ID NO: 267613 - DNA, 25 bp, probe
tgtactagcagagagtcctgagcca

SEQ ID NO: 267614 - DNA, 25 bp, probe
tgtttacaaaggactctgagccaca

SEQ ID NO: 267615 - DNA, 25 bp, probe
tgtttaaaaggaagcatccacaccc

SEQ ID NO: 267616 - DNA, 25 bp, probe
tgattactacctcaggaccaacctc

SEQ ID NO: 267617 - DNA, 25 bp, probe
tgttattacgtggagaaccaccctt

SEQ ID NO: 267618 - DNA, 25 bp, probe
tgtaaatggaaggcaaagcatcaca

SEQ ID NO: 267619 - DNA, 25 bp, probe
tgtcaccataactcacaagacacat

SEQ ID NO: 267620 - DNA, 25 bp, probe
tgtcactcattgtcatgttgacgac

SEQ ID NO: 267621 - DNA, 25 bp, probe
tgtctgctactgtcattcagcgtgc

SEQ ID NO: 267622 - DNA, 25 bp, probe
tgtctgtactgactctatctgccac

SEQ ID NO: 267623 - DNA, 25 bp, probe
tgtctgggatgacttcacagcccag

SEQ ID NO: 267624 - DNA, 25 bp, probe
tgtctgggaagttactctcatggtt

SEQ ID NO: 267625 - DNA, 25 bp, probe
tgtcagggaagtgcctctggtggcc

SEQ ID NO: 267626 - DNA, 25 bp, probe
tgtcaagtaatccacctctggctac

SEQ ID NO: 267627 - DNA, 25 bp, probe
tgtcaagtaatccacctctggctac

SEQ ID NO: 267628 - DNA, 25 bp, probe
tgtcaataaatgcccagcctgcatc

SEQ ID NO: 267629 - DNA, 25 bp, probe
tgctcaaaaaccacctgtaaaaatg

SEQ ID NO: 267630 - DNA, 25 bp, probe
tgccgaataccttaaagtaactaat

SEQ ID NO: 267631 - DNA, 25 bp, probe
tgtcagacaatggctataaactgaa

SEQ ID NO: 267632 - DNA, 25 bp, probe
tgtagtcaatgcctatgaacacatc

SEQ ID NO: 267633 - DNA, 25 bp, probe
tgtattggatgccctatctatctgc

SEQ ID NO: 267634 - DNA, 25 bp, probe
tgtatctggatctctgttatgtgcc

SEQ ID NO: 267635 - DNA, 25 bp, probe
tgtatctggatctctgttatgtgcc

SEQ ID NO: 267636 - DNA, 25 bp, probe
tgtacatgtgcttgccatgtgtagg

SEQ ID NO: 267637 - DNA, 25 bp, probe
tgtcactcagcaacactggtcacgt

SEQ ID NO: 267638 - DNA, 25 bp, probe
tgtactatcactggctggtctgagc

SEQ ID NO: 267639 - DNA, 25 bp, probe
tgtatctatagccactggttcctcc

SEQ ID NO: 267640 - DNA, 25 bp, probe
tgtatctatagccactggttcctcc

SEQ ID NO: 267641 - DNA, 25 bp, probe
tgtacctggccattgagtacgcgcc

SEQ ID NO: 267642 - DNA, 25 bp, probe
tgtccctgagcagagttacatgctc

SEQ ID NO: 267643 - DNA, 25 bp, probe
tgtctacgatgggattatgcacttc

SEQ ID NO: 267644 - DNA, 25 bp, probe
tgtctacgatgggattatgcacttc

SEQ ID NO: 267645 - DNA, 25 bp, probe
tgtctactgggcatgctccagtcat

SEQ ID NO: 267646 - DNA, 25 bp, probe
tgtctactggagggtggagttgaaa

SEQ ID NO: 267647 - DNA, 25 bp, probe
tgatccagctgctgcggggggtgaa

SEQ ID NO: 267648 - DNA, 25 bp, probe
tgtcccgcaagggcggcaagtgagg

SEQ ID NO: 267649 - DNA, 25 bp, probe
tgtccccaaactgctgctattgaag

SEQ ID NO: 267650 - DNA, 25 bp, probe
tgtcacctttaaagtgcttgctaag

SEQ ID NO: 267651 - DNA, 25 bp, probe
tgtcccttgtacacattctggtatg

SEQ ID NO: 267652 - DNA, 25 bp, probe
tgtcccttatacactgtcttcatat

SEQ ID NO: 267653 - DNA, 25 bp, probe
tgttcctaataaagcttctgttccg

SEQ ID NO: 267654 - DNA, 25 bp, probe
tgagatttcaaatagtcctccccac

SEQ ID NO: 267655 - DNA, 25 bp, probe
tgagggagacaaaaaccccgcagac

SEQ ID NO: 267656 - DNA, 25 bp, probe
tgactggcttctaaaaccctgccaa

SEQ ID NO: 267657 - DNA, 25 bp, probe
tgtctgaatgtcaaaccactcctgc

SEQ ID NO: 267658 - DNA, 25 bp, probe
tgtcatcaatgtacatgccaacata

SEQ ID NO: 267659 - DNA, 25 bp, probe
tgtcacggagacacaagctacccag

SEQ ID NO: 267660 - DNA, 25 bp, probe
tgtcacggagacacaagctacccag

SEQ ID NO: 267661 - DNA, 25 bp, probe
tgtcacggagacacaagctacccag

SEQ ID NO: 267662 - DNA, 25 bp, probe
tgtcaccaacaaccaagctaaataa

SEQ ID NO: 267663 - DNA, 25 bp, probe
tgtacacatacataccctataccaa

SEQ ID NO: 267664 - DNA, 25 bp, probe
tgtacacatacataccctataccaa

SEQ ID NO: 267665 - DNA, 25 bp, probe
tgtcaccaacataaccctttatcgc

SEQ ID NO: 267666 - DNA, 25 bp, probe
tgttcactacatgtttctttacccc

SEQ ID NO: 267667 - DNA, 25 bp, probe
tgttcactacatgtttctttacccc

SEQ ID NO: 267668 - DNA, 25 bp, probe
tgtacactggtggtttgtttcctag

SEQ ID NO: 267669 - DNA, 25 bp, probe
tgtacactggtggtttgtttcctag

SEQ ID NO: 267670 - DNA, 25 bp, probe
tgcttgctgggtctttgtaacccag

SEQ ID NO: 267671 - DNA, 25 bp, probe
tgtctcttggctattttaacctaaa

SEQ ID NO: 267672 - DNA, 25 bp, probe
tgtcttttcttttacatagtccaaa

SEQ ID NO: 267673 - DNA, 25 bp, probe
tgtttcccactttattatgaccaaa

SEQ ID NO: 267674 - DNA, 25 bp, probe
tgtttaccactttctgttggaatct

SEQ ID NO: 267675 - DNA, 25 bp, probe
tgtcattcacctttcgtgttttttt

SEQ ID NO: 267676 - DNA, 25 bp, probe
tgtttcaccttatttttggtctttg

SEQ ID NO: 267677 - DNA, 25 bp, probe
tgtcttgaggttttgttcatgcccc

SEQ ID NO: 267678 - DNA, 25 bp, probe
tgtcatagggtccctttgtcagccc

SEQ ID NO: 267679 - DNA, 25 bp, probe
tgtcatagggtccctttgtcagccc

SEQ ID NO: 267680 - DNA, 25 bp, probe
tgtcatgggttccttgcttgagacc

SEQ ID NO: 267681 - DNA, 25 bp, probe
tgtatgacgctgggcacgttgagtg

SEQ ID NO: 267682 - DNA, 25 bp, probe
tgtctgagggatcactgtgtcattg

SEQ ID NO: 267683 - DNA, 25 bp, probe
tgtctgtgtggtcagcttttggaag

SEQ ID NO: 267684 - DNA, 25 bp, probe
tgtcatggatggagggtatctggat

SEQ ID NO: 267685 - DNA, 25 bp, probe
tgtcaggggcttggatttcgtgtgc

SEQ ID NO: 267686 - DNA, 25 bp, probe
tgtcaggacacatggattttggcag

SEQ ID NO: 267687 - DNA, 25 bp, probe
tgtcgagctcacagcgtttctatca

SEQ ID NO: 267688 - DNA, 25 bp, probe
tgtcgagctcacagcgtttctatca

SEQ ID NO: 267689 - DNA, 25 bp, probe
tgttggcctcgtgtttgctatgcca

SEQ ID NO: 267690 - DNA, 25 bp, probe
tgtctgatcctcatttttcaaccat

SEQ ID NO: 267691 - DNA, 25 bp, probe
tgtctgtctgtgagcctttcacacc

SEQ ID NO: 267692 - DNA, 25 bp, probe
tgtctggtatgatccttctgaagca

SEQ ID NO: 267693 - DNA, 25 bp, probe
tgtctggtatgatccttctgaagca

SEQ ID NO: 267694 - DNA, 25 bp, probe
tgtctgttcagctcttctgtgagaa

SEQ ID NO: 267695 - DNA, 25 bp, probe
tgtcttctatgccctgttgggcatc

SEQ ID NO: 267696 - DNA, 25 bp, probe
tgtctcttcaccgtgttaacataat

SEQ ID NO: 267697 - DNA, 25 bp, probe
tgtctttgctacctgttcattatca

SEQ ID NO: 267698 - DNA, 25 bp, probe
tgtcttttgacatttgactttgcat

SEQ ID NO: 267699 - DNA, 25 bp, probe
tgtctcttgcatgattcttcttggt

SEQ ID NO: 267700 - DNA, 25 bp, probe
tgtcatctagattttccatttcagt

SEQ ID NO: 267701 - DNA, 25 bp, probe
tgtcattgtgattttcgacctcatg

SEQ ID NO: 267702 - DNA, 25 bp, probe
tgtacttgtcaagtcgacatctaac

SEQ ID NO: 267703 - DNA, 25 bp, probe
tgtaattggacagctctctcgaaga

SEQ ID NO: 267704 - DNA, 25 bp, probe
tgtaattggacagctctctcgaaga

SEQ ID NO: 267705 - DNA, 25 bp, probe
tgtaattggacagctctctcgaaga

SEQ ID NO: 267706 - DNA, 25 bp, probe
tgtaattggacagctctctcgaaga

SEQ ID NO: 267707 - DNA, 25 bp, probe
tgtaattgctggattctccgtccac

SEQ ID NO: 267708 - DNA, 25 bp, probe
tgtaatttaaatggctgcatccccc

SEQ ID NO: 267709 - DNA, 25 bp, probe
tgtcaataaaaagcttcaccccctg

SEQ ID NO: 267710 - DNA, 25 bp, probe
tgtcaataaaaagcttcaccccctg

SEQ ID NO: 267711 - DNA, 25 bp, probe
tgtcaaagaacacctttcaccacct

SEQ ID NO: 267712 - DNA, 25 bp, probe
tgtcacaggtaaggcttgctcatcc

SEQ ID NO: 267713 - DNA, 25 bp, probe
tgtacagtttattcgatcacatcat

SEQ ID NO: 267714 - DNA, 25 bp, probe
tgatgacgattgctctcttgcactc

SEQ ID NO: 267715 - DNA, 25 bp, probe
tgtacagttggttcatccctttttc

SEQ ID NO: 267716 - DNA, 25 bp, probe
tgtacagttggttcatccctttttc

SEQ ID NO: 267717 - DNA, 25 bp, probe
tgaactttggaaccccagaatttct

SEQ ID NO: 267718 - DNA, 25 bp, probe
tgtacgttgaaacctgcaacacatt

SEQ ID NO: 267719 - DNA, 25 bp, probe
tgctaggttaaacttttacttgaca

SEQ ID NO: 267720 - DNA, 25 bp, probe
tgtcagtggaatgcagtttttttac

SEQ ID NO: 267721 - DNA, 25 bp, probe
tgtcaaagacattcactatgttttt

SEQ ID NO: 267722 - DNA, 25 bp, probe
tgtcaatcgtgtcagctaggtgtac

SEQ ID NO: 267723 - DNA, 25 bp, probe
tgtcaatcgtgtcagctaggtgtac

SEQ ID NO: 267724 - DNA, 25 bp, probe
tgtcaacagctcacaggagcgtgaa

SEQ ID NO: 267725 - DNA, 25 bp, probe
tgtctacagacctggagggaacaga

SEQ ID NO: 267726 - DNA, 25 bp, probe
tgtatacgacaatgcatggggaagc

SEQ ID NO: 267727 - DNA, 25 bp, probe
tgtatacgacaatgcatggggaagc

SEQ ID NO: 267728 - DNA, 25 bp, probe
tgtctgacctcatccgggatgtgag

SEQ ID NO: 267729 - DNA, 25 bp, probe
tgtcagatatcctccgggagctgct

SEQ ID NO: 267730 - DNA, 25 bp, probe
tgtcagatgatgcctcccaggagaa

SEQ ID NO: 267731 - DNA, 25 bp, probe
tgtcaggatcatgccctgtggcaca

SEQ ID NO: 267732 - DNA, 25 bp, probe
tgtcaggatcatgccctgtggcaca

SEQ ID NO: 267733 - DNA, 25 bp, probe
tgtcacacatcagagctggctggcc

SEQ ID NO: 267734 - DNA, 25 bp, probe
tgtcagaagagccggcgtgacccgg

SEQ ID NO: 267735 - DNA, 25 bp, probe
tgtctgacagtggcgacgatgaaca

SEQ ID NO: 267736 - DNA, 25 bp, probe
tgctcggcgtggaactgtcagacac

SEQ ID NO: 267737 - DNA, 25 bp, probe
tgtaccagttgcacatgcttgaact

SEQ ID NO: 267738 - DNA, 25 bp, probe
tgtacatcttatttcattgaacctg

SEQ ID NO: 267739 - DNA, 25 bp, probe
tgtacatcttatttcattgaacctg

SEQ ID NO: 267740 - DNA, 25 bp, probe
tgtacattctccacttggacctgaa

SEQ ID NO: 267741 - DNA, 25 bp, probe
tgatcccttcttacttaacctgaag

SEQ ID NO: 267742 - DNA, 25 bp, probe
tgtcttcattttcctaaacctgggc

SEQ ID NO: 267743 - DNA, 25 bp, probe
tgtctgtaaattctaatacttgaag

SEQ ID NO: 267744 - DNA, 25 bp, probe
tgtctgttatttcctaatcaaaaag

SEQ ID NO: 267745 - DNA, 25 bp, probe
tgtctttctcttccttttatataaa

SEQ ID NO: 267746 - DNA, 25 bp, probe
tgtctttctttgtcattcagttcta

SEQ ID NO: 267747 - DNA, 25 bp, probe
tgtctttctttgtcattcagttcta

SEQ ID NO: 267748 - DNA, 25 bp, probe
tgtctttctgtccaaatatctactt

SEQ ID NO: 267749 - DNA, 25 bp, probe
tgtcatatatgctttcagaaaccaa

SEQ ID NO: 267750 - DNA, 25 bp, probe
tgtcatatatgctttcagaaaccaa

SEQ ID NO: 267751 - DNA, 25 bp, probe
tgtattgatttctaggaacccccaa

SEQ ID NO: 267752 - DNA, 25 bp, probe
tgtattgatttctaggaacccccaa

SEQ ID NO: 267753 - DNA, 25 bp, probe
tgtttagcattcactaagccctaca

SEQ ID NO: 267754 - DNA, 25 bp, probe
tgtcattgagtgtcgccaaagccct

SEQ ID NO: 267755 - DNA, 25 bp, probe
tgtctgtggggacctgagagcacct

SEQ ID NO: 267756 - DNA, 25 bp, probe
tgtacatcgggacctgaaacctgcc

SEQ ID NO: 267757 - DNA, 25 bp, probe
tgtcaagtgggactctgtcacacca

SEQ ID NO: 267758 - DNA, 25 bp, probe
tgtcatcaatggaaatcccatcacc

SEQ ID NO: 267759 - DNA, 25 bp, probe
tgtcacaatagcagagccattcaac

SEQ ID NO: 267760 - DNA, 25 bp, probe
tgtcacaatagcagagccattcaac

SEQ ID NO: 267761 - DNA, 25 bp, probe
tgtacaaaagtaccatagcacagca

SEQ ID NO: 267762 - DNA, 25 bp, probe
tgtaaactaggcggctgcagcaagc

SEQ ID NO: 267763 - DNA, 25 bp, probe
tgtcataaaagggcaggcaggggca

SEQ ID NO: 267764 - DNA, 25 bp, probe
tgtacgaaacaagagggctggcaag

SEQ ID NO: 267765 - DNA, 25 bp, probe
tgtagaagatactagttgaggagga

SEQ ID NO: 267766 - DNA, 25 bp, probe
tgtcaggattaccagattacatgag

SEQ ID NO: 267767 - DNA, 25 bp, probe
tgtaggtaaccatttgagctgcaat

SEQ ID NO: 267768 - DNA, 25 bp, probe
tgtaggtaaccatttgagctgcaat

SEQ ID NO: 267769 - DNA, 25 bp, probe
tgtagggactcatcttgcatggcac

SEQ ID NO: 267770 - DNA, 25 bp, probe
tgtcaggggacagcttgtgtcacca

SEQ ID NO: 267771 - DNA, 25 bp, probe
tgtcagggtgaccgtatgtggccgc

SEQ ID NO: 267772 - DNA, 25 bp, probe
tgtctgtgtgtgtgcatgtatgtgt

SEQ ID NO: 267773 - DNA, 25 bp, probe
tgtcttgcaatgagcacctgtgctg

SEQ ID NO: 267774 - DNA, 25 bp, probe
tgtcttcaacatccaagcatgtggc

SEQ ID NO: 267775 - DNA, 25 bp, probe
tgtcttcaagctccattggttccaa

SEQ ID NO: 267776 - DNA, 25 bp, probe
tgtctaatagcccataaagtctgag

SEQ ID NO: 267777 - DNA, 25 bp, probe
tgtctaatagcccataaagtctgag

SEQ ID NO: 267778 - DNA, 25 bp, probe
tgatccaaacacctagtcaatacag

SEQ ID NO: 267779 - DNA, 25 bp, probe
tgatgcctaccctaagtttatagaa

SEQ ID NO: 267780 - DNA, 25 bp, probe
tgcgcttacccagaattcttgttca

SEQ ID NO: 267781 - DNA, 25 bp, probe
tgtcattacccagagatgttttgct

SEQ ID NO: 267782 - DNA, 25 bp, probe
tgtcattacccagagatgttttgct

SEQ ID NO: 267783 - DNA, 25 bp, probe
tgtattaatcacgcgatgttgactg

SEQ ID NO: 267784 - DNA, 25 bp, probe
tgtttacaccgtggaattgaccctt

SEQ ID NO: 267785 - DNA, 25 bp, probe
tgtttacaccgtggaattgaccctt

SEQ ID NO: 267786 - DNA, 25 bp, probe
tgatttacccctggttaagtttctg

SEQ ID NO: 267787 - DNA, 25 bp, probe
tgtctataatgagccgttaagtctt

SEQ ID NO: 267788 - DNA, 25 bp, probe
tgtcttaatgtggaagttaaccctt

SEQ ID NO: 267789 - DNA, 25 bp, probe
tgtttccgtgaaagactataccagt

SEQ ID NO: 267790 - DNA, 25 bp, probe
tgtcttccattgaaccacttcggga

SEQ ID NO: 267791 - DNA, 25 bp, probe
tgtttccatctttaagttcccagac

SEQ ID NO: 267792 - DNA, 25 bp, probe
tgttctcgcaaaaacgtatctccta

SEQ ID NO: 267793 - DNA, 25 bp, probe
tgattctggaagcaacgttctttcc

SEQ ID NO: 267794 - DNA, 25 bp, probe
tgtcttggatatataggctattttc

SEQ ID NO: 267795 - DNA, 25 bp, probe
tgtcttctgttttcaggttctgttc

SEQ ID NO: 267796 - DNA, 25 bp, probe
tgattgctcgattgtttggttttta

SEQ ID NO: 267797 - DNA, 25 bp, probe
tgattgctcgattgtttggttttta

SEQ ID NO: 267798 - DNA, 25 bp, probe
tgtactcagtgttttgaattattaa

SEQ ID NO: 267799 - DNA, 25 bp, probe
tgtagacctgtgtgtagatatttca

SEQ ID NO: 267800 - DNA, 25 bp, probe
tgtcacaccttttgtttcattctga

SEQ ID NO: 267801 - DNA, 25 bp, probe
tgtcattcctttttatgaagtgctg

SEQ ID NO: 267802 - DNA, 25 bp, probe
tgtacacttttgttatgtgcagttt

SEQ ID NO: 267803 - DNA, 25 bp, probe
tgtatagttttggcctcatcctttg

SEQ ID NO: 267804 - DNA, 25 bp, probe
tgtatttcctatcaccatacttttc

SEQ ID NO: 267805 - DNA, 25 bp, probe
tgttttcgttgctgcagtactttac

SEQ ID NO: 267806 - DNA, 25 bp, probe
tgtttactttgcatttaccgtgagc

SEQ ID NO: 267807 - DNA, 25 bp, probe
tgattttgtttgatttccctctgca

SEQ ID NO: 267808 - DNA, 25 bp, probe
tgtaattccgtgatggaccctctca

SEQ ID NO: 267809 - DNA, 25 bp, probe
tgttttgccgagaggtgtccattct

SEQ ID NO: 267810 - DNA, 25 bp, probe
tgtacctgccggagagtgtcagaac

SEQ ID NO: 267811 - DNA, 25 bp, probe
tgtacctccataaaacagtagcaca

SEQ ID NO: 267812 - DNA, 25 bp, probe
tgtaccttctgacccatcagttgaa

SEQ ID NO: 267813 - DNA, 25 bp, probe
tgtaccttctgacccatcagttgaa

SEQ ID NO: 267814 - DNA, 25 bp, probe
tgtagccatcttttcccatgtaata

SEQ ID NO: 267815 - DNA, 25 bp, probe
tgtagcatcacaaactcgaaccaaa

SEQ ID NO: 267816 - DNA, 25 bp, probe
tgtcactcctgagatctgcaaacag

SEQ ID NO: 267817 - DNA, 25 bp, probe
tgtcttcctgagccatggcgaaggc

SEQ ID NO: 267818 - DNA, 25 bp, probe
tgtctacctggccagtggagtggtc

SEQ ID NO: 267819 - DNA, 25 bp, probe
tgtcatcaccatgacgacggtggac

SEQ ID NO: 267820 - DNA, 25 bp, probe
tgtcatcaccatgacgacggtggac

SEQ ID NO: 267821 - DNA, 25 bp, probe
tgtctcaccatttggtggagtatca

SEQ ID NO: 267822 - DNA, 25 bp, probe
tgtctactattttgccagtgactag

SEQ ID NO: 267823 - DNA, 25 bp, probe
tgtcaggttattcacatggagctgg

SEQ ID NO: 267824 - DNA, 25 bp, probe
tgtcaaggtttggcagattactgga

SEQ ID NO: 267825 - DNA, 25 bp, probe
tgtcaactgctgcctggatgttttc

SEQ ID NO: 267826 - DNA, 25 bp, probe
tgtctcctgatgcctgagcagaggt

SEQ ID NO: 267827 - DNA, 25 bp, probe
tgtatgtgtgagccagggatggatt

SEQ ID NO: 267828 - DNA, 25 bp, probe
tgtcatgtcagcggagctagaggat

SEQ ID NO: 267829 - DNA, 25 bp, probe
tgtcatgtcagcggagctagaggat

SEQ ID NO: 267830 - DNA, 25 bp, probe
tgtcatgccactggatgggatgtgg

SEQ ID NO: 267831 - DNA, 25 bp, probe
tgtcatgctggggtgctggcagagg

SEQ ID NO: 267832 - DNA, 25 bp, probe
tgtcatcttggcatcagcaggaggc

SEQ ID NO: 267833 - DNA, 25 bp, probe
tgtcatcttggcatcagcaggaggc

SEQ ID NO: 267834 - DNA, 25 bp, probe
tgtagttagcgttcaggcaggtgac

SEQ ID NO: 267835 - DNA, 25 bp, probe
tgtaattacctgtcatctgggccac

SEQ ID NO: 267836 - DNA, 25 bp, probe
tgtaattaactgtcaagcctgtgga

SEQ ID NO: 267837 - DNA, 25 bp, probe
tgtacaaagtcagccgcctggagac

SEQ ID NO: 267838 - DNA, 25 bp, probe
tgttactaggcagggcccatggtcc

SEQ ID NO: 267839 - DNA, 25 bp, probe
tgttaacaactcagccatctggcac

SEQ ID NO: 267840 - DNA, 25 bp, probe
tgttcaacaacgtggccatagcagc

SEQ ID NO: 267841 - DNA, 25 bp, probe
tgtcacaacaataacctccatagca

SEQ ID NO: 267842 - DNA, 25 bp, probe
tgtcaaggccatgatcctgctcaat

SEQ ID NO: 267843 - DNA, 25 bp, probe
tgtcaagtgcgagccacaggaaaaa

SEQ ID NO: 267844 - DNA, 25 bp, probe
tgtcatgcagtctgaaaagggaaga

SEQ ID NO: 267845 - DNA, 25 bp, probe
tgtcacgtattgccaagagcttgaa

SEQ ID NO: 267846 - DNA, 25 bp, probe
tgtcatttatacgaaagctgagaaa

SEQ ID NO: 267847 - DNA, 25 bp, probe
tgtttatcgagccaaatggatatca

SEQ ID NO: 267848 - DNA, 25 bp, probe
tgtactatcctgtaaatatatctta

SEQ ID NO: 267849 - DNA, 25 bp, probe
tgtacttcgcttaagtttctaactt

SEQ ID NO: 267850 - DNA, 25 bp, probe
tgtcacctccctattattaaatgtt

SEQ ID NO: 267851 - DNA, 25 bp, probe
tgtattccccctattgctgaaatgt

SEQ ID NO: 267852 - DNA, 25 bp, probe
tgtttccttgccttgttgatgtgga

SEQ ID NO: 267853 - DNA, 25 bp, probe
tgtttcacttaatgtatttgacagt

SEQ ID NO: 267854 - DNA, 25 bp, probe
tgtttcctcaggagtcttctgacag

SEQ ID NO: 267855 - DNA, 25 bp, probe
tgtattttaagtatttagacagttc

SEQ ID NO: 267856 - DNA, 25 bp, probe
tgtatcctttagaattttaacctat

SEQ ID NO: 267857 - DNA, 25 bp, probe
tgtacaaactagaattttaatataa

SEQ ID NO: 267858 - DNA, 25 bp, probe
tgtaacaacattatctgaccaatag

SEQ ID NO: 267859 - DNA, 25 bp, probe
tgtaacatgagcttattgagaccat

SEQ ID NO: 267860 - DNA, 25 bp, probe
tgtagcatcaactagaataatctac

SEQ ID NO: 267861 - DNA, 25 bp, probe
tgtagttgaattcatcaatctttta

SEQ ID NO: 267862 - DNA, 25 bp, probe
tgtcattatgttactgtctttttta

SEQ ID NO: 267863 - DNA, 25 bp, probe
tgtcattcagttactcttaattctt

SEQ ID NO: 267864 - DNA, 25 bp, probe
tgttatgagttccctaatatattct

SEQ ID NO: 267865 - DNA, 25 bp, probe
tttgaagttccagaaattgtgccat

SEQ ID NO: 267866 - DNA, 25 bp, probe
tttaactgtccagaactttcctcca

SEQ ID NO: 267867 - DNA, 25 bp, probe
tgttatactaccagaaggctttaaa

SEQ ID NO: 267868 - DNA, 25 bp, probe
tgttatttaaattactggattctaa

SEQ ID NO: 267869 - DNA, 25 bp, probe
tgtaatgtagctttccactggagtc

SEQ ID NO: 267870 - DNA, 25 bp, probe
tgtaggaagagttctcctgaggctg

SEQ ID NO: 267871 - DNA, 25 bp, probe
tgtagagaagcttttgccgctgtct

SEQ ID NO: 267872 - DNA, 25 bp, probe
ttattgaatgtgtggggtttcccct

SEQ ID NO: 267873 - DNA, 25 bp, probe
tgtttgaatatgtggggaggttgtc

SEQ ID NO: 267874 - DNA, 25 bp, probe
tgtttgaatatgtggggaggttgtc

SEQ ID NO: 267875 - DNA, 25 bp, probe
tgtttagactgaaggaagacgtttt

SEQ ID NO: 267876 - DNA, 25 bp, probe
tgtttctgtctggggaaggcaagtt

SEQ ID NO: 267877 - DNA, 25 bp, probe
tgatctaaccgatgtgaatgccata

SEQ ID NO: 267878 - DNA, 25 bp, probe
tgatatcaaagtcagtaagccaaga

SEQ ID NO: 267879 - DNA, 25 bp, probe
tgtacgcactgtcagttacaccaat

SEQ ID NO: 267880 - DNA, 25 bp, probe
tgtacttctgttagttcaccaaaaa

SEQ ID NO: 267881 - DNA, 25 bp, probe
tgtcatctttcttgtttcatcgtaa

SEQ ID NO: 267882 - DNA, 25 bp, probe
tgtattactccttagccatggctaa

SEQ ID NO: 267883 - DNA, 25 bp, probe
tgtatttccacctagccttgtaaaa

SEQ ID NO: 267884 - DNA, 25 bp, probe
tgtattttcaccaagccttttcata

SEQ ID NO: 267885 - DNA, 25 bp, probe
tgtattagtcccaagccacagaagc

SEQ ID NO: 267886 - DNA, 25 bp, probe
tgtactgtgccccagaggttggagc

SEQ ID NO: 267887 - DNA, 25 bp, probe
tgtacctgtccaagcagcgttggga

SEQ ID NO: 267888 - DNA, 25 bp, probe
tgtagaattgaaaatgcattaggga

SEQ ID NO: 267889 - DNA, 25 bp, probe
tgtaaatattctacacatgtaaaat

SEQ ID NO: 267890 - DNA, 25 bp, probe
tgtaccatgttgttacatgtaaaca

SEQ ID NO: 267891 - DNA, 25 bp, probe
tgttccttttgctctgatagacaaa

SEQ ID NO: 267892 - DNA, 25 bp, probe
tgtatcctgttttgactaagtctta

SEQ ID NO: 267893 - DNA, 25 bp, probe
tgtactgtttcttattaactttact

SEQ ID NO: 267894 - DNA, 25 bp, probe
tgtttgacttcgtattgacccttat

SEQ ID NO: 267895 - DNA, 25 bp, probe
tgtttactgggtataccatatgtat

SEQ ID NO: 267896 - DNA, 25 bp, probe
tcgtgtacggccactgaccaagaat

SEQ ID NO: 267897 - DNA, 25 bp, probe
tccgttcagggtctagccaaaatca

SEQ ID NO: 267898 - DNA, 25 bp, probe
tgtctgaaccgttgcttgtggattt

SEQ ID NO: 267899 - DNA, 25 bp, probe
tctacccaagttggccccaactgag

SEQ ID NO: 267900 - DNA, 25 bp, probe
tctacccaagttggccccaactgag

SEQ ID NO: 267901 - DNA, 25 bp, probe
tgtaccacaagcacctgggcaacga

SEQ ID NO: 267902 - DNA, 25 bp, probe
tgtcatacacccacctggtggatcc

SEQ ID NO: 267903 - DNA, 25 bp, probe
tgtcatacacccacctggtggatcc

SEQ ID NO: 267904 - DNA, 25 bp, probe
tgtcttcctcacagggtggagatca

SEQ ID NO: 267905 - DNA, 25 bp, probe
tgtatatgctctgaagtggggtata

SEQ ID NO: 267906 - DNA, 25 bp, probe
tgtaatgatcattatcgaagtgtgt

SEQ ID NO: 267907 - DNA, 25 bp, probe
tgtagatacagatccgcatgtgtct

SEQ ID NO: 267908 - DNA, 25 bp, probe
tgtagatacagatccgcatgtgtct

SEQ ID NO: 267909 - DNA, 25 bp, probe
tgtacagtcaggtctgctctggtct

SEQ ID NO: 267910 - DNA, 25 bp, probe
tgtaatgaaggcttgtcttcctcac

SEQ ID NO: 267911 - DNA, 25 bp, probe
tgtatgttgcagatcattttccccc

SEQ ID NO: 267912 - DNA, 25 bp, probe
tgtatgttgcagatcattttccccc

SEQ ID NO: 267913 - DNA, 25 bp, probe
tgtattataaaatttttccgctctt

SEQ ID NO: 267914 - DNA, 25 bp, probe
tgtaaaaacgattttcttctgtaga

SEQ ID NO: 267915 - DNA, 25 bp, probe
tgtaaaaacatcatttccctgatgg

SEQ ID NO: 267916 - DNA, 25 bp, probe
tgataaagtcaaatccctcctctgt

SEQ ID NO: 267917 - DNA, 25 bp, probe
tgtacaaatctttcatccatacctg

SEQ ID NO: 267918 - DNA, 25 bp, probe
tgtacaaatttttctcttacttgga

SEQ ID NO: 267919 - DNA, 25 bp, probe
tgtactacactttatccattattct

SEQ ID NO: 267920 - DNA, 25 bp, probe
tgtaataggaattgattcattctct

SEQ ID NO: 267921 - DNA, 25 bp, probe
tgtagtaacgattttcagtgctcca

SEQ ID NO: 267922 - DNA, 25 bp, probe
tgtagttaactggttcctgctcaca

SEQ ID NO: 267923 - DNA, 25 bp, probe
tgtactgtaaatatttttcacataa

SEQ ID NO: 267924 - DNA, 25 bp, probe
tgtactgtatagacagtttgtaaat

SEQ ID NO: 267925 - DNA, 25 bp, probe
tgtcactctagaagagttcttcaca

SEQ ID NO: 267926 - DNA, 25 bp, probe
tgtcattctgtgttaaatcatttca

SEQ ID NO: 267927 - DNA, 25 bp, probe
tgttttggattaaccggctgcagag

SEQ ID NO: 267928 - DNA, 25 bp, probe
tgtttgtgttcaaagcacggcgagg

SEQ ID NO: 267929 - DNA, 25 bp, probe
tgtaggtttaattgcaggtgccagt

SEQ ID NO: 267930 - DNA, 25 bp, probe
tgtaggctttaacgtgggcagcacg

SEQ ID NO: 267931 - DNA, 25 bp, probe
tgtaggctttaacgtgggcagcacg

SEQ ID NO: 267932 - DNA, 25 bp, probe
tgtcaccatttcaaagggcccacag

SEQ ID NO: 267933 - DNA, 25 bp, probe
tgttccagttcacaggcagcaaacc

SEQ ID NO: 267934 - DNA, 25 bp, probe
tgttccagttcacaggcagcaaacc

SEQ ID NO: 267935 - DNA, 25 bp, probe
tgttcctgcttctctaggcaaggtc

SEQ ID NO: 267936 - DNA, 25 bp, probe
tgttcctgtctcagcaaccaaggga

SEQ ID NO: 267937 - DNA, 25 bp, probe
tgttccgactggagacggggagccc

SEQ ID NO: 267938 - DNA, 25 bp, probe
tgttcttcagcatccgacgggaaca

SEQ ID NO: 267939 - DNA, 25 bp, probe
tgtcatttcatcgcggactgtgcgg

SEQ ID NO: 267940 - DNA, 25 bp, probe
tgtcatggcaactgatggactctgg

SEQ ID NO: 267941 - DNA, 25 bp, probe
tgtcaataacatggtgcgagcacag

SEQ ID NO: 267942 - DNA, 25 bp, probe
tgtcaaaatatccggagacgccagc

SEQ ID NO: 267943 - DNA, 25 bp, probe
tgtcagagcgattcctggaaccctg

SEQ ID NO: 267944 - DNA, 25 bp, probe
tgtcatgcaggcttccaggaacata

SEQ ID NO: 267945 - DNA, 25 bp, probe
tgtcacagccctgattgaatcagtg

SEQ ID NO: 267946 - DNA, 25 bp, probe
tgtagatgcagtatatggaatcagg

SEQ ID NO: 267947 - DNA, 25 bp, probe
tgtaagatgacagatgatgctgtca

SEQ ID NO: 267948 - DNA, 25 bp, probe
tgtataagagatgtcatgcctcaag

SEQ ID NO: 267949 - DNA, 25 bp, probe
tgtataagagatgtcatgcctcaag

SEQ ID NO: 267950 - DNA, 25 bp, probe
tgtatgtgacgtggttcttctggtt

SEQ ID NO: 267951 - DNA, 25 bp, probe
tgtatggacctgcagtcgactggtg

SEQ ID NO: 267952 - DNA, 25 bp, probe
tgtatggacctgcagtcgactggtg

SEQ ID NO: 267953 - DNA, 25 bp, probe
tgtattgatcaaaacccactgggaa

SEQ ID NO: 267954 - DNA, 25 bp, probe
tgttctacaaacatactcgcaggaa

SEQ ID NO: 267955 - DNA, 25 bp, probe
tgttcttgaaaaacctcaggtcata

SEQ ID NO: 267956 - DNA, 25 bp, probe
tgttcttgaaaaacctcaggtcata

SEQ ID NO: 267957 - DNA, 25 bp, probe
tgttttggaatttaccggctgagag

SEQ ID NO: 267958 - DNA, 25 bp, probe
tgttcgtgagaactgcaaaccgctg

SEQ ID NO: 267959 - DNA, 25 bp, probe
tgtcatggaggtgctgaacacaggg

SEQ ID NO: 267960 - DNA, 25 bp, probe
tgtcatggtggtgggcacagcctgg

SEQ ID NO: 267961 - DNA, 25 bp, probe
tgtagagagggcgccacactggccc

SEQ ID NO: 267962 - DNA, 25 bp, probe
tgtagaatgcttggcactccctaac

SEQ ID NO: 267963 - DNA, 25 bp, probe
tgtagttgcgtggactctgcacatg

SEQ ID NO: 267964 - DNA, 25 bp, probe
tgtattatgctgctcactgatcctt

SEQ ID NO: 267965 - DNA, 25 bp, probe
tgtattatgctgctcactgatcctt

SEQ ID NO: 267966 - DNA, 25 bp, probe
tgtactgagggtactggcctagcca

SEQ ID NO: 267967 - DNA, 25 bp, probe
tgtagcgaaggcactgggtgcacgg

SEQ ID NO: 267968 - DNA, 25 bp, probe
tgtactgagaggggtcaggctgctc

SEQ ID NO: 267969 - DNA, 25 bp, probe
tgtacatgatcatgcgggagtgctg

SEQ ID NO: 267970 - DNA, 25 bp, probe
tgtaaactatgactgctgagtgata

SEQ ID NO: 267971 - DNA, 25 bp, probe
tgtaaatgtacatgtgcagatattc

SEQ ID NO: 267972 - DNA, 25 bp, probe
tgtaacatttaacggatcatatctc

SEQ ID NO: 267973 - DNA, 25 bp, probe
tgttaaattaagcagaagatccaaa

SEQ ID NO: 267974 - DNA, 25 bp, probe
tgttcgacttcagcgagaagctcaa

SEQ ID NO: 267975 - DNA, 25 bp, probe
tgttggcagaactcaagggcaaaga

SEQ ID NO: 267976 - DNA, 25 bp, probe
tgaggtaagcgcagaagggcaaaaa

SEQ ID NO: 267977 - DNA, 25 bp, probe
tgaggtaagcgcagaagggcaaaaa

SEQ ID NO: 267978 - DNA, 25 bp, probe
tgaggaactccaaaagggcttcaat

SEQ ID NO: 267979 - DNA, 25 bp, probe
tgaagaactcctggggggcccaatg

SEQ ID NO: 267980 - DNA, 25 bp, probe
tgacctacttgctggggtacagttg

SEQ ID NO: 267981 - DNA, 25 bp, probe
tgcaccatggttccggggttggttc

SEQ ID NO: 267982 - DNA, 25 bp, probe
tgcccgtggcttcggggactggatt

SEQ ID NO: 267983 - DNA, 25 bp, probe
tgcccgtggcttcggggactggatt

SEQ ID NO: 267984 - DNA, 25 bp, probe
tgtacgggcctgcagtagactggtg

SEQ ID NO: 267985 - DNA, 25 bp, probe
tgtactggtttgcatgtacccaccc

SEQ ID NO: 267986 - DNA, 25 bp, probe
tgtactggtttgcatgtacccaccc

SEQ ID NO: 267987 - DNA, 25 bp, probe
tgtactgtgtttgagatggctacag

SEQ ID NO: 267988 - DNA, 25 bp, probe
tgtactgtttttaatgttcacattt

SEQ ID NO: 267989 - DNA, 25 bp, probe
tgtactgtttttaatgttcacattt

SEQ ID NO: 267990 - DNA, 25 bp, probe
tgtttactatatagaatttcctgta

SEQ ID NO: 267991 - DNA, 25 bp, probe
tgtttattcctaaattccctggtag

SEQ ID NO: 267992 - DNA, 25 bp, probe
tgtttattcctaaattccctggtag

SEQ ID NO: 267993 - DNA, 25 bp, probe
tgtttttttcacaatctcagccagc

SEQ ID NO: 267994 - DNA, 25 bp, probe
tgtatctttctgggtatccacacct

SEQ ID NO: 267995 - DNA, 25 bp, probe
tgtagtttctcaagtgaacactctc

SEQ ID NO: 267996 - DNA, 25 bp, probe
tgtagtttctcaagtgaacactctc

SEQ ID NO: 267997 - DNA, 25 bp, probe
tgtaacctgtacaacaacctcacca

SEQ ID NO: 267998 - DNA, 25 bp, probe
tgtaaatctgtcgtaaactctccac

SEQ ID NO: 267999 - DNA, 25 bp, probe
tgtaaatctgtcgtaaactctccac

SEQ ID NO: 268000 - DNA, 25 bp, probe
tgtacagcagttctacgacctgctc

SEQ ID NO: 268001 - DNA, 25 bp, probe
tgttcagcattcactaaccctgttt

SEQ ID NO: 268002 - DNA, 25 bp, probe
tgttattgacccaaaggccatcttt

SEQ ID NO: 268003 - DNA, 25 bp, probe
tgttttacaaagcggatcactgtgt

SEQ ID NO: 268004 - DNA, 25 bp, probe
tgttttacaaagcggatcactgtgt

SEQ ID NO: 268005 - DNA, 25 bp, probe
tgttgctaatgacaccggctttgtg

SEQ ID NO: 268006 - DNA, 25 bp, probe
tgttctcaaattccccagcttggga

SEQ ID NO: 268007 - DNA, 25 bp, probe
tgttgtcaaggtctccgccttgtaa

SEQ ID NO: 268008 - DNA, 25 bp, probe
tgatttaatgtacactcccttttgc

SEQ ID NO: 268009 - DNA, 25 bp, probe
tgatttaatgtacactcccttttgc

SEQ ID NO: 268010 - DNA, 25 bp, probe
tgtttcatttgccaccatccgtttt

SEQ ID NO: 268011 - DNA, 25 bp, probe
tgttaatactgtaacatacttttta

SEQ ID NO: 268012 - DNA, 25 bp, probe
tgtaaagcagtgttttagcttttct

SEQ ID NO: 268013 - DNA, 25 bp, probe
tgtatccacctggttttgttctttc

SEQ ID NO: 268014 - DNA, 25 bp, probe
tgtatccacctggttttgttctttc

SEQ ID NO: 268015 - DNA, 25 bp, probe
tgtataacctgcataactttttgtc

SEQ ID NO: 268016 - DNA, 25 bp, probe
tgttaattcctggaactgtattttg

SEQ ID NO: 268017 - DNA, 25 bp, probe
tgtttcagtcacagaaagcttttct

SEQ ID NO: 268018 - DNA, 25 bp, probe
ttttagtcaatagaccctctcctta

SEQ ID NO: 268019 - DNA, 25 bp, probe
ttttaagtatagcttcctcccttga

SEQ ID NO: 268020 - DNA, 25 bp, probe
tgtttaggatttcttcacccttttg

SEQ ID NO: 268021 - DNA, 25 bp, probe
tgttttatttctctaacctatttat

SEQ ID NO: 268022 - DNA, 25 bp, probe
tgttttcttttcataatccacttac

SEQ ID NO: 268023 - DNA, 25 bp, probe
tgttatgttctgttattgacccaaa

SEQ ID NO: 268024 - DNA, 25 bp, probe
tgttttattagttcattgcctgcac

SEQ ID NO: 268025 - DNA, 25 bp, probe
tgttttattagttcattgcctgcac

SEQ ID NO: 268026 - DNA, 25 bp, probe
tgtaccgcattacattatgcctgtg

SEQ ID NO: 268027 - DNA, 25 bp, probe
tgtacgccaacacagtgctgtctgg

SEQ ID NO: 268028 - DNA, 25 bp, probe
tgtacccagtgcaggtcagctctgc

SEQ ID NO: 268029 - DNA, 25 bp, probe
tgtacttggtcacggtggcaggcaa

SEQ ID NO: 268030 - DNA, 25 bp, probe
tgtatttggcaactgtgggcaataa

SEQ ID NO: 268031 - DNA, 25 bp, probe
tgtatttgtacactatctggcacat

SEQ ID NO: 268032 - DNA, 25 bp, probe
tgttttgctactcttgtcagacaat

SEQ ID NO: 268033 - DNA, 25 bp, probe
tgttttgtcactctagaagagttct

SEQ ID NO: 268034 - DNA, 25 bp, probe
tgtttttcacatttgcgaatggttc

SEQ ID NO: 268035 - DNA, 25 bp, probe
tgtttttccttgagactgtcttgtc

SEQ ID NO: 268036 - DNA, 25 bp, probe
tgttttctccttttgttgggtgtct

SEQ ID NO: 268037 - DNA, 25 bp, probe
tgttttcttctgcattttagtggtt

SEQ ID NO: 268038 - DNA, 25 bp, probe
tgttttcttctgcattttagtggtt

SEQ ID NO: 268039 - DNA, 25 bp, probe
tgtaattcttctcctttgtcaaatg

SEQ ID NO: 268040 - DNA, 25 bp, probe
tgtaattcttctcctttgtcaaatg

SEQ ID NO: 268041 - DNA, 25 bp, probe
tgtaatcgtttgcttgttcagggaa

SEQ ID NO: 268042 - DNA, 25 bp, probe
tgtaagagttctgtcatgcagtctg

SEQ ID NO: 268043 - DNA, 25 bp, probe
tgtaaatttctgcatctcacacgac

SEQ ID NO: 268044 - DNA, 25 bp, probe
tgtcaaaccctgaagtgatccgagc

SEQ ID NO: 268045 - DNA, 25 bp, probe
tgttgaacccagagctgattcggcc

SEQ ID NO: 268046 - DNA, 25 bp, probe
tgttgaacccagagctgattcggcc

SEQ ID NO: 268047 - DNA, 25 bp, probe
tgttgaacccagagctgattcggcc

SEQ ID NO: 268048 - DNA, 25 bp, probe
tgttgaacccagagctgattcggcc

SEQ ID NO: 268049 - DNA, 25 bp, probe
tgttgaacccagagctgattcggcc

SEQ ID NO: 268050 - DNA, 25 bp, probe
tgtatgaacccatagtcaccaccac

SEQ ID NO: 268051 - DNA, 25 bp, probe
tgtaaatgtgccacgagctccaaca

SEQ ID NO: 268052 - DNA, 25 bp, probe
tgtaaggctaattcacgtgccatac

SEQ ID NO: 268053 - DNA, 25 bp, probe
tgtaagcctgaatcgcagcccaaac

SEQ ID NO: 268054 - DNA, 25 bp, probe
tccaaaatgatatccaacccaacca

SEQ ID NO: 268055 - DNA, 25 bp, probe
tccgggcagaaacaataaaaccact

SEQ ID NO: 268056 - DNA, 25 bp, probe
tccagtgggaaacaaaactaaagag

SEQ ID NO: 268057 - DNA, 25 bp, probe
tcctgggaacgagaactactgatag

SEQ ID NO: 268058 - DNA, 25 bp, probe
tccaggtgaacttctacggggacca

SEQ ID NO: 268059 - DNA, 25 bp, probe
tccatttccccgcagcggggatccc

SEQ ID NO: 268060 - DNA, 25 bp, probe
taattacggctgccaagggggtctc

SEQ ID NO: 268061 - DNA, 25 bp, probe
tagtaatagggcccgtgcggggccg

SEQ ID NO: 268062 - DNA, 25 bp, probe
tgtttcataaaccctggcactggtc

SEQ ID NO: 268063 - DNA, 25 bp, probe
tgtttccagaacagtgccttggtca

SEQ ID NO: 268064 - DNA, 25 bp, probe
tgtttctccaccaagggcttgggcc

SEQ ID NO: 268065 - DNA, 25 bp, probe
tgatcgtgtccatggtggtgctgtg

SEQ ID NO: 268066 - DNA, 25 bp, probe
tgatcgtgtccatggtggtgctgtg

SEQ ID NO: 268067 - DNA, 25 bp, probe
tgtagatgtgcgtgcagtctggcag

SEQ ID NO: 268068 - DNA, 25 bp, probe
tgtacatgtgtgtgcccaggggtga

SEQ ID NO: 268069 - DNA, 25 bp, probe
tgtatatggtgtgaggtgggaggac

SEQ ID NO: 268070 - DNA, 25 bp, probe
tgtatggtttggaagctgcggagga

SEQ ID NO: 268071 - DNA, 25 bp, probe
tgtatggtttggaagctgcggagga

SEQ ID NO: 268072 - DNA, 25 bp, probe
tgtacggcttgtacctggagggggc

SEQ ID NO: 268073 - DNA, 25 bp, probe
tgtaacagcgtggcccaaaggggtc

SEQ ID NO: 268074 - DNA, 25 bp, probe
tgtaacagcgtggcccaaaggggtc

SEQ ID NO: 268075 - DNA, 25 bp, probe
tgtacacagcgaaccacaggatggg

SEQ ID NO: 268076 - DNA, 25 bp, probe
tgtacaactgttggaccggggagcc

SEQ ID NO: 268077 - DNA, 25 bp, probe
tgtactccagagggacgggtggacc

SEQ ID NO: 268078 - DNA, 25 bp, probe
tgtacacacaagaaggtgggctggg

SEQ ID NO: 268079 - DNA, 25 bp, probe
tgtacacaacggcgctggtggagga

SEQ ID NO: 268080 - DNA, 25 bp, probe
tgtttccctatgtgtgtgtggaggg

SEQ ID NO: 268081 - DNA, 25 bp, probe
tgtttacctgagttggctgaaatgg

SEQ ID NO: 268082 - DNA, 25 bp, probe
tgtttataacagtgccttaaggtat

SEQ ID NO: 268083 - DNA, 25 bp, probe
tgtttgtgaacagaagttaaggcca

SEQ ID NO: 268084 - DNA, 25 bp, probe
tgtttgtgaacagaagttaaggcca

SEQ ID NO: 268085 - DNA, 25 bp, probe
tgtttgtcgtgaaaagcttaatggg

SEQ ID NO: 268086 - DNA, 25 bp, probe
tgtattgtttgagcaacttggatgc

SEQ ID NO: 268087 - DNA, 25 bp, probe
tgtattattatagctacctgttaaa

SEQ ID NO: 268088 - DNA, 25 bp, probe
tgcttgctttgaacctaccagttaa

SEQ ID NO: 268089 - DNA, 25 bp, probe
tgttctttgtcacaaccagcaacaa

SEQ ID NO: 268090 - DNA, 25 bp, probe
tgttctttgtcacaaccagcaacaa

SEQ ID NO: 268091 - DNA, 25 bp, probe
cattaaacaaaccccagatcaactg

SEQ ID NO: 268092 - DNA, 25 bp, probe
tgttttcagctaaagcccaacctcc

SEQ ID NO: 268093 - DNA, 25 bp, probe
tgttttcagctaaagcccaacctcc

SEQ ID NO: 268094 - DNA, 25 bp, probe
tgcttttggtacatgccctgaatcc

SEQ ID NO: 268095 - DNA, 25 bp, probe
tgttgggcaaactgcccgagctgcg

SEQ ID NO: 268096 - DNA, 25 bp, probe
tgtataggaaatttgccctgaccct

SEQ ID NO: 268097 - DNA, 25 bp, probe
tgtacaggacaatgaccctatcccc

SEQ ID NO: 268098 - DNA, 25 bp, probe
tgtacaggacaatgaccctatcccc

SEQ ID NO: 268099 - DNA, 25 bp, probe
tgtacggtggatggcaccggagtcc

SEQ ID NO: 268100 - DNA, 25 bp, probe
tgtacacctaatcactggagattca

SEQ ID NO: 268101 - DNA, 25 bp, probe
tgtactcctcaagcactggaacacg

SEQ ID NO: 268102 - DNA, 25 bp, probe
tgtattgcccgatgcaatgagaaaa

SEQ ID NO: 268103 - DNA, 25 bp, probe
tgtttgtacggaccataaatataac

SEQ ID NO: 268104 - DNA, 25 bp, probe
tgtatcttactgccccgaaatgaga

SEQ ID NO: 268105 - DNA, 25 bp, probe
tgttcttggcccatcatgacattgg

SEQ ID NO: 268106 - DNA, 25 bp, probe
tgttcttggcccatcatgacattgg

SEQ ID NO: 268107 - DNA, 25 bp, probe
tgtttaggcccaagtgaccttttag

SEQ ID NO: 268108 - DNA, 25 bp, probe
tgtttaggcaccagatgaaattttg

SEQ ID NO: 268109 - DNA, 25 bp, probe
tgtttaggcaccagatgaaattttg

SEQ ID NO: 268110 - DNA, 25 bp, probe
tgttgccccactaaggaatcacttt

SEQ ID NO: 268111 - DNA, 25 bp, probe
tgttctaacctcagtaatgcatcta

SEQ ID NO: 268112 - DNA, 25 bp, probe
tgtactagtactgtgtactgtatag

SEQ ID NO: 268113 - DNA, 25 bp, probe
tgttttatactgtttactgaaagaa

SEQ ID NO: 268114 - DNA, 25 bp, probe
tgttttttgctgttggcagtttaaa

SEQ ID NO: 268115 - DNA, 25 bp, probe
tgttttgtttcgttctgggtcataa

SEQ ID NO: 268116 - DNA, 25 bp, probe
tgttattgtctagaattttgttata

SEQ ID NO: 268117 - DNA, 25 bp, probe
tgtttcattttggtttttgtttctg

SEQ ID NO: 268118 - DNA, 25 bp, probe
tgttcccatgtaactcgtttgtttt

SEQ ID NO: 268119 - DNA, 25 bp, probe
tgatacgaattcaatttgttttcct

SEQ ID NO: 268120 - DNA, 25 bp, probe
tgtaggtttcttatcactttctctt

SEQ ID NO: 268121 - DNA, 25 bp, probe
tgtaattttgcgtcttttttcattt

SEQ ID NO: 268122 - DNA, 25 bp, probe
tgtaaatactgccctagtgtctcca

SEQ ID NO: 268123 - DNA, 25 bp, probe
tgtaaatcagctgtgtggtgcccgc

SEQ ID NO: 268124 - DNA, 25 bp, probe
tgtaacatcactatccgatgcacca

SEQ ID NO: 268125 - DNA, 25 bp, probe
tgtacatcacgcttagccaggcatc

SEQ ID NO: 268126 - DNA, 25 bp, probe
tgtacatatctgccaatgccggaga

SEQ ID NO: 268127 - DNA, 25 bp, probe
tgtacatatctgccaatgccggaga

SEQ ID NO: 268128 - DNA, 25 bp, probe
tgtactattgaccatcctgaagaca

SEQ ID NO: 268129 - DNA, 25 bp, probe
tgatatctcggatacaatagaggca

SEQ ID NO: 268130 - DNA, 25 bp, probe
tgtacatcttcatggagtactgcga

SEQ ID NO: 268131 - DNA, 25 bp, probe
tgtacatcttcatggagtactgcga

SEQ ID NO: 268132 - DNA, 25 bp, probe
tgtttgactacagtgagtactggga

SEQ ID NO: 268133 - DNA, 25 bp, probe
tgttccttaccttgaagctgtggaa

SEQ ID NO: 268134 - DNA, 25 bp, probe
tgttctgtgtacataaagtcatcaa

SEQ ID NO: 268135 - DNA, 25 bp, probe
tgtttgtgtatacacggccacaccc

SEQ ID NO: 268136 - DNA, 25 bp, probe
tgtttgtgtgttctatgggaccctc

SEQ ID NO: 268137 - DNA, 25 bp, probe
tgtttgtgtgttctatgggaccctc

SEQ ID NO: 268138 - DNA, 25 bp, probe
tgtttttgtttatgtcgatgccctg

SEQ ID NO: 268139 - DNA, 25 bp, probe
tgtttgattttgtttgatttccctc

SEQ ID NO: 268140 - DNA, 25 bp, probe
tgtaatgtagttctttgttcctgct

SEQ ID NO: 268141 - DNA, 25 bp, probe
tgtacaaatttgttattttccattt

SEQ ID NO: 268142 - DNA, 25 bp, probe
tgtaaagttatctgcttttcatatt

SEQ ID NO: 268143 - DNA, 25 bp, probe
tgtaagcagcttagtaattgtgtct

SEQ ID NO: 268144 - DNA, 25 bp, probe
tgtaacagcattcagaatctgccca

SEQ ID NO: 268145 - DNA, 25 bp, probe
tgtaaatgcactaagatatctcaat

SEQ ID NO: 268146 - DNA, 25 bp, probe
tgtataatacttagatcctccttat

SEQ ID NO: 268147 - DNA, 25 bp, probe
tgtatgataacaacagcagcaccct

SEQ ID NO: 268148 - DNA, 25 bp, probe
tgtattcaacagaaggactgtggtc

SEQ ID NO: 268149 - DNA, 25 bp, probe
tgatttccccatcgagactgtggtg

SEQ ID NO: 268150 - DNA, 25 bp, probe
tgtttcctgcccacagatgatgagg

SEQ ID NO: 268151 - DNA, 25 bp, probe
tgtttgctcagtgcaaggtggagaa

SEQ ID NO: 268152 - DNA, 25 bp, probe
tgtatttgcagtgaaggtggtgccc

SEQ ID NO: 268153 - DNA, 25 bp, probe
tgtattacgattcgcacgatgagtg

SEQ ID NO: 268154 - DNA, 25 bp, probe
tgtacacatggataccgctcaaaag

SEQ ID NO: 268155 - DNA, 25 bp, probe
tgttcctgatgataacccagtagca

SEQ ID NO: 268156 - DNA, 25 bp, probe
tgtatgcctgcaaaaagctacaaaa

SEQ ID NO: 268157 - DNA, 25 bp, probe
tgtacctaagctcagtatgcaaaag

SEQ ID NO: 268158 - DNA, 25 bp, probe
tgtacctaagtggatatagataact

SEQ ID NO: 268159 - DNA, 25 bp, probe
tgtatgcctatatgtgtattgtata

SEQ ID NO: 268160 - DNA, 25 bp, probe
tgtacctcatactcatcatgtgtaa

SEQ ID NO: 268161 - DNA, 25 bp, probe
tgtacaccgtcattcacagattcca

SEQ ID NO: 268162 - DNA, 25 bp, probe
tgtacatgccaacataaatatggcg

SEQ ID NO: 268163 - DNA, 25 bp, probe
tgtacttcatagctggagaatgggg

SEQ ID NO: 268164 - DNA, 25 bp, probe
tgtacttcatagctggagaatgggg

SEQ ID NO: 268165 - DNA, 25 bp, probe
tgtacttatcggtgaatcattgatg

SEQ ID NO: 268166 - DNA, 25 bp, probe
tgttcggtcgagtgccatttgatgc

SEQ ID NO: 268167 - DNA, 25 bp, probe
tgttcggtcgagtgccatttgatgc

SEQ ID NO: 268168 - DNA, 25 bp, probe
tgtatgccagttccaagcctaggtt

SEQ ID NO: 268169 - DNA, 25 bp, probe
tgtatgctagccatgcacatcttag

SEQ ID NO: 268170 - DNA, 25 bp, probe
tgtagatgggcttcacatctgtaaa

SEQ ID NO: 268171 - DNA, 25 bp, probe
tgtagatactgttatgcattgtcca

SEQ ID NO: 268172 - DNA, 25 bp, probe
tgtagatactgttatgcattgtcca

SEQ ID NO: 268173 - DNA, 25 bp, probe
tgtaggccatgttagcactgcaaaa

SEQ ID NO: 268174 - DNA, 25 bp, probe
tgtatggtcatggaatacgtggaag

SEQ ID NO: 268175 - DNA, 25 bp, probe
tgtacatgtgcagatattcctaaag

SEQ ID NO: 268176 - DNA, 25 bp, probe
tgtacagatactagcattgcacata

SEQ ID NO: 268177 - DNA, 25 bp, probe
tgtacagacactaattcattaaata

SEQ ID NO: 268178 - DNA, 25 bp, probe
tgtacaaccttactgcacacttaac

SEQ ID NO: 268179 - DNA, 25 bp, probe
tgtaaatagttactccagtgccaac

SEQ ID NO: 268180 - DNA, 25 bp, probe
tgtaaatagttactccagtgccaac

SEQ ID NO: 268181 - DNA, 25 bp, probe
tgtactctttaacccagatgccaag

SEQ ID NO: 268182 - DNA, 25 bp, probe
tgtacatttgggaactcagttgcat

SEQ ID NO: 268183 - DNA, 25 bp, probe
tgtatatctgaggtgtaccagtggt

SEQ ID NO: 268184 - DNA, 25 bp, probe
tgtatgcttgggattctcaatggat

SEQ ID NO: 268185 - DNA, 25 bp, probe
tgtagcctcggaagcatggccagga

SEQ ID NO: 268186 - DNA, 25 bp, probe
tgtatacctggatctgaacagagac

SEQ ID NO: 268187 - DNA, 25 bp, probe
tgtagaactggttagtcaaatggcc

SEQ ID NO: 268188 - DNA, 25 bp, probe
tgtagaagtgagtttgtaaatattc

SEQ ID NO: 268189 - DNA, 25 bp, probe
tgtagttgtatatttgtaagatgac

SEQ ID NO: 268190 - DNA, 25 bp, probe
tgtagtgtctatgttctatggaact

SEQ ID NO: 268191 - DNA, 25 bp, probe
tgtagtttatgtacttcttgatact

SEQ ID NO: 268192 - DNA, 25 bp, probe
tgattcttcttggtctactgtgaac

SEQ ID NO: 268193 - DNA, 25 bp, probe
tgttaatctatgatccagccaaacg

SEQ ID NO: 268194 - DNA, 25 bp, probe
tgtatcaacttttagcctgctcaac

SEQ ID NO: 268195 - DNA, 25 bp, probe
tgtatatacctttttgtgtcaaaag

SEQ ID NO: 268196 - DNA, 25 bp, probe
tgagaaacgtgtttagtatcaaaag

SEQ ID NO: 268197 - DNA, 25 bp, probe
tgttgtacggtgtctagaattaaag

SEQ ID NO: 268198 - DNA, 25 bp, probe
tgttgaagccgggctcagacactct

SEQ ID NO: 268199 - DNA, 25 bp, probe
tgttgaagccgggctcagacactct

SEQ ID NO: 268200 - DNA, 25 bp, probe
tgttggaaatgtgcaaccactgctt

SEQ ID NO: 268201 - DNA, 25 bp, probe
tgttggccgaggccaactcactggt

SEQ ID NO: 268202 - DNA, 25 bp, probe
tgttgctgccatttccagttatcga

SEQ ID NO: 268203 - DNA, 25 bp, probe
tgtttgcgcttgaccatgttgcact

SEQ ID NO: 268204 - DNA, 25 bp, probe
tgtttgcgcttgaccatgttgcact

SEQ ID NO: 268205 - DNA, 25 bp, probe
tgttctgggctacatttgtgctttc

SEQ ID NO: 268206 - DNA, 25 bp, probe
tgtttggcacttcattcgtggtctc

SEQ ID NO: 268207 - DNA, 25 bp, probe
tgtttggaaactgcatcgtggtctt

SEQ ID NO: 268208 - DNA, 25 bp, probe
tgtttaccagccacagctgggttta

SEQ ID NO: 268209 - DNA, 25 bp, probe
tgtttaccagccacagctgggttta

SEQ ID NO: 268210 - DNA, 25 bp, probe
tgatttcctcagtcctttaggttaa

SEQ ID NO: 268211 - DNA, 25 bp, probe
tgatttctccaagcacttaactttc

SEQ ID NO: 268212 - DNA, 25 bp, probe
tgatttctccaagcacttaactttc

SEQ ID NO: 268213 - DNA, 25 bp, probe
tgtttcaccaaccagttatactcct

SEQ ID NO: 268214 - DNA, 25 bp, probe
tgagtccatagctctaatctacccc

SEQ ID NO: 268215 - DNA, 25 bp, probe
tgagtccatagctctaatctacccc

SEQ ID NO: 268216 - DNA, 25 bp, probe
tttccaagcagtaaactacctacca

SEQ ID NO: 268217 - DNA, 25 bp, probe
tgtaccaggcagagaactgaagtac

SEQ ID NO: 268218 - DNA, 25 bp, probe
tgtacagaggctatgatgagcagta

SEQ ID NO: 268219 - DNA, 25 bp, probe
tgtacaccaatattcatagcagctt

SEQ ID NO: 268220 - DNA, 25 bp, probe
tgtaccacagtattaatcgctattg

SEQ ID NO: 268221 - DNA, 25 bp, probe
tgtactcatcaattttaagcactat

SEQ ID NO: 268222 - DNA, 25 bp, probe
tgtatctctaagttacatgacctat

SEQ ID NO: 268223 - DNA, 25 bp, probe
tgtactctataatgtgaactttccc

SEQ ID NO: 268224 - DNA, 25 bp, probe
tgttcctaatgacgtggactttagc

SEQ ID NO: 268225 - DNA, 25 bp, probe
tgaacttggctgcggcaactttggc

SEQ ID NO: 268226 - DNA, 25 bp, probe
tgatacctggagcgccaaggtcttc

SEQ ID NO: 268227 - DNA, 25 bp, probe
tgatacctggagcgccaaggtcttc

SEQ ID NO: 268228 - DNA, 25 bp, probe
tgtaggtgccaagcgccatggctta

SEQ ID NO: 268229 - DNA, 25 bp, probe
tgtaggtctcatacggtcagtcatt

SEQ ID NO: 268230 - DNA, 25 bp, probe
tgtaggtcacataggggctgctcca

SEQ ID NO: 268231 - DNA, 25 bp, probe
tgtagatgactacttgggccatcgg

SEQ ID NO: 268232 - DNA, 25 bp, probe
tgataaagctgcctctgagtgccac

SEQ ID NO: 268233 - DNA, 25 bp, probe
tgtatagatgcagccgttgcaggcg

SEQ ID NO: 268234 - DNA, 25 bp, probe
tgtatgagatgttggcaggacagcc

SEQ ID NO: 268235 - DNA, 25 bp, probe
tgttcaggttgcgggtgagctgccc

SEQ ID NO: 268236 - DNA, 25 bp, probe
tgttgcaaggcggagcggcctgagc

SEQ ID NO: 268237 - DNA, 25 bp, probe
tgttcaattcggtacgcactagcca

SEQ ID NO: 268238 - DNA, 25 bp, probe
tgtttttgaggatcagcacggccac

SEQ ID NO: 268239 - DNA, 25 bp, probe
tgtttttaatattcacactgagaca

SEQ ID NO: 268240 - DNA, 25 bp, probe
tgtttgtaaaattccctagctctct

SEQ ID NO: 268241 - DNA, 25 bp, probe
tgttggtaaacatcatctttcccat

SEQ ID NO: 268242 - DNA, 25 bp, probe
tgttggaacacctcattttatggca

SEQ ID NO: 268243 - DNA, 25 bp, probe
tgttgccacaaccctgttttatact

SEQ ID NO: 268244 - DNA, 25 bp, probe
tgttgccacaaccctgttttatact

SEQ ID NO: 268245 - DNA, 25 bp, probe
tgtttcatggaacctatgtttattt

SEQ ID NO: 268246 - DNA, 25 bp, probe
tgttatatggaatgtctgtaaattc

SEQ ID NO: 268247 - DNA, 25 bp, probe
tgttattataattgtctgttacaca

SEQ ID NO: 268248 - DNA, 25 bp, probe
tgttcttatcaatgcactgggcact

SEQ ID NO: 268249 - DNA, 25 bp, probe
tgtattctcatagcatccttggcct

SEQ ID NO: 268250 - DNA, 25 bp, probe
tgtttatgcatagataatctctcca

SEQ ID NO: 268251 - DNA, 25 bp, probe
tgtatttgcactcattatcacccca

SEQ ID NO: 268252 - DNA, 25 bp, probe
tgtatttgcactcattatcacccca

SEQ ID NO: 268253 - DNA, 25 bp, probe
tgtttgaccgagtctacactcacca

SEQ ID NO: 268254 - DNA, 25 bp, probe
tgttatagacggtgctcactcccaa

SEQ ID NO: 268255 - DNA, 25 bp, probe
tgttatagacggtgctcactcccaa

SEQ ID NO: 268256 - DNA, 25 bp, probe
tgtttgaggacaccctagacccaac

SEQ ID NO: 268257 - DNA, 25 bp, probe
tgacaccgagaatccttacaccaaa

SEQ ID NO: 268258 - DNA, 25 bp, probe
taaccaggacaaaacacaaccaagg

SEQ ID NO: 268259 - DNA, 25 bp, probe
tcaagcccgaaacaaaaccaccaga

SEQ ID NO: 268260 - DNA, 25 bp, probe
ttggccctgaaacaggaatggggca

SEQ ID NO: 268261 - DNA, 25 bp, probe
tgaggcctccaaacaaacactggag

SEQ ID NO: 268262 - DNA, 25 bp, probe
tgatgatgcttcccaagaaatagtt

SEQ ID NO: 268263 - DNA, 25 bp, probe
tgatgatgtgtcaccccacattggc

SEQ ID NO: 268264 - DNA, 25 bp, probe
tgatgatgtgtcaccccacattggc

SEQ ID NO: 268265 - DNA, 25 bp, probe
tcggagtgcaaccccaagtactcct

SEQ ID NO: 268266 - DNA, 25 bp, probe
tctggaaaacgcccagagatttaat

SEQ ID NO: 268267 - DNA, 25 bp, probe
tgccgaaaacgagacaattgaaaag

SEQ ID NO: 268268 - DNA, 25 bp, probe
tgacgaagaagcaactaagttaata

SEQ ID NO: 268269 - DNA, 25 bp, probe
tgacgacgaaaacacagcccagttt

SEQ ID NO: 268270 - DNA, 25 bp, probe
tgatttaaaagagacagccttgtaa

SEQ ID NO: 268271 - DNA, 25 bp, probe
tgtttctagggtgtagctgggtaca

SEQ ID NO: 268272 - DNA, 25 bp, probe
tgtttctgcagacgctgtttcggac

SEQ ID NO: 268273 - DNA, 25 bp, probe
tgtttctgcagacgctgtttcggac

SEQ ID NO: 268274 - DNA, 25 bp, probe
tgtatcttgcatccctgtatggagg

SEQ ID NO: 268275 - DNA, 25 bp, probe
tgtaccagatcacctggtggaggta

SEQ ID NO: 268276 - DNA, 25 bp, probe
tgtatcatcagagcgccgaggagag

SEQ ID NO: 268277 - DNA, 25 bp, probe
tgtatctcatactgatcatgtgtaa

SEQ ID NO: 268278 - DNA, 25 bp, probe
tgtattgaagcattgtgctgtctga

SEQ ID NO: 268279 - DNA, 25 bp, probe
tgtatgtcatagtatgtcgtcacat

SEQ ID NO: 268280 - DNA, 25 bp, probe
tgtagccatggaggtgcggccatca

SEQ ID NO: 268281 - DNA, 25 bp, probe
tgtagccatggaggtgcggccatca

SEQ ID NO: 268282 - DNA, 25 bp, probe
tgttccatacagccttggactagca

SEQ ID NO: 268283 - DNA, 25 bp, probe
tgttatacacagctttatgatatca

SEQ ID NO: 268284 - DNA, 25 bp, probe
tgtttgaacagcattgtaaaatggc

SEQ ID NO: 268285 - DNA, 25 bp, probe
tgttctggcggcattgtgggcttag

SEQ ID NO: 268286 - DNA, 25 bp, probe
tgttagggtagcatgggattacagg

SEQ ID NO: 268287 - DNA, 25 bp, probe
tgttaaagaatcatctggattatag

SEQ ID NO: 268288 - DNA, 25 bp, probe
tgtataatatgatgtttggatgtat

SEQ ID NO: 268289 - DNA, 25 bp, probe
tgttcaataaagtttgtatgttgca

SEQ ID NO: 268290 - DNA, 25 bp, probe
tgttcagtcacttgtttgtgtttga

SEQ ID NO: 268291 - DNA, 25 bp, probe
tgttcaaagttgtagttcttgtgca

SEQ ID NO: 268292 - DNA, 25 bp, probe
tgttgcgttttgtgtctctgttgca

SEQ ID NO: 268293 - DNA, 25 bp, probe
tgagggctttagtttcctgggcagg

SEQ ID NO: 268294 - DNA, 25 bp, probe
tgagggctttagtttcctgggcagg

SEQ ID NO: 268295 - DNA, 25 bp, probe
tgttactttcaatattctgagattc

SEQ ID NO: 268296 - DNA, 25 bp, probe
tgtacctttcttcactgcagatttc

SEQ ID NO: 268297 - DNA, 25 bp, probe
tgtacctgttcttggagccaatgtg

SEQ ID NO: 268298 - DNA, 25 bp, probe
tgtacgcggccttcgactgcacggc

SEQ ID NO: 268299 - DNA, 25 bp, probe
tgtttgggccgacactgctgcggcc

SEQ ID NO: 268300 - DNA, 25 bp, probe
tgttcggggtgacactgtgggaaat

SEQ ID NO: 268301 - DNA, 25 bp, probe
tgtaccccgataccactgtataaaa

SEQ ID NO: 268302 - DNA, 25 bp, probe
tgttccccttgaaactgtggacaaa

SEQ ID NO: 268303 - DNA, 25 bp, probe
tgttccccttgaaactgtggacaaa

SEQ ID NO: 268304 - DNA, 25 bp, probe
tgttcccttctatgactggaggcat

SEQ ID NO: 268305 - DNA, 25 bp, probe
tgttcacttcattgcggactggtac

SEQ ID NO: 268306 - DNA, 25 bp, probe
tgttcacttcattgcggactggtac

SEQ ID NO: 268307 - DNA, 25 bp, probe
tgtaccttctgctgtgtgtgtgtat

SEQ ID NO: 268308 - DNA, 25 bp, probe
tgtatccgactctaagctgtgtgca

SEQ ID NO: 268309 - DNA, 25 bp, probe
tgtttccagctgtgagcttgagaga

SEQ ID NO: 268310 - DNA, 25 bp, probe
tgtttctcctgttggctcacagggc

SEQ ID NO: 268311 - DNA, 25 bp, probe
tgagtgtcccttttgtaaggcccag

SEQ ID NO: 268312 - DNA, 25 bp, probe
tgtttccctcttgtgaaggcactgc

SEQ ID NO: 268313 - DNA, 25 bp, probe
tgtattccatctagtacggggcctt

SEQ ID NO: 268314 - DNA, 25 bp, probe
tgtttcgctccaaagggttgtcttc

SEQ ID NO: 268315 - DNA, 25 bp, probe
tgtttcttctcaaagggccagtctg

SEQ ID NO: 268316 - DNA, 25 bp, probe
tgttacttctagtgttcacctctgt

SEQ ID NO: 268317 - DNA, 25 bp, probe
tgttactggtttcttacattgccat

SEQ ID NO: 268318 - DNA, 25 bp, probe
tgttgggtcttttttgaatgtccat

SEQ ID NO: 268319 - DNA, 25 bp, probe
tgatatgggctttctctttggtttc

SEQ ID NO: 268320 - DNA, 25 bp, probe
tgatatgggctttctctttggtttc

SEQ ID NO: 268321 - DNA, 25 bp, probe
tgtatgtgtgctgtgttttgatgct

SEQ ID NO: 268322 - DNA, 25 bp, probe
tgtatgtgtgctgtgttttgatgct

SEQ ID NO: 268323 - DNA, 25 bp, probe
tgtatgtgttggtttattgattctg

SEQ ID NO: 268324 - DNA, 25 bp, probe
tgtagctgcattatttcttgattag

SEQ ID NO: 268325 - DNA, 25 bp, probe
tgattgtgctacagtttctttaaga

SEQ ID NO: 268326 - DNA, 25 bp, probe
tgtagtaactggtctttttatattt

SEQ ID NO: 268327 - DNA, 25 bp, probe
tgtagtaactggtctttttatattt

SEQ ID NO: 268328 - DNA, 25 bp, probe
tgttgcttacggtttctttgttact

SEQ ID NO: 268329 - DNA, 25 bp, probe
tgtatgttagcatcgactctttctt

SEQ ID NO: 268330 - DNA, 25 bp, probe
tatatgttaacctccttaattcctt

SEQ ID NO: 268331 - DNA, 25 bp, probe
tgttcttagacctcctaaatgcccc

SEQ ID NO: 268332 - DNA, 25 bp, probe
tgtatttaaccagtcactattgatg

SEQ ID NO: 268333 - DNA, 25 bp, probe
tgttttattctagcaatgaatttga

SEQ ID NO: 268334 - DNA, 25 bp, probe
tgtatttttcaaactaagatctatg

SEQ ID NO: 268335 - DNA, 25 bp, probe
tgtattctttactttaggtgttgct

SEQ ID NO: 268336 - DNA, 25 bp, probe
tgtatatttaacttctagttgctct

SEQ ID NO: 268337 - DNA, 25 bp, probe
tgtatatttaacttctagttgctct

SEQ ID NO: 268338 - DNA, 25 bp, probe
tgtattgttcattaagctagcttcc

SEQ ID NO: 268339 - DNA, 25 bp, probe
tgttgatgtggacatgagccatttg

SEQ ID NO: 268340 - DNA, 25 bp, probe
tgttgcttatctccatgagaactgt

SEQ ID NO: 268341 - DNA, 25 bp, probe
tgtatcctatgtatgcagtgtgctt

SEQ ID NO: 268342 - DNA, 25 bp, probe
tgtatcgctcttcccagagttgtta

SEQ ID NO: 268343 - DNA, 25 bp, probe
tgtaccagctttaccacttttcagc

SEQ ID NO: 268344 - DNA, 25 bp, probe
tgtagaagtgatcctcacccttttc

SEQ ID NO: 268345 - DNA, 25 bp, probe
tgtagaagtgatcctcacccttttc

SEQ ID NO: 268346 - DNA, 25 bp, probe
tgaagtcggctttcccgttgatgtc

SEQ ID NO: 268347 - DNA, 25 bp, probe
tgtattcaggttacccttctgtgct

SEQ ID NO: 268348 - DNA, 25 bp, probe
tgtagccaggtatggctctgcaccc

SEQ ID NO: 268349 - DNA, 25 bp, probe
tgttccaggacaagtgttcactcac

SEQ ID NO: 268350 - DNA, 25 bp, probe
tgttcagccacaccagtggtagctc

SEQ ID NO: 268351 - DNA, 25 bp, probe
tgtatcagcgacatgattaaacatt

SEQ ID NO: 268352 - DNA, 25 bp, probe
tgtagctgtgtcatgtatatacctt

SEQ ID NO: 268353 - DNA, 25 bp, probe
tgtatctgaggcagctattccgcat

SEQ ID NO: 268354 - DNA, 25 bp, probe
tgtaccagatgttgagtgaccagct

SEQ ID NO: 268355 - DNA, 25 bp, probe
tgtagccatatgtaatcccttgctt

SEQ ID NO: 268356 - DNA, 25 bp, probe
tgttgccatggtaatcctgctcagt

SEQ ID NO: 268357 - DNA, 25 bp, probe
tgttggaggaaaggtccattttggc

SEQ ID NO: 268358 - DNA, 25 bp, probe
tgttggctggacactgttttttcag

SEQ ID NO: 268359 - DNA, 25 bp, probe
tgttagtatacatcagtctttttca

SEQ ID NO: 268360 - DNA, 25 bp, probe
tgttattaacagaaattcatatttg

SEQ ID NO: 268361 - DNA, 25 bp, probe
tgtatcattatggcagtgtatctat

SEQ ID NO: 268362 - DNA, 25 bp, probe
tgtatatttgtaagatgacagatga

SEQ ID NO: 268363 - DNA, 25 bp, probe
tgttttcccatggagaagatgacaa

SEQ ID NO: 268364 - DNA, 25 bp, probe
tgtttcatatgcagcgacaaagaaa

SEQ ID NO: 268365 - DNA, 25 bp, probe
tgtttcatagcaaggaggataaagc

SEQ ID NO: 268366 - DNA, 25 bp, probe
tgtatacagagaaccggatgaatat

SEQ ID NO: 268367 - DNA, 25 bp, probe
tgtatgaatgcaatcccgtggccta

SEQ ID NO: 268368 - DNA, 25 bp, probe
tgtatgatatcttctccatggccac

SEQ ID NO: 268369 - DNA, 25 bp, probe
tgtatgagacctatcagagcagccg

SEQ ID NO: 268370 - DNA, 25 bp, probe
tgttgaactgcactctaaggcctgg

SEQ ID NO: 268371 - DNA, 25 bp, probe
tgttcacatctgcactcaaggtcgc

SEQ ID NO: 268372 - DNA, 25 bp, probe
tgtttcattggtccaggagctccta

SEQ ID NO: 268373 - DNA, 25 bp, probe
tgtttcattggtccaggagctccta

SEQ ID NO: 268374 - DNA, 25 bp, probe
tgtttttgtgtccagctcagtatct

SEQ ID NO: 268375 - DNA, 25 bp, probe
tgtttttgtgtccagctcagtatct

SEQ ID NO: 268376 - DNA, 25 bp, probe
tgtatttagtgtggcagaataataa

SEQ ID NO: 268377 - DNA, 25 bp, probe
tgttcctggctttcagaaaaccaac

SEQ ID NO: 268378 - DNA, 25 bp, probe
tgttccaggctctcagtacaaagaa

SEQ ID NO: 268379 - DNA, 25 bp, probe
tgttccaggctctcagtacaaagaa

SEQ ID NO: 268380 - DNA, 25 bp, probe
tgttcccctatgggtacaaatgtac

SEQ ID NO: 268381 - DNA, 25 bp, probe
tgtttccttatctgtaaaatggtga

SEQ ID NO: 268382 - DNA, 25 bp, probe
tgctttataaatttgttcaaagggc

SEQ ID NO: 268383 - DNA, 25 bp, probe
tgatttattacctcattcctaggcc

SEQ ID NO: 268384 - DNA, 25 bp, probe
tgttctttatagtgattctcttgtg

SEQ ID NO: 268385 - DNA, 25 bp, probe
tgtattttctagacaattctctatt

SEQ ID NO: 268386 - DNA, 25 bp, probe
tgtttttatggttcatgttatatcc

SEQ ID NO: 268387 - DNA, 25 bp, probe
tgtttgttgttgtgagcattgatat

SEQ ID NO: 268388 - DNA, 25 bp, probe
tgttcagagctgtaaaacatctgaa

SEQ ID NO: 268389 - DNA, 25 bp, probe
tgttctgattgacccatacctagac

SEQ ID NO: 268390 - DNA, 25 bp, probe
tgttctgatatctccagaccgagcc

SEQ ID NO: 268391 - DNA, 25 bp, probe
tgttctgatatctccagaccgagcc

SEQ ID NO: 268392 - DNA, 25 bp, probe
tgtttgttctccacaataggctctc

SEQ ID NO: 268393 - DNA, 25 bp, probe
tgtttttcgtcgccaaatgttgctg

SEQ ID NO: 268394 - DNA, 25 bp, probe
tgtattcttcagccccataaactgg

SEQ ID NO: 268395 - DNA, 25 bp, probe
tgtatcagtgtggagccttacatac

SEQ ID NO: 268396 - DNA, 25 bp, probe
tgttctgtgctggacttctaatata

SEQ ID NO: 268397 - DNA, 25 bp, probe
tgttgtacattgtcagtgtaataaa

SEQ ID NO: 268398 - DNA, 25 bp, probe
tgtagaatctcttcatgcttgacat

SEQ ID NO: 268399 - DNA, 25 bp, probe
tgtagaatcactttgtagatatgga

SEQ ID NO: 268400 - DNA, 25 bp, probe
tgtagacagccttggccgcataggc

SEQ ID NO: 268401 - DNA, 25 bp, probe
tgtatggactcatccaccaggggat

SEQ ID NO: 268402 - DNA, 25 bp, probe
tttgagatctacgccatcgtcggaa

SEQ ID NO: 268403 - DNA, 25 bp, probe
tgttgaataaccctcacttggagaa

SEQ ID NO: 268404 - DNA, 25 bp, probe
tgtatgagaacctgcacactaagaa

SEQ ID NO: 268405 - DNA, 25 bp, probe
tgtatggcaccctgccataccagct

SEQ ID NO: 268406 - DNA, 25 bp, probe
tgtatggcaccctgccataccagct

SEQ ID NO: 268407 - DNA, 25 bp, probe
tgtatgggttgcccactgacaccat

SEQ ID NO: 268408 - DNA, 25 bp, probe
tgtatgaggaatggccccaacgcgc

SEQ ID NO: 268409 - DNA, 25 bp, probe
tgtagacgaagctctgcgtcaccca

SEQ ID NO: 268410 - DNA, 25 bp, probe
tgtatgaggagagcttcaggcccca

SEQ ID NO: 268411 - DNA, 25 bp, probe
tgtatgaggagagcttcaggcccca

SEQ ID NO: 268412 - DNA, 25 bp, probe
tgtatgaggagagcttcaggcccca

SEQ ID NO: 268413 - DNA, 25 bp, probe
tgtatgtgaacagcttgggccctgc

SEQ ID NO: 268414 - DNA, 25 bp, probe
tgtaggtcacaggttgaggcccagc

SEQ ID NO: 268415 - DNA, 25 bp, probe
tgctacgtcgccctggacttcgagc

SEQ ID NO: 268416 - DNA, 25 bp, probe
tgatatcgccgcgctcgtcgtcgac

SEQ ID NO: 268417 - DNA, 25 bp, probe
tgaacgggcgactgtgtcttgacta

SEQ ID NO: 268418 - DNA, 25 bp, probe
tgaagttggccttttattggactaa

SEQ ID NO: 268419 - DNA, 25 bp, probe
tgacagtttcttttttcttactaga

SEQ ID NO: 268420 - DNA, 25 bp, probe
tgagaatcgtttccttccttttaag

SEQ ID NO: 268421 - DNA, 25 bp, probe
tgagaaagttccggtcctataaggg

SEQ ID NO: 268422 - DNA, 25 bp, probe
tgtaggtgtttcgtgtgctgctaag

SEQ ID NO: 268423 - DNA, 25 bp, probe
tgttcgagcgcgaccaggtggacgc

SEQ ID NO: 268424 - DNA, 25 bp, probe
tgattcacagggcccaggtaaacca

SEQ ID NO: 268425 - DNA, 25 bp, probe
tgttccagaagccggtcaagttcca

SEQ ID NO: 268426 - DNA, 25 bp, probe
tgtttgaaatgctggtagttcctga

SEQ ID NO: 268427 - DNA, 25 bp, probe
tgttggagggaacctgtttcactat

SEQ ID NO: 268428 - DNA, 25 bp, probe
tgttgaagcagttacctagttcctt

SEQ ID NO: 268429 - DNA, 25 bp, probe
tgtatgaaggcttttggtctccctg

SEQ ID NO: 268430 - DNA, 25 bp, probe
tgttagggctgtgagctgttcctcg

SEQ ID NO: 268431 - DNA, 25 bp, probe
tgttagggctgtgagctgttcctcg

SEQ ID NO: 268432 - DNA, 25 bp, probe
tgattagacgttgactgcatctccc

SEQ ID NO: 268433 - DNA, 25 bp, probe
tgatgtccctgatacagtgctgctc

SEQ ID NO: 268434 - DNA, 25 bp, probe
tgatgtccctgatacagtgctgctc

SEQ ID NO: 268435 - DNA, 25 bp, probe
tgttctccacaataggctctcaaca

SEQ ID NO: 268436 - DNA, 25 bp, probe
tgttctccacaataggctctcaaca

SEQ ID NO: 268437 - DNA, 25 bp, probe
tgattccacccatggcaaattccat

SEQ ID NO: 268438 - DNA, 25 bp, probe
tgattccacccatggcaaattccat

SEQ ID NO: 268439 - DNA, 25 bp, probe
tgatttcatccgcaacaaactctct

SEQ ID NO: 268440 - DNA, 25 bp, probe
tgatatactttgcaactggcgtcct

SEQ ID NO: 268441 - DNA, 25 bp, probe
tgttcactgtatgtccttggtgcct

SEQ ID NO: 268442 - DNA, 25 bp, probe
tgttttgaatggtgttgtatgcctt

SEQ ID NO: 268443 - DNA, 25 bp, probe
tgttttgtagcctgcttttgctttc

SEQ ID NO: 268444 - DNA, 25 bp, probe
tgtttgggatactgcttattttatg

SEQ ID NO: 268445 - DNA, 25 bp, probe
tgtttggtatactttgctttttcta

SEQ ID NO: 268446 - DNA, 25 bp, probe
tgtttggcttattgcttgccttctc

SEQ ID NO: 268447 - DNA, 25 bp, probe
tgtttgctgccttactggaatacgc

SEQ ID NO: 268448 - DNA, 25 bp, probe
tgtttgatgccttgacatggtttgg

SEQ ID NO: 268449 - DNA, 25 bp, probe
tgtatgtattattcaatcctttgga

SEQ ID NO: 268450 - DNA, 25 bp, probe
tgattgtcatttccatttcttatgg

SEQ ID NO: 268451 - DNA, 25 bp, probe
tgttcacactctcacatgtttagag

SEQ ID NO: 268452 - DNA, 25 bp, probe
tgttcacactctcacatgtttagag

SEQ ID NO: 268453 - DNA, 25 bp, probe
tgtatcaccatctccatatcattga

SEQ ID NO: 268454 - DNA, 25 bp, probe
tgtatctctcatccaccaacataca

SEQ ID NO: 268455 - DNA, 25 bp, probe
tgtttctcatcttcataataccagt

SEQ ID NO: 268456 - DNA, 25 bp, probe
tgtttctgtgctgatctggaccatc

SEQ ID NO: 268457 - DNA, 25 bp, probe
tgttcatcggctacgtggtgccagc

SEQ ID NO: 268458 - DNA, 25 bp, probe
tgttcatcgtctactcggagagcaa

SEQ ID NO: 268459 - DNA, 25 bp, probe
tgttcatcgtctactcggagagcaa

SEQ ID NO: 268460 - DNA, 25 bp, probe
tgtttcatgctttgctccgaacaaa

SEQ ID NO: 268461 - DNA, 25 bp, probe
tgatctagatttttccggaccaacc

SEQ ID NO: 268462 - DNA, 25 bp, probe
tgatccagatgttatgctcctgctg

SEQ ID NO: 268463 - DNA, 25 bp, probe
tgtatctctgtccatgatgcactgt

SEQ ID NO: 268464 - DNA, 25 bp, probe
tgtatctctgtccatgatgcactgt

SEQ ID NO: 268465 - DNA, 25 bp, probe
tgtatgcattgccctatgcactgtt

SEQ ID NO: 268466 - DNA, 25 bp, probe
tgtatgggctctactgccagtgtga

SEQ ID NO: 268467 - DNA, 25 bp, probe
tgtatgctgctagtgttgccaatgc

SEQ ID NO: 268468 - DNA, 25 bp, probe
tgtatgctgctagtgttgccaatgc

SEQ ID NO: 268469 - DNA, 25 bp, probe
tgttgtcaaaattgccagctgcgcc

SEQ ID NO: 268470 - DNA, 25 bp, probe
tgtatgtgatcagaagctgcgtccc

SEQ ID NO: 268471 - DNA, 25 bp, probe
tgttcatgtcagtgagagcttccca

SEQ ID NO: 268472 - DNA, 25 bp, probe
tgtattttgctgaagatcctcccac

SEQ ID NO: 268473 - DNA, 25 bp, probe
tgtttttctgctagtgacttgcaca

SEQ ID NO: 268474 - DNA, 25 bp, probe
tgtttatatcctactgacagtggaa

SEQ ID NO: 268475 - DNA, 25 bp, probe
tgttgcactacctcggccatgtcat

SEQ ID NO: 268476 - DNA, 25 bp, probe
tgttacattggcacagagccatgga

SEQ ID NO: 268477 - DNA, 25 bp, probe
tgtatgaacttttcacatacattga

SEQ ID NO: 268478 - DNA, 25 bp, probe
tgttagactttgaagagactaaaga

SEQ ID NO: 268479 - DNA, 25 bp, probe
tgttaccattataaccctacagagg

SEQ ID NO: 268480 - DNA, 25 bp, probe
ttttcctatcgtgccgcactagagt

SEQ ID NO: 268481 - DNA, 25 bp, probe
tgttcctctacggcaccgagaaggt

SEQ ID NO: 268482 - DNA, 25 bp, probe
tgttcctctacggcaccgagaaggt

SEQ ID NO: 268483 - DNA, 25 bp, probe
tgtatcctttcggcatgtggaggaa

SEQ ID NO: 268484 - DNA, 25 bp, probe
tgtatcgcattatccaggtggctag

SEQ ID NO: 268485 - DNA, 25 bp, probe
tgtttcatattctcagatgggctga

SEQ ID NO: 268486 - DNA, 25 bp, probe
tgtttattgtcttttaattgaaaga

SEQ ID NO: 268487 - DNA, 25 bp, probe
tgttttatgctcttgtgtaatctac

SEQ ID NO: 268488 - DNA, 25 bp, probe
tgattctgaattcttggatattact

SEQ ID NO: 268489 - DNA, 25 bp, probe
tgttctggtcatcttgtggcttagt

SEQ ID NO: 268490 - DNA, 25 bp, probe
tgttctggtatgcattctttatagt

SEQ ID NO: 268491 - DNA, 25 bp, probe
tgttctcagaatctgatgctttctg

SEQ ID NO: 268492 - DNA, 25 bp, probe
tgtatacagtagtgactcccatgct

SEQ ID NO: 268493 - DNA, 25 bp, probe
tgtatgaagatatcaacattatcac

SEQ ID NO: 268494 - DNA, 25 bp, probe
tgtatgactgtgttatacttgataa

SEQ ID NO: 268495 - DNA, 25 bp, probe
tgtataatgtgctttatttgcaaat

SEQ ID NO: 268496 - DNA, 25 bp, probe
tgtataatgctgacgttcttgcttt

SEQ ID NO: 268497 - DNA, 25 bp, probe
tgtatgccatggggttggtgctgtg

SEQ ID NO: 268498 - DNA, 25 bp, probe
tgtatgccatgaaggtattgacgag

SEQ ID NO: 268499 - DNA, 25 bp, probe
tgtatgccatgaaggtattgacgag

SEQ ID NO: 268500 - DNA, 25 bp, probe
tgtatacttgtgcctgaatgactag

SEQ ID NO: 268501 - DNA, 25 bp, probe
tgcattccttgttctgttgacctgc

SEQ ID NO: 268502 - DNA, 25 bp, probe
tgatcctgcttggaagtaccgcttt

SEQ ID NO: 268503 - DNA, 25 bp, probe
tgttcacttgagtggaactgctttt

SEQ ID NO: 268504 - DNA, 25 bp, probe
tttacttgacaacaaggattcctgc

SEQ ID NO: 268505 - DNA, 25 bp, probe
tgttgatccgaataggaggatgtca

SEQ ID NO: 268506 - DNA, 25 bp, probe
tgttatcccaagtgctcttattctg

SEQ ID NO: 268507 - DNA, 25 bp, probe
tgttatcccaagtgctcttattctg

SEQ ID NO: 268508 - DNA, 25 bp, probe
tgtatgacccagttgtcctgaattt

SEQ ID NO: 268509 - DNA, 25 bp, probe
tgttacccataaacactgccatcat

SEQ ID NO: 268510 - DNA, 25 bp, probe
tgttaagatataaggcattgcctga

SEQ ID NO: 268511 - DNA, 25 bp, probe
tgttcaaattcaaactcatccagtt

SEQ ID NO: 268512 - DNA, 25 bp, probe
tgattcaaattatctcgcaccgggt

SEQ ID NO: 268513 - DNA, 25 bp, probe
tgttccaatatgattccacccatgg

SEQ ID NO: 268514 - DNA, 25 bp, probe
tgttctctttggatccagggatgct

SEQ ID NO: 268515 - DNA, 25 bp, probe
tgtttcttagagacggggactgctt

SEQ ID NO: 268516 - DNA, 25 bp, probe
tgttctttgggtcaggagcattcat

SEQ ID NO: 268517 - DNA, 25 bp, probe
tgatttgtctgggttaaaaccattc

SEQ ID NO: 268518 - DNA, 25 bp, probe
tgtttctgtgcgcttacccagaatt

SEQ ID NO: 268519 - DNA, 25 bp, probe
tgttcacttcttctccacaatgaat

SEQ ID NO: 268520 - DNA, 25 bp, probe
tgttcactgtttaactacattaatt

SEQ ID NO: 268521 - DNA, 25 bp, probe
tgataaagttaatctaattgtagtt

SEQ ID NO: 268522 - DNA, 25 bp, probe
tgatcaaattatatacccttgtatt

SEQ ID NO: 268523 - DNA, 25 bp, probe
tgattttggttttgcccggatcatt

SEQ ID NO: 268524 - DNA, 25 bp, probe
tgttttggtcttgcattatgtgtca

SEQ ID NO: 268525 - DNA, 25 bp, probe
tgtatctttgccagtttagctggat

SEQ ID NO: 268526 - DNA, 25 bp, probe
tgttctatggcactggccttggggt

SEQ ID NO: 268527 - DNA, 25 bp, probe
tgttttggcagcagcacatctaacg

SEQ ID NO: 268528 - DNA, 25 bp, probe
tgttcctggccatcatcaatgacac

SEQ ID NO: 268529 - DNA, 25 bp, probe
tgatatccgcccaagatcagcaacc

SEQ ID NO: 268530 - DNA, 25 bp, probe
tgttctctgcccttgggcatcaact

SEQ ID NO: 268531 - DNA, 25 bp, probe
tgatcctctccctgcggagacatat

SEQ ID NO: 268532 - DNA, 25 bp, probe
tgatcctctccctgcggagacatat

SEQ ID NO: 268533 - DNA, 25 bp, probe
tcgcgtggccttctgggaaatgtag

SEQ ID NO: 268534 - DNA, 25 bp, probe
tgcggtggttgtgtgggaaacttcc

SEQ ID NO: 268535 - DNA, 25 bp, probe
tccgggatccagttaggaaccttca

SEQ ID NO: 268536 - DNA, 25 bp, probe
tccgctggcccaggaagaaatttta

SEQ ID NO: 268537 - DNA, 25 bp, probe
tcaggggaccaaaaaacttgctctt

SEQ ID NO: 268538 - DNA, 25 bp, probe
tcagtctggctttacgtaactttta

SEQ ID NO: 268539 - DNA, 25 bp, probe
tgatgaagaatttacagctcagact

SEQ ID NO: 268540 - DNA, 25 bp, probe
tgaaaaatgctctcgtaggtggcca

SEQ ID NO: 268541 - DNA, 25 bp, probe
tgatgacacccctcgaaggggccca

SEQ ID NO: 268542 - DNA, 25 bp, probe
tgatgacacccctcgaaggggccca

SEQ ID NO: 268543 - DNA, 25 bp, probe
tgatgaatcccctggatacacggaa

SEQ ID NO: 268544 - DNA, 25 bp, probe
tgataatccccacaggcacattaac

SEQ ID NO: 268545 - DNA, 25 bp, probe
tgaaaccgaagctcgactcttccaa

SEQ ID NO: 268546 - DNA, 25 bp, probe
tgaaaccagtatttaagctttaaat

SEQ ID NO: 268547 - DNA, 25 bp, probe
tgaaaccctgtctctagtaaaaatc

SEQ ID NO: 268548 - DNA, 25 bp, probe
tgaaagccagtgagcctactaaccg

SEQ ID NO: 268549 - DNA, 25 bp, probe
tgagaacgtgagcggctactccagc

SEQ ID NO: 268550 - DNA, 25 bp, probe
tgatattcgaagacctcggctctac

SEQ ID NO: 268551 - DNA, 25 bp, probe
tgtattttatatgctgtggctcccc

SEQ ID NO: 268552 - DNA, 25 bp, probe
tgtattgaaaatggctttctcagcc

SEQ ID NO: 268553 - DNA, 25 bp, probe
tgatacagaaaaggtcctctccatc

SEQ ID NO: 268554 - DNA, 25 bp, probe
tgatatcaataacttttctctccat

SEQ ID NO: 268555 - DNA, 25 bp, probe
tgatatcaaagactcattgcttaat

SEQ ID NO: 268556 - DNA, 25 bp, probe
tgtattcatgaacttggctgtaatc

SEQ ID NO: 268557 - DNA, 25 bp, probe
tgtttaactttgactgctatagcag

SEQ ID NO: 268558 - DNA, 25 bp, probe
tgttatatacttgttttacatgagc

SEQ ID NO: 268559 - DNA, 25 bp, probe
tgttcttacttgattatataatgag

SEQ ID NO: 268560 - DNA, 25 bp, probe
tgttgtatacttccttatgcttctt

SEQ ID NO: 268561 - DNA, 25 bp, probe
tgttgtatacttccttatgcttctt

SEQ ID NO: 268562 - DNA, 25 bp, probe
tgttctatagtttttcaggatctta

SEQ ID NO: 268563 - DNA, 25 bp, probe
cgttccagacatgagcttgagcagg

SEQ ID NO: 268564 - DNA, 25 bp, probe
tgtttcttactctgtcattacccag

SEQ ID NO: 268565 - DNA, 25 bp, probe
tgtatttttctctgctaagaccggc

SEQ ID NO: 268566 - DNA, 25 bp, probe
tgtatttctttctgactagacttgt

SEQ ID NO: 268567 - DNA, 25 bp, probe
tgtttttttcttactaggtcatgtt

SEQ ID NO: 268568 - DNA, 25 bp, probe
tgtttttttctgccgggtgttgtat

SEQ ID NO: 268569 - DNA, 25 bp, probe
tgtattttttctctggtggcattcc

SEQ ID NO: 268570 - DNA, 25 bp, probe
tgttttattcttcagtgttcatata

SEQ ID NO: 268571 - DNA, 25 bp, probe
tgttttttgtctcagcatcagtata

SEQ ID NO: 268572 - DNA, 25 bp, probe
tgtttgtgttgaatgcggcgcagtg

SEQ ID NO: 268573 - DNA, 25 bp, probe
tgtttgagtttatggacactgacct

SEQ ID NO: 268574 - DNA, 25 bp, probe
tgttctgcatgtaagaaacacaatg

SEQ ID NO: 268575 - DNA, 25 bp, probe
tgttcttttggatagcatgaagctt

SEQ ID NO: 268576 - DNA, 25 bp, probe
tgttcattctggtaccacaggcagt

SEQ ID NO: 268577 - DNA, 25 bp, probe
tgttcaccatcggcagtgccagggc

SEQ ID NO: 268578 - DNA, 25 bp, probe
tgttcaccacgagtgtggctgctgg

SEQ ID NO: 268579 - DNA, 25 bp, probe
tgttagaactgaggtgggctagtgg

SEQ ID NO: 268580 - DNA, 25 bp, probe
tgtttgaagatgatggcaggaaggt

SEQ ID NO: 268581 - DNA, 25 bp, probe
tgtttgcagtggatggggaattgat

SEQ ID NO: 268582 - DNA, 25 bp, probe
tgttcagcagggctgaaagctttta

SEQ ID NO: 268583 - DNA, 25 bp, probe
tgttcagcagtcctgcttcaagcct

SEQ ID NO: 268584 - DNA, 25 bp, probe
tgttgcagctgttttccaagcagtg

SEQ ID NO: 268585 - DNA, 25 bp, probe
tgttggagcatgtttacatacaaac

SEQ ID NO: 268586 - DNA, 25 bp, probe
tgttggagagttcccatgtcaaaat

SEQ ID NO: 268587 - DNA, 25 bp, probe
tgttgaagcataatcccagccagag

SEQ ID NO: 268588 - DNA, 25 bp, probe
tgttctggcaactacacagcaagca

SEQ ID NO: 268589 - DNA, 25 bp, probe
tgtattggccatctggaatatgcat

SEQ ID NO: 268590 - DNA, 25 bp, probe
tgatctgggcccctgcagaaatgca

SEQ ID NO: 268591 - DNA, 25 bp, probe
tgttggctcacagggctgaaagggg

SEQ ID NO: 268592 - DNA, 25 bp, probe
tgtttgtcaaggcgagtgaggacgg

SEQ ID NO: 268593 - DNA, 25 bp, probe
tgttgctgtaacagttggaggcagc

SEQ ID NO: 268594 - DNA, 25 bp, probe
tgttctggaagtgttatcaccaaca

SEQ ID NO: 268595 - DNA, 25 bp, probe
tgatttggaactccattccacctga

SEQ ID NO: 268596 - DNA, 25 bp, probe
tgatttggaactccattccacctga

SEQ ID NO: 268597 - DNA, 25 bp, probe
tgttgggagctccgataaccctgac

SEQ ID NO: 268598 - DNA, 25 bp, probe
tgtttgctgagcaggacgacgccac

SEQ ID NO: 268599 - DNA, 25 bp, probe
tgattgtggagtaccacgagcgccc

SEQ ID NO: 268600 - DNA, 25 bp, probe
tgttgggctttccactgagatctac

SEQ ID NO: 268601 - DNA, 25 bp, probe
tgttggtgtctacagctgaagctgt

SEQ ID NO: 268602 - DNA, 25 bp, probe
tgttttgtggatcgcagctgacctg

SEQ ID NO: 268603 - DNA, 25 bp, probe
tgttatatggattacagtcacctgg

SEQ ID NO: 268604 - DNA, 25 bp, probe
tgttctgggcatttcatgtcaatgg

SEQ ID NO: 268605 - DNA, 25 bp, probe
tgtttggcgccatcattgcagtgcc

SEQ ID NO: 268606 - DNA, 25 bp, probe
tgtttgaggagcactgtgcgccgct

SEQ ID NO: 268607 - DNA, 25 bp, probe
tgtttgaagcgcagcaggtgcatcg

SEQ ID NO: 268608 - DNA, 25 bp, probe
tgttctggcggcagcaagctgctcg

SEQ ID NO: 268609 - DNA, 25 bp, probe
tgttgtgagtccacatgagctccca

SEQ ID NO: 268610 - DNA, 25 bp, probe
tgttgatgaatcccctggatacacg

SEQ ID NO: 268611 - DNA, 25 bp, probe
tgatcttaaccccatggcagatccc

SEQ ID NO: 268612 - DNA, 25 bp, probe
tgatctatacgcaaccggaaccaca

SEQ ID NO: 268613 - DNA, 25 bp, probe
tgttgatgatcccacgggagcccac

SEQ ID NO: 268614 - DNA, 25 bp, probe
tgttgatgatcccacgggagcccac

SEQ ID NO: 268615 - DNA, 25 bp, probe
tgcttgagtacgaaccggccaagag

SEQ ID NO: 268616 - DNA, 25 bp, probe
tgatggagaccaaacccgacaaggc

SEQ ID NO: 268617 - DNA, 25 bp, probe
tgacaaaacgccgctggagaaggat

SEQ ID NO: 268618 - DNA, 25 bp, probe
tagaccaaaggcgctgggaagggac

SEQ ID NO: 268619 - DNA, 25 bp, probe
tgaggccccgttcctgggaggggca

SEQ ID NO: 268620 - DNA, 25 bp, probe
tgaggccccagtaggggtggggagg

SEQ ID NO: 268621 - DNA, 25 bp, probe
tgattggggcctggggcaggggggt

SEQ ID NO: 268622 - DNA, 25 bp, probe
tgattggggcctggggcaggggggt

SEQ ID NO: 268623 - DNA, 25 bp, probe
tgttgggcgtggttggaaggtgggt

SEQ ID NO: 268624 - DNA, 25 bp, probe
tgattgggactggggctgaaggttg

SEQ ID NO: 268625 - DNA, 25 bp, probe
tgttgggacccagagcaatgaattt

SEQ ID NO: 268626 - DNA, 25 bp, probe
tgttgggacccagagcaatgaattt

SEQ ID NO: 268627 - DNA, 25 bp, probe
tgttagctgtcccactatgcttaat

SEQ ID NO: 268628 - DNA, 25 bp, probe
tgttacagtcacaatctacttttct

SEQ ID NO: 268629 - DNA, 25 bp, probe
tgttcagcttccaattagtattctt

SEQ ID NO: 268630 - DNA, 25 bp, probe
tgttcagcttccaattagtattctt

SEQ ID NO: 268631 - DNA, 25 bp, probe
tgtttctttgcaatgcattgtatgg

SEQ ID NO: 268632 - DNA, 25 bp, probe
tgttcttctcacatgattgtcattt

SEQ ID NO: 268633 - DNA, 25 bp, probe
tgttcttctcacatgattgtcattt

SEQ ID NO: 268634 - DNA, 25 bp, probe
tgttcttctccatttatatcatcgt

SEQ ID NO: 268635 - DNA, 25 bp, probe
tgttcttctccatttatatcatcgt

SEQ ID NO: 268636 - DNA, 25 bp, probe
tgtttctctacatttatatctattt

SEQ ID NO: 268637 - DNA, 25 bp, probe
tgtattgcttattcattatagctat

SEQ ID NO: 268638 - DNA, 25 bp, probe
tgtattgcataatcaatgctggctg

SEQ ID NO: 268639 - DNA, 25 bp, probe
tgttctgcaatatcctgcagctcat

SEQ ID NO: 268640 - DNA, 25 bp, probe
tgatttcaaacgcctgacctcaggt

SEQ ID NO: 268641 - DNA, 25 bp, probe
tgttatcaaccaactgcacaatcag

SEQ ID NO: 268642 - DNA, 25 bp, probe
tgttatcaaccaactgcacaatcag

SEQ ID NO: 268643 - DNA, 25 bp, probe
tgtttaaccaagccatagcccatgc

SEQ ID NO: 268644 - DNA, 25 bp, probe
tgatttcaatcctccatttcaagca

SEQ ID NO: 268645 - DNA, 25 bp, probe
tgttgtcaaagctctgcatagtcca

SEQ ID NO: 268646 - DNA, 25 bp, probe
tgttgtcaaagctctgcatagtcca

SEQ ID NO: 268647 - DNA, 25 bp, probe
tgtttaatggcacctcatttggctt

SEQ ID NO: 268648 - DNA, 25 bp, probe
tgtttaatggcacctcatttggctt

SEQ ID NO: 268649 - DNA, 25 bp, probe
tgtttaagtggctcattgctccttc

SEQ ID NO: 268650 - DNA, 25 bp, probe
tgttaaagtcatcctttgccacgtg

SEQ ID NO: 268651 - DNA, 25 bp, probe
tgtttacagcactactctgtgccag

SEQ ID NO: 268652 - DNA, 25 bp, probe
tgttacactgccttattctgggaag

SEQ ID NO: 268653 - DNA, 25 bp, probe
tgttattctgctccttaaggttaac

SEQ ID NO: 268654 - DNA, 25 bp, probe
tgtttttggcatttcgaggtttact

SEQ ID NO: 268655 - DNA, 25 bp, probe
tgttttgtggctttcagcaccattg

SEQ ID NO: 268656 - DNA, 25 bp, probe
tgttttgtggccatcacactcatgg

SEQ ID NO: 268657 - DNA, 25 bp, probe
tgatctttaagtatacctcttcccc

SEQ ID NO: 268658 - DNA, 25 bp, probe
tgattaaaattctcacctttcacag

SEQ ID NO: 268659 - DNA, 25 bp, probe
tgatttttattctgcccattaacag

SEQ ID NO: 268660 - DNA, 25 bp, probe
tgtttcatttttagcacttctcacc

SEQ ID NO: 268661 - DNA, 25 bp, probe
tgttatctgttgatttcccatcacc

SEQ ID NO: 268662 - DNA, 25 bp, probe
tgttatgtgccatttttcttctagc

SEQ ID NO: 268663 - DNA, 25 bp, probe
tgctttgatcctatcctgtactatc

SEQ ID NO: 268664 - DNA, 25 bp, probe
tgctttgatcctatcctgtactatc

SEQ ID NO: 268665 - DNA, 25 bp, probe
tgtttgtcctgttcttggtcatgta

SEQ ID NO: 268666 - DNA, 25 bp, probe
tgtttcacgtgtacctgtgtcatct

SEQ ID NO: 268667 - DNA, 25 bp, probe
tgtttccctgtgtcctgtgaatgga

SEQ ID NO: 268668 - DNA, 25 bp, probe
tgttccccaagaggatggccatggg

SEQ ID NO: 268669 - DNA, 25 bp, probe
tgcttgtctcaaagattaagccatg

SEQ ID NO: 268670 - DNA, 25 bp, probe
tgttgtcatggaggattgtcaccag

SEQ ID NO: 268671 - DNA, 25 bp, probe
tgtttgatggacctctgaatctctt

SEQ ID NO: 268672 - DNA, 25 bp, probe
tgttggtagccactgctagatattt

SEQ ID NO: 268673 - DNA, 25 bp, probe
tgttgtgtggtaatgctaatctttc

SEQ ID NO: 268674 - DNA, 25 bp, probe
tgtttgttgtatacttccttatgct

SEQ ID NO: 268675 - DNA, 25 bp, probe
tgataatgttttgctactcttgtca

SEQ ID NO: 268676 - DNA, 25 bp, probe
tgttttgatttgttacactagtgca

SEQ ID NO: 268677 - DNA, 25 bp, probe
tgttttcattaatcaagaacgaaag

SEQ ID NO: 268678 - DNA, 25 bp, probe
tgttcctctttttaagaacaaaatg

SEQ ID NO: 268679 - DNA, 25 bp, probe
tgttccttgttttttaagagaaatg

SEQ ID NO: 268680 - DNA, 25 bp, probe
tgttcctttctcacagtgacaggaa

SEQ ID NO: 268681 - DNA, 25 bp, probe
tgttcctttctcacagtgacaggaa

SEQ ID NO: 268682 - DNA, 25 bp, probe
tagtcctttgtctaagtagggccag

SEQ ID NO: 268683 - DNA, 25 bp, probe
tgagcccttttacagtgacagacca

SEQ ID NO: 268684 - DNA, 25 bp, probe
tgcagccctactatgggatggccca

SEQ ID NO: 268685 - DNA, 25 bp, probe
tgatgaccccttacgtggtgacacg

SEQ ID NO: 268686 - DNA, 25 bp, probe
tgttacagcatcattaatggaactc

SEQ ID NO: 268687 - DNA, 25 bp, probe
tgttacaacgggcaggagcctcctc

SEQ ID NO: 268688 - DNA, 25 bp, probe
tgttgacacaggggagctgatggcc

SEQ ID NO: 268689 - DNA, 25 bp, probe
tgttgacatcgctggaagttcacaa

SEQ ID NO: 268690 - DNA, 25 bp, probe
tgttgcctctcataccaggaagcca

SEQ ID NO: 268691 - DNA, 25 bp, probe
tgagtgccacctaaccaggaggcca

SEQ ID NO: 268692 - DNA, 25 bp, probe
tgagcagtacatgaacacccggtgc

SEQ ID NO: 268693 - DNA, 25 bp, probe
tgaactcaagaagctcaccaagtca

SEQ ID NO: 268694 - DNA, 25 bp, probe
tccaagcagtaaactacctaccaaa

SEQ ID NO: 268695 - DNA, 25 bp, probe
tcctgacgtaaacacctttgatata

SEQ ID NO: 268696 - DNA, 25 bp, probe
tcgggcttaccagaactgggtgaag

SEQ ID NO: 268697 - DNA, 25 bp, probe
tcgggcttaccagaactgggtgaag

SEQ ID NO: 268698 - DNA, 25 bp, probe
tcgggaaggagcacaaggggaaatc

SEQ ID NO: 268699 - DNA, 25 bp, probe
tcgggaaggcctgagggaagcccac

SEQ ID NO: 268700 - DNA, 25 bp, probe
ttaggaacgtcaaagaaagcgccgc

SEQ ID NO: 268701 - DNA, 25 bp, probe
tgttggtacccaaggaaagccagcc

SEQ ID NO: 268702 - DNA, 25 bp, probe
tgttggtacccaaggaaagccagcc

SEQ ID NO: 268703 - DNA, 25 bp, probe
tgttggtatgccaacggagcggccc

SEQ ID NO: 268704 - DNA, 25 bp, probe
tgttggtatcacagagggcaggccc

SEQ ID NO: 268705 - DNA, 25 bp, probe
tgttgcagtgtataaggtggaagcc

SEQ ID NO: 268706 - DNA, 25 bp, probe
tgttctggatgatacaagtagggcc

SEQ ID NO: 268707 - DNA, 25 bp, probe
tgttttgaaactcagtatgccgccc

SEQ ID NO: 268708 - DNA, 25 bp, probe
tgttgtatataaatgggcttcccac

SEQ ID NO: 268709 - DNA, 25 bp, probe
tgttgctgtagatgtgcgtgcagtc

SEQ ID NO: 268710 - DNA, 25 bp, probe
tgttgctctcattgtgtgactcagt

SEQ ID NO: 268711 - DNA, 25 bp, probe
tgttgctctgatgtttgctcagtgc

SEQ ID NO: 268712 - DNA, 25 bp, probe
tgttgcactggtttcgctcatgtga

SEQ ID NO: 268713 - DNA, 25 bp, probe
tgttgcactggtttcgctcatgtga

SEQ ID NO: 268714 - DNA, 25 bp, probe
tgttcccgttgtccctggcacagat

SEQ ID NO: 268715 - DNA, 25 bp, probe
tgttccatcagccgtaccgggcgat

SEQ ID NO: 268716 - DNA, 25 bp, probe
tgctccccaagagacacggggcatc

SEQ ID NO: 268717 - DNA, 25 bp, probe
tgataccaacagtgaagctgtggaa

SEQ ID NO: 268718 - DNA, 25 bp, probe
tgttggcaaaaggagcgtgctgaaa

SEQ ID NO: 268719 - DNA, 25 bp, probe
tgtttcccatcagactgtcaagaag

SEQ ID NO: 268720 - DNA, 25 bp, probe
tgttgtctcaccctatcttaatgag

SEQ ID NO: 268721 - DNA, 25 bp, probe
tgttatgctcatgccaactggaata

SEQ ID NO: 268722 - DNA, 25 bp, probe
tgttcagctgcctcaactggtagac

SEQ ID NO: 268723 - DNA, 25 bp, probe
tgttcaggcaccgagaacctagcac

SEQ ID NO: 268724 - DNA, 25 bp, probe
tgttaagaagcgtccctgtcagcac

SEQ ID NO: 268725 - DNA, 25 bp, probe
tgttacaggaagtcccttgccatcc

SEQ ID NO: 268726 - DNA, 25 bp, probe
tgttaattgagagccctgggtcctg

SEQ ID NO: 268727 - DNA, 25 bp, probe
tgttgtactggtgacctgggatgca

SEQ ID NO: 268728 - DNA, 25 bp, probe
tgttgttctttccaccagcaggaag

SEQ ID NO: 268729 - DNA, 25 bp, probe
tgttgctcttagaaggcccagaaag

SEQ ID NO: 268730 - DNA, 25 bp, probe
tgttctgtgtcaaagaagtgcagaa

SEQ ID NO: 268731 - DNA, 25 bp, probe
tgttctggactgcaaatctgcacac

SEQ ID NO: 268732 - DNA, 25 bp, probe
tgttttggtatcaatctctcaatgt

SEQ ID NO: 268733 - DNA, 25 bp, probe
tgttttggtatcaatctctcaatgt

SEQ ID NO: 268734 - DNA, 25 bp, probe
tgttgtgttttgaatctctccagag

SEQ ID NO: 268735 - DNA, 25 bp, probe
tgaggagtatctggtaccccagcag

SEQ ID NO: 268736 - DNA, 25 bp, probe
tgattgaaactcataccccattgcc

SEQ ID NO: 268737 - DNA, 25 bp, probe
tgttgcagaacgtgaccctgcgtgc

SEQ ID NO: 268738 - DNA, 25 bp, probe
tgattgaaccagtggtcaatgctgt

SEQ ID NO: 268739 - DNA, 25 bp, probe
tgatctaccaagtggctaaacggac

SEQ ID NO: 268740 - DNA, 25 bp, probe
tgttactcacagcgctctgacatac

SEQ ID NO: 268741 - DNA, 25 bp, probe
tgttgtccaaggcctcgttgacatt

SEQ ID NO: 268742 - DNA, 25 bp, probe
tgttctcgataggccttttgatgat

SEQ ID NO: 268743 - DNA, 25 bp, probe
tgcctactgtaggcctcctaagtct

SEQ ID NO: 268744 - DNA, 25 bp, probe
tgttcacattgatgattcccaagtc

SEQ ID NO: 268745 - DNA, 25 bp, probe
tgcttaatggacctttccagcaccg

SEQ ID NO: 268746 - DNA, 25 bp, probe
tgttaaggcacactgttgctataca

SEQ ID NO: 268747 - DNA, 25 bp, probe
tgttaaggcacactgttgctataca

SEQ ID NO: 268748 - DNA, 25 bp, probe
tgttcaaagccattgggcttcctgt

SEQ ID NO: 268749 - DNA, 25 bp, probe
tgttcaaagcacggcgaggccttca

SEQ ID NO: 268750 - DNA, 25 bp, probe
tgttcgcatcagtggcgatgacttt

SEQ ID NO: 268751 - DNA, 25 bp, probe
tgttttcatgggtcaggacttcaag

SEQ ID NO: 268752 - DNA, 25 bp, probe
tgttttcttgtctggagtctgcaca

SEQ ID NO: 268753 - DNA, 25 bp, probe
tgatatttctttcagacttcgccag

SEQ ID NO: 268754 - DNA, 25 bp, probe
tgttcatgttttcagagttcttgcc

SEQ ID NO: 268755 - DNA, 25 bp, probe
tgttcttcgttgctgcattttcttc

SEQ ID NO: 268756 - DNA, 25 bp, probe
tgttttctgtttcctatgttttctt

SEQ ID NO: 268757 - DNA, 25 bp, probe
tgttctttagctttaatgtttcatc

SEQ ID NO: 268758 - DNA, 25 bp, probe
tgttctttagctttaatgtttcatc

SEQ ID NO: 268759 - DNA, 25 bp, probe
tgtttttgagctcctggggttcaga

SEQ ID NO: 268760 - DNA, 25 bp, probe
tgatcttttccacccagggtatcag

SEQ ID NO: 268761 - DNA, 25 bp, probe
tgatgatgtattgattccaggggcc

SEQ ID NO: 268762 - DNA, 25 bp, probe
tgatgtgtattccattccgctcgcc

SEQ ID NO: 268763 - DNA, 25 bp, probe
tgatgtgtattccattccgctcgcc

SEQ ID NO: 268764 - DNA, 25 bp, probe
tgatgatgttatatgccccagcagc

SEQ ID NO: 268765 - DNA, 25 bp, probe
tgattttgaagtgctccatgatgcc

SEQ ID NO: 268766 - DNA, 25 bp, probe
tgatctcttatactgtcatcctggt

SEQ ID NO: 268767 - DNA, 25 bp, probe
tgattctcttaggataacagcagta

SEQ ID NO: 268768 - DNA, 25 bp, probe
tgttcagcattcaggtgatcagcag

SEQ ID NO: 268769 - DNA, 25 bp, probe
tgttctgcaatgcaggcatcatcag

SEQ ID NO: 268770 - DNA, 25 bp, probe
tgttcagcaatgtcaatggcatcag

SEQ ID NO: 268771 - DNA, 25 bp, probe
tgttcagcaatgtcaatggcatcag

SEQ ID NO: 268772 - DNA, 25 bp, probe
tgatctcagataactcagtacagat

SEQ ID NO: 268773 - DNA, 25 bp, probe
tgatctgtacttccatgtacacccc

SEQ ID NO: 268774 - DNA, 25 bp, probe
tgattgacccatacctagactactc

SEQ ID NO: 268775 - DNA, 25 bp, probe
tgattgacccatacctagactactc

SEQ ID NO: 268776 - DNA, 25 bp, probe
tgttgaatccaataagccttcccgg

SEQ ID NO: 268777 - DNA, 25 bp, probe
tgatattaccaacacattttccctg

SEQ ID NO: 268778 - DNA, 25 bp, probe
tgattaggcgttaacttttcacctt

SEQ ID NO: 268779 - DNA, 25 bp, probe
tgtttatctgttaactattatccaa

SEQ ID NO: 268780 - DNA, 25 bp, probe
tgttacctttcaagtttatctcaat

SEQ ID NO: 268781 - DNA, 25 bp, probe
tgatcaactcttcaggattttcaga

SEQ ID NO: 268782 - DNA, 25 bp, probe
tgatcaactcttcaggattttcaga

SEQ ID NO: 268783 - DNA, 25 bp, probe
tgatcaactcttcaggattttcaga

SEQ ID NO: 268784 - DNA, 25 bp, probe
tgatagacccacttgggccttcatg

SEQ ID NO: 268785 - DNA, 25 bp, probe
tgatcatgagcggcaactaccagtt

SEQ ID NO: 268786 - DNA, 25 bp, probe
tgatagctcgctgttatcctggatc

SEQ ID NO: 268787 - DNA, 25 bp, probe
tgattccagctagtgtcagcagtgg

SEQ ID NO: 268788 - DNA, 25 bp, probe
tgattccagctagtgtcagcagtgg

SEQ ID NO: 268789 - DNA, 25 bp, probe
tgatgctgagcgaagctataggctc

SEQ ID NO: 268790 - DNA, 25 bp, probe
tgattgtgctcaggtatgcggatga

SEQ ID NO: 268791 - DNA, 25 bp, probe
tgattgtgctcaggtatgcggatga

SEQ ID NO: 268792 - DNA, 25 bp, probe
tgttacaaagtactcttccaaaaag

SEQ ID NO: 268793 - DNA, 25 bp, probe
tgttactctattacacttcctttca

SEQ ID NO: 268794 - DNA, 25 bp, probe
tgttagtgaagattcacctcctccc

SEQ ID NO: 268795 - DNA, 25 bp, probe
tgatccattaaatgccttcctactc

SEQ ID NO: 268796 - DNA, 25 bp, probe
tgatctcattaataagaagattact

SEQ ID NO: 268797 - DNA, 25 bp, probe
tgattcatctgtaaaagggtctaga

SEQ ID NO: 268798 - DNA, 25 bp, probe
tgttacttacaaagaggtgctcagc

SEQ ID NO: 268799 - DNA, 25 bp, probe
tgttgactatgacatcggggccact

SEQ ID NO: 268800 - DNA, 25 bp, probe
tgttacgcatgatcatggagggcca

SEQ ID NO: 268801 - DNA, 25 bp, probe
tgttacagctgagcattatgatgtt

SEQ ID NO: 268802 - DNA, 25 bp, probe
tgttacatgaatggcagtcatagta

SEQ ID NO: 268803 - DNA, 25 bp, probe
tgttcacaacatgcgtatttataga

SEQ ID NO: 268804 - DNA, 25 bp, probe
tgattcagtccgaccttctttaggt

SEQ ID NO: 268805 - DNA, 25 bp, probe
tgattcatggggaactccatttcag

SEQ ID NO: 268806 - DNA, 25 bp, probe
tgatattcagggacacccgttcttc

SEQ ID NO: 268807 - DNA, 25 bp, probe
tgatttagcaggagcccctttctat

SEQ ID NO: 268808 - DNA, 25 bp, probe
tgattgtatgcaaatagccctttat

SEQ ID NO: 268809 - DNA, 25 bp, probe
tgttgctggatcttgagtcccatta

SEQ ID NO: 268810 - DNA, 25 bp, probe
tgataattgatctgagctacctcat

SEQ ID NO: 268811 - DNA, 25 bp, probe
tgatcagctggttattgctaacata

SEQ ID NO: 268812 - DNA, 25 bp, probe
tgttgttgataaattaaatgacttg

SEQ ID NO: 268813 - DNA, 25 bp, probe
tgttgttaaaattctcaaggtgagt

SEQ ID NO: 268814 - DNA, 25 bp, probe
tgttatataatatctcataatagta

SEQ ID NO: 268815 - DNA, 25 bp, probe
tgttgaccaataaaatatctagtga

SEQ ID NO: 268816 - DNA, 25 bp, probe
tgttgataaattaaatgacttgaat

SEQ ID NO: 268817 - DNA, 25 bp, probe
tgttataattatacaggctctgtgg

SEQ ID NO: 268818 - DNA, 25 bp, probe
tgttctaatcttaggcgcttcaggc

SEQ ID NO: 268819 - DNA, 25 bp, probe
tgttccagttataggccttgccagg

SEQ ID NO: 268820 - DNA, 25 bp, probe
tgttcctgttttcatctagtcagag

SEQ ID NO: 268821 - DNA, 25 bp, probe
tgttggtggggtaactagccgagga

SEQ ID NO: 268822 - DNA, 25 bp, probe
tgttgtgcgagggtgttttccgagg

SEQ ID NO: 268823 - DNA, 25 bp, probe
tgttgtctgagacctgggtcgcttg

SEQ ID NO: 268824 - DNA, 25 bp, probe
tgattactcaatccttggggctgtc

SEQ ID NO: 268825 - DNA, 25 bp, probe
tgattgaatatcacaagtctgggtc

SEQ ID NO: 268826 - DNA, 25 bp, probe
tgattgaatatcacaagtctgggtc

SEQ ID NO: 268827 - DNA, 25 bp, probe
tgttgaaatttgtcatggatggagg

SEQ ID NO: 268828 - DNA, 25 bp, probe
tgttggaattctttggtgtaaataa

SEQ ID NO: 268829 - DNA, 25 bp, probe
tgttgtgtatgtgtctgggtaacac

SEQ ID NO: 268830 - DNA, 25 bp, probe
tgatttgtttagactgaaggaagac

SEQ ID NO: 268831 - DNA, 25 bp, probe
tgaggagtttttagaacaaaccctg

SEQ ID NO: 268832 - DNA, 25 bp, probe
tgatggaaccaaatagaaaaactcc

SEQ ID NO: 268833 - DNA, 25 bp, probe
tgagggcagaaaaaggaaacggcct

SEQ ID NO: 268834 - DNA, 25 bp, probe
tgagggaaataagcaaagagggcaa

SEQ ID NO: 268835 - DNA, 25 bp, probe
tgagggaaaatctgaccataagaaa

SEQ ID NO: 268836 - DNA, 25 bp, probe
tacggagtaactgtccaaaagccat

SEQ ID NO: 268837 - DNA, 25 bp, probe
tactgaggtaacttccacgtagccc

SEQ ID NO: 268838 - DNA, 25 bp, probe
tgttgaggtacctccaaggaccggc

SEQ ID NO: 268839 - DNA, 25 bp, probe
tgttggagtgcactgtgccctaggc

SEQ ID NO: 268840 - DNA, 25 bp, probe
tgttccagcttggactcatgaagga

SEQ ID NO: 268841 - DNA, 25 bp, probe
tgttagcgtttgactctagaaatca

SEQ ID NO: 268842 - DNA, 25 bp, probe
tgttagcgtttgactctagaaatca

SEQ ID NO: 268843 - DNA, 25 bp, probe
tgttagagttatccctgcaggagtc

SEQ ID NO: 268844 - DNA, 25 bp, probe
tgttatgaagtccctctatgtcgtc

SEQ ID NO: 268845 - DNA, 25 bp, probe
tgttataacacacccatggctcgtg

SEQ ID NO: 268846 - DNA, 25 bp, probe
tgttataacacacccatggctcgtg

SEQ ID NO: 268847 - DNA, 25 bp, probe
tgttatcaccaacacagtgcttgat

SEQ ID NO: 268848 - DNA, 25 bp, probe
tgctaatcactacaggaattttaca

SEQ ID NO: 268849 - DNA, 25 bp, probe
tgcacttcccaattgggattttaca

SEQ ID NO: 268850 - DNA, 25 bp, probe
tgatcccagataagtgtgtgtttta

SEQ ID NO: 268851 - DNA, 25 bp, probe
tgatcccaaggcatatttctcctag

SEQ ID NO: 268852 - DNA, 25 bp, probe
tgatccaaaggacctgaccttcttg

SEQ ID NO: 268853 - DNA, 25 bp, probe
tgaccaaggaggactacgtcgatct

SEQ ID NO: 268854 - DNA, 25 bp, probe
tgatccaggaggtaatccgtcacct

SEQ ID NO: 268855 - DNA, 25 bp, probe
tgaggcgggtgtccaccagtacatt

SEQ ID NO: 268856 - DNA, 25 bp, probe
tgaggttcaggagaccggcctgttc

SEQ ID NO: 268857 - DNA, 25 bp, probe
tgagtgtttaggaacctgccctttg

SEQ ID NO: 268858 - DNA, 25 bp, probe
tgagtctttacaaaatagccagtta

SEQ ID NO: 268859 - DNA, 25 bp, probe
tgttgtttctataaatgactattgt

SEQ ID NO: 268860 - DNA, 25 bp, probe
tgttgagtttgtgcagtgagttttc

SEQ ID NO: 268861 - DNA, 25 bp, probe
tgttgagtttgtgcagtgagttttc

SEQ ID NO: 268862 - DNA, 25 bp, probe
tgatggggttgtgggcatgggcttc

SEQ ID NO: 268863 - DNA, 25 bp, probe
tgatggcctttggggagcggcctta

SEQ ID NO: 268864 - DNA, 25 bp, probe
tgagaggccttgtctaactgccttt

SEQ ID NO: 268865 - DNA, 25 bp, probe
tgataggccatttgcagacactgag

SEQ ID NO: 268866 - DNA, 25 bp, probe
tgatctgggcatatggggctgggat

SEQ ID NO: 268867 - DNA, 25 bp, probe
tgatcggcatggagctggtctccgt

SEQ ID NO: 268868 - DNA, 25 bp, probe
tgactgaagtcggctttcccgttga

SEQ ID NO: 268869 - DNA, 25 bp, probe
tgttgaagctcggtgtaccgcggga

SEQ ID NO: 268870 - DNA, 25 bp, probe
tgttgaagctcggtgtaccgcggga

SEQ ID NO: 268871 - DNA, 25 bp, probe
tgattgaagtagggggagtgcggga

SEQ ID NO: 268872 - DNA, 25 bp, probe
tgattgaagtagggggagtgcggga

SEQ ID NO: 268873 - DNA, 25 bp, probe
tgagttagtgacagggtggcagtcc

SEQ ID NO: 268874 - DNA, 25 bp, probe
tgacgtaggacatgtgcttggtaca

SEQ ID NO: 268875 - DNA, 25 bp, probe
tgatcgttggaatttggtcatctac

SEQ ID NO: 268876 - DNA, 25 bp, probe
tgattggtggagtttgggtgctgtc

SEQ ID NO: 268877 - DNA, 25 bp, probe
tgttgggagagtctttgtgttgggg

SEQ ID NO: 268878 - DNA, 25 bp, probe
tcactggggattctttcttttggtc

SEQ ID NO: 268879 - DNA, 25 bp, probe
tgcctggcctgtctatatttttaaa

SEQ ID NO: 268880 - DNA, 25 bp, probe
tgttggtttccttgtttcttcacaa

SEQ ID NO: 268881 - DNA, 25 bp, probe
tgttgagttgacgggttccttgaac

SEQ ID NO: 268882 - DNA, 25 bp, probe
tgatttttgacaaggttcccaagac

SEQ ID NO: 268883 - DNA, 25 bp, probe
tgatttttacccctgctttgaagat

SEQ ID NO: 268884 - DNA, 25 bp, probe
tgatgtttggaagattgtttgaatt

SEQ ID NO: 268885 - DNA, 25 bp, probe
tgatcttatggaactctttagaatt

SEQ ID NO: 268886 - DNA, 25 bp, probe
tgatctataccaccttcaatatcga

SEQ ID NO: 268887 - DNA, 25 bp, probe
tgatgccaacctcttacgtgcgcct

SEQ ID NO: 268888 - DNA, 25 bp, probe
tgatgctcaaggaaatctaccaccc

SEQ ID NO: 268889 - DNA, 25 bp, probe
tgatgctaggaagatgtccctcccc

SEQ ID NO: 268890 - DNA, 25 bp, probe
tgataaggaagcagggcctaccacc

SEQ ID NO: 268891 - DNA, 25 bp, probe
tgttcaggaagctggtcctgtccag

SEQ ID NO: 268892 - DNA, 25 bp, probe
tgttgagagaacgtccttctgtcca

SEQ ID NO: 268893 - DNA, 25 bp, probe
tgagatcagggagcccacgttcaca

SEQ ID NO: 268894 - DNA, 25 bp, probe
tgagatcagggagcccacgttcaca

SEQ ID NO: 268895 - DNA, 25 bp, probe
taatgacggactctgggttccggga

SEQ ID NO: 268896 - DNA, 25 bp, probe
tatggacactaccacgggtttgggg

SEQ ID NO: 268897 - DNA, 25 bp, probe
tgaggacattcgtccggaaaagggg

SEQ ID NO: 268898 - DNA, 25 bp, probe
tgagtttttatggggctgaacgggg

SEQ ID NO: 268899 - DNA, 25 bp, probe
tgagtttcttgggcaggttgaggag

SEQ ID NO: 268900 - DNA, 25 bp, probe
tgattcttttgcccacacttgggag

SEQ ID NO: 268901 - DNA, 25 bp, probe
tatgtgttcggccccaatggggggt

SEQ ID NO: 268902 - DNA, 25 bp, probe
tatgtgttcggccccaatggggggt

SEQ ID NO: 268903 - DNA, 25 bp, probe
tagctttaagcaccctagaggacta

SEQ ID NO: 268904 - DNA, 25 bp, probe
tgactactatacagactacgtggct

SEQ ID NO: 268905 - DNA, 25 bp, probe
tgaccccaacagacctacgggttgt

SEQ ID NO: 268906 - DNA, 25 bp, probe
tgaccccaacagacctacgggttgt

SEQ ID NO: 268907 - DNA, 25 bp, probe
tgaggctccccagcctaaggaggag

SEQ ID NO: 268908 - DNA, 25 bp, probe
tgaggctccccagcctaaggaggag

SEQ ID NO: 268909 - DNA, 25 bp, probe
tgttgctgccaggagacttggggag

SEQ ID NO: 268910 - DNA, 25 bp, probe
tgatatatgccacaatgtttgggga

SEQ ID NO: 268911 - DNA, 25 bp, probe
tgagaactcatcgaaactggggaac

SEQ ID NO: 268912 - DNA, 25 bp, probe
tgagaagtatcggcgtctgggggag

SEQ ID NO: 268913 - DNA, 25 bp, probe
tgatatttacagctttggtgtggtt

SEQ ID NO: 268914 - DNA, 25 bp, probe
tgcttttaagttatggcaattatga

SEQ ID NO: 268915 - DNA, 25 bp, probe
tgttgtccaattgttgacagttctg

SEQ ID NO: 268916 - DNA, 25 bp, probe
tgatagtcctttttccaatgtttta

SEQ ID NO: 268917 - DNA, 25 bp, probe
tgataggctgtttgttcctcatcat

SEQ ID NO: 268918 - DNA, 25 bp, probe
tgttggtgtatggttcagctctcag

SEQ ID NO: 268919 - DNA, 25 bp, probe
tgttgtgtgctcacgtgccacacag

SEQ ID NO: 268920 - DNA, 25 bp, probe
tgttctgtccagtttccaaagggca

SEQ ID NO: 268921 - DNA, 25 bp, probe
tgattatgtaactcccagggtgctg

SEQ ID NO: 268922 - DNA, 25 bp, probe
tgttgactgacgagccgaggggtgg

SEQ ID NO: 268923 - DNA, 25 bp, probe
tgataacttcgaagccatagggtgg

SEQ ID NO: 268924 - DNA, 25 bp, probe
tgatttctacacagccacggaaggg

SEQ ID NO: 268925 - DNA, 25 bp, probe
tgatttctacacagccacggaaggg

SEQ ID NO: 268926 - DNA, 25 bp, probe
tgaccttcctccgcacggagggggc

SEQ ID NO: 268927 - DNA, 25 bp, probe
tgactctttcctcacagggaaggcg

SEQ ID NO: 268928 - DNA, 25 bp, probe
tgacttatgtacccagaaagaaggc

SEQ ID NO: 268929 - DNA, 25 bp, probe
tgagcttcatgtcaaaacggaaggc

SEQ ID NO: 268930 - DNA, 25 bp, probe
tacggcttttaatgcgggagctgcg

SEQ ID NO: 268931 - DNA, 25 bp, probe
tacgtctatttaaggctaggagccg

SEQ ID NO: 268932 - DNA, 25 bp, probe
tgacggtttaatgggcacagggttt

SEQ ID NO: 268933 - DNA, 25 bp, probe
tgagggctttaactgggaaggctta

SEQ ID NO: 268934 - DNA, 25 bp, probe
tgagaagcttggagctgggcaaacg

SEQ ID NO: 268935 - DNA, 25 bp, probe
tgatgacggaggagtagccggccag

SEQ ID NO: 268936 - DNA, 25 bp, probe
tgattcggaggtcggtcaatggcac

SEQ ID NO: 268937 - DNA, 25 bp, probe
tgttgcccaggctggtcttgaactc

SEQ ID NO: 268938 - DNA, 25 bp, probe
tgttggccaggctggtctcgaactc

SEQ ID NO: 268939 - DNA, 25 bp, probe
tgttggccaggctggtctcgaactc

SEQ ID NO: 268940 - DNA, 25 bp, probe
tgttcccaccatgagtctggaggcc

SEQ ID NO: 268941 - DNA, 25 bp, probe
tgttcccactcaatacgctggagtc

SEQ ID NO: 268942 - DNA, 25 bp, probe
tgataactactgacttcactggagt

SEQ ID NO: 268943 - DNA, 25 bp, probe
tgattacacctcatccatcgatgtt

SEQ ID NO: 268944 - DNA, 25 bp, probe
tgttgaccacacaattcttgatgac

SEQ ID NO: 268945 - DNA, 25 bp, probe
tgttggccaggatgatctcgatctc

SEQ ID NO: 268946 - DNA, 25 bp, probe
tgattatccggtggctttagccgtg

SEQ ID NO: 268947 - DNA, 25 bp, probe
tgacaatcatttttcttaaggcctg

SEQ ID NO: 268948 - DNA, 25 bp, probe
taattcttttgtctgaaggggaaag

SEQ ID NO: 268949 - DNA, 25 bp, probe
taatgtctttaaaggcaaagggaag

SEQ ID NO: 268950 - DNA, 25 bp, probe
tagaagcggtagaggcccgggaagc

SEQ ID NO: 268951 - DNA, 25 bp, probe
tgaggtggggagaggcaacagggca

SEQ ID NO: 268952 - DNA, 25 bp, probe
tgaggggctcactttggagccactg

SEQ ID NO: 268953 - DNA, 25 bp, probe
tgaggggtctcggatgacaccctgg

SEQ ID NO: 268954 - DNA, 25 bp, probe
tgatgggttggggcagttacctggt

SEQ ID NO: 268955 - DNA, 25 bp, probe
tgatgaagtttgcggagaaggcggt

SEQ ID NO: 268956 - DNA, 25 bp, probe
tgatcaagggtgtggttagtggagg

SEQ ID NO: 268957 - DNA, 25 bp, probe
tgatcaggggtgctggttttggttt

SEQ ID NO: 268958 - DNA, 25 bp, probe
tgatagtttgtcctgtgtccttagt

SEQ ID NO: 268959 - DNA, 25 bp, probe
tgataattcagtccttgcctttgaa

SEQ ID NO: 268960 - DNA, 25 bp, probe
tgatgtttcacgcagtccattttca

SEQ ID NO: 268961 - DNA, 25 bp, probe
tgaatgtacaagggttttgttacca

SEQ ID NO: 268962 - DNA, 25 bp, probe
tgaatgtacaagggttttgttacca

SEQ ID NO: 268963 - DNA, 25 bp, probe
tgatattgaacaggctttttgtttc

SEQ ID NO: 268964 - DNA, 25 bp, probe
tgaatttgaaggttttgagtatatc

SEQ ID NO: 268965 - DNA, 25 bp, probe
tgattttgaagggttctcgtatgtc

SEQ ID NO: 268966 - DNA, 25 bp, probe
tgattattaaatagtcactagtatt

SEQ ID NO: 268967 - DNA, 25 bp, probe
tgttgttaactcacacatcaccatt

SEQ ID NO: 268968 - DNA, 25 bp, probe
tgttgtgtgaaactcactccacaaa

SEQ ID NO: 268969 - DNA, 25 bp, probe
tgttgtgctaaactcaataatgctg

SEQ ID NO: 268970 - DNA, 25 bp, probe
tgttgtgtgcattagaaatcagttg

SEQ ID NO: 268971 - DNA, 25 bp, probe
tgttgtgtgcattagaaatcagttg

SEQ ID NO: 268972 - DNA, 25 bp, probe
tgttcatgtacatgagaccagcttc

SEQ ID NO: 268973 - DNA, 25 bp, probe
tgttcatttatgtagatgccacttt

SEQ ID NO: 268974 - DNA, 25 bp, probe
tgttcatttatgtagatgccacttt

SEQ ID NO: 268975 - DNA, 25 bp, probe
tgttcatttgtatctggatctctgt

SEQ ID NO: 268976 - DNA, 25 bp, probe
tgattcatcttttcctggaatttct

SEQ ID NO: 268977 - DNA, 25 bp, probe
tgttctctgtattgtctattattta

SEQ ID NO: 268978 - DNA, 25 bp, probe
tgttcctgtcaatcaatggtttatt

SEQ ID NO: 268979 - DNA, 25 bp, probe
tgctgttttaggtaaggtgtttctc

SEQ ID NO: 268980 - DNA, 25 bp, probe
tgaggttgggattaaggtagtgttc

SEQ ID NO: 268981 - DNA, 25 bp, probe
tgatgttagcgtataaattagtgtt

SEQ ID NO: 268982 - DNA, 25 bp, probe
tgagcccagagtgaacactcttggt

SEQ ID NO: 268983 - DNA, 25 bp, probe
tgatgacctgagacaagatgctgtc

SEQ ID NO: 268984 - DNA, 25 bp, probe
tgatcacattcattccataggtagc

SEQ ID NO: 268985 - DNA, 25 bp, probe
tgatcacattcattccataggtagc

SEQ ID NO: 268986 - DNA, 25 bp, probe
tgatctctctgaatcctaagggctg

SEQ ID NO: 268987 - DNA, 25 bp, probe
tgatctcggtgacctacactgtcat

SEQ ID NO: 268988 - DNA, 25 bp, probe
tgatcatcaggagcctgtactgcct

SEQ ID NO: 268989 - DNA, 25 bp, probe
tgatcataagcagcaactaccagtt

SEQ ID NO: 268990 - DNA, 25 bp, probe
tgatcatcaccagctactgctacag

SEQ ID NO: 268991 - DNA, 25 bp, probe
tgatatgtgcaccaatacctactga

SEQ ID NO: 268992 - DNA, 25 bp, probe
tgttgagtctgccattcgtagctga

SEQ ID NO: 268993 - DNA, 25 bp, probe
tgttgatgtagccaagttcacatca

SEQ ID NO: 268994 - DNA, 25 bp, probe
tgattaatagtcttattgacatcat

SEQ ID NO: 268995 - DNA, 25 bp, probe
tgatttgtagcttcatatatgacat

SEQ ID NO: 268996 - DNA, 25 bp, probe
tgatctgatgcttcttcaactgcgt

SEQ ID NO: 268997 - DNA, 25 bp, probe
tgatgctttcagatccatcggttta

SEQ ID NO: 268998 - DNA, 25 bp, probe
tgatttctagctgccatggtggtta

SEQ ID NO: 268999 - DNA, 25 bp, probe
tgatttctagctgccatggtggtta

SEQ ID NO: 269000 - DNA, 25 bp, probe
tgttctgcaggtgagaggatttaaa

SEQ ID NO: 269001 - DNA, 25 bp, probe
tgttgctagatgaaaatggagttct

SEQ ID NO: 269002 - DNA, 25 bp, probe
tgttgctatggttactgctgagggt

SEQ ID NO: 269003 - DNA, 25 bp, probe
tgttgagtgcactgactgtgaaacc

SEQ ID NO: 269004 - DNA, 25 bp, probe
tgttgcagtgcattgcgttgtggaa

SEQ ID NO: 269005 - DNA, 25 bp, probe
tgttgcagtcagcaggtgtgggctt

SEQ ID NO: 269006 - DNA, 25 bp, probe
tgatggcagtcacagggggcctgtg

SEQ ID NO: 269007 - DNA, 25 bp, probe
tgttcgagaagacgcggctactctg

SEQ ID NO: 269008 - DNA, 25 bp, probe
tgttctgctacgtggagatcctcag

SEQ ID NO: 269009 - DNA, 25 bp, probe
tgatcttctgaggtcggagcttcca

SEQ ID NO: 269010 - DNA, 25 bp, probe
tgattatgtagggcaggtgtctgca

SEQ ID NO: 269011 - DNA, 25 bp, probe
tgttcctgatggccaggcttcacat

SEQ ID NO: 269012 - DNA, 25 bp, probe
tgttcttgatgaccagtatgtcagt

SEQ ID NO: 269013 - DNA, 25 bp, probe
tgattctcttgtccaggcatcagag

SEQ ID NO: 269014 - DNA, 25 bp, probe
tgattctcttgtccaggcatcagag

SEQ ID NO: 269015 - DNA, 25 bp, probe
tgatagcattgctttcgtgtaaatt

SEQ ID NO: 269016 - DNA, 25 bp, probe
tgatactggtagttggtgtgaaact

SEQ ID NO: 269017 - DNA, 25 bp, probe
tgatactttgcactgggctgtacga

SEQ ID NO: 269018 - DNA, 25 bp, probe
tgatcatgctgttgctcatggcgat

SEQ ID NO: 269019 - DNA, 25 bp, probe
tgatgcatgtcttcattctgcagac

SEQ ID NO: 269020 - DNA, 25 bp, probe
tgttgctgcctcatgctaagactca

SEQ ID NO: 269021 - DNA, 25 bp, probe
tgatcggcctgcatgaggatgacga

SEQ ID NO: 269022 - DNA, 25 bp, probe
tgatctcacctgttggaatgcacta

SEQ ID NO: 269023 - DNA, 25 bp, probe
tgattggcggattggagatgccacc

SEQ ID NO: 269024 - DNA, 25 bp, probe
tgattgccaagagcggcatctcctc

SEQ ID NO: 269025 - DNA, 25 bp, probe
tgttctgaagcaccgagacacacct

SEQ ID NO: 269026 - DNA, 25 bp, probe
tgttctgaagcaccgagacacacct

SEQ ID NO: 269027 - DNA, 25 bp, probe
tgttgagaatcatggacaaaacctg

SEQ ID NO: 269028 - DNA, 25 bp, probe
tgagtacgtcaagaatgaggacctg

SEQ ID NO: 269029 - DNA, 25 bp, probe
tgatgtcggtcaaccacgaggagct

SEQ ID NO: 269030 - DNA, 25 bp, probe
tgatgccggtgaacgtgcaaaacag

SEQ ID NO: 269031 - DNA, 25 bp, probe
tgatcgccgaggacttcacaatcaa

SEQ ID NO: 269032 - DNA, 25 bp, probe
tgatcgccgaggacttcacaatcaa

SEQ ID NO: 269033 - DNA, 25 bp, probe
tgatggctggtgtgattccaatcca

SEQ ID NO: 269034 - DNA, 25 bp, probe
tgatggccaggctgatctcgaactc

SEQ ID NO: 269035 - DNA, 25 bp, probe
tgttggcagccaactgctccaatct

SEQ ID NO: 269036 - DNA, 25 bp, probe
tgttggcagccaactgctccaatct

SEQ ID NO: 269037 - DNA, 25 bp, probe
tgttgcagcaattcactgtaaagct

SEQ ID NO: 269038 - DNA, 25 bp, probe
tgttgcagcaattcactgtaaagct

SEQ ID NO: 269039 - DNA, 25 bp, probe
tgatcaggcaattcggtcaattgtc

SEQ ID NO: 269040 - DNA, 25 bp, probe
tgatcaggcaattcggtcaattgtc

SEQ ID NO: 269041 - DNA, 25 bp, probe
tgatcatggctttgctttatatctt

SEQ ID NO: 269042 - DNA, 25 bp, probe
tgatcgatgctgctccagtaactac

SEQ ID NO: 269043 - DNA, 25 bp, probe
tgattatgccaagctgataactact

SEQ ID NO: 269044 - DNA, 25 bp, probe
tgatccgccaagtcttggacgccgt

SEQ ID NO: 269045 - DNA, 25 bp, probe
tgatccggggtgactggaaccgggg

SEQ ID NO: 269046 - DNA, 25 bp, probe
tgatccggggtgactggaaccgggg

SEQ ID NO: 269047 - DNA, 25 bp, probe
tgatccggggtgactggaaccgggg

SEQ ID NO: 269048 - DNA, 25 bp, probe
ttcactgtaaagctggaaagggacg

SEQ ID NO: 269049 - DNA, 25 bp, probe
tgatccagtaacctcggagacggga

SEQ ID NO: 269050 - DNA, 25 bp, probe
tgattagatcgggtctcggaaggga

SEQ ID NO: 269051 - DNA, 25 bp, probe
tgttcgactggaacctggagcaggc

SEQ ID NO: 269052 - DNA, 25 bp, probe
tgagaggcagtcttccttggcaagg

SEQ ID NO: 269053 - DNA, 25 bp, probe
tgagagggttcctttctctagggaa

SEQ ID NO: 269054 - DNA, 25 bp, probe
tgagagggttcctttctctagggaa

SEQ ID NO: 269055 - DNA, 25 bp, probe
tgaaagtggtttagtgctagaagga

SEQ ID NO: 269056 - DNA, 25 bp, probe
tgatacatgcatcgtttctggctgg

SEQ ID NO: 269057 - DNA, 25 bp, probe
tgataatgcatgatgcctcttccag

SEQ ID NO: 269058 - DNA, 25 bp, probe
tgataatgacattgcactggtgcgg

SEQ ID NO: 269059 - DNA, 25 bp, probe
tgatgacgatcatcacacctcgtgt

SEQ ID NO: 269060 - DNA, 25 bp, probe
tgatgacgatcatcacacctcgtgt

SEQ ID NO: 269061 - DNA, 25 bp, probe
tgataaatgatggcacctcctgtgg

SEQ ID NO: 269062 - DNA, 25 bp, probe
tgataaatgatggcacctcctgtgg

SEQ ID NO: 269063 - DNA, 25 bp, probe
tgattcagtatggaccccttccaat

SEQ ID NO: 269064 - DNA, 25 bp, probe
tgattgagagagcagccacctacca

SEQ ID NO: 269065 - DNA, 25 bp, probe
tgatcgaggatgctcgacacccaca

SEQ ID NO: 269066 - DNA, 25 bp, probe
tgatcaactctaacaactcatccaa

SEQ ID NO: 269067 - DNA, 25 bp, probe
tgatatgtccacagcagagcttaca

SEQ ID NO: 269068 - DNA, 25 bp, probe
tgttgctgccactgaacctggcaaa

SEQ ID NO: 269069 - DNA, 25 bp, probe
tgttccccactgtatctaggcaaca

SEQ ID NO: 269070 - DNA, 25 bp, probe
tgttccccactgtatctaggcaaca

SEQ ID NO: 269071 - DNA, 25 bp, probe
tgttccccaagtactgagacttgcc

SEQ ID NO: 269072 - DNA, 25 bp, probe
tgttccccaagtactgagacttgcc

SEQ ID NO: 269073 - DNA, 25 bp, probe
tgttccttcaagatcatgtacccca

SEQ ID NO: 269074 - DNA, 25 bp, probe
tgttccttcaagatcatgtacccca

SEQ ID NO: 269075 - DNA, 25 bp, probe
tgttcctgtcagtcattgagtatgc

SEQ ID NO: 269076 - DNA, 25 bp, probe
tgttggctgtgctcatggcagctac

SEQ ID NO: 269077 - DNA, 25 bp, probe
tgttgcctgcctcatggcagttgga

SEQ ID NO: 269078 - DNA, 25 bp, probe
tgttgcaccttgtagtggattctgc

SEQ ID NO: 269079 - DNA, 25 bp, probe
tgttgacacatttcctggtgctcca

SEQ ID NO: 269080 - DNA, 25 bp, probe
tgttgacactgcgagcactcagtcc

SEQ ID NO: 269081 - DNA, 25 bp, probe
tgattgagaccagctgttgtgcctc

SEQ ID NO: 269082 - DNA, 25 bp, probe
tgattggatggagcttctaatgtca

SEQ ID NO: 269083 - DNA, 25 bp, probe
tgattgctcagggactcatctttcc

SEQ ID NO: 269084 - DNA, 25 bp, probe
tgattatctggaggtctcatttctt

SEQ ID NO: 269085 - DNA, 25 bp, probe
tgttgatattggttctatttattta

SEQ ID NO: 269086 - DNA, 25 bp, probe
tgattttctgggacaaacaattgta

SEQ ID NO: 269087 - DNA, 25 bp, probe
tgatgcttttggacataaatctaat

SEQ ID NO: 269088 - DNA, 25 bp, probe
tgacctgtgcatctgcatcaacagc

SEQ ID NO: 269089 - DNA, 25 bp, probe
tgactgctgctacatgctagactgc

SEQ ID NO: 269090 - DNA, 25 bp, probe
tgactgctgctacatgctagactgc

SEQ ID NO: 269091 - DNA, 25 bp, probe
tgattctgctgctaattaagtcaat

SEQ ID NO: 269092 - DNA, 25 bp, probe
tgatatctgtgttcatctaaaccgg

SEQ ID NO: 269093 - DNA, 25 bp, probe
tgatgatcagtttatcatacccccg

SEQ ID NO: 269094 - DNA, 25 bp, probe
tgattcagatgtacatccccagcct

SEQ ID NO: 269095 - DNA, 25 bp, probe
tgattactgtcaaaccagcatggtt

SEQ ID NO: 269096 - DNA, 25 bp, probe
tgattcacatgctaaagccaggatt

SEQ ID NO: 269097 - DNA, 25 bp, probe
tgttgatcatgctgttgctcatggc

SEQ ID NO: 269098 - DNA, 25 bp, probe
tgatagtgcacgctctgatcagggg

SEQ ID NO: 269099 - DNA, 25 bp, probe
tgttgtgagatgcctgtgtcagaag

SEQ ID NO: 269100 - DNA, 25 bp, probe
tgttgcagcaacctgtgacaggatc

SEQ ID NO: 269101 - DNA, 25 bp, probe
tgatgtgcatggactcattgaagta

SEQ ID NO: 269102 - DNA, 25 bp, probe
tgttggagactctgattgtcatgcc

SEQ ID NO: 269103 - DNA, 25 bp, probe
tgttggtacatatgatgatttccat

SEQ ID NO: 269104 - DNA, 25 bp, probe
tgttggaatgcactaatgttttctg

SEQ ID NO: 269105 - DNA, 25 bp, probe
tgttggaatgagtatgtgattcttt

SEQ ID NO: 269106 - DNA, 25 bp, probe
tgttgatgtgataatttgatttgga

SEQ ID NO: 269107 - DNA, 25 bp, probe
tgttgagtttcattgcataccggat

SEQ ID NO: 269108 - DNA, 25 bp, probe
tgttgagctgttcactcatccagga

SEQ ID NO: 269109 - DNA, 25 bp, probe
tgttgagctgttcactcatccagga

SEQ ID NO: 269110 - DNA, 25 bp, probe
tgttgactttgtttcatactgccaa

SEQ ID NO: 269111 - DNA, 25 bp, probe
tgattgactccgttattccgaaagg

SEQ ID NO: 269112 - DNA, 25 bp, probe
tgatctacacccgtttcttaaaagg

SEQ ID NO: 269113 - DNA, 25 bp, probe
tgatgccacacgggtcattttaaaa

SEQ ID NO: 269114 - DNA, 25 bp, probe
tgatcatcaccgagttcattgagaa

SEQ ID NO: 269115 - DNA, 25 bp, probe
tgttgccagctacgtcctggaacac

SEQ ID NO: 269116 - DNA, 25 bp, probe
tgttgccacaaacactgcagagacc

SEQ ID NO: 269117 - DNA, 25 bp, probe
tgattccagaaacatatgggctgat

SEQ ID NO: 269118 - DNA, 25 bp, probe
tgatctgggtaccaatatttctgca

SEQ ID NO: 269119 - DNA, 25 bp, probe
tgatcgtggctgtcaaatttagtga

SEQ ID NO: 269120 - DNA, 25 bp, probe
tgatcgtggctgtcaaatttagtga

SEQ ID NO: 269121 - DNA, 25 bp, probe
tgttgcttgcttcaatttctgtgcc

SEQ ID NO: 269122 - DNA, 25 bp, probe
tgttgcttgcttcaatttctgtgcc

SEQ ID NO: 269123 - DNA, 25 bp, probe
tgatgtgccgctggctgaactttgg

SEQ ID NO: 269124 - DNA, 25 bp, probe
tgttgcacgcctgggcaatttcagc

SEQ ID NO: 269125 - DNA, 25 bp, probe
tgattaagcctgctcatttccactt

SEQ ID NO: 269126 - DNA, 25 bp, probe
tgataaatgccaaacatgttgtcac

SEQ ID NO: 269127 - DNA, 25 bp, probe
tgatagtactcaaccataattaaag

SEQ ID NO: 269128 - DNA, 25 bp, probe
tgagcagtacttacctatattcagt

SEQ ID NO: 269129 - DNA, 25 bp, probe
tgagcagtacttacctatattcagt

SEQ ID NO: 269130 - DNA, 25 bp, probe
tgagtgccctttgctattctcagat

SEQ ID NO: 269131 - DNA, 25 bp, probe
tgagatccctaatttcaactggccc

SEQ ID NO: 269132 - DNA, 25 bp, probe
tgagatccctaatttcaactggccc

SEQ ID NO: 269133 - DNA, 25 bp, probe
tgagatccctaatttcaactggccc

SEQ ID NO: 269134 - DNA, 25 bp, probe
tgagccccttaaatatcttgtctac

SEQ ID NO: 269135 - DNA, 25 bp, probe
tgaggccttggatgaacttgcttca

SEQ ID NO: 269136 - DNA, 25 bp, probe
tgatcccgatgttagaaatggttcc

SEQ ID NO: 269137 - DNA, 25 bp, probe
tgatcgcccgataaagacggattct

SEQ ID NO: 269138 - DNA, 25 bp, probe
tgacgtccgtgggacctagactcta

SEQ ID NO: 269139 - DNA, 25 bp, probe
tgacgtccgtgggacctagactcta

SEQ ID NO: 269140 - DNA, 25 bp, probe
taagccctggggccctgaaatgggg

SEQ ID NO: 269141 - DNA, 25 bp, probe
taagccctggggccctgaaatgggg

SEQ ID NO: 269142 - DNA, 25 bp, probe
tgatagaagtcgggccctgaaaagg

SEQ ID NO: 269143 - DNA, 25 bp, probe
tgatacaagattctgcacctcaaag

SEQ ID NO: 269144 - DNA, 25 bp, probe
tgatctccaagtctcaacatcctat

SEQ ID NO: 269145 - DNA, 25 bp, probe
tgatttcatcatcttattcacctca

SEQ ID NO: 269146 - DNA, 25 bp, probe
tgatttgcagctcatgttccatgcc

SEQ ID NO: 269147 - DNA, 25 bp, probe
tgagaatcagatcgagtccaaggca

SEQ ID NO: 269148 - DNA, 25 bp, probe
tgataaattgggtcacagaggcaga

SEQ ID NO: 269149 - DNA, 25 bp, probe
tgatagaggtggctacagacgcacc

SEQ ID NO: 269150 - DNA, 25 bp, probe
tgatgtgtggggctgtcaacaacct

SEQ ID NO: 269151 - DNA, 25 bp, probe
tgatgtgtggggctgtcaacaacct

SEQ ID NO: 269152 - DNA, 25 bp, probe
tgagggtggtgacacaaccccttcc

SEQ ID NO: 269153 - DNA, 25 bp, probe
tgagaagatggtcaactacctggtc

SEQ ID NO: 269154 - DNA, 25 bp, probe
tgatgatccgaataactacctgttt

SEQ ID NO: 269155 - DNA, 25 bp, probe
tgagacgctgaacaacatcctggcc

SEQ ID NO: 269156 - DNA, 25 bp, probe
tgatccgtaactgcaactgtggcca

SEQ ID NO: 269157 - DNA, 25 bp, probe
tgatcgctataactgccctttaggc

SEQ ID NO: 269158 - DNA, 25 bp, probe
tgattctcagtttactaatgaacct

SEQ ID NO: 269159 - DNA, 25 bp, probe
tgatctctcgtgattgataagaacc

SEQ ID NO: 269160 - DNA, 25 bp, probe
tgatctctcgtgattgataagaacc

SEQ ID NO: 269161 - DNA, 25 bp, probe
tgactgtccttgtctatgccagaat

SEQ ID NO: 269162 - DNA, 25 bp, probe
tgaggcctgcttcacaacagacatt

SEQ ID NO: 269163 - DNA, 25 bp, probe
tcgacctttccagagcgacgtttta

SEQ ID NO: 269164 - DNA, 25 bp, probe
tccacccttgtcggttgaggtattt

SEQ ID NO: 269165 - DNA, 25 bp, probe
tccggcctttcgtggaggtgactat

SEQ ID NO: 269166 - DNA, 25 bp, probe
tcctggactttctcagaaggtgttt

SEQ ID NO: 269167 - DNA, 25 bp, probe
tcgggacgtgtatgagacagactat

SEQ ID NO: 269168 - DNA, 25 bp, probe
tgaggggcggaagatgaagatttcg

SEQ ID NO: 269169 - DNA, 25 bp, probe
tgagggcatgggtaaaaatatttct

SEQ ID NO: 269170 - DNA, 25 bp, probe
tgcagaggaaaggggaataatctta

SEQ ID NO: 269171 - DNA, 25 bp, probe
tgatgggactactggaatcaggctt

SEQ ID NO: 269172 - DNA, 25 bp, probe
tgatggacaccagcggcaatgggaa

SEQ ID NO: 269173 - DNA, 25 bp, probe
tgatggacaccagcggcaatgggaa

SEQ ID NO: 269174 - DNA, 25 bp, probe
tgatcaacccagagacgggcgagca

SEQ ID NO: 269175 - DNA, 25 bp, probe
tgagtacgactgggccgggaagccc

SEQ ID NO: 269176 - DNA, 25 bp, probe
tgagttaaaaagcctgagaaaccaa

SEQ ID NO: 269177 - DNA, 25 bp, probe
tgactgccaccgtaggggaaaccaa

SEQ ID NO: 269178 - DNA, 25 bp, probe
tgagctccctggagcggcggaagtc

SEQ ID NO: 269179 - DNA, 25 bp, probe
tgagatcccagggggccagtacacc

SEQ ID NO: 269180 - DNA, 25 bp, probe
tgatatcccaagttggaagggaccc

SEQ ID NO: 269181 - DNA, 25 bp, probe
tgattccccatgagcgggtggtcac

SEQ ID NO: 269182 - DNA, 25 bp, probe
tgatgcccctagagctgaggctgga

SEQ ID NO: 269183 - DNA, 25 bp, probe
tgatctcccccaactagactggagc

SEQ ID NO: 269184 - DNA, 25 bp, probe
tgatctcccccaactagactggagc

SEQ ID NO: 269185 - DNA, 25 bp, probe
tgatcccgaacagctgaacagtaac

SEQ ID NO: 269186 - DNA, 25 bp, probe
tgattcggaggctttgcaggcaaaa

SEQ ID NO: 269187 - DNA, 25 bp, probe
tgatttccaggcttctcagatacca

SEQ ID NO: 269188 - DNA, 25 bp, probe
tgatttccagcggtccacattagag

SEQ ID NO: 269189 - DNA, 25 bp, probe
tgatcatcttcagggcccacaaaaa

SEQ ID NO: 269190 - DNA, 25 bp, probe
tgatgccatctcggggccaacaaaa

SEQ ID NO: 269191 - DNA, 25 bp, probe
tgatgccaatcagaagctccaaatt

SEQ ID NO: 269192 - DNA, 25 bp, probe
tgatgccaatcagaagctccaaatt

SEQ ID NO: 269193 - DNA, 25 bp, probe
tgatgcctgacagtatattctccac

SEQ ID NO: 269194 - DNA, 25 bp, probe
tgacctcatgaaatgagttgcagca

SEQ ID NO: 269195 - DNA, 25 bp, probe
tgatgactcttcaaggattagaata

SEQ ID NO: 269196 - DNA, 25 bp, probe
tgatgatccattaagtaaacaataa

SEQ ID NO: 269197 - DNA, 25 bp, probe
tgatgaccagtatgtcagttcagtc

SEQ ID NO: 269198 - DNA, 25 bp, probe
tgattacagttgctgagcttgcagg

SEQ ID NO: 269199 - DNA, 25 bp, probe
tgttgtgcttgtcctggttattgtc

SEQ ID NO: 269200 - DNA, 25 bp, probe
tgttgatttgtgctggattcctgat

SEQ ID NO: 269201 - DNA, 25 bp, probe
tgattatttctccttggatacagat

SEQ ID NO: 269202 - DNA, 25 bp, probe
tgatattttgtatttggcaactgtg

SEQ ID NO: 269203 - DNA, 25 bp, probe
tgatcatttgatttattgtgcacct

SEQ ID NO: 269204 - DNA, 25 bp, probe
tgatacttgttttcagatccatagc

SEQ ID NO: 269205 - DNA, 25 bp, probe
tgatcacttttgcaggctgcctcac

SEQ ID NO: 269206 - DNA, 25 bp, probe
tgaggctgtgctggaaggagcgccc

SEQ ID NO: 269207 - DNA, 25 bp, probe
tgaggctgtgctggaaggagcgccc

SEQ ID NO: 269208 - DNA, 25 bp, probe
tgaggggcttcacgagaggccacag

SEQ ID NO: 269209 - DNA, 25 bp, probe
tgaggggcttcacgagaggccacag

SEQ ID NO: 269210 - DNA, 25 bp, probe
tgaggccgtgtcattggctcacaaa

SEQ ID NO: 269211 - DNA, 25 bp, probe
tgaggccagctggtattagtaagga

SEQ ID NO: 269212 - DNA, 25 bp, probe
tgaggctgcagtgagttatgatggc

SEQ ID NO: 269213 - DNA, 25 bp, probe
tgatggcgagtggtgctgaagggac

SEQ ID NO: 269214 - DNA, 25 bp, probe
tgaggggtgtttcagactggcggca

SEQ ID NO: 269215 - DNA, 25 bp, probe
tgagggggttgtccagcaacagcag

SEQ ID NO: 269216 - DNA, 25 bp, probe
tgatgggaagtatgccagccccgac

SEQ ID NO: 269217 - DNA, 25 bp, probe
tgattgaggagtcctgctgagccca

SEQ ID NO: 269218 - DNA, 25 bp, probe
tgattgctgcggaccgctacatcac

SEQ ID NO: 269219 - DNA, 25 bp, probe
tgattgctgcggaccgctacatcac

SEQ ID NO: 269220 - DNA, 25 bp, probe
tgatatcgcagcgaccctggagcac

SEQ ID NO: 269221 - DNA, 25 bp, probe
tgagacaggccagcgtgcatgacag

SEQ ID NO: 269222 - DNA, 25 bp, probe
tgagtgcgtggctggggacagacct

SEQ ID NO: 269223 - DNA, 25 bp, probe
tgaggcttgcccaggagcaagtgag

SEQ ID NO: 269224 - DNA, 25 bp, probe
tgaggctggagcccttgaaaggtga

SEQ ID NO: 269225 - DNA, 25 bp, probe
tgatagctggggcttcaccagtctg

SEQ ID NO: 269226 - DNA, 25 bp, probe
tgaaggggcccagaccatgattgaa

SEQ ID NO: 269227 - DNA, 25 bp, probe
tgaagggcccgagaacatggcctaa

SEQ ID NO: 269228 - DNA, 25 bp, probe
tgaggggccggacgagctcggccca

SEQ ID NO: 269229 - DNA, 25 bp, probe
tgatggtgcggggaggaccggcacc

SEQ ID NO: 269230 - DNA, 25 bp, probe
tgatgcagatagggggagggggcac

SEQ ID NO: 269231 - DNA, 25 bp, probe
tgatgtgaatgcgcaggatgcggat

SEQ ID NO: 269232 - DNA, 25 bp, probe
tgatccagatgcccagaggctccat

SEQ ID NO: 269233 - DNA, 25 bp, probe
tgatcacatatcctgtgaactccta

SEQ ID NO: 269234 - DNA, 25 bp, probe
tgatatattgtttacagcctgtgaa

SEQ ID NO: 269235 - DNA, 25 bp, probe
tgagattctgttcagcattcactaa

SEQ ID NO: 269236 - DNA, 25 bp, probe
tgatgatgtcaagtcccagtgcact

SEQ ID NO: 269237 - DNA, 25 bp, probe
tgattgacaagtaccaggctttgat

SEQ ID NO: 269238 - DNA, 25 bp, probe
tgataactctgtacgaggcttctct

SEQ ID NO: 269239 - DNA, 25 bp, probe
tgattgccagtggaggggcttcttc

SEQ ID NO: 269240 - DNA, 25 bp, probe
tgaggctgcttgtggcggattcctc

SEQ ID NO: 269241 - DNA, 25 bp, probe
tgaggctgcttgtggcggattcctc

SEQ ID NO: 269242 - DNA, 25 bp, probe
tgcaggcctaggcaaggtacctctc

SEQ ID NO: 269243 - DNA, 25 bp, probe
tgaggcacggtacggggacctcatc

SEQ ID NO: 269244 - DNA, 25 bp, probe
tgaggctacgcataggggtccatac

SEQ ID NO: 269245 - DNA, 25 bp, probe
tgatggctggcctggacggaccagc

SEQ ID NO: 269246 - DNA, 25 bp, probe
tgatggctggcctggacggaccagc

SEQ ID NO: 269247 - DNA, 25 bp, probe
tgagaatggccgagcactggtcgag

SEQ ID NO: 269248 - DNA, 25 bp, probe
tgagaatggccgagcactggtcgag

SEQ ID NO: 269249 - DNA, 25 bp, probe
tgagacctcgcgagactttcggtcc

SEQ ID NO: 269250 - DNA, 25 bp, probe
taggcctcagtgagtcggccggtca

SEQ ID NO: 269251 - DNA, 25 bp, probe
taggcctcagtgagtcggccggtca

SEQ ID NO: 269252 - DNA, 25 bp, probe
tgaggtaagctgcttcgggggaccc

SEQ ID NO: 269253 - DNA, 25 bp, probe
tgatggggagggtctcggtggtacc

SEQ ID NO: 269254 - DNA, 25 bp, probe
tgatggggagggtctcggtggtacc

SEQ ID NO: 269255 - DNA, 25 bp, probe
tgatgtgaggagaggtgcggggaga

SEQ ID NO: 269256 - DNA, 25 bp, probe
tgatcggaggcacggctggcgtgat

SEQ ID NO: 269257 - DNA, 25 bp, probe
tgatcatgcgggagtgctggcatgc

SEQ ID NO: 269258 - DNA, 25 bp, probe
tgatcagggcagctgctctgtgaca

SEQ ID NO: 269259 - DNA, 25 bp, probe
tgatcagtgttgttgctctaggaag

SEQ ID NO: 269260 - DNA, 25 bp, probe
tgataggattgcctgcttagatgat

SEQ ID NO: 269261 - DNA, 25 bp, probe
tgttggattctgactgctgcacatt

SEQ ID NO: 269262 - DNA, 25 bp, probe
tgatcgtgacctacacgcgcatcta

SEQ ID NO: 269263 - DNA, 25 bp, probe
tgatctgtacctaagctcagtatgc

SEQ ID NO: 269264 - DNA, 25 bp, probe
tgatcagtgagcaggatgtctgtaa

SEQ ID NO: 269265 - DNA, 25 bp, probe
tgatgaagatcaaagttctaagaag

SEQ ID NO: 269266 - DNA, 25 bp, probe
tgataagatcatccgactttatgat

SEQ ID NO: 269267 - DNA, 25 bp, probe
tgattgacacacagcactctctaaa

SEQ ID NO: 269268 - DNA, 25 bp, probe
tgattgacacacagcactctctaaa

SEQ ID NO: 269269 - DNA, 25 bp, probe
tgattgaaaactcccatctaacccc

SEQ ID NO: 269270 - DNA, 25 bp, probe
tgatataaatactctccatttcccc

SEQ ID NO: 269271 - DNA, 25 bp, probe
tgaaaaataaagcaccttctcccta

SEQ ID NO: 269272 - DNA, 25 bp, probe
tacctagagaaacaatttccctcca

SEQ ID NO: 269273 - DNA, 25 bp, probe
taggtataagttcaatgttcccatc

SEQ ID NO: 269274 - DNA, 25 bp, probe
taggtataagttcaatgttcccatc

SEQ ID NO: 269275 - DNA, 25 bp, probe
ttttcaaatgctaaatatggtcgtt

SEQ ID NO: 269276 - DNA, 25 bp, probe
tgagttaaactcaacatggccggtt

SEQ ID NO: 269277 - DNA, 25 bp, probe
tgatttcaaggcgaagctggcggcg

SEQ ID NO: 269278 - DNA, 25 bp, probe
tgattatgcagagcatgacttgtgg

SEQ ID NO: 269279 - DNA, 25 bp, probe
tgattatgcagagcatgacttgtgg

SEQ ID NO: 269280 - DNA, 25 bp, probe
tgattacagtagcactttgggaagt

SEQ ID NO: 269281 - DNA, 25 bp, probe
tgagtacatgctgccctttgaggaa

SEQ ID NO: 269282 - DNA, 25 bp, probe
tgagtattggtcgacctttgggaac

SEQ ID NO: 269283 - DNA, 25 bp, probe
tgagtttgggcttcatggtctgggc

SEQ ID NO: 269284 - DNA, 25 bp, probe
tgagtgtctgtgtcttagacctgca

SEQ ID NO: 269285 - DNA, 25 bp, probe
tgatttctgcaactgaggacctaat

SEQ ID NO: 269286 - DNA, 25 bp, probe
tgatctttcgaagggaaccattctt

SEQ ID NO: 269287 - DNA, 25 bp, probe
tgatgcttgttgaacggtccacttt

SEQ ID NO: 269288 - DNA, 25 bp, probe
tgatcttttactcggcccagatagc

SEQ ID NO: 269289 - DNA, 25 bp, probe
tgatcttttactcggcccagatagc

SEQ ID NO: 269290 - DNA, 25 bp, probe
tgatctttgctgatgtggcccagcc

SEQ ID NO: 269291 - DNA, 25 bp, probe
tgatcttgtggcttatggggacatc

SEQ ID NO: 269292 - DNA, 25 bp, probe
tgatcttgtggcttatggggacatc

SEQ ID NO: 269293 - DNA, 25 bp, probe
tgatgctggattccgaggggcacat

SEQ ID NO: 269294 - DNA, 25 bp, probe
tgatctggcgggcacacagtgcaat

SEQ ID NO: 269295 - DNA, 25 bp, probe
tgatctggcgggcacacagtgcaat

SEQ ID NO: 269296 - DNA, 25 bp, probe
tgatcacagctccaggaccagtgca

SEQ ID NO: 269297 - DNA, 25 bp, probe
tgatcatgatctttggcctactgca

SEQ ID NO: 269298 - DNA, 25 bp, probe
tgatatgtcttatcagctgcctctc

SEQ ID NO: 269299 - DNA, 25 bp, probe
tgatactgcctgacaagtgcctgac

SEQ ID NO: 269300 - DNA, 25 bp, probe
tgatgcttgcctggacatgatgcct

SEQ ID NO: 269301 - DNA, 25 bp, probe
tgatgtctggcttaagtccttagct

SEQ ID NO: 269302 - DNA, 25 bp, probe
tgatgtgtggtagactccctttgct

SEQ ID NO: 269303 - DNA, 25 bp, probe
tgattgtggtttccattgcctatgg

SEQ ID NO: 269304 - DNA, 25 bp, probe
tgattgtggtttccattgcctatgg

SEQ ID NO: 269305 - DNA, 25 bp, probe
tgaggcttgttacattggcacagag

SEQ ID NO: 269306 - DNA, 25 bp, probe
tgatgtggagtggaaatttgcaagg

SEQ ID NO: 269307 - DNA, 25 bp, probe
tgatgtggtaggaaaaatccgcaga

SEQ ID NO: 269308 - DNA, 25 bp, probe
tgatggctggggaacaatgttcaca

SEQ ID NO: 269309 - DNA, 25 bp, probe
tgatggaaggttacaagtggcactt

SEQ ID NO: 269310 - DNA, 25 bp, probe
tgatggaaggttacaagtggcactt

SEQ ID NO: 269311 - DNA, 25 bp, probe
tgaggttttctgatgtgtggacact

SEQ ID NO: 269312 - DNA, 25 bp, probe
tgagaccttccggggatggcatcgg

SEQ ID NO: 269313 - DNA, 25 bp, probe
tgagaccttccggggatggcatcgg

SEQ ID NO: 269314 - DNA, 25 bp, probe
tgagaaatgctcttagggtcttccg

SEQ ID NO: 269315 - DNA, 25 bp, probe
tgattaatgacaggatggggttccc

SEQ ID NO: 269316 - DNA, 25 bp, probe
tgaaaaactcttggggtccccagtg

SEQ ID NO: 269317 - DNA, 25 bp, probe
tgaagaacctcgtgacccacaaagt

SEQ ID NO: 269318 - DNA, 25 bp, probe
tgaggaacctttgctacaagaaatt

SEQ ID NO: 269319 - DNA, 25 bp, probe
taatggacctttccagcaccgaaat

SEQ ID NO: 269320 - DNA, 25 bp, probe
tcaggcaacctagaacccgaatgta

SEQ ID NO: 269321 - DNA, 25 bp, probe
tgaggcacaaaagaaccgcatgact

SEQ ID NO: 269322 - DNA, 25 bp, probe
tgaggactaccatctgaccgaggtg

SEQ ID NO: 269323 - DNA, 25 bp, probe
tgcaggacgggatcccctgtagtga

SEQ ID NO: 269324 - DNA, 25 bp, probe
tgatgggggaacaccactggggaca

SEQ ID NO: 269325 - DNA, 25 bp, probe
tgatgggggaacaccactggggaca

SEQ ID NO: 269326 - DNA, 25 bp, probe
tgagggggggcacccagtggggtgc

SEQ ID NO: 269327 - DNA, 25 bp, probe
tgaggagtgggggggagtgctacgc

SEQ ID NO: 269328 - DNA, 25 bp, probe
tgatgagctatgggccttggcagtg

SEQ ID NO: 269329 - DNA, 25 bp, probe
tgagcagcctgaaccgggagctggt

SEQ ID NO: 269330 - DNA, 25 bp, probe
tgagcgtttcccagaggatggaccc

SEQ ID NO: 269331 - DNA, 25 bp, probe
tgagggtcttcgaggctgtggaaca

SEQ ID NO: 269332 - DNA, 25 bp, probe
tgagggacttctcagaggcagggca

SEQ ID NO: 269333 - DNA, 25 bp, probe
tgagggacttctcagaggcagggca

SEQ ID NO: 269334 - DNA, 25 bp, probe
tgagtgggcaaaatacgacagtaca

SEQ ID NO: 269335 - DNA, 25 bp, probe
tgatggggaacctaccatccgtgca

SEQ ID NO: 269336 - DNA, 25 bp, probe
tgaggaggaatcttacttctccaca

SEQ ID NO: 269337 - DNA, 25 bp, probe
tgaggaggaaccggaggtctgcgag

SEQ ID NO: 269338 - DNA, 25 bp, probe
tgaggaggcgatcaggagggagcta

SEQ ID NO: 269339 - DNA, 25 bp, probe
tgagttgggttgaagcagaggagtc

SEQ ID NO: 269340 - DNA, 25 bp, probe
tgaggtctggtacagcaatgggccg

SEQ ID NO: 269341 - DNA, 25 bp, probe
tgaggtctggtacagcaatgggccg

SEQ ID NO: 269342 - DNA, 25 bp, probe
tgagtttgtgtactggccaagtcga

SEQ ID NO: 269343 - DNA, 25 bp, probe
tgattttattgactgcgtcagggaa

SEQ ID NO: 269344 - DNA, 25 bp, probe
tgagttgttaaccagtcgggagctc

SEQ ID NO: 269345 - DNA, 25 bp, probe
tgatgctataactacgattcgggga

SEQ ID NO: 269346 - DNA, 25 bp, probe
tgatgtgtgcaagtacgacttcgtg

SEQ ID NO: 269347 - DNA, 25 bp, probe
tgatcttgtcaaacaacttcatctg

SEQ ID NO: 269348 - DNA, 25 bp, probe
tgatcttgtcaaacaacttcatctg

SEQ ID NO: 269349 - DNA, 25 bp, probe
tgattttgccatggcacacttccgg

SEQ ID NO: 269350 - DNA, 25 bp, probe
tgattacgtcatccagactactcga

SEQ ID NO: 269351 - DNA, 25 bp, probe
tgatcttcgccaccatgatctacta

SEQ ID NO: 269352 - DNA, 25 bp, probe
tgatcttctgcttaatgcagtttga

SEQ ID NO: 269353 - DNA, 25 bp, probe
tgactccagctatcaggtattaagt

SEQ ID NO: 269354 - DNA, 25 bp, probe
tgaatacactaaggtccttgtggtt

SEQ ID NO: 269355 - DNA, 25 bp, probe
tgagtagcactatgccctttgggga

SEQ ID NO: 269356 - DNA, 25 bp, probe
tgagatggactgtgggtactgggag

SEQ ID NO: 269357 - DNA, 25 bp, probe
tgatgactttggcacgtcacgggat

SEQ ID NO: 269358 - DNA, 25 bp, probe
tgatcaagttgacgacaggaaagga

SEQ ID NO: 269359 - DNA, 25 bp, probe
tgatcatcatggacgtacagaaaca

SEQ ID NO: 269360 - DNA, 25 bp, probe
tgatctgatgggactactggaatca

SEQ ID NO: 269361 - DNA, 25 bp, probe
tgatctcagggctcagtggcaggaa

SEQ ID NO: 269362 - DNA, 25 bp, probe
tgatgctgaggtcccactcgggaaa

SEQ ID NO: 269363 - DNA, 25 bp, probe
tgatgctgaggtcccactcgggaaa

SEQ ID NO: 269364 - DNA, 25 bp, probe
tgatgctgagaggcttgcctccggg

SEQ ID NO: 269365 - DNA, 25 bp, probe
tgatgctgagaggcttgcctccggg

SEQ ID NO: 269366 - DNA, 25 bp, probe
tgatgctggaggcattcctcttggc

SEQ ID NO: 269367 - DNA, 25 bp, probe
tgatctggtggatcagactgaaggc

SEQ ID NO: 269368 - DNA, 25 bp, probe
tgatgctgaccgttggcactaagcc

SEQ ID NO: 269369 - DNA, 25 bp, probe
tgatgctgaccgttggcactaagcc

SEQ ID NO: 269370 - DNA, 25 bp, probe
tgatcgcatacatcatgaccgtcac

SEQ ID NO: 269371 - DNA, 25 bp, probe
tgatgaagattggcagccgagtcct

SEQ ID NO: 269372 - DNA, 25 bp, probe
tgatgcagaagtaagggagcttgtt

SEQ ID NO: 269373 - DNA, 25 bp, probe
tgatgcagaagtaagggagcttgtt

SEQ ID NO: 269374 - DNA, 25 bp, probe
tgaggaaatgcgaaaggttgtatgt

SEQ ID NO: 269375 - DNA, 25 bp, probe
tgagtgcattacccaaggtcgtgtt

SEQ ID NO: 269376 - DNA, 25 bp, probe
tgatgtattcacaaaggcgcctttt

SEQ ID NO: 269377 - DNA, 25 bp, probe
tgatctaatacaaagatgagctctg

SEQ ID NO: 269378 - DNA, 25 bp, probe
tgactatatcacagagaagggccca

SEQ ID NO: 269379 - DNA, 25 bp, probe
tgagatggctacagggaagcctcca

SEQ ID NO: 269380 - DNA, 25 bp, probe
tgaagccttttgtcgttgccttcac

SEQ ID NO: 269381 - DNA, 25 bp, probe
tgaacttatttgtattttcccaatc

SEQ ID NO: 269382 - DNA, 25 bp, probe
tgatcacttttattcttttcctttt

SEQ ID NO: 269383 - DNA, 25 bp, probe
tgatactttatgtctttgctcaccc

SEQ ID NO: 269384 - DNA, 25 bp, probe
tgatttattagtttctctccactct

SEQ ID NO: 269385 - DNA, 25 bp, probe
tgatttattagtttctctccactct

SEQ ID NO: 269386 - DNA, 25 bp, probe
tgatctattccaatgttcttccaag

SEQ ID NO: 269387 - DNA, 25 bp, probe
tgatctattcagctgcttttactgt

SEQ ID NO: 269388 - DNA, 25 bp, probe
tgactaactgagctccttcacttaa

SEQ ID NO: 269389 - DNA, 25 bp, probe
tgactaactgagctccttcacttaa

SEQ ID NO: 269390 - DNA, 25 bp, probe
tgatctttatggctactttcttaca

SEQ ID NO: 269391 - DNA, 25 bp, probe
tgatctttatggctactttcttaca

SEQ ID NO: 269392 - DNA, 25 bp, probe
tgagccttatgggaagtagccttaa

SEQ ID NO: 269393 - DNA, 25 bp, probe
tgacctttggtacatgcctgttaat

SEQ ID NO: 269394 - DNA, 25 bp, probe
tgatccttgttttgttgtcatggaa

SEQ ID NO: 269395 - DNA, 25 bp, probe
tgatacctgcttactttctggaagt

SEQ ID NO: 269396 - DNA, 25 bp, probe
tgatccggtcatatatccaggaagt

SEQ ID NO: 269397 - DNA, 25 bp, probe
tgatctgcagaatgaaactcaagga

SEQ ID NO: 269398 - DNA, 25 bp, probe
tgatcctgaatggcacaggccaagg

SEQ ID NO: 269399 - DNA, 25 bp, probe
tgatcattactggccagcggaccag

SEQ ID NO: 269400 - DNA, 25 bp, probe
tgatatgcacctgcaacggagactc

SEQ ID NO: 269401 - DNA, 25 bp, probe
tgatggcagccagcatttaaactcc

SEQ ID NO: 269402 - DNA, 25 bp, probe
tgatgtgaccctgccaaagaatccc

SEQ ID NO: 269403 - DNA, 25 bp, probe
tgaaacccggaacagattcccgctt

SEQ ID NO: 269404 - DNA, 25 bp, probe
tgaaaaccttaatagttctgcctgc

SEQ ID NO: 269405 - DNA, 25 bp, probe
tgaataatccttgttagagttatcc

SEQ ID NO: 269406 - DNA, 25 bp, probe
tgatttacatttgttaacttctccc

SEQ ID NO: 269407 - DNA, 25 bp, probe
tgatgttactttatgtgaattctca

SEQ ID NO: 269408 - DNA, 25 bp, probe
tgatttactagttggcatattctgc

SEQ ID NO: 269409 - DNA, 25 bp, probe
tgagatgtacttgaggcttttttgt

SEQ ID NO: 269410 - DNA, 25 bp, probe
tgatgggccctatggttttctagag

SEQ ID NO: 269411 - DNA, 25 bp, probe
tgataaccactaagagtctctatta

SEQ ID NO: 269412 - DNA, 25 bp, probe
tgataactcttccatgtttcacatt

SEQ ID NO: 269413 - DNA, 25 bp, probe
tgatttcactaggcatttggcaatt

SEQ ID NO: 269414 - DNA, 25 bp, probe
tgatctctactaccacaaggaaaat

SEQ ID NO: 269415 - DNA, 25 bp, probe
tgatctgtcaaagtatagggaaaac

SEQ ID NO: 269416 - DNA, 25 bp, probe
tgatctgtgccggctacagggaagg

SEQ ID NO: 269417 - DNA, 25 bp, probe
tgatctgtgccggctacagggaagg

SEQ ID NO: 269418 - DNA, 25 bp, probe
tgatcgcatacatcatgaccgtcac

SEQ ID NO: 269419 - DNA, 25 bp, probe
tgaccagcactgtctcagtttcact

SEQ ID NO: 269420 - DNA, 25 bp, probe
tgatctcagagtagcccatttccta

SEQ ID NO: 269421 - DNA, 25 bp, probe
tgatccggaagcagcttacaccacc

SEQ ID NO: 269422 - DNA, 25 bp, probe
tgacacgtaaggtttcccaatcctc

SEQ ID NO: 269423 - DNA, 25 bp, probe
tgaccctacaggtttaccaaccagc

SEQ ID NO: 269424 - DNA, 25 bp, probe
tacgccaaatcgttacactacaccc

SEQ ID NO: 269425 - DNA, 25 bp, probe
tgaggccaagagtttgagaccaacc

SEQ ID NO: 269426 - DNA, 25 bp, probe
tgaggacaatgtctgctgaagcccg

SEQ ID NO: 269427 - DNA, 25 bp, probe
tgatggcaactccctggaagccaca

SEQ ID NO: 269428 - DNA, 25 bp, probe
tgatgtcgacaatgtgaaagcccat

SEQ ID NO: 269429 - DNA, 25 bp, probe
tgatgtacacagtggtaactccaat

SEQ ID NO: 269430 - DNA, 25 bp, probe
tgatgataacacttggagctattac

SEQ ID NO: 269431 - DNA, 25 bp, probe
tgataattgcattttcctatcattc

SEQ ID NO: 269432 - DNA, 25 bp, probe
tgatgaataaatacttctgctcttc

SEQ ID NO: 269433 - DNA, 25 bp, probe
tgatgacattgatcctactcctact

SEQ ID NO: 269434 - DNA, 25 bp, probe
tgatgccattgagattcacctccca

SEQ ID NO: 269435 - DNA, 25 bp, probe
tgatgtcttgatggatggaccccag

SEQ ID NO: 269436 - DNA, 25 bp, probe
tgatgtgatgggcagcagcatcccc

SEQ ID NO: 269437 - DNA, 25 bp, probe
tgagggagatgccatgagccgccca

SEQ ID NO: 269438 - DNA, 25 bp, probe
tgaggtggattactgcctgtacccg

SEQ ID NO: 269439 - DNA, 25 bp, probe
tgaggtgtgaattgtacgtacaggc

SEQ ID NO: 269440 - DNA, 25 bp, probe
tgatggtgtgccagaagttaaggaa

SEQ ID NO: 269441 - DNA, 25 bp, probe
tgaggatccatcatatagttcaacc

SEQ ID NO: 269442 - DNA, 25 bp, probe
tgaggaaatcttccattcctcccaa

SEQ ID NO: 269443 - DNA, 25 bp, probe
tgaggaaatcttccattcctcccaa

SEQ ID NO: 269444 - DNA, 25 bp, probe
tgatgggaactttaacactctagct

SEQ ID NO: 269445 - DNA, 25 bp, probe
tgatggaatttttctgtacttcagt

SEQ ID NO: 269446 - DNA, 25 bp, probe
tgatggaatttttctgtacttcagt

SEQ ID NO: 269447 - DNA, 25 bp, probe
tgaggtttgagcctcttgacccagt

SEQ ID NO: 269448 - DNA, 25 bp, probe
tgatggtggtggcctgtaatcccag

SEQ ID NO: 269449 - DNA, 25 bp, probe
tgaggtcagtgggcttaggcctgca

SEQ ID NO: 269450 - DNA, 25 bp, probe
tgaggtcatcaagcagtcggcctac

SEQ ID NO: 269451 - DNA, 25 bp, probe
tgagacctagcaatcagtcagggct

SEQ ID NO: 269452 - DNA, 25 bp, probe
tgaggccattgccatgaaccggcag

SEQ ID NO: 269453 - DNA, 25 bp, probe
tgatcgccatcagggagcacctggg

SEQ ID NO: 269454 - DNA, 25 bp, probe
tgatctgcaagatgctgctcagcct

SEQ ID NO: 269455 - DNA, 25 bp, probe
tgatatgagctatgtgcatcgtgat

SEQ ID NO: 269456 - DNA, 25 bp, probe
tgatgatagctatggtgtagatgga

SEQ ID NO: 269457 - DNA, 25 bp, probe
tgatgcacaagatctatgagaagaa

SEQ ID NO: 269458 - DNA, 25 bp, probe
tgatgagtatgctctaaaagaatat

SEQ ID NO: 269459 - DNA, 25 bp, probe
tgatgactcaaggccaataataaag

SEQ ID NO: 269460 - DNA, 25 bp, probe
tgagactaagggtgaaagtggttta

SEQ ID NO: 269461 - DNA, 25 bp, probe
tgacctgaaagttgacaacgtgatg

SEQ ID NO: 269462 - DNA, 25 bp, probe
tgagggacaagcataagaaggaggc

SEQ ID NO: 269463 - DNA, 25 bp, probe
tgaggggaatacataaaggagggga

SEQ ID NO: 269464 - DNA, 25 bp, probe
tgaggggccaacaccaaggcccagg

SEQ ID NO: 269465 - DNA, 25 bp, probe
tgaggcgaccagatttcatggatgc

SEQ ID NO: 269466 - DNA, 25 bp, probe
tgatgggcaccatgctttctcatga

SEQ ID NO: 269467 - DNA, 25 bp, probe
tgatggcagtctgtgtcttgctatg

SEQ ID NO: 269468 - DNA, 25 bp, probe
tgatgaatgtgggattattgaatgg

SEQ ID NO: 269469 - DNA, 25 bp, probe
tgatgttctgaggtttgctttggtt

SEQ ID NO: 269470 - DNA, 25 bp, probe
tgagtatgtgattctttttaagtat

SEQ ID NO: 269471 - DNA, 25 bp, probe
tgatgcttggcttcttttagggcta

SEQ ID NO: 269472 - DNA, 25 bp, probe
tgatcttgacaaacctgccagggat

SEQ ID NO: 269473 - DNA, 25 bp, probe
tgatcttaacaatcccattgcagtg

SEQ ID NO: 269474 - DNA, 25 bp, probe
tgatgttaacaactcagccatctgg

SEQ ID NO: 269475 - DNA, 25 bp, probe
tgatgttcaacaagctatgggggac

SEQ ID NO: 269476 - DNA, 25 bp, probe
tgatgattccactaaagaagttgaa

SEQ ID NO: 269477 - DNA, 25 bp, probe
tgatgcttcccaagaaatagttgat

SEQ ID NO: 269478 - DNA, 25 bp, probe
tgatctccctatcaatgtatttaag

SEQ ID NO: 269479 - DNA, 25 bp, probe
tgatcttcctttacacatttctcgg

SEQ ID NO: 269480 - DNA, 25 bp, probe
tgatgctagcaactttccatttctc

SEQ ID NO: 269481 - DNA, 25 bp, probe
tgatccaaggagttgctgcttttcc

SEQ ID NO: 269482 - DNA, 25 bp, probe
tgatccagatggacctgcctttggt

SEQ ID NO: 269483 - DNA, 25 bp, probe
tgatggactggtgtcctatggagat

SEQ ID NO: 269484 - DNA, 25 bp, probe
tgaggacttgggtcctcggtcttac

SEQ ID NO: 269485 - DNA, 25 bp, probe
tgatgttttagcgatcccggtcgga

SEQ ID NO: 269486 - DNA, 25 bp, probe
tgagttttatcatccacacggggca

SEQ ID NO: 269487 - DNA, 25 bp, probe
tgagttttatcatccacacggggca

SEQ ID NO: 269488 - DNA, 25 bp, probe
tgaggttttctacaatttggtataa

SEQ ID NO: 269489 - DNA, 25 bp, probe
tgaggttttatggagatttttgtaa

SEQ ID NO: 269490 - DNA, 25 bp, probe
tgaggtctcttgagggagcttagcc

SEQ ID NO: 269491 - DNA, 25 bp, probe
tgaggaccgtgcagggatgccaagc

SEQ ID NO: 269492 - DNA, 25 bp, probe
tgatcgccctgtgataggatctaac

SEQ ID NO: 269493 - DNA, 25 bp, probe
tgatgctcccttgaagccatagaat

SEQ ID NO: 269494 - DNA, 25 bp, probe
tgatccgagctctggagcgtggata

SEQ ID NO: 269495 - DNA, 25 bp, probe
tgatcctcagccttgtgagcacaag

SEQ ID NO: 269496 - DNA, 25 bp, probe
tgatcctcatttttcaaccatgtat

SEQ ID NO: 269497 - DNA, 25 bp, probe
tgatacctacacttccatcaattct

SEQ ID NO: 269498 - DNA, 25 bp, probe
tgatgtccagaacttcccgtatatg

SEQ ID NO: 269499 - DNA, 25 bp, probe
tgaaaacagagcttcccgtgcaaaa

SEQ ID NO: 269500 - DNA, 25 bp, probe
tgagacaggaagctcctgccctgaa

SEQ ID NO: 269501 - DNA, 25 bp, probe
tgagttgagttgcttctgaggtaca

SEQ ID NO: 269502 - DNA, 25 bp, probe
tgagttcagtagctttggtattatg

SEQ ID NO: 269503 - DNA, 25 bp, probe
tgatgttagtatttcttgctttatt

SEQ ID NO: 269504 - DNA, 25 bp, probe
tgaggaaggcacacttgctcctgtt

SEQ ID NO: 269505 - DNA, 25 bp, probe
tgaggaggacttgctcaggccgatt

SEQ ID NO: 269506 - DNA, 25 bp, probe
tgagggttttggttggcatcgttgt

SEQ ID NO: 269507 - DNA, 25 bp, probe
tgaggagtttattgtatgtgttcta

SEQ ID NO: 269508 - DNA, 25 bp, probe
tgatgctggttatttgcatactgtt

SEQ ID NO: 269509 - DNA, 25 bp, probe
tgatcggatctgtttcatttataaa

SEQ ID NO: 269510 - DNA, 25 bp, probe
tgatcgaatctgggtgtttcaaaga

SEQ ID NO: 269511 - DNA, 25 bp, probe
tgactttggggaatgtcataaagaa

SEQ ID NO: 269512 - DNA, 25 bp, probe
tgactatctgaatcatttttaagta

SEQ ID NO: 269513 - DNA, 25 bp, probe
tgactatctgaatcatttttaagta

SEQ ID NO: 269514 - DNA, 25 bp, probe
tgagtatatcaatcctcttttgatg

SEQ ID NO: 269515 - DNA, 25 bp, probe
tgaggcacatactatccctggttat

SEQ ID NO: 269516 - DNA, 25 bp, probe
tgagtgacaacttctccgtgaacct

SEQ ID NO: 269517 - DNA, 25 bp, probe
tgagtgacaacttctccgtgaacct

SEQ ID NO: 269518 - DNA, 25 bp, probe
tgatggaaaccacttcctctacact

SEQ ID NO: 269519 - DNA, 25 bp, probe
tgatggatggacagcttctttgccc

SEQ ID NO: 269520 - DNA, 25 bp, probe
tgatggatggacagcttctttgccc

SEQ ID NO: 269521 - DNA, 25 bp, probe
tgatggggaccgtctttcttttact

SEQ ID NO: 269522 - DNA, 25 bp, probe
tgagacggagccggaagttatttat

SEQ ID NO: 269523 - DNA, 25 bp, probe
tgagggaggcctgaaatgtttccag

SEQ ID NO: 269524 - DNA, 25 bp, probe
tgagggaagggacgcagggtctccg

SEQ ID NO: 269525 - DNA, 25 bp, probe
tgagggcagaggggaggaggtcgtc

SEQ ID NO: 269526 - DNA, 25 bp, probe
tgagaggggactggcatggggggat

SEQ ID NO: 269527 - DNA, 25 bp, probe
tgaccgtgtagtgcagggggtgaca

SEQ ID NO: 269528 - DNA, 25 bp, probe
tgaccgtgtagtgcagggggtgaca

SEQ ID NO: 269529 - DNA, 25 bp, probe
tgactcgacggtgatggggggcaac

SEQ ID NO: 269530 - DNA, 25 bp, probe
tgacccagggtaccgaggggaactg

SEQ ID NO: 269531 - DNA, 25 bp, probe
tgatcccagagagcccgaggaggtg

SEQ ID NO: 269532 - DNA, 25 bp, probe
tgatcccagagagcccgaggaggtg

SEQ ID NO: 269533 - DNA, 25 bp, probe
tgatcccagagaacgctctagagga

SEQ ID NO: 269534 - DNA, 25 bp, probe
tgatcctttgtactctataatgtga

SEQ ID NO: 269535 - DNA, 25 bp, probe
tgatccttctgcatatttaaaataa

SEQ ID NO: 269536 - DNA, 25 bp, probe
tgagctctcctcctgtttaaaagga

SEQ ID NO: 269537 - DNA, 25 bp, probe
tgagactcccggcttagaaggactg

SEQ ID NO: 269538 - DNA, 25 bp, probe
tgagtccactttattctggggcact

SEQ ID NO: 269539 - DNA, 25 bp, probe
tgagacctttccaccatgggtggta

SEQ ID NO: 269540 - DNA, 25 bp, probe
tgaagatttctgcattccggggtgt

SEQ ID NO: 269541 - DNA, 25 bp, probe
tgagattttttttccgtgtgtttat

SEQ ID NO: 269542 - DNA, 25 bp, probe
tgagattttttttccgtgtgtttat

SEQ ID NO: 269543 - DNA, 25 bp, probe
tgagtttattctattaggttttcca

SEQ ID NO: 269544 - DNA, 25 bp, probe
tgaggttttgctaaggaagccttat

SEQ ID NO: 269545 - DNA, 25 bp, probe
tgaggtgtgtagaacagggtcccac

SEQ ID NO: 269546 - DNA, 25 bp, probe
tgaggtgtgtagaacagggtcccac

SEQ ID NO: 269547 - DNA, 25 bp, probe
tgagggctctagaaaccaagcccca

SEQ ID NO: 269548 - DNA, 25 bp, probe
tgaccagtaagtttccaaacgctgc

SEQ ID NO: 269549 - DNA, 25 bp, probe
tgaccagtaagtttccaaacgctgc

SEQ ID NO: 269550 - DNA, 25 bp, probe
tgaccaaatttacgccatgaaagtg

SEQ ID NO: 269551 - DNA, 25 bp, probe
tgagaaattttactgacagaaatgc

SEQ ID NO: 269552 - DNA, 25 bp, probe
tgagaacatcgtgatcgccgaggac

SEQ ID NO: 269553 - DNA, 25 bp, probe
tgagaacatcgtgatcgccgaggac

SEQ ID NO: 269554 - DNA, 25 bp, probe
tgagaaatgcaatacccggggtgtt

SEQ ID NO: 269555 - DNA, 25 bp, probe
tgagaaatgcaatacccggggtgtt

SEQ ID NO: 269556 - DNA, 25 bp, probe
tgagacaaaacctgaggggttggca

SEQ ID NO: 269557 - DNA, 25 bp, probe
tgagaaaaaactagggctgacttcc

SEQ ID NO: 269558 - DNA, 25 bp, probe
tgcaggtaacccttggtctgtaagc

SEQ ID NO: 269559 - DNA, 25 bp, probe
tgcatggtatcactaaaggtttcaa

SEQ ID NO: 269560 - DNA, 25 bp, probe
tgatgcggaagggagagctgtttga

SEQ ID NO: 269561 - DNA, 25 bp, probe
tgaggtgggagcggggctgggagga

SEQ ID NO: 269562 - DNA, 25 bp, probe
tgatggtggtggtcgtggtgggatt

SEQ ID NO: 269563 - DNA, 25 bp, probe
tgaggtggaggtcctgcgggagaaa

SEQ ID NO: 269564 - DNA, 25 bp, probe
tgagggggtcgagtccagtgagaaa

SEQ ID NO: 269565 - DNA, 25 bp, probe
tgatgggggatggcctggaatgaga

SEQ ID NO: 269566 - DNA, 25 bp, probe
tgagaggtggtaccatggccacatg

SEQ ID NO: 269567 - DNA, 25 bp, probe
tgaggtggcatggtccattctcaag

SEQ ID NO: 269568 - DNA, 25 bp, probe
tgatggtacagcaccatccagccag

SEQ ID NO: 269569 - DNA, 25 bp, probe
tgatgcttgtacaaacacgcacaca

SEQ ID NO: 269570 - DNA, 25 bp, probe
tgatcatatctacaccacgcaaagt

SEQ ID NO: 269571 - DNA, 25 bp, probe
tgatcttctagctaccattcatttt

SEQ ID NO: 269572 - DNA, 25 bp, probe
tgatcctccaacttcatttgatgct

SEQ ID NO: 269573 - DNA, 25 bp, probe
tgaggcccgacactatgttgtctgc

SEQ ID NO: 269574 - DNA, 25 bp, probe
tgaggctcggcttggattattctgc

SEQ ID NO: 269575 - DNA, 25 bp, probe
tgatggatcctttagttcattgtcc

SEQ ID NO: 269576 - DNA, 25 bp, probe
tgagtatgctctaaaagaatatggc

SEQ ID NO: 269577 - DNA, 25 bp, probe
tgagttccttagacacaggcagcct

SEQ ID NO: 269578 - DNA, 25 bp, probe
tgatgtttgctcagtgcaaggtgga

SEQ ID NO: 269579 - DNA, 25 bp, probe
tgagtctggtcatctgaagcctgga

SEQ ID NO: 269580 - DNA, 25 bp, probe
tgagatgcgggcactaacccagggg

SEQ ID NO: 269581 - DNA, 25 bp, probe
tgatgcaggggtgtgaggcccaggg

SEQ ID NO: 269582 - DNA, 25 bp, probe
tgatcgggatatgcgaggccgagtc

SEQ ID NO: 269583 - DNA, 25 bp, probe
tgatccggaacccggcaagtctcaa

SEQ ID NO: 269584 - DNA, 25 bp, probe
tgatccagacagtgctgaggaaccc

SEQ ID NO: 269585 - DNA, 25 bp, probe
tgatccagacagtgctgaggaaccc

SEQ ID NO: 269586 - DNA, 25 bp, probe
tgatgcgagcactacctcagaatga

SEQ ID NO: 269587 - DNA, 25 bp, probe
tgatgaggcacgcccatcagatagc

SEQ ID NO: 269588 - DNA, 25 bp, probe
tgatgaggcacgcccatcagatagc

SEQ ID NO: 269589 - DNA, 25 bp, probe
tgatgaagatcactgccttgggctt

SEQ ID NO: 269590 - DNA, 25 bp, probe
tgatgagggactgttggcatgcagt

SEQ ID NO: 269591 - DNA, 25 bp, probe
tgagtaggaaccctgtctcagtgca

SEQ ID NO: 269592 - DNA, 25 bp, probe
tgagggtgacaaggcgtctcttcaa

SEQ ID NO: 269593 - DNA, 25 bp, probe
tgagggaacaccagtgctctgtcag

SEQ ID NO: 269594 - DNA, 25 bp, probe
tgagggaacaccagtgctctgtcag

SEQ ID NO: 269595 - DNA, 25 bp, probe
tgaggggcaatccaaagcctttggc

SEQ ID NO: 269596 - DNA, 25 bp, probe
tgaggaacaacctagaagctttgct

SEQ ID NO: 269597 - DNA, 25 bp, probe
tgagcgaataagcctacaagcccct

SEQ ID NO: 269598 - DNA, 25 bp, probe
tgagcgaataagcctacaagcccct

SEQ ID NO: 269599 - DNA, 25 bp, probe
tgaggaataatgaataaccactcta

SEQ ID NO: 269600 - DNA, 25 bp, probe
tgaggattgtcattaaacacagttg

SEQ ID NO: 269601 - DNA, 25 bp, probe
tgatgagtggaatgacaagcaatgt

SEQ ID NO: 269602 - DNA, 25 bp, probe
tgatgaaggagaagccaacacttga

SEQ ID NO: 269603 - DNA, 25 bp, probe
tgatgacaagaggagccccacctta

SEQ ID NO: 269604 - DNA, 25 bp, probe
tgatgcagcactgtagcccatcacc

SEQ ID NO: 269605 - DNA, 25 bp, probe
tgatgtgcctctcaccatcatgaaa

SEQ ID NO: 269606 - DNA, 25 bp, probe
tgatgtgcctctcaccatcatgaaa

SEQ ID NO: 269607 - DNA, 25 bp, probe
tgatgtgccttctccatatgaagtc

SEQ ID NO: 269608 - DNA, 25 bp, probe
tgatgacacttacgacaatgacatt

SEQ ID NO: 269609 - DNA, 25 bp, probe
tgatgacgtggactgcacaatgaca

SEQ ID NO: 269610 - DNA, 25 bp, probe
tgaggctatggactgctccattctc

SEQ ID NO: 269611 - DNA, 25 bp, probe
tgagtgtcataactccacagatcga

SEQ ID NO: 269612 - DNA, 25 bp, probe
tgagcagtcagcatgctcaccagcg

SEQ ID NO: 269613 - DNA, 25 bp, probe
tgatgatgctctggtgtacagcacc

SEQ ID NO: 269614 - DNA, 25 bp, probe
tgatgtgtgcatatttagcatccct

SEQ ID NO: 269615 - DNA, 25 bp, probe
tgatgaatgcagactctgctaccat

SEQ ID NO: 269616 - DNA, 25 bp, probe
tgatgtcagcagatcgctcatggct

SEQ ID NO: 269617 - DNA, 25 bp, probe
tgatgtctgcaatggcgctgacttc

SEQ ID NO: 269618 - DNA, 25 bp, probe
tgaggctgcgaaggcagatgcgatt

SEQ ID NO: 269619 - DNA, 25 bp, probe
tgatgctgcatggcactcagagtgc

SEQ ID NO: 269620 - DNA, 25 bp, probe
tgatgcatctgcatccatgtggctg

SEQ ID NO: 269621 - DNA, 25 bp, probe
tgatgcactgattccatcccaggaa

SEQ ID NO: 269622 - DNA, 25 bp, probe
tgatgcatttgcagttccaggagat

SEQ ID NO: 269623 - DNA, 25 bp, probe
tgagtggtgccagttgccagggcaa

SEQ ID NO: 269624 - DNA, 25 bp, probe
tgatgagggcccagtgaggcgccaa

SEQ ID NO: 269625 - DNA, 25 bp, probe
tgatgggcggcctggatggcgacat

SEQ ID NO: 269626 - DNA, 25 bp, probe
tgatgtgtgggcatttggcgtgacc

SEQ ID NO: 269627 - DNA, 25 bp, probe
tgatgtgtgggcctttggggttact

SEQ ID NO: 269628 - DNA, 25 bp, probe
tgatgtgtgggcctttggggttact

SEQ ID NO: 269629 - DNA, 25 bp, probe
tgatgtgtgggcctttggggttact

SEQ ID NO: 269630 - DNA, 25 bp, probe
tgatgtgtgggcctatggcgtggtc

SEQ ID NO: 269631 - DNA, 25 bp, probe
tgatgatctgggcatatggggctgg

SEQ ID NO: 269632 - DNA, 25 bp, probe
tgagtatcggttagtgctggcgcgg

SEQ ID NO: 269633 - DNA, 25 bp, probe
tgaggggactgaaggtgggcaaggt

SEQ ID NO: 269634 - DNA, 25 bp, probe
tgatgggcagattacagtgggacaa

SEQ ID NO: 269635 - DNA, 25 bp, probe
tgatgacatcaagaaggtggtgaag

SEQ ID NO: 269636 - DNA, 25 bp, probe
tgatgaaaacaagggatggctcatt

SEQ ID NO: 269637 - DNA, 25 bp, probe
tgagtatactaagggagttcattga

SEQ ID NO: 269638 - DNA, 25 bp, probe
tgatgtttctccagagcaacctcga

SEQ ID NO: 269639 - DNA, 25 bp, probe
tgatgtgttcacctgggcagatccc

SEQ ID NO: 269640 - DNA, 25 bp, probe
tgagattgtacgcgagatgaccccc

SEQ ID NO: 269641 - DNA, 25 bp, probe
tgagcaatgtagcaggcgtcttcta

SEQ ID NO: 269642 - DNA, 25 bp, probe
tgatcctgacaagcggatctctgta

SEQ ID NO: 269643 - DNA, 25 bp, probe
tgatcctgtacatcatggtctgcgg

SEQ ID NO: 269644 - DNA, 25 bp, probe
tgatgcccttcagcatggtcaggac

SEQ ID NO: 269645 - DNA, 25 bp, probe
tgatgagtcctctctggtcagacat

SEQ ID NO: 269646 - DNA, 25 bp, probe
tgatgagctactcctgggtcatgag

SEQ ID NO: 269647 - DNA, 25 bp, probe
tgatgaatttgctatgcgttatgga

SEQ ID NO: 269648 - DNA, 25 bp, probe
tgatgccatctcctctggggaggaa

SEQ ID NO: 269649 - DNA, 25 bp, probe
tgatgcctcataattcggagccaga

SEQ ID NO: 269650 - DNA, 25 bp, probe
tgatcctgcgtaaccagatccagca

SEQ ID NO: 269651 - DNA, 25 bp, probe
tgatgcttggctctggaatgccaga

SEQ ID NO: 269652 - DNA, 25 bp, probe
tgatgtcgctgtcaggatcatgccc

SEQ ID NO: 269653 - DNA, 25 bp, probe
tgatgtccagcgagtggatgccgcc

SEQ ID NO: 269654 - DNA, 25 bp, probe
tgatgctccggtgtgagtctggtca

SEQ ID NO: 269655 - DNA, 25 bp, probe
tgatgcctttgctcaggtctttcat

SEQ ID NO: 269656 - DNA, 25 bp, probe
tgatgcctttgctcaggtctttcat

SEQ ID NO: 269657 - DNA, 25 bp, probe
tgaccattctccggattttatctca

SEQ ID NO: 269658 - DNA, 25 bp, probe
tgatgacattctgcccaagtaaccc

SEQ ID NO: 269659 - DNA, 25 bp, probe
tgatgacattctgcccaagtaaccc

SEQ ID NO: 269660 - DNA, 25 bp, probe
tgatgtgttgttgccatggtaatcc

SEQ ID NO: 269661 - DNA, 25 bp, probe
tgatgttatatttctctggagaaca

SEQ ID NO: 269662 - DNA, 25 bp, probe
tgatgtgtcatatgagtcctcaaaa

SEQ ID NO: 269663 - DNA, 25 bp, probe
tgatggttccatcgatgcctgtaaa

SEQ ID NO: 269664 - DNA, 25 bp, probe
tgatggcctccaagccggatatcga

SEQ ID NO: 269665 - DNA, 25 bp, probe
tgaggctcctcagacaggatcttga

SEQ ID NO: 269666 - DNA, 25 bp, probe
tgaggtccatcagagctctgatttc

SEQ ID NO: 269667 - DNA, 25 bp, probe
tgaggacactcggtttgactctcaa

SEQ ID NO: 269668 - DNA, 25 bp, probe
tgagtgacaatcatttttcttaagg

SEQ ID NO: 269669 - DNA, 25 bp, probe
tgagtgactgtacttgatttttcaa

SEQ ID NO: 269670 - DNA, 25 bp, probe
tgaggatccaagttgagattttaat

SEQ ID NO: 269671 - DNA, 25 bp, probe
tgagggctcaagtcgcaatgtatct

SEQ ID NO: 269672 - DNA, 25 bp, probe
tgatccagccaaacgaatttctggc

SEQ ID NO: 269673 - DNA, 25 bp, probe
tgatccagccaaaagaattactctc

SEQ ID NO: 269674 - DNA, 25 bp, probe
tgatccagccaaaagaattactctc

SEQ ID NO: 269675 - DNA, 25 bp, probe
tgatccagccaaaagaattactctc

SEQ ID NO: 269676 - DNA, 25 bp, probe
tgatccagcccgggagaggaccgag

SEQ ID NO: 269677 - DNA, 25 bp, probe
tgatccagcccgggagaggaccgag

SEQ ID NO: 269678 - DNA, 25 bp, probe
tgaccgtcggcatggagaacaggag

SEQ ID NO: 269679 - DNA, 25 bp, probe
tgaccgtcggcatggagaacaggag

SEQ ID NO: 269680 - DNA, 25 bp, probe
tgagaagacggctcggtgagggggc

SEQ ID NO: 269681 - DNA, 25 bp, probe
tgagaagacggctcggtgagggggc

SEQ ID NO: 269682 - DNA, 25 bp, probe
tgagcagaaaggcccggggaggatg

SEQ ID NO: 269683 - DNA, 25 bp, probe
tgagcagaaaggcccggggaggatg

SEQ ID NO: 269684 - DNA, 25 bp, probe
tgagagagagggcacgagaacccaa

SEQ ID NO: 269685 - DNA, 25 bp, probe
tgaggggggaacaattcacaccacc

SEQ ID NO: 269686 - DNA, 25 bp, probe
tgaggagtggagcttcttccacgcc

SEQ ID NO: 269687 - DNA, 25 bp, probe
tgaggatgggcccaacattgacaac

SEQ ID NO: 269688 - DNA, 25 bp, probe
tgaggtgggcaaggccattggccat

SEQ ID NO: 269689 - DNA, 25 bp, probe
tgagcttgtggaggtggtcggcaat

SEQ ID NO: 269690 - DNA, 25 bp, probe
tgagcattctgtcaggtgtcgggac

SEQ ID NO: 269691 - DNA, 25 bp, probe
tgagatggctgttgagctctgctca

SEQ ID NO: 269692 - DNA, 25 bp, probe
tgagagctgagactagtcatgtctc

SEQ ID NO: 269693 - DNA, 25 bp, probe
tgatgtctgcagaagaatgtgtctg

SEQ ID NO: 269694 - DNA, 25 bp, probe
tgatgatcaaaacctgtgccaggct

SEQ ID NO: 269695 - DNA, 25 bp, probe
tgatgatcataatgtccccactcta

SEQ ID NO: 269696 - DNA, 25 bp, probe
tgatgagaagatggtcaactacctg

SEQ ID NO: 269697 - DNA, 25 bp, probe
tgatgaaagtgcttccaaactgaaa

SEQ ID NO: 269698 - DNA, 25 bp, probe
tgatgaaatggattcccatcccaaa

SEQ ID NO: 269699 - DNA, 25 bp, probe
tgatgagcaaatttaatcatcccaa

SEQ ID NO: 269700 - DNA, 25 bp, probe
tgatggcagggataacacacaatga

SEQ ID NO: 269701 - DNA, 25 bp, probe
tgatgaggtggacacacgaccagcc

SEQ ID NO: 269702 - DNA, 25 bp, probe
tgatgcccttgaccagagcggctac

SEQ ID NO: 269703 - DNA, 25 bp, probe
tgcctgcacttacaggcgtttcgag

SEQ ID NO: 269704 - DNA, 25 bp, probe
tgaccacttcatgaagtttatctgg

SEQ ID NO: 269705 - DNA, 25 bp, probe
tgaccctgtatatagcccagccagg

SEQ ID NO: 269706 - DNA, 25 bp, probe
tgaccctactgtagtcactaccagt

SEQ ID NO: 269707 - DNA, 25 bp, probe
tgagccctagctaagtcactgaaag

SEQ ID NO: 269708 - DNA, 25 bp, probe
tgagtacatcgccaagtgcctcaaa

SEQ ID NO: 269709 - DNA, 25 bp, probe
tgatgaaccgcttcatgccactgaa

SEQ ID NO: 269710 - DNA, 25 bp, probe
tgatgaacacctacagtgttgtgca

SEQ ID NO: 269711 - DNA, 25 bp, probe
tgatgtcagcaggcccagtttctgc

SEQ ID NO: 269712 - DNA, 25 bp, probe
tgatggaggctccacactagatctg

SEQ ID NO: 269713 - DNA, 25 bp, probe
tgatgggactctcccttatgcaggc

SEQ ID NO: 269714 - DNA, 25 bp, probe
tgatgggactctcccttatgcaggc

SEQ ID NO: 269715 - DNA, 25 bp, probe
tgatgtggacatgagccatttgagg

SEQ ID NO: 269716 - DNA, 25 bp, probe
tgagctgtgccaccagctcatcgta

SEQ ID NO: 269717 - DNA, 25 bp, probe
tgatgctgtcaagcaatattgtttt

SEQ ID NO: 269718 - DNA, 25 bp, probe
tgatgtgtttgggatactgcttatt

SEQ ID NO: 269719 - DNA, 25 bp, probe
tgatgttagtgttgaactcttaaac

SEQ ID NO: 269720 - DNA, 25 bp, probe
tgagattcaggttttctctagagca

SEQ ID NO: 269721 - DNA, 25 bp, probe
tgagggccagtatttccaaagcacc

SEQ ID NO: 269722 - DNA, 25 bp, probe
tgaggcccacgagttctccaacacc

SEQ ID NO: 269723 - DNA, 25 bp, probe
tgagaacgctaagacctacatcgcc

SEQ ID NO: 269724 - DNA, 25 bp, probe
tgagaaactcaacagcagcttccca

SEQ ID NO: 269725 - DNA, 25 bp, probe
tgagtaaccatacagcttccaccat

SEQ ID NO: 269726 - DNA, 25 bp, probe
tgagtttcttatcagccctcaagct

SEQ ID NO: 269727 - DNA, 25 bp, probe
tgaggatcctaaagatcgcccgtct

SEQ ID NO: 269728 - DNA, 25 bp, probe
tgatggcccaaatgtcagggttctg

SEQ ID NO: 269729 - DNA, 25 bp, probe
tgaggcccagcagagtaagcccttg

SEQ ID NO: 269730 - DNA, 25 bp, probe
tgagagctcagatttagaaagctct

SEQ ID NO: 269731 - DNA, 25 bp, probe
tgaggcaggagaatggcatgaacct

SEQ ID NO: 269732 - DNA, 25 bp, probe
tgatgctgcggaccaggacaagcag

SEQ ID NO: 269733 - DNA, 25 bp, probe
tgatgctggtgctcaggcacctctg

SEQ ID NO: 269734 - DNA, 25 bp, probe
tgagtgtgagcatcgggctttgcag

SEQ ID NO: 269735 - DNA, 25 bp, probe
tgatgggctatgtcagtggcttcgg

SEQ ID NO: 269736 - DNA, 25 bp, probe
tgagggtctgcggaggcttgcaggt

SEQ ID NO: 269737 - DNA, 25 bp, probe
tgagggatgggcctggcattcttgt

SEQ ID NO: 269738 - DNA, 25 bp, probe
tgagagggagaccggcatgctttga

SEQ ID NO: 269739 - DNA, 25 bp, probe
tgagatggggaacaagcttgtgcaa

SEQ ID NO: 269740 - DNA, 25 bp, probe
tgagataggaattctcagtgtttca

SEQ ID NO: 269741 - DNA, 25 bp, probe
tgagtaggcctggtcagttatgaca

SEQ ID NO: 269742 - DNA, 25 bp, probe
tgatgtcctgttgtcttaatccaat

SEQ ID NO: 269743 - DNA, 25 bp, probe
tgatgtcctgttgtcttaatccaat

SEQ ID NO: 269744 - DNA, 25 bp, probe
tgagatcctttgctctatgaccaat

SEQ ID NO: 269745 - DNA, 25 bp, probe
tgagcaccttgctggctaatataaa

SEQ ID NO: 269746 - DNA, 25 bp, probe
tgagcctactgatgttgttgataaa

SEQ ID NO: 269747 - DNA, 25 bp, probe
tgaggaagctgatactgtgtgaaca

SEQ ID NO: 269748 - DNA, 25 bp, probe
tgagtcccaagatctctgctggaca

SEQ ID NO: 269749 - DNA, 25 bp, probe
tgagtcgcgaggcatttggagagca

SEQ ID NO: 269750 - DNA, 25 bp, probe
tgatgtccgctctgatgtctggagt

SEQ ID NO: 269751 - DNA, 25 bp, probe
tgatgtacagtctattccatagaat

SEQ ID NO: 269752 - DNA, 25 bp, probe
tgaggaagctttgccattagatcta

SEQ ID NO: 269753 - DNA, 25 bp, probe
tgatgataagatttacctttatgta

SEQ ID NO: 269754 - DNA, 25 bp, probe
tgatgataagatttacctttatgta

SEQ ID NO: 269755 - DNA, 25 bp, probe
tgagtaagtctgaacctctaatgga

SEQ ID NO: 269756 - DNA, 25 bp, probe
tgaggaattctgaaaatctgacagc

SEQ ID NO: 269757 - DNA, 25 bp, probe
tgaggaattctgaaaatctgacagc

SEQ ID NO: 269758 - DNA, 25 bp, probe
tgagtccttcaaacgagctgacatc

SEQ ID NO: 269759 - DNA, 25 bp, probe
tgagtctctttacctaatggtctct

SEQ ID NO: 269760 - DNA, 25 bp, probe
tgatgatctttatggctactttctt

SEQ ID NO: 269761 - DNA, 25 bp, probe
tgatgatctttatggctactttctt

SEQ ID NO: 269762 - DNA, 25 bp, probe
tgagttctgctatctctacattcca

SEQ ID NO: 269763 - DNA, 25 bp, probe
tgaggagctctagactaacgccact

SEQ ID NO: 269764 - DNA, 25 bp, probe
tgagagcagccataactcagaccca

SEQ ID NO: 269765 - DNA, 25 bp, probe
tgaggctcctgagaatcaacccaac

SEQ ID NO: 269766 - DNA, 25 bp, probe
tgaggccattaatatcaccaacaat

SEQ ID NO: 269767 - DNA, 25 bp, probe
tgagacctattctgaccaaactata

SEQ ID NO: 269768 - DNA, 25 bp, probe
tgagccctttctgcacaaaaccagc

SEQ ID NO: 269769 - DNA, 25 bp, probe
tgagcctccttccagacaaaaaaac

SEQ ID NO: 269770 - DNA, 25 bp, probe
tgagttcctggtgcacgaaaacaac

SEQ ID NO: 269771 - DNA, 25 bp, probe
tgagggcctggtcaccacaattaga

SEQ ID NO: 269772 - DNA, 25 bp, probe
tgagcgggtggtcacccacagtgac

SEQ ID NO: 269773 - DNA, 25 bp, probe
tgagaccacggagacccagaggacc

SEQ ID NO: 269774 - DNA, 25 bp, probe
tgagatccagatggactccccaatg

SEQ ID NO: 269775 - DNA, 25 bp, probe
tgagatccagatggactccccaatg

SEQ ID NO: 269776 - DNA, 25 bp, probe
tgagtccagatatctagcccacaga

SEQ ID NO: 269777 - DNA, 25 bp, probe
tgagtgccacattggtagactccta

SEQ ID NO: 269778 - DNA, 25 bp, probe
tgagtgccacattggtagactccta

SEQ ID NO: 269779 - DNA, 25 bp, probe
tgagtgcagacatggccactgtcct

SEQ ID NO: 269780 - DNA, 25 bp, probe
tgagtagacagccccaagcatggcc

SEQ ID NO: 269781 - DNA, 25 bp, probe
tgaggagacccagaacatggcccag

SEQ ID NO: 269782 - DNA, 25 bp, probe
tgagttaccagagccacatggccct

SEQ ID NO: 269783 - DNA, 25 bp, probe
tgacatttccatttcgaatagtcca

SEQ ID NO: 269784 - DNA, 25 bp, probe
tgacttatcctattaaacctcctct

SEQ ID NO: 269785 - DNA, 25 bp, probe
tgactactggtacgaaacctccttc

SEQ ID NO: 269786 - DNA, 25 bp, probe
tgactactggtacgaaacctccttc

SEQ ID NO: 269787 - DNA, 25 bp, probe
tgagcacgctcgtggaaaccacact

SEQ ID NO: 269788 - DNA, 25 bp, probe
tgaggcgccaagggaaggtcaccat

SEQ ID NO: 269789 - DNA, 25 bp, probe
tgagggaaggggagcagttgccaat

SEQ ID NO: 269790 - DNA, 25 bp, probe
tgagggaagtggacggcaccgctaa

SEQ ID NO: 269791 - DNA, 25 bp, probe
tgagggaagtggacggcaccgctaa

SEQ ID NO: 269792 - DNA, 25 bp, probe
tgatggtgacagtggtggctctctt

SEQ ID NO: 269793 - DNA, 25 bp, probe
tgatgggagagctctggcagatgtc

SEQ ID NO: 269794 - DNA, 25 bp, probe
tgatgtacgagatgatggctggaca

SEQ ID NO: 269795 - DNA, 25 bp, probe
tgactacagatgtgtgagggaacct

SEQ ID NO: 269796 - DNA, 25 bp, probe
tgacgacactgggctacggagacat

SEQ ID NO: 269797 - DNA, 25 bp, probe
tgaggaccacagcctactggaagct

SEQ ID NO: 269798 - DNA, 25 bp, probe
tgaggaccacagcctactggaagct

SEQ ID NO: 269799 - DNA, 25 bp, probe
tgaggactaatttggcgcagatgac

SEQ ID NO: 269800 - DNA, 25 bp, probe
tgaggcaatttctggggagatggaa

SEQ ID NO: 269801 - DNA, 25 bp, probe
tgaggcaatttctggggagatggaa

SEQ ID NO: 269802 - DNA, 25 bp, probe
tgaggagtggcctgactggagtgaa

SEQ ID NO: 269803 - DNA, 25 bp, probe
tgaggagtggcaggaaagagggagc

SEQ ID NO: 269804 - DNA, 25 bp, probe
tgagagactggcaggaaccgagtct

SEQ ID NO: 269805 - DNA, 25 bp, probe
tgaggacacctaggttcacggtctg

SEQ ID NO: 269806 - DNA, 25 bp, probe
tgaggaccgaagtgattgtggactg

SEQ ID NO: 269807 - DNA, 25 bp, probe
tgagaaccagatttgagagagggac

SEQ ID NO: 269808 - DNA, 25 bp, probe
tgagaaccagatttgagagagggac

SEQ ID NO: 269809 - DNA, 25 bp, probe
tgaggatccagtcctcagagggaag

SEQ ID NO: 269810 - DNA, 25 bp, probe
tgatgtcaccactccagatagaaag

SEQ ID NO: 269811 - DNA, 25 bp, probe
tgaggccaccctggaatcagaactg

SEQ ID NO: 269812 - DNA, 25 bp, probe
tgatggcccttgggagacagatggg

SEQ ID NO: 269813 - DNA, 25 bp, probe
tgatgtgatgcctgttgagtcagat

SEQ ID NO: 269814 - DNA, 25 bp, probe
tgatgatgacagcagctttgtagat

SEQ ID NO: 269815 - DNA, 25 bp, probe
tgatgggaaaggtattagatttact

SEQ ID NO: 269816 - DNA, 25 bp, probe
tgagggagaaggttgcagagcactt

SEQ ID NO: 269817 - DNA, 25 bp, probe
tgaggacgaaccgtgcggaggtccc

SEQ ID NO: 269818 - DNA, 25 bp, probe
tgaggaagcccaggctcggaggacc

SEQ ID NO: 269819 - DNA, 25 bp, probe
tgagggagaccccgacagaggacgc

SEQ ID NO: 269820 - DNA, 25 bp, probe
tgatggggcctccgatgaagcagag

SEQ ID NO: 269821 - DNA, 25 bp, probe
tgatggccctcacgtatgaggagaa

SEQ ID NO: 269822 - DNA, 25 bp, probe
tgaggctgccgcagggcactgaaag

SEQ ID NO: 269823 - DNA, 25 bp, probe
tgaactacggactgcactgaaagct

SEQ ID NO: 269824 - DNA, 25 bp, probe
tgagactgactccaaggccacaaac

SEQ ID NO: 269825 - DNA, 25 bp, probe
tgaggcaattcacatggccagaccc

SEQ ID NO: 269826 - DNA, 25 bp, probe
tgaggtcattcacatgcttcagcac

SEQ ID NO: 269827 - DNA, 25 bp, probe
tgaggtcattcacatgcttcagcac

SEQ ID NO: 269828 - DNA, 25 bp, probe
tgagggattgctggcatgctgtacc

SEQ ID NO: 269829 - DNA, 25 bp, probe
tgaggagatgtccagcttgacgcca

SEQ ID NO: 269830 - DNA, 25 bp, probe
tgaggagatgtccagcttgacgcca

SEQ ID NO: 269831 - DNA, 25 bp, probe
tgaggatatccaagctggtcccatg

SEQ ID NO: 269832 - DNA, 25 bp, probe
tgatgtcaaccttgtgacccagcag

SEQ ID NO: 269833 - DNA, 25 bp, probe
tgatgtaacctggaaactatgcttt

SEQ ID NO: 269834 - DNA, 25 bp, probe
tgatgataaaaggaagatgcccttt

SEQ ID NO: 269835 - DNA, 25 bp, probe
tgaggaaaactatgtgcccgtccag

SEQ ID NO: 269836 - DNA, 25 bp, probe
tgaggaaaactatgtgcccgtccag

SEQ ID NO: 269837 - DNA, 25 bp, probe
tgatgtgagattactttgtcccgct

SEQ ID NO: 269838 - DNA, 25 bp, probe
tgcatgacgattatgccgtcccgac

SEQ ID NO: 269839 - DNA, 25 bp, probe
tgcatgacgattatgccgtcccgac

SEQ ID NO: 269840 - DNA, 25 bp, probe
tgatggcgtgatatgcacctgcaac

SEQ ID NO: 269841 - DNA, 25 bp, probe
tgaggcttatcttcaccatcatgat

SEQ ID NO: 269842 - DNA, 25 bp, probe
tgaggctgtacattgagcagaaaac

SEQ ID NO: 269843 - DNA, 25 bp, probe
tgaggtggcctctggacaagacaag

SEQ ID NO: 269844 - DNA, 25 bp, probe
tgaggtggcctctggacaagacaag

SEQ ID NO: 269845 - DNA, 25 bp, probe
tgaggcggcacctggagctgaaaga

SEQ ID NO: 269846 - DNA, 25 bp, probe
tgatggcgaggcggaggacggggag

SEQ ID NO: 269847 - DNA, 25 bp, probe
tgatggcgaggcggaggacggggag

SEQ ID NO: 269848 - DNA, 25 bp, probe
tgatggggtgagaagtacagggcag

SEQ ID NO: 269849 - DNA, 25 bp, probe
tgagggatgtcacagccaagggcag

SEQ ID NO: 269850 - DNA, 25 bp, probe
tgcgggcactaacccaggggatgcc

SEQ ID NO: 269851 - DNA, 25 bp, probe
tgaggatgcttacccggggcagatc

SEQ ID NO: 269852 - DNA, 25 bp, probe
tgagtatgcctacctcaaagccatc

SEQ ID NO: 269853 - DNA, 25 bp, probe
tgagaacgcattccaggagatgcct

SEQ ID NO: 269854 - DNA, 25 bp, probe
tgagaaccaaccgtgtcatcagcac

SEQ ID NO: 269855 - DNA, 25 bp, probe
tgagaacaacattcggaaagccttg

SEQ ID NO: 269856 - DNA, 25 bp, probe
tgagcaagaacaaggggaacccttt

SEQ ID NO: 269857 - DNA, 25 bp, probe
tgagaattacaatgtgagaaccgct

SEQ ID NO: 269858 - DNA, 25 bp, probe
tgagaaggactttgtggtacggcag

SEQ ID NO: 269859 - DNA, 25 bp, probe
tgaaaggactctttaccctagaagg

SEQ ID NO: 269860 - DNA, 25 bp, probe
tgagtggaactcagtcccctgaaga

SEQ ID NO: 269861 - DNA, 25 bp, probe
tgagggagaagcggtacctcgccga

SEQ ID NO: 269862 - DNA, 25 bp, probe
tgagggagaagcggtacctcgccga

SEQ ID NO: 269863 - DNA, 25 bp, probe
tgcagaggaaagacaggacccgggg

SEQ ID NO: 269864 - DNA, 25 bp, probe
tgaggatacagagaggatcttccag

SEQ ID NO: 269865 - DNA, 25 bp, probe
tgagagcagagccgttggacttcct

SEQ ID NO: 269866 - DNA, 25 bp, probe
tgagaagacggtcgaacttgactat

SEQ ID NO: 269867 - DNA, 25 bp, probe
tgagaagacggtcgaacttgactat

SEQ ID NO: 269868 - DNA, 25 bp, probe
tcaaagaagtgcagaacgtactctt

SEQ ID NO: 269869 - DNA, 25 bp, probe
tgcaaatagtgtcaaaagtaaatta

SEQ ID NO: 269870 - DNA, 25 bp, probe
tgaataggtcccaaacttaaatgtg

SEQ ID NO: 269871 - DNA, 25 bp, probe
taatggtagcctaaacttaatattt

SEQ ID NO: 269872 - DNA, 25 bp, probe
tgactattccctgacagttattttt

SEQ ID NO: 269873 - DNA, 25 bp, probe
tgaggtagtccagaccttttctttt

SEQ ID NO: 269874 - DNA, 25 bp, probe
tgagggagtcatctacttttttttc

SEQ ID NO: 269875 - DNA, 25 bp, probe
tgaggcggccaattatcgtgtcttc

SEQ ID NO: 269876 - DNA, 25 bp, probe
tgaggcggccaattatcgtgtcttc

SEQ ID NO: 269877 - DNA, 25 bp, probe
tgaggcggccaattatcgtgtcttc

SEQ ID NO: 269878 - DNA, 25 bp, probe
tgcaagggccaaactctggttttcc

SEQ ID NO: 269879 - DNA, 25 bp, probe
tgagacggtcaatccaaattctacc

SEQ ID NO: 269880 - DNA, 25 bp, probe
tgagacggtcaatccaaattctacc

SEQ ID NO: 269881 - DNA, 25 bp, probe
tgaacgaggccatctgaaactgaca

SEQ ID NO: 269882 - DNA, 25 bp, probe
tgagacagttccttttagactcacc

SEQ ID NO: 269883 - DNA, 25 bp, probe
tgagaagtctacattgcttacattt

SEQ ID NO: 269884 - DNA, 25 bp, probe
tgagggcctagcattttttctactg

SEQ ID NO: 269885 - DNA, 25 bp, probe
tgagggactggtaattggccttcct

SEQ ID NO: 269886 - DNA, 25 bp, probe
tgagagacgggagtttggagttgcc

SEQ ID NO: 269887 - DNA, 25 bp, probe
tgagaagggggtgagtggtgccagt

SEQ ID NO: 269888 - DNA, 25 bp, probe
tgaggacaggggtgtgggtcaagga

SEQ ID NO: 269889 - DNA, 25 bp, probe
tgaggacaggggtgtgggtcaagga

SEQ ID NO: 269890 - DNA, 25 bp, probe
tgaggacggggcagagctgagtcgg

SEQ ID NO: 269891 - DNA, 25 bp, probe
tgcattgagtagggccggccagtgc

SEQ ID NO: 269892 - DNA, 25 bp, probe
tgcattgagtagggccggccagtgc

SEQ ID NO: 269893 - DNA, 25 bp, probe
tgagggtactggcctagccatgtgg

SEQ ID NO: 269894 - DNA, 25 bp, probe
tgaggagttctgggctgagctgcag

SEQ ID NO: 269895 - DNA, 25 bp, probe
tgaggagttctgggctgagctgcag

SEQ ID NO: 269896 - DNA, 25 bp, probe
tgagcagagcaaacgcagtaccatg

SEQ ID NO: 269897 - DNA, 25 bp, probe
tgactggaagtctgtcacgtggctc

SEQ ID NO: 269898 - DNA, 25 bp, probe
tgactggaagtctgtcacgtggctc

SEQ ID NO: 269899 - DNA, 25 bp, probe
tgacggagattaaccgtcggcacat

SEQ ID NO: 269900 - DNA, 25 bp, probe
tgcaatatgaagctgactttcgacc

SEQ ID NO: 269901 - DNA, 25 bp, probe
tgcaatatgaagctgactttcgacc

SEQ ID NO: 269902 - DNA, 25 bp, probe
tgagaataggcactgacttccttcc

SEQ ID NO: 269903 - DNA, 25 bp, probe
tgaggagggcacgactcctttgcac

SEQ ID NO: 269904 - DNA, 25 bp, probe
tgaggagggcacgactcctttgcac

SEQ ID NO: 269905 - DNA, 25 bp, probe
tgagggaggaggtctccttcttcag

SEQ ID NO: 269906 - DNA, 25 bp, probe
tgagagaattgggcctcctgatatt

SEQ ID NO: 269907 - DNA, 25 bp, probe
tgagaacatctggccgggcttttcc

SEQ ID NO: 269908 - DNA, 25 bp, probe
tgagaacatctggccgggcttttcc

SEQ ID NO: 269909 - DNA, 25 bp, probe
tgagaacatctggccgggcttttcc

SEQ ID NO: 269910 - DNA, 25 bp, probe
tgagaggtcctgtgggctctttaca

SEQ ID NO: 269911 - DNA, 25 bp, probe
tgaggtgggtgattgagagctgttc

SEQ ID NO: 269912 - DNA, 25 bp, probe
tgagcgtggttatcgcatgccgtgt

SEQ ID NO: 269913 - DNA, 25 bp, probe
tgatggtaggtggcacactgggtgc

SEQ ID NO: 269914 - DNA, 25 bp, probe
tgatggtggtgatcagcctggaccg

SEQ ID NO: 269915 - DNA, 25 bp, probe
tgaggatggtatggactgcatggac

SEQ ID NO: 269916 - DNA, 25 bp, probe
tgatggtggtgagcttcagcagcct

SEQ ID NO: 269917 - DNA, 25 bp, probe
tgatggaactcaactccagcagcgg

SEQ ID NO: 269918 - DNA, 25 bp, probe
tgaggacaggcaacacagcccgagc

SEQ ID NO: 269919 - DNA, 25 bp, probe
tgaggacaggcaacacagcccgagc

SEQ ID NO: 269920 - DNA, 25 bp, probe
tgagcgagcggacttcgcccaggcc

SEQ ID NO: 269921 - DNA, 25 bp, probe
tgacttggaaggtgccctgtgctat

SEQ ID NO: 269922 - DNA, 25 bp, probe
tgagttggcaagccaagccccatgc

SEQ ID NO: 269923 - DNA, 25 bp, probe
tgagtgtggacgagaccctcatgtg

SEQ ID NO: 269924 - DNA, 25 bp, probe
tgagtttgagtaggtccccatggct

SEQ ID NO: 269925 - DNA, 25 bp, probe
tgagtttgggggtagctccaagcct

SEQ ID NO: 269926 - DNA, 25 bp, probe
tgagtccggtggacgatgcctgcaa

SEQ ID NO: 269927 - DNA, 25 bp, probe
tgagtgcctgggaatctgagcctgc

SEQ ID NO: 269928 - DNA, 25 bp, probe
tgagagccatggcctgcaggggctc

SEQ ID NO: 269929 - DNA, 25 bp, probe
tgagtgccaatgccgcagtggcttc

SEQ ID NO: 269930 - DNA, 25 bp, probe
tgagcggaggcccaatggctatgcc

SEQ ID NO: 269931 - DNA, 25 bp, probe
tgagtcagggccctaggtgacctat

SEQ ID NO: 269932 - DNA, 25 bp, probe
tgagtcagtaggcagagttcacact

SEQ ID NO: 269933 - DNA, 25 bp, probe
tgagctgtgtagggagatattcaac

SEQ ID NO: 269934 - DNA, 25 bp, probe
tgagattgtctgttcagtttcccca

SEQ ID NO: 269935 - DNA, 25 bp, probe
tgagattctcttaatttcccctcag

SEQ ID NO: 269936 - DNA, 25 bp, probe
tgagattctcttaatttcccctcag

SEQ ID NO: 269937 - DNA, 25 bp, probe
tgagctgtctgtcatttacctactt

SEQ ID NO: 269938 - DNA, 25 bp, probe
tgagctgtctgtcatttacctactt

SEQ ID NO: 269939 - DNA, 25 bp, probe
tgacctttgtatctactcttttagt

SEQ ID NO: 269940 - DNA, 25 bp, probe
tgacttgtcaattactaccctttca

SEQ ID NO: 269941 - DNA, 25 bp, probe
tgagtatgctaaaaattccatcttc

SEQ ID NO: 269942 - DNA, 25 bp, probe
tgagttgcaaaattatctccagact

SEQ ID NO: 269943 - DNA, 25 bp, probe
tgagaagaaattaatctccccaccg

SEQ ID NO: 269944 - DNA, 25 bp, probe
tgagaagagtaaaagtccaccagcg

SEQ ID NO: 269945 - DNA, 25 bp, probe
tgagaaggtacaatgttccagccac

SEQ ID NO: 269946 - DNA, 25 bp, probe
tgagaaggtggatctctggagcctt

SEQ ID NO: 269947 - DNA, 25 bp, probe
tgagagggtgtatctgtggggcact

SEQ ID NO: 269948 - DNA, 25 bp, probe
tgagacggtgctcactgtgtggtcg

SEQ ID NO: 269949 - DNA, 25 bp, probe
tgagacggtgctcactgtgtggtcg

SEQ ID NO: 269950 - DNA, 25 bp, probe
tgagagttgagtcatctgggctgtc

SEQ ID NO: 269951 - DNA, 25 bp, probe
tgagagttgagtcatctgggctgtc

SEQ ID NO: 269952 - DNA, 25 bp, probe
tgagtgaatagctttcagggcgata

SEQ ID NO: 269953 - DNA, 25 bp, probe
tgaggaacatgctttctgtgccaac

SEQ ID NO: 269954 - DNA, 25 bp, probe
tgaggagagctgttcagctatggct

SEQ ID NO: 269955 - DNA, 25 bp, probe
tgaggcagaggctttccagtgttaa

SEQ ID NO: 269956 - DNA, 25 bp, probe
tgaggcagggcagggacagtctcca

SEQ ID NO: 269957 - DNA, 25 bp, probe
tgaggcagggcagggacagtctcca

SEQ ID NO: 269958 - DNA, 25 bp, probe
tgaggaagagacggaggcccagcag

SEQ ID NO: 269959 - DNA, 25 bp, probe
tgaggaagaggctcgcctccagtgg

SEQ ID NO: 269960 - DNA, 25 bp, probe
tgaggtggagcagctcctgtccgag

SEQ ID NO: 269961 - DNA, 25 bp, probe
tgaggtggagcagctggcctgcatc

SEQ ID NO: 269962 - DNA, 25 bp, probe
tgaggcggagcaggtgaccgtctgg

SEQ ID NO: 269963 - DNA, 25 bp, probe
tgaggggggagtgcagcagttggcc

SEQ ID NO: 269964 - DNA, 25 bp, probe
tgaggctgtggaagtccgactgggc

SEQ ID NO: 269965 - DNA, 25 bp, probe
tgaggcggatgtatggtcactgggc

SEQ ID NO: 269966 - DNA, 25 bp, probe
tgaggagcttggacttgcacttgag

SEQ ID NO: 269967 - DNA, 25 bp, probe
tgacgatgcctgggcttccagggtc

SEQ ID NO: 269968 - DNA, 25 bp, probe
tgaggatgacgctgatgtggagtgg

SEQ ID NO: 269969 - DNA, 25 bp, probe
tgagcggcacagatgatggggagcg

SEQ ID NO: 269970 - DNA, 25 bp, probe
tgaggcgatagaattggcgcatgcg

SEQ ID NO: 269971 - DNA, 25 bp, probe
tgaggcaacaacatgaagctgcggc

SEQ ID NO: 269972 - DNA, 25 bp, probe
tgaggcaagaagaatactggcggcc

SEQ ID NO: 269973 - DNA, 25 bp, probe
tgaggaaaatggacagcgggtgctg

SEQ ID NO: 269974 - DNA, 25 bp, probe
tgaggcccagaggatcacggggctg

SEQ ID NO: 269975 - DNA, 25 bp, probe
tgaggcccagaggatcacggggctg

SEQ ID NO: 269976 - DNA, 25 bp, probe
tgaggcctcggtcatgaagggcttc

SEQ ID NO: 269977 - DNA, 25 bp, probe
tgagaggccaggacgtccatgggtt

SEQ ID NO: 269978 - DNA, 25 bp, probe
tgagatgctcaacaggaccaaggat

SEQ ID NO: 269979 - DNA, 25 bp, probe
tgagatgctcaacaggaccaaggat

SEQ ID NO: 269980 - DNA, 25 bp, probe
tgagtccataaccaggctcaggagg

SEQ ID NO: 269981 - DNA, 25 bp, probe
tgagcaccaaatccagggcggaggg

SEQ ID NO: 269982 - DNA, 25 bp, probe
tgaggccttgcaccaggtgggggcc

SEQ ID NO: 269983 - DNA, 25 bp, probe
tgaggactctgacattgatggcgag

SEQ ID NO: 269984 - DNA, 25 bp, probe
tgagtgactggagacagggatgatg

SEQ ID NO: 269985 - DNA, 25 bp, probe
tgagttctgcgcacgcaggattcag

SEQ ID NO: 269986 - DNA, 25 bp, probe
tgaggtctggcatctggtaggcatc

SEQ ID NO: 269987 - DNA, 25 bp, probe
tgaggtctggcatctggtaggcatc

SEQ ID NO: 269988 - DNA, 25 bp, probe
tgaggctctgagaactggtactctc

SEQ ID NO: 269989 - DNA, 25 bp, probe
tgagctcttggatgtggtcagctct

SEQ ID NO: 269990 - DNA, 25 bp, probe
tgagatctcggaactttcagcagct

SEQ ID NO: 269991 - DNA, 25 bp, probe
tgagctggagcgagctcttcgtgct

SEQ ID NO: 269992 - DNA, 25 bp, probe
tgagggcagctgtgctttaggtctg

SEQ ID NO: 269993 - DNA, 25 bp, probe
tgagaccttgaccattttgaggctg

SEQ ID NO: 269994 - DNA, 25 bp, probe
tgagaccattcagtacaggaaggct

SEQ ID NO: 269995 - DNA, 25 bp, probe
tgagggcatggcctacatggaacgc

SEQ ID NO: 269996 - DNA, 25 bp, probe
tgaggatgcgggtccatagcaacct

SEQ ID NO: 269997 - DNA, 25 bp, probe
tgagacgctggactccatagcactc

SEQ ID NO: 269998 - DNA, 25 bp, probe
tgagacgctggactccatagcactc

SEQ ID NO: 269999 - DNA, 25 bp, probe
tgagataatgggtcacattggctgg

SEQ ID NO: 270000 - DNA, 25 bp, probe
tgagtagctgggactataggcgcgc

SEQ ID NO: 270001 - DNA, 25 bp, probe
tgagtatggcaggatcctgacccgc

SEQ ID NO: 270002 - DNA, 25 bp, probe
tgagagtgatgggttctcagccctg

SEQ ID NO: 270003 - DNA, 25 bp, probe
tgagcagctttgcattgccaggcag

SEQ ID NO: 270004 - DNA, 25 bp, probe
tgagagcctctatgtgcaaggtgat

SEQ ID NO: 270005 - DNA, 25 bp, probe
tgagtcctctgtttgcactggacat

SEQ ID NO: 270006 - DNA, 25 bp, probe
tgagtcagcacagtacaggcgagaa

SEQ ID NO: 270007 - DNA, 25 bp, probe
tgagtgctgagagctcacacagagt

SEQ ID NO: 270008 - DNA, 25 bp, probe
tgagtgtagcagggccaggaaaacc

SEQ ID NO: 270009 - DNA, 25 bp, probe
tgcaggtgaagatgcgcaaacgcta

SEQ ID NO: 270010 - DNA, 25 bp, probe
tgagagtcatcgggcgtggaagcta

SEQ ID NO: 270011 - DNA, 25 bp, probe
tgagagtcttgctggaggctggcga

SEQ ID NO: 270012 - DNA, 25 bp, probe
tgagagaaggcagcgaggcggcaga

SEQ ID NO: 270013 - DNA, 25 bp, probe
tgagagaaggcagcgaggcggcaga

SEQ ID NO: 270014 - DNA, 25 bp, probe
tgaggcaaggtgacgatggcgccgc

SEQ ID NO: 270015 - DNA, 25 bp, probe
tgaccaacatggagaaaccctgtct

SEQ ID NO: 270016 - DNA, 25 bp, probe
tgaccaacatggagaagccccgtct

SEQ ID NO: 270017 - DNA, 25 bp, probe
tgaggacaacgatgaaccaccacct

SEQ ID NO: 270018 - DNA, 25 bp, probe
tgaggacatttgtaacaccacctcc

SEQ ID NO: 270019 - DNA, 25 bp, probe
tgactactttgatacgacaccgcat

SEQ ID NO: 270020 - DNA, 25 bp, probe
tgactatcttaacaagttcctgccc

SEQ ID NO: 270021 - DNA, 25 bp, probe
tgacttttaggcccgtatgactcct

SEQ ID NO: 270022 - DNA, 25 bp, probe
tgacttatttggcccatccgagtct

SEQ ID NO: 270023 - DNA, 25 bp, probe
tgacttatttggcccatccgagtct

SEQ ID NO: 270024 - DNA, 25 bp, probe
tgacttttgtggcccgaaatcgtag

SEQ ID NO: 270025 - DNA, 25 bp, probe
tccttttgaacctccaacagggaag

SEQ ID NO: 270026 - DNA, 25 bp, probe
tccttttgaacctccaacagggaag

SEQ ID NO: 270027 - DNA, 25 bp, probe
taagctttacccactaactgggagg

SEQ ID NO: 270028 - DNA, 25 bp, probe
tgagacttttgcctcacctaaagag

SEQ ID NO: 270029 - DNA, 25 bp, probe
tgagtttcattgcataccggataca

SEQ ID NO: 270030 - DNA, 25 bp, probe
tgcaattttgtgctggctttgaaca

SEQ ID NO: 270031 - DNA, 25 bp, probe
tgactcatttggactgaatttgaaa

SEQ ID NO: 270032 - DNA, 25 bp, probe
tgaccctgtggaagcatttcgcgat

SEQ ID NO: 270033 - DNA, 25 bp, probe
tgaccatggtgattacttccggctg

SEQ ID NO: 270034 - DNA, 25 bp, probe
tgacctgggcattgtacaccgggat

SEQ ID NO: 270035 - DNA, 25 bp, probe
tatgtatggtcatggaatacgtgga

SEQ ID NO: 270036 - DNA, 25 bp, probe
tgaggaggtcatttactacgtgcga

SEQ ID NO: 270037 - DNA, 25 bp, probe
tgagggactgtgttgactgacgagc

SEQ ID NO: 270038 - DNA, 25 bp, probe
tgagggactgtctgagtgacctgct

SEQ ID NO: 270039 - DNA, 25 bp, probe
tgagggacatctttgctgatgaccc

SEQ ID NO: 270040 - DNA, 25 bp, probe
tgagggacatctttgctgatgaccc

SEQ ID NO: 270041 - DNA, 25 bp, probe
tgagggactgttggcatgcagtgcc

SEQ ID NO: 270042 - DNA, 25 bp, probe
tgagtggcactgaacaagcagacca

SEQ ID NO: 270043 - DNA, 25 bp, probe
tgaggagatcttgcaacatggccat

SEQ ID NO: 270044 - DNA, 25 bp, probe
tgaggattgcttctgccatggagct

SEQ ID NO: 270045 - DNA, 25 bp, probe
tgaggatggctttgtcctgttgctg

SEQ ID NO: 270046 - DNA, 25 bp, probe
tgaggacatctgggtctcatttgct

SEQ ID NO: 270047 - DNA, 25 bp, probe
tgagggcattgtctgttttctttgt

SEQ ID NO: 270048 - DNA, 25 bp, probe
tgaggtgtcctttgtttttgtgtgt

SEQ ID NO: 270049 - DNA, 25 bp, probe
tcatgcgaccctaggacttttttta

SEQ ID NO: 270050 - DNA, 25 bp, probe
taggccctagggttgagcaatttta

SEQ ID NO: 270051 - DNA, 25 bp, probe
tataaccgagggctggcgttttgga

SEQ ID NO: 270052 - DNA, 25 bp, probe
ttcccagggggcaggcacttactgg

SEQ ID NO: 270053 - DNA, 25 bp, probe
ttcccacggttcacgaccaattgga

SEQ ID NO: 270054 - DNA, 25 bp, probe
tccccacggtactgtgaacgtcgtg

SEQ ID NO: 270055 - DNA, 25 bp, probe
tccccacggtactgtgaacgtcgtg

SEQ ID NO: 270056 - DNA, 25 bp, probe
tgaggaaagagcactcttcactgac

SEQ ID NO: 270057 - DNA, 25 bp, probe
tagtcgacgctacattgatgagtac

SEQ ID NO: 270058 - DNA, 25 bp, probe
tgcagctctgacccaaatttagtcc

SEQ ID NO: 270059 - DNA, 25 bp, probe
tgacttggcccaagtttatggcctg

SEQ ID NO: 270060 - DNA, 25 bp, probe
tgagttctaccaatgtattgtccac

SEQ ID NO: 270061 - DNA, 25 bp, probe
tgacttctagtcaggaacccctgta

SEQ ID NO: 270062 - DNA, 25 bp, probe
tgacttctagtcaggaacccctgta

SEQ ID NO: 270063 - DNA, 25 bp, probe
tgacgtcgaggcagtgaacatcccg

SEQ ID NO: 270064 - DNA, 25 bp, probe
tgaggtcagaccaggatttgcattg

SEQ ID NO: 270065 - DNA, 25 bp, probe
tgagggcaggctgaggcaacgagtg

SEQ ID NO: 270066 - DNA, 25 bp, probe
tgagggcaagccctacaaccagaag

SEQ ID NO: 270067 - DNA, 25 bp, probe
tgagggcaagccctacaaccagaag

SEQ ID NO: 270068 - DNA, 25 bp, probe
tgagtaccagccctagaactcagcg

SEQ ID NO: 270069 - DNA, 25 bp, probe
tgagtgacacagacattgaccagct

SEQ ID NO: 270070 - DNA, 25 bp, probe
tgagtatgcataccttaaagctata

SEQ ID NO: 270071 - DNA, 25 bp, probe
tgagtactgaactttctgagtaaca

SEQ ID NO: 270072 - DNA, 25 bp, probe
tgaggactcagaagttcaagctaaa

SEQ ID NO: 270073 - DNA, 25 bp, probe
tgagtcatcatcttagtccaactaa

SEQ ID NO: 270074 - DNA, 25 bp, probe
tgaggatgatcatgagcggcaacta

SEQ ID NO: 270075 - DNA, 25 bp, probe
tgagagtgtcactagaggccttagt

SEQ ID NO: 270076 - DNA, 25 bp, probe
tgagagtgtcactagaggccttagt

SEQ ID NO: 270077 - DNA, 25 bp, probe
tgagagtgatctgcagatttttcag

SEQ ID NO: 270078 - DNA, 25 bp, probe
tgagagtgtccatgctctttttgct

SEQ ID NO: 270079 - DNA, 25 bp, probe
tgagggcaatcattctgtttaatcc

SEQ ID NO: 270080 - DNA, 25 bp, probe
tgaggacgtgtctgttatttcctaa

SEQ ID NO: 270081 - DNA, 25 bp, probe
tgagcgacgagcacgttcaattcct

SEQ ID NO: 270082 - DNA, 25 bp, probe
tgagggatacccatcccatatgcct

SEQ ID NO: 270083 - DNA, 25 bp, probe
tgagaaatcaccgattgcccttgtc

SEQ ID NO: 270084 - DNA, 25 bp, probe
tgagcaaaccctatgctcatctctc

SEQ ID NO: 270085 - DNA, 25 bp, probe
tgagcacatatcagctgtgctcctc

SEQ ID NO: 270086 - DNA, 25 bp, probe
tgagctatgtgcatcgtgatctggc

SEQ ID NO: 270087 - DNA, 25 bp, probe
tgagctgatgctggggtgctggcag

SEQ ID NO: 270088 - DNA, 25 bp, probe
tgagtgcctcagtggtggcgagctc

SEQ ID NO: 270089 - DNA, 25 bp, probe
tgagtgcctcagtggtggcgagctc

SEQ ID NO: 270090 - DNA, 25 bp, probe
tgagagcctgcaggagaaggcgcag

SEQ ID NO: 270091 - DNA, 25 bp, probe
tgagagccatgcagggcgtctgcag

SEQ ID NO: 270092 - DNA, 25 bp, probe
tgagtgcagctgagcggctgtatgg

SEQ ID NO: 270093 - DNA, 25 bp, probe
tgaggaggaaggagatgatgggaag

SEQ ID NO: 270094 - DNA, 25 bp, probe
tgaggaggaaggagatgatgggaag

SEQ ID NO: 270095 - DNA, 25 bp, probe
tgagatagcgcataataaggggaag

SEQ ID NO: 270096 - DNA, 25 bp, probe
tgagaaccccaagaagtgaaagatg

SEQ ID NO: 270097 - DNA, 25 bp, probe
taaccccctagaaagacagaagctt

SEQ ID NO: 270098 - DNA, 25 bp, probe
tgaactccacggaaaaatcagaagc

SEQ ID NO: 270099 - DNA, 25 bp, probe
tgaccatgcccgcataaaactgaag

SEQ ID NO: 270100 - DNA, 25 bp, probe
tgaccatactagtgaaacacatgaa

SEQ ID NO: 270101 - DNA, 25 bp, probe
tgaccagagacatctatgaaacgga

SEQ ID NO: 270102 - DNA, 25 bp, probe
tgaccgtgccaagaaaacgtaagca

SEQ ID NO: 270103 - DNA, 25 bp, probe
tgaccaggccaagactcaagcctcc

SEQ ID NO: 270104 - DNA, 25 bp, probe
tgacccccaagcagatcaagtccag

SEQ ID NO: 270105 - DNA, 25 bp, probe
tgacccccgactgctgtgcagtcga

SEQ ID NO: 270106 - DNA, 25 bp, probe
tgagcaatctgcagtctactggccc

SEQ ID NO: 270107 - DNA, 25 bp, probe
tgaggtccatcagtcttctggagcc

SEQ ID NO: 270108 - DNA, 25 bp, probe
tgaggtccatcagtatcggcagtgg

SEQ ID NO: 270109 - DNA, 25 bp, probe
tgacttacatcctcttcagattgct

SEQ ID NO: 270110 - DNA, 25 bp, probe
tgacttacatcctcttcagattgct

SEQ ID NO: 270111 - DNA, 25 bp, probe
tgactgcgagcccagcagcttagat

SEQ ID NO: 270112 - DNA, 25 bp, probe
tgagactggctgcccattctgagat

SEQ ID NO: 270113 - DNA, 25 bp, probe
tgagatctgggactgctttggtcat

SEQ ID NO: 270114 - DNA, 25 bp, probe
tgagtttgtgcagtgagttttcatt

SEQ ID NO: 270115 - DNA, 25 bp, probe
tgagcttgtgtctgcaaattgattt

SEQ ID NO: 270116 - DNA, 25 bp, probe
tgagcttgcatttgaaattgacttt

SEQ ID NO: 270117 - DNA, 25 bp, probe
tgagcttgcatttgaaattgacttt

SEQ ID NO: 270118 - DNA, 25 bp, probe
tgagcttcaggctctactgtttctc

SEQ ID NO: 270119 - DNA, 25 bp, probe
tgagcaacaccaacatattttttct

SEQ ID NO: 270120 - DNA, 25 bp, probe
tgagacagatactagatattttgat

SEQ ID NO: 270121 - DNA, 25 bp, probe
tgagtcaagactgcattttgtaaca

SEQ ID NO: 270122 - DNA, 25 bp, probe
tgagggtcctctacttcaggaacac

SEQ ID NO: 270123 - DNA, 25 bp, probe
tgagggtggagcacttcatgaacca

SEQ ID NO: 270124 - DNA, 25 bp, probe
tgaaattggagcctctcgaaacccc

SEQ ID NO: 270125 - DNA, 25 bp, probe
tgagaatggcgaagtccggcaaggc

SEQ ID NO: 270126 - DNA, 25 bp, probe
tgagtttagattcccttgaagatgt

SEQ ID NO: 270127 - DNA, 25 bp, probe
tgagtttattgtcccatttttgcca

SEQ ID NO: 270128 - DNA, 25 bp, probe
tgaggtagttgtgcctgaccttgcc

SEQ ID NO: 270129 - DNA, 25 bp, probe
tcaagtcccagtgcactaccttgga

SEQ ID NO: 270130 - DNA, 25 bp, probe
tgacttcccactgaccacggaaggc

SEQ ID NO: 270131 - DNA, 25 bp, probe
tgacttcttcacgaaccaagcctat

SEQ ID NO: 270132 - DNA, 25 bp, probe
tgaccgctacctgaacatagttcat

SEQ ID NO: 270133 - DNA, 25 bp, probe
tgaccctcacctgaataagggactt

SEQ ID NO: 270134 - DNA, 25 bp, probe
tgaccttcgccagcaacaatgtgac

SEQ ID NO: 270135 - DNA, 25 bp, probe
tgaggtttctcaggtggcaatgtaa

SEQ ID NO: 270136 - DNA, 25 bp, probe
tgagacctactgatgtccctgatac

SEQ ID NO: 270137 - DNA, 25 bp, probe
tgaccactactgtttccaggaaacc

SEQ ID NO: 270138 - DNA, 25 bp, probe
tgacccgaagggtcgcagacgaacc

SEQ ID NO: 270139 - DNA, 25 bp, probe
tgactttgaggcctacgcgaaaatc

SEQ ID NO: 270140 - DNA, 25 bp, probe
tgactacagggccaccggcaataaa

SEQ ID NO: 270141 - DNA, 25 bp, probe
tgagtgatcaggcaattcggtcaat

SEQ ID NO: 270142 - DNA, 25 bp, probe
tgctatacagcgcagttgtttccat

SEQ ID NO: 270143 - DNA, 25 bp, probe
tgcgaaagccttttggtgactttat

SEQ ID NO: 270144 - DNA, 25 bp, probe
tgagaagttcttttggtgccatgtt

SEQ ID NO: 270145 - DNA, 25 bp, probe
tgagaagttcttttggtgccatgtt

SEQ ID NO: 270146 - DNA, 25 bp, probe
tgagtatattatttgtggcagcttt

SEQ ID NO: 270147 - DNA, 25 bp, probe
tgagtgaatctcaggcgcagcgcct

SEQ ID NO: 270148 - DNA, 25 bp, probe
tgacgcaactgcggcatagcaacct

SEQ ID NO: 270149 - DNA, 25 bp, probe
tgacgttctgaggcacatcctcact

SEQ ID NO: 270150 - DNA, 25 bp, probe
tgagctttctagaatatttgcctaa

SEQ ID NO: 270151 - DNA, 25 bp, probe
tgactttcttgttttgtctcaaaac

SEQ ID NO: 270152 - DNA, 25 bp, probe
tgactttttctgtgcgccttaaaca

SEQ ID NO: 270153 - DNA, 25 bp, probe
tgacctttgacttggggttttacat

SEQ ID NO: 270154 - DNA, 25 bp, probe
tgaccctatagtttactactttaca

SEQ ID NO: 270155 - DNA, 25 bp, probe
tgacctagacctcacttacgttaca

SEQ ID NO: 270156 - DNA, 25 bp, probe
tgacgtagaccgtttgcttctttaa

SEQ ID NO: 270157 - DNA, 25 bp, probe
tgacggaacgtgttctttttggagg

SEQ ID NO: 270158 - DNA, 25 bp, probe
tgacggaacgtgttctttttggagg

SEQ ID NO: 270159 - DNA, 25 bp, probe
tgagcgtgaatctgtatcttgccgg

SEQ ID NO: 270160 - DNA, 25 bp, probe
tgagcctaactgctattctcgggtc

SEQ ID NO: 270161 - DNA, 25 bp, probe
tgacctgaagccttttgtcgttgcc

SEQ ID NO: 270162 - DNA, 25 bp, probe
tgacctgatccccaagggactgtcc

SEQ ID NO: 270163 - DNA, 25 bp, probe
tgaccctcgcctaagaggcgtgctg

SEQ ID NO: 270164 - DNA, 25 bp, probe
tgacctggaactagaggagggccta

SEQ ID NO: 270165 - DNA, 25 bp, probe
tgagctctgtgcactcggagcaggt

SEQ ID NO: 270166 - DNA, 25 bp, probe
tgagttgagctggcctagcgatgga

SEQ ID NO: 270167 - DNA, 25 bp, probe
tgagcttggtgcggtaggtgctggc

SEQ ID NO: 270168 - DNA, 25 bp, probe
tgagctatgggccttggcagtgcag

SEQ ID NO: 270169 - DNA, 25 bp, probe
tgagtcgggccctagcagtggggcc

SEQ ID NO: 270170 - DNA, 25 bp, probe
tgagtcctgacagctaaggatgggc

SEQ ID NO: 270171 - DNA, 25 bp, probe
tgactacatggagctcttcgacggc

SEQ ID NO: 270172 - DNA, 25 bp, probe
tgactgcaaggagcctgacaagtgc

SEQ ID NO: 270173 - DNA, 25 bp, probe
tgaccaagcaggaagctcagactgg

SEQ ID NO: 270174 - DNA, 25 bp, probe
tgagccaagtggcagctaaaagttg

SEQ ID NO: 270175 - DNA, 25 bp, probe
tgagaagggccgagtaaagtgtgat

SEQ ID NO: 270176 - DNA, 25 bp, probe
tgagaggagccccattttaggtctt

SEQ ID NO: 270177 - DNA, 25 bp, probe
tgagaggagccccattttaggtctt

SEQ ID NO: 270178 - DNA, 25 bp, probe
tgagggcatcttgtctttagtggtt

SEQ ID NO: 270179 - DNA, 25 bp, probe
tgagcggcttatgttctgaatttgt

SEQ ID NO: 270180 - DNA, 25 bp, probe
tgagcactttaaaatctgaactttc

SEQ ID NO: 270181 - DNA, 25 bp, probe
tgagattattttggtacacctttct

SEQ ID NO: 270182 - DNA, 25 bp, probe
tgacttatttccctaaactatttat

SEQ ID NO: 270183 - DNA, 25 bp, probe
tgagttgttgtcgttttttgtttgt

SEQ ID NO: 270184 - DNA, 25 bp, probe
tgagttttatctgtttctctccttt

SEQ ID NO: 270185 - DNA, 25 bp, probe
tgagggattttagcctcttccctct

SEQ ID NO: 270186 - DNA, 25 bp, probe
tgaccgatgtacaggactttcctct

SEQ ID NO: 270187 - DNA, 25 bp, probe
tgagcggtttgcagtgtccgttctc

SEQ ID NO: 270188 - DNA, 25 bp, probe
tgagtgtctttcaggtcatcaccat

SEQ ID NO: 270189 - DNA, 25 bp, probe
tgagtactatgtgggcttcaccctc

SEQ ID NO: 270190 - DNA, 25 bp, probe
tgagtaagaagctgcttcccctcct

SEQ ID NO: 270191 - DNA, 25 bp, probe
tgagaaagcagatgagcgtcccact

SEQ ID NO: 270192 - DNA, 25 bp, probe
tgagaatgacgatacccgtgactca

SEQ ID NO: 270193 - DNA, 25 bp, probe
tgagcatgagctgtaacccggagcc

SEQ ID NO: 270194 - DNA, 25 bp, probe
tgaccactggcttaggcgggagcct

SEQ ID NO: 270195 - DNA, 25 bp, probe
tgaccacaaatgcttgcttggactt

SEQ ID NO: 270196 - DNA, 25 bp, probe
tgacccaaatcacagagtgcctttg

SEQ ID NO: 270197 - DNA, 25 bp, probe
tgacctcaactacatggtttacatg

SEQ ID NO: 270198 - DNA, 25 bp, probe
tgacctcaaggccaagtttctacag

SEQ ID NO: 270199 - DNA, 25 bp, probe
tgacctgggggttgtctttgggaag

SEQ ID NO: 270200 - DNA, 25 bp, probe
tgagcctggggttctggtgttagaa

SEQ ID NO: 270201 - DNA, 25 bp, probe
tgagcgtgtagcgtcctgaggaata

SEQ ID NO: 270202 - DNA, 25 bp, probe
tgagagcatggagtccctagtgtga

SEQ ID NO: 270203 - DNA, 25 bp, probe
tgagaggcggtgccgctcagtggaa

SEQ ID NO: 270204 - DNA, 25 bp, probe
tgaaggtggtgcccaaggtaaaggt

SEQ ID NO: 270205 - DNA, 25 bp, probe
tgaccaaggtatcaatgagctcaca

SEQ ID NO: 270206 - DNA, 25 bp, probe
tgaccaaggtatcaatgagctcaca

SEQ ID NO: 270207 - DNA, 25 bp, probe
tgaccatctggttgaaaaatctttc

SEQ ID NO: 270208 - DNA, 25 bp, probe
tgaccagctaaacaccaatttcttc

SEQ ID NO: 270209 - DNA, 25 bp, probe
tgagctaccaaaactaaattctttc

SEQ ID NO: 270210 - DNA, 25 bp, probe
tgagaccaacttactaaatttttag

SEQ ID NO: 270211 - DNA, 25 bp, probe
tgaaccgacttttctaaagctctga

SEQ ID NO: 270212 - DNA, 25 bp, probe
tgaagcccccaagtaagaagtctga

SEQ ID NO: 270213 - DNA, 25 bp, probe
tgaaaactcccatttaagtgtctga

SEQ ID NO: 270214 - DNA, 25 bp, probe
tgagaatatctatgatttacagagt

SEQ ID NO: 270215 - DNA, 25 bp, probe
tgagatagctctgcagataagaaaa

SEQ ID NO: 270216 - DNA, 25 bp, probe
tgagtcctggcccaaagaagcaagg

SEQ ID NO: 270217 - DNA, 25 bp, probe
tgacatccgggccgacgtatggagc

SEQ ID NO: 270218 - DNA, 25 bp, probe
tgacatccgggccgacgtatggagc

SEQ ID NO: 270219 - DNA, 25 bp, probe
tgacatccgggccgacgtatggagc

SEQ ID NO: 270220 - DNA, 25 bp, probe
tgacatccgggccgacgtatggagc

SEQ ID NO: 270221 - DNA, 25 bp, probe
tgaccgggtcacacaaaggcatgct

SEQ ID NO: 270222 - DNA, 25 bp, probe
tgaccacgggccaggaaggcttcat

SEQ ID NO: 270223 - DNA, 25 bp, probe
tgactccaagggctggcaagcgtcc

SEQ ID NO: 270224 - DNA, 25 bp, probe
tagtcccgggggaacatgattccac

SEQ ID NO: 270225 - DNA, 25 bp, probe
tagtcccgggggaacatgattccac

SEQ ID NO: 270226 - DNA, 25 bp, probe
tgaatggccggtgggaaatcttccc

SEQ ID NO: 270227 - DNA, 25 bp, probe
tgacggccggtgggaggtgcatggc

SEQ ID NO: 270228 - DNA, 25 bp, probe
tgaccccgctggtggaggatggtgt

SEQ ID NO: 270229 - DNA, 25 bp, probe
tgaccagcccagaccagaagttagt

SEQ ID NO: 270230 - DNA, 25 bp, probe
tgagtcagcccgaaaggatgttaat

SEQ ID NO: 270231 - DNA, 25 bp, probe
tgagtcagcccgaaaggatgttaat

SEQ ID NO: 270232 - DNA, 25 bp, probe
tgagtctcccagatacgttgcattg

SEQ ID NO: 270233 - DNA, 25 bp, probe
tgagtctcccagatacgttgcattg

SEQ ID NO: 270234 - DNA, 25 bp, probe
tgagtccctgaactacagtgtctat

SEQ ID NO: 270235 - DNA, 25 bp, probe
tgagctctaccatgtacaatcccat

SEQ ID NO: 270236 - DNA, 25 bp, probe
tgagctgttactaggacaaccaata

SEQ ID NO: 270237 - DNA, 25 bp, probe
tgagctgattttcctgaaacactaa

SEQ ID NO: 270238 - DNA, 25 bp, probe
tgagtgttttggcagcagcacatct

SEQ ID NO: 270239 - DNA, 25 bp, probe
tgagatgttggcaggacagcctccc

SEQ ID NO: 270240 - DNA, 25 bp, probe
tgagcaggcggcagtgaacagcact

SEQ ID NO: 270241 - DNA, 25 bp, probe
tgagcacatgagataggccccacat

SEQ ID NO: 270242 - DNA, 25 bp, probe
tgagcacatcaaaacccacgagctg

SEQ ID NO: 270243 - DNA, 25 bp, probe
tgagaatcatggacaaaacctgctg

SEQ ID NO: 270244 - DNA, 25 bp, probe
tgagataatgaagacaacacactat

SEQ ID NO: 270245 - DNA, 25 bp, probe
tgagtcatcccaggactcagcacac

SEQ ID NO: 270246 - DNA, 25 bp, probe
tgagatcctcagactactgcaacct

SEQ ID NO: 270247 - DNA, 25 bp, probe
tgagatcctcagactactgcaacct

SEQ ID NO: 270248 - DNA, 25 bp, probe
tgagatgcacttacttctcagcttc

SEQ ID NO: 270249 - DNA, 25 bp, probe
tgagatctaatgacttcagcattgt

SEQ ID NO: 270250 - DNA, 25 bp, probe
tgagttcactgtgccagcatgcttc

SEQ ID NO: 270251 - DNA, 25 bp, probe
tgagttcactgtgccagcatgcttc

SEQ ID NO: 270252 - DNA, 25 bp, probe
tgagttcatgctgtcggatctggcc

SEQ ID NO: 270253 - DNA, 25 bp, probe
tgagttcatgctgtcggatctggcc

SEQ ID NO: 270254 - DNA, 25 bp, probe
tgagagaagccttccagatcctgaa

SEQ ID NO: 270255 - DNA, 25 bp, probe
tgagagaagagagtgccagagtcta

SEQ ID NO: 270256 - DNA, 25 bp, probe
tgagagaagagggcgacaattagga

SEQ ID NO: 270257 - DNA, 25 bp, probe
tgagctgaagcgcaggtcaattaag

SEQ ID NO: 270258 - DNA, 25 bp, probe
tgactcaaggcctgctgtttaatca

SEQ ID NO: 270259 - DNA, 25 bp, probe
tgaccaagggtcgcattataacagt

SEQ ID NO: 270260 - DNA, 25 bp, probe
tgaccaagggtcgcattataacagt

SEQ ID NO: 270261 - DNA, 25 bp, probe
tgcagtgccaggaacccttaaacag

SEQ ID NO: 270262 - DNA, 25 bp, probe
tgagagcatcagggacccgtcaaca

SEQ ID NO: 270263 - DNA, 25 bp, probe
tgaagacggtcaacgagtcagccag

SEQ ID NO: 270264 - DNA, 25 bp, probe
tgaaacaggtacacgggccagggaa

SEQ ID NO: 270265 - DNA, 25 bp, probe
tgactaagtcttaggtgggttggga

SEQ ID NO: 270266 - DNA, 25 bp, probe
tgcaccaccttcaggtagcggttga

SEQ ID NO: 270267 - DNA, 25 bp, probe
tgagctacctggaggagcagcgcgt

SEQ ID NO: 270268 - DNA, 25 bp, probe
tgagctacctggaggagcagcgcgt

SEQ ID NO: 270269 - DNA, 25 bp, probe
tgagatactcgaggtggatgtcgcg

SEQ ID NO: 270270 - DNA, 25 bp, probe
tgagaatctgagtttagattccctt

SEQ ID NO: 270271 - DNA, 25 bp, probe
tgagtcagtagatctggtttccatt

SEQ ID NO: 270272 - DNA, 25 bp, probe
tgagtgcgtatgaaagtgtgtgtct

SEQ ID NO: 270273 - DNA, 25 bp, probe
tgagatgcctcaagaatcttttcat

SEQ ID NO: 270274 - DNA, 25 bp, probe
tgagatgcctcaagaatcttttcat

SEQ ID NO: 270275 - DNA, 25 bp, probe
tgagatttcataccaggtttcatga

SEQ ID NO: 270276 - DNA, 25 bp, probe
tgagatttctcatcaggcacaccaa

SEQ ID NO: 270277 - DNA, 25 bp, probe
tgagatttctcatcaggcacaccaa

SEQ ID NO: 270278 - DNA, 25 bp, probe
taattttcaggaagacccaatccag

SEQ ID NO: 270279 - DNA, 25 bp, probe
tgaattttggagagctccccagctc

SEQ ID NO: 270280 - DNA, 25 bp, probe
tgagttcattcagaagctcctccag

SEQ ID NO: 270281 - DNA, 25 bp, probe
tgagttcattcagaagctcctccag

SEQ ID NO: 270282 - DNA, 25 bp, probe
tgagtttgatcccagatccgtccat

SEQ ID NO: 270283 - DNA, 25 bp, probe
tgagtttgctcacagtgcctgtgca

SEQ ID NO: 270284 - DNA, 25 bp, probe
tgagagaagcgctgagtcctgtgca

SEQ ID NO: 270285 - DNA, 25 bp, probe
tgagagattcgatcagtgtgcctga

SEQ ID NO: 270286 - DNA, 25 bp, probe
tgagagattcgatcagtgtgcctga

SEQ ID NO: 270287 - DNA, 25 bp, probe
tgagactgttgaaagggcctgacct

SEQ ID NO: 270288 - DNA, 25 bp, probe
tgagactgtcctggaggatccaccc

SEQ ID NO: 270289 - DNA, 25 bp, probe
tgagcactggccgaggtgatgccca

SEQ ID NO: 270290 - DNA, 25 bp, probe
tgagcactggccgaggtgatgccca

SEQ ID NO: 270291 - DNA, 25 bp, probe
tgagcacagtcaggggctgggcatc

SEQ ID NO: 270292 - DNA, 25 bp, probe
tgagctgcctgagtgggcgtggtac

SEQ ID NO: 270293 - DNA, 25 bp, probe
tgagctgcctgagtgggcgtggtac

SEQ ID NO: 270294 - DNA, 25 bp, probe
tgagctccagagaggcagtgtggcc

SEQ ID NO: 270295 - DNA, 25 bp, probe
tgacccgtttggggtctcatctcta

SEQ ID NO: 270296 - DNA, 25 bp, probe
tgagcttctggctggtgagttcacc

SEQ ID NO: 270297 - DNA, 25 bp, probe
tgagatgatcagacaccggagttca

SEQ ID NO: 270298 - DNA, 25 bp, probe
tgagatgatcgaatctgggtgtttc

SEQ ID NO: 270299 - DNA, 25 bp, probe
tgagaatatgtgttcgtctgtttgt

SEQ ID NO: 270300 - DNA, 25 bp, probe
tgagtaagagctggtgtctgattgt

SEQ ID NO: 270301 - DNA, 25 bp, probe
tgagctactcctgggtcatgagaag

SEQ ID NO: 270302 - DNA, 25 bp, probe
tgagcccctttggctaagacgggtt

SEQ ID NO: 270303 - DNA, 25 bp, probe
tgagcccctttggctaagacgggtt

SEQ ID NO: 270304 - DNA, 25 bp, probe
tgaacagcctttgccaatcgtgggt

SEQ ID NO: 270305 - DNA, 25 bp, probe
tgagatccgctctgtggagacgggc

SEQ ID NO: 270306 - DNA, 25 bp, probe
tgagactagacgggggcagcggctc

SEQ ID NO: 270307 - DNA, 25 bp, probe
tgagactgagccagcttgggggtca

SEQ ID NO: 270308 - DNA, 25 bp, probe
tgagacacagccgggtggtgaagct

SEQ ID NO: 270309 - DNA, 25 bp, probe
tgagcaagcaccaggacttcaactc

SEQ ID NO: 270310 - DNA, 25 bp, probe
tgacatctctccagtacttaatctc

SEQ ID NO: 270311 - DNA, 25 bp, probe
tgacatctctccagtacttaatctc

SEQ ID NO: 270312 - DNA, 25 bp, probe
tgacctcaagctgtgacttaaccaa

SEQ ID NO: 270313 - DNA, 25 bp, probe
tgaccccagctcaagcattaagaca

SEQ ID NO: 270314 - DNA, 25 bp, probe
tgaccccctcggagccaaatgaggc

SEQ ID NO: 270315 - DNA, 25 bp, probe
tgaccccctcggagccaaatgaggc

SEQ ID NO: 270316 - DNA, 25 bp, probe
tcctccctttggtgacctgaagtca

SEQ ID NO: 270317 - DNA, 25 bp, probe
tgcccagtcgttctggaccaaagga

SEQ ID NO: 270318 - DNA, 25 bp, probe
tgaccaggagttcctgaacgagaag

SEQ ID NO: 270319 - DNA, 25 bp, probe
tgacaaagtgtttctagggtgtagc

SEQ ID NO: 270320 - DNA, 25 bp, probe
tgagaactggtactctcagtgtgtt

SEQ ID NO: 270321 - DNA, 25 bp, probe
tgagaaccgtgacatcagcgtagtg

SEQ ID NO: 270322 - DNA, 25 bp, probe
tgagaaccgggaacctgtgggctca

SEQ ID NO: 270323 - DNA, 25 bp, probe
tgagcaagggtgagtcctgggcggc

SEQ ID NO: 270324 - DNA, 25 bp, probe
tgagaagggttgatcctgcatctgg

SEQ ID NO: 270325 - DNA, 25 bp, probe
tgagacagggtctcactctgtcacc

SEQ ID NO: 270326 - DNA, 25 bp, probe
tgagccaagatcacgccattgtact

SEQ ID NO: 270327 - DNA, 25 bp, probe
tgagccatgatggcaccactgcact

SEQ ID NO: 270328 - DNA, 25 bp, probe
tgagcaatgtggccgagctgctgca

SEQ ID NO: 270329 - DNA, 25 bp, probe
tgagaagctgagtcttctgcatcag

SEQ ID NO: 270330 - DNA, 25 bp, probe
tgagaagctgagtcttctgcatcag

SEQ ID NO: 270331 - DNA, 25 bp, probe
tgagcattgccatcatctctgctct

SEQ ID NO: 270332 - DNA, 25 bp, probe
tgcatgctcaccagccatgtatgca

SEQ ID NO: 270333 - DNA, 25 bp, probe
tgagctccatcaaggctgacatcgt

SEQ ID NO: 270334 - DNA, 25 bp, probe
tgagactcagccgctgtctcgccgt

SEQ ID NO: 270335 - DNA, 25 bp, probe
tgagacatacacactttccagcaag

SEQ ID NO: 270336 - DNA, 25 bp, probe
tgagacatacacactttccagcaag

SEQ ID NO: 270337 - DNA, 25 bp, probe
tgaccacagcctgatattccagaac

SEQ ID NO: 270338 - DNA, 25 bp, probe
tgagcccaggctaaactgccaacat

SEQ ID NO: 270339 - DNA, 25 bp, probe
tgacggcagggcccctgccaattgc

SEQ ID NO: 270340 - DNA, 25 bp, probe
tgacggaggagtagccggccagtcg

SEQ ID NO: 270341 - DNA, 25 bp, probe
tgacggttgatgtggcctgaaagca

SEQ ID NO: 270342 - DNA, 25 bp, probe
tgacctttgcactggcattaaagag

SEQ ID NO: 270343 - DNA, 25 bp, probe
tgacctcctcaactacctaagaagt

SEQ ID NO: 270344 - DNA, 25 bp, probe
tgagctcacctacaacctagagaag

SEQ ID NO: 270345 - DNA, 25 bp, probe
tgagccaccgcaaaaccatgaagaa

SEQ ID NO: 270346 - DNA, 25 bp, probe
tgagataccgcaacaggccgaacta

SEQ ID NO: 270347 - DNA, 25 bp, probe
tgagataccgcaacaggccgaacta

SEQ ID NO: 270348 - DNA, 25 bp, probe
tgagatgacctcactggctctggtc

SEQ ID NO: 270349 - DNA, 25 bp, probe
tgagatgacctcactggctctggtc

SEQ ID NO: 270350 - DNA, 25 bp, probe
tgagcgaagctataggctcttgttg

SEQ ID NO: 270351 - DNA, 25 bp, probe
tgagcacaactttcaaattatgtat

SEQ ID NO: 270352 - DNA, 25 bp, probe
tgagcacaactttcaaattatgtat

SEQ ID NO: 270353 - DNA, 25 bp, probe
tgacgatgacacctccaattttgat

SEQ ID NO: 270354 - DNA, 25 bp, probe
tgactgatgtagataatttaggatt

SEQ ID NO: 270355 - DNA, 25 bp, probe
tgagctggggataaacttgaatgtt

SEQ ID NO: 270356 - DNA, 25 bp, probe
tgagctggggataaacttgaatgtt

SEQ ID NO: 270357 - DNA, 25 bp, probe
tgagctggggaaaatctgagaacac

SEQ ID NO: 270358 - DNA, 25 bp, probe
tgagctgagggaaaattgtaaacat

SEQ ID NO: 270359 - DNA, 25 bp, probe
tgagctgcagctcccaaatttcaaa

SEQ ID NO: 270360 - DNA, 25 bp, probe
tgagctgcagctcccaaatttcaaa

SEQ ID NO: 270361 - DNA, 25 bp, probe
tgcagtatgtcccaagacctaccaa

SEQ ID NO: 270362 - DNA, 25 bp, probe
tcgtagtaagaagaccacacacctg

SEQ ID NO: 270363 - DNA, 25 bp, probe
tgagaagctaaatgccctccaactt

SEQ ID NO: 270364 - DNA, 25 bp, probe
tgagaactaaatgctgtaccacaga

SEQ ID NO: 270365 - DNA, 25 bp, probe
tgagttccaaattttaccattcttt

SEQ ID NO: 270366 - DNA, 25 bp, probe
tgagaccacaatttgttcacttttg

SEQ ID NO: 270367 - DNA, 25 bp, probe
tgagagcccagtcattgtactgttt

SEQ ID NO: 270368 - DNA, 25 bp, probe
tgagagcccagtcattgtactgttt

SEQ ID NO: 270369 - DNA, 25 bp, probe
tgagagacagaggcttgtttgcttt

SEQ ID NO: 270370 - DNA, 25 bp, probe
tgagcccagaacagatttcttcgca

SEQ ID NO: 270371 - DNA, 25 bp, probe
tgagctacaaacacatgcgcttcct

SEQ ID NO: 270372 - DNA, 25 bp, probe
tgacttcaagacgctggctgatgta

SEQ ID NO: 270373 - DNA, 25 bp, probe
tgactgtctaagcacagtgggtcac

SEQ ID NO: 270374 - DNA, 25 bp, probe
tgactgtctaagcacagtgggtcac

SEQ ID NO: 270375 - DNA, 25 bp, probe
tgacgtggactgcacaatgacagag

SEQ ID NO: 270376 - DNA, 25 bp, probe
tgagaggtcctcaacaagcacgagc

SEQ ID NO: 270377 - DNA, 25 bp, probe
tgagagtgacccaaagatgagatgg

SEQ ID NO: 270378 - DNA, 25 bp, probe
tgagaggaacgggagatatgagggc

SEQ ID NO: 270379 - DNA, 25 bp, probe
tgagaagagcaccctgagaatgaaa

SEQ ID NO: 270380 - DNA, 25 bp, probe
tgagaaggcaagtttgagtagcagc

SEQ ID NO: 270381 - DNA, 25 bp, probe
tgagaaacagctctctgagatactc

SEQ ID NO: 270382 - DNA, 25 bp, probe
tgagaagtcactggtctagatcccg

SEQ ID NO: 270383 - DNA, 25 bp, probe
tgagacagaatctcgctctgtcgcc

SEQ ID NO: 270384 - DNA, 25 bp, probe
tgagacgaatgatggctagatcgac

SEQ ID NO: 270385 - DNA, 25 bp, probe
tgagcaggcaggaggcttggcgacc

SEQ ID NO: 270386 - DNA, 25 bp, probe
tgacgacggtggactatggcgacat

SEQ ID NO: 270387 - DNA, 25 bp, probe
tgacgacggtggactatggcgacat

SEQ ID NO: 270388 - DNA, 25 bp, probe
tgagctacctgatggccatggagaa

SEQ ID NO: 270389 - DNA, 25 bp, probe
tgagcaagtctgagtacatggagat

SEQ ID NO: 270390 - DNA, 25 bp, probe
tgagcaagtctgagtacatggagat

SEQ ID NO: 270391 - DNA, 25 bp, probe
tgagcttctgctaaaacatggacat

SEQ ID NO: 270392 - DNA, 25 bp, probe
tgacattcttttgcaaggactaaaa

SEQ ID NO: 270393 - DNA, 25 bp, probe
tgacacttgttgtccagttgaaaaa

SEQ ID NO: 270394 - DNA, 25 bp, probe
tgagccgtttgccaagctcatgaaa

SEQ ID NO: 270395 - DNA, 25 bp, probe
tgagccgtttgccaagctcatgaaa

SEQ ID NO: 270396 - DNA, 25 bp, probe
tgagcatgtgttcctgggctcagaa

SEQ ID NO: 270397 - DNA, 25 bp, probe
tgagactgtcacttgggctaagcag

SEQ ID NO: 270398 - DNA, 25 bp, probe
tgaacgctacggggaaaatgcattt

SEQ ID NO: 270399 - DNA, 25 bp, probe
tgaactggactagtgaaaaatctag

SEQ ID NO: 270400 - DNA, 25 bp, probe
tgaacatgtgataatctaatacctg

SEQ ID NO: 270401 - DNA, 25 bp, probe
tgagcagggatatctacagcaccga

SEQ ID NO: 270402 - DNA, 25 bp, probe
tgagacgtctaggaacacaccagag

SEQ ID NO: 270403 - DNA, 25 bp, probe
tgaccccaaagaatcacaccaagac

SEQ ID NO: 270404 - DNA, 25 bp, probe
tgaccacaagaccatttaaagaaat

SEQ ID NO: 270405 - DNA, 25 bp, probe
tgagccctgaattgttctcaaacaa

SEQ ID NO: 270406 - DNA, 25 bp, probe
tgagcccttcactcctgagaaaaag

SEQ ID NO: 270407 - DNA, 25 bp, probe
tgaccctatcccctgggaacatgaa

SEQ ID NO: 270408 - DNA, 25 bp, probe
tgaccctatcccctgggaacatgaa

SEQ ID NO: 270409 - DNA, 25 bp, probe
tgacccgggacactgaggcacaaaa

SEQ ID NO: 270410 - DNA, 25 bp, probe
tgagcccggtgcaggaacacgagac

SEQ ID NO: 270411 - DNA, 25 bp, probe
tgagagccccacagggaagggtcag

SEQ ID NO: 270412 - DNA, 25 bp, probe
tgaacctccaacagggaaggctctg

SEQ ID NO: 270413 - DNA, 25 bp, probe
tgaacctccaacagggaaggctctg

SEQ ID NO: 270414 - DNA, 25 bp, probe
tgaatttaaactcagcaaagtctgg

SEQ ID NO: 270415 - DNA, 25 bp, probe
tagaaaaagcctagaccaagtttgt

SEQ ID NO: 270416 - DNA, 25 bp, probe
tagaaaaagcctagaccaagtttgt

SEQ ID NO: 270417 - DNA, 25 bp, probe
taatgaaagttctcccttccttgat

SEQ ID NO: 270418 - DNA, 25 bp, probe
tgaagaaaagactctactatcggga

SEQ ID NO: 270419 - DNA, 25 bp, probe
tgaagaaaagactctactatcggga

SEQ ID NO: 270420 - DNA, 25 bp, probe
tgaactacaagaatcctgaccaggt

SEQ ID NO: 270421 - DNA, 25 bp, probe
tgacctacgataattatacgacgga

SEQ ID NO: 270422 - DNA, 25 bp, probe
tgacattccggaaatttggatcgaa

SEQ ID NO: 270423 - DNA, 25 bp, probe
tgactggtcctatgattatggcatc

SEQ ID NO: 270424 - DNA, 25 bp, probe
tgactggtcctatgattatggcatc

SEQ ID NO: 270425 - DNA, 25 bp, probe
tgacgagatccttcgtggggaaccg

SEQ ID NO: 270426 - DNA, 25 bp, probe
tgaccccttacgtggtgacacggta

SEQ ID NO: 270427 - DNA, 25 bp, probe
tgagcccactgtgcgtggggctccc

SEQ ID NO: 270428 - DNA, 25 bp, probe
tgacgcaactctcagtgaaactgcc

SEQ ID NO: 270429 - DNA, 25 bp, probe
tgacctacctcaggtggaacggtga

SEQ ID NO: 270430 - DNA, 25 bp, probe
tgagcctgaagcactgggcaacctg

SEQ ID NO: 270431 - DNA, 25 bp, probe
tgagcctgaagcactgggcaacctg

SEQ ID NO: 270432 - DNA, 25 bp, probe
tgagcctgaagcactgggcaacctg

SEQ ID NO: 270433 - DNA, 25 bp, probe
tgagcctgaagcactgggcaacctg

SEQ ID NO: 270434 - DNA, 25 bp, probe
tgacttgaagcattttgacccagag

SEQ ID NO: 270435 - DNA, 25 bp, probe
tgaccatggaagctgagaggccaga

SEQ ID NO: 270436 - DNA, 25 bp, probe
tgagagccccagctgacatggaaat

SEQ ID NO: 270437 - DNA, 25 bp, probe
tgagagaccacatgaagcagaaaca

SEQ ID NO: 270438 - DNA, 25 bp, probe
tgagaatcaacccaactgaagcatt

SEQ ID NO: 270439 - DNA, 25 bp, probe
tgaagcaaaatccagaccaagtcat

SEQ ID NO: 270440 - DNA, 25 bp, probe
tgactgagtaccctgatgccaagaa

SEQ ID NO: 270441 - DNA, 25 bp, probe
tgacaggtgaccgatgtacaggact

SEQ ID NO: 270442 - DNA, 25 bp, probe
tgagccacccttggctacaggacta

SEQ ID NO: 270443 - DNA, 25 bp, probe
tgcagtgcaccctggctacgggttc

SEQ ID NO: 270444 - DNA, 25 bp, probe
tgagaccccagagctgacagggcct

SEQ ID NO: 270445 - DNA, 25 bp, probe
tgagaccccagagctgacagggcct

SEQ ID NO: 270446 - DNA, 25 bp, probe
tgacaccccaggggagggagcttgc

SEQ ID NO: 270447 - DNA, 25 bp, probe
tgactacccaggcagatgggagggt

SEQ ID NO: 270448 - DNA, 25 bp, probe
tgactatccagctctgagagacggg

SEQ ID NO: 270449 - DNA, 25 bp, probe
tgacttcacagcccagcatgggggc

SEQ ID NO: 270450 - DNA, 25 bp, probe
tgactgctgggccccagacagtcca

SEQ ID NO: 270451 - DNA, 25 bp, probe
tgacttcaggatctcaggagtcaat

SEQ ID NO: 270452 - DNA, 25 bp, probe
tgaatgtaaatgtacatgtgcagat

SEQ ID NO: 270453 - DNA, 25 bp, probe
tgagcagcgaaagccatgtgacacg

SEQ ID NO: 270454 - DNA, 25 bp, probe
tgagcggagcaagcatctggacctg

SEQ ID NO: 270455 - DNA, 25 bp, probe
tgactgtgagaactcatcgaaactg

SEQ ID NO: 270456 - DNA, 25 bp, probe
tgacattgagaaccctgaaacccca

SEQ ID NO: 270457 - DNA, 25 bp, probe
tgacattgagaaccctgaaacccca

SEQ ID NO: 270458 - DNA, 25 bp, probe
tgaagatgtcccggtagcaaaccca

SEQ ID NO: 270459 - DNA, 25 bp, probe
tgaagatatcccgttagaagaacca

SEQ ID NO: 270460 - DNA, 25 bp, probe
tgaagattttggaagcgaaagaccc

SEQ ID NO: 270461 - DNA, 25 bp, probe
tgaatttttagttgggaagcctcct

SEQ ID NO: 270462 - DNA, 25 bp, probe
tgacttcttccggggaaaagctcct

SEQ ID NO: 270463 - DNA, 25 bp, probe
tgagcttcgccctggaagaagcctc

SEQ ID NO: 270464 - DNA, 25 bp, probe
tgagcagggcccttgcggagttccg

SEQ ID NO: 270465 - DNA, 25 bp, probe
tgagcaagtccctcttgagtctgtt

SEQ ID NO: 270466 - DNA, 25 bp, probe
tgagaatgaccatcttctgtctcgt

SEQ ID NO: 270467 - DNA, 25 bp, probe
tgagaagcctcatgggagtcaggga

SEQ ID NO: 270468 - DNA, 25 bp, probe
tagtagtccacgcggaggggcaggt

SEQ ID NO: 270469 - DNA, 25 bp, probe
taaagtccacgagggaagagaagga

SEQ ID NO: 270470 - DNA, 25 bp, probe
tgaaaatcccagaagtcaaagggga

SEQ ID NO: 270471 - DNA, 25 bp, probe
tgagaatatccccgagttggcggct

SEQ ID NO: 270472 - DNA, 25 bp, probe
tgagaaacagcccaagcttcagcgg

SEQ ID NO: 270473 - DNA, 25 bp, probe
tgagaacagcagggaggaccgcgtc

SEQ ID NO: 270474 - DNA, 25 bp, probe
tgagaagggggaacagctccgcatc

SEQ ID NO: 270475 - DNA, 25 bp, probe
tgacattgtgggcttcaccaccatc

SEQ ID NO: 270476 - DNA, 25 bp, probe
tgagcactgtggggattctccgtgc

SEQ ID NO: 270477 - DNA, 25 bp, probe
tgagactattatggatccccgtgcc

SEQ ID NO: 270478 - DNA, 25 bp, probe
tgagactgtgtttatctccctttaa

SEQ ID NO: 270479 - DNA, 25 bp, probe
tgagccttgaattaaccatgcattt

SEQ ID NO: 270480 - DNA, 25 bp, probe
tgactttgaaaacctcagtactgaa

SEQ ID NO: 270481 - DNA, 25 bp, probe
tgactttgaaaacctcagtactgaa

SEQ ID NO: 270482 - DNA, 25 bp, probe
tgacgaagaaaatgccaaccaaagc

SEQ ID NO: 270483 - DNA, 25 bp, probe
tgcagggagaccaggcttcccaaac

SEQ ID NO: 270484 - DNA, 25 bp, probe
tgagcaggaacgtggctcccaagac

SEQ ID NO: 270485 - DNA, 25 bp, probe
tgaccgaagagctgttcctgcaaga

SEQ ID NO: 270486 - DNA, 25 bp, probe
tgacctgaacgcagtcatccggaag

SEQ ID NO: 270487 - DNA, 25 bp, probe
tgaccagattagagccattgaggag

SEQ ID NO: 270488 - DNA, 25 bp, probe
tgaccagattagagccattgaggag

SEQ ID NO: 270489 - DNA, 25 bp, probe
tgagccagttcagtacctggaggag

SEQ ID NO: 270490 - DNA, 25 bp, probe
tgagccagtctagttcctgatgacc

SEQ ID NO: 270491 - DNA, 25 bp, probe
tgagaagcttcggaagctgcagccc

SEQ ID NO: 270492 - DNA, 25 bp, probe
tgagcgagtatccacaagcacagac

SEQ ID NO: 270493 - DNA, 25 bp, probe
tgagcatcattgactacaccctgtc

SEQ ID NO: 270494 - DNA, 25 bp, probe
tgagcaattggaaacccttcatgaa

SEQ ID NO: 270495 - DNA, 25 bp, probe
tgagcaggtccaagacacttattca

SEQ ID NO: 270496 - DNA, 25 bp, probe
tgagcatggtacttggcctttggag

SEQ ID NO: 270497 - DNA, 25 bp, probe
tgaatgaaagcacacttcgggatga

SEQ ID NO: 270498 - DNA, 25 bp, probe
taacgaagcacttccgactggaaac

SEQ ID NO: 270499 - DNA, 25 bp, probe
tgacacaatggattaccgacagtga

SEQ ID NO: 270500 - DNA, 25 bp, probe
tgaaaatggttagtaccgggttcag

SEQ ID NO: 270501 - DNA, 25 bp, probe
tgaaaatggttagtaccgggttcag

SEQ ID NO: 270502 - DNA, 25 bp, probe
tgaaaatggttagtaccgggttcag

SEQ ID NO: 270503 - DNA, 25 bp, probe
tgaaaatggttagtaccgggttcag

SEQ ID NO: 270504 - DNA, 25 bp, probe
tgaagaaagtccagacctcggagaa

SEQ ID NO: 270505 - DNA, 25 bp, probe
tgagaaaagttcaatactcttgaaa

SEQ ID NO: 270506 - DNA, 25 bp, probe
tgagaaaccttccatccttattcag

SEQ ID NO: 270507 - DNA, 25 bp, probe
tgcaaaaccggcaacctgtaactgc

SEQ ID NO: 270508 - DNA, 25 bp, probe
tgcaaaaccggcaacctgtaactgc

SEQ ID NO: 270509 - DNA, 25 bp, probe
tgaataaaccaggcaccgaaaatgc

SEQ ID NO: 270510 - DNA, 25 bp, probe
tgaaaaaactggagtcagaagacca

SEQ ID NO: 270511 - DNA, 25 bp, probe
tgcaacgaacacagtttatgaaact

SEQ ID NO: 270512 - DNA, 25 bp, probe
tgagaaaggcatgtgttgtttaagc

SEQ ID NO: 270513 - DNA, 25 bp, probe
tgaagagagcgtgtttttaaaatac

SEQ ID NO: 270514 - DNA, 25 bp, probe
tgaaaggccccctgtctgaagaaac

SEQ ID NO: 270515 - DNA, 25 bp, probe
tgaaaggccccctgtctgaagaaac

SEQ ID NO: 270516 - DNA, 25 bp, probe
taaggtgtccttatgttggaaactc

SEQ ID NO: 270517 - DNA, 25 bp, probe
taagggtactatatgtgggtagtat

SEQ ID NO: 270518 - DNA, 25 bp, probe
taagggtgaaagtggtttagtgcta

SEQ ID NO: 270519 - DNA, 25 bp, probe
tgaaccgggaagtgggaggacgtag

SEQ ID NO: 270520 - DNA, 25 bp, probe
tgaacctgggggtgatggttccctt

SEQ ID NO: 270521 - DNA, 25 bp, probe
tgaaggtgggctgtttgcctttcgt

SEQ ID NO: 270522 - DNA, 25 bp, probe
tgaaggtgggctgtttgcctttcgt

SEQ ID NO: 270523 - DNA, 25 bp, probe
tgacacgaacgatctttgccattct

SEQ ID NO: 270524 - DNA, 25 bp, probe
tgaaacaaggatcttccgagtgctt

SEQ ID NO: 270525 - DNA, 25 bp, probe
tgagaacatggtcttggccggagca

SEQ ID NO: 270526 - DNA, 25 bp, probe
tgagcccatttctggggggagaaaa

SEQ ID NO: 270527 - DNA, 25 bp, probe
tgagcccatttctggggggagaaaa

SEQ ID NO: 270528 - DNA, 25 bp, probe
tgagcccactgtgtggcagggggat

SEQ ID NO: 270529 - DNA, 25 bp, probe
tgagcaccattggcctgggggatta

SEQ ID NO: 270530 - DNA, 25 bp, probe
tgacagccttgacctgaactgcgac

SEQ ID NO: 270531 - DNA, 25 bp, probe
tgactgactgattccttctctggaa

SEQ ID NO: 270532 - DNA, 25 bp, probe
tgactgactgattccttctctggaa

SEQ ID NO: 270533 - DNA, 25 bp, probe
tgactgactttgggttctgtgccca

SEQ ID NO: 270534 - DNA, 25 bp, probe
tgacgactttgactgtgatctggag

SEQ ID NO: 270535 - DNA, 25 bp, probe
tgacgactttgactgtgatctggag

SEQ ID NO: 270536 - DNA, 25 bp, probe
tgacgactttgactgtgatctggag

SEQ ID NO: 270537 - DNA, 25 bp, probe
tgaccgatgctttggtttgggtgat

SEQ ID NO: 270538 - DNA, 25 bp, probe
tgaccctgcgcaaggtggcgggtga

SEQ ID NO: 270539 - DNA, 25 bp, probe
tgaccactgggtgtggacggtgtgg

SEQ ID NO: 270540 - DNA, 25 bp, probe
tgccccgggtggtgagcgggcagga

SEQ ID NO: 270541 - DNA, 25 bp, probe
tgacggggggatgtagacggcagcg

SEQ ID NO: 270542 - DNA, 25 bp, probe
tgactggctgtgtgaccttaggccc

SEQ ID NO: 270543 - DNA, 25 bp, probe
tgagcaggcgtggatggcatcttat

SEQ ID NO: 270544 - DNA, 25 bp, probe
tgacacgagaggtgccctttgctga

SEQ ID NO: 270545 - DNA, 25 bp, probe
tgacacggcctttggcctttctgaa

SEQ ID NO: 270546 - DNA, 25 bp, probe
tgacaggggctatgggtttgctttg

SEQ ID NO: 270547 - DNA, 25 bp, probe
tgaccgtagccacggcagtgttttt

SEQ ID NO: 270548 - DNA, 25 bp, probe
tgagcaagtacagcggcgtcttctc

SEQ ID NO: 270549 - DNA, 25 bp, probe
tgagcaggtcccagagctgctgttc

SEQ ID NO: 270550 - DNA, 25 bp, probe
tgagcggaattccatgcagtgtctt

SEQ ID NO: 270551 - DNA, 25 bp, probe
tgactgtgttgtcccagggctgatg

SEQ ID NO: 270552 - DNA, 25 bp, probe
tgagaatgttgtccttgtggttcct

SEQ ID NO: 270553 - DNA, 25 bp, probe
tgagaatggaatcctctgtggatga

SEQ ID NO: 270554 - DNA, 25 bp, probe
tgagaatgtgttcttctggctgcaa

SEQ ID NO: 270555 - DNA, 25 bp, probe
tgagaatctatctgttctgtgctgg

SEQ ID NO: 270556 - DNA, 25 bp, probe
tgagcagcgtgtttggtgcgtgtgg

SEQ ID NO: 270557 - DNA, 25 bp, probe
tgagcagcgtgtttggtgcgtgtgg

SEQ ID NO: 270558 - DNA, 25 bp, probe
tgagcagcagcttggtgaagcggga

SEQ ID NO: 270559 - DNA, 25 bp, probe
tgagcactgcgaggtgaagctggtg

SEQ ID NO: 270560 - DNA, 25 bp, probe
tgagctgtgtgagggcaagccctac

SEQ ID NO: 270561 - DNA, 25 bp, probe
tgagctgtgtgagggcaagccctac

SEQ ID NO: 270562 - DNA, 25 bp, probe
tgagctatggagagcgaccctactg

SEQ ID NO: 270563 - DNA, 25 bp, probe
tgagctaagggggacacccttggcc

SEQ ID NO: 270564 - DNA, 25 bp, probe
tgagctttggggacaagccttatgg

SEQ ID NO: 270565 - DNA, 25 bp, probe
tgagctcctgggaatcaacttgtat

SEQ ID NO: 270566 - DNA, 25 bp, probe
tgagctcctggctcatccatatgtt

SEQ ID NO: 270567 - DNA, 25 bp, probe
tgagctcctggctcatccatatgtt

SEQ ID NO: 270568 - DNA, 25 bp, probe
tgagcctaggcatctctttggctga

SEQ ID NO: 270569 - DNA, 25 bp, probe
tgagcctaggcatctctttggctga

SEQ ID NO: 270570 - DNA, 25 bp, probe
tgagcagctgtggtaccatggggcc

SEQ ID NO: 270571 - DNA, 25 bp, probe
tgagcaggtagaagccagccagcca

SEQ ID NO: 270572 - DNA, 25 bp, probe
tgagcagtgaggtgctgcccagcag

SEQ ID NO: 270573 - DNA, 25 bp, probe
tgagcagtgagggccagtcttcaag

SEQ ID NO: 270574 - DNA, 25 bp, probe
tgacattagctctcactttcaagaa

SEQ ID NO: 270575 - DNA, 25 bp, probe
tgaaaggccccactttcaagtcacc

SEQ ID NO: 270576 - DNA, 25 bp, probe
tgactaccagcctgtcactcaagaa

SEQ ID NO: 270577 - DNA, 25 bp, probe
tgacgcatgcctctggtctaataaa

SEQ ID NO: 270578 - DNA, 25 bp, probe
tgacattgcccaaggttgaagcaat

SEQ ID NO: 270579 - DNA, 25 bp, probe
tgactacactcaaggatgtgaacct

SEQ ID NO: 270580 - DNA, 25 bp, probe
tgacctcctcagaatgttgacctct

SEQ ID NO: 270581 - DNA, 25 bp, probe
tgaccatggtcacattctcaacagc

SEQ ID NO: 270582 - DNA, 25 bp, probe
tgaccaagaccatatctcgactgca

SEQ ID NO: 270583 - DNA, 25 bp, probe
tgaccaagaccatatctcgactgca

SEQ ID NO: 270584 - DNA, 25 bp, probe
tgagcagcctgagctacttcaagct

SEQ ID NO: 270585 - DNA, 25 bp, probe
tgagcagtctcagctcaagctgccc

SEQ ID NO: 270586 - DNA, 25 bp, probe
tgactcagccgagtacagctgcctc

SEQ ID NO: 270587 - DNA, 25 bp, probe
tgagcaaggctgcctacatgcccat

SEQ ID NO: 270588 - DNA, 25 bp, probe
tgagcaaggctgcctacatgcccat

SEQ ID NO: 270589 - DNA, 25 bp, probe
tgagctgatcgctataactgccctt

SEQ ID NO: 270590 - DNA, 25 bp, probe
tgagctgcagaatgactccaccttc

SEQ ID NO: 270591 - DNA, 25 bp, probe
tgagcgaggacattctctgacctac

SEQ ID NO: 270592 - DNA, 25 bp, probe
tgacgaggatattgactgggtacag

SEQ ID NO: 270593 - DNA, 25 bp, probe
tgagcccagaattcactaggttcga

SEQ ID NO: 270594 - DNA, 25 bp, probe
tgagcacaagtacccttgattcagg

SEQ ID NO: 270595 - DNA, 25 bp, probe
tgacatacgtggcattcagtccctg

SEQ ID NO: 270596 - DNA, 25 bp, probe
tgacaacagtggtggcaactcctgg

SEQ ID NO: 270597 - DNA, 25 bp, probe
tgaataaaagattggactccctggt

SEQ ID NO: 270598 - DNA, 25 bp, probe
tgagcatttagactctcgactggcc

SEQ ID NO: 270599 - DNA, 25 bp, probe
tgactgtggagagtcccacgtccat

SEQ ID NO: 270600 - DNA, 25 bp, probe
tgagcctggacttccaccaggcacg

SEQ ID NO: 270601 - DNA, 25 bp, probe
tgagcctgctgagatcataccaggc

SEQ ID NO: 270602 - DNA, 25 bp, probe
tgagcctgcggtgcatggctcaggc

SEQ ID NO: 270603 - DNA, 25 bp, probe
tgacgctggttttgtgtacagtgaa

SEQ ID NO: 270604 - DNA, 25 bp, probe
tgacggtgtcgttcttgacggtcac

SEQ ID NO: 270605 - DNA, 25 bp, probe
tgacttgttctaattctaggttcac

SEQ ID NO: 270606 - DNA, 25 bp, probe
tgacatgtttaacttcctggcttct

SEQ ID NO: 270607 - DNA, 25 bp, probe
tgacattcttgaaggggttctgtgt

SEQ ID NO: 270608 - DNA, 25 bp, probe
tgacatttgtggtgggcgttctcat

SEQ ID NO: 270609 - DNA, 25 bp, probe
tgaataatgtacgggacttcctaaa

SEQ ID NO: 270610 - DNA, 25 bp, probe
tgaaaagctagtgtacctcctctca

SEQ ID NO: 270611 - DNA, 25 bp, probe
tgaagaactggaaccccagcttccc

SEQ ID NO: 270612 - DNA, 25 bp, probe
tgaagaactggaaccccagcttccc

SEQ ID NO: 270613 - DNA, 25 bp, probe
tgaccacctggaacctccagtgtac

SEQ ID NO: 270614 - DNA, 25 bp, probe
tgaagccctggggcttacgttctct

SEQ ID NO: 270615 - DNA, 25 bp, probe
tgacaccactcggcctgaagagttt

SEQ ID NO: 270616 - DNA, 25 bp, probe
tgacaccactcggcctgaagagttt

SEQ ID NO: 270617 - DNA, 25 bp, probe
tgaccccagcgagatcaaagttgta

SEQ ID NO: 270618 - DNA, 25 bp, probe
tgcaacccacagtaagaaactatgt

SEQ ID NO: 270619 - DNA, 25 bp, probe
tgacctcaacaaagaagaaccatct

SEQ ID NO: 270620 - DNA, 25 bp, probe
tgacctcaacaaagaagaaccatct

SEQ ID NO: 270621 - DNA, 25 bp, probe
tgacctttcagaatatgtgaaccag

SEQ ID NO: 270622 - DNA, 25 bp, probe
tgacctctgtcaccaatgtggacct

SEQ ID NO: 270623 - DNA, 25 bp, probe
tgaccttcatcatcaatggtgtgga

SEQ ID NO: 270624 - DNA, 25 bp, probe
tgactctgtcttgtgggtgtctgac

SEQ ID NO: 270625 - DNA, 25 bp, probe
tgactctgtcttgtgggtgtctgac

SEQ ID NO: 270626 - DNA, 25 bp, probe
tgaccagtcaatcagggagtcccgc

SEQ ID NO: 270627 - DNA, 25 bp, probe
tgaccccaatgctgcagagcagtca

SEQ ID NO: 270628 - DNA, 25 bp, probe
tgaccagctgactatcctcagcagc

SEQ ID NO: 270629 - DNA, 25 bp, probe
tgaccagtgcagtttctaagcatgt

SEQ ID NO: 270630 - DNA, 25 bp, probe
tgacctgtgcgattgctgtagcggt

SEQ ID NO: 270631 - DNA, 25 bp, probe
tgacgctctggttgagctcagtgga

SEQ ID NO: 270632 - DNA, 25 bp, probe
tgaccacattgttgatcatcatgat

SEQ ID NO: 270633 - DNA, 25 bp, probe
tgagccaagatcgtgtcactgcact

SEQ ID NO: 270634 - DNA, 25 bp, probe
tgagccgagatcatgccattgcatt

SEQ ID NO: 270635 - DNA, 25 bp, probe
tgagcaggatagaatcacttgaatt

SEQ ID NO: 270636 - DNA, 25 bp, probe
tgagcaccatagcaccattgtctcc

SEQ ID NO: 270637 - DNA, 25 bp, probe
tgagcaccatagcaccattgtctcc

SEQ ID NO: 270638 - DNA, 25 bp, probe
tgagctggcaggcagctattacccc

SEQ ID NO: 270639 - DNA, 25 bp, probe
tgactgaagatgcagctcactaccc

SEQ ID NO: 270640 - DNA, 25 bp, probe
tgactgatggacgagtgtccacctc

SEQ ID NO: 270641 - DNA, 25 bp, probe
tgacgtggtgaggatctacagccgc

SEQ ID NO: 270642 - DNA, 25 bp, probe
tgagccaggctgaggctaccagcac

SEQ ID NO: 270643 - DNA, 25 bp, probe
tgagctcggatgagcgccatggcca

SEQ ID NO: 270644 - DNA, 25 bp, probe
tgagctctgaacaaacactgaatca

SEQ ID NO: 270645 - DNA, 25 bp, probe
tgacttgagaccagttgaataaaag

SEQ ID NO: 270646 - DNA, 25 bp, probe
tgacttgagcccagagtgaacactc

SEQ ID NO: 270647 - DNA, 25 bp, probe
tgagcatgtggtcctggaaatccct

SEQ ID NO: 270648 - DNA, 25 bp, probe
tgagcgctatgcccaggagaacttc

SEQ ID NO: 270649 - DNA, 25 bp, probe
tgacggctgctcgaagaacaatgtc

SEQ ID NO: 270650 - DNA, 25 bp, probe
tgacgtagctgcaaaggacagatcc

SEQ ID NO: 270651 - DNA, 25 bp, probe
tgaccaatggctaagtgaagatgac

SEQ ID NO: 270652 - DNA, 25 bp, probe
tgaccaatggtcatgtggccaagat

SEQ ID NO: 270653 - DNA, 25 bp, probe
tgaccacaggacatgcaaccagaga

SEQ ID NO: 270654 - DNA, 25 bp, probe
tgacccaggcctggccagtcaaagt

SEQ ID NO: 270655 - DNA, 25 bp, probe
tgaccgaacctgacatcaacaacag

SEQ ID NO: 270656 - DNA, 25 bp, probe
tgaccagaagcttgacgcaccaagc

SEQ ID NO: 270657 - DNA, 25 bp, probe
tgaccagcaactggacggcaagcag

SEQ ID NO: 270658 - DNA, 25 bp, probe
tgagctcacaccggaggaggagcat

SEQ ID NO: 270659 - DNA, 25 bp, probe
tgaccaactgcggggagcatgacac

SEQ ID NO: 270660 - DNA, 25 bp, probe
tgacggaccgggtcgagaccagggc

SEQ ID NO: 270661 - DNA, 25 bp, probe
tgagcaggacacgggccagatgcac

SEQ ID NO: 270662 - DNA, 25 bp, probe
tgagcattactggctgaccgactct

SEQ ID NO: 270663 - DNA, 25 bp, probe
tgagctgctttggagactcggctgc

SEQ ID NO: 270664 - DNA, 25 bp, probe
tgagccttttgaactcagccatctc

SEQ ID NO: 270665 - DNA, 25 bp, probe
tgagcagtatttccacaaccacctg

SEQ ID NO: 270666 - DNA, 25 bp, probe
tgagcagtatttccacaaccacctg

SEQ ID NO: 270667 - DNA, 25 bp, probe
tgagcagtattttcattatcgctac

SEQ ID NO: 270668 - DNA, 25 bp, probe
tgagcattagatttctcatttgcca

SEQ ID NO: 270669 - DNA, 25 bp, probe
tgactctagtgtttcatcttcataa

SEQ ID NO: 270670 - DNA, 25 bp, probe
tgactattgtgatgactctttggag

SEQ ID NO: 270671 - DNA, 25 bp, probe
tgaccatggactggatgctttataa

SEQ ID NO: 270672 - DNA, 25 bp, probe
tacccaaatcgtcttatattaggga

SEQ ID NO: 270673 - DNA, 25 bp, probe
taccccaagaggcttccactgggga

SEQ ID NO: 270674 - DNA, 25 bp, probe
tcaaccccagggattcccaggaagc

SEQ ID NO: 270675 - DNA, 25 bp, probe
tgcaacctcaagagacttcccaggc

SEQ ID NO: 270676 - DNA, 25 bp, probe
tgcgccgccaagggaaacctgcggg

SEQ ID NO: 270677 - DNA, 25 bp, probe
tgcgccgccaagggaaacctgcggg

SEQ ID NO: 270678 - DNA, 25 bp, probe
tgcagccacctgtggaaacccaggg

SEQ ID NO: 270679 - DNA, 25 bp, probe
tgaccagttgttgataaccactaag

SEQ ID NO: 270680 - DNA, 25 bp, probe
tgaaactttcctaggaccttaagag

SEQ ID NO: 270681 - DNA, 25 bp, probe
tgaaaactccctattctcttaagcg

SEQ ID NO: 270682 - DNA, 25 bp, probe
tgaaacgactccgttttcttctcca

SEQ ID NO: 270683 - DNA, 25 bp, probe
tgaaacgactccgttttcttctcca

SEQ ID NO: 270684 - DNA, 25 bp, probe
taatcccagctagtgctttttcctt

SEQ ID NO: 270685 - DNA, 25 bp, probe
taatcccagctagtgctttttcctt

SEQ ID NO: 270686 - DNA, 25 bp, probe
tgaaaccgctagtcttatttccttt

SEQ ID NO: 270687 - DNA, 25 bp, probe
tgaaaccgctagtcttatttccttt

SEQ ID NO: 270688 - DNA, 25 bp, probe
tgagcataccccagctggtttttta

SEQ ID NO: 270689 - DNA, 25 bp, probe
tgagcatcatccagctttttttgtt

SEQ ID NO: 270690 - DNA, 25 bp, probe
tgaccaccggggatgtgattgccat

SEQ ID NO: 270691 - DNA, 25 bp, probe
tgaacccgggtgagtaccgcgtgac

SEQ ID NO: 270692 - DNA, 25 bp, probe
ttccccaactacatgtaccagcgga

SEQ ID NO: 270693 - DNA, 25 bp, probe
ttccccaactacatgtaccagcgga

SEQ ID NO: 270694 - DNA, 25 bp, probe
tgacagaagactcactccatagttc

SEQ ID NO: 270695 - DNA, 25 bp, probe
taagtaaccgaagaatgtatgcctc

SEQ ID NO: 270696 - DNA, 25 bp, probe
tgcaagtaagtcaaggttttatcct

SEQ ID NO: 270697 - DNA, 25 bp, probe
tgcaatggggccaggccgagtcacc

SEQ ID NO: 270698 - DNA, 25 bp, probe
tgacattctcacctttgccgagaac

SEQ ID NO: 270699 - DNA, 25 bp, probe
tgacatcatgattggctttgcgcga

SEQ ID NO: 270700 - DNA, 25 bp, probe
tgacctgtcaaggcttatgctaaca

SEQ ID NO: 270701 - DNA, 25 bp, probe
tgacctctacgctctgatgaagatc

SEQ ID NO: 270702 - DNA, 25 bp, probe
tgacctctacgctctgatgaagatc

SEQ ID NO: 270703 - DNA, 25 bp, probe
tgaccgctactggccagatgagggt

SEQ ID NO: 270704 - DNA, 25 bp, probe
tgaccgctactggccagatgagggt

SEQ ID NO: 270705 - DNA, 25 bp, probe
tgaccattactggccattcacggaa

SEQ ID NO: 270706 - DNA, 25 bp, probe
tgagcgcacgaccaaagtcactgga

SEQ ID NO: 270707 - DNA, 25 bp, probe
tgaccctgaggcttgttacattggc

SEQ ID NO: 270708 - DNA, 25 bp, probe
tgacctgtaggccatgttagcactg

SEQ ID NO: 270709 - DNA, 25 bp, probe
tgaccagtatgtcagttcagtcgga

SEQ ID NO: 270710 - DNA, 25 bp, probe
tgaccttattcgctgccatgttgtc

SEQ ID NO: 270711 - DNA, 25 bp, probe
tgaccttattcgctgccatgttgtc

SEQ ID NO: 270712 - DNA, 25 bp, probe
tgactttatttgcggagcatttctg

SEQ ID NO: 270713 - DNA, 25 bp, probe
tgactatttttcagaatctctcttc
